(19) United States
(12) Patent Application Publication
(10) Pub. No.: US 2010/0279302 A1
(43) Pub. Date: Nov. 4, 2010

(54) METHODS OF PREDICTING PAIRABILITY AND SECONDARY STRUCTURES OF RNA MOLECULES

(75) Inventors: Eran Segal, Rehovot (IL); Michael Kertesz, Rehovot (IL); Howard Y. Chang, Stanford, CA (US); John Rinn, Boston, MA (US); Adam Adler, Emerald Hills, CA (US); Yue Wan, Stanford, CA (US)

Correspondence Address: MARTIN D. MOYNIHAN d/b/a PRTSI, INC., P.O. BOX 16446, ARLINGTON, VA, 22215, US

(73) Assignees: Yeda Research And Development Co., Ltd., Rehovot (IL); The Board of Trustees of the Leland Stanford Junior University, Palo Alto, CA (US)

(21) Appl. No.: 12/773,977

(22) Filed: May 5, 2010

Related U.S. Application Data
(63) Continuation-in-part of application No. PCT/IL2010/000246, filed on Mar. 24, 2010.
(60) Provisional application No. 61/202,665, filed on Mar. 24, 2009.

(51) Int. Cl. C12Q 1/68; G01N 33/50

(52) U.S. Cl. 435/6; 436/94

(57) ABSTRACT

Provided are methods of predicting a pairability of nucleotides of a plurality of RNA polynucleotides by (a) simultaneously determining a paired state or an unpaired state of nucleotides of the plurality of RNA polynucleotides; and (b) corresponding the paired state or the unpaired state of the nucleotides to a database of nucleic acid sequences, the database comprises nucleic acid sequences representing the plurality of RNA polynucleotides, thereby determining the pairability of nucleotides of the plurality of RNA polynucleotides. Also provided are methods of determining a secondary structure of a plurality of RNA molecules; methods of determining if a molecule is capable of modulating a secondary structure of at least one RNA polynucleotide of a plurality of RNA polynucleotides; and methods of screening for a marker associated with a pathology.

### RELATED APPLICATION/S

[0001] This application is a continuation-in-part (CIP) of PCT Patent Application No. PCT/IL2010/000246 filed Mar. 24, 2010, which claims the benefit of priority under 35 USC 119(e) of U.S. Provisional Patent Application No. 61/202,665 filed Mar. 24, 2009. The contents of all of the above applications are incorporated by reference as if fully set forth herein.

### FIELD AND BACKGROUND OF THE INVENTION

[0002] The present invention, in some embodiments thereof, relates to methods of predicting pairability of nucleotides comprised in RNA polynucleotides and, more particularly, but not exclusively, to methods of determining secondary structures of RNA polynucleotides.

[0003] RNA structure is important for the function and regulation of RNA, it plays a key role in many biological processes, and largely determines the activity of several classes of non-coding genes (e.g., transfer RNAs and ribosomal RNAs). In addition, substantial regulation of genes that code for proteins occurs post-transcriptionally, in RNA transport, localization, translation, and degradation. This regulation often occurs through structural elements that affect recognition by specific RNA binding proteins. In addition to specific RNA structures, the accessibility of different regions of the RNA was recently shown to be important in several processes such as the ability of microRNAs to bind their targets, control of translation speed and control of translation initiation (Kertesz, M., et al., 2007; Ingolia, N. T., et al., 2009; Ameres, S. L., et al., 2007; Watts, J. M. et al. 2009). Thus, the identification of the structure and accessibility of RNAs is a key to understanding their activity and regulation.

[0004] Experimentally, advanced methods for measuring RNA structure such as X-ray crystallography, Nuclear magnetic resonance (NMR) and cryo-electron microscopy, provide detailed three-dimensional descriptions of the probed RNA. However, these methods can only probe a single RNA structure per experiment, and are limited in the length of the probed RNA. Indeed, only ˜750 structures from various organisms were collectively solved by these methods in the past three decades, the vast majority of which being relatively short RNAs (<50 nucleotides).

[0005] As they are easier to implement, chemical and enzymatic probing methods have become widely used for RNA secondary structure analysis [Brenowitz, M., et al., 2002; Alkemar, G. & Nygard, O. 2006; Romaniuk, P. J., et al., 1988]. For example, the analyzed RNA can be radiolabelled at one end and digested with an RNase that preferentially cuts double-stranded nucleotides. The length distribution of the resulting RNA fragments is then used to infer which nucleotides of the original RNA molecule were in a double-stranded conformation. Enzymatic probing, however, is also limited to the measurement of one RNA structure per experiment, and depending on whether the enzymatic activity is assayed using standard gel or capillary electrophoresis, only ˜100-600 nucleotides can be analyzed at a time [Deigan, K. E., 2009; Das, R. et al. 2008; US 2010/0035761]. Although there has been considerable success in probing RNA structures of increasing lengths [Watts, J. M. et al. 2009; Mitra, S., 2008; Wilkinson, K. A. et al. 2008] these methods require the extension of multiple sequence-specific primers (derived from the RNA-of-interest) for the analysis of each RNA molecule, and thus cannot be implemented on more than one RNA molecule at a time. Thus, to date, no genome-scale collection of RNA structures currently exists.

[0006] Given the experimental difficulties in measuring RNA structure, algorithms for predicting RNA structure from primary sequence have been developed and applied in many settings [Kertesz, M., 2007; Rabani, M., 2008; Zuker, M. 2003; Hofacker, I. L., 2002; Do, C. B., 2006; Mathews, D. H., 1999; Mathews, D. H. 2006]. Although prediction algorithms achieve accuracies of ˜40-70% [Dowell, R. D. & Eddy, S. R. 2004; Doshi, K. J., 2004], their predictive power is limited by the complexity of modeling important factors such as long-distance intramolecular connections or pseuodoknots. More importantly, since there is little experimental data regarding how environmental factors such as changes in pH, temperature, or interactions with metabolites and RNA binding proteins affect RNA structure, these effects cannot be predicted reliably with existing algorithms.

[0007] Additional background art include Hofacker L I., et al. Fast folding and comparison of RNA secondary structures. Monatshefte Fr. Chemie. 125:167-188, 1994; Do C B., Woods D A., et al. CONTRAfold: RNA seconday structure prediction without physics-based models. Bioinfomatics 22:90-98, 2006.

### SUMMARY OF THE INVENTION

[0008] According to an aspect of some embodiments of the present invention there is provided a method of predicting a pairability of nucleotides of a plurality of RNA polynucleotides, the method comprising: (a) simultaneously determining a paired state or an unpaired state of nucleotides of the plurality of RNA polynucleotides; and (b) corresponding the paired state or the unpaired state of the nucleotides to a database of nucleic acid sequences, the database comprises nucleic acid sequences representing the plurality of RNA polynucleotides, thereby determining the pairability of nucleotides of the plurality of RNA polynucleotides.

[0009] According to an aspect of some embodiments of the present invention there is provided a method of determining a secondary structure of a plurality of RNA polynucleotides, the method comprising: (a) predicting the pairability of nucleotides of the plurality of RNA polynucleotides according to the method of the invention; and (b) determining the secondary structure of the plurality of RNA polynucleotides based on the predicted pairability of the nucleotides, thereby determining the secondary structure of the plurality of the RNA polynucleotides.

[0010] According to an aspect of some embodiments of the present invention there is provided a method of determining if a molecule is capable of modulating a secondary structure of at least one RNA polynucleotide of a plurality of RNA polynucleotides, the method comprising: (a) contacting the plurality of RNA polynucleotides with the molecule; and (b) comparing a secondary structure of the plurality of RNA polynucleotides following the contacting to a secondary structure of the plurality of RNA polynucleotides prior to the contacting, wherein an alteration above a predetermined threshold in the secondary structure of an RNA polynucleotide following the contacting indicates that the molecule modulates the secondary structure of the RNA polynucleotide, thereby determining if the molecule is capable of modulating the secondary structure of the at least one RNA polynucleotide of the plurality of molecules.

[0011] According to an aspect of some embodiments of the present invention there is provided a method of determining if a molecule is capable of modulating a secondary structure of a plurality of RNA polynucleotides, the method comprising (a) contacting the plurality of RNA polynucleotides with the molecule; and (b) determining a secondary structure of the plurality of RNA polynucleotides according to the method of the invention following the contacting and comparing the secondary structure to a secondary structure of the same plurality of RNA polynucleotides prior to the contacting, wherein an alteration above a predetermined threshold of the secondary structure following the contacting indicates that the molecule modulates the secondary structure of the RNA polynucleotides, thereby determining if the molecule is capable of modulating the secondary structure of the plurality of RNA polynucleotides.

[0012] According to an aspect of some embodiments of the present invention there is provided a method of determining if a molecule is capable of modulating a secondary structure of at least one RNA polynucleotide of a plurality of RNA polynucleotides, the method comprising (a) contacting the plurality of RNA polynucleotides with the molecule; and (b) determining a secondary structure of the plurality of RNA polynucleotides according to the method of the invention following the contacting and comparing the secondary structure to a secondary structure of the same plurality of RNA polynucleotides prior to the contacting, wherein an alteration above a predetermined threshold of the secondary structure of at least one RNA polynucleotide of the plurality of the RNA molecules following the contacting indicates that the molecule modulates the secondary structure of the at least one RNA polynucleotide, thereby determining if the molecule is capable of modulating the secondary structure of the at least one RNA polynucleotide of a plurality of RNA polynucleotides.

[0013] According to an aspect of some embodiments of the present invention there is provided a method of screening for a marker associated with a pathology, the method comprising identifying at least one RNA polynucleotide having an altered secondary structure between cells associated with the pathology and cells devoid of the pathology, wherein an alteration above a predetermined threshold between the secondary structure of the at least one RNA polynucleotide in the cells associated with the pathology and the secondary structure of the at least one RNA polynucleotide in the cells devoid of the pathology indicates that the at least one RNA polynucleotide is associated with the pathology, thereby screening for a marker associated with the pathology.

[0014] According to an aspect of some embodiments of the invention, there is provided a method of predicting a pairability of nucleotides of a plurality of RNA polynucleotides, comprising: (a) digesting a sample comprising the RNA polynucleotide with an RNase selected from the group consisting of: (i) an RNase which specifically cleaves a phosphodiester bond of a paired RNA, and (ii) an RNase which specifically cleaves a phosphodiester bond of an unpaired RNA, to thereby obtain digested RNA polynucleotides, to thereby obtain digested RNA polynucleotides; (b) determining a nucleic acid sequence of the digested RNA polynucleotides, and (c) computing an occurrence of a nucleotide of each of the plurality of RNA polynucleotides within the nucleic acid sequence of the digested RNA polynucleotides, thereby predicting the pairability of the nucleotides of the plurality of the RNA polynucleotides.

[0015] According to an aspect of some embodiments of the invention, there is provided a method of predicting a pairability of a nucleotide of an RNA polynucleotide, comprising: (a) digesting a sample comprising the RNA polynucleotide with an RNase selected from the group consisting of: (i) an RNase which specifically cleaves a phosphodiester bond of a paired RNA, and (ii) an RNase which specifically cleaves a phosphodiester bond of an unpaired RNA, to thereby obtain digested RNA polynucleotides, to thereby obtain digested RNA polynucleotides; and (b) determining a nucleic acid sequence of the digested RNA polynucleotides using a sequencing apparatus selected from the group consisting of SOLEXA™ (Illumina), PYROSEQUENCING™ 454 (Roche Diagnostics Corporation) and SOLiD™ (Life Technologies), and Helicos (Helicos BioSciences Corporation); (c) computing an occurrence of a nucleotide of the RNA polynucleotide within the nucleic acid sequence of the digested RNA polynucleotides, thereby predicting the pairability of the nucleotide of the RNA polynucleotide.

[0016] According to some embodiments of the invention, determining the paired state or the unpaired state is effected using an RNA structure—dependent agent.

[0017] According to some embodiments of the invention, the RNA structure—dependent agent is an RNase selected from the group consisting of: (i) an RNase which specifically cleaves a phosphodiester bond of a paired RNA, and (ii) an RNase which specifically cleaves a phosphodiester bond of an unpaired RNA.

[0018] According to some embodiments of the invention, the RNase is an endonuclease.

[0019] According to some embodiments of the invention, the RNA structure—dependent agent is a chemical selected from the group consisting of: (i) a chemical which specifically binds to an unpaired RNA, and; (ii) a chemical which specifically binds to a paired RNA.

[0020] According to some embodiments of the invention, the RNA structure—dependent agent is a chemical selected from the group consisting of: (i) a chemical which specifically modifies an unpaired RNA, and; (ii) a chemical which specifically modifies to a paired RNA.

[0021] According to some embodiments of the invention, the RNA structure—dependent agent is a chemical which specifically binds to an unpaired RNA.

[0022] According to some embodiments of the invention, binding of the chemical to the RNA is effected covalently.

[0023] According to some embodiments of the invention, modification of the RNA by the chemical effected covalently.

[0024] According to some embodiments of the invention, the determining the paired state or the unpaired state of the nucleotides is effected by digesting the plurality of RNA polynucleotides with the RNase to thereby obtain digested RNA polynucleotides.

[0025] According to some embodiments of the invention, the method further comprising subjecting the digested RNA polynucleotide to reverse transcription to thereby obtain complementary DNA polynucleotides.

[0026] According to some embodiments of the invention, determining the paired state or the unpaired state of the nucleotides is effected by reverse transcription of the plurality of RNA polynucleotides following binding of the plurality of RNA polynucleotides with the chemical, to thereby obtain complementary DNA polynucleotides.

[0027] According to some embodiments of the invention, corresponding the paired state or the unpaired state of the nucleotides to the data base nucleic acid sequences is effected by comparing a nucleic acid sequence of the complementary DNA polynucleotides with the data base nucleic acid sequences.

[0028] According to some embodiments of the invention, the method further comprising computing an occurrence of a nucleotide of each of the plurality of RNA polynucleotides within the nucleic acid sequence of the complementary DNA polynucleotides.

[0029] According to some embodiments of the invention, the nucleic acid sequence of the complementary DNA polynucleotides is determined using a sequencing apparatus selected from the group consisting SOLEXA™ (Illumina), PYROSEQUENCING™ 454 (Roche Diagnostics Corporation), SOLiD™ (Life Technologies), and Helicos (Helicos BioSciences Corporation).

[0030] According to some embodiments of the invention, determination of the nucleic acid sequence of the complementary DNA polynucleotides is effected for each of the complementary DNA polynucleotides.

[0031] According to some embodiments of the invention, computing the occurrence is performed on a nucleotide corresponding to a first nucleotide and/or a last nucleotide of each of the complementary DNA polynucleotides.

[0032] According to some embodiments of the invention, a higher occurrence of the nucleotide within the complementary DNA polynucleotides obtained using the RNA structure—dependent agent which is specific to the paired RNA as compared to an expected occurrence of the nucleotide indicates that the nucleotide is in the paired state in the RNA polynucleotide prior to being treated with the RNA structure—dependent agent.

[0033] According to some embodiments of the invention, a higher occurrence of the nucleotide within the complementary DNA polynucleotides obtained using the RNA structure—dependent agent which is specific to the unpaired RNA as compared to an expected occurrence of the nucleotide indicates that the nucleotide is in the unpaired state in the RNA polynucleotide prior to being treated with the RNA structure—dependent agent.

[0034] According to some embodiments of the invention, a higher occurrence of the nucleotide within the complementary DNA polynucleotides obtained using the RNA structure—dependent agent which is specific to the paired RNA as compared to an occurrence of the nucleotide in the complementary DNA polynucleotides obtained using the RNA structure—dependent agent which is specific to the unpaired RNA indicates that the nucleotide is in the paired state in the RNA polynucleotide prior to being treaed with the RNA structure—dependent agent, and vice versa.

[0035] According to some embodiments of the invention, a higher occurrence of the nucleotide within the complementary DNA polynucleotides obtained using the RNA structure—dependent agent which is specific to the unpaired RNA as compared to an occurrence of the nucleotide in the complementary DNA polynucleotides obtained using the RNA structure—dependent agent which is specific to the paired RNA indicates that the nucleotide is in the unpaired state in the RNA polynucleotide prior to the being treated with the RNA structure—dependent agent, and vice versa.

[0036] According to some embodiments of the invention, the method further comprising removing proteins from the plurality of the RNA polynucleotides prior to the determining the paired state or the unpaired state of the nucleotides of the plurality of RNA polynucleotides.

[0037] According to some embodiments of the invention, the method further comprising denaturing the plurality of the RNA polynucleotides prior to the determining the paired state or the unpaired state of the nucleotides of the plurality of RNA polynucleotides.

[0038] According to some embodiments of the invention, the method further comprising subjecting the plurality of the RNA polynucleotides to conditions which allow folding of the RNA polynucleotides following the denaturing.

[0039] According to some embodiments of the invention, the RNase which specifically cleaves the phosphodiester bond of the paired RNA is selected from the group consisting of RNase V1 (EC 3.1.27.8) and RNase R.

[0040] According to some embodiments of the invention, the RNase which specifically which specifically cleaves the phosphodiester bond of the unpaired RNA is selected from the group consisting of RNase S1 (EC 3.1.30.1), RNase T1 (EC 3.1.27.3) and RNase A (EC 3.1.27.5).

[0041] According to some embodiments of the invention, the plurality of RNA polynucleotides are obtained from a cell of an organism.

[0042] According to some embodiments of the invention, the secondary structure of the plurality of RNA polynucleotides is determined according to the method of claim 2.

[0043] According to some embodiments of the invention, the pairability is determined for each of the nucleotides of at least two of the plurality of RNA polynucleotides.

[0044] Unless otherwise defined, all technical and/or scientific terms used herein have the same meaning as commonly understood by one of ordinary skill in the art to which the invention pertains. Although methods and materials similar or equivalent to those described herein can be used in the practice or testing of embodiments of the invention, exemplary methods and/or materials are described below. In case of conflict, the patent specification, including definitions, will control. In addition, the materials, methods, and examples are illustrative only and are not intended to be necessarily limiting.

[0045] Implementation of the method and/or system of embodiments of the invention can involve performing or completing selected tasks manually, automatically, or a combination thereof. Moreover, according to actual instrumentation and equipment of embodiments of the method and/or system of the invention, several selected tasks could be implemented by hardware, by software or by firmware or by a combination thereof using an operating system.

[0046] For example, hardware for performing selected tasks according to embodiments of the invention could be implemented as a chip or a circuit. As software, selected tasks according to embodiments of the invention could be implemented as a plurality of software instructions being executed by a computer using any suitable operating system. In an exemplary embodiment of the invention, one or more tasks according to exemplary embodiments of method and/or system as described herein are performed by a data processor, such as a computing platform for executing a plurality of instructions. Optionally, the data processor includes a volatile memory for storing instructions and/or data and/or a non-volatile storage, for example, a magnetic hard-disk and/or removable media, for storing instructions and/or data. Optionally, a network connection is provided as well. A display and/or a user input device such as a keyboard or mouse are optionally provided as well.

### BRIEF DESCRIPTION OF THE DRAWINGS

[0047] Some embodiments of the invention are herein described, by way of example only, with reference to the accompanying drawings. With specific reference now to the drawings in detail, it is stressed that the particulars shown are by way of example and for purposes of illustrative discussion of embodiments of the invention. In this regard, the description taken with the drawings makes apparent to those skilled in the art how embodiments of the invention may be practiced.

[0048] In the drawings:

[0049] FIGS. 1A-F depict a method of measuring structural properties of an RNA transcript by deep sequencing according to some embodiments of the invention. FIG. 1A—RNA molecule is cleaved by RNase V1 at two positions (red triangles, marked ‘1’ and ‘2’); FIG. 1B—The resulting fragments are size-fractionated; FIG. 1C—The RNA fragments are converted to DNA (by reverse transcriptase) and subjected to DNA sequencing; FIG. 1D—The sequenced fragments are aligned to the reference genome (from which the RNA is derived). Each aligned sequence provides structural evidence about two bases. In this example, the cytosine right before the fragment (marked by underlined “C” and ‘1’ in FIG. 1D) and the last uracil of the fragment (marked by underlined “U” and ‘2’ in FIG. 1D) are each likely to be paired in the original structure of the RNA molecule (before the RNA molecule was subjected to digestion with RNase). FIG. 1E—Per-base pairability is obtained by summing the evidence provided by multiple sequences. FIG. 1F—The secondary structure of the RNA molecule can be reconstructed from the pairability estimation.

[0050] FIGS. 2A-D depict a method of measuring structural properties of RNA by deep sequencing according to some embodiments of the invention. FIG. 2A—An mRNA molecule which includes a CAP at the 5′ end and a poly A at the 3′ end is subjected to in vitro folding. FIG. 2B—The RNA molecules are cleaved by RNase V1, which cuts 3′ of double-stranded RNA, leaving a 5′ phosphate at a base which immediately follows a base-paired nucleotide in the RNA nucleic acid sequence. One such cut is illustrated by a red arrow. Following random fragmentation, V1-generated fragments are specifically captured and subjected to deep sequencing. Each aligned sequence provides structural evidence about a single base. A large number of reads aligned to the same base indicates that the base is cleaved multiple times by RNase V1 and is thus more likely to be in double stranded conformation. The marked red square illustrates the evidence obtained from one mapped sequence (red), which in this case suggests that the cytosine was paired in the original RNA structure (since the 5′-phosphate fragmented RNA sequence mapped to the uracil which follows that cytosine). Additional evidence (gray boxes) is collected by mapping more sequences (gray horizontal bars). FIG. 2C—Same as in FIG. 2B, but when the RNA sample is treated with RNase S1, which cuts 3′ of single-stranded RNA. Collected reads in this case suggest that the base was unpaired in the original RNA structure. FIG. 2D—Using the binomial test to combine the data extracted from the two complementary experiments (FIG. 2B and FIG. 2C), a nucleotide-resolution score is obtained, representing the likelihood that the inspected base was in a double- or single-stranded conformation.

[0051] FIGS. 3A-D demonstrate that PARS correctly recapitulates results of RNA footprinting. FIG. 3A—The PARS signal obtained for bases 50-110 of the yeast gene CCW12 (YLR110C; SEQ ID NO:1) using the double-stranded cutter RNase V1 (red bars, top) or single-stranded cutter RNase S1 (green bars, bottom) accurately matches the signals obtained by traditional footprinting of that same transcript domain (black lines). The PARS signal is shown as the number of sequence reads which mapped to each nucleotide of the inspected domain; footprinting results are obtained by automated quantification of the RNase lanes shown in FIG. 3B. The red arrows indicate RNase V1 cleavages and the green arrows indicate RNase S1 cleavages as shown in the gel (FIG. 3B). FIG. 3B—8% acrylamide/7M urea gel analysis of RNase V1 (lanes 5, 6) and S1 (lanes 3, 4) probing of CCW12. Additionally, RNase T1 ladder (lanes 2, 8), alkaline hydrolysis (lanes 1, 9), and no RNase treatment (lane 7) are shown. The red arrows indicate RNase V1 cleavages and the green arrows indicate RNase S1 cleavages. FIG. 3C—The PARS signal obtained from bases 50-120 of the yeast gene RPL41A (YDL184C; SEQ ID NO:2) matches the signals obtained by traditional footprinting (FIG. 3D). Red bars (top)=the double-stranded cutter RNase V1; Green bars (bottom)=single-stranded cutter RNase S1. FIG. 3D—8% acrylamide/7M urea gel analysis of RNase V1 (lanes 5, 6) and S1 (lanes 7, 8) probing of RPL41A. RNase T1 ladder (lane 2), alkaline hydrolysis (lanes 1, 9), and no RNase treatment (lane 4) are shown. The red arrows indicate RNase V1 cleavages and the green arrows indicate RNase S1 cleavages.

[0052] FIGS. 4A-B demonstrate that PARS correctly recapitulates results of RNA footprinting. Raw number of reads obtained using RNase V1 (red bars) or RNase S1 (green bars) and the resulting PARS score (blue bars) along the inspected domains of ASH1 (SEQ ID NO: 3218; FIG. 4A) and URE2 (SEQ ID NO: 3219; FIG. 4B). Also shown are the known structures of the inspected domains. Nucleotides are color-coded according to their computed PARS score (double-stranded in green, single-stranded in red).

[0053] FIGS. 5A-D demonstrate that functional units of the transcript are demarcated by distinct properties of RNA structure. FIG. 5A—Significant correspondence between PARS and computational predictions of RNA structure. The Vienna package (Hofacker, I. L. et al., 2002) was used in order to fold the 3000 yeast mRNAs used in the analysis, and the predicted double-stranded probability of each nucleotide was extracted. Shown is the average predicted double-stranded probability of each nucleotide (y-axis), where nucleotides were sorted by their PARS score (x-axis). Higher PARS scores denote bases that are more likely to be double stranded. Average and standard deviation from 1000 shuffle experiments in which a random prediction score was assigned to each probed base are shown in gray. FIG. 5B—Discrete Fourier transform of average PARS score across the coding region (blue line), 3′ UTR (red line) and 5′ UTR (green line). The high amplitude for a cycle of n=3 bases can clearly be seen for the coding region, whereas the untranslated regions show no structural periodicity. FIG. 5C—a histogram showing the PARS score obtained for each of the three positions of every codon, averaged across all codons (blue bars). FIG. 5D—Shown is the PARS score across the 5′ untranslated region, the coding region (CDS), and the 3′ untranslated region, averaged across all transcripts used in the analysis as a function of position along the transcript. Transcripts were aligned by their translational start and stop sites for the left and right panel, respectively; start and stop codons are indicated by gray bars; horizontal bars denote the average PARS score per region (5′ UTR, coding sequence, 3′ UTR).

[0054] FIGS. 6A-D demonstrate that the structure around start codons correlates with low translational efficiency. FIG. 6A—Sliding window analysis of local PARS score and ribosome density as reported by Ingolia, N. T., et al., 2009. Shown is the significance (p-value) of the anti-correlation between average PARS score along a 40 bp-wide window and the reported ribosome density. FIG. 6B—k-means clustergram of PARS scores across the 80 by window surrounding the translation start site of all transcripts for which enough coverage was obtained. Red represents highly structured areas, green areas that are less structured. The average structural profile and number of member genes is shown to the right of each cluster. FIG. 6C—Cumulative distribution plot of ribosome occupancy for each cluster and the associated Kolmogorov-Smirnoff test p-value between the distribution of cluster 1 and 3. FIG. 6D—Tendency for less RNA structure in the first 30 bases of open reading frame (ORFs) encoding predicted secretory proteins. While structure typically builds up immediately upon entry to the coding sequence (CDS), genes predicted to code for secretory proteins retain low structure in the first ˜30 bases of the CDS, consistent with the dual function SSCR having structural features of UTR rather than CDS (Palazzo, A. F. et al. 2007). Shown are the average relative PARS scores (methods) across a 30 by sliding window for the 499 genes coding for secretory proteins (blue), the remaining 2501 genes (green) and the mean and standard deviation obtained from 1000 shuffle experiments in which sets of 499 genes were randomly selected (gray).

[0055] FIGS. 7A-D demonstrate that the enzyme concentration used in PARS cuts RNA with a single hit kinetics and occurs at regions resulting from intra-molecular interactions. FIG. 7A—Shown are traces indicating footprinting intensities of P³²-labeled in vitro transcribed YDL184C (SEQ ID NO:14) that were quantified using SAFA [Semi-automate footprinting analysis—more info at Hypertext Transfer Protocol://rnajournal (dot) cshlp (dot) org/content/11/3/344 (dot) full]. The footprint of YDR184C obtained with the RNase V1 concentration used in PARS matches very well with the footprint obtained with a 5 fold dilution of RNase V1 (Pearson's correlation coefficient=0.95). FIG. 7B—The footprint of YDR184C obtained with the RNase S1 concentration used in PARS matches well with the footprint obtained with a 5 fold dilution of RNase S1 (Pearson's correlation coefficient=0.75). FIG. 7C—P³²-labeled RNA is folded and cleaved either by itself or is folded and cleaved in a population of mRNAs. YDR184C folds into a similar structure when it is alone in solution or when it is in the presence of other RNAs (Pearson's correlation coefficient=0.97); FIG. 7D—P³² RNA mixed with 1 μs of yeast total RNA is either folded at 10 μl or 100 μl of a buffer containing 10 mM Tris pH 7, 10 mM MgCl₂, 100 mM KCl) before being cleaved by RNase V1. YDR184C folds into a similar conformation with or without 10× dilution, indicating that most of the folding is driven by intra-molecular interactions (Pearson's correlation coefficient=0.9).

[0056] FIGS. 8A-B demonstrate that the protocol according to some embodiments of the invention captures fragments generated from V1 cleavages and not random fragmentation products from alkaline hydolysis. FIG. 8A—A gel image which shows RNA libraries ran on 5% native polyacrylamide gel electrophoresis (PAGE) and stained using ethidium bromide. Fragments above 120 bases indicate yeast RNA fragments that were ligated to adaptors and cloned into a library. The RNAs are either treated (“V1”) or not treated (“Fragment”) before they are fragmented at 95° C. for 3.5 minutes and further ligated to 5′ and 3′ adaptors. Lanes 1, 2, 3 and 4 refer to the amount of library that is amplified with 15, 21, 26, and 31, cycles of PCR, respectively. Typically, the native PAGE is excised between 150 bases to 250 bases for high throughput sequencing. “MW” molecular weight marker in bases. FIG. 8B—Quantitative PCR (qPCR) quantification of the library after 18 cycles of PCR amplification and size selection between 150-250 bases using native PAGE. The “Y” axis represents arbitrary units).

[0057] FIGS. 9A-C demonstrate the sampling of cleaved RNA fragments in proportion to their abundance according to the protocol of some embodiments of the invention. FIG. 9A—Histogram showing for the number of transcripts as a function of load obtained by merging the readout of all seven replicates of the PARS experiment. Load is defined as the number of fragments that mapped to a given mRNA divided by the mRNA length. Applying a threshold of load>1, a structural information for 3196 transcripts (solid black line) is obtained. A threshold of load>1 was chosen as a means to ensure that the analyzed transcripts have sufficient coverage. By performing more sequencing runs, better coverage can be obtained, allowing PARS to obtain structural information for many more transcripts. For example, it is likely that structures of ˜1100 additional transcripts will be obtained by doubling the number of sequencing runs (dashed line). FIG. 9B—Comparison of mRNA abundance levels per transcript between three biological replicates of the samples treated by the double-stranded cutter RNase V 1. The abundance level of each transcript is computed as the total number of reads mapped to the transcript divided by the transcript length; The units on the “X”, “Y” and “Z” axes are loads. These results show that the method is not biased towards sampling specific transcripts. FIG. 9C—Same as FIG. 9B, but when comparing the abundance levels and those of the ribosomal profiling method of Ingolia, N. T., et al., 2009 and RNA-Seq method of Nagalakshmi, U. et al. 2008.

[0058] FIGS. 10A-D compare sequence-dependent bias using various protocols. FIG. 10A—Shown is the sequence specificity across all sequence reads that was uniquely mapped to the genome from the V1 libraries generated according to the present teachings. The specificity was derived from an alignment of the 20 nucleotides in the genome that surround the first mapped base of each sequence read and are shown as a standard position specific scoring matrix (PSSM), which displays the information content of the nucleotide distribution at each position of the alignment. FIG. 10B—Same as FIG. 10A, for the data obtained from S1 libraries generated according to the present teachings. FIGS. 10C-D—Same as FIG. 10A, for the RNA-Seq data obtained in the study of Nagalakshmi, U. et al. 2008 and the ribosomal profiling data obtained in Ingolia, N. T., 2009. The sequence composition at these bases did not show a strong sequence bias at the first base or around it, suggesting that RNase cleavage, adaptor ligation, and cDNA conversion do not introduce significant sequence biases.

[0059] FIG. 11 is a graph demonstrating that the protocol according to some embodiments of the invention has minimal bias towards particular regions of the transcript. Shown is the number of sequence reads along each nucleotide of the annotated coding region of each transcript, averaged across all transcripts. The number of sequence reads are shown after normalizing for the abundance of each transcript, by dividing the number of sequence reads at each nucleotide with the total number of reads for its embedding transcript. Since transcripts vary in length, the position of each normalized read is then projected onto a 0-1 range denoting the 5′ to 3′ end of the coding region of each transcript. Data is shown for the double-stranded (red) and single-stranded (green) cutters, and for the RNA-Seq data (blue) of Nagalakshmi, U. et al. 2008 and ribosomal profiling data (pink) of Ingolia, N. T., 2009.

[0060] FIGS. 12A-D demonstrate PARS's ability to solve long RNA structures. FIG. 12A-B—Single-stranded and double-stranded signal of PARS obtained using the RNase S1 (green bars, FIG. 12A) and RNase V1 (red bars, FIG. 12B) across the 2.2 kb HOTAIR (SEQ ID NO:5) Rinn, J. L. et al. 2007) transcript which was analyzed according to the method of some embodiments of the invention, and which structure was previously unknown. FIG. 12C-D—Detailed view of the PARS V1 signal from FIG. 12B across two domains from the full transcript. For each domain, shown is the signal obtained when subjecting this domain to traditional footprinting (black line). The correlations between PARS and traditional footprinting are indicated.

[0061] FIGS. 13A-E demonstrate that PARS correctly recapitulates results of RNA footprinting. FIG. 13A—RNase V1 cleaves the folded p4p6 domain (SEQ ID NO:7) of Tetrahymena ribozyme at four distinct sites, which are accurately captured by PARS. Shown is the double-stranded signal of PARS obtained using the double-stranded cutter RNase V1 (red bars), for the p4p6 domain of the Tetrahymena ribozyme, one of the control fragments added to the samples. The signal is shown as the number of sequence reads mapped along each nucleotide of the p4p6 domain. Also shown is the signal obtained on the p4p6 domain using traditional footprinting (black line) and automated quantification of the RNase V1 lane shown in FIG. 13B. FIG. 13B—The gel resulting from RNase V1 (Lanes 7, 8) enzymatic probing of the p4p6 domain. Alkaline hydrolysis (Lanes 1, 2), RNase T1 ladder (Lanes 3, 4) and no RNase treatment (Lane 6) are also shown; FIG. 13C—Single-stranded signal of PARS obtained using the single-stranded cutter RNase S1 (green bars), compared to the signal obtained using traditional footprinting (black line). Green arrows indicate cleavages that are seen in gel (FIG. 13D). FIG. 13D—The gel resulting from RNase V1 (Lane 2) and RNase S1 (Lane 3) enzymatic probing of the p4p6 domain. Alkaline hydrolysis (Lanes 6, 7), RNase T1 ladder (Lane 5) and no RNase treatment (Lane 4) are also shown. FIG. 13E—Known secondary structure of the p4p6 domain43. Arrows mark nucleotides that were identified by both PARS and enzymatic probing as double-stranded (red arrows) or single-stranded (green arrow).

[0062] FIGS. 14A-D demonstrate that PARS correctly recapitulates results of RNA footprinting for the p9-9.2 domain of the Tetrahymena ribozyme. FIG. 14A—RNase V1 cleaves the folded p9-9.2 domain of the Tetrahymena ribozyme at two distinct sites, which are accurately captured by PARS. The double-stranded signal of PARS obtained using the double-stranded cutter RNase V1 (red bars) is shown as the number of sequence reads mapped along each nucleotide of the p4p6 domain. Also shown is the signal obtained on the p4p6 domain using traditional footprinting (black line) and automated quantification of the RNase V1 lane shown in FIG. 14C. Red arrows indicate cleavages that are seen in gel (FIG. 14C). FIG. 14B—Single-stranded signal of PARS obtained using the single-stranded cutter RNase S1 (green bars), compared to the signal obtained using traditional footprinting (black line). Green arrows indicate cleavages that are seen in gel (FIG. 14C). FIG. 14C—The gel resulting from RNase V1 (Lane 9) and RNase S1 (Lanes 7, 8, 9 at pH 7 and Lanes 5, 6 at pH 4.5). Alkaline hydrolysis (Lanes 1, 2), RNase T1 ladder (Lane 3) and no RNase treatment (Lane 10) are also shown. FIG. 14D—Known secondary structure of the p9-9.2 domain (Cech, T. R., et al., 1994). Arrows mark nucleotides that were identified by both PARS and enzymatic probing as double-stranded (red arrows) or single-stranded (green arrows).

[0063] FIGS. 15A-C demonstrate that PARS correctly recapitulates known RNA structures. FIGS. 15A-B—Raw number of reads obtained using RNase V1 (red bars) or RNase S1 (green bars) and the resulting PARS score (blue bars) along the inspected domain of ASH1-E2 (FIG. 15A) and ASH1-E3 (FIG. 15B). FIG. 15C—Shown is the known structure of the inspected domains. Nucleotides are color-coded according to their computed PARS score (paired nucleotides are marked in red, unpaired nucleotides are marked in green).

[0064] FIG. 16 is a histogram depicting the effect of folding window size in computational predictions of RNA structure on correspondence to PARS. Shown is the z-score obtained by comparing the average prediction score for bases, which obtained a high PARS score (≧4.5) to random shuffle. Providing the folding algorithm information regarding more than 40 bases around the probed nucleotide does not improve its predictive power.

[0065] FIG. 17 is a schematic illustration demonstrating that distinct patterns of secondary structures in mRNA are associated with cytotopic localization and protein function. For each gene, the average PARS score was separately computed for the 5′ UTR (5′-untranslated region), CDS (coding sequence), and 3′ UTR (3′-untranslated region). For each of these three regions, the Wilcoxon rank sum test was used to compute a p-value for whether genes with similar Gene Ontology (GO) annotations have PARS scores that are higher or lower than expected. Multiple-hypothesis correction was done by FDR with a cutoff of 0.05. The Wilcoxon rank sum test results for each GO category are listed in Table 3. As can be seen, mRNAs encoding proteins with specific sub-cellular localizations (blue) or function in several metabolic pathways (yellow) tend to have excess secondary structure in the coding regions, while mRNAs encoding ribosomal proteins (dark red) tend to have less secondary structure than expected in their 5′UTR and CDS.

[0066] FIGS. 18A-B depicts PARS scores (FIG. 18B) and the predicted secondary structure (FIG. 18A) of the YAL038W RNA polynucleotide (SEQ ID NO:9).

[0067] FIGS. 19A-B depicts PARS scores (FIG. 19B) and the predicted secondary structure (FIG. 19A) of the YCR012W RNA polynucleotide (SEQ ID NO:10).

[0068] FIGS. 20A-B depicts PARS scores (FIG. 20B) and the predicted secondary structure (FIG. 20A) of the YCR031C RNA polynucleotide (SEQ ID NO:11).

[0069] FIGS. 21A-B depicts PARS scores (FIG. 21B) and the predicted secondary structure (FIG. 21A) of the YDL081C RNA polynucleotide (SEQ ID NO:12).

[0070] FIGS. 22A-B depicts PARS scores (FIG. 22B) and the predicted secondary structure (FIG. 22A) of the YDL133C-A RNA polynucleotide (SEQ ID NO:13).

[0071] FIGS. 23A-B depicts PARS scores (FIG. 23B) and the predicted secondary structure (FIG. 23A) of the YDL184C RNA polynucleotide (SEQ ID NO:14).

[0072] FIGS. 24A-B depicts PARS scores (FIG. 24B) and the predicted secondary structure (FIG. 24A) of the YDR050C RNA polynucleotide (SEQ ID NO:15).

[0073] FIGS. 25A-B depicts PARS scores (FIG. 25B) and the predicted secondary structure (FIG. 25A) of the YDR064W RNA polynucleotide (SEQ ID NO:16).

[0074] FIGS. 26A-B depicts PARS scores (FIG. 26B) and the predicted secondary structure (FIG. 26A) of the YDR155C RNA polynucleotide (SEQ ID NO:17).

[0075] FIGS. 27A-B depicts PARS scores (FIG. 27B) and the predicted secondary structure (FIG. 27A) of the YDR382W RNA polynucleotide (SEQ ID NO:18).

[0076] FIGS. 28A-B depicts PARS scores (FIG. 28B) and the predicted secondary structure (FIG. 28A) of the YDR524C-B RNA polynucleotide (SEQ ID NO:19).

[0077] FIGS. 29A-B depicts PARS scores (FIG. 29B) and the predicted secondary structure (FIG. 29A) of the YFR032C-A RNA polynucleotide (SEQ ID NO:20).

[0078] FIGS. 30A-B depicts PARS scores (FIG. 30B) and the predicted secondary structure (FIG. 30A) of the YGL030W RNA polynucleotide (SEQ ID NO:21).

[0079] FIGS. 31A-B depicts PARS scores (FIG. 31B) and the predicted secondary structure (FIG. 31A) of the YGL103W RNA polynucleotide (SEQ ID NO:22).

[0080] FIGS. 32A-B depicts PARS scores (FIG. 32B) and the predicted secondary structure (FIG. 32A) of the YGL123W RNA polynucleotide (SEQ ID NO:23).

[0081] FIGS. 33A-B depicts PARS scores (FIG. 33B) and the predicted secondary structure (FIG. 33A) of the YGL147C RNA polynucleotide (SEQ ID NO:24).

[0082] FIGS. 34A-B depicts PARS scores (FIG. 34B) and the predicted secondary structure (FIG. 34A) of the YGR192C RNA polynucleotide (SEQ ID NO:25).

[0083] FIGS. 35A-B depicts PARS scores (FIG. 35B) and the predicted secondary structure (FIG. 35A) of the YHL015W RNA polynucleotide (SEQ ID NO:26).

[0084] FIGS. 36A-B depicts PARS scores (FIG. 36B) and the predicted secondary structure (FIG. 36A) of the YHR021C RNA polynucleotide (SEQ ID NO:27).

[0085] FIGS. 37A-B depicts PARS scores (FIG. 37B) and the predicted secondary structure (FIG. 37A) of the YHR141C RNA polynucleotide (SEQ ID NO:28).

[0086] FIGS. 38A-B depicts PARS scores (FIG. 38B) and the predicted secondary structure (FIG. 38A) of the YHR174W RNA polynucleotide (SEQ ID NO:29).

[0087] FIGS. 39A-B depicts PARS scores (FIG. 39B) and the predicted secondary structure (FIG. 39A) of the YJL189W RNA polynucleotide (SEQ ID NO:30).

[0088] FIGS. 40A-B depicts PARS scores (FIG. 40B) and the predicted secondary structure (FIG. 40A) of the YJL190C RNA polynucleotide (SEQ ID NO:31).

[0089] FIGS. 41A-B depicts PARS scores (FIG. 41B) and the predicted secondary structure (FIG. 41A) of the YJR123W RNA polynucleotide (SEQ ID NO:32).

[0090] FIGS. 42A-B depicts PARS scores (FIG. 42B) and the predicted secondary structure (FIG. 42A) of the YDL081C RNA polynucleotide (SEQ ID NO:33).

[0091] FIGS. 43A-B depicts PARS scores (FIG. 43B) and the predicted secondary structure (FIG. 43A) of the YKL060C RNA polynucleotide (SEQ ID NO:34).

[0092] FIGS. 44A-B depicts PARS scores (FIG. 44B) and the predicted secondary structure (FIG. 44A) of the YKL152C RNA polynucleotide (SEQ ID NO:35).

[0093] FIGS. 45A-B depicts PARS scores (FIG. 45B) and the predicted secondary structure (FIG. 45A) of the YKR057W RNA polynucleotide (SEQ ID NO:36).

[0094] FIGS. 46A-B depicts PARS scores (FIG. 46B) and the predicted secondary structure (FIG. 46A) of the YLR043C RNA polynucleotide (SEQ ID NO:37).

[0095] FIGS. 47A-B depicts PARS scores (FIG. 47B) and the predicted secondary structure (FIG. 47A) of the YLR044C RNA polynucleotide (SEQ ID NO:38).

[0096] FIGS. 48A-B depicts PARS scores (FIG. 48B) and the predicted secondary structure (FIG. 48A) of the YLR061W RNA polynucleotide (SEQ ID NO:39).

[0097] FIGS. 49A-B depicts PARS scores (FIG. 49B) and the predicted secondary structure (FIG. 49A) of the YLR075W RNA polynucleotide (SEQ ID NO:40).

[0098] FIGS. 50A-B depicts PARS scores (FIG. 50B) and the predicted secondary structure (FIG. 50A) of the YLR110C RNA polynucleotide (SEQ ID NO:1).

[0099] FIGS. 51A-B depicts PARS scores (FIG. 51B) and the predicted secondary structure (FIG. 51A) of the YLR167W RNA polynucleotide (SEQ ID NO:41).

[0100] FIGS. 52A-B depicts PARS scores (FIG. 52B) and the predicted secondary structure (FIG. 52A) of the YLR249W RNA polynucleotide (SEQ ID NO:42).

### DESCRIPTION OF SPECIFIC EMBODIMENTS OF THE INVENTION

[0101] The present invention, in some embodiments thereof, relates to methods of predicting the pairability of ribonucleotides in a plurality of RNA polynucleotides, and, more particularly, but not exclusively, to methods of determining secondary and/or tertiary structures of RNA polynucleotides.

[0102] Before explaining at least one embodiment of the invention in detail, it is to be understood that the invention is not necessarily limited in its application to the details set forth in the following description or exemplified by the Examples. The invention is capable of other embodiments or of being practiced or carried out in various ways.

[0103] The present inventors have uncovered a novel method of predicting the pairability and secondary structure of multiple RNA polynucleotides simultaneously. Thus, as shown in the Examples section which follows, the novel strategy employs deep sequencing fragments of RNAs that were treated with structure-specific enzymes or chemicals, and mapping the resulting cleavage sites at a single nucleotide resolution, allowing to simultaneously profile thousands of RNAs of various lengths (FIGS. 1A-F, 2A-D and Examples 1 and 2). The novel method termed “Parallel Analysis of RNA Structure (PARS)” was applied to profile the secondary structure of the mRNAs of the budding yeast S. cerevisiae. The analysis revealed several RNA structural properties of yeast transcripts, including the existence of more secondary structure over coding regions compared to untranslated regions (FIG. 5D), a three-nucleotide periodicity of secondary structure across coding regions (FIGS. 5B and C), and a relationship between the efficiency with which an mRNA is translated and the lack of structure over its translation start site (FIGS. 6A-C). Thus, using the teachings described herein the present inventors were capable of determining the structural profiles of over 3000 distinct transcripts of the entire yeast transcriptome (Table 5, Example 2; and Supplementary Data). The novel method described herein is readily applicable to other organisms and to profiling RNA structure in diverse conditions, thus enabling studies of the dynamics of secondary structure at a genomic scale. The results presented herein demonstrate the feasibility of the novel method of the invention as a high-throughput method for probing the structure of multiple RNAs both in vitro and in vivo.

[0104] According to an aspect of some embodiments of the invention, there is provided a method of predicting a pairability of nucleotides of a plurality of RNA polynucleotides, the method comprising: (a) simultaneously determining a paired state or an unpaired state of nucleotides of the plurality of RNA polynucleotides; and (b) corresponding the paired state or the unpaired state of the nucleotides to a database of nucleic acid sequences, the database comprises nucleic acid sequences representing the plurality of RNA polynucleotides, thereby determining the pairability of nucleotides of the plurality of RNA polynucleotides.

[0105] As used herein the term “pairability” refers to the paired or the unpaired state of a nucleotide in a given RNA polynucleotide.

[0106] Base-pairing of nucleotides occur between nucleotide strands via hydrogen bonds. Within a DNA molecule, base-pairs are formed between adenine (A) and thymine (T); as well as between guanine (G) and cytosine (C). In RNA polynucleotides, base pairing is formed between uracil (U) (instead of thymine) and adenine; as well as between guanine and cytosine.

[0107] As used herein the phrase “predicting a pairability of a nucleotide of an RNA polynucleotide” refers to the likelihood that a specific nucleotide of an RNA polynucleotide is in a paired state, or in an unpaired state.

[0108] According to some embodiments of the invention, the pairability of a nucleotide-of-interest is determined with respect to other nucleotide(s) of the same RNA polynucleotide (intra molecule base pairs).

[0109] According to some embodiments of the invention, the pairability of a nucleotide-of-interest is determined with respect to nucleotide(s) of another RNA polynucleotide, e.g., inter molecules base pairs.

[0110] The RNA polynucleotide can be a synthetic, recombinant or naturally occurring RNA. For example, the RNA polynucleotide can be obtained from an in vitro transcription of a nucleic acid coding sequence. Additionally or alternatively, the RNA polynucleotide can be isolated from a cell (e.g., a prokaryotic or eukaryotic cell) or from a virus (e.g., viral RNA which infects human or animal cells).

[0111] According to some embodiments of the invention, the RNA is purified from a cytoplasm of a cell.

[0112] It should be noted that an RNA polynucleotide of a cell or a virus can be in a purified form or in an unpurified (e.g., crude) form.

[0113] As used herein the phrase “purified form” with respect to RNA refers to being substantially free of non-RNA molecules such as proteins, DNA, and the like.

[0114] The sample comprising the RNA polynucleotides can be purified to remove proteins or DNA therefrom. For example, purification of RNA can be performed using hot (65° C.) acid phenol followed by chloroform, which thereby separates the RNA from proteins and DNA. While phenol and chloroform denatures proteins, the low pH of acid phenol (e.g., pH about 4) causes the DNA to be in included in the phenol phase and hence the aqueous phase comprises mostly RNA.

[0115] According to some embodiments of the invention, the RNA polynucleotide is in a native form. As used herein the phrase “native form” refers to the secondary and/or a tertiary structure of the RNA in vivo (e.g., within a living cell, tissue or organism) where it may associate with other molecules (e.g., DNA, proteins).

[0116] It should be noted that those of skills in the art are capable of identifying conditions imitating those present in vivo so as to enable an RNA polynucleotide to acquire in vitro the native form.

[0117] According to some embodiments of the invention, the sample comprising the RNA polynucleotide can be any in vitro or in vivo sample.

[0118] According to some embodiments of the invention, each of the RNA polynucleotides can be of any length such as from a few nucleotides to tens of nucleotides [e.g., from about 10-200 nucleotides, e.g., from about 50 nucleotides to about 200 nucleotides]; hundreds of nucleotides [e.g., from about 100 nucleotides to about 1000 nucleotides] or thousands of nucleotides [e.g., from about 1000 nucleotides to about 50,000 nucleotides or more).

[0119] According to some embodiments of the invention, each of the RNA polynucleotides comprises more than about 500 nucleotides, e.g., more than about 550 nucleotides, e.g., more than about 600 nucleotides, e.g., more than about 650 nucleotides, e.g., more than about 700 nucleotides, e.g., more than about 750 nucleotides, e.g., more than about 800 nucleotides, e.g., more than about 850 nucleotides, e.g., more than about 900 nucleotides, e.g., more than about 950 nucleotides, e.g. more than about 1000 nucleotides, e.g., more than about 1050 nucleotides, e.g. more than about 1100 nucleotides, e.g., more than about 1150 nucleotides, e.g. more than about 1200 nucleotides, e.g., more than about 1250 nucleotides, e.g. more than about 1300 nucleotides, e.g., more than about 1400 nucleotides, e.g. more than about 1450 nucleotides, e.g., more than about 1500 nucleotides, e.g. more than about 1550 nucleotides, e.g., more than about 1600 nucleotides, e.g. more than about 1650 nucleotides, e.g., more than about 1700 nucleotides, e.g. more than about 1750 nucleotides, e.g., more than about 1800 nucleotides, e.g. more than about 1900 nucleotides, e.g., more than about 2000 nucleotides, e.g. more than about 2500 nucleotides, e.g., more than about 3000 nucleotides, e.g. more than about 3500 nucleotides, e.g., more than about 4000 nucleotides, e.g. more than about 4500 nucleotides, e.g., more than about 5000 nucleotides, e.g. more than about 5500 nucleotides, e.g., more than about 6000 nucleotides, e.g., more than about 6500 nucleotides, e.g., more than about 7000 nucleotides, e.g., more than about 7500 nucleotides, e.g., more than about 8000 nucleotides, e.g., more than about 9000 nucleotides, e.g., more than about 10000 nucleotides, e.g., more than about 11000 nucleotides, e.g., more than about 12000 nucleotides, e.g., more than about 13000 nucleotides, e.g., more than about 14000 nucleotides, e.g., more than about 15000 nucleotides, e.g., between about 15000 to about 50000 nucleotides, or more.

[0120] A non-limiting example of a long RNA polynucleotide which secondary structure can be determined by the method of some embodiments of the invention is the homo sapiens HECT, UBA and WWE domain containing 1 (HUWE1)(GenBank Accession No. NM_{—}031407) which consists of 14734 nucleotides (including untranslated region) of which 13125 nucleotides of coding region.

[0121] According to some embodiments of the invention, the RNA polynucleotide is an in vitro transcribed RNA (e.g., from a nucleic acid construct which comprises a coding sequence encoding the RNA transcript and a promoter for directing transcription of the RNA). In vitro transcription of RNA is well known in the art.

[0122] As described, the method predicts the pairability of nucleotides in a plurality of RNA polynucleotides.

[0123] As used herein the phrase “plurality of RNA polynucleotides” refers to two or more distinct RNA molecules. It should be noted that two RNA polynucleotides are considered distinct from each other if their nucleic acid sequence is different in at least one nucleotide.

[0124] According to some embodiments of the invention each of the plurality of RNA molecules comprises a distinct coding sequence. It should be noted that two coding sequences are considered distinct from each other if their nucleic acid sequence is different in at least one nucleotide.

[0125] As described, determining the paired state or the unpaired state of nucleotides of the plurality of RNA polynucleotides is performed simultaneously.

[0126] According to some embodiments of the invention, the pairability of the nucleotides is performed simultaneously for all the RNA polynucleotides of the plurality of RNA polynucleotides.

[0127] As used herein the term “simultaneously” refers to performed in a single reaction mixture (e.g., a single tube), without needing to repeat the reaction for each RNA of the plurality of RNA polynucleotides, and/or for each portion of a single long RNA polynucleotide.

[0128] According to some embodiments of the invention, each of the plurality of the RNA polynucleotides is encoded by a different coding sequence, e.g., alternative splicing variants, RNA transcripts of different genes, RNA transcripts of different species.

[0129] According to some embodiments of the invention, the sample comprising the plurality of RNA polynucleotides is obtained from a cell of an organism.

[0130] According to some embodiments of the invention, the plurality of RNA polynucleotides are obtained from a biological sample which comprises cells or components thereof (e.g., cell exertion) such as body fluids, e.g., as whole blood, serum, plasma, cerebrospinal fluid, urine, lymph fluids, and various external secretions of the respiratory, intestinal and genitourinary tracts, tears, saliva, milk as well as white blood cells, tissue biopsy, malignant tissues, amniotic fluid and chorionic villi.

[0131] According to some embodiments of the invention, the pairability is determined for each of the nucleotides of at least two of the plurality of RNA polynucleotides.

[0132] According to some embodiments of the invention, determining the paired state or the unpaired state of nucleotides of the plurality of RNA polynucleotides is performed simultaneously for at least two RNA polynucleotides, e.g., for at least 3 RNA polynucleotides, e.g., for at least 4 RNA polynucleotides, e.g., for at least 5 RNA polynucleotides, e.g., for at least 6 RNA polynucleotides, e.g., for at least 7 RNA polynucleotides, e.g., for at least 8 RNA polynucleotides, e.g., for at least 9 RNA polynucleotides, e.g., for at least about 10, at least about 20, at least about 50, at least about 100, at least about 200, at least about 300, at least about 400, at least about 500, at least about 1000, at least about 2000, at least about 3000, at least about 5000, at least about 10,000, at least about 20,000, at least about 30,000, at least about 40,000, at least about 50,000, at least about 100,000, at least about 200,000 RNA polynucleotides, and more, e.g., of a whole transcriptom of a cell of an organism (e.g., human, animal, plant, bacteria, yeast).

[0133] According to some embodiments of the invention, determining the paired state or the unpaired state is effected using an RNA structure—dependent agent.

[0134] As used herein the phrase “RNA structure—dependent agent” refers to an agent which activity on an RNA molecule (e.g., cleavage or modification) or which binding to an RNA molecule is dependent on the secondary structure of the RNA, e.g., the pairability of the RNA nucleotides comprising the polynucleotide.

[0135] According to some embodiments of the invention, the RNA structure—dependent agent is an RNase selected from the group consisting of: (i) an RNase which specifically cleaves a phosphodiester bond of a paired RNA, and (ii) an RNase which specifically cleaves a phosphodiester bond of an unpaired RNA.

[0136] According to some embodiments of the invention the RNase cleaves a phosphodiester bond 3′ of a paired nucleotide.

[0137] According to some embodiments of the invention the RNase cleaves a phosphodiester bond 3′ of an unpaired nucleotide.

[0138] Following is a non-limiting list of RNases which cut single stranded RNA and which can be used along with the method of some embodiments of the invention: RNAse I [cleaves 3′-end of all 4 residues (A, G, C, U) with no base preference (Hypertext Transfer Protocol://World Wide Web (dot) epibio (dot) com/item (dot) asp?ID=347; e.g., Cat. No. N6901K, Epicentre® Biotechnologies, Madison, Wis.; Ambion® Cat. No. AM2294, AM2295 Hypertext Transfer Protocol://World Wide Web (dot) ambion (dot) com/index (dot) html)]; RNAse A REC3.1.27.5, cleaves 3′-end of unpaired C and U residues, leaving a 3′-phosphorylated product; e.g., Ambion® Cat. Nos. AM2270, AM2271, AM2272, AM2274]; RNase T1 [EC 3.1.27.3, it is sequence specific for single stranded RNAs, it cleaves 3′-end of unpaired G residues; e.g., Ambion® Cat. No. AM2280, AM2283]; RNase T2 (is sequence specific for single stranded RNAs; it cleaves 3′-end of all 4 residues, but preferentially 3′-end of “A”); RNase U2 (is sequence specific for single stranded RNAs; it cleaves 3′-end of unpaired A residues); RNase PhyM (is sequence specific for single stranded RNAs; it cleaves 3′-end of unpaired A and U residues).

[0139] According to some embodiments of the invention the RNase leaves a 3′-OH and a 5′-phosphate after cleavage of the phosphodiester bond.

[0140] In specific embodiments, e.g., when using RNAse A, the RNase leaves a 3′-phosphate and a 5′-OH after cleavage of the phosphodiester bond. In such case, prior to ligation the digested RNA molecules are first phosphorylated in order to obtain a 5′-phosphate at the 5′-end of each of the digested RNA molecules.

[0141] According to some embodiments of the invention, the RNase is an endonuclease. According to some embodiments of the invention, the RNase is devoid of an exonuclease activity. According to some embodiments of the invention, the Nase has no processivity. According to some embodiments of the invention, RNase cuts only one phosphodiester bond once it recognizes the specific structure of RNA (i.e., a paired or an unpaired).

[0142] According to some embodiments of the invention the RNase which specifically cuts single stranded RNA (cleaves a phosphodiester bond of an unpaired RNA) is RNase S1 (EC 3.1.30.1), RNase T1 (EC 3.1.27.3) and/or RNase A (EC 3.1.27.5).

[0143] Following is a non-limiting list of RNases which cut double stranded RNA and which can be used along with the method of some embodiments of the invention: RNase V1 (is non-sequence specific for double stranded RNAs, it cleaves base-paired nucleotide residues, e.g., Ambion® Cat. No. AM2275) and RNase R (which is able to degrade RNA with secondary structures without help of accessory factors).

[0144] According to some embodiments of the invention the RNase causes nicks in the double stranded RNA (cleavage of only one phosphodiester bond between paired nucleotides).

[0145] According to some embodiments of the invention the RNase which specifically cuts double stranded RNA (cleaves a phosphodiester bond of a paired RNA) is RNase V1 (EC 3.1.27.8).

[0146] The RNases can be obtained from various commercial suppliers such as Applied Biosystems and Ambion®. Additionally or alternatively, the RNases can be recombinantly synthesized by transforming a host cell with a nucleic acid construct which comprises the coding region of RNase under the control of a promoter (e.g., a constitutive promoter).

[0147] According to some embodiments of the invention, the RNA structure—dependent agent is a chemical selected from the group consisting of: (i) a chemical which specifically binds to or modifies an unpaired RNA, and; (ii) a chemical which specifically binds to or modifies a paired RNA.

[0148] As used herein the term “modifies” refers to covalent modification of a nucleotide. Examples include, but are not limited to, acetylation, phosphorylation, methylation and the like.

[0149] According to some embodiments of the invention, the RNA structure—dependent chemical directly modifies the nucleotide.

[0150] According to some embodiments of the invention, the RNA structure—dependent chemical accelerates the covalent modification of a nucleotide. For example, 1M7 is a chemical which accelerates the addition of an acetyl group to a flexible base in an RNA polynucleotide because these bases (the flexible bases) undergo the reaction better. The more flexible bases tend to be single stranded regions.

[0151] According to some embodiments of the invention, the specific binding of the chemical to the unpaired RNA or the modification of the unpaired RNA by the chemical is at least one order of magnitude higher than to a paired RNA, e.g., at least two orders of magnitude higher, e.g., at least three orders of magnitude higher, e.g., at least four orders of magnitude higher, e.g., at least five orders of magnitude higher, e.g., at least six orders of magnitude higher than to a paired RNA, or more.

[0152] According to some embodiments of the invention, the binding of the chemical to the RNA is effected covalently. For example, the chemical can modify the RNA molecule by covalently attaching to the RNA.

[0153] Non-limiting examples of a chemical which specifically binds to or modifies an unpaired RNA include 1-cyclohexyl-3(2-morpholinoethyl)carbodiimide metho-p-toluenesulfate (CMCT), dimethyl sulfate (DMS), and 1-methyl-7-niro-isatoic anhydride (1M7; Mortimer S A, 2007, J. Am. Chem. Soc. 129: 4144-4145).

[0154] It should be noted that the conditions under which the RNA structure—dependent agent binds to/modifies (in the case of a structure—dependent chemical) or digests (in the case of a structure—dependent RNase) the plurality of RNA polynucleotides are selected such that following such binding (or modification) or digestion the plurality of RNA polynucleotides are sufficiently represented for each of the sensitive regions in the RNA, namely, there is at least one polynucleotide which is specifically cut (by RNase), bound to the chemical or modified by the chemical in each of the sensitive regions in the RNA, i.e., the paired or unpaired nucleotides.

[0155] These conditions include the concentration of active agent (i.e., the RNase or the structure—dependent chemical), reaction temperature, reaction time, salt concentration and type, ions concentration and type, and other reagents as described in the Examples section which follows.

[0156] According to some embodiments of the invention, the conditions enable obtaining complementary DNA polynucleotides with an average length of about 50-500 nucleotides.

[0157] According to some embodiments of the invention the RNA structure—dependent agent cleaves (with respect to RNase) or binds/modifies (with respect to the chemical) at least once each RNA polynucleotide.

[0158] According to some embodiments of the invention the RNA structure—dependent agent cleaves (with respect to RNase) or binds/modifies (with respect to the chemical) at a single phosphodiester bond of each RNA polynucleotide.

[0159] According to some embodiments of the invention determining the paired state or the unpaired state of the nucleotides is performed by digesting the plurality of RNA polynucleotides with the RNase to thereby obtain digested RNA polynucleotides.

[0160] According to some embodiments of the invention, prior to subjecting the sample to treatment with the RNA structure-dependent agent, the proteins and/or other cellular components such as DNA, polysaccharides, membranes are removed from the sample.

[0161] According to some embodiments of the invention, the method further comprising denaturing the plurality of the RNA polynucleotides prior to determining the paired state or the unpaired state of the nucleotides of the plurality of RNA polynucleotides.

[0162] According to some embodiments of the invention, the method further comprising subjecting the plurality of the RNA polynucleotides to conditions which allow the folding of the RNA polynucleotides following the denaturing [e.g., heat to 90° C., cool on ice, and slowly bring to room temperature (10 mM Tris pH 7, 10 mM MgCl₂, 100 mM KCl)].

[0163] According to some embodiments of the invention, prior to being subjected to sequencing (determination of the nucleic acid sequence) the digested RNA polynucleotides are converted to DNA molecules. Such a conversion can be using an enzyme such as reverse transcriptase (e.g., EC 2.7.7.49).

[0164] Prior to reverse transcription, the digested RNA polynucleotides are ligated to universal adapters [(i.e., adapters (primers) which are not specific to a certain sequence of the RNA polynucleotide of interest, but rather are the same for all the plurality of RNA polynucleotides].

[0165] According to some embodiments of the invention, the adaptors preferentially ligate to 5′-phosphate.

[0166] Ligation can be done using any RNA ligase. Examples include T4 RNA ligase-2 and RNA ligase-1.

[0167] According to some embodiments of the invention, the ligation is performed with RNA ligase-2 which ligates only 5′-phosphate to 3′-OH of RNA.

[0168] According to some embodiments of the invention, the method does not involve design of sequence specific primers for each RNA polynucleotide-of-interest.

[0169] According to some embodiments of the invention, the method does not involve extension of sequence specific primers which are derived from the RNA polynucleotide-of-interest but rather use of sequencing primers which attach to the universal adapters.

[0170] According to some embodiments of the invention, the reverse transcription of the digested RNA polynucleotides is performed on 5′-phosphate-containing digested RNA molecules.

[0171] Additionally or alternatively, when the RNA is treated with chemical(s) which specifically bind to or modifies a single stranded or a double stranded RNA, determining the paired state or the unpaired state of the nucleotides can be performed by reverse transcription of the plurality of RNA polynucleotides following binding/modification by the chemical, to thereby obtain complementary DNA polynucleotides.

[0172] Once obtained, the complementary DNA polynucleotides are subjected to determination of nucleic acid sequence.

[0173] Various sequencing technologies which are known in the art can be used along with the method of the invention. For example, SOLEXA™ (Illumina), PYROSEQUENCING™ 454 (Roche Diagnostics Corporation) and SOLiD™ (Life Technologies), and Helicos (Helicos BioSciences Corporation).

[0174] Universal primers (adapters) for ligation and reverse transcription are usually provided along with the kits for deep sequencing. For example, when using the SOLID™ sequencing, the following SOLiD 2.0 Oligos can be used: The P1 adapter (SEQ ID NOs:44 and 45, which form a double strand DNA with an overhang), the P2 Adapter (SEQ ID NOs:46 and 47, which form a double strand DNA with an overhang) and the library PCR Primers 1 (SEQ ID NO:48) and 2 (SEQ ID NO:49). When the SOLEXA™ sequencing is used the following oligos can be used: 5′ RNA adapter (SEQ ID NO:50), 3′ RNA adapter (SEQ ID NO:51), RT primer (SEQ ID NO:52), small RNA PCR primers 1 (SEQ ID NO:53) and 2 (SEQ ID NO:54).

[0175] According to some embodiments of the invention, determination of the nucleic acid sequence is performed on each of the digested RNA polynucleotides.

[0176] According to some embodiments of the invention, sequence determination is performed simultaneously on a plurality of digested RNA polynucleotides.

[0177] For example, as shown in Example 2 (FIGS. 8A-B) of the Examples section which follows, the digested RNA polynucleotides which comprise the 5′-phosphate (as opposed to randomly fragmented RNA polynucleotides which comprise 5′-OH) are ligated to adaptors so as to conjugate the adaptor which is used for reverse transcription and subsequently for sequence determination (sequencing).

[0178] According to some embodiments of the invention, corresponding the paired state or the unpaired state of the nucleotides to the data base nucleic acid sequences is performed by comparing a nucleic acid sequence of the complementary DNA polynucleotides with the database comprises nucleic acid sequences representing the plurality of RNA polynucleotides.

[0179] The nucleic acid sequences which represent the plurality of RNA polynucleotides and which are comprised in the database can be DNA, RNA, complementary DNA (cDNA), complementary RNA (cRNA), sense RNA, antisense RNA, genomic DNA, a transcriptome derived from a genome (bioinformatically deduced transcriptome), a transcriptome derived from transcripts extracted from a cell [e.g., from a pathological cell or a healthy cell (devoid of the pathology); from a cell before treatment with a drug/agent or a cell after treatment with the drug/agent; from a cell in an undifferentiated state or a differentiated cell; from cells at various differentiation stages; from an embryonic cell or a mature cell; from a stem cell or a differentiated cell and the like], and/or any combination thereof. The database can be experimentally determined (e.g., by sequencing of nucleic acid sequences obtained from a cell or using recombinant tools in vitro), can be obtained using bioinformatics tools or by a combination of both. For example, the database can include a sequence which is obtained by sequencing of cDNA encoding the RNA. For example, the database can be a transcriptome of a whole genome obtained by bioinformatics tools; the database can be a transcriptome obtained by sequencing of a whole genome RNA; the transcriptome can be of a specific cell, cell line, tissue and the like. Additionally or alternatively, database can be obtained from various bioinformatics tools available online such as through the National Center for Biotechnology Information or other well know databases.

[0180] Sequence comparison methods (also referred to as sequence alignment) can be performed computationally using various DNA analysis bioinformatics tools, which are freely available through the web (see e.g., the Hypertext Transfer Protocol://blast (dot) ncbi (dot) nlm (dot) nih (dot) gov/). Non-limiting examples of sequence comparisons methods include BLAST, ALIGN, Bioconductor Biostrings::pairwise Alignment, BioPerl dpAlign (Hypertext Transfer Protocol://World Wide Web (dot) bioperl (dot) org/wiki/Main_Page), BLASTZ, LASTZ, DOTLET, JAligner, LALIGN, malign, matcher, MCALIGN2, MUMmer, needle, HMMER, Ngila, PatternHunter, ProbA (also propA), REPuter, SEQALN, SIM, GAP, NAP, LAP, SIM, SLIM Search, Sequences Studio, SWIFT suit, stretcher, tranalign, water and wordmatch [for additional info see Hypertext Transfer Protocol://en (dot) wikipedia (dot) org/wiki/Sequence_alignment_software]. It should be noted that many sequence alignments can be also performed automatically.

[0181] According to some embodiments of the invention the method of some embodiments of the invention further comprising computing an occurrence of a nucleotide of each of the plurality of RNA polynucleotides within the nucleic acid sequence of the complementary DNA polynucleotides.

[0182] As used herein the phrase “occurrence of a nucleotide . . . within the nucleic acid sequence of the complementary DNA polynucleotides” refers to the frequency (e.g., in absolute numbers or in percentages) in which a certain nucleotide of an RNA polynucleotide (prior to being treated with the RNA structure—dependent agent) appears in the complementary DNA polynucleotides.

[0183] According to some embodiments of the invention the occurrence is computed for each nucleotide of the complementary DNA polynucleotide(s).

[0184] According to some embodiments of the invention the occurrence is computed for each nucleotide of each of the complementary DNA polynucleotide(s).

[0185] According to some embodiments of the invention the occurrence is computed (calculated) for a nucleotide which appears first (i.e., at the 5′ end) of the complementary DNA polynucleotide(s), e.g., on each of the complementary DNA polynucleotides.

[0186] According to some embodiments of the invention the occurrence is computed for a nucleotide which appears last (i.e., at the 3′ end) of the complementary DNA polynucleotide(s), e.g., on each of the complementary DNA polynucleotides.

[0187] According to some embodiments of the invention the occurrence is computed for both nucleotides which appear first (i.e., at the 5′ end) and last (i.e., at the 3′ end) of the complementary DNA polynucleotide(s), (e.g., on each of the complementary DNA polynucleotides.

[0188] According to some embodiments of the invention two complementary DNA sequences are considered distinct if their nucleic acid sequence is different in at least one nucleotide.

[0189] According to some embodiments of the invention a complementary DNA sequence is considered unique if it maps to a single location (sequence) in the genome (from which the RNA polynucleotide is derived).

[0190] According to some embodiments of the invention a higher occurrence of the nucleotide within the complementary DNA polynucleotides obtained using the RNA structure—dependent agent which specifically cleaves or binds/modifies the paired RNA as compared to an expected occurrence of the nucleotide indicates that the nucleotide is in the pair state in the RNA polynucleotide prior to being treated with the digested with RNA structure—dependent agent.

[0191] As used herein the phrase “expected occurrence” refers to the occurrence of a nucleotide within the complementary DNA polynucleotides which would have been obtained if the RNA was randomly digested without any preference to a sequence or a structure (i.e., to a paired or unpaired nucleotide).

[0192] According to some embodiments of the invention a higher occurrence of a certain nucleotide within the complementary DNA polynucleotides obtained using the RNase which specifically cleaves a phosphodiester bond of a paired RNA as compared to an expected occurrence of the nucleotide indicates that the nucleotide forms a base-pair in the RNA polynucleotide prior to being digested with the RNase.

[0193] According to some embodiments of the invention a higher occurrence of the nucleotide within the complementary DNA polynucleotides obtained using the RNA structure—dependent agent which specifically cleaves or binds/modifies the unpaired RNA as compared to an expected occurrence of the nucleotide indicates that the nucleotide is in the unpair state in the RNA polynucleotide prior to being treated with the digested with RNA structure—dependent agent.

[0194] According to some embodiments of the invention a higher occurrence of the nucleotide within the complementary DNA polynucleotides obtained using the RNase which specifically cleaves a phosphodiester bond of an unpaired RNA as compared to an expected occurrence of the nucleotide in the nucleic acid sequence indicates that the nucleotide does not form a base-pair (i.e., is in an unpair state) in the RNA polynucleotide prior to being digested with the RNase.

[0195] According to some embodiments of the invention a higher occurrence of the nucleotide within the complementary DNA polynucleotides obtained using the RNA structure—dependent agent which specifically cleaves or binds/modifies the paired RNA as compared to an occurrence of the nucleotide in the complementary DNA polynucleotides obtained using the RNA structure—dependent agent which specifically cleaves or binds/modifies the unpaired RNA indicates that the nucleotide is in the pair state in the RNA polynucleotide prior to being treated with the RNA structure—dependent agent, and vice versa, namely, a lower occurrence of the nucleotide within the complementary DNA polynucleotides obtained using the RNA structure—dependent agent which specifically cleaves or binds/modifies the paired RNA as compared to an occurrence of the nucleotide in the complementary DNA polynucleotides obtained using the RNA structure—dependent agent which specifically cleaves or binds/modifies the unpaired RNA indicates that the nucleotide is in the unpair state in the RNA polynucleotide prior to being treated with the RNA structure—dependent agent.

[0196] According to some embodiments of the invention a higher occurrence of the nucleotide within the complementary DNA polynucleotides obtained using the RNase which specifically cleaves a phosphodiester bond of a paired RNA as compared to an occurrence of the nucleotide in the complementary DNA polynucleotides obtained using the RNase which specifically cleaves a phosphodiester bond of an unpaired RNA indicates that the nucleotide forms a base-pair in the RNA polynucleotide prior to being digested with the RNase, and vice versa, namely, a lower occurrence of the nucleotide within the complementary DNA polynucleotides obtained using the RNase which specifically cleaves a phosphodiester bond of a paired RNA as compared to an occurrence of the nucleotide in the complementary DNA polynucleotides obtained using the RNase which specifically cleaves a phosphodiester bond of an unpaired RNA indicates that the nucleotide does not form a base-pair (i.e., is unpaired) in the RNA polynucleotide prior to being digested with the RNase.

[0197] According to some embodiments of the invention a higher occurrence of the nucleotide within the complementary DNA polynucleotides obtained using the RNA structure—dependent agent which specifically cleaves or binds/modifies the unpaired RNA as compared to an occurrence of the nucleotide in the complementary DNA polynucleotides obtained using the RNA structure—dependent agent which specifically cleaves or binds/modifies the paired RNA indicates that the nucleotide is in the unpair state in the RNA polynucleotide prior to the being treated with the RNA structure—dependent agent, and vice versa, namely, a lower occurrence of the nucleotide within the complementary DNA polynucleotides obtained using the RNA structure—dependent agent which specifically cleaves or binds/modifies the unpaired RNA as compared to an occurrence of the nucleotide in the complementary DNA polynucleotides obtained using the RNA structure—dependent agent which specifically cleaves or binds/modifies the paired RNA indicates that the nucleotide is in the pair state in the RNA polynucleotide prior to the being treated with the RNA structure—dependent agent.

[0198] According to some embodiments of the invention a higher occurrence of the nucleotide within the complementary DNA polynucleotides obtained using the RNase which specifically cleaves a phosphodiester bond of an unpaired RNA as compared to an occurrence of the nucleotide in the complementary DNA polynucleotides obtained using the RNase which specifically cleaves a phosphodiester bond of a paired RNA indicates that the nucleotide does not form a base-pair (i.e., is unpaired) in the RNA polynucleotide prior to the being digested with the RNase, and vice versa, namely, a lower occurrence of the nucleotide within the complementary DNA polynucleotides obtained using the RNase which specifically cleaves a phosphodiester bond of an unpaired RNA as compared to an occurrence of the nucleotide in the complementary DNA polynucleotides obtained using the RNase which specifically cleaves a phosphodiester bond of a paired RNA indicates that the nucleotide forms a base-pair in the RNA polynucleotide prior to the being digested with the RNase.

[0199] Thus, the teachings of the invention can be used to determine the pairability of nucleotides in a single RNA polynucleotide in a single “run” (e.g., of any length, including large transcripts which cannot be subjected to conventional footprinting, e.g., due to the gel-size limitation) as well as to determine the pairability of nucleotides of a plurality of RNA polynucleotides (e.g., simultaneously, in a “single run”).

[0200] For example, when a plurality of RNA polynucleotides are included in a sample, the RNase(s) digests the mixture of RNA polynucleotides, and the digested RNA polynucleotides (which include a mixture of fragments deriving from the plurality of RNA polynucleotides) are subjected to sequence determination. The identified nucleic acid sequences are compared to the sequences of the original RNA polynucleotides (e.g., as determined prior to digesting the RNA polynucleotides with RNases, or as known from the database), and the occurrence of a nucleotide of each of the original RNA polynucleotide (of the plurality of the RNA polynucleotides) is determined within the sequences of the digested RNA polynucleotides. Since the sequences of the digested RNA polynucleotides align to the original sequences of the RNA polynucleotides (before digestion) one can calculate the frequency of fragments beginning or ending at a certain nucleotide of the original RNA polynucleotide. For example, if a high frequency of the RNase V1—digested RNA polynucleotides begin with a certain nucleotide (e.g., a nucleotide at position 500 of the RNA polynucleotide), then such a high frequency indicates that the nucleotide preceding this nucleotide, i.e., the nucleotide at position 499 of the RNA polynucleotide, forms a base-pair in the original RNA polynucleotide. Additionally or alternatively, if a high frequency of the RNase S1—digested RNA polynucleotides begin with a nucleotide at position 520 of the RNA polynucleotide, then such a high frequency indicates that the nucleotide preceding this nucleotide, i.e., the nucleotide at position 519 of the RNA polynucleotide does not form a base-pair (i.e., is unpaired) in the original RNA polynucleotide.

[0201] Given that the pairability of each of the nucleotides of an RNA polynucleotide or a plurality of RNA polynucleotides can be determined with high reliability, the teachings of the invention can be used to determine the secondary structure of an RNA polynucleotide or a plurality of RNA polynucleotides.

[0202] Thus, according to an aspect of some embodiments of the invention there is provided a method of determining a secondary structure of an RNA polynucleotide. The method is effected by (a) predicting the pairability of nucleotides of the plurality of RNA polynucleotides according to the method of the invention; and (b) determining the secondary structure of the RNA polynucleotide based on the predicted pairability of the nucleotides, thereby determining the secondary structure of the RNA polynucleotide.

[0203] As used herein the phrase “secondary structure of an RNA polynucleotide” refers to the folding state of the RNA polynucleotide by forming hydrogen bonds between complementary nucleotides (e.g., adenine and uracil; and cytosine and guanine).

[0204] It should be noted that various methods and algorithms are known in the art for determining a secondary structure of an RNA based on the pairability of the nucleotides comprising the RNA polynucleotide. Examples of suitable algorithms which can be used along with the method of some embodiments of the invention include, but are not limited to, Mfold [Zuker, M. Mfold web server for nucleic acid folding and hybridization prediction. Nucleic Acids Res 31, 3406-15 (2003)], Vienna [Hofacker, I. L., Fekete, M. & Stadler, P. F. Secondary structure prediction for aligned RNA sequences. J Mol Biol 319, 1059-66 (2002)] and CONTRAfold [Do, C. B., Woods, D. A. & Batzoglou, S. CONTRAfold: RNA secondary structure prediction without physics-based models. Bioinformatics 22, e90-8 (2006)].

[0205] The teachings of the invention can be also used to predict the tertiary structure of an RNA polynucleotide. Examples of suitable algorithms which can be used along with the method of some embodiments of the invention include, but are not limited to the algorithm which models the prediction of tertiary structure as constraint satisfactory problem (CSP) [described in Major F, Turcotte M, Gautheret D, Lapalme G, Fillion E, Cedergren R. The combination of symbolic and numerical computation for three-dimensional modeling of RNA. Science. 1991 Sep. 13; 253(5025):1255-60; which is fully incorporated herein by reference in its entirety]; the MC-SYM algorithm for which the CSP approach is used [described in Major F, Gautheret D, Cedergren R. Reproducing the three-dimensional structure of a tRNA molecule from structural constraints. Proc Natl Acad Sci USA. 1993 Oct. 15; 90(20):9408-12; which is fully incorporated herein by reference in its entirety]; the MANIP algorithm which uses as an input database of known fragments and secondary structure and provides as an output a complex 3D architecture; the NAB algorithm which uses as an input secondary structure and distance constraints and provides as an output the 3D structure; the ERNA-3D algorithm which uses as an input the Secondary structure and provides as an output 3D structures; the MC-Sym algorithm which uses as an input a secondary structure, distance, torsion and other structural constraints, database of known fragments and which provides as an output series of 3D structures; the RNA2D3D algorithm which uses as an input secondary structure, can also use known fragments, and provides as an output a 3D structure; the YAMMP (YUP) algorithm which uses as an input a reduced model representations and secondary structure and provides as an output a 3D structure. For additional details see Bruce A Shapiro et al. Bridging the gap in RNA structure prediction. Current Opinion in Structural Biology, 17:157-165, 2007, which is fully incorporated by reference herein in its entirety.

[0206] Thus, as mentioned above, using the teachings of the invention the present inventors were capable of determining the structural profiles of over 3000 distinct transcripts of the entire yeast transcriptome (Table 5, Example 2 of the Examples section which follows and in the Supplementary Data file. This includes the structures of the RNA polynucleotides comprising the nucleic acid sequence selected from the group consisting of SEQ ID NOs:1, 5, 6, 7, 8, 9, 10, 11, 12, 13, 14, 15, 16, 17, 18, 19, 20, 21, 22, 23, 24, 25, 26, 27, 28, 29, 30, 31, 32, 34, 35, 36, 37, 38, 39, 40, 41, 42, and 55-3219.

[0207] The secondary structure of an RNA molecule can be used to understand biological processes which involve the RNA molecule and/or which are regulated by the RNA molecule. Additionally or alternatively, the secondary structure of an RNA can be used to identify RNA molecules having a similar secondary and optionally also tertiary structure, which can be referred to as “structural homologues”.

[0208] As used herein the phrase “structural homologues” refers to molecules having a common secondary structure.

[0209] For example, a common versus different secondary structure of an RNA molecule can be defined using RNAdistance [Hofacker I. L. Vienna RNA secondary structure server. Nucleic Acids Res. 2003;31:3429-3431, which is fully incorporated by reference in its entirety].

[0210] According to some embodiments of the invention, the structural homologues exhibit also sequence homology (homology in the primary nucleic acid sequence).

[0211] Sequence homology can be determined using any homology comparison software, including for example, the BlastN software of the National Center of Biotechnology Information (NCBI) such as by using default parameters.

[0212] According to some embodiments of the invention the sequence homology is at least about 60%, at least about 65%, at least about 70%, at least about 75%, at least about 80%, at least about 81%, at least about 82%, at least about 83%, at least about 84%, at least about 85%, at least about 86%, at least about 87%, at least about 88%, at least about 89%, at least about 90%, at least about 91%, at least about 92%, at least about 93%, at least about 93%, at least about 94%, at least about 95%, at least about 96%, at least about 97%, at least about 98%, at least about 99%, e.g., 100% between the two structural homologues.

[0213] According to some embodiments of the invention, the structural homologues do not exhibit sequence homology. For example, two RNA molecules can share a similar secondary structure yet can belong to different gene families with different primary nucleic acid sequence. For example the RNA motives which are recognized by RNA binding proteins may appear in many distinct RNA molecules.

[0214] It should be noted that determination of a secondary structure of an RNA with an unknown function can be used to predict the function of the RNA based on the function of another RNA(s) which exhibits a structural homology to the RNA with the unknown function.

[0215] Once obtained, the secondary structures of the RNA polynucleotides can be used to identify molecules which can modulate (e.g., disrupt) the secondary (and subsequently also the tertiary) structure of an RNA polynucleotide.

[0216] Thus, according to an aspect of some embodiments of the invention there is provided a method of determining if a molecule is capable of modulating a secondary structure of an RNA polynucleotide. The method is effected by (a) contacting the plurality of RNA polynucleotides with the molecule and; (b) comparing a secondary structure of the plurality of RNA polynucleotides following the contacting to a secondary structure of the plurality of RNA polynucleotides prior to the contacting, wherein an alteration above a predetermined threshold of the secondary structure of an RNA polynucleotide following the contacting indicates that the molecule modulates the secondary structure of the RNA polynucleotide, thereby determining if the molecule is capable of modulating the secondary structure of the at least one RNA polynucleotide of the plurality of molecules.

[0217] According to some embodiments of the invention, the secondary structure of the RNA polynucleotide prior to and/or following the contacting is determined according to the method of the invention.

[0218] According to an aspect of some embodiments of the invention there is provided a method of determining if a molecule is capable of modulating a secondary structure of a plurality of RNA polynucleotides, the method is effected by: (a) contacting the plurality of RNA polynucleotides with the molecule; and (b) determining a secondary structure of the plurality of RNA polynucleotides according to the method of the invention following the contacting and comparing the secondary structure to a secondary structure of the same RNA polynucleotides prior to the contacting, wherein an alteration above a predetermined threshold of the secondary structure following the contacting indicates that the molecule modulates the secondary structure of the RNA polynucleotides, thereby determining if the molecule is capable of modulating the secondary structure of the plurality of RNA polynucleotides.

[0219] The molecule which is contacted with the plurality of RNA polynucleotides can be any small molecule, DNA, RNA (e.g., an RNA silencing agent), a peptide, an amino acid, a sugar, a carbohydrate, a fat molecule, an antibody, an antibiotic, a drug (e.g., chemotherapeutic drug) and a toxin.

[0220] As used herein, the term “RNA silencing agent” refers to an RNA which is capable of inhibiting or “silencing” the expression of a target gene. In certain embodiments, the RNA silencing agent is capable of preventing complete processing (e.g., the full translation and/or expression) of an mRNA molecule through a post-transcriptional silencing mechanism. RNA silencing agents include noncoding RNA molecules, for example RNA duplexes comprising paired strands, as well as precursor RNAs from which such small non-coding RNAs can be generated. Exemplary RNA silencing agents include dsRNAs such as siRNAs, miRNAs and shRNAs. In one embodiment, the RNA silencing agent is capable of inducing RNA interference. In another embodiment, the RNA silencing agent is capable of mediating translational repression.

[0221] According to some embodiments of the invention, contacting is effected by adding the molecule to a sample comprising the plurality of RNA polynucleotides. The sample can be an in vitro sample (e.g., isolated cells, isolated RNA molecules), an ex vivo sample (e.g., a sample obtained from a living organism, e.g., human, e.g., blood, tissue biopsy, body fluids, which can optionally be further cultured outside the body, e.g., under in vitro conditions), or an in vivo sample (within a living organism).

[0222] It should be noted that contacting can be effected for a time period sufficient for binding of the molecule to at least one of the plurality of RNA polynucleotides and optionally modulating the RNA secondary structure thereof, and those of skills in the art are capable of adjusting the conditions needed for such an effect to occur.

[0223] As used herein the phrase “above a predetermined threshold” refers to the increase or decrease in the number or percentage of nucleotides of RNA polynucleotide which change their pairness state (i.e., being in a paired or unpaired state) following the contact with the molecule.

[0224] According to some embodiments of the invention, the predetermined threshold is a change in the pairness of at least one nucleotide, at least two nucleotides, at least three nucleotides, at least four nucleotides, at least 5 nucleotides, at least 6nucleotides, at least 7 nucleotides, at least 8 nucleotides, at least 9 nucleotides, at least 10 nucleotides, at least 11 nucleotides, at least 12 nucleotides, at least 13 nucleotides, at least 14 nucleotides, at least 15 nucleotides, at least 16 nucleotides, at least 17 nucleotides, at least 18 nucleotides, at least 19 nucleotides, at least 20 nucleotides, at least 25 nucleotides, at least 30 nucleotides, at least 35 nucleotides, at least 40 nucleotides, at least 45 nucleotides, at least 50 nucleotides, at least 55 nucleotides, at least 60 nucleotides, at least 65 nucleotides, at least 70 nucleotides, at least 75 nucleotides, at least 80 nucleotides, at least 85 nucleotides, at least 90 nucleotides, at least 95 nucleotides, at least 100 nucleotides, at least 110 nucleotides, at least 120 nucleotides, at least 130 nucleotides, at least 140 nucleotides, at least 150 nucleotides, at least 200 nucleotides, or more of the nucleotides comprising the RNA polynucleotide.

[0225] According to some embodiments of the invention, the predetermined threshold is a change in the pairness of at least 1%, at least 2%, at least 3%, at least 4%, at least 5%, at least 6%, at least 7%, at least 8%, at least 9%, at least 10%, at least 11%, at least 12%, at least 13%, at least 14%, at least 15%, at least 16%, at least 17%, at least 18%, at least 19%, at least 20%, at least 25%, at least 30%, at least 40%, at least 45%, at least 50%, at least 55%, at least 60%, at least 65%, at least 70%, at least 75%, at least 80%, at least 85%, at least 90%, at least 95%, or more of the nucleotides comprising the RNA polynucleotide.

[0226] The teachings of the invention can be used to identify molecules which modulate the secondary structure of at least one molecule of a plurality of molecules (e.g., a plurality of RNA molecules which are comprised in a biological sample, such as in a single cell, in body fluids or in a tissue biopsy).

[0227] According to some embodiments of the invention, the molecule(s) modulates the secondary structure of at least 2, at least 3, at least 4, at least 5, at least 6, at least 7, at least 10, at least 20, at least 30, at least 40, at least 50 or more RNA polynucleotides of a plurality RNA polynucleotides comprised in a sample.

[0228] Since the RNA structure affects the function of the RNA and since alterations in RNA's structure and/or activity are involved in the pathogenesis of many pathologies (disease, disorder or condition), the teachings of the invention can be used to screen for pathology associated markers.

[0229] Thus, according to an aspect of some embodiments of the invention there is provided a method of screening for a marker associated with a pathology. The method is effected by identifying at least one RNA polynucleotide having an altered secondary structure between cells associated with the pathology and cells devoid of the pathology (from a control subject), wherein an alteration above a predetermined threshold between the secondary structure of the RNA polynucleotide in the cells associated with the pathology and the secondary structure of the RNA polynucleotide in the cells devoid of the pathology indicates that the at least one RNA polynucleotide is associated with the pathology, thereby screening for a marker associated with the pathology.

[0230] According to some embodiments of the invention, the cells associated with the pathology can be derived from the pathology (e.g., a tissue exhibiting histological markers of the pathology).

[0231] According to some embodiments of the invention, the cells devoid of the pathology can be obtained from a control subject or from a healthy, non-affected cell of a subject who is affected by the pathology (e.g., in case of a solid tumor, the cells devoid of the pathology can be obtained from a healthy tissue, or blood).

[0232] Screening for diagnostic or therapeutic targets can be effected under in vitro, ex vivo or in vivo conditions are described above.

[0233] As used herein the term “about” refers to ±10%.

[0234] The terms “comprises”, “comprising”, “includes”, “including”, “having” and their conjugates mean “including but not limited to”.

[0235] The term “consisting of means “including and limited to”.

[0236] The term “consisting essentially of means that the composition, method or structure may include additional ingredients, steps and/or parts, but only if the additional ingredients, steps and/or parts do not materially alter the basic and novel characteristics of the claimed composition, method or structure.

[0237] As used herein, the singular form “a”, “an” and “the” include plural references unless the context clearly dictates otherwise. For example, the term “a compound” or “at least one compound” may include a plurality of compounds, including mixtures thereof.

[0238] Throughout this application, various embodiments of this invention may be presented in a range format. It should be understood that the description in range format is merely for convenience and brevity and should not be construed as an inflexible limitation on the scope of the invention. Accordingly, the description of a range should be considered to have specifically disclosed all the possible subranges as well as individual numerical values within that range. For example, description of a range such as from 1 to 6 should be considered to have specifically disclosed subranges such as from 1 to 3, from 1 to 4, from 1 to 5, from 2 to 4, from 2 to 6, from 3 to 6 etc., as well as individual numbers within that range, for example, 1, 2, 3, 4, 5, and 6. This applies regardless of the breadth of the range.

[0239] Whenever a numerical range is indicated herein, it is meant to include any cited numeral (fractional or integral) within the indicated range. The phrases “ranging/ranges between” a first indicate number and a second indicate number and “ranging/ranges from” a first indicate number “to” a second indicate number are used herein interchangeably and are meant to include the first and second indicated numbers and all the fractional and integral numerals therebetween.

[0240] As used herein the term “method” refers to manners, means, techniques and procedures for accomplishing a given task including, but not limited to, those manners, means, techniques and procedures either known to, or readily developed from known manners, means, techniques and procedures by practitioners of the chemical, pharmacological, biological, biochemical and medical arts.

[0241] As used herein, the term “treating” includes abrogating, substantially inhibiting, slowing or reversing the progression of a condition, substantially ameliorating clinical or aesthetical symptoms of a condition or substantially preventing the appearance of clinical or aesthetical symptoms of a condition.

[0242] It is appreciated that certain features of the invention, which are, for clarity, described in the context of separate embodiments, may also be provided in combination in a single embodiment. Conversely, various features of the invention, which are, for brevity, described in the context of a single embodiment, may also be provided separately or in any suitable subcombination or as suitable in any other described embodiment of the invention. Certain features described in the context of various embodiments are not to be considered essential features of those embodiments, unless the embodiment is inoperative without those elements.

[0243] Various embodiments and aspects of the present invention as delineated hereinabove and as claimed in the claims section below find experimental support in the following examples.

### Examples

[0244] Reference is now made to the following examples, which together with the above descriptions illustrate some embodiments of the invention in a non limiting fashion.

[0245] Generally, the nomenclature used herein and the laboratory procedures utilized in the present invention include molecular, biochemical, microbiological and recombinant DNA techniques. Such techniques are thoroughly explained in the literature. See, for example, “Molecular Cloning: A laboratory Manual” Sambrook et al., (1989); “Current Protocols in Molecular Biology” Volumes I-III Ausubel, R. M., ed. (1994); Ausubel et al., “Current Protocols in Molecular Biology”, John Wiley and Sons, Baltimore, Md. (1989); Perbal, “A Practical Guide to Molecular Cloning”, John Wiley & Sons, New York (1988); Watson et al., “Recombinant DNA”, Scientific American Books, New York; Birren et al. (eds) “Genome Analysis: A Laboratory Manual Series”, Vols. 1-4, Cold Spring Harbor Laboratory Press, New York (1998); methodologies as set forth in U.S. Pat. Nos. 4,666,828; 4,683,202; 4,801,531; 5,192,659 and 5,272,057; “Cell Biology: A Laboratory Handbook”, Volumes I-III Cellis, J. E., ed. (1994); “Current Protocols in Immunology” Volumes I-III Coligan J. E., ed. (1994); Stites et al. (eds), “Basic and Clinical Immunology” (8th Edition), Appleton & Lange, Norwalk, Conn. (1994); Mishell and Shiigi (eds), “Selected Methods in Cellular Immunology”, W. H. Freeman and Co., New York (1980); available immunoassays are extensively described in the patent and scientific literature, see, for example, U.S. Pat. Nos. 3,791,932; 3,839,153; 3,850,752; 3,850,578; 3,853,987; 3,867,517; 3,879,262; 3,901,654; 3,935,074; 3,984,533; 3,996,345; 4,034,074; 4,098,876; 4,879,219; 5,011,771 and 5,281,521; “Oligonucleotide Synthesis” Gait, M. J., ed. (1984); “Nucleic Acid Hybridization” Hames, B. D., and Higgins S. J., eds. (1985); “Transcription and Translation” Hames, B. D., and Higgins S. J., Eds. (1984); “Animal Cell Culture” Freshney, R. I., ed. (1986); “Immobilized Cells and Enzymes” IRL Press, (1986); “A Practical Guide to Molecular Cloning” Perbal, B., (1984) and “Methods in Enzymology” Vol. 1-317, Academic Press; “PCR Protocols: A Guide To Methods And Applications”, Academic Press, San Diego, Calif. (1990); Marshak et al., “Strategies for Protein Purification and Characterization—A Laboratory Course Manual” CSHL Press (1996); all of which are incorporated by reference as if fully set forth herein. Other general references are provided throughout this document. The procedures therein are believed to be well known in the art and are provided for the convenience of the reader. All the information contained therein is incorporated herein by reference.

### General Materials and Experimental Methods

[0246] Media and growth conditions—Yeast strain S288C was grown at 30° C. to exponential phase (4×10⁷ cells/nil) in yeast peptone dextrose (YPD) medium.

[0247] RNA preparation—Total RNA was extracted from cells using a using hot, acid phenol (Sigma) essentially as described in A. Lee, K. D. Hansen, J. Bullard, S. Dudoit, G. Sherlock, PLoS Genet 4, e1000299 (December 2008), which is fully incorporated herein by reference. Poly(A) RNA was obtained by purifying twice using the Poly(A) purist Kit according to manufacturer's instructions (Ambion).

[0248] Preparation of RNA transcripts in vitro—RNA transcripts of P4P6 (SEQ ID NO:7), P9-9.2 (SEQ ID NO:8), HOTAIR [GenBank Accession No. DQ926657.1); SEQ ID NO:5)], fragments of HOTAIR, are obtained by PCR followed by in vitro transcription using RiboMAX Large Scale RNA production Systems Kit according to the manufacturer's instructions (Promega). The RNA was purified using 8% denaturing polyacrylamide gel electrophoresis (PAGE) prepared with 19:1 acrylamide:bisacrylamide, 7 M urea and 90 mM Tris-borate, 2 mM EDTA). The RNA bands were visualized by UV shadowing and excised out of the gel. The RNA was recovered by passive diffusion into water overnight at 4° C., followed by ethanol precipitation (0.3 M Sodium Acetate, 1% glycogen and 3 volumes of 100% ethanol) and resuspended in water.

[0249] Full length YKL185W (Ash1) [GenBank Accession No. NC_{—}001143.8 (94504.96270); SEQ ID NO:3), GenBank Accession No. NC_{—}001143.8 (94172.96368); SEQ ID NO: 3218], a fragment of YNL229C (GenBank Accession No. NC_{—}001146: (219138.220202, complement); SEQ ID NO:43; the fragment of YNL229C includes nucleotides 3-368 of SEQ ID NO:43), YLR110C [GenBank Accession No. NC_{—}001144.4 (370144 . . . 369638, complement); SEQ ID NO:1], YDL184C [GenBank Accession No. NC_{—}001136.9 (130408.130485, complement); SEQ ID NO:2] were obtained by PCR using primers against the yeast genome followed by in vitro transcription using RiboMAX Large Scale RNA production Systems Kit according to the manufacturer's instructions (Promega). The RNAs were purified using RNeasy Mini kit (Qiagen) following manufacturer's instructions.

[0250] Enzymatic Structure Probing—In vitro transcribed RNA was treated with 5 units of Antarctic Phosphatase (NEB) at 37° C. for 30 minutes, followed by heat inactivation at 65° C. for 7 minutes. T4 polynucleotide kinase (PNK) was then used to add [γ-³²P]ATP to the 5′-end of RNA by incubating at 37° C. for 30 minutes. An equal volume of RNA loading dye (95% Formamide, 18 mM EDTA, 0.025% SDS, 0.025% Xylene Cyanol, 0.025% Bromophenol Blue) was added before the RNA was run on a 8%, 7 M urea, denaturing PAGE gel. Bands corresponding to the right size were excised out of the gel. The gel slices were freezed on dry ice and thawed at room temperature for three times, and RNA was recovered by immersing the gel slice in 100 μl of water, at 4° C., overnight. The amount of radioactivity present was measured by scintillation spectroscopy.

[0251] Prior to structure mapping, the labeled RNA was added to 1 μg of total yeast RNA and was renatured by heating to 90° C., cooled on ice, and slowly brought to room temperature in structure buffer (10 mM Tris pH 7, 100 mM KCl, 10 mM MgCl₂). Structure determination was obtained by digesting with dilutions of RNase V1 (EC 3.1.27.8; Ambion) and RNase S1 (EC 3.1.30.1; Fermentas) at room temperature for 15 minutes. The reaction was stopped by using inactivation and precipitation buffer (Ambion), the RNA was recovered using ethanol precipitation and was dissolved in RNA loading dye. The RNA was resolved by running a 8% denaturing PAGE gel.

[0252] Additional structure depended RNases which were used include RNase T1 (EC 3.1.27.3) and RNase A (EC3.1.27.5).

[0253] T1 urea sequencing ladder was obtained by incubating labeled RNA, mixed with 1 μg of total RNA, in sequencing buffer (20 mM sodium citrate pH 5, 1 mM EDTA, 7 M urea) at 50° C. for 5 minutes. The samples were cooled to room temperature and cleaved using 10-100 fold dilutions of RNase T1 for 15 minutes. The reaction was stopped by adding inactivation and precipitation buffer (Ambion), and the RNA was recovered using ethanol precipitation and dissolved in RNA loading dye. The RNA was resolved by running a 8% denaturing PAGE gel.

[0254] Alkaline hydrolysis ladder was obtained by incubating labeled RNA in alkaline hydrolysis buffer (50 mM Sodium Carbonate [NaHCO₃/Na₂Co₃] pH 9.2, 1 mM EDTA) at 95° C. for 5-10 minutes. An equal volume of the RNA loading dye was added to the fragmented RNA and resolved using 8% denaturing PAGE gel.

[0255] Quantification of band intensities—Band intensities on the sequencing gel are quantified using SAFA.

[0256] SOLiD™ Applied Biosystems Library construction—P4P6, P9-9.2, HOTAIR, YKL185W and fragment of YNL229C were doped into poly(A)+ mRNA as controls. The RNA pool was then folded and probed for structure using 0.01 Units of RNase V1 (Ambion), or 1000 Units of S1 nuclease (Fermentas), in a 100 μl reaction volume, as described above. To capture the cleaved fragments and convert them into a library for Solid sequencing, the present inventors used the SOLiD™ Small RNA Expression Kit (Ambion) and modified the manufacturer's instructions as follows.

[0257] Briefly: RNase V1 and S1 nuclease cleaved RNA pool was further fragmented using alkaline hydrolysis buffer at 95° C. for 3 minutes. The fragments were resolved on a 6% denaturing PAGE gel and a band corresponding to 75-200 bases of RNA size was excised out of the PAGE gel. The gel slice was frozen and thawed three times and crushed. RNA was recovered by passive diffusion into water at 4° C., overnight, followed by ethanol precipitation. The RNAs were ligated to 5′ adaptors by adding T4 RNA ligase-2 (EC6.5.1.3) and adaptor mixA (SOLiD™ Small RNA Expression Kit) and incubating at 16° C., overnight. The RNA was then treated with Antarctic Phosphatase (NEB), 37° C. for 1 hour, and heat inactivated at 65° C. for 7 minutes. Adaptor mixA was re-added to the RNA to maximize ligation to the 3′ end of the RNA and incubated at 16° C. for 6 hours. Reverse transcription was carried out using ArrayScript reverse transcriptase (Ambion) (EC 2.7.7.49) and a primer which binds to the adaptor and the RNA was removed using RNase H. 18-20 rounds of PCR using the Taq polymerase (EC2.7.7.7) were carried out using SOLiD PCR primers (of the universal adapters) provided in the kit.

[0258] SOLiD™ Sequencing—cDNA libraries were amplified onto beads by subjected to emulsion PCR, enrichment and the resulting beads were deposited onto the surface of a glass slide according to the standard protocol described in the SOLiD Library Preparation Guide (Applied Biosystems). 35-50 by sequences were generated on a SOLiD™ System sequencing platform according to the standard protocol described in the SOLiD Instrument Operation Guide (Applied Biosystems). The sequences generated were further analyzed.

[0259] Sequence mapping—Obtained sequences were truncated to 35 by before mapping, and required to map uniquely to either the yeast genome or transcriptome, allowing up to one mismatch and no insertions or deletions. Exemplary mapping results are provided in Tables 1 and 2 below.

TABLE 1

| lane | input reads | mapped to genome | % | mapped to transcriptome | % | uniquely mapped | % |
|---|---|---|---|---|---|---|---|
| V1 rep#1 | 11863204 | 9279439 | 78.22 | 9011318 | 75.96 | 6629996 | 55.89 |
| V1 rep#2 | 7160815 | 4600352 | 64.24 | 4473520 | 62.47 | 3341250 | 46.66 |
| V1 rep#3 | 6528001 | 4356121 | 66.73 | 4250412 | 65.11 | 3097273 | 47.45 |
| V1 rep#4 | 29180169 | 20033105 | 68.65 | 19508366 | 66.85 | 12976611 | 44.47 |
| S1 rep#1 | 23115630 | 16076977 | 69.55 | 15783615 | 68.28 | 11086282 | 47.96 |
| S1 rep#2 | 23023964 | 15713013 | 68.25 | 15426287 | 67.00 | 10668210 | 46.34 |
| S1 rep#3 | 23749516 | 16537687 | 69.63 | 16223036 | 68.31 | 10896861 | 45.88 |
| TOTAL | 124621299 | 86596694 | 69.49 | 84676554 | 67.95 | 58696483 | 47.10 |

Table 1. Columns show, for each replicate (“lane”), the number of raw sequences obtained (“input reads”), the number of sequences, which mapped to the yeast genome or transcriptome (“mapped to genome”, “mapped to transcriptome” respectively) and the number of reads which mapped uniquely.
“V1” - RNase V1;
“S1” - RNase S1;
“rep#” - repetition No.

TABLE 2
Table 2. Continuation of Table 1. Columns show, for each
replicate (“lane”), the number of raw sequences which
mapped uniquely, non uniquely, or not annotated/not mapped.

| | unique | non unique | not annotated | not mapped |
|---|---|---|---|---|
| V1 rep#1 | 6629996 | 2381322 | 268121 | 2583765 |
| V1 rep#2 | 3341250 | 1132270 | 126832 | 2560463 |
| V1 rep#3 | 3097273 | 1153139 | 105709 | 2171880 |
| V1 rep#4 | 12976611 | 6531755 | 524739 | 9147064 |
| S1 rep#1 | 11086282 | 4697333 | 293362 | 7038653 |
| S1 rep#2 | 10668210 | 4758077 | 286726 | 7310951 |
| S1 rep#3 | 10896861 | 5326175 | 314651 | 7211829 |

[0260] Mapping of the short reads to the yeast transcriptome was done using version 1.1.0 of SHRiMP (2) downloaded from Hypertext Transfer Protocol://compbio (dot) cs (dot) toronto (dot) edu/shrimp/. The alignment started from the first base of the read, as PARS relies on the first base to recover a valid enzyme cleavage point. Reads that were not uniquely mapped were discarded and all genomic locations to which those reads mapped were marked as ‘unmappable’ due to ambiguity. In addition, genomic locations from which no reads were obtained in any of the replicates were also marked ‘unmappable’.

[0261] Genome and transcriptome assembly—The yeast genome was downloaded from The Saccharomyces Genome Database (SGD, Hypertext Transfer Protocol://World Wide Web (dot) yeastgenome (dot) org/) on June 2008. The yeast transcriptome was assembled by SGD annotations (downloaded June 2008). Untranslated regions (UTR) lengths were taken from Nagalkshmi et al (U. Nagalakshmi et al., in Science. (2008), vol. 320, pp. 1344-9). The set of genes predicted to encode secretory proteins is based on Emanuelsson et al (O. Emanuelsson, S. Brunak, G. von Heijne, H. Nielsen, Nat Protoc 2, 953 (2007).

[0262] Quantifying cleavage data—For each nucleotide along a transcript, the number of reads whose first mapped base was one base 3′ of the inspected nucleotide were counted.

[0263] The load of a transcript is defined as the total number of reads that mapped to the transcript, divided by the effective transcript length, which is the annotated transcript length minus the number of unmappable locations (see “sequence mapping” above). This measure is a proxy to the transcript's abundance in the sample. The ratio score of a nucleotide is defined as the ratio between the number of reads obtained for that nucleotide and the load of that transcript.

[0264] Computing the PARS Score—For each nucleotide, the logarithm of the ratio between the number of reads obtained for that nucleotide in the V1-treated sample and that obtained in the S1-treated sample was computed.

[0265] Specifically, the PARS Score is defined as the log₂ of the ratio between the number of times the nucleotide immediately downstream to the inspected nucleotide was observed as the first base when treated with RNase V1 and the number of times it was observed in the RNase S1 treated sample. The score of base i is thus defined as:

$${Score}_{i} = {log}_{2} ( \frac{\vert V {1}_{i + 1} \vert + 1}{\vert S {1}_{i + 1} \vert + 1} ) \qquad Formula I$$

where |V1ᵢ₊₁| and |S1ᵢ₊₁| are the number of times the nucleotide immediately downstream to the inspected nucleotide was observed as the first base of a sequence read in the V1- and S1-treated samples, respectively.

[0266] To account for differences in overall sequencing depth between the V1- and S1-treated samples, the number of reads for each nucleotide is normalized prior to the computation of the ratio:

|V1ᵢ|=k_{V}·RawV1ᵢ|

|S1ᵢ|=k_{S}·RawS1ᵢ| Formula II:

[0267] Where RawS1ᵢ and RawV1ᵢ are the raw number of reads observed for nucleotide i in the V1 and S1 treated samples, respectively, and the normalizing constants kᵥ and kₛ are computed as follows:

$${k}_{v} = \frac{( \vert V 1 \vert + \vert S 1 \vert ) / 2}{\vert V 1 \vert} \\ {k}_{s} = \frac{( \vert V 1 \vert + \vert S 1 \vert ) / 2}{\vert S 1 \vert} \qquad Formula III$$

[0268] Higher PARS (and positive) scores indicate higher double stranded propensity and lower (and negative) scores indicate that the base was less likely to be in a double-stranded conformation. The PARS score was capped to ±7, i.e., values, which were above +7 or below −7, were set to +7 or −7, respectively. Nucleotides with zero evidence counts on both lanes have a zero PARS score and were excluded from all subsequent analysis.

[0269] Enrichment of Gene Ontology annotations in over- and under-structured genes—For each gene, the average PARS score of its 5′ UTR, CDS, and 3′ UTR were computed separately, and the Wilcoxon rank sum test was used to ask whether genes with similar Gene Ontology (GO) annotations tend to have similar average PARS scores in any of the inspected regions. Multiple-hypothesis correction was done by FDR with a cutoff of 0.05. The Wilcoxon rank sum test results obtained for each gene are listed in Table 3 below.

TABLE 3

| 3UTR_under | p-value cut off for FDR < 0.05 is: 0 |
|---|---|
| 0.000750043 | hydrolase activity, acting on ester bonds |
| 0.001319102 | glutamine family amino acid metabolic process |
| 0.002189252 | endoribonuclease activity |
| 0.003019397 | protein processing |
| 0.004916578 | ribonuclease activity |
| 0.00499214 | pyrimidine nucleotide metabolic process |
| 0.006528625 | peptide pheromone maturation |
| 0.006640651 | tRNA processing |
| 0.006742024 | pyrimidine nucleotide biosynthetic process |
| 0.007395877 | heterocycle metabolic process |
| 0.007733319 | serine-type peptidase activity |
| 0.008096726 | ribosomal large subunit export from nucleus |
| 0.008278377 | carbamoyl-phosphate synthase activity |
| 0.008394098 | aromatic compound metabolic process |
| 0.008498933 | serine-type endopeptidase activity |
| 0.008694451 | endonuclease activity, active with either ribo- |
| | or deoxyribonucleic acids and producing |
| | 5-phosphomonoesters |
| 0.008694451 | endoribonuclease activity, producing |
| | 5-phosphomonoesters |
| 0.010131165 | response to DNA damage stimulus |
| 0.010152929 | glutamine family amino acid biosynthetic process |
| 0.010335072 | peptide binding |
| 0.010897536 | tRNA-specific ribonuclease activity |
| 0.012570831 | nucleotidase activity |
| 0.01429522 | response to acid |
| 0.014393705 | regulation of cell organization and biogenesis |
| 0.014522823 | S-acyltransferase activity |
| 0.01482766 | phosphoric ester hydrolase activity |
| 0.017919989 | tRNA metabolic process |
| 0.018360699 | Golgi trans face |
| 0.018642169 | phosphoprotein phosphatase activity |
| 0.020012565 | nucleotide-excision repair |
| 0.021266951 | methionine salvage |
| 0.022306714 | tRNA splicing |
| 0.022689331 | pyrimidine nucleoside triphosphate |
| | metabolic process |
| 0.022898849 | ligase activity, forming carbon-nitrogen bonds |
| 0.023122353 | amine metabolic process |
| 0.024498463 | glutamine family amino acid catabolic process |
| 0.024681545 | endonuclease activity |
| 0.024818508 | nuclease activity |
| 0.026346734 | GTPase binding |
| 0.026837208 | arginine metabolic process |
| 0.029170098 | malonyltransferase activity |
| 0.029695255 | oxidoreductase activity, acting on the CH—NH |
| | group of donors |
| 0.030601005 | purine base metabolic process |
| 0.030955322 | regulation of actin filament length |
| 0.03224123 | enzyme binding |
| 0.032960492 | intramolecular oxidoreductase activity, |
| | interconverting aldoses and ketoses |
| 0.033338633 | CTP synthase activity |
| 0.033543885 | arginine biosynthetic process |
| 0.034237777 | condensed chromosome, pericentric region |
| 0.034478999 | Rab GTPase binding |
| 5UTR_under | p-value cut off for FDR < 0.05 is: 0.000089723 |
| 2.03E−11 | structural constituent of ribosome |
| 1.51E−07 | cytosolic part |
| 2.48E−07 | ribosome |
| 7.99E−07 | large ribosomal subunit |
| 2.02E−06 | eukaryotic 48S initiation complex |
| 2.20E−06 | translation |
| 4.09E−06 | cytosolic large ribosomal subunit |
| | (sensu Eukaryota) |
| 7.20E−06 | small ribosomal subunit |
| 8.97E−05 | ribonucleoprotein complex |
| 0.000367609 | non-membrane-bound organelle |
| 0.000389687 | cytosol |
| 0.003542231 | glucose transporter activity |
| 0.003542231 | sugar transporter activity |
| 0.003622177 | organelle envelope lumen |
| 0.007340989 | transferase activity, transferring |
| | amino-acyl groups |
| 0.007997786 | macromolecule biosynthetic process |
| 0.008214458 | nucleosome assembly |
| 0.00996107 | nucleotide salvage |
| 0.012316766 | vacuole fusion, non-autophagic |
| 0.012538545 | transferase activity, transferring |
| | pentosyl groups |
| 0.012639188 | endonuclease activity |
| 0.012889267 | ubiquinone metabolic process |
| 0.014278032 | incipient bud site |
| 0.01562772 | cation: cation antiporter activity |
| 0.01562772 | monovalent cation:proton antiporter activity |
| 0.01580949 | GTP binding |
| 0.016047657 | H3/H4 histone acetyltransferase activity |
| 0.016284862 | macromolecule metabolic process |
| 0.016529259 | mitochondrial electron transport chain |
| 0.017350402 | serine hydrolase activity |
| 0.018444916 | Noc complex |
| 0.019652579 | mitochondrial membrane organization |
| | and biogenesis |
| 0.019700762 | extrinsic to organelle membrane |
| 0.01975247 | mitochondrial intermembrane space protein |
| | transporter complex |
| 0.020330901 | hexose transport |
| 0.022236721 | potassium ion transporter activity |
| 0.022236721 | pyruvate kinase activity |
| 0.022518483 | ribonucleoprotein binding |
| 0.022518483 | signal recognition particle binding |
| 0.023712751 | electron transport |
| 0.029939285 | histone acetyltransferase activity |
| 0.031186126 | inner mitochondrial membrane organization and |
| | biogenesis |
| 0.031186126 | protein import into mitochondrial inner membrane |
| 0.032096015 | purine nucleotide salvage |
| 0.032326688 | regulation of proteolysis |
| 0.032382639 | potassium ion homeostasis |
| 0.032598121 | organellar ribosome |
| 0.033881374 | peptidyltransferase activity |
| 0.033947186 | propionate metabolic process |
| 0.035160959 | glycogen biosynthetic process |
| CDS_under | p-value cut off for FDR < 0.05 is: 0.000059318 |
| 7.36E−09 | organellar ribosome |
| 2.10E−06 | organellar large ribosomal subunit |
| 5.93E−05 | DNA-dependent DNA replication |
| 0.000279759 | endonuclease activity |
| 0.000475526 | N-acyltransferase activity |
| 0.000500567 | mitochondrial part |
| 0.000622771 | DNA replication |
| 0.000683981 | mitochondrion |
| 0.000725939 | nuclease activity |
| 0.000811079 | histone acetyltransferase activity |
| 0.000930727 | nucleoplasm |
| 0.000984124 | organellar small ribosomal subunit |
| 0.001081724 | acetyltransferase activity |
| 0.001318414 | transcription factor complex |
| 0.001679761 | organelle inner membrane |
| 0.002721625 | protein tyrosine phosphatase activity |
| 0.003106832 | DNA repair |
| 0.003937244 | DNA strand elongation |
| 0.004379707 | endoribonuclease activity |
| 0.004700336 | replication fork |
| 0.004783396 | extrinsic to organelle membrane |
| 0.00518612 | thiol-disulfide exchange intermediate activity |
| 0.005603358 | GINS complex |
| 0.005712685 | Smc5-Smc6 complex |
| 0.00578419 | coenzyme biosynthetic process |
| 0.006017568 | protein amino acid acetylation |
| 0.006726906 | transcription factor TFIIH complex |
| 0.006742436 | sulfur utilization |
| 0.007800927 | transferase activity, transferring |
| | amino-acyl groups |
| 0.008018034 | ribonuclease activity |
| 0.008074945 | mitochondrial inner membrane protein insertion |
| | complex |
| 0.008140021 | mitochondrial lumen |
| 0.008344143 | protein methyltransferase activity |
| 0.008454898 | condensed chromosome |
| 0.008583497 | protein modification |
| 0.008590118 | protein amino acid acylation |
| 0.009611525 | mitochondrial inner membrane peptidase complex |
| 0.009692241 | endonuclease activity, active with either ribo- |
| | or deoxyribonucleic acids and producing |
| | 3-phosphomonoesters |
| 0.009692241 | tRNA-intron endonuclease complex |
| 0.010731481 | DNA metabolic process |
| 0.01087757 | H3/H4 histone acetyltransferase activity |
| 0.011090259 | lagging strand elongation |
| 0.011562966 | tRNA-specific ribonuclease activity |
| 0.011639807 | protein acetyltransferase complex |
| 0.012067095 | post-translational protein modification |
| 0.012087132 | mitochondrial protein processing |
| 0.012446309 | coenzyme A metabolic process |
| 0.0126325 | chromosome |
| 0.012787202 | replisome |
| 0.012952384 | vitamin biosynthetic process |

[0270] Predicted structure data—The Vienna package [I. L. Hofacker, M. Fekete, P. F. Stadler, J Mol Biol 319, 1059 (Jun. 21, 2002)] was used to fold transcripts, calculate the partition function of the structures ensemble and base pairing probabilities. Global and local (folding in selected short sliding windows) folding schemes were examined. To compute the pairing probability of a nucleotide the transcript was re-folded for every window, the window was moved a single base-pair at a time, and the average pairability reported for that nucleotide was taken across all windows that cover it.

[0271] Periodicity and codon signature—Periodicity analysis was done by a straightforward application of Discrete Fourier Transform to the average PARS score collected from the following genomic features: last 100 bases of the 5′ UTR, first 200 bases of the coding sequence, 100 first bases of the 3′ UTR.

[0272] The codon signature shown in the inset of FIG. 5C was computed by separately averaging the PARS score reported for each codon position, collected from the entire coding sequence of each of the 3000 mRNAs that went into our analysis. The reported p-values are computed by applying a t-test on the distribution of PARS scores of the different codon positions.

[0273] Clustering structure profiles—The present inventors applied k-means clustering to the structural profiles of all genes whose 5′ UTR is at least 50 bases long. To bring all profiles to the same baseline the present inventors used a relative PARS score, which is obtained by subtracting the average PARS score of the gene from each nucleotide. To account for missing values in the clustering, the present inventors first smoothed the profile by interpolating neighboring data (±10 window average) to assign a PARS score to bases that were unmappable. No missing values are required for further analysis.

[0274] Nucleotide-resolution raw reads and PARS scores for the 3000 genes included in our analysis can be visualized and downloaded at Hypertext Transfer Protocol://genie (dot) weizmann (dot) ac (dot) il/pubs/PARS010.

### Example I

### Parallel Analysis of RNA Structure

[0275] The following example describes a method of predicting the pairability (pairness, i.e., being in a base-pair or not) of each nucleotide of an RNA molecule (RNA polynucleotide) according to some embodiments of the invention which can be used to determine the secondary structure of an RNA molecule.

[0276] Determination of pairability of RNA molecules using a single enzyme—In the first step, a pool of different RNA species whose structural properties is to be measured is treated with one of several enzymes that cleaves specific RNA structures (e.g., enzymes that cleave at paired nucleotides). Next, the digested RNA pool is size-fractionated on a gel to select bands of a specified size range, followed by conversion of the RNA molecules to DNA, and subjecting the DNA to deep-sequencing to read millions of digested fragments. Finally, the millions of sequence reads are map to the reference genome, and these mapped sequences are used to estimate the pairability of every nucleotide in each of the original RNAs, based on the number of times that the sequences mapped to every nucleotide. For example, a nucleotide that appeared as the first base in a large number of the read sequences upon treatment with an enzyme that specifically cleaves paired bases, is likely to be paired to some other nucleotide in the original RNA structure.

[0277] FIGS. 1A-F schematically illustrate the basic method steps according to some embodiments of the invention. The method consists of two main stages. The first stage is experimental, where an RNA pool is treated with a structure-specific ribonuclease which cleave the RNA at specific double stranded or single stranded sites (FIG. 1A), is subjected to size-fractionation (FIG. 1B), and conversion to DNA followed by deep-sequencing to read millions of the resulting DNA fragments (FIG. 1C). The second stage is computational, where these millions of read sequences are taken as input, mapped to the reference genome (FIG. 1D) and the positioning and abundance of the mapped sequence is computed using an the algorithm to extract the structural evidence of the RNA. This evidence is then converted to a per-base score representing the pairability profile of the original RNA transcripts (FIG. 1E). For applications that require the secondary structure of the RNAs, rather than their accessibility, the extracted pairability profiles can then be used in conjunction with an RNA folding algorithm (e.g. Hofacker L I., et al. Fast folding and comparison of RNA secondary structures. Monatshefte Fr. Chemie. 125:167-188, 1994; Do C B., Woods D A., et al. CONTRAfold: RNA seconday structure prediction without physics-based models. Bioinfomatics 22:90-98, 2006) to construct a pairability-constrained secondary structure of the original RNA transcript (FIG. 1F).

### Example 2

### High-Throughput Measurement of RNA Structure Using One or Two Specific RNases

[0278] RNA structure in vivo is influenced by many factors. As a starting point for high throughput measurement of RNA structure, the present inventors have focused on RNA structures that may be strongly specified by the primary sequence of RNA itself. To simultaneously measure structural properties of many different RNAs from yeast, the present inventors extracted poly-adenylated transcripts from log-phase growing yeast, renatured the transcripts in vitro by standard methods in the presence of 10 mM Mg²⁺, and treated the resulting pool with RNase V1 and separately, with RNase S1. RNase V1 preferentially cleaves phosphodiester bonds 3′ of double-stranded RNA, while RNase S1 preferentially cleaves 3′ of single-stranded RNA. Obtaining data from these two independent and complementary enzymes allows the measurement of the degree to which each nucleotide is in a single- or double-stranded conformation (FIGS. 2A-D). Renaturation and enzymatic cleavage conditions were such that the cleavage reactions occur with single-hit kinetics (FIGS. 7A-B and where intramolecular RNA-RNA interactions are observed without heterotypic intermolecular interactions in the complex RNA pool (FIGS. 7C-D). For control, the present inventors used two additional RNA molecules, one, with a known secondary structure (Tetrahymena group I intron ribozyme) and the other with an unknown secondary structure (HOTAIR).

[0279] A splinted ligation method was used to specifically ligate V1 and S1 cleaved RNA to adaptors. The ligation was performed using T4 RNA Ligase 2 [also known as T4 Rn12 (gp24.1)], which exhibits both intermolecular and intramolecular RNA strand joining activity and which requires an adjacent 5′ phosphate and 3′ OH for ligation [Hypertext Transfer Protocol://World Wide Web (dot) neb (dot) com/nebecomm/products/productM0239 (dot) asp)]. The ligated RNA fragments were converted into cDNA libraries suitable for deep sequencing. As both enzymes leave a 5′ phosphate at the cleavage point and since only 5′ phosphoryl-terminated RNA are capable of ligating to adaptors, V1- and S1-cleaved fragments were enriched and selected against random fragmentation and degradation products that typically have 5′ hydroxyl (FIGS. 8A-B). Thus, each observed cleavage site provides evidence that the nucleotide which precedes the cleavage site (i.e., which is located 5′ of the cleavage site) on the uncut RNA molecule was in a double-stranded (for V1-treated samples) or single-stranded (for S1-treated samples) conformation. By combining many such evidence points a quantitative measure at nucleotide resolution was obtained that represents the degree to which a nucleotide was in a double- or single-stranded conformation.

[0280] Next, a scoring scheme was sought to allow the merge the results of the complementary RNase V1 and RNase S1 experiments into a single score describing the probability that each nucleotide was in a double- or single-stranded conformation. Ideally, such a scoring scheme should cancel non-specific cleavage present in both experiments and be invariant to transcript abundance. The scoring scheme is based on the ratio between the number of reads obtained for each nucleotide in the two experiments. For each nucleotide, the log of this ratio was used to define its PARS score, such that positive and higher PARS scores denote higher probabilities for nucleotides to be in double-stranded conformation while negative PARS scores suggest that the nucleotide was in a single-stranded conformation.

[0281] Four independent V1 experiments and three independent Si experiments were performed, resulting in a total of ˜85 million sequence reads that map to the yeast genome, of which ˜97% mapped to annotated transcripts (Tables 1 and 2 above).

[0282] The degree to which each base is cleaved by V1 or S1 was reproducible across the biological replicates (correlation=0.60−0.93, Table 4).

TABLE 4
Reproducibility of PARS signal at single nucleotide resolution

| | | Correlation |
|---|---|---|
| RNase S1 rep. 1 | RNase S1 rep. 2 | 0.93 |
| RNase S1 rep. 1 | RNase S1 rep. 3 | 0.76 |
| RNase S1 rep. 2 | RNase S1 rep. 3 | 0.60 |
| RNase V1 rep. 1 | RNase V1 rep. 2 | 0.75 |
| RNase V1 rep. 1 | RNase V1 rep. 3 | 0.73 |
| RNase V1 rep. 1 | RNase V1 rep. 4 | 0.62 |
| RNase V1 rep. 2 | RNase V1 rep. 3 | 0.91 |
| RNase V1 rep. 2 | RNase V1 rep. 4 | 0.61 |
| RNase V1 rep. 3 | RNase V1 rep. 4 | 0.64 |

[0283] By combining the reads obtained across all replicates, PARS is able to provide per-nucleotide structural measurements for transcripts whose average nucleotide coverage is above 1.0 (Table 5, FIG. 9A).

TABLE 5
List of genes for which the RNA secondary structure was resolved by the method of the invention

| | SEQ | | | | | SEQ | | | |
|---|---|---|---|---|---|---|---|---|---|
| | ID | | | | | ID | | | |
| Gene | NO: | Length | Reads | Load | Gene | NO: | Length | Reads | Load |
| YAL003W | 79 | 844 | 111,557 | 132.18 | YJL143W | 1728 | 834 | 6,493 | 7.79 |
| YAL005C | 76 | 2,120 | 26,722 | 33.59 | YJL145W | 1729 | 991 | 3,500 | 3.53 |
| YAL007C | 75 | 842 | 5,414 | 6.43 | YJL148W | 1730 | 807 | 1,911 | 2.37 |
| YAL009W | 80 | 921 | 1,527 | 1.66 | YJL151C | 1648 | 471 | 16,613 | 35.27 |
| YAL012W | 81 | 1,352 | 63,777 | 47.17 | YJL154C | 1647 | 2,918 | 4,022 | 1.38 |
| YAL013W | 82 | 1,338 | 1,364 | 1.02 | YJL157C | 1646 | 2,628 | 6,839 | 2.60 |
| YAL014C | 74 | 950 | 2,960 | 3.12 | YJL158C | 1645 | 876 | 51,412 | 61.58 |
| YAL015C | 73 | 1,315 | 1,353 | 1.03 | YJL159W | 1731 | 1,601 | 66,741 | 53.74 |
| YAL016W | 83 | 1,978 | 7,226 | 3.65 | YJL166W | 1732 | 550 | 4,932 | 8.97 |
| YAL020C | 72 | 1,053 | 2,292 | 2.18 | YJL167W | 1733 | 1,211 | 14,097 | 11.64 |
| YAL021C | 71 | 2,783 | 8,059 | 2.93 | YJL171C | 1644 | 1,408 | 5,610 | 3.98 |
| YAL022C | 70 | 1,627 | 11,859 | 7.29 | YJL172W | 1734 | 1,898 | 20,735 | 10.98 |
| YAL023C | 69 | 2,475 | 33,893 | 13.70 | YJL173C | 1643 | 428 | 3,160 | 7.38 |
| YAL025C | 68 | 1,110 | 1,141 | 1.03 | YJL174W | 1735 | 1,118 | 10,997 | 9.84 |
| YAL026C | 67 | 4,282 | 4,954 | 1.16 | YJL177W | 1736 | 690 | 28,003 | 49.80 |
| YAL029C | 66 | 4,499 | 6,673 | 1.48 | YJL178C | 1642 | 937 | 5,828 | 6.22 |
| YAL030W | 84 | 482 | 1,097 | 2.28 | YJL179W | 1737 | 508 | 1,043 | 2.05 |
| YAL032C | 65 | 1,209 | 1,513 | 1.25 | YJL183W | 1738 | 1,410 | 13,233 | 9.38 |
| YAL033W | 85 | 613 | 1,367 | 2.23 | YJL184W | 1739 | 476 | 868 | 1.82 |
| YAL035W | 86 | 3,134 | 8,548 | 2.73 | YJL186W | 1740 | 1,875 | 14,869 | 7.93 |
| YAL036C | 64 | 1,297 | 8,401 | 6.48 | YJL189W | 30 | 321 | 121,564 | 385.47 |
| YAL038W | 9 | 1,698 | 686,228 | 404.26 | YJL190C | 31 | 534 | 97,239 | 211.24 |
| YAL039C | 63 | 897 | 1,593 | 1.78 | YJL191W | 1741 | 540 | 12,108 | 30.62 |
| YAL040C | 62 | 2,073 | 2,468 | 1.19 | YJL192C | 1641 | 800 | 10,364 | 12.95 |
| YAL041W | 87 | 2,711 | 3,616 | 1.33 | YJL193W | 1742 | 1,440 | 1,930 | 1.34 |
| YAL042W | 88 | 1,332 | 31,968 | 24.00 | YJL196C | 1640 | 1,088 | 11,542 | 10.61 |
| YAL043C | 61 | 2,466 | 4,850 | 1.97 | YJL198W | 1743 | 2,889 | 9,452 | 3.28 |
| YAL044C | 60 | 581 | 15,522 | 26.72 | YJL200C | 1639 | 2,542 | 8,410 | 3.31 |
| YAL044W-A | 89 | 446 | 2,645 | 5.93 | YJL205C | 1638 | 309 | 620 | 2.01 |
| YAL046C | 59 | 524 | 2,177 | 4.15 | YJL210W | 1744 | 881 | 3,270 | 3.71 |
| YAL049C | 58 | 890 | 4,429 | 4.98 | YJL212C | 1637 | 2,532 | 8,389 | 3.31 |
| YAL053W | 90 | 2,514 | 6,080 | 2.42 | YJL217W | 1745 | 792 | 3,606 | 4.55 |
| YAL058W | 91 | 1,614 | 9,361 | 5.80 | YJR001W | 1746 | 1,951 | 15,028 | 7.70 |
| YAL059W | 92 | 740 | 1,891 | 2.55 | YJR002W | 1747 | 2,160 | 3,654 | 1.69 |
| YAL060W | 93 | 1,353 | 9,178 | 6.78 | YJR004C | 1636 | 2,091 | 59,114 | 28.27 |
| YAR002C-A | 57 | 763 | 21,418 | 28.07 | YJR005W | 1748 | 2,441 | 2,635 | 1.08 |
| YAR002W | 94 | 1,746 | 4,086 | 2.34 | YJR006W | 1749 | 1,527 | 1,554 | 1.02 |
| YAR003W | 95 | 1,806 | 5,369 | 2.97 | YJR007W | 1750 | 1,170 | 7,939 | 6.79 |
| YAR007C | 56 | 1,983 | 6,647 | 3.35 | YJR009C | 1635 | 1,129 | 43,752 | 127.93 |
| YAR014C | 55 | 2,443 | 2,893 | 1.18 | YJR010C-A | 1634 | 498 | 2,578 | 5.22 |
| YAR015W | 96 | 1,052 | 8,539 | 8.12 | YJR010W | 1751 | 1,777 | 2,269 | 1.28 |
| YAR027W | 97 | 895 | 2,050 | 2.33 | YJR013W | 1752 | 1,301 | 2,646 | 2.03 |
| YAR028W | 98 | 950 | 2,574 | 2.72 | YJR014W | 1753 | 736 | 2,904 | 3.95 |
| YAR068W | 99 | 486 | 1,138 | 2.58 | YJR015W | 1754 | 1,666 | 17,588 | 10.56 |
| YAR071W | 100 | 1,404 | 1,118 | 3.34 | YJR016C | 1633 | 1,910 | 25,953 | 13.59 |
| YBL001C | 225 | 423 | 3,985 | 9.42 | YJR017C | 1632 | 754 | 6,566 | 8.71 |
| YBL002W | 237 | 635 | 24,082 | 38.73 | YJR019C | 1631 | 1,121 | 2,046 | 1.82 |
| YBL003C | 224 | 611 | 17,413 | 35.41 | YJR021C | 1630 | 1,148 | 1,157 | 1.01 |
| YBL006C | 223 | 716 | 4,495 | 6.28 | YJR024C | 1629 | 849 | 8,258 | 9.81 |
| YBL007C | 222 | 3,794 | 18,494 | 4.89 | YJR025C | 1628 | 729 | 1,434 | 1.97 |
| YBL008W-A | 238 | 240 | 296 | 1.23 | YJR040W | 1755 | 2,443 | 3,702 | 1.51 |
| YBL009W | 239 | 2,187 | 2,629 | 1.20 | YJR041C | 1627 | 3,786 | 3,866 | 1.02 |
| YBL011W | 240 | 2,486 | 6,116 | 2.47 | YJR042W | 1756 | 2,391 | 3,834 | 1.60 |
| YBL015W | 241 | 1,901 | 2,836 | 1.49 | YJR044C | 1626 | 644 | 3,644 | 5.66 |
| YBL016W | 242 | 1,418 | 3,514 | 2.48 | YJR045C | 1625 | 2,302 | 48,822 | 21.71 |
| YBL017C | 221 | 4,971 | 13,594 | 2.75 | YJR046W | 1757 | 1,894 | 4,104 | 2.17 |
| YBL018C | 220 | 468 | 1,342 | 2.87 | YJR047C | 1624 | 604 | 3,705 | 7.46 |
| YBL020W | 243 | 1,961 | 4,046 | 2.06 | YJR048W | 1758 | 1,272 | 3,591 | 2.83 |
| YBL022C | 219 | 3,572 | 8,467 | 2.37 | YJR049C | 1623 | 1,774 | 1,885 | 1.06 |
| YBL024W | 244 | 2,255 | 5,340 | 2.37 | YJR051W | 1759 | 1,578 | 2,745 | 1.74 |
| YBL025W | 245 | 637 | 803 | 1.26 | YJR057W | 1760 | 741 | 1,897 | 2.56 |
| YBL026W | 246 | 481 | 998 | 2.07 | YJR058C | 1622 | 537 | 1,337 | 2.49 |
| YBL027W | 247 | 684 | 46,917 | 96.71 | YJR059W | 1761 | 2,643 | 4,009 | 1.52 |
| YBL028C | 218 | 549 | 1,402 | 2.55 | YJR060W | 1762 | 1,769 | 3,342 | 1.89 |
| YBL030C | 217 | 1,323 | 12,048 | 9.11 | YJR062C | 1621 | 1,450 | 1,823 | 1.26 |
| YBL032W | 248 | 1,395 | 13,060 | 9.36 | YJR063W | 1763 | 551 | 3,897 | 7.07 |
| YBL033C | 216 | 1,130 | 2,129 | 1.88 | YJR064W | 1764 | 1,782 | 29,691 | 16.66 |
| YBL035C | 215 | 2,364 | 2,855 | 1.21 | YJR065C | 1620 | 1,490 | 16,777 | 11.26 |
| YBL036C | 214 | 924 | 1,773 | 1.92 | YJR067C | 1619 | 525 | 538 | 1.02 |
| YBL038W | 249 | 812 | 1,561 | 1.92 | YJR068W | 1765 | 1,326 | 2,572 | 1.94 |
| YBL039C | 213 | 1,875 | 25,229 | 13.46 | YJR069C | 1618 | 755 | 2,223 | 2.94 |
| YBL040C | 212 | 761 | 12,537 | 16.47 | YJR070C | 1617 | 1,086 | 15,179 | 13.98 |
| YBL041W | 250 | 816 | 6,338 | 7.77 | YJR072C | 1616 | 1,221 | 5,525 | 4.52 |
| YBL042C | 211 | 2,138 | 5,298 | 2.48 | YJR073C | 1615 | 711 | 5,373 | 7.56 |
| YBL045C | 210 | 1,733 | 9,414 | 5.43 | YJR074W | 1766 | 762 | 1,768 | 2.32 |
| YBL047C | 209 | 4,513 | 13,645 | 3.02 | YJR075W | 1767 | 1,438 | 13,303 | 9.25 |
| YBL050W | 251 | 1,017 | 3,739 | 3.68 | YJR076C | 1614 | 1,410 | 2,537 | 1.80 |
| YBL054W | 252 | 1,874 | 3,002 | 1.60 | YJR077C | 1613 | 1,211 | 16,128 | 13.32 |
| YBL055C | 208 | 1,421 | 2,508 | 1.76 | YJR080C | 1612 | 1,328 | 2,003 | 1.51 |
| YBL056W | 253 | 1,882 | 9,388 | 5.00 | YJR085C | 1611 | 386 | 6,297 | 16.31 |
| YBL057C | 207 | 702 | 4,740 | 6.75 | YJR086W | 1768 | 401 | 467 | 1.20 |
| YBL058W | 254 | 1,419 | 12,088 | 8.52 | YJR088C | 1610 | 1,015 | 1,884 | 1.86 |
| YBL059C-A | 206 | 563 | 1,260 | 2.24 | YJR091C | 1609 | 3,457 | 4,397 | 1.27 |
| YBL061C | 205 | 2,271 | 2,900 | 1.28 | YJR094W-A | 1769 | 450 | 50,650 | 122.30 |
| YBL064C | 204 | 868 | 3,360 | 3.87 | YJR096W | 1770 | 1,052 | 1,593 | 1.51 |
| YBL068W | 255 | 1,122 | 4,617 | 4.12 | YJR100C | 1608 | 1,093 | 1,110 | 1.01 |
| YBL069W | 256 | 1,429 | 2,752 | 1.93 | YJR101W | 1771 | 1,027 | 2,768 | 2.70 |
| YBL071W-A | 257 | 533 | 2,257 | 4.23 | YJR103W | 1772 | 1,896 | 6,236 | 3.29 |
| YBL072C | 203 | 1,003 | 29,468 | 56.82 | YJR104C | 1607 | 542 | 79,233 | 146.19 |
| YBL076C | 202 | 3,301 | 44,561 | 13.50 | YJR105W | 1773 | 1,103 | 81,270 | 73.68 |
| YBL079W | 258 | 4,816 | 4,859 | 1.01 | YJR109C | 1606 | 3,526 | 4,263 | 1.21 |
| YBL082C | 201 | 1,377 | 4,958 | 3.60 | YJR112W-A | 1774 | 462 | 1,697 | 3.67 |
| YBL087C | 200 | 504 | 38,789 | 119.98 | YJR113C | 1605 | 858 | 3,884 | 4.53 |
| YBL089W | 259 | 1,475 | 2,001 | 1.36 | YJR116W | 1775 | 1,189 | 2,130 | 1.83 |
| YBL091C | 199 | 1,367 | 7,109 | 5.20 | YJR117W | 1776 | 1,494 | 10,531 | 7.05 |
| YBL092W | 260 | 797 | 109,788 | 137.82 | YJR118C | 1604 | 760 | 2,320 | 3.05 |
| YBL093C | 198 | 905 | 2,149 | 2.38 | YJR120W | 1777 | 351 | 863 | 2.46 |
| YBL095W | 261 | 933 | 1,182 | 1.27 | YJR121W | 1778 | 1,607 | 56,586 | 35.22 |
| YBL098W | 262 | 1,529 | 2,317 | 1.52 | YJR123W | 32 | 844 | 341,441 | 406.40 |
| YBL099W | 263 | 2,203 | 16,989 | 7.71 | YJR124C | 1603 | 1,628 | 5,713 | 3.51 |
| YBL102W | 264 | 887 | 5,631 | 6.35 | YJR125C | 1602 | 1,352 | 5,034 | 3.72 |
| YBR002C | 197 | 1,000 | 1,135 | 1.14 | YJR126C | 1601 | 2,436 | 4,160 | 1.71 |
| YBR003W | 265 | 1,575 | 2,783 | 1.77 | YJR131W | 1779 | 1,706 | 2,426 | 1.42 |
| YBR004C | 196 | 1,447 | 1,770 | 1.22 | YJR132W | 1780 | 3,388 | 6,091 | 1.80 |
| YBR005W | 266 | 823 | 1,055 | 1.28 | YJR133W | 1781 | 827 | 3,363 | 4.07 |
| YBR009C | 195 | 484 | 9,431 | 29.11 | YJR135W-A | 1782 | 386 | 1,433 | 3.71 |
| YBR010W | 267 | 582 | 20,844 | 45.89 | YJR137C | 1600 | 4,436 | 6,256 | 1.41 |
| YBR011C | 194 | 965 | 46,247 | 47.92 | YJR139C | 1599 | 1,208 | 57,459 | 48.69 |
| YBR014C | 193 | 760 | 2,525 | 3.32 | YJR141W | 1783 | 1,189 | 1,242 | 1.04 |
| YBR015C | 192 | 2,031 | 11,419 | 5.62 | YJR142W | 1784 | 1,143 | 1,440 | 1.26 |
| YBR016W | 268 | 633 | 2,457 | 3.88 | YJR143C | 1598 | 2,463 | 30,081 | 12.21 |
| YBR017C | 191 | 2,883 | 5,637 | 1.96 | YJR144W | 1785 | 901 | 4,198 | 4.66 |
| YBR022W | 269 | 769 | 1,260 | 1.64 | YJR145C | 1597 | 876 | 30,916 | 104.25 |
| YBR023C | 190 | 3,668 | 12,932 | 3.53 | YJR147W | 1786 | 1,425 | 3,274 | 2.30 |
| YBR025C | 189 | 1,408 | 26,229 | 18.63 | YJR148W | 1787 | 1,240 | 26,603 | 21.46 |
| YBR026C | 188 | 1,235 | 2,922 | 2.37 | YKL001C | 1867 | 690 | 2,793 | 4.05 |
| YBR028C | 187 | 1,578 | 2,344 | 1.48 | YKL002W | 1879 | 855 | 1,789 | 2.09 |
| YBR029C | 186 | 2,180 | 6,534 | 3.00 | YKL003C | 1866 | 485 | 909 | 1.87 |
| YBR030W | 270 | 1,838 | 2,673 | 1.47 | YKL004W | 1880 | 1,698 | 17,427 | 10.26 |
| YBR031W | 271 | 1,353 | 31,080 | 77.78 | YKL006C-A | 1865 | 366 | 1,243 | 3.40 |
| YBR034C | 185 | 1,223 | 8,612 | 7.04 | YKL006W | 1881 | 556 | 33,582 | 105.55 |
| YBR035C | 184 | 803 | 6,038 | 7.52 | YKL007W | 1882 | 967 | 2,915 | 3.01 |
| YBR036C | 183 | 1,339 | 18,960 | 14.16 | YKL008C | 1864 | 1,464 | 14,995 | 10.24 |
| YBR037C | 182 | 960 | 1,756 | 1.83 | YKL009W | 1883 | 847 | 4,365 | 5.15 |
| YBR038W | 272 | 3,158 | 5,765 | 1.83 | YKL013C | 1863 | 697 | 9,426 | 13.52 |
| YBR039W | 273 | 1,208 | 6,780 | 5.61 | YKL016C | 1862 | 663 | 5,919 | 8.93 |
| YBR041W | 274 | 2,240 | 8,469 | 3.78 | YKL018W | 1884 | 1,162 | 3,462 | 2.98 |
| YBR042C | 181 | 1,285 | 4,717 | 3.67 | YKL019W | 1885 | 1,103 | 5,597 | 5.07 |
| YBR043C | 180 | 2,345 | 4,837 | 2.06 | YKL021C | 1861 | 1,473 | 1,892 | 1.28 |
| YBR046C | 179 | 1,082 | 1,228 | 1.13 | YKL024C | 1860 | 923 | 7,323 | 9.19 |
| YBR048W | 275 | 709 | 30,820 | 59.95 | YKL025C | 1859 | 2,082 | 2,249 | 1.08 |
| YBR052C | 178 | 709 | 7,026 | 9.91 | YKL027W | 1886 | 1,453 | 2,450 | 1.69 |
| YBR053C | 177 | 1,171 | 3,416 | 2.92 | YKL028W | 1887 | 1,789 | 1,828 | 1.03 |
| YBR054W | 276 | 1,713 | 3,653 | 2.14 | YKL029C | 1858 | 2,055 | 8,655 | 4.21 |
| YBR056W | 277 | 1,582 | 4,828 | 3.05 | YKL032C | 1857 | 2,111 | 2,193 | 1.08 |
| YBR058C | 176 | 2,393 | 3,951 | 1.65 | YKL033W-A | 1888 | 870 | 11,977 | 13.77 |
| YBR058C-A | 175 | 396 | 2,076 | 5.24 | YKL034W | 1889 | 2,394 | 3,240 | 1.35 |
| YBR061C | 174 | 1,144 | 2,193 | 1.92 | YKL035W | 1890 | 1,742 | 38,209 | 21.93 |
| YBR062C | 173 | 637 | 1,103 | 1.73 | YKL039W | 1891 | 1,966 | 6,145 | 3.12 |
| YBR067C | 172 | 773 | 16,386 | 21.44 | YKL040C | 1856 | 1,428 | 3,179 | 2.23 |
| YBR068C | 171 | 2,082 | 12,769 | 6.13 | YKL043W | 1892 | 1,259 | 3,288 | 2.61 |
| YBR069C | 170 | 2,068 | 28,207 | 13.65 | YKL045W | 1893 | 1,783 | 1,959 | 1.10 |
| YBR070C | 169 | 797 | 2,059 | 2.58 | YKL046C | 1855 | 1,609 | 9,714 | 6.04 |
| YBR071W | 278 | 957 | 1,666 | 1.74 | YKL047W | 1894 | 1,748 | 3,050 | 1.74 |
| YBR072W | 279 | 870 | 1,392 | 1.60 | YKL051W | 1895 | 1,616 | 2,892 | 1.79 |
| YBR073W | 280 | 2,914 | 3,674 | 1.26 | YKL052C | 1854 | 929 | 1,199 | 1.29 |
| YBR074W | 281 | 2,962 | 8,492 | 2.87 | YKL053C-A | 1853 | 424 | 1,788 | 4.22 |
| YBR077C | 168 | 814 | 17,955 | 22.06 | YKL054C | 1852 | 2,490 | 3,264 | 1.35 |
| YBR078W | 282 | 1,611 | 71,735 | 44.53 | YKL056C | 1851 | 765 | 380,923 | 498.20 |
| YBR079C | 167 | 2,985 | 20,931 | 7.01 | YKL057C | 1850 | 3,186 | 4,441 | 1.39 |
| YBR080C | 166 | 2,420 | 5,725 | 2.36 | YKL058W | 1896 | 747 | 3,153 | 4.22 |
| YBR082C | 165 | 778 | 8,425 | 10.83 | YKL060C | 34 | 1,119 | 1,132,099 | 1011.71 |
| YBR084C-A | 164 | 796 | 34,075 | 57.33 | YKL063C | 1849 | 814 | 977 | 1.20 |
| YBR084W | 283 | 3,160 | 22,587 | 7.15 | YKL065C | 1848 | 681 | 5,018 | 7.37 |
| YBR085C-A | 163 | 649 | 1,586 | 2.44 | YKL067W | 1897 | 714 | 6,952 | 9.74 |
| YBR085W | 284 | 1,182 | 1,203 | 1.02 | YKL068W | 1898 | 3,117 | 4,758 | 1.53 |
| YBR086C | 162 | 3,183 | 16,272 | 5.11 | YKL068W-A | 1899 | 615 | 626 | 1.02 |
| YBR087W | 285 | 1,130 | 3,881 | 3.43 | YKL069W | 1900 | 608 | 1,817 | 2.99 |
| YBR088C | 161 | 805 | 5,687 | 7.06 | YKL073W | 1901 | 2,833 | 5,644 | 1.99 |
| YBR089C-A | 160 | 873 | 2,351 | 2.98 | YKL077W | 1902 | 1,490 | 16,833 | 11.30 |
| YBR091C | 159 | 444 | 1,118 | 2.52 | YKL080W | 1903 | 1,301 | 21,840 | 16.79 |
| YBR092C | 158 | 1,440 | 21,746 | 18.70 | YKL081W | 1904 | 1,474 | 109,763 | 75.30 |
| YBR093C | 157 | 1,488 | 9,946 | 8.77 | YKL084W | 1905 | 516 | 1,590 | 3.11 |
| YBR094W | 286 | 2,409 | 2,729 | 1.13 | YKL085W | 1906 | 1,511 | 11,190 | 7.42 |
| YBR096W | 287 | 847 | 7,305 | 8.62 | YKL087C | 1847 | 949 | 1,349 | 1.42 |
| YBR101C | 156 | 922 | 2,063 | 2.24 | YKL094W | 1907 | 1,057 | 5,041 | 4.77 |
| YBR103W | 288 | 1,608 | 2,013 | 1.25 | YKL096W | 1908 | 866 | 7,857 | 9.07 |
| YBR104W | 289 | 1,137 | 2,656 | 2.34 | YKL096W-A | 1909 | 500 | 50,871 | 103.45 |
| YBR106W | 290 | 753 | 84,557 | 112.29 | YKL098W | 1910 | 1,195 | 1,503 | 1.26 |
| YBR109C | 155 | 644 | 9,243 | 14.35 | YKL099C | 1846 | 906 | 1,137 | 1.25 |
| YBR110W | 291 | 1,451 | 2,914 | 2.01 | YKL100C | 1845 | 1,875 | 6,622 | 3.53 |
| YBR111C | 154 | 779 | 9,472 | 12.16 | YKL103C | 1844 | 1,763 | 3,507 | 1.99 |
| YBR111W-A | 292 | 475 | 592 | 1.25 | YKL104C | 1843 | 2,549 | 14,516 | 5.69 |
| YBR112C | 153 | 3,188 | 4,248 | 1.40 | YKL106W | 1911 | 1,604 | 5,058 | 3.15 |
| YBR115C | 152 | 4,322 | 7,008 | 1.62 | YKL110C | 1842 | 1,237 | 3,331 | 2.69 |
| YBR118W | 293 | 1,479 | 8,363 | 58.90 | YKL112W | 1912 | 3,571 | 3,650 | 1.02 |
| YBR121C | 151 | 2,166 | 27,078 | 12.50 | YKL113C | 1841 | 1,403 | 1,597 | 1.14 |
| YBR122C | 150 | 740 | 2,171 | 2.93 | YKL116C | 1840 | 1,983 | 3,830 | 1.93 |
| YBR125C | 149 | 1,528 | 2,569 | 1.68 | YKL117W | 1913 | 827 | 13,999 | 17.03 |
| YBR126C | 148 | 1,653 | 6,507 | 3.94 | YKL119C | 1839 | 753 | 1,599 | 2.12 |
| YBR127C | 147 | 1,748 | 26,509 | 15.16 | YKL120W | 1914 | 1,249 | 1,527 | 1.22 |
| YBR129C | 146 | 1,136 | 1,514 | 1.33 | YKL122C | 1838 | 593 | 1,147 | 1.93 |
| YBR133C | 145 | 2,549 | 7,447 | 2.92 | YKL126W | 1915 | 2,293 | 13,135 | 5.73 |
| YBR135W | 294 | 658 | 2,608 | 4.10 | YKL127W | 1916 | 1,877 | 10,679 | 5.70 |
| YBR137W | 295 | 895 | 1,654 | 1.85 | YKL128C | 1837 | 1,043 | 5,078 | 4.87 |
| YBR139W | 296 | 1,724 | 5,021 | 2.91 | YKL130C | 1836 | 903 | 2,791 | 3.09 |
| YBR142W | 297 | 2,510 | 3,025 | 1.20 | YKL135C | 1835 | 2,334 | 4,588 | 1.97 |
| YBR143C | 144 | 1,452 | 12,300 | 8.47 | YKL137W | 1917 | 540 | 1,259 | 2.33 |
| YBR145W | 298 | 1,219 | 1,321 | 1.09 | YKL138C | 1834 | 546 | 792 | 1.45 |
| YBR146W | 299 | 1,103 | 3,644 | 3.30 | YKL138C-A | 1833 | 291 | 329 | 1.13 |
| YBR149W | 300 | 1,166 | 12,941 | 11.10 | YKL140W | 1918 | 1,972 | 3,220 | 1.63 |
| YBR151W | 301 | 1,232 | 5,814 | 4.72 | YKL141W | 1919 | 719 | 7,488 | 10.41 |
| YBR154C | 143 | 832 | 2,700 | 3.25 | YKL142W | 1920 | 849 | 5,132 | 6.05 |
| YBR158W | 302 | 2,062 | 13,665 | 6.63 | YKL144C | 1832 | 1,366 | 2,158 | 1.58 |
| YBR159W | 303 | 1,272 | 12,769 | 10.07 | YKL145W | 1921 | 1,618 | 13,819 | 8.54 |
| YBR160W | 304 | 1,054 | 3,142 | 2.98 | YKL146W | 1922 | 2,183 | 5,354 | 2.45 |
| YBR162C | 142 | 1,759 | 41,584 | 23.75 | YKL148C | 1831 | 2,281 | 5,256 | 2.30 |
| YBR162W-A | 305 | 363 | 1,564 | 4.31 | YKL150W | 1923 | 1,163 | 5,186 | 4.46 |
| YBR164C | 141 | 766 | 2,679 | 3.50 | YKL151C | 1830 | 1,353 | 4,482 | 3.33 |
| YBR165W | 306 | 954 | 1,389 | 1.46 | YKL152C | 35 | 872 | 988,496 | 1133.60 |
| YBR166C | 140 | 1,490 | 2,110 | 1.42 | YKL154W | 1924 | 866 | 1,474 | 1.70 |
| YBR170C | 139 | 1,913 | 3,055 | 1.60 | YKL156W | 1925 | 468 | 46,608 | 102.92 |
| YBR171W | 307 | 776 | 1,751 | 2.26 | YKL157W | 1926 | 3,034 | 14,363 | 4.74 |
| YBR172C | 138 | 2,430 | 3,246 | 1.33 | YKL160W | 1927 | 527 | 1,912 | 3.63 |
| YBR173C | 137 | 510 | 2,605 | 5.11 | YKL163W | 1928 | 1,600 | 1,611 | 1.12 |
| YBR175W | 308 | 1,008 | 4,416 | 4.38 | YKL164C | 1829 | 1,336 | 20,454 | 21.36 |
| YBR177C | 136 | 1,473 | 8,000 | 5.43 | YKL165C | 1828 | 2,858 | 7,838 | 2.74 |
| YBR181C | 135 | 810 | 11,269 | 59.27 | YKL166C | 1827 | 1,386 | 2,541 | 1.83 |
| YBR183W | 309 | 1,268 | 1,275 | 1.01 | YKL167C | 1826 | 553 | 671 | 1.21 |
| YBR185C | 134 | 1,004 | 2,046 | 2.04 | YKL170W | 1929 | 630 | 1,158 | 1.84 |
| YBR187W | 310 | 1,047 | 21,173 | 20.22 | YKL172W | 1930 | 1,400 | 1,519 | 1.09 |
| YBR188C | 133 | 539 | 611 | 1.13 | YKL174C | 1825 | 1,982 | 3,084 | 1.56 |
| YBR189W | 311 | 682 | 96,130 | 181.52 | YKL175W | 1931 | 1,633 | 8,633 | 5.29 |
| YBR191W | 312 | 510 | 27,158 | 92.52 | YKL176C | 1824 | 2,870 | 9,995 | 3.48 |
| YBR193C | 132 | 963 | 1,402 | 1.46 | YKL178C | 1823 | 1,413 | 26,412 | 18.69 |
| YBR195C | 131 | 1,359 | 2,482 | 1.83 | YKL180W | 1932 | 691 | 43,083 | 76.45 |
| YBR196C | 130 | 1,846 | 198,210 | 107.37 | YKL181W | 1933 | 1,553 | 30,359 | 19.55 |
| YBR197C | 129 | 820 | 1,383 | 1.69 | YKL182W | 1934 | 6,564 | 96,019 | 14.63 |
| YBR199W | 313 | 1,599 | 8,999 | 5.63 | YKL183W | 1935 | 1,031 | 3,157 | 3.06 |
| YBR200W | 314 | 1,926 | 2,533 | 1.31 | YKL184W | 1936 | 1,625 | 6,923 | 4.26 |
| YBR202W | 315 | 2,778 | 4,267 | 1.54 | YKL186C | 1822 | 999 | 2,811 | 2.81 |
| YBR205W | 316 | 1,215 | 13,342 | 10.98 | YKL190W | 1937 | 731 | 2,297 | 3.14 |
| YBR207W | 317 | 1,550 | 4,175 | 2.69 | YKL191W | 1938 | 1,708 | 11,475 | 6.72 |
| YBR210W | 318 | 672 | 1,584 | 2.39 | YKL192C | 1821 | 522 | 8,634 | 16.56 |
| YBR211C | 128 | 1,166 | 1,193 | 1.03 | YKL194C | 1820 | 1,796 | 2,135 | 1.19 |
| YBR212W | 319 | 2,392 | 2,939 | 1.24 | YKL195W | 1939 | 1,364 | 2,064 | 1.51 |
| YBR214W | 320 | 1,848 | 3,838 | 2.08 | YKL196C | 1819 | 777 | 8,637 | 11.12 |
| YBR218C | 127 | 3,778 | 11,277 | 3.17 | YKL205W | 1940 | 3,536 | 3,557 | 1.01 |
| YBR220C | 126 | 1,958 | 7,869 | 4.36 | YKL206C | 1818 | 887 | 2,353 | 2.65 |
| YBR221C | 125 | 1,518 | 44,619 | 29.40 | YKL207W | 1941 | 837 | 11,416 | 13.64 |
| YBR222C | 124 | 1,846 | 19,866 | 10.76 | YKL210W | 1942 | 3,212 | 26,820 | 8.35 |
| YBR229C | 123 | 2,991 | 6,520 | 2.18 | YKL211C | 1817 | 1,635 | 14,324 | 8.78 |
| YBR230C | 122 | 430 | 2,612 | 6.07 | YKL212W | 1943 | 2,304 | 14,136 | 6.15 |
| YBR230W-A | 321 | 383 | 1,039 | 2.71 | YKL213C | 1816 | 2,237 | 3,143 | 1.40 |
| YBR231C | 121 | 1,011 | 1,085 | 1.07 | YKL214C | 1815 | 708 | 1,733 | 2.45 |
| YBR233W-A | 322 | 560 | 635 | 1.13 | YKL216W | 1944 | 1,216 | 8,056 | 6.62 |
| YBR234C | 120 | 1,247 | 9,436 | 7.57 | YKL219W | 1945 | 1,224 | 1,909 | 1.67 |
| YBR235W | 323 | 3,525 | 5,961 | 1.69 | YKR001C | 1814 | 2,269 | 10,043 | 4.43 |
| YBR236C | 119 | 1,485 | 2,473 | 1.66 | YKR003W | 1946 | 1,475 | 2,005 | 1.36 |
| YBR241C | 118 | 1,599 | 2,399 | 1.50 | YKR006C | 1813 | 864 | 2,481 | 2.87 |
| YBR242W | 324 | 932 | 2,428 | 2.60 | YKR007W | 1947 | 646 | 1,219 | 1.89 |
| YBR243C | 117 | 1,347 | 4,294 | 3.19 | YKR013W | 1948 | 1,229 | 29,669 | 24.16 |
| YBR244W | 325 | 649 | 1,275 | 1.96 | YKR014C | 1812 | 933 | 1,784 | 1.91 |
| YBR246W | 326 | 1,295 | 4,651 | 3.59 | YKR018C | 1811 | 2,357 | 7,218 | 3.06 |
| YBR247C | 116 | 1,550 | 1,942 | 1.25 | YKR025W | 1949 | 989 | 1,930 | 1.95 |
| YBR248C | 115 | 1,790 | 4,899 | 2.74 | YKR026C | 1810 | 1,147 | 2,970 | 2.59 |
| YBR249C | 114 | 1,338 | 41,908 | 31.32 | YKR028W | 1950 | 3,428 | 4,788 | 1.40 |
| YBR251W | 327 | 1,044 | 1,502 | 1.44 | YKR030W | 1951 | 962 | 1,219 | 1.27 |
| YBR252W | 328 | 522 | 8,405 | 16.10 | YKR035W-A | 1952 | 756 | 810 | 1.07 |
| YBR253W | 329 | 506 | 812 | 1.60 | YKR037C | 1809 | 1,012 | 1,395 | 1.38 |
| YBR254C | 113 | 672 | 947 | 1.41 | YKR038C | 1808 | 1,574 | 5,467 | 3.54 |
| YBR256C | 112 | 769 | 3,838 | 4.99 | YKR042W | 1953 | 1,528 | 48,179 | 31.56 |
| YBR260C | 111 | 2,123 | 2,133 | 1.00 | YKR043C | 1807 | 980 | 11,353 | 11.58 |
| YBR261C | 110 | 834 | 4,709 | 5.65 | YKR044W | 1954 | 1,459 | 2,750 | 1.89 |
| YBR262C | 109 | 420 | 1,634 | 3.89 | YKR045C | 1806 | 621 | 1,000 | 1.62 |
| YBR263W | 330 | 1,473 | 11,112 | 7.55 | YKR046C | 1805 | 1,040 | 1,510 | 1.47 |
| YBR264C | 108 | 735 | 764 | 1.04 | YKR048C | 1804 | 1,377 | 15,872 | 11.53 |
| YBR265W | 331 | 1,143 | 5,770 | 5.05 | YKR049C | 1803 | 452 | 1,705 | 3.77 |
| YBR267W | 332 | 1,309 | 2,958 | 2.26 | YKR051W | 1955 | 1,706 | 1,912 | 1.12 |
| YBR268W | 333 | 420 | 1,841 | 4.38 | YKR052C | 1802 | 1,313 | 1,867 | 1.42 |
| YBR269C | 107 | 549 | 1,822 | 3.32 | YKR056W | 1956 | 2,228 | 3,485 | 1.59 |
| YBR272C | 106 | 1,611 | 1,860 | 1.15 | YKR057W | 36 | 477 | 100,574 | 247.73 |
| YBR273C | 105 | 1,438 | 2,089 | 1.45 | YKR059W | 1957 | 1,319 | 8,734 | 28.85 |
| YBR274W | 334 | 1,823 | 2,194 | 1.20 | YKR062W | 1958 | 1,166 | 2,291 | 1.96 |
| YBR276C | 104 | 2,551 | 4,403 | 1.73 | YKR065C | 1801 | 702 | 4,206 | 5.99 |
| YBR278W | 335 | 699 | 835 | 1.19 | YKR066C | 1800 | 1,210 | 10,191 | 8.46 |
| YBR283C | 103 | 1,760 | 43,703 | 24.83 | YKR068C | 1799 | 769 | 1,750 | 2.27 |
| YBR286W | 336 | 1,697 | 88,041 | 51.91 | YKR070W | 1959 | 1,250 | 4,002 | 3.20 |
| YBR287W | 337 | 1,373 | 4,801 | 3.50 | YKR071C | 1798 | 1,341 | 2,349 | 1.75 |
| YBR288C | 102 | 1,560 | 3,343 | 2.14 | YKR074W | 1960 | 625 | 3,853 | 6.17 |
| YBR291C | 101 | 1,091 | 2,217 | 2.03 | YKR079C | 1797 | 2,658 | 3,628 | 1.37 |
| YBR293W | 338 | 2,038 | 2,529 | 1.24 | YKR080W | 1961 | 1,265 | 3,750 | 2.96 |
| YCL001W | 403 | 673 | 3,308 | 4.91 | YKR081C | 1796 | 1,139 | 1,945 | 1.71 |
| YCL002C | 396 | 898 | 3,001 | 3.34 | YKR082W | 1962 | 3,576 | 3,918 | 1.10 |
| YCL005W | 404 | 929 | 4,430 | 4.77 | YKR084C | 1795 | 1,959 | 3,889 | 1.99 |
| YCL005W-A | 405 | 326 | 3,580 | 10.98 | YKR085C | 1794 | 631 | 3,765 | 5.97 |
| YCL008C | 395 | 1,274 | 2,753 | 2.16 | YKR087C | 1793 | 1,156 | 1,861 | 1.61 |
| YCL009C | 394 | 1,003 | 27,839 | 27.75 | YKR088C | 1792 | 1,078 | 4,880 | 4.53 |
| YCL010C | 393 | 873 | 2,023 | 2.32 | YKR089C | 1791 | 2,851 | 3,324 | 1.17 |
| YCL011C | 392 | 1,385 | 10,091 | 7.29 | YKR092C | 1790 | 1,369 | 5,236 | 3.94 |
| YCL012C | 391 | 585 | 647 | 1.11 | YKR093W | 1963 | 2,082 | 7,083 | 3.40 |
| YCL016C | 390 | 1,312 | 1,849 | 1.41 | YKR094C | 1789 | 557 | 31,154 | 91.38 |
| YCL017C | 389 | 1,713 | 7,931 | 4.63 | YKR095W-A | 1964 | 428 | 540 | 1.26 |
| YCL018W | 406 | 1,095 | 3,990 | 3.64 | YKR100C | 1788 | 1,359 | 1,649 | 1.21 |
| YCL025C | 388 | 2,164 | 3,169 | 1.47 | YLL001W | 2126 | 2,479 | 3,306 | 1.33 |
| YCL027W | 407 | 1,628 | 1,859 | 1.14 | YLL006W | 2127 | 1,356 | 1,596 | 1.18 |
| YCL028W | 408 | 1,292 | 6,857 | 5.31 | YLL008W | 2128 | 2,396 | 3,347 | 1.40 |
| YCL030C | 387 | 2,503 | 18,546 | 7.41 | YLL009C | 2094 | 335 | 889 | 2.65 |
| YCL031C | 386 | 1,015 | 1,095 | 1.08 | YLL010C | 2093 | 1,759 | 2,627 | 1.50 |
| YCL033C | 385 | 585 | 3,682 | 6.30 | YLL012W | 2129 | 1,907 | 3,150 | 1.65 |
| YCL034W | 409 | 1,269 | 4,504 | 3.56 | YLL013C | 2092 | 3,240 | 3,443 | 1.07 |
| YCL035C | 384 | 469 | 2,702 | 5.76 | YLL014W | 2130 | 515 | 4,713 | 9.15 |
| YCL036W | 410 | 1,790 | 2,963 | 1.66 | YLL018C | 2091 | 1,831 | 22,136 | 12.09 |
| YCL037C | 383 | 1,522 | 2,074 | 1.37 | YLL018C-A | 2090 | 415 | 1,374 | 3.31 |
| YCL038C | 382 | 1,587 | 1,838 | 1.16 | YLL019C | 2089 | 2,793 | 3,109 | 1.11 |
| YCL040W | 411 | 1,714 | 14,056 | 13.87 | YLL022C | 2088 | 1,288 | 1,554 | 1.21 |
| YCL043C | 381 | 1,682 | 96,962 | 57.67 | YLL023C | 2087 | 976 | 5,492 | 5.63 |
| YCL044C | 380 | 1,428 | 2,359 | 1.65 | YLL024C | 2086 | 2,057 | 53,059 | 71.99 |
| YCL045C | 379 | 2,359 | 16,054 | 6.80 | YLL026W | 2131 | 2,859 | 14,417 | 5.04 |
| YCL047C | 378 | 868 | 948 | 1.09 | YLL027W | 2132 | 948 | 1,626 | 1.71 |
| YCL049C | 377 | 1,190 | 1,376 | 1.16 | YLL028W | 2133 | 2,062 | 4,275 | 2.08 |
| YCL050C | 376 | 1,115 | 5,336 | 4.79 | YLL029W | 2134 | 2,475 | 4,872 | 1.97 |
| YCL052C | 375 | 1,437 | 1,900 | 1.32 | YLL031C | 2085 | 3,259 | 7,747 | 2.38 |
| YCL055W | 412 | 1,316 | 1,360 | 1.03 | YLL033W | 2135 | 693 | 785 | 1.13 |
| YCL057C-A | 374 | 420 | 3,948 | 9.40 | YLL035W | 2136 | 2,189 | 3,363 | 1.54 |
| YCL057W | 413 | 2,283 | 10,889 | 4.77 | YLL036C | 2084 | 1,594 | 2,025 | 1.27 |
| YCL059C | 373 | 1,070 | 1,845 | 1.72 | YLL038C | 2083 | 1,016 | 1,933 | 1.90 |
| YCL064C | 372 | 1,180 | 12,884 | 10.92 | YLL039C | 2082 | 1,353 | 7,510 | 7.78 |
| YCR002C | 371 | 1,042 | 3,911 | 3.75 | YLL041C | 2081 | 1,113 | 4,069 | 3.66 |
| YCR004C | 370 | 1,080 | 19,992 | 18.51 | YLL043W | 2137 | 2,103 | 5,317 | 2.54 |
| YCR005C | 369 | 1,555 | 3,421 | 2.20 | YLL045C | 2080 | 849 | 42,536 | 83.79 |
| YCR008W | 414 | 2,201 | 3,802 | 1.73 | YLL048C | 2079 | 5,243 | 14,241 | 2.72 |
| YCR009C | 368 | 922 | 6,224 | 6.75 | YLL049W | 2138 | 657 | 1,448 | 2.24 |
| YCR011C | 367 | 3,340 | 9,078 | 2.72 | YLL050C | 2078 | 547 | 45,655 | 83.53 |
| YCR012W | 10 | 1,460 | 641,453 | 440.20 | YLL051C | 2077 | 2,373 | 5,170 | 2.18 |
| YCR017C | 366 | 3,077 | 10,990 | 3.57 | YLL053C | 2076 | 460 | 463 | 1.02 |
| YCR018C | 365 | 806 | 918 | 1.14 | YLL058W | 2139 | 1,848 | 1,859 | 1.01 |
| YCR020C | 364 | 686 | 693 | 1.01 | YLL061W | 2140 | 1,814 | 3,249 | 1.79 |
| YCR020C-A | 363 | 421 | 1,406 | 3.34 | YLR002C | 2075 | 2,092 | 2,442 | 1.17 |
| YCR023C | 362 | 2,157 | 6,093 | 2.82 | YLR003C | 2074 | 978 | 993 | 1.01 |
| YCR024C-A | 361 | 123 | 4,160 | 38.62 | YLR005W | 2141 | 1,658 | 2,095 | 1.26 |
| YCR024C-B | 360 | 439 | 4,631 | 10.55 | YLR007W | 2142 | 1,077 | 2,549 | 2.37 |
| YCR026C | 359 | 2,507 | 4,219 | 1.68 | YLR008C | 2073 | 770 | 4,618 | 6.00 |
| YCR027C | 358 | 998 | 1,517 | 1.52 | YLR009W | 2143 | 912 | 2,046 | 2.24 |
| YCR028C | 357 | 1,768 | 6,106 | 3.45 | YLR016C | 2072 | 790 | 1,550 | 1.96 |
| YCR028C-A | 356 | 632 | 7,394 | 11.70 | YLR017W | 2144 | 1,130 | 10,688 | 9.46 |
| YCR030C | 355 | 2,828 | 5,135 | 1.81 | YLR018C | 2071 | 1,058 | 2,504 | 2.37 |
| YCR031C | 11 | 514 | 92,411 | 248.42 | YLR019W | 2145 | 1,422 | 3,435 | 2.41 |
| YCR034W | 415 | 1,240 | 18,764 | 15.13 | YLR020C | 2070 | 1,814 | 3,005 | 1.66 |
| YCR036W | 416 | 1,122 | 2,231 | 1.99 | YLR021W | 2146 | 615 | 1,202 | 1.95 |
| YCR037C | 354 | 2,772 | 4,426 | 1.60 | YLR022C | 2069 | 802 | 2,842 | 3.54 |
| YCR039C | 353 | 633 | 1,292 | 2.04 | YLR023C | 2068 | 1,886 | 2,531 | 1.34 |
| YCR040W | 417 | 528 | 2,146 | 4.06 | YLR027C | 2067 | 1,304 | 43,966 | 33.72 |
| YCR043C | 352 | 575 | 2,752 | 4.79 | YLR028C | 2066 | 2,036 | 26,655 | 13.09 |
| YCR044C | 351 | 1,194 | 6,256 | 5.24 | YLR029C | 2065 | 709 | 62,620 | 130.97 |
| YCR046C | 350 | 615 | 2,560 | 4.16 | YLR034C | 2064 | 1,707 | 4,714 | 2.76 |
| YCR047C | 349 | 1,063 | 2,095 | 1.97 | YLR038C | 2063 | 622 | 1,942 | 3.12 |
| YCR048W | 418 | 2,016 | 7,636 | 3.79 | YLR040C | 2062 | 798 | 10,939 | 13.71 |
| YCR051W | 419 | 809 | 3,862 | 4.77 | YLR043C | 37 | 416 | 80,872 | 195.04 |
| YCR052W | 420 | 1,683 | 5,179 | 3.08 | YLR044C | 38 | 1,778 | 650,942 | 457.33 |
| YCR053W | 421 | 1,633 | 48,458 | 29.69 | YLR046C | 2061 | 1,257 | 1,660 | 1.32 |
| YCR057C | 348 | 2,999 | 7,475 | 2.50 | YLR048W | 2147 | 1,176 | 70,470 | 68.95 |
| YCR059C | 347 | 953 | 10,295 | 10.89 | YLR049C | 2060 | 1,319 | 2,202 | 1.67 |
| YCR060W | 422 | 475 | 2,202 | 4.65 | YLR050C | 2059 | 548 | 4,029 | 7.35 |
| YCR061W | 423 | 2,314 | 4,107 | 1.77 | YLR052W | 2148 | 906 | 1,002 | 1.11 |
| YCR065W | 424 | 1,819 | 4,311 | 2.37 | YLR056W | 2149 | 1,282 | 50,139 | 39.11 |
| YCR067C | 346 | 3,399 | 6,895 | 2.04 | YLR058C | 2058 | 1,566 | 31,070 | 19.85 |
| YCR068W | 425 | 1,563 | 1,949 | 1.25 | YLR059C | 2057 | 980 | 3,948 | 4.03 |
| YCR069W | 426 | 1,287 | 10,322 | 8.02 | YLR060W | 2150 | 2,082 | 38,127 | 18.31 |
| YCR072C | 345 | 1,661 | 4,533 | 2.73 | YLR061W | 39 | 473 | 102,779 | 221.24 |
| YCR073W-A | 427 | 1,077 | 3,224 | 3.02 | YLR064W | 2151 | 950 | 3,440 | 3.62 |
| YCR075C | 344 | 899 | 3,409 | 3.82 | YLR065C | 2056 | 654 | 4,873 | 7.45 |
| YCR075W-A | 428 | 343 | 576 | 1.68 | YLR066W | 2152 | 702 | 3,802 | 5.42 |
| YCR076C | 343 | 856 | 1,104 | 1.29 | YLR069C | 2055 | 2,447 | 2,569 | 1.05 |
| YCR077C | 342 | 2,571 | 8,106 | 3.15 | YLR073C | 2054 | 713 | 1,775 | 2.50 |
| YCR082W | 429 | 516 | 4,468 | 8.67 | YLR074C | 2053 | 568 | 3,365 | 5.92 |
| YCR083W | 430 | 526 | 1,906 | 3.63 | YLR075W | 40 | 814 | 342,918 | 421.27 |
| YCR084C | 341 | 2,668 | 13,302 | 5.01 | YLR077W | 2153 | 1,925 | 2,769 | 1.44 |
| YCR087C-A | 340 | 648 | 1,312 | 2.02 | YLR078C | 2052 | 861 | 2,882 | 3.35 |
| YCR088W | 431 | 1,900 | 5,997 | 3.16 | YLR083C | 2051 | 2,168 | 15,233 | 7.03 |
| YCR090C | 339 | 624 | 4,335 | 6.95 | YLR084C | 2050 | 3,753 | 4,416 | 1.18 |
| YCR094W | 432 | 1,311 | 1,861 | 1.42 | YLR085C | 2049 | 1,412 | 1,499 | 1.06 |
| YDL004W | 627 | 768 | 4,326 | 5.63 | YLR088W | 2154 | 2,058 | 4,968 | 2.41 |
| YDL006W | 628 | 1,296 | 2,120 | 1.64 | YLR089C | 2048 | 2,144 | 5,791 | 2.70 |
| YDL007W | 629 | 1,434 | 4,929 | 3.44 | YLR090W | 2155 | 1,561 | 1,649 | 1.06 |
| YDL008W | 630 | 623 | 1,302 | 2.09 | YLR091W | 2156 | 1,224 | 1,425 | 1.16 |
| YDL012C | 616 | 467 | 1,245 | 2.67 | YLR093C | 2047 | 851 | 2,992 | 3.52 |
| YDL014W | 631 | 1,328 | 31,658 | 24.86 | YLR097C | 2046 | 1,035 | 1,041 | 1.01 |
| YDL015C | 615 | 1,173 | 18,030 | 15.37 | YLR099C | 2045 | 1,369 | 6,664 | 4.87 |
| YDL018C | 614 | 824 | 2,290 | 2.78 | YLR099W-A | 2157 | 345 | 2,995 | 8.68 |
| YDL019C | 613 | 4,158 | 4,202 | 1.01 | YLR100W | 2158 | 1,157 | 15,768 | 13.63 |
| YDL020C | 612 | 1,958 | 2,714 | 1.39 | YLR104W | 2159 | 500 | 1,066 | 2.17 |
| YDL022W | 632 | 1,380 | 16,892 | 12.24 | YLR105C | 2044 | 1,134 | 1,154 | 1.02 |
| YDL029W | 633 | 1,313 | 15,662 | 11.93 | YLR109W | 2160 | 630 | 86,884 | 137.91 |
| YDL040C | 611 | 2,680 | 8,581 | 3.20 | YLR110C | 1 | 507 | 339,952 | 673.06 |
| YDL045C | 610 | 1,090 | 1,221 | 1.12 | YLR113W | 2161 | 1,761 | 22,410 | 12.73 |
| YDL045W-A | 634 | 440 | 1,410 | 3.20 | YLR118C | 2043 | 800 | 3,652 | 4.56 |
| YDL046W | 635 | 859 | 9,394 | 10.94 | YLR120C | 2042 | 2,181 | 5,642 | 2.59 |
| YDL047W | 636 | 1,315 | 3,082 | 2.34 | YLR121C | 2041 | 1,829 | 2,253 | 1.23 |
| YDL051W | 637 | 961 | 10,972 | 11.42 | YLR126C | 2040 | 880 | 1,009 | 1.15 |
| YDL052C | 609 | 1,011 | 6,553 | 6.48 | YLR129W | 2162 | 3,042 | 5,766 | 1.89 |
| YDL053C | 608 | 898 | 1,411 | 1.58 | YLR130C | 2039 | 1,457 | 11,791 | 8.09 |
| YDL054C | 607 | 1,618 | 2,233 | 1.38 | YLR134W | 2163 | 1,929 | 12,574 | 7.90 |
| YDL055C | 606 | 1,458 | 208,464 | 142.98 | YLR137W | 2164 | 1,141 | 1,856 | 1.63 |
| YDL060W | 638 | 2,507 | 4,388 | 1.76 | YLR138W | 2165 | 3,174 | 3,808 | 1.20 |
| YDL061C | 605 | 760 | 31,236 | 42.76 | YLR141W | 2166 | 1,491 | 1,485 | 1.05 |
| YDL063C | 604 | 2,144 | 3,514 | 1.64 | YLR144C | 2038 | 2,400 | 3,213 | 1.34 |
| YDL064W | 639 | 594 | 3,209 | 5.40 | YLR146C | 2037 | 996 | 4,471 | 4.49 |
| YDL066W | 640 | 1,450 | 19,385 | 13.37 | YLR146W-A | 2167 | 286 | 1,023 | 3.58 |
| YDL067C | 603 | 449 | 5,551 | 12.36 | YLR147C | 2036 | 417 | 928 | 2.23 |
| YDL070W | 641 | 2,072 | 3,657 | 1.76 | YLR150W | 2168 | 1,052 | 120,912 | 114.93 |
| YDL072C | 602 | 732 | 8,898 | 12.16 | YLR153C | 2035 | 2,344 | 30,071 | 12.83 |
| YDL075W | 642 | 433 | 49,191 | 133.27 | YLR154C | 2034 | 450 | 1,648 | 3.66 |
| YDL076C | 601 | 1,178 | 1,530 | 1.30 | YLR163C | 2033 | 1,569 | 2,416 | 1.54 |
| YDL078C | 600 | 1,145 | 7,434 | 6.49 | YLR164W | 2169 | 749 | 885 | 1.18 |
| YDL081C | 12 | 452 | 218,001 | 508.52 | YLR167W | 41 | 568 | 311,636 | 686.85 |
| YDL082W | 643 | 769 | 53,423 | 87.18 | YLR170C | 2032 | 708 | 832 | 1.17 |
| YDL083C | 599 | 550 | 52,806 | 125.61 | YLR172C | 2031 | 975 | 6,758 | 6.93 |
| YDL084W | 644 | 1,608 | 55,652 | 34.61 | YLR175W | 2170 | 1,594 | 16,096 | 10.15 |
| YDL085C-A | 598 | 490 | 982 | 2.02 | YLR177W | 2171 | 1,993 | 2,686 | 1.36 |
| YDL086W | 645 | 908 | 5,398 | 5.94 | YLR178C | 2030 | 792 | 1,738 | 2.19 |
| YDL087C | 597 | 786 | 856 | 1.09 | YLR179C | 2029 | 705 | 17,967 | 25.48 |
| YDL088C | 596 | 1,877 | 2,283 | 1.22 | YLR180W | 2172 | 1,453 | 57,943 | 41.75 |
| YDL090C | 595 | 1,327 | 1,698 | 1.28 | YLR183C | 2028 | 1,684 | 2,292 | 1.36 |
| YDL092W | 646 | 588 | 1,931 | 3.28 | YLR185W | 2173 | 385 | 22,229 | 68.06 |
| YDL093W | 647 | 2,500 | 4,162 | 1.66 | YLR186W | 2174 | 883 | 6,334 | 7.17 |
| YDL095W | 648 | 2,632 | 30,849 | 11.72 | YLR188W | 2175 | 2,297 | 4,767 | 2.07 |
| YDL097C | 594 | 1,387 | 10,911 | 7.87 | YLR190W | 2176 | 1,906 | 6,908 | 3.62 |
| YDL100C | 593 | 1,147 | 22,266 | 19.41 | YLR192C | 2027 | 1,074 | 6,878 | 6.40 |
| YDL103C | 592 | 1,583 | 4,727 | 2.99 | YLR193C | 2026 | 747 | 1,430 | 1.91 |
| YDL108W | 649 | 1,046 | 1,664 | 1.59 | YLR194C | 2025 | 949 | 3,086 | 3.27 |
| YDL110C | 591 | 670 | 705 | 1.05 | YLR195C | 2024 | 1,666 | 6,253 | 3.77 |
| YDL111C | 590 | 798 | 4,160 | 5.21 | YLR196W | 2177 | 1,936 | 2,916 | 1.51 |
| YDL112W | 650 | 4,464 | 5,007 | 1.12 | YLR197W | 2178 | 1,741 | 17,699 | 10.18 |
| YDL116W | 651 | 2,289 | 3,310 | 1.45 | YLR199C | 2023 | 1,032 | 2,368 | 2.29 |
| YDL120W | 652 | 776 | 1,815 | 2.34 | YLR200W | 2179 | 507 | 559 | 1.10 |
| YDL121C | 589 | 641 | 3,560 | 5.55 | YLR201C | 2022 | 910 | 1,182 | 1.30 |
| YDL123W | 653 | 485 | 3,116 | 6.42 | YLR203C | 2021 | 1,473 | 5,980 | 4.06 |
| YDL124W | 654 | 1,068 | 5,573 | 5.22 | YLR204W | 2180 | 493 | 746 | 1.51 |
| YDL125C | 588 | 801 | 18,616 | 23.24 | YLR206W | 2181 | 1,989 | 3,697 | 1.88 |
| YDL126C | 587 | 2,607 | 48,211 | 18.50 | YLR207W | 2182 | 2,601 | 2,821 | 1.08 |
| YDL128W | 655 | 1,500 | 12,006 | 8.00 | YLR208W | 2183 | 1,256 | 13,918 | 11.08 |
| YDL130W | 656 | 433 | 53,427 | 138.87 | YLR209C | 2020 | 1,019 | 4,118 | 4.04 |
| YDL131W | 657 | 1,479 | 4,468 | 4.31 | YLR212C | 2019 | 1,723 | 3,170 | 1.84 |
| YDL132W | 658 | 2,817 | 4,394 | 1.56 | YLR214W | 2184 | 2,325 | 8,914 | 3.83 |
| YDL133C-A | 13 | 280 | 191,688 | 883.35 | YLR216C | 2018 | 1,180 | 13,045 | 11.05 |
| YDL134C | 586 | 1,625 | 6,681 | 4.63 | YLR219W | 2185 | 2,519 | 3,119 | 1.24 |
| YDL135C | 585 | 841 | 1,489 | 1.77 | YLR220W | 2186 | 1,134 | 4,365 | 3.85 |
| YDL136W | 659 | 528 | 3,405 | 15.48 | YLR221C | 2017 | 913 | 1,559 | 1.71 |
| YDL137W | 660 | 1,072 | 15,079 | 15.16 | YLR222C | 2016 | 2,553 | 4,356 | 1.71 |
| YDL140C | 584 | 5,350 | 14,504 | 2.72 | YLR224W | 2187 | 1,329 | 2,816 | 2.12 |
| YDL141W | 661 | 2,522 | 5,919 | 2.35 | YLR229C | 2015 | 642 | 8,237 | 12.83 |
| YDL143W | 662 | 1,728 | 15,402 | 8.92 | YLR231C | 2014 | 1,472 | 8,129 | 5.52 |
| YDL144C | 583 | 1,184 | 3,368 | 2.84 | YLR237W | 2188 | 1,797 | 2,222 | 1.28 |
| YDL145C | 582 | 3,983 | 20,628 | 5.18 | YLR241W | 2189 | 2,349 | 4,769 | 2.03 |
| YDL147W | 663 | 1,525 | 4,825 | 3.16 | YLR242C | 2013 | 966 | 1,535 | 1.59 |
| YDL155W | 664 | 1,545 | 3,815 | 2.47 | YLR243W | 2190 | 974 | 2,145 | 2.20 |
| YDL157C | 581 | 528 | 1,583 | 3.00 | YLR244C | 2012 | 1,323 | 18,589 | 14.05 |
| YDL160C | 580 | 1,852 | 5,494 | 2.97 | YLR245C | 2011 | 429 | 586 | 1.37 |
| YDL160C-A | 579 | 433 | 697 | 1.61 | YLR248W | 2191 | 2,110 | 10,095 | 4.78 |
| YDL164C | 578 | 2,452 | 4,018 | 1.64 | YLR249W | 42 | 3,263 | 638,371 | 198.69 |
| YDL165W | 665 | 662 | 2,251 | 3.40 | YLR250W | 2192 | 839 | 4,912 | 5.85 |
| YDL166C | 577 | 685 | 1,315 | 1.92 | YLR253W | 2193 | 1,899 | 2,059 | 1.08 |
| YDL167C | 576 | 2,355 | 2,887 | 1.23 | YLR256W | 2194 | 4,509 | 31,037 | 6.89 |
| YDL168W | 666 | 1,277 | 5,224 | 4.09 | YLR257W | 2195 | 1,245 | 11,840 | 9.51 |
| YDL171C | 575 | 6,585 | 18,155 | 2.76 | YLR258W | 2196 | 2,546 | 5,338 | 2.10 |
| YDL173W | 667 | 1,060 | 1,320 | 1.25 | YLR259C | 2010 | 1,826 | 29,028 | 15.90 |
| YDL174C | 574 | 1,892 | 5,191 | 2.74 | YLR262C | 2009 | 648 | 999 | 1.54 |
| YDL178W | 668 | 1,675 | 3,116 | 1.86 | YLR262C-A | 2008 | 290 | 5,198 | 17.92 |
| YDL180W | 669 | 2,063 | 2,954 | 1.43 | YLR264W | 2197 | 860 | 66,243 | 80.67 |
| YDL181W | 670 | 433 | 1,052 | 2.43 | YLR265C | 2007 | 1,149 | 1,521 | 1.32 |
| YDL182W | 671 | 1,401 | 6,626 | 6.93 | YLR266C | 2006 | 2,106 | 2,462 | 1.17 |
| YDL184C | 14 | 290 | 148,521 | 654.28 | YLR268W | 2198 | 800 | 4,154 | 5.19 |
| YDL185W | 672 | 3,346 | 61,574 | 18.40 | YLR270W | 2199 | 1,255 | 2,105 | 1.68 |
| YDL188C | 573 | 1,380 | 4,357 | 3.63 | YLR274W | 2200 | 2,472 | 3,515 | 1.42 |
| YDL190C | 572 | 3,197 | 5,524 | 1.73 | YLR276C | 2005 | 1,978 | 2,170 | 1.10 |
| YDL191W | 673 | 513 | 2,865 | 14.17 | YLR285W | 2201 | 1,026 | 1,769 | 1.72 |
| YDL192W | 674 | 641 | 22,378 | 39.72 | YLR286C | 2004 | 2,067 | 65,921 | 31.90 |
| YDL193W | 675 | 1,334 | 3,473 | 2.60 | YLR287C | 2003 | 1,370 | 2,741 | 2.00 |
| YDL195W | 676 | 4,069 | 14,368 | 3.53 | YLR287C-A | 2002 | 397 | 49,129 | 153.53 |
| YDL198C | 571 | 1,140 | 4,463 | 3.91 | YLR290C | 2001 | 931 | 934 | 1.00 |
| YDL201W | 677 | 1,003 | 1,955 | 1.95 | YLR291C | 2000 | 1,286 | 7,735 | 6.01 |
| YDL202W | 678 | 887 | 1,209 | 1.36 | YLR292C | 1999 | 735 | 3,916 | 5.33 |
| YDL203C | 570 | 2,192 | 2,676 | 1.22 | YLR293C | 1998 | 780 | 35,159 | 45.53 |
| YDL205C | 569 | 1,274 | 2,969 | 2.35 | YLR295C | 1997 | 650 | 3,138 | 4.83 |
| YDL208W | 679 | 625 | 6,852 | 10.96 | YLR300W | 2202 | 1,669 | 52,523 | 31.47 |
| YDL212W | 680 | 824 | 14,162 | 17.19 | YLR301W | 2203 | 897 | 8,293 | 9.24 |
| YDL213C | 568 | 745 | 1,057 | 1.42 | YLR303W | 2204 | 1,335 | 35,423 | 26.53 |
| YDL215C | 567 | 3,635 | 3,649 | 1.00 | YLR304C | 1996 | 2,651 | 47,811 | 18.04 |
| YDL217C | 566 | 925 | 1,543 | 1.67 | YLR305C | 1995 | 5,754 | 10,136 | 1.76 |
| YDL219W | 681 | 558 | 1,409 | 2.52 | YLR310C | 1994 | 4,967 | 5,243 | 1.06 |
| YDL224C | 565 | 2,454 | 3,977 | 1.62 | YLR312W-A | 2205 | 904 | 1,343 | 1.49 |
| YDL226C | 564 | 1,156 | 4,247 | 3.67 | YLR314C | 1993 | 1,716 | 3,070 | 1.79 |
| YDL227C | 563 | 1,761 | 2,517 | 1.43 | YLR315W | 2206 | 462 | 685 | 1.48 |
| YDL229W | 682 | 1,982 | 56,974 | 83.24 | YLR324W | 2207 | 1,859 | 2,117 | 1.14 |
| YDL230W | 683 | 1,122 | 1,379 | 1.23 | YLR325C | 1992 | 478 | 90,046 | 188.59 |
| YDL231C | 562 | 3,378 | 5,648 | 1.67 | YLR328W | 2208 | 1,560 | 3,946 | 2.53 |
| YDL232W | 684 | 419 | 4,811 | 11.48 | YLR330W | 2209 | 2,175 | 5,051 | 2.37 |
| YDL235C | 561 | 730 | 2,107 | 2.89 | YLR332W | 2210 | 1,745 | 2,801 | 1.60 |
| YDL236W | 685 | 1,148 | 6,418 | 5.61 | YLR333C | 1991 | 887 | 17,070 | 21.03 |
| YDL237W | 686 | 1,271 | 6,468 | 5.09 | YLR335W | 2211 | 2,275 | 4,098 | 1.80 |
| YDR001C | 560 | 2,542 | 3,756 | 1.48 | YLR340W | 2212 | 1,087 | 594,533 | 560.32 |
| YDR002W | 687 | 852 | 20,887 | 24.54 | YLR342W | 2213 | 6,138 | 75,364 | 12.39 |
| YDR003W | 688 | 747 | 1,132 | 1.52 | YLR344W | 2214 | 527 | 21,350 | 52.69 |
| YDR003W-A | 689 | 317 | 366 | 1.16 | YLR347C | 1990 | 2,981 | 13,149 | 4.41 |
| YDR007W | 690 | 902 | 3,302 | 3.66 | YLR348C | 1989 | 935 | 3,242 | 3.47 |
| YDR011W | 691 | 4,987 | 22,406 | 4.49 | YLR350W | 2215 | 783 | 4,618 | 5.93 |
| YDR012W | 692 | 1,204 | 11,497 | 43.13 | YLR351C | 1988 | 994 | 6,903 | 6.99 |
| YDR013W | 693 | 746 | 949 | 1.27 | YLR353W | 2216 | 2,017 | 2,436 | 1.21 |
| YDR016C | 559 | 387 | 1,816 | 4.69 | YLR354C | 1987 | 1,147 | 68,994 | 60.15 |
| YDR019C | 558 | 1,392 | 3,294 | 2.37 | YLR355C | 1986 | 1,445 | 73,439 | 50.82 |
| YDR020C | 557 | 1,173 | 1,906 | 1.63 | YLR356W | 2217 | 750 | 1,269 | 1.69 |
| YDR023W | 694 | 1,568 | 17,921 | 11.43 | YLR359W | 2218 | 1,643 | 20,143 | 12.26 |
| YDR025W | 695 | 577 | 24,991 | 65.33 | YLR361C | 1985 | 2,085 | 2,142 | 1.03 |
| YDR028C | 556 | 3,620 | 4,155 | 1.15 | YLR363C | 1984 | 831 | 896 | 1.08 |
| YDR032C | 555 | 784 | 32,062 | 40.90 | YLR363W-A | 2219 | 460 | 837 | 1.82 |
| YDR033W | 696 | 1,643 | 83,809 | 51.26 | YLR367W | 2220 | 1,017 | 19,783 | 20.97 |
| YDR034C-A | 554 | 207 | 335 | 1.65 | YLR370C | 1983 | 706 | 4,809 | 6.81 |
| YDR035W | 697 | 1,424 | 5,091 | 3.57 | YLR372W | 2221 | 1,285 | 21,483 | 16.72 |
| YDR036C | 553 | 1,681 | 3,256 | 1.94 | YLR375W | 2222 | 1,124 | 10,471 | 9.32 |
| YDR037W | 698 | 1,915 | 41,221 | 21.53 | YLR378C | 1982 | 1,793 | 21,924 | 12.23 |
| YDR041W | 699 | 778 | 1,279 | 1.64 | YLR380W | 2223 | 1,440 | 6,064 | 4.21 |
| YDR044W | 700 | 1,248 | 8,931 | 7.16 | YLR384C | 1981 | 4,176 | 8,012 | 1.92 |
| YDR045C | 552 | 642 | 1,686 | 2.63 | YLR387C | 1980 | 1,421 | 3,155 | 2.22 |
| YDR046C | 551 | 1,955 | 10,201 | 5.22 | YLR388W | 2224 | 740 | 33,396 | 46.93 |
| YDR047W | 701 | 1,362 | 5,193 | 3.81 | YLR389C | 1979 | 3,274 | 6,605 | 2.02 |
| YDR050C | 15 | 834 | 274,791 | 329.67 | YLR390W | 2225 | 615 | 1,031 | 1.68 |
| YDR051C | 550 | 1,078 | 1,157 | 1.07 | YLR390W-A | 2226 | 978 | 11,234 | 11.67 |
| YDR054C | 549 | 1,400 | 1,772 | 1.27 | YLR395C | 1978 | 563 | 2,854 | 5.07 |
| YDR055W | 702 | 1,545 | 8,109 | 5.25 | YLR397C | 1977 | 2,343 | 4,972 | 2.12 |
| YDR056C | 548 | 764 | 3,097 | 4.05 | YLR399C | 1976 | 2,271 | 4,948 | 2.18 |
| YDR059C | 547 | 590 | 1,255 | 2.13 | YLR401C | 1975 | 2,073 | 3,529 | 1.70 |
| YDR060W | 703 | 3,218 | 4,391 | 1.37 | YLR403W | 2227 | 2,437 | 4,700 | 1.94 |
| YDR061W | 704 | 1,788 | 2,069 | 1.16 | YLR404W | 2228 | 1,002 | 1,341 | 1.34 |
| YDR062W | 705 | 2,049 | 8,602 | 4.20 | YLR405W | 2229 | 1,253 | 1,784 | 1.42 |
| YDR063W | 706 | 633 | 1,703 | 2.69 | YLR406C | 1974 | 534 | 22,766 | 48.39 |
| YDR064W | 16 | 561 | 121,002 | 215.69 | YLR407W | 2230 | 1,151 | 1,217 | 1.06 |
| YDR071C | 546 | 714 | 7,377 | 10.33 | YLR409C | 1973 | 2,878 | 6,658 | 2.31 |
| YDR072C | 545 | 2,326 | 6,470 | 2.78 | YLR410W | 2231 | 3,567 | 6,284 | 1.76 |
| YDR073W | 707 | 1,157 | 1,464 | 1.29 | YLR412W | 2232 | 891 | 2,204 | 2.47 |
| YDR074W | 708 | 3,006 | 5,872 | 1.95 | YLR413W | 2233 | 2,225 | 34,138 | 15.34 |
| YDR077W | 709 | 1,417 | 32,564 | 27.83 | YLR414C | 1972 | 997 | 874 | 1.32 |
| YDR079C-A | 544 | 444 | 1,095 | 2.47 | YLR418C | 1971 | 1,532 | 2,334 | 1.52 |
| YDR084C | 543 | 764 | 4,466 | 5.84 | YLR420W | 2234 | 1,198 | 5,881 | 4.91 |
| YDR086C | 542 | 522 | 7,711 | 14.77 | YLR421C | 1970 | 713 | 3,408 | 4.78 |
| YDR087C | 541 | 905 | 2,591 | 2.86 | YLR426W | 2235 | 1,102 | 1,451 | 1.32 |
| YDR090C | 540 | 1,380 | 2,423 | 1.76 | YLR427W | 2236 | 2,272 | 2,558 | 1.13 |
| YDR091C | 539 | 2,214 | 20,517 | 9.27 | YLR429W | 2237 | 2,040 | 10,786 | 5.29 |
| YDR092W | 710 | 621 | 6,576 | 10.59 | YLR432W | 2238 | 1,745 | 21,787 | 16.07 |
| YDR093W | 711 | 4,839 | 8,475 | 1.75 | YLR437C | 1969 | 498 | 2,297 | 4.83 |
| YDR098C | 538 | 858 | 4,720 | 5.50 | YLR438C-A | 1968 | 410 | 892 | 2.18 |
| YDR099W | 712 | 1,872 | 11,531 | 6.36 | YLR438W | 2239 | 1,385 | 11,745 | 8.48 |
| YDR100W | 713 | 588 | 3,593 | 6.11 | YLR439W | 2240 | 1,150 | 1,242 | 1.08 |
| YDR101C | 537 | 1,884 | 9,448 | 5.01 | YLR441C | 1967 | 974 | 64,036 | 83.30 |
| YDR105C | 536 | 1,738 | 5,820 | 3.35 | YLR443W | 2241 | 1,347 | 3,336 | 2.48 |
| YDR107C | 535 | 2,096 | 2,558 | 1.22 | YLR447C | 1966 | 1,216 | 18,824 | 15.48 |
| YDR111C | 534 | 1,751 | 2,287 | 1.31 | YLR448W | 2242 | 844 | 24,969 | 32.89 |
| YDR115W | 714 | 439 | 1,315 | 2.99 | YLR449W | 2243 | 1,296 | 4,228 | 3.28 |
| YDR116C | 533 | 980 | 1,722 | 1.76 | YLR450W | 2244 | 3,375 | 6,721 | 1.99 |
| YDR119W | 715 | 2,440 | 16,732 | 6.86 | YLR452C | 1965 | 2,357 | 8,256 | 3.50 |
| YDR120C | 532 | 1,911 | 3,282 | 1.72 | YLR459W | 2245 | 1,263 | 4,258 | 3.37 |
| YDR121W | 716 | 794 | 1,925 | 2.42 | YML001W | 2373 | 766 | 12,530 | 16.36 |
| YDR127W | 717 | 4,993 | 14,527 | 2.91 | YML004C | 2355 | 1,169 | 10,762 | 9.21 |
| YDR129C | 531 | 2,108 | 16,845 | 7.99 | YML008C | 2354 | 1,252 | 9,915 | 7.92 |
| YDR135C | 530 | 4,658 | 13,777 | 2.96 | YML009C | 2353 | 362 | 3,581 | 9.89 |
| YDR139C | 529 | 413 | 1,544 | 3.74 | YML010W | 2374 | 3,276 | 6,475 | 1.98 |
| YDR140W | 718 | 802 | 1,153 | 1.44 | YML011C | 2352 | 667 | 970 | 1.45 |
| YDR143C | 528 | 1,964 | 2,793 | 1.42 | YML012W | 2375 | 810 | 16,285 | 20.59 |
| YDR144C | 527 | 2,021 | 10,063 | 4.98 | YML013W | 2376 | 1,979 | 3,188 | 1.63 |
| YDR148C | 526 | 1,724 | 5,510 | 3.20 | YML014W | 2377 | 956 | 1,476 | 1.54 |
| YDR151C | 525 | 1,113 | 1,727 | 1.55 | YML016C | 2351 | 2,471 | 3,256 | 1.32 |
| YDR152W | 719 | 866 | 2,187 | 2.53 | YML018C | 2350 | 1,436 | 6,782 | 4.72 |
| YDR155C | 17 | 610 | 207,650 | 347.53 | YML019W | 2378 | 1,326 | 9,959 | 7.51 |
| YDR156W | 720 | 544 | 3,752 | 6.90 | YML021C | 2349 | 1,080 | 2,648 | 2.45 |
| YDR158W | 721 | 1,244 | 54,700 | 43.97 | YML022W | 2379 | 813 | 22,784 | 28.02 |
| YDR161W | 722 | 1,282 | 3,522 | 2.75 | YML023C | 2348 | 1,923 | 2,713 | 1.41 |
| YDR165W | 723 | 1,613 | 4,343 | 2.69 | YML024W | 2380 | 552 | 27,774 | 76.70 |
| YDR167W | 724 | 725 | 2,664 | 3.67 | YML026C | 2347 | 644 | 36,565 | 83.20 |
| YDR168W | 725 | 1,649 | 3,002 | 1.82 | YML027W | 2381 | 1,615 | 1,685 | 1.04 |
| YDR170C | 524 | 6,476 | 11,736 | 1.81 | YML028W | 2382 | 730 | 115,479 | 198.18 |
| YDR172W | 726 | 2,273 | 14,673 | 6.46 | YML029W | 2383 | 3,020 | 4,295 | 1.49 |
| YDR174W | 727 | 932 | 11,097 | 12.00 | YML031W | 2384 | 2,034 | 8,537 | 4.20 |
| YDR177W | 728 | 795 | 2,763 | 3.47 | YML032C | 2346 | 1,752 | 2,012 | 1.15 |
| YDR178W | 729 | 904 | 3,870 | 4.28 | YML035C | 2345 | 2,594 | 6,356 | 2.45 |
| YDR182W | 730 | 1,600 | 3,294 | 2.06 | YML036W | 2385 | 819 | 860 | 1.05 |
| YDR186C | 523 | 2,778 | 3,276 | 1.18 | YML038C | 2344 | 1,622 | 2,308 | 1.42 |
| YDR188W | 731 | 1,855 | 13,465 | 7.27 | YML048W | 2386 | 1,440 | 15,637 | 10.94 |
| YDR189W | 732 | 2,135 | 5,740 | 2.69 | YML051W | 2387 | 1,465 | 6,727 | 4.59 |
| YDR190C | 522 | 1,479 | 5,546 | 3.75 | YML052W | 2388 | 1,029 | 14,529 | 14.12 |
| YDR194C | 521 | 2,151 | 2,507 | 1.16 | YML055W | 2389 | 612 | 678 | 1.11 |
| YDR196C | 520 | 829 | 1,275 | 1.54 | YML056C | 2343 | 1,935 | 68,173 | 40.28 |
| YDR204W | 733 | 1,210 | 3,882 | 3.21 | YML057W | 2390 | 1,927 | 5,105 | 2.65 |
| YDR205W | 734 | 2,284 | 2,747 | 1.20 | YML058W | 2391 | 585 | 19,694 | 33.84 |
| YDR206W | 735 | 3,023 | 6,297 | 2.08 | YML059C | 2342 | 5,260 | 7,049 | 1.34 |
| YDR208W | 736 | 2,492 | 3,441 | 1.38 | YML063W | 2392 | 861 | 55,910 | 85.31 |
| YDR210W | 737 | 446 | 2,896 | 6.54 | YML064C | 2341 | 972 | 1,097 | 1.13 |
| YDR211W | 738 | 2,362 | 4,280 | 1.81 | YML067C | 2340 | 1,087 | 5,968 | 5.49 |
| YDR212W | 739 | 1,807 | 16,769 | 9.28 | YML069W | 2393 | 1,802 | 3,899 | 2.16 |
| YDR214W | 740 | 1,250 | 8,446 | 6.76 | YML070W | 2394 | 1,881 | 10,525 | 5.60 |
| YDR221W | 741 | 2,314 | 2,813 | 1.22 | YML072C | 2339 | 4,931 | 18,859 | 3.82 |
| YDR222W | 742 | 1,471 | 2,367 | 1.61 | YML073C | 2338 | 609 | 72,969 | 138.27 |
| YDR224C | 519 | 536 | 9,896 | 18.92 | YML074C | 2337 | 1,361 | 5,006 | 3.70 |
| YDR225W | 743 | 617 | 18,191 | 36.45 | YML075C | 2336 | 3,391 | 10,945 | 3.23 |
| YDR226W | 744 | 842 | 38,362 | 45.56 | YML077W | 2395 | 608 | 1,170 | 1.92 |
| YDR231C | 518 | 791 | 1,762 | 2.23 | YML078W | 2396 | 699 | 6,720 | 9.67 |
| YDR232W | 745 | 2,052 | 20,637 | 10.06 | YML079W | 2397 | 696 | 2,586 | 3.72 |
| YDR233C | 517 | 991 | 23,134 | 23.36 | YML080W | 2398 | 1,493 | 1,946 | 1.30 |
| YDR234W | 746 | 2,451 | 9,838 | 4.01 | YML081C-A | 2335 | 364 | 3,706 | 10.18 |
| YDR236C | 516 | 761 | 2,814 | 3.70 | YML081W | 2399 | 3,927 | 4,645 | 1.18 |
| YDR237W | 747 | 1,142 | 2,302 | 2.01 | YML085C | 2334 | 1,524 | 12,446 | 8.22 |
| YDR238C | 515 | 3,230 | 16,507 | 5.11 | YML086C | 2333 | 2,055 | 10,967 | 5.34 |
| YDR245W | 748 | 1,383 | 6,929 | 5.01 | YML088W | 2400 | 2,190 | 2,624 | 1.20 |
| YDR248C | 514 | 717 | 786 | 1.10 | YML092C | 2332 | 854 | 9,017 | 10.56 |
| YDR249C | 513 | 1,241 | 1,781 | 1.43 | YML094W | 2401 | 588 | 1,005 | 1.71 |
| YDR251W | 749 | 2,907 | 3,712 | 1.28 | YML096W | 2402 | 1,693 | 1,778 | 1.05 |
| YDR257C | 512 | 1,556 | 1,875 | 1.20 | YML098W | 2403 | 739 | 1,524 | 2.06 |
| YDR260C | 511 | 696 | 1,262 | 1.81 | YML099C | 2331 | 2,760 | 3,340 | 1.21 |
| YDR261C | 510 | 1,848 | 5,484 | 2.97 | YML100W | 2404 | 3,462 | 8,248 | 2.38 |
| YDR262W | 750 | 1,055 | 1,847 | 1.75 | YML101C | 2330 | 511 | 1,995 | 3.90 |
| YDR264C | 509 | 2,591 | 21,773 | 8.41 | YML102W | 2405 | 1,570 | 2,885 | 1.84 |
| YDR265W | 751 | 1,297 | 1,496 | 1.15 | YML103C | 2329 | 5,056 | 7,591 | 1.50 |
| YDR266C | 508 | 2,235 | 3,467 | 1.55 | YML105C | 2328 | 931 | 4,034 | 4.33 |
| YDR267C | 507 | 1,179 | 2,059 | 1.75 | YML106W | 2406 | 1,050 | 25,170 | 23.97 |
| YDR268W | 752 | 1,324 | 1,369 | 1.03 | YML108W | 2407 | 581 | 675 | 1.16 |
| YDR272W | 753 | 921 | 2,160 | 2.35 | YML110C | 2327 | 1,215 | 11,723 | 9.65 |
| YDR276C | 506 | 418 | 10,471 | 25.05 | YML113W | 2408 | 946 | 1,249 | 1.34 |
| YDR280W | 754 | 1,177 | 1,888 | 1.60 | YML115C | 2326 | 1,684 | 5,622 | 3.34 |
| YDR281C | 505 | 466 | 746 | 1.60 | YML117W | 2409 | 3,405 | 4,115 | 1.21 |
| YDR284C | 504 | 1,200 | 8,176 | 6.81 | YML119W | 2410 | 1,249 | 1,280 | 1.02 |
| YDR286C | 503 | 469 | 549 | 1.17 | YML120C | 2325 | 1,933 | 2,441 | 1.26 |
| YDR288W | 755 | 1,057 | 1,411 | 1.33 | YML121W | 2411 | 1,250 | 2,045 | 1.64 |
| YDR292C | 502 | 2,045 | 5,334 | 2.61 | YML123C | 2324 | 1,910 | 169,170 | 88.57 |
| YDR293C | 501 | 4,253 | 9,031 | 2.12 | YML124C | 2323 | 1,470 | 9,836 | 6.78 |
| YDR294C | 500 | 1,839 | 7,655 | 4.16 | YML125C | 2322 | 1,011 | 16,221 | 16.04 |
| YDR296W | 756 | 812 | 1,283 | 1.58 | YML126C | 2321 | 1,476 | 23,263 | 15.76 |
| YDR297W | 757 | 1,274 | 11,942 | 9.37 | YML127W | 2412 | 2,775 | 6,158 | 2.22 |
| YDR298C | 499 | 928 | 11,839 | 12.76 | YML128C | 2320 | 1,813 | 2,294 | 1.26 |
| YDR300C | 498 | 1,537 | 4,013 | 2.61 | YML129C | 2319 | 393 | 740 | 1.88 |
| YDR302W | 758 | 861 | 1,084 | 1.26 | YML130C | 2318 | 1,830 | 4,537 | 2.48 |
| YDR304C | 497 | 767 | 39,818 | 52.49 | YML131W | 2413 | 1,321 | 2,733 | 2.07 |
| YDR307W | 759 | 2,198 | 3,126 | 1.42 | YMR002W | 2414 | 773 | 9,735 | 12.60 |
| YDR309C | 496 | 1,221 | 3,558 | 2.91 | YMR005W | 2415 | 1,301 | 2,044 | 1.57 |
| YDR319C | 495 | 1,015 | 1,144 | 1.13 | YMR006C | 2317 | 2,286 | 30,049 | 13.29 |
| YDR320C-A | 494 | 273 | 2,557 | 9.37 | YMR008C | 2316 | 2,447 | 4,498 | 1.86 |
| YDR321W | 760 | 1,263 | 25,583 | 20.26 | YMR010W | 2416 | 1,637 | 5,604 | 3.42 |
| YDR322C-A | 493 | 508 | 1,546 | 3.04 | YMR011W | 2417 | 1,786 | 13,078 | 7.49 |
| YDR322W | 761 | 1,104 | 1,173 | 1.06 | YMR012W | 2418 | 4,096 | 14,265 | 3.48 |
| YDR324C | 492 | 2,331 | 4,755 | 2.04 | YMR013C | 2315 | 1,844 | 2,050 | 1.11 |
| YDR326C | 491 | 4,648 | 6,735 | 1.45 | YMR015C | 2314 | 1,935 | 10,099 | 5.22 |
| YDR328C | 490 | 826 | 10,426 | 12.62 | YMR022W | 2419 | 618 | 4,290 | 6.94 |
| YDR329C | 489 | 1,430 | 2,565 | 1.79 | YMR024W | 2420 | 1,173 | 1,838 | 1.57 |
| YDR331W | 762 | 1,305 | 2,996 | 2.30 | YMR026C | 2313 | 1,363 | 1,786 | 1.31 |
| YDR333C | 488 | 2,399 | 4,293 | 1.79 | YMR027W | 2421 | 1,527 | 6,331 | 4.15 |
| YDR335W | 763 | 4,118 | 4,848 | 1.18 | YMR031C | 2312 | 2,696 | 2,954 | 1.10 |
| YDR337W | 764 | 963 | 1,405 | 1.46 | YMR033W | 2422 | 1,589 | 2,844 | 1.79 |
| YDR339C | 487 | 632 | 1,616 | 2.56 | YMR035W | 2423 | 657 | 1,738 | 2.64 |
| YDR341C | 486 | 2,021 | 19,301 | 9.55 | YMR038C | 2311 | 882 | 8,260 | 9.36 |
| YDR342C | 485 | 1,713 | 1,024 | 1.19 | YMR042W | 2424 | 665 | 2,100 | 3.16 |
| YDR345C | 484 | 1,924 | 27,982 | 18.36 | YMR047C | 2310 | 3,487 | 7,370 | 2.11 |
| YDR346C | 483 | 1,856 | 10,008 | 5.39 | YMR049C | 2309 | 2,493 | 5,114 | 2.05 |
| YDR347W | 765 | 1,167 | 3,125 | 2.68 | YMR054W | 2425 | 2,806 | 5,565 | 1.98 |
| YDR348C | 482 | 1,880 | 3,230 | 1.72 | YMR055C | 2308 | 1,115 | 1,524 | 1.37 |
| YDR349C | 481 | 1,977 | 8,173 | 4.13 | YMR058W | 2426 | 2,101 | 44,738 | 21.29 |
| YDR352W | 766 | 1,286 | 6,109 | 4.75 | YMR062C | 2307 | 1,411 | 3,186 | 2.26 |
| YDR353W | 767 | 1,067 | 36,137 | 34.19 | YMR067C | 2306 | 1,276 | 1,577 | 1.23 |
| YDR354W | 768 | 1,304 | 5,793 | 4.44 | YMR071C | 2305 | 597 | 5,033 | 8.44 |
| YDR357C | 480 | 482 | 752 | 1.56 | YMR072W | 2427 | 716 | 7,568 | 10.57 |
| YDR361C | 479 | 1,116 | 4,020 | 3.60 | YMR073C | 2304 | 1,401 | 1,798 | 1.28 |
| YDR363W-A | 769 | 369 | 1,076 | 2.92 | YMR074C | 2303 | 495 | 7,385 | 14.92 |
| YDR366C | 478 | 399 | 714 | 1.89 | YMR079W | 2428 | 1,276 | 8,649 | 6.78 |
| YDR367W | 770 | 785 | 6,629 | 8.44 | YMR080C | 2302 | 3,384 | 10,219 | 3.02 |
| YDR368W | 771 | 1,174 | 12,526 | 10.67 | YMR083W | 2429 | 1,289 | 21,631 | 17.03 |
| YDR370C | 477 | 1,329 | 1,930 | 1.45 | YMR088C | 2301 | 1,857 | 6,514 | 3.51 |
| YDR372C | 476 | 1,410 | 2,838 | 2.01 | YMR089C | 2300 | 2,776 | 3,267 | 1.18 |
| YDR373W | 772 | 728 | 2,423 | 3.33 | YMR091C | 2299 | 1,391 | 2,224 | 1.60 |
| YDR374W-A | 773 | 477 | 920 | 1.93 | YMR092C | 2298 | 1,988 | 14,173 | 7.13 |
| YDR375C | 475 | 1,417 | 2,092 | 1.48 | YMR093W | 2430 | 1,709 | 6,202 | 3.63 |
| YDR376W | 774 | 1,560 | 2,988 | 1.91 | YMR099C | 2297 | 985 | 10,326 | 10.48 |
| YDR377W | 775 | 787 | 7,272 | 9.27 | YMR105C | 2296 | 1,896 | 2,869 | 1.51 |
| YDR378C | 474 | 456 | 7,234 | 15.86 | YMR108W | 2431 | 2,458 | 23,048 | 9.38 |
| YDR380W | 776 | 2,177 | 4,527 | 2.08 | YMR109W | 2432 | 3,768 | 4,957 | 1.32 |
| YDR381W | 777 | 958 | 16,601 | 17.33 | YMR110C | 2295 | 1,763 | 4,033 | 2.29 |
| YDR382W | 18 | 546 | 170,919 | 338.65 | YMR112C | 2294 | 841 | 1,278 | 1.52 |
| YDR384C | 473 | 1,058 | 4,409 | 4.17 | YMR113W | 2433 | 1,372 | 1,431 | 1.04 |
| YDR385W | 778 | 2,710 | 11,711 | 30.49 | YMR116C | 2293 | 1,122 | 523,787 | 466.83 |
| YDR387C | 472 | 1,937 | 3,288 | 1.70 | YMR119W | 2434 | 2,096 | 3,499 | 1.67 |
| YDR388W | 779 | 1,615 | 8,472 | 5.25 | YMR120C | 2292 | 1,960 | 5,215 | 2.66 |
| YDR390C | 471 | 1,985 | 2,371 | 1.19 | YMR121C | 2291 | 747 | 5,592 | 10.84 |
| YDR391C | 470 | 788 | 991 | 1.26 | YMR122W-A | 2435 | 547 | 27,437 | 50.16 |
| YDR394W | 780 | 1,467 | 11,979 | 8.17 | YMR123W | 2436 | 443 | 3,682 | 8.31 |
| YDR395W | 781 | 3,034 | 11,099 | 3.66 | YMR125W | 2437 | 2,803 | 7,195 | 2.57 |
| YDR397C | 469 | 573 | 1,798 | 3.14 | YMR126C | 2290 | 1,194 | 1,738 | 1.45 |
| YDR398W | 782 | 2,186 | 5,574 | 2.55 | YMR127C | 2289 | 1,259 | 1,939 | 1.54 |
| YDR399W | 783 | 836 | 22,978 | 27.49 | YMR129W | 2438 | 4,180 | 8,729 | 2.09 |
| YDR400W | 784 | 1,380 | 3,446 | 2.50 | YMR130W | 2439 | 1,064 | 3,152 | 2.96 |
| YDR404C | 468 | 835 | 6,363 | 7.62 | YMR131C | 2288 | 1,675 | 4,683 | 4.27 |
| YDR407C | 467 | 3,911 | 4,117 | 1.05 | YMR139W | 2440 | 1,422 | 2,168 | 1.52 |
| YDR408C | 466 | 847 | 8,973 | 10.59 | YMR142C | 2287 | 689 | 70,671 | 133.78 |
| YDR410C | 465 | 755 | 4,094 | 5.42 | YMR143W | 2441 | 545 | 52,761 | 126.45 |
| YDR411C | 464 | 1,115 | 3,735 | 3.35 | YMR145C | 2286 | 1,782 | 11,453 | 6.43 |
| YDR414C | 463 | 1,388 | 3,506 | 2.53 | YMR146C | 2285 | 1,169 | 12,991 | 11.13 |
| YDR415C | 462 | 1,309 | 2,416 | 1.85 | YMR148W | 2442 | 862 | 1,659 | 1.97 |
| YDR418W | 785 | 600 | 52,616 | 108.91 | YMR149W | 2443 | 1,020 | 17,887 | 17.99 |
| YDR422C | 461 | 2,626 | 3,064 | 1.17 | YMR150C | 2284 | 668 | 1,467 | 2.23 |
| YDR424C | 460 | 332 | 982 | 2.96 | YMR152W | 2444 | 1,243 | 3,774 | 3.04 |
| YDR427W | 786 | 1,313 | 4,312 | 3.28 | YMR153W | 2445 | 1,618 | 3,120 | 1.93 |
| YDR429C | 459 | 921 | 6,660 | 7.23 | YMR157C | 2283 | 890 | 1,610 | 1.81 |
| YDR432W | 787 | 1,245 | 6,311 | 5.07 | YMR158C-A | 2282 | 222 | 634 | 2.93 |
| YDR434W | 788 | 1,819 | 6,693 | 3.68 | YMR158W | 2446 | 596 | 945 | 1.59 |
| YDR435C | 458 | 1,153 | 2,496 | 2.16 | YMR161W | 2447 | 976 | 1,773 | 1.82 |
| YDR441C | 457 | 861 | 1,884 | 2.19 | YMR171C | 2281 | 2,064 | 3,553 | 1.72 |
| YDR447C | 456 | 526 | 28,897 | 85.85 | YMR173W | 2448 | 1,405 | 1,919 | 1.96 |
| YDR450W | 789 | 583 | 46,325 | 121.52 | YMR178W | 2449 | 1,008 | 3,354 | 3.33 |
| YDR451C | 455 | 1,305 | 1,992 | 1.53 | YMR183C | 2280 | 1,043 | 4,569 | 4.38 |
| YDR452W | 790 | 2,215 | 6,017 | 2.72 | YMR184W | 2450 | 702 | 2,989 | 4.26 |
| YDR454C | 454 | 680 | 16,395 | 24.11 | YMR186W | 2451 | 2,234 | 131,814 | 72.43 |
| YDR456W | 791 | 1,975 | 7,720 | 3.91 | YMR189W | 2452 | 3,342 | 7,768 | 2.32 |
| YDR459C | 453 | 1,372 | 2,823 | 2.06 | YMR191W | 2453 | 1,311 | 4,526 | 3.46 |
| YDR461C-A | 452 | 405 | 491 | 1.23 | YMR194C-B | 2279 | 365 | 391 | 1.07 |
| YDR462W | 792 | 606 | 1,110 | 1.83 | YMR194W | 2454 | 402 | 11,622 | 35.54 |
| YDR463W | 793 | 1,765 | 2,255 | 1.28 | YMR195W | 2455 | 589 | 1,121 | 1.90 |
| YDR465C | 451 | 1,420 | 2,817 | 1.98 | YMR197C | 2278 | 847 | 1,539 | 1.82 |
| YDR469W | 794 | 620 | 642 | 1.04 | YMR199W | 2456 | 1,932 | 2,284 | 1.18 |
| YDR471W | 795 | 550 | 37,251 | 77.81 | YMR200W | 2457 | 1,224 | 4,071 | 3.33 |
| YDR472W | 796 | 1,360 | 2,252 | 1.69 | YMR202W | 2458 | 768 | 57,484 | 74.85 |
| YDR476C | 450 | 864 | 3,625 | 4.20 | YMR203W | 2459 | 1,440 | 14,564 | 10.11 |
| YDR477W | 797 | 2,285 | 4,128 | 1.81 | YMR205C | 2277 | 3,237 | 70,114 | 21.69 |
| YDR481C | 449 | 1,787 | 20,345 | 11.41 | YMR208W | 2460 | 1,440 | 3,873 | 2.69 |
| YDR482C | 448 | 688 | 972 | 1.41 | YMR209C | 2276 | 2,455 | 3,220 | 1.31 |
| YDR483W | 798 | 1,510 | 29,226 | 19.36 | YMR212C | 2275 | 2,569 | 7,755 | 3.02 |
| YDR486C | 447 | 842 | 949 | 1.13 | YMR214W | 2461 | 1,333 | 6,734 | 5.05 |
| YDR487C | 446 | 764 | 16,249 | 21.27 | YMR215W | 2462 | 1,724 | 18,343 | 10.64 |
| YDR489W | 799 | 885 | 1,600 | 1.81 | YMR216C | 2274 | 2,603 | 2,717 | 1.04 |
| YDR492W | 800 | 1,185 | 2,006 | 1.69 | YMR217W | 2463 | 1,704 | 81,170 | 47.63 |
| YDR493W | 801 | 560 | 1,454 | 2.60 | YMR220W | 2464 | 1,519 | 6,148 | 4.05 |
| YDR496C | 445 | 2,057 | 2,557 | 1.24 | YMR221C | 2273 | 1,626 | 5,348 | 3.29 |
| YDR497C | 444 | 1,916 | 24,928 | 13.02 | YMR222C | 2272 | 745 | 2,779 | 3.73 |
| YDR498C | 443 | 1,226 | 1,541 | 1.26 | YMR223W | 2465 | 1,899 | 2,082 | 1.10 |
| YDR500C | 442 | 342 | 24,757 | 86.47 | YMR225C | 2271 | 439 | 443 | 1.01 |
| YDR502C | 441 | 1,458 | 22,286 | 15.99 | YMR226C | 2270 | 872 | 7,525 | 8.63 |
| YDR503C | 440 | 1,006 | 2,018 | 2.01 | YMR229C | 2269 | 5,379 | 11,883 | 2.21 |
| YDR508C | 439 | 2,333 | 17,086 | 7.36 | YMR230W | 2466 | 444 | 29,974 | 84.99 |
| YDR510W | 802 | 508 | 9,261 | 18.23 | YMR235C | 2268 | 1,386 | 14,836 | 10.70 |
| YDR511W | 803 | 491 | 1,338 | 2.72 | YMR236W | 2467 | 607 | 4,191 | 6.90 |
| YDR512C | 438 | 598 | 1,219 | 2.04 | YMR237W | 2468 | 2,392 | 5,681 | 2.37 |
| YDR513W | 804 | 534 | 5,876 | 11.00 | YMR238W | 2469 | 1,596 | 6,640 | 4.16 |
| YDR516C | 437 | 1,694 | 7,095 | 4.19 | YMR241W | 2470 | 1,125 | 10,595 | 9.42 |
| YDR517W | 805 | 1,371 | 8,487 | 6.19 | YMR242C | 2267 | 690 | 22,978 | 49.56 |
| YDR518W | 806 | 1,624 | 7,189 | 4.43 | YMR243C | 2266 | 1,602 | 36,957 | 23.07 |
| YDR519W | 807 | 682 | 6,436 | 9.44 | YMR246W | 2471 | 2,486 | 23,299 | 9.40 |
| YDR524C-B | 19 | 361 | 168,412 | 469.49 | YMR250W | 2472 | 1,902 | 2,777 | 1.46 |
| YDR525W-A | 808 | 545 | 1,325 | 2.43 | YMR251W-A | 2473 | 412 | 20,078 | 49.02 |
| YDR529C | 436 | 600 | 4,264 | 7.11 | YMR252C | 2265 | 774 | 1,313 | 1.70 |
| YDR530C | 435 | 1,080 | 2,033 | 1.88 | YMR256C | 2264 | 350 | 903 | 2.58 |
| YDR531W | 809 | 1,230 | 5,442 | 4.42 | YMR258C | 2263 | 1,722 | 2,808 | 1.63 |
| YDR533C | 434 | 821 | 1,828 | 2.23 | YMR260C | 2262 | 616 | 6,087 | 9.88 |
| YDR538W | 810 | 940 | 1,762 | 1.87 | YMR261C | 2261 | 3,457 | 8,286 | 2.40 |
| YDR539W | 811 | 1,675 | 4,702 | 2.81 | YMR262W | 2474 | 1,074 | 2,079 | 1.94 |
| YDR541C | 433 | 1,345 | 2,098 | 1.56 | YMR264W | 2475 | 780 | 5,756 | 7.38 |
| YEL001C | 882 | 783 | 10,351 | 13.22 | YMR266W | 2476 | 3,104 | 9,580 | 3.09 |
| YEL002C | 881 | 1,467 | 20,301 | 13.84 | YMR267W | 2477 | 1,192 | 1,894 | 1.59 |
| YEL003W | 901 | 461 | 1,498 | 3.25 | YMR272C | 2260 | 1,340 | 8,869 | 6.62 |
| YEL006W | 902 | 1,195 | 2,821 | 2.36 | YMR274C | 2259 | 948 | 1,220 | 1.29 |
| YEL007W | 903 | 2,380 | 3,818 | 1.62 | YMR276W | 2478 | 1,252 | 20,322 | 16.23 |
| YEL009C | 880 | 1,489 | 75,457 | 50.68 | YMR277W | 2479 | 2,461 | 4,116 | 1.68 |
| YEL013W | 904 | 1,737 | 10,338 | 5.95 | YMR278W | 2480 | 2,023 | 2,183 | 1.08 |
| YEL015W | 905 | 1,735 | 3,145 | 1.81 | YMR281W | 2481 | 1,125 | 2,183 | 1.94 |
| YEL016C | 879 | 1,722 | 3,111 | 1.81 | YMR286W | 2482 | 391 | 428 | 1.09 |
| YEL017C-A | 878 | 609 | 25,238 | 42.56 | YMR290C | 2258 | 1,723 | 6,187 | 3.59 |
| YEL017W | 906 | 1,233 | 5,240 | 4.25 | YMR292W | 2483 | 559 | 1,804 | 3.23 |
| YEL020C | 877 | 1,683 | 2,157 | 1.28 | YMR295C | 2257 | 809 | 6,916 | 8.55 |
| YEL020W-A | 907 | 381 | 4,411 | 11.58 | YMR296C | 2256 | 1,821 | 15,468 | 8.49 |
| YEL021W | 908 | 804 | 2,496 | 3.10 | YMR297W | 2484 | 1,785 | 60,426 | 33.85 |
| YEL024W | 909 | 1,232 | 4,257 | 3.45 | YMR298W | 2485 | 592 | 4,325 | 7.30 |
| YEL025C | 876 | 3,845 | 3,991 | 1.04 | YMR300C | 2255 | 1,689 | 6,265 | 3.71 |
| YEL026W | 910 | 558 | 19,564 | 35.06 | YMR301C | 2254 | 2,247 | 2,497 | 1.11 |
| YEL027W | 911 | 788 | 48,154 | 61.11 | YMR303C | 2253 | 1,099 | 3,198 | 4.17 |
| YEL029C | 875 | 1,094 | 1,862 | 1.70 | YMR305C | 2252 | 1,461 | 46,887 | 32.21 |
| YEL031W | 912 | 3,759 | 38,016 | 10.11 | YMR307W | 2486 | 1,931 | 103,078 | 53.52 |
| YEL032W | 913 | 3,109 | 8,885 | 2.86 | YMR308C | 2251 | 3,429 | 18,499 | 5.39 |
| YEL034W | 914 | 693 | 83,184 | 141.72 | YMR309C | 2250 | 2,663 | 13,005 | 4.88 |
| YEL036C | 874 | 1,682 | 7,694 | 4.70 | YMR310C | 2249 | 1,043 | 2,180 | 2.09 |
| YEL037C | 873 | 1,492 | 8,841 | 5.92 | YMR312W | 2487 | 953 | 1,546 | 1.62 |
| YEL038W | 915 | 765 | 8,489 | 11.10 | YMR314W | 2488 | 921 | 11,316 | 12.29 |
| YEL040W | 916 | 1,538 | 34,336 | 22.38 | YMR315W | 2489 | 1,220 | 8,930 | 7.32 |
| YEL042W | 917 | 1,846 | 13,023 | 7.05 | YMR318C | 2248 | 1,331 | 30,660 | 23.03 |
| YEL043W | 918 | 2,948 | 3,577 | 1.21 | YMR319C | 2247 | 2,043 | 4,728 | 2.31 |
| YEL044W | 919 | 655 | 2,576 | 3.93 | YMR321C | 2246 | 318 | 309 | 2.39 |
| YEL046C | 872 | 1,728 | 53,744 | 31.11 | YNL002C | 2589 | 1,046 | 1,897 | 1.81 |
| YEL047C | 871 | 1,507 | 11,642 | 7.74 | YNL003C | 2588 | 1,060 | 1,922 | 1.81 |
| YEL048C | 870 | 1,031 | 3,060 | 2.97 | YNL005C | 2587 | 1,239 | 1,466 | 1.18 |
| YEL050C | 869 | 1,358 | 3,421 | 2.52 | YNL006W | 2600 | 1,120 | 3,161 | 2.82 |
| YEL051W | 920 | 922 | 15,700 | 17.03 | YNL007C | 2586 | 1,213 | 10,254 | 8.45 |
| YEL052W | 921 | 1,679 | 5,260 | 3.13 | YNL008C | 2585 | 2,010 | 2,054 | 1.02 |
| YEL054C | 868 | 714 | 44,224 | 73.96 | YNL010W | 2601 | 867 | 19,200 | 22.15 |
| YEL056W | 922 | 1,500 | 2,581 | 1.72 | YNL015W | 2602 | 363 | 2,355 | 6.49 |
| YEL058W | 923 | 1,782 | 19,798 | 11.11 | YNL016W | 2603 | 2,010 | 7,345 | 3.69 |
| YEL059C-A | 867 | 405 | 543 | 1.34 | YNL022C | 2584 | 1,552 | 2,369 | 1.53 |
| YEL060C | 866 | 2,370 | 4,284 | 1.81 | YNL023C | 2583 | 3,111 | 4,036 | 1.30 |
| YEL063C | 865 | 1,965 | 5,187 | 2.64 | YNL024C-A | 2582 | 533 | 4,368 | 8.19 |
| YEL065W | 924 | 2,098 | 9,996 | 4.76 | YNL026W | 2604 | 1,595 | 2,938 | 1.84 |
| YEL066W | 925 | 597 | 2,047 | 3.43 | YNL029C | 2581 | 1,608 | 1,661 | 1.03 |
| YEL071W | 926 | 1,641 | 17,645 | 10.76 | YNL030W | 2605 | 546 | 13,249 | 34.32 |
| YER001W | 927 | 2,751 | 7,591 | 2.76 | YNL031C | 2580 | 663 | 41,414 | 77.12 |
| YER003C | 864 | 1,375 | 23,509 | 17.10 | YNL035C | 2579 | 1,422 | 3,927 | 2.76 |
| YER004W | 928 | 1,092 | 8,779 | 8.04 | YNL036W | 2606 | 829 | 2,244 | 2.71 |
| YER005W | 929 | 1,984 | 5,430 | 2.74 | YNL037C | 2578 | 1,296 | 11,282 | 8.70 |
| YER006W | 930 | 1,648 | 6,410 | 3.89 | YNL38W | 2607 | 786 | 1,142 | 1.45 |
| YER007C-A | 863 | 741 | 1,742 | 2.35 | YNL040W | 2608 | 1,567 | 1,956 | 1.25 |
| YER009W | 931 | 559 | 40,083 | 71.88 | YNL044W | 2609 | 752 | 8,781 | 11.68 |
| YER010C | 862 | 876 | 3,448 | 3.94 | YNL045W | 2610 | 2,084 | 8,849 | 4.25 |
| YER011W | 932 | 985 | 4,130 | 4.85 | YNL046W | 2611 | 767 | 4,472 | 5.83 |
| YER012W | 933 | 776 | 3,075 | 3.96 | YNL048W | 2612 | 1,757 | 2,765 | 1.57 |
| YER014W | 934 | 1,761 | 2,096 | 1.19 | YNL049C | 2577 | 2,757 | 5,714 | 2.07 |
| YER017C | 861 | 2,423 | 3,635 | 1.50 | YNL052W | 2613 | 754 | 5,943 | 7.88 |
| YER018C | 860 | 865 | 2,300 | 2.66 | YNL053W | 2614 | 1,926 | 2,122 | 1.10 |
| YER019C-A | 859 | 347 | 14,305 | 41.22 | YNL055C | 2576 | 931 | 56,070 | 60.22 |
| YER019W | 935 | 1,634 | 6,550 | 4.01 | YNL056W | 2615 | 750 | 3,191 | 4.25 |
| YER020W | 936 | 1,632 | 2,219 | 1.36 | YNL058C | 2575 | 1,056 | 1,629 | 1.55 |
| YER021W | 937 | 1,700 | 13,139 | 7.73 | YNL061W | 2616 | 2,036 | 3,231 | 1.59 |
| YER023W | 938 | 958 | 16,821 | 17.56 | YNL062C | 2574 | 1,437 | 3,494 | 2.43 |
| YER025W | 939 | 1,891 | 22,741 | 12.03 | YNL063W | 2617 | 1,187 | 1,376 | 1.16 |
| YER026C | 858 | 1,003 | 13,025 | 12.99 | YNL064C | 2573 | 1,524 | 19,986 | 13.11 |
| YER027C | 857 | 1,382 | 3,231 | 2.34 | YNL066W | 2618 | 1,819 | 25,121 | 13.82 |
| YER031C | 856 | 812 | 7,891 | 9.72 | YNL067W | 2619 | 777 | 34,572 | 63.89 |
| YER034W | 940 | 799 | 797 | 1.02 | YNL069C | 2572 | 735 | 99,584 | 145.05 |
| YER035W | 941 | 783 | 798 | 1.04 | YNL070W | 2620 | 382 | 5,430 | 14.21 |
| YER036C | 855 | 1,940 | 31,912 | 16.45 | YNL071W | 2621 | 1,639 | 29,600 | 18.14 |
| YER043C | 854 | 1,560 | 62,895 | 40.32 | YNL072W | 2622 | 1,015 | 2,037 | 2.01 |
| YER044C | 853 | 619 | 4,010 | 6.48 | YNL073W | 2623 | 1,810 | 1,814 | 1.00 |
| YER048C | 852 | 1,344 | 2,292 | 1.70 | YNL074C | 2571 | 1,463 | 3,060 | 2.09 |
| YER048W-A | 942 | 686 | 4,116 | 6.00 | YNL075W | 2624 | 1,166 | 1,905 | 1.64 |
| YER049W | 943 | 2,119 | 10,730 | 5.06 | YNL078W | 2625 | 1,402 | 4,621 | 3.30 |
| YER050C | 851 | 534 | 841 | 1.57 | YNL079C | 2570 | 788 | 10,926 | 13.87 |
| YER052C | 850 | 1,754 | 8,959 | 5.12 | YNL080C | 2569 | 1,269 | 4,005 | 3.16 |
| YER055C | 849 | 1,093 | 23,911 | 21.88 | YNL081C | 2568 | 639 | 1,909 | 2.99 |
| YER056C | 848 | 1,778 | 22,682 | 13.82 | YNL084C | 2567 | 1,162 | 1,670 | 1.44 |
| YER056C-A | 847 | 443 | 14,359 | 45.00 | YNL085W | 2626 | 3,018 | 9,973 | 3.30 |
| YER057C | 846 | 479 | 9,977 | 20.83 | YNL087W | 2627 | 3,903 | 10,730 | 2.75 |
| YER060W | 944 | 1,854 | 4,010 | 2.19 | YNL090W | 2628 | 843 | 1,848 | 2.19 |
| YER060W-A | 945 | 1,593 | 1,739 | 1.20 | YNL094W | 2629 | 2,085 | 3,365 | 1.61 |
| YER062C | 845 | 1,098 | 8,305 | 7.65 | YNL096C | 2566 | 784 | 24,491 | 37.46 |
| YER063W | 946 | 871 | 2,765 | 3.17 | YNL099C | 2565 | 987 | 2,553 | 2.59 |
| YER064C | 844 | 1,843 | 4,250 | 2.31 | YNL100W | 2630 | 866 | 1,930 | 2.23 |
| YER070W | 947 | 2,911 | 44,006 | 15.16 | YNL101W | 2631 | 2,510 | 6,019 | 2.40 |
| YER072W | 948 | 576 | 19,044 | 33.06 | YNL104C | 2564 | 1,964 | 11,987 | 6.22 |
| YER073W | 949 | 1,872 | 6,120 | 3.27 | YNL108C | 2563 | 970 | 2,397 | 2.47 |
| YER074W | 950 | 540 | 32,518 | 120.58 | YNL111C | 2562 | 635 | 2,612 | 4.11 |
| YER074W-A | 951 | 347 | 1,908 | 5.50 | YNL112W | 2632 | 1,801 | 17,969 | 10.01 |
| YER078C | 843 | 1,659 | 1,665 | 1.00 | YNL113W | 2633 | 601 | 3,003 | 5.00 |
| YER080W | 952 | 1,966 | 2,099 | 1.07 | YNL115C | 2561 | 2,103 | 2,156 | 1.02 |
| YER081W | 953 | 1,790 | 2,507 | 1.50 | YNL116W | 2634 | 1,783 | 2,116 | 1.19 |
| YER082C | 842 | 1,808 | 2,002 | 1.11 | YNL118C | 2560 | 3,072 | 3,861 | 1.26 |
| YER083C | 841 | 902 | 4,277 | 4.74 | YNL121C | 2559 | 2,002 | 4,306 | 2.15 |
| YER086W | 954 | 1,935 | 21,985 | 11.36 | YNL122C | 2558 | 348 | 578 | 1.66 |
| YER087C-B | 840 | 470 | 7,106 | 15.12 | YNL123W | 2635 | 3,166 | 7,440 | 2.35 |
| YER088C | 839 | 2,593 | 3,624 | 1.40 | YNL125C | 2557 | 2,133 | 3,028 | 1.42 |
| YER089C | 838 | 1,754 | 6,532 | 3.72 | YNL130C | 2556 | 1,290 | 12,037 | 9.33 |
| YER090W | 955 | 1,680 | 8,147 | 4.85 | YNL131W | 2636 | 996 | 11,208 | 11.25 |
| YER091C | 837 | 2,558 | 24,401 | 9.54 | YNL132W | 2637 | 3,335 | 6,712 | 2.01 |
| YER092W | 956 | 378 | 1,505 | 3.98 | YNL134C | 2555 | 1,226 | 13,573 | 11.07 |
| YER094C | 836 | 962 | 15,654 | 16.27 | YNL135C | 2554 | 562 | 22,734 | 40.45 |
| YER095W | 957 | 1,486 | 5,539 | 3.73 | YNL137C | 2553 | 1,757 | 3,269 | 1.86 |
| YER099C | 835 | 1,281 | 2,590 | 2.02 | YNL138W | 2638 | 1,761 | 10,852 | 6.16 |
| YER100W | 958 | 1,112 | 2,045 | 1.84 | YNL138W-A | 2639 | 406 | 1,042 | 2.57 |
| YER102W | 959 | 1,036 | 15,809 | 28.76 | YNL141W | 2640 | 1,226 | 15,692 | 12.80 |
| YER105C | 834 | 4,434 | 7,475 | 1.69 | YNL147W | 2641 | 629 | 675 | 1.07 |
| YER107C | 833 | 1,388 | 4,535 | 3.27 | YNL149C | 2552 | 532 | 4,299 | 8.14 |
| YER110C | 832 | 3,459 | 34,111 | 9.86 | YNL151C | 2551 | 895 | 1,014 | 1.13 |
| YER113C | 831 | 2,121 | 3,413 | 1.61 | YNL153C | 2550 | 602 | 2,760 | 4.69 |
| YER117W | 960 | 510 | 33,519 | 102.23 | YNL154C | 2549 | 2,163 | 7,264 | 3.38 |
| YER118C | 830 | 1,455 | 4,180 | 2.87 | YNL155W | 2642 | 1,086 | 3,485 | 3.21 |
| YER119C | 829 | 1,575 | 2,859 | 1.81 | YNL156C | 2548 | 1,174 | 4,378 | 3.73 |
| YER120W | 961 | 861 | 19,958 | 23.23 | YNL157W | 2643 | 710 | 661 | 1.20 |
| YER122C | 828 | 1,686 | 5,204 | 3.09 | YNL158W | 2644 | 1,044 | 1,851 | 2.08 |
| YER124C | 827 | 2,060 | 10,002 | 4.85 | YNL159C | 2547 | 1,202 | 1,998 | 1.66 |
| YER125W | 962 | 3,315 | 13,912 | 4.20 | YNL160W | 2645 | 1,327 | 10,614 | 8.00 |
| YER126C | 826 | 935 | 2,569 | 2.75 | YNL161W | 2646 | 2,512 | 2,835 | 1.14 |
| YER127W | 963 | 1,182 | 1,201 | 1.02 | YNL162W | 2647 | 433 | 11,978 | 57.37 |
| YER131W | 964 | 867 | 14,680 | 19.14 | YNL168C | 2546 | 958 | 9,303 | 9.71 |
| YER133W | 965 | 1,228 | 4,483 | 3.65 | YNL169C | 2545 | 1,629 | 5,443 | 3.34 |
| YER134C | 825 | 794 | 1,596 | 2.01 | YNL173C | 2544 | 1,217 | 1,438 | 1.18 |
| YER136W | 966 | 1,762 | 7,730 | 4.39 | YNL175C | 2543 | 1,302 | 3,143 | 2.41 |
| YER141W | 967 | 2,711 | 4,108 | 1.79 | YNL177C | 2542 | 1,122 | 1,397 | 1.24 |
| YER143W | 968 | 1,502 | 2,362 | 1.57 | YNL178W | 2648 | 808 | 374,769 | 463.82 |
| YER145C | 824 | 1,327 | 16,160 | 12.18 | YNL182C | 2541 | 1,794 | 4,584 | 2.55 |
| YER146W | 969 | 367 | 7,138 | 19.45 | YNL185C | 2540 | 681 | 987 | 1.45 |
| YER147C | 823 | 1,968 | 2,678 | 1.36 | YNL186W | 2649 | 2,723 | 3,665 | 1.35 |
| YER148W | 970 | 913 | 4,971 | 5.44 | YNL189W | 2650 | 1,951 | 15,301 | 7.84 |
| YER149C | 822 | 1,586 | 2,560 | 1.61 | YNL190W | 2651 | 1,428 | 16,630 | 14.03 |
| YER150W | 971 | 633 | 840 | 1.33 | YNL191W | 2652 | 1,206 | 1,309 | 1.09 |
| YER152C | 821 | 1,364 | 9,996 | 7.33 | YNL192W | 2653 | 3,617 | 6,045 | 1.67 |
| YER153C | 820 | 765 | 878 | 1.15 | YNL197C | 2539 | 3,002 | 5,126 | 1.71 |
| YER154W | 972 | 1,297 | 2,712 | 2.09 | YNL200C | 2538 | 902 | 2,312 | 2.56 |
| YER155C | 819 | 6,694 | 10,240 | 1.53 | YNL207W | 2654 | 1,576 | 5,730 | 3.64 |
| YER156C | 818 | 1,121 | 9,582 | 8.55 | YNL208W | 2655 | 728 | 19,212 | 26.89 |
| YER157W | 973 | 2,406 | 2,735 | 1.14 | YNL209W | 2656 | 1,987 | 43,668 | 63.56 |
| YER159C | 817 | 718 | 894 | 1.24 | YNL216W | 2657 | 2,692 | 6,895 | 2.56 |
| YER163C | 816 | 753 | 3,531 | 4.69 | YNL217W | 2658 | 1,115 | 5,615 | 5.03 |
| YER165W | 974 | 2,019 | 29,564 | 14.65 | YNL219C | 2537 | 2,977 | 8,984 | 3.02 |
| YER166W | 975 | 4,798 | 6,168 | 1.29 | YNL220W | 2659 | 1,483 | 11,593 | 7.82 |
| YER168C | 815 | 1,723 | 2,664 | 1.55 | YNL221C | 2536 | 2,821 | 3,346 | 1.19 |
| YER174C | 814 | 820 | 4,594 | 5.60 | YNL222W | 2660 | 698 | 789 | 1.13 |
| YER177W | 976 | 1,021 | 62,595 | 63.70 | YNL231C | 2535 | 1,374 | 2,069 | 1.53 |
| YER178W | 977 | 1,415 | 53,201 | 37.60 | YNL232W | 2661 | 971 | 6,023 | 6.20 |
| YER183C | 813 | 708 | 3,425 | 4.84 | YNL238W | 2662 | 2,823 | 6,364 | 2.25 |
| YER186C | 812 | 1,101 | 4,008 | 3.64 | YNL239W | 2663 | 1,565 | 11,323 | 7.23 |
| YFL001W | 1011 | 1,370 | 1,421 | 1.04 | YNL240C | 2534 | 1,743 | 3,942 | 2.26 |
| YFL004W | 1012 | 2,707 | 10,187 | 3.76 | YNL241C | 2533 | 1,772 | 15,927 | 8.99 |
| YFL005W | 1013 | 1,028 | 11,565 | 11.25 | YNL243W | 2664 | 3,018 | 18,405 | 6.10 |
| YFL007W | 1014 | 6,623 | 9,496 | 1.43 | YNL244C | 2532 | 473 | 13,305 | 28.17 |
| YFL009W | 1015 | 2,606 | 3,670 | 1.44 | YNL246W | 2665 | 1,099 | 2,702 | 2.46 |
| YFL010C | 1007 | 790 | 8,449 | 10.79 | YNL247W | 2666 | 2,433 | 7,872 | 3.24 |
| YFL014W | 1016 | 543 | 1,008 | 1.86 | YNL248C | 2531 | 1,483 | 5,283 | 3.56 |
| YFL016C | 1006 | 1,631 | 4,940 | 3.03 | YNL251C | 2530 | 2,041 | 3,790 | 1.86 |
| YFL017C | 1005 | 681 | 1,434 | 2.11 | YNL255C | 2529 | 735 | 20,838 | 28.35 |
| YFL017W-A | 1017 | 337 | 677 | 2.01 | YNL256W | 2667 | 2,620 | 3,264 | 1.25 |
| YFL018C | 1004 | 1,652 | 12,406 | 7.51 | YNL259C | 2528 | 323 | 1,210 | 3.75 |
| YFL021W | 1018 | 1,679 | 1,868 | 1.11 | YNL261W | 2668 | 1,901 | 3,510 | 1.86 |
| YFL022C | 1003 | 1,666 | 21,248 | 12.75 | YNL263C | 2527 | 1,193 | 10,249 | 8.59 |
| YFL028C | 1002 | 953 | 2,534 | 2.66 | YNL264C | 2526 | 1,231 | 3,412 | 2.77 |
| YFL031W | 1019 | 1,201 | 64,554 | 53.75 | YNL265C | 2525 | 1,176 | 1,467 | 1.25 |
| YFL034C-A | 1001 | 460 | 5,199 | 11.36 | YNL268W | 2669 | 2,100 | 9,425 | 4.54 |
| YFL037W | 1020 | 1,666 | 30,461 | 18.29 | YNL280C | 2524 | 1,474 | 9,679 | 6.57 |
| YFL038C | 1000 | 768 | 9,137 | 11.90 | YNL281W | 2670 | 654 | 8,526 | 13.04 |
| YFL039C | 999 | 1,338 | 154,961 | 115.86 | YNL282W | 2671 | 588 | 1,020 | 1.73 |
| YFL041W | 1021 | 2,055 | 5,998 | 2.92 | YNL283C | 2523 | 1,619 | 6,387 | 3.94 |
| YFL044C | 998 | 1,118 | 3,271 | 2.93 | YNL284C | 2522 | 969 | 1,437 | 1.48 |
| YFL045C | 997 | 985 | 54,920 | 55.79 | YNL287W | 2672 | 3,234 | 18,302 | 5.66 |
| YFL046W | 1022 | 803 | 927 | 1.15 | YNL288W | 2673 | 1,402 | 5,551 | 3.96 |
| YFL047W | 1023 | 2,205 | 2,839 | 1.29 | YNL289W | 2674 | 1,069 | 1,395 | 1.30 |
| YFL048C | 996 | 1,448 | 15,802 | 10.91 | YNL290W | 2675 | 1,336 | 3,024 | 2.26 |
| YFR001W | 1024 | 734 | 917 | 1.25 | YNL291C | 2521 | 1,954 | 6,222 | 3.18 |
| YFR002W | 1025 | 2,619 | 3,481 | 1.33 | YNL292W | 2676 | 1,213 | 1,337 | 1.10 |
| YFR003C | 995 | 623 | 1,401 | 2.25 | YNL294C | 2520 | 1,910 | 3,856 | 2.02 |
| YFR004W | 1026 | 1,017 | 3,265 | 3.21 | YNL300W | 2677 | 659 | 4,686 | 7.11 |
| YFR005C | 994 | 1,573 | 2,758 | 1.75 | YNL301C | 2519 | 729 | 18,808 | 45.43 |
| YFR006W | 1027 | 1,879 | 6,792 | 3.61 | YNL302C | 2518 | 545 | 35,640 | 101.94 |
| YFR009W | 1028 | 2,391 | 10,825 | 4.54 | YNL305C | 2517 | 994 | 5,165 | 5.20 |
| YFR010W | 1029 | 1,675 | 2,955 | 1.76 | YNL306W | 2678 | 766 | 2,021 | 2.64 |
| YFR011C | 993 | 513 | 582 | 1.13 | YNL307C | 2516 | 1,617 | 20,848 | 12.90 |
| YFR014C | 992 | 1,737 | 1,927 | 1.11 | YNL310C | 2515 | 603 | 2,752 | 4.56 |
| YFR018C | 991 | 1,293 | 6,384 | 4.95 | YNL312W | 2679 | 928 | 3,550 | 3.82 |
| YFR021W | 1030 | 1,680 | 2,260 | 1.35 | YNL313C | 2514 | 2,782 | 4,223 | 1.52 |
| YFR024C-A | 990 | 1,533 | 10,318 | 6.74 | YNL315C | 2513 | 1,023 | 3,216 | 3.16 |
| YFR025C | 989 | 1,124 | 4,347 | 3.87 | YNL320W | 2680 | 1,019 | 2,427 | 2.38 |
| YFR028C | 988 | 1,749 | 4,390 | 2.51 | YNL321W | 2681 | 2,727 | 5,246 | 1.92 |
| YFR030W | 1031 | 3,210 | 3,792 | 1.18 | YNL322C | 2512 | 994 | 10,594 | 10.66 |
| YFR031C-A | 987 | 924 | 26,378 | 60.18 | YNL323W | 2682 | 1,441 | 2,782 | 1.93 |
| YFR032C-A | 20 | 588 | 100,484 | 198.09 | YNL326C | 2511 | 1,214 | 1,634 | 1.35 |
| YFR033C | 986 | 675 | 749 | 1.22 | YNL327W | 2683 | 3,278 | 22,775 | 7.14 |
| YFR034C | 985 | 1,317 | 2,459 | 1.95 | YNL329C | 2510 | 3,217 | 3,272 | 1.02 |
| YFR037C | 984 | 1,792 | 5,709 | 3.19 | YNL330C | 2509 | 1,389 | 4,022 | 2.90 |
| YFR039C | 983 | 1,692 | 3,454 | 2.04 | YNR001C | 2508 | 1,644 | 6,870 | 4.18 |
| YFR042W | 1032 | 748 | 3,388 | 4.53 | YNR003C | 2507 | 1,055 | 3,469 | 3.29 |
| YFR044C | 982 | 1,493 | 21,797 | 14.60 | YNR009W | 2684 | 1,052 | 1,168 | 1.11 |
| YFR045W | 1033 | 1,052 | 1,261 | 1.20 | YNR012W | 2685 | 1,680 | 2,248 | 1.34 |
| YFR047C | 981 | 971 | 4,411 | 4.54 | YNR013C | 2506 | 2,799 | 9,152 | 3.27 |
| YFR049W | 1034 | 652 | 932 | 1.43 | YNR015W | 2686 | 1,203 | 4,092 | 3.40 |
| YFR050C | 980 | 959 | 8,865 | 9.24 | YNR016C | 2505 | 7,327 | 57,034 | 7.78 |
| YFR051C | 979 | 1,734 | 15,035 | 8.67 | YNR017W | 2687 | 1,018 | 5,222 | 5.13 |
| YFR052W | 1035 | 1,066 | 4,090 | 3.84 | YNR018W | 2688 | 843 | 7,310 | 8.67 |
| YFR053C | 978 | 1,695 | 5,007 | 2.97 | YNR019W | 2689 | 2,046 | 5,199 | 2.56 |
| YFR055W | 1036 | 1,493 | 5,318 | 3.56 | YNR021W | 2690 | 1,422 | 16,839 | 11.84 |
| YGL001C | 1168 | 1,207 | 14,621 | 12.11 | YNR022C | 2504 | 529 | 1,736 | 3.28 |
| YGL002W | 1193 | 926 | 3,698 | 3.99 | YNR027W | 2691 | 1,235 | 2,763 | 2.24 |
| YGL003C | 1167 | 2,025 | 2,153 | 1.06 | YNR028W | 2692 | 1,019 | 2,991 | 2.93 |
| YGL006W | 1194 | 3,932 | 4,524 | 1.15 | YNR030W | 2693 | 1,875 | 3,579 | 1.91 |
| YGL008C | 1166 | 3,486 | 364,856 | 111.64 | YNR032C-A | 2503 | 329 | 739 | 2.25 |
| YGL009C | 1165 | 2,528 | 15,321 | 6.06 | YNR032W | 2694 | 1,236 | 3,490 | 2.82 |
| YGL010W | 1195 | 750 | 1,626 | 2.17 | YNR033W | 2695 | 2,456 | 4,723 | 1.92 |
| YGL011C | 1164 | 879 | 7,605 | 8.65 | YNR035C | 2502 | 1,096 | 12,610 | 11.50 |
| YGL012W | 1196 | 1,552 | 45,009 | 29.00 | YNR036C | 2501 | 609 | 7,452 | 12.32 |
| YGL014W | 1197 | 3,125 | 4,856 | 1.56 | YNR037C | 2500 | 383 | 2,360 | 6.16 |
| YGL016W | 1198 | 3,246 | 5,325 | 1.64 | YNR038W | 2696 | 2,052 | 2,912 | 1.42 |
| YGL017W | 1199 | 1,612 | 1,844 | 1.14 | YNR040W | 2697 | 855 | 1,208 | 1.41 |
| YGL019W | 1200 | 1,007 | 4,946 | 4.91 | YNR041C | 2499 | 1,165 | 3,502 | 3.01 |
| YGL020C | 1163 | 814 | 3,818 | 4.69 | YNR043W | 2698 | 1,348 | 14,561 | 10.80 |
| YGL021W | 1201 | 2,387 | 3,956 | 1.66 | YNR044W | 2699 | 2,275 | 4,089 | 1.86 |
| YGL022W | 1202 | 2,296 | 27,225 | 11.86 | YNR046W | 2700 | 560 | 6,300 | 11.25 |
| YGL023C | 1162 | 2,045 | 2,417 | 1.18 | YNR049C | 2498 | 785 | 984 | 1.25 |
| YGL025C | 1161 | 1,258 | 2,380 | 1.91 | YNR050C | 2497 | 1,535 | 15,310 | 9.97 |
| YGL026C | 1160 | 2,213 | 20,217 | 9.13 | YNR051C | 2496 | 2,274 | 2,557 | 1.12 |
| YGL027C | 1159 | 2,619 | 6,963 | 2.66 | YNR052C | 2495 | 1,431 | 6,776 | 4.82 |
| YGL028C | 1158 | 2,063 | 9,847 | 4.78 | YNR053C | 2494 | 1,582 | 7,878 | 4.98 |
| YGL030W | 21 | 464 | 186,050 | 400.97 | YNR055C | 2493 | 2,081 | 8,860 | 4.26 |
| YGL031C | 1157 | 1,064 | 32,200 | 35.64 | YNR061C | 2492 | 1,033 | 8,277 | 8.01 |
| YGL035C | 1156 | 1,856 | 2,507 | 1.36 | YNR067C | 2491 | 3,483 | 19,347 | 5.55 |
| YGL037C | 1155 | 822 | 15,209 | 18.50 | YNR074C | 2490 | 1,343 | 1,374 | 1.03 |
| YGL038C | 1154 | 1,661 | 3,601 | 2.17 | YOL001W | 2851 | 1,480 | 1,535 | 1.04 |
| YGL039W | 1203 | 1,255 | 6,213 | 4.95 | YOL002C | 2837 | 1,050 | 4,088 | 3.89 |
| YGL040C | 1153 | 1,290 | 14,603 | 11.32 | YOL003C | 2836 | 1,262 | 3,682 | 2.92 |
| YGL043W | 1204 | 1,184 | 4,970 | 4.20 | YOL004W | 2852 | 4,932 | 5,539 | 1.12 |
| YGL047W | 1205 | 670 | 945 | 1.41 | YOL005C | 2835 | 416 | 4,115 | 9.89 |
| YGL048C | 1152 | 1,308 | 12,327 | 9.43 | YOL007C | 2834 | 1,428 | 3,867 | 2.71 |
| YGL050W | 1206 | 822 | 1,221 | 1.49 | YOL008W | 2853 | 789 | 1,052 | 1.33 |
| YGL054C | 1151 | 502 | 7,191 | 14.32 | YOL010W | 2854 | 1,272 | 2,172 | 1.71 |
| YGL055W | 1207 | 1,852 | 36,054 | 19.47 | YOL011W | 2855 | 2,261 | 4,563 | 2.02 |
| YGL056C | 1150 | 1,748 | 2,313 | 1.32 | YOL012C | 2833 | 635 | 4,247 | 6.69 |
| YGL058W | 1208 | 800 | 4,838 | 6.11 | YOL013C | 2832 | 1,933 | 2,247 | 1.17 |
| YGL062W | 1209 | 4,007 | 6,870 | 1.82 | YOL013W-A | 2856 | 315 | 975 | 3.26 |
| YGL063W | 1210 | 1,113 | 1,467 | 1.32 | YOL014W | 2857 | 655 | 1,461 | 2.23 |
| YGL065C | 1149 | 1,512 | 1,667 | 1.10 | YOL020W | 2858 | 2,009 | 7,592 | 3.78 |
| YGL067W | 1211 | 1,298 | 2,781 | 2.14 | YOL021C | 2831 | 3,125 | 5,793 | 1.85 |
| YGL068W | 1212 | 743 | 8,333 | 11.21 | YOL022C | 2830 | 1,330 | 4,942 | 3.72 |
| YGL070C | 1148 | 698 | 1,558 | 2.23 | YOL026C | 2829 | 432 | 2,141 | 4.96 |
| YGL076C | 1147 | 847 | 48,212 | 123.09 | YOL027C | 2828 | 1,925 | 2,261 | 1.17 |
| YGL077C | 1146 | 1,811 | 9,002 | 4.97 | YOL030W | 2859 | 1,675 | 17,305 | 10.33 |
| YGL078C | 1145 | 1,818 | 3,882 | 2.13 | YOL031C | 2827 | 1,352 | 1,883 | 1.39 |
| YGL079W | 1213 | 851 | 1,084 | 1.27 | YOL036W | 2860 | 2,815 | 3,118 | 1.11 |
| YGL080W | 1214 | 711 | 1,623 | 2.28 | YOL038W | 2861 | 866 | 8,509 | 9.82 |
| YGL082W | 1215 | 1,381 | 2,669 | 1.93 | YOL039W | 2862 | 645 | 113,806 | 191.61 |
| YGL084C | 1144 | 1,832 | 7,160 | 3.91 | YOL040C | 2826 | 529 | 94,557 | 178.75 |
| YGL087C | 1143 | 545 | 874 | 1.60 | YOL041C | 2825 | 1,511 | 1,515 | 1.00 |
| YGL089C | 1142 | 363 | 34,800 | 97.10 | YOL042W | 2863 | 1,443 | 1,625 | 1.13 |
| YGL091C | 1141 | 1,175 | 1,863 | 1.59 | YOL048C | 2824 | 1,144 | 2,945 | 2.57 |
| YGL092W | 1216 | 4,051 | 5,081 | 1.25 | YOL049W | 2864 | 1,631 | 7,250 | 4.44 |
| YGL097W | 1217 | 1,589 | 6,861 | 4.32 | YOL052C | 2823 | 1,351 | 4,500 | 3.33 |
| YGL099W | 1218 | 2,006 | 2,100 | 1.05 | YOL052C-A | 2822 | 464 | 651 | 1.41 |
| YGL100W | 1219 | 1,162 | 5,006 | 4.31 | YOL056W | 2865 | 1,192 | 1,392 | 1.17 |
| YGL101W | 1220 | 1,003 | 2,831 | 2.82 | YOL057W | 2866 | 2,299 | 11,562 | 5.03 |
| YGL103W | 22 | 554 | 262,228 | 473.34 | YOL059W | 2867 | 1,801 | 12,170 | 6.77 |
| YGL105W | 1221 | 1,276 | 22,928 | 17.97 | YOL060C | 2821 | 2,478 | 3,543 | 1.43 |
| YGL106W | 1222 | 718 | 5,920 | 8.31 | YOL061W | 2868 | 1,685 | 22,296 | 13.24 |
| YGL111W | 1223 | 1,563 | 2,099 | 1.34 | YOL062C | 2820 | 1,731 | 6,691 | 3.86 |
| YGL112C | 1140 | 1,695 | 4,740 | 2.80 | YOL063C | 2819 | 2,940 | 2,985 | 1.01 |
| YGL114W | 1224 | 2,298 | 3,629 | 1.58 | YOL064C | 2818 | 1,164 | 6,752 | 5.80 |
| YGL115W | 1225 | 1,173 | 11,802 | 10.06 | YOL066C | 2817 | 1,845 | 2,132 | 1.16 |
| YGL120C | 1139 | 2,442 | 9,643 | 3.95 | YOL070C | 2816 | 1,660 | 1,703 | 1.02 |
| YGL122C | 1138 | 1,816 | 4,264 | 2.45 | YOL073C | 2815 | 1,048 | 4,110 | 3.92 |
| YGL123W | 23 | 952 | 442,048 | 464.54 | YOL077C | 2814 | 971 | 5,445 | 5.61 |
| YGL126W | 1226 | 1,435 | 13,827 | 9.68 | YOL077W-A | 2869 | 345 | 1,594 | 4.62 |
| YGL127C | 1137 | 492 | 2,055 | 4.19 | YOL082W | 2870 | 1,461 | 2,386 | 1.63 |
| YGL129C | 1136 | 1,564 | 2,073 | 1.32 | YOL086C | 2813 | 1,154 | 546,138 | 670.82 |
| YGL135W | 1227 | 813 | 36,219 | 165.42 | YOL086W-A | 2871 | 344 | 1,081 | 3.14 |
| YGL137W | 1228 | 2,880 | 16,454 | 5.71 | YOL088C | 2812 | 1,033 | 3,054 | 2.96 |
| YGL139W | 1229 | 2,819 | 4,735 | 1.69 | YOL092W | 2872 | 992 | 11,590 | 11.68 |
| YGL140C | 1135 | 3,923 | 4,496 | 1.15 | YOL094C | 2811 | 1,026 | 1,454 | 1.42 |
| YGL142C | 1134 | 2,008 | 4,254 | 2.12 | YOL097C | 2810 | 1,438 | 14,666 | 10.20 |
| YGL147C | 24 | 692 | 105,956 | 232.49 | YOL098C | 2809 | 3,434 | 10,761 | 3.13 |
| YGL148W | 1230 | 1,265 | 28,419 | 22.48 | YOL102C | 2808 | 834 | 879 | 1.05 |
| YGL155W | 1231 | 1,455 | 3,025 | 2.08 | YOL103W | 2873 | 2,183 | 4,694 | 2.15 |
| YGL157W | 1232 | 1,172 | 3,208 | 2.74 | YOL109W | 2874 | 537 | 56,663 | 105.52 |
| YGL160W | 1233 | 1,936 | 2,991 | 1.54 | YOL110W | 2875 | 898 | 2,373 | 2.64 |
| YGL161C | 1133 | 1,160 | 8,710 | 7.51 | YOL111C | 2807 | 805 | 2,432 | 3.02 |
| YGL166W | 1234 | 861 | 3,346 | 3.89 | YOL120C | 2806 | 651 | 42,695 | 128.72 |
| YGL167C | 1132 | 3,111 | 13,154 | 4.23 | YOL121C | 2805 | 537 | 23,809 | 69.68 |
| YGL169W | 1235 | 1,577 | 3,053 | 1.94 | YOL122C | 2804 | 2,013 | 5,608 | 2.79 |
| YGL172W | 1236 | 1,538 | 6,341 | 4.12 | YOL123W | 2876 | 2,091 | 8,102 | 3.87 |
| YGL173C | 1131 | 5,044 | 14,908 | 2.96 | YOL124C | 2803 | 1,390 | 2,370 | 1.70 |
| YGL181W | 1237 | 1,357 | 3,460 | 2.59 | YOL125W | 2877 | 1,514 | 2,344 | 1.55 |
| YGL186C | 1130 | 1,824 | 4,280 | 2.35 | YOL126C | 2802 | 1,514 | 1,905 | 1.26 |
| YGL187C | 1129 | 1,196 | 10,579 | 8.84 | YOL127W | 2878 | 523 | 151,867 | 291.08 |
| YGL189C | 1128 | 803 | 39,786 | 60.47 | YOL128C | 2801 | 1,330 | 1,353 | 1.02 |
| YGL191W | 1238 | 698 | 4,369 | 6.26 | YOL129W | 2879 | 734 | 6,145 | 8.37 |
| YGL193C | 1127 | 357 | 653 | 1.83 | YOL130W | 2880 | 3,091 | 7,205 | 2.34 |
| YGL194C-A | 1126 | 447 | 1,609 | 3.60 | YOL133W | 2881 | 653 | 4,262 | 6.53 |
| YGL195W | 1239 | 8,145 | 28,034 | 3.44 | YOL136C | 2800 | 1,707 | 2,394 | 1.40 |
| YGL196W | 1240 | 1,465 | 3,220 | 2.20 | YOL139C | 2799 | 797 | 30,133 | 37.83 |
| YGL198W | 1241 | 758 | 5,580 | 7.36 | YOL140W | 2882 | 1,338 | 2,653 | 1.98 |
| YGL200C | 1125 | 744 | 23,071 | 31.01 | YOL142W | 2883 | 797 | 1,881 | 2.36 |
| YGL202W | 1242 | 1,691 | 29,993 | 17.74 | YOL143C | 2798 | 608 | 13,439 | 22.10 |
| YGL206C | 1124 | 5,288 | 15,809 | 2.99 | YOL146W | 2884 | 670 | 1,659 | 2.48 |
| YGL207W | 1243 | 3,328 | 6,513 | 1.96 | YOL147C | 2797 | 911 | 3,460 | 3.80 |
| YGL210W | 1244 | 801 | 1,158 | 1.45 | YOL151W | 2885 | 1,118 | 6,215 | 5.56 |
| YGL211W | 1245 | 1,209 | 2,811 | 2.32 | YOL155C | 2796 | 2,904 | 3,330 | 1.24 |
| YGL213C | 1123 | 1,447 | 3,165 | 2.19 | YOL158C | 2795 | 1,971 | 9,229 | 4.68 |
| YGL215W | 1246 | 2,126 | 3,703 | 1.74 | YOL159C | 2794 | 575 | 842 | 1.46 |
| YGL219C | 1122 | 1,445 | 1,481 | 1.02 | YOR001W | 2886 | 2,302 | 3,269 | 1.42 |
| YGL220W | 1247 | 363 | 4,101 | 11.30 | YOR002W | 2887 | 1,754 | 13,061 | 7.45 |
| YGL221C | 1121 | 1,287 | 14,167 | 11.01 | YOR004W | 2888 | 958 | 2,414 | 2.52 |
| YGL223C | 1120 | 1,319 | 2,421 | 1.83 | YOR007C | 2793 | 1,154 | 22,861 | 19.82 |
| YGL224C | 1119 | 1,058 | 1,646 | 1.56 | YOR008C | 2792 | 1,631 | 4,729 | 2.90 |
| YGL225W | 1248 | 1,169 | 18,318 | 15.67 | YOR014W | 2889 | 2,593 | 4,369 | 1.68 |
| YGL226C-A | 1118 | 418 | 1,237 | 2.96 | YOR016C | 2791 | 832 | 4,060 | 4.88 |
| YGL228W | 1249 | 1,921 | 4,469 | 2.35 | YOR020C | 2790 | 424 | 14,235 | 33.57 |
| YGL231C | 1117 | 630 | 3,348 | 5.31 | YOR021C | 2789 | 795 | 5,357 | 6.74 |
| YGL234W | 1250 | 2,553 | 40,160 | 15.73 | YOR025W | 2890 | 1,536 | 1,832 | 1.19 |
| YGL236C | 1116 | 2,066 | 3,273 | 1.58 | YOR026W | 2891 | 1,066 | 1,520 | 1.43 |
| YGL238W | 1251 | 2,983 | 7,119 | 2.39 | YOR027W | 2892 | 2,045 | 13,611 | 6.65 |
| YGL242C | 1115 | 689 | 1,832 | 2.66 | YOR034C | 2788 | 2,351 | 3,759 | 1.60 |
| YGL245W | 1252 | 2,208 | 47,616 | 21.57 | YOR039W | 2893 | 1,131 | 4,118 | 3.64 |
| YGL246C | 1114 | 1,316 | 1,769 | 1.34 | YOR042W | 2894 | 1,287 | 2,857 | 2.22 |
| YGL248W | 1253 | 1,212 | 1,693 | 1.40 | YOR043W | 2895 | 1,673 | 3,438 | 2.05 |
| YGL252C | 1113 | 2,008 | 2,640 | 1.31 | YOR045W | 2896 | 379 | 14,119 | 37.25 |
| YGL253W | 1254 | 1,683 | 92,702 | 55.37 | YOR046C | 2787 | 1,534 | 5,572 | 3.63 |
| YGL254W | 1255 | 1,344 | 1,454 | 1.08 | YOR048C | 2786 | 3,121 | 7,586 | 2.43 |
| YGL255W | 1256 | 1,265 | 2,433 | 1.92 | YOR051C | 2785 | 1,437 | 5,077 | 3.53 |
| YGL256W | 1257 | 1,591 | 5,596 | 3.52 | YOR052C | 2784 | 814 | 3,493 | 4.29 |
| YGL257C | 1112 | 1,853 | 3,441 | 1.86 | YOR056C | 2783 | 1,442 | 2,024 | 1.40 |
| YGR001C | 1111 | 800 | 3,612 | 4.51 | YOR057W | 2897 | 1,526 | 1,873 | 1.23 |
| YGR004W | 1258 | 1,474 | 1,837 | 1.25 | YOR061W | 2898 | 1,359 | 2,034 | 1.50 |
| YGR007W | 1259 | 1,153 | 3,053 | 2.65 | YOR063W | 2899 | 1,308 | 523,283 | 400.17 |
| YGR008C | 1110 | 464 | 1,103 | 2.38 | YOR065W | 2900 | 1,547 | 2,619 | 1.70 |
| YGR010W | 1260 | 1,188 | 1,297 | 1.09 | YOR066W | 2901 | 2,134 | 2,681 | 1.26 |
| YGR012W | 1261 | 1,346 | 2,510 | 1.86 | YOR067C | 2782 | 1,807 | 6,037 | 3.34 |
| YGR014W | 1262 | 4,057 | 18,779 | 4.79 | YOR071C | 2781 | 1,797 | 2,700 | 1.56 |
| YGR017W | 1263 | 1,157 | 1,847 | 1.60 | YOR079C | 2780 | 1,107 | 2,191 | 1.98 |
| YGR019W | 1264 | 1,551 | 3,606 | 2.32 | YOR081C | 2779 | 2,362 | 2,474 | 1.05 |
| YGR020C | 1109 | 541 | 6,660 | 12.31 | YOR084W | 2902 | 1,323 | 2,365 | 1.79 |
| YGR024C | 1108 | 813 | 4,094 | 5.08 | YOR085W | 2903 | 1,383 | 8,768 | 6.34 |
| YGR026W | 1265 | 991 | 3,044 | 3.07 | YOR086C | 2778 | 3,858 | 10,066 | 2.61 |
| YGR027C | 1107 | 738 | 54,305 | 82.05 | YOR087W | 2904 | 2,128 | 4,754 | 2.23 |
| YGR028W | 1266 | 1,234 | 2,320 | 1.88 | YOR089C | 2777 | 699 | 1,171 | 1.68 |
| YGR029W | 1267 | 666 | 1,876 | 2.82 | YOR090C | 2776 | 2,006 | 3,224 | 1.61 |
| YGR031W | 1268 | 1,484 | 7,484 | 5.04 | YOR091W | 2905 | 1,166 | 2,429 | 2.08 |
| YGR033C | 1106 | 1,052 | 3,870 | 3.68 | YOR095C | 2775 | 995 | 6,931 | 6.97 |
| YGR034W | 1269 | 544 | 47,706 | 112.84 | YOR096W | 2906 | 695 | 135,254 | 240.10 |
| YGR036C | 1105 | 720 | 1,325 | 1.84 | YOR098C | 2774 | 3,362 | 5,477 | 1.63 |
| YGR037C | 1104 | 460 | 25,157 | 54.69 | YOR099W | 2907 | 1,339 | 30,353 | 22.68 |
| YGR038W | 1270 | 956 | 5,148 | 5.38 | YOR101W | 2908 | 1,227 | 3,953 | 3.22 |
| YGR040W | 1271 | 1,959 | 2,516 | 1.28 | YOR103C | 2773 | 503 | 3,696 | 7.35 |
| YGR044C | 1103 | 1,119 | 3,899 | 3.48 | YOR108W | 2909 | 1,998 | 19,590 | 9.98 |
| YGR046W | 1272 | 1,648 | 1,651 | 1.00 | YOR109W | 2910 | 3,487 | 5,034 | 1.44 |
| YGR048W | 1273 | 1,215 | 1,534 | 1.26 | YOR115C | 2772 | 937 | 1,952 | 2.08 |
| YGR054W | 1274 | 2,152 | 12,263 | 5.70 | YOR116C | 2771 | 4,727 | 11,284 | 2.39 |
| YGR055W | 1275 | 1,870 | 16,705 | 8.93 | YOR117W | 2911 | 1,505 | 6,379 | 4.24 |
| YGR060W | 1276 | 1,051 | 25,048 | 23.83 | YOR120W | 2912 | 1,125 | 1,229 | 1.09 |
| YGR061C | 1102 | 4,475 | 23,945 | 5.35 | YOR122C | 2770 | 582 | 39,934 | 68.61 |
| YGR062C | 1101 | 994 | 1,058 | 1.06 | YOR125C | 2769 | 867 | 2,324 | 2.68 |
| YGR063C | 1100 | 389 | 2,568 | 6.60 | YOR126C | 2768 | 834 | 1,371 | 1.64 |
| YGR065C | 1099 | 1,992 | 3,564 | 1.79 | YOR128C | 2767 | 1,787 | 4,705 | 2.63 |
| YGR074W | 1277 | 736 | 1,711 | 2.32 | YOR131C | 2766 | 855 | 2,632 | 3.08 |
| YGR077C | 1098 | 1,808 | 3,377 | 1.87 | YOR132W | 2913 | 1,758 | 2,420 | 1.38 |
| YGR078C | 1097 | 742 | 2,061 | 2.81 | YOR133W | 2914 | 2,777 | 9,220 | 20.15 |
| YGR079W | 1278 | 1,205 | 2,395 | 1.99 | YOR136W | 2915 | 1,266 | 22,323 | 17.64 |
| YGR080W | 1279 | 1,077 | 2,895 | 2.69 | YOR138C | 2765 | 2,100 | 3,417 | 1.63 |
| YGR081C | 1096 | 709 | 745 | 1.05 | TOR142W | 2916 | 1,385 | 10,913 | 7.88 |
| YGR082W | 1280 | 749 | 7,560 | 10.09 | YOR145C | 2764 | 895 | 3,862 | 4.31 |
| YGR084C | 1095 | 1,070 | 1,581 | 1.48 | YOR149C | 2763 | 1,627 | 3,222 | 1.98 |
| YGR085C | 1094 | 618 | 11,493 | 46.95 | YOR150W | 2917 | 605 | 1,308 | 2.16 |
| YGR086C | 1093 | 1,371 | 20,772 | 15.19 | YOR151C | 2762 | 3,971 | 11,638 | 2.93 |
| YGR090W | 1281 | 3,946 | 7,859 | 1.99 | YOR152C | 2761 | 1,137 | 1,661 | 1.46 |
| YGR094W | 1282 | 3,479 | 38,286 | 11.01 | YOR153W | 2918 | 4,783 | 143,333 | 30.01 |
| YGR095C | 1092 | 746 | 1,549 | 2.08 | YOR155C | 2760 | 1,605 | 2,056 | 1.28 |
| YGR096W | 1283 | 945 | 1,249 | 1.32 | YOR157C | 2759 | 857 | 6,905 | 8.06 |
| YGR099W | 1284 | 2,157 | 2,483 | 1.15 | YOR159C | 2758 | 285 | 423 | 1.48 |
| YGR101W | 1285 | 1,188 | 2,866 | 2.41 | YOR161C | 2757 | 1,620 | 4,876 | 3.01 |
| YGR102C | 1091 | 707 | 902 | 1.28 | YOR163W | 2919 | 680 | 4,057 | 5.97 |
| YGR103W | 1286 | 2,004 | 6,119 | 3.06 | YOR164C | 2756 | 1,074 | 9,038 | 8.41 |
| YGR105W | 1287 | 454 | 1,401 | 3.09 | YOR165W | 2920 | 2,503 | 3,929 | 1.57 |
| YGR106C | 1090 | 929 | 19,711 | 21.22 | YOR167C | 2755 | 318 | 94,668 | 334.25 |
| YGR108W | 1288 | 1,683 | 2,306 | 1.37 | YOR168W | 2921 | 2,531 | 25,388 | 10.03 |
| YGR111W | 1289 | 1,353 | 1,875 | 1.39 | YOR171C | 2754 | 2,105 | 3,418 | 1.62 |
| YGR116W | 1290 | 4,513 | 5,874 | 1.30 | YOR174W | 2922 | 1,196 | 1,222 | 1.02 |
| YGR117C | 1089 | 1,830 | 2,307 | 1.26 | YOR175C | 2753 | 2,077 | 12,636 | 6.08 |
| YGR118W | 1291 | 636 | 28,314 | 77.48 | YOR176W | 2923 | 1,414 | 8,027 | 5.68 |
| YGR119C | 1088 | 1,750 | 3,460 | 1.98 | YOR179C | 2752 | 816 | 895 | 1.10 |
| YGR122W | 1292 | 1,209 | 1,287 | 1.06 | YOR182C | 2751 | 249 | 18,722 | 109.15 |
| YGR123C | 1087 | 1,702 | 3,769 | 2.21 | YOR184W | 2924 | 1,286 | 5,469 | 6.69 |
| YGR124W | 1293 | 1,849 | 60,750 | 34.53 | YOR185C | 2750 | 1,044 | 1,277 | 1.23 |
| YGR125W | 1294 | 3,196 | 3,931 | 1.23 | YOR187W | 2925 | 1,509 | 25,787 | 17.09 |
| YGR128C | 1086 | 2,220 | 3,555 | 1.60 | YOR196C | 2749 | 1,406 | 3,059 | 2.17 |
| YGR132C | 1085 | 1,201 | 8,885 | 7.40 | YOR197W | 2926 | 1,369 | 10,857 | 7.93 |
| YGR133W | 1295 | 804 | 1,032 | 1.28 | YOR198C | 2748 | 1,613 | 7,942 | 4.92 |
| YGR135W | 1296 | 919 | 10,021 | 10.90 | YOR201C | 2747 | 1,324 | 3,103 | 2.34 |
| YGR136W | 1297 | 726 | 2,299 | 3.17 | YOR202W | 2927 | 755 | 3,514 | 4.65 |
| YGR141W | 1298 | 1,549 | 2,022 | 1.30 | YOR204W | 2928 | 2,558 | 31,268 | 12.23 |
| YGR143W | 1299 | 2,870 | 3,124 | 1.09 | YOR206W | 2929 | 2,229 | 4,715 | 2.11 |
| YGR147C | 1084 | 1,021 | 2,752 | 2.70 | YOR207C | 2746 | 3,638 | 6,161 | 1.69 |
| YGR148C | 1083 | 1,023 | 19,617 | 22.81 | YOR209C | 2745 | 1,523 | 6,853 | 4.50 |
| YGR149W | 1300 | 1,628 | 1,933 | 1.19 | YOR210W | 2930 | 538 | 3,237 | 6.02 |
| YGR152C | 1082 | 940 | 1,312 | 1.40 | YOR212W | 2931 | 1,560 | 6,267 | 4.02 |
| YGR155W | 1301 | 1,681 | 49,715 | 29.57 | YOR213C | 2744 | 1,167 | 1,669 | 1.43 |
| YGR157W | 1302 | 2,932 | 10,841 | 3.70 | YOR215C | 2743 | 727 | 1,029 | 1.41 |
| YGR158C | 1081 | 1,009 | 1,231 | 1.22 | YOR217W | 2932 | 2,889 | 5,616 | 1.94 |
| YGR159C | 1080 | 1,363 | 28,036 | 20.80 | YOR219C | 2742 | 3,206 | 3,287 | 1.03 |
| YGR161W-C | 1303 | 583 | 803 | 1.38 | YOR220W | 2933 | 997 | 1,067 | 1.07 |
| YGR162W | 1304 | 3,061 | 19,151 | 6.26 | YOR221C | 2741 | 1,296 | 1,380 | 1.06 |
| YGR165W | 1305 | 1,214 | 3,127 | 2.58 | YOR222W | 2934 | 1,434 | 5,487 | 3.83 |
| YGR167W | 1306 | 891 | 2,783 | 3.12 | YOR224C | 2740 | 533 | 18,427 | 34.57 |
| YGR172C | 1079 | 894 | 6,779 | 7.61 | YOR226C | 2739 | 651 | 1,902 | 2.92 |
| YGR173W | 1307 | 1,366 | 2,964 | 2.17 | YOR230W | 2935 | 1,541 | 28,943 | 18.79 |
| YGR175C | 1078 | 1,714 | 26,734 | 15.60 | YOR231W | 2936 | 1,805 | 2,084 | 1.15 |
| YGR177C | 1077 | 1,608 | 4,110 | 2.56 | YOR232W | 2937 | 943 | 5,458 | 5.79 |
| YGR178C | 1076 | 2,485 | 10,309 | 4.15 | YOR234C | 2738 | 416 | 82,011 | 222.63 |
| YGR180C | 1075 | 1,314 | 37,930 | 28.89 | YOR236W | 2938 | 700 | 1,498 | 2.14 |
| YGR181W | 1308 | 550 | 2,796 | 5.08 | YOR239W | 2939 | 2,140 | 3,631 | 1.70 |
| YGR183C | 1074 | 618 | 6,208 | 10.05 | YOR241W | 2940 | 1,714 | 4,048 | 2.36 |
| YGR185C | 1073 | 1,289 | 14,425 | 11.19 | YOR243C | 2737 | 2,193 | 5,291 | 2.41 |
| YGR189C | 1072 | 1,653 | 15,893 | 9.62 | YOR246C | 2736 | 1,119 | 10,900 | 9.74 |
| YGR191W | 1309 | 2,183 | 12,841 | 5.88 | YOR247W | 2941 | 633 | 24,202 | 38.23 |
| YGR192C | 25 | 1,129 | 248,847 | 730.28 | YOR251C | 2735 | 1,035 | 4,293 | 4.15 |
| YGR193C | 1071 | 1,409 | 3,424 | 2.43 | YOR253W | 2942 | 664 | 3,822 | 5.77 |
| YGR195W | 1310 | 923 | 2,996 | 3.25 | YOR254C | 2734 | 2,191 | 11,189 | 5.11 |
| YGR197C | 1070 | 1,733 | 1,789 | 1.03 | YOR259C | 2733 | 1,381 | 5,357 | 3.88 |
| YGR199W | 1311 | 2,280 | 5,019 | 2.20 | YOR260W | 2943 | 1,990 | 7,702 | 3.87 |
| YGR200C | 1069 | 2,473 | 6,330 | 2.56 | YOR261C | 2732 | 1,176 | 5,214 | 4.43 |
| YGR201C | 1068 | 792 | 2,009 | 2.54 | YOR264W | 2944 | 1,418 | 2,343 | 1.65 |
| YGR202C | 1067 | 1,518 | 2,313 | 1.52 | YOR265W | 2945 | 388 | 479 | 1.23 |
| YGR203W | 1312 | 962 | 1,385 | 1.44 | YOR270C | 2731 | 2,792 | 49,548 | 17.75 |
| YGR204W | 1313 | 2,962 | 33,970 | 11.47 | YOR271C | 2730 | 1,106 | 8,613 | 7.79 |
| YGR206W | 1314 | 428 | 658 | 1.54 | YOR272W | 2946 | 1,501 | 5,807 | 3.87 |
| YGR207C | 1066 | 897 | 1,289 | 1.44 | YOR273C | 2729 | 2,190 | 4,308 | 1.97 |
| YGR208W | 1315 | 1,022 | 5,091 | 4.98 | YOR276W | 2947 | 620 | 17,048 | 27.50 |
| YGR209C | 1065 | 413 | 55,338 | 134.48 | YOR278W | 2948 | 828 | 1,295 | 1.56 |
| YGR210C | 1064 | 1,429 | 8,002 | 5.60 | YOR280C | 2728 | 904 | 1,598 | 1.77 |
| YGR211W | 1316 | 1,719 | 12,032 | 7.00 | YOR283W | 2949 | 921 | 1,655 | 1.80 |
| YGR214W | 1317 | 840 | 77,456 | 112.72 | YOR285W | 2950 | 502 | 17,369 | 34.60 |
| YGR216C | 1063 | 1,945 | 2,497 | 1.28 | YOR286W | 2951 | 527 | 4,946 | 9.38 |
| YGR218W | 1318 | 3,743 | 9,741 | 2.60 | YOR288C | 2727 | 1,053 | 2,596 | 2.47 |
| YGR220C | 1062 | 922 | 2,687 | 2.91 | YOR291W | 2952 | 4,532 | 7,028 | 1.55 |
| YGR222W | 1319 | 1,000 | 1,045 | 1.05 | YOR292C | 2726 | 987 | 1,430 | 1.45 |
| YGR227W | 1320 | 1,724 | 2,718 | 1.58 | YOR293W | 2953 | 494 | 62,020 | 154.23 |
| YGR229C | 1061 | 1,947 | 4,249 | 2.19 | YOR294W | 2954 | 809 | 2,366 | 2.92 |
| YGR230W | 1321 | 645 | 785 | 1.22 | YOR297C | 2725 | 752 | 966 | 1.28 |
| YGR231C | 1060 | 1,156 | 6,194 | 5.36 | YOR298C-A | 2724 | 709 | 70,539 | 99.72 |
| YGR232W | 1322 | 768 | 2,078 | 2.71 | YOR299W | 2955 | 2,241 | 4,585 | 2.05 |
| YGR233C | 1059 | 3,671 | 4,855 | 1.32 | YOR301W | 2956 | 1,599 | 5,713 | 3.57 |
| YGR234W | 1323 | 1,491 | 49,695 | 33.33 | YOR302W | 2957 | 270 | 387 | 1.45 |
| YGR235C | 1058 | 838 | 2,497 | 2.98 | YOR303W | 2958 | 1,297 | 11,605 | 8.95 |
| YGR239C | 1057 | 1,092 | 1,113 | 1.02 | YOR306C | 2723 | 1,842 | 3,302 | 1.79 |
| YGR240C | 1056 | 3,393 | 62,236 | 18.37 | YOR307C | 2722 | 1,639 | 4,667 | 2.85 |
| YGR241C | 1055 | 1,856 | 1,909 | 1.03 | YOR310C | 2721 | 1,637 | 12,269 | 7.55 |
| YGR244C | 1054 | 1,474 | 5,948 | 4.04 | YOR311C | 2720 | 935 | 5,762 | 6.16 |
| YGR245C | 1053 | 2,480 | 2,558 | 1.03 | YOR312C | 2719 | 588 | 33,903 | 93.71 |
| YGR247W | 1324 | 873 | 1,575 | 1.82 | YOR315W | 2959 | 1,341 | 1,717 | 1.28 |
| YGR253C | 1052 | 868 | 5,137 | 5.92 | YOR316C | 2718 | 1,565 | 4,505 | 3.15 |
| YGR254W | 1325 | 1,505 | 32,998 | 50.65 | YOR317W | 2960 | 2,497 | 8,609 | 3.45 |
| YGR255C | 1051 | 1,730 | 2,673 | 1.54 | YOR319W | 2961 | 841 | 1,310 | 1.56 |
| YGR257C | 1050 | 1,226 | 3,094 | 2.52 | YOR320C | 2717 | 1,721 | 6,239 | 3.63 |
| YGR260W | 1326 | 1,718 | 17,260 | 10.05 | YOR321W | 2962 | 2,339 | 5,072 | 2.17 |
| YGR261C | 1049 | 2,533 | 5,459 | 2.15 | YOR322C | 2716 | 2,820 | 3,005 | 1.06 |
| YGR262C | 1048 | 893 | 3,735 | 4.18 | YOR323C | 2715 | 1,434 | 9,182 | 6.40 |
| YGR264C | 1047 | 2,487 | 25,381 | 10.20 | YOR326W | 2963 | 5,069 | 12,856 | 2.54 |
| YGR266W | 1327 | 2,403 | 3,111 | 1.29 | YOR327C | 2714 | 519 | 1,197 | 2.31 |
| YGR267C | 1046 | 1,007 | 4,956 | 4.94 | YOR332W | 2964 | 804 | 15,244 | 18.96 |
| YGR268C | 1045 | 749 | 1,028 | 1.38 | YOR335C | 2713 | 3,085 | 25,949 | 8.41 |
| YGR277C | 1044 | 990 | 1,941 | 1.96 | YOR336W | 2965 | 4,334 | 4,592 | 1.06 |
| YGR279C | 1043 | 1,242 | 60,884 | 49.21 | YOR337W | 2966 | 2,300 | 2,381 | 1.03 |
| YGR281W | 1328 | 4,816 | 5,601 | 1.16 | YOR340C | 2712 | 1,159 | 2,281 | 1.97 |
| YGR282C | 1042 | 1,141 | 48,901 | 42.88 | YOR341W | 2967 | 5,379 | 21,588 | 4.01 |
| YGR283C | 1041 | 1,102 | 1,237 | 1.12 | YOR342C | 2711 | 1,277 | 1,950 | 1.53 |
| YGR284C | 1040 | 1,137 | 17,055 | 15.00 | YOR347C | 2710 | 1,652 | 2,481 | 1.50 |
| YGR285C | 1039 | 1,361 | 64,781 | 47.60 | YOR354C | 2709 | 2,260 | 2,992 | 1.33 |
| YGR286C | 1038 | 1,533 | 2,990 | 1.95 | YOR355W | 2968 | 1,851 | 6,278 | 3.39 |
| YGR295C | 1037 | 1,146 | 1,189 | 1.96 | YOR356W | 2969 | 2,095 | 4,365 | 2.08 |
| YHL001W | 1401 | 563 | 15,143 | 46.51 | YOR357C | 2708 | 599 | 1,577 | 2.63 |
| YHL002W | 1402 | 1,415 | 1,591 | 1.13 | YOR359W | 2970 | 1,923 | 1,943 | 1.02 |
| YHL003C | 1395 | 1,567 | 14,313 | 9.14 | YOR360C | 2707 | 1,883 | 6,980 | 3.71 |
| YHL004W | 1403 | 1,368 | 2,856 | 2.09 | YOR361C | 2706 | 2,358 | 27,628 | 11.72 |
| YHL007C | 1394 | 2,939 | 3,467 | 1.18 | YOR362C | 2705 | 1,024 | 10,830 | 10.58 |
| YHL011C | 1393 | 1,178 | 14,250 | 12.10 | YOR367W | 2971 | 681 | 1,256 | 1.84 |
| YHL015W | 26 | 686 | 186,676 | 276.03 | YOR369C | 2704 | 586 | 422,461 | 720.92 |
| YHL017W | 1404 | 1,804 | 6,138 | 3.41 | YOR370C | 2703 | 2,279 | 6,763 | 2.97 |
| YHL020C | 1392 | 1,390 | 3,243 | 2.36 | YOR374W | 2972 | 1,825 | 3,941 | 2.16 |
| YHL021C | 1391 | 1,497 | 2,257 | 1.51 | YOR375C | 2702 | 1,503 | 10,587 | 7.05 |
| YHL025W | 1405 | 1,133 | 2,900 | 2.56 | YOR377W | 2973 | 1,894 | 2,014 | 1.06 |
| YHL027W | 1406 | 2,198 | 3,979 | 1.81 | YOR382W | 2974 | 598 | 1,626 | 2.72 |
| YHL031C | 1390 | 707 | 1,902 | 2.69 | YOR383C | 2701 | 781 | 4,580 | 6.07 |
| YHL032C | 1389 | 2,195 | 3,306 | 1.51 | YPL001W | 3095 | 1,187 | 1,596 | 1.34 |
| YHL033C | 1388 | 1,248 | 32,563 | 35.86 | YPL002C | 3081 | 885 | 1,246 | 1.41 |
| YHL034C | 1387 | 1,126 | 6,942 | 6.17 | YPL003W | 3096 | 1,438 | 1,597 | 1.11 |
| YHL039W | 1407 | 1,758 | 3,786 | 2.15 | YPL004C | 3080 | 1,244 | 16,510 | 13.33 |
| YHL040C | 1386 | 1,884 | 3,975 | 2.11 | YPL006W | 3097 | 3,629 | 4,466 | 1.23 |
| YHL044W | 1408 | 966 | 1,169 | 1.21 | YPL010W | 3098 | 785 | 14,028 | 17.87 |
| YHL047C | 1385 | 1,998 | 3,384 | 1.69 | YPL011C | 3079 | 1,188 | 1,263 | 1.06 |
| YHL048W | 1409 | 1,241 | 1,032 | 1.06 | YPL012W | 3099 | 3,913 | 6,214 | 1.59 |
| YHR001W | 1410 | 1,704 | 3,396 | 1.99 | YPL013C | 3078 | 528 | 761 | 1.44 |
| YHR001W-A | 1411 | 509 | 1,316 | 2.59 | YPL015C | 3077 | 1,421 | 7,466 | 5.25 |
| YHR003C | 1384 | 1,428 | 2,078 | 1.45 | YPL019C | 3076 | 2,689 | 38,296 | 14.24 |
| YHR005C | 1383 | 1,583 | 3,135 | 1.98 | YPL023C | 3075 | 2,223 | 4,869 | 2.19 |
| YHR005C-A | 1382 | 438 | 4,299 | 9.81 | YPL024W | 3100 | 960 | 1,454 | 1.53 |
| YHR007C | 1381 | 1,971 | 60,581 | 30.74 | YPL028W | 3101 | 1,333 | 61,420 | 46.08 |
| YHR008C | 1380 | 895 | 6,087 | 6.81 | YPL030W | 3102 | 1,838 | 2,562 | 1.39 |
| YHR009C | 1379 | 1,782 | 6,104 | 3.42 | YPL031C | 3074 | 1,005 | 4,467 | 4.44 |
| YHR010W | 1412 | 558 | 92,639 | 191.02 | YPL032C | 3073 | 2,772 | 4,161 | 1.50 |
| YHR012W | 1413 | 1,332 | 2,428 | 1.82 | YPL036W | 3103 | 3,216 | 7,042 | 2.35 |
| YHR013C | 1378 | 843 | 2,811 | 3.33 | YPL037C | 3072 | 535 | 62,711 | 117.22 |
| YHR016C | 1377 | 1,563 | 3,535 | 2.26 | YPL038W | 3104 | 660 | 1,257 | 1.90 |
| YHR017W | 1414 | 1,261 | 1,550 | 1.23 | YPL039W | 3105 | 1,117 | 1,122 | 1.02 |
| YHR018C | 1376 | 1,582 | 6,453 | 4.08 | YPL047W | 3106 | 720 | 3,641 | 5.06 |
| YHR019C | 1375 | 1,766 | 53,415 | 30.25 | YPL048W | 3107 | 1,463 | 21,622 | 14.95 |
| YHR020W | 1415 | 2,261 | 36,935 | 16.38 | YPL049C | 3071 | 1,628 | 3,555 | 2.20 |
| YHR021C | 27 | 360 | 74,988 | 217.24 | YPL050C | 3070 | 1,445 | 8,093 | 5.61 |
| YHR024C | 1374 | 1,713 | 3,152 | 1.84 | YPL053C | 3069 | 1,514 | 3,898 | 2.57 |
| YHR025W | 1416 | 1,182 | 26,973 | 22.82 | YPL057C | 3068 | 1,677 | 2,798 | 1.67 |
| YHR026W | 1417 | 893 | 26,241 | 29.38 | YPL058C | 3067 | 4,915 | 7,611 | 1.55 |
| YHR027C | 1373 | 3,262 | 15,667 | 4.80 | YPL059W | 3108 | 652 | 10,480 | 16.07 |
| YHR028C | 1372 | 2,547 | 8,300 | 3.26 | YPL061W | 3109 | 1,659 | 48,360 | 29.15 |
| YHR029C | 1371 | 885 | 2,127 | 2.40 | YPL063W | 3110 | 1,619 | 3,221 | 1.99 |
| YHR030C | 1370 | 1,661 | 3,158 | 1.93 | YPL066W | 3111 | 1,599 | 1,676 | 1.05 |
| YHR032W | 1418 | 1,746 | 7,368 | 4.22 | YPL067C | 3066 | 729 | 1,634 | 2.24 |
| YHR033W | 1419 | 1,322 | 2,654 | 2.01 | YPL075W | 3112 | 2,594 | 2,803 | 1.08 |
| YHR034C | 1369 | 1,181 | 1,538 | 1.30 | YPL078C | 3065 | 1,021 | 8,667 | 8.49 |
| YHR037W | 1420 | 1,884 | 3,222 | 1.71 | YPL079W | 3113 | 616 | 52,108 | 130.56 |
| YHR039C | 1368 | 2,097 | 15,623 | 7.45 | YPL081W | 3114 | 824 | 12,857 | 19.14 |
| YHR039C-A | 1367 | 415 | 3,879 | 9.35 | YPL083C | 3064 | 1,511 | 1,834 | 1.22 |
| YHR041C | 1366 | 855 | 4,830 | 5.65 | YPL086C | 3063 | 1,794 | 4,913 | 2.74 |
| YHR042W | 1421 | 2,234 | 24,781 | 11.09 | YPL087W | 3115 | 1,185 | 2,967 | 2.50 |
| YHR043C | 1365 | 894 | 1,459 | 1.82 | YPL090C | 3062 | 880 | 16,669 | 64.06 |
| YHR045W | 1422 | 1,846 | 3,564 | 1.93 | YPL091W | 3116 | 1,625 | 9,902 | 6.09 |
| YHR046C | 1364 | 1,104 | 1,306 | 1.19 | YPL092W | 3117 | 1,590 | 3,136 | 1.97 |
| YHR047C | 1363 | 2,743 | 12,127 | 4.42 | YPL093W | 3118 | 2,241 | 20,612 | 9.20 |
| YHR049W | 1423 | 892 | 9,587 | 10.75 | YPL094C | 3061 | 881 | 13,524 | 15.35 |
| YHR050W | 1424 | 1,696 | 6,539 | 3.85 | YPL095C | 3060 | 1,558 | 2,820 | 1.81 |
| YHR051W | 1425 | 951 | 5,434 | 5.71 | YPL096C-A | 3059 | 321 | 718 | 2.24 |
| YHR052W | 1426 | 1,291 | 4,657 | 3.61 | YPL098C | 3058 | 510 | 4,714 | 9.24 |
| YHR055C | 1362 | 367 | 1,007 | 4.02 | YPL099C | 3057 | 682 | 738 | 1.08 |
| YHR057C | 1361 | 708 | 2,708 | 3.82 | YPL101W | 3119 | 1,488 | 3,478 | 2.34 |
| YHR058C | 1360 | 978 | 1,388 | 1.42 | YPL105C | 3056 | 2,673 | 3,211 | 1.20 |
| YHR061C | 1359 | 1,382 | 1,489 | 1.08 | YPL106C | 3055 | 2,242 | 68,969 | 30.78 |
| YHR062C | 1358 | 993 | 2,307 | 2.32 | YPL111W | 3120 | 1,143 | 11,792 | 10.32 |
| YHR063C | 1357 | 1,214 | 5,690 | 4.69 | YPL112C | 3054 | 1,289 | 2,067 | 1.60 |
| YHR064C | 1356 | 1,720 | 119,941 | 69.75 | YPL116W | 3121 | 2,223 | 2,463 | 1.11 |
| YHR065C | 1355 | 1,622 | 2,780 | 1.71 | YPL117C | 3053 | 1,126 | 6,440 | 5.72 |
| YHR066W | 1427 | 1,510 | 1,693 | 1.16 | YPL118W | 3122 | 1,222 | 1,935 | 1.58 |
| YHR067W | 1428 | 1,199 | 1,544 | 1.33 | YPL126W | 3123 | 2,824 | 8,124 | 2.88 |
| YHR068W | 1429 | 1,378 | 22,116 | 16.48 | YPL127C | 3052 | 1,123 | 5,222 | 4.65 |
| YHR069C | 1354 | 1,203 | 5,698 | 4.74 | YPL128C | 3051 | 1,689 | 4,427 | 2.62 |
| YHR070W | 1430 | 2,079 | 6,384 | 3.07 | YPL129W | 3124 | 896 | 2,741 | 3.06 |
| YHR071W | 1431 | 808 | 1,279 | 1.61 | YPL131W | 3125 | 1,014 | 200,469 | 197.70 |
| YHR072W | 1432 | 2,373 | 10,309 | 4.34 | YPL132W | 3126 | 1,104 | 1,515 | 1.37 |
| YHR072W-A | 1433 | 396 | 35,255 | 89.03 | YPL133C | 3050 | 1,410 | 1,433 | 1.02 |
| YHR073W | 1434 | 3,217 | 5,652 | 1.76 | YPL134C | 3049 | 1,229 | 1,611 | 1.31 |
| YHR074W | 1435 | 2,282 | 15,949 | 6.99 | YPL135W | 3127 | 963 | 6,255 | 6.49 |
| YHR076W | 1436 | 1,176 | 2,494 | 2.12 | YPL137C | 3048 | 3,911 | 6,381 | 1.63 |
| YHR078W | 1437 | 1,857 | 3,173 | 1.71 | YPL143W | 3128 | 394 | 156,148 | 451.12 |
| YHR083W | 1438 | 1,086 | 4,949 | 4.56 | YPL144W | 3129 | 553 | 1,317 | 2.38 |
| YHR086W | 1439 | 2,108 | 3,164 | 1.50 | YPL145C | 3047 | 1,997 | 17,388 | 8.71 |
| YHR087W | 1440 | 589 | 649 | 1.10 | YPL148C | 3046 | 804 | 921 | 1.14 |
| YHR088W | 1441 | 1,013 | 1,282 | 1.27 | YPL149W | 3130 | 1,028 | 2,479 | 2.41 |
| YHR089C | 1353 | 841 | 8,375 | 10.00 | YPL154C | 3045 | 1,536 | 22,240 | 14.48 |
| YHR092C | 1352 | 1,921 | 2,667 | 1.56 | YPL160W | 3131 | 3,496 | 24,345 | 6.97 |
| YHR094C | 1351 | 1,853 | 17,194 | 10.38 | YPL162C | 3044 | 971 | 1,716 | 1.77 |
| YHR098C | 1350 | 2,987 | 14,273 | 4.78 | YPL163C | 3043 | 1,089 | 9,539 | 8.76 |
| YHR103W | 1442 | 2,677 | 5,542 | 2.07 | YPL169C | 3042 | 2,077 | 4,671 | 2.25 |
| YHR104W | 1443 | 1,212 | 3,947 | 3.26 | YPL170W | 3132 | 763 | 1,863 | 2.44 |
| YHR106W | 1444 | 1,332 | 1,812 | 1.37 | YPL172C | 3041 | 1,539 | 2,251 | 1.46 |
| YHR107C | 1349 | 1,441 | 2,590 | 1.80 | YPL176C | 3040 | 2,485 | 5,587 | 2.25 |
| YHR108W | 1445 | 1,958 | 13,535 | 6.91 | YPL177C | 3039 | 1,413 | 2,933 | 2.08 |
| YHR110W | 1446 | 763 | 5,512 | 7.22 | YPL178W | 3133 | 790 | 4,910 | 6.22 |
| YHR111W | 1447 | 1,323 | 2,267 | 1.71 | YPL179W | 3134 | 2,042 | 4,116 | 2.02 |
| YHR112C | 1348 | 1,378 | 2,533 | 1.84 | YPL183C | 3038 | 3,174 | 4,933 | 1.55 |
| YHR113W | 1448 | 1,586 | 6,084 | 3.84 | YPL183W-A | 3135 | 473 | 2,908 | 6.15 |
| YHR115C | 1347 | 1,503 | 5,076 | 3.40 | YPL184C | 3037 | 2,122 | 7,529 | 3.55 |
| YHR116W | 1449 | 722 | 921 | 1.28 | YPL187W | 3136 | 498 | 31,258 | 97.56 |
| YHR117W | 1450 | 1,920 | 6,399 | 3.33 | YPL189C-A | 3036 | 495 | 818 | 1.65 |
| YHR121W | 1451 | 731 | 2,780 | 3.80 | YPL198W | 3137 | 856 | 4,047 | 10.41 |
| YHR122W | 1452 | 897 | 2,946 | 3.28 | YPL199C | 3035 | 788 | 1,536 | 1.95 |
| YHR123W | 1453 | 1,337 | 7,487 | 5.60 | YPL203W | 3138 | 1,548 | 1,917 | 1.24 |
| YHR127W | 1454 | 930 | 971 | 1.04 | YPL204W | 3139 | 1,830 | 3,566 | 1.95 |
| YHR128W | 1455 | 932 | 15,668 | 16.81 | YPL206C | 3034 | 1,116 | 3,915 | 3.51 |
| YHR132C | 1346 | 1,479 | 12,039 | 8.14 | YPL207W | 3140 | 2,606 | 5,009 | 1.92 |
| YHR132W-A | 1456 | 745 | 1,216 | 1.64 | YPL208W | 3141 | 1,818 | 4,365 | 2.40 |
| YHR133C | 1345 | 1,047 | 10,331 | 9.87 | YPL210C | 3033 | 2,088 | 2,309 | 1.11 |
| YHR135C | 1344 | 1,810 | 4,697 | 2.63 | YPL211W | 3142 | 708 | 8,235 | 11.63 |
| YHR136C | 1343 | 613 | 3,339 | 5.45 | YPL212C | 3032 | 1,826 | 3,502 | 1.92 |
| YHR137W | 1457 | 1,869 | 8,085 | 4.33 | YPL214C | 3031 | 1,721 | 3,174 | 1.84 |
| YHR138C | 1342 | 478 | 831 | 1.74 | YPL215W | 3143 | 1,186 | 2,341 | 1.97 |
| YHR141C | 28 | 398 | 39,209 | 222.47 | YPL218W | 3144 | 689 | 29,209 | 42.39 |
| YHR142W | 1458 | 1,214 | 3,473 | 2.86 | YPL220W | 3145 | 826 | 17,129 | 73.84 |
| YHR143W | 1459 | 1,488 | 15,933 | 10.79 | YPL221W | 3146 | 2,576 | 10,052 | 3.90 |
| YHR143W-A | 1460 | 520 | 13,821 | 26.58 | YPL224C | 3030 | 1,795 | 2,841 | 1.58 |
| YHR144C | 1341 | 1,211 | 3,244 | 2.68 | YPL225W | 3147 | 601 | 2,614 | 4.36 |
| YHR146W | 1461 | 1,472 | 2,611 | 1.77 | YPL226W | 3148 | 3,905 | 26,982 | 6.92 |
| YHR147C | 1340 | 799 | 1,674 | 2.10 | YPL227C | 3029 | 1,197 | 2,046 | 1.71 |
| YHR148W | 1462 | 879 | 1,379 | 1.57 | YPL231W | 3149 | 5,830 | 89,342 | 15.32 |
| YHR149C | 1339 | 2,375 | 3,867 | 1.63 | YPL232W | 3150 | 1,131 | 3,407 | 3.01 |
| YHR151C | 1338 | 1,581 | 2,490 | 1.57 | YPL234C | 3028 | 663 | 16,983 | 25.61 |
| YHR161C | 1337 | 2,310 | 2,295 | 1.00 | YPL235W | 3151 | 1,575 | 5,096 | 3.24 |
| YHR162W | 1463 | 674 | 23,469 | 34.82 | YPL237W | 3152 | 967 | 11,947 | 12.35 |
| YHR163W | 1464 | 935 | 12,613 | 13.49 | YPL239W | 3153 | 878 | 2,645 | 3.01 |
| YHR167W | 1465 | 900 | 919 | 1.02 | YPL240C | 3027 | 2,264 | 15,893 | 8.66 |
| YHR169W | 1466 | 1,517 | 3,669 | 2.42 | YPL241C | 3026 | 875 | 1,685 | 2.05 |
| YHR170W | 1467 | 1,710 | 15,024 | 8.79 | YPL243W | 3154 | 1,995 | 7,146 | 3.58 |
| YHR174W | 29 | 1,555 | 342,805 | 496.14 | YPL244C | 3025 | 1,181 | 4,628 | 3.92 |
| YHR175W | 1468 | 774 | 3,369 | 4.57 | YPL245W | 3155 | 1,477 | 4,918 | 3.33 |
| YHR179W | 1469 | 1,355 | 27,667 | 20.42 | YPL246C | 3024 | 980 | 6,374 | 6.50 |
| YHR181W | 1470 | 835 | 6,353 | 7.61 | YPL247C | 3023 | 1,725 | 2,122 | 1.23 |
| YHR183W | 1471 | 1,669 | 43,343 | 26.04 | YPL249C-A | 3022 | 459 | 74,990 | 194.69 |
| YHR187W | 1472 | 1,076 | 1,915 | 1.78 | YPL250C | 3021 | 642 | 2,095 | 3.26 |
| YHR188C | 1336 | 1,922 | 16,854 | 8.77 | YPL252C | 3020 | 625 | 4,283 | 6.85 |
| YHR189W | 1473 | 573 | 696 | 1.21 | YPL254W | 3156 | 1,774 | 2,146 | 1.21 |
| YHR190W | 1474 | 1,485 | 15,335 | 10.33 | YPL256C | 3019 | 2,009 | 5,560 | 2.77 |
| YHR191C | 1335 | 624 | 837 | 1.34 | YPL260W | 3157 | 1,833 | 2,130 | 1.16 |
| YHR192W | 1475 | 941 | 1,450 | 1.54 | YPL262W | 3158 | 1,556 | 17,285 | 11.11 |
| YHR193C | 1334 | 587 | 36,803 | 62.70 | YPL263C | 3018 | 2,094 | 4,813 | 2.30 |
| YHR194W | 1476 | 1,827 | 2,222 | 1.22 | YPL265W | 3159 | 2,203 | 6,399 | 2.90 |
| YHR196W | 1477 | 1,831 | 2,780 | 1.52 | YPL266W | 3160 | 1,074 | 3,692 | 3.44 |
| YHR197W | 1478 | 2,405 | 3,250 | 1.35 | YPL270W | 3161 | 2,412 | 4,819 | 2.00 |
| YHR198C | 1333 | 966 | 1,838 | 1.90 | YPL271W | 3162 | 341 | 8,261 | 24.23 |
| YHR199C | 1332 | 977 | 5,334 | 5.46 | YPL273W | 3163 | 1,189 | 14,491 | 14.32 |
| YHR199C-A | 1331 | 222 | 449 | 2.02 | YPL274W | 3164 | 1,871 | 5,398 | 2.89 |
| YHR200W | 1479 | 906 | 7,587 | 8.37 | YPR004C | 3017 | 1,149 | 4,886 | 4.25 |
| YHR201C | 1330 | 1,342 | 2,305 | 1.72 | YPR009W | 3165 | 979 | 1,952 | 1.99 |
| YHR203C | 1329 | 919 | 24,101 | 71.17 | YPR010C | 3016 | 3,789 | 28,219 | 7.45 |
| YHR204W | 1480 | 2,720 | 6,541 | 2.42 | YPR010C-A | 3015 | 474 | 1,293 | 2.75 |
| YHR205W | 1481 | 2,655 | 5,137 | 1.94 | YPR011C | 3014 | 1,372 | 1,425 | 1.04 |
| YHR206W | 1482 | 2,467 | 4,042 | 1.64 | YPR016C | 3013 | 923 | 19,062 | 20.65 |
| YHR208W | 1483 | 1,361 | 16,040 | 11.79 | YPR017C | 3012 | 591 | 2,426 | 4.10 |
| YHR215W | 1484 | 1,516 | 2,522 | 5.18 | YPR019W | 3166 | 3,028 | 4,299 | 1.42 |
| YHR216W | 1485 | 1,948 | 7,565 | 4.40 | YPR020W | 3167 | 494 | 955 | 1.93 |
| YIL002W-A | 1546 | 295 | 1,121 | 3.80 | YPR023C | 3011 | 1,298 | 2,811 | 2.16 |
| YIL003W | 1547 | 1,003 | 1,967 | 1.96 | YPR024W | 3168 | 2,867 | 13,261 | 4.63 |
| YIL004C | 1537 | 589 | 802 | 1.36 | YPR028W | 3169 | 739 | 20,184 | 27.31 |
| YIL008W | 1548 | 480 | 700 | 1.46 | YPR029C | 3010 | 2,750 | 3,728 | 1.35 |
| YIL009C-A | 1536 | 704 | 2,682 | 3.81 | YPR033C | 3009 | 1,688 | 22,813 | 13.51 |
| YIL009W | 1549 | 2,292 | 6,272 | 2.74 | YPR034W | 3170 | 1,745 | 3,266 | 1.87 |
| YIL010W | 1550 | 856 | 1,194 | 1.39 | YPR035W | 3171 | 1,327 | 18,176 | 13.70 |
| YIL011W | 1551 | 955 | 1,216 | 1.28 | YPR036W | 3172 | 1,565 | 41,001 | 26.20 |
| YIL014W | 1552 | 2,046 | 2,804 | 1.37 | YPR036W-A | 3173 | 490 | 2,725 | 5.56 |
| YIL016W | 1553 | 524 | 1,613 | 3.08 | YPR037C | 3008 | 773 | 2,067 | 2.67 |
| YIL018W | 1554 | 880 | 53,220 | 139.74 | YPR041W | 3174 | 1,470 | 24,941 | 16.98 |
| YIL020C | 1535 | 938 | 1,308 | 1.39 | YPR043W | 3175 | 377 | 43,625 | 128.27 |
| YIL021W | 1555 | 1,154 | 2,579 | 2.23 | YPR048W | 3176 | 1,963 | 3,160 | 1.61 |
| YIL022W | 1556 | 1,632 | 5,298 | 3.25 | YPR051W | 3177 | 669 | 1,466 | 2.19 |
| YIL023C | 1534 | 1,353 | 7,686 | 5.68 | YPR052C | 3007 | 448 | 12,317 | 27.49 |
| YIL027C | 1533 | 549 | 1,932 | 3.52 | YPR056W | 3178 | 1,199 | 1,771 | 1.48 |
| YIL029C | 1532 | 889 | 2,275 | 2.62 | YPR058W | 3179 | 1,069 | 6,582 | 6.16 |
| YIL030C | 1531 | 4,038 | 11,576 | 2.87 | YPR060C | 3006 | 956 | 3,237 | 3.39 |
| YIL033C | 1530 | 1,454 | 6,695 | 4.60 | YPR062W | 3180 | 601 | 9,065 | 15.08 |
| YIL034C | 1529 | 931 | 5,621 | 6.04 | YPR063C | 3005 | 639 | 5,747 | 8.99 |
| YIL035C | 1528 | 1,319 | 1,391 | 1.05 | YPR067W | 3181 | 739 | 1,140 | 1.54 |
| YIL036W | 1557 | 1,926 | 2,025 | 1.05 | YPR069C | 3004 | 943 | 20,696 | 21.95 |
| YIL038C | 1527 | 2,867 | 2,937 | 1.02 | YPR071W | 3182 | 988 | 1,042 | 1.05 |
| YIL039W | 1558 | 1,563 | 13,910 | 8.90 | YPR072W | 3183 | 1,878 | 2,771 | 1.47 |
| YIL040W | 1559 | 501 | 1,443 | 2.88 | YPR073C | 3003 | 770 | 3,727 | 4.84 |
| YIL041W | 1560 | 1,091 | 16,115 | 14.77 | YPR074C | 3002 | 2,246 | 128,745 | 57.37 |
| YIL043C | 1526 | 951 | 47,612 | 50.06 | YPR075C | 3001 | 1,212 | 2,131 | 1.76 |
| YIL044C | 1525 | 1,031 | 1,689 | 1.64 | YPR079W | 3184 | 1,313 | 2,036 | 1.55 |
| YIL046W | 1561 | 2,116 | 3,134 | 1.48 | YPR080W | 3185 | 1,533 | 9,776 | 50.75 |
| YIL047C | 1524 | 2,709 | 12,310 | 4.54 | YPR082C | 3000 | 527 | 699 | 1.33 |
| YIL048W | 1562 | 3,912 | 3,957 | 1.01 | YPR086W | 3186 | 1,102 | 1,868 | 1.69 |
| YIL049W | 1563 | 838 | 909 | 1.08 | YPR088C | 2999 | 1,711 | 14,456 | 8.45 |
| YIL051C | 1523 | 565 | 29,278 | 51.82 | YPR091C | 2998 | 2,373 | 3,028 | 1.28 |
| YIL052C | 1522 | 426 | 31,620 | 104.79 | YPR098C | 2997 | 528 | 1,446 | 2.74 |
| YIL053W | 1564 | 931 | 47,658 | 51.94 | YPR100W | 3187 | 483 | 676 | 1.40 |
| YIL062C | 1521 | 550 | 8,079 | 14.69 | YPR102C | 2996 | 616 | 31,138 | 127.12 |
| YIL063C | 1520 | 1,030 | 1,268 | 1.23 | YPR103W | 3188 | 1,019 | 9,434 | 9.26 |
| YIL064W | 1565 | 855 | 2,307 | 2.70 | YPR105C | 2995 | 2,749 | 3,256 | 1.18 |
| YIL065C | 1519 | 572 | 1,580 | 2.76 | YPR106W | 3189 | 1,498 | 2,189 | 1.46 |
| YIL067C | 1518 | 2,074 | 2,384 | 1.15 | YPR108W | 3190 | 1,418 | 4,997 | 3.52 |
| YIL069C | 1517 | 637 | 13,521 | 36.95 | YPR109W | 3191 | 1,132 | 2,435 | 2.15 |
| YIL070C | 1516 | 937 | 1,406 | 1.50 | YPR110C | 2994 | 1,210 | 13,518 | 11.17 |
| YIL074C | 1515 | 1,551 | 8,135 | 5.43 | YPR113W | 3192 | 787 | 18,934 | 24.06 |
| YIL075C | 1514 | 2,966 | 13,949 | 4.70 | YPR114W | 3193 | 1,099 | 8,552 | 7.78 |
| YIL076W | 1566 | 1,067 | 8,612 | 8.07 | YPR118W | 3194 | 1,350 | 11,629 | 8.61 |
| YIL078W | 1567 | 2,318 | 53,427 | 23.05 | YPR119W | 3195 | 1,476 | 2,742 | 1.86 |
| YIL083C | 1513 | 1,284 | 3,530 | 2.75 | YPR124W | 3196 | 1,452 | 4,403 | 3.03 |
| YIL085C | 1512 | 1,668 | 2,684 | 2.16 | YPR125W | 3197 | 1,622 | 1,994 | 1.23 |
| YIL087C | 1511 | 520 | 739 | 1.42 | YPR127W | 3198 | 1,237 | 2,991 | 2.42 |
| YIL088C | 1510 | 1,591 | 6,713 | 4.22 | YPR128C | 2993 | 987 | 5,016 | 5.08 |
| YIL090W | 1568 | 1,916 | 8,609 | 4.49 | YPR129W | 3199 | 1,152 | 1,963 | 1.70 |
| YIL093C | 1509 | 1,040 | 1,461 | 1.42 | YPR131C | 2992 | 675 | 2,089 | 3.09 |
| YIL094C | 1508 | 1,207 | 16,661 | 13.80 | YPR132W | 3200 | 554 | 39,256 | 138.36 |
| YIL103W | 1569 | 1,379 | 1,468 | 1.06 | YPR133C | 2991 | 1,360 | 2,122 | 1.56 |
| YIL106W | 1570 | 1,131 | 1,404 | 1.24 | YPR133W-A | 3201 | 343 | 6,389 | 18.63 |
| YIL108W | 1571 | 2,313 | 3,930 | 1.70 | YPR137W | 3202 | 1,852 | 3,022 | 1.63 |
| YIL109C | 1507 | 2,966 | 32,200 | 10.86 | YPR138C | 2990 | 1,864 | 3,653 | 1.96 |
| YIL110W | 1572 | 1,739 | 3,938 | 2.26 | YPR139C | 2989 | 1,049 | 2,196 | 2.09 |
| YIL111W | 1573 | 512 | 2,598 | 5.07 | YPR140W | 3203 | 1,280 | 1,288 | 1.01 |
| YIL114C | 1506 | 931 | 3,949 | 4.24 | YPR144C | 2988 | 1,796 | 2,916 | 1.62 |
| YIL115C | 1505 | 4,577 | 6,509 | 1.43 | YPR145W | 3204 | 1,922 | 41,716 | 22.76 |
| YIL116W | 1574 | 1,274 | 5,460 | 4.30 | YPR147C | 2987 | 1,153 | 5,665 | 4.91 |
| YIL117C | 1504 | 1,136 | 1,893 | 1.67 | YPR148C | 2986 | 1,453 | 2,312 | 1.59 |
| YIL118W | 1575 | 958 | 4,598 | 4.80 | YPR149W | 3205 | 1,078 | 20,516 | 19.15 |
| YIL121W | 1576 | 1,833 | 4,386 | 2.39 | YPR154W | 3206 | 1,013 | 2,014 | 2.01 |
| YIL123W | 1577 | 2,250 | 25,936 | 11.57 | YPR156C | 2985 | 2,379 | 2,978 | 1.44 |
| YIL124W | 1578 | 1,044 | 9,776 | 9.36 | YPR159W | 3207 | 2,730 | 19,396 | 7.11 |
| YIL125W | 1579 | 3,258 | 4,936 | 1.51 | YPR161C | 2984 | 2,104 | 3,068 | 1.46 |
| YIL131C | 1503 | 1,660 | 3,306 | 1.99 | YPR163C | 2983 | 1,536 | 15,464 | 10.63 |
| YIL133C | 1502 | 717 | 34,708 | 51.85 | YPR165W | 3208 | 1,031 | 20,489 | 19.87 |
| YIL134W | 1580 | 1,152 | 1,525 | 1.32 | YPR166C | 2982 | 450 | 1,204 | 2.67 |
| YIL135C | 1501 | 1,517 | 1,774 | 1.17 | YPR167C | 2981 | 873 | 1,137 | 1.30 |
| YIL137C | 1500 | 2,937 | 5,946 | 2.02 | YPR169W | 3209 | 1,591 | 1,923 | 1.21 |
| YIL138C | 1499 | 829 | 2,408 | 3.05 | YPR170W-B | 3210 | 456 | 17,170 | 37.65 |
| YIL140W | 1581 | 2,472 | 5,115 | 2.07 | YPR172W | 3211 | 603 | 1,433 | 2.38 |
| YIL142W | 1582 | 1,638 | 13,196 | 8.06 | YPR173C | 2980 | 1,409 | 2,337 | 1.66 |
| YIL143C | 1498 | 2,704 | 3,634 | 1.34 | YPR176C | 2979 | 1,153 | 3,368 | 2.92 |
| YIL145C | 1497 | 1,305 | 9,751 | 7.47 | YPR181C | 2978 | 2,692 | 27,724 | 10.30 |
| YIL148W | 1583 | 467 | 27,593 | 107.35 | YPR182W | 3212 | 397 | 3,874 | 9.76 |
| YIL152W | 1584 | 708 | 784 | 1.12 | YPR183W | 3213 | 930 | 14,097 | 15.16 |
| YIL153W | 1585 | 1,242 | 3,248 | 2.62 | YPR187W | 3214 | 569 | 4,984 | 8.76 |
| YIL154C | 1496 | 1,112 | 3,434 | 3.09 | YPR188C | 2977 | 714 | 1,227 | 1.72 |
| YIL156W-B | 1586 | 314 | 2,676 | 13.08 | YPR190C | 2976 | 2,101 | 2,659 | 1.27 |
| YIL157C | 1495 | 832 | 2,967 | 3.57 | YPR191W | 3215 | 1,355 | 3,732 | 2.75 |
| YIL158W | 1587 | 744 | 1,084 | 1.46 | YPR198W | 3216 | 1,726 | 3,766 | 2.18 |
| YIL162W | 1588 | 1,834 | 5,264 | 2.87 | YPR199C | 2975 | 1,015 | 1,350 | 1.33 |
| YIL164C | 1494 | 600 | 651 | 1.08 | RDN18 | 2090-2091 | 1,800 | 2,894,527 | 1608.07 |
| YIR006C | 1493 | 4,593 | 10,092 | 2.23 | RDN25 | 2088-2089 | 3,396 | 7,814,920 | 2301.21 |
| YIR008C | 1492 | 1,286 | 2,675 | 2.08 | RDN37 | 2086-2087 | 5,354 | 11,423,085 | 2133.56 |
| YIR009W | 1589 | 563 | 632 | 1.12 | RDN5 | 2092-2097 | 121 | 176,933 | 1462.26 |
| YIR011C | 1491 | 1,063 | 1,363 | 1.28 | RDN58 | 2084-2085 | 158 | 706,763 | 4473.18 |
| YIR012W | 1590 | 2,480 | 11,028 | 4.45 | tA-UGC | 78, | 73 | 167 | 2.29 |
| | | | | | | 889, | | | |
| | | | | | | 1182, | | | |
| | | | | | | 2099, | | | |
| | | | | | | 2839 | | | |
| YIR015W | 1591 | 435 | 468 | 1.08 | tD-GUC | 229, | 72 | 481 | 6.68 |
| | | | | | | 623, | | | |
| | | | | | | 1183, | | | |
| | | | | | | 1175, | | | |
| | | | | | | 1540, | | | |
| | | | | | | 1539, | | | |
| | | | | | | 1692, | | | |
| | | | | | | 1693, | | | |
| | | | | | | 1687, | | | |
| | | | | | | 1694, | | | |
| | | | | | | 1871, | | | |
| | | | | | | 2122, | | | |
| | | | | | | 2123, | | | |
| | | | | | | 2370, | | | |
| | | | | | | 2592, | | | |
| | | | | | | 2847 | | | |
| YIR016W | 1592 | 925 | 2,283 | 2.47 | tE-CUC | 619, | 72 | 27,690 | 384.58 |
| | | | | | | 1542 | | | |
| YIR018W | 1593 | 904 | 1,374 | 1.52 | tE-UUC | 230, | 72 | 33,670 | 467.64 |
| | | | | | | 398, | | | |
| | | | | | | 896, | | | |
| | | | | | | 897, | | | |
| | | | | | | 888, | | | |
| | | | | | | 1184, | | | |
| | | | | | | 1174, | | | |
| | | | | | | 1185, | | | |
| | | | | | | 1543, | | | |
| | | | | | | 1686, | | | |
| | | | | | | 1870, | | | |
| | | | | | | 2124, | | | |
| | | | | | | 2371, | | | |
| | | | | | | 3085 | | | |
| YIR021W | 1594 | 1,136 | 3,024 | 2.66 | tF-GAA | 231, | 73 | 84 | 1.15 |
| | | | | | | 1010, | | | |
| | | | | | | 1173, | | | |
| | | | | | | 1398, | | | |
| | | | | | | 1397, | | | |
| | | | | | | 2372, | | | |
| | | | | | | 3084, | | | |
| | | | | | | 3083 | | | |
| YIR022W | 1595 | 606 | 5,542 | 9.14 | tI-AAU | 232, | 74 | 81 | 1.09 |
| | | | | | | 618, | | | |
| | | | | | | 887, | | | |
| | | | | | | 886, | | | |
| | | | | | | 1186, | | | |
| | | | | | | 1538, | | | |
| | | | | | | 1544, | | | |
| | | | | | | 2125, | | | |
| | | | | | | 2098, | | | |
| | | | | | | 2591, | | | |
| | | | | | | 2597, | | | |
| | | | | | | 3091, | | | |
| | | | | | | 3082 | | | |
| YIR026C | 1490 | 1,193 | 3,280 | 2.75 | tK-CUU | 397, | 73 | 116 | 1.59 |
| | | | | | | 624, | | | |
| | | | | | | 617, | | | |
| | | | | | | 885, | | | |
| | | | | | | 884, | | | |
| | | | | | | 1187 | | | |
| | | | | | | 1172, | | | |
| | | | | | | 1188, | | | |
| | | | | | | 1695, | | | |
| | | | | | | 1875, | | | |
| | | | | | | 2361, | | | |
| | | | | | | 3092 | | | |
| YIR034C | 1489 | 1,185 | 3,731 | 3.15 | tL-UAA | 234, | 84 | 196 | 2.33 |
| | | | | | | 235, | | | |
| | | | | | | 625, | | | |
| | | | | | | 1685, | | | |
| | | | | | | 1876, | | | |
| | | | | | | 2097, | | | |
| | | | | | | 2590 | | | |
| YIR035C | 1488 | 847 | 3,938 | 4.65 | tN-GUU | 401, | 74 | 105 | 1.42 |
| | | | | | | 1009, | | | |
| | | | | | | 1189, | | | |
| | | | | | | 1877, | | | |
| | | | | | | 2096, | | | |
| | | | | | | 2598, | | | |
| | | | | | | 2599, | | | |
| | | | | | | 2848, | | | |
| | | | | | | 2849, | | | |
| | | | | | | 3093 | | | |
| YIR036C | 1487 | 837 | 3,477 | 4.15 | tR-UCU | 236, | 72 | 134 | 1.86 |
| | | | | | | 626, | | | |
| | | | | | | 898, | | | |
| | | | | | | 1190, | | | |
| | | | | | | 1171, | | | |
| | | | | | | 1191, | | | |
| | | | | | | 1696, | | | |
| | | | | | | 1684, | | | |
| | | | | | | 1869, | | | |
| | | | | | | 2360, | | | |
| | | | | | | 2359 | | | |
| YIR037W | 1596 | 630 | 6,355 | 10.09 | tS-CGA | 402 | 82 | 479 | 5.84 |
| YIR038C | 1486 | 828 | 3,242 | 3.91 | tS-GCU | 1008, | 82 | 166 | 2.02 |
| | | | | | | 2850 | | | |
| YJL001W | 1698 | 803 | 10,864 | 13.53 | tS-UGA | 883, | 82 | 893 | 10.89 |
| | | | | | | 1545, | | | |
| | | | | | | 3094 | | | |
| YJL002C | 1683 | 1,552 | 30,243 | 19.49 | tV-AAC | 899, | 74 | 146 | 1.97 |
| | | | | | | 900, | | | |
| | | | | | | 1170, | | | |
| | | | | | | 1192, | | | |
| | | | | | | 1169, | | | |
| | | | | | | 1396, | | | |
| | | | | | | 1697, | | | |
| | | | | | | 1868, | | | |
| | | | | | | 1878, | | | |
| | | | | | | 2095, | | | |
| | | | | | | 2358, | | | |
| | | | | | | 2357, | | | |
| | | | | | | 2356, | | | |
| | | | | | | 2838 | | | |
| YJL004C | 1682 | 885 | 1,930 | 2.18 | SCR1 | 891 | 522 | 12,096 | 23.17 |
| YJL005W | 1699 | 6,450 | 6,627 | 1.03 | SRG1 | 895 | 551 | 1,009 | 1.83 |
| YJL008C | 1681 | 1,861 | 19,388 | 10.42 | TLC1 | 233 | 1,301 | 7,617 | 5.85 |
| YJL011C | 1680 | 657 | 789 | 1.20 | snR10 | 1178 | 245 | 2,929 | 11.95 |
| YJL012C | 1679 | 2,246 | 40,856 | 18.19 | snR11 | 2363 | 258 | 701 | 2.72 |
| YJL014W | 1700 | 1,759 | 10,055 | 5.72 | snR128 | 1691 | 126 | 5,511 | 43.74 |
| YJL016W | 1701 | 2,184 | 3,132 | 1.43 | snR13 | 622 | 124 | 1,107 | 8.93 |
| YJL020C | 1678 | 3,670 | 4,099 | 1.12 | snR161 | 226 | 161 | 179 | 1.11 |
| YJL024C | 1677 | 823 | 2,233 | 2.71 | snR17a | 2843 | 333 | 720 | 2.16 |
| YJL026W | 1702 | 1,379 | 23,105 | 16.76 | snR17b | 3089 | 332 | 643 | 1.94 |
| YJL034W | 1703 | 2,286 | 52,103 | 23.39 | snR18 | 77 | 102 | 1,545 | 15.15 |
| YJL035C | 1676 | 753 | 1,199 | 1.59 | snR190 | 1690 | 190 | 1,949 | 10.26 |
| YJL039C | 1675 | 5,248 | 6,542 | 1.25 | snR24 | 2362 | 89 | 459 | 5.16 |
| YJL041W | 1704 | 2,660 | 4,641 | 1.80 | snR30 | 2118 | 606 | 1,405 | 2.32 |
| YJL042W | 1705 | 4,398 | 4,869 | 1.11 | snR31 | 2842 | 225 | 1,406 | 6.25 |
| YJL044C | 1674 | 1,491 | 3,211 | 2.15 | snR32 | 1399 | 188 | 1,259 | 6.70 |
| YJL050W | 1706 | 3,454 | 6,593 | 1.91 | snR33 | 400 | 183 | 3,195 | 17.46 |
| YJL052W | 1707 | 1,205 | 4,182 | 6.25 | snR34 | 2119 | 203 | 1,482 | 7.30 |
| YJL053W | 1708 | 1,275 | 1,820 | 1.43 | snR37 | 1689 | 386 | 1,172 | 3.04 |
| YJL054W | 1709 | 1,648 | 3,124 | 1.90 | snR38 | 1872 | 95 | 259 | 2.73 |
| YJL055W | 1710 | 822 | 2,708 | 3.29 | snR39 | 1177 | 89 | 222 | 2.49 |
| YJL059W | 1711 | 1,418 | 1,990 | 1.40 | snR39B | 1176 | 96 | 539 | 5.61 |
| YJL060W | 1712 | 1,486 | 3,047 | 2.05 | snR4 | 892 | 186 | 1,421 | 7.64 |
| YJL061W | 1713 | 2,324 | 3,436 | 1.48 | snR40 | 2594 | 97 | 2,351 | 24.24 |
| YJL062W | 1714 | 2,610 | 6,399 | 2.45 | snR41 | 3088 | 95 | 403 | 4.24 |
| YJL062W-A | 1715 | 473 | 4,056 | 8.59 | snR43 | 399 | 209 | 1,063 | 5.09 |
| YJL063C | 1673 | 806 | 2,948 | 3.66 | snR44 | 2120 | 211 | 1,241 | 5.88 |
| YJL065C | 1672 | 602 | 2,930 | 4.88 | snR45 | 3090 | 172 | 916 | 5.33 |
| YJL066C | 1671 | 948 | 954 | 1.01 | snR46 | 1179 | 197 | 414 | 2.10 |
| YJL068C | 1670 | 986 | 5,831 | 5.91 | snR47 | 621 | 99 | 1,231 | 12.43 |
| YJL069C | 1669 | 1,875 | 3,315 | 1.77 | snR48 | 1180 | 113 | 1,424 | 12.60 |
| YJL072C | 1668 | 642 | 1,018 | 1.59 | snR49 | 2595 | 165 | 396 | 2.40 |
| YJL076W | 1716 | 3,659 | 6,838 | 1.87 | snR50 | 2844 | 90 | 632 | 7.02 |
| YJL078C | 1667 | 2,894 | 9,360 | 3.23 | snR51 | 3087 | 107 | 613 | 5.73 |
| YJL079C | 1666 | 1,249 | 5,906 | 4.74 | snR52 | 890 | 92 | 10,089 | 109.66 |
| YJL080C | 1665 | 3,934 | 24,390 | 6.20 | snR53 | 893 | 91 | 871 | 9.57 |
| YJL081C | 1664 | 1,623 | 3,688 | 2.27 | snR55 | 2103 | 98 | 257 | 2.62 |
| YJL091C | 1663 | 1,623 | 3,030 | 1.87 | snR56 | 228 | 88 | 1,556 | 17.68 |
| YJL093C | 1662 | 2,076 | 4,709 | 2.27 | snR57 | 2102 | 88 | 118 | 1.34 |
| YJL094C | 1661 | 2,803 | 3,761 | 1.34 | snR58 | 2841 | 96 | 2,235 | 23.28 |
| YJL096W | 1717 | 584 | 1,404 | 2.40 | snR60 | 1688 | 104 | 1,832 | 17.61 |
| YJL097W | 1718 | 754 | 8,081 | 10.72 | snR61 | 2101 | 90 | 164 | 1.82 |
| YJL101C | 1660 | 2,397 | 4,656 | 1.94 | snR63 | 620 | 255 | 1,061 | 4.16 |
| YJL104W | 1719 | 649 | 1,365 | 2.10 | snR64 | 1873 | 101 | 4,436 | 43.92 |
| YJL109C | 1659 | 5,398 | 14,092 | 2.61 | snR66 | 2596 | 86 | 433 | 5.03 |
| YJL111W | 1720 | 1,949 | 7,529 | 3.86 | snR67 | 894 | 82 | 698 | 8.51 |
| YJL117W | 1721 | 1,094 | 8,034 | 7.40 | snR68 | 1541 | 136 | 1,380 | 10.15 |
| YJL118W | 1722 | 829 | 1,109 | 1.35 | snR69 | 1874 | 101 | 1,362 | 13.49 |
| YJL121C | 1658 | 882 | 14,692 | 16.66 | snR70 | 3086 | 164 | 322 | 1.96 |
| YJL122W | 1723 | 714 | 2,165 | 3.03 | snR71 | 1400 | 90 | 423 | 4.70 |
| YJL124C | 1657 | 881 | 1,920 | 2.18 | snR72 | 2364 | 98 | 1,336 | 13.63 |
| YJL126W | 1724 | 924 | 1,154 | 1.25 | snR73 | 2365 | 106 | 1,181 | 11.14 |
| YJL127C-B | 1656 | 560 | 2,773 | 4.95 | snR75 | 2366 | 89 | 695 | 7.81 |
| YJL128C | 1655 | 2,222 | 4,821 | 2.17 | snR76 | 2367 | 109 | 215 | 1.97 |
| YJL129C | 1654 | 3,915 | 4,115 | 1.05 | snR77 | 2368 | 88 | 377 | 4.28 |
| YJL130C | 1653 | 7,346 | 30,212 | 4.11 | snR78 | 2369 | 87 | 395 | 4.54 |
| YJL133C-A | 1652 | 427 | 1,030 | 2.41 | snR79 | 2100 | 84 | 371 | 4.42 |
| YJL133W | 1725 | 1,248 | 2,126 | 1.70 | snR8 | 2845 | 190 | 714 | 3.76 |
| YJL134W | 1726 | 1,305 | 4,591 | 3.52 | snR81 | 2846 | 201 | 266 | 1.32 |
| YJL136C | 1651 | 405 | 25,144 | 75.40 | snR82 | 1181 | 268 | 677 | 2.53 |
| YJL137C | 1650 | 1,294 | 1,445 | 1.12 | snR9 | 2840 | 187 | 2,775 | 14.84 |
| YJL138C | 1649 | 1,442 | 10,348 | 24.12 | LSR1 | 227 | 1,175 | 2,194 | 1.87 |
| YJL140W | 1727 | 802 | 2,606 | 3.25 | snR19 | 2593 | 568 | 1,343 | 2.36 |
| | | | | | snR6 | 2121 | 112 | 691 | 6.17 |

Table 5: Provides a list of all RNA polynucleotides whose average nucleotide coverage is above 1.0 (methods). Columns show, for each gene, the annotated transcript length (in nucleotides), the total number of sequences mapping to that transcript and the computed load. While the poly-A purification process greatly reduces the overload of tRNAs and rRNAs in the total RNA, it is imperfect and non-polyadenylated transcripts are therefore recovered. Sequences of these transcripts are available through the NCBI web site (The Hypertext Transfer Protocol://world wide web (dot) ncbi (dot) nlm (dot) nih (dot) gov/). Note that several sequences representing different transcripts of rRNA or tRNA (each having a unique sequence identifier) are presented under a single GENE entry in the above Table. For example, SEQ ID NOs: 883, 1545 and 3094 are different transcripts of the gene entry tS-UGA, corresponding to the ts-UGA-E, ts-UGA-1 and ts-UGA-P, respectively, which are included in the “48677 Supplementary Data” file, which is being co-filed with the instant application.

[0284] The structural profiles of these transcripts, which include 3000 yeast coding transcripts, 14 tRNAs, 5 rRNAs, 58 snoRNAs and six other annotated non-coding genes was uncovered. In total, structural information for over 4.3 million transcribed bases was obtained, which is ˜100-fold more than all published RNA footprints to date.

[0285] The structural profile is provided in “Supplementary Data” file, in a text format. The information provided for each RNA polynucleotide includes “Designation” (the transcript name, e.g., “YLR110C”), “Sequence” (the nucleotide sequence of the RNA for which the pairability status was determined), “Length” (the length of the RNA polynucleotide for which the pairability status was determined (e.g., 507 for the first RNA transcript “YLR110C”), “SEQ ID NO:” (sequence identifier of the RNA polynucleotide for which the pairability status was determined), and “PARS score” (the log of the ratio between the number of reads obtained using RNase V1 and the number of reads obtained using RNase S1 for each of the nucleotides by order, separated by “;”). For example, for the first 11 nucleotides of the YLR110C RNA [CCAAGAAATTA (nucleotides 1-11 of SEQ ID NO:1)] the following data is presented: “YLR110C CCAAGAAATTA 507 1

[0286] 2.92;1.96;1.34;2.04;0.86;1.24;1.77;2.36;2.93;−1.91;−1.86;”. This data indicates that the log ratio of the first nucleotide of YLR110C (i.e., “C” at position 1 of SEQ ID NO:1) is “2.92”, demonstrating that this nucleotide is in a “paired state”. Similarly, the log ratio of the second nucleotide of YLR110C (i.e., “C” at position 2 of SEQ ID NO:1) is “1.96”, demonstrating that this nucleotide is in a “paired state”. The log ratio of the tenth nucleotide of YLR110C (i.e.,“T” at position 10 of SEQ ID NO:1) is “−1.91”, demonstrating that this nucleotide is in an “unpaired state”.

[0287] Several tests were used to determine whether there are biases in the method. First, to determine whether there is a bias towards RNA fragments with particular sequences, the nucleotide distribution over the first bases of the sequenced fragments were examined. The sequence composition at these bases did not show a strong sequence bias at the first base or around it, suggesting that RNase cleavage, adaptor ligation, and cDNA conversion do not introduce significant sequence biases (FIGS. 10A-D). Second, to test whether the obtained reads are uniform from both the 5′ and the 3′ end of the transcripts the present inventors plotted the number of reads as a function of position along each transcript and averaged the reads across all of the transcripts to obtain a global profile of 5′ to 3′ bias. Positions that exhibited the largest deviation from the mean coverage had 8% more reads than the mean coverage, suggesting that the protocol used by the present inventors has a relatively small bias towards particular regions along the transcript (FIG. 11). Third, to test whether the RNA fragments are cleaved and captured in proportion to their abundance in the initial pool the present inventors computed the average nucleotide coverage of each mRNA as the number of reads that map to that mRNA divided by the mRNA's length. A high correlation was found between mRNA coverage measurements across biological replicates (correlation>0.96, FIG. 9B), as well as among the measurements and previous sequencing-based approaches (Ingolia, N. T., 2009; Nagalakshmi, U. et al. 2008) that measured mRNA abundance in yeast (correlation=0.86 and 0.75 respectively, FIG. 9C). Fourth, to ensure that structure-specific signals are measured the present inventors also confirmed that signals generated by RNase V1 are highly distinct from those generated by RNase S1. Although as expected, V1 and S1 peaks are mostly distinct, some peaks overlap. Global inspection across all transcripts reveals that ˜18% of the V1 and S1 peaks are shared (data not shown). Because they are difficult to interpret, these joint peaks, as well as other background noise present in both experiments, are removed by the integrated PARS score.

### Example 3

### PARS Probes RNA Structures with High Accuracy

[0288] To test whether PARS accurately measures RNA structures, the present inventors confirmed that the signals obtained by the method of some embodiments of the invention are indeed similar to those obtained with traditional footprinting which was performed on a single RNA polynucleotide at a time. To this end, ten separate traditional footprinting experiments were conducted with either RNase V1 or S1, applied to two domains from the Tetrahymena ribozyme, and two domains from the human HOTAIR non-coding RNA, which were included in the samples (see above) and two domains of endogenous yeast mRNAs. The structure of the latter four were unknown and were first revealed by PARS. In all cases, high agreement was found between the PARS signals and traditional footprinting (correlations=0.63-0.97, FIGS. 3A-D; and FIGS. 12A-D, 13A-D, and 14A-D). Thus, nucleotides that are cleaved by RNase V1 or RNase S1 are accurately captured by PARS, and the relative intensities of such cleavage sites can be measured. Notably, due to length limitations of traditional footprinting, short domains were selected from each of the above transcripts, in vitro transcribed, and only then traditional footprinting was applied. Thus, traditional footprinting measures the structure of small RNA fragments that are excised from their larger encompassing RNA. This is not only laborious, but may also be inaccurate, since due to long-range interactions, the excised fragment may fold differently when taken out of context.

[0289] Finally, the PARS signals were compared to structures of yeast RNAs previously reported in the literature. Notably, PARS correctly reproduces the known secondary structure of three structured RNA domains of ASH1 [which are involved in mRNA localization at the bud tip (Chartrand, P., et al., 2002)] and of a structural element responsible for internal translation initiation in URE2 mRNA (Reineke, L. C., et al., 2008) (FIGS. 3A-D; FIGS. 15A-C). This result suggests that PARS is able to provide structural information of transcripts in their full-length context and endogenous abundance from within a complex RNA pool. Taken together, these results demonstrate that PARS recapitulates results obtained by low-throughput methods with high accuracy, and also has advantages over existing methods, stemming from its ability to probe structures of long RNAs.

### Example 4

### Comparison to RNA Folding Algorithms

[0290] As the approach described herein provides genome-wide measurements of RNA structure, the present inventors sought to compare its results to algorithms that predict RNA structure. The Vienna package (Hofacker, I. L., et al., 2002) was used to fold the 3000 transcripts that were analyzed and a significant correspondence between these predictions and the PARS scores were found. The present inventors found that nucleotides with high double-stranded PARS score had a significantly higher average probability of being base paired according to Vienna and conversely, that nucleotides with high single-stranded PARS score (negative scores) were predicted by Vienna to have a significantly lower probability of being base paired. This result is highly significant, as can be seen when comparing to random samples of the same size (average of 0.577±0.006, p<10⁻²⁰⁰, FIG. 5A. Similar results were obtained from folding the yeast transcriptome in windows ranging from ˜40 nucleotides up to windows that cover the entire transcript (FIG. 16), suggesting that folding algorithms correctly capture local interactions but do not improve in accuracy when the entire transcript is made available. The present inventors suggest that genome-wide PARS data can be used to constrain folding algorithms and improve their accuracy, as has been previously shown for specific RNAs (Watts, J. M. et al. 2009; Mathews, D. H. et al. 2004). Overall, the significant correspondence between PARS and folding prediction provides further independent validation for the ability of PARS to provide genome-scale and high-quality measurements of RNA structure at single nucleotide resolution.

### Example 5

### Global Structural Properties of Yeast Transcripts

[0291] The present inventors used the structural measurements that were obtained for 3000 yeast transcripts to uncover global structural properties of yeast genes. First, examining the average PARS score across the coding regions and 5′ and 3′ untranslated regions (UTRs) of yeast transcripts, differences were found between the propensity for RNA structure across these regions, with coding regions exhibiting significantly more structure than 5′ and 3′ UTRs (p<10⁻³⁰ and p<10⁻⁵⁰ respectively, FIGS. 5B-C). Notably, the start and stop codons each exhibit local minima of PARS scores, indicating reduced tendency for double-stranded conformation and increased accessibility. These findings are in agreement with previous suggestions made on the basis of computational predictions for mouse and human genes (Shabalina, S. A., et al., 2006). The evolutionary conservation of this global organization of mRNA secondary structure suggests that it may have functional importance. The need to preserve regulatory interactions may have selected for decreased tendency to form secondary structures in UTRs, and in particular, in the start and stop codons (Shabalina, S. A., et al., 2006). Conversely, structured domains along coding regions may protect against ectopic translation initiation, or affect ribosome translocation and protein folding, as recently postulated (Watts, J. M. et al. 2009).

[0292] Second, aligning the coding regions of those 3000 genes and applying a discrete Fourier transform analysis to the average PARS signal, the present inventors detected a periodic structure signal across coding regions with a cycle of three nucleotides, such that on average, the first nucleotide of each codon is least structured and the second nucleotide is most structured. Notably, this periodic signal is only found in coding regions, and not in UTRs (FIGS. 5B-D). It is noted that triplet periodicity of the PARS signal is only detectable when averaging PARS signals over many genes and is less evident in mRNAs of individual genes. Thus, the periodic occurrence of RNA secondary structures cannot be used to set the proper phase of translation for individual mRNAs, and is more likely to be a consequence of the genetic code, codon usage and nucleotide distribution in yeast open reading frames.

### Example 6

### Local Structural Properties of Yeast Transcripts

[0293] Having observed the pattern of RNA structure across yeast transcripts, the present inventors checked whether mRNAs of individual genes deviate from the canonical signature, and whether such deviations may be related to biological regulation. For each transcript, the present inventors ranked the overall PARS score of its 5′ UTR, CDS, and 3′ UTR, and used the Wilcoxon rank sum test to ask whether genes with shared biological functions or cytotopic localizations [REF GO] tend to have similar scores, which would correspond to similar degrees of secondary structures. A rich picture of biological coordination was found (FIG. 17) including increased RNA structure, especially with CDS and 3′ UTR, being significantly associated with cytotopic localization of the encoded proteins to distinct domains of the cell, such as the cell wall, the bud, cell division site, or the vacuole. The stronger association between RNA structure in CDS with cytotopic localization over that of UTRs was not anticipated and suggests that many RNA localization signals may reside in CDS. In addition, it was found that a decreased RNA structure is a feature of RNAs encoding many house-keeping enzymes, and that the mRNAs with the least secondary structure encode subunits of the ribosome. mRNAs encoding subunits of the same protein complex, such as the RENT complex, U2-splicesome, Smc5-Smc6 complex, and GINS complex, also tend to have the same pattern of RNA structures. These results suggest systematic organization of mRNA localization and function via specific patterns of RNA structure.

[0294] It has long been hypothesized that mRNA accessibility near the start codon affects protein translation (Kozak, M. et al., 2005). A recent work in E. coli suggested that the predicted degree of RNA folding near the translational start site explains much of the observed variation in translation efficiency of a reporter protein (Kudla, G., et al., 2009), and as shown in FIG. 5D, yeast start codon tends to lack RNA structure. The present inventors tested whether such a correlation between mRNA structure around the translation start site and translation efficiency exists in a eukaryotic organism and on a genome-wide scale. A correlation between the PARS scores in 40 by windows and ribosome density (Ingolia, N. T., 2009) was performed and used as a proxy for translation efficiency. A small but significant anti-correlation was found between translational efficiency and PARS scores around ten bases upstream of the translation start site (correlation=−0.1, p<10⁻⁴, FIG. 6A), which interestingly corresponds to the 5′ position of the first ribosome on yeast mRNAs (Ingolia, N. T., 2009). To study the structural patterns around the start codon in more detail, k-means clustering was applied to the structural profile of the ±40 by surrounding it. Three clusters were found with distinct structural profiles. Of particular interest are the genes found in cluster 4, as those exhibit significantly less structure in their 5′ UTR than in the beginning of their coding region. Notably, those genes also exhibit a higher ribosome density, providing further insight into the relationship between translational efficiency and the structural profile around translation starts sites (FIG. 6B). Overall, these results provide the first genome-wide experimental validation for the suggestion that mRNA secondary structure around the start codon may reduce translational efficiency (Kozak, M. et al., 2005), although the rather low correlation clearly implies that translational efficiency is determined by additional factors in vivo. The observed global difference in the extent of RNA structure between 5′ UTRs and coding regions suggests that lower RNA structure may be a feature of regulatory non-coding RNA sequences. Recently, RNA sequences encoding the signal sequence (termed the SSCR) of secretory proteins have been shown to function as an RNA element that promotes RNA nuclear export (Palazzo, A. F. et al., 2007) whereas the peptide encoded by SSCR directs the protein to the secretory pathway via the endoplasmic reticulum. The prevalence and structural basis of SSCR are not clear, and the present inventors wondered whether this dual function RNA/protein element, typically at the beginning of the coding sequence, would conform to the rule of lower RNA structure typical of UTRs. Indeed, the 5′ UTR region and first ˜40 coding nucleotides of transcripts predicted to encode a signal peptide have lower PARS signal, indicating increased single-stranded propensity, as compared to other transcripts (p<10⁻¹¹, FIG. 6D). Thus, these results raise the hypothesis that specific secondary RNA structure around gene starts may assist in the cytotopic localization of mRNAs and their resulting proteins. More generally, the present inventors suggest that PARS can be used to both generate and test hypotheses regarding signals of secondary structure that may characterize and have functional importance for classes of mRNAs.

### Example 7

### Determination of Pairability of RNA Molecules using Structure Sensitive Chemicals

[0295] Cells are subjected to binding with chemicals which specifically modify or bind to single stranded or double stranded RNA. Binding is performed in vivo or in vitro. Binding or covalent modification is performed for a certain amount of time, so that RNA nucleotides that are single-stranded are partially modified by the chemical (DMS—adenine and cytosine, or CMCT—uridine and some guanine).

[0296] For in-vivo structure probing: the chemical penetrates the cells and modifies the RNA in vivo. The RNA is then isolated from the cell. The proteins are removed from the RNA sample by conventional means. The RNA is subjected to RT-PCR to create cDNA. PCR falls off at modified sites, thus the first base of each DNA fragment represents a nucleotide that immediately follows a nucleotide that was in an “unpaired” conformation in the original RNA (in-vivo).

[0297] Adaptor ligation at the first base can be carried out to capture the first nucleotide.

[0298] For in-vitro structure probing: RNAs isolated from the cells are renatured in vitro and then subjected to partial modification by chemicals that recognize single/double stranded regions. After modification, the RNA ligated to adaptors and converted to cDNA.

[0299] The cDNA polynucleotides are subjected to deep sequencing-compatible library. Analysis of the outcome is similar to the analysis described in Examples 1-6 above. Each sequence fragment gives an “evidence point” about the sequence being in single/double-strand conformation, i.e., if the nucleotide immediately upstream of the first nucleotide in the sequenced fragment was in a single-strand conformation in the original RNA.

[0300] Analysis and Discussion

[0301] The invention according to some embodiments thereof provides PARS, the first high-throughput approach for experimentally measuring structural properties of RNAs at genome-scale. The present inventors show that PARS recovers structural properties with high accuracy and at a nucleotide resolution. Applying PARS to the entire transcriptome of yeast, the present inventors obtained structural information for over 3000 yeast transcripts and uncovered several global structural properties in them, including the propensity for more structure over coding regions compared to untranslated regions, a three-nucleotide periodic pattern of structure in coding regions, and a global anti-correlation between structure over translation start site and translational efficiency. While some of these findings have been hypothesized from computational predictions of RNA structure, the analysis provides the first large-scale and direct experimental validation for these hypotheses. These results reveal a systematic organization of secondary structure by RNA sequence, which can demarcate functional units of mRNAs.

[0302] PARS transforms the field of RNA structure probing into the realm of high-throughput, genome-wide analysis and should prove useful both in determining the structure of entire transcriptomes of other organisms as well as in systematically measuring the effects of diverse conditions on RNA structure. Applying PARS with other probes of RNA structure and dynamics should refine the precision and certainty of RNA structures. Probing RNA structure in the presence of different ligands, proteins, or in different physical or chemical conditions may provide further insights into how RNA structures control gene activity.

[0303] As a starting point, the present inventors implemented PARS with RNases, and it is likely that additional modification can improve the utility of PARS. More generally, many classical methods in molecular biology require precise mapping of ends of nucleic acids. The results presented herein provide the first experimental and computational frameworks to enable deep sequencing to precisely map ends of nucleic acid fragments in a complex pool, suggesting that many other powerful methods in structural and chemical biology can now be performed on a genomic scale.

[0304] It should be noted that simultaneous determination of the pairability (as used in the method of some embodiments of the invention) provides a significant advantage over the prior art methods [e.g., footprinting or SHAPE (e.g., Watts, J. M. et al. 2009] in which several sequence specific primers were designed along each RNA sequence in order to subject a single long RNA molecule (e.g., HIV) to deep sequencing, followed by repetitive sequencing runs (each begins from a distinct primer) in order to obtain information regarding the pairability state of each nucleotide. Thus, the prior art methods could not detect the pairability of a plurality of RNA polynucleotides simultaneously but instead are limited to analysis of a single RNA polynucleotide at a time. The prior art methods could not be used to detect a change in secondary structure of an RNA polynucleotide which is present in a mix of RNA polynucleotides such as in a cell.

[0305] Although the invention has been described in conjunction with specific embodiments thereof, it is evident that many alternatives, modifications and variations will be apparent to those skilled in the art. Accordingly, it is intended to embrace all such alternatives, modifications and variations that fall within the spirit and broad scope of the appended claims.

[0306] All publications, patents and patent applications mentioned in this specification are herein incorporated in their entirety by reference into the specification, to the same extent as if each individual publication, patent or patent application was specifically and individually indicated to be incorporated herein by reference. In addition, citation or identification of any reference in this application shall not be construed as an admission that such reference is available as prior art to the present invention. To the extent that section headings are used, they should not be construed as necessarily limiting.

### REFERENCES

### Additional References are Cited in Text

[0307] 1. Arava, Y. et al. Genome-wide analysis of mRNA translation profiles in Saccharomyces cerevisiae. in Proc Natl Acad Sci USA Vol. 100 3889-94 (2003).
[0308] 2. Olivier, C. et al. Identification of a conserved RNA motif essential for She2p recognition and mRNA localization to the yeast bud. Mol Cell Biol 25, 4752-66 (2005).
[0309] 3. Wang, Y. et al. Precision and functional specificity in mRNA decay. Proc Natl Acad Sci USA 99, 5860-5 (2002).
[0310] 4. Takizawa, P. A., DeRisi, J. L., Wilhelm, J. E. & Vale, R. D. Plasma membrane compartmentalization in yeast by messenger RNA transport and a septin diffusion barrier. Science 290, 341-4 (2000).
[0311] 5. Shepard, K. A. et al. Widespread cytoplasmic mRNA transport in yeast: identification of 22 bud-localized transcripts using DNA microarray analysis. Proc Natl Acad Sci USA 100, 11429-34 (2003).
[0312] 6. Tucker, B. J. & Breaker, R. R. Riboswitches as versatile gene control elements. Curr Opin Struct Biol 15, 342-8 (2005).
[0313] 7. Kato, J. & Niitsu, Y. Recent advance in molecular iron metabolism: translational disorders of ferritin. Int J Hematol 76, 208-12 (2002).
[0314] 8. Chu, V. B. & Herschlag, D. Unwinding RNA's secrets: advances in the biology, physics, and modeling of complex RNAs. Curr Opin Struct Biol 18, 305-14 (2008).
[0315] 9. Kertesz, M., Iovino, N., Unnerstall, U., Gaul, U. & Segal, E. The role of site accessibility in microRNA target recognition. in Nat Genet Vol. 39 1278-84 (2007).
[0316] 10. Ingolia, N. T., Ghaemmaghami, S., Newman, J. R. S. & Weissman, J. S. Genome-Wide Analysis In Vivo of Translation with Nucleotide Resolution Using Ribosome Profiling. in Science 1168978v1 (2009).
[0317] 11. Ameres, S. L., Martinez, J. & Schroeder, R. Molecular basis for target RNA recognition and cleavage by human RISC. Cell 130, 101-12 (2007).
[0318] 12. Watts, J. M. et al. Architecture and secondary structure of an entire HIV-1 RNA genome. Nature 460, 711-6 (2009).
[0319] 13. Bernstein, F. C. et al. The Protein Data Bank: a computer-based archival file for macromolecular structures. J Mol Biol 112, 535-42 (1977).
[0320] 14. Brenowitz, M., Chance, M. R., Dhavan, G. & Takamoto, K. Probing the structural dynamics of nucleic acids by quantitative time-resolved and equilibrium hydroxyl radical “footprinting”. Curr Opin Struct Biol 12, 648-53 (2002).
[0321] 15. Alkemar, G. & Nygard, O. Probing the secondary structure of expansion segment ES6 in 18S ribosomal RNA. Biochemistry 45, 8067-78 (2006).
[0322] 16. Romaniuk, P. J., de Stevenson, I. L., Ehresmann, C., Romby, P. & Ehresmann, B. A comparison of the solution structures and conformational properties of the somatic and oocyte 5S rRNAs of Xenopus laevis. Nucleic Acids Res 16, 2295-312 (1988).
[0323] 17. Deigan, K. E., Li, T. W., Mathews, D. H. & Weeks, K. M. Accurate SHAPE-directed RNA structure determination, in Proc Natl Acad Sci USA Vol. 106 97-102 (2009).
[0324] 18. Das, R. et al. Structural inference of native and partially folded RNA by high-throughput contact mapping. Proc Natl Acad Sci USA 105, 4144-9 (2008).
[0325] 19. Mitra, S., Shcherbakova, I. V., Altman, R. B., Brenowitz, M. & Laederach, A. High-throughput single-nucleotide structural mapping by capillary automated footprinting analysis. Nucleic Acids Res 36, e63 (2008).
[0326] 20. Wilkinson, K. A. et al. High-throughput SHAPE analysis reveals structures in HIV-1 genomic RNA strongly conserved across distinct biological states. PLoS Biol 6, e96 (2008).
[0327] 21. Zuker, M. Mfold web server for nucleic acid folding and hybridization prediction. Nucleic Acids Res 31, 3406-15 (2003).
[0328] 22. Hofacker, I. L., Fekete, M. & Stadler, P. F. Secondary structure prediction for aligned RNA sequences. J Mol Biol 319, 1059-66 (2002).
[0329] 23. Do, C. B., Woods, D. A. & Batzoglou, S. CONTRAfold: RNA secondary structure prediction without physics-based models. Bioinformatics 22, e90-8 (2006).
[0330] 24. Mathews, D. H., Sabina, J., Zuker, M. & Turner, D. H. Expanded sequence dependence of thermodynamic parameters improves prediction of RNA secondary structure. J Mol Biol 288, 911-40 (1999).
[0331] 25. Mathews, D. H. Revolutions in RNA secondary structure prediction. in J Mol Biol Vol. 359 526-32 (2006).
[0332] 26. Rabani, M., Kertesz, M. & Segal, E. Computational prediction of RNA structural motifs involved in posttranscriptional regulatory processes, in Proc Natl Acad Sci USA Vol. 105 14885-90 (2008).
[0333] 27. Dowell, R. D. & Eddy, S. R. Evaluation of several lightweight stochastic context-free grammars for RNA secondary structure prediction. BMC Bioinformatics 5, 71 (2004).
[0334] 28. Doshi, K. J., Cannone, J. J., Cobaugh, C. W. & Gutell, R. R. Evaluation of the suitability of free-energy minimization using nearest-neighbor energy parameters for RNA secondary structure prediction. BMC Bioinformatics 5, 105 (2004).
[0335] 29. Ziehler, W. A. & Engelke, D. R. Probing RNA structure with chemical reagents and enzymes. Curr Protoc Nucleic Acid Chem Chapter 6, Unit 61 (2001).
[0336] 30. Rinn, J. L. et al. Functional demarcation of active and silent chromatin domains in human HOX loci by noncoding RNAs, in Cell Vol. 129 1311-23 (2007).
[0337] 31. Nagalakshmi, U. et al. The transcriptional landscape of the yeast genome defined by RNA sequencing, in Science Vol. 320 1344-9 (2008).
[0338] 32. Chartrand, P., Meng, X. H., Huttelmaier, S., Donato, D. & Singer, R. H. Asymmetric sorting of ashlp in yeast results from inhibition of translation by localization elements in the mRNA. Mol Cell 10, 1319-30 (2002).
[0339] 33. Reineke, L. C., Komar, A. A., Caprara, M. G. & Merrick, W. C. A small stem loop element directs internal initiation of the URE2 internal ribosome entry site in Saccharomyces cerevisiae. J Biol Chem 283, 19011-25 (2008).
[0340] 34. Mathews, D. H. et al. Incorporating chemical modification constraints into a dynamic programming algorithm for prediction of RNA secondary structure. Proc Natl Acad Sci USA 101, 7287-92 (2004).
[0341] 35. Shabalina, S. A., Ogurtsov, A. Y. & Spiridonov, N. A. A periodic pattern of mRNA secondary structure created by the genetic code, in Nucleic Acids Res Vol. 34 2428-37 (2006).
[0342] 36. Kozak, M. Regulation of translation via mRNA structure in prokaryotes and eukaryotes, in Gene Vol. 361 13-37 (2005).
[0343] 37. Kudla, G., Murray, A. W., Tollervey, D. & Plotkin, J. B. Coding-sequence determinants of gene expression in Escherichia coli. in Science Vol. 324 255-8 (2009).
[0344] 38. Palazzo, A. F. et al. The signal sequence coding region promotes nuclear export of mRNA. PLoS Biol 5, e322 (2007).
[0345] 39. Cech, T. R., Damberger, S. H. & Gutell, R. R. Representation of the secondary and tertiary structure of group I introns. Nat Struct Biol 1, 273-80 (1994).
[0346] 40. Hofacker L I., et al. Fast folding and comparison of RNA secondary structures. Monatshefte Fr. Chemie. 125:167-188, 1994;
[0347] 41. Do C B., Woods D A., et al. CONTRAfold: RNA seconday structure prediction without physics-based models. Bioinfomatics 22:90-98, 2006.

### Supplementary Data Content

[0348] The following lists the content of the text file which is submitted herewith and filed with the application. File information is provided as: File name/byte size/date of creation/operating system/machine format.

Supplementary_Data/18,453,201 bytes/7 April 2010/PC/Notepad

### Text File Content

[0349] The following lists the content of the text file which is enclosed herewith and filed with the application. File information is provided as: File name/byte size/date of creation/operating system/machine format.

[0350] Sequence_Listing/6,374,281 bytes/19 April 2010/PC/Notepad

What is claimed is:

1. A method of predicting a pairability of nucleotides of a plurality of RNA polynucleotides, the method comprising:
(a) simultaneously determining a paired state or an unpaired state of nucleotides of the plurality of RNA polynucleotides; and
(b) corresponding said paired state or said unpaired state of said nucleotides to a database of nucleic acid sequences, said database comprises nucleic acid sequences representing the plurality of RNA polynucleotides,
thereby determining the pairability of nucleotides of the plurality of RNA polynucleotides.

2. A method of determining a secondary structure of a plurality of RNA polynucleotides, the method comprising:
(a) predicting the pairability of nucleotides of the plurality of RNA polynucleotides according to the method of claim 1; and
(b) determining the secondary structure of the plurality of RNA polynucleotides based on the predicted pairability of said nucleotides,
thereby determining the secondary structure of the plurality of the RNA polynucleotides.

3. A method of determining if a molecule is capable of modulating a secondary structure of at least one RNA polynucleotide of a plurality of RNA polynucleotides, the method comprising:
(a) contacting the plurality of RNA polynucleotides with the molecule; and
(b) comparing a secondary structure of the plurality of RNA polynucleotides following said contacting to a secondary structure of the plurality of RNA polynucleotides prior to said contacting,
wherein an alteration above a predetermined threshold in said secondary structure of an RNA polynucleotide following said contacting indicates that the molecule modulates the secondary structure of said RNA polynucleotide,
thereby determining if the molecule is capable of modulating the secondary structure of the at least one RNA polynucleotide of the plurality of molecules.

4. A method of determining if a molecule is capable of modulating a secondary structure of a plurality of RNA polynucleotides, the method comprising
(a) contacting the plurality of RNA polynucleotides with the molecule; and
(b) determining a secondary structure of the plurality of RNA polynucleotides according to the method of claim 2 following said contacting and comparing said secondary structure to a secondary structure of the same plurality of RNA polynucleotides prior to said contacting,
wherein an alteration above a predetermined threshold of said secondary structure following said contacting indicates that the molecule modulates the secondary structure of the RNA polynucleotides,
thereby determining if the molecule is capable of modulating the secondary structure of the plurality of RNA polynucleotides.

5. A method of screening for a marker associated with a pathology, the method comprising identifying at least one RNA polynucleotide having an altered secondary structure between cells associated with the pathology and cells devoid of the pathology, wherein an alteration above a predetermined threshold between said secondary structure of said at least one RNA polynucleotide in said cells associated with the pathology and said secondary structure of said at least one RNA polynucleotide in said cells devoid of the pathology indicates that said at least one RNA polynucleotide is associated with the pathology, thereby screening for a marker associated with the pathology.

6. The method of claim 1, wherein said determining said paired state or said unpaired state is effected using an RNA structure—dependent agent.

7. The method of claim 6, wherein said RNA structure—dependent agent is an RNase selected from the group consisting of:
(i) an RNase which specifically cleaves a phosphodiester bond of a paired RNA, and
(ii) an RNase which specifically cleaves a phosphodiester bond of an unpaired RNA.

8. The method of claim 7, wherein said RNase is an endonuclease.

9. The method of claim 6, wherein said RNA structure—dependent agent is a chemical selected from the group consisting of:
(i) a chemical which specifically binds to or modifies an unpaired RNA, and;
(ii) a chemical which specifically binds to or modifies a paired RNA.

10. The method of claim 9, wherein binding of said chemical to said RNA is effected covalently.

11. The method of claim 7, wherein said determining said paired state or said unpaired state of said nucleotides is effected by digesting the plurality of RNA polynucleotides with said RNase to thereby obtain digested RNA polynucleotides.

12. The method of claim 11, further comprising subjecting said digested RNA polynucleotide to reverse transcription to thereby obtain complementary DNA polynucleotides.

13. The method of claim 9, wherein said determining said paired state or said unpaired state of said nucleotides is effected by reverse transcription of said plurality of RNA polynucleotides following binding of said plurality of RNA polynucleotides with said chemical, to thereby obtain complementary DNA polynucleotides.

14. The method of claim 12, wherein said corresponding said paired state or said unpaired state of said nucleotides to said data base nucleic acid sequences is effected by comparing a nucleic acid sequence of said complementary DNA polynucleotides with said data base nucleic acid sequences.

15. The method of claim 14, further comprising computing an occurrence of a nucleotide of each of the plurality of RNA polynucleotides within said nucleic acid sequence of said complementary DNA polynucleotides.

16. The method of claim 14, wherein said nucleic acid sequence of said complementary DNA polynucleotides is determined using a sequencing apparatus selected from the group consisting SOLEXA™ (IIlumina), PYROSEQUENCING™ 454 (Roche Diagnostics Corporation), SOLiD™ (Life Technologies), and Helicos (Helicos BioSciences Corporation).

17. The method of claim 16, wherein determination of said nucleic acid sequence of said complementary DNA polynucleotides is effected for each of said complementary DNA polynucleotides.

18. The method of claim 15, wherein said computing said occurrence is performed on a nucleotide corresponding to a first nucleotide and/or a last nucleotide of each of said complementary DNA polynucleotides.

19. The method of claim 15, wherein a higher occurrence of said nucleotide within said complementary DNA polynucleotides obtained using said RNA structure—dependent agent which is specific to said paired RNA as compared to an expected occurrence of said nucleotide indicates that said nucleotide is in said paired state in the RNA polynucleotide prior to being treated with said RNA structure—dependent agent.

20. The method of claim 15, wherein a higher occurrence of said nucleotide within said complementary DNA polynucleotides obtained using said RNA structure—dependent agent which is specific to said unpaired RNA as compared to an expected occurrence of said nucleotide indicates that said nucleotide is in said unpaired state in the RNA polynucleotide prior to being treated with said RNA structure—dependent agent.

21. The method of claim 15, wherein a higher occurrence of said nucleotide within said complementary DNA polynucleotides obtained using said RNA structure—dependent agent which is specific to said paired RNA as compared to an occurrence of said nucleotide in said complementary DNA polynucleotides obtained using said RNA structure—dependent agent which is specific to said unpaired RNA indicates that said nucleotide is in said paired state in the RNA polynucleotide prior to being treated with said RNA structure—dependent agent, and vice versa.

22. The method of claim 15, wherein a higher occurrence of said nucleotide within said complementary DNA polynucleotides obtained using said RNA structure—dependent agent which is specific to said unpaired RNA as compared to an occurrence of said nucleotide in said complementary DNA polynucleotides obtained using said RNA structure—dependent agent which is specific to said paired RNA indicates that said nucleotide is in said unpaired state in the RNA polynucleotide prior to said being treated with said RNA structure—dependent agent, and vice versa.

23. The method of claim 1, further comprising removing proteins from the plurality of the RNA polynucleotides prior to said determining said paired state or said unpaired state of said nucleotides of the plurality of RNA polynucleotides.

24. The method of claim 1, further comprising denaturing the plurality of the RNA polynucleotides prior to said determining said paired state or said unpaired state of said nucleotides of the plurality of RNA polynucleotides.

25. The method of claim 24, further comprising subjecting the plurality of the RNA polynucleotides to conditions which allow folding of the RNA polynucleotides following said denaturing.

26. The method of claim 7, wherein said RNase which specifically cleaves said phosphodiester bond of said paired RNA is selected from the group consisting of RNase V1 and RNase R.

27. The method of claim 7, wherein said RNase which specifically which specifically cleaves said phosphodiester bond of said unpaired RNA is selected from the group consisting of RNase S1, RNase T1 and RNase A.

28. The method of claim 1, wherein the plurality of RNA polynucleotides are obtained from a cell of an organism.

29. The method of claim 3, wherein said secondary structure of the plurality of RNA polynucleotides is determined according to the method of claim 2.

30. The method of claim 1, wherein the pairability is determined for each of the nucleotides of at least two of the plurality of RNA polynucleotides.

The application's sequence listing, which the Patent Office published only in electronic form, follows.

SEQUENCE LISTING (3219 sequences)

SEQ ID NO: 1 - DNA, 507 bp, Saccharomyces cerevisiae
ccaagaaattaatcttctgtcattcgcttaaacactatatcaataatgcaattttctactgtcgcttctatcgccgctgtcgccgctgtcgcttctgccgctgctaacgttaccactgctactgtcagccaagaatctaccactttggtcaccatcacttcttgtgaagaccacgtctgttctgaaactgtctccccagctttggtttccaccgctaccgtcaccgtcgatgacgttatcactcaatacaccacctggtgcccattgaccactgaagccccaaagaacggtacttctactgctgctccagttacctctactgaagctccaaagaacaccacctctgctgctccaactcactctgtcacctcttacactggtgctgctgctaaggctttgccagctgctggtgctttgttggctggtgccgctgctttgttgttgtaaacttagtttattattatttatacattctaaattttttataaacttttttggcatttaaca

SEQ ID NO: 2 - DNA, 78 bp, Saccharomyces cerevisiae
atgagagccaagtggagaaagaagagaactagaagacttaagagaaagagacggaaggtgagagccagatccaaataa

SEQ ID NO: 3 - DNA, 1767 bp, Saccharomyces cerevisiae
atgtcaagcttatacatcaaaacaccactgcatgcattatctgctggtccggattctcatgcaaatagctcctattatgacaatcttttattgccttcattttccaatttatccagtaatatcagcaggaacaatatcacaaccgataacaatataaattcagcaagtcctaggaagtattcgtttcattcgctcaatgtgtcgccaattctttccccaatatctttggctaacgaaatacttggaaaaaaatcaaatactgcaccagcatcgccacatcatatggattacaatccaatttcctcattaacaccaggcaattcaccagaattcaacaaggcaagcttatctcagattagttttacaaatccattgaactatgggtctggcttaggtttttcctctaattcacaacctcgactaccattgttagacaggctatcgtccgtctctttatctaagagaccggagcgcccacaacaaagcctaccatcactaaggcatctgcaattattacccagtcctcttttacaagaaaacgcagcacgcttccctgatacatcaaaacgtacatctaattggaaaactgatcttacccattggtgtaaggatacaaactatcaagactatgttaaaatacgcgaagaagtggctcatttcaagccattaagtatacccaacttaactaataatcaaaataatgatagtttcaattacggcaaggaattggaatcgactaggtcgtccaagttccattccccgtctaaggaatcatttgatcgtaccaaactaattccttcgattctagaagctaaagatcaatttaaagatctttccaacaatgcatggagtattactcctcccgtcacaccgccgatgagtccaccaaccaatagaaccatggagcgcacgacgcttagaggagtagaggcctctttttttgaggggaaatccagcaataacgattcaatattcaatccaattattagtgaaaaattggttcaagaagttaaacatcaaagacaattacgtggaaattcatttcccatgccaaatgccagtcacaaaaagacgaacagtttcaaagctttgcaaataaaaaaattgcttgcgaatagagacattctatcgaacaattccaaatctaatgtaaggaaaccatctaagaacaaaatctcaaagcaagcatcaaatgttttcggtaacactgcaagacaattggtgatgaaactcgacaacgctagttacagttctgtctctgcatcttcatctccatctccctccacaccgacgaaaagtggcaagatgagatcaagatcatcctcacctgtgcgtcccaaggcatacactccaagcccaaggtcacccaattatcatagatttgctctcgactctccccctcaaagccctcgaagatcatcaaattcaagcataacgaaaaagggaagtagaaggtccagtggctcatcacccactcgtcacaccacaagagtgtgcgtgtcgtgtcattcgagtgattcgccctgttggaggccatcgtggtcgccaagaaagcaagatcagctatgtaactcttgtggtcttcgatataaaaaaacacatacaagatgtttgaacgatttatgtcgtaagatccccacaaagggtgaaataaacattatgaaatccaatggaatagacaaagaattcgtccccgaacgcaactgcgaaattgaagggtaccgttgcttattttgtaattacataactgagacagtagagaattga

SEQ ID NO: 4 - DNA, 1065 bp, Saccharomyces cerevisiae
atgatgaataacaacggcaaccaagtgtcgaatctctccaatgcgctccgtcaagtaaacataggaaacaggaacagtaatacaaccaccgatcaaagtaatataaattttgaattttcaacaggtgtaaataataataataataacaatagcagtagtaataacaataatgttcaaaacaataacagcggccgcaatggtagccaaaataatgataacgagaataatatcaagaataccttagaacaacatcgacaacaacaacaggcattttcggatatgagtcacgtggagtattccagaattacaaaattttttcaagaacaaccactggagggatatacccttttctctcacaggtctgcgcctaatggattcaaagttgctatagtactaagtgaacttggatttcattataacacaatcttcctagatttcaatcttggcgaacatagggcccccgaatttgtgtctgtgaaccctaatgcaagagttccagctttaatcgatcatggtatggacaacttgtctatttgggaatcaggggcgattttattacatttggtaaataaatattacaaagagactggtaatccattactctggtccgatgatttagctgaccaatcacaaatcaacgcatggttgttcttccaaacgtcagggcatgcgccaatgattggacaagctttacatttcagatacttccattcacaaaagatagcaagtgctgtagaaagatatacggatgaggttagaagagtttacggtgtagtggagatggccttggctgaacgtagagaagcgctggtgatggaattagacacggaaaatgcggctgcatactcagctggtacaacaccaatgtcacaaagtcgtttctttgattatcccgtatggcttgtaggagataaattaactatagcagatttggcctttgtcccatggaataatgtcgtggatagaattggcattaatatcaaaattgaatttccagaagtttacaaatggacgaagcatatgatgagaagacccgcggtcatcaaggcattgcgtggtgaatga

SEQ ID NO: 5 - DNA, 2158 bp, Homo sapiens
gactcgcctgtgctctggagcttgatccgaaagcttccacagtgaggactgctccgtgggggtaagagagcaccaggcactgaggcctgggagttccacagaccaacacccctgctcctggcggctcccacccggggcttagaccctcaggtccctaatatcccggaggtgctctcaatcagaaaggtcctgctccgcttcgcagtggaatggaacggatttagaagcctgcagtaggggagtggggagtggagagagggagcccagagttacagacggcggcgagaggaaggaggggcgtctttatttttttaaggccccaaagagtctgatgtttacaagaccagaaatgccacggccgcgtcctggcagagaaaaggctgaaatggaggaccggcgccttccttataagtatgcacattggcgagagaattaagtgctgcaacctaaaccagcaattacacccaagctcgttggggcctaagccagtaccgacctggtagaaaaagcaaccacgaagctagagagagagccagaggagggaagagagcgccagacgaaggtgaaagcgaaccacgcagagaaatgcaggcaagggagcaaggcggcagttcccggaacaaacgtggcagagggcaagacgggcactcacagacagaggtttatgtatttttattttttaaaatctgatttggtgttccatgaggaaaagggaaaatctagggaacgggagtacagagagaataatccgggtcctagctcgccacatgaacgcccagagaacgctggaaaaacctgagcgggtgccggggcagcacccggctcgggtcagccactgccccacaccgggcccaccaagccccgcccctcgcggccaccggggcttccttgctcttcttatcatctccatctttatgatgaggcttgttaacaagaccagagagctggccaagcacctctatctcagccgcgcccgctcagccgagcagcggtcggtggggggactgggaggcgctaattaattgattcctttggactgtaaaatatggcggcgtctacacggaacccatggactcataaacaatatatctgttgggcgtgagtgcactgtctctcaaataatttttccataggcaaatgtcagagggttctggatttttagttgctaaggaaagatccaaatgggaccaattttaggaggcccaaacagagtccgttcagtgtcagaaaatgcttccccaaagggttggcagtgtgttttgttggaaaaaagcttgggttataggaaagcctttccctgctacttgtgtagacccagcccaatttaagaattacaaggaagcgaaggggttgtgtaggccggaagcctctctgtcccggctggatgcaggggacttgagctgctccggaatttgagaggaacatagaagcaaaggtccagcctttgcttcgtgctgattcctagacttaagattcaaaaacaaatttttaaaagtgaaaccagccctagcctttggaagctcttgaaggttcagcacccacccaggaatccacctgcctgttacacgcctctccaagacacagtggcaccgcttttctaactggcagcacagagcaactctataatatgcttatattaggtctagaagaatgcatcttgagacacatgggtaacctaattatataatgcttgttccatacaggagtgattatgcagtgggaccctgctgcaaacgggactttgcactctaaatataggccccagcttgggacaaaagttgcagtagaaaaatagacataggagaacacttaaataagtgatgcatgtagacacagaaggggtatttaaaagacagaaataatagaagtacagaagaacagaaaaaaaatcagcagatggagattaccattcccaatgcctgaacttcctcctgctattaagattgctagagaattgtgtcttaaacagttcatgaacccagaagaacgcaatttcaatgtatttagtacacacacagtatgtatataaacacaactcacagaatatattttccatacattgggtaggtatgcactttgtgtatatataataatgtattttccatgcagttttaaaatgtagatatattaatatctggatgcattttcaaaaaaaaaa

SEQ ID NO: 6 - RNA, 72 nt, Artificial sequence
  Tetrahymena ribozyme p2
ggagggaaaaguuaucaggcaugcaccugguagcuagucuuuaaaccaauagauugcaucgguuuaaaaggc

SEQ ID NO: 7 - RNA, 159 nt, Artificial sequence
  Tetrahymena ribozyme p4p6
ggaauugcgggaaaggggucaacagccguucaguaccaagucucaggggaaacuuugagauggccuugcaaaggguaugguaauaagcugacggacaugguccuaaccacgcagccaaguccuaagucaacagaucuucuguugauauggaugcaguuc

SEQ ID NO: 8 - RNA, 95 nt, Artificial sequence
  Tetrahymena ribozyme p9-9.2
ggaccucuccuuaaugggagcuagcggaugaagugaugcaacacuggagccgcugggaacuaauuuguaugcgaaaguauauugauuaguuuugg

SEQ ID NO: 9 - DNA, 1698 bp, Saccharomyces cerevisiae
ccaatcaaaacaaataaaacatcatcacaatgtctagattagaaagattgacctcattaaacgttgttgctggttctgacttgagaagaacctccatcattggtaccatcggtccaaagaccaacaacccagaaaccttggttgctttgagaaaggctggtttgaacattgtccgtatgaacttctctcacggttcttacgaataccacaagtctgtcattgacaacgccagaaagtccgaagaattgtacccaggtagaccattggccattgctttggacaccaagggtccagaaatcagaactggtaccaccaccaacgatgttgactacccaatcccaccaaaccacgaaatgatcttcaccaccgatgacaagtacgctaaggcttgtgacgacaagatcatgtacgttgactacaagaacatcaccaaggtcatctccgctggtagaatcatctacgttgatgatggtgttttgtctttccaagttttggaagtcgttgacgacaagactttgaaggtcaaggctttgaacgccggtaagatctgttcccacaagggtgtcaacttaccaggtaccgatgtcgatttgccagctttgtctgaaaaggacaaggaagatttgagattcggtgtcaagaacggtgtccacatggtcttcgcttctttcatcagaaccgccaacgatgttttgaccatcagagaagtcttgggtgaacaaggtaaggacgtcaagatcattgtcaagattgaaaaccaacaaggtgttaacaacttcgacgaaatcttgaaggtcactgacggtgttatggttgccagaggtgacttgggtattgaaatcccagccccagaagtcttggctgtccaaaagaaattgattgctaagtctaacttggctggtaagccagttatctgtgctacccaaatgttggaatccatgacttacaacccaagaccaaccagagctgaagtttccgatgtcggtaacgctatcttggatggtgctgactgtgttatgttgtctggtgaaaccgccaagggtaactacccaatcaacgccgttaccactatggctgaaaccgctgtcattgctgaacaagctatcgcttacttgccaaactacgatgacatgagaaactgtactccaaagccaacctccaccaccgaaaccgtcgctgcctccgctgtcgctgctgttttcgaacaaaaggccaaggctatcattgtcttgtccacttccggtaccaccccaagattggtttccaagtacagaccaaactgtccaatcatcttggttaccagatgcccaagagctgctagattctctcacttgtacagaggtgtcttcccattcgttttcgaaaaggaacctgtctctgactggactgatgatgttgaagcccgtatcaacttcggtattgaaaaggctaaggaattcggtatcttgaagaagggtgacacttacgtttccatccaaggtttcaaggccggtgctggtcactccaacactttgcaagtctctaccgtttaaaaaaagaatcatgattgaatgaagatattatttttttgaattatattttttaaattttatataaagacatggtttttcttttcaactcaaataaagatttataagttacttaaataacatacattttataaggtattctataaaaagagtattatgttattgttaa

SEQ ID NO: 10 - DNA, 1460 bp, Saccharomyces cerevisiae
tcaaggaagtaattatctactttttacaacaaatataaaacaatgtctttatcttcaaagttgtctgtccaagatttggacttgaaggacaagcgtgtcttcatcagagttgacttcaacgtcccattggacggtaagaagatcacttctaaccaaagaattgttgctgctttgccaaccatcaagtacgttttggaacaccacccaagatacgttgtcttggcttctcacttgggtagaccaaacggtgaaagaaacgaaaaatactctttggctccagttgctaaggaattgcaatcattgttgggtaaggatgtcaccttcttgaacgactgtgtcggtccagaagttgaagccgctgtcaaggcttctgccccaggttccgttattttgttggaaaacttgcgttaccacatcgaagaagaaggttccagaaaggtcgatggtcaaaaggtcaaggcttccaaggaagatgttcaaaagttcagacacgaattgagctctttggctgatgtttacatcaacgatgccttcggtaccgctcacagagctcactcttctatggtcggtttcgacttgccacaacgtgctgccggtttcttgttggaaaaggaattgaagtacttcggtaaggctttggagaacccaaccagaccattcttggccatcttaggtggtgccaaggttgctgacaagattcaattgattgacaacttgttggacaaggtcgactctatcatcattggtggtggtatggctttcaccttcaagaaggttttggaaaacactgaaatcggtgactccatcttcgacaaggctggtgctgaaatcgttccaaagttgatggaaaaggccaaggccaagggtgtcgaagtcgtcttgccagtcgacttcatcattgctgatgctttctctgctgatgccaacaccaagactgtcactgacaaggaaggtattccagctggctggcaagggttggacaatggtccagaatctagaaagttgtttgctgctactgttgcaaaggctaagaccattgtctggaacggtccaccaggtgttttcgaattcgaaaagttcgctgctggtactaaggctttgttagacgaagttgtcaagagctctgctgctggtaacaccgtcatcattggtggtggtgacactgccactgtcgctaagaagtacggtgtcactgacaagatctcccatgtctctactggtggtggtgcttctttggaattattggaaggtaaggaattgccaggtgttgctttcttatccgaaaagaaataaattgaattgaattgaaatcgatagatcaatttttttcttttctctttccccatcctttacgctaaaataatagtttattttattttttgaatattttttatttatatacgtatatatagactattatttatcttttaatgattattaagatttttattaaaaaaaaa

SEQ ID NO: 11 - DNA, 514 bp, Saccharomyces cerevisiae
taagaaaccacaagaacccgccatgtctaacgttgttcaagctcgtgacaattcccaagtttttggtgttgctagaatttacgcttctttcaacgatactttcgttcatgttaccgatttatctggtaaggaaaccatcgccagagttactggtggtatgaaggttaaggctgacagagatgaatcttctccatacgctgctatgttggctgcccaagatgttgccgctaagtgtaaggaagtcggtatcactgccgttcacgttaagatcagagctaccggtggtactagaaccaagactccaggtccaggtggtcaagctgctttgagagctttggccagatctggtttgagaattggccgtatcgaagatgttaccccagttccatctgactccaccagaaagaagggtggtagaagaggtagaagattatgagttatgcatgtattgtacttgtattgccgtattattttttacagttaaaaaatgtgtacatataattatatagcgccc

SEQ ID NO: 12 - DNA, 452 bp, Saccharomyces cerevisiae
tccaatacaacagcttaaaccgattatctctaaaataacaagaagaaatgtctactgaatccgctttgtcttacgccgccttgattttggctgactctgaaatcgaaatctcttctgaaaagttgttgactttgactaacgctgccaatgtcccagttgaaaatatctgggctgatatttttgctaaggctttggacggccaaaacttgaaggacttattggtcaacttcagcgctggtgctgctgccccagctggtgtcgctggtggtgtcgctggtggtgaagccggtgaagccgaagctgaaaaggaagaagaagaagctaaagaagaatccgatgacgacatgggtttcggtttatttgattagaagtgccgcactgtttagaagaaattgcatattctaacatttaaaattttttataatttttctatatagtcgcttttaatacaa

SEQ ID NO: 13 - DNA, 280 bp, Saccharomyces cerevisiae
tagtcatatcgacttaattccaaatgagagctaagtggagaaagaagagaactagaagacttaagagaaagagacggaaggtgagagccagatccaaataagcggattgagagcaaatcgttaagttcaggtcaagtaaaaattgatttcgaaaactaatttctcttatacaatcctttgattggaccgtcatcctttcgaatataagattttgttaagaatattttagacagagatctactttatatttaatatctagatattacataatttcctctct

SEQ ID NO: 14 - DNA, 290 bp, Saccharomyces cerevisiae
cagaccacatcgattcaatcgaaatgagagccaagtggagaaagaagagaactagaagacttaagagaaagagacggaaggtgagagccagatccaaataagcggattatgagtaaataactctaattttgttttaaattctttcaagagtatcgtaatgtcattgatgaattaacatgttagtttctattctacctcataatggatctaaattgcatactaatctcacggtggggtgtaaaccattgcctactatttatatagtgctttatatatgtctcacatagttt

SEQ ID NO: 15 - DNA, 834 bp, Saccharomyces cerevisiae
taactacaaaaaacacatacataaactaaaaatggctagaactttctttgtcggtggtaactttaaattaaacggttccaaacaatccattaaggaaattgttgaaagattgaacactgcttctatcccagaaaatgtcgaagttgttatctgtcctccagctacctacttagactactctgtctctttggttaagaagccacaagtcactgtcggtgctcaaaacgcctacttgaaggcttctggtgctttcaccggtgaaaactccgttgaccaaatcaaggatgttggtgctaagtgggttattttgggtcactccgaaagaagatcttacttccacgaagatgacaagttcattgctgacaagaccaagttcgctttaggtcaaggtgtcggtgtcatcttgtgtatcggtgaaactttggaagaaaagaaggccggtaagactttggatgttgttgaaagacaattgaacgctgtcttggaagaagttaaggactggactaacgtcgttgtcgcttacgaaccagtctgggccattggtaccggtttggctgctactccagaagatgctcaagatattcacgcttccatcagaaagttcttggcttccaagttgggtgacaaggctgccagcgaattgagaatcttatacggtggttccgctaacggtagcaacgccgttaccttcaaggacaaggctgatgtcgatggtttcttggtcggtggtgcttctttgaagccagaatttgttgatatcatcaactctagaaactaagattaatataattatataaaaatattatcttcttttctttatatctagtgttatgt

SEQ ID NO: 16 - DNA, 561 bp, Saccharomyces cerevisiae
aatcaacaacaatcagtcaaaatgggtcgtatgcacagtgccggtaaaggtatttcttcttctgctattccatactctagaaatgctccagcttggttcaagttgtcctctgaatctgtcattgaacaaattgtcaagtacgcgagaaagggtttgactccatctcaaattggtgtcttgttgagagatgctcacggtgttacccaagctcgtgttatcactggtaacaagatcatgagaatcttgaagtccaatggtttggctccagaaatcccagaagatttgtactacttgattaagaaggctgtctctgttagaaagcacttggaaagaaacagaaaggacaaagacgctaagttcagattgattttgatcgaatctagaattcacagattggccagatactacagaactgttgctgtcttaccaccaaactggaagtacgaatccgccactgcctccgctttggtcaactagagtgtttaaatcatttatttcattattttatatgtatattttgtataactaaaattgattttttaaacatctctttataaacga

SEQ ID NO: 17 - DNA, 610 bp, Saccharomyces cerevisiae
tctcaactcaatccaaactcaaccgctaatactaccatgtcccaagtctattttgatgtcgaagctgatggccaaccaattggccgtgtcgttttcaagttgtacaacgacatagtcccaaagactgcagaaaacttcagagctctatgtaccggtgaaaagggattcggctacgctggctctccattccacagagttattccagacttcatgttgcaaggtggtgacttcactgctggtaacggtaccggcggtaagtctatctacggtggcaaattcccagatgaaaacttcaagaagcaccacgacagaccaggtttgttgtccatggccaacgccggtccaaacaccaacggttctcaattcttcatcaccaccgttccatgcccatggttggacggtaagcatgttgtctttggtgaagttgttgacggttacgacatcgttaagaaggttgagtccttgggttctccttccggtgccaccaaggctagaattgttgttgccaagtccggtgaattataaccgctctgcctggaacaatacagcaaaaattgaaacgaactattctctcttaaattatatgtatatgtataaggtatgtgtatgt

SEQ ID NO: 18 - DNA, 546 bp, Saccharomyces cerevisiae
aatttattaccgcttaaactgattatttcaaatatagaaagtaatatctattaatcaacaacagaaatgaaatacttagctgcttacttattattggttcaaggtggtaacgctgccccatccgccgctgacatcaaggccgtcgtcgaatctgtcggtgctgaagtcgatgaagccagaatcaacgaattgttgtcctctttggaaggtaagggctctttggaagaaatcatcgctgaaggtcaaaagaagttcgctactgttccaactggtggtgcttcttctgctgctgccggtgctgccggtgctgctgccggtggtgatgctgctgaagaagaaaaggaagaagaagctaaggaagaatctgatgatgacatgggttttggtttattcgattaaggaatttaattaataaacaattttcttgttttccttcattttacaaaatctggtgtaaatcctcgattccattgtgatttaaaaataattaattactgtataagattctatatagacaattaattgaaaatagtattacttctttaa

SEQ ID NO: 19 - DNA, 361 bp, Saccharomyces cerevisiae
tcaacactaatcatcaacaaaacaatgcaattcaagaccatcgtcgctgccttcgctactgttgccgctgtccaagctgctaacgtttctaccaatggttccaaccgtaccaacggttccaacaccaccagcaccaagatctccactggtgctgctgcttccaacgctttgggtgctggtgtcttcggtgctgccgtcgctgccggtgtcgctttcttattctaagttctttaattttgagtttagagacattatactcctataatatcgaaaaaatttttttattatcgctacacaatcaagtttttatgtgcttttttaataatattattatagaacaagaagaaagaccgctctttcc

SEQ ID NO: 20 - DNA, 588 bp, Saccharomyces cerevisiae
gtacgttatattatcatgaagtccccatttcgcccattggaaatgcaggtagccaaatctgaggtgcgctgagtggcatatagtggaggatataaagaaaaaaagagagaagggaaaataatggaaagttaccagtgtttgaacttatagcgaacgctctttctcgaacgttcaattacctttagcatacccttgttcgaagttgcccccgctagcaccacttcagattggcagttagctgccacgctactcccctccaccgttatgaatcatttttactaacctttaatgaccattcgcaatttctgcgtacattcatcgtcttctccagaaaatggctaagtctaagaaccataccgctcacaaccaaaccagaaaggctcacagaaacggtatcaagaagccaaagacctacaagtacccttctttgaaaggtgttgatccaaagtttagaagaaaccacaagcatgccctacacggcactgctaaggctttggctgctgccaagaaataaactttttaagattataatacgttaaaaatttacatattattttgtctgattttatataacatgttttattatct

SEQ ID NO: 21 - DNA, 464 bp, Saccharomyces cerevisiae
gtgtttaagaacctacagcttattcaattaatcaatatacgcagagatggccccagttaaatcccaagaatctatcaaccaaaagttggctttggttatcaagtctggtaagtacaccttaggttacaagtccactgtcaagtctttgagacaaggtaagtctaagttgatcatcattgccgctaacactccagttttgagaaagtccgaattggaatattacgctatgttgtccaagactaaggtctactacttccaaggtggtaacaacgaattgggtactgctgtcggtaagttattcagagtcggtgttgtctctattttggaagctggtgactctgatatcttgaccaccttggcttaaataaggtaagttcaaacgatttgttggaagacaattggtttgatgtgtatttttctataatatataaatcttagactattcattaaccttattttattta

SEQ ID NO: 22 - DNA, 554 bp, Saccharomyces cerevisiae
tcatccaactaatcaagaatgccttccagattcactaagactagaaagcacagaggtcacgtctcagccggtaaaggtcgtatcggtaagcacagaaagcaccccggtggtagaggtatggccggtggtcaacatcaccacagaattaacatggataaataccatccaggttatttcggtaaggttggtatgagatacttccacaagcaacaagctcatttctggaagccagtcttgaacttggacaaattgtggacattgatcccagaagacaagagagaccaatacttgaaatctgcttctaaggaaactgctccagttattgacactttggcagccggttacggtaagatcttgggtaagggtagaattccaaatgttccagttatcgtcaaagctagattcgtctccaagttggctgaagaaaaaatcagagctgctggtggtgttgttgaattgatcgcttaagcgcatcaacaaaaactctatgtattttccaataaattatatatcttcagtttaatctaattcaacatctacttctgtattatttc

SEQ ID NO: 23 - DNA, 952 bp, Saccharomyces cerevisiae
cgtgttctttatatattgtcgattgaaagttacctacatcaactttccgtgttccattccgactataacaaacaaccaataagctcaactaattaagtaatgtctgctccagaagctcaacaacaaaagagaggtggtttcggtggccgtaacagaggccgtccaaacagaagaggaccaagaaacactgaagaaaagggatgggttccagttaccaaactaggtagattagtcaaggctggtaagattaccaccattgaagaaatcttcttgcactctttgccagtcaaggaattccaaatcattgacactttgttgccaggtttgcaagacgaagtcatgaacatcaagccagttcaaaagcaaaccagagccggtcaaagaaccagatttaaggctgttgtcgttgttggtgactctaacggtcacgttggtttgggtatcaagaccgccaaggaagttgctggtgccatcagagctggtatcattattgccaagttgtccgttatcccaatcagaagaggttactggggtaccaacttgggtcaaccacattctttggccaccaagaccactggtaagtgtggttccgtcactgttagattgatcccagccccaagaggttctggtatcgtcgcttctccagctgtcaaaaagttgttgcaattggctggtgttgaagatgtctacacccaatctaacggtaagactagaactttggaaaacaccttgaaggctgctttcgttgctattggtaacacatacggtttcttgactccaaacttgtgggccgaacaaccattgccagtttctccattggacatctactccgatgaagcttctgctcaaaagaagagattctaagcttgttgtctacaaattataaaatagttttttataatcaaccattaaataattttgtacacttataataacactttatttctcgttc

SEQ ID NO: 24 - DNA, 692 bp, Saccharomyces cerevisiae
cgtaccagaagttcaatcatgaaatacatccaaactgaacaacaaatcgaagtcccagaaggtgtcactgtcagcatcaagtccagaatcgtcaaggttgttggtccaagaggtactttgaccaagaacttgaagcacattgatgttaccttcaccaaggtcaacaaccaattgatcaaggttgctgttcacaacggtggcagaaagcacgttgctgctttgagaaccgtcaagtctttggttgacaacatgatcactggtgtcaccaagggttacaagtacaagatgagatacgtctacgcgcatttcccaatcaacgtcaacattgttgaaaaggatggtgccaaattcattgaagtcagaaactttttgggtgacaagaagatcagaaacgttccagttagagatggtgttactatcgaattttccaccaacgttaaggacgaaattgtcttgtcaggtaactctgtcgaagacgtttcccaaaacgctgctgacttgcaacaaatctgtcgtgtcagaaacaaggatatccgtaaatttttggacggtatctacgtttctcacaagggttttattactgaagatttataagctttttatttgattttgtgacattttctttaaagtagcagaaaaaataattacatataaaaaactttgtatatctaacatataatataattgaaccg

SEQ ID NO: 25 - DNA, 1129 bp, Saccharomyces cerevisiae
ccaagaacttagtttcgaataaacacacataaacaaacaaaatggttagagttgctattaacggtttcggtagaatcggtagattggtcatgagaattgctttgtctagaccaaacgtcgaagttgttgctttgaacgacccattcatcaccaacgactacgctgcttacatgttcaagtacgactccactcacggtagatacgctggtgaagtttcccacgatgacaagcacatcattgtcgatggtaagaagattgctacttaccaagaaagagacccagctaacttgccatggggttcttccaacgttgacatcgccattgactccactggtgttttcaaggaattagacactgctcaaaagcacattgacgctggtgccaagaaggttgttatcactgctccatcttccaccgccccaatgttcgtcatgggtgttaacgaagaaaaatacacttctgacttgaagattgtttccaacgcttcttgtaccaccaactgtttggctccattggccaaggttatcaacgatgctttcggtattgaagaaggtttgatgaccactgtccactctttgactgctactcaaaagactgttgacggtccatcccacaaggactggagaggtggtagaaccgcttccggtaacatcatcccatcctccaccggtgctgctaaggctgtcggtaaggtcttgccagaattgcaaggtaagttgaccggtatggctttcagagtcccaaccgtcgatgtctccgttgttgacttgactgtcaagttgaacaaggaaaccacctacgatgaaatcaagaaggttgttaaggctgccgctgaaggtaagttgaagggtgttttgggttacaccgaagacgctgttgtctcctctgacttcttgggtgactctcactcttccatcttcgatgcttccgctggtatccaattgtctccaaagttcgtcaagttggtctcctggtacgacaacgaatacggttactctaccagagttgtcgacttggttgaacacgttgccaaggcttaagtgaatttactttaaatcttgcatttaaataaattttctttttatagctttatgacttagtttcaatttatatactattttaatgacat

SEQ ID NO: 26 - DNA, 686 bp, Saccharomyces cerevisiae
aaataaacaaaaaggtatatacaaaatgtctgactttcaaaaggaaaaggttgaagaacaagaacaacaacaacaacaaatcatcaagattagaatcactttgacctccaccaaggttaagcaattggaaaacgtctcttccaacattgtcaagaacgctgaacaacacaacttggtcaagaagggtccagtcagactaccaaccaaggttttgaagatctccaccagaaagactccaaatggtgaaggttctaagacttgggaaacctacgaaatgagaatccacaagagatacatcgacttggaagctcctgttcaaatcgttaagagaatcactcaaatcaccattgaacctggtgtggatgtcgaagttgttgttgcttccaactaagctggttctaactggaaataatttccattagattcctctttttctcgtccattaaccaaaatatattattgaattcagcggttccttttttctcattttcgcatatagctgcactattagaatcagcccactctaggtaaacacagttcctcgatatacctctgtcttactatcagtggttaaaccttatgcaaatataatatatatatatatatatatatatatatctcatacttttgttgattcttgtgtaattattggaaaagacaaaacaaagcaagcgtttctattcata

SEQ ID NO: 27 - DNA, 360 bp, Saccharomyces cerevisiae
gaaaacacaccagataattagtgcatatatattagatcaatatggttttagttcaagatttgttgcacccaactgctgcttctgaagccagaaagcacaagttaaagactttggttcaaggcccaagatcctacttcttggatgtcaaatgcccaggttgtttgaacatcaccactgttttttctcatgctcaaactgctgtcacttgtgaatcatgctctactgtcttatgtactccaaccggtggtaaggccaaattatctgaaggtacttctttcagaagaaagtaagttaatttatttttttgtgtagttaaaatcatcttcttttatctaaatatataaatataaatttactttt

SEQ ID NO: 28 - DNA, 398 bp, Saccharomyces cerevisiae
taagcaaaaaaacaatcagtaataatggttaacgtcccaaagaccagaaagacctactgtaagggtaagacctgtcgtaagcacactcaacacaaggttactcaatacaaagctggtaaggcttccttgttcgctcaaggtaagagacgttatgaccgtaaacaatctggtttcggtggtcaaaccaagcctgttttccacaagaaagctaagactaccaagaaggttgttttgagattggaatgtgtcaaatgtaagactagagcccaattaaccttgaagagatgtaagcacttcgaattgggtggtgaaaagaagcaaaagggtcaagctttgcaattctgagagttgttattgtttattgttttattatatttttatagttatactttgaccat

SEQ ID NO: 29 - DNA, 1555 bp, Saccharomyces cerevisiae
tgtaattaattcttattttgtatcttttcttcccttgtctcaatcttttatttttattttatttttcttttcttagtttctttcataacaccaagcaactaatactataacatacaataataatggctgtctctaaagtttacgctagatccgtctacgactcccgtggtaacccaaccgtcgaagtcgaattaaccaccgaaaagggtgttttcagatccattgttccatctggtgcctccaccggtgtccacgaagctttggaaatgagagatgaagacaaatccaagtggatgggtaagggtgttatgaacgctgtcaacaacgtcaacaacgtcattgctgctgctttcgtcaaggccaacctagatgttaaggaccaaaaggccgtcgatgacttcttgttgtctttggatggtaccgccaacaagtccaagttgggtgctaacgctatcttgggtgtctccatggccgctgctagagccgctgctgctgaaaagaacgtcccattgtaccaacatttggctgacttgtctaagtccaagacctctccatacgttttgccagttccattcttgaacgttttgaacggtggttcccacgctggtggtgctttggctttgcaagaattcatgattgctccaactggtgctaagaccttcgctgaagccatgagaattggttccgaagtttaccacaacttgaagtctttgaccaagaagagatacggtgcttctgccggtaacgtcggtgacgaaggtggtgttgctccaaacattcaaaccgctgaagaagctttggacttgattgttgacgctatcaaggctgctggtcacgacggtaaggtcaagatcggtttggactgtgcttcctctgaattcttcaaggacggtaagtacgacttggacttcaagaacccagaatctgacaaatccaagtggttgactggtgtcgaattagctgacatgtaccactccttgatgaagagatacccaattgtctccatcgaagatccatttgctgaagatgactgggaagcttggtctcacttcttcaagaccgctggtatccaaattgttgctgatgacttgactgtcaccaacccagctagaattgctaccgccatcgaaaagaaggctgctgacgctttgttgttgaaggttaaccaaatcggtaccttgtctgaatccatcaaggctgctcaagactctttcgctgccaactggggtgttatggtttcccacagatctggtgaaactgaagacactttcattgctgacttggttgtcggtttgagaactggtcaaatcaagactggtgctccagctagatccgaaagattggctaagttgaaccaattgttgagaatcgaagaagaattgggtgacaaggctgtctacgccggtgaaaacttccaccacggtgacaagttgtaaagtgcttttaactaagaattattagtcttttctgcttattttttcatcatagtttagaacactttatattaacgaatagtttatgaatctatttaggtttaaaaattgatacagtttta

SEQ ID NO: 30 - DNA, 321 bp, Saccharomyces cerevisiae
caagcaaataaacacagatagatcaacatggctgctcaaaagtctttcagaatcaagcaaaaaatggctaaggctaagaagcaaaacagaccattgccacaatggatcagattgagaaccaacaacactatccgttacaacgctaagagaagaaactggagaagaaccaagatgaacatctaagcgaagaacatatttatgcttcaaactttttgtcatttgtcttccatccttcccttattctcaatatatatgtaatacgtcgtatttgatatatatatatatatatatataatataatttaacggttgttatctgcta

SEQ ID NO: 31 - DNA, 534 bp, Saccharomyces cerevisiae
tacatatccaagatgaccagatcttccgttttagctgatgctttgaatgccattaacaacgctgaaaagaccggtaagcgtcaagttttaatcagaccatcctccaaggtcattatcaagtttttgcaagttatgcaaaagcacggttacattggtgaatttgaatacatcgatgaccacagatctggtaagattgttgttcaattgaacggtagattgaacaagtgtggtgttatttccccaagattcaacgttaagattggtgacattgaaaaatggactgccaacttgttgccagccagacaattcggttacgtcatcttgaccacctctgctggtatcatggaccatgaagaagccagaagaaagcacgtttctggtaagattttgggtttcgtttactaagctacttgttacaacaaccttttcggtagctttatatactataataaacacaagatagcctcataactttactcatttcttattatacatttttttagttttcctgttaaatactaatatatttgtact

SEQ ID NO: 32 - DNA, 844 bp, Saccharomyces cerevisiae
caagaaaagagactagaaataaccgaccattccaaagatgtctgacaccgaagctccagttgaagttcaagaagatttcgaagttgttgaagaattcaccccagtcgtcttggctactccaattccagaagaagtccaacaagctcaaaccgagattaagttgttcaacaaatggtcttttgaagaagttgaagttaaggatgcttctttggttgactacgttcaagttagacaaccaatctttgttgctcacaccgctggtcgttacgccaacaagagattcagaaaggctcaatgtccaatcattgaaagattgaccaactccttgatgatgaacggtagaaacaacggtaagaaattaaaggctgttagaatcatcaagcacactttggacatcatcaatgtcttgactgaccaaaacccaatccaagttgttgttgacgctatcaccaacactggtccaagagaagacaccaccagagtcggtggtggtggtgctgctagacgtcaagctgtcgatgtttctccattgagaagagttaaccaagctattgctttgttgaccattggtgccagagaagctgctttcagaaacatcaagaccattgctgaaactttggccgaagaattgatcaatgctgctaagggttcctctacttcttacgctatcaagaagaaggatgaattggaacgtgttgccaagtctaaccgttaagaagctaaaaaaagtgaaagattttcaatattacatatgtttttcttattattacttttatcttctttgtacactctattgtttaaatttataacataatacaatcttatcttttgatgtaaaaaaaaa

SEQ ID NO: 33 - DNA, 452 bp, Saccharomyces cerevisiae; identical to SEQ ID NO: 12

SEQ ID NO: 34 - DNA, 1119 bp, Saccharomyces cerevisiae
acatattcaaaatgggtgttgaacaaatcttaaagagaaagaccggtgtcatcgttggtgaagatgtccacaacttattcacttacgctaaggaacacaagttcgctattccagctattaacgtcacctcttcttctactgccgtcgctgctttagaagctgctagagacagcaagtccccaatcattttgcaaacctctaacggtggtgctgcttacttcgctggtaagggtatctctaacgaaggtcaaaatgcttccatcaagggtgctattgccgctgcccactacatcagatccattgctccagcttacggtatcccagttgtcttacactctgaccactgtgccaagaagttgttgccatggttcgatggtatgttggaagctgatgaagcttacttcaaggaacacggtgaaccattattctcctcccacatgttggatttgtctgaagaaaccgatgaagaaaacatctctacttgtgtcaagtacttcaagagaatggccgctatggaccaatggttagaaatggaaatcggtattaccggtggtgaagaagatggtgttaacaacgaaaacgctgacaaggaagacttgtacaccaagccagaacaagtttacaacgtctacaaggctttgcacccaatctctccaaacttctccattgctgctgctttcggtaactgtcacggtttgtacgctggtgacatcgctttgagaccagaaatcttggctgaacaccaaaagtacaccagagaacaagttggttgcaaggaagaaaagccattgttcttggtcttccacggtggttccggttctactgtccaagaattccacactggtattgacaacggtgttgtcaaggtcaacttggacactgactgtcaatacgcttacttgactggtatcagagactacgtcttgaacaagaaggactacataatgtccccagtcggtaacccagaaggtccagaaaagccaaacaagaagttcttcgacccaagagtctgggttagagaaggtgaaaagaccatgggtgctaagatcaccaagtctttggaaactttccgtaccactaacactttataagttaattcaaattaattgatatagtttt

SEQ ID NO: 35 - DNA, 872 bp, Saccharomyces cerevisiae
atattacaataatgccaaagttagttttagttagacacggtcaatccgaatggaacgaaaagaacttattcaccggttgggttgatgttaaattgtctgccaagggtcaacaagaagccgctagagccggtgaattgttgaaggaaaagaaggtctacccagacgtcttgtacacttccaagttgtccagagctatccaaactgctaacattgctttggaaaaggctgacagattatggattccagtcaacagatcctggagattgaacgaaagacattacggtgacttacaaggtaaggacaaggctgaaactttgaagaagttcggtgaagaaaaattcaacacctacagaagatccttcgatgttccacctcccccaatcgacgcttcttctccattctctcaaaagggtgatgaaagatacaagtacgttgacccaaatgtcttgccagaaactgaatctttggctttggtcattgacagattgttgccatactggcaagatgtcattgccaaggacttgttgagtggtaagaccgtcatgatcgccgctcacggtaactccttgagaggtttggttaagcacttggaaggtatctctgatgctgacattgctaagttgaacatcccaactggtattccattggtcttcgaattggacgaaaacttgaagccatctaagccatcttactacttggacccagaagctgccgctgctggtgccgctgctgttgccaaccaaggtaagaaataagtctgaagaatgaatgatttgatgatttctttttccctccatttttcttactgaatatatcaatgatatagacttgtatagtttattatttcaaattaagtagctatatatagtcaa

SEQ ID NO: 36 - DNA, 477 bp, Saccharomyces cerevisiae
accacatacaaaccatagaaacatcataccaaaatggaaaacgataagggccaattagtcgaactttacgttccaagaaaatgttctgctaccaacagaatcatcaaggctgatgaccacgcatctgttcaaatcaacgtcgctaaggttgatgaagaaggacgtgctatcccaggtgagtacgttacctacgctttgtccggttacgttagatccagaggtgaatctgatgattctttgaaccgtttggctcaaaacgatggtttgttaaagaacgtctggtcttactcacgttaagagaaaagaaaaagaggattcgatttaagcttcatatcgttcagactaataggtaactgacgatttttctcttcattaccaacttttcaccatatgttctaattcgtcggattttcgatgaagcgttttaggtactctataggtatttaggttataataatatattgtatttttagacaa

SEQ ID NO: 37 - DNA, 416 bp, Saccharomyces cerevisiae
gtgtaatagaagactagacacctcgatacaaataatggttactcaattcaaaactgccagcgaattcgactctgcaattgctcaagacaagctagttgtcgtagatttctacgccacttggtgcggtccatgtaaaatgattgctccaatgattgaaaaattctctgaacaatacccacaagctgatttctataaattggatgtcgatgaattgggtgatgttgcacaaaagaatgaagtttccgctatgccaactttgcttctattcaagaacggtaaggaagttgcaaaggttgttggtgccaacccagcggctattaagcaagccattgctgctaatgcttaaactcacccaatgaccgatatattgtgtttctatactgtgtttgttatatatagtttaccttttttagaca

SEQ ID NO: 38 - DNA, 1778 bp, Saccharomyces cerevisiae
tcacgcaaaataacacagtcaaatcaatcaaaatgtctgaaattactttgggtaaatatttgttcgaaagattaaagcaagtcaacgttaacaccgttttcggtttgccaggtgacttcaacttgtccttgttggacaagatctacgaagttgaaggtatgagatgggctggtaacgccaacgaattgaacgctgcttacgccgctgatggttacgctcgtatcaagggtatgtcttgtatcatcaccaccttcggtgtcggtgaattgtctgctttgaacggtattgccggttcttacgctgaacacgtcggtgttttgcacgttgttggtgtcccatccatctctgctcaagctaagcaattgttgttgcaccacaccttgggtaacggtgacttcactgttttccacagaatgtctgccaacatttctgaaaccactgctatgatcactgacattgctaccgccccagctgaaattgacagatgtatcagaaccacttacgtcacccaaagaccagtctacttaggtttgccagctaacttggtcgacttgaacgtcccagctaagttgttgcaaactccaattgacatgtctttgaagccaaacgatgctgaatccgaaaaggaagtcattgacaccatcttggctttggtcaaggatgctaagaacccagttatcttggctgatgcttgttgttccagacacgacgtcaaggctgaaactaagaagttgattgacttgactcaattcccagctttcgtcaccccaatgggtaagggttccattgacgaacaacacccaagatacggtggtgtttacgtcggtaccttgtccaagccagaagttaaggaagccgttgaatctgctgacttgattttgtctgtcggtgctttgttgtctgatttcaacaccggttctttctcttactcttacaagaccaagaacattgtcgaattccactccgaccacatgaagatcagaaacgccactttcccaggtgtccaaatgaaattcgttttgcaaaagttgttgaccactattgctgacgccgctaagggttacaagccagttgctgtcccagctagaactccagctaacgctgctgtcccagcttctaccccattgaagcaagaatggatgtggaaccaattgggtaacttcttgcaagaaggtgatgttgtcattgctgaaaccggtacctccgctttcggtatcaaccaaaccactttcccaaacaacacctacggtatctctcaagtcttatggggttccattggtttcaccactggtgctaccttgggtgctgctttcgctgctgaagaaattgatccaaagaagagagttatcttattcattggtgacggttctttgcaattgactgttcaagaaatctccaccatgatcagatggggcttgaagccatacttgttcgtcttgaacaacgatggttacaccattgaaaagttgattcacggtccaaaggctcaatacaacgaaattcaaggttgggaccacctatccttgttgccaactttcggtgctaaggactatgaaacccacagagtcgctaccaccggtgaatgggacaagttgacccaagacaagtctttcaacgacaactctaagatcagaatgattgaaatcatgttgccagtcttcgatgctccacaaaacttggttgaacaagctaagttgactgctgctaccaacgctaagcaataagcgatttaatctctaattattagttaaagttttataagcatttttatgtaacga

SEQ ID NO: 39 - DNA, 473 bp, Saccharomyces cerevisiae
aaacaacagattaagaaacaatggccccaaacacttccagaaagcaaaagattgccaagacctttaccgtcgatgtctcttctccaactgaaaacggtgtcttcgacccagcttcctacgctaagtacttgatcgaccacatcaaggtcgaaggtgctgtcggtaacttgggtaacgctgtcactgtcactgaagatggtaccgttgttactgttgtttccactgccaagttctctggtaagtacttgaagtacttgacaaagaagtacttgaagaagaaccaattgagagactggatcagatttgtctctaccaagaccaacgaatacagattggccttctaccaagtcactccagaagaagacgaagaagaagacgaagaataaattcattaatattattttaaatagagcataagttttgtataattaaaatcttctaaacctaataaatatgtttaatgaatgattcaa

SEQ ID NO: 40 - DNA, 814 bp, Saccharomyces cerevisiae
gtacagtatatcaaataactaattcaagatggctagaagaccagctagatgttacagataccaaaagaacaagccttacccaaagtctagatacaacagagctgttccagactccaagatcagaatctacgatttgggtaagaagaaggctaccgtcgatgaattcccattgtgtgtccatttggtttccaacgaattggaacaattgtcttctgaagctttggaagctgctcgtatctgtgccaacaagtacatgactactgtctccggtagagatgctttccacttaagagtcagagtccatcctttccatgtcttgagaatcaacaagatgttgtcttgtgccggtgcggatagattgcaacaaggtatgagaggtgcttggggtaagccacacggtttggccgctcgtgtcgacattggtcaaattatcttctctgtcagaaccaaggacagcaacaaggatgttgtcgttgaaggtttgagaagagccagatacaagttcccaggtcaacaaaagattattttgtctaagaagtggggtttcaccaacttggacagaccagaatacttgaagaagagagaagctggtgaagtcaaggacgacggtgctttcgttaagttcttgtccaagaagggttctttggaaaacaacatcagagaattcccagaatactttgctgctcaagcttaagttcttttcaaacatttgaactaacttaaaagagaaatttttttgatttaaattctagtttattaaacagtaaatatatttatacattattgtaatacatataattatgtgtttttttaa

SEQ ID NO: 41 - DNA, 568 bp, Saccharomyces cerevisiae
tcacaagattacttggtaagaaagaagcagttaatttttaattttgccgacaagccaagatgcaaattttcgtcaagactttaaccggtaagactattaccctggaagttgaatcttctgacactattgacaatgtcaagtccaagatccaagacaaggaaggtattccacctgaccaacaaagattgatctttgctggtaagcaattggaagatggtagaactttgtccgactacaacatccaaaaggaatctactctacacttggtcttgagattgagaggtggtggtaagaagagaaagaagaaggtctacaccaccccaaagaagatcaagcacaagcacaagaaggtcaagttggctgtcttgtcctactacaaggtcgatgctgaaggtaaggttaccaaattgagaagagaatgtagcaacccaacttgtggtgctggtgttttcttggctaaccacaaggacagattgtactgtggtaagtgtcattccgtctacaaggttaacgcttaagtaaagtatttttaaaacttatatattttaattgatcgttaaattttgaa

SEQ ID NO: 42 - DNA, 3263 bp, Saccharomyces cerevisiae
ccgtgtatttttctagttcgaatccatcgataacattaaaagatgtctgattcccagcaatccattaaggttctagaagaactattccagaagttatctgttgccactgctgacaacagacacgaaatcgcttctgaagtcgcttctttcttgaatggtaacatcattgaacatgatgttccagaacacttcttcggtgaattggccaagggtatcaaggacaagaagaccgctgctaacgccatgcaagctgttgctcacattgctaaccaatctaacttgtctccatctgttgaaccatacatcgtccaattggttccagctatctgtaccaacgcaggtaacaaggacaaagaaattcaatctgttgcttccgaaactttgatttccatcgttaacgctgttaacccagttgccatcaaagctttgttgccacatttgactaacgctattgtcgaaactaacaaatggcaagaaaagattgctattttggcagctatctctgctatggtcgatgctgctaaggatcaagttgccctaagaatgccagaattgattccagtcttgtctgaaaccatgtgggacaccaagaaggaagtcaaggctgctgctactgccgccatgaccaaggctaccgaaactgttgacaacaaggatattgaacgtttcattccaagtttgattcaatgtattgctgacccaactgaagttccagaaaccgttcatttgttaggtgctactactttcgttgctgaagttactccagctactttgtccatcatggtcccattgttgtccagaggtttgaacgaaagagaaaccggtatcaagcgtaagtctgctgttattattgacaacatgtgtaagttggtcgaagacccacaagttattgctcctttcttgggtaaattgttgccaggtttgaagagtaactttgctaccattgctgacccagaagccagagaagttactttgagagctttgaagactttgagaagagttggtaacgttggtgaagacgatgctattccagaagtttctcacgctggtgacgtttctactactttgcaagtcgttaacgaattgttgaaggacgaaaccgttgctccaagatttaagattgtcgtcgagtacattgccgccattggtgctgatttgatcgatgaaagaatcattgaccaacaagcttggttcacccacatcaccccatacatgactatcttcttgcacgaaaagaaggccaaggacatcttggacgaattcagaaagagagctgtcgacaacattccagttggtccaaacttcgacgacgaagaagacgaaggtgaagacttatgtaactgtgaattctctttggcttatggtgctaaaatcttgttgaacaagacccaattaagattgaagagagccagaagatatggtatctgtggtccaaacggttgtggtaagtccactttaatgagagctattgccaacggtcaagttgatggtttcccaacccaagaagaatgtagaaccgtctacgtcgaacacgacattgatggtactcactctgacacttccgtcttggatttcgttttcgaatctggtgttggtactaaagaagctatcaaggacaaattgattgaattcggtttcaccgatgaaatgattgctatgccaatctctgctttgtctggtggttggaagatgaagttggctctagctagagctgtgttgagaaatgctgatatcttgttgttagatgaaccaactaaccatttggataccgtcaacgttgcttggttagttaactacttgaacacctgtggtatcacttctatcactatttctcacgactccgttttcttagataacgtctgtgaatatattattaactacgaaggtttgaagttgagaaagtacaagggtaactttaccgaattcgttaagaagtgtccagctgctaaggcttacgaagaattatccaacactgatttggaattcaagttcccagaaccaggttacttggaaggtgttaagactaagcaaaaggctattgtcaaggttaccaacatggaattccaatatccaggtacctctaagccacaaatcactgacattaacttccaatgttctttgtcttccagaattgctgtcattggtccaaatggtgctggtaagtctactttgattaacgtcttgactggtgaactattaccaacctctggtgaagtctacacccacgaaaattgtcgtatcgcttacattaagcaacacgcttttgctcatatcgaatctcatttggacaagactccatctgaatatatccaatggagattccaaaccggtgaagatagagaaaccatggacagagctaacagacaaatcaacgaaaacgatgctgaagctatgaacaagatcttcaagattgaaggtacccctagaagaattgccggtatccactccagaagaaagttcaagaacacttacgaatatgaatgttctttcttattgggtgaaaacattggtatgaaatctgaaagatgggttccaatgatgtccgtcgacaacgcttggattccaagaggtgaattggttgaatctcactctaagatggttgctgaagttgatatgaaggaagctttggcttctggtcaattccgtccattaaccagaaaagaaattgaagaacattgttccatgttgggtttggacccagaaattgtttctcactccagaattagaggtttgtctggtggtcaaaaggttaagttggtcttagctgccggtacatggcaaagacctcacttgattgtcttagatgaacctaccaactatctggacagagattctttgggtgctttgtctaaggctttgaaggaatttgaaggtggtgttattatcattactcactctgctgaattcacaaagaacttgactgaagaagtctgggccgtcaaggacggtagaatgactccatctggtcacaactgggttagtggtcaaggtgctggtccaagaatcgaaaagaaggaagacgaagaagataaattcgatgctatgggtaacaagattgccggtggtaagaagaagaagaagttgtcttctgcggaattgagaaagaagaagaaggaaagaatgaagaagaagaaggaattgggtgatgcttacgtttcttctgacgaagaattctaatctttttgatcactgctttcacagttttctttaagatttttattgatcaataatttatgtatattttaatttctatgtttttgtaa

SEQ ID NO: 43 - DNA, 1065 bp, Saccharomyces cerevisiae; identical to SEQ ID NO: 4

SEQ ID NO: 44 - DNA, 41 bp, Artificial sequence
  P1 Adapter
ccactacgcctccgctttcctctctatgggcagtcggtgat

SEQ ID NO: 45 - DNA, 43 bp, Artificial sequence
  P1 Adapter
ttggtgatgcggaggcgaaaggagagatacccgtcagccacta

SEQ ID NO: 46 - DNA, 25 bp, Artificial sequence
  P2  Adapter
agagaatgaggaacccggggcagtt

SEQ ID NO: 47 - DNA, 23 bp, Artificial sequence
  P2  Adapter
tctcttactccttgggccccgtc

SEQ ID NO: 48 - DNA, 28 bp, Artificial sequence
  Library PCR Primer 1
ccactacgcctccgctttcctctctatg

SEQ ID NO: 49 - DNA, 23 bp, Artificial sequence
  Library PCR Primer 2
tctcttactccttgggccccgtc

SEQ ID NO: 50 - RNA, 26 nt, Artificial sequence
  5' RNA adapter
guucagaguucuacaguccgacgauc

SEQ ID NO: 51 - DNA, 22 bp, Artificial sequence
  3' RNA adapter
  misc_feature (1)..(1): 5' phosphorylated oligonucleotide
  misc_feature (22)..(22): 3' idT blocked
ucguaugccgucuucugcuugu

SEQ ID NO: 52 - DNA, 21 bp, Artificial sequence
  RT Primer
agcatacggcagaagacgaac

SEQ ID NO: 53 - DNA, 21 bp, Artificial sequence
  Small RNA PCR Primer
agcatacggcagaagacgaac

SEQ ID NO: 54 - DNA, 44 bp, Artificial sequence
  Small RNA PCR Primer 2
aatgatacggcgaccaccgacaggttcagagttctacagtccga

SEQ ID NO: 55 - DNA, 2443 bp, Saccharomyces cerevisiae
tacgctggttgtgttttctgctttgctatcgtgtagaactggatccattctttcctggctgtggtagtacttaaggagttggacgtgttcaagtcgagaaagaggtgaaatacacgtagtttttagataacattctctgcttggtaagagaatgagtaataaggaagagcatgttgatgagacttccgcaagtggtgtcaaggaggttagttctatagctgctagacatgacaatggttacgcgccttcgctaatcacgtcgacgtcgggcatggactcctttcaatcgcacgcgctactgaatgatccaaccctaatagaggattattcagatatcattaataataggcctacaagtggaagtaaacttactttaggaaacgaggattcggagagtatgggcggaagtgttgtggtgactccgacttcgaataagagttcgcccttcaattcgaaacttaatatactgagtaatgcggcagaaaagggccatgatgttctgcgaaatagagatgatgacaaagagttagaggaggagaacgtggaaaaacatatgcatagcaacagtaaaagggatcagcgacattacaaagaaaattcttcggaattgcccgactcatatgattattcggattctgaatttgaggacaatttggaaagaaggctacaagagatcgaaactgattccgtggatagcgccgataaggatgaggtgcatttttcagtgaataatacaatgaaccctgacgttgacgattttagtgatggcttgaaatacgccatctcggaggacgaggatgaagaggaaaactactctgatgacgatgactttgacagaaaatttcaagattcagggtttcaaggggagaaagacgatttggaggaggaaaacgacgattaccaacccttatcgccgccaagagaactggaccctgataaactatatgctttatatgcgttcaatggccatgattcttcacattgtcaattagggcaagacgaaccttgtatacttttgaatgaccaggatgcctattggtggctggttaagaggatcactgatggtaaaatcgggtttgcgccagcggaaattctagaaacctttccagaaagactagctcgattgaattgctggaaaaatgaaaacatgtcttctcaatcggttgcttcctccgattcgaaagatgattccatcagctctggtaacaagaatcagagtgatgcagagagtataattccgacacctgcactgaatggatatggtaaggggaacaaatctgttagtttcaatgatgttgtcggttatgcagacaggtttatagatgatgcaattgaagatacctcgttagatagtaacgatgatggcggtgaaggcaatggacagtcgtacgacgatgatgttgataacgacaaggaaacaaaagtaacgcaccgggacgaatacactgaagcgaagttaaattttgccaaattccaggatgatgatacgagcgatgtagtgagcgacgtctcctttagtacatctttgaatacaccactaaatgtgaaaaaagttcggagacaagacaacaaaaacgaaagtgagcctaagacatcatcgagtaaagacagagaagatgattataatgcaaatcggtatgtggggcaagaaaagtctgaaccggttgacagtgattacgataccgatctgaaaaaagtatttgaagcgcctcgtatgccatttgcgaatggtatggcaaaatcagactctcaaaattccctttcaacaattggcgagttttcaccgtcgtcgtcagaatggacaaacgaatcaccatccactccaatagttgaagaaagcagcagtattccatcatctagagcaataaggacattcacatatatcatgcaaaatcgaaaattgagagacaacaaacgtggaaaacacagagggcaaattcaagccagcttggggtctagtggaggaatgccaaatcaaactgacgcagaacaacctaaagaggagctagaaaaacatcacagtacccccgaagaagaaaagcaatcaaccttatcgttacactcatcatctgaagaagatttttatatggatgaacaaagggcggtatcatcagcaagcataaatagttcactttccggatcaagggcattgtctaataccaatatgtccgatccggcttcgaagcccaattctttggttcaacatctctatgctccagtttttgacagaatggatgtgttgatgaaacaattggatgaaattattcgtaaatgatattgtccttacaataaagcctggtctttttctcatccaacgaacttgcatcatattcatgaatatttatttgttttagaaacatttcggaaaaaataaggtagtaacagttcagcatatatgatagctaaaacaaacaactatatatcgtatctacaaagtttatct

SEQ ID NO: 56 - DNA, 1983 bp, Saccharomyces cerevisiae
ctattcactcttcttattacggtaaaggcgaaaccagcaagaagaccagattatacttacaagagatgagcagtgttcaactttcgaggggcgattttcatagcatcttcaccaataagcaaaggtacgataatcccaccggtggcgtttatcaagtttataacaccaggaaatctgatggggctaacagcaacagaaagaatttgatcatgatttccgatggtatttaccatatgaaggctctgttgagaaaccaagctgcatccaagttccagtcaatggaactacaaaggggtgatatcattcgcgtgataattgcagaacctgctattgtcagggaaagaaagaaatacgttcttttagtagatgactttgagttggtccagtcgcgtgctgatatggtcaaccaaactagtacttttttggataactatttctcagagcatccaaatgaaaccttaaaagacgaagatataactgacagtggtaatgttgccaatcaaacaaacgccagcaatgctggtgtccctgatatgctgcattcaaactcaaacttgaatgcaaatgagagaaaattcgccaatgaaaaccctaattcgcaaaaaaccagaccaatttttgccatcgaacaactgtctccataccaaaacgtttggactatcaaagcaagagtttcctacaagggagaaattaaaacgtggcacaatcaaagaggtgatggtaaactattcaatgtcaacttcttggatacctctggagaaatccgagccacggcgtttaatgattttgctacaaaatttaacgaaattttacaagaaggcaaagtatactatgtatcaaaggcaaaactccaaccagctaagccccaatttactaatctaacacacccttatgaactgaatttggatagagacactgttatagaagaatgtttcgatgaaagtaatgttccgaaaacccatttcaatttcatcaaactagatgctattcagaaccaggaagtaaattccaacgtagacgtcctcggtattatccaaactataaacccacattttgagctaacttcaagggctgggaagaaattcgatcgtcgtgacatcacaattgttgacgactctgggttttctatctctgttggcctatggaatcagcaagcccttgatttcaaccttcctgaaggttctgttgctgccattaaaggtgttcgtgtgacggattttggtggcaaatctttgtctatgggattttctagtaccctgattccgaatccagaaattcctgaggcatatgccttaaagggttggtatgattccaagggccgcaacgcaaacttcatcactttaaagcaagaacccggtatgggtggtcaatcggctgctagcttaacaaaattcattgctcagcgtattactattgctagagctcaagctgaaaatctaggaagaagcgagaaaggtgacttttttagtgttaaagctgctataagtttcttaaaagttgataattttgcatatcctgcctgttctaatgagaattgtaataagaaagttctggaacagcctgatggtacttggagatgtgagaagtgcgacaccaataatgcaaggccaaattggagatacatcttgacaatatcaattattgacgaaaccaatcaactatggctcactttatttgacgaccaagctaaacaattattgggtgttgatgctaatacattaatgtctttgaaggaagaagaccccaacgaattcacaaaaattactcaaagtatccaaatgaacgaatatgactttaggattagagcgcgtgaggatacatacaatgatcaaagcagaattagatataccgttgctaacctacacagcttgaattacagggctgaagccgactatcttgccgatgagttatccaaggctttgttagcttaatgtatcaaataatcaagtactatttaatctatgtaacatatgagaaatgtaa

SEQ ID NO: 57 - DNA, 763 bp, Saccharomyces cerevisiae
gtttggaaaagtatttaaaggtaaccaatctctctactaatcatgcttttaacctctcttttacaggtttttgcctgctgtctagttttaccagctcaagttactgcgttctattattatacttctggtgctgaacgtaagtgcttccacaaggaattgtctaaaggtactttgttccaagcaacttacaaggcacaaatttacgatgaccaattacaaaattacagagacgctggtgcgcaagattttggtgtcttgattgatattgaggaaacttttgatgataaccacctggttgttcatcagaaaggttcagcaagtggtgatttaactttccttgcgtctgattcgggtgaacataaaatctgtattcagcccgaagctggtggctggttgattaaggctaaaacgaagattgacgttgaattccaagtgggctctgatgaaaagttagattctaagggtaaagccactattgacattctacatgccaaggttaacgtcctaaactccaagatcggcgaaattagaagagagcaaaaattgatgagagatcgtgaagctacctttagagacgcctctgaagctgttaattctcgtgctatgtggtggattgtcattcaattaattgttctcgctgttacttgtggctggcaaatgaaacacctgggcaaattttttgttaagcaaaaaattttatgatcagactaaaaaccttttatgtatcttctagaaatttatagtttataagagccgctaaagg

SEQ ID NO: 58 - DNA, 890 bp, Saccharomyces cerevisiae
aagttttccactacgtctaactacagcagaacaaaattatttcaatcaaatggcatctaatcaacctggcaagtgttgctttgaaggagtttgtcacgatggaacacccaagggtcgtcgtgaagaaatcttcggtttagatacttatgcagcaggctctacatctcccaaggaaaaagttatagttatcttgacagatgtgtatggcaataaattcaacaatgttttattaacggccgacaaatttgctagtgctgggtacatggtctttgttcccgatattttattcggcgatgctatctcatcggacaaaccaattgatcgtgatgcctggtttcaaagacattctcctgaagtcaccaagaaaattgttgatggattcatgaagttgttaaaacttgaatatgacccaaagtttattggcgttgtgggttactgttttggtgcaaagtttgccgtccaacacattagtggcgacgggggtcttgccaatgctgcagccattgcacatccatctttcgtcagcatcgaggaaattgaagcaattgatagcaagaaaccaatattgatttcagcagcggaagaggatcacatctttccggcaaacttaagacacttaacggaggaaaaattaaaggataatcacgctacttaccagttagacctcttcagtggtgtggctcacgggtttgcagcaagaggcgatatatccatacctgccgtaaaatatgcgaaggagaaagtcttgctcgaccaaatatactggttcaatcatttttcgaatgtttaagagggaagagctcttcttacgttaaccgttatatacatatatatatatattgagcactttatattatcggtcagtttcataaattcgtggctatataata

SEQ ID NO: 59 - DNA, 524 bp, Saccharomyces cerevisiae
tggtcactgagaaccataaaagcgaaaagagaaggtaaaacatagaaatgaagctcccacagaccatgctacgttctatatctgtgaagcatgtccggtggccaaggattctgacgggctcaaagctttggtactcaacgcagatggcaatgactccggaggagaagatgatcaccgataaactacaacaggaactggaacctgaagtgtgtaaagtgcaagacgtttccggtggctgcggatccatgtttgctatcaacataacaagcaagaagttcaacggactgagtctcatcaagcagcaccagctggtgaacagaattttgagggacgatatttccagatggcatggcctacaattgaccactaagaagtcaactgggaagggtccggcatcatcatgaacagtttggaaccaaaaaagctcgtgtaagtatcacttttagtttacttttgcttccctctgtgtatattctttatatatgtatttattattttaattgaaatcgcgaaatttcacataa

SEQ ID NO: 60 - DNA, 581 bp, Saccharomyces cerevisiae
atcgacaatgttacgcactactagactatggaccacccgcatgcccactgtgagcaaattgtttttgagaaacagctccggcaatgccctaaacaagaataaactaccatttttgtactcatcccaaggacctcaagccgtgaggtacacttcccaacatgagtggatagctgtgcatcaggacaagactgcctttgtcggaattacaaaatacgccactgatgccttaggggacgctacctatgttgagttgccagaagtgggcactgagattgcccaaggtgagtcgctagggtccattgagtccgtcaagtcagcctccgagatctaccagcctgccgatggtaccgtagaggaaattaacactaatcttgaggaaaatccaggtgtggtgaacgaagatcctatgggtgacggctggctagtcaaaatgaagcttggtgagggcgttaatgtggaacaggtcgagggtctaatgtccttagaacagtacgaaaagacactggttcatgatgactgaacaaagcttatacgtacgtaaagtaatttcatatatatgtatatatatgtaggggaaataa

SEQ ID NO: 61 - DNA, 2466 bp, Saccharomyces cerevisiae
acaaatggttaaatcgtggcaagaagcatataactaccactaagcagcgcaatgtcatctgcagagatggaacaattgttacaggccaagacactggccatgcacaacaatccaacggagatgctgcccaaggtgctcgaaactacggcatccatgtaccacaacggtaatctcagcaagctgaagttgcctttggccaagttttttacacagttagttctagacgtggtgtcgatggactctccaattgcgaatactgagagaccgtttattgctgctcaatatctgccactacttcttgctatggcgcaatccaccgcggacgtactagtgtacaagaatatcgtgcttattatgtgcgcttcatacccgctggtgttggatctggttgctaagacatcaaaccaggaaatgtttgatcagttgtgtatgctgaagaagttcgtgctctcgcactggagaactgcatatcctttgcgtgccaccgttgacgatgaaacggatgtcgaacaatggctggcgcagattgaccaaaatatcggcgtgaaattagcgaccatcaagttcatatctgaggtcgtgctgtcgcaaactaaatcacccagcggcaacgagattaattcatctaccatcccggataaccaccctgtgttgaacaaaccggctttggagagcgaggctaagaggcttcttgatatgttgctaaactacctaattgaggaacagtacatggtctcgtccgttttcattggtatcatcaattctttatccttcgtcatcaaaagaaggccgcagacaacaataagaattctttccgggctgttgcgtttcaacgtcgacgccaagtttcccctagagggcaagtctgacttgaactacaaactatccaagagatttgttgaaagggcgtacaagaactttgtgcaatttgggctaaaaaatcaaatcattacaaaatccctctcatccggatcagggtcatcgatctactccaagctgaccaagatttctcaaactttacacgttattggcgaagagaccaagagcaagggaattttgaacttcgacccttccaagggcaatagcaagaaaacgttgtccaggcaggacaaactaaaatacatctcactatggaaaaggcaattatccgcgttattgtctactctaggggtgtccacaaagacccccacgcctgtgtccgcacctgcaacgggctcttcaaccgaaaacatgcttgatcaactgaagatattgcaaaaatacaccctcaacaaggcttcacaccagggcaatacttttttcaacaactcacccaaaccaatcagcaacacctactcatctgtgtactcattgatgaacagttcgaactccaaccaggatgtgacccagctacccaatgacatacttatcaagctgtccacagaggccatcttgcaaatggacagcacgaaactgatcaccggattgtctatcgttgcttcgaggtacacggatttaatgaatacgtacatcaattctgtaccgtcctcgtcatcatcaaagaggaaatccgacgatgatgacgacggcaacgacaatgaagaagttggaaacgatggcccaacggctaatagcaagaaaatcaaaatggaaacagaaccactagcggaggaaccagaggagcccgaagacgatgaccgaatgcagaagatgcttcaagaagaggaaagcgcccaagaaatctcaggagatgccaacaaatcaacttctgccattaaggagatcgcacccccctttgaacctgactcattgacgcaggatgaaaaactaaagtacctctcaaagctgaccaagaaactgtttgaattatccggtcgccaggatactacccgggccaaatcttcgtcttcctcctccatattactggacgatgacgactcctcgtcatggttacacgtcttaatcagattggttacgagaggaatcgaagcacaagaggccagtgacctgattcgtgaagaactgcttggcttcttcatccaggatttcgagcaacgtgtcagtctgatcattgaatggctcaatgaagaatggttcttccaaacctcgctgcatcaagatccctctaactacaaaaaatggtccttaagagttctcgagtctctgggtccattccttgaaaacaaacacagacgattcttcatcagacttatgagcgaactgcccagtcttcaaagcgatcatcttgaggcactgaagcctatctgcctggatccggcaagaagttcccttggtttccaaacgctaaagtttctcattatgtttagacccccagtgcaggacactgttcgcgacctgctgcatcagctaaagcaagaagatgaaggcttacacaagcagtgcgattcactgcttgacaggctaaaatgatcacaaccattacatacatcatatatacgcatgtgtagggtcttccttcaacttgca

SEQ ID NO: 62 - DNA, 2073 bp, Saccharomyces cerevisiae
tcaaatggatttctgaggaaagaggactatacccattaggaaacgaattgcccgagtagtctcctctgccgacttaaaccaacctttttctatttctcttttcttttctccctcttttttctctgtactagcatccaaaagcaagcatccatccgagtcccagtcgcaatctcacatctccaatttaacgtatccattgcatttcctcattcggtttaactcctctgcatttcttttctgacccatagcatttcttacattccattgcatctcccttttactctcgttcaagacactgatttgatacgctttctgtacgatggccatattgaaggataccataattagatacgctaatgcaaggtatgctaccgctagtggcacttccaccgccactgccgcctctgtcagcgctgcctcatgtcctaatttgcccttgctcttgcaaaagaggcgggccattgctagtgcaaagtctaaaaaccctaatctcgttaaaagagaattgcaagcacatcactcagcgatcagcgaatacaataatgatcaattggaccactatttccgtctttcccacacagaaaggccgctgtacaacctgactaacttcaactctcagccacaagttaatccgaagatgcgtttcttgatctttgacttcatcatgtactgtcacacaagactcaatctatcgacctcgactttgttccttactttcactatcttggacaagtattcctcgcggttcattatcaagagttacaactaccagctcttgtccttgaccgcgctttggatttcgtccaaattttgggactccaagaatagaatggccactttgaaagtcttgcaaaacttgtgttgcaatcaatattctataaagcaattcacgactatggaaatgcatcttttcaaatcactcgattggtccatctgtcagtcggcaacattcgactcctacatcgacatcttcttgttccaatctacgtccccgttatcgcctggcgttgtcctttctgcccctttggaagctttcattcaacagaaactggccttattaaataacgctgctggtactgctattaataaatcgtcctcttctcaaggcccctctttgaacatcaacgagatcaaattgggtgccattatgttgtgcgagttagcttccttcaatctcgaattatcatttaaatatgatcgttcactaattgcgctgggtgcaattaacctcatcaaattatctttgaactactataattcaaacctttgggaaaatatcaatctggctttggaggaaaactgccaagacctagatattaaattgtcagaaatctctaatactttattggatatagcaatggaccaaaattctttcccctccagtttcaaatcaaaatatttgaatagcaataagacatctttagcaaaatctctcttagacgcattacaaaactattgtattcaattgaaactggaagaattctaccgttcacaagaattggaaaccatgtacaatactatctttgctcagtcctttgacagcgattcattgacttgtgtttactcaaatgctactactccaaagagcgctacggtttcatctgcggccacagactatttctcggatcacactcatttaagaaggttgaccaaagatagcatttctccaccatttgccttcactccaacctcatcttcatcctctccatctccattcaattccccttacaagacttcaagttcaatgacgaccccagactctgcatcacaccattcacattcaggttcgttctcttctacccaaaattcttttaaaaggtcactgagcatcccacaaaattcaagcatcttttggccaagcccactaactcccaccaccccatctctaatgtcaaatagaaaattattacaaaatttatctgtgcgttcaaaaagattatttcctgttagacccatggccactgctcacccatgctctgcccccacccaactgaaaaagagatcaacttcctctgtggattgtgattttaatgatagtagcaacctcaagaaaactcgctgaaacgacaaaaa

SEQ ID NO: 63 - DNA, 897 bp, Saccharomyces cerevisiae
atacgagtagcacgaataaagcagagcaaatacaacagaaactacaaaaaatgggttggttttgggcagatcaaaaaactacgggcaaagatattggtggggcagcagtatcatccatgtcagggtgcccagtcatgcacgagtcgtcgtcgtcgtcgccaccatcctctgagtgccccgttatgcagggagataacgatagaataaacccgctgaacaatatgccggagttggcagcatccaaacagcctggccaaaagatggacttgcccgttgatcggaccatctccagcatccccaagagtccagacagtaacgagttctgggagtatccttctccacaacagatgtacaatgctatggttagaaagggcaagattggcggtagcggcgaagtcgccgaagatgcagtggagtccatggtgcaggtccacaactttctaaatgaagggtgctggcaggaagtgctcgaatgggaaaaaccgcacacagatgaaagccacgtgcagcctaagttgctgaaattcatggggaaaccgggcgtattgagccctcgtgctcgctggatgcacctgtgcggcctactgtttccgtcccattttagccaagaactaccattcgacaggcacgactggattgtactccgaggcgagcgcaaagcggaacaacaacctccaaccttcaaggaagttagatacgtcttggatttctacggagggcccgacgacgaaaacggaatgcctactttccacgtggatgtccgtcctgccctagatagtctagacaatgctaaggaccggatgacccgtttcttggaccggatgatctcgggtccgtcctcttcgtcctccgccccttaaatgatatacagccagcgtaagtacgtgtaaatagcca

SEQ ID NO: 64 - DNA, 1297 bp, Saccharomyces cerevisiae
agagttgttgattgagcaaaatgtctactacagttgaaaaaatcaaagctatcgaagatgaaatggcccgtacccaaaagaacaaggccacatctttccatttgggtcaactgaaggccaagctggccaaactgagaagagaattgttgaccagtgcttcatccggcagcggtggtggtgctggtattggttttgatgtggctagaactggtgtggccagtgtggggtttgtcgggttcccgtcggtggggaaatctacattactgtccaagttgactggtactgagtctgaagcagctgagtacgagtttaccaccctggttaccgtccccggtgtcattcgttataaaggtgccaagatccaaatgttggatttacctggtattatcgatggtgctaaggatggtagaggtagaggtaagcaagttattgccgtggcaagaacctgtaacctgttatttatcatcctagatgtgaacaaacccttgcatcataagcaaatcattgagaaggaactggaaggtgtggggattcgtctgaataaaactccgccagatatcttgatcaaaaaaaaagagaaaggtggtatttccatcacaaacacagtcccattgacccatctggggaatgacgaaatcagagccgttatgagcgagtacagaataaatagcgctgagattgccttcaggtgtgatgccactgtggatgatttgattgatgttttggaagcttcgtcaagaagatacatgcctgccatctatgtgttaaacaagattgattctctgtcaatagaggaattggaattactttaccgaattcctaatgccgtgcctatttcgtctggtcaagattggaacttggacgagctgttgcaagtcatgtgggatagactaaatctagtccgtatttacactaaaccaaagggccaaataccagattttaccgaccctgtggtgctaagatcagaccgttgcagtgtcaaggatttttgtaaccaaattcataaatctttagtggacgactttagaaatgctctggtttacggtagcagtgtcaaacatcaacctcaatacgtggggttgagtcacattttggaagacgaagatgttgttaccatcttgaaaaagtgattctcgaacaaaaaataatataagaaatgaaaaaaaaaaaaaataattcataattgaatatacaagcatttgtattcgaaaagggggtatcggttattttttttcgctgtttttcttccaccgtttgagtatagagcatctataacatttaattatctctacataat

SEQ ID NO: 65 - DNA, 1209 bp, Saccharomyces cerevisiae
gagccgagaggacgtatcagcaacctcaaccaaatatgtttagtaacagactaccacctccaaaacattctcaaggacgagtttcgacggctttgagctcagatcgcgttgagccggcaatattgactgaccaaatcgctaaaaacgttaagctcgatgattttattccaaagagacagtctaatttcgaactatcggttcctttgccaacgaaagcagaaatccaagaatgtacagcaagaaccaagtcatacattcagcggcttgtgaatgcgaaactagccaactcaaataacagggcatcatcaaggtacgtcaccgaaacacatcaggcacccgcgaatctattattgaacaacagccaccatattgaggtagtgtccaagcaaatggatccattgttgccaaggttcgttgggaagaaggcgagaaaggttgtagcacccacagaaaacgacgaagtcgtgcctgttctccatatggatggcagcaatgataggggagaagctgatccaaatgagtggaagatacctgcagctgtgtcaaactggaaaaatccaaatggttataccgtggccttggaaagacgtgtaggtaaagctcttgacaacgaaaataataccatcaacgatgggtttatgaagctctccgaagcgttagaaaacgctgacaagaaggcaagacaagagatcaggtccaaaatggaattgaagcggcttgctatggaacaggaaatgcttgctaaagaatctaaattgaaagaattgagccaacgagccagataccacaacgggactccgcagacgggagcaatagttaagcccaaaaagcaaacgagcacagtggccagactaaaagagctggcgtactctcaaggaagagacgtatccgaaaagataattctgggcgcagcaaagcgttcagaacaaccggatctgcagtacgattcaagatttttcacaagaggggcaaatgcctccgccaaaaggcatgaagaccaggtttatgacaacccactgttcgtccaacaagatattgaaagcatatacaagaccaactacgaaaagctggacgaagcggtcaatgttaagagtgaaggtgccagtggttctcacggccccattcagtttactaaagctgaatccgatgataaatcggataactatggcgcctaggcccaggatgagcactaggaaaacaaagcattct

SEQ ID NO: 66 - DNA, 4499 bp, Saccharomyces cerevisiae
ttctaaaacacaaaaaaacaaaaaaaatcctataaccagttctcccgcatgtcatttgaagtaggaactaagtgttggtaccctcacaaagaacaaggctggataggcggcgaagtcaccaagaatgacttctttgaaggaacgttccacttagagttgaaattggaggatggagaaactgtatccattgaaacaaatagcttcgaaaatgatgatgatcatcccacgctacctgtactacgaaacccacctattttagagtctactgatgacttaaccaccctatcatatctgaacgaaccggcagtgctgcatgccataaaaaaaagatacatgaatggacagatatatacttactctggtattgtccttattgccgctaatccctttgataaagtcgaccatttgtactctcgcgagatgatacagaattattctagtaagcgtaaagatgagctggagccgcacctttttgccatagcagaggaggcgtacaggttcatggtccatgaaaaggctaaccagactgttgtagtcagtggtgaatccggtgctggtaagaccgtctctgctaaatacattatgagatactttgcctcagtccaagaaagcaacaatcgtgaaggggaagtggaaatgtctcaaatcgagagccaaattttagctactaacccgatcatggaagcctttggtaacgccaaaactaccagaaatgataattcctctcgtttcggcaaatatctgcaaattttatttgatgagaatactaccatcagggggtccaaaattagaacctatctcttggaaaaatccaggttagtttatcagccagagacagaaagaaattaccatattttttaccaaattttggaaggattgccagaaccggtaaaacaagaactgcatttgtcatctcccaaggactaccattatactaaccaaggtggacagccgaacatagctggtatagatgaagctcgagaatacaagataaccactgatgccctgtcattagtaggtataaaccacgagactcagcttggaattttcaaaattcttgcaggcttgctacatataggtaatatcgagatgaaaatgactagaaacgacgcatcactatcatcggaagagcaaaacctgcaaatcgcatgtgaattattgggtattgatcccttcaattttgcaaaatggattgtcaagaaacaaatcgtcacaaggtctgaaaaaattgtcactaatttgaattacaatcaagcgctaattgctagggactctgtggcgaaatttatttattccacgctttttgattggctagtagacaacattaacaagacattatacgatcctgagctggatcaacaagatcatgtcttttcctttattggtattttagatatctacgggtttgagcattttgagaaaaactcattcgaacaattctgtataaactatgcgaatgaaaaattacaacaagagttcaaccagcacgttttcaaattggagcaagaagaatatgtaaaggaggaaattgagtggtctttcattgagttcagcgacaaccaaccttgcatagacttgattgagaataaacttggaatactttctctattagatgaagaaagtagattaccatcaggctcagatgaatcatgggcctcaaaactatattctgcctttaataaaccgccctcaaatgaagttttttcgaagccaagattcggacaaacgaagtttatagtaagccattatgctgttgatgtagaatatgaagttgaagggtttattgaaaagaatagagacagcgtttccctaggtcatctggatgttttcaaagcaacgacaaatccaattttcaaacaaattttagacaacagagaacttaggagtgacgatgctcctgaagagcaaaatactgaaaaaaagataatgatcccagcaagattaagtcaaaagaaaccaaccctgggatctatgttcaaaaaatcgctcggggaattgatggccatcataaattctactaatgttcattatattcgttgcataaaaccaaattctgaaaaaaagccatgggagttcgataatttgatggtcttatcgcaattaagagcttgtggtgtgctggaaacaatcaggatttcatgtgcaggctttccatcaagatggacttttgacgaattcgttcaaagatatttcctcctgacggactacagcttatggagtggaattctttataatccagacctcccaaaagaggcaatcgtcaacttctgtcaatctattctagatgctactatctctgattcagcaaaataccaaattggtaataccaaaattttctttaaagcaggaatgcttgcatttttggaaaagctaaggactaataaaatgaatgaaatatgcatcataatacagaaaaagataagggcaagatactataggcttcagtatttgcagaccatggaatcaataaagaagtgccaaagccaaattagaagtttgttggttcgtacaagggtcgatcatgagctcaagacaagagctgccatattactacaaacgaacattagagcattatggaaacgggaatactatagagctgccattgggcaaataataaaactacaatgtacctgtaaaagaaaattgattttagatagtgttaacaggaaattcatgctcatggcggcagtaattatccaaagctacatcagatcatatggtcacaaaacagattacagaacattgaaaaggagctccattcttgtacaaagcgccatgagaatgcagttagctagacgaaggtatatagttctgcaaaaagaagttgaagaacggaatattagggctagttacgggattggattactggaggaagctatcgaatttaagaactctttcattttgaatctagagatgttaaatgactcatatacaagattaacacagttgttgcagggagatttgtcaaatattccatctaagcaaaggcaagagtacgaaacgatagtaaatggttataatgataagatttccaagctgaagacgttacaagttgaaatcatgaatactttaaacaagaagaatgccttgaaggagagaaaaaagaagcaatcttctttaatacagtcacatatgcaaagtttggctgctataaaaggtaacaaaccttcaagattaagtgatgaagtcaaatcaatgaagcaagaactagcgtttattgaaaacgtaatagcacaagatttcaccaccacatattctgctaataagaatgataaagtgaaaggtttgggaatcgcaggacaacaagtaaaaccgaagctagtcaatgtaattcgtagagaatcaggaaatcctgatcttctagaattactaatggacctgaattgttacacattagaagtcacagaaggttacttgaaaaaagtaaatgttactgaggtgaatggagacaatgttctgggtcctatacacgtcattactacagtggtaagtagcttagtgagaaatgggttattgattcaaagtagcaaattcatctcgaaagtcctattgactgtagaaagcattgttatgagtctaccaaaggacgaaacaatgcttggtggtatcttttggttaagtaatctttccagacttcccgcatttgctgcaaatcaaaaaacattatatgaagcgaatggtggtgatgaaaaagataagttaacactgatatatttgaatgatttggagaatgaaactttaaaagtattcgacaagatttattccacttggttagtgaaattcatgaagcatgcttcagcccacatcgagatcttcgatatggttttaaacgagaagctatttaaaaattctggtgatgagaagttcgctaaattattcacattcttaaatgaatttgatgctgtcttgtgtaaatttcaagttgttgactcaatgcatacaaaaatttttaacgacaccctgaagtatctgaacgtaatgctatttaatgacctaataaccaaatgtcccgcgttaaattggaagtatgggtacgaagtggatagaaatatcgagcggttggtgagctggtttgaaccaagaattgaagacgttcgtcccaatttgattcaaataattcaggctgtcaagatattacagttgaagataagcaacttgaacgagttcaagttactattcgatttctggtatgccttgaatccagcccaaatacaagcaattctgttgaaatacaagcctgctaacaagggcgaagctggagtaccgaacgaaatcttgaattatttagctaacgtgatcaaaagagaaaatctgtctttgccagggaagatggaaattatgctttctgcccaatttgactctgctaaaaaccatctgcgttatgacactagtgcaataacacagaacagcaatacagagggcttagctactgtcagtaaaattataaaattagacagaaaataagaacaaagtaaatatacgcccatatatgtatatat

SEQ ID NO: 67 - DNA, 4282 bp, Saccharomyces cerevisiae
tagtgcaacaagaagccagtaacgccaaatagaggttagcgccaagcaataatttactggtaggttctttcattccctgattttaccatgaatgacgacagagaaacccccccaaagaggaaacctggggaggacgacacgcttttcgatattgacttcttagacgacacgacttctcattctggatcccgttcaaaggtcaccaactcacatgcgaacggatattatataccaccaagtcatgtacttcccgaagagactatcgacttagacgctgatgatgataacattgaaaatgatgtccatgaaaatctatttatgagcaataaccatgacgaccaaacgtcttggaatgccaatagattcgactcagatgcatatcaaccacaatccctacgagcagtcaagcctcccggtttatttgctaggtttggtaatggtctcaaaaatgcctttacgttcaaacggaagaaagggcccgaaagtttcgaaatgaatcattacaatgcggtgactaataacgaattagacgataattatctagactcgaggaataagttcaacattaaaattcttttcaaccggtacattttaagaaagaacgttggcgacgcagagggcaatggtgaaccaagagtcatccacatcaacgattctctcgctaattcctccttcggttatagtgacaaccatatatctaccaccaagtataattttgcgacctttctgcctaaatttttgttccaagaattttccaaatacgctaatctgttttttttatgtacatctgccattcaacaggtgcctcacgtctcgccaactaatagatacaccacaattggtactttattagtggttttgattgtttctgccatgaaggaatgtatcgaagatatcaagagagctaattctgataaagaattaaataattcgacagcagaaatattttcagaagcacatgatgactttgttgagaaacgatggattgatattcgtgtaggtgacataattagagtaaaatcagaggaacctattcctgctgataccataattttgtcatcttcggaaccggagggtctttgctacattgaaactgccaacttggatggtgaaacaaatttgaaaatcaaacagtcgagagtagaaactgccaaatttatagacgttaaaactttgaagaacatgaacggaaaagttgtttccgaacagccgaactctagcttgtatacttatgaaggtacaatgactttaaatgatcgtcaaataccgttatctcctgaccaaatgattttaagaggtgcaactttaagaaatactgcatggatatttggtttagttatcttcactggtcatgaaactaagttattgcgtaatgctactgcaaccccaattaaaagaaccgcggttgagaaaattatcaacagacagattattcgattgttcacagttttaatcgtgctaattttaatttcttcaattggtaatgttattatgtctactgcagatgccaaacatttatcgtacctttacctggagggtaccaacaaggctggcttattcttcaaagactttttaacattttggattctattttcgaatctagttcctatttctctatttgtcaccgttgaattaatcaaatattatcaggcttttatgataggttcagatctagatttgtactacgaaaaaactgataccccaactgtggttcgtacatcctctttggttgaagaacttggtcaaatagaatatatattcagtgacaagacaggaactttaacaagaaatattatggaatttaaatcctgctctattgcaggccattgctatattgataaaatacctgaagataaaacggccactgttgaagatgggattgaagttggttatagaaaatttgacgatttgaagaaaaagttaaatgatccctctgatgaggattcacctattatcaatgacttcttaacattactggctacctgtcatactgtcattccagaatttcaaagcgatggatctattaaatatcaagcagcctctccagatgaaggtgccctcgttcaaggtggtgcagatttagggtataagtttatcatccgtaaaggaaactctgtaactgttttattggaggaaactggcgaggaaaaagagtatcaactacttaacatttgtgaatttaattccaccaggaagagaatgagcgctatatttagatttccggatggttcgataaagttattctgtaaaggtgctgatactgtcattctggaaagattggatgatgaagctaatcaatatgtagaagctacaatgagacatttagaagattatgcatctgagggtttgcggacgttgtgtttggcgatgagagatatctctgaaggagaatatgaagaatggaatagcatttataatgaggctgccacaacattagataacagagccgagaagctagacgaagccgcaaatctaatcgagaaaaatctaatattaattggtgcaactgctattgaagataagttacaggacggtgttccagaaactatccacacattacaagaagcgggtattaaaatttgggttttaactggtgacagacaggaaactgctattaacattggtatgagttgccgtttattgagtgaagacatgaatttgttgatcatcaacgaggaaaccagagatgatactgagagaaatttgttagagaagattaacgctctaaacgagcatcaattgtcaacacatgatatgaaatccttagcgctcgtcattgatgggaagtcattaggctttgccttggaaccagaattagaagattatttgctaactgtggcgaagctttgtaaagcggttatatgttgccgtgtatctccactacagaaagccttggttgttaaaatggtaaaaagaaagtcgtcttcactactgctagccattgcgagtggtgccaacgatgttagtatgatacaggcagctcatgttggtgtcggtattagtggtatggaaggtatgcaagcggctcgttcagctgatatagctcttggccaatttaaatttttaaaaaaactattacttgtccatggctcctggtcttatcaaagaatttctgtcgcaattttgtactctttttacaagaatacagcattatacatgacgcagttttggtacgtttttgccaatgccttttcaggtcaatccattatggaatcatggacaatgagtttctacaacttattcttcactgtttggcccccttttgtcattggtgtatttgatcaatttgttagtagtagattacttgagcggtacccacaattgtacaaattaggacagaagggtcaatttttctctgtttacatcttctggggatggattattaatggctttttccattctgcaatagtatttattggcaccatattgatttacagatatgggtttgccttaaatatgcacggcgaactagctgatcattggtcttggggtgtaactgtctacactacaagtgtcattattgttttgggaaaggctgctttggtaactaatcaatggacgaaattcaccttaattgccattcctggttccctcttattttggttaatattcttcccaatttatgcttctatatttcctcatgctaacatctcaagagagtattatggtgtggttaaacacacgtatggatccggtgtattttggttaactttgatcgttttaccaatttttgcactggtaagagattttctatggaagtactataaaagaatgtatgaaccagaaacgtatcatgttattcaagaaatgcagaaatacaatatcagcgactctaggccgcacgttcagcaatttcaaaatgccatcaggaaggtgaggcaagtgcaaagaatgaaaaaacaaagaggatttgccttttcacaggctgaagagggtgggcaagaaaaaattgtcagaatgtatgatactactcaaaagagaggtaagtacggtgaattacaagatgcttcggcgaacccctttaatgacaataatggactgggaagtaacgactttgaaagtgcagaaccgttcattgaaaatccatttgctgatggtaatcaaaattcaaatagattcagttcttcgagagatgatatttcatttgatatatgaggcacagaaacaaagagcagaagacaaaaaatacaaaaataaaaataagataaaaagaaaagtcattattaccattactgaaatatgtacatttaccataaaatatatccgttatatagaagttata

SEQ ID NO: 68 - DNA, 1110 bp, Saccharomyces cerevisiae
caacggttagaatacaacgaggatatgtccgacgaaattgtttggcaagtgattaatcaaagtttctgctctcatagaattaaggcacctaatggtcaaaatttttgcagaaatgagtataacgtcactgggttgtgtacaaggcaatcatgcccacttgccaactccaagtatgcaacagtgaagtgtgacaatgggaaactgtacttgtatatgaagacgcctgaaagagcgcacactcctgccaagttatgggaaagaatcaaactatccaaaaattacacgaaggctttacaacagatcgacgaacacctactacattggagcaagtttttccgtcataagtgtaaacagagatttacaaaattgacgcaggtcatgataacagagagacgtttagcattaagggaggaggagagacactacgttggtgtagcaccaaaggtcaaaagaagagaacaaaacagggagagaaaggcattggtagctgccaagattgaaaaagccatcgaaaaagaattgatggacagattaaagagtggtgcttacggtgataaaccattaaatgttgacgaaaaggtctggaagaagataatgggtcaaatggaagaggagaattctcaggacgaggaagaagactgggatgaagaagaggaaagtgatgatggggaagttgaatacgttgcagatgatggcgaaggtgaatacgttgacgtggatgacttagaaaagtggttagctgactctgacagagaagcttccagcgccagtcaaagcgaaagcgacagtgaaagcgagagcgacagcgatagtgatgaagaaaataagaattcagccaagagacgtaagaagggaactagtgccaaaactaaacgtcctaaagtcgaaatcgaatacgaggaggaacacgaagttcaaaatgctgagcaagaagtggcacaataagctcacgcactatactacgcaacattacatgatttcagtttctattattgaatgaacaggatttttccacgtggattgggcagcgcactgtaccataataacaaccagttataaaatatttcaattcttttacatatataaaaatacataaagactattattttt

SEQ ID NO: 69 - DNA, 2475 bp, Saccharomyces cerevisiae
tctcgagactaacaacattaccaaggagaaccggcttagtccacatcgctactgtcattctgtttcgaaccgtggtccagcaatcatgtcctcgtcttcgtctaccgggtacagcaaaaacaatgccgcccacattaagcaagagaatacactgagacaaagagaatcgtcttccatcagcgtcagtgaggaactttcgagcgctgatgagagagacgcggaagatttctcgaaggaaaagcccgctgcacaaagctcactgttacgcctggaatccgttgtaatgccggtgatctttactgcattggcgttgtttaccaggatgtacaaaatcggcatcaacaaccatgttgtttgggatgaggcgcactttggtaaatttggttcttattacttgagacacgaattttaccacgatgtccatcctcccctaggaaaaatgctggtcgggttgtctggttatttggcaggctacaacggttcttgggacttcccttctggggaaatttacccagactatttggattatgttaaaatgagactgttcaacgcgtcattttccgcgctctgtgtgccattggcctacttcactgccaaagctattggattttctttaccaacagtttggctgatgaccgtgttggttttgtttgaaaactcgtatagtactttgggcaggttcattcttttggactccatgctacttttcttcactgtcgcatcgttctttagttttgttatgttccacaaccagaggtccaagccgttctctagaaagtggtggaaatggctgttgatcactggtatttctttgggttgcactatttccgtcaaaatggtgggtctatttatcatcactatggtcggtatctatactgtgattgacttatggacctttttggcagataaatccatgtcatggaaaacctatattaaccactggttggcaagaatatttggtcttattatcgtccccttctgcattttcctattgtgcttcaaaatacattttgacctattatcgcattctggtacaggtgatgctaacatgccatctcttttccaagcaagattagtgggttctgacgtcggacaaggcccccgtgacattgctctaggttcctccgttgtttccatcaaaaaccaagctcttggaggatctctattgcactcacatatacaaacttatccagatgggtccaaccaacaacaagtaacctgttatggttacaaagatgctaacaacgaatggtttttcaacagagaaagaggcttaccatcatggtcagaaaacgaaactgacatcgagtatttgaagccaggtacctcctatagattggtacacaaaagcacgggcagaaacttgcacacccacccagttgctgcaccagtgtcaaagacacaatgggaggtttctggttacggtgacaatgttgttggtgacaacaaagacaattgggttattgagatcatggaccaaagaggagatgaagaccctgagaagttgcacacattgaccacctctttccgtatcaagaacttggagatgggctgttacttggctcaaaccggtaacagtttgcccgaatggggtttcagacaacaagaggttgtctgcatgaaaaacccattcaagagggacaagaggacctggtggaacatcgagacccacgaaaatgaaaggttgccaccaagacccgaagattttcaatacccaaagaccaacttcttaaaagacttcattcatttaaatctagccatgatggccactaataacgctttggtgccagatccagacaaatttgattacttagcttcctcagcatggcaatggccaactttgaatgtgggtttgagactatgtggctggggtgatgataatccaaaatacttcctattgggtaccccagcttccacgtgggcttctagtgttgccgtcctcgcattcatggccacggtcgttatcttactgatcagatggcaaagacaatatgtggacctaagaaatccatctaactggaacgttttcttaatgggcgggttctacccactactagcttggggcctacactacatgccattcgttatcatgtctagagtcacctacgttcatcattacttgcctgccttgtattttgcactgatcattttggcgtactgtttcgacgccggtttgcaaaaatggtccagatctaagtgcggccgtatcatgcggttcgtcctatacgccggattcatggcacttgtaattggttgcttctggtacttctccccaatatcatttggtatggagggaccaagtagtaacttccgctacttaaactggttttccacttgggacattgccgacaagcaagaagcatgaattaagatcatcgtagtaagtacataagtaaaaaacaagaattaaataaaatttctatatcaaccagcagaagaagtggtctatataaaccactatataatgaatttcga

SEQ ID NO: 70 - DNA, 1627 bp, Saccharomyces cerevisiae
catcaaacgcaagaaagcataccagattgcaaaaatgagtactagtgcggacactgataccatcaagaagccaatccttgcggtgccagagcctgcactggccgatacgcattcagaggagatatcacgctctggagaagaacatgaatcagagaacaacgagcactcagatgaagaaggcgataattattctgaaagagagcaatctgtgtcaaccgaaccactggatacattgccgttaagaaaaaagttgaaaaatctttcatatattacatttttcgccataggaataggtcttttatggccgtggaactgtatcctcagtgcctcgcaatattttaagcacgatattttcaaagacacctccatttgggcaaagatcttcacaagctctatgatgtccttttctaccatatcgtcaatgctgttcaacatctacttggccaaaagacagtacaaatactcgagaagggtcataaacgggcttgtgtgggagattattgtctttactgtcatgtgcttctttacaattttgcatttccttttacctaaatggttcaatttcatgtttataatgatgcttgtagtgatcagttccatggggacagccatgacacagaatggtatcatggccatagccaacgtcttcggttccgagtacagtcaaggtgtcatggtggggcaagccgttgctggtgtcctgccctccctagtgctttttgccctagctttcatcgagaactcttctgtgtctactacgggcgggattcttctatacttttttaccacaacactcgtggtcaccatttgtgtggtcatgttcagcgtgagcaaaatcagtcggaaagtgaacgagaattggaatgtggaagacggacatatcactgatgtgttgttagggtctctgcgctccaatgaggaggaaatccgtattgttggccgcattgaccaaatggaggatgaagaccaccgccgcaccaacggcactcgcgacgacaacgacgaaggtgaggaactccaactaaaagtgcctttcgaggtcttatttgccaaactaaagtacctggttctttccatattcaccacgtttgtcgtaactcttgtttttcctgtatttgcgtctgccacctacgtgacagggcttcctttaagcaacgcacagtacatacctctcatattcacgctgtggaacctaggcgacctttacggaagagtcattgccgactggcccatgttccgtgaccagaaatttacgccacgcaaaaccttcatctactcattgttgcgggtggccgcaataccactgttcttgatgttcacagccatcacctcctcttcaagcggcgatgaagagcacaatggctccgtaatcgttgacttgtgttacatgctactgcagttccttttcggcgtaaccaacgggcacgtcatctctatgagtttcatgaaggtgccagagcaactggacaacgacgacgagaaggaagcggccggtggattcactaatattttcgtttctacaggactagctctgggcagcatcataagctacgtattcgtcttcataattgactttattatcaggtagatagatactgtacataccgaaacgccatcatttacagtc

SEQ ID NO: 71 - DNA, 2783 bp, Saccharomyces cerevisiae
agggaactccgactgacgttatccctgcaaactaccgctaatgaacgacccttctttactaggctaccctaatgtgggcccgcagcagcaacagcaacagcagcaacagcagcatgccgggctactaggaaagggtacaccaaacgctctacagcagcagctacacatgaaccagctcaccgggatacctccaccgggactcatgaacaacagcgatgtacacacttccagcaacaacaactcgcgccagttgctcgaccaattggctaatgggaacgcgaacatgctcaatatgaacatggataacaacaataacaacaataacaacaacaacaacaacaacaacaacggcggtggaagcggggtgatgatgaatgcctccacagccgcagtaaattctatagggatggttcctaccgttggtacgcctgtgaacatcaatgtgaacgccagtaaccctttattacacccgcacttggatgacccttctttactaaacaatccgatctggaagcttcaattgcatctggctgcagtgtccgcacaatctctggggcaacccaacatttatgctagacaaaacgctatgaagaagtatttggctacacaacaggctcagcaagctcagcaacaagcgcagcaacaggcacagcagcaggtcccgggcccatttggccccggacctcaggctgcaccaccagctttgcagcccaccgatttccagcaatctcacattgcagaagcctccaaatcactggtagactgcacaaagcaagccttgatggaaatggccgacactctcaccgacagcaagacagcaaagaaacaacaacctacgggagatagcactccctcaggcacggcaactaacagtgcagtttctacaccattgactcccaagatagagctgtttgctaatggcaaggacgaagccaaccaggcgctcttacaacacaagaaactgtctcagtacagcatcgacgaagatgacgacattgaaaacagaatggtcatgcccaaggactcgaaatacgacgaccaattatggcacgcgctagatttgtccaacttgcaaatcttcaatatcagcgccaacatcttcaagtacgattttctaacgagactatatttgaatggcaatagcctcacggaactgccagcggagatcaagaacctaagcaacctacgcgttttggacctgtcgcataataggttaacatctctaccagcggaactaggctcatgtttccaattgaaatacttctacttttttgataacatggtcaccacattaccatgggagtttgggaacctgtgtaaccttcagtttcttggtgtagaaggaaaccccttagaaaaacagtttttaaagatccttacagaaaaatctgtcacgggattgattttctacctaagggacaacagaccagagattcccttaccgcatgaacgtaggttcatcgaaatcaataccgatggggaaccacagagggagtacgattctttgcagcaatccactgagcatctggccaccgatttagccaagaggacgttcaccgtcttatcctacaacaccttatgtcaacactatgccaccccaaaaatgtaccgttacacaccgtcgtgggcgttaagttgggattacaggcgcaataaattaaaggagcagattctctcgtacgacagtgatctgttgtgtttacaagaagtggagtctaagacttttgaagagtattgggtgcccctattggacaagcacggttatacaggcatcttccatgcaaaggcaagagccaagaccatgcattccaaggactccaagaaagtggacgggtgttgcatttttttcaaaagggaccaattcaagttgatcaccaaagacgccatggatttcagcggtgcttggatgaaacacaagaagttccaaagaactgaagattatttaaaccgtgcaatgaacaaagacaacgttgcactgttcttaaagctacaacacattcctagtggcgacaccatatgggcggtcaccacgcatttgcactgggatccaaaatttaatgatgtcaagacattccaagtaggtgtcctgttagatcatctggaaacgctgctaaaggaggagacatcgcacaattttagacaggacattaagaaatttcctgtgctcatttgtggtgacttcaattcatacatcaactccgccgtatacgaattgataaatacaggccgtgtccaaatacatcaagagggaaatggtagagatttcggttacatgtcggagaaaaatttctcacataacttggctctcaaatcaagttataattgtatcggagaactaccattcaccaatttcacaccgtcattcacagatgttatcgactatatatggttttctacacatgctctaagggtgcgtgggctattgggtgaagtggaccctgaatacgtgagtaagtttatcgggttccccaacgacaaattccccagtgaccatataccattgttagcaagatttgaatttatgaagacaaacacaggcagtaagaaagtataaaccgcacactttcatcccactccctccctcctctctgtacactacctcattataaaattgaaacgatcccaatctcaccgcacttcccataaagccttcacgttatacttttttttctcatcttttttttctctctctctctctctctcttttgcgtatctttttcgtcctgtttctttcttacttaagtatctttttataatatttaagagagccaaaattatttaac

SEQ ID NO: 72 - DNA, 1053 bp, Saccharomyces cerevisiae
atgagttgtgtgtatgcgtttgggtctaatgggcaaaggcaactgggactggggcacgatgaggatatggataccccacagaggtctgtgccaggagatgatggagcaatagtcaggaagatagcgtgcggtgggaaccacagcgtgatgctgacaaatgacgggaatctggtaggatgtggagataacagacggggagaactggatagtgcgcaagcactgcggcaggtgcatgactggaggcccgtggaagtaccggcacccgtggtggatgtggcgtgcggctgggacacgacagttattgtggatgctgatggccgtgtatggcagagaggaggcggttgctacgagttcactcagcaacatgtgccattgaattccaacgatgagcgcatcgcagtatacggatgtttccagaactttgtggtggtgcaaggcacccgagtatacggctggggcagcaacacaaagtgtcaattgcaagagcccaaatcccgatcactgaaagagcccgtattggtgtacgataccgggtctgtggccgtagactacgtggccatgggcaaggacttcatggtcatagtggacgagggcggccgcatagtgcacgcatccggtcgcctgcccactgggttcgagctcaaacaacagcaaaaaagacacaatctagtggtactgtgcatgtggacctcgatccacctgtggaatgcgcgcctcaatacggtagagtcgtttggtaggggcacacattcccaactcttcccgcaagagcgcctagacttccctattgtcggtgttgcaaccgggagtgagcacggtattctaactactgctaatcaagaaggcaagtctcactgttacaatgtatactgctggggctggggagagcatggcaactgcggcccgcaaaaggcgtcccagcctggactgcagctcgtgggccaatactctggaaaacctcgcgtgtttggcggatgtgccaccacgtggatcgtgctctagcactgataagtaactatatacccactatcatatacatagatgtccattcag

SEQ ID NO: 73 - DNA, 1315 bp, Saccharomyces cerevisiae
atgcaaaagatcagtaaatactcatctatggcaattctgaggaaaagaccgctggtaaagactgaaactgggccagaatcagaactcctaccggagaaaaggaccaaaatcaaacaagaagaggttgtccctcaacccgtggatatcgactgggttaaatcgctgccaaataagcagtacttcgaatggattgtggttagaaacggcaatgtgcccaacaggtgggccacaccattggacccctcgatccttgtcactccggcctcgacgaaagtcccttacaagtttcaagaaacatacgctagaatgcgagtactgagatctaagattctagcccccgtcgatataattggtggatcatccattcctgtaacggttgcctctaagtgtggtatctcgaaagagcagatatcaccgagggactacagattacaggtccttcttggggtgatgctatcatcgcaaacaaaagatgaagttaccgcaatggcaatgcttaacataatgcggtattgtatagacgaactgcacagcgaagaaggtatgacattagaggccgttttacaaatcaatgagaccaaattagacgaattgattcattcagttgggttccacacaaggaaggccaagtatattttgtcaacctgcaaaatccttcaagatcagttttcgagtgatgttccagctacgattaatgagctattgggcctgcccggtgtagggcccaaaatggcttatctaacattacaaaaggcatggggcaagattgaaggtatctgcgttgacgttcacgtggatagattgaccaagctttggaaatgggtagatgcgcagaaatgcaagactccagatcagacaagaactcaattacaaaattggctgcctaaggggctttggacagaaataaatgggttgctggttggatttggacaaataatcactaaatcgaggaaccttggtgacatgttacaattcttgccaccggatgatcccagaagctccttagattgggatttgcagtctcaattgtacaaggaaatccagcaaaatatcatgagttatccaaagtgggtgaaatacctggaaggaaaacgtgaactgaacgtggaggcggaaatcaatgttaaacacgaggagaaaacagttgaagaaactatggtcaaactggaaaatgatatttctgttaaagtagaggactaagtgtggtaaaaaaaaaaaaaaagaaaagaaaagaaagcaggcctagttgttaatatgtatactttttattcattcaagtgtacatatgtgtatgtatgtatatatttgaactagt

SEQ ID NO: 74 - DNA, 950 bp, Saccharomyces cerevisiae
agacagatctcacgacagcaaatagatgcgtaagcacacacggtatggatgtgttgaagctgggttatgaactggaccagctctctgatctggtcgaagaaagaacaaggctagtgtcggtgttgaagctcgccccgacctcaaacgataacgttactttgaaacggcaattgggctcaatattggagttattgcagaagtgtgcgcccaatgatgaactaatatcccgatacaataccatactggacaaaattcctgatacggcggttgacaaggagttgtataggttccaacagcaggtggcaagaaatactgatgaggtgtccaaagagtctttgaaaaaagtgcggttcaagaatgatgacgagcttacggtcatgtataaggatgacgatgaacaagacgaggagtcgccgctgccttcgacgcatactccatacaaggatgaaccattgcaatcgcagttacagtcacagtcacagccacagccaccacaacccatggtttccaaccaagaactatttattaaccagcaacagcagttgttagagcaagattcccacttgggcgcactgtctcagtctattgggaggactcatgacatttcgctggaccttaataatgagatcgtttctcagaacgactcgctgctggttgatttagaaaacctgattgataataatggtaggaatttgaacagggcctctcggtccatgcatggctttaacaattctaggttcaaggataacggcaactgcgtgattattcttgtgctgatagtggtgctcctgttgcttctattagtattataacattatattctgttttttaggctcgaatacgaagtttggttttgatctttttttttttctttttctttcacttagtaataacctcctctttaatgattcatcatatatttgtatctatatatactttatagcccaaaa

SEQ ID NO: 75 - DNA, 842 bp, Saccharomyces cerevisiae
attctgcatcaggtgacccaaactagaataagataaacagtggagtacactcattgtaaaggaaaaccatgatcaaatctacaattgctctaccctctttcttcattgttttaattttggcgttggtcaattcagtggctgcatcttccagttatgcaccagttgctatcagtttaccagcattcagcaaagaatgcctgtactacgatatggttactgaggatgattccctggctgtgggttaccaagttctaaccggtggtaattttgagattgattttgatattactgctcctgatggatctgtgattactagtgagaaacaaaagaagtactcagactttttattaaaatcgtttggagtggggaagtataccttttgtttttccaataactatggtacagcgttgaaaaaggtagaaattacactagaaaaggaaaaaactttgactgacgagcatgaagctgatgtcaataacgatgacattattgccaataacgccgtggaggaaatagatagaaacttgaacaaaatcacgaagactttgaactatttgagagccagagaatggagaaacatgtctaccgtcaattccaccgaatcaaggttgacttggttatctatattgattatcattatcattgccgttataagtattgcccaagttctacttattcaattcctcttcactggtcgtcaaaaaaattacgtttaagaacttttcaatctacgaaaaatatatgtccgcaatatagaacacaattaggtttatattcgacgtgatttttttttcttccttagccctatgtatatttactgtataggataaatgaaataccaa

SEQ ID NO: 76 - DNA, 2120 bp, Saccharomyces cerevisiae
gcacatcaaaagaaaagtaatcaagtattacaagaaacaaaaattcaagtaaataacagataatatgtcaaaagctgtcggtattgatttaggtacaacatactcgtgtgttgctcactttgctaatgatcgtgtggacattattgccaacgatcaaggtaacagaaccactccatcttttgtcgctttcactgacactgaaagattgattggtgatgctgctaagaatcaagctgctatgaatccttcgaataccgttttcgacgctaagcgtttgatcggtagaaacttcaacgacccagaagtgcaggctgacatgaagcacttcccattcaagttgatcgatgttgacggtaagcctcaaattcaagttgaatttaagggtgaaaccaagaactttaccccagaacaaatctcctccatggtcttgggtaagatgaaggaaactgccgaatcttacttgggagccaaggtcaatgacgctgtcgtcactgtcccagcttacttcaacgattctcaaagacaagctaccaaggatgctggtaccattgctggtttgaatgtcttgcgtattattaacgaacctaccgccgctgccattgcttacggtttggacaagaagggtaaggaagaacacgtcttgattttcgacttgggtggtggtactttcgatgtctctttgttgtccattgaagacggtatctttgaagttaaggccaccgctggtgacacccatttgggtggtgaagattttgacaacagattggtcaaccacttcatccaagaattcaagagaaagaacaagaaggacttgtctaccaaccaaagagctttgagaagattaagaaccgcttgtgaaagagccaagagaactttgtcttcctccgctcaaacttccgttgaaattgactctttgttcgaaggtatcgatttctacacttccatcaccagagccagattcgaagaattgtgtgctgacttgttcagatctactttggacccagttgaaaaggtcttgagagatgctaaattggacaaatctcaagtcgatgaaattgtcttggtcggtggttctaccagaattccaaaggtccaaaaattggtcactgactacttcaacggtaaggaaccaaacagatctatcaacccagatgaagctgttgcttacggtgctgctgttcaagctgctattttgactggtgacgaatcttccaagactcaagatctattgttgttggatgtcgctccattatccttgggtattgaaactgctggtggtgtcatgaccaagttgattccaagaaactctaccattccaacaaagaagtccgagatcttttccacttatgctgataaccaaccaggtgtcttgattcaagtctttgaaggtgaaagagccaagactaaggacaacaacttgttgggtaagttcgaattgagtggtattccaccagctccaagaggtgtcccacaaattgaagtcactttcgatgtcgactctaacggtattttgaatgtttccgccgtcgaaaagggtactggtaagtctaacaagatcactattaccaacgacaagggtagattgtccaaggaagatatcgaaaagatggttgctgaagccgaaaaattcaaggaagaagatgaaaaggaatctcaaagaattgcttccaagaaccaattggaatccattgcttactctttgaagaacaccatttctgaagctggtgacaaattggaacaagctgacaaggacaccgtcaccaagaaggctgaagagactatttcttggttagacagcaacaccactgccagcaaggaagaattcgatgacaagttgaaggagttgcaagacattgccaacccaatcatgtctaagttgtaccaagctggtggtgctccaggtggcgctgcaggtggtgctccaggcggtttcccaggtggtgctcctccagctccagaggctgaaggtccaaccgttgaagaagttgattaagccaattggtgcggcaattgataataacgaaaatgtcttttaatgatctgggtataatgaggaattttccgaacgtttttactttatatatatatatacatgtaacatatattctatacgctataga

SEQ ID NO: 77 - DNA, 102 bp, Saccharomyces cerevisiae
gtgaatgatgaatttaattctttggtccgtgtttatgatgggaagtaagacccccgatatgagtgacaaaagagatgtggttgactatcacagtatctgacg

SEQ ID NO: 78 - DNA, 73 bp, Saccharomyces cerevisiae
gggcacatggcgcagttggtagcgcgcttcccttgcaaggaagaggtcatcggttcgattccggttgcgtcca

SEQ ID NO: 79 - DNA, 844 bp, Saccharomyces cerevisiae
atatacacacataatggcatccaccgatttctccaagattgaaactttgaaacaattaaacgcttctttggctgacaagtcatacattgaaggtactgctgtttctcaagctgacgtcactgtcttcaaggctttccaatctgcttacccagaattctccagatggttcaaccacatcgcttccaaggccgatgaattcgactctttcccagctgcctctgctgccgctgccgaagaagaagaagatgacgatgtcgatttattcggttccgacgatgaagaagctgacgctgaagctgaaaagttgaaggctgaaagaattgccgcatacaacgctaagaaggctgctaagccagctaagccagctgctaagtccattgtcactctagatgtcaagccatgggatgatgaaaccaatttggaagaaatggttgctaacgtcaaggccatcgaaatggaaggtttgacctggggtgctcaccaatttatcccaattggtttcggtatcaagaagttgcaaattaactgtgttgtcgaagatgacaaggtttccttggatgacttgcaacaaagcattgaagaagacgaagaccacgtccaatctaccgatattgctgctatgcaaaaattataaaaggcttttttataaactttttataattaacattaaagcaaaaacaacattgtaaagattaacaaataaatgaaaaaaacaacgaaataacttaggttttaggctaaaaaaaacagaaggaattttgaacgataaacttttcgactgcacacgaaacattattactaatttgtgtaaccactatataaggaatcgtgtttattaattgaa

SEQ ID NO: 80 - DNA, 921 bp, Saccharomyces cerevisiae
tagtggaaagctaaataaaggaggtcatggagccagagagcataggcgatgtggggaaccatgcccaggatgatagtgccagtatagtgtccgggcctcgcaggcgttctactagcaagacatccagtgcgaagaatatacggaactccagtaatatctctccagcatcgatgattttcaggaatttgttgatactggaggatgatttaagacgccaagctcacgaacaaaagatactgaagtggcaattcactttgttcttagcgtctatggccggtgtaggcgcatttaccttctacgaactttatttcacttcagattatgtcaagggcctccatagggttattttgcaattcactctttctttcatttccattactgtagttctttttcatatcagtggacaatatagaagaactatcgtcattccaagaagattttttacctctactaataaagggattaggcagtttaatgtgaagctagttaaagtacagtctacgtgggacgagaaatacacagattcagtaagatttgtgagtcgaacaattgcttattgtaatatttattgtttgaaaaaatttctgtggcttaaagacgataatgccattgtgaaattttggaaaagtgtcacgatacaatcccaaccgaggatcggagctgtggatgtgaaattagtcctcaaccccagagcatttagtgcagagattagagaaggatgggagatttatagagacgagttttgggccagggaaggtgctagaagacgcaaacaagcgcacgaactccgacctaaatcagaatgaaagagttggagggcttcttccttcgaataagaggtcatatttacctatgtaaaattgtaaccatctatgttcacacataaattatattttatacattattagaagtgaagctgtt

SEQ ID NO: 81 - DNA, 1352 bp, Saccharomyces cerevisiae
ttgaggcctatacacatagacatttgcaccttatacatatacacacaagacaaaaccaaaaaaaatatgactctacaagaatctgataaatttgctaccaaggccattcatgccggtgaacatgtggacgttcacggttccgtgatcgaacccatttctttgtccaccactttcaaacaatcttctccagctaaccctatcggtacttacgaatactccagatctcaaaatcctaacagagagaacttggaaagagcagttgccgctttagagaacgctcaatacgggttggctttctcctctggttctgccaccaccgccacaatcttgcaatcgcttcctcagggctcccatgcggtctctatcggtgatgtgtacggtggtacccacagatacttcaccaaagtcgccaacgctcacggtgtggaaacctccttcactaacgatttgttgaacgatctacctcaattgataaaggaaaacaccaaattggtctggatcgaaaccccaaccaacccaactttgaaggtcaccgacatccaaaaggtggcagaccttatcaagaagcacgctgccggccaagacgtgatcttggttgtcgacaacaccttcttgtccccatatatctccaatccattgaacttcggtgcagacatcgttgtccactccgctacaaagtacatcaacggtcactcagacgttgtgctcggtgtcctggccactaataacaagccattgtacgagcgtctgcagttcttacaaaacgccattggtgctatcccatctcctttcgatgcttggttgacccacagaggtttgaagactttgcatctacgtgtcagacaagctgccctcagcgccaacaaaatcgctgaattcttggcagcagacaaggaaaacgttgtcgcagtcaactacccaggtttgaagacacaccctaactacgacgtagtgttaaagcaacaccgtgatgcccttggtggtggtatgatctccttcagaatcaagggtggtgctgaagctgcttccaagttcgcctcctccacaagactgttcacattggccgaatcccttggtggtatcgaatctctattggaagtgcccgctgtgatgacccacggtggtatcccaaaggaggccagagaggcctctggtgtttttgacgacttggttagaatctctgtcggtattgaagacactgacgatcttttggaagacatcaagcaagccttgaaacaagccaccaactaatcgccagtgccacgtctctgccttcgaccggacctttttaagtacgataaatatccttttataaatatatagtctaaaatatccattaatactgtgctcaa

SEQ ID NO: 82 - DNA, 1338 bp, Saccharomyces cerevisiae
cagaagcaagaggaggcgcatcgatcgtggcagatgagtcagcaaacaccacaggaaagtgaacagaccacagcgaaagaacaggaccttgatcaagagagcgtgttgagcaacattgacttcaatacggatttgaatcacaatttgaatttatcggaatactgtatatccagtgacgcaggaacagagaagatggatagcgacgaggagaagtcgttggccaatctgccggagttgaaatacgctcccaagctatccagcctggtgaagcaagagacgctcaccgagagcttgaaaagaccacacgaagatgagaaagaggcgatagatgaggccaagaagatgaaagtgccgggagagaacgaggacgaaagcaaggaagaggaaaagagtcaagaactggaagaggcaattgacagcaaggagaagagcaccgacgccagggacgagcaaggggacgaaggtgataatgaggaggaaaacaacgaggaggataatgaaaacgaaaacgagcatacagcaccgcctgcgctggtgatgccctcccccatcgaaatggaggaacagaggatgactgcgctgaaggaaatcaccgacatcgagtacaagttcgcgcaattgcgccaaaaactatatgacaatcaattggtgcggttgcaaacggagctgcagatgtgtctggaagggtcacacccggaattgcaggtctactactcgaagattgccgcgatccgtgactacaagctacaccgagcgtaccagcgacagaagtacgagctttcatgcatcaacacagaaacaatcgctaccaggacattcattcaccaggacttccacaagaaggtcaccgacctgcgagccaggctgctgaacagaaccacgcagacctggtacgatatcaacaaggagcgccgcgatatggatatagtcatcccagatgtcaattaccacgtccccatcaaacttgataacaagacgctgagctgtatcacgggctacgccagcgcagcacagctgtgctatcccggcgagcccgtggcagaggacctcgcttgcgaaagcatcgagtaccgctacagagccaacccggtggacaaactcgaagtcattgtggaccgaatgaggctcaataacgagattagcgacctcgaaggcctgcgcaaatatttccactccttcccgggtgctcctgagttgaacccgcttagagactccgaaatcaacgacgacttccaccagtgggcccagtgtgaccgccacactggaccccataccacttctttttgttattcttaaatatgttgtaacgctatgtaattccacccttcattactaata

SEQ ID NO: 83 - DNA, 1978 bp, Saccharomyces cerevisiae
atgtctggagcaagatcaacaacggcaggtgccgtgccctcggcagcaacaacatcaacaacatcaacaacgtcaaactctaaggactcagactctaacgagtcattatatcccttggctctgcttatggatgagttaaaacatgatgatattgctaatagggtagaagccatgaaaaaactagataccatcgcgttggcactcggtcccgaaagaacaagaaacgagttgattccctttttaacggaagttgcacaagatgatgaagatgaggtgtttgccgttttagccgaacagttaggaaaatttgtcccctacattggcggtcctcaatacgccacaatcctattaccagttttggaaattttggcatctgcagaagaaactttggttagagaaaaggccgtagattctctgaataacgtggcccaagaactttctcaagaacaattatttagtgacttcgtccctttaattgaacatttagctactgcagattggttttcttcaaaagtttctgcttgtggtcttttcaagtctgttattgttagaatcaaagatgattcattgagaaagaatatcctggctttatacttacaactcgctcaagatgatactccaatggtgaaaagggccgtcggtaaaaacctgcccatcttgatcgatctgttgactcaaaatttgggattatctacagacgaagattgggattacatttctaacattttccagaaaatcattaacgataatcaagattctgtcaagtttctggcagttgattgtttaatttccatcttgaaattttttaacgctaaaggtgatgagtctcacactcaagatttattgaactctgctgtcaaattaattggtgacgaagcgtggagggtacgttacatggctgccgatagattttcagatttagcctcgcaattcagttccaaccaagcatatatcgatgaattagtacaaccatttttgaacctttgtgaggacaacgagggagatgttagggaagctgtggctaaacaagtttctgggtttgccaagttcctaaatgatccttcaattatattgaataagatcttacctgctgtgcagaatttgagtatggacgaaagtgaaacagtgagatctgctttggcttctaagattacaaatattgtattactgttgaataaagatcaagtcattaacaattttcttccgattttactgaatatgctaagagatgagttccctgacgttcgtttaaatatcattgccagcttgaaggttgtcaatgacgtaataggaattgagctgctatcagactctttgttacctgccataacagaattagccaaggacgtgaattggagagttagaatggctataattgagtacatacctatcttggcagaacaattaggtatgcaattttttgaccaacagttaagcgatttatgtctttcatggttgtgggatactgtttattctatcagagaagccgcagtgaataatttaaaaaggttaacggaaatatttggctctgattggtgtcgtgatgaaattatttcaagactgctcaaatttgatctacaattactggaaaattttgtctcgaggttcacaatactctctgctctaaccactttggtgcccgtggtatcgttagatgtcgttactgagcaactattaccattcatttctcacttggctgatgacggtgttccaaatattaggtttaatgtggccaaatcctacgctgtgatagtgaaggttttaattaaggacgaggccaaatatgatgcattaattaagaacacaattttaccctcattgcaaacgctgtgtcaagacgaagatgttgatgtaaaatacttcgctaagaaaagtttggcagaatgtcaagaacttttaaaaaattgatactagttcaaatatatacatacatacacatatgtacacttgaatgaataaaaagtatacatattaacaa

SEQ ID NO: 84 - DNA, 482 bp, Saccharomyces cerevisiae
caagcgcaacgtattcattgtccatgtcgtcatctactccctttgacccttatgctctatccgagcacgatgaagaacgaccccagaatgtacagtctaagtcaaggactgcggaactacaagctgaaattgatgataccgtgggaataatgagagataacataaataaagtagcagaaagaggtgaaagattaacgtccattgaagataaagccgataacctagcggtctcagcccaaggctttaagaggggtgccaatagggtcagaaaagccatgtggtacaaggatctaaaaatgaagatgtgtctggctttagtaatcatcatattgcttgttgtaatcatcgtccccattgctgttcactttagtcgatagaagttcactcgcaatgctatatatatagggagcttccatatgtagtgtaggatatatgtatatatacatatatacatatatgggcgtatatttactttgttctta

SEQ ID NO: 85 - DNA, 613 bp, Saccharomyces cerevisiae
aagaaacaagtcgataaatggtacgtttaaaaagtagatatatcctttttgaaattatattcccacctacagacaccaacgttgaggaatctgtgtcgaaagcagacatcttgctttcgcatcacagagcatcgcctgcggatgtgtccataaagtcgatactccaagagatacgacgctcgctgtcgttgaatctgggcgactatgggtctgcaaaatgtaactctctcttgcagttgaaatacttttcaaataagacgtctacggggataatccgatgccatcgagaggattgcgaccttgttatcatggcattgatgttgatgtcgaaaattggcgacgtcgatggactgatcgtgaaccccgtcaaggtaagtgggaccatcaagaaaatagagcagtttgctatgagaaggaattctaaaattctgaacataatcaagtgtagtcaatcatcacacctcagcgataatgactttattatcaatgatttcaagaaaattggaagggaaaacgaaaacgaaaacgaggacgattagaatatattaatatatagatgtacacgtatatgcagtagttttatttttttatctataatacaactcaagcacaa

SEQ ID NO: 86 - DNA, 3134 bp, Saccharomyces cerevisiae
ggaacatcagataagtgaaagatggcgaaaaagagtaaaaagaaccaacagaactactgggatgaggaattcgaagaagacgccgcccagaacgaagaaatcagtgccacgccaactccaaatccagaaagcagcgcaggtgcagatgacacttccagagaagcaagtgcaagtgctgaaggtgctgaggccattgaaggcgacttcatgtctactttgaagcaatcgaagaagaagcaagaaaagaaggttattgaagagaagaaggatggtaagcctatactaaagtccaagaaggaaaaggagaaggaaaaaaaggaaaaggagaagcagaagaagaaagaacaagctgccaggaagaaggcccaacagcaagctcaaaaggagaagaacaaggagttgaacaagcaaaatgttgaaaaagctgctgctgagaaggctgctgctgagaaatcccaaaaatctaaaggtgaaagtgataaaccaagtgctagtgctaagaagccagccaagaaagtacctgccggtttggctgctttgagacgtcaattagaattgaagaaacaacttgaagaacaagaaaagttggaaagagaggaagaagaaagattggagaaagaagaggaggaaagattggccaacgaagaaaaaatgaaggaagaagctaaagcagctaaaaaggaaaaggagaaggcaaagcgtgaaaaacgaaaggctgaaggtaagctattgaccagaaagcaaaaagaagaaaagaaattattggaaagaagacgtgccgctttattgtcttccggtaacgtcaaagttgccggtctggccaagaaggatggagaagaaaacaaaccaaagaaggttgtttacagcaagaagaagaagagaacaacccaggaaaacgcctccgaagccattaaatctgactctaagaaagactcggaagttgtacctgatgacgaactcaaagaatccgaagatgttttgattgatgattgggaaaatttggctcttggtgatgatgacgaggagggaaccaacgaagaaacgcaagaatccaccgcaagccatgaaaatgaagaccaaaatcaaggcgaagaagaagaagaaggagaagaagaagaagaagaagaagaagaaagagcacatgtgcatgaagttgccaaaagcacaccagcagctacaccagcagctactccaactccatccagcgcttctccaaacaaaaaagatcttcgttccccaatttgttgtattttgggtcatgtcgataccggtaagactaaattgttagacaaaatcagacaaaccaacgttcaaggtggtgaagctggtggcatcacccaacagattggtgccacttatttccccatcgacgctattaaggcaaaaactaaagttatggctgaatatgaaaaacaaacttttgatgtcccaggtcttttggttattgataccccaggtcacgaatccttctctaacttacgttcaagaggttcttcattgtgtaacatcgcaattttggttattgacattatgcatggtttggaacaacagactattgaatctatcaaactgttaagagatagaaaggctccatttgtcgttgccctaaacaaaattgatagattatatgactggaaagccattccaaacaattcattcagagactcctttgcaaagcaatcaagagctgttcaagaggaatttcaatctaggtattctaagattcaattggaattagctgaacaaggtttgaattcggaattgtatttccaaaacaaaaatatgtctaagtatgtctccattgtcccaacatctgccgtcaccggtgagggtgttccagatttattgtggttgctattagaattgacccaaaagaggatgtccaaacaattgatgtacttgtctcacgtggaagcaaccattttggaagtgaaagtcgtagaaggttttggtaccacaattgatgttatcttgtccaacggttacttgagagaaggtgaccgtattgtactgtgtggtatgaatggtccaattgtaacgaatatcagagcattactaacaccacaaccattacgtgaactacgtttgaaatctgaatatgtccaccacaaagaagtcaaggctgctttaggtgtcaagattgccgctaatgatttagaaaaagccgtttctggttctaggctgctagttgtcggtcctgaagatgacgaagatgaattgatggacgacgttatggatgatttgactggtttgttggactccgttgacacaactggtaaaggtgttgtggtccaagcatccaccttgggttctttggaagctttgttggatttcttgaaagacatgaaaatccctgtgatgtctatcgggttaggtccagtgtacaagcgtgatgttatgaaagcctccactatgttggaaaaggctccagagtatgccgtgatgttatgttttgatgttaaagtggataaggaagctgaacaatacgctgaacaagaaggaattaagatctttaatgcagacgtcatctatcatttatttgattcatttacagcataccaagaaaagttattggaagaacgtcgtaaagatttcctagattacgctattttcccatgtgtcttacaaaccttacaaattattaacaaacgtggtccaatgattattggtgtagacgttctggaaggtactctacgtgtgggaactcctatttgcgctgtgaaaaccgaccctactacaaaggaaagacaaactttgatattaggtaaagtcatctctttagaaatcaaccatcaacctgtccaagaagtaaagaagggccaaaccgctgctggtgttgccgtccgtctagaagatccctccggtcaacaacctatctggggtcgtcatgttgacgagaatgatacattatactccttggtttcaagaagatctattgacactttgaaggataaagcttttagggaccaagttgctagatccgattggctgctattgaagaagctgaaggtcgttttcggcatcgaatgagcatggcatacgctgacttgtcaacccaatcacattctacaaaatttaatgaattaaataggtaattgtatataaaaatgtgaacctttgtgtattagtttcaa

SEQ ID NO: 87 - DNA, 2711 bp, Saccharomyces cerevisiae
atggtaggatagcaaaagagtaccattgctgttatcatttgttgcctagccctatcaagacctgtctgctaatccaacccgagagatcatggcgatccaaacccgttttgcctcgggcacatctttatccgatttgaaaccaaaaccaagtgcaacttccatctccatacccatgcaaaatgtcatgaacaagcctgtcacggaacaggactcactgttccatatatgcgcaaacatccggaaaagactggaggtgttacctcaactcaaaccttttttacaattggcctaccaatcgagcgaggttttgagtgaaaggcaatctcttttgctatcccaaaagcagcatcaggaactgctcaagtccaatggcgctaaccgggacagtagcgacttggcaccaactttaaggtctagctctatctccacagctaccagtctcatgtcgatggaaggtatatcatacacgaattcgaatccctcggccaccccaaatatggaggacactttactgacttttagtatgggtattttgcccattaccatggattgcgaccctgtgacacaactatcacagctgtttcaacaaggtgcgcccctctgtatacttttcaactctgtgaagccgcaatttaaattaccggtaatagcatctgacgatttgaaagtctgtaaaaaatccatttatgactttatattgggctgcaagaaacactttgcatttaacgatgaggagcttttcactatatccgacgtttttgccaactctacttcccagctggtcaaagtgctagaagtagtagaaacgctaatgaattccagccctactattttcccctctaagagtaagacacagcaaatcatgaacgcagaaaaccaacaccgacatcagcctcagcagtcttcgaagaagcataacgagtatgttaaaattatcaaggaattcgttgcaacggaaagaaaatatgttcacgatttggaaattttggataaatatagacagcagttattagacagcaatctaataacgtctgaagagttgtacatgttgttccctaatttgggtgatgctatagattttcaaagaagatttctaatatccttggaaataaatgctttagtagaaccttccaagcaaagaatcggggctcttttcatgcattccaaacatttttttaagttgtatgagccttggtctattggccaaaatgcagccatcgaatttctctcttcaactttgcacaagatgagggttgatgaatcgcagcggttcataattaacaataaactggaattgcaatccttcctttataaacccgtgcaaaggctttgtagatatcccctgttggtcaaagaattgcttgctgaatcgagtgacgataataatacgaaagaacttgaagctgctttagatatttctaaaaatattgcgagaagtatcaacgaaaatcaaagaagaacagaaaatcatcaagtggtgaagaaactttatggtagagtggtcaactggaagggttatagaatttccaagttcggtgagttattatatttcgataaagtgttcatttcaacaacaaatagctcctcggaacctgaaagagaatttgaggtttatctttttgaaaaaatcatcatccttttttcagaggtagtgactaagaaatctgcatcatcactaatccttaagaagaaatcctcaacctcagcatcaatctccgcctcgaacataacggacaacaatggcagccctcaccacagttaccataagaggcatagcaatagtagtagcagtaataatatccatttatcttcgtcttcagcagcggcgataatacattccagtaccaatagtagtgacaacaattccaacaattcatcatcatcctcattattcaagctgtccgctaacgaacctaagctggatctaagaggtcgaattatgataatgaatctgaatcaaatcataccgcaaaacaaccggtcattaaatataacatgggaatccataaaagagcaaggtaatttccttttgaaattcaaaaatgaggaaacaagagataattggtcatcgtgtttacaacagttgattcatgatctgaaaaatgagcagtttaaggcaagacatcactcttcaacatcgacgacttcatcgacagccaaatcatcttcaatgatgtcacccaccacaactatgaatacaccgaatcatcacaacagccgccagacacacgatagtatggcttctttctcaagttctcatatgaaaagggtttcggatgtcctgcctaaacggaggaccacttcatcaagtttcgaaagtgaaattaaatccatttcagaaaatttcaagaactctattccagaatcttccatactcttcaggatatcatataataacaactctaataatacctctagtagcgagatcttcacacttttggtagaaaaagtttggaattttgacgacttgataatggcgatcaattctaaaatttcgaatacacataataacaacatttcaccaatcaccaagatcaaatatcaggacgaagatggggattttgttgtgttaggtagcgatgaagattggaatgttgctaaagaaatgttggcggaaaacaatgagaaattcttgaacattcgtctgtattgataaataaaactagtatacagcaaatactaaataattcaagaaaaaaacattagataga

SEQ ID NO: 88 - DNA, 1332 bp, Saccharomyces cerevisiae
atgaaaaggtccacgttgctgtcgctggacgcattcgctaagaccgaagaggacgtacgagtccgcaccagggccggcgggctgatcactttatcgtgcatcttgaccacgttatttctgctggtgaacgagtggggacagttcaattctgtggtaacaaggccacaattggtggtggaccgtgaccgacacgcaaagctggagcttaatatggatgtgacatttccatcgatgccatgtgacctggtgaatctcgatattatggacgactctggagagatgcaactagacattcttgacgcagggttcacgatgtctaggttgaatagcgagggtcgccccgtgggagatgctactgagttgcatgtgggtgggaacggcgacggaaccgcgccggttaataacgatcctaactattgtgggccatgttacggtgccaaagatcagtcgcagaatgagaatctagcacaggaagagaaggtttgctgccaagactgtgatgcagtgagatcagcatacttggaggcaggctgggcttttttcgacgggaagaatatcgagcagtgtgaaagagagggctatgtcagcaagattaacgagcacttgaatgaaggctgcaggatcaaaggttctgcacaaattaacagaattcaggggaatcttcactttgcccctggaaaaccctaccagaatgcatatggacattttcatgatacttctttgtacgacaagacttcgaatttgaacttcaaccacatcatcaatcatttgagctttgggaagccgatccagtcccacagtaagttgttaggaaacgataagcgccacggcggcgccgtagttgccacttctcccttggacggacgccaggtgttcccggacaggaacacacactttcaccagttctcgtattttgccaagattgtccccaccagatatgagtacttggataatgttgtcattgagaccgcgcagttcagcgccacttttcattcccgacctcttgccggtggaagggacaaggatcatccaaacacacttcacgttaggggtggtatccctggtatgttcgtctttttcgaaatgtctccattgaaagtcatcaataaggaacagcacgggcagacttggtcgggcttcatcttgaattgtatcaccagcattggtggtgtcctagctgtgggcactgtcatggacaagctattctacaaagcacagagatcgatctggggcaagaagagccagtagaggaagagactgtcatagggaagagccctttctacatactactacataatatatatatatagtatagaaattggtatatcacta

SEQ ID NO: 89 - DNA, 446 bp, Saccharomyces cerevisiae
atgttcaagagagcaatgagcacagatggtcccgtggcacgtaccatcctgaagagactggaatgcggctttccagattacaagaactttgcgtttggcctctacaacgattctcacaagcataagggccatgctggtgtacagggaaatgtctctgctgagacacatttccggattgagatggtcagtaaaaagttcgaaggcctgaaacttccacaacgccatcgtatggtttattccctcttgcaagacgagatggctcaggcgaacggtatccatgctttacaattgtcactaaagaccccacaggagtatgaatccaaagcgaaatagaatgcataagcataagtgtacacgttgagtttattgttttatttcccctacatatatatacatatatatgaaattactttacgtacgtataagctttgttcagtcatcatgaa

SEQ ID NO: 90 - DNA, 2514 bp, Saccharomyces cerevisiae
cccttaaactaaaacaatttgctgcgctataccgtgtttcagtgtattataatacattcatttctgtttcattacgattatattgacgtgataaaaagattatatagccatgatcttcctaaacaccttcgcaaggtgccttttaacgtgtttcgtactgtgcagcggtacagcacgttcctctgacacaaacgacactactccggcgtctgcaaagcatttgcagaccacttctttattgacgtgtatggacaattcgcaattaacggcatcattctttgatgtgaaattttaccccgataataatactgttatctttgatattgacgctacgacgacgcttaatgggaacgtcactgtgaaggctgagctgcttacttacggactgaaagtcctggataagacttttgatttatgttccttgggccaagtatcgctttcccccctaagtgctgggcgtattgatgtcatgtccacacaggtgatcgaatcatccattaccaagcaatttcccggcattgcttacaccattccagatttggacgcacaagtacgtgtggtggcatacgctcagaatgacacggaattcgaaactccgctggcttgtgtccaggctatcttgagtaacgggaagacagtgcaaacaaagtatgcggcctggcccattgccgctatctcaggtgtcggtgtacttacctcagggtttgtgtctgtgatcggttactcagccactgctgctcacattgcgtccaactccatctcattgttcatatacttccaaaatctagctatcactgcaatgatgggtgtctcaagggttccacccattgctgccgcgtggacgcagaatttccaatggtccatgggtatcatcaatacaaacttcatgcaaaagatttttgattggtacgtacaggccactaatggtgtctcaaatgttgtggtagctaacaaggacgtcttgtccattagtgtgcaaaaacgtgctatctctatggcatcgtctagtgattacaattttgacaccattttagacgattcggatctgtacaccacttctgagaaggatccaagcaattactcagccaagattctcgtgttaagaggtatagaaagagttgcttatttggctaatattgagctatctaatttctttttgaccggtattgtgttttttctattcttcctatttgtagttgtcgtctctttgattttctttaaggcgctattggaagttcttacaagagcaagaatattgaaagagacttccaatttcttccaatataggaagaactgggggagtattatcaaaggcacccttttcagattatctatcatcgccttccctcaagtttctcttctggcgatttgggaatttactcaggtcaactctccagcgattgttgttgatgcggtagtaatattactgatcatcacgggacttctggtttatggaactataagggttttcatcaagggaagagagtctctcagattatacaagaatcctgcgtacctactttacagtgatacctacttcttgaacaagtttgggttcttatacgttcaattcaaagcagataagttttggtggcttttacccttattaagttatgcgttcttaagatccctgtttgttgccgttttacaaaaccaaggtaaggctcaagcaatgatcatctttgtcattgaactagcttacttcgtttgtctctgttggataagaccatatttggacaagagaactaatgttttcaatattgctattcatttggtgaatttgatcaatgcatttttctttttgtttttcagtaatttgttcaagcaaccagcagtggtttcgtcagtgatggcggttattctgttcgttttgaacgcggtgtttgctctattcctattattgttcactattgtcacctgtacactggcattactacacagaaacccagatgtccgttaccaaccaatgaaagatgaccgtgtgtcattcattcctaagattcaaaatgatttcgatggcaaaaacaaaattgatcctgaactgtttgaattgagaaaagctgttatggacaccaatgaaaatgaggaagaaaaaatgttccgtgacgacactttcggcaagaacctgaatgcaaacacaaatacagcaagactctttgatgatgagactagttcatcctcttttaagcaaaattcctctcccttcgatgcctcggaagtaacggagcaacctgtgcaaccaacctccgctgtcatgggtacgggtggcagcttcttgtctccacagtaccaacgtgcgtcatctgcttctcgtactaatctagcgccgaataatacaagcacctccagtttaatgaagcctgaatcaagtctctacctggggaattccaataaatcatattcgcattttaacaacaacggcagcaacgaaaacgcccgcaacaacaacccatatttgtaatccaatatatactcacatgtaacaacttattatataaatatttaagggcaagg

SEQ ID NO: 91 - DNA, 1614 bp, Saccharomyces cerevisiae
tgaacggcaacgcatttctaatatagataacggccacacaaagtagtactatgaaattttctgcgtatttatggtggctgtttttgaatctagcgttggtgaaaggcacttcattgctatccaacgttacattagcggaagattctttctgggagcattttcaggcttacactaatacaaagcatttaaaccaagagtggatcacaagtgaagccgtcaacaatgaaggctctaaaatatatggtgcacaatggcgactatcacagggtcgattgcaaggatccgcatgggataaaggaatcgcagttcgaacaggcaatgccgcagctatgataggacatctcttggagacacctattaatgtttcagaaacggataccttggttgtccagtacgaaattaagttggacaattctttgacgtgcggcggtgcgtttattaagttaatgtctggtttcatgaatgttgaagcattaaaacactatgcacccgatacagagggtgtcgagttagtttttggtccggattattgtgctcctgaaataaatggcgtgcaatttgccatcaataaggttgacaagatcacacatgaatctaaactaagatatttgcaagagatgcccctgtcaaaattaactgatacctcgcaatctcatctgtatacgctcataatagatgaatcagcgcagtcttttcaaattcttatagacggtaagacggttatggtaagagaacatatcgaagacaagaaaaaggtcaattttgagccacccattacaccgcctttaatgattcctgatgtttcagtagcgaaaccgcatgattgggatgatcgcatccgaatcccagatcctgaggcggtgaagctcagtgatcgggatgaacgagacccattgatgattccacatccagatggcactgaaccaccagaatggaacagctccatccccgaatacattcttgacccaaatgctcaaaagccctcgtggtggaaggaacttgagcacggggaatggataccgcccatgattaaaaatcctctttgcactgcagaacgtggttgtggccagcagataccagggctgataaataatgccaagtacaaaggtccaggcgaactcaatgaaatcataaatcccaattacatgggggaatggcatccaccggaaattgaaaacccgctatactacgaagagcagcacccattgcgcatcgaaaacgttatcagtggtgtgatcctcgagttttggagtggatctccaaacatgttgataagcaacatttatgttggtaaaaatgtaacagaggcgcaaattattgggaataagacttggctgatgagagaccgcgcgtttagaggctccgatggccccacagaacgcaaattcatgaatagcagactaggaaatctacaaacaactttccataacgaaagagaatcccctaatccatttgaccgcattatagatcgcatattagagcaacctctgaaatttgtgcttactgcggccgtcgtgctcttgacgacgtcggttctttgttgtgtagtatttacatagtggacaagtgttagtttataacatggtctcaataattgcaccacaacggcttctc

SEQ ID NO: 92 - DNA, 740 bp, Saccharomyces cerevisiae
atgtgggaacaaagacgacaaaaggtagttttttccttgactatactggtaagatatcgtctaaaacaaagcatggccaagaaaatatcaaagaattcaagagctgctagacaatcggatgctcttgaaccagaggtaaaggatttaagtgaactacctagagctgaaaaaaccgatttgactaatattttgattagaacagcagccaagaatgaggcattgctggaagcaaagatatctaagaaagccaataaaagtaagaggggcaagaagttaaataaaaaggctctggaagacaaactggacaactctatttcatccatggacagggatcgtttagtgaaggccttgaattttaccaatcgtctggacggtaaaattgccaagtccatttctcgtgccaagtacattcaaaatacaagaaaggctggctgggatagcaccaatgagactataaaaaaagagctggcttttttgaacggagggttgtctgtgcaggcaaaaagtgctagtgaaggtaatgctgaaaaggaagatgaggagatcccagaagtttttgactctttagcagaggataacacagtgcagaagactcctacaaatagattcggtgtcctgccagacgatgttgaagaatagaaaattttcatatgaaaggtcctaggaatacacgattcttgtacgcattcttcttttttctatcttctttcattctttgtacattagataacatggtttta

SEQ ID NO: 93 - DNA, 1353 bp, Saccharomyces cerevisiae
cccttcttctttcttaaaaagtcttagtacgattgaccaagtcagaaaaaaaaaaaaaaaggaactaaaaaaagttttaattaattatgagagctttggcatatttcaagaagggtgatattcacttcactaatgatatccctaggccagaaatccaaaccgacgatgaggttattatcgacgtctcttggtgtgggatttgtggctcggatcttcacgagtacttggatggtccaatcttcatgcctaaagatggagagtgccataaattatccaacgctgctttacctctggcaatgggccatgagatgtcaggaattgtttccaaggttggtcctaaagtgacaaaggtgaaggttggcgaccacgtggtcgttgatgctgccagcagttgtgcggacctgcattgctggccacactccaaattttacaattccaaaccatgtgatgcttgtcagaggggcagtgaaaatctatgtacccacgccggttttgtaggactaggtgtgatcagtggtggctttgctgaacaagtcgtagtctctcaacatcacattatcccggttccaaaggaaattcctctagatgtggctgctttagttgagcctctttctgtcacctggcatgctgttaagatttctggtttcaaaaaaggcagttcagccttggttcttggtgcaggtcccattgggttgtgtaccattttggtacttaagggaatgggggctagtaaaattgtagtgtctgaaattgcagagagaagaatagaaatggccaagaaactgggcgttgaggtgttcaatccctccaagcacggtcataaatctatagagatactacgtggtttgaccaagagccatgatgggtttgattacagttatgattgttctggtattcaagttactttcgaaacctctttgaaggcattaacattcaaggggacagccaccaacattgcagtttggggtccaaaacctgtcccattccaaccaatggatgtgactctccaagagaaagttatgactggttcgatcggctatgttgtcgaagccttcgaagaagttgttcgtgccatccacaacggagacatcgccatggaagattgtaagcaactaatcactggtaagcaaaggattgaggacggttgggaaaagggattccaagagttgatggatcacaaggaatccaacgttaagattctattgacgcctaacaatcacggtgaaatgaagtaatgacaaaataatatttggggcccctcgcggctcatttgtagtatctaagattatgtattttcttttataatatttgttgttatgaaacagacagaagtaagtttctgcgactatatta

SEQ ID NO: 94 - DNA, 1746 bp, Saccharomyces cerevisiae
gcaagatatcctaaaatcgacatccaatgcatcgtaaatcattgaggagggctagcgctactgtgccttccgctccctatcgaaagcagattattagcaatgcacacaataaaccaagccttttctctaaaattaaaactttctttacccaaaaagattcagccagagtgagtccaaggaataatgttgctaataaacaaccacgcaatgagtcttttaacagaagaatctcaagtatgcctggaggttatttccattctgagatatccccagattctactgtaaaccgttccgtagttgtttctgcagtgggtgaagccagaaacgacattgagaataaagaagaggagtatgatgaaacacatgaaactaacatctccaatgcaaagcttgcaaacttttttagtaaaaaaggtaatgagcctttatcagaaattgaaatagagggtgtgatgtcattgttacaaaaatcaagcaaatccatgataacttcggaaggagaacaaaaatcagccgaaggtaataatatcgaccagtcgcttatcttgaaggagtcaggaagtacaccaatcagcatatctaatgcgccgaccttcaacccaaaatatgatacttcaaatgcgtcaatgaatacgactttgggaagcattggttcaagaaaatacagtttcaattattctagcctgccctcaccatacaaaacaaccgtttatagatatagtgcagcgaaaaagatccccgatacatacacagccaacacatctgctcaaagtatagcatctgctaaatcggtaagaagtggtgtttcaaagtcagctcctagtaagaaaataagtaatacagctgcggcattggtctcactattagatgaaaatgacagtaagaagaataatgcagcttcagaacttgctaatccatactcctcatatgtaagccaaatacgcaaacataagagagtttctccaaatgctgcaccaaggcaagagatcagtgaagaagaaactactgttaagccattatttcaaaacgttcctgaacaaggcgaagaaccaatgaaacaactgaacgccaccaaaatttcaccatctgcgccaagcaaagattcttttactaaatacaaacctgcaaggtcctcatccttacgctcaaatgtcgtcgtagctgaaacctcacctgaaaagaaggatggtggagataaacctccatcctctgcttttaacttctcgtttaatacttcaagaaacgttgaacctactgagaatgcttataagagcgagaacgcaccatctgcatcatcaaaggaattcaattttaccaacctacaggcgaagccgttagttggaaagccaaaaaccgaacttacaaagggcgattctactcccgtccaaccagatctttcggttactcctcaaaaaagttcatcgaaaggctttgtttttaatagtgttcaaaagaaatcacggtccaatctttcacaagaaaacgataatgaaggtaaacatatcagcgcctcaattgataacgacttttcagaggaaaaggcggaagagtttgatttcaatgttcccgtggtgtctaagcagctaggaaatggcttggttgatgaaaataaagttgaggctttcaagtccctatataccttttgataatgaaaattttagccgtgacataattaccgtatagcccaactcaatacgtaagtttgtgtaaaataccattccaagatgatattatttagtcattttt

SEQ ID NO: 95 - DNA, 1806 bp, Saccharomyces cerevisiae
tttgtgtatatcagctggttcttttcgttatgaacatccttttacaggatccattcgctgttcttaaggaacatcctgagaagctcacacatacgattgagaaccctttacgcactgaatgtctccagttcagtccttgcggtgattacctggctcttgggtgtgccaatggagcacttgttatttacgatatggatacgttcaggcctatttgtgtcccaggaaatatgttgggagcacatgttcgacccattacatctatcgcatggtctccagatggtagattgttgcttacaagctctagagactggtcaataaaactgtgggatctttcaaagccaagtaagcctttgaaagaaatacgattcgattctccaatttggggttgccaatggctggatgctaaaaggcggctttgtgtagctacgatatttgaggaaagtgacgcatatgttattgacttcagcaatgatccggtcgcaagccttctcagtaaatcagacgaaaaacaattgagttcgacacctgatcatggatatgttcttgtttgtacagtacataccaaacatccaaatattattattgttggaacttcaaaaggttggctagacttctataaattccattctctatatcaaacagaatgtattcattcccttaaaatcacgagttctaatatcaaacatttaattgtctcgcaaaatggtgaaagattagctattaactgctccgatagaacaataagacaatacgaaataagtattgatgatgaaaactctgcggttgagttgaccttagagcataagtaccaggatgtgattaataaattacagtggaactgtatcctctttagtaataatactgccgaatacttagtcgcttctacacatggttcttctgcacatgaactatacatctgggaaacgactagtggaacgttggtgagagtcctggaaggggctgaagaggagttgatagatataaattgggacttctatagtatgagtatagtgagtaatggttttgaatctgggaacgtgtatgtgtggtctgttgttattccgccaaagtggagtgctttggcgccagattttgaagaagtagaagagaatgtcgactatttggagaaggaagatgaatttgatgaggtcgatgaggcagaacagcagcaaggactagaacaagaggaagaaatagctatcgatcttcggacgagagagcaatatgatgttagaggtaataacttgcttgtagaacggttcacaatccctacagattatacgaggataattaagatgcagtcatcataggtttctcttcaaaaggagaaagtttaaataggcaactgacactgaagaggtatagtcatgcctaccgcgatttctttgacacagaattgaaaaattttgcattttttggtaatttcctaataatacgaagtgcaataatctcactttgataggagcacgtcatgatggtaatttcatactactgaacgtaaatgttgaaggtgaatttgtaaagctttgttatttgaagctgtacacctaaagggcggtaaattgttgggtgttagtaccatgccattaattagaatttgttagcatttttattcatttgtgcattatgggttcaaattcatatgactgaacgtgtagtttcatatccagtcatcaagagatgctgaaccgcccttcaaaaacttgacgaaatagaagttttttttttacatttctcatatgttacatagattaaatagtacttgattatttgatacattaagctaacaaagccttggataactca

SEQ ID NO: 96 - DNA, 1052 bp, Saccharomyces cerevisiae
ttacaaagaatacacatacgaaatattaacgataatgtcaattacgaagactgaactggacggtatattgccattggtggccagaggtaaagttagagacatatatgaggtagacgctggtacgttgctgtttgttgctacggatcgtatctctgcatatgacgttattatggaaaacagcattcctgaaaaggggatcctattgaccaaactgtcagagttctggttcaagttcctgtccaacgatgttcgtaatcatttggtcgacatcgccccaggtaagactattttcgattatctacctgcaaaattgagcgaaccaaagtacaaaacgcaactagaagaccgctctctattggttcacaaacataaactaattccattggaagtaattgtcagaggctacatcaccggatctgcttggaaagagtacgtaaaaacaggtactgtgcatggtttgaaacaacctcaaggacttaaagaatctcaagagttcccagaaccaatcttcaccccatcgaccaaggctgaacaaggtgaacatgacgaaaacatctctcctgcccaggccgctgagctggtgggtgaagatttgtcacgtagagtggcagaactggctgtaaaactgtactccaagtgcaaagattatgctaaggagaagggcatcatcatcgcagacactaaattcgaattcggtattgacgaaaagaccaatgaaattattctagtggacgaggtgctaacgccagactcctctagattctggaacggtgcctcttataaggtaggagaatcccaagattcttacgataagcaatttttaagagactggcttactgctaataagttgaacggtgttaacggcgtcaaaatgccccaagacattgtcgacaggacaagggccaaatatatagaggcttatgaaacattgacagggtctaaatggtctcactaacgtgatttacatatactacaagtcgccagtgtaactcctcactgaatatgattcatacatacccgtatgtattaatgtataaatgttctcagagcaa

SEQ ID NO: 97 - DNA, 895 bp, Saccharomyces cerevisiae
caattcaacatgcaaaccccttcagaaaataccgacgtcaagttggatactctcgacgaacccagtgcacatttaatcgaggaaaatgtggctcttccagaggatacattcaattcgtactggagttatatacttaatgaaatcgctcgttgtaaaccgctaatgattatgttcctaatacctgtgtgtttggttttattgattacgttttttcatgatatcaaaggtatccttgtgtttttagtgatttctcttatcctctctattatcattttattgatcggtataactgccttcgtgtctgagaccttgaataagggtttcataattaagcttttagtagaagtcattacacgtaaaccagcagtaggggggaaggaatggagaataatcgcatataatatgaaccagtatctgtttgaccatgggatatggcatactccgtattactttttttgtgaacataggtgccataaatttttcaaaagccttatcaaacagacaaggtcgaatgcacatttgagttcaccaacgaacggtgcagagaatacgcagtcaaacacaccagcaaaagaggtttcaaatgagatggtaaaaccttatatctttagttctgatccagttttagaagcttaccttattaaagctgcggaaattcacaaagaagctgaatttgagtattggagaaagcaatacccagaggttgatttgccttagggccgaatttttggtatttatctagtatattctaatataaaatgtacgagcatcattaacttcaagaacattacgaagcccgcaattaagtgtcagtccatctgggtgtaaaagttatgtacgctcgaaacaaattttatgtagtttactttagatgcaaatgctattatatattttg

SEQ ID NO: 98 - DNA, 950 bp, Saccharomyces cerevisiae
caggataacatctataagtgccatattaaggcaagatatcaattgaccatgcaaacaccttcagaaaataccgacgtaaagatggatactctcgacgaacccagtgcacatttaatcgaagagaatgtagctcttcccgaagacacattcagttcacatctgagttatgtactttatgaaattgctcattgtaaaccgatcatgtttatgatcatcataatcgtgagtttgatctcattgattgtgctttttcatgataacgacgggtgcactgtgatcttagtgatgtcccttatagtagcctccatggctttaatggtggttgcagcattcacattcgggaaagcgatcactgaacaggagttcatgataaagcttttagtggaggtgatcgcacgcaagcctgcggggaaggaatggggtactgtcgcatataatatgaaccaatatctattcatgaagagactatggtataccccgtactatttctatagcggcaagaagtgccatgagttcttcaccactcttatcaaggaagtgaattctggttcgcactcggattcctcatcgaatagtgccgaggatacacaatcacctgtctcagcagggaagacttcaaatggtctaaacaacttttatagtattagatcagaccctattttgatggcatatgttttgaaggcaacacaaatagaaaaggaggctcaaagtgaatactggagaaagcaatatcctgacgctgatttaccttgaagcggaagcattttattcaccaagtatacttacttttctttaaaacgagaacaagaatcgaattcaagaacatctcgaagccagaattgagcatcatatattcgagctgtacaaacatcatggcctacaactatcgtatttgtaagtttttttagaggttttcatatttgtttaataagggttctgtcagtttttgt

SEQ ID NO: 99 - DNA, 486 bp, Saccharomyces cerevisiae
atgccacaagtacagtcgtggtttcctgttcagaaacaaccgacgctagcggtaacatttacaccattaccacaactgtcccatgctcatctaccactgccaccatcacatcttgtgacgaaaacggatgccatgttccagcaccaactgctaccgacgcaactgcaaccgtttcctccaagtcatacaccactgttactgttactcactgtgacaacaatggctgtaacaccaagactgtcacttctgaatgttctaaagaaactgcagcaaccaccatttctccaaaatcatacactactgttaccgttactcactgtgacgacaacggctgtaacaccaagactgtcacttccgaggcttccaaacaaacatcattggccactagcacagtcaccaagtctgctgctccaacttctcatactgctgcttccagcaccttcactggtattgtcgttcaatccgaaggtatggctgctggtttga

SEQ ID NO: 100 - DNA, 1404 bp, Saccharomyces cerevisiae
atgttgaagtcagccgtttattcaattttagccgcttctttggttaatgcaggtaccatacccctcggaaagttatctgacattgacaaaatcggaactcaaacggaaattttcccatttttgggtggttctgggccatactactctttccctggtgattatggtatttctcgtgatttgccggaaagttgtgaaatgaagcaagtgcaaatggttggtagacacggtgaaagataccccactgtcagcaaagccaaaagtatcatgacaacatggtacaaattgagtaactataccggtcaattcagcggagcattgtctttcttgaacgatgactacgaatttttcattcgtgacaccaaaaacctagaaatggaaaccacacttgccaattcggtcaatgttttgaacccatataccggtgagatgaatgctaagagacacgctcgtgatttcttggcgcaatatggctacatggtcgaaaaccaaaccagttttgccgtttttacgtctaactcgaacagatgtcatgatactgcccagtatttcattgacggtttgggtgataaattcaacatatccttgcaaaccatcagtgaagccgagtctgctggtgccaatactctgagtgcccaccattcgtgtcctgcttgggacgatgatgtcaacgatgacattttgaaaaaatatgataccaaatatttgagtggtattgccaagagattaaacaaggaaaacaagggtttgaatctgacttcaagtgatgcaaacactttttttgcatggtgtgcatatgaaataaacgctagaggttacagtgacatctgtaacatcttcaccaaagatgaattggtccgtttctcctacggccaagacttggaaacttattatcaaacgggaccaggctatgacgtcgtcagatccgtcggtgccaacttgttcaacgcttcagtgaaactactaaaggaaagtgaggtccaggaccaaaaggtttggttgagtttcacccacgataccgatattctgaactatttgaccactatcggcataatcgatgacaaaaataacttgaccgccgaacatgttccattcatggaaaacactttccacagatcctggtacgttccacaaggtgctcgtgtttacactgaaaagttccagtgttccaatgacacctatgttagatacgtcatcaacgatgctgtcgttccaattgaaacctgttctactggtccagggttctcctgtgaaataaatgacttctacgactatgctgaaaagagagtagccggtactgacttcctaaaggtctgtaacgtcagcagcgtcagtaactctactgaattgacctttttctgggactggaataccaagcactacaacgacactttattaaaacagtaa

SEQ ID NO: 101 - DNA, 1091 bp, Saccharomyces cerevisiae
aattattagaagtgaaaaaaaaaaaaaagaagaacaatgaaatttagtctcactttagcgtgatatataaaacgtaaaatgtcgaagccaacgtaaaattaaaaacattttgatgtcacaatgaaagaactccaaagtagagcttgaattataaattagcattttaccgatgtccagtaaagctaccaaaagtgacgtagatccattgcactcgtttctggcagggtccctagccggtgctgctgaagcatgtataacatatccttttgagtttgccaaaacaaggctgcagctgattgataaggcctccaaggcatcaagaaatcctctggtattgatatataaaactgcaaaaactcagggcattggttccatttatgtcggatgtcccgcatttattattggaaacaccgctaaggcgggtattagatttcttggctttgataccattaaagacatgctaagagatagtgaaactggagaactaagtggtacaagaggggtgatagctgggttaggtgcgggactattagaaagtgttgccgcagtgactccttttgaagcaatcaaaactgctttgatcgatgataaacaatctgctacaccaaaataccataataatgggcgcggtgtagtacgaaactattcatcattagtccgtgataaaggattttctggtctttatcgtggtgttttgccagtttccatgagacaggccgcaaaccaagccgttagattgggttgttacaataagattaagaccttgatccaagattatacggattcgccaaaagacaaacctttatcatccgggttaaccttcttagtgggtgcatttagtggtattgtgacggtctattccaccatgccccttgatactgtgaaaacaagaatgcaaagtttggattccaccaaatactcctctacaatgaattgttttgcaaccattttcaaagaagaagggttaaagacgttttggaaaggtgctacgcctagacttgggagattggtcttgagtggtggtattgttttcactatctatgaaaaggtcttagttatgctagcctgaaatgtattattgtgtacaatat

SEQ ID NO: 102 - DNA, 1560 bp, Saccharomyces cerevisiae
tgtaaaccttaccaacccaaccaaaatagatgtatttgtcattctatatcactgatacaaagaacaaacttattttccagtatcttttaggtgcaacagctccctccttcaagcacctgtggacccgcgttcgtaccacatgtcctcaattgctcgaagatagcagtagtgatgattatttagaccattcaatggttggaagagatttagaggtctataagtatttctcagttataaataagctcaattattggtgcttagcctccacttcgaagtcaaaaggcccgcttgattgttttacctttttagagactatagatcgtatcctgttagaatattttgacaaggataaattaagtatcaagaaaattgttaataattatgatagaatcagtttgatttttaactgttgcgtcgaagcgggtgaaccaaatgtgagtgatatgctctatgttaataaaattaaagaagctgttcctgaaagatcggatttatcgaagttcataagttctacagcccataatttacagcaggctgtgcaactcccacaacaaaggcaacagcagctacaacaaaatcagatttctcgtggtagtaattcactaatcgaaaatgaagagattgttccctggagaacttcaagggctagcaaacatgagaataatgagctttatgtggatttgttagaaacattccatgttgtatttgaaaagaaaaaatcacatctaaggttgctcactggaagtatccatggaatagtggacgtgagatcttatttgaatgataatcctctagttgcagtaaaattaaacactatgggaaatgatataggtatacccagtttgcatgactgtgttgaaatcaatgatggtgtgttttctccctctaatataacgtttataccaccagatgggaagttcagattgctggagtattccgtcgatttaagttctcaagtaaagcaatccggagtaaggatgaattctattggcttgatgtctttacacttccaaaatggattgggtaaagattctgatgaatttgagttatccttaaatattgaaaatttcaaaaaagtttcacaagttgatgacctaaaaatagatttacagttcaatgttgagaatgctgatccaaatgaaatagcatataagataaaaatattgcgcaatactcatggccgttttgaaaatagcattatcatgggtcaaggacaatggatttttgataaatcaactgccactggaacggtacctgtactacgtggctgtattgagtatgaaaatactgggccaaattttacaaaaaaagttgatttacaaacagtctccttagaatattcttacataggacaatcggccagtggaatctatgtagaagccatcgatattgtatctggattaacaattggcaaaaatacaaagctgtacaagggtgcaaagtataagacccagacaggcaattttcaagtaaggctgtagttatatgtgtacttgaaattccatgcgaaactaaatagaatataatgagaatataagtcttggaataaaaaaggaatat

SEQ ID NO: 103 - DNA, 1760 bp, Saccharomyces cerevisiae
aagtaagatcgaatacactgcagaaaagcttgctcttttttttttctttgcttgggttgggtggtttttcatagctttattgaattgaatccattactcgtacgcattttttagcacatttgcccccgccactctccattgttttagtatgtctggttttcgtctaattgatatcgttaagcctatcctaccgattttaccggaagttgagttaccttttgaaaaattaccatttgatgacaagattgtctatactatttttgcagggttaatttacctttttgcacaattcccacttgttggtttgcccaaagctaccacacctaatgttaatgaccccatttattttctaagaggtgtatttgggtgtgaaccaagaaccttgctagaatttggcctttttcccaacatttctagtgggttaatcttacaattattagccggtttgaaagtaattaaagttaatttcaagatccaaagtgatagagaattatttcaaagcttaacaaaagtttttgccattgttcagtatgtgattttgaccaacattttcatatttgcaggttattttggtgatgatttatctgtggtacagatcgggttgatcaactttcaattggtcggtgctggcatattcaccactttgttagctgaagtcatcgataaaggatttggattttcttctggagctatgataatcaacactgtggtaatcgccactaacttggtggctgatacttttggtgtttctcaaattaaagttggcgaggacgaccaaaccgaagcccaaggtgccctaatcaatttgattcaaggtttaagatctaagcacaagacatttattggcggcatcatctctgcattcaacagagactatctaccaaacttgacaactactattatagttttggcaattgccattattgtgtgctatttgcaaagtgtccgtgtagaattgccaatcagatcaacaagagcccgtggtacaaacaatgtttacccaattaagctactatacactggctgtttatctgttttgttttcttacaccatcttgttctacatccacatttttgctttcgttttaattcaattggttgccaagaatgaaccaactcacatcatctgcaaaataatgggccactatgagaatgctaataatcttttagcagtcccaaccttcccattatctcttttggctccaccaacatctttcttcaaaggtgtcactcaacaacctttaaccttcatcacctattccgcctttatattggttactggtatttggtttgctgataagtggcaggctatttcaggttcctctgctcgtgatgtagccttggaattcaaagaccaaggtatcactttgatgggacgcagagaacagaatgtcgctaaagaattgaacaaagtcattccaatcgcagctgttacgggtgcatccgtcttaagtttgatcaccgttatcggtgaatctttgggtttgaaaggtaaagctgctggtatagttgttggcattgctggtgggttttctttgctagaagtcattaccattgaataccaacaaagtggcggtcaaagtgctttgaatcaagtcttgggtgttccaggtgctatgtaaacaaagaaaagaaaaaaaagaaggaaaacaaaaaagaagatcaaattctctctgctacgcgcatttatatacgtacgaactttttgctcttcttttagatttatatgtatctatatttaactcaaagaaagatgacata

SEQ ID NO: 104 - DNA, 2551 bp, Saccharomyces cerevisiae
aaagaaacaccaaccataaaagagagattgtcattgaggtagaaggggcgggtatagaaaactagagcaacaaccatggttttggaagtgccctcaatcacacctggtgaactgcatgatcttatgcgactacatcaggatgcagaatggcctgaatgtaaaaaaatgttcccctgggctcatgatatttcctttggtcaaccacccgattttcctcattctcttgcaatagtcaaatcgcaatcagatgctaacaattctgcgcttttgcgtaattctctcgaagtgaatgatatcttccagtcctggaaagttcgcacttcctttcatagagagggcgatacctgtgaaactggaaatgattctaatggttttcaatatcccaataacacaaaggaacttttgaacttgctaaagtttcagatacgacaattggaattgcaagtggatgatgttgctttggaaaacgctgctacttattgtcacaatcatagcattttaccatttctgaaagtagatcctcgtggactatcattagaacttaaaaggtattctagaaacaaggttgggtctaataccacgctaaaacggagtgggcaggacgtctggggaaggagaggtctattccgaaggttcgacctgcaatgtgccaagatgatagaaatggttgataatatagtaatttattgttcgcggactggtggcagcactgatatgcaaacagaatcagcgccagcgtgctcacacgagggaaattgccccaattgtacaacccttgcactacttttacagatctgtttaatgtttgttcaaaagggttatgtagggagtggaggatcgctttacaagacgaatctttttatttgcacttatcagaatttcaatacagatatacctcaaactttgattggtacacctttattagacaacgaatttttcaagaataatactcccttgaatttatgttcgtcacctagtgaaatagtgtgtttcaataacgttgataagaatatggttttgtgcgagaagttagagttgaataagctgacttcagctacacgattggaggaaacagggttgatttgcggtaacaccactgattggcataattatcaaataattaaaaaaaacaatatatctctgacccaccgtttcgaagagaatacaagcatagtaaatttaaagtctctaaattatgatacggacaatccgacaacctccatttctcaactgtataacataccgaatacaaaagaggtgtggaaattgatcataaaatgtacgtcaaactcgcaaatgccgtcgttaacgaaaatccgaacatatctagatcttttattagacgatgatgcgtcaaaatcacaagagcatttgcatttgactttccctgcctcaggtagtataggtttggggaacttaaacattcagtctgtggaaattcttttgaatgtttgttatttaatatttcaagtatcccaagttcaagaattattgacgttcatgtattgcgaagacggatatacagaaacgtcattattattaacagcttatattatattccactttaatattccgttacaagacgctcttttgaggatccatccaagaccatttttcctttttccatcagacttgcaaattttaggccatttacaacctgtcctgcgggagtttagtccgcagaatggaagtaatctaaaattatatgccaatgcattgaaatttagggataaaagctttcaattacacatttcttcagagctttttagtagcatattttttatgaagattcctcttgagtctaatttcgttaatttgaagggcccactgccatcccggattctacgtcacttgtatttgggatccctggatcatgcacaaaatcctgccttacttaagtctctaggaattacgcatatagtttctgtcggtgaagttgtttcatggacattgaataaggataaaattgctcatcctgtaaggccacatcgtgcaataactatgacgaataccaatgaagttgcaggtaatactacatgtaataaaagcagaaatagagctgatactgtggtcagcgataagcaagaaaatggcagcaacgtagtaataagtgaaaattctggatttcaaatttgccagatcgaaaatctagatgacaacggcaaagatccgcttttccaccaaatagacaaagttttggattttattagcaattccgaagcaacaggagggaaagttctggtgcattgtatggtcggagtctccagatctgcaacagtttgtatagctgaatgtatgagatatctccagtgtgacctggcaagtgcgtatttgtttgtgagggtacggaggcttaatgttatcattcaaccaaacttgttcttcgtatatgagctcttcaaatggtggaaaaagcattataatcgcgaaaaagacaaaactatggattggcacatcatctgtaggggtatcgctgaggttaatatgaagtacacatgaactttgttatataagtatacgtacaactgtataatacgtaggaaaattacca

SEQ ID NO: 105 - DNA, 1438 bp, Saccharomyces cerevisiae
gcaaggatagctaaaccaaacagccgtaaccaaatgttagaagcactgtttagagattctgtggaagaagcaataaacgattccatcaaggaaggcgttgtgctggccgtttacaacactgcacgggatgaccagtggctgaaaagttggtttaaaggagatgatgtctcattagatactttagcggaacatagtatttggttgaggttggtcaaagacactgagcagttccagttatttgagcaagtatttcctaatgtagttgtacccagtatatacttgatacgtgctggaaagatagaattgattattcaaggcgaggatgaccgacattgggagaagttgctggcgtgcataggcatcaaagacaaaaaggctggtgagagttcgtccagggaaaccaatccaggtttggctagagaagaaaagtcatccagagacgtccataggaaaaatgcaagagaacggattgctgagactaccttagagatccaacgtcgtgaacaactgaaacaaagaaagctggctgaggaggaaagagaaagaattataagacttgttagggcagaccgtgcagaaagaaaagctcttgatgaaactcatcacagaacccttgatgatgataagccattggatgttcatgattacataaaagacgcacaaaaactgcacagcagcaaatgcgtcttgcaaatcaggatgactgatggcaagactctaaaacatgagttcaactcgtctgaaacattaaatgacgttagaaaatgggtggacgtcaacaggacagatggagactgcccgtactcattccacaggggcattcccagagtgacatttaaggattctgatgaattgaagacgctagagacactagaactaactccaaggtctgcattattacttaaaccactagaaactcaaaactcggggctatctgtgactgggatggagggaccaagccttttgggccgtctttataagggattctctacgtggtggcacaacgataaagatcctgaagtaacatcacaacgtgaggaaacatcgaagccgaatcgtcacgaagtgaggtcttcaacacctttatctggagctgcttcgtcaagctgtttccaatacaacaatgttcgggaaccagttcaatcatctgctcatgcatcaccaatgctgacacctagcggaaccaggtacccatcggaaaccaaccttactacgtcacgttctgtctcgccaaatgttttccaatttgttaacaacgatcatcaagaagatcctgaagacccaacaacctttaatggtaataatgtccatttagaaaagaaaaaggacgaagataaaaaataagtagttaatggcttcaactccatttatgactagtattagacgtgaattttttttgattagattacataaaaaaatatacagtaattttatttac

SEQ ID NO: 106 - DNA, 1611 bp, Saccharomyces cerevisiae
atgagtgagaaagaaacaaattacgtggaaaatctccttacgcaattagaaaatgaacttaatgaagataacttgcctgaagatatcaacacactattaaggaaatgttctttgaatcttgtgactgttgtctcccttccagatatggatgttaaaccactactggctacgatcaagcgttttctgacgtctaacgtatcctatgattcattgaattacgattaccttttggacgttgtggacaagcttgttcccatggctgattttgacgatgttctagaagtttatagcgcggaggacttagtgaaggcccttaggtcagaaatagatccattaaaagtagcagcatgtagagtcattgagaattcgcagccaaagggtttattcgcgaccagtaatatcatcgatattctattggatattctatttgatgagaaagtggagaatgataagctcattacagcaatcgaaaaagcgttggaaaggttgagtacagatgaattgattaggcgtcgattatttgataataatttgccatacctggtgagcgtaaagggtagaatggaaacggtttcttttgtcagattaattgacttcttgactattgagtttcaattcatcagcggtcctgagttcaaggatatcatattttgctttactaaagaagagatactgaaatccgttgaagatatcctcgttttcatcgaattggttaattattatactaagtttttgctggaaatacgaaatcaagataaatactgggctttaagacatgtaaaaaaaatactgccagtatttgctcaactttttgaagacacggagaactatcctgatgtcagggccttttctacaaattgtcttttacagttattcgcagaggtgtcacgaattgaggaagatgaatattctttattcaagactatggacaaagattctttaaaaattgggtccgaagcaaaattaataaccgagtggttggaattaattaatccgcagtacttggtaaaatatcataaagatgtggtcgaaaactattttcacgtcagtggctacagcattggaatgttgagaaatctttcagcagatgaagaatgtttcaatgctataagaaacaagtttagtgctgagattgtcttaagactaccgtacttagaacaaatgcaagtagtagaaaccttgacgagatacgaatacacttcaaaatttctgctcaatgagatgccaaaggtgatgggcagcttgataggtgatgggagcgcaggtgctattatagatcttgagactgtgcattataggaattctgccttgagaaatttactggacaaaggtgaagaaaagttaagtgtatggtatgaacctttattgcgagaatactccaaagcagttaacggaaaaaattattccacaggcagtgaaactaagattgcagattgcagatgattatgttgcataagcgcaactataaaggcggccttgattgtttaatgtactaccagtattgattcctgtctgaatcaaaaactaaccttttggcgaggtggcccattcagttttcttctccataaattgtataaatcagtatgtaaggtctggcaagtacttataatt

SEQ ID NO: 107 - DNA, 549 bp, Saccharomyces cerevisiae
actaatgttgtgcgccatcaaaagcacaggttatcggtatcctcgcacgggagccttaaatctactacgtggacgaccatttaatatggccacccgaaaaataactactgaaaggatccccggccctcccaagctgccaagagaagagcaggaagagttcgaaagacttcagaggattgccacatcgcaagaggcaatagatcagtataatgcgcaggccaccggcgatcgtacaaaggagagtttgaattcaccgcttttaaccaaaaacgatattgggtcattctcgcctgaattttccaagaccatacctgaattcgaaggtgatgttaaccccaagactggtgaagttgggggtcccaagcaggacccgttgagacacggcgattattcgtttaacggaagagtaacggatttctagatatttggtccggccaatttttaataatactattcttatttgatgaaactgcgtaacgttcaatttacttttcaatatgtatgttgttatgctttattttgaatatataatatatatatgtgtgtgtt

SEQ ID NO: 108 - DNA, 735 bp, Saccharomyces cerevisiae
atttttcatttttttgttttttttttgtcgtttattgttttttagccttacgtttcacgttaaggaacaatgatagtaaaattactccaggaaatacaagtagcacaaaatacggaggaatacgatatggaagcaaccatcaaagtggtactgctaggagattcatcagtggggaaaaccagtatagtgactaggctcaaatcaggtaagtttctagcaaaacatgcggctacgataggtgcggcgttcatcaccaagacaatcgaggttccttctaacgactcctctacggagaaacgtatccatatggagatatgggacacggcgggtcaggaacggtataaatcactggtgccaatgtattatcgagatgcgaatattgctttgattgtattcgaattgggagacgtatccagtctgcaatgtgcaaagacatggtttcaagatttacaggaccgtgctcagggaacgcaggtaattatcgtgggcaataagtacgatttagtctgcgaagagcattcaggggaagtgactataccggcggagttacagggtctgccgtatgtggccgtaagtgcaaagacagggtacaatttcgatacattgaataaaataataatcagtttggttcccgaaagtcaattcaagacattgtcaaagaacaatgaacagggaaatatactggaaataaataaaaaaaaaagcggcagtggctgtatatgttaatacataaag

SEQ ID NO: 109 - DNA, 420 bp, Saccharomyces cerevisiae
actaagaaccagcagataacggagagaatcatgtcgaaattgggtccgttagcaagatctgtgaagtggactctctctgtgggagtaatcggttctgttttttacctgtaccgatacagtaacaatggctacttctacgatcacgatgctacatggttgaaacaagatcatcaggtacaggacctggtggatagaaaagaagtggtacctggggagaccaggaaccgcaagctagttgtgacggatgatggcactgcatggagcaggaccatgggggagagcataaaagatatttggaatgaacagataagaaactctgtcgattggatctactcctggggtaagaattagcgagctttctatttctcctactgtaacgaacatcctcatgtatataacctattgtaacgactctgtgta

SEQ ID NO: 110 - DNA, 834 bp, Saccharomyces cerevisiae
ccaagaaagaatacataaacaacaacgatggacgtgcctgcagattcccatatcaaatacgaagatgccatcgactattggacggatgtggacgccactgtggatggtgttctaggtggatacggagaaggtacagtagtacccacaatggatgtcctgggatccaataacttcctgcgtaaactgaagtcgaggatgctgcctcaggagaacaacgtgaagtacgctgtagacattggtgcggggattggacgtgtaagcaagaccatgcttcacaagcacgccgctaagatagaccttgtagaaccggtaaagccttttatcgagcaaatgcacgttgaattggctgagctgaaagacaaaggccaaattggacaaatatatgaagtagggatgcaggactggacccccgatgccggcaagtactggctgatctggtgccaatggtgcgtgggacacctgccagatgcagaactcgtcgcattcctgaaaagatgtattgttggtttgcaacctaatgggacaatcgtggtcaaagaaaataacacacctacagataccgatgatttcgacgaaacggattcttcggtcacaaggtcagatgctaagttcaggcaaatcttcgaagaagctggcctaaagctcatcgccagtgaaagacaacgtggcttaccaagagaattgtacccagtgaggatgtacgcactcaagcccatgccaaactaggatcaaggatgcatagatttatatagatacgccccttttcttgtgctggcattcaccatttgtgccattatatagacttttttttcgatatatatggaaaaagaaccc

SEQ ID NO: 111 - DNA, 2123 bp, Saccharomyces cerevisiae
gagaagtgatatagacaagatggaagagactgcgaagaaaccagctagtgccacagtaagtgcgaagtcgtcgcacgatggtggcaccgacgatttggcgcacctttttagcacgccagagatcaagaaggtgctaaattccgatgtggcaattaacgctttgttgagccgtttaaagcagtcgttgttgacttgtgaagagtttatgaaatttattagaaagaaatacgccttcgaagaagagcacgttcaggagctctccaagcaatataagcactttttcaacattcagggttccacaaattcatccttaaaaaagatgattcacgaagttttgggattcgatggcaagatggctcaagtaaagcagagttatatcaccgccttgcagaaaatgtactccgagattagtagtcttttattaacaatgacaaaattaagaaagtctgtcaaggagaacagcaaaaggctggaaaaggatgtttctgatgccatacacagcgcagaaaaggcgcaatctcgttacaattcgttgtgccaagattgggacaaattgaggatgactgacccaacaaaaacaaagctgaccttgagaggttccaaaactacgaaggaacaagaagaagaattgttaagaaaaatcgataacgccgatctggaatataagcaaaaagtagatcattctaattctttgagaaacacattcataacgaaggagagacctagaattgttcaagaattaaaagatttgattttagaaatagacacagcgatgactatccaattgcagaagtacacgatatggacggaaaatttggttctgaatacaggtgttacaataagcccattggactccaccaaatctatgaaatcatttgctggatctgtttccaatgaacgtgatctttacagttttttgaacaagtataaccaaacaggaaaacattccctactgatcaacaaaaacttgatccctgtatcatacaaaaagcatccatcaatgaatcatggtcagaaaaataagagccccccaaagtttgccgtggacccttcaagaaactccatcccgaagagaatgatatccactcataatgaatctccatttttgagcagtagtagtaacactgccgctgttccgaatgctaatcttaacagtgctacaccgtccttaaataccaacaagcagttaccacctactatggcttcatctatttcttccactagcaatgcggctggcgctatgtcaccgtcttcttccattgtaacaagcgacaccacatcatccataacaaagaccctggatcctggcaacaatagtccacaaattccagaagaattgattaactctttagactcggatcgcccgatttctcacattcagactaacaacaatatgccacccggtgttcaaaaaaatttcaaaacatttggtgtaccgctagaatcactgatagaattcgaacaagacatggtccctgcgatagtgcgccaatgcatatacgttattgataaatttgggcttgatcaagaaggaatttatagaaaatcggcaaatgtacttgatgtcagcaagttgaaggaggaaattgataaggatcccgcaaacatttccatgattctaccatcaaagccacattctgattcggatatttatttagtaggatcactgctgaaaactttttttgcgtcgctgcctgatagtgttttaccaaaggccctatcatcggagatcaaggtttgtttacaaattgaagacccaacaacaagaaaaaattttatgcacggactaatatataacctccccgacgcacaatactggacgttaagggctcttgtctttcatttgaaaagagtgttggcacatgaagcccaaaacagaatgaatttaagggctctttgtataatttggggtccaactattgcgcctgcaaatccagatgacgctaatgatgtaaattttcaaattatggcaatggaagtattattagaggtttcagatcaagcttttgagcctgaataaacatagcacttatgatattttcattccgtctttaatttccacttgtatgtacattgacgctgttatcagatttaagtaaaaacaaaggaaaattatatattga

SEQ ID NO: 112 - DNA, 769 bp, Saccharomyces cerevisiae
tgagatcgtaaccatagcacaatgtttactggtattgtagaatgcatggggactgttttggaaaacaacccatatgatgactctgaaagtggaggtcaaggagtttctattactattggcaatgcggggagtattctcaccgattgtcacgttggagattcaatagccgtaaatggggtatgccttactgtgaccgagtttaataacgactccttcaaagttgggatatcaccagaaactataaaacgaagtaatgtcgcttcctggattcaaggcacccaggtcaacttggagagagcggtatctcaagacgttaggttcggtggtcattatgtacagggtcacgtagacactgttgctaatattgtctcaagaagacctgaggggaattcaattatttttgggtttcagttaagagatcaagagtactttaaatacatagtagaaaagggattcatttgtatagatggaacttccttgaccataatcaaggttgacccactttcgcaaggtggagccttctatattagtatgataaagcacacccaagacaatgttatcatgcctttgaagaaaattggcgacgaggttaatattgaagtagatttgactgggaagattattgagaagcaaattctattaacgttggaaaaccaaatatcaaagaaagatagtactttgaatactatgatctcaaacattatcgaggagaaggttagaaactacctaaataaataaataaaaaattcgtcataaataggtttcataa

SEQ ID NO: 113 - DNA, 672 bp, Saccharomyces cerevisiae
attgagatgcctcagtattttgccattattggtaagaaggacaatcctgtctatgaaatcgagtttaccaatgcagaaaatccacagggttttcctcaggatttaaaagaattaaatccgttcatactgcatgcatcactagatatcgtagaagatttacaatggcaaattaatccgacttcacagttaaatgggaacggtggaaacggatccaatggcggtggtgggttccttcgatctagagctgtaaacaatactgataattgttatctaggtaaagttgatcatttttatggactagcaataacggcttatattagctatagtgggatgaagttcgtgatgatccatgggaactcagccaacagtagcgtagttattgacgacaataatatgaggtcattctaccaagaggtacacgaactatacgtaaagacactaatgaacccgttttataagattacagaccctattaggagcccggcattcgactcgagggtaaggacattagcacgtaagcatttgtccaaataatgggaaataagatagatgcagagattttttatggcgtatatgtatatgtagtatgtatttttttttttttttggccaaataatagataaataccgcctttttacgtagttttttccgccacgaacgtttctatacagt

SEQ ID NO: 114 - DNA, 1338 bp, Saccharomyces cerevisiae
tatcgtgttaattcctctttcgtcatttttagcatcgttataagagtaattaagaataactagaagagtctctctttatattcgtttattttatatatttaaccgctaaatttagtaaacaaaagaatctatcagaaatgagtgaatctccaatgttcgctgccaacggcatgccaaaggtaaatcaaggtgctgaagaagatgtcagaattttaggttacgacccattagcttctccagctctccttcaagtgcaaatcccagccacaccaacttctttggaaactgccaagagaggtagaagagaagctatagatattattaccggtaaagacgacagagttcttgtcattgtcggtccttgttccatccatgatctagaagccgctcaagaatacgctttgagattaaagaaattgtcagatgaattaaaaggtgatttatccatcattatgagagcatacttggagaagccaagaacaaccgtcggctggaaaggtctaattaatgaccctgatgttaacaacactttcaacatcaacaagggtttgcaatccgctagacaattgtttgtcaacttgacaaatatcggtttgccaattggttctgaaatgcttgataccatttctcctcaatacttggctgatttggtctccttcggtgccattggtgccagaaccaccgaatctcaactgcacagagaattggcctccggtttgtctttcccagttggtttcaagaacggtaccgatggtaccttaaatgttgctgtggatgcttgtcaagccgctgctcattctcaccatttcatgggtgttactaagcatggtgttgctgctatcaccactactaagggtaacgaacactgcttcgttattctaagaggtggtaaaaagggtaccaactacgacgctaagtccgttgcagaagctaaggctcaattgcctgccggttccaacggtctaatgattgactactctcacggtaactccaataaggatttcagaaaccaaccaaaggtcaatgacgttgtttgtgagcaaatcgctaacggtgaaaacgccattaccggtgtcatgattgaatcaaacatcaacgaaggtaaccaaggcatcccagccgaaggtaaagccggcttgaaatatggtgtttccatcactgatgcttgtataggttgggaaactactgaagacgtcttgaggaaattggctgctgctgtcagacaaagaagagaagttaacaagaaatagatgtttttttaatgatatatgtaacgtacattctttcctctaccactgccaattcggtattatttaattgtgtttagcgctatttact

SEQ ID NO: 115 - DNA, 1790 bp, Saccharomyces cerevisiae
gttttaaaagaaaagaggcagctattgaagtagcagtatccagtttaggttttttaattatttacaagtaaagaaaaagagaatgccggtcgttcacgtgattgacgttgaaagtggtaacctacagtcactaaccaatgcaattgagcatttaggttacgaagtacaactggtgaaatcaccaaaggattttaacatatcaggcacgtcaagattgattttgcctggtgtcggaaattatggccatttcgtcgacaatttatttaatagaggattcgaaaagccgataagagaatacattgaatctggaaaaccaataatgggaatttgcgtcgggctacaagcgctctttgccggttccgtggaaagccctaagagtacgggtctgaactacattgattttaagttgtccaggttcgatgattcagaaaagccagtaccagaaataggttggaattcttgcattccctcggaaaacctattctttggattggatccatacaagaggtactatttcgtccattcttttgctgccattctgaattcagaaaagaaaaaaaacctagaaaatgacggttggaaaattgcaaaagctaagtacggttcagaggaatttattgcggcagtcaacaagaataatatattcgctactcagttccatcctgaaaaatcaggtaaagctggtttgaacgtcattgagaattttttgaagcaacaaagtcctccgattccaaactatagtgcggaagagaaggaactcttaatgaatgactattcaaattatggtctaacacgcagaattattgcttgtcttgatgtacgtactaatgaccaaggtgatttggtggttactaaaggtgatcaatacgatgtacgtgaaaaaagtgatggtaaaggtgttagaaaccttggtaagcctgttcagttggcacagaaatattaccaacagggtgcggatgaagtaacatttttgaatataacttcttttagagattgtcctttgaaggatactccgatgctagaggttctgaaacaagccgcaaagacagtctttgttccattgacagtcggtggggggatcaaggatattgtcgatgttgatggaaccaaaatacctgctttagaagttgcaagtctatacttcagatctggtgctgataaagtatcgatcggtacggatgcagtctatgcagccgaaaaatactacgagttgggtaacagaggagatggaacgtcaccaatagagacaatctcgaaagcatacggtgctcaggcagttgttatttctgtcgaccctaagagagtatatgtaaattcacaagcagatacgaagaacaaagtcttcgagacagaatatccgggccccaatggagagaaatactgctggtaccaatgtacaatcaaaggtggaagagaatctagagaccttggtgtgtgggaattaacaagggcatgtgaagctctaggtgctggggagattttattgaactgcatagacaaggatggctctaattctggttatgatctggaattgatagaacatgttaaagatgcggtcaagattcccgtcattgcatccagtggcgccggtgtacccgaacatttcgaagaggccttcctaaagacccgcgcagatgcttgcttgggtgcaggtatgttccacagaggtgaattcactgttaacgatgtaaaggagtatttactagagcacggattaaaggttagaatggatgaagagtaatgtggttggatatgtatactttataatcttgactcagtctatatacgca

SEQ ID NO: 116 - DNA, 1550 bp, Saccharomyces cerevisiae
tataatggccagagcatcctctactaaagccagaaaacagaggcatgatccacttttaaaggatttagatgcagctcaaggtaccttgaaaaaaatcaataaaaagaagctagcgcagaacgatgctgcaaatcacgatgctgcaaatgaggaagatggatacatagactccaaagcatcaagaaaaattttgcagttggccaaggaacaacaggatgaaattgaaggtgaggaacttgctgaatcagaaagaaacaagcaatttgaagccagattcaccaccatgagctatgatgatgaagacgaagacgaagacgaagacgaagaagcttttggagaagacatctccgattttgaacccgaaggtgattataaagaagaggaagagatagttgaaatcgatgaagaagacgcagcgatgtttgagcaatatttcaagaaatcagatgattttaactctttaagtggtagctataatcttgcagacaagattatggcctctatccgagaaaaggaaagtcaagttgaagatatgcaagatgatgaaccacttgctaatgaacagaatacctcaagaggcaatatttcatccggtttgaagagtggagagggtgttgcacttccagagaaggtcatcaaagcatatactacggtaggtagtattttaaaaacttggacgcacggtaagttgccaaagttgttcaaggttatcccatccttaagaaattggcaagatgtcatttatgtgaccaacccggaagaatggtcaccacacgttgtttacgaagcaacgaaattatttgtatccaacctaactgctaaagaatctcaaaaatttattaacctaattttacttgaacgtttccgtgacaatatcgagaccagtgaagaccactctttaaactatcatatataccgtgcggtgaaaaaatcgctttataaaccaagtgccttcttcaaaggtttcctattcccattggttgaaacagggtgtaatgtacgtgaagcgacaattgcaggaagtgtgcttgctaaagtctctgttccggctttacattcttcagctgccttgagttatcttttaaggctacctttctctccacctacaactgtttttatcaaaatattgctcgataaaaaatatgctttaccgtaccagacggtggacgactgcgtgtattactttatgaggtttagaattttggatgacggtagtaatggggaagatgctacaagagtactcccagtgatatggcacaaggctttcttaacatttgcacaacgttacaagaacgatattacccaggatcagagagatttcttgttggaaactgttcgtcaaagaggccataaagatatcggtcctgagattagaagagaactattggcaggagccagcagggagtttgttgatccacaggaagctaatgatgatttaatgattgatgtcaattgatgctgtaatatcaatttttcatcaattttatatcgctcggtctttccccctttcaacaaagcttctgaatcatgtataataagtagaaaatata

SEQ ID NO: 117 - DNA, 1347 bp, Saccharomyces cerevisiae
atgttgcgacttttttcactggcacttatcacatgcttaatctactattccaaaaatcagggcccatctgctcttgttgcggccgtgggatttggtatagcaggctatttagctacagatatgttgattccacgtgtgggcaaatccttcatcaaaataggcctattcggtaaggacttgagtaaacctggccgtccggtgcttccagaaacaataggtgctatccctgctgcagtttatttatttgtaatgttcatttacattcccttcattttctacaagtatatggtcataaccacttcaggtgggggccatcgcgatgtctcagtggttgaagataacggtatgaattctaatatttttcctcatgataaactatctgaatatttgagcgctatcctatgcttggaaagtacggtcctcttgggtatcgctgatgatttatttgatttacgttggagacataagtttttcttgcctgccattgcagccatcccactgctaatggtttattatgtggattttggagttacgcatgtacttattcccggattcatggaacgctggttgaaaaagactagtgttgatttggggctgtggtattatgtttatatggcatcgatggcaattttttgccccaactccatcaacatcctggcaggtgttaatggtttagaggttggccaatgtatagtgttggccatcttagcgctattgaacgatttgctgtacttctcgatggggccattagccacaagagactcccataggttttccgctgttttgattatcccatttttgggtgtatccttggcgctatggaaatggaatcgttggcccgccacagtgtttgtgggagatacatattgttatttcgctggaatggtattcgcagtcgttggtatactgggtcatttttcaaagacgatgcttttgctattcattcctcaaatcgttaattttatttattcatgtcctcagctattcaaattggtcccctgcccgagacataggttacctaaatttaatgaaaaagacggtttaatgtatccatcaagagcaaacttaaaagaagaaccgccaaagagcatttttaaaccgatcttgaagttactatactgtctccatttgattgacctggaatttgatgaaaataatgagattattagcacctctaatatgacgttaataaacttgacattagtatggtttggccctatgagggaagacaaattgtgcaatacaatcttgaagttgcaattctgcattggaattttggctttacttggaagacacgctataggcgctatcatctttggccacgacaacctatggacagtacgttga

SEQ ID NO: 118 - DNA, 1599 bp, Saccharomyces cerevisiae
ctgaatatctttctctcttggaacaacaacaaaacacagagactaaggcataacaaactaagtcatggctgaaactgaaagactaatgcctaacggtggttcccgcgaaacaaaaccgttaattacgggccatttaatcttgggcacgatagttgcttgtttggggtcgatccagtacggataccacatcgcagagttgaatgcgcctcaagaattcttatcgtgctccagatttgaggcaccagacgaaaacatctcatacgatgacacttgggttgggcaacacggactcaagcaatgcattgcgttaaccgattctcaatacggcgcaattacgtctatattcagcataggcggactgtttgggtcgtactacgccggtaactgggccaaccgatacggaagaaagtacgtgagcatgggcgcctcggccatgtgcatggtttcttctctgctgcttttcttttccaactcctacttgcagttgctatttggcaggttcctggtaggcatgtcctgcggcaccgccattgtgatcacacccttatttatcaacgagattgcccccgtggagtggagaggcgctatgggatctatgaatcaggtttctatcaatctaggtatcctgctgacccaaaccttggcactcaagtacgcagactcctataactggaggtggcttctcttttccggatccgtgattgcggtagcgaatattttagcttggctcaaagtggacgaatctccaaggtggctggtgagccacggattcgtctcggaagctgaaactgctctgttcaagttgcgtccaggaacgtaccaacaagcgaagcaagaaattcaggattggcagcgtagccatgggcacaaccgcgacccggagtcaagcgaagagactcattcaggacccacactatggcaatatgttaccgatccctcatacaagaaaccgcgcacagttatactcgccatcttgtcgtgccagcaattttgcggcatcaactctattatcttctacggtgtaaaagtgatcggcaagattctaccggactactcgattcaggtaaattttgccatttccatcctcaatgtcgttgtcactctagcagcatctgcgatcatcgaccacgtcgggcgccgtccattattgcttgcctcgactacggtgatgaccgccatgtcgctgctgatcagtgtaggtctcaccttgagcgtatcctttttactggtcacggccacttttgtctatattgccgcattcgccatcggtctgggacccatccccttcttgatcattggtgagctatcctacccgcaggatgccgctacagctcaaagttttggtactgtgtgcaactggcttgccaccttcatcgtcggatacctcttcccgataggccacggcctcatgggcggctacgtatttgcgatcttcgccgccatcgctgccatgtttgctacatatgtgtacaagcgtgtacccgagacaaagggcaagactacatacagcgaggtttgggctggctactgatctgtagccagtcatatatacctaagcaactattttttacttctttctagctattcatctgtttttta

SEQ ID NO: 119 - DNA, 1485 bp, Saccharomyces cerevisiae
acaacgtggagtcgtccattatccgtcttagaaaagtagaatgtcaaccaaaccagagaagccaatatggatgtcacaagaagactatgaccgtcagtacggctcaattactggtgatgaatcgtccacagtctcaaaaaaagactccaaagttactgccaatgcgcctggtgatggtaatggatcattaccagttttgcaaagcagctctatccttacttctaaggtgtctgatctacccattgaggcagaatccgggtttaaaatccaaaagagaagacatgaaaggtatgatcaagaggaaagattacgcaaacagcgtgctcaaaaattgagagaagagcaactaaagagacatgaaatagagatgactgcaaatagatccataaatgttgaccagattgtccgagagcactataatgaacgtacaataatcgccaatcgcgctaagaggaatctatcgcctattattaagcttcgtaattttaacaatgcgattaagtatatgttaattgacaaatatacaaaacctggagatgtcgttttagaactcggatgtggcaaaggtggtgatttaagaaaatatggtgctgcaggtatttcacagtttattggtattgacatttccaatgcctctatccaagaagctcataagagataccggtccatgagaaatttggactaccaagttgtgctaattactggggattgctttggcgaatcattaggtgttgcagtagagcccttcccagactgtagatttccgtgtgatatcgtttcgacgcaattttgcttgcattatgcttttgagaccgaagaaaaagcaaggagagctttactgaatgtcgccaaatcactcaaaattggtggtcacttttttggcacgataccagattcagaattcattcgttataaactgaataaatttcccaaagaagtggaaaagccatcttggggaaactccatttataaagtgacatttgagaataattcataccaaaagaatgattatgagttcacatcgccttatggtcaaatgtatacttattggctagaagatgctatagataatgttcctgaatatgttgtgccattcgaaaccttaagaagtttggctgatgaatacggtttggaactagtatcgcaaatgccttttaataaattttttgtccaagaaattcccaaatggattgagaggttttcgcctaaaatgagggaaggtttacaaagatctgatggtagatatggtgttgaaggggatgaaaaggaagcggcatcatatttctataccatgtttgcattccgtaaggtaaaacagtatatcgaaccggaaagcgtaaagcccaactgaaataaaaatgaatagaaacaataaccctactataaagcatctgtatttcggccgtattacaagacttctatatgtagtaaataagttctggggaaatgcataacgatatatgtgttattctataatgcagtagt

SEQ ID NO: 120 - DNA, 1247 bp, Saccharomyces cerevisiae
taggaaaaataagccgaagtaaacgtatattagttgagagtctcctaatgtcattttccaattctaaagacaagtccgttgttgccgtctacaagctggtcaaagcgccaatctactctcattgcttttctcaagataaatctattttagccgttacatgcgaaacagattgtcttgtctatagagtttcaaacaacacacctcccgttttattcgcaacgttgaaagatcatgataaaaccattactgctgtggacatttccatacatggtcgtattgtgacttgctcccaagaccgtaatgcttacgtttgggagccattgagtgatgggacatacaagcccacgttagtacttcttcgtattaacagagcagctacttcagttacatgggcaccaaatggttataagtttgctgttgggtccagtgctagaatcatcgctgtttgttattacgaacacgagaataattggtgggtatccaagcacatcaagaaacccatcaaatctaccatcaattgcctgtcttggcatgcaaatggagtcctattagctgctggtggtactgatgggtttatgcgtgtgttcagcgggtttatcaagggtttggattccaaggaatccgtcgccggatcaccctggggccagaaattcccttttggttgtttaatcagggagtggtatcagggttcttatatccatgatgtggaatggagaagtcagatggaaagaattgcttatgtagcgcatgatggtactttgaatgttgtcgattaccaatctccagtgcaatctgtcaatgctccggaaggtttaccttacaggtccttagtatggataaacgaccacgagattgtttgtggaggatactcttgtcatccggtattgttcagcgaagcctctgaaggctggaaatttgcgaagaatctagacaaatcagacaataacaagtcttctgccttaactgcatctggtaatacagacgagctgagtggtaataatgatgaaagttcaactttcggtatttccgcattgagaaagtttaaagaattagacttgaaaggtaaagttagcacagatgtccaagaaagtgcacatgaaaacgccattgtggaattaagaccttttgcggaatccaacggccaaatcacacaagtctcttcctgtgggttagacggtaagatcgtcatttatacaatttaaatatacatacgtatatatatatattgttatgtgtattccctacct

SEQ ID NO: 121 - DNA, 1011 bp, Saccharomyces cerevisiae
cgaaaaggcgtaaactggaataatattgtttcaagaaagaaaacccactagcctataaatgccagaagtagagacaaagattataccaaacgaaaaggaggacgaggacgaggacggctacatagaagaggaggacgaggacttccagcctgaaaaagataaattaggtggtggtagcgacgatagtgatgccagcgatggcggtgacgactatgatgacggtgtgaacagagataagggtagaaataaagtggactattcgcgtatagagagcgagagcggcggactgatcaagactagaagagctcggcaagctgaggaagaatatgcgaaaacacataagtatgaatcgttaactgttgaatcgatccctgcaaaagtaaacagcatctgggaggagctacaggaagctagtaagaaccgtcttttgagcagttcagggaaagtcggctctgttctcgacggttccaaggaggctaggtcgacaacggccgcgcaacaggaggacaaaatcctcatcgaaagaaactacaagtttgctggtgaaactgtccatgagaaaaaatgggtttcacgcagcagtgcggagggtcaagaatatctaaacagtttgaaatttaagcagcaggcgcctgctgctcctgttcaactggaaaaagcagttaggaccaagtccaatgaaagccggcaacacttgcgacggccactgaaaaggcctccattgttggagcagatcatttctggcgggctacgacccaagctaacgacattagaaaaatctcagctggactgggctagttatgtagaccgtgctggacttaacgacgaattggtgctgcacaacaaggatgggttcttggcccggcaagaatttctgcagcgggtcgggtctgcagaggacgagagatacaaagaattgcgccggcaacaacttgctcagcagttgcagcaggatagcgaagcttcatagacaaatattacatgtattaaataacatgcttttctgctcaa

SEQ ID NO: 122 - DNA, 430 bp, Saccharomyces cerevisiae
cagcatctcataatatgtctgcaactgctaaacacgacagtaacgctagcccaaattctgactctgaagacggtcaccaccacaacaataagaaggaatgcgctatcgaatatctgaaggcacggttaaatagtgcatcagcagtcgcttgcggctacctccaagcttttgtcagtaagacgcaagactttgccaaagtatgctttttagaacttcagaatcccgttgtcttggtcaacttgttgctgcattcttcagtggtatgttatttatgtaacgggtatgcgaaccacaacgccagattcttgaaggggaaacctaactctacagtcttagcaacaaccgccggcgctctgggtcttttgacgctggacggtataatttcaaagaaatactactccagatacgacaagaaataataacatactat

SEQ ID NO: 123 - DNA, 2991 bp, Saccharomyces cerevisiae
aatcaaccgtatgcaacatggtccttttgaaatggctcgtatgccaattggtcttctttaccgctttttcgcatgcgtttaccgactatctattaaagaagtgtgcgcaatctgggttttgccatagaaacagggtttatgcagaaaatattgccaaatctcatcactgctattacaaagtggacgccgagtctattgcacacgatcctttagagaatgtgcttcatgctaccataattaaaactataccaagattggagggcgatgatatagccgttcagttcccattctctctctcttttttacaggatcactcagtaaggttcactataaatgagaaagagagaatgccaaccaacagcagcggtttgttgatctcttcacaacggttcaatgagacctggaagtacgcattcgacaagaaatttcaagaggaggcgaacaggaccagtattccacaattccacttccttaagcaaaaacaaactgtgaactcattctggtcgaaaatatcttcatttttgtcactttcaaactccactgcagacacatttcatcttcgaaacggtgatgtatccgtagaaatctttgctgaaccttttcaattgaaagtttactggcaaaatgcgctgaaacttattgtaaacgagcaaaatttcctgaacattgaacatcatagaactaagcaggaaaacttcgcacacgtgctgccagaagaaacaactttcaacatgtttaaggacaatttcttgtattcaaagcatgactctatgcctttggggcctgaatcggttgcgctagatttctctttcatgggttctactaatgtctacggtataccggaacatgcgacgtcgctaaggctgatggacacttcaggtggaaaggaaccctacaggcttttcaacgttgatgtctttgagtacaacatcggtaccagccaaccaatgtacggttcgatcccattcatgttttcatcttcgtccacatctatcttttgggtcaatgcagctgacacttgggtagacataaagtatgacaccagtaaaaataaaacgatgactcattggatctccgaaaatggtgtcatagatgtagtcatgtccctggggccagatattccaactatcattgacaaatttaccgatttgactggtagaccctttttaccgcccatttcctctatagggtaccatcaatgtagatggaattataatgatgagatggacgttctcacagtggactctcagatggatgctcatatgattccttacgattttatttggttggacttggagtatacgaacgacaaaaaatattttacttggaagcagcactcctttcccaatccaaaaaggctgttatccaaattaaaaaagttgggtagaaatcttgtcgtactaatcgatcctcatttaaagaaagattatgaaatcagtgacagggtaattaatgaaaatgtagcagtcaaggatcacaatggaaatgactatgtaggtcattgctggccaggtaattctatatggattgataccataagcaaatatggccaaaagatttggaagtcctttttcgaacggtttatggatctgccggctgatttaactaatttattcatttggaatgatatgaacgagccttcgattttcgatggcccagagaccacagctccaaaagatttgattcacgacaattacattgaggaaagatccgtccataacatatatggtctatcagtgcatgaagctacttacgacgcaataaaatcgatttattcaccatccgataagcgtcctttccttctaacaagggctttttttgccggctctcaacgtactgctgccacatggactggtgacaatgtggccaattgggattacttaaagatttccattcctatggttctgtcaaacaacattgctggtatgccatttataggagccgacatagctggctttgctgaggatcctacacctgaattgattgcacgttggtaccaagcgggcttatggtacccattttttagagcacacgcccatatagacaccaagagaagagaaccatacttattcaatgaacctttgaagtcgatagtacgtgatattatccaattgagatatttcctgctacctaccttatacaccatgtttcataaatcaagtgtcactggatttccgataatgaatccaatgtttattgaacaccctgaatttgctgaattgtatcatatcgataaccaattttactggagtaattcaggtctattagtcaaacctgtcacggagcctggtcaatcagaaacggaaatggttttcccacccggtatattctatgaattcgcatctttacactcttttataaacaatggtactgatttgatagaaaagaatatttctgcaccattggataaaattccattatttattgaaggcggtcacattatcactatgaaagataagtatagaagatcttcaatgttaatgaaaaacgatccatatgtaatagttatagcccctgataccgagggacgagccgttggagatctttatgttgatgatggagaaacttttggctaccaaagaggtgagtacgtagaaactcagttcattttcgaaaacaataccttaaaaaatgttcgaagtcatattcccgagaatttgacaggcattcaccacaatactttgaggaataccaatattgaaaaaatcattatcgcaaagaataatttacaacacaacataacgttgaaagacagtattaaagtcaaaaaaaatggcgaagaaagttcattgccgactagatcgtcatatgagaatgataataagatcaccattcttaacctatcgcttgacataactgaagattgggaagttattttttgagggaaaaaaacgaagtgatatctttacatctttttagctctttcttacaaagtaaacgtaaaaatatccgtaaatataacatataaccattatctatagaaaaaaaaga

SEQ ID NO: 124 - DNA, 1846 bp, Saccharomyces cerevisiae
tttcaagattaactgtatataaatagagatggtatgattaaaagctctttttaatagatgctccttcttgaaatttactcccactgtgctgcaagaggttagacgcttcacgcacatttttgctacaatgacaagtgccgctactgttactgcttcgttcaacgatacttttagcgtatccgataatgtcgccgttattgttcctgaaacggacactcaggtgacctacagggatctatcccacatggtgggtcacttccagaccatgttcacaaatcctaattctccattgtacggagctgttttcagacaagatacagtggcgatatccatgcgtaatgggctggaatttatcgtcgctttcctcggtgctactatggacgctaaaattggcgcgcccttgaatcccaattataaggaaaaggagttcaatttttatttgaatgacctgaaatctaaggcgatttgcgtcccaaagggtaccacaaagttacagagttctgaaattctaaaatctgcctccacgtttggatgttttatcgtagagctggccttcgatgcgaccaggtttagggtagagtatgatatatactctccagaggacaactacaaaagggttatttaccggtctttgaacaacgccaaatttgtcaacacaaatcccgttaaattccctgggtttgcccgttccagtgacgttgccctgattttgcataccagtggtaccacctccactccaaaaacggtgcctttgttacatttgaacattgtgagaagcacgttgaacattgctaacacttacaagctaacgcccttggacagatcttatgtcgtgatgcctcttttccacgtccatgggttaattggtgttttactttccacttttagaactcagggttctgttgtggttcccgatggattccatccaaagttattctgggaccaatttgttaagtacaactgtaattggttcagttgcgttcccacaataagcatgattatgctgaacatgcccaaaccaaaccctttcccacacattagattcatcagatcgtgttcttctgctttggctccagcaacgttccataagctggagaaggaattcaatgcacctgtcttggaggcctatgcgatgaccgaagcatcacatcaaatgacctcaaacaatctgcctccaggaaagagaaagcctggtactgtgggccagccacaaggagtcaccgtcgtcattctagatgacaatgacaatgtcttgcccccgggcaaagtcggcgaagtttccatcagaggcgaaaacgtcactttggggtatgctaataatccaaaagctaacaaggagaacttcaccaagagagagaactatttcagaaccggtgaccaaggttatttcgaccctgaggggtttttggtccttacaggcagaatcaaagagcttatcaacaggggtggtgaaaagatttcacccattgagctcgacggcattatgctatcgcatccaaagatcgatgaagccgttgcatttggtgttcccgacgatatgtacggccaagtagttcaagccgccattgttttgaagaagggagaaaaaatgacctacgaagaactggtgaacttcttaaagaagcacctagcctctttcaaaattccaaccaaggtgtactttgttgataagctaccaaaaaccgctacaggtaaaatccagagaagagttatcgcagaaacttttgctaagagcagcagaaataagagtaagttgtaggcagtatcctgtacaattttatgctctctgaaagcttctatctggcacccgtttatatacgccaatacttatgtattttatctatct

SEQ ID NO: 125 - DNA, 1518 bp, Saccharomyces cerevisiae
atctacatatacaggttaacgattgcaacagcgactcttgatattatctctgtcaagtttcttccttttgttagactaatttagtatcatttacacactcggacgttaaattccgcctccctcataacagttcctgtgtttgttcattgataatcgatcgcagtttagtaagttcttttacttttgcaataattttgttcaacatgttttccagactgccaacatcattggccagaaatgttgcacgtcgtgccccaacttcttttgtaagaccctctgcagcagcagcagcattgagattctcatcaacaaagacgatgaccgtcagagaggccttgaatagtgccatggcggaagaattggaccgtgatgatgatgtcttccttattggtgaagaagttgcacaatataacggggcttataaggtgtcaaagggtttattggacaggttcggtgaacgtcgtgtggttgacacacctattaccgaatacgggttcacaggtttggccgttggtgccgctttgaagggtttgaagccaattgtagagtttatgtcgttcaatttctctatgcaagctatcgatcatgttgtcaattccgctgcaaagactcactacatgtctggtggtactcaaaaatgtcaaatggtcttcagaggtcctaatggtgctgcagtgggtgttggtgctcaacattcacaggacttttctccttggtacggttccattccagggttaaaggtccttgtcccttattctgctgaagatgctaggggtttgttaaaggccgccatcagagatccaaaccctgttgtatttttagagaacgaattgttgtacggtgaatcttttgaaatctcagaagaagctttatcccctgagttcaccttgccatacaaggctaagatcgaaagagaaggtaccgatatttccattgttacgtacacaagaaacgttcagttttctttggaagccgctgaaattctacaaaagaaatatggtgtctctgcagaagttatcaacttgcgttctattagacctttagatactgaagctatcatcaaaactgtcaagaagacaaaccacttgattactgttgaatccactttcccatcatttggtgttggtgctgaaattgtcgcccaagttatggagtctgaagcctttgattacttggatgctccaatccaaagagttactggtgccgatgttccaacaccttacgctaaagaattagaagatttcgctttccctgatactccaaccatcgttaaagctgtcaaagaagtcttgtcaattgaataaataaacttcaatccaataggaaggagagaaagaaggagatagggaacttttttccctgtaccctacactttctaccctcttcgcggaaatagtactaatgagaaaaacataaataatattttgctaatcaagacatgtatggcgtactggttattagtagatatataactgcaaatacacacatacatacaatgtatatattttgtttttacaa

SEQ ID NO: 126 - DNA, 1958 bp, Saccharomyces cerevisiae
caagacctaaacgtttggtgaggcagtataatataccatagttatagggggataaaacaaaagtaggcatggaacctaagcgaaagagcgggtcactagccaagcatgatttgccgcaattttatcttttaattatgttatatttggctcaaggcatacctgtaggattggccttcggtaccgtaccgtttctactgaaatctttagcaaaggagacctcgtttacatcactgggaattttctctatggctacatatccatattctttaaagatcatatggtcaccaatagtagactcactgtacaacaagcgcatcggtagaagaagatcatggatcattccagtacaatttgttagtggatttgtgctatgggcattagggtggtgcatatcacaaggcataatcttcgatggtgtcgacgatgcgttccataatcgcggtaatggcactttacacagtgtcagtataaaaaatttgacgtggtggtttggcctgttagtttttctgtgtgccactcaagacatcgcagttgatggttgggcgttgacgattttgtccaaagaatccctatcatatgcatctaccgcgcaaacaataggtttgaatattggttattttatgtcatttaccattttcctgtcgttgaattcctctgatttcgccaataagtatttcagaaacatcccactggatcacgggttcattagtcttggtgggtacatgaaattctcgggcatgctttacattgtaataaccatatatatcatcttttgcaccaaggaaaaaccctacgtagagtatttgcccaaagtggagcccataaatacaagtgacggagggtcaaagccgataagtattgagtatgacgacggtgatgtggtgtcaactcagaatacaagcagtataaagtacatttaccgctgctttataaaagtgttgaaattgaagtccgtaagaagcctagccttcattcacatgatttcgaaatttgcctttcaatgcaacgaagccgccacaaacctgaaactactagagcaaggcttcaaaagagaagacttggctgtgacagtactcatagacctgccgttcgaaatcatatttgggtactatgttgttaaatggagctccgacaaggaccccatgattcgtgacaatagaagattaagaaacagcacgggcaccaacaaggtcatcaagttcttagttggggatgccggcgttttaacaccatggttgtggggctttttgggccgtctggcagccgcggtcttgggaagttacgtggtgaagcaattccccaaggatggtgaaatatccacgggttatttttgtctcgtgatattccagcacctcttaggttccttcatgaatactgtccagttcattggaatatcggccttccatacaagagttgcagaccccgtgctgggtggcacatatatgacattgttaaataccctcagcaacttcggtgggacatggccgcggttaatcattatgtccatgatcaactacttcaccgtgtatcagtgcactattcctggcacaaataaagtatacgtaactcacggcggcagcatgcaagcgtgcaccgagcttttgaatggcaccgtgaccatcctgcgtgacggctattacatcaccaatctcatatgtattgtagtcggacttttcctatattttggatatttgaaaaggaaaatcctccatttacaaagtctgccaatcagttcctggagatgtacgtaacgacccctcaaacaagaattgtacgacattacgttcaagaaaattttaacgagtatcgtaatatttacaagatctttttatgtactacaggaagcagaaacaaaatgagtatcaataccagtgtaaatctgttaatgagaatcatcacattatcccagttttttccatgcaagggaaaaatatactatacgacatttctatacttta

SEQ ID NO: 127 - DNA, 3778 bp, Saccharomyces cerevisiae
gcccctcttttcttccaaactcttgtagcttactatctgtggcccgtcatttgagtttgatttttttgccaattactatattgcaaaataaaggacagttactaggagagaaaataagggacatagagaacaaaataaaatatgagcagtagcaagaaattggccggtcttagggacaatttcagtttgctcggcgaaaagaataagatcttggtcgccaatagaggtgaaattccgattagaatttttagatctgctcatgagctgtctatgagaaccatcgccatatactcccatgaggaccgtctttcaatgcacaggttgaaggcggacgaagcgtatgttatcggggaggagggccagtatacacctgtgggtgcttacttggcaatggacgagatcatcgaaattgcaaagaagcataaggtggatttcatccatccaggttatgggttcttgtctgaaaattcggaatttgccgacaaagtagtgaaggccggtatcacttggatcggccctccagctgaagttattgactctgtgggtgacaaagtctctgccagacacttggcagcaagagctaacgttcctaccgttcccggtactccaggacctatcgaaactgtgcaagaggcacttgacttcgttaatgaatacggctacccggtgatcattaaggccgcctttggtggtggtggtagaggtatgagagtcgttagagaaggtgacgacgtggcagatgcctttcaacgtgctacctccgaagcccgtactgccttcggtaatggtacctgctttgtggaaagattcttggacaagccaaagcatattgaagttcaattgttggctgataaccacggaaacgtggttcatcttttcgaaagagactgttctgtgcaaagaagacaccaaaaagttgtcgaagtcgctccagcaaagactttgccccgtgaagttcgtgacgctattttgacagatgctgttaaattagctaaggtatgtggttacagaaacgcaggtaccgccgaattcttggttgacaaccaaaacagacactatttcattgaaattaatccaagaattcaagtggagcataccatcactgaagaaatcaccggtattgacattgtttctgcccaaatccagattgccgcaggtgccactttgactcaactaggtctattacaggataaaatcaccacccgtgggttttccatccaatgtcgtattaccactgaagatccctctaagaatttccaaccggataccggtcgcctggaggtctatcgttctgccggtggtaatggtgtgagattggacggtggtaacgcttatgcaggtgctactatctcgcctcactacgactcaatgctggtcaaatgttcatgctctggttctacttatgaaatcgtccgtaggaagatgattcgtgccctgatcgaattcagaatcagaggtgttaagaccaacattcccttcctattgactcttttgaccaatccagtttttattgagggtacatactggacgacttttattgacgacaccccacaactgttccaaatggtatcgtcacaaaacagagcgcaaaaactgttacactatttggcagacttggcagttaacggttcttctattaagggtcaaattggcttgccaaaactaaaatcaaatccaagtgtcccccatttgcacgatgctcagggcaatgtcatcaacgttacaaagtctgcaccaccatccggatggagacaagtgctactggaaaagggaccatctgaatttgccaagcaagtcagacagttcaatggtactctactgatggacaccacctggagagacgctcatcaatctctacttgcaacaagagtcagaacccacgatttggctacaatcgctccaacaaccgcacatgcccttgcaggtgctttcgctttagaatgttggggtggtgctacattcgacgttgcaatgagattcttgcatgaggatccatgggaacgtctgagaaaattaagatctctggtgcctaatattccattccaaatgttattacgtggtgccaacggtgtggcttactcttcattacctgacaatgctattgaccattttgtcaagcaagccaaggataatggtgttgatatatttagagtttttgatgccttgaatgatttagaacaattaaaagttggtgtgaatgctgtcaagaaggccggtggtgttgtcgaagctactgtttgttactctggtgacatgcttcagccaggtaagaaatacaacttagactactacctagaagttgttgaaaaaatagttcaaatgggtacacatatcttgggtattaaggatatggcaggtactatgaaaccggccgctgccaaattattaattggctccctaagaaccagatatccggatttaccaattcatgttcacagtcatgactccgcaggtactgctgttgcgtctatgactgcatgtgccctagcaggtgctgatgttgtcgatgtagctatcaattcaatgtcgggcttaacttcccaaccatcaattaatgcactgttggcttcattagaaggtaacattgatactgggattaacgttgagcatgttcgtgaattagatgcatactgggccgaaatgagactgttgtattcttgtttcgaggccgacttgaagggaccagatccagaagtttaccaacatgaaatcccaggtggtcaattgactaacttgttattccaagctcaacaactgggtcttggtgaacaatgggctgaaactaaaagagcttacagagaagccaattacctactgggagatattgttaaagttaccccaacttctaaggttgtcggtgatttagctcaattcatggtttctaacaaactgacttccgacgatattagacgtttagctaattctttggactttcctgactctgttatggacttttttgaaggtttaattggtcaaccatacggtgggttcccagaaccattaagatctgatgtattgagaaacaagagaagaaagttgacgtgccgtccaggtttagaattagaaccatttgatctcgaaaaaattagagaagacttgcagaacagattcggtgatattgatgaatgcgatgttgcttcttacaatatgtatccaagggtctatgaagatttccaaaagatcagagaaacatacggtgatttatcagttctaccaaccaaaaatttcctagcaccagcagaacctgatgaagaaatcgaagtcaccatcgaacaaggtaagactttgattatcaaattgcaagctgttggtgacttaaataagaaaactgggcaaagagaagtgtattttgaattgaacggtgaattaagaaagatcagagttgcagacaagtcacaaaacatacaatctgttgctaaaccaaaggctgatgtccacgatactcaccaaatcggtgcaccaatggctggtgttatcatagaagttaaagtacataaagggtctttggtgaaaaagggcgaatcgattgctgttttgagtgccatgaaaatggaaatggttgtctcttcaccagcagatggtcaagttaaagacgttttcattaaggatggtgaaagtgttgacgcatcagatttgttggttgtcctagaagaagaaaccctacccccatcccaaaaaaagtaatttttactcgttaattatattttatgacatctgaaaatactagctgtactatatatggcgtatattttatctagttatgttcccatgtatattt

SEQ ID NO: 128 - DNA, 1166 bp, Saccharomyces cerevisiae
ttgcagtataagaagcgattgctctcatttttttacgtgtcctgtgttgctctgtattgtcttgactatttgcgtgttcatttaaagaaaaacctcagtatggatagagacactaaattagcttttaggctgaggggcagtcattcaagaaggacagacgatatagatgatgatgttattgtatttaagacgccaaatgctgtttatagagaggagaactcacctattcaatctcctgttcaacccattttgtcttcaccaaaacttgcgaattctttcgagtttcctattaccactaataacgtaaatgcgcaggaccgtcatgaacatgggtatcagcccttggatgcagaagactatcccatgatcgactctgaaaataaaagtcttataagcgaatcgccgcaaaatgttagaaatgatgaagaccttactactcgttacaatttcgatgatatacccattagacagctatcatcgtctatcacttctgtgaccacaattgatgttttatcttctttattcataaacttatttgaaaatgatttgattccgcaagctttgaaggatttcaataaaagtgatgatgatcaatttaggaaactattgtacaaattagatctgcgactctttcaaacgatatcagaccaaatgaccagagacttgaaagacatattagatatcaacgtgtcgaataatgagctctgctaccaactgaagcaggtacttgctcgaaaagaagatttgaaccagcagataatatcggtacgaaatgaaattcaagagttgaaagccggtaaagactggcatgacttacaaaatgaacaagccaaactgaacgacaaagtgaagctaaataagaggctaaatgatttgacttctactttgctaggcaaatacgagggagatcgcaaaattatgagccaagatagcgaggacgattcaatacgggatgactcaaatattctggatattgcacatttcgtagacttgatggatccatataacggacttctgaaaaagataaataaaattaatgaaaatctttctaacgaattacaaccaagtctatagggaattggttcaaaagatgtatatatatatatatatatatatatatgtatgtatatatgtatatatgtatatatgtattacttccatactaa

SEQ ID NO: 129 - DNA, 820 bp, Saccharomyces cerevisiae
atgggagtgaagcaaaccccaccagtccaggtgaaagtaagcgacgcggattccaccaacagaaggaaatctagtagccaggaaggaaaccctcagctggttcaattaaaggcaaagagcgacaaagataaaagaaagggatcttcagattccactgcctctataatgggcagttccaacgcacttccgaccaaaaacctaaccacgcctccagcactaaaccccttaacgaccagcattagtaggggtaatactgcatacgaaagaagcgtaaatggtagccgtataacaatgcactcaaacctggcacctacggagacgcaagacgtatcatggtctgaaatcgatacactggatgatgtgaagaagatggcgaaagaacctatcgtcaacgacgggttcccacgagattttgagagcaatctcacgcaaatgcgcaagtcgcacgctcaactactgcgattaatgagggaaagaaatcagcgactaaagtatgccaagctgaggagccctcctcataaggatcagcataattctgccacgaataaagatcaagaaccagacgaggtattgcatgacccggaaatcgcacttgacggtgagaagtacgtgagccaagttgtcgatactattaaagatgttcaccgatgctgatgacatgtatgggttgaaaatatttagaggatgctaaaagtcccgtctaaaatagaggaagtcatggattacattatcacctttattgtcctgttccgtctggctaatttgggacgaggaacgtttgtctccattcgcaaccttttgaaaccatatgaacggcggc

SEQ ID NO: 130 - DNA, 1846 bp, Saccharomyces cerevisiae
tagtcttgcaaaatcgatttagaatcaagataccagcctaaaaatgtccaataactcattcactaacttcaaactggccactgaattgccagcctggtctaagttgcaaaaaatttatgaatctcaaggtaagactttgtctgtcaagcaagaattccaaaaagatgccaagcgttttgaaaaattgaacaagactttcaccaactatgatggttccaaaatcttgttcgactactcaaagaacttggtcaacgatgaaatcattgctgcattgattgaactggccaaggaggctaacgtcaccggtttgagagatgctatgttcaaaggtgaacacatcaactccactgaagatcgtgctgtctaccacgtcgcattgagaaacagagctaacaagccaatgtacgttgatggtgtcaacgttgctccagaagtcgactctgtcttgaagcacatgaaggagttctctgaacaagttcgttctggtgaatggaagggttataccggtaagaagatcaccgatgttgttaacatcggtattggtggttccgatttgggtccagtcatggtcactgaggctttgaagcactacgctggtgtcttggatgtccacttcgtttccaacattgacggtactcacattgctgaaaccttgaaggttgttgacccagaaactactttgtttttgattgcttccaagactttcactaccgctgaaactatcactaacgctaacactgccaagaactggttcttgtcgaagacaggtaatgatccatctcacattgctaagcatttcgctgctttgtccactaacgaaaccgaagttgccaagttcggtattgacaccaaaaacatgtttggtttcgaaagttgggtcggtggtcgttactctgtctggtcggctattggtttgtctgttgccttgtacattggctatgacaactttgaggctttcttgaagggtgctgaagccgtcgacaaccacttcacccaaaccccattggaagacaacattccattgttgggtggtttgttgtctgtctggtacaacaacttctttggtgctcaaacccatttggttgctccattcgaccaatacttgcacagattcccagcctacttgcaacaattgtcaatggaatctaacggtaagtctgttaccagaggtaacgtgtttactgactactctactggttctatcttgtttggtgaaccagctaccaacgctcaacactctttcttccaattggttcaccaaggtaccaagttgattccatctgatttcatcttagctgctcaatctcataacccaattgagaacaaattacatcaaaagatgttggcttcaaacttctttgctcaagctgaagctttaatggttggtaaggatgaagaacaagttaaggctgaaggtgccactggtggtttggtcccacacaaggtcttctcaggtaacagaccaactacctctatcttggctcaaaagattactccagctactttgggtgctttgattgcctactacgaacatgttactttcactgaaggtgccatttggaatatcaactctttcgaccaatggggtgttgaattgggtaaagtcttggctaaagtcatcggcaaggaattggacaactcctccaccatttctacccacgatgcttctaccaacggtttaatcaatcaattcaaggaatggatgtgaacaaatcgctcttaaatatatacctaaagaacattaaagctatattataagcaaagatacgtaaattttgcttatattattatacacatatcatatttctatatttttaagatttggttatataatgtacgtaatgca

SEQ ID NO: 131 - DNA, 1359 bp, Saccharomyces cerevisiae
atgaatcagtgcgcgaaggacataactcatgaagcctccagtatacccatcgatttgcaagaaagatactcgcactggaagaaaaacactaaactactttatgattacctaaacacgaattcaacaaagtggccgtccttaacgtgccagttctttcctgatttagataccacttcggatgagcatcgcatcttgttatcctcatttacatcttcccaaaaacctgaagatgagaccatatatattagcaaaatatccacgttgggtcatataaaatggtcatctttaaataatttcgacatggacgaaatggaattcaaaccggagaactcgacaaggtttccctccaaacacttagtaaatgacatcagtattttcttcccaaacggggaatgcaatagggcaagatatttgcctcaaaatccagatattatagccggcgcctcttcagatggtgcaatctacatattcgatagaacaaaacacggctctactagaataagacagtccaaaatttcacatccctttgagacaaagctgtttggttcacatggtgttattcaagacgtggaggcaatggatacttcttcggcagatataaatgaggcgacttctttagcctggaacttgcagcaggaggcccttttactttcttctcactccaacggccaagttcaagtttgggacattaaacaatattcgcatgagaaccctataatagatttacccttagtgtcaataaacagcgacggaacagcggtgaatgatgtaacttggatgccaacacacgattccctctttgctgcttgtactgaaggaaatgcggtctccctattagatctgaggactaagaaagagaagctccagagtaaccgtgaaaaacacgatggtggagtaaactcctgtagatttaactataagaactctttaattctagcatctgcagattcaaatgggaggctaaatttatgggatattagaaacatgaacaaaagcccaatcgctaccatggagcacggtacttccgtttcaactttagaatggagtccaaatttcgatactgtattggcaacggctggccaagaagatgggttagtcaagctatgggatacctcctgcgaagaaactatatttacccatggtggtcatatgctcggtgtgaacgacatttcgtgggacgctcatgacccttggttaatgtgcagtgtggcaaatgataattcagttcacatatggaaacctgcaggaaaccttgttggacattcgtgacctaaacgttccttgaagccaggcatgctaatggctcctgtccctattacatattcaaccatttgatagacgaatatacaaacataaata

SEQ ID NO: 132 - DNA, 963 bp, Saccharomyces cerevisiae
caagaagaacaaaagaaaaacataaagcaacgtggaatatgtcacaatctactgcatcactggtaccagagggcaatcaaggctccctccaagaagatgttagttttgatttcaatggtgtacctggccaggctttagatgccgtgcgcatgcgtttggctcaattaactcattcattgaggagaatcagagacgaaatgtccaaagccgaactgccacaatggtatacactccaatcacaactgaatgtcacattatcccagctcgtttctgtaacctccactctacaacatttccaagaaactttagactctacagtggtttaccctttgcctaaattcccaaccacctctcatgaaagtttggtcactacccttttgaggaagaagaatattcctgaagtggacgaatggatgaaatatgttagggaaacatctggagtaactacagccttgctaaaggatgaagaaatagaaaagctgctgcaacaggacagagaaataacgaattgggcgcgcactacgtttagaaacgaatatggaaagcacgatttcaaaaatgaagaatccctaagcgaagaacacgcttcacttctagtacgagatagcaaaccttcgaaacctttcaatgtggatgatgttctaaagttcaccttcacaggggaaaagcccattattacgggatctacttcaacatcatctagtaattgaattttacttcacgctactgatattttaaaacattttattgttactagtgacctggtaaaaatatttacaagtataaaaggaccaatttactgaatgaagtaaataaggatcattgatatgttacgataaataatgcaaagtaaaggagaagaaacgaaggggtccaaaccttagtaggttagctttctataaactttgacaggctttatatccttacaaaatgcacttttttcatacttttttgttagagtat

SEQ ID NO: 133 - DNA, 539 bp, Saccharomyces cerevisiae
caaagccttccattacatctacttttttacgacttacttgttgcgactactttttacaaccagtatgccctctctgcgagatttatcactagaaagggaccaagaattaaatcagttacgtgcccgtatcaaccagctgggcaaaacaggcaaagaagaagccaatgattttgttggtttaaatatttcaaatgaacctgtatatgacacggtgattcaaacaggacagagctctaacgcaacgaatagttttgtacaagaaactattcagaagacgaaacaaaaagagagtggtcagccatatattatcccccaaaaaaacgaacatcagcgttacatcgataaggtttgcgaaaccagcgatctcaaagccaaattagcgcctattatggaagtgctcgagaagaaaacgaatgaaaaaattaagggaataataaggaaaagggtattacaggaacccgaccgtgacaatgatgatagcggctgatcggataattacaaccaattgcgtgcgcaagacttcattgggttggctggga

SEQ ID NO: 134 - DNA, 1004 bp, Saccharomyces cerevisiae
aaagcaagcctatccattcagctaagcttatgagatgagtgtattaagatctacatgccttttcttccctccaagatccttgttgatatcatttaacaagcggcgattattttcaacttcgaggttaattttgaataaagaaagtgaaactacaaagaagaaagataaaagtaagcagcaagattttaatcctcggcacctgggtgttgctgccgaaatatttatcccctcggcttacaagaaccttccaaatgtatttgctcatcctctcattgttgcaaatgcattgatcagaagactttacacgtttggtttgaactctgttcaagtcgcattgtttcgttttcaatcaggcattaaaccttcttttttactctggaaaaacaaagccatagagacgtatatcaatgtaaacacgtcatttgctcataaaaatttgtcggacatcaaagggttagtttcattatgggttcaggaagctctcgaggctaggtcccgtcaacttccaggtaatgcaacactggactggcagttgataaagtttaatgcagttcctaaactagtctcagtgcaaccaatcatgattcccggaatgccgttagagcatttacagttggtttacaaatttgatacgaagcaaagactaattaaagtcaatcagcaaactaagaagactgagacgttagaccgtgacgttgtagactatattgcctttttgtgtgatgctacaactaatgatatgattttaatgggatctttgtttgaaagtaaaccaaatgataaattaccgaaaagctacgaggacgatgctaaagttgccatacacagaatgaaagttaacggtgatatatatcgtttacctccaagctaaggcaatatgtatataaatgcgaaaagttttggaacatctgtaaatagccattgcttcatttgagtttcttattccacataccacttacatattcagtaaaaactattcatttgtttttcattctgaagtatat

SEQ ID NO: 135 - DNA, 810 bp, Saccharomyces cerevisiae
tccagtgtgaatagacgactgagccatcatgaagttgaacatttcttacccagtcaacgggtctcaaaagaccttcgaaattgatgatgaacaccgtattcgtgttttcttcgacaagagaatcggtcaagaagtcgatggtgaagccgttggtgatgaattcaagggctacgtcttcaagatctctggtggtaacgacaaacaaggtttcccaatgaagcaaggtgttttgttgccaactagaatcaagttgttgttgaccaagaacgtttcttgttacagaccaagacgtgatggtgaaagaaagagaaagtccgtcagaggtgccattgttggtccagatttggctgtcttggctttggtcattgtcaagaagggtgaacaagaattggaaggtctaactgacactactgttccaaagagattgggtccaaagagagctaacaacatcagaaagttcttcggtttgtccaaggaagatgacgttcgtgatttcgtcatcagaagagaagtcaccaagggtgaaaagacttacaccaaggctccaaagatccaaagattggttactcctcaaagattgcaaagaaagagacaccaaagagctttgaaggtcagaaacgctcaagctcaaagagaagctgctgccgaatacgctcaattgttggctaagagattgtctgaaagaaaggctgaaaaggccgaaatcagaaagagaagagcttcttctttgaaggcttaagtatgtcttggacctgcataatttttatactttttccttttagatatatgtacttttggcttaatttaata

SEQ ID NO: 136 - DNA, 1473 bp, Saccharomyces cerevisiae
atgtcagaagtttccaaatggccagcaatcaacccattccattggggatacaatggtacagtttcgcatattgtcggtgaaaatggttccattaaactccatttaaaagacaacaaggagcaagttgattttgacgagttcgctaacaaatatgtcccaacgttgaagaatggtgcccaattcaaattgagtccttacttgttcacaggtattttgcaaactttgtacttaggtgctgctgatttctctaagaaatttcctgtattctacggcagggaaattgtcaaattctcggatggtggagtttgcaccgctgactggctcatagattcatggaaaaaggattatgaattcgatcaaagtactacgagctttgataaaaaaaaatttgataaagacgagaaggcgacacatccagaaggatggcctcgtttacaaccacgtacaaggtacctgaaagataatgagttggaagaactacgggaggttgatctacccctagtagttattctacatggtcttgctggtggtagtcatgagccgattataagatctcttgctgaaaacctgtctcgcagtgggagatttcaagtggtcgtcctaaataccagaggttgtgcacgttccaaaattaccaccagaaatttatttacagcttatcacacaatggatattcgcgagtttttgcaaagagaaaagcaaagacatccagatagaaaactatacgctgtgggatgctcttttggtgctacgatgctggcaaactatctgggagaagagggcgataaatcacctttatccgcagctgctactttgtgcaatccttgggatcttctcctttcagcaattaggatgagccaggattggtggtcaagaactttattttccaaaaatattgcgcaattcttaacaagaaccgttcaggttaatatgggtgaattaggagttccaaatggctctctccccgatcatcctcccacagtcaagaatccatctttctatatgttcacgcctgaaaatctaataaaggcaaagagctttaaatcgacccgggaatttgatgaagtgtacactgcgcctgctttaggcttcccaaatgctatggagtattataaagcggccagctcaataaacagagttgatacaattcgggttcctacccttgttatcaattccagggatgatcctgttgtcggcccagatcaaccatactcaatcgtggaaaagaatcctcgtattttgtattgtagaaccgatttaggtggtcatttagcttacctagataaagacaacaactcgtgggctaccaaggcaattgcagaatttttcactaagtttgatgaattagtcgtatgatgtcacacaattttcaaaccactttcctatgtatttatacaacattggatcaatgcccctttattttaagttatgtattttttgttgtcttcagtatacctaaaatttaaagttttt

SEQ ID NO: 137 - DNA, 510 bp, Saccharomyces cerevisiae
cagaaacagcctgcataccaactatgaatatcgtcccacaagatacctttaaatctcaagtctctacagatcaagacaaaagtgttctttcatctgcagtgccctccttgccagacacattacgccagcaagaaggcggtgcagtacctctttccacacaattgaatgacagacatccattagaatcaacattgaagaactgggaaaccacacagcgccaaagacaaatggaacagtatcgacaaatatttggcattgccgaaccaatgaaaaggacgatggaaatggaaatcgtcaatcgtaccgacttcaaccccctttcaacaaacggtagtatacaccgtgacatactactgaacaaagagtgcagcatcgattgggaggacgtctaccctggtactggcctacaagccagcaccatggtaggtgatgacgtccacagcaaaatcgaaaaacaattaggcatttaaaaattgctctcaatttctttatacatctgtcacgtaaacc

SEQ ID NO: 138 - DNA, 2430 bp, Saccharomyces cerevisiae
gtggtctcttcgagttcatcatttccattcgtactccttgagcttttaccttccttcctcctcccctatatactcaacttctcagcccacatcaataatgatagcaccagactcgcaaagattattcggttcctttgatgaacagtttaaggacttaaaactagattcagtcgatacagaaaacaataacacacacggtgtttctactatcctggattcctcccctgcgagcgttaataacaatacaaacggtgctgttgctgcaagcgtgaatacagtccctggatcgacgtttagatccaatacacctcttttaggaggtcgacatccactcagtaggacgtcttccttaatcgattctattggtatacagcgtgctgcgtcaccattttcttctatgaaagagccttttattcctcaaagttcgggagtaatgagttcctctttttggcacggcgaccatcctgaatcacgggttagtacgcctgttcagcagcatccactattgcaaagaaacgagtcctcctcctcctttagttatgctgctaatcttggagtgaatctgagtacacattcattggcggtagatattactccattaagtacaccaactgctgcccaatctcatgtcaatttgtttccgtcctctgatattcctcctaatatgagcatgaacggaatgtcacaactcccagcaccagtttcagttgaatccagttggaggtacatagacacgcagggacagattcatggtccatttactacccaaatgatgtcacaatggtacataggtggctattttgcttcaacccttcagatttcaagattgggaagcactccagaaacgctaggaataaacgatattttcatcacacttggtgagttaatgactaaactcgagaagtatgatacggatccattcactacttttgacaaacttcacgttcaaacaaccagctctgattctatcaacttgaatctagctccttacgcaagcggtgttgccgctactggcactattaaagctactgaaaacgatattttcaagccattgacacatgacaatatctgggatatggatggaggtaccacctccaagggagtcgatattaaattagcctcagcaaccaccattagtcaaacagatgaatctcacaagcaagaatacaaatcgaccactatgctggaaaaagggaagaaggaaaaatccgaatctgtagcaaaagcgttattggatgaacaagagaaacggaacagagaactcaaaaggaaggaagaagctcgcttatcgaagaaacaaaagcaaaaagaggatgatttattgaagaaacaaaaggaacaaaaggaacaaaaggaaaaagaagctttggaagcagaaaagcaaaaaaaatcagaaaagacaaaaaaggacacacaaacacaaacagaaggctttaagacatcaaaagatttgccttcattaaattcctcaagcgcgaatccggcaccatgggcctcaaaagtcaaagttaacaatgcaatcgaaacttcaattaaaaatggtgtaagtagcactggaaagaagaaaggagaacccttaggtctacaacagaggaacagcaaagaagaaaagcaaaaggaggaactaaaatccgtgcttaactgggctaacaagtccagcctaccatcgaatcaaactattgatattaaatctcagtttcaaaaaagcccaaaagggatgaaagagtcgtctccgttaaaggagttggaagatccaaatttcatagaagagcagaaaaaactatgggaaaaggttcagagttcttccaaacaagtaaagtccacatcctctgcatctactaccacatcttcttggactacggtgacttctaaagggaaagcacctataggaaccgttgtctccccatattcaaaaaccaataccagtttaaattcttcattaacggcaaaaactagcacaacttctactaccactacctttgctagcatgaacaatgtttctccccggcaagaatttatcaaatggtgtaaatcacagatgaaattaaattctggaataaccaataacaatgtcttagaactattattgagtttacctacggggccagaatctaaagaattgattcaagaaacaatttatgccaatagtgacgttatggatggtagaagatttgccactgaatttattaaaagacgtgttgcgtgcgaaaaacaaggtgatgatccactaagttggaatgaagcgctagctctatcaggcaatgatgacgacggctgggaattccaagtagtgagcaagaagaagggtagaaaacactgaaaggaaaagcttcataattttttcttttcactgcatatttctttatcatttattgttattgtatatactttataactattttttaacgcagataatgacaaattctatac

SEQ ID NO: 139 - DNA, 1913 bp, Saccharomyces cerevisiae
tgaagaaaaatttccctatactactgatatcgatatacatttaagtgaagtatgcttatcagatttagatcaaaaaacggtacacacagggtttcttgtcaagaaaacgaccttttcggaacggtcattgaaaagttggtgggtaatctggaccccaatgccgatgtcgacacatttactgtttgtgagaagcccggtcaaggtattcatgctgtttctgaactagctgatcgaacagtgatggatctaggactaaagcacggtgacatgctgatccttaactattcggacaagcccgctaatgagaaagatggtgtcaatgttgaaatcggatccgtaggtattgacagcaagggaattcgtcaacacaggtacggtccactaaggatcaaagaactcgctgtagatgaggaactagagaaagaggacggattaattcctcgtcaaaaatcaaaactatgcaagcacggtgatagaggtatgtgtgaatactgctcgcctttacctccttgggacaaagaatatcatgagaagaataagatcaaacatatatcgtttcattcatatcttaaaaagctaaatgaaaatgctaataagaaggagaacggcagctcttatatttcccctctttcagaacctgattttagaatcaataagcgttgccataatggccatgaaccatggcctcgggggatatgttctaaatgtcaaccatcggcaattacattacaacagcaagaatttagaatggttgaccacgttgaatttcagaagagtgaaataattaatgaatttattcaggcgtggaggtacacgggtatgcaaagatttggctatatgtacggatcttattctaagtatgataacacacctttaggtataaaggccgtcgttgaggcgatatacgagccccctcagcatgatgagcaagacggtttaaccatggacgtagaacaggtcaagaatgaaatgctacagattgatagacaggctcaagaaatggggctttcgcgaattggcctaatatttacagatttatctgacgcgggagctggggatgggtctgttttttgcaaaagacataaggattcgttttttctttcatcattagaagttattatggctgctaggcatcaaacaaggcatcctaatgtaagcaagtatagcgaacaaggttttttttcttccaagtttgtaacttgcgttatatcaggtaatttggaaggtgaaattgatatttcgagctaccaagtatccacagaagctgaagcattggttactgcagatatgataagtgggtccacatttccttcaatggcatatattaatgacactacagatgaaagatatgtacctgagatattttacatgaagtcgaatgaatatggtataacagtgaaggaaaatgcgaagcctgcatttccggtagactatcttttagtgacgctgactcatgggttcccgaataccgatacggaaaccaactcgaaattcgttagttccaccggatttccatggagcaatcgacaagctatggggcaatctcaagattatcaagaattaaaaaagtatttattcaatgtggcttcaagtggagatttcaatcttttgcatgaaaaaatctcgaactttcatttactattatacataaattctctgcagatactctctccagacgaatggaagttactaatagaatctgctgtgaaaaatgaatgggaagaatctctactaaaacttgtctcatcggctggttggcaaacgttagtcatgatccttcaggaaagcggctaggagagactgtaagatttgaggttttagattaaaaaaatagaaatgcgcggaaggtaaaattgagccttttttattttaaaactatgtaaatcatccaaaatagtagacgtttctagaac

SEQ ID NO: 140 - DNA, 1490 bp, Saccharomyces cerevisiae
ccgtagcacttgaaggaaagaggacagcatatccacttgataaacatggtatcagaggataagattgagcaatggaaagccacaaaagtcattggtataattggtctgggtgatatgggcctattatacgctaataaatttacagatgctggatggggtgttatatgttgtgatagggaagaatattatgatgaactgaaagaaaaatatgcctcagctaaattcgaactggtgaaaaatggtcatttggtatccaggcaaagcgactatattatctatagtgttgaagcatccaatattagtaagatcgtcgcaacgtatggaccatcttctaaggttggaacaattgttgggggtcaaacgagttgtaagctgccggaaatcgaggctttcgaaaagtatttacccaaggactgcgacatcattaccgtgcattcccttcatgggcctaaagttaatactgaaggccaaccactagttattatcaatcacagatcacagtacccagaatcttttgagttcgttaattctgttatggcatgtttgaaaagtaagcaagtttatttgacatatgaagagcatgacaagattaccgctgatacacaagctgtgacacatgctgctttcttaagtatgggatctgcgtgggcaaagataaagatttatccttggactctgggtgtaaacaaatggtacggtggcctagaaaatgtgaaagttaatatatcactaagaatctattcgaacaagtggcatgtttacgcaggattagccataacaaacccaagtgcacatcagcaaattcttcaatatgcaaccagtgcaacagaactatttagtttaatgatagataacaaagaacaagaacttactgatagactattaaaagctaagcaatttgtatttggaaagcatactggtctcttactattggatgacacgattttagagaaatattcgctatcaaaaagcagcattggtaacagcaacaattgcaagccagtgccgaattcacatttatcattgttggcgattgttgattcgtggtttcaacttggtattgatccatatgatcatatgatttgttcgacgccattattcagaatattcctgggtgtgtccgaatatctttttttaaaacctggcttattagaacagacaattgatgcagctatccatgataaatcattcataaaagatgatttagaatttgttatttcggctagagaatggagctcggttgtttcttttgccaattttgatatatacaaaaagcaatttcagagtgttcaaaagttctttgagccaatgcttccagaggctaatctcattggcaacgagatgataaaaaccattctgagtcattctagtgaccgttcggccgctgaaaaaagaaatacataatgtttttaatgctgatttcctataatattaggccttcttttgtgaaaaggagtatatttatataactgaataaaaatatatattgt

SEQ ID NO: 141 - DNA, 766 bp, Saccharomyces cerevisiae
gcgtggttcatttgtatttacgaaacggtgagtaataaggtttctaaaaccaaaggaaaaataaagaaagatctaagaagaaagttccagtaaagtgagttatagatcaagatgggtaacatttttagttcaatgtttgacaaactatggggttcaaacaaagaattgcgtatattgattttgggtttggatggtgcaggtaaaactaccatcttatatcgtttacaaattggcgaagtagtcactacaaagccaaccattggtttcaatgtagagacgctaagttataaaaacttaaaattgaacgtctgggatcttggtggtcaaacaagtatcaggccctactggaggtgttattatgcagacactgctgcagttattttcgttgttgattcgactgataaagatcgtatgtctacagcctctaaggaacttcatttgatgttacaggaagaagaattgcaagatgcagcactgctggtttttgcaaataaacaagaccaaccgggtgcattaagtgccagtgaagtctccaaagaactgaatcttgtagaattgaaggacagaagttggtctatcgtagcatccagtgcaattaaaggcgaaggtattaccgaaggtttagattggttgattgatgttataaaagaggaacagttatagcgataaagatttgcaaaaaaaaagtgtagatgcatactttttaaatggcattgaatatacatataatttgttttgtaactgaattatcaaggagctctatcca

SEQ ID NO: 142 - DNA, 1759 bp, Saccharomyces cerevisiae
caagaagactccagaatcaaaactcaaaccaacctaacttatccaacttctagtcactccttcaatagaacgtctttttctcaccttttcgtttttccatttacaccccataaaatatctaaaacctaacggaatttgaacgaaaaaaatgttacaaaagctttccatgaccgcattagtcggtttgttttcttcagttgtgtcactcgtgaacgctgattgtacttactctggcggtaattactattgtgctcaaaccgatgccatcatttactctaacgtcggtttatctgctacctaccaagatgtcaccaatatggatgaatcttcttgtgcttgtacccaagctgatttcactgcttctggtagcttggctcccttcaacgaggaactatctgttcatttcaggggtccgatcgagttactacaatttggtgtttactacccaaatggtgaatctaatgctttgaagaaaagatcagagaaacaatcaatcgagtcctgtaaggaaggtgaagctgttgtctccagacataagcatcagcacaagagggatgttgctgttgaatatgttcaagttacttccactgtttacgtcgacagtaatggtcaaacagtcacagccgattccaccaataccgttgtcggtcctgctgttccttcttcttacactaaagactctactgttttgtccagcagtgctcaagcagttgaaacgagtgaaagccagtcttccatctcttcctctaaaaccacctcttctgctgctgctgcttcatcatcttcgtcatcatcttctaacactaacggtgactggtccagaggttcctactttgtcccaggctctactagcaactgtacattcatgaacaaccaaggggggactgccggttctggtgtctggtcgagttgtttcggtaactccatctcttttgctgcttcagatggtgtttctggtgctgcctccgctcaagctcttggtgatgtcaccattaaatctggtaatgaattcatgattttctccggtgaagaatgttccggtaataacggcgattgtggttattacagagaaggcattcctgcttatcatgggtttggtggggctgataaaattttcgtcttcgaattttctatgccaagtgacaccagcggttctgcctacaatcaagatatgccagctatttggttattaaatgcaaaaatcccaagaaccttgcaatatggtgatgcatcttgttcttgttggaaaactggctgtggtgaaatggatttgttcgaaattttgaccgctggttctgataaattaatctcacacatccatgacggccaagatggtggtactcaagattacttcgagagaccaactgatggtactttaaaggctgccgtaatctttaattcaagtgataaaactattcacattatcgaagtcgacgaaagctttgatgctactttaagcgatgatgtcgttgaccaatggttgagcaagtccggttcttctgcggccttgccatagtcgatcgtttcttattaaccaataaaattttcctttttttcatttatgtttcacttgctatttttttccttccccgttattatttttgttttagggtttctgtccactttgaacagattgtgttattttccaagaacaatacattattgtaaaaaaaaaaaaaaaaaaaaactaaactaaaaaaaaaaaattcactcttaaagtttagagttatgttctctatctatctttatctttattata

SEQ ID NO: 143 - DNA, 832 bp, Saccharomyces cerevisiae
aaacgttgctaacaagggtcaacagatcacgagccaatttgaattcaaattaaattagtaggggatttacaaaatttgtgcgcaggtggatattactaataagctaagacaatggaccaagaaaatgaaagaaacatctcaagattatggagagcattcagaacagtaaaagaaatggttaaggacaggggttattttatcactcaagaggaagtcgaattgccattggaagatttcaaggccaagtattgtgactccatgggcagaccacaacgtaaaatgatgtccttccaggcaaatccaacagaagaatctatatcaaagttcccagacatgggctccttatgggtagaattttgtgatgagccttccgttggtgtaaagacaatgaagacttttgttatacatattcaagaaaaaaatttccaaacaggtatctttgtttaccaaaataatattacaccaagtgcaatgaaattggtgccttctataccaccagccaccattgaaacttttaatgaagctgccttagtggttaatattactcaccacgaattggttccaaagcatatcagattgagtagtgatgagaaaagagagcttttaaaaaggtatagattgaaggaatcccaattgccaagaattcaaagagctgatcctgtagccttatacttgggattgaaaagaggcgaagtagttaaaatcataagaaaaagtgaaacctctggtcgttatgccagttacagaatctgtatgtagagtggcatttggatttacccctttcatataatataaaataacaagaatatgtacaattagaaataaataatct

SEQ ID NO: 144 - DNA, 1452 bp, Saccharomyces cerevisiae
gacaaaggaaatacttcaataatggataacgaggttgaaaaaaatattgagatctggaaggtcaagaagttggtccaatctttagaaaaagctagaggtaatggtacttctatgatttccttagttattcctcctaagggtcaaattccactgtaccaaaaaatgttaacagatgaatatggtactgcctcgaatattaaatctagggttaatcgtctttccgttttatctgctatcacttccacccaacaaaagttgaagctatataatactttgcccaagaacggtttagttttatattgtggtgatatcatcactgaagatggtaaagaaaaaaaggtcacttttgacatcgaaccttacaaacctatcaacacatccttatatttgtgtgataacaaatttcatacagaagttctttcggaattgcttcaagctgacgacaagttcggttttatagtcatggacggtcaaggtactttgtttggttctgtgtccggtaatacgagaactgttttacataaatttactgtcgatctgccaaaaaagcatggtagaggtggtcaatctgcgcttcgttttgctcgtttaagagaagaaaaaagacataattatgtgagaaaggtcgccgaagttgctgttcaaaattttattactaatgacaaagtcaatgttaagggtttaattttagctggttctgctgactttaagaccgatttggctaaatctgaattattcgatccaagactagcatgtaaggttatttccatcgtggatgtttcttatggtggtgaaaacggtttcaaccaggctatcgaactttctgccgaagcgttggccaatgtcaagtatgttcaagaaaagaaattattggaggcatattttgacgaaatttcccaggacactggtaaattctgttatggtatagatgatactttaaaggcattggatttaggtgcagtcgaaaaattaattgttttcgaaaatttggaaactatcagatatacatttaaagatgccgaggataatgaggttataaaattcgctgaaccagaagccaaggacaagtcgtttgctattgacaaagctaccggccaagaaatggacgttgtctccgaagaacctttaattgaatggctagcagctaactacaaaaacttcggtgctaccttggaattcatcacagacaaatcttcagaaggtgcccaatttgtcacaggttttggtggtattggtgccatgctgcgttacaaagttaattttgaacaactagttgatgaatctgaggatgaatattatgacgaagatgaaggatccgactatgatttcatttaaataaataaaagggggagaaaaaaatcgaatcaaaaagaatttaatcactagatgccagatttaaattaaattcgcttttaattttttgtacaatataatatatacttggtaaacctt

SEQ ID NO: 145 - DNA, 2549 bp, Saccharomyces cerevisiae
atgcatagcaacgtatttgttggtgtcaaaccaggctttaatcataaacagcacagcaaaaagtcacgtttcctagaaaatgtctctagtcattcaccagaactgcctagtaactatgattacgttttgcttcctataacaacgccaagatataaggaaatagttgggcaagttttcaaagatttccaaagacaatccatacagaactggaaaccgcttcaaattcctgaaccgcagttgcaggatatctgtatacccccgttcaacgtcaagaagctagacaatgacgatacgccgtcttacatagggctgttatcctcttggctggagctggagagtcgcgatccaaatgtaagagatcttggcttaaaggtccttctaaacgaatgtaagtacgcgaggtttgttggaatcaataagctaatattggcgcctccacgggacctgtccaacctgcaattgtatggacagatgatttacaggctcctgcaaaatcgcatcgtctttgctgcgcctgcgttaaccatatccatttctctgccactttacgaagacagcgatccattggccacttgggaactgtggaataccgtgcggaaacaatgcgaatatcatccctctttgactatctctttggctttgccaagaaccaggactccttcgtatgtgctgaatagatggttagccgaacccgtctcgtgtcttttggtatcttcatccatctttgccagtaatcagtacgattatcccgttttacacaagtttaaccagaatttgattttaaagttccaaaaggttaatggagattcacaaattttgggtaatgaattatgcgtgatattgcatgggatggagaaatatgccaataatgttaagggcggagaatctgcctatttggaatatataaactacttattgaaaaagggcgacaaagtattaaattccaatagtaatcaccaatttttgctccaagaggactctcggataatgccgcctctgaaacctcattcagataatttattaaattccacatatttgacttttgaaaaagatttggtgaagtacgatctttacgaatctgccatattagaggcgcttcaagatcttgctcctcgagcgagtgccaagagaccgttggtgatcctagtagccggtgcgggaagaggacctttagtggatcgaacttttaagataatatcaatgttgtttatggatagtaaggtttctataattgccattgaaaaaaatccacaggcatatctgtacttgcaaaaaagaaatttcgactgttgggataatagagtgaaattaatcaaggaggatatgaccaaatggcaaatcaacgagccgtcggaaaagcgtattcagatagatctgtgcataagtgaactgctgggttcgttcggttgcaatgaattatcaccagaatgtctctggtctattgaaaaatatcattcccacaatgacacaattttcataccgaggtcatactcttcatacatagcacccatttcgtcaccattattctaccaaaaactctcacaaacaaatcgctctttggaggcgccctggatagtccatagagtgccatactgtatattatcctcaagggtaaatgaagtgtggcggttcgagcatcccatggcccaaaaagatactgtccaagacgaagatgattttacagttgaattttctcaaagttcattaaatgagttcaagataaagcaccgcggcgaaatccatggctttatcggattcttctcggcaaacttatataacaatatattcttgtcaactttgcccaatgacagcacagtccgtttaaaatttagcgaagaaacgttgatgaataccagacgagaagaaaatctaatcaagaaatgtgaccatacaccaaatatgacctcgtggtctccaattatctttcctttgaagcaaccaatatcctttatagatgactccgaactttctgtgctgatgtctcggatacactccgatacagaacaaaaagtttggtatgaatggtctttggagagtttcatataccttatgttgtcaaattacacttcggcggtaactgctgcaagcatgactattccgaggtctatagttacagatgacactaaaactttagcccataatcgacattattcagcgactaccaatcaaaagctagataatcaaattgatcttgaccaagacattgaaaacgaagaagaacagggattcctatccaatctagaaactggttggcaaagcgtacaagatattcacggactcagcgaaaccgccaaaccggaccatttagattctatcaataagcctatgtttgatctcaaatctactaaagcgcttgaaccctctaacgaattgccaaggcacgaagacctcgaggaagatgttccagaagttcatgtcagagtcaagactagtgtttccacgctacataatgtctgtggcagagccttttccctgcctctgtgaattctgcattgtatactatatactgcggcaacaaataactatccatacgtcctgagtaccacaag

SEQ ID NO: 146 - DNA, 1136 bp, Saccharomyces cerevisiae
tacgctaattttgccttggtaaatttcataagaccaatgatagcaggtgcgactgctccgtcaagtcagcatgaaattttgatcgcatcgaatctcatcaagaagccatcaacgtctcaaaataaaacgccgacagctcaatccagttcaggtaacaatggagctgctgatggtgcaccgcagggttaccatcatcaccatcatcaccatcgtcatttatggtggcctcggacaacagaccatcaatattggtgtgtcttgaggaaaaaccaatttgcctattacaaaactcgggatgaaagagaggctataagtgtcataccgagatttgacatacttaattttaagataagcgagctcgatggtatattaactgtttatactccatccaaggatttaatattcaaatttccacgagggcaaaatgagaaggttggtatggaactgatgcataattggaaaattgcccttgaaaaattcctctctagtcctagtggcaacgaaagtgtcactacaggtagtgattatgatgaagaagaggatgatgatgatttaattgtagttgacgaaaaggcgggtccttctagcagcaagcattcttgcagtttgacgatggatgagcaactgtctcgtgaagataaagaattttataggatgttcgatccaagaaatgcagagcaccaggtttgttctgggattctttacacaaaagtgaaaaagaagaaactgttcaatagggctaaatggcaaaagttcaatgtggaattgactaatacttcgttcaatttatactctttcaagactgggaagttaaagaaaagcattaaattggataaaattatcgattgtattgaacttgataataattcgaagatgaaaaatgacgacactaattttgcgctaattacatttgatgaaaggttatcttttaaagccgctaacgatcaagatatggtggattggataataaatttcaagagtggaattttgataagaaaaaaattaaaggccgaaaatatataagcaatgccaatgatgaatatgtattgactttttttttctttgtactattaaataatacgtgtaattgttttccttacgtctagttaaaaaactatttatttatttgtatttta

SEQ ID NO: 147 - DNA, 1748 bp, Saccharomyces cerevisiae
attgtaagagtagacagtacatcaagcgaaaataaatattgcaggaatggttttgtctgataaggagttgtttgccataaataagaaagccgtcgaacaaggtttcaatgtgaagcctagattgaactataatacggtcagtggtgtgaacggtccattagtcattttggaaaaggtcaagttcccacgttacaacgaaattgttaatttgacattgccagatggaaccgtgagacaaggtcaagttttggaaattagaggagatagagccattgtgcaagtgtttgaaggtacatctggtattgatgtcaagaagactaccgtggaattcactggtgagagtttgagaattcctgtgtctgaagacatgttgggtagaatttttgacggttctggtagacccattgacaacggtcctaaagttttcgcagaggattacttggacattaacggttctcctatcaacccatatgctcgtatttatccagaagaaatgatttctactggtgtttctgctattgacacaatgaactccattgccagaggtcaaaagatcccaattttctccgcatcaggtttaccacacaacgaaattgcagcacaaatttgtagacaggctggtttggtgagacctaccaaggatgttcatgatggtcatgaagaaaatttctccatcgtttttgctgccatgggtgtcaacttggaaaccgctagatttttcaaacaggatttcgaagaaaatgggtctttggaaagaacttcattatttttgaacttggctaatgaccctaccattgaaagaattatcactccaagattggccttgaccaccgctgaataccttgcttaccaaacggaacgtcatgtgttgaccatcttgaccgatatgtcatcgtatgctgatgctcttagagaagtttccgctgctagagaagaagttccaggtagaagaggttatcctggttacatgtatacagatttgtccacaatttatgaaagagcaggtagagtagagggtcgtaacgggtccatcactcaaatacctatcttgacaatgcctaacgatgatattacgcatccaattccggatttgaccggttatattaccgagggtcaaatcttcgttgaccgtcaattacataacaagggtatctacccaccaatcaacgtcttgccttcgttgagtagattgatgaaatctgccatcggtgaaggtatgaccagaaaggaccacggtgacgtttctaaccaattgtatgccaagtacgccatcggtaaggacgctgctgctatgaaggccgttgtcggtgaagaggcgttatccatcgaagataagttatctttggaatttttggaaaaattcgaaaagacctttatcacacaaggcgcctacgaggacagaaccgttttcgaaagtttggaccaggcatggagtttgctaagaatctaccctaaggagatgttgaatagaatctccccaaagattcttgatgaattttacgatagagccagagacgatgccgacgaagatgaagaagatcccgacacaagaagctccggtaagaagaaggacgccagccaagaagaatctctaatctaagaggacggttgctgaagaaaaaggctttttttattttgtccgttttttttttgtaaaacccaaagatctgaatctaaagcttttttaaacgtatatagatgtctacatgtgtgtttttgtttttttacgtacgtatacccacctatat

SEQ ID NO: 148 - DNA, 1653 bp, Saccharomyces cerevisiae
gcaacaaagcaggctaacaaactaggtactcacatacagacttattaagacatagaactatgactacggataacgctaaggcgcaactgacctcgtcttcagggggtaacattattgtggtgtccaacaggcttcccgtgacaatcactaaaaacagcagtacgggacagtacgagtacgcaatgtcgtccggagggctggtcacggcgttggaagggttgaagaagacgtacactttcaagtggttcggatggcctgggctagagattcctgacgatgagaaggatcaggtgaggaaggacttgctggaaaagtttaatgccgtacccatcttcctgagcgatgaaatcgcagacttacactacaacgggttcagtaattctattctatggccgttattccattaccatcctggtgagatcaatttcgacgagaatgcgtggttggcatacaacgaggcaaaccagacgttcaccaacgagattgctaagactatgaaccataacgatttaatctgggtgcatgattaccatttgatgttggttccggaaatgttgagagtcaagattcacgagaagcaactgcaaaacgttaaggtcgggtggttcctgcacacaccattcccttcgagtgaaatttacagaatcttacctgtcagacaagagattttgaagggtgttttgagttgtgatttagtcgggttccacacatacgattatgcaagacatttcttgtcttccgtgcaaagagtgcttaacgtgaacacattgcctaatggggtggaataccagggcagattcgttaacgtaggggccttccctatcggtatcgacgtggacaagttcaccgatgggttgaaaaaggaatccgtacaaaagagaatccaacaattgaaggaaactttcaagggctgcaagatcatagttggtgtcgacaggctggattacatcaaaggtgtgcctcagaagttgcacgccatggaagtgtttctgaacgagcatccagaatggaggggcaaggttgttctggtacaggttgcagtgccaagtcgtggagatgtggaagagtaccaatatttaagatctgtggtcaatgagttggtcggtagaatcaacggtcagttcggtactgtggaattcgtccccatccatttcatgcacaagtctataccatttgaagagctgatttcgttatatgctgtgagcgatgtttgtttggtctcgtccacccgtgatggtatgaacttggtttcctacgaatatattgcttgccaagaagaaaagaaaggttccttaatcctgagtgagttcacaggtgccgcacaatccttgaatggtgctattattgtaaatccttggaacaccgatgatctttctgatgccatcaacgaggccttgactttgcccgatgtaaagaaagaagttaactgggaaaaactttacaaatacatctctaaatacacttctgccttctggggtgaaaatttcgtccatgaattatacagtacatcatcaagctcaacaagctcctctgccaccaaaaactgatgaacccgatgcaaatgagacgatcgtctattcctggtccggttttctctgccctctcttctattcactttttttatactttatataaaattatataaatgacata

SEQ ID NO: 149 - DNA, 1528 bp, Saccharomyces cerevisiae
ggctacataaacaattgacattggatctctagttttacgttgttttcaactgcatctttttcttctttcttagcacggagcccttacgtcttcttttctatcccatcgccctttttgcctctattctcccctatatagccattttagaaagtaacttcaatttgaagaagacaaaaatgggtcaattgctttcccatccgttgacggagaagaccatagaatataatgaatataaaaacaaccaggcgtcaactggtattgttccacgattttacaattgtgtggggtccatgcaaggctatcgtttgactcaggaagatgcacatctaattagaaatgaaaactctgttgtgtacgtacgatttttcaacccattcatagacaaatacgaaaccctgtcattgaacgtcttcgcagtattcgatggtcatggtggagatgattgttcgaaatttctaagcggcggccgccaccatcgcgatggtaacggcagtagcaacggtaatggtgaacccaacgctggcctgatcaaatggattgcgtatagtttcgaaaaccaccattacacatctacaactaataacgactcatcaaaatttaaaagatccttcaatacgttggaaggacttgtttctcaaatttttaaagacgctttcatattgcaagatgaagagttatatcgacattttgccaacagttcgtgtggatctacagcagtagtagcatgcatcataaacgaggaatcactgtatgtggctaactgtggtgattcgcgatgtattctttcctccaaatcgaatggcataaagacgatgtctttcgatcataagccacaacacataggagaattgatacgtataaacgataatggtggtactgtctctcttggaagagtgggtggagtactggctctcagtagggcatttagtgatttccaattcaagagaggtgtcacttatccacatagaaggacaaaactaacaaatattacccagaatttaacttatggaaccccaccacaagaagcacaagttaccgttgaaccagacgtattgatgcacaagattgactattctaaagatgagtttttagtactggcttgcgacggtatatgggatatttataacaacaaacagttaattcactttataaagtatcacctggtatcagggacgaagttggatacaataataacaaaattgttggaccacgggatagcgcaggcaaatagcaatactggtgtcggctttgacaatatgactgccatcattgtagtgctaaaccggaaaggcgaaacattgcaagactggtttaataaaatgaagacccgtttggaaagagaaaggggcctagtgtaaggaaaaaaaattatttttcttcttcctttttctcatacatatctgaacgtgtggttaatgtgtctgtgtattagtgtataggatcaactgcttgggagatgaaataacaaaagtaccttaaaacgacctcattatcacatttttttttttactttattattttattgtgc

SEQ ID NO: 150 - DNA, 740 bp, Saccharomyces cerevisiae
caacgcaaacgaacacacgttttgttcactcctaatgttgaagtctatatttgcgaagcgatttgcttccacagggtcatatcctggttctacaagaattactttgccaagaaggcctgcaaaaaaaattcaactggggaagtcacgaccggctatttatcaccaattcaatgtcaaaatggagttgagtgatggaagtgtagttatccggagatcccaatatccaaagggtgaaattagattaattcaagaccagagaaataatccgctgtggaatcctagcagggatgacctagtcgttgtggatgctaattctggtggtagcttggacagatttaacaagaggtatagctctttgttttctgtcgattcaacgaccccaaattcaagctctgaaacagttgaactatctgaagaaaataaaaagaaaacacagattaaaaaggaggagaaggaagacgtttctgaaaaagcgttcggtatggatgactatctatctctgttagacgatagtgaacaacagatcaaatcaggtaagttggccagtaagaagagagacaagaagtgaatagtgtttgctccccttacttttctattctcgaaccaatttatattccttttgggacatagatctcaatcgcatctgtttgaagactacataaacagccttgtatataccgcaacatatacacatacgtctacatatgtatatattgacaacgaagattctgcgaacgctt

SEQ ID NO: 151 - DNA, 2166 bp, Saccharomyces cerevisiae
tttcaagaaaaattgtcgttcttcaatatcagtagacgattttactctcagattgttaaaaaatcggttaagattaaaagaatgagtgtagaagatatcaagaaggctagagccgctgttccatttaacagagaacagctagaaagtgttttgagaggaagatttttttatgccccagcttttgacttgtacggtggggtttctggtttatatgactatggtccaccaggttgtgcattccaaaacaacatcattgacgcctggagaaagcattttattttggaagaagatatgttggaagttgattgtactatgttaactccatatgaggttttgaagacctcaggtcatgttgacaaattttctgattggatgtgtagagatttgaagactggtgagattttcagagctgaccatttagtcgaagaagttttggaagctcgcttaaagggtgaccaagaagccagaggtttagtcgaggatgctaatgccgctgctaaggacgatgccgaaaagaagaagagaaagaaaaaagttaaacaaattaaagcagtcaaattggatgacgacgttgtcaaagaatatgaagaaattttggctaaaatagatggttattccggcccagaattaggtgaattgatggaaaaatacgatatcggtaacccagtcaccggagaaactttagaatctccaagggcttttaacctgatgtttgaaacggctattggcccatctggtcaattaaagggttacttgaggccagaaactgcccaaggtcaattcttgaattttaacaagttgttagaatttaacaacagtaagaccccttttgcctcagcctctatcggtaaatcatttagaaatgagatttccccaagggccggtttattaagagtccgtgaatttttgatggcagagattgaacatttcgttgacccattggacaaatctcatccaaaatttaatgaaatcaaagacatcaagctttcctttttgcctcgtgatgttcaagaagctggttctactgaaccaattgtcaagacagttggtgaagcagttgcttcaagaatggtcgataatgaaactttgggttactttattgccagaatttaccaatttttgatgaaaattggtgttgatgagtccaaattgagattccgtcaacatatggctaatgaaatggcacattatgctgctgactgttgggatggtgaattgaagacatcttacgggtggattgaatgtgtcggatgtgctgatagatctgcctatgatttgaccgttcattccaaaaagaccaaagaaaaattggttgttagacaaaaattagataatccaattgaagtcaccaagtgggaaattgatttgacgaaaaaattgttcggtccaaaattcagaaaagatgcaccaaaagttgaatctcatctattgaatatgtctcaagatgacttggcttccaaggctgagttattgaaggcaaatggcaagtttactataaaggttgatggtgttgatggcgaagtcgagttggacgataaattggttaaaatcgaacaaagaacaaaggttgaacacgttagagaatatgttcctagtgtcattgaaccatctttcggtattggccgtatcatctactccgtttttgagcactctttctggaacagaccagaagacaatgccagaagtgttctttccttcccacctttggttgctccaacaaaggttcttttagttcctttatctaaccacaaagatttagttcctgttcatcatgaagtcgccaaaatcttaagaaagtctcaaatcccatttaagattgatgattctggagtttccattggtaaaagatatgcccgtaatgacgaattaggtactccattcggtgtcaccattgactttgaatctgccaaagaccattctgtcactttgagagaaagagattccaccaagcaagttagaggttccgtcgaaaatgtcatcaaggctatccgcgatatcacttacaatggtgcttcttgggaagaaggtaccaaggatttgactccttttattgcccaagctgaagctgaagctgaaactgactaaataaatgacttaattttaactatatatcgccaaacatgtaaattaaaaaaagaagcgagaagtatatacatgtgtgtatga

SEQ ID NO: 152 - DNA, 4322 bp, Saccharomyces cerevisiae
tcaagatatataagtaacaagcagccaatagtataaaaaaaaatctgagtttattacctttcctggaatttcagtgaaaaactgctaattatagagagatatcacagagttactcactaatgactaacgaaaaggtctggatagagaagttggataatccaactctttcagtgttaccacatgactttttacgcccacaacaagaaccttatacgaaacaagctacatattcgttacagctacctcagctcgatgtgcctcatgatagtttttctaacaaatacgctgtcgctttgagtgtatgggctgcattgatatatagagtaaccggtgacgatgatattgttctttatattgcgaataacaaaatcttaagattcaatattcaaccaacgtggtcatttaatgagctgtattctacaattaacaatgagttgaacaagctcaattctattgaggccaatttttcctttgacgagctagctgaaaaaattcaaagttgccaagatctggaaaggacccctcagttgttccgtttggcctttttggaaaaccaagatttcaaattagacgagttcaagcatcatttagtggactttgctttgaatttggataccagtaataatgcgcatgttttgaacttaatttataacagcttactgtattcgaatgaaagagtaaccattgttgcggaccaatttactcaatatttgactgctgcgctaagcgatccatccaattgcataactaaaatctctctgatcaccgcatcatccaaggatagtttacctgatccaactaagaacttgggctggtgcgatttcgtggggtgtattcacgacattttccaggacaatgctgaagccttcccagagagaacctgtgttgtggagactccaacactaaattccgacaagtcccgttctttcacttatcgcgacatcaaccgcacttctaacatagttgcccattatttgattaaaacaggtatcaaaagaggtgatgtagtgatgatctattcttctaggggtgtggatttgatggtatgtgtgatgggtgtcttgaaagccggcgcaaccttttcagttatcgaccctgcatatcccccagccagacaaaccatttacttaggtgttgctaaaccacgtgggttgattgttattagagctgctggacaattggatcaactagtagaagattacatcaatgatgaattggagattgtttcaagaatcaattccatcgctattcaagaaaatggtaccattgaaggtggcaaattggacaatggcgaggatgttttggctccatatgatcactacaaagacaccagaacaggtgttgtagttggaccagattccaacccaaccctatctttcacatctggttccgaaggtattcctaagggtgttcttggtagacatttttccttggcttattatttcaattggatgtccaaaaggttcaacttaacagaaaatgataaattcacaatgctgagcggtattgcacatgatccaattcaaagagatatgtttacaccattatttttaggtgcccaattgtatgtccctactcaagatgatattggtacaccgggccgtttagcggaatggatgagtaagtatggttgcacagttacccatttaacacctgccatgggtcaattacttactgcccaagctactacaccattccctaagttacatcatgcgttctttgtgggtgacattttaacaaaacgtgattgtctgaggttacaaaccttggcagaaaattgccgtattgttaatatgtacggtaccactgaaacacagcgtgcagtttcttatttcgaagttaaatcaaaaaatgacgatccaaactttttgaaaaaattgaaagatgtcatgcctgctggtaaaggtatgttgaacgttcagctactagttgttaacaggaacgatcgtactcaaatatgtggtattggcgaaataggtgagatttatgttcgtgcaggtggtttggccgaaggttatagaggattaccagaattgaataaagaaaaatttgtgaacaactggtttgttgaaaaagatcactggaattatttggataaggataatggtgaaccttggagacaattctggttaggtccaagagatagattgtacagaacgggtgatttaggtcgttatctaccaaacggtgactgtgaatgttgcggtagggctgatgatcaagttaaaattcgtgggttcagaatcgaattaggagaaatagatacgcacatttcccaacatccattggtaagagaaaacattactttagttcgcaaaaatgccgacaatgagccaacattgatcacatttatggtcccaagatttgacaagccagatgacttgtctaagttccaaagtgatgttccaaaggaggttgaaactgaccctatagttaagggcttaatcggttaccatcttttatccaaggacatcaggactttcttaaagaaaagattggctagctatgctatgccttccttgattgtggttatggataaactaccattgaatccaaatggtaaagttgataagcctaaacttcaattcccaactcccaagcaattaaatttggtagctgaaaatacagtttctgaaactgacgactctcagtttaccaatgttgagcgcgaggttagagacttatggttaagtatattacctaccaagccagcatctgtatcaccagatgattcgtttttcgatttaggtggtcattctatcttggctaccaaaatgatttttaccttaaagaaaaagctgcaagttgatttaccattgggcacaattttcaagtatccaacgataaaggcctttgccgcggaaattgacagaattaaatcatcgggtggatcatctcaaggtgaggtcgtcgaaaatgtcactgcaaattatgcggaagacgccaagaaattggttgagacgctaccaagttcgtacccctctcgagaatattttgttgaacctaatagtgccgaaggaaaaacaacaattaatgtgtttgttaccggtgtcacaggatttctgggctcctacatccttgcagatttgttaggacgttctccaaagaactacagtttcaaagtgtttgcccacgtcagggccaaggatgaagaagctgcatttgcaagattacaaaaggcaggtatcacctatggtacttggaacgaaaaatttgcctcaaatattaaagttgtattaggcgatttatctaaaagccaatttggtctttcagatgagaagtggatggatttggcaaacacagttgatataattatccataatggtgcgttagttcactgggtttatccatatgccaaattgagggatccaaatgttatttcaactatcaatgttatgagcttagccgccgtcggcaagccaaagttctttgactttgtttcctccacttctactcttgacactgaatactactttaatttgtcagataaacttgttagcgaagggaagccaggcattttagaatcagacgatttaatgaactctgcaagcgggctcactggtggatatggtcagtccaaatgggctgctgagtacatcattagacgtgcaggtgaaaggggcctacgtgggtgtattgtcagaccaggttacgtaacaggtgcctctgccaatggttcttcaaacacagatgatttcttattgagatttttgaaaggttcagtccaattaggtaagattccagatatcgaaaattccgtgaatatggttccagtagatcatgttgctcgtgttgttgttgctacgtctttgaatcctcccaaagaaaatgaattggccgttgctcaagtaacgggtcacccaagaatattattcaaagactacttgtatactttacacgattatggttacgatgtcgaaatcgaaagctattctaaatggaagaaatcattggaggcgtctgttattgacaggaatgaagaaaatgcgttgtatcctttgctacacatggtcttagacaacttacctgaaagtaccaaagctccggaactagacgataggaacgccgtggcatctttaaagaaagacaccgcatggacaggtgttgattggtctaatggaataggtgttactccagaagaggttggtatatatattgcatttttaaacaaggttggatttttacctccaccaactcataatgacaaacttccactgccaagtatagaactaactcaagcgcaaataagtctagttgcttcaggtgctggtgctcgtggaagctccgcagcagcttaaggttgagcattacgtatgatatgt

SEQ ID NO: 153 - DNA, 3188 bp, Saccharomyces cerevisiae
atgaatccgggcggtgaacaaacaataatggaacaacccgctcaacagcaacaacaacagcaacaacaacagcagcaacagcaacagcaggcagcagttcctcagcagccactcgacccattaacacaatcaactgcggaaacttggctctccattgcttctttggcagaaacccttggtgatggcgacagggccgcaatggcatatgacgccactttacagttcaatccctcatctgcaaaggctttaacatctttggctcacttgtaccgttccagagacatgttccaaagagctgcagaattatatgaaagagcacttttggtaaatcccgaactatcagatgtgtgggctactttaggtcattgttatctgatgctggatgatctgcaaagagcttacaatgcctatcaacaggctctctaccacctcagtaatcccaacgtaccgaaattatggcatggaatcggcattctttatgacagatatggttcgctcgactatgccgaagaagcttttgccaaagttttggaattggaccctcattttgaaaaggcaaacgaaatttacttcagactaggtattatttataaacatcagggtaaatggtctcaagctttggaatgcttcagatacattctccctcaacctcctgctcccttgcaggagtgggacatatggtttcagttgggtagtgttttggagagtatgggagagtggcaaggtgcgaaggaagcctacgagcatgtcttggctcaaaatcaacatcatgccaaagtattacaacaattaggttgtctttacggtatgagtaacgtacaattttatgaccctcaaaaggcattggattatcttctaaagtcgttagaagcagatccctccgatgccactacatggtaccatctcggtagagtgcatatgattagaacagattatactgccgcatatgatgctttccaacaagctgttaatagagattcaagaaaccctatcttttggtgctcaatcggtgttttatattaccaaatttctcaatacagagacgccttagacgcgtacacaagagccataagattaaatccttatattagtgaagtttggtacgatctaggtactctttacgaaacttgtaacaaccaattatctgacgcccttgatgcgtataagcaagctgcaagactggacgtaaataatgttcacataagagaaagattagaagctttaacaaagcagttagaaaacccaggcaatataaacaaatcgaacggtgcgccaacgaatgcctctcctgccccacctcctgtgattttacaacctaccttacaacctaatgatcaaggaaatcctttgaacactagaatttcagcccaatctgccaatgctactgcttcaatggtacaacaacagcatcctgctcaacaaacgcctattaactcttctgcaacaatgtacagtaatggagcttcccctcaattacaagctcaagctcaagctcaagctcaagcacaagctcaagcacaagcacaagctcaagcacaagcacaagcacaagcgcaagcacaagcacaagcacaggcgcaagcacaggcacaagcacaagcacaagcacatgcacaagcgcaagcacaagcacaagcacaggcacaagcacaagcacaggcgcaggcacaacaacaacaacaacaacagcaacaacaacaacaacaacaacaacaacaacaacaacaacaacaacaacaacaacaacaacagcagcagcaattacagcccctaccaagacaacagctgcagcaaaagggagtttctgtgcaaatgttaaatcctcaacaagggcaaccatatatcacacagccaacagtcatacaagctcaccaactgcaaccattttctacacaagctatggaacatccgcaaagctctcaactgccacctcaacagcaacaactacaatctgttcaacatccacaacaacttcaaggccagcctcaagcccaagctccccaacctttaatccagcataacgtggaacagaacgttttacctcaaaagagatacatggaaggtgcaatccacactttagtagatgccgccgtatccagtagcacccacacagagaataacacaaagtctcctcgtcaaccaacccatgccattccaacgcaagctcccgcaacaggaataacgaacgctgaaccacaggtaaagaagcaaaagttgaactctccaaattcaaacatcaacaaattagtaaatactgctacttccattgaagaaaatgcaaaatctgaggtgagcaaccaatcgccagcagtagtggagtctaataccaataatacttcacaagaagaaaaacctgtaaaagcaaactcaataccttcagtaattggcgcacaggaacctccacaggaagctagtcctgctgaagaagctaccaaagcagcttctgtttctccttctacaaaaccgcttaatacggaaccagagtcatctagtgtccaaccaactgtatcatcagaaagttcaacaacaaaagcaaatgaccaaagcactgctgagaccatagaactttctactgctactgttcctgcagaagcaagccctgtagaagacgaagtaagacagcattctaaagaggaaaacggcacaactgaagcatctgcaccttctactgaagaggcggagccagcagcttccagagatgctgaaaaacaacaagatgaaaccgctgctacaacgataactgtaatcaaacctactttggaaacaatggaaacagtgaaagaggaggccaaaatgcgtgaggaagagcaaacatctcaagaaaaatccccacaggagaacacacttccaagagaaaatgtagtaaggcaagtggaagaagatgaaaactacgacgactaaaaagtttgcattcaaaaaattaatctactaatttataatcaacgagaaatgttgtgtagctcacaattcattcattatgttgtggatacatatataaataaagaaaaggctaaaaaaaaaggtgggtaacgtgaattaggttatttttcatatatgcacatgtaaatatatgcgtatataaatatattattatttgtatcattacatacttaaaatctattattgcttaaaaggttttcccgatgagcatatgtaataatattgggaattaaggtgcattttcgtat

SEQ ID NO: 154 - DNA, 779 bp, Saccharomyces cerevisiae
tctttcggcattttccttccttctcatacttagatgtttttgagaaacgtaagagttatttccctcaattcaaggagactatttagaactatgagcaccgtcaagggtaaaccagaagatgctaaaataattgaagcccgtcacgttaaagaaacatctgactgcaagtggatcggtttacaaaaaatcatctacaaagatcccaacgggaaggaaagggaatgggatagcgcagtccgcaccactagaagttccggtggtgtagacggcattggtatcttaaccattctaaaatacaaagatggaaaacctgatgaaattttgctacaaaagcagtttcgccctcccgttgagggcgtatgcattgagatgccagccggtttgatagatgcgggtgaagatattgacactgctgccttaagagaattaaaagaagagactggttacagtggtaaaataatttctaaaagcccaacagtttttaacgatcctggtttcacaaacaccaacctctgtctggttactgtcgaagttgatatgagtttacctgaaaaccaaaaaccagttactcaattggaagataatgaatttatcgaatgctttagcgttgagttgcacaagtttcctgatgaaatggttaagttggatcaacaaggctacaagttggatgcacgtgttcaaaacgtagctcaaggtatcctcatggccaagcaataccacatcaaatagatagcgataagtagtgtttctgtatgaaaaataggcgagatgttaatacc

SEQ ID NO: 155 - DNA, 644 bp, Saccharomyces cerevisiae
agcttagttaatacaaataaaaaagtacaatgtcctccaatcttaccgaagaacaaattgctgaattcaaagaagcctttgccctctttgataaagataacaatggctctatctcatcaagtgaattggccactgtgatgaggtcattgggtctttcgcccagtgaagcagaagtaaatgatttgatgaacgaaatagatgttgatggtaaccatcaaatcgaatttagtgaatttttggctctgatgtctcgtcaactcaaatcaaatgactctgaacaagaactactagaagcttttaaagtattcgataagaacggtgatggtttaatctccgccgctgagttgaaacacgtgctaacatccattggtgaaaaattgactgatgccgaagtagatgatatgctaagagaggttagtgatggatcaggcgagatcaacattcaacaattcgctgctttgttatctaaataggtgcatccttgtgattttttgctcccgctatcttacccttaccattctggttttatagtattcgttgagtatcgtttcatctaaagtttgacaaccacacgcaaatatatactgtacgtagacagggttaatgttatttatgtagataagtaatgttcctgagaagacagt

SEQ ID NO: 156 - DNA, 922 bp, Saccharomyces cerevisiae
cgaaagagtaaaatagaaaaaaaaacacatacataactatggaaaagctattacagtggtctattgcgaattctcaaggggacaaagaagctatggctagggccggccaacctgatcctaaattgctacagcagttattcggtggtggtggtcctgacgatccaaccttaatgaaagaatccatggctgttattatgaatccggaggttgacttagaaacaaaactcgttgcatttgacaactttgaaatgttgattgagaacttagataatgctaataatatcgaaaatttaaaactgtgggagccattgttggatgttcttgttcagacgaaggatgaagaactacgtgctgctgctttatccattattggaacggctgtgcaaaacaacttggattcgcaaaataatttcatgaaatacgacaatggtctgcgaagccttatcgaaatagctagtgacaagacaaagccactcgacgtgagaacaaaagctttttacgcactatctaatctaataagaaaccacaaagatatctcagaaaagtttttcaaattaaatgggctcgactgcatagcacctgtattaagtgataacaccgccaaaccaaaactgaaaatgagagccattgccttattgaccgcatatttgtcatctgttaagattgatgaaaatataatcagtgtgctgagaaaggatggagtaattgaaagtacgattgagtgcttgtctgacgagagtaacttgaacatcatagatagagttctgtcttttctctctcacctgatatcttccggaataaaatttaatgaacaggaattgcacaaattgaacgaaggttacaaacatatcgagcctctaaaggacagacttaatgaagacgattatttagccgtaaagtatgtattatgattacgtccgta

SEQ ID NO: 157 - DNA, 1488 bp, Saccharomyces cerevisiae
tgagaataagaacaacaacaaatagagcaagcaaattcgagattaccaatgtttaaatctgttgtttattcaattttagccgcttctttggccaatgcaggtaccattcccttaggcaaactagccgatgtcgacaagattggtacccaaaaagatatcttcccatttttgggtggtgccggaccatactactctttccctggcgactatggtatttctcgtgatttgcctgaaggttgtgaaatgaagcaactgcaaatggttggtagacatggtgaaagataccctactgtcagtctggctaagactatcaagagtacatggtataagttgagcaattacactcgtcaattcaacggctcattgtcattcttgaacgatgattacgagtttttcatccgtgatgacgatgatttggaaatggaaaccacttttgccaactcggacgatgttttgaacccatacactggtgaaatgaacgccaagagacatgctcgtgacttcttggctcaatacggttacatggtcgaaaaccaaaccagtttcgccgtttttacctctaattctaagagatgtcatgacactgctcaatatttcattgatggtttaggtgaccaattcaacatcaccttgcagactgtcagtgaagctgaatccgctggtgccaacactttgagtgcttgtaactcatgtcctgcttgggactacgatgccaatgatgacattgtaaatgaatacgacacaacctacttggatgacattgccaagagattgaacaaggaaaacaagggtttgaacttgacctcaactgacgctagtactttattctcgtggtgtgcatttgaagtgaacgctaaaggttacagtgatgtctgtgatattttcaccaaggatgaattagtccattactcctactaccaagacttgcacacttattaccatgagggtccaggttacgacattatcaagtctgtcggttccaacttgttcaatgcctcagtcaaattattaaagcaaagtgagattcaagaccaaaaggtttggttgagttttacccacgataccgatatcctaaactttttgaccaccgctggtataattgacgacaaaaacaacttaactgccgaatacgttccattcatgggcaacactttccacagatcctggtacgttcctcaaggtgctcgtgtctacaccgaaaaattccaatgttctaacgacacctacgtcagatacgtcattaacgatgctgttgttccaattgaaacctgttccactggtccagggttctcttgtgaaatcaatgacttctacgactatgctgaaaagagagtagccggtactgacttcctaaaggtctgtaacgtcagcagcgtcagtaactctactgaattgaccttctactgggactggaacactactcattacaacgccagtctattgagacaatagttttgtataactaaataatattggaaactaaatacg

SEQ ID NO: 158 - DNA, 1440 bp, Saccharomyces cerevisiae
ttccaaattacctatgtttaagtctgttgtttattcggttctagccgctgctttagttaatgcaggtacaattcccctcggagagttagccgatgttgccaaaattggcactcaggaagacatattcccattcctgggtggtgccgggccatacttctctttccctggcgactatggtatttctcgtgacttgcctgaaggttgtgaaatgaaacaattgcaaatgcttgccagacatggtgaaagatacccaacttacagtaaaggtgctaccatcatgaaaacatggtataagttgagcaattacacacgtcaattcaacggctcattgtcattcttgaacgatgattacgagtttttcatccgtgatgacgatgatttggaaatggaaaccacttttgccaactcagacaatgttttgaatccatacactggtgagatggatgctaagagacatgctcgtgagtttttagcgcaatatggctacatgttcgaaaatcaaaccagtttcccaattttcgccgctagttctgaaagggttcatgacactgctcaatatttcattgatggtttaggtgaccaattcaacatctccttgcagactgtcagtgaagccatgtccgccggcgcaaacactttgagtgctggtaatgcgtgcccaggatgggatgaagatgctaacgatgacattttggacaaatacgataccacatacttggatgacattgccaagagattaaacaaagaaaacaagggtttgaatttgacctcaaaggacgccaacactttgtttgcatggtgtgcatacgaattgaacgctagaggctacagtgatgtttgtgatatcttcaccgaagatgaattggtacgttactcatacggccaggacctggtatcgttttaccaggatggaccaggttatgatatgatcagatccgtcggtgccaacttgtttaacgctactttgaagttgttaaagcaaagtgaaactcaagacttaaaagtctggttgagttttacccacgataccgatatcctaaactatttgaccaccgctggtataattgacgacaaaaacaacttaactgccgaatacgttccattcatgggcaacaccttccataagtcctggtacgttcctcaaggtgctcgtgtctacaccgaaaaattccaatgttctaacgacacctacgtcagatacgtcattaacgatgctgtcgttccaattgaaacctgttccaccggcccagggttctcttgtgaaatcaatgatttctacgactatgctgaaaagagagtagctggtactgacttcctaaaggtctgtaacgtcagcagtgtcagtaacgtcaccgaattgaccttctactgggactggaatactactcactacaacgataccctattaaaacaataaattgtataaataaataatattgc

SEQ ID NO: 159 - DNA, 444 bp, Saccharomyces cerevisiae
ataatattaaagtgcaccaagaaaaggatgtcgttctttttaaatagtctaaggggcaaccaggaggtctcgcaagagaagctagacgttgcaggagtgcaattcgatgcgatgtgctcgactttcaacaatattctcagtacgtgtcttgagaaatgtattccgcatgagggctttggtgagcctgatctaacgaaaggtgagcaatgctgcatagacagatgtgtggcaaagatgcattacagcaatcgcctcattggaggatttgtacaaacacgaggtttcgggccagagaatcagctacgacattattcgcgatttgtggccaaagaaatagctgatgattccaaaaaatagctgtaaatatgaggactgtctgtgctgtttgtatataatagtaacctgcatatatagcattataagctgtgtagacaattttagaag

SEQ ID NO: 160 - DNA, 873 bp, Saccharomyces cerevisiae
ttacactatgggagacagctcctaacaccaagcagaaaaacgactttttcgcaaagtatgtaaggcgctgggtgagcccagcggacgaggatgggcttaataagaacgtacagtttagcacagctagaacaggatacagctaagggcaactctgcttttcgggagaagttaaagaggggtagacaatgatggtaatcttataaaccggctacaatgaaggttgtagcagcaaggaagatgatattttaatacggttcaggtgaaatgaaatagccgcccataacggcatgctcaagttgtaagtcaggactctagctttctactgtagtatcctctaaaggactgctgttctgtgcacccccttcctttgtttatcatagcgcacgacaagagtactaactaattaacttagaacattaacatatataaaactagcgctatggccgcaactaaagaagcaaagcaaccaaaggaaccaaagaagaggaccaccaggagaaagaaggatcctaacgcccctaagaggcggttgtcagcttatatgttctttgctaatgaaaacagagacattgtccgttccgagaatcctgacgtaacttttggccaagtaggcagaatattgggtgagaggtggaaggccttaactgctgaagaaaagcaaccctatgaatctaaggctcaagcagacaagaagagatacgaatctgaaaaggaattgtacaatgctacacgtgcttgatctaacaactcaatgttctctacctcccatacaacgtacttttgaaacttcagaaagaagttgagtaggttgcattatgtgttattattattactattatcattattttacttatatatccttcttttctttta

SEQ ID NO: 161 - DNA, 805 bp, Saccharomyces cerevisiae
atgttagaagcaaaatttgaagaagcatcccttttcaagagaataattgatggtttcaaagattgtgtccagttggtcaatttccaatgtaaagaagatggtatcattgcacaagctgtcgatgactcaagagttctattggtctccttggaaataggtgtcgaagccttccaagaatatagatgtgaccatcctgttacgttaggtatggatctaacctcactaagtaaaatcctacgttgtggtaacaacaccgatacattaacactaattgctgacaacacaccggattccatcatcttattatttgaggataccaagaaagaccgtatagccgaatactctctgaaattgatggatatcgatgctgatttcttaaagattgaagaattacagtacgactccaccctgtcattgccatcttccgaattctctaaaattgttcgtgacttgtcccaattgagtgattctattaatatcatgatcaccaaagaaacaataaagtttgtagctgacggtgatatcggatcaggttcagtcataataaaaccattcgtggatatggaacatcctgaaacaagcatcaaacttgaaatggatcaacctgtcgacttgacgttcggagctaaatatttattggacatcattaagggctcctccctttctgatagagttggtatcaggctctccagcgaagctcctgctttattccaatttgatttgaagagtgggttcctacagtttttcttggctcctaaatttaatgacgaagaataaatgtaaattatctatatagttgtatact

SEQ ID NO: 162 - DNA, 3183 bp, Saccharomyces cerevisiae
aaaatagttttctttttgcagctattattgacttcattaagaaatatcccttttttccccgttgcaattatttctataagggaagctggaaatagggggctggaaaagatatttgaacagtcgctccaataaccgttctcaccatcattaacatttttgaaggtgaatactgtttcggtcgatttatggctaatttgtcaaatacatttgaaaaagattaaaacaagcacaagcggttgagcatactatgtcgcagacaattacatctctagatccgaattgtgttattgtattcaataaaacttcgagtgcaaacgagaagagtttgaatgtcgaattcaaacgtttgaatatacattctattatcgaacctggccatgatctgcaaacaagctatgcgtttattagaatccatcaggataatgcgaaaccgcttttttcatttttgcagaatctggacttcattgaatccatcataccatatcatgatactgaattgtccgatgatttgcataaactgatttctatcagcaaatcaaaaatactggaggctccaaaacagtatgagttgtacaacctatcgaatttgaccaataatcccaaacaatccttatattttgcattcttacagaactatataaaatggttgattcccttctccttttttggattatcaattagatttttatctaattttacgtatgaattcaattccacatactcgctgttcgccatcctatggacattgtcatttacagccttttggctttataaatatgaaccattttggtctgatagactgagtaaatactcatcattttctaccattgagtttcttcaagataaacagaaagcccaaaaaaaagctagttcggttatcatgttgaagaaatgttgttttattcctgtggctttgttgtttggcgcaatattactatcattccagctatattgttttgcgttggaaattttcatcaagcaaatttataacggcccaatgatttccatcttgtcttttttgcctactatacttatttgcacgtttactccggttttaactgtgatttacaacaaatatttcgtagaaccaatgacaaagtgggaaaatcatagcagtgttgtgaatgcaaagaaatctaaagaagctaagaactttgttattatttttctatccagttacgttcccctattaattacactatttctttatctgccaatggggcatttgttgaccgcagaaataagaactaaggttttcaatgccttttcaatattggcccgtttacctacccatgattcagattttattattgatacaaagcgctatgaagatcaatttttctactttattgttatcaaccaactgattcaatttagcatggaaaactttgttccaagccttgttagcattgctcagcagaaaattaatggaccaaatcctaactttgtcaaagctgagagtgaaatcggtaaagctcaactcagctcatcagatatgaaaatttggtcaaaggttaagtcgtaccaaacagacccctggggagcaacatttgatttggacgccaacttcaaaaagcttcttctacaattcgggtatcttgttatgttttctacaatttggccactagctccatttatctgtttgatagtcaatttgattgtttaccaagtcgatttgaggaaagctgtgctttatagtaaacctgagtattttccatttccaatctacgataagccatcctctgtgtctaatacccaaaaactgacggttggtctatggaactctgtcttagttatgttctccatcttaggttgtgttatcactgctactttgacctatatgtaccagagctgtaatataccaggtgtcggcgctcatacttccatccatacgaataaagcttggtacctagcaaatccaataaaccactcgtggataaatattgtactatatgctgtttttattgagcatgttagtgttgctattttcttccttttctctagtattttgaaatcttcccatgatgacgttgcaaatggcattgtgccaaagcatgtagttaacgtgcaaaacccaccaaaacaagaagtctttgaaaaaattccctcccctgaatttaattcgaataacgaaaaagaactagttcaaagaaaagggtctgcgaatgagaagttgcaccaagaactcggtgagaaacagcctgcctcttctgccaatggatatgaggcacatgctgccactcatgccaacaatgatccgtcttctttatcctcagcctcctcgccttcattatcttcttcttcttctagcagcaaaaccggtgtagtcaaagctgttgataacgatacagccggatctgctggtaaaaagccattggccacagaaagtactgaaaaaagaaattctttggtgaaggtgcctaccgttggctcatatggtgttgcgggcgccactttaccagaaacaattccaacatctaaaaattactacttaaggtttgatgaggacggtaaatccattagggatgcgaaatccagtgcagaatcttccaacgccaccaataacaacaccttaggcacggaaagtaagcttttgccagatggtgacgccgttgatgcactaagtagaaaaattgatcaaatacccaaaattgctgttactggtggcgaaaataacgaaaatacccaggccaaagacgatgctgccactaagactccactcattaaagatgcaaatattaagcctgttgtcaacgcagctgttaacgataaccaatcgaaggtttcagtggctactgaacaaacaaaaaagactgaagtaagcacgaaaaatggcccatcaagatctatttccacgaaggaaactaaggattctgcgagaccatctaataacaatactactactactactactacagatgctactcagccccaccatcatcatcaccaccaccgccatcgtgatgctggagtgaagaatgtcacgaacaattctaagacaaccgaatcctcttcctcttcatcggcggcaaaggaaaaaccaaaacataaaaaggggctattgcataagctgaaaaagaagctttaaaaaaaagctaggacgataacaaattttatttttataatatggtgacattaaattaatatgtattcttctttctatcaagtgtatgttttatgtat

SEQ ID NO: 163 - DNA, 649 bp, Saccharomyces cerevisiae
tcttcattcgataggggctcaagttaccaactacaataaattacattatactataacatgtcatctgctctatacaaacaaagcacaaattttactcattctaccggttctttcttgcaaagcgcacctgttgaactgacgacagtcagtgggtaccaggagtttttgaagaagcaagagaaaaagaactatgaaattcaaacagttttaagcgaggataaatcacatggttatgtgctaaaggacggcgaagtcatcgctaatatcattggtgaggccaaagattatcttttggatttggccggccaggcttgaacgagtggctaaatatttgttcgatacgagtcacttcatgcacactttgatttgcactcttattgctgggctgtagttttcttttccgttttcgcttataaatctaacatgttctattaggggaaagaaaggcgcaaattgtagagtttgttaggtcttttaagtacttgatttcaccaaccgaaagtgaaagaaataaaaaaagataaagctattattattaccatgaccctgtcattggtttaaaacgtttgtccgtctgcttttgatgtttttaaaaaaaatttaaataaatattctaaataagtgaattacaggctggtagatagttcgt

SEQ ID NO: 164 - DNA, 796 bp, Saccharomyces cerevisiae
gataggcatcgacctaacttctctgagggggaaacaaaaatataggtttggacagtgatcaacagagaatacaaggtaactattgattttacgcttcacatagaaagttgattaagaactccaaagcaaaaatggctaatttacgtactcaaaagagacttgccgcttctgtcgtcggtgtcggtaagagaaaggtttggttagatccaaatgaaacctctgaaattgctcaagccaactccagaaacgccattagaaaattggttaagaacggtaccatcgtaaagaaggccgttaccgtccactctaaatccagaaccagagcccatgctcaatctaagagagaaggtcgtcacagtggttacggtaagagaaagggtaccagagaagcccgtttaccatcccaagttgtctggatcagaagattacgtgtcttgagaagattattggctaagtaccgtgatgctggtaagattgacaagcacttgtaccatgttttgtacaaggaatctaagggtaacgctttcaaacacaagagagccttggttgaacacatcatccaagctaaggctgatgctcaacgtgaaaaggctttgaacgaagaagctgaagctagaagattgaagaacagagctgctcgtgacagaagagctcaaagagttgctgaaaagagagatgctttattgaaggaagacgcttaaattttctttaattaatttatcttaatatacatactcagttaataaacaggtagcaaaaacttcgataatacgtatgtatgcacatatacctacat

SEQ ID NO: 165 - DNA, 778 bp, Saccharomyces cerevisiae
tcaccttgaaaggccttggcctgtatttttcttttttcttcatccttctttctttttctttattcttatttttcatcttaataaataatccagagaataaatctatcctgaaaaaaaataaagtaaagaagccaggaaaatcactatcgccacaagtaaataaatttcactgactatagagtacatacataaacaagcatccaaaaaaacatgtcttcttctaaacgtattgctaaagaactaagtgatctagaaagagatccacctacttcatgttcagccggtccagtcggcgatgatctatatcactggcaagcatccatcatgggacctgccgattccccatatgccggcggtgttttcttcttgtctatccatttcccaaccgactacccattcaagccaccaaagatctccttcacaaccaagatatatcatccaaatatcaatgccaatggtaacatctgtctggacatcctaaaggatcaatggtctccagctctaactctatcgaaggtcctattatccatctgttctttgttaacagacgctaatcctgacgatcctttagtaccagaaatcgctcatatctacaagactgacagacccaagtacgaagctacagccagagaatggacaaagaaatacgctgtataaacagaagtccttactcagctgaaaaagagaagcaagatttatatgggattggacgatgaaaagaatattagatacaatgtatttaagaaagaatacaataaaatatatgtatattctatct

SEQ ID NO: 166 - DNA, 2420 bp, Saccharomyces cerevisiae
ttcagcctttataaattgagtatgttcaagatacctggttttggaaaagctgctgcaaatcatactccaccagatatgacaaacatggatacccgtacacgccatttaaaggtgtcaaactgtccaaataactcctatgcactcgcaaacgtagctgctgtctcaccaaatgatttccctaataacatttatattattatcgataatttatttgttttcacaactagacactccaacgacattccaccgggaaccattggatttaacggtaaccagcgtacctggggtggttggtccctaaatcaagacgtgcaagcaaaagcatttgatttattcaagtattccggtaagcaatcgtatcttggttcaatagatatagatatctcattcagagctagaggtaaggcggtaagcacggtattcgatcaagatgagttagccaaacaatttgttcgttgctacgaatctcaaatattttctcccacccagtaccttatcatggagttccaaggccatttctttgacttaaaaattagaaatgtccaagcaatcgatttgggtgatattgaaccaacctccgctgttgcaactgggatagagacaaagggaattttgacaaaacaaacacaaattaattttttcaaaggaagagatggtttagttaatttgaaatcatcaaattcattaagaccaagatcaaatgctgtgatcagaccggatttcaagtttgaagatttgggtgtcggtggtttggataaagagtttactaaaattttcagaagagcgtttgcaagtcgaatctttcctccttcagttatagaaaaactgggtatttctcatgttaaaggtttgctattgtacggtcctccaggtactggtaagaccttaattgcaagaaagattggtacaatgctgaatgccaaagagcccaaaatcgtcaatggtccagaaattttgagtaagtacgttggttcttcagaagaaaacattcgtaatttatttaaggatgcagaagcagaatatagggccaagggtgaggaatcttccttacatattattattttcgatgagctggattctgttttcaagcagagaggttcaagaggtgatggtaccggtgtaggggacaatgtagttaatcaattgttagctaaaatggatggtgttgatcaattgaataatattttggttattggtatgaccaatcgtaaagatttaatagacagtgctcttttgcgtccaggtagatttgaagtccaagttgaaattcatttacccgatgaaaaaggaagactccaaattttcgacattcagacgaagaaaatgagggaaaataatatgatgagcgacgatgttaacttagctgagttagctgcgttaacaaaaaacttctctggtgctgagattgagggtttagtgaagagtgcaagttcttttgcaatcaacaaaaccgtcaacatcgggaaaggtgccacaaaacttaacactaaagatatagcaaaacttaaagtaacaagagaagactttttaaatgcactcaacgatgttactcccgcttttgggattagtgaagaagatttgaaaacatgtgtggaaggtggaatgatgctttattccgaacgagttaactcaatattgaagaacggagcccgttacgtccgccaagttcgcgagagtgataaatccaggttagtatctctattaatccacggccctgcagggtccggtaaaacagctttagccgctgaaattgctttaaaatctggattcccattcatcaggttaatttctcccaacgagttgtcaggcatgtcagaaagcgcaaaaattgcctatattgataacactttcagagatgcgtataaatctccactaaacattcttgttattgattcgttagagactctagttgattgggtaccaattggtccaagattctctaataacattttacaaatgctaaaggttgcattgaagcgtaaacccccacaagaccgtcgtttattgatcatgactactacatcagcttattcggtacttcaacaaatggatatcttgagttgcttcgacaatgagatagcagttccaaatatgaccaatttagatgaattgaacaacgtcatgatagaatcaaactttcttgacgatgctggtagagttaaagttattaatgaattatcaaggagctgtcctaacttcaatgtcggtattaaaaagaccttgaccaacattgaaaccgcaaggcacgatgaagatcccgtgaacgagcttgttgagttgatgacccaatccgcataattatttcaaatttttcatgtccttgtatttttattctttatcccttccaatcagaaaggatctagtgaacaagttctttcctctatggtatatattttagtgataaattttataaaattatc

SEQ ID NO: 167 - DNA, 2985 bp, Saccharomyces cerevisiae
catacaaacgcccaggaaacatcaagatggcccccccaccattccgtcctgaaaatgccattaagagagccgatgaacttatttctgttggcgaaaaacaagctgctttacaatctttgcatgatttcataactgccagaagaatccgttgggctacaccttcaactgttgagccagtcgtgtttaaattcttggaaattggtgttgaactaaagaaaggtaagctgctaaaagacggtttgcaccagtacaaaaaattaattcaaggatctaccgaaggtttggtttctgtcggtgccgttgcacgtaaattcattgatttagtcgaatctaaaatcgcttctgaacaaactagagctgacgaacttcaaaagcaagaaatcgatgatgatttggaaggtggtgttaccccagaaaatttgctgatttctgtttacgagtcagatcaatctgtggctggtttcaatgatgaagccattacttcatggttaagatttacttgggaatcatatcgtgcagtcttagatttattgagaaacaacgctttgttggaaattacttattctggtgtcgttaaaaaaactatgcatttctgtttgaagtatcagcgtaaaaacgaattcaagagattagctgaaatgttacgtcaacatttagatgctgctaactaccaacaaagtaaatcaggaaacaatttagttgacttgagcgatgctgataccttgcaacgttatttagatcaacgtttccaacaagtcgatgtttctgtcaagttggaattgtggcacgaggcttatagatccattgaggatgttttccacttaatgaaaatatccaaacgtgctcctaaaccatctactttggctaattactacgagaatctcgtaaaggtcttctttgtttccggtgatccattgttgcacactactgcctggaagaagttttataagttatattctaccaatccaagagccacggaagaagaattcaaaacatattcttctacaattttcctatccgctatttctacccaactagacgaaattccatctattggctacgatcctcatttacgtatgtaccgtttattaaacttggacgccaagccaactagaaaggaaatgttgcaatccattattgaagacgaatccatttatggtaaagttgacgaggaattgaaagaattgtacgatatcattgaagttaactttgatgtcgacacagtgaaacaacagctggaaaatttattagtcaaattgtcttctaaaacctacttcagccaatacatcgcacctttaagagacgtcattatgagaagggtttttgttgctgcctctcaaaaattcactactgtctcccagtccgaattatacaagctcgctaccctacctgctccgttagacttatctgcttgggacatcgaaaaatcgctgttacaagctgctgtggaagattatgtttcaattaccatcgatcatgaatctgctaaggttacattcgctaaagatccatttgacattttcgcatcaactgcttctaaagaagtctctgaagaagaaaacacagagccagaagtccaagaagaaaaggaggaaactgacgaagctcttgggccacaagaaactgaagacggtgaagaaaaggaagaagaatctgatcctgttattatccgcaattcttacatccacaacaagttgcttgaattatccaatgtcctacacgatgttgacagtttcaacaatgcttcatacatggaaaaggttagaattgcccgtgaaactttaattaagaagaacaaggatgaccttgaaaagatttccaagattgttgacgaacgtgtcaagagatctcaagagcaaaagcaaaaacatatggaacatgctgccctacatgctgaacaggatgctgaggtcagacaacagcgtattttggaagaaaaagctgctattgaagctaaattggaagaagaggctcaccgtcgcttaattgaaaagaagaaacgtgaatttgaagctatcaaagaaagagaaatcacaaagatgattactgaggtgaatgctaagggacatgtttacattgaccctaacgaagctaaaagcttagatcttgacaccattaaacaggttattatagctgaggtatcaaagaacaagagtgaattggaaagtcgtatggaatatgctatgaagaagttagatcatacggaaagagctttgagaaaggtcgaattgccattgctgcaaaaagaagttgacaagctacaagaaacagacacagcaaattatgaagctatgaagaaaaaaattgtcgacgccgccaaggccgaatacgaagccagaatggctgatcgtaagaacttggtcatggtctatgatgattatttgaagttcaaggagcatgtttcgggcactaaggaaagcgaattagctgccatccgcaaccaaaagaaggctgaattggaagctgccaaaaaggccagaattgaagaagttcgtaagcgtcgttacgaggaagccattgcaaggcgtaaggaagaaattgcaaatgctgaaagacagaagcgtgctcaagaactcgctgaggctacccgtaaacaaagagaaatcgaagaagctgctgccaagaaatcaactccatactctttccgcgcaggaaacagggaacctccaagtacaccaagcactctaccaaaggcgaccgtttctccagataaagctaaattggatatgatcgctcaaaaacaaagagaaatggaagaagccatcgaacagagactagccggtagaacagctggtgggtcctccccagctactccagctactccagcaaccccagcaaccccaactccatcttctggtccaaagaaaatgactatggctgaaaagttgagagccaagagattggccaaggggggcaggtaacagacaacgcaaaatgatctacttaatttataccgttttttatacgtataagagtatgtgtaca

SEQ ID NO: 168 - DNA, 814 bp, Saccharomyces cerevisiae
aacaattgcttcatttggcatataagctaaaaagactctaatgaattaattaagggaagataagaagaaaaaaaaaaaaggcagttatcagcagcaaacggtatccaaaatattgaagcaatatggtgatgctccattctaaaaacgttaaagggtttctggaaaacactttgaaaccgtatgatttgcattcggtagacttcaagacatcgtctttgcaatcgtctatgattataaccgccactaatgggggtatactgtcctatgcgacgtcaaacaacgatgtaccgaaaaattccataaacgaaataaactcggtcaataacttgaaaatgatgagcttattgattaaggataagtggtcagaggatgaaaacgatactgaggaacagcactccaatagctgttaccctgtggaaatcgactcctttaagacaaaaatatatacttacgaaatggaagatttacatacctgtgtcgcacagatacccaatagcgaccttttgctattgttcattgcggaaggtagcttcccttacggactactggtaattaaaattgaaagagctatgagagagttgactgatttgtttggctacaagctaggttgatgggtttaacaatatgtatcgaggccacaccttttcatgcgtctccggatgggggctggaaaaaacaatgcgaacagtctataaataaacacattttcgcagggacagagtttacgcagacacgccatttacataagcttgattacgcggattgccgtggtgcactttcgtgcactcgcacatatatatgcacgtacataagg

SEQ ID NO: 169 - DNA, 797 bp, Saccharomyces cerevisiae
cgcaataactgtaatcggcggtttattattgtatcaggaaagtcgaaagaagtgacttgaagatcatgaaaacggcctacttggcgtcattggtgctcatcgtatcgacagcatatgttattaggttgatagcgattctgccttttttccacactcaagcaggtacagaaaaggatacgaaagatggagttaacctactgaaaatacgaaaatcgtcaaagaaaccgctcaagatttttgtattcttaggatcgggaggtcatactggtgaaatgatccgtcttctagaaaattaccaggatcttttactgggtaagtcgattgtgtacttgggttattctgatgaggcttccaggcaaagattcgcccactttataaaaaaatttggtcattgcaaagtaaaatactatgaattcatgaaagctagggaagttaaagcgactctcctacaaagtgtaaagaccatcattggaacgttggtacaatcttttgtgcacgtggttagaatcagatttgctatgtgtggttcccctcatctgtttttattgaatgggcctggaacatgctgtataatatccttttggttgaaaattatggaacttcttttgcccctgttgggttcctcccatatagtttatgtagaatcgctggcaaggattaatactcctagtctgaccggaaaaatattatattgggtagtggatgaattcattgtccagtggcaagaattgagggacaattatttaccaagatccaagtggttcggcatccttgtttaagtaaaccatttatgtagg

SEQ ID NO: 170 - DNA, 2068 bp, Saccharomyces cerevisiae
cataaaatagtctgaaattaatacatagaaccaagctgtattataaggtgcctttaccaccgtagctacctaatatagtttctcgataaaaaggcgtaaaaatggacgatagtgtcagtttcattgccaaagaggccagtccagcacaatattcgcacagtttgcatgaaagaacacacagtgaaaaacaaaagagagactttacaataacagaaaaacaagatgaggtatctggacaaacagcggagcctcgaaggacggacagcaaatccatattacagaggaaatgcaaagaattcttcgactcttttaaaaggcagctgccaccagaccgtaattccgaactagagtcccaagaaaaaaacaacctgacaaagtcgatcaaatctcgtcacttagtcatgatcagtctcggtaccggtataggtactggtttactggtcggtaatggtcaggtgctgggaacagctggtcctgccgggttagtccttggttacggaatagcatcgatcatgctttactgtatcatccaagcggcaggcgagttaggtctctgttatgcaggactaaccggcaattacaccagatatccttctattttagtcgacccttcgttgggttttgcagtttctgtggtttacaccattcaatggctaactgttctgcccttacaattggtcactgcggcaatgacagttaagtactggacgagtgtaaatgcagacatctttgttgccgtggttttcgtttttgtaattatcattaatctatttgggtccagaggctatgctgaagccgagttcattttcaattcctgtaagatattgatggtaatcggattcgtcattctggcgattatcatcaattgtggtggtgcaggtgacagaagatacatcggtgctgagtactggcacaatcctggtccatttgcccacggtttcaaaggtgtatgtacggttttctgttatgctgcattcagctacggtggaattgaagttctacttctatctgccgctgagcaggaaaacccaacaaaatctattcccaatgcctgcaaaaaagtggtataccgtattctgctgatttacatgctcaccaccattttggtttgctttcttgttccatacaacagtgacgaattattagggtctagtgactcctctggatcccatgcctccccatttgtcattgctgttgcatcacatggtgtcaaagttgtgcctcactttataaatgctgttattttgatttctgtcatttctgttgcaaactcttcgttatattctgggccaagattgttattatcattggcagaacaaggcgtcttacctaaatgcttagcatatgttgatagaaacggcaggcctttactttgtttttttgtttcccttgtctttggatgcattgggtttgtagccactagtgacgctgaagaacaggttttcacctggttattggcaatttctagtctttcgcaattatttatctggatgtcaatgtccttgtcacatataagatttagagatgccatggcaaagcaaggtcgttcgatgaacgaagttggatacaaagcacaaactggctattggggttcatggcttgcagttttaattgcaatcttcttccttgtgtgccagttctgggtagccatcgcacctgttaatgaacatggaaaacttaacgtcaaagtgtttttccaaaattatttggcaatgcccatcgttttgtttgcctattttggtcacaagatatacttcaaatcatggagcttttggattccagccgaaaaaattgatttggactcacatagaaacatatttgtgtctccatcgcttacagagatcgacaaagttgacgataacgatgatcttaaagagtatgaaaattcagaatcgtcggaaaatccaaacagctcgcgttcaagaaagttttttaagaggatgaccaatttctggtgctaacagcaattccattcattttccgcttggcttcatcgggctttcgttgccactcttcaggataacaaaatatatatttgttttttagcattaatgcaagtcgagaaagg

SEQ ID NO: 171 - DNA, 2082 bp, Saccharomyces cerevisiae
ttcgatactatcaatttatttagcttcaataaaactcaagtgattttagaaatgctatcttcagaagattttggatcttctgggaaaaaggaaacttctcctgattcgatatcgatacgttcctttagtgccgggaataatttccaatcatcatcaagtgagaaaacttattctaagcaaaaatccgggagtgacaaacttatacatagatttgcggattcattcaaaagagccgagggtagcactacaagaactaagcaaataaatgaaaatacgtctgatttagaggatggcgttgagtctatcacgtcggattccaagttgaaaaagtccatgaagtcgcgccatgttgtcatgatgtctttagggacaggtattgggactggtcttttggtagctaatgcaaaaggtctacattacggtggtcctgctgcgctaataattggttacatcttggtttctttcgagacgtacttcatgatccaagctgcaggtgagatggcggtaacctatccgactttaccagcaaatttcaacgcatactcctccatattcatttccaaatcatttggattcgccacagtatggctttactgtttccaatggctaacggttttgcctttagagttaataaccgcgtctatgactattcaatttgggaatgataaaataaatccggacatttatattcttattttctatgttttcttagtattcattcatttcttcggtgtaaaagcctatggtgaaacggaattcatcttcaattgctgtaaaattttaatgattgcaggtttcattattctttctattgttatcaactgtggtggggccggaaatgacggttatatcggggccacttattggcataatccaggtgcttttgcaggtgacacatcgattggtaggttcaaaaacgtttgctatattttagttactgcttacttctcctttggtggtatggaattatttgcactaagtgttcaggaacagtctaaccctagaaaatctactccggtggcagccaagagaagcatttatcgtatcgttgtgatttatcttttgactatgatcctcattggattcaatgttccatataatgatgaccaactaatgggcgcaggcggatccgctacacatgcatctccctatgtcttagccgcttctattcacggtgtgaaaattgttccacatattatcaacgctgttattttgatttctgtggtttcagtggcaaattcctctttgtatgctggtccaagactgatttgctctttggcccaacaaggctacgcacccaagtttttagattacgttgacagagagggcaggcccttgagagctcttattgtgtgttgcgttttcggcgtcattgcttttgttgcagcttcatcaaaggaagagatcgtgtttacatggttagcagctatcgcaggcttgagtgaattattcacatggacttccataatgttgtcccatctgcgattcagacaagcaatgaaagtacagggaaggtctctagacgagttgggatacaaggccacaacagggatttggggttccatatacggtgtcttttttaatattttagtctttgttgcccaattttgggtagcattggcccccttaggtaatgggggcaaatgcgatgcggaatccttctttcaaaattatttagcttttccaatatggttggccttttacttcggatatatggtttacaaccgagattttacgctattaaatcccctcgacaagattgaccttgacttccacagacgcatttatgatccagagctaatgagacaagaggacgaagaaaataaagaaaaactaaggaatatgtctttgatgagaaaagcttatcatttctggtgttaaacttaactacaccactcaggtctggacacttcccattagagccggttgatgatatcacggcatgtccttagcgctgagtaggtatgacttcacaagcacatttgcttgtgccctcccctcccttaatgaccttattcgtttctgtaattttatattttttttacatacattcattaatcatccgtagcatacatacccgca

SEQ ID NO: 172 - DNA, 773 bp, Saccharomyces cerevisiae
ataactataccctctgctaaataaaataaaatgtccgtttccaagattgctttcgttttaagtgccattgcctctttggccgtcgctgacaccagcgccgccgaaactgctgaattgcaagctattatcggtgacatcaactctcatctttctgactacttgggtctagaaactggcaacagtggattccaaattccatctgatgtcttgagtgtgtatcaacaagtcatgacttacaccgatgacgcttacactaccttgtttagtgaattggactttgatgctatcactaagacaattgttaaattgccatggtacaccacaagattgagttctgaaatcgctgctgctcttgcctccgtttccccagcttcttccgaggctgcatcttcttccgaggctgcatcttcttccaaggctgcatcttcttccgaagctacatcctctgccgctccatcctcttctgctgccccatcttcttctgctgccccatcatcatctgccgaatcatcttctaaggccgtttcttcttctgtcgctccaactacctcttctgtcagcacttctacagtcgaaactgcttccaatgccggtcaaagagtcaatgcaggcgctgcctctttcggtgctgttgttgcaggtgcagctgctttattgttataaaagggaaccttttacaacaaatatttgaaaaattacctccattattataccttctctttatgtaattgttagttcgaaaattttttcttcattaatataatcaacttcta

SEQ ID NO: 173 - DNA, 637 bp, Saccharomyces cerevisiae
tcaaaaaaatgtctacatatgaagaggaacatggaatacaacaaaactcaagggattaccaagaagtaggaggaacttcacaggaggagcagagaagacaggtcagatcccaactgcaaggtctatttcaaaactttggtaacaccagtggtgagggtgatgcacattcagattcaacactacttttacgattattatcgcaaatgcttccagaatcattacaggaagaatggttgcaagaaatggataaaggcaagagtgcgggctgtcctgatacttttgcagcctctttaccacgaatcaataaaaaaaagctcaaagcaactgacaactgctccatttgttacactaattatttagaagatgagtaccccttagtagttgaattacctcattgccatcataagttcgacttagagtgtttgtctgtctggctatctcgaagtacaacatgtccattatgcagagataatgttatgggccaccgaatcattaatgagattgatacaactgaagcagaactggaagaagattggggtatgtacggttaatatctttcttttatattatataaagacaccaaacctaagtagaataggtaactacgtcttctttcacagaagacagacctacaagt

SEQ ID NO: 174 - DNA, 1144 bp, Saccharomyces cerevisiae
actgtaaaacaacagtagatgagtacaaggcaagcttaaaaagaaagtattcaagatgggtaagagcagcaaagataaaagagatttgtactatagaaaagcaaaagagcagggctatagggctagatctgctttcaaactacttcaactcaatgaccaatttcatttcctggatgatccaaacttaaaaagagttgtagatttgtgtgcagcaccaggttcatggtcacaagtgctctcgagaaaactgtttgatgaaagtcccagttcagataaggaggacaggaaaattgtctctgtcgatttacaaccgatgtcccccatacctcatgtgacaacgttgcaagccgatatcactcatcctaaaacattggcgaggattctaaaactgtttggcaacgaaaaggccgattttgtttgtagtgatggtgcacctgatgttactgggttacacgatcttgacgaatacgtgcaacaacagttaattatgagtgcgctgcaacttactgcatgcattctgaaaaaaggtggaacttttgtggcaaagatcttcagaggtcgtgatatagatatgctatattcccaattgggctatctattcgataaaatcgtttgcgcaaagccaagatcatcaagaggtacatctctggaagcttttattgtttgtttaggctataacccaccatccaattggacaccaaaattagatgtaaatacatccgttgatgaattttttcaaggctgttttttgaataaattgtgtatatcagacaaattgtctcattggaatgaagaggagagaaacatagccgaatttatggcttgtggaagtcttcaaagtttcgactcagatgccacttatcatgacctaccttcttcggttgcaggcacttcatcgtccttagatcctgttcaaagcccgacgaaccctccctacaagaaagctttggaattaaaaaggagcgggaaactcactagatcagtttgattgcaatattactacctctaatcaaacaattaaataagtcactacattataagattatctacaaaatcaacttttccttgcaatcattaaaaacgatataggttacggttatgtagaatatccattgtataatataaaagaaaatgaaacagtaat

SEQ ID NO: 175 - DNA, 396 bp, Saccharomyces cerevisiae
tagaaaccggaagaacaaaggtggaacatatcataaggggaagaaatgacacaacataaaagctcgatggtgtacatacccaccactaaggaagctaaaagacgtaatgggaaatcagaaggcatactaaatactattgaagaagtggtggaaaagctttattggacctactacatacatttacccttttatttaatggcctcttttgattcattcttcctccatgttttttttctcacaattttcagtttgagtttcttcggtatactaaagtattgcttcctttgaatgattatttatatccttattcggttaataatagtataagctggaggcaaggggacagaaaatttaggaggatatcatggaggatagagttacataaatatacacaca

SEQ ID NO: 176 - DNA, 2393 bp, Saccharomyces cerevisiae
gaagtctttctcacattcagaaatggcagaagcagtactagaaaacgttaacgttcctgcagtcgtttcaaaagatgagtgtatttattgctttgaatccccttataatgaaccattggccctcaatgcatcacctaaacattcattgaatatatgcttaaactgtttccaagctacgtgcaacagacatgttccactccatatccgagtcacagaatatgcttgcgataccatacattccaattatttaactattgctaaagtggagaaacctaagcaagaaaatgtagaagaaaataataacaacaaaaaaataaagctacaggtaattgagacgtcagaagacgacacccacaacactatttggagtttacaaaggttcaatggtgaaaatgttcccaggaccgtactttcgaagtcgacagactctgacatttcttctacggccttggagaagattgaaaagatattaaaggcgaagtcacaagacttcgaggataagaagaactcctgggtgttagaaatcagcacctgtccacatacagaaaactttcaaattccatctaagcccgaaaatactgtgaatttaaaccaatgctcttcctgtgatttgactcaaaatctctggttatgcctacattgtggtaatatcggatgtggcagggaacaaatcgggattgatggtcactcgcatgctttggatcattatcggagtaataataatcacccattagctatcaaattagggtctttaagctcttcaacctatgatctgtattgttacgcatgtgacgacgaaactagatttccagataatgttaatttaggcagtgcactacaaatatacggaattaacatacaagaaaagattgcggatgaaaagactctagttcaattacaagtggaacagaacgaaaattggcaatttagaatggtcgattctagcggtaaagaatttgaaaaattatccgctagtaagaattatggctgtggtctgatcaatttgggtaattcctgttacttaaattcggttatacaaagcttggtgaatggtggcgtcccgaattggtccttggattttctaggaagtaaatttccactggatgttgtatatccggacaataatttaaagtgccaatggatcaagctactcaatgccatgaaatgtgaacccgaactatatccaaatggtatcaaacctactactttcaagaaatgcattgggcaaaatcatcaggaattcagttccaatagacaacaggatgcgatggaatttctaaccttccttttagacttgttagacaagaaatttttttcaagtagttcttcaggtattccaaatcccaacgatttagttagatttatgatggaggataggctccaatgtaacatttgcgggaaggttaaatattcttatgaacccacagaggctatacagattcccttagaggagaatgatgaacctcaagatatgttagagagaatcaaggcgtattttgaagggcagacgattgaatttaaatgtgctaattgtaaggaaaaggttaccgcaaataaaaaacctggtttcaaatctcttcctcaaacacttattttgaacccaataaggattagattacagaactggattcctgttaagacaagtaatgagctttctttaccaggtttaatagacagggatgatatgctagatgtttcgtcttatttatcacaaggatttgatcctcaaactgaaaacttattgcctgatgaggacgaaaaccgtagctcttttacgccaaaccaatgcagtatttctcaattaattgaaatgggctttactcaaaatgctagcgtgcgcgccctatttaacaccggaaaccaagacgctgagagcgctatgaattggctattccagcatatggatgaccctgatttaaatgatccctttgtcccgcctcctaatgtccccaagaaagataagagagaagtggatgaggtatcattgacttcaatgttatccatgggactaaatcccaacttatgtcgtaaagccttgatactcaacaacggagatgttaatcgtagtgttgaatgggtatttaacaacatggatgatgatggaacatttcccgaacctgaagtgccaaatgaagaacagcaacaaaaaaaggatcttggatattcgaccgctaaaccgtacgctttaactgcagttatttgtcataagggaaattctgtccattctggtcactatgttgtttttattcgtaaactagtggcagacaaatggaagtgggttctttataacgatgagaaactagttgctgccgacagcattgaagatatgaaaaaaaatggttatatttatttctatacaagatgctaaaagaacgtttacacacacacacaca

SEQ ID NO: 177 - DNA, 1171 bp, Saccharomyces cerevisiae
agattcttagattaagtttatatgcattgagcaactagacacttttcgtaaaatgagtagtgttggcgattttgaagaaattattttgcatgatttaaaaccttattatcacgttcccggtgccatacatagtgaaggaataaccttcgttaaggaaaccggtacactgttgtgggttgatatttttaaaggagaggttcataaagtcgaagacatagaacagcctgaatccagtcattcttttttttccattagtagagccaattatggcaagaatgcgtcaattgagtaccctcccaatccagatgaattaaaagaatccgtgggctgtatatttccaatacttgatggggcttcacaaaatgaaatcaaacaagtattatttggtagtaaatttggcataggaaaattggattttagcaaaagtgaatgggaatatgtcattttgtattccgaatgtcctgaattgagtacagacagagcatataagttgagatctaatgatgggaacgtttcgccagatggaaaatatatttatgtggggctaatgagcgattttccatttgatttggaacctattgggtgtttgcttcgtgttgacctattagctcacaagatagagcttgtttggaattgcttgttaattcctaacgcgatccactgggatgaaagtgatcaaaagacgatgtacgtgactgattctttaaacttcactatttggaaatgtcctggtggcgacttgctaaaacgtgacgagttaattgacgtgaagaactccaacaatcaatcttttgagtctcctgaaccagatggaagtgcaatttggtttagcaaagacggaaaacattctgggtttctgtttatcactgtctggtccaccagtaaggttcaaatgttcgatttaactaacggaaaattgctgaaggagttcattttgccggagcagacaccaagagtttcatgttgttgttttgttggtaaagatctcttcgtgaccactgccaatgcagaaatcaacgatgctgtaagaaccaatactgacaagaatggtggctgcatctacaaaattccaaacgtgctagacggaaatgttcctctggaatctacaaagcgacaacctctccactaggtgtatatacatatgtttatatatatgcagcatacgtatcca

SEQ ID NO: 178 - DNA, 709 bp, Saccharomyces cerevisiae
agcatactactcactattataagcacatactacgccacatagataatgccgaaagtcgctattttgatttattcagtggacgatataattgccacattagcagaaaatgaaaaaaaaggtatagagatagctggtggtgaggctgagattttccaagtgccagacgtcagctataaaactgaatatgcgacagaagagggaaaagaggcagccaaagtcgccaaaactaatgcagatttttcctataaaatcctaacaagagaaacgttggttgagtacgattactacttattcggaatacctactaagtttggaaacttccccgcggagtggaaaagcttttgggactcgaatactggtgggctttgggcaaagggttctctccatggcaaaattgccggtttgtttgtttcaggcgcaataagcggcaagggtgatacagaaatgtgtatcatgaacgcaatgagtactctggtccatcatggtgtcatttatgtcccattggggtataagaacgcatacaaggaattgaccgacgttgaagatgtgaacgggtcttgcgcctggggcgcaggatgtgtttctggaatcgacggtggcagacctcccagtttatccgagctaagagttcaccaacttcaagggaaggccttttacgaccgtatcaaagatttgtaaaaccgtatatatctttacataagtacgatat

SEQ ID NO: 179 - DNA, 1082 bp, Saccharomyces cerevisiae
gatattttgaagctactagtaagcattaagagacgagatcgctaacaacaagacaaaaatgaaatgtactataccagaacagcaaaaagtcattttgattgatgaaattggtggatacgatgtaatcaagtatgaggattatcctgtaccatcgatttcggaggaagagttactaatcaaaaataagtacacgggtgttaattacatcgaaagttactttcggaagggtatttatccctgtgaaaaaccatacgtattgggcagggaagcgtcggggaccgttgtagcaaaaggtaaaggggtaactaattttgaagttggagaccaagttgcttatatatctaactcaacttttgcacagtattcaaaaatttcgtcccaaggcccagtcatgaagctgccaaagggaacgagtgacgaagagttgaaactttatgcggctggtttattacaagttctcactgctttatcatttacaaacgaagcgtatcacgtcaaaaagggcgactatgtattactttttgccgcagcgggtggtgtgggattgattttaaatcagctactcaagatgaaaggtgcacatacgattgcagttgcctcaactgatgaaaagcttaaaatagcgaaggaatacggcgccgaatacttgatcaacgcttcgaaagaggatattttaagacaagttttaaaattcactaatggtaagggcgttgatgctagttttgactcggtcggaaaggatacctttgaaatcagcttagccgcactaaaaagaaaaggtgtattcgtttcctttggtaatgcatctggtcttatcccgccattctctattaccagactttccccaaaaaatattactttggtgagacctcaactttacggctatatcgccgatcctgaagaatggaaatattactctgacgagttttttggtctggttaattcaaagaagttgaacatcaaaatatacaaaacttatccattacgggattatagaactgcagctgctgacatagaaagtagaaaaactgttggtaagctagttcttgaaataccacaatagaatcatatattgatttatc

SEQ ID NO: 180 - DNA, 2345 bp, Saccharomyces cerevisiae
ttatcgattagataagatagaaaccaacaaaatttgttgtaatagctgtgtccttgtatccttaaaagaaaacagggttgaaggcatatgtattcacatctttctaacttgttaacgtctatgctaggaccgaagtcagaaagcgataaacatgcaagcccaaggttcacaatcgaatgtagggtctttgaggagtaattgctctgacaattcactaccgaacaatcatgttatgatgcactgcgatgaaagcagcggcacgccgcacagcgagcacaacgattatagttacgaaaagaccaatctggaaagtacggcatcaaatagtcgtgaacacagagacaaccagctaagtaggttgaagagtgaggaatacgttgttccaaagaatcaacgtaggggactattgcctcaactcgccattataccggagttcaaggatgccagagattatccaccgatgatgaaaaagatgattgtcttcttgattgcgttttcctccatgatgggccccatgggcacatctatcatttttccagcgatcaactcaatcacaacagaatttaaaacatcagtgattatggtaaacgtttcaattggtgtgtaccttttaagtcttggtgttttcccattgtggtggtcttctctatccgagctagagggcagaagaactacttacataacttcatttgcattattgtttgcatttaatatcgggtctgctctagctcctgatatcaactcatttattgccttgagaatgctctgtggggctgcttctgccagtgttcaaagtgtaggtgctggaacagtggctgatttatatattagcgaagatagaggtaaaaatttgagttattactatttgggtccactactggcgccgctactatctccaatttttggatctttgttagtgaatcgctggccctggagatccactcaatggtttatggttattttatccggatgtaatgtcattcttttgacggtgttactacctgaaacattaagaaaacaagattctaaaggcgctatcgctcaaattttggctgaaagacgtattcaagtagacaataacgaacgtggagagatacaagaagattatcagaggggagaagatgagacagatcgaattgaaaaccaagttgccacattatctactgagaagcataactacgttggagaggtaagggatcaagactcgctagatttagaaagtcactctagccccaatacttatgatggtcgagctggagaaacccaattgcaacggatttatacagaggcgagtagaagtctgtatgaatatcagctagatgatagcggtatcgatgcaacaacagcacaagttacgagaataagatcaacagatccaaagttagcgagatcgattcgagaaaatagtctgagaaaattacaaaccaacctggaagagcaagtcaaaaaagtgctatccagtaatggaggtgaaatcgctcctaaacaggtatcagcggtgaggaaggtctgggacaccttttttgtttattttatcaagcctttaaaatcattgcacttcctagaatatccacccgtggcacttgcaataacattttccgcaatttccttttccacagtatactttgttaatatgacagttgaatataaatattcaaggcctccttacaactttaaaccattatacattggtctactgtatattccgaattctgtaacatactttttcgcctcaatttacggtggacgttgggtggacatgcttttaaaaagatacaaagagaaatatggaattcttgctcctgaagctcgtatatcgtggaatgttgttacatctgtaatatctttccccattgcgctattgatatttggctggtgcctagataaaaaatgccactgggtaacgccactaattggaacagccctctttggatatgcagctatgatgacaattggtgctaccctttcctatttagtcgattcattgccgggaaagggtgccaccggtgttgctttgaataatttaataaggcaaatcttggctgcaaccgcagtctttgtcaccacacccatgttaaacggtatgggaactgggtgggctttcacaatgctggcctttatcgtcttgggtgctagcagtgtacttataatactgaaaaagcacggtgattactggagagagaactacgatttacaaaaattgtacgacaaaattgattaatcatatcggttaataagacggaagcgtaaatattttcattgtagacttttcatagggtggcacatacatagtttactttagtttatggtaaatcgttattgtgctaaaagtattattaaataat

SEQ ID NO: 181 - DNA, 1285 bp, Saccharomyces cerevisiae
atgctgcatcaaaaaatagctcataaagttcgaaaagtcgtcgtcccaggtatttccttattgattttcttccagggatgccttattcttttgtttctccaactcacctataagactctttactgtagaaatgatataaggaaacaaattggtctcaataaaaccaaaagattatttattgtcttggtatcatccattttgcatgttgtcgcaccatctgcagtgagaattaccactgaaaattccagtgttcctaaaggtactttttttttagacttgaagaagaaaaggattctttctcatctaaagtccaattcggtggccatttgcaatcaccaaatatacacggattggatatttttatggtggttggcttacacatcgaacttaggggctaatgtcttcattattttaaaaaaatcgttggcttccattcctatcctcggtttcggtatgagaaactataatttcatttttatgagtagaaagtgggcacaagacaaaataaccctaagcaacagccttgctggccttgattcgaatgcaaggggcgccggctcacttgctggaaagtcacctgagcgcataactgaggaaggagagagcatatggaatccggaggttattgatccaaaacaaatccattggccatacaatcttatcctattccctgaaggtacaaatctcagtgctgatactaggcaaaaaagtgctaaatatgctgccaaaataggcaaaaagccattcaagaatgtgctactgcctcattctacaggcctaagatactcgttacaaaagttgaagccaagtattgaaagtctttatgatattacgatcggctactccggtgtaaaacaggaggaatatggtgagcttatatatgggctgaagagcatatttttagaaggaaaatacccgaagttagtcgatattcacatcagagcatttgatgttaaagatattccattagaggacgagaatgaattttcagaatggctgtataaaatttggagtgagaaggatgctctaatggaaaggtactattccactggatcattcgtaagtgatcctgaaacaaaccattcagttaccgatagtttcaagatcaatcgtattgagttaactgaagtgctaatattaccaactctaacaataatttggttagtttataaactttattgttttattttttgaatttaaataatcctttccatatgttattaggtacatatatagatagatataaaactttttttgattctttatcaatattacgtttacatac

SEQ ID NO: 182 - DNA, 960 bp, Saccharomyces cerevisiae
caaacgtagaaaagatgctgaagttgtcaagaagtgccaatctaagattggtccaattgccagccgcaagattaagtggcaatggcgctaaattgctcactcaaaggggattctttactgtaacgcgcttatggcagtcaaatggcaagaaaccattaagcagagtacctgtgggcggtactcccattaaggataacggcaaagtgcgagaaggctcgatcgagttttccacgggaaaggccattgctctattcctagcagtcggtggggcactttcttatttcttcaacagggagaaacgcagattggaaacacagaaggaggctgaagcaaacagaggatacggtaaaccttcacttgggggacccttccatctggaggatatgtatggcaatgagtttacggagaaaaaccttctcggtaagttttctataatatactttgggtttagtaactgtcctgacatctgtcctgatgaactggataagctaggtctatggcttaatacactctcttcaaagtatggtattactctgcagccattatttataacttgtgatccagcaagagactcccctgctgtattgaaagagtatttgagcgactttcatccctccatcctgggtttgacggggacgttcgatgaggtgaagaacgcatgcaagaagtacagagtatacttttctacgcctccaaacgtcaaaccgggccaagattatttggtagaccattccatcttcttttatctcatggaccctgaaggacagtttgttgatgctttgggtagaaattatgatgaaaaaacgggcgtggacaagatcgtggaacacgttaagagttatgtgcctgcagagcagcgcgccaagcagaaggaggcatggtactccttcttattcaaataagattgtaaatatatgctactttcttccttgtatatacatatatacttataacgctata

SEQ ID NO: 183 - DNA, 1339 bp, Saccharomyces cerevisiae
cgctcttgagctggtgagttagcacgataacaaacaaagatacagcgtcatgtctaccacactactttggttttcaagtgtaataggctacgtgattcaaacaaaatgtttgtctaacatacaatctaaaaaggaaatctccgtggggcccaatggtacaattgcaacgcctgaaactaacggcgacaacggaaactcaagttcattaaccttctatctgacctttatgtattttgcttcgtggctgctcttggtgcctgcatctcgactttgggagaagatgagaccgatgtttgtctctgactcagactcgaacaggaattctcagtttgacaacaacaacagcgggtctgtgacaaacgaagatgtcgatacgttctcgcacgtgttggatgatcctcaaccacggattccagcccaacagcagaagcaaaaaatcatatccgtggctaccttcaaatatgtggctaagctaacagtgctggctctcataatgattgtcgctgatttgacttataacatggctttgtcattgtcaccggcatttgatgttgctttgatgcaaaatactgccattttcgaaattgtcactttactatatggtgtttgtggaatctccaggaagaactacgttttccgtaatttcctcatcatgatgaacgcggtcattggaattttgatcatctcatacacgaaggctacctgtgacatgcttgccggaaagctgtccgtcaaccctaacacgggtgaactttctgacccattcttgtttgataggttgaaaggtgctctgatttgcggccttggtgctttgattatgggtccttttgccgtgttatggaaccgttggttttgcagtaacatttccaagaacgaaaattctgctgtagtcttggttaagcagagcacccacatggccctaatcggtattattggcatggtaatacttttgccatttattcctaaatttccctcccgtgagtctgtggaatccatttcgttgttctataatgacaagagcttttggttctctctactaggctcgattatctttggttccttgccgagcttgatttcgatattagagttgaatcgcaaggcccctgctgagtatttgacgacgtgcaacctgggagctattatctttatggggttagctgagtgggtttgcgaacctacgcaaaccacaattgtgagatgggaagtcataggatacataatgctaacggtaagtttgttggtcctatcagtaacactcggggaaggtaaataccaccattagtacggacaacatactttatatgactgatgatgatgtaacaagcatatgcaattattt

SEQ ID NO: 184 - DNA, 803 bp, Saccharomyces cerevisiae
acggatctgcactgaaaatgactaaacaagctgaggagacccaaaagccaatcatatttgctcctgagacgtatcaatatgataaatttactttgaatgaaaaacaacttactgacgacccaatcgatcttttcaccaaatggttcaacgaagccaaggaagacccaagggaaacgttgccagaagcaattactttttcatccgcggaactacctagtgggagggtgtcgtccaggattcttctttttaaggagctcgaccatagaggttttactatttattctaactggggaacctctagaaaggctcatgatattgctaccaacccgaatgcggcaatcgtattcttttggaaggatctgcaaaggcaggtgagagttgaaggtatcacagagcatgttaacagagaaacttctgaaagatactttaagacgagacctcgtggatccaagatcggtgcatgggcttcccgccaatcggatgttatcaagaacagagaagaactagacgagttgacccaaaaaaacaccgaacgtttcaaggatgctgaagacatcccatgtccagattattggggtggcttgagaatcgttccactggaaattgagttctggcaaggtagaccctcgagattgcatgatagattcgtttacagaagaaaaacagaaaacgatccatggaaagtcgttagactagccccatgagggactgttaatgaaaaattcaatgtaggatctatttaacaccatataattctctcattttctattttatactgtataatgaatctttttataccgcct

SEQ ID NO: 185 - DNA, 1223 bp, Saccharomyces cerevisiae
aattcatccaaagaaaataatgagcaagacagccgtgaaagattctgctacagaaaaaaccaagctaagtgaaagcgaacagcactacttcaattcgtacgatcactatggtattcacgaagagatgcttcaagatactgttcgtaccttatcttacagaaacgcaattatccaaaataaggatctttttaaggacaagattgttttagacgtcggttgcggtaccggtattttatccatgtttgccgctaaacacggtgcgaagcatgttatcggtgttgatatgtcaagcattattgagatggcgaaggaattggtagagttgaacggattcagcgacaagatcaccttgctaagaggcaagttggaggacgttcatttaccctttcctaaagttgacatcataatttctgaatggatgggttactttctactatacgagtccatgatggacaccgttctttacgctagagaccactatttggtagaaggcggtctgatctttcccgacaagtgctccattcatttggccggtttggaagactctcagtataaagacgagaagttgaactactggcaagacgtttacgggtttgattattcgccatttgttccgttggtcttacacgagcccatcgtcgacaccgtggaaagaaacaatgtcaacaccacctcagacaaattgatcgaatttgatttaaatacagtaaaaatatcagatctagcgtttaagagtaactttaaattgacggccaagagacaagatatgattaatggtatagtcacctggttcgacattgttttccctgcaccaaagggtaagagacctgttgagttctccactggtcctcatgctccatacactcactggaagcaaacaatattttatttccctgatgatctagatgctgaaactggtgacaccattgaaggtgaattggtttgctctccaaacgagaagaataacagagatctaaatatcaaaatttcttacaagttcgaatcgaatggcatcgacggtaattcaagaagcagaaaaaacgaaggttcttatttaatgcattaagacttttgtttgctggagaaagaaaaaaatttgaaaagcaaataaacaaacttgttcatattattgacgcgaatatgtgtactttgttacccttttttgttggtcgtgtaccaaaattagtttagatatatgactttgcatgtccttgtactatagt

SEQ ID NO: 186 - DNA, 2180 bp, Saccharomyces cerevisiae
tatcagtctttgcaaagacacccaatccaccgagaggcgattctcttatatcacatttggaatcttcaaacctgccattgcaattagcaacaaacttcagaatccgatgaacatcgtccttaaaagttacggacatctcactctttcaaatttattttttaattgctattatatatggcaacaaatctttcttattgtatctgccacctcatctcagctgccttcatcgagtatacttcatttgattttctgatatttattgctcgtttttcgctattttgatgcagtacatctcagaattcaacggagaacgtggatatattaggcacaaagaatcataaacaaacgcccatgtaaataactatcaatacactactttctaaaccaatctgcaggagctccaccttgatcgctttggcttattccaggcgttttcaggcactgtatattggtactatatcgctatgtatttgacagtcattatcaacggatacccttcttgaaaatttttcagatgggatgacatgtgaaaagtgtaacaatcgagaactgtaaacagcatgggggagcattcatcaatattgttatttagtgtaagccagattgtgaagacgcacttcttgccaagtatcttcccaaacagcgaacctgtcatacttaactgttccacttccatatacctaaaatgtctgacaaccctgagatgaaaccacatggtacgagcaaggagattgtggagtcggttactgacgccacctcaaaggcgattgataaattgcaagaagaactccacaaggacgccagcgaatccgtcacgccggtgaccaaggaaagcactgctgctacaaaggaaagcaggaaatacaactttttcattagaacagtttggacgtttgttatgatcagtggtttcttcatcaccttagcatcgggtcatgcatggtgtatagtgctgattttgggctgccaaattgctacttttaaagagtgtattgccgtaacaagtgcatctggtcgcgaaaagaatttgccattgacaaagacgttgaactggtaccttctcttcaccactatctattacttagatgggaaatcactcttcaagtttttccaagctactttttacgagtatcctgtattgaactttatcgtaacaaatcataagtttatctgctattgtctctatcttatgggatttgttctgttcgtttgtagtttaagaaagggatttttgaaattccagttcggatcattgtgcgttactcatatggttcttcttctggtagtatttcaggctcatttgatcatcaaaaacgtgctcaatgggctattctggttcttattaccatgcgggttggtaattgttaatgatatcttcgcctacctgtgcggcattacattcggtaagactaaactaatagaaatctcgcccaagaaaactttagaaggtttccttggtgcctggtttttcactgctctagctagtattatattaacaaggattctgagcccttatacttacttgacgtgccctgttgaagatctccataccaattttttctctaatttgacatgtgaactaaacccagttttccttccacaagtttacagacttccacccatctttttcgataaagttcaaatcaattcaattacagtaaaaccaatttatttccatgctttaaacttagctacctttgcatcattatttgcgccatttggaggctttttcgcatctggtctaaagagaacttttaaagttaaagactttggccactccatcccaggccatggtggtatcacagacagggttgattgccaattcataatgggttcttttgccaatttgtactatgaaacattcatcagcgaacacagaataacagtagatacagttttatccactattttaatgaacctgaacgacaagcagattatagaattgattgatatcttgattagattcctatctaaaaaaggtataatatcagcgaagaattttgaaaagttggctgacatctttaatgtgaccaagaaatcattgaccaatcactcttgaatataaaaaagaccatataaaagtatatatgagtgtatgaatagtttttttttttcaaacttatgcacgctatactactctttccctatttagtttatgtaaattataaaatatgatatca

SEQ ID NO: 187 - DNA, 1578 bp, Saccharomyces cerevisiae
atgattttctcactagatgaagaacttcatcgtgtgtcactagatgataaaaagaatgacattaaagtagattattcctcggcaatatacaatgatatcaatcatgaacaaggcagctccatcacatatgaggagagtataaatcacctctcggttcattcaaatgcgattccgctaaatggcatgagtcctgcacataggatgagaagaaggtcctcagcttattccaaattccctattctcactccaccaaatacgagaagattttctattacaggttcggacgcaatgcgaactaatacgaatagactatccataacacctcaggacattatttcctctaatattggagaaaatgaattatcaaggaacctgcacgattttaagcccgtgagagtcctaggccaaggtgcctacggtaaagttcttcttgttaaggacgtcaatacatccaagctgtatgctatgaagcaattacggaaagcagaaattttaatttctcaaacagccacagattccaagagagaagacgaagataaaaatgatggtaataacaacgataatgacgatggattatcaaagaggcttgagagaacatttgccgaacggtctattctatctgaaatagaacatccaaacattgtcaagttattttattcttttcacgataactcaaagttatatttactgctacaatatatccctggcggtgaactattttaccacttgaaggaacacgggaccctagatgagacgacagtttcgttttacgcggcagaaatcagctgtgccttgagatttttgcatacgaaaggtgttgtctatagagatttaaaacctgaaaactgtttattgaatcaacgtggacatttagtattgacagattttggtctgagtaaaaaaagtgctaatgattccgcggttgatgaggaggatccagagaacgtcaatgccctatactcgattatcggtacgcctgaatactgtgcgcctgaaatattattaggtaaagcttacagtcagaattgtgattggtattctttgggatgtctgttgtatgacatgttagtaggtaagcctccatatactggtagcaatcataaggtgatcattaataagattcaacaaaacaagcaaggccccaaaattccattttatctgagcgagggaatgaaagatatattaaacgcgctgttgaagaaggaaactgccaaaaggtggaatgttgacaaatactgggccaaaaccggggctaataataagcctactaagtctaagaagaagaaatcaggggctgcaagaactagtcttttcactgaacattttatctttagaaaaatagactggaagttattagaatctggacaattgcaaaaaaccactctaggcccaattgttccagttattacggatttggaactagcggaaaattttgacacagaatttacttctatgtcatatgaggaaacctatacggatagcaagccgattaatatcaattcggtgagcaagtccccggatatgttcaagggatttagttataaagcaagtggtagctatttggagaagtacttttga

SEQ ID NO: 188 - DNA, 1235 bp, Saccharomyces cerevisiae
atgcttcccacattcaaacgttacatgtcgtcctcagctcatcagattcccaagcacttcaaatcgctcatctattcaactcatgaagttgaggattgtaccaaggttttgtcagtgaaaaattatacgcctaaacaagacttatctcaatcaattgtgttaaaaactttggcctttcccataaacccttcggatatcaatcagttgcaaggagtatacccgtctcgtccagaaaagacatacgattactccacagatgagccagccgctatcgccggtaatgagggtgtctttgaagttgtttctttaccttcgggaagttccaagggagatttgaaattgggtgaccgagttatcccattgcaggcaaatcaagggacttggtccaattatagagttttctctagtagttctgatttaatcaaggtaaatgatttggatctgttttctgcggcaactgtatctgttaatggttgtaccggtttccaattagtatcagactatatcgactggaacagtaacggtaatgaatggattatccaaaatgccggtacatctagtgtatcaaaaatagttacgcaagtagcaaaagctaaagggatcaaaacattaagtgttatacgtgaccgtgataattttgatgaggtagcaaaagttttggaggataagtatggtgctacgaaggttatttccgaatcgcaaaacaacgacaagacttttgccaaagaagtattgtccaagattttgggtgaaaatgcaagggtgaggcttgccttgaattctgttggaggtaaatccagtgcatcaatagcacgtaagttggaaaataatgctttgatgctcacttatggaggaatgtcaaaacaacctgtaactttaccaacatctctacacattttcaaaggcttgacatccaaagggtactgggtgactgaaaagaacaaaaaaaacccccaaagcaagattgacaccatcagtgattttatcaaaatgtataattatggtcacattatttcaccaagagatgaaattgaaactcttacctggaatactaacactactactgacgaacagttactagaactagtcaaaaaaggtataactgggaaggggaagaaaaaaatggttgttttagaatggtaagggccttagcattgctcagagttagacaaccaccaaagatagtattcctctttatgacatcgagtatagttgctatataatatataccaaga

SEQ ID NO: 189 - DNA, 1408 bp, Saccharomyces cerevisiae
gtatccgtaaaaacaatcaaataaatagcactgtaaaacatgcctccaaagaagcaagtcgaagaaaaaaaggtcttattgggtcgtccaggtaataacttgaaagccggtattgtcggtttggccaatgttggtaagtctacctttttccaagccatcactagatgtccattgggtaacccagctaactatccattcgctaccattgatccagaagaagcccgtgttattgtcccatctccaagatttgataagttgtgtgaaatctacaagaagacagcttcggaagttccagctcatttgaccgtttacgatattgctggtttgactaagggtgcctctgctggtgaaggtttgggtaatgctttcttgtctcacatcagatcagtcgattctatctaccaagtcgttcgttgtttcgatgatgctgaaattatccacgttgagggtgacgttgatccagttcgtgatttagaaattattaaccaagaactaagattgaaagatattgaattcgcacaaaaggctttggaaggtgctgaaaagattgccaaaagaggtggtcaatctttggaagtcaaacaaaagaaggaagaaatggatttgattacgaaaatcattaaattgctagagagtggtcaaagagttgctaatcactcctggacttcaaaagaagttgaaattatcaactccatgttcttgttgactgctaagccatgtatctatttgattaatttatctgaaagagattacatcagaaagaaaaacaagcatctgctaagaatcaaggaatgggtagacaagtactctccaggtgacttgatcattccattcagtgtttctctagaagaaagactatctcatatgtccccagaagatgctgaagaagaattgaagaaactgcagacaatatctgccttgccaaagattatcactaccatgagacaaaagttagatttgatttcctttttcacctgcggtccagatgaagttcgtgaatggaccatcagaagaggtactaaagctccacaagctgctggtgttattcataacgatttaatgaatacctttattttggctcaagttatgaaatgtgaagatgtcttcgaatataaggacgattctgccatcaaggccgctggtaagttgatgcaaaagggtaaagactatgtcgttgaagacggtgatatcatttacttcagagctggtgctggtaagaattgatttcgtgcactaaagttgacttttctttatttggtttagttccctactatatatcatcatagaaattttcaacatgattttcttgaaagagaaacgaaaggaaaaaagcaatctcgcgagtggatggcatcggattttatgtatgtgtgtatgtatgtttattattcccgcatgtttacgccct

SEQ ID NO: 190 - DNA, 3668 bp, Saccharomyces cerevisiae
ccattttcttcaaaggtcctgtttagactatccgcaggaaagaaattagaatgaccggcttgaatggagatgatcctgatgactactatctgaaccttaatcaagatgaagagtctctacttaggtcaagacacagtgtcggctcaggagcacctcatagacaaggctctttagtgcggcccgaaagaagccgactgaacaatcctgataatccacatttttattatgcgcagaaaacgcaggagcagatgaatcacctggatgttttaccatcaagtaccggtgtaaacccaaatgcaactcgtcggagtggctccctgcgctccaaaggctcagtgagaagcaaatttagtggccgcgaaacggatagctatcttttacaagatatgaatactactgacaagaaggcttccgttaaaataagtgatgaaggtgttgcggaagacgaatttgataaagatggtgatgtggacaatttcgaagaaagctccacgcagcccataaataagtctatcaaaccattaagaaaggaaacgaatgatacattgtcattttggcagatgtactgttatttcattacgttttgggcacctgctccaattcttgctttctgcgggatgccaaagaaggaaagacaaatggcgtggagagaaaaggttgctttaatttctgtcatcttgtacattggtgcgattgtggctttcctgacttttggtttcactaaaaccgtttgtagtagttcgaaactacgtttgaaaaacaacgaagtatcaacagaatttgtcgtaattaacggtaaggcttatgaattggatacttcctcgcgttccggtatacaagacgttgaagtagattcagacaccctttatgggccctggtcagatgctggtaaagatgcttcgttcttgtttcaaaatgtgaatggtaactgtcataaccttataactccaaagagtaattcttccattccccatgacgatgataataatttagcatggtattttccttgtaagttaaagaatcaagatggctcttcgaagccaaacttcacagttgaaaattacgcaggatggaactgtcatacgtctaaagaagatagggacgcattttacggtttaaagtcgaaagctgatgtttacttcacttgggatggtataaagaactcttctagaaacttgattgtttataatggcgacgttttggatttagatcttcttgattggttggaaaaggatgacgttgactatcccgttgtattcgatgacttgaagacttcaaatttacaaggttatgatctttcgttggttttgtcaaatgggcatgaaagaaaaattgcgagatgtttgagcgaaattattaaagttggtgaagtagactccaaaaccgtcggttgtattgcctctgatgtcgttttgtatgtttctctggtatttattctttcagtggtgataattaaattcataattgcctgctacttccgttggactgtagctaggaaacaaggtgcatatatcgtggacaataaaacaatggataaacacacaaacgatatcgaggattggtctaataatattcaaacaaaagctcctctaaaggaagtagatcctcatttgaggccaaagaaatactcaaaaaagtcgttgggacacaagcgtgcttcaacctttgacttgctgaaaaaacacagctccaaaatgtttcaatttaacgaatctgtgatagatctagacacctccatgagcagttcactacaatcttctggttcatacagaggaatgacaacaatgaccactcaaaatgcttggaaactctcgaatgaaaacaaagctgtacattcccgtaatccatctactttgttgcctacatcctcgatgttttggaataaagcgacttcctctcctgtaccaggatcatcgctgattcagagtcttgattcgacgattatacatcccgatatcgttcaacaaccaccactggattttatgccatacgggttcccattgattcatactatctgttttgttacttgttattctgaggatgaagagggtttaagaaccactttagactctctttctaccacagattatccaaattcccataaactactgatggttgtttgtgatggtttaattaagggctcgggcaacgataagactactccagagatagcgttaggaatgatggacgactttgtcaccccacctgatgaagttaaaccttactcctatgtggcagtggcatcaggctctaaaagacacaatatggccaagatatatgcgggtttttacaaatatgacgattctacaattccaccagaaaatcaacaacgtgtcccaatcattacaattgtgaagtgcggtactcctgcagagcagggggccgccaaacccggtaacagaggtaagcgtgattctcaaattattctgatgtcctttttagaaaaaataacatttgatgaaagaatgactcaattggaatttcagcttttaaaaaatatttggcagattacggggctaatggcagacttctacgaaacggtacttatggttgatgctgatactaaagtctttcccgatgctttaactcatatggtcgctgaaatggttaaagatcctttgattatgggtctttgtggtgagaccaagatcgctaataaggcacaatcttgggtaactgcaattcaagtgtttgagtactatatttcgcatcatcaggctaaagcttttgaatctgtcttcggttcggtaacttgtttgccgggatgtttctcaatgtatcgtataaaatctcctaaaggttcagatggttattgggtacctgtattggcaaatccagatattgttgaaagatattcggataatgttacaaacactttgcataagaagaacttattattacttggtgaagatagatttttatcttcattaatgttaaagactttccctaagagaaagcaagtatttgttccaaaagctgcttgtaaaactattgcccctgataaattcaaagtcttactttcccagcgtcgaagatggattaattctacggtacataacctttttgaattagttctaatcagagacttatgtggcactttctgtttttccatgcaatttgtgattggtattgaattgattggtactatggtactgccgttagccatttgctttactatttatgtcattatttttgccattgtatcaaaacctacacccgtaatcactttagttttactggcaattattcttggtctgcccggcttaattgttgttataactgctacgagatggtcgtacctatggtggatgtgcgtatatatttgtgctttgcctatttggaatttcgtactaccttcatatgcgtactggaaatttgatgacttctcatggggtgatacgagaactattgcgggaggtaataaaaaggcacaagacgagaatgaaggtgaatttgatcactcaaagattaaaatgaggacatggagggaatttgaaagggaagatattctcaatcggaaggaggaaagtgactccttcgttgcatagacagtatgaaaatatttttactgtgatacttacaagttgatatatggttgtgtgtaacttatttatttgagaggtattttaacacaccttagaactaaaacttaataaataaatatttct

SEQ ID NO: 191 - DNA, 2883 bp, Saccharomyces cerevisiae
ccgcagtctttggttttcagaattgttagcagtagttaagtgaataaagatggcatcgacatggaagcccgccgaagactatgtgttgcaactagcaactcttttacagaactgtatgtcaccaaatccagagattcgtaataacgcaatggaagctatggagaacttccagctgcaacctgaatttctcaattatttgtgttatattttaattgaaggcgaatctgatgatgtattgaagcaacactactccctacaggatcttcagaacaatagagctaccgccggtatgctgttgaaaaattcaatgctagggggaaacaatttaattaagagcaatagccacgacttaggatacgtcaaatcaaacattatacatggcctttataattcgaacaataatctcgtttcgaacgtgacaggtatcgttattactactttattttccacttactataggcagcatagagatgatccaactggtcttcaaatgctttaccagttgctagagctaacctcaaatggaaatgagccaagtattaaggctttatctaagatcatggaagacagcgctcaatttttccaattggaatggtcgggaaatacgaagcctatggaagccttattggatagtttttttaggtttatttcgaatccaaatttctcacctgtgattcgctcagaatcggtgaaatgtataaatacagtgatcccgctacaaacacaaagttttattgtgagattagataaattcttagaaattatttttcagttggcacaaaacgacgaaaacgacctagttagggcacagatttgcattagttttagtttcttattggaattcagaccagataagctggtttcccatttagatggtattgtacaattcatgttgcatttgatcaccactgtaaatgaggaaaaagtggctattgaagcctgcgagtttttgcacgcctttgcaacgagcccaaatattcctgaacatatcttacaaccatatgttaaggatatcgtgccaatattattatcgaaaatggtctataacgaagaatccatcgttctcctggaagcttctaatgatgatgatgcattcttggaggataaagatgaggacatcaagcccattgcaccccgtattgtgaaaaagaaagaggcaggaaatggagaggatgcagatgacaacgaagatgatgatgatgatgatgatgatgaagatggcgatgttgatacgcaatggaatttgagaaaatgttccgcggcaacgctagatgtaatgacgaatattttacctcatcaagtgatggatatagcgttcccatttttaagagaacatttgggttctgataggtggtttattagagaagctactatattagcactgggggccatggcagaaggtggaatgaagtattttaatgatggcttaccagcactaataccatttttagtggaacaattgaacgataagtgggcaccagtgaggaaaatgacatgttggacattaagtaggttttcaccatggatattacaagaccatactgagtttttaattccagtcttagaacctataataaacacattaatggacaagaaaaaggatgttcaagaggcggctattagtagtgtagcagtatttattgaaaacgccgactccgaattggttgaaactttattttatagtcaattattgacgagttttgataaatgtttgaaatattacaagaaaaagaatttaattatattatatgatgccatcggcaggtttgctgaaaaatgtgcattagacgagacagcgatgcaaataattttgccgcccttaattgaaaaatgggctttgctgtcagacagtgacaaggagctgtggccacttttagaatgtctttcctgcgtggcatcatcactgggggaaagattcatgcctatggcaccagaagtgtacaacagagcctttagaattctatgtcattgtgtcgaattggaagccaaatcacatcaagacccgacaatagtagtgcctgagaaggacttcatcatcacctcattagatttgattgatggattggtacaaggtcttggcgctcactcgcaggatctattgttccctcaagggacgaaggatttaacgatattgaaaatcatgctagaatgtttgcaggaccctgtccatgaagtaagacaaagctgctttgccctgttgggagatattgtatattttttcaattcggaactggtaattggtaatttggaggatttcttgaagttgattggtacggaaataatgcataacgacgatagtgatggtactcctgctgtgataaatgcgatatgggcgcttggtttgataagcgaacgtatcgatttgaatacttatatcattgatatgtctagaatcattctagatttatttaccaccaacacacaaatcgtagacagctctgtgatggagaacttgtctgtgaccatcggaaaaatggggctaacacaccctgaagttttcagttctggcgcatttgccaatgattccaactggaataaatggtgtttgtccgttaacgcattggacgatgtagaggaaaagagtagcgcgtacatgggtttcctgaaaattatcaatttgaccagcacggaggtcacaatgagtaatgataccattcataaaattgttacgggcctttcaagcaatgtagaggcgaatgtttttgcgcaagagatctacacctttttgatgaaccattctgcccaaatttctgcaataaatttcacgcccgatgaaatctccttcttacaacagttcaccagctaaaattttttttactgtatcctacgtgtttgtatagtttggtacattattactagtgatatatacatagcacaattcgg

SEQ ID NO: 192 - DNA, 2031 bp, Saccharomyces cerevisiae
ttaaaagcagaattgccctactttttaatatcctcgtgctgctcaaggtatcatatctacttcgagacaaatcagtgtaggtaggtcagtaaaattatattttcagtatgctgcttaccaaaaggttttcaaagctgttcaagctgacgttcatagttttgatattgtgcgggctgttcgtcattacaaacaaatacatggatgagaacacgtcggtcaaggagtacaaggagtacttagacagatatgtccagagttactccaataagtattcatcttcctcagacgccgccagcgctgacgattcaaccccattgagggacaatgatgaggcaggcaatgaaaagttgaaaagcttctacaacaacgttttcaactttctaatggttgattcgcccaaggggagtactgcaaagcagtataacgaggcatgcttattaaagggtgacattggagaccgtcccgaccactacaaagatctttacaagttgtctgctaaggagctgtccaagtgtttggaactatctccggatgaagtagcaagtctgaccaaaagccataaggactacgtagagcatatagcgactctcgtctcgccaaagggtacgtacaaagggtccggtatagccacagtgggtggcgggaagttctcccttatggcatttttgatcattaagactttaaggaatatggggaccacgttacctgtggaagtcctgatccctcctggtgatgaaggtgaaactgagttttgtaacaagattctgcctaagtataactccaagtgtatttacgtttcagatattctaccacgagagacgattgaaaaatttgttttcaaaggataccagtttaaatcattggcccttatcgcttctagttttgaaaacctgctcttactggatgctgacaacttccccatcaaacccctagacaacatattcaatgaagaaccatatgtgtctacgggcttggtcatgtggcccgatttctggaggcgtacaactcacccattgtattacgacattgcaggtattgctgtggacaagaaaaagagagttcgcaattctcgagacgatatcaccccacctgctgtttacacaaaggatttgaaggatttgagtgacgtcccgctaagtgacctagacggaacaatacccgacgtgtctacggaatccggccaactgatgataaacaaaacgaagcatttggctacggctcttctatctttattctacaacgtcaatggaccaacgtggtactacccaatattttctcaaaaagctgctggtgaaggtgataaggaaactttcattgccgctgcaaacttttatggtctatcattttaccaagttagaacaaggacaggcgttgaaggctaccatgatgaagacgggtttcatggtgtagcaatgttacaacacgactttgtgcaggattatggccgttacttaaatgctatggagagcattggcaacaaatacggtggcactaaatcagctgatgcaatcaagtttgacaaaaactattccctcgaaaaatacaccgaagaatttttcgacaacgaggacttaaatgccaagaatcatgtagatgttatgttcatccattcaaacttcccaaagtttgacccatacgatttatctaaaagcaattttttgactacgaatggtaaacctgctcgttcatatacggccttaaaaaaggtaaaaaattacgatattgaactagagaatttcaaggttttaaacgaatatgtttgtgttaataagaatcctttcaaatatctcgatgaccttttagggcaggataaaacggaatggaaaagagtgtgtggttacatcaccgatagattagcatttttagaatctactcatgataaggcgattgccggtaaataatatgcaacgggtcggactatagtttggacaacttccattggcgttttctacattcttattactattccttacatagttatgtttatttatcttccagttatgtaaattttttccttcacaatccatataa

SEQ ID NO: 193 - DNA, 760 bp, Saccharomyces cerevisiae
ctatatattggaaagaagcaaaattttcaaattaaacgcaaaacaactgaagaaaattagagatggctattgttataaacaaaagaaacgtgagagtcttggtaataactaatttactgctcattgttgtgttttttgtgttaaggaattcgaatgctagcgtcaacgaaagtattactactcaccatcctgattcattggtgacgtttgacaattcaggaaatgcacctggcactcaccaatctgtccatgatacagtaaatacacaagataaggaagccgaagaagttgataaaaatagtggggacgctgaatttgatgccgctgcagaatacaacaaaataatggaacagtcacccatgattgtatttagcaagactggctgcccatatagcaaaaaactgaaagctttgttgactaattcgtacacgttttctccatcttactacgttgtagaattggataggcacgaacacacaaaagaactacaagaccagattgaaaaagtcactggtaggagaacagtcccaaacgttatcatcggtggtacttccagaggtggttatactgagatagcagagttacataaaaatgatgaacttctagactctttcaaaaaatggagcgatggggcgtttactgtaaaagctaattcgcaatctgagagtgcctagatcagattataaactgagagttattcttcttcttctcccacagtagcgaaagaggatatttaggtagtatacagatttaaatgtag

SEQ ID NO: 194 - DNA, 965 bp, Saccharomyces cerevisiae
gcaatttactaatgacctacactaccagacaaattggtgccaagaacaccttggaatacaaagtttatatcgaaaaggatggtaagccagtttctgccttccacgacattcccttgtacgctgacaaggaaaacaacattttcaacatggttgttgaaattccacgttggaccaacgccaagttagaaatcaccaaggaagaaactttgaacccaatcatccaagacaccaagaagggcaagttgagatttgttagaaactgtttccctcaccatggttacattcacaactatggtgctttcccacaaacttgggaagacccaaacgtaagccacccagaaactaaggcagttggtgacaacgatccaattgatgtgttggaaattggtgaaactattgcttacactggtcaagtcaagcaagttaaggctctaggtatcatggctttattggatgaaggtgagaccgattggaaagttattgccattgatattaacgatccattagccccaaaattgaacgacattgaggatgttgagaaatacttcccaggtctgttgagggctactaacgaatggttcagaatttacaaaatcccagatggtaagccagaaaaccaatttgccttctccggtgaagctaagaacaagaagtacgctttggatatcatcaaggaaacacatgactcctggaaacaattaattgctggtaagtcttctgacagcaagggtattgatttgaccaatgttactttgcctgacaccccaacctactccaaggctgcctctgatgccatcccaccagcttctccaaaggcagatgctccaattgacaagtctattgacaagtggttcttcatctccggttctgtttaaaatattttgaattgaaaatgagacacctaccacgtatgcggcttcaagttgtttaatatgtagctatatatcgattatataactgactca

SEQ ID NO: 195 - DNA, 484 bp, Saccharomyces cerevisiae
agcaacaaatataatatagtaaaatatgtccggtagaggtaaaggtggtaaaggtctaggtaaaggtggtgccaagcgtcacagaaagattctaagagataacatccaaggtattactaagccagctatcagaagattagctagaagaggtggtgtcaagcgtatttctggtttgatctacgaagaagtcagagctgtcttgaaatccttcttggaatccgtcatcagagactctgttacctacaccgaacacgccaagagaaagactgttacttctttggatgttgtttatgctttgaagagacaaggtagaaccttatacggtttcggtggttaatttagctaattctaagaaaacggtaacaacaagcaaatatttgggattcgtattcaactgcccggtttttcttctacaaatatgagtgtattatagcgggtttaggagaaatatgtacaattataaacatataaagggtatttaatt

SEQ ID NO: 196 - DNA, 1447 bp, Saccharomyces cerevisiae
aagacataaaagagaggcttcgagagaggaggcggaataagactaaattaaaatatgattgtggggttgacactttattttgtattattccgttcaatacagtatttactggtttttttgactccaattaggcagtttgatacatcaacatcacttttattaaacgaattatgttcttctccctctgaaatcaacagttattggaacaagtatttttggaataagctactatcatgggacagtgttttttttatcaagaacataacttccaaaaacggaaaacctcaatttgagcatgaatacgcgttttctcagttgtggacttttttcgttaggctgtttattaaaagtaataacgatagcatctaccatgccttaagggttggagttgcaatagaaaatgttttattttacttgtcaggtattgttttatattttctaacaaaaaaaattttcagccaaaatataaggcaatcacagtttgctagaactatcgctaaaaaaacatctctgttgtttttcttaacgagtgccgctggatttttaacaagcatatattctgaaccattatcttttttttttgcatttgttggtatttggagtcgtgaatgcaccatttccgtgcccgtattgggtcaattcgatatttcgtggagatattggtttccttactcctttatcagcatggcttgctttaccttagcatccttgaatcgttcaaactgtgttttgttagggatttactttatttttgaccttattgaactaacaaagaacaggaagtttgtaaaagcaatatgtttcccactattatcaggatcattaatgttttctgctctactatatcaacaatattacctaccatataagacattttgtcctcaaaggggtgaatggtgtaaatctcaattgttttcaagcatttttatcacgaaaacttctttatattcctacattcagagtcattattggggagttgggttattgaaatactggaccccaaacaacatcccaaactttttgtttgctgtcccaaatattattattttaatctattcctccatatatttcagcaaaatttatccctcctataacttgaaggctctcgtatggatcaccagagcactggtcgtcatagtatgcttttttgcccatgtccaaattctgaatcgtatagcctcctttttacccttgcacctttggtatttggctgatagattggttaaaacttctgatccaaaaaaaatggaaaatccgaaaggtgacgataagatagtcaagttttacatatactggttggcattctggatacctttacagactatcctatttgcagcttttttaccaccagcctgatccttaatgcttgtatatttcttcttttactaaaaacatataaaaactatttacatatagaatatagaataatgcgacactatgaccttct

SEQ ID NO: 197 - DNA, 1000 bp, Saccharomyces cerevisiae
aatagaacttaagcagtaaaaatagggtaaacacaggtaaaagacggtatggaaacggatagtggtatacctggtcattcatttgtgttaaagtggacaaaaaacatcttttcgcgcacattgcgtgcatctaactgtgtacctagacatgttgggttcatcatggatgggaacaggagattcgctagaaagaaagagatggacgtaaaggagggccacgaggcaggatttgttagtatgagtagaatcttagaactgtgttatgaagcaggagtcgatacggctaccgtgtttgccttttcaattgaaaatttcaagaggagctcacgggaagttgaatcactgatgactttagcgcgcgaaaggatacgacaaatcacagaacgtggagagctggcctgtaagtatggggtacgcattaaaattatcggcgatctctctttgttggataagtctctattagaagatgttcgggttgctgtggaaactacaaagaacaacaaaagggccacgttaaatatctgctttccatatacaggcagggaagaaatcttgcatgccatgaaagaaacaattgttcaacataagaagggcgccgctatagacgaaagcacgttagaatcgcatctctacacggcgggggtaccccctttagatttattgattaggacaagtggcgtttccagattaagtgactttttgatatggcaggcatcgagtaagggcgtacgcatcgaattgctggattgtttatggccagagtttggacctatacggatggcatggattttattaaaattttcgtttcacaaatcctttttaaacaaagagtacagattagaggaaggtgattatgacgaggaaaccaatggggaccccatcgatttgaaagaaaaaaagttgaattaagaaaggtctgcatttttttcctaccacatggcatagatatttatagagtaatgagcaagataaatgagttcgcaaaagaacattcaaataa

SEQ ID NO: 198 - DNA, 905 bp, Saccharomyces cerevisiae
gcctcttcattcctttcctgatctgacaacagggtggaacataaaatatagatctgtagtgagtgcgaatagcaatagtaagtgaacgaaaaaggaatacgataataatggcttctagagtggacgaaactacagtcccctcatactactattacgtggatccggaaactacatatacgtaccaacaaccaaatcctctacaggacttgatatcggtgtatggcttggatgacatctccaggcaagtggcaagaacaaatttggacggcactaaagccgtgaagctaagaaaatcttacaagaaccagatagcagatctttcaggtaaattctccaccataccgaccagagaaaatggtaaaggtggtcaaatagcacatattcttttccaaaataacccagacatgatgatacaaccacctcagcagggtcaaaacatgtcagagcaacaatggcgcgaacagctgcgcaatagagacatagcattgtttcagcctccaaatttcgattgggacctttgctcttcggtactatcgcagtttgaaaggtcatatccaagcgagttcgcaaaccagaaccaagggggagcccaagcgccgtttgatatagacgacttggcgtttgatctagacggtacaggaaaaagccaatccggctcaaattcaggtaacaatagtaagaaaaggaagaacaaatctagtggaagttcgatggctacaccaacacatagtgacagtcatgaggatatgaaaagaaggaggctggagtagctttacgccatcgcatatcagccccactataaataaagagcaagtgttcatggaagtggcacgtttgtgcttcggcggtaagtacatgcagtatatatgtttaacttttttgaatatagaatattaattaacacg

SEQ ID NO: 199 - DNA, 1367 bp, Saccharomyces cerevisiae
acaagtactgtagaagctctaccgtattgaaaaatgacagacgctgaaatagaaaattcccctgcttctgatttaaaagaattgaatttggagaatgaaggcgttgaacagcaagaccaggcaaaagctgacgagtcagacccagtagaaagcaaaaagaagaagaacaagaaaaagaagaagaagaaaagcaatgtgaagaagattgaattactgtttccagatggaaagtacccagaaggtgcgtggatggactatcatcaagatttcaatctgcaaagaaccacggttgaagaatcacgttatttgaaaagggatctggaaagggccgaacattggaatgatgtcagaaagggtgctgagatacatcgtcgtgtgagaagggccatcaaggacagaatcgttcctgggatgaagttaatggatatcgctgacatgatcgaaaatactacaagaaagtatacaggtgccgaaaatttattagcgatggaggatcccaaatctcaaggtattgggtttccaacgggtctctctctcaaccattgtgctgcacatttcacacccaatgcaggcgacaaaaccgttctgaaatacgaagacgtgatgaaggtagattatggtgtgcaggtaaacggtaacatcattgattctgcctttactgtttcctttgatccacaatacgataacctgctagccgctgtaaaggacgctacttacacgggtattaaagaagcgggtatcgatgtgagattaaccgacatcggtgaagccatccaagaagttatggaatcctacgaagtggaaatcaatggtgagacttaccaggttaaaccttgtcgtaatctatgtggccacagtatcgcaccatatcgtatccacggcggtaaatccgttcccatcgtcaaaaatggggacactacaaaaatggaggaaggtgagcactttgccattgaaacttttggttctactggtagaggttatgttactgccggtggggaagtttctcattatgccagatctgctgaagaccatcaggtaatgcccacgttagacagcgccaagaacttgttaaaaacgatagaccgcaactttgggactttaccgttctgtcgccgatacctagacagacttggccaagagaaatacttatttgcgttgaataacttggttagacacggtttagtacaggattatccaccattgaacgatatccccggatcctacactgcacaattcgaacacaccatcttgttgcatgctcacaaaaaggaagtcgtttcgaaaggtgatgactactgaggtaaaatgcgctttcaaatggcctcctcactaggtatatgaatactgttgtagttatatagatagtt

SEQ ID NO: 200 - DNA, 504 bp, Saccharomyces cerevisiae
acacctatatataactaataatgtccggtaacggtgctcaaggtactaagtttagaatctcattaggtctaccagtcggtgccatcatgaactgtgctgacaacagtggtgccagaaacttgtacattatcgccgtcaaaggctctggttccagattgaacagattgccagccgcctctctaggtgatatggttatggccaccgttaagaagggtaagccagaattgagaaagaaggttatgccagctattgttgtccgtcaagctaagtcttggagaagaagagacggtgtctttttgtacttcgaagacaatgctggtgtcatcgctaatcctaagggtgaaatgaagggttccgccatcactggtccagtcggtaaggaatgtgccgatttatggccaagagttgcatctaactccggtgttgttgtgtaaaaaggaaattattttgactcatactcttagattcttcaattatatatattttctttataaataacaatct

SEQ ID NO: 201 - DNA, 1377 bp, Saccharomyces cerevisiae
atggaaggtgaacagtctccgcaaggtgaaaagtctctgcaaaggaagcaatttgtcagacctccgctggatctgtggcaggatctcaaggacggtgtgcgctacgtgatcttcgattgtagggccaatcttatcgttatgccccttttgattttgttcgaaagcatgctgtgcaagattatcattaagaaggtagcttacacagagatcgattacaaggcgtacatggagcagatcgagatgattcagctcgatggcatgctggactactctcaggtgagtggtggaacgggcccgctggtgtatccagcaggccacgtcttgatctacaagatgatgtactggctaacagagggaatggaccacgttgagcgcgggcaagtgtttttcagatacttgtatctccttacactggcgttacaaatggcgtgttactaccttttacatctaccaccgtggtgtgtggtcttggcgtgcctctctaaaagattgcactctatttacgtgctacggttattcaatgattgcttcactactttgtttatggtcgtcacggttttgggggctatcgtggccagcaggtgccatcagcgccccaaattaaagaagtcccttgcgctggtgatctccgcaacatacagtatggctgtgagcattaagatgaatgcgctgttgtatttccctgcaatgatgatttctctattcatccttaatgacgcgaacgtaatccttactttgttggatctcgttgcgatgattgcatggcaagtcgcagttgcagtgcccttcctgcgcagctttccgcaacagtacctgcattgcgcttttaatttcggcaggaagtttatgtaccaatggagtatcaattggcaaatgatggatgaagaggctttcaatgataagaggttccacttggcccttttaatcagccacctgatagcgctcaccacactgttcgtcacaagataccctcgcatcctgcccgatttatggtcttccctgtgccatccgctgaggaaaaatgcagtgctcaatgccaatcccgccaagactattccattcgttctaatcgcatccaacttcatcggcgtcctattttcaaggtccctccactaccagtttctatcctggtatcactggactttgcctatactgatcttttggtcgggaatgcccttcttcgttggtcccatttggtacgtcttgcacgagtggtgctggaattcctatccaccaaactcacaagcaagcacgctattgttggcattgaatactgttctgttgcttctattggccttgacgcagctatctggttcggtcgccctcgccaaaagccatcttcgtaccaccagctctatggaaaaaaagctcaactga

SEQ ID NO: 202 - DNA, 3301 bp, Saccharomyces cerevisiae
aaaaaccaaggaaatatgtccgagagtaacgcacacttctcatttccaaaggaggaagaaaaagttctatctctttgggatgaaatagatgcctttcatacttcattagaattaacaaaagacaaaccggagttttccttcttcgatgggcctccatttgccaccggtactcctcattacggtcatattcttgcttccactattaaggatattgttccaagatacgctaccatgacaggccaccacgtggaaagaagattcggttgggatacacacggtgttccaattgaacatatcattgacaagaaattaggtatcacgggtaaagatgacgtcttcaagtatggtcttgaaaactacaacaatgagtgtagatccattgttatgacttatgccagtgattggagaaaaactattggtcgtttgggtcgttggattgatttcgacaacgattacaagactatgtatccatcctttatggagtccacatggtgggctttcaagcaacttcatgaaaaaggtcaagtttaccgtggattcaaagttatgccttattctactggcctaaccactcccttgagtaactttgaagctcagcaaaactataaagatgttaacgacccagctgtgaccattggtttcaatgttattggccaggaaaaaactcaattggtcgcatggactacgactccatggactttaccttccaatttgtcgttatgtgttaacgctgatttcgaatatgtaaagatttacgacgaaaccagagatcgttatttcatcttattagaatctttgattaaaaccttgtataagaagcctaagaatgaaaaatataagattgtggaaaaaattaaaggttctgatttggttggtttgaagtatgaaccattgttcccatatttcgctgaacagttccatgaaacagcttttagagttatttcagatgattatgttactagtgattccggtactggtattgttcataacgctcccgctttcggtgaagaggataatgctgcttgtttgaagaacggcgtcatatccgaagattcagtgttacctaacgccattgatgaccttggtagattcacgaaagacgttcctgattttgagggtgtttatgtcaaggacgctgataagttgattattaagtacttaactaatactggaaatttgttattggcatcccaaattcgccattcctatccattctgttggagatccgataccccattgttataccgttctgttccagcttggttcgttcgtgttaaaaacattgtccctcaaatgttggattctgtgatgaaatctcactgggttcctaacaccatcaaggaaaagaggttcgccaactggatcgccaatgcccgtgactggaacgtttccagaaatagatattggggtactccaattcctttatgggtttcagacgattttgaggaggtcgtctgtgttggttctatcaaagaattggaagaattgaccggtgtgcgtaacatcactgacttgcatcgtgatgtcattgacaaattgacaattccatccaagcaaggtaagggtgacttaaagagaattgaagaagtttttgattgttggtttgaatctggttctatgccttatgcttctcaacattatccatttgaaaacacagaaaaatttgacgaaagagttccagctaatttcatctctgaaggtttggatcaaacaagaggttggttctacacgttagctgtcttaggtacccatctatttggctctgttccatacaagaacgtcatcgtctctggtattgtcttagctgccgatggtagaaagatgtctaaatccttgaaaaattaccctgatccatccattgttctgaacaaatatggtgcggatgcattaagattgtacttgataaactcacctgttttaaaagctgaaagtttgaaattcaaagaagagggtgttaaggaggttgtttcaaaggtcttactaccatggtggaactcctttaaatttttggacggtcaaattgccttgttgaaaaagatgtctaacatcgacttccaatatgatgattctgtgaaaagtgataatgtcatggacagatggattttagcttctatgcaatctctagtacaattcattcacgaagaaatgggtcagtacaaattatacactgtcgttccaaaacttttgaatttcattgatgaattgacaaactggtatattagatttaatcgtcgtcgtttgaagggtgaaaacggtgttgaggactgtttgaaagcattaaattctttattcgatgccttattcacatttgtccgtgccatggctccattcaccccatttttgtcagaaagcatttatttgagactgaaggaatacatcccagaagctgtcttagcaaaatacggtaaggacggaagatcagtccatttcttatcttacccagtggtcaagaaagaatactttgacgaggccatcgaaactgcagtttctagaatgcaatccgttatcgatttgggtagaaacattcgtgaaaagaaaactatttccttaaaaactccattgaagactttggtcatccttcacagtgatgaatcatacttgaaggatgtagaagccttgaaaaactacattatcgaggaattaaatgttcgtgatgttgttatcacctccgatgaggcaaaatatggtgttgagtataaagcagttgctgattggcctgtattgggtaagaagttgaaaaaagacgcaaagaaggttaaagatgccctaccatcagtcacttctgagcaagtacgggaatatttggaaagcggaaagttggaggttgccggtattgaactggttaaaggagatttgaatgctattagaggcttgccagaatctgctgtccaagctggacaagaaaccagaaccgaccaagacgtgttaatcatcatggatacaaatatttactctgaactaaagagtgaaggtctcgcaagagagctggtcaacagaatccaaaaattgagaaagaagtgtggtttggaagccaccgacgatgttttagtggagtacgaattagttaaagatactatcgactttgaagccattgtcaaagaacattttgatatgttaagcaagacctgtagatccgacattgccaaatatgacggctcaaagacagacccaattggtgatgaagaacaatctattaatgacaccattttcaaattaaaagtgttcaaattatgaaaacaactcatataaatacgtacaaatttttctctactcgaagtgatatagatgtatatgtgtaagt

SEQ ID NO: 203 - DNA, 1003 bp, Saccharomyces cerevisiae
gtatgtgctatggtcatatgagtaatggaactacatattattttgaatgctacaggacctctctttgaatggaatagatagtggaaaaagtaaacttaactaaaagggatgatataaattgtgacaggagcagtgcactaaactgaatcctttgtgtaccccaaaaatcaagcctcttatgaaacgccgagtttttcacaagaagagatgaaaagaaaccaaagcatatttcaagataagaaaaaaattccgcaacttttgtacgttctttattttactaacaagcgtcattaaattttctattacagttacaaaatgggtatttctcgtgattctcgtcacaaaagatccgctaccggtgccaagcgtgctcaattcagaaagaagagaaagttcgaattaggccgtcaaccagccaacaccaagatcggtgctaagagaattcactctgttagaactagaggtggtaacaagaaatacagagctctaagaattgaaaccggtaacttttcttgggcttctgaaggtatctccaagaagaccagaattgctggtgttgtttaccatccatccaacaatgaattggttagaactaacactttgaccaaggctgccattgtccaaattgatgctactccattcagacaatggttcgaagctcactacggtcaaaccttgggtaagaagaagaacgtcaaggaagaagaaactgttgccaagagcaagaacgctgaaagaaagtgggctgctagagctgcttctgccaagatcgaatcttccgttgaatctcaattcagcgccggtagattatacgcttgtatctcttccagaccaggtcaatccggtagatgtgatggttacatcttggaaggtgaagaattagctttctacctaagaagattgactgctaagaaatagatgaaatgaaaatactaccaattttttcttctcttctcctcatctcttcatatagtcttatatatcatatatgctattattatgt

SEQ ID NO: 204 - DNA, 868 bp, Saccharomyces cerevisiae
tgagataaatttcaaagaagcaggaagcaaaggatgtttagtagaatttgtagcgctcaattaaagaggacggcatggacccttcctaagcaggctcacttgcaatcacagacgattaaaacatttgccacagcacctattctgtgcaaacaattcaaacaaagtgatcaaccaagactaagaataaactctgatgctcctaactttgatgctgacacaacggttggtaaaatcaatttttacgactacttgggcgactcttggggggtcttgttttctcacccagcagatttcacccctgtctgcaccaccgaagtcagcgcattcgccaaattgaagccggaattcgacaagagaaatgttaaattgatcgggctttcagtggaagatgttgagtcccacgaaaaatggattcaagacatcaaggaaatagcaaaggttaaaaatgttggtttcccaataattggtgacacttttagaaacgtggcattcctatatgatatggtagatgccgaaggattcaaaaatatcaatgatgggtcactgaagaccgtgaggtctgttttcgtcatcgatcccaagaagaagattagactgatttttacctacccttccaccgtcggaagaaacacttctgaagtgttaagggtaatcgacgccttgcaattgactgacaaggagggcgtagtaactccaattaattggcagccagctgacgatgtcattattcctccctctgtctccaatgatgaggcgaaggctaaatttggtcaatttaatgaaattaaaccctatttaagattcaccaagtcgaaataagctttgaaataaacgactttactatatacaggtatatgaagtatctcta

SEQ ID NO: 205 - DNA, 2271 bp, Saccharomyces cerevisiae
tgttggcacttgactttagacttgctgttaataagccttccattgtatactaccaggttctcgtcttttttggtgataaagttaaaataaaaggataaaaaatggcaagttcaccgcaggtacatccatataagaagcatttaatgcaatcacagcatataaattttgataacaggggcctacagtttcaaaacagttcgttgaaggtaggtcaagatttttcagataataaagagaatagggaaaacagggacaatgaagacttcagtaccgcagaccttcctaagcggtcggcaaaccaaccgcttatcaatgagcatcttagagctgcgtcagtacctctactatcaaacgatataggcaatagtcaagaggaagatttcgttccagtcccacccccacagcttcatcttaataattcaaataatacttccttaagttctttgggaagtactcctacaaattctccgtcaccgggagcattaagacagacaaattcgagtacatctcttacgaaggagcaaataaagaaaagaactcgttctgtagatttgtctcacatgtacctgttgaatggtagcagtgatacccaattaacggctactaatgaatctgtagcagatttgtcacatcagatgatcagtcgatatttgggtggtaaaaataatacttccttagttccaaggctaaaaacaatagaaatgtatagacaaaacgttaaaaaatctaaagatcctgaagtgttattccagtatgcgcaatatatgttacaaaccgcactgactattgaatcttccaatgctcttgttcaagatagtgacaaggaaggaaatgtcagccaatctgacttaaaacttcagtttttgaaagaagcgcaaagttatttgaagaaactgagcataaagggttattcagatgcccaatacttattagcggacggctactcatccggagcatttgggaagattgaaaataaagaagcatttgtcttatttcaagcagctgcaaagcatggtcatatagaaagtgcttacagagcatcgcattgcttagaagaaggactaggaacaacaagagattctcgtaagtcagtcaattttttaaagtttgcggctagcaggaatcatccctcagcaatgtataaattgggactttattcattctacggcagaatgggtcttccaaccgacgttaatactaaattaaatggggtaaaatggttatcaagggctgcagcaagagctaatgagttgacggccgcagcaccatacgaattggctaagatttatcatgaagggttcttagatgttgtcattccggatgaaaagtatgcaatggaactatatattcaagcagcaagtttagggcatgttccttcagcaactttgttggcacagatttatgaaacaggtaatgatacagtagggcaggatacatcactttctgtacactattatacgcaggcagcgttaaaaggcgattctgtggcaatgttaggtttatgtgcatggtacttactgggagcagaacctgcttttgaaaaagatgaaaatgaggcttttcaatgggccttgcgtgcagctaatgctggtttgccaaaggcccaattcactctgggctacttctatgagcatggcaagggctgtgatcgtaacatggaatacgcatggaaatggtacgagaaagctgcagggaacgaggacaagagggcgattaataagctacgctcaagggacggtggactagccagcattggtaaaaaacagcataaaaaaaataaaagtatcagtactttgaatttattctctactgtggacagtcaaacaagtaacgtagggtcaaattcaagagtttcttcaaaatctgaaacattctttactggaaatccaaaacgtgatcgtgagccacaaggtttgcaaattaacatgaattcaaacacgaatagaaatggtattaaaacgggttctgatacaagcatcaggaaaagttcttcctcagcaaagggaatgtcaagggaagttgctgagcagtcgatggcagcaaagcaagaagttagtttatcaaatatgggcagttcaaacatgattcgtaaagattttcctgcagtaaaaactgagtcaaaaaaacctacaagcttgaagaacaagaaggataaacaaggtaaaaaaaaaaaagactgtgtaattatgtaagtacacatactagattgttttcattctttataggtgcaacagtttacactcaatgcatatagtgatacaaatattttac

SEQ ID NO: 206 - DNA, 563 bp, Saccharomyces cerevisiae
acaagtactacaacatgcatccacagttagaagctgaacgttttcattcctgtttggacttcatcaatgcactcgataaatgccatcaaaaggaatattacaagagaatatttggcctttgtaacaacgaaaaggatgctttgaacaagtgtctcaaggaggcaagtttgaataacaagaaacgtgctgtcattgaaagtagaataaagagagctgatgtagaaaagagatggaagaaaattgaggaagaagaatatggcgaggacgctatattaaagactatcttagatagacagtacgccaagaaaaagcaggaaagtgacaatgatgcgaactcgaaataaaagctttttttctgtcgctacttcattcacacaaatcatctcaatatcccttgtaaataaaaggcagagtacagttttcaagtttatatttcttcagcgcagtctttatatttatatctttaaatatacttagaactgaacagaacccatggctttttgcaaagctttcaagtagctcagtcgtttcttatattgattattcatatacaaatatctcga

SEQ ID NO: 207 - DNA, 702 bp, Saccharomyces cerevisiae
agtaacatgataacgtcctttttaatggaaaagatgacagtttcttcgaattacaccatagctttatgggctactttcaccgcaatctcctttgccgtgggttaccagttgggtacgtcgaacgcatcatcaactaagaaatcctcagctactttactgcgttctaaagaaatgaaggaaggaaagctacacaatgacactgatgaggaggaaagtgaaagcgaagatgagagcgatgaggacgaagatattgagtccacttcattgaatgatatacctggagaagttaggatggcattggtgattcgtcaagatcttggcatgacaaagggcaaaatagcggcacaatgctgtcacgcagcattgtcatgttttagacatattgctacaaaccccgcgcgtgcttcatacaacccaattatgacacaaagatggctaaatgctggacaggctaaaataacgttgaaatgtccagataagtttacaatggacgagttgtatgcgaaggctatatcacttggggtgaatgcagcagttattcatgatgctggtagaacacagattgctgcgggaagtgccaccgtattgggtttaggacctgctccaaaagcagtattggatcaaataacaggtgatttgaaattgtattgaggtacaaatgatatatactacgggtatagatatacgtgcatttatatatta

SEQ ID NO: 208 - DNA, 1421 bp, Saccharomyces cerevisiae
ccagtggtgatgtcctggtagcaatggacaactaaaggtggacactttcgctgccaaggcatttttttgaggcgccagtactgttatagttatatgtggggcatcttattgaaatcctcgaacaaaagttgttctaggctctggaaaccaattttgacacaatattatagcatgacatcaactgccacggattctccgctgaaatactatgatattggattgaatctgacagatcctatgtttcacggtatttacaatggtaagcagtaccatccagcagattatgtaaaattattagagcgtgctgctcagaggcacgtgaaaaatgcccttgttacaggatcatccatagcggagtctcaaagtgccattgagttggtaagcagcgtcaaagatcttagcccgttaaagctgtatcacacaataggtgttcacccatgttgcgttaacgagtttgcggatgctagtcaaggggacaaggctagcgcttctattgataacccttccatggatgaagcatataatgagtctctatatgctaaagttattagtaatccatcttttgcacagggtaaactgaaagagctttatgatttgatgaatcagcaagcaaaacctcatgatacaagtttcaggtcaattggtgagatcgggttggactacgacagatttcactatagttctaaagagatgcaaaaggttttttttgaagagcaactgaaaataagttgtttgaacgataaactcagcagctatccattgtttctgcatatgagaagcgcatgtgacgattttgttcaaatattggaaagatttattgccgggttcactgatgagagggatacctttcagctacaaaagttaggtgcatcgtcgtctagcgggttttacaaatttcatccagatagaaaactagtggtccattcattcactggttctgcgatagatttgcagaaattactgaacttatcacccaacatcttcataggagtaaacggttgctcgttgagaaccgaggaaaatctagctgttgtaaagcaaataccaacagaaaggttgttattagagacagatgctccgtggtgtgagattaaaagaacgcatgcatctttccagtacttagccaaataccaggaggttagggatttcgaataccctgcattcaagtccgttaagaaaaataagctcgctgacaagttgaatgcagaagaactttacatggtcaagggccgtaatgagccttgtaatatggaacaagtagcaattgtcgtatcggaagtcaaggacgtggatctggctactttgatagataccacgtggaagacgacctgtaagatatttggagagtaacatctattggtgcaaagagcaaagttacattatttttagtaagtacactaattatgcttaaactattaata

SEQ ID NO: 209 - DNA, 4513 bp, Saccharomyces cerevisiae
ataggcaatagagtgcttttaaatagagaattactggttctcgcgaaataatatagcgcgttgaaactaataaatagattcgtgaagctctagatctatcttttttcctgtttttatctgtgtgttttcaataggattcgaacgatataggccatggcatctattacttttagaactccattatcctctcaggaacaagccttttataatcagaaatttcaccaattggatacggaagatctcggggtggtcactggcgaggcagtcagaccgctcttcgcgtcttctggtcttccagggcaattactatcgcaagtgtgggctaccgtcgatatagacaataaagggtttttgaacttgaacgagttttcggctgctttgagaatgatcgctcaattgcaaaatgctcccaaccaaccaatttccgctgccctatatgagagcacacctactcaactggcttctttttctataaatcagaacccagcccctatgcaaagcggtagtgcaaccggcaatacaaacaacactgatattcctgccttatcctcaaatgatattgctaaattttcacaactgtttgataggacagcaaagggtgctcaaactgttgctggtgataaagccaaggatatatttttaaaggcaagattaccaaatcaaactttaggtgaaatttgggctctttgtgatagagacgcatccggtgtcttagacaaatctgagtttataatggccatgtatttgatccaactatgtatgtctcatcatcctagtatgaacacaccaccggccgtgttgcctactcagctgtgggattctattcgtttagaacctgttgttgttaatcaaccaaacaggactactcctttgagtgctaactccactggcgtatcttcactaacaagacactctactatatcacgtctatctactggtgcattcagtaatgctgcttcagattggtctttaagttttgaaaaaaaacaacagtttgatgcaatttttgattcattagataagcaacatgctggttcgctaagctctgctgtgttggttccattcttcttatcctctagattaaaccaagagacgttagccaccatctgggacttagctgacatccacaacaatgctgaattcaccaaattggaatttgctattgccatgttcttaattcaaaaaaagaatgctggtgtcgaattaccggatgttatccccaatgaattattacagtcccccgctttaggactttatccgccaaacccacttcctcaacaacaaagtgcacctcaaattgccatcccctcaagagcaagtaagccttctttacaggatatgccacaccaagtttctgccccagcagttaatactcaaccaacagttccacaagttcttcctcaaaactcaaataacggttctttgaatgatttactggctttgaacccttcattcagctctccttctcccactaaagcacaaactgtggttcaaaacaacacaaataatagtttttcatatgataataacaatggccaagcaacattacaacaacaacagccacagcagcctccacctttaactcactcctcctctggattgaagaaatttactcccacctcaaacttcggtcaaagtataatcaaggaagaaccagaggaacaagagcaactaagggaatccagtgatacttttagcgctcagcctccgccagttccaaaacatgcttcaagtccagtcaaacgtacagcttcaacaacactgccacaagttcccaacttttctgtgtttagcatgccagcaggcgctgccactagcgctgccactggtgctgctgtaggcgccgcagtgggtgctgctgctttaggcgcatccgctttttcaagatcttccaataatgcattcaagaaccaggatttatttgcagatggtgaagcttctgctcagttatctaatgctaccacagaaatggctaatttatctaaccaagtaaactccctgtccaagcaggcaagtataactaatgacaaaaagtcaagagcgacccaggagttgaaacgtgttactgagatgaaaaattccattcaaatcaaattgaacaatttacgttctacccatgaccaaaatgttaaacaaacggaacaactggaagcacaagtacttcaagtaaacaaagaaaacgaaacattagcgcaacagttggctgtatccgaagcaaactaccatgccgctgagtccaaactcaatgaactaactactgatttgcaagaatctcaaacaaagaacgcagaattaaaagaacaaattacgaatttgaactcgatgacagcctccttacagtcacaattaaatgaaaaacaacaacaggtcaagcaagaaaggtcaatggtagatgttaattcaaaacagctagagttgaatcaagtcacagtagcaaacttgcagaaggaaatcgatggtcttggcgaaaagataagcgtttacttaactaaacaaaaggagttaaatgactaccaaaagaccgtggaggagcaacacgcacaattacaagctaaataccaggatctgtccaacaaggatactgatttaacggaccgtgaaaaacaattggaagaacgtaacagacaaattgaagaacaagaaaatctctaccatcagcacgtttctaaattgcaagaaatgttcgacgatctatcacagagaaaagcttcttttgaaaaagctgatcaagagttaaaggagagaaacatcgaatacgctaacaatgtgagagagttatccgaaagacaaatgaatttagctatgggacaattacctgaggatgctaaggacattattgcgaaaagcgcctctaatacagatacaacaaccaaagaagccacatcaagaggaaatgttcacgaagacactgtatccaaatttgtcgaaactactgttgagaattcaaacttgaatgttaatcgggttaaagacgatgaagaaaagacagaaagaaccgaaagtgacgtatttgatagagacgttccaactttgggatctcaaagcgatagtgaaaatgccaatacaaacaacggcacccagtcaggaaatgagacagcaaatccaaacttaactgaaacattaagtgataggtttgatggtgatttgaatgaatatggtattccaagaagtcaatccttgacatcgtctgttgcaaacaatgctcctcaatccgtaagagatgatgttgagctaccggaaacgttggaagaacgtgacaccatcaataatactgcgaatagagataatactggaaacttatctcacattcctggtgaatgggaagctaccccagctaccgcttctactgatgttttgagcaacgaaactacagaagttattgaagacggaagtaccacaaaaagggctaattcaaatgaagacggtgagtcggtcagttctatccaagaatctccaaaaatctctgctcaaccaaaagcaaagacaataaatgaagagtttccaccaattcaggaattgcatattgacgaaagcgattcatcctcttcagacgatgatgagtttgaagataccagagaaattccatcagcaacagtgaagacccttcaaactccctataatgcccagcccacatcaagtttggaaatccacacggaacaagtcataaaatatcccgctccaggcacttctccttcacataatgaaggtaactcaaaaaaggcaagcaccaattccattttgcctgttaaggacgaatttgatgatgaattcgcagggttagaacaagcggctgtggaggaagataatggtgctgattcggaatctgaatttgagaatgttgcgaatgctgggtcgatggagcaatttgaaaccatagaccataaggatctcgatgacgaactacaaatgaacgcttttacagggacgttaactagttcctctaacccaactatcccaaaaccacaagtacaacaacagtcaaccagtgaccctgctcaagtaagcaacgatgagtgggacgagatttttgctggatttggtaactccaaagctgaaccaaccaaagtagctaccccaagcattccacaacaaccaattccattgaagaatgatcctatcgttgatgctagcttgtcaaaaggtccaatagttaaccgcggggttgcaactactccaaagtctctagccgtcgaggagttaagtggcatgggatttactgaagaagaagcgcacaatgccttggaaaagtgcaactgggatctagaagccgccactaactttttgttggatagtgcttagtctgtaatggaccatttcgtcttctttttgtacttcttcctcgaagctgaatcatatttacccttttccaggatcgtccttgtatattgtgaattattctaaaagtagaatatgttgtactttaaaattgttatagttatcatcatctatttttccattttataaaatttttacgttagacagttatgtattgaaactgcttcataagttttga

SEQ ID NO: 210 - DNA, 1733 bp, Saccharomyces cerevisiae
cgaggaaaacagcgtataataaagcaatagctttcacagaaaaaatattatatcatccctgttcgtataggtaacgaatcctaatattaaattgctaccattgctgatcaagacaattgtggagtaataatacgagaagaacatcatcgtcaccatatcactgagaaagaaaacacaagatatataaacaaaaaaaatgctaagaacagtaacttcaaagactgtatctaaccagttcaagaggtctttggctacagctgtagcaacccccaaggccgaagtaacgcaattatctaacggtatagttgtagccactgagcataatccttccgctcacacagcctctgtcggtgttgtcttcggctccggtgctgccaacgaaaacccttataacaacggggtttccaatttatggaagaacatctttctatccaaagaaaactctgctgttgccgccaaggaaggtttggcattgtcttccaatatctccagagacttccaatcttacattgtatcttctttgccaggttctaccgataaatcactagacttcttgaatcagtctttcatccaacaaaaggctaatttgctatcttcttctaacttcgaggccacgaagaaatctgtcttgaagcaagttcaagattttgaagaaaacgaccatcccaacagagttttggaacatttacactccaccgccttccaaaacactccattatctttgcctactagaggtactttggagtccttggagaatttagttgttgctgatctggaatcttttgccaataaccatttcttgaattcaaatgctgttgttgttggtaccggtaatatcaaacatgaggatttagtaaattccatcgaatccaaaaacctaagtttgcaaaccggtaccaagcccgtactcaagaaaaaggccgctttcttgggttccgaagttagattgagagacgacaccttgccaaaggcgtggatttcgctggctgtggaaggtgaacctgtcaattcaccaaattattttgttgctaaattagccgcccaaattttcggctcatacaacgccttcgaacccgcttctagattacaaggtatcaaattgttagacaacatacaggagtaccaattatgcgacaatttcaatcatttctctctttcttacaaagattccggtttatgggggttctctacggccacgagaaacgttaccatgattgacgacctcatccatttcactttgaaacaatggaacagattgaccatttctgtcactgatactgaagttgaacgtgccaaatcgctgttgaaattacaattagggcagttatacgaatctggtaatcccgtcaatgacgctaacttgttaggcgcagaagtcctaatcaagggctccaaactgtctctgggtgaggctttcaagaaaattgatgcaatcacagtcaaagatgttaaggcttgggccggtaagagattatgggaccaagatattgctattgctggtacaggccaaattgaagggttattagattacatgagaatcagaagtgacatgtccatgatgagatggtaagatgtgtgataatatattttccatgcacataaaatagaaataagcaagctgctagatgtatacaggcacgctcgcacactcacaccataaatgaattttttacatgtattttatattctagtaacccaagtagtcttcattatttattggcaaggtcactgtt

SEQ ID NO: 211 - DNA, 2138 bp, Saccharomyces cerevisiae
aaaaggcggtaactagtcctctcattcattaattctatataagagaaaatgccggtatctgattctggattcgataattcttcaaaaacaatgaaggacgacactataccgacggaggattacgaagaaatcacgaaagagtccgagatgggtgatgcgactaaaattacttctaagattgatgctaatgtcattgaaaaaaaagataccgattcagaaaacaatataaccattgctcaggatgacgaaaaggtgtcttggctgcaaagagttgtcgagttttttgaggttaagaatgactctaccgatttggccgatcataagcccgaaaatccaattaggacatttaaagatttacaggagtccctccgttcgacgtacttgtacaacacagatctgcggcccgtggaggcaaaaagaagaacgtggacatggaagcagtacattttcttttggatttctgggtcctttaacgtcaatacatggcaaatctcagccactgggctacagttagggcttaactggtggcagacttggatctgtatttgggttggatacacgtttgtcgcatttttcttgatactgggttccaaagtggggaacaattaccatatctctttccccatttcctcaagagtatcatttggtatctacttctccatctggattgtcatcaaccgtgtcgtcatggcatgtgtctggaattctactttggcttatatcggtagtcaatgtgttcagttgatgctaaaggctatcttcggtactaatttgaatactagaatcaaagacaccataaagaaccccaatttgacgaacttcgagttcatgtgcttcatggtcttctgggtcgcatgtttaccgttcctatggtttccacctgacaaattgcgtcatatatttgcactcaaatccgccatcactccatttgcggccttcggttttttgatttggactctttgtaaggccaaaggtcatttggcattgggttccctaaatgacaatggtggcgcaatcagcaagacggttttagcatggtctgtcattagagctattatgagtgctctggataacttctctactttaatcctaaacgctcctgacttcactagattcggtaagacctacaagtcatctgtttactcgcaattgattgcgctacccgtctgctatgccattatttccttaatcggaatattgtctgtctccgcagcttatacattgtacggagtaaattattggagtcccctagacattctgaacaggtacttggataactatacttcggggaacagagccggtgtattcttaatatctttcatttttgcgtttgaccagctgggtgccaacttgtctggtaactcgatccctgcaggtaccgatctgactgcattattgcctaaattcatcaatatcagacgcggttcttatatttgtgctctaatatcgttggcgatttgcccctgggatttattatcatcatcgtcaaagtttactacggcactagcggcatatgcagttttcttaagtgctattgcgggtgtaatatcagccgattacttcattgtcagaaagggttacgttaatattttccattgctacaccgacaagccaggatcgtactacatgtacaataaatatggtacgaactggagggcggtggtagcttatatatttggtattgctcctaattttgcaggctttttaggttcagtgggagtttctgtgcctattggcgctatgaaagtttactacctaaactatttcgttggttatctccttgcagcattgagttactgcattttagtgtatttttacccaattaagggtattccaggcgatgccaagataactgaccgtaaatggctcgaagagtgggtcgaagtagaagaattcggaactgaaagagaagcttttgaagaatatggcggcgtttccactggctatgaaaagatacgatatatctaaacacaattgttaacaacgcaagtagcaccttatcatgataatgtcaaagccaaaaaaaaaaaaaaataatttacttataatctgcataggcctcatcatatttgttgcatacatatagacatatgcttctgcataatctcaaattgtaacctttattttgtaaaaataac

SEQ ID NO: 212 - DNA, 761 bp, Saccharomyces cerevisiae
agttgaggcataatcagtaagcaatgaatccgtttagaatcttaggtgatttatcacatctaaccagtatactgatcctgattcataatatcaagaccacaaggtacattgaaggtatttctttcaagacccaaacgttgtacgctttggttttcataacacgatacttggatctcttgacttttcactgggtatccctatacaatgctctaatgaaaatatttttcattgtatctaccgcttacattgtagtgctattacaagggtctaaaagaaccaacaccattgcgtataatgaaatgcttatgcatgatacctttaagatccagcatttactaattgggagtgctctaatgagtgtttttttccatcacaagttcacttttcttgaattagcatggagtttttctgtatggttggagagtgtggctattctacctcaattgtacatgctatctaagggtgggaagactagaagtctaactgttcattatatttttgccatgggattatacagagcattgtatattcctaactggatttggaggtacagcacggaagataaaaaattggacaagattgccttcttcgcgggacttttgcaaactctgttgtactctgatttcttttacatttactacactaaagtcatcagaggaaagggtttcaaactgccaaaataaaaaaaaaacctgttttaaatagtgttcgcagcaatatatacaaatttcaatatatcaatgctataccaaaagaaaaaa

SEQ ID NO: 213 - DNA, 1875 bp, Saccharomyces cerevisiae
caggcagtttctcagtgaattggtcaatagaacaaaagaaacttatagacagaaaatgaagtacgttgttgtttcaggtggtgtcatttcgggtatcggtaaaggtgttcttgcatcttcaactggtatgctaatgaaaaccctcggtttaaaggttacgtcaattaaaattgacccttatatgaacattgatgcaggtactatgtctcctttggaacatggtgaatgtttcgtgcttgacgacggtggtgaaacagatttggacttgggtaactacgagagataccttggagttactttgactaaagatcataacattactactggtaaaatatactcgcacgttattgctaaggaaagaaaaggtgactatttaggcaaaaccgtgcaaattgtccctcatttgaccaacgctatccaagattggattgagcgcgtggccaaaattcctgtagatgacaccggtatggaaccagatgtttgtatcattgaattgggtgggacagttggtgacattgaaagtgctccttttgtggaggcactaagacaattccaatttaaagttggaaaggaaaattttgccttgatacacgtttctctagttcctgtcatccacggtgaacaaaaaactaagccaactcaagctgccatcaaaggtttgaggtctcttggtttagttccagatatgatcgcctgtagatgtagtgaaactttggataaaccaacaatcgataagattgccatgttttgtcatgtggggcctgaacaggtggttaacgttcacgatgttaattctacttatcacgtcccattgttgctactggaacaaaagatgattgattacttacacgccagattaaagttagatgaaatatcacttacagaagaagaaaaacaaagaggcctggaattattgtctaaatggaaggccacaacaggtaacttcgatgaatccatggaaacagtgaagattgctttggttgggaaatacaccaacttgaaagattcttatctatcagtgataaaagcattggaacattcatccatgaagtgtcgtcgtaagttagacattaaatgggtggaagctactgatttggaacctgaagcacaagaaagcaacaaaactaaatttcatgaagcatggaacatggtcagtaccgcagacggtatcttaatccccggtggttttggtgttagaggtactgaaggtatggttttggctgctagatgggctcgtgaaaatcacattccattcttaggggtttgcctgggtttacaaattgccaccattgaatttacacgtagtgtgttgggaagaaaagacagtcattcggcagaattttatccagacattgatgaaaaaaatcacgttgtcgttttcatgcctgaaattgacaaggaaaccatggggggctcaatgagattaggtttgagaccaacatttttccaaaatgaaactgaatggagtcaaatcaagaagttatacggtgacgtctccgaagtccatgaaagacaccgtcaccgttacgaaatcaatccaaagatggttgatgaattggaaaacaacgggttgatctttgtaggtaaggacgacactggaaagcgttgtgagattttggaattaaagaatcacccatactatattgctactcaatatcacccagaatacacatcaaaggtcttagatccatccaaaccatttttgggtttagttgctgcttccgctggtatccttcaagatgtcattgaaggtaagtacgatcttgaggccggcgaaaacaaattcaacttttaaatcaaaattttagaattaaaagtctactgcattaacaaagataaatttctaatttttttatgtatattatattttttgga

SEQ ID NO: 214 - DNA, 924 bp, Saccharomyces cerevisiae
taagattccagcatcacattgcaatatgtccactggtattacttatgatgaagatagaaagacacaattaattgcccaatacgaatctgtaagggaagttgtgaatgcagaggcaaaaaatgttcatgttaatgaaaatgcctccaaaattttattattggttgtttcgaaattgaaaccagctagcgatatacaaattctttacgaccatggtgtgagggagttcggggaaaactatgttcaagagttgatcgaaaaggcaaaattactaccagacgatatcaagtggcactttattggcggtttgcaaacgaataaatgtaaagatttggctaaagtgccaaatttatactctgttgaaacaatcgactccttgaagaaagccaaaaaattaaacgaatcgagggctaaatttcaaccagattgcaacccaatattgtgtaatgttcaaattaatacctcccatgaggatcaaaaatcgggcttgaataatgaagcagaaatatttgaagtcatcgacttcttcttatccgaagaatgcaagtatattaagttgaatgggttaatgactattggttcatggaacgtctctcatgaagatagcaaagaaaacagagactttgctacgctggttgagtggaagaagaagattgatgctaaatttggtacatcattgaaattgtctatggggatgagtgctgatttcagggaggctataaggcaaggaacagcggaagtcagaattggtaccgacatttttggtgctagacctccaaaaaatgaagctagaatcatttagtaggttgaatgaactgagattttatacgaagatctttttttttatagcattacaacacaaaatgaaaataaatagaatctcaaatatatatatatatgtgtgtgtgtgtttatatatgtacaatg

SEQ ID NO: 215 - DNA, 2364 bp, Saccharomyces cerevisiae
agagtttcttagttctttctcttttctaaaactgtaataatatgagctctttgtagacacatataacattttgtttcatatacataatatatttgcatataaaaatatcaagataattgattgtcaattggttcaacaaagcttgaaggtaaatttaggcaggagcaagtgactgaaaaaaaaaaaaatgagcggatctatcgatgtcatcactcattttgggcctgatgcagacaagccggaaatcatcactgcattagagaatttaactaaactgcatgcattgtccgtcgaggatctatacattaaatgggagcagttctccaatcaaaggcgtcaaactcacacagatctgacttccaagaacatagatgagtttaaacaatttttacaattacaaatggaaaagcgtgctaaccaaatttcatcgtcctctaaggtaaacacatccacaaaaaaaccagtgattaaaaaaagtttgaattcaagtcccttgtttggccttagtattccaaagactccgactttaaaaaaaagaaagttacatggtcccttttcactcagtgattccaagcaaacatataatgtaggctctgaggcagaaacaaatgaaaaaggaaatagttctttaaaattggagtttactccaggcatggcagaagatgctgtgggtgacagtgctccattgtcccacgctaaaagctcggatgccaagactcccggctcgtcgacattccaaactccaacaacaaacactcctaccacatcgaggcaaaatgttcctgctggtgaaattttggattctttgaaccctgaaaatattgaaatatcatctggtaatccaaatgtaggccttctttcgactgaagaaccatcatataaccaggtcaaagtagaaccattttatgatgctaaaaagtataaattcagaacaatgaggcaaaacttacaggaagcgtctgatgtcctcgatgatcaaattgaatcgtttactaagattattcaaaatcactataagttatctccaaacgacttcgctgatccaactattcaatctcagtccgaaatttatgctgttggaaggatagttccagattcgccgacctacgacaagtttttgaatccagaatcgctttccctagagacctcaagaatgggcggcgttggaagaagggtaaggttagatctatcgcaggtcaacgagctttcgtttttcttaggccaaattgtggcattcaaaggtaaaaatgctaatggggattacttcaccgttaactctattttgccgctaccttatccaaactccccagtgtccacatcgcaggaactgcaggagtttcaagcaaatttggaaggttcttctttgaaggttatcgtgacctgtggcccatactttgcaaatgataacttctccctcgaattgttgcaagaatttatcgatagtataaataatgaggtaaaacctcacgtcttgataatgtttggcccatttatagatatcacccatcctctgatagcgagtggtaaattgccaaattttccccagttcaagacacagcccaaaacattggacgagctttttttgaagttatttactcctattctaaaaaccatatcaccacatatccaaaccgtattgataccctccacaaaagatgcaatttctaatcacgccgcatatccacaagcttctttaattagaaaggctttacagctgcctaaaaggaacttcaaatgcatggctaatccttcatcttttcaaataaatgagatatacttcggttgctcaaacgttgatacattcaaagatctaaaggaagtcataaaaggcggtactacctcatcaagatatagattagatcgtgtttctgagcatattttacaacagcgcaggtattaccccatatttccaggtagtattcgtacaagaataaaaccaaaagacgtatctacgaagaaggaaaccaatgatatggaaagcaaagaagaaaaagtttatgaacatatatctggtgcagatttagacgtgagttatctgggactaacagagtttgttggtgggttctcgcctgacataatgattatacccagtgaattacaacactttgcaagagttgtccaaaacgtagttgttataaatcccggaagatttattagagcaacaggtaacaggggatcctatgcacaaattactgtccaatgccctgatcttgaagacgggaaattgacgcttgttgaaggtgaagagccagtttatctacacaacgtgtggaagcgcgctagagttgacttgattgctagttgatatatttaattcaaacttaactaatggaatagctcaaggtagcaccaaaaagtattgtt

SEQ ID NO: 216 - DNA, 1130 bp, Saccharomyces cerevisiae
cgtacataaaactacaacaaacctacaggatgaccatagataactacgacaacagtaaacaggatagcagcaaatacgaggttagtggtacgggtgatggcaggaacggcgatggcggcttgcctctagtacaatgtgtcgcaagagctcgtatcccaaccacacagggtccggatatctttttacatctttacagtaacaacagggacaacaaggaacatctagccattgtgtttggtgaagacatacggtcgcgctcgctattccgtagaagacagtgcgagacgcaacaagatagaatgatcaggggcgcttatattggcaaactgtatcccggcagaactgtggcagacgaagacgatagactcggattagctctggagtttgatgatagtacaggtgagttattagcttccaaagccactacatgggacgcccataacgacacgctggtacggatccattctgaatgttacaccggtgaaaacgcatggagcgcccgttgtgattgtggtgaacaattcgatagggccggtaggcttatcgcttgcgaccacgaacccacaagcaacatcaaaggtggaaacggccatggtgttatcgtgtatctaagacaagagggtcgtggcatcgggttaggtgagaaactcaaggcctacaacctgcaagacttaggtgctgacacagtgcaggccaacttaatgctgaaacatcccgtggatgctagggacttctcgctgggtaaggctattttgctggatcttggcatcggtaatgtcaggctgctgacaaataacccggaaaagataaaacaggtagatcatgcgccttaccttaagtgcgttgaacgagtgcctatggtacccatacactggacaaactccagtgaaggcatagactccaaggagatagaaggttatctcaggaccaagatagaaagaatgggtcatttactaacggagcctctgaaacttcatacaaaccctcaacctactgagacaagtgaagcccaaaaccaaaaccgtatgaactctgcgttgtcatcaacatcgacgctggcaatataaacacaagtgtagcataattattagtacatatagtgctttttttgtaatgaaacgaaaatacca

SEQ ID NO: 217 - DNA, 1323 bp, Saccharomyces cerevisiae
cctctatattatttatatttgtcgttgttcttttttgtgtgctcttttatacttcagaatcatacattaacatacatataagcaaatagccatgtcttccaacgcccaagtcaaaaccccattacctccagccccagctccaaagaaggaatctaactttttgattgatttcttaatgggtggtgtcagtgccgctgtcgccaaaactgctgcatctcccatcgaaagagttaaacttttgatccaaaaccaagatgaaatgttaaaacaaggtactttggacagaaaatacgcaggtatcttagactgtttcaagagaaccgctacacaggaaggtgttatctcattctggagaggtaacactgctaacgttatccgttatttccccactcaagctttgaatttcgccttcaaggacaagatcaaggccatgtttggtttcaagaaggaagaaggttacgccaaatggtttgccggtaacttggcatctggtggtgctgctggtgccttgtcattactatttgtttactctttggattatgcaagaactagattggctgctgactccaagtcctctaaaaagggtggtgctcgtcaattcaacggtttgatcgatgtctacaagaagaccttaaaatctgatggtgttgctggtctttacagaggtttcttaccttctgtcgttggtattgttgtctacagaggtctatacttcggtatgtacgattctttgaagcctctattgttgactggttctttggaaggttcattcttggcttcattcttgttgggttgggttgttactactggtgcttctacatgttcttacccattggataccgttagaagaagaatgatgatgacctccggtcaagctgttaagtacgacggtgcctttgactgtttgaggaagattgttgctgctgaaggtgttggttctctattcaagggttgtggtgctaacatcttaagaggtgtcgcaggtgctggtgttatctcaatgtacgaccaactgcaaatgatcttgtttggtaagaagttcaaataagtctaatctggcttgattcttaatctaaattctttctcacattttcctttttttcttctttggatttttggtgtttaatgagtgacacgatttgttttgataatattattatcctcctatttttttagaaattcttttcaacaagaatcaaagattcataaaaaaagaaaacgatgaaattttttgaacaacttttacgtataaagaagaaaaaaaaaaaattctaaatatccagtaaatagttttatattagtagtattctttcccacttttta

SEQ ID NO: 218 - DNA, 549 bp, Saccharomyces cerevisiae
taaaataagttaaaacttactagaacaagaatcatggccaaatcattacgtgctagcagtcatctaaatgctaaatctgtcaaaagacgtggcgttttccaaaaagcagtagatgcacgtgaacaaagaatatccgataaactaaaggaagacttactaaagcaaaaattagaagatctaaaaaagaaagaagagcaaggaattgacatggatgtcgacgagaaaaaatccaatgaagaagctcccagaaaaaaaatcagcacctctggttggagagacggtagacatcacacttataaaaaggctaagctgatgaaacaatctaagaaaaaaacttctttcaccagattctgataaaatgaaggtaataagaacttgataggagctaggttgtaaaatttttaattatgtaccatactaaaattccgacgttatttttattcttcaccgtgctttatctcttcctagacaatttaagagttgaaaggacaacagagggtgatgatatgaaaaccggttcacttttatatatttgtcttttatgtgagt

SEQ ID NO: 219 - DNA, 3572 bp, Saccharomyces cerevisiae
actaggacacctaaaacctgataatacagtgtgcatttgcagctgtttcaaagtttagttgttttttcttttggttttcgaggtgcttgaacgaaaagatttgcaaatagagcatgctaagaacaagaaccacaaagacccttagcacagtggcgaggaccacaagagctatccaatattaccgatctatcgctaagactgctgcagtttctcaaagaaggttcgcatcgaccttgaccgtgcgtgacgtagagaatatcaaacctagccatattattaagagtccaacatggcaagagttccagcatcaattgaaggatccaaggtacatggaacactttgcacaacttgatgcacagtttgctcggcatttcatggctacaaacagcggcaaaagtattctggcgaaagatgatagtacatctcagaaaaaggatgaagatgtcaagatagtacctgatgaaaaagatacagacaatgatgttgagcccacgcgagatgatgaaattgttaataaggaccaagaaggtgaagcttcgaaaaactccagaagctccgcttctggaggtggacagtcatcatccagtcgatcggattctggagatggaagttcgaaacaaaagcctccaaaggatgtaccagaagtatacccgcaaatgctagcattaccaatagccagacggcccttatttccagggttctacaaggcggttgtgatatcggacgaaagagttatgaaggcaatcaaggaaatgttagaccgccagcaaccctacattggcgctttcatgttgaagaactcggaagaagatactgatgtaatcacagataaaaatgatgtatacgatgttggtgttctggctcaaataactagcgctttcccgagtaaagacgaaaagacgggcactgaaacaatgactgctcttttatatcctcacaggagaataaaaattgatgaattatttccaccaaacgaggaaaaggaaaaatcaaaagaacaagcaaaggatacggatactgaaacgaccgtcgttgaagacgctaacaacccagaagaccaagaaagcaccagccctgctacgcctaagttggaggatattgtggtggagaggataccagactcagaattgcaacatcataagagagtagaagccactgaagaagagtctgaagaattagacgatattcaagaaggtgaggacattaaccccacagaattcttaaaaaattataatgtttcccttgtcaatgtgttgaatttagaagatgaaccgtttgatagaaagtcacccgttattaatgcgctaacatcagaaatattgaaggtatttaaagaaatttctcaattgaacacgatgttcagagaacaaattgcaactttttctgcttcaattcaatctgcgaccacgaacatttttgaggaaccagctagattggcagattttgccgctgctgtttctgccggcgaagaagacgaattacaagacatactgtcatctttaaacattgagcacagactagaaaagtcgctactagtccttaagaaagaattgatgaatgccgaattacagaacaaaatctccaaagatgtagagacaaagattcaaaagagacaaagagaatactatttgatggaacaattaaagggcatcaaaagagaattaggtattgacgacggccgtgacaaattgattgacacttataaagaaagaatcaagtcattaaaattgcctgatagcgttcaaaaaattttcgatgatgagataactaaattaagtaccttggagacttctatgtccgaatttggcgttatcagaaactatttggattggttaacatcgatcccatggggaaaacattccaaagaacagtattccattccgagagcaaagaaaattttagatgaagatcattatggtatggtagatgtcaaggatcgtatcttggagtttattgccgtcggtaaactattgggtaaagtcgatggtaaaatcatatgtttcgtaggacccccaggtgttggtaaaacgtccataggtaaatctatcgctagagctcttaacaggaaattcttccgattttctgtaggcggtatgacggacgtggcagaaataaaaggtcataggagaacgtatattggtgccttacctggcagagtagttcaagcattaaagaagtgccaaactcaaaatcctttgattttgatagatgaaatcgataagattggacacggcggcatacacggcgatccgtccgcggcattgttagaagtattggaccctgaacaaaacaacagcttcttggataactacttggatattcctattgacttatcaaaagtgcttttcgtttgcactgctaactctttggaaactattccaagacctttactggatcgtatggaagtcattgagttgacaggatatgttgctgaagacaaggttaagattgccgagcagtatttagttccaagtgccaagaaaagcgctggtctagaaaactctcatgttgatatgacagaagatgcaataacagcgttaatgaagtactactgtagagaaagtggtgtaaggaatttgaaaaaacacatcgagaaaatataccgtaaagcagccctacaagtggtaaagaagttgagtattgaagattccccaacgtcatcagccgacagcaagcctaaagaaagcgtttcttccgaagaaaaggcggaaaataacgccaaaagctcatcggagaagactaaggacaataattcggaaaagacaagcgatgacattgaagccttaaagacctctgaaaagatcaatgtttccatatcccagaaaaacctaaaagattacgttgggcctccagtctacactacagaccggttatacgaaacaactccaccaggggtagttatggggttggcgtggactaatatgggaggttgctcactttatgtagaatctgtccttgaacaacctttacacaactgcaagcatccaacatttgaaaggaccgggcaactgggagatgttatgaaggaatcatcaaggcttgcttattcattcgccaagatgtatttagcacaaaaattccctgagaacagattttttgaaaaggcgtctatccacttgcattgtcctgaaggtgctacccctaaagatggtccatctgcaggtgtcactatggccacttccttcctttccctagcattgaataagtcgattgacccaacggttgcgatgaccggtgaattgacacttaccggtaaagttttacgtatcggtgggttgagagaaaaagctgtggccgctaaaagatctggtgccaagactattattttccctaaagataacttaaatgattgggaggaacttccagacaatgtaaaggaagggttggaacctttagctgctgattggtataatgatatattccaaaaattattcaaggatgtgaatacgaaagaaggtaattcagtatggaaggctgaatttgagattttggatgctaaaaaggaaaaggactaacttttcatctaaatggattaaatacctgtttaaacattctgtaaatatttaaacata

SEQ ID NO: 220 - DNA, 468 bp, Saccharomyces cerevisiae
gataaatagtttgataaatggccagttgtgatggggaaaaagacttttagagaatggcaatatttcaagttatcaattacttcattcgatcaagatgtggacgatgcacatgctattgatcaaatgacatggaggcaatggttaaataacgcattgaaacgtagttatggtatttttggtgaaggtgtagaatattcattcctgcatgttgacgataagctggcttacatcagagtaaatcatgcggataaagatacattttcttcgtccatcagtacatacatatctactgatgaactcgtcggttcaccattaacagtgtcaattctacaagaatcttccagtttgagacttctggaggttactgacgatgaccgcctatggctgaaaaaagtaatggaagaagaagaacaagactgtaaatgtatatagaatatcagtttattatttaaaaaaacttgggcatag

SEQ ID NO: 221 - DNA, 4971 bp, Saccharomyces cerevisiae
agcacaaaaaaaggaggcgagtaggtggtactatttcattctactaagatctttaaagcaattcctttccggtttttttctcaactaccgtactctttttccttttttattttgcccttagattgtattataaagctctgtatatctggaaaagccctgaagtgtccagtagtcatcacacgttatgatattacttcattttgtctattctctttgggccttacttctcattcctttaactaatgccgaagaattcacccccaaagtgacaaagactatcgcgcaagattcatttgatatattaagctttgatgattccaacactttaattagaaaacaagacacctccgttactataagctttgacgatggtgaaacatgggaaaaagttgaaggcattgaaggcgaaatcacttggatatacatcgaccccttcaatagacatgacagagccgttgcaacggcaatgaatgggtcgtacctttatataaccaatgatcaaggtaagtcatgggagcgtataacgctacctgactccggagaaagtatttcacctcgtgaatgctatatagaaacccatcccttgaataagaactattttcttgcaaagtgcaactattgtgagaaaacagaagtaaacaatgacaatgaagagaattcgggggacgaagagggacaatttgaaatatttaatattacacgttgcacagacaaggtttttgcaagtaatgatggtggaaaatccttttctgagatcaagtcttctctagaaaggaacgaaaatagtcctatcagcatttctgattgtggctttgccaagaccagcaaagattctgaccttgaaagtagtgatacctcaataatctgtctttttcaaaatatgcagcttattatggatgagtttagttctccttacaccgaaagtaaattggtcctaactacggactggggcaaatcactaaaagaatttgaccaatttaaagataaggtcgtcaatggttacaggatattgaaatctcacatggttgtcttaacccagggcgacagatataatgatatgtcttccatggatgtgtgggtatcaaatgatctgtcaaactttaaaatggcttacatgcctactcagttaaggcattctatgcaaggagaaatatatgaggacgctatgggaagaattatcttgcccatgagtagggaaagaagtgatcaagaggaggataagggcatcgtgtctgaaattttaatttccgactcacaagggttaaaattttcccccatcccatggaccgcaaatgaggtgtttggttatattaatttttatcaacctacttacttgaaaggaacgatgattgcctcactttaccctctatctaggcgtcgtaaccgtaaaggaaaagccaaaggagtaaagagtaagggggtaaccaaaatatctgttgataatggcctcacatggacaatgttaaaagttgttgatccagataacgcagactcattcgactgtgatattactgattttgagaattgttcgcttcaaaatatgttttacacacgggagggttccactccaaccgccggaattctaatgacaacaggtattgttggcgatggtagtgtcttcgactggggagatcaaagaacctttatttctagggatggtggcttaacatggaaactcgcctttgattttccttgtttatacgctgttggtgattacggaaatgttattgtggctataccgtataatgcggatgaagacgacgatcctcaatccgaattttattactctttagaccaaggtaaaacttggaccgaatatcagctagaaactactatctacccaaatgaagtaatgaatacaacgcccgacggatctggagctaaatttattctaaatgggtttactttggcgcatatggatggtacaacgaatttcatctatgcaattgatttttcaacagcctttaatgataagacatgcgaagaaaatgatttcgaggattggaatttagctgaggggaagtgtgtcaatggagtcaagtacaagatcagaagaagaaaacaggacgctcagtgcttggtgaagaaagtttttgaagacttacaattatttgagactgcttgtgacaagtgtaccgaggctgattacgaatgcgcgtttgaatttgttagggacgcgaccgggaaatgcgtaccagactacaacctaatcgttctctctgacgtatgtgataagacaaagaaaaaaactgtgcctgtaaaaccattgcaactagttaaaggtgataaatgtaaaaaaccaatgacagtcaaatcagtggatatttcgtgtgagggagttccaaagaagggaacgaatgataaagaaatagtggttacagaaaacaaatttgatttcaagattcaattctatcaatactttgacacagtcaccgacgaatccctcctcatgatcaattcaagaggagaagcttatatatctcatgatggtggacaaacaataaaaaggttcgacagtaatggtgaaacaattattgaagttgtgtttaatccatactacaattcttcagcttatctgtttggttccaaaggtagcattttctctacccatgataggggatactcttttatgactgctaaattgcccgaggctaggcagttaggtatgccattagactttaacgctaaggcacaggatacatttatctattatggtggtaagaattgtgagtcaatcttaagtccggaatgtcatgcggtagcatacctgaccaatgatgggggcgaaacgtttacggaaatgcttgataatgcaattcattgtgagtttgcgggctcacttttcaaatatccgtcaaatgaggatatggttatgtgtcaagtgaaggaaaagtcttcgcagacaagaagcttagtttcttctactgattttttccaggatgataaaaataccgtctttgaaaatattatcggctacttatccactggtggctatatcatcgttgctgttcctcatgagaacaacgaattgagagcatacgtaactatcgatggtactgagtttgccgaggcaaaattcccatatgatgaagatgttgggaagcaagaggcattcactatattagagtctgagaaaggatcgatattcttacatttagcaacaaacttagtaccaggacgcgattttggcaatcttttgaaatccaactcaaatggtacttcttttgtcacgttggagcatgccgttaatagaaacacattcggctatgttgactttgaaaaaattcaaggtctcgaaggcattattctcaccaacatcgtttcaaatagtgacaaggtcgccgagaataaagaagacaaacaattgaagacgaagatcacctttaatgaaggttcagattggaactttttgaaacctccgaagagggattcagaaggaaaaaagttttcttgcagctccaaatcactggatgagtgttcattgcacttacatggctatactgaacgtaaggatattagagatacatattcttccggttctgcattaggaatgatgttcggcgttggcaacgttggtcctaaccttttaccatataaagaatgttccaccttcttcaccaccgatggtggcgaaacgtgggctgaagttaagaagactcctcaccaatgggaatacggtgaccacggtgggattttagttttagttcctgaaaactcagaaactgattctatttcctattctaccgattttggtaaaacatggaaagattataaattctgcgctgataaggttttagtaaaggatataaccactgttcccagggattctgctttgagatttttgctgtttggagaggcagcagatattggaggcagctcatttagaacgtacacaattgattttagaaacatcttcgaaagacaatgtgatttcgacatcactggtaaggaaagcgcagattataaatactctcctctgggttccaaaagcaattgcctatttggtcaccaaaccgagtttttacgtaaaaccgatgaaaattgttttattgggaatattccactttctgaattttcaagaaatatcaaaaactgttcttgtacaagacaagatttcgagtgtgattacaacttttacaaagctaacgatggtacttgtaaattagtcaaaggactaagcccagcaaatgctgcagacgtttgtaaaaaagagccagatttaatcgaatattttgaatcgtcaggctacagaaagatccctctatcaacctgtgagggtggcctgaaattggatgctccctcatcaccacatgcttgcccaggaaaagaaaaagaattcaaggaaaagtactcagtaagtgccggtccctttgcatttattttcatttcaattcttttaataattttctttgccgcatggtttgtatatgacagaggtatcagaagaaatgggggatttgcaaggtttggagaaattaggctaggtgacgatggtttaatagaaaacaataatactgacagagttgtcaataacattgtgaaatcaggattttacgttttctcaaatatcgggtctcttttacagcacacaaaaactaatatagcgcatgctatctccaaaattagaggaaggtttggaaacagaacaggtccaagctactcatccctgatccatgatcaatttttggatgaagcagatgacctgcttgctggccacgatgaagacgccaatgacttatccagtttcatggatcagggtagtaattttgaaatcgaagaagatgatgttccaacacttgaagaagagcatacatcatatacagatcaacctacgaccaccgatgttccagatacattaccagaaggaaatgaggaaaacatcgacaggcctgattctacagcgccatctaacgaaaaccagtagagagattactttacatagagtagataattccatatacttttcataaa

SEQ ID NO: 222 - DNA, 3794 bp, Saccharomyces cerevisiae
atgactgtgtttctgggcatctatagggccgtctatgcctatgagccgcagacaccagaagaactggccatccaagaagacgatctgttgtacctcttacagaagtcagacattgacgattggtggacagtaaagaaaagagtcattggttccgatagcgaagaaccggtgggtctagtgccctccacttacattgaagaagctcctgttttgaagaaggtaagagccatttatgattatgaacaggtgcaaaatgctgatgaagaattgacgtttcatgaaaatgacgtttttgatgtattcgatgataaagatgctgattggctgttggttaagtctaccgtttccaatgaattcggcttcattccaggcaattacgtcgaaccagagaatgggtccacttccaagcaggaacaggctcccgctgccgctgaagctcctgcagctactcctgcagccgctcctgcttctgctgccgtactacccaccaactttttaccacctcctcaacacaatgatagagctcgtatgatgcaaagtaaagaagaccaagctccagatgaggatgaagagggccctcctcctgccatgcctgcaagaccaacggctactaccgaaactactgatgccaccgctgcggctgttcgatctcgtacaagactatcatacagcgataacgataatgacgatgaagaggatgattactattacaacagcaacagcaacaacgttggaaatcacgaatacaatacagagtatcactcttggaacgttaccgaaatcgagggaaggaaaaagaagaaggccaagctatcaatcggtaacaacaagataaacttcataccccaaaaggggactcctcatgagtggtcaattgataaattggtctcttatgataacgaaaagaaacacatgttcttggaatttgttgatccatatagaagccttgaattacacactggtaataccaccacatgtgaagagatcatgaacattattggtgaatataaaggtgcttcccgtgatcctgggttgagagaagtcgaaatggcttccaaatccaaaaagagaggtattgttcaatatgacttcatggctgaatcacaggacgaattaaccataaaatcaggcgataaagtctacattttagatgataaaaaatctaaggactggtggatgtgccaactggttgattcagggaaaagcggtctcgttcctgcacagtttattgagcctgttcgtgacaaaaaacatactgaatctacagcaagcggtatcatcaagtctatcaagaaaaacttcaccaaatctccatctaggtcgagatctagatcaagatctaaatccaatgccaatgccagttggaaagatgatgaactacaaaacgatgttgtaggtagtgctgccggtaaaaggtcaagaaaaagttcattgtcctctcacaaaaaaaactcttcggcgaccaaagatttccccaatccaaaaaaatcgcgtctatgggttgatagaagtggtactttcaaagtggatgcagaattcattggatgtgctaaggggaaaatccacttgcacaaggctaatggtgtcaagattgctgtcgccgctgataaactatccaatgaagatttagcgtatgtggaaaaaattactgggttctccttagagaaatttaaggcgaatgatgggtctagttcccgtggcactgattcaagagactctgaaagagaaagaagaaggagattgaaggagcaggaggaaaaagaacgcgataggagattgaaagagcgtgaattatacgaattgaaaaaagccagagaactcctagatgaagaaagatcaaggttgcaagaaaaggaattgcctccaataaaaccaccaagaccaacctctactacctccgttccaaatacgacgtccgtaccaccagccgaaagcagcaataacaacaactccagtaacaaatatgattggttcgaatttttcttgaattgcggcgttgatgtaagcaattgtcaaagatatacaataaattttgatagagaacagcttactgaagacatgatgcctgacatcaataactcaatgttaagaaccttgggtctgcgcgaaggtgatattgttagagtaatgaaacatcttgacaagaaatttggaagagaaaatattgcatcaattcctacaaatgccactggaaatatgttttcacaacctgatggttcattgaacgttgctacaagtccggaaacctcactgcctcagcaattgttgccacaaacaacaagtcctgctcaaacagctccttccacatcagctgagacagatgatgcttggactgttaaaccggcttctaagtctgaatctaatttactctctaagaaatcagaatttactggttccatgcaggatttattagacttgcaacctttagaacctaaaaaggcagctgcctcgacacctgaaccaaacctaaaagatttggaacccgtgaaaactggcggcaccactgttcctgctgctccggtttcatctgctccggtttcatctgctcccgctccattggatccattcaaaaccggtggcaacaatatcttacccttatctactggctttgtgatgatgccaatgattactgggggcgatatgctgcctatgcaaagaaccggcggcttcgttgtaccacaaacaacttttggtatgcaatcgcaagttactggtggtatcctacctgttcaaaagacaggaaatgggttaattcctatctctaacactggcggcgcaatgatgccacaaactacgttcggcgcagcagctaccgtcttacctctgcaaaaaactggaggtggcctaataccaattgccaccacaggaggtgcgcaattcccgcaaacttcattcaatgttcaggggcaacaacaacttccaacaggttcaatattacctgtccaaaaaactgctaatggattaatttcagctaatactggtgtctcaatgccaactgtacaaagaacaggcggcactatgattccacaaacatcatttggcgtttcacagcaattaacaggtggtgcaatgatgacccaacctcaaaatacagggagtgccatgatgcctcaaacatccttcaatgctgtaccacaaattactggaggagcaatgatgcctcaaacgtccttcaatgctttaccacaagttacagggggagcaatgatgcctttgcagagaactggtggtgctttgaatacatttaatactggaggcgccatgattccccagacttcgttcagctctcaagctcaaaacactggcgggttccggccgcaatcccaattcggtttgactttacaaaaaaccggaggtattgcgccattaaaccagaaccagttcactggtggagccatgaatactttaagtacagggggcgttcttcaacaacagcaaccacaaacgatgaataccttcaatactggtggtgttatgcaagagctccaaatgatgactactttcaatactggtggtgctatgcaacaaccacagatgatgaacacattcaacaccgatggaattatgcaacaaccacagatgatgaacacttttaacactgggggtgctatgcaacaaccacaacaacaagcattacagaaccaacctactggatttgggtttggtaatggacctcaacaatcaaggcaagccaacatattcaatgctactgcatcaaatccgtttggattctagattaatgtattttaagattttataggataataactaaaacaagctatatgaaatagttt

SEQ ID NO: 223 - DNA, 716 bp, Saccharomyces cerevisiae
acaaggaatagctgagaatgagtggaagtaatatgggatactatgacgtactcgcagggctttcagcgctggaaaagtcatcccaggtagtgttcagtgcgactgagcttcaacagcttacgcaacaatctcatgctaccgacaagggcatagagggcagtgagaatagtaaagcgaaggtatccaagcccaaaagagtagctgtacatggttacctaggcggtaaagtgtcgctcgccgatgcggcacaggtggagtatgaagtaggccattcactgctgggcagttatgtgccacgccagcagttggaagccctgtcaagtgtcgacttttcgcaccatttccaccgcacattagaatgcaaagctgctctagagacacacgatgtttttcttgccggcgcaggacaattgtctctacccttccaatcacacatagagagccccaggaatagcgaggctaaaaggaaaagaaaagtgataatatgcaaacggtgtcaatcacgatttataggttcccataggcggtctcaacttagagaacatgcctgcgtagattaaaccatgtaattgatagaggtagaatgttgcttcgtagaaagtgactatacgattcctaaaaggggcttccttccactcatgcgaaatcgagatacatcagacgaaaacagaacgaatatttagcgcatatatactatgtatatctattgcaatcct

SEQ ID NO: 224 - DNA, 611 bp, Saccharomyces cerevisiae
cataaattcttgtctttttacataagaattaggaaagtacagaacaagagcaaatttaatatataatgtccggtggtaaaggtggtaaagctggttcagctgctaaagcttctcaatctagatctgctaaagctggtttaacattcccagttggtagagtgcacagattgctaagaagaggtaactacgcccagagaattggttctggtgctccagtctatctaactgctgtcttagaatatttggctgctgaaattttagaattggctggtaatgctgctagagataacaaaaaaaccagaattattccaagacatttacaattggccatcagaaatgatgatgaattgaacaagctattgggtaatgttaccatcgcccaaggtggtgttttgccaaacattcaccaaaacttgttgccaaagaagtctgccaagactgccaaagcttctcaagaactgtaagaactgagttgaaaagaaacaaagcaaatcaaacattcttgtcatttggggttttaaagtaggtcatatgaggaagactggtatgtcttttatctaacagttttataaatagcgtcgttttattaaagacagtgtatagtattacta

SEQ ID NO: 225 - DNA, 423 bp, Saccharomyces cerevisiae
gatattcagtttttgtcattgccgtcgtgatcattaactataaagcacataaactacaagtttagaaaatgcccaagatcttttgtttagcggacgtgtgtatggtccctattggcaccgactctgctagtatttctgattttgttgcactcattgaaaaaaaaatcagagaaagcccattaaagagcactttacacagtgcaggaacaacaattgaagggccttgggatgatgtgatgggtttgattggcgaaatccatgaatacggtcatgagaaaggatatgttagagtacacactgatattcgtgttgggactagaactgataagcaccaaactgctcaagataagatcgatgttgttttaaaaaaaatttctcaatgaatgctcgtgtagtgaacctaaatagggtatatctttaagg

SEQ ID NO: 226 - DNA, 161 bp, Saccharomyces cerevisiae
taaatatacaacacccagtatttttggctgcccgtgtctttctctaccacgggtagtctctctaagctggcagatagatgtttattgaaccgcttaagttccgttgtgaagttttcgtctttcaggctgtatttcataacactactgtagttcacacatac

SEQ ID NO: 227 - DNA, 1175 bp, Saccharomyces cerevisiae
acgaatctctttgccttttggcttagatcaagtgtagtatctgttcttttcagtgtaacaactgaaatgacctcaatgaggctcattaccttttaatttgttacaatacacattttttggcacccaaaataataaaatggacgggaagagactttttaagcaagttgttttccgctaatgtcaggtctcactactttttgctgctatttttcttcgctcatggtttcttcataaggcgtttttatgatggtttttcgaaattggtttttgagacgacggttgctcaaggttattgtttttgttttcttctggttgttttctattttcttttttttagctttctgtttctcccttagtttggctttttgcttcatactcttccctgtctttccgagccgtttatgtccaacgcgggatttggtttttctttatcgatgggaagaaatggtgctatagtaggttgggagataatatttatggtatggggtgctagtgcggatggggcgctcttattgttgatttcttcgctcgtcttctttttctggtggcgctgcaagaggaagtttttcgactttgttatgatttttggtttgcaaggaaaggtgtcttacgattctttttttgatgtaataggataagcttgcttatcccccaagtatcggccaaagttgttgattttccttttgaagtgtcctcggtttgagggggtgtagggtggggttggtctacaataagagtgttccattgttaacgtgctggcgtcttttactatattttttttcccagtttattttgtgcttattttctcattgaggagaaggagctcttctcgcaggatataaatggaggtttgctaaaggggaggagatgtgtttgtgagaatactgctgagagagttctggaagagaaaaaaaggaggcaatggaaggcgtttgctgggaaaagagaagagccatgactgcatctgttgtttcaaggccagttttattaaccgcctatgtcatagaggcgttttttttggagggatttgaagaatgccggcggcatcaagaaacggacttgatggttgacgcctgtttttaaagttagagacgtcgcgaccctcgcacttgtggagtcgttcttgacttttactttggtcgcttgatgtttctctcgtcttcccgttcgctctt

SEQ ID NO: 228 - DNA, 88 bp, Saccharomyces cerevisiae
ttaacatgatgaaaaaatatattaacacagacctgtactgaacttttcgaagttttgcagataacaatattgctttttttctctgact

SEQ ID NO: 229 - DNA, 72 bp, Saccharomyces cerevisiae
tccgtgatagtttaatggtcagaatgggcgcttgtcgcgtgccagatcggggttcaattccccgtcgcggag

SEQ ID NO: 230 - DNA, 72 bp, Saccharomyces cerevisiae
tccgatatagtgtaacggctatcacatcacgctttcaccgtggagaccggggttcgactccccgtatcggag

SEQ ID NO: 231 - DNA, 73 bp, Saccharomyces cerevisiae
gcggatttagctcagttgggagagcgccagactgaagatctggaggtcctgtgttcgatccacagaattcgca

SEQ ID NO: 232 - DNA, 74 bp, Saccharomyces cerevisiae
ggtctcttggcccagttggttaaggcaccgtgctaataacgcggggatcagcggttcgatcccgctagagacca

SEQ ID NO: 233 - DNA, 1301 bp, Saccharomyces cerevisiae
aataaaactagagaggaagataggtaccctatgaaaatgtcaatggctgttgcgtttgcttaatcgtatttttttttttttcagtccgtgttttttgtacattctacgtttgagttttccatcatgcaggcctcagaaatttggtaggcactcgatggtgaagagatagtgtcggatttcggattgatctttcagttgatagcctgctgctcttttcttttccaaagaatttcgagtatgctggtgtcagtgtagatgcttgtgtgtgcgcaatttgtggttttttattgtgtttctacttatagatggctaaaatctgagtttagaaaatgcaaaccgtaaattcttaaacactgctattgcatttagttgctaaagcagtgtttttgaacttattcctgttattccttcttcgtaccgatcctcttctcgacctaaccttttaattaccatgggaagcctaccatcaccacacccacacacaaatgttacagctaattgtttattagcaaagtttgcacgagttcgctgtttatttttttctcgttttcttatacctagtattttttctgacactgtttaaggtgacagaaaaaaaggagtttaagttagatttgcaaacagacggtgctaagcgctgtcactttatgtctatcttatcgttaactctggaaaaagaaaaaggaaaaagaacgtcagggaacatgagtatatatagaaatggtttattctagttttttccgttttttcagtagatttttgcctttaaaagaataaatcccactacaaaaaggtaaaataaaaaatctattcactgaacttactgatgaaatttccaaatgtgccccgtacatcgaacgatgtgacagagaaaaatacgagtaggtaaataagccaaaaggcaagggtgtcctttcttaagcatcggttaggtttgcgggcgatcagtaactgaacaatgacacaagatcaagaacgtaatttgagatttttcaagatggtttttttaggtatctattaaaactactttgatgatcaatacggtatttttgtcgcattattttccaagcggaaggaaccgtgtgttcattttatgaatcttggtgttgtattcacagctacttctcctaatgccttcgatgcatttagataatttttggaaacattttttttcttgatgtatattttttgtattgtagaaatcgcgcgtactgtacttgtatatcgctttataagcgcttttaattgattgttcatgacgaggataggcggataggcggaggtatgcctcttaatattta

SEQ ID NO: 234 - DNA, 84 bp, Saccharomyces cerevisiae
ggagggttggccgagtggtctaaggcggcagacttaagatctgttggacggttgtccgcgcgagttcgaacctcgcatccttca

SEQ ID NO: 235 - DNA, 84 bp, Saccharomyces cerevisiae; identical to SEQ ID NO: 234

SEQ ID NO: 236 - DNA, 72 bp, Saccharomyces cerevisiae
gctcgcgtggcgtaatggcaacgcgtctgacttctaatcagaagattatgggttcgacccccatcgtgagtg

SEQ ID NO: 237 - DNA, 635 bp, Saccharomyces cerevisiae
ttttctgattgctctatactcaaaccaacaacaacttactctacaactaatgtcctctgccgccgaaaagaaaccagcttccaaagctccagctgaaaagaagccagctgccaagaaaacatcaacctccgtcgatggtaagaagagatctaaggttagaaaggagacctattcctcttatatttacaaagttttgaagcaaactcacccagacactggtatttcccagaagtctatgtctattttgaactctttcgttaacgatatctttgaaagaattgctactgaagcttctaaattggccgcttataacaagaaatccactatttctgctagagaaatccaaacagccgttagattgatcttacctggtgaattggctaaacatgccgtctccgaaggtactagggctgttaccaaatactcctcctctactcaagcctaagtcactcactaggtattgtgatttagtcatgttttctttttattagtggcattttttatatattgtaacattagggttctgttacttgtccagatatgattggaagggtctagtctatcagcctccgaaggagttgtataaatgtatatatataactttataaacaaaaaaaattgggaaagatattttg

SEQ ID NO: 238 - DNA, 240 bp, Saccharomyces cerevisiae
atgaaaatgaacccttgtactgttatcctctgtaagtcgttatttttcttttgcctttttcaggttgactgctactgtaatcgtaagaatattcaaaatcaatcatctcgcatcgcaacaaaaataaaacgaagttactggtttaggtggcagaaacatataatattggcgaacattcataaaataattaaggcttaccaacgaagcataataaaattgccagtaaccaaaggtctctga

SEQ ID NO: 239 - DNA, 2187 bp, Saccharomyces cerevisiae
aaacacacatacatgcgctatttgtattgagaaaatgaattttgatgcggtagcagatcaacagatgactgacagaaggtattttgctctcgaagtagcagaaagcgatgatgccgacagctcattaaattcttcatccatgggaagccccgcagtggatgtaggaagaaaagtttacaaaatcacttcgcacaagggttcagcagaagatgagagtcaatccttttttacttcttcagattctccaacatccaaaacaaggcctgtaggtaaaaccatcgaaaacgatgattactatggtaaaagatcttctacaggttcatcgctcaaacaactcttcaataaaattaatattaatgataccgctcactcttcaaacaaagaaaatgtatctcagtcggtgctatcggaaaacaagctgctctctccatctaaaaggttgtcgaagcaaggtcttacaaaggtgactaactccaagtttcgtacacccttgagacctatttcaaaccaatcgactttatcaagggatgagcctgttaaagattttagatcacttaagtttcggagcggtagtgatttcaaatgctggggtgacgagaagacaagttctcatgttcattcatccagtgtgaactcagttaattcctttacttctaccacctcttcttcaaagtggaagttctggaaaaatgataacctattgtcgaggtcgctatcttccagatctgtgaatgaccaagatccgaactttgttcagccaaaaccaaccaattcgttacaaaagaagtcttcaatttcaagttttcacaattctatttttggtggtggcaaacacacagagaagaagaggaattctggatttattatgcccgatcatcagagcacgaaggagctaaaccacaaacattcatcatcgaacctttcctttagaagtttgaagcataaaacatcacattcttcactaaataagctcaaagtaaggcgtaaaggaaatacacaagaactgaatcatccgatcaaaaaaacttgccaaatatcattgcctgttccagaccaagtctcaaaggacaagattcaactgaaattgaaaaattcaacatcattggcatccttatcttcagaagtcactcccataaacactttggactacaatgattcaattttgcaacaaatattacaactttgtgatgttaagtatatattacatgatctacgtgaagctcagtcattaggcttgtttacgttgaatactagatcggttcagctgtctcataacttttggcaaacttatcatagcgatatgcaaacttcactcatttgcaagaaagtatgtctaggggctctaagtgatttgactacttcaaacttgatatccttacatgaattgaaatcattacggttaatacaaggaactagcggtgtcgccaatttactgcaagcttatgttgtgccctcaaatcaatgtgaaaatgaccaaaacttgatactgtacttatttttcaaataccagggaactcctctatcaaggtgctctaacattgattactctcaagcattgtctattttctggcagtgcagcagtattttatatgttgctgaatccaaatttcagctcgaacacaggaatctaactttggaccatattttgatagactctaaagggaatgttactttaattgatatgaagtgctgtcgtttcttgaatatagacaacaataaggcttcctatacaagattagaccatcattatttcttccaaggccgggggactcttcaattcgagatatatgaactgatgagaagcatgctgcctcagccaatatcctgggctacatttgaaccaagaacaaacctattatggttatatcacctaagtagcagcctgctaaaaatggccaaaaaagccgtagtcagcggcgctttgaaccgggaagaaaatatcttaatcgagttgacgcacttactcgatcctgctcgaaaacattccaaaacaattttcaaaaaggaacttgttataagaacttgcggtgatttgttatctttgaagggagaaataatgcagtaaagacatcgtagtaataaggtgcaagcttttgtatccttcttaatgatttgtaagcaaaaaaaaattacgtacatcaatttgtaatggaaaggaaataaatagtataatatgaacactctttc

SEQ ID NO: 240 - DNA, 2486 bp, Saccharomyces cerevisiae
atgcctgcaccaaaactcacggagaaatttgcctcttccaagagcacacagaaaactacgaattacagttccatcgaggccaaaagcgtcaagacgtcggctgatcaggcatacatctaccaagagcctagcgctaccaagaagatactttactccatcgccacatggctgttgtacaacatcttccactgcttctttagagaaatcagaggccggggcagtttcaaggtaccgcaacagggaccggtgatctttgttgcggctccgcatgctaaccagttcgtcgaccctgtaatccttatgggcgaggtgaagaaatctgtcaacagacgtgtgtccttcttgattgcggagagctcattaaagcaaccccccatagggtttttggctagtttcttcatggccataggcgtggtaaggccgcaggataatttgaaaccggcagaaggtactatccgcgtagatccaacagactacaagagagttatcggccacgacacgcatttcttgactgattgtatgccaaagggtctcatcgggttacccaaatcaatgggatttggagaaatccagtccatagaaagtgacacgagtttgaccctaagaaaagagttcaaaatggccaaaccagagattaaaactgctttactcaccggcactacttataaatatgccgctaaagtcgaccaatcttgcgtttaccatagagtttttgagcatttggcccataacaactgcattgggatctttcctgaaggtgggtcccacgacagaacaaacttgttgcccctgaaagcaggtgtggcgattatggctcttggttgcatggataagcatcctgacgtcaatgttaagattgttccctgcggtatgaattatttccatccacataagttcaggtcgagagcggttgttgaattcggtgaccccattgaaataccgaaggaactagtcgccaagtaccacaacccggaaacgaacagagatgcagtgaaagaattattagataccatatcgaagggtttacaatccgttaccgttacatgttctgattatgaaactttgatggtggttcaaacgataagaagactatatatgacacaatttagcaccaagttaccgttgcccttgattgtggaaatgaacagaagaatggtcaaaggttacgaattctatagaaacgatcctaaaatagcggacttgaccaaagatataatggcatataatgccgccttgagacactataatcttcctgatcaccttgtggaggaggcaaaggtaaatttcgcaaaaaacctcggacttgttttttttagatccatcgggctctgcatcctcttttcgttagccatgccaggtatcattatgttctcacctgtcttcatattagccaagagaatttctcaagaaaaggcccgtaccgctttgtccaagtctacagttaaaataaaggctaacgatgtcattgccacgtggaaaatcttgattgggatgggatttgcgcccttgctttacatcttttggtccgttttaatcacttattacctcagacataaaccatggaataaaatatatgttttttccgggtcttacatctcgtgtgttatagtcacgtattccgccttaatcgtgggtgatattggtatggatggtttcaaatctttgagaccactggttttatctcttacatctccaaagggcttgcaaaagctacaaaaggatcgtagaaatctggcagaaagaataatcgaagttgtaaataactttggaagcgaattattccccgatttcgatagtgccgccctacgtgaagaattcgacgtcatcgatgaagaggaagaagatcgaaaaacctcagaattgaatcgcaggaaaatgctaagaaaacagaaaataaaaagacaagaaaaagattcgtcatcacctatcatcagccaacgtgacaaccacgatgcctatgaacaccataaccaagattccgatggcgtctcattggtcaatagtgacaattccctctctaacattccattattctcttctacttttcatcgtaagtcagagtcttccttagcttcgacatccgttgcaccttcttcttcctccgaatttgaggtagaaaacgaaatcttggaggaaaaaaatggattagcaagtaaaatcgcacaggccgtcttaaacaagagaattggtgaaaatactgccagggaagaggaagaggaagaagaagaggaagaagaagaagaggaagaagaagaagaagggaaagaaggagatgcgtagatgccatttactgacggtgaagatactagaaactaaatctttcgccgttctatttatgtaataaacccattattgctcattgggagttgtaaatattaatgctcaatgtttatgtatatccctcgcacaggggctttttatttcttgagggggggactaattgtataattgtatgttttataaaaaagtatattgctcttttacga

SEQ ID NO: 241 - DNA, 1901 bp, Saccharomyces cerevisiae
caagagaccgtcttactagacaatagcggcaaaacaaacaacacatttctttttttctttttcacatattgcactaaaatgacaatttctaatttgttaaagcagagagttaggtatgctccctatctgaaaaaagttaaggaagctcacgagcttattccattgttcaagaatggtcagtaccttgggtggtccggttttacaggagtgggtactcccaaggcagtgccggaggcactgatagatcacgtggagaagaacaatttacaagggaagttgagattcaacctttttgttggagcttctgctggtccagaggaaaaccgttgggctgaacacgacatgatcattaagagagcccctcatcaagtagggaaacccattgcaaaggcaattaaccagggtagaattgagttctttgataaacatctgtccatgttccctcaggatctgacatacgggttctacaccagggaaagaaaagacaacaaaatccttgattatactataatcgaggcaacggccattaaagaggacgggtctatcgtcccaggtccctctgtcggtggttctccagaattcattacagtcagtgataaagtgattattgaggttaacacggctacgccttcgttcgagggtattcacgatatagacatgcccgtgaacccacctttcaggaaaccatacccatatctgaaagtggacgacaagtgtggtgttgactccatcccggttgatcctgaaaaggttgttgcgattgtggagtccaccatgagggaccaggtcccaccaaatacgccctctgacgacatgtccagggctattgcaggtcatttggtcgagtttttcagaaacgaggtaaaacatggtaggctacctgaaaacctgctgcctttacaaagtggtataggtaacattgctaacgctgtcattgaagggcttgctggcgcccaattcaagcacttgactgtatggacggaagtgctgcaggactcgttcttggatcttttcgagaacggatctttggactacgccactgctacttccgtgagattgactgaaaagggtttcgacagagcctttgcaaactgggaaaatttcaaacacagattgtgtttgagatctcaagttgtctcgaacaatccggaaatgatccgtagattgggtgtcatcgccatgaataccccagtagaagttgacatttacgcgcacgccaattctacaaatgtgaatggttcccgtatgttgaacgggttgggtggatctgctgatttcttgagaaatgcaaagttgtccatcatgcatgccccctctgcaagaccaactaaagtagaccctaccggtatctctaccattgttcctatggcctctcatgtagatcaaactgagcatgacctggacatcttggtcactgaccaaggtttggcggatctaagaggtctatcgcctaaggaaagagcccgtgaaatcatcaacaagtgtgctcatcccgattatcaagctttgttgaccgattacttggacagagcagagcattacgctaaaaagcacaattgcttgcatgaaccacacatgctaaagaatgctttcaagttccacaccaacttagctgaaaagggtacaatgaaggtcgacagctgggaaccagttgactagtgtttgtgcgcaaaccgagagatgagtatttaacaaaaaaaagaaaggaaatgatatgattatgattttatgtttataaagcttttatccaatgcgttgttttttcttgcatatttatactttttgcgctcatggagggagttaatcaatacgcatgacgtctagttaattcacaggtagtactgtatatttatatgtttacacaataattatgtattaagtagtgattagtaaaaaaaact

SEQ ID NO: 242 - DNA, 1418 bp, Saccharomyces cerevisiae
atttttactttttttttttttgtttctgcattctctcagattttagatgatgcggttttttacagggcattgaaacaattgcagaaaagcaacatactaatatatcataactttttactcttgcctctcagaaactatatatacgttgtaatcattttctttcttctaatagctagttcgtttgaactacaaggaaataaggcagagaaaaagaaaggaaaataatatgccaaagagaattgtatacaatatatccagtgacttccagttgaagtcgttactgggagagggtgcatacggtgtggtatgttctgcaacgcataagcccacgggagaaatcgtggcaataaaaaagatcgaaccattcgataagcctttgttcgcattacgtacgctgcgtgaaataaagatcctgaagcacttcaagcacgaaaatatcataacaatcttcaacattcaacgccctgactcgttcgaaaacttcaatgaggtctacataattcaagagctaatgcagacagatttacaccgtgtaatctccacccagatgctgagtgacgatcatatacaatattttatataccaaaccttgagagcagtgaaagtgctgcatggttcgaacgtcatccatcgtgatttaaagccctccaaccttctcataaactccaactgtgacttgaaagtatgtgatttcggtttagcaagaatcattgacgagtcagccgcggacaattcagagcccacaggtcagcaaagcggcatgaccgagtatgtggccacacgttggtacagggcgccagaggtgatgttaacctctgccaaatactcaagggccatggacgtgtggtcctgcggatgtattctcgctgaacttttcttaagacggccaatcttccctggcagagattatcgccatcaactactactgatattcggtatcatcggtacacctcactcagataatgatttgcggtgtatagagtcacccagggctagagagtacataaagtcgcttcccatgtaccctgccgcgccactggagaagatgttccctcgagtcaacccgaaaggcatagatcttttacagcgtatgcttgtttttgaccctgcgaagaggattactgctaaggaggcactggagcatccgtatttgcaaacataccacgatccaaacgacgaacctgaaggcgaacccatcccacccagcttcttcgagtttgatcactacaaggaggcactaacgacgaaagacctcaagaaactcatttggaacgaaatatttagttagccatcattatcattaaaatatcaacccgaagaacaatgtatacatatacatatacgtacacatatacatatgtacatatgacatacgtattagccgctgaggacgcggacgtataaaaggacaatactta

SEQ ID NO: 243 - DNA, 1961 bp, Saccharomyces cerevisiae
catcgaacgtaatatggtacttctattgtgctatattttggcagaaggtttgcagtaatcgcagcctggagaagacaatgcgtattagtagcagtaaagggccacagatagggtgatttgaagttgattctgcttttgtcagtgaaggaaaagaaaaaatggcgaaaaaaaactcacaattgccctctactagtgagcagatcttggaaaggtccacaacaggagctaccttcctcatgatgggccaacttttcaccaaactggtaacgttcatactaaataatttgttgatcaggtttctgtcgcccagaattttcggtatcacggcctttctagaatttatacagggcacagtgttattttttagcagagatgcgattcgtctgtcgacgttgagaatctcagactccggtaatggaataatcgatgatgacgacgaggaggagtaccaggaaactcattacaagtctaaagttttgcaaaccgcagtcaattttgcttacattccgttttggatcgggtttccactgtccattggtcttatcgcctggcagtacagaaacatcaacgcgtatttcatcactcttccattcttcaggtggtcgatttttcttatctggctgagtatcatcgtggagctgttaagcgagccattcttcatcgtcaaccagtttatgttgaactatgccgcaaggtcaagatttgaaagcatcgcggtgactacaggatgtattgtcaattttatagttgtttatgccgttcagcaatcccgctacccaatgggggttgtcacatcggacattgacaaagaaggcatcgccatattggcatttgccttgggaaagttagcacattcgatcaccctgctagcatgttactactgggactatctcaagaatttcaaaccaaagaaattgttcagtaccaggctaacgaagataaaaacgcgtgaaaataacgaattgaagaaaggctacccaaagagcacatcttattttttccaaaacgacattttacagcacttcaaaaaagtttattttcaactatgttttaagcatttgttgacagagggtgataagttgattatcaattctttatgtactgtggaagaacaaggcatttacgctctattgtcgaactatggatcgctactaacaagattattatttgcgccgatcgaagaatctctgcggttatttttggcccgtttattatcctcgcataaccctaaaaatttaaaactatctattgaagtcctggtgaatttaacaaggttttacatatacttatcgttaatgatcattgtatttgggcctgccaattcatcctttttattgcagttcttgattggctcgaaatggtccactacttccgttttggacactataagagtctactgcttttacatcccatttttatcgcttaatggtatttttgaagcttttttccagagtgtagccactggtgaccaaattttgaaacattcatattttatgatggccttttctggtattttcctgctcaattcctggcttcttattgaaaaactcaaactatcaatcgaaggcttgatattgagtaacatcattaacatggtgttgagaatattgtattgtggagttttcttgaataaatttcatagggaactgtttacagattcctcttttttcttcaattttaaggatttcaaaacagttattattgctggctcaacgatctgtctacttgactggtggtttattgggtacgttaaaaatttacaacaatttgttgttaacgtattattcgcaatgggattgttagcgttaattttggtcaaggagcgccaaaccatacaatcttttattaacaagagggcggtttccaattctaaagatgtataaacaaaaattcttatataacttaggcgacacataatatgcgcttaaataacatatagtgagtatattatcaaaaagcat

SEQ ID NO: 244 - DNA, 2255 bp, Saccharomyces cerevisiae
ctgagttcttccaaagacgtcaaatcacctactatagttaaaaacatattacttatactagttctaacacttccttttatctacactgtaatccgaagaatacactataaggatggctagaagaaagaatttcaaaaaagggaacaagaagacttttggtgctcgtgatgactcgagagctcaaaaaaactggtctgaactggtaaaggaaaatgaaaaatgggaaaaatactataagactttagctcttttcccagaagatcaatgggaagaatttaaaaagacatgtcaagctccacttcctctaacttttagaattacaggttctagaaagcatgccggtgaggtcctgaatttgtttaaagaaagacatctaccaaacttgactaatgttgagtttgaaggtgagaagattaaggcccctgtagaattaccttggtatccagaccatcttgcttggcaattggacgttcctaagacggttattagaaagaatgaacaattcgcaaaaactcagagatttttagttgttgaaaatgccgttggtaatatctcaagacaagaagccgtttcaatgattcctccaatcgttctagaagtaaaacctcatcacactgttttagatatgtgtgctgctcctggctccaaaactgctcaattaatcgaagccttgcacaaggatacagatgaaccatctggtttcgttgtagctaatgatgccgatgccagaagatctcatatgttggttcaccaattgaagagattgaacagtgccaacttgatggttgtcaaccatgacgcccaattcttcccacgtatcagattacatggcaactcaaataacaagaatgatgttttaaaatttgacagaatcctgtgtgacgttccatgttctggtgatggtaccatgaggaaaaatgttaatgtttggaaagactggaacacacaagcaggtcttggtttgcatgctgttcagctgaatatattaaacaggggtttgcatcttctaaagaacaacggtagattggtttactcaacctgttctttaaatcctattgaaaatgaagcggttgttgccgaagcgttaagaaagtggggtgacaagattagattagttaactgtgatgataagcttcctggcctaataagatccaagggtgtatccaaatggcctgtctatgacagaaatttgactgagaaaaccaaaggagacgaaggtacactagatagtttcttttcaccatctgaagaagaggcatcgaaattcaatttacaaaattgtatgagggtttatcctcaccaacaaaacacaggcggatttttcattactgttttcgaaaaagtcgaagatagcactgaggcggctacagagaaactatcttctgaaaccccagctctagagtctgaaggacctcaaacaaagaaaataaaggtagaagaagtccaaaagaaagaaagactaccacgtgacgcgaacgaagagccttttgttttcgttgatccacagcacgaagctttaaaagtttgttgggatttctacggcatcgataatattttcgacagaaacacttgtttagtgcgtaacgccactggtgaaccaacaagagtggtttacactgtgtgtccagcattgaaggatgttattcaagcgaatgacgataggttgaagattatttattctggtgtaaaattgtttgtctctcaaagaagtgatatcgaatgttcatggagaatccaaagtgaatcattgccaataatgaaacaccatatgaaatctaatagaattgttgaagctaatttagagatgttaaaacacttgttaatcgaatctttccctaactttgacgacattcgttcgaagaacatcgataatgattttgttgaaaagatgacaaaattaagctctggttgcgcctttattgatgtgtcaagaaatgaccctgccaaagaaaacttattcttgcctgtgtggaaaggcaacaagtgtatcaatttgatggtttgtaaagaagatactcatgagctattatataggatctttggtattgatgcgaatgccaaggctactccaagcgctgaagaaaaagaaaaagaaaaagaaacgactgaatctcccgcagaaactactaccggaacctctactgaagctcctagcgctgctaattgatagttatcatgtttcttatcccctccactgtaaagtaaatgtatattattaaaaggcaaaaataagaatataatacttcagtaatgag

SEQ ID NO: 245 - DNA, 637 bp, Saccharomyces cerevisiae
aatgtcatgaaatgcagatcaacactccaataaaaaagtaaatgtttttaaagaagtatatcacgctacaaaaattcataagcactatatttcgaacgttaacctaaatctctcccactaagaaaatggatagaaatgtatatgaagcctgcagcaatataattaaggaatttggaacacatgtagtgagcgccgatgaagtactcgcagaaaaaatagataatgctgttcctataccgttcaaaacaagggaggagatagatgccgacgtggaaaaagatagaaacgaaggagttttcgaaggtaatatcattcctgatatcgacctacgtgtagtacactactacgccacgcagttgtgtctaaataagtatcctcatttgattaacgcctttgatgagacaagccttataacattgggtttactcatcgaaaagtgggtaaaagactatctaaccagcatccagacagaacagggaaggcaaagtaaggtaatcgggaaggggccatgcgaattcatatcaaaacatattgattataggcatgcgccaggtaatatctgaatgtagcaaaaacctggcttttgcggctggggaggatggaaggcttttgtaggctattatctactcgaggaagg

SEQ ID NO: 246 - DNA, 481 bp, Saccharomyces cerevisiae
agaattcaataaaagaatacaatactttcgaacacatatctcacgctgataacaccctagcaagtatgcttttcttctcctttttcaagactttagttgaccaagaagtggtcgtagagttaaaaaacgacattgaaataaaaggtacactacaatcagttgaccaatttttgaatctgaaactagacaacatatcatgcacagatgaaaaaaaatatccacacttgggttccgtaaggaatatttttataagaggttcaacagtcaggtacgtttacttgaataagaacatggtagatacgaatttgctacaagacgctaccagaagggaggtaatgactgaaagaaaataagaattatgcagtctatcctcatggcattttttctcattagttttttacacgagtatcattttaggatattgagattatatgtatatgtatatatgtaggccataagatgattcaacggtttgtattaa

SEQ ID NO: 247 - DNA, 684 bp, Saccharomyces cerevisiae
agtcaccaataaattagaggaaaatggctaacttgcgtactcaaaagagacttgccgcttctgttgtcggtgttggtaagagaaaggtttggttagacccaaacgaaacttctgaaattgcccaagccaactctagaaatgccattagaaaattggtcaagaacggaaccatcgtcaagaaggccgttactgtccactctaaatctagaactagagcccatgctcaatccaagagagaaggtcgtcacagtggttacggtaagagaaagggtactagagaagctcgtttaccatcccaagtcgtctggatcagaagattacgtgtcttgagaagattattggccaagtaccgtgacgctggtaagattgacaagcatttgtaccacgttttgtacaaggaatccaagggtaacgccttcaagcacaagagagctttggttgaacacattattcaagctaaggctgatgctcaacgtgaaaaggctttgaacgaagaagctgaagctagaagattgaagaacagagctgctcgtgacagaagagctcaaagagttgctgaaaagagagacgctttgctaaaggaagacgcttaattgattacaaataattagctaagaaattacgtaccttctcattgttctatatatgttttattttctctaaaatgtaccaaatacaataata

SEQ ID NO: 248 - DNA, 1395 bp, Saccharomyces cerevisiae
tatcgcgcgtcccctgtacaacaaagcatcaacttatcgggtaacttagagacagcattagtatatataccagccatgtcacagttcttcgaagctgctactcccgttgcaattcccacaaacaataccaacggcggctccagtgatgccggcagcgccgccactggcggcgcccccgttgttggcaccaccgctcaacccaccatcaatcacaggcttttgctgtcattgaaagaggctgccaagatcattggcactaagggctccaccatctcacgcataagagctgcaaacgccgtcaagatcggtatttctgaaaaggtgcccggttgctctgacaggatcctgtcctgtgctgggaacgtaatcaatgtggccaatgccattggtgatattgttgacgtgcttaacaaacggaatcccgaaaatgaggacgcagctgagggcgaagcggaagagcactactacttccactttttgaaccatattttaccagctccctcaaaggacgagatcagagatctgcagcaactggaggacatcggttatgtgaggctcattgtggccaattcccatatctcatcgattatcgggaaagcaggcgccaccatcaagtccctgatcaataagcacggcgttaagatcgtggcttccaaggacttcttacctgctagcgacgagagaattatcgagatccagggtttcccaggatccatcaccaatgtacttatcgaaattagcgagatcatcttgagtgacgttgacgtcagattcagcacagaaagatcttatttccctcatctgaaaaagtcctccggtgagccaacttccccttctacctcatctaacactaggatcgaattgaagattccagaactgtatgtaggcgccattattggccgtggaatgaacagaattaagaatttgaaaactttcacaaaaaccaatattgtcgtggaaaggaaggatgacgatgataaagacgaaaattttagaaaattcataatcacaagtaaatttcctaagaatgtcaaacttgctgagtccatgcttttgaagaacctgaatactgaaattgagaaacgtgaaaactacaagagaaaattggaagctgccgaaggagatgccactgttgttactgaacgctctgattctgcttctttcttggaagagaaggaagaacctcaagagaatcatgataacaaagaggagcagtcgtagtatatacgtgtgcgtgcgcacgtcccacacagacaaaacaaactatcatcttaacgaataatgttgcatcattactagtttaaactgtatttttattaaagggaaaaaaatgattcaatatgtatatatttattcatgtatatgtattttgaattaaaaaaaaacgttttataa

SEQ ID NO: 249 - DNA, 812 bp, Saccharomyces cerevisiae
gaagttgattacctttcaccagaggtacagaggaatagaattttgcaacatgttcccctatttaacaagaatgaatttatccataaagatgggagggctaactttaaaagaaagttcccccaatgcttttttaaataacaccactattgctaggagattcaagcatgaatatgccccacgtttcaaaatcgtacagaaaaagcaaaaaggtagagtgccagttcgtacaggtggttcaataaagggatccactttgcaatttggtaagtacggattacgactgaaaagcgaaggtattaggatatccgcgcaacagctgaaggaagcagataacgcaattatgagatatgtcaggcctttaaacaatggtcatttgtggaggcgtttgtgtacaaacgttgctgtatgtatcaagggtaacgaaacaagaatgggtaaaggtaaaggtgggtttgaccactggatggtgagggtacccacagggaagatccttttcgaaataaatggtgatgatttgcatgaaaaagtcgcacgggaagccttcagaaaagcaggcaccaagttacctggggtatatgaatttgtatccttggattctctggttagagttggattacatagtttcaaaaatcctaaagacgacccagtgaagaatttttacgatgaaaatgcaaagaagccatcaaagaagtatttgaatattttaaagtctcaagaaccacagtacaaactcttcagaggacgttgaacggattgaacacaccatgtatacatgtatataactattgaaaaatatcgatattcacaatcaa

SEQ ID NO: 250 - DNA, 816 bp, Saccharomyces cerevisiae
agagagtagccaagactattgaactataaagttaaacaaaatatggccactattgcatcagaatactcttcggaggcgtcaaatacacccattgaacatcaattcaatccttacggtgataatggtggtacaatcctgggcattgcaggtgaagatttcgcagtgttagcaggcgatacaagaaatatcaccgattactcaattaattctcgttatgaacccaaggtttttgattgtggtgataacatagtcatgtcggcgaatggatttgcagcagacggcgacgctttagtaaaaagattcaaaaatagtgtaaaatggtaccatttcgaccacaacgacaaaaaactatctataaactctgcagcaaggaacattcaacatcttctgtacgggaagaggtttttcccttactacgttcatacgatcattgcgggtcttgacgaagatggtaagggcgctgtctattcgttcgacccagttggctcctacgaaagagaacagtgtagagcaggtggtgctgcggcatcattgatcatgccatttttggacaatcaggttaatttcaaaaatcaatatgagccaggtacaaacggtaaagtcaaaaagcctttgaaatacttgtccgtggaagaagtcatcaaactggtgagagactcgttcacttctgctacagaaagacatatacaagtgggtgatgggctggaaatccttattgtcaccaaggatggtgtaaggaaagaattttatgagctaaaaagagattaatgcatacatatcatagtataaaaagaaatagaccaatatcaacatcaa

SEQ ID NO: 251 - DNA, 1017 bp, Saccharomyces cerevisiae
agcagtttatctgaactaacttctgtacgactcgagaatatagtaagaacaccatcattaacctgaaagttaaaaatgtcagaccctgtagagttattgaaaagagctgagaagaagggtgttccttcatcgggtttcatgaaattgtttagcggttctgattcatacaagtttgaggaggctgctgatctttgtgtccaagcagccaccatttaccgtctaagaaaagagttaaacttggcaggagactcgtttttgaaagctgctgactatcagaaaaaggctggtaatgaagacgaagcaggaaatacctacgtagaggcttataaatgctttaaaagcggtggaaactctgtgaacgccgtggattcattagaaaatgctattcaaatttttactcatagggggcagttccggagaggtgctaatttcaagtttgagcttggagaaattctagaaaatgatttgcatgactatgcaaaagctatagattgctatgagctcgctggtgagtggtatgcccaagaccagtcggtagcattatcgaataagtgttttatcaaatgcgcagatctaaaggctcttgacggtcaatatattgaagcaagtgatatatattcgaagttgatcaagagcagcatgggcaatagattgagccaatggagtttgaaggattacttcctaaaaaaagggctttgtcagctagctgctactgatgcagtcgctgctgcaagaactttacaagagggtcaaagtgaagatccgaattttgcggattcaagggagtcaaatttcttgaaaagtttaatcgatgctgttaatgaaggtgatagcgagcagctaagcgaacactgtaaggagtttgacaattttatgagactagataaatggaaaattaccattttgaataaaattaaggagtccatccagcaacaagaagatgatttgttatgaacggcatatacttacgcgcacatacatatatacatatatattataaatgtaacacttgtttta

SEQ ID NO: 252 - DNA, 1874 bp, Saccharomyces cerevisiae
tccactgcttgagtcattaaaactactcactcaagaaggcatatacacgacagtgggtagagaaaagaatatatcactgttcttattgaagttccctcgcgatgacgttgccgaaactcagtagcgtttctgtttcatcaggacatgttagtgccaactcacatggtttctcaatactaagcaaacaccctcacccaaataatcttgtccattcccactcactttctcacacaaatgcgaagagccacctgcctatcagtagcactagcactaaagagaacagcacgaacaaggaggaggcggaatcactcaaaaaaaacaacccctcttcttgggaccctagtgatgatatcaagctccgccacctgaaagagatcaagaacttgggctggaaggagattgcacatcatttcccaaatagaactcctaacgcttgtcaattcagatggaggagactgaaatcaggcaacttaaagtctaacaagaccgcagttattgacatcaataagctattcggcgtgtatgcgactggtgatgctaccccatccgcgggtactccgtctgcggaagaagccgtaaaagaggaagctgttgaggatgaagatattactgcaggttctagtgctatcgaggattctccaccggatttcaagccattagttaagcctaaatacatggacagaaaactgataactcaaagatctacatcaacattttcggaccatgagccacaacacacgaaaccaaggaaactgtttgttaagccaaggtccttctctcattctataacaaccaacacgcctaatgtaaagactgctcagcagacaaatctaagcctttataacactacttcagcaaagacaaataaagctgttaattccaatgattatgagaatattggtcttgtgcctaaaattattatcaggtctagaaggaactcctttattccttcaactcaaatccctcattcaacgacgaagactaggaaaaactcgcattccgtaatttcttctagaagatcatcttttaacatgatgcattcaagaagatcatccttcaactctcacgctcctacggagcctatttctagaagagcttccttggtagttagcccgtatatgtcacccagaaggttatctacatcgcaatccgttcattatcatccacagcaccaatactatcttaaccccatagcgtctcccaactgcaagacagaccacgcaaatgacaaaatcacgcacacgaggactttcttagatatgcaaaaattcgctaataaacacccgtggtctagagaagatgatgaagtgctacttaacaatacgaaggacaaacaaaaccatttgtcgccgctagaaatttctattgttctgcctaataatagatccgagttggaaatccaacaaagaatggattatttaaagagaaaaggacgtgtaagtggttttcatacaaatgaaggatgcaaagacgaggaggaggaggatgacattgacccactgcacaaggagaatggcattaacacgccatcgcagcaatcgcaaaattacggtatgttagaggctaaacatgataatccaaagtctagtgagctttcttctatgaccagcgcaaatgacatacgcaatgagcaagatgaacttccaggtataaattctatctttaaaaatatattttaagctaagagacgaatttagtttgttttgactattcgtttaatgagtacaaattaatcgcacccacacatgtacacacacacatatatatctttatatatacacataaaatttattcgtaggagaattctgtaatactattgactacaagggttcttattgctattaataatgttacatgtatatgcttatatccaa

SEQ ID NO: 253 - DNA, 1882 bp, Saccharomyces cerevisiae
tattcattttactttttgaagtttctattataggcagacgaagaaggccaagaagacaaatcgaagaaagagagagataacatgggtcaaatattgtccaatccaattatcgacaaagagcatcattctggtacggactgtttgacagcgtttggactatgtgccatgcaaggctggcgtatgtccatggaagatgcccatattgttgagccgaaccttttggctgagtctgacgaggaacatctcgcattttatggtatatttgacggtcatggtggttcttctgtagcggagttttgtggctctaaaatgatatctatactgaaaaaacaggagagcttcaagagcggtatgttagagcagtgcttaatagatacctttttagctacagatgttgagttgttgaaagatgaaaaattaaaagatgaccatagtggttgtacagcaactgtgatattggtatctcaattgaaaaagctactaatttgcgccaattccggtgatagtagaacagttctatctactggtggtaatagtaaagcaatgtcatttgatcataagcccacattgttaagtgaaaaatctcgtattgtagctgctgatggttttgttgagatggaccgtgttaatggaaatttagcgttatcaagagccataggtgattttgaattcaaatctaacacaaaattgggacctcatgagcaagtcgttacatgtgttcctgatatcatttgtcacaatttgaattatgatgaggatgaatttgttattttagcatgtgatggtatttgggattgtttaacttctcaagagtgtgttgacttggttcactacggtataagtcaaggtaatatgacgttgagcgacatttcatctagaatcgtagatgtttgttgttcacccacaactgaaggctcaggaattggctgtgataatatgagtatttccattgttgctttactaaaggaaaatgaatctgagtcacaatggtttgagcgtatgagatcaaaaaattacaatatccaaacgtcttttgtccaaagaaggaaaagtatttttgatttccatgatttttcggatgatgataacgaagtgttcgcaataaccaccaaaaaattacaagaccgcttgaatcgtagtaaagataatgacgacatggaaattgatgatcttgataccgaattggacagcagtgctactccctcaaagttatcaggtgaggatagaactggccctattgacttgttttcgttggaggctctattagaagccgggattcaaataaggcagaggcccagctccgacagtgacggcaacacttcttatttccatggtgcttctttatcagatatgttggcatctttaagcaatgcggctgcaggagaaacagaacctaatgatgctgatgataacgatgataacgacggcgaagaaaacggcaagaatgaaaatgcgaagaagggttccaagattgaagaaattgaataataaatattgtcgaaccgtactttgcaacgaaagagtagtcaaactttgttatctttatttgttattcctcttctgccgatggattgttttttactggatcatctttgcggcccatattgaggagatggtgaaattcataaaaatcattacgagagaatgataaattgtaacagaatttataaatcctattcatatagatacatctgtttttccttactctgtttttattttgttggtaacctttgaatcctttttgatgaaaaaaatagaaaaaaaaaaaaaaaaaaaatgaaagcaatatcgactgtatgtatatgcgcaccataattttcctattaatagtttaagcataattagtgtacttactaaaaataatgtaactttgctctttgca

SEQ ID NO: 254 - DNA, 1419 bp, Saccharomyces cerevisiae
tagcacaacaattaactcattatttaggtatggcggaaatacctgatgaaaccatccagcagttcatggcattgaccaatgtgtcgcataacatagccgttcaatatctctctgaatttggagatttaaatgaagcactaaattcctattatgcttctcaaacggatgaccaaaaggatagaagagaggaagcacattggaacagacagcaggagaaggccctcaagcaagaagccttctccaccaactcttcgaataaagccataaatacggagcacgttggtgggttatgtccaaaaccaggatcctcacaaggtagcaacgagtacttgaaaaggaaaggttctacctctcctgaaccaaccaagggtagtagccgctctggaagtggtaacaactccaggtttatgagcttttcggatatggtaagaggtcaagctgatgatgacgatgaagatcaaccgagaaatacttttgctggtggtgaaacatccggcttagaggttacagatccttcagatcctaattcattactgaaggatttgctggaaaaagcgagaaggggtggtcaaatgggcgctgaaaacggattccgtgatgacgaagaccatgaaatgggtgccaataggtttactggaagaggttttagattagggtcaaccatcgacgcagcagatgaagtcgtagaagacaacacttcacaatcacaacgtagaccagaaaaagtcacaagagaaattacattttggaaggaaggttttcaagtggccgatggtccgctttatcgctatgatgatcctgcgaacagtttctatttgagcgagttaaatcaagggagggctccattaaagctcttagatgtgcaatttggacaagaagttgaagttaatgtatataaaaaattagatgagtcttataaagctccgacgagaaaactgggcggtttttcaggccagggccaaagactaggatctcctatcccgggtgaatcgtcacctgcggaggttccaaagaatgagacacccgctgctcaggaacaacccatgccggacaatgagccaaaacaaggcgacacctccatccaaattagatacgcaaatggcaaaagagaagttttgcactgcaattccacagatacagtaaagtttttgtatgagcatgtgacatcaaatgcgaacactgacccatcgaggaatttcaccttgaattatgcctttcctatcaaaccaataagcaacgatgagacaacattgaaggacgctgatctgctgaactccgttgtcgtgcaaagatgggcatgagcataaatatacaaaaacagaaacgggaaaagacttcaacttaatatataaatgcacgtatatctatacccgtagtatatatcatttgtacctcaatacaatttcaaatcacctgtta

SEQ ID NO: 255 - DNA, 1122 bp, Saccharomyces cerevisiae
tacataatgcacatagactctcagcttcaactccacaaggcttctccagcaaaaatgaattcagagtctcgagaagatatggctataaatagtatcaaattgctagcgggaaactcccatcctgatttggctgaacaaatatcgaaaaagttaggtattccactttccaaagttggtgtgtaccagtattctaataaagaaacctctgtcaccataggtgagagccttcgcgacgaagatgtgtatattatccaaactggaataggtgaacaagaaattaatgatttcttgatggaattattaattttaattcatgcttgccaaattgcatctgcaagaaagatcactactgtaatacccaattttccatatgcaagacaagacaagaaagataaatcccgggcgcccattaccgcaaagttggttgccaatttattgcaaactgctggtgctgatcatgtcatcacaatggatctccatgcctcccaaattcaagggtttttccatatcccggttgacaacctatatgcagaaccaagtgttttaaattatattagagcccggaaaacagatttcgacaatgctattttggtgtcgcctgatgcaggtggtgctaagagagtagctgctttggctgacaagttagatttaaattttgctttgattcacaaagagaggcaaaaagctaacgaggtttcaaaaatggtgcttgttggtgatgttaccaataaatcatgtttattagttgatgatatggcggatacttgtggtacgttggtaaaagcttgtgatacgttgatggagcatggtgccaaagaagttatagctattgttacacacggtattttctccggttcagcaagagaaaagctaagaaatagtagattgtctagaattgtttgcacaaataccgttccggtagatttggatttacctattgctgaccagatcgatattagtcccacgttcgctgaagctataagaagactacacaatggtgaatccgtgtcatatttgttcacccatgctccagtataggacaattttttattcttagattcctgattgcttgcatgcctaaatacttcataattgtattagtttaaaagaaaaccttttact

SEQ ID NO: 256 - DNA, 1429 bp, Saccharomyces cerevisiae
cgagcattccggaagctacaaatacgacattgcataccaagaggcaaacgttgaacaatggctaaagatattttgaagaaccaggaccctaaattgcaagcgatgatcgttgaacactcggcgcctgctcccaaagagatacctatggacgctcctgttttgaaaagagtcgctagacctttaagacatgtaaagttcattccaattaaatcgctgatattccatactaaaacagggcccatggatttttcttatgaaaagaagatcaagacgcctattcctaagaacaaaattgtagttcgagtaagtaatgtgggtttgaaccctgtagatatgaaaatcaggaacggctacacatcgtcgatttacggtgagatcggcttggggagagagtacagtggtgttatcactgaggtaggcgagaacctaaactacgcctggcacgtgggtgatgaagtatacggtatatactaccaccctcatttggccgtgggatgtttgcaaagttcaatcttagtagatccaaaggtggacccaatccttttgagaccagaatcggttagcgccgaagaagctgcaggctccttattctgcctggccaccggctataatattctgaataaattatccaagaacaagtatttgaagcaagattcaaacgttttgattaatggtggaacttcgtcagtggggatgtttgtcatacaattattgaagcgtcattacaagttacagaaaaaactagtgattgtaacgtctgcaaatgggccccaagttttacaggagaaatttcctgatctggctgatgaaatgattttcatcgattacttaacgtgtaggggtaaatctagtaaaccactaagaaaaatgctcgaagaaaagaaaatttctcagtatgatccggtcgaggataaggaaactatacttaactataatgaggggaagttcgatgttgtactcgattttgtcggtggttacgatattttgagtcattctagttcattgattcacggcggtggtgcgtacgtaaccactgtaggtgattacgttgccaattataaagaagacattttcgattcatgggataacccaagtgccaatgcaagaaaaatgttcgggtctattatctggtcatataactacacacattactattttgatccgaatgcaaagacggcttccgccaataatgattggattgagcaatgtggcgactttttgaagaacggtactgtaaaatgtgtcgtcgacaaagtttatgactggaaagaccataaagaagcattttcttatatggccactcaacgtgcccaaggaaagttaatcatgaacgtcgaaaaattctagatacccacttacatttacaatatgttttatttttaaacttaatgaacttcataatttaatgcttaatattttccccctccca

SEQ ID NO: 257 - DNA, 533 bp, Saccharomyces cerevisiae
taagcacatcatttgtacaatacattaccagctgaaatgtcaacatatgacgaaatcgaaatcgaagatatgacgtttgagcctgaaaatcaaatgttcacctatccttgtccctgtggagataggtttcaaatatatctggatgacatgtttgagggcgaaaaagttgctgtttgtcccagctgctcactgatgatcgatgtagttttcgataaagaagacttggctgagtactacgaagaggcaggcatccacccccctgagcctattgccgctgctgcctaaagatgagaggctagatcgagaatacaaatagaaataaagaaagagctatatgacttagcaacgcaagcagaaaagaaggtttgcttcttcgctggactccggttggaattactattcaaaattccaagtgcactgatggaaaacgttttgctcaggttgagctcttttactgcatataaggatactgggtaggtgtatatgattattttatacatgatacgtaggctaaaatgatttggacccattaa

SEQ ID NO: 258 - DNA, 4816 bp, Saccharomyces cerevisiae
tattacttctctttctagcggttgttcatgtttcaaagttttttccacaacaatgggcccgctgctgccggtgaaacgttttcagatagcagatcgtaccctttaacgaatcatcaagaagtacccaggaatggactgaatgagttggcctcatctgcaaccaaggcgcaacaacaacctacacacatattaaactcatatccaattaccgggtccaacccactcatgagggcaagcgcaatgggggcgacctctggcagcatcaatcctaatatgtccaacatgaatgagcacattcgtgtttccgggatggggacttctaagcccctggacttagcgggaaagtacattgaccatctacaacataaagatagtaacactcccgtactcgacgaacgatcttattataacagcggggtagattataacttcagcagagaaaaaaacggcttaggagcgtttactccatttgaaaagcaagatgtgttcaacattccggacgagattttgcatgaattttccacttcacagacaaaaactgatatgggtattttcccggagttaaatcgatgttggataactattgataataaactgatactctggaatattaacaatgacaatgagtatcaggtggtagatgatatgaagcataccattcaaaaagtcgccttggtaagacctaagccaaacacctttgtgcctgccgtgaagcatctacttttgataagcacgacaatggagcttttcatgtttgctatttccttagacaaagccaccaacgaactcagtgtattcaatacacatctatcagtccctgtacaaggcattgatgtaatagacattgtgtctcatgaaagatcgggtagaattttcttcgcaggccaagccagtggcctgaatatctgggagttgcactactcaggttccgatgactggttcaatagtaaatgtagtaaggtctgtctgacaaagtctgccctattaagtcttctacctactaacatgttatcgcagattccaggtgttgattttattcaggctttgttcgaagataattctaacggtaatggcggattttctcaagagaccatcacgcaactaactattgaccaacaaagaggaatcatctattcattatcctccaaatccaccattagagcatacgtaataacagaaaaatcactggaaggacccatgtcaattgagcctgcctacatcagtaggatcataggtaccacgacggcaagggcagcaccgattttgggccccaaatacctaaaaattgtcaagataagctctgttgcaccagaagaaaacaacaatttgtttttagttgctttaacagtaggtggtgtgcgtttgtactttaatggttccatgggcagatttaacatcgaagctttgaggttagaatcgatcaagttcccccctagttctgtaactcctgaagtcatccaacaagaattactacatcaacaacaggaacaggcgaagagaagctttcctttcttttcaaatctaatgtcttccgaaccagtcctcttaaaattccaaaagaaatcatctgtattactagagactacaaaagcaagtacaattatttccccaggcatatttttttccgctgtgatcaagtcatctcagcaaactcatcaacaagaaaaaaaagagaactcatctgttactggaacgaccgctaccgcagggtctaaaactgtcaaacaacagccagttactttacaacataagcttttcgttagtgttccagattatggtatcttgaaaacacacggtaagtacgttgaaaatgccacgtttttggaaactgcgggcccagttcaacaaattattcccttatcggggttgtttaatgcaacgacaaagccacaaggatttgctaacgaatttgcgacacagtacacatcagaaactttaagggtagcagttttgacgagcacttctatcgaaatttataaatatcgtactcctgatgaaatttttgaggatctaatcgataatccgctgccattcgtcttaaattatggtgccgcggaagcttgttccactgcattgtttgttacttgcaaatcaaataaatctgaaaaattaagatctaatgccctgacttttttaactatgggtattcctggcgttgttgacatcaaacctgtctacaaccgttattctgtatctacagtatcctctttattgtcaaagcccactttatcaaccgcaacaactaatctccaacaatcaataactggctttagtaaaccctcccctgcaaacaaggaagattttgacttagatgacgtaatattatcccccagattttacggtattgcattattgattaccagactacttcgagatatttgggggagacatgtcttcatgacttttacagataatagggtgacatcccatgctttcatttcttcttctgatccaatcactccatctattaataacctaaaaagtgatgaaatttcacaaaataggaacataatatcaaaggtttctatttccaaggattgtatcgagtactatctatcttcaattaacattttaaatgaatttttcatcacttatggtgattcaatttcccaaatatcagctccctacgtattagcgaacaattctaacggcagggttattgataaaacagaagaagttgcaaaccaagcggaaagtatagcgattaatgcgatgatcaaaatggtacagtccataaaggaaggtctatcattcttgaacgttttatacgaggaaagcgaagtcgaaggattcgacaaccaataccttggtttcaaggatataatcagttttgtaagcttggacgtccaaaaagatttagtcaaactagattttaaagatttatttgctccaaatgacaaaacaaaatcattaattagagaaattttattatccatcatcaataggaatatcaccaaaggtgcgtcgatagagtataccgcaacagctttacaagaacgctgtggatcattctgctctgcaagtgatatattaggatttagagccattgaacatcttagaagggctaaagaaattggcttgcgtaactatgattctctaaactatcacctgaaaaatgctactgctttacttgaacaaattgtggatgatctttctatcgagaaattgaaagaagctgtatcaatgatgctgagtgtaaattattacccaaaatctattgaattcttattgaatattgccaactctatggacaaaggcaaactagcttgtcaatatgtggcaaatggatttttagaaaatgatgataggaaacaatattacgacaaacgtatcttagtttatgacctagtttttgatactttaataaaagtagacgaacttgccgaaaaaaaacagtcatcaaaaactcaaaaccaaatttcgatatcgaatgacgatgaagtgaaactgagacaaaaaagttatgaagccgccctaaaatataacgatagattattccactatcatatgtatgattggcttgtgtctcagaacagagaggaaaaactattagatattgaaactccattcatactcccttatttaatggaaaaggcaggtagttcattgaagatatctaatatactctgggtctattattcaagaagatctaaatttttcgaatctgctgaaattctttaccgtttagctacatcgaattttgacatcacattgtttgaaagaattgagtttctttcacgcgccaatggtttttgcaacagtgtgtcaccattaagccagaaacaaagaattgtacaattagctagtaggatccaagatgcatgtgaagttgctggtattcaaggtgatatattgtcgctcgtgtatacagacgcaagaatagattcagccattaaagatgagctgatcaaaactctagatggtaaaatattgagcacaagtgagctgtttaatgattttgctgtacccttaagttaccatgaaattgccctattcattttcaagatagcagattttagggaccatgaagtaattatggccaagtgggatgagctattccaatctttgaggatggaatttaataataccggaaagaaagaagattcaatgaacttcatcaacttactgtctaatgtactgattaaaattggtaaaaatgttcaggattctgaattcattttccccattttcgaactctttcccattgtctgtaattttttctacgaaacactacctaaggaacatattgtatcagggtcgatagtttctatattcataacagcgggtgtttctttcaacaaaatgtactatattttaaaagaactaatcgagacatcagattccgataattccgtatttaataaagaaatgacctggttaattcacgaatggtacaaatcggacaggaaatttagggacattatttcctacaacgatatcattcacttgaaggaatacaaaattgataatgatccaattgaaaagtacgttaagaacagcggcaataatttggggatttgtttctacaaagaataaaaattcatgttcgacatatagatagcagggtaatgtacgtgtatattttaatgtaataaagaggccttactagacggtaaagttaagaatatcgagtgaacttttccttaagataaaggtaaatatagtcgagtatttatttattattcttttccactatacagtatttaaaattctgtaagaaattgattctacatacataagacaaacgaacaggtcagagagaatcagatttttggttagcaagaatacattttggagaagaaagacattaactcca

SEQ ID NO: 259 - DNA, 1475 bp, Saccharomyces cerevisiae
gaacagcaagataaagtggaaacgaaaagtaagcagcttcctcaatatgccgtcaaacgtacgttcgggagtcttaactttgctccatacagcatgtggagcaggcgtacttgcaatgccgtttgcattcaagccatttgggttaatgcctggtctgataacgctaacattttgcggaatatgttccttatgtgggctgctattacagactcgaatagcgaagtacgtacctaaatctgagaacgcctcgtttgctaaactcacccaactaatcaatccgtcaataagtgtagtgttcgattttgccattgctgttaaatgttttggcgttggtgtatcttacttaattattgttggtgacttagtgccacagatagtgcagtcaattttttatcgtaacgatgataacatgagtggttcgcaagagcatcacatgttcttagacaggcgtttgtatataactctgatcatagtgtttgttatctcccctttatgctttaaaagaagtttgaattctctacgatatgcttctatgattgccattgttagtgtcgcatatttatctggtttgattatttaccattttgtaaatcggcatcagctagagagagggcaagtatattttatggtacctcacggagattctcagtctcattctcccctgactacattgccaatttttgtgtttgcttacacttgtcaccacaatatgttcagtgtaattaatgagcaagtggataagagcttcaaggtaatcaggaggattccgatttttgccatcgtgttggcctattttttatacatcataattggtggtacaggttatatgacatttggtgagaatattgtaggaaatatcctcactttatacccgaattccatctccaccaccatcgggaggttagcaatgctgctattagttatgttagcatttccattgcaatgccatccttgcagatcatcggtaaaaaacataattatattcattgaaaatttcagaaaaggtaagttatacgataacagagctagctttattccattagacaactttaatagtgaagatccgcaggaggcgccaacccaacaaaacaacgaagagccaaatctgcgtagtgagtctttacggcatatcaatattatcaccctttgtatcttactgttctcatatctactggctatttcaattacgtctctagcaaaagtcctagcaatagttggtgccacgggatctacgtcgatttctttcattttgccaggcctttttggttataaattaattggctcagaatttacgggcacgaatgaaagagtaccgacaagcataaaaatattcaaatacttaagtttatctctattcatctgggggatagcagtaatggtagcttcactatcagcgattgtatttttgggcacatcatcacattgagtttgtacattacttttcgtatttctataaacaaaaaaaagaagtataa

SEQ ID NO: 260 - DNA, 797 bp, Saccharomyces cerevisiae
agtatgtgacatatagaatgctagaatgaatagcctagactgcattgttatgagagcaacgtttgatatttgtggcgattggaacaaacatagtacatgccaaaatgagatgaaatgtccaatttgaactgattaacatacacgcgcaagctcgtatttgtttactggtacacctagagttagccgatcaaagagacagtggcagatatatgggaaaattttctccggaagattgcatgcgagagtctcataaccagtcatttcccaagatacaattctcggagctgttatactaacaaacttttaattttcatttttttttttttttgattagatggcctccttacctcacccaaagattgtcaagaagcacaccaagaagttcaagcgtcatcactctgaccgttaccacagagttgctgaaaactggagaaagcaaaagggtattgactctgttgttagaagaagattcagaggtaacatctctcaaccaaagatcggttacggttctaacaagaagaccaagtttttgtcaccatctggtcacaagactttcttagtcgctaacgttaaggatttggaaaccttgaccatgcacaccaagacttacgccgctgaaattgctcacaacatctccgctaagaacagagttgtcattttggctagagctaaggctttgggtatcaaggtcaccaacccaaagggtcgtttggctttggaagcttaaattaaataaagatttacaaaataataaccttcatttaattttaaatttcaataaaaaaatatcaaatcaa

SEQ ID NO: 261 - DNA, 933 bp, Saccharomyces cerevisiae
atgtccagaactattccatttctatttaaattagtcaacagggcagtaattttgcctacggcaggttttacattaggagttggtgcgtttgtaaaggcgtggcccgatgatgccggtgttctatcattgaatgatccgcaaacgccagcggagttgattagtgcgaccaagagccgccaacctatggagctgcagagggttgacatcctcgctcaaatcgagaaaagcgaggtttacaacaagttggcccaggatgagaagatgcaccatgtcttattcagtgagaaaataccaagcgggcatagggaatatcatgtaggacaaggcctcttgttcggcaaggggaagcttgaaattgatcctttggtgttccatgatgtgaatcacggtgaattaaccgtgatttatcacttaggtgctgagttagggaatcgagacggtaacgtccataagggcttgttgtcattgttgctggatgaagcattgtgctattgtggcttccctttgttgcctagtaaaagaggtgtaactgcaaggctgtcgctagagttttttgaggacattcctgtagatactacgattatactaaaagcaaacgtcaaagagattaaaggcagaaagtgtatcattgagggacacttggaacagtttccgttggaagtttcttctcgaaatggaactagaagttggaacttaccacatatttggggtttcaaccataagcaggagatggcaaaaaaatttgccaaggccaattgtattctcgttgagcctacttggttcaaatattttaaatggcttgatatgttttgaaaaagcatgcctgtctcaaaatagcctattccgtgttaattaatattctatattcaaaaaagttaaacatatatactgcatgtacttaccgccgaagcacaaacgtgccacttccatgaa

SEQ ID NO: 262 - DNA, 1529 bp, Saccharomyces cerevisiae
ttaatctgtttaacttgaaaatatgtctgaatcagtggccattataggtgcaggattagtaggctgccttgcagctttggcattctccaaagaaggctacaatgtcacactatatgattttagacaagatcctcgattggacaccaccaaaaataaaaatttgaaatccattaatttggctatttctgctcgtggcattgatgctctgaaatcaatagatccggatgcttgtgaacatattctgcaagatatgattcccatgaaaggcaggatgattcatgacttgaaaggcagacaggaatcacaattgtatggcttgcatggagaagctattaattctatcaatagatctgtattaaataatagccttttggacgaattagaaaaatctacaacagaactgaagttcggtcacaaattagtcaaaatcgaatggacagatgataaacaaatctgtcattttgccattggggaagatttgaaaaccccacatactgaaaagtatgattttgtcataggttgtgacggagcatactctgcgacgagatcgcaaatgcaacgtaaagttgagatggatttttcacaagaatatatgaatttacgttacattgaactttacatcccgcctactgaggaattcaagccaaactatggcggaaattttgcaatagctcctgaccatttgcacatttggcctcgtcataaattcatgttaattgcgctcgccaacagtgacggctcgttcacttcaacctttttcggttctaaagatcaaatatcagatctgataacttccaagtcacgtgtgagggaattcttaatcgagaactttcccgatattattaatattatggatttggacgatgctgtcaaaaggtttatcacttatccaaaggaaagtcttgtctgtgtaaactgtaagccatacgatgtaccaggcggaaaggccatcctactcggcgacgctgcccatgcaatggttccattttacggccaaggtatgaattgcggatttgaagatgtgagaattcttatggcgctattgaaaaagcattcaggagatcgttcaagagcctttactgagtacactcaaacaagacataaggacctagtttctattactgagctggcaaaaaggaactataaagaaatgtcacatgacgttacatccaagcggtttttattaaggaaaaagctagatgctctctttagtattataatgaaggataagtggatacctttgtatacaatgatatctttcagatccgatatctcgtattctagagctttagaaagggctggaaagcaaacacgtatcttgaaattcttagaatctctgacactcggtatgttatctattggcggttacaagcttttcaaatttttgacaagagaacgttcctgaagccagtttattcttgccatccgtgtacgctaggagaggattattaaaataagtgatatatacatatatatatatatatatatatatataatacactaattattttatgtgatgttgatcacgc

SEQ ID NO: 263 - DNA, 2203 bp, Saccharomyces cerevisiae
gtagagatattatactgtcatagctctttcaattggtcttattagattgtctccatctttcccattgacgttgttactccctctcttttttcgtttttaactgatttctcatatattcccaaacaggcatatatactcgacgtcaagaaagaaaagaaaagaaaaccctcataaaaaatataatcgagaagtttttttcctcatcgcgaaccattagtataacagattgatcgttcagctctcataactatcgcaagaacagtaacaaaataaataaaaaaaacacgcacatataataatgttggctcgtactgctgctattcgttctctatcgagaactctaattaactctaccaaggccgcaagacctgccgctgctgctttggcttccaccagaagattggcttccaccaaggcacaacccacagaagtttcctccatcttagaggaaagaattaagggtgtgtccgacgaggccaatttgaacgaaactggtagagttcttgcagtcggtgatggtattgctcgtgtttttggtttgaacaacattcaggctgaagaattggtcgagttctcctctggtgttaaaggtatggctttgaacttggagcctggtcaagtcggtatcgttcttttcggttccgatagactggttaaagaaggtgaattggtcaagagaaccggtaatattgttgatgtcccagtcggtccaggccttttgggtagagttgtcgacgctttaggtaaccctattgatggtaaaggtcctattgacgctgccggtcgttcaagagctcaagtcaaagcaccaggtattttgccaagaagatctgtccatgaaccagttcaaaccggtttgaaagccgttgacgccttggtccctatcggtagaggtcaaagagagttgattattggtgatcgtcaaacaggtaagactgctgtcgccttagacaccatcttgaatcaaaagagatggaataacggtagtgacgaatccaagaaactttactgtgtttacgttgccgttggacaaaaaagatctaccgttgctcaattggtccaaactttggaacaacatgacgccatgaagtactctattattgttgcagctactgcatctgaagccgctcctctacaatacttggctccatttactgccgcatccattggtgaatggttcagagataatggaaagcacgctttgatcgtctatgacgatttgtccaagcaagccgtggcataccgtcaattatctttgttgttgagacgtcctcctggtcgtgaagcctaccctggtgatgtcttttacttgcatccaagattgctagaaagagccgctaagctttctgaaaaggaaggttctggttctttaactgctttgcctgttattgaaacccaaggtggtgatgtctccgcttatattccaaccaatgttatttccattaccgatggtcaaatattcttggaagctgaattattctacaagggtatcagacctgccattaacgttggtttgtccgtttctcgtgtcggttccgctgctcaagttaaggctttgaagcaagtcgctggttccttgaaattgtttttggctcaatacagagaagtcgctgcttttgctcaattcggttccgatttagatgcctccaccaagcaaactttggttagaggtgaaagattgactcaattgttgaagcaaaaccaatattctcctttggctacagaagaacaggttccattgatttatgccggtgttaatggtcatttggatggtattgaactatcaagaattggtgaatttgagtcctcctttttgtcctatctaaaatccaatcacaatgagcttttgaccgaaattagagaaaagggtgaattgtctaaagaattgttggcatctctaaagagtgctactgaatcatttgttgccactttttaatgtgaactaaaaaaataaaaatgaatataaggtacgtctccaaaagaaatgtaaatatagaaattttaaaaaaaaaaacgaaaaaaaacataactaaatttaaagtgcagcccaacaataaccctgaaaaatctaaatatcttagaatttttttattttgattattatatattattattattcttatggtaaataatgcccctacttttcttctaaggaagtgagttaccaccaaaataaggaaatatcgcctgcaagcggttttta

SEQ ID NO: 264 - DNA, 887 bp, Saccharomyces cerevisiae
gtagtttagagtaggacttagattacctgtattgtctgcagttgcgttttttttttttgctggtaaaaaaaaagaacaagtgtggagaatatgagcgaggaaccaccttctgaccaggtcaatagtctccgtgactcattgaatcgatggaatcaaacaagacagcagaactcgcagggttttaatgaatctgcgaagacattgttctcaagctgggcggattctctcaataccagggcccaggatatatatcagacgttgcctgtatctagacaggacttggtgcaagaccaggagccgtcgtggttccaattgtcaagaacggaaagaatggtactttttgtctgttttcttttgggtgcaacagcctgtttcactctttgtactttccttttccccgttctagccgctaaaccaagaaagtttggtttactatggacaatggggtccctactatttgttcttgcgtttggggtacttatgggaccactcgcgtacttaaaacatttgactgcaagggaaaggctgcctttttcgatgttctttttcgccacatgcttcatgacgatttatttcgcagccttttccaagaacacggtgctgactattacatgtgctcttcttgaattagttgccgtcatttattatgctatttcatatttcccattcggtgcaacaggtttgaggatgttaagctctgctggtgtcaattcggcaagaggtgttctgcgcatctgaattatcattcatagtgcatattgaattgattagttgaagaagaaaaataatgtttatgttataagaaacaataataaagagatttataacctaacctaattaaatagcatgtagtcaacaaaaagggagtaaaacatgcagtggctcta

SEQ ID NO: 265 - DNA, 1575 bp, Saccharomyces cerevisiae
tccgaattgagtacagtgggacgatgtttcaaaggtctggcgctgctcatcacatcaaattgatttcatctcgaagatgccgctttaaatcctcctttgcagttgctttaaacgctgccagtaagttggtaactcccaagattctttggaataatcccatatcattagtctcgaaggagatgaacacattggccaaaaatatagttgccctcatcgggtctggccatccggtgctaaacaaggttactagttactattttgaaacagaaggcaaaaaagtacgtcccttgttagtgttgttgttgtcaagagcactttctgaaattcccatgacagaaagaaatcacttgaaaattgacaagtcggatgttcctgaggacccaatttactctaaacctagtcaaaatcaactatttcaacgtcctgcaagtagcatatccccactacatattcttcacggtattaaaccactaaatcccttgacaaaaggtcctgagcctttgccagaagaaacttttgacaaacaaagagggattttacccaaacagagaagattagcagagattgtagagatgatacacactgcgtctttacttcatgatgacgttattgatcattctgatacaagaagaggaaggccaagcggaaatgctgcctttaccaacaagatggccgttttggcgggtgattttctcttagggagagcaacagtgtcaatttcaagattacacaaccccgaagtcgtagaactaatgtctaatagtattgcgaatcttgtcgaaggtgagttcatgcaactgaaaaatacttccattgacgcggatatcgataccatcgaaaatggccataagctacttccggttccttctaaaaagcttgaagttaaagagcacgactttcgtgttccaagccgccaacaggggctgcaattatctcatgatcagattatagaaactgcatttgaatactacatacacaagacctatctgaagactgctgctttgatatcaaaatcttgcagatgtgctgctatattatctggggcatcacctgccgttatcgacgaatgctatgatttcggtagaaatctaggtatatgtttccaactcgtagatgatatgcttgattttactgtgtctggaaaagatttagggaagccatccggcgcggatctaaaattaggtattgctactgctccagtcttgtttgcatggaaagaagacccatctttaggtccactaatttcacgcaatttttcagagaggggtgatgttgaaaaaactattgattctgtgagactccataatggtatagcgaagacgaaaatactagcggaggaatatagggacaaggcattacaaaatctacgggattctcttcctgaatctgatgctcgttctgccctagagtttttaactaatagtatactaacaagaagaaagtaaaccttgaaatttcaaataaagggtgaagaataaagagaaaatgaagaaggtcatagtgtcgcattattctatattctatatgtaaatagtttttatatgtttttagtaaaagaagaaatatacaagcatt

SEQ ID NO: 266 - DNA, 823 bp, Saccharomyces cerevisiae
aaataggaaagtataactcgaattaagaataaggaatgggacttatttcatacgaaaatgaggcgataaacgaggtgaaaaaggcagataaccatcacgttagcaaatttgtgactagttactatgggccatcatcgtcgtcatggcagtcaggaatatggattttgtttgtgctgtttgttgccgcagtaatccttataatactgttcacttttgtagcgaacagaaggagacgaaggatggggcgtgctcccattagaggtacggcatggttgacaccgccttcatacagacagtctcagcaacaatatactgggaccgttcagcaacggacagatgattatgttcctgagtatacagaaacagcgaacgaacatgatcttggatactatgaccagcggggcgagtttcaccccaacgataaggctgcatacgtggcccccccgccattggtacaagaatgttcatcagaatctgttaattctttagaaagacctcccgctgctgtagttcaccaagctaactctttagatacggattacggtttaacaaggcctagcaatgggcgcgttccagctgtaagtgatacggtggagcaattggaaaggcttccgggcgggactacaacgcaggaaattaacccaccggagagggcaaaggtaaatgcaaggtcatgaactgaatctttttttccggctgtcctcttacagttgagttacaatattttgccagaaatatttacatttttttacccaatctctataataattattttaattcctaatccgcttcaggcccgcggtcgttgaagtgctatagttta

SEQ ID NO: 267 - DNA, 582 bp, Saccharomyces cerevisiae
acgcaaacaatggccagaacaaagcaaacagcaagaaagtccactggtggtaaggccccaagaaagcaattagcttctaaggctgccagaaaatccgccccatctaccggtggtgttaagaagcctcacagatataagccaggtactgttgctttgagagaaatcagaagattccaaaaatctactgaactgttgatcagaaagttgcctttccaaagattggtcagagaaatcgctcaagatttcaagaccgacttgagatttcaatcttctgccatcggtgccttgcaagaatctgtcgaagcctacttagtctctttatttgaagataccaacttggctgccattcacgccaagcgtgtcactatccaaaagaaggatatcaagttggctagaagattaagaggtgaaagatcatagtttgttgattgtcatcagttttagtaaaaaacgaacaaaaacacaataaaatataaatcaatatatttaggtttactgggttctttaacagttgtataatagttattttttattacaaaaatataggttttaataaaaaaaaatagggttctatttgtttta

SEQ ID NO: 268 - DNA, 633 bp, Saccharomyces cerevisiae
tcactagtaagcttaagatagtcctacacacaaccaccatgtctgctaacgattactacggcggaaccgccggcgagaagagccaatattcccgtccctccaacccgccaccttcatccgctcatcagaacaaaactcaggagcgtggatacccaccccaacaacagcagcagtactaccagcagcagcagcagcatcccggatactataaccaacaaggatacaatcagcaagggtacaatcagcaagggtacaatcagcagggctacaatcagcagggatataaccagcagggatataaccaacaaggccatcaacaaccagtctacgtccaacaacaaccaccccagaggggtaacgaaggttgtctggctgcatgtctggctgcattatgtatatgctgcaccatggatatgctattctaagagaacccgcaaaagtattcaagaatgaaaaaaaaaaaaagaataatctccccttctgttctttgcagttgcctttcttcccctcagtgttattttttttcacaaggagataaaaaaaaaaactttaacatgtcactttaagcatgtatgtaatacgtctattaattatatgtaacttttataactattttcatttctatgtgatcca

SEQ ID NO: 269 - DNA, 769 bp, Saccharomyces cerevisiae
gcgaacttgaagcccagatttctacacgaaaagtttgagtttattagtatcttctccaagataaatatagcatcaagttacaggtatgtcgaacatcacttatgtcaaaggtaacatcttaaaaccaaagtcatatgctaggatcctcatccattcttgcaactgcaatggctcgtggggtggtgggatcgcttatcaacttgctttgcgctacccaaaagcagagaaagattacgttgaagtatgcgaaaagtatggttctaatttactaggcaaatgcatattacttcccagttacgaaaactcagatctgctgatttgttgcttgtttacatcatcatttggaggttcaagtcatggagaaaagcaaagtattttgaattatacaaaacttgctttagataaattgaagacctttagagaagcaaaagacaaaactcgaacaagtgaagattcaatcggtgactatttaaacggccacatcaaatacccaataggggaatataaattggaaatgccacagataaatagtggcatattcggagtcccttggaaagagacagaacgcgtgttagaagaatttagtggcgacatgagttttacagtatatcagctgtaattgccttagccacgtaatatgtgcctttaaagatagagaaatatttatttattaagttttagttctaaggtgtgttaaaatacctctcaaataaataagttacacacaaccatatatcaacttgtaagtatcacagtaaaaatattttca

SEQ ID NO: 270 - DNA, 1838 bp, Saccharomyces cerevisiae
atacaataagaaagatttgttgccatatataatagcaattaaaaaataaatttgaaagagtgagatgtccgtaacttttaaggacgatgttcatcggattctgaagtttgttgctaattgcaatggcaggtttgaagattccaaatgtgatataagagaatcgcctctcggtggattgggtgtctttgcaaagactgatattgcagaaggtgagtcaatattgacgttgaacaaatcctcgattttttctgcatctaacagctccattgccaatttgttatgtgacagtagcatcgatggaatgttagctctaaacatcgcattcatttacgaaactacagttttcagaaattctagtcattggtacccatttctgcgaactatccgaattcgtgatgacgaagggcacttaaacctgccgccaagcttttggcatgcggatgctaagcgacttttaaaaggaaccagtttcgataccttattcgattcgttggcaccagaagaagaaatcatggaaggatttgaaattgctgtggatttggcacacaaatggaacgacgagtttgggttggaaattccaaaaggcttcctagacgttagtgaggagaatcatgaagaagattacaatttgaaattagaaaagtttatatcggtggcatatactttatcatcaagaggatttgaaattgacgcgtaccatgagacagctttggtgcccatcgcagacctgttcaatcatcatgtttccgacccggatttaaagtttgtatcgctatatgatgtgtgcgataaatgtggtgaaccagacatgtgtaaacatctcatagcagaggaatacttggaagcagaaaatctagacaaaaatatgcccaaagtcgcaagtatggagactcgtgtcatcgatgaagacttaatcaaaagtttagaaaatgatttagagaaagaatactctaatgttacggcaaacatcgaggatgatgatggcggtattgaaaaccctgacgaatgtgtcgatttagtgttaaagaatgacgtcgcacaaggccaagaaatatttaattcctatggtgagctctcaaacgtctttttgttggccagatatggtttcaccgtacctgagaatcagtatgatattgttcatttaggacctgattttatgaaaatcttaaagaaagaagaaaaatatcaagaaaaagtcaagtggtggagccaagtcggtcatggcttgttttcagcatggtatgctcaaatgcgccaagaagatgaagaagacgaagacggtcaagcaaaatcagacaatctgtctgacgatatagagagcgaagaggaagaggaagaggaagagggtgatgatagcttggaatcatggctttcccagctttacatagactcaagtggcgagccttcaccctcaacgtgggccttagctaaccttttgactttaacggccgttcaatgggaatcattgttttccaaaaaggccactcctcacatcagtgattctatagttaacgaagaaaagctgcccttcctggccaaaaaagacaatccccattccaagaaactgctttccaacttacttaaggaaaagcaactaccttgcataaaaggcgacaactcgtcaaagataacaagtgctactaaaagcatgctccaaaatgctcgaacacttgtacaatcggagcataatatcttagatagatgtctcaagagactatcctaaataatattgaatatgcacttttactatattaatatcacgtcacacgacgcacagtgagaagtgaaaaattttttttcaatctgaaaaaaaaaaaaaaaaaaaaaaaaaatttata

SEQ ID NO: 271 - DNA, 1353 bp, Saccharomyces cerevisiae
acgcacagtgagaagtgaaaaattttttttcaatctgaaaaaaaaaaaaaaaaaaaaaaaaaatttatataaacgaatggtatctccatcacatttcttttagcctcgcaacttgtacttttcatcacttttcttgtaatttagcaatatcccaagaacaatcatcgaaatgtcccgtccacaagttactgttcactctttgactggtgaagctactgccaatgccttgccattgccagctgtcttctccgctcctatccgtccagacattgtccacactgttttcacctctgtgaacaagaacaagagacaagcttacgctgtttctgaaaaggctggtcaccaaacctccgctgaatcctggggtaccggtcgtgccgtcgctcgtattccaagagttggtggtggtggtaccggtagatccggtcaaggtgccttcggtaacatgtgtcgtggtggtcgtatgtttgctccaactaagacctggagaaagtggaacgttaaggttaaccacaacgaaaagcgttacgccactgcttctgctattgctgctactgctgttgcctctttggtcttggccagaggtcacagagtcgaaaagattccagaaatcccattggttgtctccactgacttggaatctattcaaaagaccaaggaagctgttgctgctttgaaggctgttggtgctcactccgacttgttgaaggtcttgaagtccaagaaattgagagccggtaagggtaagtacagaaacagaagatggactcaaagaagaggtccattagttgtctacgctgaagacaacggtatcgtcaaggccttgagaaacgttccaggtgttgaaactgccaacgttgcttctttgaacttgttgcaattggctccaggtgctcacttgggtagattcgttatctggaccgaagctgctttcaccaagttggaccaagtctggggttccgaaaccgttgcctcctccaaggtcggctacactttgccatcccatatcatctccacttctgatgtcaccagaattatcaactcttccgaaatccaatctgctatcagaccagctggccaagctactcaaaagcgtactcacgttttgaagaagaacccattgaagaacaagcaagtcttgttgagattgaacccttacgccaaggtctttgctgctgaaaagctaggttccaagaaggctgaaaagactggtaccaagccagctgctgttttcaccgaaactttgaaacacgattaaacttattagtacattaaaaatattcttttattttttatatacatacataagcctttaatacctttaaagcggtaacgactgcctcttgaacttaa

SEQ ID NO: 272 - DNA, 3158 bp, Saccharomyces cerevisiae
tccataatattactgttgatttcgtgactcagaagagaaaacagaggaagttacatatagacccaaataaaaaccaaagaaccacatatagaaatgacgagaaacccgtttatggtggaaccttcgaatggctctcctaatagacgtggtgcttcaaacctctccaaattttacgcaaacgctaacagcaactctcggtgggctaatcccagtgaggagagtttggaggatagctatgaccaatctaacgttttccaaggccttccggcatctccttcgagagctgcactaagatactccccagaccgtcgccatagaactcaattttaccgcgatagtgcccataactctccagttgctccgaacaggtatgctgctaatctacaagagtctcccaaaagagcaggcgaggctgtcatacatctaagtgaggggagtaacctttacccccgcgataatgcagatctaccggtagacccctaccatctatcaccccagcaacagcccagtaacaatctgtttggaagtggcagattgtattctcaaagctcgaaatacacgatgtctactacttccacaacggctccctctctggcagaagcagacgatgaaaaggaaaaatacctcacttcgactacttcctatgatgatcagtctacaattttctctgcagacactttcaatgaaacaaaatttgaactgaaccatccaacaagacagcagtatgtaagacgtgccaattctgagagtaagagaagaatggtctcagacttgcctcccccaagcaagaagaaggcactattgaaactagacaacccgataccaaaaggtctgttggatactttgcctcgtaggaactcccctgagtttacggaaatgagatatacagcctgcactgtggaacctgacgattttttgagagaaggttacactttgagattcgcagagatgaacagagaatgtcaaattgccatttgtattaccatgtacaatgaagataaatattcattggcaagaaccatccactccattatgaagaatgttgctcatctttgtaagcgtgaaaaatctcatgtttggggccccaatggctggaagaaagtctctgtaattctgattagtgacggtagagcaaaagtcaaccaagggtctctcgactatttagctgctttgggtgtttatcaagaagatatggccaaggcgtctgtgaatggtgatccggtaaaagcgcacatttttgaattgacaactcaggtctctatcaacgccgatctggattatgtttcaaaggacattgttcctgtgcaattggttttttgtctaaaagaagaaaataagaaaaagatcaattcccatcgttggctattcaacgcgttttgtcccgttttgcaacctactgtagttactttggttgatgtcggtacacgtttaaacaatacagcaatttacaggttatggaaggtttttgatatggattcaaatgtggctggtgcggctggtcagattaagactatgaaggggaagtggggactgaaacttttcaatccattagttgcatcgcaaaattttgaatataagatctcgaatattttagataaaccattagaaagtgtttttggttatatctctgttcttcctggtgccctgtccgcatataggtatagagccttaaaaaatcatgaagatggcactggccctctcagatcgtatttccttggtgaaactcaagaaggcagagaccatgatgttttcactgcaaatatgtacttggctgaagatagaattctttgttgggaattggtcgccaagcgagatgcaaaatgggttctaaaatatgttaaggaagccactggtgaaacggatgttcccgaagacgtttctgaatttatttctcaaagaagacgttggttaaatggtgcaatgtttgccgcaatttatgctcaattgcatttctaccaaatttggaaaactaaacattctgttgtacgcaagttctttcttcatgttgaattcctttatcaatttattcagatgcttttttcctggttttctattgcaaatttcgttcttaccttttattatttagcaggatcaatgaatttagttattaaacatggtgaggccttattcattttttttaaatacctgatcttttgtgacttggcaagtttattcattatttccatgggtaatagaccccagggcgcgaaacatttattcattacctccatggttatactgtctatatgtgccacatattctctaatttgtgggtttgtttttgctttcaagtcgttagcttctggaacggaatcccacaaaatatttgtcgacatcgttatctcattgctctccacctatggcctatactttttctcatcactgatgtacctagatccttggcacatgtttacatcatccatacaatactttttgacacttcccgcctttacgtgtactttacagatttttgccttctgtaatacacacgacgtttcctggggtactaaaggttccacacaggagtccaagcaattgtccaaggccattgtcgttcaaggtccagatgggaaacagattgtggaaacagattggcctcaggaagttgataagaagtttttggaaataaaaagtcgtttgaaagaaccagaatttgaagaatcaagcggcaatgaaaaacaatccaagaatgattattatagagatataagaaccagaattgtgatgatttggatgctatcaaatctaatactgatcatgtctataattcaagtctttacaccacaagatactgacaatggttatttgatattcattttatggtctgtggccgctttagctgcctttagggtggttggttccatggcctttttgttcatgaaatacttgcgtataatagtgagttacagaaataaagttgaaggtagcggctcatgggaagtctctaaattagacttaccaaatgttttccacaaaaagggctaatgccagtatttttcagctaatttctcgtcattccctcttttttctcattctgttttagaatgtacaggttatgacaaccattaccttctaggatattttgacatttctctcttagactttttatatataatatacatgtttcaataccaaatataatgtagcataacataatc

SEQ ID NO: 273 - DNA, 1208 bp, Saccharomyces cerevisiae
caaataagaaactattgagactgaaccgttttggttaatttcaggtggaaacaattgaagacgagcagtaaacattattttatttagtagtcatgttgtcaagaattgtatcaaacaatgcaacacgctccgtaatgtgccaccaagcgcaagtgggtattctttataagactaacccagtgagaacttatgctactttgaaagaagtggaaatgcgtttgaaatctatcaaaaatattgagaagatcacaaaaactatgaagattgttgcatctacaagattgagtaaagctgaaaaggctaaaatttccgcaaagaagatggatgaagcagagcagttgttttacaagaacgccgaaaccaaaaatttggatgttgaggctactgaaacaggtgctcctaaagagttgattgttgctatcacctctgataaggggttgtgtggttctatccactctcaattggctaaagctgtgagaagacatttgaatgatcaaccaaacgccgatatagtcactattggtgataaaattaaaatgcagctattgagaacccatcctaacaacattaaattgtctattaatggaattggtaaagatgccccaactttccaagaatctgctttgattgccgataagttattgagtgtcatgaaggccggcacttacccaaagatttccattttctacaatgacccagtgtcttccctatcttttgaaccatctgaaaaaccgatctttaacgccaagaccattgaacaatccccatcattcggcaaatttgagatcgacacggacgcaaacgttccaagagatttgtttgaatatactttggctaaccaaatgttgacagcaatggctcaaggttatgctgctgaaatttccgccagaagaaacgctatggataacgcttccaagaatgccggtgatatgatcaatcgttactctatcttgtacaacagaacaagacaagctgtcattactaatgaactggttgatattattactggtgcttcctctttgggatgataaaaaaatcaccctgcattgcctctttatttgacgttgtttttgtagaacatgaaacgaattttgacttgatgagacgaagtatatatccaaagaataccttaaatagaaaaggaaagataataaatactaaacactactatatattcaggtaaaatacaaaaattataacatttttaa

SEQ ID NO: 274 - DNA, 2240 bp, Saccharomyces cerevisiae
attcaaattctatatcgttgaacttttaataggctgcgaataccgactatgtctcccatacaggttgttgtctttgccttgtcaaggattttcctgctattattcagacttatcaagctaattataacccctatccagaaatcactgggttatctatttggtaattattttgatgaattagaccgtaaatatagatacaaggaggattggtatattattccttactttttgaaaagcgtgttttgttatatcattgatgtgagaagacataggtttcaaaactggtacttatttattaaacaggtccaacaaaatggtgaccatttagcgattagttacacccgtcccatggccgaaaagggagaatttcaactcgaaacctttacgtatattgaaacttataacatagtgttgagattgtctcatattttgcattttgattataacgttcaggccggtgactacgtggcaatcgattgtactaataaacctcttttcgtatttttatggctttctttgtggaacattggggctattccagcttttttaaactataatactaaaggcactccgctggttcactccctaaagatttccaatattacgcaggtatttattgaccctgatgccagtaatccgatcagagaatcggaagaagaaatcaaaaacgcacttcctgatgttaaattaaactatcttgaagaacaagacttaatgcatgaacttttaaattcgcaatcaccggaattcttacaacaagacaacgttaggacaccactaggcttgaccgattttaaaccctctatgttaatttatacatctggaaccactggtttgcctaaatccgctattatgtcttggagaaaatcctccgtaggttgtcaagtttttggtcatgttttacatatgactaatgaaagcactgtgttcacagccatgccattgttccattcaactgctgccttattaggtgcgtgcgccattctatctcacggtggttgccttgcgttatcgcataaattttctgccagtacattttggaagcaagtttatttaacaggagccacgcacatccaatatgtcggagaagtctgtagatacctgttacatacgccaatttctaagtatgaaaagatgcataaggtgaaggttgcttatggtaacgggctgagacctgacatctggcaggacttcaggaagaggttcaacatagaagttattggtgaattctatgccgcaactgaagctccttttgctacaactaccttccagaaaggtgactttggaattggcgcatgtaggaactatggtactataattcaatggtttttgtcattccaacaaacattggtaaggatggacccaaatgacgattccgttatatatagaaattccaagggtttctgcgaagtggcccctgttggcgaaccaggagaaatgttaatgagaatctttttccctaaaaaaccagaaacatcttttcaaggttatcttggtaatgccaaggaaacaaagtccaaagttgtgagggatgtcttcagacgtggcgatgcttggtatagatgtggagatttattaaaagcggacgaatatggattatggtatttccttgatagaatgggtgatactttcagatggaaatctgaaaatgtttccactactgaagtagaagatcagttgacggccagtaacaaagaacaatatgcacaagttctagttgttggtattaaagtacctaaatatgaaggtagagctggttttgcagttattaaactaactgacaactctcttgacatcactgcaaagaccaaattattaaatgattccttgagccggttaaatctaccgtcttatgctatgcccctatttgttaaatttgttgatgaaattaaaatgacagataatcataaaattttgaagaaggtttatagagagcaaaaattaccaaagggtttggatggaaatgacactattttttggctcaagaattacaagcgctatgaagtcttgaccgctgctgattgggaagccatcgatgcacaaacaattaaattatgatttgatgttcctgaattaggataaagtatttttccttgcacgagagtacgtatgtaaacgtaatattgataaagaatcaaaaaaagttttatatctatctatatatgtacctaataacatatggaaaggattatttaaattcaaaaaataaaacaataaagtttataaactaaccaaattat

SEQ ID NO: 275 - DNA, 709 bp, Saccharomyces cerevisiae
gaggaaacgtatcaagccagggaaaaagatgtccactgaattaactgttcaatctgaaagagctttccaaaagcaacctcacatcttcaacaatccaaaggtcaagacttccaagagaaccaagagatggtataagaatgccggtttgggattcaagaccccaaagaccgctattgaaggttcttacattgataagaaatgtccattcactggtttagtttccatccgtggtaagatcttgaccggtaccgtcgtctccaccaagatgcaccgtaccattgtcatcagaagagcttacttgcattacattccaaagtacaacagatacgaaaagagacacaagaacgtcccagtccacgtctccccagctttccgtgtccaagttggtgacattgttaccgttggtcaatgtagaccaatctccaagactgttagattcaacgtcgtcaaggtctctgctgctgccggtaaggccaacaagcaatttgctaaattttaaagaaataaaattaacaagatgatataataataagtggaggataaaacgtaggacttctggtgaattatttgaaccaaagtgtcgtatattaggctctttttctttttcttttaccagacttggtttttttctctctttagtaattgtttctatatatggcttatcaattctatatattttttaacttgaatatatgaatgacatctttaa

SEQ ID NO: 276 - DNA, 1713 bp, Saccharomyces cerevisiae
caagtgtcaagattgtgtcagcaaataacagtaatattccaacccgaaaaaaactatctatttatctttggatactttaacatagacaagaagtcctaagaacttaccataattttttttctaaaaacccttttttactcaaaactaatagcttattctggttatttttaatcaatctagaatttttttcttttaattccaaacaatctaataacgtttaaccactaattctttaattattaatatttaattttaaaaatcttctaattttcctgataacttaaagtgacactattttttaaaaaaagcatcaaaatgtctgattatgttgaactattgaaaagaggtggtaacgaagccatcaaaattaatccaccaaccggtgctgatttccacattacatctcgtggttcagactggcttttcaccgttttttgtgttaacctactattcggtgtgattttagtcccactaatgtttagaaaaccagttaaggacagattcgtatattatacggccattgctccaaatttgttcatgtcaattgcttatttcaccatggcttctaacttgggttggatcccagtcagagcaaagtacaaccatgtacaaacttctacccaaaaggagcacccaggttacagacaaattttttacgctagatacgttggctggtttttggctttcccatggccaattattcaaatgtctctacttggtggtactccattatggcaaattgctttcaatgttggtatgactgaaatatttactgtctgctggttgattgctgcctgtgtccactctacttacaaatggggttactacaccattggtattggtgctgccattgttgtttgtattagtttgatgacaactacattcaacctggtcaaggccagaggtaaggatgtctctaacgttttcattactttcatgagtgtcatcatgtttttgtggctgattgcttacccaacctgttttggtatcacagatggtggtaacgttttgcaaccagattctgctaccattttctatggtattattgatttgttgatcctatctatcttgccagttcttttcatgccattggctaactatttggggattgaaagattaggtttaatcttcgacgaagaacccgctgaacatgttggtccagttgctgaaaagaagatgccatctccagcttctttcaagtcatctgattctgactctagtatcaaggagaagttaaagctaaagaagaagcacaagaaggacaagaagaaggctaagaaggctaagaaggccaagaaggccaagaaagcccaagaagaggaggaggatgtagccaccgactctgagtaaatgctttgatctgctgatgtagcaatgtttttttccttctttttcctgacgtattattatttgagaccgaaacttcgctggaaaagaaacacttcgatcctttttttatcttctgcattataacgcgcaacgatgaagtgttaatacatgaaagaagatgggattggattgtagcgaccaaaggccacaaataaatatgcactgtttttaaatttttttttcattaaaaaaatacgaataaattccttaaacacatacatcattttgcttcaaatttttacgtttgtaagaaagaccatttgttgtcttaatacctatgaagcactacttataatcttaattaaatctaattcttttctttaa

SEQ ID NO: 277 - DNA, 1582 bp, Saccharomyces cerevisiae
tatccatctataaaatttattaaaacttttgaactgcacagaatgattggctcacttagaaacaaatttgagcatttcaaagtttctgaaaagggaggtcaaaatttatctacaacactaccgaaactaccccctgcaaaggaccttgatagatcaactatctacaagtaccgttacaattatggtgtaaacttgggtgcgttatttgtgctcgaaccatggattttttctaaagaaaccatttgtacaatcgatgggaaagaatatgatagcgaatttgatgctatttcccaacaattgaagaagcattcttctgaagacgttgcgaaaatgttaagcgatcactataaaaagtacattgatcgaattgactgggaatggctatctaaagatgcccatattacagcgttacgtattccaattggatattggcatgtcgaagatgggaagcatttagattcgcttccatttgccccattgagaaaagtttatgagttagccaaaccttgggaaaaacttggcgaattaatcaataatgccaagaaaatgagcattggtgtattgatagatttgcatggtctaccaggaggcgctaattgcgactcacacagtggctcgaagagtggtgaagctgcgtttttccacaaggaaaagtacatgaccaaagtctacaaagatattttacctgcaattattaacacaatgactctgggcaacgaaaacatcattggtattcaagtggttaatgaggcatgttttgataataacccaaagggccaaaaattctattattcagaagccattaataccgttgaaaaacttcaaccaggtttacctgtcataatatccgatggttggtggccccaacaatgggcagactgggttaaagaaaaacattttagtgaaatagtggtcattgattctcatgtctaccgctgtttttctgattctgataagtcgaaggatgccaattccattatcaaggatttgccaaatactgtgaattttcctcatgaagatgccgattatactgttggtgaattttctggtgttcttgatggacaaacttggaataaaacttctggcgacagagacgctattgttcaaaaatacgtacaaacccaagcagatgtattttctcatgtagctagttggggttggtttttttggactttgcagtttgaatacggtgatggaggtgaatggggcttagctcccatgatgcagaaaggaaatttaccaaaacgtcctcacggtgatgacttacaagtcgacaagaagaaaatagattcaataatccatgaacacgaggcttattggaacggtaaaggtaaaaattttgaacactggaggtttgaggatggcataaagacagctgttgatgatataattgcctttaggaaatttgacaattcattaattggtagatggcattcatggaagtcgcaaagaagagctgaatacgtttctgccaaaaaagatagcgaatttatgtgggaatgggatcaaggctaccaacgtgggttagatgagtttaataagtattaagaaatatacaaacacatatatactaactataggc

SEQ ID NO: 278 - DNA, 957 bp, Saccharomyces cerevisiae
gacgataaagaacataccaactatatattgtgacggcacaaaaagacaaaatacgtaaaatgctaagacgctctaaaaattccagcactaacacaaacgcagacaccaagaaaagacaatccatgcatttaggatccaaaagttcgctaatctcgctgactagcgaatttggccatggacactccaagacgaagcagaaaaaggaggagggcacagctccttctcaattcctgtctcctacgaataagagaagcacatctagtcagtcaaagttaaaaaggagcagcttgttactggacgaaacactgcttaaagactaccactcggccatgaggcacatgcaaacaaacgctgcaaaggaagaaaagctgcggatggctccatcaccaacgcagtcaacgaggagcgaatcagacgccagtctttcctccaccaagagctcgatctcttccatattttcccaagataatgactattccattcacgatttgttgtacgaagatattgaagagatggataaaacagacgctttcaaaattaacaacacaatagcaatcgatgattctaaagctctctttgtcttctgttcaaacgactcctcctcaaggacagcgtctatcgaaacattgcacgaatcaaatttggacaacctggatatgggttccagtagaaggacatcgttggactttttttaatataacctaccataggacacactttgttgttgatgttggacaattcgttaattaagagtccctaaacggctctactagttccaacctcactttgttttttcatttttttatgttttttctagaaccttctttacgtgattctcgctcggaatccgtcaatagaatgttttcagtctccgtttcaatattctgcgcacatcaatcattttcttactacatacactaacattactcctagtttaatttaattgaatttttaact

SEQ ID NO: 279 - DNA, 870 bp, Saccharomyces cerevisiae
atcagatctctattaaaacaggtatccaaaaaagcaaacaaacaaactaaacaaattaacatgtcatttaacagtccattttttgatttctttgacaacatcaacaacgaagttgatgcctttaacagattgctgggtgaaggcggcttaagaggctacgcaccaagacgtcagttagcaaacacacccgcaaaggattctactggcaaggaagttgctagaccaaataactatgctggcgctctttatgatcccagagatgaaaccttagatgattggttcgacaatgacttgtccctgttcccatctggtttcggtttccctagaagtgtcgcagttccagttgatattttggaccatgacaacaactacgagttgaaagtcgtggttcctggtgtcaaaagcaagaaggacattgatattgagtaccatcaaaacaagaaccaaattttggtttctggtgaaattccatctaccttgaatgaagagagtaaagacaaggtcaaggtcaaggagagcagctctggtaagttcaagagagtcatcactttgccagactacccaggtgtggatgcagacaacattaaagcagactacgcaaatggtgttttgacattaacagttccaaaattgaagcctcagaaggatggtaagaaccacgtcaagaagattgaggtttcttctcaagaatcgtggggtaactaaagtgacctggctctatagtgttgtccctctcgcgaggaccattgttgcttgcatatggcttgaaacatatgtcatcacatctgagcgattttacctcttagaattagtttagatatatatgagttgatgaataaatagttataaaaacttgctttggcttcgata

SEQ ID NO: 280 - DNA, 2914 bp, Saccharomyces cerevisiae
cgaagagagaagatcctacaggaggtaaaaaacagctcggtatatcaaacggtatttgattccggtactactcaaatgcagataccgaaatatgagaacaagccattcaagcctccaagaagggttggatcaaataagtacacacaactcaaaccaaccgccactgcagtcacaacagcccctatatctaaagccaaagttactgtcaacttgaaaagaagcatttcggcgggacctactttaaatcttgccaagaagccgaataatctgtcctcaaatgaaaacactagatattttactatcatgtacaggaagcctactaccaaaaagcacaagacttggagtggtgatggctacgctaccttaaaagccagtagcgataagttatgcttttataacgaagcagggaaatttcttgggtcaagtatgctaccaagtgattcagattctctcttcgaaactcttttcaaagcaggctccaatgaagtacaattggattacgaattgaaggaaaatgcagaaatacgtagcgccaaagaagccttatcacaaaacatgggaaatcccagcccaccgaccacaagcacaacagaaacagtgccttctacgaagaatgacggtggcaaataccaaatgcctctgtctcagctgttttcactaaacactgtgaaaagattcaaatcagtaacaaagcaaacaaatgaacacatgaccacagtacctaaaaccagtcaaaattccaaagccaaaaaatattatccagtatttgatgtcaacaaaatcgataatcctatagtaatgaacaaaaatgcagccgctgaagttgacgtaattgttgatccattactgggcaaattcttgcgccctcatcagagggaaggggtgaagttcatgtatgattgcttaatgggcttggcaagaccaactattgaaaatccggatatcgattgtactactaaaagtttagtgttagaaaatgactcagatattagtggatgccttttggctgatgatatgggtttaggtaaaacactaatgagtataactttgatttggacattaattaggcaaactccttttgcatcaaaagtttcatgttcgcaatcaggcataccattaactggactttgtaagaagattttagtcgtttgtcccgttactttaataggaaattggaaaagagaatttggaaaatggttaaatttgtcaagaataggtgttttgacattaagctcaaggaattctcctgatatggataaaatggctgtcagaaattttttaaaagtgcaacgaacttatcaagtcttgattattggctacgaaaaactcttgagtgtttctgaagaattagagaaaaataaacatttgattgacatgctggtgtgtgacgaaggccatcgactaaaaaacggggcttctaaaattttaaatacgctgaagagtttagacataagaaggaagcttttgcttacgggaactcctatacaaaatgatcttaatgagtttttcactattatagatttcataaacccaggaatccttggaagcttcgcttctttcaaaagaagattcattatccctataactagagccagagacactgcaaacagatacaacgaagaattgttggaaaagggggaagaaaggtcaaaagagatgatagaaattacgaaaagatttattttgagacgaacaaatgcgattttagaaaagtaccttcctccaaagacggatataattttattctgtaaaccatacagccaacagatattggcattcaaagatattttgcagggcgcacgtttagattttggacaattgacgttcagttcttcgctaggactaataacattactgaaaaaggtttgtaactctcctggattggttggctcagatccctattacaaatcacatataaaggatacccaatctcaggacagctatagtcgttctttgaactctggtaagttaaaggtattaatgacattactagaaggtattaggaagggtaccaaggagaaggtcgtcgtagtgtctaactacactcaaacattggatataattgaaaatttgatgaatatggctgggatgtcacattgcagactcgacggttccatacctgctaaacaaagggactctatcgtcacatctttcaatcggaatccagccatatttggattcttgttgagtgcaaaatcgggaggtgtaggattgaatctagtcggtcgttcgcgacttattttatttgataatgattggaatccttcagtagatttgcaagcgatgtcacgaattcatagagatggtcaaaaaaagccgtgcttcatatatagacttgtcacaactgggtgtatcgatgagaaaatattgcaaaggcaattaatgaagaacagtttgagccaaaaatttctaggtgactcggagatgagaaataaagaatcttctaatgatgatcttttcaataaagaggacttgaaggacctgttttctgtccatacagataccaagagtaacacacatgacttaatttgttcttgcgatggtttaggtgaggaaattgaatatcctgaaacaaatcaacagcagaacaccgtagagctgagaaagcgtagcactacgacatggacaagtgcgctggatttacaaaagaaaatgaatgaagcagccaccaacgatgatgccaaaaagtcacaatacattaggcaatgtctcgttcattataagcatatcgatccagcaagacaagatgaattatttgatgaggttatcacagattcgttcaccgaattgaaagatagtattacctttgcgtttgtaaagcccggcgagatatgtctcagagaacaatgacgccaaatatggacacttatatactaaataaaatagctattatttaatcactgattgtatttaa

SEQ ID NO: 281 - DNA, 2962 bp, Saccharomyces cerevisiae
acggcatgaaattaaaaagtgtattcagatcagttctaaagtaccggaaaacaaatttgagtttgcttctattaatcacctattcgattattacgttactctatatctttgatcatgaacgttataaactcaatctaccaaaagaggatgagcaccctgaattcaatgacttattagaaacagcatggggggacttacagattatcacggcctcttttcatccgtacacgtccaaagaaaatgataaagtacatgattacttgctcaaaagggttcttgaaattacagggaattcttcgtttgcaagtgtttcagatgacaaagaaagcgagagatccatattatttcagcaacaagatcctttcaatgagtcatctaggttttcgagagtgacatattttgaatcttctaatatattagttaagcttgagggtaaaaatcctgaggaagaagggttacttctttcagctcatttcgactctgtacccacaggatatggagctaccgatgacggcatgggtgtagtgtctttactagcgaacctcaagtaccatataaagcacagaccgaacaggactttaattttcaactttaataataatgaagagtttggcctactaggtgcatcaacttattttgatcactcatggtctaatttaaccaagtatgtgataaatttagagggaactggtgctggtggtaaagctgtactgttccgaacttcagatacttcaacagcaagaatataccaacagtctgttaaggaaaatccatttggtaactctatctaccagcaaggtttttatagcagatatgtcaggagtgagacagactacaagatttacgaagaaaatggcatgagaggctgggatgtcgcattctacaaaccgagaaacctttatcataccataaaggattcaatacaatatacctccaaggcatctttatggcatatgctacatacttccttacaattaagtgcatatgtggcttctaattcattggatacagctgaccaaacgccggcttgttattttgattttatcggtttgaagtttttcgttataagcgctaaaacgcttttctattggaactgcatatttctattagtttcacccgttgtggccattggcttgtatttaatttctcgtgatagaatgacttggaaatcttattcatggctatcgtggacacgctttcctctttcattagccgctggtattattgtccaaaagcttttctctaacgacataattcgttccaatcctttgacgttctcaaggaactacttttggcctatctcggcttttttcactcaagtaatttttaccagttatgttctgattaattgctccaatttttttttcccctgtgccgatatgaaaagcctatcaattatcgaattgttcattattttatggaccattttactttttacgtcgaagttattgtatagttccgactataggtataccgggctttatcctctctcgattttctttcttctgagcacaatagctgctatattgagactacttgcactagcgttgggaatgagaacaaggaagaggcttggtagagaatgtagggaccatcactccaattacagctcccattctcaaatagatatggaacgagacggtcaggaaaacttggaacaaccccaagatcaacttacatcgtcacaagacgatcaagcaagtatccaagatgataatgtgtcaactacttcagctggcccatcacataatgttgacgaggatcatggtatggattcatcgtcacaacaacatgatgaaagggtaccattactgaaggggtctaatagcatggaggaaggattgagtactagagaaaattctctaaaacttgagtataccgattatgcctggatcattcaatttttgctaattgtaccaataccatcatttattttgtttaacagtgtggatgttatcatggacgcactaaaccatactgtccaggaaggaagtaaggctacatttgatgtactcaggttcggaatggtgggcagtattttgatcgcgctaccaattttaccttttttctataaggtcaactatatcacaatttctttaactgcactgcttttcttgatttccgcatccaaaacgctcctagtgcacccctttaccaatagtaacccattaaaagtaaggttttctcaaaatattgatttgtctcaagggaacgctgccagtgtacatgtccttggaagagaaggaaattttttaaaacctatgctgcaagatttaccaagtataaaatatagctctacacatattaactgtacttccgtaaccaatggaatggaactttgtatgtatgatggaatgcaacctaatttattgagcacgaatggaaatacgaacatcagcagtatggtcaaggttcatgttttacataataaccgaaactcaacagagagatctccttacgaaccaatagttgcagagttacttttggaggtgaaggagttcagggcttgcactttaacttttgaaagtagacatcaggcgaagtcacctgtcagagaaatcacggtatatcaaaagaaaaattcggccccacagaaagctaatatcacgaagacgatcaagtctgcttctggcataaacgaactgcaattgcataaacttgatttcgatcaggaaacttaccatatcggagtccagtggtttccaaaacttttgacggatggaaatgtagaggatgacaagttggggacaaaagacgaactgtctgtttctattagctgttattggggagaatatgattcggaatcggttgtaaatggtaccgctgttaggaaaattccagcatttgatgaattgataaattacgcacctctaagtttttcctttaccaacgaacagaaaggattagttattgtcaaggatgctataattttataattctaattagttttaaatgtaaattt

SEQ ID NO: 282 - DNA, 1611 bp, Saccharomyces cerevisiae
tcggccacttttagaaaagaaattaaataaaagagttaatcgttcattcgcttctacacagtttaatcttttccatttttctttcaacaagtccctttgagctatcaagaatacgtttatttgacttttaaagatctagttttaattttactattattccgcaatgcaattcaagaacgctttgactgctactgctattctaagtgcctccgctctagctgctaactcaactacttctattccatcttcatgtagtattggtacttctgccactgctactgctcaagctgatttggacaaaatctccggttgtagtaccattgttggtaacttgaccatcaccggtgacttgggttccgctgctttggctagtatccaagagattgatggttccttgactatcttcaactccagttctttatcttctttctccgctgactctatcaagaaaatcaccggtgatttgaacatgcaagaattgatcattttgaccagtgcttctttcggttctttgcaagaagtagactccattaacatggtgactttgcctgccatttctaccttctccaccgatttacaaaatgctaacaacattattgtttctgacaccactttggaaagtgtcgaaggtttctccactttgaagaaggttaatgtttttaacatcaacaacaacagatatctaaactctttccaatcttccttggaaagtgtctctgactctttacaattctcttccaacggtgacaacactactttggccttcgacaatttggtctgggctaacaacatcactttgagagatgttaactctatttctttcggtagtttgcaaactgttaacgcttccttaggtttcattaacaacactttgccaagtttgaacttgacccaattgagcaaggttggtcaatctttgtctatcgtctccaacgatgaattatccaaggccgctttcagtaacttgactactgttggtggtggtttcatcattgctaacaacacacaattgaaggtcattgacggttttaacaaggttcaaactgttggtggtgccattgaagttactggtaacttctcaaccttggacttatcttctttgaagtctgttagaggtggtgctaacttcgactcttcttccagtaacttctcctgtaacgctttgaagaagttgcaaagtaacggtgctattcaaggtgactcttttgtttgcaagaacggtgccacatctacctccgttaagctatcctctacttctactgaatcatccaagagctctgctacatcttccgcttcttctagtggtgatgcctccaatgctcaagctaacgtttcagcttccgctagctcttcttcctcttcttctaagaagtctaagggtgctgctccagaacttgttccagccacttcattcatgggtgtcgttgctgctgttggcgttgcttactataagattaaagcaacaatttgtgtttctattattactttaatttcttctctaatgatttctttaccattccttttttattatgagacggttggttcatcactgaattttatatgtagataaaattttagtgtcgttaatatctcttttatttcttattgtta

SEQ ID NO: 283 - DNA, 3160 bp, Saccharomyces cerevisiae
caaaaaacaactttcattactgtgattctctcagtctgttcatttgtcagatatttaaggctaaaaggaaatgttgtcgagactatctttattgagtaactcgagggcgttccaacaggccagatggcgcatttaccgcttaaaagtttcgccaactgtgcatgcttctcaataccatattctttctggtaggaaacttgctcaatctattcgagaaaaagccaatgatgagatacaagccattaagcttaagcatcctaatttcaagcctaccttgaaaatcattcaagtcggggccagaccagactcatctacgtacgtgaggatgaaattgaaagcttcaaaggacagcaatgtagactgtatcatagagaagttaccagcagaaatcactgaagttgagcttttgaagaaaattagtgacatcaatgatgatgactctatccatgggttgctaattcaactacctctaccgcgtcacttggatgaaaccacgattacaaacgctgtggactttaaaaaggacgttgatgggttccacagatataatgctggtgaattggctaaaaaaggagggaaaccatacttcataccatgtactccttatggttgcatgaaattacttgaagaagctcatgttaagttagatggtaagaacgccgtcgtgttaggcagatcaagtatcgtcggaaatccaattgcttcgttgttgaaaaatgcgaatgccactgttactgtctgtcatagtcatacaaggaacattgcagaagtggtctcccaagctgatatagttatcgcagcttgcggtattcctcaatacgttaaatcagactggattaaagaaggcgccgtggttattgatgtaggtatcaactacgtacctgatatcagtaagaaaagtgggcaaaaattagttggtgatgttgattttgattctgtaaaggaaaagacatcttatattacccctgttcctggtggagtgggtccaatgactgtcgctatgcttgtttccaatgtactattagctgctaaaaggcaattcgtggaatctgaaaagcttccagttatcaaacctcttccattacacttagaaagtccagtgccttcagatattgatatatcaagagctcagagtcctaagcatatcaagcaagttgccgaggagttgggaatccactctcacgaattagaattatacggccactataaggcaaaaatttctccaaatatttttaaaagattagaatctagagaaaacggtaagtacgtccttgttgcaggtattactccgactccattgggtgaaggtaaatccactacgactatggggttggtgcaggctttatccgctcatttagggaaaccatccatcgcgaacgttagacaaccatctcttggcccaaccctgggtgtcaaaggtggtgctgctggtggtggttatgcccaagttattcctatggacgagttcaatttacatttgaccggggatattcatgctatcagcgctgcgaacaatcttcttgcagcagctatcgacactagaatgttccatgaagccactcagaagaatgatagtacattttacaagagactagttccaagaaaaaaaggcatcagaaagtttaccccatccatgcagagaaggcttaaaagattggatattgaaaaagaagaccctgatgctttaacacctgaagaagtcaaaagatttgctagattgaacataaatcccgatactatcactatcagaagagttgtcgacatcaatgacaggatgttaagacaaattaccattggcgaagccgctacggagaagggttttacaaggaccactggattcgatatcactgttgcctctgaattaatggccattttagctctatctaaaagcttacacgagatgaaggaacgtattggacgcatggttattggtgctgattatgataacaaaccagtaacagtagaagatattggctgtaccggtgctctgactgcattattacgtgacgctataaagcctaacttaatgcaaactttggaagggacccccgtaatggttcacgctggtcctttcgccaacatctccatcggcgcatcatcagtaattgcagacttaatggcattgaagcttgttggttcagaaaagaacccgttaaatgacaagaacatccatgaacctggttatgtagttactgaagcaggattcgattttgccatgggtggtgaaagattctttgatatcaaatgtcgttcctctggattggtgccagatgcagttgtcttagtcgcaaccgtaagagctttgaaatctcatggaggtgctccaaatgttaagcccggacaatcattaccaaaagaatacacagaggaaaacatcgattttgttgccaagggtgttagtaatttggttaagcagattgaaaacatcaaaacgtttggaataccagtcgttgtagcaatcaacagatttgaaacagactcacaggcagagattgaggtaatcaagaaagcagccttgaatgctggcgcatctcatgccgttacttctaatcactggatggaaggtggtaaaggtgcagtagaattagcacatgctgtggtagatgcaacgaaagaaccaaagaactttaactttttgtacgacgtcaatagctccatcgaggacaagcttaccagcatcgtccaaaaaatgtatggtggggcaaaaatcgaagtatcaccagaagcccaaaaaaagatagacacctacaaaaaacaaggcttcggtaatcttcccatctgtattgctaagacacaatattcattatcccatgatccatcattaaagggtgttcctagaggttttacgttccccatcagggatgtgagagcttcaataggtgcaggttatttatacgctttggctgcagaaattcaaaccataccgggtctatcgacatatgctggttacatggcagtagaagtcgacgacgacggtgaaattgaaggtctattttaaatagtttggcagactcctaatggcatcaattcgacctcgatgtccgtctgcacgagtaccctttatataaacaattgagatgagaatattagaaaaatgggttttagttatgtaggtatatgtgcatacatacgtattatcgaagtttttgctacctgttta

SEQ ID NO: 284 - DNA, 1182 bp, Saccharomyces cerevisiae
tcagatagaaagactaaagaagtggtgtgagtataattaactcaattgaagacggtttacctgaagtgatatactgtgccttgagaaacaatgagtagcgacgctaagcaacaagaaacaaactttgccattaatttcttaatgggtggtgtgagtgcggccatcgctaaaactgctgcctcaccaatcgaaagagtcaagatcttgatccaaaatcaagatgaaatgatcaagcaaggaactttagataaaaagtattccggtatcgtggattgtttcaagagaactgcaaagcaagagggactaatatccttttggcgaggaaatactgccaatgttattcgttattttcccactcaagctttgaacttcgccttcaaagataagattaagttgatgtttggtttcaagaaagaggaaggctatggtaaatggtttgcaggtaatctggcttctggtggtgcagctggtgctctttcgttattatttgtttattctttagattttgccagaaccagacttgctgctgatgcaaaatcgtcgaaaaagggtggcgctcgccaattcaatgggttgactgatgtttataaaaagaccttgaaatcggatggtatcgcaggattatacagaggattcatgccatcagtagtgggtatcgtggtttatagaggactatatttcggtatgtttgattctctcaagccactggtgctaactggttcattagatggttcattcttggcttcatttttattgggatgggtggtcactacaggtgcctcaacatgttcttatccattagacacagtgagaagaagaatgatgatgacttcaggtcaagcagtaaagtacaacggtgctatagattgtctcaaaaaaatcgtagcttctgaaggtgtagggtcattgttcaaaggctgcggggcaaatatcttgagaagtgttgctggagctggtgttatttccatgtatgaccagttgcaaatgatattgttcggtaaaaaattcaaatgatcagttggatgaagaaaaaagtcattttctcgacttctcttcacctttcgatcgatttgattttggccgccaacttgtttatagaaaaaaaatagtaggaaggttatgtatcgctttcttttattttttattatagagtataactgaataaatttgtaaatcagccac

SEQ ID NO: 285 - DNA, 1130 bp, Saccharomyces cerevisiae
gtacagcacaaacatgtcattgtgggtagataaatacagacctaagtccttgaatgctctttcacataatgaagagttgacaaattttctaaaatcgttatctgatcagcctcgtgatttacctcatcttttactgtatggaccaaatggtacaggtaagaaaacgcgttgtatggcattattggagtccatatttggacctggagtctatagattgaaaattgatgtcagacaatttgtcactgcttcgaacagaaaactagaactgaatgtggtcagctcgccataccatttagagatcacgccaagtgatatgggtaacaatgatagaattgtcatccaagaactattgaaagaagtggctcaaatggaacaagtggactttcaagattctaaggatggacttgcccatagatataagtgtgttattatcaacgaggcgaactcgttaacaaaagatgctcaagctgctttaagacgtaccatggaaaaatactccaaaaacattaggttgataatggtctgcgattcgatgtcgcctataattgctcctatcaaatcccgttgtctgttgattcgttgtcctgcaccaagcgatagcgaaatttcaactatcttgtctgatgtggtgacaaatgaaagaatacaactagaaacaaaggatattttaaaaagaattgctcaggcatcgaatggaaacttgcgagtctccctattaatgcttgaatctatggcactgaacaacgaattagcattgaaaagcagtagccctataataaaaccagattggattatagtgatccataaattaacgaggaaaatcgttaaagagagatctgtcaattctttaatcgaatgcagagctgtcctatacgatttactagctcattgtatacctgccaatatcatcttaaaggaactaacgttttctttgttggatgtggaaaccctgaataccacgaataaatcgtccataattgaatactcaagtgtttttgacgaaagattatcacttggaaacaaagcaatattccatttggaagggttcatagcaaaagttatgtgctgtctagattaatgtaagatatgtcataaatactgtataagtcacacaaaaagctgatatttaa

SEQ ID NO: 286 - DNA, 2409 bp, Saccharomyces cerevisiae
gctctgacttgatctctgacattaaaaattcggaaacaataaatatttcttttaagatgcgggttttaataactaacgatgatggtcccttaagtgatcagttttcaccatacattagaccttttattcagcacattaaaagaaattatcctgaatggaaaatcacggtttgtgtacctcatgtccagaaatcatgggtgggtaaggctcatcttgctggtaaaaatttgacagctcaattcatatattctaaagttgacgctgaagacaatactttttggggcccatttatccagccacaaattaggtcagaaaactctaaattaccttatgttctcaatgctgaaattccgaaagatacaattgagtggatattaatcgatggaactccagcatcgtgcgcaaatatcgggctgcacctattgtctaatgaaccgtttgatctagtactgtcgggtccaaatgttggtagaaatacatctgctgcttatattacctcttctggtaccgtaggaggcgcaatggaatctgttattactggaaatacaaaggccattgctatttcttgggcctattttaatggattgaaaaacgtctccccacttttaatggagaaggcctctaagagatctttagatgttatcaaacatcttgttaagaattgggacccaaaaacagatctatatagtatcaatattcctttagtggagagtttaagtgatgatacaaaggtttactatgcaccaatttgggaaaatagatggattccaatattcaacggccctcacattaacctagagaatagctttgctgagatcgaagacggtaatgaatcatcatcgatttcctttaattgggctccaaaatttggggcacataaggattctattcactatatggacgaatacaaggacaggactgttttaactgatgctgaagttattgaatccgaaatgatcagtgtcactcccatgaaagccactttcaagggtgtgaaccaccttcttggagagttgaaactgactgaggaagaaaataatttatcaaaaacaaataacctcatcgtggtaagtatagacccaatggaatatatatacaaacctctaacccacgccctgaaaaaatatctgccacaagtggagattgtatcaaacttgccagaatttgacaatggagggtgtgaaaaagaaatgaaggtttttcattacggtgattacgaacagctagatatggacaaactaatggaactgcccaataattacttcacaaactcttatatatataggaaggcattgataagaaaacactttctttcgcataccatacagacttatactgcgaagaacccagagtccattttaaagaaggcatatttggaatcattcactattgatttagattatcgtgaatttctagacgacgcattagatgaaaattgggaattacgccaagagttggagaatgaaagccaagataaatggtggatcgtgaaaccgagtatgagcgataaaggtcaaggtatcagggtatttaagactattgaagatttacaggctattttcgattcctttgacgatgaagacagcgaagcagaagagagtggaaatgacgacgatgctgatgatgtaaatggcgaattcatggataataacaaggttaacatttcccaattgcgccactttattatacaagaatatttaaccaatccgttactattggcatctatggataatagaaagttccacataagatgttacgtcgtctgtaggggagatttgcaagtttttgtttatgatagaatgctagcgctctttgctgccaagccatttgttcctctagatccatatgcgtattccgtaactgatttgaaagatttggaatgccacttgactaacacatgtctgcagagcaaaaagaaggataaagattcttctgttttggagtttgactccatagaggaaattccaaatgagagaaagtccaatattaaggagcaaatccatagcataacgaacgacgttttcttagctgctgtaaatgtaaatagattaaacttccaaccgttaccaaacgcatttgaaacatatggcgtagactttttgattgattcgaattacgaagttaaattactagagatcaacgctttcccagacttcaaacaaactgggaaagatttgaagaacctcattgatgaattatttgatgacactgtcaaatactgtgttacccccatctttaacgagaatagaaataagacagatgatgaaacagacccgaacttcgtaaaagtcattgattacacttcaaacggttggtgaaacaaaaaaaaaaaaagaacccatcctaaaatactgttattattactaaatagtgctaaataatacatatgccttgattttatttccgaaa

SEQ ID NO: 287 - DNA, 847 bp, Saccharomyces cerevisiae
ttgcttctaatttcaagacttccaaaaggtttctcgagtaactagtgctttccaatatctacaacaaaataaaataatagaataatgggtgtttgcactatttttaggtggctctttgctgcttacttgctctcttcatataagtcgcttcctggggcatattttgttaggttttattattatgttattcaaaacttgttcttgcctatgtttacagggtttgaaaccgagaatattaagaaacttgagaaaaatgaatatggctgtttctcgtacaccagcctagatacctatgcctctccattcgaatgtgacttctactttcataagagcaatagcacctattttgcggaattggacatttcaagaggtaatctcatgtgcaagatttttcaaaaattgatgctgaattccaagcattatccatatattccagttgcgaacgttttcactaatttcttgaaggaaatcaagccttttcaaaagtactcggtttcatcaaggattatctgttgggatgagaaatggatttacgtcatgagtagattcacaattaaaaagggcaccgtcttatgctcattatcattgaccaaatacgtccttaaggacggtagaaagaccatcaaaccaaaggatgctcttgaatactgtggtttatataatgagaaggtcgccaaaatttctgaggacaatctaaagcttttaaccgagcgttgtggtttccacgagacagtaccattggaaaacttgagccaagagtactgttcagaaatctaacttctatacacatatagccggtattataaaatatataaatctatcttctttcaaaagtttctctgtgcag

SEQ ID NO: 288 - DNA, 1608 bp, Saccharomyces cerevisiae
atgagtataacaagtgaagaactaaactacttgatatggaggtattgtcaagagatgggacacgaggtgagtgcattagcattgcaggatgaaacaagagtattggaatttgatgagaagtataaagaacacattcctttgggtacactggtgaatctagtacaaaggggaatcttgtatacagaaagtgagttaatggttgatagtaaaggtgatatcagcgctttaaatgaacatcatctttctgaagatttcaatttggttcaggcgctgcaaatagataaagaaaaatttcctgagatctcttctgaaggaaggttcactttggaaaccaattccgagagtaataaagcaggtgaagatggcgctagtactgttgaaagagaaacccaagaggacgatactaattctattgacagtagtgatgacctagacggatttgtcaaaatactgaaggagatagtaaaattagataatattgtttcctccacttggaatccattggatgaatctatactcgcatacggtgaaaaaaattctgttgcaagactagcgaggatagtagaaaccgatcaagaagggaaaaaatactggaaactcacgataatagcggagttgagacatccttttgctctgagtgcaagtagtggtaaaacgacgaatcaagtcacatgtcttgcttggtcacacgatggtaattcaattgtcacgggtgtagaaaatggtgagctaagactatggaataagacgggggcacttctgaatgttttaaattttcatagagcacctatagtatccgttaaatggaacaaagatggaacacatatcatatccatggacgtggaaaatgtcactatactctggaatgttataagcgggaccgtcatgcagcactttgaattaaaagaaaccggtggctcatccatcaacgcagagaaccatagtggcgatggttcacttggggttgacgttgaatgggtagacgatgacaaatttgtcattcctggccctaaaggtgctatatttgtataccaaattacagaaaaaacgcccactggtaaacttattggacaccatggacctatcagcgttttggagttcaatgacaccaataaacttctacttagtgcctcagacgatggtactctaagaatatggcatggcggtaacggcaattctcagaattgcttctacggacactcacaaagcatagtatcggcatcatgggtcggtgatgataaggtaatatcctgctcgatggatggctccgttcgcctatggtcgctgaagcagaatacgctattggctctatcaatcgtggatggtgtcccaatttttgctggaagaatatcacaagatggacagaagtacgcagttgctttcatggatgggcaggtaaacgtctacgatttaaaaaaactgaacagcaagtcacgaagtctttatggtaaccgtgatgggattttgaatccattaccaattcccctctacgctagctaccaaagcagccaagacaatgattatatatttgatctgtcatggaactgtgcgggaaacaagatttctgtagcatactcgcttcaagaaggttcagttgtagccatataa

SEQ ID NO: 289 - DNA, 1137 bp, Saccharomyces cerevisiae
ccataaagaacagaaaaaagcggcgcaataatttcgtgtattacaattacagttagtcatgagtgaagaatttcctacgccgcagcttttggatgaattggaagatcaacagaaagttaccacgccgaatgagaagagagagttaagttctaatcgtgtgttgaaggatatttttgcgggtaccatcggtggtattgcacaagttcttgtagggcaaccgtttgatacaacaaaagttaggcttcaaacagccaccacaagaacaacaacgttggaggtattgcgtaacttggtaaagaatgagggtgtgtttgcattctacaaaggtgcgttaacaccgttattgggtgttggtatatgtgtctcagtacaatttggtgtgaatgaggcgatgaaaagatttttccaaaattacaacgcttctaagaacccgaatatgagctcacaggacgtagatctttcacgttcaaatactctgccactatcccagtactacgtttgtgggttgacaggtggtgtagtcaattcattcttggcatcgcccattgaacaaataagaattcgtttgcagacgcaaacatctaatggtggagacagagaattcaaaggtccttgggactgtattaaaaaattgaaagctcaaggtggattgatgaggggtttatttcccacaatgataagagccggacatgggcttggtacatattttcttgtctacgaagcattggttgccagagaaattggtacgggactaacaagaaacgaaattcctccttggaaattatgcttatttggtgcattttccgggacaatgttgtggttgacagtatacccattggacgttgtgaaatccattatacaaaacgatgatttacgaaaacctaaatacaagaattccatttcttacgtagcaaagaccatttatgcaaaagaaggtatcagagcctttttcaaagggtttgggccaacaatggttaggtccgcgcccgttaatggtgcgacattcctgacgtttgaattagtcatgagatttctgggggaagagtaggagagtatatatgaaaacatcgttttatagatatagacatagacatgctgttatcataccaaatagaaaagtgtacagtcttttagtga

SEQ ID NO: 290 - DNA, 753 bp, Saccharomyces cerevisiae
aactataacagtataacacagcacaagagaaccgagcagcccgccatgaatcctcaagtcagtaacatcatcatcatgttggtcatgatgcaactctcccgtcgcattgacatggaggacccaaccatcatcatgtacattagaattttatactgttcttccatcggtatctcttggatcatctaccaaatggccagaaagagaattgttgctaaaaacgacatgactaccatgaagtacgtcgaacctggtaatgctatgtccggcgaaggtgagaagctgcaagttactaccgtcagagactacgatttgaaggaaatagacagtgctatcaagtctatctacactggtatggctatgatgggtttcatgcatttgtacttgaaatacaccaacccattgttcatgcaatccatttctccagtgaaaagcgctttggaacacaacgaagtgaaaattcacctcttcggtaagcctgcaaccggcgatttgaagagaccattcaaggctccatctttgtttggtggtatgggtcaaactggtccaaagaccgacaagaaatctatcgaagaagctgaaagagccggtaacgctggtgttaaggctgaatgattcgatcaaaagcgaagtatttttttttcctagtttttatgtaaaaatatattcatttttttctctacgcagttgctgcagtgttataagaaaaatagaatgaaataagataaagctagacgaattgtgtctattttccta

SEQ ID NO: 291 - DNA, 1451 bp, Saccharomyces cerevisiae
atgtttttggaaattcctcggtggttacttgccttaataatattatacctttccataccgttagtggtttattatgttataccctacttgttttatggcaacaagtcgaccaaaaaaaggatcatcatatttgtgctgggtgatgtaggacactctccaaggatatgctatcacgctataagtttcagtaagttaggttggcaagtcgagctatgcggttatgtggaggacactctacccaaaattatttccagtgatccaaatatcaccgtccatcatatgtcaaacttgaaaagaaagggaggcggaacatcagttatatttatggtaaagaaggtgctttttcaagttttaagtattttcaaattactttgggaattgagaggaagcgattacatactagttcaaaatccaccgagcatacccattcttccgattgctgtgctatacaagttgaccggttgtaaactaattattgattggcacaatctagcatattcgatattgcaactaaaatttaaaggaaacttttaccatcctttagtgttgatatcttacatggtagagatgatattcagcaaatttgctgattataacttgactgttactgaagcaatgaggaaatatttaattcaaagctttcacttgaatccaaagagatgtgctgttctctacgaccgcccggcttcccaatttcaacctttggcaggtgacatttctcgtcaaaaagccctaactaccaaagcctttataaagaattatattcgcgatgattttgatacagaaaaaggcgataaaattattgtgacttcaacatcattcacccctgatgaagatattggtattttattaggtgccctaaagatttacgaaaactcttatgtcaaatttgattcaagtttgcctaagatcttgtgttttataacgggtaaaggaccactaaaggagaaatatatgaagcaagtagaagaatatgactggaagcgctgtcaaatcgaatttgtgtggttgtcagcagaggattacccaaagttattacaattatgcgattacggagtttccctgcatacttcaagttcagggttggacctgccaatgaaaattttagatatgtttggctcaggtcttcctgttattgcaatgaactatccagtgcttgacgaattagtacaacacaatgtaaatgggttaaaatttgttgatagaagggagcttcatgaatctctgatttttgctatgaaagatgctgatttataccaaaaattgaagaaaaatgtaacgcaggaagctgagaacagatggcaatcaaattgggaacgaacaatgagagatttgaagctaattcattgagtcaatggtaactcagcctttcttttttgaaaattactattttcgactctttttttatacagttacatagtactacctctaatacacattcatgattaaca

SEQ ID NO: 292 - DNA, 475 bp, Saccharomyces cerevisiae
agtaacaattctggccttcactccaatgactatggatactgcgcaattaaagagtcaaatacaacaatatcttgtagaatcaggaaactatgaactaatttcaaacgaactaaaagccagactacttcaagaaggttgggtggataaagtcaaagatttgaccaaatcagagatgaacataaatgaatctacgaactttacccaaattttatccaccgtagaacccaaagcattagaaatggtatcggattcaacaagggaaaccgttttaaagcaaataagggaatttcttgaagagattgtagatacacaatgaaggatacgaaaatgcaccttaattcccaatattattacatatgctcatcgggaaaaccttttaagcaataatagattttaagtatgtaatgatacaaataataatatatttatatacgcatatatttacatgtgcatatatgaaaaataacctaattca

SEQ ID NO: 293 - DNA, 1479 bp, Saccharomyces cerevisiae
ataattaactaaacatgggtaaagagaagtctcacattaacgttgtcgttatcggtcatgtcgattctggtaagtctaccactaccggtcatttgatttacaagtgtggtggtattgacaagagaaccatcgaaaagttcgaaaaggaagccgctgaattaggtaagggttctttcaagtacgcttgggttttggacaagttaaaggctgaaagagaaagaggtatcactatcgatattgctttgtggaagttcgaaactccaaagtaccaagttaccgttattgatgctccaggtcacagagatttcatcaagaacatgattactggtacttctcaagctgactgtgctatcttgattattgctggtggtgtcggtgaattcgaagccggtatctctaaggatggtcaaaccagagaacacgctttgttggctttcaccttgggtgttagacaattgattgttgctgtcaacaagatggactccgtcaaatgggacgaatccagattccaagaaattgtcaaggaaacctccaactttatcaagaaggttggttacaacccaaagactgttccattcgtcccaatctctggttggaacggtgacaacatgattgaagctaccaccaacgctccatggtacaagggttgggaaaaggaaaccaaggccggtgtcgtcaagggtaagactttgttggaagccattgacgccattgaacaaccatctagaccaactgacaagccattgagattgccattgcaagatgtttacaagatcggtggtattggtactgtgccagtcggtagagttgaaaccggtgtcatcaagccaggtatggttgttactttcgccccagctggtgttaccactgaagtcaagtccgttgaaatgcatcacgaacaattggaacaaggtgttccaggtgacaacgttggtttcaacgtcaagaacgtttccgttaaggaaatcagaagaggtaacgtctgtggtgacgctaagaacgatccaccaaagggttgcgcttctttcaacgctaccgtcattgttttgaaccatccaggtcaaatctctgctggttactctccagttttggattgtcacactgctcacattgcttgtagattcgacgaattgttggaaaagaacgacagaagatctggtaagaagttggaagaccatccaaagttcttgaagtccggtgacgctgctttggtcaagttcgttccatctaagccaatgtgtgttgaagctttcagtgaatacccaccattaggtagattcgctgtcagagacatgagacaaactgtcgctgtcggtgttatcaagtctgttgacaagactgaaaaggccgctaaggttaccaaggctgctcaaaaggctgctaagaaataagagtaataattattgcttccatataatatttttatatacctcttatttttatgtattagttaattaagtatttttatctatctgctta

SEQ ID NO: 294 - DNA, 658 bp, Saccharomyces cerevisiae
tacaactctgtcgtaagttcttggaactgctggccgcgttggatacaactagattgacacgcacttactctcgtcttacagtactatgtaccatcactatcacgccttccaaggcagaaagcttactgaccaagaaagagcacgcgtgttggagtttcaagattccattcactattctccgcggtactcagacgataactatgagtacaggcatgtgatgttacctaaggccatgctaaaagttatcccatctgattacttcaattcggaagtggggaccctgcgtatattaacagaagacgaatggagaggcctcggcatcacacagtctttggggtgggaacattatgaatgccatgcgccagaaccacacattttgctattcaaaaggccgctgaactacgaggccgagctgagggcagcgaccgctgctgctcaacagcaacagcaacagcagcaacagcagcaacaacaacaacagcaacatcaaacacaatcgatttcgaacgatatgcaagttccaccccaaatctcctagctttgatatactctaattactgaaattgaattccttttcaaggctccataactatatggagcatactatgtacttatcataataaagaataaacaaacaagcaaacaaaaaaaaaaaaaa

SEQ ID NO: 295 - DNA, 895 bp, Saccharomyces cerevisiae
cactgcaggtgcttttctccggcggagttaatagatacttatccccgcttcatgtcatactatctctcttaacagggatgttgacaccatataagttaacataacatatacgtacgtaataatattaaggactatctcgcatttcaaaagagaaacaacctaatcaagccttattataagagcaaattattcaaaaaaagtctacggagaaaattattatggtggttttagacaagaagttattggaaagattgacttctcgtaaggttcccttagaagagctcgaagatatggaaaaacgatgctttttgtctacttttacatatcaagatgcctttgatttggggacttacataagaaatgcagttaaagaaaatttccccgaaaaaccagttgcaattgatatctccttaccaaatgggcattgcttgtttcgcacagtgacctacggtggcagtgcattggacaatgatttttggatccagagaaagaagaagacagcgcttcgatttggtcattcaagtttctatatgggctgcaagaaaagtgacaaaacaccggaggaaaagttttttgtggactcaaaagaatacgctttccatggaggtgctgtcctaatacaatcggagagaagtgactacccctatgcctgcttaactataagtggattgaagcaggaagaagaccatttaatggcagtcagctctttaattgcatttgctaatgaaagtctagaagaagatttgaatttggattgagaatgtaggtagaagtaaaatagaggcttgaacaccatagaatattttttacccgttactagtataactgttatttagtcgtaagcttttcatatatatattgattgttttgcccttgaaaaaatacacagcaccaa

SEQ ID NO: 296 - DNA, 1724 bp, Saccharomyces cerevisiae
tatacaaaaagtgataccgacatacaatgaagtatctaaacttagttttcgtgcttcagcttcttattagcatcaaatacgcctcattcggccgagccttttctctttttgaagatgataccacctttgccaatttggataaacagctaaagcttccacagaatacacagcaaacccttaaattggaccgtttgaatcacgatgatccgctgtttacaacttttatttcttctgtggacacagattacagtttgagacttagaacagtagatccttctaaactaggaattgacaccgtaaaacaatggtcgggttacatggactataaggattccaaacactttttttactggttttttgaaagtaggaacgatcctgctaacgacccaattattctttggttaaatggtggacctggttgttcctcgtttactgggttgctatttgaactaggcccctcatcaattggcgccgatatgaaaccaatccacaatccctattcttggaataataacgcttcaatgatcttcttagaacagccactcggagtcggcttttcctatggtgatgaaaaagtctcctctacaaaattagcaggcaaagatgcgtacattttcctggaattgttttttgaagcttttcctcatttacgctccaacgatttccacattgcaggcgaatcctatgcaggacattatatccctcaaattgcacatgagatcgttgtcaagaaccctgaaagaacgttcaatttaacttcagttatgattggtaatggtatcacagaccctttgattcaagcagattattatgaaccaatggcatgcgggaaagggggctatcaccctgttctctcatcagaagaatgtgagaaaatgagtaaagctgcaggtcgttgtcgtaggttgaacaagttatgttatgcttctaaatcaagtttaccatgcatagtcgccactgcttactgtgactctgcacttttggaaccgtacattaacacaggactcaacgtctatgacattagagggccctgtgaagataatagtactgatggtatgtgttatacaggtctccgctatgtcgaccagtatatgaattttcctgaagttcaagaaacgctagggtccgacgtgcataattattctggctgtgataatgacgtgttcaccggatttttgtttacgggcgatggaagtaaaccatttcaacaatatattgctgaattattaaatcacaacattccggtattaatatatgcgggtgataaggattatatttgtaattggctgggaaaccatgcttggtccaatgagttggaatggatcaataaacgtaggtatcagagaaggatgttaagaccatgggtcagtaaagaaacaggtgaagagttgggacaagtcaagaactatggccctttcacctttttgagaatatacgatgccggtcatatggtgccctatgatcaaccggaggcaagtttggaaatggtcaacagttggatttccggtaatcgtgctttttcggatctttccaccttggaaaatgctagttagtagtgctctaaaaatgtttcactcttaaccttgcaatcattatactttacacaaatctctacgtttcatttaatttaaaatctacaatccaacaaatataaaacaaaatataattataaggaaaaacgtatataatcactgcaatactctaatttaaaattaggagcacga

SEQ ID NO: 297 - DNA, 2510 bp, Saccharomyces cerevisiae
agaaattctttagtcaaataccggcataatcagtttttccatcatgggtaagaaaagggctcctcaaaaaggaaaaacggtcacaaagccacaggagataattgtagatgaatccaaattgaactggaaaccagtagatattccggacactttagatgactttggtggattttatggcttggaagaaattgacggagtggacgttaaagtcgtggatggtaaagtaactttcgtcaccaaaaaagattcaaaagtgttaaaagatagcaataaggaaaaagtcggagatgatcaggaatctgtggaaaatgaatcagggtcagattcggagtccgagctccttgaattcaagaacttggacgatattaaagaaggagagttgagtgcagcatcttattcatcatccgacgaggatgagcaaggtaatattgagagttcaaagttaaccgatcccagtgaggatgtggatgaggatgtggatgaggatgttttgaaagaaaacgtctttaacaaagacattaatatcgatgatatttctcctgtaaatttacctgaatggacgaatcttgcacctctctcaatgactattttgcagagcttgcagaatttaaattttctcagacctacagaaattcaaaaaaagtctattccagttattatgcaaggcgtagacgtcatggggaaagcctctacaggttcaggtaaaactttagcctatggtattccaattgtagagaaactgatcagtaacttctctcagaaaaacaagaaaccaatatcgttaatctttactcctacaagagaactggcgcatcaagtcacagaccacttaaaaaagatctgtgagcctgttctagcgaaatctcagtactcgatattatctttgacaggtggactctctatccaaaaacaacaacgtctattaaagtacgataatagtggccaaattgtcatcgcaacaccaggtagatttttggaactgttggaaaaagacaacactttaatcaaaagattctcgaaagtaaatacgctaatccttgatgaggctgataggctgttacaagacggtcatttcgacgagttcgaaaaaatcattaaacatttattagtagaaagaaggaaaaacagagaaaactccgagggcagtagcaaaatttggcaaactttgatcttttctgcaacattctccatcgacttgtttgataagctatcttcttcccgtcaagttaaggatagaaggtttaaaaacaacgaagatgagctaaatgccgtaatacaacacttaatgagcaaaattcacttcaactcaaagccggttataatagatacaaatcctgagtcaaaagtgagctctcaaatcaaagaatccttaattgaatgtcctccattagaacgtgacctatactgctattactttttaaccatgttcccaggtacaactttgatcttttgtaatgccattgactccgtgaagaaattgaccgtatacttaaataacctaggcatcccagcttttcaaattcattcttccatgacacaaaagaaccgtttgaaaagcttagaaaggttcaagcaacaaagcgctaaacagaaaacaataaatcattcgaatccggattccgttcaactctcaacagtattgattgcaagtgatgttgctgctagaggtttagatattccgggtgttcaacacgttattcattaccacttaccaagatctactgatatttatattcatagatcaggcagaactgcaagagcaggttctgaaggtgtctctgccatgatatgctcacctcaagaatctatgggcccattaagaaagttaagaaaaactctcgctacaaaaaatagtgtttcgacggatttgaactctagatcaactaacagaaaacccatcaagtggcaaaacactgtgcctttgttaccaattgaaaccgatatactttcacaactcagagaaagaagtagattagcaggcgaactggctgatcatgaaattgcttctaattccctaagaaaagatgacaattggttaaaaaaggctgctgatgaattaggtattgacgttgattccgacgaagacgatatatcaaagagtaattcggacactttcttactaaaaaataaaaataaaaaaatgcagaagactataaataaggacaaggtaaaagccatgagagctacgttgaacgaattgttatcagtgcctatacgtaaagatagaagacagaaatatttgacaggtgggctagtgaatttagctgataacttggtcaaaaaaagaggtcataattctatcattggtcatgaaaagacaaacgccttagaaactttgaagaaaaagaaaaagagaaataattaatctcgaggcttttgaagagaaactctcctttcactgtattttctacgtaatatacacggtcctctaaacccactatgtactttcaacaaaggaattagctcaatatagagcaaaaggtttaccaagtatatattatattgtacaa

SEQ ID NO: 298 - DNA, 1219 bp, Saccharomyces cerevisiae
tgtctctgattggaagatacctaagaaaattatttaactacatatctacaaaatcaaagcatcatgccttcgcaagtcattcctgaaaaacaaaaggctattgtcttttatgagacagatggaaaattggaatataaagacgtcacagttccggaacctaagcctaacgaaattttagtccacgttaaatattctggtgtttgtcatagtgacttgcacgcgtggcacggtgattggccatttcaattgaaatttccattaatcggtggtcacgaaggtgctggtgttgttgttaagttgggatctaacgttaagggctggaaagtcggtgattttgcaggtataaaatggttgaatgggacttgcatgtcctgtgaatattgtgaagtaggtaatgaatctcaatgtccttatttggatggtactggcttcacacatgatggtacttttcaagaatacgcaactgccgatgccgttcaagctgcccatattccaccaaacgtcaatcttgctgaagttgccccaatcttgtgtgcaggtatcactgtttataaggcgttgaaaagagccaatgtgataccaggccaatgggtcactatatccggtgcatgcggtggcttgggttctctggcaatccaatacgcccttgctatgggttacagggtcattggtatcgatggtggtaatgccaagcgaaagttatttgaacaattaggcggagaaatattcatcgatttcacggaagaaaaagacattgttggtgctataataaaggccactaatggcggttctcatggagttattaatgtgtctgtttctgaagcagctatcgaggcttctacgaggtattgtaggcccaatggtactgtcgtcctggttggtatgccagctcatgcttactgcaattccgatgttttcaatcaagttgtaaaatcaatctccatcgttggatcttgtgttggaaatagagctgatacaagggaggctttagatttcttcgccagaggtttgatcaaatctccgatccacttagctggcctatcggatgttcctgaaatttttgcaaagatggagaagggtgaaattgttggtagatatgttgttgagacttctaaatgatcttttgtaacgaatttgatgaatatatttttactttttatataagctattttgtagatattgactttttacgatttatttgtaacaatgagaattactc

SEQ ID NO: 299 - DNA, 1103 bp, Saccharomyces cerevisiae
gaaattggttaaattgattagctaaaatttactcgttgtggacagagtttgagccaagcggaatgttttcaaggctttctttgtttcgaagggcagctctggctcctgcccctatgagaatgtcttttaggactatttatcaaaaaaccgaggatgaattgcccagaaggatcgtcccaaagctagccacattttattcggcgaatcctaaccatgaagatcgtattaatcgactcgaaagacttctaaggaaatacataaaactgccatctcagaacaacaatgaagcacaacaaacaaaagctccttggatttctttcgatgagtacgctttaatcggcggtggtacgaaattaaagcctacgcaatatactcagctactgtatatgttgaataaacttcacaacattgatcctcaacttactaatgatgaaatcacatccgaactatcccaatattataaaaaaagttcaatgctttccaataatatcaaaatcaaaactttagatgagtttggaagaagtatagccgttggaaaaaggaaaagttccactgcgaaagtattcgttgttagaggtacaggtgagatattagttaatggtcgacaattgaatgattacttccttaagatgaaagacagagaatcaatcatgtatccacttcaagtgatcgaatcagttggaaagtacaatatttttgcgacaacgtctggaggcggacctacgggtcaggctgaatcaatcatgcacgccattgcgaaagctttggttgtgttcaatccattattaaaatccagactacataaagctggcgtcttaacaagagattacaggcacgtcgaaagaaagaagccaggaaaaaagaaggcaagaaagatgccaacatgggtcaagagatagtcttagtgcatcttgttacctcaatttcgaacggaagcgtgcgtgctctgagttttttgacacatgccagaagaaacgttatatattttgcatacaacgccgcccagcattagaagcacaactctcgttcgttattcctgtaaataaagttatatgtattcgaatattgctcagttagtattttcttctacttactgcacataa

SEQ ID NO: 300 - DNA, 1166 bp, Saccharomyces cerevisiae
agcgtcttgattttaatcaactgctatcatgtcttcttcagtagcctcaaccgaaaacatagtcgaaaatatgttgcatccaaagactacagaaatatacttttcactcaacaatggtgttcgtatcccagcactgggtttggggacagcaaatcctcacgaaaagttagctgaaacaaaacaagccgtaaaagctgcaatcaaagctggatacaggcacattgatactgcttgggcctacgagacagagccattcgtaggtgaagccatcaaggagttattagaagatggatctatcaaaagggaggatcttttcataaccacaaaagtgtggccggttctatgggacgaagtggacagatcattgaatgaatctttgaaagctttaggcttggaatacgtcgacttgctcttgcaacattggccgctatgttttgaaaagattaaggaccctaaggggatcagcggactggtgaagactccggttgatgattctggaaaaacaatgtatgctgccgacggtgactatttagaaacttacaagcaattggaaaaaatttaccttgatcctaacgatcatcgtgtgagagccattggtgtctcaaatttttccattgagtatttggaacgtctcattaaggaatgcagagttaagccaacggtgaaccaagtggaaactcaccctcacttaccacaaatggaactaagaaagttctgctttatgcacgacattctgttaacagcatactcaccattaggttcccatggcgcaccaaacttgaaaatcccactagtgaaaaagcttgccgaaaagtacaatgtcacaggaaatgacttgctaatttcttaccatattagacaaggcactatcgtaattccgagatccttgaatccagttaggatttcctcgagtattgaattcgcatctttgacaaaggatgaattacaagagttgaacgacttcggtgaaaaatacccagtgagattcatcgatgagccatttgcagccatccttccagagtttactggtaacggaccaaacttggacaatttaaagtattaagacaacgactttattttcactttatttagttcgcttcttaatcttgtcaaaaacaagatattgtgtaatcgcctcaagtaaacaatatgtttttcatacgtga

SEQ ID NO: 301 - DNA, 1232 bp, Saccharomyces cerevisiae
taacgcaaagttgaaattctaaccgaatagtagtataacatactggttttctttctgttcgaggtataagaaaagaaagtacttggctatattcggaggaggcaagaaggcggccaagagagagatatcttctttgtcctttgaattatggcttttttgaatattttcaagcaaaaacgtggtgatgaagcttcacaactgagcgcaaagggacgggaggaaatttctcaatcgattaagatatgcaaaagtgacgatgctgctaacgaacatagctgctctggtgattgcaaaacagaaattgaagaaggagagcaggcctttgcgaaactaaagatcgaacatgaaactcctttgttgaactcttctaaaacgccaaaaattcacttcgttgtccccacctctcaaatcgattggcagcatgatgcctgcctcgaggacccaaagtcagtacagtataaaatttcccagtggtgtgataagaattcagctaaattttccaacgtgggcacaggcaagacactaaactgtgcagtttcatctttacctaaagatatcatggatattgatgttatgcggggaaccaagaataatgtacttattttgccttacttcatttggctgaacgaccttagatcagatgacgtcgaagcaacgctggatggtttagttcctgacttattagacgagaatatttcaagagagaaattgctagaaacacgaccaaatgttgccgttgcacgtgaacgtgcatttgtatttatatgttcacatactacgagggataaacgatgcgggattacggcaccctatttaaagaaagtttttgacagtaaattacaggaacatgggctgtatagggacaattcggattacagggcagagggtgtcaaaattgcatttgttaatcatgttggtggtcacaaatttgctgcaaatgttcaaatttatttacgaaatccaaataccttaatttggttgggaagagtaactccaaccatagttccttctattgtcgaacatctgattgttcctgaagaaccaacgttgccgtttcccgaaaaagttcgctgtattaagaaatatcaaagctggtaaaggttggccagcaaaatacaatcttttgacgccataaaatttgccatcagagtagcttttaaatgtacatagttctaaagcacgcatatatatttataacgctaagatgataatgaaaagttttatttgcaaaa

SEQ ID NO: 302 - DNA, 2062 bp, Saccharomyces cerevisiae
ttaaggcccaagggaactaacaaaaacgttcaaaaagttttaaaactatatgtgttaactgtacaaaaataacttatttatcatatcatttttttctctgtttatttcttctagaacttatacctgtcttttccttttattctttgaatttggtttaatatccctttttggtttaatatccatccattcctttcacttagaactaataattcccttcgtttgataatttatcattttccttttctgttagtaaagtacccattaaatgaaactagaacgcgtaagcagcaatggctccttcaaaagaggtagagatatccagtcacttgaatctccgtgtactagaccgctgaaaaaaatgtcacctagtccatctttcacatctcttaaaatggagaagcctttcaaagatattgtaaggaagtatggaggtcatcttcatcaaagtagttacaatcccggctcaagcaaagtggagttagtaagaccagatttgtctttaaaaacagatcaaagttttcttcaaagtagtgtgcaaactacgcctaataagaaaagctgcaatgagtatctttcaactccagaggccacaccattaaaaaatacggctacagaaaatgcatgggcaacctctcgagttgtttctgcatccagtctttctatagtgacaccaacggaaattaaaaacattcttgttgatgaattctctgaattgaagttagggcaacctttgactgctcaacatcagcgaagtcatgcggtctttgaaattcctgagattgtggaaaatatcataaaaatgatagtttctctagaatctgcaaatataccaaaggaaagaccatgcttaagaagaaatccacaatcttatgagcactctctgcttatgtacaaagacgaagagagagcaaaaaaagcatggtcagcagcccagcagctacgagacccaccattagtcggacacaaggagaagaagcaaggggccttatttagttgtatgatggttaacaggttatggcttaacgtaacaaggccttttcttttcaaaagcttgcactttaagagcgtccataattttaaggagtttttacgaacttcccaggagacgacacaagtaatgagaccgtctcattttatattgcacaaattacatcaagtaacacaaccagatatagaaaggctttccagaatggagtgtcaaaatttgaaatggttagaattttacgtttgccctagaataactcccccattaagctggtttgataacctccataaacttgaaaagcttattattccaggcaataaaaacatagatgataactttttactcagactatcacagagcataccaaatttaaagcacttagttttaagagcatgtgataatgtcagtgattcaggtgttgtttgcattgctttgaattgcccgaaattaaaaacatttaacattggcagacataggcgtggaaatttaattacgagtgtctcactggtcgcgctaggcaaatacacacaggtggaaactgtggggtttgccggttgtgatgttgatgatgccggtatttgggaatttgctcgattaaatggcaaaaatgttgaaagattgtctttaaattcctgtcgtcttttgactgattactctctacccattctttttgctttaaactcatttccaaatctggctgttttagagatcagaaatttagataaaataactgatgtgaggcatttcgtgaagtacaacttgtggaaaaaatcattggatgcccccattctaatcgaagcatgtgaacgtattacgaaactaatcgatcaagaagaaaatagagttaagaggattaactccttggttgccttaaaagatatgacagcttgggttaatgcagacgacgaaatagagaataatgtggactagatggtttttgtgactttacctataaatagtacacaacagaccaccagtaattctacacacttcttaactgataatattattataattgtaactttttagcagcactaaatttaatgaatacatagatttttaactagcattttacta

SEQ ID NO: 303 - DNA, 1272 bp, Saccharomyces cerevisiae
gaggcctttttatttttcgcttttttagagatttcacgaataaaagcgttgcagaaatgcaacttcaaaagagactgaaggaaacacagatagaagaacagtcttcaaagcaatcaattcgtgtcggtgcagcttaagaaatgacttttatgcaacagcttcaagaggctggggaaagatttaggtgtatcaatggtcttttatgggttgtttttgggcttggtgtcttaaaatgtacaacgttatcacttagatttttagctcttatttttgatctttttttactaccagcagtcaatttcgacaagtatggtgctaaaactggtaaatactgtgctatcactggtgcaagtgacggtattggtaaagaatttgctagacaaatggcgaaacgtggcttcaacttggtattgatctcgagaacgcaatctaaattggaggctttacaaaaagaactagaagatcaacatcatgtcgttgtaaagattctagccattgacattgcggaggataaagaatccaactatgaatccattaaggaattgtgtgcgcagttaccaatcaccgttttggtcaataatgttggtcaatcacactccattcctgttccatttttggaaacagaagagaaggagcttagaaatattatcactatcaataacactgctacattattaattacacaaatcattgcaccaaagattgtggaaactgtgaaagctgaaaacaagaagtcgggtactcgtggtttgatcttaaccatgggctcatttggtggtctgattcccaccccacttttggctacatacagtggttcgaaatcattcttacaaggttggtctaactctttggctggggaattatctaaagatgctatcgatgttgaattaatcatttcatatttggtcactagctcgatgtctaaaatcagaagatcatctttaatgatcccaaatccacaacagtttgtaaaatccactttaagaagcgttggcagacgctgcggctctcaagaaagatacgctactatgaccccttactgggcgcacgcagtgtatcaatttgtaattacagagacctttggcgtttactctaagattgttaactccattaattattccttccataaatctatcagaattagagccttaaaaaaagccgcaagacaggttaaaaaggaatagaattatcgttctcgagatagtttttatacaatacatatatatatatatatatatatatttacaagaaaagcatggcttatgtattata

SEQ ID NO: 304 - DNA, 1054 bp, Saccharomyces cerevisiae
caagccagcacatcagctacagtggaaaatagcccagatcaaatagaactatccttcgaacatgagcggtgaattagcaaattacaaaagacttgagaaagtcggtgaaggtacatacggtgttgtttataaagcgttagacttaagacctggccaaggtcaaagagtagtcgcattgaagaaaataagactagagagtgaagacgagggtgttcccagtacagccatcagagaaatctcattattgaaggaattaaaagacgataatattgtcagattatacgatattgttcactctgatgcacacaagctatatcttgtttttgagttcctcgatttggacctgaaaagatatatggagggtattccaaaggaccaaccgttaggagctgatattgttaagaagtttatgatgcaactttgtaagggtattgcatactgccactcacaccgtattctgcatcgtgatttaaaaccgcagaacttattgattaacaaagatgggaatctaaaactaggtgattttggcttagcgcgtgcttttggtgttccgttgagagcttacacacatgaaattgttactctatggtatagagctccggaggtattactgggtggaaaacaatatagtacaggtgtcgatacatggtccatcggctgtatatttgccgaaatgtgtaacaggaaaccaatcttcagtggcgatagtgagatcgatcagattttcaagatattcagagtattgggaacgccgaatgaagctatatggccagatattgtctacttgcctgatttcaagccaagctttcctcaatggcgcagaaaagacctatcacaagtggtaccaagtctagatccacgcggtattgatttgttggacaaactcctcgcgtatgaccctattaaccggattagcgccagaagagcagccatccacccctacttccaagaatcataagcattataatctatttcgctattatattacaaatgctactgcactgtcattatagcctagtaaagtatatagtgaatacaatatactcagtttcaa

SEQ ID NO: 305 - DNA, 363 bp, Saccharomyces cerevisiae
atataatttcagcacagcattacatgcagaaatagcagggtgcagaggtcgaagtagatagaggacaacacctgcgatggccgtacagacaccaagacaaagactggctaatgccaagtttaacaagaataacgaaaagtatagaaaatacggtaagaagaaggagggcaaaactgagaaaaccgcacctgtgatatccaaaacttggttgggtattcttctgtttcttctcgtaggtggtggtgttttgcaactaatcagctatatcctatgaagcagtggcaaattgcatatataagtgtacagtggaagcaagtacgtaaataaataagcgatttcgaataataataacaacaagcataa

SEQ ID NO: 306 - DNA, 954 bp, Saccharomyces cerevisiae
tcgtgattttgtgcgaggaggcgatataagagctaaacagatttttttatattttaatcaaaaagctaataattatggcttactctttaacaaggaaattgctgaaggattggaaatattttatgcgccatcctgagaagacccaaggtctttttcatgtaaggccacatgattcagacttacatctttggcacgtggtaatgtacgagcccaggacttctttggaagtatatctactactttatattggcggaaacgaccaggatccatatatcatcatgaaatgtctgtctccaaattgttgctttccaattaacagaacggtttcgatgacacacttaaactatcttttattgaaagacttgggattacaggatttacttttccacatatggcaaccgctttttcatattcaagcaacggaagacttacagtattcaccgtcaacggtaaaattcaacagggcgtggaataggattatatataaggactttaaatcttattttccggaactgataggtactttacaaccaggtgattactctatagtaaagagctattccaaaaatcataatatcagcaatagtaatggtggcagtgtcaatgaatttatgtcctcttacaatgctcaaagccacacctttcacgcacaagacaacagcaagaacccttatactaacagcagcataggaaagtctagtatgttatctactctcaacaataataacgttaacaaaaggacacatgactacaatgctatcgactttatgaccaaaaacttacttgcatgtgatgatgacagtattcatccggtcgtaagttctaaaaggtcaagaacgttggcatgtccagatgaaacgaacgataatcgcggtagtgagcattacacaaagaggaaaaaaatctaatgggtttatttttacatagaatagtagaactttcttccttttttca

SEQ ID NO: 307 - DNA, 776 bp, Saccharomyces cerevisiae
gtacgcacaactacttgagtttgccaatatgtccgaatttaatgaaacaaaattctccaacaacgggacgttttttgaaacggaagagccaattgtggagacgaaatcaatctccgtttataccccactcatatatgtctttattctggtggtgtcccttgtgatgtttgcttcaagctacagaaagaagcaggccaaaaaaattagtgagcaaccatccatatttgacgaaaacgatgcccatgatctgtatttccaaataaaggaaatgagtgaaaatgaaaaaattcacgagaaggtgttgaaggccgctttattgaacagaggagcagaatctgttagacgatcattaaagttaaaagagttggctcctcagataaaccttctatataaaaatggctctattggggaggattactggaagagatttgaaactgaagttaaattaattgaattggaatttaaagatactttacaagaagctgaaagattgcaaccgggctgggttcaattgttcgttatggtttgtaaagaaatttgctttaatcaagctctctctagacgttatcaatcaatcttgaaacggaaagaagtgtgtattaaagagtgggagctgaaaataaataatgatggaagattagtcaattagtgcctactgtgtgcaaagatatgtattcgctcgttcagtgtttttttaaaaatatgtatagaatttgtcattatctgcgttaaaaaatagttataaagtatatacaataacaataaatgataaagaa

SEQ ID NO: 308 - DNA, 1008 bp, Saccharomyces cerevisiae
atgttccagtttgttactcctgtgggaacacagaatggattgaaagctacttgtgcgaaaatatctcctgatgggcagtttcttgctataacacaaggacttaacatcctgatatacgacattaacagacgaactgtatcacaaacactagtcacatcacatgccaggcctttctcagagttatgctggtctccagatggacagtgcatagctactgcatcggatgatttttctgtggaaatcattcatttatcttatgggctgctgcacacttttatcggccatacagcgccagtgatatctctgacattcaatagaaaggggaacttgctgtttacatcctcaatggacgaaagtatcaaaatatgggacacactgaacgggtctttgatgaaaacaatatctgcacactcagaagcagttgtgtcggtggacgtacccatgaatgattcatccattctgagttcaggttcatatgacgggctcatacggatctttgatgcagagacgggccattgtttgaagacattgacctatgacaaggattggaaaagagaaaatggtgtggtacccatctcccaagttaagttttctgagaatgcaagatatctcctggtgaaatcgctggacggtgtagtgaaaatatgggattgcatcgggggttgtgtagttcgtactttccaggttcagcctcttgaaaagggcgtactgcatcattcctgcggtatggacttcttaaatcctgaagatggatccactcctttggtgatcagcggttatgaaaatggcgatatatattgttggaattctgatacaaaaagcctcttacagttgctcgatggttctttatatcaccacagcagccctgtaatgagcatacattgcttcggtaatataatgtgttcccttgcattgaatggagattgctgtttatggagatgggtttaaagaatctgcgttatgtacacgacagacattcccttaaggtgtaacacaagagtatatata

SEQ ID NO: 309 - DNA, 1268 bp, Saccharomyces cerevisiae
aaaaaatatctgtctccggttatatatgtctaaatagaattcgggtagcattttatttttatcgcttataggaaaaagatatttgcatatatatatctatatatcctatatacatctatatagttattgtgtaaggggtttttataaggtccgatacttacagagattaatttgtaaataaaagcagaaatctttatttaagaaaatagaagattgatgggaatatttcgttggaactatccagagagttctgtccccggcgtttggggagaaacaacttccactattgactggtgtgaggagaactatgtcgtttctccctatattgccgagtggtcaaacactttaactaacagcgtattcatactgtcagcgatttacacaacttactctgcttacaagaataaattagaaaaaaggtttttacttattggcttcgggtacggtttggtcggagtaggatcatggctatttcatatgacactgaagtatagattccaactattggatgaacttccaatgatatacgccatgtgcattccgacatggagtttagtatgcgaggccaaagaggcattacttaacggagataatcacaagaaggttcctctatttgaacagatattcatcggcgtaattatcggcctggccgttacaacagcaagcatactctacgttatttacaaaaatgtcgatatccatcaaattttgtttggcgtacagattgtagttgtggctgctactgcaggaagtttgacgtacagatacgtccatgatccacttgccaaaagaaatctcaaggcttcaatggcgctcggcgcaattttgttcttatctggctacatttcgtggctacttgatatacactattgttcgttctgggtgcacgttagaagaagtattttggctttaccacttggtgtactgcttgaaccacacggatggtggcatatattaactggtatggggatttatttctacattgtttctttggaacatttaagggtcattacgctcaacgtcagctgcaattaccagttcatctggagatggaaagtcttccctgaactgatatggaaagggcgcaaaccctcaacaagatattcacttgaactatttggcccatacgtagaagatcaatcaattgaagttaaaaaggagaagtaataattatagcataatatatattcataatgtataggcatatttattttttattttttttatttcatgttctatttaatgacgaatcacgaagaaaatatatc

SEQ ID NO: 310 - DNA, 1047 bp, Saccharomyces cerevisiae
atgaaatccttattttagaatcaaaaagtcctacaatcttgtttgtggagtctatataaagctaaagttaggttctacaaagcaagatacaaatacgaggccatcgagtattcaatgggaaatatgataaagaaggcatctttaatagccctcctaccgctgttcaccgccgcagccgctgcagctactgatgcggagacatctatggaatctgggagttcttcacatttgaagtcttttttaatgtccgtttctatgattgggctttctgaaattggtgacaaaaccttcttgatcgcagccttgatggcaatgcgtcacaaaagagttctggtgttctcagcagcagctacctccctcgctattatgaccatcctttctggtgtggtgggtcattcagccgttgcttttctttctgaacgctatacagcattttttgcaggtattttattcttagtgttcggttacaaattgactatggaaggtttggagatgtctaaggatgcaggtgttgaggaggaaatggctgaagtggaggaagaaattgccattaaagacatgaaccaggatatggatgatgttgaaaaaggaggcgacactgcgtatgataaacagctgaagaacgcttcgattggtaaaaaaatagtgcacaggattcgcgaattagcatcatttatgttttccccagtttgggttcaaattttcctgatggttttcctaggcgagctaggtgaccgttcacaaattagtattattgccatggctactgacagcgactattggtatgttattgcaggtgctgttattggtcatgccatttgctctggattagcagtggtgggtgggaaattattggcaacaagaattagcataagaacaatcactcttgctagctcgttgttattcttcattttcgccttgatgtatatatatcaagcattcacaactcaggattgagatggtttgtaaccgtattcttcttggattctctcttttttctcttcatatttaagtgtgaatcttgaaaagaatatttatagacatacg

SEQ ID NO: 311 - DNA, 682 bp, Saccharomyces cerevisiae
aagacaactaagactaagcaacaatgccaagagctccaagaacttactctaagacttactctacaccaaagagaccttacgaatcttctcgtttggacgcagaattgaagttggccggtgaattcggtttgaagaacaagagagaaatttacagaatttctttccaattgtctaaaattcgtcgtgctgccagagacttgttaactagagacgaaaaggacccaaagagattgttcgaaggtaatgccttgatcagaagattggttagagttggtgtcttgtccgaagacaagaagaagttggattatgttttggctttgaaggttgaagatttcttggaaagaagattgcaaactcaagtctacaagttgggtttggccaagtctgtccaccacgccagagttttaatcactcaaagacacattgctgttggtaagcaaatcgtcaacatcccatctttcatggtcagattggactctgaaaagcacattgacttcgctccaacttctccattcggtggtgctagaccaggtagagttgctagaagaaacgctgctagaaaggctgaagcttccggtgaagctgctgaagaagccgaagacgaagaataaataattcgctgatttcataactgtataataaattttataacttttcaaatcacggatcatttttcatttta

SEQ ID NO: 312 - DNA, 510 bp, Saccharomyces cerevisiae
atgggtaaatcacacggttacagatctcgtactcgttacatgttccaacgtgacttcagaaagcatggtgccgtccatctttctacttacttgaaggtctacaaggttggtgacattgtcgacatcaaagccaatggttctatccaaaagggtatgccacacaagttttaccaaggtaagaccggtgttgtctacaacgttactaagtcttctgttggtgttatcatcaacaagatggtcggtaacagatatctagaaaaaagattaaacttaagagttgaacacatcaagcactccaagtgtagacaagaatttttggaaagagttaaggccaatgctgctaagcgtgctgaagctaaggctcaaggtgttgctgttcaattgaagagacaaccagctcaaccaagagaatcccgtatcgtttctactgaaggtaacgttcctcaaactttggccccagttccatacgaaactttcatctaatttacccgatgctggttttgtatcgaa

SEQ ID NO: 313 - DNA, 1599 bp, Saccharomyces cerevisiae
taatatacaataggccgttacagcagaacacaatttttagtttagacccaacaaggtgaaccatacgaactgatatgaggtttctttcaaaaaggatactgaaacctgtactttcagtgatcattctaatatcgattgccgtaaccgttgttctttactttttaacggcgaatgagaactatttgcaagcagtcaaggatagtgccaagtcccagtatgcttctctccgggagagctacaaaagtattacaggtaaaactgaaagcgctgatgaacttcctgatcatgatgctgaggtgttagatagcataatggacaggctacacgagcccctttatgaaaaggacacttttgacccgaatgaagtccttgctgaaaataaacagttgtacgaggagtttttacttcaagaaatttctgagccaaaggtggacaatttggtacgtagcggggatccgttagccggcaaggcaaaaggaactattttgagtttggtgagaaattctgatttagaggatataatttcttctattcaacagctagaagaggagtacaataagaattttggatatccctataccttccttaacgatgaggaatttactgacgaattcaaagatggaataaaaagtattcttcctaaggaccgtgtagtagaatttggcactattggtccagataactggaatatgcctgatagcatagatagggagagatacgaccaagaaatggacaaaatgagtaaagagaacattcagtatgcagaggtggaatcctatcataacatgtgtcgtttctattctaaagaattttaccatcatcctctgctatctaaatataaatatgtgtggagattagagccaaacgtgaatttctattgcaaaattaactatgacgttttccaatttatgaacaagaatgacaagatttatgggtttgttttgaacctctatgatagtccgcaaaccatcgaaacgctatggacttcaactatggattttgtcgaggaacacccaaactatttgaacgtcaacggagccttcgcatggctaaaagataactctcaaaatccaaaaaattatgattatactcaagggtattcaacttgtcatttctggaccaattttgaaatagtcgatttagactttttgaggtcagaaccttatgaaaaatatatgcaatatcttgaagaaaagggaggattctactatgaaaggtggggtgatgcccctgtaagaagtttggcacttgctttatttgcggataagtcaagcatccattggttcagggatataggttatcaccatactccgtacacgaactgtccaacttgtccagcagattcagataggtgtaatggaaattgtgtaccaggcaaattcactccttggagtgatctagacaaccaaaattgccaggcaacctggataagacactctatgtctgaggaagagttagaaatgtattgaagacattagctttgagaatttgtgccgctgctttcgagaacggcatcacatctggggttttatgatttaatttaggacgcacatagatagatatatattatggaattaagaaaagtttataatgtagcaa

SEQ ID NO: 314 - DNA, 1926 bp, Saccharomyces cerevisiae
ggatgcacgttgaaagcactgtgtgaaaagaaattgtcaagaaagccatataaatgctgaaaaacttcaaactctcaaaaagagatagtaatgggtcgaagggcagaattacatccgcagatatttccacaccttctcatgataatgggagtgttataaagcatattaagacagtaccagtgaggtacctttcttcatcttccaccccagtgaaaagccaacgggactcttcaccaaaaaacagacataattctaaagatattacttctccagagaaagttataaaagccaaatacagttatcaggcacaaacttcaaaggaactatctttcatggaaggtgaatttttttatgtatctggagatgagaaggattggtataaagcttcaaatccttctactggaaaagagggtgttgtccccaaaacctattttgaagtgtttgatagaactaaaccttcctctgtgaatggatccaatagttcaagtcggaaggttacaaatgattcattaaacatgggatcgttatacgccattgttttatatgactttaaggcagaaaaagctgatgagttgacaacttatgtgggagagaatttgtttatttgcgcccaccataactgtgaatggttcattgctaagccaattggtcgacttggagggcccggccttgttcctgttgggtttgttagcatcatagatattgccacggggtacgcaacaggtaacgacgtaatagaagacatcaagtcagttaacctaccaactgttcaagaatggaaaagcaacattgcaagatacaaagctagtaatattagccttggttctgtggagcagcagcagcagcaatccattacaaaacctcagaacaaaagcgcaaagctggttgacggtgaattattagtgaaagcatccgttgaatcctttgggttagaagatgagaagtattggtttttggtttgctgtgaattatctaacggtaagacgaggcaactgaaaagatactatcaagatttctacgatctgcaggttcaacttttggatgcgttcccagcagaggccggtaagttgagggatgcaggtggacaatggtccaaacgtataatgccctatatccctggacccgttccatacgttaccaatagcataacaaaaaaaagaaaggaggacttgaatatatatgtggcagacctagtgaatcttcccgattatatatctcgctcagaaatggtgcattccttattcgttgttttgaataatggtttcgacagagaatttgaaagagacgaaaatcaaaacaatattaaaacattacaagaaaacgatacagcaacctttgcaacagcatctcaaacttctaattttgcctcaactaaccaagacaacactttaactggcgaagacttgaagttaaacaagaaactctcagatttatctttatcgggctccaagcaggctccagcccaatcaacttctggattgaaaactactaaaattaaattttattacaaagacgatatttttgctttaatgctgaagggtgacacaacctataaagaacttcgtagtaaaatcgctccaaggattgatacagataattttaaattacaaaccaaattatttgatggtagcggggaggaaattaagactgattcacaagtcagtaacataatccaagccaaactgaaaatttccgttcacgatatttgaatctagtgttagaagacgaagcatttttcttctttacttggcagatgcacataggttgaacattttaatcaactttatgatgatttgcgagagtaataagattctcccgaacagtaataatattaaggtatccaattcttccgaaacagcgtgatttgtaataaaaataaataaggacatatatgtatatagaaagttgcttaaactttttagacca

SEQ ID NO: 315 - DNA, 2778 bp, Saccharomyces cerevisiae
tttagaaaggcaatataatcactacctagattagcttgaatcttgcaggaagaactcaatacagatagaccagattatgagtgcggcacttccatcaattcagcttcctgtcgactataataatctttttaatgaaatcaccgattttttggtgactttcaagcaggatacgttgtcttctgatgcaacacgaaatgagaacgaagatgaaaatttggatgctgagaatatcgaacaacatctattggaaaaggggcccaagtacatggcgatgctacagaaagtggctaatagggaactgaattccgtgattattgatttagatgacattctacagtatcaaaacgaaaagtttctccagggcacacaggcagacgaccttgtgtctgccattcaacaaaacgctaatcacttcactgaattattttgccgtgccattgacaacaacatgccgctaccaacaaaagaaattgactacaaggacgacgttcttgatgttattttaaaccaaaggagactgaggaatgagagaatgctctcggacaggaccaatgagatccgaagcgaaaacctcatggataccacgatggatccaccctcttccatgaatgatgcgttaagagaagttgtcgaggatgaaactgagttatttcctcctaatttaactagacgctatttcctttattttaagcctctatcgcaaaattgtgctcgtcgttacaggaagaaagcaattagttctaaaccattatctgttaggcagattaaaggtgacttcctaggccaattgattaccgtcagaggtattatcaccagagtttctgatgtcaaaccagctgtggaagttatcgcatatacctgcgatcaatgtgggtacgaagttttccaagaggtcaactctcgtacttttactccgttgtcagaatgtacttccgaagaatgttcccaaaatcaaacaaagggtcaattgtttatgagtacacgagcttccaaatttagtgcctttcaggaatgtaaaattcaggagttatcacaacaagtgccagtgggtcatattcctaggtcgctaaatatccacgttaacgggacgctggtaagatctttatcgcctggtgatatcgtcgatgtaactggtatattcttgccagcgccctacaccggtttcaaagctttgaaagctggcttactgacagaaacttatttagaggcacagtttgtccgtcaacacaagaagaaatttgcgtctttcagtctgacttctgatgtagaagagagagttatggaattaatcacctctggtgatgtttataataggctggcaaaatctattgcaccggaaatctacggtaacttggacgtaaagaaagcgttgctgctattacttgtcggaggtgttgataaaagggtaggtgacggtatgaaaatcagaggtgatatcaatgtttgtctgatgggtgatcccggtgttgccaaatctcaactgctgaaggccatttgcaaaatatcacctcgaggagtgtataccactggtaagggttcctcaggcgttggtctgaccgctgccgtcatgaaagatcctgtcacggatgaaatgattctagaaggtggtgccttagtactcgctgataacggtatttgttgtatcgatgaatttgataagatggatgaaagtgacagaacggcaatccatgaagttatggaacaacaaacaatttcgatatccaaggcggttatcaatacaaatccgggcgccagaacctcaatcttagcggcagcaaatccgttgtatggtagaattaatcctagattatcacctctggacaatataaatctaccagctgctttactatccagatttgatattctcttcttaatgttagatataccaagtagagatgacgacgaaaaattagccgagcacgttacatatgtgcatatgcataataaacaaccggatttggacttcactccagtagaaccctctaaaatgagagagtacattgcctatgctaagacaaagaggccagtgatgagtgaagctgtaaacgattatgtggtgcaagcttacatcagattaagacaagactccaagagagaaatggattccaaattttcctttggtcaagccactccgagaactttactaggtattataagattatctcaagcgctagcaaagttaaggttggctgatatggtggatatagatgatgtggaggaagccttgaggttggtccgagtctccaaggaatcattgtatcaagaaaccaacaaatctaaagaagatgaaagccccacaacgaaaatctttacgatcatcaagaaaatgttacaagaaactggtaaaaacacgctatcatatgaaaatattgtgaaaactgtaagactaagagggtttaccatgctacaattaagcaactgtatccaagaatattcttacttaaacgtctggcatttaattaatgagggtaacactttgaaattcgtggatgacggtaccatggacacagaccaggaagactcactagtgagcacgcctaaactcgcaccacaaacgaccgcttccgctaatgtgagcgcccaagattctgatatcgatctacaagacgcttgaaagttctaaaaaaaaaagcaacagggccttcattctttattctttttccccctttttttcatttccatatagctgcacattcaaatttaccttctgtaacttacttccaaggcccagttttcaagatatgtattctgtattattataattttactaatattatt

SEQ ID NO: 316 - DNA, 1215 bp, Saccharomyces cerevisiae
atgtctgtgcaccacaaaaagaagctaatgcccaaatcggcattgctgattagaaaataccaaaagggaatcagatcatcattcattgggctcatcatagtgttatcctttttatttttcatgagtggctcaaggtccccagaggtaccaatagctcagggcaccagtgtcagtcgtgtagccagtaaggattatttgatgccgtttactgacaagtcacaaggagtaatccatcccgtggacgatggaaagaaggaaaagggtgttatggtcacattggccaggaattcagatttatggaacttggtaaaatctattagacatgttgaagacaggttcaataacagatatcactacgattgggtgttcttgaatgaccaaccatttagtgatgagtttaaacgtgttaccagtgcattggtttcaggcaaggcaaaatatgggacaatcccaaaggaccattggtccattccatcttggatcgatactgaaaaattcgatgagaaaaggcttgcaatgggaaaattggatattccatatggtagttccgtgccttaccgtcacatgtgccgtttccagtcagggttcatatggagacacccactactggaggagtacgaatggttttggagagtggataccgatatcactttattctgtgatattcagtatgacatattcaagtttttaaaagtaaataacaagaaatatggattcattctttcggtaagtgaatatgagcgcacaatcccaaccttgtgggaaacgacaaagaaattcatcaagaaaaatcctaaattcttacacaaaaataacctcatgaaattcatttcgaatgatgatggtgacacttataatatgtgtcatttctggaccaacttcgaaatcggctctttagacttcttcaggtccgatgcatacagagaatactttgattacttagacagttctggtggattcttctacgaaagatggggggatgcgccagtgcactccatcgctgcctctttgttcttggacaagtcagaaatccatttctttgacggtcttggattccatcatccagatttcacctcttgtcctatcgaacagaagattagactacaaaacaagtgtatctgcgaacctagcaaggacgtcacctggactcctgactacttctgtactagaaagtacttttcagcaggaaattacaagcttccaccaggaatttaa

SEQ ID NO: 317 - DNA, 1550 bp, Saccharomyces cerevisiae
agaactagagtggtgttcatatttctagtcaccatggcgtttgaggattatttttctttccagatattcttcattttcttaaggaaatccttagaaattgttgtcattgtttctatcctgttgacgatcgtcaaacaagatctgtctgttgaggacgacagcccgtttgaaggaagttcctcttctgctggtcttccaagtccaaatacgaacacaaacgcagattcgaccactgccttcttacaagcagggccttcagacggtaatgctattggaacgtccgctacggctgctaataataaatcgaggccgctaaatgtggaggaagaagaagaaatttacgagtactctaatgagcttagagaccaggaccgcgagtccgatgaacatacggctgacaacgttaagctatatcagaaattaaaaatacaaattctagcgggcggcgcatttggtttgttgctgtgtatgttaatcgggggtgcgtttgttagtatcttttatcatattggaaccgacttatggacactgagtgaacattattatgaaggtgtcttaagtcttgtcgcgtccgttattatttctgtcatggggttgttttttttaagaatggggaagttaagagagaagttcagagtgaaattagcttctatcatttattcaaaggacaataatttgctgggaaacaaaacccaaaaaggtgtgaaattcagtcaaaagtactccttcttcatattaccatttataacgactttgagagaagggttagaagctgtgtattcaattggaggtatcggtattgaccaaccactatcctcgattcccctctctatggtccttgctactgcaatcagtacggtgttcggtatttttttcttcaggtactcaagttctctttcacttaagatatgccttgtagtcgccacctgcttcctctacttgatcgcggctggtttgttttccaaaggtgtatggcaacttgaattgcaagactacgtcaacaaatgtaacggtcaagacatgagtgaagtagaaaatggacccggttcgtacgacatatctcgttctgtttggcatgttaattgttgcaatggtgaaaaagatggaggttggatgatttttactgccatttttggttggacgaatagtgctaccgtcggctctgtaattagctacaacgcctactggttggtattaaaatacgctttgaagcttctaatgatagaaggaaaatgcggatatatcccatatctacctattagctggcaaaagaaacgtattatgaaaagattaagcattgccaaggcatcgctcgatctcaaacatcatacttctgaactcaactctagcacatcagagccagacagtcaaagacggtccaaagatagttctgtgcccctaataattgatagcagtggttcagcaaattgagaacataacaaacacacgtaataattttaagcttcttttcatacattttacagtaaatactatgtacatatatattcgtcattaaaaatagctagaaaaaggcatgctataaagactaa

SEQ ID NO: 318 - DNA, 672 bp, Saccharomyces cerevisiae
ccaagaagttcgaagccaagagtaaagatgtcaggaaccggattatcgctattcgtgacgggtcttatactgaattgtttgaattccatttgccagatatactttactatattatatggtgatcttgaagcagactatatcaactcaatcgaactgtgtaagagggtgaataggttgagtgtaccagaggcaattctacaagctttcatttctgcattgtttctttttaacgggtactggttcgtatttctcttgaatgtccctgttctagcatataacgcaagtaaagtctacaagaaaacacatctactggacgccacggatattttcagaaaattgggtagatgcaaaattgaatgctttttaaaattgggattttaccttctcatattctttttctacttctacagaatggtcacagcgttacttgaaaatgatgcaaatttgataagctaatagcgacaacaggaaaaaaaaagagagatttgtgcatatctatgaagtatgtctaccacataaaaatgaccttataacacaacttccttagtatggaagtaatacatatatacatatatacatatatacatacatatatatatatatatatatatatatacatcttttgaaccaattccctatagacttggttgtaattcgttagaaagattttca

SEQ ID NO: 319 - DNA, 2392 bp, Saccharomyces cerevisiae
acatagacgcagtcgacaaagaagcaataaaagagattaccattcttattcactatttttttttttctctgactcttcatagttgtacggaaaaccatctgcgtgttatatcctagttccaaatattctgatttctcgtgatcgaatctgttatattgtcatatattgtaattccatttttttcccggttcattttttgatattctcttcctgttccaatattaataaaggaggcttttttctttccctttcgttctgatttatattgtttttactattattggatcttttaaatattacagctttttcatatccttcgccatcgatttttgcctgaaaaatttacacaaatgatgtctaacgttgctaacgcctcccaaagacaggaaaatccatatattattccattgcctccttcatccacagtggaaacttctactgaacccccaagaacgttatggatgggagatttggatccgtccttcgacgaggccacgattgaggagatatggtcaaaactggataaaaaagttatcgttaaactaattagagccaaaaaaaatttgttgattccttgtagctccacctcaagtagtaataacaacacaagtgaggagaatgctgaaaaccagcaatctgcatcaaacagcactgatcagttagataattcccaaatgattaatattaatggaatatccttcattgatccttccactactcaattacatcatgccggatactgttttgtcgaatttgaaactcaaaaggacgctaaatttgccctgtcattaaatgctacacctttacctaatttttattccccaacaactaactcccaaactaatccaacgttcaaaaggactttcagattgaattgggcgtctggagctactttacaaagttctataccatctaccccagaattttccttgtttgttggtgatctttctcccaccgccactgaagctgatttgttatctcttttccaaacgaggttcaaatctgttaaaaccgtccgcgtgatgactgaccctttaacaggatcatctcgttgttttggatttgtcagattcggtgatgaagatgagcgccgcagggcactgattgagatgagtgggaaatggtttcaaggaagggccttaagagtcgcttatgccacgccaagaaataatatgatgctgcagttacaggaacaacaacaacagcaacaacaattgcagcaacagcatcagcagctagatcaggaggataataatggccctctcttgattaagactgcaaataatctcattcaaaacaatagcaacatgcttcctctcaatgccttgcataacgcgcctccaatgcatttgaatgagggcggcatttcaaacatgcgtgtaaatgattcactaccttcaaacacctataatacagaccccactaatactactgtttttgtgggaggactggtaccaaaaactaccgaatttcaattacgttcactattcaaaccctttggacccattctaaatgtcaggattcccaatggtaaaaactgtgggtttgttaaattcgagaagaggattgatgctgaagcttcaatacaaggcctgcaaggctttattgtgggcggcagtccaataagattatcatggggacgcccatccagttcaaatgctaaaacaaattcgaccatcatgggggcaagccaatatatgtcctcaaatggcctgagagcgccatctgcggcttcttcagtcgataactccaaacaaattcttgaacaatatgcggaagataaaaggcgactctttttacatcagcagcagcagcagcagcagcagcagcaacaggatggtaacttttctatggagcaaatggcgcacaacaactattacaactacaataattacgattatcacaggaacaagaatggcagccatagcgacctcgttaatctgcagagatctaatgtcccgtatatgcaagaagacggtgcactgtacccacaccaatattcaagtccctcatactcgctccatccgacgggcaaccaattctccaatgctactaataacttacctcaatttgggaacgcgatgtcaatttctatgcaactgcccaatggcaacagcaataaaacggcctcaagcatgaacacaaaccctaacacaaacatgatcatgaattctaacatgaacatgaacatgaacgtaaatccagtaccatacggaatgggaaacggtgcaaatatgtatgacgtgtccaggatgatgactcctcccttaaatatagccccgaattccaataattcgaaatcgagcatcatgaacaagcatcctaataggaacaatgttccgccaattcatccttctcttctacattgattacaaaagacaaaaaaagaaaa

SEQ ID NO: 320 - DNA, 1848 bp, Saccharomyces cerevisiae
ttatcaggcaagatcaggcacacaacccaactataataactataaacacttatagaacaattaccgtttcttccttcacacaacatggcttctacttcgaacacgttccctccaagccaaagcaattcttccaacaaccttccaacttctagacatgcatccattgtggagatgctgtctactccgccattgctgccccacgttcaagtgaacgatacagacgacaaggaacaaccagaagagtccacgccgccaacagcaacagcggcagcgcctggtccaggttgtgctgctacacccgcccccttgcgcgatgaaaagcctcaattcaaactatcagctgttcctatgacccagacgccatcgcagtgtctgtcatgtgtgcacgcccaaaaatggcaacacataccgttgtcgcaattgatcgaacagaataagcttatttttgttccaggttccatatcggtagaggaggcattcaacactttgatcaagtatcatctaaactctattcccgtggaatctttccccggcgacatgaactgttttactttcgactacaatgaccttaattcgtaccttttgctggttttgaataaaatcaccgtcagcaacaaacagcttactgcagattgccagaatggaaaacccgtaccagtgggcgaaatggtgaaactaactcctaagaatccgttctataagctgccggagaatgagagtttgtccacggtgatggggattctcggttcgggtgtccatcgtgtagcgataacaaacgaagagatgaccaaagttaaaggtattttgtcccaacgtcgtttgataaagtatctttgggacaacgctagatcttttacaagcttagaacctctattaaactcctcattacaagatttgcacatcggtgttctcaatattcaatctaagccaacttcaagacaatcccgtgtcatctctattcaaggcgaggagcccttaatcatgggcctttataaaatgcatgtggaaagaatttcttccattgcagtcatcgacaaacaaggtaatttgctaggtaacatatcggtaacggacgtaaaacatgtcacaagaacctcccaataccccttactacataagacatgtcgccatttcatttctgtcattttaaactccagaggattagaaacgggtaaagattctttccccatttttcacgtataccccagtagttcactagcaaggactcttgccaagttagttgctacaaagtctcatagactatggatcgtacaaccgccggagtcgtcaacctcggcgtcatccacaaatttaacagctgctaatactgcagccaatgcagtttctgccaccgctcaatcgtctgctaatggtgcgactccaatgtcaaagtcatcctcttcaacatccctcaactcccactctccgttgatgacagcaatggaagacccaccatccccacgttcttcggccatcgcgatcccaccaccaagtcccgcttcctcaacaaacacaccaaacctattcgaaaaggaatatagaacgggtaagttgatcggtgtggtctcattgacagacatcatcaacttattagcaaggaaacaaacagggaataaagaagtggatccgcaatccgcaagaagacagagaggcagtatcgccatgtgaggcttgcagcgttgtcttttcccgctgtttccctctccctcaaaaaaaaaaatcttttacaatgactaaaagaaaatattgttcatttatatggttttaagtattttgtagacatttaagcgtatatacttgttctgaaaacatttatatattctattttgtatattcaacttattaaac

SEQ ID NO: 321 - DNA, 383 bp, Saccharomyces cerevisiae
aagcaacaaaggaaaaggaaacaagtaaaaaaaaaaaaagagactagcatgagaaacgaattataccagttatggtgtgtggcgagtgcagcaagaggggtagccaagagctcattcgtaagggccaattcggccatgtgtgagtacgtgcgcacgtccaacgtcttgagtcgctggactcgggacaggcaatgggaagcagctaaggccctatcacaacgggtcaagaaagagtatgccgccaattagtgcacacacatacatatattttatatacttacatatttggttgcgtggtatatagaatctctcctttcgcttcatgaatgaactcattcatgcgaagtcaaaggaaaaaaaaaataaaaaaataaaagagcgaa

SEQ ID NO: 322 - DNA, 560 bp, Saccharomyces cerevisiae
aaagtcgctgtgaaacatacacggcgttgtagtcacagtatggaacacaatctttcacctttacagcaagaagtattggacaaatacaaacagctttctttagatctaaaagctctggatgaaactataaaagaactaaactattcgcaacacaggcaacagcattcacagcaagaaactgtatcgccagatgagatactacaggagatgagggacatagaggtcaaaattggtttagttgggacactgctaaaaggtagcgtgtactcgcttatcttgcaaagaaagcaagaacaggagtctttgggtagcaattctaaataatggtttggtgcaagaaattgattctgatgctttattttttacggtacactacattgtgctgtgagttgtaataatatagtctgtatatgccaagtgaagaaaaaaacaatacaaactcaaggtgtattatgaggtagggaatacacataacaatatatatatatacgtatgtatatttaaattgtataaatgacgatcttaccgtctaacccacaggaagagacttgtgtgatttg

SEQ ID NO: 323 - DNA, 3525 bp, Saccharomyces cerevisiae
agtgatagagacagtgtttttgccagccaattctctttaagaataggcctttcttgtaggattaatggttagtaggttttatcagattccaggtacgcatcggccatcgtcggcaatatcttcttcaaatgaatcttcttcactgttgtctgcaaggagaataagtcaaacatatttcaattatcaggcgacccctgaatgccaaaaagtttcctctaagtatgatcctgataacccaaacaaagataagttgggaacatacgatggggtatttgtgcctactgctttaaacgtattgtctatccttatgtttcttcgttttggcttcattttgggtcagttaggtattatatgcaccatcggtcttctgctattgagttacactattaatcttctcaccacgttaagtatatctgctatatctacaaacgggactgttaggggcgggggtgcttattatatgatttcaagaagtttaggacctgaatttggtggatccattgggcttgtctttttcttagggcaggtgttcaatgcaggtatgaacgcagtgggtattatcgaacctttactctataacttgggttattctgctcaaggcgagccacctgcagctttgggagagctactaccaagagggcattggcacgaatttacatatgccacggtcattcttttcttatgtttttctgtggcttttgttggctcgcaaacagtgtcaagagcagggaatattctttttttggtactggcagcttctatattttccattccactttctgcattgataagatcgccattcactgaaggcggtatcagttatacaggtccttcatggcaaacttttcatgataacctgctccctcacttaacaaaaggtgcagcaggttcgttactcaaaggtaaggaaacattcaatgatttatttggcgttttttttcctgctacagctggtatattcgcgggcgcaggaatgtcaagtgaattgagaaagccctctaaatcaattcctaagggtaccttatggggtttacttttcacttttatctgttatgccgttgttgtcttctccatgggttgttccattcccagaagatcgttatatgatgaagtacaaattatacagacgatcagttccgttcagtgggttatattcatgggtgaaatggctacttctcttttctccatcatagtggggatgctcggtgctgcttatgtattagaagcaattgcaaaggataacattattcctggtttggagatttttgctcattcaccgttatattcattgatttttacttggattctaacacagctatgtttgttttcagacgtcaataaaatcgccacatttatcacaatgacattcttaatgacgtttgtggtcatgaatttggcgtgcttcctattaggtatttcctctgctcccaatttcaggccctctttcaaatactttaacaggtatactacagcaattggcgcattactttctgttgttgcgatgttaatagttgatggcatctcagcgtctgtcttgtttttggctatgattttgctatttttattcattcattatttttcaccaccgaagtcttggggtgatgtgtctcaaagtttaatatatcatcaagtgagaaagtatttgcttcgcctacgtcaagacaatattaaatactggaggcctcaaatattgctgtttgtagataatccaaggacgagctggaacttaataaggttttgcaatcatttgaaaaaaggtggtttgtatattttaggccatgttgcagtaactgcggattttccgaagcaactaaatgaattaaaaactcagcagaaagcttggatgaagatcagagacatggcagcaataaaggcttttgtccaagttgggactggtccctcccttatatggggaattaggaatgtttttattggttccgggcttggaggtatgaaaccaaacattactgttgtcggtttttttgacctcgaaagttatagaaagcacatcccacaaagtcgcagccaaaataaccttcagaaacaggtggaaataaaagctacagtgccacgtagtacatgctctgatgtcaaaatcaatgttccattgcctacggatgagtgtaaaaatgaaaccaaagttaatgtacaacaatgggttcaaattgtagaagatctatcactgatgcaatccaatattgccatagcgcatggattcaaaaatttagagataccgaacaaaagggacagctgctttccaaaaaaaactatagatctttatcccatccaaatgtgcggaaaagttgaggcaaagggtgaccagcctgcggctatcactactaactttgatacgtatacactgattctacaattagctgccattttggttactgttcctgaatggaagcgcacacattcgcttcgagttattttatttgtggaacaagaatatcatagaacgaacgaaactcaacgaatgaaaaagctattacaggttctaagaattgacgcagaggttttggtagtatctttagatcaattcagagtatacaacacaattgtcaagggagacccaatcgtgtttgattatgtcaactcgaaattggccgataatgaatggtggaaagatttggttgaagctcgtgatacattaaaaccgaagcggaggttttccactattgaacctcaaacgatagcaaagcaatttacacaatcaagaaaatatacgtctggggttcagaaattgggtgtctcatttacaatgaatacgagaatgccaactaaccgcattgataccccatgcgagagtgaggactccgatttggatacagatcttacgtcaattcgtgatgccttctcggcatcgactaatatttcagtaggtaaggacttaacgaccaaatcgaagaccggttccgacagaacaaatttactcgtaaagaatttacaaagcgatgtgtcaacacagtcgttaagacccgttttctcgagtaatactttgccgaggacgagagtcgtggaagatggcacgggtgaacagccgacactgatcccaattgccgaacctgacctttcgaatgggaacggtactgggagcggtattggcaacggcaacaaattaaagaaaccggttcttcccgaattatcaccttgttgttcaaaagatagtttagtcacagcgatgcaaaatttaggtttcaatgatcttcccagcactgctcaacatttggttctgaatgatgtgatgacacaaatgtcaaagagttcggatttaattttttcaaccttgccagttccagctcttggaacacatgaagatcacgatgcaagtttacaatatgtcgaggacttggatatttggttggagggcttacctccatgcatgttaatcaattcgcaaaccatgacagtaactactgcattatagaataacacatatatcgttatgcatttccccagaacttatttactacatatagaagtcttgtaatacggccgaaatacagatgctttatagtagggtta

SEQ ID NO: 324 - DNA, 932 bp, Saccharomyces cerevisiae
ataattagactgttttactctgtccattggtcattataaagcctgaaaatacccactgaatggtttttttcgcaggagcaaaccttttccatttctaataaaccttctgcactatttttattctcataaaaaacaattgtcaaagaaagcctacataaaaaaaatatgacagcaacgatcacaaataagaaatcatgctctggttctgttgaggcaggaaagacacgtttaacaactgaatggaagcctgaaagccaagtaccccaatatgttaaaaatgagctctctaaaccccatccaaactatatcctggcgtttttgaacgtggtacagcaattaaaaattcagagaagaaccggttatcttgacctcggtattaaagaatgtgaaagcatatcagatcacatgtacagattgagcataatcaccatgctgatcaaggattcgcgggttaaccgcgataaatgtgtccggatcgcattggtgcacgatatcgccgaatctttagttggcgatattactccagttgaccctattgggaaggaagaaaagcatcgtcgggaatgggaaaccataaaatatctatgtaatgctctgatcaagccatacaatgagatcgcggcaaaggaaattatggacgattggttggcttatgaaaatgtcacctcattggaagctagatacgtgaaagatatcgataaatatgaaatgcttgtacaatgttttgagtacgagagggaatacaaaggaacgaaaaacttcgatgatttctttggggctgtagctagcataaaaacagacgaagtaaagggctggacaagtgaccttgtcgtgcagcgccaaaaatacttcgccgatttgactcaatcgataactaaataattatcataaataccaacttttgcgtcataaaagtacaaagtaactaccaa

SEQ ID NO: 325 - DNA, 649 bp, Saccharomyces cerevisiae
acaagaatacaattagcaacaaaaagtaataattcaaaatgaccacatctttttatgatttagaatgcaaggacaagaaaggcgaatcttttaagtttgaccaactgaaaggcaaagtagttctcatagttaatgttgcctccaagtgcggcttcacgccgcagtataaagaattggaagaactatacaaaaaatatcaagataaggggtttgttattttggggttcccatgtaatcagttcgggaagcaggaaccgggctctgatgaacaaattacggaattttgccagttgaattatggcgttacattcccaattatgaagaagattgatgttaacggaagtaatgctgactctgtctataattatttgaaaagccaaaaagcaggtttactaggtttcaagggtatcaaatggaattttgaaaagttcttagttgattccaatggtaaggttgtccaaagattttcctccttaacaaaaccatcgtccttggaccaagaaatccaaagcctgttaagtaaatgatatctttgtctataatcaagcaattatccggaacaataaataatacatttatagattagtatgattatatatttttcttcagaagcatggtgtaggatatattaaaaaaaatcgaaatataa

SEQ ID NO: 326 - DNA, 1295 bp, Saccharomyces cerevisiae
acatccacctctagctggtttttgcatagctatacatatggactctattcaagaatcagatgtactaaatgcagtgaaaacaaaactaccgccgtgttgtttgagaatattcaggaataagatcatccttgttgggacgtatgatttagataagtcaactggatacaggtcaggctcactggatgtcttcacaatggacctcaaacttttatgttcgaataatacgtatggcgcaatcctagatttgaagttatccccctttgatgatacattgatatgcacggcccattcgacaggtaatatcatgctatggaggatacggtgcacagataaggatgatttccaatcaaacgaactagatattcatgcaattgcaaatctacaactctttgaaaaagatgttctcattgcctcgtgccatttttccccacttgattgtaagaaattacttgtaacaaatacggcaggcgaagcagctaccattgatataagaacactatctgtacagttcacggcatcagcaatcgcgcaggcttactcaaaactagataaaatagattacgaagttcaaggtgcaaccgaaaaagtcattcatgttgaatcgggacaatttttgaaaccccatgaactcgagtgttggactgcggaatttggatctctacagccttttcaagacgttgtatttacaggaggtgatgattcgagaattatggcccacgacttacgttccaaagaattcatttggagtaataatcgtattcatgatgctggtgttgttagcattaagtgtagtcaacctaactttcgaaataataaacccacgtccataataactggatcctatgatgataacattcgttctctggatttaaggatgatgggtgagtccatatttcctggtgcaaatgtccccacagttaataaattggcgtgtgatcttggtggcggtgtttggagatttgttgaatcccccattgatcaggaacaatctcaccacaacggctccgatcggcttttagtttgttgcatgtacaatggtgccaaggtggtgaccatgaatgataattccgatgagtattttcaaattcaacattatctgaagaagggccatgattcgatgtgttacggtggcgactggtcaaattctttgatcgcaacatgctcattttatgataattccttgcaaacatggatagtttagaaaaaaaaattcagtctgcaatatatggactaatatataggctaatatataggctaatatataggctaatatataggccatattttgatgattt

SEQ ID NO: 327 - DNA, 1044 bp, Saccharomyces cerevisiae
aaccatacaagaaacagatttcatagatcaataggtaaagatgttcaagaggcaattatcgactagtgttcgttatctacagcattatgatgagtcgctattatcaaggtactatcctgaaagtcttttaaaatccataaaacttgctcaacaaacgataccagaagatactaaattcagagtatctcgtaacgtggaattcgcaccaccatatttggatgattttaccaaaatacatcctttttgggattacaaaccaggcatgccccatctccacgctcaagaggagaataataacttcagcatctttagatgggaccaggtacaacaaccattaccaggcgaaggtaacattctgcctccaggagtcagcttaccaaacgatggtggtcggaaatcgaaaagcgccgatgtagctgcagggctacacaagcaaaccggtgtagatccggattatatcactagaaagttgactatgaagccgctggtgatgaaaagagtgtcaaatcagactgggaagggtaaaattgcgtctttctatgccttggttgtcgttggtgacaaaaacggtatggtaggtttgggagaaggtaaatctcgtgaagaaatgtccaaagcgatctttaaagctcattgggatgcggtaaggaacctgaaggaaatacctaggtatgaaaacagaactatttatggtgatatagattttaggtatcatggtgtgaaactacatttaagaagtgcaaaaccagggtttggattacgtgtaaaccatgtaatctttgagatttgtgaatgtgcaggtatcaaagatctgagtgggaaagtatataaatccagaaacgatatgaatatagctaaaggtaccatcgaggctttcacgaaagctcaaaagacattggatgaggttgccctgggtagaggcaaaaagcttgttgatgtcaggaaagtttactattcaagctgaaatactatgtacatacacacgcaccattatctctcgttttacataagtaaatacagcaataataatacctgtaaatatct

SEQ ID NO: 328 - DNA, 522 bp, Saccharomyces cerevisiae
caaaaaataaccaaatgactgctactagcgacaaagtactaaagattcaattgcgctcagcaagcgctactgtacctaccaaaggttctgccactgccgcgggatacgacatttatgcatctcaggatattaccattccggctatgggtcaaggtatggtttccaccgacatatcgttcaccgtacctgttggtacctacggtcgtattgcgccaaggtcaggcctggcagtgaaaaacggtatccaaaccggtgctggtgttgtcgacagagattacaccggtgaagttaaagtagttttattcaatcattcacagagggatttcgcgatcaaaaaaggtgatcgcgtagcccaattgattctggaaaaaattgtcgatgatgcccagatcgttgttgtagactctctggaagaaagtgcaagaggggccggtggctttggtagcactggtaactaacttagtgtatatactttggcacacttgtataatgtataataaaatcaggataaatccagtgtga

SEQ ID NO: 329 - DNA, 506 bp, Saccharomyces cerevisiae
acagattgtgatgataggcatcctgtactccttttttttacaagaaaatgagcaaccaggcactatatgagaaactcgaacaaaccaggacgattctgtccgtgaagctggcggaattgataaatatgactacgatagccgatagaaatgatgatgacgagggttcattcgcacaagaaaattctgagctcgctgtggccacgaccagtgtgatgatggtgaataaccagaccatgcaattgattaaaaatgttcaagacttgttgatcctgaccagatcgataaaagagaaatggctactgaaccaaattcctgtaacggaacactcaaaagtgactcgttttgacgagaagcagatagaggaattactggataactgtatagaaacgttcgtggcggaaaaaactacgtaaaaaggcggtatttatctattatttggccaaaaaaaaaaaaaaatacatactacatatacatatacgccataaaaaatctctgcatctatctta

SEQ ID NO: 330 - DNA, 1473 bp, Saccharomyces cerevisiae
atgtttcccagagcttctgcattggccaaatgtatggcaactgttcatcgtcgtgggctactcaccagtggtgcacaatcgctagtctccaaaccagtctcggagggagatccagagatgtttgacatcttgcaacaagaacgtcacagacaaaaacactctatcacccttatcccatcagaaaacttcacctcgaaggccgttatggatttgctaggttctgagctccaaaacaagtattctgaaggttatccaggtgaaagatactacggaggtaacgaaatcatcgataagtccgaatccttgtgtcaagcaagagctctggaactgtacggattagaccctgccaagtggggagttaatgttcaaccattaagcggggcacctgccaatttgtatgtttactccgctatcatgaacgttggtgaaagattaatgggattggatttgccagatggtggtcacttgtctcacgggtaccaacttaagtcaggaacgccaatttctttcatttccaaatacttccaaagtatgccataccatgtcgaccacactacggggctaatcgattacgataacttgcaagtattggccaaggcattcagaccaaaggtgatcgtggccggtacttccgcgtactcgagattaatagactacgctagattcaaggaaatttcccaaggatgcggcgcatatttgatgagtgatatggcacacatatccggtttggtggcagccaatgttgtcccatctccatttgaacattccgatatagttaccacaaccactcacaagtccttgagaggcccaagaggtgctatgattttcttcagaaagggtatcaagtctgtcaccaaaaagggcaaggaaatcccatatgagttagaaaagaaaatcaacttctcagttttcccaggacatcaaggtggtcctcacaaccatactatcggtgcaatggcagtggcattaaagcaagcgatgtctccagaattcaaagaataccaacaaaaaattgtcgacaacagcaaatggtttgctcaggaactaaccaagatgggttataagttggtttccggcggtaccgataaccacttgattgttattgacttatccggtactcaggtagacggtgctcgtgtcgagacaattttaagtgccttgaacattgctgctaacaagaacaccatcccaggtgataagagtgctcttttcccctctggtctaagaatcggtactccagcaatgaccacgagaggatttggccgtgaagagttttctcaagtcgcaaagtacattgattctgccgttaagctcgctgaaaatttgaaaactttggaaccaacaacgaaactagatgcaagatcaagactcaatgagttcaagaagttgtgtaatgaatctagtgaagtcgctgctttgtctggcgagatttccaagtgggtcggtcaataccctgtcccaggtgatatctaa

SEQ ID NO: 331 - DNA, 1143 bp, Saccharomyces cerevisiae
gattaaataagattgcctcaagaaaagaagttatcggtataatcttttgtaggtaatgaagtttacgttagaagaccaagttgtgttgatcactggtggttcacaaggtcttggaaaggaattcgccaaaaaatattataatgaggctgaaaacacaaagattattatcgtcagtaggtcagaggctagactgctggacacatgcaacgaaattaggattgaagctcacctgagaagggaaaccactgacgagggccaagtgcaacataagttggctgcgcccttggaccttgagcaacggttattttactacccatgcgacttgtcctgctacgaatccgtggaatgtttgttcaatgccctgagagacttggatttactccctacacaaacgttatgctgtgcagggggggctgttcctaagttatttcgtgggctaagcggacatgagttgaacttgggtatggacatcaactataaaacaactttgaacgtggcacatcagattgcccttgcagagcaaaccaaggaacaccacctcatcatcttttctagtgccaccgcgctttacccatttgtgggctattcccagtatgcgcctgcaaaagctgcaatcaaatcactggtagcaatcttaagacaagaactgacgaacttccgtatcagttgtgtttatcctggtaattttgaaagcgaaggtttcactgtagagcagctaacgaaacccgaaattacaaagttgatcgaaggcccctcagacgctatcccatgcaaacaagcatgtgatatcattgccaagtcgctggccagaggtgatgaagacgtttttacagattttgtcggatggatgataatggggatggaccttgggctcaccgcaaagaaaagccgctttgttccgttgcaatggatttttggtgtcctatcaaacattctggtcgtgccattctacatggttggctgttcctggtatatcaggaaatggtttcgtgaaaatgacggcaagaaggccaactgagagcacatccactctcattcccgatattccccgtgactctctttatttctttcaagacaaaccctagtggtgtagctatttgtacatgtataagtatatacgaaatattaattataacattatta

SEQ ID NO: 332 - DNA, 1309 bp, Saccharomyces cerevisiae
aatacgatgagtagcagtggtgtttatacgtgtaattcatgtgtcctgacctttgattcaagcgacgagcagcgggcccacatgaagtccgattggcatcgctacaatttgaaaagacgtgttgcacaattgccaccaatatcatttgagacatttgactccaaagtgtctgcagctgctgccagtactagtaagtctgctgaaaaggagaaacctgttaccaaaaaggagttgaaaagaagggaaaagcaagcattgctcgaaaagaaaaagaaactgttggaaattgccagggctaatatgcttgaaaacatgcaaaagagccaagagggaaatactcccgacctaagcaagctctctttgcaagaaaatgaggagaacaaggaaaaggaagaacctaagaaggaggagcctgaacagttgaccgaggaagaaatggcggaaagagtaatgcaagaaaacgtacgcaacagagtcgatattccactggaacaatgtctattttgtgagcacaataagcacttcaaagatgttgaagaaaacctggaacacatgtttaggacccacgggttttatatcccagaacagaaatatctagtcgacaagatcggcttggtaaaatacatgtcggagaagattggtcttgggaacatttgtattgtttgtaattaccaggggagaacgttgaccgctgtaagacagcacatgttggcaaagagacactgtaaaattccctacgaaagcgaggatgaaaggttggagatatctgaattctacgattttacaagctcatacgcaaactttaatagcaacacaacaccagacaacgaagatgactgggaagacgtgggcagcgacgaagccggaagcgacgacgaagatctgccacaagagtacttatataacgatggtatagagctgcatctaccgacaggcatcaaagttggccacaggtccttgcaaagatactacaagcaagacttaaagcccgaggtgatactgaccgaaggccaaggtaccctggtcgctgcagagacgagatcgttcttacctgccttcgacaaaaagggcgtgcagactcaacagcgtgtttggcaaactgagaggttcgacaagaaaaggctcgataagagaagtgccaagttcgtcaataaccaaccacactacagagaccaacttctgcagtaattctttttgcactactttttttagtattttgtcgcatatatactgcttcaccatttgtacattagataattcttcactaccccctctatagcaatgttatagtcattgaatcatgctttga

SEQ ID NO: 333 - DNA, 420 bp, Saccharomyces cerevisiae
actgaagatgttggcgcgcagtttgggttacaggttgatatcgaccagtcgtatcttatataataaacccacggttaagtcagtggtgtcgtcgtgtcctgcgggaacatcgcttaacttaaacatatggaagagcggtaaagacgcagtggcactcgaggacaaggagtatccaaattggttatggagcgtattggatagtgatcacgttgtcgaacatgcggctgaggacccagagggacaggctctcttaaagagaagaaagaacataaggaaggcgaacaggcagcgaatcaagcaaaacaatttcttgagccaactttaagcctccgttaataagatcaagtttggtatccttgtaaataaatatgtgtgtacgtggttaaatagtatgtttttagcataatgccttattttgta

SEQ ID NO: 334 - DNA, 1823 bp, Saccharomyces cerevisiae
taagagtatatcataagttgctgtatatgggcagcacgtattactatgagtctctcgcaggtgtcacctttaccccatatcaaggatgttgttttaggagatacagtaggccaaggcgcattcgcctgcgttaaaaatgctcatcttcaaatggatccctccattattctagctgttaaattcattcatgttcccacttgcaaaaaaatgggactcagtgacaaggatatcacaaaagaggttgttttgcaatcgaagtgttctaagcatcctaatgttttgagacttatcgattgtaatgtctctaaagaatatatgtggataattctggagatggcagatggtggtgatctatttgataagattgagcctgacgttggagttgattccgacgtggcccaattttactttcaacagctcgttagtgctattaattatctgcatgtagaatgtggagttgctcacagagacatcaagcctgaaaacatcttactcgataagaacggaaatctgaagctagctgattttgggctcgcctctcaatttaggaggaaagatggtacattacgtgtatccatggatcaaaggggttctccaccctacatggctcctgaagtattatattctgaagagggttattacgcagatcgaacagatatatggtctattggcatcctcttgttcgtattgttgactggtcaaacgccttgggaattaccttcattagagaacgaagatttcgtcttttttattgaaaatgatggaaatttaaactggggaccctggtcaaagatagaatttactcacttgaacctactccgaaaaattttacaacctgacccaaataagagggtgacattgaaggctttaaagttacatccttgggtattacgtcgagcttcattttctggggatgatggtctctgtaatgaccctgaactcttggctaagaaactgttttctcacttaaaagtctcactgagtaacgaaaattatttgaaattcactcaagatacaaactctaataataggtacatttctactcagccaattggtaacgaattggctgagcttgaacacgactcaatgcatttccagacagtttcgaatacacaacgtgcatttacctcgtatgattcaaatacgaactataatagcggaacaggtatgacacaagaggctaagtggacgcaattcataagctatgatatcgctgccttacagtttcattctgatgaaaatgattgtaatgaattagtaaaacgacatttacaatttaatccgaataaacttaccaagttctacacgttgcaacctatggatgttttgttaccgattttggagaaagccttgaatttatcacaaattagagtaaaacccgacctttttgcgaattttgaaagattgtgcgaattattgggttatgataacgttttcccacttattataaatattaaaaccaaaagtaatgggggttatcaattatgcggtagcatttccatcataaagattgaagaagagttgaaaagtgtcggatttgaaagaaaaactggtgatcctttagaatggagaagattgttcaagaaaatttcaactatctgtagggatattatcctaattcccaactgaaaaaaatggagacaaaagaagggttaagatgcactgatcaaaaaaaaaaaaaaattctttctacttattatatatctctctcgatttctagtgtgtcatcgtaactatatattgtttcgagagattttattattgtaattaatttattgccattttgatctattctacatactaacaatcaattcatatcatta

SEQ ID NO: 335 - DNA, 699 bp, Saccharomyces cerevisiae
atgtccaacttagttaaagaaaaagcacctgtctttcctatatctaaagtaaagaagattgccaaatgcgaccccgaatacgtaattacatctaatgtagctatatcagcgaccgcattcgctgctgagttatttgtacagaatctcgtcgaagaatcgctggtcttagcacaactgaattcgaaaggaaagacaagcctacgattaagcctaaattctatagaagaatgtgtcgaaaaaagagataatttcaggtttctagaggatgccattaaacaactgaagaagaatagcgcactcgacaagaagagagaactaaacatgcaaccgggtcggagcgatcaagaggttgttatagaagagcctgaattgcatgaggatgatggtgtagaggaagaagaagaagaagacgaggtatccgaagaagaagagcccgtacacaatgaagaacttcttgatgatagtaaagatcaacaaaatgataaatccacgcgcagtgtggcaagcttgctgtcgagattccagtataaatccgcactagacgtaggagaacactccgactcttctgatatcgaagttgaccatacgaaaagcaccgatccttagtgttgttgctattattgctatgtaattactattcgatgcaatatgttatacatatacatacacgcaatgagaaccctaaccttgaacttacta

SEQ ID NO: 336 - DNA, 1697 bp, Saccharomyces cerevisiae
gccaaaaaaaaaaaaaaaacagaaacgccaaccatgcacttttctttgaagcaattggctgtcgctgcgttttacgctaccaatttaggctctgcctatgtcattcctcaattcttccaggaagcctttcaacaagaagagccaattgagaattatcttccgcaattaaacgacgatgatagctctgccgttgctgccaacattccgaagccacatattccttacttcatgaaaccacatgtagaaagtgaaaaattgcaagataaaatcaaagttgacgatttgaatgctactgcttgggacctctaccgtttagctaactattctactcctgactacggtcaccctacccgtgtgatcgggtccaagggtcataacaagactatggaatacatattgaatgttttcgatgacatgcaggactactatgatgtttctttgcaagagttcgaagctttatccggtaagatcatctctttcaacctctctgacgccgaaaccggtaaaagctttgctaacactacagctttcgcactttctccacctgtggacgggttcgtaggtaagctagtcgaaattcctaacttgggatgtgaagagaaggattacgcctctgtagtcccaccaagacacaacgaaaagcaaattgcccttatcgaaagaggtaagtgtccttttggcgataagagtaatttggccggtaagttcggtttcaccgctgtggtcatttacgacaacgaacctaaatctaaagaaggactacacggtacattaggcgaacctaccaagcacactgtcgccaccgtcggtgttccatataaagttggtaaaaaattgattgccaatattgcattgaacatcgattattcattatattttgccatggactcttatgtagaatttatcaagacccagaacatcattgccgacacaaaacacggtgatcctgataatattgttgcccttggtgctcattcagactctgttgaggagggcccaggtatcaacgacgatggttccggtactatttccctattgaacgtcgctaagcaattgacccatttcaagatcaataacaaggtccgttttgcatggtgggctgctgaagaagaaggtttgctaggctctaacttctacgcttataacttgaccaaagaagaaaactccaagatcagagtatttatggactatgacatgatggcttctccaaactatgaatacgaaatttatgatgcgaacaacaaggagaaccctaaggggtctgaagagttgaaaaacctgtacgtagactactacaaggctcatcacttgaactacactttggtcccatttgacggtagatccgattatgtcgggtttatcaacaacggaattccagccggtggtattgccactggtgccgaaaagaataacgtcaacaacggaaaggtcttagacagatgctaccatcaattatgtgatgatgtctctaacttatcctgggacgcattcattaccaacaccaagttgattgctcactctgtggccacctatgctgactctttcgagggtttcccaaaaagagaaacccaaaagcacaaagaggtggacatattgaatgctcaacaaccacaatttaagtacagggccgacttcttgattatttaagtgtactgttcacatcaagtatttctgtataattatctaaaagaaaataa

SEQ ID NO: 337 - DNA, 1373 bp, Saccharomyces cerevisiae
aaccataccctcatagattactctgcatttctactatatggttgaaacatttagttttgctcatttggcttatttggtctttgagtccgttttacaggtagtcattatcgcactcgctggtttttggagcgctagttctggtctgctgcccaaacaaagtcaaaaaatcatttctctgttgaacgtggacctttttacaccatgtcttatttttagtaagttggccaaatccctgtccatggccaaaatctttgaaatagccatcattcctattttttttggtttgactactggtatttcatttatttccggaaagataatgagccgtatcctagacttggataaagatgaaactaattttgtggtggcaaactctgtctttggtaacagtaactctctacctgtgtccttgacattatctttggcttacactctgcccaacttaacttgggaccaaattcctaatgataacagagataacgttgcatcaaggggtattttatacttgctgatctttcaacaaatcggacaaatgctgaggtggagctggggttacaataagctaatgaagtggtctggagagaacactcagcatatgccaccttctcaagtgcaatctttgttggaaaggacgcccaacattgataacgaggaacttgtcaatgaggaacaagaggaacaagaattgcttgaagaagaaaataacagaatgaactcatcttttttgagttcgagttccatcggtgataagatttggcaaaaatcatgcactgtatttgagagaatcagagcgaaccttaatcctccgttatattccatgatttttgctgttgttgtggcagcaattggtccgttgcagagagagctatttatggaagatgggtttatcaataacacatttgccgaggctgttacgcagctgggttcagtttctatcccactgatcctggttgtcctcggttctaacttatatccttctgcggaagtcttccctaagacggttcaccatagcaagttattgatcggctccatcatcggaagaatgattttaccttcttgcttccttttgcctattattgctattgctgttaagtacataaacgtgagtattttggacgatccaattttccttgttgtcggttttcttttgactgtttcccctcctgccattcaattaactcaaatcactcaactgaatgaatttttcgaggcagaaatggccgatattctattttgggggtacgctgtcttaagtttgcctgtaagtattattgttgtctcaggtgcaatttacgttttacagtgggctaacccaacttaatacaacttttcattcctttgtatagagtcttcatgaatgaaagtcttattca

SEQ ID NO: 338 - DNA, 2038 bp, Saccharomyces cerevisiae
attctaaggctcggtaagtgatgcgatatatgtgcatgtgtggctttcttcctaatttgctattagatgattgtgtgcaaatccacagaaatatacaatttcgagaatatatatactagttatcgttataagaacacacagtattggccaattcttgcctctgaatggtacaaaatgctttaaaatgtagtaaatgaaacattaattccaaatcagatttttttctgcaatgcttaaatctagtaaacacaagtactaccgaaaagcaaggatggaaactatggcagtattgaagagactgaaattccttctgtcgactacagtgaagacttagatgaggacttggacaaaggcgaagatatagcgctttcaagaatcccaaattgatggattattgaagctactcttttttctaatgtctttttgtccggttttgacggaaccgttacagcttcgacgtaccaaacgattggtaacgaatttaatcagatgagtatttcaaattggatcaccactgcgtatttaattacatcaacatcttttcaacctctttatgggtcattttctgatgcacttggtcgaagaaactgccttttctttgctaatggggcttttaccattggatgtctagcctgtggtttctcgaaaaacatctacatgcttagttttatgagagcattgacaggcataggaggtggtggcttgatcacactttctacaatcgtaaattcagacgttattccaagttcgaaaagaggaatttttcaagcgtttcagaatttacttttgggatttggtgccatatgtggagcgtctttcggtggcacaatagcgtcgagcattggttggaggtggtgttttctcatccaagtacccatatctgtgattagttccatattaatgaattattatgtacctaatcagaaagaatataatcgtcaaaattctagcatattccaaaatcccggaaaaatactcagggacatagatgttatgggctcaattcttattataactggtctcacactacagcttctttacctgagcctggggtgttctacttctaaattatcatggaccagcccttctgtgctactgctattagttgggagtgtaataatcctcttactgttcatattgcacgaaaggaaaacaagtgctagagcgattattcctatggagctggtcaattcctcctacagtgtcgttgtactttcgataagtatacttgttggttttgccagctacgcgtatctttttactttaccattattctttcagattgtacttggagattccactgcaaaagcaggattacgtcttacgattccttccctatttactccggtaggcagtctcataacaggattttccatgagcaagtacaactgtctaagattattactctacattggtatttctttgatgtttttgggtaactttttattcctgtttattgaaaaaacttctccgaactggttgattggtctatttttgatacctgcaaatctaggacaaggtatcacttttcctacgaccttgtttactttcatatttatgttctctaagagtgaccaagctactgcgacatcaactttatatttattccgtagtattggatctgtatggggtgttgcaatttcagctggcgtcattcaattatctttcgcaggtttattgcgtagtaatttgaaaggtctactggatgaaaacaagataaagaaacttattgttcagcttagtgcaaactcctcatatattggatctttacatggcgaagttaaaaacacagtcataaagagttttgatgaggcaacaaagagggctcatctaatgtctacattactctcttcattggccctgatactctgcatccttaaagacaatctggcgaaacctaaaacaagaagataaacaatatatacctatgcccttgaccgactcaattgatacattaacagtattgaaactagatattctacttgacactaaactttttttgtatttcgtggaattgcaacgtttctaattgaccgac

SEQ ID NO: 339 - DNA, 624 bp, Saccharomyces cerevisiae
aagaaaaccaggttgtgtacgataatgccgttatttttggttctgaaagcaacattatcagaaaacgtgaccaaggtttcaattgagaatacaaacgaatcaagggcagaatttgccttcgatctacaatgtaccagttgtagagaattacacgattctaaagtcatcatcaatacatttgaagaatatgctatgccggcatcaaaaggtaccgcatctttcttgatgaagtgtaaattttgttcaaaagaattgtcagttaacctgtgcgcttttgaggatgaatatttaactgatcagagtgacgacaaatgggccaagataaaagatgtgcggaagaagcatggtttatcgaaggtcaaagaagattctttcattcctttaagccttgattgcagaggttgtgaattaatcaaattttatcccgacaccataacgtttgaagtttctctaagttcggggaaagtaatgtcatgccaactagaggataatgaatggtatgattatgatgacaaccttggggaagaagtaacaatgactgatttctcatcaagcattattaaaggtaagtaaaaagagtgtctgtttatagcatatatacgtacatataatatatacgggaaa

SEQ ID NO: 340 - DNA, 648 bp, Saccharomyces cerevisiae
atggttacgttcaactgtgaggtgtgtaatgatactgtgcccaagaagaataccgaaaagcattattatagatgtcctaacgcgtactatacatgcatagattgctccaagacgtttgaagatggcgtgagttacaagaatcacacgtcttgcatcagcgaggacgagaagtaccagaaagcgttgtacaagggcaacaagaagcagaagcagaagcagcagcagaagcagcagcagaagcagcaccagcaccagccagtggcaactcctgcaaagaaagtggagaagcctgtgatcaagaaggcagagaaagtggaaaagacctcgaacggtatcgagcttcacaagggcaagtcgttgtacaaaattttgaaaaccatgaaggataaaggggcaaaaaagaccttcttgaaaagtctggttgtggattctgaggggcaaatcaggtatgcaaaggaataatcggaattttatgtgtagatatatagacattatgtagcagcttactcggtttcatcttttttctctcttttcttattcaggcttttagcgattttgttatagaattggtttagcgacgagagggggaaactcaacgtttcgaagaggtattccggtagtttcgactgtagcgagtatagttcctcg

SEQ ID NO: 341 - DNA, 2668 bp, Saccharomyces cerevisiae
cccccatctacccccaattgataaacatcagcgaagcaagaacaactggctgaacacgtgcccctctatctgtccttctgcaattgtttaattttctttcacgccaagttacctttcgcacaccactactctttttctattgtttttttgtcttttttgataagcaggggaagaaagaaatcagctttccatccaaaccaatatgactgccagcgtttcgaatacgcagaataagctgaatgagcttctcgatgccatcagacaggagtttctccaagtctcacaagaggcaaatacctaccgtcttcaaaaccaaaaggattacgatttcaaaatgaaccagcagctggctgagatgcagcagataagaaacaccgtctacgaactggaactaactcacaggaaaatgaaggacgcgtacgaagaagagatcaagcacttgaaactagggctggagcaaagagaccatcaaattgcatctttgaccgtccagcaacagcggcaacagcaacagcagcaacaggtccagcagcatttacaacagcaacagcagcagctagccgctgcatctgcatctgttccagttgcgcaacaaccaccggctactacttcggccaccgccactccagcagcaaacacaactactggttcgccatcggccttcccagtacaagctagccgtcctaatctggttggctcacagttgcctaccaccactttgcctgtggtgtcctcaaacgcccaacaacaactaccacaacagcaactgcaacagcagcaacttcaacaacagcaaccacctccccaggtttccgtggcaccattgagtaacacagccatcaacggatctcctacttctaaagagaccactactttaccctctgtcaaggcacctgaatctacgttgaaagaaactgaaccggaaaataataatacctcgaagataaatgacaccggatccgccaccacggccaccactaccaccgcaactgaaactgaaatcaaacctaaggaggaagacgccaccccggctagtttgcaccaggatcactacttagtcccttataatcaaagagcaaaccactctaaacctatcccacctttccttttggatctagattcccagtctgttcccgatgctctgaagaagcaaacaaatgattattatattttatacaacccggcactaccaagagaaattgacgttgagttacacaaatctttggatcatacttcagttgtttgttgcgtgaagttcagtaacgatggtgaatacttagccacaggctgcaacaaaactactcaagtgtatcgcgtttcagatggttctctggtggcccgtctatctgacgattctgctgccaataaccatcgaaattcgatcactgaaaataacaccaccacgtccacggataacaatacaatgacaaccactactaccaccacaattactaccacagcgatgacttcggcagcagaattggcaaaagatgtggaaaacctgaacacttcgtcttccccatcatccgacttgtatatccgttcagtgtgtttttctccagatgggaaatttttggcaacaggtgctgaagacagactgattagaatttgggatattgaaaatagaaagattgttatgattcttcaaggccacgaacaagatatttattcattggactactttccctcaggtgacaaattagtctccggttctggtgaccgtaccgttcgtatttgggacttacgtacaggccagtgttcattgactttatccattgaagatggtgttaccaccgtcgctgtatcaccaggtgatggtaaatacatcgctgctggttctctagatcgtgctgtgagagtttgggattccgagaccggattcttggtggaaagactagattcggaaaacgaatccggtacaggccacaaggactctgtttatagcgttgtcttcactagagatggacaaagcgttgtatccggctcattagatagatctgttaagctctggaatttgcagaatgcaaacaacaagagcgattcgaaaactccaaattccggcacttgtgaagttacgtatatcgggcataaagactttgtattgtccgtggccaccacacaaaatgatgagtacatcttgtccggttccaaagatcgtggtgtcctgttttgggataagaaatccggcaatccgttattgatgttgcaaggtcataggaattcagttatatctgtggctgtggcaaacgggtctccgctgggtccagaatataacgtttttgctactggtagcggtgattgtaaagcaaggatttggaagtataaaaaaatagcgccaaattaagaacagaacacaaaaggaacactttacaaatgtaactaactaaactattcttcaattcattgtcattatatctttctctctattcttttttatctacttatttgttatgttatgatccaggtacgctttaaaacaaacagttactttcctcaccattcatcccttcccctccttttcctgtgtttctgaatattgcggttcattattctttgatatgaatttatttgtgtattgtataagcttactttccttttatatgtatatgtatatatatatatatatatactatcttttttcttatatttaaaactaaaaaaaaaaaaa

SEQ ID NO: 342 - DNA, 2571 bp, Saccharomyces cerevisiae
caaaggttttaaccggaagtaagagcagcaagaagcactagcaatgtccttctttgggttagaaaatagcggtaatgcgcgggatggtcctctggactttgaagagagttacaagggctatggcgagcacgaacttgaggagaacgactatttgaacgacgaaacatttggtgataatgttcaggttggtaccgactttgattttggaaatcctcacagcagcggcagcagcggcaacgcaattggtggtaatggcgtcggtgccacggctagatcatatgttgcagctactgcagaaggaattagcggccctaggaccgatggaacggcagcagcaggacctctagacctgaagccaatggaatctttgtggtctactgcaccacctccagcaatggcgccttcaccccaaagtacaatggctccggctcctgctccgcagcaaatggcccccctacagccaatcttgtcgatgcaagacttggaaagacaacaacgtcaaatgcagcaacagtttatgaatttccacgccatgggtcatccacagggtctcccacagggtccgcctcagcagcaatttccaatgcagcctgcgtcgggtcaaccaggtccctcacaatttgcgcctccacctccacctcctggcgttaatgtgaatatgaatcaaatgccaatgggtcctgtacaagttccagttcaagcttcgccttcacccatcggtatgtccaacactccttctccaggccctgtggttggcgcaactaaaatgcctctgcaaagtggacgcagatcgaagagagatttgtcgcctgaagagcaaagacgtttgcagattcgtcatgccaaagtggagaaaatcttgaaatactcaggtttaatgactcctcgtgataaggacttcatcaccagatatcagttgtctcaaattgtcactgaggacccttacaatgaggatttctacttccaggtctacaagattatccaaagaggcggtatcacgtccgaatccaacaaaggtttgattgctagggcgtatttggaacattctggacacagactcggtggtcgctataagagaaccgatattgccctacagagaatgcaaagtcaagtagaaaaggctgtcactgtggctaaggaaagaccttctaagttgaaggatcaacaagcggctgctggtaactctagccaggataataagcaagcaaacacggttctgggcaaaatctcttccactttgaacagcaagaatccaagaagacaactgcagatccccagacaacagccttctgaccccgatgcgctaaaagacgtcactgactctctgaccaacgtggacttggcctcttcagggtcctcctctacgggctcttctgccgctgctgttgcttctaagcaaagaagaagatcttcatacgcgttcaacaacggtaatggtgccacaaatttgaacaaatctgggggcaaaaaattcattcttgagttaattgaaacagtttatgaagagattttagacttggaagctaacttgaggaatggccagcaaactgacagcactgcaatgtgggaggcccttcacatcgacgacagttcatatgacgtaaaccctttcatttcgatgctatcatttgataaaggtatcaagattatgcctagaatttttaatttcttggataagcagcaaaaattgaaaatcctgcaaaaaatcttcaatgaattatcacacttgcaaatcatcatattgagttcctacaagactacaccaaaaccaactttgacacaattgaagaaagtcgatctgttccaaatgatcatattaaagatcattgtctcgtttttgtctaataactccaattttatcgaaattatgggtctgttgctacagttaatcagaaacaacaacgtttcgttcttgaccacctccaaaattggtctaaatttgatcaccattttgatttctcgtgccgcattaatcaagcaagattcatcaagatctaatattctttcctctcctgaaatctccacatggaatgagatttatgataaattattcacttcattggaaagtaagattcagctgattttccctccaagggaatataacgtccacatcatgcgtttacaaaatgacaagtttatggatgaagcatacatttggcagttcctagctagtttagcactaagtggaaagctaaaccaccagagaatcattattgatgaagtacgtgatgaaatctttgccactattaacgaggcggagaccttacaaaagaaagagaaagaattgagtgtattacctcagaggtctcaagaattagacacagagttaaaatctattatttataataaagagaaactataccaagatttgaatttgttcctaaacgttatggggttggtgtatcgcgatggtgaaatatcagaactaaagtaagatttttcctgtaattttaatgtacttacgcatgtatttttttttctcccttattttttatttcctaccctttgtagatcatttattgtatatgtttttatataagtttatataagtttgttatcctttttttttca

SEQ ID NO: 343 - DNA, 856 bp, Saccharomyces cerevisiae
ataccaccatagtaacgcaagagttaaacaatgattgagaataaggttgaactggtagcagaactagtgttggagtccatcggtaaaactgaggtggtgtcacgccatacagagggaaccaaatcatgccaagtgagttttcgcattaaagattctcccagtgagaagggttcaacatcgtttctctctgagctagtggtgattcagactctggatgacaatgacaagtatactgttgttattcgtcatggtacgtcgatcaccatggcatgtgtggtgggttacagcgattttaaattgcccacagaattgaaatggccactagaaagagaaagcttacctgtggagccagacctgaaacctataatgacacaacttaaaagacaaactgcaggtagtgcggacatgccaaaatttgacgatgagtaccaggcacaagcaagacaaaaccagggaacagcaccgttgaacccatatcccggacttacggtaactgaaccgagcttcgctaacccagcaggagggtatgcggatggtgatctgtatcctgttggcacaagccatccggattggtctggagggcttcccaatcctctggggaatccaagtagccaaggcggtatgattttcgatccaaatagaagacctgccccaagacgggaagatatgccgccaggatggatgcctggatccaagtacgacgaaccatttggtcctggatctggcggatttggaggttcaggatccggcggatttggagggtcaggatctggctttatttaaatgggtgtttattttagtactttgtttattgtgatatttagtttttagatagtatacagacatagctatgtcg

SEQ ID NO: 344 - DNA, 899 bp, Saccharomyces cerevisiae
atggtgtcgttagacgatatactaggtatcgtgtatgttacgtcatggtcgatatcgatgtatccaccgataatcaccaattggcgccataagtcagcgagcgcgatatcgatggattttgtcatgttaaatacggcaggttactcttacctggtcatatccatatttttgcaattgtactgctggaaaatgacgggtgatgagtctgacttgggcaggcccaagttgacgcaatttgatttctggtattgcctgcatgggtgcttgatgaatgttgtcttattgacccaggtggtagctggagcgagaatctggcgatttccaggtaaaggtcaccgcaagatgaatccatggtacctaaggattttactcgcatcactggccattttttcactgctaaccgtacaatttatgtactccaactactggtacgattggcataactcaagaactctggcgtattgcaacaatttgtttttactcaaaatatcgatgtcactaatcaagtacatcccacaagtgacgcataactcgacaagaaaatctatggattgtttccccattcagggtgtgtttctagatgtcactggcggtatcgcctcgctgctccaattgatttggcagttgtctaacgatcaaggtttcagtctggatacgttcgtgacaaattttggaaaagtgggactgtcaatggtaactttaatattcaacttcatctttatcatgcagtggtttgtatatcgatctcgaggccatgatctggcgtcagagtacccgctgtagcacacaaggagaaatctgcataattacgcatatatatatatatatatatatacataaatatacataaatatatgtatgtatgtatgtatgtgtgtatgtatgtatgtacacacatg

SEQ ID NO: 345 - DNA, 1661 bp, Saccharomyces cerevisiae
acaagatttttatatttgtaacctcgataaacacacactaacacaatatacagatgtccaccctgattcctccaccttctaagaaacaaaagaaagaggctcaacttcccagagaagtagctattattccgaaagatttacccaatgtttcaatcaagttccaagctttagatactggtgacaatgtaggtggcgccctgagagttcccggtgctatctccgagaaacagttagaagaacttttaaatcaattgaacggtacttcagacgatccagtgccatataccttcagctgtacaattcaaggtaagaaggccagtgaccctgtgaagacgattgatataacagataacctatattcttcattaataaaaccaggctataacagtacagaagatcagatcacgctactgtatacgccaagagcagttttcaaagtcaagccggtaactagaagttcatcagccattgcaggtcacggttccacaattttgtgttctgccttcgcaccacatacgagttctaggatggtaaccggtgcaggtgataatactgcaaggatttgggactgtgacacccaaacgccaatgcatactctaaagggtcactacaattgggttctctgcgtttcctggtcccccgatggagaagtaattgctacgggatccatggacaataccataagattatgggacccaaaaagcggtcagtgtctaggtgatgctctcagaggtcattccaagtggatcacttctttaagttgggaacctatacatcttgtgaagccgggctccaaaccaagattagcttcatcttctaaggatggtactattaagatttgggacactgtgagcagagtttgccagtatacgatgagtggtcacacaaattcagtgtcttgtgtcaaatggggcggccaaggtctattgtatagtggctctcacgatagaaccgtacgtgtatgggacatcaattcgcagggcagatgtatcaacattttgaagtcgcatgcgcactgggttaatcacttatctttatctacagattacgcattgcgcattggtgcattcgatcatacaggtaagaagccttctacaccagaagaagcccagaaaaaggcattggaaaattatgaaaaaatctgtaaaaagaatggaaattcagaagaaatgatggttactgcaagcgatgattataccatgtttttatggaacccactaaaatctaccaagcctatagcaagaatgaccggtcaccaaaaattagtcaatcatgtggcgttcagccctgatggtaggtatattgtctcagcgtcttttgataactctatcaaactttgggacggtagagatggtaagtttatctccacatttagagggcatgtagccagcgtataccaggttgcgtggtcatcggactgccgactactggtgtcatgttccaaagataccacgttgaaagtgtgggatgtaagaactagaaaactttctgttgacctccctggtcataaagacgaagtttataccgtcgactggagtgtcgacggtaaaagagtgtgtagtggtgggaaagacaagatggtaagattgtggacgcattgagttatgtgcaaagacaagtaacatacatgcacatataaatattatataactgtgatatag

SEQ ID NO: 346 - DNA, 3399 bp, Saccharomyces cerevisiae
acgcttatagctgcttcgatcgacggaggctgtttgtcaacaagcatcacaattccctacgatacgtcctctcttccttttttttctctccttttaaacttagaaaaactagcataataatgagtggcaactctgcaaactatgacgtcggatatccgatatatggtgctaaatttataaatgaaggcactctactggtggctggtggtggaggccagttcaattcctcgtttccaaacaaaattacagctttaaaggtgaacttccagaaaaagaaacacattagaaggtttcgtgagatcacattagattcgattgacgatgcgcccacttcattggattgtaataataacctgattctagttggttgcaatgaactgtttaatgattcctccatggagaacgttaaccaccacttgaggaagtttgtgtttgaacaagaacatctaaaattcgtggccagtattgatttcaacagaactacagacccatccgttttcactaagtttgtttacattaatcaaagggccacagtagctgcaattgcgtcctctgaagtgcccactgtgataagaatcattgacccgcgtaatttgacggaaaattacgaaattgaaacgggtagggaagttaatgatttgcacttcgcccctaacggtattcttttgtcatatatcacttctaattctttggaagtagcgtctgttagggacggaaattttgtagcaaggaaaacggattttgataaaaatcttgttctttctaatatcaggtttctcaatgacaatacgctattagtggcagcatcattatcgaactctgatggagtttccttgttaaaactaggtgtgagttccaaaggtgttaaaattttaaaaacagcatccttcatgttcgatttgaatggaataacatcgatggatgtctccccaaataagaagttcgttgcattatcatctaacgataacttggttgccatcgtcagcgttgaaaagctaaagcttgttcagttggttccaagagtacatgaatctactataacaaaagttactttttctccagattctagatatttggcaagcacttctatggggaacacgatcaacgttctgaagctttccggtacatcgtcatcaattttacgaaatatttggaaatttttcttgaattttgttttgttagtggttttggctggcgctattcaactaggctacaaacataatgtgcacggctttatttacaaacatgctcatgatatatataagtcgaaattcaaggaaaacactaccatagaccaaggatcttcttcttatttcactattaatgacgattacagaggcattactgaaagtgcagatatcatcagcgctacagatgttgctagcgatatagagactgaattttcctcatttgacactagcactatgagaaccaccacagaagatgagcaaaaatttgtttggatatcgtcatcagctgattcacaattcacttctgcagatatcccaacatcagcttcttcttcttcttcttcttcttcttcttctttctatgaagagagtgtcactaatgaaccaattgtgtcttcacctacctctgaaattacgaagccgctagcctctcctacagaaccgaatattgtcgaaaaaccatcgcttccactgaattcagagtcgatagatttgttatcctcatcttcaaattctatcacagaatatcctgagccgactcctgacttggaggagaaattgtcctcgttaatagtagaacaatcagaaagcgaaataacaacagatagagaaagcgtttcaaaactcttaagtactgaatcaccttcgctatcacacatgccgtcttcatcttcatcttcattatctctttcctcatcgttaacaactagccctactacagcattatccacaagtaccgcgactgcggttaccaccacacaaacaaaccccaccaatgatgcagccaacacatcttttctagacaactcaaaaccggcatccacgagagagatttataagacaaaaataatcactgaagtcattacaaaaattgagtataggaatatacctgcatcagattccaatgcagaagccgagcagtatgttacaacatcttcttcaatgttgttgacgcccacagacactatggtttcttcgcccgtctccgaaattgatcccatagcatcagaattagagcgtatggttgaaacacctacgcattctatttctatagcatccgaatttgactcagttgcgtctaatttgatcccaaatgaagaaattttgtcaacatcagcatcccaggactctatttcctcgcatccgagtacattttctgattcatctataacctctggcttccagtcaatagaagtatcgactgtaacttcttctgttcttgcttctgaatcaatcccttcaatctcagattccactttttctaaatttcattccatctctgaacctgtttcatcagctattgtggagacggcaactagctcattctcaaaaacagaaacgaagacttcgagagtaattgctttctctaccgaggattcagaacgctccagtgccttgattgataattcggaatacaccagtgtgttggctgacaatttggaacccactagtgttttggctgacaattcggaacccactagtgttttggctgacagttcggaacccactagtgttttcactgatgctgtacaatcacctaagacgagtgttggtcaatcttccctatcagaatccacaaatattgaagggacttctatggcatctatgatctttagtagtagtggtgcttcaattggcgctctgtctgatataggcaagggaactttatccgtggagagcgcgtcaagcacagtagctcagccgatgccaggtgtaaccacaacagcaccatcttttgtaagtagccctcacaaaatatctgctagttcaattgatgcatcaggatttgtacagaaagaaataatgatagaagtacagtcatcaaaagattcatctgaagcgtttggggtacgccacaaaatcagcgaaaatgtaaatactcctgtttcccgaatgcttacgacggaaatgcaggcatctggtacggtagatgttaccgaagacgtctctctatctagtgaagttatttcagcacttaacgtggagatcacttctttgcctaatccagtggcccctccgcaaacaattgcagcacctttgaataataattcgaatacaaacattgtcaacgatgataatgcagtagcaggaaccgtaaactacgctggccttcatgacgaattgtgaataacgaaataatatatattaatgttaaatatgattacatagctttgtgcacatatctctatgtcatcttttatgcatttat

SEQ ID NO: 347 - DNA, 953 bp, Saccharomyces cerevisiae
ggaaagaaaagctcaatggatgacgatcacgaacagttggtcgaagaactggaggccgtcgaggccatctatccggatcttctctccaagaagcaggaagacggaagcatcatcgttgtgaaagtgccgcagcatgaatacatgacactgcagatctccttcccgacacactacccctccgaggaggctcctaatgtcatcgaagttggtgtctgcacttctttggctaagcgcgatctctacgataccaagtaccttcagcatttgttccaggaagtgatggactctgttttccaccgcggatctgtctgtctatttgacttcctcacagaactcgacggtgtcttgtacgttgaaccagaggaggagacagaaccggtccagcagagtgacattcccacagaccccttcgagggctggaccgcgtcggaccccattactgatagaggctcgactttcatggcctttgcagcacatgttacctccgaggaacaagcgtttgccatgctagacctactgaagaccgactccaagatgcgtaaggcaaaccatgtcatgagtgcatggcgaatcaagcaggatggctctgcggcaacatatcaagattccgatgatgacggtgaaacggccgccggctccagaatgctgcacctcatcaccatcatggatgtgtggaacgtcatcgttgtggtggcccgttggttcggcggtgcccacataggtcccgaccggtttaaacacatcaattctacggcaagagaagctgttgtcagggccggcttcgactcgtaatcattatgattatgtcaagcacctgtaaccttgatcacatgcgacgggagttctttttgaaattttttggaaaaattttgcgatgagctgaaagatgaaaaaaaaaaaagtttcgagtatagttctaggtatgtacaataactagtataatatcaataata

SEQ ID NO: 348 - DNA, 2999 bp, Saccharomyces cerevisiae
aaaaaaaaaaagtttcgagtatagttctaggtatgtacaataactagtataatatcaataatagtaataatagtatcgttttcaacaggtagacaggagagcagaccgcagattgaaccgcatcccaatgaaatccgatttcaagttctctaaccttttaggtacggtctacaggcaaggtaacatcaccttttccgatgatggcaagcaactactctcaccggtggggaatagggtcagcgtgtttgacttaatcaacaacaaatcgttcacgtttgaatacgagcatcgcaaaaatattgctgccattgatctgaacaaacaaggcacattgctgatttctattgacgaggacggtcgcgccatccttgtcaatttcaaagcccgtaacgtgcttcaccatttcaacttcaaagaaaaatgctccgctgtgaagttcagccctgatgggagactctttgcattagcctcaggcaggtttttacagatttggaagactccagatgttaataaagacagacagtttgctcccttcgtccgccatagggtgcatgcgggacactttcaagacataacgtctttgacgtggtcacaagattccagatttatccttacgacttccaaagacttaagcgcaaaaatatggtccgtagattcagaggaaaagaaccttgcggcgacaacatttaatgggcacagagactacgttatgggtgcgttcttcagtcatgatcaggaaaaaatctacactgtaagcaaagacggtgctgtctttgtctgggaatttaccaagaggccatccgatgacgacgacaatgaaagtgaagacgacgacaagcaagaagaagtagatatttcgaaatacagctggagaatcacaaagaaacattttttttacgcaaaccaagccaaagtaaagtgtgtcaccttccatccagcaacaaggcttttagctgtcggatttactagtggggaattccgtctttacgatttgcctgatttcactttgattcaacagctttctatggggcaaaacccagtcaacaccgttagcgtcaaccaaaccggcgaatggctggcgtttggttccagcaaactgggccaattactagtttacgaatggcaatcggaatcgtatatcttgaagcagcagggccatttcgattccacaaatagtcttgcatactctccggatggttcacgtgtagtgacagcatccgaagatgggaaaatcaaagtttgggacattacatcagggttttgtttggccacttttgaagaacacacctcttcagttactgctgtacagtttgcgaaaaggggtcaggtcatgttctcatcatcgttagatggtacggtgagagcgtgggacttaatcaggtatcgtaattttagaacattcactggtactgaaagaatccaattcaattgtttagcggtggatccatcaggtgaagtggtttgtgccgggtccctggacaattttgacattcatgtttggtccgtgcaaactggtcaattattagatgctttgtccggacatgaaggccctgtttcgtgtctttcatttagtcaagagaacagtgtcttagcttctgcatcatgggataaaacaattagaatctggtccatatttggtagaagccaacaagtagaacctatagaagtttattccgatgttttagccttatcaatgagaccagatggtaaagaagttgcagtatctaccttaaagggtcaaatatccattttcaacatagaagatgccaagcaggtgggcaacattgactgtagaaaggatataatatctggtaggtttaatcaagataggttcactgccaaaaattctgaacgatccaaattttttactacaatacattacagttttgatggtatggctattgtggctggtggtaataataactccatttgtctatatgatgttccaaatgaagtcttgttaaaaagattcattgtgtccagaaacatggctttgaatggtactctcgaatttttaaacagtaagaaaatgactgaagcaggttcattagatttgattgacgatgcaggcgaaaattcagatttggaggatcgtattgataattctttaccagggtctcaaagaggtggcgacctgtccacaagaaaaatgagaccagaggttagagttacttcggtgcaattctccccaacggcgaatgcatttgccgctgcttcaacggaaggtttattgatatattccaccaatgacacgatattatttgatccctttgatctggatgtggacgtcaccccccattctactgtagaggcgctacgagaaaagcagtttttaaatgcattagtaatggcgttcaggttaaatgaagaatatttgatcaataaagtctatgaagccatacctattaaggaaatccccttggttgcaagtaatattcctgcaatatatttaccgaggattctgaagttcatcggtgattttgccattgaatcccaacacattgagtttaacctaatttggatcaaagctctattatctgcgagcggtggttacataaatgaacacaaatatctcttctcgacggctatgaggtcgatacaaagatttattgttagagtggctaaggaagtagtcaataccactactgataacaaatacacctatagatttttggtatcaactgatgggtccatggaagatggcgcggctgatgatgacgaggttctattaaaagatgacgcagatgaagataacgaagagaacgaagagaacgatgtagtcatggaatctgacgacgaggaaggatggattggtttcaatgggaaggataacaaattacccttgtctaatgaaaatgattccagtgatgaagaagaaaatgagaaagagcttccttgaaaaatattcactgtcctctatttatgcacattcacatcatgtattccccaagtatagaactatataaagcattacatttgtatttaatatcaacaaaaaa

SEQ ID NO: 349 - DNA, 1063 bp, Saccharomyces cerevisiae
agaagaagcagaagaagaagagcatagtaaaaaagtagtgctaaaaaggtgcggtacggaaacacaggaaatatatcagagaagaaataatgtcacgtcctgaggagttggcaccaccggagattttctataatgatagcgaagcacacaagtacacgggttcgaccagagtgcagcatatccaggcgaagatgacgctgagggcgttggagcttttgaatctgcagccgtgcagtttcattctggatatcgggtgcgggtccggactgtctggggagattttgacgcaggagggagaccatgtgtggtgtggtttggatatatcgcccagcatgcttgcgaccggtcttagtagagagctggagggcgacttgatgttgcaggatatgggcaccgggataccgttccgggcgggctcgtttgacgcggctattagtatcagtgcgatccaatggctgtgcaatgcggacacttcatacaacgatcctaaacagcggttgatgaggtttttcaacacattgtatgctgcactgaagaagggagggaaatttgtggcccagttctacccgaaaaacgacgaccaggtggacgacatactgcagtctgccaaggtggcagggttcagtggcgggcttgtggtggacgacccagagtctaaaaagaataagaagtactaccttgtgttgagcagtggggccccaccgcagggggaggagcaggtgaatttggacggtgtgaccatggacgaggagaacgtcaacttgaagaaacaactgcgccagcgcttgaagggaggcaaagacaaggagtctgccaagagtttcattctaagaaagaaggagctcatgaaaagacgtgggaggaaagttgcgaaggactccaagttcaccgggaggaaaagaagacacaggttctagaagaaacacacatcctcacacgcatattcttttgtatactataaaaatacacacttatacatttccctctgtctctgtctccttctacatgtatacttgtatatgtatacttgtatatatacacttatatctgtatgtgagtggtc

SEQ ID NO: 350 - DNA, 615 bp, Saccharomyces cerevisiae
gagagagaaccatagcgatgtggagcaggaacgtcagattgcttggatcatggacaaggtcctacatggtccccgccaccaagagaaaaaccatccccgtgtacccacctgtgcagcgcatagcttcgtcgcagattatgaagcaggtggccctctcagaaatagagtctctggatcccggggccgttaagaggaagctcatcagtaaaaagaacaaggaccgcttgaaggcaggcgacgtggtccggattgtgtacgactcgtccaagtgctcgtacgacacctttgttggctacatcctttccatagaccgcaaacaactggtgcaagacgcctcgttgctgttgcggaaccagatagccaagacggccgtcgagattagagtgccattgttttcgccgctgatcgagagaatcgacttgctaaccccccacgtctcgagcagacaaagaaacaaacactactacatcagaggtacaaggttggatgtcggcgacctcgaggcaggtctaagaagaaagaaataggctaggcgcgggttctgtggccacccatctcctgtatataagaaaaatagtgcgtgtataaaatctacgtatactaactatgggtaaa

SEQ ID NO: 351 - DNA, 1194 bp, Saccharomyces cerevisiae
acccttcgggagaaaagaaacagaagtgtggcaagaaatatgaggttagctgtggttgtgaccctacttgttcactgtttcctagtgacatgctctccaggagataatttagatgagtttatagactgtacgtatgcgtgcgagtataacagaagatgtccgaattcccaaataaactacattgaccctgaaaccaacatgtttcatgatattgagtttttcgataccccgcctttgtactctaagttattgttctgggattgtatctcagattgtgattaccaatgtcagcacatcattacgcgctggagaattgacgaagaggaagaaatataccaattccatgggaaatggccatttttgagagtattggggactcaggaattcttctcgacgatattcagtataggtaactttattccacattataagggatttgtaaagttttctagaatcatacgcgaagagggagataggaggagaaaaaacagcagaagtatactgatttggaactacctttacgttactgtggcgggaatgttggcttggacagcaagctcggtctttcactgtcgtgatttgatcataacggagaagctagattactttttcgcaggtttaactgtcctaacagggtttcatgcaatatttgcaagaatgacttccatgttcctgtaccccaagatagcacaagcgttcactgcgtcagttgcggcaatctttgccctgcacatcttgagactctatgttgactggtcgtacacatacaacatgagattcaacatttttttcggtgttttacagtatattttattgataatgttatcatgccaaaactaccatgctctgcaaaagcaaaagctaatgggcgaattcaagaaaaccgcgtactccagcttcaagcggcaaatcttcaaactgtgtgtcattccaattcttcttgtgattgtaaccacaatggccatgtcattggaactgtttgacttttttagttacgaatggcagattgatgcccatgcgctatggcatctgtgcacaatatggccctcgtgggtattgtacgactttttcctcgaggattatgcctattggggtaatagacaattgtactaaatatcttaattcacctgtttactatcatgaataatagttatatatgtatttttttttgtttatttttgattttcttttacc

SEQ ID NO: 352 - DNA, 575 bp, Saccharomyces cerevisiae
aacagtaggcagtgaaagcgctcttaacgtactttggcaaaggatgatcccagctccacttgatgcttccttattgagagaacatgcattccaaggaactaatgatctaagcacagttttgagtccaagtacgtttaccgatgaaggtggatataaacctgtattgaaatacggactcggttatttcaattatggactggttatagacgatgaagtgtatgattattcagtgtgtgatatcataaggggtcacgtttacgatcatttttggtgttatttctgttgtttcatgattttgtttactatctggttaataagtttaaattggtgtcccagcagcaagaaaagcaagtttgattggagcaagaagaaggacgactttaagatggaaggaggtgatttagagtaccaacatgtaaagatctaaatctacatcgttctcaggacgacttattactgctggtttcgaaggaataacaatgcatttttttatcccaccattttcctcgtttattacaaaaagcaatgaaataatatgtatatgtctacatagagatattattatagtaataatg

SEQ ID NO: 353 - DNA, 633 bp, Saccharomyces cerevisiae
atgaataaaatacccattaaagaccttttaaatccacaaatcacagatgagtttaaatccagcatactagacataaataaaaagctcttttctatttgctgtaatttacctaagttaccagagagtgtaacaacagaagaagaagttgaattaagggatatattaggattcttatctagggccaacaaaaaccgtaagattagtgatgaggagaagaagttgttgcaaacaacatctcaactcactactaccattactgtattactcaaagaaatgcgcagcatagaaaacgatagaagtaattatcaacttacacagaaaaataaatcggcggatgggttggtatttaatgtggtaactcaagatatgataaacaaaagtactaaaccttacagaggacaccggtttacaaaagaaaatgtccgaatactagaaagttggtttgcaaagaacatcgagaacccatatctagataccaagggcctagagaatctaatgaagaataccagtttatctcgcattcaaatcaaaaactgggtttcgaatagaagaagaaaagaaaaaacaataacaatcgctccagaattagcggacctcttgagcggtgagcctctggcaaagaagaaagaatga

SEQ ID NO: 354 - DNA, 2772 bp, Saccharomyces cerevisiae
atgagattctcacactttctcaaatacaacgctgtccctgaatggcagaatcattacctagattataacgaattgaaaaatttgatctacacattacagacagatgaattgaaacaagaaacgccaaccggtgacttaaacgatgacgctgactctcagactccaggtccaatcgctgatatagaaagcaacatagctgcaggagaaccatcttcatcgaaaagaagatttacacataaactcaagcgtaagctctttggttctaaaacaccttcaggaagcaaaaggggagactccgacgaaaaggccatagatgggaacaatattaacgaggaaacaattgagttagacgagttatctcctcaagggaaaaccacctctttcaataagaattttatacgtaagaaattctttgaatcacgcagctcatctgtgagtagcgagggaaagacgctcttcagttcttatgatacattcgtaactaacctgagcgacgagaaattgaaagtagatgatttctacaaaagaatggaagctaagttctatgaaagatttgaccacttgattaatgatttggagaaggaaggcattgtaacaagattgaatgaaactttcaatcctgaaattcaagcattgcctcctttaagagaaattatttctggtacatcagagacacattcatctaataacccatttgaaatacactcttcaaacatcgacagtgaattgagaaataggtttgattacagcgaagaagaaatggatgaagatgatgacgttgacgtgtttgctgacactaccgacaataccgccctcttgaattattcgcaatttaacattaaatctcagaaaaagtcattattaaaacagacaataataaatctttacatagacctttgccagttgaaatcttttatcgaattgaacagaatgggtttcagtaaaattactaagaagtctgataaagtattgcacatgaacactaggcaagaattaatagaaagtgaagaatttttcaaagacacctacatcttccagcatgaaactttaagcagtttaaacagtaaaattgcacaacttattgaattttatgctgttctcatgggtcagcctgggaacgtagattcatgcaagcaagagttaaagtcgtacctgcacgaccacattgtttgggaaagaagcaacacatggaaagacatgttgggcctctcttcgcaaaataacgatataataactattgaagatgaagctgagaaacttatgcaagaaaagcttcaaattgaatatttcaagtatccattgcctaagccaattaatttgaagtttactaaaattgaaaatttggcagttcctaagctattttttgggaaaagagcaatgaaaataggcttcattatcattgtcacaggtgttttgttgggtgttaaaactttcaatgaccctgtcgaacaccggtgtatggcattggtagaatgctgtgctttcttatgggctagtgaagccattccattacacatcacaggtttattggttccccttctaactgtcctttttagggtactaaaagacgatgacggtaaggtaatgggagcagcagctgcctctacagaaatcttaggtacaatgtggtcgtcaacaattatgattttattagcaggtttcacattgggtgaagccttgtcgcaatataacgttgcgaaagttttggcatcgtggttattggcccttgcaggtaccaagccaagaaatgtccttttaatggcaatgagtgttgtattctttctttcgatgtggatttccaacgttgcctccccagtattgacatattctctattaacacccttactagatccgctggactacacttcaccgtttgctaaggcattagtcatgggtgttgcactttcggcagatattggtggtatggcttcacctatttcttcgccacagaatatcatctccatgcagtacttaaaaccttatggaatcggctgggggcaattttttgctgtcgctctgcctacaggtattctatcgatgctgtgctcctgggccttgatgatactcacctttaaaataggcaaaactaaactggaaaaatttaaaccaataaggaccagatttactataaagcaatattttatcatcattgtaactattgctactattcttctatggtgtgtagagtcacaaatagaaagtgcttttggatcgtccggtgaaattgcagtaataccgatagtcctgttttttggtacaggtctactatcaacaaaggatttcaacacattcccttggtcaattgttgttcttgctatgggtggtatagcccttggtaaggcagtttcatcttcaggcttgttggtaactattgcaagagcattacaaaagaaaattcagaacgatggtgtttttgctatcttatgtattttcggtattttaatgttagttgtgggcacttttgtctcacatactgtgtcagcaatcatcattattcccttggtgcaagaagttggtgacaaattatccgatccaaaggcagctccaattcttgtgttcggttgcgccttgttagcctcatgcggtatggggttggcttcatctggatttccaaacgttactgctatttctatgaccgataaaaagggtaatagatggctaactgtaggcgcttttatctccagaggtgttcctgcttcgttgttagcgtttgtctgcgtaattactctcggttatggtattagttcttccgtcttaaaaggtagcacttaa

SEQ ID NO: 355 - DNA, 2828 bp, Saccharomyces cerevisiae
gtagtcgtattgaagcaagcttatttgaaaattgcgaataatcacctctcatgacggaacaaagaaccaaatatgcagatagcatattgactactaagagtccttacgaggctaccgaaactattagaatcaggttatcgcaggtcaaattgttgaataaagacttttacctgttatttaaggaattggcaaatctgaagaggaactatgctcagcaattgagaaaaataatagctgaaaatgaagatataacaaagatcttaaacgctcaaatgattgaaagtaatgttttgactccgcaggaaatgagtgcattcagattcaactcgctgggagagctaagaaatgtatgggatactgtaattgaagaactaaaatcagatttgaagtcaagtacagaatactacaacactttggaccagcaagtcgttcgtgaattgaaggaatccgtggagaacaatactagctggagagaaagcaaggacttacattccaagcttagtaaaaatgcagcttcaattgagcactatagtaagaataacgaaaactctagtcacttagaagaggcaagaaggcaatgggaccagcaaagcccctatttgtttgagctgttcgagactattgactataaccgtttggacactttaaaaaactgtatgcttagatttcaaaccagttttagcgattatttactaaatactaccaaagaatgcgaaacggtgatgacgaaattcctggcattcgaaccgcaaagtgaaattgatcgttttgccaaagatgccagtcaatacaacttccaactatcctcttcttccaaagaagtagttcctaataatgcttcgccagcttctgccactggtgcccgcccggtctctgtatccaatggtgccgctaatacggaaagagaaaagaaatccccacaaaaggataagcgtaagagtgcatttggaaacattggacatcgtcttgcctctgcatcttccagtctcactcataatgatctcatgaataacgaattttcagactctactaataattcttccttgaaatcaaaaaagtcgtcccacaccctaagatctaaagtgggctcaattttcggtagaaataagaccaagaacaagagacaacaacaatcatcatcaaactctcatattcaggcatccatcactgagactccgaataattcttccaccagagtgtcttcaactgcaacttcttctatttatcagaagcaacgtcgacccacctattcatcatcaaaatcaaacaattggaccccgggtgaagctagtgacactcctcctcttcctccccatgctactcctaaaaacgtagatgcacctgttactgccgatacaccacctgcgcaaacttttactccttctgaagtgcctccttcaacgccacaacaaagttctccacccactgcgaaagaaccagactcaagtaacttacccaagacagtaccgatatcaatttctcaacctccacttcagccacaatcaaaaacaaaaccattaccagttgagcctgcctctcccagtatttcacttcctactgctacggttgataaccaaccttcaggtcaagttgattcaaggcccttgcatatccgcgcacctgctttaccaccctcaaggaaacaaaatttcattcataacagggattctcaactctatgactctttgcctaatcacggctcaggcgctacccctacttcttcttccttgtcctctattccccaggaacgtccagtttccacactctcctctcagattactggcgagctaagagaactaaatcctcaagccacgggctcttcaacatctttagttggtcaatcgttgtttcagcactcctctttagatacatctcaatttgggttgaatgctagtatcgcagaagtgctcaatgcttctttcaaagacggtatgttgcagaactcccaactgattggggaaattgccctcaactatttacccaattctgtcatgaattcgcctttacctatcggtattaatttgagaatcaataatggcgctaagttcgaaaaggtcattctgaaccaagcctttattgagcgtgttgctccagaagaattcaaagttaacccttcatttatcgattctagaaccttaggagctattaaatattccataaaggagccgatcgcgcctattgttattcatccggtctggagatttgaatctcaccaggcaagtgttgtattgactgtcaagatgtcaccaagcttacccgatgaaatatcacaaatcgtaatagaagacctcgttgtctttgtgaatatcgatggtgctaatgcaacaagcgctttatcaaaacctcagggctccttcagtaaagaaaagaagagaataacgtggagatttaaagaaccagttgttttgacaagaaatggtgaaggtcaaagattaatcgccagatttattacagacggcctggcacatgaatccgctaaaggcgtgattaccaaattcactatcagtgagacggataacgtggctctaccccatagcggagccggcagtggaatcaccttgacttgtcaggagctggatgaaaacaatccatttggtggtgagtggctcgatgtaaacacaaaaagaactttgaccactggtaactaccatggtctcgcttgatatttctgctatgcttctatttttcaatattaattgttcttttgtttgctaatccataatttatggaggtggcgccgctaaatcatattttccttttgaaacctttgtttaagacttacgtagaactacacttatgtactataatgttctgtaaagattctgtat

SEQ ID NO: 356 - DNA, 632 bp, Saccharomyces cerevisiae
ttgctaattgtgtgtccttgacaaatacaaaacaaacaaaaatccactaatccattgtaatgtttttacgtactcaagctcgtttcttccatgctactaccaagaagatggacttctcgaaaatgtccatcgtcggccgcattggctctgaattcactgaacatacttctgctaataacaatcgttatttgaaatatagtatcgcttcgcaaccaagaagagatggccaaaccaattggtataatatcaccgttttcaatgaacctcaaatcaattttttgacagaatatgttagaaaaggcgctttggtatatgttgaagcagatgctgctaactatgtcttcgagagagacgacggttctaagggtactactttgagcttagttcaaaaggacattaatttattgaagaatgggaagaaattagaagatgctgagggccaagaaaatgctgcttcttcagaataattgtaatatttacgcttgcttatttcgactcttcctcgatattttttatctagagcatgctttcttttacttaaaatatttatggcaaataggaaaaatacatttggaataacgaactagttatgtaaaactatgcttattctcaaatagaatgtatatatacta

SEQ ID NO: 357 - DNA, 1768 bp, Saccharomyces cerevisiae
tgtaattctgatataaaagtattccgatttattcaagattgagaagctgttttcagaatttttgattggagagagcctgggcctaagtcatgatgaaggaatcgaaatctatcactcaacatgaggttgagagagaatctgtttcttccaagcgtgccattaaaaagagattacttctgtttaaaatagacttgtttgtgctatcatttgtttgcttgcaatactggattaattatgtcgaccgtgtcggtttcaccaatgcatatatatccggtatgaaggaagatcttaagatggtcggaaacgatttgaccgtgtctaacacagttttcatgattggttacattgtaggtatggtccccaataatttaatgttattgtgtgttccgcccaggatatggctaagtttttgtacgtttgcttggggtttattgaccttgggaatgtacaaagttacatcgttcaaacatatttgcgcaattagattctttcaagccttatttgagagttgcacattttcaggaacacattttgttttgggttcgtggtataaagaagacgaattgcccattagaagtgctatttttacaggtagcggtttggtgggatctatgttcagtggatttatgcaaacaagtatctttactcatttgaatgggcggaatggcttggcgggttggagatggttattcattattgatttttgtatcacattacccattgcaatttatgggtttattttcttccccggccttcctgatcaaacaagtgctgttagcaaattttctatgacgagatacatttttaatgaacaagagctacattatgctaggagaaggctccccgctagggacgaaagcacccggttagactggtcgactattcctagagtcttaaaaaggtggcactggtggatgttctctcttgtttgggttctgggaggtgagaacttgggtttcgcatctaattctacatttgcattatggttacaaaaccaaaaatatacgttggcgcaaagaaataattatccttcggggatatttgccgtaggtatagtttctacgctttgttctgctgtatatatgagtaagatcccaagagctaggcattggcatgtttctgttttcatatcattggtaatggttattgttgcggtactaatacgtgcagacccactaaatccaaaagtcgtcttttctgcacagtatcttggaggcgtagcatacgctggacaagcggtttttttttcgtgggcaaacattatttgtcatgcagatcttcaagaacgtgctatcgttcttgcttccatgaatatgttttcaggggccgttaacgcatggtggtctatattattctttgcttcagatatggtgcccaagtttgagagaggttgctacgccctcttggctacggcaatatcaagcggaattgtctcggtcgtcatacgctcactacagataaaagagaatttgtctaagaaacaggttccttatatagatgctaatgacatgcccggagaagatgacgatgacgacaaccaggataatgaaaatgatggcgacgacgagagtatggaagttgaacttcataatgaggaaatggccgaaatttcaaatcctttccgatagatacattcgattcttttagctattcattggtcctgttgatggtaatggaaaatctcagggctcttttcaaaagtatcatgaacaatagccgctaagacacttctaaagaggtctacttagtttttcatcatgcatttttc

SEQ ID NO: 358 - DNA, 998 bp, Saccharomyces cerevisiae
ggtttaatatctaacaatttctacagcagttacacgaattattactagttatatttccagtgaaattattgaacttgcctccattttcattgacgcatattgatattttcatattcattcttttgggctggttcgaattgtctctttaccgaaacagttttattggggcacggcgagaaaagatataacctgtgacataatggaatacgccactatgtcttcttcgaactccacacataactttcagagaaagattgctcttataggagctagaaatgtcggcaaaaccacattaacggttcgcttcgtagaatcgcggttcgttgaatcctattatcccactattgaaaatgaatttaccaggataattccttataaaagtcatgactgtactctggaaattctagatactgcaggccaagatgaagtttctctattaaacattaaatcgttgacgggcgtacgaggcataatactgtgctatagtataataaatcgtgctagctttgatcttattcccattctctgggacaagctggtagatcagctgggtaaggataacctcccggtaatacttgtgggtaccaaagctgatttgggaaggagtacaaaaggtgtaaaaaggtgtgtcacgaaagctgaaggagagaaactagcttcgacaattggcagtcaagataagaggaaccaggcagcatttatagaatgcagtgccgagttagattataatgttgaagaaacttttatgctccttttgaaacaaatggaacgtgtcgaaggaactctggggcttgatgccgaaaataataataaatgttctataatgtgaaaactcgagcgtccctaggatatcattggttttattagtaggaaagcggtcagtacaatttgtataataataccacatctttctcatacctgttacggtgtgctgcatttatagtaagaggttgaatattgataaaacctttcaatggcttggacgcctcgtttaacaa

SEQ ID NO: 359 - DNA, 2507 bp, Saccharomyces cerevisiae
aaataagtgaggcgaggtaattacatatatctgaaaagaggtacagtataacactctctatagatggaacttcagaatgatttagagtcgctcgataacgagctgaatgattttagtgaagatccatttcgtgatgatttcataacggatgaagatgctgtaagatcggggtggcgatctgcgtggaccaggatgaaatattggttttataagaatagactgaagtggacaaacaatcccatagtgattggcgacgcgaaagatagtagggatggttctaactttagaaggggtataccgctatatgaattagacgcgaatggtcaacccattgatactgaacttgttgatgagaatgaactttcttttggaacgggatttcattccaaagtgccttttaaaataatatttcgcacattgtttggctcgctggtgtttgccatttttttaattctgatgattaacatagcaaaaccccatcactccacgagagtgctatcgcactttggcagtcctgaatttgacccttacgtgaagtattttaacggtacgcatgaatttttccccttaacgatagtaatttcactagacggtttccatccttcactcatatctaagaggaacacaccgtttttacatgacttatatgaattgaaatatgatggaggtatgaatatcacgtccacaccttttatggtacccagcttccctacggagacctttcccaaccattggacgttggttactggacaatacccaatacaccacggtatagtctctaacgtattttgggatcctgatcttaatgaggaattccatccaggtgtattggaccctcgaatatggaacaataatgatacagaaccaatatggcaaactgttcagtctgcatttgacggtgatataccattcaaagctgctacccatatgtggccaggtagcgatgtgaattataccaagtataatgaagagaaactacaacctgaacataaaaatcctattgctagagagagaactccattttacttcgacgaattcaatgctaaagaaccactttcgcaaaaattatccaagattattgaatatgtggatatgagtacactgaacgaaagaccacagctaattctcggttatgtaccgaacgtagatgcctttggacataagcatggatatccgtcagagtcggaatactattatgaagacttcactgaaacactgggggaagtagatacatttctgaagcaactagtggaatcgctgcaagaaagaaatttaaccagctttactaatttggtcattgttagcgatcatggtatgagcgatatcgtagttccctcaaatgttattatatgggaagacttactggacgaaaaattgaggaaggattatgtatcgcacgcatatctagagggtccgatgatggctatatcgttgaaagattccggaaacatcaatgaggtttaccacaatttaaagacttctatagatgaagacaagtatacggtttacgttaatggaaatttccccaaagaatggaactttaatgatggaaaaaatcatcacatggcgtcaatctggattgtgcccgagcctgggtatgcagtgatgaagaaagaacaattgaagaaggtggcaaaaggtgatcataaggacaaaaacgaagacaatgtgttcacgattggatcacatggatacgacaataacgcgatcgatatgagatctgtatttattggtatggggccatattttccacagggatacattgagccgttccaaaataccgaaatttacaaccttttgtgtgatatttgcggtgtggcagaaaaggacagaaattccaatgatgggactgggatgcttatgaaccaactccgcgaaccccagagcagcgaagaagtagagattgaagatgactttgattatttggtcagtaagtttggtgaattcagcacttataatataatttggggcgggtaccccgaagagacagaacaagacaatgttgacaatgataatgatgacaacgacgatggaaacactgatgaaatagccgctatgccatcttcgtcattaacgataaaactagaaatgacaacttcaataccatcagcaactgagactctactgggcgaaacatcaccatcatcaagaagcagcagcagcagcagcatacaagctagcgctactgctagcacagtgggggattggcttcaagacataatcaacgacgcaaaagatctcattgacgacataattgacagcatcgacgatttagtcgattctgatacctaagcttaaggtgggacaaccgcgttatgaaataaaagacgcatccttgtgagtcccgcgcaagaaaacatatgcacgcagaaagagacttttatttagatttagtatatctctaaacttaattcagaagtgaaccactctctcacatccgatgacagtggggtcaataagatgtactaagtaagaaaactaattacacaataaaaagaaacaagctg

SEQ ID NO: 360 - DNA, 439 bp, Saccharomyces cerevisiae
atgtgtgtgtgtgcgatacccttttttgaattctttctaccttttatccctcactatgcctttcttttatttgtttcgtccgttcgctttactgtaaatgaacgttgttactacttagtgtgcgtgctcaagttgaattgtgcttttttttttatggttatgatatttgaactaaaacgagtgtgtgtttcgtatttagacagatcccgtaaaatccaaattgttagcttttttccttttatcactattatttttttccactcttaacaatgtgtgtgattgttaagtctggctgatgactcctcatgataactcatgtgtgtgtaaaattgagtttttcatggttgttttcaaagataaattacatagtagtgtaatcaaaatagtgtatgatttttttttatttttagaaaatctaaataataaataaataaaaaat

SEQ ID NO: 361 - DNA, 123 bp, Saccharomyces cerevisiae
atgactttaccaggtggtgttattttagttttcattttggtcggtttggcttgtattgccattattgctaccattatctacagaaaatggcaagctagacaaagaggattgcaaagattctaa

SEQ ID NO: 362 - DNA, 2157 bp, Saccharomyces cerevisiae
aatttagatcacctaaaggaatgctagcaaaggaactaggaagtggtaagcatatgaacacacgaatataaaagatatggcgcgtcaaaagcttactttcaaagaacaaatggatggtttcccctgggtccaacttgttgttgtgtccttagttaggttcagcgaaccaattgcgttttcgtcactatttccttatgtttatttcatggttagagattttaatattgctcccaatgatgctcaagtgtccaaatattcaggttatttatcttcatcatttgcgttatgccaagtcatatctgcgtaccactggggtagattctctgaaaagcatggcagaaaaataacattgacttgcgggcttataggaacatctgtatcattgttaatactgggattttcacgcaatttctatcaggctttggtggcaagaagtttaatgggattgctaaatggtaacgtcggcgttattagaaccattattggtgaaatagcaactgaaagaaaacatcaggctttagctttcagtactatgcctttattatttcaatttggtgccgttgttgggcctatgatcggtgggtttcttgtatttagagatggaacaatgaatgaagtgccactatggtttccacattttgcaaaaagaataattaggtcatatccgtacgccttgccaaacgtggtagtgtgcatgtttttgatgtttggtttaactaatgcaacattgtttttggaagaaacacatcctgcttttaaagatagaagagattacggtttagaggtcggtgattttattaagaagaatatatttggtatacagccgaaaagaagaccctggcaaaagcgcattcaggatgattcggaaaacattcaccaccgtaatgagaatgtgaacagcattcgaggacaagatagtgaagaggatgaaaatagtcccctagtgaatactaccaatgacgatgatactgaaagcatacaatcgattgatcctattttaacaagaagacagtctgtaggcctgattaggacatattctctgcatgaaccaacagacgctgtgcatgccaatatagatacagctccagacggttgtaaagaaagtagtatatttcatcacgtttttcatacaaaagtattttaccctatatcggtgaattttattatggctttacatttgattgtatacaacgaatttttgcctgtttttttagcttatgatttagccgtagatccagaaaatccaaagaagctggcttcaaaatttccgtggaaaatatctggcggtataggttatgaaccagaacaaaccggtactcttttgtcgacaacaggtatctttggttgttttgtggttattttcatttttcccatagttgatcgaaatttcgattgtttaacaattttcagaactttagtcaagctgtaccctattatgtacgttatggttccttacgttgtttttctacagaatgaacggattcctagctggtatactgtcgtctacttgtacataatcacagggataaaaacattttgtggcgctttaacgtcaccacaaattatgttattaattcataattcgagtcccttgagttgtagatcagtcatcaatggcgccaccattagtatttctgcctctgctcgtttcataggtcccttagtatggggctatattatgtcttggtcccagcaaaatgacgtcgcctgggtcagttggtggtcgttaagtcttttttgtatggtagctctttatcaaagttataagatagcaccaattgatgataacgaaaatgagcttcatggacagggtagtgaagatgcctacaattcgcagtcacagtcttctgatttaagaatggctcatcgatctagtttaagcagcttaagtaaccaacgctgtaccacatgagaaattttttttcagaaggcttgcaaaaaggatatctaataaaaaaaaaaatgaactccagtagattttagatatcaaccataactggcgaaaatttgcacctttttgatgagagcatgttatgtcaaggcatggccgcgtgatggcattgcactcaagatagtttccggaattattatactccttatgtaaatttcaatccgtttatgtaattatatccaggaactcaatttgaccagacaagt

SEQ ID NO: 363 - DNA, 421 bp, Saccharomyces cerevisiae
aaagcgtcatggacatcttgaaactgtcagattttattggaaatactttaatagtttcccttacagaagatcgtattttagttggaagcttggttgctgtagatgcccaaatgaatttgctattagatcatgttgaggaacgtatgggctccagtagtagaatgatgggcctagtcagcgtccctaggcgttccgttaagaccataatgattgataagcctgttctgcaggagcttactgcgaataaagttgaattgatggctaatattgtttagcgcatatggttctaatagtttccatagtaacaattgcttggcaaaaaaggtctggcttcgaaagatatataaacgaatatgaactggactgaacttagatatttttttctgtattaactaaaatttagcgcaaataataacaatat

SEQ ID NO: 364 - DNA, 686 bp, Saccharomyces cerevisiae
atgagctgtaccactgataagttaatacaaaagtacgacgcccttgttaggaaaaccacagaacataaattcgctaaggaactatgtgccggaacattgaaggaccgtagtttgtacatctatttatcacaagatctgcaattttttgaaactagcttaaggttgatatgtaagacgacttctttagcaccaactactcacgctttaataaccttagccaaaaagattggatttttttctaatgatgaaaactcatactttcatgactgcttagaattattggcaccatccctcaccaaggaagaaagagataattttgacaataaagcgatccccggcgttgatgcgtatattaatttcttagatgagctgagaaaggacgcctcaattacatggccatccttagtaaccagcttatgggttgctgaggaactctattggagatgggctcgtgatactcctagagccccagggttgcattggaaatatcaaaaatggattgatttacatgatggtgagcattttcaaacttggtgtgaatttctaaaggctgaagttgacaagtttcccgtcgaagaagtggaaagcatatttgtgaaggtttcacagttcgagttcgaattttttgaatcttgttacaacgcctaatctcaagtagtatataacacttacttatatatatatat

SEQ ID NO: 365 - DNA, 806 bp, Saccharomyces cerevisiae
atgcgatataataattatgacaactctggaagttccttcttaactagagtagttaaaaagtcagatatggagaaaacgttattattaaatagagaaattgatgactggaagtcaaacgataaaaagaaggcatataaggaacgcggaagagtttatgcaagttgctcatttattgaagtatccttttctcaaataagggctgttgatgttgaaaaaaaaattgagaatgccgaacaactaagagatcttacaagaaatattgttaagaacaaaaccagctctttgaacgaaattacaccctcaaagaatcgtgtaactagtgcatgcaattccgagagacgtacgactagccaagaagcaaacaatcttgaaggctaccatagttgtgcacaaggaactagtcggtctgccagtattacgaagaaatacagcaaaaagactactagtcgtcctaaaagagaaaagagacaaacaatcctcccaaatggtgagataaaggaatgctctaaatgtaaagacacttggacaattcaatggcgtagtggacccgaccaaaacagggaactttgtagtccctgtggactcgcctatggaaaaagactgaagaaggagaatgaaaaaaaaaggcaagcagcagataaaaggatagatcgaaacaatccatagtatctatttaattctttcaccgcatagatgatatttttccactaggatattccaccttttttttttctaatattggcacttcagttataatgtattttcttcgtctttgttcttatattgtactattattcataatattt

SEQ ID NO: 366 - DNA, 3077 bp, Saccharomyces cerevisiae
ccaggaatacagaaggtatccaccgccagttatgctgatcatcaatgggaagatcatccctatagctcatactatttgtgcattctccgccttctttgcagctttggtcactggttattcattacattttcataaaattgtaaccaatgcacattatacgtatccagatgagtggtttcctagtgtatcagccactatcggggaccgctatccggaacgttctattttccaaatcttaatagctctaactgcttttccaagatttttactgctactaggtcactactacttgaaccaatctaaggtatgcttccttgtcggtgtactccggacagtctcttgcggtggttgggtatacattacaagtacagatgaccacgatattcatgatatatttatgatcacatacattgttttaacgttaccatgggatataatgattacccgctattctagtcctttaacttcgaagaacaaagggttgactgctacaattttttttggaacattgttcccgatgatttactggtacattcagcactccgtccaacagagagctggggcatattctatatatgcttatttcgaatggtctctgattcttttagatattgcatttgatgcatttgcttacgctgatttcaaaaagatagatattgttctcgcttttaatgagaaacccggtaataccagttttttccaaattagagactctagtcccataaattatggagaagaaaaaagttcagaattgcagaaaagtggtgaaaagaaggttgaaaaggaaaaacccgttgctagaagcgcaactggttcatatttcaggtttgactcttttttttacttactaacaaatatttttaacggttttcttttctggtcgaacgttacgtccctgttatgtagtatttggcatttcccgctatggtatatgggaatctcaggttatgaagctgcaatattgggttatttgggacccattttcttatatctgccgttcgtttctgaagccttcacgcaatatggtgtacttttaggaggtattattgccattggtgcctatattgttcagatgccagaattaaggttgatttctgtagctgtgggaacttccattaccgttgcaacgtttgtacaaaatctaagatatatcacaaatgcggagactagtttctcttttgctctaacttggctgttaggtcttgttgcatctgtgatcttgaaaatggggttctataccaacaatccaacttgggtcattttagatgaacgtaatggtgggtataataagacagctctcgtgcttactgttttattcggcatgctgtcgccttatgttaattcaattaatttcgaagggaaaaggaatgctcaagcaaaatctgcttcgttgattggcaaattatttttggctgttggttttggctcgttgttattcggaattcatcagttattgacggattcttctactactatttattgggcatgggaaggttacaatgaatcacacggtcccttgccatggccttggggcgccttaacttgtacggtcatgttatttgcttctttgagttctgtgaagtttatgggcaagccattagttccatgtttgttgcttctcatatccactgctgtactttcagctagaagcattacacaatggcctaaatatattttcggtggtttattgtacgctatcgctatgctttggttagttccttcgtatttttctgcattaggccaagttcaaaacatatgggtttatgtcctatcattctccgtttatattatctttgtccttgcccatgtttgggtcgttgcatacgcatttgttccaatgggctgggtactgagggagaagattgagacggttcttgccttttcttccacatttatcattattggtgctttaacatgcaaaaaccttaacattcaactggtgactatgggcaaaaaattcttcatttatgttttcttctttgccgtggccctgctatcactaacagctaggttcgtgtatgatattagacctacaggaattcctcagccttatcatccagattctcagttgattacagctggtatttggactatccactttggtctcgataatgatatgtgggcatctgaagacagaatgatcaaccttattaaagatatggaactagatgtggtaggtctactagaaacagatacacaaagaattaccatggggaacagggatctaactagcaaactagctcatgatttgaatatgtatgcagatttcggaccaggtccaaataaacatacctggggctgtgttcttctttctaaattccctatcgtaaattctacgcatcatttattgccctctccagttggggaacttgcgccagccattcatgccacacttcaaacgtacaatgacactctcgttgacgtctttgtattccatagtggacaagaagaggatgaagaggatagaagactgcaaagtaactacatggctaagctcatgggcaatacgactcgcccagctattttattaagttacttagttgttgatccaggtgaaggcaactacaatacgtacgttagtgaaacatccggaatgcacgacattgatccttctgacgatgatagatggtgtgagtatatcttgtataggggcttgagaagaacaggatatgctagagttgcaagaggaacgataaccgatacggagctacaagttggtaagttccaagttttgagtgagcaagcgttagtagagcactcggattctatgtatgaatacggtcatatgagtgaaccggaatatgaggacatgaaatttccagataagtttttaggcgaaggtgagaggggtcacttctaccatgtttttgatgagccacgttattacttataagaggccgtaaggtggttttataaatcagtgtaatcacattgtgtgtactgaaaatcttgataacttaaggtaagttatgtatccacctgatttttttgacctcgaattttaaaaatttatgtgatttctttatgtatgttacttagacgatcttgttatagttttgtaagaaattatacttcct

SEQ ID NO: 367 - DNA, 3340 bp, Saccharomyces cerevisiae
taatatctgtgcgtcttgagttgaagtcaggaatctaaaataaaaattaaggttaataaaaagaggaaagaaaaaaaaattaatcgatttacagaaacttgcacactaaaaatacacaactaaaagcaattacagtatgggaagtcatcgacgttatctctactatagtatattatcatttctattattatcctgctcagtggtacttgcaaaacaagataagaccccattctttgaaggtacttcttcgaaaaattcgcgtctaactgcacaagataagggcaatgatacatgcccgccatgttttaattgtatgctacctatttttgaatgcaaacagttttctgaatgcaattcgtacactggtagatgtgagtgtatagaagggtttgcaggtgatgattgctctctgcccctctgtggcggtctatcaccggatgaaagcggtaataaggatcgtcccataagagcacaaaatgacacctgtcattgtgataacggatggggagggatcaattgtgacgtttgtcaagaagattttgtctgtgatgcgttcatgcctgatcctagtattaaggggacatgttataagaatggtatgattgtagataaagtattttcaggttgtaatgtgaccaatgagaaaattctacagattttgaacggcaaaataccacaaattacatttgcctgtgataaacctaatcaagaatgtaattttcagttttggatagatcagttagaaagcttctattgtggcttaagtgattgtgcctttgaatacgacttggaacagaatacctcccattataagtgtaatgacgttcaatgcaaatgcgttcccgacactgtgttgtgtggtgctaaggggtctatagatatctcggatttcctgacagagacaataaaagggccaggagatttcagctgtgatttagaaacaaggcaatgtaaattcagtgagccttctatgaatgatttgatattgaccgtgtttggtgacccttatattactttgaagtgtgaatccggtgaatgtgttcattatagtgagattccaggttacaaatctccttcaaaagatccaacagtgtcatggcaagggaaattggtgttggcattgactgctgtgatggtcctggcactttttacatttgctaccttttacatttctaaatctccgttattcagaaatggattgggttcctcaaagtctcccattcgtttgccagatgaagatgcggtgaataatttcttacaaaatgaagatgacacactggcgacattaagttttgaaaatatcacttatagtgtcccctcgataaattcagatggtgttgaagaaactgtgctgaatgaaataagtggtatcgtgaagcccggccaaatattagctatcatgggtggatctggtgcgggtaaaactactttattagatatcctagcaatgaaacggaaaacaggtcacgtttcgggttccataaaagttaacggtattagtatggaccgtaaatctttctcgaaaataatcgggttcgtcgatcaagatgactttttgctgcccactttgactgtttttgaaaccgtattaaatagtgcgctgttaagattgccaaaagcattgtcattcgaggccaagaaggcaagagtttataaggtgttggaagaactaagaattattgatatcaaagatcgtattattggtaatgaatttgatcgtggtattagtggaggtgaaaaacgccgagtttccattgcatgtgaattagtgacatctccattggttttatttttggatgaacctacatctggtttagatgctagtaatgccaataatgttattgaatgtttggtaaggttatccagcgactataacaggacattggtgctatctattcatcagccaagatcaaatatattttatttattcgataaattggtcctgttaagtaaaggtgagatggtctattccggaaatgccaaaaaagtgtcagaatttttgagaaatgagggatatatctgtccggacaactataatattgctgattatttgattgatattacttttgaagccggtcctcaggggaaaaggagaagaatcagaaacatttccgatttagaagctggtacggatactaacgatattgataatacgatacaccaaacaacatttactagcagtgatggtacaacacagagagagtgggctcatcttgcagctcatagagatgagatcagatctttactcagagatgaagaagatgtagagggaacagatggaaggcgaggtgctactgagattgacttaaataccaaactactacacgataaatataaagatagcgtctattatgcagagctttcacaggagatcgaggaagttttaagcgaaggtgatgaggaaagtaacgttttgaatggagatttacccacaggtcaacaatctgctggttttctgcaacagttatcgatattgaattcaagaagttttaaaaacatgtacagaaaccctaaactattattgggtaattatttactgacgatcctattgagtttattcttgggaacactatattacaacgtctccaatgatatcagcggttttcagaacagaatggggctgttcttctttatactaacgtacttcggttttgttacattcacaggtctcagctcgttcgctctggaaaggatcattttcataaaagaaagatccaataactattactcgccacttgcatactacattagtaagataatgagcgaagtggtcccgctacgtgttgtaccacctatactcttgtcattgattgtttacccaatgactggtttaaacatgaaagacaatgctttttttaaatgtattggaatccttatactgtttaaccttgggatatcgttggaaatcctaaccatcggcataatttttgaagacttgaataactccataatattaagcgtgctggtgcttttgggctcactactgtttagcggactatttatcaatactaagaatattacaaacgtggccttcaagtacctgaaaaacttctctgtgttttactacgcctacgaatctttattgatcaatgaggtcaaaacattgatgctgaaagagagaaagtacggcttaaatattgaagttccaggcgctactatcttgagcacatttggatttgttgtccaaaaccttgtatttgacatcaagatcctggctctgtttaatgtggtgtttttaataatggggtatctagcccttaagtggatagttgtggaacaaaagtagataggcgtcgtatatagtctcttcttttacataagaaataataatttttggccc

SEQ ID NO: 368 - DNA, 922 bp, Saccharomyces cerevisiae
aaaactatacaaatcctattataagaagccagaagaaagctgatacaagatgagttgggaaggttttaagaaagctatcaacagagctggtcacagtgtgataattaagaatgtcgacaagaccattgataaagagtatgacatggaagaacgtcgttataaagttcttcaaagagcaggtgaggcattacaaaaggaagccaaaggtttcttggactcattgagagctgtgacagcatcacagactaccattgccgaggtcatctctaacctctatgacgattcaaaatatgttgctggtggtggttacaacgttggtaactattatttgcaatgtgttcaagattttgatagcgaaactgttaagcaattagacgggcccttaagagaaaccgtactagatccaataacaaagttttcgacgtatttcaaagaaattgaggaggccataaaaaagagagaccataagaaacaagacttcgatgctgcgaaggcaaaagttcgtagattagtggacaaacctgctaaagatgcctctaaactgccaagggctgaaaaagaattgagcttagctaaagatattttcgaaaatcttaataaccaattgaaaactgaactaccacagttagtttcattaagagtaccttactttgacccaagttttgaagctttaatcaagattcagctaaggttctgtactgatggttacactcgtttagcgcagattcaacaatatttggaccaacaatcaagagacgactatgccaatgggttattagacactaaaatcgaagaactattaggacaaatgacaagcctagatatttgtgcgctcgggataaaataaattaatgcttttgcctttagttttttacggtcatttatgtttctttcatttaaattaacagacctaaatagcact

SEQ ID NO: 369 - DNA, 1555 bp, Saccharomyces cerevisiae
caggttctcaaaactttttgttttaataatactagtaacaagaaaaatgacagttccttatctaaattcaaacagaaatgttgcatcatatttacaatcaaattcaagccaagaaaagactctaaaagagagatttagcgaaatctaccccatccatgctcaagatgtaaggcaattcgttaaagagcatggcaaaactaaaattagcgatgttctattagaacaggtatatggtggtatgagaggtattccagggagcgtatgggaaggttccgttttggacccagaagacggtattcgtttcagaggtcgtacgatcgccgacattcaaaaggacctgcccaaggcaaaaggaagctcacaaccactaccagaagctctcttttggttattgctaactggcgaggttccaactcaagcgcaagttgaaaacttatcagctgatctaatgtcaagatcggaactacctagtcatgtcgttcaacttttggataatttaccaaaggacttacacccaatggctcaattctctattgctgtaactgccttggaaagcgagtcaaagtttgctaaggcttatgctcaaggaatttccaagcaagattattggagttatacttttgaagattcactagacttgctgggtaaattgccagttattgcagctaaaatttatcgtaatgtattcaaagatggcaaaatgggtgaagtggacccaaatgccgattatgctaaaaatctggtcaacttgattggttctaaggatgaagatttcgtggacttgatgagactttatttaaccattcattcggatcacgaaggtggtaatgtatctgcacatacatcccatcttgtgggctcagcactatcatcaccttatctgtcccttgcatcaggtttgaacgggttggctggcccacttcatgggcgtgctaatcaagaagtactagaatggttatttgcacttaaagaagaggtaaatgatgactactctaaagatacgatcgaaaaatatttatgggatactctaaactcaggaagagtcattcccggttatggtcatgctgtgctaaggaaaactgatcctcgttatatggctcagcgtaagtttgccatggaccattttccagattatgaattattcaagttagtttcatcaatatacgaggtagcacctggcgtattgactgaacatggtaaaaccaaaaatccatggccaaatgtagatgctcactctggtgtcttattacaatattatggactaaaagaatcttctttctataccgttttatttggcgtttcaagggcatttggtattcttgctcaattgatcactgatagggccatcggtgcttccattgaaaggccaaagtcctattctactgagaaatacaaggaattggtcaaaaacattgaaagcaaactatagttggattacatcctacttttacacccctctgcatatttttctttcctcatgaccatttagtatttagcacttatttaatacaataatatattcttttaaccatacactatgataatgatatttata

SEQ ID NO: 370 - DNA, 1080 bp, Saccharomyces cerevisiae
actataacatcctacatttttacttgttttacgttcatttttatttgaagtttgtaaactttatcagaaagaaaacaagaagaggaaaaaggaaaagaggggtcaggttagtatcaataaaaaaaaagagagtaaacaaaacaatacagactcaattgaagcactataagaatggtaaagattgcgataattacttactctacctacgggcacatagacgttttagcccaagctgttaagaaaggtgtggaggcagctggtggtaaagctgatatatacagggtcgaggaaactttacctgatgaagtcctcaccaagatgaacgctcctcagaaacctgaagatattcctgttgccactgagaaaacgttgctcgaatatgacgcctttttgttcggtgttccaactaggtttggtaatttgccggctcaatggtccgccttttgggataaaaccggtggattatgggccaagggctctttgaacggcaaagctgcggggatattcgttagtacttccagttacggaggtggtcaagaaagtaccgttaaagcctgtttgtcttatttagctcatcacggaattatctttttaccactgggttataagaattcatttgctgagttagccagtatagaagaggtacacggtggctctccatggggtgctggtacccttgcaggacctgacggctcaagaactgcgtctccacttgaattgagaattgctgaaattcaaggtaaaacattctacgaaaccgccaaaaaacttttccctgcaaaagaagccaagccctccactgaaaagaagaccactacttctgatgcggctaagagacaaactaaacctgcagcagctacaactgcagaaaagaaggaggacaaaggattattatcctgctgtactgtcatgtaagaaacaacagttcgcgtctaatatttagttcttactaacattaattctatctcagcagatatatcaatgtaggacgttggaaaattaataaagaattaactctttttattttattttttcctttttatattaaaagtatatttctgtaagtccttgtactaataa

SEQ ID NO: 371 - DNA, 1042 bp, Saccharomyces cerevisiae
cacggttactacaagcactctataaatatattaatggatcctctcagctcagtacagcctgcttcttatgttggttttgataccatcacgaatcagatcgaacatcgtctgttgaagaaaggttttcaatttaatataatggttgttggccaatccggattgggtaaaagtactctaataaatacgttatttgcctcacatttgattgattctgctactggtgatgatatttctgccctgcctgttacaaaaacaactgaaatgaaaatttctactcatactcttgtggaggaccgcgttcgcttgaatattaatgttatagatacacctggatttggtgactttattgacaattctaaagcttgggagcctattgtgaagtacattaaggaacaacattctcaatacttacgtaaagaattgacagcccaacgtgaaaggtttattactgatacaagagttcatgcaattctttatttcctgcaaccaaatggaaaggagttgagccgccttgacgttgaagccttgaaaagattgacagaaatagcaaatgttataccagttattggcaagtcggatacattgactttagatgaaagaacggagtttagggagcttattcaaaatgaattcgaaaaatacaatttcaagatttatccttatgattcggaagaactaactgacgaggaattagaactaaacagaagtgttagatctatcattccgtttgcagtggttggttctgagaatgagattgaaataaacggtgaaaccttcaggggaagaaaaactcgttggagcgctattaatgttgaggatatcaaccagtgtgattttgtatatttaagggaatttttgattcgaactcatctccaagacttaatcgaaacaacttcctacattcattatgaagggttcagagcaagacaattaattgccttgaaagaaaatgcgaatagtcgttcctcagctcatatgtctagcaacgccattcaacgttgaatctcataagaatggtggtgattatatatcttatgttatt

SEQ ID NO: 372 - DNA, 1180 bp, Saccharomyces cerevisiae
tggatagacaagagacaggaaaattaaccagcgagatgtcgatagtctacaataaaacaccattattacgtcaattcttccccggaaaggcttctgcacaatttttcttgaaatatgaatgccttcaaccaagtggctccttcaaaagtagaggaatcggtaatctcatcatgaaaagtgccattcgaattcaaaaggacggtaaaagatctcctcaggttttcgctagttctggcggtaatgccggttttgctgctgcaacagcatgtcaaagactgtctctaccatgtacagtcgtggttcctacagcgacaaagaagagaatggtagataaaatcaggaacaccggtgcccaggttatcgtgagtggtgcctactggaaagaagcagatacttttttaaaaacaaatgtcatgaataaaatagactctcaggtcattgagcccatttatgttcatcccttcgataatccggatatttgggaaggacattcatctatgatagatgaaatagtacaagatttgaaatcgcaacatatttccgtgaataaggttaaaggcatagtatgcagcgttggtggaggtggtttatacaatggtattattcaaggtttggaaaggtatggtttagctgataggatccctattgtgggggtggaaacgaatggatgtcatgttttcaatacttctttgaaaataggccaaccagttcaattcaagaagataacaagtattgctacttctctaggaacggccgtgatctctaatcaaactttcgaatacgctcgcaaatacaacaccagatccgttgtaatagaggacaaagatgttattgaaacctgtcttaaatatacacatcaattcaatatggtgattgaaccggcatgtggcgccgcattgcatttgggttacaacactaagatcctagaaaatgcactgggctcaaaattagctgcggatgacattgtgataattattgcttgtggcggctcctctaatactataaaggacttggaagaagcgttggatagcatgagaaaaaaagacactcctgtaatagaagtcgctgacaatttcatatttccagaaaaaaatattgtgaatttaaaaagtgcttgaaaatccaataactttttcgttgaagcatcaatttgcccttgataattttcatacatgtacta

SEQ ID NO: 373 - DNA, 1070 bp, Saccharomyces cerevisiae
aaaagggtcacacaaatatccaaattggcaaacgatggtgtctacacataacagagataaaccttgggatacggatgatattgataaatggaagatagaggagtttaaggaagaggataacgcatccggtcaaccttttgctgaagagtccagttttatgactttgtttcctaaatacagagaaagttacttgaagacgatttggaatgatgtaacaagggctctagacaaacacaacatagcgtgtgttctagatttagtcgaaggttctatgacagtaaaaacaactagaaaaacatacgatcccgctatcattttgaaagccagagatttgatcaaattattggcgagatccgttcctttcccgcaagccgttaagatcctacaagatgacatggcatgcgacgttattaaaattggtaatttcgttactaacaaagaaaggtttgtcaagagaagacaacgtcttgtaggccctaacggtaatactttaaaggctttggaacttctaactaaatgttacattctagtacaaggtaacacagtaagtgccatgggtcccttcaagggcttgaaggaggtccgtcgagtagtagaagattgtatgaaaaatattcaccctatctatcatatcaaggaattaatgataaaaagagaattggcaaaaaggccagagttagccaatgaagattggtcaagattcttgcccatgtttaagaagaggaatgtggccagaaagaaacccaagaagatcagaaacgtcgaaaagaaggtctatactccatttcctcctgcccaattgcctagaaaggttgatttggaaattgaaagtggtgagtatttcttaagcaagagagaaaagcaaatgaagaaattaaatgagcaaaaggaaaagcaaatggaaagagaaatcgaaaggcaggaagagagagcaaaagatttcatagctccggaagaagaagcatacaagccaaaccaaaattagtttacaccgctacggaatccttcatatatgtctatatatatatagaaacacacacacatttcgtttacttagatatgtttgtaaa

SEQ ID NO: 374 - DNA, 420 bp, Saccharomyces cerevisiae
aaaaagacaaaatataccatgtccgaacaagcacaaacacaacaaccagcgaaaagcactccctccaaggattctaacaagaatggcagctccgtgtccacgatcctcgacactaagtgggatattgtcctgtccaacatgctggtcaagactgccatgggttttggcgtgggtgtgttcacctcagtattattcttcaagcgccgtgcatttcctgtatggctaggcattggatttggtgttggaagaggctacgccgagggcgacgccatctttagatccagcgctggcctcagatcctcgaaggtttagtcttaagcgacgatgctttatatatattcaaaaaaaaaaataataaaaatatgcagtaccattccgctctatatgtatatatttacgtaactttcaccactattccct

SEQ ID NO: 375 - DNA, 1437 bp, Saccharomyces cerevisiae
taaacgcaagaagtgtgcgtttctagctgagtaatggtgacaagacatagagtgactgtactctacaatgcccctgaggatatcggtaatcatatgcgccaaaatgacactcatttgactgttcgtggaggttctggtgtggttttacaacaaaggtggctattagagaggactggaagcttggataaatcctttacgagaatcacttggaggcccagagcggacttggctagaagtttaagcgttatagaaaatgaactgagtgctggcttttcagtttactcaaattcttcggatgtgccggaaaggtttattactaacccagtctacaattcatttcacagtgagaagtttgacatagagcagtacttgcctcccgaagtagatttgaatctgtcatggaatccagaagattttacatatgatatatcagtggagcccacacaaatccaaattgttgaatatcgtctgttgaaacagggtgaagaatttacaattgcaagagtgaaagatgagaaactcgaagtaggtgtattctttgtggatgcaagtgatgaaagtgatgtcgatattggtggaatacgttgtaattggaggatggacgatggtaaaatggaaagatgtcagaaaacatccttattgtataaacagggccatatcgcatacaatcactcgacgactacgacatcactatatctgaatgaacctatcggtttgcatccaaaaatcatgattgatctcacagatttcgaagaacgccctaaatgcatgtatctaatgcacctgcaattgccgttagaattatttatcgataaattccaatcctctcccttactactttttggagaagacgacttagaattaccagaatactctcttcgagataaggcatggggttctgaaagtatctttgaattgaaagccggcacaatgaatgaagtgacattgcatactagatatattgagccttctaataataaaggggataaattagaagtttcatttgatccagaagttatattagcctgcgacacaggtgacaataaagtttcccgtaatccattttataaaaaaggtctaggatatgaatctctctttacagacgatactacattccgccatttgaactcgacaactcttctagtaccaattccaaggcctgacacaaaggattattccaagatcaaaaatggtacgttactatgcttactcatctccatcatatacattttctccaaggtatttggtaacaacaagaagaaaagatcagtaaaacgggaataaaaattgttctactgtgcactcgtattttctgaattcaaaacgataggtttcctataagttttttgatgataatttgattaattctatgtatacataatatatctattgctttcttttcctttattttcaatattatacaagggaatggaaaaa

SEQ ID NO: 376 - DNA, 1115 bp, Saccharomyces cerevisiae
tgatcttgaaagccagtttagatagattttagaacaaacagaaaagtaaaaattaaaataaaaatgagtatccccgctgacattgcatctttaattagtgacaagtacaaaagtgccttcgataatggtaacttaaaatttatccagactgaaacaacgaaaacaaaggacccaaaaaccagcatgccatacttgattagtcacatgccaagtctgatcgaaaagccagagcgtggccaaactccagaaggagaggatccactaggcaaacctgaggaagaattaacggttatcccagaatttggtggtgccgataacaaagcgtataaattgctattaaacaaattccctgtaatccctgaacacactttattggtaactaacgaataccaacatcaaactgatgccttgaccccaaccgatttattgactgcttataagttgctgtgtgccttggacaatgaagaatccgacaagagacacatggtcttttacaattctggtccagccagtggttcttcattggaccacaaacatttgcaaattctgcaaatgcctgaaaagttcgtcactttccaagatagactatgtaatggtaaagaacatttcctaccaactttcaatactgaacctttgcaagatgctaaagtctcgttcgctcattttgtcttgccaatgccggagtctgaagaaactgttgatgaagacctattagctatgtgttacatctccatattgcaaagagctttgacctttttccaggactggttgaacgaaaatccagaactaaagaaatcctacaatcttatgttaaccaaggaatggatctgtgtcgttccacgctcgaaggccttttctgatgaaatgaagataggtttcaactccacaggttattgtggtatgatcttaaccaaaaatgatgaagttttctccaagattactgaaaaacctgaattgattaacgatatcttattggaatgtggtttcccaaacacttctggtcaaaaaccaaacgaatacaactattgagtccttcacaagtacaagtatacacgtatacatgtatgtatatatatgtatttaaatgatagaagtaatttctatatgtatatgtc

SEQ ID NO: 377 - DNA, 1190 bp, Saccharomyces cerevisiae
gctttttttcgtcttgcattcagatttaaatagctgcttctaaatatatactttacgcaagagggtccggtcccaataggaaccaagctattgcaattccagggttcaagagagaaaaatctgtaatcacttcgaaccaatgtttagtaaatacctcgtaactgcatcttccctctttgtggctttgacctctgcagcatctaccgttgatctagatgctctgcttcttctaccaggggtcgagtcccacgacggcgttgatactgtattttcgaccaaagacttttatcaagtgtcattcgtcaaatccattgctcctgctatcgtaaacagctccgtaatcttccacgatgtttctcgtggtgtggctatgggcaatgtcaagagcagagcaagtatcttcaacccagaggaaacgtattacgattgggaacagtaccaagtagtaaataacggagactggcgaaccgaatgggcacctgcctctgactgcatttggagggaggagaaggataacagcgacgaaacaccggacagattccccatctcggtgccatataattggacgtcacagtactcaattgtagattatgacacagacgctaacgaagacaatttagatttcaggtttattaaatcattgctagataagaaaaattggttgaaaaaaattaaccagactgtttcccaatccagtattatggtagcaccaatgattaggccatacaatgtggtccagctttggtattcaaaagatatggtttgggcaaacgtccaaagacaatattgtagcggtgtttatccaggagggactcaatgtagcgcttggtccaggtactaccatgttgatgcacccacctgcgatgagcctgtcgcctcttacatgaccaaaatgttggaaaatgaggttcagtgtcccaatgagagaaacgcaactaccctagagcctctccgcctgaataagcagggagactctgatttttctttgactttcgaggaagaggaagaggaagagacaggatctaaatctctttggagtacattgaaaaaaattttctctaaaagaagtataagttgatcttagttggtagcactttgatgaggtctctagcaaaaagtctacaaacaaattcttgaaagtgtttgattgtatatcgatatatcagaaacatacatatgatttttatctt

SEQ ID NO: 378 - DNA, 868 bp, Saccharomyces cerevisiae
gcagactaatatgaagaagacgttcgagcagtttcgaaaaagcaatttactatttcaggttctcaaaggaccccagcatctagaatgtcagaagttatttgtccttgattcttcattcaatccaccacatctggcccattttcaactactatcgcagactattaaaaacttcaaattgaaggacacccgttcgcatgttttattactgttagcggtgaataatgcagataagttgcctaagccggcatcttttccaactcgtctggaaatgatgtgcttattcgctgactaccttcaggagaagctcccccaatctgtagtatctgtcgggttgactgttttctcgaaattcatcgacaaggacaaaatattacatgagcaatttgttaaaggatgcagtgcagatataggctacttagttggttttgatacaattgctaggatctttgatgaaaaatattatcatcctttaaaaatcagtgatgtaatggagagcttcatgtcgggatctcaattatattgcttggcgagaggcgattgccatctcagtgctgaatcgcaactaagatacgccagtgacatccttgagggaaaattcgaaccggtaataccaagagaatggggcgctaggattcatgttatgcaaaatgattatccagcattaagaaatgtttcatcatccgagattaggaacaaactgaagaatgggcaagtggagagtttgaaagacgagttgccattgtgcatatacgattatttgatcaataataagacaatatttgattgaaagagaaagatagaaattcaaatgcctttcatggagatatatgtatatagataaagataatattaggaacaaaaaaaactt

SEQ ID NO: 379 - DNA, 2359 bp, Saccharomyces cerevisiae
acattcatatcaacactttcatcctccccttcccccatagcaatgaagataacgtgtacagacttggtgtacgtcttcattttactcttcctaaacacgagttgtgtccaagccgttttttcagatgatgcatttatcactgattggcaactggctaacttaggtccttgggagaaagtcatccctgattctcgagaccgcaacagggttctcatcttatcgaaccctaccgaaacttcctgcttagtttcttcgtttaacgtttcttccggacagattcttttcagaaacgttttaccctttaccattgatgagattcaactggatagtaatgaccataacgcaatggtttgtgtgaactcttcaagcaaccattggcagaaatatgatttacacgattggtttttactagaggaaggcgtagataatgccccttctacgaccattttacctcaatcctcatatttaaacgatcaagtatctattaagaacaatgaactacatattctcgatgagcagtcaaaactggcagaatggaaattggagttacctcaagggttcaataaagtggaatattttcatcgtgaagatcccctggcgttagtgttgaacgttaatgatacccaatatatgggattctctgccaatggcacagaattgatccccgtttggcaaagagatgaatggttgactaacgtggtagactatgctgtattggacgtcttcgattctagggatgtggagttgaacaaagatatgaaagcggaacttgattcaaattcgctttggaatgcttactggcttagattgacaactaattggaatcgccttatcaacttattgaaagaaaaccaattctcaccaggacgtgtcttcactaaactcctagctctagacgctaaggataccacggtatcagatttgaagttcggattcgccaaaatcttaattgttttgacgcatgatggctttatcggcggccttgatatggtcaataagggccaacttatctggaaactcgatttagaaattgatcagggcgtcaaaatgttctggacggataaaaaccatgacgaacttgttgttttttcgcatgatgggcattatttgacaattgaagttactaaagatcaaccgattatcaaatcaagatcccccctatctgaaaggaaaactgttgattccgttattaggctgaatgaacatgatcaccagtatctgattaagtttgaggataaggatcatttactgttcaaattgaatcccggcaagaatacggatgtaccaatagttgccaacaaccattctagttcccacatattcgtcacagagcatgacacgaatggcatttatggctacataatcgaaaacgatacggtaaaacaaacttggaaaaaagccgtaaattcgaaagagaaaatggtggcatatagcaagagggaaacaacaaacctaaacactcttggtattacactaggtgacaaatcggttctttataaatatttgtaccccaacctagcggcttatctgatcgctaatgaagaacatcatacaatcacttttaacttaattgataccattacaggagaaatcctcattacccaagagcacaaggattctccggattttaggtttccaatggatattgttttcggtgaatattgggtcgtttattcctatttcagttctgaacctgttccagaacaaaagttagtagtggtggaattatatgagtcactaaccccagatgagcgtttgtctaactcaagcgacaatttttcttatgatccattgactggacacattaacaaacctcaatttcaaactaaacaattcatttttcccgagattatcaaaacaatgtccatttccaagacaacggatgatattaccacaaaggcaatcgttatggaattagaaaatggacaaatcacctacataccaaagcttttattgaatgcaagaggtaaaccagcagaagaaatggccaaggataagaaaaaagagtttatggctaccccatacacgccagttatcccaattaatgataatttcattatcactcatttcagaaatctattgccaggatccgattcgcagttgatctccatcccaaccaatctggaatccacaagcattatatgtgatctaggccttgatgtattttgtacaaggatcacaccttcgggccaatttgatttaatgagtcctactttcgaaaagggtaaattgcttattactatattcgtcttgttggtgatcacgtattttatccgtccttctgtttcaaacaagaagttgaaatcccaatggctaattaaatagatatttacatacacattatatatatcagatacac

SEQ ID NO: 380 - DNA, 1428 bp, Saccharomyces cerevisiae
ctccttttccaattaccgtaataaaagatggctgtatttactcctccatcaggtaatagcaattccaccgaccatactcacacacaagatgaccacgacaaagatgataatgatatcaagaaattctacataaggccaagtttaggcttaaaactgtggggtccgctcgtacccgctcctgataacctaccgggactatacactctaatcactatccaatctgcagtgggtttctttgccctttggagactgagaaggctctacaaactaccgccaccgcgccgcattgccactggcactcactcggatttatcctttggcgaactacccagtgaaatgattgtcaatggcaagactaaaatcaaaaaggatattgctgactttccaactttgaaccgcttctccaccacccatggtgacattgtgctcgcccctcctcccatcatacctcgccaatctcgattcgtcagcgtcagaaagctcttatgggggttgtttggctctttgctactttctcagtcactgttggagcttactcgcctgaactttcttaaatacgacccctggtgcgacgaaatgaaatccgtacgtgacaagaagtttttcaacaatattgtcaaatattatcacgagggcatagaccccaccaaaataaaagtcaaggatgctatgaacggtactcctctctcgacaaatatccctgaggtcaaacaaagcgtcgctctcgctagagcgcaagttgaggcgcagaatcccattattaaatggttcggacccttggaatacaagcccatgtctttcaacgagtacctcaatcgcatggaatttcacttggacatgttcgagttttttcaaaataaaagaaacattagagaaaattccattgaactcatcaattccatatcccacaatccgcagtcttcttctactggccttgaaggtctttccgagtccaaaaaactccatctacaaaatgtggaaaaaagactgcatttcttagcatcttcgggagattccatttccgcaccagtaaagaagagatccagcaccacactctcccgaggtgtcattttgccccatgacacgaaaggcccgcaagatattgatctcgatacaataagatcgctttatgatccatggatgactttggccttagaaacttcgctaagcatcaaattcataccaactaccatgccctcccataccaagacacccactagcacggaccagccgttaccagggcctacccccaaggctctcactaatgaaaagacacattaggtctttgcggattgcttagttgtaccgtgcgtatattaaatccttcttcgtacaccgtgatttttcagacggctaccagagaaaatatggctgggatttcatattatatatgcaaatatataataacatatatatatatacactcca

SEQ ID NO: 381 - DNA, 1682 bp, Saccharomyces cerevisiae
ccaagctctacataaagaaaaacatacatctatcccgttatgaagttttctgctggtgccgtcctgtcatggtcctccctgctgctcgcctcctctgttttcgcccaacaagaggctgtggcccctgaagactccgctgtcgttaagttggccaccgactccttcaatgagtacattcagtcgcacgacttggtgcttgcggagttttttgctccatggtgtggccactgtaagaacatggctcctgaatacgttaaagccgccgagactttagttgagaaaaacattaccttggcccagatcgactgtactgaaaaccaggatctgtgtatggaacacaacattccagggttcccaagcttgaagattttcaaaaacagcgatgttaacaactcgatcgattacgagggacctagaactgccgaggccattgtccaattcatgatcaagcaaagccaaccggctgtcgccgttgttgctgatctaccagcttaccttgctaacgagacttttgtcactccagttatcgtccaatccggtaagattgacgccgacttcaacgccaccttttactccatggccaacaaacacttcaacgactacgactttgtctccgctgaaaacgcagacgatgatttcaagctttctatttacttgccctccgccatggacgagcctgtagtatacaacggtaagaaagccgatatcgctgacgctgatgtttttgaaaaatggttgcaagtggaagccttgccctactttggtgaaatcgacggttccgttttcgcccaatacgtcgaaagcggtttgcctttgggttacttattctacaatgacgaggaagaattggaagaatacaagcctctctttaccgagttggccaaaaagaacagaggtctaatgaactttgttagcatcgatgccagaaaattcggcagacacgccggcaacttgaacatgaaggaacaattccctctatttgccatccacgacatgactgaagacttgaagtacggtttgcctcaactctctgaagaggcgtttgacgaattgagcgacaagatcgtgttggagtctaaggctattgaatctttggttaaggacttcttgaaaggtgatgcctccccaatcgtgaagtcccaagagatcttcgagaaccaagattcctctgtcttccaattggtcggtaagaaccatgacgaaatcgtcaacgacccaaagaaggacgttcttgttttgtactatgccccatggtgtggtcactgtaagagattggccccaacttaccaagaactagctgatacctacgccaacgccacatccgacgttttgattgctaaactagaccacactgaaaacgatgtcagaggcgtcgtaattgaaggttacccaacaatcgtcttatacccaggtggtaagaagtccgaatctgttgtgtaccaaggttcaagatccttggactctttattcgacttcatcaaggaaaacggtcacttcgacgtcgacggtaaggccttgtacgaagaagcccaggaaaaagctgctgaggaagccgatgctgacgctgaattggctgacgaagaagatgccattcacgatgaattgtaattctgatcactttggtttttcattaaatagagatatataagaaattttctaggaagtttttttaaaaaaatcat

SEQ ID NO: 382 - DNA, 1587 bp, Saccharomyces cerevisiae
atgagctatggaactataaatgatatgaatgaatcggtaacgaactatcgaataaaaaaagcccaaaacaatatcaagggatggtacgcttactcattttctagcgaaccatttgtcgtttctgcggtttcaacgtatattcccttactactgcagcaatttgcgagtataaatggtgtaaaagttcacgatcactccataccctgcctgtcagaaacgggtagtgattcagataagtgtgttcttggtttgttcaacaatcggatcttcgtagatacttcaagttttgcattatatgtcttttcccttagcgttttattccaaactataatagtcatttccgtttcagggatagtagatctctgggggagcgttaaattcaaaggcagaattctggtttggtttggtattgtgggcgcattgtcgactgttgcgatttcaaaattgaatgatacccagatttattctctggctgggctttatatagtggccaatggttgttttggcgttatcaatgttgttgggaattctcttctgcccatttttgtcaaggattctttgaaatgtcaaagtcaaggagcttatgaacctgataaggtagactcgttaactactgttattagcggtagaggtgcatctttaggttattcaagtgccctcattgttcagattgtatctatgttcttagtcgcatctaaaaagggcagtaagcaggatgttcaagtggctgttcttttcgttgggatttggtggtttgtgtggcaactgcccatgatctggttgattgacgatgtgacaataccgataagagttgacgattctacattagcatccgcccgcagtccgtatcccggtgagcaagacgccttgggtcaactaaactggaagaattacctttcatatggttgggtttcgcttttcgaatcgtttaaacatgccagactattgaaagatgtgatgatttttcttattgcgtggtttattattagtgattccattacaactataaattctacagcggttttgttctccaaggcagaactgcacatgagtaccctcaatttaatcatgataagtgttttgaccgttgtaaatgcaatgctgggtgcctttatgattccacaatttcttgccacaaagtttcggtggacttctagtcaaactttgatgtacattatcatttgggcaagtttcataccattttatggtattcttggatttttcttcaatgcgttcggtttaaagcataagtttgaaatgttcttattggccatttggtatggattatcactaggtggcctgtccgcggtttcaagatcagttttcagtttgattgtacctccaggaaaagaatccacgttttttagtatgttcagtatcacagataaggggtcgtccatcctgggacccttccttgttggactgcttaccgataaaacgcataatattcgctattcgttttatttcttctttttgcttttgatgctatcattgcctgtgctaaactgtttggatgtcaagagaggtagaagagaggctgaagaactcagtcaagttttacctgaaagtgaaagaaggttggattag

SEQ ID NO: 383 - DNA, 1522 bp, Saccharomyces cerevisiae
tcaggattactctggacctgctaacgtgtttcatcttcttttcacttctctgcccacgatgtctgctgaaaccgccgccgcaaacactgctactgccccagtcccagaagtgcaagaacaagagagctccaagagcaagcaagtcaacttgacgccggcaccattgcccacatcttccccatggaaacttgctcctactgagatccctgtttctactatctcaatagaagacttggatgccacaagaaagaagaagaacagaacacccactccgaaatcatcgactgctaccaagtgggttcccatcaaggcctccattaccgtctctggcaccaaaagatccggttccaagaatggtgcaagtaatggcaacagcaacaagagcaaaaacaacaaaactgcagcatcgtcgacatcgtcgagtaatgctaacaggaaaaagaagcatcaccaacataatgctaagaagcaacaacaaatgaagaaagatggctttgaatcggcagtaggtgaggaagattcaaaagacgctacctctcaagaaaatggtcaatctacacaacagcaacaaccacctcaccaccgtaatcatcaccacagtcatcaccataacagcaatggtcctcaaaggagaaagttccacaacagtaataacgccggtatgcctcagaaccaaggcttcccaccacagtttaaaccttaccaaggacgcaacgctcgtaataacaacaacaaccgctctaaataccacaaccacttccatcacaaccaacaacatcctcaacaacctatggtcaaattacagcaacagttttatccagtccaaccagtgttaatggccatcaacaacattgctagacaaattgaatactatttcagcgaagaaaacttgaccgtcgacaattacttaaggtccaaactctccaaggatggttttgctccattgtctttaatctctaagttttacagagttgttaacatgtccttcggaggtgacactaacctgattttagccgcattgagagaaattgtcgctaacgaagccgctaccgtcaatgttgcagaaggtactttggccgccaaggaaggtgataacgttaccggtgaagccaaagaaccatctccattggataagtacttcgttcgttccaagagctggtcaaactggttaccagaaacttttgaaactgaaattaatattgaaaaagaactggtcggcgatgcattggaccaattcatgatatccctaccacctgttcctcaacaagaagaggaatcatccactgaactcgcttctcaagaacaagaaaccaaagaagactctgcgccggttgctgccggtgaatccgagtcttccttataaaggcctctcacacttgcaaaataaaaaatggattcgttcattgcattttacacaaaaaaccataaaaaattgaaaaacctaataattaaaaaaattaaaagttaatcatcctccagcaaagctgttttttttttgtttttttttttttttttgtttttt

SEQ ID NO: 384 - DNA, 469 bp, Saccharomyces cerevisiae
ttcgcataattatacaaatagacaaaacctcagaaggaaaaaaaatggtatctcaagaaactatcaagcacgtcaaggaccttattgcagaaaacgagatcttcgtcgcatccaaaacgtactgtccatactgccatgcagccctaaacacgctttttgaaaagttaaaggttcccaggtccaaagttctggttttgcaattgaatgacatgaaggaaggcgcagacattcaggctgcgttatatgagattaatggccaaagaaccgtgccaaacatctatattaatggtaaacatattggaggcaacgacgacttgcaggaattgagggagactggtgaattggaggaattgttagaacctattcttgcaaattaagggcagacaaagttttttccatgcacacaggtttataatgagcttatatatatgtatatgtatatgtatacaagcatgtgtttgtatttaca

SEQ ID NO: 385 - DNA, 585 bp, Saccharomyces cerevisiae
gggagaaaggaagcaatatcaaaaaatgaataagtggagcaggctgtacgttataactgtacgcaggacttttccagggagaagaaacattgtactgacgcagtactggaataagagcaagaaaatgagtgacgaatcgaatgacgtgaagtggaacgatgccctgacaccattgcagctgatggtgctgagagataaggccactgaaaggcccaacaccggtgcgtatttacacaccaacgagtccggtgtctaccattgtgccaactgcgacagaccgttgtattcgagcaaggccaagttcgacgctcgttgtggatggcccgcattctacgaagaggtatcccctggagccatcacatatcatcgtgacaattctttaatgcctgcgagggtggagatatgttgtgcaaggtgtggtggacacttgggacatgtgtttgaaggtgaaggctggaaacagttgctaaacttgcccaaggacaccagacactgtgtgaacagtgcgtctttaaacctcaagaaggattaaatgtactatatatatatatatatatatgtgtgtatgcatacgtacatacttct

SEQ ID NO: 386 - DNA, 1015 bp, Saccharomyces cerevisiae
aacagataacaacctcagatagagtgttacgggatgggtattgaagacattagcgccatgaagaacgggtttatagtggtgccgttcaaattaccggatcacaaggcactacccaaaagccaggaagcttcgttgcatttcatgtttgctaaaagacaccagagttcaaattccaacgagtctgactgtttgtttttggtcaaccttccattattatctaacatagagcacatgaagaaatttgtcgggcagctctgtgggaaatacgatacagtatcgcatgtagaggaactactatataacgatgaatttggattacatgaagtagatttatcggcattgacctccgatctgatgtcctccactgacgtcaacgagaagagatacacaccaagaaacacggcgctattaaaatttgttgatgctgcaagtataaataactgctggaatgctttgaaaaaatactcgaatttgcatgccaaacatccaaatgaactatttgaatggacatatacgactccatcattcacaacttttgttaacttctacaaaccactggatattgattatttgaaagaagatattcatacacatatggcaatttttgaacagcgtgaagctcaagcacaagaggatgttcaaagttctatagtggatgaggatggattcacattagttgtaggaaagaacaccaagtcattgaattccataagaaagaaaatattaaacaaaaatccattatccaaacatgaaaataaggccaagccaatttcaaatatagataaaaaggcaaagaaagatttctatagatttcaggtcagagaacgtaaaaaacaggagatcaatcaactgttaagtaaatttaaggaagatcaagaaagaatcaaggtaatgaaagctaagagaaaattcaatccatacacttaaaccaccatcctcgtcatcatattcaacatatctcaatatatctataaaactaataatataatataacataatatagtataatagtata

SEQ ID NO: 387 - DNA, 2503 bp, Saccharomyces cerevisiae
atggttttgccgattctaccgttaattgatgatctggcctcatggaatagtaagaaggaatacgtttcacttgttggtcaggtacttttggatggctcgagcctgagtaatgaagagattctccagttctccaaagaggaagaagttccattggtggctttgtccttgccaagtggtaaattcagcgatgatgaaatcattgccttcttgaacaacggagtttcttctctgttcattgctagccaagatgctaaaacagccgaacacttggttgaacaattgaatgtaccaaaggagcgtgttgttgtggaagagaacggtgttttctccaatcaattcatggtaaaacaaaaattctcgcaagataaaattgtgtccataaagaaattaagcaaggatatgttgaccaaagaagtgcttggtgaagtacgtacagaccgtcctgacggtttatataccaccctagttgtcgaccaatatgagcgttgtctagggttggtgtattcttcgaagaaatctatagcaaaggccatcgatttgggtcgtggcgtttattattctcgttctaggaatgaaatctggatcaagggtgaaacttctggcaatggccaaaagcttttacaaatctctactgactgtgattcggatgccttaaagtttatcgttgaacaagaaaacgttggattttgccacttggagaccatgtcttgctttggtgaattcaagcatggtttggtggggctagaatctttactaaaacaaaggctacaggacgctccagaggaatcttatactagaagactattcaacgactctgcattgttagatgccaagatcaaggaagaagctgaagaactgactgaggcaaagggtaagaaggagctttcttgggaggctgccgatttgttctactttgcactggccaaattagtggccaacgatgtttcattgaaggacgtcgagaataatctgaatatgaagcatctgaaggttacaagacggaaaggtgatgctaagccaaagtttgttggacaaccaaaggctgaagaagaaaaactgaccggtccaattcacttggacgtggtgaaggcttccgacaaagttggtgtgcagaaggctttgagcagaccaatccaaaagacttctgaaattatgcatttagtcaatccgatcatcgaaaatgttagagacaaaggtaactctgcccttttggagtacacagaaaagtttgatggtgtaaaattatccaatcctgttcttaatgctccattcccagaagaatactttgaaggtttaaccgaggaaatgaaggaagctttggacctttcaattgaaaacgtccgcaaattccatgctgctcaattgccaacagagactcttgaagttgaaacccaacctggtgtcttgtgttccagattccctcgtcctattgaaaaagttggtttgtatatccctggtggcactgccattttaccaagtactgcattaatgcttggtgttccagcacaagttgcccaatgtaaggagattgtgtttgcatctccaccaagaaaatctgatggtaaagtttcacccgaagttgtttatgtcgcagaaaaagttggcgcttccaagattgttctagctggtggtgcccaagccgttgctgctatggcttacgggacagaaactattcctaaagtggataagatcttgggtccaggtaatcaatttgtgactgccgccaaaatgtatgttcaaaatgacactcaagctctatgttccattgatatgccagctggcccaagtgaagttttggttattgccgatgaagatgccgatgtggattttgttgcaagtgatttgctatcgcaagctgaacacggtattgactcccaagttatccttgttggtgttaacttgagcgaaaagaaaattcaagagattcaagatgctgtccacaatcaagctttacaactgccacgtgtggatattgttcgtaaatgtattgctcacagtacgatcgttctttgtgacggttacgaagaagcccttgaaatgtccaaccaatatgcaccagaacatttgattctacaaatcgccaatgctaacgattatgttaaattggttgacaatgcagggtccgtatttgtgggtgcttacactccagaatcgtgcggtgactattcaagtggtactaaccatacattaccaacctatggttacgctaggcagtacagtggtgccaacactgcaaccttccaaaagtttatcactgcccaaaacattacccctgaaggtttagaaaacatcggtagagctgttatgtgcgttgccaagaaggagggtctagacggtcacagaaacgctgtgaaaatcagaatgagtaagcttgggttgatcccaaaggatttccagtagattatttctaacttggaaaccgaacactaacgaaaataatatgtatatatacatatatatatcaaacaaaatacagtcttgaatgaatagagatacactatgt

SEQ ID NO: 388 - DNA, 2164 bp, Saccharomyces cerevisiae
taacaagactcatatccttcgtgattagtttctttttgttattttcctcgtaatactcatttgttttacatacatatataagtgctttgtctttgatggtctgcccacaacaatgtagaacaagtttattatgtaatctttatagaagaagcacgctaatatagacaaagatagcttcgcacaatgtcgtcgtcgaagtctctatacgaactgaaagacttgaaaaatagctccacagaaatacatgccacggggcaggataatgaaattgaatatttcgaaacaggctccaatgaccgtccatcctcacaacctcatttaggttacgaacagcataacacttctgccgtgcgtaggtttttcgactcctttaaaagagcggatcagggtccacaggatgaagtagaagcaacacaaatgaacgatcttacgtcggctatctcaccttcttctagacaggctcaagaactagaaaaaaatgaaagttcggacaacataggcgctaatacaggtcataagtcggactcgctgaagaaaaccattcagcctagacatgttctgatgattgcgttgggtacgggtatcggtactgggttattggtcggtaacggtaccgcgttggttcatgcgggtccagctggactacttattggttacgctattatgggttctatcttgtactgtattattcaagcatgtggtgaaatggcgctagtgtatagtaacttgactggtggctacaatgcataccccagtttccttgtggatgatggttttgggtttgcagtcgcttgggtttattgtttgcaatggctgtgtgtgtgtcctctggaattggtgaccgcatccatgactatcaaatattggacgacatctgtgaacccggatgtgttcgtcattattttctatgttttggtgattactattaatattttcggtgctcgtggttatgcagaagctgagttcttcttcaactgttgcaaaattttgatgatgactgggttcttcattcttggtattatcatcgatgttggtggcgctggtaatgatggttttattggtggtaaatactggcacgatccgggcgctttcaatggtaaacatgccattgacagatttaaaggtgttgctgcaacattagtgactgctgcttttgcctttggtggttcagagtttattgccatcaccactgcagaacaatctaatccaagaaaggccattccaggtgcggccaaacaaatgatctacagaatcttattcctattcttggctaccattattctactgggtttcttggtgccatacaattccgatcaattattgggttctaccggtggtggtactaaagcctcgccatatgtcattgctgttgcatcccacggtgtccgtgtcgtcccacacttcattaacgccgttattctactttccgtgctgtccatggctaactcctccttctactccagtgctcgtttatttttaactctatccgagcaaggttacgctcctaaggttttctcctacatcgacagagccggtagaccattgattgccatgggtgtttctgcattgtttgccgttattgccttctgtgctgcatctcccaaggaagaacaagttttcacttggttattggccatttctggtttgtctcagcttttcacatggactgccatttgtttatcccatcttagatttagaagagccatgaaagtccaagggagatctcttggagaattgggtttcaaatctcaaactggtgtttggggatctgcctacgcttgcattatgatgattttaattcttattgcccaattttgggtcgctatcgcccccattggtgaaggtaagctggatgcacaagcctttttcgaaaactacttggctatgccaatcttgattgcactttatgtcggctacaaggtctggcacaaggattggaaactgttcatcagggcagacaagatcgacctagattctcatagacaaatctttgatgaagaattaatcaagcaagaagacgaagaatatagggaacgtttgaggaacggaccttattggaaaagggtcgttgccttctggtgttaaaaaaaaaagcatttacttcttttatatttattcatttttgtacttctgttttgtagtaatagcatacgtgtaatgatag

SEQ ID NO: 389 - DNA, 1713 bp, Saccharomyces cerevisiae
ccgacagagttcattagtgtgttatattttctatttcagatacatcattttcattaaaatatatcgcatacacgaaggaactgctacaactggaagatgttgaaatcaactgctacaagatcgataacaagattatctcaagtttacaacgttccagcggccacatatagggcttgtttggtaagcaggagattctattcccctcctgcagcaggcgtgaagttagacgacaacttctctctggaaacgcataccgatattcaggctgctgcaaaggcacaggctagtgcccgtgcgagtgcatccggtaccaccccagatgctgtagtagcttctggtagcactgcaatgagccatgcttatcaagaaaacacaggttttggtactcgtcccatatatcttgacatgcaagccactacaccaacagaccctagggttttggatacgatgttgaagttttatacgggactttatggtaatcctcattccaacactcactcttacggttgggaaacaaatactgctgtggaaaatgctagagctcacgtagcaaagatgatcaatgccgaccccaaggaaataatattcacttcgggagcgaccgaatctaataatatggttcttaagggtgtcccaagattttataagaagactaagaaacacatcatcaccactagaacggaacacaagtgtgtcttggaagccgcacgggccatgatgaaggagggatttgaagtcactttcctaaatgtggacgatcaaggtcttatcgatttgaaggaattggaagatgccattagaccagatacctgtctcgtctctgtgatggctgtcaataatgaaatcggtgtcattcaacctattaaagaaattggtgcaatttgtagaaagaataagatctactttcatactgacgccgcacaagcctatggtaagattcacattgatgtcaatgaaatgaacattgatttactatcaatttcttctcacaagatttacggtccaaagggaataggtgccatctatgtaagaaggagaccaagagttagattagaacctttactatccggtggtggccaagagagaggattgagatctggtactttggcccccccattggtagcgggatttggtgaagctgcgagattgatgaagaaagaatttgacaacgaccaagctcacatcaaaagactatccgataaattagtcaaaggtctattatccgctgaacataccacgttgaacggatctccagatcatcgttatccagggtgtgttaacgtttctttcgcctacgtggaaggagaatctttattgatggcactaagggatatcgcattatcctcgggttcagcctgtacatctgcttccctagaaccttcttatgttttacatgcgctgggtaaggatgatgcattagcccattcttccatcagatttggtattggtagatttagtactgaagaggaggtcgactacgtcgttaaggccgtttctgacagagtaaaattcttgagggaactttcaccattatgggaaatggttcaagaaggtattgacttaaactccatcaaatggtcaggtcattgagtgttttttatttgttgtatttttttttttttagagaaaatcctccaatatataaattaggaatcatagtttcatgattttctgttacacctaactttttgtgtggtgccctcctccttgtca

SEQ ID NO: 390 - DNA, 1312 bp, Saccharomyces cerevisiae
caccagagatttgctcactaataatcctgtaccatgtccatcaacctacattccgcacccgagtatgatccatcttataagctgatccagttgacaccagagttactggatataatacaggatccggttcaaaatcaccagttaaggtttaagtcattggacaaagacaagtctgaagttgtactgtgttcgcacgacaagacttgggtgctgaagcagcgcaaacattcaaacacagttctactaatgagagaatttgttcctgaacaacctattactttcgacgaaacgctcttgtttggactgtccaagccgtacatggacgtcgtgggattcgccaagactgaatcagaatttgagaccagagagacacatggcgaattgaacttgaattcagtaccaatatacaacggagaactggatttctccgacaaaatcatgaagaggtcatctacaaaggttatcgggaccctggaagaactacttgagaactcaccatgttctgcgctagaaggtatatcaaaatggcataagattggtggatctgtgaaagacggtgtgttgtgtattctttcacaagacttccttttcaaagcactgcatgtactactgatgagcgcaatggcagaatcactcgatctacagcatctgaatgttgaggatacacatcacgctgtggggaaggacattgaggacgagttcaatccatacacaagagaaatcattgaaacagtgctgaataaatttgctgttcaagagcaagaggctgaaaacaatacgtggcgcttgagaataccgtttatagctcagtggtacgggattcaagcgctaaggaaatatgtttctggaataagcatgccaattgatgagttcctcatcaagtggaagtcccttttcccacctttcttcccatgtgacattgacattgacatgctgcgaggctatcatttcaagcctaccgataagactgtccagtatatagcgaaaagcacactaccaatggaccccaaagaacggtttaaagtcctgtttaggctacagtcacagtgggacttggaggatatcaagcctctaattgaagaactaaattcaagaggtatgaaaatagacagtttcatcatgaagtatgcccgccgtaaaagactgggcaaaaagaccgtggtcacgagcaggtagcacacaaaactgccttcgatgggcaatgcgaatatatagcggaaccactaaagtaatagtggatgacgtgaatagcaacaaatatctatcatagtagctttatatatttatatatattacaatactattatgcacc

SEQ ID NO: 391 - DNA, 585 bp, Saccharomyces cerevisiae
aaaactgccaccaattaagagaagaaaagctacacaattaatttccaaaaattgcaaatacgagtatgaagagtttgttctatctcaaattgctcctctgggttgtgctattgtctttatgccttcttatggcacaccggaaaaccaaagttgccgacaaatttcgtgcactgcgttcaagaatacaattacgttttaatagacatatacgtttaaatgattcctttgctgatgacctagaaaacggtctccattccaggaatttcgatattatctcggagaatagcaacgacgtaagaggtggtttggatgatgtctccaagaatgagattaaacaaattatggaaaacgataatgtagatttcgataaggctagactattatatatggaaagaaagttcggccaaaatggtattgcccccgatggaacccctattgatccaaaagcattcacctttgatagtaggtaaaggtatctaatatattcagttttacttaagtgggaggtttttccccctttttcttatttgtccatattttatgtaaatgtatacattgcattaaattaaaaagaaaaaaaaaatc

SEQ ID NO: 392 - DNA, 1385 bp, Saccharomyces cerevisiae
ctatgggcgaaaaggaaacaaacatcagctggattttttcgccaagatggagagagagctagggatgtatggaaatgataggagtagatcaagatcacctgtacgtcgtcgtttgagcgacgacagagacaggtacgatgattataacgatagtagcagtaataatggtaatggcagtcgtcgtcagagacgcgaccgaggctcccgtttcaatgatcggtacgatcagagttatggtggcagccgctaccacgatgataggaactggccccctcgccgaggaggccgtggcagaggaggaagcagatcattcagagggggacgcggtggcggtaggggtcgtactttaggtccaattgttgaaagagacttagaaaggcaatttgacgcgaccaagagaaattttgaaaatagtatcttcgtgagaaacttgacttttgattgtacccctgaagaccttaaggaattgtttggtacagtgggcgaagttgtggaggctgacattatcacatcaaagggccatcaccgtggtatggggactgtggaatttaccaaaaacgaatctgtccaagatgccatatcgaagtttgatggtgccctctttatggaccggaaactaatggtaagacaggataatcctcctcctgaagctgccaaggaattttctaagaaagctactagggaagaaatagataatgggtttgaagtgttcatcatcaatttaccgtactctatgaattggcaatccttaaaagatatgtttaaagaatgtggtcatgtcttgcgtgccgatgtagaattggatttcaacggattttcaagaggattcggttctgtcatttatcctactgaggatgaaatgattagagctatcgatacattcaacggcatggaagtagaaggtagagttttggaagttagagaagggcgtttcaacaagagaaagaacaatgatcgttataatcaaaggcgtgaggaccttgaagataccagaggtactgaaccaggtcttgcgcaggatgccgctgtccacattgatgaaactgcagcaaaatttactgaaggtgtcaatccaggaggggatagaaactgtttcatttattgtagtaatttaccattctcaacagcaagaagcgatttattcgacttgtttgggcctatcggcaaaatcaataacgcggaattgaaaccacaggaaaatggtcaaccaactggtgttgctgttgtagaatatgaaaatttagtagatgcagatttttgtattcaaaaattaaataattataattatggtggttgtagtttacagatctcttatgctagacgtgattaattcctaagcaccaaccgaaccatgacctgtgtactttatgataacgtataaataa

SEQ ID NO: 393 - DNA, 873 bp, Saccharomyces cerevisiae
cctttcttattatggacggatattgggatgttgtagtgtcgtccttgcaagacatatacaatgccaacgaggtcattccctttgatgatgagctgcaaacaaaaaaactaaatttccttaatatgtcaaaggatcagctgcaattgcatctcaacactttccaagaacacatggaaaacgtcaacagagtgcaccgaatccttgacaatgtacgttccaatttgtcgttgatgttgaatcagtcacgagaggaaaagagtgaggaaaatactgaagatgcagaagaaggagaagggacacgcatggcattgtcgcagggcaagaaagctgtggggaaagttggcagatcgtactggaccagcgaatacaacccaaatgcacctattttggtgggctcagaggttgcctataagcccagaaggggcagtgccgacggcgaatggatacagtgtgaagtactcaaagtcgtagcagatggtacacgatttgaagtgagagatcctgaacctgatgaattgggcaactcaggcaaggtgtataaatgtaatcggaaagaactactgttgatcccgccaggctttcccactaagaactacccgccaggtactaaggttctggcaagatatcctgaaacgaccactttttatcctgcaattgtcatcggaaccaagagggacggcacttgcaggcttcgatttgatggtgaagaggaagtggacaaagagacggaagtgactcgccgtctagtgctgccttcgccaacggctttggcaaacctagcaaggaaatagcaatggtggttaacatttactacatatcataagatcttctcatggcattttgtcattattttggtatcgtcggaagtgatgt

SEQ ID NO: 394 - DNA, 1003 bp, Saccharomyces cerevisiae
cagtctttctaatgctgagatcgttattgcaaagcggccaccgcagggtggttgcttcttcatgtgctaccatggtgcgttgcagttcctcgtcgacctccgcgttggcgtacaagcagatgcacagacacgcaacaagacctcccttgcccacactagacactccttcctggaatgccaacagtgccgtttcatccatcatttacgaaacaccagcgccttctcgtcaaccaagaaaacagcatgtcttgaactgtttggtgcaaaacgaacccggtgtcttgtccagagtctcgggtacgttagctgccagaggctttaacatcgattcgttggtcgtgtgcaacaccgaggtcaaagacctaagtagaatgaccattgttttgcaagggcaagatggcgtagtcgaacaagcacgcagacaaatcgaagacttggtccccgtctacgccgtcctagactataccaattctgagatcatcaaaagagagctagtgatggccagaatctctctattgggtactgaatacttcgaagacctactattgcaccaccacacttccaccaatgctggcgccgctgactcccaagaattggtcgccgaaatcagagaaaagcaattccaccctgccaacttgcccgccagtgaggtattaaggttgaagcacgagcatttgaacgatatcaccaacttgaccaacaactttggaggtcgtgtcgtcgacatcagcgaaacaagctgtattgtggagttgtctgcaaaacccacacgtatctctgccttcttgaagttggtcgagccattcggtgtcctagagtgtgcaagaagcggtatgatggcattgccaagaactcctttgaagacaagcaccgaggaagctgccgacgaagacgaaaagatcagcgaaatcgtcgacatttcccaactaccacctggttaggttagtctctcggccttgcgatcgccctcgggactctcctctatacatctatataacgtatc

SEQ ID NO: 395 - DNA, 1274 bp, Saccharomyces cerevisiae
agcaacgatgtctgcaaacggcaagatctctgttcccgaggcggtggtcaattggctgttcaaagtcattcaacccatttataacgacggaagaacaactttccacgattctttagcgctgctggacaattttcacagtttaaggccaagaacaagggtatttacgcactctgacggcactccacaactactgttgtccatatatggtaccattagtactggtgaggatggttcatctcctcacagtattcctgtgatcatgtgggtacccagtatgtacccggtaaaacctccctttataagtataaacttggaaaatttcgacatgaacaccatcagtagttccttgcccattcaagaatacatcgactccaatgggtggattgcgctgcccatactccactgctgggatcctgccgcgatgaaccttataatggtcgtacaagaattaatgagtctcttacacgagccgccacaagatcaggcgcccagtctaccccctaagcccaatacgcagctccagcaggagcagaatactcccccactgcccccaaagcccaagtctccacacctaaaaccgccattgcctccacctccaccacctcaaccggcatctaacgcactcgaccttatggacatggacaacacggatatctccccaaccaaccatcatgaaatgctacaaaatctacaaaccgtagtcaatgagttatacagagaggatgtggactatgtagcggacaagatactgacgagacagaccgtcatgcaagaatcaattgccagattccatgaaataatcgccatcgacaagaaccatttacgagccgttgagcaggctattgagcagaccatgcactcgctaaacgcacagatagacgtcctgaccgcaaatagggccaaagtccaacagtttagctcaacttcgcatgtggatgacgaggacgtgaactccatagcagtggccaaaacagatggactcaatcaactatacaacctcgttgcccaggactacgctctcacggacaccattgagtgcttatctaggatgctgcaccgtggcaccattcccctcgatacttttgtcaagcaaggtcgtgaattagcacgccagcaattccttgtgcgatggcacatccaacgaatcacctcaccgttatcgtgactcactttctttcgcatcgccgaagtgccataaaaaatatttttttaacctttacctaacaagaacggggaatggtatatatggaagtacatagttcgtatatacagaa

SEQ ID NO: 396 - DNA, 898 bp, Saccharomyces cerevisiae
cgaagcaattatattgaatcattcacatgcttgttattgttctgcagggcttggcaggttttttatcaatcatcgccattctatgtcaaaagcgctataataaacttcatcgatctatttacgggctttcatatgatttatttctgctagattttgttggtaatggtctgtacttgtattgcgcgttgcattattgttattcatctctggtgagggaacaactgtctcaaagattcccacttttttatccgttgaatgatgcccgtagtatacctatatccagtttcctcattctaaaagatttttgcgtttcctgttgctgcatgatggttttaaggcagttatactattataggtcaactaaacatatttatcagggcatttccattacttccataataattataagtgtgttccttgtattaggcatatttacatatggctgttccatctctaatttaccgttgaaaaattcaggtaaatttggcgttttctatttggaacacataaattatttgtgggtaatggcaaatctgcttaaatgtttcaagtatgtgcctcaaatgagtataaactggatgggatgctcaacagtaggtttatcatcaaagtttgcattgatatcatttttggctgaatctatcgatttattaggtagactggtaataccgaccaatgcattgttttacgagataccatttaattcaacgcccttttgggtaaaattgatacaatttgtcacctattggtcatactttgtcaagttcagtatgtttacgtaggacggaaaccacggttgccaaaaggaaaactataacaaggtcagctcattctctaccttaatggctttgcgatgtttgcaaatttaaggagttttagataatgcatttattattac

SEQ ID NO: 397 - DNA, 73 bp, Saccharomyces cerevisiae
gccttgttggcgcaatcggtagcgcgtatgactcttaatcataaggttaggggttcgagccccctacagggct

SEQ ID NO: 398 - DNA, 72 bp, Saccharomyces cerevisiae; identical to SEQ ID NO: 230

SEQ ID NO: 399 - DNA, 209 bp, Saccharomyces cerevisiae
cactcctgtttctgcctcatgtcttttaaaacgcttccacgggacatgggttctaattatggagaagatcaagctttgaaatggcccgtttacacattttgatacaaccgtagacggcgtctcgtttcaaagaccgtgtggttgtctatcagtatatactcattgtgtttttcaaaaaatctctgggttgtttagatgccactatattt

SEQ ID NO: 400 - DNA, 183 bp, Saccharomyces cerevisiae
aagcttaatgccctctttgtacgatggtgtcactctaaaattatttacgtaatttaattggatgtgatatcaagcactagttttgtttggaggagcagagattgaaagcctagcttttacaccggtttgagtcggttccttcgttttcttagttggaattgatatagaagtgtgtggacaatc

SEQ ID NO: 401 - DNA, 74 bp, Saccharomyces cerevisiae
gactccatggccaagttggttaaggcgtgcgactgttaatcgcaagatcgtgagttcaaccctcactggggtcg

SEQ ID NO: 402 - DNA, 82 bp, Saccharomyces cerevisiae
ggcactatggccgagtggttaaggcgagagactcgaaatctcttgggctctgcccgcgctggttcaaatcctgctggtgtcg

SEQ ID NO: 403 - DNA, 673 bp, Saccharomyces cerevisiae
ttcgatttgggactaagtgttacacgaaaggcatagagtatcaaaaaaaggaagcaagatggattacgatagctctgatacaatgaacggtggttcaagtaaccccttaatcactaagatgaatacaatgaaattattatatcaacactatttggataaagtcactcctcacgctaaggagaggtgggctgtattgggtggtttgttatgtttgtttatggttcgtattacaatggccgaaggctggtatgtgatttgttatggtctaggtctatttttattgaatcaatttttagcctttttgaccccaaaattcgatatgtccttacagcaagatgaagaaaacaacgaattggaagctggagaaaaatcagaagaattccgtccattcatcagaagattaccagagttcaaattctggtataacagcattagagccactgtcatttccctcttgttgtcgctattttcaatcttcgatattccagtattttggcccatcttattgatgtatttcatattattgttttttttaactatgagaaggcagattcaacatatgataaaatatagatatatacccttagatatcggtaagaagaaatattctcattcttctaactgatataccctgactccacatacctattcaacgaacacattcgtatcttaa

SEQ ID NO: 404 - DNA, 929 bp, Saccharomyces cerevisiae
agcaactgtaggaggagaaagcaggtatataactagccgcaatatgtttgtggtggattggagcgtgcagctatgcatgggagtgatttcacctctcttccgtgccctcgtgcaactgcctttatcaattttcgtatggaatgggtttcagcttgtggcattgcctatcaacatcccattgaggttgttcctggggacgtcgctgagccgtttagttgcacaaacaagcacattagacttctatgtggttttgacgttgtttcaatattttgctgtgctttgtgcttttggcagcatcataggactcatctttggatttatattgggtgtgttccactcaatctgcggggtacccagtgtatacataagtctagaatggaaacggtggtttgctccgatacgtacggtccttgaacgtgcttccactagtattgtcaacattatgcgaggacaaactattgcgccaatacccatgcctaagcccaatcccacgcatatatcaaagcctaacatgaaaaaattccatgatgagcctggagctgatgatatgactataacgcatgatgtgaactgctacatcaccccttgccaaacgcctactaacgaaaaaattcagcattataataatgattcattcaacacgaccaccacagacgatgaacccactgatatttgggataggtctgacacttaccaaaactcattcgtcaccaatgaaactttgatgtctctttctaatagagctaagcttcgaagaaatgccagtgatgcggacatcgttaatataaagattttacgaaggaattctaggtgatattgcaattacttcttctcatgcactaacaagtgaatgatagaaatatgttgagttcctaactgcctgattttaaataagtttcatattataatcttttagcatatatatatat

SEQ ID NO: 405 - DNA, 326 bp, Saccharomyces cerevisiae
atgagtagtttctatactgttgttggtgtattcatagtggttagtgccatgtccgtgctgttctggataatggctccaaagaacaaccaagctgtttggagaagtacagtgattttgacattggccatgatgtttttgatgtgggccattacgttcctttgccagctccatcccttggtggctccacgccgttcagatttgagacctgaatttgcagaataaagcgtcgagtatatcaagccaagtgacgtttcctgagtataagaaaaataagcaaaataagtatacataaaaataaatacgaatagaaatatagtggcatctaa

SEQ ID NO: 406 - DNA, 1095 bp, Saccharomyces cerevisiae
atgtctgcccctaagaagatcgtcgttttgccaggtgaccacgttggtcaagaaatcacagccgaagccattaaggttcttaaagctatttctgatgttcgttccaatgtcaagttcgatttcgaaaatcatttaattggtggtgctgctatcgatgctacaggtgttccacttccagatgaggcgctggaagcctccaagaaggctgatgccgttttgttaggtgctgtgggtggtcctaaatggggtaccggtagtgttagacctgaacaaggtttactaaaaatccgtaaagaacttcaattgtacgccaacttaagaccatgtaactttgcatccgactctcttttagacttatctccaatcaagccacaatttgctaaaggtactgacttcgttgttgtcagagaattagtgggaggtatttactttggtaagagaaaggaagacgatggtgatggtgtcgcttgggatagtgaacaatacaccgttccagaagtgcaaagaatcacaagaatggccgctttcatggccctacaacatgagccaccattgcctatttggtccttggataaagctaatgttttggcctcttcaagattatggagaaaaactgtggaggaaaccatcaagaacgaattccctacattgaaggttcaacatcaattgattgattctgccgccatgatcctagttaagaacccaacccacctaaatggtattataatcaccagcaacatgtttggtgatatcatctccgatgaagcctccgttatcccaggttccttgggtttgttgccatctgcgtccttggcctctttgccagacaagaacaccgcatttggtttgtacgaaccatgccacggttctgctccagatttgccaaagaataaggtcaaccctatcgccactatcttgtctgctgcaatgatgttgaaattgtcattgaacttgcctgaagaaggtaaggccattgaagatgcagttaaaaaggttttggatgcaggtatcagaactggtgatttaggtggttccaacagtaccaccgaagtcggtgatgctgtcgccgaagaagttaagaaaatccttgcttaa

SEQ ID NO: 407 - DNA, 1628 bp, Saccharomyces cerevisiae
aaaatcaaaatggtagcaacaataatgcagacgacaacaactgtgctgacgacagtcgccgcaatgtctactaccttagcatcaaattacatatcttcgcaagctagttcctcgacgagtgtaacaacagtaacgacaatagcgacatcaatacgctctacaccgtctaatctactcttttctaatgtggcggctcagccaaaatcatcttcagcaagcacaattgggctttcaatcggacttcccatcggaatattctgtttcggattacttatccttttgtgttatttctaccttaaaaggaattcggtgtccatttcaaatccacccatgtcagctacgattccaagggaagaggaatattgtcgccgcactaattggttctcacggttattttggcagagtaagtgtgaggatcagaattcatattctaatcgtgatattgagaagtataacgacacccagtggacctcgggtgataacatgtcttcaaaaatacagtacaaaatttccaaacccataataccgcagcatatactgacacctaagaaaacggtgaagaacccatatgcttggtctggtaaaaacatttcgttagaccccaaagtgaacgaaatggaggaagagaaagttgtggatgcattcctgtatactaaaccaccgaatattgtccatattgaatccagcatgccctcgtataatgatttaccttctcaaaaaacggtgtcctcaaagaaaactgcgttaaaaacgagtgagaaatggagttacgaatctccactatctcgatggttcttgaggggttctacatactttaaggattatggcttatcaaagacctctttaaagaccccaactggggctccacaactgaagcaaatgaaaatgctctcccggataagtaagggttacttcaatgagtcagatataatgcctgacgaacgatcgcccatcttggagtataataacacgcctctggatgcaaatgacagtgtgaataacttgggtaataccacgccagattcacaaatcacatcttatcgcaacaataacatcgatctaatcacggcaagaccccattcagtgatatacggtactactgcacaacaaactttggaaaccaacttcaatgatcatcatgactgcaataaaagcactgagaaacacgagttgataatacccaccccatcaaaaccactaaagaaaaggaaaaaaagaagacaaagtaaaatgtatcagcatttacaacatttgtcacgttctaaaccattgccgcttactccaaactccaaatataatggggaggctagcgtccaattagggaagacatatacagttattcaggattacgagcctagattgacagacgaaataagaatctcgctgggtgaaaaagttaaaattctggccactcataccgatggatggtgtctggtagaaaagtgtaatacacaaaagggttctattcacgtcagtgttgacgataaaagatacctcaatgaagatagaggcattgtgcctggtgactgtctccaagaatacgactgatgaaaataatattgacgttcgcatttaatctatacctataattctgtacttatatactgttccttaattgaagatttcaa

SEQ ID NO: 408 - DNA, 1292 bp, Saccharomyces cerevisiae
caaacgtatagcaaagatctgaaatggatacggataagttaatctcagaggctgagtctcatttttctcaaggaaaccatgcagaagctgttgcgaagttgacatccgcagctcagtcgaaccccaatgacgagcaaatgtcaactattgaatcattaattcaaaaaatcgcaggatacgtcatggacaaccgtagtggtggtagtgacgcctcgcaagatcgtgctgctggtggtggttcatcttttatgaacactttaatggcagactctaagggttcttcccaaacgcaactaggaaaactagctttgttagccacagtgatgacacactcatcaaataaaggttcttctaacagagggtttgacgtagggactgtcatgtcaatgctaagtggttctggcggcgggagccaaagtatgggtgcttccggcctggctgccttggcttctcaattctttaagtcaggtaacaattcccaaggtcagggacaaggtcaaggtcaaggtcaaggtcaaggacaaggtcaaggtcaaggttcttttactgctttggcgtctttggcttcatctttcatgaattccaacaacaataatcagcaaggtcaaaatcaaagctccggtggttcctcctttggagcactggcttctatggcaagctcttttatgcattccaataataatcagaactccaacaatagtcaacagggctataaccaatcctatcaaaacggtaaccaaaatagtcaaggttacaataatcaacagtaccaaggtggcaacggtggttaccaacaacaacagggacaatctggtggtgctttttcctcattggcctccatggctcaatcttacttaggtggtggacaaactcaatccaaccaacagcaatacaatcaacaaggccaaaacaaccagcagcaataccagcaacaaggccaaaactatcagcatcaacaacagggtcagcagcagcaacaaggccactccagttcattctcagctttggcttccatggcaagttcctacctgggcaataactccaattcaaattcgagttatgggggccagcaacaggctaatgagtatggtagaccgcaacagaatggtcaacagcaatccaatgagtacggaagaccgcaatacggcggaaaccagaactccaatggacagcacgaatccttcaatttttctggcaacttttctcaacagaacaataacggcaaccagaaccgctactgaacgatgattcagttcgccttctatcctttgtttacgtatttgtttatatat

SEQ ID NO: 409 - DNA, 1269 bp, Saccharomyces cerevisiae
ataaagcattggaggcaggcaaaacaagaacatggggtttctttcggatcatccgcatacagctatcaccgagacgatctttcgaattgtctcttcaagggactatacgctagaagtggagttagctcccttgattcagcttatcaaagcagatcacaacgattataactataccgtgaaccaagaagaagctgcgcgagcacttagaaagaaaataaagtatgggaaccggctgcagcagtccaggactctggacctcttggatctgttcatctcacaaggcgtgaagtttacagtcatgtacaatgatgacaagctgctgcaaaggctgagagggatggctacgaactctgaaaacagcgggtccggtgaaaagtatgagcctaggattattaagaagtgcgcggcgtatgctatctcgtggctaaactatattacgcagaacaaccttgagaatgcgagggcgtattcaggtctttatcaattgggtcaaacagtcaaacagaggtactcgaagagcagccgttcccgccgtagcggcggaggctctggcggacggtctaacttcatggatgatagcgccgacgacactttgtaccagtccaactcgctgactagtgccgatagattgtataggattccacagatcaacatgaacaaagaggcacccaggattcggctcataatcagcgatgctctcgcgtctgctgtgtcgttacagaactcgctgatcgggctgcccaagggcaagttctccacagacgatgaagaggccacgtccaagttcatccaggcaagggcgatcagaaggaaagttcttagatatctgcaattggtcacggagggtgagtttctgggtagcttaattcatgccaatgatgaactggtggctgcgttgactgcatacgacgaccgaagcgctcaggacgatagcagcgatgaaagtgatcacggctcgtacgatgacggtatttatgatgaaaacgagcaggataacagcaggtatattgatagcgagtcctcagaggaagagagcttgtcttcttatcagccgtccacgatctcaaaccctttcggtgatcataacaaaatttgaagaagtatgtacgtatgcatacacacatatatatatatatatatatagtacatttaatccttcttgaggtttaaagacgcactgttcacacagtgtctggtgtccttgggcaagtttagcaactgtttccagccttcaccttcaaacacatgtcccaagtgtccaccacacct

SEQ ID NO: 410 - DNA, 1790 bp, Saccharomyces cerevisiae
atgcaggttcaaaaaatggtgagagataacagtaataacggtagcgataaaagcgtccattgggagaggaggaataataacggcgcaggcccccgttatcgttccagaagcggtaataccggtgctttggcaacaaaactaagtaatgggacgctctctgtcagaggattagtgaaggaccgaacaggaagcggcaagatcgcgggctgtgtggaggcgtttctggatgccaggacccaattgaatacgccctgggaccgtgctaagtgcaattggctggaccagatagattactatgtacagttgagaaagaccgcgttttctaaggaattggaccaactaaggaagcccatgatcgatgcatatgtggcggagatgaggcagaagtttgatgcctcctatggacaatccagggcgcaattggaagccaaactggcgcaggtggacagtgaatggcatatggtacatggtgatgtgcatgcaaaactggaaaaactcgtggaagaacgccggtttttgaaaagattaagcgacacgatcgtaccacccaggtccaaaagatcacagcggctgtctccattgaccaaagaggaccgagccaactgtatctgtccgcagcccaaaggaatgagcgacaccgcttggttcgaagccattcagaagaaaatgttaggaatgaatggtaccatcaagctcctagagacagaacagaaactactggctgacgagaaaaacagcgtgaggaagacgttctggcccatggtggaagcacattcacgctcgaatgaatttgcttatctggagaaatgcatcaggctgatggcctctcagagagcaatatgcttttgtcttgatatagaggctttcgaaacaaaccagaacgtaatcaccgaaattgggatttcaatttatgaccccagggaaaatatggtgccgtcaatggttccaattacaaagaattaccacctaattatcgaggagtccctggaacttagaaaccaaaaatgggtctgtgactacaaggattgctacttattgggagaaagctatgttttgagcttgaaagagtgcgtgcatttcattcaatcactaataaactattacttggtcccggtgaccgaagaagacaagacatggtcaagggcatttgttggtcatcacgtgagcggggatcttaagtggctggagactattggtgtcaaattccctggcagagggtatgaaggccatctggaccatacgctgcttttggctgaaactcccggtgatctagacgtgttcatcttggacactgagcagttttacaggaaatcgtatggcgaaaagggcagcagtctgggcaagattctgcggttgttcgagataccgcatgcgtttctacacaatgccggtaacgatgcctactataccctgcatttgttcatgaagttttgcgatgttaatttcaggaaaataagcggcatggacgatgttcttaaagtaatgggccaagtaaaagtttggggagaacgagacgtacgagagcctaaagtggtgcccatgtcgtatgccatctccatcgaggaggcagtcaaaaatcggacgtaccgcaagggcgtcaagagcagtaggaaggaaagagtctgccaaacggaattcggtgggttaacgtatttcggaactgctaaagacgccttcacaagcactcttccgacacactaaatatattcatcgatttttttcctgtaaatacaaacacatgcttgtatacatatacatatacatatatataagctcattataaacctgtg

SEQ ID NO: 411 - DNA, 1714 bp, Saccharomyces cerevisiae
ccaccactaatacaactctatcatacacaagatgtcattcgacgacttacacaaagccactgagagagcggtcatccaggccgtggaccagatctgcgacgatttcgaggttacccccgagaagctggacgaattaactgcttacttcatcgaacaaatggaaaaaggtctagctccaccaaaggaaggccacacattggcctcggacaaaggtcttcctatgattccggcgttcgtcaccgggtcacccaacgggacggagcgcggtgttttactagccgccgacctgggtggtaccaatttccgtatatgttctgttaacttgcatggagatcatactttctccatggagcaaatgaagtccaagattcccgatgatttgctagacgatgagaacgtcacatctgacgacctgtttgggtttctagcacgtcgtacactggcctttatgaagaagtatcacccggacgagttggccaagggtaaagacgccaagcccatgaaactggggttcactttctcataccctgtagaccagacctctctaaactccgggacattgatccgttggaccaagggtttccgcatcgcggacaccgtcggaaaggatgtcgtgcaattgtaccaggagcaattaagcgctcagggtatgcctatgatcaaggttgttgcattaaccaacgacaccgtcggaacgtacctatcgcattgctacacgtccgataacacggactcaatgacgtccggagaaatctcggagccggtcatcggatgtattttcggtaccggtaccaatgggtgctatatggaggagatcaacaagatcacgaagttgccacaggagttgcgtgacaagttgataaaggagggtaagacacacatgatcatcaatgtcgaatgggggtccttcgataatgagctcaagcacttgcctactactaagtatgacgtcgtaattgaccagaaactgtcaacgaacccgggatttcacttgtttgaaaaacgtgtctcagggatgttcttgggtgaggtgttgcgtaacattttagtggacttgcactcgcaaggcttgcttttgcaacagtacaggtccaaggaacaacttcctcgccacttgactacacctttccagttgtcatccgaagtgctgtcgcatattgaaattgacgactcgacaggtctacgtgaaacagagttgtcattattacagagtctcagactgcccaccactccaacagagcgtgttcaaattcaaaaattggtgcgcgcgatttctaggagatctgcgtatttagccgccgtgccgcttgccgcgatattgatcaagacaaatgctttgaacaagagatatcatggtgaagtcgagatcggttgtgatggttccgttgtggaatactaccccggtttcagatctatgctgagacacgccttagccttgtcacccttgggtgccgagggtgagaggaaggtgcacttgaagattgccaaggatggttccggagtgggtgccgccttgtgtgcgcttgtagcatgatctttttacatttttttggtttgtgtacgtatcccaccgtacttaccatcttctctcctttatatatatatatatatatgtatattttcagtgtatatacatacattcttatacaataccgtataagaacgtatgtatgtatgtatgattttctcacattaatgaacaatatcatcggaa

SEQ ID NO: 412 - DNA, 1316 bp, Saccharomyces cerevisiae
catttccgagtttcatcttgcgacataacttgtttcaacttttcaagtgcgactttttgttaaatattatgacatagaagaaagtagaacagccattataaaacaaaagagaagtgagaatactattaagatggcattccaagatccaacttacgaccagaataaaagcagacacatcaacaacagtcacttgcaagggccaaaccaggaaacaatagaaatgaaatctaaacacgtatcattcaaaccctctagagacttccatacaaacgattactcgaataactacattcatgggaagtcgctaccgcaacagcatgttactaatattgagaatagggttgatggctatccaaaacttcagaaattatttcaggcgaaagctaaacaaataaatcaatttgccactacgccatttgggtgtaaaatcggaatagattccattgttccaacgttgaatcactggatacagaacgaaaatttgactttcgacgtggtgatgattggctgcttaacagaaaatcagtttatttacccaattttaacccaattgccattggatagattgatctccaaaccaggtttcctgttcatctgggccaattctcaaaaaatcaatgaacttactaaacttttgaataatgaaatatgggctaaaaagtttagaagaagtgaagaattggtttttgttcctattgacaagaaatcaccgttttatccaggtttagatcaggacgatgaaacgttgatggaaaaaatgcaatggcactgttggatgtgtatcacaggtacagtaaggaggtctacagatggacatcttattcattgtaacgtagacactgacttgagtatcgaaacgaaggacaccactaatggtgctgtaccatcccatttgtatcgtattgcagaaaacttctctaccgcgactagacgattacatattattcctgcaaggactggttacgagacacccgtcaaagtaagacctggctgggttatagtgagcccagatgttatgttggataacttctcacccaagagatataaagaagagatagctaatttaggttcgaatatcccattaaaaaatgagattgagctgttaagaccaagaagtccagtacaaaaagcacaataaagcatcaacacataaatccttgcttagctcaattaaatatactagtaaataagtatataaacaataattttgcattttattttactggaaactcttctcaaaaccaaattgcgcaaggattgattcagtacaattatgcaaactcgaaaagtaaataaacaaaaagatacagttgagt

SEQ ID NO: 413 - DNA, 2283 bp, Saccharomyces cerevisiae
agagggaatacttggagatgcgattgttgctgtgcaagaattggtttgcgtcacctgtaatctcaccactactgtatacccgctccttatattcaatggctaacactactagtttccctattgctccccaggccccgcctaattggtcgttcactcccagcgatattagtgggaaaaccaacgaaatcatcaacaacagcaacaatttctatgattctatgagtaaggtagagagcccttccgtgagtaattttgtggagcctttcatgaagtttgaaaatgaattgggcccaataattaaccaattaactttcttacagcatgtgtcgtctgataaagaaattagggacgcatctgtgaactcctcaatgaaactggatgagttgaacatcgatctatctctgcgtcacgacatctttttgcaattcgcccgcgtctggcaggatgttcaatcgaaggcagattctgtggaaagagaaactttcaaatacgttgagaagtcttacaaggactacattcattctggtttggaacttgacgagggaaaccgattgaaaatcaaagagatcaaaaagaagatctccgttaactctattaatttttcgaagaatctgggagaacaaaaggaatacatcactttcaccaaagaacaattggaaggtgtgccggattctattttgacgcagttcgagacaataaaatctgacaaagatagcaatgaaaccttgtataaagtcaccttcaaatatccggacatttttcccgtgatgaaattggcatcctcagctcagactagaaagcaggcctttttggccgaccaaaataaggtccctgaaaatgaagctatactgttggatacattgaagctgcgtgacgaattggcctcgttattgggctatgacacgtatgcgaactacaacctgtatgataaaatggctgaagatagcactacggtaatgaactttttgaatgatttgaaggacaagctaattccgctgggcagaaaggaactacaggtcttgcaagatatgaaagccgaagatgttaagaaacttaaccagggtgcagatccaaactactacatttgggaccaccgttactacgataacaaatatttgttagaaaacttcaatgtggacctagaaaagatttctgaatattttccactagaggctacgattactggtatgctggaaatatacgaaacattgtttaatttgaagtttatcgagacgaaagattctcaaaacaaatctgtttggcatgacgacgtcaaacaaatcgccgtttggaatatggatgatccaaagtctccaaactttgttggttggatttatttcgatttacatcctcgtgatggtaaatatggccacgctgccaattttggtttatcgtcatcattcatgattgatgacaccacaagatcgtatccggttactgcgttggtttgcaatttctccaaatctacgaaggataaaccttctctactgaagcataacgaaatagtgacctttttccatgaattgggccatggtatccatgacctggtgggacaaaacaaggaatcgaggtttaatggccccggatctgttccatgggattttgtggaggcaccttcccaaatgttagaattttggacttggaataagaatgaattaatcaacctctcatcacattacaaaacgggcgaaaaaattccagaatctttgatcaattcattgatcaaaactaaacacgtaaatggtgctttattcactctaagacaattacattttgggttatttgatatgaaagtacatacttgtaaagacttgcaaaacctgtcaatttgcgatacctggaaccaattgagacaggatatttctttgatttctaatggtggtacgttatccaagggttatgattcatttggccatataatgtcagactcttactctgccggttattacggttatctatgggcggaagtctttgcaactgatatgtatcacaccaaattcgctaaggatccgttaaatgccaagaatgggatacaataccgtgatattgtgttggctcgtggtggcctttatgatattaatgataatctgaaagaatttttgggtagggaaccttctaaggatgctttcttgaaggagctgggcttacagaactaaattcgttcaagcataaaattatacaattattctacaaagtgttattatgttagataatcttttaaataacctcgtccctggatagattaaaaccattaaatagctcaaatcttggagtaaagcagca

SEQ ID NO: 414 - DNA, 2201 bp, Saccharomyces cerevisiae
aatattaggctctcaacctttttttactctccatttaccgctagatattaactagtagtaagtattgtgactactattccctgtaatcaaaaaaaaagtaatcagattttattttatttcgacattacccctcaaatatatgactggtatgaatgataataatgccgctattcctcagcaaactccaaggaaacatgcgctatcttctaaagttatgcaactttttagaagcggttcaagatcatctaggcagggaaaggcctcatcgaatatccagccaccttctaatataaacacaaacgttccatcggcgtctaaatcagccaaatttggtttacataccccaaccactgctactcctagggtagtttctaatccttctaatactgcaggtgtgagtaaaccgggcatgtatatgcccgaatattaccagtcggcatcaccatcgcactctagttcatccgcatcattaaacaaccatattgatattaacacctctaagtcatcatcagctgcttctttaacttcgtcagtatcagctttatccttatcacccacatcagccataaatattagctccaaaagtttgagcccaaagttctctcatcatagtaacagcaatactgctattacacccgcgcctactcccactgcttcaaatattaataatgtaaataagataaccaatacaagtgcacctatttgtgggaggtttcttgtgcataaagatggtacccatgaacatcacttaaaaaatgctaagagacaagaaaagctaagcacaatgattaaaaacatggttggtgcgagcaaattacgtggtgaggcaaaatctgctgtccctgatataataatggatccaaagacgactttaaaatccaacaagaatcctcctactctttttgcaggcttcatgaagcaggtcgtggatatggatgataaatatccagaaggcgctcccacaagtggcgctttaaattgtcctgaaagggatatatacaggtcagatcaaaaagattccaaaaataatacgcataatatcactactactaaaaaagataggcaatgttttgccgaaaagtatggtcgctgtcaagaagtccttggtaaaggtgcttttggtgtagtaagaatatgtcaaaagaaaaatgtttcttctcaagatggtaataaaagtgaaaagctttatgcagtgaaagagttcaagcgtagaacatccgaatcagcagaaaagtattctaagaggttgacttctgaattttgcatttcttcttcattacaccatacaaatattgttactacactagatcttttccaagatgccaaaggcgagtactgtgaagtaatggaatattgtgcaggtggcgatctattcactttggtcgttgccgccggaaaattagaatatatggaagcagattgtttcttcaagcagcttattagaggtgttgtttatatgcatgaaatgggtgtttgtcatagagatttgaagcctgagaacttactgcttacgcacgatggtgtgctaaaaattacagactttggtaacagcgaatgtttcaagatggcatgggaaaaaaatattcaccttagtggaggcgtttgcggttcatcgccgtacatcgccccagaggaatatatcaaagaagagtttgatccaagacccgtagatatatgggcatgtggtgtcatttatatggcaatgagaactggtagacaattgtggagttctgctgaaaaagacgatccattttatatgaattatttaaaaggacgtaaggaaaagggaggctatgagccaatcgaaagtttaaaaagagccaggtgtaggaatgttatatattcgatgttagatcccgttccgtacagaagaattaacgggaaacaaattttgaacagtgaatggggaagggagataaaatgctgccataatgggcgcgcattgaaataaacgagtacttcactttcaaatatcacgatattttggaacaattcggtattttttacttaatctagtacactaaggaatgctttgttatccggcattcgtatcttattcctcgcttctattgttctacttttatatcccgtttggctgattacggatcacgttcaaattggtaaatcccattaattaaaaaagaattgtaaccttatttaaaaaaaaaaatagtacataacaataaaaaaaaaaaagataa

SEQ ID NO: 415 - DNA, 1240 bp, Saccharomyces cerevisiae
tgaactaattatcttcgtctagaagccatgaattcactcgttactcaatatgctgctccgttgttcgagcgttatccccaacttcatgactatttaccaactttggagcgaccattttttaatatttcgttgtgggaacatttcgatgatgtcgtcactcgtgtaactaacggtagatttgttccaagcgaattccaattcattgcaggtgaattaccattaagcactttgccccctgtgctatacgccatcactgcctattacgttattatttttggtggcaggtttttgttaagtaagtcgaaaccatttaaattaaatggccttttccaattgcataatttggttttaacttcactttcattgacgcttttattgcttatggttgaacaattagtgccaattattgttcagcacgggttatacttcgctatctgtaatattggtgcttggactcaaccgctcgttacattatattacatgaattacattgtcaagtttattgaatttatagacacctttttcttggtgctaaaacataaaaaattgacatttttgcatacttatcaccatggcgctactgccttattatgttacacccaattgatgggcaccacatctatttcttgggtccctatttcattgaaccttggtgttcacgtggttatgtattggtactatttcttggctgccagaggcatcagggtctggtggaaggaatgggttaccagatttcaaattatccaatttgttttggatatcggtttcatatattttgctgtctaccaaaaagcagttcacttgtatttcccaattttgccacattgtggtgactgtgtgggttcaacaactgccacctttgcaggttgtgccattatttcttcatatttggtactatttatttcattttacattaacgtttataaacgtaaaggcaccaaaaccagtagagtggtaaagcgtgcccacggcggtgttgccgcaaaggttaatgagtatgttaacgttgacttgaaaaacgttcctactccatctccatcaccaaaacctcaacacagaagaaaaaggtaagtgtaaaatctttgaaagaatttaagtattcaactttcgtatattcgttttttcttagtggatctattgttactattatcactattattatattgtaaaagaccggatggttttgttatatattacatacacatgttatcgttgaaaaaagttttccgtttcctttcga

SEQ ID NO: 416 - DNA, 1122 bp, Saccharomyces cerevisiae
tctttcatcccaaagttccaacagcatatttcaaagatgggtattacagtaataggttctctaaactatgatttggacacatttacggatagattacctaacgctggagaaactttcagggctaaccacttcgaaacacatgctggtggtaagggattgaaccaagctgcggccattggtaaattaaaaaaccccagcagcagatatagtgttcgaatgattggtaatgttggaaatgatacatttggtaaacaattgaaggacactttatccgattgcggagtcgatatcactcacgtcggtacttacgaaggcattaatacgggtaccgctaccatactaattgaagagaaagctggtggccaaaataggatattgattgtagaaggtgctaacagcaagactatttatgacccgaaacagttgtgtgaaatttttccagagggcaaggaggaagaagagtatgttgtttttcaacacgaaattcctgatcctctttccattattaaatggatacatgcgaacaggccgaattttcagatcgtatataacccctcacctttcaaggccatgcctaagaaagattgggagttggtagaccttttggtcgttaatgaaattgagggtcttcaaatcgtggaaagtgtatttgataatgaacttgttgaagaaataagggagaagataaaggacgactttttaggagaatatcgtaaaatttgtgagcttttgtatgaaaaactcatgaatcgaaagaaaagaggaattgtggttatgactttgggttcgagaggggtgcttttctgttcgcacgaaagccctgaagtacaattccttccggctattcaaaatgtttcggttgttgatactacaggagctggagatactttcctgggcggtttggttactcaattgtatcaaggagagaccttgtctacggctataaagttctctacattagctagttcattgaccattcaaagaaaaggtgctgctgaaagcatgccactgtataaagatgttcagaaagatgcataaaatctactgcaattttttacttttagtttgttaaattttagttttcgtcatatatataaagtttaaaaaggtacaaagaatgca

SEQ ID NO: 417 - DNA, 528 bp, Saccharomyces cerevisiae
atgtttacttcgaagcctgctttcaaaattaagaacaaagcatccaaatcatacagaaacacagcggtttcaaaaaagctgaaagaaaaacgtctagctgagcatgtgaggccaagctgcttcaatattattcgaccactcaagaaagatatccagattcctgttccttcctctcgatttttaaataaaatccaaattcacaggatagcgtctggaagtcaaaatactcagtttcgacagttcaataagacatctataaaatcttcaaagaaatatttaaactcatttatggcttttagagcatattactcacagtttggctccggtgtaaaacaaaatgtcttgtcttctctgctcgctgaagaatggcacgcggacaaaatgcagcacggaatatgggactacttcgcgcaacagtataattttataaaccctggttttggttttgtagagtggttgacgaataattatgctgaagtacgtggtgacggatattgggaagatgtgtttgtacatttggccttatag

SEQ ID NO: 418 - DNA, 2016 bp, Saccharomyces cerevisiae
atgacggagactaaggatttgttgcaagacgaagagtttcttaagatccgcagactcaattccgcagaagccaacaaacggcattcggtcacgtacgataacgtgatcctgccacaggagtccatggaggtttcgccacggtcgtctaccacgtcgctggtggagccagtggagtcgactgaaggagtggagtcgactgaggcggaacgtgtggcagggaagcaggagcaggaggaggagtaccctgtggacgcccacatgcaaaagtacctttcacacctgaagagcaagtctcggtcgaggttccaccgaaaggatgctagcaagtatgtgtcgttttttggggacgtgagttttgatcctcgccccacgctcctggacagcgccatcaacgtgcccttccagacgactttcaaaggtccggtgctggagaaacagctcaaaaatttacagttgacaaagaccaagaccaaggccacggtgaagactacggtgaagactacggagaaaacggacaaggcagatgcccccccaggagaaaaactggagtcgaacttttcagggatctacgtgttcgcatggatgttcttgggctggatagccatcaggtgctgcacagattactatgcgtcgtacggcagtgcatggaataagctggaaatcgtgcagtacatgacaacggacttgttcacgatcgcaatgttggacttggcaatgttcctgtgcactttcttcgtggttttcgtgcactggctggtgaaaaagcggatcatcaactggaagtggactgggttcgttgcagtgagcatcttcgagttggctttcatccccgtgacgttccccatttacgtctactactttgatttcaactgggtcacgagaatcttcctgttcctgcactccgtggtgtttgttatgaagagccactcgtttgccttttacaacgggtatctttgggacataaagcaggaactcgagtactcttccaaacagttgcaaaaatacaaggaatctttgtccccagagacccgcgagattctgcaaaaaagttgcgacttttgccttttcgaattgaactaccagaccaaggataacgacttccccaacaacatcagttgcagcaatttcttcatgttctgtttgttccccgtcctcgtgtaccagatcaactacccaagaacgtcgcgcatcagatggaggtatgtgttggagaaggtgtgcgccatcattggcaccatcttcctcatgatggtcacggcacagttcttcatgcacccggtggccatgcgctgtatccagttccacaacacgcccaccttcggcggctggatccccgccacgcaagagtggttccacctgctcttcgacatgattccgggcttcactgttctgtacatgctcacgttttacatgatatgggacgctttattgaattgcgtggcggagttgaccaggtttgcggacagatatttctacggcgactggtggaattgcgtttcgtttgaagagtttagcagaatctggaacgtccccgttcacaaatttttactaagacacgtgtaccacagctccatgggcgcattgcatttgagcaagagccaagctacattatttacttttttcttgagtgccgtgttccacgaaatggccatgttcgccattttcagaagggttagaggatatctgttcatgttccaactgtcgcagtttgtgtggactgctttgagcaacaccaagtttctacgggcaagaccgcagttgtccaacgttgtcttttcgtttggtgtctgttcagggcccagtatcattatgacgttgtacctgaccttatgaactgccaccataccacgtgtgtccctcgcaagcccttgatagatatacaatagggaatgggcgtccgctccaccgtggtcaaagacaggggcaaagagctcctaggtctatatatatatctatatacatatttatatatattattagaactttacaatatagtatataccattcattgtttaa

SEQ ID NO: 419 - DNA, 809 bp, Saccharomyces cerevisiae
gacaaaatgaacgctaatatatgggtggctgcttcagatggtaatttggaccgagtggaacatatcctccgcgagagtaaaggcgccatgaccccgcaatccaaggacattaacggctacactccaatgcatgctgccgccgcatacggccacctggatttgctgaagaaaatgtgcaatgagtacaatggagacattaatgtgttggacaacgacggcgataccccgttgcaccatgtggaggatgtggccactgccaggttgatcgtggaagagctgggtggagacttcactatcaggaatgtggagggccaaacgccatacgactcgttcgtcgagaacggtgaagatggtgagctaatcgagtacatgaggattaagtccggcgtggccgatgttcacggagtggacggcgtgcagggtgagggtgtcatcgacagcaaattgctggaagagttcaaggacaacgtgagatacaccttggaaaatgaccctgaggaaggagccgatgaggccactctgcaacgcaggaggcagttggaacagatcattacgggagacaacgctgaggaggagttggaaaggtacatccgtgctatggtcagagagcagatgctgggccagggctccatggcgggttccggggacgaaccagattccaagagaagaaaataacgacccagcacaaaggctcttacagcttgctaaaagaaattgaacgcgacgctacatgaactacttctttctcttacatagtcttttcccttatgtatcttttctgtacattaatagacgttcttacaaggtaa

SEQ ID NO: 420 - DNA, 1683 bp, Saccharomyces cerevisiae
acgaaaaacagctcatagaaatggtaacacagaccaatccggtccctgttacatatccaacggatgcttatatccccacgtatctgcccgatgataaggtctccaatctggcagatttgaaaaaattgatagaaatggattccagactagatttgtatctgacaagaaggaggctggatacgtccatcaatttacctacaaacaccaagaccaaggaccatccccccaataaagagatgctgaggatttacgtctacaacactacggaaagcagccctcgcagcgattctggcaccccagcggactcaggcaagactacatggacactgagaatagaaggtaagcttctgcacgagtccgcaaacggaaagcacccatttagtgagtttttggaaggtgtcgcggtcgactttaaaagactgaaaccgctgggcatgggcaagaagaggaaacgcgattcgtcattgagccttcctttgaatctgcaacaacccgaatacaatgatcaagatagcaccatgggcgataacgacaacggcgaggatgaggacagtgcagaggcagaatccagggaggaaattgtagacgcactggaatggaactacgatgaaaacaacgttgtggagtttgatggtatcgacatcaagaggcaaggcaaggataatttgcgatgcagtataaccatccagttgaggggtgtcgacggtggaaaagtacagtactcgcccaacttagctaccttgataggtatgcaaacgggctccgttaatgacgcggtttattcgatctacaagtacattttgatcaacaatctgtttgttacggaacaaacagaggctcaagatggttccaacgatgccgaagacagcagtaacgagaataacaataaaaacggtgctggtgacgatgatggcgtcgagggaagtactccaaaggataagcccgaattgggtgaagtgaagctagattcactcttacaaaaggtattggatacaaacgccgcgcacctccccttgatgaatgttgtgcaaaccgtgaacaaactggtatcacccctaccgcccatcatcctagattatacaattgatctttccaaagataccacctatggtgctaccaccttggatgtagatgtgtcgcacattctccaccagcctcaaccccagccaaatttacaaaaagaggaagaaacagatgctgaagacacagcaaaactacgtgaaatcacaaagcttgccttgcagttgaactctagtgctcaaaaataccagtttttccacgaactgtctttgcatccaagagaaacgctgactcactacttatggtcttccaagcaaaacgagcttgtgctgcagggcgaccaatacttcaatgaagatgctgcaagaacgagtgacatatacagtaacaacaacaatgacaggtcactaatgggcaatatctcactactgtactcccaaggaagactataacatcactgtatgatctcattctttctgcaattattgcacgcctcctcgtgagtagtgaccgtgcgaacaaaagagtcattacaacgaggaaatagaagaaaatgaaaaattttcgacaaaatgtatagtcatttctatcaataacgtatacacgtttttttaatactatctatattgtgtatcttatatttttccatttggtagtatagca

SEQ ID NO: 421 - DNA, 1633 bp, Saccharomyces cerevisiae
atgcctaacgcttcccaagtttacagatctaccagatccagctctccaaagacaatctcttttgaagaggctatcattcaaggtctggccactgacggtggtcttttcattccaccaactattccacaagtggaccaagccactcttttcaatgattggtcaaagctctccttccaagacttagcctttgctatcatgagactatacattgcccaagaagagattccagatgctgatctaaaggacttgatcaagagatcttattctactttccgttctgatgaagtcacccccttggtgcaaaacgtcactggtgacaaggagaatttgcacattttagaattattccacggtcctacctacgctttcaaagacgttgctttacaatttgtcggtaatctttttgaatacttcttacaaagaaccaacgccaatttacctgaaggcgagaaaaagcaaatcactgtggtcggtgctacttccggtgacactggttctgcagccatctacggtttaagaggcaaaaaggacgtttccgttttcatcttatatccaaccggtagaatttccccaattcaagaagaacaaatgaccaccgttccagatgaaaacgtccagactttgtctgttaccggtactttcgacaactgtcaagatatcgtcaaagctattttcggtgacaaagaattcaactctaaacacaacgtcggtgctgttaactccatcaactgggcaagaatcttggcccaaatgacctattacttttattcattcttccaagccaccaacggtaaggactccaagaaggtcaagttcgttgtgccaagtgggaacttcggtgatatattggccggttattttgccaagaaaatgggtttgcctattgaaaaactggccatcgctaccaatgaaaacgacattttggacagatttttgaaatctggtctatacgaaagatcagacaaggttgctgctactttatccccagcaatggatatcttaatctcttctaactttgaaagactactatggtacctagctcgtgaatacctagctaatggtgatgatttgaaagccggtgaaatcgtcaacaattggttccaggaattgaagaccaacggtaagttccaagttgacaaatccatcattgaaggcgcatcaaaggactttacatcagaaagagtttccaatgaagaaacatctgaaacaatcaagaagatctacgaatcatctgtaaatccaaaacattacatcttagatcctcacacagctgtcggtgtttgcgccacagaaagattgattgcaaaagataatgacaagtccatccaatacatttctctatctaccgctcacccagctaaatttgccgatgctgtaaacaatgcattgtctggattttccaattattcatttgaaaaggatgttttgcctgaggaattgaagaaactatccacattaaagaagaaattaaaattcatcgaaagagctgacgttgaattggtcaaaaacgctattgaagaagaacttgctaaaatgaaattataagatcttcctttttaatgaatatattttatcttatataacatatagaattctataattaatagagagtatgaagtacgattatccttaa

SEQ ID NO: 422 - DNA, 475 bp, Saccharomyces cerevisiae
gcaacggtaaagagcatgagccaatttgaaaagcagaaggaacagggcaattctttgttcaaacagggcctgtatcgcgaggctgtgcactgttatgaccaactaattactgctcaaccgcagaacccggtcgggtacagcaacaaagccatggcgctgatcaaactgggtgaatatacacaggctattcaaatgtgccagcaaggactgcggtacacctcaacggcagagcatgtagctatcagatccaaattgcaatatcgtctagagctggcacagggagcggtaggttcagtacagatccctgttgtagaggttgatgaactaccggagggatacgaccggtcctgagaaaagagaaagggaacacttctaatttatctttaaaattatatatatatatatatatatatgtgtgtttgtatactctgtgggtatttccgtgtatatggttaataatagtagtatcttgtca

SEQ ID NO: 423 - DNA, 2314 bp, Saccharomyces cerevisiae
agtatttgttttgcattgtactcttaataccccaaccaaaaacaaaatagtgagagtaatggtgcgttttgtttcaattttaagtttattcggctgcgcggcgacgcttgtcacggcccatgatgacatggacatggacatggatatggacatggatatggacatgaatatcgatacgacaacgtctcaatccatagatgtctcatccacggcttcaatcgtccccgtgccacatgaaccaaaacatttgcatggccttcctatactgcaatcgccctcgcttacccctgcggagagattgtactgggaaaactacaacaccacaacctactttactacacaggctgggaataggtctgcccttcgctaccacattattacgctgctcttggttgcatttgtgctctaccctgtgtccctggcgctaagcgccgcccgttctaggtggtacttacccctgctgtttgttaatctatgcatttgtatttcgtccgtaatggcattgtccgtgttcaaaaatactttcccggaagaagactggtatgcgcataatatctatggcaccacttctgtgctacttctcgtttttatgcttgttcacttcttcgctgcggtgctttctgtccccgtctcattagcatcgaaaaaggagtaccgtccggttgacaccatccctctgaatgatcttgaatctacgcccgtcatggtgaatagtgcacgtggctctccaagtccttcttccaacagagacacgttgttctcgctctcttcagacaccacgaccgccacggccaccaataataataaacggagacgcgctgaaggcgaagacgagggtgataacacctccaaccacgacactttgcgcgacgaagactacgataatgatgacgacgaaattgcttccattgaagcgccacctctgcttcctcaagacatacccgttttccgaatcttgtttaccaacacgaagtaccagatgcttgccgcgcacctctcgtgcgtcgccaacgtggtctttcacatgcttacctacccgctattcatgtacatctttgtagacctaatcatcggcttcgctgtaggtaacttgctcggcaagggcatccgcatctttaatctcttggcccactggattaagggcggcgtattttttactctgggcgttgtctctttagcaagatactgcggtttcgcagctaagtacggctgggcatggaacaacatcagcttcacctctcaactcacacaaacgcgttcctccaatcttcttttccggtttgctcctgcggggactttcaccatggaattcgttgaatccttcctcattttcttttacgggtccaccaacatcttcttggagcacctggcaggaaacggcggcgcatggactgccaaggatttacagcatgtgtcgatcgcgtttatgttcataggaaccggattgtgtgggctactcacggagtacaagctcaaccattggcgattcgagcatgcccgcaaacggccacagaccgatgtagttgctgccacaccggggtactctccaaacccgttccccgctttcaccatattttggactgggattctgatgtcccagcacgcacagtcctcgcaattttctactaccattcacacgcaatggggatacttgttgtcctatgggtccttcttccgtctgctaacatttttgattctgtttttggtgcccaacaccaacagtgccgcatccaagcctttcacggagttgatcacctcgttctgtctcctctgtggtggtctggtatttatggagtccacggatcagtccattgaagccatggaatatagggggtttacccccatgttcactttcaacctcagtgttggattcgtttctttgttgatggcttgggaaatgattttatttatttggaaagactggctcatcaaaaccaggaaaaccagtctttaaccgccataatggcttttcttttttcttttttttttcacccccccctcatctttgagtgagaagcttatatgctttacttttcctcacctactttttaattcttaattattagtttatccagcattcagtcaattctgaatgcgttatcgcttcctcaaaatttataaaaatgaataagcaagatctcattggaattgagttcaatgacgattattgagggcccatacctgataaaagtgaatatattatgtataatgactctactggaggttctctctgagaatgtaaaataatccacaaaagacatgaaaattagttactctacataatgtataataagttcttccttccttttttctt

SEQ ID NO: 424 - DNA, 1819 bp, Saccharomyces cerevisiae
tctactatttgagcttcttttattgaccgaaactacctcttatttcgaagcaaaaaaaaaaaaaatcaacaaaaattccaacttttcaatgatgaatgaagacatatccatcattgatggccataatagttttttaacggaaaaaagcaccgtgctattaacccaagccaagagaacactagaagacgaaaaggaaatgattactcccccgagctcaactgtgagaaaaacaatgaaggaagtaaataagaggccgtcgcatcccctctcaccggatcactcgtccccaattgctccatctaaggccaagcgccaaagatcggacacatgcgctcggtccaatggtaacctaaccttggaagaaattcttcaatctttggaaagaagaagaataaatggtgaactcgccaagaaacctccatattcgtatgcaactttgatttgcttggccattttgcaatctcaggagggaaagctaacgctatcccagatatatcattggatccacgttcacttcccttattacaagcagaaagatgctagttggcaaaattcaataagacataacttgtctttaaatgatgcgttcatcaagactgaaaagtcctgcgatggtaagggtcatttctgggaggtcagaccgggtgccgaaacaaaatttttcaaaggtgaaaatcgtggttatgaatttgtaaaggactccttacaagacattgggaagtattttgaaatagattctacacttgatgaattagaacaagttgagagtggagaaggcaatgatgatcttcctgacgaggaagaaagagaggaagcagggaaattcccttccattgaaattcaattgaactcctcccctatactgagagtttcccagttacatcacataccgcaattgaaaacagacaacagtgtactgaaccctcacgaaaacctagaatcgatgcggaacatgatagaaaacgatgtcaacaatatagattccttggaacctccttatgtcatgaagaaatatcatacttctttaggcttaccgtcgctggtgaatgccaaagatcatttccaggcgggtgtgaaaaacaataatatcacccaggcaaatagatttaatacactccctataactagcgcaaagtctcctcagaatttcagaaaatatttcacctcattcaattcaaattttgaagatttatctccacttcgaagtaatgtaggggctggttctctactcgacccacttccgtattccccattgaagctgtacgatcagaaaaatcttgcgctcatgtcgaaaccacaatctcagcaatcatattccaattctcaacttccacctccaccttcctctcatggttcggacttacttaaaacacccaagatgaggcattccgatggcttagagaaaaccccatcgcggttgataagcacacctaaggacggtaactcgattttgaggaaatggcagactccttcacacctttttgaagatttgtactgttctccgctatttagagctatagagactccaatcaggtatatcacgacgccggggggcactttggaaacccaaatttcaccaagaaagtcctctgcacccgatgtcctcacaagcgcaacgaattccaaatttgcttcaagcgggctgtttggcgtggatgtttattctgtttggaagcgcgcaactgaaaagatttctgatggtaacaatactacggatagcaatcaaaaacatcatccttatcataatcacccttccaacgatagcggtaatgaaaagaattgactttttttttttttttttttcattttcttttcctca

SEQ ID NO: 425 - DNA, 1563 bp, Saccharomyces cerevisiae
atgttgcataaaagcccttcaagaaagagatttgcttctcctttgcatctaggatgcattctaacgcttacagtgctctgccttattgcttactactttgctttaccggattatttatcggtagggaagagctcatccaggggtgccatggatcaaaaatctgatggaacctttagacttaagtctatctacaggcatggcgtcggagcaaaccatcggctacaccagaggctggaggtcactccagaagttatttctgccgctggaatgctgtatcaagaaaccacaactcaaggacaggatttcgaagaccaagaacccctatggactactaatgccgaatatgccaccactaacccattcgattttgagtttgagctacgaaggatgccgctattgatgaagcggatgaaggaaagagatcctgaattcatagagtcgtacatttacggagaaacatacatgacggaggaggaagaacacgccatgtggatagatgatgacattgtggcacccaatatcacagatagaggtacagtagtgtcgttagcattaatgtcgtctaatgcttacgtgagaataccgcaaacgggagactggcgtaacgtcacggagccgtggaatgaaacagagccggaagattttggttgggatggtgatggtatacgtggtcacgtcttttacaatgaagtggagaatatcgtggtactctcgataaagggaaccagcgctcagggtttgccagggtctggcgaagatgagacaactggaaacgacaagatcaacgataatttgttattttcgtgttgttgtgcaagagtgagctacctgtggactaccgtgtgcgattgctatgtgaagtcgtatatatgcgatgagtcttgcctggaaaaggaactgagacgtaaggatagattttactctgcagtcgttgacatatacaaaggcgtcctcaaagaataccccgatgcggccatatgggtcacaggccactcactgggaggcgcattggccagtttactgggccgcacttttggattgcctgcggtcgcattcgagtcccctggagagctactaccttcaaaaagacttcacttaccattcccaccgggacttccctcatacatggagggtatctggcacttcggtcacaacgcagacccaatcttcatgggtacatgcaacggagctagttcaagttgctcactggtgggctacgctatggaaaccgcgtgccacactggtagagtctgtgtctacgatgtggtcaacgacaagggctggagtgtaaacatgttcaaccacagaatccacaaagtcattgacgaagttctccttggatacgagcaggctgccaagtgcgttgaaccagagccctgcgtagattgctacaactggaagtttattccaagcagagactgggaatcctcatcgaggctcattaccaagactaaaagccacgctgcaccaaccacgacgactcgcaccactgctactactacctcttcatctacctgtgtaggccgcaattggcttggcttctgcaccaaatacgagttgtaa

SEQ ID NO: 426 - DNA, 1287 bp, Saccharomyces cerevisiae
tgataaataatgtatcattttgacaacttaaaggttcagctaaacgacacgagaagatatattaatactgctttaaagtgaaaggcgtcagtcaggtgcaattaataggtcacatattctttgcttcaattgctctctagcaaactcacacactcgtagattggaagaccgaagaaaatagatagactttcgaataagttcagcaacaacatgtggttgaaatccttgctgctctgcctgtactccttagtactctgccaagtccacgctgcaccttcatcagggaagcagattacctccaaggatgttgatcttcagaaaaaatatgagcccagtccccccgccacacatcgtggaataatcactatcgaatactttgatcccgtttcgaagtcgatgaaagaggcggatctgacttttgagttgtacggtactgtcgtgcccaaaactgtgaacaactttgctatgctggcccatggtgttaaggcagttatcgaagggaaagatcccaatgatatacatacttactcgtaccgtaagaccaaaatcaacaaggtttaccctaacaagtatatccagggtggtgtggttgccccagatgtgggtcctttcaccgtctatgggcccaaatttgatgacgaaaacttttacttaaaacatgacaggcctgaaagactcgcaatggcctattttggacctgattctaacacctcggaattcatcatcaccactaaagccgatggaaatgaggaattggatggcaaaagtgtcgtgtttggtcaaataacttctggtctagatcaactaatggatgctattcaatacacagaaacagacgaatatggaaagcctcagcatgaattacggttcctgtatttcgttctagaaatcttaaaaattagtaacatcttagatttgcacgctgcgtacacagaaaaagtcgagaagtttagaaatggcgatgtgtctgttggctccactttggaaaacatcttccgtaacgataaagcctacacacctttaaccacctccactggaaccaccgcctatgatttaaaccacccaatttccagagccttgatgtgtttaactgttcttggcctttgtttcattgcctacaagggcatgcacgaaaagcctcatacggtttcattaagacacaagtaagcaacttcttttcgatggcttgatgaccacatggctatgattttaattaatatatatacatgacaattatttttttatacattagcgatacctaaaatttcttggttaatacccttttga

SEQ ID NO: 427 - DNA, 1077 bp, Saccharomyces cerevisiae
ttgcagcaagacaatatgactacgacggtacccaagatattcgcgtttcacgagttttcagacgtggcagaggccgtagctgaccatgtagtccacgcgcaagacggtgcattggctccaaagaacgagaggaaacactctgttcccaacatcagcatgaatgcactggatatgacgagagaggcctcttgcaaaagcacagcatctgccgcggaagggaaaagtggtagcagtggtagtggcagtggtagcagtaagcccaaaaaggagaaacggttcaagattgctctctccggtgggtcattgatcgaagtgctacacgaaggtctgctaaaacgagacgatgtacggtggggagactgggacatttactttgcagacgagagacttgtacccttcagctcgaatgaaagcaattatggatgcgccaaaaggaagattttggacctgatagacacggcgaagtatggaactccgaaggtgtaccacattgacgagtcattgattgacgacccgcaagaatgcgctgataactatgaaaaggtgctaatccgcgggtttgccggtagagattccgtcaaacttccgatgttcgacttgttcctgcttggttgtgcccccgatggtcatatcgcatcactcttccctaacttccaggacaatctacgtgagaaacttgcatgggtggtgcccgtggagaacgctcctagtgggccctcgaccagaatttcgctgactatacctgtaatctgccattctcacagggttactttcgttgtcgaaggtgcaaccaaggcgcccatcatcaagaccattatggaaaggcctgaaaagggcctacctagcagtattgtcaacgaaggtgctgctggtcgtgtatcatggtttgttgacgacgatgctcttacggacgtcctcgtcaccaaaaaaaagtataaattccaccaaggtttgtctatttaaaccatgcatgtgtgtacatacatacatacacacatacatacatacatacatatatttatgtatatttatgtatatatatatatatatatatatgcgtaattatgcagatttctc

SEQ ID NO: 428 - DNA, 343 bp, Saccharomyces cerevisiae
cctaaaccaaatcaaagatggaagcggaaaaacaatctgatattaagggaaccattgctttcgatactcacggtaacgttatagagtctaccggcgtgggcagtcaaaggatcgaagatatcggtgatttatcgaaagttacgctggatgcagaaggttttgctcaagttcaaggagattcgctactcgtacacctgtacaaacgcaatgatatcactttagctgtatataccagcgctcaataaattctttccttccctttcgacatagctatgtctgtatactatctaaaaactaaatatcacaataaacaaagtactaaaataaacacccatttaaataa

SEQ ID NO: 429 - DNA, 516 bp, Saccharomyces cerevisiae
tcagtactagcgtgtaccagtctatttaaactggaatgatcaccccaaagggaacgcacgatgctgtggccaagtttcaaaaaactgacctgcatcaagatctcgattacatcgtactgcaacaacgaagaacacagctagagacgcttattaacgaaagagaatcttttgtcaagaatctgtgttctcttttccacaaaattcaaaataccaagaattaccaggaatttgttgatgtattggcggagaatagggatttactgcgagaaattttcactgtagagaacggatttcaaaagcaaaaatggattagcaacgacgacattccccagatagactgggacaagtttgccctagatatcaacgcttatatagcagagaacgatcaattgttggctttgtatgaagatggcttattatgatcaaatagcggctatggacatttttaaacatatatttatatatatatacatatatgcgtatattgcataaatcacaaagaagaacaacgcccta

SEQ ID NO: 430 - DNA, 526 bp, Saccharomyces cerevisiae
gtacatagagaaaccaaagctgttatgttgttctataagcctgtgatgaggatggcggtgagaccgctaaaaagcataagattccagtcctcatacaccagtattactaaattgacgaacctaacagaatttaggaatttgatcaagcaaaatgataaactagtcatcgatttttatgctacttggtgtggcccctgtaagatgatgcaaccacacttaacgaaattaattcaggcttatccagatgtaagatttgtcaagtgcgacgtggacgaatcaccagatattgccaaagagtgtgaagtgacggctatgcccacctttgttcttggcaaggatggccaactcatcggcaagatcattggagctaaccctactgctttagagaagggaatcaaagatctataaattttatattcatgagcacatgtagtttttttttttttagttttaaatataagaaaaaagatagtatatatatatatatatatacatatacatataaaaggaaagtaagcttatacaa

SEQ ID NO: 431 - DNA, 1900 bp, Saccharomyces cerevisiae
tcgcataaccgcacgtatatacacgcacacacctatcaatcacaatggctttggaacctattgattatactactcactcgagagagatcgacgcagagtacctgaagattgtcagaggctccgatcctgacaccacctggttgattatttcacccaatgcgaaaaaagaatacgaacctgagtctaccggttcctcctttcacgatttcttgcaattgtttgatgaaaccaaggtccagtacggactggcacgtgtgtccccaccagggtcagacgttgagaagattattatcattggttggtgtcctgattctgcgccattgaagacaagggcctctttcgccgccaattttgctgcagttgctaataatctgttcaagggttaccacgttcaagttaccgccagagacgaggacgatcttgacgaaaatgaactgttgatgaaaatcagtaacgcggccggtgcccgttattctattcagacttcctccaagcaacaggggaaggcttccactcctcccgtgaagaaatccttcacaccttccaagagccctgctccagtttctaagaaggaaccagtcaagactccttccccagcacctgctgctaagatttcttcccgtgttaacgacaacaatgacgacgacgattggaatgagcctgaattaaaggaacgcgacttcgatcaggctcccctgaaaccaaatcaatcatcttacaaaccaattggcaaaatcgacttgcaaaaagtgattgctgaagaaaaggctaaggaggacccacgtcttgttcaaaagccaaccgctgctggttccaagattgatcctagttctgatatcgctaatttaaagaacgaatcaaaattaaagagggactccgagtttaactcctttttgggcaccactaaacccccctccatgacggaatcttcattaaagaatgatgatgataaagtcattaagggttttagaaacgagaaatcacctgctcaattatgggccgaaagaaaggcaaagcaaaacagcggcaacgccgaaactaaggctgaggcaccaaaacctgaagttccagaagatgagcctgaaggtgaacctgacgtcaaagatttgaaatcaaaatttgaaggattggccgcttcagaaaaagaggaggaagaaatggaaaacaaatttgctcctcctccaaagaaatcagaaccaactattatctcaccaaaacccttctccaagccacaagaacctgtgaaagctgaagaagccgagcagcctaagactgattacaagaagatcggcaacccattacccggtatgcacattgaagcggataatgaggaagaaccagaagagaatgatgatgactgggatgatgatgaagacgaggctgctcaacctcctttgccttcgaggaatgttgcgtcaggagcaccagtgcaaaaagaagagcctgaacaagaagagatcgccccaagcttaccttctagaaactcgatcccagctccaaaacaagaagaagcacctgaacaagcacctgaagaagaaattgaagaagaagctgaggaagccgctccacagctgccatcaagaagctctgcagctcctcctccgcctccaagacgagcaactccagagaaaaagccaaaggaaaatccttgggccacagcagaatatgattacgatgctgcagaagataacgaactgacctttgtggaaaatgacaagattatcaatattgaatttgtcgacgatgactggtggctaggggaactagagaaagacggctcaaaaggtctcttccccagcaattatgtgtctttgggcaactagaatcacacgtcagcgtcatgctattatattattcttacgtaaaaaaatacttacagagacgttaaagcttttgtata

SEQ ID NO: 432 - DNA, 1311 bp, Saccharomyces cerevisiae
acgcactgcgaacaaagaataattgagtaatcgaacttgaagttctatagaacagcttgtatatggtttcattgttcaaaagaggtaaggctccaccgctcacgaaagaaggccccacttctaaaaagcctcctaacacagcgtttagacaacaaaggcttaaggcatggcaaccaatactgtctcctcaaagtgtgcttccgttgttaatattcgttgcatgtatatttactcctattggtattggactcattgtaagcgctactaaggtacaagatctaacaattgattatagtcattgtgatacaaaagcatctacaactgcttttgaagatataccaaagaagtacattaaatatcactttaaaagtaaagttgaaaataaaccacaatggaggctaaccgaaaatgaaaatggcgaacaatcatgcgaactgcagttcgaaatcccaaacgatatcaagaaatccatttttatatattataaaataaccaatttttatcaaaatcatcgcagatatgtccaatcgtttgacacaaagcaaatattaggggagcctatcaaaaaagatgatctggatacaagctgtagtccaataagaagtagggaagacaaaataatatatccctgtgggttgatcgctaattccatgtttaatgatacattttctcaggtgttgagtggtatagatgacacagaagactataatttaactaacaagcatatatcatggagtattgatcgtcacagatttaaaaccaccaagtataatgctagcgatattgttccaccgccaaactggatgaagaagtatcccgatgggtatacagatgaaaatcttcctgatatccatacttgggaagagttccaggtatggatgaggactgcagcctttcccaagttttacaagttgacgttgaaaaatgaatctgcttctttaccgaagggtaaatatcaaatgaacattgagttgaattatccgatttcactctttggtggcacaaaatcatttgtactgactacaaatggagctattggtggtagaaatatgtcactaggcgtactgtacctcatcgttgcagggctttgcgccttatttggcatcatttttttggttaaattaatcttccaaccaagagcgatgggtgatcacacttatttgaattttgatgatgaagaaaacgaggattatgaggatgtacacgcagagaatacaacattgagggaaattttatagaggccaaaaaacaaactttagtgcctgtaggtatttgtgtttataagtaaacaagttttgttgacttcctgaa

SEQ ID NO: 433 - DNA, 1345 bp, Saccharomyces cerevisiae
ctgagagagaagaaattgtttcttttcttttcggaaaatttgtttgtaaagggatatgatataatacaggcccctgcgagctttgtcacaaggcccgtttccattctttttatttcatcgaaaggttcgaagaacacttttccactatataagcatacctgtactcccttatttaatccgttcaacaactttggttcctccttctagattaattgaaagctttcgttcgtttcacaccatgtctaatacagttctagtttctggcgcttcaggttttattgccttgcatatcctgtcacaattgttaaaacaagattataaggttattggaactgtgagatcccatgaaaaagaagcaaaattgctaagacaatttcaacataaccctaatttaactttagaaattgttccggacatttctcatccaaatgctttcgataaggttctgcagaaacgtggacgtgagattaggtatgttctacacacggcctctccttttcattatgatactaccgaatatgaaaaagacttattgattcccgcgttagaaggtacaaaaaacatcctaaattctatcaagaaatatgcagcagacactgtagagcgtgttgttgtgacttcttcttgtactgctattataacccttgcaaagatggacgatcccagtgtggtttttacagaagagagttggaacgaagcaacctgggaaagctgtcaaattgatgggataaatgcttactttgcatccaagaagtttgctgaaaaggctgcctgggagttcacaaaagagaatgaagatcacatcaaattcaaactaacaacagtcaacccttctcttctttttggtcctcaacttttcgatgaagatgtgcatggccatttgaatacttcttgcgaaatgatcaatggcctaattcataccccagtaaatgccagtgttcctgattttcattccatttttattgatgtaagggatgtggccctagctcatctgtatgctttccagaaggaaaataccgcgggtaaaagattagtggtaactaacggtaaatttggaaaccaagatatcctggatattttgaacgaagattttccacaattaagaggtctcattcctttgggtaagcctggcacaggtgatcaagtcattgaccgcggttcaactacagataatagtgcaacgaggaaaatacttggctttgagttcagaagtttacacgaaagtgtccatgatactgctgcccaaattttgaagaaggagaacagattatgacgccataccacacataatctcgcaattatgtgaagccaaaataatcaagggaaaccataagtcatatttagt

SEQ ID NO: 434 - DNA, 821 bp, Saccharomyces cerevisiae
gcatttttaagtacttcccactggctaattacacagataaaactcaaacaaatttataatggccccaaaaaaagttttactcgctcttacctcatataacgatgtattctacagtgacggcgccaagaccggtgtttttgttgtagaagccttacatcccttcaacacattccgaaaagaaggttttgaagtcgattttgtatctgaaaccggaaaatttggttgggatgagcattccttagccaaagattttctaaatggtcaagacgaaacggattttaaaaataaagactcagatttcaacaagacattggctaaaattaagacaccaaaagaggtgaatgccgatgattaccaaattttttttgcatctgcaggccacggtaccttatttgactatcctaaggctaaagacttgcaggacattgcttccgaaatttatgctaacggtggtgttgtcgcagctgtttgtcacggtcctgctatttttgatgggttaacagacaaaaaaacaggaagaccattgatcgaaggtaaatctatcaccggttttactgatgttggtgaaaccattttgggtgttgatagtattttgaaagccaagaatttggcaaccgttgaagatgttgctaaaaaatatggcgctaagtatttagctccggttgggccctgggatgattactctattactgacggaagactggtaacaggtgtgaatcctgcttctgcgcactccactgccgtaagatccatcgacgctttaaaaaactgagccaaaggttgataattagaatttcctttgtactactatatagatgtaa

SEQ ID NO: 435 - DNA, 1080 bp, Saccharomyces cerevisiae
gcccctgggtcagagaaaataggaagacaaagatgattgaagagaatttgaaacagaaaatccacgataagttcgttgcagccaaaaagaatgggcatctgaaagtaacgcatgcagaatccaagaagttgaaagatcctcaaacgacgacacaatattgggtgacatttgctccatctttggcacttaagccagacgctaacaagaatagcgattcaaaggcggaggacccgttcgccaatcccgacgaagaactagtggtgactgaagatctaaatggtgacggagaatataagctgctactcaacaaatttcctgtggtccctgaacatagtctcctagtgacaagcgagtttaaagaccagagatctgctttgacgccaagtgacttgatgactgcttataatgtgctctgttctctccaaggagacaaggacgatgatgtcacttgtgaaaggtatctggtcttttataattgtggacctcatagcggttcctcacaagatcacaaacacttgcagatcatgcaaatgcctgaaaaatttataccttttcaggacgtattgtgcaacggaaaggatcatttcttgcccaccttcaacgcagagccattacaagatgataaggtttcctttgctcatttcgtcttgccgctgccggaatcgtctgatcaagtggacgaagatcttcttgctatgtgttacgtatctttgatgcagagagcacttacatttttccaagattggaccaatgagtctccggagttgaccaagtcatacaatgtgctactgaccaagaaatggatctgtgtagttccaagatcgcatgccaagagtggaccgccattgatgttaaacattaactccacggggtactgtggtatgatcctcgttaaagacagagaaaaactagagaacctcactgaagatcctcatcttgtggacaagtcgttactgcaatgcggtttccccaacacagcaggccaaaaaccaacagagtatcactattaaggtctattagccatatgtacattgtctatagatgtgtaactgcgctgtgatcttgttttgaccaatcagg

SEQ ID NO: 436 - DNA, 600 bp, Saccharomyces cerevisiae
tatcagaatattagtaactgtaattaaacgttccagaaagaacaaaatgccacagtcttttacgtctattgcgagaattggtgactatattttgaagtcacccgtcctctccaagttatgtgttccagttgccaatcagttcattaacctcgcaggttacaagaagttagggctcaaatttgacgacttaattgcagaggaaaatcccatcatgcagaccgctttaagaagactccctgaagatgaatcttatgccagagcatatagaataatcagggctcatcaaaccgagttgactcatcatttactgccaagaaacgaatggatcaaagcccaagaggatgttccttacctgttgccatacatattagaagctgaagctgcagctaaggagaaggacgagttagacaacatagaggtctccaaatgaaaagaagaataaaaaaatcaccacgaacacacaacccgaaaaaaaaaaggcattaaatattcatttgaaagaagggacagagactaaatcatatcctttattatctctctatatatatataagcgtttgcttgaaacgtttacttcatattatttatttatctatagtct

SEQ ID NO: 437 - DNA, 1694 bp, Saccharomyces cerevisiae
tcttttgtacgtctcatacttataggaagtttaaatagaaacagatatcagtgtatcaaggaagaattgtacaagaatcgaatcatagatacacagtaatgtcatttgaaaatttacataaagtcaatgctgaggcattggaagatgcagtggttgagatctgctcctcattgcaggttgatgcagcaaagttggacgaactaacagcgtacttcattgaatgtatggaaaaggggttgaataacacctctgtaggcgaagaaaagacggtggacaagggtctacccatgatccctacatatgtaaccagtttgcccaatgggacggaacgtggtgttttgctggctgcagatttaggtgggactcacttcagagtgtgttctgtgactttgaatggtgacggaacctttgatatgcagcaattgaagtctaagattccggaagaatatctaaatgacaaggatgtcaccagcgaggagctgtttagctacctgggtcgccgtacaagggccttcgttaggaagcatcatcctgagttgttgaagtccacgggggagaacataaaacctttgaaaatgggatttaccttctcatatcccgttgaccaaacctctttgagttccggtactttaatcagatggaccaaaagcttcaagattgaagacacggtcggcaaggatgtcgtgaggttataccaggagcaattagacattcaggggctctctatgattaatgtggtagctttgaccaacgacacggttggcactttcctatcccactgctacacttcaggctctcgtccatcgagtgctggtgagattagcgagcctgtcattggttgtatctttggtactggtactaacggttgctatatggaggatattgaaaacatcaagaagctaccagatgagctcagaacaagactgctgcatgaaggaaaaacccaaatgtgcatcaacatcgaatggggttctttcgacaatgaattgaaacatttgtctgctacaaagtatgacatcgatattgaccaaaaattttctccaaatccaggttaccatctatttgaaaaaagaatttccggcatgtacttgggtgagctgttaaggaacatcctggtggacttgcatgcaaggggcttaatcttgggacagtatcgtaattacgatcaattacctcaccgtttaaagactcctttccaattgtgcagtgaagttctttccaggattgaaatcgatgattcgacaaacttgcgtgaaactgaattgtcgtttttgcagagtttgaggctaccgaccacttttgaagaacgtaaagcaattcaaaatctggtccgttccattacgagaaggtctgcatatctagcagccgttccgattgccgccatcctaatcaagacaaacgctttgaacaaaagatatcacggtgaggtagaaattggttttgacggttatgtcatcgaatactatcctggattcagatccatgctgagacatgctttggcattaagtccaattggcactgagggtgaacgtaagatacatttgcgtctagccaaagatgggtccggtgttggcgcagctttgtgtgctctggtggcataaaacatatctgttcttaacagcttatttttagtttgttttcgttttcctctatataaatatcttatgtatctgttatataaaaaattatttagt

SEQ ID NO: 438 - DNA, 598 bp, Saccharomyces cerevisiae
atgataataacaattaaattcgagtcgaaggaaaaattggtctccatgaaacaatatataacagtagttggagtgtccgttaatcaagagggcaccttttcttggcgtcctgggactttttatatgaaaattcatgaagaaagtgcggcgggcccctttgcgaagggggccgaaatatcggatcttagtaatagttctgctattggatgtggtattagcataaatcaagagggaggcgatggttctattagggtaaaagagagcagcttgaggaagaaacaggaaaggatgagtacaaaatatccgacaacgatgagttgccgagaggcatttgatcaactgacgagttgctattcgattggagggcaatttagaagctattacagatatggagattttacatcatgtgacaagcaggtgtccaaattcaagttttgtattatccacggcaatgaccctgtgaaagtgcaggaatggtataaagatcaggtttccaacaataaggcattggaaaataccagtggggttatatggcaggagagggagaccactgcaaataagtgagatttttagctttttttttttagcatgtgtacta

SEQ ID NO: 439 - DNA, 2333 bp, Saccharomyces cerevisiae
tttaaacatattcctttcgtgcttcttcaaagttgagagttataggtgctttatgtttttttttttttgtgtaagaaaaaaaaactatcgctttctcaagtagcttatataatatcaaatattgcacattatgacgcttggtaatagacgccatgggcggaataatgagggaagctctaatatgaatatgaatcgtaacgaccttgacgatgtttcccattacgagatgaaggaaatacaaccaaaggaaaaacaaattggctctatagaaccggaaaatgaagtagaatattttgaaaaaacagtggaaaaaaccattgaaaatatggaatatgaaggtgaacatcatgcatcttacttacggaggttcattgactcgtttagaagagcggaaggctcgcatgcaaattccccagactcgagcaactctaatgggactactcctatatccacaaaagattccagctctcaattggacaatgagttgaatcggaagagctcatacatcactgttgatggtattaaacagtcaccacaagaacaagaacagaaacaagaaaatttgaaaaagagtataaagccccgtcatacggtgatgatgtccctagggactggtattggtactggtttgctggtcggtaactccaaagttttgaacaatgcaggtccgggtggtttgatcattggttatgctattatgggtagttgtgtttactgtattattcaagcttgtggtgaattagcggttatatacagtgatttgattggtggatttaatacatatcctttgtttttggtcgaccctgcacttggcttttctgttgcttggcttttttgcttacaatggctatgtgtttgtcctctagaattggtcactgcatccatgactatcaaatattggacgacatctgtgaacccggatgttttcgttgttatcttctacgtactaatcgttgttatcaacgtttttggagctaagggttatgcagaggcagatttcttcttcaattgttgtaaaattctgatgatagttggatttttcattctcgccattattattgattgtggtggtgcaggtaccgatggttacataggtagcaaatattggcgtgatcccggagccttccgtggtgatacacccatccagaggttcaaaggtgtcgttgccacatttgtcacagcagcgttcgcctttggtatgagtgaacagctggctatgactgccagtgaacaatccaatccaagaaaggctattccatcggcggcaaagaaaatgatttatagaattctgtttgtgttcttggcgtctttaacgttagttggtttccttgtaccttacacctcagatcaattgctaggggccgcaggttcagccactaaagcgtcgccctacgtcatcgctgtctcctctcatggtgttcgtgtggttcctcatttcataaacgctgtcatcctgttgtctgttctttccgttgctaacggtgccttctataccagttctcgtattttgatgtcgttggccaaacaaggtaatgcacccaaatgtttcgattacatcgatagggaaggtagacctgctgctgctatgcttgtcagtgcattatttggtgtcattgcattctgtgcctcatctaaaaaggaagaggacgttttcacctggttgttagcaatctccggtttgtctcaattattcacgtggattaccatttgtttgtctcacattaggtttagaagagctatgaaagtgcaaggaaggtccttaggagaggttggttataaatctcaagtcggtgtctgggggtcggcttacgctgtccttatgatggtgttagctttaatcgcccaattttgggttgccattgccccaattggtggaggaggtaagttaagtgcccaatcattttttgagaattatttggctatgccaatctggattgctttatacatcttttacaaagtttggaaaaaagattggagtttattcattcccgctgataaagtagacttagtttctcatagaaacatctttgatgaagaattattaaaacaagaagatgaagaatataaagagagattaagaaacggaccatactggaaaagagttcttgatttctggtgttaaagcagaaatcacgattcaaaaaaaaaaaaaaaaacttgaagaaacaattcaattagcatattatttcaaatcccagccttcctacacgctcttcctgttttatctctttcctttcattctcccgtccccctcattcatgtatttcttatttcattatactatttaactctttaaatattctatgtactttgtgcaaacatcattgtcatca

SEQ ID NO: 440 - DNA, 1006 bp, Saccharomyces cerevisiae
aaactcgtcatattctaccaaggatgatctctgtcatggcggatgagaaacataaggagtattttaagctatactactttcagtacatgataattggtctatgtacgatattattcctctattcggagatatccctggtacctaggggccaaaacatcgaatttagtcttgatgaccccagtatatcaaaacgttatgtacctaacgaactcgtgggcccactagaatgtttgattttgagtgttggactgagtaacatggtcgtcttctggacctgcatgtttgacaaggacttactgaagaagaatagagtaaagagactaagagagaggccggacggaatctcgaacgattttcacttcatgcatactagcattctatgtctgatgctgattataagcataaatgctgccctaacaggcgccttaaagttgattataggaaacttgaggcctgactttgttgatagatgtatacctgacctccaaaagatgagtgattcagattctttggtttttggcttggacatttgcaagcagactaacaaatggattctatacgaaggcttaaaaagcactccaagcggacattcaagtttcatagtcagtaccatgggctttacatatctttggcaaagggttttcaccacacgcaatacaagaagttgcatttggtgccctttattagctctagtagtaatggtttcaagggttatcgatcacagacatcattggtacgatgttgtctctggagctgttctagcatttttagtcatttattgttgctggaaatggacatttacaaacttggcgaaaagagacatacttccttcaccggttagtgtttagtaacacttacagagtcctatcaggaaagaataaaagccgatcaagcttcattctcaggtaacaactggagcactggcgagctttgctctattatataagataaaatatgcactaaaagtttgcatttctttacataactaaaactaagacattatgca

SEQ ID NO: 441 - DNA, 1458 bp, Saccharomyces cerevisiae
tccagtatttacgacaatatacaaacataatcatgtccaagagcaaaactttcttatttacctctgaatccgtcggtgaaggtcacccagacaagatttgtgaccaagtttctgatgctattttggacgcttgtttagaacaagatccattctccaaggttgcctgtgaaacagctgccaaaactggtatgattatggttttcggtgaaattaccaccaaagctagacttgactaccaacaaatagtaagagataccatcaagaagattggttatgacgattctgccaagggtttcgactacaagacatgtaatgttttagtagctatcgaacaacaatctccagatatcgctcaaggtctgcactatgaaaagagcttagaagacttaggtgctggtgaccaaggtataatgtttggttacgctacagacgaaactccagaagggttaccattgaccattcttttggctcacaaattgaacatggctatggcagatgctagaagagatggttctctcccatggttgagaccagacacaaagactcaagtcactgtcgaatacgaagacgacaatggtagatgggttccaaagaggatagataccgttgttatttctgctcaacatgctgatgaaatttccaccgctgacttgagaactcaacttcaaaaagatattgttgaaaaggtcataccaaaggatatgttagacgaaaataccaaatatttcatccaaccatccggtagattcgtcatcggtggtcctcaaggtgacgctggtttgaccggtagaaagattattgtcgacgcttacggtggtgcctcatccgtcggtggtggtgccttctccggtaaggactattccaaggtcgatcgttccgctgcttacgctgctagatgggttgccaagtctctagttgccgctggtttgtgtaagagagtccaagtccaattttcatatgctattggtattgctgaaccattgtctttacatgtggacacctatggtacagctacaaaatcagatgacgaaatcattgaaattattaagaagaacttcgacttgagaccaggtgtgttagtaaaggaattagatttggctagaccaatttacttaccaaccgcttcttatggtcacttcactaatcaagagtactcatgggaaaaaccaaagaaattggaattttaaacatttagacaataaatgttttattttgatttttataattatttcaatccctttctttatgctaggctggtcccgatcacctccctatattgagaagacgatgccttatcgtttgattcgctcaactcgagtcatgtaattactagaaaatgatacaatagaaaagttttaaacattcttaaacttgacaaacaccaatagaataacatctaggcataatgatctattttgtatggattatgtattagctccttcaacggaaatatataga

SEQ ID NO: 442 - DNA, 342 bp, Saccharomyces cerevisiae
aagtaaagatgggtaagggtactccttcattcggtaagcgtcacaacaaatctcacaccttgtgtaacagatgtggtcgtcgttctttccatgttcaaaagaagacctgttcctcttgtggttacccatccgctaagactagatctcacaactgggctgccaaggcaaagagaagacacactactggtaccggtagaatgagatatttgaagcatgtctccagaagatttaagaacggtttccaaaccggttctgctaaggctacttctgcttaaatttgatattatctataagttttgttctttcctaaaacgaaaataatataaattatatatagttaat

SEQ ID NO: 443 - DNA, 1226 bp, Saccharomyces cerevisiae
gcgcataacaaactataaagccattaaagattatggtcgtgacatttttgcaggacctggaagttttgcaagatgcattattaaataatttgcaaaaattaagtgcaatctcccgcagaaaagaaagcggagaaagcaagcatgataataaggacagttttgcagccattgccaacgaacacaatgatgaagaagaagagattgaatttgaggatttggtgaatattatagagagcaaagtttcagatttcgaatcggtactgaaatgtagtattgtggaaatgacctacaaataccccgaattaaaattacagtgggaaaaaagccctagatacgatcaatgcgataagttgcatattgtgaagcttgataaacaaatgaacgaggacatatatgctcagttggtcgaagaactggatttcgtgttgcaattcgtcgattggttctattgctaccgcctgaaagtcaaagagattctacgacaacaccacaaacgtgacttagcttggaacgacgagaaaagagaccgcgctataaaatttcacgctgtggattacgacaagcttcaccaaggaacgtcgtcatcgtcaagcttaacgtccacatcgatggaaaaagccagcactagagagaagcttttgagcaaaacaaaacaactgacgaataacttggtgagaggaaatcaaattttgcagtccggaattttacaaagtgacctgaatttggatgaattgagagcccaaaccaattccttaacacaaatcgatgacaagtacactcaattcgaaaccgtcttcaagaaaactgccgatttggtcaaagtactggaaaatgcctcccatcaagagaaacgagatgtctatttatcacttgggttcctcctatgctgcgtctcgtgggttctatggcgtcgtattttcaagttacctgttaaactcggcctctggctgctattcaagtttttcaagggtatactcgtcaccctaggtctagttaaaagctatgcaggctcctcgtcctctcttcaagcacccagtcttgtgctaaatgcacccattctagccactacaactacatcctcagcaacctctgtggaaccattcgcatctgtatcagccgtcagtagtatccagcgggctgtcgatgaggccgtggacaggatcgtctcacatgatgagctatgataattttaacatctatataacataataagcgcatatacttag

SEQ ID NO: 444 - DNA, 1916 bp, Saccharomyces cerevisiae
tgcgctattcagatttattggtcgtcctactgtatacatctctttcattttctttgtttctgcagtgggtgttaaaatgggaatacacataccatatctcacgtcaaagacatcgcaatcaaatgttggtgatgccgttggcaacgctgatagtgtagagttcaacagtgagcatgactcaccttcaaagagaggtaaaattacacttgagtcacatgaaatacagagggctcccgctagcgatgatgaagataggattcaaattaaacccgtgaacgacgaggatgacacgtcggtcatgatcacttttaaccaatctctttcgcccttcatcatcactctgacttttgtcgcatccatatccggtttcatgtttggttacgacactggttatatatccagtgcgctgatctcgatcggcacagatctggaccacaaggtacttacttatggggagaaggaaattgtcactgcggctacctctctgggagctttgattaccagtattttcgccggtactgcagctgacatatttggtaggaaacgttgtttaatgggttcgaatctgatgtttgtcattggcgcaatcttacaggtctccgcacacacattctggcaaatggctgttggtagactgatcatgggtttcggtgtcggtatcggctccttgatcgcgccacttttcatcagtgaaattgctcccaaaatgatcagagggagactaactgtcatcaattccttatggttgactggtggtcaattagtcgcttacggttgcggtgctgggttaaactacgtcaacaatggttggagaattcttgttggattgtcactaattcccactgctgtgcaattcacatgcctgtgctttttacctgacactccaagatactacgttatgaagggcgacttggcaagggctactgaggtgttgaagagaagttacactgacacttcggaggaaatcattgaacgtaaggtggaagaacttgttactttgaatcaatctattcctggtaagaatgtccctgaaaaagtctggaataccatcaaagaattgcacacagtaccatctaatctaagggctttgatcattggttgtggtttacaagcaattcaacagtttaccggttggaattcgttgatgtatttctctggtaccatcttcgaaactgtcggtttcaaaaattcttccgctgtttcaatcatcgtgtccggtaccaattttattttcactttagttgcctttttttccattgacaaaataggccgtagaaccatattattgattggattaccaggcatgaccatggctttagtcgtgtgctctattgctttccattttctaggtattaagtttgatggcgctgtcgctgtggtggtttcctccggtttctcctcttggggtattgtgatcatcgtatttattatcgtatttgctgcgttctacgctcttggtatcggtactgttccatggcaacaatcggaactattcccccaaaacgtgagaggtattgggacttcatatgcaactgctacaaactgggctggttcactggttattgcatccacatttttgaccatgttacagaatatcactcctgcaggtacatttgcctttttcgcgggattgtcgtgcttatcaaccattttctgctacttctgttatccagaattatcgggattggagttagaagaggtacaaactattttgaaggacgggttcaacatcaaagcctcgaaagctttggccaagaagagaaaacagcaagttgccagagttcatgaattgaaatatgaaccaactcaagagattatagaggatatatagtcctttcacgaggtaaaaggaaggagacgcaattgaatattcaaatacatagtagaaaataaataaaaataaattacaagataga

SEQ ID NO: 445 - DNA, 2057 bp, Saccharomyces cerevisiae
gaaataaagcacaatcaggaataacaaattaactgacaatggcacctttaaccaagaagacaaacggaaaacgttctgctaaagaagttagtcattcagaaaagaaattagccaaaaaacctagaatttctattgattcgtctgatgaagaatcagaactatccaaaaaggaagatgctgtatcctcttcatcagatgatgatgatttggatgatttaagtaccagtgactctgaagcagaagaagaagctgacgaattagatatttccgatgacagtgaggaacatgaaaatgagaatgaagagaaagaaggaaaggacaaatctgaaggaggtgaaaatggaaatcacactgaacaaagaaaactgctaaaagaaaggaaaatgcaaagaaaatctggtacccaagtgcaacaaattaaatccgtctgggaaagattgcgtgtgaagaccccacctttaccaaaacagattcgtgaaaaactttccaacgaaatctgggagctatctaaggactgtatcagtgatcttgtcttaaagcatgatgcttcccgtattgttcaaactttagtcaagtattcgtccaaagatcgtcgtgaacaaattgtcgatgctttaaagggaaaattttatgttctagccacatctgcgtacggtaagtatctattggttaagttactgcattatggttcaagaagttcaaggcaaactataataaatgaattacacggttctttgagaaaattaatgagacatcgtgagggtgcctacgttgttgaagatttatttgttctttatgccacacatgaacaaagacaacaaatgattaaagagttttggggctctgaatatgctgtatttagagaaacccacaaagatttgaccattgagaaagtttgtgaaagtagcattgaaaaaaggaatattatcgccagaaacttgattggtaccattaccgcatcagtagaaaagggttccaccggctttcaaattctacatgctgctatgagagaatatgtgaaaatagccaacgaaaaggaaatatctgaaatgatcgaattgcttcatgaacaattcgctgaattggtgcatactccagaaggttcagacgttgcttgtactttggttgctagagctaacgccaaggaaagaaagttaattttaaaggctttgaaaaaccacgccgaaaaattgatcaaaaatgagtacggtaatattgtcttcattacaattctgaactgtgttgacgatacagttttagtattcaagactttcagtcctactgttaaggaacatttgcaagaattcataattgataagtttggtagaaggccttggttatacatactattaggtttggacggtaagtatttctcacctatcgtcaagaatgaattattgagatacattgaactgtccaaagccacctctaagaaggatcctttacaaagaaggcacgaacttttgtcaaaattcgcccccatgtttttaagcactatatcaaaagattattccagtatattgacagagaatctaggctgtcagttcattgccgaagttctaataaacgatgagttgtacgcgcagctgaatgaaaaagaccaagaaaagtatcaacaggtcttaaacaacattttaactacttttaagggtgacataaccgaagaagagcacccaatacatagagcattttctactagactattaaaggcactaattcaaggtggtaaatggaataacaaagaaaaaaaggtcataccattaaaaaatgttcaaggcttaggcgttccatttgctgaaaagttatacgatgaaattattgactcctccaacttgttagaatggattaataacgctgatagttcatttacaattgttgcactgtatgaaacgttaaaagatcaaaaagaagggaaaccatttttgaaggatttgagaggagttcagagtaaaatcaccactgatgaaagtaacaaaggctctcagcttttggctaaattgttaaaataaattttctacgataaagtcacaatatttggtatataagcatctgtacaa

SEQ ID NO: 446 - DNA, 764 bp, Saccharomyces cerevisiae
acaaaaagcagaaggctaaaaaaaaggaaaggaaaagaagaaaaggcaacgtcgaaaatgtttacaccaattgatcaagctatagaacacttcaagcagaataagtttgtaattgttatggacgatgccggtcgtgaaaatgaaggtgatcttatttgcgctgctgaaaatgtcagcactgaacaaatggcctttcttgtacgccattcctcaggctacgtctgtgcacctatgacgaatgccattgctgataagttggaccttccactactgagaacaggcatgaagtttgaatccaatgatgacgacaggcatggaactgcatacacaataactgtagatgtagcccaaggcactaccacaggtatttctgctcacgacaggtcgatgacttgtagggctcttgcagactcttcctctacgccaaaatcatttttaaaaccagggcacatctgtcccttgagagccgctgatggcggtgttttgcagagaagaggccacactgaggccggtgtcgatttgtgtaaactaagtggactaagtcccgtcgctgttattggcgaattggttaacgatgacgaacaaggaactatgatgagattaaatgactgccaagcgtttggtaagaaacatggcattcctttgatctccatcgaagaattggcccaatatttgaagaaataatctggtgaacattttctccattcattctatcacaacagactcacacatatatacatgtatatatttgtaactttgtatat

SEQ ID NO: 447 - DNA, 842 bp, Saccharomyces cerevisiae
acacagttataaactcttcaaggcaattatgaacaggattttcggatatgggaacaaaaagagccatgatcagctcttacaagagtcgaatcagtccatgaatcaggcccaacaatcactatcgaacagaatatcccagttagatactcaaatcgcccagttaaacttccagctgcaaaatattcaaaagaatttgcaaagatcaaacaacaagcaaccctcgttaagaaaacaggctttgaagattttaaataaacgtaaacagttagaaaatatgaaggattctttagattctcaatcctggtccatgacgcaagcccagttaacaaatgataacttacagaacacaatgatcactataaacgcactaaagcaaacaaacaatgccatgaaggctcaatacggcaagataaatatcgacaaactacaggacatgcaggatgagatgctggatttaatagaacaaggggatgagctgcaagaagtcttggcaatgaataataacagtggcgagctcgacgacattagtgatgcagagctggatgcagagctggatgctctggcacaagaggatttcactttgccaaccagcgaaaactcattaggtaacgatatgcccagttacttactaggtgcgaatgcgccaccggcttttattgatgaagagccaaacttagatactgaagacaaaaataaagctttagaaagcgctcagtgaaaacaaaaagcacacaaagttgcatattcagaatttttctctcctttcccttttctttatattctctttgctggtaagccaaaatatgtaccttatttaggttttagtagttttcttttttctt

SEQ ID NO: 448 - DNA, 688 bp, Saccharomyces cerevisiae
taagacctcaagaatggcactataagtgtggtattataatctgtgtaatcctaatttgagctctacacaataccattcgacggttaacagctactgcatcaccgtccagtcatgtcgtacaacggaatagggctcaagtcggcaaaagggtcatctacgtcgggccacgtgcagcgatcacttgctagcaacaataggcgcagaccacagggtagtcaacagcagcggcaacaacgacaaaatgcgatcaaaaaggccagccatgacaaggcaagcaggcctcttgctgtgcagaaacagatagagactcatatggagaaacgtgagattgaagtacaagttagcgagctacgggaccgactggaggaggaagaaacgctctcggaagagcagattgacaagaaatgtgaagcgttgagggcaaaactgacgaacgagtggcaagaacagcagcggatgtcctctttgtacacccctcgtaaggcgcgtctaacggaagagcagcatcgacatgaatagcagcattgacgatagcgataagcttcgcgcgtagaggaaaagtaaagggattttagtatataaagaaagaagtgtatctaaacgtttatattttttcgtgctccacattttgccagcaagtggctacataaacatttacatatcagcatacgggacattatttgaacgc

SEQ ID NO: 449 - DNA, 1787 bp, Saccharomyces cerevisiae
atgatgactcacacattaccaagcgaacagacacgtcttgttcctggatctgactcgagctctcgtcctaaaaagagacggatctcgaagagatcaaagataatagtatccactgtggtctgtattggtttgttgctggttttagtgcaactggcatttccaagcagttttgcattacgttctgcatcacacaagaagaagaatgtcatattcttcgtgacggatgggatgggacctgcgtctttgtccatggcaagatcattcaaccagcatgttaatgatttacctatagacgacatcctgacacttgacgagcattttatcgggtcttcgagaacaaggtcctcggactcactagtcactgactcagctgcgggcgccaccgcatttgcatgtgcattaaagagctataatggggccatcggtgttgatccgcatcacagaccttgtggtacagtgctcgaggcggctaagttagcaggttatctcactgggcttgttgttacgacaagaatcacagatgccactccggcttcattcagttcacatgttgattacagatggcaggaagatcttatcgctacgcaccagttaggcgaatatcctctggggagagtagtagacttactcatgggtggcggcaggagccatttctaccctcaaggcgaaaaggcttctccatatggtcaccacggtgctagaaaagatggaagagatttaatcgatgaggctcaatctaatggctggcagtacgtgggtgaccgtaaaaattttgattctttgttgaaaagccacggtgaaaacgttactttacctttcttgggtctctttgcagataacgacattccttttgaaattgacagagatgaaaaggagtatccttcccttaaggaacaagtcaaggtggctttgggtgccttggaaaaagcttccaatgaggacaaagattctaatgggtttttcttaatggtggaaggctccagaattgatcatgctggtcaccaaaacgatccagcttcgcaggtaagggaggtgttggctttcgatgaagcattccaatacgttttggagtttgctgaaaattccgatacggagactgttttggtctctacgtcggatcatgaaacgggtggtttagtcacttcaagacaagtcactgctagctatcctcagtatgtctggtatccacaggtgctcgccaacgccacccattcaggtgagtttttgaaaagaaaactagtagattttgttcatgagcataagggcgcaagcagcaaaatagaaaatttcatcaaacatgagatcctggaaaaagatttgggtatttacgattacacggatagcgatttagaaacattaattcatttggatgacaacgcaaatgctatccaagacaaactgaatgacatggtatcatttagggcccaaattggctggaccacgcatggtcacagcgcagtcgacgtcaacatatatgcatacgccaataagaaagctacatggtcatatgtcttgaacaatttacaaggcaatcacgaaaatacggaagttggccagttcttagaaaactttttagaattgaacctgaacgaagtcactgatttgattagggacaccaaacacacatcagattttgatgctacagaaatagctagtgaagtacaacattatgacgaatactaccatgagttgaccaactgatcctatctaactctccctcttttttcacatattatttaatacgttataatttatttgaatatatatatatatatatatatgtatat

SEQ ID NO: 450 - DNA, 864 bp, Saccharomyces cerevisiae
acacaagtatgtgggattcgttaattgtaagcatcaacgatacgcacaagttggggctggaggattgtctcgccgtttttggccacgttcccattaccaaggccgtcaagcatgtcagactgacagagatcgacacgcagacgtccacgtttacgctcaagttccttcacacagaaacgggtcagaacatcgagaagattatctacttcattgacaatgacacgggcaacgatacccgcactgctaccggaatcaagcaaatcttcaacaagatgttccgcatcgctgcggagaagaggaagctgtcgctcatccagatcgacactgttgagtacccctgcactctagtagacttgttgatcctggtaggcgtggcgctaccgccattgtgctacctctatcgtcctgcactgcacgctatctttttcctggtccctaatcctgtgggctccaccttagaggcgtggctggatagtgatcttgtgctgcgactcatcattgttgccgagttcctgactcacgccctcgagacgctcattttcgtcgtccctaggctcaagtactaccgtgttcctggcgagttcgtgcccgagtggcttcttctaggtctcctcgaaggttacggtcctgcgagacgtctagatactaaggctcgcactcttggcgaagggtcagttaattagtccgaggccttttttcattttgtctccctatccgactggaaaagttctagcgaaaagtgcagcagacgctgcagcaacaggaacaatttccgaatgacccacctgcggtggtgtggcacacgcattctgcatgtctcaataacctctagaattatctatatactttttagtaaacacaact

SEQ ID NO: 451 - DNA, 1420 bp, Saccharomyces cerevisiae
gcaacggctaggtgtttacaccaaggacttttaatatattcaagtatgtcagaattacatgctttgcttactttcccagagaggcccatttctcaaagttactatgtaccaaaactgcagcatttcttaaaatctggtataccggctacatatactttggagcaggtcgcagccttcgagcatgaggaaaagaacaggaacggggataaggaattcagagagagcactgacgacaataaaacctcaaacacaacgccgttacacgttttagcaagatcgctacccttggatatcaaggatgaggaactgcaagtggtgatggatatgatgaatattctttttgagtatggggctggatggaattttattgactacgaggacaaaacagtgggtgatttgtttttagagagaaatcaaagtagggagagccctctttatagacggctcgtggaagctggtgtgtctgctgaattattactgagaaaactcaatggtggcgacgtcgaattcttggatacagatgaactaataggtatcgagcctgaggaaagcgttcaaacagcagttgatggtcaaaaagaagaatcagttggtagtgatgacgatgctaccgcggcaaatcaacaagtgtacttaaaaacagaactagagtacaaagacgatgcgcttatcacaaaggaaaataaggacggtgttatgatggattgggaaaccaagattatggaacttgcttccgaaaccttatttcctgatccagaggccactaattctgctacgatcttaaacattggatttggaatggggatcatcgatacattcatccaagctcgaaaaccatatcgtcactatatttgcgaagctcatccagatgttttggccaagatgaaaatggatggttggtatgaaaaggataatgtggttattttagagggaagatggcaagatacgttgaataatttattagacaaaggtgaagttttctttgatggtatttattatgatacatttagcgagcactaccaagacatattggacttatacgatgtcgtggtaggtttaattaaaccagaaggcgttttctcatttttcaacggattaggcgctgacagatcgttgtgttacgatgtatataaagaaattgttgagatcgatgttgctacatatggtatgaaatgcgattacaccagatattctcttgacgagcaattgccagattggaatgatgttaagcggtcttactttaactgtaactattattaccatccacgtatcacgtttgcttaattatagaataatgtaaattgcacaatggcaggggccgatttccaatactaatattagtttcgaaaatcggaagaaaaaactatatacatttgctactttaagtatatatgattatgcagaaatggacatatgaact

SEQ ID NO: 452 - DNA, 405 bp, Saccharomyces cerevisiae
ataaacaaaaacagattatgatggatagcggaaagagtgatataaataagcatgcatacaaggagacagcgaccccgctgcccgtagatccgccctcttacgaagaaacaatgaagcaagataaggaggaggtcgaagccgatgaaacgacatcttccgcacacagagacagctttatgaggcctgtttacactcaccatccgcatccaagatcccacaagggatatccgggtgcgaagacccttacatatacttcacggtaggtggtaagcggtatatgtacatatacatatatatatatatatatatatatatgagcgtgtgcatggatgtacaacgataacaaaagcaggtacagggtatcaaaatattttatataatatagttacttaggatatttattat

SEQ ID NO: 453 - DNA, 1372 bp, Saccharomyces cerevisiae
gcccgttgtaatattttcagaacctagctaaggtcctttcatcgcgacacggcagaaattaaaccgttgtatatgaatggctctatcatggaatattcgaatcaggcgcaggtcatggtttagattcatcttaccgattatcgtgctcggtttactgtgctacggtacgtgggcttactgccataaactatgttacgagcaagtcgacaaacgacttcgtcagaaatcagtttcggttggtcttatttgtgcggtatgcttcctagacgtagtcgtgattttcatatggcttcaaatagttatcttggtcggtccaggtacccaaccgcacgtagcaccttttttgatccttcctatagcctctgaagagaagactagcaacacttctcaaaacacttcagtggaatacgatgctgtggttccgcctaagtgttatcagtctgatcctcacggatacccaatatggtgcagtgaatgtcaaagtctgaaaatggaacgaacgcatcattcttcagaactaggccactgcattcctcgctttgatcattactgcatgtggatagggactgttattggtagagacaattatagactctttgtgcagtttgctgcttatttttcaacacttttacttatcatgtgggtgtctatttgcgtttacataagaattattactcaacacaatcataattatagccccaatttaaacgcaaatataatttcaacgttagtgtttgccatccttggatggttattaaccgcaagtttgttggcatcgagtattttttacatgagtcaaaacaagacgtctttggaggctatcatagatagcaaaaggaaaaaatttggaacaaggaagatattttgttattactcggaagcaaacaagttgaggtttgtggtagagttcgatagatctgaatttcactctttctgggacaaaaagtcaatcttagctaatataaaagactttatgggttctaacatacttatgtggataattcctttaggcaagccctatacatctcgatgcaaatctgatggcaaaagcggttcaaaaacaacgctagtggaaatattgggtccctatgaagaaactcttagtgactacaccattcaggccattgaggacaagatatcaagaggagaatatctggccacattgcgggcttctggtgacgatagtgatcctgcttactaaatagtattaaatttttcaagcaatttatattctgggacgaaactcatgttacaatcggtatatgtttctattatctattcattttaatatattctgtatgcgtaggggaagggatagtatatacattttcttgatcgtccttccataaatagtaagagataagtttgaaaa

SEQ ID NO: 454 - DNA, 680 bp, Saccharomyces cerevisiae
cagtttacttcggataaagattagtaaacctttgcgttatgtcccgtcctatcgtaatttctggcccaagtggtacaggtaaatctacactgttgaagaaattgttcgctgaatacccagattctttcgggtttagtgtttcatccactactagaaccccaagagctggcgaagtaaacggtaaggactataactttgtctccgtagatgaattcaaatctatgattaagaacaatgaattcattgaatgggcgcaattctccggtaactactatggtagtactgtcgcttccgtcaaacaagtcagtaaatctggtaagacttgtattttagatattgatatgcagggtgtcaaatctgtcaaggctatcccagagttaaatgccaggtttttgtttattgctccaccatcggtcgaggatttgaaaaaaagattagaaggtagaggtacggagaccgaagaatccatcaacaagaggttaagcgccgctcaagctgaattggcatatgctgagacaggtgcccatgacaaagttattgtcaatgatgatttggacaaggcctacaaggaattgaaggattttatctttgcagaaaaatgatgtagccctatatagacattactaagtatgtacctggtaggagagtgctgtcgcaaagcgacaaaacgtccaattatt

SEQ ID NO: 455 - DNA, 1305 bp, Saccharomyces cerevisiae
ataattcgtattatcttcttctttaccctcgccagccagtgtaactagcatttgtagggaaataacaataacacaaaatatcgtatatatataacatggaaagcagaaataccgtgcttccttctttaccaaacattattacaggtacttctaattcgcctttccaactgcatactttgccaaatacaaacttccctagtgatgaccaaggtgacatcaggttgccaccattagctgcatctgcgcacattgtgagaccagtggtaaatatttataaaagtccttgcgatgaggaaaggccaaaaaggaaaagtccacaggctgtggatttcttatcacaacgtgtaaccacttccatgacgcctttatccaagcccaagaagctgagctctcattcaccattcacgccaacggtcagagtctgttctaaagagcagccacctcagagtatgcactcttataaaaaagttaatattcttactcctctatctgctgcaaaggctgttctcacaccaaccacaagaaaagaaaagaaaaggtcatttgcctttattacacactcacaggaaacttttccaaagaaggagcctaagatagacaatgctcggttagctcgtcggaaaagaagaagaacttcatcatatgagcttgggatattgcaaacagcatttgacgaatgtcccacgcccaataaggctaaaaggatagagttatccgagcaatgtaatatgtccgaaaaatcggttcaaatatggtttcagaacaaaaggcaggctgctaaaaagcacaagaacagtggcaacaccagccattgcaaagttcactctaatgattcgatgtctatgatatcttactcagacgctgcgttggaaattacctctacgccaacgagtacgaaggaggctattactgcagagttgctgaaaacttcacctgccaatacgtcctcgatcttcgaagaccaccacataacgccttgcaagcccggcggacagctcaagttccacaggaaatctgtgcttgttaagagaacattatcaaataccggtcatagcgagattatcaaaagtcctaaaggcaaggaaaaccgcctaaagttcaatgcatacgaaagaaaaccccttggggaggtcgatctcaattctttcaaaaactaatctttctcagtgtttattttcttgagcactgatgctatcaatattaacaaaaactacacaaagtaatgactgagactacaccaacgtttttttttagatttaaagcggcctgtttcataaatctatatagagatgtaatattatattc

SEQ ID NO: 456 - DNA, 526 bp, Saccharomyces cerevisiae
agaaaaaagcagataaaaatgggtagagttagaaccaagaccgtcaaacgtgcctccaaggctttgattgaacgttactatccaaagttgaccttggatttccaaactaacaagagactttgtgatgaaattgcaactatccaatccaagagattgagaaacaagattgctggttacactactcatttgatgaaaagaatccaaaagggtccagttagaggtatttctttcaaattgcaagaagaagaaagagaaagaaaggatcaatacgtcccagaagtctctgctttggacttgtctcgttctaacggtgttttgaacgttgacaaccaaacctctgacttggttaaatctttgggtttgaagttgccattatctgtcatcaacgtttccgctcaaagagacagacgttacagaaagagaaactaaaaagcatgaattgatatagttattatcatgtcgtctgttttactccatttcattgaggactctccttatgtatagttaaataatttcaatatcatct

SEQ ID NO: 457 - DNA, 861 bp, Saccharomyces cerevisiae
cttgattagcaagtagttcttacatcgcaggaatcttatgttgcatagctcaatttacaaaaataacaaggataaatatatatatatacgcatatactttttgggtgttaaagtaaattttgcacccgttcataccaatcgttcagataattttcgctccttaaaaaaagagagtgcgtgtgtatatgcctgttcattgcctgtccgcctctcattatgtctatttctgaatcttacgcaaaggaaataaaaactgcatttaggcagttcactgactttcccatagagggtgagcaatttgaggattttttacctattattggcaaccccacgctattccaaaagttggtacacacgttcaagacgcatttagaagaaaagttcggcaaagaaaagatcgactttattgcaggtatagaagctagaggccttctatttgggccatccctagcactggcattgggagttggatttgttccaataaggagagttggaaaattgccgggtgagtgtgcttctataacattcacaaaattagaccatgaagaaatttttgaaatgcaggttgaagccattccctttgattccaacgtggttgtcgtggatgatgttctcgccaccggtggaacggcatatgctgcgggcgaccttatcagacaagtgggtgctcatattctggaatatgactttgtgctagtgttagatagtctacatggtgaggagaaattatctgctcctattttttccatattgcactcctgatttaaatttgttctctgcctcctccttcaattattttcctttccttcgcatattgctactttttagcttgaacttcttttgttaatataaactggtact

SEQ ID NO: 458 - DNA, 1153 bp, Saccharomyces cerevisiae
atgataaagagtacaaacaagtcgccatggagagaatcatacagcagactgactatgatgcgttgtcgtgcaaattagctgctatatcagtcggatatcttccttcaagcggcctgcaaagattgtcggtggacctatccaaaaagtatacagaatggcatcgcagctacttgattactctcaagaaatttagtaggcgagcttttggaaaagtagacaaagcaatgcggtcttccttcccggtaatgaactatgggacatacttgcgtactgtggggatagacgcggccatattggaatttttggttgcaaatgagaaggttcaagtggtaaatttaggttgcggttccgatttacgaatgctgcccctgttacaaatgttccctcatttagcttatgtggacattgactacaacgaatcagtagaattgaagaatagtattttgcgtgaaagtgagattttgcgtatctccctcggtttgtcaaaggaagatacagcaaaatcaccctttttgattgatcaaggaagatataaacttgctgcttgtgatttgaacgatatcactgaaacaacccgtttgttagacgtatgcactaagcgcgaaatacccactatcgtaatatctgagtgtcttttgtgctacatgcataataatgagtctcaattactaataaatacaatcatgtcgaagttttcacatggactatggatatcctacgatccaattggtggttctcaaccgaatgaccgatttggcgccattatgcagtccaacttgaaagaatcaaggaatttggaaatgcccacgttgatgacgtataattctaaagagaaatacgcttcgagatggtctgcggctcccaacgttattgtcaatgacatgtgggaaattttcaatgcacagattcccgaatctgaaagaaaaaggctcagatcattacagttcttggacgaattagaggaattaaaggttatgcaaactcattatatccttatgaaggctcagtggtgatttttatttacagcctcaactaatttgatcttaatatgcttaccgtttatatggtactcttacatatacataatatatagatatacctgtacttacactacatgcattcaaaatattggtaattgtagtttagttatcaa

SEQ ID NO: 459 - DNA, 921 bp, Saccharomyces cerevisiae
caaagaccaccaggaataatgagtgaagttgcaccagaggagatcatagagaatgcagatggatctagatctatcattacatacaagattgaagacggtgtcaagtataagattactcagaaagtaaaagaggttaaagtattggaaaaagtccataaatctgttgcagaaagaaaaaactggcataaatatggctctgaaaaagggtctccagcaggtccaagtgctgttacagcaagattgggtgaagaagtagaattaagattgagtaggaactggaaacaagctgaagaagaaagaatacaaaaagaaaaggcaagtctcacaaagaccggtctacaatgtagattatgtggtaacgaccatatgaccatgaactgtccattcaagacaattttaagtgaactttcagcattagaagacccagccactaatgaaggcggtgtcgaggccgccagtgaagagaaggcaggccaagttggcggagctggttccatcccagggcagtatgttccaccttctcgtcgtgctggtgcaagagatccttcatccgatgcttacagagactctagagaacgtgatgatatgtgtactttgaagattatgcaagttaatgaaaatgccgatgaaaatagtttgagagaagagttattgttcccattcgcacccattccaagagtttctgtcgttagaaacaaagaaacaggtaaatcaagaggtctcgcctttgttaccttttcgagcgaagaagttgccgaacaagctttacgtttcttggatggtaggggttatatgaatttaattttacgtgttgaatggtccaaacctaaggttaaggaatagatgcacagaatatgctctgcacttgttttctaatgttactcttctcatataaaaattgtagatattaagaaagaaagt

SEQ ID NO: 460 - DNA, 332 bp, Saccharomyces cerevisiae
gcaaattaaaaccaaaatgagcgatgaaaataagagtacgcctattgttaaggcgtctgacataaccgacaagctgaaagaggatattttaaccatcagtaaagatgctctggacaagtaccagttggaaagagacattgctgggacggtaaagaagcaattggatgtcaaatacggcaatacctggcatgtgattgtcggaaagaactttgggagctacgtgacacacgaaaagggccattttgtttatttctatatcggtccactggcgtttttagttttcaaaacagcataaatagtgtttcttcaatagttaatcgataatcaattac

SEQ ID NO: 461 - DNA, 2626 bp, Saccharomyces cerevisiae
attgtctctgatggaatactattgacaattaacaatggtagatatatccgatacaagtggatacctacataaacaaggtgtcttacctagtgtttctttcatttgcacttctttttttgcgtgtggactgacatcttggaaagttgaactgtcatattatatagttgttgcagccgccatgggaaacagtccttctactcaggatccatcgcattcaaccaaaaaggagcatggacatcattttcatgatgcattcaataaagatcgtcagggaagcataacctctcaactgtttaacaataggaagagtactcataagagacgcgccagtcatactagcgaacataatggtgccattccccctagaatgcaattacttgcatctcacgatccatcgacagattgtgatgggcgcatgagcagtgatactactatcgataagggcccgtcccatctattcaaaaaggattattctttgtcctctgccgcagacgtaaatgacactacgttggccaatttgactttaagtgatgatcacgatgtgggtgcacccgaagagcaggtgaaatctccgtcgtttttgagcccaggtccatcaatggccactgtcaaacgaactaaaagtgatctggatgatctgtctactttgaattacaccatggttgacgaaacaacagaaaatgaaagaaacgacaaaccacaccatgaaaggcatcgctcaagcatcatagctttgaaaaaaaatcttttagaaagttcagctactgcttccccttctccaacgaggtcttcatcggtgcattcagcatcacttcccgccttgaccaagacggattccattgatattcctgtaagacaaccctattcaaagaaaccatctatccatgcataccaatatcaatatctcaataacgacgaaacattttctgagaactctcaaatggataaagagggaaacagtgatagtgtagatgcagaagcaggcgtacttcaaagtgaagatatggttttgaaccagtctcttttacaaaatgctttaaaaaaggatatgcaacgtctttcaagggtgaattcctctaattcaatgtatactgcagaaaggataagccacgctaataacaatggaaatattgaaaataacacccgtaacaagggaaacgcgggaggctccaacgacgattttaccgcacctatatctgctactgcaaaaatgatgatgaaactgtacggtgataagaccttgatggaaagagatttaaataagcaccataataagacaaagaaagcccagaataaaaaaataaggtcggtttcaaattcgagaagatcctcatttgcttctttgcattctttacaatcaagaaagagtatcttaacaaacggtttgaatttgcagcctttgcatccactacatccaattattaacgacaatgaaagtcaatactctgcaccgcagcatagagaaatatcgcatcactctaattccatgtcgagtatgtcttcaatatcatcaacaaactccaccgaaaatactttagttgttctaaaatggaaagacgatggtaccgtggctgcaaccacggaagtctttatagtaagcacggatattgcttctgctcttaaagagcaaagagagcttaccttggatgagaatgcaagtttagactcagaaaaacagttaaatcctaggatccgcatggtttatgatgatgtgcataaggaatggtttgttccagatctttttttgcctgcaggaatttatagactgcaattctccatcaatggtatattgactcactcaaattttcttcctacagctacggattcagaaggcaattttgtcaactggtttgaagtattgcccggttatcatacgatcgagccatttagaaacgaagcagacatcgactcgcaagtagagccaacactggatgaagaattgcccaagagaccggaacttaaaagatttccttcttcctctcgaaaatcttcctactattctgctaagggtgttgaaaggccaagtacaccgttttcagattatagaggcttaagtaggtccagttcaataaatatgcgtgactcatttgtacgtctgaaggctagcagtttggatttgatggccgaggtcaagcctgagaggttggtgtattcgaacgaaataccaaatttatttaatataggtgacggctctacgatttctgtaaaaggagattctgatgacgtgcatccccaagaacctcccagctttacacatagagttgttgactgtaatcaagatgatttatttgctactttacagcaaggcggtaatattgatgcagaaacagcagaggcggtttttctaagtagatacccagttcctgacttgcccatatacctgaattcatcctatctgaacagaatactaaaccaaagcaatcagaattcagaatcacatgagagggatgaaggtgcgataaatcatattataccccacgtgaatttgaaccatttactgacaagcagtattagagatgaaataatcagcgtagcttgcactactagatatgaggggaaatttatcactcaagtagtttatgcaccttgttattataaaacacaaaagtctcagatcagtaattag

SEQ ID NO: 462 - DNA, 1309 bp, Saccharomyces cerevisiae
ttattcgaaaaagtaagtaacataatcaaccgctgattagcacaatatgaggatacagtcgctttttgttttatttaatgttgccatcatcgcatggtcatatccatatgagcctttaagggttttacaagtaggagagaatgaggtaatggaggttcccgaatcagaaaagctaaacttacgaagaagaggtgtcaaattctttgatgtgaccaaacacacttctttcttacctttctttaacaaggaggaagagccaacagtaccaacgtataactatcctcctgagatatcgaacaaagaagtagtggatgattcgattaagaatatagacaagggctctatgcacaagaacttggcaaagtttacaagtttttacacccgttactacaagtccgatcacggctttgaatctgccgagtggttagctgcaactatcgctaatattacaaaagatattccgcaagatacgttgactattgaacattttgatcacaaagaatggaagcaatattcaattatagtccgtgtcacgggatctactacgccagaagatattataataattggttctcatcaagattctatcaatctgctactgccatccataatggcagctccaggtgcggacgacaatgggtcaggcacggtgactaatatggaggctctcagattatatacggaaaattttttgaagagaggatttagacctaacaacactgtggaatttcacttttattccgccgaagaggggggattgttgggttctcttgatgtttttacagcttatgccaaacagaaaaagcatgtgagagcgatgcttcagcaagacatgacgggatatgtttctgatccagaagatgaacatgtggggattgtcaccgactacactactcccgcattaactgattttataaaactaattatcaactcttatctatccattccttacagggatacacaatgtggctatgcttgtagcgatcatgggagtgccaccagaaacggatttccaggctccttcgtgattgaaagtgagttcaaaaagactaacaagtatattcacagcaccatggatactttggacagattaagtctcgctcatatggcggaacacacaaaaattgtattaggggtaatcattgaactcgggtcatggtccgcttggtaaaagtcagtaatatgcatacataactaatgatgccttaccttggtgttcttttgtaatatacctaaaccgatatcacgctagtatttatttcccgaatttttttggcgtatttcgtcatctgaaaataacataatcaat

SEQ ID NO: 463 - DNA, 1388 bp, Saccharomyces cerevisiae
gatttagtcgcaatattgatggcaaacagtaccaaaaactggttacccatataaattgtttggcattgttattattgttataaattattattgttattattataaattattattagtattatacaaagttttcaattctgcaacaagttgggccgcaaaatatggagaaaagcgaaagtaattctgaaggactttatctccaaaatatattaaatgttccccctccgcagcgatttattgtgctcataatacttgccctttggatctggacatggatattaaaattcttcttgcatagtaatttagacgtatcccaagtcatactcacgagagtaccgcacgatatacgtccaggttatactctacagcaattgcatagaacagctagaaattttgctttgaagataacaaggattattataccgttccactttgccactgtgttcctttttgagttcatgaatattatagaaggtccactcaaaaatatcattctcatcgtatattttctaccattgatccaatgtgtcactatattttggtttctgttgaaagagtgccagataataaaatattgtactaggagatgtttgttgatagaatcctccccccgttccttaaggaatacctacattttaatctctgacacgttgacatcgtttggaaaaccattgatagacttcacattgtttacctctctaatttttagagaacccttcacacattttgatctatccgtagcccttcttcctgtactggtaagactactgcagtgtttgagagaataccgtttactgcacgaagcaactttactattcaatgcattgaaatacagttgtaatcttcccattcttttttgcacctggagatcaagagtgtatgagggatccatcaacgaagaaagactacaccacgttcaaagatggtttatgctaattaattcttcctatacgttattttgggatgtaaggatggattggtcattggactcgttaacctctttaagatccagatccaaaagtgccgtcacattaaagaaaaaaatgtatcattcggcgattctcgttgactttttgctgaggttctggtggctatgggtatatttatcgcagaatctgaaattagttgccgcagatagcgactacatttttttccaaggcgaaatgcagtatttcgaagtaattagaagaggcatatgggtcgttttcaaattggacgcagagtattatattaagtttgcaagcaaataatttgttgggcaagccatataaaatcatgcaaatgctgtaaatatttgttctattttccccgtagaatggtttattcgatatattacatataataaacgaaaaatacatatgcacagtatatacttttccaaaaaaaaa

SEQ ID NO: 464 - DNA, 1115 bp, Saccharomyces cerevisiae
cagtgaattccgcatttccaagtcaaatcaaaaactattttcgaggaaataatggcaggcccaaggaatgtgcgtacattacatggaaatggaggccgtaataatgatgtgatgggcccaaaagaattctggttaaatatccccccaataacaagaactttatttactctagcgatcgttatgacgatcgtcggccggttgaatctaatcaatccgtggtactttatttatgtttggaatttgacgttcaagaaggttcagatatggagacttcttacttcttgtgtaatgctttcgtctcgtgccatgcctgcgctaatggaactatatagtatttatgacaggtcctcacagttggagcgagggcattttggtcccggtttgtccaatagacgaggaccgatggtaacagtagactatgcctactacctgtgcttttgtatactagccatcactacggccactacaatcatttatgggtcctactaccctgttgtgctcacctctgggttcatatcatgcattacatatacttggtcgatcgacaatgccaacgtgcagatcatgttttatggtttgattcctgtttgggggaagtacttccccttaattcaattgtttatctctttcgtttttaatgagggtgatttcgtaatctcattgatcggttttactacagggtacctttatacatgcttagatacccatacactggggccaatatgggggatgatatccagaaaagctgatccaacctacggaatctcgcccaatgggaaattctcaacgccatggtggtttactagtctatatgctcgcataacgggtgcccacaatgaaactgcaacattcaacaacaactttgccaatgtgccatcttcgcaaagagaaacgagaacttttagtggaagaggtcaacgattgggtacggcccctgcaacattgtctcaaaccagtggcacagattcaggcagagcttctggaagtcaattaagaagtggcccatcgaatttgaaccaatttcaaggccgcggccaacgagtaggacaaacaaacagcccctccgactcacaataacaacttttatctatttctatgtactttgccattcatta

SEQ ID NO: 465 - DNA, 755 bp, Saccharomyces cerevisiae
ctctttcattgtggtcaccgtttttgaacacaacatgcaccaagattttcaagaagacgagcatgagtatccagacatcagacgcaatccgctgcatgaggtgaccatgacttcctacatactggggattcttttaggtatatttgttggtctttttccacaaattagattcaagaattttaacctctttattattgccctgtccttattccattttttggagtattatattacagctaaatacaatcctcttaaggtacattcagagtcctttcttctgaacaacggcaaaagttacatggcggcacattcctttgctattctggaatgcctcgtagaaagctttctttttcctgatctgaaaatttttagctactctctagctaccaagctttgtacagtacttggatgtcttctagttattctgggacaatataccagaactattgctatgcatactgcgggacattccttttctcatattgtgaagaccaagaaggagtccgatcatgttttagtgaaaactggcgtttactcctggtcaagacatccaagttatcttgggttcttttggtgggcaattggcactcagctactgcttctaaatcccctatcattggttattttcatttttgtactttggaaatttttcagtgatagaattcgtgtggaagaaaaatatttgatagagttctttagcgcggaatacatagaatacaagaataaggttggtgtcggaataccttttatataat

SEQ ID NO: 466 - DNA, 847 bp, Saccharomyces cerevisiae
ttaacttgcagcaagcgcaggtgagagccaacacacatcaataatctttccaaaagctatggccagaattgtcgtattaatttcgggctcaggttccaacttgcaagccttgatcgatgcccaaaagcagggccaattaggcgaggatgctcatattgtctctgtcatatcttccagcaagaaggcatacgggttaactagggcagcggacaataatatccccacaaaggtttgttcgctatacccatatacaaagggtattgcgaaggaggacaaagccgcaagggccaaggcaagatcccagtttgagaacgacctcgcaaaactagtgctcgaggaaaagcctgacgttatcatctgcgcgggctggttattgatccttggatctactttcttgagccaactgcaatctgtgccgatattaaatctgcatccagcgctaccaggttgtttcgatggtaccacacacgcaattgaaatggcatggcgcaaatgtcaggacgagaacaagcctctgacggccggatgcatggtgcactatgtcatcgaggaggtcgacaagggtgagccattggtggtaaaaaagctagaaatcatacctggcgaagaaacactagagcagtacgagcaaagggtacacgatgctgagcacatcgcgattgtagaagctacatataaggttttacagcagcttcacaaataagaatagttcccatatttatacttttatatttggcattcttcaaagtgaggcgcgaaacatctcgcgtcgtaaatcatgatcatggattgtgacaaaacgatcttaaaggtttcgaataaaatgtgtgtaaatacgtatacttat

SEQ ID NO: 467 - DNA, 3911 bp, Saccharomyces cerevisiae
atgaatattcttaagcatttcccaagctatgttggcccatctaagattaggaccttagtgataccaattggccattggacgcgaaaagagtttaataatgcggtacagaaactttctgaattcaacgaaattcatctgtctgatgtaacccccattgacagccctatcttcacaccgcaaggctttccacatgggaagttatttttcgacttcttgaccatagatcatgacgatgcattggagttgtttctgtatgattttgagccatttcggaaaacatttgtcattattgggctggtaaacgattacagtgaccccttgaccaatttgaatttcatgaaggagaagtatccaactttgatttcaccgaatttggtgtacgcttcatctacacccactaaagagcttgagcaaaccatagatacgatggaaaatgtattcgcatcttctccagatatgcagaaaaacatagaaacgattatgtgcgacatagcaaggaactttttaaccgcattgaacagctattactcttcctataaacatgttactttgaggtcgccgggtgcgattggtgggaatgcggtattgaaaacaactctaataagacagaacagttacacatcttcgtcatccagcacacccatgtcagcggtacaatcttccgtctcaagttcatcgaaggcaggctcagttactactgcttctaagaggttatcttcctttgagatgactaccaatagtttaaagagatccgcttctctaaagctagctaccacgctttccacatctgagaataggtctcaacaaaaatcattgggcagacaaatgaaaattttgggcaatttccaattgctggcaggaaggtacgttgatgcgttgaacagctttgttgatgcgatcacaactttgtacaaagtgcgtgactacttatggttgggttctgctcttgacggtatttcgatctgctttttacttctatcttatctcggtttgtcataccagattccacaaattgtgagtctcatttgtcctgtggagaagctcaattttgaatctagctcaacggggatttcgcctgtagattccaatagtaaagccacagcaagcacgacggcgtcaagcacaccaaggaacagcatatctatagctgctatgcagtcacctagaaattccattatgtctttatctgccccagcattaaatattgatgtagaaaacatcaacctcccgttattaattaaatgcatatctgacaaagtcttgtattattatgatttaagtttgatgcacaatagtgaatatgctccgcaagtggtttattgcgagtttttactgaagactttaactttcatgacatcgtgttataagagttcagagttttcaaaggacgttctggacaatattgtgaaaaaccaacacagggccttgtcagatatccctaatagtccgatgttcccaaggtttgaagtttatttctatagcaataaattgttcgaattacaattgaaggaaatgcaagttgaggctcaaattaaaatatactctactatggcggaagtttatcgccttttgggatacaaaagaaagcaattattcgtgttaagattgctgatggttgctcttttggcgactccgaataagatagcatggcatcctgactacaggaccttgatagataccatcatagaactcctcaacatcaatgaaagcgaggccaaaatcaatgtagatgatccgtctcaatctacttggttgatcctacagaaaaagatcctacaactatgcattaaagtttcaagaaaaatcaatgacttcgaatatgtcgctaaatttagctcgatactaattacgaaatatacgcatctgttaaatcagtcggaacaagatgccttgtttaaagaatatattcaaccatcaattaccaacgagtctatcacaagttattgggatcccttcattctgagggaagttgttataaatagaatattggatagtgaccccacttcaaacgaaatcccattagagtcagatgttagcagccttgaaagcctagaaaatagacaaaagacacaggatattaatccgcaggaagttttcaaccctttcaaacgggttcaaccaacttcttttgtttctaataacagcaccaaagttcctattttagtatttttagttggcgataaggctgaattcacctgcagggttcaaaatcctttcaaatttgattttacgatcaatgatattcaactagatgaggaaatatctgaattttgtgagattgatagaaaagctgtaagttattcagggccatataatgttaaagccgagtcaataagatccatcacattgcctttgattattaaaaagccaacatacaaaaaaatctacgagatttcatgcctaaaaatctctatcctaaaactaccgcttcagaaattcgatattataaacgattctagaagatcgaatcctgttgaagaagaggcagaatacagtaaatgtatatacggaaaattaaaaattaaaatcctgcctgaacaaccacaattagaactattgagtacttccaagatgacaagaaactcatggatgatgctggatggtaccaaaactgattttcatataacggtgagaaataaatcactgagctgtgcaataaatcatattaagatcataccaatgaataatattgagcaaatgttgaaacctgattattggaaaaaaatgccaccagatgacttgtacatcatggaaaaacagctagattggctctctaagtcttgtgtacgtattattaaattaccaacggtaatcaagccaaatgaaaccatcacatttgatttggaattagataatactgctgttccatttaatttcaccggatttgacttattgatcgaatacggtatgagcgctactgatgaatcctgcatttatttaaaaaagttatcaataccatatgaagtaacattgagaagaacaattgaagtaccaagtatggacatcataccgctaaatgaactcttcagctcgcaagttgaaaatgttgattggattgagtatgtaatgagcaaaatacgtgcagaatctaacctccactctagagattttatattgttattattagacttcagaaattcttggattgacggaataaaattgaatgttcaatttgaagatttcactagtaatgagtatcatgtagaggcaagccatacctcgagaattattgttcctattaaaaaaattgattacaaaaagtataattttgagaatacacctataccaagaatctatccaggccgacaatttattcaaagtggtttaaacgaagaacagactatagaaatgagacaaaaattttggtgtcgcgaacatatcatttcaaagcttaaatgtaactggaaattaaccacagaccaatctgtaacaggttcggtggatttcaataagttcatagaaaagtttgatcacaagatggtctacacgatataccccgggagattattttacggagtgcagctattgcttgatgagccaaaagtcaaagtaggggaaataataaacttgaagataataacagagccgactagtacatgtagaagaaaacaaaattctactgtaaattttttggacatcgtgattttcgacagcaagacatcaaaaatattaccaagatcgaacagacgaattttgtataatggttcgttaactaaaccaatcagtacaaccaaagtttctgaaattaacttagaaattattccaattgaaaaaggccggtacgagtttagcgtttgcatctccaaatcaaacaaccaagatggaataatccagttcgactctgaaaacgttatcttgtctgttatttagtgttaaatgcatttctataaactactatatagaatatagat

SEQ ID NO: 468 - DNA, 835 bp, Saccharomyces cerevisiae
acaagctcacttcgtcgatttattctctaacattgggtcgatcaggtctgtccacctatctcttctcccagaatatcatagcctttctttttccgtttctcctcctacaccattctcctttgcgattagacagtgggaaagtccaagaatagattcacatttcaaccactgtataaataactcaatttctgagaatgttttttattaaagacctttcgcttaatattacccttcatccgtcctttttcggtcctcgaatgaagcaatatctaaagacaaaactattggaagaggttgaaggttcgtgtacgggtaaattcggatatattctttgtgtcctagactatgataatatagatattcaacgtgggagaatattgcccacagatgggtccgccgagttcaacgtgaaatatagagctgtagttttcaaaccatttaaaggggaagtagtggacggcacagtcgtttcatgttctcagcacgggttcgaagtgcaagtaggtccaatgaaagtatttgtgacaaagcatctgatgcctcaagatttaacctttaatgcgggttcaaacccaccatcataccaaagttccgaggatgtcatcaccataaaaagtagaattagagttaaaattgaaggttgtatcagtcaagtgagttctattcacgcaatcggtagtatcaaagaagattatttgggtgctatttaatcacttgttactccgcaacgcttttctgaacgcccgccttcgcctttcattatcattctcatcccaaaagaactgtgcatgttatttgcaatacttcatatacgctctgtattattaatagtatc

SEQ ID NO: 469 - DNA, 573 bp, Saccharomyces cerevisiae
caagaaatcataacgatatttactaatacagttgtacctattaattaattgatggctggagactccgataatgtgtcgcttcccaaggcgaccgtacaaaagatgatatctgaaatactggaccaggatttgatgtttaccaaggatgcaagagaaatcatcatcaactccggcatagaattcataatgatcctgtcctcgatggcttccgaaatggcggacaacgaggctaagaaaaccatagcgcccgagcacgtgatcaaagcgctagaagagttggagtataatgagtttataccattcttagaggaaatattattgaattttaagggttcccagaaggtgaaagaaactagggattccaagttcaagaagtcaggtctctcggaagaagagctgctacgacaacaagaggagttgtttagacagtcaaggtccagattacaccacaatagtgtatctgatccggttaagtcggaggattcttcttgaatagaagcttctaaacaaagtaatgctatatacgaaaataaaccacatgggaatatgttaagcgcatgcatgtatgtaata

SEQ ID NO: 470 - DNA, 788 bp, Saccharomyces cerevisiae
atgtaaccgaacatcatgtccttcgagaacaaactgccaactccattagaaaacaacgatgctaagggccatatggtctgtaccctgaacaagactacggatgccagaagagcagcagagactttgtctattgcttttagtaactcgccagcgtttcattttatctgcaagaaaatcttaaatattcctctagctgagaaggtgcctacaaggacaataaccaccgatatcatatcgccattcctggattcaccttatggtgagatctccgaagttaatactttcgatgctgttgcagtgtggagtcttccacctcacgttccgaaggcaaggagtaatgatgcaaagttcaacaaggactttattgacgatttaaatgctcgcgtaaagcaagtcattccaaatggcatcaattactactatcttttctgtattggtaagaacttaaatgagaaaggaatcagaggttctgtaaggactatttttgaagagtacaaaaggagagcagacgaagaaaattgcgccattgtccttgaagctattgccgagcatgctaaatctgtgtacgaatattttggatttagaaattacatgacgttcaaatacggtgagtgtgaggtcgactctaacggcaattgcgatccgaatggtgaagggttcacagcctatttaatgatatatcataaggacggtaataaagtcttaaaagagtagtttttgagctttttctttccccccttcaagtaattatttagaataaaaagtagtgtttaaagacgacattttgg

SEQ ID NO: 471 - DNA, 1985 bp, Saccharomyces cerevisiae
acgccaaacaagaaaagaaaatgccaagggaaacaagtttggtaacaatcatcggtgaagatagttacaagaaattacggtcctcaagatgtcttctggtcggtgctgggggcatagggtctgaattgttaaaggatataatcttgatggaatttggtgaaatacatattgtcgatttggacaccattgacctttcgaacttaaacaggcaatttctttttagacaaaaagatattaaacaaccgaagtctaccacagccgtaaaagcagtacagcatttcaataactctaagttagtgccttaccaaggaaatgttatggacatttctaccttcccactgcattggtttgagcaatttgacattatcttcaatgctcttgataacttggccgcaagacggtatgtcaataaaatatcacagtttctatcactgcccttaatagaatctggaacagctggatttgatggatacatgcagcctattatccccgggaaaactgagtgttttgaatgtacaaagaaggaaacaccaaagacttttcctgtgtgtactatcaggtccactccttctcagccaattcattgcattgtttgggcgaaaaactttctatttaaccagctatttgcgtcagagacctctggaaatgaagatgataacaaccaggattggggtacagatgatgctgaagaaattaagcgcattaaacaagaaactaatgaattgtatgaattgcaaaaaattatcatatcaagagatgcatcccgtattccagagattcttaataaattattcattcaggatataaataaactgctagccattgaaaatttatggaaaacgagaacaaagccagtaccattatcagactctcaaataaatactcctactaaaacagctcagtctgcctctaattctgttggcacaatacaggagcaaattagtaatttcattaatattacacaaaaattaatggatcgctatcccaaagagcaaaatcatattgaatttgataaagatgatgctgatactttggaattcgtcgcaactgctgcgaacataaggtcacacatattcaatattccaatgaagtccgtatttgacatcaagcaaattgctggtaacattatcccggctattgcaacaacgaatgctatcgttgccggtgcatcgtcattgatttcactgcgcgttttaaatcttttgaaatatgccccaactactaagtatactgatttgaatatggctttcacagcaaaggcaagcaatctatcccaaaatcgttatttatcaaatccgaaactagcccctccaaataaaaattgcccagtttgctctaaagtttgtagaggtgttattaagttatccagcgattgtttgaacaaaatgaaactaagtgattttgtagttttaatacgcgagaagtactcatatccacaggatatttcgctcctggacgcaagtaatcaaaggttactatttgattacgatttcgaggatttgaacgatcgtactttatcggagattaatcttggaaatggttctataatattattctccgacgaagaaggtgatacaatgatccgcaaagccatagaattatttcttgatgttgatgatgaactcccatgtaatacttgcagcttaccggacgttgaagtcccattaataaaggccaacaatagtccttcaaaaaatgaagaagaagaaaaaaatgaaaagggtgcagatgtagtcgcaactacgaacagtcatgggaaagatggtatcgtgatattagacgacgatgaaggtgagatcaccatcgatgctgaaccgatcaatggttcaaagaagaggccagttgatactgagatttctgaggcgcccagtaacaaaaggacaaagttagttaatgaaccgactaattctgatattgttgaattagactaataaataagaaaaggtatctatatatttatttaatcgtggttcgcagtgtacgac

SEQ ID NO: 472 - DNA, 1937 bp, Saccharomyces cerevisiae
gaacttcttgaactatatacaaccttatatgtgcaactgtagcgtgcacttatagtccatggtcaaaaagtatcttttctcagtagaaaacaaaagcgtacaggcaagcgacaggaaagtcaaaacttgatagaggtatgtctacagatgaaagtgaagacgtttattctgatctgtattccattatctcccaggtaacatccaatactgccaatgacatcgagcaactcccatatgctttaacgttcaaaacgtcgttaatcttcgttggtgctaccattggtgggcttttattcggctatgatactggtgttatatcaggtgttctgctttctttaaagcccgaagatctatctttggtagttttaacggatgttcagaaggagctgataacttccagtacaagcgtcggatcattttttggctctattctggcatttcctttagcagataggtatggaagaagaattactctcgcaatctgctgttcaatttttatcctagctgcaattggaatggctatagcaagaacattgacgtttttgatttgtgggagattgctggttgggatcgctgttggagtgtctgcccagtgcgtccctctatttctgagtgaaatttcaccttccagaatcaggggttttatgttgacattgaacattattgccatcactggaggtcaattggtttcctatgtgattgcgtcccttatgaaagagattgataattcatggagatatttgttcgcactttctgctattccagctattctgttcctttcaatactggattttatccctgaatcgccacgatggtccatttccaagggagacattctatataccagggattctctaagaatgctatatcctactgcatctacatatcatgtgaatagtaaaattaagcagctgataattgaactcgataagttacgactatacgaagatgcaagtgaacctttactagtacagtcccaatcggttattcgatacatggatagttcaacctcaggaactcttagcccacctaacattaaaagactttcctcgaacacagaaagaactagcaacacaatgtcctcctcatcagcatatctatcggcgttgcgaggcccagctccaaacggtgccctggcatctaacaaaaagaaaagacacagaatggagccacgcacaataagagcgttaatagtaggttgcatgttaatgtttttccagcaaatcactggctttaatgcttttatgtactatgcggcaataatattttccaaatttaatataaaaaaccctctactgcctccaattttgattgcctcaacgaacttcatattcacttttttcgccatgtacaccatggactctttgggaagaagagccattcttttgagaacaattttgattatgactgttgggttacttctttgcagtgtaggtttcggtcatgaccaagtcaatttacttttaatttctgttgtaatttatgttgcagcatatgcttctgcgatgggcagcgttccatggacctgtgtggaatttctccccttgaacaggagatcatttggggcatcatgtatagcctgcacaaattggttgaccaatgcatttgtttcaatgacatatctgagcactattaacaccattggtgatgaaaatacaatgctcatttttgcttttttcacagtttgtgcctggtttttcgtatatttttggtatccagaagtcaaaggtttgtcactggaagaggttggaagggtttttgataatggaattgatgttcattatgtctttcgtacctaccattgatgagttgtcaagtggcatcataatgcattggggcggctttcagatatgcttctggtatatttgtccgtgagaaattaaggcttcttttcttatatatgtatatattagttaaaagaatatcatcactttttt

SEQ ID NO: 473 - DNA, 1058 bp, Saccharomyces cerevisiae
ttataaacagttgggtcacatataactgaatacattcccagaaagatttagtaagaataaaaaataaaaatactggttaaaatgacatcgtctgcttcttctccacaggatttggaaaagggtgtgaacactctagaaaatattgagacgctcccccagcagggttcgattgcaggcgtttcgcagggcttccctaatattcaagagatatactccgacagagacttcattactctaggatcctccacctacaggcgcagagatttgctcaatgcactagacagaggggatggggaggaaggaaactgtgcaaagtatactccgcaccagttcgctaatccggttcctttgggtctcgcatcgttttctctgtcatgtctagttctgtcgctaattaatgcgaacgttcgcggcgtcactgatggtaaatgggcgctaagtttgtttatgttttttggtggtgccattgaattgtttgccgggttattgtgttttgtcattggggacacatacgccatgactgtgttcagttctttcggcgggttctggatctgctacggttatgggctaacagatactgataatttggtcagcggctataccgatcccacaatgttgaacaatgtcattgggttcttccttgcgggctggaccgttttcaccttcttgatgttgatgtgtacattgaagagcacgtggggtttgttcttactattgacgtttttggatcttaccttcctactactgtgtatcggcaccttcattgacaacaacaatctcaaaatggccggtggctattttggaattttaagtagttgctgcggttggtattcgctatactgttctgtggtgagtccttcaaattcttatttagccttcagggcgcacacaatgccaaatgctccttaaagggtatgaaatgaaaaacaaaacttataaaacattaaaatgatttaataataatgataacgttacgtttagacatagtcttttttttttttcttggccaagagtttttataaaaatttatatatcatttacccacaatacttagcaaa

SEQ ID NO: 474 - DNA, 456 bp, Saccharomyces cerevisiae
gattattagtgatgtccggaaaagcttctacagagggtagcgttactacggagtttctctctgatatcattggtaagacagtgaacgtcaaacttgcctcgggtttactctacagcggaagattggaatccattgatggttttatgaatgttgcactatcgagtgccactgaacactacgagagtaataacaataagcttctaaataagttcaatagtgatgtctttttgaggggcacgcaggtcatgtatatcagtgaacaaaaaatatagacttatctcctctaatggattaatatgtaggaatgagcaagttggtttgacataaagttgcatttgcgagtttagcacggatacacacaaacacacccatatctatatacatatatatatatatgtgtgtgtgtatatcgaataggatcgaacagttttattttaatgaatttttatgaatata

SEQ ID NO: 475 - DNA, 1417 bp, Saccharomyces cerevisiae
ccctcaatctaccatgtcggataagccgattgacatacaatatgataaacaggctactccaaatctgagtggtgtaattactccgccaacaaatgaaactggtaatgactcagtccgggaaaaactttcaaaactagttggcgatgctatgtcaaacaatccctattttgccgccggcggtggtcttatgatccttggtacaggtttagctgtagctagatccggtataataaaagccagcagggtcctataccgacaaatgattgtcgacttagagattcagtcgaaggacaaatcatacgcctggtttctaacatggatggccaaacatcctcaaagggtatctagacacttatccgttaggacaaactacatacaacatgacaatggatcagttagtacaaaattttcgctggttccgggtccgggaaatcattggattcgttataagggtgcttttatcctgattaaaagagaaaggtccgcaaaaatgatagatatcgcaaacgggtcaccatttgagaccgtaaccttaactacactgtaccgtgacaaacatttgttcgatgacattttgaacgaggctaaagacatagccctgaagactactgagggcaagactgttatttacacttctttcggccctgaatggagaaagtttggtcaaccaaaagctaaaaggatgctgccctccgtcattttggacagtggcatcaaagagggtattctcgatgacgtttatgattttatgaagaacggcaaatggtactctgacaggggtatcccatatcgcaggggatatttactctatggccctcccggatctggtaagactagctttatccaggctttagcgggcgaattagactacaacatttgtattttaaacctctccgaaaataatttaacagatgacagattaaaccacttaatgaataacatgccagaaaggagcatactattactggaagatattgacgcggcgttcaacaaaagaagtcaaactggtgaacaaggttttcattctagcgtaacatttagcggtttactgaatgccctggatggcgtcacatcttctgaagaaactattacattcatgactaccaatcatcctgaaaagctagacgcggctataatgagaccaggtcgtattgactacaaagtcttcgttggtaacgcaactccataccaggtagaaaaaatgtttatgaaattttacccaggtgagactgatatatgcaaaaagtttgtaaatagtgttaaagaattggatatcaccgtaagtaccgcccagttgcaaggacttttcgttatgaataaagatgcaccacacgatgcgttgaaaatggtctccagcttacggaacgctaatcatattttctaggtgctaagtggcgccttactacataacttgtat

SEQ ID NO: 476 - DNA, 1410 bp, Saccharomyces cerevisiae
ttgctttctgggtacgttgactttttcagttctatatcggcccgttgcttactctgttcaactcacttattcttttgtttcggtttgggctgctgcatttatagattaaaaataaatttcaaatttccacgctaacaaatagagctaaattagcagtttcattgttggctatattttcattacaacttttgatctgataacgtaaaagaattcaaacaaaaactatctaaaaaaatacaaagcaaaaatcatgtctactttacaacgtcgtagagtcaatagggcggattctggagatacttcctccattcattcttctgctaacaataccaaaggagacaaaatcgcaaatattgctgttgacggggatgatgacaatggaacaaacaaaaagattgcatatgacccagaagaatcgaaattgagagacaacatcaatatccctacgttaacgttgatggaagaagtcttattgatgggcttaagagatagagaaggatatttgtcgttttggaatgatagtatttcatatgctttgcgtggttgtataattatagaattagcgttaagaggtaaaatcagaatcttagatgattccgccaggaaaaggttcgatctttccgaaaggttgattgaagttattgacagttccaaaactggggaagttttactggatgaaactttgcaattgatgaaaaacgacgaacctttgtcaatttctaactggattgatcttttaagtggtgaaacatggaaccttttaaagatcaactatcaattgaaacaagtaagggaaagattggcaaaaggtttggtcgataaaggtgtattgagaacagaaatgaaaaatttctttttgtttgacatggcgacacaccccattgcagacgccagctgcaaagaagccattaagcgcagagtactttctgtactcgtatcgaggaacatggaattaagttacaatgaatattttccggagacaacatctttcaaaatcattagaactttagctttaatatgtggatcatatggggcaaacgtattggagaatgtcctgactacgttggaatatgagaagagagataaggcaattagtagagctgaagaaataatggcacaattttcgcaatacccatttgatttagaaaaggaaactgagttaggtgtctccgttaatttaaacaaggaagttaaagaagagatagaaaacaatcctggtcatgatttacaattggaagttattgctggtgtatttgaagtcttttcaagaatggatatgctattatgaaaataacaacaaaaatcctctctttgaaacataaggaaaagtcaagcttttttttataagcctctaacattaataaacgaaatttgtatatatgtatatacatatacggagtggataataaa

SEQ ID NO: 477 - DNA, 1329 bp, Saccharomyces cerevisiae
atgtcaactgaacaagatgctgttcttggattggccaaagatttagaaggtataaatttgcttactgtgcccaatctcgagagaggacaccaaagtaaattatgcaaagagaaaactacttctgattcatcttcgtcaaggaagccttcacaacagagagacaattatagaaagagacgtccgaaacttatatgtatcccatatacgtcttttctgcatactggtatgcacaattttttgacgaaaccaccaagagatatatttcatgaaagtaaagaagtagctctgtttaccaatggccgggcttatacaatcctacgcaaagaccttataccaaatttgaaagaaagtattgctgaattgtatgaaagctcgcttcttgaggcaaaaaagcggaaagtcccgtatttaggccatgacttatttgctaatattgatgagttcgttcccatgacaatatccgaattagatagtgtatcaccgtgtttttcatacattgagaactggatactagataatcctggtaaggattttaagatcggcaagaaatttactgttgtaaccacaagacatcatatcgtagatttgactatgcatctctttaacaggcgaaatagacaaacgtcactaattgtaacttatatgggggcgggccttctttcattttgcagaaatgtaaaaaaagattctcaaatgtccaaagagggcatttattcaaatgatccaaatatgaagaaaatttgctattcaggatttgaatttgaaaattgggtaaccgaaaattccaaagtcgctgatttaactggctctaaatgtcctattttttctcttgtagagagtaaactttcagaagaaattggtcttttaattcgctgcgaaatggatgcattcaatcctgtttcggagacaaacacagaactaaagtgttttgccccattatcaatgcacaattccaatcataggagaaaacttctgaaaacgtgggtacagacgggtttattaccgaactcagatatcatgataggtttgagggacagtcatagcggtcaattactagacattcaatggtactcaagggacttattatgtaagaaattcaatcacccaggtctacctacaaataaaaaggaacttaactataatgcccaaattgcggtagaatggtgtcattattgtattgaagcaatttgtaagctggtggaggcaaatatctctgactatagcagtacaaaaccagaatcatttgaaatcggtatagatactaacaacgccatcgtcatcactaaacttaagactactccaagaaacgtagaattatttggaatgtag

SEQ ID NO: 478 - DNA, 399 bp, Saccharomyces cerevisiae
atggttacaattggtagttcctccctggtattatttcttttcttcgtagtttttgtacagatcacttatacagctttacacagattttcccgcttgttgtgcacttttttttcgaagattattgaagagggatgcgtttggtacaataaaaaacataggttcccaaacctatataaatatatatatgtatatgtatatatactacatatatgctttgagaaatatgtgaatgttgagataattgttgggattccattgttgataaaggctataatattaggtatacagaatatactagaagttctcctcaaggatttaggaatccataaaagggaatctgcaattctacacaattctataaatattattatcatcattttatatgtttatattcattga

SEQ ID NO: 479 - DNA, 1116 bp, Saccharomyces cerevisiae
cattttcataggattgctaattaactcacaaatatggttcaagctatcaaattaaatgatttaaaaaataggaagagaaaaaatgtggaggaagaaaatggcagtgacgagtctgaaattgacattagtagcaccgattcagaaaatgaagaagagcaaaatggagaagaagagatcgtaaatattgacttcgattttttcggtggtaacccagaagttgattttcatgctttaaagaatttactgcgtcagttatttggtcctcaagaaagtaccaggattcaactaagcagcttggcagatttgatcctaggttccccaaccaccacaattaaaacagacggcaaagaatctgatccatactgttttctttcattcgttgatttcaaagctaatcatctaagtgattatgtcaaatatttacaaaaagtggacatgagactttccactttcttcaaaactatgattgatagtggtaataaaaattgtgctttggttctcagtgaaaggctgattaatatgccaccggaagtcgttccacctttatacaagattacgttggaggatgttgccacggcacttggcgatgacaaacattatgacttctatatcatcgtcaccaggaagtatgaagtaaattttgacactgacgatgataccgactctggtaagaggaataaaaacaaagacgaaagatccaaaaaaagggtgaaggccgatgaagtagactactttcatgaggaggaccgattttttgaaaaatatgccaagattcacttcgaatcagaagctaaaaagggtgttatcagctcatacatgattcttgatcacgaaggccttgtcaaaagtatcgatgaattggaaacagaaatttccacttggtaattttacgaaaagtaaatagttgcgatcactgccctgcacagttagtgcaatttgtatattattaacagacgaagcagcagcggccattgagcctttatgtcatcctacacggataattttgggctgccgaggacagtaaaaattaatccgccaccgctgaaaatttttctgggcgatcatctttttaatgtcgtgtgctccaataaaaatacatagtatatattgtgcaaa

SEQ ID NO: 480 - DNA, 482 bp, Saccharomyces cerevisiae
tttttttacatgaaatttgtgtattttagcattcattagcagtatattcaactaggttagttggccttatttagaatgcaagacaactcaagtcattccagagagtcggcttcggctggtgacgatcctcttggaattgataaattgacagtcgactacgattacttactttataaaatgagagactatgtacagagtatacaattggatactacggagctatgtaaaaaacaaaatgaagtgatggtgaatggtattattgaaaacaccatagataaaaatattgcgaagttcaaagaactccttgaaaaatgcgatacgttggaaaatcactatgaaatgttaaaccaactggcgataataacagatactttcaaggaaagaatcgcagaggccgtaaataattacaatagcttaaaaaagggcgccagtaaatctaagtaacttataatacaaatataccacatacatagatataccct

SEQ ID NO: 481 - DNA, 1977 bp, Saccharomyces cerevisiae
gactaatcgttctagaaggatacagaacttggaaagatctttgaacgtatcgtaactgcgtgcttgctttatttgccgttgatttttgctatgacatgcctaattttatggtatctgtggctcatatcaacttttcagttagagtttgcaacggctagtactgcaaatacaacaactacagcaaagtctggaacctcttcgtcaacggaggagccgtttcctgtactagccgtgggtaaagatggtagaggaaactactatgttaatagcacatttggcactcccggtcaacgccaacgtttgctagtggatattatccaaccgtacataaatctggtttccggaacaagcgaaagtcataacgaatactccggtgtatatcataagcatcccagctacctcatgaatgactctacatcatctgttcctgtttctcctggccaaatatatgagatttctttcattgatggtagagctgttaactgtactttggtgacagacgatatgaattttacaaatgtttcctcagaaaattcctcgaccgctttgataaccgatttaatggtaactcgagataacgtacaatttaactcggggagcctatccatttcaaacgtttccttctttgatattcagtcctcgaactttaagacttcaggcttgttaggtttaagcgggaaggtcacaaacccaggcaatgctatcgatagctcacaatacacagaacagtcttattttctatccttattgaaagatgcagatatcattgaaagttcgtcatattcactgtggttggctggagacacttccacgtacaaaacatatagagatccaatatctaattgtgggaagctacttcttggaggggtggatccttcgctgtttaccggtacactgggaaaatttgacttaattccttacgttgacccagtgagtaatgctgttagtgttgggtacccaattgtgccattaggccctatttatattgtgtctaacagcggacaaagtttgaatatgacttcgaaggactttctgagcccagccttacttgattcaacttcttcggtcagttacctgccaactagtaccattattcagattgccgttcaaattgcggccacttatgtggaatcactagataggtggctagtccaatgttctatagcagatatgggtgtctccttgggtttcaggcttcgagaattgacaattgaaatacccctacgtgatttattatcatctacttacgatacatccaccaattcttcaatgtttttcagttctggacaggaagcttgttttctaacactatacgctaatacaaatactggagtaaacatactcggagaagccttcataaaaaatatatatatggcaatggacttagaggataacactatagccattgcacaggcaaagaaggttgaagatgacgcagttactgaagagacaaatgaaactaccgcgtccactatcatcaagaagatcaaatctggttacattccttacgcaaaagtgatgaatagtagtaatacaagaaacttgactctttatccatcctataggtcaggctatatgttcactgtcccaggtcaactgacagcagcatactcaaacggtgtgattacaggtgcgggccggtcattctatgatacttcaagagcaagcacaagtgctagaccatccagtactcaattcgacagcttttctgtgtcagcctcagaagagtggtcaaattcaactaatagaaccagcagtgcttcgggagcaggcgttcgattgagcagtccttatacatttaacaaagatccagctggacatgtaactcgtatagcttccttgctactactttcgatattctcgatacttattgttctttgaatggttttaacaaaagttcataacataaaacctttttctccttgaccaatgcacgtataacatcattatatagcagatttaataacaacatactta

SEQ ID NO: 482 - DNA, 1880 bp, Saccharomyces cerevisiae
ttttatagtgtgtagaatccgaaatatatccgatctacctcgctctttttattgttatttttattcgaggaatttaagtgttttgcagacctatcccttcgaacacgtaacgtcattttaccataatcttcgactgcttaattgttgatacattgtaggttccattacactttgccagcattttccatttttagaaaaattgatacatatacgcaagatttagcatggagaatagaaacagtagtacctctagtaggccattttctgttaataacccgtttagaaatgccacagttgattcaagtattaatcagtataaaaatgactcccagtttcaggagtgggcgaaaaaccaatctcgtaccaattcatttgatatgccacaattgaacacaagaacttcttcacaattatcattcccaaacattccagaggatgaaccccagcgaaacgcagatcagcagggtgctttttattctggtttggagagctttagtagtggtagtttatcaccaccttcgagacctctttcctcaaagaatcctttcctagacgatgtgagttctgcaaccgattttagaaggtctcccccacctgtttcaaggaataaaaatcatcccactgctaaagaagaaaaagaacaattaaggcaaagatatttggaggaaagtgacgtaagtacagtaggtaacacaagagaaaacactgacctaccaccctcatacgaagagatcacttcaaccaatggatcaaggcgtgcatatccaaaggaaaaggtttctcgtccttcttctcaccgcgaacatagcaacagcggcacatatatttcacgcagatcttcatcccaccatcaccgtgaagcttcctcatcttcaacgccttctaagaagggaaagagaaaaagtaaggttattgttcctaagaacgtcgatactatcgataagttagatgtaactggattgttcggtggctcatttcatcatgacggcccattcgatgcagtaacacctcatagaaataaaaataacaaagctgcgcctgttttagcatttccggtcgatggtccaaacagtaccatcggtggcgcttcaaccaagaagtctgccctggatgaggtttttgggagagatgatacagatgattctgatatataccagtacagttcgcagactctaaggagaggtggtgatacgcaggacgcaataaaagcaaacgtgggtaacgtccaacaaatggatgccaaaaataagacagaattggttcatgggccagttactgcgggattaggttctagtacgtttttagatggggcgccggcctcctcagctgccattagaaacgacataaaagcccattcctatcataatcgtaacggtggtttacaaagaaataagtcactttctcaacgattaggtctcggaggatccggtgatagcaatgcccccatgacaggcgttagaagaaacttgagtttaagtagagacaactatgatgttggtcacagcaatgaaggtgttagaaggtcgaaaaccgttaattctcctaacagaacgcataagtccaattatactactgatttcgacggccaagatgatcacaatgaagatgaggaagacgtttatttgggtgtgcgctacaatgagcccaatatgaaaaagaaatcgacgggcagcaaattactgagcagagtaaaaagtctaaaggtcggcaggaaaagtcagtaaagtgagcttaaaagagagaaaagaagctatgagacaccaaagccaggcaaataaaagggagagatacgaataaaaataatttaagaccacgttatatacacattacgaatagtttgactttatatatttacagagactaccaacttatatcaaaag

SEQ ID NO: 483 - DNA, 1856 bp, Saccharomyces cerevisiae
cacggcttttcgtttgttatatatagatagagcctgttgatagaattcttttgtattcgtttgataatttgaaatctgtagaagatcaaaagattcagtcatttattgcatcgaatcaagaaaaaagaaacgaataagcttttgtataatataatataatgttgaagtggataaaaggtgggatctcagcagtcactggtatggctgagcctgaatatgggaaagattacattcatagtgttgctgatagggtaaaaaataagcagccttacagagaaaccagtcgtgaagattttttttggcaagctcctgaccatacaaacgttgaatcggttatcttttatttcagtgacttgaaaacaggtatctttggatttgcccaggttattcattcgaacatcattgggttgcacactgcatcccaatttactttcagaatttttgactcgaagaatccagaggatttgaatatctggacttccaccaagttggaaaatttttacatcgaaggtccaaacttctatgccgacaatctttctgtagaattaagtgaagacggtgaaagctatcacattcaatccagtgtttgtgatttatctgtcgttgacttgcatataagaaggttaacccctggagccaagataggcgatgatcctgcgacttattatggtaacaatatcaatgaaccatggggtagcatgagacacgttttctggccaaggaatgcttgtcacggtactatcaaagttaagaaagaagttattccagaatctgatgaagaagaatcctcagctgatgaggatgataatgaagacgaagatgaagagtctggtgattctgaggaggaatctggtagtgaagaagaaagcgacagtgaagaagtcgaaatcacctatgaagatcgtacgattacttttaaagaggaagaccctgcgatttcgacatttataatggccttccaaggcatgaagcctcatcacgcagctaaggcatggaacttcatgtttttccattccgaaaagtattccgcggtgttgatggagttcactacaccaaaatcatatgccaacactaaaatttctgctggtattattaccgatgataaagaagttttagcgatgacaactaacaatcttgttgagcacttaaactcagaaattgattctgttggttggaaagttccaaaagatattaagatcaccttcaaaggtatcaataccaaagtcaaggatgaacaattggaatccgagaatgggactgaacaagctttacaaggagaggatgaaaaggaagatgaaaaggaagatgaagaggaagaagaatacaagaacgtcgcagaagaaaataagatctgtgctgttgtggagggtccgttgaacaacctagttgaaagaattgatgtgatgggcgaaattccaagttttgttaaaaacatcgtctctggtgttgctggtactaagccatttatataccaatatgctgatccaaaaagctcaactttacaaataaatggcggggagaaaattcacggtgtagcttggaccgaagtaacattcatttctgaatcagatgtgattagtgaggagtcttacaatgaagcatgagcaaaagtgggaaggtctcgtatgctttttcctatctgtgatttaatactacacaaatctaatattgcaaattttaataattatagcaagttatcgttatacccctttttaattgttgcgtcacataatcgatactattgttcaaaataagagtgatgcgagaaatagccacagtaaacaatgttgccataataaatagttgtcgtttttattcatctcatttttcttatgtatccatacatatatatatat

SEQ ID NO: 484 - DNA, 1924 bp, Saccharomyces cerevisiae
caggcgctgttttatcttcagcatgaatattccataattttacttaatagcttttcataaataatagaatcacaaacaaaatttacatctgagttaaacaatcatgaattcaactccagatttaatatctccacaaaagtcaagtgagaattcgaatgctgacctgccttcgaatagctctcaggtaatgaacatgcctgaagaaaaaggtgttcaagatgatttccaagctgaggccgaccaagtacttaccaacccaaatacaggtaaaggtgcatatgtcactgtgtctatctgttgtgttatggttgccttcggtggtttcgttttcggttgggatactggtaccatttctggtttcgtcgcccaaactgatttcttgagaagattcggtatgaagcataaagatggtagttattatttgtctaaggttagaactggtttaattgtctccattttcaacattggttgtgccattggtggtattattttggctaaattgggtgatatgtacggtcgtaaaatgggtttgattgtcgttgttgttatctacatcatcggtattattattcaaattgcatccatcaacaaatggtaccaatatttcatcggtagaattatttccggtttgggtgttggtggtattgccgttttatctcctatgttgatttctgaagtcgctcctaaggaaatgagaggtactttagtctcctgttaccaactgatgattaccttgggtattttcttgggttactgtaccaacttcggtactaagaactactccaactctgtgcaatggagagttccattaggtttgtgttttgcctgggctttgtttatgatcggtggtatgactttcgttccagaatccccacgttatttggttgaagctggtcaaattgacgaagcaagagcatctctttccaaagttaacaaggttgccccagaccatccattcattcaacaagagttggaagttattgaagctagtgttgaagaagctagagctgctggttcagcatcatggggtgagttgttcactggtaagccggccatgtttaagcgtactatgatgggtatcatgatccaatctctacaacaattgactggtgataactatttcttctactatggtactaccgtttttaacgctgttggtatgagtgattctttcgaaacttctattgttttcggtgtcgtcaacttcttctctacttgttgttctttgtacactgtcgatcgttttggacgtcgtaactgtttgttatatggtgccattggtatggtctgctgttatgtagtttacgcttctgttggtgtcaccagactatggccaaatggtgaaggtaatggttcatccaagggtgctggtaactgtatgattgtctttgcctgtttctatattttctgttttgctaccacttgggctccaattgcttatgttgttatttctgaaactttcccattgagagtcaagtctaaggctatgtctattgctacagctgctaattggttgtggggtttcttgattggtttcttcactccatttattactggtgctattaacttctactacggttacgttttcatgggctgtatggttttcgcctacttctacgttttcttctttgtgccagaaactaagggtttgactttggaagaagtcaatgatatgtacgctgaaggtgttctaccatggaagtctgcttcatgggttccaacatctcaaagaggtgctaactacgatgctgatgcattgatgcatgatgaccagccattctacaagaaaatgttcggcaagaaataatttcacgctaaaccgtagtgctgaataatagtgtattttaagattcgatgtgctagtcaataatgataaataatacacaagatttatgactttatatatataattctctgatacagt

SEQ ID NO: 485 - DNA, 1713 bp, Saccharomyces cerevisiae
atgtcacaagacgctgctattgcagagcaaactcctgtggagcatctctctgctgttgactcagcctcccactcggttttatctacaccatcaaacaaggctgaaagagatgaaataaaagcttatggtgaaggtgaagagcacgaacctgtcgttgaaattccaaagagaccagcttctgcctatgtcactgtctctattatgtgtatcatgatcgcctttggtggtttcgttttcggttgggatactggtaccatttctggtttcatcaatcaaaccgatttcatcagaagatttggtatgaagcataaagatggtactaattatttgtctaaggttagaactggtttgattgtctccattttcaacattggttgtgccattggtggtattattctttccaaattgggtgatatgtacggtcgtaaggtgggtttgattgtcgttgttgtcatctacatcatcggtattattattcaaattgcatctatcaacaaatggtaccaatatttcatcggtagaattatttccggtttgggtgttggtggtattgccgttttatctcctatgttgatttctgaagtatccccaaagcatttaaggggtactttagtctcttgctaccaattgatgattactgccggtattttcttgggttactgtaccaacttcggtactaagaactactccaactctgtgcaatggagagttccattaggtttgtgttttgcctgggctttgtttatgattggtggtatgacatttgttccagagtctccacgttatttggctgaagtcggtaagatcgaagaagccaaacgttctattgccgtttctaacaaggttgctgttgatgatccatctgttttggctgaagtcgaagctgtcttggctggtgtagaggcagagaaattagctggtaatgcatcctggggtgaattgtttagtagcaagacaaaggtccttcagcgtttgatcatgggtgctatgattcaatctctacaacaattgacaggtgataactatttcttctactatggtactactattttcaaggctgttggtttgagtgactctttcgaaacctctattgtcttgggtattgttaactttgcttccacctttgttggtatttacgttgttgagagatatggtcgtcgtacttgtttgctatggggtgctgcatccatgactgcttgtatggttgtctatgcttccgtgggtgtcaccagattatggccaaatggtcaagaccaaccatcttccaagggtgctggtaactgtatgattgtctttgcctgtttctatattttctgttttgctactacatgggctccaattccttatgtcgttgtttctgaaactttcccattgagagtcaagtctaaggctatgtctattgctacagctgctaattggttgtggggtttcttgattggtttcttcactccatttattactggtgctattaacttctactacggttacgttttcatgggctgtttggtcttcatgttcttctatgttttgttagttgttccagaaactaagggtttgactttggaagaagtcaacaccatgtgggaagaaggtgttctaccatggaagtctgcctcatgggttccaccatccagaagaggtgccaactacgacgctgaagaaatgactcacgatgacaagccattgtacaagagaatgttcagcaccaaataa

SEQ ID NO: 486 - DNA, 2021 bp, Saccharomyces cerevisiae
taaattcttgagtgttgtaaattctgttaatcaaagaaaaagcaatagctcgtttttctacagaatggctagcacagcaaatatgatttctcaactaaagaaactatctatcgcggaacctgcggttgccaaggattctcatcctgatgtaaatatcgtggatttgatgagaaattacatttcacaagaattaagcaagatttccggcgtagactcgtctcttatttttccagcattagaatggacaaatactatggagagaggcgatttgttgattcctatcccaagattgagaatcaaaggtgccaatccaaaggatttggcagtccaatgggctgaaaaatttccatgtggagatttcttggagaaagttgaagcgaatggcccgttcatccagtttttcttcaaccctcaatttttagcaaaacttgtcatcccagatatcttaaccagaaaggaggattatggttcttgcaaattggttgaaaacaagaaagttattattgaattctcctctcccaacattgccaagccatttcatgctggtcatttaagatccactattattggtggctttttggccaacctttatgaaaaattaggttgggaggttatcagaatgaactacctgggtgactggggtaaacaatttggtcttttagctgttggttttgaaagatacggtaatgaagaggctttagttaaggatccaattcaccacctgttcgatgtttacgttcgtatcaacaaggatattgaggaagaaggtgacagtattccattagaacaatccaccaatggaaaagctcgtgaatatttcaagagaatggaagatggtgacgaggaagctttaaaaatttggaagagattccgtgaattttctattgaaaaatatattgacacatatgcacgtttgaacatcaaatatgatgtttactctggtgaatctcaagtttctaaagaatccatgctcaaagctatcgacctgttcaaggaaaagggcttaacacatgaggataagggtgcagttttgatcgatttgacaaaatttaacaaaaagttaggaaaggctattgttcaaaaatcggacggtactacgttatatctaactagagacgttggtgcagctatggaccgttatgaaaagtatcattttgacaagatgatttacgttatcgcttctcaacaagatttgcacgctgcccaattcttcgaaattttgaagcagatgggctttgagtgggctaaagatctacagcatgtcaactttggtatggtccaaggtatgtcaacaagaaaaggtactgttgtcttcttagataatatcttggaggaaactaaggaaaaaatgcacgaagttatgaaaaagaatgagaacaaatacgcgcaaattgagcatccagaagaagttgccgatttagttggtatctctgccgtcatgattcaagatatgcaaggtaagcgtatcaacaactacgagtttaaatgggaaagaatgctttcattcgaaggtgacactggtccataccttcaatatgctcactcaaggttaagatcagttgaaagaaatgcttctggtatcacccaagaaaaatggataaatgccgatttttcgttattaaaagaacctgccgcaaaactgttgattagactgctaggccaataccccgatgttttgagaaatgcaatcaaaacccacgagccaacaaccgtggtcacatatttattcaaattgactcaccaggtttcttcttgttatgacgtcttatgggttgctggtcaaactgaagaattagcaactgcccgtctggctctatatggtgctgcaagacaagttttatacaacggtatgcgcttgttaggtttaactcccgtagaaagaatgtaataaacttttccaccaagccattcttcaaatgtgttttatttctataattggatataaattgtataaacggattatttcaatccttgccatctttttgttaggggccattgtccacatttcattaaatagatcg

SEQ ID NO: 487 - DNA, 632 bp, Saccharomyces cerevisiae
aaatatcgatatactacaacagttaattatgggtaaagctaagaaaacaagaaagtttggcctcgtaaaaagaactttgaacaccaagaaagaccaaagattgaagaaaaaccaggaaaatatcaaaactaaagaagaccctgagctaaccaggaatataccacaagtatcaagtgcacttttctttcaatacaatcaagctataaagccaccttatcaagtactgatagataccaattttataaatttttctatccagaaaaaagtcgatattgttagaggaatgatggactgtctactcgcaaaatgtaacccgttaatcacagattgtgtgatggcagagttagaaaaattgggccccaagtaccgtatcgccttgaaactggctcgagatcctagaataaagagactaagctgttcgcacaagggtacgtacgcggatgactgtttagtgcatcgagtcttacaacataagtgttacatcgtagctacaaacgatgccggcctgaaacaaagaattagaaaaatccctggaattcctttgatgagcgtaggcggtcacgcatacgtcattgaaaaattgccagatgtcttttaaactactgtgtattcactctttaagtatgtagtgc

SEQ ID NO: 488 - DNA, 2399 bp, Saccharomyces cerevisiae
tgaatcatctaaatatatttgtaaagtactcgaacatgagctctagagcattaaggagattacaagatgataatgctctgctagagtcgctgctatcgaattcaaatgcgaataaaatgacgagtggtaaaagtactgccggtaatattcagaaacgggagaacatcttctctatgatgaataacgtacgtgattcagataatagcactgatgaaggacaaatgtctgagcaggatgaagaagctgctgctgctggggagcgtgatactcaaagtaatggtcaacctaaaagaattacactagcatccaagtcttctagaaggaaaaagaataaaaaggcaaaaaggaagcaaaaaaaccataccgccgaggctgcaaaagacaagggttccgatgatgatgatgatgatgaagaattcgacaagattatccaacagttcaaaaaaactgatatattgaagtacggtaagactaaaaatgatgacactaatgaggaaggtttcttcacggcatctgaaccagaggaagcatctagccaaccttggaagtcatttttaagcttagaaagtgatccgggcttcacaaagttccccatttcatgtttgaggcattcttgcaaattttttcaaaatgatttcaagaaattggacccccatacggaattcaaacttttatttgacgatatatctccagagtctcttgaagatattgattcgatgacatccacacctgtctcccctcagcagctgaaacagattcagagactgaaaagattaattagaaactggggcggaaaagatcatagattggcacctaatggccccggaatgcacccgcaacatttgaagtttaccaagatcagagatgattggatcccaactcaaagaggtgagctctctatgaaacttttaagttctgatgatcttttagattggcaattatgggaaaggccgttagattggaaggatgttatccaaaacgatgtcagtcagtggcaaaaattcatttctttttataagttcgaacctttaaattccgacctgagcaagaaatcaatgatggacttctacttaagtgttattgttcaccctgatcatgaagcccttataaatttgatttcttctaaatttccgtatcatgtgcctggactgctacaagttgctttgatatttattaggcaaggtgatagatcaaacactaatggattgttacaaagagcactctttgtctttgatagagctttgaaagcaaatattattttcgattccttgaattgtcaactaccttatatatacttcttcaacagacagttttacttggcaatatttagatacatccaatctcttgctcaaagaggtgttataggaactgctagtgaatggacaaaagttctctggtcactgagcccattggaagatcctttaggatgcaggtatttcctcgatcactattttctattgaataatgactatcagtacattatagaattatccaactctccattaatgaactgttataaacagtggaatactttaggattttccttggcggtagtactaagcttcctaagaataaatgagatgagttccgcccgcaatgcgcttctaaaagcctttaagcatcatcctttacaactgtcagaacttttcaaggagaaactcttgggcgatcatgcgctaactaaagatttatccattgatggccattcggcagaaaacttggaattaaaggcatatatggcccgcttcccgttactttggaatagaaacgaagaggtaacatttttgcatgatgaaatgtcgagtattttacaggattaccatagaggaaacgttacaatcgattcaaatgatgggcaagatcacaataacattaacaacttgcaatcacctttctttattgcgggaatcccaattaacttattaagattcgccatactatctgaggagtcttctgtaatggctgcaattccatcatttatctggtctgataatgaagtatatgagtttgacgtattaccaccaatgcctacgtcaaaagaatcaatcgaagtggttgaaaacatcaaaacctttattaatgaaaaggatttagctgtccttcaggcagaaagaatgcaagatgaggacctgttgaatcaaattagacaaatatctttgcaacagtacattcatgaaaatgaagagtcaaatgaaaatgagggttaataagaaatgttgcagctcattttctagtacgcagagtaaggctaaagcacttatttgaatttaacgttattcattgcatagttcagaaagggtgtgatccaaaagaaaatgcatatacgagtggtccgacgtttacatatgtactagtgactgtatattaatatatgcacatttatgtagctacggatttca

SEQ ID NO: 489 - DNA, 1430 bp, Saccharomyces cerevisiae
aaaagcagaagcacgaaacaaggaggcaaaccactaaaaggatggccccaaatcaaagatcacgttcgcttctgcagagacatcgaggaaaggtactcatttcattgactggaatagctgctttatttaccacagggtcggtggtagtgtttttcgtgaagagatggttgtataaacagcagttacggattactgagcaacacttcatcaaagaacagatcaaaagaaggttcgagcagacacaggaagactcgttgtacacaatatacgagctacttcctgtatggagaatggttttgaatgaaaacgatttgaatttggacagcatcgttacccaattaaaggaccaaaagaaccagttgactagagcaaagtctagtgaaagcagagaaagttcgccgttaaaaagtaaagctgagttgtggaacgagttagaactaaagagtttgatcaagctggtgacagtgacgtacacagtatcgtcgctgattcttttaacaagactgcaactaaatatcctgacaagaaacgagtacctggactccgcaataaaattaaccatgcagcaggaaaactgcaacaaactacagaataggttctataactgggttacatcgtggtggagcgatccggaggacaaagcggatgatgcaatggtaatggcagcaaaaaagtcaaagaaagaaggccaggaagtgtatattaatgagcaagctttcctatcactatcatggtggattcttaacaaggggtggttgagttacaatgaaataattacaaatcaaatcgaaattgaatttgacggcatacacccaagagatactctaacgttagaagaatttagttctcgtctcacgaacatattccggaacacgaattcccaaatattccagcaaaataataataacctcacgtctattttgcttcctaaagattccagtggacaggagtttcttctgtcacagacgcttgacgcggatgctttaacaagttttcactctaacacactagtttttaatcaattggtgaatgaactgacccaatgtatcgaaagcacagcaacatccatagtgttagagtctctaataaatgaatcattccatttcataatgaacaaggtcggcataaagacaatagccaagaaaaaacctggccaagaagatcagcaacagtatcaaatggcagttttcgctatgtcgatgaaagactgttgccaagaaatgcttcaaacaactgccgggtcttcccatagcggcagcgtgaacgaatacctggccactctggattctgtgcagccgctcgatgatctgagcgccagcgtatacagcaactttggcgtctccagctcgttttccttcaagccttaatctctgaataagtactgacactcacaccagaatatatatatatatagcgtaatctttaataca

SEQ ID NO: 490 - DNA, 826 bp, Saccharomyces cerevisiae
cgttggcaaagatataacagaaaagacgttataaacaatacaggaatactaacaaacgtagcgcagatatggtgacttctaatgttgtcctagtgagtggtgagggtgaacgattcaccgtagacaagaaaatcgcggagagatccctgctattgaaaaactatctgaacgatatgcatgacagcaacctacaaaacaactcagattcagaatcagattcagactcggaaacgaaccacaaaagcaaagacaacaataacggtgacgacgacgatgaggatgacgacgagattgtgatgcccgtgcccaatgttcggtcttccgttttgcagaaggttatcgaatgggccgagcaccacagagactctaacttccctgacgaagatgacgacgattccagaaagagtgctcccgtggactcatgggacagagaattcctgaaagtggaccaagagatgctatacgaaattattctggcggcaaactacctcaacatcaagcccttgcttgacgctggctgcaaggtggttgctgaaatgatcaggggaaggtctcccgaggaaattagaagaacgtttaatatcgtcaacgacttcactccagaggaggaggctgccattaggcgtgaaaatgaatgggctgaagaccgttagcctacatttcctctgatgactgtgatcctttcttccgatgataatgcgccatttcagagcaagataggcaaaaataagcaaacaaggcttgctgtcatgcaatgtgtacgttagtccaccataaccaagcatgtatgaattatatatgtatacagtttacataaacttcaaac

SEQ ID NO: 491 - DNA, 4648 bp, Saccharomyces cerevisiae
aacactccgttttgaatcatatttgtgaaatatttggtctaaattttaagtcaagtttattttcttcgagcatttcaacaccagcttaaccctttgctttaaattattcatctaaaatagggtatattgattgctaatcacatataaatatatagaagcagcagctgtacagatatccctaaccaatgagggatgaagctactcgcaaaaaaaggtcatttagtgatggtcattttttcaagaaactgaaattgatgtcaaggaaaaagcaacctgttatggaaagaagtaagaccactcgtacaaggaaggaatctaccaattccgcagcaaaatcatccctatcattaagaagggccaacaatggcagaaagaccatcgctaagagaagagtactgaccgacataggctctactaatgaaggtgttgccggtaactctggttcaaactctcctgctcaatattctcatactcctcattttagtgattctatcccaccactgcctttagagctaccagatatcgtctcaataaggagtagtagaagtcatattagtaataagagtaataagaacaaacatggtatagacttgactttcatacctcgaagatcgctacaaaattctaaggctggcttgaagaaaccgaatacttctccacaaggttattttaatattccagtgactatagatagagcaagtgagaaagtcaaacatactgatactaaaaatacattcaattcttcgtcttctgagaatgaacgaccagttttgagcatcttacagaaggatgactctcaaagttcttcgcacccagctatcgattcaatgtcagcacccaataatattaacaacaataacgacattgagaattcttcaaacagtctatttgatactattctatcaattgctcatagtgccatatctcatgtccctaaaatttcagccttaaatactgagatacaacgtgaattttcgcattcaggtgaaagtcatacaggttcaactcgccatccttatttccatatccaccacgcgcagcagcaacatcccttgtcacagcaacaagggcccttacctgtttccgaaaatgctaaccaaaatcccaatgacacagtgctcattcattccccctccgctaacacagcccaccgcagttcatcatttttgcgtcatttagattatttactatcccccacttctggtccagcctctgataaacatactcaagtagaggaaggggatgacgaggaagagttatcgcctctttccaaagcatttctttcaccatcaactcaactggtacctacaaatacatcgactacgcccctttcaggttctttgacacctaacaatagaaacgtaaatgcaaactctaactctgaaaccgagaacgacaatgatagggatgatagatcaaatgttggcaaagtgaaatttcagcccttgaaagtacacgagcctgcaatctcaacctttggtaaaggcaacttaactttagaggcagtggcaggatcctctgatattgataatacaactattgatctggacgagaataataccaataataatccaaatgcaagttcaacaaacttgagtcatattagcaaaagtaacgtaaacaataatctcggtccaaaagaattaaacacaagttatcgtaatagtacctatatcgacatggcaaggtttgaaaattcacaatcgaacctttctagccatagggcaagaagtaagacactgcccgcgaacaaagcattagagaatgccgttggtgatgaaggtaatagtaaaagaaattcaagatattcttcttattcaaacgatatggcctttgatgatgccgacgaaagaaaattcagaagtatgtccaaaaaattcttaaacaggagatctttttcaccttcgaacttaggcaataaagtgatccctggaattaatttaagaaattcattcaacaaaaataggaatagtagttctgatttctttagtacaaatcagggacagcaaatgccaagaacaagtactgcgggctcaggtaatatccatgcaataatgggtttggattctggcaatgatgatttcaagttagaaggtattgaatatgcttcagaaaagaaaaacagcgaatttcatacccttttcaaggactgcgatattaatcctaacgaaaagttaattgtcgatcatagttgtgcactatctcgtgatattcttttacaaggaaggatgtatatatctgatgcacacattggatttttctcaaacattttgggatgggtcagtacagttttcattccgtttaaggaaatcgttcagattgagaaaaagactaccgccggaattttccccaatggtattgtaattgatacgttgcatacaaagtacatcttcgcctcttttatgtcaagggatgctacctttgatttaattacagatgtatggaatcagatcatcttaggtaaaaaatataggaatggcttcggtaataatgacgacggtacgataagcgattcgagcagtgcattttttgatgattccgatgacaatgacgacgatggagacctggatgacgatgaccctgatattaatagcacagatatgacatctagtgacgatattgatgctgatgttttcaatgaatcaaatgatcttggtaaaaaccaaaaatctacgaactacttattgggtcccaataaacactctccaaccactgctgatttcaaaccttccaataatgatcatttggttattgaagcaaatattaatgcaccattaggaaaagtagtaaatcttttatacggtgaagacgtctcttactatgaaaggatccttaaagctcagaaaaattttgaaatatcgccaatccctaacaatttcctcacaaagaaaattcgtgactatgcatatacgaaaccgttatcaggcagcattggtccaagtaaaacaaaatgtttgatcacagatactttagagcattatgatttggaagactatgttaaagtgctcagtattaccaagaacccggatgttccttcagggaatatcttttcagtgaaaactgttttccttttctcttgggataaaaacaactccaccaaattaacagtttacaattctgttgattggactggtaaaagttggatcaaaagtatgattgaaaagggaacatttgatggtgttgcggacaccacaaagataatgatatctgaaattaagaaaatcttaagtgatgaagactcaaacataaactcaaagcatcaagccagcaataatgaatcagaagaagaaattattaatctgccaactattggacctccagttcatgatccgacggaacctgattttcaaaaaggaaaagacgatacagttatcgatgaaaaaattaatataccagttcctttaggaacagtgttttcactattgtatggtgatgacacatcatatattaagaaaatcatcgaaaaccagaataactttaatgtttgtgatattccaaagtttgtgaataacgcaagagagatcacctataccaaaaaattgaacaattcattcggtccgaagcaaactaaatgtatagtcacagagaccatcgagcatatggatttgaacagtttttttatggtaaaacaaatagtcagatctccggatgttccttacggtagttcattttcagtacatacgagatttttctattcctggggtgatcacaacacaacgaacatgaaagttgtcaccaatgttgtctggacaggtaaatcaatgctgaaaggaaccattgagaaaggttcaattgatggacaaagaagttcaacaaagcaactcgtagatgatctcaaaaaaataatttctaatgctagttcaacgaagaaaaaatcgaggagaagaggaaagacggtaaataaaaggaaatcatcaccatccactatcaagaatgagaagaatgaagaaaacttcgaagatacaagtaccaaaaattcatttttttccgctttctcaatgttacaacaagtaaacataacatccgttcaaggaattatgacaattatctctttttttatttgcttgattttcttctttagattattattccattctaagaatacttcgaacatccagattattactccaggaacaatcttaattaatggaaatgaatataattacgttcctaattttaaaacactctatcatgtttacgaagataatattataaaagatgcccgccgtaaagactcgaataaaaataacatagtcaccgatacggagggtctcatatgggactggttgatagatcgtggaaatggaaccgttcaaaatagtgtcttgtccaatcatattaaggagagtaataacaagaaggttaagctcgtaaatggagttagtgatcataaaatacagcagctagttgaatctataaaaatcaccgaattgcagctgcaagaaatgaaagaattattggcccaaacggataacacgtcggctactaaccaattactttgataaaataacatttttcgttctaatatagtcaagtaggaaaattctactcgactttattttgttcttttgatcttatttcttttactttaattatatataggatattttcttaggataattgtaataaaatgcattaatagttttat

SEQ ID NO: 492 - DNA, 2331 bp, Saccharomyces cerevisiae
atgagctcatcgctactttcagttttaaaagaaaagtcaagaagcctgaaaatacgaaacaaaccggtgaagatgaccagtcaggaaaggatgatagtgcatagatgcagatttgtggatttcactcctgccacaatcacatctctagcattttcacataaatcaaatataaataagttaactccgtccgatttgagattagctattggtagatctaatggtaacatagaaatctggaatcctagaaacaattggtttcaggaaatggttatcgaaggtggcaaagacagatcaattgaaggcctttgctggagcaacgttaacggcgagtctctaaggctattttctattggcggctcgactgtggtaacagaatgggatttagcaacaggtttaccattaagaaactatgattgcaattcaggtgtgatatggtctatttccatcaacgattcacaagacaagctgtctgtgggttgcgataatgggacggtggtcctcatagatatctctggcgggcctggtgtcttggaacacgatactattttgatgagacaagaagccagagtattgactttggcttggaaaaaggatgacttcgtgattggtggttgttctgatggtagaataaggatttggtctgcacaaaaaaatgacgaaaacatgggtcgtctattacacactatgaaggtcgacaaggccaaaaaagaatcaactctagtttggtcagttatatatttaccaagaactgatcagattgcctctggtgattctacaggctccattaaattctgggatttccagtttgccacgctaaaccagtcatttaaggcgcacgatgcagacgtactgtgtctaactaccgatactgataataattatgtttttagtgctggtgtggacagaaaaatctttcaattttctcaaaacactaacaaatctcaaaagaacaacagatgggtaaattcttctaataggttgcttcatggaaacgacattagagcaatatgtgcataccaatctaaaggtgcagattttctagtttcaggaggtgttgaaaaaacactagtcatcaactcacttacttctttttctaatggaaactacaggaagatgccaactgtcgaaccttattcaaagaatgttttagttaacaaagagcaacgccttgttgtttcatggagcgaatctactgttaagatatggacaatgggaaccgattctagtacagaacagaattataagctagtttgcaagttaactttaaaagatgaccagaatatctcaacttgttctttatcacctgatggacaagttttagtcgtagggaggccctctaccactaaagtttttcatttacagcccgtaggtaataaattgaaagtgactaaactagataatgacctattattgagaacttccacaaaattagtcaagttcatcgataattccaaaattgtcatatgctcttgcgaagatgatgtatttattgtggatctagaatctgaagaagatgaaaaaccgcaagaagttgaacttttggaggttacttcaactaagagcagtatcaaagttccctatattaacaggatcaaccatttggaagtagaccagaacattgcagtaatttctcgtggctgtggagtcgtagacatattagacttaaaagcaaggatttctaaaccacttgctcgtttgaataatttcatcaccgctgttcatatcaatacttctagaaaatctgtagtagtaattactgcagacaataagatttatgaattcaatatgaatttgaattcggaagccgagaatgaagatagcgaaagcgtattaactcaatggtcaaaaaacaatacggataacttaccaaaagaatggaagacattaaaagagaactgtgtagggatattttcagacatagaaaatagtagcagattatggttttggggggctacttggatatcaagaatagactttgatgttgacttccctataaataagagaagaaaacagaaaaaacgtacacacgaagggctaactatcacagatgaaagtaatttcatgaacgacgaggaagatgacgaagatgacgatattgatatggaaatcagcgaaaacttgaatgtattattaaaccaaggaaacaaaataaagtccacagatgtacaaagaaacgaagaaagctccggtcacttcttctttactgataaatataaacctttactgtttgttgacttaatttctagtaatgaattggcaataattgaaagaaatccattaacttttcactccaaacaaaaggcgtttattcaaccaaagttagtgttttga

SEQ ID NO: 493 - DNA, 508 bp, Saccharomyces cerevisiae
acgtatataggaactagctgagtgagttaaaggatgtcgacagttaatgttttgagatactctgcgttgggtttggggctattttttggttttagaaatgatatgattttgaagtgtaatgctaagaagaaagaggagcaggcacagtacgaggagaaattgaagctggtagaggaggcaaagaaggaatacgccaagctacaccctgtagtaactcctaaagatgtgcctgcgaacgcctcatttaatttggaagatcctaatatagattttgaaagagttattcttaacgccgttgaatccctgaaggaagcttcaacataaatagaagcttcaacataaataggatactaaaaatgcacattagctcgcactgaatgacgaagttatgatggattctcgttcgctagatgttccatatttttttcttcattcgttagtgcacaaacaataaggaaaaaaatgaaatgtatatattctagaacatactaatatcatacgtatcgta

SEQ ID NO: 494 - DNA, 273 bp, Saccharomyces cerevisiae
atggagaaccctcatgaacaagtgcaggctaacatactttcgcgaataattggtaatgtcaaaaggctcaatgagagcgtggcaattcttaaccaggagcttgtgaccattaataatcggaacaaaaatctagaaatcatgggcgcaatttgtgataactaccatagtagcgtccaattcaacctggaagcgaccaataacaagaagccacctctttaattcaccaattttctatatacgcatactcatatacacatatatatatgctatacc

SEQ ID NO: 495 - DNA, 1015 bp, Saccharomyces cerevisiae
aagtggcacccaatttgattaatatgaaaaacaatctgcaaaaaaaaaaaaaaaattcaaaatatcacaatgttaaaacacaatagaaatagggcattgtattaaaaccactgaacgactaaaaattgaaaaagattatgatacgtcagctcaattattggtcaaggaaggcgtatctcatttacccctttcaagtttttgtaggcgcattattatcaatagtagtatcttcagaaacattaaaccatcaaaaagagacatgcgctctattgaaatcgtccaatattttcaatgttatttttgcatacaaagcgaaccaactgtggccatttttattctttagtttggcttttctgcaaatatacttccactatctagcaagaatggatatattgcctttaccaatatcaagtaccgaaactagctcttcctatttaacatatactaaccattggcctctgctcaaaaatagaataatcagtattatgatcactcaatatgcttgcaagttcgttctaaaatatctattattgtttttgaatttccaatttatcgatcatgttttcatttggacagggggagaatgcagttctggtagtaaaacgacatcagctgaaaagtgccgtctagaaaatgggaaatgggatggtgggtttgacattagtggacacttctgctttcttgtgagtataagcatgattctttggatggaacttcacttattcagtagatttgttcaagctgaagatatgttttgggttgtgaataagtgggtacgagcttgccttgccattgtttgcgctgtcctagtaatttggatatgtattctctgggttaccgctatttattatcatactatcttggaaaaagtgttaggttgccttatgggtttcatatgccctgttttcatataccacattctacccaaaattgggatactacacaattacttatatctatgataaacagagaaaattagctctatcctctttctataaagtatatttttgttaac

SEQ ID NO: 496 - DNA, 1221 bp, Saccharomyces cerevisiae
taacactaacaaaaggaatacctgacagaatacgctatcaaaagaacgaatatgactagtgcaagtattaccaatactggaaacgaaaccatgaaccttccacagatgcggtcgatttggctggatgaagatgaagaagctgaaaaactctacggtctgcaggcccagcaattcatgggatctgatgatgaagaaaacctaggcattactttcatcaacagcgataaacctgtgctgagtaacaagaaaaacattgagttgcctccactttcaccaaattcacatccgtcttgccaccacaggagaagtaattctaactctgcaaagtctaaagaatcatcgtcatcatcgtccagcgccaacaagacaaatcacaaaaaggttttccttaagcttaatttgttgaagaaaaagttgcttggtgcccaaccggacataagaggtaaaggtatctccacaccatttgattttcaacatatttcacatgctgacactagaaatggattccaagatgagcaattgcaggaaccttcatcgctgtccacagagattaaggacgactatacctcctcctcaagcaagcgggattcgaaatcactaaataaagcttttgtcactgaaaggatccctgctaatcgtgaaagcaaactcatttcaagatcgcacgaaaataagacatcaagactatcagtcgcgcgttcgatctcagtaacgtcctccaattactctaaaaacacacaaggaaacaatcattccattaatgggagagtcgtatctacgtcaactatggctacatctatttttgagtattccccaaacgcatctccaaaacaatttaaaaataagtcacacgctctgggtcatagatacactaattccacggattctagtgagtcttcgctggattttttgaagaactacaacttccccacactacttgaagataagcctattttagacttcttgcctcgttctcagaggtcaagcgcttatcgtagccttttagagaccccaaactcaaataaggactcagcaaaagccttctttccttcacgccaaagccctcttcccaagagaagaaactctatagctacgccttctccacaatctaaattttcctactctgactcccctgtaaaccatagaaaatctttcgatgatgttctttattctttcaaccagctcgagcccctgcaaacttaagctaaggacagaaaatga

SEQ ID NO: 497 - DNA, 767 bp, Saccharomyces cerevisiae
ctttcaattcaataaacaaaaggcacagcgatatccgcaattatgaagcttcaatttttttcctttattaccttatttgcttgtctcttcacaacagccatttttgcgaaagaggacacggcagaagatcctgagatcacacacaaggtctactttgacattaatcacggtgataaacaaattggtagaattgttatgggattgtatggtctcaccacaccccaaaccgttgaaaacttttaccagttgaccatttccagggaccctaagatgggttatttgaactctatcttccatcgcgttattcctaacttcatgattcaaggtggcgatttcactcacagatcaggtattgggggtaagtctatcttcggaaacacgttcaaagatgagaattttgatgtcaaacatgacaaaccaggcagattgtctatggccaatcgtggtaaaaacaccaacggatcccaatttttcatcaccaccgtcccatgcccatggttggacggtaagcacgttgtctttggagaagtcttggatggtatggacgtagttcactacattgaaaacgttaagaccgacagtagaaatatgcctgtaaaggaagttattattgtggaaagtggtgaactggaaactgttcctttggacaataaagacgccgccaagctacaggaagagatcaaagcggaagctagcgaagcagcccacgatgaactctaaactgcatcactattcaggagatgtataggccagctatgtaactatat

SEQ ID NO: 498 - DNA, 1537 bp, Saccharomyces cerevisiae
attacatcagcgaactaatgctttctcgatgaattattcatccatcaaaacggtctttcaagattaatgtctagttgcttcaaagataggcatagtttaggtcattttatcagctactgtaatatagtcataagaacgcgaaaatgaaggatgctaatgagagtaaatcgtatactatagtgatcaaattaggctcttcatcgctagtagatgaaaaaaccaaagaacctaagttagctatcatgtcgcttattgtcgaaactgtagtcaaattgagaagaatgggacacaaagttatcatcgtgtccagtggtggtattgctgttggtttgaggactatgcgtatgaataaaagaccaaaacatttagcagaagttcaggccatcgcagctattgggcagggtagattgatcgggagatgggatcttctgttttcgcaatttgatcaacgtatcgctcaaattctattgaccagaaatgatattctggactggacccaatataagaacgctcaaaacacaattaatgaattgttgaacatgggcgttattcccattgtgaatgaaaacgacacactatctgttagagaaatcaaatttggtgacaatgacactttatcagcaattacttctgctttaatccatgcagattatcttttcttactgacagatgttgactgtttgtatactgataatccaaggacaaacccagatgccatgccgatcttagttgtcccagatctctcaaagggtttgcccggtgtgaatactgctggtggttcaggttctgacgttgggaccggtggtatggaaactaaattggttgctgcagatttggcaacgaatgccggtgttcatacgttgatcatgaaaagcgatacacctgcgaatataggtagaattgtcgagtatatgcaaactctagaacttgacgatgaaaataaagttaaacaagcatataatggcgatttaacggatttgcaaaaaagagaatttgagaaattaaaggctcttaacgttccactacatacgaagttcattgctaatgataataaacaccatctaaagaatagagagttttggattttacacggtcttgtctctaaaggcgctgttgttatagaccaaggtgcgtacgcagccttaacaaggaaaaataaggcgggattattgccagcaggtgttattgatgttcagggcactttccatgagttagaatgtgttgacataaaagttggtaaaaagttaccagatggcacgttagatccagattttcccttgcaaacagtaggcaaggcaagatgcaattacacgagttctgaattaactaaaattaaaggtttgcacagtgaccaaatcgaagaggaattgggctataatgacagcgaatatgtcgctcatagagaaaatttggcattcccacctcgttgaaacgaactaaaaagttatagaggattcccttaatgatatttcttatataaaacactacctttatatttccaggttaaataatgacacattaagcatgttttgttttt

SEQ ID NO: 499 - DNA, 928 bp, Saccharomyces cerevisiae
agtttttatctcattgaaaacaaaattcagtcaacttggaaatttaagcaggctactgtggcattgagatatttttccgcagagtaagaaccgattagcaagttaccgcattatttttaaaccgtggacaatcatgtttaatagagtctttaccaggtcatttgcatcaagcttaagagctgctgcttccaaagctgctgctcccccaccggtgagattgttcggtgttgagggcacttacgcaacagctttatatcaggccgctgcaaagaactcctctattgatgctgcctttcaatctttgcaaaaagttgaaagcacagtcaaaaagaatccaaaattaggtcacttattactgaatcctgcattgtcattgaaggacagaaattctgtcattgatgccatcgtggagactcacaagaatttggatggttatgtcgttaacctattgaaggttctttccgaaaataacagactgggatgttttgaaaaaattgcgtctgactttggcgttttaaacgatgctcacaacgggttacttaaaggtacagtgactagtgctgaaccattggatcctaaatctttcaagaggattgaaaaagctttgagcgcctccaaattggtggggcaaggtaaatctttgaagctggaaaacgtggttaagccagagattaagggtggtttgattgtagaacttggtgacaagactgttgacttaagcatttctacaaagattcaaaaactgaataaggtcttagaggacagcatttaacgttaataatatagttggatatgctcaactcgtttgatgttactttctttgcctccctcctaatttttgattctgttcaaatatatattcttttccgtgaatttttcctaaacatcaaaattacgtacatatacgaataaataagaaacccctcta

SEQ ID NO: 500 - DNA, 1839 bp, Saccharomyces cerevisiae
ggctagcttctgtaaagggatttttccatctaatacaatgagtggagtatcaaataaaacagtatcaattaatggttggtatggcatgccaattcatttactaagggaagaaggcgactttgcccagtttatgattctaaccatcaacgaattaaaaatagccatacatggttacctcagaaataccccatggtacaacatgttgaaggattatttgtttgtgatcttttgttacaagctaataagtaattttttttatctgttgaaagtttatgggccggtgaggttagcagtgagaacatacgagcatagttccagaagattgtttcgttggttattggactcaccatttttgaggggtaccgtagaaaaggaagtcacaaaggtcaaacaatcgatcgaagacgaactaattagatcggactctcagttaatgaatttcccacagttgccatccaatgggatacctcaggatgatgttattgaagagctaaataaattgaacgacttgataccacatacccaatggaaggaaggaaaggtctctggtgccgtttaccacggtggtgatgatttgatccacttacaaacaatcgcatacgaaaaatattgcgttgccaatcaattacatcccgatgtctttcctgccgtacgtaaaatggaatccgaagtggtttctatggttttaagaatgtttaatgccccttctgatacaggttgtggtaccacaacttcaggtggtacagaatccttgcttttagcatgtctgagcgctaaaatgtatgcccttcatcatcgtggaatcaccgaaccagaaataattgctcccgtaactgcacatgctgggtttgacaaagctgcttattactttggcatgaagctacgccacgtggagctagatccaacgacatatcaagtggacctgggaaaagtgaaaaaattcatcaataagaacacaattttactggtcggttccgctccaaactttcctcatggtattgccgatgatattgaaggattgggtaaaatagcacaaaaatataaacttcctttacacgtcgacagttgtctaggttcctttattgtttcatttatggaaaaggctggttacaaaaatctgccattacttgactttagagtcccgggagtcacctcaatatcatgtgacactcataaatatggatttgcaccaaaaggctcgtcagttataatgtatagaaacagcgacttacgaatgcatcagtattacgtaaatcctgcttggactggcgggttatatggctctcctacattagcagggtccaggcctggtgctattgtcgtaggttgttgggccactatggtcaacatgggtgaaaatgggtacattgagtcgtgccaagaaatagtcggtgcagcaatgaagtttaaaaaatacatccaggaaaacattccagacctgaatataatgggcaaccctagatattcagtcatttcattttcttcaaagaccttgaacatacacgaactatctgacaggttgtccaagaaaggctggcatttcaatgccctacaaaagccggttgcactacacatggccttcacgagattgagcgctcatgttgtggatgagatctgcgacattttacgtactaccgtgcaagagttgaagagcgaatcaaattctaaaccatccccagacggaactagcgctctatatggtgtcgccgggagcgttaaaactgctggcgttgcagacaaattgattgtgggattcctagacgcattatacaagttgggtccaggagaggataccgccaccaagtagctatatagaatcaaatctcatacataatttaa

SEQ ID NO: 501 - DNA, 4253 bp, Saccharomyces cerevisiae
catagccactattctaaaagaaacaactttttttcaaagggaaatctaagttgcctgcacgaagaataagacaagggttcataaacgtatagtatttgccaagttccatctttttctttgtcactttaatatcgcaaaacagaacaccaaaaacctttcagcgcaaagatttggcccaattattccatctttatacactatgtctaaaaatagcaacgttaacaacaatagatcccaagagccaaataacatgtttgtgcaaaccacaggaggtggtaaaaacgccccaaagcagattcatgttgcacacagacgttcccaaagtgagttgacaaatttgatgattgaacaattcactttgcagaagcagttggagcaagttcaagcacagcagcaacagttgatggctcagcaacagcaattggcacaacagacaggacaatacctgtcaggaaattctggctctaacaatcatttcacgcctcaaccgcctcaccctcattacaactcaaacggtaattcacctggtatgagtgcaggtggcagcagaagtagaactcactccaggaacaactccggatattatcataattcatatgataacaataacaatagcaataatcctgggtctaactcacacagaaagacgagttcacaatccagcatatatggccattccagaagacattctttaggtctaaatgaagcgaaaaaggctgctgcggaagaacaagctaaaagaatatctgggggtgaagcaggcgtaactgtgaagatagattctgttcaagctgatagtggctcaaattctactacagaacaatctgattttaaatttccaccaccaccaaatgctcatcagggccatcgtcgcgcaacttcaaacctatcacctccctctttcaaatttcctccaaactctcacggggataatgacgatgaattcatagcaacctcttcaacgcaccgccgttcaaagacaagaaacaatgaatattctccaggcattaattccaactggagaaaccaatcacagcaacctcaacagcagctttctccattccgccacagaggatctaattcaagggattacaattccttcaataccttagaacctcctgcgatatttcagcagggacacaaacatcgtgcctctaattcatcagttcatagtttcagttcacaaggtaataataacggaggtggacgtaagtccctatttgcaccctaccttccccaagccaacattccagagctaatccaagaagggagactagtagctggtatattaagagttaataaaaagaatagatcggatgcctgggtctctacagatggcgctcttgatgcggatatttacatttgcggctccaaagatcgtaatagagcacttgaaggtgatttagtcgcggtagaactattagttgtggacgatgtttgggagtccaagaaagaaaaggaagaaaagaagaggagaaaggatgcctctatgcaacacgatctaattcctttgaacagtagtgacgattaccacaacgatgcatctgttactgctgcaacaagcaacaattttctatcttctccctcctcgtctgattcgctaagcaaggatgatttatccgtcagaagaaagaggtcatctactatcaataatgatagtgattccttatcatctcctaccaaatcaggagtaaggagaagaagttcattgaaacaacgtccaactcaaaagaaaaatgacgatgttgaagttgaaggtcagtcattgttattagttgaagaagaagaaatcaacgataaatataagccactttacgcaggccatgtcgttgctgttttggaccgtatccctggtcagttatttagcggtacattaggtttgttgagaccatcccaacaagctaatagcgacaataacaaaccaccacaaagcccaaaaattgcttggttcaagcctactgataagaaggtgccattaattgcaattcctacagaattagctccaaaggactttgttgaaaacgctgataaatactccgaaaagttattcgttgcctctattaaacgttggccaatcacatctttgcatccatttggtattttagtttccgaacttggagatattcacgatcctgatactgaaattgattccattttaagggataacaattttctttcgaatgaatatttggatcaaaaaaatccgcaaaaagaaaaaccaagttttcagccgctaccattaacggctgaaagtctagaatataggaggaattttacggacactaatgagtacaatatctttgcaatttccgagcttggatgggtgtctgaatttgccttacatgtcaggaataacggaaatggtaccctagagctgggttgtcatgttgttgatgtgaccagccatattgaagaaggctcctctgttgataggcgtgcgagaaagaggtcctctgcggtgttcatgccacaaaaacttgtcaatttattaccacaatcgttcaacgacgaactgtcgttggcccctggcaaggaatcagccacgctgtcggttgtttacactctagactcatctactttaaggattaaatctacttgggtaggcgaatctacaatttccccctcaaacatcttgtctttagaacaattagacgaaaaattatctactggaagtcccactagctacctctctactgtacaggaaattgctagatcattttatgctagaagaataaatgatccagaagctacattacttcccaccctgtccttattggaaagcttggatgacgaaaaagttaaggttgacttgaacatcctggatagaactttaggctttgttgtaattaatgagattaaaagaaaggtcaactccactgttgcagagaaaatttacaccaaacttggtgatctagctcttttgagaaggcagatgcaacccattgcaaccaagatggcgtcatttagaaagaaaattcaaaattttggttacaattttgataccaatacggcggatgaattaatcaaaggggtgctaaaaattaaagatgacgatgttagagtcggaattgaaattttactgtttaaaaccatgccaagagctagatactttattgctggcaaagtagacccggaccaatatgggcattatgccttgaacctacctatctacacacatttcacagcgccaatgagaagatacgctgatcatgtcgttcataggcaattaaaggccgttatccacgatactccatacaccgaagatatggaagctttgaagattacctccgaatattgtaattttaaaaaggactgtgcttatcaagcacaggaacaagcaattcatctattgttgtgtaaaacaatcaacgacatgggaaatactacaggacaattattaacaatggctactgtcttacaagtttacgagtcctcctttgatgtatttattccagaatttggtattgaaaagagagttcatggagatcaactacctttgatcaaagctgagtttgatggtaccaatcgtgtcttggaattgcattggcagcccggcgtagatagtgcaacttttataccagcagatgaaaaaaatccaaaatcctatagaaattccattaagaacaaattcagatccacagccgctgagattgcgaatattgaactagataaagaagcggaatctgaaccattgatcagcgatccattgagtaaggaactcagcgatttgcatctaacagtaccaaatttaaggctaccatctgcaagcgacaacaagcaaaatgctttagaaaaattcatttctactactgaaaccagaattgaaaatgataactatatacaagaaatacatgaattgcaaaagattcctattctattgagagctgaggtggggatggctttgccatgtttaaccgtccgtgcattaaatccattcatgaagagggtataatctcttctaccaatatcgtcattgctgtttttcttgtttttcactttcgttctttggattgtgcttcacccctcagtatcccttccctttgtttttatttcctgcgaacattaacaactgcatgaattttgtacttctccttttaatccacgttccggtaaggcatcatccaaatttttttattcgacctcgttaagtcatatattttttcccaaaaatacataaaacaataatgcagccttcttttcaatatttacaacttttcaatttatattgtcttttgttatttatactcttatat

SEQ ID NO: 502 - DNA, 2045 bp, Saccharomyces cerevisiae
agcgtttaatctgtagccaaagatttgtggtattctcacagtttgaataatattcagctacttcatcaagtagtttttttcaataggagattcacggttcaataagtgcattgattatgttcgaccaattagcagtctttacccctcaaggtcaagtactttaccaatataactgtttaggaaaaaagttttctgaaatacaaattaacagctttatatcccagctgattacttccccagtaactagaaaagaaagtgttgcaaacgcaaatacagacggatttgatttcaatcttttaacaatcaacagcgaacacaaaaattctccttcatttaatgcactattttatttgaataagcaaccagaattgtatttcgtagtgacttttgccgagcagactttagagcttaatcaagaaactcaacaaacacttgcactggtgttaaaactctggaactcattgcatttaagtgaatccattctaaaaaatcgtcagggccaaaacgaaaagaacaagcataactacgtcgatattcttcagggaattgaagacgacctgaagaaatttgagcaatattttaggataaaatatgaagagtcaataaaacaagaccatatcaatccagataattttaccaaaaatggatcagtaccccaatcgcataataaaaataccaagaaaaaattgagggatacaaaaggtaagaagcaatctacaggaaatgttggtagtgggagaaagtggggccgtgatggtggcatgcttgatgaaatgaatcatgaagatgcagccaaattagatttctcatcatccaacagccacaatagtagccaagtagctctagactccactattaataaagattcttttggggatagaacagaaggaggcgatttcttaatcaaagaaattgatgatcttttgtcttctcataaagacgagataactagtgggaacgaagctaaaaattctggatacgtcagtacagcttttggattccttcaaaaacacgttctaggtaacaaaacgatcaatgaaagtgatttgaaatctgtattagagaagttaacacaacaattgataaccaaaaatgtagcaccagaggcagcagactatttaacacagcaagtctcacatgatcttgtaggctcaaaaactgcaaattggaccagtgttgagaatactgctcgtgaatctttaacaaaagcattaactcaaatattaacgcctggtgtatccgttgatctcctccgtgaaattcagagcaaaagaagcaaaaaggatgaagaaggtaaatgtgatccctatgtgttctctatagttggtgttaatggtgttggtaagtcaacaaatctttcaaagctagcgttttggttactgcaaaataatttcaaggtcttaattgttgcttgtgatacgtttaggtctggtgcagttgagcaactaagggtccatgttgaaaatttggcacagctaatggatgattcacacgttcgtggctccaagaacaaaaggggtaaaactggtaatgactacgttgaactatttgaagctggttatggtggatctgacttggtaaccaaaattgcaaagcaagccatcaaatattctcgtgatcaaaacttcgatatagtgttaatggatactgccgggagaaggcataatgatcctactttaatgtcgccattgaagtctttcgctgaccaagccaagccagataaaatcattatggttggagaggctttagtaggtactgattctgtccagcaagccaaaaattttaatgatgccttcggaaagggaagaaatcttgacttctttattatctccaagtgtgacacagttggtgaaatgctgggtactatggtaaatatggtttatgctacggggattcctatcttattcgttggcgtgggacaaacctataccgatttgaggacattaagcgtaaaatgggctgttaatacattaatgtcttaaaaactgtaatatcatagtatatatatatataccacagacaatgttattcaacaataataaagt

SEQ ID NO: 503 - DNA, 469 bp, Saccharomyces cerevisiae
ttattcagtaagacataaaacttaaggaacatatcaccatgttgagagcgttccgctgttctatacatacttcgagggtattgttacatgatgctggagtgaaattaactttcttctcaaagcctaattgtgggttatgcgatcaagcaaaggaagtgatagatgatgtatttgaaagaaaggaatttcataataaagcagtttcactagagatagtcaacataactgaccgaagaaacgcaaaatggtggaaggaatattgcttcgacataccagtacttcatattgagaaagttggtgatcctaagtcgtgcaccaagatcctgcactttcttgaagaagacgatatcagtgataaaataaggagaatgcaatctagatgacctcttttgtttttactagagttacaacactgtaaatatttataagctatgaataagtatatacctcaaaaaactatatctacgct

SEQ ID NO: 504 - DNA, 1200 bp, Saccharomyces cerevisiae
cacgactaacttttttgtattttagaaataatttgtcgatcggttgtatatttttgtcatatattatctagaaacgttagggaataaactgttatctagggtccactaacatacgcgcagttcggaaatcagcaaacatcacttaaaggacacctgctataaactgaattgtgtccaatttttcgagtagttagcagttcaataaagggcacgttatcaattgttaaaggcaaagaatcagaattaaatcatagcaaacgaccaaaatgaacagagtttcgtttattaaaacgcctttcaacataggggcgaaatggagattagaagatgtctttttgctcattatcatgatacttcttaactacccagtgtattaccaacaaccgttcgaacgtcagttttacattaacgatctcactatatcgcatccttatgcgacaactgaacgtgtaaataacaacatgttgtttgtttatagttttgtcgtgccatctttaaccatattgataattggttccattttggccgatagaagacatttgatttttattttgtacacatctctccttggtttatcactcgcttggttcagtacgagtttctttacaaacttcatcaagaattggattggaagactaagaccagattttctagatcgttgccaacctgttgaaggcttgccattggacactttatttactgcaaaagatgtgtgtacgactaagaatcacgaacgtctgttggatgggtttaggacaactccgtcaggtcattcaagtgaaagctttgcaggactgggttatttgtacttctggctatgtgggcaacttttgactgaatcaccgttgatgcctttatggagaaaaatggtggcctttctaccactgttaggagctgcactaattgctctatccagaactcaagattacagacatcatttcgtcgatgtaattttagggtctatgttgggttatataatggcacactttttctacagaagaatcttcccacccattgatgatcctcttccgttcaaaccattgatggacgattcagatgtcaccctggaggaagcagtcacccatcagaggatcccggatgaggaattacatcctttgtccgatgaaggtatgtaagaataaaaaagaatatatactccacatgacatacgaaatatacgtatttattgttctgtatgga

SEQ ID NO: 505 - DNA, 466 bp, Saccharomyces cerevisiae
aaaaaaaaacgacagcaattgtttttcaacctgacaccaagatggaagatacctcgaggtgcatcgatgatgtactgaaaataggacaacaggagaaggaaataagacaggcagagttttctgacgcacaaggggagagagaggaggttaagtgtattgattacacagtagatttggaagcaggtcttccgcgccacgagagtagtggaaaaagtaataccctcaaacagtgttataacgccgttctagggtttctcgaggaactcatcatcgtcattattattgtgttgctgttgtacagtttgacaatggtaggtcttttttatgtgatgacgatgacgaagtttttgttttaataataagaataatgggatttgttttctttcaagatttttcttttggatagtacatgccttcagaaattaagcagggaggcaaaagataatattttctcatatgcatttat

SEQ ID NO: 506 - DNA, 418 bp, Saccharomyces cerevisiae
taatacaattgattatacattttgaactaaacagcacagcacaatacaacaatggattctgccaagatcattaacattatattatcccttttcttaccaccagtcgccgtttttctagcccgtgggtggggtactgactgtatagtggatatcattttgaccattttggcttggttcccaggtatgctatatgccttgtacattgtcctacaagattaagctcattcaataaacgaaagtaactatcaaatgaaataaggaagcagtattaggaaacggtatcaacatgttcgggtcaccctcatttttatttgtttcctttctttttttttgtttctctttctcttaaggtttcctcccccgctgttaattttaactacgtgtgtattttttaataattaattttatcacaaaaaaa

SEQ ID NO: 507 - DNA, 1179 bp, Saccharomyces cerevisiae
tataccacgacattttaatagttcaattggtttacttatttggtaatggcgtctatcaatctgattaagtctttgaaactttacaaggaaaagatatggtcttttgacttttctcaaggtatattagcaacaggttcaactgatcgaaaaattaagctagttagcgtgaaatatgacgattttacgttaattgatgtgctagatgagactgctcataaaaaggcgattcgatctgtggcgtggagacctcacacttcgctgttagcggctggctcttttgattccactgtatctatctgggctaaggaagaatctgctgacagaactttcgagatggacctgctagctattatcgaaggtcacgaaaatgaagtaaaaggtgtagcgtggtcgaatgatggatattacctagcaacctgttccagagataaaagcgtgtggatatgggaaacagatgaaagtggcgaggaatatgagtgtattagtgttttgcaagaacattcacaagacgttaaacatgttatatggcatccatctgaagcattactggcttcaagttcttatgatgacaccgtcaggatatggaaagactatgacgatgactgggaatgtgttgctgtcttaaatggccatgaaggaactgtttggtcttctgattttgacaagactgagggcgtgtttagactgtgcagtggaagcgacgattccactgtacgggtatggaaatacatgggtgacgacgaggatgatcaacaagaatgggtttgtgaagctattctcccggatgtacacaaaagacaggtatacaatgttgcatggggctttaatggcctcattgctagtgtaggagcggatggagtactagcggtctatgaagaagtagacggagaatggaaagtttttgctaaacgtgcattatgtcatggagtttatgaaatcaacgttgtgaagtggttggagttaaatggtaaaactatacttgcaacaggcggtgacgacgggatcgtaaatttctggtctctagaaaaagcagcgtagatgtagaagcaagagtacaattcaggaactcatattaacacagtgatcgatctgaattctaaaaataaacttaatgacgatttttctacctagttacataaacctttgtatcactataacgcaattctgtcatgtgtgacg

SEQ ID NO: 508 - DNA, 2235 bp, Saccharomyces cerevisiae
tacactgaaagtttcatactcgcggtcactcttaataatagctatattttctgattttctcttaagattttgaaaagggcatctgaacgactgcccactcagccatattcaacaaatcgtcgagcgcatacctagctgaaaaagatccataaagtgcattttgatacagtctctttcgtcgaaaaaatagtggctatacttcttttcaagaattaggatgagcgaatcagtgaaagaaaacgttactccgacacgtaacttccgtcgtactcaagggccccaaaataatacaaaacctcacaacgacaggaagaatttcagaagaaagcaaaagaaaaataacctttctgctgaacccaacctcaccacttcaagcgcagatgatactgatgaagaaaatgaattatgtgtaatttgtgcgcgcaagttaacatacgtatctctaacaccatgccatcataagacatgccatatctgtggtttcagacaacgagctttgtacaacaagaaaagctgtttgatttgcagaacggagaatgaagaagtcatgtttaccgatcgcatagatggtgatatttcagataaatataacttttgcgaaaaaaatgaaaaatatggaataaatttcactagcgaagaggttgctaccgaaacactaaatcttttaaaatttttttgtcccctatcgaaggatgaacaagtttgtgactttggtagtttcaagaaatataatgaacacttgaaatctgaacataacagaatgatctgtttaatatgtgcaacccataagcatgcattcccttgtgagcttgaaatattcacccaaaatcaattacgcaaccatcaaactaagggtaattcagaaggattcaaaggccaccctatgtgtgccttctgttccggaaaacgattttattcagacgacgaattgtacattcacatgagaaatcagcatgaaaagtgccatatttgtgataagatgaaccccgcttctcctcaatactttaaggattataatcagctttttgaccactttaaacattcgcattacgtttgcaccgtccaaacttgcttagataacaagtttgtcgtatttaaagacgagttggagttacaagcccacattttgcaggagcatggtaatatcctgaagggaaagccaaagtttttccagtcagaactttctacttttatctcggctccatctagagtgatcagggaaagagatgattacgaccttccatctatatcttccctaccgggttcatcatccggctctagaactgatgtgagatctgctagttctcccgaggaaagtagactaagattggcagaaagagcaaaatactatctggaaaattccaaagaagacttcaataagttttcttcttataacgaagattattctaaaggtcgcttaagtgctgaaaaattattggaatcatataaattgttattcacaaaaccaaatgcggatgtatatttattgattcataacttagctgaaacctttcccaaaaactcctccaaatacaataatctgaacgccatatatgaacaaagagagcaaacccttgcacgacaaacttcactaccttctttatctagtgattcttccctttcaatgtcaataggcaggggccattggggtggaacaaacgatgggggcagcgctggtgcagcattaggcgttaggaatatcaaaaatcttccaaccctgaaaagtccttcagcgtcgtatgatccctttgcaaccaccgtaaaaaaaaacactctgagacccgtgcaaaacattaaaagaactacacctcaatcagttagttatcgaacttccactaatacagtcgccttctctccaacctatttggaaagtaaaaagggttcctcttctacttctctaaataatagcaaagataaattgaaaagtctcaacctacctcaactacctccaccaaagccaaaggtgcaaattccaggtctgaacagaccccaaattgctgatcctaagcagtggggtaaaaagtcaagcacacaagatactaacgtgcacgataatttgagggaattgaacacaactagtggaggaaataaaaagaaaggcaaacaaaagcagctgttattccacattggtgtatagttggaaatatatttctaacctgtaactgacaatagcattagagaaatgaaagtcttaaataaaattccgataaagaaaaacttatttaattaattaat

SEQ ID NO: 509 - DNA, 2591 bp, Saccharomyces cerevisiae
tatcatttccgtttcgtctagataaaaaaacacttctttgttcagagtagctaattgatggtgaacgaattagagaatgtgccacgggcgtcgaccttgacgaatgaagagcaaacggttgatcctagcaataacgactcacaggaagatattagtctgggtgattctaacgaaattacttcgttggcatcattaaaggctatccgatcaggaaatgaagaggaaagcgggaacgagcaggtgaatcataatgatgaggccgaagaagatcctctgttaactcgctaccataccgcttgccaaagaggtgatctagcgactgtcaaagaaatgatacatggaaagttgctcgaagttaataacgacggtgactctacggaacatatcactggtttgcattgggcaagtattaataacagactttctgtagtggattttctagtttcacaaggcgctgatgtcaatgcaagggctggtgctttgcatgccacaccattacattgggctgcaaggtatgggtacgtgtacattgtcgattttttgcttaagcatggagctgatcccaccatgaccgatgaccaaggtttcaatctactacacttatctgtgaacagctcaaatataatgctagttctatacgttttattcaacgttgtcagcaaaggtcttttagatatagattgccgagacccaaagggcagaacttcactactatgggctgcttaccagggagattccctaactgtagcagaattgttgaaatttggtgccagcataaagatcgcagatacagaaggattcaccccactgcactggggcactgtaaaagggcaaccacatgtactaaaatacttgattcaagatggtgcagattttttccaaaaaacggataccggaaaagattgctttgctattgctcaagaaatgaacactgtgtactcacttagagaggctctaacacattctggattcgactaccatggttatcccattaaaaaatggttcaaaaaaagtcaacatgctaagctcgttacattcataacgccatttctatttctaggaatcgcatttgctcttttctctcatattaaccctttgtttgtaatcattgtcctttttttattggccattgccactaacaaaggcttgaacaaattcgttctgccgtcatatggacgaatgggtgtccacaacgttaccttgttaaggtcacctttgttatccggtgttttttttggcactttactttgggtgactatcgtttggtttttcaaagttatgcctcgaacattttctgatgaacaatatactaacatcctaatgctggtaatacttgtttctgtattttacctttttgggcagcttgttattatggacccaggatgtttgccagaagaaactgatcatgagaacgtgcgacaaacaatctcgaacttgctcgaaatcggtaaatttgatacgaagaacttttgtatcgaaacttggattagaaaacctctaagaagcaaattttcgcccttaaacaatgctgtggttgcaagatttgatcattactgcccttggatctttaatgatgtcggactcaaaaatcacaaagcatttatattttttattacattaatggaaagtggtattttcacatttcttgcactttgcctggaatattttgatgaacttgaagatgcacacgaagatacatcccagaaaaatggcaaatgtttcatcctaggcgcttcagatctctgttcgggattaatatatgatagatttgtctttctgatattattatgggctttactccaatctatttgggttgcaagtttgatcttcgtccaagcctttcaaatatgtaaaggaatgaccaatacagaattcaatgttttgatgaaagagagtaagtccattggccccgatgggttatctttcaatgaaaacttcaatactactccagaaggatttgcgccgtcgattgatccgggtgaggagagtaatgatactgtactagcaccagtcccaggctcaacgataaggaaaccacgcacttgttttggcgtttgttacgcggtgactggtatggatcagtggttagcggttataaaagaaaccattggcatcaaggatagcaccggacataatgtgtattcgattacatcaagaataccaacaaattacggttggaaaagaaatgttaaagacttttggcttacaagcgatataaatgcgcctttgtggaggcgaattttgtatcctccttcgggctctaaagctttgctcaacgggatagaagttgactattttaagctttacaaattgccaaataaggatgttgaacaaggaaatgatatggtatgaaaattttgttgttttcattaggagaaactgtatattttagccttttatcaaacaactgtgagtatagaaaagtttatgcctcaagctgcagtgcttcttataagtgattggctgaatcaaggactattaggaaagctcatgaggtggttaataaatgtttagctgaaaaaatgaagatagccacatttgtaacattcatttcaaagcacatatatatataatatacatatgtttgtttt

SEQ ID NO: 510 - DNA, 1848 bp, Saccharomyces cerevisiae
gagattttagcgcgttctatagaatagtcaattgtagaccgttcgttacttgggacgtcctaatatgcctttgaagtcgttttttttttcagcatttctagttttatgcctgtctaaattcacgcaaggcgttggcaccacagagaaggaagaatcgttatcgcctttggaactaaatattttacaaaacaaattcgcctcctactatgcaaacgacactatcaccgtgaaaggtattactattggcggctggctagtaacagaaccttatatcacgccatcattatatcgtaatgctacgtcactggcaaaacagcaaaactcttccagcaatatctccattgtcgacgaatttactctttgtaaaaccttaggatataacacctctctaactttattggataatcacttcaaaacttggattacagaggatgattttgaacaaatcaaaaccaacggtttcaatttagttaggatccccatcggatattgggcgtggaaacaaaatactgataaaaacttgtacatcgataacataactttcaatgatccatacgtaagtgatggattacaactgaaatatttaaataatgctctcgaatgggcgcaaaagtacgaactaaatgtatggttagatctacatggtgctcctggatcccagaatggattcgataattccggtgaaagaatactctatggcgatttaggctggttaaggttgaataatactaaagaactgactctggctatttggagagatatgttccagacatttttaaataaaggtgacaaaagtcctgtggtgggtattcaaatcgtcaacgaaccgcttggtggcaaaatcgatgtttcagacataacggagatgtattacgaagcatttgacttgctcaagaaaaatcagaattcgagtgacaacactacgtttgttattcatgacggttttcaaggaatcggtcactggaacttggagctaaacccaacctaccagaatgtatcgcatcattatttcaatttgactggtgcaaattacagctctcaagatatattggtcgaccatcatcattatgaagtgtttactgatgcgcaattggccgaaactcagtttgcacgtattgaaaacattatcaattatggggactctatccacaaagaactttcttttcacccagcagtagtcggagaatggtcaggcgctattactgattgtgcaacctggctaaatggtgttggggtgggtgcacgttacgatggatcatactacaatacaacgttgtttaccaccaacgacaagccagttggaacatgtatatcccaaaatagcttagctgattggacgcaagattaccgtgaccgtgtgagacaattcattgaggcacagctagccacttattcgtcaaaaacaacgggatggattttttggaattggaagaccgaagacgccgtagaatgggattatttgaagctaaaagaagctaaccttttcccttcccctttcgacaactacacgtacttcaaagcagatggatctatcgaagaaaaattctcatcctctttatcagcacaggcatttccaagaacaacgtcatcggttttgtcctccactacgacttccaggaagagtaagaatgctgcaatttctaataaactaacaacttcgcagctattaccaatcaaaaatatgagtttgacctggaaagcgagcgtatgcgcactcgctatcaccattgccgctctttgcgcttctctttaaagtaaacggcaacagtgtggtgcgtttaatggtgctaattatatatacacttttcattatattattatagatactcagaacgtaggcactatgta

SEQ ID NO: 511 - DNA, 696 bp, Saccharomyces cerevisiae
cagagaagtggggtgagcaaagtataacaaccacgattatgagttcaagttcttatagggattcatattttcaataccgccatttaccagcaccacatcacatattatatgcggaatggaatcaagatatactggcgcttccggacgaagtggcaaatattacaatggctatgaaagataatactcgcaccgacgcggaggagggaagagctccccaagatggggaaaggaattctaatgtacgcgagagcgctcaaggtaaggcattaatgacaagtgaacaaaatagcaaccgctactggaactcttttcatgatgaagacgattggaatctattcaatggcatggaactggagagtaatggagtagtgacgtttgctggacaggcgttcgatcattctttaaacgggggaaccaattccaggaacgacggtgccaatgagccaagaaaagaaacgataactggttctatttttgataggcgcatcacacaattggcgtacgcaagaaataacggttggcacgaactggctctcccacagtcacgatgagcagaacgtgacgtatatgctgatcattagtcagaaattgtggtgtatgggtactatgcacagccgttgagactagactattgtgtgagaaatttttttaaagcaaaacagtggcgtaaaatccacggaacaaaataacacccaa

SEQ ID NO: 512 - DNA, 1556 bp, Saccharomyces cerevisiae
gtttgcgaaaatggatgatttttcaagagataccgaaaactttgtttgctggttaaaaactaccgctgaaattgaagtatcccctaagatagaaatcaaagatctttgttgtgataatcaaggccgcgcagtagttgccactcaaaagattaagaaggatgaaacattgtttaaaatacctcgtagttctgttttaagcgttacaacatctcaactgataaaggattatccttctctcaaggataagttcctgaacgaaaccggatcgtgggaaggtttaattatctgtatactttatgagatggaagttttgcaagaaagaagccgatgggcgccttactttaaagtttggaacaaaccaagcgatatgaacgcgttaattttttgggatgataatgaactgcaacttttaaaaccatcacttgtccttgaaagaataggaaaaaaggaagccaaagagatgcatgaaagaattattaaatcaatcaaacaaattggtggagaattttcacgtgtagcgacgtccttcgagtttgataattttgcctatattgcaagcattatattgagttactcctttgatttggaaatgcaagatagtagtgtaaatgaaaatgaagaagaagaaaccagtgaagaagaacttgaaaatgagcgctacttgaaatcgatgattccacttgctgatatgttgaatgcagataccagtaaatgcaacgctaatttaacttacgactctaactgtttaaagatggttgctttgagggatattgaaaagaatgaacaagtgtacaacatatacggagaacatccaaattcggaactactaagaagatatgggtatgttgaatgggacggttcgaagtatgattttggagaagtgttacttgaaaatattgtcgaggcgttaaaagagacttttgagacgaatactgaatttttggacaggtgtattgatatcttacgcaataacgccaatattcaagaattcttagaaggtgaagaaatagtactagattcatatgattgttataataatggtgaattgttgcctcaactaatacttttggtccaaatcttgacaattctttgccaaattccaggtttatgcaaactggacataaaagcaatggaaaggcaagtggagagaattgtaaagaagtgtttacaattgatagaaggtgcccgcgccactacaaactgtagtgccacatggaaacgttgtattatgaagcgtctagccgattaccccataaaaaagtgcgtttctatcgaaaaaccttcgaaaggaaactcattaacaagggaagaactaagagatgttatggctcggagagttttgaaaagcgaaatagattcgctgcaagtttgtgaagaaaccatcgacaagaattacaaggttattcctgatgaaaagctgctaactaatattttaaagagaaagttgacagaggaagaaaaaagctctgtcaaacgtccttgcgtgaagaagtgagcggttgttctaaccactatttaaagccgcaattagtaatgcaaaaagttggccggaatta

SEQ ID NO: 513 - DNA, 1241 bp, Saccharomyces cerevisiae
cacgcagtgtatttttagaataagtggccatgggttatattttgacaggatattctagccgtcatgataagagaaagaaacatgcacttcctttgcatcggtatgcatcgtcttcgataaacttgcagcaccatgtgcatctcttagagacccgggtttcatccaagaggccaatatcggaagatcaaaggactatcaggcttcctgcgaagaaacttaggcatcatcaaaagctaactttgcaagatttacctgtagagattattcaacatattttcgttttcacaaagggtgaaccgtcgatggtcaccttgaacaggttcttctatagttgcttgaagccatctttttcattattatcgaagatcatgtgggaaaaatatcttttcgatcccctggagtttggcgtaagtaatataaaagcttattcaagaaatattgtgatccctacattatttgagcatgaaactttttttagactactactagatcatcatcctatcctgttgaaaaatatttctcattttcttcccagaaagcactatcaagatatgcagaatggcgattttgatacatctaaagagctagacttgtgttcaatgaacactgaagatacatcgaaagaagacttccctaaaaacttttacaacaatatgcatatttttttaacacgtagggaatgtgtgaagtctctaggtaatcattttactttgaagaatccatatgatgtgatatccccttttatagaatggttttttcaaggtattgatatgcaaggaactgacctaagccctaagtttacctttgtttctctatttgaatcaatagatttaatcctatacgtctctggatctacagtgcaaaaactagcgtctattgaaccccttacgactgtaatatttttattatatttcacgtatgctgattcactagggagtctgaactttgagttttttttgcagaatagatcaagattacagctcatagagaaatttatcctgaaatattattacaatccatcattgacagaaaacgaacttttatctgatagcactatatgggacctgttaaggcgggtgtctgatttaaaactcatagatttggtcgttaaatgcggcggaaggcctcaatacggggttatgtttgcataattaaattacttagtattaagattctgccccttgcatgcatgcacaatatgtgcttgccaattcatttatgtacaaaagatggtgttatat

SEQ ID NO: 514 - DNA, 717 bp, Saccharomyces cerevisiae
ccgaagactaaacaggctttcatagtgtctcagtaagcgtatggatggacaacgcagttgatgacagagaaacacaaaactatggggaaatttaaggttattgtattggcaggtactgcaggtacaggaaaatcaaccattgcaggtgaactaatccatgaatttaaagatatatacccggatttgaaattcatcgaaggtgatgatttacacccgcctgccaacgtagaaaagatgacaagagggattccattaaatgacgacgaccgttgggactggttgaaaaaagttgccgtagaatctacaaaagctgcagcaagcactaaggagcatttgtcaattgttgcttgctcgagcttgaagaagaaatacagagatttgattaggcacacatgccctgaatcggagttccattttatctttttgtatgcaagtaaaatagaagttctgaaaaggctcaaaacaaggaagggtcatttcatgaaagctgatatgatggagtctcaattcagggatctggagttaccagacatcaacgacgaaactgactgtgacattgttcccttagatttcaaaacgttttatcaaattgaaaaagatgttatacaggtggtaaaaagtaaagttttgaatattgagtaaataacgcttggataaaacgaagtaaatattagaaacagttatatagaaattaaatacggtgacctggaaaattaa

SEQ ID NO: 515 - DNA, 3230 bp, Saccharomyces cerevisiae
ccgtgtactcgctacacgtagaaagaaatcagaaaacaacagctcgacaagtgaaatttgacgttcattaagactcagttaagattgccttgagaataaacaaaagtaatcacagttaactattgaacaagagtgcacctatgacttcactttcttcacagccagcgtacacgttggttttcgatccttctccgagtatggagacttactcgagtaccgattttcagaaagctcttgaaaagggatctgatgaacaaaaaattgacacgatgaaatcaattttagttacaatgctggaaggaaatccaatgcctgaattgttgatgcacataataagatttgtcatgccttctaaaaataaggaattaaaaaagcttttgtacttctactgggaaattgttcccaaactagctgaagatggaaaattgagacatgaaatgattcttgtctgtaatgccattcaacacgatttgcaacatcctaatgaatatattagaggtaacacattaaggtttttaacgaaattgagagaggccgaactcttagaacagatggttccctctgtcttagcgtgcttggaataccgtcatgcatatgttcgtaagtatgcaatcctagcagttttctccattttcaaggtcagcgaacatttacttcccgatgctaaagaaatcatcaattcgttcatagtagctgaaactgatccaatatgtaaaagaaatgcatttattgggttagctgaattagatcgtgaaaatgccttacactatttagagaacaatattgctgatatagaaaacctagaccctttattacaagctgtctttgttcaatttatcagacaagatgcaaacaggacccctgctttgaaagcccaatatatcgaattattgatggaactgctttcgaccacgacttccgatgaagtcatcttcgagaccgcattagccctaactgtgttgtctgccaatccaaatgtcttggttcctgcggttaacaaattgattgacttggccgtcaaggtttctgataataacattaagttaattgttctagaccgtattcaagacatcaatgctaataacgtaggtgctttggaagagttaaccctggatattttgagagtcttgaatgcagaagatttagacgttcgttcaaaggcgcttgatatttcaatggacttggccacatccagaaatgctgaagatgttgttcagcttttgaagaaagagctgcaaacaaccgtaaataacccagatcaagacaaggcaatgcagtacagacaattgttaataaaaactattcgtaccgtggctgtaaactttgtagaaatggcagcaagtgttgtttcgctattattagatttcatcggtgatttaaactcggttgccgccagtggtatcattgcctttatcaaagaagtgatcgaaaaatacccacaacttagagccaatatccttgaaaacatggttcaaacgctagacaaagtgagatctgctaaagcttaccgcggtgcattatggattatgggtgagtatgctgaaggagaaagtgagatacaacattgttggaagcacattcgtaacagcgtaggtgaagttcctatccttcaatcagaaatcaaaaagttaacacaaaaccaagaacacaccgaagaaaatgaggttgacgctaccgccaagccaactggtccagttattctaccagacggtacgtatgccactgaaagcgctttcgatgtgaagacttctcaaaagtcagttaccgatgaagaacgtgattctagacctccaattcgccggtttgttttaagtggtgatttctacacagctgccattctggccaacaccatcattaaacttgttttaaaattcgaaaacgtttccaagaacaaaactgtcatcaatgctctaaaggcggaagctttactaattttagttagtattgtaagagtgggtcaaagctctttggtggagaaaaaaattgatgaagattctttagagagagttatgacatctatttctattttattggatgaagttaatcctgaggaaaagaaggaagaagttaaacttctggaggttgcattcctggacaccaccaaatcctcattcaagagacaaattgaaattgcaaagaagaacaagcataagagagcattaaaagacagttgcaaaaacatcgaaccaattgatacgccgatttctttcaggcaatttgctggtgtggattctactaatgtgcaaaaagatagtattgaagaagatttacaactggcaatgaaaggagatgcaatccacgctactagcagctctagtatttcgaagctgaagaagatagtacctttatgtggcttttctgatccagtttacgccgaggcttgtattacaaacaatcaatttgacgtcgtattagatgttcttcttgttaatcaaacgaaagaaacattgaaaaacctacatgtgcaatttgcaactcttggtgatttgaagattattgacacaccacagaagaccaacgtgattcctcatggcttccacaaattcactgttactgtcaaagtttcctctgctgacacaggtgtcattttcggtaatattatttatgatggtgcgcatggtgaagatgctcgttatgttattttaaacgacgttcatgttgacattatggattatatcaaaccagccactgctgacgatgaacatttccgtaccatgtggaatgcatttgagtgggagaacaaaatatcggtcaaatcacaactaccaacattgcatgcttatttgagagaactggtcaagggaactaatatgggtattctaacaccatcagagtcgttgggagaagatgattgtaggttcttaagttgtaatctgtatgcgaagtcgtcctttggtgaagatgccctagccaacttgtgtatcgaaaaggattccaaaaccaatgatgtcataggttatgttcgtatccgatcaaagggacaaggtttggctctgtccctaggtgacagagtggcattgattgctaagaagaccaataaacttgctctcactcatgtttgaaccaccctgagctgatgcaatgtaagttataatgtcaaaggagataagaataaaacttaaaaaattcgaaaagaaataaaaaaataaggaaaatctttaaatagattttaattgcgtaggaatctttgttctcatttttaaacaagtattcacttttatgtacatttt

SEQ ID NO: 516 - DNA, 761 bp, Saccharomyces cerevisiae
cgtgttgttgaagtgttgatgtttacgtggactatttatgtttcgttattgctagtgttagcaggtactttcttaatgaaccgaaatacgaatacagatataattgatacttttaaacgagaagtcgatttgccaatacctgcgcaaccaggtccaccattcccgcttgttactgactattgtgacattgtatgtggatttggccgcggatccgccgaattgggtattcccactgccaatgtacctataaatcagttacctaaaggtatcaacgatttggatttaggggtttactttgggtttgctcacattaaaactgttgatggtcaagaactatcggtggaaacaaggcgggatggaagaactgtggtttataattacggtcaatatttaagtgaagcgaacgatgatttgtccgtacttcctatggtactttcagttgggaaaaatccattctacggaaatgatttcaaaaccatggaattacatattatacatgattttaaaaatgatttttatggggccagggtcaagttcaatattttaggtcatatcagacccgaattgaactacactactaaggaagctctgatcgaagacatcaatatcgatattaggactgcgcagactgtccttgccactccaccgtatcaagtattcaaacaacaattatagagatctgcgggagtgatgaggctagtagtttttcttaacggtcattaagtatacatttacatatttataccttttaataaatgaca

SEQ ID NO: 517 - DNA, 991 bp, Saccharomyces cerevisiae
atataatatatattcacacacgcaaatatgtccgcctcagctcaacatagccaagcccaacaacaacaacaacaaaaaagctgtaattgcgatttgctattatggaggaaccctgttcaaaccggtaaatatttcggtgggtctctgttagccttgttaattttgaaaaaagttaacttgatcactttctttttgaaggttgcctacactatcttattcacaacaggatctattgaattcgtatccaagctctttttgggacaaggtttaatcaccaagtatggtcctaaagaatgtccaaatatcgccggctttattaagcctcatatcgatgaagctttgaaacagctaccagtcttccaagcccacataagaaagactgtattcgctcaagtccctaagcacactttcaagaccgctgttgccttatttctactacacaaattcttctcctggttctctatctggaccatcgtctttgttgctgacatttttaccttcactttgccagttatctaccattcctacaagcatgaaattgatgctactgtcgctcaaggtgtagaaatttctaagcaaaagacccaagagttttctcaaatggcttgcgaaaagacaaaaccatacttggacaaggttgaatctaaattgggcccaatttccaacttggtcaaatctaagactgctcctgtgtcttctactgccggtcctcaaaccgccagcacttctaagttggccgctgatgttccattggaaccagagtctaaggcttacacatcttcagctcaagttatgccagaagttccacaacacgaaccttccactacccaagaatttaacgtcgatgaattgtctaatgaattgaagaaaagtacaaaaaacttgcaaaatgaattggaaaaaaacaacgcttgagtgctttttttttttcatttcaaacaagaatagctaacttttgtctctttatttaccactacatattacattagcc

SEQ ID NO: 518 - DNA, 791 bp, Saccharomyces cerevisiae
cgagcagctcaacagttaatataaagatgcgttggtggccgtggtcaaatcagacagaagatcaaaagcagcagcaacaaccgcagggtaaagcagatggtgatcgcgtgctgacaaattactcgcggggtcaaaagatcctcttagaagacactccacccaagtttgccgatgacttgtccaattctcagttggccaagaagcaagaacgggctactttgaaagaggcttgggactcgatcagatggagtgattttagtttgcagaagctgacttcaatcccgtgcttcagagacgcgggcatgctcgggttttccagcatgttcttgatgggatctattatatttatataccataagagcccgactaaggccacgaattgggcgatgagctctctgatactgggctcgattgtcggatgggagcaatgtaggctaaagagacaaaaaagtttccagatcgcacaattggcaaaggaaaccgtggcgaaaaaggaaaaaccaatgctccataatgtccctcatgacccatctctgccggggcaatgggaggccgccaaaaatgaaaagcagagtcagtttgaacaaagtaaccagaatttatctcaggcctcctctgagaagaaatggtacaagttctggtgaaaagaacgagggggaaacagaaggtagaagcagggccttttaaccgttttcctatgtatatatgcaacatttctccgaaaatactataacttcaattgttcactttctccatttctatataaaaagcatacatagagttacaaattt

SEQ ID NO: 519 - DNA, 536 bp, Saccharomyces cerevisiae
caagtcaaaccacaaataaaccatacacacatacaatgtctgctaaagccgaaaagaaaccagcctccaaagccccagctgaaaagaaaccagccgctaaaaagacttccacttccactgatggtaagaagagaagcaaggctagaaaggaaacatactcttcttacatttacaaagttttgaagcaaactcaccctgacactggtatttcccaaaagtccatgtctatcttgaactctttcgttaacgatatctttgaaagaatcgctactgaagcttctaaattggctgcgtataacaagaagtctactatctctgctagagaaattcaaaccgctgttagattgatcttaccaggtgaattggctaagcatgctgtctctgaaggtactagagctgttaccaagtactcttcctctactcaagcataatgaaatcacttcctttggttataattaatattattatttatatgggtatataaaaattaaagtaaagtaaaaaaaattgtataatagtttaataattttaatgat

SEQ ID NO: 520 - DNA, 829 bp, Saccharomyces cerevisiae
tgaaagttgtcagatagccacaattaaaatatgctggtagtgggattgacaggtgggatcgcttgtggtaagagcacagtgtcgagaagactcagagacaaatacaaactacccattgttgatgcggacaagattgctagacaagtggtcgaaccaggacagaatgcttatgatcaaattgtgttatacttcaaggacaaaataccgaatttattattggaggatgggcatttaaatcgtgaagccctagggaaatgggtttttagtcataaagaagatttgcaagccttgaatgggataacacatcctgcaatcaggtatgcaatgttcaaagaaattggctactattacttgaagggatatagaatgtgtgtattggatgtgccactcttatttgaaggaaatctggattcaatatgcggagtgactgtaagcgtaatttgtacgcaagaattgcaactagaaagattaatgacaagaaatcctgaacttagtgaagaagatgcaaaaaacaggctaaatagtcaaatgagcactgaagaaaggatggcaagatctgactatatcctacaaaataacagcacattggttgacttatacgaacagattgaaagtgttgtaaaaaaaatccaacctagtaaattaagaactgttttggagtatttcccaccttttggggccgtaagtgccagtagcatcgtcatgtccagattactgatgaaaaaacttcaaaataaaaagtcttcagcggtataaggttgatatcttataattacattatataaaatgagtatatatactacatgtttatgtatcagcatgtcatagc

SEQ ID NO: 521 - DNA, 2151 bp, Saccharomyces cerevisiae
cagagttgcacgttaggctgataaatgttgacctctatattgataaaaggtcgcacacctgttcttgcaagcagaaatttattagcagctctctcgaattgcaaccatattacttgggctgtttcaagaagattatacaatgatggaaacagagatcaaagaaattttggtaggaatcagagaaacaacaacagtaacaggtatagaaactcccgtttcaattctcgcccaaggacaaggtctagagaagacgatgatgaagtgcactttgataagaccactttttccaaactaattcacgtcccaaaagaagataatagtaaagaagtaacgctggactctttactggaggaaggagtccttgataaagaaatacataaagccattaccaggatggaatttcccggtttaactcctgtacagcaaaagactatcaaaccaatattatccagtgaagaccatgatgttatcgcaagagctaaaaccggtacaggtaagacatttgccttcttgattccaattttccagcatttgataaatacgaagttcgattctcaatatatggtaaaagctgttattgtcgcaccaacaagagatttggccttgcaaatcgaagcagaggtgaaaaaaatccacgatatgaattatggcttgaaaaagtacgcttgtgtctctttagttggtggtactgacttcagggcagctatgaataaaatgaataagttgagaccaaacattgtaattgccactccagggagattgattgatgttttggaaaaatactccaacaaattttttaggttcgtagattacaaagtgctagatgaagctgacagattgctagaaattggattcagggatgatttagaaactatttctggtattttaaatgaaaagaactccaaatcagccgataatatcaagactttgttgttctctgctactctggacgacaaagtacaaaagttggcaaacaatatcatgaataaaaaagaatgtctctttttagacacagtagataagaatgaacctgaagcacatgaaagaattgatcagtctgtcgtcatttcagaaaagtttgccaatagtatatttgctgctgtggagcatataaagaaacaaataaaggaaagagattctaattacaaagccattatttttgcaccaactgttaaattcacatcctttttgtgcagtattttaaagaatgaatttaagaaagatttaccaattttggaatttcatggtaaaattactcaaaataaaagaacaagtttagttaaaagattcaaaaaagatgaatccggtattttggtttgtacggatgtgggagcccgtggtatggatttcccaaacgtccacgaagttttgcaaattggtgttccatctgagttggctaattatattcatagaattggtagaacagccagaagtgggaaagaaggatcttctgtgctattcatttgtaaagatgaattgccatttgttagagagttggaagatgcaaaaaatatagtcattgccaaacaagaaaaatatgagcccagtgaagaaataaaatctgaggtcctagaggcagtgaccgaagaaccggaagacatatcagatattgtaataagtttaatctcatcctacagatcctgtatcaaggaatacaggttttctgaaaggcgcatacttcctgaaattgcttccacttatggtgtactgttaaatgatcctcaattaaagattccagtatccagaaggtttttagataaattaggtttgagccgtagtccaattggtaaggcaatgtttgaaattagagactatagtagtagagatggaaataacaagtcctacgattatgatgatgattcagaaatttctttcagaggcaacaaaaactataataataggagccaaaatagagattacgatgacgaaccgtttagacgcagcaacaacaatagacgctcattctcccgtagtaatgataaaaataattactccagtagaaacagcaacatatattagaaaagataaaaaaggaggaccaagagatgtgggttgtattttaaataacaattcctctattaagacgcctgtattttagaccccatcttgattcaatactttcacgtgtaaatacctagtatataaatatta

SEQ ID NO: 522 - DNA, 1479 bp, Saccharomyces cerevisiae
gttaagttctgggcctgaatattttgaacgttaaaataattgagtaaatatggtcgctatcagtgaagtcaaagaaaatcctggcgtaaacagcagtaattctggtgcagttacgagaactgcggcacatacacatattaaaggtttaggtctggatgaaagtggtgtggccaagagggttgaaggagggtttgttggacaaatagaagctcgtgaagcgtgcggtgtaattgtagatttaatcaaggctaaaaaaatgtcaggtagagctatcctattagctggtggtccttctacaggtaagacagcattggctctcgccatttcacaagagttaggcccaaaagttccattctgtcctcttgttggtagcgaattatattccgtggaggtcaaaaaaacagaaaccctaatggaaaattttagaagagcaattgggttaagaatcaaagaaactaaggaagtttatgagggtgaagtgacagaactaacccctgaagacgcagagaatccgttgggcggatatggtaaaactatctcacatgtaattgtcgggctcaagtctgccaagggtaccaagacactaagattagacccaacgatatatgaaagtattcaaagagaaaaggttagtattggtgatgtcatttatatagaggccaacaccggtgcagttaagcgagttggcagatctgatgcatacgctactgaatttgatttggaaactgaggaatacgtaccattgccaaaaggcgaagtgcataagaaaaaggaaattgtacaagatgttaccttgcacgatttggatgttgcaaacgcaagaccacaaggtggtcaagatgtcatatcaatgatgggccagttgctcaaacctaagaagactgaaataaccgagaaattaagacaagaggtgaataaagttgttgctaaatatattgatcaaggtgtcgcagaacttattccaggtgttttgttcattgatgaagttaatatgctagacattgaaatattcacgtatttgaacaaagcgcttgaatctaatatcgcccccgttgttgtattggcttctaataggggcatgactacagtccgtggcactgaggatgtgatatcaccacatggtgtgccacctgatttgatcgatagattgttaattgttcgtacattaccatatgacaaggacgagatccgtaccattatagagagaagagctaccgttgaaagattgcaagtagaaagtagcgcattggaccttttagccacgatgggtacagaaacttcgttacgttacgctttacaattattggcaccatgtggtatcctagcacaaacaagcaatcgtaaggaaattgttgttaatgacgttaatgaagccaaattgctgtttttggatgccaaaaggtcaacaaagattttagaaacttccgcaaattatttgtaacagtgaagaaagcctaaagcacatttcataaataaaaa

SEQ ID NO: 523 - DNA, 2778 bp, Saccharomyces cerevisiae
aaccactattactaatcacatcctaaattttgggaagcctacactacgatggacactgtcggtacggacgcagcagccgcgagcattaatgagcgtcgctttgcccagtccacttcaccaaaagttagtgtgaagtcacaggactcgctgtttctgatcacttactccaacatgcagcagacagtggtacaagcgtctttggcggaccggtacccttcgctaaagaagcttaacatcctactttacatagatatccctacgatcgactactacaacgatgagatgactcataacaagctttccagactgaataaacggtttaagctgcatcggcttagaaattcgatcgcgcaaagtttttccaacacatctactgcggaagataacgataagttttgggaggagttgaaaagtctgatcagctctcgcagcacaccggaaaacaagtttgatctgaatgtactggtgtcgtcttcggggtctttacgttacgtggagaccataagatttttggttgaaaaattgtttaattctttcaaagacttgtatgttcaaaagaaactaaacctatgtttccagatcaacgtttctcccacctctctcaagtggttttctactttcctgaacgcagaactgcttaatttaaaaatcattaattggcagaatattggttctttcactaagacaatccagaactccaagtcactcccgttcaaagagtactacaccaagttgaacgagaaattcaccggctcaaaccagagcaatggtagcatgcaagaccagactgtcttggattccatagttattgtcacgaatagcacgggggtaaaagcactgctgactttgttgtcagaccaccctctcaccagccttatctcccaggaatcaataaaagcgctacatgaatattcagatgctgttaacgaagataagggcgacgaccagagcaacacaagtttgaaaagaaactcttcgtcgttgttgaattttcaaaactcggttttaacctccaataaagacaagtccgtcagaattaggtcgttgtctatcaacagaaaatccaacagggcacatatgttcaaaacgaacgaatccatcacaactatcccatcaacgtcaatcaacaatcttattggtcaggaatccaacctacgcaagcagccttcgggaactgcactgcatttacaatcgcatctgcatccacattcccgttcacaatcctattctagttctaatatgtccagatcgccttctcccttcccctacggaaagacaccatcaaacgacgaactagtatatgacgagttaaacaaccaaatcaacgaagtgcaagaccgtgctaagaatgaggaaattgtcctgtacaacaataataattatgacgattatacaaaagaacgaggggaacaagagcaggatagaacctcatacgcagatgaatatggctttaattacgatgatgaagaaggtggaaatgaagacaactatgatgatgatgaagacgatgatgacgatgatgacgatgacgatgagagtgacgatgaaggtttgagcttttacgctccaagcattttgtcccgctctggttcgagcacagacgtgttatcctccggaatagattctatggcaaaaaattcgaaggaaacaaggggtaggtttaggtccttgagtttaatggaccctgctctgcaaaagccgttcaaccagaaatttccaaacagccaacaacccgattctgcaggggcttcatcacctaaaagatcgacctcttcaaaccattttactaacgtctacgtgcacgatggtgattttgacgggacagacactatcaacaacaaaaagaatctatcgtctgcaacgcttattaaaaggaaatctttgatgaacagaaacttggctccttctattagtaatggattgatacctccggaatttatttcccgaatatctacgccctctacaagcgcaagtagttcaaactcctcgttgaatgacatgtctacagtatcaaacgcattttccaaattattaaatgacacaagtaagaagcaaaaattcttgaattcaccaattccacaacatacacaacaggcatctccattactaatgagaaataattcaaacagtaacttgctatttgagaagaatttgatcaacaagtcatttgaagaactgagaagacaaccatcagttaacctttttagcaccttgatgaatggtaacatggaaaagaatggtttggcactaaacttcaagtccagaacgcctacagatgcgttgatggcgaatagcattaaaaatagtaacaattccagtcataggttactaaatctcgaggaagaagaccaaatcatgtctggatctctccccaaagaacgcgaggacgataacgattcgactaatagcacaatagtaccgaatcacccagacaatgataactataatgataatgataacgacaataatactggtataaattccaataatttcaatctaaatctctatgatgacaatgatagtgcaggctttacagatgtaacaactgaaggagtgaaatactcaaactcgaattctacagtcaccaaacccgtttataaaaaagccgtcaccctggatttatacggcgaagatgatatggataacatgggaggatgggtattaggaggtaatgcccggtaaaataatcacctgaaaaaaactaggttaagcacaaggcaagggaaaaagccaaattacacatatacttgattataaatagattagtaaaacatatat

SEQ ID NO: 524 - DNA, 6476 bp, Saccharomyces cerevisiae
gcaacgagaaaggaagctcaaagttgggatttacatcatttctttaaaaagcatcattggcttctctccaattgttcaataaacgcagactaatagaaattgaagtcattttccggagaaatataaaatattttctgcaactaagctatactcgatttcttttaagtttctccagaaccaataaaaagtaatatcttaaactgtttctttctcattttttccccgaattccattaaagaagataagaaacaagtctaagtgctactatatctgatgtctgaacagaattcagtagtaaatgctgaaaaaggggatggcgaaatatcttcaaatgtagagactgcttcttcagtcaatccgtctgtgaaaccacagaatgctattaaagaagaagctaaagagacaaatggtgaagatcaaaaatgcaaagggccagaaaacgctggcagtacggcagaaacaaaagaaacaagtaacgacgctaccaacggaatgaaaacgcccgaagaaacggaagatacaaatgacaaacgccatgacgatgaaggtgaagatggagatgaagatgaagatgaagatgaagatgaagatgaagacaatggggacgaggatgatgaggacgtggatagcagtagttccgaaaccagttccgaagacggggaagattctgaatcagtctcaggggaaagtactgagagtagctctggagaagatgaagaatctgatgaaagcgatggaaatacatcaaacagctcctctggtgatgaaagcgggtcagaagaagaagaagaagaagaagaagaagaagaagaagaggaaaatgctggcgaaccagctatcgctcatcaagatagtgttcccaccaacgattctactgccccaaggtctacccatacgaggaacatatcactatcttcaaatggttcgaacacaaactcaaccataattttagtgaaaactacgttggagacaattttaaatgataaggacattaaaaagaattcgaatgctcagaaggctatcgaaaggacattacaaaaatttaaggaatttgatccgcaaaccacgaataacccacattacgtggattcaatactagtattcgaagcactaagggcaagctgtcgtaccaaatcctccaaagttcaaagtttggctttagattgcctgtcaaaattgttttcttttagatcgctagacgagaccctgttagtgaatccacccgattctttagcctctaatgatcaacgacaagatgctgccgatggaataacgccgcctccaaaacaaaaaattatagacgctgcaattgatactatttcagactgttttcaaggtgaaggcactgatgaccgtgtggaactacaaatcgttagagctttatctagttgcattttagaagaggattcaagttctttatgccacggtgcttccttgctaaaggctatcagaacaatctacaacgttttcgtcttttcgttgaacccatccaatcaaggtattgcacaggcgaccttgacacaaattattagttcggtgtatgataaaatcgatctcaaacaaagtacctcttcagcagtatccttatcgacaaaaaatcatcaacaacaatccgccatagaactttccgaggcttctgaaaatgcagaaacgccggctcctttaactctggaaaatatggataagttgaatgacgatgaggaaagactaatggacgctcaacagcctgattctatcgccataactaaccaagatctagctgttaaagatgcgttcttagtgtttagagtcatggcgaaaatatgtgctaaacctttggaaacagaactcgacatgaggtcacatgccgtcaggtcaaagcttttatctcttcacatcatttactctattatcaaagatcatattgacgtattcctttcccacaacatttttctaccaggaaaggagcgtgtgtgctttatcgattcaattagacaatatttacgtcttgttttatcaaggaatgctgcctcgcctctagctccagttttcgaggttactttagaaattatgtggctattgattgctaatttgagagcagatttcgtgaaggaaattccagtttttttaacagaaatctacttccccatttcagaattaaccacttccacctcccaacaaaagagatattttttaagtgttattcaacgaatttgtaacgacccaagaactttagttgaattttacttgaattatgattgtaaccctggaatgccaaatgtaatggaaataactgttgattatttgacaagattggctttaactagggtggaaattactcagactcaaagatcatactacgatgaacaaatatcaaaatccctgtccacctacaatttctcacaattgccccttttgacttcttccaacttgtcttctagtcctgatgttggtcaagtcaatttactttttccacttgattttgctctcaaaatggtgtcactaaattgcattgtgtcagttttgcgttccttaagctcatgggctcacaaagctttaaatccaaacacacacactgctaataaggtattactaaacacaacatcttcagctcgtcaagaatctagatcatctttgagtaacgacgtaaggtcttctattatgacaagtaatgatgacttcaaaccaacatatgaagacgaagaaagcagatcattgagcagtcaaaacattgacgcagacgaccccacacaatttgaaaatttgaaactaaggaaaactgctttatcggaatgtattgctattttcaacaataaacccaagaaagctattccagtacttattaaaaaaggatttttgaaagatgattctccaatttccattgccaagtggttattagaaacagaaggcctcgacatggccgctgttggggattatctaggcgaaggagacgacaagaacatcgctataatgcacgcatttgttgatgagtttgacttcactggtatgtccattgttgacgcattaaggtcatttttacaaagtttcagattgcctggagaaggtcaaaaaattgacagattcatgctgaaatttgcggaaagatttgtggaccaaaaccccggagtcttttcaaaggcggatactgcatatgtgctttcgtattctttgatcatgttgaatactgatttacattcgtcacaaatcaaaaataaaatgtctttacaagagtttttagaaaacaacgaaggtattgacaacggaagagatttaccaagagacttcttggaaggtttgttcaacgaaattgctaacaatgaaatcaagttaatttctgaacagcatcaggcaatgctttcaggtgataccaatcttgtccaacaacagcaatctgctttcaacttctttaattctcgtgatttgacaagagaggcatataatcaagtctcaaaagaaatttcatctaaaacggaattagtctttaagaatttaaacaaaaataaaggaggcccagacgtctattatgctgcttcccacgttgagcatgttaaatcaattttcgagacactatggatgtcctttttagcagctctaacccccccatttaaggattatgatgacattgacacaaccaataagtgtttagaaggcttgaaaatatcaattaaaattgcttctacttttagaatcaatgatgctagaacctcctttgtaggtgcgttagtccaattttgtaaccttcaaaaccttgaagaaatcaaagttaaaaatgtcaatgcaatggtaattcttcttgaagtcgcgttatcagaaggaaattacttggagggatcgtggaaggacattttgctggtcgtgtctcaaatggaaagactacaattgatatccaaaggtatcgacagagatacggttccagatgttgcacaagctcgtgttgcaaaccctagagtttcttacgaatcatcaagatccaataatacatctttctttgatgtttggggcaagaaggcaactcccacagaattggctcaagaaaaacaccataatcaaaccttatcacccgaaatctctaaattcatttcctccagtgaattagtcgttttgatggacaatatatttaccaaaagttccgagttatcaggtaatgctatcgttgattttatcaaagctttaaccgctgtatctttagaagaaattgaatcatctgaaaatgcttccacaccaagaatgttttccttgcaaaaaatggtcgatgtatgttactacaatatggatcgtatcaaactagaatggacgccgctttgggctgttatgggaaaagctttcaacaagattgctacaaactctaacttagcagtagtatttttcgctatcgattccctgcgtcaattgtctatgagatttttagatattgaggaattatcaggttttgaatttcaacatgattttttaaaaccttttgaatacacggttcaaaatagtggcaacactgaagttcaagaaatgattattgagtgttttaggaacttcatattgacaaaatcggaaagtatcaaatctggctggaagcctattcttgaatccttacaatatacggctcgctcaagcactgaatccattgtattaaagacgcaattgctggttagcaatgatattgtgacaaatcacttcgaaaacgtattctctcaagaagatgccttttctgagttagttggtgtcttcagagaaatcaccaaaaataagagattccaaaagctatctctacatgctttggagtctctaagaaagatgactcagaacgtcgcagacatctgtttttacaatgaaaataagactgaagaagaaagaaaacataacgatgctttacttcgtgggaaagacatattccaggatgtgtggttccctatgttattctgcttcaatgatacgatcatgacagctgaagacttagaagttagatcacgtgcattaaactatatgttcgatgccctagtggcatatggtggtaaattcaatgatgatttctgggaaaagatttgtaagaagttactatttcctattttcggtgtattatccaaacattgggaagtcaaccaattcaatagtcatgatgatttaagtgtttggctttcgaccacgttaattcaagccttaaggaacttgattgccctttttacgcattactttgaatcgttgaacagaatgctcgatggatttttgggtctgctggtatcctgtatttgtcaagaaaatgacactattgctagaattgggagatcctgcctgcaacaattgatattgcaaaacgtatctaaattcaatgagtaccattggaatcaaataggtgacgtattcgataaattgtttgatttaaccactgctaatgaattgttcgattatgatccgttacagcaaggaagaaaatcatctgtatctcatcaccaaacaactaatgataccagccaacactcagatgatgatagcaacgacagaagggagaacgattctaatatcagtgagacggtcgaaagagcgcatcaagaagaatccagcgaagacgttggtggtgacatggttgaaacactcaatgggcaaactaagcttaataatggcaattccgttccgacggtaaaggacgaattgaatccaaagcccgctagtctaagtatccccaagaaaactaagcacatgaaacgaaacgaaagtaacgaagatatacgtaggagaataaacatcaagaattctattgttgtcaaatgtgttttacagcttttgatgatagagctgctcaacgaattattcgagaacgaagattttgcccactgtatcccttacaaggaagccattagaattacaagattgttggagaaatcgtacgaattttctcgtgactttaatgaagattatgggttaagaacaagactagtagaggctcgtgtagttgataaaataccaaacctgttgaaacaagaaacgagtgctgctgcagttctccttgacattatgtttcagttgtatctgaacgatgatgagaagaaggctgatttaataactcgtctgatcaccatttgcatccaggtcgtagagggttatgtttctttggatgatagaaccatggaacgtagtatcaatgcctggcgttcagtgatagttgaaatattacaaggttactacgaatttgatgatgaagactttagactatactgtcctgctatgtatgctctggtgattcaaatattagataagagcgttccaacggagttgagacatgctataaaacaatttctaagcagagttggtgaattatacctttctactgattaaggctttgttgaatggtccagcagattaaaatatgcttagttgtagaacacagaaaaaatgagaaggttgatatacttttactcatattaatcctgatttagtggcggtgatcctttttagattcgtttaattcataaacaaggtacatcatatagcaataacaaatatgtaaa

SEQ ID NO: 525 - DNA, 1113 bp, Saccharomyces cerevisiae
tcttaacaagtcacatcttatttagcctcttcacccataagttgattgtaaagccgtagaaccctatatcacagtctcttcggcaactcaaccaataagaactattaaggattaacactagccatgatgccgaatgttgctccaaacagctactatttaaacataccgaatgccaattcgacctcaacgactacgtcctcgatcttttctgatctcaacaaggagtacgagtcaaagattaaagaaatcgaagaatattatataaagacactgctcaatgaaaataccgataatgatgacagcagcagctccgaggggcataatataaatgaaacggacattttaagtgaatactcaccaaggccttctccttggttaccatccaaaccaaactgttatcatccgttgggagattttaaagacttgatcatatcagattccagacctacaaatacattacctattaataaccctttcgcaggcaataataacatctcaacacttgctacaactgagaaaaaacgtaagaaaaggtcactcgaagttgagattaaccctacttacacgacaagtgcattttcattacccctgacagcggagaatttacaaaaactatctcaggtggattctcagtctactggacttccatacacacttccaattcagaaaacaacaaaactggaaccttgtagaagggcacctttgcagcttcctcaattagtcaataagaccttatacaaaactgagctctgtgaatcttttactattaaaggctattgtaagtatggaaataaatgccaatttgctcatggtcttaatgaactgaaattcaagaaaaaatcaaacaattatagaactaaaccttgcataaattggtcgaagttaggctactgtccgtacggtaagcgttgctgtttcaaacacggtgatgataaggacgttgaaatatatcaaaatgctaacgatggaagaagtaaggatacggcgttgactccacttcctacttccctagccccaagcaacaacgataatatcactaatttgagtaagcctaggaacttacatactagtgttaaagcattgcaaaggatgacttggtagtcggtcaacaac

SEQ ID NO: 526 - DNA, 1724 bp, Saccharomyces cerevisiae
ccctcaactaggcctacttttcatatataatctctttttgagcttcaggggaggaaatatctaacgtaaaaaaaagaaaaatccgaaataaaaaattaggcagctatctttaacggtatatatcagtgaatagatatattgttataaacttcactaccacatttgttacaaccaaagacacaacttcagataattatttaaacaatgctttccagagcgacgcgtactgcagctgccaaatccttagtaaaatctaaagtggctagaaatgttatggctgcttctttcgtcaagagacatgcttctacaagtttgttcaaacaagctaacaaggtcgaatccttaggttcaatatatttatccggcaagaaaatttcagttgcggcgaatccgttctccataactagcaatcgttttaaatctacctctattgaagttcctccgatggcagagtccctgactgaaggctctttaaaggaatatactaaaaacgttggtgattttattaaggaggacgagctgttggccactattgagaccgataaaattgatattgaggtcaattcgccagtatcaggtactgttacgaagctaaatttcaaaccagaggacactgtcactgttggtgaggagttagctcaggtcgagcctggtgaagcacctgctgagggttctggagaatctaagccagagcctaccgaacaagcggagccatcgcaaggtgtcgccgcaagggaaaactcaagtgaggaaacggcttcaaagaaagaagctgctccaaagaaagaagccgctccaaagaaagaagttacagaaccaaaaaaggctgatcaaccaaagaagaccgtctctaaggcgcaggaacccccagtagcctctaactctttcacaccatttccacgtacagaaaccagggtcaaaatgaaccgtatgagattgaggattgccgaaagattaaaagagtctcaaaacactgctgcttccttaaccacattcaacgaagttgacatgtcagctttgatggaaatgaggaaactgtataaagatgagattattaagaagaccggtactaaattcggattcatgggtcttttctccaaagcatgtaccttggccgccaaggatattccagccgtcaatggtgccattgaaggtgaccagattgtttatcgtgattacacagatatttctgttgctgtggccactccaaagggtttggttacccccgtcgttcgtaatgcagagtcattgagtgttttagatattgagaacgaaattgttcgcttgagtcataaagcgcgtgatggcaaattaaccctagaagatatgacgggtggtactttcaccatatctaatggtggtgtttttggttcattatacggtactcctatcatcaattcaccacaaacagccgtcctaggcttgcatggtgtcaaagagagacctgtcactgttaatggacaaattgtctcaagaccaatgatgtacttggctttgacttatgatcatagattgctagatggtagagaagctgttaccttcttgaagactgttaaagagttgattgaagaccctagaaaaatgttgttatggtgatttgaaatttgcagcccataccaatctgatttcatgattattcttgtccgctattactgtgtgaatctcttctatttaagtatgatatttaaagatatgctatgatgataaatggaactatgaattaa

SEQ ID NO: 527 - DNA, 2021 bp, Saccharomyces cerevisiae
gagaaatttggttggcgtcactcgttcttgctaagaaattgtaattggctaaaagtatcaacgagagaacaagcttttgtcgttattcgcttgagcaaatacgtcaaaaataaacgaaaaagaaagagctctatgaaattatctgtcctcacatttgtcgtagatgcattacttgtctgcagctcaatagtagatgccggtgttacagattttccatccttaccaagtaatgaagtctatgtcaaaatgaattttcagaagaaatacggcagttcatttgaaaacgctttggatgatacaaaaggtagaacgcgtttgatgacaagagatgatgattacgagctggtggaactgactaatcaaaacagtttttattcggtggaattagatattggcacccctcctcaaaaagttactgtgcttgtcgacactggttcttctgatctatgggtcacgggttcagacaacccatactgttccactaaaaagaaggataccactggctcatcctttaaacaagtaaacaaggatgctttggctagcgtggttgagagtgtgtttactgaaattagctacgacaccactatagttaccagcgaagccactgctacttttgatagtacagcttctacatcacagttaattgactgcgctacatacgggacatttaatacctctaagtcgtctacattcaactccaataatacagaattttcgatcgcctatggtgatacgacttttgcatctggtacctggggccatgatcaattgagcttgaacgatttgaacattacgggtttatcatttgctgtagcaaacgaaacaaactcaacagttggtgtcttgggtattggtttgcctggcttggagtcaacttattctggtgtttctctcagctctgtacaaaaaagctacacttacaataactttccgatggtgctaaagaattcgggtgtaataaaatcaacagcttattctttattcgcaaatgattctgattcgaaacatggtaccattttgtttggcgctgtggatcatggaaaatatgcgggcgacctatacacaattcccatcattaatactttgcagcatcgcggctacaaggatccaattcaattccaagtcactttacaaggattaggtacgtcgaaaggggataaagaagacaatctgacaaccctaaccactacaaagatcccagtcctgctagattcaggtacgaccatatcgtatatgccaactgagctggtaaaaatgcttgccgaccaggtcggagctacttactcttctgcatatggttactacataatggattgtatcaaagagatggaagaagagagtagcatcatctttgattttggtggattctatctttctaattggttaagcgattttcagctagtcacagatagtcgttcaaacatttgtatactaggtattgcaccgcagtcagatccgaccattattttgggtgataacttcttagctaatacttacgtggtatatgatctggacaatatggagatatcaatggctcaggctaacttcagcgacgacggtgaatacattgagattatagagagcgcggttccaagtgctcttaaagcacctggttactcaagcacttggtctacatatgaaagtattgtctccggcggcaacatgttttccacggcagctaactccagtatatcgtactttgcttccacgtctcattcggcaacaagttcttccagctccaaaggccaaaaaacccaaacaagtacgacagctctctctatttcaaaatctacctcaagtacttcctcaacaggaatgttatctcccacctcaagttcatctacgagaaaagaaaacggaggacacaatctgaatcctccatttttcgccaggttcattacagctatttttcatcacatttgataaatccctccctccatataagcatttactagactttaaaagttgcaatgtatatctggaggtataacattgtacattacttgaaagaaaagcgtctt

SEQ ID NO: 528 - DNA, 1964 bp, Saccharomyces cerevisiae
cctttgttttctctcatagtcttgtaacctcagcttttgttcattatgagtgaaagtggtcaagaacaaaacagaggcacaaatacatcaccaaataatgctgaaaataataataattcaaatgcagcttccggtccactcaatggtggtgctgagcaaacaagaaacataaccgtttccattcagtattcctatttcactccggagagattagcacatttgagcaatatatctaataatgataataacgaaaacaacagcgcagcatccggtagcacgattgccaacggtactgggcccagctttggcatcggaaatgggggccatcaacccgacggtgctcttgttttatcttttcgtgatgttcctgcgtctactccacaagaccgtttgaacagcttcatatctgttgctgctcagcttgcaatggagagattcaacagactattaaatagaccaaaaggaatatcaaaggatgagtttgataagctccccgttctgcaagtttctgatctacccaaggccgaagggcccttatgtagtatatgttatgacgaatatgaagatgaagttgattcaactaaagcaaaaagaaaaagggattctgaaaatgaggaggaatctgaaggaacaaaaaaaaggaaggataatgaaggtgcgcccctacgcacaaccgccgataatgacagtaacccatcgattacaaatgctacggttgttgaaccgccttctattcctctcactgaacaacaacgcactctcaatgatgaagaaacaaatccaagctacaaacactcaccaatcaagttaccttgtggccacatttttgggagggaatgtatctacaaatggtcaagattagaaaattcttgtcccctttgtagacaaaagatcagcgaatctgtaggtgttcaacgtgcagcccaacaagatacggatgaagtagcagctaacgaagctgcttttgaacgtattagacgagttttatacgacccaactgcagtgaatagcactaacgaaaatagttccgccccatccgaaaacacgtccaatacaacggttcccactatcggaaatgcaagttctggcgaacagatgttatcaagaacaggcttttttttagtgcctcaaaacggccaacctttacacaatccagtccgtttaccgcctaatgatagcgatagaaacggtgtcaacgggccgagctcaactactcaaaatccaccctctaattctggtggttcgaataacaatcaaagtccgcgctgggttcccatccctttgactttgttccaattccacagtccaaatccgaatccttccgcttctgattcttcggcaagcccatcagcagcgaacggtccaaactcaaataacactagtagtgacgctacagaccctcaccacaacagactaagagccgttttggatcacatattcaacgttgctcagaggggaacttctgatacctctgcaacaacagcacccggagcacaaactgttcacaaccaaggacgtaatgactcatcgtcctctgatacaacgcaaggaagttcctttttggaaaatatttcacgattaacaggccattttacgaatggctcaagagacaacaataacgacaataaccatagcaatgatcaacaacgaggtggaagtactggtgagaacaacagaaataacttgttttcctccggtgttgccagttatagaaatcaaaatggtgatgttactaccgtcgaactacgcaacaacaattctgctgcctttcctcctacagacgaaaatccctctcaaggccaaggttcaagcagttcggacaccaccattcataacgacgtccctaatgataacaatgagcaacgatcatcacaataaacaataccgcttctgaagtatgttaatatgaaaatatgtcctattggcagtcatccattttcagacattattttctactcctttta

SEQ ID NO: 529 - DNA, 413 bp, Saccharomyces cerevisiae
aattaacttccttacagccgtaaccgatgattgttaaagtgaagacactgactgggaaggagatctctgttgagctgaaggaatcagatctcgtatatcacatcaaggaacttttggaggaaaaagaagggattccaccatctcaacaaagacttatattccagggaaaacaaattgatgataaattaacagtaacggatgcacatctagtagagggaatgcaactccacttggtattaacactaagaggtggtaactagaaccattttccgtcatttatggaattttatcgaaggtgttcattagaaaagaagacaaaacgaacataagttcacttggactttggaaggctaccgcccccaatttgtcaaaaaaaaaaatacatacaatttagtctatagagtctgttataa

SEQ ID NO: 530 - DNA, 4658 bp, Saccharomyces cerevisiae
aattaggggtatcgtactaccgtaaagaacaagaaaatggctggtaatcttgtttcatgggcctgcaagctctgtagatctcctgaagggtttggacctatatccttttacggtgactttactcaatgcttcatcgacggtgtgatcctaaatctatcagcaattttcatgataaccttcggtatcagagatttagttaacctttgcaagaaaaaacactctggcatcaaatataggcggaattggattattgtctctaggatggcactagttctgttggagatagcgtttgtttcacttgcgtctttaaatatttctaaagaagaagcggaaaactttaccattgtaagtcaatatgcttctacaatgttatctttatttgttgctttagccttacactggatagaatacgatagatcagttgtagccaatacggtacttttattctattggctttttgaaacattcggtaattttgctaaactaataaatattctaattagacacacctacgaaggcatttggtattccggacaaacgggtttcatactaacgttattccaagtaataacatgtgccagtatcctgttacttgaagctcttccaaagaagccgctaatgccacatcaacacatacatcaaactttaacaagaagaaaaccaaatccatacgatagcgcaaacatattttccaggattaccttctcttggatgtcaggtttgatgaaaactggctatgaaaaatacttagtggaagcagatttatataaattaccgaggaactttagtagtgaagaactctctcaaaaattggagaaaaactgggaaaatgagttgaagcaaaaatcaaatccttcattatcatgggctatatgcagaacttttggatctaaaatgcttttagccgcattctttaaagcaattcatgatgttctagcatttactcaaccacaactactaaggattttaatcaagttcgtcacagactataacagtgagagacaggatgaccattcttctcttcaagggtttgaaaataaccacccacaaaaattacccattgtaagagggtttttgattgcgtttgctatgtttctggtgggctttactcagacatctgtcctgcatcaatatttcctgaatgtcttcaacacaggcatgtatattaagagcgccctaacggctttaatatatcaaaaatccttagtgctatctaatgaggcttctggactttcctctaccggtgacattgtcaatctcatgagtgtggatgttcaaaaattacaagatttaacacaatggctaaatttaatatggtcagggccttttcaaatcattatttgcttatattctctgtataagttgttgggaaattccatgtgggttggcgtgattatactagttattatgatgccattgaactcatttttgatgaggatacaaaagaagttgcaaaaatcccagatgaagtacaaagatgaaaggacccgtgttataagtgaaatactaaacaatattaaatctttgaagttatatgcatgggagaagccttatagggaaaagctagaagaagtaagaaataacaaagagttaaaaaatcttacaaaactaggatgttatatggctgtgacaagttttcagttcaatatagtaccattccttgtttcatgttgtacctttgctgtatttgtttatactgaggatagagcattgactactgacttagttttccctgctttgactctgttcaacctgctctcattcccactaatgattattcctatggttttaaattcttttatcgaagcttctgtttctattggtagattatttacattctttaccaatgaagagctacaaccagattcggttcagcgtttaccaaaagtaaaaaatattggcgatgtagccattaacattggagatgatgctacctttttatggcaacggaaaccggaatacaaagtagccttaaagaatattaatttccaagctaaaaaaggaaatttgacctgtattgttggtaaagttggcagtggtaaaacagctctattgtcatgcatgttaggtgatctattcagggttaaaggtttcgccaccgttcatggttctgttgcttatgtttcacaagttccatggataatgaatggtactgtaaaggaaaacattttatttgggcatagatacgacgcggaattttacgaaaaaacgatcaaggcctgtgcgttaactattgatcttgcaattttgatggatggagataagacattagttggcgagaaagggatctccttatctggaggacaaaaagctcgtttgtctttagcaagagcagtttatgcgagagctgacacttatttacttgatgatcctttggcagctgttgatgaacacgttgccaggcacttgatcgaacatgtgttgggtccaaatggtttattacatacaaaaacgaaggtattagccactaataaggtgagcgcgttatccatcgcagattctattgcattattagataatggagaaatcacacagcagggtacatatgatgagattacgaaggacgctgattcgccattatggaaattgctcaacaactatggtaaaaaaaataacggtaagtcgaatgaattcggtgactcctctgaaagctcagttcgagaaagtagtatacctgtagaaggagagctggaacaactgcagaaattaaatgatttggattttggcaactctgacgccataagtttaaggagggccagtgatgcaactttgggaagcatcgattttggtgacgatgaaaatattgctaaaagagagcatcgtgaacagggaaaagtaaagtggaacatttacctagagtacgctaaagcttgcaacccgaaaagcgtttgtgtattcatattgtttattgttatatcgatgttcctctctgttatgggtaacgtttggttgaaacattggtctgaagttaatagccgctatggatctaatccaaatgccgcgcgttacttggccatttattttgcacttggtattggttcagcactggcaacattaatccagacaatcgttctctgggttttttgtaccattcatgcctccaaatatttacacaacttgatgacaaactctgtgttgagagccccaatgacgttttttgaaacaacaccaatcggtagaattctaaacagattctcaaatgacatatacaaagtggatgctttattaggaagaacattttctcagtttttcgtcaatgcagtgaaagtcacattcactattacggttatctgtgcgacgacatggcaatttatcttcattatcattccactaagtgtgttttacatctactaccagcagtattacctgagaacatcaagggagttgcgtcgtttagactctattactaggtctccaatctactctcatttccaagagactttgggtggccttgcaacggttagaggttattctcaacagaaaaggttttcccacattaatcaatgccgcattgataataacatgagtgcgttctatccctctatcaatgctaaccgttggctagcatataggttggaacttattggttcaattatcattctaggtgctgcaactttatccgtttttagactaaaacaaggcacattaacggcaggtatggtgggtttatcattaagctatgctttacaaatcactcaaacgttaaattggattgttagaatgactgtggaagttgaaacgaatattgtttcagtggaaagaataaaggaatatgctgatttgaagagcgaggcacctttaatagttgaaggccacagaccacccaaagaatggccgagccagggtgatataaagtttaataattattccactcgttataggccggagcttgatcttgttctgaagcacattaatatacacattaaaccaaatgaaaaagttggtatcgtgggtagaacgggtgcgggaaaatcctcattaacgctagcattattcaggatgattgaggctagcgagggaaacatcgtaatcgacaacattgccatcaacgagattgggttatatgatttgagacataaattgtcaatcatacctcaggattctcaagtttttgagggcactgttcgtgagaacattgatcccattaaccaatacactgatgaagctatttggagggcattggaactttctcatttgaaagaacacgtgctatcaatgagcaatgacggattagatgcccaactaaccgaaggtggtggcaacttaagtgttggacaaagacaattattatgtcttgcaagagcaatgttggttccatcaaagattttggtgcttgatgaagccacggccgcagtcgacgtggagacagataaagtcgtccaagagacgattcgtactgctttcaaggacagaactatcttgaccatcgcgcatagactgaacacgataatggacagtgatagaatcatagtgttggacaatggtaaagtagccgagtttgactctccgggccagttattaagtgataacaaatcattgttctattcactgtgcatggaggctggtttggtcaatgaaaattaaactgtgaaactaataaaaacctgtcccgcacaatctggtacgtaggatggataaaataaataagtaaataagaa

SEQ ID NO: 531 - DNA, 2108 bp, Saccharomyces cerevisiae
actaaaattatcagagaagaagctgatatattagccctaaggagtacaccaaaacacaatgaatattgtcaaattacaaagaaaatttccaattttgactcaagaggatcttttttccacaattgaaaagttcagagccattgacttagatgataaaggatgggttgaaaaacagcaagctctagaagcggtgtccaaagatggtgatgctacttatgacgaagcaagagaaaccctgaagcatgtgggtgtggatgcgtcaggccgtgttgaactggacgattacgtcgggttggttgcaaaattaagagaatctaaaacaggagctgctccacagaccactttcaacgtagcacctaactcaacccctattgtttccactgctgccacaggactacagcacaagggtaagggtactcaagccaagattattgttgctggctcccaaacaggtactacacataccatcaatgaagaagaaagacgtgaatttactaaacatatcaatagcgtcttggcgggagaccaagatataggtgatttgcttccatttcctactgatactttccaattatttgatgaatgtagggatgggttggtgctatctaagttgatcaacgactctgttcctgatactatcgatacaagagttttgaattggcctaagaagggtaaggaattgaataattttcaggctagtgaaaatgctaatattgttattaattctgcaaaagccattggttgtgtcgttgttaatgttcattccgaggacattattgaaggtagagagcatttgatcctgggtttgatttggcaaattattaggagaggtttgttaagtaaaattgatattaagctgcatcctgagttataccgtctattggaggatgatgaaacgttggagcaatttttgaggttgcctccggagcaaattctactacgttggtttaactaccatttgaagcaagcaaactggaacagaagggttaccaatttttcaaaagacgtgtctgatggtgaaaactatactatcttgttgaaccagttggaccccgccttgtgttctaaggcaccattacaaaccacagatttaatggagagagctgagcaagttttacaaaatgctgaaaagctagattgtagaaagtatttaaccccaagttcattagttgcggggaaccctaaattaaacctggctttcgtggcacatctattcaatacacatcctggattagagcctattcaggaagaggaaaagcctgaaattgaagaatttgacgccgaaggtgagagagaggcaagagtctttaccttatggttgaactctcttgacgttgatccacctgtcatttcgctgtttgatgatttgaaggatggtttgatattattgcaagcttacgaaaaggtgatgcccggtgctgttgattttaaacatgtcaacaaaagaccggcctcgggtgcagagatatccagattcaaagccttagaaaacaccaactatgcagtcgacttgggcagagccaaaggattttctttggttggtatcgaaggatctgatattgtagatggtaacaaattactgaccttagggttagtgtggcaattgatgcgtagaaatatttcgataaccatgaagacattatcctcaagtggtagagacatgagtgattctcaaatattaaagtgggcccaagaccaggtaactaaaggtggtaaaaactctaccattagatcatttaaggaccaagctttatcaaacgcccacttcttattggatgttctgaatggtatcgcgccgggctatgttgattatgatctagtcacccctggtaacaccgaggaagaaaggtacgcaaacgcaagattggctatttctattgctagaaagttgggtgctttgatttggttggtgccagaagatatcaacgaagttcgtgcaagattaattattacttttatcgcttcgttaatgactttgaacaaatgagccaacaaacaactttcgtaacctgttttctactcagctttcttgttccaatgctccgttatacgattggttaagtgtacaacaatatatagcctcaagtatttctgaagtttttaatatg

SEQ ID NO: 532 - DNA, 1911 bp, Saccharomyces cerevisiae
ttacaatgtagatatggaaggtttcttcaggatacccctcaagcgggcaaatttacacggaatgttgaaggctgctatatccaaaattaaagcgaattttaccgcgtatggtgcaccaagaatcaatattgaggatttcaatatagtcaaggaaggaaaagcagaaattcttttccctaaaaaggaaactgttttctataatcccatccaacaatttaatagagatctaagtgttacatgcatcaaggcgtgggacaacctatatggtgaggaatgtggccaaaagagaaataataaaaaaagtaagaagaaaaggtgcgcggaaactaacgatgattcttccaagcgtcaaaaaatgggaaacgggtcaccaaaagaagccgttggtaattctaatcgaaacgaaccttatataaatattttggaagcattgtcagccactgggttaagagccattaggtatgctcatgaaattccccatgtgagggaagttattgctaacgatttacttccagaggctgtcgaatctataaaacgaaacgttgaatataatagtgtcgaaaacattgtcaagccaaaccttgatgatgctaatgtcttaatgtaccgtaacaaagcgacgaataataagtttcacgtcatcgacttggatccttacggtaccgttacaccttttgtagatgcggctattcagagtattgaggagggtggtctaatgctggtaacttgcactgatttatccgttttggccggtaacggatacccagaaaagtgttttgccttatatggtggtgcaaatatggtttctcatgaatcaactcacgaaagtgcgctgagactagtattgaacttactaaagcaaactgccgcgaaatacaagaaaactgtggaaccgcttttgtcgttgagcattgacttttacgtcagagtttttgtcaaagtcaaaacaagcccgattgaagtcaaaaacgttatgtcaagtactatgactacttaccattgttcccgttgcggctcttaccacaatcaacctctgggcagaatttctcaacgcgaaggtaggaacaacaaaacattcaccaaatactcggttgcgcaagggcctccggttgatactaaatgtaagttctgcgaggggacataccatttagctggtccaatgtatgcaggacctctacacaacaaggagttcatcgaggaggtgttgagaattaataaagaagagcatcgtgaccaggatgatacatatggaacacgtaaaagaattgaaggtatgctatctctagctaagaatgaattatccgattcgccattctatttcagtcctaaccatattgcatcggtaataaaattacaagtacctcccttgaaaaaagtagtcgcaggcctaggttccctaggctttgaatgttcattgacacatgcccaaccatcgtccctaaagactaacgctccatgggatgcaatctggtatgtgatgcagaaatgtgatgatgagaagaaagacttaagcaaaatgaatccaaatactacgggctataagattttatcggcaatgccaggatggttgagtggcactgtcaaatcagagtatgactcaaagctgtcgttcgcaccaaatgaacaaagcggtaatattgaaaaactaaggaagctaaaaattgtgagatatcaggaaaatccaacaaagaattggggcccaaaagcccgtcccaacacttcataagaattttgattagtgttagagctaaaacgtaagaaactaaggatccgcccgagaacggtataatggacggaaaagaatgcttctcttttgtaatatagatgtttaaagtaatcaggagggcagtatgtatgtgtaaaaaataaataaatatatatatatatttgaggaaccagatctcaaatgaa

SEQ ID NO: 533 - DNA, 980 bp, Saccharomyces cerevisiae
aaacagtgataagtcatcaaagaagatgctatccgtagtagcgatcccgaaaatatgtgtcacaggtcctgcaagaagatgcttttttcatactgcaaaaaaactatacgcagatgactataaaccagcagctatgtcctccaatgcaccttcgctaacaaaagaccaagccaaaaaaagagagttgaaaagattggtacaacgaaaggccgaggcaaagagaccagctacagcaagcccattgtacatgcctgttacaaaggcactaagatatttacgcgcagcagaagttggcagaccgcaatcgcaacagacaattaatttgactacattggtagtcggtgaaagaggtacagcgcctttatccggtagcgtgacatttcctaagcctttgagatatatcaaaattgctgcctttaccaacgacgaaagtaaattggaagagcttcgtgagaaatacccaaatcatttgattggcggagcagatcttgttgccaaaattaaaagcggtgaaattagcgttgattttgacaaagcatttgcaactcctgatattgttccagctttacaatcgcaggtggccaggatacttggtcctcgtggggttttaccctctgtcaaaaaaggtacggtgagtgatgatataagctccttacttcaagaaagtctaggatctatgcctttcaggcaaaggggaaactctatcagcattggagtcggcaaatgctacttcactgatcgagaaattttacaaaacattatatccgctagagcggcatttaaaactgctgttgataatcaaaaatctaagaaaccaaatatactgagtaaaaccacattatcaagcacacatggccccggtattgtaatcgattttgcttaatcagcgaatcagttttgtcttgttggacttttttaattgtatatatatatatactggtgcattttctttctttttatataaaatcatgtacatacaa

SEQ ID NO: 534 - DNA, 1751 bp, Saccharomyces cerevisiae
atgacaatgacacaccaacaggatttgaaaggtgtgttcaccgcaaaggatttggattttaagcccgctggcaagattactaaaaaagatttgaatacaggtgtcactaaggcagaatatgctgtaagaggagctattccaaccagagctgacgagctaaaagaggaattgaaaaaaaacccagaagttttgcctttcgatgatattatcaatgcgaacattggtaatccgcagcaactggatcagaagcctttgacctttaccaggcaagtactggccatcctggagtacccggaaattttacgagtaggccataatgaactggcttctttgaacttgttttccagggacgccttggaaagagctgagcgcctcttgaatgatattggcggttctataggggcatattcgcattctcaaggtgtgccaggaataaggcaaacagttgctgacttcattactagaagagacggcggtgagcccgctacaccggaagatatttatttaaccactggcgcttcgtccgcggcaacttctttgttatctttattgtgtaaagattctcaaacaggcctgctgattccaattccgcagtatccgctttatactgcatccgcatctcttttcaatgcacaagtgctgccatactacttagatgaggagtcaaattggtctacaaacagcgacgaaattgaaaaagtagtgcaagatgctttgaaaaaacagatcagaccatctgtgctgatagttattaatccaggtaacccaaccggtgcagttctttctgaagaaaccattgccaggatctgtttgatcgctgcgaaatacggcattacaatcatttctgatgaggtctatcaagaaaacattttcaacgatgttaaatttcattcgatgaagaaagtcctaagaaaattgcagcatctttatccaggaaaattcgataacgttcagctcgcctctttacactccatttctaaaggattcatggatgagtgcggccaaagaggcggttacatggaaattattgggttttctcaagaaataagagatgctcttttcaaactcatgtctatatccatatgttctgttgtcacaggacaagctgtggttgatttaatggtcaaaccaccccagcctggagacgagtcctatgaacaagatcatgacgaaaggctgaaaatttttcatgaaatgcgtacgagagcaaacttattgtacgagacgtttaaggaactagagggtatcgaatgccaaaaacctcagggtgcaatgtatcttttccctaggcttgttttacctaagaaagctctttgtgaaagcgaacgccttggcatcgaacctgatgagttctattgcacatctttgctagaatctacaggtatttgtactgtcccagggtctgggttcggacaaagacccgggacttatcatgtgcgaacaacgtttttggctccagggactaaatggattcaagactggaaagaatttcatcaagatttcttcagcaagtatcgtaattgaatgaaaaaaaaaaactaatgataatggctttctatttgttttgcatccatggtgggggtgaagtttaaatttgtaatagtatacatgcatcattctttactaagggaaataaggaaaagtatatatctgcctcttgtaatattgttcaaggaaataaattttggagcattcctctgcatctattgttcaattaaaaaaaaaaaaaaaaaaaaaaaaaaaaaaaaaaa

SEQ ID NO: 535 - DNA, 2096 bp, Saccharomyces cerevisiae
atgaaacgaggtgtttggttgctgatttattgctatgcaactttaactaaaggattttccttgccaggcctatctcccacaacatatcactcaggcgatgaaatcccgctattggtgaaccgcttgactccatcaatttactttcagcatcaagatgaggaaggtaacgatgtttcaggcgataaagaacattttctttactcctatgattactataataagaggtttcatttttgtagaccagagcacgttgagaaacagcctgagtcgttaggttcagtcatatttggtgacagaatttacaattccccattccaattgaacatgttagaggagaaagagtgtgttgcactttgtaaaagcacgattccgggaaaagatgccaaatttatcaacacccttattaaaagtggatttttccaaaactggctcgtggatggattgccagcagcaagaaaggcttatgatagcagaacaaaaacaaactattacggcacaggatttgagttaggttttacagatgttaagcaaaccgttgacggtaaagcagttcccagtacgatggaagagcttacttcagaggcctcaaatgaggatgttatattggatgctcgactgcccaagaatgttaagcctaatttagttaaaacggtagaattaccttactttgtaaatcattttgacattgaagtggaatttcacgatcgtggaaacgataattaccgagttgttggtgtcattgtaaaccctgtatctatcgaaagatcgtcacctggcgcgtgttctacaacgggaaaacctctgatactagacgaggataaggataacgaggtttacttcacttattctgttaaatttgttgcctctgatacagtgtgggctacgagatgggataagtatctacatatttatgacccgcagatacaatggttttcattaataaatttttccgttattgttattttgttgtcatctgttgtaatgcattctctattacgggctttgaaaagcgatctcgctcgttataacgaactaaacttggataatgaattccatgaagattctggctggaaattgggccatggtgacgtatttagaaccccatctaagtcgatgctgctatccattcttgtgggatccggtatgcagttatttttgatggtcatgtgtagcattttttttgccgcagtaggtcttgtgtcgcctgtttccagaggatccctgccaactgtaatgtttgttctttatgcattatttggatttgtaggatcctacgcctcaatgggtgtctacaaattttttcgtggaccctattggaaggcgaatatgatattaacgccaatattacttcctggagcaatttttttactgattgtaataatgaacttctttttgttatttgcacattcttcaggtgtcatcccagcgagaagcctattctttatcattcttctatggtttttagtttctgttccgttgtcgtttgcgggttcaattgttgctcataagcagtgtaattgggatgagcatccaactaaaacaaaccaaatcgccagacagattccatatcaaccctggtacttgagaacagcacaagcaaccttaatcgctggaattttcagtttcggatcaatagcggttgagctgtacttcatttactccagtttatggttcaacaaaattttttatatgtttggatttttactcttttcattcttattgttgaccttgacaacctcattagttaccatcttgatcacatattactcgttatgtctagaaaactggctatggcaatggagaagttttattattggtggtttaggatgttcaatctatacgttcatccactccatactatttactaagttcaagcttggtggagttattactgtcgtgctctatctcggatattcacttattatatctgcattatgttgtgtcgtcactggagcgattggtttttttagtagtatgttttttattaggaagatatactctgccattaaagttgagtgatttcgttattctctccactaaagtaaaagaagtgaatacgttagttttatttttttttttttttttaattttttgag

SEQ ID NO: 536 - DNA, 1738 bp, Saccharomyces cerevisiae
ctatcacaatagtattcgacatttcctcatagggtttcctgggtagattttttttatcatttcacagtgtcgaatattgtagtatttgtacctcttttgtttatgtctctcggctacaatagaagttccgacaattagattctaacaaaaaagagaactgtttttgaggtctttatgcccccaaaacgaagtttataatcaaacaacagatttacttcatatcaaaatacccatcacaaagtacaacaatctaccatgggtgccgtaatttctttgccagttagcatggcgggctcattcgtggcgtcctgttttggaggttgctgctcaaacttggtgactaagactgcatcttccctaggatcttcttctttagggacaagacttctgtacgccgtttggcttttacttaactcattgatatcatgggtgtcctattctgcgaacaaatcaatcctatggccagggaagacatgtactgggactggggaatgtggattttttacagttcataggttgaattttgcattgggatgcttacatttgatattggcgcttgtactaacgggcgtaaagtcgactaatgacgtaagagcagcattacagaattcgtggtggagtttaaaatttatactgtatttatgtctcattgttttgtcatttgtcatccccaatgacttttatattttcttttccaagtgggtgtcagtccctagtggagcaattttcatcctggttgggcttatattattagtagacttcgctcatgagtgggctgaaacgtgtattagtcacgttgagtcagaagatgaagattcctcattctggcaacgatttttggttttagggacaacttcaatgtataccgcatcgattatcatgactgttgttatgtatgttatgttttgtcatcaacaatgtaacatgaatcaaacagcggtaacagtcaatttaatattaactgttataacgcttgtcttatcggtgaatcctaagatccaagaggccaaccctaaaagtgggctggcccaaagtagtatggtttctgtttactgtacttatttgacaatgagtgccatgtcttccgaaccggatgacaaaatgtgtaatccgttggttagatctagtggaacccgtaagtttagtatcattttgggctctttatttacttttattgcgattgcttacaccacaactagagccgctgctaatagtgcttttcaaggcaccaatactaatggtgctatatatctcgggaatgatatcgagtacgaaggactaggtggacagacaagaaatcagttgaggtatgaagctattaaacaagctgtagaagaaggatctttaccggaaagtgccttatatgataccgcttggttagggacatcatctcctacaggcgcaatggataaccaaaatgatgatgaaaggactggaaccaagtacaattacactctgttccacgttatattctttctggcaacccagtggattgcaattttactaacaataaacgttacccaggatgatgtaggtgattttatacccgtaggaagaacatatttttattcttgggtaaaaatagttagtgcatggatatgttatgccctttacggttggacagtggtagccccagcgattatgcccgatagatttgattacgagaattactattaaatagactaacacaaaaagattttcttataatgtatgtaacttttttttaagtagcccccag

SEQ ID NO: 537 - DNA, 1884 bp, Saccharomyces cerevisiae
cgacccgactaatattgctaaaactatcatggctctagctatctcccacgaggatactcagattttgctaaaggacaaaaatattctacaggaatcggtcttgaacaaatacagaactgctggacaaatcgcacaaactgctttgaaatatgttacttctttgatcaatgattcatatcactctaagaccacacagcgccaattaaccgtgccagagctatgtttgcttaccgattcttttattttgacccggttggaacaatattataaaaacaaagttaatgaaagaggtattgccattccaaccactattgatatcgaccaaatttctggtggatggtgccccgaaatagatgatactcaaaatttgttaaactggaataaggggaaagactccacttttgcatcatctgtcactgggactttgagaccgggggatttagtcaagattacactaggtgttcatattgatggttacacctctgaagtttctcatactatggttatttaccccgttgatgaaaccaaacctattcttcaacccactgggccactactaggtggtaaagcggatgctgtagctgctgctcacattgctatggaaacagttgttgctttattagcctgtgctctgactccagaaaagcttcctgcctcactgggaggaacttcaagtggtatcacaggccaattgattagaactatagtggatactattgccagatcttataactgtggcgttgttcctggttctcgtgtaagaaggattagaagattcctggcaggccaaaacgaaggtattgttgccgaaagggaatataagggtgttgtttggacagagtcccatcaagaagcagatttgctatctaatactgatgccaaggatttaacagtggtagatcgtggacaatcgactccattcactaatgtttctgctattccaagtgatgatttcgttgttcaatcaggtgaagtgtatttaattgatttgaaaatggcatctttggagcattgtaccaaaaagggtttagtaactttagaaaccgttgactcttacacaggtaaatctcataaggctggagaattgattgcaagacccggtgcatatgttagagattttgctcaaacccatattcttaaattaaaaacttctagacaattattaactaaaatcgataaacaaggcgtttatccattcaagttatctcatttatcttctaactttcctttcgttcacgaaaatgaagaagaactccaaagcttaaagaaagatttgaaatcatttagacttgggatgagtgagatttccaacaactacttatgtgtggaaagtccaatacaaattgctagatgggttccatgggaccatattttaaaggctaccaatccaaacggtaatttaagttatgatgcaacctctacattaacattacctgggcatgagttacctttaccaaaattgggtgtttcagccatcaagcttaaatccttaatgaattcaaccaaggaatcgatttctttaccagttgctcgtgaatgtaataccatcgtattatgtgactctagtgtaagtacaacggacagacccgaattattgagattaactggtggttctaagacctgtcaaccgagctggattcactctcagcacgaattaaatccacaagattcaattgttcaagggatctttcaattagctactttggccaaggataagaggttcggtctattattaaaggaaacgcagccaatgaagcagaagagtgttgagacatcaaatggcggagttgaagaaaccatgaaaatgtaggaaacttcatcatttctaaagctagtatataaataatataagtatatcataaaatgtaaaatagaatattataa

SEQ ID NO: 538 - DNA, 858 bp, Saccharomyces cerevisiae
atgtgttcttttcaggttccatctgcattttcttttaactacacctcgtactgttataaacgccaccaagcaagatattacacagcagcaaaactttttcaggaaatgcctgttattgaaattaacgatcaagagcaatttacttacctaactaccactgcggccggcgacaagttaatcgtgctttatttccataccagttgggcagaaccatgcaaagcattaaagcaggtttttgaggccattagtaatgagccttccaattccaacgtctctttcttatccattgatgcggacgaaaactcggaaatttcagaactttttgaaatctcagctgttccatattttatcataattcacaaagggacaatcttaaaagaattatccggcgcggatccaaaggagtatgtgtctttattagaagactgcaagaactcagtcaattccggatcatcacaaactcatactatggaaaatgcaaacgtaaatgaggggagtcataatgatgaagacgatgacgacgaagaagaggaagaagaaactgaggagcaaataaacgctagattgactaaattggtcaatgccgcgccggtaatgttatttatgaaggggagcccctctgaacctaaatgcgggttttcgagacaacttgtgggtatcttgagagaacatcaagtaagatttggcttctttgatatattaagagacgaatctgttagacaaaacttgaaaaagttttctgaatggccaactttccctcaactttatataaatggggagtttcaaggcggtttagacattatcaaggaatccttggaggaagaccctgattttttgcagcatgctctccaatcttaa

SEQ ID NO: 539 - DNA, 2214 bp, Saccharomyces cerevisiae
tcattgtgatctgtttcagcgcgaattccacctagccttctgcaaaagttcttaagaaaacacgacagaccataatgagtgataaaaacagtcgtatcgctatcgttagcgctgataaatgtaaaccaaaaaagtgtcgtcaagagtgtaaacgttcgtgtcccgttgtgaaaactggtaaattatgtattgaagtcactccaacttcaaaaatcgcattcatttccgaaatcttgtgtattggttgtggtatttgcgttaagaaatgtccatttgatgctattcaaattatcaatttgccaactaatttagaagcccatgtaactcaccgttactctgccaatagtttcaaactgcacagattgccaacaccaagaccgggtcaagtccttggtttagtcggtaccaacggtattggtaagtctaccgccttgaaaatcttagccggtaaacaaaaacctaatttaggtcgttttgatgatcctcctgaatggcaggaaattattaaatatttccgtggttctgaattacaaaattacttcaccaagatgctggaagatgatatcaaggctataatcaaacctcaatatgttgataacattcctcgtgctattaaaggtccggttcaaaaagttggcgaacttttgaaattgagaatggaaaaaagtcctgaagatgtgaaacgctacatcaaaattttacagttggaaaacgttttgaaaagagatattgaaaagttatctggtggtgaactgcaaagatttgccattggtatgtcatgtgttcaagaggctgatgtttatatgttcgatgaaccttcatcttatttggatgttaagcaacgtttgaatgccgctcaaattattagatctttactagctccaactaaatacgttatttgtgttgagcacgatttgtcagttttggattatctttccgatttcgtttgtatcatatatggtgttccatctgtttacggtgttgttacattaccagcctctgtcagagaaggtatcaacatattcttggacggtcatattcctgctgaaaacctgagattcagaactgaagctttacaatttagaatagctgatgctaccgaagacttgcagaatgactctgctagtcgcgccttctcttacccaagtttgaagaaaactcaaggtgattttgttttgaatgttgaagaaggtgaattctccgattccgaaatccttgttatgatgggtgaaaacggtaccggtaagaccactttgatcaaattactagctggtgctttgaagccagatgaaggacaagatattccaaaattgaatgtttctatgaaaccacaaaaaattgcaccaaagttcccaggtactgtcagacaattgtttttcaagaaaattagaggacaattcctaaatccacagtttcagactgatgtcgttaaacctttaaggattgacgatattattgatcaagaagtccaacatttgtctggtggtgaattacaaagagtcgccatcgtcttggcattgggtatcccagcagacatatacttgattgatgagccatctgcctacttagattccgaacaacgtattatctgttctaaagttatcagaagattcatcttacataataagaaaactgcgtttattgtcgagcacgatttcatcatggctacttatcttgctgataaggtcattgtttttgaaggtattccttccaagaatgctcacgcaagagcccctgaatctttgttgactggttgtaacagatttttgaagaatttgaatgtcaccttcagaagggatccaaactccttcagaccaagaattaataagctagattcccaaatggataaagaacaaaaatcatcaggaaactactttttcttggataacaccggtatttaagcatcttgggattcggagaaccaagaggacgattgttttatttttgggtttagaaatgtggagaaataattaagagttataatgtttttgcaaaacaaaatgagtattatattacattgagttccttcccaagcatcgggttgtttatttctagatatacgccaactaatacatttctaacttcccaccttcattacatcataacctgaaagtgaacaacctcctcttcggtgatccgtactccagtttatttcatttttctgtaaagcaactacactatatttattctctatttattttatatacctattgt

SEQ ID NO: 540 - DNA, 1380 bp, Saccharomyces cerevisiae
taatgctttccttctggtgccttctactttccgctgatctctattttcaaattaaccgctgaaatataaactgtggaatactataacataacatagatttaagaataaggtattcatgatctctgaaaaggctgctaccgctttagctactatagcaacagtttgctggtgtgtccagctaattccgcaaataatatataattggaaaaaaaaggactgtacggggctgccaccactgatgatgttcctctgggttgtttccggaattccatttgccatatatttctgtgttagtaaaggtaatgtcattttacaagttcaaccacacctttttatgttcttctgttctataagtttcgtccaatcgtgttattatccaccaatcagtatggcgagatccaaaatagtaatgattgtagctgctattattgcggctgatgttggcatggaagttggctttatattatggctgaggcccctttacgagaagggtgttaaatggcccgatctgatttttggtatttctgcatctgttttgttagctgtcggactgcttccaccttactttgaactagccaaaaggaaaggtcgtgttattggcatcaactttgccttcttattcatcgattcattaggtgcttggctatctatcatcagtgttatcctaggtaatatggatattatgggtattatattatactcaatagttgctggaatggagttaggaattttcgcgtctcatttcatatggtggtgtaggtttagattcctagctaaaggcaatacttttgacgaagaaagtggccaagctcaaaaggaagaacccgatgaaaaaatcgaacaagatattagcaagagtgaccgaaatgttactaactataacctggataactgttcaatccccgacgatgcttcgagctttgcagacgattttaatatatacgatagtactgatggggggacgttatcaagagcccaaacattgcatgctgtccatggagttgtggttagaacagatcctgatcgttattcgaggctaagtgtgtaacgaatctgagtcctttttagttagcacgttttcatctctttttgatagcacgcttaataatattcaccactagcgcagtaatatggcatctgccgcaggtgtaaaggttttcacttcgcttatattcacaatactatgcgttcaaacacggccatcagaaaagatcaaaataaggattattaattaaaaacttaaacagaaattcagtttgcaacacccttcgcaatggcgaagtttccaaaaacaaaatctccaaacaagattaacattcttcttatgtaaccacatgatatgcatattttatatagactgtacacatgaaaaacttttat

SEQ ID NO: 541 - DNA, 905 bp, Saccharomyces cerevisiae
atggagacctccaactttgttaaacaattatcgtcgaacaacagaaaaaccagggtaaatgcactcgaagcgttaaagaaatatctaaccgctaaacagttcaaggagaacaaacaaatagaattcaataaactttggaagggtctttactatgcaatgtggttcagtgaccgtcctagacctcagcaacgtttagccaatgaattaggtgaattgcatggattatattttgatcctaaggacaatagcactgcagatgagttgaccacaaacgataaagcatttataaagtttagcagagggttttggaaggtcatgtgctttgaatggtttaacattgacagatataggttggataagtatcttctattgataagaagggtattattcagtcaattgaagtatttgcagtccagaaactgggacaaaaaattagtcgacgagtatattaagaaagtgttgaggtggttacctctgagtggaagtccaaaggtctacacagggattccaattcatatcgtcgatattctgctggacgaatgggaaagattgcttaaagatggagatgaagacgatgaagacgaggaaaacaaagaggaagagatgcgcaaaattgcagagagcgcaaaaaaaacgccactagccgatgttatcgcaattttccaagatatcgtggcagattacaataacagtaaggtgttgagagagaagatcaaagaagacctattcagtgacaccagacttgtttcctgggatattcttgaaggcgaaacgcaacataatgattccagtaacgaatctgaagaagaggaagaggaagagtggaagggattttgattcttcctggcggtagtatgtaagtaatcgtaagtcgctcatataaattgtagttgtatatctatagt

SEQ ID NO: 542 - DNA, 522 bp, Saccharomyces cerevisiae
acaaggaaaatagtacagattggcgtgtattgtccataactcgtgtccattgtccgcactacgctagtttaccaaagataaaatcacgtataacattgaaaaataaaatggctagagctagtgaaaaaggtgaagagaaaaagcagagcaacaaccaggttgaaaagctggttgaagcacctgtagaatttgtcagagaaggtactcaattcttggccaagtgtaagaaacctgatttgaaggaatacaccaagattgtcaaggctgttggtattggttttattgcagtcggtatcattggttacgccatcaagttgattcatattccaatcagatacgttattgtttaaaagagataaaagacgagaaaaaataaaaacaacggcaccagaaccaaaaatcaaaattaagtagtattctttatgtgcatttttccctttaaattataacctttctatcggtatagtgtgtatatgttcagccctatataagaatttactctaaagaggtggaaggcaagag

SEQ ID NO: 543 - DNA, 764 bp, Saccharomyces cerevisiae
tttacggttcaatacgcttttataaacctgctggtgctctaattacgaatgaaacatggaccaggcaagaaatttctacaacacaattttaaaatcgtcgcacccgttgctactatcatttcatctggcaggtaaggcagttcccattgtattttatatcataggatcaatgtttttgaatttcacacctcaattcatcactgtcgttcttttactttcttttgacttttacttaacaaaaaacattacaggtcggaaactggtccaattacgctggtggtatgattctacagatgtgaacaaagattctaattttactttcgaatcatataagcaatatgcgccgggcccaccaataaatgccatcgattctaagttattctggtggtcgatgtatgtgacacccgtaatctggggtgtcttcgctgtgttgtgtcttttaagactgaaaatattctacctgattttggtcattgttgcaatgtgtctgaccgcctggaacacgtatggatttcgttgttgcgatagatgggagcccaatagtggacaatctgacggtcaagatactaataattggttcgctcttccttctgttccgggctttgaaaatctttcaaggctggctaatatccaatcgtttttccagagacaataaaaccttgtccctcatgtgaacattgtggagtacttcttctagatgatttttactttacgcaatgtactacaggaaaagaatacaattatatgtataaatatagtataca

SEQ ID NO: 544 - DNA, 444 bp, Saccharomyces cerevisiae
tagaagtgtactcccaatagagacaaagccaagatacttttgtaaaagaacgaaaaaatggctagagcaagaaagggtgcactggttcaatgtgatccatccatcaaggcgctcatattacaaattgacgccaagatgagtgatatagtactagaggagttggatgacacccatcttttagtaaatccctcgaaagtcgaatttgttaagcatgagctaaataggctattatctaagaatatatataatcctatggatgaagaagaaaatcagtaattattgctcattcagctttttcaatactatttgaatagagcatgacctgcataaccaggtcagacatgaatatagaggggaagtgatgatctagtggaaatacgactatacaggtatgtacatgttagaataataaatataaggaagaaaaagtggtcaggtgcaagt

SEQ ID NO: 545 - DNA, 2326 bp, Saccharomyces cerevisiae
ggggttatccttggttactcgtaaatgccaataatccatcttgaataattcctattcgagacgcatggggaaatgcaaggcaagctaacacgtagtagaataccctgctgcacagcgccgttggggtctcaagtgcaattgccgttttgcgcggcgataaacggctaaagattacttcagttggccacggcagctgcgcccttcccgagtggattacgctcacgtgctttccgcggaacaaaaatgtgaacgccacgggaaaaaagcattatccccgcgccgcttcttgacgcctctgattgtgctgattgattccgctttttttttttaccggcttttttctccgccttcttcgcctcaatcgagagttctggtgtaaattctcttacgaagtgcaaagttagtaggaaagtaaaaaaaataagaaaaaggaaaaatgcctagaaatgcagacctccggccacaacatttttatataatacattcgagcatcaaaaaccaggaacaatagaagagtaatcgctacttgtcaaataaaaataaaaaaaggaaacctaaggcatagtgttttcataagcatcgctactttttcattgccaccctaactgttcctttatttcaccggttggacgttatcatttctgctaagaatcacctaaagtctttcaacgtctaagaaagcatgaatgtcatattttctttggcgagtttcgtcaaaaacatgtataatgcaagtttgaaccaacgtaatctaataagcctgccgttcaacttcatgcttaattttgcgccagtgtttatttggctgtctatattcaagcgcgctggtctgatacccataaggctcagacctgacattcatagcaagtttgctttttttgctgatcaattcctctttggggactattggcatgaacttactgtacaattgcccgataatacttcgaagctatttttctggtcattcatatcatcttctgcatttctcttagtatttctgatatgtattccctttgccatttggtactacatctattacattaagcacgttaactataatctgttagagtggttcgcaaatatttttcattacccctgcaagcgcaagcagcggccgatccaaaagagatttcggacaattttcataccgtttgccttgcccctgtttacatttgttatactcaacattgatcatttctttgcttaccagtcggatgcaaactttactaagaccaaggatttactggcttggttctcctatgtcatcctgcacttgacagctccaattttaacagctgtatacttatacgtcttccaaccaccggggactttaaaatgctttagttttgccctaggattacaaaatatagcgggggtccttacccatctgcttgttccaatggcctccccatggtttactcatctgtacggtattgatgacaccgaacatgttaattacacccaggaagggtttgctgccggtttgataagagtagatagccatttgggtactcatttgaacactaaaggatttcacatgtctcctattgtgtttggtgctgttccttcactacactccgccattgcatttcaatgtttcttgtttttggtttcaaggtccaccagcttaaaacacagattttccaatgctggaggtttcacaatgcacaataatgattcttccactttcaagttgagtgaggaagacagcgaagatgaaggtgacaatagcataccgcccacgattggccctaacgacttagagatggaaccattgggtaccgttgagcctgtagatatttcaaatgagcggtcctcctccccttcatcttcattcaccgtatccagtaatgaaagaagcaccggcggcggcgacggcagcattattaacagcaatggcaataagaaacctctccagtttgtccatttatatgatgaagacacgaacttcacaaacaaatggatttttaaaatagtcaacgatgggtttataccaaaattctgggctatcctatatataatactacaatggtgggctaccatgtatctggaccaccattatagatttgaccttttcgttggtgttttatatgcaatgacaagtttcatcatcataaactggtttgttttacaaccaaaagttttaaaaaagtggattcatataaggttaggcgacaaagtggatacaagaaacgaagctcgcacttttggcatgagagtattttgtggcaccaagatggaatggttttttgatccgcttgcatagactatagaatgtcataatgtaataaaagtaatttcggataatttaaataatatagattgg

SEQ ID NO: 546 - DNA, 714 bp, Saccharomyces cerevisiae
taagaagaattggacatcagaatacttttctcggagaaaaaataacaccaatacattacgattaaataaaaagttaaaatggcctcctcaagtagcacgctaccgcttcatatgtatattagacccttaatcattgaagatttaaagcagattttgaacttggaaagccaaggtttcccaccaaacgaaagagcttcagaagaaattatcagctttcgtttgatcaattgtccagagctatgttcaggtcttttcatcagagagatcgagggcaaagaagttaaaaaggagacactaattggtcatattatgggtactaagatacctcatgaatacattactatcgaaagcatgggcaaattacaagtggaatcgagtaatcatattggtattcactctgtagtaatcaagccagaataccagaaaaaaaacctggctactttacttttaactgactacattcagaaattgagtaatcaggaaattggtaacaaaattgtccttattgctcacgagccattgataccattttatgaaagagttggtttcaagatcattgctgagaacaccaatgttgctaaggacaaaaacttcgcagaacagaaatggatcgatatggagagagaactaattaaggaagaatacgacaactagatcattagtttaacgcactttacaaatgtctaattataaatactacatataatttttgta

SEQ ID NO: 547 - DNA, 590 bp, Saccharomyces cerevisiae
ccatcttgaaaagtcattttctgctcaccaccctcaactaaactaaaaatgtcttcctccaagcgtattgccaaggaattaagtgatttagggagagatcctcctgcttcatgttcagcaggacctgtaggggatgacctgtatcattggcaagcctctattatgggtccttcagactcaccctacgctggtggcgttttctttttgtctattcactttccaactgattatccattcaagccaccgaaggtaaactttacgaccaaaatttatcatccgaatattaattcgagtggtaatatctgccttgatattttaaaggaccagtggtcaccggcgctaaccctttcaaaagttttgttgtctatttgctctcttttaacagatgctaatcccgacgatcctttggtccctgaaattgctcaaatctacaagacagataaggctaagtatgaagccaccgctaaggagtggactaaaaaatatgctgtttgattaatttgggctaacggataaattgtgtagacttaccttcctcagcgcacacatcaatatattatatattctttacgtatacaaacacgcaaatt

SEQ ID NO: 548 - DNA, 764 bp, Saccharomyces cerevisiae
acaaggtggtactattcaacactatctaacaagaactgtacaatactcattgaaggaaagatgcttgtgcggctgttgcgtgtgattttattggccagcatggttttctgtgctgatattttacaattaagctattcagatgatgcgaaagacgctatacccctaggaacatttgagattgatagtacatccgatgggaatgttacagtaacaaccgttaatatacaggatgttgaagtttctggagaatactgtttgaatgcccagattgaaggtaagctggatatgccatgttttagctacatgaagctgaggacaccactaaaatacgatttaattgtggatgtagatgaagataatgaggtcaaacaagtgtcgttatcatatgacgagactaacgatgctattactgctacagtcagatatccagaagcgggacctactgcaccagtcaccaaattaaagaagaaaaccaaaacttatgctgataaaaaagctagtaagaataaggatggaagcactgcacaattcgaagaagatgaagaggttaaggaggtgtcttggtttcaaaagaactggaaaatgttacttttaggcctattgatttacaattttgttgcgggctcagcaaagaagcaacaacaaggaggtgccggagctgatcaaaagactgagtaaataaagtattgtgattttttaaatttttaagtgtcgttacttttatctctttcccgaaaatatttgaatacataaaatttttaaat

SEQ ID NO: 549 - DNA, 1400 bp, Saccharomyces cerevisiae
taaagagcatactattacaaaataataggagctttgcgtttgttatttcagtcgaatagtactcctttatactctctgccgctgacatctttgtcctttactgtttaggacttatagcgactgttattttttagtacaccaaacaaggaaaaaagaacaatacaacgtaaatatgagtagtcgcaaaagcaccgcttctagcttactgttacggcaatatagagaacttactgatcctaagaaagctattccctcatttcatatagaactagaggatgattcaaatattttcacttggaacataggtgttatggtgctaaatgaggattccatttatcatggagggtttttcaaagctcaaatgagatttccggaagactttcccttttctccaccacagtttcgatttacgccggctatctaccatccaaacgtttacagggatggcaggctttgtatttctattttacatcaaagtggggatcctatgaccgacgaacctgatgctgaaacgtggtcccccgtgcagaccgtggaaagtgtgttgatctctatagtatctctattagaggaccccaatatcaactcgccagcaaatgtcgatgccgctgttgattacagaaagaaccctgaacaatacaagcaaagagtcaaaatggaagtggaaagatcgaaacaagatatccctaaaggtttcataatgcccacttctgaatcggcgtacatatctcaaagtaaactagatgaaccagaatcgaataaggatatggcggataatttttggtatgatagtgatttggacgacgatgagaacgggtccgtcattttacaagacgacgactacgacgatggaaacaaccatatcccctttgaagatgatgacgtttacaactataacgacaacgacgacgatgacgaaagaatcgaattcgaagatgatgacgatgatgacgacgatagtatagataacgacagcgtcatggataggaaacaaccccacaaggctgaagatgaaagtgaagatgtggaggatgtagaaagagtttcaaagaaaatataaaaaagaacagtaagaaagaagacaaaatttaacaaaacatattcagctcaaacgcaaaacatgaatcaatttatacatacgcgatacgttgtcgataaagcactttacatttttccctatgataatctgagattgacaggggaagaagaaaataactaagtgtcgaagaaaaatttagaaaaattaattcatcatcccattttacttctcgcagtacaccgtacgaaagaagaaggtaaagaattgagaaaaaaagtgtatatcattacattactttacaccaccttataaccacaaacgtgtatattaagaaagttttttaaaaagaaagaaataagaa

SEQ ID NO: 550 - DNA, 1078 bp, Saccharomyces cerevisiae
atttgaataactcagagtattagtaaaagaaatgtgtgaagagaatgttcatgttagtgaagatgttgctggcagtcacggttcttttacgaatgccagacctaggttaattgtactaataaggcatggggaaagcgaatcaaataaaaacaaggaggtcaatggttatattcctaaccatctgatttctttaacgaaaacaggtcaaatccaagctagacaagctggtattgacttattacgtgttttaaacgtagacgatcacaacttggtggaggatttggctaagaagtatattaaagatgaaagtagcaggagaactttaccgctgaaggactataccaggctgagtagagaaaaagacacaaacatagttttttatacatcaccctatagaagagcaagggaaacattgaaaggtattttggacgtcatcgatgaatataatgaattaaacagtggtgttcgtatatgtgaagatatgagatatgatccacatggtaaacagaaacatgcattttggccgagaggacttaataatactggtggtgtttacgaaaataatgaagataatatttgtgaagggaagcctggaaaatgttatctgcaatatcgggttaaggatgagccaagaataagggaacaagattttggtaatttccaaaaaatcaatagcatgcaggacgttatgaagaagagatctacgtatggtcatttcttcttcagattccctcatggagaaagtgcggcagatgtatatgacagagtcgccagtttccaagagactttattcaggcacttccatgataggcaagagagaagacccagagatgttgttgtcctagttacacatggtatttattccagagtattcctgatgaaatggtttagatggacatacgaagagtttgaatcgtttaccaatgttcctaacgggagcgtaatggtgatggaactggacgaatccatcaatagatacgtcctgaggaccgtgctacccaaatggactgattgtgagggagacctaactacatagtgtttaaagattacggatatttaacttacttagaataatgcc

SEQ ID NO: 551 - DNA, 1955 bp, Saccharomyces cerevisiae
gttgtaattagcgtggttactattgatggattggcgaagtaagatattgtttcttaatattttctttcccctaaggtaatgtcagatcctatagtaacgtcttccaaaatggaaaaaagtgcagagtttgaagtaacagactctgctttatataataacttcaatacatcaacaacagcttcactaactccggagattaaggaacattctgaggaatctcgcaatgggttagttcacagattcgtcgactcattcagaagagccgaaagccaacgtttagaagaagacaatgacttggaggatggtaccaaatcgatgaaatctaataaccacttaaaaaagtcaatgaaatctagacatgttgtaatgatgtctttaggtacagggataggaacaggtcttctagttgccaacgccaaaggtttgagtcttgcaggcccggggtctttagtcatcggttacgttatggtgtccttcgtcacgtattttatggtccaagcggctggtgagatgggtgtcacttatccgacgcttccaggtaacttcaatgcatacaattcaatctttatttcaaagtcgtttgggttcgcgaccacttggttattttgcattcagtggttaactgtgctaccgttggaattgattacttcttccatgaccgtcaagtactggaatgacacaattaatgctgatgtattcattgtcattttctatgtgtttttattgtttatccacttttttggtgttaaggcatacggtgaaacggaatttatcttcaattcctgtaagatattgatggttgcaggattcattattttatcagtcgtcatcaattgtgggggagccggtgtggacggctatattggcggcaaatattggcgcgaccctggttcatttgcagaaggcagcggtgccactcgtttcaaagggatatgttatattctagtatctgcatatttctccttcggtggtattgaattatttgttctttccatcaatgagcagtctaaccctagaaaatccactcctgtagccgcgaagagaagtgtatatcgtattttgatcatttatttgctgacaatgattctaattgggttcaatgttcctcacaataacgatcaattgatgggttccggtggctccgcaacgcacgcttcaccatatgtcttggcagcctctattcacaaggttagggtcatcccccatatcattaatgctgttattttgatatcagtcatctctgttgcgaactctgccctttatgccgcaccgagattaatgtgttccttggctcaacagggctatgctccaaaatttttgaactatattgatagggagggaagacctttaagggccttggtagtgtgctctcttgttggtgtcgttggcttcgtcgcctgttctccacaggaagagcaagcatttacatggttggcagccattgcaggtttgagtgaacttttcacatggtcaggcattatgctttcacacattcgattcagaaaagcgatgaaagtccaaggaagatcacttgatgaagtcggctataaggccaataccggtatatggggttcatactatggggtttttttcaatatgcttgtctttatggcccaattttgggtcgcactgtctccaataggaaatggcggaaagtgtgatgctcaggcattcttcgagagttatctggctgccccgctatggatattcatgtatgttggatacatggtttacaaaagagattttacctttttaaacccactggacaagatcgacttggactttcatagaagagtttacgaccctgaaataatgaggcaggaggacgaagaaaataaagaaaggttaaagaactcttcaatattcgtcagagtctacaaattttggtgttagtgcataataaatagcattttaaatatttgtatattatattcataaacgaagtaacacaagca

SEQ ID NO: 552 - DNA, 642 bp, Saccharomyces cerevisiae
gtaggaaaagttttatccaaaagcataaccgagaatcttctttctggaaaacgcatacgttatatggctatataagcaaaagagttcgcattcattggtaaaacgtaaaatacataatttaggatgctttcgttttgtccttcgtgtaacaatatgctactgataacgagtggcgatagtggtgtatatacattagcatgccgttcatgtccatatgagtttcctatagagggtatagaaatctatgataggaagaaacttccaagaaaggaagttgatgatgttcttggtggtggttgggacaatgtggatcaaaccaaaacccaatgtcccaattatgatacttgtggtggtgagagtgcttactttttccaactacaaattaggtcagctgatgagccgatgactaccttttataagtgtgtaaactgtggtcatagatggaaggaaaattaagaagtccttgaatataagatgaattttctaagaataaaaagagtaataaaaacatcttaaaatttgattagaaggcatgatcgcatattgagaatgaaggctgctgccatatttttagagcaatagatactgatataatttttgatcctgcacgtactgtgaacttgcatcataaataggacgcaa

SEQ ID NO: 553 - DNA, 1681 bp, Saccharomyces cerevisiae
tgtgtacgggaatcctcatttatataatacttggttctgtttagccaccacaaataatgctcagaaatacgctaaaatgtgcccaattgtcgtctaaatacggatttaaaactaccacacgtacattcatgactactcaaccccagctaaatgtcaccgacgcaccacctgtgctatttaccgttcaagatacagctagagttatcacgctaaataggcccaaaaagctcaatgctttgaacgccgaaatgtcagaatccatgttcaagactttgaacgagtatgcaaagagcgatactacaaacttagtcattttaaagtcatccaaccgaccacgttcgttctgtgctggtggtgatgtagctactgtggcaatattcaattttaacaaagaatttgccaagtccatcaaattttttactgatgaatattctttgaattttcaaatagcaacttacttgaaaccaattgttaccttcatggacggtatcaccatgggtggcggcgttggtctatccattcacacgccctttagaattgctacagaaaacaccaaatgggccatgcccgagatggacattggtttttttccagatgtaggctcaacttttgctctccctagaatcgtgacattggctaactcaaactcacaaatggccctgtatctatgtcttacaggagaagtagtcacaggagcagacgcttatatgctcggcttagcgtctcattacgtcagtagtgaaaatttagatgctttgcagaaaagattaggtgaaattagccccccttttaataacgatccacaatctgcatacttcttcgggatggttaacgaatccatcgacgaattcgtatcaccattaccaaaagattatgttttcaagtattctaacgagaaattaaacgttattgaagcctgttttaacttgtctaaaaatggtactattgaagacataatgaataacttacgtcaatatgaaggttctgcggaaggtaaggctttcgcacaagaaatcaaaacgaaattgttaaccaagtcaccatcctctcttcaaatcgccttgagattggtgcaagagaattccagagatcacatagaatctgctatcaaaagagacttatacacagcagctaacatgtgcatgaaccaggactctttggtggaattctctgaagccacaaagcataaacttattgataaacaaagggtcccgtatccatggacaaagaaggaacagttatttgtatctcagttgacatctatcacatctcctaaaccatcgctaccaatgtcattactaagaaatacctcgaatgttacttggactcaatatccctaccattctaaataccaattgcctacagaacaggaaatcgctgcgtatattgaaaagagaacgaatgatgacactggcgccaaagttaccgaaagagaagtactaaatcactttgccaatgtgattccttctagaagagggaaactgggtatccaatcgctatgtaaaattgtttgtgaaagaaaatgtgaagaagttaacgatggcttaagatggaaataaaacctgaaatagcagccccgtggctcgtaaagaattttgccaacacttctatgcatgtaaataataaaagtaaaacataacgctatatttgtatatggatgtttatttaatgatacatagaa

SEQ ID NO: 554 - DNA, 207 bp, Saccharomyces cerevisiae
taatggaatctatatttctacatgctaatattacgatcattcctcattcagttttatatgtttcattatcctattacattatcaatccttgcgtttcagtttccactaatttagatgactatttctcatcatttgtgtcatcttctaacaccgtatatgataatatactagtaacataaatactagttagtagatgatagttggttt

SEQ ID NO: 555 - DNA, 784 bp, Saccharomyces cerevisiae
taatatattcaataaatcatcaccactctctagttaaaagaatccaattatatacaatgccaagagtagctatcatcatttacacactatatggtcacgttgctgccaccgcagaggcagaaaagaagggaattgaagccgctggaggctctgcagacatttatcaagtcgaggaaacgttgtctccagaagttgttaaggcgcttggcggtgctccaaagccagattacccaattgccactcaagatacgttgacagaatatgatgcctttttgtttggtattccaactagatttggtaacttccctgctcaatggaaggctttctgggaccgtaccggtgggttgtgggctaagggtgctttgcatggtaaggtcgctggttgtttcgtctccaccggaactggtggtggtaatgaagccacaattatgaactctttgtctactttggctcatcacggtatcatttttgtcccattgggttacaagaatgttttcgctgaattgaccaatatggatgaagttcacggtggttcaccatggggtgcgggtaccattgcaggcagtgacggttcaagatctccttccgccttggaattacaagtacacgaaattcaaggcaagactttctacgaaaccgttgcaaagttttgaaataatttgaagtattacttctcctacctatggaaatgaatgatcctttaccgaaaattattctgtgatgaaaaaaggactgcccgtcaggtatacctaagtatctttagaaaatatatatactttaaata

SEQ ID NO: 556 - DNA, 3620 bp, Saccharomyces cerevisiae
ttatcgctgaaatttaaatagaaagagaaaatatcacaactagagttagtattctttttatcgttcatcagctctatcaagatataatatttgctcatctttatctctcttatttttttaacaccacctcctgaaagagaactaattggtatactagttttacgagggctagcttttggctgttatacgtataaccacacacctggtgttctgtacgaacgttgaaaagtcaaagcaagggggaaaagataatatccttgaagattataaatcctaaagcaagcatattgacgaagacgagataagaaaaatccaaaaatgtcaacaaatctagcaaattacttcgccggtaagaaagatattgaaaacgagcatgtaaatagaaatgcgagccatgaaagtaatagcaaaagtgatgtcaaaattagtggtaacgataacgacaacgacgaagatatggggccttcagtatcgatggctgttcaagcgaaaaatgatgatgatttccataaatcaactttcaaccttaaaagaacaagatcaatgggccttcttgatgaatatattgaccctaccaagaaattgctaggaaggtcagacgacttatatgataacgacaatgaatattatgacaactcatctaataattcttcaagcaattcttcagatgatgattatgatgacggctatcaggaacactcaacctccgtttctccaccgccggcggataatgatagctacttaattccacaagatgataatgacgtagtggtagagccagaaagacatgttgactatctgtcacatgaatggaaagaatcagaaatttctaattcttggaaatatatcatcctaaagaaaaagaaaagagatgttgatctagtaaatgctgctaggttagaaaatgcctcatggagaacatgggcaaaagcaagaaacaacttgaaaacagtgtcacctgaagtggttaattggtcaaaagattctgatgtgacttggctatatggccctattgtaagagattctgaaggtaatgcccaaagtgaagaagaacatgatctagaaagaggatatggttcggatgatgaaaattccaagagaatttcaatgcccactaaaaattcaaagtcgatcgcagctgctccgaaaccaattttgaagaagagaaccgtcacagaaattatagaggacaacgctttatggaaactgaatgaggcaagaaaacacatgacagaaatgaaacatgcttcggtaataatggatcccaatggcaacaaaaacgtccatgacgatttcgatgctctggccgctcaagttaacgcccagtactaccattatcccaaagaatcgaacagtagcgttagtttgaagagtcaacactctgacaaaaaagataattctaccataccgaatcctgtaggagaaaattcaaatggtggcggtgacaagggagaagaagacctgcatttaaagtcagcgcttcatgttcaaaacaataggtcaacggcacaatcaaacaaaagcatactagaaaatagtaccaatgatcgtaaggctaacttggatcaaaacctaaattctcctgataataataggttcccctcctcaacatcttcctccaatagagataatgaaaacaattccatgggattatcatcaatattaacctcaaacccaagtgaaaaatctaacaaacctactaaaaatagacatatacattttaatgacagggtggaacaatgtatggcactacgatatccagcttcacaatcggaggatgatgaaagcgatgatgaaaataaacaatatgttgatgttaataacaatgcgaacgttacaacaataaacaacaataggactccattgctagccattcagcataaatctattcctatcaactccgcaactgaacatttgaacaaaaatactagcgacgatgatacatcctcacaatcatcatcttcatcacattctgatgatgaagaacacggcggcctttacataaatgcaagattttccaggaggtctgactctggagttcattcaccaataacagataattcctctgtggcttcatctactacttccagagctcatgtacgtcccataataaagttgcttcctgataccactttgaattatggatcagacgaagaatctgataatggcgaatttaatgggtatggtaatgctgtgtcacataacgtcaatacctccagaggctatgattacatatacgattataactcggtctacactggtgatacttccagttttttaccagtagattcatgtgacattgtagatgttcctgaaggaatggacttacaaacagccattgcagatgataatgcatcaaactatgaatttaacaatgcggtagaatccaaggaaaaacatgttccacaactacacaaagcttcagcaaataatacaacacgtcaacatggatcgcatatgttattatatgacgacgacaattacagctcttcatcagatagcgaacagcaatttattgaagactcacaatacaatagtagcgacgacgaagaggaagaagatgacgatgaccaagaagtagacgataaccacgatgaaggactttcactgaggagaacattgtcacttgggaaatcaggatctaccaattctttgtacgatctagcacaaccatcactctcttcggcaactcctcaacaaaaaaatcctactaattttacagggggtaaaactgatgtagacaaagatgcacaactggctgtcaggccgtatccgttgaagcgcaattcctcttcagggaacttcatattcaattcagatagtgaagaagagagtagcagcgaggaggaacaaagaccattacccgctaacagtcagctggttaatcgaagcgtattgaaaggcagtgtgacaccagcaaacatatcatctcagaagaaaaaagcccttccaaagcagccaaaagcgtccgatagttcacaaagctttagaattgtaaataatactccttcaccagccgaagtgggggcgagtgatgttgccatagagggttatttctctcctagaaatgaatctatcaagtctgttgtttccgggggaaatatgatggaccatcaagatcactcagaaatggacactttggcaaaaggatttgaaaactgccatataaataatgctagtaagctaaaggacaagaaagttgatagcgtgcaaaccactagaaaagaagcgtctttgacggattcgagtaatgaaagcttacacaaagtggtgcagaatgcaagaggtatggcaagcaagtacttgcactcttggaaaaagagtgacgtcaagccacaagaaaatggaaatgacagcagttagaagaaagaattttgaagtcaacatgaagagaaaataaaaatccaggtagtgtggatcagtgccgtctttaggatccaagtaagctgtaatcgactggcattgtcaaggacaaatgtagacagcgaagcagttattttacgtacacaattaaattcgctccagatttcaaaacttctttatacctttacaatatttggtacttatgtacaagaacttcttgagcttccatagtcgtatgtgtgttctatatattagca

SEQ ID NO: 557 - DNA, 1173 bp, Saccharomyces cerevisiae
tacatttttcctagagcataccacaagggaaatcgtttttaattttcgtttcctgcattaacaattagcgagataaatattacaggaaatggacagaaaagctgtcgaagaaaaaagaattgttatttctatcggtggagggcatgctactggtgttggagcaattgcactggatttacaaaatactttcaaaagcctatataactctatcaatataagggtaataaacctagataatatgatagaagggaacatcaagagctacaataataacgactatgattttgataatatccttaatttggtatatgaaaagcacgctgtaacttctcaaaatgacatgattcaacatgattacgaggacccgatagatttgataatagtatgtggctgttatgcgctatacgataaacgcatcaacgaaatatctcaattaaaagtattcttggatagtgatgcagataaaagattaattagtctaatcaagaagaagaacgtagggagcaatgaacaactagcccagttgatcactgagtatatggaccatctgcgcccggagatgcaacaatatatagagcccactagaacttttgcagatttgatcattccttctacaaatgaaaatctagggcgcgcagtcctcgtggacggtatagttaaagcaatcgaagataccaaaagccaaatagaaggcaacaatacgaacaacaaaatacgcccacgtttatgggatttcgaagctgaaacaatggacttggagaaagatagatattacgatctgtcatgaggtccttgccttctatatctgcgccacttttaatcggctcgatgcgactaacatccgtatttacccacacaagcttattgattttttttttgcattcttggatctcgatgggcgcttttactccattagaaccatgctcacgggaagctgagttcttacttagagctggtcatagatatcacctattttgttcatcgccgtgacttctttcggcagggcgactctgctcaggagccctgactcgtgttgcctcgagtaaacggtatgtcaaaaagaataggtccaaatatcatatatatagcaccttgaacccaaacaaatccaattacagtacccgtagctcacatatgtagaaagagctttgcctggcacaagcaataatgtct

SEQ ID NO: 558 - DNA, 1392 bp, Saccharomyces cerevisiae
atgtagaaagagctttgcctggcacaagcaataatgtctataatcaaaaaaattgtgtttaagagattcaactcaactttgaaaaaaactgctcttcatgaccttcatgtgtcattaggcggtacaatggtaccatacgcaggatattccatgcccgtactatacaagggacagactcatattgaatcacataattggaccaggacaaacgctggtttatttgatgtttctcatatgttacaaagtaagttatctggtcctcattctgttaagtttctgcaacgtgtaacgcccacagatttcaatgccttgcctgttgggtcagggaccttaagtgttctattaaatccacagggaggcgtggtagacgataccatcatcactaaagaaaacgatgacaatgagttctatattgtgaccaatgctggctgtgcggaaagagacaccgagttctttcacgatgagctacaaaatggttctactttagattgtcaatggaaaatcattgaaggtagatcactattggcattgcagggtcctaaagcaaaagatgtgttggaaccacttttatcaaaaacagctcctggaaaggatctaaaagagttattttttggacaaagacatgaatttgcgttaaaggacggttctttggttcaaattgctagaggcgggtacactggtgaagatggatttgagataagcattgcaaatgagaaagcggttgagtttgcggagcaactcttggccaatccagtaatgaagcctatcggactggctgctagagacagtttaaggttggaagctggtatgtgtttgtatggtcatgaattggacgaaagtatcacaccagtagaagctgcgttaaactgggtgatttcaaagtcaagaagggacctagtagatcaaaagtactggttcaatggctatgccaagataatggaccagctaaacaataaaacgtatagcaaggtacgagtcggattcaaatacttgaaaaaggggccagctgccagaaatggtgtcaagatcttcttgcccgatgccgaaacagaggtcggccttgttacatcaggtagtgcatctccaactttaaacaacatcaatattggacaagcttatgtacagaaaggttaccacaagaagggaacgaagttgcttgttcaagtaaggaacaagttctacccgattgaacttgctaaaatgcctcttgtgcccacacattactacaagcagtaaactgagcgaaataatattcagttgataatgcgtttattaagaaaagaaaaagagtaaaaaaataatttgctattttgatctagtaaagacaaatacaaagatgcttacgctcaattcctttatttttttatatttatgtagctttttgtatattct

SEQ ID NO: 559 - DNA, 387 bp, Saccharomyces cerevisiae
tgaggatatatgtacatatgatggctagtacatccaatgatgaagaaaagttgatatcaaccactgacaaatacttcatcgagcagaggaatatagtattgcaggagatcaatgagactatgaattcaatcttgaatggtctgaatggtctcaatatatcattggagagctcgatagctgtgggaagagaattccagtcagtttctgatttgtggaaaacactttatgatgggttggaaagtttatcagacgaagcgcccatcgacgagcaacctactttatctcaatcgaaaacgaagtaaagttgcggttccctctgtctctcctaatattatcctaaatttatgtttacagtcgcaaattagataaaggatacgtaagatataa

SEQ ID NO: 560 - DNA, 2542 bp, Saccharomyces cerevisiae
ttggcctgaaaagatcgcaaaacattagctagaaattttccccctatcgttttccgtagagtaaatataatatcaagaagatagttttatattgactgatttcacaaccaactgcatagatataaggagattactagatacaagaacgcctgataaacaaaaaaagaaaaattaacaaaaaaaatcagtagaatgagtcaagttaatacaagccaaggaccggtagcccaaggccgtcaaagaagattatcatcactaagtgaattcaatgatccattttcgaacgcagaagtctactatggccccccaacagacccaagaaagcagaagcaggcaaagcccgctaagatcaaccgtacgaggactatgagtgttttcgataatgtatctcctttcaagaaaactggttttggtaaacttcaacagactagacgtggttctgaggatgacacctattcaagtagtcaaggtaatcgtcgtttctttatcgaagatgtcgataaaacacttaatgaactactggctgctgaggataccgataaaaattatcagatcaccatcgaggataccggtccaaaagttttgaaagtcggtaccgcaaactcctatggctataagcatattaatattaggggtacgtatatgttatccaatttgttgcaggaactaactattgcgaaaagttttggtagacaccaaattttcttagatgaagctcgtataaacgaaaatcccgtcaacagattatcaagattgataaacacacagttctggaactctttgaccaggagagttgatctgaacaacgtaggcgaaattgcaaaagataccaagattgatacgccgggggcaaaaaatccaagaatctatgttccttatgattgtccagaacaatacgaattttatgttcaagcttctcaaatgcatccatctttgaaattagaagttgaatatttaccaaaaaaaataacggcagaatacgtcaaatccgtcaatgatacccccggtttactagcattggctatggaagagcacttcaatccttctactggtgaaaaaactctcattggttacccttatgctgttcctggtggtagattcaatgaattatatggttgggactcctatatgatggcactaggtctcctagaagccaacaagactgatgttgcaagaggtatggtggagcattttatttttgagattaatcactatggaaaaatattgaatgctaacagaagctactatctatgtagatcacagcccccattcttgactgaaatggccttggtagtattcaaaaaacttggtggtaggagtaatcccgatgctgtggatttgttgaaaagagctttccaagcaagcataaaagagtacaaaactgtttggaccgcatctccaaggcttgatcccgaaacaggcttatccaggtaccatcctaacggtctcggtattcctccggaaactgaaagtgatcacttcgataccgttttactaccatatgcatcgaaacacggcgttaccttagacgaatttaagcaactttataacgatggtaagataaaggagcctaaattggatgagttttttcttcatgaccgtggcgttagagaatctggacacgacactacatataggtttgagggcgtatgtgcctacctggccactattgacctgaattctcttctttacaaatacgagattgatattgcagacttcataaaggaattctgcgacgacaaatatgaagatcctttagaccattctataacaacttcagctatgtggaaagaaatggccaaaatcagacaagaaaagattaccaaatatatgtgggatgacgagtcggggtttttctttgactacaacacaaaaatcaagcacagaacgtcatacgaatccgcaactacattctgggcattatgggctggacttgccacgaaggagcaagcacagaaaatggtggagaaagcactacccaagttagagatgcttggaggtttagctgcatgtacggagcgttctcgaggcccaatttctatttcgagaccaattagacaatgggactatccatttggttgggcaccccatcaaattcttgcttgggaaggcctccgttcttatggttatttaactgtaacgaataggctagcttatagatggcttttcatgatgacaaaggcttttgtcgattataatggtattgtggttgaaaaatatgatgtcacaagaggaacagatcctcatcgtgttgaagcagaatacggtaatcaaggtgctgactttaaaggggcagctactgaaggttttggatgggtcaatgccagttacattcttggtttgaagtatatgaacagtcacgcaagaagagcgcttggtgcttgcattccaccaatatcattctttagcagtttaaggcctcaagaaagaaacctctatggactatagttgagataatatatatatatatatatatatactccaggtacagtcctctaggtacctaaatcctctttatatgatctgccgatagatagttcta

SEQ ID NO: 561 - DNA, 730 bp, Saccharomyces cerevisiae
gatcattgataaaccactgacgtgtaatagttttatttctttgaaaaattcaaaagaaataacaacactcgttctcggaaacaagaaaatacacacaataatgtctactattccctcagaaatcatcaattggaccatcttaaatgaaattatatctatggatgacgatgattccgatttttctaaaggtctaattattcaatttatcgaccaggcacaaacaacttttgctcaaatgcaacgacagctggacggtgaaaaaaatcttaccgaattagacaatctgggccattttttaaagggttcttctgctgcattaggcttacaaagaattgcctgggtttgtgaaagaattcaaaacttgggaagaaaaatggaacatttcttccccaacaagaccgaattggtcaacactctgagcgataaatcgattattaatggaatcaatattgatgaagatgacgaggaaataaagatacaagtggacgataaagacgaaaattccatatatctcatcttgatagcaaaagctttgaaccagtctaggttggagttcaaactggcgagaattgagttatctaaatattacaacacaaacctataatcgtcatcattttattcacacctccggataatccattcttccccggaaaaacacatgtacaatatatattatatatatatatatatgtatatcaaatcatacaacttacataaaaacaacaaacct

SEQ ID NO: 562 - DNA, 3378 bp, Saccharomyces cerevisiae
atgaaaagatatgagcgagatcgaagtcccactcctgatcctgatattgtgaaaggttcatactctcaaacatcactcaggtcactacatgaacttaactataagaatcctgccggtataagcgggcttagctttgcaggaagcccacaacaatccgtggcatccttatcgcaaatgcggctggaaaatttggttaaggacaaacactgggaggaagtagaggactttgggctggaagagctgagagatgggttttttgatgctgcttttaccaagccggacagcaaagctaggtctcctaacagcgacatcgatgacgacaatggcgctgcaaggaaaaaactgcaatctggttttaccaagctttccgaatatgtttggactgctatctacaggcccattattcatttccctagagatattagaaaaaatggggtatccatattcaagttttttattgcttatttcattgctatcgtgatttgcgttatcaggccttctggtaggtggattggccatgagttcaggtattttctacccatcgcagtacttatacatcatccggtcagaaatattggtgttcaactggaaatgactataagctccattatcggcgcaagttttggcctgggatggtcggctttggcatggtacatttccacagcgacaaagccgaccgcaaactaccagggaggaattttatttcagagtctgactatggccctcttatttgccatctggctaaggtctgtttaccgtcggttcttctatttcacaacttcgttttcgatatcgattatattcactcatacagttcggttggcctcatccaagtttgatttgaagtggcaaattttttgggattttggaatctcatatctcttcggccttttgctatctctcttggtttgtgtatgtgtatcaccacatagtggcaatgcagagttaatggaacattataacaagtgtctacagaccacaaagacctttttaatggcactagtagatactgaattaataaagtccaaagaacaaatttacctagcccaagtaaaaatggtgaaaacactaaacattgatttatctcaaggttttagagattttgtaaatcagttgacaatttccaggtttgaccttcaatcgttgaagagtttaagaaattctttaactgccatggaaacttctctgagagtattacccattgcacccaaaatttttaatgatgatgaattgaaaaagatgtatgaagaattggagaagtatagatcggattctgcgaccctgagcaaagaagcaagcgctagccctcaatcttcaggaattccaacaagagaaaacacgcccagtgcctttaagcctatcggtccggggcttttaaaaaatgaaatctacattaatgcattaaaggcgtccttctcgaaaagcatcttcaacttaatactggaaatgatcttcgttttggaaaatctatcaagagtactaaagaaatacgagtctccaaatcaaaaaaacaacttagatgagtgtgtcaaaatattaagtcactcgcattctaaattaaagaggaaaatttacaaactagatgtttgttacagggattttgtgaattctagttttttttcacaggaactgttgaatgacgaagagtctgtcgatattttcctttttctaagatatttgagaaactccgcaaggcagctagttactgttatccacgattgccaagttttgggtgagaatattcactggagaattgctctgccatcatatccactgtctcgtgcgttgacaagattgcccaaacaatgtgttctcgatgaaggtgcaggaaatgttcttcattattttgaggccaaacgtgatgtcgatgaaatttttgaaagagtttataacacctacacgtcaagacacaagtataacaaaggcgaagaagaagcgctgagacttgattcacaaggtggtgacgaaaagtcacagaatcgcaaaaaccacactatttccatcagagcaattgatcacaacgacttcaattttcatacaactcaaaatccttggagatttaaactatggaaattgagtagaattttatctggtgatgaatgtaagtggacactaaagattactttttgtatgatatttttgtgtctaccaacttggctacctgaatcctatcactggtaccaagaatttcattgttggtgggccccactcacgttttacttattagcacatagaagatactctggtaactgggcgttggtaatgaggagattaatctgtggtatagtaggtatcttttgggggtgggctgccaaccaatcgagacattttggtagtccatacgtggtttgcacgtttgctggtctgatcgtggtcccatttagcatcaactttcttgtctatagaaacaccaaatcgagcttcactgcattaatgtgctttaccataattgctcttgaaccatacagcaaacctaatagacattataacttaaccaccgctggaatatggaaatctacgtgggttacaggcttggcacttattatcggtattttggtttcgattcccatcaactggatagtgtggccctttagagctaggacagaactaagagatagtatgtcatcattactggcacacttgggccagtcctaccaaaccgtggcggaccggtatttatacagggatgccgacgacgcacctactgatttaactttcgcattttcccacattcgtgaagttagactgactcaaagtcttgaagcaatcagggaacttttgaagaaagcccgtcatgagccaatcattatttccaacttcaatcctgagaagtacgcaagtctaatcaattcatgccaatttttgttatctaagatcattgaagcgagaatttcaggtgcattttttgaaatttgggatcaggattttgatattgaaaccacgagagccttactatcgctacgaagagatagtgtctcatcagtgattttcgttttttacattttatccaattgtttcagatcaaaaaacaagataccgcgatacttgccaaatccaattatgtcacgtaaaaaactttaccacttcatcaagaaatttagtgaaatgaaggaccaatcacattcgaatttaaattcaggaggcaattctatggagaagaacctattcaagaaaatataccaacagaaggcatcaagttcagggcagcaacaattacccttgccttcagtggcgaacagctctgaaatagacagtgaaaaaatgcattggacagaggttcacggcattgcatttgcgagagcttttacggatatttctgaagccttgttccaggtagagagttgtgcaaaagatatactgggcgaagaaaacttttaa

SEQ ID NO: 563 - DNA, 1761 bp, Saccharomyces cerevisiae
atgctttctgaaaacacgactattctgatggctaacggtgaaattaaagacatcgcaaacgtcacggctaactcttacgttatgtgcgcagatggctccgctgcccgcgtcataaatgtcacacagggctatcagaaaatctataatatacagcaaaaaaccaaacacagagcttttgaaggtgaacctggtaggttagatcccaggcgtagaacagtttatcagcgtcttgcattacaatgtactgcaggtcataaattgtcagtcagggtccctaccaaaccactgttggaaaaaagtggtagaaatgccaccaaatataaagtgagatggagaaatctgcagcaatgtcagacgcttgatggtaggataataataattccaaaaaaccatcataagacattcccaatgacagttgaaggtgagtttgccgcaaaacgcttcatagaagaaatggagcgctctaaaggagaatatttcaactttgacattgaagttagagatttggattatcttgatgctcaattgagaatttctagctgcataagatttggtccagtactcgcaggaaatggtgttttatctaaatttctcactggacgtagtgaccttgtaactcctgctgtaaaaagtatggcttggatgcttggtctgtggttaggtgacagtacaacaaaagagccagaaatctcagtagatagcttggatcctaagctaatggagagtttaagagaaaatgcgaaaatctggggtctctaccttacggtttgtgacgatcacgttccgctacgtgccaaacatgtaaggcttcattatggagatggtccagatgaaaacaggaagacaaggaatttgaggaaaaataatccattctggaaagctgtcacaattttaaagtttaaaagggatcttgatggagagaagcaaatccctgaatttatgtacggcgagcatatagaagttcgtgaagcattcttagccggcttgatcgactcagatgggtacgttgtgaaaaagggcgaaggccctgaatcttataaaatagcaattcaaactgtttattcatccattatggacggaattgtccatatttcaagatctcttggtatgtcagctactgtgacgaccaggtcagctagggaggaaatcattgaaggaagaaaagtccaatgtcaatttacatacgactgtaatgttgctgggggaacaacttcacagaatgttttgtcatattgtcgaagtggtcacaaaacaagagaagttccgccaattataaaaagggaacccgtatatttcagcttcacggatgatttccagggtgagagtactgtatatgggcttacgatagaaggccataaaaatttcttgcttggcaacaaaatagaagtgaaatcatgtcgaggctgctgtgtgggagaacagcttaaaatatcacaaaaaaagaatctaaaacactgtgttgcttgtcccagaaagggaatcaagtatttttataaagattggagtggtaaaaatcgagtatgtgctagatgctatggaagatacaaattcagcggtcatcactgtataaattgcaagtatgtaccagaagcacgtgaagtgaaaaaggcaaaagacaaaggcgaaaaattgggcattacgcccgaaggtttgccagttaaaggaccagagtgtataaaatgtggcggaatcttacagtttgatgctgtccgcgggcctcataagagttgtggtaacaacgcaggtgcgcgcatctgctaa

SEQ ID NO: 564 - DNA, 1156 bp, Saccharomyces cerevisiae
tcgcggattatagagcatgtcagattggaaagtggacccagatacccgcaggcgtcttttgcaattgcaaaagattggtgcaaataagaaatgtatggattgtggtgcgccaaatccacaatgggccacgcctaagtttggagctttcatttgccttgaatgtgccggtatccatagagggcttggtgtgcatatatcttttgtaagatctatcactatggatcagtttaaaccggaggaacttcttcgtatggaaaaaggtggtaacgaacctttgactgaatggttcaagtcgcataatattgacctgagtttaccacaaaaagtgaaatacgataaccccgtcgcagaggattataaagaaaagttaacatgtctttgcgaagatagagtatttgaagagcgtgagcatttggattttgatgcttccaagttatcagcaacctctcaaaccgctgcatccgctacgcctggtgttgctcaaagtcgagaagggacaccactggagaaccgtcgatctgcaacaccagcaaactctagtaatggtgccaattttcaaaaggagaagaacgaagcttattttgctgagctgggcaagaagaaccaatctagaccagatcatttgcccccttctcaaggtggtaaatatcagggctttggaagtacacccgcaaaacctccacaagaacggtctgcagggtccagcaatactttgagcctggaaaattttcaagctgatcctttgggaacattgagcagaggatggggcctcttctccagcgctgtaaccaaatcgttcgaggacgtaaacgaaacggttattaagcctcacgtccagcaatggcaatccggagagttgtcagaagaaacgaagagagcagctgcccagtttggccaaaagtttcaagaaacgagtagttatggattccaagcatttagtaacttcactaaaaatttcaatggtaatgcagaggatagctctacagcagggaatacaacccatacagaatatcaaaagattgataataacgataagaagaatgaacaggacgaggacaaatgggacgatttctaattttaatatagtttttctcaacattcaaggaaagttcaattcacattgtagctataatggagaagtggttctgtaaagttt

SEQ ID NO: 565 - DNA, 2454 bp, Saccharomyces cerevisiae
cgaaccggtagttttacagaaaatagacccatctggtggcaacactaaatcattgaaataatagcaaacaattgtttcaaaactcctcccatttggatctcatctcaattgttttttccttcttagttaaaagttcacgaaattaggaaatctaagaatcaaaatataatccgctgttatttctgcgtgtaaaggtttatcttctacttgtgtcatatttcacaaattatcactttgctaaaacaagggactgacttctttctttatttttcgagcatttttcaaaaaagcagggtttttgaaaacaggaaccttagttgccacatctacgctgaaaaataacgcttaaggtttctcaattaacaatgtcattagtgcataatcagacgaatttaaacgaatccaaatttcttatagaaagggcatttagttctagttcagaaaccgttccattatcaaaggaggcaacatatcccatgccaactgcatatagtttttccgcagttaggagcaacagcgagactaacattaaaagagagaacccgcaaggttttgcaaaagaacctattatgacttctatgcttcataatttgaccatgtccacggggaaagggaacgggaatgacgtcaattctttagccccacatgatgtggatgttggcccctactgtcttttgctgaggaatttgccaaaagacattacactaagagagtgttattgtatattttcactagcaactggggtgtcaagtatagaactaaaaagggatgatagagaaccctttaatgacaatgaaaaagtcgttgtggtcaaatttggatccctttctttagtaacccattatgctaatatattaaactcgaagtctgagatttttgggcctagtttcccctttaggtctcacattgacgtagtaaatgaacaaacgcagcttccagtgagttttcaagaacatgtttcatctggcactacaaatagttctccaaagaattaccaattgtcgtccagtgcgcaaaatgaaattcaaaatcaaagttttaatactatatcatatggaaaaactagttcctctccattagggccttcagcggccaagccaaggccttcattactttcagagagatccctccgtttctcattcaatgacccattcggattggaaacaatctctcaaagaaaagaatccgtaccctttctacgaaatagcatctcacaacatgatttatcaaacgtaaccaccacaccagttccagcaggaatgccacctcagaaggacgctggcaagtcacttttgctactagaaaaggatgaaataaatgaaagtatttggaatggtgatgaattagttaatgatgttggtaattcttcatttggtgcatctttacaagagcctccgatgtcatctacgcctgtgatggagtggaatgcttcctcaactgctaatattcctctttttcaattatctagccaagaaaatcatcagtctaatctgttgcctccatcccaccattcaattagccaggatgttccacatattcaatcacaacctaatctgaacaattcaggagtaatacattccgcgacttctctaccgcattatcacttattgaaccaaattaatgcttcaactaagacacaaagtattcagcagagcgtttcgaatgttccttccaatttggacctgaatctccaaacggaaaatggccacccacaatcttctgctcctaacgggtcttcaatattcaacaaccaaaaggtgaatcaaggctttttagtgagtgaacaagacaccagtacaatatcacgacagaaagaatgttcttctacagcttctgcctctgcattttcgaaaaataacgaaacaaatgtggcaggttccacaactatttcacaggctgacctatcactactagccaaggtgccaccaccagccaatcccgcggaccaaaatcctccttgtaatactctttatgtgggtaatctacctccggatgccacggaacaagaattaaggcaattgttttctaatcagcaaggttttcgtagattatccttcaggaataaaatgaactctcacggtcatggcaacggtcatggccatggtccaatttgttttgtagaatttgaggatgttagctttgccactagagcattggcagaattatatggtagtcaactacctcacccccgcccttccctcaacaacaaaggaggtatcaggttgagcttctctaaaaatccattaggcgttagaggctcaaacagtaggagtaaatctggttacagctttaatggaagttacgggaaatcatgatagatttagtattgctttattaattttcttttgctttactttctgaccttcgtttttactttttggattttgcagttttttcatgctctacttatttagtttatgccatatttaaatttatccctacaattatttgaca

SEQ ID NO: 566 - DNA, 925 bp, Saccharomyces cerevisiae
tttcctcggatccatttcgtacatataaaatccgaagcttttcaggacaaaatactatttttctgtcactactaaacgggatagtactaaacgggatagtagagatagctgccaaataagatcaagaaattgtgattttaaatactttatacgaagatggtgtacacaggatttggtttggagcagataagtccagctcaaaagaaaccttataatgaactaactccggaagaacagggtgaacggggtgctgaaatgatcatgaacttcatgacttcctgtcctggaaaatcagttgtgagtggtgtaacagggtttgcactgggtggtgttttaggcctgttcatggcgtcaatggcatatgatacacctcttcatacacctacacctgcaaatacagcagcaactgcaactgcgggaaatataggtgtgggtggaatatcaagaacagttcagcaaatatctgatttacctttccggcagcaaatgaaacttcaatttaccgatatgggtaaaaaatcctactctagtgctaagaattttggctacattggtatgatatatgctggggtggagtgtgtcatagagtcacttagagctaaaaatgatatttacaacggagtaaccgcagggttttttaccggtgctgggctggcatacaaagctggaccacaagctgccttaatgggtggtgccgggtttgctgccttttcagctgcaattgatttgtatatgaaaagtgaggatggtagaccacctcaaaacgattttaaagaatgaatagccaatttcgacgaacgatgaatgttttatatttgtaaatatcacctatcttaatattctgcacgaccgtcccagaatttaagaacgcttaataatttccagaactactgttactagtaaagcaaaaaaattccctgggaga

SEQ ID NO: 567 - DNA, 3635 bp, Saccharomyces cerevisiae
catcaataacaataacaaaagttatactgtcgacatcaacactgacaagcgtttactcattgctgctgtttagtcagaattcttgttatataagaacaaccggtttctaaaaaatacattaccttttggtataatcctttttgtgattgtcacgatctcaacaaaacatacaaaacaaggatattaaattcacaacaataaaaagaataaagaatgctttttgataacaaaaatcgcggtgctttaaactcactgaacacaccagatattgcttctttatcaatatcatccatgtcggactatcacgtgtttgattttcccggtaaggacctgcagagagaggaagtgatagatttgctagatcagcaagggtttattcccgacgatttgatcgaacaagaagtagattggttttataactcattgggtattgacgatttgttcttctcgagagaatctccccaattaatctcgaatatcatacattctttgtatgcttcaaagctagatttctttgcgaagtccaaattcaacggaattcagccaaggctattcagcattaaaaacaaaattataactaatgataatcatgccatctttatggaatctaatactggtgtcagcataagcgattctcagcaaaaaaactttaaatttgctagtgacgccgtcggaaacgatactttggagcatggtaaggataccatcaaaaaaaataggattgaaatggatgattcttgtccaccttatgaattagattccgaaattgatgaccttttcctggataacaagtctcaaaaaaactgcagattagtttctttttgggctccagaaagcgaattaaagctaacttttgtttatgagagtgtttaccctaatgatgatccagccggcgtagatatttcctctcaggatttgctgaaaggtgatattgaatcgattagtgataagaccatgtacaaagtttcgtcgaacgaaaataaaaaactatacggtctcttacttaagttggttaaagaaagagaaggtcctgtcattaagactactcgctccgtagaaaataaggatgaaattaggttattagtcgcttacaagcgattcaccactaagcgttattactctgctttgaactctttgttccactattacaagttgaaaccttctaagttctatttagagtcgtttaatgttaaggatgatgacatcattatcttttccgtttatttgaacgagaaccagcaattggaagatgttctacttcacgatgtggaggcagcattgaaacaggttgaaagagaagcttcattgctatacgctatcccaaacaattctttccatgaggtttaccagagacgtcaattctcgcccaaagaagctatatatgctcatattggtgctatattcattaaccattttgttaatcgtttaggctctgattatcaaaaccttttatctcaaatcaccattaagcgtaatgatactactcttttggagattgtagaaaacctaaaaagaaagttaagaaatgaaaccttaactcagcaaactattatcaacatcatgtcgaagcattacactataatttccaagttgtataaaaattttgctcaaattcactattatcataatagtactaaagatatggagaagacattatcttttcaaagactggaaaaagtggagccttttaagaatgaccaagagttcgaagcttacttgaataaattcattccaaatgattcacctgatttgttgatcctgaaaacactgaacatcttcaacaagtctattttgaagacaaatttctttattacaagaaaagtagcaatatcattcagattagatccttccctggtgatgacaaaattcgaatatccagagacaccctatggtatattttttgtcgttggtaatactttcaaagggttccatatcaggttcagagatatcgcaaggggcggtattcgtatagtctgttccaggaatcaggatatttatgatttgaattccaagaacgttattgatgagaactatcaattggcctctactcagcaacgtaaaaataaggatattccagagggtggctctaaaggtgtcatcttattgaacccaggattggtagaacatgaccagacatttgtcgccttttcccaatatgtggatgcaatgattgacattctaatcaacgatccattaaaggaaaactatgtcaaccttttaccaaaggaggaaatattattttttggcccagatgaaggaactgctggtttcgtggattgggcaactaaccatgctcgtgtgaggaactgcccatggtggaaatcatttttgactggaaaatccccatctttgggtggtattccccatgacgaatatggtatgacttctctgggtgttcgtgcttatgttaataaaatttacgaaactttaaacttgacaaattctactgtttacaaattccaaactggtggtccggatggtgatttgggatccaatgaaattcttttatcttcgccaaacgaatgttatttggcaattctggacggttcaggtgtcctgtgtgatcctaaaggtttagataaagatgaattatgccgcttggcacatgaaaggaaaatgatttccgatttcgacacttccaaattatcaaacaacggattttttgtttctgtggatgcaatggatatcatgctaccaaatggtacaattgtagctaacggcacaaccttcagaaacacctttcatactcaaattttcaaatttgtggatcatgtcgacatttttgttccatgcggtggtagaccaaactcaattactctaaataatctacattattttgttgacgaaaagactgggaaatgtaaaattccatatattgtggagggtgccaatctatttataacgcaacctgctaaaaatgctttggaggaacatggctgtattctgttcaaagatgcttctgcaaacaaaggtggtgtcacatcttcatcaatggaagtgttggcctcactagcgcttaacgataacgacttcgtgcacaaatttattggagatgttagtggtgagaggtctgcgttgtacaagtcgtacgttgtagaagtgcagtcaagaattcagaaaaatgctgaattagagtttggtcagttatggaatttgaatcaactaaatggaacccacatttcagaaatttcaaaccaattgtccttcactataaacaaattgaacgacgatctagttgcttctcaagagttgtggctcaatgatctaaaattaagaaactacctattgttggataaaataattccaaaaattctgattgatgttgctgggcctcagtccgtattggaaaacattccagagagctatttgaaagttcttctgtcgagttacttatcaagcacttttgtttaccagaacggtatcgatgttaacattggaaaattcttggaatttattggtgggttaaaaagagaagcggaggcaagtgcttgagcttcaataaaattgttttgtataaattagttctgccgtcagaaaagaaaattaaacatatgtgtatgttcttctcagcgttttattgtgtactaagtaaagttgtttatatgtccattatttttaatctaaaaaaagcattt

SEQ ID NO: 568 - DNA, 745 bp, Saccharomyces cerevisiae
agacgtctacagctaaaatggggtccgaggaagataaaaagttgaccaagaagcagctcaaagctcagcagtttagaaaaagtaaggaggaaaaagatcaagagaaagacgtaaaaaaagagcaagcaccagaaggaaaaagacccaacagtgcagccggaaatgatggtgaagaacccgtgaagaaaaaaagaaaaacacgtagaggccgtggtggtaagggcaaaaatggtaaaaagggcaacagatttattgtctttgtcggtagcttacctagagacatcactgctgttgaattgcaaaaccattttaaaaatagttcacccgaccagatccgcctcagagctgacaaaggtattgcatttttggaattcgatgctgacaaagatcgcaccggcattcaaagacgtatggacattgccttattacaacatgggaccttactgaaagagaagaagatcaatgtcgagctaactgttggcggaggtggtaacagtcaagagcgtctagaaaaattgaaaaacaaaaacatcaagttggatgaagaacgtaaagagaggttgacaaagatgattaacgacggcaaccaaaagaaaatcgccaaaactaccgccactgcagctcaaacctctggaacagacaacaagcctgttcctgcaggaattcatcctgatagagccaaactacttaaatgagtacaaatttaattttatacgccatgtatcttagacaaaaagaaaataaa

SEQ ID NO: 569 - DNA, 1274 bp, Saccharomyces cerevisiae
tactaactatctgtattattgctacacatagcctgaattcaaggtcattggcagattgacgctcgtgtttgcatggtacagggctgtattagattttgaatattctgttcttctcatcccgtattaatatctagaacaatagaaaaaaagaaaagcgaagaaaatctagataaatttgtagttggtaaatacacacgtactatgggccctgaaactctacatattggtgggagaaaatcgaaattggcggtaatacaatccaaccatgttttaaaactgatcgaagaaaagtatccggactacgactgcaaggttttcactttgcaaactcttggtgaccagattcaattcaaacctttgtactcatttggcggtaaagctttatggacaaaggagttggaagaccatctttaccatgacgatccctcaaagaagcttgacttgatcgttcattctctgaaggacatgcccactttactaccagagggtttcgagctggggggtatcactaagcgggtcgatccaacagattgtcttgtcatgcccttttactctgcttataagtctctggatgaccttccagacggggggattgtgggaacctcatccgtgagaagatctgctcagctaaaaagaaaatacccacatttgaaatttgaaagtgtcagaggaaatatacaaactagattacaaaaactagacgacccaaaatctccgtaccaatgcatcatcttggcgtctgctgggttgatgcgtatggggttggaaaacagaattacgcagcgattccattcggatacaatgtaccatgcagttggacaaggcgccctgggtatagaaattagaaagggtgacaccaagatgatgaagattcttgacgaaatttgcgatctaaatgcaactatatgttgcctttcggagcgtgctttgatgagaactttagaggggggttgttccgttcctattggtgtggaatctaaatacaatgaagagactaaaaaattactattaaaggccattgtagttgacgttgaaggcacagaagcagtagaagacgaaattgaaatgctaatagaaaatgttaaagaagattccatggcgtgtggtaagatactagctgaaagaatgattgccgatggcgcaaagaaaattctggatgaaattaatttagacagaatcaaatgaacaccattaatttgatcagtccaaaaactctattattactaactaaagttcccttttttttttttttttttttttttttccttatctcc

SEQ ID NO: 570 - DNA, 2192 bp, Saccharomyces cerevisiae
ttaactccgttttcttttcatttccttctattcttttgtacagagtgtaccaccacgttttaatactttgttttaatacagtaggcaatggttaatcagggccaaccgcaacctaacctctatgacaaacacattaacatgtttccaccagcaagggcgcgggagtcctcgcataaattgggaaatgccaattcggataggcatggtttgccagctcaaaatatagtgcctgcaccctatccagtggatgactctatcgttgaactcacaccagctattccttttacatccccttcatcttcctcatcattatcgctgcctttgagtgcgctgaatttcacagacgggaatgctgatggtggtcaattaggcactccagtaaccataaatagtaataacggcatggacatttttaattccaagccaacaggtgaaataggatatgccaataatggcaccaacagtactggtagtaggtatgaacttcctttcaattttagttctacaaaagagagtttgggttcaccagctgtacaagatgcatcaataagcagtggaaatcgaatatcagagtctgtaagggacaactcagcgccaccaccctatgaggaatctgaatctaggatactgcaggaaaaagtttacagaaccgaggaaaaagctccaatacgacctttgaataataatcctgttccaccacaaaaaatcaaccaaccacccactgggagcgcgaagacagacgataatgggtcctcaggtggtgaggacaaactgtcttcctattcaccagaggcattggctttctatcaagtgtacaagaagacaattactgactcttcaaaattcacccccgagatacaaatgcaatggtgtgaaacattacttacatatgcctttaatgaggatttcatatcgcaatataacataaacgcggagaagctcaaaagaagcttaaagcctgaggaaatgctcaaaaaccagaaagtcattttggaacattcattcaaggtgctcacaaaattgataactttaaaatggccacctgccatgtatttaatggggacgctgtattcacaccaaccctatttacctataaagaacaaaaacatcgttattaaaaatgatgaaaaggcgctggaatattattgtaaagctgcgaaattgaacaattcagatgcatgctaccgtgcaggtgtatgctttgaataccaaaggggcacctcttctttggatccatcaccaaccaaagaacaatgcataaaaaaggccttccaatactaccagcatggcgcagaagtttgttcaaattctgcgtgtatgtataaattagggatgagccatttatacggtctgaacatgcaaaagactgatgtattgctagctattaaatggtttgataaagctgcccaaaagggtgactctccacaaacattatatgagttaggtaaaatatatgaattcagtgttttgccgccagaaatccagaacctattatttgcgaacggcatacgaaaagactctcaactggcaataaaatactaccaacaatgtgccaaagattttgagtaccctttagcgcaatggaaattaggaaattgttatgagtttggagacctagggttgccagtggtggccaaaaaatccatatattggtattccaaagctgctgctgctcagccgaaggggaatccgatggcaatgttatccttaagtggatggtacttaacgggagcaccaaatattttgaaaccaaacaataaagaggcattcaactgggccttgaagagcagcaagtgttcagacggtaaattagcccgcactgaatttgccttaggattttattacgaaaaaggtgtcggttgtgaagttgatttggatctggccaaacaatattatcagagggctgcaagaatgggattcaggaaggcagttgatgctcttcgaagtttgacaaattaacgaattcgcatttctttattatgccataaatcaaatattattcaggacattagtaaaatattgtaacattctcctcaaaaatgagaggagaataaaaataacaaaagcgaagaaatgcgacgtcatttactcattattttaaactaaataaaaaaaatattgtaactacttatcgttgtaatgatatcttttcttcaaaaaaatatatagttggtgataaatatgacctcttt

SEQ ID NO: 571 - DNA, 1140 bp, Saccharomyces cerevisiae
tgctgtcacattttctacaaagcgacgacatagatatatagaggtgactatataaatcgtgtatctcttttgatggttaatatttagcctttagacatatatcaaacaaagcatcttccaaagtattagaaaagggaaatatgcctcataccgataagaaacaatcaggattagctcgtcttttggggtccgcctctgcaggcataatggaaattgccgtcttccatcctgtggacaccatttccaaaagactgatgtccaaccacaccaaaataacctctggccaggaattgaatcgtgttatttttcgtgatcatttcagcgaacctttgggcaaacgtttgtttaccttgttcccgggtctcggttacgctgcatcatacaaagttcttcaaagagtgtataaatatggtggtcagccttttgctaacgagtttttgaataagcactacaaaaaggattttgataatcttttcggtgaaaagactggtaaggcaatgagatccgccgctgctggatctttgattggtattggtgaaattgttcttttgccgctggacgtgttgaagattaagagacagaccaatcccgaatcgtttaaaggtagaggtttcatcaagattttgagagacgaaggcctgttcaacttatataggggttgggggtggacggctgccagaaatgctcccggttcattcgccctttttggtggtaatgcattcgccaaggagtatatcttgggtttgaaagattattctcaagctacttggtcccaaaacttcatctcctccatcgtcggtgcttgctcctctctgatcgtttctgctccattagatgtcatcaagacaagaattcaaaataggaattttgataatcctgaaagcgggttgagaatcgtcaaaaacactctgaaaaatgaaggtgtaactgcgtttttcaagggcttaacacctaaattactaacaacgggtccaaaactggttttctcatttgcgttagctcaatctttgatacctagattcgataacctgttgagcaaatgaagtacatgaacttcttgtctattttccttggcattcagcttgtgaatataaaatgtataacaatatgagtttgtactttatgtattatttcctgttt

SEQ ID NO: 572 - DNA, 3197 bp, Saccharomyces cerevisiae
aatcattgttaatcattaagtaattgccattttattcacatttttagactcaaccacttgctgttgccacagtaaacgttaattatatctttgagaattgtgtcagccaatagaaaggtaaagttgaccacaagttgtttaaggggaaaagttaactttgaaagtagaaccctcattccatagatcatgaccgccatagaagatattttacaaatcaccaccgatccttccgatacccgtggctactctctattgaagtccgaggaagtgcctcaaggctcaactcttggagttgattttattgatacgctactattatatcaactcaccgagaatgagaagttggataaaccgtttgaatatttgaacgattgctttcgccgtaatcagcaacaaaaaagaatcaccaaaaacaagccaaatgctgagtcattacattccactttccaagagattgatcgtcttgtcattggctatggtgtcgttgcctcacaaatagaaaacttttgcatgaatggtgctttcatcaattatatcactggaattgtttctaacgttaactcatatactgatttcctttcccaaatcattcaaagagccatattagaaggtaccgctttggatttacttaacgctgttttcccgacattattagaatactgtaataaacatgtcagccattttgatttgaacgaatctgtaatttacaataacgttcttaccatttttgagttatttgttacatttaaacctattgcagaaatattcactaaaatagatggtttttttgcagactatagctgtaaaccacaggattttgaaaggaaaacgatattggggcctattttatctctttctcccatagaagctgctgtggcaatccggaactacggcgataaccttttgcgttccaaacaacagacagccatgatccatgaatctctacaagctgagcataaagttgtcatagatagactcttttttattgtcgataagcttgttcgtggctccttaaactcaaggactgatatgattagttattttgcccatatcgctaataaaaaccatttacgtagagccgatcatccaccattcaaagaactatcctctaacggatttatgtccaatatcactttgttattggttagattttctcaaccatttctagatatttcatataagaaaatcgacaagatcgacgcaaattacttcaacaacccaagtttatttattgatttatcaggggaaacacgattaaattctgattttaaagaggcagatgcattttatgacaagaacagaaaaacagcagattctaagccaaacttcatctctgattgctttttcttgacattaacctatttgcattatggtctgggaggtacattatcatttgaagagaagatgggatctgaaatcaaagcgttaaaggaagaaattgaaaaagtaaagaaaatagctgcgaaccacgatgtctttgccagattcattacagcacaattatccaagatggagaaggcgttgaaaacaacagaatctttgcgatttgctcttcaagggttcttcgctcatagatctcttcaactagaggttttcgactttatttgtggtgcatctacgttcttgattcgtgttgtggatcctgaacacgaatttccgtttaaacaaattaaattgccattaattccggaccaaataggtgttgaaaacgtggacaacgctgattttttgagagcgcatgctccagtgccttttaaatactatccagaatttgttgtagaaggtccagttaactattctctatacatttcgaagtaccagacctctccaatcttcagaaatccacgtctgggatcgtttgttgagtttacaacaatggtcctccgttgtcctgaattggtttccaacccacatttaaaaggtaaattagtgcagttattaagcgttggtgctatgcctctaacagacaattcccccggattcatgatggatatattcgaacacgacgaattagttaacaagaatctgttatatgctctactagacttttatgttattgttgaaaaaacaggctcttcttcacaattttacgataaattcaacagcagatatagcatatcaataattttggaggagctttattacaagataccatcttataaaaaccaattgatctggcagtctcaaaacaatgctgacttttttgtgaggttcgatgctcgtatgttgaatgacttgactttcctgttggatgaaggcctaagtaatttggctgaggtgcataatatccaaaatgagctggataatcgcgcaaggggcgcgccaccaacaagagaggaagaggacaaagaactacaaacaagattggcgtctgcttccaggcaagctaagtcctcgtgtggattggccgataaatcgatgaaactgttcgaaatctattcgaaggatataccggctgcatttgtcacaccagaaatcgtatatagactggcaagtatgctaaactataacttagagtcacttgtcggtcccaaatgcggggaactaaaagtgaaagacccacaaagttattcattcaacccaaaagatttgttgaaagccttaacaactgtttatatcaatctttccgagcaatcagagttcatcagtgctgtcgctaaagatgaaagatcatttaatagaaatctctttgttcgcgcagttgatattcttggtagaaaaactggtttagcatctccagagttcatcgaaaaactattgaactttgccaataaagccgaagagcaaagaaaggctgatgaagaggaagatcttgagtatggtgatgttcctgacgagttcttagatcctttgatgtacacaattatgaaggatcctgtcattttaccagcatccaagatgaatattgatagaagcacgatcaaagcacatctgcttagtgactctactgacccgtttaatagaatgcctttaaaactagaggatgtaacacctaatgaagagttaaggcaaaagattctttgtttcaaaaaacaaaaaaaggaagaagcaaaacataaagcaagcgagtgaatgaataagtgatagaataaattgcaaaattgaccctaatcaaataaggcttatttcatcgctcaatgtgtcttatattttgaagattttcgatgaaaatgttttaatttaacaattatttaaaa

SEQ ID NO: 573 - DNA, 1380 bp, Saccharomyces cerevisiae
gtaccagcccgctgcaaaacagtgttcgaacaagaacacgcaaacccgtttacttcttgtcctacctgctctctttcctttccggttattgttcctgttacgtctttttttgaattttatattattggcacttctgtataactggctttcattcgaaaaaaatggatatggaaattgatgaccctatgcatggttcagatgaagatcaattatcaccgactctcgacgaagacatgaatagtgatgacggcaaaaataatacgaaggcgcgttctaatgacgaagacacagatgaagagttggaagattttaattttaaaccggggtcctcgggtatagcagatcataaatcctccaaaccactaaaactgaccaatacaaatataaatcagcttgaccaatggattgagcatttgagtaaatgcgagccactatcagaagacgatgtagcacgactatgtaaaatggcggtggacgtgttgcagttcgaggagaatgttaaaccaattaacgtgcctgttaccatttgtggtgacgtacacggtcaattccatgacttgttagaacttttcaagattggtggtccttgtcctgacaccaattaccttttcatgggtgattacgtggatagaggatattattctgttgagaccgtatcttacctagttgccatgaaagtcagatatccacatagaattactatacttaggggcaatcacgagtctaggcagattacccaagtatatgggttttatgacgaatgtttgagaaagtacggcagtgcgaacgtgtggaaaatgtttaccgatctattcgattatttccccgttactgccttggtggataataaaatcttctgtttgcatggaggtctctcacccatgatagagacaatagatcaagttagagatttaaatagaatacaggaagtgcctcacgaaggtccaatgtgtgaccttctatggtccgatcctgatgatagaggcggatggggaatcagtccgagaggtgcaggcttcacttttggtcaagacatcagtgagcaattcaatcacactaatgacctatcactaatagcaagagctcaccaattggtaatggaaggatattcttggtctcaccagcaaaatgttgtcaccattttcagtgctccaaattattgttatagatgtggtaaccaggccgctattatggaggtggatgaaaaccataataggcaattcttacaatacgatccatctgtgagacccggtgaaccaaccgtcaccaggaagacaccggattatttcttataatatatatctattacacctttatccttactacgctatttcattccaacatacatttattttttttttttttttaatatatatttag

SEQ ID NO: 574 - DNA, 1892 bp, Saccharomyces cerevisiae
ttatagtgcaatttaaatattgtacatcattccgatccagctggaaacaaaagcaagaacaatgttgtggaagcgtacttgcacaaggctaataaagcctattgcacaacctagaggaaggctggtgagaagatcatgctacagatacgcctcaacaggcacaggcagcaccgacagcagcagccagtggttaaaatactctgtcatcgcctcttcagctactctattcggttatttgttcgctaagaacctctattctagggagactaaggaagatttgatagagaagctggaaatggtcaaaaagatcgacccagtaaattctacgttaaagctgtcctcattggactcaccagactatttgcacgacccggttaagatcgataaggttgttgaggacctgaagcaggtgctgggaaacaagcctgaaaactactctgatgcgaaatccgatttggacgcccattcagatacctacttcaacacgcatcacccctctcccgagcaaagacctaggattatattattccctcatactaccgaagaagtttccaaaattttgaaaatatgtcacgataacaacatgccagttgtacccttctcgggcggaacgtccttggaggggcacttcctgcctacaagaattggagataccataaccgtagacctgtccaagtttatgaataacgtcgtaaaatttgacaagctggacctggacatcaccgtgcaggccggtctaccctgggaggatttgaatgactatttgagcgaccacggtttgatgtttggctgtgaccctggtccaggtgcacagattggtggttgcattgctaattcttgttcaggaaccaacgcctaccgttacggtaccatgaaggagaatattataaacatgactatagtgttgccggacgggaccattgtcaagacgaagaaaagacccagaaagtcgagcgctggctataacttaaatggtttatttgtgggaagtgaaggtaccttaggtattgttactgaagctactgtcaagtgtcatgtcaagcccaaagctgaaactgttgcggtggtatcctttgatactatcaaggatgcggccgcatgtgcttctaatctgactcagagtggtattcatttgaacgccatggagttactggatgaaaatatgatgaagttgatcaacgcatctgaatccacggacagatgtgattgggtagagaaaccaactatgtttttcaagattggtgggagatctcccaacattgtcaatgctcttgtggatgaagttaaggctgtcgcccagttaaatcactgcaacagttttcagtttgctaaagatgatgacgaaaaattggaattatgggaagctagaaaggtcgcgctatggtctgtgctagacgctgataagagcaaagacaaatcagctaaaatttggacaactgatgtagctgttcctgtgtcgcagttcgacaaggttattcacgaaactaaaaaggacatgcaagctagtaagctgatcaacgccattgttggtcatgcaggtgatggtaacttccatgcattcatcgtctacagaacccctgaagaacacgaaacctgtagccaacttgttgacagaatggtcaagagagcactgaacgcagaaggcacttgcacgggtgaacacggtgttggtattggtaaaagagagtacttgctcgaagaattaggtgaagcacccgtcgatttgatgagaaagattaagctagctattgacccaaagagaatcatgaacccggacaaaatctttaaaactgatccaaacgagcccgctaatgattacaggtgagtatctgattttcctttttcacccttcacgtaaacctgaaatatatttcatgtaatatatatagttc

SEQ ID NO: 575 - DNA, 6585 bp, Saccharomyces cerevisiae
ctgcttcagtttttttttatttatttttgtctttctactctctcttttttcttaatctatttgccatttatttattttgaagaactagaaaaagaattagaaaagaaagcatgccagtgttgaaatcagacaatttcgatccattggaagaagcttacgaaggtgggacaattcaaaactataacgatgaacaccatcttcataaatcttgggcaaatgtgattccggacaaacgaggactttacgaccctgattatgaacatgacgcttgtggtgtcggtttcgtagcaaataagcatggtgaacagtctcacaagattgttactgacgctagatatcttttagtgaatatgacacatcgtggtgccgtctcatctgatgggaacggtgacggtgccggtattctgctaggtattcctcacgaatttatgaaaagagaattcaagttagatcttgatctagacatacctgagatgggcaaatacgccgtaggtaacgtcttcttcaagaagaacgaaaaaaataacaagaaaaatttaattaagtgtcagaagattttcgaggatttagctgcatccttcaacttatccgtattaggttggagaaacgtccccgtagattctactattttaggagacgttgcattatctcgtgaacctactattctacagccattattggttccattgtatgatgaaaaacaaccggagtttaatgaaactaaatttagaactcaattgtatcttttaaggaaggaggcctctcttcaaataggactggaaaactggttctatgtttgttccctaaacaataccaccattgtttacaagggtcaattgacgccagctcaagtgtataactactatcccgacttgactaatgcgcatttcaaatcccacatggcgttggtccattcaagattttccactaatactttcccctcttgggatagagctcaacctttacgttggctagctcataatggtgaaattaacaccttaagaggtaacaagaattggatgcgctccagagaaggtgtgatgaattcagcaactttcaaagatgagttagacaaactatacccaattatcgaagaaggtggttctgattcagctgcattggataacgttttagaactattgactattaatggcacattatctctacctgaagctgttatgatgatggttcctgaagcgtatcataaggatatggattctgacctaaaagcatggtacgactgggctgcatgtctgatggaaccttgggatggtccagctttgttaactttcactgatggacgttactgtggtgctatattggatagaaatggtttaagaccttgtcgttattacatcactagtgatgacagagttatctgtgcttcagaggtaggtgtcattcctatcgaaaattcattggttgttcaaaaaggtaaactgaagccaggtgatttattcctagtggatactcaattgggtgaaatggtcgatactaaaaagttaaaatctcaaatctcaaaaagacaagattttaagtcttggttatccaaagtcatcaagttagacgacttgttatcaaaaaccgctaatttggttcctaaagaatttatatcacaggattcattgtctttgaaagttcaaagtgacccacgtctattggccaatggttataccttcgaacaagtcacatttctgttaactccaatggctttaacaggtaaagaagctttaggttcgatgggtaacgatgcgccactggcttgtttaaatgaaaatcctgtcttactttatgattatttcagacaattgtttgctcaagtgaccaatcctccaattgacccaattcgtgaagcaaatgttatgtcgttagaatgttatgtcggacctcaaggcaaccttttggaaatgcattcatctcaatgtgatcgtttattattgaaatctcctattttgcattggaatgagttccaagctttgaaaaacattgaagctgcttacccatcatggtctgtagcagaaattgatatcacattcgacaagagtgagggtctattgggctataccgacacaattgataaaatcactaagttagcgagcgaagcaattgatgatggtaaaaagatcttaataattactgacaggaaaatgggtgccaaccgtgtttccatctcctctttgattgcaatttcatgtattcatcatcacctaatcagaaacaagcagcgttcccaagttgctttgattttggaaacaggtgaagccagagaaattcaccatttctgtgtcctactaggttatggttgtgatggtgtttatccatacttagccatggaaactttggtcagaatgaatagagaaggtctacttcgtaatgtcaacaatgacaatgatacacttgaggaagggcaaatactagaaaattacaagcacgctattgatgcaggtatcttgaaggttatgtctaaaatgggtatctccactctagcatcctacaaaggtgctcaaatttttgaagccctaggtttagataactctattgttgatttgtgtttcacaggtacttcttccagaattagaggtgtaactttcgagtatttggctcaagatgccttttctttacatgagcgtggttatccatccagacaaaccattagtaaatctgttaacttaccagaaagtggtgaataccactttagggatggtggttacaaacacgtcaacgaaccaaccgcaattgcttcgttacaagatactgtcagaaacaaaaatgatgtctcttggcaattatatgtaaagaaggaaatggaagcaattagagactgtacactaagaggactgttagaattagattttgaaaattctgtcagtatccctctagaacaagttgaaccatggactgaaattgccagaagatttgcgtcaggtgcaatgtcttatggttctatttctatggaagctcactctacattggctattgccatgaatcgtttaggggccaaatccaattgtggtgaaggtggtgaagacgcagaacgttctgctgttcaagaaaacggtgatactatgagatctgctatcaaacaagttgcttccgctagattcggtgtaacttcatactacttgtcagatgctgatgaaatccaaattaagattgctcagggtgctaagccgggtgaaggtggtgaactaccagcccacaaagtgtctaaggatatcgcaaaaaccaggcactccacccctaatgttgggttaatctctcctcctcctcatcacgatatttattccattgaagatttgaaacaactgatttatgatttgaaatgtgctaatccaagagcgggaatttctgtaaagttggtttccgaagttggtgttggtattgttgcctctggtgtagctaaggctaaagccgatcatatcttagtttctggtcatgatggtggtacaggtgctgcaagatggacgagtgtcaaatatgcgggtttgccatgggaattaggtctagctgaaactcaccagactttagtcttgaatgatttaagacgtaatgttgttgtccaaaccgatggtcaattgagaactgggtttgatattgctgttgcagttttattaggggcagaatcttttaccttggcaacagttccattaattgctatgggttgtgttatgttaagaagatgtcacttgaactcttgtgctgttggtattgccacacaagatccatatttgagaagtaagtttaagggtcagcccgaacatgttatcaacttcttctattacttgatccaagatttaagacaaatcatggccaagttaggattccgtaccattgacgaaatggtgggtcattctgaaaaattaaagaaaagggacgacgtaaatgccaaagccataaatatcgatttatctcctattttgaccccagcacatgttattcgtccaggtgttccaaccaagttcactaagaaacaagaccacaaactccacacccgtctagataataagttaatcgatgaggctgaagttactttggatcgtggcttaccagtgaatattgacgcctctataatcaatactgatcgtgcactcggttctactttatcttacagagtctcgaagaaatttggtgaagatggtttgccaaaggacaccgttgtcgttaacatagaaggttcagcgggtcaatcttttggtgctttcctagcttctggtatcacttttatcttgaatggtgatgctaatgattatgttggtaaaggtttatccggtggtattattgtcattaaaccaccaaaggattctaaattcaagagtgatgaaaatgtaattgttggtaacacttgtttctatggtgctacttctggtactgcattcatttcaggtagtgccggtgagcgtttcggtgtcagaaactctggtgccaccatcgttgttgagagaattaagggtaacaatgcctttgagtatatgactggtggtcgtgccattgtcttatcacaaatggaatccctaaacgccttctctggtgctactggtggtattgcatactgtttaacttccgattacgacgattttgttggaaagattaacaaagatactgttgagttagaatcattatgtgacccggtcgagattgcgtttgttaagaatttgatccaggagcattggaactacacacaatctgatctagcagccaggattctcggtaatttcaaccattatttgaaagatttcgttaaagtcattccaactgattataagaaagttttgttgaaggagaaagcagaagctgccaaggcaaaggctaaggcaacttcagaatacttaaagaagtttagatcgaaccaagaagttgatgacgaagtcaatactctattgattgctaatcaaaaagctaaagagcaagaaaaaaagaagagtattactatttcaaataaggccactttgaaggagcctaaggttgttgatttagaagatgcagttccagattccaaacagctagagaagaatagcgaaaggattgaaaaaacacgtggttttatgatccacaaacgtcgtcatgagacacacagagatccaagaaccagagttaatgactggaaagaatttactaaccctattaccaagaaggatgccaaatatcaaactgcgagatgtatggattgtggtacaccattctgtttatctgataccggttgtcccctatctaacattatccccaagtttaatgaattgttattcaagaaccaatggaagttggcactggacaaattgctagagacaaacaatttcccagaattcactggaagagtatgtccagcaccctgtgagggagcttgtacactaggtattattgaagacccagtcggcataaaatcggttgaaagaattatcattgacaatgctttcaaggaaggatggattaagccttgtccaccaagtacacgcactggctttacagtgggtgtcattggttctggtccagcaggtttagcgtgtgctgatatgttgaaccgtgccggacatacggtcactgtttatgaaagatccgaccgttgtggtgggttattgatgtatggtattccaaacatgaagttggataaggctatagtgcaacgtcgtattgatctattgagtgccgaaggtattgactttgttaccaacaccgaaattggtaaaaccataagcatggatgagctaaagaacaagcacaatgcagtagtgtatgctatcggttctaccattccacgtgacttacctattaagggtcgtgaattgaagaatattgattttgccatgcagttgttggaatctaacacaaaagctttattgaacaaagatctggaaatcattcgtgaaaagatccaaggtaagaaagtaattgttgtcggtggtggtgacacaggtaacgattgtttaggtacatctgtaagacacggtgcagcatcagttttgaatttcgaattgttgcctgagccaccagtggaacgtgccaaagacaatccatggcctcaatggccgcgtgtcatgagagtggactacggtcatgctgaagtgaaagagcattatggtagagaccctcgtgaatactgcatcttgtccaaggaatttatcggtaacgatgagggtgaagtcactgccatcagaactgtgcgcgtagaatggaagaagtcacaaagtggcgtatggcaaatggtagaaattcccaacagtgaagagatctttgaagccgatatcattttgttgtctatgggtttcgtgggtcctgaattgatcaatggcaacgataacgaagttaagaagacaagacgtggtacgattgccacactcgacgactcctcatactctattgatggaggaaagacttttgcatgtggtgactgtagaagagggcaatctttgattgtctgggccatccaagaaggtagaaaatgtgctgcctctgtcgataagttcctaatggacggcactacgtatctaccaagtaatggtggtatcgttcaacgtgattacaaactattgaaagaattagctagtcaagtctaaaaagcttgagttattatttattttatgatcgtatatt

SEQ ID NO: 576 - DNA, 2355 bp, Saccharomyces cerevisiae
taggataattgtgcattgctattgtgatttttgatacagaaattatgcactatgtggtactagagctgcaagttgcgcatttgccagatacccccaaggatcaatgtcgcattgcgaatatagcatttcaaattgtgaatgctgaaacattagtatgccattatgggaccaattctttaccgagcattgaagtaaacgggacgacaaagagtttggagagtgcaatggtgcaattggacaaggatattcatgacgttattggtaacgacgactttgttcttgtttccctgtattcaacatggcatatccgtgttaccttaccacgtcaagcgagagatgatgggtttattcttacttcttatttacaacatccgaaagtatttgacttatggaaggaattcgatagatggtgtgtcaaccatccggagattttgggacaaaagaaagcaatctccaacaacaattgtaatactaaaagtattagtattaatgcagccaaaaatacgaaggatttggacgaaatagttagaatattggaagtttcaatcccaactgaagaggcaggctctgttccagagatatactctcttttaaaaaggacaacggatatattaatacaattgcacaaaaagtgtacttcccctgaagatatggaatctgtcttaacaaaaccatatgactcacacaccgatattagagcgtttttgcaagagaaatctaagattttgtacatgaacaatttaccgcccgacacaactcaaagtgagttggaatcatggtttacccaatatggtgttagaccagttgggttttggactgtcaaaaacatcgtagaagatacgtctaacgttaataataactggagtctaaataacagtccctatgtggaagatcaagatagtatctcaggatttgttgtcttccaaacacatgaagaagcaactgaagtactagcgttgaatgggagatcaatcctatctaatctggcaaacactaagcaaccaagggtggtggaacatgtccttgagcttcaaccttcttccaccggagtactcgataaggctcaagaaattttatcgcctttccctcaaagtaaaaacaaaccaagaccaggtgactggaattgcccatcttgtggtttttcaaactttcaaagacgtactgcatgttttagatgttcttttccggcaccatcaaatagtcaaatacatactgcgaactcaaacaataatgttaacagtagtagaaataatttaaacaatcgcgtgaactcgggatcttcaagcaatattagtaacactgcagcgaatcacccctatggtgcccctgagttcaacatgattgctaacaacacgccagcagctttaacatacaatagagctcattttcctgcaattacgccattgtcgcgacaaaattcattgaacatggcaccatcgaacagtgggtcgccgataattatagcggatcatttttcgggaaataataatatagccccaaattatcgttataataataatattaacaataacaacaataatattaacaatatgaccaataatagatataacattaataacaacatcaacggtaatgggaatggtaatgggaacaacagtaataacaataacaatcataataacaatcataataacaatcatcataatggtagtatcaatagtaatagtaataccaataataataataataataacaatggtaacaatagtaataattgtaattccaatatcggtatgggaggatgtggctccaacatgccatttagagcaggagattggaagtgttccacgtgcacgtatcataactttgctaaaaacgtagtgtgcttacgctgtggtggtccaaaatcaataagcggcgatgcaagtgaaaccaatcattacatagattcatcaacatttggaccagcgtcgcgtactcccagtaataacaatatttctgttaatactaatggtggtagcaatgctggtcgcaccgatgggaacgataacaaaggtcgtgatattagtttgatggaatttatgtcaccaccgttatcgatggcaacaaagtcaatgaaggagggagatgggaatggtagctcgtttaacgagttcaaaagtgacaaagctaacgttaatttttccaatgttggtgataatagcgctttcggtaatggttttaatagttcaatacgttggtagttaggaacaggcgaggtcaataaatttcacacaaccacattgtattttttatttttacacttttatatatttatatactttttctacccttacttttttcttcaggtctaactgattgctgaagaacgtaattgtgcgcatatatatgata

SEQ ID NO: 577 - DNA, 685 bp, Saccharomyces cerevisiae
attagaaaataaagaaatactttgttatataaagatggaagcaagacggtatggaccgaatatcattgttacaggaacaccaggatgtggcaagtcgtctacgtgtgagtttttaaaaaataaactgaaggattacaaatactataacatttcggatttcgccaaagataacgactgtttcgaaggatatgatgagggccgtaaatcgcacattgtcgatgaagacaaactgctggacatgctagagcctcttttgagacagggaaatagtattgtcgattggcatgtcaatgatgtgttcccagagaggctgattgacttggtggtggtgttgagatgcgataactctaacttgtattcaagattgcatgcaagaggctatcatgactctaagatcgaggaaaacctcgatgccgagattatgggtgtcgtcaaacaggatgccgtggaatcatacgaaccgcacattgtggtagagctacaaagcgatacgaaagaagatatggtatctaacgtatcccgtattgttgcttgggaaaagatgtggttagaacaacatccagatggagtcacaaatgaatatcaagggcctcgtagcgatgacgaagacgatgaagacagtgagtaggcgttccataactttgtgtatctacatatatacatatataattgtaaattagtaaca

SEQ ID NO: 578 - DNA, 2452 bp, Saccharomyces cerevisiae
taatgattttggaggtttagagcagcttttaacgtcattgttcatcaattacatgcgcagattactgaccggttgccttctttcatctgcacgtcccttgaaatcaagattgccattattgatgtcatcctcattaccttcctctgccggtaagaagcctaaacaagccactttggctagattcttcacttccatgaaaaataagccaacagaaggtactccttctcccaaaaaatcatccaaacatatgctggaagatagaatggataatgttagtggggaagaggaatacgcgaccaagaaattgaaacagacggctgttacacatactgtagcagctccaagctccatgggtagcaatttttcttctataccatcatccgctccctcttccggtgttgctgattcaccgcaacaatctcagaggttggtaggtgaagttgaagacgccttgagctcaaataataatgatcactattcgtctaatatcccctattctgaagtttgtgaggtttttaacaagattgaggccatatcttcccgtttagagattataagaatctgttctgatttctttattaagataatgaagcaatcgtctaagaacttaatacctacaacataccttttcatcaatagattgggccctgactacgaagcaggcttggaattaggccttggagaaaatcttcttatgaaaaccataagcgaaacttgcgggaaatccatgagccaaattaaacttaaatacaaggatattggggatttgggtgaaatagcaatgggtgcgagaaatgtccaacccactatgtttaagcccaaacccttgaccgtgggtgaggtcttcaaaaatcttagagctattgctaagactcagggcaaagattcacaattaaaaaagatgaagctgatcaagagaatgcttactgcttgcaaaggtatagaggctaagtttttgattagatccctagagtcaaaattgagaatcggtcttgctgaaaagactgtcttaatatccctatcgaaggctcttttgctccatgatgaaaatagggaggactctccagacaaagatgtccccatggatgtgttagaaagtgctcaacaaaagataagagacgcattttgtcaagtacccaactatgaaattgttataaactcatgcctggaacacggtattatgaatttagataaatattgtactctaagaccaggaattccattgaaacccatgttagccaagcctaccaaggcaattaatgaagtattggatagatttcaaggcgaaacttttacgtcagaatacaaatacgatggtgaaagggctcaggtgcatttactaaatgatggtacaatgaggatttattccagaaatggcgagaatatgactgagagatatccagaaattaacataacggattttatccaggatttggatactaccaaaaatttaattctagactgtgaggctgttgcttgggacaaagatcaggggaaaattttgcctttccaggtcttaagtacaaggaaacgtaaagacgtggagctgaatgatgttaaagttaaagtctgtctctttgcatttgatatactttgctacaacgatgaaaggctgattaataagtcactaaaggaaagaagagaatacttgacgaaggttacaaaagttgtcccgggagaattccaatacgcgactcagataacaacaaataaccttgatgaacttcaaaaattccttgatgagtccgttaatcactcatgcgaaggtttgatggtcaaaatgttggagggccctgaatcccattatgaaccaagtaaaaggtcaagaaactggttgaaattaaaaaaagattacttggagggggttggagattcattggatctctgcgtgttgggggcatattatggtagaggaaaaagaactggtacgtacggtgggttccttctaggatgttacaaccaagacacaggagaatttgaaacttgttgcaagatagggacaggattttcggacgaaatgttgcagcttttgcacgacaggttgaccccgacgatcattgatggaccaaaagccacgtttgttttcgattcgagtgctgagccagatgtatggttcgaacctacgactttgtttgaagttttgactgcagacctttccctatcgcctatttataaagcaggtagtgcaacttttgataaaggcgtatccttaagatttccaagatttttgcgtataagagaagacaagggcgtagaagatgcaacctcttctgaccagatcgtcgaattgtatgaaaaccaatcccacatgcaaaattagatgtgcacactatttttctcaattaatcattaaaaaaaaaaaagagggcgttctgttcagctccaaaacgccgcatcacatataatgacatttatttacttctttcgtttctctgtctaccttacataatag

SEQ ID NO: 579 - DNA, 433 bp, Saccharomyces cerevisiae
cagtaattgtggtgatgttatctaaagaagcgttaataaaaatcctcagccaaaatgaaggtggtaatgatatgaaaattgccgatgaagtagtaccaatgatacagaaatatttggatatattcattgatgaggcggtgctgcggtccttgcaatctcacaaggacattaacggagaacgtggcgataaaagtcccttagagttatcgcatcaagatttagagcgtatcgtagggcttcttctgatggatatgtaaaagtattcaacttacattacatccatgtaaagacataagacattcctggttgtctgataaatttaaagcactatattttctttcagtcgtcctgaactacgttagtttactaaagtagtttttggagcgatcgtgcgctcacatatacaaatatacagttcattttatactaaacg

SEQ ID NO: 580 - DNA, 1852 bp, Saccharomyces cerevisiae
aaagtgtttattatctgattgtacatttatttctcatcattggattcagttttgtttcatccacattcttttaagaccacaagcttaatattttcattcataaaggattgtacgacaaaacaacaataatagtaaatatagtcatattttattcctaatagaaagatagacgcagaaaattcttacttttagcccttttatttcttcataaccgcatcgccattcgcataataacttatcccaggcctaaaatacgacaagaaagaaaatagtagtaatgggttccatcaataataacttcaacactaataataacagtaatacggatctcgatcgggactggaaaactgcattgaatattcccaagaaggataccagaccacagacagatgatgtcttaaatacaaagggtaatacttttgaagatttttatttgaaaagagagctgttaatgggtatttttgaagccggttttgaaaaaccatcccctattcaagaagaggctattccggtagcaataactggtagagacatattggccagagcaaagaatggtacaggtaagacagccgcatttgttattcctacgttagagaaagtcaaaccaaagttgaataaaattcaggctttgatcatggttcccacaagagagttagctctgcaaacttcccaagtcgtccgtacattgggaaaacactgtggtatttcatgtatggtgaccactggtggtaccaatttgagagacgatattctaagattaaatgaaacagtccatattttggttggtactcctggtagagtgttggatttagcttcgagaaaagtagcagatctgtctgattgttcattattcatcatggacgaagccgataaaatgttatctcgtgacttcaagacaataattgaacaaatcttatccttcttacctccaactcaccaatctttattatttagcgctactttcccactaacggttaaggaattcatggttaaacatctgcataagccttatgaaattaatttgatggaagaattgactctaaagggtattactcaatactacgcctttgttgaagaaagacaaaagctacattgtttaaatactttattctctaagcttcaaattaatcaagccattattttttgtaattctactaaccgtgtcgaattactagccaagaaaatcactgatttaggctattcctgttattactctcatgcaagaatgaagcaacaagaaagaaataaagttttccacgaatttcgtcaaggtaaggttcgtacattggtctgctccgatttattgacccgtggtatcgatattcaagccgttaatgtcgttatcaatttcgatttccccaaaacggcagaaacatatttacatcgtattggtagatccggtaggtttggccacttgggtttagcaatcaatttgattaactggaatgatcggtttaacctttataaaatcgaacaagaactgggcactgaaattgcggctattccggccactatcgataagtcattgtatgtggctgaaaatgacgaaacggtacctgtcccattcccgatagagcaacagagctatcatcaacaagcgatacctcagcaacaattaccatctcagcaacaatttgctattcctccgcagcaacatcatccacaattcatggttcctccttcgcatcagcaacaacaggcgtatcctccaccgcaaatgccatcgcagcaggggtatcctccacagcaggaacatttcatggcgatgccacctggtcagtcacaaccccagtattaaagaatatctaagaaaaaataactactgtggtgagatacgctttttttgtgatct

SEQ ID NO: 581 - DNA, 528 bp, Saccharomyces cerevisiae
gtgaaaaacaatgagtaatattttggcagtgttcaaccctccaccacaaagggagctggaaaaagaagagactatggattgcgttccttgtcaagtcatgagcactatgttttctgttggatttggctcatacttggcatctgggaaaccattcaagtatggtaaaaaagaagccaaaagaggcatttctctgactgaatttgaaaaaagaaacccacaatggtggaaagtaactttacgtagcttcggtgggttattaatcgccttcggtttcgttagaggaaccgaaggttggttgtggcataaaaataaagaatataagaactataagaaattaagtaacgatggtgaaacacaggctaactagtattattcgcaagcttctctcaatcgtgaaattttctgtacataaagtgctactttgatgattatttttaaaaatattgttacattagaaaattggtttgtgatttacataatcaggagagtctatatatatatgaatatagctttgagaaagggatgtga

SEQ ID NO: 582 - DNA, 3983 bp, Saccharomyces cerevisiae
aggcattgcaattaggtaaatcatagaattggcgaaaccagcaggattttccaaacatttgttacttacccccttctttgcttaagatataaagttttttctttttattttatcttccctttacacttttgaataaaaacattatcatacctgtttacaaattcgcggtttatttaacctgaaatcagtatactttttttcttctgtagtgtctttgttcatttcattactggatcaagatgaagatgttaactaaatttgaatcaaagtccactagggccaagggcattgccttccacccctccagaccttgggttttggtggctttgttttcctctactattcaattatgggattacaggatgggaacactacttcacagatttgaagaccacgagggccctgttcgtgggctagatttccatccaacccaaccgatttttgtttcggcaggtgacgactataccattaaagtttggtccttagatactaacaaatgtctatacaccttaactgggcatttggattatgtccgtaccgtgtttttccaccgtgagctgccttggatcatatctgcttctgatgaccagaccataagaatctggaactggcaaaaccgtaaggaaattgcatgtttgaccggccacaatcattttgtcatgtgtgctcaatttcatccaaccgatgacctgatcgtttccgcttctctggatgaaaccatcagaatttgggatatttccggtttaaggaaaagacactccgctcctggtactagttcatttgaggagcaaatgagtgcacaacaaaatctattggatggctctcttggtgactgtgttgtcaagtttattctagagggtcacacaagaggtgtcaactgggcctctttccatccaactttaccattgattgtctccggcagtgacgaccgtcaagttaaattatggagaatgagtgctacgaaagcttgggaagttgatacttgcagaggtcacactaacaatgttgatagtgttatctttcacccacatcaaaacttgatcatttctgtcggtgaagacaaaacgctaagggtttgggatcttgacaagagaactccagtaaagcaattcaaaagagaaaacgatagattttggttgattgcagcacatcctcatatcaatctatttggtgcagctcacgattctggtattatggttttcaagctcgatcgcgaaagaccatgcagctttatccatcaaaaccagttgttttttgtcaatgcggaaaagcaaatccaaagtttcaatttccagaaaagagtcgcttcattaccttatgcgtccttaaagggtattggtcaaccttgggatgcattcagaagtatatcgtacaatccctcccaacattcagttttggttaatgaagctaatggcaaatttgctctcgttattttaccaaaacaaccagttggagctgtggagccaacaagtgtcacccaagatacaggtaattttgctacttttgttggtcgtaatagatttgttgtttacaacaagaacactgaatctgttgaagttcgctctctcgaaaacaaagttacaagaaatatcaaagtagaggaaacagtaagaactattgtagctgcaggtcctggatctgttttggtcatacaccccagagaagttattctttatgatgtccaacagggcaaaaaagtatcccaattggctgttaaaaacgtcaagtacgtttcgtggtccttagatggtcaatatgttgcattgatgagtaagcacaccataactttggctaccaaaaagctagaattgattaattctatgcatgaaacgattagaatcaaaagtgccgcttgggatgaaactggtgtattaatttattcaactttaaatcatataaggtactcactattgaacggggatagaggtattattaaaactttggagaaaactttatatatcacaaaagttcagggaaaattagtgtactgcttgaaccgtgaaggtgagattgaaattttaaccattgatcctacagaatatcgcttcaaaaaggccctggttaacaaaaatttcccagaagttttacgtctgataaaagattctaatttggttggccagaatatcatttcctatctgcagaagtcaggttacccagaaattgctttacaattcgttcaagacccacatatccgttttgatttagctttggaatacggtaatttggatgttgccttagatgaagccaaaaaactgaatgattctagtacttgggaaagattaatccaagaagccttggcacaaggtaatgccagcttagctgaaatgatttatcaaactcaacattcttttgacaaactttccttcctgtatttagttacaggtgacgttaacaaactatctaaaatgcaaaatatcgctcagactcgtgaagactttggaagtatgctattaaacaccttttacaacaattcaaccaaggaaagatctagcatttttgcagagggcggctctttaccattagcttatgccgtagcaaaggctaacggagatgaagcggctgcttctgctttcttggagcaagctgaagttgatgaacaagatgttactttaccagaccagatggatgcctccaacttcgttcaaagaccagtgatctcaaagccacttgaaaaatggccattaaaagaggctgaactatcttactttgaaaaggctgttttaggtcaaattgacgatttgactatagacgatgaaactccagcagtaaacaccactcaagagcaagaagaaccactaggcgaagaaaactttaacgatgaggatattggtgaagacgaaggtgcctgggatttgggtgacgaagatttggatgtgggagaagagttacctgaagaagttgagcaaggcgaaattacctctccagcacaggaagttgaaacagccatttggatcaagaattctaaactgcctgctgtcctagttgccgctggtgcctttgatgccgctgttcaagccttgagcaagcaagtgggtgtagtcaagctggagccattgaagaaatattttaccaacatttatgagggttgtagaacatacattcctagtacgccctgtgaacttcctgctcaattaggttatgtcagagcgtatgatgataccgtaagtgaagatcaaattcttccttacgtgccaggtcttgatgtcgttaatgaaaaaatgaatgagggttacaaaaactttaaactaaacaaaccagatattgcaatcgaatgcttcagagaagctatctaccgtattacgctattaatggtcgatgatgctgaagatgaaaaattagcacacaagatactggaaactgctagggagtatatattaggtttatccattgaattggaacgccgctcattaaaggagggaaatactgtacgcatgcttgagctagctgcatactttacaaaggcaaaactatccccaattcatcgtaccaatgctttacaagtggctatgtcccaacatttcaaacacaaaaatttcttacaggcctcatattttgccggtgaatttttaaagattatttcttctggtcctcgtgcagaacaagcacgtaaaatcaaaaacaaagccgactcaatggccagtgacgccattccaattgactttgatccttatgctaaattcgatatttgtgcagccacctacaaaccaatttatgaagatacaccttccgtttctgacccattaacaggtagtaaatacgttatcacggaaaaagataaaatagatagaattgctatgatttctaagatcggtgcacctgcatccggattaagaatacgtgtataaatgctattttgcctattgattttctcgggattgtattctgctcgacctaaatttcatgtgacaagtccttttaatctaaacaatatgatagtgaaaaaaaaaaactgactatgtaattaacagttatatacaacttct

SEQ ID NO: 583 - DNA, 1184 bp, Saccharomyces cerevisiae
gttggcataagctaatgtcgaaaatgtctagaatactagttatcggggcaggtggcgttggggtcattactgcgctttcgttgtggcttaagaaggagagcgacgtttccttggtagtcagatctgactacgatagggtattgaagcatggctacacaatcgaatcatgtgactatggccggttagaaggttggagaccccaccatatttacagcagcgtcgaggacgctgcttctgccgcagacaaccaaggatacaactatattgtagtgactaccaagaacatcatagatgggcccgttaattcaagggtgtccaacatcatcagacctgtgcttgagaagaataaagagctacatgggccgcaattgacgacacacattttactggtacagaacggaatcgatattgagaaggagatatgggcggaatttcccagagagcagtatcgttacacggtgctttctggcatccagttaatcggatccactaagatcgggtcaggccatatcagtcaagtgggccaggaccacttatcgtgtggagcttttgatccacaggacgctgctgctatccaggctgccaacgacttcgtcaggatgtacagcaacgaggggcaaaactttgtcgaatttgaccctagggtccgttactctcggtggaagaagttgctctacaatgcagctatcaacacatccacggcacttgtggggctagacgttccgcgttgcctggagtttggggttaacaagaagagcacagaaattgaagtgttccaccctgccatgagggagatcatcgccattgcggcgagtgaaggcatcattatcgaagaggagttcataacgatgtttacagagattaccaggaaaaaggtgttcaagccatccatgtgcgtggactgcgagaagggccaattgatggagctagaagtcatcctaggcaaccccataagaatcgcgaaaagaaacggcgtcgctacacccactctttctatcttatacaacctacttgtgctagtacaggccaaactaaaggagcggaaaggcctattgaagttcgacgaaaaaactgccactcttgtggacgagtagttccaaccattgcttgcctcgttgacgagccttcatctagtatattgtaacacataatttagtatgtactcttaactattattcttattg

SEQ ID NO: 584 - DNA, 5350 bp, Saccharomyces cerevisiae
caatcataaagatagcaataacactttaccccaaaatataaatcagacatggtaggacaacagtattctagtgctccactccgtacagtaaaagaggtccaattcggtcttttctcacctgaagaagttagagcaatcagtgtggccaaaattagatttccagagacaatggatgaaacccagacgagagcgaaaattggtggtctaaacgaccctaggttaggctctattgatcgtaatctgaagtgtcaaacttgtcaagagggtatgaacgaatgtcctggtcattttggtcacatagatttagcaaaacctgtatttcatgttggttttattgccaaaattaagaaagtatgtgagtgtgtctgtatgcactgtggtaagctattactggatgaacataatgaattaatgagacaagctctagcaatcaaagacagtaaaaaaaggtttgctgcaatttggactttatgtaaaacaaaaatggtctgcgaaacagatgtcccttctgaagatgatcctactcagctcgtatcaaggggaggttgtggtaatacacagcctacaattcgtaaggatgggttgaaattagttggtagttggaaaaaagatagagccacgggggatgcggatgaaccagaactaagagttttaagtacggaggaaatcttgaatatttttaagcatatctcagtaaaagacttcactagtttgggtttcaacgaagttttttctcgtccagaatggatgattttaacatgccttcctgtcccaccaccaccggtgcgtccatccatttccttcaatgaatctcaaagaggtgaggatgatttaacctttaaacttgctgatattttaaaagctaatattagtttggaaacactagagcataacggtgctccacatcatgctattgaagaagcagagagtttattacaatttcatgttgccacttatatggataatgatattgctggtcaaccacaagctcttcaaaagtccggccgtcccgttaaatctattcgtgctcgtttgaagggtaaagagggtcgtatcagaggtaatttaatgggtaagcgtgtggatttttcggcaagaactgttatttctggtgatcctaatttggaattagaccaagtcggtgttccaaaatctattgccaagactttaacatacccagaagtggtcacaccatataacatagatcgtctgacgcaacttgttaggaatggaccaaatgagcaccccggtgccaaatacgtcattcgtgatagcggagaccgtatagatttaagatacagtaaaagggcaggtgatattcaattacagtatgggtggaaagttgaacgtcatattatggacaatgatccagttttattcaaccgtcaaccttcgttgcacaaaatgtccatgatggcccacagagtaaaagttattccatattctacatttagattgaatttgtccgttacatctccatacaatgccgatttcgacggtgacgaaatgaatcttcacgttcctcagtctgaggaaacaagggcggaactttctcaattatgtgctgttcctctgcaaattgtttcaccacaatctaacaaaccttgtatgggtattgttcaagatactttgtgtggtattcgtaaactgacattaagagatacatttatagaacttgatcaagttttgaatatgctttattgggttccagattgggatggtgttattccgacacctgcaattatcaagcccaaacctttgtggtccggtaaacaaatcttgtctgtggctatcccaaacggtattcatttacaacgttttgatgagggcactactctgctttctccaaaggataatggtatgcttattattgacggtcaaatcatttttggtgtagtagagaaaaaaaccgttggttcctccaatggtggtttaattcatgttgttacgagagaaaagggacctcaagtttgtgctaagttgtttggtaacatacagaaagttgttaacttttggttactacataatgggttttcaacaggtattggtgataccattgcggacggcccaacaatgagggaaattacagagacaattgcagaggctaaaaagaaagttttggatgttacgaaagaagcccaggcaaacttattgactgctaaacatggtatgactctccgtgagtcttttgaggataacgttgttcggttcctaaatgaagcaagagataaggcaggtcgtttagctgaagtcaatttgaaagatttgaacaatgtgaaacaaatggttatggcaggttccaagggttcatttattaatatcgcgcaaatgtcagcttgtgtaggacagcaatctgttgaaggtaaacgtattgcttttgggttcgttgatcgtaccttacctcatttctctaaagatgattactccccagagtctaaaggttttgttgagaactcatatttgagaggtttgaccccacaagaattttttttccatgcaatgggtggtcgtgaaggtcttatcgataccgccgtcaaaacagccgaaacaggttatattcaacgtcgtttagtgaaagctctagaagatatcatggttcattacgataacaccacaagaaactcattgggtaacgttattcagtttatttatggtgaagatggtatggatgctgcgcatattgaaaagcaatcgctagatactattggtggctccgatgcagcttttgaaaagagatacagagttgatttattgaatacagaccatacccttgatccctcactattggaatccggatctgagatacttggcgatttgaaacttcaagttctcctggatgaagaatacaaacaattagtgaaagatcgtaaatttttgagggaagtttttgttgatggtgaagcaaactggccattaccagtcaacataagacgtattattcaaaatgctcaacaaactttccacatagatcatacgaaaccatctgatttaacaatcaaagacatcgttcttggtgtaaaggatttgcaagaaaacttattagtgttgcgtggtaagaatgaaattatacaaaatgcccagcgagatgcagttacattgttctgctgtttattacgttcccgtttggccacacgtagagttctacaagagtacagactaacaaaacaggcattcgattgggtattaagtaatatcgaggcacaattcctccgttctgttgttcaccctggtgaaatggttggtgttctagcagcccaatccattggtgaaccagccacacaaatgacccttaacaccttccattttgctggtgttgcttccaaaaaagttacttctggtgtcccccgtttaaaggaaattttgaatgtggccaaaaacatgaaaaccccttccttgactgtatacttagagcctggtcatgctgccgatcaagaacaagcgaagttgatcagatctgctatcgagcataccactttaaagagtgtcactattgcttcagaaatttactatgatcctgatccacgttccacagttattccagaagatgaagaaattatccaacttcatttctcattattggatgaagaggctgaacaatcttttgaccaacaatcaccttggttattacgtctggaactggatcgtgcagcaatgaatgataaagacttaacaatgggtcaggttggtgaaagaatcaagcaaacattcaaaaatgatttgtttgttatctggtctgaagacaacgatgagaagttgatcatccgttgtcgtgttgttcgtccaaagtcactagatgctgagactgaagcagaagaagatcatatgttgaagaaaattgagaacacaatgttagagaatattacattacgtggtgtagagaacatcgagcgtgttgtcatgatgaaatatgaccgtaaagtaccaagtccaactggtgaatacgttaaggaacctgaatgggtgttggaaacagatggtgttaacttatctgaagttatgactgttcctggtatcgacccaaccagaatctataccaactccttcattgatataatggaagttctaggtattgaagctggtcgtgcagccttgtataaagaagtttacaatgttattgcttctgatggttcgtatgttaactaccgtcatatggctttgttagtcgatgttatgacaacccaaggtggcttaacttctgttactcgtcatggtttcaacagatcaaatacaggtgccttaatgagatgttcatttgaagaaactgtcgaaattttgtttgaagctggtgcttcagccgaattagatgattgtcgtggtgtttcggaaaatgtcattcttggtcaaatggctccaatcggtaccggtgcatttgatgtgatgatcgatgaggagtcactggtaaaatacatgccagaacaaaaaataactgagattgaagacggacaagatggtggcgtcacaccatacagtaacgaaagtggtttggtcaatgcagatcttgacgttaaagatgagctaatgttttcacctctggttgattcgggttcaaatgacgctatggctggaggatttacagcgtacggtggtgctgattatggtgaagccacgtctccatttggtgcttatggtgaagcacctacatctcccggatttggagtctcctcaccaggcttttctccaacttccccaacatactctcctacctctccagcgtactcaccaacatcaccatcgtactcaccaacatcaccatcgtactcgccaacatcaccatcgtactcacctacatcaccatcgtattcaccaacgtcaccatcatattcgccaacgtcaccatcatattcgccaacgtcgccatcgtattctccaacgtcaccatcgtattcgccaacgtcgccttcctactctcccacgtcgccaagctacagccctacgtctccttcttattctcctacatctccatcatactctcctacgtcaccaagttacagcccaacgtcaccaagttacagcccaacgtctccagcctattccccaacatcaccaagttatagtcctacatcgccttcatactctccaacatcaccatcctattccccaacatcaccttcttactctcccacctctccaaactatagccctacttcaccttcttactccccaacatctccaggctacagcccaggatctcctgcatattctccaaagcaagacgaacaaaagcataatgaaaatgaaaattccagatgatatagtatatcatccttacgtatttgacgttattacattatatatagtttctcaaataatatttctagtttatttttgtatcataataaaaacgtatacc

SEQ ID NO: 585 - DNA, 841 bp, Saccharomyces cerevisiae
ggttctctaacgcgatcgtttaaatttcgcgatagatcagggaaacgttataaagattgagtggaaagaacttccattcttcaggctgcttgtattactttgattctttttctagccacacgaataactcgagtattgagcttttttattagagaaaaactgaataatggccgaagaaagtaccgactttagtcaattcgaagaggagagaaacaacgatcagtataaagtttcagccaaaaaaactgttgacgaatacaaaaatctggatgctgaagacgaatccttggcgaaatggaaagagtctttgggtctaagttcagacgtcttgccattggaatttcccggtgacaaaaggaaggtggttgttcaaaaaattcaattactagtcaatacagaaccaaatcctatcacatttgatcttaccaacgaaaagacaatcaaagaactggcatctaaaagatacaaaattaaagaaaattctatttataagttgaagattgtgttcaaagttcaacatgaaattatcacagggttgcgatatgtccagtatatcaaaaaagcgggtattgccgttgacaagatagacgatcatttgggatcgtatgctcctaataccaagaccaaaccattttatgaggtggaactaccggaaagtgaagcacctagtgggtttttagcaagaggtaactacagtgccgtatcaaaattcattgatgatgataaaactaaccacttgactttaaattggggggtcgaaattgtcaaaaaataataagttcttgaaatgcacaatgtagatatggcctgtataaacaagagcatacctttatctacatat

SEQ ID NO: 586 - DNA, 1625 bp, Saccharomyces cerevisiae
taacacatagtagtagaaatagttttccggattacattagttcggcattctttttagcaggtttttgttacaggttcctttcgacgcaccgtttcacagtaaaggaggtaattagtgaatcagacgctgcactttcattgattttgatatacacatactccaattagttttagtgtaaattaaattgccccagtggacacgatatttacaaaaagtgttttattcttcttagaaatacacctgttggactgctcttttttcactcgtcttcccctagttttctttccttaccagtaatttagtaagagtttagtgagttcaggttgaatagagttattatctaattttaaactgttaattttaccggttgtgttttttgaaataaggcaaaagagaaagaaaaaaacaaattattttgcccctatttagttcatagtggaaagagggatataaattatcgcataaaacaataaacaaaaagaaaaatggatacagatttagatgtgcctatgcaagatgctgttaccgaacagctgactcccacagtatctgaagatatggatctcaacaacaattcatcggataataatgcagaagaattctcggttgatgatttaaaacctggttcctcgggcatagcagatcacaaatcttccaaaccactagaactgaataacacaaatataaatcagcttgaccaatggattgagcatttgagtaaatgcgagccactatcagaagacgatgtagcacgactatgtaaaatggcggtggacgtgttgcagttcgaggagaatgttaaaccaattaacgtgcctgttaccatttgtggtgacgtacacggtcaattccatgacttgttagaactttttaagattggtggcccttgtcctgacaccaattaccttttcatgggtgattacgtggatagaggatattattctgttgaaactgtatcttacctagttgccatgaaagtcagatacccacatagaattacgatactgagaggcaatcacgagtctaggcagattacccaagtatacgggttttatgatgaatgtttgagaaagtacggcagtgcaaacgtgtggaaaatgttcacagatcttttcgattattttcctataaccgcattagtagataataaaattttctgtctgcatggaggactttcccccatgatagaaaccatagatcaggtgagagagttgaacagaatacaggaagtgcctcatgaaggtcctatgtgtgaccttctatggtcagaccctgacgatagaggcggatggggaatcagtcccagaggtgcaggcttcacttttggacaagatgtcagtgagcaattcaatcacactaatgatctatcactaatagcaagagctcaccaattggtaatggaaggctatgcttggtctcaccagcaaaatgttgtcaccattttcagtgctcctaattactgctacagatgtggtaatcaagcagctatcatggaagtggacgagaatcataatagacaattcttacagtacgacccatccgtaagaccaggtgaacctagcgtcagcagaaagacgccagattactttttatgagtatgtatacatatatgcatctatatagat

SEQ ID NO: 587 - DNA, 2607 bp, Saccharomyces cerevisiae
actcgataactggctcaactacaagacagatatacaaatcatgggtgaagaacataaaccacttttggacgcctcgggtgtcgaccctcgtgaggaggataaaaccgccaccgccattttaagaagaaagaagaaggacaacatgcttttggtggacgatgctatcaatgatgacaattctgtcattgctattaattctaacaccatggacaaattggaattgttccgtggtgacaccgttctcgttaagggcaagaagagaaaagatactgtcttaattgtgttgatcgatgacgaattagaagacggagcatgcaggataaaccgtgtagttcgtaacaatttacgtattaggctgggtgatttagttacaattcatccttgccccgatatcaaatacgctactagaatttctgtgttaccaattgctgatacgatcgaaggtataactggtaatcttttcgatgtttttttgaagccttattttgtggaagcctacagaccagtgaggaaaggcgaccattttgttgtcagaggcggtatgagacaagtcgaattcaaggttgtggatgtcgaacctgaagaatatgccgtcgttgctcaggatactattattcactgggaaggtgagccaatcaacagggaagatgaagaaaataatatgaatgaggtgggttacgatgatattggtggttgtcgtaagcaaatggctcaaattagggaaatggttgaactaccattgagacatcctcagttgttcaaggctatcggtatcaagccaccaagaggtgttttgatgtatggtccccctggtactggtaaaaccttgatggcaagagctgttgctaatgagaccggtgccttttttttcttaattaatggtccagaagtcatgtcaaaaatggctggtgaatcagagtctaacttaagaaaggcctttgaagaagccgaaaagaacgctccagccatcatttttatcgatgaaatcgattctatagctccaaagagagacaagactaatggtgaagttgagagaagagttgtctctcaattgttaactttaatggatggtatgaaggcaagatctaatgttgttgtcattgctgctaccaatagaccaaattcgattgatcccgctttaagaagatttggtagattcgatcgtgaagtcgacattggtatcccagatgctacaggtagacttgaagttctacgtattcacaccaagaacatgaagttggctgatgatgttgatttggaagcattggctgctgaaacacacggttacgtgggtgctgatattgcctctttgtgttctgaagctgccatgcaacagatccgtgaaaaaatggacttgatagatttagatgaagatgaaattgatgcagaggtgctcgattctttaggagtcaccatggacaacttcagattcgcattgggcaattcaaacccatctgcattgcgtgaaaccgttgttgaaagtgtcaatgttacttgggatgacgttggtggcctagatgaaatcaaggaggaattgaaggaaactgtagaatacccagtcttacatccagaccaatacacaaagtttgggttatcaccatcaaagggtgtgttgttctacggtccaccaggtacaggtaaaactttgttagcaaaagctgtagctactgaggtttctgccaactttatctcagtcaaaggtccagaattattgagtatgtggtatggtgaatcggaatctaacatccgtgatatttttgataaggcaagagcagctgcaccaaccgtcgtttttctagatgaattagactccattgccaaggcaagaggtggttccttgggtgatgctggtggtgcttcggatagagtcgtcaaccaactattaacagaaatggatggtatgaatgctaagaaaaatgtgttcgtgattggtgccaccaataggccagatcaaattgatcctgctattttaagacctggcagattggatcaattaatttatgttccattgccagatgaaaacgctagattatctattctaaatgctcaattaaggaaaacaccactagaaccagggctagagttaactgcgattgccaaggccactcaaggtttctctggtgctgatttactctatattgtgcagagggctgctaaatacgctatcaaggattctatcgaagctcacagacaacacgaagctgaaaaggaagtgaaagtagaaggtgaagacgtggaaatgacagatgagggagcaaaggctgaacaagaaccagaagtagatcctgttccatatattacaaaggagcatttcgcagaagctatgaagaccgctaaacgttctgtttcagatgctgaattgcgtcgttatgaagcatactcacagcaaatgaaagcatctagaggtcaattcagtaatttcaactttaatgacgctccattaggtactacggctacggacaatgctaacagtaataatagtgctccaagtggagcaggtgctgcatttggttctaatgcggaggaagatgatgatttgtatagttagttatatgccaggtatatttttattttaaatcgtaaattcaagtcatttctataaaaaaa

SEQ ID NO: 588 - DNA, 801 bp, Saccharomyces cerevisiae
taagcttgagaagctttaagatatggtgcgaatcgttacagaatattccttgcagaaataatggcgggtccgttctcttctgaagaagttaccgccctactgaagcattgctgtacgatcgtgtaatgtgatgtgtgttcgactggaaagcggagaacattatgaagtaaaaggacaatcagcacgccttccagacttttaagaaacattgatggagccattgatatcggcaccgtacctaacaacaacaaaaatgtctgctcctgctacgcttgatgctgcctgtattttttgcaagattattaaaagcgaaattccatccttcaaattgattgaaacaaagtactcgtatgctttcttggacatccaacctactgctgaaggtcatgctttaatcattcctaagtaccatggtgcgaagttgcatgacatcccggacgaattccttaccgatgctatgccgattgccaagagactggccaaggcaatgaagttggacacttataatgtgttgcagaataatggtaaaattgcgcatcaagaagtcgaccacgtccacttccatttgattcctaagagagatgagaaaagtggtttgattgtagggtggccagcccaagaaacggacttcgataagttgggcaagctacacaaggaattgcttgccaaactagaaggctccgattagagtaatgcatgctatgatttcttttagcgttttcttttcatatttaagtttatacatatgggtgtgtttgcttccattcatatccactctataatgctaacaatcatgttact

SEQ ID NO: 589 - DNA, 641 bp, Saccharomyces cerevisiae
cggtgcctaagtcaataagtccggagcatgaatctatacggttattttttacttctcattattgtgattgctttcattgcattgttgccattgttttctggcatcggtacattcaaactaacaaaaccgaaatcgtctgcaacagcacagtcagcgactggtaagcttggtaagagggaatatttgaaaaaaaaacttgatcataccaatgtattaaagtttgatctgaaggacacggaggaaagccttggccatgacagtgcaagtgcctcttccgcttccagaaaatttgaaatagactcaaagacaggccttaaaagacgtgtaattggacagtacaacaaagatccaaatgatttcgatttcgatattgatgacctaattaacgaagatgaactagatgaacggagagaagaagagaaaaagttgaagaagtacaatggtaagaaaaatgaagcttacgaaggatttgtataataatggaagtgatttttgcaattgtcctacaaaaactttagacattcgtaactagctaaacaattgatttaacgaataacgtagacttttaattattcaatttaattatagttattgttatttacacaattacggatatcgtatttataacttagtttacatct

SEQ ID NO: 590 - DNA, 798 bp, Saccharomyces cerevisiae
atgtctctttcggtcgccgaaaagtcgtacctatacgattcactagcaagcacgccttcaattaggcccgatggaagactacctcatcaattcagacctatagaaatatttactgacttcctaccaagttccaatggatcgtccagaattatagctagtgatggaagtgaatgtatcgtgagcattaagtccaaagttgtggatcatcatgtggagaatgaactacttcaggtcgatgtagatatcgcaggccaaagagatgacgcgctggtagtagagacaatcacttctttactgaacaaggttttgaagtctggtagcggagtagattcctcaaagttgcaattgacaaaaaagtacagcttcaaaatatttgtcgatgttctggtcatttcatcacattcacacccagtttctttaatatcctttgctatttattcagcgttgaactccacatacctaccgaaacttatttcagcttttgacgacttagaggtggaagaacttcctacgtttcatgattacgacatggttaagcttgacattaatccgcctttagtgtttatattggccgttgtaggcaacaatatgctattggaccctgcagccaacgaaagcgaagtggccaataatggcctaatcatttcctggtctaatggtaagattacatcacctatcagatcagtagcattgaatgattcaaacgttaaaagctttaaacctcatttgttgaagcaaggtcttgcaatggtggagaaatacgcccccgacgtagtacgatcactggagaatttataa

SEQ ID NO: 591 - DNA, 670 bp, Saccharomyces cerevisiae
gtaagatctttataaaacataaagcaaatcaaaacataataactactacaagtaacataatgtgctcagcaggcggtatcagaagaccaatccagatcgaagaatttaagacggcgataagcggcatgtccgacatggagttggcacagattaaaacagaaattgagaacagtatcaatcatttgcagaggtctaacgcccgcttgggtaaatacatagctaagttggagggtgctgacgaccgtcttgaagctgacgacagcgacgacttggagaacattgattcgggagacctggcgctgtacaaggactctgtcagggagaacgaaattgtgctaaacaattacaatgagagagtggacgcattggagcaagaaacggtatatagaaagacgggccatggcaagagtaagcacgaggtagaggcaaaggacaacaccaacaagggccctgacgttgacatggacaattcaaatgtggacgtcgtgacaccaaacagcatattcatttaagagacgggatttagttttactgcgcatcattttcacgtcatactctttgtctctctgttctatctcttcgtataaatatttcaataactccatttgtctattctatctacccgttctatccttactactagatatcttaaagaaataataaaataagt

SEQ ID NO: 592 - DNA, 1583 bp, Saccharomyces cerevisiae
caagaacgctgcaaagaaacgcagatataaaggagaacaccagatcgaactgcaactatgactgacacaaaacagctattcattgaagccggacaaagtcaacttttccacaattgggaaagcttgtctcgcaaagaccaagaagaattgctttcaaacctggagcaaatatcttccaagaggtcccctgcaaaactactggaagactgtcaaaatgctattaaattctcactagctaactcttctaaggatactggcgtcgaaatttcaccattgccccctacttcgtacgagtcgcttattggcaacagtaagaaagaaaatgaatactggcgtttaggccttgaagctattggcaagggtgaagtcgcagtgattttaatggctggcggacaaggtacgcggttaggatcctctcaaccaaagggctgttacgacattggattgccttctaagaaatctctttttcaaattcaagctgaaaagttgatcaggttgcaagatatggtaaaggacaaaaaggtagaaattccttggtatattatgacatcaggccccactagagcggctactgaggcatactttcaagaacacaattattttggcttgaataaagaacaaattacgttcttcaaccagggaaccctgcctgcctttgatttaaccgggaagcatttcctaatgaaagacccagtaaacctatctcaatcaccagatggaaatggtggactctaccgtgccatcaaggaaaacaagttgaacgaagactttgataggagaggaatcaagcatgtttacatgtactgtgtcgataatgtcctatctaaaatcgcagaccctgtatttattggttttgccatcaagcatggcttcgaactggccaccaaagccgttagaaagagagatgcgcatgaatcagttgggttaattgctactaaaaacgagaaaccatgtgtcatagaatattctgaaatttccaatgaattggctgaagcaaaggataaagatggcttattaaaactacgcgcaggcaacattgtaaatcattattacctagtggatttactaaaacgtgatttggatcagtggtgtgagaatatgccatatcacattgcgaagaagaaaattccagcttatgatagtgttaccggcaagtacactaagcctaccgaaccaaacggtataaaattagagcaattcatatttgatgtctttgacactgtaccactgaacaagtttgggtgcttagaagtagatagatgcaaagaattttcacctttaaaaaacggtcctggttctaagaacgataatcctgagaccagcagactagcatatttgaaactaggaacctcgtggttggaagatgcaggcgctattgtaaaagatggggtactagtcgaagtttccagcaaattgagttatgcaggtgaaaatctatcccagttcaaaggtaaagtctttgacagaagtggtatagtattagaaaaataactgtttgagctacttatgaagcacttttaacatgtaattgaaaagtactcgtaattgtgattcaatatatataataaaatatttcgtactct

SEQ ID NO: 593 - DNA, 1147 bp, Saccharomyces cerevisiae
acaagaagatcatcacattgtaattatggatttaaccgtggaacctaatttgcactctttaattacctctaccactcataagtggattttcgttggtggtaaaggtggtgttggtaagactacttcatcatgttccattgctatccaaatggctttgagtcaaccaaacaaacagttcctactgatctctactgatcctgcccataacttaagtgatgcattcggtgagaaatttggtaaagacgccagaaaggtgacaggcatgaataatctatcatgtatggaaatcgatccatccgctgctttgaaggatatgaacgacatggcagtttcacgcgctaacaataacggaagtgacggtcaaggtgacgatctaggaagcttgcttcaaggtggtgctcttgctgatttgaccggttccatccctggtatcgacgaagctttatccttcatggaagtcatgaagcacattaaaaggcaagaacagggcgaaggtgaaaccttcgatactgttatttttgacactgctccaactggccacacattaagatttctacaactaccaaatactttatccaagcttttggaaaagttcggtgaaattaccaacaaattgggcccaatgctaaactcttttatgggcgcaggtaatgtcgatatctctggaaaattgaacgagttaaaggctaatgtcgagaccatcagacaacaattcacggatcctgacctaacgacttttgtttgcgtttgtatcagtgaattcttatccttatatgaaactgaaagactaattcaggaattgatttcctacgatatggacgttaattccatcattgtcaaccaattattatttgctgaaaacgatcaagagcacaactgtaagagatgtcaggcaagatggaagatgcaaaagaagtacttggaccaaatcgacgaattgtacgaagatttccatgtcgttaaaatgccattatgtgctggagaaatcagaggcttaaataacttaacaaagttctcacagttcctaaacaaagaatataaccctattactgatggcaaagtcatttatgagttagaagataaggaatagaagcccctgaataccataaatagatacatacgacatataaccatagaaaaaatagta

SEQ ID NO: 594 - DNA, 1387 bp, Saccharomyces cerevisiae
gaaagaggacaattggtgattaatctataaacgaggaacttcatgtctctgccaggttcgaaattagaagaggccaggagactggttaatgaaaaacagtataatgaggcagaacaagtctatttgagcctgctggataaagacagctcacagagcagcgccgctgccggtgccagtgtggatgacaagcgtagaaatgaacaggagacaagcatattggaattaggacagttatacgtgactatgggtgcaaaggacaaattgcgcgagtttattcctcattctacggagtatatgatgcaatttgccaaatccaaaacggtaaaggtattgaaaacgttgattgaaaaattcgagcaagtgccggactccttggacgatcagatctttgtgtgcgagaaaagcatcgaatttgccaagagagaaaaaagggtgtttttgaagcattcactctcgatcaaattggccaccttacattatcaaaagaaacagtacaaggactcattagcattgattaacgatcttttgagggagttcaaaaagctggacgacaagccctctttggttgatgtacatctattggaaagtaaagtttaccataaactgaggaatctagccaagtccaaggcctcgttgactgcagcaaggacggccgctaactccatatactgtcctacacaaacagttgcggagctggacttgatgagtggtatcctgcactgtgaagataaagactacaaaactgcattttcgtatttcttcgaaagttttgaaagctaccacaatttgactacgcataattcctacgaaaaggcatgtcaagtgttgaaatacatgctattgtctaagatcatgctgaaccttattgatgacgtaaaaaacatcctaaacgcaaaatacacaaaggaaacgtaccagtcccgaggcattgatgccatgaaagctgtcgctgaggcttataacaacagatcgcttttagacttcaacacggcgctaaagcaatacgagaaggaactaatgggcgatgaactaacaagatcccatttcaatgcattatacgacacgttattagagtccaatttgtgtaagattattgagccatttgaatgtgtggaaatatcccacatttccaaaataatcggtctggatactcaacaagttgaaggaaagctctcccaaatgatactagataagatattctacggtgttctggatcaaggtaatggttggctttacgtttacgaaactccgaatcaggatgccacgtacgactctgcattggaattagtcgggcaactaaataaagtcgtcgatcaactatttgaaaaggcaagtgtcttgtattaggtttacatgtatatatatgtatgtatactcacaagtacca

SEQ ID NO: 595 - DNA, 1327 bp, Saccharomyces cerevisiae
aagcgtatgcgacagagagtaggaaggtccatagctagggctaaatttataaatactgccttattaggaagaaagagaccagttatggaaagagtcgtcgatatagcgcatgtagattcaagtaaagcaatccaaccattgatgaaggaactagaaaccgacactacagaagcacgatacaaagtactacaaagtgtattagagatatacgatgatgaaaagaatatagaacctgctctcacgaaagagtttcacaaaatgtacttggatgtcgcttttgagatatcgttacctccacaaatgacagcactagatgcttcacaaccgtggatgctatattggattgctaactcattgaaggtaatggacagagactggctttcagatgacaccaaaagaaaaattgtagataagctctttactattagtccttcaggaggaccctttggtggaggtcctggccaattatctcatttggccagcacttatgctgcaattaatgctctctccctttgcgataacatagatggatgctgggacagaattgatcgaaaaggaatttaccaatggctgatatcgttgaaagagcctaatggaggattcaagacctgtttagaagtcggagaagtggatacaagaggtatatactgtgccttgagcatagcaaccttattaaatattcttacagaagagcttacagaaggtgtgttaaactatttgaaaaattgtcaaaattatgaaggtggattcggcagttgtcctcacgtagatgaggcacacggaggctatactttctgtgctacagctagtctagcaattttaaggtccatggaccaaataaatgttgaaaagcttttagaatggtctagtgctcgtcaattgcaagaagaacgaggattttgcggaaggagcaacaaacttgttgacggttgctatagtttttgggttggaggttcggctgccattcttgaagcttttggatatggccaatgcttcaacaaacatgctcttcgggactacatattgtactgttgccaagaaaaagagcaacctggtttgagagataaaccaggggcccactcagacttttaccatacaaattattgcctattaggactggctgttgcggaaagttcatacagttgcactcctaatgattctccacataatattaagtgtactccagaccgcctaattggatcatcgaaacttactgatgtcaaccctgtctatggtttaccaatagaaaatgtaagaaaaattatccactactttaaatccaatttatcttctccaagttaaccacatactattatatatatgtatt

SEQ ID NO: 596 - DNA, 1877 bp, Saccharomyces cerevisiae
tgaaagaagaaaggtttgtgaatatcacacacatacctctgcatagtttatttcccgataaggtagacatatcgtttccctatctatttaagttttttattcgctctctttttttttttttctctgtaacctgaaaacaaggaacggcaaattaaaatgtttggaatacgttcaggcaataataacggtggatttactaacctcacgtcgcaagcaccacagacaacccagatgtttcaatcgcaatcacagttgcagccacaaccgcaaccgcaaccacaacaacagcagcaacacttgcaattcaatggatcatccgatgcaagttctttacgatttggaaactcactttccaatactgtaaacgccaataactatagtagtaatatcggtaacaatagcatcaacaacaacaacattaaaaacggcacaaataacataagccaacatggccaagggaataatcctagctgggtgaataatcctaaaaagagattcactcctcatacggtgataagaaggaagacaacaaagcaaaattcttcttctgacatcaaccagaatgatgattcatcttctatgaacgctactatgagaaatttcagtaagcaaaatcaagattccaagcataatgaaagaaataagtctgcggcaaataatgacatcaattctctgttgtcaaattttaacgatattccaccctccgttactttacaggattggcaacgcgaggatgaattcggttctattccatcattaacaactcagtttgttaccgacaaatacacggcgaagaaaacaaataggtcagcttatgattccaaaaatactccaaatgtttttgataaagactcttatgttagaatagcaaacattgaacagaaccatttagataataattacaacaccgccgaaacaaacaataaagtccatgaaacatcttccaagtcttctagtttgagcgcaattatcgtatttggctatcctgaatcaatttccaatgaattgattgaacacttctcccatttcggtcatattatggaagactttcaagtattgcgattgggtcgcgggattaaccccaacaccttcagaatattccataatcatgatacaggctgtgatgaaaacgattctactgttaataaatctattactttaaaaggcagaaataatgagtcgaataacaaaaaatatccaatatttactggtgaaagttgggtcaaactcacttataattctccatcttctgctttgagagcactgcaggaaaatggaaccatatttcgcggttctttgattggttgcatcccatattcaaaaaatgcggtggagcaattagctggctgcaaaattgataatgtcgacgacattggagaattcaacgtttctatgtatcaaaattcctccacatcgtcgacatctaatacaccatccccaccaaacgtaataataactgatggcactcttctgagggaagacgataatactcctgccggtcatgctggtaatccaacaaatatttcaagtccaatagtagcaaattctccgaataagcggctggatgtaatagatggcaaattgccattcatgcaaaatgcaggaccgaattcgaatattcctaatctgttgcgaaacctagaatcgaaaatgcgtcagcaagaagcgaaatacagaaataatgaacctgctggttttacgcacaaactgagtaattggttatttggttggaatgacctataacagaaatcgtccagctaattattcatgaacatttacaatacttcatacatttattattttgataacttttcaaacagcattgttttacttttgtttattgatttttacgtaactgtatatacttagacataatt

SEQ ID NO: 597 - DNA, 786 bp, Saccharomyces cerevisiae
atgtcaactatgtcaacgcctgccgcagaacaacgcaaactcgtcgaacagctgatgggcagggacttcagtttccgccacaacaggtattcgcatcaaaaaagagacctcggactacacgatcccaagatctgcaagtcataccttgttggcgagtgcccctacgacctgtttcagggcaccaagcagagcctgggaaaatgcccgcagatgcatcttaccaagcataaaattcagtacgagagagaggtcaagcagggcaaaacgtttcccgaattcgaaagagaatatctggccattctatctcggtttgttaatgagtgtaatggccagatatccgtagcactacaaaatctaaaacacaccgctgaggaacgaatgaagattcagcaggttaccgaagaactagatgtcttggacgtgcggataggcctaatgggacaagagattgattctttaattcgtgcagatgaagtcagtatgggtatgctacagtcagtcaaattacaagaactgattagtaaaaggaaagaagttgcaaaacgtgtacgaaacattacagaaaacgtgggccagagcgcccagcaaaagttacaggtttgcgaggtgtgtggggcatacctatcgcgtttagatacagacagaaggcttgctgaccacttcttggggaagattcatctgggatatgtcaagatgagagaggattatgatcggctaatgaagaataaccggacaactaacgccagcaagacagctactacactacccggaagacgctttgtgtag

SEQ ID NO: 598 - DNA, 490 bp, Saccharomyces cerevisiae
ccaacaagatcaatactacacagagcaacaaattacgtcgcaagacgatacatctttaacaatggctagaggtaatcaaagagacttggcaagacaaaaaaacttgaaaaaacaaaaggacatggctaagaaccagaaaaagagtggtgatcctaagaaaagaatggagtcagacgccgaaatcttgagacaaaagcaggccgccgcagatgctagaagagaggctgaaaagcttgagaagttaaaagccgaaaagacgagaagataagcagacactttatacctgtccttttattggaatgaatagtgccagtagtttcttacgtataaagtactttataaacagctgttatgttttttgtcctttttagttaccttttttttattttttttttattttttttttttctttagttaattagaacgctttcctatattgtgcttctttttctttttcttattgttatttagtatatagcgtgtacagagt

SEQ ID NO: 599 - DNA, 550 bp, Saccharomyces cerevisiae
gcaagagaataagcaacaagatgtctgccgtcccaagtgtccaaacttttggtaagaagaaatcagctaccgctgttgcccacgtcaaggccggtaagggtttgattaaggtcaacggttctccaatcactttggttgaaccagaaatcctaagattcaaggtctacgaaccattattgttggttggtttggacaagttctccaacatcgatatcagagttagagtcactggtggtggtcatgtttctcaagtctacgccatcagacaagctattgctaagggtttagtcgcttaccaccaaaagtacgttgacgaacaatccaagaacgaattgaagaaggccttcacctcttacgacagaactttgttgatcgctgattctagaagaccagaaccaaagaaattcggtggtaagggtgctcgttctagattccaaaaatcttaccgttaagaaaatttcaagattttttccagaaatctcttcacttttctttgcacatctattgtattaaaaaactttttacttacatatactgtatatcttcctat

SEQ ID NO: 600 - DNA, 1145 bp, Saccharomyces cerevisiae
gggaaaacacttgtcagtgcaaaagaaaataaaaagagacaaacaatcataaacatggtcaaagtcgcaattcttggcgcttctggtggcgtgggacaaccgctatcattactgctaaaattaagcccttacgtttccgagctggcgttgtacgatatccgagctgcggaaggcattggtaaggatttatctcacatcaacaccaactcaagttgtgtcggttatgataaggatagtattgagaacaccttgtcaaatgctcaggtggtgctaataccggctggtgttcccagaaagcccggtttaactagagatgatttgttcaagatgaacgccggtattgtcaaaagcctggtaaccgctgttggaaagttcgcaccaaatgcgaggattttagtcatttcaaaccctgtaaacagtttggtccctattgctgtggaaactttgaagaaaatgggtaagttcaaacctggaaacgttatgggtgtgacgaaccttgacctggtacgtgcagaaacctttttggtagattatttgatgctaaaaaaccccaaaattggacaagaacaagacaaaactacaatgcacagaaaggtcactgttattgggggtcattcaggggaaaccattatcccaataatcaccgacaaatcgctggtatttcaacttgataagcagtacgagcacttcattcatagggtccagttcggaggtgatgaaattgtcaaagctaaacagggcgccggttccgccacgttgtccatggcgttcgcgggggccaagtttgctgaagaagttttgaggagcttccataatgagaaaccagaaacggagtcactttccgcattcgtttatttaccaggcttaaaaaacggtaagaaagcgcagcaattagttggcgacaactctattgagtatttttccttgccaattgttttgagaaatggtagcgtagtatccatcgataccagtgttctggaaaaactgtctccgagagaggaacaactcgttaatactgcggtcaaagagctacgcaagaatattgaaaaaggcaagagtttcatcctagactcttccaagctatgagctacttcaatttttatatttttcttaactctatactcctttgtatcttgactcatatc

SEQ ID NO: 601 - DNA, 1178 bp, Saccharomyces cerevisiae
aagtgctatagaattccatgacagcgttttgacaaataacggtattttagtacgaaggtaagggaaaatttactcgcagttttttttttgagagaagtaacaatacaatataagataaaaatgtcggtaagcgaacaagatcctaatagggcgtacagagagactcaatcccagatatataaactacaggaaacactactaaattcggcgagaacaaaaaataagcaagaggagggacaagaaagcaacacccattcttttccagagcagtatatgcattaccaaaacggcagaaattcggcctacgacctgcctaatgtaagttcacagtcggttcttgctttcactgagaaacactatccaaacaagttaaaaaacttgggtacactttattacaatcgtttcaaagaagggtcttttgatgaagactccacaagttactcagacaggcacagttttccatacaacctttatgacaacactcttccaccaccgttccttccagctatcggtattcaaaatatcaataatattgcaacgctaaaaataacatatgaagatattcaggcaagtttcaataatatagaatctcctagaaagagaaataatgagatatggggatgtgatatctattctgatgactcagacccaatactagttttaagacattgcgggttcaaaattggagcgccttctggtggctcatttcacaaattgagaagaacccctgtaaatgtaactaatcaagataatgttacaggtaaccttcccctactggaaggcacaccttttgatctagaggtggagttgttgtttttgcctactctacaaaagtatcctagcgtaaaaagatttgatataacatcgcgggaatggggatcggaagccaccgttatacacgatggactgagttacggtatctatagtattgtcattaagcaaagactagatagagataaacctcatgaaccaaacgggtatattaaaaatttaaaatggacctaaggaaagacataatattggtcgtccttctttcccttccaaccttagttggcgccatgtgtgtatttaatttaattcaaaatatcattctgctgcgctacttctgtattattgctttgaggaatatacgatgcgttgtactatataacaaaagcttcactttataagtttctata

SEQ ID NO: 602 - DNA, 732 bp, Saccharomyces cerevisiae
acgtcacattatactcataaccatagaattcacagaattgaatcatgtcattatattacaccttggtttttgccattctagtggtggagattttcatgttctccattctagccctaccaatcccttctagataccgtaggcctctcaccttactgttattaaagccgttcaaatcctccacagtgcaagttgcgatcaagtgtgtacttgggttcattcttttgcttttcatcgattgtatcaacagagtgtacagcatcgacaaagagctgcagttaagtagcgcctctcaaaataatggcgctataatcgctcaagatagaattgaggttctttctaggaaattctttgcccaaaggaatatgtatttgacaggtataactttgtttttgacctttgtcgtcgttaggacttttgggctagtcatagaacttttaaccatgaaagacatatacagagcatcgcctccagtagcctccagcgatgtcaagaagaacgactctgttactgccgaagctgctgctcaatccggcgcttccaaggatgaccacggcgatgagaaaaattttgaactattgaagaaaattcaggacatcgatgacgaaattgcacgtttaaaggagaagtcggaatcgttgcaagaagaaataaattagtttgacgttttattccttttcttctgcacagaagtgtgtatatatatatttatatatagtcgatgtgcaaaagcct

SEQ ID NO: 603 - DNA, 449 bp, Saccharomyces cerevisiae
gcaagcaagatatttgcaaactactaactacaagcgacttacacagacatgactattgctccaattactggtacgatcaagagaagagtcatcatggacatcgtcctcgggttctccctcgggggtgtcatggcctcttactggtggtggggattccacatggataagattaacaagagagagaagttctacgcagagctagctgagaggaaaaagcaagagaactgaccgaacctgaccactattgtttttcgcattatattcttattcctatttatttatcttttattttttttctgtgctggcctcgattgattacttttgcaagagtttgtagggaaggaaaacagacaagtcattcttttctttctttttgacctttatcataattttctatttgtataatttgaaaaaatagttttacatatttatgtagtgtcaaactaaaa

SEQ ID NO: 604 - DNA, 2144 bp, Saccharomyces cerevisiae
tcgtagcaacgcccccattattcttactggattccaagtactttcgatcagattttcgagtttgtacaaggacgcagaaatcgactttttagggcagaaaagaatgggcagatcaaagaaaagatcaagagcatcttcgtctcgattaaatccactacgcaaagctgggtcaaatgacaataataaagataccaacgtcgttaataaaaaactccagccgctattgcagaatttgtcaagtgtggtgcctaatgatagaagtattgctttgagttccatcagtgttctttgtgaggatgcacatatgagacaacttttactgaaagagaaattagttcctatcattttgaataaattgctgaacgattctaattcggacatagttgtggagtcgttcggcttattaaggaacttgtctttggaagaaggttatgatgtgtcaatctacctttggagatctgatatatggacaagtataacaagtaattttggcaggattgttgaatcgttatccgctttgcaagcagcagaacagcaaccgcagctaaaacctgcaggaaaatccaaaatagaatctaaaaggttgttattcgattttgccgataacttactgtcgttagtggtggctctgtctaatggatccgacgatattcttaatgagatattaacggaaagtaaaataaatgaaatttttcaggtcatttcacagctattaaaatatggtgtcgagaaactgccaattaatctgttcaataccactcttgatctcatttatgatttgagttccgaatcatttgaatttattgatcatgtttccaacaatgaacttctatcacagttcttaaatgggctatctccggctttacatccacaagctaatgaattaacaaaagttctaattgaaggtatccattgccaattccttgacatgaaaataacttatgatcaatgtaacaaaatgatccactctgtatgtcattccattaataacattgatccagtacagttagttaatgacattaataaccctgtagaaattggacctgctactagtaaagatgaaagcagtaaggttataactaagatcaaggattacaatgcgaaacgtaacgaatccatgataaaattgcaaagcattgaaatagcaattgatcttatcaccgcaatcattgagatagttgcatccaaatatgaatcaccagaatcacaggaagtagcaattccagaggagctaatcaataccttaacaaatttcttacctcacgttttcatgattttgaaagataccttcacctcgcgaatattgatcggatggaacaatctgatctggctctttgtgtctctatctctaacagagctctctggagagttgttaaccaccttatggagttatgttacacagttggacagccaagatgatttgagtattaaaataggaagaatgggctgtatttgggcgcttctgaaactcatctttcctgatggagcgtttgaaagtgagaatcgagcattgatcaatgtccaaatgctgaacaattcaggattcgctaggggaattattgaagagttccaaaataataatgaccttgagttacaacaaaaatgtattaatgtactaagcacatatgctatgattcagggacaaattgatgcaaataaggagattgggcagttcttcatacaaactttaacacagttgaatgttcgccctgaaattttgatagaaatgacaaattcgcttttccaaatttacggggatgcctcttacgactataatgaaccaatatttgtaaggggtggatttttatctattctaaaagaccaagttgtaccaaatttgaggcagcaattcaaaatggttgataaaaacaaaaatcccgaactaaaagaaagatgccatgattgctttactacgttggatagtttcattcactacaaaatgaatgaaaattctactaaccaatagatttattaaagtgtatatagttgccatacttatagaaaatggtacaaaaaatatctttctatttacttagcataagaaacaaagagcaaaaaattatttttgagaatttgtaaataatgttattttgctctatttttgttacacaacgacattagttaaataaagtacaaaaggagga

SEQ ID NO: 605 - DNA, 760 bp, Saccharomyces cerevisiae
ctttgaaagaaactatagctaaatgtatgtggaaacgcggattgaagagacaagggacgtgtatgcagaatgaaggaacagcaggaaagtatctgcgctgatttggatttgtaactaaaatttacaactaaaagaattgaaaattcgaggaaaatatctgtggctagcagtaggggggagcctttctggtggccccatggtggaataagacgatgtgtttattgaatgtagcaacaagcatcaaacatcaacaaagcttcaaattatgtcaaatacaatgagccatagcataagcttatatttatttccttttaacttcgatagtcgaaaaattctattgtacacgtccatggaactcctggaaaacataaaaactgcaaaaattataatactaacatttttctattcaattttgaaaacttattggttatagaatatatacaaaatggctcacgaaaacgtttggttctcccacccaagaagattcggtaaaggttcccgtcaatgtcgtgtctgctcctcccacactggtttggtcagaaagtacgacttaaacatctgtcgtcaatgtttcagagaaaaggctaacgacattggtttccacaagtacagataagtcaagagcgattgtaacatcgtaatcattaaccttttttgagttactttgattacttctttccttttctttccacttcttttgtataagttatcataattatttttggtattactatattatgtttatcattaaatattggcg

SEQ ID NO: 606 - DNA, 1458 bp, Saccharomyces cerevisiae
tgactttgataacgttcatcaagtgtgcaaactactttacattcgctaactcttttcttctgtccaaatattttgttgactatacaaacaaaatattatcagcacaagacaagctacaacttcaacaaataaaacatatataattgaaaaatgaaaggtttaattttagtcggtggttacggtaccagattgagacctttaactttgaccgttccaaagccactggttgaattcggtaatagaccaatgattttacaccaaatcgaggctttagccaacgctggtgttactgacatcgttcttgctgttaattacagaccagaagtcatggtggaaactttgaagaagtacgaaaaggaatatggtgttaacatcactttctctgtagaaactgaaccattaggtactgcaggtccattgaaattggctgaagatgttttgaagaaggacaactctccatttttcgtcctaaactccgacgtcatttgcgaatatccattcaaggaattggctgacttccacaaagctcacggtggtaaaggtaccattgttgctaccaaggtcgacgaaccttctaaatacggtgtcattgtccatgatatagctactccaaacttgattgacagatttgttgaaaagccaaaggaatttgttggtaacagaattaacgccggtttgtacattttaaacccagaagtcattgacttgattgaaatgaagccaacttcaattgaaaaggaaactttcccaatcttggtcgaagaaaaacaactatattccttcgatttggaaggtttctggatggatgttggtcaaccaaaggacttcttgtctggtaccgttctttacttgaactctttggccaagagacaaccaaaaaaattggctacaggtgccaacattgttggtaatgccttgatcgacccaaccgctaagatttcctccactgctaagattggcccagacgtggttatcggtcctaatgtcaccatcggtgatggtgttagaatcaccagatctgttgttttgtgcaactccaccatcaagaaccactccttggtcaaatctaccatcgtaggctggaactctaccgttggtcaatggtgtcgtttggaaggtgtcactgtcttgggtgacgacgttgaagttaaggacgaaatctacatcaacggtggtaaagtcttacctcataagtctatctccgataatgttccaaaggaagctattattatgtgagttaggaaaacgaactgtaatgaatataatctatatcactcatctgtttttgttaattttattttagccaatatcattataaaaagaggaaaacatgcacagaaaaagcactgcttactgttatgtcttagtttgtaattgaaaatgaaaaataaaaaaaaaaaagaaaataaagaaaaaaaggttgatccttatgtaactttttatttacgtagaagttaa

SEQ ID NO: 607 - DNA, 1618 bp, Saccharomyces cerevisiae
gactagtttcctttcatatcattttatagcaataaccattttccaagtgcaaatcatgcctctatcaaaggtggagcactacctttcataccatacgcgcttactcttaccccatgttttgtctcttcagtcatcacatcgtgttgcatacatcttttcgctattatctgcggtgtcaactggcttcattactttgatatctctttactctcaaccgtggcagaaacatttaaattattcctcatggcaaatcaacaccatcgctagtatgactaatttggggatgtacttgacgccaccaatcttggggatgatcgctgattctcatggccccattactttaagtcttttagccatcatagggttcatacctagctattcatatctggcttacgtttttaatcatccggagttatctctcggaggaaatggtgactcatcattcaatctatccatcatttgtttcgttttcataggtatatcaacaagcgctttatactttagcgctttactgacatgcactaagctatatcctcatacaaaactactatccattagcttaccaacgacatgttatggtatttcttctgtagtcggttctcaactgctaagaatcaaatggttctggtcctctaacgcaagttcttcctcgtccaatagtgacttaaacctgggaagagtattccaaacatttgccctcgtttatgtcgttattgggctacttgcatggatagccaccagcgtggtatcacttttgcattttaatgaagagcaagacaaccaaaaacggctggatgatcaaactgatgtggaacaatcaccgctgttagaacgaagtaatcatgttcaagaaaagtttacgcagacgatgctaaggatctttagtgatcctgtgacatatatcctagcggtatcaattttgttatcacttgggcccctcgagatgtttattgccaatatgggatcactgactaacctgctagtccaattagatgcgccaaccttatctacaaagttgttatccacatacgcgctatcttccacttttacgagattgctcacaggcatagtggcagacttcttcgccaagaaaaaaatatcaattaaatggatcctgttgactttcctttcattaggggtatgtgcacaactgtttttattgaaaatgacctcttcagcgtcaccctgggggctagtacctacaggatcattggttggaattgtatacggtggacttttcactgtttatccgacgctggtcctgttagtatggggcgaacgctcattcgggactgtttacggtagcttactaattgcacctgctataggttctatgatattttgcatgttgtatgccaaattttacgattctcgctgtatgagtggcggaggagatctgcgaaatccgtcctgtatttcggctgtctacaagtacagcagtatcgcattcgttgtatccgctgttctttcagctgtagtattttggaaattaaaaagtagaaaactcagaatttaaacaaaaaagaaactgctacatttattttttttaaaattcatagcttatataaatgacaccaataaattgcacttatttcttttatgctatgctattgttttt

SEQ ID NO: 608 - DNA, 898 bp, Saccharomyces cerevisiae
aacaacaaataatacgatcttgtgcatattttttccctttttttttttaattctttttttctgaaatttttcatttgttcactgtttaatatctatccatttttgtttccgaattttcattaactttattacttatttacgatacaattttccctttaatctagtacgaaatgacaacaacctcaacaaccagtgtagatggcagaacctcctcgactttgaaggctactttatctgcttcaggtccaaattcaaatggtccaacgcccgctgtgcttcctcagaagccaaaattaacaggttgggcgcaggcagctgccaaagcccttccaaggcaacagcaacagcaacagcaggcacgaaaagatgattccgtggctgtacaacctgctaatacgaagactaaaaccatcgcatctaccgcgccgcctgctaatataaagggtagttccaccgccaatggatcatccacaaataagaaatttaaaagagcgaataaacaaccttacaatagagaagaagttagatcgtatatgcacaaattatttcagagctataccgctggtgaaaaaagtcattcaatgaaaacttataagcaagtactatcagaaacggcaagtggcagagtttcaacagccactgactggggtactgtatcaagcagtaaaaataagaataaaaaatacggctgtttgtccgatattgctaaagttttaagaaaccaatgagaatatcgaagcatcacgtttcataacgcaaaaaggagtcaaacaaaaaatgaagtatgaagtcaagaaaacgaagaaaagaggaaaatagaagaaatgaaaatattattttacaagcgtaaataaaaattttataattcataatgtcgaaaaatgtatactgtgttaag

SEQ ID NO: 609 - DNA, 1011 bp, Saccharomyces cerevisiae
gtttccctccgtcagtgaattcgagcaaaaaaataatgagtgtgataggtaggttcttgtattacttgaggtccgtgttggtcgtactggcgcttgcaggctgtggcttttacggtgtaatcgcctctatcctttgcacgttaatcggtaagcaacatttggctcagtggattactgcgcgttgtttttaccatgtcatgaaattgatgcttggccttgacgtcaaggtcgttggcgaggagaatttggccaagaagccatatattatgattgccaatcaccaatccaccttggatatcttcatgttaggtaggattttcccccctggttgcacagttactgccaagaagtctttgaaatacgtcccctttctgggttggttcatggctttgagtggtacatatttcttagacagatctaaaaggcaagaagccattgacaccttgaataaaggtttagaaaatgttaagaaaaacaagcgtgctctatgggtttttcctgagggtaccaggtcttacacgagtgagctgacaatgttgcctttcaagaagggtgctttccatttggcacaacagggtaagatccccattgttccagtggttgtttccaataccagtactttagtaagtcctaaatatggggtcttcaacagaggctgtatgattgttagaattttaaaacctatttcaaccgagaacttaacaaaggacaaaattggtgaatttgctgaaaaagttagagatcaaatggttgacactttgaaggagattggctactctcccgccatcaacgatacaaccctcccaccacaagctattgagtatgccgctcttcaacatgacaagaaagtgaacaagaaaatcaagaatgagcctgtgccttctgtcagcattagcaacgatgtcaatacccataacgaaggttcatctgtaaaaaagatgcattaagccaccaccacatttttagagtagtatatagacccaaaaactgtaattatctttttaaaaaagt

SEQ ID NO: 610 - DNA, 1090 bp, Saccharomyces cerevisiae
ctaaggatccgtctatagaaagaacctcgaaaaatcttcgaaagattttgttgactgagagtggaaaaaactgatattactttctcggtatagagggcaacatttgcaaaaagtaataaacaaataggggagcacaatatgcagttgagcaaggctgctgagatgtgttatgagataacaaactcttacttacacatagaccagaaatctcagataatagcaagtacacaagaagcgatacggttgacaagaaaatacttactaagtgaaatttttgtacgttggagtccactgaatggggaaatatcattctcgtacaacggaggaaaagattgccaggtattactactgttatatctgagttgcttatgggaatatttcttcattaaggctcaaaattcccaattcgatttcgagtttcaaagcttccccatgcaaagacttccaactgttttcattgatcaagaagaaactttccctacattagagaattttgtactggaaacctcagagcgatattgcctttccttatacgaatcacaaaggcaatctggtgcatcggtcaatatggcagacgcatttagagattttataaagatataccctgagaccgaagctatagtgataggtattagacacacagacccatttggtgaagcattaaagcctattcaaagaacagattctaactggcctgattttatgaggttgcaacctctcttacactgggacttaaccaatatatggagtttcttactgtattctaatgagccaatttgtggactatatggtaaaggtttcacatcaatcggcggaattaacaactcattgcctaacccacacttgagaaaggactccaataatccagccttgcattttgaatgggaaatcattcatgcatttggcaaggacgcagaaggcgaacgtagttccgctataaacacgtcacctatttccgtggtggataaggaaagattcagcaaataccatgacaattactatcctggctggtatttggttgatgacactttagagagagcaggcaggatcaagaattaagtacggtttaacggaggaaagaaaataaaat

SEQ ID NO: 611 - DNA, 2680 bp, Saccharomyces cerevisiae
tgaggaaggcgattgaccctaacgaagtatgtctaggaaaagaagtactaagcccaagccagcagctaaaatagctttgaaaaaagaaaatgaccagttcctcgaggcattgaaactatacgaagggaagcaatacaaaaaatctctcaagctgctagacgcaattttgaaaaaagacggtagtcacgttgattccttggctttaaagggtcttgatttatattctgtaggtgagaaagatgacgctgcttcctacgtggctaatgccatcagaaaaattgaaggcgcttcagcatcaccaatctgctgtcatgtattaggtatctacatgagaaacaccaaagagtacaaagaatctattaaatggttcacggcagctttgaacaatgggtccactaacaagcaaatatatagagacttagcaactttgcaatcacaaattggcgatttcaaaaatgctttagtgtccaggaaaaaatattgggaagcattccttggttaccgtgccaactggacatcattggctgtggcacaagatgtgaacggtgagaggcaacaagctattaacactttatctcagtttgaaaaactcgctgagggaaaaatatctgattccgagaaatatgaacacagcgagtgtttaatgtacaaaaacgacattatgtataaagctgccagtgataaccaagacaagttacaaaatgtattgaaacatttgaatgatatcgagccatgcgtctttgataaatttggtttattagagagaaaagcaactatttacatgaaattgggtcaattgaaagacgcgtccattgtttatagaactctgatcaagagaaatccagataattttaagtactacaaattactggaagtatccttgggaatccaaggtgacaataaattgaagaaggctttgtatggaaaacttgaacaattttatccaagatgcgaaccacccaaatttattccattaactttccttcaagacaaagaagagctcagcaaaaaattgagagaatatgttttgcctcaattggagcgcggtgttccagcaactttttccaacgtgaaacccctttaccaaagaaggaagtccaaggtttcaccactattggagaaaattgtccttgattatttgtccggattagatcctacgcaggatccaattccttttatttggaccaattattacttgtctcaacatttccttttccttaaggattttccgaaagcccaagaatatattgatgctgcccttgaccacaccccaactttagttgagttttacatcctcaaggcacgtatcctgaagcacttaggcctaatggacacagcggctggaattttggaggaaggtaggcaacttgatttgcaggatagatttatcaactgtaaaacggttaagtactttttaagggctaacaatatcgacaaggcggtggaagtcgcgtcccttttcaccaaaaacgatgattctgttaatggtattaaggacttacaccttgtggaagcttcttggttcatcgtagaacaggcagaagcctattatagactatacctggatagaaaaaagaaattagacgatttagcatcgctaaaaaaagaggttgaaagtgataaaagcgaacaaattgcgaatgatatcaaagaaaaccaatggcttgttcgcaaatataaaggtttggcgctgaaaagattcaacgctattccaaagttttataaacaattcgaagatgaccagttggatttccattcatactgtatgagaaaaggtacgccaagagcctatctggagatgttagaatggggaaaggcactttataccaaacccatgtatgttcgcgcaatgaaggaagcatcaaagctttactttcaaatgcatgatgatcgcttaaaaagaaagtccgattctttagatgaaaattcagatgaaatccaaaataatggccaaaatagtagcagccaaaagaaaaaagctaagaaggaagcagccgctatgaacaaacggaaagaaactgaagccaagagtgttgctgcttatccgagtgatcaagataacgatgtattcggcgaaaagttgattgaaacctccactccaatggaggacttcgctaccgaattttataataactactccatgcaagtcagagaagacgaaagggattatattttggactttgaatttaactacagaattggaaagttagctttgtgctttgcttctctaaacaaattcgctaagagatttggcaccacgagcggtttatttggtagtatggccattgttttgttacatgccacaagaaacgacaccccctttgatccaattttgaagaaagtagtcacgaagagccttgaaaaagagtattctgaaaatttcccattaaacgaaatatctaacaatagcttcgattggctgaatttctaccaagaaaaattcggtaagaatgatataaatggcctgctatttctgtatcgctatcgcgatgatgttccgatcggaagctctaatttgaaagaaatgattattagcagtctttctcccttggagcctcactcccagaacgaaattctacagtattacttgtagcctgcaactcctcaatgtgtcaattaactcttacttaatttatgtatatattttttatgtatatgcttatatgcatgcgcatatgct

SEQ ID NO: 612 - DNA, 1958 bp, Saccharomyces cerevisiae
taacccacacggataattttttatcgttcaaggaggaggatacgttttatctctaatataaattaaagataaacccgaaactcttttttcttcttggcgtggaatatttaaggagtagatcagttccattttgttcatccttttctcctcaaggaagaactccgctttttagttgaactaatagtagatagtactaatagctaatttgtatcttttcaaaagttttctagaattttcaagcaatcatggcttctacggaacttagcctaaaaagaaccttaacggatattttagaagacgagttgtaccatactaatccaggtcacagtcagtttacgagtcattatcaaaactatcatccaaatgctagtattactccatataagttggtgaataagaacaaggaaaacaacacttttacgtggaatcattcattacaacaccagaatgaatcgagtgcagcttcgatacccccacaacaaacctaccatttcccgatattcaacaaatacgcggatcctactttaactaccaccacctcttttacgactagtgaagcaacggccaacgatagacagattaataatgtccatctcataccaaacgagattaagggtgctagcgaaaccccattgcagaagaccgtcaatctaaagaatataatgaaagtatcagacccgtatgtaccgacacggaatacgttcaattatgatgttaaaatttccaacgattttttcgataacggtgacaatctatatggtaatgatgaagaagtgcttttctatgaggataattataatccgaaaatgcagtggtcacttcaagataatagcgccgcaataaacaatgaggatgcgagagctatttttaacaatgaatttgactctgatgacgacgatatcagtgatgatgaagaggatgaaatagaagaaaattgtttgcaacaagagcaacaccaagaggagcctttactgtcattggatgttacaccaatctcaatgtttggctcagatcaaaaaacgggtcgtgccaagagttctagtcatttatttaatgagtacagttacgttgactctaacatggacagcatttccagtgttgtatctgaagatctgttagatgaacggggacatgagaagatagaggatgaggatgaggataatgatcttgatgaagacgatatctacgatatctctctcttgaagaacagaagaaagcaaagttttgtcctcaataaaaacactattgattttgaaagatttccatctccctcaacctcggcaaacgtaccgtctactgctactaccggtaaaaggaaaccagcaaaatcatccagtaaccgtagttgcgttagtaacagtaatgaaaacggcacattagaaagaataaagaagcctacatcagctgtagtaagctcaaatgctagtaggcggaagctaattaattatactaagaagcacttatcttcacattcatctacaaattcgaattcgaaaccttcgactgcatcaccatcggcccatacgtcatcttctgacggtaataacgaaatatttacgtgtcagataatgaatctcattacaaatgaaccgtgtggtgcccaattttcaaggtcctatgatttaacgagacaccaaaataccattcacgctaaaaggaagattgtcttccgttgctcggagtgtataaaaattcttggatctgagggctatcagaagacgttttcgagactggatgctttaacaaggcatataaaatcgaagcatgaagatttgtcgttagaacaacgtcaagaagttacaaaatttgcaaaggctaatattggttatgtcatgggttaattaaggttacaaattatataggagataaaagaagaaaacctcacacaaaatggaaatacatatacacatctatatatatttacaatatatatcatatatctgcattcaggaatgttc

SEQ ID NO: 613 - DNA, 4158 bp, Saccharomyces cerevisiae
cgacacgaattttttgtagttttggcttcttttttggttttaagtgcaagatattctggtctcttttttcaacgtatataatctatttaccaaagttgcttaatattacaaaggtgaatatcaaccaatcgtcccaaggaaaatttttaaatttaacctagcatatttcatcgataatcataagcttaagctcgccaactgaaaacttcacaatatgtctagggaagacttgtccattgctgaagatctcaaccaagtgagcaaacctttactcaaagtgaagctgctggaagttttgggtcagggggatttcaaacatttaaaggcgcttgtggacaatgaatttcaacctaaagacgacccatctgtacagcaagttcttaatttaattttacattatgctgtccaggtggcccctattcttcttatcaaggaaattgttgctcattgggtggaccaagtaggtgatgagaagagttcgagtaaaagcgatgatggtatccatctagatttgaattatcaggatgaaaatggcaatactccattgcacttggctgctgctcaatctcggtcggatgtgatcagtttccttcttagccagaagtctatcaatgattgtgtcaagaataaagctcatcagcagcctttggacatgtgcaaagatttgaatgtagcacaaatgattcaattgaaaagagatgactattttttggaaacagttcattctttgagagcagccatgaataaaagagacttttcgaaattggactctatttggaaaaatccaagaaacctaaatttactagatattaatggcatagatcctgaaaccggaacgacacttctgtatgaatattcgcaaaaaaaagacattgaaatgtgtcaatggctgctgaaacatggtgcagaagcaacagttaaagatgggaagggacggtcgccattggatttagtcaaaaatataaaactacccgctaaaccgtcgaacaacgttacaccggaaattaagttaaagaatctacttgaaaagaatctgagagaacaagctattgttcacgaagatgtcgcatcaagtaagcctcctacgtataaggggtttttaaagaaatggacaaattttgcccatggctacaaattacgttggttcattttaagtggcgacggaaatctgtcatattacaaagaccaatcgcatgttgataggcctcgtggtactttaaaagtttcgacgtgccgcttacacatcgattcttcagaaaaactgaatttcgagttgctaggtggcatcacaggcacaacaaggtggcgcttaaagggcaatcatcccattgaaacgactaggtgggtcaatgctatacaaagcgctattagattcgccaaagacaaggagatattaaacaaaaaaaaggcagtaccaccatcattggccttgaagaacaaatctccagccctgatatcgcattccaaaacacaaggatctcttcctgaagcttcgcaatactatcagcacacattacacaaggaagttattcagccctcctctgtgagtctttatcggagaccaagcaacaacctgtccgtcgtatccagcgaaatccaactaaacgataatttgactgaatctggcaagcgctttgttagtaaaatgattgaaaaccggctggatggtagcaaaacccccgttggagtacacacaggttcagctctgcaaagggtccgcagtagtaataccttgaaaagtaaccggagtatgcaaagtggctcaggtgtagctagtcctatagataaagtccctaacggtgcgaatttgagccagtctaacaccacaacaggatctactgcttccttgagtgataataactatattgataatttcgagggtgatgaggcaaattcagatgatgaagaggaagaccttggaataaattttgatcgtgatgaagaatacatcaaagcacagtatgggccatataaggagaaacttgatatgtatgaacaagcaatcagtatagagttgagttctttgattgaactaattgaacaagaggagccaagtcctgaggtttggctcacaataaagaagagcctcatcaacacatcaaccatttttggtaagttgaaggacttgacttataaaagagacaaaagattagtggatatggtttcaaagcaaggtgatgtcaataacgtttgggtgcaatctgtgaaagaattagaaatggagttgtccaacaaaaccgaacgtctagcatctattgataaagaaagaagaggtttgaaaaagatactacacaagaaattgctggaatcacatgccactgccggcaacaaggaatccttagaaaatgacaaagaacaggaatcagatactacggcaagtactctcggtcaaattgcgaaatttatcagcgctacaaaggaagaagatgaagcatctgatgctgatgagttttatgatgccgcggaattggtggatgaagtaactgaattaacagaggctcatcctgaaatttcgaccgctgcagctcccaagcatgctcctcccccagttccaaatgaaacagataacgacagccagtatgtccaggacgaaaaaagcaaaatagagtcaaatgttgagaaaacaagccaaaaatttgaaaaacaaaataatctagttacagaagatgaaccaaaaactgatcaatcactgaaaaacttcaaagcggaggacaaagagagccaagtaaaggagaaaactaaagagatagcatcttcagttatcggtgaaaagaccatagttgctgtcactacagtgcaaaaaagaaaagaagaatatttactcaaagaagggtcctatcttggttatgaagatggtattagaaaaagactatctatggataaggacgatagaccaaagattagtctttgggccgttctgaaatcgatggtgggcaaagatatgacaagaatgacgttaccagttactttcaatgagcctacatctcttttacaaagagtggcagaggatttggagtattccgaactattagaccaggctgcaacgtttgaagattcaacactgagaactctatatgttgcggcatttaccgcatcttcatacgcatctactacaaaaagagttgcgaaacccttcaacccattgttgggtgaaacatttgagtattctcgaccagataaacagtacagatttttcaccgagcaggtttcacatcaccctcctatatctgcaacatggactgaatcaccaagatgggacttttggggtgaatcatttgttgatactaaattcaatggcagatctttcaatgttaagcacttaggattatggcacattaagttgcgtccaaatgacaatgaaaaagaggaactgtatacttggaagaagcccaacaatactgttataggtattctcattggtaatccacaagttgataaccacggtgaagtgaacgttgtcaatcacacaaccggtgatcattgcaagttgtatttcaaagcaaggggatggaggtcatcaggagcatatgaaatcacaggcgaagtctacaacaagaaaaaacagaaggtgtggatcctaggaggacactggaatgaagctatttttgccaagaaagtagtaaaagatggcgatctctcgttggagaaaactagaaccgctgcatcagcagggaatgggcctacggatgacggaacgaagtttttaatatggaaggcaaacgaccgtcctgaggagccattcaatttaacaccttttgctatcacgctgaatgctccacaaccacatctattgccatggttaccccccacagatacacgtttgagaccagatcaaagagcaatggaagatgggcgttatgacgaagctggtgatgagaaattcagagttgaagaaaagcaaagagcagcacgcagaaaaagggaggaaaataaccttgaatatcacccacaatggttcgtcagggatactcatcccatcacaaaagctaaatattggagatatacgggcaaatattgggttaaaagaagagatcatgatttgaaagattgtggtgacattttttaacacgccttttttatgcgagcttttttcctggtacttgtatgtattttgaatgtattttattgtactgaattgtattttattctaccgcacat

SEQ ID NO: 614 - DNA, 824 bp, Saccharomyces cerevisiae
taaggctcttgatagttaccgtacttgaagggacactgtgaactgactaaaaaactccgtcatgtccaatttatgtgtacttttcttccagtttttttttttagcacaattttttgctgaggcatcaccgttgacatttgaactgaataaaggtcgaaaggagtgcttatatacgctaactccggaaattgactgtacaatctcatattattttgcagtacagcaaggagagagcaatgactttgatgttaactacgaaatatttgctcctgatgacaaaaacaagccaataatcgagagatctggtgaacgtcaaggtgaatggtcatttataggccaacataagggagaatatgctatctgcttttatggtggtaaagcacacgacaagattgttgatctggacttcaagtacaattgtgaacgccaagatgatattcgaaatgaaagacgcaaggcgagaaaggcgcagagaaacctgagagactctaaaaccgatcccttgcaagacagtgtggaaaattctatagacaccatagaaaggcagctccacgttttggaacgtaatatacagtactataaaagcagaaacaccagaaatcatcacaccgtttgttcaacagagcatagaattgtaatgttttctatttacggcatattattaatcatcggaatgagctgcgctcaaattgccatactggagttcattttcagagaatcgagaaagcataatgtgtaaatagttgtgtattgttcctgcattttctatcaacttgagaatatatgttcttcatatttaataggggaaaggaatgacataccgt

SEQ ID NO: 615 - DNA, 1173 bp, Saccharomyces cerevisiae
agctatttgagagagatacatattttgaatttaatttgaaaatgcctatcaccataaaaagccgctctaaagggttaagggacactgaaattgacttatccaaaaagcctactttagatgatgttttgaaaaaaatctctgctaataaccacaatatcagcaagtacaggataagattaacctacaaaaaggaatctaaacaagttccggttatttcagaatcgttttttcaagaagaggctgatgactcaatggaattcttcatcaaagatttgggtccccaaatttcatggagattagtcttcttttgtgagtatttgggtccagtcttggttcactcccttttttattatctatctaccattcccacagttgttgatagatggcacagtgctagctccgactataatccatttttaaacagggttgcatattttttaattttaggacattatggaaagagattatttgaaaccttatttgttcaccaattctctttagctactatgccaattttcaacctgttcaaaaattgtttccattactgggttctaagcggtctcatttcattcggttactttggctacggcttcccctttgggaatgctaagttattcaaatactattcatatttgaaattggatgacttgagtacattaattggtcttttcgtgctttcagaactatggaacttttattgccacattaaattgcgcctatggggtgactatcaaaagaagcatggtaacgctaagatccgtgtcccattgaatcaaggtattttcaatctttttgttgctcccaactatacttttgaagtttggtcttggatttggtttacttttgtgttcaagttcaatttatttgccgttttatttttgactgtttcaacagctcaaatgtacgcatgggctcaaaagaaaaacaaaaagtatcataccagaagagcattcttgattccatttgtattttgatcctcctgtttgcaacatgcccaaatgcaaggtaaagagatattagctttcacgaagtggcgtagtagcactattgtttaagtatcgtctgcacctgtgccttttggtatttggcactatcttaagcgcatgccaccaattatgctaaaccgtttcactttaagaaatttttatttaaatctttcactatgcaaatatg

SEQ ID NO: 616 - DNA, 467 bp, Saccharomyces cerevisiae
acacatctcatgtcagctcaagattattacggaaactctgcctccaaacaaagctattctcgtcctagcgctccaccaccaggatatgaaacggcgtctagaggttacgctccatcgcaaagccaacagaactattatccacctcaacagcagcagcagcagtatcagcaacaacctcaatactatcagcaacagcagccccaatattaccaacaacacccacagcagcccatttatgtccaacaacaaccggccagttctggaaatgaagactgtctagcgggctgtctagcgggtttatgtttatgctgtactttggatatgctgttttagagtatctccatatcttgtgggagcaaaccctttcacacaaatccactatataaaacaaagcacaattgcacctctgatcttttaatcttaattaaataagcgtgattaaagtgttcatgcaagtagataatata

SEQ ID NO: 617 - DNA, 73 bp, Saccharomyces cerevisiae; identical to SEQ ID NO: 397

SEQ ID NO: 618 - DNA, 74 bp, Saccharomyces cerevisiae; identical to SEQ ID NO: 232

SEQ ID NO: 619 - DNA, 72 bp, Saccharomyces cerevisiae
tccgatgtagtgtaacggctatcacatcacgttctcaccgtggagaccggggttcgactccccgcttcggag

SEQ ID NO: 620 - DNA, 255 bp, Saccharomyces cerevisiae
tttaatgatgaagattttaattttccgttggtctattaagaacagaagtacttcaaaactactttttaagaccatccttttacagtattttttcaatattgtaaaacttctcatttactttgtgtctttatgatctcatcgttctggtggaccataatcagacgcacggtatacttcgtttctgttggagaatattgggagtcttttaatgtgatgagtggccaacataaccttatagtcatagttacactgatt

SEQ ID NO: 621 - DNA, 99 bp, Saccharomyces cerevisiae
atatatgatgatatcctataacaacaacaacatgaatttcttcgtccgaatcctttataggtggaaacaaactttgacaatagctttttaacactgata

SEQ ID NO: 622 - DNA, 124 bp, Saccharomyces cerevisiae
aggaagttttttcctttttatatgatgaatatgagtgcatttggctcgagttgctgtttggcttttgccaaatcagtaacggtgtggaaaaactcaagctacctttttttacttttatctgacc

SEQ ID NO: 623 - DNA, 72 bp, Saccharomyces cerevisiae; identical to SEQ ID NO: 229

SEQ ID NO: 624 - DNA, 73 bp, Saccharomyces cerevisiae; identical to SEQ ID NO: 397

SEQ ID NO: 625 - DNA, 84 bp, Saccharomyces cerevisiae; identical to SEQ ID NO: 234

SEQ ID NO: 626 - DNA, 72 bp, Saccharomyces cerevisiae; identical to SEQ ID NO: 236

SEQ ID NO: 627 - DNA, 768 bp, Saccharomyces cerevisiae
aatcaatttgtgaaggtataactgtagccgtgaggataggaaaatgttacgttcaattattggaaagagtgcatcaagatcattgaatttcgtcgctaagcgttcatatgcagaagctgctgccgcatcatcaggtttgaagttacaatttgctctaccacacgaaactttatatagtggctccgaagttactcaagtgaacctgcctgctaagtcaggacgtattggtgtattggccaaccatgttcccaccgttgaacaattactaccaggtgtcgttgaagttatggaaggctctaactctaaaaaattctttatatcaggtggatttgcaacagttcaaccagactcgcagttatgtgtaactgcaattgaagcttttccattggaatccttttcacaagaaaatataaaaaatttgttggcagaagctaagaagaacgttagttcatctgatgccagggaagccgcagaagctgcaattcaagtagaagttttagaaaacctacaatccgtattgaaatagcgtttttatggtacgcattctagaacttgaggggaagaagtctacgtttttaagtgttgacaagcaattcgcttgaaagcgccaaaattcattgtttgttctactcgaatttaagtttccattttggttgatgtcttaagtatacagagaaaccgtttattagcgtatatatacagaaaattttattattttatattcaaaaacaagaaaacaaaagagaaaacattaacatgtaattttca

SEQ ID NO: 628 - DNA, 1296 bp, Saccharomyces cerevisiae
aaaagacaaagtatacctttgcaaattgaaagcttagttaaacattattattcgtgtgtttgaggtcactttttttcgtcttaaacagctctcaaagttgtctcaaaatttttatccggattcctttacattaacagaccccaaacacaacaagttttgatagtttaagtaagtgaacgcttatttttgttgtcgttgaaaagaaaataaataggcagtattatcaattaggaggtgagttaaattccattctataccgagtatacgagattttgcacattcttacttcatatatcatttaggcactgcatttatcttttaaaaatcattataatgagtaatcattctgaaatcttagaaaggccagaaacaccatatgacataacttatagagtaggtgtggcggaaaataaaaactcgaaatttcggaggacaatggaagatgttcatacgtatgttaaaaactttgcttcaagattagattggggatatttcgcggtgtttgatggacatgctgggattcaggcctccaaatggtgtggtaaacatcttcatacaattatagagcaaaacattttggcagatgaaacacgagatgttagagatgtattgaacgattcattcctagccattgacgaagaaattaatacaaaacttgtaggaaatagtggatgtactgctgctgtttgcgtattacgttgggagcttccggattcagtttctgatgattcaatggatttagcccaacaccaaagaaagttatatacagcaaatgttggtgattctcgaatagtattgtttagaaacgggaacagcataagactgacttatgatcataaggcatctgacactttggagatgcagagagttgaacaagcaggtggcctgataatgaaaagtcgtgtaaatggtatgctggcagtgacgagatcgttaggggataaattttttgatagtttagtagtgggcagcccatttaccacgagcgtagaaataacttctgaggacaaatttttaatcctagcgtgtgatggattatgggatgttattgatgatcaagatgcatgcgaattaatcaaggatattactgaacctaatgaagctgcaaaagtcttggttagatatgctttggaaaatggcacaacagataatgtaacggtcatggttgtcttcctctaagaaggatccgttataaaccgcgcaaaaattatgcatagacatagagatatgcaatgtgtatgtgtgtatgtatgtatatgtataaacgtaccaaatctattttgcatgcatctctca

SEQ ID NO: 629 - DNA, 1434 bp, Saccharomyces cerevisiae
gttaaagaagagacagcgtttttaatagaaaataaaatgggacaaggtgtatcatctggacaagacaaaaagaagaagaagggatctaatcagaaacccaaatatgaacctcccgttcaatctaaatttggtcgtaagaaaagaaagggaggtccagctactgctgaaaaattacccaacatatatccaagtactcgttgtaagttaaagcttctaaggatggaacgaattaaagaccatttgttattagaagaagaatttgtctctaactctgaaattttaaaaccctttgaaaagaagcaggaggaggaaaagaaacaattggaagaaatacgtggaaatccattgagcattgggacccttgaagaaattatagacgatgatcatgcgatagtgacaagtccaactatgcctgattattatgtatctatcttatcctttgtcgataaagagttactagagcctggatgttctgtgttattgcatcataaaaccatgtccatcgtaggtgttttacaggatgacgccgatccaatggtttcggtcatgaaaatggataagtcgccaacagaatcatacagtgatattggtggcttagaatctcaaattcaagaaataaaagagtctgtagagttaccgttaacacaccccgaactgtatgaagagatgggtatcaaacctcccaagggtgtgattctttatggtgcacccggtacaggtaagacattgctagcaaaggctgttgcaaatcaaacatctgccacattcttaaggattgttggctcagagttaattcaaaaatatttgggggatggtcctaggttgtgtaggcaaattttcaaagtagcgggtgagaatgcaccaagtattgtatttattgatgaaatagacgccattggtactaaaagatatgactccaatagtggtggtgagagagaaattcagagaaccatgctggaattgctgaaccagctggacgggttcgacgacagaggggatgtgaaggtgattatggccactaacaaaatcgagactcttgacccagcattaatcaggcctgggagaattgatcgtaaaatcttatttgaaaaccctgatctaagtactaagaaaaaaattttagggattcacacttccaagatgaatttaagtgaggacgttaatcttgaaactttagtaacaacaaaggatgatttgtcaggcgccgatatccaggcaatgtgtacagaagcaggtttgttagcccttagagagagaagaatgcaagttacagcggaggattttaaacaagccaaggagagagtcatgaaaaataaagttgaggaaaatttagaaggtttatacttgtgatgtgcccatttacatttttctataatagatttacgtatataagtaatgcttcaacaaagcttaatatgtgtacattttgtatca

SEQ ID NO: 630 - DNA, 623 bp, Saccharomyces cerevisiae
gattataaaaatatgaaagttaaaataaacgaagtgcacagtgtgtttgcttggtcatggcacatccctagcacatctgatgaggacgcagccaataacgatccaattggcaatgatgaagacgaggatgtctgtggtatctgtcgtgccagttataacggtacctgtccaagctgtaaatttccaggcgatcaatgccctttagtgattgggctatgtcatcataacttccatgatcattgtatataccgttggcttgatacaccaacctcaaaaggactgtgtccgatgtgtaggcaaactttccagctacagaagggtctagcaattaatgacgctcatgtccaaaagttcgttgaaatagtttcaagaagaagagaagaaatgatagaggagggcgtcgcagaagagtttgtggactttgatgaaccaataaggcaaaacaccgataacccaatcggtagacagcaagttgataccatcctggacgaagactttttgttacgataaaaaagaaacttagaaatcacaattagctatatttccatacggttcttttcttgtgaacgctgttaacattctgtatacttaaatgaaaatttaatattgattttttcttgttg

SEQ ID NO: 631 - DNA, 1328 bp, Saccharomyces cerevisiae
catcggtatactactgttatataagttattcttcgagaaacaattagatatcattcatcggataaatctaagttgcccattgctttcaataactccgatcaaattaactcaaatcaactaaaacagtaatgtcattcagaccaggtagcagaggtggttcccgtggaggttccagaggtggcttcggtggtagaggcggttcccgtggtggtgctcgcggtggttccagaggtggcttcggtggtagaggcggttctcgtggtggtgcccgtggtggttccagaggcggcttcggtggtagaggcggttctcgtggtggtgcccgtggtggctccagaggtggtagaggtggcgctgctggtggtgcccgtggtggtgccaaggtcgttattgaaccacatagacatgccggtgtttacattgctagaggtaaagaagatttgctagttaccaagaacatggccccaggtgaatcagtttatggtgaaaagagaatctccgttgaagaaccatctaaggaagatggtgtcccaccaaccaaggtcgaataccgtgtatggaacccattcagatctaagttggctgccggtattatgggtggtctagatgaattatttattgccccaggcaagaaagttttatatttaggtgctgcttccggtacttctgtttctcacgtttcagatgttgttggtccagaaggtgttgtctacgccgtagaattttctcacagaccaggcagagaattgatttctatggcaaagaagagacctaatatcatcccaatcattgaagatgctagacacccacaaaaatacagaatgttgattggtatggttgactgtgtcttcgcagatgttgcccagcctgatcaagctcgtattattgcattgaactctcatatgttcttgaaggaccaaggtggtgttgttatctccattaaggctaactgtattgattctactgtagacgcggaaaccgtttttgctagagaagttcaaaagttacgtgaggaacgtattaagccattagaacaattgactttagagccatatgaaagagaccattgtatcgtcgttggtagatacatgagaagcggtttgaagaaataagttgaataaaggaaattagtcaaaagtttctggtagcttgctcaattattagcagaataattgtttcgtttatatatatttcccccattcagtttcacttcctatttgaagtttttgtaaccctcgactttgtaaaatagatattactaaattcttttagagaacaaaagtattgtacgtattcgccatataaaaaaaaaagagtatatgtggtga

SEQ ID NO: 632 - DNA, 1380 bp, Saccharomyces cerevisiae
tatcttactctcctacataagacatcaagaaacaattgtatattgtacaccccccccctccacaaacacaaatattgataatataaagatgtctgctgctgctgatagattaaacttaacttccggccacttgaatgctggtagaaagagaagttcctcttctgtttctttgaaggctgccgaaaagcctttcaaggttactgtgattggatctggtaactggggtactactattgccaaggtggttgccgaaaattgtaagggatacccagaagttttcgctccaatagtacaaatgtgggtgttcgaagaagagatcaatggtgaaaaattgactgaaatcataaatactagacatcaaaacgtgaaatacttgcctggcatcactctacccgacaatttggttgctaatccagacttgattgattcagtcaaggatgtcgacatcatcgttttcaacattccacatcaatttttgccccgtatctgtagccaattgaaaggtcatgttgattcacacgtcagagctatctcctgtctaaagggttttgaagttggtgctaaaggtgtccaattgctatcctcttacatcactgaggaactaggtattcaatgtggtgctctatctggtgctaacattgccaccgaagtcgctcaagaacactggtctgaaacaacagttgcttaccacattccaaaggatttcagaggcgagggcaaggacgtcgaccataaggttctaaaggccttgttccacagaccttacttccacgttagtgtcatcgaagatgttgctggtatctccatctgtggtgctttgaagaacgttgttgccttaggttgtggtttcgtcgaaggtctaggctggggtaacaacgcttctgctgccatccaaagagtcggtttgggtgagatcatcagattcggtcaaatgtttttcccagaatctagagaagaaacatactaccaagagtctgctggtgttgctgatttgatcaccacctgcgctggtggtagaaacgtcaaggttgctaggctaatggctacttctggtaaggacgcctgggaatgtgaaaaggagttgttgaatggccaatccgctcaaggtttaattacctgcaaagaagttcacgaatggttggaaacatgtggctctgtcgaagacttcccattatttgaagccgtataccaaatcgtttacaacaactacccaatgaagaacctgccggacatgattgaagaattagatctacatgaagattagatttattggagaaagataacatatcatactttcccccacttttttcgaggctcttctatatcatattcataaattagcattatgtcatttctcataactactttatcacgttagaa

SEQ ID NO: 633 - DNA, 1313 bp, Saccharomyces cerevisiae
taataataatggacccacataatccaattgtccttgatcagggtactggtttcgtcaaaattggtcgtgctggcgagaatttcccagattacacgtttccttctattgttggtagacccatcttgagggcggaagaacgtgccagcgttgctacaccattaaaggacattatgattggtgatgaggcaagtgaagttcgctcttatctgcaaatatcttatcctatggaaaacggtattattaagaattggacagatatggaacttctttgggattacgcctttttcgagcaaatgaaactaccatccacctccaacggtaagattttactaacggaacctccaatgaatccgctgaaaaatagggaaaaaatgtgtgaggtaatgttcgaaaaatacgattttggcggagtttatgttgccatccaagctgttctagcattgtacgcacaaggtttgtcttcaggagtcgtcgtcgattccggtgacggtgttactcatatagtcccagtttacgaatctgtcgttttgagccacttaacaagaagattagatgttgcgggtagagacgttactaggcatttgattgatctgctttctcgtcgtggttatgcatttaacagaactgcagatttcgaaactgtgcgtcagataaaggaaaaattatgttatgtttcatatgatttagacctagatacaaaattggctagagaaacaaccgcccttgtggaatcgtatgagttaccagatggcaggacaatcaaagtgggacaagagagatttgaagcaccagaatgtttgttccaacctggtttggttgacgttgaacaacctggcgtgggcgagctgttatttaatactgtgcaatcggctgatgttgatatcagaagttccctgtataaggccattgttctttcaggtggttcaagtatgtacccagggctgccttcgagattagagaaagaattgaaacaattatggtttagtagagttttacacaatgacccttcaagacttgataaattcaaagttagaattgaagatcctccaaggagaaagcatatggttttcattggtggtgccgttttagctagtatcatggctgataaagaccacatgtggttgtctaagcaagaatggcaagaaagcgggccatctgcaatgactaaatttggtccaagatagatttgaactttattgatccaaaagaattaataaaaaagtttaaatctacgaatgaaaaatggaaatggaataatataaacttatatataaatgtaataagttaataaggcacaattgttgaacaagcaa

SEQ ID NO: 634 - DNA, 440 bp, Saccharomyces cerevisiae
gaaacttccatctaaaataaagagtgcccattaatgtccggaaaaccaccagtttatagattaccccctcttcccagactaaaagtgaagaaacctatcattaggcaagaagcgaacaaatgtcttgttttaatgtcaaacttattacaatgctggtcttcatatggtcatatgagccctaaatgtgctggcttagtaacggaattgaaaagttgcactagtgaaagtgccctcggcaaaagaaacaacgttcaaaagagcaatattaactatcacgccgctaggctgtatgataggatcaacggtaaaccccatgattaattttatatccaaaagcagcaagaatgaaaacttgataatattaaagtcatggccttgtatatacaaattaaatagtctcaacggaaaatatataaacttttaatctaatagtaacatca

SEQ ID NO: 635 - DNA, 859 bp, Saccharomyces cerevisiae
attcgccaaggcagaaaagcataaccatattaaatcttctccttcaaagctagcacgccttccaaaatgacccacagcttgaaagctctattcgccttgctatttctttacacagctgctgtcaatgcgggtgtgattggcatattcaacgcccttcccccaccaaacaccaaaccaattaacggcgaatctccactttaccaatgtgacattctagacaagcaacttgtggaaatcaaagaggtcaatttggaccctaaccctcctgttcgtggcgaaaatttgactatttctgctaacggtgaggtctttgaaactatagaagagggggcatatatcgacgttgaagtccgtctaggatacatcagactgttatcccagacttttgatttgtgtgaaacattagaagataacgatatcgaaggcttatcctgtccaattgaaccgggtgaatacaacattaagaaaatagttgagatcccaggcgaggttccacctggcaaatatgttgttgtagcaagagcttacactgaaaaggatgatctgatcacttgcttaaccggagaagtcatcttcccaccaaggtgatctgattcatacaactcattgatccgtgtttatttcccttctcgttccatgtattcttttcttttaccccatgttctcttcacccgttcgaggcagggtttttcctctttttgttataaccaccatctagtcgaatgtggttactcttaatatttttttgtcggccaatgcttcagcgcctttgtcaacacctacttcttttccattcctttcctctaattaaaaatcatctatttagtgtgtacgtattaaaaacatgtcattacattga

SEQ ID NO: 636 - DNA, 1315 bp, Saccharomyces cerevisiae
aaaaaagaaaaagaagcaatacaataggttattgcatactatcataagcatacagataaaggagttctgcacatacggtccctctttctcttcctattattcttcagtcccctcctcgctctttttagattcgacattacaaggtgaaatactattgaagctcaaaaacatccataataaaaggaacaataacaatggtatctagaggccccgacgaatggcttgaaacaataaagaaatgccaggcgctaactgaaaacgagatgaaacaactgtgtgaaatggtgaaagaacttttgatggaggaaagtaacatccagccggtacagacccccgttactgtatgtggagacatacacggccaatttcatgacttgttagagctattccgtacggcgggtggctttcctgacgatataaactacatttttctcggtgattacgtggatcgtggctactatagtctggaaacttttacgcttttaatgtgtctgaaagtcaagtacccggcaaagataactttggtcagaggaaaccatgagtccagacaaattactcaagtttacgggttctacgaggaatgcctgaataagtacggatctaccaccgtatggaagtattgctgtcaagtttttgatttcctgacgctggccgctataattgacggtaagatcttatgtgtccatggagggttatctcccgagattagaatgctcgatcaaatcagagtcttgtcaagagctcaagaagtgccacacgagggtgggttctcggacctgctttggtcagaccctgacaatgtagaggcttggcaagtttcccctcgtggtgcaggatggctctttggcagtaaagttgctagagagtttaaccacgttaatggactgaaccttattgcccgggctcaccaactggttatggaggggttcaagtaccattttcctgaaaaggacgttgtaaccgtgtggtccgcgccaaattactgttatagatgtggtaatgtcgcgagtgtaatgaaggtcgatgaggatctggaacctactttcaaaattttctcggctgttcccgatgactacataagagaatccacggcaaaccataataatcaaagagccggctatttcttataacacgacggcatgccctccctaactcgacgaataaaaataattttcacaataaaaaaaagactacaaaaatcagaaactttttcattacgccatttgctacgatacgatacacaacaagcacattctaagagcattccatttactatggtcaaaatgaccaaataaaaaattaaaaaaaaaaagaa

SEQ ID NO: 637 - DNA, 961 bp, Saccharomyces cerevisiae
tggaactaaagtagcatctgcaaagaagtaatgtctgaaaaaccacaacaagaggagcaagagaaaccacaatcaagacgtaattcatttgctgtgattgaatttactccagaagtcttggacagatgtttaaagcaagtggaattctacttttctgaattcaactttccatatgacaggttcttgcgcacaacagcggaaaaaaacgatggatgggtccccatcagcaccatcgccacattcaaccgtatgaagaaatatagaccagtggataaggttatcgaagcactacgtagttctgaaattttggaagtatctgctgatggagagaacgtcaagagacgtgttcctttggacctaactgctgccagaaatgccagaattgagcaaaaccaacggactttggctgtaatgaatttcccacatgaggacgttgaagcttcccaaattcctgaattgcaggagaacttggaagcctttttcaaaaaattaggtgaaatcaaccaagtgcgtttgagaagagatcacagaaacaagaaatttaatggtacggtcttggtggaatttaagacaattccagaatgtgaagcttttttgaaatcgtattccaatgacgatgagtccaacgaaattttgtcatatgaaggtaagaaactgagtgttttgacgaaaaaacagtttgatttacagagagaggcctcgaagtccaaaaacttcagcggtagatcaagatcctttaacggccataagaagaaaaacttgcctaaattccccaaaaataagaagaaaaacggcaaggaagagtcaaaagaggactcttctgccattgccgatgacgatgaggagcacaaggagtgattcttgtgtttcttctggttctcgtatctcattatcatagcatattaagaatatatgtactaacatatgtactaaacagaaacacaatatgaattacaactaa

SEQ ID NO: 638 - DNA, 2507 bp, Saccharomyces cerevisiae
tatttgttagttgaagagcggtagttttacgcaggcatcagaatggcaggtcattcacacaggtcatcattaaaaaacggacacaaatcttacaaatccaaacatgcttctaaaggtgctttgaaaagattatacaaggggaaagtggaaaaagaacccgtgggcactggcaaaccagacaaacaagtttcaaaattgcaacgtaaaaacaaggcaaaacaattaagggcccaaaggatcttggattccattgaaaacaggaaattattcgaaggaaaaaatggcgctgccaaaatcattactattgttccgttagtgaatgatttagacccattggacattctttacaagctattaaagtgtgcagatgatgaaggaatcatggtgcaggaagtagactcaaaacgtatatttaatgttcatataaagaagtttaaaagcaatcttaaaatcataattccagacatgaccaattttttgaacattttagattgcgctaaagtagcagactttgttgtgtttgggctcagtggtgtccaagaagtcgatgaagaatttggtgagcagatcatccgtgcgttagaactacaaggtattgcttcatatatcggtgtcataagcaacctctcagcagtccatgaaaaggagaaattccaattggatgtcaagcaatccttagaaagttatttcaagcactttttcccaagtgaagaacgtgtttataatttggaaaaaaactcagacgctttaaacgtcttgagaacattgtgccagaggctaccaagatcaatcaattggagagacaatagaggttacgtagtcgctgactttgttgatttcgttgaaacctctcccgattctggtgacctggtaattgaggggaccgtccgtggtattggcttcaacgccaatagactggtccatattcctgattttggtgacttccaactgaataagatagaaaaaatcagtgaatcttcgcagaaaaggaaaataataaaggaaaaagctacagatagtctgagcttagagctggatttacaaacagttttcgaaagtaatatgaatagagatactttggacgaatatgccccagaaggcacggaagattggtcagattatgacgaggattttgagtacgacggtttgacaaccgcgagatacgacgaccatggcttcttgccagggagggaacaaacatcaaaaaaggcggcagttcctaagggaacttctgactatcaagcgaagtggtacttggatgacgtcattgacgcaaatgaggaagaagaggcagaacagaccaatggaaaggatgagacaatgatggaaattgatgatgaaatgatggtggagcaagacaatgaagaggtagcaggcgacgaagaatatgacatagaggataatgaaggatttgaagagctttcacccgaagaagaagaacgtcaactgagggaatttagagatatggaaaaggaggacagagagttccccgatgagatcgaactagagcccagtgaatctgccatcgaacgtttgaaaaggtatagaggtttgaaaaacttatacaactgtgattggcaagttgatgaaaaggacccatcatcaccagcggaatggaaacgtctattaaggattggcaattacaaaaacactaaaaacagaatcataaaggaaaccaagaatgaagcacaggccattgcaggtgatcgtattaggatgttcatcaggtttcctaagtttctgcttgaaaagattcaagatcctaaacaactattatttgctgtctacggattactacttcatgaacacaaaaatgcggtagtcaacttctctctacaaagatgggaacaatatgacaaacctgtgccttctcaggagcctatcgtagtacaatacggtgttagaagatacactattcaacctctattttctcaaggctctaacagtcctaataatgttcacaagtatgaaaggtttctgcatccagatacagtatcagttgccacatgtattgctcccgtagatttcacccagtcacctgcaatttttttcaagccatcaccaacagatgccaaaaatattgaattgattggtcacggtacattcctgaatgcagaccattcaagaatattagcaaagagagccattttgaccggtcatccattcagattccacaaaactgtggttactgtacgttacatgtttttcagaccagaagatgtggaatggttcaagtctatcccactgttcaccaaatcaggtaggtcaggtttcattaaagaaagtttgggtacgcatggttatttcaaggctacatttgatggtaaattatctgcgcaggatgttgttgctatgtccttgtacaaacgtatgtggcccatgccttcgttaccttggaatggtatgtaaagtgataaaaatatacacgtatatatatatatatatatatatataagtacgtgagatctatttgtataatataatgctaataaaatagtatcaacgat

SEQ ID NO: 639 - DNA, 594 bp, Saccharomyces cerevisiae
gcacacactggcaccattttttggaagcaatatgagtagtttgtgtctacagcgtcttcaggaagaaagaaaaaaatggagaaaggatcatccatttggattttatgccaaaccagttaagaaagctgatgggtccatggatttacagaaatgggaagctggtatcccaggcaaagaaggtacaaactgggcgggtggtgtgtacccaattacagtcgaatatccaaatgaatatccttcaaaacctccaaaggttaaatttccagccggattttatcatccaaacgtgtatccaagtggcacaatatgtttaagtattttaaatgaagatcaagattggagacccgccatcacgttaaaacaaattgttcttggggttcaggatcttttagactctccaaatccaaattcccctgctcaagagcctgcatggagatcattttcaagaaataaggcggaatatgacaagaaagttttgcttcaagctaaacagtactctaaatagagggaatccatctttcccattcttcctccttttgtactttatttaactaatgtcgttgtgtaacaaaaatagagcaaaataacattatt

SEQ ID NO: 640 - DNA, 1450 bp, Saccharomyces cerevisiae
cacaaggaagatcgcccagcatgagtatgttatctagaagattattttccacctctcgccttgctgctttcagtaagattaaggtcaaacaacccgttgtcgagttggacggtgatgaaatgacccgtatcatttgggataagatcaagaagaaattgattctaccctacttggacgtagatttgaagtactacgacttatctgtcgaatctcgtgacgccacctccgacaagattactcaggatgctgctgaggcgatcaagaagtatggtgttggtatcaaatgtgccaccatcactcctgatgaagctcgtgtgaaggaattcaacctgcacaagatgtggaaatctcctaatggtaccatcagaaacattctcggcggtacagtgttcagagagcccattgtgattcctagaattcctagactggtcccacgttgggaaaaaccaatcattattggaagacacgcccacggtgatcaatataaagctacggacacactgatcccaggcccaggatctttggaactggtctacaagccatccgaccctacgactgctcaaccacaaactttgaaagtgtatgactacaagggcagtggtgtggccatggccatgtacaatactgacgaatccatcgaagggtttgctcattcgtctttcaagctggccattgacaaaaagctaaatcttttcttgtcaaccaagaacactattttgaagaaatatgacggtcggttcaaagacattttccaagaagtttatgaagctcaatataaatccaaattcgaacaactagggatccactatgaacaccgtttaattgatgatatggtcgctcaaatgataaaatctaaaggtggctttatcatggcgctaaagaactatgacggtgatgtccaatctgacatcgtcgctcaaggatttggctccttaggtttgatgacttctatcttagttacaccagacggtaaaactttcgaaagtgaagctgctcatggtaccgtgacaagacattatagaaagtaccaaaagggtgaagaaacttctacaaactccattgcatccattttcgcgtggtcgagaggtctattgaagagaggtgaattggacaatactcctgctttgtgtaaatttgccaatattttggaatccgccactttgaacacagttcagcaagacggtatcatgacgaaggacttggctttggcttgcggtaacaacgaaagatctgcttatgttaccacagaagaatttttggatgccgttgaaaaaagactacaaaaagaaatcaagtcgatcgagtaatcgaatttacgtagcccaatctaccacttttttttttcattttttaaagtgttatacttagttatgctctaggataatgaactacttttttttttttttttttactgttatcataaatatatataccttattgttgtttgcaa

SEQ ID NO: 641 - DNA, 2072 bp, Saccharomyces cerevisiae
atgtctcgtactaacatggatacaagacacgcacattctgctttactggcagcaccacagagtgctactgcaaatagcaggagcagcaacagcagcagcgagagtagtagtaacaaaaacaatatcaatgtcggcgtcggtgacgatagcggtaatgtcagcgcggtaagtatcgacgatggaccccacttcagggatatcttccactatggacacgaggaaaattacaaacttgcgagcagcggtatcactaacctgaattcttcatcccacgcccaccaaactttgtctcccatttccattagtaatgcatccactccggaaagttttcccgagcaccctttgggcctagaacgggaaacagagccggcgttggaagctgaaatggaagcggaggaactaccaccacaccaaagtaaataccttttaagctccattaaggcgaccaaacgattaaaagatgctagaccgtttctgaagccggttgatcctattgctttgaacatcccgcattatttcaactacgttcaaaccccaatggatttgtctttaattgaaacaaaattgcagggcaacgtgtatcattcagtagagcaagtcacatcggacttcaaaacaatggtggataattgtttaaactttaatggtccagaatcttcaatctcttcgatggctaaaaggattcaaaagtattttgaaaaaaagttatctgcaatgccaccaagagttttacccgcttctgccttgaagaaaacaagcagaaaccggaaaaaaaatgaggatatggattccccacttgtcattagacgttcagttagtaccaccaatgacaatattggggaaagcggaaatagagaaggcgtcagtggtggtagacccaaaagaacaattcatccacccaaatcaaaagatttgtttgatatatatgaaaactccaaaccaaaatcaaagactttacaaaaaaaattcaggacttgtctgaaaatactaaaggttttgatgagtaaaaaaaattcggatataaattttccctttttacaacctgttgatccgattgctttgaatctaccaaattactttgatgtcgtgaagaatcctatggatttgggtacaatatcaaataatttaatgaactggaagtacaaaacaattgatcaatttgtcgacgacctcaaccttgtcttttataattgtttccaattcaatccagaaggcaatgaagtccattcaatgggcaaaaaactaaaagagcttttcaattttcattggttagagaaccaggatattttgaatgaaattgaaacggattcagatcttgaagaggataactattcttcttcatattcatctgatgatgaatatgatgatgaagacataaatgaaaacgatataactaatccggctattcaatatttggaacaaaaactgaagaaaatggaggttgaattgcaacaattgaaaagacaagagttaagtaaattatcgaaggaaaggaagaggaagcatctaggtaaaacgcttttgcgtaggaaggcaatgaagcattcagttgacgatttaaagaaatctattactgataaaatcaatgaattaagtgatttagaaatgaatgggatgattcgtatcattaaaaattcattacccgcagatgaaatactaacttccaatgaagatgaaattgaaattgatttggatattttagatgaagcgactattgcaagaatttatgagagatattttgagaaaaaaaataacaacaatagcaaaagaaaactaagtggcaactactcgactgcgccaactaacaagaaaaagaaaaccttgaaatttttggaaaaggatgaaatcataaataataataattattccgattctgaagaagacagtagtgatagtagcgacagtgacagtgattaacaatcgaaatgggcttcatgccctaattaaggaaaaaaagaaaagaaaaaaaaattgggaagaatggggataaaaaagatttgtaacattataaacaaaaataagaaataattgtttttacgtacttattgtaaataaaacaaagggataacgga

SEQ ID NO: 642 - DNA, 433 bp, Saccharomyces cerevisiae
cagaactcaatcaaaggaaaaatggccggtttgaaagacgttgtcactcgtgaatacaccattaacttgcacaaaagattgcacggtgtctccttcaagaagagagctccaagagctgtcaaggaaattaagaagttcgccaagttacacatgggtactgatgatgtccgtctagctccagaattgaaccaagctatctggaagagaggtgtcaagggtgttgaatacagattaagattgagaatttccagaaagagaaacgaagaagaagacgccaagaacccattgttctcctacgttgaacctgtcttagttgcttctgccaagggtctacaaactgttgttgtcgaagaagatgcttaaatcaattaaataaaaataatactcattttatattaataaatataaagtaaacattttcgatttgtataaa

SEQ ID NO: 643 - DNA, 769 bp, Saccharomyces cerevisiae
gtacagcacagcaggaatcgtacacaatggccatttccaagaatttaccaatcttaaagaatcatttcagaaagcactggcaagaacgtgttaaagtgcacttcgaccaagctggtaagaaggtttctagacgtaatgctagagctaccagagccgctaagattgctccaagacctctagatctcttgagacctgttgttagagccccaactgttaagtataacagaaaggtcagagctggcagaggtttcaccttggctgaagttaaggccgctggtttgactgctgcttatgccagaactatcggtatcgccgttgaccacagacgtcaaaacagaaaccaagaaatctttgatgctaacgttcaaagattaaaggaataccaatctaagattattgttttcccaagaaatggtaaggccccagaagctgaacaagttttgtctgctgctgctactttcccaattgctcaaccagctaccgatgttgaagctagagctgtccaagacaatggtgaatctgctttcagaaccttgagattagccagatctgagaagaaattcagaggtatcagagaaaagagagctagagaaaaggctgaagctgaagctgaaaagaagaaatagatctaaaaacttcatcaaagaatttttcatccacaatttttgtattttccttcttttttatctgttcaatttcataaataatatatatgtacaatgtataaacgggaagccatcacttataatttatcatttccttaacttta

SEQ ID NO: 644 - DNA, 1608 bp, Saccharomyces cerevisiae
tgatatctttctgagtgttgttatttttgtaagtcgtaacacggaactgtttgcctgttggaattttacgttactattctcatcggtataactagcttatattcactttggcaataggttaaaaaaagctcgttcatttttttaaaaacagcaacgatgtcacacgaaggtgaagaagatttattggagtactccgataacgaacaagaaattcaaattgatgcctctaaggccgctgaagctggagaaactggcgccgccacttctgcaactgaaggtgataataataacaacactgcagctggcgacaagaaaggttcctatgttggtatccattccaccggtttcaaagatttcttgctaaagccagaactatcaagagccatcattgactgtggttttgaacatccttctgaggtccagcaacataccattcctcagtcaattcatggtaccgatgtcttgtgtcaagcaaagtctggtttaggtaagacagctgtctttgtcttatccactctgcaacaattggaccctgttccaggtgaagttgccgttgttgtcatttgtaatgctagagaactggcctatcaaattcgtaacgagtatttgagattttccaaatatatgccagacgttaagacagcagtcttttacggtggtactccaatttctaaggatgctgaacttttaaagaataaagatactgctcctcacattgttgttgcaactccaggtcgtttaaaagcgttagtgagagaaaaatacattgatttgtcacacgtcaagaactttgtcatagatgaatgtgataaggttttagaagaattagacatgagaagagatgtgcaagaaattttcagagctactccaagagacaaacaagtcatgatgttttcagccacactttctcaagaaattagaccaatttgtagacgcttcttacagaatccattggaaattttcgtcgatgatgaagctaagctaaccttgcacgggttgcaacaatattatatcaaattagaagaacgtgaaaagaaccgtaaattggctcaattattagatgatttggagttcaatcaagtcattattttcgttaaatctaccacaagagctaatgagttgaccaaactattaaacgcctctaactttccggctatcaccgttcatggtcatatgaaacaagaagaacgtattgctcgttacaaggctttcaaagattttgaaaaacgtatttgcgtgtccacagatgtttttggtagaggtatcgatattgaacgtattaatttagccatcaattacgatttgactaatgaagctgaccaatatttacatcgtgtcggtagagctggtagatttggtactaagggtttggctatttcattcgtttcttcaaaggaagatgaggaagtcttggctaagatccaagagcgtttcgatgtcaaaatcgctgaattcccagaagaaggcattgatccgtccacttatttgaataattaataaaggaaaaaagatacgtttttatatagattatataaagattttgtattattcaaacgaacaaaacaaacaaaaaaggggaagtggaaaaaaattagcagttatagcgaa

SEQ ID NO: 645 - DNA, 908 bp, Saccharomyces cerevisiae
aaactcgtggtagtagataaagcaaacaatgttgattactgagacctttcatgatgtgcagacatcatacggcaccactctgcgtatatacgtatattctcctaagattgcaggctatccacaagctaagtttcctggggtgattctgtacagtgaaatttaccaagtgacgggtccggttcgtcgttttggtcaaagaattgcgtctgaaggttacgttgtggtggcacctgccatataccacaactttatgggccctgaagcgttgccctatgacgtgcagggtaccgatattggtaacgagtacaagatcaagaagccgttagaatcatacgatgaggacaacaaactgtgttgcgatctacttttccagttaccccaattcgatggtaagagaattggttccacaggaatgtgtttaggtggccatttggcttttagagcgctcctggacaaaagggttacctgcgcaacctgcttcttccctaccgacatccattccagaaccttaggtcttggccagaacgataactctttggaacgtgtttcgaaggagttgggtaataaccaagaaatggttttgatcttcggaactgcggacacccatgtcgacccgcaaggccgcgatctaatcagaaagaccctcagagaccacggagtaaagtttacgttcttggaaatcctggctgcccagcatgcgttcatccgtgacgagttcagcaagggcaggttcgactccgctatcactcaaagttgtctcggcttcttgttcgagcagttcaacagaaaattgagaatcgatttgggtgaatttgtcgatgacaatacacctttggagcacgtttgttaagatcttcactctgtacacgctatatactaaataacaataagaaaaagaaaaagaagca

SEQ ID NO: 646 - DNA, 588 bp, Saccharomyces cerevisiae
cctaaaacaatggcaaatactggctgtttatcaccaggtgcatttttatcaaaggttccagaatttttccagactgcgaatgaaaaacatataactgtgcgtctaacggccaaaagactcatagaacacgatcctgtggaagggaatcttgaatttgattctaccaaccatcctgactatgatgtatctaaaaaggcttctgaaatttcagttagctcaagatctgacagagaatacccactattaatcagaatgtcttatggctcgcatgacaagaaaacaaaatgctcaacagtggtaaaagcaagtgagttagatcaattttggcaagagtattcatctgtatttaaggggggcatgcagaatttgatcaagaagaagaaaaagaagagtaagaacggtaccatcagtaagacaggaaagaaaaacaaggtagcgaagaaaaactgatgcacgtgacacttgagtcaaaaggcatgtgcgcctcttgttatctttggatgtgtagattaaaggatggcaacgtagatataaaagattaattgcataaagttgtgtagatataaatttaactaaactttagaataa

SEQ ID NO: 647 - DNA, 2500 bp, Saccharomyces cerevisiae
atgaataaagagcatttgctgaaggtggatcccatccccgatgtgactattaaacgcggccctttgaggtcttttctcataacaaaaccctgtgataatttgagttcattacgaacagttacttcatctaaggaaaagcttctagttggctgtttgctgatatttactgccatcgtaaggctacacaatatctccctgccaaatagtgttgtttttggtgaaaatgaagttggtacatttgtttctcaatacgtgaacaacatattcttcaccgatgttcatcctcctttagtggcaatgctatatgcaaccgtgtcctctgtttttggttataaagggcttttcaattatgggaacattggtactgaatacacggcaaacgttccatacgtcgcgatgaggttcttttctgctactttgggcatcgtgtccgttttggtattatacttaacgttacgagtttctggcgtgaaaattgcggtagctgccatttgtgcagtatgttttgcaattgaaaactcctttgtaacgttgtctcgtttcaccttgatagagggaccctttgtttttttcatggcatgtgcagtttatttctttagaagatcggaactttatttgccaaattcatgtaaagcaaacaagtcattacttgctgcgagcattgcattgggatttgcagtttcttcaaaatgggctggcctcttcaccatcgcatgggctggtattattgtcctttggagagtatggttcatgattggtgatttgtcaagacccattggttcttctatcaaatatatggcgttccagtttacctgtctattagctattcctgccttcatctattttctcattttcagcgtgcatattaagacattaaacgtgaatggtattagtagtagcttttttcccgctgagtttagaaaaactttaaaatacaacaacgttattaaagagactgtggcagaagttgcagtgggttccgctgtttcactgaatcatgttggaacggcaggtggttacttgcattctcatcttcacaattatccggctggttccatgcaacaacaagttactttgtatcctcacatcgaccaaaataacaaatggattattgagctggctgaacatccaaatgaaaatgtcacaagtttccaaaatttaaccgacggtaccataattaaattaagacagcttaagaacggctgcaggttacactcacatgaccacaaacctccagtttctcaaaatgcggattggcaaaaagaggtgtcatgttatggatacgagggcttcgaaggtgatataaatgatgattggataattgaaatcgataaaaagagatcagagccgggacctgcccaggaacatattagggctattgaaaccaaatttaggctgaagcattatctaactggttgttacttattttcacatcctgaaaagctacctgagtggggattcgggcagcaggaagttacgtgtgcatactttgcaagggaagacttaacttcatggtatattgaagaaaacgaaaacgaaatttctttgccaaatccagagaaggtttcttataagaaaatgagcttttggcagaagtttgttgctatccacaagttcatgttctaccttaacaattatatggatactagtcatgcctactcatctgaaccaaagacttggcctcttatgttgcgtggtattgatttttggaatgaaaatggcagagaggtgtactttttaggtaacgctgttttgtggtggtctgtcacagcatttatttgcacgttcatcattggagtggctgttgagcttcttgcttggaaattaggtgtgaatattctacgggataagcacatcataaatttccactatcaggtctttcagtacttattaggctttgccgcccactatttcccttacttctttgtggggcaaaagttatttttgtacgattatttgccggcctattattttggtatcctagcatttggtcatgctttagacctgatttcaacctatatttctaacaaaagaaacaatactggatatatagtggtggctattttcatggttgtatgtttctatttcttcagcgagcattctccacttatttatgctactggatggtcgagtaacctgtgtaagaggtccaagtggttaggaagctgggacttttattgcaattcactattactatccgatagccactatgaattaaacgctgaatcatgatccatccacccgtattcagattggacattcgtttagcaaaagatttaaaaactacatttgagctaaactgcgggaaagatctacgtacatatggaaaagaaccagatgtatatgaaaaaagagttcataaccggtcacaatgcaacactttcctatcttgttctttcgttgaatttcactaaacaactaacgaataccaaaaaaatgatccgtattaagtaatgtatatacatatatattgtcaaatacaacaagatatttaataaac

SEQ ID NO: 648 - DNA, 2632 bp, Saccharomyces cerevisiae
caagacaaacaggtgcattgttaaagcgaggtagtatcagaagagcctatcaagaaacagctaacagctacaagcacggtcatgtcggaagagaaaacgtacaaacgtgtagagcaggatgatcccgtgcccgaactggatatcaagcagggccccgtaagaccctttattgttaccgatccgagtgccgaattggcctcgttacgaaccatggtcactcttaaagagaagctgttagtggcctgtcttgctgtctttacagcggtcattagattgcatggcttggcatggcctgacagcgtggtgtttgatgaagtacatttcggtgggtttgcctcgcaatacattagggggacttacttcatggatgtgcatcctcctcttgcaaagatgttgtatgctggtgtggcatcgcttggtgggttccagggtgattttgacttcgaaaatattggtgacagctttccatctacgacgccatacgtgttgatgagatttttctctgcttctttgggggctcttactgttattttgatgtacatgactttacgttattctggtgttcgtatgtgggttgctttgatgagcgctatctgctttgccgttgaaaactcgtacgtcactatttctcgttacattctgttggacgccccattgatgtttttcattgcagctgcagtctactctttcaagaaatacgaaatgtaccctgccaactcgctcaatgcttacaagtccttgcttgctactggtattgctcttggtatggcatcttcatccaaatgggttggtcttttcacggttacatgggtgggtcttttatgtatctggagactatggttcatgattggggatttgactaagtcttccaagtccatcttcaaagtagcatttgccaaattggccttcttgttgggtgtgccttttgccctttatctggtcttcttttatatccacttccaatcattaactttggacggggatggcgcaagcttcttttcgcctgaatttagatctacactaaagaacaataagatcccccaaaatgtcgttgctgatgtcggcattggctccattatcagcttgcgtcatctctctaccatgggcggttatttgcattctcattcacacaattatccagctggttcggaacaacaacaaagcactttatatcctcacatggatgccaataacgattggttgttggaactttacaacgcacccggcgaatctttaacaacattccaaaacctaaccgatggtaccaaggtcagactattccacactgttacaagatgtagattacactctcatgaccataagccacccgtttcagaaagcagcgactggcagaaggaggtttcttgttatggttacagcggattcgacggtgatgctaatgatgactgggttgttgagattgataaaaagaattctgctcctggagttgcccaagaacgggtcatagctttggacacaaagtttagattgagacatgctatgacaggctgttatttgttttcccacgaagtcaagttgccagcttgggggttcgaacaacaagaagttacctgtgcctcctccggtagacatgatttaacattgtggtacgttgagaacaacagtaacccattgttaccagaagataccaagcgtatttcctataaacctgcaagcttcatttctaaatttattgaatcccataaaaagatgtggcatatcaataaaaatttggtcgaacctcatgtttatgaatcacaaccaacttcatggccattcttgctacgtggtataagttactggggtgaaaataacagaaacgtctatctattaggtaatgcgatcgtatggtgggctgtcaccgctttcatcggtattttcggattgattgttatcactgagctgttctcgtggcagttaggtaaaccaattttgaaggactccaaggttgttaacttccacgttcaggttattcactacttattgggttttgccgtccattatgctccatctttcttaatgcaacgtcaaatgtttttgcatcactacttacctgcttattatttcggtattcttgcccttggccacgccttggacataatagtttcttatgttttccgcagcaagagacaaatgggctacgcggtagtgatcactttccttgctgcttctgtgtatttcttcaagagcttcagtccaattatttacggtacaccatggactcaagaattgtgtcaaaaatcgcagtggttgtctggttgggactacaattgtaacacatacttttcttcattagaagagtacaaaaaccaaaccttgactaaacgtgaatctcaacctgccgccactagtacagttgaagaaatcactatagaaggggacggtccgtcgtatgaagatctcatgaacgaggatggcaagaaaatctttaaagacacagaaggtaatgaactagatccagaagttgtcaaaaaaatgttggaagaggagggagctaacattttaaaagtagaaaaaagggctgttttggaataaatttcccagtactctccacatttttatgtaaagtcttctataagctctcgagcgtataattaaaaacgaaaatagacaaaaaaaacatcatgaataa

SEQ ID NO: 649 - DNA, 1046 bp, Saccharomyces cerevisiae
gttacttaaaagtcatcaaaaaaaatattcccggcctcagagcgaacatatgaaagtgaatatggagtacacaaaggaaaagaaagttggtgagggtacttatgcggttgtttacttgggttgtcaacactctactggaagaaagattgctattaaggagatcaaaacatccgaatttaaagatggtttagatatgtcagctatccgtgaagttaagtacctccaagaaatgcagcatccgaacgtcatagaactaatagacatatttatggcttatgataatttaaatctcgttctggagttcctaccaactgatctagaggtggtaataaaagacaaatcaatactgtttacaccagcagatattaaggcatggatgcttatgactttgaggggcgtgtatcattgccacagaaatttcattttgcacagggatctgaaaccaaacaatttattattttcacctgatggccagataaaagtagcagatttcggtctagcaagggcgataccggccccacatgagatactgacaagtaacgtcgtaacaagatggtatagagcgccagaattgttgtttggagctaaacattacacatcggctattgatatctggtcagtaggcgttatattcgcggaattaatgctaaggataccttatttaccaggacagaatgatgtcgatcaaatggaagtaacgttcagggccttagggacacctacagatagagattggcccgaagtttcttcctttatgacgtataacaagttacaaatatatccgcccccttcaagagatgaattgaggaaaaggttcattgctgctagcgaatacgccttagattttatgtgtggaatgctaacgatgaacccacaaaagaggtggaccgctgttcagtgtttagaaagtgattatttcaaagaattaccaccaccaagtgacccgtcttcaataaaaatacgtaactgatatgattttataaaatttgtagaatctgtgttattgacattagatgtatcctcaacatatacaaataaacttcttg

SEQ ID NO: 650 - DNA, 4464 bp, Saccharomyces cerevisiae
ttaacgaacgttacaaactctataccttttttttaccagcaaaatggttggaggtgctctcatctgcaaatatttaccacgcgaagagcaactaaagcttatatcagacttgattcagaatgacagcttagaagaggtgctggagttgattgaaacttcgccactggatataacgacggacagcaacattgaaacaccaatctttgaaaaaattactgagcaggtcattgcgtatgctagtatagacggtgaagccagggaaatgtttcgctcttcgagggctgaaatgaacaaggcgctaagaacttctgcacaattactatgttgtttacccagtgtatggcataaatttcaggtgtggatgagctaccggttaaatgacatcattagcgaaaactataaacatctcttcaatgacaactttggaaaaaagattgtacaaccatttttcgattcttttgctgaggaacaaaacgctaatatcaagcatgaaaatctgcacttagatatccttagcctgcttcactacttagaagttgtatatttatttgacgaatgtaagaatggtatatcgtccaaatgcctagattttatcattgttccattgttaggctgtaattcggaagagattgctgattcctgctccaagttaatgagatggcatatcaaatatttatcgaaatgctgcaataccgatagtaactttgataagctcatttggacatttatcaaacaattgtacgctgaaggctcccaacaagcttggaagcaaaagaacagtttatcttttctcctaagattccttttagcagcagagttgtctcctgaacttattacttatataaagaccgatgcttattggaggcacattcaaacagagctggataatgatgtgcacgaacacagaaaattggcactctcaattcttaaattaacaattcaaaaactgtcatctcatggtataacattgcaaacaacattttataaatgcaatgatctagcaaatatcgagatgctgggtagctggaagaaattcaccaccttatatgaaatgattgctctggacacatcattgaatcaaatacaagcggccaaacaagatataataaaaatttttgataacgagcatttacaccatagttggggccttatcttgctttctacgggattgaaatcatcaatggagagtgtcagaaaatacatgatgacgttaatgttctcgattacaaatatgtcagcattctcttcaaacttgccattattgacaaaaactcttcttccagctgcaatgtccgctcattattttgatgtaaaaggtgtcagttgtccccatggtgaaaaactttcattatttgtcaataacttactttcccaaacaacagaaggcatatcagatatattatttgaaattttgaaattattggtggaaaaagggacctcttttgacccttctaggatatacttgtcctacggtatcttagttttcttccagaataacaaacagaaaacaatcaactctgaccatttgagtctgatcaggaaattgtacgattttgcagccgaagaagaggttctcgaaactacaatccaaacaatttacttgaagttcttactgtacattgatccatctgtctccgcatctgaattattgtttacattagtttcacacattaagttaaagggagggacatacaaatatgttgagcctctttttgaagattatagggatcttgccgtttctcactttgacgatttgcaagcgaaagaaaacttgacgacaaacatcggaaaggatactatttttgacctcttagcatctatcatcttcgatttcaaggatattgatattactcccgattttttaattgaagttgcgaagtcgaagcaagatatacccgtttacacttcaaaggcagttacttttctaactcagctactttcaggcgaaccttcgaacggttatacctatgaaaatgcaaccgctttgttgtcttacccaaattttacaatatctacatggaaatccatcaatgtgaataatttatttaagtcggtaatggaaaaattttcgcttgataaattcaagttctttgctgaaatttaccagaagacttatgaatgtaggttcgatacaatcgagctaaattttaatgaccttctgagcctatatgaaatggttaaaaagtctgccaatcagtgttcaagagagagctttaaagtgaaggacagcgcttattcttcttactttgaacttttaaataccttcctgaaaacatacgccttaaatcgtgactcttctgaaggaaatgatgatgagcttcacatactactacgcttagttgacgagaatattaacaaagataatgggaattatctggggaacctggcagtctgtaaattattgtactttatcatagattcctacatccattgctccacatctgtttctgatgatgatattttcatagtgaaattcatttttgagaaattttcgtttatatgggaatgtattaatagtgaaagattagttttgaaggaaagggatctgcatttgatgctaattaagggattatttcatcctgtgatcctgtactttggatcaaatcagtatatcgatactttgacctcgaagttggaggaacatgcacaaacgattatatcattgagttattccagaagaagcctactccctcttctcggatcacaactcagagtatttatgaagttttatgggaaattgttaagagaagatgtcaactattggtggttgattaacattatagtaggtgttttcaaacagccgcaaatggatgtcaacctttacaagctcaaacctgttatttccagcctatttgaccacaaactgaacaattattacataaaaggcgatgaactttatgaaaaggtgtacggacccgacgaaatattggctagagtatctattattgattctattttatatgcaaatgatcagttgaaaattcgattaatcgaaaaagttactgaaaaaacaaacgcactttatgctataaagagaaccgacggtgccgaagcgttacagaggttgttgcagtggcaattgttattattatcactactaaccaccaatgaaaaaaaattaagcgaaactagcatgatcagaattctaaagagtatcgaggatgaaagttcaccactagtaagagtatataaagaatggttcatttcctcaaaggttgttgattattataaaactggcaatccaaaatttgctgaggattatctcttctcattgctggaggatcatagcaaaccggtgtttgtagttagcgcagaaaaaatatgctttatggtgttgaaagatttaagaaacgacgaaaagaaatatggatttacacagttactagacagattcatttgcacgttagttcctaacgcagcttcaaacaaacctctggtaaggcatttttctaattctctaataatttcattatggcctacattcaaagcctacctatcggatcacacactgagaaacatcattgagaacttatattccaatgccaaaaagactcaaatatttggtcaatatcgtgccggggatgccaacatatgggatctgaagggtgataggaaattaacgaacatgtttggtggtgtgctcaaaaaagttaccgaccatgattgcccgtacatttctgagtctgttttcgaaaaatatttgcaggagaaagatattgttcctataggtaccgatgaaaggtccttatggcttgataaaagagacaccaatacggaatctgttaacaacgcgaacatctcctgtgacacttctccactgcaaacaaaaagtggagcttgggaaaccgttctggatctggacaataaaaaatcgaatgatgtcgttacacgttctgaattgattgtggtatcttcattagttgataagccgccaaacctgggaggtatttgtaggttatgtgatgttttaggtgtgggactgcttactgtacaagacatcaaagtcaaaaaccatcctcaatttaaaaatgttgctgtgactgctgatagatggatgcccatggaggaagttgccctagatgagattgcaagtttcatgaaagagaaaaagaaggaagggtacacattaattgggctagagcaaacggataaatcagtgaagctagacaacaatttccaattccctaaaaaatcattgatcttgctaggaaccgaagcattcggtattccggggactttgttaagcgaattggatttatgtttagagattcaacaatttggtgtgatcagatcaatgaatattcaaacggcaaccgcagttatcgttcattcctatacagttcaacacatgtaagaatcaggtttcattcccacttttgttaaccatgaagtttttagtatgtaaactaatttgtctttttatctaattgtgactatatttttataaattctccagtgatcgta

SEQ ID NO: 651 - DNA, 2289 bp, Saccharomyces cerevisiae
cctgaaaaccaattgagtgctacttcgaagtaaaatacatagccatttcaaatggaattatcccctacttatcaaacagaacgcttcacaaagttctcagacactttaaaggaattcaaaattgaacaaaataatgagcaaaaccccattgacccgtttaacatcataagagagtttcgctcagccgcggggcagcttgcgttagatttggctaattctggagatgaaagtaacgtcatatcttctaaggattgggaactggaagctagattttggcatttagtagaactgttactggttttcaggaacgctgatcttgatctagatgaaatggaacttcatccttataactcgaggggtttatttgaaaagaaattaatgcaagacaacaaacaactttatcaaatatggatagtgatggtttggctcaaagaaaatacatatgtgatggaaagacccaaaaatgtaccaacttcaaaatggttaaatagtattacttctggaggattgaaaagctgtgacttggattttcctttacgagaaaacactaatgtcctcgatgttaaagataaagaagaagatcatattttcttcaaatacatttacgaactaattttggccggtgcgattgatgaagcattagaagaagctaaactttccgacaatatttcaatttgtatgatcctgtgtgggatacaagagtacttaaaccctgtcattgatacgcaaattgcaaacgaattcaatacccagcaaggtatcaagaagcactctttgtggagaagaacagtttacagcctttcgcagcaggccggtttggacccttatgaaagggcgatatacagctatttgagtggcgctattcccaaccaagaagttctgcaatattcggattgggagtctgatctgcacatacacttaaatcaaattttacaaactgaaattgaaaattatcttttggaaaacaatcaagtaggtactgatgaactgattttaccattaccttcacacgcgctaactgtacaagaggtgcttaatagagtggcttcaaggcatccctcagaaagtgaacatccaatcagagttttaatggcatctgtcatactagattctttgccatcagttattcattcatccgtggaaatgttgcttgatgtcgtcaagggaaccgaagctagtaacgatattatagataagccttatcttctgaggatagttacacatttagccatttgccttgatataattaatccaggttctgttgaagaggttgataagtccaagctcattactacgtatatcagtcttctgaaattgcaaggcctttatgaaaatattccaatatatgctactttcctgaatgagtcagactgcttagaggcatgctctttcatattgtcttctttagaggacccccaagtaaggaaaaagcaaattgagacaataaactttctaagattacctgcctcaaatattttgagaagaaccacacagcgtgttttcgatgaaaccgaacaagaatattcaccatctaacgaaatttccatatctttcgatgtaaacaacattgatatgcacttaatatatggcgtggaatggcttattgaagggaagctttatgtggacgctgtccactctatcattgccttatcgaggagatttttgttaaatggccgcgtaaaggctctcgaacaatttatggagagaaataatattggagaaatatgcaagaattatgaattagagaaaatagccgataacatatcaaaggatgaaaatgaagatcagtttttggaagaaataactcaatatgagcatttgataaagggcataagagaatatgaagaatggcaaaaatccgttagcttgttaagctctgaatcgaacattcctactttaatagagaaattgcaaggtttttcaaaggatacatttgaattgatcaagacatttttagtagatttaacttcctctaatttcgcggattcggcagattatgaaatcctgtatgagattagagccctatatactccatttctactgatggaattgcataaaaagttagtggaagccgcaaagttgttaaagatcccaaaatttatttcggaagccctggcatttacctcattggtcgctaatgagaacgacaagatttatttattattccaatctagtggaaagttaaaagagtatctggatctcgttgctcgcacagcaaccctttcgaactgatcaattaatgtattgcagaataagtttatattttaagtaaacagcaataattttatg

SEQ ID NO: 652 - DNA, 776 bp, Saccharomyces cerevisiae
acacttacaaatcgttacgtactactgaataccagaaagatagtatttcaaaaaaaactaagcgagaagatagagtgtagcaatgattaagcggtctctcgcaagtttagttcgagtcagctctgtaatgggcagaagatatatgatagcagcggcaggaggagaacgtgccagattttgtccagctgtaacaaataaaaagaatcatactgtaaatacttttcagaagagatttgtagaatcctcgacagatggtcaagttgtgcctcaagaagtgttaaacttaccgcttgaaaaataccatgaagaggcagatgactacctagaccatttactagatagcttagaagaactgagtgaggctcatccggattgtatacctgatgtagagctaagccatggcgtaatgacattggaaattccagcttttggaacgtatgtaataaacaaacagcctccaaataagcaaatttggttggcatcaccattgtccgggcctaacagatttgaccttctcaatggggagtgggtttcgttaagaaatggcacaaagctaacagatatacttactgaagaagttgagaaggccatttctaaaagccaataagtgcacttatccatcgactctcttatatttatttaaacacttgtaacgcatccaatctatttcatagttagagtctctcttccttgttattgatatgatttttcttttgtaccgtgtgtgtatgtatgtatgtatgaacgtactactaagcttcaacgtcactctataa

SEQ ID NO: 653 - DNA, 485 bp, Saccharomyces cerevisiae
tctccccaataaaggtgccacactgagcagagacagatagggacgcgcatcatgtgttgctactgtgtttgttgtaccgtttctgactttatactgtatattgttgcgttttttttccccccagctgcagtccttcttcgatctgggccttgttcatctgatttcctcctgaatgtattgctaacgctactgggatttttgcccggtatgttacacgcattctactacatcacaattacaagtcctttaaggaacgctgaatacgtctattattaccagcaaggctgggtggatagcgaaagaaacgttccttcgaatcgtcctcaaaactcgcagaccccccaaaaccgcccacaacaaggaagctccgctagaaacgtatacccgagcgttgaaactcctctgttacaaggcgcagctccccatgacaacaaacagtctctggttgagtctcctcctccttatgtgccatgatgaagctacag

SEQ ID NO: 654 - DNA, 1068 bp, Saccharomyces cerevisiae
tgtaaacggttgtgttaccctaaagaaacggaggtcagttaacaacacttttacagatgtcatttcaccaacagttctttaccttgaataatggaaataaaatccccgcaatcgccatcattgggacaggtactagatggtataaaaacgaagaaacggatgctaccttttcgaacagtttggtcgaacagattgtttatgctctgaagttacctggcattattcacattgatgctgctgagatctacagaacatatccagaagttgggaaggcacttagcctcaccgaaaaaccaagaaatgcaatattcttgacagacaagtactcacctcaaatcaagatgtcagattccccagcggatggactagatttagctttgaagaagatgggcactgactatgtcgatctataccttttgcatagcccatttgtttccaaagaggtcaacgggttaagtttggaggaagcctggaaggacatggagcaattgtacaaatcaggtaaagctaaaaatatcggtgtttccaactttgctgtggaagacttgcaaagaattctgaaagttgcggaagtcaagccccaagttaatcaaattgagttcagtcccttcttgcagaatcaaacaccagggatctacaaattttgccaagaacatgatatattggtagaagcatactcgccactaggtcccttacaaaagaaaacagcacaagatgactctcaaccgtttttcgaatacgtgaaagagttatccgagaaatatatcaaatctgaagcccaaattatcctacgttgggtgaccaaacgtggcgtgttgcctgtaaccacctcttccaaacctcaaagaatttctgacgcgcaaaatttattctctttcgacttgacggctgaggaagtcgataagataacggagttgggcttggaacatgaaccgctaagattgtattggaataaattgtacggtaaatacaactacgctgctcaaaaagtataaataccggataatttatgtacgagtcatatttgttttgtataactttattaatcgactttttttgtcaggttta

SEQ ID NO: 655 - DNA, 1500 bp, Saccharomyces cerevisiae
ctaaacttaaaaagcagtcctaaatatatagttgacttcgacgcatatcattcatcggctgctgatagcaaataaaacaacatagatacaatggatgcaactaccccactattaactgttgcgaacagtcatcccgcccgcaatccaaagcacactgcatggagagcagctgtgtatgatttacagtatattttgaaagcgtcacccctgaatttcctattggtatttgttcctttaggtctgatttggggacacttccaactatctcatacactgacatttctttttaatttcttggcaattataccgttggcagctatcttggctaatgccacggaagagttggctgataaggctggtaacaccattgggggactgctaaatgctacttttggtaacgctgtggaactaattgtttctatcattgccctgaaaaaaggtcaagtgagaattgtgcaggcctcgatgctaggtagtcttctttctaatttgctgttagtgcttggattatgcttcatattcggtggatacaatagagtccaacagacattcaaccaaaccgccgctcaaacaatgtcctcattacttgccattgcgtgtgcatccctactgattcccgctgcctttagagccaccctacctcatggcaaggaagaccacttcatcgatggaaaaatattggagttatccagaggcacctctattgttattctcatcgtttacgttttgttcttatatttccagctagggagccatcacgccttgtttgagcaacaagaagaagagaccgatgaagttatgagcaccatttccaggaatccacatcactctttgagtgtcaagtcatcattggtgatacttctaggtacaactgtgatcatctctttttgtgcggattttctagtcggtacgatagacaacgttgttgaatctaccgggctatctaaaacatttataggtttgattgtcattcctattgtgggtaatgccgcagagcatgtcacttcagtcttggtggccatgaaggataagatggatctggcgctaggtgttgccatcggttcctctttacaagttgccttatttgttacaccattcatggttcttgtgggctggatgatcgatgttccaatgacgctaaatttctccacttttgaaaccgctactctttttattgctgttttcttatccaattacttaattctcgatggtgagtcaaactggttggagggtgtcatgtctctagctatgtatattttgattgcaatggcatttttctattatccagacgaaaaaacccttgactctattggaaatagtttatgagtaagaacagtagcgcagaaattcaccattctctttttttttatattttatcttcttcgtaattctatcgatggaccaatacaaagatgattatgactagcaagtcattattatgatcgttatattatacatattatgtttacgcaactaatttttatatcgaattttatctga

SEQ ID NO: 656 - DNA, 433 bp, Saccharomyces cerevisiae
aaacaactaagaagaaaatgtctgactctattatttcctttgctgctttcatcctagctgatgctggtttggaaatcacctctgacaacttattgactatcaccaaggccgctggtgctaatgtcgacaacgtctgggctgatgtttacgctaaggctttggaaggtaaggacttgaaggaaatcctatctggtttccataacgctggccctgttgctggtgctggtgctgcttctggcgctgccgctgctggtggtgacgctgctgctgaagaagaaaaagaagaagaagctgctgaagaatctgacgacgacatgggtttcggtttattcgactaaacatacaaggaaagtcattttttctgcaacgtttttttaccctttatgtatatatatttacatataaaataaacctctaatcaatcagtatttaa

SEQ ID NO: 657 - DNA, 1479 bp, Saccharomyces cerevisiae
acacatttaaaagtgcaacgacaacccaagtaattgtatactttaacaaaccatgtctgaaaataacgaattccagagtgtcaccgaatcgacgactgctccaaccactagtaacccatatggcccaaatcctgcggattatctatccaatgttaagaatttccagttgattgattcaacactaagagagggtgaacaatttgccaacgcattcttcgatactgaaaaaaagattgaaattgctagagccttggatgatttcggtgtggactacatcgagttaacctctcccgtagcatccgaacaatcaagaaaggactgtgaagctatatgtaaactaggtttaaaggccaagatccttacacacattcgttgtcacatggacgatgccagagtcgccgtagagactggtgtcgacggtgtcgatgttgttatcggcacctccaaatttttaagacaatattcccacggtaaggatatgaactacatcgccaagagtgctgttgaagtcattgaatttgtcaaatccaaaggtattgaaatcagattttcctctgaagattccttcagaagtgatctcgttgatcttttgaacatttataaaaccgttgacaagatcggtgtaaatagagtcggtattgccgacacagttggatgtgccaacccaagacaagtatatgaactgatcagaactttgaagagtgttgtctcatgtgacatcgaatgccatttccacaatgataccggttgtgccattgcaaacgcctacactgctttggaaggtggtgccagattgattgacgtcagtgtactgggtattggtgaaagaaacggtatcactcctctaggtgggctcatggcaagaatgattgttgccgcaccagactatgtcagatctaaatacaagctgcacaagatcagagacatcgaaaacctggtcgctgatgctgtggaagttaacattccattcaacaaccctatcaccgggttctgtgcattcacacataaagcaggtatccatgccaaggccattttggctaacccatctacctacgaaatcttggaccctcacgatttcggtatgaagagatatatccacttcgccaacagactaactggttggaatgcaatcaaatcaagagtcgaccaattgaacttgaatttgacggatgatcaaatcaaggaagttactgctaagattaagaagctgggtgatgtcagaccgctaaatattgatgatgtagactccattatcaaggacttccatgcagaattgagcaccccacttttaaaaccagtaaataagggtacagatgacgacaatatcgatatttccaatgggcatgtttctaaaaaggcaaaggtcaccaaatagtttcattatatatatagtacacatatttcaaacatacacatactgggcgttattaggtgtttaagtactggcgattaccgtaataaaattactatttacgtcaa

SEQ ID NO: 658 - DNA, 2817 bp, Saccharomyces cerevisiae
acatctagaaaaactagggcattaggtaaagtaccccagcagaacttcactttacaacgcaattgattcatatcactgctcttttatattgtcctttttctcttttagagcttttcatccgcatcttctaacttctgtgcacccctttcattgttgattacattttacctcagttacacatttcttttagcaattcgacattgcttctacttaccgataaataagcgtacatttttgagtcttgaaaggattcttacatatacctaaacaaagaataacaacaaaatcgcaagcagcaaagcatgtctgagactctgcctagatctgatgatttagaggccacttggaactttatagagccaggaattaaccaaatactgggtaatgagaaaaaccaagcatccacgtctaagcgagtttacaaaattctttctccaaccatgtatatggaagtctataccgcaatttataactactgtgtgaacaaatcacgctcgtctggacattttagtactgacagtagaactggccaatcaacaattttggttggcagtgagatttacgaaaagttaaagaattatttgaagaattacattttaaattttaagcagtctaattcagagacctttttgcagttttacgtcaagcgctggaaaaggtttacaataggtgccatttttttaaaccatgcattcgattatatgaatagatattgggttcaaaaggaaagaagtgacggcaaaaggcatatttttgatgtaaacaccttgtgcttgatgacatggaaagaagtcatgtttgatccgagtaaagatgttttaataaacgaattattagaccaggtaaccttgggaagggaggggcaaataattcaaagaagtaatattagcactgccataaagtctttagttgcactaggtatcgatccacaggatttgaaaaagttgaacctaaatgtctacatccaagttttcgaaaagccatttttaaagaagactcaggagtactacacgcaatatacaaacgattatttagagaaacactcggtaactgagtatatttttgaagcacatgaaatcatcaaacgtgaggaaaaagcaatgacaatatattgggatgatcatacaaaaaaaccactatccatggcattaaacaaggtcttgatcacagaccatattgaaaagttggaaaatgagtttgttgtccttctggatgccagagatattgaaaaaattacttctttgtacgcactaatacgcagagactttacattaatcccaagaatggcttcagtgtttgaaaattatgttaaaaagacaggtgagaatgaaatttcgagtctactggcaatgcataaacacaatattatgaaaaacgaaaacgcaaaccctaaaaaactagcactaatgacagctcactccctttctcctaaagactatatcaagaaattactggaagtacacgatatattctctaagatttttaatgaaagtttccccgacgacatacctttagctaaagctctagataatgcgtgtggtgctttcatcaacatcaacgagttcgcattacctgctggatctccaaaaagtgccacctcgaagacttccgagatgctagctaagtacagtgatatactattaaagaaggccaccaaacctgaagtggcaagtgacatgtcagatgaagatattataacaatattcaaatatttgaccgacaaagatgcgttcgaaactcattatagaagacttttcgccaagcgtttaattcatggcacttcaacatcagcagaagacgaagaaaatattattcaaaggctgcaagcggcaaatagtatggaatatacaggcaagataactaaaatgtttcaagatattagactttccaagatcttggaagacgattttgctgtcgccctgaagaatgaaccagattactctaaagcaaaatatccagatctacaaccatttgtattggcagaaaatatgtggccattttcataccaagaagttgaatttaagctacccaaggaattggtaccatctcacgaaaaattgaaggagtcatacagccaaaagcataatggtagaatattgaagtggctatggccattatgtcgtggcgaattgaaggcagatattggaaaacccggcaggatgccgttcaactttacggtaacactgtttcaaatggcaattttgctactatataacgatgctgatgtattaaccttagaaaatattcaagagggcacgagcttaaccattcagcacatcgcagcggcaatggtaccattcatcaaattcaaactgattcaacaggtcccaccagggctagatgctctcgtgaaacctgaaacacaattcaagctatcacgtccttataaggcgcttaagaccaatattaatttcgctagcggagtcaaaaacgacattctgcaatcgctatccggtggaggccacgataatcacggtaataagttaggaaacaaacgcttgacggaagacgaaagaatagaaaaagaattgaatacagaaaggcagattttcttggaagcttgtattgtgagaataatgaaagcgaaaagaaatctgccacatacaacattggtcaacgaatgcattgcgcaatcacaccaaaggttcaatgcaaaggtttctatggtcaagagagccatcgatagcttaatacaaaagggatacctacagaggggagacgatggtgaatcgtatgcttaccttgcttaatcatctttgaaggcttgtgctgatcgaacgaagcaaatcctacgagtaaatacataagcgtatacat

SEQ ID NO: 659 - DNA, 528 bp, Saccharomyces cerevisiae
cacgataaagaaccaaataggactaaaaatggccggcgttaaagcttacgaactaagaaccaaatccaaggaacaattagcttctcaattggttgacttgaaaaaggagttggctgaattgaaggtccaaaagttgtccagaccatctttgccaaagatcaagaccgtcagaaagagtatcgcctgtgtcttgaccgtcatcaacgaacaacaaagagaagctgttagacaattatacaagggtaagaagtaccaaccaaaggacttgagagccaagaagaccagagctttgagaagagctttgaccaaattcgaagcttcccaagttaccgaaaagcaaagaaagaagcaaatcgctttcccacaaagaaagtacgctatcaaggcttaatttcgttagattatcattttaatatttgatttttggatatagtttaatttgtattttttaagaacaccaaacggcaatttattttattagtgatctactagctaaatcaatatactacattaaatttttatttgcca

SEQ ID NO: 660 - DNA, 1072 bp, Saccharomyces cerevisiae
tgtatgtaacgagtttcattaggagggatagacgcacgacactatctggtactacgtgttatatcatacccagaaggaaggactctctccactgaacggtgggatgagttcctaaaggcgcccctttatttgatcaggaagccgtattgattatctaatagggcctagttatcctaattgtggggagtcgagcagtacggctctgatgtttttcgaacgaagataaggagttgacatacaaagtcaacagaagttcttcttgttagcgtctctgtgctcaatatctctctttttttctttaagtagtaattactaacatcagccaaccaatagagataaaaaaaaaaggaattaagatttcatagagaaaagatgggtctatacgcttctaagttattcagcaatctttttggcaacaaagagatgcgtatacttatggttggtctagatggtgccggtaagaccaccgttttgtacaagttgaagttgggcgaagttatcactaccattccaaccattggtttcaacgttgagactgtccaatataagaacatttccttcactgtctgggacgtcggtggacaagacaggattagatctttatggagacactactacagaaacaccgaaggtgttatttttgtcatcgattccaacgatagatcgcgtattggtgaagccagagaagtcatgcagagaatgctgaatgaagatgaattgagaaatgctgtctggttagtcttcgctaacaaacaagatttgccagaagccatgtctgctgctgaaatcaccgaaaaattaggtttacattctattagaaaccgtccatggtttatccagtctacttgtgcaacctcgggtgaaggtctgtacgaaggtctggagtggttaagcaacaacttgaagaatcaatcctaatctaaatctgtatagaacgtttagtcatgcggaccttgtgtgttttgtttctagattgttttatttttatgattgttgaagatataaaccactgtatagttgtataagataggataatgatggtgcactgaaaataaacttactagctctttaa

SEQ ID NO: 661 - DNA, 2522 bp, Saccharomyces cerevisiae
acgcacatataagtatattttactttccttctcccttcgtcagtttttcttttgctgtaatatattgttctcaaaagttgtttggtatacaaaagtgcaaggtttttactggttgttacaggttcagagttccaataaagaagatattagaacgatcttatcaatattatccaatttcaactaatatgaatgtattagtctataatggcccagggactacgccaggatcagttaagcatgctgttgaaagtttacgtgactttttggaaccctattacgccgtcagtactgtcaatgttaaggtattacagacagaaccatggatgtcaaagacctccgctgtagtttttcctggtggtgccgatcttccttacgttcaagcttgtcaacccattatttctcgattgaaacattttgttagcaaacaaggtggtgtctttatcggattttgtgcaggaggttactttggcaccagccgtgtagaatttgctcaaggtgaccctacaatggaagtatcaggaagcagggatttgcgattctttccgggaacaagcagaggacctgcgtacaatggatttcagtataacagcgaggccggtgcacgtgcagttaaattgaatcttccagatggctcacagttctcaacttatttcaatggaggagccgtttttgttgatgcagataaatttgataatgtcgagatcttggccacgtacgcagaacacccggatgtgccttcttctgactcaggaaaaggtcaaagtgaaaacccagctgctgtagtgctatgtacggtcggaagaggaaaggttttactcactggaccacaccctgaattcaacgtccgttttatgaggaaatccacagataagcattttcttgaaaccgttgtggaaaacctgaaagcacaggaaatcatgaggttgaaatttatgagaacggttcttaccaaaactgggttgaattgtaataatgacttcaattatgtaagagctccaaatttgacaccactgtttatggctagtgcacctaataagcggaattacttgcaagaaatggaaaacaacttagctcatcatggaatgcatgcaaataatgttgaactctgctcagaattaaacgccgaaactgactctttccaattttatagaggctatagagcctcttacgatgcagcaagttcgtccttgcttcataaagagccagatgaggttcctaagaccgtaatatttcctggcgtagatgaagatattccaccatttcaatatacgcccaattttgacatgaaagaatacttcaagtatctgaatgttcaaaacaccataggttctttacttctatatggtgaagttgttacatcaacgagtaccatattgaataataataaatccttattaagttcgatccctgaaagcactttacttcacgtgggtactattcaggtttctgggcgtgggagaggtggtaacacttggattaatcctaaaggtgtttgcgcatcaacggccgtcgtaacaatgccgcttcaatcgcctgtgactaatcgaaatatatcagttgtttttgtccagtatctttctatgcttgcttactgtaaggcgatactttcgtacgctcctggattttcagatattcctgttaggatcaaatggcccaatgacctttatgctttgagccccacctactataagcgtaaaaacttgaaattggttaacaccggttttgagcatacaaagttgcccttaggtgatatcgagcccgcttatcttaagatctctggtttattagttaatacccacttcataaacaataaatattgtttgctacttggctgtggtataaatttgactagtgatggtcctacaacttcattacaaacttggattgatatcctgaatgaagaacgccaacaattacaccttgatttattgccagcaataaaggcagaaaagctgcaggcactctatatgaataaccttgaggtcatattaaaacagtttattaactacggagctgcggaaatattgccaagttattatgagttgtggttacatagtaaccaaatagtaacattaccagatcacggaaatacgcaagccatgattactggtatcacggaagactacggtttactgattgcaaaagaattggtaagcggtagttccactcaatttacaggaaacgtttataatttacagccggacggtaacacttttgatatcttcaagagcttaattgctaaaaaggttcagagttaagagtctaccacttgaagcttagaagttggacggacgtaatttaaatgcatttactagcgccgttggttttcccaatgctctgcggatataaattagttacttgattccctatccctaccataatgctatgaaaaataatggtatatttggtatacgtttttattatgatacaaaaataaactagaaatattatttgagaaactatatataatgtaataacgtcaaatacgtaaggatgatatactatatcatctggaattttca

SEQ ID NO: 662 - DNA, 1728 bp, Saccharomyces cerevisiae
tgcggcaagtgtgcaagacgggtaaaggagagtatagaacgatgtctgctaaagttccatctaacgccacgtttaagaacaaggaaaaacctcaagaggttcgcaaagccaacatcatcgctgcacgttctgttgcagatgccatccgtacttcattgggtcccaagggtatggacaagatgattaagacatctcgtggagaaatcatcatctctaatgatggccacaccattctaaaacagatggccattctgcatccggtggccagaatgctagtagaggtttctgccgcgcaggactcggaagccggtgatggtaccacttctgtggtgatcttgaccggagctctattgggtgctgctgagaggctgttaaacaagggcatccatccaaccatcattgcggactcctttcaaagtgctgcgaagagatctgtcgatattcttttagaaatgtgccataaggtttcgttgagcgatagagaacagctggttcgtgctgcatccacttctttgagttccaagattgtgtctcaatactcttcgtttttggcgcccttggcagtggactccgtattgaagatatctgatgaaaactctaagaatgttgacctgaacgatatcagactggtcaaaaaagttggtggtaccattgatgacacagaaatgatagatggtgtggtcttgacacaaacggcaatcaaatctgctggtggtccgacaagaaaggaaaaagcaaagattgggttaattcaattccaaatatctcctccaaagcccgacacagaaaataatatcatcgttaatgactatagacaaatggataagatccttaaagaagaaagagcgtatttgctaaatatctgtaaaaaaattaaaaaggccaagtgtaacgtgctgttgattcagaaatccatcttgagagatgcggtaaatgatttggctcttcatttcttgtcaaaattgaacataatggtggtaaaggatatcgagagagaagaaatcgagtttctgtcgaagggcttgggttgtaagccaattgctgatatagaattgttcaccgaagatagattgggttccgctgatttagttgaggagatcgatagcgatggttccaagatagttagagtaactggtataagaaacaataatgcaagaccaaccgtctctgttgttattcgtggtgcaaacaacatgatcattgatgaaacagagcgttccctccatgatgcactatgtgttattcgttgtctagtgaaagagagaggtttaatcgctggtggtggtgctccagaaattgaaatatcccgtaggttgagtaaggaagcaaggtctatggaaggtgtacaggcttttatttggcaagaatttgcctctgctttggaagttattccaacgactttggctgaaaacgcaggtttgaatagtatcaaagttgtcacagaattgcgctctaagcatgaaaatggtgaattgaatgacggtatctctgttagacgatctggtactacgaacacctatgaagaacacatcttacaacccgtacttgttagtacaagtgcaattaccttagcgtctgaatgtgttaaatccatcttacgtattgatgatattgcattcagccgttaacatgggtttcccagtatccatatgtttatgcatatatacatatatatgttgatttagtgtattttccactacataaaaactaaaaaacattcaaaatgaa

SEQ ID NO: 663 - DNA, 1525 bp, Saccharomyces cerevisiae
ctcactaccatttttgttgctagagtaaacgtagagaaagatgtcaagagatgcaccaattaaggctgacaaggattatagccaaattttgaaggaagagtttcctaagatcgattcgctcgctcaaaatgattgtaactctgctttagaccaactgttagtgttggagaagaaaaccagacaagcttcagatctggcctcctcgaaagaagttttggccaagattgtagatctgctagcatcaaggaataagtgggacgacctaaatgagcaattgactctactctcaaaaaagcatggtcagttgaaattgtcaattcagtatatgatacaaaaggttatggaatatttgaaaagctcgaaatctttggatttaaacaccagaattagtgtcattgaaactatcagggtggttacagagaacaaaatatttgtagaagtggaaagagctagggtcaccaaagatttggtggaaattaagaaagaagagggtaagattgatgaagctgcagacatcttgtgtgagttacaggttgagacctatggctccatggaaatgtctgagaaaattcagtttatattagagcaaatggaattgagtatattaaaaggtgattattcccaagccacggtgctttcaagaaaaattctgaaaaaaacttttaaaaatccaaaatacgagtcattgaagctagaatattataatcttctggtaaaaattagtttgcacaagagagaatacctagaagttgcgcagtatctgcaagaaatttatcaaacagacgccattaaatcagatgaggctaagtggaaacctgttttatcgcacattgtatatttcttagtcctttcaccttacggcaatttacaaaatgatttaattcacaaaatccagaatgataacaacctgaaaaaattagaaagccaagaatctttagtaaaattgtttactacgaatgagttgatgagatggccaattgttcaaaaaacctatgagcccgtcttaaatgaggatgatttggcatttggtggagaagctaataagcatcactgggaagatttacaaaaaagggtcatcgagcacaatttaagagtcatttccgaatactattccagaattactttactaagattgaatgaattgctggacctaacggagagccagacggaaacatacatcagtgatttggtaaaccagggcatcatatacgctaaagttaatcgcccagccaaaatcgtgaattttgaaaaaccaaaaaactcaagccaattattgaacgaatggtcacataatgttgacgaactattagaacatatagaaacaataggccatttaattacaaaagaggaaatcatgcacggtttgcaagctaaatgaagagattttcgagtaagtgtcggattatctcagatccggttttgattttaaatctgttactaatcgaaatgtgtatttacgtacgtgagataaaattatctatgcatatatataactcaaatggaaaatggccacgtattgctctca

SEQ ID NO: 664 - DNA, 1545 bp, Saccharomyces cerevisiae
cgatcagaaatttttagctgcttgcttagaagaaaagaaaagaaaattgcagagaaaaagctatttattgtttctgtccttcgctttaaaacatagagatattttgtcctttttatcattgcttattataaatgcatcataactcacagtctttgagctctggacacatcaggagccccgaggatgaaaatgtggcacctataggtaatcttaaacacaggactggatccctcagtcatatttcatctgcgcacccgagggtcgcacttagcgacgttaccaatatagttgcgacaaactctagcaacaacagcataagtaagccaaaagtcgccccaattaaagaaagattggattcagctgcgataattgaggaagaaaggctggatgcgaatagtgttgcacagagaaaagaagctgatcataacgatttgttaacggacagggaacaagaggaacccgttgaagacgacggagaaagcgaagaggatgaagaagaagaccaggagcctctactgttgcaacattatgctagtgatacattggtctgggagcatgcatttagaacttactatagaactacattagatcccaatgatgatgacgtgtacgatgtggtcatggttgccgaattatctaatgagatattcgagtatatgaggaaattggaagacctgtataaacccaacccgtactacatggataaacaaccagagttaagatggtcgtttcgaagcacactgattgattggatcgtccaagtacatgaaaaatttcaacttttacctgaaactctatatctctgcattaatataatagacagatatctgtgcaaagaagttgttcctgtaaataagttccaacttgtgggtgcagcctcactcttcattgctgctaaatatgaggaaatcaactgtcctacaatcaaggatttcgtatacatgtcagaaaactgctactcaaggaacgacctgctggacgcagaaagaactattttgaacggcttagaatttgaattgggttggcctggtccgatgtcatttttacgaagaatcagtaaggcagacgattacgagcatgatacgagaacactggccaaatatctattggaatccacaataatggaccatcgactggtttccgctcaacctagttggttagctgccggtgcatactttctaagtaagattattctgggccaaaatcagtggtctctggcgcacgtctactattccaattatacacaagaacaaattcttccgttggccaccattattttagaaaattgcagatatgcctctaaacgtcataacgccatatggagaaaatattcttcacgtcgttatttgcattcttcacagatcgtagcgaagtggatagcattagctgaacacagagtagaaagatctaactaaaaagcctcagctcgagacatggcatcaacaaaggaaaaaggattcattaccgtcttttgcacacaaaaactttaatcatcagtaataaacatatgtaactttttaaccttaaaacatactaatctccgta

SEQ ID NO: 665 - DNA, 662 bp, Saccharomyces cerevisiae
caaggaaaaacaggaagagaagagaatcaaaatatactattccctacataatggaaaaatttggtttaaaagcgctagtaccgctccttaagctagaggacaaagaactttcaagtacatatgaccattccatgaccttaggagcggacttatcgtcgatgctatattcgttgggtattccaagagattcacaagatcacagagtcctcgatacttttcaatcaccgtgggcagaaacatccagaagcgaagtggagccccgatttttcacaccagaatcattcaccaatattccgggcgtattacaatccactgtaactccaccatgcttcaattccatccaaaatgaccaacagcgtgttgccctttttcaagatgaaactctatttttcctcttctataaacaccctggtacagtcatccaggaactaacgtatttggaactcaggaaaaggaactggagataccacaagacgttgaaggcctggctcaccaaagatcctatgatggaacctattgtatccgctgatggtttaagtgaaaggggatcatatgtgttttttgacccacaaaggtgggaaaagtgccaaagagatttcttattgttttataatgctattatgtaaggtagacagagaaacgaaagaagtaaataaatgtca

SEQ ID NO: 666 - DNA, 1277 bp, Saccharomyces cerevisiae
atcgttaagtttacttctacaaaatctccaagtaaagaaggaatataagtaatataagtacaatgtccgccgctactgttggtaaacctattaagtgcattgctgctgttgcgtatgatgcgaagaaaccattaagtgttgaagaaatcacggtagacgccccaaaagcgcacgaagtacgtatcaaaattgaatatactgctgtatgccacactgatgcgtacactttatcaggctctgatccagaaggacttttcccttgcgttctgggccacgaaggagccggtatcgtagaatctgtaggcgatgatgtcataacagttaagcctggtgatcatgttattgctttgtacactgctgagtgtggcaaatgtaagttctgtacttccggtaaaaccaacttatgtggtgctgttagagctactcaagggaaaggtgtaatgcctgatgggaccacaagatttcataatgcgaaaggtgaagatatataccatttcatgggttgctctactttttccgaatatactgtggtggcagatgtctctgtggttgccatcgatccaaaagctcccttggatgctgcctgtttactgggttgtggtgttactactggttttggggcggctcttaagacagctaatgtgcaaaaaggcgataccgttgcagtatttggctgcgggactgtaggactctccgttatccaaggtgcaaagttaaggggcgcttccaagatcattgccattgacattaacaataagaaaaaacaatattgttctcaatttggtgccacggattttgttaatcccaaggaagatttggccaaagatcaaactatcgttgaaaagttaattgaaatgactgatgggggtctggattttacttttgactgtactggtaataccaaaattatgagagatgctttggaagcctgtcataaaggttggggtcaatctattatcattggtgtggctgccgctggtgaagaaatttctacaaggccgttccagctggtcactggtagagtgtggaaaggctctgcttttggtggcatcaaaggtagatctgaaatgggcggtttaattaaagactatcaaaaaggtgccttaaaagtcgaagaatttatcactcacaggagaccattcaaagaaatcaatcaagcctttgaagatttgcataacggtgattgcttaagaaccgtcttgaagtctgatgaaataaaataggagtacttaattaaactaagtaagcatgactcaaattttctggaatactttgaa

SEQ ID NO: 667 - DNA, 1060 bp, Saccharomyces cerevisiae
cagcagcagtagcgtaagaccaagttagtatggctacgttcaacccacaaaacgagatggagaaccaggcacgtgtacaagagtacaaggtctccactggcagaggcggagctggcaacatccataaatctatgtccaagccgtctcccgtacttcttccattgaaatccaattcaaagacagtagcaaacaacaataataacggtagcaaccaggaaaaggttcctcgttttgcaattggtagaggtggtgccggtaatatctttcatgatccgcacctgacgagatccgcccaacaactggactctaacgacaatatcaactataacgacgtgatcaatgacatcgacgattatatttcccctataacttcggatatggtggatgaaggtgggtcaaacccggtgaccaacaccaggtctcgtatcagcgctacaaggagccatcagtctttgcatgccaccacttcgtctccgaacaacaacgccccaattgtcgttggtagaggtggggcaggaaacattttcttcaacaaaaaaaaggtggccagcaatggtggaaatgaagaggatgagatacgaggcggcaatatcgaggatgaggatactatcaatgcaaacgaggacaacctgtttgtggtgacttccaatggcaatgctttggcggcaatcaagtccacgtccaagaagcctaaaaataagctcaagggcaaaagcgcaccggaaaaatttgctattggaagaggtggcgctggaaacataatttctccaaagtcaagcaggaacactatcaaccataacttaaacgatgatgatgaagataagtttaatttgaaagatgacaatggtaaagagaagaagaagaagaagaagaagaaatcagggtttttcagttctttgaaaactatgtttaattgaaataacattcatcagcaaaattaataaactaaataaaataaataaataaataaataaataaataaataaataaataaataaataaataatatacgatcataaaataaataataactcaagctttttagacttgactagctaat

SEQ ID NO: 668 - DNA, 1675 bp, Saccharomyces cerevisiae
ataacaagatgctaagaaacattttggtgagaagtactggcagcaatttcaaatttgctggcagatatatgaaatcatcagctcttttaggatactatagaagagttaactattattcgaccaagatacaaaccagactgactagcgaaaactatccagacgtgcatcgagaccctagattcaaaaaattaacgtccgatgatctaaattattttaaatctattttatcggaacaagaaatattaagagccagcgaatcagaggatctttcattttataatgaagattggatgagaaagtacaaaggacagtccaagttagtattgagacctaagtcagtggaaaaagtttctttaatcttaaattattgtaatgatgaaaaaattgccgttgtcccacaaggcggtaacacggggttggtaggtggttctgtgcccatttttgatgaattaattctatctttagcaaatttaaacaaaataagagattttgaccctgtatcaggtatcttgaagtgtgatgctggtgtaatcttggaaaatgctaacaattacgtaatggaacaaaattatatgtttccgttggatctgggagctaaaggttcctgccatgttggtggcgtggttgcaaccaacgctggaggactaaggttattgcgttatggctcactacatggaagcgttttaggcttagaggtggtaatgcccaatggtcaaattgttaatagcatgcattccatgagaaaagacaacaccggttatgatctgaaacagctgttcattggctcagaaggtactatcggtatcatcactggtgtttcaatcttgactgttcctaagccaaaagcgtttaatgtatcttacttgtctgttgaaagttttgaagacgttcaaaaagtcttcgtcagagccaggcaagaattatctgagattttatccgcttttgaatttatggatgctaaatctcaagtattggccaagagccaattgaaggatgctgccttccctttggaggatgagcatccattttatattcttatcgaaacgtcagggtcaaacaaagatcacgatgattccaaacttgaaacatttttagaaaacgtcatggaagagggcatagtaacggatggtgtagtggcacaagatgaaaccgaactccaaaacttgtggaagtggagagaaatgattccagaggcaagtcaagctaatggtggtgtttacaaatacgatgtttctttaccactaaaggacctatattctttggttgaagccactaatgcaagactttctgaagctgaattagtgggtgattcgcccaaaccagtggtgggcgccattggatacggtcacgtgggtgatggtaatctacacttaaatgttgcagttagagagtacaacaagaacattgaaaagactttggaaccatttgtctacgagtttgtttcctcaaaacatggttccgttagtgccgaacatgggctaggtttccaaaagaaaaattacattggctattctaagagcccggaagaggtcaagatgatgaaggatttgaaggttcattatgatcctaatggaattttaaacccttacaaatacatttgaaaataaaatgccaagttttatagttatctacatatgtatatatttatcaatattatattctacaattgtgtata

SEQ ID NO: 669 - DNA, 2063 bp, Saccharomyces cerevisiae
aaactatataataatacatcacactgagcttttgcattttcgataactatcattctagttttcctctggtttgaattttcctcttgtctgtctgactaatgtcactcattatttccacttcgcgcaaagttcgtcccaatgcggaaaggcatagaaagataggaacagtgtggaacatggaaaagttccaaataacgtcaatagtccatacttaagatacgaaatttcaaaattccttcttttttgtttcaacaagcttagcctaacaccaagaatatacttagcatctcttcgcattcaaaatttctcttccattctttgacgttttaaatcatacctcgtattctttacacaaaagaaagatacctgtgaaatatatctgaatatggtccgattaaatcatgcagcatcatattttatgcctattttctgctccacaaggcctcacatagtgatactttctgcgctgtttagtatttcactgttttcactattctatgcgtcgtccgaattactgctacaccagtatgatgatccattgatgttcaaaccaaattcgcaggactatttcaggacctttcttttggggcttttttcaccatttctttattatttcctgaagacctttctattcaatataaatcaaaggtttttaatattgaacctgatagtggattttcctatcaacgacgtctttatgcttttgatactgattggtttagcgtaccctcaggtgcaagatcacgaaggcggtacgatcaagcataaggaatgttcttggcacatcattccaagacaagcctatatctttggtatatcatgggccctgggtgaattcaccatatgcataatagggaatttgtttaactaccaagaaatcgccgatccaaacattaatagtggcttcacacaccaggaaagcgccaacacttactgtaacaataatgatatgagccataacgatgactgcggttgtagtacagaatatcgccccaacgtcgtagacagaagtgatattacgttgtccaaatgtattgaagtaagaaatgactcatcttccatatcgaataacgtatactcgtctgagtaccatccaatcaaacctctacgttcatcgtcatcaacttatggcagcatacgacagcaacctcatgaaaataagaagcagctgcatgtaccagataattcgcaggacgatacaattatcatgatgaaccccatcgacaattcattaaagttgacaactctagatacgggtgatttgagtttccccatagacgaagaacagcccattttgaagaaatcttttggttatacatgggcagttcctaatgaaaatacacaaaatactactaaaagcttcacaccgataaagagatttattgcatttagcacggcataccagttggtcaccggtttattgttaatgatattggtagttggtagtaatatcatgttgacaattggggaatcattgattctgtcgatgtatttcgtctatgttcgcggccatgaaggattatttactcccgtggtgaactacttcggctcaagaaccatttcaaatttcatcttatgcgtaataattcctttcatatctctaaacttcctcatcaacacttcgatatatttaagaagagagctagacgattggtttaataattcacagggggagtttgaggacgacgacgaaaatactatcagtaagagagtagctacaaatcaagagtaccaacatccactgagtgctaattacatttcgatggatagtcctgatgtaataaatagcagcccgggtcacttcgggatgaattcaggccagttgttaggtaatacgacgttatattatggtagtttaaatggggatgatgatgatatgaccaacgactccgctttactaagattctgcaagaagctagtcaaaaattggagggctttggcaagaaatgattcttttgtacttggagtaatggtttcttggagtcttcttgtttttgtaacgggaatactttcaacagtttatatatagcatataagtaacgaccgtgcacatattagggtgt

SEQ ID NO: 670 - DNA, 433 bp, Saccharomyces cerevisiae
cgtggttgaatttgtttttgctatcccaaaggagtgcattttacacgcattactacagcacacttttatacagttccacaatagaatatgttaccacgttcagcattagcacgctcattgcaattacagcgcggtgtggccgcaaggttctactctgaaggttctaccggcaccccaagagggtcaggctcagaggattcgtttgttaaaagggaaagggccacggaagacttcttcgttaggcagcgtgagaaggagcaactacgccatttgaaagaacaactggaaaaacaacgaaagaagattgattctttggaaaataaaattgactcgatgaccaaataatcatgcgtttccgcagaagcttttttttttttttttttagaatattcttactcttttatagtcaaacagcagaaaaactatataataa

SEQ ID NO: 671 - DNA, 1401 bp, Saccharomyces cerevisiae
ccctgtattgttttcctaaagatgactgctgctaaaccaaatccatatgctgccaaaccgggcgactatctttctaatgtaaataatttccagttaatcgattcgacgctgagagaaggtgaacaatttgccaacgcattcttcgatactgaaaaaaagatcgaaattgctagagccttggacgatttcggtgtggactacatcgagttaacctcaccagtagcatctgaacaatcaagaaaggactgtgaagctatatgtaaactaggtttaaaggccaagatccttacacacattcgttgtcatatggatgacgccaaagtcgccgtagagactggtgtcgacggtgtcgatgtcgttatcggcacctccaaatttttaagacaatattcccacggtaaggatatgaactacatcgccaagagtgctgttgaagtcattgaatttgtcaaatccaaaggtattgaaatcagattttcctctgaagattccttcagaagtgatctcgttgatcttttgaacatttataaaaccgttgacaagatcggtgtaaatagagtcggtattgccgacacagttggatgtgccaacccaagacaagtatatgaactgatcagaactttgaagagtgttgtttcatgtgacatcgaatgccatttccacaacgatactggttgtgccattgcaaacgcctacactgctttggaaggtggtgccagattgattgacgtcagtgtactgggtattggtgaaagaaacggtatcactcctctaggtgggctcatggcaagaatgattgttgccgcaccagactatgtcaagtccaaatacaagttgcacaagatcagagacattgaaaacctggtcgctgatgctgtggaagttaacattccattcaacaaccctatcaccgggttctgtgcattcacacataaagcaggtatccatgccaaggccattttggctaacccatctacctacgaaatcttggaccctcacgatttcggtatgaagaggtatatccacttcgccaacagactaactggctggaacgccatcaaagccagagtcgaccagttgaacttgaacttgacggatgaccaaatcaaggaagttactgctaagattaagaagctgggtgatgtcagatcgctgaatatcgatgatgttgactctatcatcaagaacttccacgcagaggtcagcactcctcaagtactatctgcaaaaaagaacaagaagaatgacagcgatgtaccggaactggccaccatccccgccgccaagcggactaagccatccgcctaacgttcccaaaccattacattatgttctttcacttattacatacgatatatagcatctacatctacatatctaaatgatgttttttcccatcta

SEQ ID NO: 672 - DNA, 3346 bp, Saccharomyces cerevisiae
atggctggtgcaattgaaaacgctcgtaaggaaataaaaagaatctcattagaagaccatgctgaatctgaatatggtgccatctattctgtctctggtccggtcgtcattgctgaaaatatgattggttgtgccatgtacgaattggtcaaggtcggtcacgataacctggtgggtgaagtcattagaattgacggtgacaaggccaccatccaagtttacgaagaaactgcaggccttacggtcggtgaccctgttttgagaacaggtaagcctctgtcggtagaattgggtcctggtctgatggaaaccatttacgatggtattcaaagacctttgaaagccattaaggaagaatcgcaatcgatttatatcccaagaggtattgacactccagctttggataggactatcaagtggcaatttactccgggaaagtttcaagtcggcgatcatatttccggtggtgatatttacggttccgtttttgagaattcgctaatttcaagccataagattcttttgccaccaagatcaagaggtacaatcacttggattgctccagctggtgagtacactttggatgagaagattttggaagttgaatttgatggcaagaagtctgatttcactctttaccatacttggcctgttcgtgttccaagaccagttactgaaaagttatctgctgactatcctttgttaacaggtcaaagagttttggatgctttgtttccttgtgttcaaggtggtacgacatgtattccaggtgcttttggttgtggtaagaccgttatctctcaatctttgtccaagtactccaattctgacgccattatctatgtcgggtgctttgccaagggtaccaatgttttaatggcggatgggtctattgaatgtattgaaaacattgaggttggtaataaggtcatgggtaaagatggcagacctcgtgaggtaattaaattgcccagaggaagagaaactatgtacagcgtcgtgcagaaaagtcagcacagagcccacaaaagtgactcaagtcgtgaagtgccagaattactcaagtttacgtgtaatgcgacccatgagttggttgttagaacacctcgtagtgtccgccgtttgtctcgtaccattaagggtgtcgaatattttgaagttattacttttgagatgggccaaaagaaagcccccgacggtagaattgttgagcttgtcaaggaagtttcaaagagctacccaatatctgaggggcctgagagagccaacgaattagtagaatcctatagaaaggcttcaaataaagcttattttgagtggactattgaggccagagatctttctctgttgggttcccatgttcgtaaagctacctaccagacttacgctccaattctttatgagaatgaccactttttcgactacatgcaaaaaagtaagtttcatctcaccattgaaggtccaaaagtacttgcttatttacttggtttatggattggtgatggattgtctgacagggcaactttttcggttgattccagagatacttctttgatggaacgtgttactgaatatgctgaaaagttgaatttgtgcgccgagtataaggacagaaaagaaccacaagttgccaaaactgttaatttgtactctaaagttgtcagaggtaatggtattcgcaataatcttaatactgagaatccattatgggacgctattgttggcttaggattcttgaaggacggtgtcaaaaatattccttctttcttgtctacggacaatatcggtactcgtgaaacatttcttgctggtctaattgattctgatggctatgttactgatgagcatggtattaaagcaacaataaagacaattcatacttctgtcagagatggtttggtttcccttgctcgttctttaggcttagtagtctcggttaacgcagaacctgctaaggttgacatgaatggcaccaaacataaaattagttatgctatttatatgtctggtggagatgttttgcttaacgttctttcgaagtgtgccggctctaaaaaattcaggcctgctcccgccgctgcttttgcacgtgagtgccgcggattttatttcgagttacaagaattgaaggaagacgattattatgggattactttatctgatgattctgatcatcagtttttgcttgccaaccaggttgtcgtccataattgcggagaaagaggtaatgaaatggcagaagtcttgatggaattcccagagttatatactgaaatgagcggtactaaagaaccaattatgaagcgtactactttggtcgctaatacatctaacatgccggttgcagccagagaagcttctatttacactggtatcactcttgcagaatacttcagagatcaaggtaaaaatgtttctatgattgcagactcttcttcaagatgggctgaagctttgagagaaatttctggtcgtttgggtgagatgcctgctgatcaaggtttcccagcttatttgggtgctaagttggcctccttttacgaaagagccggtaaagctgttgctttaggttccccagatcgtactggttccgtttccatcgttgctgccgtttcgccagccggtggtgatttctcagatcctgttactactgctacattgggtatcactcaagtcttttggggtttagacaagaaattggctcaaagaaagcatttcccatctatcaacacatctgtttcttactccaaatacactaatgtcttgaacaagttttatgattccaattaccctgaatttcctgttttaagagatcgtatgaaggaaattctatcaaacgctgaagaattagaacaagttgttcaattagttggtaaatcggccttgtctgatagtgataagattactttggatgttgccactttaatcaaggaagatttcttgcaacaaaatggttactccacttatgatgctttctgtccaatttggaagacatttgatatgatgagagccttcatctcgtatcatgacgaagctcaaaaagctgttgctaatggtgccaactggtcaaaactagctgactctactggtgacgttaagcatgccgtttcttcatctaaattttttgaaccaagcaggggtgaaaaggaagtccatggcgaattcgaaaaattgttgagcactatgcaagaaagatttgctgaatctaccgattaagatatatgtagcatttatcttctggtatatttgttagatgtcttttcttcgtatttcaaaaaatttatataggcgtatgttaataagataaaaaataattaaaggaaattaacagatgtacctcaatgaa

SEQ ID NO: 673 - DNA, 513 bp, Saccharomyces cerevisiae
agcactattattgaccgtagaataggtacagtgagacagtatattcgaaatggccggtgttaaagcttacgaactaagaaccaaatccaaggaacaattggcttctcaattggttgacttgaaaaaggagttggctgaattgaaggtccaaaagttgtccagaccatctttgccaaagatcaagaccgtcagaaagagtatcgcctgtgtcttgaccgtcatcaacgaacaacaaagagaagctgttagacaattatacaagggtaagaagtaccaaccaaaggacttgagagccaagaagaccagagctttgagaagagctttgaccaaattcgaagcttcccaagttaccgaaaagcaaagaaagaagcaaatcgctttcccacaaagaaagtacgctattaaggcttaattggaagttcaattatatactatcattatctatagttccaacttttctacgtttttctagcaccttttaaataattgttaaattaaaacattttcatcgaa

SEQ ID NO: 674 - DNA, 641 bp, Saccharomyces cerevisiae
ataagaaagaactcaaacaggtttaatagaattaaaaatgggtttgtttgcctctaagttgttcagtaacctttttggtaacaaagaaatgcgtattcttatggttggtcttgatggtgctggtaagaccaccgttttgtacaagttgaaattgggtgaagttatcactaccattccaacaattggtttcaacgttgaaactgtccaatataagaacatttcattcactgtctgggatgtcggtggacaagacagaattagatctctatggagacactactacagaaacactgaaggtgttatctttgttgtcgattctaacgatagatcgcgtattggtgaagctagagaagttatgcaaagaatgttgaacgaagatgaattgagaaacgccgcttggttggtgttcgctaacaagcaagatttgccagaagccatgtctgctgctgaaatcactgaaaaactaggtttacattctattagaaaccgtccatggtttatccaagccacgtgtgctacctccggtgaaggtttgtatgaaggtttggaatggttaagtaacagtttgaaaaactcaacttaaaaattctagaatatggatcaaatacgcttgtataaactaaatgaaacataaagattaa

SEQ ID NO: 675 - DNA, 1334 bp, Saccharomyces cerevisiae
gcaaattacacaattttttgatacaatatatatacatatattttccccattgtttttcttagatgcccacgatgatcaaaaaggatgataaagcaatggagccccctaatgaaaaaccgcatagaaagatcgaaagagatgatgttccagaatcttccaatcacatcccacctccagaatctggtgttttaaagggcggtaaagttaattcaaaaaccagagctttaaaggccgttacaagtatcattgcagacgccgatgagaaccctcagaagaaagtgaacaatgagacgaatggagtccaaaagcaaaagacagaagatttgagtaaaagaataggtaaatttgaataccttttttacaagtttttacttgtgttgttatacatctgcttcgggttgtttcggtacggtcaataccaatataataaaatgaaactaagaatattcagtatcatctacaaccatgcatatacaccacagttgattagacaggacgttattcctctgaaaaaaattcctaaaaggttggccgctatcttggaagtcaagccagttggcgacgttggcggcggtgtgacaggtttattaaatgacgcgagtgaaattgtttgctggactgtttcagctggtataaaacatttgatgttgtacgattacgatggaatattacaaagaaatgttccagagctgagaatggaaattcattccaacctggctaaatattttgggccagctcatgttccaaactacgctgttaaaatacctcattctaacaagatattctacaatctagacggaattgaaaccgagactgatgtaggcaatgagatagaagctaaccaagaaaaggacaaaattgctattgaaatttctttattgtctaacagagatggtagagaaacgattgtcgatctgaccaaaactatggctgagttatgtgcggttaacgaattgagcgtttctgacatcacaatggatttagttgattcagaactgaaacaactagttggacccgaaccagatttactgttatacttcgggccttcgttggatttacaagggttcccaccttggcatattagattaaccgaattttattgggaaaaagataacaacgaagtcatatattcggttttcatccgcggcctaagacagtacgcaggatgtaaagtgaatgttggtaaatgatacttaagagctaaacgaaaagataagtatctcgctcaaccttttaattttgcacagttgaattctcgtctgatacttaagaaagtcattgcccacatatataacagtagtaataatgataatgatagcaatagttttaagcta

SEQ ID NO: 676 - DNA, 4069 bp, Saccharomyces cerevisiae
tgtaggtgtagaacattaggacaaggcaagcttctgcgatagacactttactcacacatatttccctttgttcccgtttgctctccctaattgaacaataaagatggtcaaacttgctgagttttctcgaacagccacgtttgcgtggtcacatgataaaattccattattggtctctggtaccgtatctggtacggtggatgctaatttctccactgattcatctctagaattgtggtcattgttggctgctgattcggagaagcctattgcttccttgcaagtggattccaaattcaatgatttggattggtctcataataacaagattattgctggtgctctggataacggtagtttggaattgtactccaccaatgaagcaaacaacgctatcaactccatggccagatttagcaaccattcttcctctgtgaagacggtaaagtttaacgcaaagcaagacaacgttcttgcttcgggtggtaacaacggtgaaatttttatttgggacatgaataaatgcactgaatcgccctccaattatactccattgacaccgggtcaatcgatgtcgtccgttgacgaggtcatttccctagcatggaaccaatctttggcccatgtttttgcatctgccgggtcgtctaatttcgcatctatttgggatttgaaggctaagaaggaagtcattcatctaagttacacttcacctaattcaggtatcaagcaacagctgtccgttgttgaatggcacccaaaaaactccacaagagtggcaacggctactggtagcgataatgatccatctatcctgatctgggatttaagaaacgccaacacaccattgcagactttaaatcaaggccatcaaaagggtattttgtcattagattggtgtcatcaggacgaacatctattattgtccagtggtagagataataccgttcttctatggaaccctgagtcagccgaacaactgtcccaattcccagctcgtggaaactggtgttttaagaccaaatttgcaccagaggctccagacctatttgcttgtgcctcctttgataacaaaattgaggtacagactttgcaaaatctcacaaacactttggatgagcaagaaaccgaaactaagcagcaagaatctgaaacagatttttggaataatgtttcccgagaggaatcaaaagagaagccatctgttttccatttacaagccccaacttggtatggggaaccatctcccgcagctcattgggctttcggtggtaaattggttcaaattactccagatggtaaaggtgtatctataacaaacccaaaaatttcaggcttagaatcaaacactactttgagtgaagcgttgaaaactaaggatttcaaaccattaataaatcaaagactggtcaaagttattgatgacgttaatgaagaagattggaatttattggaaaagttatcaatggacggtactgaggagttcttgaaagaggctcttgcattcgacaacgatgaatcagatgcacaagacgatgccaacaatgagaaagaagacgatggggaagaattctttcaacaaattgaaaccaatttccaacccgagggcgatttctccttgtctggtaatatcgaacaaactatttccaagaacttggtttctggcaacattaagagcgctgtgaaaaattctctagagaatgacttactaatggaggccatggtgatcgcattagattcaaataacgaaagattaaaggaaagtgtcaagaatgcctattttgcgaagtatggatctaaatcatcgctctcgaggatactatactccatttctaagagggaagtagatgatttggttgaaaatttggatgtctctcagtggaagtttatctctaaagcaattcaaaacttatatccaaatgatatcgcccagaggaatgaaatgttgattaaattgggagacaggttaaaggaaaatggtcatagacaagattctttgactttgtacttggctgccggatcattagataaggtggcttcaatttggttatcagaatttccagatttggaggataaattgaagaaagataataagacaatttatgaagctcattccgaatgtctaactgagttcattgaaagattcaccgtattttccaacttcattaatggaagctctaccattaataatgagcaattaattgccaaatttttggaatttatcaacttaactacttccacaggaaatttcgaactagccactgaattcttaaatagtttaccaagtgacaatgaagaggttaaaacagaaaaggcacgtgtcttgattgcttccggcaaatcattaccggcacaaaatcctgcgacagcgacgaccagcaaagccaagtatacaaacgccaagacaaataagaacgttcctgtactaccaactcctggaatgccttctactacttctattcctagtatgcaggcaccattttatggtatgacaccaggcgcctctgcaaatgctctacctccaaagccgtacgttccagcaaccaccactagtgctcctgttcatacagaaggtaaatatgcgccaccaagccaaccttcgatggcgtcaccttttgttaacaaaacaaatagctcgaccagattgaattcttttgctcctccgcctaacccatatgccactgcaacagttcctgcaacgaacgtatctacaacgtcgattccgcaaaacacttttgctcctatacaacctggtatgcctattatgggcgactataatgctcaatctagctctattccttcacaacctccaattaatgctgtatcgggtcaaacgccacatctcaaccgtaaagccaatgatggttggaatgatttgcctttgaaggtcaaagaaaaaccatctcgtgccaaggctgtatctgttgcccctccaaatatcctatcgacaccaactccattaaatggtatccctgcaaatgctgctagtaccatgcctccgccacctctttccagagctccctcttctgtgtcaatggtatcaccacctcctctacacaaaaattctagagtcccatccttggttgcaacttctgagtcaccaagggcatccatatcaaatccatacgctcctcctcaatcatcacaacaattcccaataggtactatttctacagcaaaccaaacgtcaaacaccgctcaggtagcttcatcgaacccctatgctccaccaccacaacaaagagtagcaaccccattatctggaggcgtgcctccagctccgttgccaaaggcctctaatccatatgctccaactgcaaccactcaacccaacggttcctcctatcctccaaccggtccgtatactaataaccataccatgacctctcctcctcccgtttttaacaaacctcccactggcccccctccgattagcatgaagaagagaagcaacaagttagctagtatagaacaaaacccatctcaaggtgctacttatcctccaaccctttccagctcggcctctccattgcagccttctcaaccgccaactttggcttctcaggttaatacctccgctgagaatgtcagtcatgaaattccagctgatcaacaacccattgtcgacttcttgaaagaagaactggctcgcgtaacaccattgaccccaaaggagtactccaaacaattaaaggattgtgataaacgattaaagattcttttctaccatttggaaaagcaggatttattaacccaaccaacaatcgattgtttacatgacctcgtcgcattaatgaaggaaaagaaatacaaagaagctatggtcatccatgctaatatcgctacaaaccatgctcaagagggtggtaactggctgacaggagtgaagaggttgattggcatagctgaagcgactttgaattaattcagtctcaaaactttcagtacaaaaagtggcgtattggccttgtttttttcttattatgtcttatagtattatatttatatatttatgtacttatccttttatgtttaaacctaatcaagatcacaattagaactagcttaa

SEQ ID NO: 677 - DNA, 1003 bp, Saccharomyces cerevisiae
attagtatagattcagcagttcccataggataaaattttcaagcgtttattgttaagatgaaagccaagccactaagccaagatccaggctccaagcgttacgcataccgtataaataaggaagaaaatcgtaaggagttgaagcatgtaaagatcaatgaaagttctttggtgcaagaaggccaaaagatcgacttgccaaagaagagatattatcgtcaaagggcgcattccaacccattttcagatcaccagttagagtacccagtatctccccaggatatggattggtccaaattgtacccttactacaaaaacgcggaaaatggacaaatgacaaagaaggtgacgattgctgatattggctgtggattcggtgggttgatgatagatttatcaccagccttccctgaagatcttatcttagggatggaaattcgtgtgcaggttacaaattacgtggaggatagaattattgccttaaggaacaatacagcttcaaaacatggatttcaaaacattaatgtcttgagaggtaacgctatgaaattcttgcccaacttttttgaaaagggccagctttctaaaatgtttttttgtttccccgatcctcatttcaaacaaagaaagcataaggcaagaattatcactaacaccttgctgagtgagtacgcatatgttttgaaagagggcggtgtcgtgtacacaattacagacgtcaaagacctgcatgagtggatggtaaaacatttagaagagcatcctttatttgaacggttgagcaaagaatgggaagaaaacgatgaatgtgtgaaaataatgagaaatgccacagaagaaggtaaaaaagtggaaagaaagaagggtgacaagttcgtcgcttgtttcacaagattaccaacgccagccatattgtaacatagatgtataactagaacaatttaccacatatacataactatttcttatgtttattttcctaaaatcctttatccaactacaa

SEQ ID NO: 678 - DNA, 887 bp, Saccharomyces cerevisiae
ccttattggaagtgcttgggcgcggagtgtgattataaataatgttgcagctaaggtttatgcctggatgggtccccagaaatggtttttttggtttgaaggagacaattggtacagtacataagagattttatgctctggcttctgaacaaccctcaagaaagacagtaaagccgctggactcgaggaagacgtttctcatcgatacatacaagcatttaatggagaacagttctatgattttttttgtccattacaataatctttccaaaacagaagatcaccatttcagattcaagattaaacagacaggagggaaactcacaaaagtaagaaacaacctgttcgaagtctacttgagaaattcgcatctgcccgacccatgtggattcgtgaagcgtaaagagcaaaactggaaacatccactcttgccactactgaagggtcctacggccacaattacatacgaagacaccaaccctcaacaagtagccaagctattgaaggttctgcagtcagcacaagacaagctgatggtgattggtgcaaaagtagaaaacgaagttttgaatgtggaaaaaataaacacttttaagactctccccacaaagccggaaatgcagtcgcagttagtcagcgttttgcaaatgctaagtgggttgggtttggttcgtacgttggaaaacagttcaaatgcattgtatttaacactaaaatctcacaatgacaaccaaaaacctaaagaggatgtggagtcaactacagatgcagaatcgaagggatcaaagtaaaaagaaaatgcccgtaattcgacaagttttataaaggttttactattcaatcatgtacatacatcatcaaaaaataaaaagacaatgaagcaataa

SEQ ID NO: 679 - DNA, 625 bp, Saccharomyces cerevisiae
gagaaacggaaacaagtgcagtaaaaatgggtaaagacaacaaggaacataaggaaagcaaagaaagcaaaaccgtagacaactatgaggccagaatgcctgctgtgttgccattcgctaaaccattggcctctaagaaactaaacaagaaggtcttgaagaccgtgaagaaggcttccaaggccaagaatgttaaaagaggtgtcaaggaagttgtcaaggccttaagaaagggtgaaaaaggtttagtcgtcatcgccggtgacatttctccagctgatgttatttcccacatcccagtcttatgtgaagatcactctgtcccatacatcttcataccttcaaagcaagacttaggtgccgctggcgctacaaaaagacctacctcagttgtctttatcgtcccaggtagcaataagaaaaaagatggaaaaaataaagaagaagaatacaaggaatctttcaacgaagttgtcaaagaagttcaagctttatgaaaaaagttcgcttcttaaccatattagaaatctagaagaaataaaaaaaatctggcattagatatatattttgactgtaggccttctgtatattatataatactactaataacatcaaatgtttgtga

SEQ ID NO: 680 - DNA, 824 bp, Saccharomyces cerevisiae
ttggactacagagcataaaatcccgtgatacgataaaactctaacgatgttctcatattcagatttctgttctatcggtacggccatgatcttatcggccacaacgttcctaatgggtgttttcttcagtaacatgccatacgattatcatcttttatttaatcctaactctactcaagagcatttcgatttggcactgagacattaccaaattttacatgagactccattgccggtgattgttactttgtgcgttgttgccggtattggcttagttggtggtacaattaaggttttcaagccaaaccctgaactgcagatgtttgagtattgttcattggggttgtacgtgttggctatctgtgtgtttctcactaatgtgaaaacaggtatcgactgttctgtgagccataattggggagaagttacggaaaatcagggtttggcagttattgcttcctccaacataattttattagttatgtttgccggtgttatcatcctacaaattggtttgtggtacagtaactgggatttgcaaaaaagattaaaggagttttatgctcaagaagaaagagaagctgccaatgccggtaaaaagactgagaaagttgacaatgcgaaaaagaatgataacaaatctaaaggtgctcaaaagaggaagaacgccaaaaaataggccataatatttttaacattttctctttttgtccctcttttcccgtctgtgacgaaacagacgattatacgaatctagttgtatagtaagatcaatatttattatataaatactgttgaataaataaaactctatctgcttcgtg

SEQ ID NO: 681 - DNA, 558 bp, Saccharomyces cerevisiae
gtacatattaaataatccacatattattcagcagcggatttacaatgaagattgtcttacaaaaagtcagccaagcatctgtagtcgtcgattcaaaagttatttcaagtattaaacatggttatatgctcctagtaggtatttccattgatgattctatggcggagatagataaattatcgaaaaaggttcttagtttgagaatcttcgaagatgaatccagaaatctatggaagaagaatattaaagaggccaatggtgaaattctatccgtgtctcaattcactttgatggcaaaaaccaagaagggaactaaacccgatttccatttggcccaaaagggtcatatagctaaagaactttatgaagaattcttaaaattactaagaagtgatttgggtgaggaaaaagtaaaggatggtgaattcggcgcaatgatgagttgctctttaactaatgaagggcccgttacaatcattcttgacagtgaccaataagattgaccttatagatatatacgagaagaaaataaaaagcaaacattatttgcaatctttc

SEQ ID NO: 682 - DNA, 1982 bp, Saccharomyces cerevisiae
ccaagatcattacagtattttaattgaacaaaatggctgaaggtgttttccaaggtgctatcggtatcgatttaggtacaacctactcttgtgttgctacttacgaatcctccgttgaaattattgccaacgaacaaggtaacagagtcaccccatctttcgttgctttcactccagaagaaagattgattggtgatgctgccaagaaccaagctgctttgaacccaagaaacactgtcttcgatgctaagcgtttgattggtagaagattcgacgacgaatctgttcaaaaggacatgaagacctggcctttcaaggttatcgacgtcgatggtaacccagtcatcgaagtccaatacttggaagaaaccaagactttctccccacaagaaatttccgctatggttttgaccaagatgaaggaaattgctgaagctaagattggtaagaaggttgaaaaggccgtcattactgtcccagcttactttaacgacgctcaaagacaagctaccaaggatgccggtgccatttctggtttgaacgttttgcgtatcatcaacgaacctactgccgctgctattgcttacggtctaggtgctggtaagtccgaaaaggaaagacatgttttgattttcgatttgggtggtggtactttcgatgtttccttgttgcacattgctggtggtgtttacactgttaaatctacttccggtaacactcacttgggtggtcaagatttcgacaccaacttgttggaacacttcaaggctgaattcaagaagaagactggtttggacatctccgacgatgccagagctttgagaagattgagaactgctgctgaaagagctaagagaaccttatcttctgtcactcaaactaccgttgaagttgactctttgtttgacggtgaagatttcgaatcctctttgactagagctagatttgaagacttgaacgccgcattgttcaagtctactttggaacctgttgaacaagttttgaaggatgctaagatctctaagtctcaaatcgacgaagttgtcttggttggtggttccaccagaattccaaaggtccaaaagttgttgtctgacttctttgacggtaagcaattggaaaaatctattaacccagatgaagctgttgcttacggtgctgctgttcaaggtgctatcttgaccggccaatccacatctgacgaaaccaaggacttgttgttgttagatgttgctccattatctctaggtgttggtatgcaaggtgacatgttcggtatcgttgttccaagaaacactactgttccaaccatcaagagaagaacctttactacatgtgctgacaaccaaaccaccgttcaattcccagtctaccaaggtgaacgtgttaactgtaaagaaaacactttgttgggtgaattcgacttgaagaacatcccaatgatgccagctggtgaaccagtcttggaagctatcttcgaagttgatgctaacggtatcttgaaggttactgccgtcgaaaagtctaccggtaagtcttctaacatcactatctctaacgctgttggtagattgtcttctgaagaaattgaaaagatggttaaccaagctgaagagttcaaggctgccgatgaagcttttgccaagaagcacgaagctagacaaagattggaatcctacgttgcctccatcgaacaaactgtcactgacccagtcttgtcttctaaattgaagagaggttccaagtccaagattgaagctgctttgtccgatgctttggctgctttgcaaatcgaagacccatctgctgatgaattgagaaaggctgaagttggtttgaagagagttgtcaccaaggccatgtcttctcgttaagactgcattcatcacatatatatgaatattacttatattgtatataaattttgttttctcttaactttgtatccttaataaaataaaattcacaagtatcacaattaa

SEQ ID NO: 683 - DNA, 1122 bp, Saccharomyces cerevisiae
catcgaggagttatcaagaaaagcgtttgttagtagtagtttgcgacagtggagatggcagctgcaccatggtatattagacagcgtgacacggatttattgggtaaattcaagttcatacagaatcaagaagacggcagattaagggaagctacaaacggaacggtgaattcacgatggtcgttgggggtcagcatagaacctcgtaacgatgctagaaacagatacgttaacattatgccgtatgagaggaaccgcgttcatttgaagactctatccgggaatgattacattaatgcctcgtatgtcaaagtgaacgtgccagggcagagcatcgaaccgggctactatattgctactcaaggtcccacgcgtaaaacttgggatcagttttggcaaatgtgctatcacaattgtcctttagacaatattgtcattgtgatggtcacgcctctggtagaatacaatagggagaagtgctaccagtactggcctcgcggtggtgtagacgatacggttagaatagcatcaaaatgggaaagtccgggcggcgccaatgatatgactcaatttccctctgatttgaaaatagagtttgttaacgtacataaggtgaaggactattatacggtcaccgatatcaaactcacacccacggaccctcttgtaggacctgtcaaaactgttcaccacttttacttcgacctttggaaagatatgaacaagccagaggaagtagtacccataatggaattatgcgctcactcccacagcttgaattcccgcgggaaccccattatcgtacactgttccgcaggcgtgggcagaacggggacgttcattgccctagatcatctcatgcatgataccttggattttaaaaatattacagaacggtcaaggcattcagacagggctacagaggagtacacacgggacttgatcgaacagatcgtgttacagttgcgctcgcaaagaatgaaaatggttcagacaaaggatcagttcctatttatctaccatgctgccaagtatcttaacagtctttccgtgaaccaatagacagctatataaaagttcctaattgtgcattttttcaataacaatacttattcatcctta

SEQ ID NO: 684 - DNA, 419 bp, Saccharomyces cerevisiae
gtacagagcaagcaaaagatgatctctgatgaacagctgaactccttggccatcaccttcggtattgtgatgatgactttaattgtcatttaccatgctgttgactccaccatgtctcctaagaactaaagtggttacatttggatagcgaacttcagtttttattatacgtcgctttgtgtttctgcaaaacaaaacaaaactacaactacaaagtactgcgttggatttcaatcagtgctacattaatttttctccctttttacttcgttttacgcacaaaaatatacagataaatacactcgagataaacaagacatctccttccgctattttttgtataatttaatatcattattaataaaaagaattcctatacatatattcaaaaacaaatgttaaaagttttcttcgcccag

SEQ ID NO: 685 - DNA, 1148 bp, Saccharomyces cerevisiae
tgacaaagaatatacaactcgggaaaatgactgctcaacaaggtgtaccaataaagataaccaataaggagattgctcaagaattcttggacaaatatgacacgtttctgttcgattgtgatggtgtattatggttaggttctcaagcattaccatacaccctggaaattctaaaccttttgaagcaattgggcaaacaactgatcttcgttacgaataactctaccaagtcccgtttagcatacacgaaaaagtttgcttcgtttggtattgatgtcaaagaagaacagattttcacctctggttatgcgtcagctgtttatattcgtgactttctgaaattgcagcctggcaaagataaggtatgggtatttggagaaagcggtattggtgaagaattgaaactaatggggtacgaatctctaggaggtgccgattccagattggatacgccgttcgatgcagctaaatcaccatttttggtgaacggccttgataaggatgttagttgtgttattgctgggttagacacgaaggtaaattaccaccgtttggctgttacactgcagtatttgcagaaggattctgttcactttgttggtacaaatgttgattctactttcccgcaaaagggttatacatttcccggtgcaggctccatgattgaatcattggcattctcatctaataggaggccatcgtactgtggtaagccaaatcaaaatatgctaaacagcattatatcggcattcaacctggatagatcaaagtgctgtatggttggtgacagattaaacaccgatatgaaattcggtgttgaaggtgggttaggtggcacactactcgttttgagtggtattgaaaccgaagagagagccttgaagatttcgcacgattatccaagacctaaattttacattgataaacttggtgacatctacaccttaaccaataatgagttatagaggagcaatgcaaaatctaggggtagaattactttttgaaaaggaaaaatattcaggtttgttgtttttatgtaagttgtatgatttgatatacatatatatatatatataatatatattgtacatgtgtttttccggggaagaatggattatccggaggtgtgaataaaatgatgacgatta

SEQ ID NO: 686 - DNA, 1271 bp, Saccharomyces cerevisiae
ctcggtttagttaagcgatgttaggactgaaagggtgtctaactattcttattggatacgttattgctgtctgtgctttgttttccagtaggggaagaaatccttcattaactgattgggaaaagttaaaggaccagaaaatatcggatattgataactttgggttgaccggtcaacatcttttagaatttttccaggaaaacttgccatttctaagtttttcagaggaaaagtatcgtcacaaacacgtttctttatattatgatgtattcaaagaatatatcttacgtcgtgccagttcaaaaaagtgtttaccagtagactctgctatcgcaaagttgaacaaagatgttaacccaatgccagttcactcccataatgactactggaggaaacttccgctttttgaaggtctggcctatggtgctagtagtactgaagccgacgtgtggaatatagatgaaaagatcctagctgtgggtcataatgaagcgtatttggacccagttgaattgacattagacaagctatacactggccccctcttggagattttagacgaggtgaattgccaagattcagacgccgatcgcaaaaatggtgtatttttcaactctccagaaacttcactcttcttttatattgatttcaagtcggatgataacgaactaacttataaactgctgatggagcaatatttcaaatctctgattgattctggatatttgacatattacgatatgaagaaggatgaaattatttggagacctgttactgtgatactaacgggcaactacccgacgtcattggatattttagacaatggaaatgataacggctattttgagtcaagtcaaaggtttgcatttctagatgcgccgttgttaagtttggagcccaaatactcaaagctatctgtagctgcgacggtttcgttcagccaattaatgaaacattgtggttctgatcattggaaagtatcgctaagaggtcgtatggattcgaatgagatcagttgtgctaaaagcataattgatggtgctcacgcattgaaacttaaaacaagaatttggggagccccaacctggccagctaacctggtggaaactatttctcgccaaattattcatgacttgggttccgatttacttaacctggacaatttattcatggcatcgtcattgatataagtggcttgagctgtggataagaaaagccatatatttatataaacatttagatatgaataggaagtagattgttcgacgcaa

SEQ ID NO: 687 - DNA, 852 bp, Saccharomyces cerevisiae
agaaagatcttgtttaatttgaaataaaagcaagaagataaacacaactatagaaaaagaatgtctagcgaagataagaaacctgtcgtcgacaagaaggaagaggctgctccaaagccaccatcctctgctgtcttctccatgtttggtggtaagaaggccgaaaagccagaaaccaagaaagacgaagaagataccaaggaggaaaccaagaaggaaggtgatgatgctccagaatcaccagatatccattttgaaccagtggttcacctggaaaaggtagatgttaagacaatggaagaagacgaagaagttctttacaaggtcagagccaagcttttcagattcgatgccgatgccaaggaatggaaagaaagaggtactggtgactgtaagttcttgaagaacaaaaagactaacaaggttagaatattgatgagaagagacaagaccttaaagatttgtgctaaccacatcattgctccagaatacactttgaagcctaacgttggttctgatagatcttgggtgtatgcttgtacagcagatattgcagaaggtgaagcagaagccttcacttttgctatcagatttggcagtaaggaaaatgctgataaatttaaagaagaatttgaaaaagctcaagaaatcaacaaaaaggcttagtttcgatgtgcttgttacttgcgtctagatttttttgttcctaatgtaattttcctttacagcgtgcatatatatttttatctactgtgaggaaaagttgctctttaattatataaaaaacgcttatgtagcattgtgaaatcacatatgaatagatatgtaagaaggattagagggttcaagtaa

SEQ ID NO: 688 - DNA, 747 bp, Saccharomyces cerevisiae
gctagaaagctgaaggaaatttagctaaacagagagtatagttttgaaatgattttacgggagcagatcgacttcctaatacataaaagacaggatgataataataacaatggtgaagcgattacagatgatgatccatttagctcttcctcatggagatggggaagatggattttttttatttttttcatagttgcactccttatacttctgttttcaactgcaaaagtgaataggagaagaagaattatgggtcaagctccgattaggggaaccgcttggttaaccccgcctacctacaggcagtccgagagagattacaatggcacacagcgttgcgttgaagactatgttcctgaatatacagagacagcaaatgagaatgatttggggttttacgacgaacgaggagagtttcatcctaatggcaaaacggaatatttagcgccaccgcctttatcagaagaacaagctagctcgactgataaagacttacagcgcccagtggctgccgtcgtacgaattcctagtgaaagtgaattcgacttcaatctgctaagacccactatgaataatttcgttaatggtcagagtaatcgcaacgagcagcattctccgactgttgaatcttcttcctttgatgttaataacgcgccggcaagagcgaaagtgagtaagtgatttttcgtttaatgaatttattatcgcatgacttgcggtatagaaaatagttataagagtgctgaa

SEQ ID NO: 689 - DNA, 317 bp, Saccharomyces cerevisiae
atgacttgcggtatagaaaatagttataagagtgctgaaaaaaaaaagaagtacagaagttttcgtttctttgaaagtcgcgattattccgagttgtgtattatagtaggaacatactattgatttaggtttgagagctggtagtatcgacgtccagaacagtcaattcatcggaacgctttcgactcggtccacggaaaagccattcaacgatttatacggacggtgattttgattagtctaattgcctatatattataaatatattcttcctttacctatttcttctcacacattatcctctaagtaacatgaga

SEQ ID NO: 690 - DNA, 902 bp, Saccharomyces cerevisiae
gattaagaattcggtcgaaaaaagaaaaggagagggccaagagggagggcattggtgactattgagcacgtgagtatacgtgattaagcacacaaaggcagcttggagtatgtctgttattaatttcacaggtagttctggtccattggtgaaagtttgcggcttgcagagcacagaggccgcagaatgtgctctagattccgatgctgacttgctgggtattatatgtgtgcccaatagaaagagaacaattgacccggttattgcaaggaaaatttcaagtcttgtaaaagcatataaaaatagttcaggcactccgaaatacttggttggcgtgtttcgtaatcaacctaaggaggatgttttggctctggtcaatgattacggcattgatatcgtccaactgcatggagatgagtcgtggcaagaataccaagagttcctcggtttgccagttattaaaagactcgtatttccaaaagactgcaacatactactcagtgcagcttcacagaaacctcattcgtttattcccttgtttgattcagaagcaggtgggacaggtgaacttttggattggaactcgatttctgactgggttggaaggcaagagagccccgaaagcttacattttatgttagctggtggactgacgccagaaaatgttggtgatgcgcttagattaaatggcgttattggtgttgatgtaagcggaggtgtggagacaaatggtgtaaaagactctaacaaaatagcaaatttcgtcaaaaatgctaagaaataggttattactgagtagtatttatttaagtattgtttgtgcacttgcctgcaggccttttgaaaagcaagcataaaagatctaaacataaaatctgtaaaataacaagatgtaaagataa

SEQ ID NO: 691 - DNA, 4987 bp, Saccharomyces cerevisiae
aaaacaatatatacgaacctagtgtatttgtatcttttgtttttcaagttgaagtgttgcgaggtcaaaaaaaaaaaagctcactgtaggatataggagttactatatcaccagtgcattacattctcagtgcatccatcgtcttcaacattgattattttctccttccattgattagagttcaagctccctgagaaaacgaaggtatagcggacgtacccgcagagacataaaaaaagaaaaactatatcgaagaccgaaagcagtaaaaaagtggatagaataacacagctaccaaaatacgtaaagagaattcaatgagcaatatcaaaagcacgcaagatagctctcataatgctgtcgctagaagctcaagcgcttcttttgcagcttcagaagaatcatttacgggcataacccatgacaaagatgagcagagcgataccccggcggataaactaacaaaaatgctgacaggacctgcaagagacactgcgagccagattagtgccactgtgtctgaaatggcgccagatgtcgtatctaaagtggagtcatttgcagatgcactatcccgtcatacaacgagaagcggtgcctttaatatggattcagatagtgacgatgggttcgatgcccatgccatctttgaaagttttgtaagagacgctgatgagcaaggcatccatatccgcaaggctggtgttaccatagaggacgtaagcgctaaaggtgtggatgcgagtgccctagaaggtgctacctttggtaacattctttgtttaccgttgaccatctttaaaggtattaaggctaagaggcatcaaaagatgagacagatcataagcaatgtcaatgccctggcagaagcgggtgaaatgattttggttcttggaaggcctggtgctggttgttcctcctttttaaaagtaacagctggtgaaatagatcagtttgccggtggtgtttccggtgaagtagcatatgatggtattccccaagaagaaatgatgaaacgatataaagcagatgttatttacaatggtgagttggatgttcatttcccttatttaacagttaagcaaactttggatttcgctattgcctgcaaaacgcctgctctcagagtcaataacgtttccaaaaaggaatacattgcatccagaagagatttatatgcaaccattttcggtctaaggcatacctataataccaaagttggtaacgatttcgttagaggtgtatctggtggtgaacgtaagcgtgtttccattgccgaggctttggcagccaaaggttccatttactgttgggataatgccactagaggtttggatgcgtctacggccttagaatacgcaaaagccatccgtattatgacaaacttattgaaatcaaccgcttttgttacaatttatcaggcaagtgaaaacatttacgaaacatttgataaagtcactgtcctttattctggtaagcaaatttattttggtttgatccacgaggcaaaaccttatttcgcaaaaatgggttatttgtgtcctccaaggcaagcaacagctgaatttttaaccgcgttgactgatccaaatggattccatctgatcaagccaggttatgaaaataaagtaccaagaaccgctgaggaattcgaaacatattggttaaattctccagagtttgctcaaatgaaaaaagatatcgctgcttataaagagaaggtcaataccgaaaagactaaagaagtttatgacgaatcgatggctcaagagaaatccaaatatacgagaaagaagtcttattatacagtgtcatattgggaacaagttaaactgtgtacccaacgtgggttccaaagaatttacggtaacaagagttatacagtcatcaatgtctgctctgcaataattcaatcttttattactggatcattattttacaataccccttcatccacttccggtgctttttcaagaggtggtgtgttgtattttgcgctactatattattctttgatgggactggcgaatatttcttttgaacataggccaatcttacaaaagcacaagggctattctttgtatcatccttcagctgaggcaattggctccactctggcatctttccccttcagaatgattggtttgacctgtttctttatcattttattcttcctatctgggttgcacagaacagcgggatcattttttaccatctatttgttcttaaccatgtgttcagaggcgatcaatggtttatttgagatggtttcttcagtatgtgacactctttctcaagctaactctatctcgggtattctgatgatgtctatctcaatgtactctacctatatgatccaattgccttcgatgcatccatggtttaaatggatatcgtacgtactacctatcaggtacgccttcgagtcgatgttaaatgccgaatttcacggtaggcatatggattgtgctaacactctagtacccagtggaggagactatgataatttatccgatgactacaaagtatgtgcttttgttggttcgaaaccaggtcagtcttatgtgcttggtgatgactaccttaaaaatcaatttcagtacgtttataagcacacgtggagaaactttggtatcttgtggtgctttttactgggttatgttgttttgaaagtgatattcacagaatataagaggcctgtgaaaggtggtggtgatgctcttatcttcaagaaaggatcaaaaagatttatcgcacatgcagatgaagaatctccagacaatgtcaatgatatagatgccaaagagcaattctccagtgaaagtagcggcgcaaatgatgaagtatttgatgatttagaagccaaaggtgttttcatttggaaggacgtatgctttactattccatatgaaggcggtaagagaatgcttttggataatgtttcaggttattgtattccaggtaccatgacggccttgatgggagagtcaggtgctggtaaaacaactttgttaaatactcttgctcaaagaaatgtcggtatcattactggtgatatgcttgtcaatggacgtcccattgatgcgagtttcgaaaggcgtacaggttatgtacaacaacaggatatacatatcgcagagttaactgttagggaatcgttgcagttttctgctcgtatgcgtcgccctcagcatttgcctgattctgaaaaaatggattatgtggaaaaaatcatcagagttttgggaatggaagagtatgcggaagcccttgttggtgaggttggttgtggtttaaacgttgaacagagaaagaagctgtctattggtgttgaactagtcgccaaaccagacttattattattcctcgatgaacctacatcaggtttggattctcaatcttcatgggccattattcaattattaagaaagttatcaaaagctggccaatccattctttgtacgatccatcaaccttcagctactctgttcgaagagtttgatagattactacttttgaggaagggtggacaaactgtttatttcggagatattggtaagaactctgccaccattttgaactactttgaaaggaatggggcaagaaaatgtgattctagtgaaaatcctgctgaatatattttagaggctattggtgccggtgccacagcatccgtcaaagaagactggcacgaaaaatggttgaactctgtcgagtttgaacaaacaaaagaaaaagtacaggatttaataaatgatttatcgaaacaagaaactaaatccgaagttggagacaaaccttccaaatatgctacttcttatgcttaccagttcagatatgttttaatcagaacctctacttcattttggagaagtctgaattacatcatgtcaaagatgatgctaatgctggttggtggtctgtatattggtttcacatttttcaatgttggtaaaagttatgtcggcttacaaaatgcgatgttcgcggcatttatctctattatcttgtctgctcctgcaatgaaccaaatccaaggacgtgctattgcctccagagaactttttgaagttagggaatcccaatctaacatgtttcactggtcgctggtgttgatcactcagtacttgagcgaacttccctatcatttatttttttcgacaattttctttgtctcatcgtattttccattaagaatcttcttcgaagcgtcaagatctgcggtgtactttttgaattactgcattatgttccagttatactatgttggtcttggcttaatgatcctatatatgtcaccgaaccttccatccgctaatgttatcttaggtttgtgtctgtcatttatgctttctttctgtggtgttacacaacctgtctcattgatgcctggcttctggacattcatgtggaaggcttccccatacacatattttgttcagaatctggtcggaattatgctgcacaaaaaaccagtcgtatgcaaaaagaaagaactaaactacttcaacccaccaaacggctcaacgtgtggagagtacatgaaaccctttttggaaaaagctactggttacatcgaaaatcctgatgctacgtcagattgtgcatactgtatttacgaagttggagataattatttgacacatatcagctctaagtatagctacttgtggagaaattttggaatattttggatttacattttcttcaatatcattgctatggtttgtgtgtattacctcttccatgtaagacaatcttccttcctaagccccgtatctatactcaataaaattaaaaacataaggaaaaagaagcagtaatgtgggcttcagataacttaacattttgtgcattcatctgcctttaattcttaattctcattttacactatagaagaagacacgagtacatctcgtttcacttttatactgacattcatataattaacaataagtatagtttataatagatacaaaaaaaaagt

SEQ ID NO: 692 - DNA, 1204 bp, Saccharomyces cerevisiae
ttcatagtcatttactagggtatataccaataataatgtcccgtccacaagttactgttcactctttgactggtgaagctactgccaatgccttgccattgccagctgtcttctccgctcctatccgtcctgacattgtccacactgttttcacctctgtgaacaagaacaagagacaagcttacgctgtttctgaaaaggctggtcaccaaacctccgctgaatcctggggtaccggtcgtgccgtcgctcgtattccaagagttggtggtggtggtaccggtagatccggtcaaggtgccttcggtaacatgtgtcgtggtggtcgtatgtttgctccaactaagacctggagaaagtggaacgttaaggttaaccacaacgaaaagcgttacgccactgcttctgctattgctgctactgctgttgcttctttggtcttggccagaggtcacagagtcgaaaagattccagaaatcccattggttgtctccactgacttggaatctattcaaaagaccaaggaagctgttgctgctttgaaggctgttggtgctcactccgacttgttgaaggtcttgaagtccaagaaattgagagccggtaagggtaagtacagaaacagaagatggactcaaagaagaggtccattagttgtctacgctgaagacaacggtatcgtcaaggccttgagaaacgttccaggtgttgaaactgccaacgttgcttctttgaacttgttgcaattggctccaggtgctcacttgggtagattcgttatctggaccgaagctgctttcaccaagttggaccaagtctggggttccgaaaccgttgcctcctccaaggtcggttacactttgccatcccacatcatctccacttctgatgtcaccagaattatcaactcttctgaaatccaatctgctatcagaccagctggccaagctactcaaaagcgtactcacgttttgaagaagaacccattgaagaacaagcaagttttgttgagattgaacccttacgccaaggtctttgctgctgaaaagctaggttccaagaaggctgaaaagactggtaccaagccagctgctgttttcgccgaaaccttgaagcatgactagaatttatagtatagatctttaactttaatttaaatatctttgttactagtctttaatcaaacctttttgttttctttaaa

SEQ ID NO: 693 - DNA, 746 bp, Saccharomyces cerevisiae
agggaaaatcgtttataaacggccatgctcacagagaatcatgtatggagatttaggtaataaattagtattagaagctaaaagaacaaaacagctgtacgcaagaagtaatcaagatgttaatttacccatgtatcatgaagatataatacgaaatattctgaaagaagtttcaaatttacgtaaaaatacggaatatcttaaagaacagcagcaactaggaatgctagatgataaggtggctaaatgccagtatttcgttaccttgttatgtatggaaaggaacaagagatgtctcttagcataccaaaggttgagaacagacatactagattctatggcttggaataataatggtctggacttgatgagtagcattacgtttagccaacaagacacaaataacctttctcatcaagagcaggaatatttgaaagaatactgcgatttaattactgatttaaaaagtggtgacttggtcgatattgatttatccggctctttagtgcctccgagcgatgtatttattgatgttagagtgctcaaagatgctggtgagattcaaactgaatacggcgtgtttaaccttattaaagactcccagtttttcgtaaggcagtctgatgtagagcgtttgattcaacaaggttatttgcagaagatatgataaaatgctttcaagctggtcttcatgatatataatcctttataaagcaagatacatacctccattctaatttactccc

SEQ ID NO: 694 - DNA, 1568 bp, Saccharomyces cerevisiae
aggaaaagcgtgtaattaaaaatgttggacatcaaccaatttatcgaagataagggtggtaacccagagctaatcagacaatctcagaaagcaagaaatgccagtgttgaaatcgtcgatgaaattatttccgactacaaagattgggtcaaaacaagattcgaattagatgaattgaacaagaaattcaacaagcttcaaaaggatattggtttgaagtttaaaaacaaggaagacgcttccggattattagccgaaaaagagaagttaacccaacaaaagaaggaattgactgaaaaggagcaacaggaagataaggacttgaagaaaaaagtttttcaagtaggaaatatcgttcatccatctgttgttgtttccaacgatgaagaaaacaatgaattggtccgtacttggaaaccagaggatttagaagcggttggccccattgcttctgtgactggtaaaccagctagtttatcccatcatgaaatcttgctaagattagatggatatgatccagaccgtggtgtaaagatttgtggtcatagaggttatttcttcagaaattatggtgttttcttgaaccaagctttgattaactatggtttacagttcttagctgccaagggttatattcctttacaagctccagtcatgatgaataaagaacttatgtcaaaaactgctcaactatctgaattcgatgaagagttatacaaagttatcgatggtgaagatgaaaaatacctaattgctacctcagaacaacctatctccgcttaccacagcggtgaatggtttgaaaagccacaagagcaattgccaattcactatgtcggttactcctcttgtttccgtagagaagccggttctcacggtaaggatgcttggggtgtcttcagagttcatgctttcgaaaaaattgaacaattcgtcatcactgaacctgaaaaatcttgggaggagtttgaaaagatgatctcttactctgaggaattttataagtctttgaaattaccataccgtatcgttggtatcgtttccggtgaattaaacaatgctgccgctaaaaagtacgatttagaagcctggttcccataccaaaaggagtacaaagaactcgtctcttgctccaattgtactgattatcagtcaagaaacttagaaattagatgcggtataaagaaaatgggcgacagagaaaagaaatacgtacactgtttgaattccactttggctgctacccaaagagctttgtgctgtatcttggagaactaccaaacggaagatggtttggttgtaccagaagttttgaggaaatacattccaggtgaaccagaatttttaccattcgttaatgaattaccaaagaattccacctctagtaaagacaagaaaaagaagaattaaatatagcatatcatgaatgtcacatatatgttgtttctgttctgccaatcttttttaatatatttctcatgatagctccataatcttatatacatggttgcataataaaataaataaataatgagcctttaccaatcgatagtgttcatcgcacgtaa

SEQ ID NO: 695 - DNA, 577 bp, Saccharomyces cerevisiae
ttaagcaaccagcaagatgtccactgaattaaccgttcaatccgagagagctttccaaaagcaaccacacatcttcaacaacccaaaggttaagacttccaagagaaccaagagatggtacaagaatgccggtttgggattcaagaccccaaaaaccgctattgaaggttcctacattgacaagaaatgtccattcactggtttagtttccatccgtggtaagatcttgaccggtaccgtcgtctccaccaagatgcaccgtaccattgtcatcagaagggcttacttgcattacattccaaagtacaacagatacgaaaagagacacaagaacgttccagttcacgtttccccagctttccgtgtccaagttggtgacatcgttaccgtcggccaatgtagaccaatctccaagactgttagattcaacgttgtcaaggtctctgctgctgctggtaaggctaacaaacaatttgctaaattttaagctggttatgaatcagcataagacttacgtaactgtttattttataattatttgtataatgtactaaaaatataaattcaataatctcca

SEQ ID NO: 696 - DNA, 1643 bp, Saccharomyces cerevisiae
tcttttgtccttattgttaagaaacattgcgaagaaaaagaataataaaagaaactcagaaaaaaaaaaagtttcctcgaacaaaaatattattatttcaataactttttctttctctacatccaattttttgaccctattttaacattaattttttgctttaattttaactaatacctaatttcacttaatatctaatcatcttcctttaacccacagaacaaagaagaaaaataacaatgtctacctttgaaactttaattaaaagaggtggtaacgaagccatcaaaattaaccctccaaccggtgcggatttccacatcactagtcgtggttccgattggttctggacatgtttctgttgttacctattatttggtttaattttaacattcttaatgttcagaaaaccagtcaatgacagattcttttaccttaccggtattgctccaaactttttcatgtgtatcgcttatttcaccatggcttctaacttaggttggattccagtcaaggctaagtacaaccatgtccaaacttctactcaaaaagaacatccaggttacagacaaatcttctactctagattcgttggttggttcttagctttgccatggccaattattcaaatctgtatgctagctggtaccccattctggcaaatggctttcaatgtttgtattactgaattcttcactgtttgttggttgatcgctgcctgtgttcactccacttacaaatggggttactacaccatcggtctaggtgctgctattgtcgttagtatcagtgttatgaccaccagttacaacttggtgaaacaaagagataacgatatcaggttgacattccttgttttcttcagcattattatgttcttgtggattattgcttacccaacttgtttcggtattaccgatggtggtaacgttttgcagccagactctgccggtattttctatggtatcattgatcttattttgatgtgtttcattccaactttattggttccaattgctaaccacttcggtgctgacaaattgggctaccatttcggacctagtgatgccgaagcagtgatggctccaaaagctccagttgctagtccaagacctgctgctacaccaaacttgagtaaggacaagaaaaagaagtctaagaagagcaagaaatctaagaagtctaagaagtctgaagaataagccaatcgtcatgtcaattatgtgctactttcttctttctttcaatcatctttgaagaattttctacttcaagccaatcctataaatggataaaactgtctttattgattatttgacaagattattttactccatcttcaacttttatcatattttattttattttcctgacgtttcaatattttcgttcgttaaattatcaccatttcttgtcgaatttttattttctatcataaagtgcaattctagactcattttttaatttaatggatccatttaatccatttcgtcaagcaagtatgttttcataacaatattttgctcagtgcattttgatcaagaaacgtatagttgatgattagaaacgagcttttttatgcccatcgtcatctatatatatatttgtatcactttaatagttattttaatatttgataacaa

SEQ ID NO: 697 - DNA, 1424 bp, Saccharomyces cerevisiae
cgacatatttattttcactatttctcatttatatttatagctactacccctattacgttacaagaacactttatagcattatgttcattaaaaacgatcacgccggtgacaggaaacgcttggaagactggagaatcaaaggttatgatccattaacccctccagatctgcttcaacatgaatttccaatttcagccaaaggtgaggaaaacattatcaaggcaagagactccgtctgtgatattttgaatggtaaagatgatcgtttagttatcgtgatcgggccatgttccctacatgaccccaaagccgcttacgattacgctgacagattggctaaaatttcagaaaagttgtcaaaagacttattgattattatgagagcgtatttagaaaaaccaaggactactgttggctggaaagggttgattaacgaccctgatatgaataactcttttcaaatcaataaaggtctacggatttcgagagaaatgttcataaaactggttgaaaaattacccattgctggtgagatgttggataccatttctccgcagtttttgagtgattgtttctccttgggtgccatcggcgccagaactactgaatcccaactgcacagagaattagcatccggtctatctttccctattggatttaagaacggtactgatggtggtttgcaagtcgccatcgacgctatgagagccgctgcacatgaacattacttcctttctgtcacaaagccaggtgtcactgctatcgtgggcactgaaggtaacaaggataccttcctgatcttgagaggtggtaagaacggtactaactttgacaaagaaagtgttcaaaatactaagaaacagttagaaaaggccggtttgactgatgattcccagaaaagaattatgatcgattgttcccacggcaacagtaataaagatttcaagaaccaaccaaaggttgccaaatgtatttatgaccagctgacggagggtgagaatagtctctgtggtgttatgattgagtccaacataaatgaaggtagacaagatattcccaaagaaggtggcagagagggattgaagtatggttgttctgttacggatgcttgtattggctgggagtccaccgaacaggtattggagctattggcagaaggtgttagaaacagaagaaaggccttgaaaaaatagcctgtaaatgagggaaaaatgcaaataatcttgaatgatactcaaaacttttgatttattgtaatttctttctgaaccatatttattacattcaaacttttttttttttgccttttataaaaaaaaatacttataagaaaagagaaagaaaatgacagttttctatgtatcattaaataaacatccatatacaaatatagcgttatgttttacttttattatttacatgca

SEQ ID NO: 698 - DNA, 1915 bp, Saccharomyces cerevisiae
attatcttacatacattgatttattgctctgtccttcctccgagaaatccgtaataaacttcaatagcataatgtctcaacaagataatgtcaaagccgccgctgaaggtgttgctaacctacatctcgacgaagctaccggggaaatggtctccaagtctgaattgaagaagcgtatcaagcaaagacaagtcgaagctaaaaaggccgccaaaaaggctgccgctcaaccaaaaccggcttccaaaaaaaaaacagatttgttcgctgacctggatccatcgcaatatttcgaaacaagatctcgccaaattcaagaattgagaaagactcacgaaccaaatccatacccacacaagtttcacgtttctatatccaatcctgagttcttggccaaatatgcgcatttgaaaaaaggtgaaaccttacctgaagagaaggtttcaattgctggtagaattcatgccaaaagagaatctggctccaaattgaaattctatgttcttcacggtgatggtgttgaagttcaattgatgtcccaattgcaggactactgcgacccagactcttacgaaaaggatcacgaccttttgaaaaggggtgatatcgttggtgtcgagggttacgtcggaagaactcaaccaaagaaaggtggtgaaggtgaagtttccgtcttcgttagcagagtgcaattattgacaccatgtttgcacatgttacctgccgaccactttggtttcaaagaccaggaaaccagatacagaaagcgttatttggatttgatcatgaacaaagacgccagaaaccgttttattacccgttctgaaattatccgttacatcagaagatttttggaccaaagaaagtttattgaagtagaaactccaatgatgaacgttattgctggtggtgctaccgctaagccatttattacccaccataatgaccttgatatggacatgtacatgagaattgctccagaattgttcttgaaacaattggttgtcggtggtttggatcgtgtttacgaaattggtagacaattcagaaatgaaggtatcgatatgacacataatccagaattcaccacttgtgagttttatcaagcctacgctgatgtttatgatttgatggatatgactgaattgatgttttcagaaatggtcaaggagatcactggttcttatattatcaaataccatccggaccctgctgatccagccaaagaactagaattgaacttttctagaccatggaagagaatcaacatgattgaagaattagaaaaggtattcaacgttaagttcccatctggtgatcaattacatacagctgagactggtgaatttttgaaaaagattcttgtcgacaacaaattagaatgtccacctccactaactaatgctcgtatgttagataagcttgtcggtgaattagaagatacatgtatcaacccaactttcatttttggccaccctcaaatgatgtctccattagccaagtactcaagagatcaaccgggtctatgtgagcgtttcgaggtctttgtagctacaaaggaaatttgtaatgcctacactgaattgaacgatccatttgaccaaagggcacgtttcgaagaacaagctagacaaaaggatcaaggtgatgacgaagctcaattagtcgatgaaaccttctgtaatgctctagaatacggtttaccaccaactggtggttggggttgtggtattgatagactggccatgttcttgaccgactccaacaccattagagaagtcttattgttcccaactttgaagcctgatgttttgagagaggaagtcaaaaaggaagaagaaaattaagctaaaagatattagaacatattgtataatgtaagtattattattctaagatagagcttgaatatgaa

SEQ ID NO: 699 - DNA, 778 bp, Saccharomyces cerevisiae
acattggccaatgcttagaaataccattgcattaagatcatttatcagaacacagtcgacgcgcccatatcctgtaaatgtagaggcagtctactatgctcctttaaagttacctatcaaatatggtgatttagttgcagacattcagttaagatcgtatgacaatgaaaacctcgatttttattcagacttcatacttagaacaggttactatttgggtatcccattgacaggtcctaaacctttgcccacgagaagagaaaggtggactgtaataaaatcacctttcgtgcacgctaaatccaaagagaattttgaaagacatacacataagaggctcattagggcctgggatacgaaccccgaagtgctacagatgttgatagcttacattacgaagcactctatggcaggcgtcggaatgaaatgtaacttctttcaaaggtccgaaatatcgctggacttgggttcggacgccaatggcctcgaaaaatcactaagcaatatcgatgaattgtattctctgagaaacgatgataaagctcaaactagtgctgtcggacaaaaagtattggaactattggatagccccgattttaaaaaacatttggaaaagaagtaaaaagatgatggcaatcctataattacgctggttcttgggaccgaaaagatttcgtacttgtaaataaaataggtgaagaagaggggcaaaaagtagtagattaaatggttatactgaatttataagtaagtttaattatattttttaactatatga

SEQ ID NO: 700 - DNA, 1248 bp, Saccharomyces cerevisiae
ttgtctttctttgttaagcttttattctccgggttttctttttttgagcatatcaaaagctttcttttcgcaaatcaaacatagcaaaccgaactcttcgaacacaattaaatacacataaagatgcctgcccctcaagatccaaggaatcttccaattagacaacaaatggaagctcttatccgtcgcaaacaagctgaaatcacgcaaggtttggaatccatcgatactgttaagttccacgctgatacttggacccgtggtaacgatggtggtggtggtacctctatggttatccaagacggtacaactttcgaaaaaggtggtgttaatgtctccgttgtttatggtcaattgagcccagcggccgtttcagccatgaaagctgatcataagaatctgcgtctaccagaagatccaaagactggtttgccagttaccgacggtgtcaagttcttcgcttgtggtttaagtatggtcattcatcccgttaacccacacgctccaaccacgcacttaaactaccgttacttcgaaacttggaaccaagatgggaccccacaaacttggtggtttggtggtggtgctgatttgacaccttcttacttatacgaagaagacggtcaattattccaccaactgcacaaggatgccttggacaagcacgacactgctttgtacccacgtttcaagaaatggtgtgatgagtacttctacattacccaccgtaaggaaacacgtggtattggtggtatattctttgacgattatgatgaacgtgacccacaagaaatattgaagatggttgaagactgtttcgatgctttcttgccatcctacttgactatcgtcaagagaagaaaagatatgccatatacaaaggaagaacaacaatggcaggccattagacgtggtagatacgttgaattcaacttaatctacgatagaggtacccaattcggtttgagaaccccaggctctagagttgagtcaattttgatgagtttgcctgaacatgcttcatggttatacaaccaccaccctgctcctggttccagagaagctaaattactagaagttaccaccaaaccaagagagtgggttaaataattcaaggttctttagcagaccgattttatgatctcaatgacaatgatgatttaattatttcgaccacttatttatacatttttttatctatttattatacctcctttacataattcttcaaattcaattgatacagga

SEQ ID NO: 701 - DNA, 1362 bp, Saccharomyces cerevisiae
ttgccagcgaaatgttctgccattttcatctttaccgctcgaattagtgatgttccagacgaaggtaacatagagtgatcgataggttcttcaattcatcaagcattatctcagaattgtgtttggtaagctctcttcgagaaaaggaagaacaaaaaaaaaaaaaataaagcaaagaacaggttataacgctatgggtaactttccagctccaaaaaacgatttgatattgagagccgcaaagggtgaaaaagtcgagagaccgccatgctggataatgcgccaggcaggtcgttacctgccggaatatcacgaggtgaaaaacaatcgtgatttctttcaaacttgcagggatgcggaaattgcttctgagattactatccagccggtaagacgctatagaggcctcattgatgctgctattatttttagtgatatcttagttattccgcaagccatgggtatgagggtcgagatgctcgaaggtaaaggtccacatttcccagaacctttaagaaatccggaagacctccaaacggtattagactacaaggttgatgttttgaaagagttagattgggctttcaaggcaatcaccatgacaaggatcaagttggatggtgaggttcccttatttggcttttgcgggggaccttggactctaatggtttatatgacggaaggcggtggatcccgtcttttcagatttgccaaacaatggattaacatgtatccagagctttctcacaaattattacaaaaaatcactgatgtggccgtggagtttctgagtcagcaagtcgtggcgggtgctcaaatactacaagtttttgaaagttggggtggtgagctttcgtctgtagattttgatgagttttccctaccatatttaagacaaattgccgaaagagtgcctaaaagattgcaagaattaggtatcatggaacagattcctatgatcgtttttgcgaaagggtcgtggtatgctttggacaagctatgctgttcaggatttgacgttgtttcgttggactggtcctgggacccaagagaagcggtaaaaataaacaagaaccgtgtcaccttgcagggcaacctggatcctggcgtcatgtatggttctaaagaggtaataacaaagaaagttaaacagatgattgaggcttttggaggtgggaagtcccgctacattgttaatttcggtcacggtacccaccctttcatggatccagacgtcatcaagtttttcttggaggagtgccacagaattggttcgaagtaatgtggaaatattgattcttatagtgttataagtgataatatacgtttatgtaaataatatctttttcacaacgttcaaaa

SEQ ID NO: 702 - DNA, 1545 bp, Saccharomyces cerevisiae
gatctaatccaagagagaagcaaaaaaaaaaagctcgctataaaaatatcatgcaattacattcacttatcgcttcaactgcgctcttaataacgtcagctttggctgctacttcctcttcttccagcataccctcttcctgtaccataagctcacatgccacggccacagctcagagtgacttagataaatatagccgctgtgatacgttagtcgggaacttaactattggtggtggtttgaagactggtgctttggctaatgttaaagaaatcaacgggtctctaactatatttaacgctacaaatctaacctcattcgctgctgattccttggagtccatcacagattctttgaacctacagagtttgacaatcttgacttctgcttcatttgggtctttacagagcgttgatagtataaaactgattactctacccgccatctccagttttacttcaaatatcaaatctgctaacaacatttatatttccgacacttcgttacaatctgtcgatggattctcagccttgaaaaaagttaacgtgttcaacgtcaataacaataagaaattaacctcgatcaaatctccagttgaaacagtcagcgattctttacaattttcgttcaacggtaaccagactaaaatcaccttcgatgacttggtttgggcaaacaatatcagtttgaccgatgtccactctgtttccttcgctaacttgcaaaagattaactcttcattgggtttcatcaacaactccatctcaagtttgaatttcactaagctaaacaccattggccaaaccttcagtatcgtttccaatgactacttgaagaacttgtcgttctctaatttgtcaaccataggtggtgctcttgtcgttgctaacaacactggtttacaaaaaattggtggtctcgacaacctaacaaccattggcggtactttggaagttgttggtaacttcacctccttgaacctagactctttgaagtctgtcaagggtggcgcagatgtcgaatcaaagtcaagcaatttctcctgtaatgctttgaaagctttgcaaaagaaagggggtatcaagggtgaatcttttgtctgcaaaaatggtgcatcatccacatctgttaaactatcgtccacttccaaatctcaatcaagccaaactactgccaaggtttccaagtcatcttctaaggccgaggaaaagaagttcacttctggcgatatcaaggctgctgcttctgcctctagtgtttctagttctggcgcttccagctctagctctaagagttccaaaggcaatgccgctatcatggcaccaattggccaaacaacccctttggtcggtcttttgacggcaatcatcatgtctataatgtaatggaatgaagaaatattcttcatttttgataactagtacctgtcattcacgacatgtgaacaaataaaaacatttatttaaaaattttatgtattcaaatattttcgggaaagagataaaagtaacgacacttaaaaatttaaaaaatcacaatacttta

SEQ ID NO: 703 - DNA, 3218 bp, Saccharomyces cerevisiae
atagatattaaacctctccagtgtctttgttggtacagtaatcaaaaataatgagtgagaacaacggcaatccgctggatttgtcttcactaagaaataagatttcgtcaaaattgcgagacaataacagcaaaaaggcgaagaaaacccacaaaggcaaggacgtgaaggccagtagtaattcaaagaaggtaaatgaggacatacgtcgtgaagcactagcattgggtgccagcgaagaagatctaaaattgattcaaggattaagcgatgatgatgacgctaagagcgaacaggaatttgatgccgtcgctgacgaggatgctgacgacaagggattcaagaacgatcttcaaaatttcatgaagaatgtaggatttgaccaacacaaactcgaagatgtagacgatgacgatatagaagaagaatccactagctccaaagaatctaaaatacccgctcaagagaaggaacatgcacaatcaaacattgcatcatcgacaatagagaaaacctcccaagagtcaatcgataatggcagtgaacaagaagaaaacacagtagaagaggctaatcttagttcagaccaagagccagaatcagaatctgcagagaaagaaaagaaagaggagaaagatggaggtttaattactcaaactactattatctcatctgacaaacttattattccttacgataaaccatggtatgaaattccattggatcctcaagttggacaaaatgatgatgttgaagaattatccaaggaacagattgagaaactttttgaaagaggtaagcaaacgctagaagctgacaaccaaacttactatgaggagtttacaaaggactcatcgcaggccaagttcatgtcccaaatcctatcggacggtaccctcaacgataaaatatctgccgtaactttactcattcaagattcgccattgcataacactaagtctttagaaactctggtttcatattgtggcaaaaaatcgagaaactctgctttacagagtttaaacgctttgaaggatttattcttaaatggtcttttgcccaacagaaagctgaggtatttcaaaaatcaacctggcttatctatgatgctaaacaagaaaactcttgcaattttctatttcgaagattatttaaagaaactgttctttcgtgttttagaagtcttggaagtgctttcccacgatccaattattcacgttagattacaaatattaaatcatgtatttgatttattgaccaaccaaccagagcaggaatttaatttattgagattaggtgtaaataaaattggtgatattgattccaaagtttcttcgaaggcgtcatatttactactgaagttggaacaagctcatccgaatatgaaatctattgtcattgatgctatcgttgatatcgcattgagaccgaatgcggattatcataccacttactattctgttattactttaaaccaaaccatcttaaaaagatcagaagactctgttgctaataaattagtaaaaacatacttcactttgtttgaaaaattcttgattaatactgataaagacaataccaatggcgttgttaagagtaactcaaagtcgtatgaggagaaaagaaagaagaactttaaaaagggtaaacacggtggtaaatctgtaaaaatcgaaaaaacggaaaatgaagttttagatgaaaagaactcaaaattattcagtgctttgttaacaggtatcaatcgtgcattcccattcgctcagattccagcgtctgtctatgaagtacatatggaaactcttttcaaaatcacacactcctctaactttaacacctcaatccaagcattagttttgattaatcaagtcaccgtcaaagcaaagttgaacagtgatcgatattatagaacattatacgaaagtttatttgaccccagactggtgaactcttctaagcagggtatttacttgaatttactatacaaatcattaaaacaagatgcactcaacgttgaacgagtagaagcctttgtcaagagaattcttcaagtttgttctcattggttgaacgtcggcaccattactggttttttcttcttattaatccagttggctaaaacagttccacaaataaaaaatcttctaaccaacacgccagttgattacgagtatgaatctgatgcagaagaggagcaaggggacaaggacataaaaaggaaggaatacgacggccgcaagcgtgatccaaagttcgccaatgctgaaaaatcttctttatgggaaatcaacaacttcatcaatcattttcatcctactgtgaaaacatatgcaaacgcctatgtgacaggagaaacagagcaaatagctaaaccagacctgggtctatttactctatcacacttccttgacagatttgtctacagaagtgccaagcagaccaatacagcaagaggtacatctattatgcaacctctgtttagtggctcacgagttaatgactctgtcttagttaaggcatctgatattatgcatgaccagggtcccgtgaacactgaagactggctaactaaaaaagttgaagatatcaaacctgaagataaattcttttatcaatatttcactaccaagaaaaccgctgatggaaaaggaaagaaatctaacaaagcatctaatttcgatagtgatgacgaaatggatgaaaatgaaatttggagtgctttggttaaatcgagaccagatgttgaagatgatagcgacgacagtgaacttgacttcgctgaagatgatttcagcgattcaactagtgacgatgaacctaagctggacgcaattgatgatgaagatgctaaaagtgaaggcagccaagaaagcgatcaagaagaaggcctcgatgaggatattttttacagtttcgatggagaacaagacaatagtgataaaaaacgttccttcgctgaaagtagtgaagaggacgagagcagcgaagaagaaaaagaagaagaagaaaataaagaggtatccgcaaaaagagcaaagaagaagcagagaaagaatatgctcaaaagtctaccggtatttgcatctgccgacgattatgctcaatatttagatcaagattcagactagaaaataataatacattaactaaacacttcggtgttgtaaattaaataaggaaaacagaattttgtacaataaaaaacggtccaatacgaa

SEQ ID NO: 704 - DNA, 1788 bp, Saccharomyces cerevisiae
taagcaaaacaaatttgtgaatacttgattaatattctgtgaaagattttttaattatgagtaccaataagttcgttgtacgaataacgaatgcgctcttcaagtcatcactggctagcaacagtccacctgtttaccctaagaggattaggcatttcgagattttacccaacgaaaaatgggttatatggggacctggaaagggcaagttcttggatgtactgaataacaagtatatttgtgagcccccattatctttgaggtttggatttttgaaggaaagttcgaacatcctgccgaggatagagcaagtggccttcaaaggggttatgccaacggctcatttaagtgctagatatgaatacttcaaagatgactacgatcaaacctgcaaacagtttatatttgataaggcaagcggatcaaatgctgtttcatataaagttgagacgaacaatcggcaaataaacatggagctgtacaatgcattagttgaaaatttaaacctctccagtttacaggataggtgggtaatgggattgagtaatggacaaatgaggagagcaaggttagctcgtagtatactcaaggaaccggatctactacttattgacgacccatttttagggttggatccagccgcaatagcaaccatttcacaatttttagccaaatatgatagtatagaagtcagtggcggatgtccaatcgtcattggtttgaggtatcaagataccattccagcatggtgtactcatatatgttgcgttgatgagaaaaacggtatattgtttgaaggcccaatcgaaaaacttcaaagtaaaatggatgaaaccagatcaagggcactaaaagaactagagcagctcaaaaaagcgtctaattccaaagaggacatttccattaacgatttgatttgtatacatcctatgtatggcaagaaagagcacgaaattatcaaaatgcctcatcttatagaattagacgggttgagcgtttcatacaaaggcgaagctgttttggaaaatctgcactggaaagttcagccgggttcgaaatggcatataagaggtgacaatgggtcaggtaagtcgaccttattatctttgcttacggcggaacatccccaatcgtggaattcgagggtgatagataatggcgtcccacgaagaacaggtaaaacaaactactttgacctaaacagcaaaataggtatgtcatcacccgaattacacgcaatttttttgaagaatgctggaggaaggctaaacattcgggaaagtgttgcaactggctatcatgaggcgtcctccaacaattacctacccatatggaagcgcttggacaaaaatagccaagaaatagtgaatatgtatctgaaatattttggcctggacaaagacgccgatagtgttttatttgaacagttgtccgtaagtgaccagaaactagtcctttttgtcaggtctttaattaagatgccgcaaatattgattctcgatgaggcattttctggaatggaggtagaacctatgatgcgttgtcatgaatttttagaggagtggcctggaacagtccttgtagtggcacacgttgccgaagagacaccaaaatgtgcccattacttaaggctcatatctcctggagagtatgaaataggcgatatggaaaattaaagttttctgttgtgtggcagcaagagacagaacctcgataatttgacatacgtatataatagtacatgtacataaaaagctacgcaaatatcgtatatctgttatactacaa

SEQ ID NO: 705 - DNA, 2049 bp, Saccharomyces cerevisiae
taaaggaaaaaaagcataaagaagattccacacactttattgtgatagttttcaaagtaaaaagtaatagattatgagtactcctgcaaactatacccgtgtgcccctgtgcgaaccagaggagctgccagacgacatacaaaaagaaaatgaatatggtacactagattctccggggcatttgtatcaagtcaagtcacgtcatgggaagccactacctgagcccgttgtcgacacccctccttattacatttctttgttaacatatctaaattatttgattctgattatattaggtcatgttcacgacttcttaggtatgaccttccaaaaaaacaaacatctggatcttttagagcatgatgggttagcaccttggttttcaaatttcgagagtttttatgtcaggagaattaaaatgagaattgatgattgcttttctagaccaactactggtgttcctggtagatttattcgttgtattgatagaatttctcataatataaatgagtattttacctactcaggcgcagtgtatccatgcatgaacttatcatcatataactatttaggcttcgcacaaagtaagggtcaatgtaccgatgccgccttggaatctgtcgataaatattctattcaatctggtggtccaagagctcaaatcggtaccacagatttgcacattaaagcagagaaattagttgctagatttatcggtaaggaggatgccctcgttttttcgatgggttatggtacaaatgcaaacttgttcaacgctttcctcgataaaaagtgtttagttatctctgacgaattgaaccacacctctattagaacaggtgttaggctttctggtgctgctgtgcgaactttcaagcatggtgatatggtgggtttagaaaagcttatcagagaacagatagtacttggtcaaccaaaaacaaatcgtccatggaagaaaattttaatttgcgcagaagggttgttttccatggaaggtactttgtgtaacttgccaaaattggttgaattgaagaagaaatataaatgttacttgtttatcgatgaagcccattctataggcgctatgggcccaactggtcgcggtgtttgtgaaatatttggcgttgatcccaaggacgtcgacattctaatgggtactttcactaagtcgtttggtgctgctggtggttacattgctgctgatcaatggattatcgatagactgaggttggatttaaccactgtgagttatagtgagtcaatgccggctcctgttttagctcaaactatttcctcattacaaaccattagtggtgaaatatgtcccggacaaggtactgaaagattgcaacgtatagcctttaattcccgttatctacgtttagctttgcaaaggttaggatttattgtctacggtgtggctgactcaccagttattcccttactactgtattgtccctcaaagatgcccgcattttcgagaatgatgttacaaagacggattgctgttgttgttgttgcttatcctgctactccgctgatcgaatcaagagtaagattctgtatgtctgcatctttaacaaaggaagatatcgattatttactgcgtcatgttagtgaagttggtgacaaattgaatttgaaatcaaattccggcaaatccagttacgacggtaaacgtcaaagatgggacatcgaggaagttatcaggagaacacctgaagattgtaaggacgacaagtattttgttaattgaattttacctaattgctagttaggtgaaaaattacaaaatttctggaagacgttggaaacacgcaacgtcttttttgacataaacttaaaactgccaaaagtcaaacaaaaattgcaaaaaaagtaaaaaaagttacgaaaaaaaaaacatttaaaagaaagaagaagttaaaagtgcacgcaatatgttccaggatatgaaatgaaataccttttgtttcaccttttaaataatttaatgttatatatacaactttatcgtatcatattcgcaattacattatacaagaa

SEQ ID NO: 706 - DNA, 633 bp, Saccharomyces cerevisiae
ttatcaattcttttgttcactgattttgaatttatcagctaccattgatttaaacccattatttagttttgcaattgcgtcctcaaagcatcgagcaaacaatcatgtcgaacctctacaaaattggaactgaaactagaaataaaatcaagaagtttcgtacatctacagcaagaaccgactccataaaagctttatcaataaagatcgaaccaaaaccgtcctatgagataattgtcgatgaagacgaacaagaagagctagacgaaattgaagatttgagcgaattagccgagatcctacctgataactcacctagatttgtactaactgcatatccaacaacaacaaaagatgggttcaaacagactcccttagttctagtatattggaagccaatgacggtcgtttcacaggaatggaagatgctttatgccggcgcattagaaatgatcagagaggagtgcggtacttttaaattgatagaggtttcttcaggtttggaggatgactcagacgttgaagaattgagggagcaattagaaaattgttagtatagtctatcttaaacactaaactacctcctataatcatgtagtgtactttaaacatttttttatcttcatagcaata

SEQ ID NO: 707 - DNA, 1157 bp, Saccharomyces cerevisiae
gaacagacttcccataaaagcatattacgtggggtcgtagtaagattgccgtttatgataccctctattcagggctcagagcgcatcacgatcgggagtgtaaattcaatgtgcatataagcaaaacacacagatttccttttttcccagaaaaatgagcagtgaaattgcctactcgaatacgaacaccaacactgaaaacgagaaccgcaatactggcgctggcgtagatgtaaatacaaatgcaaatgcaaatgcaaatgcaactgcaaatgcaactgcaaatgcaactgcaaatgcaactgcagagctgaacctccccacggtcgatgagcaaagacagtataaggtacaactgctattgcatatcaacagcatattacttgctagagttattcagatgaataatagtttacaaaacaatctacagaacaatataaataatagcaataacaataacatcatcaggatacagcaacttatatctcagttccttaaaagggttcatgccaatcttcaatgcatatctcagataaaccaaggagtgccctcagcgaaaccactgatcctcacgcctcctcagctagccaaccagcagcaacctccacaggatattctttctaaactctatcttctcttggcaagagtgttcgagatatggtagaataactttgtttctcttcccttttttattttgtttttttttttttacttttgcaattttaattttgcattcagctacaggtgtgattgcatacccgcagagcaagtacaggaagcataagaaaaatagaatacgaaaagcagaaaaagaaaggcaaataacaatcactcaagtactacaactgcatgaatttatcgtatgtaatgtacccaacgtaaataataatattagtattttaaaatctatgacatcagatgtagttatcttactgccagccctattaatactactttcttattatcttcttcgagagccaccttcgtcatcgtcgcagtaagcattgtcatcttcatcatgcacgtcggtaacggaagcctaatctcaatatctactagtttactctacgccatttggagcgtagccccttctccttttgactctctgacttttccctcccctccttctcttctggcctagcctaacctagtctagc

SEQ ID NO: 708 - DNA, 3006 bp, Saccharomyces cerevisiae
accaacgtacccagttcacgttgaacaagcaatagaaaaccaaaataacactgcctgtcactatttctgtgccgaaatgaccaccactgcccaagacaattctccaaagaagagacagcgtatcatcaattgtgtcacgcagctgccctacaaaatccaattgggagaaagcaacgatgactggaaaatatctgctactacaggtaacagcgcattattttcctctctagaataccttcaatttgattctaccgagtacgagcaacacgttgttggttggaccggcgaaataacaagaaccgaacgcaacctgtttactagagaagcgaaagaaaaaccacaggatctggacgatgacccactatatttaacaaaagagcagatcaatgggttgactactactctacaagatcatatgaaatctgataaagaggcaaagaccgatactactcaaacagctcccgttaccaataacgttcatcccgtttggctacttagaaaaaaccagagtagatggagaaattacgcggaaaaagtaatttggccaaccttccactacatcttgaatccttcaaatgaaggtgaacaagaaaaaaactggtggtacgactacgtcaagtttaacgaagcttatgcacaaaaaatcggggaagtttacaggaagggtgacatcatctggatccatgactactacctactgttattgcctcaactactgagaatgaaatttaacgacgaatctatcattattggttatttccatcatgccccatggcctagtaatgaatattttcgttgtttgccacgtagaaaacaaatcttagatggtcttgttggggccaatagaatttgtttccaaaatgaatctttctcccgtcattttgtatcgagttgtaaaagattactcgacgcaaccgccaaaaaatctaaaaactcttccaatagtgatcaatatcaagtctctgtgtacggtggtgacgtactcgtagattctttgcctataggtgttaacacaactcaaatactaaaagatgctttcacgaaggatatagattccaaggttctttccatcaagcaagcttatcaaaacaaaaaaattattattggtagagatcgtctggattccgtcagaggcgtcgttcaaaaattaagagctttcgaaactttcttggccatgtatccagaatggcgagatcaagtggtattgatccaagtcagcagtcctactgccaacagaaattccccccaaactatcagattggaacaacaagtcaacgagttggttaactccataaattctgaatacggtaatttgaatttttctcccgtccagcattactatatgagaatccctaaagatgtatacttgtccttactaagagttgcagacttatgtttaatcacaagtgttagagacggtatgaataccactgctttggaatacgtcactgtcaaatcgcacatgtcgaactttttatgctacggaaatccattgatcttaagtgagttttctggctctagtaacgtattgaaagatgccattgtggttaacccatgggattcggtggccgtggctaaatctattaacatggctttgaaattggacaaggaagaaaagtccaatttagaatcaaaattatggaaagaagttcctacaattcaagattggactaataagtttttgagttcattaaaggaacaggcgtcatctaatgatgatatggaaaggaaaatgactccagcacttaatagacctgttcttttagaaaattacaagcaggctaagcgtagattgttcctttttgattacgatggtactttgaccccaattgtcaaagacccagctgcagctattccatcggcaagactttatacaattctacaaaaattatgtgctgatcctcataatcaaatctggattatttctggtcgtgaccagaagtttttgaacaagtggttaggcggtaaacttcctcaactgggtctaagtgcggagcatggatgtttcatgaaagatgtttcttgccaagattgggtcaatttgaccgaaaaagttgatatgtcttggcaagtacgcgtcaatgaagtgatggaagaatttaccacaaggaccccaggttcattcatcgaaagaaagaaagtcgctctaacttggcattatagacgtaccgttccagaattgggtgaattccacgccaaagaactgaaagaaaaattgttatcatttactgatgactttgatttagaggtcatggatggtaaagcaaacattgaagttcgtccaagattcgtcaacaaaggtgaaatagtcaagagactagtctggcatcaacatggcaaaccacaggacatgttgaagggaatcagtgaaaaactacctaaggatgaaatgcctgattttgtattatgtttgggtgatgacttcactgacgaagacatgtttagacagttgaataccattgaaacttgttggaaagaaaaatatcctgaccaaaaaaatcaatggggcaactacggattctatcctgtcactgtgggatctgcatccaagaaaactgtcgcaaaggctcatttaaccgatcctcagcaagtcctggagactttaggtttacttgttggtgatgtctctctcttccaaagtgctggtacggtcgacctggattccagaggtcatgtcaagaatagtgagagcagtttgaaatcaaagctagcatctaaagcttatgttatgaaaagatcggcttcttacaccggcgcaaaggtttgaaacaccctttttaacgaaatggttatgactagacagacatcttacgtcttactccttcatgctttatttttttctttgtattgtatttgaacagtcaatatgtggtgttgcgacgaaggcatatatataatagtctcaacccaccattttcgaagatttacatacacattatatttttataaacttccaatatgtaataactttatatgatatgtaacttctcactattatccttacta

SEQ ID NO: 709 - DNA, 1417 bp, Saccharomyces cerevisiae
attctcttgtaattattgatttatagtcgtaactacaaagacaagcaaaataaaatacgttcgctctattaagatgaaattatcaactgtcctattatctgccggtttagcctcgactactttggcccaattttccaacagtacatctgcttcttccaccgatgtcacttcctcctcttccatctccacttcctctggctcagtaactatcacatcttctgaagctccagaatccgacaacggtaccagcacagctgcaccaactgaaacctcaacagaggctccaaccactgctatcccaactaacggtacctctactgaagctccaaccactgctatcccaactaacggtacctctactgaagctccaactgatactactactgaagctccaaccaccgctcttccaactaacggtacttctactgaagctccaactgatactactactgaagctccaaccaccggtcttccaaccaacggtaccacttcagctttcccaccaactacatctttgccaccaagcaacactaccaccactcctccttacaacccatctactgactacaccactgactacactgtagtcactgaatatactacttactgtccagaaccaaccactttcaccacaaacggtaagacttacaccgtcactgaaccaaccacattgactatcactgactgtccatgcaccattgaaaagccaacaaccacatcaaccaccgaatacactgtagtcactgagtacactacttactgtccagaaccaaccactttcaccacaaacggtaagacttacaccgtcactgaaccaaccactttgactatcactgactgtccatgtactattgaaaagagcgaagcccctgagtcttctgtcccagttaccgaatctaagggcactaccaccaaagaaacaggtgttactaccaaacaaaccacagccaacccaagtctaaccgtctccacagtcgtcccagtttcatcctctgcttcttctcattccgttgtcatcaacagtaacggtgctaacgtcgtcgttccaggtgctttaggtttggctggtgttgctatgttattcttataaacggtggtgtttgacacatccgccttcttaatgctttctttcagtattatgttatttttttgttattcgtttttcacttctaggctttttgacagactagccccgttataccaccatctttgtgggaaagcccctaaattgccctgagcagtatcgtttcatgtctagtctctttaaagatgtttcttacgcgttgcgtgtaaaacatcctctcattcaagacagggttttctaaaagcaataggggtagtttaataattcttatataatcatcatatacactatttttagttcttaattctttaatacaaacttattaatgtgctc

SEQ ID NO: 710 - DNA, 621 bp, Saccharomyces cerevisiae
actttacactcttctgttctttttttttccaatattagcaaataaggtcaggttcattgtaacatagttagaaatggcatcattacccaagagaataatcaaggaaactgagaaattagtaagtgacccagtacctggcattacagcagaaccacatgacgacaacttacgttacttccaagtaacaatcgaaggcccagaacagtcaccatatgaagacggtattttcgaattagaattatatctgcctgacgactatccaatggaagcaccgaaagtacgttttttaaccaagatatatcatcccaatattgataggttgggccgtatatgtcttgatgtgcttaaaactaattggtcacccgctttacagatcagaaccgtcctgctgtccattcaagcactgttggctagccctaatcctaatgatccgctagctaatgacgtcgctgaagattggataaagaatgagcaaggtgccaaagctaaggctcgcgaatggacgaaattgtatgcaaagaagaaacccgagtgatcatttctgtataagttttctcaactgaatatataaatatatatcattactatgctgctgctgctgcaaaaaaaaaaaaatttacg

SEQ ID NO: 711 - DNA, 4839 bp, Saccharomyces cerevisiae
atgtcaagtccctccaaacccacttctcccttcgtggatgatattgagcatgaatcgggatcagcatctaatggtctgtcgtccatgtcaccatttgacgatagttttcaatttgaaaaacccagtagtgcgcatggaaatattgaagtagcgaaaaccggcggttctgttttgaagcgacaatctaagccaatgaaagatattagcacacccgatctctcaaaagttacttttgatggaatcgatgattatagtaacgataatgatattaatgatgatgatgaactcaatggtaaaaaaaccgagatacatgaacacgaaaatgaggtggatgatgacctccattcgttccaggcaacacctatgcctaatactggaggctttgaggatgttgagttggataacaatgaaggtagcaacaatgattcccaggcagatcataagttgaaaagagtacgttttggtacaagaagaaataagtcaggtaggatagatataaataggtcaaaaacattgaaatgggccaagaagaacttccacaatgctattgatgaattcagtacaaaagaagacagtctcgaaaattcagccttgcaaaataggtctgatgagttgagaacagtttactataatttacccttgccggaggacatgcttgacgaggacggcttaccgttggcagtttacccgcgtaataaaatcaggactacgaagtatactccattaacattttttcccaagaacattcttttccaatttcataattttgccaatatttactttttaatactgttgattctaggtgcttttcaaatatttggtgtgacaaatccaggttttgcatccgttcccctaattgtcatcgtaattatcactgctattaaggatggtatcgaagattccagaaggactgtattggatttagaagttaataatacaagaacacatatcttaagcggggtgaagaatgaaaatgttgctgttgataacgtttccttatggaggcgtttcaagaaagcgaatacaagggcattgattaaaatttttgagtatttttcagaaaacctcactgctgctggtagagaaaagaagttacagaaaaaaagggaagaattacgaaggaagaggaactcgagaagctttgggccacgtgggtctctggattcaattggtagttacagaatgtctgccgactttggtcgtccctctttggattatgagaacctgaatcaaacaatgtcacaggctaacaggtataacgatggtgaaaatttagttgatcgaacgctacagccaaaccctgaatgtaggtttgccaaggattactggaaaaatgttaaagttggtgatattgttcgtgttcacaataacgatgaaattcctgctgatatgatcttattatcgacatcagatgttgatggcgcttgttatgtggaaaccaaaaatttggatggtgaaacaaatctaaaggtccgtcaatcattaaaatgtagcaagattattaagagttcaagggatattaccaggacgaagttttgggttgaaagtgaaggcccacatgccaacttgtattcttatcaaggtaatttcaaatggcaagatacacaaaatggaaacatcagaaatgagcctgtaaatatcaataacttattattgagaggttgtaccttgagaaacactaagtgggccatgggtatggttatttttactggtgacgataccaagattatgataaacgctggtgtcactccaaccaaaaaatccagaatttcaagagagttgaatttttctgtgattttgaattttgtactattgtttatcctatgtttcactgctggtattgttaacggtgtttattataaacagaaacctcgatcgagagattattttgaatttggtaccattggaggttctgcctcaactaacggttttgtttctttttgggtggcggttattctttatcagtcattggttccgatctctttatatatttctgtggaaattattaagacagcacaggctattttcatttacactgatgttttgttgtataatgccaagctagactatccatgtacaccaaagtcgtggaacatctccgatgatttgggtcaaattgagtatattttttcagataaaacaggcaccttgacacaaaatgtgatggaattcaaaaaatgtactattaacggtgtgtcttatggacgtgcctatacggaggcactagcaggcctgaggaagagacaaggtgttgatgtcgaatcggaaggtcgtcgcgaaaaggaagagatagcaaaagatagggaaacaatgatcgacgaattaagatcaatgagtgataatacacagttttgtccggaggatttaacttttgtatctaaggaaattgtggaagacttgaaaggatccagtggcgaccatcaacaaaagtgctgtgaacactttttgctggcgctcgcattatgtcattctgtccttgtggagccaaataaagatgatcctaaaaaactggacatcaaggctcaatcacctgatgagtctgccttagtttccaccgccagacaattagggtacagtttcgttggtagttcaaaaagtggattgatagtagagatccagggtgttcaaaaggagttccaagttctgaacgtacttgaattcaattcgtcgagaaaaaggatgagttgcattatcaagatccctggctctacaccaaaggatgaacctaaagcactgttaatatgtaaaggtgcggattccgttatctattcaagattagatcgcactcaaaacgacgctactttgttggaaaagacggccctccatttggaagaatatgccacagaaggtttaagaacattatgtttggctcaaagagagctcacgtggtccgagtatgaacgttgggttaagacttatgatgtggccgctgcatccgttactaatagggaggaagagttggacaaagttactgacgttattgaacgtgagcttattttgcttggtggtacggccattgaggatcgtttacaagatggtgttcctgattcgattgccctcttggccgaggccggtattaagttatgggtcctaacgggtgataaagtggaaactgccattaacattggtttttcctgcaatgttttgaacaatgatatggaattattggttgtgaaggcttccggcgaagatgtagaagaatttggtagtgaccctattcaagtggttaacaatttggtgacaaaatacttaagggaaaaatttggcatgagtggatccgaggaggagttaaaagaagctaaaagagagcatggtttgccacagggaaattttgctgtcattatcgatggcgatgcgctaaaagttgctttgaatggtgaagaaatgagacgcaagttcttgctactgtgtaagaattgtaaagctgttttgtgttgcagagtttctccagcacaaaaggctgcagtggtcaagttggtaaaaaagaccttagacgttatgaccttggccattggtgatggttcgaatgatgtagccatgattcaatcggcggacgttggtgttggtatcgcgggtgaagaaggcagacaagctgtcatgtgttctgattatgccatcgggcagttcagatatgtgacaagactggtattggtgcatggtaaatggtgttataagagactggcagagatgatcccacagtttttctacaagaacgttatttttacgctatccctgttctggtatggtatttacaataatttcgatgggtcgtatttgtttgagtatacgtacttgacattctacaatcttgcattcacatccgtacctgttattttactagcagtactcgaccaagatgtttccgacaccgtttcgatgctggtgccacagttgtaccgtgtgggtatcctaagaaaagaatggaaccaaaccaaatttctttggtacatgttggatggtgtataccaatctgtgatatgcttctttttcccctatttggcgtaccataaaaacatggttgtaactgaaaatggccttggactagaccaccgttactttgtcggtgtcttcgttacagcaattgcagtcacttcatgtaacttttacgtcttcatggaacagtatagatgggactggttctgtggcctattcatatgtctatcactggccgtgttttacggctggacgggtatatggacaagctcgtcgtcaagtaacgaattttacaagggtgcggcgcgtgtattcgcacaacctgcctattgggcagtacttttcgttggcgtgctgttctgcctactgccaagattcaccattgactgtatcagaaagatattctatccgaaagatatagagatcgttagagaaatgtggttacgcggtgattttgacctctacccacaaggctacgaccctacggaccctagcaggcccagaataaacgaaatacgtccccttacagatttcaaagagcccatttcactggacactcattttgatggtgtcagccactcacaagagaccatagtcacagaggaaataccaatgagtatactcaatggtgagcaaggctcgcgcaaggggtaccgtgtctctaccactctggaacgccgtgaccagctcagccccgttacaacaacgaacaacttgcctagaagatcaatggccagtgcccgcggaaataagctcagaacttcgctggatcgcacaagagaagagatgcttgccaaccaccaactggacacaagatactccgtggaaagagcacgtgcctcgctggatctgccgggtatcaatcatgcagagacgctgctcagccagcgcagcagggaccgttaa

SEQ ID NO: 712 - DNA, 1872 bp, Saccharomyces cerevisiae
cgtatgttttacctctcaataacttgtttcattaatagctccttccacaaccaccttcatcttctctgatttgaattattaccgacatgaatgttactctcctgaaaatgttaattatatcaacttaacaggccttgaaagtgaagtgttatagtttctcttcctttgtttttcccactttcttttttttatatatatcttatattggtttaagcacagcggattgctttcttctaatacaagaactagaacataggtccacccgtgtgatgttgcattctgaaatgtttagttatctctgtcagaacagcgaggtaacacttatttttgttacgaccaatccgtaattcaagcgtgggtattcatatgaccagagataataatacagcgaatactattgaaatcgtcccttttttgtttaggaagaacggacaaatcggtcgtctgctcgaaatgattagtagtgtgtcacccggatcagcaaaatgacacacacgaaatacgaggaaaaagtcggtcgaaaggggcaaatgttattataagtccctccagtagtcttttttttttcaaatattcatcatcaaaggttacgaaatcttttgagctatcttaaacattcgttctttttatcaaatttcaattactaacttattttttcaaaaaaaattgcctctcccggtttttaatcattatttttttcgattgattaagggggaaaagcaaagaacgagaaaacttggacagaaggttaatactctgacaatttcaaaacgaagtaaaaagaaaaattatcaaatcaacaaaaagtacccgttacaacaaaaaaaatgtcccaaactcgtgaagattctgtttacctagctaaattagctgaacaagccgaacgttatgaagaaatggtcgaaaacatgaaggccgttgcttcatcaggtcaagagttatctgtcgaagaacggaatctattgtcggttgcttacaagaacgtcatcggtgctcgccgtgcttcatggagaatagtttcttcgatcgaacaaaaagaagaatcaaaggagaaatctgaacatcaagttgaattaatccgttcttaccgttctaaaattgaaactgaattgaccaaaatctctgacgacattttatctgtgttagattctcatttaatcccttctgctactactggtgagtctaaagtattttactataagatgaagggtgactaccaccgttatttagctgaattttccagcggagatgcaagagaaaaggcaaccaactcctctttggaggcttataaaaccgcttccgaaatcgccacaactgaattgcctccaactcacccaattcgtttaggtctagctttgaatttctccgtcttctattacgaaattcaaaactctcctgataaggcttgccacttggccaaacaagcctttgatgatgctattgctgagttagatactttatctgaagaatcatacaaggatagcactttgatcatgcaattattaagggacaacttgaccttatggacctctgatatttctgaatctggtcaagaagatcaacaacaacaacaacaacagcaacagcaacagcaacaacagcaacaacaagctccagctgaacaaactcaaggtgaaccaaccaaataagagcgctgagaaatacaaggggaaatgaagatttaccactccagttttcttgctaacgaaaatgaatgcaattcgattttgatactttttttaggggaagagataatatcttcgtctaatacaaattcacaaaattttcaattttaccaactacaaaatatacaaacctctaaaaaaatagtttcttaatatataacataaaatagtttttctgttactatta

SEQ ID NO: 713 - DNA, 588 bp, Saccharomyces cerevisiae
ataaccacaagggatcacaaacgaaaggatgtcagttattcctccaaaattcttcaagattgcaaatatatcaattggctgcatagacattattgctgccctttcacaattgacgtatattttcaccaatttaaacgtcttcctcttggcagtttacggactggcactctccgtacctatcgtctatctggagttcaaggttccgtcaaatctttacaggtatgcttccttttactttagttttcttggaaggggtttatcttatattttactaagtctgataatcagcttcggcggtatctacaacatattggcgggaatgtttacttttattttaggggttgcctttattgtttttcatttttcccagtttgtggaagaacctgctaacttcagagcacccggctcatctttgtcaattggtgatgatgacatcgacgatgacgatgacatgatttaatattagaagcccatgtctctcaatccgccggtgttacaaaagcatggcgaaacaggcgtgagatatttaatcttccatctcatctgtatagcaaataaaatgtaattataatgcaagattctgagcaa

SEQ ID NO: 714 - DNA, 439 bp, Saccharomyces cerevisiae
atgccactatttgcaaggctctgccagcctcaatcaagaagaatgttttcatctatatcttctttctctgctctatctgtgttacgcccacaaaccggtatgctcttaaacagttcaccattgaagactccgtccttcacaccgttgggatttggcttaataggtcaaagaagatggaaatcaaggggtaacacctatcaacctagtacattgaaacggaagagaacttttggtttcttggctagggccaagagcaaacagggctctaagatattgaaaaggaggaagctcaaaggtaggtggtttttgtctcattgaaatttcacatactattcagataaatttgaatacttcttgtacataggtatctaatgattatgcaacatacactttcactattattcaaaaataaaagagcagttactttattccactttaa

SEQ ID NO: 715 - DNA, 2440 bp, Saccharomyces cerevisiae
cgaagtgtcagtttactcagatttttgctacttttgattactttttttttacattttcaaggtaattgacgtcggttaagtagagatggggaagaaggatagacagcgcaagaaactgcgtgagtttgctaaattgaaaaacaggcagcgaaacttgagaaagagcgtgcaaacattgaagaatgaggttcaacgagaggctaaagtcccaagaacttcgaatcaaattgctttaggaaacgacaaaatcgaagagattaacgaaaatagtccattattatcagctcctagtaaacaagaggaggtatcaattccgaaagcggttgatattgataccattgatgcacagcctcttcacgaaggcccaaaaattgatgactcgccccaagatgaggtcaatagcattaaaggaaaacctgcggacaaggctaatgaagacgatcttaagccgccttcacaacatgaagcatgtggaaattcagctttgcaaagctctattacagattttagtgatagatcagtatcaccattgcaaagtattaccagctgcaatactccgatgagtgagcacgagctaccagtatcttcctcaaattcgtttgaaagagctgatgatatgcctgtagtgcaggcagataaccagacgtcaagtagtaaatctttgcacattgttgcaccatctcctgaagtaccagtcagcggagatgaaatcacttcatatggatatggctctataccccagagcatcggggatgtagagaacggattgaatcctccttatgtcgaaaatacatcatctgatgaacttgtacatgatctgacgagaagacggatattttcatcctgtatgtgtacttatttattctttattgcaatggacagttctataatcctagtaattgcgtccaaaattgcttcggagtttcatgagttatggagattatccttagtcatctcagcatacctattgagtaatgctattgggcaactggtatttttgaagctatctttaatatccagtgtaaaattgttgttgtgtattgctcaattcagttttatccttggtggctatttatcttggagttctgcccatttttggacgtttatctttgcccgttgtgtcacaggatttgggggcggttccttaatagcgctcaaaagtactattatgaatcggttttctcaaaagaacgacagtcggtactcattgagtgcctctatgataacatttgctatgggtgtggtaattgggccctttatgatgaacttgtttgattcttctcatggtagcgggtggagaaatgccttcttaataccagttcctttttgccttgtgaatgcctcgattatgctggcagatatgtattctgttaagagcactttatatggacgcccaacgcctacattatggaaaagattcaagaatactctattaagtcctgatttatacgaaatattgacacttacgctattcctactttgtttcgttcaagtgacctcattggatttaacagggttaaagaataatacgatgattcaagcgctactattttctgtaattatcgtttgtggcattttatttttcttgatagagacaagcgatacttacatgaactctgtaatttcaatgtccttacaaggtgacaagcgtttaatatggacaatgataggaatttcattttgctttgcagcattaatgtgcatcatcccattcggtacaacgtacttcatcattgttttaaatttaagcactttacaacttgcagagagattgtccccattctttttctccattgtactgggttactttagtgtttcttatttttggaagtcgaaaggacagaattttttgctaaaatttgttttaagcggagccaccctgttactatatgtggcacttatgggggtaagtttgaatttaccagtatggaagcaatatatatgtttgtctctgccatttttgggctcctctatgatattgaccttgctgtcaaatctttatcatgagtaccatgaacaaagaaagtcacctatcagtggttctatcgtatattgtttcggtgccgtgggggggacggttggtatttccttgggtggttatgtcttccacaaaacattaataaaacttatgcatgagaaggtgatgccatttagcaagcaaggttatcttaaaaaggaccttttgaaaattatcaagcacgctacggaatcttcagattgggtacacgaatcagccccaaagtttgtttttcaaactttgattgagtgttatttacaagcatgtcgaaacgtattcaaactctctacccttttttttacgattactgtcgtagcaatattcattttcaacagaatccattgtcgtagtcaaaattgtttgtcactatcttgaaccggtagatgaaaatgtatactttaaataatacaaatactttttttc

SEQ ID NO: 716 - DNA, 794 bp, Saccharomyces cerevisiae
taggtgaaaggaaggatttttttaattatttaatactttgaaatagaagtcaagcctttcattgcttatttatatcagaccatatatttttacacacgatgccaccaaaaggttggagaaaagacgcccaagggaattaccccactacttcgtatattaaagaacaagagaacattacgattcaggacctgttatttcctaaaagcactattgtgaatttggcacgcgaagtgccacagcaaagcggcaaaaagctgctgataaataaagacgcatcactagcgttacagcgtggtgctacagtatttgttaaccacttgctcctgtttgcaagggaaattgcaaagagtcaagataaaaaaagctgcagtgtagatgatgttctgagtgctttggaccatataggacactcggcattgaagggtccggttagagataaactagatgaataccaagctgctgttgaacagaggaagaaggaaaaactagatagtggtgaagtagatgctgatggcgatatagatatgggtgaagataaggagaatgtgcccgtggaaaaggttaaagagcatgacgaaatagaagaacaaggcgatgcattacaggacgtagaagagtcctccgaaaagaaacagaaaacggagagccaagatgtagaaactagagttcaaaaccttgagcaaacgtaaccccgctatggaaactgtctagtagtgcttgccaccactcccacaggatcgtagtatgtaacttgcctttattacctacatacataataagctatactcatcgtc

SEQ ID NO: 717 - DNA, 4993 bp, Saccharomyces cerevisiae
atagattctaaccgcaaatgtcgaacaaattcattatacaagcggtttattaatatagaaggtaggacgccgactcgtaaccattagtaacagatcacagctatactcggtcgttcaagtttatataatctcctagttgagaaatccctacgtaagataattgtatattacgatggtgcagttagccaaagtcccaattctaggaaatgatattatccacgttgggtataacattcatgaccatttggttgaaaccataattaaacattgtccttcttcgacatacgttatttgcaatgatacgaacttgagtaaagttccatactaccagcaattagtcctggaattcaaggcttctttgccagaaggctctcgtttacttacttatgttgttaaaccaggtgagacaagtaaaagtagagaaaccaaagcgcagctagaagattatcttttagtggaaggatgtactcgtgatacggttatggtagcgatcggtggtggtgttattggtgacatgattgggttcgttgcatctacatttatgagaggtgttcgtgttgtccaagtaccaacatccttattggcaatggtcgattcctccattggtggtaaaactgctattgacactcctctaggtaaaaactttattggtgcattttggcaaccaaaatttgtccttgtagatattaaatggctagaaacgttagccaagagagagtttatcaatgggatggcagaagttatcaagactgcttgtatttggaacgctgacgaatttactagattagaatcaaacgcttcgttgttcttaaatgttgttaatggggcaaaaaatgtcaaggttaccaatcaattgacaaacgagattgacgagatatcgaatacagatattgaagctatgttggatcatacatataagttagttcttgagagtattaaggtcaaagcggaagttgtctcttcggatgaacgtgaatccagtctaagaaaccttttgaacttcggacattctattggtcatgcttatgaagctatactaaccccacaagcattacatggtgaatgtgtgtccattggtatggttaaagaggcggaattatcccgttatttcggtattctctcccctacccaagttgcacgtctatccaagattttggttgcctacgggttgcctgtttcgcctgatgagaaatggtttaaagagctaaccttacataagaaaacaccattggatatcttattgaagaaaatgagtattgacaagaaaaacgagggttccaaaaagaaggtggtcattttagaaagtattggtaagtgctatggtgactccgctcaatttgttagcgatgaagacctgagatttattctaacagatgaaaccctcgtttaccccttcaaggacatccctgctgatcaacagaaagttgttatcccccctggttctaagtccatctccaatcgtgctttaattcttgctgccctcggtgaaggtcaatgtaaaatcaagaacttattacattctgatgatactaaacatatgttaaccgctgttcatgaattgaaaggtgctacgatatcatgggaagataatggtgagacggtagtggtggaaggacatggtggttccacattgtcagcttgtgctgaccccttatatctaggtaatgcaggtactgcatctagatttttgacttccttggctgccttggtcaattctacttcaagccaaaagtatatcgttttaactggtaacgcaagaatgcaacaaagaccaattgctcctttggtcgattctttgcgtgctaatggtactaaaattgagtacttgaataatgaaggttccctgccaatcaaagtttatactgattcggtattcaaaggtggtagaattgaattagctgctacagtttcttctcagtacgtatcctctatcttgatgtgtgccccatacgctgaagaacctgtaactttggctcttgttggtggtaagccaatctctaaattgtacgtcgatatgacaataaaaatgatggaaaaattcggtatcaatgttgaaacttctactacagaaccttacacttattatattccaaagggacattatattaacccatcagaatacgtcattgaaagtgatgcctcaagtgctacatacccattggccttcgccgcaatgactggtactaccgtaacggttccaaacattggttttgagtcgttacaaggtgatgccagatttgcaagagatgtcttgaaacctatgggttgtaaaataactcaaacggcaacttcaactactgtttcgggtcctcctgtaggtactttaaagccattaaaacatgttgatatggagccaatgactgatgcgttcttaactgcatgtgttgttgccgctatttcgcacgacagtgatccaaattctgcaaatacaaccaccattgaaggtattgcaaaccagcgtgtcaaagagtgtaacagaattttggccatggctacagagctcgccaaatttggcgtcaaaactacagaattaccagatggtattcaagtccatggtttaaactcgataaaagatttgaaggttccttccgactcttctggacctgtcggtgtatgcacatatgatgatcatcgtgtggccatgagtttctcgcttcttgcaggaatggtaaattctcaaaatgaacgtgacgaagttgctaatcctgtaagaatacttgaaagacattgtactggtaaaacctggcctggctggtgggatgtgttacattccgaactaggtgccaaattagatggtgcagaacctttagagtgcacatccaaaaagaactcaaagaaaagcgttgtcattattggcatgagagcagctggcaaaactactataagtaaatggtgcgcatccgctctgggttacaaattagttgacctagacgagctgtttgagcaacagcataacaatcaaagtgttaaacaatttgttgtggagaacggttgggagaagttccgtgaggaagaaacaagaattttcaaggaagttattcaaaattacggcgatgatggatatgttttctcaacaggtggcggtattgttgaaagcgctgagtctagaaaagccttaaaagattttgcctcatcaggtggatacgttttacacttacatagggatattgaggagacaattgtctttttacaaagtgatccttcaagacctgcctatgtggaagaaattcgtgaagtttggaacagaagggaggggtggtataaagaatgctcaaatttctctttctttgctcctcattgctccgcagaagctgagttccaagctctaagaagatcgtttagtaagtacattgcaaccattacaggtgtcagagaaatagaaattccaagcggaagatctgcctttgtgtgtttaacctttgatgacttaactgaacaaactgagaatttgactccaatctgttatggttgtgaggctgtagaggtcagagtagaccatttggctaattactctgctgatttcgtgagtaaacagttatctatattgcgtaaagccactgacagtattcctatcatttttactgtgcgaaccatgaagcaaggtggcaactttcctgatgaagagttcaaaaccttgagagagctatacgatattgccttgaagaatggtgttgaattccttgacttagaactaactttacctactgatatccaatatgaggttattaacaaaaggggcaacaccaagatcattggttcccatcatgacttccaaggattatactcctgggacgacgctgaatgggaaaacagattcaatcaagcgttaactcttgatgtggatgttgtaaaatttgtgggtacggctgttaatttcgaagataatttgagactggaacactttagggatacacacaagaataagcctttaattgcagttaatatgacttctaaaggtagcatttctcgtgttttgaataatgttttaacacctgtgacatcagatttattgcctaactccgctgcccctggccaattgacagtagcacaaattaacaagatgtatacatctatgggaggtatcgagcctaaggaactgtttgttgttggaaagccaattggccactctagatcgccaattttacataacactggctatgaaattttaggtttacctcacaagttcgataaatttgaaactgaatccgcacaattggtgaaagaaaaacttttggacggaaacaagaactttggcggtgctgcagtcacaattcctctgaaattagatataatgcagtacatggatgaattgactgatgctgctaaagttattggtgctgtaaacacagttataccattgggtaacaagaagtttaagggtgataataccgactggttaggtatccgtaatgccttaattaacaatggcgttcccgaatatgttggtcataccgctggtttggttatcggtgcaggtggcacttctagagccgccctttacgccttgcacagtttaggttgcaaaaagatcttcataatcaacaggacaacttcgaaattgaagccattaatagagtcacttccatctgaattcaacattattggaatagagtccactaaatctatagaagagattaaggaacacgttggcgttgctgtcagctgtgtaccagccgacaaaccattagatgacgaacttttaagtaagctggagagattccttgtgaaaggtgcccatgctgcttttgtaccaaccttattggaagccgcatacaaaccaagcgttactcccgttatgacaatttcacaagacaaatatcaatggcacgttgtccctggatcacaaatgttagtacaccaaggtgtagctcagtttgaaaagtggacaggattcaagggccctttcaaggccatttttgatgccgttacgaaagagtagacaataatatatctatccttttttatattttacaatgcttctatgatatcttta

SEQ ID NO: 718 - DNA, 802 bp, Saccharomyces cerevisiae
ggaatttgatttcatataaatattgatataattatactctgaaatataatattgataaacttaacacagggtgagaaaggtgaagtatgctaccgaccccttatgtaaaatgcgattacgataaagtatatgagcctgctgaggatagcttcctcatactggactgtttggaaaaagagcatgattttttgaaacagaaatttggtaatcgtttggccatcgtttgcgaaattggttcgggatcaggtatcgtcacaacatttctaatgcaaaacaaaataataccgcaggaaaattccatccacttagctgttgatatcaacccatgggcgctcgaagcaactttggatactgcgaagttaaattcatgtaaaagttcttttttagaagtgattcaagctgatttaaactccagtattcggaataatcaggttgatgtcctaatatttaacccaccatatgtgccagcagaatgtgtgccagatgtcccaggatcaagagaggaggcagaccaatggctagatttagcgttattgggtggaaaagacgggatggcgattactgataaactgctacgacaattagaacaaattctttctccagatggtgttgcatatatattattttgtgcaagaaataagcctaaagaagtcattaagaggtttgtcgatacttacaaatggaatgtgaaacttattgaaacgagaaaagcgggatgggaagtcctcagtgtgtacagctttacaaggtgacagttgcaaaacctttcacgttataattgataacctgtgtctttactcaa

SEQ ID NO: 719 - DNA, 866 bp, Saccharomyces cerevisiae
cctccatatccagaaggcacttgttaatactatggattataaggaagaacagaagcaggaactagaagttttagagtccatttatcctgatgaactgaggatcataaacgatgaatacccaaagattaaatttgaagtagccattaaattagagctggatacaggtgattctacttctgttttaaccaaagagcacactataatcgccgaattcaagttaccagaaaactaccctgacgaaccatgcctgatttcattggaagctcaagaagtagccctcaatgacaacgaagaagataacgaggaagatgaagacgaggttgaatatgacgaccatggtaataaagtactgaaaaagtttgaaaacctgccagatttaataagctttaaggggtacttgcctgaattaaccgtacaattagaatcgcaaatcgaaaccgatatgttattgggtatgcaaatgtgttttgcattgatttcatccataaaagaaagatgtgagcaatggtatagtgaacaattgaataagctcgagaagcagtacgagctggaagcacaagaacgtgaaaagaaggaacaggccaagttccatggtactaaagtcacaagagaatcgtacttggaatggaggtctaaatttcgccaagaactgaaactggatgaaagagaccaggtgagaaggatgaaggctcatcatgggaagctaaccggtaagcaaatgtttgaacaaggcgtggtgggcacaggcgacgagtatatggaagaggatgacgcgagtgtagatgacgtagccaagggacttgccaagaccgaaatagcaaatcaataaatacttgtgtacttaagtatttaagtattttcttctg

SEQ ID NO: 720 - DNA, 544 bp, Saccharomyces cerevisiae
tggagacgtctgaggtaagatttcgataatacaagatgatgaaaggttctagaagaacaggtaataacactgctaccacgctaaacacgcctgtggtcattcatgccacgcagctgccccaacatgtctctactgacgaggttcttcaatttctggagagctttatcgatgagaaggagaacattattgatagtactaccatgaataccatcagcggcaacgccgctgacgcggacgctgccgctgtggctaacaccagcctcaacatcgacaccaacctttccagctccatatcgcaattaaagaggattcagagagacttcaagggtctgccacccgcccaagacttttccgccgcgcccattcaggtctccacgacggagaagaaggagacaagcataggtgttagtgccaccggcggcaagaaaactacattcgccgatgagtgagacctgtagcagcagccttgcccttttacacaaaatcctacatatccattcacatacgccttctgtatactacaatatatgcatatcagttagaa

SEQ ID NO: 721 - DNA, 1244 bp, Saccharomyces cerevisiae
tgtagaaataaagcgttctaaaatggctggaaagaaaattgctggtgttttgggtgctactggttccgttggtcaacgtttcattctgttgttggcaaatcaccctcatttcgaactgaaagttcttggtgcctcttctagatcagctggcaagaaatacgttgacgctgtgaactggaagcaaaccgatttgctaccggaatctgctaccgatattattgtttccgaatgtaaatctgaattctttaaagagtgtgacatcgtcttttccggattggatgctgactatgctggcgctatcgaaaaggaattcatggaagctggtatcgccattgtttccaatgccaagaattatagaagagaacaagatgtgccattgattgttcctgttgtcaatcctgagcatttggatattgtagctcaaaagcttgacaccgccaaggctcaaggtaagccaagaccagggttcattatctgtatttccaattgttccactgcaggtttggttgcaccattgaagcctttgattgaaaaattcggtcctattgatgctttgaccactactactttgcaagcaatctcaggtgctggtttctccccaggtgtaccaggtattgatattctagacaatattattccatacattggtggtgaagaagacaagatggaatgggagaccaagaaaatcttggctccattagcagaagacaagacacacgtcaaactattgactccagaagaaatcaaagtctctgctcaatgtaacagagtcgctgtttccgatgggcacaccgaatgtatctctttgaggttcaagaacagacctgctccatccgtcgagcaagtcaagacatgcctaaaagaatacgtctgcgatgcctacaaattaggctgtcattctgctccaaagcaaactattcatgttttggaacaaccagacagacctcaaccaaggttggacaggaacagagacagcggttacggtgtttccgttggtagaatcagagaagacccattgttagatttcaaaatggttgtcctttcccacaacaccattattggtgccgctggttctggtgtcttgattgccgaaatcttactagcaagaaacttgatttaaggaaaaattgcaaagttatgtcttcatcttacttttttttcgaacgaacaaaaaatacaaaacaagtaaataagtatatgtgtatgaatatacgtataataatttgaaacgtagatctttatta

SEQ ID NO: 722 - DNA, 1282 bp, Saccharomyces cerevisiae
ctaaaagcatcttcaggctgaggattaaaaaaggaatatgagtgaacttgaagccacaattaggcaagccaaagaagccctggctgaaaataatgccaaaaaggcgctcaaaatattgaagccgttcaaaagttcactgaaaaaagaaaacgcaaacaatgtaatactgaatgaagtgtttgccgatgcatacctggataatggacaggtagagaaagcctacccaattttagcgcgtgcttgcgaattagatcctgagggacaagttggcggaccggacaaattttttaccatgggtcaaatcatgggtggacaggatggtgtatcgataataactcgcggaataatgaacatctctaatactggaggtgaaatgttaaccaacgttcaggttgaaaagattgtaggtggactgctttctgtgattgaaatttggatgacggatttatgtatggagccaaatgcagaagagcagtgtgaggagttaatacaaaaggcgatggaactcacagagggaaaatctcctgaaacatggtctaccctgggttctatcaaaatctcgcaacaaaaatttggagaagcttatgaagcattctcacaagcctggaatttctttgagttgaaaaaacaagaaattggtagcggtataaatgaaaatggtgacacaactcagaaagctggtttacagtcagagtatgtagatcttttacaacctcttttatctttaacaaagatgtgcctcgaagtgggagcttacgaagtcgcattgaaagttattgccgcagtaagagatatagatgaggataacatagagggttattatctagagggttttacttattatttaatgagtaaattagaaattttcaagttgaacaatcccgaagtaagcctgcgtccggaaaatatatacgagtttaaccaactcattcaagaagttcctttggatttatcccacgaaccaatctcccagttaatctatgactcaagattagcgctaagttttgcattgcaagcaggtgtcaatgctgacagcaaagatgaaattgtgcaagaattattgggcggtgctaatgctttactccaagaaattggtggtcctctagatccaagtgagttaacacaaatcaagaagggtgatttagtgaatgagaatgaagacttggaagagttggacatagaggaagaatattctgactaatagtcttctaatttaacatatgcataagtacatacactgatatatatgtatatatccgtaagaaacggaaattatgacata

SEQ ID NO: 723 - DNA, 1613 bp, Saccharomyces cerevisiae
tttacgctgctgtcattaaatatggcacttatctcagatacatttcttttaatcagcgaaaaaaatggcgaggtgaaaaaaatcgatgagatgaaaaaattttttactagtaaaggcgtattgatgatatattagcagctaaagtatagcaaggtttgtcaatttgaagcagtccgcgtgttttacaatgagcgtcattcatcctttgcagaatttactcacctctcgtgatggctcattagttttcgccatcattaagaattgtatcttaagcttcaaatatcaatcgccaaatcattgggaatttgctggaaaatggtctgatgatttcgacaaaattcaagaatcgagaaacaccactgctaaggagcaacaaggacaatccagcgaaaacgaaaacgagaacaaaaaattgaaaagtaataaaggcgattccattaaaaggacagcagccaaggtaccatctccaggtcttggcgccccaccgatatattcgtacataagaaatctgagattaacttcggatgaatcaagactaattgcgtgcgcagattctgacaagtccctcctagttttcgatgtcgacaaaacttccaaaaatgtcttaaagttgagaaaaaggttctgcttctcaaagagaccgaatgctatttctatagccgaagatgatactacagtcataatagctgacaaatttggtgatgtatattctattgatattaattctatcccggaagaaaagtttactcaagaacctattctcggtcatgtctctatgttgactgatgtacacttgattaaagactctgacggtcatcaattcataattacaagtgatagagatgagcatattaaaatttcgcattatccccaatgtttcattgtggacaaatggctctttggtcataagcattttgtttcttccatatgctgtggcaaagactatttattattaagtgcaggtggtgacgataaaatcttcgcttgggattggaaaactggtaagaacttgtctaccttcgattataatagtttgattaaaccttatttgaatgatcagcatttagcaccaccaagatttcaaaatgaaaataatgatattattgaatttgcagttagtaaaattataaagtcaaagaacctaccgtttgttgcgtttttcgtcgaagctacaaaatgcataataattctggaaatgtccgaaaaacaaaaaggggatcttgcactaaagcaaattataacttttccatataatgttatctcattatccgcccataatgatgaattccaagtcaccctagataataaggaatcatctggtgtgcaaaaaaattttgccaaattcattgaatataacttaaatgagaatagttttgtcgtgaataatgaaaaatcaaacgaatttgacagtgccatcatacaatcagtacaaggggattctaacttggtgaccaagaaagaagaaatttacccgttatacaatgtttcctcgttaagaaaacatggagaacattactcgtgaaataaaaaggtagtaagtacatctttataactaatataaaaaaagatacgtaccgatttgtgttaataatcattgttagtacatctttata

SEQ ID NO: 724 - DNA, 725 bp, Saccharomyces cerevisiae
aggaaagaataactgaaactatggattttgaggaagattacgatgcggagtttgatgataatcaagaaggacaattagaaacaccttttccatcggttgcgggagccgatgatggggacaatgataatgatgactctgtcgcagaaaacatgaagaagaagcaaaagagagaggctgtagtggatgatgggagtgaaaatgcatttggtatacccgaatttacaagaaaagataagactctggaggagattctagagatgatggacagtactcctcctatcattcccgatgcagtaatagactactatttaaccaaaaacgggtttaacgtagcagatgtacgagtgaaacgacttttagcacttgctactcagaaatttgttagtgatatagctaaggatgcctacgaatattccaggatcaggtcttccgtagcggtatctaatgctaacaacagtcaggcgagagctaggcagctattgcaaggacagcaacagcctggcgtgcagcagatttcacaacaacaacatcaacagaatgagaagactacagcaagcaaagttgttctgacggtgaacgatctcagtagcgctgttgctgaatacgggctcaatataggtcgcccagacttttatcgttagtggctaacaaatggaaatgaaatatgtatatagtgtagcagtatgcaactcttttaaatacacgattcgttattagattgatta

SEQ ID NO: 725 - DNA, 1649 bp, Saccharomyces cerevisiae
cggaacaactacataagtcaaaaatggccattgattactctaagtgggataaaattgaactatcagatgattctgatgtcgaggtgcatcctaatgtggacaagaaatcgttcattaaatggaaacaacagagtatccatgaacagcgattcaaaaggaaccaagatatcaaaaatttggagacacaagtggatatgtattctcatttgaacaaacgagtggacagaattttgagtaatttacctgaaagttctcttactgatttgccagccgttaccaaattcttgaatgcaaattttgataagatggagaaaagtaaaggggaaaatgttgatcctgagattgcaacatacaatgaaatggttgaagatctttttgaacaattagcaaaagatttagacaaagagggcaaagactcgaagagcccatctctcataagggatgctattttgaaacatagggctaagatcgattcagtaactgtagaggctaagaagaaattagatgaattatacaaggagaaaaatgcacacatttcatctgaagacattcatacaggctttgatagtagctttatgaacaagcaaaaggggggggctaagccactggaagcaactccttcagaagctctttcgagcgctgcagagtctaatattcttaataaactagcaaaatcatcagttccgcaaactttcatcgattttaaagatgatcctatgaaactggccaaggaaactgaagaattcggtaaaatatccattaatgagtactcaaaatctcagaaattcttactggagcacttacctattatttcagaacaacaaaaggacgccttaatgatgaaggcctttgagtatcagttacatggtgacgataagatgactttgcaagtcattcatcaatccgaattgatggcctacattaaggaaatctacgacatgaagaaaattccatatttaaatccaatggaactatcaaatgtcattaatatgtttttcgagaaggttatcttcaacaaggacaagccaatgggtaaagagtcttttttgagatcagttcaagaaaaatttttgcacattcaaaaacgttccaaaattttacaacaagaggaaatggatgaatcgaatgctgaaggagtagagacgattcaattgaaatctctagatgattctacagaattagaagtaaacttgccagacttcaattctaaagatccagaagagatgaaaaaggttaaagttttcaaaactttaataccggaaaaaatgcaagaagccataatgaccaaaaatttggataatattaataaagtctttgaagatataccaattgaagaggctgagaaacttttggaagtgtttaatgacattgacattattggaataaaagcgatcttagaaaacgagaaagactttcaaagtttgaaagatcaatacgaacaggaccatgaagacgccactatggagaatctgtccttaaacgaccgtgatggtggcggagataaccatgaagaggtcaaacatactgccgacactgttgactagaaatttatgtagctattttactggtgcagcgtgcatctacttccttttttattgttattttcatttatacataatacaaaaaaaaaaaagaagaaaattaatgat

SEQ ID NO: 726 - DNA, 2273 bp, Saccharomyces cerevisiae
tgctcggaataacatctatatctgcccactagcaacaatgtcggattcaaaccaaggcaacaatcagcaaaactaccagcaatacagccagaacggtaaccaacaacaaggtaacaacagataccaaggttatcaagcttacaatgctcaagcccaacctgcaggtgggtactaccaaaattaccaaggttattctgggtaccaacaaggtggctatcaacagtacaatcccgacgccggttaccagcaacagtataatcctcaaggaggctatcaacagtacaatcctcaaggcggttatcagcagcaattcaatccacaaggtggccgtggaaattacaaaaacttcaactacaataacaatttgcaaggatatcaagctggtttccaaccacagtctcaaggtatgtctttgaacgactttcaaaagcaacaaaagcaggccgctcccaaaccaaagaagactttgaagcttgtctccagttccggtatcaagttggccaatgctaccaagaaggttggcacaaaacctgccgaatctgataagaaagaggaagagaagtctgctgaaaccaaagaaccaactaaagagccaacaaaggtcgaagaaccagttaaaaaggaggagaaaccagtccagactgaagaaaagacggaggaaaaatcggaacttccaaaggtagaagaccttaaaatctctgaatcaacacataataccaacaatgccaatgttaccagtgctgatgccttgatcaaggaacaggaagaagaagtggatgacgaagttgttaacgatatgtttggtggtaaagatcacgtttctttaattttcatgggtcatgttgatgccggtaaatctactatgggtggtaatctactatacttgactggctctgtggataagagaactattgagaaatatgaaagagaagccaaggatgcaggcagacaaggttggtacttgtcatgggtcatggataccaacaaagaagaaagaaatgatggtaagactatcgaagttggtaaggcctactttgaaactgaaaaaaggcgttataccatattggatgctcctggtcataaaatgtacgtttccgagatgatcggtggtgcttctcaagctgatgttggtgttttggtcatttccgccagaaagggtgagtacgaaaccggttttgagagaggtggtcaaactcgtgaacacgccctattggccaagacccaaggtgttaataagatggttgtcgtcgtaaataagatggatgacccaaccgttaactggtctaaggaacgttacgaccaatgtgtgagtaatgtcagcaatttcttgagagcaattggttacaacattaagacagacgttgtatttatgccagtatccggctacagtggtgcaaatttgaaagatcacgtagatccaaaagaatgcccatggtacaccggcccaactctgttagaatatctggatacaatgaaccacgtcgaccgtcacatcaatgctccattcatgttgcctattgccgctaagatgaaggatctaggtaccatcgttgaaggtaaaattgaatccggtcatatcaaaaagggtcaatccaccctactgatgcctaacaaaaccgctgtggaaattcaaaatatttacaacgaaactgaaaatgaagttgatatggctatgtgtggtgagcaagttaaactaagaatcaaaggtgttgaagaagaagacatttcaccaggttttgtactaacatcgccaaagaaccctatcaagagtgttaccaagtttgtagctcaaattgctattgtagaattaaaatctatcatagcagccggtttttcatgtgttatgcatgttcatacagcaattgaagaggtacatattgttaagttattgcacaaattagaaaagggtaccaaccgtaagtcaaagaaaccacctgcttttgctaagaagggtatgaaggtcatcgctgttttagaaactgaagctccagtttgtgtggaaacttaccaagattaccctcaattaggtagattcactttgagagatcaaggtaccacaatagcaattggtaaaattgttaaaattgccgagtaaatttcttgcaaacataagtaaatgcaaacacaataataccgatcataaagcattttcttctatattaaaaaacaaggtttaataaagctgttatatatatatatatatatatagacgtataattagtttagttctttttgtaccatataccataaacaaggtaaacttcacctctcaa

SEQ ID NO: 727 - DNA, 932 bp, Saccharomyces cerevisiae
caacaagcctgtcacaccatgactacagatccttctgtcaaattgaagtccgccaaagactccctcgtctcctccctcttcgagttatcaaaagctgctaatcagacagcctcctctattgttgatttctacaatgccatcggcgacgatgaagaagagaagatagaggctttcaccactttgactgagtctttgcaaacattgacttctggtgtaaaccacttgcacggcatcagctcggagctggttaaccctattgatgatgataaagatgctattatcgctgctccagtcaaggctgtaagaagaaagatcgaacgtgatccaaatgctccaaagaagccactgactgttttctttgcttactctgcgtacgttcgtcaagaacttcgtgaagacagacaaaaggctggcttgccacctttatcctcaactgagattactcaagaaatctccaagaaatggaaggaattgagtgataacgaaaaagaaaaatggaagcaggcttacaacgtcgagttggagaattaccaaagagagaaatccaaatacttagaagcaaagaaaaacggtaccctaccaccagcttccttggaaaacggtccaactcatgcgccggttccaattcctttcagtttacagcacgccgctgaacctcctgtggaaaagagacctcacgatgatgatggatcttcggaaaagaagaagaagaagaagaagaaggataagaagaaggacaaatccaactcttctatttgatggacggacaaactcgttactattactctactgtctttctaaaataaatataataataaaaaaaggaataaaatatagcagcatgggcttgctttgcccatagtgtatgcacatatatatatatatatatgtatctatccctctcctcttgtaacagtatatcttccttttca

SEQ ID NO: 728 - DNA, 795 bp, Saccharomyces cerevisiae
acataagtatcgtaatttagtggttggatacattaaaaaaaacaagtggtatatatataagtagtagtagtaagaagtaagcgatgtctagggctaagagaattatgaaagaaatccaagctgtgaaggatgatcctgcagctcacattactcttgaatttgtgagtgaatctgatatccaccatttaaaaggcacatttttgggcccacctggaacaccttacgagggtggcaaatttgtcgtggatatcgaagtacctatggagtatccattcaaaccaccaaagatgcagttcgacacaaaagtataccatccaaatatatcatcagtgacaggtgccatttgtttagatattcttaagaatgcatggtcgccagtgataacactaaagtctgcattgatttcgctacaggcgctactacaatctccagagcctaacgatcctcaagatgcagaagtagcacaacactatttacgggatagagaatcttttaataagactgctgcactatggacgaggttatacgccagtgaaacttccaatggtcaaaaaggcaatgtagaggagtctgatttatatgggattgaccacgatctgattgacgagtttgaatctcaaggttttgaaaaggacaagattgtggaagtgttgagacgattaggcgtcaagtccttagaccccaatgacaacaacacagccaaccgtatcatcgaggaattgttgaagtgaatagataaaaaaaaaacgcaccaagtaagtaagtaaataaagaataaataaactatatgagtaa

SEQ ID NO: 729 - DNA, 904 bp, Saccharomyces cerevisiae
caggcgcaatttagttatataaggagaagccctcgagcgatcaggggaccgactgcggatcgctttaaggcaaagatagaaggataaatatctgctttggaagatagtcgtatctaatttcccattctgttgttttcttgatctttcctacgctttcgactttcttcctacgcgctttataatagctatgatgttgccaagatccatgaaatttatgactggaaggagaattttccatactgccacagtaagggccttccagtctaccgctaagaagagcttaactatcccatttttgcccgtattaccccagaaaccaggtggtgttaggggcactcccaatgatgcctacgtccccccccctgagaataaattagagggctcataccactggtatatggaaaaaatctttgccttgtccgtcgttccattggctacgacggctatgctgacaaccggtccgttatccactgcagctgattctttcttttctgtcatgcttttgggatattgttacatggaatttaactcttgtatcaccgattatatttctgaaagagtttatggtgtttggcacaagtacgccatgtatatgttgggccttggttctgcggtctccctttttggaatctataaactagaaaccgagaatgatggtgttgttggtttagtaaaaagtctatgggattcttccgagaaagacaacagtcaaaagattgaagccaagaagtagataaatcaccacgaatcatttgttcggtcatgtaacatgcacatctatagcaacgacgtgtctcctatcttttgcttttaccttgttttccgccggtatattcctttgccatatttactagtatttatttattattatttattcttctatttttcttttatttatttgtta

SEQ ID NO: 730 - DNA, 1600 bp, Saccharomyces cerevisiae
actaatctgttggatacattagacaataagctctaggaagtatggtatatcgtaacaggtcaaagagcgttttatctacacacagcaagaagagcgacgataaggcccactataaatcacgttcgaaaaagaaatcaaaaagcaggagcaagaagaggttaagaatctactggagatacatatctattgtatggatcttatggttaggattaatatcttattatgaatcagtggttgtgaagagagcaatgaagaagtgccaatggtcgacttgggaggattggcctgaaggcgctgaaagtcatagggtgggtttatttgcagacccacaaataatggacgaatattcatatcctgggaggcctcaaatagttaattattttacaagagtgattgttgaccattatcacaggagaaattggaaatatgtccagtattacttggatcctgatagcaattttttcctaggtgatctatttgatggagggagaaactgggatgataagcaatggattaaagagtacacacgattcaaccaaatattccccaagaagccactgagaagaacggtcatgtctttaccaggtaatcacgatattggttttggagacacagttgttgaatcgagtttacagagattttctagttactttggagaaacttcctcctcattagacgctggaaatcatacctttgtacttttagatacaatttcgctttctgataaaacaaatccgaatgtctcgagggttcctagacagtttttggataattttgcaatgggttcacatccgcttcctagaattcttttaactcacgttccattatggagggatccagaacagcaaacgtgcggtcagctacgtgaatccaaagaaccttttcctattcagaaagggcaccagtaccagacagttatagaaaacgatatatcacaagaaattttaacgaaaattcaaccagaaatattattttccggggatgatcatgaccattgtcagatatcacactcatatccgtttcaggggaaaactaaaaatgctcaagaaattacagtaaagtcatgtgcaatgaacatggggatcagtaggcctgctattcaattgctctccttatataatccttcagatttgacaatggtaaatgccggcggagagtatgcatcaaaaacttaccaaacagagctatgctatatgccagatccctataaggcaatcagaatgtacctatggggattattattctctgctgcctttatcgcatacatgcattttttcccaaaatcttttaataatcgcgtagcaaccataatgaacagagtatttacacgacctgatggtaacacctcagatttgccattacctacaagtatttccaaatcgaaatccaaaaaatcattgacacatagtaaatacgctgtgaatgatacgcgttcgatcaaacaatttctagttaatgcaattgtcctttttgtttctgtgatgcccatttttatttatttttatactgtagtctagacagaattactgctattctcttccaggatcaaaatgctttgaagggaaacgtctggctatttaatatatgcgaatacacctta

SEQ ID NO: 731 - DNA, 1855 bp, Saccharomyces cerevisiae
gtggaagcagtgagaagcagaagattataatataagtagagtagaagcatgtcattgcaattgttgaatccgaaggctgaatcgttgagaagggatgcggctttgaaggttaacgtcacatctgctgagggcttacaatccgtcctagagaccaacttgggccctaagggcacgctaaagatgcttgtggatggtgctggtaacatcaagctgaccaaggacggtaaagtgttgctgaccgagatgcagatccagtcgcctacagcggtactgattgctagggcagctgccgcgcaggatgaaatcacgggcgatgggaccacgacggttgtgtgtcttgtgggtgaattgcttagacaagcgcaccgtttcattcaagagggcgtgcatccgcggatcatcactgatgggtttgagattgcgcggaaggagtccatgaaatttttggacgaattcaagatcagtaagacgaacctttccaatgatagagagttccttctgcaagtggcccggtcgtcgctgctaaccaaggtggacgctgacttgacggaggtcttgacgcccattgtaacggatgcggtgctaagcgtgtacgacgcgcaggctgacaatttggatttacacatggttgagatcatgcagatgcagcacttgtctcctaaagataccacttttattaagggtttggtattggaccacggtggtaggcatcctgacatgcccacccgtgtgaagaacgcgtatgttttgattttgaacgtatctttggaatacgagaagactgaagttaactctgggttcttttacagttctgcggaccaaagggacaagttggccgctagtgagaggaagtttgtggatgccaagttgaagaagatcatcgacttgaaaaacgaagtttgtggcatggatccagacaagggttttgttatcattaaccaaaaaggcattgaccccatgtctttagacgtgtttgccaaacacaacatcttggctttgagaagggccaagagacgtaacatggaaagattgcaattggtcactggcggtgaagctcagaactctgtggaagacttgtcgcctcagattcttgggttttctggcttggtctaccaagaaaccataggcgaggaaaaattcacatacgttacagagaacactgaccccaagtcttgcaccatcttaatcaagggctccactcattatgccctcgctcaaacaaaggatgcggtgagagatggtctcagagctgtggcaaacgttctcaaggacaaaaacatcattccaggcgctggtgcgttctacatcgccctttcgagatacctaagatctgccaacatgaacaagttgggtgccaagggtaaaacaaagacaggtattgaggcgttcgcagaagcattgctggtaattccaaagactttggtgaagaactcaggattcgacccattggacgtgctcgcaatggtggaggacgagttggatgacgctcaggattctgacgaaacgagatatgttggtgtggacttgaacataggtgattcttgcgaccctaccatcgagggtatttgggattcctaccgcgtactaagaaatgctattaccggtgctacaggtattgccagcaacttgttattatgcgatgaattgttaagggcaggtagatccactttgaaagaaacaccacagtaataaaaaataataataataataataataacaagaacacgaatactagtagtaatagtagtcagatacaaaaattctatgtaacatattttttccagtcactatcatcatcatcatattttgtatatatacatttattatataaaatatcataccaatttttgccaaa

SEQ ID NO: 732 - DNA, 2135 bp, Saccharomyces cerevisiae
tcattgccagttgctaagtatctttgaccaaaaatcacaacatcatggctgtggaggaaattgcgtcccgcaaggacattagtttaagagatatgcaaatctctgccatattaaaaatgctgtttttaaataaggatttgaacaacaacgacaacatcaccaccatcacagacgatatttttaaccagcaggagatcatctggaaggtgttgatactggacatcaagagcactgctaccatatcttctgttctcagagtcaatgacctgctgaaagctggtatcaccgttcattccttgattaaacaagacagatctcccttgccagatgtccctgccatatatttcgtctcccccacaaaggaaaacattgacattatagtcaatgacttgaaaagcgacaagtattctgaattttacatcaactttacctcatctctgcccagaaacctcctggaagatttggctcaacaagtctccatcacgggtaaatctgataaaatcaaacaagtttacgaccaatacctggacttcattgtaactgaaccggaactgttctcactagaaatttcaaacgcatacttgacattgaatgacccgaaaaccacagaagaggaaatcacgggcttatgcgccaacatcgcggacggtttattcaacactgtcttaacgatcaattctatccccattataagagcagctaagggtgggcctgctgagatcatcgctgagaaactgggtacaaaattacgtgatttcgtcatcaataccaattcctcctccacttccactttgcagggaaatgattctctggaaagaggagtgttgattattttggatagaaacatagattttgcctccatgttttcacattcgtggatttatcagtgcatggtctttgatattttcaaattatcaagaaacaccgttactattccacttgaaagtaaggaaaacggaactgacaataccaccgcaaaaccattagccacgaaaaaatatgatatagagccaaacgattttttttggatggaaaactctcatttgccattcccagaagctgcagagaacgttgaagcggcattgaatacgtacaaggaggaagccgcagaaattactaggaaaactggtgttaccaacatatcagatttggacccaaactcgaataatgatacggttcaaattcaggaagtcgtaaagaaactgccagagttaacagctaagaaaaatactattgatacacatatgaatatttttgctgcattgttgtcacaattggaaagtaaaagtcttgatactttctttgaagttgaacaagaccctggaagcaccaaaacaagatctaggtttttggatatactaaaagatggtaagacaaacaatcttgaggacaaactgagatcgtttattgttctttacttgacatcaacgacaggcttaccaaaggattttgtccaaaatgtggaaaactatttcaaggaaaacgattacgatatcaatgctttaaaatatgtttataagctaagagagttcatgcaattatcaaatatgtcgttacaaaataaatctttggaagatggatccgattccgctttcaaaccaagcaacttaacattatccggtatctatggcttaactgaaggcaaattacaaggaggtgtaggaagtttaatatcaggtattaagaagttactgcctgaaaagaaaaccatcccgataacaaatgttgttgatgcgataatggaccctttaaacagctctcaaaaaaatttggagactactgacagttacctatacatcgacccaaaaattacaaggggttcccataccagaaagccaaaaagacaatcttataataagtcactagtgtttgtagttggtggcggtaactacctagaatatcaaaacctccaagaatgggcacattcccagttgcataatcccaaaaaagtcatgtatggtagcacagccattaccacaccagctgaattcttaaatgagatttctcgccttggcgcaagtaatagcagcaacaacgatgcataattggcatctagccccaatgacgatacactaatatatatatatatatatatatctatatatctgcaagaaataagcgtgtgtagtaagtaa

SEQ ID NO: 733 - DNA, 1210 bp, Saccharomyces cerevisiae
tacttcatataacttttgagagaaaaatagttgcggtttgtggaaaagaaggggaggaaagcaattagctacaaaaaaggacaagtaaaagagtatgttgaggttatctttactgagatcaacagctactttgccagtgaaatgccaacgtcgtgggctaatattacctgcggcggcaatgtacaccttaggctcattaatatttggtaaggaagcaaggttggcggatgccatggaacgtggtgagttacataacaagaacgttgattatgcgaaagaagctgaagagcgtaccgagttacgtattagggccctggctaatactcggccaatggaacctcggtacaacggccatgttccccttcatcggtacgagaaattgctgctgtttgcaatttccggttggaattcatttttccatcctgaagatggttataatattgtacaattgggtgaggcaactgcattgccggtcttcttggagaatttgaagcaaacaatgttaagtgattcctctgggaggcgcattttgaaggaacaacccaatatcacaacagagattttgcatatggacaaactagctaaattgccacataacacgtttgggtatgtatattaccaatggttgaaaagagaaaacgtttctccggacactagagcacctgtcaaatttatcgacgatcctatgcatgcatatatctttaagaggtatagacaatgccacgatttctatcacgctataaccaacatgcctattatcattgagggggagatcaccataaaggctcttgaaggtgccaacctgggcgtcccaatggccattctcggtggtatccttgcacctttacgtttgaaaaaggtgcaaagaaaaagattatataatatatatctcccttgggctgtcagaacaggtttaagctgcaagccattgatcaacgtgtattgggaggaaatgctggagaaggatgttactgctttgaggaaagagctaaagataacactccctccggatctaaggacaatgaggaaggagcgtgcagcccttaggaaggagattgacgcaaaatacaactcacagaaacgagccacgactccagcatgaatcagcagaacaacttttatctctcgcccatgaagttagatattattatttagtcagctataatatactatataggatggtcgtccaaggcgatcttgcgatctctca

SEQ ID NO: 734 - DNA, 2284 bp, Saccharomyces cerevisiae
agcagaataatgaatctgcaagaactattagcgaaagtaccgctgttgttatcgtatccgaccattattctatccagtaatctgatcgtaccttcccataatgatctcatatcacgagcagcctctacatcagcagcagagtatgctgacgaaaagctaatatttttcagtacagatcatgccatcagactgatttttctgccaaccttcgtagcttcttcctttaacctatttgcgcactattttaacttcatcaattactctagccgaaggaagtattatgttttatttactgcaatttatttcctatccatattgactgcgattttccatccaattcagtcaacatgcatcactctattgattatcaagctcctgactaccgctgatgagtcttcgccaaaaattgccctcaatttcaagaccattttgaaaacatttgttccctttattactttaacattagttatattgcgttgggatccttcttttgatgccagctcaggagatgtgaacaaaatttctacgtctttggccgcatatgctctcttaatattaacgctaagatatgcatcaccgctgatattatcgacgttatcaagtagcataggtgttgtttccaaagacaccagcgtcgcacagcattcgataagtagaaataagagatttccgctaattctcgtgttaccgattttttcctttgttcttttgtatctaatgactatagttaacaagacttacaatatccagttattaatggtatttgtgttttttggatgtctgtccattttctttttatcgttaaaagatttgttcacagaggatggaaatcaaaagaagggaggccaggaggatgaatattgtcgtatgtttgacataaagtacatgatttcctatttatggctgacaaggttcaccattttattgacaggcataatggctattgtagtacattttttatcgtttaatgaaattacttcttccatcaaaactgatttgttaagtttacttttcgtcgtagtggcagaatatgtttccagtttctctaacaaacaacctgattcgcactcccataatcatgcacatcaccattcccatctaaccgattcattgcctctcgaaaatgaaagtatgttcaaacaaatggcattgaataaggacaccaggtccattttttcgtttttattgttgaataccgctttcatgtttgtacaacttttatattcctttcgttccaaatcattgggcttattatctgattcgttgcatatggccttagattgcacatctttgctcttaggtctaattgctggtgtattgaccaagaaaccagcaagtgataaattccctttcggtctaaattatcttggtaccttggcaggtttcaccaatggtgttctgttactcggcatagtgtgcggtatctttgtggaggcaattgagagaattttcaaccccattcatcttcatgcaacaaatgagttgttggttgttgctacgttaggcttattagtgaaccttgtaggtttgtttgccttcgaccatggtgcacatgatcatggtggtactgataatgaaaacatgaaggggatttttttacatatattggcagatacattaggttctgttggcgttgttatttcgacgttattaatcaagttaacacactggccaatttttgatccgatcgcctctttattaattggttccttgattttacttagcgctctgcccctgctaaaatctacttccgcaaatattttactaagactggatgacaagaagcataatctagtaaagagtgcgctaaaccagatttcaacgacgccaggaatcacaggttatacaactcctagattttggccgacagagtcaggcagttccgggcattcacatgcacacacgcattctcatgcagagaatcatagccatgagcatcatcatgatcagaaaaacggttcacaagaacacccgagcttggtgggctatattcatgtacagtatgtagacggcgagaattcgacaattatcaagaaaagagttgaaaaaatattcgaaaatgtgtcgattaaagcgtgggtacaagttgagcctcaaaattccacttgttggtgccgggctacttctatgaacacaatttcagctaacccgaattctttaccgctacagcctatagcaaattgacaattctttgtcctgcataccttttatattaattttttaaacaagatttcatatacataacggtacctatcgtaattattggcggctgcttgtgttgatc

SEQ ID NO: 735 - DNA, 3023 bp, Saccharomyces cerevisiae
ttaacaaagtcacttaatatatcaaaaagaaggcttttaggaactcaaaaatccgcatcatttgcaatttaaaacgtacgtcatcaggcgtatatattcaaagaaaatatctcagtttcattgcactggcttacagttgatatttcaattaaatggaaccatcgaatacccaaaaagaagatcttcctaccgcttttaatggtataaaaagtcaattaaacagcatattaaaatcgaatcaattatttcaagattatgcgctattaaatgggttcttggcatttgttcattccaaattgaatgccgcaatccttacatctatagaatcacaatgtgggaaatcctttgcggctgatcttgattcttttgatcagagcagtatctcttcgattttagatttttcttgggaaagcgttcactatccaatattcaaatggtttcagatgtggaggaattatattctttttgagaaggagaataaaaaacagcagaccaaatttatcgactttagaaagatgaattcgaagatgttaaaattcttcaaaacggtgcaaaacttctatgtcaacgttatcaacacggtttataagaaatatgatatatctgtacttttgccgaaaaggattatccaagacttaaagttaagtgacatcgaaaataccactaatgttggagacattcttgcggtgaagacatttaatagtagtagcccactcgcacatctcatcccaacgcttttccatcgctgtctcttattcttaggaacagcgtatcgttataaaactctcctcgaagaaatttccaataaatacagcatatccaattttaaaaaatctctggacttctttcgtttagcttcgttggtgttaccaagtgctggtgagacgtattcgcaagcaggagcgatattccttcaaacaggaaatttggggattgcagtattcaattttgttaaaggtatgatgacgaagatgccaagccctgtttcaatcaaaaattttggggcattaatggtggacaataaaagttcattaaatcgtagcttgcatactactatcatgaacacttacttacaagaatctaaaggacccaggacacctgctaaagagatactagaattttatttcctgggcctttttgggtctgtttggtcacctaccagttggagagatgatacaaaacctaaccaattaaataacggtatcaagttaaggcatttggaaaatgcactctacgagacgatgtcagcaagatacctgaataatattaagaccatctttcacaatttgatcattacaattggtgggttccatctattattaaaaaggcgttccgatgtaagtgcaaaaaccttgaaggatttacgtagcaatgaattggattacctaaattttgcattcaagtatattgctcacattttaaatgatatcgttaaggaatcatggagcgaaaatcctgaggtttcagaaattctaggtatggtaagaattatcaattgttggataaaagcaaatcccatggttcttcaatattcacaaagtaatctagagtttgttaatgccttggcatacttgataaatgatattgtgaaaaaaaaaccaagtccttcttttagtataacagaacatattcctaaaaggacatactggttcgaagaagacttaatggtgaagggtttatcattcgttaactttcaactatctgattttgacgattatgaaaaaattcttgaaatggatcatagtctcgatagattaattggtaatccgccattatgcgacaagttatcggcatcatctgaaatgctgttaaggttgcaggctgttgtgaatataagttcgcaattattgcagaacaacaactgcggagtagaatggtcagataataaatcacgttatatctttaataagaaaattggatttaaggagaccgttaaaaatagtatgaagacatcgaagcaatccaatgaaaaggccaagttacaaagaaaaaacaaaccttcgaccactaatggctcaatatccatggcggatttggagagacaaatgagaagtagctctttggattctttttctccaactatgggttatagtggttcgtctgtacctatggccccagatacgttcaatgttaagcccagcggtacaataacggggaacaaagtaaatgtagaactgttaaaaatcgaactaagcggtcaaaacgccgatggcgctattacgaatatatctcctggttacagtaacgcagcgatctcttcttcaaattcgacagatgaatcatccttcgatttgaacaacatcctatcttcaatgcaacaaaagcacgcggaaaaatcatttgccaaatccatgcaaggggtgaatgaacaaattccagcgaatgacgtctgccatcaagcccagaggccaatgcaaggtggtctgtattcatcacagcaaccttcatcgatgtcttcattaaactccgcgtatcagaatgcctcgatgcctccatctgcctccatggtatcctatccctatccttttttgaaccagcaggggcaaggggtctttccgccttataatgcacaaaatttacaatggcagagcgaagcttactcattaaagtcaatgaattttgcaaatccaacgtggctaggtgaccagtaccagacatctgcgccgtcgtcagcatatgcgcaagcgcaacggcaaatgtttcaacaacctatgcagcaagatgtggggaagtacatgcaatttccttttgacgcccaaagcaacacggacagcatgaggggaaacagtcggaataatatgttttaatattgttcgttttttatcatagtttttcaaatcttcatatgaatactaggtagaaatttggcttatcagtacgaatgaattacagtttgactgatttgtacacgagaattgacgtataacttcttttgaaagtctttgaaattacatggtagtacatacatatatatatatatatatatatgttatattattgttaattaaatattattatgcgta

SEQ ID NO: 736 - DNA, 2492 bp, Saccharomyces cerevisiae
ccctatatcgcttttccctatcaatagtttctaactcatgtcagtcttgcgatcacaacctccttcagttgtaccgctacatctgacaacatccaccagtcgcaaaacagaacaggaaccatcgctattgcactctgcaataattgagcgacatcaagaccgttcggtgccgaattcgaattcgaatccggattcgaaccatcgaataaaaaaggatcgcaataatcacactagctaccattcttcatcgaattcggagtcaaacatggaaagtcctcgcttgtcagatggtgagtcttccactccgacctctattgaagagttaaacccaacaataaataattcgaggctggtgaagagaaactactcaatatcaattgatcctttgcatgacaacagcaataataatacggatgatgatcatccaaacaccataacttctccccgaccaaatagcactagtaacaaggaaatgcagaaatatagttttcccgaaggtaaggagtcgaagaaaataacaacaccctcgttaaactcgaataattgtttggatttggacaattccagtcttgttcacacagattcgtatatacaagacttaaatgacgatcatattttactaaacaagcgcgtttcgaggcgatcttccagaatatcggcagtaacagcaacttccacgacaattaagcaaagaagaaatactcaggattcaaacctgcccaatattccctttcacgcttccaagcattctcaaattctacctatggatgattcagatgtaataaaattggccaatggagataccagcatgaaaccaaattctgctactaaaattagtcactcaatgacttctttgcctcttcacccacttccacaaccttctcaaaagtcaaagcaatatcatatgatatccaaatcaaccacttctttgccgccagagaatgaccactactatcaacacagtcgtggcaccaaccataatcacgctgctaatgctgctgctgttaataataatactactactactaccgctgctacgggtctgaaaagatcagagtctgcaacggcagaaattaagaagatgagacaatctttgctgcataaaagagaaatgaaaaggaaaagaaaaacatttttggtggatgacgatcgtgttttgatcggtaataaagtcagtgaaggccatgtcaactttattatagcttataacatgctaactggtattcgtgtcgcagtgtcacgttgttctggcataatgaaacctttaactccggcagactttagatttacgaagaagcttgcctttgattatcacggaaatgaattgaccccttcttctcagtatgcatttaagtttaaggactactgtcccgaagtctttagggaacttcgtgcattattcggcttagaccctgctgattatttggtttcgttaacttccaagtacattttgagtgagttgaactcgccaggtaaaagtggttcatttttttattattcgagagattacaaatatattatcaagaccatacatcattctgagcatattcatctgagaaagcacatacaagaatactataaccatgtaagagacaatccaaacactttgatttgtcaattttatggtttgcatagagtgaaaatgcctatatcgtttcaaaataaaattaagcatcggaaaatttacttcctagtcatgaataacttatttccaccacacttagacattcacattacttatgatttaaaaggttccacatggggccgttttaccaatttggataaagaaaggttggcgaaagatagatcatataggcctgtgatgaaagatttaaattggcttgaagaaggtcagaaaattaaattcggtccattgaagaagaagacttttttgacacagctgaaaaaagatgtggaattgcttgctaaattgaatacaatggactattccttgttaattggcattcatgacatcaataaagctaaagaagacgacttacaattggcggatacggcatctattgaggagcaaccacagactcaaggacccataagaaccggtaccggaacggtagtacgacatttttttagagagtttgaaggtggaattcgagcatctgatcaattcaacaatgatgtggatttgatttattacgtggggataatcgatttcttgactaattactcagttatgaagaaattagaaacgttttggagaagtctacgccatgataccaagttggtgagtgccatacctccaagagactacgccaataggttttacgaattcatagaagattctgtagatcctctgccccagaaaaaaactcaatcgtcgtatagagacgaccctaaccagaaaaattataaagactgagtagggcacaggtaaataacctatcgtctatgtactcagtctaatctactttgatttaatttaattcaagttatataaatctattcttttccctttaattttaatattttaattt

SEQ ID NO: 737 - DNA, 446 bp, Saccharomyces cerevisiae
ccgtcttcgaaacaagtcaaaagagcgaaaactaatgagccaacaacaaggttactaccaacaaggacccccacagcaaggttattatcaacaaggtccaccacaacaaggttattatcaacaaggtccaccgcaacagggttatcctcagcagcaaccagtctatgtccaacaaggtcaaccaaaggaggaaagctgcttggacagttgtttaaaatgtttgtgttgttgtttcttattagaattggtatgcgataactgattcgtttgttcaagaagtggtcaatataaaaaacgaaatcacatagcctttcatctatgctgcgaaagactgtataattacttttaagcaaaaatgtatataatatgatgggatcgttacgttggaacaagaattgaccatcgttcatctgttgttgaaataaaatttgaagttattcgtcgta

SEQ ID NO: 738 - DNA, 2362 bp, Saccharomyces cerevisiae
ataactaaaagtggtcttgtgttaaaaatagaatagaaaccactcataaggcaaaagatggctggaaaaaagggacaaaagaaaagtggactaggcaaccatggaaagaactctgatatggatgttgaagatcgtctccaggccgttgtcttgacagactcttatgaaactaggtttatgccactgacagctgtcaagccaaggtgtttgctgccactggctaacgtacctctcattgaatacaccttagaatttttggctaaggctggcgtacatgaagttttcttaatttgctcttctcatgccaaccaaattaatgactatattgagaattctaagtggaacttgccttggtctccatttaaaattaccaccattatgtctccagaagctagatgtacgggtgatgttatgagagatctagataatagaggtatcattactggagattttattttagtcagtggtgatgtattgactaacatcgatttcagcaaaatgctagaatttcacaaaaaaatgcatttgcaagataaagatcacatctcgacaatgtgtttgagcaaagcgagtacctatccaaaaacaagaactattgagcctgccgcatttgtcttagacaaatccaccagtaggtgtatttattaccaagatttaccattaccaagctctagagagaagacttccattcagattgacccagaattgttggataatgtcgatgaatttgtcataaggaatgacctcatcgattgtagaattgacatttgtacatctcatgtacctttgatatttcaagaaaattttgactaccaatcattaaggacagactttgttaaaggtgtcatttcaagcgatatattgggaaagcatatatatgcctatttgacggacgaatatgctgtaagagttgaaagttggcaaacttacgacaccatttctcaagactttttaggtagatggtgttatcccttggtcttagactctaacatacaggacgatcaaacgtattcttatgaatcaagacatatatacaaggaaaaagacgttgttttggcccaatcctgtaaaattggtaagtgcactgcaattggatcaggaacaaaaatcggagagggtacgaaaattgagaattccgtgattggaaggaactgccaaatcggtgaaaatattagaatcaagaacagtttcatttgggatgactgtatcatcggaaataacagtataattgaccattcattaattgcctctaatgccacgttagggagtaatgtacgcctaaatgatggctgtataattggtttcaacgttaaaattgatgataatatggatttagatagaaacacaaaaatatctgccagtccattaaaaaatgccggctcaagaatgtatgataatgaaagcaatgagcagtttgaccaagaccttgatgatcagacactagccgtttctattgttggagataagggtgttggttatatttacgaaagcgaggtgtctgacgatgaagatagttctacagaagcctgcaaagaaataaacactttgagtaaccaattagatgagttatacttaagtgacgattcaatttcttccgccactaaaaagacaaagaaaagaagaacgatgtctgtcaatagtatatacacggatagagaagaaattgattctgaatttgaggacgaagattttgagaaagaaggtattgccaccgtggagcgtgctatggaaaacaatcatgatcttgacacagcattattagaattgaacaccttgagaatgagtatgaacgtgacatatcatgaggtgagaatagcaacaataactgcattattgagaagagtttaccactttattgcaactcaaacattaggtcccaaggacgctgtggtgaaggtttttaatcagtggggactgttgttcaagagacaagcctttgatgaagaagagtatattgatttgatgaacatcataatggaaaaaattgtagaacagagttttgacaaaccggatttgattctatttagtgcattggtttctctatacgataatgacataattgaggaggatgtcatttataaatggtgggataatgtttctactgaccctcgctatgatgaagtcaagaaattaactgtaaagtgggttgagtggttacagaatgctgacgaagaatcttcctcagaagaggaataaaagtccacgcagtaccctgcataatcatgtattaccataaaaaggctttaatatgagaaaaaggtgagcgctatatagatttagtaatttacatgttacagaagcaaaaagcaaatatatatatattttttatcatattagtttttatcctcagtagtactactga

SEQ ID NO: 739 - DNA, 1807 bp, Saccharomyces cerevisiae
gagtacaagaaagggacaataacaatagacagaagacttttatatttgtaataacttagcgatgtcccaattattcaataactcgcgctcagatacccttttcctaggaggtgaaaaaataagtggtgatgatattcgtaatcagaatgttttggctactatggctgtggctaacgtcgtcaagtcatctttaggccccgttggactggacaaaatgcttgttgatgacattggtgattttaccgtcaccaacgatggtgccactattttgtctttgttagatgttcaacatccagctggaaaaattttagtagaattggctcaacaacaggacagagaaattggtgacggtactactagtgttgttattattgcttctgagttgttgaaaagagctaatgaattagtcaaaaataagattcatccaactaccatcataactggtttcagggttgcattaagagaggctattcgttttataaatgaagttctttccacaagtgttgacactttagggaaagagacgttaattaatatagccaagactagtatgtcctctaagatcattggtgctgactctgattttttcagcaatatggttgtagatgctcttttggctgttaagacgcaaaattccaaaggagaaatcaagtatcccgtaaaggctgtcaatgtgttgaaagctcatggtaaatctgccactgaatcactgttggtgccaggttatgctttgaattgtacagttgcttctcaagcaatgcctaaacgtatcgccggtggcaatgtgaaaatcgcatgtttggatttgaacttgcagaaagctcgtatggcaatgggtgttcaaatcaacattgatgatccggaacaattggagcaaatccgtaaacgtgaagctggtattgttttggaaagagtgaagaagatcattgatgctggtgctcaagttgtgttaaccaccaaaggtattgatgatttatgcttaaaggagttcgttgaagctaagataatgggtgtaagacgctgtaagaaggaagatttgagaagaattgcacgcgctacaggcgccactttggttagttctatgtctaacttagaaggtgaggaaactttcgaaagcagttatttaggtctttgtgatgaagtagttcaagccaaattttctgatgatgagtgtatcttaattaagggtacttctaaacattcatcttcttcgatcattttaagaggtgccaacgattattctttagatgagatggaacgttctttgcacgattctctttctgttgtcaaaagaacgcttgaaagtggaaatgttgtccccggtggaggttgcgttgaagccgcattgaatatctatttggacaattttgccaccacagttggttctcgtgaacagttagctattgctgagtttgcagctgcattattaatcattccaaaaactttagctgttaacgctgccaaggattctagtgaattagttgcaaaattaaggtcctaccatgccgctagtcaaatggccaagccagaggacgttaagaggagaagctacagaaattacggcctagatttgattagaggtaaaattgtggacgagattcacgctggtgttcttgagccaaccataagcaaagtcaaatccttgaaatcagcattggaggcttgtgtagcaattctaagaattgatacaatgattacagtggatccagaaccacccaaagaagatccgcacgatcattgattctttgcgtaatccgaacgagattctgtatctgcatgtaaactaataaacctatataaaatttaa

SEQ ID NO: 740 - DNA, 1250 bp, Saccharomyces cerevisiae
gaaagttcactcgtataggaaactttgatagagaggcaattccttactttcgttattcctttcagtcttattcttaatcgtttatagtagcaacaatatatcaatatggtcgtgaataacccaaataactggcactgggtcgataagaactgcatcggatgggccaaggagtatttcaaacagaaactggttggagtggaggccggttcggtgaaggataaaaagtatgccaaaatcaagtctgtttcgtccattgaaggtgattgtgaagttaatcagcgtaaggggaaggttatatctttgtttgatttgaaaatcacggtgttaatagagggacacgtggactctaaggacggatcggcattgccattcgagggtagcattaacgttcctgaagttgccttcgatagcgaggcctcaagctatcaatttgacatatctatatttaaggagactagcgaattgagtgaagccaagccactaattagatccgagttattgcccaagttgagacaaattttccaacaatttggcaaggatttgctggccacccatggtaatgacattcaggtgcccgaatctcaggtgaaatctaactacacaagaggtaaccaaaaaagtagctttaccgaaatcaaggactccgcttcaaagccaaaaaagaatgcacttccctcttctacttcaacttcagcaccagtctccagcaccaacaaagtcccccaaaacggaagcggcaatagtacatctatttatttagaaccaacttttaatgtgccttcctccgagctctacgaaacgttccttgataagcaacgcatattggcctggaccagatcagcacaatttttcaacagcggaccgaagctggagaccaaagaaaaattcgagctctttggcggcaacgtgatcagcgagttggtttcatgcgaaaaggacaagaaacttgttttccactggaaactcaaggattggtctgcccctttcaactctactatcgaaatgactttccatgagtcgcaagaattccatgaaaccaaattacaggtgaagtggactggcatacccgttggcgaggaagatcgcgtgcgcgctaattttgaagaatactacgtgcgttctattaaattgacattcggctttggtgccgtattataagatatattgttctcatgtttcaataaaagtatgcgtaaatatttacataccactattggcatagatagaatgcaatacatcatgtagttctg

SEQ ID NO: 741 - DNA, 2314 bp, Saccharomyces cerevisiae
gctatttcattaagaagattcgctatggtgagcatgttctcattatttctgctattaattgagcaatcgccgcttgtagcgtcattgcaacaaagtcaacggcatatagtgggtgttccctgggaaaagcagcacttgtatgactcgaatgaaccagatttgactaaatggcactgtttgaaccacgaagatatcgtattggatataagccagattaatgatggggtttgtgattgtcctgatggttcagatgagcccggcagcgccgcctgcgtggaagatatattcaaaagcgttgcagagggaggtggtaaagtgaataagtatttttattgtgataacaaggggtttattccaagatatatacgaaaatcggaagtcgcagatggtatttgtgactgctgtgactgttctgacgagctactttctggatatgagctctttgatgctggatctaattgttctcagttaaaaaacgaatttgacattatggcctctaaagagttatcaagttaccgggaaggtaaagaggccctagaagaactggaaagaaaatacggtacaaaggaagaggctatcacccgtggtaattgcttagaagaagataaggaaaaagcttctgccgagataaaagtactctccaacaggctctcagaaaatcgagccaaattagagcagttgagaggcgagtactttaaccaattaagccatgatcccattttgtatcaatttgaacaattaaacagtactcgtttgggatcggacatccttacatcgttcactatggtttcaagagtaagtaaaggttaccaggacatattcaagattttaagtgatttatcagaggcctatactccctcgctaaatgataaagttgtcaatgataatattaaaaaattcagaaaagttagaagacgggctgaaaaggctaaaattaatgcagatagcaaaattgatgatgagcaggcagataatctttacttgtactttacagaagaagtacctcaaatttttttgaaaagagaatctgagaacacgttgaggtacgtcataggaaaatccaattttgttcaagcgctagtggagggtaaaattaactataccaacgatatcttggagtatatcagagaattccgtttgattatggatgatatttctcagaattacaatgttaactttcaagatgcaggggtcaaaagtgctgtcgattcgtataaaaactacctaggtgaatacggcgaactggctgaattagaaccagctcacccgtcagagagccttttgagatcgttgagcgaagtaacatcatttgtgaacgagaatgcaccaaaggtattgccaccagacgctgttgagtcagaacaagatacgaacagcgatcatatcggtacttctggagatttgcgcaataaactcaaagagattctatctaagctgaatattttttcatctagaaaagatttggtctcattagagaagagattccgctcttgtgaaagtcaagtcagtctcctggagaatgaattaaagcaaaaaatggactataagaaattattagatgaaactgaagatgaaggaactaattctactgcaggaaatctgactgagcttttagaactaatgggatcacaatcctattgtcttgacgacatactggacaactatgtgtacactatatgctttcaacgtccaatgaccgaaggtgtcatatatcaagctgaggataaggttgacggtaaaaaagttttgatcggtcgttttaagacatcaggttttaatgttgacttaaacatggaaaaatacgcagaacatttaaaggccacatatgatgagaagagtgatttgatttcaaacttagcagctatacaggacgatgacggtaacatgcaacattacgtattcgggaacttaaacgaactgaataatggtctggtactagaatacgaaaatggagaccagtgctggaatggtccgcgcagatcggctactgtatttgttcggtgcagcgacaaattcaagattcggagtgtacatgaagcgactaagtgcaactacatcttcgatgtcgttggtcctctaggctgcaacaagactttcgaatacgagccccctaagttcaatttaagtgaatgactggaaaatgagtagttaggcttttttagtaagtaaacaactaggaaggccgatgctgtgccgtgatactcttttccgcaacaaaagcaatatttccctcggccaaaacgcgaaaagacgataaataagtatatcgttccaaatactgatagttctgtacgacctgttggaataacgcgaa

SEQ ID NO: 742 - DNA, 1471 bp, Saccharomyces cerevisiae
cttcgtattgtcttttcttgacagtgagggcgtataagatacatcgtacatacatagagactcatttagtgatgcttgaatcgagcagtgataagataaagtttgcgcctattaaagaggtagattacaaaaaaccggtaagtaagagtaagaactatactcttattaatgacatccaaccattggagtggtattgtcacaatgatagtgaaacgggctaccaacacaccataagtaacaagacagatggtggtagaggtttattcagagtgatgaaaaaatcgatggagaccagagtcgagacccaaacgttatatttcacagatttgcatacaggcttgtgtggatttgttcaattactgtattctacggttatgggtggtatctataaaggcttccaattgaatttcaaggtttttggctcagaaagtaataatactgactacgacgtttgggaaagttttaaattggatgacatagctgaatttcaaccattaaagtttgtctctagaaatgttatttttgaatttttgagcaacaaaaatgaaaaattaggttccattggccagttatctatcaaatgtgatttaccaacatgtaacaatacaattcaaaatttgaaaatcgatttgttggtggatttgtttcaaggttttaagatgaaccccaacggttgcaattattattttgacaaacaaatctcgatgagtgacgaattcgtttcctcagacaaaatgatcagacatgtttttgtgcccagaggtaaatgtaatggtaatatttcctacgataaaaaactcaatagtggggactttcaaaataaaaatatttcattaactgatgttcctgtcgtttatctggacgctgttcaaggtcttttgccgaataaagcagccagtaaatggaatttcctatgttttcagagcgaaaactactctgttttagcaattgaattcactactcctcgagatcatgataacgtcaccgtaacagtttggtcaattactgaaaaaaacaaactgatatctattggttcttctgtgcagagcccaaaacgtcatgttaggttccgtgctacgagtacagataaggaaagcggctgggtatatccaacctctatcaagttccccggtggattttcagaacacgacttgaggctggttaatcgatacgacgttctcggtgagttaccaagcatggtcaggtcgttagctcagaaaattgtgagcatcaaacctttcatttatcaatactgtcaaccttctaaatataagcacgagaaaggtatttctatcgttgagagcaccttcattagttgaacaaaagcgtgaacacttccacatgaaattcgttttttgtccttttttttctcttctttttctctcctgtttcttctaccaactttacctaataattaatgtgtaatcgaatttttttacataatcactacctaataactaatttatcatca

SEQ ID NO: 743 - DNA, 617 bp, Saccharomyces cerevisiae
ggttatttctcagtgaataaacaacttcaaaacaaacaaatttcatacatataaaatataaaatgtccggtggtaaaggtggtaaagctggttcagctgctaaagcttctcaatctagatctgctaaggctggtttgacattcccagtcggtagagtgcacagattgctaagaagaggtaactacgcccaaagaattggttctggtgctccagtctacttgactgctgtcttggaatatttggccgctgaaattttagaattagctggtaatgctgctagggataacaagaagaccagaattattccaagacatttgcaattggctatcagaaatgatgacgaattgaacaagctattgggtaacgttaccattgcccaaggtggtgttttgccaaacatccatcaaaacttgttgccaaagaagtctgccaaggctaccaaggcttctcaagaattataagatcggttctggtattttaaagaaggcggaaggaactaaactgcttctccattgtaactatattaagtgtctattagacctttctgtttttcctttttatttttctatatataatttattgggtatataattaacggtaacatatgtcatgcatga

SEQ ID NO: 744 - DNA, 842 bp, Saccharomyces cerevisiae
cgtttctctggtaaagtcaccacacagcatcaaatataacagtaatgtctagctcagaatccattagaatggtcctaattggcccacctggtgccggtaaaggtactcaagctccaaatttgcaagagcgtttccatgccgctcacttggccactggtgacatgttgagatctcaaatcgcaaagggcactcaattaggtttggaagcaaagaaaattatggaccaaggtggtttagtctctgatgacattatggttaacatgatcaaggatgaattgaccaacaatccagcttgtaagaatgggttcatcttggacggtttcccaagaaccattcctcaggctgaaaaattggaccaaatgttgaaagaacaaggaactcctttggaaaaagccatcgaattgaaggttgatgatgaattgttggttgccagaattaccggtagattaattcacccagcctctggcagatcctaccacaagatctttaacccaccaaaggaagacatgaaggatgacgtcaccggtgaagctttagttcaaagatctgatgacaatgcagacgccttgaagaagagattagctgcttaccatgctcaaaccgaaccaattgttgacttttacaaaaagaccggtatctgggctggtgttgatgcttcccaacctcctgctactgtttgggctgacatcttgaacaagctaggtaaggattaatgaccttgcgcaatgtcttctaaatatcttttcttttttttaaattaatgaaaatataataaatttttgtatgtgagtacatatatccgcagtatactataaatgaaataataacataagtgtttgtaa

SEQ ID NO: 745 - DNA, 2052 bp, Saccharomyces cerevisiae
gtcagctgatactctattcggttgtgtgttgcaccctgctctgctgtctctcaaccgttcttcctttacacgccttcccttctcagctcgcgtttcttttttttttatcccactcttttcttttttctttcctatatattgcccatataagtttggttggaaggaaaactaatagagctagttgttgtccctcaataatcataacagtacttaggtttttttttcagtatgcaacgctccatttttgcgaggttcggtaactcctctgccgctgtttccacactgaataggctgtccacgacagccgcaccacatgcgaaaaatggctatgccaccgctactggtgctggtgccgctgctgccactgccacagcgtcatcaacacatgcagcagcagcagcagccgctgctgccaaccattccacccaggagtcgggtttcgattacgaaggcctgatagattccgaactgcagaagaaaagacttgacaaatcgtacagatatttcaacaatatcaaccgattggccaaggagttccccctagctcatcgccagagagaggcggacaaggtcaccgtttggtgttccaacgactatttagcactttccaagcaccctgaggtattggacgccatgcataaaactatcgacaagtatggttgtggtgccggtggtacaagaaacattgctggccataacatccccactttgaatctggaagccgaattggccactttacacaagaaggaaggtgccttagttttttcgtcatgttacgtagccaacgatgccgtcttatccctactgggtcaaaagatgaaggacttggtgattttctccgacgaactcaaccatgcgtccatgattgtcggtattaagcatgctaacgtaaaaaaacacattttcaaacataatgacttgaacgaattggaacaactgctccagtcataccccaaatccgttcctaaactaattgctttcgaatcagtatattctatggccggttcagtggccgacatagaaaaaatttgcgacttggccgacaaatacggtgctttgaccttcttggatgaagtacatgcggtcggcctgtacggccctcacggtgcaggtgttgcagaacattgtgattttgaaagtcaccgtgcaagtggtattgctaccccaaagaccaatgacaagggcggcgcgaagactgtgatggaccgtgtcgacatgatcaccggcactttaggtaagtctttcggtagcgtaggtggctacgtcgcagcctctaggaaattgatcgattggttcagatcgtttgcacctggtttcattttcaccacgactttaccaccttcagttatggcaggcgctaccgcagcaattagataccaacgttgccacatcgacctaagaacctcgcaacagaaacataccatgtacgtaaagaaagctttccatgagttgggcattccagttattccaaatccttctcatatcgtcccagtgttgattggtaatgctgatttggctaagcaagcttctgacatcttaatcaataagcatcaaatctacgtacaagctatcaacttccctacggttgctcgcggtaccgaaagattgagaattaccccaacgccaggtcacaccaacgatttatctgacatcttaatcaatgcagttgatgatgtgttcaatgagctacagttaccacgtgtcagagactgggaaagccaaggtggcttattgggtgttggagagagcggatttgtggaagagtctaacttatggacatcaagccaactatctttaactaatgacgacttgaaccctaatgttagagaccccatcgttaaacaactagaggtttctagtggtatcaagcagtaaaacaaccaatatatgcatgggctgagatagaggtacaaggaatttgtaaatcagtaaaaaaaaaaattaacagtttttttttttcattttttttttttattcttatttatgtatgatactttattattatttctcttaattatttatttatttaactaacacgatgagcacttttaa

SEQ ID NO: 746 - DNA, 2451 bp, Saccharomyces cerevisiae
cgatgagtctataccagaggcagcaaatatcaccaacatacacaggtatacacaatctcatgtccacacacacgtacagacacgcacatatatatatatatatatatatccccataggtatttatatatacaaaagaatcctcgtgtgtttgtgtgtgcaatagctagttttgcgctgcctcttatagtagacaatatcactttttcaataaaatagaacttgcaaggaaacaaaattgtatcgcttcaagatgctacgatcaaccacatttactcgttcgttccacagttctagggcctggttgaaaggtcagaacctaactgaaaaaattgttcagtcgtatgcggtcaaccttcccgagggtaaagttgtgcattctggtgactatgtatcgatcaagccggcacactgtatgtcccacgataattcgtggcctgtagctttgaaattcatggggcttggcgctaccaagatcaagaatccttcacagattgtgaccactctggaccacgatattcagaacaaatcagagaaaaatttgaccaagtacaagaacatcgaaaattttgctaagaaacaccatatagaccactaccctgccggtagaggtattggtcatcaaattatgattgaggagggctatgctttccccttgaacatgactgtcgcatctgactcgcattcaaacacctacggtggtctggggtcgctgggcactccaatagtgagaacagacgctgcagccatatgggccacgggacagacgtggtggcagatcccaccagtggctcaggttgagttgaaaggtcaattgcctcagggtgtttccggaaaagatatcattgtcgcattatgtgggcttttcaacaatgatcaagttctaaatcacgccattgaattcacgggtgactctttgaatgcattgcctatcgatcacagactcactattgctaacatgaccaccgagtggggggctctttctggtttgttccccgtggacaaaactttgatcgactggtataaaaaccgtttgcaaaagctgggcaccaataatcatccaaggattaatccaaagactatccgcgcactagaagaaaaggcgaagattccgaaagcagacaaggatgcacattatgccaagaaactgatcatcgatctagccacgctaactcactacgtctcaggtccaaatagtgttaaggtctccaacaccgtgcaagatctatctcaacaagacatcaagataaataaagcttatctagtgtcatgtacaaactcccgtctatctgatttgcaatctgcagcggatgtggtttgtcctactggagacttaaacaaagtcaacaaggtggctccaggtgtggagttctatgtcgctgctgcctcttcagaaattgaggctgatgcccgtaaatcaggcgcttgggaaaagctgctaaaggctggctgtatcccactgccttctggttgtggtccatgcatcggtctaggtgcgggattactggaaccaggtgaagttggtatcagtgccacaaacagaaacttcaaaggtagaatgggttccaaggatgcattggcttacttagcttcccctgctgtagtcgccgcttctgccgtgctgggtaagattagttctcctgctgaggtattgtccacaagcgaaattccattcagcggcgttaagactgagataattgagaatcccgtggttgaagaggaagttaacgctcaaacagaggctccaaaacaatccgttgagatattagaaggtttcccaagagagttttctggtgaattagttttatgtgatgccgataacatcaataccgatggtatatatcctggtaagtacacttatcaggatgatgtgcctaaagaaaagatggcgcaagtttgtatggaaaattatgatgccgagttcagaaccaaggttcatccaggtgatatagtggtcagtgggttcaatttcggtaccggttcctccagggaacaagcggccaccgccttattggctaaaggtatcaacttagttgtttcaggatcttttggtaatattttttcaagaaactccattaacaatgctcttctgaccttggaaatcccagcattaatcaaaaaattacgtgagaaatatcaaggtgctccaaaagaacttacaagaagaactggttggtttttgaaatgggatgtagctgatgctaaagtggtcgttaccgaaggttctttggacggccctgtgatcttggagcaaaaagtgggtgagctaggtaagaacctacaagaaattattgtaaaaggaggcttggaaggttgggtcaaatcccaactataatgtgcataaatatctagaaaaatcgcacccttttctttatttattaagtttatttatttatttacggttattcacgtatattttgttaatctattgatacacaagttcttatttgtaa

SEQ ID NO: 747 - DNA, 1142 bp, Saccharomyces cerevisiae
caggaaaagcatctgtttagaattttataactaatttggggaggtatctgtaaagtaatagacaggaccggaaatagtgtaaatactctcctttgtttttttagttgtaccactttgaagagggctcgagattcacgaacaaaatgcaaaggttttcactagtcactcacagatcattctctcactcctgtgtgaagcccaaatctgcatgctctttggtcaaaccagttcatcacttggtgaaaattgataagtcaaagttatcccctagatttccagaattgaaatatgacaaaagtgatattaggtcacctggatttaaaccaaaagacactcatgcagatagactcaatgaccattaccttaacactttacaatctgatttgttattgattaattattcacataacgctgcggtggtaaagggtctaaaacaaagagcgtggagtggtgattcgccataccacttgaacagaccaccgaaaaatcctcgaggttcgaaagctcaactacctgacattcatcctatcaaatggagtaacattcctgggctagaaagtgttgtaataaactgttttgttagggaagcgagagaaaatcagctattggctatcaccgctgcgttacaattacaacaaattactggatgtaaacctcatccaattttttccaaaaatgatgttccaacctggaaactgagaaaaggtcatcagatgggagctaaagtcgaactaaagggaaaagaaatgtctcagttcttaagcacattgaccgaaatcgtcctaccaagaatcagagaatataaaggtataagcaaccagtctgggaacagatttggtgggattagtttcggcctgacggctgaagatatcaaattcttccctgaaatcgatgcaaaccaggactcatggcctaaaacttttggtatgcacataaatataaacacctcagctcaattagattaccaggcgagaactttgttgagtgggttccagttcccatttttcggagaggagaaataagaatacaatctcatggtcctggccagttagccatgctctatggcagaaaggcaaagggcatatataatttcccattcgtcatgtaaatatataaactgtacaagatactatctctctcca

SEQ ID NO: 748 - DNA, 1383 bp, Saccharomyces cerevisiae
agaaaagctctctatttatttttataaggaataattgtgcatgtacaactatacaatatgtctagtgtaccttataattcccaacttcctatatccaaccatctagagtacgatgaagatgaaaagaagagcagaggctcaaaactaggcctgaaatataaaatgatatactggaggaaaactttatgcagttcgctagcgagatggagaaagctaatactattaatatctttagctttgtttttattcatatggataagcgattccaccataagcagaaatccatctaccacaagttttcaaggccaaaatagtaacgataataagttgagtaatactggttctagcatcaactccaaaagatatgtaccaccatattctaagagatcaagatggtcgttttggaatcaagatcctaggattgtcattatattagcggcaaacgaaggtggtggtgtattgaggtggaaaaatgagcaagaatgggctatcgaaggcatatcaatagaaaataagaaggcctatgcgaagagacatggatatgcgttgactatcaaggatttgacaacgtccaaaagatactctcacgaatacagagagggttggcaaaaagtagatatattgagacagacgttcagggagtttcctaatgcagaatggttctggtggttggacctggatactatgataatggagccttctaaatcattagaagaacatattttcgacagattggaaactctggctgacagagaattgaaaagttttaatcccctaaacctaagagacgacataccctatgtcgattattcagaggaaatggagtttctaataacacaagattgtggaggcttcaatttgggctcatttctgataaaaaatagcgaatggtctaagctgcttctagatatgtggtgggaccccgttctgtatgaacaaaaacatatggtttgggaacatagagaacaagatgcgttagaggcattatatgaaaacgaaccgtggattcgttcgagaataggatttttgcccttaagaacgatcaatgcattcccaccgggagcatgctctgaatacagtggtgactcaagatacttttacagtgagaaagaccatgattttgttgtgaatatggccggatgcaattttggcagagattgctggggcgagatgcagtactacaccactttaatggaaaaactgaataggaaatggtacacgagatttttcttcccataaaatggaagttatcaatattgtaaagagaagcatttacaagcttttatttttctttttaatttccactactggttctgctttaaaatgttgttttataatttatgtacatttaggcctatagaagattctttcaataatatgcta

SEQ ID NO: 749 - DNA, 2907 bp, Saccharomyces cerevisiae
tatctattatcaccaggccattcattaaaaacttaccgctaaattgaaaaagaggcgactgccaacatacttgcccttttttttttcgctattattagtgtcctttgattacaaactacatccattcgaaaagcttgtaaccaacactaaagtctgtgattctacccaaatatttgctctccgtcatttctattctgtttgaactactgtgcatatatttttctttttgtttcctacattttattcccggcatatctcgcgataggtatattgaataatgacatctgcattaagggttttggtatgcggagatcacccaaatctcattctgtacacatccaggtttcaacatgccaaaaatatagaattttatcttgtgaacaactcaaaaaatgccaactacgaggttagttcactattttatgggacggaacggtttcagattcaaaaccatttccaatcgctcctagatttagtagaccttaataatgaaaatggtggcttggtattcgacttgataataatgagtgcgtcttcactgcaagaaatcccgcaggtattgagagatataaaacctatgatgaataagacaacaaagatactatttgaaagtagcgggtttatatatttggagccattcatcaaggcttcagttgatctttcgctgtcaaatattttcagcattttcaccgattatgacataagacggttggacaatggctcatacaaacagttcacgactgcaaatgccaaatccttttctgtttcgatcggtcaaacgacatccgttcacgaaaacagctattcaagtgatattattcctattttgaatacatttcagaaattgttccaaaaactgtttcctagggacgttgtgactctttacgatcattctccctccgctttcttggcaaaagaatgggaactagctttgcctcaaatatgtttcgatccattattaataatattagaagagaagaatccatcaaccttggatgaccacgttttggccaaacctcttatttcaggtttactaggcgagagcttattaataataaaaaaaatgggtatagccatgaacaatccaaattttcaaaatgaacagactatattgaaacattggaagaataagtgcgaagacttacctgatgggccggcacttttatataatttcatccataaggcttcatctttgaatattgacttattgttattacagccgatattattagcagatgactttggcgtgaagacaccatatttagaatgtttgtttacaatgatgactcaatatcaattgttaaataaaggtgattctgaatggtttattagaaaggatgagaacacagcgttaactcgcgttgatgatttacaaaacagtatcgcacttaaagatggaaaaatcatgcagctgcaaaattcggaatcaaccctgaaaaatgagataaaagaacttcaaagtcaagttttgagcttaaaacaagaagtgtcctcaagtaaagcaaataatggacaagagttggaaattttaaagaagaaagtgcaaatgggagacaattcattatttgatcgcccaaatagtaatactaatggtatatctccctctgataacattgttgatgttgatttaaattacgaaaggagtgaccaaggtaataatagtagtggtaatgatagcagaagacaatcttttttcaactccacatctgatacaacattatccagagatgaaacctcgttgaaagagcgtgagttagaagtacgaatgaaggaattagaacttcaagagcgtgagttagagttacagagaaaagccctccagcaacaacaacaatatcaacagagaccgcctaagcaagtatactccggtccttctggtacaccaaccagcggcaataacaataataaaagttacaatccaaatagaaaatcttcctatagtcagcctcaacatgtggctatgatgaccagcagaggtctacatggtcctagcgctgcaagctctagccctgtcatttctgccaacaattttgttgatccagtttcttctgggacgccatatagcagcaatagttctcgatttagtcagcaaattccatcgcagcaatacatgcatactgttaagccaacgagtagaaaaaacagaagtagtgtcatgcctaatataggttacgtcccagggctaaccaataacgagtatggtagaaagtttaacggtaatggtatgaatggtacccaaagccgtctgaattcactttcaaaccaaagtacgtttagatctcaacagggtccaccgataacacagcaaaaatcgtttcaaaataacggtggtagcatgaggacaaatcgcataccatctgcaaattacaatatttcaaatcagcaatcgggttttgttaactctatttcaagtccaaatctaagcaatttggagaatagaaacacagtacaaaacagtagaaatgcggattctgctccgtgcgttaatcaattgaacagtgactctccgccccaattacagtctctatctcaaaacggtacctcaaaagttcctcagatcaatattacgcaaccatcaccaattcagaccaactttgctacgagtgataaccctgctgctgtaataaaactagggacaccttctgaagatacagtttcagctgcggcaacagccaataatataagtacaatgggagatgaaagccgcaaagaggacgttaaggaaaaaaagaagaaaaagttcagtttctttggaaaaaggaaaaagtaacaaatacgcgagcccttgtctttccaatccaaataatccgtttttgttaatgatatgttatattttatctacttatacattttatctaaaacactttctatttggttaatgaccaacgaggaagtttgtagcttcaa

SEQ ID NO: 750 - DNA, 1055 bp, Saccharomyces cerevisiae
taacttctccttataatataaaaacttacaaaacgaccatgatattcaatctacctgttagtgtgctgctttatttttctttgatatgggcaatggagcctagtttcgtaagaggtaagaacgtcgtcaacttaattactttcaaagattcaaatggcaagctgcacaagcggttagcaccagaggaaataccgccccggctacataattctcaagtaaattcttatccattaggatataagggaatgcgtgacttttcaagacccgcagtgaatttagatgatattttagggacacagcaaagaaagcagcaagagtttttggctgaattgtctcctttatccttagaatcaaagttgtcattagtgaacgaggtccaaatatttgcaagctatgtgcgaaatgatgttgaaacatataacaaagtaagtgaccccaacgaagatttgattattattgcaccaacgaacagggctgtctctcagcttactttaaaaccgtggcaatttccgaataatattgataagcttgaaagtgatggtgccaccgagaaggaacttgatacggcaatacaagagaatatctccaaatttgtgagatctcatattgtagtgtacaatgatgataaaaattcctacaagaaggtgagtccaggatgtacgctcctgcagagtattgacttcacagaaagcaagaaaagcgattcggaaactggtggtgatattttactcaaaaaagaaggagaagtatattatgtagcttcctccagagacgagaaatttcatgccgtcgagagcattgaaaatggaagcaatggtgttattttgatggttgatttcaccctggtgggtccttagttatgtgttgcttatggttttgacttccttgaccccatacaaattgcgttctttattttttttggttataatttattaataatggcgagtaggatcggcctatctttatggagtttacaacataatatatacattggtatcaatttgttttatagttatattttctctagtatgtgaacgataattttgttttacgaa

SEQ ID NO: 751 - DNA, 1297 bp, Saccharomyces cerevisiae
tttacattagaaaaataaggtagtggtaataaagcacactacacatcgaagaaagaaacagacactactacatcggtggggggtcatacaatagaggaccaaaatgaagaatgataataagttgcaaaaggaagcacttatgcgactatcgcagctaagatttccatttgccgatgctccaagtatagtacaagcgcatcaaaaagatgaacaaatccagggccttttgattatgaaagtgactgaattgtgcaaattgataaagagtcaattgtttgttaactcttaccctaaggaactgtccatatttgccaagctcctgtatttgctctttactacaggaagacgtggtagaacgttaggtgaggaatatgttgacttgacatacactaataggaagggtaccagacttgcaggacggctcaaaatgattgtattcgctttcgcttatcctttatgtccatatttcatcaccaaactatacaagaaaataatgaagaacaacaaggaaagtaaaattgaagatactgaaagtgttgccgcgttttgtaagggccttttagatttcattttagacgtacacatgaccctcttttatttcaaaggagctttttacagtatttccaaaaggatttttggtatgagatatgtttttaaacatatattgtcaaaaaatgaggccaattttagagaagagggctcacaaaagtacaaagtattaggttatatcctattagctcaaaatgttatgaaatggtaccctgtcctaacctctacgctcgggtcctggatttatgggagaaaaaggaccaatgattcaattactaggtcgtctgttggtctacaggagcgttcagaacatgaatctatagaaggcataccgaaggaatcgcagctgactcatataaatttgtcagataaaaaccaattgccatttattccagaagcctcgagaaaatgcatcctatgtctcatgaacatgagtgatcctagctgcgcgccatgtggacatctattttgttggagttgtcttatgagctggtgtaaagagaggccagaatgccccttgtgcagacaacactgtcaaccacaggaaattctggtcctgcggcaatagaggaactaatcaataatttgactactcttttagcattgtccacaggcctttttcagaaataacgcagacgtctgagcaggagaagtaaaacgcgaaggggaaataatgctttttagtcttgtaattatattaattaattaaataagtttttctttatcggaattttatttaagactttca

SEQ ID NO: 752 - DNA, 1324 bp, Saccharomyces cerevisiae
tacctgcaccatctcaaaggttttacgttactaaggagtgaatcaggttttgataaatatttacactatcttttacaaggaagatgtcgaataagcaggcggttctgaagttaatcagtaaaaggtggataagcacagtgcaacgtgccgattttaagctgaattccgaagcgcttcatagtaatgctacggtatttagtatgattcagccaactgggtgtttccaccttggtaattatctaggtgctacacgtgtttggacagacttatgtgaattaaaacaacctggccaggaattgatatttggagttgctgatttacacgctatcactgttccaaagccagatggagaaatgtttagaaaatttcgccatgaggcagtagcaagtatactggctgtcggtgtagatccagaaaaggcttcggtgatctaccaatccgccatccctcaacacagtgaattacactggttgctttctactcttgcctcgatgggattacttaaccgcatgacgcaatggaaatcaaaatcgaatatcaaacaatcaactaatggggattatctggttaacgattctgacgtgggaaaagttagactgggcttattttcgtatcctgttttacaggcagcggatattctactttataaatctacacacgttcctgttggcgatgatcaatcgcagcatttggaactaacaagacaccttgctgaaaagtttaacaaaatgtacaagaaaaatttttttcctaaacctgtaactatgttggcacaaacgaaaaaagttttgagcttaagcacgcctgaaaagaaaatgtccaagagtgatccgaatcacgactctgtaatttttttgaatgatgagcctaaggcaattcagaaaaagattagaaaagctttaacagattccatttctgataggttctactacgaccctgtagaaagaccaggcgtatcgaatttaattaacattgtcagtggcattcaaagaaaatcgattgaagatgtcgtagaagatgtatctcgtttcaataactatagggatttcaaagattatgtttcagaagtgataattgaggaattgaaaggcccaagaacagaatttgagaaatatatcaacgaaccgacctatttgcatagtgtcgttgaatctggcatgcgcaaagcgagagaaaaagcagcaaaaaacctggccgacattcataaaataatgggcttctgactgtccccggctttaggctgctgcaaacgcaatgtaaataataatacagtttaacttgtacgtatctttgttatttcagaatatgcaagattcctcactcg

SEQ ID NO: 753 - DNA, 921 bp, Saccharomyces cerevisiae
actgcaggacaacacaaaaacacaagaaaaggaggacaaaaaatgcaggttaaatcgattaaaatgagatgggagtctggtggtgttaattactgctatctattgtccgacagtaaaaataaaaaatcgtggctaatcgatccagcagagcctcctgaggttctgccagagttgactgaggatgagaaaataagtgttgaagcaattgttaatacacatcaccattatgaccatgcagatggtaacgctgatatcttgaagtatttaaaagagaaaaatccaacttcaaaagttgaggttataggagggtcaaaggactgcccaaaggttacgataattccggagaatttgaaaaagttacacctaggtgacttagagattacttgtattaggacgccctgccataccagagactctatctgttattatgtgaaagatccaacaacagatgagcgctgcatttttactggcgatacactatttaccgctggttgcggtaggttttttgagggtacaggcgaagaaatggatatagctctgaacaattctatcttagaaactgtgggcaggcagaactggagtaaaacgagggtttatccaggacacgaatacacaagtgataatgtaaagtttgttcgtaagatttacccgcaagttggtgaaaataaagcattggatgagttagaacaattctgctccaagcatgaagtcacagcagggcggttcactttgaaagatgaggtagaatttaatccattcatgagattagaagatccaaaggtccaaaaagctgccggagatacgaataattcatgggacagagctcaaattatggataaattgagagctatgaaaaaccgtatgtaggaaagccaacagagtataatatacttaaaaatattcttttagcataccctttta

SEQ ID NO: 754 - DNA, 1177 bp, Saccharomyces cerevisiae
taaaggaataggaaacggttgctagattgtatttaccttaccaactttcaagttttttttctaacttcctaactttcagtctcgatacattaatcaacaggacgtagtgattgcaaaattgttcagaatatacattagattaaaagacaaatggccaaagacattgagatatccgcatccgagtcaaaatttatcttagaagcactgagacagaattataggttggacggccgctcctttgatcaatttcgtgacgtggaaataacgtttggtaaagaatttggtgatgttagcgtaaaaatgggcaacaccaaagttcactgcaggattagttgtcaaatagcacaaccatacgaagacaggccatttgaaggattatttgtaatatctacagaaatatctcctatggctggttctcaatttgaaaatggaaatatcacgggggaagatgaagttttatgttcaagaataattgaaaaatctgttaggcggtcgggcgcattggacgtggaaggactatgtatcgttgctggcagtaaatgctgggctgtgagagctgatgtacatttcctggattgtgatggtggatttattgacgcttcgtgtattgccgtcatggcaggattgatgcattttaagaaaccagatataactgtccatggcgagcagatcattgttcatcctgttaatgaaagagagccagttccactaggtatactgcatattccaatatgtgtaactttttctttcttcaatcctcaagacaccgaggaaaacataaaaggtgagactaactcagaaatttccatcattgatgcaacattgaaagaggaactactgcgagatggtgtattgacggttacgctaaacaaaaaccgtgaagtggtacaagtttccaaagcgggtggtttaccaatggatgcgttgacgctaatgaaatgttgtcacgaggcttacagcattattgagaaaataactgatcaaatactgcagcttttaaaggaggattcagaaaagagaaacaagtatgcagccatgcttacatctgaaaatgcccgcgagatctaatattaacgaaaaaactgaaataaaagcaacgcttatacatatacatgcatgcattaatatatgtatatatatcggtacgtatagattgtaaaattacacttactactaa

SEQ ID NO: 755 - DNA, 1057 bp, Saccharomyces cerevisiae
gtatgctacaagggaaggttgttcgataaacataagcttctcattagcatgagttctatagataatgacagcgatgtggatttaacagaagatttagccgtggccaagatcgttaaagagaatcctgtagctagaaaaatggttaggtatattttatcgagaggagaatctcaaaattcgatcataacaagaaacaagttacaatctgttatacatgaagctgctcgcgaggaaaacatagcaaaaccgtcttttagtaaaatgtttatggacataaatgctatactgtataacgtatatgggtttgaattacaaggattgccgtcaaaaaataatatgaacgctggcggtaatggaagcaatagcaatacaaataaatcaatgcctgagccactgggacatagagcccagaaatttatcttgctaaacaatgtcccgcactcaaaaaattttgacgatttcaagattttacaaagcgctcacacttatgaagagctaatagttaccggagagtatattggtgacgatatagcttcaggaacttccaataccttagaaagcaagttgagtacagatcgagatcttgtttacaagggtgttttgagcgtcattttatgcattgttttcttctctaagaataacatattacatcaggaattgatcaaatttctagagacatttggcattccaagcgatggttcaaagattgctatactgaacattactattgaagatttgataaaaagtttagaaaagcgcgaatatatagtcagattggaggagaaatccgataccgacggggaagtgatatcatacaggataggtagaagaactcaggctgagcttggactagagtctcttgaaaaattggtgcaagaaatcatgggccttgaaaaggagcagactaaaagtttgcacgatgatataataaaaagcattggcgattcatattctatatagcattgcataggtgtccatgtagtttaggtgcgcatcttttttgtcgaggaaatagtgaagatgaatacgaaataaactatgggcaaatagttacgaa

SEQ ID NO: 756 - DNA, 812 bp, Saccharomyces cerevisiae
gtgaggaataaatagagaaacagcgacggaaaaatcgatatttcagggcaaaagcatgaaggtaaaccattcaatttcaagattccgccccgcttcatggttcgaaaagacaaagataatcccaccccaggtatacatctttaggaacctagagtatggacaagtactatattctcaatttcccaacttttcgcaaacacaggtggataagctgtttgtgagaccaaactggagcaacagaaagccatcattgagaagggacatctggaaatgtatgtgtgtagtgaacttgcaaaactataagcagagtgtccatctataccagaacctctgccggttgagatacctccgtgatgtggcacagcgtaaggagagtgacaagctaagaaaaaaggactctaacgggcacgtctggtatagcggacagtatagacctacatattgtcaagaggcagtggcagacttgcgggagtccttgttgaaggtgtttgagaatgccacaccagcagaaaagcagacagtacccgccaaaaaaccgtccatatactgggaggacccatggaggatgggtgacaaggacaaacattggaattacgatgtgttcaatgctctggggctggaacacaagcttattcagcgtgtggggaacattgcgagggaagaaagcgttattctgaaggaactagctaagctcgaatcacatcctacagagcagacggaagtgtcttcccagtagaacgcttcgtcattagatatacaaatgcaggtagaaaaaaaaacatatataagctcatgtaaatagtgcaatgcaa

SEQ ID NO: 757 - DNA, 1274 bp, Saccharomyces cerevisiae
ggtctgggtatttctaacattctagtccgaagagggtgtatacgaaaagaaaatatacgatgaacgtaacatcgaatgcaactgcagccggttcctttccactagcatttggtctcaagacctcatttgggtttatgcactatgccaaggcccctgccattaatttacgccccaaggaatccttgctgccggaaatgagtgatggtgtgctggccttggttgcgccggttgttgcctactgggcgttgtctggtatattccatgtaatagacactttccatctggctgagaagtacagaattcatccgagcgaagaggttgccaagaggaacaaggcgtcgagaatgcatgttttccttgaagtgattctacaacatatcatacagaccattgttggccttatctttatgcacttcgagccgatctacatgactgggtttgaagaaaatgccatgtggaagcttcgtgcagaccttcctcggattattccagatgccgctatttattacggctatatgtacggaatgtccgctttgaagatctttgcaggctttttattcgttgatacatggcaatactttttgcatagattgatgcatatgaataagaccttatacaaatggttccactctgttcatcatgaactatacgtgccatatgcttacggtgctcttttcaacaatcctgttgagggcttcttgttagatactttgggaaccggtattgccatgacgttaactcatttgactcacagagagcaaatcattctttttacctttgccaccatgaagactgtcgatgaccactgtgggtatgctttgccacttgacccattccaatggcttttccctaataacgctgtctatcacgatatccaccaccagcaatttggtatcaagacgaactttgctcaaccatttttcactttctgggacaatttgttccaaactaactttaaagggtttgaagaatatcaaaagaagcaaagacgtgtcaccatcgacaagtacaaagagtttttgcaagagagagaattggaaaagaaggagaaactcaaaaacttcaaagctatgaatgctgctgaaaatgaagtaaagaaagagaaataacccttttgcatacctcccgttcaattgctgggtaaaggcaatgtctccgacttcccacgtttgtatttattatccatttatatacatcaagacatattattaagtgtataggcgtgactttgactatatatttgatttgtaacgaaagaatacatcaaaattcaa

SEQ ID NO: 758 - DNA, 861 bp, Saccharomyces cerevisiae
gatgaggaaaaagttactttttgcacagcaaaaaaaacaaataaagaacagttagtgaaataaagcaaaagtgcaaacggtgcctttaatcaaagactttgcaggaacataaacaagtgcactaaagaaggtccaatttaaatatgccagctaaaaaaaggactagaaagacagtgaaaaaaaccgtatcattctccgatgacacaacattaacaacgcaccaaaatcgtgagaaaaagaacgtagatcatgatcgtccacctgtgtatgtgaggaaaacccctctgatgacatttccataccatttagtagcactactttattactacgtttttgtatcttcaaatttcaatacggtgaagttgctaagttttttgattcctacacaagttgcttatttagttttacaattcaataaatgcacagtttacggtaacaaaatcattaagatcaattactcattgaccattatttgtctaggtgttacatttttgttgagctttcccacaatgttattaactatattatttggtgcgccattaatggacttattgtgggaaacctggctgttgtcactgcattttgcatttttagcataccctgcagtttattctgtatttaattgtgatttcaaagtgggattatggaagaagtattttatctttatcgttgtagggggttggattagttgtgttgtcattcctttggattgggatagagattggcagaattggccaattcctattgttgttggaggttatttgggcgctttggtgggctatactatcggtgcctatatataatatcggtaatttaaaaatttgtatataaaaaaatataagtatgatagaggtaacataa

SEQ ID NO: 759 - DNA, 2198 bp, Saccharomyces cerevisiae
aaggagaataagaacgtagacacttaagggcgatagtgtttgaacagaaaaaaattaacttacaaaacatgaaggacttgagattacaggggccctacagaaagtacattccctataatattttccaacaatgtggaattggtcacttaaagacgcttgattatattttcgcgtttttgattgttattaccaatttcacattaatatggaaatcgcactcttcttcattctggaaccgaccatgggacaataatagtgaacaagaactttcccaattaattcagttttacctagacaaggctttttacatccatgaattgccaccatttacaatacagttctactccattattcgaagattaaagatcgcagaaaatttaagatacgtttctttgtttttgaattcatcgactttaggttttcttttcctgataacaaggagaatcaattgctctcgtttaatttcagcaacaggtttgctgatattatccaactgggaaactttcagaaatgagggcactattatatcatttgacagtttagaatggtgtctgttctcagtagtaatttacagttttataagcatttcaattgcaaaactgggaactacgaattggtttgctaatgtgattacattatctatttctttagggctggcaatctcttctaaatttattggaattgtcacttgggccttcgtaattctttcttttgtacgtcaatttgatagactgataagcgacgttaaagttacgaccatccaaataataaaatttgtcattctctgtctattattcgttttgattatccctggttccatcttcataataagttattcgaacttactttcgaattttaagacagacacgccacaattttcaaaatatatgagcacatatttcaagtcctatttaagaggccctcaagtacaaccgagtcgattgtactatggatcaacgatcacattacgtcatttagattctatggtcggatatcttgcttctcacgatatttcgtatccatcagatgttgacgaacagttagtagcgttatcatttgaagaattcgcggcagacaatgaatggttaatagaacatcctacattaaatttgagtttttctgaggtataccatgctgatcaattgatacctgtagaatttggtcaaagtataaaactaagacacaaatctactggaaaattattgagagccagcactgctaaacctcccatcagcgagcaggactatgactttcaaatttcatgcacgaaagattcaaactacgaaggaggaatggatgagagatgggatgttctcctgattaaagatgaaatcaacaatgataaaaaggataacgcagatgataaatacattaaaccgcttcaatcagagatacgcttttacaataacggccagagatgtgggctattgggccatgatcttcggttacctgaatggggccgctttgagcaagaagtcctatgtatggagtacccagtaataccaagaaccacttttctaatagactcagtacaactaccagtcgatttccaagtcccaatgatagaatattatatcggcaaaataagttcttcagcagaattcaatcataccttatcttggtcacaatttctttatcttttcaaagaatatattttcaaacaatacaagtacaattactatattaaatacggtaaaaataaggtcacttttgaagatgcgttcgccgtggaaaaatggccaattacgttagacacagactctccagtttggtttaattttgcatggtatggatccttactctcgatgatcattttcatgtgcgtgcaatgtaagagaatgatatcttggaatccgtggacaactgctgaaccttccttttctatcaaatgggaggtctacaatgaatttggctgggagtgcattgtcggttggtttttacatttttacatcttcacaatgagtccacacttcaacttggggaaaaaactgtacttccaaagttttttctttagtgtattgtgtcttttagaatcgttagattgccttgcaaagtaactcgtagaaagattttctccattatgatttttctcccattgcttcaataattctccggtacaaatagagtagcacaattatttataagaataacatacatacgcttaactctgccatataactatagtacattttctgtcc

SEQ ID NO: 760 - DNA, 1263 bp, Saccharomyces cerevisiae
ctctcatcgcacttttggaagcgtatcatgaaaagcgattcagttgaaatcactaccatctgcccagatgttgaaaattctcagtttgttgtgcaaagcaactgtccagagactattccagagattctaaagtctcaaaatgccgctgtgaatggcagcggcatcgcttgccaacaacgtagcttaccaagaatcaaaatcttgggtaccggtggtactattgcatcgaaagctatagactcctctcaaactgccggctatcatgttgacctgaccatccaagatctattggatgccattccagatatatccaaggtctgtgacattgaatatgagcaactatgcaacgtggattctaaagacataaacgaggatattctttataaaatttataagggcgtctcagaatcgttgcaggcttttgacggtatagttattacccatgggactgatacgctatctgaaactgcattctttattgaaagtactattgatgctggcgacgttcctattgtttttgttggttcgatgcgtccttcaaccagcgtttctgctgatggccctatgaacctttaccaagcaatttgcattgcttcaaatccaaaatctagaggaagaggtgttcttgtttccttgaatgaccaaatttcctctggttactacattactaagacgaatgcaaatagtttggattcttttaatgttagacaaggctatttaggaaattttgtcaacaatgaaattcactactattatcctcctgtgaaaccgcaaggttgccacaaattcaaactgagagtggacggtaagcattttaaattaccagaggtttgcattttatatgctcaccaagcctttccgccagctatagtcaacttagtggcagataagtatgatggtattgttcttgctaccatgggtgctggttcattgccggaggaggtcaatgaaacctgcatgaaattgagtttgccgatcgtatattccaagagatcgatggatggtatggtgcctattgccaacgtaccaaagaaaggttcaaaggaggataatctcatcgcatctggttatctaagccctgaaaagagcagaatcttgttacaattatgtttggcaggtaactacacgttggaagaaattaaacatgttttcactggcgtctatggtgggtgaaaattttgtaattttttgcatttgtgtcgatatatatatatatatacatagacacagagatagagatataattatgcaagtccctgttaa

SEQ ID NO: 761 - DNA, 1104 bp, Saccharomyces cerevisiae
atgttacgaagatctattcataccactaaaatcctccaaaaacctaatgctacttcgcatatttggtcggactttaccacaaggcctagttcactttctatccaatcttcaaaagtgaaaaattaccttttccagaagaaagcttctctagacccaccatctatcagcagaagaagtaaccgtatcaaatattcacctccagaacacattgatgagattttcaggatgagttatgattttcttgagcaaagatccagtaagttttatgagttggccaataagactaaaaatcccttgaagaaggatgcacttctcataaaagcagagatcaataatcctgaggtacaatacaattttcagtttaataacaagttgaacaatgttaaggatataatagattatgatgtgccagtgtacagacatttggggaaacaacattgggaatcgtacggccagatgttattgatgcaaaggttagaaacgttggctgccattcctgatactcttccaactctggttccacgggcagaagtgaatatcaaatttcccttctctactggtgtaaataagtggatcgaacctggtgaatttctatcgtccaatgtcacatccatgcgtcccattttcaaaattcaagaatatgaacttgtgaacgttgaaaaacaattgtatacggtactgatagtcaatcctgatgttccagatttgagtaatgactcatttaaaacggctttgtgttacggattggtgaatattaatttgacttataatgacaatttaatagatccaagaaagttccacagttctaatattatcgctgactacttacctccggtacctgaaaagaatgctggaaaacagagattcgttgtttgggtattcagacaacccttaatcgaggataagcaaggtcctaacatgttagagattgaccgaaaggaactaagtagagatgattttgatatcaggcaatttacgaagaaatacaatctaaccgctattggggcacatatctggagaagcgaatgggatgccaaagtcgccgccgtcagagaaaaatatggcctaccacctggaagggtttttagcagagttagaaggtga

SEQ ID NO: 762 - DNA, 1305 bp, Saccharomyces cerevisiae
atgcgtatagcgatgcatctgccgctgttgcttttatacatattcttactacccctttcaggtgcaaataacacagatgctgcacacgaagttatagcaacgaacacaaataattgggccgtattagtatccacgtcgcggttctggttcaattacaggcacatggctaatgtccttagtatgtataggactgtaaagaggttaggtataccggattcacaaataatattgatgctgagtgatgatgtggcctgcaattcaaggaatctatttcctggaagtgtttttaacaataaggatcacgctattgacctttacggagactctgtagaggttgactacagaggttacgaagttaccgtggaaaactttataaggctgttaacggatagatggacagaagaccatcctaaatctaaacggttgttgacggatgaaaattcaaatatattcatctatatgacaggacatggtggcgatgattttttaaagttccaagatgctgaagagattgcttctgaagatattgcagatgcattccagcaaatgtacgaaaagaaaagatacaatgaaatcttctttatgatagatacatgtcaggcaaacacaatgtattccaagttttattctccaaatattctggctgtaggctctagtgaaatggatgaaagctcgtactcgcatcactcggacgtagaaataggggttgctgttattgatagattcacctattactgtttggatttcctagaacaaatcgataaaaattccacgttaactttgcaggacctcttcgattcattcaccttcgaaaagattcactctcatgtgggtgtcaggactgatctgtttgataggaatccgtcagaagtattgattactgatttttttgcgaatgtgcaaaacgtaattcctgatgattcaaaacctctttccgtaagtcattatcatcattacaaagatcatatcgatactgctcagtatgagcttaacaataatgtgctggatttggccttggagacttaccgcaaaaacaatcaatcctccaagattgaaaaaaaaatcaaagacatcaagtctactagtgtattggatgttgatatagattccaacgaatgtttcttcacctccttcaaacaatcagctaccataatactggcgcttatagtaactattctgtggttcatgctgagaggaaacactgctaaagcaacctatgacctgtacactaattaaaacacttttatccattttttttcgtataagcatattttacatctttatatatatttatttttttttttt

SEQ ID NO: 763 - DNA, 4118 bp, Saccharomyces cerevisiae
ttccattgaacagaggtgctggagtgacgagcgtgtgtgtttttagcctatctttattcgttgagcctgtagaagagccgttcttttaagtacaccctgattagatccccctatttgttgcaaccgttcaagttttgtagatcggaagaagagcaaaacagaaaaataaacaaggcgagaacgtaaggtgtcattgcattagccattaaaaaccatattcactctttacattcgtgtagcaattgttactgtgataaactattgaaattatttatagtatattttgttttcttccttttaatcactttttgaatttttagaatctgaaattttttttctaacgttgattggaagaaaagtaatggattccacaggcgcttctcagattgttagcgcactagatgttatttactcccccaagtctaacaattctcaacggcaagaagctcagaaatttttagatgaagtgaaattatgctcagaatcgcccttttggggctacgaaattgcattgcaaaaccccactaattctatattgaaatactttggactaggattactagaccatgcagtgaagaaaaactggaatgattatgacgaggggaaaagagtggccctgagaaaatgggtcatggaacttaattttggggtgcaagattatgataccagatatattaaggaaaaattagccactttatgggtagaggtggcaaaaagaacatggggtgaggctcttaagcagacaaaccctacggaagaacagttactcacatcttgggtggacatggacaataaccttttcgaactttggaacataaatcaatcgtcaagagaactagcattaataattttcagaatcctttttgaagatgttttcttgttggacgacctaattgttttgaaaaggatgacggttattcaacccttatgtgtaatgattgtttgccctattgaagttttcgcaataaaatacaaattcagtgataaatggaccaaatttaaagctaatgaagagggctggttttctgtttggattccagagttgaataatgcattacaacagaataattctgaatacatcataaggcttttagaaactctgaagacgtgtttaaactggccattaacagaggtcattgtaagaaatgacgtgttatcctccttattgacttgtttatccagcaatatcccaagggcgcagtcaatggcattagactcgatacatattctgttgacccgtccctatagtaatgaaagccattaccaaatgaccatagatcgagtttttgataatatggacttattagatagcgtttatgaaagcttgttgtttgatcctacagatgatatagatgaaacgaaatatcctataattaaaaagttcgtggatatgatcagttgtctctatgtttgtgtcccaaagattaaggagacaaatggccaaattcaaaaatattttaagcttgtattaaagacaacttataacccaagcttaatcgttagcggattaacattagacctatggtgtacctgtcttcgaaacgatgaatacttacccaagctggagaaatatgtcattcctgatctactacagtttgccgcggatgctttagtctattatgaacagattgatggtcatatttccaaaaaatttgcggagattgattttcaatccaagtccgaatttcaaacattttgttccacttataggaaaagaataagagacatcattaggttgatttcttgcgtcgaattagaccttacttatgattggttgaacaacagattaaacaattatttcagctctccatttggtcagcaggtcttaagttccacatttttggaccataaattagagccttatttaggtgccctctcccaatacatgattgttgaatgtttcatcaatggttgtataagatggaagatctggtatccaacaggagatgattatgacgaaaaactagattccatattacaaaaactggaaattttgtcaaaccagttaattgcattaaatttaagagaaccattgttattgaagaaacaaatccaaaattttgcactttttttgacaatgttaaaagataatgtgcttttcacacttttagaaaaaatcataacaagcgccacgatggactatccagaaattaatttggaagagagaggcgctgaatcagacgcagttagagatttgagatatgcttgtggtatcgagttgaataggatggctttattaatgcccgaatctctgaaaaaaatatacccagaccttgaaagtgtcattgccagaatcatgcccaacttatcttaccatgaaaaaatttccttcaaatccttcttattgatcattgtattgaagtcttcattagatatgaaagaggaaagatttgcggctattgtggatccagaacttttagcctggtctgataaaacaacagttgttggtctttctgatttgcattggtttatggaacgcttaggtattgttcagatcgcagaatatttccagaggcgtgatatcgacgaaaatagtgaccttttatcaattccaattgatgatgagggtaaagagctgaagtcggaattgaccaaacgttggcaaagcttgtttcctgttcgtgcaacaagaatgttcattcattattcaatgcaaagtataaagacagatgaagaattcaaaatgctacaagatctgtggagacctaggattgtcccaatattaccttacatcacgagactactgtaccaattgcaatcctaccacgatccagataattggaaaggattacctacggttgtgcaatccttcgtcaagtattccactattgaaagattttgggaggccggagcttcaaataaatcaaaggatgagtttattgatgaacatatgaaagcgatgcaaaccttacgagacttcgccgactccgtaggacacatcattaggtatacaagggaatacactctacttgttttaagtgccatatcatcacttggtagtgttttttaccttttggacgaatcgcccgacctactactgaactctattgccatatttaagccaggtagcaatgagataagccctggagtttcaacacatggatggaaacacataatgaatatagccattcgtcctatattaaaaggttgtccaaaagattgtctggggaaattcatgcccgcatttttgcctaaattatttgaaatcctggacctgctgctatgtcagaaatggtcctcgcatatgaatgatatggacatgaacccagttccaactgacgatgatcaaatgactgaagaaattttggaagagaatttgttgagacaactaaccacagttgttgttagaatagtaattgattgtgttggtcaaggcaatgccaatccaaacagtgctaaaagcaggctaaataaccatcaaatggagatgagaaaaattatatttaatgatttaaacacccttgctccatttttgaaacttttgaaccatttaatttccttcaaggatacaaaatgttcatttaactccatcctagtaatgaaatgctgcttaacctcagtccttaatcaaaacaacacggtggatgaatatttcacatttgaagtgatgaaaaatctgttgctaaatgtgctgtgtaatagtgcgtttaaggattctttccatgaggcactatatgctttcactgtgatttttttgactctgtgcaaagaatatccctctgctagagcgttcctttttgagatatctaatggttataatattgatgagttatacagaaatttaaggagcgtggacgaatacaaaacacaaagggcactcatgattgattttatagattgggttaaatccaccagtgggaaagaagatggtaatgtggaccatgcaggcgatgagagaaaaagacaagagaaaagggaagctatcctcaagaaggcaaatgagagattaattaagaagaataaagaaaacggagacatgctggatgatccgaacattgaagacggtgctgtgggtaatctctttgatgacaactgataataaggtgccatatatacgtagatgtgtagatgaaattagagaaagcaaatagacatctgaatcgtgctaaaaattgtaa

SEQ ID NO: 764 - DNA, 963 bp, Saccharomyces cerevisiae
cgcaggtaagcctcttaacaccacattcaggtatttgaagataatacataatgtcgattgttggaaggaatgctattctgaatctaagaatttcactatgtcctctgtttatgggcaaaagatcgtttgtatcctctccggttagcaatagtgcaaaagctgtgaaattcttaaaggctcaaagacgaaaacagaaaaatgaagccaaacaagccactttgaaagcgtcaaccgataaggttgatccagttctgggccgggcggacactccctttataacacgtattatggcagagttaaaagagcctttagttctatcgaaaggttataatattgaagaggtagacaagttccttgcagccattgagtctgctaagcgtgaaagagctgagttgtcaggtttaaatacagaagttgtgggtattgaagacatagaaaaactggaagacagacgtgaagccatcttgagaatattgagcatgaggaactccgagaataaaaatgccattaaaatggctgtagaactcgcacgtaaggaatttgagaggttcccaggcgatactggctccagtgaagtccaagcagcttgcatgactgttcgtatccagaatatggcaaaccatattaaagagcatcgtaaggattttgctaacaccagaaatttgaggatattagtccagcaaaggcaggcaatattaagatatttgaaaagagataatcctgaaaaatactactggactattcaaaaactaggattgaatgatgcggccataacggatgaattcaatatggacaggcgttacatgcaagattatgaattttttggtgataaaatattgataagagattctaagaaagtggcaaatcaaaagcgtaaggagataagaaaacaaaaaagggctacattttagaataatttgaatcatatgtagaaaagcttgtaaataagaaaccgtcatattc

SEQ ID NO: 765 - DNA, 1167 bp, Saccharomyces cerevisiae
gttttagctaggatctggaaacaatcagtgatttgccatttaacagctgggggaatctaaatacttttgaattttaaggtttccagcaccatgcttcgctttactggtgctcgcgctattagaaagtactctactaggtatgcactcgagcacctgaaagaaggtgctcctctgaaagggctgttttctattgaaggattacagaaagcatggttcgaccgagtgaaatatctcgatgcaaaattgaacgattgtacaaatgaagcgcaacaaaaacccttagaaactctcatccatgaaaattcgaaatctgcttcaaagaaacatatcgtgaactatgcgtcatcattgtacaacttgaaatttagcatgtcttcccttcagggatgtatcaggactccgccagaggaatgccccaggctaggtccagaggcgctacttcagacccctgatttcaataggacaataagcaatgagccattgaccactggcaacgaacgtttgcaagcagctctaatttcttcatttgggtctttgatggagttcagaacattattaataaattcaaatcttgctatatcaggcgacgggtttacgtggttagtcgcaagacggcagctcgacaaacgtgctatgcgcaacgacatgccaaacagggatattgaatatgataagctgtttatattgaatacgtacaatgcgggaactcccttcaacttctctacatctggggtaatgaatgagctcaataaccaatataccaacatggaaaaacaacgagccaaagaagccggtaatcttgaagattctgagatgactgccaagcaagccaagacaaaatttatttatgaaacccaacagaaaggtttttctgggaaagaggtttcatatatcccgcttttagccattgatgcgtcaccaaaaacatggttaactgattatggcgtatttgggaaacgagaatatttagaaagggtatgggactctatagaatggaaaattgtagagtcaaggttacctcaacgtactaagatccaagcattcaacacgttatgaatgaaactggtaatgggaattttttccttttgatataagttggtagtctctgtaaatatataaagtcaaactattcgtaatgtgtatataacgtggtcttaaattattttt

SEQ ID NO: 766 - DNA, 1286 bp, Saccharomyces cerevisiae
agcaatcttttcattaccttaagccagtatctattgatatcaatcgataaggttcgttgttatcggtgctaaaaattataaagtgaaaataagaatcttttcatgtcgtgctcaaacggcatctggcctactgtatctaatttgtgcggatcattatccttcttcacctctgttatttcattgtttccacaaataattgagacttatcgagataaatctgtcgatgggctatcgccatattttttgctggcttggttatgtggggatattacctcgctgataggggcaaagctaacagggcaattgttatttcagatacttttagcaatttattttctattgaatgattcttttgtatgtggtcaatattattactatggcgtgctgcatgaaaataaattggcgactgtcggccatgagcctaaacctcttcttcccgaactggttgaaaatggtgagcttttgagggaggaagaggacatgatacaaggtggtagcagtgcagaaagccctagaagcagtagaagaaggtctgccattacagcagccttggctatagctcatactataagtacagctagcgcatatccgctaaatgtaggctccacccaatcacaagtggggcctcccggagatggtaaaaacagccagctgggtacaattttatcttggattggcgcttccttctacgtaggcgcacgtatcccacaactaatcaagaattacaatagaaagtctacagacggcttatctcccttcctatttgctactacactactctgcaatatcacgtataatttgagcatcttcacaagctgtagatttttagataatcagaacaagagggaattcatcgtgaatgagttgccctttatatttggaagtgctggaacaattgcgtttgatttgatatacttctaccaatactatatcctttatgcaactgatatgcaactacgtgaactggaaagagaactatacagtcctgaagaagacagtgcagcgcaactagtgacagaacgtacatcactgttgtctggtgaaacgcaaacatagttttccctacggagtactaccatttatatttaaacaatgcactctgctcttgggatagtccttgcgagacccttttttcccaataggaatactacgttcgtactctgtgtaaaagtacccaactatagttagcgccagttttacgtaaaaccgtctatgtcttgtttgcattcgcaacagctacaaacacatatagtttgtcacactaatattaataatgaaagttatta

SEQ ID NO: 767 - DNA, 1067 bp, Saccharomyces cerevisiae
atagcgaacagtacgaaagtaaacatcatattatcaataatggttcacaacaaagttactatcattggttcaggtccagctgcacacaccgccgccatctatttggccagggcagaaatcaagccaatcctatatgaaggtatgatggcgaacggtattgctgccggtggccagctaaccaccactacagaaatcgaaaacttcccaggtttcccagatggtctaacaggtagcgaactgatggacagaatgagagaacaatccacgaagtttggcactgaaattatcacggaaacagtttccaaagttgatctgtcttccaaaccattcaagctatggaccgaatttaacgaagacgcagaacctgtgacgactgacgctataatcttggccacaggcgcttctgctaagagaatgcatttgccgggcgaggaaacctactggcaaaaaggtatttctgcctgtgccgtgtgtgatggtgccgtccccattttcagaaacaagccattggccgtcattggtggtggtgactctgcatgtgaagaagctcagttcttgaccaagtacggctcaaaagtgtttatgcttgtcagaaaagaccatttgcgtgcttctaccattatgcaaaagcgtgctgagaagaacgaaaaaattgaaatcctttacaacactgttgcgctagaagctaagggggatggtaaattattgaatgccttgaggattaagaacactaaaaagaatgaagaaaccgatttgccagtcagcggtttattttatgcaattggccacactccagcaacaaagattgtcgctggccaagtcgacactgatgaagcgggctacattaaaactgtcccaggcagctcattaacctccgttccaggatttttcgctgctggtgatgttcaggattctaaatacagacaagctattacttctgctggctctggttgtatggccgctttggatgctgagaaatacttaacttccctagaatagatgaattttccattataaaatagatacactcaaatttttgtatacttatccaacaaatcgttactttc

SEQ ID NO: 768 - DNA, 1304 bp, Saccharomyces cerevisiae
tggaaaactttataataaagcatctgatattacagctactgacaactaagtgaatttaaactgcaataatcacaagaaaacttagtattcccttatcatgtccgaggcgactttgctatcttacaccaagaaattattggcttctccgccgcaattgagtagcacagacctacacgatgcgttgctggttatattaagtcttttgcaaaaatgtgatacaaatagcgatgagagtctttccatctataccaaagtttcgagttttctcacggccttgagagttactaaacttgatcacaaggctgaatacattgcggaagctgcaaaggctgtgctcagacattccgaccttgttgatctacctttacccaagaaggacgaattacacccggaagatggaccagtaatcttagatattgtaggtactggtggtgacggacagaatacttttaatgtttccacgtctgctgctatcgttgcctccggaattcagggcctaaaaatttgtaagcacggtggtaaagcttctacatccaatagtggagctggtgacctaattggaactttaggctgtgacatgttcaaggttaattcatcgacagtgcccaaactttggcctgataatacgttcatgtttctacttgctcctttttttcatcatggaatgggccacgtttctaagatacgcaaatttcttggaattccgactgttttcaacgtactgggaccacttctacatccagttagccacgtaaacaagagaatattgggcgtttactcaaaggaacttgcgcctgaatatgccaaggcagccgctttggtatatccaggaagcgaaacttttatagtttggggacatgttgggttagacgaagtatcacctataggcaaaactactgtctggcatattgatccgacatcgtccgaacttaaattgaagaccttccaattagaaccttctatgtttggtttagaagaacacgagttgtcgaagtgtgcttcatacggccctaaagagaatgcgagaattctaaaagaagaagtcttgtccggcaagtaccaccttggcgacaataatcctatttatgactacatcttgatgaacaccgccgtgttatattgtttaagccaaggtcaccagaactggaaggaagggatcattaaggcagaagaaagcatacattctggtaatgcattacgttctttagaacactttatagatagtgtgagctccttgtagacattatttcatatgttatacttaaactagatagagacgttttatttgtactaagctgaacatt

SEQ ID NO: 769 - DNA, 369 bp, Saccharomyces cerevisiae
taatagtacaaatacgcaaaaatatgagtacggacgttgctgctgcacaagcccaaagtaaaatagatttaacaaaaaaaaaaaatgaggaaataaataagaagtctctagaggaagacgatgaatttgaagatttccccattgacacatgggccaatggtgaaacaataaaaagcaatgctgtaacgcaaacaaacatatgggaagaaaactgggatgatgttgaagttgacgacgatttcaccaatgaattgaaggccgaattggatagatacaaacgggaaaatcagtgaggggctacataacattatttctaaataacgcaaaaggaaattatacgtctaatgttactttagtacattgttgtca

SEQ ID NO: 770 - DNA, 785 bp, Saccharomyces cerevisiae
gtaaagctgtataagtgatctgtacaaaaactacgaagaaaagaaataataccagggaggaactaccaattgtaaccattaaccttagttatgagatcatctcttctaacccttccaaaatcttttttggggtttatgccgctataccttgcagttgagattgtcttaggtatttccattctaaacaaatgcagtggtgcttatggtattttagcattgttcacgggtcatccgttggattttatgcaatggatagcatatctttggtcggtatttacattaatcgtattctcacaagggctgtatttgattcataagccaaacttgctggtattttcgcaaatctgcgtactttatacaatcgataccatttccacttgtttttttactctatggtttaccacgcaatggttcaccttggaagacactgctaatattgatggaaataatgcactacaaagtaacccaatatcgacaggtaagctgacagaacgtggtattgatataagtaaacaaagtgcaactgaaagctacgaatataccatgactattttaattacgttggtgtcattgatattcaggttctactttaacttcattttggcatcttttgttcaagaattgttacaccaccccaaatatttagttgatagggatgacgtagaacaaaacttgaaaaacaagcctatttggaaaagactgtgggctaagagccaaaaaggttgttataagctatgtaagaatttgttagagtaaatagtaaaataaagccctagcgttatagc

SEQ ID NO: 771 - DNA, 1174 bp, Saccharomyces cerevisiae
ttctaaagtgataataaagtaactttgcaatataatcaggtcgcaaatatacccacagataataatctaccatgcctgctacgttaaagaattcttctgctacattaaaactaaatactggtgcctccattccagtgttgggtttcggcacttggcgttccgttgacaataacggttaccattctgtaattgcagctttgaaagctggatacagacacattgatgctgcggctatctatttgaatgaagaagaagttggcagggctattaaagattccggagtccctcgtgaggaaatttttattactactaagctttggggtacggaacaacgtgatccggaagctgctctaaacaagtctttgaaaagactaggcttggattatgttgacctatatctgatgcattggccagtgcctttgaaaaccgacagagttactgatggtaacgttctgtgcattccaacattagaagatggcactgttgacatcgatactaaggaatggaattttatcaagacgtgggagttgatgcaagagttgccaaagacgggcaaaactaaagccgttggtgtctctaatttttctattaacaacattaaagaattattagaatctccaaataacaaggtggtaccagctactaatcaaattgaaattcatccattgctaccacaagacgaattgattgccttttgtaaggaaaagggtattgttgttgaagcctactcaccatttgggagtgctaatgctcctttactaaaagagcaagcaattattgatatggctaaaaagcacggcgttgagccagcacagcttattatcagttggagtattcaaagaggctacgttgttctggccaaatcggttaatcctgaaagaattgtatccaattttaagattttcactctgcctgaggatgatttcaagactattagtaacctatccaaagtgcatggtacaaagagagtcgttgatatgaagtggggatccttcccaattttccaatgagcgcgctacattacagttaatgcctccagcaacctgtagtgcttctttaaaccgatccgatacagctgaaacaaacattgattttactaattttcatataatatatacacatatatcgaatgataatgcaaaatataatttaatgaaattggaaatactcggaa

SEQ ID NO: 772 - DNA, 728 bp, Saccharomyces cerevisiae
tagtttaagaatcggcgagagttattttgtgcttgaaaactgtttttgattcaaaaaaaaaatgggagccaagacgtcaaagctttccaaagatgacctgacatgtttgaaacaatccacctattttgatagaagagaaatccagcaatggcataaaggatttttgagggattgccctagtggccaactagctagggaagattttgttaagatatacaaacagttttttccatttggttctcctgaagattttgctaatcacctttttacagtttttgataaagacaacaatggattcatacattttgaagagtttatcacagttttgagtacaacgtccagaggaactttggaggaaaaactgagctgggctttcgaactttatgatttgaaccatgatggatatattacatttgatgaaatgctaaccattgtggcgagtgtttataaaatgatggggtctatggttacacttaatgaggatgaggcaacgcccgaaatgagggtaaagaagatcttcaagttgatggataagaacgaagatggttacattacgctggacgaattcagagaaggttctaaagtcgatccctctattattggtgccttaaacctttacgatggcttaatatgaaaactttgtttttgcttcttatggattggatgttataacagtagaagtaattttaggataattttaaataaaaataatattaaaaataataata

SEQ ID NO: 773 - DNA, 477 bp, Saccharomyces cerevisiae
aaccaaagtacaacaatagcaacagttcctaacattcttccatggatacggaagcattggccaattatttgctacggcagcttagtttagatgcggaggagaataagctagaagatcttctccaacggcaaaatgaagatcaagagtctagtcaagaatataacaagaaattattattggcatgtggatttcaggccattttaagaaaaattctgctggatgctagaacaagggcaactgcagaaggtttgagggaagtatatccttatcatattgaagctgcaacgcaggcttttctggatagtcaatgaaggggtatttttaagcctctttatcatatactcttttgttcgtaatagcaaataactcggtcttattaacgagaaaaagttaaagcatcttctgaatttttattatatacaagttatgtagtaaggcgccacttagcacctagaaaatatgattagcgttccgtaa

SEQ ID NO: 774 - DNA, 1560 bp, Saccharomyces cerevisiae
tcactctttcttcttccttttttagctcattacttgtgaaaatgagctttgttcaaataaggcacatttcttcacaaataaaccgtaagactgtatccattgttggatcggggccttccggcttttatacagcgtaccatttactcaagaagtcaccgattccattaaatgttactatatgggaaaagttacctgttccttttggtttaagtagatatggtgtggcacctgatcatccagaagtcaaaaattgtgaagaaacgtttaccacatgtgcagaagagttttcttcccctacaaaccaaaagcataaattttcctttgttggtggtataaccattggaaaagaaatattgttgaaggaattgctggataatcaagatgctgttattttaagttatggttgtacaggggacagaaagctgaatatccctggcgaactcggaacaaaaggggtgtttagcagtagagaatttgtcaattggtacaatggtcatcctgatttcgcaaaggataagcgatttaccgattttgactggagcaaagtttcgaaagttggtattataggaaacggtaacgttgctcttgatattacgcgtgtacttatttctaatcaaattgatgaaatatgggaaaatacggacatctcatctcttgcactaaatttgctaagaagggcacctgtaaaggacgttaagctaattgcacgaagggatttcgttcattccaaattcaccaacaaagaattaagagaactatgggagttagaaaagtatggcatacgtggccgtattgatcctaaatttttccagaaagaaatgtttgacccatctaagtacgatcgtgcattcaatagacgagtagagatgtgtagtgagtatctcaagccatttaatgaacgttcgaagaaaaactataaaaaggctcctcctccaagcagcggatatgacaaattctgggagttagattatttgaagactcccttgaaaattaatagagacgattttggtgcaatcaactctttgagtttatgtaacaatcgattaaatgaagataacagtttgcaacccttgaaggacgtcaataatattatgacatataaagtggatttgctgattacttcattgggatatgcaggcgttcccatgcctgaattctctaagttgtctattggatttgacaaagatcatatagctaataaacagggtcgtgttttaacttccagcggagaaatattcccacatttatatgcatctggttggatccgtaagggcagccagggcgttattgcctcgacaatgcaagatgcttttgaagttggagacagagtaatacaagacttggtggtcagcggagcgctatccttagagaattctatcgacctctctaatatcaagcacaccacatggaaggattgggaaagaatcaacaagaaggaattgcttcggggcaaaaaggaacacaaaactcggtcaaagtttttaacttttgaagagttgtggaacggtgtagaaggcatataaaatagatcgttaatatatttctaacatcttcttgtaa

SEQ ID NO: 775 - DNA, 787 bp, Saccharomyces cerevisiae
aaagacattgttgaaattgttccagaaactttcatttaaagtctttcgtgaaaggagtggacgtcaaaaagaaataatgatttttaaacgtgcagtatctacattgattcctccaaaagttgtgtcttccaagaatataggttcggcaccaaatgccaagcgcattgctaatgttgttcacttttataagtctttgcctcaaggaccagcaccagccatcaaggctaacactagattggccagatacaaagccaagtactttgatggggataatgctagtggtaaaccattgtggcattttgctctaggtataattgcctttggctattccatggaatattattttcatttgagacatcataaaggtgcggaagagcattgaacgtggagttttacttttgtagaaaattctttattttaagcctttttaaaccaaacatgcaaagagaagaaaaactttttggtaaatccaaataatttttgagcgaaattgaaaggagtacataagtgatagaacaaaatttcgttgttttcatatgtctataaggaaactccgtcactttctggctctattcattttttctttagtaaagcataaaaataatgagacggagagtaaactttacaatatatattcataaaaattcattaaaataaaactgttcgatcctattcgatatacacacacacatatatatatatatgtatatagatatgggtgtgtttgtgtgtatccgtgctaaactcgcaaatgcaactttatgtcaaaccaacttgctcattccta

SEQ ID NO: 776 - DNA, 2177 bp, Saccharomyces cerevisiae
cattttttttctgcgtttattaatactacataaaatctgatataaaacatatttaactgatcaaccctctcaacttgatactcaaaacaagttgacgcgacttctgtaaagtttatttacaagataacaaagaaactcccttaagcatggcacctgttacaattgaaaagttcgtaaatcaagaagaacgacaccttgtttccaaccgatcagcaacaattccgtttggtgaatacatatttaaaagattgttgtccatcgatacgaaatcagttttcggtgttcctggtgacttcaacttatctctattagaatatctctattcacctagtgttgaatcagctggcctaagatgggtcggcacgtgtaatgaactgaacgccgcttatgcggccgacggatattcccgttactctaataagattggctgtttaataaccacgtatggcgttggtgaattaagcgccttgaacggtatagccggttcgttcgctgaaaatgtcaaagttttgcacattgttggtgtggccaagtccatagattcgcgttcaagtaactttagtgatcggaacctacatcatttggtcccacagctacatgattcaaattttaaagggccaaatcataaagtatatcatgatatggtaaaagatagagtcgcttgctcggtagcctacttggaggatattgaaactgcatgtgaccaagtcgataatgttatccgcgatatttacaagtattctaaacctggttatatttttgttcctgcagattttgcggatatgtctgttacatgtgataatttggttaatgttccacgtatatctcaacaagattgtatagtatacccttctgaaaaccaattgtctgacataatcaacaagattactagttggatatattccagtaaaacacctgcgatccttggagacgtactgactgataggtatggtgtgagtaactttttgaacaagcttatctgcaaaactgggatttggaatttttccactgttatgggaaaatctgtaattgatgagtcaaacccaacttatatgggtcaatataatggtaaagaaggtttaaaacaagtctatgaacattttgaactgtgcgacttggtcttgcattttggagtcgacatcaatgaaattaataatgggcattatacttttacttataaaccaaatgctaaaatcattcaatttcatccgaattatattcgccttgtggacactaggcagggcaatgagcaaatgttcaaaggaatcaattttgcccctattttaaaagaactatacaagcgcattgacgtttctaaactttctttgcaatatgattcaaatgtaactcaatatacgaacgaaacaatgcggttagaagatcctaccaatggacaatcaagcattattacacaagttcacttacaaaagacgatgcctaaatttttgaaccctggtgatgttgtcgtttgtgaaacaggctcttttcaattctctgttcgtgatttcgcgtttccttcgcaattaaaatatatatcgcaaggatttttcctttccattggcatggcccttcctgccgccctaggtgttggaattgccatgcaagaccactcaaacgctcacatcaatggtggcaacgtaaaagaggactataagccaagattaattttgtttgaaggtgacggtgcagcacagatgacaatccaagaactgagcaccattctgaagtgcaatattccactagaagttatcatttggaacaataacggctacactattgaaagagccatcatgggccctaccaggtcgtataacgacgttatgtcttggaaatggaccaaactatttgaagcattcggagacttcgacggaaagtatactaatagcactctcattcaatgtccctctaaattagcactgaaattggaggagcttaagaattcaaacaaaagaagcgggatagaacttttagaagtcaaattaggcgaattggatttccccgaacagctaaagtgcatggttgaagcagcggcacttaaaagaaataaaaaatagaaacttgtgggcgcaattataaaacactgctaccaattgttcgttttctgttcattaacacataaaaaacccttatgtaactatatttacaaagtaaatacgtatattaaagctattttacca

SEQ ID NO: 777 - DNA, 958 bp, Saccharomyces cerevisiae
cgaagacaaatagataaaaaaatctccctcgttctatttgaaactttaagaaatccatattaagaaaatacctacatctgctaaatgtctgctaacttagataaatccttagacgaaatcattggctctaacaaagcaggaagtaatagagcccgtgtcggtggtactcgtggtaacggtccaagaagagttggtaagcaagttggtagccaacgtaggagccttccaaacagaagaggccctatcagaaaaaatactagggcacctccaaacgcagtcgctagagttgccaagctcttggacaccactagagaggtcaaggtcaacgtcgaaggtttgccaagggacattaagcaggatgctgtaagagaattttttgcatctcaagtaggtggtgttcaaagagttttgttgagttataacgaaaggggccaatctactggtatggctaacatcacattcaaaaacggtgaattggccagaagggctgttgaaagatttaacggctctccaatcgatggaggcagatcaagattgagacttaacctaatcgttgatccaaaccaacgcccagtcaaaagtttagccgacaggatcaaggctatgccacaaaaaggcggaaacgctccaagaccagtaaagaggggtccaaatagaaaagctgctatggcaaaatcccaaaacaaaccaaagagagaaaagcctgctaagaaaagtcttgaagatctggacaaggaaatggcggactatttcgaaaagaaataattaattgtcaattttttgtttgatttaatttggttttattaaatttaatttttccgagtttcattatgtattagtttccagaaaatttaaaggattaaaaaatgtattaataaaactttgatatgtttatgtaataatatttaccaccgccactaggtgacgctaacctactcatcggtgacggcttttctca

SEQ ID NO: 778 - DNA, 2710 bp, Saccharomyces cerevisiae
caaacacaaactataacataattgcaagatggttgctttcactgttgaccaaatgcgttctttaatggacaaagttaccaatgtgcgtaacatgtccgttattgctcacgtcgatcatggtaagtccactttgaccgattccttggtccaaagagccggtattatttccgctgctaaggctggtgaagctcgtttcaccgataccagaaaggatgaacaagaaagaggtatcactatcaagtctaccgctatttctctatactctgaaatgtctgacgaagatgtcaaggaaatcaagcaaaagaccgacggtaactccttcttgatcaacttgatcgactctccaggtcacgttgacttctcctctgaagttactgccgctttacgtgtcactgacggtgctttggttgtcgtcgacaccattgaaggtgtctgtgtccaaaccgaaactgttttgagacaagctttgggtgagagaatcaagcctgttgttgttatcaacaaggtcgacagagctttgttggaattgcaagtttctaaggaagatttataccaaacctttgccagaactgttgaatccgttaacgtcatcgtttccacctacgccgatgaagttttgggtgatgtccaagtttacccagccagaggtaccgttgccttcggttccggtttgcacggttgggctttcactatccgtcaattcgccaccagatatgctaagaaattcggtgtcgacaaggccaagatgatggacagattatggggtgactctttcttcaacccaaagaccaagaagtggaccaacaaggacactgatgctgaaggtaagccattggaaagagctttcaacatgttcatcttggacccaatcttcagattattcactgctatcatgaacttcaagaaagatgaaattccagttttgctagaaaagttggaaattgtcttgaagggtgacgaaaaggacttggaaggtaaggccttgttgaaggttgttatgagaaagttcttgccagctgccgatgccttattggaaatgattgtcttgcacttgccatctccagtcactgctcaagcctacagagctgaacaattatacgaaggtccagctgacgatgccaactgtattgctatcaagaactgtgatccaaaggctgatttgatgttgtacgtctccaagatggtgccaacctctgataagggtagattctacgccttcggtagagtttttgccggtactgttaagtccggtcaaaaggtcagaatccaaggtccaaactacgttccaggtaagaaggacgatttgttcatcaaggccattcaaagagttgttttgatgatgggtagatttgtcgaaccaatcgatgactgtccagccggtaacattatcggtttagtcggtatcgatcaattcttgttgaagactggtactttgaccaccagtgaaactgctcacaacatgaaggtcatgaaattctctgtctctccagttgtgcaagtcgctgtcgaagtcaagaacgctaacgacttaccaaaattggtcgaaggtttgaagagattgtccaagtctgatccatgtgtcttgacctatatgtctgaatccggtgaacatatcgttgctggtaccggtgaattgcatttggaaatttgtttgcaagatttggaacacgaccacgctggtgttccattgaagatctccccaccagttgtcgcttacagagaaactgttgaaagtgaatcttctcaaactgctttgtccaagtctccaaacaagcataacagaatctacttgaaggctgaaccaattgacgaagaagtctctttggctattgaaaacggtatcatcaacccaagagatgatttcaaggccagagctagaatcatggctgacgactacggttgggatgtcaccgatgccagaaagatctggtgtttcggtccagacggtaacggtccaaacttggttattgaccaaactaaggctgtccaatacttgcacgaaatcaaggattccgttgttgctgctttccaatgggctaccaaggaaggtccaattttcggtgaagaaatgagatctgtcagagttaacattttggatgttactttacatgccgatgctatccacagaggtggtggtcaaatcatcccaaccatgagaagagctacttacgctggtttcttgttggctgatccaaagatccaagaaccagttttcttggtcgaaattcaatgtccagaacaagccgtcggtggtatctactccgtcttaaacaagaagagaggtcaagtcgtttctgaagaacaaagaccaggtactccattgtttaccgtcaaggcctacttgccagttaacgaatctttcggtttcactggtgaattgagacaagctactggtggtcaagctttcccacaaatggttttcgaccattggtccactttaggttctgacccattggacccaacctctaaggctggtgaaattgttcttgctgctcgtaagagacacggtatgaaggaagaagttccaggctggcaagaatattacgacaaattgtaagaatggttaaacaatttttaattatttaactttttcagtttttgtcgtaatgtattgggcaccttttatgtccttttgacttttttgtagtttattctcacgtatacttaccatctatagtgttatttcatatttaatcatatttccatatta

SEQ ID NO: 779 - DNA, 1615 bp, Saccharomyces cerevisiae
cctggtcatttaacaccaagaatcaaggagccaataagtgcacatgagttttaaagggtttaccaaggctgttagtagggctcctcagtccttccgtcaaaagttcaagatgggtgagcagacagaggatcctgtttacgaggatgcagaacgtcgttttcaagaattggagcaggagacaaaaaaattaagtgaggaatcgaagagatactcgactgcggtgaatggaatgctgacacaccaaattggatttgccaaatccatggaggaaattttcaaacctatcagtggtaaaatgagtgaccctaacgctaccataccagaggacaacccacaaggtattgaagcaagtgaacagtatagggcaattgtcgcagaattacaggaaacattgaaaccggatctggctttggtggaagaaaaaattgttacgccatgccaggaactgttgaagattattacttatattcgtaaaatggccaccaagagaaatcacaaaaaattagatttagatagacatctaaacacttataacaagcatgaaaagaagaaggaaccaaccgccaaagacgaagaaagattgtataaagcacaagctcaagtggaagtggctcaacaagaatatgattactataacgacttgctaaagactcaattaccaatactgttcagtttggaagctgaatttgtgaaaccattatttgtctcattttatttcatgcaattgaacattttttacactttgtataatagacttcaagacatgaagattccatattttgatttgaacagtgacattgtagagtcgtacattgccaagaaaggcaatgtggaagaacaaacggacgccttgactattacacactttaaactcggttactctaaggcaaaattggagatgaccagaaggaagtatggtgtagcaaccgccgaaggctcacccgtcagtggcgcatcaagcggtgtcggatatggtgctgggtatgatccagcaactgccacttctccaacccctacaggatacggttatggtgccgcagcaccaagttacgccgctcaacctgctgcccagtatggtactgctgccgccgttggtactgctgctgctgttggtactgctgctggtgctgctgctggcgctgttccgggtacttatccacagtatgctgctgcgcaatctccaccgctcactgggctaggcttccaacaatcaccacagcagcaacagggaccaccaccggcctactctaatcctctaacatcacctgttgcgggcacaccagccgcggccgtagcggcagctcctggcgttgaaactgttaccgcattgtatgactaccaagctcaagctgctggtgatttgtctttccctgccggcgcagttatagaaattgtccagcgtactccggacgtgaacgaatggtggacaggaagatacaatggccagcaaggtgtgtttcctgggaactacgtgcaactcaacaagaactagaggaggcccctgcatccctctgtattcattaccttctattgtgagatgttaccattacctttttcttttattgtaatgtttcttaatttaaatactatatagggtaattcatccttccaccaa

SEQ ID NO: 780 - DNA, 1467 bp, Saccharomyces cerevisiae
aaccaattctgcctatttcctttcactcataagttatacaagaggcaatcggataaaattcaagtatttataaagtaaaaaccacaacaagaatggaggaactaggtattgtgacacctgtcgaaaaggcagtcgaagaaaaaccagccgtcaaatcatacgcatcattgttggctcaactcaatggtacagtcaacaataacagtgccctgtctaatgtgaattctgatatatatttcaaattgaagaaattagaaaaagagtatgaactgctgactttgcaagaagactatattaaggacgaacaacgccatttgaaacgtgaattgaagagagctcaagaagaagtaaagagaatccagtcggttccattagttatcgggcaattcttagaacctattgatcagaacacaggtattgtttctagtaccacaggtatgagttatgtcgttagaatattatcaaccctagaccgtgaactattaaagccatctatgtctgtagctttacatcgtcattcaaatgctttagttgacatcctaccacctgattccgactctagcatatccgtaatgggcgaaaacgaaaaacctgacgtcacttatgcagatgttggtgggttagatatgcaaaagcaagaaatcagggaagccgtagagctgccattagttcaggctgatctatacgagcaaatcggtattgaccctcctaggggtgttctattatatggtccaccaggtaccggtaagacgatgcttgttaaagccgtcgccaatagtacaaaagctgcattcataagagttaatggctccgaatttgttcacaaatatcttggtgaaggtccaagaatggttcgtgacgtctttagactcgccagggaaaatgctccatccattatattcatagatgaggtagattccattgccacaaagcgttttgatgctcaaacgggttccgatcgtgaagtacagcgtatcctgattgagttgttgacacaaatggatggtttcgatcaatccaccaacgttaaagtcatcatggctacaaacagggcagacacattggacccagctttgctgagaccaggcagattagatagaaagattgagtttccctcacttcgtgataggcgtgaacgtcgtttgattttcggtaccattgccagtaagatgtcccttgccccagaagcggacttagactcgcttattattcgtaacgactctctatcaggtgctgttattgcagcgatcatgcaggaagctggtttaagagcagtgaggaaaaacagatatgtcatcttacaaagcgatctggaagaagcttacgccactcaagtcaagacagataataccgtcgataaattcgacttctacaaatgattaccatatatgcttcaacgtaggtctacataaagtattacgtacatttctatctagacaacactaaatgaaataaatacagacgcca

SEQ ID NO: 781 - DNA, 3034 bp, Saccharomyces cerevisiae
gtacgcagtctctgcttcatcccagtgtagatttgctattcgatttgtgtcataaacatttaacattgcgcccgtctacaacaaaggagataaatcaaaaaaggaaatggtacaagaacaggcaattttgagctgcattgagcagactatggttgctgatgcaaaaattatcaaagaggcagaacagcagttatttgagttccagaagcaacctgggtttacttcttttctgcttaatatagtgtctgatgataattttgcgctaaatgttcgtctttcttctgctatttatttgaagaataagattcacagatcatgggatactaagagagaagatggtataaaagctgacgaaaagctttcgatcaaggaaaggttaatcgagactttagttaaaaactgtgaaaataaccacattaggcctatcctgactgaaaccataaatgggatacttgttggtcaggaagattgggatttagcacctattatcaagaatttattatcgagcggtgacgcatcgtacatttatcccgggttactactactgttccaactttgtaaagctcataggtgggacatggttgggtcgagagattatattgattctgttatcgaagaacttttccctattgtggaagggatagcttctaatatcggtagtcaaacggattacagatctaatgaaatattgtacctcattttgaagtcattcaagtatgcatgtttgaacaacttgcctcaatacttcagccaacctgaaagaattatgtcatgggtgcaactacatttgtatttatgttccaaaccattaccagtcgaagtaatggaactggatcccgcagataggtccctagacaaaagggttaaagtgaacaaatgggggttcggtaacttaaacagattcctgcaaagatacaacaaaattacaaaggccatcaccaaggaatttatcgactatatcttcaatactattgttcctataattcttcgagaattttttaaggatattgaagcttggggtaataattcactatggttatccgattcctctttgtatttcttaatttcattcctagagaaatgtgttacaatagatcaactttatcctttaattgagccacatttacaaattatttttgagaacgtcatcttcccatgtttgtgtgctaatgaacaatccatcgaattattagaagatgaccaagaggaatataccaggcgttattttgacattaacagagaaggctctacgccagatgctgcttcagcagatttcatattcttgattgggtccaaacgtcctgagaaactgaacaatattttaccgttcattaatgatatttttactagattcgatgccaattccagtgatattaacatggcatttaaagaagagggtgctttgagaacattgtctaacttgttttcgtttatagatgagccatccgttctggagaatatttttggacacttcatcgtgccattgttatcgcaggataagtacatgtttttggttgcaagaagtttggaaacgatagcgctgtattcggaagaatttaaagatatgaacatattgtcacaattatttgagttaacatataccaacttcttaaacagtaacgttttaccagtccaaattgaggccgcagatgccattaaatgtttaattgtatccaatcctcaaatccacccagcggtctctgctcatgttccaggtatgatggaaaagctattgaaattgtctaaaatctttgaaatcgatatcttatctgaagtcatggaagcattggtggagagattttcagatgaactatccccatttgctaaagatttagcttcaaacctagtcgaacaatttttacgtattgctcaagcattggtagaaaatccatcggaaacctacagcgcaagtgaccaagagcaggaaatccaggccagtggattgttacaaacaatgactactatggtcatgtcaatgaataaagttccattaatcgagtccttagctcccgtggtcaagtttgttgtacttcatgcacaaatttcttttattacggaagctgtcgacttactggatgctttaactatttcttcgcatctgctttataaccaaattgcaccaccaatatgggagttgttacatgatatattggattctttccaaacttatgccatggactattttgaggcctacagtattttttttgaaaccatcgtgatgaccggcttcccacaagatcaaacttatgttcaacctctgctagaaattctctctgctaaactggaaagtgaagttgactacgacatcgagcatgttatgcaaattctaatgtacttcgcactgtccatgagagacattccattattcagcaaagccatcaaagtatccactaatgatgagctaggattggactctaaatgcatcgttaaactgggactggccaatttgtttgctaaaccaatcgaaactttacaaataatggaaaatgaaggttttactataaatttctttaccaattggtttaatgaaaagttctacagtgtcttcgccatcaaattacaagtcctggtcattttaacccttttgaagatgcctgaagttcctaatagtgtcagcccactactaaataacctgaccaataaactggtggaattgacattatcattgccaaaggcaattagaaaccgtgatgctgttaccgagggcaaatccttagaaggagacctgaccccagaagaagaagaagaatactttatcgaatgtgatgatgatatgaaggagacagtgttagaccaaattaatgttttccaggaagtacatacctttttcaagaatttgcaaaacgaagatgccggtaagtacgaaaaaatcataaattatctggatgaatctaagagagattccttgcaggtaattctggaatttgtttctcaacactgaggagaacacaaaaaaaatagtggaatgtgatagtttgaaataaggatattagtttatactctaatatacaaatataaaagttgtttctttttc

SEQ ID NO: 782 - DNA, 2186 bp, Saccharomyces cerevisiae
atttctttttctaatctttcgcagctgaagcgatgaggtgaaaaaattaacaagtattggataggatatatgtatgtaaagatagatgcagagcatatatagtttaaacttggcttagcaagagggtaaaagacacatttgccttataattgttcattaccgatggattctcctgttctacagtccgcttatgacccatcaggtcagtatttgtgttatgtcactgtagctttggacaagcaacgcgttggtgtacagcccactcaaagggccacttcctccggagttgatacagtgtggaatgagaattttctgtatttagaggactcgaaattgaaggtgacgtgcttaaaatgggtaaacctggcttcttccgacacagtggctattatattgggtatgaataacggtgaaatttggctatattccgtattggccaacgaagtcacctataaattcactacggggaattcttacgaaatcaaagacatagacttgatgggtaatcaactgtggtgtatcgactccagcgacgcattctatcagttcgatctgttacaattcaaactgttacaacattttagaataaacaactgcgttcaattgaataaactaaccattgttccagcaggcgattctgttgcacaacttttggttgcatcccattccatttctttaatagacatcgaagagaaaaaagtcgtaatgacatttcccggtcatgtatctccagtgtccacattgcaagttataactaatgaatttttcatatcaggcgcagagggtgatagattcttgaacgtatatgatattcattccggtatgaccaaatgcgtccttgtggctgaatcagatatcaaggagttatctcattcaggccaagccgattctatcgcagtcactaccgaggatggtagcttggaaatttttgttgatccattggtatcgagttcaacaaagaaaagaggcaacaagtccaaaaaatccagcaaaaagattcaaatcgtcagtaaagacggcaggaaagttccaatttataacgcatttattaataaagaccttttgaacgtatcgtggttacaaaatgctactatgccttacttcaagaacttgcagtggagagaaatccctaatgaatataccgtcgaaatttccctaaattggaataataaaaataagtccgccgatcgcgatctacacggtaaagatcttgcctcagccaccaactacgtggaaggtaatgcaagagtcacctctggagataacttcaagcatgttgatgacgctataaagagctgggaaagagaattgacttctttggaacaagaacaggccaagcccccacaggccaatgaactattaacagaaacatttggtgataagctagaatcaagcaccgtcgcaaggattagtgggaaaaaaacaaatttaaaaggttccaatctcaagactgctacgacaaccgggacggtaacagtaattctgtcgcaagcactacaatcaaatgatcattcactgttggaaacagtgctcaataatcgtgacgagagggtcattagggatactatcttccgtctgaaaccagcactggctgtcattctcttagaaaggttggcagagaggattgcaagacaaacccaccgtcaaggcccattgaatgtttgggtaaaatggtgtttaatcatacacggtggctatttggtttctattccaaatttgatgtctactctatcgtcgttacattccaccttgaaaaggcgttccgacttattaccaaggctactagcactggatgcaaggttagactgtactataaataaattcaaaactttgaactatgaagcaggcgacatccactcatccgaaccagttgtcgaagaggacgaagacgacgttgaatataacgaagaactcgatgatgccggccttatagaggacggtgaagaatcttatggcagtgaagaagaagaagaaggtgatagtgacaacgaagaggaacagaagcatacctcatctaagcaagatggccgtttagaaacggagcagagcgacggcgaggaggaagccggatatagtgacgttgagatggaatagaggatatcatgcataaaatgctttcacgcatcagaatacaaaaataatctctaggcacataaatacttatatagagttcaccacataatgta

SEQ ID NO: 783 - DNA, 836 bp, Saccharomyces cerevisiae
atctttcttatttttatattaccgttcgtgttcattatatccattacgttcccataatgtcggcaaacgataagcaatacatctcgtacaacaacgtacatcaactatgtcaagtatccgctgagagaattaagaatttcaagccggacttaatcattgccattggtggtggtggtttcattcctgctaggatcctacgtacgttcctaaaggagcccggcgtgccaaccatcagaatttttgctattattttgtctttgtacgaagatttgaacagtgtaggctcagaagttgaggaagttggtgttaaggttagcagaacacaatggattgattacgagcaatgtaaattagatctagtcggcaagaacgttcttatcgttgacgaagtcgatgacacccgtaccacacttcattacgctttgagtgaattggaaaaggatgcagctgaacaggcaaaggctaaaggtatcgatactgaaaagtctccagagatgaaaacaaacttcgggatttttgttctacacgataagcaaaaaccaaagaaagcagatttgcctgccgaaatgttgaatgacaagaaccgttattttgcagctaaaactgttccagacaagtggtatgcatatccatgggaatctactgacattgttttccatactagaatggctattgaacagggcaatgacatctttattcctgagcaggaacacaagcaatgatagacatatcatatccttcagtaacttgaatcatacagcagaatttgtacaatagacaacgcatataactgcgaccatatgtatacgtataactaattattatctcaaagttta

SEQ ID NO: 784 - DNA, 1380 bp, Saccharomyces cerevisiae
cctcaccggtaacctgtgaggcgcgattacgttttccctctgttcaccaccacgtaacgcgatatttgacacatacgtgacaactacttttgatggaatctgctgatttttttacctcacgaaacttattaaaacagataatttccctcatctgcaaggttggggaagggttggacagcaataaccagcgactgtttgaagaaaagatgactgttagtaaaatacccatatggctagattgtgatcctggtcatgatgatgccatagccattttattaggctgtttccatccagctttcaatcttctaggaatcagcacgtgttttggtaacgcaccgccagagaatactgactacaacgcccgttctcttttgactgcgatgggcaaagcacaagcgattccagtttataaaggcgcacagagaccttggaaaagggaacctcattatgctcctgacattcatggtatatcaggtttagacggcacttctttgctacctaagccaacatttgaggcaagaactgataaaacgtatattgaggccattgaagaggcgattctagctaacaatggagagatatcctttgtgtctactggtgcacttaccacattagcaacagtttttaggtgtaaaccatacctaaaaaaatctgtcaaatatattagcattatggggggtggactccatggtctaggaaactgtaacccaaatctttctgctgaattcaacgtttggattgatcctgacgcagcgaattacatattccgtgatcccgatgtaaaggacaaatgtatagtagttcctctaaatttaactcacaaggccatagctacttacaaggttaacgaaatgatatacaacgaaaagaataacagcaagttacgagaattgtttttggagctttttcaattttttgctcatacctacaaggatatgcaaggatttgaatcgggcccacctatacatgatccggtagctttgatgccgcttttggaattttatgggtgggatccatcgtctgcggttggatttcgctacaagagaatggacatatcctgcattgatgatgttttcaacgaaaactcagggaaaattatcattgaaaaagaatatccaaatgacagtgatgttggtacaataattggtctcgatttgaatatccagtacttttgggatcagatttttgaagcattaaatagagcagacaaaatgtcaacgattggataagaacttctataaaaggctttttttttttctactgacctttggtcaggttctgttcctttcattttcactggatacaaagaagtttcactaaaagttgtcgcgattgtatacatatatgcgtatatatacaattctacatgttttatattta

SEQ ID NO: 785 - DNA, 600 bp, Saccharomyces cerevisiae
atgcctccaaagtttgatccaaatgaagttaagtacttgtacttgagagctgtcggtggtgaagtcggtgcttccgccgccttggctccaaagatcggtccattgggtttatccccaaagaaggttggtgaagatatcgccaaggccaccaaggaattcaaaggtatcaaagttactgtccaattgaaaatccaaaacagacaagctgctgcttctgttgttccatctgcttcctctttggtcattactgctttgaaggaaccaccaagagacagaaagaaggataagaacgtcaagcatagcggtaacatccaattggatgaaattattgaaattgccagacaaatgagagacaaatccttcggtagaactttggcttccgttactaaggaaattttgggtactgctcaatctgtcggttgtcgtgttgatttcaagaaccctcatgacatcattgaaggtattaacgctggtgaaattgaaattccagaaaactaaggttgtttataacatcaaaaatccattccatatattattctgtacttttaatttaaaaggctttaatctaacatataaaccaaaatattttacttcacgtta

SEQ ID NO: 786 - DNA, 1313 bp, Saccharomyces cerevisiae
acacgcgaggaaaccacattatatttcgcaagatgtttaataatcatgaaattgacaccatattaagcactctccgcatggaggcagatccctctttgcatcctttattcgaacaatttgagaaattttatgaagagaaattgtggttccaattgtccgaatccttgactaaattttttgatgatgctaaatctacaccattgaggctcagattatatgataacttcgtttctaaattttatgataaaatcaaccaattgtcagtagtaaagtatctacttgcctctttgaaggattctaaggatttcgatgagtctttaaaatatttggatgatttgaaggctcaatttcaagaattggactctaaaaaacaaagaaataatggatcaaaagaccatggtgatggtattttgttgatagatagcgaaattgctagaacttacctgttaaagaacgacctcgttaaggcaagagatttattagatgatttggaaaagacattggataaaaaggattccattccattaaggataacaaacagcttctattctacaaattcccagtattttaaatttaaaaatgatttcaattctttctactacacaagtctattatacctttctaccttagaaccatctacaagcattactttagccgaacgtcaacaattggcctatgatttgagtatctcagcattgttaggtgacaaaatctataattttggcgaactattacaccatccaataatggaaactatagtcaacgattccaattacgattggcttttccaattattaaatgctctaaccgttggtgattttgataaattcgactcattgataaaagttcaaatatcaaagattcctatattggctcaacatgaatcatttttacgacaaaaaatttgcctaatgacattaattgaaacagtttttgtcaaaaatattaggatgctttcatttgaagatatttcaaaggctacacacctaccaaaggataatgtcgaacacctggtcatgagagccataagtttgggtctattaaagggttctattgaccaagtaaatgaactcgttaccatctcctgggtccaaccaagaatcataagtggtgaccaaattacaaagatgaaggacagactggttgaatggaacgatcaagtagaaaaactgggcaaaaaaatggaagctcgtggccaatccatctgggtttaggccattggcagttatatataaaacacacacgcacacatatatataaatgcagaaataaaatcaactatcaacaaatattgtcaaaaatatacttcgcaa

SEQ ID NO: 787 - DNA, 1245 bp, Saccharomyces cerevisiae
atgtctgaagctcaagaaactcacgtagagcaactaccagaatctgttgtcgatgccccagtcgaagaacagcaccaagaaccaccacaggctccagatgctccacaagaaccacaagttccacaggaatctgctccacaggaatctgctccacaagaaccaccagctccacaagaacaaaatgacgttcctccaccatctaatgctccaatttatgaaggcgaagaatcccacagtgtccaagactaccaagaggcccaccagcaccaccaaccacctgaaccccaaccatattatcctcctcctcctccaggtgaacacatgcacggtcgcccaccaatgcaccaccgtcaagaaggagaactctcgaacaccagattgtttgttagacctttcccattggacgttcaagaatccgagttgaatgaaatctttggtccatttggaccaatgaaggaagtcaagatcttgaacggcttcgcgtttgttgaatttgaagaagcagaatccgctgccaaagccattgaagaagttcacggtaagagttttgctaaccaacctttggaagttgtttactctaaattgcctgccaagagataccgtatcaccatgaaaaacttaccagaaggttgttcatggcaagatcttaaagatttagccagggaaaatagtttagaaactactttttctagcgtcaataccagagattttgatggtaccggtgctctagaattccctagtgaagaaatcttggtcgaagctttggagagattaaacaatattgaattcagaggttctgtcattactgttgaaagagatgacaatcctccaccaatcagaagatcaaatagaggtggcttcagaggtcgcggcggcttcagaggcggcttcagaggtggcttcagaggcggtttctccagaggcggcttcggtggccccagaggtggatttggtggtccaagaggtggttacggtggctattccagaggtggctacggtggctactccagaggcggatatggtggctccagaggtggttacgatagtcctagaggtggttacgatagtccaagaggtggttattccagaggtggctatggtggtccaagaaatgattacggtcctccaagaggtagctacggtggttcaagaggtggttatgatggtccaagaggcgattatggtcctccaagagatgcatacagaaccagagatgctccacgtgaaagatcaccaaccaggtaa

SEQ ID NO: 788 - DNA, 1819 bp, Saccharomyces cerevisiae
cgtgtactaattgaagtgtgtacgtgtgcattaatattaataagggataaataacgataaaagagccgctctttgataaggattacacgccagaataatgtccaatgcaaatctaagaaaatgggttggtttttgctttgttgccatttatctctttttaggtgttccactgtggtacaagctaactacagtttatagagcatcactaccaataaattacattgagtcacttcaaaataacaaattccaagatattcatctcgtaataccggtgtatgttaagtcagatacttacagatttcctgacgttcatgacgctatccaagtacaagttaaccatttattgaattctcaggagcaacgggtcccttggtctttacaagttcttccatataatgagactattgagcagatggaaagtgaaggcaaccagtttcatgtcgttactttgaagttagacgaatttattggttactcatcagcttacgacaccaaagaaacactagtatattacgacgatgctgccgttttaagtaatgatctaccgttttttgttgctcaaacattggtagagcacactttccaattggaatggacgcatttgaataaaacgtgtgaaggcgtttctacaaacaacgatgtcgcaatatcttatgatccaaacattcatttaagtgtaactttattgtcaggtgatgggaatcctgttgcatgggaaattgagcctacattaactgactacttttcaccttttaggaagttcttatcaccactggtaaattttacagtagattcatccattgtttatcataatgatttgaatttgcattcattaaatggatcatgtacaagcgttacgtggtttgatctctctcatactattgatctttctgaactttcttcaatggcctattacccagaagattctgcactgaatttagccatagtctttcctagtgcttcttcaagtcccgatggtctggcgttcattaatggcactcggatttcagacgaaataaccacattagattggaatagttatctagttcctcaatggggggttataataataaataaaatgccgttgaagccaaattcagtcattagcgaagattatttagaacctatgatgtaccgttttgcgacagatatttttcaactattgggattaacggagggctcgcaagatttgttatcaccttatattaccatagattcattcaaaaggttgacaattttacagaatctagataaagctacggaaacattatggtcgttagtgaaattaactcaacaatttcagggcatgtctatcccacgcgaagtatcggataatgttatcgaagctttagacttaaggctacagattattgatttattaaatgatcctggaaagggtggagatatcgtctggaacaatgccctgcatctaagtaatgaattggttaaactatgcgaaaaggcatttttcaatggagaaatggttcaacaaaatttcttcccacaagagcacatgatagctgtgtatttacctttattaggcccaatatcggcagtcatgttctttggtttctacaacgtgatgaaggaaaagaatcaaaagagtaaaaagaatggaaccgagagagaagttgctaaagaaaaattagagttgaaagaggctcaaaaattacatgctattgatggtgaagatgaattatgagttgataactaaactacaattaccaatattttgaatgcatgtagtgtaagtacaggtatatctatatattatgtatatgtaagagtaccatataaacggtaagcatattaagatcaa

SEQ ID NO: 789 - DNA, 583 bp, Saccharomyces cerevisiae
gtatacacaagagcggataaaagatgtctttagttgtccaagaacaaggttccttccaacacattttacgtttgttgaacactaacgttgacggtaacattaagatcgtttacgctttgaccactatcaagggtgttggtcgtcgttactccaacttggtctgtaagaaggctgatgttgatttacacaagagagctggtgaattgacccaagaagaattggaaagaattgttcaaattatgcaaaacccaactcactacaaaatcccagcttggttcttgaaccgtcaaaatgacatcactgatggtaaggactaccacactttggctaacaacgtcgaatccaaattgagagatgacttggaaagattaaagaaaatcagagctcatcgtggtatcagacacttctggggtttgcgtgttagaggtcaacacaccaagaccactggtagaagaagagcttaaactgataagattattcaagcttaatcttttttgtacgagtacatatatttccatagcacttcctaattgacttttttttaaaataaataaagaaaagaaaattaattttgtgaccataa

SEQ ID NO: 790 - DNA, 2215 bp, Saccharomyces cerevisiae
tatggtagaatacaagtcagaagaaggctaaaatcaacagatcaatattttttttggttgttgggttggagaattataaagtttttttgatctccttgtctccagctattgttttcattgagtaggggtagagctagttagctgcttttcgatggttgtagtgggtaagagtgaagtgcgcaatgtaagcatgagtaggccgaagaagaaatcattgattgccatcctgtcgacctgtgttttgtttttcctcgtgtttataattggtgctaaatttcaatatgtttccgttttctccaaattcttagatgacaggggggacaacgagtcacttcaattgctcaatgacatagaatttacaaggctaggactgacacctagggagccagtaattatcaaagacgtaaagacagggaaggagagaaaattacatggacggttccttcatattaccgatattcatcctgacccttattatgtggaaggaagctctattgatgcagtttgtcacacaggaaaaccaagcaaaaaaaaggatgtggcacccaagtttgggaaggcaatgtctggatgtgattctcccgttattttaatggaagaaactctgagatggattaaagaaaatcttagagataagattgattttgtcatttggacgggtgataatatcagacatgacaatgaccggaaacatccaagaacagaagcacaaatttttgatatgaacaatatcgttgctgataaaatgacagaattatttagtgctggcaatgaagaagatccaagagattttgatgtgtctgtcattccaagtcttggaaacaatgatgtctttccacataacatgtttgcactaggaccaactctacaaactagagaatattataggatttggaaaaattttgttccgcagcagcagcaaagaacttttgataggagtgcttcatttttgactgaagttattccagggaagcttgctgtcctgtcaattaacacgctgtacttattcaaggccaatccgttagttgacaattgtaattcaaaaaaagaaccaggttaccaacttttactttggttcggttatgtattagaagaactaaggagtaggggaatgaaagtatggttaagtggacatgtacctccaatcgcaaaaaatttcgatcagtcgtgctacgataagttcacgctatggactcacgaatacagggatataatcattggaggattatacggtcacatgaatattgaccacttcatcccaacggatggtaaaaaagctagaaaatcgttattgaaagccatggagcaatccactcgtgttcaacaaggagaagacagtaatgaagaggacgaagaaactgaattgaatagaattctggatcacgctatggcggcaaaagaagtttttttaatgggagcgaaaccatctaacaaagaagcatatatgaacaccgtccgcgacacatactatcggaaagtgtggaataagctggaaagagtggatgaaaaaaatgttgaaaatgagaagaaaaagaaagaaaagaaggacaaaaaaaagaaaaagccaatcactagaaaagagctcattgaacgctattccattgtgaacataggtggttcagtcattccaactttcaatccttcctttaggatctgggaatataacatcaccgacatagtgaatgactccaattttgcagtttcggagtataagccctgggatgaatttttcgagtcactaaataagattatggaagactctttgctagaagatgaaatggacagcagtaatatcgaggttgggatcaaccgcgagaagatgggcgaaaagaaaaacaagaagaaaaagaaaaatgacaagactatgccaattgagatgccagacaaatacgaactcggccctgcatatgtaccgcagttattcactccgacgcgtttcgtccaattctacgccgacttggaaaaaatcaatcaagaattacataattcatttgttgaatctaaggatattttcaggtatgagatagaatatacctcagacgagaaaccatactcaatggattcgttaacagtaggaagttatttggatcttgcaggcagattatacgaaaacaaacctgcatgggaaaaatacgtcgaatggtcatttgcgtcttctggatataaagatgattaagttaatatacacatagaaatgcatatcattcttcaatta

SEQ ID NO: 791 - DNA, 1975 bp, Saccharomyces cerevisiae
atgctatccaaggtattgctgaatatagctttcaaggtgctgttaaccaccgccaagagagcagttgatcctgacgatgatgatgaacttctaccttccccggatctcccgggtagcgatgaccctattgcaggtgatcctgatgtagacttaaaccctgttacagaagaaatgttctcttcatgggcattgttcattatgttgctcctattgatctctgcattgtggtctagttactatttaactcagaaacgaattagggcagtgcatgaaactgtgctttctattttttatggtatggttattggcttgataataaggatgtcccccgggcattatattcaagatacggttacttttaattcatcctacttttttaatgttctattgccgccaattattttaaatagtgggtacgagttgaatcaagtgaactttttcaataatatgttatctatcttaattttcgccataccgggcaccttcatatctgctgtggttattggaatcatattgtatatctggacctttttaggactagagagtattgacatttcattcgcagatgcaatgtctgttggtgctacattatctgctaccgaccctgttacaattctttcaattttcaatgcgtataaagtggatcctaagctatataccatcatttttggagaatcactgttaaatgatgccatctctattgttatgtttgaaacctgtcaaaaatttcatggtcaacctgcaacattttcgtcggtttttgaaggggcaggcctctttttgatgactttctccgtttcgttgttgataggcgttcttataggaattcttgttgctcttctgttgaaacacactcacataaggcgctatcctcaaattgagagttgtttgatcttgttgattgcttatgaatcctattttttctccaacggttgccatatgtccggtatcgtctccttgttattttgcggaattactttaaaacattacgcctattataacatgtcaagaagatcacagatcaccattaagtatattttccaactattggcaagattatcagagaatttcatctttatctatctaggtttagaactttttactgaagtagaactagtctataagccactgctaattattgtggcagctatttctatatgtgttgctcgttggtgtgctgtgttcccattgtcgcaatttgttaactggatatatagagtaaagacaatcagatctatgagcggcataaccggagaaaatatttctgttcccgatgaaataccctacaattaccaaatgatgacattttgggcaggtttacgtggtgctgttggtgtcgccttggcgttgggaattcaaggtgagtataagttcactttattggcaacggtccttgttgttgttgttttaacagttatcatttttgggggcactactgcaggaatgttagaagttttaaatattaagactggttgcataagtgaagaagatacatctgatgacgagtttgatatagaggctccaagggcgataaatttattgaacggtagttctattcagacagatttgggcccatattctgacaacaattctccagatatttcaattgaccaattcgcggtcagcagtaacaagaatctccccaataacatatccacaactggtggtaatacttttggaggccttaatgaaactgagaatactagccctaacccggcaaggtcttctatggataagcgtaatttgagagataaactgggaacaatctttaattccgactcacaatggtttcaaaattttgatgaacaggtattgaagccagtattcttggacaacgtttctccatccttacaagattcggctacgcaatcacctgcagatttctcttcccaaaaccactagactttaaagtgtatggtttccttgtttctaatataaatatattaattaagtctttatacattctctcttactc

SEQ ID NO: 792 - DNA, 606 bp, Saccharomyces cerevisiae
aactgacgaagacctacgctacacaacgaagataacacatgctggcacaaacattcaaaaaaccacacagagccgttctagaacaggtatctgggaccacggtcttcatcagaaataagagaacaaagagcaagagctcactgtcacctttggcacaaagggtcgtcacgcagttgagtgtgatgtctgcaagcagaaagcagcccaagttgctgaagctggcgcgtgaagacctgattaaacatcagaccattgagaagtgttggtcaatttatcagcagcaacaacgggagcgcagaaatttacagttggaattacaatataagagcattgagagatctatgaaccttctacaagaactcagccctcgtctgtttgaggctgccaatgcttccgagaagggcaagcgattcccgatggaaatgaaggtgcccactgacttccccccaaatacgttatggcattataacttccgaaaatgatagcgtgagcgaacgcttgactgtctcctgctgtaaataactgatgatcaatagaatgccacgtatatatggacttatataattatatgtacatagacatataaagggcatgtggtaattatga

SEQ ID NO: 793 - DNA, 1765 bp, Saccharomyces cerevisiae
ccacattcgttcaaaaatgccctctaccacgctactgtttccgcagaaacatattagggccattccaggcaagatatacgcgttcttcagagagctcgtcagcggagttattatatccaagccagatctaagtcatcattattcttgtgaaaatgcgacaaaggaggaaggcaaagatgcagcagatgaagaaaagactaccacaagtttgtttcccgaatcaaataatatagaccgttctttaaatggtggctgctctgtgatcccttgctccatggatgtcagcgatttgaacacgccaatatcgatcacactatctcctgagaatcgtatcaaatcagaagtaaatgccaagtcactgctcggatcaaggccagaacaagatacaggcgcccctatcaaaatgtctactggtgtcacaagctctccattaagtccatcaggctccaccccagaacattccaccaaggtcttgaacaacggcgaagaggagttcatttgtcactactgtgacgctactttcaggattagaggatatctaacgagacatattaagaagcacgccatcgaaaaggcgtatcactgtccattttttaacagtgccactcctcctgatcttagatgccacaattcgggtggttttagcagacgcgatacttataaaactcatttgaaggcaaggcacgtgctgtaccccaaaggtgttaaaccacaagaccgtaacaagtcgtccggccattgcgctcaatgtggtgaatacttttccaccattgaaaatttcgttgagaatcacattgagtctggggactgtaaagctttaccgcaggggtataccaagaaaaatgaaaaaagatctggaaaattaaggaagatcaagacatctaatggtcattctagattcatatccacttcgcaaagtgttgtagaacctaaagtacttttcaacaaggatgccgtagaggctatgaccatagtggctaataacagttcgggcaatgatattatatccaagtacggaaacaacaaattaatgttaaactcggaaaactttaaagtcgacatacccaagagaaagagaaaatatatcaagaaaaagcagcaacaggtatctggatcgacggtaaccacaccagaggtagctacacaaaacaatcaagaagtggcacctgatgaaatctcatccgccacaattttttcaccttttgatactcatctactcgagcccgtcccttctagttcatcggaatcttccgctgaagttatgttccatggcaagcaaatgaagaattttttgattgacataaacagcttcacaaatcaacagcagcaggcacaagataatccttcgttcctgccactcgatattgaacaatcttcatatgatttgagcgaagacgcaatgtcatatcccatcatatccacacaaagcaaccgtgattgcacgcagtatgataacacaaaaatctcacaaatcttacaatcacaactaaatccagaatatctcagcgaaaatcacatgagagagacacaacaatatttgaatttttacaatgacaactttgggtcacaattttgattaaatataacacgggataaaaataagggtatcatattggaaagccgatgggtaaaaattattgagttaataaatggagacaatattaaaaatcaggtaacaacaaataaaaggttataaatgtactgctgtatactatataaaaacttttagcatgactaattaattttcatactactatgttaaata

SEQ ID NO: 794 - DNA, 620 bp, Saccharomyces cerevisiae
agagaattagggaaacctatacaatgaatgaaagtgagaatagtccccaacataatgaagttacggttcctatggtagaggatacttcaagtaatgctgatattccaatggagcaaattcaacgcgaagacaataagaactacgataaacatgacaatgaatgcttcgatatgaatggcaatcacaataataactctgataacttacaatttgacagtgtaccatcttctgcaacgaaagatttgaaaaacatcaaaagtgtcaccaaccaaaatgtaaaaatagaagaatcgagtagcacaaattcagtcattgaagagtcatctgaacctaaaatatcaaaattagaaaatgtgaaccttgccgcgacggtaggtggttcacaaactagaaaatacctgaatacaaatgtgacaccgcatttattagcgggcatgaggctcatagccgtacaacaaccagaagatccgttacgtgttttaggtgaatatctaatcgagcagagcaatatactgaagagtggagaaaaagagagtaatgctagtaaatgataaccataattatataaatatacatgtgtatttatttttccttactattaaacctttggatatagacaa

SEQ ID NO: 795 - DNA, 550 bp, Saccharomyces cerevisiae
tcaaagaaatcaatataaccatggctaaatttttgaaagcaggtaaagttgctgtcgttgttcgtggtcgttacgctggtaagaaggttgtgatcgttaagccacacgatgagggttctaaatctcatccattcggtcacgctttggttgccggtattgaaaggtacccatcaaaggtcaccaagaagcacggtgccaagaaggtcgctaagagaactaaaatcaagccattcatcaaagtcgtcaactacaaccacttattgccaaccagatacaccttggatgttgaagctttcaagagcgttgtatctacagagacttttgaacaaccatcccaacgtgaagaagccaagaaggttgtaaagaaggcatttgaagaaagacatcaagctggtaaaaaccaatggttcttctccaagttgagattctaagaagcttttttccgaaacctaacttttttctgtgtactattattattttcataatgcagtttatccttcacataattaaaaattcatattgtataaactaaaacaaacactaccactaa

SEQ ID NO: 796 - DNA, 1360 bp, Saccharomyces cerevisiae
tatgatgaatatgagtgcatttggctcgagttgctgtttggcttttgccaaatcagtaacggtgtggaaaaactcaagctacctttttttacttttatctgaccttttaacttccccgtagaaaatcttagtaatccttcttacattgtatcgtagcgctgcatatataatgcgtaaaattttctctttttaaaagatgttagtacgttgggtttggcttgttcatttttattatcctttatttacttgtaaaaaaacgaaagtgacgaagttcatgctaagattgaagaaaattatttatcgtatactttgcaggacaagagacacggaagcgacagaaagacagggagtactatcaccatccataatactggagtaacattatgtctcaaagaataattcaaccaagcgcatctgaccaacaattcccaggtaaatctgatggatatgaatatactgttgggcctaagcaagcgataacaagcgaagcttcaacaacatacattccctctagaatatactcagagtctctacttttcaaaaggcaagaagcgtctttatcagcaatggctttcttgttccaggaaatgatttcacagttgcatagaacatgtaaaactgcaggcgattttgaaactaaattaagtgactatggccacaatattggaattcgtctattagaactgctgaattttagggcttctgtatctcctagttctcttcccagagcatctgctttcctttcacaaaatgaatcttcttcaaagttatcaaatgcgtcaaattccccgggcatgttggctaactccagcacagcgacttctgcatctgccaatgaacgactccaagaaaagcaaacagaatcattgtctaactacattacaaagatgaggcgccgtgatctgaaaattctcgatatactgcagtttatccacggtaccctatggtcatatctttttaatcacgtaagtgatgatttggttaaatcttcagaacgtgacaatgaatatatgatagtagataacttccccactttaacccaatttatcccaggtgagaacgtttcttgtgagtacttcgtttgcggcattatcaaaggattccttttcaatgctggatttccatgtggcgtgacagcacatcgaatgccccaaggcggacatagtcaacgaaccgtttatttgatccaatttgacaggcaagtgcttgacagggaaggtttgagatttggctgatatcatctcaaaacatcggtaaatacctaaaaccaagaaaaggataaagagtttgtatatttactgttgatttatagacatatgctcatatattcattacgaagaatgattcttttaattgtcga

SEQ ID NO: 797 - DNA, 2285 bp, Saccharomyces cerevisiae
ctttcatttatcgaaatattcttttttcacatttcctcttactgcgcattcgtgtccaaacagtcattcaggaagtataacgataaacaatagattgaagcctgaaaaaaaaaaaaaaagcacgacaatagaaattgtttcagtgtcattggcttttgataatatatagaggctgtttcaataatcatagcgaaagaaatagaagtttttttttgtaacaagttttgctacactcccttaataaagtcaacatgagcagtaacaacaacacaaacacagcacctgccaatgcaaattctagccaccaccaccaccatcaccaccatcaccaccaccatcacggtcatggcggaagcaactcgacgctaaacaatcccaagtcgtccttagcggatggtgcacatatcgggaactaccaaatcgtcaaaacgctgggagaggggtcctttggtaaagttaaattggcatatcataccactacgggccaaaaagttgctctaaaaatcattaataagaaggttttggcaaagagtgatatgcagggcagaattgaaagagaaatatcttatctgagactcttaagacacccccacatcatcaaactgtatgatgttatcaaatccaaagatgaaatcattatggttatagagtacgccgggaacgaattgtttgactatattgttcagagagacaaaatgagcgagcaagaggcaagaagatttttccagcagatcatcagtgccgtcgagtactgccataggcacaaaattgtccatagagatctgaagcctgaaaacttactactagatgagcatctgaatgtaaagattgccgattttggtttgtcaaacatcatgactgatggtaatttcttaaagacttcttgtggttctcccaattatgcggctcctgaagttatcagcggtaagctgtacgcaggcccagaagtggacgtgtggtcatgtggggttatcctttatgttatgctttgtcgtcgtctaccgtttgacgatgaaagcatcccagtgcttttcaagaatatcagcaacggtgtttacaccttgcctaaatttttatctcctggagctgctgggctaatcaaaagaatgttaatcgttaatccattgaacagaataagcattcatgaaattatgcaagacgattggttcaaagttgacctgccagaatatctacttccaccagatttgaaaccacacccagaagaagagaatgaaaataatgactcaaaaaaggatggcagcagcccagataacgatgaaattgatgacaaccttgtcaatattttatcatcgaccatgggttacgaaaaagacgagatttatgagtccttagaatcatcagaagacactcctgcattcaacgaaattagggacgcgtacatgttgattaaggagaataaatctttgatcaaggatatgaaggcaaacaaaagcgtcagtgatgaactggatacctttctgtcccagtcacctccaacttttcaacaacaaagcaaatcccatcaaaagagtcaagtagatcatgaaactgccaagcaacacgcaagaaggatggcaagtgctatcactcaacaaaggacatatcaccaatcacccttcatggatcagtataaagaagaagactctacagtttccattttgcctacatctttacctcagatccacagagctaatatgttagcacaaggttcgccagctgcctctaaaatatctcctcttgtaacgaaaaaatctaaaacgagatggcattttggtatacgatctcgctcatatccattagacgttatgggtgaaatttatattgccttgaagaatttgggtgccgaatgggccaagccatctgaagaggatttatggactatcaaattaaggtggaaatatgatattggaaacaagacaaacactaatgaaaaaatacctgatttaatgaaaatggtaattcaattatttcaaattgaaaccaataattatttggtggatttcaaatttgacggctgggaaagtagttatggagatgatactactgtttctaatatttctgaagatgaaatgagtactttttcagcctacccatttttacatttaacaacaaaactaattatggaattagccgttaacagtcaaagcaattgatggtggaacgtaaaagaatgatatggaagttcccttttttttatgtatcgtaacgtatttgcaacatctttataatatccctttgtataaagtaaacaatcttgattaaataaacctgaacataatttattg

SEQ ID NO: 798 - DNA, 1510 bp, Saccharomyces cerevisiae
tatacattttatgaatctataatactggaagtgatatccatattcgcaagcagttccactcgaaagcatggccctctttctcagtaagagactgttgagatttaccgtcattgcaggtgcggttattgttctcctcctaacattgaattccaacagtagaactcagcaatatattccgagttccatctccgctgcatttgattttacctcaggatctatatcccctgaacaacaagtcatctctgaggaaaatgatgctaaaaaattagagcaaagtgctctgaattcagaggcaagcgaagactccgaagccatggatgaagaatccaaggctctgaaagctgccgctgaaaaggcagatgccccgatcgacactaaaacaaccatggattatatcactccatcttttgctaacaaagctggtaagccaaaagcttgttacgtcactttggtgagaaacaaggagttgaaaggtttgctaagctccattaaatatgtggaaaacaaaattaacaagaaattcccatatccttgggttttcctaaacgatgaaccttttactgaagaattcaaggaagcagtcaccaaagctgtttcttccgaagttaagtttggtattttgcccaaggaacattggtcatatcctgaatggattaatcaaaccaaggctgctgaaattcgtgcagatgctgccaccaaatacatatacggtggctccgaatcttatagacacatgtgtcgttaccaatctgggtttttctggagacatgaattattagaagagtacgattggtactggcgtgtggaaccagacatcaagttatactgtgatattaattacgacgtttttaagtggatgcaagaaaacgaaaaagtttacggctttaccgtttctattcatgaatatgaagtgacgatcccaacactatggcaaacgtccatggatttcatcaaaaagaaccccgaatacttagatgaaaacaacctgatgagttttctttcgaacgataatggtaaaacatacaatctgtgccatttctggtcaaactttgaaattgcaaacttgaatttgtggaggtcaccagcctacagagagtattttgacactttggatcatcaaggtggatttttctacgaaagatggggcgatgctcccgttcattctattgctgctgctttgtttttgccaaaggataaaatccattatttttcagacattggttaccatcatccaccttatgataactgcccattggacaaggaggtctataacagtaacaactgtgaatgtgaccaaggtaatgatttcactttccaaggttactcttgtggtaaggaatattatgatgctcaagggttggtaaagccaaaaaactggaaaaaattccgtgagtagaaatcttggaacatactgtttctttgttttgactttatactttctatttatattttatttttataactggttaagtacacataggactgcgtatcaaacatataagtgaggcaa

SEQ ID NO: 799 - DNA, 885 bp, Saccharomyces cerevisiae
atggacattaacatagacgatattcttgcagaactggataaggaaactactgctgtcgactctaccaagatcacgcaaggttcttcttccactacccacagagatgcaaatacaatagtgggttcgtccttagacttgaatgacaagactcagatatatgtctctccccagcaggatttttctgacttgatgaagtcttggaaaaatgaacggtgttcgccagaactcttaccatatcctcatcagttgatgaaaagattattgaatcgaatatccatgcaatctcaattaattgaaaacatttcaatgggattcctcgatatgcaaaatgcttctaatgcgaacccgcctatgcctaacgaatctaaattgcctttactctgcatggaaactgagttagaaagattgaaatttgttattagaagctacatacgatgtaggctaagcaaaattgacaaattctcactttatttgcgccaattaaatgaagatgaaaattcgctgatctctcttacagatttactatccaaagatgaaatcaaataccatgacacgcattccctgatctggttgaaactagtcaatgattctatcctgaaatacatgcccgaagaacttcaggctattaatgatacagaaggtagcgtaaacatgatagatgagcccgactggaacaaatttgtctttatacacgttaacggcccaccagatggtaaatggaacgaagatccgctattgcaggaaaacgagttcggtaaaccttgctacacggtcacaatacccgatttaaaggaagaggttgaactcactattggaagtatttacgttatgagatatgaagtcattagggatctgctgagagacgacaaagttgctcttatttga

SEQ ID NO: 800 - DNA, 1185 bp, Saccharomyces cerevisiae
gtatcatcagttgaaacagtaaggagctccgcaagcgcaatattaactttacaaaagtgattctggttcctaacttttctattgttttccattttcgtcattcgttttgttattagtcgccttaattgagtcaagcaagataaaagaagaaaaaaaatgagtatcaccactactagaagaagaaaccaagatagtgtctgctgcaaggcaacgagagcctccattaaggtggaagctgtctcaggccagacagtttttgaaaagcaaaaactgctacacaatttcgatgagttgccagaatggcaaaaagataatgacaaaattctcaccgggtacgttcgtgaaacactgtcatggaaaaagtgcttatattctttattttattggaacaacgagactgtgaacatttatacacatttggtaccggctatcgtatacttcgtgtttgccattacgttgaccaactactttctaattcccgttttcccctccacttcctggtccgattacaccgttataaacattttcttgatgggcgctttctcatgtctcatgtgcagtagctgtttccactgcatgaagcaacactctgaaaagcaaagcaatttctggagcaagctcgactacttggggattatcagtttgatttcctgttctatgatccctataatatactttggttacttcgaccacatatcctacttcagtcttttcacgattgttactttagtcctggcaacattttgtacagtctgtgtcctccacgacaagtttaacacttccacatttcgtccatttagggccatgtttttcatattgtttggatttagtggcttactcccattgaccacagggtttttcaagttcggtatccaaggggttcttaacagaataaaagtcagctttgtgttttgggaagctctcttttacatttcaggggctgtaatctacgggtttaggattcctgaaactttggctccagggaagttcgatttcttcggtagctctcatcaaatatttcatattatggtggttcttggttctgtatgccacttgaaagccattatcgattcttacaaattaatgcattctcatatccacccttgatgggcctacaactactacaaaatcaaataaataacattatatatctaaggttagaaaataattaaatgcaaaaaaagt

SEQ ID NO: 801 - DNA, 560 bp, Saccharomyces cerevisiae
actaaaagacttccttatatttttcggtacgcttgcgtttcactgaagagaataaaaagaacaaattatataaatttaacacactatgagcacgagaacaaaggccctgaatgcatacaggcatggcttaagagcaacccgaatagctttccggaatgatgctgaagtattactagccgcgagagctaaaatgcgttcaggaatgttatgtcccccagatcctaaactcaccacagaggatcagattcaacatttagaggatgtggctgtttttttgagacgaaacctggttcagggcaaaaaggttgatggctcaagtactaaggagcctaggtaccatttgaacattcacaaagacaccgaattgggtgacaatgagacgattgcagaccctacggcaagagtgaaaacaaacttaaaggcaagaccatttaaatgctctgataaaaagcaatgataatgccttgattttgttttatcttcgaagctatatacatgtaaatacttttttagtacctagcaactttgctaggtggcatataaactgatttagcacgata

SEQ ID NO: 802 - DNA, 508 bp, Saccharomyces cerevisiae
ttaccacctgtagcatataggacagaaggacccagttcagttctagttttacaaataaatacacgagcgatgtcggactcagaagtcaatcaagaagctaagccagaggtcaagccagaagtcaagcctgagactcacatcaatttaaaggtgtccgatggatcttcagagatcttcttcaagatcaaaaagaccactcctttaagaaggctgatggaagcgttcgctaaaagacagggtaaggaaatggactccttaagattcttgtacgacggtattagaattcaagctgatcagacccctgaagatttggacatggaggataacgatattattgaggctcacagagaacagattggtggtgctacgtattaggactcttaacaatgcctaaaaaacgccaacaaacctctcccttccccccacccaccaaaaaataccatagtaatgaaaaaactaaataattcatattatataacatagtattaatatatgttcgacaagaata

SEQ ID NO: 803 - DNA, 491 bp, Saccharomyces cerevisiae
tcaccatgaacaacaagctcatatatcgttcggttagatttgcaacccataacagccagcttttacttccacctttggttctctacagaaggatactaaggcagcataagctgctacctggtccccaaagggagatgggtgaccaatacgtgcgaaacgagttcaagttgcacaaagatatcgataacccgttgcatatagtcggctttttagcttcctggcaagattatctccacatgatttccaacggtaaatggaaagatgccactttatcttcggaaaccctggagaaactatcccctgagcaaacagttcaactgtatgaattgatgaaggaaacacagaaacttcaccaagacaatgaaatagaatcaagtaaggacgtgaagcggaacaacaaggattagtgttcgtctttttattgcgcttgtaaataagaaatccatatactatatagtacacatgctaaaaaaaaaaagctaaaaatctca

SEQ ID NO: 804 - DNA, 534 bp, Saccharomyces cerevisiae
atggagaccaatttttccttcgactcgaatttaattgttattatcattatcacgttgtttgccacaagaattattgctaaaagatttttatctactccaaaaatggtatcccaggaaacagttgctcacgtaaaggatctgattggccaaaaggaagtgtttgttgcagcaaagacatactgcccttactgtaaagctactttgtctaccctcttccaagaattgaacgttcccaaatccaaggcccttgtgttggaattagatgaaatgagcaatggctcagagattcaagacgctttagaagaaatctcgggccaaaaaactgtacctaacgtatacatcaatggcaagcacattggtggtaacagcgatttggaaactttgaagaaaaatggcaagttagctgaaatattgaagccggtatttcaatagtttaaattacgctaatatccccttcataatatttacatatatatatcttttattatctatatcttaaatcacatatacctacaaaacttctagctagattca

SEQ ID NO: 805 - DNA, 1371 bp, Saccharomyces cerevisiae
ttagttgcattttggctatcataaaagaaatgggcttgtcgcaacgggatcaggaccaagaacaggggtgctgagactactactgtaactgcgaccgacacagcgtgcgaaactagggaagtaaaaaggtataggaagaagaactatgtttagaatagctaaaaacctcgtacggacttttgagcagagcgtgcaagataccctggcactctcgcaggactcgagcaatctggacgctttctttcagtctataccaccaaatttgttgtctgctcagttggaatcacccgtagatgcggtttctgaaggtgttaagcacaccaacgtcaatgaaacgctttccggtctccgcattgtttgggtggacgagatgcagttccaactgcagtcctttttcgactatatagtaggtttcaatgatgatccggtgccggtggtcagtaatcaacacggattttcgtacccagattaccgtcgtatcacatccatcttcaatgaacactgtggccgaactttgaaggtcaacatatggtcagctaaaggaggcacgttcagagacgagtatatcagcattatatcgaaggagagcgacgatttggacgatgtttctctaaaccatgacgagaggaggccatctagtggggaagcgcaccagttccaagcactcgggttcaaagtccaatggacgcctttgatagcttccactttcacataccatatcctgaacgtgaacatcccagatggacccgcccaatcggcagggctcatcccagatgaagactacattatcggctgccaagatggcctgttggccacgggaggggagacgcttttacaagatattgttagatcaagagcaaactacgatctggtcctttatgtctacaacaaagtttctgactgtgtgagaccaatcacagttcatataggtcccgacggcaggttgggttgcaacgttggatacgggtttcttcacaggattccaacagtaaagcactgtccacaacaagcacagcagcaggggcaagatgacaaccctgttcctgttcctgttccagtagaatctgagacggcttttgtgccatcagcattcacagcaccaccggtgccaacaaagaagaaatcaaaaaataaaaagggtacccagccattggcaatggatgactattttaatgaaggcagagataagtcatctaccgctgcgaagtcagcagaatctgacatcctcgccccaccaccacaaaaacagtcatcctctgattaactttcctggttagtcttttggttttgtttcatagcaaaattaaatatatatatataagcttgctttcccttcaaaacacgtaaacgatagttggcaatgtacgaaaa

SEQ ID NO: 806 - DNA, 1624 bp, Saccharomyces cerevisiae
cacccgctcatataataccatgcaagtgaccacaagatttatatctgcgatagtctcgttttgcctgtttgcttctttcacgttggctgaaaacagcgcaagagctacgccgggatcagatttactcgttctaacagagaagaaatttaaatcattcatcgaatctcatccgttagtcctcgtcgagttttttgctccatggtgtttgcattctcagatcttacgccctcacttagaagaggccgcctctattttaaaggagcataacgtcccagttgttcaaattgattgtgaggctaacagtatggtttgcctgcaacaaactataaatacctacccaaccttgaaaatctttaaaaatggtcgtatttttgatggtcaagtctatcgcggtgtcaagatcaccgatgaaatcactcagtacatgattcagctatacgaggcttctgtcatttatttaaattccgaagatgaaatccaaccatacttggaaaatgcaactttaccagtagtaataaacagaggcttgacaggcttgaatgaaacgtatcaagaagtcgcactggaccttgctgaggattacgtctttttatcccttctagattcagaagataagtcattatcaatccacttgccaaacactacagaaccaattctgtttgatggaaatgtagactctttggtcggaaattccgttgctctaactcagtggttaaaagtggtaattttaccttactttaccgacatcgaacctgatctcttccccaagtacatttctagcaatttgccgttggcttacttcttttatacttctgaggaagaattggaagattacactgatcttttcacgcagttaggtaaggaaaatcgtggccaaataaatttcattgcattaaactctacaatgttcccacaccacgttagattcctaaatatgagagaacagttcccattatttgctatccataatatgatcaataatctgaaatatggtttaccacaactaccagaagaagagtacgcgaaattagaaaaaccacaaccactagacagagatatgatcgttcagttggtaaaagattaccgtgaaggtactgccaagccaattgttaagtcagaagagattccaaaagaacaaaagtccaatgtttataaaatagttgggaagacacatgacgacattgttcatgatgatgacaaggatgtccttgtcaaatattacgcgacatggtgtattcatagtaaaaggtttgcgcctatttacgaagaaattgcaaatgtcttagcatctgatgaatctgttcgcgataaaatcttgatcgccgaagtagattcaggggcaaatgatatcttaagttttcctgtgacaggatatccaaccattgctttgtatcctgccggaaataactctaagcctattatcttcaataaaattagaaatttggaagatgttttcgaatttatcaaggaatcaggtacacatcacattgacggccaggcaatttatgataaattgcaccaggccaaggattctgaagtgtctactgaagataccgtacatgatgaattataatcaataaataaagcatatataatgcacatttttaacatctgattactcgca

SEQ ID NO: 807 - DNA, 682 bp, Saccharomyces cerevisiae
gtgctttcgttttcaatcacattctagtttacagtaattgagtctcgatgatgtttaatatttaccttttcgtcacttttttttccaccattcttgcaggttccctgtcagatttggaaatcggtattatcaagagaataccggtagaagattgcttaattaaggcaatgccaggtgataaagttaaggttcattatacaggatctttattagaatcgggaactgtatttgactcaagttattcaagaggctctcctatcgcttttgaacttggcgttggcagagtaattaaaggttgggatcaaggtgttgccggcatgtgcgttggcgaaaaaagaaagctgcaaattccaagttctttggcctacggagaaagaggtgtcccaggcgtcattcctccaagtgctgatttggtgtttgatgtcgaattggtagacgtgaaatcagccgcctaggtaaattggcactcaggcacatatctgcaacaagatgcatggagtacgtatgtggcaaacttttttttatagttgaaaatatatccatatgaggatgccagccatcatgtcaagtttcaatgtaattatggttgtgtatattatgtttgcagcaaaataaaataaaagggctctaactacaatatattaatataaagaaatgttattcaatctagtttgggtatgaa

SEQ ID NO: 808 - DNA, 545 bp, Saccharomyces cerevisiae
cttagttagtcctcgaataagcattttgcaagtaccagtcatcgtattagagaacatacaactttagaattacactatgcacgcccgcgactggtttttagtttttattgcaattttcattcctcccttagcagtctggctaaaaagaggtttttttaccaaggatctgctcattaactttctgttatttttactagggtttttccctggtctgatccatgctttgtacgtgatcagctgtcatccatatgaggagaacgaggcccggtactcacacctctcctcctcggatgataactatggtagtttagcatgagtgactctttctacgttatcctcctccgcagaatttcgtaataagtgatgtgtggctcttttgctaccctttttttttcatttctttcttttttttctattttattttttctttttcatttttcggtacttctatgtacctgaaatgaataataatgtaatggcaagccatctcatcgctgtcggctaagtaaatctatagtttaatatattcattttccctcattcaa

SEQ ID NO: 809 - DNA, 1230 bp, Saccharomyces cerevisiae
agaaatttatagttccaattgagtgcatgcgaaaagaatcgcaatgccgcgaattactcaagagatatcttacaattgcgattatggcgacaatactttcaaccttgctattgatataggaggcactctggctaaagtagtcttctcgcctatacacagtaacaggctgatgttctacaccattgaaacagagaaaattgacaagttcatggaacttctgcattctattatcaaagaacataacaatggatgctatagaatgactcatataattgccactggtggtggcgccttcaagttttatgatttgttgtatgaaaattttcctcaaataaaaggtatatcgaggttcgaagaaatggaaggcttaattcacggtttagactttttcattcatgagattcccgatgaagttttcacttacaacgatcaagatggcgaaaggataatacccaccagttccggcaccatggactcaaaggctatctacccataccttctagtcaatatagggtcgggtgtctcaatattaaaagtcaccgaaccaaacaattttagtagagtaggcggttcttcactgggaggaggaactctttggggcctattatcactaattactggcgctcaaacttatgatcagatgctcgattgggcacaagagggtgacaattctagcgttgatatgctagttggagatatttatggaacagactataataaaattggtctaaagtcgtcagctattgcaagttcatttggtaaagttttccaaaatagaatgacatctaacaaatctttggaaaacaacgaaaataaattatattcctcacatgagtctattgagaaaaacaatggacaaatgtttaagaatcctgatatttgtaaaagtcttctattcgccatctccaacaatattgggcaaatagcttatttgcaagctaaaatcaataatatacagaatatatactttggcggatcttataccagaggacatttgactaccatgaacactttgagctacgctattaatttttggtcacaaggatcaaagcaagcgttttttctcaaacatgaaggctatttgggtgcaatgggtgctttcctaagcgcgtctcgtcattcatctactaagaaaacaagtacgtagatagatttcactttttttttggctagtaatattacatacatctttatctagataattaatttattcgtttgttagctcgctta

SEQ ID NO: 810 - DNA, 940 bp, Saccharomyces cerevisiae
atgctcctatttccaagaagaactaatatagcctttttcaaaacaacaggcatttttgctaattttcctttgctaggtagaaccattacaacttcaccatctttccttacacataaactgtcaaaggaagtaaccagggcatcaacttcgcctccaagaccaaagagaattgttgtcgcaattactggtgcgactggtgttgcactgggaatcagacttctacaagtgctaaaagagttgagcgtagaaacccatttggtgatttcaaaatggggtgcagcaacaatgaaatatgaaacagattgggaaccgcatgacgtggcggccttggcaaccaagacatactctgttcgtgatgtttctgcatgcatttcgtccggatctttccagcatgatggtatgattgttgtgccctgttccatgaaatcactagctgctattagaatcggttttacagaggatttaattacaagagctgccgatgtttcgattaaagagaatcgtaagttactactggttactcgggaaacccctttatcttccatccatcttgaaaacatgttgtctttatgcagggcaggtgttataatttttcctccggtacctgcgttttatacaagacccaagagccttcatgacctattagaacaaagtgttggcaggatcctagactgctttggcatccacgctgacacttttcctcgttgggaaggaataaaaagcaagtaacactttttctgagcattttattacgttactcaactactaatagagttgatttgttacttgctaaaatctttttatatttcttttagccccgacagaacttgttgcaaatgaatacaaaccgtgaacttcccgatatcattctaattgaacccagatatttacacatgtacttcttactcattttcaatgtcagcttaaatatcgtctaaaa

SEQ ID NO: 811 - DNA, 1675 bp, Saccharomyces cerevisiae
accgcatatctttttgatttttttcctctgagttattctattcttgacattattacatcaccaattcaaaagaattgtcaatttatatatttaaatgaggaagctaaatccagctttagaatttagagactttatccaggtcttaaaagatgaagatgacttaatcgaaattaccgaagagattgatccaaatctcgaagtaggtgcaattatgaggaaggcctatgaatcccacttaccagccccgttatttaaaaatctcaaaggtgcttcgaaggatcttttcagcattttaggttgcccagccggtttgagaagtaaggagaaaggagatcatggtagaattgcccatcatctggggctcgacccaaaaacaactatcaaggaaatcatagattatttgctggagtgtaaggagaaggaacctctccccccaatcactgttcctgtgtcatctgcaccttgtaaaacacatatactttctgaagaaaaaatacatctacaaagcctgccaacaccatatctacatgtttcagacggtggcaagtacttacaaacgtacggaatgtggattcttcaaactccagataaaaaatggactaattggtcaattgctagaggtatggttgtagatgacaagcatatcactggtctggtaattaaaccacaacatattagacaaattgctgactcttgggcagcaattggaaaagcaaatgaaattcctttcgcgttatgttttggcgttcccccagcagctattttagttagttccatgccaattcctgaaggtgtttctgaatcggattatgttggcgcaatcttgggtgagtcggttccagtagtaaaatgtgagaccaacgatttaatggttcctgcaacgagtgagatggtatttgagggtactttgtccttaacagatacacatctggaaggcccatttggtgagatgcatggatatgttttcaaaagccaaggtcatccttgtccattgtacactgtcaaggctatgagttacagagacaatgctattctacctgtttcgaaccccggtctttgtacggatgagacacataccttgattggttcactagtggctactgaggccaaggagctggctattgaatctggcttgccaattctggatgcctttatgccttatgaggctcaggctctttggcttatcttaaaggtggatttgaaagggctgcaagcattgaagacaacgcctgaagaattttgtaagaaggtaggtgatatttactttaggacaaaagttggttttatagtccatgaaataattttggtggcagatgatatcgacatatttaacttcaaagaagtcatctgggcctacgttacaagacatacacctgttgcagatcagatggcttttgatgatgtcacttcttttcctttggctccctttgtttcgcagtcatccagaagtaagactatgaaaggtggaaagtgcgttactaattgcatatttagacagcaatatgagcgcagttttgactacataacttgtaattttgaaaagggatatccaaaaggattagttgacaaagtaaatgaaaattggaaaaggtacggatataaataattgccatagactttctacggaagaaaaaccatataatcagattttaaataaaattttccgaacttttat

SEQ ID NO: 812 - DNA, 1101 bp, Saccharomyces cerevisiae
ggctgattaccgaagtcaaaggttctagtatatgatcgagttctgtaaacagtatcatgctgtggcatcctgatggttacgagcctcgagtaaaggctatagaagaagaaatctacgctaacgaagacaggaaggatgttccggataagtttaaatttgatactgtaacgaaaactggaatggtcaagcttcgtgttttcaaagacgatctaatattcaaatcacaacgatctataaatctgtttgcaagtaggaagcatcccttcaagtcatttacggcggatggagagggcttgccgttatttgccttccgcactaagaagcctttttttgttaggcgagattatgtgggttttcttttttatcaatacgagatattgaaaaatggggacttccctgaagagtcggattatgaggtaaaaggagagtgcgacggtttcactctgtttaaagttcttttttgcactgttaaggtgaagaaaacaagctattatcgcaataaggagagaatatcccacatactagagctcaacttcggaaaaaaggaagattttaggatattgacactggttagatgctctgaaattagatcagtatatgttgtagaggataaaaaggttattatgaaatgggttttcacctcagagagtaaatttaatttgaattcctcactgttcatcataaaggccgcaattggctgtttaccagaggtgggtgatagcatagaggacatacctaaatttgattgggactcctgccctactattggatgtatgtgcagaactaaggaggctctttttcaacctgagtctcgaaaagatatgcatatatgccctcaattatttttaggggaaaccggaccgccacattataatgagagttcagttccgtggctaacaaaaatgaatatatgcatttcagtgctaataaatttccttgaatataccgatttcatgtcttggatgcaggataattagaaatttctatttaacactgcagaaaactgtgttcatttaaagaaattcttgcgggttaatgctattatgatattttctgttgatttggtgataaattatattatatgctatatactaattcctt

SEQ ID NO: 813 - DNA, 708 bp, Saccharomyces cerevisiae
atagctacaaaaaattaatggccactaagcaattactgagacgtcaaatcaaaagggtaataaatgctcttgactacgatattatcgctgcagagtcgcatactatttctcaagcagtacgctcattgatcgcttccgccaattctaggcgtgtagcgtgttatatgagcatggataaaggagaagtaacgactggagaaatcattaagaatttatttcaagatggccaggaggtctttctgccaagatgtactcatacttctgaatcgaaacacttcaaattacgggaagatcatcatccacatttaatattccatcgaatgagtagtttgaaaatggttcgtgatttgaagcctcaaggtccatatcaactaaaagagcctgaaccgcatattgaggaatcagatattctagatgtcgtattggtgcctggagtggcgtttgatattaaaactggtgcaaggatgggtcacggtgctgggtattatgacgattttttccaacggtataagatactgcatgaaggccaaaagcccctcctagttggactatgtcttatggaacaggtggcctctccaattcctttagaaaaacatgattattccatggattgtatagtatgcggagatggatccatacattggtttcaataatttcatatatgtattatttacatggtacagctattgtataaataaataaataaat

SEQ ID NO: 814 - DNA, 820 bp, Saccharomyces cerevisiae
atgactgtggttgaaataaaaagccaggaccaatttacgcaactaaccactacaaacgctgctaataaactcattgtcttatattttaaagctcaatgggctgatccttgcaaaactatgagccaggtgctagaagctgttagtgaaaaagttaggcaagaggatgtccggtttttatcaatagatgcagacgaacatccagaaatatcagacctttttgagattgcagccgtaccatacttcgtcttcattcaaaatggtactattgtaaaagaaatatcagccgcagatcctaaggagtttgtgaaaagcttagaaattctttcgaatgcttctgcctcactagcgaacaatgccaagggtcctaaatctacgtctgatgaggaaagcagcgggtcttccgatgatgaagaggacgaaactgaagaagaaataaatgctaggctggtgaagctagtacaagctgcacctgtgatgctattcatgaaaggaagcccatcagaacctaaatgcggattttctagacagttagttggtatcctcagagaacaccaaataaggttcggattttttgatatattaagagacgaaaacgttagacaaagcttgaagaagttttctgattggcctacttttcctcagttatatatcaatggggagttccagggaggtttggatattatcaaggaatctatagaagaagatcctgaatatttccaacatgctctacagtaagccttattttgtaatgaaaactatattcatacatatatacatattaatatatatgtatatatttttatttattaatttattctag

SEQ ID NO: 815 - DNA, 1723 bp, Saccharomyces cerevisiae
ctcgagattaattcgtatccgtgggttataagggctttttttgtgtatgctacggtctactatatctctactgatgaatagtgctgctcagaaaacgatgacgaattctaattttgttctaaatgcacccaaaatcaccttaaccaaagtggaacagaacatctgtaacttgctgaacgattatacagacttgtacaatcaaaagtaccacaataagcctgagccattgactcttcggatcacgggcggatgggtgcgtgacaagcttctgggacaaggttctcacgacttggatattgccatcaatgtgatgtcaggtgagcaatttgctactggtttgaacgagtatttgcaacaacattacgccaaatatggagccaagcctcataatatccacaagattgacaagaatcccgagaaatccaagcatctggaaactgccactactaagctctttggcgttgaagtggattttgtcaatttaagatctgaaaagtatactgaactttccaggatacctaaagtgtgctttggcacacccgaggaagacgctttaagaagggatgctacattgaacgctcttttctataacattcataaaggtgaagtggaagatttcaccaagagaggtctgcaagatctaaaagatggcgttctccgtactccgcttcctgcaaaacaaacatttttggatgatcccttgagggttttgaggttgatccgttttgcttctagattcaactttaccatagatccggaagtgatggctgaaatgggcgatcctcagattaatgttgcattcaattcaaaaatttctagagagcgagttggtgtggagatggagaaaatattagtaggaccaacccctttattggctttgcagctgattcaaagggctcatcttgaaaatgttatctttttttggcataatgatagctccgtcgtaaaattcaacgaagagaattgtcaagatatggacaaaattaatcatgtatacaatgataacatactaaactcacacttgaaaagttttattgaattatatccaatgtttttagagaagcttcctatcttaagggaaaaaattggtcgttcgccaggatttcagcaaaattttatattgagtgcgatcctgtcccccatggctaatttacaaataatcgggaacccaaagaagaaaattaacaacctggtttcggtgacagaaagcattgtgaaggaaggattgaagctgagtaaaaatgatgcagcagttattgccaagaccgtagattcaatatgttcatatgaggaaatacttgctaagtttgcagatcgttcccagctaaaaaaatccgaaatcggtatatttctacggaactttaatggcgaatgggaaacagcacattttgcatctctatcagatgcatttttaaagattcccaagcttgaaactaaaaaaattgaattacttttccaaaattacaatgaattttattcttacatatttgacaataatttgaataattgtcatgaactaaaaccaatagtggacggaaaacaaatggcaaaactacttcaaatgaagccaggtccatggctgggtaaaattaataacgaagcgattaggtggcagtttgataatcctacagggactgatcaagaattaataactcatttaaaagccatactaccaaaatacctgtagtagcttattagtatacataagacatgtagaacaaga

SEQ ID NO: 816 - DNA, 753 bp, Saccharomyces cerevisiae
acgttggtttgggcttataaaaagttgtatggccaaatgactaatgacaacagtggtatctgggtcctaggctacggatctctgatttacaagcctccgtctcattacacgcatagaataccggcaataattcacggttttgctcgtcggttctggcaaagttccactgatcataggggtacacctgcaaacccaggaagagtggccacactaatcccgtatgaggatattataaggcaaactgccttcttgaagaatgtgaatttgtatagtgaaagtgcacctatccaggatcccgacgacttagtcaccataggggtagtgtattatataccaccagaacatgctcaagaggttagagagtatttgaacgtaagagaacaaaacgggtacactctacatgaggttgaggtgcatctagaaactaatcgggagcacgaggcagaattgggtgaagcattagaacagttgcctcggcacaacaaatcgggtaaacgggtactacttacttcggtgtacattggtacaatagataatgaggccttcgtcggaccagagaccgtggatgaaactgcgaaagtaattgccgtgtcgcatggacctagtggatctaactatgaataccttgcaaaactggagcaagcgctagcgcaaatgcccatcatgaaagagcgagggcgtattaccgatcattatctgactgctctattggagactgtaaataaatacaggtgaatgaaatatgtatacata

SEQ ID NO: 817 - DNA, 718 bp, Saccharomyces cerevisiae
agggcaatgcactgagaaataaaaaggcaggcaaagaaaaacgtatacaaaaggggattattttattttggggcattaaaaccaaaaacggaaaaaaaagcacgtcacgaaaataaaaattcaaaaaaaaaaataaaaccagttacagtactcatcactacattcttaatggcagatcaagtaccagttacaacacaactaccaccaataaaacctgaacatgaggtaccacttgatgctggagggagtccagtaggtaacatgggtaccaactcgaataacaacaacgagctaggtgatgtattcgacagaataaagacacacttccctccggccaaggtaaagaaaataatgcagacagacgaggatataggaaaagtttcacaagccacgcccgtaatagcgggcaggtccctagagttttttatagcgttattggtgaaaaaaagcggggagatggcaagaggacaaggaaccaagagaataaccgccgaaatactaaaaaaaacaattttaaacgacgaaaaattcgatttcttaagggaaggtctatgcgtagaagaaggccaaacacaaccggaggaagagagtgcctgagcagaacggggcgatgtaacttagtgtaaaatgaataccacatctatatatatccatataccaatgtatttatatctatatatgtctgcacatatatattatactctattatcaaggacga

SEQ ID NO: 818 - DNA, 1121 bp, Saccharomyces cerevisiae
agtctgcatgaatagcgtaaaaagagtaaagctaaattcaaaaatgtccaaacaaatatgcacgcattccggatcttttcacgcggacgagtcgttggcggtatacatgttaaggctactacccgaatttaaagatgctaagttggttagatcaagaaatcccaaggactgggaggctagtgacattctagtggatgtaggagctcagtatgacggcgtgaaattttttgaccaccaccagcgtggatttttcgaaactttcaacgagaaatacaagactaagctctcaagtgctggtctgatcttcaaacactacggtcgtgacattatcaaaacaattttgaacaacaaggttagcagctctgatttagatctgctctatgacaaggtatacaaacaatttgtcgaggcactggatgcaaacgacaacggtattagcaagtacacgattcctaaggattccaacttggaaccgaatttcagggataacgccatcagcattcccgggattatttcaggtatgaatcctaactggaacgaagacacttccgatgagtcttttgacagatgctttgctcgcgcaagtgagtttatcggtggggtctttgtcacattggtaagaggctacggtcaatcgtggttgccagccaaggcccttgtggcgcaagccattgatgaaagaatggatgttgataagagtggcaaaatcattgtcttgccccaattctgtccatggaaggagcatctatacgagctggaaagagagaagaacattgaaaagcaaatcgagtttgttctcttcacagactcttctggtgcctggagggtatctactgtaccaatcaactccacctccttccagtttaggagaggtttgccggagccattaagaggcctcagagacgaagagctgagcaccaagagcggtgtgccaggatgtatcttcattcatgcagcaggtttcattggaggtgccaagtccaaagaggctgtatatgagctggctaagatgtctttggcctagtcgggagcgagcgctcagtcaggtcccttatctatttaataatatttaacaattccactatttattctgtatagtaagtaaatctttaatgcaagca

SEQ ID NO: 819 - DNA, 6694 bp, Saccharomyces cerevisiae
cggtcgtcgtgccttttctggatagacacaaaaaaaacaaataacgaagcaggagtctaatgaaaggtcttctctggtctaagaacaggaaatcttcaacggccagtgctagttcaagctcaacttccacgtctcataagacaactactgcgtctacagcatcgtcgtcgtcgccgtcatcatcctctcaaactattcgaaactcgacaagcggtgcttctccatacatgcattcccaccatcaccatggccagggacacagtcaccacagaggggaagacaacaacagagataagagaaaaagctccgtatttccaccctccaagcagtacacatccactagttccagtcaggtgaacttggggatgtatcattcggatactaacaccagatcttctagaagcatagcctctacgctaaaagacgattctccgtctgtctgctccgaagatgaaataagcaattcttctagccagaagtccaatgcccaggatgagactcccattgcgtacaagaagagtgcccattcgaaagactcattgttgccttcacgttcctcgtctttatcacctcctcagtctcgatgtagcactggaactacgctagagaaatcgttgaacacttcaggtatcagtaacagtagcggcactaataataacaatagcaataataacaacgataacgagcaaaagcaaagaaatgttatccacttaaactctgaaaactatgatacaactgtttttaagactggatgggttaataagtcccatggccagactgttgctacaaactataatagctcaatgacagccccttcctcttcctcttcgtcctcctctcagaatctccgtaatgatgcgtattctagaaacagggaaagcaggttttatgggaacgacggttcgtctttaaaaaatgatgacagcagtagtactacggccactaacagtggcaatgatgtggcctcagcaagaagcagcatggctatagatcctcaaatgctagtacctgattaccgtctttatagggctcaattgaaaggttgcgttctcaacctttacaaaagtggtttgaatagtaacattaagttttttgatccaactttaccagcttcaaatagtagtatagcaaatgaaaaccatcaacagaaaaaacaacaaacaaacaaccaagcacaagcggaagctctgcaccaaaagcaatcatttggccaaatgggtgaacctattacactggacctgaagtatttatctgaagtttacccgcacccagatttaagacaagacagtgatggtaaaattatatcaggcacaatagaaagtttatgtcacacagtcttattttaccccggtccaaagcaatcggacgtacctaatgagaaatcattatctaagacacatagagctgttattaatctgttattgatgtttccattactagatcatttcattaagtttctaaaggtattcaaccaattcggtctttcttttaccaagaataaatcaagattgacaaataattccacacaattctacaacatatcccctgctgtcgatgactccatgactcaaagattagctttaactgctaaaacaatccttgatgtatttccgggatttttgctggatgaaccaatgctgaagactataatttccttattagatactatatctttgcataacgatgaaatttccaacaatttgaaaattaaaatcgccaataaacataacgaattaatgaaacttaccgcattcactcgatctcttccaatggcaacatcatctacacatgaattagagattatattggatccaagtcatttcctgtctttagacattacaacattggctgatgaagttcatcatatcaatttaaagtttgataaagtatgggcaccgaaatttgactattctctgctgtatgattcgaagtttattaatcgaagaattgtctcgttaaatccattggtattcaacaacgaccaaaatatccattttcttggaaggctactaatatcacatttatttccaacaaatcctgagtttagtaaaaaagtgactccaaaagtgagagctgagttattagataaatgggtccaaattggctgtagatttgaacatttaggagacatggtatcatggctagctgtcgccactatcatttgttcaattcctgtactaaggtcatcttcatggaaatatgttcctgatcagtcattgaaaactatttttaaagattgggttcctaccattattcagttagagaggcgacaaaggacatctaaatctacaagtagtgttttcatactcgctcctccaaatctggatgacgactttacgagagctaacgtgatttcttattttggcgatttattaattcatgctgatgatttaccatctgatacgaaattcaagtacttggaaaagaaaattaacagaacaaaaaacgcttttcataaatggcaacaaagattacaagcaatcgactctacgagacataaaactaattcgacagaaaacgtcagggataatgattctcctaataacgttgtttatcagctctggaaatttcatttatcacaacctccgttgaacattgaaggaataatgaaattaagtgtccaacacgaacctccaataatcgaccagaaagcgtattctactattggttctcaaaggagtgctttagtaactggaagttatttacccattttattcaatgaactattcccaaattattcactatttcctaagaatacattagtgggtgctgccagtgatgcgaagttgccgcctccaagatcatccgcgcgcctctcaaaatcactttcaatcagtgaaccaattccaatagcttcaaacagtcacactatgggctcattaacagatgatgctatgtcctcaaaaaatgataataataaagttacaggtgttggaaaaattgacggacctgtgatcaaagagatgtcgtcaaaacaatcaaataaacagagactattaaaatctgtgagagatgtttttaatattgacatggatgtgtttcatatatcagatgagttagtatttaaatcggtatacgataatgatggtaaatcccgtcctgctagtatggtcatagaaacaccaaagagattctcacaacactcttccatgcttattaataatccagctactccaaaccaaaagatgagagattccttggataccactggaagactaagtaagacattagaaaatatggactttttcaacaatattggtcaagtatcagattcactaaaagaatcgattattcgtgtcgtattgaaatcgtcgtcgctagaaaagatttttgatttactggtattaacttcaaatatcttttcaaaattggtagacactaaagaccttgagaattattactatcatcaaagacaaaggggtcattctaccagagggctttccgatgataacataggactactagattatgcattcgttaaactaactatggacaatgatattttcacagaaacattcttcaacacttataaaagctttactactacaactacggtattagaaaatatggcaaaacggtatgttggtgcaaagagttgcagcgtgtcaatttccaagattttagatcgcagtgatgattctaaaatgaagataaatgaggatacaaatttagtgtcctcttcattatacgaccaaaattttcctgtttgggatatgaaagtaactgacgatgaaaacataaaccttatttatatggcaaaaatccaaatcggcgccgcggaagctatactacatttagtgaaaaatcattactctgactttactgacgatttatgtaacaactctactctattggatattataaaaataatggaacaagaagtatccactgaatggcctacgcgaattgcaaactcaaagttacaaaaaagcctaccagaaaattttgtgattgaaacagaaaatttgttgactacgttaactgatctatttcatggtattaaatcagcataccaaaagcaactatacagacctattggtgtcaatagaactcagaagagaataactgacattttgaattcctttaacacattctcttttacagatcttaacaacatcattgatgatccttcctttagcgatgacatgattagatcttttcaaaagttacactcaaccaattacgaagatatactagaatggatctaccagttagataactttatttctaagaagttcaatttagtttctaagaaagattggatagttcttttccaggagttggaattgctttcaaaggaatctctggtctcttttttcaattatccgctacattttaagtcaagcaaattgataaaccccggatatttgcaattgcacgagtttgaaatttccaatctttttacttggatttctacattgattcttaaggatgataatggtacggagagtcttttttttgaaaaactaccacaatctataaaattgttaataaagttacacacgagtctaactacgtttttcgtgatggaaatttcaaacgtcaacaaaagcagtagtgaaaggttaactacttgtaaagttatattacaaattttgaactacatccgctggaaaaacggaagtttggatttatttgattcagaggaggatgaaagtcctcatgctatttgtccacacattccagcttttattgaaactgctattgcgcatgccataatatcaccagagtctagaaactatgaactttcgtggatcaaagcttctgaaaaactttcggaccctactaaaggaacccaaaatctaagatcgattagtaacgttttagagaagatagatgacatacatataaagagattcattgagattgatgatgtattcagcaaaaactgcaagaatttatgcccctgccctggttggttcatttcaaggttactagaaatatctcagtttgtccctaacatgagtatcactaattcgaaacttattaattttgacaaaaggagatttgttaacaacataatatctaatgtcttggatttaattccgaacgaaagggagtttccacttgatattgaaatgagtgacgaaaatccttcgaaaagaactacatttggccgcattctgttcaataattttgaagatgttaataaagtatacagaaagaagactaaaaaagtatcagaatcagaagccatatcggagagatttcaagagcagggagtatttaatgaaatactagtcaatgaaattgaaaaaataaagagggaagccagaaaattagaggttttactcgatcaagaaaagatcttgaagaactctgctgctttacatcaggccgttccgaaaaagaataggaagtctgttattatctcaggtactcatagtgacaacgatcatagctataatatcaataagaacaccggtcaaacgccttctctaggtagtgttatggaaagcaataattcagcaaggaatagaagagattcaagggcctccttttccacaaatagatcatcagtagtgtcaaattccagccataatggtgttagtaaaaaaataggtggatttttcagaagaccattttcaatcggtggattcaacacatccagttctaattattcactcaacagtatattatcgcaagaagtttcaagtaacaaatccattctaccaagtatacttccagaggttgattccatgcaactacacgacttaaaacctagttatagtttgaagacctttgaaatcaagtcaataatggaaataatcaatcacagaaacattccggcttactactatgcgttcaagatagttatgcaaaatggccatgaatatctgattcaaacggctagttctagtgacctcacagaatggataaaaatgatcaaggcttccaagagattttcattccattcgaaaaaatataaaggtaaaactcataataagatatttggggtaccattagaagacgtttgtgaaagagagaataccttgatacctacaattgttgtgaaattgctggaagagattgagctgcgtgggctagatgaagtgggattgtacagaattcctggttccatcggcagtataaatgcactaaagaacgcatttgacgaagaaggtgcaacagataattcctttacattagaggacgatagatggtttgaagtgaatgcgatcgcaggctgttttaagatgtatttaagagagttaccagattctttattttctcatgctatggtgaacgactttaccgatttggcgattaagtataaagcacatgcaatggtaaatgaagaatacaagagaatgatgaatgagttactccaaaagttacctacatgctattaccaaactttgaaaagaattgtatttcatttgaataaagtacatcagcatgttgtaaataataaaatggacgcatcaaacttggctattgtattttccatgagttttataaaccaagaagacttagccaacagcatggggtccagattaggtgcagttcagacaatcctgcaagattttattaagaatccaaatgattatttcaagcaataaacaattttcgtggtaaatgtatacaatccactgctgagagagaaaaaatttggtcccgcctatcgagggtttgagttttatatttttatatttacagagagatatagagcctttattcattttttgttatt

SEQ ID NO: 820 - DNA, 765 bp, Saccharomyces cerevisiae
atgttgactatcacgaaaagactggtgaccaccgatgtgcggtcgcgaatactgttaagcagtttaaacgggaaaatgtccgatgcactggcgctgctgcgtcagcagcagcagaccagcgtggatgtggagctgctgcacacgatgctagcgcgagccgctgcgcttgcccatgccgacactatagcatacatgtggtatcagcatgtgatgccacgccggttgccagtagagggccgcctgctatgtgaaatggctggcgtagcattgtaccaggacaggctcttcttacccgcgcagttcctccagcactaccaggcgatgaatcgcgatcgtcgcaccagcccagaagatgaactgattgagtatgagcttagacggattaaagtcgaagcgtttgcgcgtggcacaatgcactccacggcgctcagggaaaagtggaaggtattcttgcaggagatggatacgctaccagggcagccgccattaaggctgcgcgacttcccgcaaatgaccaaggctatgggcatagcattgatgcagcaagatgagcaagcagctgccctggcgttgtttggacgacagcccctagtgataaagaacgaatggtcactaccgctactactggctggtgtcctttggcatgttcccggcccagcgcaggcgcgacgtgtgctggcggagttccgtcaaagttatcgcgggctgccgctgctggatgccgaactagtgataaagagaagaggatttgaaatcaacacataa

SEQ ID NO: 821 - DNA, 1364 bp, Saccharomyces cerevisiae
atgaaatacaaggaaatcaatttcttcaagggccatccgagctcgaggttgctgcctcgagaagcagtaattcaagcgactgcggctatattggggcccgagaccagggagtacgataacgacccctataacaggcatccgctgacgtacggttcggacgaaggtgccctgtgggtgcgagagcagatttgtacgtttctgaatgatcagctgtttaagttcgaaaatggggctcggagcaggacacgggcagactatttgaatctgaatagcggcgcttcgtatggcatgctgaacatccttctgcaaacaaccttgccacataacgggtataccaggcaggcgttcatcatcacgccaacatatttcttgatcaacaattgcttcacagatgcgggattcaaggggaaaatgaccgccatcaacgagcagggccacgactcgattgatttcgagtcgttgatttctgcccttgagcagcacgaggcggagccgcagccccatagtaccacagagatgattcaggggccaaagttgaccaagaaggtctacaggtacgttatgtactgcatcccgacgtttgcaaacccatcgggaaacacatactcgcttgagaccagacgcagacttatcgacatcgctcggaagtacgacatgctgataatcactgatgacgtgtacgatattctagattacacgacgccctcagatgagctgccctctccgcccctaaggatggtgcacatagacagaagtacagcgccctccggtgaggactcgttcgggaatacagtgtccaacgcaactttctccaagctgatcgcccctgggctcagatttggataccatgagtcaatcaacgcgaatctcgccagacagctatctaaaggtggtgcaaacgtctctggcggaactccctcacaactgaactccatgatcgtgggtgagatgctgcgtagtggtgccgcccagagatgcattgcacatctgagatccgtatactccgagagggccactgtcttgacctcggcgcttaagaaatacatgcccctaggaaccgagattatgccattgaagggcggctattttacttggatcactctcccaccagcgtacaatgccatggagatatccactattcttgccaagaaatttaatgtcatccttgccgacggctccaatttcgaggtcatcggcgatgagaaaaactggggtcagtcatgctttaggctttctattagtttcttagaagttgatgatatcgacaggggcattgagctgtttggtgctgtttgcaaatctcatgcgatcaccaataacataactatgtagaaggaatacgtatataggtgaacggtaataag

SEQ ID NO: 822 - DNA, 1586 bp, Saccharomyces cerevisiae
agatactatcgaagtcctgtgttcgagagggagaataacggtggatatcacgtttcatatgcataaatttgatctagagctctcgagaagagcgaaccctttgctttttagtgcagaacgatacgaagagtatccattgaaatacgatgaattgaaacagtaccttctctcccaaaatccgtcacatccgcatcacaatagtagaccatacacttccattgactattttgactatcttctgtatagaagtaaaaatgacgagtcagaaatagaccttgacaaaaagctagtgtctgagttcgccctatactacgttcaaaaagagcacttgaactctgatgatctaaatcccacactcaatgagttgctgaagctgcagccgaagtctgcggattggtatgaaatgatgctgaggatccttgaatccattaacactacagggatagaccagcttacgaaggaaaacaacaacagtttcccaaattctaaaagagcgaggtcttccactaatatgggtggcacagataaatttaacaagggtgcttaccatactgacaaagctgatgacgataaaaatgaaatacttcaagaattaacgtccttcttgatgtcaaactccattcagaaaggcattgatatcaagccaataccattagatgaccctgtgaagttcttgaaaaatgggataaattctatcttggatacctgcgtcagtctagaaaaaaatacgtcatcaccacctatttcgcctaacgccgctgcaattcaagaggaagactcctctaaaaaattagaagaactagaaacggcatttagtgatttgcaactggcacacaatttcttgactaagcaattcgagaatgaccgtgccgaatatgtacaagatatcgagaagctaacgcggactaacagagaattacaagataagttattaaacaaccactcgaatttgagtaaaactgaaaagaaattacacgaattggagcaggaaaataaagaacttgaaaaagccaacaacaagctgaattcaagcagacataatttcggcatgtcatcaccagcgagttcgccggtgacttgggatccaagttcaccttcctctgtaggaagccccacaagcggttctggatcacgttcactttcaataatgacaagtgagtttaaaaaagtgcttacgagtacacaaagaaagtatgaaaaagaattgtcggatgagcgtgaacatagattcaagctggaaagggagcttgctttgctgaaaaatgcagaggcaaacacctcgctggcgcttaatagagacgatccaccagatatgctatgaataaacatcttattataaaacattgatatataaatatagaataagaagaatatactataaaaaaccgtttgatattacaattacttcttcttccttttcttttatttctttgaggaccattaataattgagaaaatggaacaaatagaaaacctttttttcttttcgtctactccttccccatcacatttttctaaattcacttagcacagggtatatagcttcaaaagcttggtaaatttcttccctttgctttgcaccagtaa

SEQ ID NO: 823 - DNA, 1968 bp, Saccharomyces cerevisiae
gtattggtagaaattgaacgatttcgaaagaagtacaaattcatggaaaatcttggcgacaaacttagtatttcacaagtataccacttagcacaggaatacagagaccatgcatattcaattgcgaataaaatcggttctgaggaagggttgaagcagtattatggcctcatgaacatgtctatccagatgtttcagctattgaaaacgaaatgtacgctttcagttctggaggatagtaaggtcacgtttgagatggtggagttattgatacaggagacgtataattttgacctagcagagctttacatttccagtttgaaagaacggttacaaacgcaccagagcgacacagatttggtagaagagatcatgcgttgcgagtttctgctgttacatgacttgccacttatgagagacagtaagttccactataagattgcactaagaaattgcaatgaattagtccagtacatggtaaatttgcaggatgagttgtatcaaaattgggcatccgtattccagtatgtcggcgtgatgctttgcattaagctgaaacagcaccgcagggtgaagacgagttttcatgggctactctcgcaatgtcgggaaaagtcacaatggaaatggtttctaaatctgtgttatgtgaattacttgctaaatgagaggttcccaatccccgaggatgctctgcaggagctgcgaagcacggagctgcacacggtggggcctgagctatatgcatggaagttggcattagagatggtaatccagctttgtaaagacgggaatattacggaccacttgaacgaattcaaaaatttctttgacacaaacaagcaatctctagtcactaatgaaggtaagggatgtgtgatcaaaatcatgccaaggatagcgctgaaagtagagttgcctatgattttccactacaaagaattaaagaacatactgttattattgcaaagtgtcagctacatcgtgaactgttatgacgaaaagggcaatttttccaggaagttcctccccaaagtctattctacaacgcagaaactgattaagaacattgccgctggcggtgtttcgatgaatgagctggactcacgaatccagacatacaagagcattcttgaattctgtgagttttacaaagtgtgggaacaaacactcttgaagggggccgtagtgacgaccgagtcacctaagttagggccctctccaggctacgtgaggctgctgcaagccatgaaggttcagtttgaaggcggcggggccgtagaagagtacacgcggcttgcacaatctggcggtacatccagcgaggtgaagatgatatcgcttctgaattgctacacagtgcaggcggcaagagtgagccgatgttcgggggacaaacagggcgaactcgtagagcaatgcaacaaggtgtggcttcaggtggagaaattgctacaagaaacggatctgcagttcaaccccatatgggagtgcacagtaacgatcctatggcttttcagccatttcgagccgttcagttggaacccgctgccatgtagtgacaagcagcgcgccgagtacgtgtcgaagctccgcgagttctactctagcaacaagttcgttgccggagaagccgttgcggacaaccgcttcaaattgaagaaggctctgttgctgcaaatactggtaaactacttaggcggtcgaatgctcgaacacgatctgggcgagatctatgcgatttcagcaaagtgtttcgatatgtgccgccagcagggcggcatgcgcaaggtccaatacgtgatcggaatatggcatttaatgaattgtacggtggcgatgcggggaaaagacgtcgctctcacgaacgcgaagctggaggcgctggttaagcaaatcaccagtgtcaaacaataaaccaaaaaaaaaaaaagaaacacttgatttcctttatctatttttatactt

SEQ ID NO: 824 - DNA, 1327 bp, Saccharomyces cerevisiae
agcaggtcatcacacatatacttcccgccatgcctaacaaagtgtttaacgtggccgttttcttcgttgtgttcagagagtgcttggaagcagtgattgttatttccgtgctgctatcgtttttgaaacaggcaatcggggaacatgaccgggcgctgtaccgtaaattaaggattcaggtttgggtcggtgtgttactcgggttcatcatttgtctggccatcggtgcaggtttcatcggtgcgtactattcgctgcagaaggatattttcggaagcgcggaagacttgtgggaaggtatcttttgtatgattgcgacgataatgatctcgatgatgggtattcctatgttgagaatgaataagatgcagagtaagtggagagtgaagattgcgcggtcgttggtggagattcctcaccgtaagagagactatttcaagattgggttcttgagtagaagatatgctatgttccttttgccgtttattactgtcttgagagaaggtttggaagctgttgtgttcgttgccggtgcaggtattaccacacagggctcgcacgcctctgcttacccattgcccgttgtggttggtttgatatgtggtggtcttgttgggtatttgttgtactatggtgcttcgaaatcctcgctgcagattttcttgattttgtctacttcgatcttgtacctgatctccgccggtcttttctctcgtggtgcgtggtactttgaaaattacagattcaaccttgccagtggtggtgatgcttccgaaggcggtgatggtaatgggtcttataacatcagaaaggccgtttaccatgtcaattgttgcaacccagaactggacaatgggtgggatatcttcaatgctttgcttggatggcagaacaccggctacttgtcatccatgctttgttacaacatctattggttggttcttatcattgtgttgagtttaatgatattcgaagaaaggcgtggtcacttgcctttcaccaaaaacttacaattgaaacacttgaacccaggatactggatcaagaacaagaaaaagcaggagttgacggaagagcaaaagagacaactgtttgccaagatggagaacatcaacttcaatgaagatggtgagatcaatgtgcaagagaactacgaacttcccgagcaaactaccagtcattcctcgtctcaaaacgtcgccacagacaaggaagtcctccacgttaaagccgactctctttgaatgaagtctagcacagggtgggagttttccacctattttctgttgataaaaatactacatttatatacatatatacaataatt

SEQ ID NO: 825 - DNA, 794 bp, Saccharomyces cerevisiae
acaaatcctgctccaaaatagtctcaacgcgtttattatgactggataccctgacgtggccgccttcgatttggactacaccatttggccctgctattgtgatacccatttgcacggtccctttaagccagttaaaagtagtaatggcgaagttctcacaattatatgtagagatggttacgagctcacaatctacaaagatatcccacgtatactaggtgatcttaaagataatggagttaagttaatgaccgcgtcacgaacgtgggcacctgagattgcccaggaaatactgaaaatattcaaggtcaagtatgctggtgtcgtaaccccgttggccaacctgttcgatgaatttcagtggggagaaagaagtaaaattggccatttaagggacggtttgaaagatctttataataccagcgatttaaaatcgaaaaagatttgtttatttgatgatgaaagtagaaacaaagaagtggagaaatacggagtgaagtttgtttatgtaagagacccagagaatggaccatcttggaaactttatcaagattacctgagtggaaaggtttgaaggactgcgcacttagttcacagagcatcatctgagcataagaagaagtcattacatttatgggaagatgatacatcactgttaaaaattatatatttgtgatttatcaaaatagaagctcacttttaatttaaaaactttaaccaatccgcctcagcctttgtactaatttgttcttccaaaaagagttttcataacttaaccatatatctatgtataa

SEQ ID NO: 826 - DNA, 935 bp, Saccharomyces cerevisiae
tcaatactgatatatacaacgaaacaatgcctcaaaacgattatatcgagcgtcacatcaaacagcatggtaaaagattagatcacgaagaaaggaaacgtaagagagaggcaagagagtctcataagatttctgaacgggcccagaagttgactggttggaagggtaagcaatttgctaagaagagatatgctgaaaaggtatcaatgagaaagaagattaaggcacatgaacaatctaaggtcaagggttcatccaaaccattggataccgatggtgatgctttgccgacatatctattggacagagaacaaaataacacagccaaagctatttcttcatcgatcaaacaaaagaggttggaaaaagctgataagttttcagttccgttaccaaaggttcgtggtataagtgaagaagaaatgttcaaagttattaaaacaggtaaatctagatccaagtcatggaagagaatgataacgaaacacacttttgtgggtgaaggtttcactagaagaccagttaaaatggaaagaatcatcagaccaagtgcgttgagacagaaaaaggcaaacgtcactcatccggaattaggtgtaactgtcttcttgccaattttggcagttaagaagaatccacaatctccaatgtacactcagttaggtgttttgactaaaggtaccattattgaagttaacgtttcggaattggggatggttactgctggtggtaaagttgtctggggtaagtatgctcaggtcacaaacgaaccagacagagacggctgtgtcaatgcggttttgcttgtatgagcaaaaaagtgctccgttttttttttttttatctcgatggttcaaattaggtttacttttaatttaataatacgatatacgtctacaagcacaaaagaacaggtatataaaaaatgtacgctc

SEQ ID NO: 827 - DNA, 2060 bp, Saccharomyces cerevisiae
aaaaaatttgattgtaggtgtgatagtgagagtgacacgtattaatattatgcaagataccaaatactacgaaccaacaaatatttttcgtcagcctgctattaatataaagaagagatcagataaaaagaggattttacaatcgatgatgactttatccacatacaaaaaaacgtggcaaaacaatacttcgaaaatgaattcaccgattttgcgaaaagcatcagacaacttcaatgactattatacaactaaaaaattaaaatcagattattggaaactgtacggtgttgatgaaagtgagttatccataccttcagacatgtccattgtggataatatacttctagtatctacaatgaacgagaaagacaacttgaaactttttgaaatttccgctgagaaaaagctgaaggaactacagacgattactgttcccggtaaacccattacttgtatctgcttattgcccatggtagattttccgccacagattttccccagctctcaaataaatcctaaccacaaccaattaatattgacaggtcatcaagacggtatagtcaatctgatagcaacttcaacatataagggatgtgctaaaataataaaaaggtttaaccacaacaagtttctaaaatctaccgtatcaacgtcgattccgattctggaaataacgccaaaaacagcacctattttgaaggtttcgccatggaacaagaccggttttgtttcccttctaaatgactccctctttatatatgacttgaaatcaaatcttgattgcataaaaacacctatttttttgcaatcatatccaggtataaattcttttgccgttaatgaattccatgatcccttcttactggccttagttggctcaaaatttggaccaaatggcatctcgctgcttgatttgagaacaaatctctatattccagatattttagataatagcatatctgcaggatgtggaaaagaccatttgcaaagaaagaacacaagtttggattgcgtatggataagtaatcatcacgttgcacagagcttgaacgataaaattcaaatttgggacattcaatcctgcgacggtaaaccagtttgtgaattatatgctaagaaaggatacattgaaagtctaaaatttaacgaaaacacaggcgcgttatatagcagtgatgaccaaggctttgtcatttgttgggatttacaaaacctacaaaacatgaaatatggtgagttagtccatggatttaactcaattagcctagatagtgaaagtgaactactattaaccaagcaagtcttccaatgtggaaacattattgtgagtggtatgagtgataaaaatatttgcttgaagagcaatgacactaaggccaatggaaaaggatgtggatttttattccttgatatggcaaacgatggaagtttagtaactcttgacaatttttgtgaactgggattacatcaaatttgtcaagttcaattcaatgtcgataccggtaaaataatcgatggtaatggtactgggaagagtggaatatctgattcttctatgttatcattatccaatgagagtgaccatagtatgacagaaacatctgatgatatgttctcaaattctggtaattgggattgttcttcagcaaatactgttagcgaaggtagattgaatgatgaccaagaggatatcgtcttcacaaagaggatgtattctgtaaatgatgtgcatttaagtggatctactattgatactactgttgtctagtttccttgagtgctttcaaataaaaacaaataacatatcaatgaatcaaagtaacatttctttgaagataatttctttgtctgtcactcagaatgccctttattactaacgaccatcctccttgatgaaggtgaaaatcaataaaattcaaattgtgacccaagtccagtcagtggatccttctggtaacacaagtattcggttttttttttttctccatgatctgtatgttttactaagctttgaatttttcttacacaatgtatatatatatatatgtgtgtgtata

SEQ ID NO: 828 - DNA, 1686 bp, Saccharomyces cerevisiae
caaggcgatagcaaagaaagggtatttgttaagtacttgttgatccggtcttcttgagcaatttagtatacacatagcgacaatgagtaacgatgaaggagaaacatttgccacggaacagactactcaacaagtttttcagaagctaggtagcaacatggaaaatcgagtttgttttgattgtggtaacaagaatcctacttggacttcggtaccttttggtgtgatgctgtgtattcaatgctctgctgtgcatagaaacatgggtgttcatatcacctttgtaaagtcttctacattagataaatggacaattaacaatttaagaaggtttaagttgggtgggaaccataaggctcgtgattttttcttaaagaacaatgggaaacagctactaaatacagcaaatgttgacgcgaaaacaaaatatacgagccctgttgctaagaaatataagatacatctcgacaagaaggttcaaaaggatatggagttatacccatcagaattagtcttgaacggtcaagattcttcggactcaccgttggacaccgattcagacgcttccaggtcgacttccaaagaaaatagtgttgacgattttttctctaattggcaaaaaccaagctccaattccagttctaaactcaatgtaaatacaggctctctcgccccaaaaaacaacaccacaggcagcacacccaagaccactgtcactaaaacgagaagttccatcttaacggctagcagaaagaaaccggtattaaactcgcaagataaaaagaaacattcaattttgtcttcgtcaagaaagcccactagactaaccgcaaagaaagtcgacaaatcacaggcagaagacttgtttgatcaatttaaaaaagaggctcaacaagaaaaggaggacgagttcactaattcgtcttctagcaccaaaattagacaaaatgattacgattcccaatttatgaataacagtaaaggcaacaataataacagtatagatgatattaatacccagcctgatgaattcaatgattttttaaatgacacttcaaacagcttcgacacaactagaaaagaacagcaagatactttaacacccaagtttgccaaattgggatttggtatgaccatgaatgacgccaatgatttggcaaagcaacaaaaagaatctcagaaaatagctcagggaccaagatatacgggcagaatcgcggaaaggtacggcacacaaaaagctatatcatctgatcaattatttggtcgtggctcatttgatgaagcagcaaacagggaagcgcatgacaagttgaaaacatttgacaatgctacatcaatttcctcttcttcatactttggagaagataaagaagtggatgaatttggtaatcccatcaatagtagtggaagtggagcagggaattttgatggccgtaattctaataacggtttcatcgattttaatgcctccgcagatgatgaattgcagatgttgagagacgttgtagaacagggtgctgaaaaactcggtagttatttaagggactacttaagaaaataagtttaattttctctttaattgaattttttttttttcattgttatcattgttttttattctcatttttcattatatgataattatatttatggtacatagaaacggttgtatatgcattgtac

SEQ ID NO: 829 - DNA, 1575 bp, Saccharomyces cerevisiae
aagagtaagatcaccacgcacgtttaggggatcggagagcttatctatacagcaactagaagtatatagaacaacaatggtcgaacgacgggttagtttcacagctcaataaccatagaaaggaatcgtgcatcatatggtagctagtattagatcaggtgtgctgacacttttacacacggcgtgcggtgctggtatcctggccatgccgtacgcattcaagccgtttggattaattcctggagtgataatgatagtgctgtgtggggcgtgcgctatgcaaagcttgttcatacaagctcgtgtagctaaatacgtaccacaggggagggcctcgttcagtgctctgacgcggttgattaacccaaatctaggtattgtgtttgacctagcgatcgctatcaagtgttttggtgtgggcgtctcttatatgattgtagttggggatctgatgccccaaataatgtctgtgtggaccagaaatgcttggctgttgaacaggaacgtgcaaatttcactgatcatgctttttttcgtggccccgctgtcttttctgaagaagttgaattcgttgaggtacgcttccatggtggccatctcttctgtagcgtacttgtgtgttttggtgttgttgcactatgtagcaccatcagatgagattcttcgcttgaaaggccggatctcctacctcctgccaccacaatcgcatgatttgaacgtgctaaacactcttccaatttttgtctttgcctacacatgtcaccacaatatgttttcaataatcaatgagcagaggtcaagccggttcgagcatgtgatgaagattccactgatagcaatatctttggctctcatcttatatattgcgatcggctgtgctggatacctgacattcggcgacaacatcattggaaacattatcatgctgtacccgcaagcggtctcgagcaccatcggcagaatagcgattgtgttgttggtgatgctggcgttcccactacagtgtcatcctgcaagagcttcaatccatcagattttgcaacacttcgccgaggaaaatgtaagtataagtgctacatcggcggatgaacccactgttgctaccgaaagttctccgttgattcgcgacagtagccttgacctcaatgaggtaattgaagaagaatctatttatcagcctaaggagactccattgagaggcaagagctttattgttataacgtgcagcattttagttgcatcatatcttgtcgccatttcggtttcctccttggcccgtgtactggccattgttggggccacaggctccacttctatttctttcattctgcccgggctctttggctacaagcttataggaactgagcacaagacagccgtgccattgacgacaaagattttcaaatacacaggtcttctcttgtttatctgggggctaataatcatgatcacctgcctgaccgcagctttgaagctaaactaaataagcaagagtatactcattctttttttgctattcctccatacgtacatagacccttgaacctacatatccgcgtaagaaactattaataa

SEQ ID NO: 830 - DNA, 1455 bp, Saccharomyces cerevisiae
gaacacgaataaagtcattgagcctcgttttcagtgaggtatcattgtctatcatatcagctttctttgctcaacagaatcgctaaaagaaagggcgtgttattaacagtagccaacccaataatttgaaaacaacattggacattatagatcaacgccatcttttcagaaacaccaaaaatcacgttttcaaaatatgtcaatatcatcaaagataagaccaactcctcgtaaaccttcacgtatggctaccgaccattcttttaaaatgaaaaaattttatgccgatcctttcgctatatcatcaatttctttggcaattgtatcgtgggtcatcgccatcgggggctccatctcatctgcatccaccaatgaatccttcccacgttttacttggtggggtatagtataccaatttctaattatttgttctttaatgctgttctattgttttgatttagtcgatcattacagaatcttcatcaccacatctattgcagtggcatttgtgtataatacaaacagtgcaacgaatttagtgtatgcggatggtcccaagaaagctgctgcttcagcaggtgtcatcttactttccatcataaatttaatctggattctgtactacggcggtgataatgcttccccaaccaatagatggattgattcgttttccattaagggtatcaggccttcgccattagagaattctcttcatagagctcgtcgaagaggcaataggaacacaacgccttaccaaaataatgtctataatgatgctatacgagactcaggctacgcgacacagtttgatggatatccacagcagcaaccttctcacacaaattatgtatcttctacggcattggctggttttgagaatactcagccaaatacttcagaagccgttaatcttcacttgaacactctacaacaacgtatcaatagcgcaagcaacgcgaaggaaaccaatgataatagcaataatcaaaccaatactaatataggtaatacgttcgatactgatttttcaaatggcaatacggaaactacgatgggagacactttgggtctgtatagcgatatcggtgatgataatttcatttacaaggcaaaagcactgtacccatacgacgctgatgacgatgatgcttacgaaatctcatttgaacaaaatgaaatcctacaagtctctgacattgaaggcagatggtggaaggcaagaagggcaaacggtgaaacaggtattattccaagcaattatgttcaactaatcgatggtccagaagaaatgcatcgttaatgattaacaatcttatagcatggattctcgagtcaaaggaaaaaaataaagaaacctatctttatgaccctctacagtaatgttttgaagaatatagttctgtaattgtaggaaaaatcattcttatgtattatgtttactctaggatgttcaca

SEQ ID NO: 831 - DNA, 2121 bp, Saccharomyces cerevisiae
atgagagtaagaccaaagaggtcggtcataacactcatggcgatagtagtcgtgatgctcatcctcagaaaccagttctactcatcacgaacgcgagggcatgggcaggaaccagtcatctcctccagccaaaagaatctttatgacgggtggataacacccaatttctatagaaagggtgatcccttggaattgattgtgaataaggtagaatctgacttaacgcaattgccatacgcatattatgacttgcccttcacttgtcctcctactatgcataaaaaaccgcttcatttatctctaaacgaaataataagaggggataggaaatgggaaagcgactataaactcaaatttggcgaagacaatccatgtgaaacgttgtgtgcccggaaaactaccaaagagggcatgcagaccttagacaagttagtcagggagggatacgtcgtacaatggctaattgatgatgaattgccggctgccactacctttatttccaccactgatcataaaaaatattatgcatctgggtttcctttaggtttcatagatcctgatacagataaaacctatctgcataatcacgtaatgctggtaatacgttttcatgccagtgataatgataaaaataccatagtcggctttgaagtatatccaagatctgtgtcagattatcattgtcctggggcatcgaagaactacgaacaatacgaaatagtcattcctgaggatgaaaatgagttgacatatttgccatttacttactccgtatattggagggaagaatttgaagtagactggaatcatagatgggattatttcttgaacgcaggtgagttatctgacgaacagagcattcagtttcattggatgagcttagccaattcagtgggaattgtattgtccatctcatttatcacgcttattatttacgtacgagtcatgtacacggataaaagtaattcaaagtcccccaaatacatgataaatatagaaggaattgaaacagaggatgacctggacgatgacaagtatggtaaatactccgtttacacggtggcgaaagactggatacaaaatggtagaccaaatttatttggtttaaaagttttaatccttctggtctcatttggggtgcaatttttatttaccataattggatccttaacgatatcatgttcaatgaacaaattgcataatgtaagaaacagtgtgctaactatggccattttatttttcgtacttggagcattcatggcatcattcgtagggacaagactcagtatggtaacgaaaacgaaaagaaccaaggccaattaccttgacgataacagatacctcaaagactacaagaagtttagtcccatttttacgatactttgtgggtccagcttacctggcattgtaatggtgagcacatttttattaaatagtattgtttgggcacatgattctacaagtgcattaccattcaagactattgtgtttttcatgagcatttatttcatcgtctgtataccactcagcttgtttggtggtattgtagctaataatatacctttgcctcaatattggttgagtggaattactaaagatgaaagcaatagcgatggcaatggattatttgtacctaaatcacgagccaagttcaacccgttggtttactgcggcatttatttatgtggtattttccccttgttagtaatttacgtggaaatgcaatacgtttacaaatctctctggttggagaaaactacattttattatttttacggattcctttttttgagtatcatactattatgcgtgttaactatggagatatcaattattggaagttatttattaatgagattttgcttcgaagataaggtggttcgcaacaattggagatggaagtgctttgaaatgggatttagcggtggtgtatatatggaattgtattcgctatattacattttcgcagtgctaaacatccatgggttttcatctatcttaatttccatttgttatagtttaatcttcaacgtaatgtgcagtttagggcttggcgcattaagttacttaacggcttcatggtttataaataaaatataccaccagaaagtcaacctgtaa

SEQ ID NO: 832 - DNA, 3459 bp, Saccharomyces cerevisiae
gggacgaaaaacacttttttagtatcaagtagtataatggatcaacaatttctaagtcaacttgagcaaactttgcacgctatcacttctggtgtaggcttgaaggaggctacaaaaactttgcaaactcaattttatacccagcctacaactttgccagctttgattcatattttgcagaacggctccgatgattcgttgaaacaactagctggtgttgaagctagaaagttggtttccaagcactggaacgccattgatgaatccactagagcctccatcaaaacatctcttttacaaacagcatttagtgagccaaaagaaaatgttcgtcattccaacgctcgagtaattgcttctattggtactgaagagctagatggtaacaaatggccagatttagtccctaacctaatccaaactgcttctggtgaagacgttcaaacaagacaaactgccatttttattttgttttctctgttggaagatttcacctcttctctatctggccacatcgatgactttttggctttgttctctcagacaattaatgatccatcttctttggagatcagatcattatctgcccaggctttgaaccacgtttctgctttgattgaagaacaagaaaccatcaaccctgttcaagctcaaaaattcgccgcctcaattccatctgtggttaacgttttagacgcagttatcaaggccgacgacaccatgaacgctaaattaatctttaactgtttaaacgatttcctgctattggactcccaattaacaggaaactttattgtggatttgattaagctgtctttacaaattgctgttaacagtgagattgacgaagatgttcgagtttttgctcttcaattcatcatatcttcattgtcctacagaaaatcgaaggtttctcaaagcaaattgggcccagaaattactgttgcagctttgaaggtggcttgtgaagagatcgatgttgacgatgaattaaacaacgaagacgaaacaggcgaaaatgaggaaaatacaccctcttcttctgctattagactgttagctttcgcttcctctgaactgccaccatcccaggttgcttccgttattgttgaacacattccagctatgttgcaatccgcaaacgtttttgagagaagagctattcttttagctatttccgttgctgttactggttctccagactacattttgtctcaattcgacaaaattatccctgccaccataaacggtttgaaggatactgaaccgattgttaaattagctgctctgaagtgtattcaccaattaaccactgacttacaagacgaagttgccaaatttcatgaagaatacttgccattgatcatcgatatcattgattctgcgaaaaacattgtcatttacaactatgcaactgttgctttagatggtctgcttgagttcattgcttatgatgctatcgctaagtacttggatccattaatgaacaaactattctatatgttggaaagtaatgaatcatccaagttgagatgtgctgttgtttctgcaattggttccgctgcttttgcagcaggttccgcgttcattccatatttcaagactagtgttcactatttggaaaaattcatccaaaactgttctcaaattgaaggtatgagcgaagatgatatagaactaagggccaacacttttgaaaatatttctactatggccagagccgtcagatcagacgcatttgccgaatttgccgaacctttggttaactccgcctatgaggccatcaaaactgattctgctagattaagagaatctggttatgcattcattgcaaacttggctaaagtttacggcgaaaattttgctcctttcttgaaaactatcctaccagaaatcttcaagacactagaattagatgaataccaattcaacttcgatggtgatgcagaggatttagccgcatttgctgattctgccaatgaagaagaactacagaacaaattcaccgttaacactggtatttcctatgaaaaggaagttgcttctgcagctctatccgaattagcattgggtacgaaggagcatttcttgccatacgtcgaacaatccttaaaggttttgaatgaacaagtcgatgagtcgtacggtttaagagaaaccgctctaaacaccatctggaatgttgttaagtctgtcctgttggcttccaaagtagaaccagaaagctatcctaagggtatcccagcctcttcctacgttaatgctgatgttttggcggttattcaagctgccagggaaacttccatgggtaacttaagcgatgaattcgaaacctcaatggtcattaccgttatggaagattttgccaatatgattaagcaatttggcgcaatcatcatcatggacaacggcgactcttctatgctagaagctttgtgcatgcaagttcttagtgtcttgaagggtacccatacttgtcaaaccattgatatcgaggaggacgttccaagagatgaagaattagacgcttctgaaaccgaagcaactttacaagatgttgcattggaagttcttgtcagtttatctcaagctttagctggtgattttgccaaagtctttgacaacttcagaccggttgttttcggattattccaatctaaatccaagaataagagatcatccgccgtcggtgccgcctctgaattagctctaggtatgaaagaacaaaatcctttcgttcatgaaatgctagaagccttagtcattagattaacaagcgataaatctttagaagttagaggtaacgcggcttatggtgttggtttgttgtgtgaatatgcttctatggacatctcagccgtttatgaacctgttttgaaggcgctttatgagttactaagtgctgctgaccaaaaggccttagcagccgaagatgacgaagccaccagagagattattgatagagcatacgctaatgctagtggatgtgtggccagaatggctttgaagaacagtgctctagttccattggaacaaactgttccagcattattggcacatttaccactaaacaccggttttgaagaatacaatccaattttcgaattgatcatgaaactataccaggaaaatagtcccgttatcacaaacgaaaccccaaggatcatcgagattttcagtgctgtgtttaccaaagaaaatgatagaattaagttagaaaaggagtctactctaggtagggaagagaatatggaaagattaaagcaattccaaaccgaagagatgaagcataaggttattgaattattgaagtatctaaacactacttacaacggaattgttgctcaaaatccggttttagctgccgtcattgcttgatttttttaaaaccattttttattctcgtctgtttcgataaacagcgcttatataagtataccttccttcattatttttatt

SEQ ID NO: 833 - DNA, 1388 bp, Saccharomyces cerevisiae
tgttccggttaagcactatataaccattttacttgaacagagactgacttataagaattgggcaagcttaccataccaatcattccggcacatccaccttgatcaaatatcataaaccttaatctgcatattacaataaaataaagaaatacgtaagaagaggaaaagtggggaactatgtctttttttaatcgatcaaatacaacctcagctttgggaacgagtactgcaatggcgaatgaaaaggatttggccaatgatattgtcattaatagcccagcagaggactcaatatcggatattgcgttttcaccgcaacaagatttcatgtttagtgccagttcctgggacggtaaggtacgtatttgggatgtccaaaatggtgtacctcaaggtagagcgcagcatgaaagctccagccctgtattatgtaccagatggtcgaatgatggtacaaaagtagcctcaggcgggtgtgataatgccctgaaattgtacgatattgccagtggtcaaacacagcaaattggaatgcattctgcgccaataaaagtattacgttttgtacaatgtggaccatcgaacacagagtgtatagtaaccggatcctgggataaaaccataaaatattgggatatgagacaaccccagcccgtatccaccgtaatgatgcctgaaagagtatattcgatggataataaacagtctctgttagtagtggctactgccgaaagacatatcgctattatcaatctagcaaacccaacaacgatttttaaggcaaccacgtcacctttaaaatggcaaactcgatgcgtggcatgttataatgaagccgatggatatgcgattggttcagtggaaggtagatgctccataaggtatatcgatgatggtatgcagaaaaaatcaggcttttcatttaaatgccatcgtcaaaccaatcctaatagggcacctggctccaatggtcaatctctagtgtatcctgtaaatagcattgcatttcatccattatatggtacttttgttacggctggtggtgatggtaccttcaatttttgggataagaatcaaaggcatagattgaaaggctatcctactttgcaagcatctattcctgtatgcagcttcaataggaatggtagcgtatttgcgtacgctctaagttatgattggcatcaaggccatatgggcaacagacccgactatccaaacgtcattaggctacatgccacaactgatgaagaggttaaagagaaaaagaaaaggtgaaattcgttcttcggatagcttccgtgcgcaaccacattacttttgtaattttttatatttgcaatatgtaaaagatatatattttttaatgatacaggttcttttggagagaa

SEQ ID NO: 834 - DNA, 4434 bp, Saccharomyces cerevisiae
aacatttcacaaaaactacagctcggatttcaattgtgatgtattcaactccactaaaaaagaggattgattacgatcgcgaaacgtttacggcttcggcttccttaggaggaaatcgcttaaggaatcggccaagagatgaccaaaacaacggtaagcccaacctgtcgagccgttccttcctaagcgaaagaaaaaccaggaaagatgtattaaacaagtatggcgaggctggaaatactattgaatcagaacttcgtgacgtaactacacacgtcaagataagcgggttgacttcctctgaaccgttgcagttggctagtgaatttgtccaggatttgagctttagggacagaaatacgccaatactagataatccagactattatagtaaaggtttggattataatttctcagatgaagtcggtggattaggtgcatttacccccttccaaagacaacaagtgacaaatataccagatgaagttttatcacaagtttcaaataccgaaataaagagtgatatgggtatttttctcgaactgaactattgttggataacctctgataataaattgatcttgtggaatatcaataatagttcagaataccactgtatcgatgaaatcgagcacaccattttaaaagtgaaactagttaagcctagcccaaacacttttgtttcttctgttgaaaatttattgattgtcgccactctttttgatatctatattttgacaatatcatttaatgaccgtactcatgagttgaatatctttaacacaggattaaaagtaaatgtaactgggttcaacgtttctaacataataagctacgaaaggactggacaaatatttttcactggtgcgactgatggtgtcaacgtgtgggaattacaatataactgctcggagaacctattcaatagcaagagtaacaaaatatgtttgacaaagtcaaacttagcaaatttactacctacaaaactaatacctagcatacccggaggaaagttgatacaaaaagtactagaaggggatgcaggtaccgaagaagaaactatatcacagctcgaagttgaccagtcaagaggcgttttacatactctatcaacgaaatctattgtcagatcttacctaattactagtaacgggctagtaggaccggtcctcattgatgctgctcatatcaggcgtggaatgaatgcattgggtgtaaaaaattcacctctactcagtaatcgagctttcaagattgccaaaattgtttctatctctatgtgtgagaacaatgatttattcttagctgttataactactactggggtacgcttgtatttcaaaggttccatttctaggagatcgattggctcattaaaattagactctgtaaagtttcctcctaccagtatatctagctccctcgagcaaaataaatctttcataatcggtcatcaccccttaaacacacatgatacaggcccactttcaacacaaaaagctagttcaacttatatcaataccacttgcgctagtacgataatatcaccaggtatatactttacgtgcgtgaggaaaagagctaattccggagaactatctaaaggtattacaaataaagctttgctggaaaataaagaggaacacaaactttacgttagtgctccagattacggtatattaaagaattatggtaaatatgtagagaataccgcactactcgatacgacagatgaaattaaagagattgttcccttaacaagatcttttaattacacttctactccccaaggttacgccaatgtgtttgcctcacaatacagtgcagaaccattaaaagttgccgttttaacaagcaatgccttagaaatttattgctatcgcacgcccgacgaagtgttcgaaagcttgattgaaaatcctttgccatttattcacagttatggtttatctgaggcttgctctacggcactttatttagcttgtaagtttaataagtcagagcatattaaatcaagtgccctggccttcttctctgccggtatacctggggtagttgaaataaaaccgaaaagttctagagaaagtggcagcgtgccgccaatctcacaaaatttattcgataaatctggtgaatgtgatggtatagtactatctcccaggttttatggttctgcgttattaattacaagattatttagccaaatatgggaagagagggtctttgtttttaaaagggcttccaaaacggaaaaaatggatgcttttggtatttctataactaggccacaggttgagtattatttatcatcgatatctgttttggcagatttcttcaacatccaccgtccttccttcgtttcatttgtgcctccgaaaggtagcaatgctataactgcatccgatgctgagtctattgctatgaatgctcttatcctcttaataaattctattaaggatgcgctttcccttataaatgtcttctacgaagatattgatgctttcaaatctttgctaaatacattgatgggtgcagggggagtttatgactccaagacacgtgagtatttttttgatcttaagttccatgatttgtttacccctaacgcaaaaaccaaacaattaataaaagagattttaatagaagttgtaaacgctaatattgcaagcggcacatcggcagattatattgtgaacgttttaaaggaacgctttggatctttttgtcatagtgcagacattttgtgttacagggcaggagagcatttagaagcagcacagaagtttgaaatgatagattctaaaatatcaaggaaccatttagataccgcaattgacctttatgaaaggtgtgccgagaatatagaattatgtgaattgagacgtgtggtggatatcatggtaaaacttaattaccagcctaagactgttggatttctacttagatttgcagataaaattgataaaggaaaccaagcacaagagtatgtgtctagaggttgtaatactgccgatccaagaaaagttttttatgacaaacgcataaatgtgtacactttgatttttgagattgtcaaaagcgtggatgactatacatctatcgaacaatccccttcaattgcaaatatatctattttttcaccagcttcgtcactgaagaaaagagtttactcagtgataatgaatagcaataacaggttcttccattattgcttttatgattggcttgtcgcaaataaaagacaagactacttattacgtttggattctcaatttgttttgccgtacttgaaagaaagagcagaaaaatctctagaaattagtaatctgttgtggttctacttattcaaagaagaacattttcttgaagcagctgatgttttatatgctctagctagttctgattttgacttaaaattaagtgaaagaatcgaatgcctagcaagagcaaacggtctttgtgatagctcaacgtcattcgaccaaaagccggcactggtccagttatctgagaacatccacgaacttttcgacatagcttccattcaggatgacctacttaatttggtaaggaatgaaacaaggattgacgaagattatagaaagcaactaacacttaaactaaatggaagggtgctcccattatcagatctctttaatgattgtgcagacccattagattactacgaaataaaactaagaattttcaaagtatctcaattcaaagatgaaaaagtcattcaaggagagtggaatcgattgctcgatagcatgaaaaatgctccatcgcctgacgtgggaagtgtaggccaagaatcctttctttcctcgatatccaacacactaattcgaattggtaaaacaacacgcgatacggacgttgttttccctgtacatttcttaatgaataaaatattagaatcattcattgataaaagttcagctgctgatggatctgtatgttcaatgttcttgcttgccggagtttctcatttaaaactctattacattctaagtcgtatcatagaaaactctgaaggaaatgtcgaattggcaaaaaaagaaatggtatggttgatcaaagattggtaccaaagtgattcagatttacgcggttcaattgcgccagaacaaatcaaaaaattggagaaatatgatccgaataccgatcccgttcaagattatgtgaaggatcgtcatcatggcctgaaatgaacggaattatttgtatattttagcagtttgattgtgaagttttctttaatacgtaggcaaattcttacgtcatcctttatatagtgaatgtaaactgctgttttacggtacgctaaccgtagcgaactgagactgtatatggtaaacagttagttgatcgtatggcagagaatctagttattctgaatacgttcccttcacttgagcagctcaaaatata

SEQ ID NO: 835 - DNA, 1281 bp, Saccharomyces cerevisiae
tgtggaaggatatcgactcaagcgaccagtggaataggatggcgagttggctagtttagctctctccgacattgttgctattgaacagatacggtatgcccgtgtatttatcctcctaccaaatcgcgcagcaaaatggttaagcacgtgactatttttcaacaatgaaaaaattttgaacaatagatgatatgaggaggcatcgagggattgctaagaagaggatattcctcatcatccaaagactatcttgtcgtaagtttcgttgaatatgtctacaaacagtattaagttgttagctggtaactcacatcctgggcttgctgagcttatttcccaaaggcttggtgtaccgttatctaaagtgggggtatatcagtattcaaataaagagacgtctgttacaataggggaaagcattcgtgatgaagacgtatatatcatccaaactggttacggggaacatgaaatcaacgatttcttaatggaattacttatcttaattcacgcttgtaagacggcatcagtcagaagaattacggcagtaataccaaatttcccttatgctagacaagataagaaggataaatcgcgggcgcccatcactgcgaagctgattgccaatcttttggaaactgcgggttgtgatcatgttattactatggatctccatgcttcacaaattcaagggttttttcatatcccggttgataatttatacggtgaaccaagtgtgttgaattacataaggaccaaaacagatttcaataatgcgatactggtatcgcctgatgctggtggtgcgaaaagggtggcttctttagcggacaagctggatatgaattttgccttgattcataaggagaggcaaaaagctaatgaagtttcgcgaatgctgcttgtcggtgatgttgctggtaagtcatgcttgttgattgacgatatggctgacacgtgtggtacgctggtgaaagcctgtgacacattaatggatcacggtgctaaggaggttatcgctattgtcacacatggtatattttctggctcagctagggagaagttaataaatagtaggttatcaagaattgtttgcaccaacacggtacctgttgatttggatttggacattgtcgatcaggtggatatcagccctacgattgcagaagctatcagaagattgcataatggagaatcagtctcatatttatttacacatgcgcctgtttaaagaagaggtataaacgaatatatttgtataaatgtactaacagatattttgaa

SEQ ID NO: 836 - DNA, 962 bp, Saccharomyces cerevisiae
tggtgtagtcatgtgaccggatggcactgccggtggcaaaaaagtgcaaatgcaggggcgatgaaaagagaggaagaaagagtttatggcatagtagaaaggccaattaaatcgggaagctgctaagtaagtttgaaccgtagtttcgaagtagagtgcgtttcttgcgaattgtggtgaaaatattgaacagtgaataaagcataaaaaaaaaatgtcggatccaagttctattaacggtggtatcgtcgttgcgatgacaggtaaagactgtgtggccattgcctgtgatttgcgtctcggaagccagtcactaggtgtgtcgaacaagtttgaaaaaatcttccactatgggcatgtgttcttagggattaccggtctggctaccgacgtgactactctgaacgagatgttccgctacaagacgaacctatataagttgaaggaagaaagggccattgagcctgaaacgtttacccaattagtgtcaagttcactttatgaaagaagattcggtccatactttgtggggccggtggtagcaggtattaattccaagtccgggaagccctttattgcgggattcgacctaatcggctgtatcgacgaggccaaggattttatcgttagcggtactgcatccgaccaactgttcggtatgtgtgagtccctgtacgaacctaatctagagccagaagatcttttcgaaactataagtcaggccctactgaatgctgctgaccgtgacgctctatcaggctggggagctgtagtatacatcatcaagaaggatgaagtggtgaagagatacttgaagatgagacaagattgatcggttcatggcaatctcatggtcccaaaaacaaccccaacacaaaatatcagcggaacgtcaagaattttccacatccaactcatctttaatttttaagtaaacagaatagatcgaatgaatatataaa

SEQ ID NO: 837 - DNA, 2558 bp, Saccharomyces cerevisiae
tgacaacactctaagaaacaaaataccaatataatttcaaagtacatatcaaaaatggttcaatctgctgtcttagggttcccaagaatcggtccaaacagagaattaaagaaggccactgaaggttactggaacggtaaaatcactgtcgatgaattattcaaggtcggtaaggatttgagaactcaaaactggaagttgcaaaaggaggctggtgttgatatcatcccatccaatgacttctccttttacgaccaagttttggatttgtctttgttgttcaatgtcattccagaccgttacactaagtacgatctatctccaatcgacactttgtttgctatgggtagaggtttacaaagaaaggccactgaaactgaaaaggctgtcgacgtcactgctttggaaatggttaaatggttcgactctaactaccattacgttagaccaactttctccaagaccactcaatttaagttgaacggccaaaagccagttgacgaatttttggaagccaaggagttaggtattcatactagacctgtcttgttgggtccagtttcttacttattcttgggtaaggctgacaaggattctctagatttggaaccattgtccctattggaacaattgttgcctctatacactgaaatcctatctaaattggcttctgctggtgccactgaagttcaaattgacgaacctgtcttagttttggacttgcctgccaacgcccaagccgccattaagaaggcttacacttacttcggtgaacaaagcaatctaccaaagattactttggctacttacttcggtaccgttgtccctaacttagacgccatcaagggcttgccagttgctgccttacacgttgactttgttagagctccagaacaatttgatgaagtcgttgccgccattggtaacaaacaaaccttgtccgttggtattgttgatggtagaaacatttggaagaatgatttcaagaagtcttccgctatcgttaacaaggctattgaaaagttgggtgctgacagagtcgttgttgccacttcttcttctctattgcacacaccagttgatttgaacaacgaaaccaagttggacgctgaaatcaagggctttttctctttcgccactcaaaaattggatgaagttgttgtgatcaccaagaacgtttccggtcaagacgttgctgctgccctagaagctaacgctaaatctgttgaatccagaggtaaatccaagtttatccacgatgctgccgttaaggccagagttgcctctatcgacgaaaaaatgtctactagagcagctccatttgaacaaagattgcctgaacaacaaaaagtcttcaacttgccattgttcccaacaacaactattggttccttccctcaaaccaaggacatcagaattaacagaaacaaattcaacaagggcaccatctctgctgaagaatatgaaaaattcatcaattctgaaattgaaaaggtcatcagattccaagaagaaattggtttggatgtcttagtccacggtgaaccagaaagaaacgatatggttcaatacttcggtgaacaaatcaacggttatgctttcactgttaacggttgggttcaatcttacggttccagatatgtcagaccaccaattattgttggtgacttgtccagaccaaaggctatgtccgtcaaggaatctgtttacgctcaatccatcacttctaagccagtaaagggtatgttgactggtccaattacctgtttgagatggtctttcccaagagacgatgtcgaccaaaaaactcaagctatgcaattagctttggctttgagagatgaagtcaatgatttggaagctgccggtatcaaggttatccaagttgatgaaccagctttaagagaaggtttaccattgagagaaggtactgagagatctgcttactacacctgggctgccgaagctttcagagttgctacttctggtgttgctaacaagactcaaatacactctcatttctgttactctgacttggatccaaaccatatcaaggctttggatgctgatgttgtttccatcgaattctctaagaaggacgatgctaactacattgctgaattcaaaaactatccaaaccacattggtctaggtttattcgatattcattctccaagaattccatcaaaggatgaatttatcgccaagatttcaaccatcttgaagagctacccagctgaaaagttctgggttaacccagattgtggtttgaagactagaggctgggaagaaactagattgtctttgactcatatggtcgaagccgccaagtacttccgtgaacaatacaagaattaaggttttaaaaaggaagcaaagtaatgatattttctgaactttttgttttttattctgggattcaacatcggtgatttaatttttgtgttcacatttaaaagtttatttgggtaattttttgatatcaattttattacaaagccataactcttgcattttttttattatatttttatatacacgtacattctgtattattt

SEQ ID NO: 838 - DNA, 1754 bp, Saccharomyces cerevisiae
cggattctgacagagcaaattgaaactggatattatagtgctaagtatatagacttctgttttgttctttaaaactaaataaaaaaaattcaccctcctccccacggaataaaactacaacaagttctgttatcaaggacaattagtgtatattagttgttgtaacattttttactttctctttttttttttcattgattaattataactattcgttcgagatagtagttttccgattaataacatccctaggattttgactattccattgttgtataaaatatagagaaccagaaaaagaaaaatgggacaaattctatcaaacccggtaattgataaagagagccactccggtgctgactccttgaccgcgtttggactgtgtgcaatgcaagggtggcggatgtcaatggaggattcacacattctagagcctaatgttttgacaaagtccgataaggaccatattgcattttacggtatattcgatggtcatggtggcgctaaagtagcagaatactgtggtaataaaatagtggagatcctgcaagagcagaaatcgttccatgaaggaaatttaccaagggctttgattgatactttcataaacacagacgtgaaactgttacaagatcctgtgatgaaagaagaccatagcggatgtacggctacatccatattagtatcaaagtcccagaacttgttagtatgtggtaacgctggtgacagtagaaccgtactcgccaccgacgggaacgcaaaggcattatcatacgatcacaagcccactctagcaagcgaaaaatcacgtattgtggcagctgatggcttcgtagaaatggatagggtcaacggtaacttggcgctctctcgtgccattggtgattttgagttcaaatccaaccccaaattgggccccgaggagcaaatagtgacatgtgttccggacattctcgagcattctctagattacgatagggacgagtttgtaatcttagcctgtgatggtatctgggattgtttgacttcccaagattgtgtggacttggttcatctcggccttcgcgaaggcaagacattgaatgaaatttcttcgcggatcatcgatgtctgttgtgctcccaccacagaggggacgggtattggatgcgacaacatgagtatagtggttgtcgcgctgctgaaagaaggtgaagacgtcgctcaatggagcgaccgtatgaagtccaaggcccaccgcacatcagtgcgttcttttgcagacaagagaagaagggtgtttagttactacgatttttccaaatgtaacgacgaacaggtgttcgctatcactacgaagaaacctcaggacaaattcactcgcgaccacgaagccgctgtggcctcggtgactgccgccgataacgacgatccaatggacatagacgacacggacgctgacacagatgcagaaaatcttgacccttccagccaatccaagagcaagacctccggccccattgatctagcatccttggaggcgctacttggtgctacaggaggagtgaagacagacagcaacgggaacaaagtcacctacactcttccccagtctgccttggcccaactgctccaaaccatgggccatgacccggcttcctcccatcccgagaatgacagtaacactgaccacaaggccggccgttcccacttgcaatgaaggatcttccatccttcattatatatacatacctatatacgaaccgaacgaacag

SEQ ID NO: 839 - DNA, 2593 bp, Saccharomyces cerevisiae
ggcacgagtccccagcgcccgtcccatgaggtcctcctaaggtagacagcgcggatgtttccgatgcaaaggagaaaggatggacggtacagacatcgtagacaggattcgcgcattgccttgcacatctgtgccccatccaatctaccgtatctattgttatcgtcgtgtgtgctactcttttctccgacagcctcgacaagacggaatcagaaagtgcacacagtttaaaaaggaaaaaaaccgagtacaacaaaaacagggacaggttttgaaaagtgttcttttctttgcatcttctctatttcttctctctttcgtcctgtttggtatcttgttgtattttttctctcttttgtagtatatttatccgtgtttcctccttttcacagtcagttcatccgacctcatcgaatagcttccgtgcacgttccagtcttccctcccttctctgctccgtgatgtccatttcaaccagtttgaactcagcttccattcatttgagcagcatggacacccatcctcagctacactcactcactcgtcagccacactcgtcgtcaacagctatgtccaagaacgaagcccaggaatcttcgccctctctgccagcttcctcttcatcgtcgacttcggcatcggcatctgcgtcttccaagaattcgagcaagaacccttcctcttgggaccctcaagatgatctgctgctacgtcatttaaaggaggtcaagaaaatgggctggaaggatatttcgcaatacttcccaaacaggactcctaacgcgtgtcagttcagatggagaaggttgaagtctggtaacttgaagtcgaacaagactgctttgatcgacatcaacacctatacgggcccactcaagatcacccacggcgatgagactgccaacgctcagcaaaagcccagcaagaaggtagaagaaaacgtattaacggaagatactgctgagttcactacaacgtcatccatcccgattccctccagaaagacctcgttgccttcgtttcacgcatcgatgtcattttctcaatctccgtccaatgtgactcccactacgattgtctcaaacgctgcttcttccatgccgttcgctcctcccacgctgccggccgcactccctcatcatcctcatcaacacctacaccaccatccccatcataagactctaaagccaaggtcaaactctcactccttcaccaattctttgaaccaagaccccatcgttcggtctaatgatgaggagaagtatggattcattcctaaagtattcgttagatccagaagaagttcgtttgcctatccacaacaggtagcaataaccactactccgtcttctccaaactcttcgcatgtcttactaagctcaaagtcaagaaggggctcgcttgcgaattggtccagaagatcatcgtttaatgtttcaagtaacaacacttcaagacggtcttcaatgattcttgcaccaaattccgtgtcaaacatattcaatgtcaacaatagcggcagtaacactgcttctacttctaataccaactcaagaagggaatctgtcatcaagaaggaatttcagcaaagattaaacaacttaagtaacagtggaggtcctacctccaacaacgggcccattttccccaactcttatacctttatggatctcccacattcttcatcggtgtcatcgtcatccactttgcataagtctaaacgaggttcgttttctggccattctatgaagtcatcgtgtaatccgactaatctatggtcaaaagatgaagacgctttgctaatggaaaacaaaaagagaaacctatccgttatggaactatccattcttttgccgcagagaactgaggtggaaattcaatggagattaaacgccttgtcaagtgatgcggatatgttgtctcctacacattcacctcaaaaaactctgtccaagaaaacttgtccaagaatgttcaaaagtggttctaccactgatgatgacaaaggtagcgacaaagaggacgttatgggtgatggtagtaacgatgatgacgaagataatgtagacccgctgcaccgtgctaaacaatccagtaacaagactgtcttttcatccagcagttccaacatatcctccaaagacgtttcaccggatccgatcttttcaccggatcccgcagatgattcatcgaatacttctgatgctggttctaggtgcaccataacctccgataccagctcctcggctgcaaccatgaatcgcacccctaattccaaaaacccgcaagatattgctttgttaaacaactttcgttctgaagccattactccgagaccgaagccttcttccacaactacatccatcactaccgaaaccaccaataacatgataaaccactctagttctacaactactaccacaaacaacagtccgctgccaagcataaacactatcttcaaggatatgctgtgaggggaaaacttaaaatgaaaaaaaaataaaaataaaaaaatatcaacaacaaaaagaaaaatgtgaatttagcgggcttgttcattaaatttctatagtttagcatatttaaaagtata

SEQ ID NO: 840 - DNA, 470 bp, Saccharomyces cerevisiae
aaacaccacactctacctcctaccatactccataatgtcaagcccaactcctccaggtggtcaacgtactttgcaaaagagaaaacagggaagttcacaaaaagttgcggcatccgctccaaagaaaaacacgaacagcaataattcgattttgaagatttattctgatgaggctacgggactaagagtagatcccttagttgtgttgtttctagcggtcggtttcatcttttctgttgttgcattacatgttatttctaaagttgccggtaagttattttaagaattttcttcagtaatgattcagcttttatccaccctatttgacaaaacaagactacgagcaaacgaacgcgagaattgccttgttttgaataaattcctgccatcggataacgtccacggtactttttgattcaagtttctatagaagcacgtatatatctttaatacactaaatacttacttcc

SEQ ID NO: 841 - DNA, 902 bp, Saccharomyces cerevisiae
caacgtagctctaggaaatatgtctgaattaacagaggcggaaaagcgcaggttactaagggaaaggagacagaagaagtttagcaatggaggtgccagctccaggcttaataaaatcaccgggcaggcaagcagtcatttgaacgcagaatcacctttagacgctcctagcgctgcaaagaccacaccacctgcgagtgtgcattcggctactccagatatcaaagaagatagcaacgtagcgccccaattggacctattgaaacagctcgctgccatgcaaggccaaggtacgggtaaaagtacccctcaggactcctctacgcccgatctactctcactactaagttctatgaacactggcatgcccagtgcagagggtacaccatcgtttggtcaagcggctcctgcagccccgatcaatcaagctgctttggactaccatgattacttgctgaacagactgaaagcctggaccattcttgtgaagtgggtctttttcctactaccctatctatacctaatcacaagaccaaattcctctgtgtggccggcctatgcatttactcaatcagcttggtttgcacctttgcggaacccatcgaatttcactagaatttttgccacgtttgagttcctttccatatccatctactaccagctattgaagaatgtggaacacaagagcaagattaaaaatttacaagataccaataaacttgtcaagttagtttcactggtgcccgagggagtaattcccgtcgccaacctgaaggggaagctaattacccttttgcaatactgggatctattgtccatgctaatcactgacatttcgtttgtgctaattgtcttaggcttattgacgtacttataaattctagatagttcagtaatataat

SEQ ID NO: 842 - DNA, 1808 bp, Saccharomyces cerevisiae
aaaaaaaatccatatatagcattaaaaactcagtatcctagctttaagaaactgaaccagattccaacgacacaatgggtcacaagaagaacggtcacagacgccagataaaagaaagagaaaaccagaataaatttgaacgttccacatatactaataatgctaaaaataatcatactcaaacaaaggataaaaaactaagagcaggcttgaaaaaaatagacgagcaatataaaaaggcggtatcttctgctgcggcaacagattaccttttacccgagtccaatggttatttggaacctgagaatgagctagaaaagactttcaaagtgcaacaatcggaaatcaaatcgagtgtggatgtcagtactgcaaacaaagctttggatttatctttgaaggaattcggcccttatcatataaaatatgcaaaaaacggtacgcatcttttgattactggccgcaaaggtcacgtagcatctatggactggagaaagggacaacttcgtgctgagctgtttttgaatgaaacctgtcactcagcgacatatttgcaaaacgaacaatactttgctgtagcgcaaaaaaaatatacatttatttatgatcacgaaggtacagaattacatcgtttgaaacaacatattgaggcaagacatttagattttctaccatatcattacctgctcgtaactgccggtgagacaggttggttgaagtaccacgatgtttccactggccagttggtctcggaattgaggaccaaagctgggccaactatggcaatggcacaaaacccatggaatgctgtgatgcatctaggtcattcaaacggtacagtatccctctggtcaccatccatgcctgaaccattagtaaaattactttctgccagaggaccagtgaacagcattgctatcgatagaagcgggtattacatggcaaccacaggggctgataggtcgatgaaaatttgggatatcagaaacttcaagcaactacattctgtggaaagcttaccgacgccaggaacaaacgtttccatttcagatactggtctattggcattatctaggggccctcacgttacgttgtggaaggacgctttaaaattaagtggagacagtaaaccgtgcttcgggtccatgggagggaacccacatagaaacaccccttacatgtcacatttgtttgccggaaacaaagtagaaaatttgggattcgtaccatttgaagatttactaggtgtaggccatcaaacgggtattacgaatttgattgtacctggtgcaggtgaagccaattacgatgccttagaattaaacccattcgaaaccaaaaaacaaagacaggaacaggaagtcagaaccctattgaacaaactgccagcagatacaattactttagatccgaattccatcggttcagtggataaaaggtcttctaccataaggttaaacgctaaggatttggcgcaaactacaatggatgctaataataaagccaaaaccaacagcgacattccagatgtaaaacctgatgtgaaaggtaagaattcgggtttgcgttcctttttgcgtaaaaagactcaaaacgttattgatgaaagaaaattaagagtacagaaacaactggataaggagaaaaatattcgtaaaagaaaccaccaaatcaaacaaggcctaatttcagaagaccacaaggatgtcatcgaagaggcattgagcagattcggctaaatcgaaatatctttaaaaaaaaaacttaaatgattatgtatgtatatataaaatagataatcattatta

SEQ ID NO: 843 - DNA, 1659 bp, Saccharomyces cerevisiae
tctaaagaatataatagaaaaagctaataggaaaagtggtcattttctgttgatatgttacataggataaacccagtacggttttctatgcaatcttgccaaagatacttctcgaagttggtatcgccattggaacagcataaaagtaatacttttactaatagagtcagaatccccattgaggcaggccaaccactgcatgagacaaggccgttccttataaagtcgggcgagttgacaccaggcatttcagccttggaatactatgaaagaagaattaggttggcggaaacattgcctcccaaaagttgtgtgattttagctggtaacgatatccaatttgcatctggagcagtattttatccgttccaacaggaaaatgacctgttttatcttagtggttggaatgaacctaattcggtcatgattttagaaaagccaacggatagtttaagtgatacaattttccacatgctggttccgccaaaggatgcgtttgctgaaaagtgggaaggatttaggtctggggtttatggtgttcaagaaattttcaatgccgatgaatctgcttccattaacgatttgtctaaatatttgcccaaaataattaacaggaatgatttcatctattttgatatgctatcaacttctaatcccagttcgtccaattttaaacacatcaagagcctgttagatggcagtgggaatagcaatcgatcattgaattccattgcgaataagaccatcaaacccatcagtaaaagaattgcagagttccgtaagatcaagtcccctcaagagttgagaattatgaggagagctggccaaatatcaggaagatcgttcaatcaagcctttgctaaaagatttaggaatgagagaactttagattcctttcttcattacaagtttatatccggtggttgcgataaggacgcatatatccccgtggtcgctactggttcgaattctttgtgtatccattacacaagaaacgatgatgtgatgtttgacgacgaaatggttcttgtagacgctgctggctccttgggtggttattgtgctgatatttcgagaacgtggcccaatagtgggaaattcactgatgcacaaagagatctctacgaagctgtattaaatgttcagcgtgattgcattaagttatgtaaagctagcaataactattccctccacgacatccatgaaaagagtatcacactcatgaaacaggaattgaaaaacttgggcatagataaagtctccggttggaatgttgaaaaattgtatccgcactatattggacacaatttaggtctagatgttcacgatgtgcctaaagtttccaggtacgaaccattaaaggttggacaagttattactattgaaccgggtttatatattcctaacgaggaatcatttccatcttactttagaaacgtcggaataagaattgaagatgacatagccattggtgaagatacttacactaatttaactgttgaagcagtgaaagaaattgacgatttagaaaatgtcatgcaaaatggcttatctacaaaattcgaggaggaccaagtggcaccactgtaatgttattgctaaattgagtacaccctgtatatacagatacataacttatcgatttaaggtcttttaata

SEQ ID NO: 844 - DNA, 1843 bp, Saccharomyces cerevisiae
tctagctgtatattacctttagcatattcaaacatcttaaccggaaaatatctcagcaaaaaaaacagcaacagtcagagtaaaaattgcaagatgattgacgatactgagaactccaaaattcatttggaaggtagccataaaacaggaaagtatacgggctatggtactacacataaaatcagagctcagttaaactttaatgatgaaaagaaatggaagaagttttctagcagaagactagaactcattgactcatttggcttgagccagcacaaagcaagtgaacaagatgataatataagacaaatagccaccatattaaggagtgaatttgagtaccctgatacgttttcggcagaatttgaaaagttggttaccgctgctgttcaatcggtgagaagaaacaggaaacgttccaagaaaaaattattagactctaagaagaaaatagcccgtggtaaagttcaaaaaattcctttgtctccccccagctcaagtaatatggggtcttgttcagcttccaatgcatcaagctctgacgaagaagccagcgtgaaggaagaacctgctgagcacgctcttccttctcttaatactataacatcacaaaaattgttaccttatccgaatggccgcactcttccacctgtaccaactcaagttcgctctttacttaagaagaacgcatctcttcttcgtgatccatcggcaccgtatgcgcacggcggcgatgaaaaattacaaaagtttgatatagaagatcagcctctagaaagtgaacaagaatacgactttattgccaaatcaataattgttgaaattgtaaataatgctattccactacctgaacaaattcaaagagataagttcattagaccaaatttaacgaaaaaaaaagggtgccaaagcaaagttgtaatatccaacaacttgagaaaactcatcctgtcaaagatacataactcaaggacgtgcttggagatgtctaaggatgaaagaaatttggattcttttgctaatctagaaacgctgggcaaaaattcactaatggcttccatttcccttgtggtagaaaacagcttttcacatttaccgtcttctactaagcaatatcttactgaacggctgtcatcaatcgaatttttgactattctatcgcaaaggctatttatgcccgctacacgtcaactattcgctgacctatcacaagaaaaaattcaggtgagagtgctgaatctcatactgggatctcttgtcaaagattatgggtttgatgcatctttggcaccaatcaacgaaattatctatcacatgacactccatcaatatcccttggtttgtagtaataaacagtccaatccaatgaggccacactccacatctgaggtcttgagtgcacattcttcaacgaaagatgcaagcactcccggtaaagaagagcctcgagtgacgaggtcaagcacatcggcagatagcactatcattacattgccttcaattgaagtcccaaatacgtacgatgatgacaggttaaagatgttgagcgcgatatcgttgcagattgaaaattccaccttttccaaaccattcagtactatttcaaaataaataggcccgcttgcatcatccccacctgcattactatgaactatttatcatagcttatttttcctctatcatcattgtaacttgtacaagaatgttcagtctgtaaatctcgccgctcattctctactagcactttacaacgttgacagccactgtatgtgtaatacagtgaaccgccgactcttcggatttaataacacagatttatttagaataatctacacatgtttac

SEQ ID NO: 845 - DNA, 1098 bp, Saccharomyces cerevisiae
ttcgtttcttttgatgttgtcattttcagaaatatatatatatgcgcttaaatacacaagctaaaacaacatagttaggattgccaaaggtttcttttctactcaatttggtctaactcttttcatattaatagcgccaaccagctagtgtttaccagatcagtggaaaaacataaaacaataaaaacaatattcggaatgggattgactactaaacctctatctttgaaagttaacgccgctttgttcgacgtcgacggtaccattatcatctctcaaccagccattgctgcattctggagggatttcggtaaggacaaaccttatttcgatgctgaacacgttatccaagtctcgcatggttggagaacgtttgatgccattgctaagttcgctccagactttgccaatgaagagtatgttaacaaattagaagctgaaattccggtcaagtacggtgaaaaatccattgaagtcccaggtgcagttaagctgtgcaacgctttgaacgctctaccaaaagagaaatgggctgtggcaacttccggtacccgtgatatggcacaaaaatggttcgagcatctgggaatcaggagaccaaagtacttcattaccgctaatgatgtcaaacagggtaagcctcatccagaaccatatctgaagggcaggaatggcttaggatatccgatcaatgagcaagacccttccaaatctaaggtagtagtatttgaagacgctccagcaggtattgccgccggaaaagccgccggttgtaagatcattggtattgccactactttcgacttggacttcctaaaggaaaaaggctgtgacatcattgtcaaaaaccacgaatccatcagagttggcggctacaatgccgaaacagacgaagttgaattcatttttgacgactacttatatgctaaggacgatctgttgaaatggtaatcctctaaaatcgaacatatttgagtaataattctcagatacagtcctattctatattcgccacaaaacaagtaatgatgctaaaaaacgacacatttataaaatcacatcttattgattaaataaatacgtagatagatttttttt

SEQ ID NO: 846 - DNA, 479 bp, Saccharomyces cerevisiae
ccttcgaacatcatcattacattagaattatggtcaccacgctaactcccgttatttgtgaatccgctccagctgctgcggcttcatactcccatgccatgaaagtgaacaatttgattttcctttctggccaaattccagtgaccccagacaacaagttagttgaaggttccattgctgataaggctgaacaggtgattcaaaacattaagaatgttctagaagcaagcaattcctcattggacagggtcgtaaaagttaacattttcttggcagatatcaatcactttgctgagtttaactccgtttacgccaagtacttcaatactcacaaacctgccagatcatgcgttgctgttgcagcattgccattaggcgttgacatggaaatggaagccattgctgccgaaagagattaagggcaagtcttaatagcgtcttttagaacttaggattttactacgtattttttagcttta

SEQ ID NO: 847 - DNA, 443 bp, Saccharomyces cerevisiae
cataacagaacaaccaaagatggcccaacgtgttactttcagaagaagaaatccatacaacacccgttctaacaaaatcaaggttgttaagaccccaggtggtattttgcgtgcccaacatgtcaagaagttagctaccagaccaaagtgtggtgactgtggtagcgctttgcaaggtatctctactttgagaccaagacaatacgccactgtttccaagacccacaagactgtttccagagcttacggtggttccagatgtgccaactgtgttaaggaaagaattattagagctttcttgatcgaagaacaaaaaattgtcaagaaggttgtcaaggaacaaaccgaagctgccaagaaatctgaaaagaaggctaagaaataaactttaagaaaatgttacttttcttatgtacctaattaactgttttatataaagcacg

SEQ ID NO: 848 - DNA, 1778 bp, Saccharomyces cerevisiae
taagcttaactgtaatagtattcacaacaatatccatataaatttcgcatataaaacatcctatcctctattataacgatttataagaatgttggaagagggaaataatgtttacgaaatccaagacttggagaagagatctcctgtaataggctcaagcttggaaaacgaaaagaaggtagccgcttctgaaactttcacagcaacttccgaagatgaccaacagtatatcgttgaatcatcagaggccacaaaattatcgtggttccataagttctttgccagtttgaatgcagaaacaaagggtgttgaaccagttacagaggatgaaaaaacggacgattccatactgaatgctgcgtccatgtggttttcagctaatatggtcattgcatcatatgctttgggtgccttaggacccatggtgttcggtctaaattttggtcaaagtgttttagttatcatatttttcaatataatggggttgatatttgttgcgttcttttctgtctttggtgcagaactgggcttaagacagatgattttatcaagatatctggttggtaatgtaacggcaagaattttctctcttattaacgttattgcttgtgtcggttggggtattgtgaatacctcagtatccgcacaactgctgaatatggtgaatgaaggctccggccacgtctgtcctatttgggccggttgtctgatcattattggtggtaccgtgcttgtgactttttttggttacagtgtcattcatgcatacgagaaatggtcatgggtacccaattttgccgtctttttggttattattgcccaactatcgagatcaggaaagtttaaaggtggtgaatgggtaggaggtgcaactactgcaggtagtgttctttcttttggttcatctattttcggttttgccgcaggatggacgacctatgcagctgactacactgtttatatgccaaagagtacaaacaagtacaagatttttttctccctagttgctggtctagcgttccctctatttttcaccatgattcttggtgctgcttctgctatggctgctcttaatgacccaacctggaaggcatattatgacaaaaatgctatgggtggtgtcatatatgctatcctggttcctaactctctgaacggatttggtcaattctgctgcgttttgttagctctgtccactattgcaaataatattccaaatatgtatactgttgctttatccgctcaagctttgtgggcacctttggctaaaataccaagagtagtctggacaatggcaggtaatgctgccactttaggtatttccatccctgctacctattactttgatggctttatggagaatttcatggattctatcggttactacttagctatttacattgccatctcatgttcagaacatttcttctacagacgttccttcagtgcttacaatattgatgattgggataattgggagcatctacctatcggtatcgcaggtactgctgccttaattgttggtgccttcggtgttgcattgggtatgtgtcaaacctattgggttggtgaaattggccgcttaattggtaaatatggtggtgacattgggttcgagttgggtgcaagttgggccttcatcatctacaacatcttaagacctttagaattaaaatacttcggtcgttaggaagtaatgattagggcgatcatttccccgtgcacatttcacgtcatgtatcatagatgcaatttcatgtaaactatttagacatctc

SEQ ID NO: 849 - DNA, 1093 bp, Saccharomyces cerevisiae
tctaaactttggcattttactcctattaacggtttgaatctttgaaaatagaaaagaaaggataggtttctaaaaaattcaatagaaaaatggatttggtgaaccatctaaccgatagactactgtttgcaatcccaaagaaaggtcgtttatattctaaaagtgtttctattttgaatggtgctgatattacctttcaccgctctcaaagattagacattgcactaagcacaagcttacctgtagcgttggtctttctgcccgctgcagatattccaacttttgttggtgaaggtaaatgtgatcttggtataactggtgttgaccaagttcgtgaatctaacgtcgacgtagacttagcaatcgatttgcaatttggtaactgtaaattgcaggtacaagtccccgtaaatggcgagtataaaaagccagaacagttaattggcaaaaccattgttaccagtttcgtgaaacttgctgaaaaatactttgccgatttggaaggtactactgttgaaaaaatgaccacaaggataaagtttgtcagtggttccgtggaggcatcatgtgctctgggaattggtgatgctattgtagatcttgtagagagtggtgagacaatgagggcagcaggtttagttgatattgccaccgtcctaagcacaagtgcctacctaatagaatcaaagaacccaaagagcgataagagtttgattgctactatcaaatcaagaattgaaggtgtcatgaccgctcaaaggttcgtttcatgtatttataacgcacctgaagacaagctgcctgaactgttgaaggtgacgcctggccgtagagcaccaaccatttccaaaattgacgatgaaggatgggttgctgttagttccatgattgagagaaaaacgaagggtgttgttttagatgaattgaaaagactcggcgcatctgatatcatggttttcgaaatttctaattgtcgtgtataagatagaacagaaaaagggaagccaaatcccgattaattttgtattttttataggcaataatttgatagagttctatcttattctaagttacccctcatgacttcccaagt

SEQ ID NO: 850 - DNA, 1754 bp, Saccharomyces cerevisiae
agccaatactctctccatcgcttaagctcacatagctatcgcattttatcacagaagctttcattttttttaacttttacatgccaatggatttccaacctacatcaagtcattcgaactgggtcgtgcaaaagttcggtggtacatctgtcggtaaatttcccgtccaaatagtggatgacattgtgaagcactattctaaacctgacggcccaaacaataatgtcgctgtcgtttgttccgcccgttcttcatacaccaaggctgaaggtaccacttctcgtcttttgaaatgttgtgatttggcttcgcaagaatctgaatttcaagacattatcgaagttatcagacaagaccatatcgataatgccgaccgcttcattctcaatcctgccttgcaagccaagttagtggatgataccaataaagaacttgaactggtcaagaaatatttaaatgcttcaaaagttttgggtgaagtgagttcacgtacagtagatctggtgatgtcatgtggtgagaagttgagttgtttgttcatgactgctttatgtaatgaccgtggctgtaaggccaaatatgtggatttgagccacattgttccctctgatttcagtgccagcgctttggataacagtttctacactttcctggttcaagcattgaaagaaaaattggccccctttgtaagtgctaaagagcgtatcgttccagtctttacagggttttttggtttagttccaactggtcttctgaatggtgttggtcgtggctataccgatttatgtgccgctttgatagcagttgctgtaaatgctgatgaactacaagtttggaaggaagttgatggtatatttactgctgatcctcgtaaggttcctgaagcacgtttgctagacagtgttactccagaagaagcttctgaattaacatattatggttccgaagttatacatccttttacgatggaacaagttattagggctaagattcctattagaatcaagaatgttcaaaatccattaggtaacggtaccattatctacccagataatgtagcaaagaagggtgaatctactccaccacatcctcctgagaacttatcctcatctttctatgaaaagagaaagagaggtgccactgctatcaccaccaaaaatgacattttcgtcatcaacattcattccaataagaaaaccctatcccatggtttcctagctcaaatatttaccatcctggataagtacaagttagtcgtagatttaatatctacttctgaagttcatgtttcgatggctttgcccattccagatgcagactcattaaaatctctgagacaagctgaggaaaaattgagaattttaggttctgttgatatcacaaagaagttgtctattgtttcattagttggtaaacatatgaaacaatacatcggcattgctggtaccatgtttactactcttgctgaagaaggcatcaacattgaaatgatttctcaaggggcaaatgaaataaacatatcctgcgttatcaatgaatctgactccataaaagcgctacaatgtattcatgccaagttactaagtgagcggacaaatacttcaaaccaatttgaacatgccattgatgaacgtttagaacaattgaaaagacttggaatttaaatccacctttcttcttcactttaatgatagaatattaattttccctttatatatatatatatatatatatacgcgcacatatatttacat

SEQ ID NO: 851 - DNA, 534 bp, Saccharomyces cerevisiae
atgccaccacaggcataaaaattcaaaacggtatgcaacctatcatcaagggagcagtaagctccacatttaaacgtgctctatacaatttcggtatcaaagaaaagaagagtgtcaatattgaaatggggagaacgcaacaaacaaagaaaatcgatcagtctttgtccaaaaaacttcccaaaggtactatctacgatccatttgacttctctatgggacgaatccatttagatagaaaatatcaggcaaacaagaactcaaacaggaacgatataatgaagtccggtgcaaatccactagaattttatgcaagaccaagaatactttcaagatatgtgacctccacgggaagaatccaacatagggatatcacaggcttatcggcaaagaatcaaagaagactatcgaaagccattagacggtgccaggcaataggattaatgtgaactgtactacactaatgcttctccacatgaaataattaagaaaataaggcatttcatagttctgtctgtaaatatacaatatgta

SEQ ID NO: 852 - DNA, 1344 bp, Saccharomyces cerevisiae
acttagataattgtcggcttcacgtaattaagacgtattaactcaaaggaaaagaaaagagggaatatggtaaaggagacggagtattatgatattttgggcatcaagcctgaggccacgcccactgaaatcaaaaaggcctatcgtagaaaggctatggaaacacatccggacaagcatcctgatgacccagatgctcaagcaaagtttcaagccgtaggcgaggcctaccaagtcttaagtgatccagggcttcgttccaagtatgaccagtttggtaaggaggatgctgttcctcagcaaggatttgaagatgcttctgaatactttacagcaatattcggtggtgatggcttcaaagattggattggagaattttctttgttcaaagagctaaacgaggcaacagaaatgtttggaaaggaagatgaggagggtacagcagccactgaaaccgaaaaagcagatgagagcactgatggtggaatggttaagcatgacactaataaagctgaatctttgaaaaaagataaattatcgaaggagcaaagagagaagctaatggaaatggagaaaaaaagacgggaagatatgatgaaacaagtcgacgagttggcagaaaaactgaacgaaaaaatctctaggtacttaattgctgtgaagtccaataacttggaggaatttacgcgaaaactagatcaagaaatcgaggatttgaaattagaaagttttggtctagagttattgtatttattggccagggtttacaagacaaaagcgaataattttatcatgtccaagaagacttacggaatttctaaaatattcactggtacacgcgacaatgctagatctgttaaatcagcatacaatttattgtctacaggcttagaagctcaaaaagccatggaaaaaatgagtgaagtcaatactgacgaactagaccaatatgaacgtgccaaatttgagtccacaatggctggtaaggcacttggtgtcatgtgggctatgtcgaaatttgaactggaaagaaaactaaaagacgtttgcaataagattctaaacgataaaaaggtcccttccaaggaacgtattgcaaaggcaaaagcaatgctgtttattgcccacaagtttgccagtgctagaaggtcaccagaagaagctgaagaagctagagtttttgaagagctaatcctaggtgagcaggagaaggaacacaaaaaacatactgtggccagataagctcagcaagttaataacgcctcatgtatatttttcatatatagcgcaatcaattacaaagcgaagaaaaaaaaccctatgtattctagacatatcacaggc

SEQ ID NO: 853 - DNA, 619 bp, Saccharomyces cerevisiae
caggtttttatattcttgacactagctagaccatagtatcgaaggattcaaatacactaaagtatcagataatgttcagcctacaagacgtaataactacaaccaagaccaccttggcagcaatgccaaaaggttacttaccaaaatggttacttttcatttccattgtatcagtcttcaattctatccagacttacgtttctggtttagaattgacacgtaaagtctacgaaagaaaacccactgaaacaacccatttgagtgcaagaactttcggtacttggacctttatttcctgtgttatcagattctatggggctatgtacttgaatgaaccacacattttcgaattggtcttcatgtcttatatggttgccctattccacttcggctctgaattattgatctttagaacttgtaagttgggaaagggattcatgggtccattggttgtctcaaccacctctttggtttggatgtacaaacaaagagaatactacactggtgttgcttggtaattctgatgtaagggcaagcatatcctgtaaaaaaaattatatagagatgatttatttatataatgcctatagcaacctttatccaaaccttccgtacatta

SEQ ID NO: 854 - DNA, 1560 bp, Saccharomyces cerevisiae
aaaaagaacaattcccaatgtctgctccagctcaaaactacaaaatcgctgatatctctttggctgccttcggtagaaaggaaatcgaattggctgaacatgaaatgccaggtttgatggccatcagaaaggcttacggtgacgtccaacctttgaaaggcgcccgtattgctggttgtttgcacatgaccattcaaactgctgttttaattgaaactttagttgctttgggtgccgaagttacctggtcctcttgtaacatctattcgactcaagatcatgccgccgctgctattgccgcttccggtgttccagtttttgcctggaagggtgaaactgaagaagagtatttgtggtgtattgaacaacaattgtttgccttcaaggacaacaagaaattgaacttgatcttagatgatggtggtgatttaaccactttagttcatgaaaagcaccctgaaatgctggaagactgctttggtctttccgaagaaactaccaccggtgttcaccacttatacagaatggtcaaagaaggcaagttaaaggttcctgccattaacgttaacgactccgtcactaagtccaagtttgacaacttgtacggctgtagagaatccttagtcgacggtattaagagagccactgatgtcatgttggctggtaaggttgccgttgttgctggttacggtgatgtcggtaagggttgtgctgctgccttaagaggaatgggtgctcgtgtcttggttaccgaaattgacccaatcaacgctttacaagctgccatggaaggctaccaagttgttaccatggaagatgcatcccacattggtcaagttttcgttaccaccactggttgtagagatattatcaacggtgaacatttcatcaacatgccagaagatgccattgtttgtaacattggccatttcgatatcgaaattgatgtcgcctggttaaaggctaacgctaaagaatgtattaacatcaaaccacaagtcgaccgttacttgttgtcttctggtagacacgtcatcttgttggctaacggtagattagttaacttgggttgtgctactggtcactcatctttcgttatgtcttgttccttctctaaccaagtcttagctcaaattgctttgttcaagtctaacgataagtctttcagagaaaagcacattgaattccaaaagacaggcccattcgaagttggtgtccacgttttgccaaagatcttggatgaagctgtcgctaagttccacttgggcaacttgggtgttagattgactaaattgagtaaagtccaatctgaatacttgggtattccagaagaaggtccattcaaggccgaccactacagatattgatcaattcaattcccatttcagttcttctttctcactattttttaatgttcaaaaactcaacggtttgatcatcaaaaaagatcataaataaattgcaaatataaaaacaacagctaacaatcctatcacagtattaatactaatacatgtgatactaagttacgttatcgaaaagatagatcctgtataccta

SEQ ID NO: 855 - DNA, 1940 bp, Saccharomyces cerevisiae
acagtaacttgacagaaccaaatatgccaccagtatctgcgtcaaaggccaagagagatgctaagaaagctgaaagagaggctaagaaagccgctgccggtaaaaccatcagaaagctaggtagaaaaaaggaggctgctgctgaagaatcggaggtagatgcagccgctagagaaatcaagatgatgaagttgcaacaagataaggatggtctttcagatcgtgttgtcactggtgttttgagttcattggagacttcccgtgatatcaagctatcttctgtttctttactgttccacggtaaagttttgatccaagattctggtttagaattaaactacggccgtagatatggtcttctgggagaaaatggttgtggtaagtcaacattcttaaaggctcttgctactagagaatatcctattcctgagcatattgatatttatttattggacgaacctgcggaaccaagtgaattgtcggccttggactacgttgtcactgaagctcaacacgaattgaaaagaatagaagacttagtcgaaaagactatcttggaagatggtcctgagtccgagttattagagcctctatatgaaagaatggactctttggatccagacacctttgaatctagagctgctatcattttgatcggtctaggtttcaacaagaagaccattttgaagaaaaccaaagatatgtctggtggatggaaaatgcgtgttgcgttggcaaaagctcttttcgttaagccaactctattattgttggatgatcctactgcgcatctggatttggaagcttgtgtttggttagaagaatatttgaagagatttgacagaactttagttttggtgtcccactctcaagatttcttgaacggtgtttgtaccaatatgattgacatgagagctcaaaaactaactgcttacggtggtaactatgattcttatcacaagacaagatccgaattggaaaccaatcaaatgaaacaatacaataaacaacaagaggaaatccaacatattaaaaaattcattgcatctgctggtacttatgctaacttggtgaaacaagctaaatctagacaaaaaattttggacaagatggaagcagatggtttagtccaacctgtcgtccctgacaaagttttctcatttagattcccacaagtggaaagattgccaccaccagttttagcattcgatgatatttcatttcattatgagagcaacccatccgaaaacttgtacgaacatttgaactttggtgtcgatatggactcacgtattgcccttgtcggaccaaatggtgttggtaaatccacattgttgaagattatgaccggtgaattgaccccacaatctggccgtgtttctagacatacccatgtcaagttgggtgtctactcgcaacactctcaagatcaactggacttgacaaaatctgctttagaatttgtccgtgacaagtactctaacatctcacaagatttccaattctggagaggccaactaggtcgctacgggctaaccggggaaggtcaaaccgttcaaatggctaccttgtcagaaggtcaacgttctcgtgtcgtctttgctttattagctttagaacaaccaaatgtcctactattagatgaacctaccaatggtttggatatcccaaccatcgactccttggccgacgccatcaacgaatttaacggtggtgtcgtcgtcgtttcgcatgatttcagattattagacaaaattgcccaagatattttcgttgtggaaaacaagaccgctaccagatgggacggatccattttgcaatataagaacaaattggccaagaacgttgttttgtaattgtgaagttgatctgcgccgtgcacgtttttacttccccttttatgtattttaatagcaataatttatataactaatcaatca

SEQ ID NO: 856 - DNA, 812 bp, Saccharomyces cerevisiae
tgacggcgtctggggatttcaacaatgagcagcgaggactacgggtatgattacgacctactatttaaaattgtactgatcggtgattccggggtagggaaatccaatctattgtcaagatttacgaagaacgaattcaatatggattcaaagtctacaattggggttgagtttgccaccagaactttggaaattgatggcaagaggatcaaggcgcagatttgggatactgcgggccaggaacgttacagagccattacttctgcttattatagaggagctgtaggtgccttgatcgtttacgatatcagtaaatcaagctcatatgaaaattgtaatcattggttatcagaattaagagaaaatgcagatgacaacgtcgcagtggggcttatcggtaacaagtctgatttggcccatttacgtgctgtacctacggaggagtccaagacttttgcacaggaaaatcagttattattcacagaaacaagtgctttgaacagtgaaaacgtggataaggcttttgaagagttaatcaataccatctatcaaaaggtcagcaagcatcaaatggaccttggtgactccagtgccaacgggaatgccaatggtgcgtccgctcctaatggaccaacgattagtctgacaccaacaccaaacgaaaacaaaaaggcaaatggaaataactgttgttaagagatattttgcagcagttgcgcacttgcatgtgaatgactcttctcccctttaattctgtgctatatttttacaattttctgctgacatatagtttatatacatatagaacgcat

SEQ ID NO: 857 - DNA, 1382 bp, Saccharomyces cerevisiae
ggatttgggccactgttgtaatcgcaagtagagagcatcctagataagagctactatattttgtataaggtcgtttcctgcacaataataaattatctacactgaaatatggctggcgacaaccctgaaaacaaggatgcttccatgttagatgtcagtgacgcagctagcaacactacgattaatggtaaacatagcgccgattcaactaatgaggcttccctggcgtacactttttctcaaatgaacgtagataatcctaatgaattagagcctcagcatcctttaagacataaatcgagtttaatttttaacgacgatgatgacgatgaaatacctccatattcaaaccatgcggaaaatggttctggggagacctttgattctgatgatgatatcgatgctagcagctcgagtagtatcgacagcaacgaaggcgatatccacgatgcagatatgacaggaaataccttgcaaaaaatggattatcaaccatctcagcagcctgactcacttcaaaatcaaggctttcaacagcaacaagaacagcaacagggcactgtggaaggcaagaaaggaagagctatgatgtttccagttgacatcacttggcaacaggggggtaataaagtgtacgttactgggtcttttacgggatggagaaagatgatcgggttagtaccagtccctggacagcctggacttatgcatgtaaaattacagctgcctccaggtactcatcgtttcagatttattgttgacaatgagttaagattcagtgattatttacctaccgcaaccgaccaaatgggaaacttcgtcaactatatggaagtgagcgcaccgcctgattggggcaatgaacctcagcagcatctggctgaaaaaaaagcgaatcatgtagatgatagcaaattgagtaagagacctatgagcgctcgctcgagaatcgcattggagatagaaaaggaaccagatgacatgggcgatggttacactcgttttcacgatgagacccccgctaaacctaatttagagtacactcaagatatacctgctgtgttcaccgacccaaatgtaatggaacaatattatttgacacttgatcagcagcaaaataatcaccaaaatatggcctggttgactcctccacaactgccacctcatttagaaaacgtcattttgaatagttactcaaacgcgcaaactgataatacgtctggcgcccttcccattccgaaccatgttatattgaaccatctggcgacaagcagtattaagcataatacattatgtgtcgcatccattgttaggtataaacaaaaatacgtgacccaaatactgtatacaccattgcaatagatatgattatagagcttata

SEQ ID NO: 858 - DNA, 1003 bp, Saccharomyces cerevisiae
gtgattgtcatttttagttgtctatttgattcaatcaaaaaacaaaaataaaactatatattaaaaaatggttgaatcagatgaagatttcgcacctcaagaattcccacacacggacacagacgttatcgtaaatgaacacagagacgaaaatgacgggtatgcctcagatgaagttggtggcacattaagcagaagggcctcaagtatattttctataaatacaactccattggccccccctaatgctactgatatccaaaaatttacaagtgacgaacatcatttcagcatgatgaggaatttgcatatggcagattacattactatgctgaatggattttctgggttttactctattgtaagttgtctgagatttacgcttacaggtaaacctcattacgtccagcgtgcccatttctttattttattgggtatgtgtttcgatttccttgacgggagagtagcacgtctgagaaataggtcttccttaatgggtcaagaactggactctttggccgacttggtttcctttggtgtggctccggctgcaattgcttttgccattggatttcaaactacattcgatgtcatgattttatctttctttgtcctttgcggcttagcgagattagcaaggtttaatgtcaccgttgctcaattacccaaagattctagcacaggtaaatctaaatattttgagggattgcctatgccaaccactctagctttggtgttgggtatggcatattgtgtcagaaagggtttaatttttgataacatcccattcggcatttttagagaagaccaaatattggaatttcatccaattattctagtattttttatccatgggtgtggaatgatttcgaagagcttgaaaattccaaagccatagtagtttttgttcatgcctggcgtcaaaaaaaatttgtacatataactttttattctacttttatatgctggtctaaatattactcaattcttgccagctggtata

SEQ ID NO: 859 - DNA, 347 bp, Saccharomyces cerevisiae
gaaaaggtaaggggcgcaaagcataaaacaggtggtattatcgatcaacagtatcataagaatggcagcttcagttccaccaggaggtcagcgtatcttgcagaagagaagacaggcacaatccattaaggaaaagcaagcaaaacaaacgcccacttccaccagacaggctggttacggtgggtcttcaagctcaattttgaagttatatacggacgaagccaatggattcagagtcgactcccttgtcgtattgttcctatctgtcggtttcatcttctccgtgattgctttgcatctattgacgaaatttacacacattatataatatcagtaatttttttaca

SEQ ID NO: 860 - DNA, 865 bp, Saccharomyces cerevisiae
ccaaaccaaaacaaaacaaaaacaaaaacaaaaacaggctaagccgattcaattaaaaccgctcatacgtatacaacacatacacacatacaagaatggccagcatagacgcattttcggaccttgagcgccggatggacgggttccaaaaggacgtggcccaggtactggcacgtcagcaaaaccacgcgcgccaacagctgcaacagttccaagcggaaatgcgtcaattacataaccaacaccaacatctcatagatgaactgcaacggcttgccacccagcgcaccgctctgcagcaacaaatacatgcggcccaacaagctacaaataccaccagagagcagtggagaagctatcacgagcgtgaatctgagttatctagacggcagtcgaccttagcagcccaatcgcgcgagctggactcgctgctgcaacagcgtggtaaagagtgtgtccaattacgcgcacgttgggctgcgcagtcgggtaacgatgccgcagaggtcgcactgtacgaacggctgttgcagcttcgtgtactacccggagccagcgatgtgcatgacgtacgtttcgtattcggcgatgattcacgctgctggatcgaagtcgcgatgcacggagaccacgtgatcggaaactctcacccggcgctggaccccaagagtcgggcaacacttgagcacgtgcttaccgtccagggcgacctcgcggcatttttagtcgtggcccgcgatatgcttctggcatctttataacgcctttatacgcatctgttcagtttattctgggcctatgatttagatgaggaataaattggttcttactgtctatacataacttttacaaggacccattctat

SEQ ID NO: 861 - DNA, 2423 bp, Saccharomyces cerevisiae
atgatgatgtggcaacgatatgcaaggggtgcgccacgctcattgacatcactctcatttggtaaagctagccgcatatcaacagtgaagccagtgcttcgctcgcgcatgccagttcaccagcgtttgcagacgttatctggtctggcaaccagaaacacaatacaccgttctacccaaatacgttccttccatatctcatggacaaggttaaatgaaaataggccaaacaaagagggtgagggcaagaacaatggtaataaagataataatagcaataaagaagatggcaaagacaaaagaaatgagtttggttcattatcagaatacttcagatctaaggaatttgctaatacgatgtttttgaccatcggattcacaattatatttactttgctcacaccttccagtaacaactcaggagacgactctaaccgcgtcttgactttccaggatttcaaaacaaaatacctggagaagggtcttgtgtccaagatttacgtcgttaataagtttctcgtagaggccgaattagtcaatacaaagcaagttgtatcgttcaccattggttcagtagatatttttgaggaacagatggaccagatccaggacctcttgaacattcctcctcgggatcgtatccccatcaaatacattgagagatcttctcccttcacatttttgttccccttcctgcccaccatcattctgcttggtggcctttacttcataaccagaaaaataaatagttcaccaccaaatgccaatggtggtggtggaggaggcctcggcggcatgtttaatgttggaaaatccagagcaaagctcttcaataaggaaacagacattaaaatttcatttaaaaatgttgccggttgtgatgaagctaaacaggaaatcatggaatttgttcactttttgaagaacccaggtaagtacactaaattgggtgccaagattccacgaggcgctattctttctggacccccaggtaccggtaagactctcttggccaaggccaccgcaggtgaggcgaacgtgcccttcttgtcagtatcaggttctgagttcgtcgaaatgttcgttggggtgggtgcttcacgtgtaagagacttgtttactcaagcaaggtctatggccccctcgattatctttatagatgaaattgacgctatcggtaaagaaagaggcaaaggcggcgctctcggtggcgctaacgatgaaagagaagctacgctgaatcaattattggtggaaatggacggattcactacttccgaccaagtcgtagtccttgcgggtacaaataggcccgatgtgttggataatgctttgatgagaccgggaaggttcgatagacatatccaaattgattctcctgatgtcaatggtaggcagcaaatatacctggttcacttgaaaagactgaatctggatccccttcttacagatgatatgaataatctttctgggaaattggctacgcttactccaggttttactggtgcagatatcgctaatgcttgtaatgaggctgcattaatcgctgccagacataatgacccatatatcactatccatcactttgagcaagccattgaaagagtcattgcgggactagagaagaaaacaagagtcctttctaaggaagaaaaaaggtcagtggcctatcatgaggcaggacatgccgtttgtggttggtttctaaaatatgcggatccacttctgaaagtaagcatcatcccgcgtggacaaggtgctttaggctatgcccagtacctaccaccggatcaatatttgatatctgaggagcaattcagacatagaatgatcatggctcttggtggccgtgtttctgaggagctacattttccatcggtgactagcggtgctcatgatgatttcaaaaaggttacacagatggcaaatgccatggttacatccctaggaatgtcacccaagattggctacctgtcgtttgatcagaatgatggaaacttcaaagttaacaaacccttcagtaataaaacggcaagaaccattgatttagaagttaaatctatagtagatgatgcacaccgagcttgtacagaattgctaaccaaaaatttggacaaagtcgatcttgtcgcaaaagaattgctacgtaaggaagcaattactagagaagacatgattagattattgggtccaaggccattcaaggaaaggaacgaggcttttgaaaaatatttggatccaaagagcaataccgaaccgcctgaggcacctgcagcaacaaattaaaggggaaataaaacggtggcttcttcatctcactttatatctttacctgatcccccttccaggatcctatcttattttctcattcttttagtaataatatacatgtatatatatatattgataacgagtaataaaaa

SEQ ID NO: 862 - DNA, 876 bp, Saccharomyces cerevisiae
ttacttagcgcgaaaaaacttgaactgtatggctttccataaactaaaccaacttttaaaaaaattaacagtataagtagaaaccgccgtccgcaatgtcagatcttcaaaagttacagaggttctcaacctgtgatatttcggacggattgttgaatgtttataacattccaacgggtggttatttccctaatctaacagcaatttctccaccgcaaaatagctccatagtaggcactgcatacacagtactgtttgcacccattgatgatccaagacctgccgtgaactatatagactctgtccctcccaactcaatactcgtcctcgcactggagccccatttgcaaagtcagttccacccatttattaaaattacgcaagcgatgtacggggggctgatgagtaccagagcacaatatttgaaatcgaatgggacagtagtctttggacgcataagagatgtggatgaacaccggactttaaaccatcccgtttttgcttacggtgttggatcttgcgctccaaaggctgtcgttaaagccgtaggcactaacgtacagttgaaaatcttaacgagtgatggcgtaacccaaacaatatgtcctggtgattatattgcaggtgacaataatggaatagtacgcattcctgttcaagagactgacatttcaaaattagttacctatatcgaaaagtcaattgaagtggatttacttgtctctgaagatattaagaatggtattcccgccaaacaagctcaaaatgatcgaagatcagtattaaagaaatacatttaaaaacgctatcttcatacatatatatatatatatatcttctttatcgctatcgccttatacatcgttagctaagcat

SEQ ID NO: 863 - DNA, 741 bp, Saccharomyces cerevisiae
aagacggtaaactaaaacagcagagaggaaatgtttaagaaattcacaagagaagatgtccattcacgttcaaaggtcaaatcttcaattcaaagaacgttaaaggccaaattggtcaagcagtaccccaaaatagaagatgttattgatgaattaattcctaagaagagtcaaatcgagttgattaaatgtgaagataagatccaattgtattccgtcgatggtgaagttcttttttttcaaaaattcgatgaactgattccaagcctgaaattagtacacaaatttccagaggcttatcccactgttcaggttgatagaggtgctattaaattcgttctctcaggtgctaatatcatgtgccctggcctaacttctgcgggtgccgacttaccacctgctcctggttacgagaaaggtacgattgtagtcatcaatgccgaaaataaagagaatgcattggctattggtgaattgatgatgggtactgaagaaattaaatcagtgaacaaaggtcattccatagaattgattcaccatttgggcgaccccttatggaacttcagcgttgagtaacaaacggagccgtcaacactatattactatccatctgctacataataaaataaagaaactaagaaaaaattagaataacatccgcttacaatctaaaaggctgtttcctgatttttaaatatgcaactagccaagattaactatatactgtgattacgatgggct

SEQ ID NO: 864 - DNA, 1375 bp, Saccharomyces cerevisiae
aagaacatcagaccagaaaattttaaaacatgtccaacaagctgttcaggttagatgcaggctaccaacaatacgactggggtaaaatcggctcttcttcagctgtcgctcaatttgctgcccattctgacccctctgttcaaattgaacaagataaaccatatgcagagttatggatgggtacccacagcaagatgccttcctacaaccatgagtctaaggaatccctgagagatatcatctccaagaacccctctgccatgttaggtaaggacattattgataagttccacgccacaaatgaattgcccttccttttcaaagttttgtccattgaaaaagtcttgtctattcaagcacatcccgacaaagccttgggtaaaatattgcacgctcaagatcctaagaactatcctgatgataatcacaaacctgaaatggccatcgctgtgactgactttgaaggtttctgcgggttcaaacctttgcaagagattgcagatgaattgaaacgtattcctgaattacgcaacattgttggtgaagaaacttccaggaattttattgagaacattcaaccttctgctcagaaaggttccccagaagatgagcaaaacaaaaagctattgcaagctgttttcagcagggtcatgaacgcttcggatgacaaaatcaagattcaagctcgctccttggtcgaaagatcaaagaattctccatcagactttaacaaacctgatttaccagaattaattcaaagactgaataaacagttccctgatgacgtgggtttgttttgtggatgtttattgttgaatcactgcagattgaatgctggtgaagccatctttttaagagctaaggatcctcacgcctatataagcggtgatattatggaatgtatggctgcttctgacaacgtagttagagcaggcttcactccaaaattcaaggatgttaaaaacttggtctccatgttaacctatacatatgatcctgtggaaaagcaaaaaatgcagcctttaaagttcgacaggtcctctggtaacggtaagtcagttttatataaccctccaatcgaagaatttgctgtattggagactacttttgatgagaaacttggtcaaaggcattttgaaggtgttgatggtccaagtatcttaatcactacaaaaggtaatggttacattaaagcagatggccaaaaattgaaagctgaacccggttttgtctttttcatcgctccacatttgcctgttgatttggaagctgaagatgaggcgtttactacctatagagcctttgtggaaccaaattagctttctttctatttcttaattttcttatatctataatagagaaaatattatactta

SEQ ID NO: 865 - DNA, 1965 bp, Saccharomyces cerevisiae
taactcctgtaaaaacaaaaaaaaaaaaaggcatagcaatgacaaattcaaaagaagacgccgacatagaggagaagcatatgtacaatgagccggtcacaaccctctttcacgacgttgaagcttcacaaacacaccacagacgtgggtcaataccattgaaagatgagaaaagtaaagaattgtatccattgcgctctttcccgacgagagtaaatggcgaggatacgttctctatggaggatggcataggtgatgaagatgaaggagaagtacagaacgctgaagtgaagagagagcttaagcaaagacatattggtatgattgcccttggtggtactattggtacaggtcttttcattggtttatccacacctctgaccaacgccggcccagtgggcgctcttatatcatatttatttatgggttctttggcatattctgtcacgcagtccttgggtgaaatggctacattcatccctgttacatcctctttcacagttttctcacaaagattcctttctccagcatttggtgcggccaatggttacatgtattggttttcttgggcaatcacttttgccctggaacttagtgtagttggccaagtcattcaattttggacgtacaaagttccactggcggcatggattagtattttttgggtaattatcacaataatgaacttgttccctgtcaaatattacggtgaattcgagttctgggtcgcttccatcaaagttttagccattatcgggtttctaatatactgtttttgtatggtttgtggtgctggggttaccggcccagttggattccgttattggagaaacccaggtgcctggggtccaggtataatatctaaggataaaaacgaagggaggttcttaggttgggtttcctctttgattaacgctgccttcacatttcaaggtactgaactagttggtatcactgctggtgaagctgcaaaccccagaaaatccgttccaagagccatcaaaaaagttgttttccgtatcttaaccttctacattggctctctattattcattggacttttagttccatacaatgaccctaaactaacacaatctacttcctacgtttctacttctccctttattattgctattgagaactctggtacaaaggttttgccacatatcttcaacgctgttatcttaacaaccattatttctgccgcaaattcaaatatttacgttggttcccgtattttatttggtctatcaaagaacaagttggctcctaaattcctgtcaaggaccaccaaaggtggtgttccatacattgcagttttcgttactgctgcatttggcgctttggcttacatggagacatctactggtggtgacaaagttttcgaatggctattaaatatcactggtgttgcaggcttttttgcatggttatttatctcaatctcgcacatcagatttatgcaagctttgaaataccgtggcatctctcgtgacgagttaccatttaaagctaaattaatgcccggcttggcttattatgcggccacatttatgacgatcattatcattattcaaggtttcacggcttttgcaccaaaattcaatggtgttagctttgctgccgcctatatctctattttcctgttcttagctgtttggatcttatttcaatgcatattcagatgcagatttatttggaagattggagatgtcgacatcgattccgatagaagagacattgaggcaattgtatgggaagatcatgaaccaaagactttttgggacaaattttggaatgttgtagcatagatatgacgttttattacctttgatcacatttccacgccatttcgcattctcaccctcataagtcatacaccgaaaagaaagtttaagggatcaatgagcttactataatctcagtatatttatttttatcgatgattcaccacaacaatcttgc

SEQ ID NO: 866 - DNA, 2370 bp, Saccharomyces cerevisiae
gctttcggctttggaaatttaggtgacttgttgaaaaagcaaaatttgggctcagtaatgccactgcagtggcttatcacgccaggactgcgggagtggcgggggcaaacacacccgcgataaagagcgcgatgaatataaaagggggccaatgttacgtcccgttatattggagttcttcccatacaaacttaagagtccaattagcttcatcgccaataaaaaaacaaactaaacctaattctaacaagcaaagatgaagttagaaaatactctatttacactcggtgccctagggagcatctctgctgctttggtcatcccaaatcttgaaaatgccgccgaccaccacgaactgattaacaaggaagatcaccacgagagacccagaaaagtggaattcactaaggacgatgatgaggagccatctgactctgaagataaagaacatggaaagttccataagaagggccgcaagggccaagacaaggagtctccggaattcaacggtaaacgtgcaagtggctctcatgggagcgcccacgagggaggaaagggcatgaagcctaagcatgaaagttccaatgatgatgataatgatgataagaagaagaagcctcaccataagggtggctgccacgaaaataaggtggaggagaagaagatgaaaggtaagaaagtcaagggcaagaagcaccacgaaaagacgttggagaaagggaggcaccacaacaggctggctcctctcgtgtccactgcacaattcaacccagacgcgatctccaagatcatccccaaccgctacattatagtcttcaagagaggtgcccctcaagaagagatcgatttccacaaggaaaacgtccagcaggcacaacttcaatccgtagagaacttatctgccgaagacgctttcttcatttctactaaagacacctccttgtccacctctgaggctggcggtatccaggactcattcaacatcgataatcttttctccggttacatcggttacttcacccaagagattgtcgacttgatacgtcaaaacccattagtagactttgttgagagagactctattgtcgaggctacagaatttgacactcaaaatagcgccccatgggggttggcccgtatttcccacagagagcgcctcaacctggggtccttcaacaagtatctctacgatgatgatgccggtcgcggtgtcacgtcctatgttattgacacgggtgtcaacatcaaccacaaggacttcgaaaagagagccatttgggggaaaaccatcccacttaacgacgaagatctcgacggtaacggccacggtacccactgtgccggtactatcgcttccaaacactacggtgtcgctaaaaatgccaacgttgttgcggtgaaagtcttgagatcaaacgggtctggtaccatgtctgatgtcgtcaaaggtgtcgaatatgccgcaaaggcgcaccaaaaagaagcccaagaaaagaaaaaggggttcaaaggttccacagccaatatgtcgcttggtggtggcaagtccccagctttggacttggctgttaatgcagccgttgaagtcggtattcactttgccgtggctgctggtaacgaaaaccaagacgcttgtaatacctccccagcttctgctgacaaggccatcaccgtcggagcttccacgttgagcgatgacagagcctacttttccaactggggtaagtgtgtcgacgttttcgccccaggtttaaacattttgtccacctacattggaagtgatgacgccaccgccactttatcgggtacctcaatggcttcccctcacgttgctggtttgttgacctactttttgtctttgcaaccaggttctgatagtgaatttttcgaattgggccaggattctttgactcctcagcaattgaaaaagaagctaattcattacagtacaaaggacattttgttcgatatccctgaagacactccaaatgttttaatctacaacggtggtggtcaagatttgtccgctttctggaatgataccaaaaagtcccattcatctggtttcaagcaagaattgaacatggatgaattcattggatcaaagaccgatttaatctttgatcaagtgagagatattcttgataaattgaatattatttaattcttcatttagaaaaatttcagctgcttttttttttctttttctttccttaggcgtctcgaggttacaagtcggagtccctcttcactatcgtttgtccactttttttatatccccattattttcaatctgaatttcattttttttttttaattcatgaaatttatatgtcccacgtattactacatatttgcgtttttaattaa

SEQ ID NO: 867 - DNA, 405 bp, Saccharomyces cerevisiae
gaaaaaaaaactaacagtagataagacagatagacagatagagatggacgagaaacagggggggagaaaaggggaaaagagaaggaaagaaagactcatctatcgcagataagacaatcaaccctcatggcgcctccaaccaccatccgcactagggaccaagcgctcgcaccgttagcaacgcttgactcacaaaccaactgccggctgaaagagcttgtgcaatgggagtgccaattcaaaggagccgaatacgtctgctcgccttttaagaggctttttgaacactgcattgcacccgacaaatcagccactaactacgaggtcacggacacatataccaatagttaaaaattacatatactctatatagcacagtagtgtgataaataaaaaattttgcca

SEQ ID NO: 868 - DNA, 714 bp, Saccharomyces cerevisiae
atgcctccaaagtttgatcctaatgaagttaaatacttgtacctaagagccgttggtggtgaagtcggtgcctccgctgctttggctccaaagattggtcctttaggtctatcgccaaagaaggttggtgaagatattgctaaggccaccaaagaattcaagggtatcaaggttaccgtccaattaaagatccaaaacagacaagctgctgcctctgttgtcccatctgcttcctctttggtcattactgctttgaaggaaccaccaagagacagaaagaaggacaaaaacgtcaagcacagtggtaacattcaattggatgaaattattgaaattgccagacaaatgagagacaaatccttcggtagaactttggcttccgttactaaggaaatcttaggtactgctcaatctgtcggctgtcgtgttgacttcaagaatccccatgatatcattgaaggcattaatgctggtgaaatcgaaatcccagaaaattagaaaaaaattaaagaaagtttcaaagctttttagtttttttattgtttttgtattttaatatgataattgcacaaaattccaatacgtttattttctaatttttgatttcgattctagggttatactttttctatctgttttgtctcttctcttcctctctggataaccacaatgaagaggataagtgacacattatatttctataatgtatttccg

SEQ ID NO: 869 - DNA, 1358 bp, Saccharomyces cerevisiae
ctagtccagaaatacgcagagaagataatttaagtgtttatgaaagatgttggtgctagggtctcttagatcggcgctgtcgtgcagttccacagcatcgcttattagtaagagaaacccttgttatccatacggtatactctgtcgaactctatctcagagtgttaaattgtggcaagagaatacttcaaaagatgactccagtttgaacattactccacgattactaaagattatacctaacgatactgatatcgtgactcttgagaagcaggatgaattgattaaaagacgtcgtaaactttcgaaagaagtgacccagatgaagaggctaaaacccgtctcacctggtttgagatggtaccgttcccccatttatccatatttgtacaaaggtcgtccggttagagccctaactgttgttcgaaagaagcacggtggtagaaataattcaggaaaaatcactgtccgtcaccaaggtggtggccatagaaatagaacgaggctgatagactttaacagatgggaaggtggtgcacaaacggtgcaaaggattgagtacgatccgggtagatcctctcatatcgccctattgaagcataatactaccggcgaattgtcttatattattgcttgtgatgggttacgcccaggcgatgtggtcgaatccttcagaagaggtattcctcaaactttactgaatgaaatgggcgggaaagtagaccctgctatcttgagtgttaagactacccaaagaggcaactgtctacctatttccatgatccccataggtactattattcacaacgttggcataacacccgttggacctggaaaattttgtcgctctgctggtacatatgccagagtccttgcgaaattacctgaaaaaaagaaagctattgttagattacaaagcggtgaacatcgttatgtgtctttagaggctgtcgctaccattggcgtggtctccaatattgaccatcaaaacagatctcttggtaaagccggcagatcaagatggttagggataagacccactgttagaggtgttgccatgaataaatgtgaccatcctcacggtggtggccgtggtaaatccaagtctaataaattatcaatgtctccatggggacaactggcaaaggggtacaagactagaaggggtaaaaatcaaaatagaatgaaagtaaaagacagaccaagaggcaaagatgcaagattataaataggctaattttagtagaaaagaagcaacatagggaccttttcttcgttgttctggttacatttatctgtactatataattttgcacagcctgtagacaatgccgcttgtccacaatcatgtaaatata

SEQ ID NO: 870 - DNA, 1031 bp, Saccharomyces cerevisiae
tttatatcaccaaactatgagcttgaggccttgcttcgtatcattgatagatgaatctgataaacctatattgatttacgtccctaatgaggcggagaatgagatgaatgatgtactcaaatataacgtgctttctaacatatcgttagattattttgaaagtgctttggttgaatggcattctttagattccaaacctcttctgaagtcaatttttcaattggaaggtgtctctgtatttgctatgttgattaagcagacgggcctgaagattgtcattggatttgaacaaaaaagcctaagtggagctgatgatgaatttgaagcaatcaatcagattttcgaaaccgtaagaaaaatctatatacgtgtcaaatgtaatcctttacttgttagcggtgacgaaaagtccattataaaaagcttggaaagaaaatttgatgagttgtttatttcaactgaagttgaattataaatgataatttattagtcgattctttcacgaatgaaagcaaaatttaatgtcactgctttggagtgagagcgattcagagaagttattaatgtctaatatgtccaacttggtgacagtttcgccttgcctaattagcggggatcaggtgccggtagtatatctcagatgaccgtgacaatcaaactttctacttcattcaagtgactgtcaattgtcatgctgttcatgaataaataagatacggagacaattaaggcgatcgctttgactctactgctaacgaaaattgtccgaattgaacagatgtggaagcaatcactatacgttacttcataatgaagatatttgttggctttccgagatatagactgatctttgtcacttcatatccggcacggcaatttttacatgggatggctcgtcataaagatactgcgacctttggaaagtctgaaataagtgctaggttatggttacaacgagaattgacagatatgatgtgattgttcacgtatgtacgtataaagatatttatactaccaaaaaaaaaaaaagg

SEQ ID NO: 871 - DNA, 1507 bp, Saccharomyces cerevisiae
aaatgtctctctctcccgttgttgttattggaaccggtttggccgggctggctgctgccaatgaattggttaacaagtataacatccctgtaaccatcctcgaaaaggcttcctcgatcggtgggaactctatcaaggcctccagtggtattaacggtgcttgcaccgagactcaacgtcacttccacatcgaggactccccacgcttatttgaagatgacaccatcaagtctgctaaaggtaaaggtgtccaagaattaatggctaagttggccaatgattctcccctggctattgaatggttgaaaaacgaatttgatttgaaattggacctattggctcaattgggtggccactctgtggcaagaactcacagatcgtctgggaagttgcctccaggtttcgaaattgtttctgccttatctaacaatttgaagaaattagctgagactaaaccagagttagttaagattaacttagacagtaaagtcgtagacatccatgaaaaggatggctccatttctgctgtagtgtacgaggacaagaatggcgaaaagcacatggtgagtgctaacgatgtcgttttttgttctggagggtttggcttttctaaggaaatgcttaaagaatacgcacccgaactggtgaacttgccaacaacaaacgggcaacaaacaactggtgatggtcaaaggcttctgcagaagttaggcgctgatctgattgacatggaccaaattcaagttcatccaactgggttcattgatccaaatgaccgtagctcaagctggaaattcttggctgccgaatccttaagaggtcttggtggtatcctattaaaccctattaccggtagaagatttgtcaacgaattgaccacaagagatgtagtcactgcagctattcaaaaggtttgtcctcaagaggataacagagcactattggttatgggcgaaaaaatgtacacagatttgaagaataatttagatttttacatgttcaagaaacttgtacagaaattgacattatctcaagttgtttctgaatataatttaccaatcactgtcgcccaattatgcgaggaattgcaaacatactcttccttcactaccaaggctgatccgttgggacgtaccgttattctcaacgaatttggctctgacgttactccagaaactgtggtttttattggtgaagtaacaccggttgtccatttcaccatgggtggtgctagaatcaatgtcaaggctcaagtcattggcaagaacgacgaaaggctactaaaaggcctgtacgcggccggtgaagtttctggcggtgttcatggcgccaataggttgggtggttcaagtttgttagaatgcgttgtctttgggagaaccgcagctgaatctattgccaatgaccgcaagtaacgaattttataaatgaatcatttctaaacgattttttaatagtatataagtagtattaatattattattatttttttttttttttttttttc

SEQ ID NO: 872 - DNA, 1728 bp, Saccharomyces cerevisiae
atgactgaattcgaattgcctccaaaatatatcaccgctgctaacgacttgcggtcagacacattcaccactccaactgcagagatgatggaggccgctttagaggcctctatcggtgacgctgtctacggtgaagatgttgacaccgttaggctcgaacagaccgttgcccgcatggctggcaaagaagcaggtttgttctgtgtctctgggactttgtccaaccagattgccatcagaactcacttgatgcaacctccatactctattctatgtgattacagggctcacgtttacactcacgaagccgctggactggcgatcttgtctcaagcgatggtggttcctgtggttccttccaacggtgactacttgaccttggaagacatcaagtcacactacgtcccagacgacggtgatattcacggtgcccccaccagattgatttctctggaaaacactttacacggtattgtttatccattggaagaactggtccgcatcaaagcttggtgtatggaaaatggtctcaaactacattgtgacggtgccagaatctggaatgccgctgcacaatctggcgtgccattaaagcaatatggggaaatcttcgactccatctccatctgtctatccaagtctatgggtgctcctattgggtccgtcttggttgggaaccttaagtttgtcaagaaggccacccatttcagaaaacaacaaggtggtggtattagacaatctggtatgatggctagaatggctcttgtaaacatcaacaacgattggaagtcccaattgctgtactcgcactctttggctcatgaattagccgaatattgtgaggcaaagggcatcccgctagagtctccagcagacaccaactttgtctttattaacctgaaggccgctagaatggacccagatgtccttgttaagaagggtttgaagtacaacgttaagctaatgggtggtagagtctcgttccactatcaagtcaccagagatactttggaaaaagtcaaattggccatctccgaggccttcgactatgctaaagaacatcctttcgactgtaacggacctacccagatttaccgtagtgaatccaccgaggtcgacgttgatggcaacgctatccgcgaaataaaaacctacaaatactgatgcgttccagttgcatcatgtgtattgttagggtttttgttttaggattgctaccctcttcctttttttcatacattacaataatttcgtggcattgtagatttaacggctttcttttgcatcaatgatttttatattcaaatgggttttttcttttttctgttttgttattcaaggatatttcaactctcacaccataattataactaattatgtcggcacatttgagaaccaatggttagtttccagcgcacctagcgactaactaccctattatggagggacgaaggtggtctttctgagggaaggaggaaaaaaaggtaagaacctcttttctttgttccccattgagagatcgactgaatatgtttggtttttttggtacttgattaaagtttacaacggtacgtatccacgtggagaagcacatttctttgtattctacgatactacgtattaagattgaatgtacccatgtatattctcgcagggtttcttcacaggatttcgacgtacaccttttatacaaatatatatatatatttatatgtatgcgtaagagtc

SEQ ID NO: 873 - DNA, 1492 bp, Saccharomyces cerevisiae
ttttctccctgtttttaagtttgaaccattgataaggccgttcgcagacaagcttgctaccatccaattttccttcctctaaagacttaataaaggcatctaactccacctttaaatcacagatcacacaaagacaacatacaatagaaaaatggttagcttaacctttaaaaatttcaagaaggaaaaagttcctttagatctggaaccttcaaacacaattttagagaccaagaccaagcttgctcaatccatttcttgtgaagaatctcaaataaaactgatctactcgggtaaagtgctacaagattccaaaaccgtatcggaatgcgggctaaaagatggggaccaagttgtcttcatggtttctcaaaaaaagtccacgaagaccaaagtaacagaacctccaattgctcctgagagcgccactacccccggaagagaaaattctacagaagcatcccccagtacggatgcttctgcagctcctgcagccactgctcccgaaggctcacaaccgcaagaagaacaaaccgccactacagaacgtactgaatctgcctctacaccgggattcgtggtgggaaccgagaggaacgagaccatcgagagaatcatggaaatgggctaccaaagagaggaagtcgaacgagccttgagagcagcctttaataatccagatagagcggtggaatatctactgatgggtattccagaaaatctgcgtcaaccggaaccacagcaacaaacagccgccgcagcggaacaaccatcgacagccgccaccactgcggaacaaccggctgaagacgacttatttgcacaagctgcccaaggcggtaatgcttcatccggtgcgcttggcacaactggaggagctacagatgctgcgcaaggtggacctccaggttccattggcctcactgtagaagatttactatcgttgagacaggtcgtttcaggtaacccagaagctttagccccattgttggaaaacataagtgctagatatcctcaattacgtgaacatatcatggcaaacccagaagtgtttgtgtccatgttgctagaagccgtgggtgacaatatgcaagatgttatggaaggtgcggatgatatggtggaaggagaggatatagaagttacaggagaggctgctgctgcaggactgggacaaggtgaaggtgaaggttctttccaagttgactatacccccgaagacgatcaagctatttcgcgcctctgtgaattgggctttgaaagagatcttgttatccaggtgtattttgcgtgcgataaaaacgaagaagctgcagcaaatattctattcagcgatcatgccgactgagattgtagtaatgttatggcttgaagtatcttcacttattctcgacaatgttgcatgatttttgagccaagggaaaaaaaaagcttacgtagaaatcaataacgtatgtgtatttatatatgctagaagggaaagaaaagaaaa

SEQ ID NO: 874 - DNA, 1682 bp, Saccharomyces cerevisiae
agcattgcaaaaccattcatcactcagttgctaggcgagtgttggtgcgatttaccctcatcatctttttttcgctccattaaacagttccttgtggctttcatgcaaagtgtacgtccataatgaagtataataacagaaaactctcgttcaaccctaccacagtaagtatcgctggaacgttgcttacggtgttctttctcacaagactcgtgctttcgttcttctcgatatcgctattccagctggtaactttccaaggaatcttcaagccctatgttccagattttaaaaatactcccagcgtagagttctacgacctacgaaattaccaaggcaacaaagatggttggcaacagggtgaccgcatcttgttttgcgtgccactgagagatgcttctgagcatcttcccatgttttttaaccatctgaataccatgacatatccgcacaacctgattgatctgtcgtttttggtgagtgactcttcggataacaccatgggcgtgttactatccaatctacagatggcgcaatcgcaacaagacaagtccaaaaggtttggtaacatcgaaatctatgagaaggacttcggccaaatcattggtcagtccttttctgatcgtcacgggtttggcgcccagggccccagaagaaagctgatggccagggctcgtaattggcttgggtccgtggccctgaaaccataccactcctgggtttactggagagacgtggatgtcgaaaccatccccactaccatcatggaggatctaatgcatcacgacaaggacgtcattgtccccaacgtctggagacctttaccagactggctgggaaacattcaaccctacgatttaaattcatggaaggaatcagaagggggtcttcaattggcggattccctagacgaagatgctgtcattgtggaagggtacccagagtacgccacttggagacctcacctggcatacatgagagacccaaacggtaatccagaagacgaaatggaattggacggtattggaggggtctcgattctcgcgaaagctaaagtattcagaacaggctcacactttcctgcattctcctttgaaaagcacgcagagacagaagcattcggtaggctctcccgcaggatgaattacaatgtcatcggcttgccccattatgtcatctggcacatctacgaaccttccagcgacgacttaaagcacatggcttggatggctgaagaggagaagcggaaactagaagaagagagaattcgcgaattttacaacaagatctgggagattggatttgaagatgtcagagaccaatggaacgaagaaagagattcaatcttaaaaaacattgactccactttgaacaataaagtcactgtagactggtctgaagagggagatggctcggagctggtggactcaaagggtgactttgtctcaccaaacaaccaacaacaacaacaacagcaacaacaacaacaacagcagcagcagcaacagcaacagcaacaacagctcgacggcaacccgcaggggaaacctcttgatgacaacgacaagaacaagaaaaaacatcctaaagaagttccattagacttcgaccctgatagaaactaggctcggttttttagtgacctacatatgaagtacgaattcatatagttgtacatatat

SEQ ID NO: 875 - DNA, 1094 bp, Saccharomyces cerevisiae
tgagttcactgactactaaatctccctgagtttggtctgcagtagctatcgaaaaattacgaaaaaatgcctcgtctcttggccacgcagtctcatgttgtacatggatatgtgggaaataaggctgcaacgtttcccttacagtgtctaggctgggatgtggattgttgtaacagtgttcagttttccaaccataccggatatggtttagataaagtgtttgggactataacgagggaaacagatttgaaggaactcttatcaggtctttttgataatttttcccaagactaccaagccttactttcaggctacttgcccaataagaattccgttcgatgtatgggaacatactacgctaaatttaaagaggcgaatccagaaatgatatggcttatggatcctgttatgggtgacgaaggacaattatatgttagtgaggatgtcataccagaatatagaaagctggctttgtctccaaaacagctagtcgatataataactccgaatcaatttgagctggagatactttatgggggggaaatcaagactaaagaacatttgaagaaggccttaaagaaattacaccaaactatcccagtgatcattgtcacatcctgtgactgtaagatgtttgatgacaaagattttatttattgcgtagcttcaatggagggtaaaacccccattgtttacagagtgccgtttattgattcgtatttcactggggttggtgatttgttttctgctttgttattggatcgagtgtataagatcttatcgaaccctacaacaacattaaaatttgaagaccaagtcaataatgttcttaatgttattcagaaggttttgaaaattactaggagctatgcttcaggaaaaatgaaagcaaaaatgggttccgccttggaaatgaaagaaatggaattgcgtcttattgaatcaagagatatatatgaaacaatcaacattcatcaaacagattatatttacgcaaggttgtgatgaaactttatagagtcatattttcaccaaagaaaattaatgttgacatttgtaaaatagtgaatagttttttatgttcaaatgcatac

SEQ ID NO: 876 - DNA, 3845 bp, Saccharomyces cerevisiae
agcgcattgcatattgcactagccattgccacgtaaaatggcaagacaagatgaaacggactgcaaaaaattggatagcaattcggcctttttacctttatgcataacatcttatagatcaaaagatgaggctgagaagctggtaagttgtcttcatcacgaaggaagttactttttatgttttagctatggattgtataccggaacgtccaacgaattgaaagcgaaggttgagttcgctttagatggaccgttcgttgttaactacgcaactgtaccgatgttcatgtcagcttccttctgtcacctgctaatgtttaacgacggttccattaagggattcaaatgcgaaaataacaaatttgaaattatctacgactctaatgtggctccgaaactggatactatttctttattaacttccagctggttaaatgcttcctttgagggtgttttatacacttgcaataaaaacatatcatatgatagtgatttgcatacgttatgtacgacaatttactcctttgacttcagagaaggaatagtcgaaagattttatgccaccgatggcgaagaaattatctcctttgattttattagcagggaggatttgcttgacgacgccacatgcacaggtaaatcacacgtttattttctttgcctacttaagagttgctatagtgaaaacctgtttttaaaggaatacaatcttgctggaaagcatggaagtaggaaatttgatttaaacgagtaccgccaatacaatcttttgccgatatgtgataatgaattttgttatatgaaggtagtttgcggccataccattgtagtgttgactactaactacactcaaataataaatataaaagcaagtgggcttacaaacggggcttttttcaataataaaggtctcccaaatgtagaaaactaccaatttctaaaagattcttatgatgtgatatatgaaagatcagtcattctcttgacaatttctgacgtgtatgctaacaaatacactgccaagatacacactaggtcgttacatagagaccacgtcctgaaagaactacaatggacaaaagaaagagtgttcaagcctcctaaacatgatctatgcgatgttattttgcagctcccacgtgaaaagtatatagcggtgacaagaataaatggagtaaattttatatcgaaagatcatcgaggttcaaaattagaaaaggtgaaaagcggtcccgcttatacaaacaaagtttacctggcatcacaagttattggaaacaaggggacagatattgattcactgcttttgggtggaagttttaactcaagaagaggatttttagaaaagaaaattttggtatatgacaaaaccctgttcaagttagtgacttcctccaaagcgctagtagagaatgtaactgatttttgggttacagatttagcacttaatggtggtgacgaatttgcatatgaatcaggtgggttgatttataagaacggaatatttttaatggatgagccttatgattacggtctatttgtttctaggacgggaaaagttttgaaagccggtatggatggttctaccggagaatttaggcaggtcgatttcttgcagtcgaaccacaactcttccaccatgttttgttatcccgtacagaactccaagctcaggatttcgatacttgaggcaaaatctggttttctacgtaaaaaagaagaattttttatccatgggctcaattctaaagagagtattgtgagctgtttctcagatggtgccgagaaatacctttttgtcatttacttggacggtgtgttttcggtatggaatgccaatcaaaagaaagtggctacatcacatccagactattctttcatagcctatgatcaattgataaaaatatcttggctaagcaaaaagcataaacacgactcgatttatgtcatcgcatcatcatacactggctgcgtaagagtctacaaatcagaatcaaattttttgagagtggatttagagattcattcgttatacgatcagaaattagaactgttggatacgattccttccttacctttggttttcctttacaacgataaggaaataattttgttaaatcttcaaaacatgtcttatggttgcatacagttaggcttagttccaagacgaatgagaattcgacccggtaaagcactgttctctctttgtgttttagattatgattctcgaataagcatctttgagtttggtagcacgttttaccgtgaaggtttcactaagcagatgacttcattaaaacctcaattagaaaatcatatcttttacctccctagcattcccgtagagctctatactgttccaaataacctcaatcaggccgtggtgtgtttggtcgatagcaatagtaggcagtataagttgatgctattcaattatgcttcaatgaaggcagtttccacattcagtttctcggatgaaaagtatttacatgccgttgtgaagccactgtggccagaacaaaactcaatctacttatcacagagacccttttatggtaataagtttgttgtatgcttaggagttggtgaaaaacgtacaaaattctggctgtttgaaattagaaacaataacattacccaattgtacgcgaattatctcgaagattgtatattctcggtgttcatatactatgagtgcaacttggttttattttctggtgatagtggcatagcagcatataaaataaacatgctaaaagagggcgcggaaattttagaggcctattccttcccagcactttcatcgattaaccatataggtcttccagcttatatgagtggtgattatctggttcaatttgagatcttgagagattttttgagaacccgctttccaattaggacgtccatagtatatccatcagagtaccctgaatgtccctacttgggttttaagcggttgggaagcattacacaagtggcgactaaaataattcctaagaagctaagagaacctaaaaacgattgtttagcgagtgataagaactatctattaggtcgattatcagacctttcttgtgcaacgttgaaatattccaatagatcttatgttgccaccattggtattgataataccttgacaatatacgaagattctaaattatcagttgataagggcgggttggctatgccatacctcaaaattcggttacctaataagataatctcactggcggccatcccagatggatttcaaaaccttcaaatatgtccaaatttcaatagtcaaaggttggaaggcgtcatacctctatttttactttgcggtactgagggccaaatttatataatatcggaattcattggtgagctgtggatgagaacgttgcatgattacaaaaagatcaagctcgaatgtaaaagagcttttcgaaggtctgagaaaagcatgcgaaatgttactaaacaatattccgtgagtaaagagactggaataaatgaaagcggctttgatgagctagctagaaattcaaagagaagacatatagatcattcaccatacaagaccatagattttttcgatcctgtaaaactaaaaaggtgacaataaatctcctacgaacgaataggtgccatgagatcttgcacctttttgttatgcctaaattactacagctcaattgataatacatgtttgtgcatttacagatgcactcgagtaggttattcaatgaagatatgacatatatcataccactaacaaaacagcactattagcgtctgcactagtggaaagcaaaaaacttttttatagtatatagatggtacaaaaactatgttgatag

SEQ ID NO: 877 - DNA, 1683 bp, Saccharomyces cerevisiae
atgaccacgaccgctacccaacacttcgctcaacttttacaaaaatatggcatcgacacagtctttggaattgtgggcatccctattgtccaactagcggatacgatggttgccaacggtatcaaattcattccatgcaggaacgaacaggctgcctcatatgcagcctctgcttatggttatattagtgataagcccggcgtgttacttattgtcgggggccccggtttaatccacgcactggctggtatatacaactcaatgagtaataggtggcctcttctagtaattgcagggagttcttctcaaagtgatatacataaaggcgggtttcaagagttggatcaagttagtcttttgtccccatttttgaagtttaccggaaagttaacccctgacaatattgacatgattactcagaaggctttgaattactgtatacaaggcactgcaggggtttcttacatagacgtccctgcagattttattgagtatgaaaaacccttagaaggaaacgaccgtacaggaaatgaattaccgatgatattaactccaaacatatgtggccctgatccgtcgaagatcaaaaaagtcgtacagcttattttgcaacataaaaataaaaatattctgattgttattggaaagggtgcggtaaaaaactcacacgaaatccgcagactagtaaatacgttcaatctaccatttttacccaccccaatggctaagggaattgtcccagactcttctccactgaacgtttcatctgcaagatctcaagcattgaaaatagcggatattgttcttgttctcggggcaagattaaactggatattgcattttggtacttcacccaaatggaactcagaatccatattcatccagttcgattccaatcccgaaaccttgggggataacaatgtctcacctggtgctgacctttccatatggggagatataggcttgagcgtaaccgctttagttgaggaattgactcgccaagattcctgctggaagtatagtggtgttaagcaagaaatacgagagaaaattcaactgaatcaaactcgtctattgaggaaagagaagactagaggggcacaattgaattacaaccaggtttatggaacattgaggcctcttatcgatgattacaggacaatacttgtgacggagggagcaaatactatggatattgcgcgtatttcattccctacagacgctccaaggcgccgtttagacgcagggaccaacgcgactatggggattgggctcggatatgctcttgcatgcaaggcatctcatccggaactcgatgtggtgctgattcagggtgattccgcatttggattctctgccatggaaattgaaacggcagtaaggtgtcagctggcattggtcatcgttgtgatgaacaatagcggtatttaccatggagaaaaggatatagagggtgatttacctccaacggcactaagcaagaactgccgttacgatctcgtaggcaaaggactgggtgccaatgatttttttgtcaacacaataagcgaactgagcagatgcttccaacaagccgtgcagctttctcggactaaaagagaaacaagtgtcatcaacgttatcattgagcctggcgaacaaaagcaaattgcctttgcctggcagaataaaccgcgtttatag

SEQ ID NO: 878 - DNA, 609 bp, Saccharomyces cerevisiae
aataaatagtacaataacaattatacaaagatgttgatgagcacgttaccaggtggtgttatcttagtttttattctagtcggtttggcttgtatcgccatcatttctaccattatctacagaaaatggcaagctagacaaagaggtttacaaagattctaagcgatcactagcaagccaaacgagcttgatgttgttttctcttagttatcctcttttttttttttttttcaattactgaatattaatgaataaattagacctcttttctccccaacccttttaatttctaataattaattaatttttcctgtgtgtgtgctatattcctactttgtatctgtgctgttcgattcctctgttggaacgatgtgatttgcgtgggcgttttatcgcaaaaaagttttgggcatgcgggcgtgaatggatgttgtttgccgtgtgtgggcaaatacaccctgctcttcgttttgtttgtcccgttctttcccatttttacctacctactatgtttttttttgagaaacatgtcgcttcatttgttatatattgttctgttaaagaattgtgtgtgtatttttttaataaaatagtatataatagtaatgt

SEQ ID NO: 879 - DNA, 1722 bp, Saccharomyces cerevisiae
tgggttgagagtttttctatcaattagacggtttactgtgcgttgatggaagataatttaaggctttatatgactgtgacgcttgataccagggttcattaaacacgcaggccacaaaacagtttcgaaataacaaagaaggccatttcgaagtgtgcttacgatatgcttcttttcgagcaacctgttgaccttgaaaaaaataatgaagatgatacgaacataaaacctttcgcaatatcacgacattttttattgaaacttttgctttgcggtataatactcattgagttgcttttatattcgaagtgcccaaaacctattgataatgggccccggacaattgcgaatagatcaaatacttacttcaacggcacacatgatttcaagacgttaacgatattgatatctatcgatgggttccatccgagattgatagatgcaaaatacacgccatttctttacaacttgcacaatttgcggtccccgtacgatatgaatatcacgactgcaccgtatatgatcccaagttttcccactcagacatttcccaaccactggagcatggtaacgggaaaatatcccattgagcacggtattgtttccaatatattctgggataatttcacgagtagcgaatttagaccaaataacctcgacgcaagaatttggagcaacacggctgaccctatttggcaactactgcaaactgaatcgcaaggcgaatataaagtggccacgcatatgtggcctggaagtgaggttgtgtatgaggaccacggggatgtacctagggaaagaatgccattttattttgggaaattcaatcaatgggaaaaacttcaagataaattagctcaaattttccgatacatagatatgcctcagcttaaagataggccagaattggtcataagttatatacccaatgttgattcgtacggacacagttttggatacgatttacgagataagcggctacaaaagctgatcggtgaagtcgatggattctttctcgatttgattgaaggcctgcaaaaaagaaacttgttgaaaattagcaatgttatgattgttagtgaccatggcatgagcaatgtcaacgcgaatgacggtgagcatgttgttgtgtgggaaagggtgttcccggccgacgcaatgagcgcatttatttcgcatctttataacgagggccccatgatgatggtatgtttgaaaaaccctcgagacaagcaatggatttgtgacttgattgaagctcagttagagaaagcatatggagatgaaatatcgaggaagtttcacgtgatcctgaaagaagatttcgacccgagctggaaatatttccaatacgataacagaaagcacagatatgacgatagggtcggcgatatctggattctcgcagatgaatactacgccattgtaaaagaaatgggtgatgtgcctatcggcattatgggcacacatggatacaactttaacaactgtagtgatatggcatctatattcattggaatgggtccgatgttcaacaatgaagtcgtacctccatttgaaaacatcgaagtatacaatatgctgatcaaggcaagtgcgcttttgggagaagaaaagacaaagaaggagaagagtttattacaataatacagagtagtaaatacacacttcgcggcttacgtacgcgtgtgtatacgtatgtaagaaaatatactataatac

SEQ ID NO: 880 - DNA, 1489 bp, Saccharomyces cerevisiae
aaaacaaaacaaaacaaaaactcacaacacaggttactctcccccctaaattcaaattttttttgcccatcagtttcactagcgaattatacaactcaccagccacacagctcactcatctacttcgcaatcaaaacaaaatattttattttagttcagtttattaagttattatcagtatcgtattaaaaaattaaagatcattgaaaaatggcttgctaaaccgattatattttgtttttaaagtagattattattagaaaattattaagagaattatgtgttaaatttattgaaagagaaaatttattttcccttattaattaaagtcctttactttttttgaaaactgtcagttttttgaagagttatttgttttgttaccaattgctatcatgtacccgtagaattttattcaagatgtttccgtaacggttacctttctgtcaaattatccaggtttactcgccaataaaaatttccctatactatcattaattaaatcattattattactaaagttttgtttaccaatttgtctgctcaagaaaataaattaaatacaaataaaatgtccgaatatcagccaagtttatttgctttaaatccaatgggtttctcaccattggatggttctaaatcaaccaacgaaaatgtatctgcttccacttctactgccaaaccaatggttggccaattgatttttgataaattcatcaagactgaagaggatccaattatcaaacaggataccccttcgaaccttgattttgattttgctcttccacaaacggcaactgcacctgatgccaagaccgttttgccaattccggagctagatgacgctgtagtggaatctttcttttcgtcaagcactgattcaactccaatgtttgagtatgaaaacctagaagacaactctaaagaatggacatccttgtttgacaatgacattccagttaccactgacgatgtttcattggctgataaggcaattgaatccactgaagaagtttctctggtaccatccaatctggaagtctcgacaacttcattcttacccactcctgttctagaagatgctaaactgactcaaacaagaaaggttaagaaaccaaattcagtcgttaagaagtcacatcatgttggaaaggatgacgaatcgagactggatcatctaggtgttgttgcttacaaccgcaaacagcgttcgattccactttctccaattgtgcccgaatccagtgatcctgctgctctaaaacgtgctagaaacactgaagccgccaggcgttctcgtgcgagaaagttgcaaagaatgaaacaacttgaagacaaggttgaagaattgctttcgaaaaattatcacttggaaaatgaggttgccagattaaagaaattagttggcgaacgctgatttcatttaccttttattttatattttttatttcattctcgtgtataacgaaatagatacattcacttagat

SEQ ID NO: 881 - DNA, 1467 bp, Saccharomyces cerevisiae
tttaacacaattgacggtgcaaattttgaattatccttttttgattatttaggatgcggaccgattggaattttttcttttgtatccttctgcaggccattttcgttgtgggcacacaaacttcaagaacgcttgttctttacgaccaatctacggaacctttagaggagtactcagtctatttaaaagatctagaacaaaggaattacaaacttgaatatttagatattaacagtacttccactactgtggatttgtatgacaaagagcaaagattgtttgataacatcatcgtttttcctaccaaaggaggcaagaatttagcgagacaaatcccagttaagcagttgattaaattttttgaaaatgaaggtaacattttatgcatgagttctccaggtgctgttccgaataccattcgtttatttttgaatgaattaggtatctatccaagtccaaaaggacacgttattcgtgactatttttcgccctcctcagaagagctagtggtttcttctaaccatcttctgaacaaatatgtgtacaacgccagaaaaagcgaggattttgtttttggggaaagttcagctgctttattagaaaatcgtgaacaaatcgtcccaattttaaacgctccaagaacatcctttactgagtccaaaggcaaatgcaactcttggaccagcggatctcaaggctttcttgtagttggtttccagaacttaaacaatgctcgtttagtatggatcggcagtagtgatttcttaaagaacaaaaatcaggactctaatcaggagtttgcaaaagaattactaaaatggacatttaatgaaaaatctgtaatcaaaagtgtgcatgcggttcattcacatgcggatggtactagttatgacgaagagccctacaaaatcaaggacaaagttatttattctgtaggcttttcggaatggaatggagaagaatggctaccacatatcgctgatgatatccaatttgaactaagacaagtggatccgtactaccgtctaacattgtcgccaagcggaaacgattctgaaactcagtattacaccaccggtgaattcatccttccagaccgccatggagtgtttacattcctcactgactatcgtaagattggcctgtcgttcactactgacaaagacgttaaagctatccgtcaccttgctaatgatgaatacccaagaagttgggaaatcagcaattcttgggtttatattagcgccatttgtggcgtcattgttgcgtggatattttttgttgtttctttcgttacgacttcctctgttggcaagaaacttgaaacattcaaaaaaacaaactaatatatgttttcatatcctttataattctttataaatggctcacataaatacataagagtacctgattgtgtttatttatattttttgccaaactaagtactgcaatagattttatatatgg

SEQ ID NO: 882 - DNA, 783 bp, Saccharomyces cerevisiae
tgtcacttctttatagctggcaattatgaggttttctatgttaatcgggtttaatttattaactgccttgagcagcttctgtgctgccatatcagctaataatagcgacaatgtcgaacatgaacaggaagttgcggaggcggtagcgccaccttctattaatatagaggtgaaatatgatgtcgttgggaaggaatcagaaaatcatgattctttccttgagttttacgcggaggataccgctaccttagcctataatgttactaattgggaagatactaatatcacaatttttggtgtcaacggaacaattgttacatatccacatggttatcctgtggcggacattacaggtgcgagtattgggccttacgaaatggaggtcaacggaacttcaaaattcgggcaagacgttacgttaaatttaccggaaggacaatactttttaatcccatttttattagcttctaggttcgatgaaatcgtgagaattgcggcaccaccaaccctattcgaaattgttagcccacctatttcctttttcaacccacaatttttatcagttcaggtcatctttctagccatcatcggaggtgtaagttattactacatgaagtctaaaacaaatcaaagaccttccaagaagagtgccactgtcaaaaaagttgatgaatcatggttgccagaaacctataaaaaataaaaatggcggagtaagatctctggatgatgatagggggctctcattgttttatagatacatattagtatactacaattaaa

SEQ ID NO: 883 - DNA, 82 bp, Saccharomyces cerevisiae
ggcactatggccgagtggttaaggcgacagacttgaaatctgttgggctctgcccgcgctggttcaaatcctgctggtgtcg

SEQ ID NO: 884 - DNA, 73 bp, Saccharomyces cerevisiae; identical to SEQ ID NO: 397

SEQ ID NO: 885 - DNA, 73 bp, Saccharomyces cerevisiae; identical to SEQ ID NO: 397

SEQ ID NO: 886 - DNA, 74 bp, Saccharomyces cerevisiae; identical to SEQ ID NO: 232

SEQ ID NO: 887 - DNA, 74 bp, Saccharomyces cerevisiae; identical to SEQ ID NO: 232

SEQ ID NO: 888 - DNA, 72 bp, Saccharomyces cerevisiae; identical to SEQ ID NO: 230

SEQ ID NO: 889 - DNA, 73 bp, Saccharomyces cerevisiae; identical to SEQ ID NO: 78

SEQ ID NO: 890 - DNA, 92 bp, Saccharomyces cerevisiae
tactatgatgaatgacattagcgtgaacaatctctgatacaaaatcgaaagattttaggattagaaaaacttatgttgccttccttctgaaa

SEQ ID NO: 891 - DNA, 522 bp, Saccharomyces cerevisiae
aggctgtaatggctttctggtgggatgggatacgttgagaattctggccgaggaacaaatccttcctcgcggctagacacggattgcacgccctttgggcaagggatagttctctattccgcaccgtgccctgttgtggcaaccgtctttcctccgtcgtaaatttgtcctgggcagagctgtctgcccggaggcgggagagtccgttctgaagtgtcccggctataataaatcgatctttgcgggcagcccgttggcaggaggcgtgaggaatccgtctctctgtctggtgcggcaaggtagttctgggtccttaggggctccaccttcaccgctgttaggggagttttatccagcgtcagcaaaggtgacccgtgatggaggcggccgggatagcacatatcagtcggataattgtgcaagttgatcgcttcggcggtttaatttggcggtgccatcaggatttactcgcacattgtggccgttccctcggggatggagtgtgtcctgaaccatattttt

SEQ ID NO: 892 - DNA, 186 bp, Saccharomyces cerevisiae
aactattacagtcgatgaggataggttatagttcatgtgtaacatctgtgttttaaaataactctagttatccggggcgtttttcacaaagtttgtgtaagatgctttcctgggtcgatgtggattgtgccgtggcctttttcaccacctttatagcggtgctttaactattaataactgaggctg

SEQ ID NO: 893 - DNA, 91 bp, Saccharomyces cerevisiae
tttgatgatgattacactccatgctaatcatgaacgtgttcgatgtaaatttgaatacgatgattaaaattgttgtttacgctttctgaaa

SEQ ID NO: 894 - DNA, 82 bp, Saccharomyces cerevisiae
taacatgatgactaagttgtcgccccaagcggatctttgaaatgactgattttacaaacaacaaacactgaaaattctgaaa

SEQ ID NO: 895 - DNA, 551 bp, Saccharomyces cerevisiae
taatgcctttgtttggccaagctatgtgcaaatatcacaaattaaaaatttggttaagcagttaggctggacctaatattttagaaaaacctaattttttttgtggacccattttcgatatttactcacaaatggaattcaaggggaacaacttcggtctcagcactttaattattcttctcgttcccacctaatttcgcaatttattgtccttgacttctaccacgagaaaaaaattaagaaaatgcaacgctgcccgtgcagggttttctgagcgggatgaaaaaatcagacaaatatccaagttatgagtaattactttgttggaaggagggagcagaggataaggaaattcttaaaactgttatgtatataaaggaagaaccatttctagttatttcactttttgatacttgtcaactatcttagtaaaaatacagaactctataaagaaccacagaaaaatcgacagcaatgacaagcattgacattaacaacttacaaaatacctttcaacaagctatgaatatgagcggctccccaggcgctgt

SEQ ID NO: 896 - DNA, 72 bp, Saccharomyces cerevisiae; identical to SEQ ID NO: 230

SEQ ID NO: 897 - DNA, 72 bp, Saccharomyces cerevisiae; identical to SEQ ID NO: 230

SEQ ID NO: 898 - DNA, 72 bp, Saccharomyces cerevisiae; identical to SEQ ID NO: 236

SEQ ID NO: 899 - DNA, 74 bp, Saccharomyces cerevisiae
ggtttcgtggtctagtcggttatggcatctgcttaacacgcagaacgtccccagttcgatcctgggcgaaatca

SEQ ID NO: 900 - DNA, 74 bp, Saccharomyces cerevisiae; identical to SEQ ID NO: 899

SEQ ID NO: 901 - DNA, 461 bp, Saccharomyces cerevisiae
atggaacaaaggaacaacgtctttcaagcaaaatataatgaatacaaacaaattttggaagaattgcaaacaaaaatcatagaattaggtcatgacaaagatgaacacactatagtcataaaaacactgaaagacgctgagccgacgagaaaatgttacaggatgataggtggcgcacttgttgaaagtgatgttcaaacgagtttgcctattcttgaaactaagaaggaaaacatagaaggtacaataagtaaaatgaaagaaaccttaatacaaactgcaaaagagtttgaaaaatggaaaaaagacaataagattcaagtcgttaaaaactaaaccatatataaaatctattgcagtacttagtttggcaaaaaatataaataaacacaatcaggtactcttatgtatttatgtgagccatttataaagaattataaaggatatgaaaacatatatta

SEQ ID NO: 902 - DNA, 1195 bp, Saccharomyces cerevisiae
tataatgaataatggagacaataaaacgacattagaaaactcaaaaaatgcgtcactagctaatggaaattatgcgattcccacaaaactaaataggctgaaaaagaatgctgaccctagagttgctgcaatttcaggtgctttatctggtgcactatccgcaatgctggtctgtccttttgacgttgcgaaaacaagattacaagcacaaggtctccaaaacatgacacaccaaagtcaacattataaggggttttttggtacatttgctactattttcaaggatgaaggtgctgctgggctttataaaggtctacagccgacggttttaggttatattcctactttgatgatttacttttccgtctatgatttctgtagaaaatattcggtcgatattttcccacatagtccgtttctctcaaacgcttcttctgcaattactgcaggtgccatctctacagttgcgacaaatccgatttgggtagtaaaaacaagacttatgctgcaaacaggtatcggtaaatattccacccattataagggtaccatagacacatttagaaagatcattcaacaagagggtgctaaggctctttatgccggcttagtaccagccctgctggggatgctgaacgttgctatacagtttcctttatatgaaaatttaaaaataaggttcggatattcagaatcgactgacgtatcgacagatgtgacgagctcaaactttcaaaaattaatattggcctctatgctatctaaaatggtagcatctaccgtgacttatcctcacgaaatacttcgaactcgaatgcaactgaaatccgatcttccaaatactgttcaacgccatctccttccattgattaaaattacgtataggcaagagggcttcgccggcttttactctgggtttgcaactaatttggtaaggacagtacctgctgctgtggtaacactagtatcgtttgaatattctaaaaagtatttaactactttttttcaataaagtgaaacagaaaaatgtacatgacacaagctgagggtcgtaaaaagcatctttcgcaattgtttcaacctcatgacccctgtcttgactatgtattcctctttacgtcgggctactcgcaaaatcaagtagttttaaacctttagtatgttgcaaataaagagcaaaaaaagaatttattca

SEQ ID NO: 903 - DNA, 2380 bp, Saccharomyces cerevisiae
cttttgattgtttgtttgtcttttttaagattatcaatattatttaatatctcgcctcaactatcgacaatatagcctattttcttctcttttttggtccgcctctgttgtacgccatttctatactgtgttactaggataaaataaatacctgtactgcatcatctttcctatcaccatctttttccacaaaacaacatttcaactagacacaaggacaacgtaaatttctaaatggatatcgagcctactttcaaagggtacattgaagatgaagatgacgctttgcttattcttcaagcaactttggatggcaagttaaagcatataccaagaaggccttatgaaatagaaagaccttatttgatcgtatcaggtagtatattcgtttttattgaagagatatcgggcatcaagagatggactgatggcgtttcttggtctccatcaagaatatcaggcaagtttctaatatacaaggaactagacaaggaaaacgccgggtctaatgctaatgctacttcgagtggcagtactgattccgccgtcattacggatggaacttctggcgcgagaaataacccttcttcgtcgaaaatcaagctacctcctttgaagaatcaccagtttgatttgccacctactatgggccattcaagttttgagtcagagcaagacacctccatttctccatcaaaccgttcgaacttacctttaaagtatactggcctggtgaagaagacaatatctgtgaagctgaagagacctccattcaactcgattgaaaatttacatattgtctcttattattctgtaaaagatataaaacaaaattgtctagtgactcctaaagcttctccttttttgaaagatgttagaccttcacaggaactaattgtcgcgatgggaaatacaaccttaggcaacgtgaaaaacaattccactaccaccggtaatggtcctaataatataaacaataaaagcaactcttccactcccctgaatactgttatttccacgaataacaatagtgctaatataaatgctgctggcagtaatcaatttactagtgcaaacaaaaattattattataaaaatgatgaaagctctggatacccaatcactcaatttgctcccgcattaccatcaacaactttgatgtatacggcgaatccaccttatatcactcaatctcctgataacactaacgctactggtatgaatacacatgttaataataacaataataatagtaataacagtagtaatagtaataatagtaacaataataataataataataataataataataataacaataataataatattaataatattaataatgtcaatactaatgcagggaacggtaacaatccaaatagattccataacgcctcttttgcttataacaccaccggtgactttattaatccgcaacaacaaggacaaatttcttatccattttattatacaacaattccgataaacaatcctaactattataccacacaacctccaaaccctgtaacaaacgcttcaacgaacgagaatcaaggctattccacctcctcaactcaacacccttattatgggcatcctactgaaagtcaatcagcatcagcagccgcaggcgctactggcactcctggtacagccgagaatgtccttcccgtatccagtatgcagccactactccatcaagccaataataatagtgcaagctctgctacctctacagctccttatccggtgtattctatgaatgtgaatgttccttattacaattcttctgcttctgcatacaagagggcacaagaaaatactacttcaaatacgaatgcagaaccttctggtgctacaagcactaactcaggcaccatgctatcaaatcctgcatacgctaattctcagtacactccatcgcaagtgtattaccagggattcccccaatatgccatggcaagtgctcaaaatccgtctatgtatcaacaccagcaccaacatcctttgcccactgtatatccaatagcgacgcctcaacaaaatataatgagctctggtcacactttgagcactattggatctgatcctcaacatcatcactatcaacaagagcccaacgaccacaaaaacttcgctatgggtcacgcgaacaataatatcttaaacatcaccaataatgatacgatgaacaacctcaatacaaacacttcaactactacacaataagtaaatatattttaaaaaagtactccgattttcttttcttctccttgcctttttgagtatcgggtttactcatgaaaattatatcatttttcattttacagttttatatacttcgcttctttacgtaatcatgcctttaatttca

SEQ ID NO: 904 - DNA, 1737 bp, Saccharomyces cerevisiae
atgggttcatgttgtagttgcttgaaagattcttcagacgaggccagtgtctcaccaattgccgataatgaaagagaagcggtgactttattactagggtatttggaggataaagaccaattagacttttactctggtggtccactaaaggccctaactactttggtgtattcagataatctaaatttgcaaaggagcgccgctctggcattcgcagaaattactgaaaaatacgtccgtcaggtctctagagaggtactggaacccatcttaatattattacaaagccaagatccacagattcaagtggccgcttgtgcagccttgggtaatttggccgttaataatgaaaataaattattaattgtggaaatgggaggcttagagccattaataaaccaaatgatgggtgacaatgtagaagttcaatgtaatgctgttggatgcattaccaatttagccacaagggatgacaataaacataagattgctacttctggtgctttaattccattgactaagctagctaaatccaaacatataagagttcagagaaatgctacaggtgcattattaaatatgacacattctgaggaaaatagaaaagaattggttaatgcaggtgctgtgcctgtattggtatctttactgtcgtccaccgatcctgatgttcagtactattgtactactgctttatcaaatatagcagtggatgaagccaatcgcaagaagttggctcaaactgagccaagattggtttccaaattggttagtctgatggattctccatcttcaagggtaaaatgtcaagctactttggctttacgaaacctagcgtccgatacaagctaccaattagaaattgtaagggctggtgggttgcctcatttggtaaagttgattcaaagtgattctataccactggttttggctagtgtggcatgcattagaaacatttctattcaccctctaaatgaaggtttaattgttgatgcaggtttcttaaaaccattagtaagattgttggactataaggattcagaagaaattcaatgtcacgccgtatctactttgagaaatttggctgcatcatctgaaaaaaacagaaaagagttcttcgaaagtggtgctgtcgaaaaatgtaaggaactggctctagattcacctgttagtgttcaaagtgaaatttccgcatgttttgctattttagccctagcagatgtctccaaattggatctactggaagcaaatatcttagatgctttaatccctatgactttttcccagaaccaagaagtttctggtaatgctgctgctgctttggcaaatctatgttcaagagtgaataattatacaaaaattattgaagcatgggatcgtccgaatgaaggcattcgtggatttctgattagatttttgaaaagtgactatgctacctttgaacacattgcgctatggacaattttacaattgctagaaagtcataatgataaagtggaagatttggttaaaaatgatgacgacatcattaacggagtgagaaaaatggcagatgtgacctttgagcgtttacaaagatcaggaattgatgttaaaaatccggggagcaacaacaatccaagctcgaatgataacaacagtaataacaatgacacaggatctgaacatcaacctgtagaggatgcaagtttggaattgtataatattactcaacagattttacaatttttacattga

SEQ ID NO: 905 - DNA, 1735 bp, Saccharomyces cerevisiae
agtaattcgtaaaagaaaccataatgtcacaatttgttggtttcggagtacaagtggagctaaaagatgggaagctcattcaggggaaaattgccaaagcaacctcaaaaggattgactttaaatgacgttcaattcggcgatggtggtaaatctcaagctttcaaagtgagggcgtcaaggctaaaggacttaaaggttctaactgttgcctctcaatccgggaaaaggaagcagcaaagacaacagcagcaacaaaacgattataatcaaaatcgcggtgaacatattgattggcaagatgatgatgttagtaagataaaacaacaggaagatttcgatttccaaagaaatttgggcatgtttaacaaaaaagacgtcttcgcacaattaaagcaaaatgacgatatattaccggagaatagattacagggacataacagaaagcaaacccaattgcagcaaaataattatcaaaatgatgaattggttattccagatgcaaagaaagattcatggaacaagatttcttcaagaaatgagcaaagcacacaccaatctcagccgcaacaagatgctcaagatgatctggttttggaagatgatgaacatgaatacgatgtcgatgatatcgatgatcccaaatacctaccaataactcagtctttgaatattacacatttaattcactctgcaactaactctccatccataaatgataaaacgaaaggtacagttataaatgataaggatcaggtactagctaaattaggccagatgatcatcagccagtcaagatccaactcaacatccttgccagctgcaaataaacaaacaaccatcagatcaaagaacactaagcagaacattcctatggctacaccagtacaactactagaaatggagagcatcacgtccgaatttttcagtattaactcggcagggctactagaaaattttgctgtaaacgcatcgttcttcttaaagcagaaactaggtggccgtgcacgtttacgtttacaaaattctaatccggaacctttagtagtaatactagcctcagattccaacagatctggtgcgaaagctctggcgttgggtagacatctttgccaaacggggcatatccgtgtcataacattatttacatgttctcaaaatgaactacaggattccatggtcaaaaagcaaacagatatttacaagaagtgtggcggaaaaattgttaatagtgtatcgtcgctggaatctgctatggaaacattaaatagccctgtagaaatagtcatcgatgccatgcagggatatgactgtacattgagcgatctggcggggacgtcggaagttattgaaagcagaattaaaagcatgatatcatggtgtaacaaacagcgaggatctactaaagtgtggtctttggatattccaaatgggtttgatgcgggatccggcatgccagatattttcttttcagacaggattgaagcaacaggaattatttgttctggctggcctttgattgccatcaacaacttaattgcaaatttgccaagtctagaagatgctgttttgattgatataggtataccacagggcgcctattcacagagaacttctttgcgtaagttccaaaactgtgatcttttcgtcactgacgggtccctgctattagatttgtaaaccaagaattactttagcctaaactggatacatacgtataagcatacggtaaggaa

SEQ ID NO: 906 - DNA, 1233 bp, Saccharomyces cerevisiae
gtgcattcgtcactcataacaaaaagaactacacaatacgtaaacaacgtgcgaaaatatctatatacaaggggagaaaacaaaagtgaaagtgcattacagcccatcacagatcattataatacaatatgccgaccaagtcaacttttagtcgctggaagaaggcggacctaattgacctggccaacaagctggaaattgacggcttccccaattatgccaagaagagtgatatgatcgattacctcgaatcgcacttgaatcatcttgagaaacctgtggattttaaagacgactacccggaactaaggtccttttatgagtcgatgacagtggaccagtcaaaggatgaacggaacgaatacggatccggatctggaaacgggtctgggtctggatcctgtgacaccgccacaaatgattccgatctggagaaagcgtacatcaaggaggatgatgatgagaaaccgcaatcaggcgatgaaacaagcgcgacaaagccgctttccagcaggaatgcaaattcaaacgccaaaacgaacttcaatttgttggattttagcacagataacgactcgtccacctctgcgtttactaagttcaagtttaactttcaggaatacctctccgatattagataccaaacgcagaaattgaatgaaaatgttcaggactatctttccactatttccgccgtcgatacgattttttccttgttggaattctcttttctggtgagaaacatattagccgccgggcagccaacttcttcttcttcgctcgcatcgtcgctggaagccgccgttgccgcccataataaatatcaatacacgctcgatttctgtttaccaatactcacgtggctgctcttctttaggggtattccaacgttagtgtcatactacatcaacttcatccgctacgacctgaacatcgagttggacccgatgactttcaatctcacgaaattcttgatttctttggcaatcttcaaaacttgtaataataaaaacatagatttccattcttttcgatgtgttaaccaactatggacacaactctgtacagtgaaccgttcccttggtatggtacctctagtattctccatggttagttgtctcctcactctatacgtattatagtatattttcttacatacgtatacacacgcgtacgtaagccgcgaagtgtgtatttactactctgtattattgtaataaactcttctccttc

SEQ ID NO: 907 - DNA, 381 bp, Saccharomyces cerevisiae
atggacgcattgaactccaaagaacaacaagagttccaaaaagtagtggaacaaaagcaaatgaaggatttcatgcgtttgtactctaatctggtagaaagatgtttcacagactgtgtcaatgacttcacaacatcaaagctaaccaataaggaacaaacatgcatcatgaagtgctcagaaaagttcttgaagcatagcgaacgtgtagggcagcgtttccaagaacaaaacgctgccttgggacaaggcttgggccgataaggtgtactggcgtatatatatctaattatgtatctctggtgtagcccatttttagcatgtaaatataaagagaaaccatatctaatctaaccaaatccaaacaaaattcaatagtta

SEQ ID NO: 908 - DNA, 804 bp, Saccharomyces cerevisiae
atgtcgaaagctacatataaggaacgtgctgctactcatcctagtcctgttgctgccaagctatttaatatcatgcacgaaaagcaaacaaacttgtgtgcttcattggatgttcgtaccaccaaggaattactggagttagttgaagcattaggtcccaaaatttgtttactaaaaacacatgtggatatcttgactgatttttccatggagggcacagttaagccgctaaaggcattatccgccaagtacaattttttactcttcgaagacagaaaatttgctgacattggtaatacagtcaaattgcagtactctgcgggtgtatacagaatagcagaatgggcagacattacgaatgcacacggtgtggtgggcccaggtattgttagcggtttgaagcaggcggcggaagaagtaacaaaggaacctagaggccttttgatgttagcagaattgtcatgcaagggctccctagctactggagaatatactaagggtactgttgacattgcgaagagcgacaaagattttgttatcggctttattgctcaaagagacatgggtggaagagatgaaggttacgattggttgattatgacacccggtgtgggtttagatgacaagggagacgcattgggtcaacagtatagaaccgtggatgatgtggtctctacaggatctgacattattattgttggaagaggactatttgcaaagggaagggatgctaaggtagagggtgaacgttacagaaaagcaggctgggaagcatatttgagaagatgcggccagcaaaactaa

SEQ ID NO: 909 - DNA, 1232 bp, Saccharomyces cerevisiae
ctggaaaaagacctgcaagaactatagttggttcttgaatatcaagtaatatattacttctctgtcgtaactttttgttgctttcaagttcaacgtcttttaaaaaccaagaaattattgaacataaataatatcactctaacacttattaggaaaccgaaaggagcaataacaaacatgttaggaataagatcatctgtcaagacctgcttcaagccaatgtctttaacttccaaaagactgatttctcaatctttgctggctagcaaatccacgtacaggaccccaaattttgatgacgttttaaaggaaaataacgatgctgataaaggccgttcttatgcttactttatggtcggtgctatgggtcttttgtcatctgcaggtgccaaatcaaccgtagaaacctttatttcatctatgaccgctactgccgatgttttggctatggctaaagttgaagttaatttagcggctatcccattgggtaaaaacgtggttgtcaaatggcaaggtaagcctgtgttcattagacacagaactcctcatgaaattcaggaagccaacagtgtggatatgtccgctttgaaggacccacagaccgatgctgacagagtcaaagaccctcaatggttaattatgctgggtatttgtactcacttaggttgtgttccaattggtgaagccggtgattttggtggttggttctgtccttgccatggttcacattatgatatttccggtagaatcagaaagggacctgcccccttaaacttagaaattcctgcttatgaattcgatggtgataaggtcattgttggttaggtttgtttttcgtcctcgaaaactacatctttattgtctatttgtttcacccttattttgatttttcatttactatccattatgttatgaacgggaactatacaactaacctaagaattttgaaatcacaacaaaaataatcaacatcacagtctcgaagggattacgctcaaaaaggaacgaaaatcactatactgtattccctgttgattttcctaagaatatattcttatacaatatggagaaaacaaaaggataagaaaagaaaggggaaataaagaagatttggacctatttattactacttttttgtctcaccatcttctttttctattcataatatttgatattcctttatttatctgcatgtatttataattaacgaaactatttatcttccctcgtcc

SEQ ID NO: 910 - DNA, 558 bp, Saccharomyces cerevisiae
ttaatttaaatcatcattcgagcgagctttctataccaggaccatactgattattgcaaggaacttgaataaaccagatttcatactataaaaactatattaaaaatgtctgccccaaacccaaaggctttcccattagccgatgctgcattaacccaacaaatcttggatgtcgttcaacaggctgctaacttgagacaattgaagaaaggtgccaacgaagctaccaaaactttgaaccgtggtatctccgaattcatcattatggctgctgactgtgaacctattgaaatcctattgcatttaccattactatgtgaagacaagaatgttccatatgtctttgttccatctagagttgctttaggtagagcttgtggtgtttctagaccagttattgctgcttctattaccaccaacgatgcttctgctatcaagacccaaatctacgctgtcaaggacaagattgaaactttattaatttaagtagattggattatatctatcaacatagtttttgtaccatctatatactataaaaaagttttttgctttcca

SEQ ID NO: 911 - DNA, 788 bp, Saccharomyces cerevisiae
attgcttttctcaaaaagactaatcaattagaataacaaaagaaacatatacatataatgactgaattgtgtcctgtctacgcccctttctttggtgccattggttgtgcctctgcaattatcttcacctcattaggtgctgcttacggtactgctaagtctggtgttggtatctgtgccacttgtgtgttgagaccagacctattattcaagaacattgttcctgttattatggctggtatcattgccatttacggtttagttgtttccgttttggtttgttattcgttgggtcaaaagcaagctttgtacaccggtttcatccaattgggtgccggtctatcagtcggtttgagtggtctagctgctggtttcgctattggtattgtcggtgatgcaggtgttagaggttcctctcaacaaccaagattattcgtcggtatgattttgattttgatttttgctgaagttttgggtctatacggtttgattgttgctttgttgttgaactccagggctactcaagatgttgtctgttaaggcagcttctgaatcactaaagcaggaatagagtatacaaaagaatctttttgtgagaaactatgaaaactatcaaaatttttcatcttagagattgtttatagcccctattcttacttcatatccaaactacctcatttcaagcttcctttttattagtaccattattattgtttaaaagagtattacacgctaaatatgtatatcttaatttttaatgtgtataaaatagaaaatttgaatatcaa

SEQ ID NO: 912 - DNA, 3759 bp, Saccharomyces cerevisiae
cagaaacataggaatcggtaaatgacaaagaaatcatttgtgagcagtcctattgttagggactcgacattgctggtaccaaagtcattaatagcaaagccgtacgtattaccgtttttcccgttatacgctacctttgcccaactatatttccagcaatatgatcgttacatcaaaggacctgagtggacttttgtctacttggggacattggtatccttgaacatcctagtcatgttaatgcctgcttggaatgtcaagatcaaggcgaaattcaactacagtactactaaaaatgtcaatgaagctactcacattctcatctacaccactccaaataatggttctgatggtatcgttgaaattcagagagtaactgaagcgggctctttgcagacttttttccaatttcaaaagaaaagattcttgtggcatgaaaatgagcaggtattttcttcaccaaagttccttgttgatgaatccccaaagatcggtgatttccaaaaatgtaagggccattccggtgacctaactcatttgaagagactatatggtgagaatagttttgatattcctattccaacatttatggaattattcaaagagcacgctgttgcgccattgtttgttttccaagttttctgtgttgccttatggctattggatgagttctggtattattctttgtttaacttattcatgattatctccatggaggcagctgcagtatttcaaagattaactgccttgaaggaatttagaactatgggtatcaaaccttataccattaacgtgtttagaaacaaaaaatgggtagcattgcaaaccaatgaattgttacctatggatttagtgtctataacaagaaccgccgaggagagcgcaattccttgcgatttgatcttgctcgatggctccgctattgttaatgaagcaatgctttcaggtgaatctactcccttgttaaaggaatccattaaattacgtcctagtgaagataatttacaactggacggtgttgacaagattgctgtgttacatggtggtacaaaggcattacaagtaacacctcctgaacataaatcggatatccctcctccacctgatggaggtgccttagccatcgtcaccaaaactggctttgaaacatctcagggttctttagttcgagttatgatttactccgctgaacgtgtttccgtcgataataaggaagcgttgatgttcattcttttcttgttgattttcgctgttattgcatcctggtacgtttgggttgagggtacaaaaatgggtagaattcaatccaaattgatcttggactgtatattaattattacatctgttgttcctcctgagttaccaatggaattgaccatggctgtcaacagttctctggccgcccttgccaagttctatgtctattgtactgaaccatttagaattccatttgctggtagaattgatgtttgttgtttcgataaaactggtactttgaccggcgaagatcttgtgtttgaaggtctagctggtatctctgcggactccgaaaacattcgtcacttgtacagcgctgccgaagcaccagaaagtacaattcttgtcattggtgctgctcacgctttagttaaattggaagatggtgatattgttggtgacccaatggaaaaggcgaccttaaaggctgttggttgggctgtcgaaagaaaaaacagtaactatagagagggcaccggaaaattggatattatccgtagatttcaattttcttctgctttaaaaaggtctgcttctattgcttctcacaacgatgccttgtttgctgctgtcaaaggtgcacctgaaacgattcgtgaaaggctttctgacattcccaagaattatgacgaaatctataaatcctttacacgctctggttcaagagttttggctttggcttctaagtcgttgccaaaaatgtctcagtctaaaattgatgatctaaaccgtgatgatgttgaatctgaattaacctttaatgggtttttgattttccattgtcctctgaaggatgacgctattgaaaccattaaaatgttaaatgaatcctcccatcgttctattatgattactggtgataatccattaactgctgttcatgtggctaaagaagttggcatagtttttggcgaaactttaatcttagacagagcaggtaaatctgacgacaatcagttgctgttccgtgatgttgaagagacagtttccatcccatttgatccatcaaaagacacttttgatcattctaaattatttgatagatatgatattgctgttactggatatgctttgaatgccttggaagggcattctcaattaagggatctattacgtcacacctgggtttacgcacgtgtttcaccatcccaaaaggagttcttgctgaatacactaaaggatatgggatatcaaactttaatgtgcggtgatggtactaatgatgttggtgctttgaaacaagctcatgttggtattgcattgttgaatggtaccgaagaaggtttgaaaaaattgggtgaacaacgcagattggaaggtatgaaaatgatgtatataaagcaaactgaatttatggctagatggaatcaaccacagccacctgttcctgaaccgattgcacacttattcccacctggtccaaaaaatcctcattatctgaaagctttagaaagcaaaggtaccgtcattacgccagaaatcagaaaagcagttgaagaagcaaattccaaacctgttgaagtcatcaaaccaaatggactatcggaaaaaaaacctgctgacttagcttctttgttgttgaactctgctggtgatgcccaaggtgatgaagcaccagctctaaagttaggagatgcatcttgcgctgccccttttacctcgaaactggccaatgtttctgctgttactaacattatacgtcaaggccgttgtgctttagttaacacaattcaaatgtacaaaatcttggccttgaattgtttaatcagtgcctactctttgtccatcatttacatggctggtgtcaaatttggtgatggtcaagccactgtctccggtttgttactatcggtttgtttcttgagtatttcccgtggtaaacctttagaaaaactatccaagcaaaggccacagtccggaattttcaatgtttacattatgggatctattttgtctcaatttgccgttcatattgccactttagtttacatcactacagagatttataaattggaacccagagagccacaagttgatcttgaaaaggaatttgctccatcattattgaatacgggtattttcatcattcagttggtacaacaagtctctacatttgctgtcaattatcaaggtgagccattcagagaaaacattaggagtaacaaaggtatgtattatggtttattgggtgtgacaggtttggcacttgcaagtgctactgaatttttacctgagctaaacgaagccatgaagtttgtgccaatgactgatgactttaagattaagttgaccctaacattattgctcgatttctttggtagttggggtgtcgagcattttttcaagtttttcttcatggacgacaaaccatcagacatttctgtgcaacaggtcaagattgcctctaaatgataaatcttttatgtagtacccctttttgtatttatatacttatattacccattcatatagatcttttttaatgggtgtattgttaagttt

SEQ ID NO: 913 - DNA, 3109 bp, Saccharomyces cerevisiae
ctgctcgtattgaactccactataagcgcaccaaaaagatacaaacgtcaattatggaaggctcaacgggatttgatggagacgctactacttttttcgctccagacgctgtgtttggtgacagagtgcgcagatttcaagagtttttagatactttcacctcatacagagactctgtaaggtccatacaagtttacaacagcaataacgcggccaactacaacgatgatcaagatgacgcagacgaacgagatttgctaggtgatgacgacggtgatgatcttgaaaaggaaaagaaagcagcatcgtccacctcattgaatatactccctcacaggattatcatctcgcttgatgacttgagagaattcgacaggtcgttctggtcgggcattttagtcgaaccagcatacttcatcccgcctgccgaaaaggcgcttactgacctagcagattccatggacgatgttccacatcccaatgcctctgcagtatcgtctcgccatccttggaagctttcgttcaaaggctcatttggtgcacacgcattgtctcctcgtactctaacggcacaacatttaaacaaactggtctctgttgagggtatcgtaactaagacttcgttggtcaggccaaagcttatcagatctgtccactacgcggcaaagactggtagattccattacagagattatacagatgctactacaactctcaccacccgcatcccaacgcctgccatctatccaacggaggacactgaaggtaacaaactaaccaccgaatatgggtatagtacgttcatagaccatcagcgtatcactgtgcaagaaatgcccgaaatggcccccgctggccaacttcccaggtccattgacgtcattctcgatgacgaccttgtggacaagaccaagccaggtgacagagttaacgttgtcggggtattcaagtcgcttggtgctggtggcatgaaccagtccaactctaatacattgatcgggttcaaaactctgatcctaggtaatacggtgtatcctctccacgccagatccacgggtgtcgctgcgagacaaatgttgacagatttcgatataagaaatatcaataaactatccaaaaaaaaggacattttcgatatcttgtctcaatctttagcgccttctatttatggacatgaccatataaagaaagccattttattgatgctcatgggaggtgtggagaaaaatttagaaaatggctcgcatttaagaggtgacatcaatatcctaatggtgggtgatccatccactgccaagtcccaattgctaaggtttgtgttgaatacagcatcactggcaattgctactactggtagaggttcttccggtgtcggtttgaccgcagcggtcactactgatagggaaacaggtgaaagaagactagaggctggtgccatggttcttgctgaccgcggggttgtatgtattgatgaatttgataagatgacagatgtggatagagtcgccattcatgaagtaatggaacaacaaacggtgacgattgccaaagcaggtattcacacaacattaaatgctcgttgtagtgttattgctgccgcaaatcccgtttttgggcagtacgatgtcaatagagatccacaccaaaacattgccctaccggactcgctgttgtctcgttttgatttactatttgttgtgacagacgatatcaatgaaatcagagatagatccattagtgagcatgtcttaagaacacacagatatttgcctccaggttatttagagggtgaacctgtgagagagcgtttgaatttatcattagccgttggggaggatgcagatataaatcctgaagagcattccaactccggggctggtgtagaaaatgaaggagaagatgatgaagaccatgtcttcgaaaagttcaaccccttattacaagcaggtgctaagttagcaaaaaacaaaggtaactataacggtacagaaattccaaagctagtcaccatcccattcttaagaaagtacgttcaatatgccaaggaaagggttattccacagttaacacaagaagccatcaatgttattgtgaaaaattatactgatttaagaaacgatgataataccaaaaaatcgcccattactgcaagaactttggagactttgatcagattagccacagctcacgccaaagtcaggttatccaaaacagtcaacaaggtggatgctaaagtggctgccaatctactaaggtttgcactattgggtgaggatatcggcaatgatatcgatgaagaggaaagtgaatacgaagaagctttgtcgaagaggtctccacagaaatcaccgaaaaaaagacaaagagtcagacaaccagcaagcaactctggatccccaatcaaatctactccaagaaggtcaacggcatcttccgttaatgccacgccatcgtcagcacgcagaatattacgttttcaagatgacgaacagaacgctggtgaagacgataacgatataatgtcaccgcttcctgcggatgaggaagctgaattacaaagaaggcttcaactggggttgagagtgtctccaagacgtagagaacatcttcacgcacctgaggaaggttcgtcgggacctcttaccgaggtcggtactccaagattacctaacgtatcttctgcaggtcaggatgatgagcaacaacagtcagttatttcttttgacaatgtggagcctggtaccatttctactggtagattgtctttaatctcaggtattattgcgcgtctgatgcaaacagaaatatttgaagaagaatcctatcctgtggcctctttgttcgaaagaatcaacgaagaactaccggaggaggaaaaattctccgctcaagaatatttagcaggtttgaagatcatgtcggacagaaataacttaatggttgctgacgataaagtttggagagtctgatgtcacaggaatgtttactaaaagacttccattcttggctttttttctttttgtcattcataattttcagttcatttccagattatttagttcattaattgttattcgtgtattaaagaattatgtattaaaacgcttat

SEQ ID NO: 914 - DNA, 693 bp, Saccharomyces cerevisiae
atgtctgacgaagaacatacctttgaaactgctgacgctggttcctccgccacctacccaatgcaatgttctgccttgagaaagaacggtttcgttgtcatcaagagtagaccatgtaagattgtcgacatgtccacttctaagactggtaagcacggtcacgctaaagtccatttggttgccattgatatcttcactggtaagaagttggaagatttgtctccatctactcacaacatggaagttccagttgtcaagagaaacgaataccaattgttggacattgatgacggtttcttgtctttgatgaacatggacggtgacactaaggatgatgtcaaggctccagaaggtgaattgggtgacagtttgcaaactgcttttgatgaaggtaaggacttgatggttaccatcatctccgctatgggtgaagaagccgccatctccttcaaggaagctgctagaaccgattaaaccggttaacatcatggcatgggatataaatgaaaaaagaaaaaaaaactccgacgccccttccatcacatcatgtactcttcgctgaaccgggtttttttctttgcaatttttttttcgttctcctaaagcatacacaaataaatccttttttttattttctatttattttgttatttatcatctatatagcaataatatactttgtttttattcgta

SEQ ID NO: 915 - DNA, 765 bp, Saccharomyces cerevisiae
aggtcctgctagctcgtataccaaaaatgggagacaattactcgacttacttgcttgatattgaagggacagtgtgcccgatctcgttcgtgaaggagactttattcccttatttcacgaataaagtgccgcaattggttcaacaggatacaagggactccccggtttccaacattctgtcgcagtttcacatcgacaataaggagcagttgcaggcgcatattttggagttggtggccaaggatgtgaaggatccaatcttgaaacagttgcaaggctacgtctgggctcacggatacgaatctgggcagattaaggcgcccgtttatgcagatgctattgactttatcaagaggaagaagcgtgtgtttatctactctagtggatctgtaaaggcacagaaattgctgttcgggtatgttcaggatcccaacgcgcctgcgcatgattcgttggatttgaattcttatatagatggttatttcgacatcaacacttctggaaagaaaaccgaaacacagtcttacgccaacatcttgcgggatatcggtgcgaaggctagcgaggtactgttcttgagcgataatccattggaattggacgcagcggccggcgttggaatagctactgggttagcttcccgacctggtaatgcacctgtccccgatgggcaaaagtaccaggtatacaagaattttgaaactctttaacaaaactgtatatatgcgctaaaagcagtataatcattatttgttgttgttatta

SEQ ID NO: 916 - DNA, 1538 bp, Saccharomyces cerevisiae
tttattgtcctgcaaataagctaattatataattaataatggcaatcgttaatagttggctaatttgtttagtcagtattttttccttcgtggtacgtgtagaggccgctacattttgcaatgcaactcaagcatgtcccgaagataaaccatgttgctcacaatatggtgaatgtggtactggtcaatattgtctgaacaactgtgatgtaagatattcgtttagtcatgattcatgtatgcctgtacctatctgcaagagttcatccactaaattcaaagattattcctctaagttggggaatgctaacactttcttaggaaatgttagtgaggctgattggttgtatactggtgacgttttggattatgatgatgaagaaagtttaattttggcgatgcccaagaacagtggtggtaccgttctttcctccacgagggctgtttggtatggtaaggtcagtgctagaataaagacgtcacatcttgctggtgtggtcactgggttcattctgtattccggcgcaggtgatgaacttgattacgaattcgtcggtgctgatctagaaactgctcaaaccaatttctattgggaaagtgttttgaactacacgaattctgccaatatttccactactgatacatttgaaaactaccatacttacgaattagattggcacgaagattatgtaacatggtccatcgatggtgtcgtcggtagaaccttgtacaagaacgaaacttataacgccaccacccaaaaatatcaatacccacaaaccccatccaaggtggatatttccatttggccaggtggtaattctaccaacgctccaggaaccattgcatggtctggtggtgaaattaattgggacgcatccgatatcagcaacccaggatattattatgctattgtcaatgaagttaatatcacatgttatgatccaccaagcgataccaagaagaatggtacttctgcttatgtgtatacttcgtccagtgaatttttggccaaagacattgctattaccgatgatgaggtcatgatggacagtgatgagggatctggcttggacccacataagggagctaccacatcttccacccaaaagagttcttcctcaactgcaacctcttcctccaaaacgtcatccgatcacagcagttcaactaagaagagtagtaagactagttccaccgcttcatcatcatcatcatcatcttcttcttcttcttcttcttcctctactgctactaagaacggagataaagtcgtatcctccgtatcctcttccgtcacttcccaaactcaaacaacatcttctgtaagcggaagcgcctccagcagtacaagctcaatgagcggtaataacgcaggtgccaacgtagcggcaaactggcgtttgactgttttatgtgtcatcctaggttatgtcttataggaggatctgcatctaagaacaaataggctacacaggactctcaaaaaaaaatgtattaataaataaaagaacttaaatatagactttttattcgca

SEQ ID NO: 917 - DNA, 1846 bp, Saccharomyces cerevisiae
aaaaacagtttcttttacaagcttatttaattttggttttaaggagaaagcactaataaaaagggcaaggactgcaatcaacaatctttattggcgaacagttaagggtcctctcgagaagaaacattaagacatcatcgcacaaaaaacatggcgcccatctttagaaattaccggttcgctatcggtgcttttgccgttattatgctcattttgttgattaaaacatcttccatcggtccaccttctattgcacgtacagttactcctaatgctagtattcccaaaactccggaggacatctctatcttgcccgtcaatgatgaaccaggttaccttcaagattcgaagactgaacaaaactatcctgagcttgccgatgctgtgaagtcacaaacaagtcaaacatgcagcgaagaacataagtatgttatcatgatcgatgccggctctaccggttcccgagtacatatatacaagtttgacgtctgtacttccccacctacattacttgatgaaaaattcgacatgttagagcctggtttatcttctttcgataccgattccgttggtgccgctaactcccttgacccattactgaaagtagcaatgaactatgtccctattaaggcaagaagttgtactcccgttgcggtgaaagctactgcaggcctaagactcttgggtgatgccaaatcttcaaaaattttgagcgctgtaagggatcatttggagaaggactatcctttcccagttgtcgaaggtgatggtgtttccatcatgggcggtgatgaagaaggtgtcttcgcctggattactacaaactacctattaggtaatatcggtgctaatggccccaagttacctactgctgccgtttttgacttaggcggagggtctacacaaattgtttttgagcctactttcccaataaatgaaaaaatggtcgatggtgagcataaatttgatttgaagtttggtgatgaaaattacaccttgtaccaattttctcatctaggttacggtttgaaggaaggaagaaataaagttaactctgttcttgtggaaaatgcattaaaagacggcaaaatattgaagggtgataacactaagactcatcaattgtcatctccatgcctaccgcctaaagttaatgccacaaatgaaaaggttacattagaatccaaggaaacttataccattgactttatagggccggacgagccaagtggtgcacaatgtagatttctgactgatgaaattttgaataaagatgctcagtgccagtctccaccatgctctttcaatggggttcaccaaccttctttagttcgtacattcaaagaatcgaacgatatctatattttctcttatttctacgacagaacccgtccattgggtatgcccttgtcctttactttgaatgaattgaacgatttggcaagaatagtgtgtaaaggcgaagaaacttggaatagtgtcttcagtggcattgcggggtccctagatgaattggaaagtgactcgcacttctgtttggacttatcttttcaagtgtccttattacatacgggatatgacattccattacaaagagaattgagaactggaaagaaaattgccaataaagaaatcggttggtgtttaggtgcgtcattaccattgttgaaagctgataactggaaatgtaaaattcaatcagcttgaataagaacatggacaccgcttttcgtcccatgtatattaaggaagaggagattgcggtgatatgtattctgttatatgtcctattctataacccttgaacaatatgtaaacgatttttacgttatgaaaatcactatta

SEQ ID NO: 918 - DNA, 2948 bp, Saccharomyces cerevisiae
atgcatggatgccagtctctgtaataaccacggttttagcatgtctgtggctctcttataggctctataagtttctcactattcctgtgtccagcatcgtctccactttgaagatcaaaactccaccggcaacaaaagtgtctatcgacaaaatagccacggattcagtgaccattcattgggagaacgaacctgtaaaagcggaggacaatggcagtgcggatagaaacttcatttcccactatttgttgtatctgaataacacacaattggctatcttcccaaacaacccaaactccctttacacatgctgctccatcacgggtctcgaggcggagacgcagtaccagttagattttataacgattaacaacaagggctttatcaataagctaccctccatttactgtatgacgaaggcgagagaggcgaatgaagcgttaaagactagaaaatggagaagaaacaccatcacatcgtccacagctatgcagcccagaaactccaagtccgaacccgccccgttgccctctcactactcctctgtttccctgtctactttctcatccaatattactaatagcgccaccagcaataatggttcaaatctacccgcttacacatctttgactacgttgaaggatttggattcgttttccatcgatgatctgaaaaagatactgatttgcgcccaggaggacttacacgatgtgttgtcccaacaaacttcgcttttgcaagattttcaagaatcgaagttagaattagaactagaactggataacttgaaaacacattggtcgcacgaaattgacttgcggaaatccttgaaatccaatatcaagtcattggagaattctaaactattgaccgatttgaaaatcgaaaaattgaacaagaaaatcgacaaatccaaggaaaaaatatcgaaaatgcgcaatgatatgcagaaatggtctcaggaagataccgagctgttgtctaaggataccataaaggagaaatatttcaaattgctaaatgaatccaatgcctctgtggccaatatcaacaaagaaattgagtctttacaaaatgaaatttccaagatggaggagtctaacaagagattgaacgcctccaaaaaatcattgattacttccatagtggtgaatgccaatgtggaaaacgataaacctattgctagcggagaattgtcggctgttttgaagaagctcaatgattttactttagaaaaaaatggatttttaagtaatgctggtgaagagtttctatccaaattgaatgcagactcatcattgattaaaatgattaagcaagagctaagcattgatcaagaattggaggccaactggaaattgcagaggtcaaatttgttgaagaaaattagtgctttagaaaaccaatttaatgaaatgagccttaataatcggaatttgaaaacaaaattaatggttcaaccatataagaataacggtgattcgcttgctgccaccaattcgaataattccgcggaaaaaaacagaagttctggatcgattcaattaccattatccaacaacatgtcaagaacggggtccattgatttaatatcgaataataacaaaagtattaacaacagtaatgctgattctgctcctccgttgaggttgcacaatccagtttcgtactctccttcgaatgaacccatacaaccttcaagcagtctattgagtcaattgacacaggacaccgataatcgatcaatgctctccaatcacatctcatcgaacaacgaaaacaagcaacagccttcttcatattcacatgctttacctacaactgctactgctaatgcaacagcaacagcaacagcaactaatggtcactcaaggtcaaatttatggaccaccgcacaattcgctcaaccttcgcatcaacaagtatctacagaattggatcaagcttttgaatacgataatgcaaaccacttaatcagtggtttgcaaaatatgatctacgacgaaacagactatcctgataacataagcaattattccaagggttttactacagacgaacttgacaattactggactaagcagcaaccccaggtgcgcagcacaaatgaaagtcttttctctacgactggaacacctatgtcatcatataaggctaacccagtaatatctccatattctagttctcatttgcgacaaacctccaacgcaaccaatacgaatcctatgcatccacagagtctactcgccgctacattgaatgatccttcattacaaagttttgtacgcagtggttctttctacagtgctccgcaacctgcaaactccttacagaacaatatcaatggcaatgaaaccgagaacattagtccaaggatatcaagtgacttcaatttattggtgccaaacttgagcccacgactctcaaacgatgtgcccattgttccaggcaataacactactttaacaccttcacactcgaacatattaacaatgaaccatcaaccaacggcggataacattacacgaagatctttccatgcctcttcaccacctttcaactccatatggaattcaaatacaaatcaactttctcctccattggaggagcagtatcacctcgatgtgcctgtgggtccaaaggttcccgctaaagaaccaagccctaagccttctcacaagaggaaccaaagtaacagcagcatttcttctgcatggtccaagtttaagcacaagtctgcatcatcacctgctaatgcggacacggatattcaagattcatcaactccatcaactagtccaagcggtagaagaatgtcaaaactgttgtccaagagcggtatgaataatctatttaacccgcacagtcacgactcatgaacaatattataatacttccaggtcgtgtatatatgtagatatataaattatgaaacataatatatgaaa

SEQ ID NO: 919 - DNA, 655 bp, Saccharomyces cerevisiae
cggtgaggaatggaagtgtaaagaagcgaacgagggaaaaaaagttgtgacctaggggaaggttaaaattgtcatcatcatcagcgtgagaaagtcgaaacaatgagcggtagtaggggcaatagcagcaatagtagcgtcagtaataatagtaataataacaataataatgacgggggcgacgagagattgctgtttctaagaagcgtgggcgaacgcaatgaaattggctttccctctagattcaagtcggcgcattacaagaaaccgacaagaagacacaaatcagcgaggcagttgatctcggacgaaaacaagcggatcaacgccttgttgaccaaggctaacaaagctgcagagagttctactgctgctaggcgacttgtgcccaaagcgacgtactttagcgtggaagcgccaccgtctatcaggcctgccaagaagtactgcgatgttactgggttgaagggcttctacaagtcgcctacgaacaacattcggtatcacaacgcagaaatctatcagttaatcgtaaagccgatggcccccggcgtcgatcaggagtacttaaaattgagaggggccaacttcgttctaaaataggcattgtatatgtatgtatgtattttagcttgtagacaacctttcacactta

SEQ ID NO: 920 - DNA, 922 bp, Saccharomyces cerevisiae
tagtacataggttcctaacagcattgtgaaaaaggttcaaaaatgtctggtaatagagagcaagtctttcctacgcgtatgacgctgggtttgatgaagaccaagttaaaaggtgccaaccaaggttattctttactaaagcgtaagtctgaagccctaacaaagagattcagagatattaccaaaagaattgatgatgctaagcaaaagatggggagagttatgcaaactgctgccttttccttggccgaagtttcctatgcaacaggtgaaaacattggctatcaagtgcaagaaagtgtctctactgcaagattcaaagtgagagcacgtcaagaaaacgttagtggtgtgtatttgtctcaatttgagtcctacatcgaccctgaaattaatgatttcagattaactggtttaggtagaggtggtcaacaggttcaacgagccaaggaaatctattcaagagccgttgaaactttagttgaattagcctctttacagactgcatttattattttggatgaagtgattaaagtgacgaacagaagggttaatgctatcgaacacgttattatcccaagaactgaaaacacaattgcttacattaacagtgagttggatgagttggacagagaagaattttatagattgaaaaaggtccaagaaaagaagcaaaatgagactgcaaaattggatgctgagatgaaattgaagagagatagagcagaacaagatgcttcagaagtagctgctgatgaggaacctcaaggtgaaacattggttgctgatcaagaagacgatgttatattctgaagtttcaggcagaacaagacccttttcaaaaatatgtaagccattattaaaaaaaaggatattttgtataattgtttaataaaataacatctttttaaacaatcataaa

SEQ ID NO: 921 - DNA, 1679 bp, Saccharomyces cerevisiae
agttcctttcttctgatttgcgggtgctccgaaagaacaaagaataaataggtaaagcagtgaaacatagtatttgctggttaaaatcatgatcgctttgaagcccaatgctgttcgaaccttccgacaagtgcagcattgcagctttcgcatttgtcggtatcaatctacgaagtcaaataagtgtctgacgcccttgcaagagtacgacagactggtgaagttggggaagctacgggatgatacatatcagcgtggtatcatctcttccttaggggatttgtatgattcactggttaaatatgtacctccggttgtcaagacacccaatgctgtcgaccaagttggcggttggttgaatggtcttaaatccgtatttagccgtggcaaacctaagaacattggggcgtatgtggatgtatccaaaattggtaactcgatacctcgaggagtttacctatatggagatgttggctgcggaaagacaatgttgatggaccttttttatactacaattcccaatcatttaacaaaaaagagaatacattttcaccagtttatgcaatatgttcacaaaaggtcgcatgaaattgttagagagcaaaatttgaaagaactaggtgatgcaaaaggaaaagagatcgatacggttccatttttggccgcagagattgcaaataattcgcatgttctttgttttgacgagtttcaagtcactgacgtggcagatgcaatgatattgagaaggctgatgactgccttactatccgatgattatggtgtcgtacttttcgcaacctcgaatagacatccagatgagttgtatatcaacggtgttcaaagacaatcatttattccttgtattgaactgataaagcatagaactaaggttatcttcttgaattcgccaacagattaccgtaagattccaagacctgtgtcctcagtttactatttcccatccgatacgagcataaaatacgcatcaaaggaatgtaaaacccgtcgagaaactcatattaaggaatggtataactatttcgcacaggcttcccacaccgatgattccactgattcacacacggtgcataagacattttatgattatccattaactatttgggggagagagttcaaagtccctaagtgtaccccacctcgagtcgcgcagtttactttcaagcagttgtgtggtgagcctttggccgcaggagattacttgacgttggcaaaaaattttgaagcctttatagtgaccgatattccatatttgtccatttacgttcgtgatgaagtgagaagatttattacatttttagatgctgtatatgacagtggcgggaaactggccactacgggtgcagcggatttttcttccttgtttgtggaacctgaacagatacttaatgattttgagttacgcccaacaaccaaagaacctgatagcgtcgatactggtatggtagatgagatggttgagaaacacggtttttcgaaagagattgccaagaaatcgcagatgtttgctcttgatgaagaaagatttgcctttgcccgtgccttaagcaggctgtcacagatgagctccaccgattgggttactaagcctacatactaaaccctatgtaacaaaagtgtttatttatattcttgtatttattctaaacacgaactttgat

SEQ ID NO: 922 - DNA, 1500 bp, Saccharomyces cerevisiae
tatcaattgtggttagcctagtagtcaccaaatagcaaattaccaatcaactatggaaaaccaagagaaaccgctttctgtagacgaggagtacgatttatggaaatccaatgttccattaatgtatgactttgttagcgagacacgtttaacatggccatctttaaccgtccaatggctccctactcctgttcaagaattagatggtggctttattaaacaagaattaatcatcggtacgcacacttctggtgaagaagaaaactatttgaaattcgcagaaattaatctaccaaaggaaattcttagtaatgaagacccacaagaagaagcaggagaggagtatcagtcctctctacctgctcctaggtcaaatataaggattaccgctaaatatgagcacgaagaagaaatcactagagcccgatatatgcctcaagaccctaatattgtcgccacaataaatgggcaaggcacagttttcctctattctcgctcagaaggtcttcagtcaacactaaaatttcataaggataacggttatgctttatcatttagcactttggtcaaagggcgattgctttccggctcagatgatcatacagtcgctctctgggaagtggggagtggcggtgaccctacaaaaccagtacgaacttggaatgatttacattctgatattattaatgataataaatggcacaacttcaataaagatctattcggcactgtttcagaagattctctcttaaaaataaatgacgtcagggcaaacaatactacgatcgatactgtgaaatgcccgcaacctttcaacacattagcatttagtcatcattcctcaaacctccttgcggccgcaggtatggactcgtatgtttatctatatgatctaagaaacatgaaggaaccattacaccatatgtcgggtcatgaagatgcagtgaacaatttggaattttcaacccatgttgacggtgtagttgtatccagcgggtcagacaatagattgatgatgtgggatttgaaacaaattggagcagaacaaacacctgatgacgcggaagacggcgttcctgaattgatcatggtccacgcaggtcacagaagttcagtgaatgattttgatttgaaccctcaaataccttggttggtagcaagtgctgaagaagaaaatattttacaagtttggaagtgttcccatagtctacccatcgtgggaggtccaccaaaggtgaacaaggatataataagctaatatatagtttttttattgtttctttggcgaaaaggcgtaattaaacaaagatcaacatacataatccgattttgaggagtgataaaatatacttagattattccttatccattacagtttgcttttttgaagatagccaattgatgaaatcaataaaaatgttaggtccacattttcctttttgcatccactctttggtagttgcagtatacaagtcaatcaattcgtcaagcttgtcgtta

SEQ ID NO: 923 - DNA, 1782 bp, Saccharomyces cerevisiae
caaggcaaaggtcagcagtaagcttagagacgatgaaggttgattacgagcaattgtgcaaactctacgatgacacgtgccgcacaaagaatgtgcagttcagttacggtacggccggattcagaacgctggccaagaatttggatacggtgatgttcagtactggtatactggcggttctcaggtcgctgaagcttcagggtcagtatgtgggggtgatgatcacggcgtcgcacaacccataccaggacaacggggtcaagatcgtggaaccagacggatcgatgcttttggccacatgggagccatatgccatgcagttggccaatgcggcctcttttgccactaattttgaagaatttcgtgttgagttggccaagctgattgaacacgaaaagattgatttgaatacaaccgtcgtgcctcacatcgtggttgggagagactctagggaaagtagtccatacttgctgcgctgcttgacttcctccatggccagcgtcttccacgcgcaagttttggacctaggctgtgtcactacgcctcaattgcattacattactgatttgtccaacaggcggaaactggaaggagacacagcgccagttgccacagaacaggactactattcgttctttataggagccttcaacgagctcttcgccacgtatcagctggagaagaggctgtctgtcccaaaattgttcatagacacagccaatggtatcggtggtccacagttgaaaaaactactggcctccgaagattgggacgtgccagcggagcaagttgaggtaatcaacgacaggtccgatgttccagaactgttgaattttgaatgcggtgcggattatgtgaagactaaccagagattacccaagggtctttctccatcctcgtttgattcgctatattgctcctttgatggtgacgcagacagggttgtgttctactatgtcgactcaggatcaaaatttcatttgttggatggtgacaaaatttccactttgtttgcaaagttcttgtctaaacaactagaattggcacacctagaacattctttgaagattggtgttgtgcaaactgcctatgcaaacggcagttccaccgcttacataaaaaatacgttgcactgtcccgtgtcttgcactaagacaggtgttaaacacttgcatcatgaagctgccactcagtacgatattggcatttatttcgaagcaaatggacatggtacgattatattcagcgaaaaatttcatcgaactatcaaatctgaattatccaagtccaagttaaatggtgatacgttagctttgagaactttgaagtgtttctctgaattgattaatcagaccgtgggagatgctatttcagacatgcttgctgtccttgctactttggcgattttgaaaatgtcgccaatggattgggatgaagagtatactgatttgcccaacaagctggttaagtgcatcgttcctgataggtcaattttccaaaccacggaccaggaaagaaaattgctcaatccagtggggttgcaagacaagatagatcttgtggtagccaagtatcccatgggaagaagctttgtcagagccagtggtacggaggatgcggtgagggtttatgcggaatgtaaggactcctctaagttaggtcaattttgtgacgaagtggtggagcacgttaaggcatctgcttgaaagcattattcgatgtatagtatagctatttagatatacagagagataaatgaaagagaaaaaatattggtatcaa

SEQ ID NO: 924 - DNA, 2098 bp, Saccharomyces cerevisiae
aatttacttttgtgatgcgatgatttgcagatactatataagcaatggacaccgtccatcaccgatgaggctagaacatcgtagtgctttgtaaaagaactgttaaagacccagtacgaaaatttttccataatggaccctggtattgctaatcataccctccccgaggaatttgaagaggttgtcgttcccgagatgctggaaaaggaagtaggagccaaggtcgatgtcaagccaacgctaaccacatcttctccagcaccttcttacattgaattgatagatccaggtgtgcataacatcgagatttacgcagaaatgtacaaccgcccgatctaccgtgtcgcattattcttctcacttttcctcattgcctatgcttacggattagatggtaatatccgttacactttccaggcgtacgcgacttcgtcgtactcccagcactcgctgctatcgaccgtcaactgtattaagacggttattgcggctgtaggccagatcttctttgccagattatcagatatcttcggcagattttccattatgattgtcagtatcattttttatagcatggggaccatcattgagtcgcaagcggtgaatattacaagatttgcagttggtggttgtttttaccaattgggtcttaccggtattattctaattttggaagttattgcttctgacttttccaacttgaactggaggttgttagccttattcattccagctttaccatttatcatcaacacctggattagcgggaacgtaacaagtgccatagatgctaattggaaatggggtattggtatgtgggcttttatactgccgctagcttgtattccgcttggaatttgtatgttgcacatgaggtatttagcaagaaagcatgctaaagatagattgaagcccgagttcgaagcgctaaacaaattgaagtggaagtccttttgtatagacatcgcattttggaaattggatatcattggaatgttattaattactgtatttttcgggtgtgtattggttccattcaccttagcgggtggtttgaaagaggaatggaaaactgcgcatattattgtccctgaagtcattggttgggttgtagtgttaccactgtacatgctatgggaaataaagtactcgagacatccattgacaccttgggacttgattcaagatagaggtatctttttcgctctactcatcgcattctttatcaattttaactggtatatgcaaggtgattacatgtatactgtactagtcgttgcagttcatgaatccataaagtccgctacaagaattacctccttgtattcatttgtttctgttatcgttggtacaatcctcgggttcatactgattaaagttagaaggactaagccttttattatatttggcatttcttgttggatcgtctcatttggtttgctggtccattaccgtggtgactccggtgctcattccggtatcattggctctttgtgtctattaggtttcggtgcaggttcatttacctatgtgactcaagcttccatccaagcatccgctaaaactcatgcaagaatggcggtagtaacctcattataccttgccacttataatattggttctgcatttggtagttctgttagcggagctgtctggactaatatcctacccaaagaaatttcaaaaagaatttccgatccaaccttagctgcacaagcgtacggttctccatttacattcattacaacttatacctggggaacaccagaaagaatagctttagtcatgtcttaccgctatgttcaaaagattttatgtatcataggtttggtattctgctttcctttgttaggttgcgcattcatgttgagaaatcataaactaacagattctattgctcttgaaggcaatgatcatttggaaagtaaaaacacctttgaaattgaggaaaaggaagaaagttttttgaaaaataaattctttacgcactttacaagcagtaaagataggaaagattaatattatctcacccaaataatttcatacatgcacatatagctactacatagtcaagaacatatcataacatttggtataa

SEQ ID NO: 925 - DNA, 597 bp, Saccharomyces cerevisiae
atgaaaaagaccccagacccatctccaccttttgcaagcacgaagaacgtaggcatgtcaaacgaagaaccggaaaaaatggttaacgatcgaattgtggtgaaggccatcgagccaaaagatgaggaagcctggaacaaactgtggaaggagtatcagggtttccaaaaaacggttatgcctccggaagtagccaccactaccttcgcaaggtttatagaccctacggtcaaactatggggtgctctagcctttgacaccgagaccggcgatgcaattggctttgcacactacctgaaccatttgacgtcgtggcatgtcgaagaagttgtctacatgaatgacttatatgtcactgaacgcgcaagagtcaaaggcgtaggtagaaagctcatagaatttgtatacagccgtgccgatgagctcggtacgcctgcagtgtactgggttacagaccattacaatcaccgcgcacagttgctgtacaccaaagtggcttacaagacagataaggttctttacaagagaaacggatactgaaaccgctgtgtaatgtagactactgtgtatagagataactctagcttctataggctc

SEQ ID NO: 926 - DNA, 1641 bp, Saccharomyces cerevisiae
tattttattcatttgagattcaaggcttaaagacagcatatataagaattatgacggccgcacatcctgttgctcagttaactgccgaggcataccctaaagtcaagagaaacccaaatttcaaagttctcgactcggaagatttggcgtactttcgttcgattttgtcaaatgatgaaatcttaaactctcaagctccagaagagcttgcttcgtttaaccaggactggatgaaaaaatatagaggccagtccaatttaattctcttgccaaactccactgataaagtgtccaagattatgaaatactgtaacgataaaaagttggcagtagtaccacaaggtggtaacaccgacttggtcggagcctctgttccggtatttgatgagattgttctttctctaagaaatatgaacaaagtcagagattttgatccagttagcgggactttcaagtgtgacgcgggtgtcgttatgcgtgatgcgcatcaatttttacacgaccatgaccatatcttcccattggatctgccttctagaaacaactgtcaagtgggcggtgtagtttcaacaaatgcaggtggtttgaactttttaagatatgggtctctacacggtaatgttttgggtttggaagtggtgctacccaacggtgagattatcagcaatatcaatgccctaaggaaggacaatactggttatgacttgaaacaattattcatcggtgcagagggtactatcggtgtcgttactggtgtatccatagttgcagcagcaaagccaaaagccttgaatgccgtattttttggtattgagaatttcgataccgttcagaaattatttgtcaaggctaaaagtgaattatctgagattttatctgcttttgaattcatggaccgtggctccattgaatgtacgatagaatacttgaaggacttgcctttccctctggagaaccaacacaacttttatgttcttattgaaacgtcagggtccaataagagacacgacgatgagaagctgactgctttcctcaaagataccacagattctaaattaatttcggagggtatgatggctaaggacaaagccgattttgatagactttggacctggagaaaatctgttccaacagcttgtaattcttacggtggtatgtacaagtatgacatgtcacttcaattgaaagatttatattccgtatctgcggctgtgacggagagattaaacgcagccggtttgattggtgatgcaccaaaaccagttgttaaatcatgtggttatggtcatgtcggtgacggaaacatccatttaaatatcgcggtaagagaatttacaaaacagattgaggacttactagaaccatttgtttatgaatatattgcatcaaagaaaggttccatcagtgctgagcatgggatcggtttccataagaaaggtaagttacactacaccagaagtgatattgaaattagatttatgaaggatatcaaaaatcactacgatccaaatggaatcttaaacccatacaagtacatttgaactttgttaatttttaactttcaaagagcaaaccctttttctttacagtattatagatttacatatatgtatttatcaatttattattgatcaaaattaa

SEQ ID NO: 927 - DNA, 2751 bp, Saccharomyces cerevisiae
aacgttgcaatgtattaggcaagattatattaaggaggtattataaaaaggactcataagtgaaataaataatattcgtaatgctaaatgtcctggtcttgcttcgtactctcgaaaaacgtaatcttgcggtatttaacgctagtttaagaaagtgttactgtgtattaaatgttggcactccggagatttatattaaaccaaaggtctttgagatcgtgtaccataccgattctagtcggagccttgatcattattctcgtgctattccaactagttacccaccgaaatgatgcgcttatacgatcaagcaatgtaaacagtacaaacaagaaaacattgaaagatgcagatcctaaggttcttattgaagccttcggctctcctgaggtcgacccagtggatacaattccagtatcgccactagaattagttccattttatgaccagtctatagatactaaaaggagttctagttggctaatcaataagaagggctattataagcatttcaacgaattaagcttaactgatagatgtaaattttatttccggacactgtatacgctagacgatgaatggactaatagtgtgaagaaactggagtacagcataaatgataatgaaggagttgacgaaggtaaagatgcgaatggaaatccaatggatgagaaatccgagagattgtatcgccggaaatatgatatgttccaggcatttgagagaataagagcctatgatagatgttttatgcaggccaatccagttaatattcaagaaatttttccgaaaagtgataagatgtcgaaagagagggttcaatcaaaattaatcaaaaccttaaatgctactttccctaattatgatccagacaattttaagaaatacgatcaattcgaattcgagcacaaaatgtttccgtttataaataactttaccacagagacttttcatgagatggttccaaaaatcacatcaccttttggaaaagtattagagcaaggcttcttacccaagttcgatcataaaactggtaaagtgcaggagtatttcaaatatgaatacgatccatcaaaaaccttctgggccaattggagggatatgagcgccaaagtagccggtcgtggtattgtattgagtttaggttccaaccaatttccattagctgtcaaatttattgcttctttgagatttgaagggaatactttaccgatccaagtggtctatagaggcgatgagctgtcgcaagaactagtggacaaacttatatatgctgctagaagtcctgatttcaaaccagtagaaaataattacgataattctaccaatgttccacaagaaatttggttcctagatgtttctaataccatccaccctaagtggcgaggtgacttcggtagttataaaagtaaatggctagtggttctactcaatcttttgcaagaatttgtctttttagatattgatgctattagttatgaaaaaattgataactacttcaagaccactgaataccagaagacaggaactgtattttacagggaaagggcgctaagagaaaacgtgaatgaaagatgtattgctagatatgaaactctattgcctagaaaccttgaatctaaaaatttccaaaactcacttcttatcgatcctgatcatgctctcaacgaatgtgacaatactttaactacagaagagtacatattcaaagctttttttcatcatagaaggcagcaccagttagaagctggtttatttgctgtcgacaaatcaaaacacacgatccccctagtgcttgctgctatgattcatttggccaaaaatacagcccactgcacacatggtgataaagagaatttctggttagggttcttggccgcaggtcacacttatgcactgcagggagtgtattccggagctattggtgattatgtaaagaaaaccgacttgaacggaaagaggcaagaagctgcagtcgaaatatgttccgggcaaatagcacatatgtctactgataagaaaactttactttgggttaacggtggaggtaccttttgtaaacacgataatgctgctaaagatgattggaaaaaagatggcgactttaagaaattcaaagatcaattcaagacttttgaagaaatggaaaaatattattacataactccaatcagcagcaaatatgtcatcttacctgatccaaaatctgatgattggcatagggcctctgcaggtgcttgtggtggttatatatggtgtgccacacataaaaccctcctaaagccatatagttataaccacagaaccactcacggcgaattaataactctagatgaggagcagcgcctacatattgatgctgtcaacactgtttggtcacatgctaataaagataacaccagatcattcactgaagaagagatcaaggaattagaaaattctagacacgaacaaagctagaatgcattaaccagtgttttttctaactgtttatggtactagcctttgtgaacatgtatagtaaagcatatcggacgtagttttttaagaaccttgtttattacactttgacggttaggagttttattggaattacctcactttgcacataaacctctagaaaagaaggtaatacacaatgctttcgatcgatttgataaataatagtaattcatattggcataatgctacatatacgtatatatattttttttactcttttaataatcaaattaacttaataattgttga

SEQ ID NO: 928 - DNA, 1092 bp, Saccharomyces cerevisiae
tgattctcatccttgcgcttgtcgcgcggcacgatgccagtgcggagtttccgcgatatgatgtaactgcagctgttggtggcgaactttgcataagatcgacctcctactgatgagaaagataggatggattatatagaagagcacaagcaacgatgaatgggttggtattaggcgctacaggtttatgcggaggcgggtttctgaggcacgcacaggaggcaccccagttctctaaggtatacgcgatcttgagaagggaattgccctttccggccactgataaagttgtggccatagtagaaagggataattcaaagtggtcacaattgatcaccaatgaaatgaatccgcaggtgctattcaccgcactggcaacgacaagggcagctgcaggcggtttggacaagcaatacaagatcgatcatgatttaaacttacaattggcccaggctgccaaggaaaaaggatgtgaaacgatcgttctcgtttcttccgctggtgctcatccggactccaggttcggctacatgaagatgaagggcgagattgaacgcgatgttatcgctcttgattttaagcacattataattttgcgcccaggccctctccttggtgaacggacaaattctaaacaaagcggatttggcggcaatctgactgctgctttgggcactcgcgtgtaccgttctagattccagaggttgctaggctatccagtttatggcgatgaggtaggaaaagttggtgttcatttggcgttgaatacttctgggaaagacaaggttcagtttgtctccagcaaggacattcttgacatctcagcttctctggagaagattgctacctaaatcaaccaacggcttcttctcgcagctacagttgtattttactgtgacgtacttttgcgcgcgtacgggttcaatgaattacggattttcaacaacttcacacaatcatagctttttttactttttcgcctcattattttctttaaagaaacgatgataaacagagatttatcgtcatgttatttcgttcgtatatatcgtatttgcgttttagctgtataaagtaaaatactatatctaa

SEQ ID NO: 929 - DNA, 1984 bp, Saccharomyces cerevisiae
atgctcatagaaaacactaatgatcggtttggtatcgtcatagatgcagggtcttcgggttcgagaatccatgtgtttaagtggcaggacacggaatcgcttcttcatgcaacaaaccaggactcacagtccatattacaatcagtacctcatattcatcaagaaaaagactggacttttaagctgaatccaggcttgtcgagttttgaaaaaaaacctcaagatgcgtacaaatctcacatcaagccgttactagattttgctaagaatattatccctgaatcacattggtcgagttgtcccgtttttattcaagcaaccgcgggcatgcgccttttacctcaagacatacaatcttccattttggatggtttgtgtcaggggctcaaacaccctgcagaatttttggttgaggattgctcagcacaaattcaagtcattgatggtgaaaccgaaggtttatatggctggcttggcttaaactatctatatggacactttaatgactataatccagaggtctctgaccattttacatttgggtttatggacatgggcggtgcctctactcagattgcgtttgcaccgcatgattcaggagaaatagctagacatagagatgacatcgccaccatcttcttgaggagtgttaacggagatttgcagaaatgggacgtttttgttagtacgtggttagggtttggtgccaatcaggctagaagaaggtacttggctcagttgatcaatacccttccagaaaacacaaatgattacgaaaatgatgacttctctacaaggaacttgaatgatccatgtatgccgcgaggaagcagcacggattttgaatttaaagataccatatttcacatcgcgggttctgggaattacgaacaatgtacaaaatctatttatccgttacttttaaagaacatgccttgtgatgacgagccgtgcttgtttaatggtgttcatgctcctcgaatagactttgccaatgacaaatttataggtacttctgagtactggtacactgccaacgacgtattcaaacttgggggcgaatacaactttgacaaatttagcaaaagcctaagggagttttgcaattccaattggacgcaaatattagcgaacagtgataaaggcgtgtataattctattccggagaattttttgaaagatgcatgctttaagggcaattgggtccttaatatacttcatgaagggtttgatatgcctcgaatagatgtcgacgcagaaaatgtcaatgacaggcccttatttcaaagtgtggaaaaagtcgaagaacgagagttatcgtggacactaggcagaattttactttatgcctcaggtagcatattggcaggtaatgatgacttcatggtgggtattgcgcccagtgaaagaagaactaagctcactggtaagaaattcatacctggcaagttactggagtctgatcaactacgcaagcaaagttccagcctttctaataaaggatttttgatgtggttcgcaattatttgttgcatattttacttgatctttcataggtcacacataatcagaagacgtttttccggtctgtacaacattaccaaggactttaagacaggcataaggagaaggttgaaatttctaaggagatcagatccattttccagattggaggaaggtgaacttggaacagacgtagatggcttcaaagatgtgtacaggatgaagagtagcagtatgtttgatcttggtaagagttcagccacaatgcaaagggagcacgaaccacaaaggacagcaagtcagtccgctaatctcgctccgtcaaacttacgacctgcgttttctatggctgatttttccaaatttaaggacagtaggctatatgattgaatgtggtggtgtatgtgccataaatagaagcgcatatacttctcacataaatatatgtatatatctagtgaggtgccatagtattgcatta

SEQ ID NO: 930 - DNA, 1648 bp, Saccharomyces cerevisiae
gtcacgactataatatcataaaatgagagtcagaaagcgccaatctagaagaacatctaccaagttgaaggaaggtattaagaagaaggcttctgcccatagaaaaaaggaaaagaagatggctaagaaggacgttacttggagatcaaggtctaagaaagaccctggtattccttctaactttccttataaggctaagatcttagaagaaatagaagccaaaaaaatgaaggacttagaggaaagagagcttgccaaacaacaacgattggaggctaggaaagctgccaaggaacaaggcgttgatgcaatggatgaagacatgatagaagacgatgaaaatggattagcagctttggttgagtctgctcagcaagcagctgctgaatatgagggcacaccctctaatgatgcagatgttcgtgatgatgaattggacgtcattgattataacattgatttctacggtgaagatgtagaaggcgagtcagaacttgaaaaatctaggaaagcttatgacaagattttcaaatccgttattgatgcttctgatgtcatcctatatgttttggatgccagagatccagagagtacaagatcaagaaaggtggaagaagccgtcttacaaagtcagggtaaaaggctgattttaatactgaacaaagttgatttaattcccccacatgtattggaacaatggttaaattacttaaagtctagttttcctacaatcccattaagagcttcttctggtgcagtcaacggaacttctttcaacagaaagctaagccaaaccactactgcaagtgcactgctagagtcgctgaaaacttactctaataacagcaatttgaagagatctattgtagtgggtgttatcggttatccaaatgttggtaaatcatctgttatcaacgctcttttggcgcgccgtggaggtcaatcaaaggcttgcccagtcggtaatgaagcaggtgttactacctctctgagagagatcaaaatcgacaacaagttgaagattctagattctcctggtatatgtttcccaagcgaaaataagaaaagatcgaaagttgaacatgaagctgaattagctcttctaaatgctctaccggcaaaacacattgttgatccgtatccagctgtcttaatgttggtaaagagactagctaaatcagatgaaatgacagagagctttaaaaagctgtatgaaattcctcctattcctgctaatgatgcagatacgtttacaaaacatttcttaattcacgtcgctcgtaaaagaggtagattagggaaaggcggtattccaaatcttgccagtgctggtctttcggtacttaatgactggagggatggtaaaattcttggttgggttttaccaaatacatcggcagctgcatctcaacaagataaacaaaatctaagtactataaacactggcactaaacaagctccaattgcagcaaatgaatccaccattgtatccgagtggtccaaagaatttgatttggatggattatttagctctcttgacaaggccatagatgctagcaaagatcaagatacaatgatggaataaataagtcatatgtaaggctatttttatgtaaggggtgtttcttattttttctttatcatcaaa

SEQ ID NO: 931 - DNA, 559 bp, Saccharomyces cerevisiae
tactattatctttataatgtctctcgactttaacactttggcccaaaacttcacccagttttactataatcaatttgataccgatagaagccaattgggtaacttgtacagaaatgaatctatgctaacattcgagactagtcaattgcaaggtgcaaaggacattgttgagaaattagtatctttgccatttcaaaaggtccaacatcgtatcactactttggatgcgcaacctgcttccccaaatggcgatgtcttagtcatgatcactggtgatctgttgattgacgaagaacaaaatccacagcgtttctctcaagtgttccatttgattcctgatggaaactcttactacgtgtttaacgatatcttccgtttgaattactctgcttaaggattttttaagtcaccacagaaacatgtattttcattttcgaatattgtttagcataattgaagatgcttagctaacgatgtataaggcgatagcgataaagaagatatatatatatatatatgtatgaagatagcgtttttaaatgtatttctttaatactga

SEQ ID NO: 932 - DNA, 985 bp, Saccharomyces cerevisiae
ataaaaaaccaagaaaatatcagactttttcattcgctttcaacaagtactacaataattaaaaatggcttacactaagatcgctttattcgctgctattgctgctttggcttccgctcaaacccaagatcaaattaacgaattgaacgttattttgaacgatgtcaaatctcacttgcaagagtacattagcttagcttctgattcttcctctggattttccttaagcagtatgccagctggtgttttggatatcggtatggctttagcttccgccactgacgactcctacactactttgtactctgaggttgactttgctggtgttagcaagatgttgaccatggttccatggtactcctctagattggaaccagctttgaagtctttgaatggtgatgcttcttcttctgctgccccaagctcttctgctgctccaacttcttctgctgccccaagctcatctgctgccccaacttcttctgctgcctcaagctcttctgaagctaagtcttcttctgctgccccaagctcttctgaagctaagtcttcttctgctgccccaagctcttctgaagctaagtcttcttctgctgccccaagctcttctgaagctaagtcttcttctgctgctccaagctccactgaagctaagataacttctgctgctccaagctccactggtgccaagacctctgccatctctcaaattaccgatggtcaaatccaagctaccaaggctgtttctgagcaaactgaaaacggtgctgctaaggcctttgttggtatgggtgctggtgttgtcgcagctgccgctatgttgttataagttattggtttttaataataactacgtaaaaaataaccatagtcatacccttttttattaactactttcggtcctttcttctgctttacaattaatgtaaatatgtttcggttctttaattgcatatataacaagattaatttttcttttttttaa

SEQ ID NO: 933 - DNA, 776 bp, Saccharomyces cerevisiae
tcttttaaataggttcatatacaatactaagaaagatatattaagaaatggatattattctgggcatccgtgtacaggattctgtcattctagcgtcttctaaggcagtcacaagaggtatttctgttttaaaagattctgatgataaaacgagacaattatcgccacatacattgatgagttttgccggtgaagctggtgacaccgttcaattcgccgagtacattcaagccaatatccaattatactccattagagaagattatgagctctctccacaagcagtatctagttttgttaggcaagaattagccaagtcaattaggtcgagaagaccataccaagtcaacgtattgattggaggctatgacaaaaagaagaacaaaccggaactatatcaaattgactacttgggtactaaagtcgaattaccctatggtgctcatggttactcggggttttacacattctctttactagatcatcattatagacctgatatgactactgaggagggtttagatttattaaaactatgtgtacaagagcttgaaaaaagaatgccaatggacttcaagggcgtcattgttaaaatcgtggataaagatggcataagacaagtagatgacttccaggcacagtgaaagatattcagtgtaatcacacggaaaaggtgattgctaatgatatactaaagtaattatcttcctcgttcataaaattaaataaagttattatagttttttcatccgttataatagcaaatgtatcagaaa

SEQ ID NO: 934 - DNA, 1761 bp, Saccharomyces cerevisiae
agtgcaattgagaacgccaaaaagagcttgtataatgttattaccattaacaaagctaaaaccgagagcaaaagttgctgttgtagggggtggcgtttctggactatgttttacttattttttaagcaagttgagaccggatgttgaaatcacactgttcgaatcgcagaacagaactgggggttggatatattcttgtaacacaagagatatgagtgggaacccaattatgttggagaagggacccagaacattgaggggcgtatcagacgggaccgttctgattatggatacccttaaagacttgggcaaggaagcagttattcaaagcattgataaaggttgcattgcagacaaaaagtttctactagaccccagtgataaactcgtgcaggttcctaattcgatatctacaacagtaaaatttctgctgaatccgttgggaaaaggactcatcacgggtatgatgggagaatggttcagaaaaaaatctccacatcctggccaagacgaaagtgtcgaatccatttgtgacagaaggtttgggaataactacatatcaaacaatatgatcagtgccttactaagaggtatctatggggatgacgtttccctattaagtgccaagagaacgtttaagaaaatatactacaatgaactaaagcacggatctaacacacaagctatgattgataatatgcgcggaaagtcaagaagtaaaaaaactgagaacctgcaccaatctttaactggctgccttaacgactactcaaatgcgtttggaaaagacaggtcaaagttattagacttatccaacacgctaaagaaatatcccatgttgggtcttgctgggggactagaaacgtttcccaagatagtcagaaatgctttgaacgaatttaaaaacgtcaaaatagttactgggaacccggttacgcaaataatgaaacgccctgctaacgaaacgacaatcggattgaaagcgaaatctggcgaccaatacgaaacatttgaccatttaagacttacgataacacctcccaaaatcgctaaattgctaccgaaggatcaaaattcattatccaagttattagatgagatacaatcaaacacaataattttagttaattattatttgccaaacaaagatgtaatagatgccgatctacaaggctttggatacttggttcccaaatccaataagaatccagggaaattgcttggtgtaattttcgattctgttatcgaaaggaatttcaaaccactttttgacaaactctccacaaacccaaacgccctcaacaaatatacaaaagtgactgcgatgataggaggttgtatgctcaatgaacacggtgttcctgtagtgccatccagggaggtaaccattaatgcagtcaaagatgcgctgaacaaccacctcggcatcagtaacaaggatctggaagctggtcagtgggaattcactatcgccgatagatgtctgccaagatttcatgtaggttatgacgcatggcaagaaagagctgaaaggaagttgcaagaatcttacggccaaacagtttctgtggggggaatgggattttctagaagtcccggtgtccctgacgttattgtagacggctttaacgacgccttacagctaagcaaataagtacgtatatatatggttagctttacgcaaactacttcttttgacaattgaggcagttatcagctaataagaaaaagtagttagtatcaaaagacacaatttattta

SEQ ID NO: 935 - DNA, 1634 bp, Saccharomyces cerevisiae
gtttttgtttttgtttttgttttgttttggtttggtttgatttattttggtttggcttaaatcttcgaggaaatttgcgctttccgcgtaaaaagggaaaaaaagcagatatatgtacaacagaaaagacagagatgttcacgagaggaaggaagatggtcaatctgagtttgaagcactgaacgggaccaacgcaattatgtccgataatagtaaagcgtattccataaagtttctgaccttcaatacatgggggttaaaatacgtctccaaacaccgtaaagaaagactcagagcaattgctgataaattggcgggccactcaatgcttacgccaatatctgacgagttgttgcccaatggtggagatagtaatgaaaacgaagattacgacgtgattgccttacaagaaatctggtgtgtggaagactggaagtatctagcttctgcgtgtgcctccaagtatccgtatcagcgtttgttccattctggtattctgacggggcctgggttggccatactgtccaaggtcccgatagagtcgacctttctttaccggttcccgataaacggtagaccgagtgcggtgttccgtggcgactggtacgtagggaaatctatagcaatcaccgtattgaacacaggaacccgccccattgcaataatgaacagtcacatgcacgccccatacgccaagcagggtgatgccgcctacttgtgccacagatcttgtcaggcctgggatttcagcaggctcattaagctttacaggcaggccggttatgcggtgattgtggtgggtgacttaaactccagaccgggctcactgccccacaaatttctcacgcaggaggccggcctggtcgactcctgggagcaattgcatgggaagcaagacttggcggtgatcgctcgtctgtctccattgcaacaattgcttaagggctgtaccacgtgcgattcgctgctcaacacatggagggcccaaagacaacccgatgaggcatgcaggttggattatgctcttatcgaccctgatttcttgcaaacagtagacgcaggtgtcaggttcactgaacggatccctcacctggactgcagtgtctctgaccattttgcatactcatgcacccttaacatcgtcccacagggcacagagtcccgtccatccacctccgttaagcgtgcgaagactcatgatagagagctgatcttgcagagatactccaactacgaaaccatgatagaatgcatccacacgtacttgaagacagcccaaagacagaaatttttccgtggcctacatttctgggcctcaatacttctcctaatagcgtcgttggtcgtgacaacgtttactgcaaacaaggcaggctggtcctccatcttctgggtccttttcgctattgctgtctccatctcgggcaccatcgacggtgccatctccttcttgtttggcaggtctgaaatcagagccctcatcgaagtcgaacaagaggttctggacgcggagcaccacctgcaaactttcttgagcgagaaatgatattatcgattttctttagcatatgtaaaaaaattactgatattatataatgtgtgtaaatttcgtcaatagatgcaaagcaatcacg

SEQ ID NO: 936 - DNA, 1632 bp, Saccharomyces cerevisiae
gttctcactacccaaagagcaatcgataggtataaaagtgagcaattgctatcacagcgagccttattgttacagcacaaatcacgcgtattttcaagcaaatatcatgggtctctgcgcatcttcagaaaagaacggcagcactcctgacacgcagaccgccagcgctggtagtgacaacgttggcaaagcgaaggtaccaccaaagcaggagccacagaagactgtgagaacagtcaacacagcaaatcaacaagaaaagcaacaacagaggcagcagcagccgtctccgcataatgttaaggaccgcaaggagcaaaacgggagcattaataacgcgatatctcccacggctacggcaaatacaagcggatcgcaacagatcaatatcgactctgccctgagagacaggtcgagtaacgttgcagcacaaccatcattgtcggacgcttcaagtggcagcaacgacaaagaactgaaagtgctactgctgggtgccggtgaaagtggtaagtccacggtattgcagcagttgaagattttacaccagaacgggtttagcgagcaggaaattaaagagtacatccccttgatctatcagaatctattggaaattggcaggaacctcatccaggcgagaacaaggtttaacgtcaacttggaaccggagtgtgaactgacgcaacaagacctgtcgagaaccatgtcctatgaaatgcccaataactacacgggccaattcccggaagatatcgcgggcgtaatatctacgttgtgggccttgccctcaacacaagatttagtcaatgggcctaacgcatcgaagttctatctaatggactcgactccttacttcatggaaaatttcaccaggatcacttcgcccaattacagacccacccagcaggacatattaagatcgagacagatgacgtcagggatttttgacaccgtcattgatatggggtcggatatcaagatgcatatttacgacgtgggtggacagcgttccgaaagaaaaaaatggatacactgcttcgacaatgtcactctggtcatattttgcgtttctctatcggagtacgaccagacgctgatggaggacaagaaccagaacaggtttcaggaatcgctggtgcttttcgataatattgtcaacagtagatggttcgcgcgcacgtctgtcgtactctttctgaataaaatcgacctttttgctgaaaaactaagcaaagtgcctatggaaaattacttcccagactacaccggcgggtcagacatcaacaaggctgctaagtacatactctggaggtttgttcagttaaacagggcgaatctaagcatatatcctcacgtgacacaggccacagacacgtcgaatataagattagtatttgccgccatcaaagaaacaattttggaaaatacattgaaagactctggagtgttacaatgaatgcacagctaaaacagagacaaaactgcatgcctcttctcccctttattatcacctttaaaaaagataaaaaaagaaactggaaaaaaggtaaaaaaaaaaaaaaaattaaataaatacgaatacgttttctcatgaccattgtactagtaatcacaaccatgatacttgaataa

SEQ ID NO: 937 - DNA, 1700 bp, Saccharomyces cerevisiae
acacaatttgaaagggggtatagtaaaaaaaattcaattgagcaaatagaatggctagcactgcagtaatgatggacgtggattcttccggggtcaatgacttgcaccattctgagaagaaatatgcggaagaagatcaggttcaggaactattgaaagttttgaatgagatctccaagaccactttaacgctggacccaagatatatatggaggagtttaaaggacttgagctctttaaggaaccaggagcttttgaatgcggaaactttatgtttcacagtgaatgtgctgtaccctgattcttcttcattcaagaagaatctgctgaagttcattacttctaaccataaatcgtccgtaccggggtcagctgagcttagaaactcatatccagcctctttttattccgtaaacactgagaaaaagaccattgaagtgacagctgaaattaattgcttcatgcatctactagtccagttgtttttatgggacagtaaagaattagaacaattggtagagtttaataggaaggttgttatcccaaatttattgtgttattacaatttgcgttccttgaatttaatcaacgctaagttatggttctacatctacttgagtcatgaaacgttagcgcgcagctccgaggagattaacagcgacaaccaaaatataatcttaaggtccacgatgatgaagtttttgaaaatcgcttccctgaagcacgacaacgaaaccaaagccatgctgattaacttgatcttgagagattttttgaataatggcgaggttgatagcgcgtctgatttcatttctaaactagaatatcctcacacagacgtttccagttcattggaggcaagatatttcttctatttatcgaaaattaacgccattcaactggattattccactgcgaacgagtacattattgcagccataagaaaagccccacataattccaagagtttagggttcttacagcaatcaaacaaactgcattgttgtattcaattactcatgggtgatattccagaattatcatttttccatcaatcaaatatgcagaaatctctccttccttattaccatttgaccaaagccgttaaattaggtgacttgaaaaaattcacatctacaatcacaaagtataagcagttgctattgaaggatgacacctatcaactctgtgttagattaagatctaatgttatcaagacaggtatcaggatcatctccttaacgtataaaaaaatttcattaagagatatttgtttgaaactgaatttggattcggagcaaactgtagaatacatggtttcaagggctattagagatggtgttattgaagccaagattaatcacgaggatggctttatcgaaaccacagaattactaaacatttatgatagtgaagatcctcagcaagtatttgatgaaagaatcaaatttgccaaccaattacatgatgaataccttgtttcaatgaggtaccctgaggataaaaagactcaacaaaatgagaaaagtgaaaatggtgaaaatgatgatgatacgctagatggtgatttgatggatgacatgtctgatatctcggatctcgacgatttgggattcttataagggcgcataaaaaataaataactaccattcataacagaaattcattcgtatatacataaagttctcataaacgtatat

SEQ ID NO: 938 - DNA, 958 bp, Saccharomyces cerevisiae
ccaatagcaaacaaaccaactacagatatgacttacacattggcaattttaggctgcggtgttatgggccaagcacttctttccgccatttataatgctccaaaggcggctgatgaaactgctgctgcattttacccttccaaaattatcacatgtaaccatgatgaacctagtgcacaacaagttaccgatctagttgagacattcgacgaatctcctaacggtattaaagtcgaaagcacttacggtcacaacgtgagcgctgtcgaagaagcttctgtagttcttcttggtaccaagccatttttggccgaagaagtgttgaatggtgtgaagagcgtcattgggggaaagctacttatttccctggctgctggctggacaattgaccaattgagtcaatacactagcactgtttgccgtgttatgacgaacacacctgccaagtacggatatggttgtgcggtggtgtcctactcagctgatgtttccaaagagcaaaagccactggtcaacgaattgattagccaagttggtaaatacgttgagcttccagaaaagaacatggatgctgctacggctttagtcggttcaggccccgcttttgttctcttgatgttagaatccttgatggagagtgggttgaaattgggaatcccattacaagagagtaaggagtgtgccatgaaagttctagaaggaacagtgaagatggttgagaaaagcggtgctcatccatccgttttaaagcatcaagtttgcacaccaggtggtacaactattgccgggttgtgcgtaatggaagaaaagggcgtcaagagcggtattatcaatggtgttgaagaggcagcccgtgttgcgtcacaattaggccaaaagaagaaatagattgctttgcgtgaaatgtatgtatgttcgctttgtagccgtatattatttttttattactgaccttgca

SEQ ID NO: 939 - DNA, 1891 bp, Saccharomyces cerevisiae
ggaaagagcgtaatacaccgttaacatcgcgcattagaggtagacatgagtgacttacaagaccaagaacctagcattattatcaacggtaatttggaaccagttggtgaaccagatatcgttgaagaaacggaagttgtagctcaagaaacacaagaaacacaagatgctgataagccaaagaagaaagtcgccttcactggcttggaagaagacggggaaactgaagaagaaaaaaggaaaagggaatttgaagaaggtggtggtttgcccgaacaaccattaaaccctgatttttcaaaattaaacccactatccgccgaaattatcaacaggcaagctacaataaacatcggtaccatcggtcatgtcgcccacggtaaatccacagtagttagggctatttcaggtgtccaaacagtccgttttaaggatgaattagaacgtaacattactattaagttaggttacgctaatgctaaaatttataaatgtcaagagcctacatgtcccgaacctgattgttatagatcattcaaatctgataaagaaatcagtcctaaatgtcaaagaccaggttgtccggggcgttacaaattggtccgtcacgtttcttttgttgactgtcccggtcacgatatcttaatgagtactatgttatcaggtgctgctgttatggatgctgcgttactgttgattgcaggtaatgaatcttgtccacaacctcaaacctcagagcatttagctgccattgaaatcatgaaattaaagcacgtcatcatcttacagaataaggtcgatttaatgcgtgaagaaagtgccttagaacaccaaaaatccatcttgaagttcatcagaggtaccattgctgacggtgctcctattgtaccaatatccgctcagttgaagtataacatcgacgcagttaatgaatttattgtcaagactattcccgtaccaccaagagattttatgatttctccaaggttaattgttattcgttcatttgatgttaataagccaggtgctgaaatcgaggacctgaaaggtggtgttgccggtggttctattttgaatggtgttttcaaattaggtgatgaaattgagattagaccaggtattgtcaccaaggatgataagggtaaaattcaatgtaaaccaatcttttctaacattgtctccttatttgccgaacaaaatgacttgaagtttgctgttcccggtggtctgattggtgttggtactaaagttgatcctaccttgtgtagagctgatcgtcttgtcggtcaagtcgtcggtgctaagggtcatttgccaaacatttatactgatatcgaaatcaactactttttgctacgtcgtctattaggtgtcaaaacagatggtcaaaagcaagccaaagtcagaaaattagagccaaatgaagttcttatggtcaacattggttctaccgctacgggggctcgtgtggttgccgttaaagctgatatggcaagattacagttaacgtcgcccgcttgtactgaaattaacgagaagattgctttgtcgagacgtatcgaaaagcattggcgtttgattggttgggcaaccattaaaaagggtactacattggaacccatcgcttaaggaaccaataaaaccactgcaaagacaaaaatttcataattaatctgaaagaaagtgaagataagaaacgggctaggaggaagggaaactgacacttctggttattgcaatatgctcatatacattgatgcgtaatgacattgatgatctttattctctttttataacgttttctttctttttttttccttcttacatagtattcaactgtatatttaacatgttttacgtatttttaagaaaaaattactaaacgcgataa

SEQ ID NO: 940 - DNA, 799 bp, Saccharomyces cerevisiae
aaacgagcaaaacaaaaaaaaaaacaagacaattgaaaacgcaatggatgcattcagcttaaagaaggataatcgaaaaaaatttcaagataaacagaaattgaaaagaaaacatgccacacccagtgatagaaagtaccggctattgaaccgccaaaaagaagagaaagctaccacagaggagaaagatcaagaccaagaacagcccgccctgaagtcaaacgaggacaggtactatgaggacccggtactcgaggacccgcattctgcagtcgccaatgcagagttgaacaaggtgctaaaagacgtcctcaaaaatcggctccagcagaacgacgacgccacagccgtcaataatgttgctaataaagatactttgaaaatcaaagacctcaagcagatgaatacggatgagctcaatcgttggctcggacggcagaatacaacatcggctataacagcggctgagcccgaatcattagtcgttcccattcacgtacaaggtgatcatgatcgtgcgggcaagaagatcagtgccccttcgaccgatctaccggaagaactagagaccgatcaggatttccttgatggactgctctaatcgcgcggtacgacagttactgcgtgaaaagattatcagcgcccctttttttcttctttgttcttaacgtttctttttcttgcggcttatgcccgtacttataaaacaacggcctcccgtgccctattaccttcctgatagaccggacaataacgtcactacatacaaagttatacactaacagaaactcaaacacaa

SEQ ID NO: 941 - DNA, 783 bp, Saccharomyces cerevisiae
aagattatcagcgcccctttttttcttctttgttcttaacgtttctttttcttgcggcttatgcccgtacttataaaacaacggcctcccgtgccctattaccttcctgatagaccggacaataacgtcactacatacaaagttatacactaacagaaactcaaacacaaacgtttttataatagtcaaaattaaatatctctcataatgggttccgagacaaaacattctgcaaaagtcaagattgtcacaagggaaagtcctccttccgccaaggagcacatgcgccccactaaaactcaaatattagttccaccgacgcagagtttgcccaatggcaagaaaccaaacttcggtaagtctacaaaacagcggcgagaacctagggaacgcacctcgaagacgggacacgaggacgataaggcaacgatggtcactgttaacatagatgccttcctacatgataaggcccctaaaaaaaaatcgtgcaaatacaagaagaagaaaacgagacagtaccaggatagggcggcggcgtcgatcgattcgaaaccgcacgtagctggtcatacggcctttgccggtgcttcgttcacaacagatatcccacatgaggcagcgctacccaaacctagttttgtttgagtagctgtgattgtaaatttttttatttctacttgagcgggcgggctctcatttttttttttggggttttatttaggtcggattattcataaagatggcatttatatacatttttacgcaattaccctcatattctta

SEQ ID NO: 942 - DNA, 686 bp, Saccharomyces cerevisiae
gatagcagttttattcccatttttatctgcagtatagggaacttggaatcaccttttgaaagaagagaaatgcctggatttacagctccaacaagaaggcaggtgttgtctttatacaaggaattcatcaagaatgctaatcaattcaataattacaacttcagggaatactttttaagtaaaacaaggactactttcagaaagaacatgaatcagcaagacccaaaagtgttaatgaacctatttaaggaagctaagaacgacttaggtgtcttgaaaagacagtctgttatttctcagatgtacacatttgacaggctggtcgtagaaccattgcaaggaagaaaacactaaaacctggcctaactggtcattgcatgtaagaaagaactttccagtaattttttccttctcacgtcaggaaattcgtatggttatatcttatagagaggtggccgcctttaatttggaaaagatattattagatgatattcctaattttcgaccgatactttgcatggttggacttcaattagatcatgtaatttacttccttaatatcaatagcatttcttttttggtagaagatttttcttttcttttcttttcttcaacccacatgggactataagaggagagtttatagcttgtatataaaacgctataactaaaacataagcccactc

SEQ ID NO: 943 - DNA, 2119 bp, Saccharomyces cerevisiae
acacgaagagccaactgttttcttgtgtcattctttagcactctttctttttatttttacattttttaattaagatcaccaaatataccgggaatataatgaagagaaaaactgctgaagttaaaggtgagaaggagagaaattccaaacaaatttccctcgaagaggacaagataaagggtatgttcaaccctaaaatctgggacaagactttccaggatggcttgaaaaaggaaattgaagactctcagccttacaactggggtactattcatgaattggttaatgacgatcttctacgtgctgttcgtaaagaaatagaaactgagatccatttcactaaaaaagaaaccgatatctatagagtcaaccaaagtggtgacttggccaatttgtctggtctggactgggatgacttgtcccgtttgcctaatttgttcaagctgcgccagattctgtattccaagcaatatcgagatttttttggctacgtcaccaaagctggtaaattgtctggttctaagaccgacatgagcatcaacacttacacaaagggatgtcacttgttgactcatgatgacgttattggctctagaaggattagtttcattttatacctaccagatcccgacagaaaatggaaatcgcattatggtggtggtctaagactttttccaagtattttaccaaacgttccacattccgatccatctgctaaactagttccacagttcaatcaaattgcttttttcaaagttttaccgggtttctctttccacgatgtcgaagaagtcaaagttgataagcacagattatctattcaaggatggtaccatattccacaagttggcgaagaaggttacatacctggtgaagaagaagcgtgggtccgtaacaacacatccactttggcgcagattgaatctaatgtcctagaagattttgaatttccaaaggacgagagaaatattttatcatttcatgaagtgaagcactttgaaaaaatgctcaagggcgatgctggcgcaaaaactgataacacacctaaagaatctatgactagtgtgatttctgattcggttaagttgtctgaagccgagttcacctatctatctcaatacatctctcctgaacatttaagctcgaaaggtatcgaaaaactacaaaagcagtttgttgagaactcttctctacaaattgagtcgtttttaaatgacgataaatcagaattgttaaagaaggttatcaaacaaaaagagttggaacaggaatgtccttatcattcaaaagatgtgaaagctccgtggaaaacggctattcctccacacaaagcccgttatttgtacatcgacggtaaggaataccgtaatttccaaacagaagctgatattcttgaggcgctgaataacaatgatttgccaaactttcagtttactaaggacgcaattaaaattatctccgatgcttccggaaatagtagggaaaacaattttgatgcagaattagcgttgattgacctagctgtatttcacaagagcacaattttcaagaaatacctagctcttctaacttctttgtgcccagtcagtgagcaaatccttattagaaggtttaggccaggaatggatttcacattggccaccaaatgtcgctttaatgaacttttgaaaagcaatccagatataatcgatgctgtcttggaaggtactttgtgcttgacaccttctgccggttgggaatccggagagcttggtggttacgaattgtacatgatggacgacgacgaagataataagcaatacttaaaggaagacgttgaagacgcttctgtttatcgtgcggatgacagtggtgattcagtattgattaatgatccacctgcttggaatactttcaatttggtcttgagagatgaaagtgttttggagtttgttaagtacgtcagctggagcgctaaatctagtagatgggatgtcaaaatgaagtgggatgtcaaatcatgtgatgaagatggtcaggaagatgaagcgtaaacaattaacccgtcttattaagtaaatggcagcttagatatttataaagttgtataatagaagtaataaaattatttgaaaagtta

SEQ ID NO: 944 - DNA, 1854 bp, Saccharomyces cerevisiae
taagggcgtagacgtccctcttaacagatactctgtagtccgtgctaacgtaaacacagcattaaaagtgcttgttacttcactattattagcattgaggcgcgtgtgctcggaaaacctaccatattataaaagggctaacaaatatgcctcaaacgcacgaaatgtccctgaacggcactcaatacttaaaatatgaacttaaagaccttgagtctcgagctcacgatgcaaagactccttcaacaaatgaattctatgatgatgtagaatcgcacggaacagaagaattagttgaagctaaactgtcgtttttgaacagaattgctgctggtttaagtgccgagacaaagggtattgaaccgattacagaagatgaaaaaactgatgattctatactgaacgctgcatctatgtggttttcagcaaatatggttctgcctgcttatgccattggcgccctagggcctatggtgtttgatctaaatttcggccaaagcgttttcgttattattttctttaacctcttaggcttggtatcagttgctttcttttctgttttcggtgcagagctgggcctaagacagatgattttgtctagatatttagttggcaatatcgcagccaggatcttctctttcatcaattttattgcctgtatcggttggggtatcgttaataccgtagcaagctcgcaagtcctgaatatggttaaccccggtcatcaatgtcctctctgggctggttgtatagttattatcggtgctactgtaattgtaacttttttcggctatggagtcattcatgcttacgagaaatgggcgtgggtaccaaattttgccgtttttttggtaataattgctcgtttggcaaggtctaaaaaatttgtccttggggagtggacatctggtcctactacagcaggtaacgtgctttcatttggatcaacagtttatgggtttgctgcaggctggacaacatatgcggctgactataccgtttatatgccaaggaaaacgaacaagtataaaatttttttctcgcttgtagttgggttagcaacaccattatattttactatgatacttggtgcagctgtagcaatggcagctatcggcgatccagcctggaagacgtattatgacgaaaattccataggtggtttaacttttgccgttcttgtccctaattctgttcacggattcggtcagttctgttgcgtgttattgtctctgtccactatcgctaataatgttcccaacatgtatactattgctttatcggtgcaagccacgtgggaacctcttgcgaaagtcccaagagttatttggactttattaggcaatgcggccgcactgggtattgccattcctgcctgctactatttttctaccttcatgaattacttcatggattccataggttattatttggctatttatattgccattgcatgttcagagcattttatttataggcgttccttcagtgcttacaatgttgatgattgggatagttgggaacgtctacctatcggcattgcaggtactgctgccttaattgttggtgcctttggcgtagcgttgggtatgtgccaaacttattgggttggcgagatcagccgtttgatcggagactacggtggtgatattggattcgagttaggactaagttgggcatttatagtttacaacattgctagaccctttgagctcaagtactttggtcgttaacgaaagttcatttaaatgtttcgctattttagtctttgtaatgtaacataaatggctctagtatgcaaatcattaaaaaatagcatgtatgttaattaaattatcacggctcattcatttg

SEQ ID NO: 945 - DNA, 1593 bp, Saccharomyces cerevisiae
atgccagaaaagttagccatgtcaatggtcgatataaaagatgcggggagtgaactaagggacctcgaatctggagctctggacacaaaatcttccgccgctgatgtatactatgagggtgtagaattgcatagaaccaacgaattcattgataataagccgtcctttttcaataggattgcagctgctttaaatgctgagacgaaaggtattgaaccagttacagaagatgaaaaaaatgatgactcgatactcaatgccgccactatatggttttcagctaatatggtgattgtagcctattccgtaggtgccttgggtcctctagtatttggcctaaatttcggccaaagtgttttagttatcatttttttcaatattttgggtttgatccctgttgcattattctcactttttggggtagaactgggcctaagacagatgattctatcgagatatttggctggtaacatcacagcaagatttttctctcttgttaatgtcattgcttgtgtcggttggtgtgttttaaatatttctgtttctgctcaacttttgaatatggtgaatgaaggctctgggcacaactgtcctatttgggcaggttgtttgattattgctggtggtaccgtgcttgtgactttttttggttacagtgtcgttcatgcatacgaaaaatggtcgtgggtacccaattttgctgcctttttggtcattattgcccaactatcgagatcaggaaaatttaaaggtggtgaatgggtagggggtgcaactactgcaggtggtgttctttcttttggttcatctgtttttgggtcagctgcgggttgggcgacttatgcagcagattacactgtttatatgccaaagaccacaagtaaatacaaaatttttttttccgtagtagccggtctagcgttccctctatttttcaccatgattcttggtgctgcttgcggtatggcggcccttaatgacccaacctggaagtcatattatgataaaaacgccatgggtggtgtcatatatgctatcctggtccctaactctctaaacggattcggtcaattctgctgtgttttgttggctctttcaactgttgctaataatgtccctggaatgtacactgtcgctttatccgctcaagctttgtgggcacctttggctaaaataccaagagtagtctggacaatggcaggtaatgctgccactttaggtatttccatccctgctacctattactttgacggctttatggagaattttatggattccattggttattatttggctatttatattgccattgcatgttcagagcattttatttataggcgttccttcagtgcttacaatattgatgattgggataattgggagcatctacctatcggtatcgcaggtactgctgccttaattgctggtgcctttggagtagcgttgggtatgtgccaaacttattgggttggtgagatcagtcgtttgatcggagagtacggcggtgacattgggttcgagttaggcggaagttgggcgttcatcatctataacattgtaagacctttagaactcaaatatttcggtcgatga

SEQ ID NO: 946 - DNA, 871 bp, Saccharomyces cerevisiae
tctgtatattgaatagaatttttttcaccactagaattgttcttggagccagcacaagcacttacaatggcagattattcttcccttactgttgttcaattgaaagatttactgaccaagagaaatctgtctgtaggcggattgaagaatgaactagttcaaagactgataaaggacgatgaagaatcaaagggtgaaagtgaagtttctccacaggaacaaaaccaggaacaagggtcagaacctgcggcgatagaagaaccagcctcccagaacattactgaaaaaaaggaagtttcaagcgagcctaaagaaacaaacgaacccaaggaggaaaataaggacgttcaaaagccctctgatggaccttctgctactgcttcagagaacgaacaagctgctgcttccactgctgctcccgctttgtcaccagaagaaattaaggccaaagcattggatcttttaaataagaaactgcaccgcgctaacaaattcggtcaagatcaagcggatattgactctttacaaagacagataaatcgtgtggagaagtttggtgttgacttgaatagcaagttggctgaagaactgggccttgtcagtaggaaaaatgaacctgaaagtggcaataacggtaaatttaaaaatagaaacaaaaatgcaaacaaccgctccagagtaagtaaaaacaggagaggcaaccgctctggttacagaagataaaggctcaagccgttttggtggagtttttcattctagtttcggttctttcccactttttaaacgaccgcagttgtttgtatatgaaggtgcaaaatttgttgcatacgtaaacatgtgtagattattctaaataaatctgtgttattaa

SEQ ID NO: 947 - DNA, 2911 bp, Saccharomyces cerevisiae
accaacgaacaacactttatttgttgatatattaacatcatgtacgtttataaaagagacggtcgtaaagaacctgtccaattcgataagattaccgctcgtatatcacgcttatgctatggtttagatccaaaacatatcgacgccgttaaggtcacccaacgtatcatttctggtgtctatgaaggtgtcacaacaatcgaactagacaacttagccgctgaaacatgcgcttatatgactactgttcatccagattacgccaccctagcggccagaattgccatttctaatttacataaacaaaccacaaaacaattttctaaggttgtcgaagatctttatagatacgtcaatgctgctactggtaagcccgctcccatgatctctgatgatgtctacaatattgtcatggaaaacaaggataaattgaactccgcaattgtctatgacagagattttcagtacagttattttggttttaaaactttggaacgttcttatttactaagaatcaacggtcaagtggccgaacgtccacaacatttaattatgagagtcgcactaggcatccacggtagagatatcgaggctgctttagaaacgtataacttgatgtctctaaaatattttactcacgcctctccaacgttgttcaatgccggtactccaaaacctcaaatgtcctcttgtttcttggttgccatgaaggaggactctatcgaggggatttacgacaccttgaaggaatgtgctttgatttccaaaactgctggtggtattggtctacatatccataacattcgttcaactggttcttacattgctggtacaaacggtacttctaacggtttaattcctatgattcgtgttttcaataacactgcccgttatgttgaccagggtggtaataaaagacctggtgcgtttgccctttacctggaaccatggcatgctgatatatttgattttattgatattaggaagaaccacggtaaagaggaaattcgtgcaagagatttgttccctgctctatggattcctgatcttttcatgaagcgtgtcgaagaaaatgggacctggacattattctctccaacatcagctcctggtttaagcgattgttacggtgacgagtttgaggctctatatacccgctacgagaaagaaggtcgtggtaagactatcaaagcccaaaaattatggtattccattttggaagctcaaactgaaactggtacacctttcgttgtttacaaggatgcttgtaacagaaaatctaatcaaaaaaacttaggtgtcatcaagtcatcaaacttatgctgtgaaattgttgaatactcagctccagatgaaactgctgtttgtaacttggcttccgttgccttaccagcattcattgaaacttctgaggatggtaagacttccacatacaacttcaaaaaattacatgaaattgctaaagttgttactcgtaatttaaacagagtcattgatcgtaattactaccctgttgaagaagcgagaaaatccaatatgagacatagaccaattgctttgggtgttcaaggtctcgctgacactttcatgctgttacgtttgccatttgattctgaggaagcccgtttgctaaatatccaaatctttgaaactatttatcatgcctccatggaagcttcttgtgaactagctcagaaggacggtccatacgaaactttccaaggatctcctgcttctcaaggtatactacagtttgatatgtgggaccaaaaaccctacggcatgtgggattgggacaccttaagaaaagatatcatgaagcatggtgttagaaattccttgaccatggcaccaatgcctactgcatccacatcccaaatattgggttataatgaatgtttcgaaccagtcacttccaatatgtactcccgtcgtgtcttatccggtgaattccaggttgtgaacccttacttactgcgtgacttggttgatttaggtatttgggatgagggtatgaaacagtatctgattacacaaaatggctccattcaaggcttaccaaacgttccacaagaattgaaggacttatacaagactgtttgggaaatttcacaaaagactatcattaacatggcagccgatcgttctgtctatattgatcaatctcattctttgaatttgttcttacgtgccccaactatgggtaaactaacaagtatgcatttttacggatggaagaagggattgaagaccggtatgtactatttgagaacccaagctgcatctgctgcaattcaatttactattgatcagaagattgcggatcaagctacagaaaacgttgctgatatttccaacttgaagcgtccatcatatatgccttccagtgcaagctacgctgccagcgatttcgtgcccgcagctgtgactgcaaacgcaactattccatctctagatagctcctcggaagcttcaagagaggcatctccagctccaacaggtagccactcattaactaaaggaatggcagaattaaacgttcaagagtctaaggtagaagttcctgaagtacctgccccaactaagaatgaagaaaaagctgcccccatcgttgatgatgaggaaaccgagttcgacatttacaactctaaggttatagcatgtgctattgataacccagaagcttgtgaaatgtgttcgggttaatgagggctaagtttttatttcttcaattctatttatcaaaatttgggtgtttacttcgaggtgtaatttatattttcttttgttttctctgataaaaaaattggtttccattctaatgccaagctaaaaggtacctatatatgtttactaattatttttctactttgcatatatacataaaaaaagtcgaataatttaacatgaa

SEQ ID NO: 948 - DNA, 576 bp, Saccharomyces cerevisiae
cattatcgaatacgattaaacactacgccagatttccacaatatgtcttcagcaccattattacaaagaacacctgggaaaaagatcgctttgcccacacgagttgagccaaaagtgttctttgccaatgagcgtacctttttgtcgtggttgaactttacagttatgctgggaggccttggtgtaggtttactgaattttggtgacaagataggtagggtcagtgcaggactatttacttttgttgccatgggtacaatgatatacgcgcttgtaacataccactggagagctgctgcgattagacgtagaggatcaggtccttatgatgacagattggggcccactttgttgtgctttttcttattggttgctgtcattatcaactttatattaagattgaagtacaatgacgctaacactaagttatgaaattgtaattccaatatcgtaagcgtgggttacgcacaaactgtattttcaagatgctcacaaataatttagtttcatatatacgcatatatagaaagtatccatctataggtaatcatgaacaataaaaatattcacgtttca

SEQ ID NO: 949 - DNA, 1872 bp, Saccharomyces cerevisiae
gaacagaacaaaacacgattatataagccccatgtaaaaagaacgtcttaatttattttgaatttaggacttcttgacatttttagcatatataacaatacgataagtgtctcatcaaacgtggttaagacagaaaacttcttcacaacattaacaaaaagccaaagaagaagaaatgctttctcgcacaagagctgcagctccgaattccagaatattcactagaagcttgttacgtctttattctcaagcaccattacgcgttccaattactcttccaaatggtttcacctacgaacagccaacagggttattcatcaatggtgaatttgttgcctcgaagcaaaagaaaacgtttgacgtgatcaatccatctaacgaagaaaagataacaactgtatacaaggctatggaagatgatgttgatgaagccgttgcagcggctaaaaaagcttttgaaacgaagtggtctattgtagagccggaggttcgcgctaaagctttattcaatctcgctgacttggttgagaaacaccaagaaacactggctgccattgagtcaatggataatggtaagtcattgttttgtgcgcgcggtgacgtcgctttagtatctaaatacttgcgttcttgcggtggttgggcagataaaatctacggtaacgttattgacacaggtaaaaaccattttacctactcaattaaggaaccattaggcgtttgcggccaaataatcccttggaacttccctttattgatgtggtcatggaaaattgggcctgctctggctacaggtaacaccgtcgtattgaaacccgctgaaacaacacctttatctgcccttttcgcttcccagttgtgtcaggaagcaggcatacccgctggtgtagtcaatatccttccgggttccggtagagttgttggagaaagattgagtgcacacccagacgtgaagaagattgcttttacaggctctactgccaccggccgccatattatgaaggtcgctgccgatactgtcaagaaagtcactttggagctgggaggtaaatcaccaaatattgtgtttgctgacgctgatctagataaagccgtcaagaacattgccttcggtattttttacaactctggtgaagtttgctgcgctggttccagaatatacattcaagatacagtatacgaggaggtgttgcaaaaactaaaggattacaccgagtcactaaaggtcggtgacccatttgatgaggaagttttccaaggtgctcaaacatctgacaaacagctgcataaaattttagactatgtcgatgtagcaaaatcagagggggctcgtcttgtgactggaggggccagacatggcagtaaaggttattttgtcaagccaacagtgtttgctgatgtcaaaggagatatgagaattgttaaggaggaagtgtttggtcccattgtaactgtatccaagttttctactgttgatgaagtgattgctatggcaaatgattctcaatatgggttagccgcaggtattcacactaacgatattaacaaggctgttgatgtgtccaaaagagtgaaagctggtactgtttggataaatacctataacaacttccaccaaaatgttcctttcggtggcttcggccagtcaggtattggccgtgaaatgggtgaggctgctttaagtaactacactcaaacaaaatctgtcagaattgccattgacaagccaattcgttgaagtaactcaggcccgagttgactgctcattgaaggtatgtatgataaacattatagaataatgaaaaatgcctcgtgacatacagataaaatctaacaaggatatattcaaaaaaaaaaaacaaaacaaaaaaa

SEQ ID NO: 950 - DNA, 540 bp, Saccharomyces cerevisiae
tcaagaaaccaacatagattaagcagaaatgtctgacgctgttactatccgtactagaaaggttatctccaacccattgttggccagaaagcaattcgtcgtcgacgtcttgcacccaaacagagctaatgtctccaaggatgaattgcgtgaaaaattagctgaagtctacaaggctgaaaaggacgctgtctccgttttcggtttcagaacccaatttggtggtggtaagtctgttggtttcggtttggtctacaactctgttgccgaagctaagaagttcgaaccaacttacagattagtcagatacggtttggctgaaaaggttgaaaaggcttccagacaacaaagaaagcaaaagaagaacagagacaagaagatcttcggtactggtaagagattggctaagaaggttgctcgtcgtaacgccgattaagcaaactaacttcaaaacgttaaatcatttttacggattgtttagttttctatatataaatatgtgtatctttttccaataaaaaatataatcaataattttaa

SEQ ID NO: 951 - DNA, 347 bp, Saccharomyces cerevisiae
ggaagagaaaactttgatatagaggggatatggtactgtttggactaggtagactattttacgtcattttattattgattaatgccgttgcagtactgagcgaagaaaggttcttaagaagaattggccttggaagatcaaatgatgagacacctgtttttggtcaggatcaaaataccacgaagtccaaggttgttcaattgattggcgccgtacagacattactgaggataccattaattggaataaatatactggtgattgtttatgaattactattgggatgaactaagcgtacgaagcaaatattacatactactatatacaagaaacaggctctaatagtt

SEQ ID NO: 952 - DNA, 1966 bp, Saccharomyces cerevisiae
atgattaggtacactgttgctggccattccagaaggtgtgtagtaggagcttcgaaaagagtgggtgcaattaaatgtatcaccgtcgccgccaccaagagatttatctccaataagccaaacgaagtttttaccaagctaacgaatgacaatgatccaaagagagatgcctttttcaaatatacgtggggctcatggcttaaaaatgataagcaagaaaaggaaaaaagattcacgaagttttcgattgaaggtttaaatcgcattctcaatgacatctacattcaatctaatgaaatggctaaggcccccgacggtaagatcttaccaccagtgtttaacaagaacttgaccgtttcattggtcaataacgttgtaccaaagaatataggtaaaatcaacccaaatgaaaaagttcaagtaaccacattatctagtattcacgaaggtaaacatcacagaatatacaaggtcgacacgaatttgaacaaggcatttatcttgaggattccttatccgctggaaaatgaaaacactctatcctacagaataagaagtgaagtagcaaccatggattttgctgacttgaagttgggcatcaaagttcccaagattttttgttatggtgtcaattctttgaaccctgtaaggcagccttttgtcttacaagaatttatcgaaggagaactcttgatgaaagattgggatccattgattgaagacggttcctccaatcaaaaaaaatatgacaatgttattaaacaagtttctgattttcagtcgaagttagtgtcattgaaattaaatgcatttggatccatatattttaacaatgacttaaaagacggaaatgagaaggagtttgttaaggaagacatatacgatggggaaactaatccggatctacaaaacagatggaaaattgggccatccgtggaaagatgtctctggagacataaatctcacttggattttcataaacaaatgaaaccttttttgggaccatggccaaagaagtctccaatggatataattaaaaatactggcctattggaagctgaaaatgctaaaactagaatagccatgaaagaggcaggaagttcagctgaattgatgtatcctcgaactttgaaggagcaaataactacctatgaaaatttagctaagattgccccggatttattcaacgtcaaaacaaaggccattccaaatatgcaggaactattgtcaccacgtttgtttcatcctgatctagaccccatgaatattattgttaacaaagaagcacaagaagcctatctattagattttgaaggagcatgcacaaaacctttcattttacagaattcgccacaattcatcgcctatgatgggcccaagatttatgacttaaaggaggacataaccgattttgacaaattatctgaggcggaaaaggtgcaatatcagttcatgtacaagcgcacccgtaatcaacatcaatgggagaaaaaattaaatgacaataatcctaaattaattactgcagttgccccacctgttaagctactgagaagcccatatattgcagctgtcgaaagaaaaacggaagaagagtatttacttattgatgaatcactattgcaattgaaggaagtttgggacatctttgcccagaatgagttagtgaatcagaaaaagtttcctctaaactatagtaaagaagatattgaaagacatgttgaggatttgcaaaaattacacgaaaagctaatctctacaccatttgctgccactcaagggtggattcctcaagatatgtttgatcaactattaaattccggcagtattgttaagcaagagaacggagactacaccgtgaagcaacctgaagctaccaaataatctatactaaaaatgaaatatttttttgttttctttacctcattcaactgtatagaacgttataacaaaataatcaagttaa

SEQ ID NO: 953 - DNA, 1790 bp, Saccharomyces cerevisiae
agcgggatgaaaaaatcagacaaatatccaagttatgagtaattactttgttggaaggagggagcagaggataaggaaattcttaaaactgttatgtatataaaggaagaaccatttctagttatttcactttttgatacttgtcaactatcttagtaaaaatacagaactctataaagaaccacagaaaaatcgacagcaatgacaagcattgacattaacaacttacaaaatacctttcaacaagctatgaatatgagcggctccccaggcgctgtttgtacttcacctacgcaatctttcatgaataccgttccacagcgcttgaatgctgtaaagcacccaaaaattttgaagcctttctcaacgggtgatatgaagattttactattagaaaacgttaatcaaactgctattacaatcttcgaagagcaaggttaccaagtcgaattctataaatcttcattgcccgaggaagagttgatcgaaaagatcaaggacgttcatgctattggtatcagatcaaagactagattaacttcaaatgtcttacaacatgcgaagaatctggtttgtattggttgtttctgtatcggtaccaaccaagttgacttagactacgctaccagcagaggtattgctgttttcaactcgcctttctccaactcaagatcagtagcagaattggtcatcgctgaaatcattagtttagcaagacaactaggtgatagatctatcgaattacataccggtacatggaataaggttgctgctagatgttgggaggtaagaggaaaaactcttggtattattgggtacggtcacattggttcccaattatcagttcttgcagaagctatgggtttgcatgtgttgtactacgatattgtaactatcatggccttgggtactgccagacaagtttctacattagatgaattgttgaataaatctgattttgtgacactacatgtaccagctactcctgaaactgaaaaaatgttatctgccccacaatttgctgctatgaaggatggcgcttatgttattaatgcttcaagaggtactgtcgtggacattccatctttgatccaagccgtgaaagccaacaaaattgcaggtgctgctttggatgtttatccacatgaaccagctaagaacggtgaaggttcatttaacgatgagctaaatagctggacttctgaattagtttcattaccaaatatcatcttgacaccacacattggtggctctaccgaagaagcccaaagctcaatcggtattgaagtggctaccgcattgtccaaatacatcaatgaaggtaactctgtcggttcagtcaacttcccagaagtggcattgaaatcattgtcttacgaccaagagaacactgtgcgtgtgttatacattcaccaaaatgtaccaggtgttttgaagaccgtcaatgatattttatcgaaccataacatcgaaaagcaattttccgattcaaatggtgaaattgcttatttaatggctgatatctcttctgttgaccaaagcgatattaaagatatttatgaacaactaaatcaaacctctgctaagatctcaattagattgctatattaatatgcaatcgattctcatactgtcaactttttgaacatgattaaaagtttcctataaaatattaaaaagaaccaaaaaaaaaatggatagaagaatgcttgaggcaataataatgattatctattttatatatacatacataatcatttaagttttttttttaaagatatttcgattta

SEQ ID NO: 954 - DNA, 1935 bp, Saccharomyces cerevisiae
agttctttcttgtgtgagtgctacaagccacatttaaactaagtcaattacacaaagttagtgatgtcagctactctactaaagcaaccattatgtacggttgttcggcaaggtaaacagtccaaagtgtctggattgaaccttttgagactaaaggctcatttgcacagacaacacctgtcaccttccttgataaaactacactctgaattgaaattggatgagctgcaaactgataacacccctgattacgtccgtttagttttaaggtcctctgtatacgatgttattaatgaatctccaatctctcaaggtgtaggtttgtcttcccgtctaaacacgaatgtcatcttgaaaagagaagatctattgcctgttttctctttcaagcttcgtggtgcctataacatgattgccaagttggacgattctcaaagaaaccagggtgttattgcctgttcagctgggaatcatgcccaaggtgtggcctttgctgctaaacacttgaaaatacctgctactatcgttatgcctgtttgtacaccatctattaagtatcaaaatgtctcgagattagggtctcaagtcgtcctatatggtaacgattttgacgaggctaaggctgaatgtgccaaattggctgaagagcgtggcttgacgaacattcctcctttcgatcatccttatgtcattgccggtcaaggtactgtagctatggaaatcctaagacaagtacgtaccgctaataagatcggtgctgtctttgttcccgtcggcggtggtggtttaattgctggtattggtgcttatttgaaaagggttgctcctcatatcaaaatcattggtgttgaaacttacgatgcggccactttacataattccttgcaacgcaaccagagaactcctttacctgtggtgggtacttttgccgatggtacgtctgtgcgtatgattggtgaagaaacatttagagtcgcccaacaagtggttgatgaagttgttcttgttaacactgacgaaatctgtgctgcagtaaaggatatttttgaagatactagaagtattgtagaaccatctggtgccctttcagtagccggtatgaagaaatacatctctaccgtacatccagaaattgaccacactaaaaacacctatgttcccatcctttctggtgctaacatgaactttgatagattaagatttgtttccgaacgtgctgttcttggtgaaggaaaggaagtcttcatgttagttactttacccgacgtccctggtgcgttcaagaaaatgcaaaagatcatccacccaagatctgtcactgaattctcttaccgttacaatgaacatcgtcatgagtcctctagtgaagtgcccaaggcttacatttacacttctttcagcgtcgttgacagagaaaaggaaatcaagcaagttatgcaacagttgaatgctttaggttttgaagctgtggatatctccgataacgaattggctaaatctcatggtagatacttggttggtggtgcttctaaggttcctaatgaaagaattatttcatttgaattccctgaaagaccaggtgccttgactaggttccttggaggcctaagcgattcttggaatcttactttattccattatagaaaccatggtgccgatatcggtaaggttttagctggtatttccgttcctccaagggaaaacttaaccttccaaaaattcttggaagatttaggctacacttatcatgatgaaactgataacactgtttatcaaaaattcttgaaatattaaaaccgacaatttactttataaatttacgcaacaacttgttaggtaaaatgaacgtcgtcataatttaaatactagacagcgcgtgtatgttactcatatttatactcatatcatgtgaacctataaaccaattcaatacaa

SEQ ID NO: 955 - DNA, 1680 bp, Saccharomyces cerevisiae
ggccacaatcgataattagcactgatattctgattggaaaaaaggcaaaaaatgaccgcttccatcaaaattcaaccggatattgactctctaaagcaattacagcagcaaaatgacgatagttccataaatatgtatcccgtgtatgcgtatttgccatcattggatctgactcctcacgtggcatatctaaaattggcacaattgaacaaccctgatagaaaggaatcatttctgttggaaagtgctaagacaaataatgaattagatcgttattcattcataggtatctcgccacgcaagaccatcaaaaccggtcctactgaaggcattgaaacagatcctttggaaattttggaaaaggagatgtctacctttaaagtagccgaaaatgttcctggtttaccgaaattaagtggtggtgctattggttatatttcttatgactgtgttcgttatttcgagccaaaaacaagaaggcctttgaaagatgtcctaagacttccagaggcatatttaatgctttgtgataccattattgcctttgataatgtttttcagagatttcaaatcattcataacattaataccaatgaaacttcgttggaggaaggttaccaagctgcagcacaaataatcactgatatcgtatcaaagctaaccgacgattcctcgccaataccatatccagaacaacctcctattaaattgaatcaaacttttgaatcgaatgtgggcaaggaaggttacgaaaatcacgtctccactttgaagaagcatattaagaaaggtgatattattcaaggtgtgccatcgcaaagagtggcaaggccaacttcgttacatcctttcaatatttacagacatttacgtacagtgaacccatctccttacctgttttatattgattgtttggatttccaaatcattggtgcatctccagaattgttgtgcaaatcggattccaaaaatagagtcattacccatccaattgctggtactgtcaaacgtggggctactactgaagaggatgatgctttagcggaccaattacgtggctcgttaaaagaccgtgcagaacatgttatgctggtagatttagcaagaaacgatattaacagaatttgtgacccattaacaacaagtgtcgataaactgttaactattcaaaaattttctcatgtccaacatctggtttctcaagtcagcggtgttctccgcccagaaaagacaagatttgatgcattcagatcgattttccctgcaggtactgtcagtggtgctccaaaggttagagccatggaattgattgccgaactagaaggagaaaggcgtggggtttatgcaggcgccgtaggtcattggtcatacgacggtaaaacaatggacaattgtatcgctttaaggactatggtctataaagatggcattgcttacttgcaagctggcggtggtattgtttacgattcagatgagtacgatgaatatgtcgaaaccatgaataaaatgatggccaatcacagtactattgtgcaagcagaagaattgtgggccgatatcgtaggatcagcttaaaaagggcattctctgtttttttccccttagacgacatttttatagttttcgaataatatgatataatgatgtatagcaggatcctgaaaagtattattctttcga

SEQ ID NO: 956 - DNA, 378 bp, Saccharomyces cerevisiae
atgcctagtaaagatccagagagcgttatagacaaagaaatacggaagatatcagcaagaaatgatgagcttatcaaacaggatgggactctaaaaagggaatacactacattattgagaaaagtatcgagcgtgataacggtactgaacagtattgatgatgcagatactggttctgctgaaacggaactcccacgcttaatatctcaagcaacagtagagaaagtacccgaattgaagtggtacaatgatcagatatcactgattacagaaaagttggaggacgatgaagatattgaggttcccgaggagctaatggatgcttatactctgtacaaggaaaccccattattatataatgatacgcacacaccataa

SEQ ID NO: 957 - DNA, 1486 bp, Saccharomyces cerevisiae
cgacaaagagcagacgtagttatttgttaaaggcctactaatttgttatcgtcatatgtctcaagttcaagaacaacatatatcagagtcacagcttcagtacgggaacggttcgttgatgtccactgtaccagcagacctttcacagtcagtcgttgatggaaacggcaacggtagcagcgaagatattgaggccaccaacggctccggcgatggtggcggattgcaggagcaagcggaagcgcaaggtgaaatggaggatgaagcatacgatgaagctgccttaggttcgtttgtgccaatagaaaaactgcaagtgaacgggattactatggcggatgtgaaaaaactaagggagagtgggcttcacactgctgaagcggtagcatatgctcccagaaaggatttattggaaatcaaaggtatatcggaagctaaggcagataagttgctaaacgaagcggcaaggctagtgcctatgggatttgtcacggctgctgattttcatatgagaagatcggagctgatttgtttgacaacgggttctaagaatttggacactcttttgggtggtggtgtggaaactggttctattactgagcttttcggtgaattcaggacaggtaagtcccagctatgtcacactttggccgtgacatgccaaattccattggatattggtggcggtgaaggtaagtgtttgtatatcgataccgaaggtactttcaggccggtaagattggtatccatagctcagcggttcggattagacccggatgatgctttgaacaacgttgcgtatgcaagagcctataacgccgatcatcagttaagacttctggatgctgctgcccaaatgatgagcgagtctcggttttccttgattgtggtcgattctgttatggctctataccgtacggatttttctggtcgtggtgaactaagcgcaaggcaaatgcatttagccaaatttatgcgtgctttgcaaaggctggccgaccaatttggtgttgcagtcgtcgttactaaccaagtggtcgcccaagttgatggtggtatggcttttaatccagatccaaagaagcctatcggtggtaatattatggcacattcttccaccacgcgattaggtttcaaaaagggtaagggatgtcaaagattatgcaaagttgttgactcaccttgcttaccagaggctgaatgtgtgttcgcgatctatgaagatggtgttggtgaccccagagaagaagacgagtaggtatttggtctcttgtctctatttatttacacaggtttactttcaattctcctctttttcttaggttgcgttccgtacatttttatcttcatttccatccactgtcttagatttttgcatatattttgtcatatacctcgcaaccctactgcggtcttaaccttttttttcagttcttttaaataactttcgtattgtctgtcacccatgaaatatatgtatttttct

SEQ ID NO: 958 - DNA, 1112 bp, Saccharomyces cerevisiae
tattccactggtcgcttgagtcgatatccttccacagcaatattgcactttacaattaggatagcctccccaataaaataaggaaattttggttatttgtgttcagaaaaagccgaaatcgattgcagagaacagaaaggaactttccgattatcacactttaggagccgtgataaagaagactaccatcgcatatcgcagaaaagactttaaatattaactaaaaccgcattcgcaaattgcaaacaaagtacgtacaatagtaatggctacaaagcaggctcacaagagattgacgaaagagtacaagttgatggtggaaaaccctccaccatatattcttgctcgccccaacgaagataatattttagagtggcactatattatcacaggacctgcggatactccttacaagggcggtcaatatcacggtactttaactttcccgtctgattatccatacaaaccaccggctatcagaatgataacaccgaatggacgtttcaagcccaacacacgattatgcctttctatgagtgattaccaccctgatacttggaatcctggctggtctgtctcaaccattttgaacgggttactaagtttcatgaccagtgatgaagccacgacaggatcaattacaacatcagaccatcagaagaagacattagcaagaaattccataagttataacacttttcaaaatgttagattcaaattgatttttccggaagttgtacaggaaaatgtagagacattagaaaagagaaaattggatgagggggatgcggcaaatacaggtgatgaaacagaagacccttttacaaaggctgcgaaggaaaaagtcatctcgttggaggaaattctagaccctgaagacagaatacgcgctgaacaagcgttgagacaatcagaaaataattccaagaaagatggcaaagaacctaatgatagttcttcaatggtttatattggtatcgctatttttttgtttttggttggcctttttatgaaatgaagccattaaatgaactaaactttagataaattttgacaacacagaatagaaatcaatagtattatatagacaaaacggatctttttattatgaa

SEQ ID NO: 959 - DNA, 1036 bp, Saccharomyces cerevisiae
cgtatgttctgatacccagcaaatgagaaagtagaaggagaaacctaaaaacctgtggcggtcaagactgctagcaagatggatatttagatcataaattctaacgcatgcatcctgagcaatgaaatcatgcaacctaacatttgaggttaatatatgagaattaactagcgttgaggaggtactgcaatttaaaagaccgaagaattatcgatgcaaggaaaaatgggtctaggatgaatacgagcaattgaaatacatttggaataccttgtgaaaatatcacatactttcgccttctatctcgatgcgttattacaagaaaatagttttactaacaaattaacaaaaattaaaatagtgtaaaaatgggtatttctcgtgattctcgtcacaaaagatcagccactggtgctaaacgtgctcaattcagaaagaagagaaagttcgaattaggtcgtcaaccagccaacacaaaaattggtgctaagagaatccactctgtcagaactagaggtggtaacaagaaatacagagctctaagaattgaaaccggtaacttttcttgggcttctgaaggtatctccaagaagaccagaattgctggtgttgtttaccatccatccaacaatgaattggttagaactaacactttgaccaaggctgccattgtccaaattgatgctactccattcagacaatggttcgaagctcactacggtcaaaccttgggtaagaagaagaacgtcaaggaagaagaaactgttgccaagagcaagaacgctgaaagaaagtgggctgctagagctgcttctgccaagatcgaatcttccgttgaatctcaattcagcgccggtagattatacgcttgtatctcttccagaccaggtcaatccggtagatgtgatggttacatcttggaaggtgaagaattagctttctacctaagaagattgactgctaagaaatagagataataagataatattttattacactacatgtacaattttacttttactttgtgttgtctcta

SEQ ID NO: 960 - DNA, 510 bp, Saccharomyces cerevisiae
atcgagaaatcacgataataatacagcaaaaatgtcaggtaacggtgctcaaggtacaaaattcagaatttctttaggtttaccagttggtgctatcatgaactgtgctgacaacagtggtgccagaaacttgtacatcattgccgtcaaaggttctggttctagattgaacagattaccagccgcctctttaggtgacatggttatggccactgttaaaaagggtaagccagaattgagaaagaaggttatgccagctattgttgtccgtcaagctaagtcttggagaagaagagacggtgtctttttgtacttcgaggacaatgctggtgtcatcgctaatcctaagggtgaaatgaagggttctgccattactggtccagtcggtaaggaatgtgccgacttatggccaagagttgcttccaactctggtgttgttgtttaaataaaatttccaagaaaaattcttttaaatcattatgtaaccttttaaaatattaatataaacaa

SEQ ID NO: 961 - DNA, 861 bp, Saccharomyces cerevisiae
tattctacaatctccgcgaacctaagtatgtctgctgttgaaatttcccctgacgtgttggtgtataagtctccattaacggagcaatcgacagaatacgctagtatttccaacaattcagaccaaaccattgcatttaaggtcaagaccacagccccaaagttttactgcgtgagaccaaacgccgcagttgttgctccaggtgaaacaatccaggttcaagttatcttcctgggtttgactgaagagcctgccgcagactttaagtgccgtgacaagttcctggttatcacgttgccttctccttacgacctcaatggcaaggctgttgcagatgtttggtccgacttggaggctgagttcaagcaacaggctatctctaaaaagataaaagtcaaatatttgataagtccagatgtacacccagcacagaaccaaaatatacaggaaaacaaggaaactgttgaaccagtagtccaagacagtgagccaaaggaagtgcctgctgtggtaaacgaaaaggaggtccctgctgaaccggaaactcaacctcccgtccaagtaaagaaagaagaggtcccacctgtcgttcagaaaaccgttcctcatgaaaatgagaagcaaacgtccaacagcactccggccccacagaaccagataaaggaagccgcaaccgtacctgcagaaaatgaatcatccagcatgggtatattcatattggttgcactccttatcttggttttaggatggttctacagataatagggagattgaggatatagctgtattctaaatatatatttatatatgtgtgtgttttgccctttccttcctttcagtctttattttactttgtttttc

SEQ ID NO: 962 - DNA, 3315 bp, Saccharomyces cerevisiae
cgacaattaaaagacatacgcttaaccatttttagggtactcgagtatcgcatctgctaattgataaaaggactttgttgtgttttgaggctgttttccattttcttcgttagagctacaagagtcgactttttcgttaaacaaaaacgattataagataataagcgctgtcagttttttccacagttttggacttgttactataattcgtgaagcacattttgcaagtgagtcaaaatttcagttcagtccttctttagaagagtgagtgcgtagcaaataaaacagcaggaaataattgcttgtttttgtgtgtaagtaccttttagttggaactaccgaatatagtgttattcgactttcactttcataagccacagctttttcttagtgcgtttttagttcgataaatttaccaaaaactattttccccttttcttattcccttttctttgttagcttgggtattatatttaaagtaacagaaaggaaagaaaaaagaaaaaaaatgccttcatccatatccgtcaagttagtggctgcagagtcattatataagagggacgtattccgttccccggatccgtttgctgttctgactattgatggttaccaaaccaaatctacatccgcagcgaagaaaacgttaaatccctactggaatgagactttcaaattcgacgatatcaatgaaaattctattttaaccatccaagtctttgatcaaaagaaatttaaaaagaaggatcaagggtttcttggcgtggttaacgtccgcgtgggtgatgttttgggccatttggatgaagatactgctacatcgagtggtagacctcgcgaagaaactattactcgtgatttaaaaaaatctaatgacggaatggccgtcagcggtaggttgattgttgttttatcaaaactaccttcgtcaagtccgcattcacaagctccttctggccatactgcatcttctagtacgaatacaagttcaactactcgaacaaatggtcattctacttcctccacccgtaatcattcaacgtctcatccttccagaggcaccgcgcaagcagtagaatcaactcttcaaagcggtacaacagctgctactaatacggcaacaaccagtcaccgttccaccaattccacatccagtgctaccagacaatactcttcgtttgaagaccagtatggtcgtttaccccctggttgggagagaaggaccgataactttggtcgtacatattacgtcgatcataacacaaggactaccacttggaaacgtccaacgctcgatcaaacagaagccgaacgtggcaaccaattaaatgcaaatactgagttagagagaaggcagcataggggaagaactttacctggtggatcatcagataattcctctgtaacagttcaagtgggaggtggttccaatatacctcctgttaatggtgcagcagcagcagcgtttgcagctacaggtggtaccacatctggtttaggcgaattaccttcaggctgggagcagcgatttactccagaaggaagagcttatttcgttgaccataatactagaacaaccacttgggtggatccaaggagacaacagtatatacgtacttatggccctacaaataccaccattcagcaacaaccggtctcccaattaggtcctttgccttctggatgggaaatgagattgaccaatacggcacgtgtatatttcgttgaccacaatacaaaaacaacgacctgggatgacccaagacttccatcatcgctagaccaaaatgttccacaatacaagcgtgacttcagacgtaaggttatttatttcaggtcccagcccgctcttagaatattgccgggacaatgtcatattaaagtacgtagaaagaacatttttgaggatgcttatcaagaaattatgagacaaaccccagaagatttaaagaaaagattaatgatcaagtttgatggtgaggaaggtttagattacggtggtgtttccagagaatttttctttttattatcacatgagatgtttaatccattttattgtttgtttgaatattctgcgtatgacaactataccattcaaataaatcctaacagtggcatcaaccccgaacatttgaactatttcaaattcattggtagagttgtgggtcttggtgttttccatagaagatttttggatgcattctttgtaggtgcactttacaaaatgatgctacgtaaaaaagtcgtattgcaagatatggaaggtgttgacgcagaggtgtataactcattaaactggatgcttgagaatagtatagatggtgtcttggatctgacgttcagtgccgacgatgaaagattcggtgaagttgtaacagtggatttgaagccagatgggagaaatattgaagttactgatggtaataagaaagaatatgtcgaattatatacccaatggagaattgttgatagagttcaagaacaatttaaggcattcatggatggttttaacgaattaatccccgaagacttagtaactgtgtttgatgagcgtgaactagaactattgatcggtggtattgcggaaattgacattgaagattggaagaaacacactgattatcgtggttaccaagagtcagacgaggtcattcaatggttttggaagtgtgtcagtgaatgggataatgaacaaagagcccgtttattgcagttcaccactggtacttctcgtatacctgtcaacgggtttaaagatttgcaaggctctgatggtccaagaagattcactattgaaaaagctggtgaagtacaacaattgccaaaatctcacacatgttttaacagagttgatttgccacaatacgttgattatgacagcatgaaacagaagctaacattggccgtggaagaaaccatagggtttggtcaagaatgattattccgcaccaattttttttttatttatggtgtccgttttcccaacattctttctgcctcaatcatcttgttttatatttcagctaacaatagtaaagagaaaactcttttttgttaattttatctgagttgctcatgaaatgattaatcattgttgtttttacagcaacatggaaagcagcaaagaaaatgcaggaaaacgtgaagtgctttttttgatgattacgcaaagttcttttcaagttcgccataagaggaggttttccttttcaaaaggagcatgataccaataatttatattgccttacgcctcttattttttatatcctctttttagattttattaatttttttttttatttatatacatataat

SEQ ID NO: 963 - DNA, 1182 bp, Saccharomyces cerevisiae
actaacacacaaatccaagaatgtctgaacttaatgcattattaaaagatatcaacggctcgctcactgcgacatcagaatccttggagaggttgtctgggatttatagtaattctgcgaccgatgagattcctgaaagtaaccaactacatgagcatctattttacgacgctaagaagcctgctgagaaagtatcgctgctatccttaaaaaatgggagcatgctagggtacataaattctctattgatgcttataggcaataggctagacgacgagtgcaaagatccttctgctatggatgcacgtgaacgctctattcaacaccgtgtggtattagagcgtggtgttaaaccactagaaaaaaagttggcttaccaattggacaagctgactagagcatatgtgaaaatggaaaaggaatataaagacgctgagaagcgtgcactggaaaaatctaccttagtgaatcatagcggcaacgacgatagcgaagatgatgagtctagtgaggatgaaatagcatacaggccaaatacctctggaattatcaacacaaataaaaaatcatcagcatacagggtggaggaaacggctaagcaagaaaacggggaagaaaacgatgacaatgagactggcgtgtataaaccaccaaagattacggctgttctaccaccgcaacaaacgcattttgaagatagattcgatgccagagaacacaaagatcgtagtaacaaatcgcgtatgcaagccatggaagaatatattagagagtcatcggaccaaccggactggagtgcatctattggtgctgacattgtgaaccatggaagaggcggtatcaaatctttgagagacacagagaaggaacgtagagtcacttcattcgaagaagataattttaccagattgaatattacaaataaagctgaaaaaaggaagcaaaagcaacgagaaagaaatgcaaggatgaacgttatcggtggtgaagattttggtatattcagctcaaagaggaagctggaagatagcacttcgagacgtggggccaagaagactcgttctgcctgggatagagctcaaaggagactgtagatacaaaaagtttattttcttatatcctaaagcgtttatagacttaatatttaaaagttaaatataaatgaagggcactggtatataa

SEQ ID NO: 964 - DNA, 867 bp, Saccharomyces cerevisiae
agtatgttataagagcgaataatgtgataaaggagcaaagtggaaggaaagaattataaagaatgacgttgccgtaaagccaatttttcaaccaacaaaattgcaatagtttcaagcaaattatggtgtgtccgggattggcggtagtaaattgtaaaacaatagctggtcaatagttgatattcataccgacactataatccacaaaagatgggtgacattgatggctgaaatggtagaggcaagaaaattttttaaagcaataaggcatagacgtttctattaatcctttgttttattcagtattttcgatatttcctctttactaacttcaatttactgaatttgtatgtaatttttagatgccaaaaaagagagcttccaacggtagaaacaagaagggtagaggtcacgtcaagccagtgagatgtgttaactgttccaagtccattccaaaggataaggctatcaagagaatggctattagaaacattgttgaagctgctgccgtcagagatttgtccgaagcttctgtctacccagaatacgccttgccaaagacttacaacaagttgcactactgtgtctcctgtgctattcacgccagaattgttagagttagatccagagaagacagaaagaacagagctcctccacaaagaccaagatttaacagggataacaaagtttctccagcagctgccgcaaagaaagctttgtaaatatgatgagagaataatataaatcaaacgctcgctgattaaggtgtcatttattttttttaatagaggctttgtcttttataattgtgtattttaataatatgattatagtatattttcaagaatagaatttttgcgcatgtaa

SEQ ID NO: 965 - DNA, 1228 bp, Saccharomyces cerevisiae
acgaacgagtaactggggagaggaaagcagattaccacaatatacattcaaattaaagaaatggactcacaaccagttgacgttgataatatcatcgatagattattggaagtaagaggatctaaacctggtcaacaagttgatctagaagaaaatgaaatcagatacttatgttcgaaagccagatctatattcataaagcaacccattttactagagttagaagccccaattaaaatatgtggtgacattcatgggcaatactatgatttactacgtctatttgagtacggtggattcccgccagaatctaattatctatttttgggtgattatgtcgaccgtggtaaacaatccttagagactatttgtctattactggcttacaaaattaagtatccagaaaactttttcattttaagagggaaccatgaatgtgcttccattaatagaatttacgggttttatgatgaatgtaagagacgttataatatcaaactttggaaaactttcacggattgtttcaattgtttaccaattgctgcaattattgatgagaaaatcttctgtatgcatggtggtctctcaccagatttgaatagtatggaacagatcagaagggtgatgaggccaacagatattcccgacgttggcttattatgtgacttattgtggtcagatccagataaagatatcgtaggttggagtgaaaatgatagaggtgtttctttcacttttggtcctgatgtagtgaacagatttttacagaaacaagatatggagttgatttgcagggcccatcaagttgtggaagatggttatgaattctttagtaaaagacaattggtgacacttttcagtgctccgaattattgtggtgaatttgataacgctggtgcaatgatgagtgttgatgaaagtttattatgttcttttcaaattttaaagccagcccaaaaaagtctaccaaggcaagctgggggtagaaagaaaaaataaatagattcacgtcctaaatcaaagtttaaaaaggaaaatacttattaacaagaagagtagtagaagaaaaatacaagaaacataaacgtagaaaacttttagtcaattctttaagcgaagaatacgaaagaaacatcaagaaaacaaaggaagatgcaatcatcactcgtcatatacacaaataattccctttagtgcaacaaaccgcgaaaaagcataagaaacataa

SEQ ID NO: 966 - DNA, 1762 bp, Saccharomyces cerevisiae
actgcaattagtcttttccttttctttactccccttccatcataactgttagtgaataaccacttatatagcataacacaatggatcaagaaacaatagacactgactacgacgtgattgtcttaggtaccggtattaccgaatgtatcttatctggtttactctctgtagatggaaaaaaggtattacatattgacaagcaagaccattatggtggcgaagctgcttctgtgaccttatctcaattgtatgaaaaatttaaacaaaatccgatcagtaaagaggaacgggagtccaagtttggtaaagatagagattggaatgtcgacttaattcctaaattcctgatggccaatggtgagctgacaaatattttaatacataccgatgtgaccagatatgtcgatttcaagcaagtttctggctcctacgtttttaagcaaggcaaaatttacaaagtgccagctaatgaaatagaagccatttcatcgccattgatgggtatttttgaaaaacgtagaatgaagaaatttttagaatggattagctcttacaaagaagatgacttgtccactcatcaaggattagacttagacaagaataccatggatgaagtgtattataaatttgggttaggcaattctaccaaagaattcatcggtcatgcaatggctttatggaccaatgatgactacttacaacaacctgctaggccatcgtttgagaggattttgttatattgccaaagtgttgcccgttacggtaaatcaccttatttgtatcctatgtatgggttaggcgaacttccacaaggatttgctcgtttgtcggctatttacggtggtacttacatgctagacactccaattgatgaagtattgtataaaaaagacacaggaaaatttgaaggggtcaagactaagctgggaactttcaaggccccattggttattgctgatccaacttattttcccgaaaaatgtaaatctactggtcaaagagttattagagccatctgtattcttaaccatccagttccgaacaccagtaacgcggattctttacaaattattatcccacaaagccaactgggaaggaaaagcgatatatacgttgcgattgtttcagatgcgcataacgtttgctccaagggtcactatttagcaattatttctacaatcattgaaactgataaaccacatatagaattagagcctgctttcaaacttctgggaccaatcgaagaaaaattcatgggaattgccgaattatttgaaccaagagaagacggctctaaggataacatttacttatccagatcatacgacgcatcctctcatttcgaatccatgactgacgatgttaaagatatttacttcagagtaacaggccacccattagttctaaaacaaagacaagaacaagaaaagcagtaaattcatacctttacgactaaagcagcaattggagggtaaacttattttttccgataatgttcttggcaaatgagttaccaataaatgacatgaattacagaaaacaagaaaatatttgccaaaaaaaaaccaatacaaaaatataggggaaaagattatcctttattcctttctcattccactttttttttttgttatatgcgtattctgattgattcataactaagtatctttccttttcttttctttcaatttcttttttccatatataaatacataaatttacataccttatgtagtataatatatggaagaatgctactgaa

SEQ ID NO: 967 - DNA, 2711 bp, Saccharomyces cerevisiae
catttatcgcggcttacggctttcggatatttcgtatattgcaaggagcaaaaaagaaaccctgcttactaaaaagctattgttttgcagtttataagttcttgccttttgaattattgatctttcctttatcgtttatttagtttcctattgtaacttggaactgtattatataatagtgcacagcactgaagttgtaactactgtacgtcatgcttttcagaaacatagaagtgggcaggcaggcagctaagctattaacgagaacctcgagtcgtttggcctggcaaagtattggggcctcaaggaatatttctaccatcagacaacaaatcagaaagactcaactatataattttaagaaaactgtgagcatccgtccattttctctctcctcccctgtttttaaaccacatgttgcttcagaatcaaaccctatagaatcacgtttgaagacctcgaagaatgttgcttactggttaataggtacatccggtttggtatttggtattgttgttcttggtgggttgactagactaacagaatcggggctgagtattaccgaatggaaacctgtcacaggtactttgccccctatgaaccagaaggaatgggaagaagaatttatcaagtataaggaatcaccagaatttaaattgttgaattctcacattgatttagacgagttcaagtttatattttttatggagtggattcatagattgtggggtcgtgctatcggcgctgtttttatattacctgcagtttatttcgctgtatctaaaaaaacttcaggccatgtcaataagaggttgtttggtctcgcaggtttattaggattacaaggatttgttggttggtggatggtgaagtctggtcttgatcaagagcaactagacgcaagaaaatcaaagcctaccgtttctcaatatagacttactacgcatttgggtaccgccttctttttatacatgggtatgctctggactggtttggaaatattgagagaatgtaaatggattaagaaccctgttcaagccattagtctcttcaaaaaattagataatcccgcaattggcccaatgagaaagatttctttagctttgttagcggtgtctttccttaccgctatgagtggcggtatggttgccggtttggatgctggttgggtctataacacctggccaaaaatgggtgaacgatggttccctagttctcgtgaattaatggacgaaaacttctgtagaagagaggacaagaaagatctgtggtggaggaatttgctagaaaacccggttacagttcagttggtccataggacatgtgcgtacgttgcgtttacatcagtactagctgctcatatgtacgctatcaaaaagaaggccgtaattccaaggaacgcgatgacctctttgcatgttatgatgggcgtcgttactttacaagcaacacttggtattttaactatattgtacctagtcccaatatcgttagcttctatccatcaagctggtgctttggcgttgctaacaagttctttggtgtttgcctctcaattaaggaagccaagagctccgatgagaaacgtaatcattaccttgccacattcaagcaaagtaactagcggtaaaattttaagtgaagcgtcgaagttagcctcgaaaccattataatggataaaggtattcttatgagaattgacagtatactcgcttttccgctttgtcgctccaatggttggattgtatgtgtgaggctttttcttattatatgttggtatccctacgagaagctgtaaatatgaatttctttagtaggcatcacacacaacaatagggtgtatttatttttatttttttttttcttatataaatgtcagtaatacatgatatctttaagttaggatttcacgaaattttcttctgccttcatcatggcatctgtatttgtgctcgcgagcctccaaagtatgaacataaacacagacctatacggagaaaatgtttcagagcatttttccattatgtcgtcgtcatatattttccagttgtatttcttatgcttaatcttactctttttaactacttttctttcacgcattaattctttttccaattctggcttatctgaaaggtattttgaaaaacccctagcaatacctagatcttcaggagcaaatacatccattcttttcaatccggagatcaagaacattttggcactccatgggcctataccttttacattcgtaactaaactttcaatcacttcctcatcattatctttttgaccgaagagcttttcgatatccttatatttttcagtaaaatagacagcaagagactctagatatatcattttccttttactcaatccacattttgcgatttctgcacattttgctgggtctttgaagtcttcgaaaaggattttgtaatcaggaaatgcaccgccataaagactgacaacccttgccttgatgctttcagctgcttggccactgatctgttgagacaaaattgtgcttgcaagcctaataaaataatcttcgagtgtattagggacttgagtctccttcaagtacaacgtaaattcattattcttaagtatgggaaaaagtgatggatctttctctaaaatgtgttcgcaagccatattgaacttttcttcatgtctagcaatatatttctcaggaagagcaacctctagag

SEQ ID NO: 968 - DNA, 1502 bp, Saccharomyces cerevisiae
aagaaagtatacttaacgtagttaacaaagtacataccaaacataacagcaaaaatatacgtaaagatggatttaacaatttcaaacgaacttactggcgagatatacggcccaattgaagtcagtgaagatatggctttaactgatctaatagcattactgcaggccgattgcgggtttgacaaaacaaaacacgacttatattacaatatggacattctagactcaaacagaactcagtctttaaaagaactagggctcaaaaccgatgacttattattgattaggggtaagatttccaattccattcaaacagatgctgctactttgtccgacgaagcgttcatagagcaatttagacaagagctacttaataatcaaatgcttagatcacaactcattttgcaaatccctggattgaatgatttagtaaatgacccactgttgtttagggaaagattgggcccgctcatattacaaagacgttatggtggctataacaccgccatgaatccttttggcatcccccaagatgaatatactagactaatggccaaccccgatgatcctgacaacaagaagaggattgcagagcttttagaccaacaagctatcgatgaacagttgcgcaatgctatcgaatatacacctgaaatgtttacccaggtccctatgctttacattaatatcgaaataaataactaccccgtaaaggcatttgtagatacaggggctcaaacaacgattatgtccaccaggttagcgaagaaaactggcctgtcgagaatgattgacaagagatttattggagaagctcgtggcgtaggaaccggcaaaattattgggagaattcaccaagcccaagtcaaaatagaaacacaatatattccatgcagttttaccgtcttagatactgacatcgatgttttgataggactagacatgctgaaaaggcatttggcttgtgtggacttaaaggaaaacgttcttaggatagcagaagtggagacaagctttttgagtgaagcggaaatcccaaaaagttttcaagaaggacttccagcaccaacgtcagttacaacttcgtctgataagcccctaacacccaccaagactagttcaactctaccaccacaaccgggggctgttcctgcgcttgctccaaggactggtatggggccaacacctacgggaagaagtacagccggtgctacaacggcaaccgggagaacgtttcccgaacaaacgattaaacagcttatggatctaggtttccctagggatgctgtggtaaaggctcttaaacagactaacggaaatgcagaatttgctgcatccctccttttccaatgagcaaccactgatattgtgatcggcctctacgtatgtagcccataacacaaatagataagtataaggatgtacatactttcattgtttcgtcaattgttgtttgtattgtatatgattgtacttctgttaagtatataatatgcagattg

SEQ ID NO: 969 - DNA, 367 bp, Saccharomyces cerevisiae
atgagtctaccggagattttgcctttggaagtcatagataaaacaattaaccagaaagtgttgattgtgctgcagtcgaaccgcgagttcgagggcacgttagttggtttcgacgacttcgtcaacgttatactggaagacgctgtcgagtggcttatcgatcctgaggacgagagcagaaatgagaaagttatgcagcaccatggcagaatgcttttaagcggcaacaatattgccatccttgtgccaggcggcaaaaagacccctacggaggcgttgtaaaaaggcaaaaattaacgcgaatttgtatagtgcatctaaaaaaaataattaagtataaaaatagataaaggaaatcaagtgtttc

SEQ ID NO: 970 - DNA, 913 bp, Saccharomyces cerevisiae
atggccgatgaggaacgtttaaaggagtttaaagaggcaaacaagatagtgtttgatccaaataccagacaagtatgggaaaaccagaatcgagatggtacaaaaccagcaactactttccagagtgaagaggacataaaaagagctgccccagaatctgaaaaagacacctccgccacatcaggtattgttccaacactacaaaacattgtggcaactgtgactttggggtgcaggttagatctgaaaacagttgcgctacatgcccgtaatgcagaatataaccccaagcgttttgctgctgtcatcatgcgtattagagagccaaaaactacagctttaatttttgcctcagggaaaatggttgttaccggtgcaaaaagtgaggatgactcaaagctggccagtagaaaatatgcaagaattatccaaaaaatcgggtttgctgctaaattcacagacttcaaaatacaaaatattgtcggttcgtgtgacgttaaattccctatacgtctagaagggttagcattcagtcatggtactttctcctcctatgagccagaattgtttcctggtttgatctatagaatggtgaagccgaaaattgtgttgttaatttttgtttcaggaaagattgttcttactggtgcaaagcaaagggaagaaatttaccaagcttttgaagctatataccctgtgctaagtgaatttagaaaaatgtgatggggaaggagtagacgaaaagaaaaaaaggttttctatttgttccattttctcaattattaatggtcctcaaagaaataaaagaaaaggaagaagaagtaattgtaatatcaaacggttttttatagtatattcttcttattctatatttatatatcaatgttttataataagatgtttattcatagca

SEQ ID NO: 971 - DNA, 633 bp, Saccharomyces cerevisiae
aaatcagtactattactaataatgttgtctaacgctaagctccttctatcattggccatggcctctacggctctcggattggtatctaattctagttcctctgtaatcgtggtaccatcaagcgatgctactattgccggtaacgatacagccacgccagcaccagagccatcatccgccgctccaatattctacaactcgactgctactgcaacacagtacgaagttgtcagtgaattcactacttactgcccagaaccaacgactttcgtaacgaatggcgctacattcactgttactgccccaactacgttaacaattaccaactgtccttgcactatcgagaagcctacttcagaaacatcggtttcttctacacatgatgtggagacaaattctaatgctgctaacgcaagagcaatcccaggagccctaggtttggctggtgcagttatgatgcttttatgatcgaatagtctttaactagagacttattttaaacaggacatgtgttttttactaatattgtattcttcgatgtagtcgttatagttctttttcttcaaatcatttaaataaagaaactattttttctttttgtgtgtagaataataaatgtaattctagttcttc

SEQ ID NO: 972 - DNA, 1297 bp, Saccharomyces cerevisiae
gagccacagaataacctccccgacgatgttcaaactcacctctcgactcgtcacgtcaaggtttgctgcctcttccagactggccaccgctcgaaccatagtattgccccggccccatccgtcatggatctcttttcaggccaaaagatttaattcgacgggcccaaatgccaacgatgtctcggaaatccaaacccagttgccttccatcgatgaattaacctcttcagctccttctctttccgcttctacttcggaccttatcgctaacacgacccaaacagtgggcgagttgtcctcccatatagggtacttaaatagcattggcctggcccaaacctggtactggccctcggacattatccaacacgtcttggaggccgttcatgtttactctgggttgccttggtggggaactatcgcggccaccaccatcctcattcgatgcctgatgtttcccctctatgtcaagtcctctgatactgttgctagaaattcccatatcaagcccgagctggacgccttgaataataagctaatgtccactacagatttgcaacaaggtcagctagtcgccatgcaaaggaaaaaactgctctcctcgcacggcattaagaacagatggctggccgcacccatgctacaaattccaatcgcccttgggtttttcaacgcattgagacacatggctaactacccagtagatgggttcgctaatcaaggtgtcgcttggtttacagacttgactcaagcagacccttacttaggtttgcaagtaatcactgccgctgtgttcatctcatttacaaggctggggggtgagactggtgctcaacaattcagttctcccatgaagcgtcttttcactattctaccgatcatttctataccggccacaatgaacttatcgtccgctgtggtcctctactttgcctttaatggtgccttctccgtcctacagacaatgattttgagaaacaaatgggttcgttcgaaactgaagataacagaagtagctaaaccaaggactcctatcgctggcgcttcccccacagagaacatgggcatcttccaatcattaaaacataacattcaaaaggcaagagatcaggcggaaagaaggcaattgatgcaagataatgagaagaagttacaagaaagcttcaaggagaagaggcagaattccaaaatcaaaattgttcacaaatcaaacttcattaataacaaaaaatgaataaaggctctatatctctctgtaaatataaaaatataaaactcaaaccctcgataggcggga

SEQ ID NO: 973 - DNA, 2406 bp, Saccharomyces cerevisiae
atggcgagaagtagaaagaattcattggttcgagatattgcgtctcatccgactataccagaatctcagaccatagtgggtttactggacgattcgtacctttttgataagctaaaaaagctatctttggctgtggaaaattctgacagtctgcaaagaactgatgtctcagaaggttgttcagaggttaatggttctgaagctacgacttctgcggatgtaaaaaagacaaacaagtatttgtattatactacctatttggaccagttaaacattaagatagacgagtataaagttgttctggatcaaacacgccaggttaacgatcaattggatagttccatcaagaaatttcggaaaatctctcaggatactggagctttcattgaggaaacgaagacgatctatgaaaagcagtctaaattaagcaatctaactgagtcaatccctaaagctctccattattttgaagttttagaccctataatgcgtcgcttgaaccatgccacttctcccgctattgttaagaagagctcctttacgacaatgttggcgactatcgacgagtctttacgttttttggatgagaatagtgacctcaaggatgcggcagcgtacagaatcaagttcaagcaatgcttgatcagagcctgtgaattgatatctcactttttaacgaatctgttgaaacaaacaaatcaagaaattttggataaaaccaaaaacaaaaattcgttaactgggttgccgtcgactacaagagacgccttcttgtacagtaaattctataccatagctgatactttcaaaattcaggtttcggaaattgttaagagaagcaacgaaaaagcctacaacaagtatcacgatgaactgaattccattctttacgagtgtttcaaccactatttccaaacacgtttaagactgctaactccggtcatttggtcacacattgatgaaattgttgttaaagataaggaccagggcttggtcaaattcattcaagacggtaaggtttattttcagcagttatgcgcggacgaatacaaacttttcgtagaatttttccctgaaaaggaatgtcgtttcaagattaatcagtggttcttacagttatgtgaacccctttatgactccattagagtcagggttttgaaagagacagatatttgtactttgtgtgactcagtgactttgtttgctccatattatgaatttgaagaaggttcagaagaatacgtgaagcagtttaccgacattcagtatgataaactattcgaaccgattgtccaaaaagtgcaggctagattaattttaagagtgcaaatatatgtccaacaaaatattttgagctataggcccactagggacgttttcatgatttcaaatagaaggagaaaatcgaagaccagcttacaagggggtaacgaagatgctactactagtgatgacaatccagatcccttgttagaatcttatttatcttctttcaagaatagaagcatattgcccatatcccctaatgatgcagacgataaaagtattgattcagaagaatctactgataaaatttcacagttgcaaacatattatccgcccttgttaaagactttggctttattgtccaaaatttatgaaatgatcaattctgtggtatttgatgatttagctcaccatgtagtccacgactgtattgtatccttgagaaatgcctatgatatggttatcaaatcttcagcgggaaaatctgattttaacaacttagatatttcattagcgtacctaaaaaatttgttgatgttacgtgattccatacagaactttaatattcaatatacagttaatgaaacttatctggatttttctggtgttgaggggtttttcaaatcacttaaagaaaatggtagaaacgttttgaaaaagacaaagtcatcttcaatattgaccctggcaagagagctggttccaaaagttgtaaacaatatggtggacgcccgtacggaactcatatctgaattgagaaacgtcattaaagattttactgaaagcacttctttggagcttattgatgacactttagatatcaatagtgatgaagatctgttaagcaaaaacgtaaaattaagagagaatataaaggccagattaccaagaatatatgaacagatattgaactatatcgatgatcaagagattgttactaatttattagacgctgtgcaagagttaattacacaatcatattccaaatattatgaaactataactgaattggcagaaaatggaaagtttgctaaggatcaagtcgcagacgtaatgtacttggacgtcttcacagatttttttgccaaagaggtggcggatcttttaagaaatggtgatattgataccataacgaaataa

SEQ ID NO: 974 - DNA, 2019 bp, Saccharomyces cerevisiae
agtaacatttttacttaataaccgtttgaagcatagagcaggccctggtaccaccacctaatatctggctttttattcaataaaaactcaaaaaaaaaaatccaaaaaaaactaaaaaaccaataaaaataaaatggctgatattactgataagacagctgaacaattggaaaacttgaatattcaagatgaccaaaagcaagccgccactggttcagaaagccaatctgttgaaaactcttctgcatcattatatgttggtgacttagaaccttctgtttccgaagcccacttatatgatatcttctctccaatcggttcagtctcctccattcgtgtctgtcgtgatgccatcactaagacctctttgggctatgcttatgttaactttaacgaccatgaagccggcagaaaagcaattgagcaattgaactacactccaatcaagggtagattatgccgtattatgtggtctcaacgtgacccatcattgagaaagaagggttctggtaacatctttatcaagaacttgcaccctgatattgacaacaaggctttgtatgacactttctctgtgtttggtgacatcttgtccagcaagattgccaccgacgaaaacggaaaatccaagggttttgggtttgttcacttcgaagaagaaggtgctgccaaggaagctattgatgctttgaatggtatgctgttgaacggtcaagaaatttatgttgctcctcacttgtccagaaaggaacgtgactctcaattggaagagactaaggcacattacactaacctttatgtgaaaaacatcaactccgaaactactgacgaacaattccaagaattgtttgccaaatttggtccaattgtttctgcctctttggaaaaggatgctgatggaaaattgaagggtttcgggtttgttaactacgaaaagcatgaagacgctgtgaaagctgttgaagctttgaatgactctgaactaaatggagaaaagttatacgttggtcgtgcccaaaagaagaatgaacgtatgcatgtcttgaagaagcaatacgaagcttacagattggaaaaaatggccaagtaccaaggtgttaatttgtttgttaagaacttagatgacagcgttgatgacgaaaagttggaagaagaatttgctccatatggtactatcacttctgcaaaggttatgagaaccgaaaacggtaagtctaagggttttggttttgtttgtttctcaactccagaggaagctactaaggccattacagaaaagaaccaacaaattgttgctggtaagccattatacgttgccattgctcaaagaaaagacgtaagacgttctcaattggctcaacaaatccaagccagaaatcaaatgagataccagcaagctactgctgccgctgccgccgccgctgccggtatgccaggtcaattcatgcctccaatgttctatggtgttatgccaccaagaggtgttccattcaacggtccaaacccacaacaaatgaacccaatgggcggtatgccaaagaacggcatgccacctcaatttagaaatggtccggtttacggcgtccccccacaaggtggtttcccaagaaatgccaacgataacaaccaattttatcaacaaaagcaaagacaagctttgggtgaacaattatacaagaaggtttctgctaagacttcaaatgaagaagcagctggtaaaattactggtatgattttggatttgccacctcaagaggtcttcccattgttggaaagtgatgaattgttcgaacaacactacaaagaagcttctgctgcctatgagtctttcaaaaaggagcaagaacaacaaactgagcaagcttaatgctctatgtaatcacctacttccctactcaacaaacttatcatcttttttttctcccttcccttttttttttgtcttaaatactagttattatcctttgtaacctaaatactcgctcttattgacaaaatgcaaacgttttttgtttttaa

SEQ ID NO: 975 - DNA, 4798 bp, Saccharomyces cerevisiae
atgtctggaacttttcatggcgatgggcatgctcccatgtcgccctttgaagatacatttcaatttgaagataatagcagtaatgaagatacacatattgcacctacccattttgatgatggtgcaacaagcaacaaatacagccggccacaggtcagcttcaatgatgaaacacccaaaaataaacgtgaagatgcagaagaattcacatttaacgatgacacagaatatgacaatcattcctttcagccaacaccgaaacttaataatggatctgggacgtttgatgatgtggaattagacaatgatagtggtgaaccgcacactaactacgatggtatgaaaagattccggatgggtacaaaaaggaataaaaaaggaaacccaataatgggaagatctaagaccttgaaatgggctaggaagaacattccaaacccatttgaagactttacgaaggatgatattgaccctggtgccataaatcgtgcgcaagaactaaggactgtgtattacaatatgcccttaccaaaagatatgatagatgaagaaggcaaccccattatgcagtatcctcgtaataaaatcagaactaccaaatataccccgttaacattcttaccaaaaaacattctatttcagtttcataatttcgccaacgtttatttcttagttttaataattttaggtgcatttcaaatttttggtgtcacgaaccctggtttaagtgcggttccgttagttgtcattgttataatcactgcgatcaaggatgctattgaagactcaagaagaaccgtcctagatttagaggtgaataataccaagacacatattttagaaggtgttgagaacgaaaatgtctcaaccgataatatttcattgtggagaaggtttaagaaagcaaactctagactccttttcaagtttatacaatattgtaaagaacatttaactgaagagggcaaaaagaagagaatgcagagaaagcgtcatgaactaagagtacaaaaaactgttggaacgagtggacccagatcctctctagactccattgacagttacagagtatctgcagattatggccgtccttcattggattatgataatttggaacaaggggccggtgaagccaatatagttgatagatccctaccacccagaactgattgtaaatttgccaagaattattggaaaggtgtcaaggttggtgatattgttcgtatccataacaatgatgaaatccctgctgacattatcttactttcaacgtcggatacagatggtgcctgctacgtagaaactaaaaatttggatggtgaaacaaacttaaaggtacgccaatccttgaagtgtaccaatactataagaacgtcaaaagatattgctagaacaaaattctggatcgaaagtgaagggccccactcaaatttgtacacttatcaaggtaatatgaaatggagaaatcttgcagatggcgagatacgaaatgagccaattactattaataacgttctgcttcgtggttgcactcttagaaatactaagtgggcaatgggtgttgtaatgtttaccggtggtgacacaaaaatcatgttaaactctggcattacacccaccaagaagtccaggatttcaagagaactaaacttctctgtggtgataaatttcgtgctacttttcatcttatgttttgtttctggtattgcaaatggtgtatattacgacaaaaaaggcagatcacggttttcctatgaatttggaacaattgctgggtcagcggcgacaaacggtttcgtctcattttgggttgctgttattctttaccaatctttagtcccaatctctttgtacatttctgtggagatcatcaaaactgcacaagcggccttcatttacggagacgttttactctacaatgccaaattggattatccttgtacaccaaaatcctggaatatttctgacgatttaggtcaagtggaatatatattttctgataaaacaggtacattaactcaaaatgtaatggagtttaaaaaatgtactatcaatggtgtttcatatggaagagcttacaccgaagcgttagcgggattaagaaaaagacaaggtatcgacgtcgaaaccgaaggtaggcgtgagaaggccgaaattgccaaggatagggatacaatgatcgatgaactgagagctttatcaggaaattcacaattttatcccgaagaagttacctttgtatcaaaggagttcgttcgcgatttgaaaggggctagtggtgaagtacaacaaagatgctgtgagcactttatgttagcattagctttatgtcactccgtccttgtagaagcaaacccggacaatccaaaaaaactggatttaaaagctcaatctccagacgaagcagcgttagtagccacagctagagatgtaggattcagttttgttggaaaaaccaaaaaagggttgataattgaaatgcaaggtattcaaaaagaatttgagattctaaatattttggagtttaattcatcgagaaaaagaatgtcctgtattgtcaaaattccgggtctgaacccaggggacgagcctagagcacttttaatttgtaaaggtgcagattccattatatactcaagattaagtcgccagagtggtagcaatagtgaagctattttggaaaaaactgctttgcatttagagcagtacgctactgaaggtttaagaacgttatgcatagctcaaagggagttaagttggtctgaatacgaaaaatggaacgaaaagtacgatattgctgctgcatcattagcaaacagagaggatgaattagaagttgttgcagattccattgaacgcgaattgatattattgggcggtacagctatcgaagatcgtttacaagatggtgttccggattgtatagagttgcttgcagaggcaggaattaaattatgggttcttacgggtgataaagttgaaacagctataaacattggattttcttgcaaccttttgaataatgaaatggaattgttagttattaaaacaactggtgatgacgtgaaagaattcggatcagaaccaagtgaaattgtggatgctttactctccaaatacttgaaggagtatttcaacttaaccggttcagaagaagagatttttgaagctaaaaaggatcacgaatttccgaagggtaattacgccatcgttatcgatggtgatgctttgaaattggcgctatatggtgaagatataagaagaaagtttcttttactctgcaagaattgtagagctgtcttatgctgtagagtatctccatctcaaaaagcagccgttgttaagttagtcaaggattctctagatgtcatgacactagccatcggcgatggttccaacgacgtcgccatgattcaatctgcggatgttggtattggtattgccggtgaagaaggtcgacaagctgttatgtgctcagactacgccattggacaattcagatatttggctagattggtcctcgttcacggtaggtggtcttataagagactggcagaaatgattcctgagtttttttacaaaaacatgatttttgctttggcattgttctggtatggtatctataatgattttgatgggtcttacctgtatgaatacacatacatgatgttctataatttggcatttacatccctaccagtcatcttcttaggtattctggaccaggacgtgaatgacacaatatcattagtggtccctcagttataccgtgttggaattttaaggaaagaatggaaccaaagaaagttcttatggtatatgttggacggattatatcagtctattatctgtttttttttcccttacttggtttatcacaaaaatatgatagttacgagcaatgggttaggattggatcatcgttattttgtcggtgtttatgtgaccactattgctgtaatttcgtgtaacacatatgttttattacaccaatatagatgggattggtttagtggattattcattgcactgtcttgcctcgtagtttttgcatggacgggaatatggtcttctgcgatagctagtagagaatttttcaaagctgcagcgcgtatctatggagcaccttcattttgggctgttttctttgttgccgtgctgttctgcttactgccccgtttcacatatgacagttttcaaaaatttttctacccaactgatgtggaaatagtaagagagatgtggcaacatggccatttcgatcattatcctcctggttacgatccaacagatcccaacagacccaaggtcacaaaagctgggcaacacggagagaagattatagaaggcatagcactttccgacaacttaggaggatcgaactattcaagggatagtgttgtcacagaggagattccaatgactttcatgcacggtgaagatggaagtcctagcggatatcagaagcaagaaacctggatgacttcacccaaggaaacacaagatcttcttcaatcgccccaatttcagcaggcccaaacgttcggaagaggcccatcaaccaacgtcaggtcatccttggaccgcacaagagaacagatgatcgccactaaccaactagataaccgctactctgtggaaagagcgagaacatctctagatctaccaggcgtaactaacgcagcctccttaatcggaacacaacagaacaattaataatgatatccgaaccatagctgatggaactccgcttttcactgtatatataatattacataatattactggataagcctta

SEQ ID NO: 976 - DNA, 1021 bp, Saccharomyces cerevisiae
tgagaagaaaaagcaagttaaagataaactaaagataaaaatgtcaaccagtcgtgaagattctgtgtacctagccaagttggctgaacaggccgaacgttatgaagaaatggtcgaaaacatgaagactgttgcctcctctggccaagagttgtcggtcgaagagcgtaatttgttgtctgttgcttataagaacgttattggtgctcgtcgtgcctcttggagaattgtttcttctattgagcaaaaggaggagtccaaggagaagtccgaacaccaggtcgagttgatttgttcgtaccgttcgaagattgagaccgaactaactaagatctccgacgatattttgtccgtgctagactcccacttaattccatcagccaccactggcgagtccaaggttttctactataagatgaagggtgactaccaccgttatttggctgaattttctagtggcgatgctagagaaaaggccacaaacgcctctttagaagcatacaagaccgcttctgaaattgccaccacagagttacccccaactcacccaatccgtctaggtttggctcttaacttctctgtcttctattatgaaattcaaaactctccagacaaagcctgccatttggccaagcaagcttttgacgacgctattgctgagttggacactctgtctgaagaatcatacaaagatagcacacttatcatgcaactgctaagggacaatttaaccttatggacttcagacatgtccgagtccggtcaagctgaagaccaacaacaacaacaacaacatcagcaacagcagccacctgctgccgccgaaggtgaagcaccaaagtaagtattctgataaatctaaagagaaattactaaaaaaaagaaaaaaaaaagaacgggggtgtaataatttgtagttcattattgcaattatatatctatatctatatatgtatataacattaacatgtgcatgtacacacgtaatcgcgcgtgtacatgtctatatgtgttacttgaa

SEQ ID NO: 977 - DNA, 1415 bp, Saccharomyces cerevisiae
gaaaccacatttgtgccaatgcttgctgcttcattcaaacgccaaccatcacaattggtccgcgggttaggagctgttcttcgcactcccaccaggataggtcatgttcgtaccatggcaactttaaaaacaactgataagaaggcccctgaggacatcgagggctcggacacagtgcaaattgagttgcctgaatcttccttcgagtcgtatatgctagagcctccagacttgtcttatgagacttcgaaagccaccttgttacagatgtataaagatatggtcatcatcagaagaatggagatggcttgtgacgccttgtacaaggccaagaaaatcagaggtttttgccatctatctgttggtcaggaggccattgctgtcggtatcgagaatgccatcacaaaattggattccatcatcacatcttacagatgtcacggtttcacttttatgagaggtgcctcagtgaaagccgttctggctgaattgatgggtagaagagccggtgtctcttatggtaagggtggttccatgcacctttacgctccaggcttctatggtggtaatggtatcgtgggtgcccaggttcctttaggtgcaggtttagcttttgctcaccaatacaagaacgaggacgcctgctctttcactttgtatggtgatggtgcctctaatcaaggtcaagtttttgaatctttcaacatggccaaattatggaatttgcccgtcgtgttttgctgtgagaacaacaagtacggtatgggtaccgccgcttcaagatcctccgcgatgactgaatatttcaagcgtggtcaatatattccaggtttaaaagttaacggtatggatattctagctgtctaccaagcatccaagtttgctaaggactggtgtctatccggcaaaggtcctctcgttctagaatatgaaacctataggtacggtggccattctatgtctgatcccggtactacctacagaactagagacgagattcagcatatgagatccaagaacgatccaattgctggtcttaagatgcatttgattgatctaggtattgccactgaagctgaagtcaaagcttacgacaagtccgctagaaaatacgttgacgaacaagttgaattagctgatgctgctcctcctccagaagccaaattatccatcttgtttgaagacgtctacgtgaaaggtacagaaactccaaccctaagaggtaggatccctgaagatacttgggacttcaaaaagcaaggttttgcctctagggattaattaaatcgtaaggaaaaataaaataatagtgctgtgatcgcatgatattcttccctggaagcgccattttatagcaagaaatgtaagtcaagtatattttaactgtatatcaacaatatagctcttttttatgc

SEQ ID NO: 978 - DNA, 1695 bp, Saccharomyces cerevisiae
aacaattgtggcttgcaatactcaattagaattcttttcttttaatcaaactcacccaaacaactcaattagaatactgaaaaaataagatggttcatttaggtccaaagaaaccacaggctagaaagggttccatggctgatgtgcccaaggaattgatggatgaaattcatcagttggaagatatgtttacagttgacagcgagaccttgagaaaggttgttaagcactttatcgacgaattgaataaaggtttgacaaagaagggaggtaacattccaatgattcccggttgggtcatggaattcccaacaggtaaagaatctggtaactatttggccattgatttgggtggtactaacttaagagtcgtgttggtcaagttgagcggtaaccatacctttgacaccactcaatccaagtataaactaccacatgacatgagaaccactaagcaccaagaggagttatggtcctttattgccgactctttgaaggactttatggtcgagcaagaattgctaaacaccaaggacaccttaccattaggtttcaccttctcgtacccagcttcccaaaacaagattaacgaaggtattttgcaaagatggaccaagggtttcgatattccaaatgtcgaaggccacgatgtcgtcccattgctacaaaacgaaatttccaagagagagttgcctattgaaattgtagcattgattaatgatactgttggtactttaattgcctcatactacactgacccagagactaagatgggtgtgattttcggtactggtgtcaacggtgctttctatgatgttgtttccgatatcgaaaagttggagggcaaattagcagacgatattccaagtaactctccaatggctatcaattgtgaatatggttccttcgataatgaacatttggtcttgccaagaaccaagtacgatgttgctgtcgacgaacaatctccaagacctggtcaacaagcttttgaaaagatgacctccggttactacttgggtgaattgttgcgtctagtgttacttgaattaaacgagaagggcttgatgttgaaggatcaagatctaagcaagttgaaacaaccatacatcatggatacctcctacccagcaagaatcgaggatgatccatttgaaaacttggaagatactgatgacatcttccaaaaggactttggtgtcaagaccactctgccagaacgtaagttgattagaagactttgtgaattgatcggtaccagagctgctagattagctgtttgtggtattgccgctatttgccaaaagagaggttacaagactggtcacattgccgctgacggttctgtctataacaaatacccaggtttcaaggaagccgccgctaagggtttgagagatatctatggatggactggtgacgcaagcaaagatccaattacgattgttccagctgaggatggttcaggtgcaggtgctgctgttattgctgcattgtccgaaaaaagaattgccgaaggtaagtctcttggtatcattggcgcttaatgaaaaaaatgtaatgaaatataaatgtgtttttccctcccttaatattattattcttatgagtgatgcccttatgttttttttgcggtctagtatatgtaaatatagacacacacatatatatatatttatgtgtataatcctagct

SEQ ID NO: 979 - DNA, 1734 bp, Saccharomyces cerevisiae
atcatattagaatacctatagctccatcaaaagaaatacacaatggtggttttggctgcttctatcactacgcgtcaggggaaacctctcttgtccaggcaattcaaagatctgtccaaggatcgagtcctagagttgctgtccaatttccagaacctagtctccgagatctcgtcagaccacacatttgtcgaggacaagcacgtccgctacgtgtataggccctttgataactactacattattcttatcacaaaccgccagtccaatattatcaaggatttggccacattaaatctgttttcacagacgatcaactcctacttgtctagtttccaagaccaagagatttttcacaatgcctttgagatcttgtcctcgttcgacgaaatcgtgtcaatgggcgggtacaaagagaacttgtcctttactcaagtgcaaacatacttgtctatggagtcgcacgaagaaagaatccaggaaattattgagcgtaataaagagatcgaagctactgaggagaggaagcgccgtgctaaggaaattgctagaaaagaacatgaaaggaaacacgggtttatgtcttcaaatggcgattacgacggcgccaataggttcatgggaagtaaagatcctaacgttacaaacgccatcaacagttactactcccatgcttctcctgcagcacaacagtcttatctacaaagttcccatgccgctgctgctgaggtggccccagtggcctccccaatggctacgtctcagcgtgcgggacattctgctactggcggtatgaaattgggtggtggtgccggaagaagagcgggtgccgcaccacggccaagtgcaatttcttcagcctcttctggcactccacctcctccggaggaggatgtcccagagaacaatggtattttgatctctatcaaggaggtaatcaatgcagaattctccagagatggtaccattcactcttctgaattgaaaggtgttttagaactaagaattaatgaccatgacttatctcactcgaacctaaaactagctgattctattgacgttcgcgataaatccttccagtttaagacccatccaaacatagataaacaatcgttcctatccactaaacttatctccctgcgtgataaatctaaggctttcccagccaacgaccaaagcctgggtgttctaagatggcgtaaagtcgctcccgcagaagatgactcattaattccattaactctaactacatgggtttccccctccgaatcacaacagggctttgatgtcattattgagtatgagagcgtcctggaaacagaactcgctgatgtgatcttcaccattccagttttccctcaggagccagtagacataaatacagagtcttctacatgctctgacgctgaagttgtcaacatggaccaagaaatgggaacctccattaagattagcaaaattgctgccaacgatgcaggtgcgctagcattcactatcgaagctccatatgaagatgcattgtacccaatgaccgtttccttccaagagtccacgagggataaattagctaagagtttcaccggtatggccatacaatctgttgtcatggccaatgaccacgatcaagagctcccttacgacgtcatcacctctttgaaatcagatgaatatcttgtccaatagtacgttacattcacatataaaatacttaagttatatacacaaactaaataa

SEQ ID NO: 980 - DNA, 959 bp, Saccharomyces cerevisiae
ccttcatcttccgccgaaaacaacataaaaacccacacgaatgaatcacgatcctttcagttggggcaggcccgcagactctacttatggtgcttacaatacacaaattgcgaacgcaggcgcctctcccatggttaatacacagcaaccaatagtaacaggtacttccgtcatatcaatgaaatatgataatggggttatcattgcagcagataatttaggttcatatggctctcttctaagattcaatggcgtggagaggcttattcccgtgggtgataacaccgttgtgggcatttcaggtgatatttctgatatgcaacacattgagagattattgaaagatctagtcactgaaaatgcgtatgacaatcctctagcggatgctgaagaagcgctcgaacccagctatatttttgaatatctagctaccgtcatgtaccagcgaagatcaaagatgaatccactttggaatgccatcattgttgctggtgtacagtctaatggtgatcaattcctaagatacgtaaatcttctaggtgttacgtattcgtctcccaccttggccacaggttttggggcacacatggcaaacccactgttaaggaaagttgtagatcgagaatctgatattccaaagaccactgtacaggttgctgaagaggcgatcgtaaatgcaatgagagttctttattatagagatgcccgttcttctagaaacttctcactggccataattgataagaacacaggtttaactttcaagaaaaacttgcaagttgaaaacatgaaatgggacttcgccaaggatattaaaggctacggtactcaaaaaatttagaagagttttatcccaccttcattaaatactcattttatttttatttttcaattcataatatcatcactcttctctcttcctaagtaactacgtttttacatagatataatgatatgtg

SEQ ID NO: 981 - DNA, 971 bp, Saccharomyces cerevisiae
cagaaagaacacacaccaaaaaaaaaaaatgcctgtttatgaacacttattgcccgttaatggagcatggagacaagacgtcaccaattggctgagcgaggacgttccttcttttgattttggtggatatgttgttggttccgacctaaaggaggccaatttgtactgtaagcaggatggtatgctgtgtggtgtcccctttgcgcaagaagtctttaatcagtgcgaattgcaagttgagtggttgtttaaggaaggctccttcttggagccttcgaagaatgactctggtaagattgttgtagctaaaattactgggcccgctaaaaacattctattagctgaaagaaccgccttgaacatccttagtagaagtagtggaattgccaccgcctcacataagataatcagtttggcgcgttcgactggttacaaggggaccattgcggggacaagaaagactacaccaggtttacgtagattagaaaagtattccatgcttgtaggtggctgcgacacgcacagatacgacctttcctctatggtcatgctcaaagataatcatatttgggctactggttctataacaaacgcagttaagaacgccagggccgtgtgcgggtttgctgtgaagatcgaagtggagtgtttgagtgaagatgaagccacagaggccattgaagctggtgcagacgttatcatgttggataatttcaaaggtgacggtttgaaaatgtgcgcccaaagtcttaagaacaaatggaatggtaaaaagcatttcctcttggaatgtagtggaggcttgaatttggacaacctcgaggagtatttgtgcgatgacattgacatttacagcactagtagcattcatcaaggcacaccagtgattgatttctcattgaaactggctcattgaaaatgcttaggcttcgatttttacttttttttatttacatattctaaataagatt

SEQ ID NO: 982 - DNA, 1493 bp, Saccharomyces cerevisiae
cagagcatcgtacacaagcatgtctcactcacttacttccgttttccaaaagattgattctttaaagcctcagttcttcagcagactgactaaggctattcaaatccccgctgtttcttcggatgaatcactaaggtccaaagtcttcgataaggccaagtttatctccgagcaattatcacaatcggggttccatgacattaaaatggtggatctgggcattcaacctccaccaatttctacgccaaatctgtctctacctcctgtgattctgtctaggttcggcagcgacccttcaaaaaagactgtgttggtttacggtcactatgatgtgcaacctgctcaattggaagatggttgggatactgagccattcaagcttgtcattgatgaggctaaaggtatcatgaaaggaaggggtgtcaccgatgacactggtcccttattatcttggattaacgttgtggacgccttcaaagcctccggacaagaattccccgttaacttagttacttgtttcgaaggaatggaggaaagtggttctttgaaattggatgaattgattaaaaaggaagctaatggttactttaaaggtgtagatgccgtttgtatttccgataattactggctaggcactaagaagcctgttttgacttatggtctaagaggttgcaactactatcaaaccatcattgagggtccaagtgcagatttacactctggtatctttggtggtgttgttgctgaaccaatgatcgatttaatgcaagttctcggttcccttgtggattctaagggtaagatcctgattgacggtattgacgaaatggttgctcctctaaccgaaaaggagaaggctctatacaaggatatcgaatttagcgtcgaagaattgaacgctgcaactggctctaagacaagtttgtacgacaagaaggaagacatcttgatgcacagatggaggtatccttcgttgtccattcatggtgtggaaggcgccttttccgctcaaggtgcaaagactgtcattccagctaaggtcttcggtaagttttccattagaaccgtccccgacatggattctgagaaactgacctctttggtccagaagcattgtgatgccaaattcaagtccttgaactctccaaacaagtgcagaacagaattgatccatgatggtgcttattgggtttctgatccattcaacgcccaatttactgctgctaaaaaggccacaaaactggtctatggtgtcgatcctgattttaccagggaaggtggttccattcctatcactttgactttccaagatgccttgaacactagtgtcttattgctgccaatgggtagaggcgatgatggtgctcattcaatcaatgaaaagttagatatttcaaattttgttggtggtatgaagacgatggctgcttacttgcaatattactctgaatcgccagaaaactaagtcatcttatttatatatgtgtatatat

SEQ ID NO: 983 - DNA, 1692 bp, Saccharomyces cerevisiae
tcctttttgactattggaagatagcatttttttgggtgttgctactatcatatttctgttactgattgaccttttcttaactaagaaaaaggtggttagttctttactaaaaatcatgaaggccgttttcaaagtaacgactgctttgctggcttgcgtgtttattgcaaggtatctggtctgtcagcaaaatggtctgggaagctttgccacagatttacagcccatttgccggcatactgaattttcagttggctcactattcgattctaaattggttgaaggttcagcggtttctgactatttagttggaaagtactcacaatcgataaaaccactgattgaaagataccccaactcatccttgaagagaattatgggatatttttaccgcttttggtacaatattttctcttttctaaggctaaatgagctctgctgttcgctacattccaagttgggacctttattaaatcatctaaggattgcctggtactatttaaagccatatacagacaatgtgaagaatgtactagagaatccatttaactcctctacggattggatgaaatacggctcctttagcgctgatggcacgctcaccaaacccatttttgagacagactcggaaacagaggattatgaggatgatgagaatgaaaatgaggatgaggatgaagatgaggatgaggatgatgtcggaattgaggatgaaaataaagaatacgagttcgatggagtacaggatggccacgggaactcacaactcgtcactgctgctattttgcaggatttgtcaaagattatcattggttccaatagccatgcagaattggaaacttacgaggcagaatcattaaaaatggaatatgaagcatggattaaggctatagattcgaaaatacacagtgcgatggcacttttggattcagagatacagtctgtgttcgaggccgaggtgcaaaataaatctatagaaatcactaggaatcttgatgaccttaacactaccgttaatgagcaattagtgtttctagattcaaaaatcaaagatattaattgtacctctaaattcgatcctgtgcaaaataaaataaagtattttgatgaatcgggtcaagttgaactggaagcttacattaccaaatcatctatcacatcgatactgaagaattataaaatacatttgttagactttgaaaaatcactgtttcattcattagattcttttcttaccgaaatggctaaactggcagaatcgattcgtcttgaaaacgtcgaagtgtacgaagagtggggcgatgtaatgataagtcaatggtcgcaaagaatggcatatatggacgtcagaggtctccatttggaagatcaatacgatcctgcctatatagaagagaatcattccaactggctccgtttcatggaattgaaaaagaaagttatttctgagaggaaccgtctggtaaaacatgatctggatatgactttgatactggaatggattactaaactaaaagctgatttccagaacacaaaaaataatattcaagatacctttctgcaacgaatgaatactgcggatactttattcaaaaaccgtgaactaaaggaacaactagaggaagaatttgtacggcaagaacattgatcaatatataggtatgtatatgtacatatatacaaacatttaat

SEQ ID NO: 984 - DNA, 1792 bp, Saccharomyces cerevisiae
caaagagtagatagaaggccaggataatgagcgacactgaaaaggataaggatgtccctatggtagactcgcacgaagcgaccgaggagccacccaccacaagcaccaacacgccatctttccctcacttagcacaggaacaggcgaaggaggaatctgccacattgggagcagaagtagctcataagaaaatcaattacgagcaagaagcacagaaactggaggagaaggcccttaggttcctggcaaagcaaactcacccggtgattattccgtcgtttgcctcttggtttgatatttcgaagatccacgagatcgaaaaaagatccaatcccgactttttcaacgattcatcaaggttcaagacaccaaaggcatataaggacacaagaaattttatcatcaacacgtaccgtctttcgccgtacgaatatttgaccattaccgctgtgagaagaaatgttgccatggatgttgcctcgatagtgaagattcacgcgttcttggaaaaatggggcttaatcaattatcagattgaccccaggaccaagcccagtcttattgggccaagttttacgggccacttccaagtggttctggacactccgcaggggttaaagccatttttaccagagaatgtgatcaagcaagaagtggaaggaggagatggagcggaaccacaagtcaagaaggaatttcccgttaatctcacaatcaagaagaacgtttacgattctgcacaagacttcaatgcattacaagacgaaagtagaaactccaggcagattcacaaagtttacatttgccatacatgcggtaacgagtcaatcaatgtgcgctaccacaatttgcgtgcacgggacaccaacctgtgctcccgttgtttccaagagggtcatttcggtgccaactttcaatcttcagatttcatcagattagaaaacaacggaaactcggttaaaaaaaactggtcagaccaggagatgctactattgctggagggtattgaaatgtatgaagaccagtgggagaagattgctgaccacgtgggtgggcacaagcgtgtagaagactgcattgaaaaattcctaagcttaccgatcgaggacaactacatccgagaagttgttggttcaacgctgaatggtaagggtggcgacagccgcgatggtagtgtgtccggttcgaagttgatggaatgcgtgaatgatgctgtccagacgctactgcaaggcgacgacaaattgggtaaggtctctgataagtcgagagagatctccgaaaagtacattgaagaaagccaagcgataatccaagagttagtcaagctgaccatggagaaattagagagcaagtttacaaagctgtgcgatctagaaacgcaactggagatggaaaaactgaaatatgtgaaggaatctgaaaagatgctgaacgaccgattatcactgagtaaacagattcttgacctgaacaagtcgctggaggagttgaatgtgtcgaagaaactggtactgatctcggagcaagtagactcgggcatacaactagtggagaaggaccaggagggcgatgacgaagacggcaatacggccacaggacatggcgtgaaacgtgtaggcaaggaaggcgaggaagtaggcgaaggcgactccattgcaaaattgcagccccaggtgtacaaaccgtggtcattgtaaaaaaatatataagaaaaaaaaaaaaaaaaaaaaagagagcctacaaagtgtactattgtcatattttatatttctaatacaacgtatataaa

SEQ ID NO: 985 - DNA, 1317 bp, Saccharomyces cerevisiae
ggagacagaacaagagtagcagaaagtcatgggccgtacaacttctgagggaatacacggttttgtggacgatctagagcccaagagcagcattcttgataaagtcggagactttatcaccgtaaacacgaaacggcatgatgggcgcgaggacttcaacgagcaaaacgacgagctgaacagtcaagagaaccacaacagcagtgagaatgggaacgagaatgaaaatgaacaagacagtctcgcgttggacgacctagaccgcgcctttgagctggtggaaggtatggatatggactggatgatgccctcgcatgcgcaccactccccagctacaactgctacaatcaagccgcggctattatattcgccgctaatacacacgcaaagtgcggttcccgtaaccatttcgccgaacttggtcgctactgctacttccaccacatccgctaacaaagtcactaaaaacaagagtaatagtagtccgtatttgaacaagcgcagaggtaaacccgggccggattcggccacttcgctgttcgaattgcccgacagcgttatcccaactccgaaaccgaaaccgaaaccaaagcaatatccgaaagttattctgccgtcgaacagcacaagacgcgtatcaccggtcacggccaagaccagcagcagcgcagaaggcgtggtcgtagcaagtgagtctcctgtaatcgcgccgcacggatcgagccattcgcggtcgctgagtaagcgacggtcatcgggcgcgctcgtggacgatgacaagcgcgaatcacacaagcatgcagagcaagcacggcgtaatcgattagcggtcgcgctgcacgaactggcgtctttaatccccgcggagtggaaacagcaaaatgtgtcggccgcgccgtccaaagcgaccaccgtggaggcggcctgccggtacatccgtcacctacagcagaacgtgagcacgtgaccgtgcaccaatgggaagcacgttccgggcatatcggactggggcgcgcctcccctgcgcggtgcttgttataagaggcgctttgctggaaagtggcccacaccgggttttcgagattaggacctactcagtcttaagggcagtattggttggcgcttatttgcacatattgtatacacgcactcacattaacagaagcacacatatacacttacacctacacacacggataaagaaaaagaaatagaaaatgggcatgttggaactagttggtgagtactgggaacaactaaagataaccgttgtgcctgttgtggccgcggccgaagatgacgataacgagcagcatg

SEQ ID NO: 986 - DNA, 675 bp, Saccharomyces cerevisiae
agtattggttggcgcttatttgcacatattgtatacacgcactcacattaacagaagcacacatatacacttacacctacacacacggataaagaaaaagaaatagaaaatgggcatgttggaactagttggtgagtactgggaacaactaaagataaccgttgtgcctgttgtggccgcggccgaagatgacgataacgagcagcatgaagaaaaggcagcagaaggagaagaaaaagaagaagaaaatggggatgaagatgaggatgaagacgaagacgaagatgatgatgatgatgacgacgaagatgaggaagaagaggaagaagtcactgatcagttggaagatttgagagaacatttcaagaacacggaggagggtaaggcccttgtgcaccactacgaggagtgtgctgagagagtcaagatacagcaacaacaacccggctacgcggatcttgaacacaaggaggactgtgtggaggagtttttccatctacagcactatttggacactgccacggcacctagattatttgacaaattaaagtagtctgtttatccgtcatattccctatattcatatttattctgagtcttgttacaatttcttcaagaaaccgatccttatttaacctactgtatttagaaagtaaataaataaactaaaatcaa

SEQ ID NO: 987 - DNA, 924 bp, Saccharomyces cerevisiae
ctaagaaaccattagatcaataagcaatgggtagagttattcgtaaccaaagaaagggtgctggttctatctttacctcccacaccagattgagacaaggtgctgccaagttgagaactttggattatgctgaacgtcacggttacattcgtggtatcgttaagcaaattgtccacgactccggtagaggtgccccattggccaaggttgtcttccgtgacccatacaagtacagattgcgtgaagaaatctttattgctaacgaaggtgtccacactggtcaattcatttacgccggtaagaaggcttctttgaacgtcggtaacgtcttgccattgggttctgtcccagaaggtaccattgtctccaacgttgaagaaaagccaggtgacagaggtgccctagccagagcttccggtaactacgttattatcatcggtcacaacccagacgaaaacaagactagagtcagattaccatccggtgccaagaaggttatctcttctgatgccagaggtgtcatcggtgtcattgccggtggtggtagagttgacaaaccattgttgaaggctggtcgtgctttccacaagtacagattgaagagaaactcttggccaaagacccgtggtgttgccatgaatccagttgatcaccctcacggtggtggtaaccatcaacatattggtaaggcttctaccatctctagaggtgctgtttctggtcaaaaggccggtttgattgccgccagaagaactggtttgttacgtggttctcaaaagacccaagattagattatgtaaaatagtcattctttaagcaagatctaaaaaaaaaaagataactcaaaaaattcctcaaagcaaacaatacaatataacataacacttatttttaaagaaaaatttctaaattagattttgttct

SEQ ID NO: 988 - DNA, 1749 bp, Saccharomyces cerevisiae
actacaaagtacgcttataaaaaaaaaaaaaaaatgcgtaggagtgtatacctcgacaacacgatcgagttcctgcgaggcagagtatatctcggtgcatatgattacacgccggaagatactgatgagctggtgttttttaccgtggaggacgcaatcttttacaacagtttccatttggatttcggtcccatgaacattggacatctatatcgttttgccgttattttccatgaaatcttgaatgacccagaaaatgccaataaagccgttgttttctattcatctgcatcgaccagacaacgtgctaacgccgcatgtatgctttgctgttatatgatcctcgttcaggcatggactccgcatcaagtgcttcagccgttggcgcaagtagaccctcccttcatgccatttagagatgccggttattctaatgcggatttcgaaatcacaattcaagatgtggtttatggcgtttggagggctaaggaaaaaggccttattgatttgcattccttcaatttggagagttacgagaaatacgaacacgtggagtttggagacttcaatgtactcaccccagattttattgcatttgcgtcaccacaagaggaccatccaaagggctatctcgctaccaaatcttcacatttgaaccagccgtttaagtcagttctgaattttttcgccaacaataacgtccaattagtggtaaggttgaattctcatttatataataaaaagcattttgaagacattggcattcaacatttggatctaattttcgaagatggtacatgtcctgatctttccattgtaaaaaactttgttggtgctgctgaaacgataattaaaaggggaggtaaaattgctgtgcactgtaaggctgggctaggtagaactggttgtttaattggtgctcacttaatatacacgtatggatttaccgctaacgagtgtattggcttcttaaggtttataaggccgggaatggtcgttggccctcaacagcattggttatatttacaccagaatgattttagagaatggaagtacacaaccagaatttctttgaagcctagtgaggccattggcggcttatatcccttaataagtttagaagaataccgcttacaaaaaaagaaacttaaagacgacaagagggttgcgcaaaataacattgaaggtgaattaagagatttaaccatgacgccgccatccaacggtcatggggcgcttagtgccagaaattcgagccaaccttctacggcgaataatggaagtaattcattcaagagctcagccgtcccacagacttcgcctggtcagccgagaaagggccaaaacggttctaatactatagaagatatcaacaataatcgtaatccaacttcccatgcgaataggaaggtagtaatagaaagcaacaactcagatgacgaatccatgcaggataccaacggcacaagtaatcattatcccaaagtttcgcgcaagaaaaatgatatctcctctgcttcatcgtcccgaatggaagataacgaacccagcgcaacgaacatcaataatgccgcagatgataccatactaagacaactattgcccaagaataggagagtaacgtcagggagaaggactacaagcgccgccggtggtataagaaaaataagtggctccatcaagaaataatttatttcatttttatatatatatatatcatataataaaaaaacttactaataataacct

SEQ ID NO: 989 - DNA, 1124 bp, Saccharomyces cerevisiae
gtacaattcagtaaaaatcctcgaggtcatgcactcacaccattcacactccggtgactatagtgcccacggtacggaccctttggattccgtggtcgatcaagtggtcaacctcaactttcacacgtactgtttgacagagcacataccaagaattgaggccaagtttatataccccgaagagcagtcattgggcaagaatcctgaggaagtcataaccaagctagaaacatcgttcaagaatttcatgagtcatgcgcaagaaatcaagactcgttatgctgatagacccgatgtgcggactaaattcattataggaatggagatcgaaagttgtgacatggctcatatcgaatatgcaaagcgactcatgaaggagaataatgatattttgaagttttgtgtgggttcggtccatcacgtcaacgggatccctattgatttcgaccaacaacaatggtacaattcattgcattccttcaatgataatttgaaacattttctcctgtcttacttccaatcacagtacgaaatgctgatcaatattaaaccgttggtcgtgggtcacttcgacctttacaaattatttttgcccaatgacatgctagtaaaccagaaatcgggcaactgcaacgaagaaaccggagttcctgtagcttcactggacgtcatcagtgaatggccagaaatatacgatgcagttgtaagaaatttacaatttatagactcctatggcggcgcaattgaaatcaatacgtccgcattaagaaagcgcctcgaggagccgtaccccagcaaaaccttatgtaatctggtcaagaagcactgtggatccagatttgttctaagtgatgacgcacacggcgtggcgcaagtgggtgtgtgctatgacaaggtaaagaaatacatagtagacgtgctacaattagagtatatttgctaccttgaggaaagccaatcaccagagaatctgttaactgtaaagagattacccatttcgcaattcgttaatgatcccttttgggccaatatataatctgattatcttgaactggatgtacataaaaaaaaactgtcatataaactcatgtacagctgtgtagaagtgaatgatctttccaaga

SEQ ID NO: 990 - DNA, 1533 bp, Saccharomyces cerevisiae
aaaacaaaagctgtatcacacgcaatgggtattaacaatcctattccaaggagtttaaagagtgagacaaaaaaagcagcgaagattttggctagttttgtcaaaccaaaccaagtttttggtgcggaccaagtcattcctccagacgttttgaaaagagctaaagggttggctatcataacgatcttaaaagcaggttttctattttcaggtagagctggttctggtgtgattgtcgcaagattaaaggatggtacttggtcagctccatctgccattgccatggcaggtgctggtgccggtgggatggttggtatagaattgactgattttgttttcattttaaatactcaggatgctgttaagtcgttttctgaatttgggaccatcacgttgggtggtaacgtctccgtttctgctgggcctcttggtagaagtgcagaagcagctgcatcagcctccgccggtggtgtggctgcagtttttgcctattctaagagtaaaggtctatttgcaggggtttctgtggaaggttcggctattatagaaagaagagaggctaacagaaaattttatggtgacaattgtaccgcgaaaatgattttgtctggtaggataagaccgcctccagcagttgatccattgtttcgtgttttagagtccagggcgtttaattacagaccctccaacggtggtcgtggcagtttcgatgacgacgaagacgattactatgacgacgacgattactataatgacattcctagttcattcagttctacagatgcttcctccactagacctaacacaagatccacaaggagaagagcccaaagcggttctcgttatacgttcgacgatgatgatgacgatgatgattatggtactggctattcaaggaattcaagactggctcctaccaacagtggcggtagtggtggtaaattggatgacccatctggagcttcaagttattatgccagccacagaagatcaggaactgctcagtcaagggctcgttcttcaagaaatcgttgggctgatgatgaatacgatgattatgatgatgattatgaatccgggtatagacgcgggaatggaagagataggacaaaagaccgtgaagtcgatgacttgtcgaacagattttctaaatctagaatctcgtccgcttcaacaccgcaaactagtcagggcagattcactgctccaacatccccatccacgtcttctccaaaggccgtggcattatatagctttgcaggagaagagtccggagatttaccattcagaaagggtgacgtgatcacaattttgaaaaaatcagattctcaaaatgactggtggaccggaagagtcaacggtagagaaggtatattcccagcaaattacgttgaactagtttaaaaaatttgaaggagagtaaagaatacgagaaacgttattgatttacacttataccttttgccttacagtttatcagcactcggacctaaatacatatcatatagcagacggcgtccctctgtctatcct

SEQ ID NO: 991 - DNA, 1293 bp, Saccharomyces cerevisiae
gggagagggagagttagagagagtcaacagaaaagaaataaaaagactgaaaaggtcgtaagcatgggaatgaagtacgtattgcctttgcgactaattggtctagcgtacctgttggtgctatttcaggtgcatagggtaactgggtgggagttgtcatatgagcagtaccatgcagcgcatctgaacgaagctatcaacccagacagcggttggaacaaaagtaccaagaacctgctgttgccttttaacagaacgcgcgtacccggatcggaaggctcgcgcgagatccagcgcttcatcatcgagcacttcaacaatacgctggcgggagaatgggccgttgagacgcaagcctttgaggagaacggttaccgcttcaataaccttgttatgacattacaaaacaatgcgagcgagtacttagtgctcgctgctcattatgataccaagatagcgcccacggggatggtgggcgctatcgacagtgccgcctcgtgtgccgcgctgctatatacggcccagttcctaacgcacatcgcgtgccacgagcgcacgaaagagtacaatgacttagagtcgaacactgtagtatcgaattctaccttgggtgtaaagatcgtattctttgatggagaggaggccattgaagagtggggccccgaggactcgatttatggagcacgccgattagccgcccaatggcttgctgacggcacgatgacaagaattcgcctattatttcttctggatcttttaggaagtggcgaagaggagccgctagtgcccagctactatgcagagacacatcaagaatatcagctgctcaatcgaatagaggatgacttgttatttcgacgtggagatgaaatcaacggcgaatcggcattagccgccgaagtcgcgcgtcaacgcaaacatctggaccccacggactatcgatttttagggctcgggcattcggtcatcggagacgaccacacgccattcctggccgccggagtacccgtattacatgcaatcccgctaccattcccaagtacatggcacaccgtggatgatgacttccggcacttagacgccgcggagactcgtcactgggcgctgcttgtgtgcgaatttgtagtacagtcactacgctcccgtaaccagtgataaatcccctgtttcctttcgttaacatctccccctgatctgggggatgtggggtggaatgagtggcccggtcaatgtcagtgcaccactctgaaaagcttgcacacatacatatacatatatatatatatatatgta

SEQ ID NO: 992 - DNA, 1737 bp, Saccharomyces cerevisiae
gaagaaaaggctgaaaaaaaaaaaaaaagaaactccccccgcgtttagaatggtgcagccgagctacctacgcaggggataaaaagaacgaaagccacatcgactacaagccagagtataaatggtttcaattctcgtagagaactcacaattatataatattggaagacaccagaaaaaataacgagtcaattactatggacgacaaagtttcagaaaaggagagctccccaaaacaaacagaggaggattctgaaggtaaaatggcacatgtgcagcctgcttcgtacgtgaataaaaaaaaatatgtttttgggaagacattaggtgctggtacatttggtgtggtgagacaagccaaaaacactgaaacaggggaggacgtggccgttaaaatcctgatcaagaaagcactaaagggaaacaaggttcagctagaggctttatacgacgagttagacattttacaaagactgcatcatccaaatatagtggcatttaaggattggtttgaatcaaaagacaagttctacattatcacgcaattagccaaagggggtgaattgttcgataggattttgaagaagggtaagttcactgaggaagatgcagtgagaattttggttgaaatattgagcgcagtcaaatatatgcattctcagaatattgttcatagggacttgaaaccggaaaatttactgtatatagataaaagtgacgaatctccactggtagttgctgattttggtatcgcaaagagattgaaaagtgatgaggaactcctctataagccggcaggctcactgggttacgtggctccagaggtacttactcaggacggtcatggtaaaccttgcgacatttggtcgataggtgtcattacgtatactttgctttgcggttattcggcgtttagagccgaaagggttcaagatttccttgacgaatgcacaactggtgagtatccagtgaagtttcataggccttattgggattccgtttccaataaggcaaaacaattcatcttgaaggctcttaatttggatccttcaaagagaccgaccgccgcagaactcttggaagatccatggattatttgtaccgaattgaagacgcacaatttattgcctgggttaaaggaaggattggatgctcgtcaaaagttccgtaattctgttgagagagtcagattaaacatgaagatccagaaattaagagatctgtatcttgaacagacagagagtgattcagattttgacgaaggaagtcaagcaaacggttcagttcctccattgaaagcaacggataccagtcaactatccaagaagctatcagaagaagaacagtctaagttgaagtccgagttaaccagcaaagcttttgcacaattagttaacacagtgcttgccgaaaaggaaaaatttttaaatattaacagagtctgtagttctgatagcgatcttcctgggagtgatataaagtctttggatgaggcgaaggagaaaccagaggggaaggataccaaaacagaagaatgataacagtatgccgttttaccacactggcgaataaatcttcaatgactttgtaagctcgaatatgcgcaagatttgactttgatattttgcactttttcgtcctcactttctaccttttttttttatgccttagttgaaaagatacgcgtatctaattatgtactaatagtcttaattttacattacttaattaatcgaa

SEQ ID NO: 993 - DNA, 513 bp, Saccharomyces cerevisiae
atgggttcaaacacttccaaagtgggtgctggtgcagaaaaacaacaagtctatactccgctaacacagatcgatttttcacagtctttggtttctcaattggattcatcgaaggaatcagactatgtcaccaagcaaaatgcagaaaagttcattgagaagaaggtttcacaaaggctatctaacctagaagttgaaacgttaaagaagtttgaagatactttgaacaattcactattatcagacgacgacaaggatgccgttgatggaatatcatcaagttcattgaataatcaaatcgagtcgttgaacaagaaactaacattatttgatcaattagagttacaaaagttggagaaatatgggggtgccaaaggtaaatctgataaaaaaaccgacaacggcagcatttctataaaggcaaaattgactgagtgtcttttggccaataagggcaagccattgaattgttacgaagagatggaagaattcaagaagctcgttatgggttga

SEQ ID NO: 994 - DNA, 1573 bp, Saccharomyces cerevisiae
ttcatggttcatcatttagtgggcgttaacctaaagcgctgtttataatggaggttgataacaaaaggagacattcagaagatgagttaaaacaggaggcagtaaaaaagataaagtctcaggaaccaaactatgcctatcttgagactgtagtaagagaaaaactagatttcgattctgagaaaatttgctgcattactctgtcccctttgaatgtatattgttgcctcgtgtgtggacattattatcaggggagacatgaaaagagtcctgctttcatacattcaattgatgaaaaccatcacgtcttcttgaatttgacaagtttgaagttttacatgttgccgcaaaatgtccaaattttacatgacggtgaggttcaattgttgaacagcataaaatttgcagcttatccgacttattgtccaaaagatctagaagattttccgagacagtgttttgatttgagcaatcgcacatatctgaatggatttatagggttcaccaatgcggcaacttatgactatgcgcatagtgtattgcttttgatatcgcacatggttccagtgcgggaccacttcctactgaatcattttgataatcaaggggaatttatcaaaaggttatccatatgtgtaaagaaaatttggtcccctaaactattcaaacatcatctttcagttgacgattttgtatcctatttgaaagttagagaaggtttaaatttaaatcctatagacccgcgtctcttccttttgtggctattcaataaaatttgctcgtcctcgaacgacttaaagtcaattttaaaccattcttgtaaaggcaaagtaaagatagcaaaagttgaaaataagcctgaggccagtgagtctgttacaggaaaagtcattgtcaaaccattttgggttctgactctcgatttgccggagttttcaccctttgaagatggcaacagcgttgatgatctcccacaaataaatatcactaaattattgactaaatttactaagtcaagaagctcctctactagcaccgtttttgaactaacgcgattaccgcagtttttaatatttcatttcaataggtttgaccgtaacagtgatcatcctgtcaaaaatagaaaccaaacgttggtggaattttccagtgaacttgaaattttgcacgtcaagtatcgcttaaaagcaaatgtggtccatgtggtcattaaacaaccatccacagatggaaacgcatttaatggtgatgaaaaaagccattggattactcagctgtatgataacaaaagtgaaaaatggatagaaatagatggcataaatacgacagagagagaagccgagcttttatttttgaaggaaacgtttatacaagtatgggaaaagcaagagtgaaagaaaagaaagtaaaaaaaaaaattggcactgggactaccagtagccatttcatttttactgttatttaaggagccttttccctcctaacgcgttttctctttcccattcattccattaactacttcattagaatttttagaaaaatacaatataatatatatgtagtgggctttcta

SEQ ID NO: 995 - DNA, 623 bp, Saccharomyces cerevisiae
tgccaggagttgcgagctaagtcttcaattaagtctataaggatgagtggaaatcaaatggctatgggatcagaacaacaacagaccgtagggtcccgaacggtgagtgtggaagaggttcccgcagttttgcagcttcgagcaactcaagatcctccaagaagccaggaggcaatgcctacaaggcacaatgtaagatgggaagaaaatgtgattgacaatgaaaacatgaataaaaaaaagaccaagatatgctgcatttttcatccacaaaatgaggatgaagaagagtgcaaccatcattcagatgatgatggatcctcttcttccggatcctcttcttcagaatctgagaatgagaaggatcttgactttaacgaacgtagacaaagaagattggaaaggcgccatcgtaaacttgagaaaaaaaggtcatatagccccaatgcttatgaaatccaaccagattattctgaatacaggcgaaaacagcaggaaaagaaggactgaggctttgtacaacgaaagccaaaatattcgatgaagcagcaaatggctttttatacttttactaagtatgcgcgcatactgatatatagatataaacaaaaatatacaatatt

SEQ ID NO: 996 - DNA, 1448 bp, Saccharomyces cerevisiae
cagggaatttgtattttatgatgatgttaattactatgaaaagtacagtactgttgagtgtttttaccgtcttagcgacatgggctggattgctagaagctcatccattgggtgacacttcagatgcatccaaattaagctcagactactcgctccctgatctcattaatgcacgtaaagtgcccaataactggcaaactggagaacaagctagtctagaggaagggagaattgtattgacttctaagcaaaattccaagggttcactttggttgaagcaaggattcgatttgaaggattcttttactatggagtggacatttaggagtgttggttattctggccaaaccgacggtggcatatcattttggtttgttcaagattctaacgtaccacgcgataagcagttatacaatgggccagtgaactatgatggtttacaattattagtggataacaatggtccattgggcccaacacttcgtggtcaactaaatgatggtcaaaagcctgtagataagacgaaaatctatgatcagagttttgcatcttgtttgatgggttatcaggattcctccgttccttccacgatcagagtaacttatgatttggaagacgacaacttattaaaagttcaggtggacaataaagtctgtttccaaactaggaaggttcgctttccctctgggtcttaccgtattggtgtcaccgctcaaaatggagcagtgaataataatgcagagtcttttgaaatattcaaaatgcaattttttaatggcgtgattgaagattctttgatccctaatgtgaatgcaatgggtcagccaaaactgatcaccaaatacattgaccaacaaaccggcaaagaaaaattgattgaaaaaacagcatttgacgctgacaaagacaaaattacaaactatgaattgtataagaaactggatagagttgaaggtaaaattcttgcgaacgatatcaatgctttagaaacaaagctaaatgatgtcattaaggtccaacaagagctattatcattcatgactacgataactaaacagctctcttctaagccaccagctaataatgaaaagggaacgtccaccgatgatgcaatcgctgaggataaagaaaatttcaaagacttcttatcaatcaatcagaaattggagaaagtcctggttgaacaagaaaagtatagggaagctaccaaacgtcatggacaagatggtcctcaggtcgacgaaattgccagaaaactaatgatttggttacttccattaattttcattatgttggttatggcatattacacattcagaatcagacaagagatcataaagaccaaactgctatgattttggattattccttccactcaaaccaattgtgcacatgcattccctatatatgtatatatatgtaacaatacatattttataaaataacga

SEQ ID NO: 997 - DNA, 985 bp, Saccharomyces cerevisiae
tataagatctttgacgaaaactaaatcgacaatttccttagtacttctttctccttttttacctatctgctaatataaccaccaataatgagtatcgctgaattcgcttacaaggaaaaaccagaaactttggttttattcgatgttgatggtaccttgacaccagccagattaactgtttctgaagaagttagaaaaactttggccaagttgagaaacaagtgctgcattggttttgtcggtggttctgacttaagcaagcaattagaacagttaggcccaaacgttttagatgaatttgactattctttctctgaaaatggtttgaccgcctacagattaggtaaggaattagcttctcaatccttcatcaactggctcggtgaggaaaaatacaataaattggccgtcttcattttgagatatctatctgaaattgacttgccaaagagaagaggtactttcttggaatttagaaatggtatgatcaacgtttccccaattggtagaaatgcttctactgaggaaagaaacgaattcgaaagatacgataaggaacaccaaatcagagccaagttcgttgaagctttgaaaaaggaattcccagactacggtttgactttctccattggtggccaaatctctttcgacgttttccccgctggttgggataagacctactgtttgcaacacgttgaaaaagatggtttcaaggaaattcatttctttggtgacaagactatggtcggtggtaacgattacgaaatttttgtcgatgaaagaaccatcggacattcagtacaatcccctgatgacaccgtcaaaattttgactgaactattcaacttatagctttatttccaggttgctacgtgattatgccatttgtgatccgtttggtgattcttttttatccttcttatataaataaatatactcttactacgttattgaatgtgtactcttactgaactgtgttatacaa

SEQ ID NO: 998 - DNA, 1118 bp, Saccharomyces cerevisiae
ccaagagaagaaactttcaagatgaaactgaaagttactggagcaggaatcaaccaagtcgttactttgaagcaagatgcaacactaaatgatcttattgagcatatcaatgtagatgttaagacgatgaggtttggatatccgcctcaaaggatcaatttgcaaggggaagacgcttctttgggacaaacccagctggacgagctgggtattaactctggtgaaaagattacaatagagtcctctgatagtaacgaaagcttcagtttgccaccaccacaacccaaaccaaagagggtgctgaagagcactgagatgtcaattggtggcagtggagaaaacgtcctatcagtacatcctgttctcgacgacaactcgtgtctgttccatgctattgcctatggcatcttcaaacaagatagcgttcgtgacctcagggagatggtctctaaggaggtcctcaacaaccccgtcaagttcaatgacgccatattggacaaacctaacaaagattacgcgcaatggattttgaaaatggaatcttggggtggagccatcgagattggtatcatatccgatgcactcgcagtagctatttatgtagtcgacattgacgctgttaaaatcgaaaagttcaacgaggacaagttcgacaactacattttgatactgttcaacggaatccactatgattccttgaccatgaacgagtttaaaactgttttcaacaagaaccagccggaatcagatgatgttctaacagcagctttgcaactggcctcaaatttgaagcaaactggctattccttcaacactcataaggcccagatcaaatgcaacacttgccaaatgacctttgtgggtgaaagagaagttgctaggcacgctgaatccacgggacacgttgattttggccaaaatagataataaaatacgcatttggcgtttatcggtatactcgtcatgagacacgaaaagtggataaaatgcattccttttgtcgttgatgaaaaaaaaatttgaaatatattaaaatgtgccgttttttacgtgttcttttcacttatttttctgtttatatcgtctattcttcttggcaaagtataagatctttgacg

SEQ ID NO: 999 - DNA, 1338 bp, Saccharomyces cerevisiae
ctcaaaccaagaagaaaaagaaaaggtcaatctttgttaaagaataggatcttctactacatcagcttttagatttttcacgcttactgcttttttcttcccaagatcgaaaatttactgaattaacaatggattctgaggttgctgctttggttattgataacggttctggtatgtgtaaagccggttttgccggtgacgacgctcctcgtgctgtcttcccatctatcgtcggtagaccaagacaccaaggtatcatggtcggtatgggtcaaaaagactcctacgttggtgatgaagctcaatccaagagaggtatcttgactttacgttacccaattgaacacggtattgtcaccaactgggacgatatggaaaagatctggcatcataccttctacaacgaattgagagttgccccagaagaacaccctgttcttttgactgaagctccaatgaaccctaaatcaaacagagaaaagatgactcaaattatgtttgaaactttcaacgttccagccttctacgtttccatccaagccgttttgtccttgtactcttccggtagaactactggtattgttttggattccggtgatggtgttactcacgtcgttccaatttacgctggtttctctctacctcacgccattttgagaatcgatttggccggtagagatttgactgactacttgatgaagatcttgagtgaacgtggttactctttctccaccactgctgaaagagaaattgtccgtgacatcaaggaaaaactatgttacgtcgccttggacttcgaacaagaaatgcaaaccgctgctcaatcttcttcaattgaaaaatcctacgaacttccagatggtcaagtcatcactattggtaacgaaagattcagagccccagaagctttgttccatccttctgttttgggtttggaatctgccggtattgaccaaactacttacaactccatcatgaagtgtgatgtcgatgtccgtaaggaattatacggtaacatcgttatgtccggtggtaccaccatgttcccaggtattgccgaaagaatgcaaaaggaaatcaccgctttggctccatcttccatgaaggtcaagatcattgctcctccagaaagaaagtactccgtctggattggtggttctatcttggcttctttgactaccttccaacaaatgtggatctcaaaacaagaatacgacgaaagtggtccatctatcgttcaccacaagtgtttctaatctctgcttttgtgcgcgtatgtttatgtatgtacctctctctctatttctatttttaaaccaccctctcaataaaataaaa

SEQ ID NO: 1000 - DNA, 768 bp, Saccharomyces cerevisiae
atctttactgttaggcccaggttgaaataaataaaacaagaaaagcactaatatgaatagcgagtacgattacctgttcaaactgctgttgatcgggaattccggtgtcgggaagtcctgtttacttttgaggttttcggacgacacatataccaacgactacatctccacaattggagtggacttcaagattaagactgtagaactggacggcaagactgtaaagctacagatttgggacactgcaggtcaagaacgtttccgtactatcacttcatcttactaccgtggttcgcatgggatcattatcgtgtatgatgtcactgaccaagaatccttcaacggcgtgaagatgtggctgcaagagattgatcggtatgcaacctcaacagtgttgaagctattggtaggtaacaagtgtgatttaaaggacaagcgtgtcgtggaatatgacgtggcaaaggaatttgcggacgcgaataagatgccgttcttagagactagtgctttggactccaccaacgtcgaggatgcgtttttaaccatggctagacaaatcaaggaaagtatgtcccaacaaaacctgaacgaaaccactcagaagaaggaagacaaagggaacgtcaacctgaagggacagagtttaaccaacaccggtgggggctgctgttgaacaagcgcgcctctaccttgcagacccatataatataataactaaataagtaaataagacacacgcgagaacatatatacacaattacagtaaca

SEQ ID NO: 1001 - DNA, 460 bp, Saccharomyces cerevisiae
aacctatatcgtttcacaaatatcaaccacaatggctccaaacacttccagaaagcaaaaagttatcaaaaccttaaccgttgacgtttcctctccaactgaaaacggagtcttcgatccggcttcatattccaagtacttaatcgatcatattaaagtagatggtgccgtaggaaacttagggaacgccattgaggttactgaagatggttctatagtcactgtagtatccagtgccaaattttctggtaaatacttgaaatatctaacaaagaagtatttgaagaagaatcagctaagagactggatcagattcgtctctataaggcaaaaccaatacaaattggttttctatcaagtcacccctgaagatgctgacgaagaagaggatgacgaataaatagacactcacatgtatattaatttataaaatgctattcatatcataattcaccaccct

SEQ ID NO: 1002 - DNA, 953 bp, Saccharomyces cerevisiae
atatcaagatattagataactctcaagatggtttcccaatttgctattgaggtgcgtaacctaacgtacaaattcaaagaaagctccgatccgtcagttgttgatatcaatcttcaaatcccatggaatacaagatctttagttgtgggtgccaatggtgctggtaaatccacccttttgaaattactaagcggtaagcatctttgccttgatggaaaaatcctggtcaatggtcttgatccattcagtccattatctatgaatcaagtggacgatgatgaaagtgttgaagattcgacgaactaccaaacgaccacttatctaggtacggaatggtgccatatgagtatcattaatagggatatcggcgtcttggaactattaaaaagtattggattcgatcattttagggaaagaggtgaaagattggttagaatcctggacatcgatgtacgttggagaatgcacaggttaagtgatggacaaaagagaagagttcagttagccatggggctcttgaaaccttggagagttttactacttgatgaggtcactgtggatctcgatgttattgccagagcaagacttctggagtttttaaagtgggagaccgaaaccagaagatgctcagtggtctacgctacacatatttttgacggcttggccaaatggcctaaccaagtataccatatgaaatcaggtaagattgtggataatttagattatcagaaagacgtagagttctctgaagtggtcaatgctaaagttaatggacaagtggcctttgaaaatgacaacaataaggttgttattagtaaagtgaatagtttgcatccattagcactagaatggttgaaacgtgataatcaaattcctgacaaagagattggtatataactgagtatatataactgcaaagaccccctgtatagaaaatatgtatcttagtggaa

SEQ ID NO: 1003 - DNA, 1666 bp, Saccharomyces cerevisiae
tatacatatatatatatatcttacgtatatatacattaaaggcacccccctccctctctcaccccctaacgtaaagatgtctgatttccaattagaaattctaaaaaaactagatgaattggatgagatcaagtccacactggcaactttccctcagcacggctctcaagatgttctttccgctttgaactctttgaaagcccacaacaagttagagttttccaaggtcgacacggttacgtatgacttgaccaaagaaggtgctcaaattttgaatgaaggttcgtacgaaattaaactagtcaagctcatccaagagttgggtcaacttcaaatcaaagatgtgatgtccaaactgggtcctcaagttggtaaggtcggtcaggctagagctttcaagaacggctggatcgccaaaaacgcctcaaacgagcttgaactctccgcaaaattgcaaaataccgatttaaatgagcttactgatgaaacgcaatctattctagcgcaaatcaagaacaactcgcatctggatagcattgacgccaagattttgaacgacttgaagaaaagaaagttaattgctcaaggtaaaatcacagatttcaacgttaccaaagggccagagttctcgaccgacctcaccaaattggaaaccgatcttacctccgacatggtctccaccaatgcatacaaggacttgaagttcaagccttacaatttcaattctcaaggtgtgcaaatatcttcaggtgctcttcaccccttaaacaaagtcagagaggaatttagacaaattttcttttccatgggattcacagagatgccctcgaaccaatacgtcgagacaggtttctggaacttcgatgccctttacgtcccacaacagcatcctgctcgtgacctgcaagacactttctacatcaaggacccactaaccgctgacttgcccgatgacaagacatacatggacaatatcaaagccgttcacgaacaggggagattcgggtccatcggttatcgttacaactggaagccagaagaatgtcaaaaattggtcttgagaactcactccacagccatctctgccagaatgctgcacgatttggccaaagatccaaagcccaccagattgttttctatcgaccgtgttttccgtaacgaagcagttgacgccacccatttggccgaattccaccaggtggaaggtgttcttgccgactacaacattactctgggtgacctgatcaagttcatggaagagtttttcgaaagaatgggtgtcaccggtttgagattcaagcctacctacaatccttacaccgagccatcaatggaaatcttttcttggcacgaaggtttgcaaaaatgggtcgaaatcggtaactctggtatgttcagaccagaaatgctcgagtccatgggtctaccaaaggatctaagagtccttggttgggggttatccttggaaagacctaccatgatcaaatataaggttcaaaacatcagagaactgttaggtcataaagtctctttggactttatcgaaaccaatcctgctgctagattggacgaagacttgtacgaataagctcagcagttcctctagttttatatcgtctgtccccaattttgtagtagttattgtacacaaaacaaatatatacgt

SEQ ID NO: 1004 - DNA, 1652 bp, Saccharomyces cerevisiae
agatatatatatacatataacgtatatttatatatatacggttttgttcgattgtctctgtcgtaccatcaaagaacatactaacagttcacaatgttaagaatcagatcactcctaaataataagcgtgccttttcgtccacagtcaggacattgaccattaacaagtcacatgatgtagtcatcatcggtggtggccctgctggttacgtggctgctatcaaagctgctcaattgggatttaacactgcatgtgtagaaaaaagaggcaaattaggcggtacctgtcttaacgttggatgtatcccctccaaagcacttctaaataattctcatttattccaccaaatgcatacggaagcgcaaaagagaggtattgacgtcaacggtgatatcaaaattaacgtagcaaacttccaaaaggctaaggatgacgctgttaagcaattaactggaggtattgagcttctgttcaagaaaaataaggtcacctattataaaggtaatggttcattcgaagacgaaacgaagatcagagtaactcccgttgatgggttggaaggcactgtcaaggaagaccacatactagatgttaagaacatcatagtcgccacgggctctgaagttacacccttccccggtattgaaatagatgaggaaaaaattgtctcttcaacaggtgctctttcgttaaaggaaattcccaaaagattaaccatcattggtggaggaatcatcggattggaaatgggttcagtttactctagattaggctccaaggttactgtagtagaatttcaacctcaaattggtgcatctatggacggcgaggttgccaaagccacccaaaagttcttgaaaaagcaaggtttggacttcaaattaagcaccaaagttatttctgcaaagagaaacgacgacaagaacgtcgtcgaaattgttgtagaagatactaaaacgaataagcaagaaaatttggaagctgaagttttgctggttgctgttggtagaagaccttacattgctggcttaggggctgaaaagattggattagaagtagacaaaaggggacgcctagtcattgatgaccaatttaattccaagttcccacacattaaagtggtaggagatgttacatttggtccaatgctggctcacaaagccgaagaggaaggtattgcagctgtcgaaatgttgaaaactggtcacggtcatgtcaactataacaacattccttcggtcatgtattctcacccagaagtagcatgggttggtaaaaccgaagagcaattgaaagaagccggcattgactataaaattggtaagttcccctttgcggccaattcaagagccaagaccaaccaagacactgaaggtttcgtgaagattttgatcgattccaagaccgagcgtattttgggggctcacattatcggtccaaatgccggtgaaatgattgctgaagctggcttagccttagaatatggcgcttccgcagaagatgttgctagggtctgccatgctcatcctactttgtccgaagcatttaaggaagctaacatggctgcctatgataaagctattcattgttgaaaacaggaaataataaacagtatagtatatatatttatgaagaaccgcttagtattgag

SEQ ID NO: 1005 - DNA, 681 bp, Saccharomyces cerevisiae
agctggatatcaacataaaataatgagcttacccgatggattttatataaggcgaatggaagagggggatttggaacaggtcactgagacgctaaaggttttgaccaccgtgggcactattacccccgaatccttcagcaaactcataaaatactggaatgaagccacagtatggaatgataacgaagataaaaaaataatgcaatataaccccatggtgattgtggacaagcgcaccgagacggttgccgctacggggaatatcatcatcgaaagaaagatcattcatgaactggggctatgtggccacatcgaggacattgcagtaaactccaagtatcagggccaaggtttgggcaagctcttgattgatcaattggtaactatcggctttgactacggttgttataagattattttagattgcgatgagaaaaatgtcaaattctatgaaaaatgtgggtttagcaacgcaggcgtggaaatgcaaattagaaaatagtattgctgtatagtacatagaggtcgacatatatatatatatatataattttatatggcatctagagcctctagggatattatggagttgcccctaatgacggtctgcaagcctagctggtggttattggcagggtcttcaccatttatctccattgcatcatcaagaacgacgtttaa

SEQ ID NO: 1006 - DNA, 1631 bp, Saccharomyces cerevisiae
ctaaacataacataacaatggctttccaacaaggtgtattgtcaaggtgttccggtgtctttagacaccatgtgggacattctcgccatatcaataatattctttatagacatgccatcgcgtttgcatccatcgctccacgaataccaaaatctagcttccatacttctgcaatcagaaacaacgaagcattcaaggacccgtacgatactttaggcttgaagaaatctgctacaggtgcggaaatcaaaaaagcatactacaaactggcaaagaagtaccacccggatatcaacaaggaaccggatgctgagaagaaattccacgatttacagaacgcttatgaaattctgtcagacgaaacgaagaggcagcagtacgatcaatttgggcccgctgccttcggcggcggcggtgccgctggaggtgccggtggtggtagtggctctccctttggttcccaatttcatgatttctcaggattcaccagtgcaggcggctcgccatttggcggtatcaattttgaagacctgtttggtgctgcatttggtggtggtggccgcggtagcggtggcgcaagcaggtcgtcatctatgttcagacaatataggggcgacccaatcgagattgtccataaagtgtctttcaaggacgcagtgtttgggtccaagaacgttcagttaagattctctgcgctggacccttgtagtacctgttcagggacgggaatgaaaccaaacacgcataaggtcagttgtagcacttgtcacggaacaggaaccactgttcacattaggggcggatttcagatgatgtcgacttgtcctacttgcaacggtgaaggtaccatgaaacggcctcaggacaattgtaccaagtgccatggtgagggtgttcaggtcaacagggcaaagacaattacggtggacttgccacatggattacaggacggcgacgtggtcaggatccctggccaaggctcataccctgacatcgctgtagaggcggacttgaaagattcagtcaagttatcaagaggtgatattttggtgagaattcgtgtcgacaaggatcccaacttttcgataaagaacaagtacgatatttggtacgacaaggagattcctataaccacagctgcacttggtggtactgtcactatccccactgtggagggacaaaagatcaggataaaggtcgctccagggactcaatacaatcaagtgatatccattcctaacatgggtgttcctaaaacatcaaccattcgcggtgatatgaaagtccagtacaagatcgttgttaagaaaccgcaatcgctggcagaaaaatgcttgtgggaggcactggcagatgtcaccaacgatgacatggccaagaaaaccatgcaaccgggcacagccgcgggtacagccattaatgaagagatactgaagaaacaaaaacaagaagaggaaaaacacgcaaaaaaggatgacgacaacactttgaagagactagaaaatttcattaccaacacattcaggaagatcaaaggtgacaaaaaaaattaaacttcatgcaatttcttgtagataaggaaaaatagaagcctttacgtaaatagataactatagttaaataattgtgca

SEQ ID NO: 1007 - DNA, 790 bp, Saccharomyces cerevisiae
aaacattttaaagtaatggctcaaagtaaaagtaatcctcctcaagtgccttctggctggaaggctgtttttgatgatgaataccagacttggtattatgtagatttatctacgaacagctctcagtgggaaccaccaaggggaacaacatggccaagacccaaaggtcctccaccaggtgttaacaatgagaagagttctcgtcaacaggcagaccaggctcctccaccttattcttctcaatcaacaccgcaagtgcaagcaggggcccaagcacagcaacctcgttactatcagcctcaacagcctcagtaccctcaataccctcaacagcagcgttactatcctcaacaagcccctatgccagcagcagcaccacagcaagcatactatggaactgcgccaagcaccagtaaaggtagtggacacggcggtgccatgatgggtggtttacttggtgttggtgcgggtttgttaggtggagctatgctagaacacgcatttgacgaccacaactatgacggaccagacactgtcgttgtcgagaacaattactacggtgatgatgctggtgggtccgacggcggatttgatgatgctggtgggttcgacggcggatttgatgatggatttgacggtagtgacttttaatgttatcaagactttttggacaaggacgataaaatgatataagctcatcaaatctatattgcttgctgccatctaaatatggatacatacagatatatacttgcaaagatcggtccattatactacatagaaagcaatt

SEQ ID NO: 1008 - DNA, 82 bp, Saccharomyces cerevisiae
gtcccagtggccgagtggttaaggcgatgccctgctaaggcattgggttttacctgcgcaggttcgaatcctgtctgtgacg

SEQ ID NO: 1009 - DNA, 74 bp, Saccharomyces cerevisiae; identical to SEQ ID NO: 401

SEQ ID NO: 1010 - DNA, 73 bp, Saccharomyces cerevisiae; identical to SEQ ID NO: 231

SEQ ID NO: 1011 - DNA, 1370 bp, Saccharomyces cerevisiae
ctataacctcccttgaatgagtaatttcattagaaggctagttgggaaaatgaaagcgatttcaacaggtaccaatgctattgttagtaagaaggactccatttacgcaaactggtccaaagagcagctaatacgaaggatcactgaactagaaaacgcaaataagccacattctgaaaaattccagcacatcgaggataacaaaaagcgcaaaatttcgcaagaagaggttacgagaagcaaggcgaaaaaggctccgaagaagtttgacttttctaaacataataccaggttcatcgccttgagatttgcctatttgggatggaattacaatggcttagctgttcagaaggaatacacaccgttgcctacagtagagggtaccattttggaggccatgaataagtgtaaacttgttccctcgatggttttacaagactataaatttagcagatgtggcagaacagacaagggagttagcgccatgaaccaagttatatcgttagaagtccgttccaatttaacagatgaggaacagcgggatccgaccaacgacagcagggaaataccctatgttcacgttttaaatcaattactacccgacgatattcgtatatcagctgtctgcctcagaccgccacctaactttgacgcaagattcagctgtgttcaccggcactataagtacatctttaatggaaaaaaccttaatattgaaaaaatgtctaaagccgcatcatattttgttggagagagagacttcaggaatttttgtaagcttgatggctcaaaacaaattaccaattttaaacgaacaataataagctcaaaaattcttcccctttctgaaactttctattgttttgatctcgttggttcagcattcctatggcaccaagttcgttgcatgatggccattcttttcttagttggtcaatcacttgaagtgccggaaattgtcttgcgtctgactgatattgagaaaacccctcaaaggcctgtttacgaaatggcaaatgatataccattattgttatatgattgtaaatttcctgaaatggattggcaagaacctactgtagatgactataaggcaataaaattcacgacagctactgaagcattgacgttacactacgaacttaaggccgcagtatgcaatatttttaaagatgttttgcccacagcaaatacaaacaacttctcaaagacaattattaatttgggcgatggaagaggtaaagtagtcggtacctatgtgaaactagaggatagaagcgttatggaacctgtcgaagttgttaatgctaaatactccaagaaaaagaacaacaaaaataagtaaaataatatataaacctgtataatat

SEQ ID NO: 1012 - DNA, 2707 bp, Saccharomyces cerevisiae
caggctctcttcgtcttatcttttctatcggaagcgaattactgggaaagaggcataggtataaacagataaaatagacgaaaagagtttagaaaaaaaagtagaaagaacgactacacctcaacataacgacacttttttgacatgctgtttggagtgaagttggctaatgaggtttatcctccttggaagggttcttatattaattatgagggcttgaaaaaattcctgaaggaagatagcgtgaaggatggaagtaacgataagaaagcacgctgggacgattcagatgaatccaagtttgtggaagagttggataaggaacttgaaaaagtctatggttttcaactaaaaaagtacaataacttgatggagagattgtcccatctggagaaacaaacagatacggaagcagccataaaggccttggacgctgatgcattccaacgtgtattggaggaactgttaagcgagtctaccgaattagacaattttaagagattgaactttactgggtttgctaagattgttaagaaacatgacaagctatatccaaagtatccatctgttaaatctttgttggaagttagattaaaggaattgccttcccattcggaagaatattccccattgttgtatcgtatttcatttttgtacaacattttgagaagtaattttaacactgcatctgaacccttagccagcgcttctaagttttctagcattgtcagcaatgacatagacatgaatttcagaagctttaaattttgggttcataatgacaacttaatggaggtcaaaacaagaatcttgagacatcttcccgtgttggtctacgccaatgttccctccgaaaacgatgacctggtcaatagattcgaatcagatatatcaaataatgatgaaattgtgggtagttcgagctccactagtagcgtagaacatggcttgggagcgcgctccttcgatccattaatcaacacgctatattttgacaatgagcattttgaattatataacgacaagttattaaagttaaattcagcacctactttaagattaaggtggactggccagttatctgataagccggatattttcttggaaaagaaaactcttattgaagacgaagccactgggaagtctgaatttgatctaactaaattgcaattgaaacaaaaattcattaacgggtttattttcgaaggtgataagaaatttaaagaacaaactttgaaaaagttaaaagaaagtggtacggcagggagagacctggaaaggttagaagaagatttctctgagattcaaaactttattatcaagaatgaattgcaaccagtttttagaactgtttacaccagaactgctttccagattcccggcgatgacaagataagagtaaccattgactctaatattgtattcatcaaggaggattcattcgacagagagcgtccaattagagaccctaatacctggcatagaactgatattgatgccaatgttgcaaatcccttgaaattcctgagaggaggcgagtatgctaagtttccttattcagtaatggaaattaaagtgaaaagttcattagattcttcgatgtctgccagttctatgatttctaatgtaaaactgcctaaaaagcatggtcaatggctgaacgatttgacaaattctcatttggtcaaagaaattccaaagttttctatctttgtgcaaggtgtggcatcattgtatggagatgatgaaaaattagatatcttaccattttggttaccagatttggaaacagatattagacaggatcctaagcaagcatatgaggaggaaaagaaaaaactgttgaaacaaaaagagatacaaaagaaaattgatggaatgagaaggctttccaacttaaaagagcctcaacatcaagcagcagtaccggtatctcaagaggaaaatgagcgtattacctctcaaggtgatttggaggcagacggttcatccgatgaggaaactgagcaagaacctcattcgaaaagatcaaagaaagttcggagaagaaaacccaaggccactttcttgagaattttggccggtagagatccaaagttaatgggggtggattctgaagaagaagaaattgaattgccacctggtgtgaaaaaaccattaaatttgttaaaaaatgctggtcctgtaaacgtggaggcaaaggtttggcttgccaacgaacgtacatttaacagatggttaagtgtcaccagtttattgagtgttttgacgttctcaatttataattctgtgaagaaagccgaataccccactttggctaactacatggcatacgtatattttggtctaacgatattctgtgctttatggtcctattccatttatatgaaaagagttgatattattcaacaaagaagcggtcaacatctagatgcaccacttggtccagttttggtttctatagttttatttgtcactttagtggttaattttgttatggcgtttagaaatgcagcaaagtctcgtcaagagttgcaaatacagaatttagaagttcctgaaagaataccagaagtattaaggccacttcaaaattatctattcaagttaatggggccaagcagtgattagaatatgtactctatctactgagaccatgtgtttttatgtttgtaatgtgtagcaaaaaattatcatctgctaacaa

SEQ ID NO: 1013 - DNA, 1028 bp, Saccharomyces cerevisiae
ttgtcttttagtgatccattattccaacctattgcaattccaagaaaataaactaggaacttttttttttggaagaataagaaaaggagaaaaagtagacatactgtatatacacgagggcgtatcgttcaccagaaagaatataaacataacaagataaacatgtcaggcttgagaactgtttctgcttcatccggtaatggaaagagctatgactctattatgaaaattttattgattggtgattctggtgttgggaaatcatgtttattggttcgttttgttgaagacaaatttaacccgtcatttatcaccaccattggtattgatttcaaaataaagactgtcgatatcaacggtaagaaggtaaagctgcaactttgggataccgctggtcaagaacgtttccggacaatcaccacagcgtattatcgtggtgctatgggtatcattcttgtatatgatgtgacagacgagagaacatttactaatatcaagcaatggtttaaaaccgttaatgagcatgcgaacgatgaagcacagctactgttggttggtaacaagagcgatatggagacgagagtggtaacagctgatcaaggtgaagccttggctaaggagctgggtataccattcatcgagtccagtgctaagaacgatgacaatgtcaacgagatttttttcaccttggcgaagttaatccaagaaaaaatcgacagtaacaagcttgttggcgtcggtaacggtaaagagggcaatattagcatcaatagtgggagcggaaacagttctaaatcaaattgctgttgaagaaaagaagatttttgcttctttgagaattaatcgtgaactggaattagagctataaatcgcttgattcttttttccctttttctcaatattcgcaggttatttttcctttatatatatacattgtttgtatctttttttgattaccatacttactatttttatattagtcatattagatgtcacttttatattatctaaacaattcaaacttctca

SEQ ID NO: 1014 - DNA, 6623 bp, Saccharomyces cerevisiae
taaagctgcattagatcttagcaaaaactacgagaagaacattgaatattgtagctgtatttgcatacataaactttatcattgttcgttagctagctttgcacattaatttttcgatttgttaccgccaatgaccgctaacaatgacgatgatatcaaatcacccattcccattactaacaagaccttatcccaattgaagcgctttgagagaagtccaggaaggcccagttcttctcagggcgagataaaacgtaaaaagtctaggctatatgccgcagacggaagaccacattctccgctaagagcaaggtctgctaccccaacgctacaggaccaaaaactgttcaatggcatggattccacttcccttttgaatgaaaggctacagcattatacgctggattatgttagtgacagggcccagcatatgaagaatatatatgacccatcatctcgctggttcagcagatccgtgaggcctgaatttcctattgaagagttcttaccatataagactgaaagtcatgaagatcaagcgaaatacttgtgccatgtcttagttaatctttatattgcgatcagctcattagatatacaaggtttgatttctatttccagtaaagatctggctgatttaaagaaagaagtggatgatttagctcttaaaaccgatcttttcaggttatctaacaacacagcggagaatgacttacttggtaacgatattgctgattatgacgatgcggaaggcctggaggacgaattggatgaatacttcgacttagcaggccccgactttaatgctaccggaaaaatcacagctaaatcagctactattgtgaatgtaaaccattggactaatgagctcaaaaattgtctacattttgattttccagtagctttaagaaagtcgctagcgacagtttattattatttgtctcttgttcagggccaaaaggtgtatagacaaatgcatgtcgatatgttcgaaagattagtaagccttgacgatgataggacaaatttcactgaactgttgcaaaaacaaggtcttttgctagatcatcaaatcatgctcaatttcctgtgcgaatttctaccttatccagatcccgactatgctcgttatgaattatcatcaaaggaagatttacagttatttagattacttttgaagcatgcacataatgcaaaaccatttttcgataagtcaaaggaaagtttgttagttgatacgatgaattttctgttgtctagtcttgcaccatctactatgatggctgtcatgcctatcgttacatccgttgtgccctatcattatcatatccattctaagatcatcgattatttcccgttttgctatagcatctggagctcagtcagcgcaaacgtggccatcgacactcacatgtatgattttgttgggtcaatttccaaagacgttcataataagattttgagtagcgagcatgaaaaggatgtagttggagtggagtttggagaattcgggatttttactgatgatcaaatgacttttatgttcaataggttacaaggccatcttagaacagacggtcaaatacattcgtattcccgcacagtgaagccttttgtttatgctataaacggatcaaaaaaagataggttttttgaaaaacttgtaagtttagccaaagcaatcgaaacatttatccatccctctaataatgggttttggaccaagccaaatgctaaattcgttcatgcatttataaagtcttaccacggaagggtcaaatatgaagaagatatttgtgctaggggcgtcacaaatgggatatgtttaacttctttttgtcacgaagagatagttgaaatattcttaaatattatcagtctgggttcacagaataaaaatcctgatattgcgaactattacatctcttgtttcgcatatctgttagagctggatccttcaaatgcatatttaatttatgacaaaatactgatagatttgtacgatacgctggctgaccaatttatcaattcgagacacagaatcatttcctctttgaaacaatttacaagagtaattcggtttattgtgatggataagctatatcgcgtgcacataacaaacgtcctttcgatgctggtctccaaacttgatatgaacgatactaatttgacaagcaacctcatcaacggtattgtatctatagccgctttcattcctatccaagacctcactggggaggacgattatatatcgtttgaatcggatactcttcctttagttcaacaacatttttatcatattaagtgtggcgaaagttcaaagaccttccgagttgatgatgaactgttaaataacgctttcaaagcttccactacagtttttcaaagtatgctaaaagtatacgtagaaaaaattttccaattggttgatgtagacttagaggactctttggttactaaaataaaccaaacaactatgattttacaagagtctatggacgataaaatatttaattattttgcttctttattacagagaaacttctggagtaatgactccttcaaggaaaaggatccaaactatgaattagttactatcccactagcggctttagtaagaaggaataatggtttgagtaaagagttggtcagaactcttttattccatatcaaagaacaaatcaaaagaggcgccgggtctgtaagaagtacttcagagattcaacagagggatgttaagttagttttatacttaactgcactaaatgatgtcttaaggcaatgtcatgaatctctattggagtatagcgatgagttgataacattcatgaaatatttatacgacaacgtcactaacccgccattggatgttatcacatctattgttattcacagtgctttagcaactctatgtacaaccgaaataactgattgtcgtctattcccagaggactctaagattccggaaaaagacagatggggaggactacagttcgatcctcgaagatttgataaacagcatttgagttttcagtggcacgtaccttctagtgacgagataactttatccataagcattctagaaagcctttccgaatactgtattaacaacgtagaagaactgatgaaagctccaagacatgattccgaatatggcgatatgatacaaaaatatgttttagttatgacacatacgctttccgggtcaagtttactttttgatccagattttaacaaatataggacgcaatcaaacttatcatacagagagaaactgattttattaaagaatatacgcgaaaataattgtgaccctcaagaactggatattgatattgaacaaattcgttctggcaaggatgatgaagactatattgagagtaaggacattgaagcagggctgaatgcaggagtttccgatgttgtgcagttaagagatgagtttccggatgaattaattgttgatgaagaagtagtgtctgagatgccatctggtgtaaatacccctatcgcggggacgcatggcacggacaattcagctatgagttcggatctagctttcagggatttagatatttacacctgtaattattacttcggaaataccactgaggagaagttacaaaacccacaatatttacaagtccacagagttagagcgcgcattggacatttctttcacaaactctatgtttttttatctacaaacttcgaaaacaacaccaacatgttccaaattctattgcacggattgaaagtttggttcacagatctgggacaagaaacggtcttcaatgaagacccaaatgccttcattgacgttgatttcctagaaaacgttcaatctctctcacacgtaaatgagcccttcacgagaaccaattttgcaatcagagcaaacagtttgcaccagagtagagttctattacattcaacaaatagaaaagcttccaagctggaaaacctattgttagttgacatcatacagttagcgacatccctttatcctgatatttataaaccagcacagggaactttggtacactgtatgaaacaattagttgggtcatatggcgtagtcatcaataaaattattccatcattagagaaagcgattaaggatcatgattatatgaaaatccaagttattttaaatgttttgttaattaagaaaatccataggaagcttatgacggattataaagacatcggcagattgatatttctgcttattgaatgttgtcgtgtgaatgaattagagattggtatgtatgcagataaaatcttaactgacatagtgattgggatcaagattccttctagtgtatgtgtcatttccgatcaagctttcttacctttagcacctcctgatggtactattaatttgcaagttgaagcggtaaagcttgccaaaaagaaaaagcgtgagtactacctctctctgttagtggatttgcaggacaaacttttagacaaattagataatgaaaaagatatggggtggaagataagaatgttcattttacgttttgttacacaaatccaatcgaacctcgaaagcaaacccgataaaagagcagtattttcaataatctcccaaatctccacaaaacatcccgaaatcatacatttggttgtaaagtcattgttgtcgacgtgcaacaagataatatctctctctgactatgaatatgacatcaccagggcctataagaatgaattcaatccatcatttgtggaaatactggacacttcgaccacaagcttccctaaaacgtttactgaagaaatgaataactttgataaccccaagtattttatcgatttgagggcgtatgtagggtggctatgttggggaaggcttatgtacgtcatgtcgccgaaagctttaaagctcaatttacgtgagaatgaactggaagtcctcaagacagctggtcatctattgacaagagaattcctgagagatgttacaatgaatttagtccaagataatgaaactaggggtgtttttagtagtggtaacgtgtcatttttctctttagtaatccttttgatatcatctggtttctgcgaactgaatatgtcggatctctttgagctatgtgaatcctactataacaaagacgataaggcttcgatgatcatgtctgtcgagatagtggctggcttagtttgcgggagtaagtttatgtcagtctctgacttggacaaacgtgacacttttatcgaaaacttcctagccaaatgtttagattatgagttgaaccatgacgcatttgaaatttggagcaccttggcatggtggttgcctgcagtcgttgatttaagaaggtctaaaacttttttttgccattttatcaacgccgatggcatgtttgaccgtgaatctgatgcagccacacatcaaacctccaaaatttacatgctaagaagtatcttgatgagcatggaatttagagccccagatgttggtaagctatttgatgagttggtatttgatcacccatacgatcaggttcgccaggctgtcgctaaactattgacgaccttagttcaaaatcaaagtaatccgtcaatttcagatccaaccacattattagaagcagaacggaatgatccagatggattagggttaccattaaaaagcgtcccagaaaaggtggatgcctatattaagaagcagtttgagatcattaaaaatctggaagattccgttgtcggcctgaatcctcaacaatttattaagacagactatttttacaggacatccacaatattttattggatcaaagaaatggcgagagggcctaataaagttttgttagttccatatttagtcgattatgttttaccatttctgatcggattagtgaaacataaagatgtttgtgctcttgccagtttagatcctgttcgattgtatgccggcttgggctatatgccgatcagaaagaaccatgttgccgccattgttgactatgtttgttcgtcaaatgtagcactatcttcaaaccaaacgaaactacagctagctttcatccaacactttttatcagcggaactgcttcaacttactgaggaagaaaagaacaaaattttggaatttgttgtcagcaatttgtataacgaacagtttgtagaggtgagagttcgtgcggcatccattttgtctgatatcgtccataactggaaagaggaacagccgttgttgagtttaatcgagagatttgcaaagggtctcgacgtcaacaaatacacgtcgaaagaaagacaaaagttatccaaaacggatatcaagattcatggtaacgttttgggtttgggagctattatatcagcgttcccctatgtttttcccctaccgccatggatacccaagcaactaagcaacttatcctcgtgggccaggactagtggtatgactggacaagctgccaaaaatactattagtgagttcaagaaggtgagggccgacacttggaagttcgatagagcatctttcaatacggaggaactggaagacctggagggtgtcctatggagaagttactatgcctgattcatattagtataggatattaagcacatatctagacatatatgtacatctaaacaaatag

SEQ ID NO: 1015 - DNA, 2606 bp, Saccharomyces cerevisiae
tatgaatatagattgctcaacaaagcgtgtctttttctgtgtgcttaaaatatagtgtcttttttgggaaaaaaacgtttatttacagtattctcttcttcttctcctcattcaacttgttgcggttcgaagaaaattacgcataaagaatcaaagaaaggcaaaaattacgctgtacgatggggtcgtttcccttagctgagtttccattacgtgatatccctgttccttatagctaccgtgtgtctggcggtatagcttcctcaggtagtgttactgcgcttgttactgccgctggcactcatcgaaactcgtccacggctaagacagttgagacagaagacggcgaagaagatatcgatgagtatcagaggaaaagagcagctggttctggcgaatccactcctgaacgcagtgatttcaaaagggtaaaacatgataatcacaaaaccctccatccagttaacttacagaacaccggtgcagcgtctgtggataatgacggtctgcacaatttaacagatatatccaacgatgcagaaaaacttttgatgtctgtggatgatggttctgccgcaccttctacattgagtgtaaacatgggagtggcatctcataatgttgctgctcccactaccgtcaatgcggcaacaataactggcagtgatgttagtaacaatgttaatagtgctactattaacaatcctatggaggaaggagcgctgccgttatcacccactgcttcctctccaggtaccacaactcctttagctaaaactacgaaaactatcaacaacaataataatatcgccgatttgatagaatccaaagattctataatctcccctgaatacctttctgatgagattttcagcgcaataaacaataatctccctcacgcatacttcaaaaatttattatttagattagttgccaacatggataggagtgaactatccgacttggggactttaatcaaggataatttaaagagggacctaataacgtctttgccttttgaaataagtttgaaaattttcaattatttgcaattcgaggatattataaattcccttggggtctcccaaaattggaacaaaataattagaaaatctacatcgttgtggaaaaaacttctgatatcggaaaattttgtgagcccaaagggttttaattctctcaatctcaaactctcccaaaaatacccaaaactctcacaacaagatcgccttagattatcttttctggagaatatattcattttaaaaaattggtacaatcccaagtttgtaccacaaaggaccacgttaagaggccatatgacgagtgttattacgtgcttgcaatttgaagataattatgtcattacgggggctgatgacaaaatgatcagagtttatgattcgataaacaagaaatttcttctacaactatcaggtcatgatggtggggtttgggcattgaagtatgcccatggcggtattttagtcagcggttctacagacagaacggtgcgagtttgggatattaagaaaggttgttgtacccatgtgtttaaaggtcataactctacggtgaggtgcctagatatagtagaatataaaaatatcaagtacattgttactggttcgagagataacactttgcacgtttggaaattgcccaaggagtcctccgttcctgatcatggggaagaacatgattatccattagtctttcatacccctgaggagaacccatattttgttggtgttttaagaggacatatggcatctgtaagaactgtctcaggccacggtaatattgtcgttagtggctcctatgataatacactgattgtgtgggatgttgcgcaaatgaaatgtttgtatattttaagtggacatacggatcgtatttattcgacaatctacgatcatgaaagaaaaaggtgcatctctgccagtatggataccactattagaatttgggatttggaaaatatatggaataatggagaatgttcctacgcaacaaattcagcatcgccatgcgccaaaatacttggtgctatgtacactttgcagggtcatacagctttggtcggtttattaagattatccgacaaatttttggtcagtgccgctgcagacggttcaataaggggttgggacgcaaacgactactctagaaaattttcctaccatcataccaatttgagtgcaattaccacattttatgtatcggataatattttggtgagtggatcggaaaatcagttcaacatctataatctacggagtgggaaattggtccacgcaaatattctaaaagatgctgatcagatttggtcggttaattttaagggcaaaacacttgttgcagcagttgaaaaagatggacagagctttttagaaattctggatttcagcaaagcttcaaaaattaactacgttagcaatcccgtaaactcctcgtcgtcgtctttggaatccatttctacttctttgggtctaacgaggacaactataataccatgacctttcccagagaataagcattgactcatacttagataatatagcttaataagtagttatataatcagtaaaaaagtacaataacaa

SEQ ID NO: 1016 - DNA, 543 bp, Saccharomyces cerevisiae
caaacaaacaactcaaaacaaaaaaaactaaatacaacaatgtctgacgcaggtagaaaaggattcggtgaaaaagcttctgaagctttgaagccagactctcaaaagtcatacgctgaacaaggtaaggaatacatcactgacaaggccgacaaggtcgctggtaaggttcaaccagaagacaacaagggtgtcttccaaggtgtccacgactctgccgaaaaaggcaaggataacgctgaaggtcaaggtgaatctttggcagaccaagctagagattacatgggagccgccaagtccaagttgaacgatgccgtcgaatatgtttccggtcgtgtccacggtgaagaagacccaaccaagaagtaaatctttcggaactctttgtagttacatggttttttctttatgatgtgtgatgttccttaatattatattcaatgaatagcagagtaataaaaaaattctaaaaaaaaaacgcttaaatcgaggtggaatatataaacttaagtacgcatatactctagttcagtttaaaaatta

SEQ ID NO: 1017 - DNA, 337 bp, Saccharomyces cerevisiae
gacaggattacgcaaacacacgcacagatacaatggtttctacccctgaactgaagaaatatatggacaagaagatattgctgaatataaatggatctaggaaagtggcaggaattttgcgaggctacgatattttcttaaacgtcgttcttgatgatgcaatggagataaatggtgaagaccctgccaataaccaccagctaggcttgcagaccgtcattaggggcaactccataatatccctagaggctctagatgccatataaaattatatatatatatatatatgtcgacctctatgtactatacagcaatactattttctaatttgcatttc

SEQ ID NO: 1018 - DNA, 1679 bp, Saccharomyces cerevisiae
atgcacgttttctttcctttgcttttccgcccttcccctgttctgttcatcgcatgtgcatatatatatatagatatatatatacattgtacacggtgcacggtagtgaacataactatgagcacgaacagagtcccgaacctcgacccggacttgaatttaaacaaagaaatctgggacctgtactcgagcgcccagaaaatattgcccgattctaaccgtattttgaacctttcttggcgtttgcataaccgcacgtctttccatcgaattaaccgcataatgcaacattctaactctattatggacttctccgcctcgccctttgccagcggcgtgaacgccgctggcccaggcaacaacgacctcgatgacaccgatactgataaccagcaattcttcctttcagacatgaacctcaacggatcttctgtttttgaaaatgtgtttgacgacgatgacgatgatgatgacgtggagacgcactccattgtgcactcagacctgctcaacgacatggacagcgcttcccagcgtgcttcacataatgcttctggtttccctaattttctggacacttcctgctcgtcctccttcgatgaccactttattttcaccaataacttaccatttttaaataataatagcattaataataatcatagtcataatagtagtcataataataacagtcccagcatcgccaataatacaaacgcaaacacaaacacaaacacaagtgcaagtacaaacaccaatagtcctttactgagaagaaacccctccccatctatagtgaagcctggctcgcgaagaaattcctccgtgaggaagaagaaacctgctttgaagaagatcaagtcttccacttctgtgcaatcttcggctactccgccttcgaacacctcatccaatccggatataaaatgctccaactgcacaacctccaccactccgctgtggaggaaggaccccaagggtcttcccctgtgcaatgcttgcggcctcttcctcaagctccacggcgtcacaaggcctctgtcgttgaagactgacatcattaagaagagacagaggtcgtctaccaagataaacaacaatataacgccccctccatcgtcgtctctcaatccgggagcagcagggaaaaagaaaaactatacagcaagtgtggcagcgtccaagaggaagaactcactgaacattgtcgcacctttgaagtctcaggacatacccattccgaagattgcctcaccttccatcccacaatacctccgctctaacactcgccaccacctttcgagttccgtacccatcgaggcggaaacgttctccagctttcggcctgatatgaatatgactatgaacatgaaccttcacaacgcctcaacctcctccttcaacaatgaagccttctggaagcctttggactccgcaatagatcatcattctggagacacaaatccaaactcaaacatgaacaccactccaaatggcaatctgagcctggattggttgaatctgaatttatagatcccccaaaaaaaaaaagtactcgcttctttccatgtccgcttcatatatatatacacatactaatcaaactctatgtatacatagaataaaaagaagaacactatatttatttcataaaaaaaaaaaaaaaataacaaaaaaag

SEQ ID NO: 1019 - DNA, 1201 bp, Saccharomyces cerevisiae
ccaaggctttaactcagtgtcaaacataacaacctcctcctcccccacctacgacaacaaccgccactatggaaatgactgattttgaactaactagtaattcgcaatcgaacttggctatccctaccaacttcaagtcgactctgcctccaaggaaaagagccaagacaaaagaggaaaaggaacagcgaaggatcgagcgtattttgagaaacagaagagctgctcaccagagcagagagaaaaaaagactacatctgcagtatctcgagagaaaatgttctcttttggaaaatttactgaacagcgtcaaccttgaaaaactggctgaccacgaagacgcgttgacttgcagccacgacgcttttgttgcttctcttgacgagtacagggatttccagagcacgaggggcgcttcactggacaccagggccagttcgcactcgtcgtctgatacgttcacaccttcacctctgaactgtacaatggagcctgcgactttgtcgcccaagagtatgcgcgattccgcgtcggaccaagagacttcatgggagctgcagatgtttaagacggaaaatgtaccagagtcgacgacgctacctgccgtagacaacaacaatttgtttgatgcggtggcctcgccgttggcagacccactctgcgacgatatagcgggaaacagtctaccctttgacaattcaattgatcttgacaattggcgtaatccagaagcgcagtcaggtttgaattcatttgaattgaatgatttcttcatcacttcatgaagacaatcgcaagagggtataattttttttttctcgttattatcgctgttggtgggttttttcttttcatatatttctttttcgcttagtggtttctactgttctgtctccggttagtgtgtgctacttcaaccgaagaagaagaggcttttcaagaatgcaaacgtgaggttggcgcgccctcctacaattatttgtggcgactgggcagcgacactgaacatagctcttgaacaagacccttttttggctgcaaggagcaagactggctggggttccacctcaaagagccacgctctgctttttttctatctgtttgtgtcatatctatctgtctatttatctatatatatatttttttatataaaactataaagaattcttgatgtatgcccttaggttgggcagcttttcaa

SEQ ID NO: 1020 - DNA, 1666 bp, Saccharomyces cerevisiae
tgaggcaattggagtgacatagcagctactacaactacaaaagcaaaatctccacaaagtaatataatgagagaaatcattcatatctcgacaggtcagtgtggtaaccaaattggtgctgcattctgggaaactatctgtggtgagcacggtttggatttcaatgggacatatcacggccatgacgatatccagaaggagagactgaacgtgtacttcaacgaggcatcttctgggaagtgggttccaagatctattaacgtcgatctagaacctgggacgattgacgcagtacgcaattctgccatcgggaatttgtttagacctgacaattatatctttgggcaaagttctgcgggcaacgtgtgggccaagggtcactacacagaaggtgctgagcttgtagacagcgtcatggatgttattagacgagaggccgaaggatgcgactcccttcaaggtttccagatcacacattctcttggtggtggtaccggttccggtatgggtacgcttttgatctcgaagattagggaagagtttcctgatcgtatgatggccaccttctccgtcttgccctctccgaagacttctgacaccgttgtcgaaccatacaatgccacgttgtctgtgcaccaattggtagaacactctgatgaaacattctgtatcgataacgaagcactttatgacatctgtcaaaggaccttaaagttgaatcaaccttcttatggagatttgaacaacttggtctcgagcgtcatgtctggtgtgacaacttcattgcgttatcccggccaattgaactctgatttgagaaagttggctgttaatcttgtcccattcccacgtttacatttcttcatggtcggctacgctccattgacggcaattggctctcaatcatttagatctttgactgtccctgaattaacacagcaaatgtttgatgccaagaacatgatggctgctgccgatccaagaaacggtagataccttaccgttgcagccttctttagaggtaaagtttccgttaaggaggtggaagatgaaatgcataaagtgcaatctaaaaactcagactatttcgtggaatggatccccaacaatgtgcaaactgctgtgtgttctgtcgctcctcaaggtttggacatggctgctactttcattgctaactccacatctattcaagagctattcaagagagttggtgaccaattttccgctatgttcaaaagaaaagctttcttgcactggtatactagtgaaggtatggacgaattggaattctctgaggctgaatctaatatgaatgatctggttagcgaataccaacaataccaagaggctactgtagaagatgatgaagaagtcgacgaaaatggcgattttggtgctccacaaaaccaagatgaaccaatcactgagaattttgaataattaagttgctttcctttctttttcttacctttcttcttctctaggattgaagcacttggagcaaaataaacaaaaatcaaaaaaactaattaaatatctttaaaatattaccgtacgaaaaaatttataccattccctactgaagtatgtaattcaaaatatatatatgtatatgtatatgtacatatatatgtatatactatcttaacaacctttaaccttccga

SEQ ID NO: 1021 - DNA, 2055 bp, Saccharomyces cerevisiae
aagacaagaaacgatgttgttctactcgttcgtgtggtctgtactggccgctagtgttgctttggcaaagacacataagttaaactataccgcttcttgggtaactgccaatcctgatggattgcatgaaaaaaggatgattggttttaatggcgaatggccacttccagatatccatgttgaaaaaggagatcgtgttgagctttatttgactaacggctttcaagacaatactgctacttctctacatttccatggtcttttccagaatacgagtttggggaaccagcttcaaatggatggtccttctatggtgacacaatgtcccatcgttccgggacaaacatacctgtacaacttcactgtcccagagcaggtaggaacgttctggtaccatgcacacatgggtgcccagtacggtgacggtatgaggggtgcatttatcatccacgatccggaggagcccttcgaatatgatcatgaacgagtcatcactctatcggaccattatcacgaaaattataaaacggttaccaaagagtttctgtcaagatataatccaaccggtgctgaacctattcctcaaaatattctttttaataatacgatgaatgtaactttagattttacacccggtgaaacgtatctcttcaggttcttgaacgttgggctgtttgtatcccagtatatcattcttgaggatcatgaaatgagtatagtagaggtggacggtgtttacgtaaagccaaactttactgattcgatatatctttctgcggggcaaagaatgagtgtgttgattaaagctaaagataaaatgcctacaagaaactacgctatgatgcaaataatggatgagacgatgcttgatgttgtcccacctgagttacaactcaaccaaactatccaaatgaggtatggccactcgttgccggaggcacgcgcattgaacattgaagattgtgacttggaccgcgccacgaatgacttttacctagaacctctgattgagagagacctacttgctcactatgaccaccaaattgtcatggatgtaagaatggtcaacttgggtgatggtgtgaagtatgcatttttcaataatatcacttacgtcacaccaaaggtgcctactttgacaacgttgcttacctcaggaaagcttgcgtcagatcctagaatttatggtgataatatcaatgcgcagttattgaaacataatgatatcatagaggttgttctaaacaattatgattctggcagacatccattccatttgcacggtcataatttccaaatagtccaaaagtcgccagggttccatgttgatgaagcttatgacgaatctgagcaagatgaaatgaccgtcccttataacgaatctgcgccattacaaccgttccctgagaggccgatggtgagagatacagtggttcttgaacctagtggacatgttgtcctgagatttagagctgacaaccctggtgtctggtatttccattgtcatgtagattggcacttacaacaaggtttggcttcggtctttattgaggcacccgttttacttcaggaaagggaaaagcttaatgagaactatctggatatatgcaaagccgctgatattccggtagttggtaatgctgcaggtcattcgaatgattggtttgacttaaaaggattaccaagacaacctgagccactaccaaagggatttactactgaaggatatttggcattgattatttcaaccattatcggtgtctggggcctatattccattgctcagtatggtattggcgaggttatccctaacgatgagaaggtgtaccacacgttaagggaaatcttggctgaaaatgaaatagaggtttctcgcggctaattaaacaagaaaatataaaagaaaaatgaaagaagtttatattcatattgatgatttgcaatcctaaaaaaaatgtagcactgtaaatactgcttactattgagtattttcattttgttcattccattccctatataatattcatacgtaatcaaatctattgcttttttttt

SEQ ID NO: 1022 - DNA, 803 bp, Saccharomyces cerevisiae
ataagtaaagtaaggtagaacggaataaaatgctcaagcgtattgttggattgcctgcaaggcgttgctttcatagaacgtcctttttgctgggcagtgactttgaaactgtgcatattcccaatacgaaccactttaaagatttacttatagagaacggtaaatttcaagaggatcaagcaactacaatagtagagataatgacagatgcaattaggggcggggttaatcatgtttcacaggatctggcaaagagagaaaaattgacccaacttagctatcaacaacgtgttgattttgcaaagttaagagatcagctattgagtgctgatagaagtgaatttcacaatattcaaaacgagtacgaaagtgtgaaaaacgatctggagaaactaagaaacaaactaagggaagaaattaccaaaacaaacgccggtttcaaacttgatctgtccttagaaaaaggcagaattagggaagaaagtagtcatcacgatctgcaaataaaagaaatcgacaccaaaattgagcaagaagtgaccaatatgaagatgcagattgattctgtcaagactcaagtcatgcaatggctgataggtgtctgtacaggtacatttgcacttgtattagcatatatgaggttattaacatagtggcgacaagcgaggaaaaagggctagacttggtacttgaaaattgcatttacgttttgtataacacagttcagtaagagtacacattcaataacgtagtaagagtatatttatttatataagaaggataaaaaagaatcaccaaacgga

SEQ ID NO: 1023 - DNA, 2205 bp, Saccharomyces cerevisiae
atgctatcattttgcgactatttttggtctgaagaccttgtctcaggtctagatgtgctttttgatagattataccatggttgtgagcaatgcgacttgttcattcaattatttgcgtcaagaatgcaatttgaagtcagtcacgggaggcagttgtttggtatagaagccggtatggacaatctgaaggcagtgcaggaagatgaagatgaaggggtgacagtttcgagggccctgaggggaattctacaggaaatgtctcaggaagggacgcatcacttgacaatagcgtcgaacatagaaagtttggtgctgcagccattcagtaaatggtgcatagaacatagggagagaattcaatactccgagaagactttgttgaccaatgtaaataatttcaggaagtctaaaaagtacgtcggtaagctggagaaggaatattttaataaatgtaggcagctagaagaatttaaaagaactcatttcaacgaagatgagctagcaaatgcaatgaaatcattgaaaatacaaaataaatacgaagaagatgtggccagggaaaaggatcacagatttttcaacaggatagcgggaatagattttgattataagacaatgaaggagacgcttcagctgttactgaccaagcttcctaaaacggactataagctacctctcattagttattctttgagcaacaccaacaatggtggagaaataacgaagtttctgcttgaccacatgtcgttaaaggatattgatcaagctgaaacgtttggccaagatttgttgaatttagggtttttgaaatattgcaacggtgttggtaatacatttgtcaactctaaaaaatttcaataccaatggaagaataccgcgtacatgtttgccaatgtgccaatgcccggttcagaggagcctaccactggtgaatccttaatatcccggttcaacaactgggatggttcatctgcaaaggaaattattcaatccaagattggtaacgaccagggggcagcgaagatccaagctccgcatatatccgataatgaaaggacgcttttcagaatgatggatgcgcttgcagcgtcagataagaagtattaccaggagtgcttcaagatggatgccttgagatgctcggttgaggagttgttgattgaccatttgtcgtttatggaaaaatgtgagtccgatagactgaatgcgatcaagaaagcgacactagatttttgttctaccttgggtaacaagatttcttcgttaagactgtgcatagataaaatgctcacgctagaaaacgatattgatcccactgcagaccttttgcaacttttagttaagtacaagacgggcagtttcaagccgcaagccattgtttataataattactacaatcctggttcatttcaaaactttggtgttgatctagaaactcgttgtagactagacaagaaagtcgttccgttgataatttcttcgatattctcatatatggacaaaatatatcctgacttacctaatgataaagtaagaacttcaatttggactgattcggtgaaattaagtttaacacatcagcttcgaaacctattgaacaaacaacagttccacaacgaaggggaaatatttgatatactttctacgtccaagttggagccaagcaccatcgccagtgttgttaaaatttatttattagaattaccagacccactaattcccaatgatgtctctgatattcttcgggtgctttaccttgactatccacctttagttgaaactgcgttgcaaaattctacatcatctcccgagaatcagcaggacgatgacaacgaagaaggctttgataccaagagaataagaggcctttatactactctgtcctctctaagcaaaccacacatagcgacactagacgctattacaactcatttttacagattaattaaaattctgaaaatgggagagaacggtaatgaagtagcagatgagtttaccgtctcaatttcacaagaatttgccaattgtattatccagtcaaagatcaccgatgataatgaaattggttttaagattttctatgatctactgacacataagaaacagatttttcacgaattgaaaaggcaaaattcaaaaaattaggactaggcgatatagatttgtatataattttatataaaaggaaatatgtacatcattttc

SEQ ID NO: 1024 - DNA, 734 bp, Saccharomyces cerevisiae
attataaggttagatatctgtaaatctatacaattaaggaaagatggcaccaaagaaaccttctaagagacaaaatctgagaagagaagtcgcaccagaggtgtttcaagattcacaagctaggaatcaactagcgaatgttcctcatcttaccgaaaaatctgcccagcgtaagccttctaaaaccaaggttaaaaaagaacagtctttggctagactttatggtgcgaagaaggacaagaaggggaaatattctgagaaagacttgaatattccaacactcaatagagctatcgttccgggtgttaaaataaggaggggaaagaaaggtaagaaattcattgctgataacgacactctgactttaaaccgtttaataacaactattggtgacaagtacgacgatatagctgagagtaagcttgaaaaggctagaagattagaagagatacgagaattgaaaagaaaggaaattgaaagaaaggaagcgcttaaacaagataaactagaagaaaaaaaagacgagattaaaaagaagtcttctgtcgcaaggactatacgtagaaagaataaacgtgatatgttgaaaagtgaagcaaaagctagtgaaagtaaaactgaaggaaggaaggtaaaaaaagtctcatttgctcaatagtttgattgactaaactaaatacggataagtctgttgtataatatataacatcctgaaggcaaagtctttgtaaaga

SEQ ID NO: 1025 - DNA, 2619 bp, Saccharomyces cerevisiae
caaagaagtaaacgatatgctggagacgttgcgcggaaataagctgcattctggcacctcaaaaggcgccaacaaaaagttgaatgaactcttggaatcgtccgacaatctaccatcagcatcctctgaattaggttcaattcaagtaagcattaatgaattgagaagacgtgtttttcaattgagaagcaagaacaaagctagcaaggactatactaaagcccactatttattggctaacagtggcttaagctttgaagatgttgatgctttcatcaaagacttgcagacgaatcaatttttggaaccaaatccaccaaaaataattgaaagtgaggaattagaattctatataagaactaaaaaggaagaaaacattttgatgtctatcgaacagcttttaaatggcgctacaaaagattttgataattttattaatcataacttaaatcttgattgggctcagcataaaaatgaagtcatgaaaaattttggcatccttatacaagataagaaaactgtagatcacaaaaaatccatcagttctctagaccctaagcttccaagctggggtaataagggcaataacattttaaatagcaacgaatccagattgaatgtcaacgaaaataatatccttagggaaaagtttgaaaattatgccagaattgtgtttcaatttaacaatagtagacaagcaaatggaaattttgatatagccaacgaattcatctcaatattatcttctgcgaacggaacaagaaacgctcaattgctagagagctggaagattctcgaatcgatgaaaagtaaggatattaatattgttgaagtcgggaaacagtacctggagcaacagtttttacaatataccgacaatttatataagaaaaacatgaatgaaggattggccacaaatgtcaataaaatcaagtcattcattgatacgaagttgaagaaagcagacaaatcatggaagatttctaatttaactgttatcaatggtgttccaatatgggccttaatattttatcttttaagagcaggtctaatcaaggaagcattgcaagttctagtggagaataaggcgaatatcaaaaaagtagaacaatcattccttacttatttcaaagcatatgcttcttcaaaggaccacggcctaccagtggaatattccaccaagcttcatacagaatacaaccaacacataaaaagttcactagatggtgatccttatcgtctagctgtctacaagttgatcggaagatgcgacttgagtagaaagaacattcctgcagttactttaagcattgaagattggttgtggatgcatctcatgttgatcaaagaaaaggacgcggagaatgatcctgtttatgaaagatattccttagaagacttccagaatataataatatcgtatggaccatctcgcttctcaaactattacttacagacccttttgttaagtgggctctatggattggctattgactatacttatacatttagtgaaatggatgcggtgcatttggcaatagggctagcaagcttgaagctatttaagattgatagctcaacgcgcttgaccaaaaaacccaaaagggatatcaggttcgcaaacatactagctaattataccaagtcctttaggtattcagatcctagagttgctgtcgaatatttggttttaataactctaaatgaaggacctaccgatgtcgagttatgccatgaggcgttgagggagctagtattggaaactaaggaatttactgttcttttgggtaaaattggacgcgatggagctagaattccgggggtgatcgaagaaagacaacctttattacacgttcgtgatgaaaaggagtttttgcatacaattacagaacaagcagcaagaagggcagacgaagacggcagaatatatgatagtatattactgtaccagcttgctgaagaatatgacatagttattaccctcgtcaatagtttattaagtgatacacttagtgcgtcagatttagatcaaccattggttggacctgatgacaatagcgagacgaatcctgtcttgttggctaggaggatggcgtccatatattttgataatgctggtatatcgagacagattcatgttaaaaacaaagaaatttgtatgctgctcttaaatatctcctctatcagggagctatatttcaataaacaatggcaagaaacactatcccaaatggagttattggatttacttcctttctcagacgagctatctgctagaaagaaagcacaagatttctctaatttagatgacaacattgtgaaaaatattccaaatttgttgattatcactctaagctgtatatcgaacatgattcatatcttgaacgaaagtaagtatcaatcgtccacaaaaggtcaacaaattgattccttaaaaaatgttgcgagacaatgtatgatttatgctggtatgattcaatacagaatgccaagggaaacgtacagcactttaattaatatagacgtctctctatgatttttttaaatattgtatatttttgtttatatctatatatcagtatgcgcgcatacttagtaaaagtataaaaagccatttgc

SEQ ID NO: 1026 - DNA, 1017 bp, Saccharomyces cerevisiae
cacaattaagaggacttaacaagaaagacgagacataatggaacgactacagagattgatgatgaatagtaaggtggggtccgcggacaccggccgtgacgatacgaaagaaactgtttatatttcttcgattgcgcttttaaagatgctaaagcatggtagagctggtgttcccatggaagtcatggggttgatgttaggtgagtttgtcgatgattatacggttaacgttgtggacgtgtttgcgatgcctcaatcgggtaccggagtttctgttgaggctgtcgatgatgttttccaagcgaagatgatggacatgttaaaacaaacgggcagagaccaaatggtcgttggctggtaccactctcatccagggtttggctgttggctatcttctgttgatgttaatactcaaaaatcttttgaacaactaaacagcagagctgttgctgtcgttgttgaccctattcaatccgttaagggaaaagttgtcatcgatgcttttagattgattgacacgggcgcattgataaataacttagagcctagacaaacaacctccaacacaggcttattgaacaaggccaacattcaagccttaattcacggtctgaataggcattactattctttaaatattgattatcataaaaccgcgaaggaaaccaagatgttaatgaacttacataaagaacagtggcaatcaggtcttaagatgtacgattatgaagaaaaagaagaatcaaatttggctgctacaaagagtatggttaagatagccgaacagtactctaagagaatagaagaggaaaaggaattaaccgaagaagaacttaagacaagatacgttggtaggcaagatccaaagaagcacctttccgaaacagcagatgagacactagagaacaatattgtttctgtgctgacggcgggtgttaattcagtggcaattaaataaacaaattttataaagtcattatgcattaaataactagaaagcccactacatatatatta

SEQ ID NO: 1027 - DNA, 1879 bp, Saccharomyces cerevisiae
atttttttatcaagattttccagtttttttttttttttggcattgcttactatacgcgagggaggttcaattgacactttccgctacggcgattcttcagaaactgtgtcatcttttttccaggtcgagctgtaggaaaacctgggaaatataggtatatacctgatctgttgttggagtgatgtgccttgaaccaatctctcttgttgttttcggatccctggtgtttttctttggcttggtgaagtatttcaaacgtggagaacggcaaagaacaagaggaattttacagccagagtacaaagataagtattattacagtaaagaaaaaggggaagaaatgggcgaggtagcaaacgtaaatgaaattccggtcaagataagaaatcataagtatcctgcgaaagaacataacttgagggttaaagatttgttgttaaatcgcaatccgaagctatcaaagatatccacagcattttttattgctggtgaagaattagagggaaacaagtattgtgacaccaacaaagattttagacagaatagatatttttatcatttgtcaggtgttgatatacctgcttcggcgatattgtttaactgtagcacagataagctgacattgtttttgccaaacatcgatgaagaagatgtcatatggagcggtatgcctttgagtttggatgaggcaatgagagtgtttgacattgatgaggccttgtacatatctgatctggggaaaaaatttaaagaattgcaagacttcgctatctttacaaccgatttggacaatgttcatgacgagaatattgcaagatcactaattccttcagaccctaacttcttttatgctatggatgaaactagagcaattaaggattggtatgaaattgaaagcatcagaaaagcttgtcagatttcagacaagagccatttggccgttatgtccgcgttgcccatcgaactgaacgagttacaaatacaagctgaatttgaataccatgcaacccgtcaaggtggtcgttctttgggctatgaccccatttgttgttctggaccggcatgtggcactttacattacgtcaagaattcagaagatatcaaaggtaaacattccatcttaattgatgcaggtgcagaatggagacaatatacaagtgatatcaccagatgtttcccaacttcaggcaagtttactgcggaacatcgtgaagtttacgaaaccgttcttgacatgcaaaaccaagcaatggaaaggattaaacctggtgctaaatgggacgatttacatgcactgacacacaaggttcttattaaacatttcttaagtatgggtattttcaagaaagagttttctgaggacgaaatctttaaaagaagagcttcttgcgctttttatccccatggactagggcatatgttggggcttgatgtacacgacgttggtggtaatccaaactatgacgacccagatccaatgtttagatatttaagaatccgccgtcctttgaaagaaaatatggttatcactaatgaaccaggttgctactttaatcaatttttgatcaaagaatttttggaaaagcaccccgaaagattggaagttgtcgatatgagcgtattgaaaagatacatgtatgtcggtggtgttagaattgaagatgatatccttgttaccaaagatggttacgagaacttaactggtattacttctgaccctgatgaaattgaaaaaatcgttcaaaaaggtttgaagaaaccccgttcaggtttccacgtaatcgtttaggtattaacttttttttactcgcttctagaagtttagtatattcttttgtacacagaattgtatattttttttataatcttggattcacca

SEQ ID NO: 1028 - DNA, 2391 bp, Saccharomyces cerevisiae
ttttgaagcgctaaaacgttaacttcgattcatagcacaaaaggtaaataacttttttgaaatggcaagcatcggttcgcaagtgagaaaagctgcttctagtattgaccctatcgtcacggattacgcagtgggctactttaaccacttgtccggaataacttttgatgctgttcaaagtaagcaggtagatttgtccactgaagtgcaatttgtgtccgatttattgattgatgcgggtgcgtcaaaggctaaagttaaagaactatcggaaagtattttgaagcaattgactactcaactaaaggagaacgaagccaaattggaattgaccggtgatacgtccaagagattacttgatattaatgtcttaaagagtcataacagtaaatccgatatcaacgtctcattaagcatgctgggtgtgaacggtgacatcgaacatactggtagaaagatggaaacaagagttgatttgaaaaaactggccaaggctgaacaaaagatcgcaaagaaagtcgccaagagaaataacaaatttgttaaatacgaggcttctaaattgatcaatgaccaaaaggaggaggattacgattctttctttttgcaaatcaaccctttagaattcggttcatccgctggtaaatccaaggatatccatattgacactttcgacttgtacgttggtgacggtcaaagaattttgtccaacgcccaattgactctaagttttggtcacagatatggtcttgtgggccaaaatggtattggtaaatctactttgttaagggctctatctagaagagagctgaacgtccccaaacatgtttcgattttacacgtggaacaagagttaagaggtgatgatacaaaggctttacaaagtgtgctggatgcagacgtttggagaaaacaactattaagtgaagaagccaagatcaatgaaagattaaaggaaatggatgtattaagacaggaattcgaagaagacagtttagaagttaaaaaattggacaatgaaagagaagacttggataaccatttgatacagatttctgacaaattagtcgatatggaatctgacaaggctgaagctagggcagcatcaatcttatatggtttggggttcagtacggaggcacagcaacaacccactaattccttttccggtggttggagaatgagattgtccttggcaagagccttattctgtcaaccagatcttttgttgttagatgaaccttccaatatgttggatgtgccatccatcgcttatttagcagagtatttgaaaacatatccaaatacagttttgacagtttctcacgaccgtgcattcttgaatgaagtggctacagatatcatttatcaacacaacgaaagactagactattacagaggccaagatttcgataccttttacaccacaaaggaggaacgtagaaagaatgctcaacgtgagtatgataaccaaatggtttacagaaagcacttgcaagagtttattgacaaatacagatacaatgctgccaaatcacaggaagctcaatcaagaattaagaaattggaaaaattgcccgttttggagccacctgaacaagacaaaaccattgatttcaaattccctgaatgtgataaattgtctccaccaattatccaattgcaagacgtttcctttggttatgatgaaaacaacctattattgaaagatgttaacctggacgttcaaatggattccagaattgcccttgtaggtgccaatggttgtggtaagactacactgttgaagattatgatggagcagttaagaccactaaaaggctttgtatcaagaaacccaagattacgtataggctacttcactcaacatcatgtggattctatggatttgaccacgtctgcagtggactggatgtccaaatccttcccaggtaaaactgatgaagagtatagacgtcatctaggttcatttggtatcactggtaccctgggtctacaaaagatgcaattattatccggtggtcaaaaatctcgtgtagcattcgctgcattgtgtttaaataatccacacattttggttctggatgaaccttctaaccatttggataccactggtctagacgctttggtagaagccttgaaaaatttcaacggtggtgtcttaatggtttcccatgatatctctgttattgactctgtttgtaaagagatttgggtttcagagcaaggtactgtcaagaggttcgaaggtacaatttacgactatagagattacatcttgcagtctgctgatgctgcaggtgtggttaaaaagcattgattatttaggaagcacctcagaatatattttccatagaagcctaaattaagtatgcattcatagccccatga

SEQ ID NO: 1029 - DNA, 1675 bp, Saccharomyces cerevisiae
tggtgcaattgaaatacgagatttcgttctctaagaggatataaaaataaggaaattagccctacctatccttgtgttaaaatatgagcggagaaacgtttgagttcaatattagacattctggtaaagtttacccaataacactttccactgatgctacttcagcagatttgaaaagcaaagcagaggaattgacccaagtcccaagtgcccgccaaaaatacatggttaaaggtggcttgtctggcgaagagtccattaaaatatatcccttaatcaagccaggatcgacagtaatgctattggggactccagatgctaacctgatttctaaaccagccaaaaagaataatttcattgaagaccttgcgcctgagcaacaagtccaacaatttgctcaattgcctgttggtttcaagaatatgggcaacacctgttatctgaatgctaccctacaggctttatacagagtgaacgatttaagggatatgattcttaattataacccttctcaaggtgtgtctaacagtggtgcacaagatgaagagattcacaaacaaatcgttattgaaatgaagcgttgttttgaaaatttacagaataaaagtttcaagagtgttttgccaattgtgttattaaacacgctaagaaagtgttatccacaatttgctgaacgtgattcacaaggtgggttctataaacagcaagacgctgaggagttgtttacacaactattccatagtatgagtattgtttttggtgacaaattttccgaagatttcaggattcaatttaaaactaccatcaaagacacagctaatgataacgatattactgttaaagaaaatgaaagcgattctaaattacaatgtcatatttctggtactacaaatttcatgagaaatgggctcctggaaggtttgaatgagaaaattgaaaaaagatcagacttgactggcgccaattccatctatagcgtcgaaaagaaaatatcaagattaccaaagtttttaactgttcagtacgttagatttttctggaaaaggtcaaccaacaaaaaatctaaaatattgcgtaaggtcgttttcccatttcaattagatgttgcagacatgcttaccccagaatacgcagcagagaaggtaaaagttcgtgacgaactgagaaaagttgaaaaggagaaaaatgaaaaggaaagagagatcaaaaggcgtaaatttgacccatcatccagtgaaaatgtcatgacaccaagagaacaatatgagacacaagtggctcttaacgaaagtgaaaaagatcaatggctcgaagagtataagaaacattttcctccaaacttggaaaaaggtgaaaacccatcttgtgtttataacttgatcggtgtcattacacatcaaggtgccaattctgagtctggacactatcaagctttcataagggacgaactggacgaaaataaatggtacaaatttaatgatgataaagttagcgttgttgaaaaggaaaaaattgaatctttagccggtgggggcgaaagtgatagtgcactgatcttaatgtataaaggatttggtctgtaagtccatttttcattttttcaaaattaatagttttttcggaatatacatatacatttttttacatacacataaaaatatttctctccctttta

SEQ ID NO: 1030 - DNA, 1680 bp, Saccharomyces cerevisiae
tcattgccttcgttcacgaccctcccttattaatcagttagtaatagtgttccagttaactctgtatccttttctcttcggcctgacaatgtctgattcatcacctactatcaactttattaatttcaatcaaaccggaacgtgtatttcccttggaacgtcgaaaggtttcaaaatattcaattgtgagcccttcggaaaattttattcagaggacagtgggggctatgctatcgtcgagatgttgttctccacctcgttactagccctcgttgggataggcgatcaacctgcgctttcaccaaggagattgcgtataatcaacacaaaaaaacattctattatctgtgaggtgactttccctacttctattctgagtgtgaaaatgaataagtctcgattggtggtacttttacaagagcagatttatatttatgatatcaacaccatgagactattgcatactatagaaacaaaccctaacccacgtggccttatggctatgtctccttcggtagccaacagctatttagtgtatccatcaccaccaaaagttattaactccgaaattaaagctcatgccaccacaaacaatatcacattgtcagttggtggcaacacagagaccagtttcaagagagatcagcaagatgctggccatagtgacattagcgacttggatcagtattcgagctttactaagagggatgatgcggatccaacaagcagtaacggcggtaacagcagtataataaagaatggtgatgtgatcgtattcaacttggaaacattacagccaaccatggtcatcgaagctcataagggcgagattgctgcaatggcaattagttttgatgggacactaatggctaccgcctctgataaaggtactatcatcagggtctttgacattgaaacgggtgataagatctaccaattcaggagagggacgtacgcgacaagaatttactccatatcattcagtgaagatagccagtacttggcggttaccggctcttccaaaaccgtgcatatcttcaaattggggcattcaatgagcaacaataaactagacagcgatgatagcaacatggaagaagctgcagccgatgattcatcgctcgataccaccagtatcgatgcgctgagtgacgaggaaaacccgacaagactcgcaagagaaccatatgtggatgcatcaagaaagacaatgggtaggatgatacgttactcttctcaaaagctatcccgaagagctgccagaacattgggtcagattttccccatcaaagttacatcgttgttggaatcctcgcgccattttgcgtctttgaaacttcccgttgaaaccaattcccatgtaatgaccatatcaagtataggctctccaatagatatagacacatccgagtatccggaactcttcgaaactggcaattccgcaagtacagagtcctaccatgagcctgttatgaagatggtccccatcagggtcgtttcctcggatggatacctatacaactttgttatggacccggagagaggcggcgattgcttaatattgtcacagtattccatcttgatggattgatcacggaagtgtctcgcgctgccttccgtacgtcacaacgcatacacaatatagtttatataaactcctgcgtataatctatccttttg

SEQ ID NO: 1031 - DNA, 3210 bp, Saccharomyces cerevisiae
tgcacatagtttttttcaactgcttttcctcgaggtcacccaaatatacaacgagatgccagttgagtttgctaccaatccttttggcgaggccaaaaatgcaacttcactgccaaaatatggtacacccgtaactgccatttcatctgtgctgttcaataacgtggactccatttttgcttacaagtccttttctcaacccgatttgctacaccaagatctaaaaaaatggtctgaaaagcgtggtaacgaatcacgtgggaagccatttttccaagagctggatatcagatctggcgctggtttggctcctttagggttttctcatggattgaagaacactacagcaattgttgctccagggttttcgctgccatacttcattaactctttgaaaaccgtctctcatgatggtaagtttcttttgaatgttggtgctttaaactacgacaatgctaccggctctgtcaccaacgattatgtaaccgcattggatgctgcttccaagctgaagtatggtgtcgtgactccgatttccgctaacgaggtacaaagtgtcgccttactggcattggcgattgccactttcagtaataactccggagctatcaatttatttgacggattaaactactcgaaaaccgtcttgccgttggtcgaatctgttcctgaggcatctattttggcaaaactatccaaagttattgcaccagatgctgcctttgatgatgtcttggataagtttaatgaattgactggattgagactacataatttccaatactttggtgctcaggatgctgaaactgtgtttatcacttatgggtctttagaatccgaattgttcaactctgcgattagtggtaataattccaaaatcgggttaatcaacgtcagagtgccattaccttttaacgttgctaagtttgtcactcacgttccatccactaccaaacaaattgttgttataggccaaactttggatggttcttcgccttctttcttgagatctcaagtttcagccgccttattttaccacggccgcacctcaattagcgtttctgagtacatctatcaaccagatttcatttggtccccaaaagctgtcaaatcaattgtatcgtcattcatccctgaattcacttacaatgccgattcatctttcggcgaaggattcatttattgggcctctgataagagtatcaatattgatgttgcctccaaacttgtgaaagctctgtctttggaagatgggaaatttgtgtctttgagaacgaaatttgataacttggctaatgctggtaccttccaagctcaatttgtgacctcgaaagaacagatacctgtttcaaacatcgattctacgaaattatcagtcgttgaagatgtcagtttattgaagcatttagacgtagctgctaccgtcgcagaacaaggttcaattgcgttggtttcccaaaaggcagttaaagatttggatttaaattctgtagaaagttacgtcaagaatttgggaattcctgaatcattcctaatatctattgcgaagaaaaacatcaaattgtttatcatcgatggtgagaccactaacgacgagtccaaattgtccttgtttatccaagccgttttctggaaattggccttcggtctagatgtcgcagaatgtaccaaccgtatctggaaaagcattgattcaggtgcagacatttcagcagcctcgatttctgaatttctcactggtgcattcaaaaacttcctcagtgaggttccgctagcgctgtacactaaattttctgaaataaacattgaaaagaaagaggatgaggaagagcctgcagctttaccaattttcgttaatgaaacatctttcctcccaaataacagtaccattgaagaaataccattacctgagacctctgagatctctgatattgccaagaagttgtccttcaaagaggcatatgaagttgagaataaactaagacccgatttacccgtcaagaacttcgtcgtgaaagttaaagaaaatagacgtgttacgcctgctgattatgatagatatattttccatattgaattcgatatttctggtactggaatgacttatgacatcggtgaagccctcggtattcatgccagaaacaatgaatctttggtcaaagaattcttaaccttctatggtctaaatgaatccgatgttgtcttagtccccaacaaggacaaccaccatttgttagaaacaagaaccgtcttacaagcatttgtggaaaatttggatattttcggtaaaccaccaaaaagattttacgaatcattgattccatatgcctctaacgaagaggagaagaaaaaattagaggatttggttactcctgccggtgcagtagatttgaagagatttcaagatgtggagtattatacatatgctgacatttttgaattgttcccatctgttcgcccatctcttgaggaacttgttactatcattgaaccattgaagagaagagaatactcaattgcctcctctcagaaagttcatccaaatgaagttcatttattgatcgttgttgttgattgggtggataataaaggaagaaaaaggtacggtcaagcttctaagtatatctcagaccttgctgtcggttcagaattggtcgttagcgttaaaccatctgttatgaaattaccaccatctccaaagcaaccagttattatgagtggtttaggtactggtttggcaccattcaaggccattgttgaagagaaattatggcaaaagcagcaaggttatgagattggtgaagtcttcctatatctaggttcaagacacaaaagagaagaatatttatatggtgagttatgggaggcttacaaagatgcaggtattatcacacacatcggcgctgctttctcaagagaccaacctcaaaaaatttacattcaagatcgtatcaaagagaatttggatgaattaaaaactgcaatgattgataataaaggttcattttacttgtgtggccctacttggccagttccagatattactcaagctttgcaagacattctggctaaagacgccgaggaaagaggcatcaaagtcgacttggatgccgcaattgaagaattaaaggaagcatcaagatacattttagaagtctactaaattaatatagtaataaaaactaaatatctatttattgaacctgtctt

SEQ ID NO: 1032 - DNA, 748 bp, Saccharomyces cerevisiae
tatttgttcggtcacatatatttaactagcattgaggatggcaggtatcaagttgacgcataagctttatcagtattatcaattagccacaagctttttgtatgctgcattattgatacggtggctgatattaatgccactggtagggtctcggtttttaccgggaggaatccacgaattcttgatatatttgatgttttattccagcatcatggaagttatttggttgcttagattccacgggttcaaatatggtttgctttcaagaacgtttttgaaagacctaaattttatctatttagtcagcgtgatccatttttatgacgattatgagcatgcattgatcctcaagaatgcatcatattctagtttcattatttccttatctttatcacaggcatattgccattggtgcaaactttttaaacgtaagggcgtaaaggaaagaacacttgtatggaaggttaacacatttgttacattgccaattctctacctgagtgaatttgcattgctactattaaatatccaggttaagaactatcattctaccccgactttggacataatcaacagggtggttttactagcatacttccctgtactactaacagcatacaaaaaactattaacaaaatgagcaatcttattggtttaatacatatgtatacacatatacatatctgtacatactcataaatatctggatagttcgtcagccatttcatttgcaaaagcatcagcttca

SEQ ID NO: 1033 - DNA, 1052 bp, Saccharomyces cerevisiae
aagaacagcacccgacatggctaaccagaactctgacctttacaagcaaatcactgccggcagtgtagctgctgtgtttcaaacgacaatgacatacccatttgagtacttaaagactggtttacaattgcaaccgaagggtaccgctttcgaaatcattttacctcagattaagtcgtactttgttggctgctctgccctaaacgtggccgcatttggtaagactattttaaggttcgttacgttcgacaagttatgccactccctgaataataacattgataataatgataattttcaaagactgactggttataaccttttgatcgctggtacgttgacaggaatagtagaaagtttgtttattatcccttttgaaaacataaaaaccacccttatccaatcggcgatgatcgatcataaaaaattagagaagaatcaacctgtagttaacgcaaaggcaacctttcacaaggtggcgactaaatctactcctgtggctcgtatcgagaaactacttccagcggtaaaacacatgtatcaaacaagaggccctgctgcgttcgtccagggaacaacagccaccatatttaggcagatagctaacacctctattcaatttactgcatacacagcatttaaacggttgttacaagcaagaaacgacaaggcatcctcagtaataacggggttagccacatcttttacactcgtggcaatgactcagcccattgacgtcgtaaaaacaaggatgatgagtcaaaatgccaaaactgaatataaaaataccttaaattgcatgtatagaatatttgttcaagaaggcatggccacattctggaagggctccatctttaggtttatgaaagtcggtatttcaggaggcttaacgttcactgtttatgaacaggttagtttgttactaggcttctcttccaggtcttgataattttgtggatcttttactcttttctgtacataaattgccactatttaattattttctctacggtatcttttttagaacaaataactttcaattcttgattgaa

SEQ ID NO: 1034 - DNA, 652 bp, Saccharomyces cerevisiae
tgaagactaatattttagccagattgcagtgtttcagtgatcttaaaagtctttttcatttctagccgcattgaattctttaaagcaaaccattaaggagtacttccccaggtttttaaccgataataagagtaagataaaagtacaagaagacagggaaatgattgctacacctataagattagcaaagagtgcatatgagccgatgataaaattcgtcggtacaaggcatcccttagtgaagcatgcaactgaggtcgttgttcatccttgcgctaccaacggaatgttacctggcagcaaagagtgtattccagtgagtaaattcatggaaaattataaaccattccgtgtagtgccaataaagcatagcgctaatgctggtctcagctcgtcaaagacctctgtattcgttaacaggccattgcaaaaagatgagcttgcttccattttcgagctacctgctaggtttcggtacaaacctattaacgagcatgaattggagagcataaatagcggtggtgcatggtgaaggatagatgcagtaatattatgatttttttttgttattttatagtttctttacacatatcattatatctatgtaaaaacgtagttacttaggaagagagaagagtgatgatattatgaa

SEQ ID NO: 1035 - DNA, 1066 bp, Saccharomyces cerevisiae
gtactattgaagtgagataagaagccatcgtaatgccctcgttagccgaattgaccaagtcgttaagcatagcctttgaaaacggcgattatgccgcgtgtgagaagctcttgccccctatcaagatcgaacttatcaagaataaccttttaatacctgacttatccattcaaaatgacatctatttgaatgatttgatgattactaaaaggatcctggaagtaggtgcccttgctagcatccaaactttcaattttgacagcttcgagaattacttcaaccaattgaagccttactactttagcaacaatcataaattatctgaatctgacaagaaatcgaagctgataagtctgtatttgttgaacttattgtctcagaataacacaaccaagtttcactcggaattgcagtatctagataaacatatcaagaacttggaagacgattcacttttgtcttaccctatcaaactagacagatggctcatggaagggtcgtaccagaaagcatgggatcttctgcaatctgggtcgcagaatatatcagaattcgactcttttaccgatatcctaaaatcagctataagagacgaaattgctaaaaataccgagctatcctacgactttctccctctctccaacataaaggctttgctctttttcaacaacgaaaaagaaactgaaaaatttgcactagagagaaactggcctattgtcaactcgaaagtttacttcaataaccaatcaaaggagaaagctgattacgaagatgaaatgatgcatgaagaagaccaaaagacaaacattatcgaaaaagcaatggattatgccataagtattgaaaatattgtgtaatatttgtatatataatatgtgcacaaaattactacaaaataaacaactttttctctcccggagaacaaagtaagtggaaaaaattatactaataacaatctaaaaatgtttattagctaggattatacacataaatatatatatatgtgtgtgtctatatttacatatactagaccgcaaaaaaaacataagggcatcactcataagaa

SEQ ID NO: 1036 - DNA, 1493 bp, Saccharomyces cerevisiae
atgattgatcgtaccgagttatcgaagtttggtattactacgcaactgtctgttattggacgtaatccagatgaacaaagtggctttgttaatccacctttgtataaggggtcaaccatcattcttaaaaaacttagtgatttagaacaaaggaaaggaagattttacgggacagcaggttctccaactattgacaatttagaaaatgcctggacgcatttaaccggcggtgctgggacagtgctatcagcttctgggcttggttctatctctttggcgctattggccctttcgaaagctggtgatcatatcttgatgactgatagtgtctacgtgccaacacgtatgctatgtgatggtttattggccaagttcggtgttgaaacggattattatgacccatcaatagggaaggatatagaaaaactagttaagccaaatacaaccgtcattttcctcgaaagcccgggttctgggaccatggaagtacaggatattccagctttggtctctgttgccaaaaagcatgggataaagacaattctagacaacacatgggcaacgccactcttttttgatgctcatgcgcatggtatcgatatttcggtagaagctgggacaaaatatttgggtggtcattcagatcttcttattggtctggcctccgcaaatgaagaatgttggccgctattacggtcaacttatgatgcaatggcaatgttaccaggtgccgaggactgtcaattagcattgcgaggaatgcgtacattgcacttaagattgaaagaggtagaaagaaaagccctggatttggctgcttggctcggaaatcgagatgaggttgaaaaagtgcttcaccccgcctttgaagattgtcccggacatgaatactgggttcgtgactacaaaggttcttcaggcttattttccattgtccttaaaaatgggttcacaagagctggtctggagaaaatggtagaagggatgaaagttttgcaattgggattttcatggggtggctagaaaagcttcaacatggccttacaaaggttttgcactaagaatacaagtgggtctcgaagaatttgaagatttaaaaagggattttgagttaggctttgaacgtctcgcagaagaaatttctttgaatcctttacaaatctgattttttttccttttttttttggatttccaagcaatgttgtttgagaaatgaatgaaatttttgactatagcttgtcttaggcaggctggagtagacaaccatctagtagccaatgtttgcccagttaatatatggttcaattttctagctgtatcatattatggatgatgaagcagataatctttcttttttctgtatgtctgattgtaataaagaggcttaccatattgtgaatgcatttcaatgacactgcataatgaagtcattgtatttagaaaagtaataattttgtattgtataaagatagaaaaaacgtatatcgtactta

SEQ ID NO: 1037 - DNA, 1146 bp, Saccharomyces cerevisiae
atgaaagagaatgaacttaaaaatgagaagagtgtagatgtattatccgtcaaacagctcgaatcccaaaagactgttctacctcaagatcttttcagaagcagctttacctggttttgttatgaaatttacaagtccttagtgtttcgcatctggatgctattatggctaccacttagcgtctggtggaaactttccaacaattggatttacccgcttatggtttcacttcttgtcctgttttggggaccagtatttgttcttgttatttttagactttctcgtaaacgttccttatcgaaacaactcactcagttttgcaaagagattactaaaaacacaccaagttcggatcctcatgattgggaagtcgttgcagcaaatctaaattcgtacttctatgaaaataaggcttggaataccaagtacttttttttcagtgccatgagctgccaagaagcattcagaacaacccttctcgaacccttctctttgaaaaaagacgaagctgccaaggttaagtcatttaaggattccgtcccttacattgaagaagcattggaagtttattttacagaagttgaaaaacaatggaagttgtttaattctgagaaatcatggagccctgttggcctggaagatgctaaacttcccaaggaagcttaccgatttaagcttacctgggttctcaaaaggattttcaaccggcggtgtttaccactcttccttttttatttgcataatgtcttcatttcacgaaatgatggcactatagcacgtcccttgtttcttgtggtgctgttttttatcatgacgagagatttccggaatatgaggatgatcgttttatccgtgaaaatggaacacaagatgcagtttttatcgactattataaatgagcaagaaagtggtgcaaatggatgggacgaaattgcaaagaaaatgaataggtacttgtttgagaaaaaagtctggaagaatgaagagtttttctttgacgggattgactgtgaatggttttttagccacttcttctaccgcgttctctctgcaaagaaatctatgcgggctctatcattgaatgtggaactatggccatatattaaagaagcgcaattatcctgcagtgaggagtccttagcgtaa

SEQ ID NO: 1038 - DNA, 1533 bp, Saccharomyces cerevisiae
tggtgcccccacagatttcacgtgagagacgatgcctgaggaaaatccgctacgctgctgcctaatctgtatttacaggctatgtagttcgtttgccactctgctagattctcttggtatcttttatttcttctcttaggcagatcttatataaaagggcaaagctttttttgctcccatacttgctgaaaatttttcagatcttactcttctggtagtggtgtcctcagaagagctaacttagccgattattttcaatttagtgcagtatgatgtctactatctaccgtcatttatctaccgctagaccggctttaactaaatacgcaaccaatgccgcagttaaatcgacaactgcatcctcagaagctagtactctgggtgctctacaatatgcattgtctttagatgaaccaagtcattcgtggacaaaatcgcaattaaaagaaatttatcataccccactgctcgaacttactcatgcagcacaattgcagcacagaaagtggcacgatccaaccaaagtgcaattgtgcacattgatgaacatcaaatctggtggttgttctgaggactgtaagtattgtgcgcagtcttcgagaaacgataccggtctaaaggctgagaaaatggttaaagtggatgaagtgattaaagaggcagaagaggccaaaagaaacggatctactagattctgcctaggtgctgcatggagagacatgaaaggtcgtaaatcagccatgaaaagaattcaggaaatggtgaccaaagtgaatgatatggggctagaaacgtgtgttactttaggtatggttgatcaagatcaagcaaagcaattgaaagatgcaggtttgactgcatacaaccataacatcgacacttccagagaacactatagtaaggtcatcaccacgagaacctacgacgacaggttacagaccatcaagaatgtccaagaatctggaataaaagcctgtaccggtggtattttgggtctcggtgaaagcgaagacgaccatataggattcatctacacattatccaatatgtctcctcatcctgagtccctaccaattaatagactagttgctatcaaagggactccaatggctgaggaacttgccgatccaaagagtaaaaagttgcaattcgacgaaattttgagaaccattgccacagcgagaatagttatgccaaaggccattataagacttgccgctggtcgttatacaatgaaagaaacagagcaatttgtctgtttcatggcaggttgtaacagtatcttcaccggtaagaaaatgctgacgacaatgtgtaacggttgggacgaagacaaggcaatgttggctaaatggggattgcaacctatggaggcatttaagtacgacagatcttgaagatagggatatgtggataattctacgattctaactgtacatttctcccttatttattaagaaaacctatatatatatatatttacctatttattctgccatcgttagctggcgttttatcttttatgcatccaat

SEQ ID NO: 1039 - DNA, 1361 bp, Saccharomyces cerevisiae
caacaagagtaacgatgttttctttacctaccctaacctcagacatcactgttgaagtcaacagttccgctaccaaaaccccattcgtccgtcgtccggtcgaaccggttggtaagttctttttgcaacatgctcaaagaactttgagaaaccacacctggtctgaatttgaaagaattgaagctgaaaagaacgtcaaaaccgttgatgaatccaatgtcgacccagatgagttgttattcgacactgaattggccgatgaagatttactgactcatgatgctagagactggaaaactgccgatttgtatgctgctatgggtttgtctaagttgcgtttcagagctactgaaagtcaaatcatcaaggctcacagaaaacaagttgtcaagtaccatccagacaagcaatctgctgctggtggtagtttggaccaagatggctttttcaagattattcaaaaggcctttgaaactttgactgattccaacaagagagctcagtacgactcatgtgattttgttgccgatgttcctcctccaaagaagggtaccgattatgacttttatgaagcttggggccccgttttcgaagctgaagctcgtttttctaagaagactcctattccttctctaggtaacaaagattcttccaagaaggaagttgaacaattctatgctttctggcacagatttgactcctggagaacctttgagttcttggacgaagatgtcccagatgactcttctaacagagaccacaagcgttacattgaaagaaagaacaaggccgcaagagacaagaagaagactgctgataacgctagattggtcaaacttgttgaaagagctgtcagtgaagatccccgtatcaaaatgttcaaagaagaagagaagaaggaaaaggaaagaagaaaatgggaaagagaagccggtgccagagctgaagctgaagctaaggccaaggccgaagctgaagcgaaggctaaagctgaatctgaagccaaggctaacgcctccgcaaaagctgacaaaaagaaggctaaggaagctgctaaggccgccaagaaaaagaacaagagagccatccgtaactctgctaaggaagctgactactttggtgatgctgacaaggccaccacgattgacgaacaagttggtttgatcgttgacagtttgaatgacgaagagttagtgtccaccgccgataagatcaaggccaatgctgctggtgccaaggaagttttgaaggaatctgcaaagactattgtcgattctggcaaactaccatccagcttgttgtcctacttcgtgtgaataccgtaagaaatggaatagaatatatacgaatgtatacgaata

SEQ ID NO: 1040 - DNA, 1137 bp, Saccharomyces cerevisiae
acgactcaaaaaaagtgaaaacaaaactgaaaggatagatcaatgtcttacagaggacctattggaaattttggcggtatgccaatgtcatcatcgcaaggaccatactctggcggtgcacaattcagatcaaaccagaaccaatccacttctggcatcttaaagcaatggaagcattcttttgaaaagtttgcctccagaattgaggggctcactgacaatgcagttgtttataaattgaagccttacattccaagtttgtcaagatttttcattgtggccaccttttatgaagattcgtttaggatcttatcacaatggtcagatcaaattttttatctgaataagtggaagcattacccatacttctttgtcgttgtgtttctagtggttgttaccgtttccatgttgattggcgccagtttgttagttttaagaaagcaaaccaattatgccaccggtgtgttatgtgcttgcgttatttctcaagcattagtttatgggttgtttacgggttcatcatttgtcctaagaaactttagtgttattggtgggttgttaattgcattcagcgattcaattgttcaaaacaagacaacattcggtatgcttcctgaattaaacagcaaaaacgacaaagcgaagggttacctgttgtttgctggtagaattttaattgttttaatgtttatcgctttcactttcagtaaatcatggtttactgttgttttgaccattatcggcacaatatgtttcgccattggttacaagacaaaattcgcatccattatgttgggtttgatactaactttttacaatatcacgctaaacaactactggttttataacaatactaagagagatttcttgaagtatgagttttaccagaacttaagcatcattggtgggcttctattagttactaatactggcgctggtgaattatccgttgatgaaaagaagaagatttactagattgtaaaggaaatcttttctttatgtcccttctgttcactcatcttctaacaatctatttcgttttgccttcttgtgatcgctttcaataccctgctagctcacatatatacttttcttactgtcatatctacataaaagatttctttttgtataggcgca

SEQ ID NO: 1041 - DNA, 1102 bp, Saccharomyces cerevisiae
gggaagtgtagcataataggggaagatggcagtaaaacataaatccgagagccttaagcacgaagagggggctgccaaaaaggcaaagacaggcctattgaagctaaaaaaaatcatggatatagaatctaatgtggtcaaatattccatatgcataccgacaactgttatcgacaattgtaataatttggagcaagttacatttactgcatatcaaatagctcggacagctgtattgttcaatgttcaagaaatcatagttctagaccagtcaaaagataaaaagcatgaaaaaaaatcaagatcaaaggagactatctctgattgtttattacttgccacactattacaatattttgtaacgcctccaaacttactggatactacattcaaaaaaaaaaacaagttatatttaaagtgtgcatctacctttccgccattgaaccagctaccttttatgaacgcatctgccgaacaacactacaaggaaggcttatcaatcgcacgagatagctcaaaaggtaaatctgatgatgctctaacaaatttggtgtatataggaaagaatcaaattattacgttatctaaccaaaatattcccaatactgcgcgtgtaacagttgatacagagcgcaaagaagtagtgtcacccatagatgcttacaaaggaaaaccactcggctatcatgttcgaatggcaagcactttgaatgaggtgtccgaaggttacacaaagatcgtttgggtcaacagtggtgacttccactacgacgaagagttgtcaaagtaccacaaggtagaaacaaagctaccatacatcgcaaaactgaaaaaaagttcaacatcagaaaaaccctgtaatatcctgcttatcttcgggaaatggggccatttaaaacgttgtttcaggagatctgacttagaatcctcttctttgcatcattacttttctggtcaactgcaattccctgcttccgtaccccagggaaatatacccattcaagatagcctacccatagctcttaccatgtttcagcgttgggcaagttgaaataaatagcaattaataactgatattactatttatgttatataatcatcg

SEQ ID NO: 1042 - DNA, 1141 bp, Saccharomyces cerevisiae
accaaaaagaaaaacggtcaaagatgcgtttctctactacactcgctactgcagctactgcgctatttttcacagcctcccaagtttcagctattggtgaactagcctttaacttgggtgtcaagaacaacgatggtacttgtaagtccacttccgactatgaaaccgaattacaagctttgaagagctacacttccaccgtcaaagtttacgctgcctcagattgtaacactttgcaaaacttaggtcctgctgctgaagctgagggatttactatctttgtcggtgtttggccaacagacgacagtcattacgctgctgaaaaggctgctttgcaaacctatttgccaaaaattaaagaatccactgttgctggtttcttggttggttctgaagccttataccgtaacgatttgactgcctctcaattatcagacaaaattaatgacgtccgtagtgtcgttgctgacatttccgattctgacggaaagtcatactctggtaagcaagtcggtactgtcgattcctggaatgttttggttgctggttacaattctgccgttatcgaagcttccgattttgttatggctaacgcgttctcctactggcaaggtcaaaccatgcaaaatgcctcttactcattctttgatgatattatgcaagctctacaggttatccaatctactaaaggttctaccgatattaccttctgggttggtgagaccggttggccaactgatggtaccaactttgaaagttcttacccatctgttgacaacgccaaacaattctggaaagaaggtatctgttccatgagagcttggggtgttaacgttattgtttttgaagcctttgatgaagattggaagccaaacacctctggtacctctgatgtcgagaagcactggggtgttttcacttcaagtgacaatttgaaatactccttggactgtgacttttcatgaacgctttaaaaatactctttaaacaagaatggctttttccttctgtttaggtgaggaataagcaaaaagtaacaaaaaaaaatgttatcccttcttttcttccttatttaggctttattttatctttcacttcttttacgtatttgaaatatccttcggttttaggattttcactt

SEQ ID NO: 1043 - DNA, 1242 bp, Saccharomyces cerevisiae
ctaaatccaactaagtcattcttttacatctacaatcgtttatatactagcaagccataccgaaaagcaaactagaaaaatatgcgtctctctaacctaattgcttctgcctctcttttatctgctgctactcttgctgctcccgctaaccacgaacacaaggacaagcgtgctgtggtcactaccactgttcaaaaacaaaccactatcattgttaatggtgccgcttcaactccagttgctgctttggaagaaaatgctgttgtcaactccgctccagctgccgctaccagtacaacatcgtctgctgcttctgtagctaccgctgctgcttcctcttctgagaacaactcacaagtttctgctgccgcatctccagcctccagctctgctgctacatctactcaatcttcctcttcctcccaagcttcttcctctagttcttccggcgaagacgtcagcagctttgcctctggtgtcagaggtatcacttataccccatacgagtccagcggtgcttgtaaatccgcttcggaagttgcttccgatttagctcaattgactgacttcccagtcattagattgtacggtaccgactgtaaccaagttgaaaatgttttcaaggctaaggcttcgaaccaaaaagtctttttaggtatttactacgttgaccaaatccaagacggtgtcaacaccatcaagtctgctgttgaatcttacggttcttgggacgatgtcaccactgtttccattggtaacgaattggttaacggtaaccaagctaccccatcccaagtcggtcaatacattgactctggtagatctgccttgaaggctgccggttacactggtccagttgtttctgttgatacttttattgctgtgatcaacaaccctgaattgtgtgactactccgactacatggctgttaatgcccatgcttactttgacaagaacacagttgcccaagactccggtaaatggttactagaacaaatccaaagagtctggactgcttgtgatggtaagaagaatgttgttatcactgagtctggttggccatcaaagggtgagacttacggtgttgctgttccatctaaggaaaatcaaaaggacgctgtttccgccattaccagctcctgtggtgctgataccttcttattcactgccttcaacgactactggaaggccgacggtgcttacggtgttgaaaaatactggggtattctatccaatgaataa

SEQ ID NO: 1044 - DNA, 990 bp, Saccharomyces cerevisiae
taaagtaaagaagtgtaagatggttgaggaaaattccagagttttgattgttcttccttatacaccgcctagtgctactttgcagaggattatagggcaaactattccgttcttaagagaatgtcaaagtcaactagacatcgtgattgtacctgaattcaaaacctcattccagttggattctgcgctagggaagatgtacagtattaccagggatgtccttttgggctatggaatgatcaacagcggaatcaacatcatattcaacaatattcatttcgtcgagagtaatttgcaatggaaagtggttttattgccacaggaatccacttttgaaacttggaagctagagttgggacaaggacaataccatagtatagaacattatgcattacacgataatataatggaagagatagaaggtcccaaagatgctaacaaatttcatgtcaccgcattgggcggaacgttcgaccacattcacgatggacataaaatattgttgagcgtctctacattcatcacgtcacaaaggttaatttgtggaattacgtgcgatgagctcttgcaaaacaagaaatacaaagagttgattgaaccttatgatacacgatgcaggcacgtacatcaattcatcaagttgttaaaaccggatctctccgtagaactagttcccttaagggacgtgtgcggccccacagggaaagtacccgagatagaatgtttagttgtgagtagagaaaccgtcagtggggcagagactgtgaataagactaggattgaaaaaggcatgagcccattggcagtacatgtggttaatgtacttggaggaagggaggaagacggctggagcgagaagttaagcagcacggaaatcagacgcctacttaagtcctctgcttcgccaacgtgcactccacaaaacccttgcgtataaacatatttttgtatattttattgttgtagttcactattattttattgttagta

SEQ ID NO: 1045 - DNA, 749 bp, Saccharomyces cerevisiae
atgtctaaagacacgcatgatgatgaactgccgagctacgaggacgtaatcaaggaagaggagagattgcaatctcaaccgccacgaccaccaagaccagcagctaacttggcgcaagggcaccaatcaagaccccaccaaaggccctcgacaatgccagcaacgtcctcatcccaaacatatgctcactcacactcttatacgcctacaagttcccaaccacggcctccaccgaggccacaacagaatcctagcttgccctggacataccctcccaggttttactgttccaagtgtggaaatacgggttacaagttgaagaatggacgatcttgcaagtcgtgttggaggaggtttgcacctcaaaataacgttgtttctgcaccgacatattacacaaactatacaatgcccgtgtacaccaacgcatggcagggtaataggcccttgtacgttcaaccaggggatcctcgcctgggtggcgtgctatgtggtgaatgcagagggtccggacgcaccagattcctgttggacgaagatatatgtcctctttgtcatggtgtaggcagaattatcacccagcctcaacgctattagcgcatgaaaatttaggatttggatgacccggtacggccttagtagaaaagctgtgtcgctcaccgaaaagaaaaaagaccgaacaactgtaggatgaaaagcatattttaatgctcctaattttcaaacatgtctattacatacttatcaca

SEQ ID NO: 1046 - DNA, 1007 bp, Saccharomyces cerevisiae
taatgctcctaattttcaaacatgtctattacatacttatcacataatccgactgatttgcccttctttaacttctttcatttatttttacggtgccaaccgtctgatcgatatagcatccgttcataaaatattatacgactccatcctcaatcgtgattgtgcgtgcgtgactcattttttgttagaaccaatactttcaatcatcccaaaatgcataacatccaattagtgcaagagatagaaagacatgaaaccccgttaaacattagacctacctctccatacactttaaaccctcctgtcgagagagatgggttttcttggccaagtgtgggtacaagacaacgtgcagaggaaactgaagaggaggaaaaggaacgaattcaacgcatttcaggcgctatcaagacaattttgaccgaactgggtgaagatgtcaacagagaaggtctactagatactccacaaagatacgctaaagccatgctttatttcactaaaggttaccaaacgaacattatggacgatgtcattaagaatgctgtctttgaagaagatcatgatgaaatggttattgttcgtgatattgaaatttactcgttatgtgaacatcatttggtgccatttttcggcaaggttcatatcgggtatataccaaataaaaaagtcatcgggttaagtaagttggccagattggcagaaatgtatgcgagaaggctccaagttcaagaaagacttacaaagcaaattgcaatggccctaagtgatattctaaaaccattaggtgtagccgttgttatggaagcttctcatatgtgcatggtttcaagaggcattcaaaaaacgggatcttctacggtaacttcttgtatgcttggagggtttagggctcataaaacaagagaagagtttttaactcttttaggaagaagaagtatttgaaaaaaaaaaataaaagcgacgatatatcgtgtatgtattaactaaattaatagagatataca

SEQ ID NO: 1047 - DNA, 2487 bp, Saccharomyces cerevisiae
gcatctttgtggaggaataaaacttgaaaaaaaagcggaaatttacaacaagcatgtctttcctcatttcctttgataaatcgaagaaacatcctgcccatttgcagttagcgaacaatttgaagattgccctagcacttgaatatgcaagcaaaaatttaaagcctgaagttgacaatgataatgctgccatggaattgcgcaatacaaaggaacctttccttttgtttgatgctaacgctattctaagatatgtcatggatgattttgaaggtcaaacttccgacaagtatcaatttgcattggcatctttacaaaacctgttatatcataaagaattacctcaacaacatgtcgaggttttgacaaataaggccattgaaaattacttggtcgaattaaaagaaccattgactactacagatttgatcctgtttgctaacgtttatgctctaaattcttctttagttcattctaaattcccagaattgccatccaaagtgcataacgctgtagcattggctaaaaagcatgttccacgtgattcttcttctttcaaaaacatcggcgcagtgaaaatccaagctgacttaacagttaagccaaaggattcagaaattttgcctaagccaaacgaaagaaacatcttgatcacttcggcattaccttatgtcaacaacgttccacacttgggtaatatcatcggtagtgttctttcagcagacatttttgctcgttactgtaagggacgtaattataatgccttgtttatttgtggtactgatgaatatggtactgccacggaaactaaagctttggaggaaggtgtgacaccaagacaattatgtgacaaatatcacaaaatccacagtgacgtttacaagtggttccaaattggatttgattatttcggtagaactacgacggacaagcaaacggagattgctcaacatatttttacaaagctaaattcgaatggttatctagaagaacaatctatgaagcaattgtactgtccagttcataattcttatctggctgatcgttacgtggaaggtgaatgtccaaaatgtcactacgatgatgctcgtggggatcaatgtgacaaatgtggtgccctgttagatccatttgaattgatcaatccacgttgtaaattagatgatgcttctccagaaccaaaatattctgatcatattttcctatcgctggataaattagaaagccaaatttctgaatgggttgaaaaggcctctgaagaaggtaactggtcaaaaaattcaaaaacaattacgcaatcatggttgaaggatggtttgaagccacgttgtattacaagagatttagtttggggtacgccagtgcctttagaaaaatataaagacaaagtcttgtacgtttggtttgacgctacaatcggctacgtttccatcacttccaactacaccaaagaatggaaacaatggtggaataatccagagcatgtttcattgtatcaattcatgggtaaggacaatgttcctttccatacagttgttttccctggttctcaattgggtacggaagagaactggactatgttgcaccatttgaatactacagaatacttacaatatgagaacggtaaattttctaaaagtaggggtgttggtgtttttggtaataacgctcaagactctggaatttctccaagtgtttggagatactacctggcatctgttagaccagaatctagtgattctcatttctcatgggatgactttgttgctagaaacaacagtgaattgttggctaacttgggtaactttgttaacagattaattaagtttgttaatgccaaatataatggtgttgttccaaaattcgaccccaagaaggtttccaattatgatggtttagttaaagatatcaacgaaattttatcaaattacgtcaaggaaatggaacttggacatgaaagacgtggtctagaaattgccatgtcgttaagtgctcgtggtaaccagtttttgcaagaaaataagttggacaataccttgttttcacagtccccagaaaagtcagatgctgttgtcgcagttggtttgaatattatttacgctgttagctctattatcacaccatatatgccagaaataggtgagaaaataaacaagatgttaaatgcaccagctttaaaaattgatgatagattccatttggcaatcctagaaggacataatataaacaaggcagaatacttgttccaacgtattgatgaaaagaaaatcgatgaatggagagccaaatatggtggtcaacaagtgtaaggttcatcggaagcattttttttcctctcttttccctttcaatcttcacatgataaaagtgtatcaattaatatatagattttactctgatataaaaacaagtttaaaaaacaattctcccgctaacacgtttataccctttcttttagttgagtaattgtgtagtgttaagctgaga

SEQ ID NO: 1048 - DNA, 893 bp, Saccharomyces cerevisiae
gaaaaggttatacgctttgctcattatgacgcaagaattcattgataaagtatcttcctacctgactcctgatgtggacattgcacctatttctcaaggtgcagaagccattgttttcacaacgactactcacccatatctcccaagagcaaaggattctcatcaaaagtatattatcaaatataggccaccaaagcgttatagacatccacaaatagaccaggcactaacaaaacatcgtacgttgaatgagtcgcgtttattggccaaattatacttgattccagggctatgtgtccctcaactgatagcgtgtgatccatacaatggattcatttggttagagttccttggagaagatcttcccggagggcacggttttagtaacctaaagaacttcctttggatgcatgaccaagatccatatagtgatcttgtagcaactacactacggaaagtggggcgccaaattgggttgttgcactggaatgactactgtcatggtgatttgacaagttctaacattgttctcgtgcgagatggtgcgagatggacgcctcatttgattgatttcggtctgggctcagtttcaaacctggtcgaagataaaggcgtcgatttatacgtcttagagagagctattttaagtacacattcgaagcatgcggaaaaatacaatgcttggatcatggaggggttcgaagaggtctatcgtgaacaaggtgcgaaaggtgccaagaaactgaaagaagttaccaaaagattcgaagaggtcaggttgcgtggtcgtaagagaagtatgctaggataatataaatgctagcgtactgcctgtatatcgctgcacataatatgtatctataatttatattaacgtacataacttttaggta

SEQ ID NO: 1049 - DNA, 2533 bp, Saccharomyces cerevisiae
caaagacagcaaacaatcgaaaagtggacaaccagcaatggtagattcaattcaccgtattgcatcggcgttggatacggccaaagtaataacgagggaagctgccgcggtagccacctctaagctgggtgaatcctcctatacttattattctcaaaacatcaatcctcaacagttagtcaccttgttaaattctaggaactctagagaagttagagatgcaatgaagagaataatatctataatggcttccgatgatgactctattgacgttcaattatactttgctgatgttgtaaagaatatcaccactaatgacaccaaagtgaaaagacttattcacctgtatttacttagatttgcagaaaatgacccaaacctgaccctgttatctattaattctcttcaaaaatcattgtctgattcgaattccgaactgagatgctttgctttgagtgccctttctgacatgaaaatgtcatcattagcacctataattttgcatactgtcaagaaattggttacagatccatctgcaatggttcgtggtgaagtcgccttggccattatcaaattatatagggctggaaagaatgactatcatgaagaattgttggatattctgaaagaattaatggcagatacagatcctaaggtgatatcctgtgctgtcctagcttacaaagaatgttatgcggatcacttggagctattgcatggacattttcgcagatattgtagaataattaagcaactagattcgtggtcacaatcatatttaattgagctgctaatcaagtactgtaagcagtatttaccaaaaccaactgtggtcgataaatcatcagaaggttccccaaggagttgtcctttaccagataaatacaacgagattgaatacccatcttacgaggtggtaaatgaccctgatttagatttatttctacagagtttgaattgcttaatttatagttccaaccctacagtgattttatcgtgttgcaatgcgctatatcagttagcttcaccattgcagatgaaaaatactaaatttattgaagcattggttagaacggtaaccatgacagaaaaccaaggtaacaaagaaatgcttttacaagcaattcacttcttatcgatcttagaccagacactatttttaccctacaccaagaaattttacgttttccccaaagatcctattgtggcatcaatttggaagatccaaattttgtccacgttaataaatgaatcaaacgttaaagaaatattcaaagaattgaaatattatgttgccagtgctcatttcccagaaaatgttgttattatggcggttaagtcattatctcgatgtggccaattgtcaacgagttgggaatcacatgtaatgaagtggttaattgatcatatggaatcccacaacctctctgcttctgtcctagatgcatacgtgaatgttatcaggatgctggtgcaaaaaaatcctacaaaacatcttcgcataatcttcaagcttgcagatttattaacagttcaaacgagtttggctgataatgctcgtgcaggtattgtttggttatttggtgaaattgcctcgattgaatttaagatatgtccggacgttttgaggaggctaatccagaatttttcaaatgagggtcctgagacaagatgtcagatcttagtgttatcagcaaaactgttgtcatatgacattgataattttaagcaagcgcaagttactggaagcgaagaaaataaccaaaatcccccatactatgattttagtggttcaagaatctctcaaatgtacaatgcggtcctttacttggcaaaatatgatgacgaatttgatattagggatagagccaggatgatttcatccttgtttgattcagggaaatatgaaattgtgtcactactattacaagcacctaaacctacggcaagaagtgacgattttatcgtttctgcaagattggaaacacataccccagaaataaaagaattttttagaatgcttccttggaatactgaaattactgaggttggcgagacaggtaacgatattagagaaggcgcagaattgaaagactataacaaatacaaaaaaagtttttcatcgcagtcttttattaccaacaactcagcaagatctttcacatctagctccaacgcaaaattgactgggatcaatgacggcgatagcaatagcatctcaggtaaaggtaacgtaaacaccttcacatctcaaaacgggaagaaatatcgtttgcaaagcctggacgagtttttttccgacattccagaaaggaagagtaaaccaaggaaaattataaaggtggtggaagaaagcagtgacgaggatgaagacgaatcggaagagagcagtgacgatgatgagtatagtgactcttctttgggaacgtcttcttcgggaacgtcttcttcgcatctggagctttagaactcggagataatactatataaatatgtatatttatagatatagatataggcatgtatatcttcc

SEQ ID NO: 1050 - DNA, 1226 bp, Saccharomyces cerevisiae
taccctcatatttgtgccagttcacttcacaggaatcgtatgagccaaagccataaagtatcgtaggaaaggaaacgaggtgttgataatacgatatgagtgatcgcaatacaagtaacagcctgaccttaaaagaacgaatgttaagtgccggtgctggatcagtactcacttctttgattttgacaccgatggatgtagtgagaatacggctgcaacagcagcagatgattcctgactgttcatgtgatggggctgccgaagtgcccaacgccgttagctcaggctccaaaatgaagacattcaccaacgtcggaggacagaacttgaacaacgcaaaaatattttgggagagtgcttgttttcaagaactgcactgtaaaaattcatcgttgaagttcaacggtactttagaagcattcacgaaaattgccagcgtcgaaggtattacaagtttgtggaggggtatttctttgaccctattaatggctattcctgccaacatggtttattttagtggttatgaatatataagagacgtttctcctatagcctcgacgtacccaacattaaaccccctcttttgtggtgcaattgcgagggtatttgcagcaacaagtattgcacctttagaattggttaaaactaaactgcaaagtataccgagatcatcaaagtccacaaagacatggatgatggttaaagatttattaaacgaaacgaggcaggaaatgaaaatggtgggtccttctcgggccctcttcaaaggtttggagatcactctgtggagagacgttccgtttagtgcaatatattggagttcctatgaactttgcaaggaaagactatggctagattctactcgatttgcatctaaggacgcaaactgggtccattttataaacagttttgccagtggttgcataagtgggatgatagctgctatatgcacacacccttttgatgtcggtaagacgagatggcaaatatccatgatgaacaatagcgatccgaaaggcggcaataggtctagaaacatgttcaagttcttagagactatatggcgtacagaaggtcttgcggccctctacacgggcctggcagccagagtaattaagatacgcccaagttgcgccatcatgatatctagttatgagatctccaaaaaagtatttggaaacaaattgcatcagtgaataaaggcttgtaaatatagatatatagta

SEQ ID NO: 1051 - DNA, 1730 bp, Saccharomyces cerevisiae
cggataattttcttcattcagtaactcaaattggtctttcagtgaaccttgtatcgattgacacagaggcatgttcttttcaaaagttatgcttactcggcgtattttggtgaggggtttggcaacagccaaatcttcagctccaaagttaacagatgtattaatcgtaggtgggggtcctgcaggtttgactttagctgcatcgattaagaattctccgcaattaaaagatctaaagacaactttagtcgatatggtggacttaaaagataaattatcggacttttataattcacccccagattattttacgaacaggattgtcagtgttacgcctagatctattcattttcttgagaataacgctggggcaactttgatgcatgacaggattcaaagttatgacggactctatgtcacggacggttgttctaaggctactttggatctggcaagggactccatgctttgtatgattgaaattataaatatacaggcctccttatacaacagaatttctcagtacgattcaaagaaggactccattgatattattgataatacaaaagttgtcaatattaaacacagcgaccctaatgatccattgtcctggcctttagtcactctttccaatggtgaagtatacaagacgagattgctagtgggtgcagacgggttcaattctcctaccagaagattttcccagatcccatctaggggctggatgtataatgcctatggtgttgtggccagcatgaagttagagtatcctccctttaaactaaggggctggcagaggttcttacccactggtccaattgcacacttacccatgcctgaaaataatgctactttagtctggagttcatctgaacgtttatcgaggcttttgttgtcattacctccagaatcattcactgcacttatcaatgctgcttttgtcttggaagacgcagacatgaactactattaccgtacattggaagatggctctatggacaccgataaattgatagaagatattaaattcagaactgaggaaatatacgccacgttgaaggacgagtcggatattgatgaaatttacccaccaagagttgttagtataatagataagacaagagcacgttttcccttaaaattaacacatgcagatcgttattgcactgatagagttgcccttgttggggacgcagcacatacgacacatcctctcgctggacaggggttaaacatggggcaaacagacgttcatggtttagtatacgctttagaaaaggcaatggaaagaggtttagacattggctcttcattgagcttagaacccttttgggcagaaagatatccgtcgaacaacgttctattaggaatggcggataaattatttaaattatatcacactaattttcctcctgtggtagccctaagaacttttggtttgaatctgacgaataagatcggtccagttaagaatatgatcattgacacattaggaggaaatgagaaatgagaggtatgtaaatagaaatagactagctccacttttaagaattatttatgcaattaaatacatgggtgaccaaaagagcgggcggatacacgcgtcaccacaagcagaataaaaggtaaacctgaaattgttttaacataaaatgaaaaatgcttgtttgcaaccctatatagaatcataaaacattcgtgactataaaatgaataaactaaactattct

SEQ ID NO: 1052 - DNA, 868 bp, Saccharomyces cerevisiae
gtcaataagaacataaattccaattgtctaatataactagaaaggatgttcttaactagaagtgaatatgatcgtggtgtaagcacattttccccagaagggaggttattccaagttgagtattctttggaggccatcaaattaggatctacagcaattggtattgccacgaaagaaggtgttgtactaggtgtggagaaacgtgccacctcaccactattagaatctgattctattgagaaaatcgtggagattgatcgtcatattggttgtgcaatgagtgggcttacagcagatgctcgttccatgattgaacatgcgcgtactgctgcagtaacgcataatctatactacgatgaagacatcaatgttgagtccttaacgcaatcggtgtgtgatcttgctctaaggttcggtgaaggtgcctctggtgaagaaagactaatgtctcgaccattcggggttgccttgttaattgctggccatgatgcggatgatggttatcaacttttccatgcagaaccatctgggacattttaccgttataatgccaaagccattggttcaggctctgaaggagcacaagcagaattattgaatgaatggcattcttctttaactttgaaagaagctgagcttcttgttctaaaaatcctaaagcaagtgatggaagagaaacttgatgaaaataacgcgcaattgagttgtataacaaagcaagacggattcaaaatatatgataacgaaaaaactgctgaattgataaaagagttgaaagagaaagaagctgcagaaagtccagaagaagcggatgttgaaatgtcataaatatagttacataaaggtaaataccaacgtcacactaaca

SEQ ID NO: 1053 - DNA, 2480 bp, Saccharomyces cerevisiae
gttctaccactaaaaaaacatatcaaacgtcacttttttgaataagtaataatagttaaggaggaagcacaagacgcactgaatataccaatcaagggcatcaacaatgggtagaagaagtagagcagctatgctcccaacaaatatcattcttttacagaatttggtaaagcgtgacccagagtcctatcaagaggagtttcttcaacaatatgcacattatgaatcgctaagggacatttttatgttaaatgggcttgctggaggtgattctgcagctgccactaatgggctcgatgtaggaaatggatcttctacaatggcaggtactaacggtaccaccatgagcacttcaacttcgcaacttattgaattggttggcttcgtatctcaagtctgctcatgttttcctcgtgaaactgcaaacttcccgtctgaattaaagcagcttttgctggaacaccataagtccttgccatttgaattgaaagaaaaaatcttaagttgtttgacgatgttaaggaataaggacgtcattactgctgaggaattaattcaaagcttatttcctttattggttgcttactcttcccatggtaattcactcggcgttaattcacacgccaaggaattgaggaaaatcatttatacaaatttaatttctttattaaaaagttgtaatactaatggtaaaaatcaaaaattgaacaaatctacgcaggccgtttgctttaatttgttagatcaaccagattcccagggaatctgggccacaaaattaaccagagaactttggagacgtggtatttgggatgattcaagaacagtagaaattatgacccaagcagcattacatcaggatgttaagattgtcatgtctggtgtgatgttttttttggatgctgacagagaacgtgaagaaaattttgaagaaaattccgaggatgaggatgggtttgatttagatgcattaaggcataagatgcaagtcaataaaaaaacgggtagacgtggtaagaagctggagaatgccataaaaactgtgaagaagaagaagaagaacggaccgggtgctcctcaagggtatttaaacttcagtgctatccaccttttgagagatccacaaggatttgccgaaaaattgtttaaggaacatctttcaggcaaaacgaaaaacaaatttgacatggaacaaaaaatatctttgatgcagctgttatcaaggttgattggtacccataagttaattgttttaggaatttatactttttttttaaagtacttaactccgaaacaaagagatgttacaagaattatgtccgcatgtgcccaagcatgtcatgatcttgtccctcctgaagttataaatgtcatggtgagaaagattgcagacgagtttgtatcagacggtgttgccaatgaagtcgctgctgcaggcattaataccattagagaaatatgctctcgtgcacctttggctatcgatgagattctactacaggatctggtagaatataaggggtctaaagctaaaggtgtcaatatggctgccaagtcattgatagcgttgtatagagacgtggcaccagaaatgctaaagaagaaggatcgtggtaagaatgccgccatggaagtacaagaagccaagaaaggaggtaaagattcaaaaagaccgcaatttggtgccgacaacagtgttcaagggattgctggtatcgaactgttagccaaatggaagaaagaacatggtgaagagagtgaaaatgaagacgctgatgccaactgggaagtagatgtcgatagcgaagaagacgatgtcgacggtgagtgggtcaccatggatagtgataaagaatatgacgttgatatggaagatagtgacgatgaaaaagacaatgctaagggcaaggaatcagattccgatttggaactaagcgatgatgacgatgaaaaagaagtgaaggatgagcaagaagatgcagatatagatcccgaagctgccttccgtgaaattgcttctacacgtattttaactccggcagatttcgctaaactacaagaattgcgtaatgaggaaagcgttgctaaaataatgggtatccacaaacaagacaagcgtgaagagttagttgatgcaagtacactaacaggccctatcaaatacaaacagtctcgtgaggaaagattacaaaaggtgttggaaggtcgtgaaggtagagacaaatttggtagtagacgcggtaagcgtgacaacatgcgttctactaccaacagagaaaaagaaagaaggaagaactttgttatgtctattcacaagagatctgttagaggtaaacaaaaaatgtcactacgagacaagcaaaaagtgttacgtgcacacatcaccaaacaaaagaagaaggggtattagacgacatcgtagccatattaatatatacatacatatacacagatacattcatctctccaactgtatgagg

SEQ ID NO: 1054 - DNA, 1474 bp, Saccharomyces cerevisiae
agtccagtttttttgtaactgacttttaggtagttaggattaataaggattgagtcaatacaatcgaaaaaaatactgaagcattgcaactgaacaaaatgtactcaagaaaatccttatccctaatttcaaagtgtgggcaattaagcaggctaaacgcgcaagctgctttacaagcaaggagacacttgtcaattcatgaatacaggtcagctcagttattgagggaatacggtattggtactccagaaggatttccagcgttcactcccgaagaggctttcgaagcagccaagaaattaaacactaacaaactggtcatcaaggcgcaggcattgaccggaggtagaggtaaaggtcacttcgacaccggttacaaaagcggtgttcacatgatcgaaagtcctcagcaggcagaggatgttgcaaaagaaatgctcaatcataacctgattactaaacagacgggaatagcggggaagccagtatctgctgtatatatagtgaaaagagtagatacaaagcatgaagcttatttatctattctaatggacagacaaaccaagaaaccgatgatcattgcgtccagtcaaggtggtatgaatattgaagaggtggctgagagaaccccagatgctataaagaaattttcaattgaaacttcaaagggattgagcccacaaatggccaaggatgttgccaagagtctcggtttcagtcccgatgcacaagacgaggcagcaaaagctgtttccaatttgtataaaatattcatggaaagggatgctacacaagtggagattaaccctttgagtgaaattgaacatgatccaacccacaaaatcatgtgtacagacgccaaatttgggtttgatgataacgcatcattcagacaggaaaagatatattcctggagggacttatcacaagaagatcctgatgaagttaaggcaaagaagtatgatttgaattttgttaagttgaagggtaacattggatgtttagtcaatggtgctggtttggctatggctactatggatgtcatcaaattaaatggaggcgatcctgcgaactttttggattgtggtggtggtgccacccctgagaccatcaaacaaggtttcgaattgatcttatccaataagaacgtagatgcaattttcgtcaatattttcggcggtatcgtaagatgtgactatgttgccctggggctggtagaagccgccagagaactagaagttagggtccccattgtggcacgtttgcaaggtaccaaagtagaagaaggccgcgacattatcaataagtcaggcgtgaagatttattcgtttgatgaattagatcctgctgctaaaaaggtcgttgaattgacccaaaattaagcttctcgagaaaaacaaaagagttaataataaagtatatatgcttttttactattaataaagtttcttattttccctacatgtatacatac

SEQ ID NO: 1055 - DNA, 1856 bp, Saccharomyces cerevisiae
atgtcttcattatatactaagttggttaaaggggcgaccaaaataaagatggcccctccaaagcaaaaatatgtggaccctattctctcgggcacttcgagcgcaagaggattgcaagagattacccacgcattggatataaggttgtctgatacagcctggaccattgtttataaggcattgattgtgttgcatctgatgatacaacaaggcgaaaaagatgtcacgctaaggcactattcccataatttggatgttttccaattgagaaagatttcgcatactactaagtggtcttccaatgatatgagggctttgcagagatacgacgaatacctaaaaacacgttgtgaagagtatggcaggctaggtatggatcacctacgagacaattactcctcgctaaagctgggcagtaagaaccagctttcaatggatgaagagctagatcatgttgaatcattggaaattcaaattaatgccttgataaggaataaatactctgtttcagatttagaaaaccatttgttattgtatgcattccaattgttagtacaagatttactaggtctgtacaatgctcttaatgaaggtgtcattacacttttagaatcattcttcgaattgtccattgagcacgcaaaaagaacactggatctctataaggatttcgtggatatgacagaatatgttgttagatacctaaaaataggaaaagctgtcggtttgaaaatccccgttatcaaacatattactacaaagttaattaactcccttgaggagcatttgagagaggaaacaaaaagacaaagaggtgaaccttctgaaccgcagcaagatagaaaaccatctacggccattagctctaccagtagtcacaataacaacagcaatgacaagaataagtctatagcgcagaagaaactggaacagataagggaacaaaaaagactgctggagcaacaattacaaaaccaacagttgctcatttcccccacggtcccacaagatgcttacaacccatttggatcacaacagcaagatttaaataatgacaccttttcattcgaaccaacccagccacaaatgaccgctcaagtccctcaaccaactgctaaccccttcttgataccgcaacaacagcaacaggctttacagttgacatctgcgtctacaatgccacaaccaagtgagatacagattactccaaatttgaataatcaacaaactgggatgtatgcttctaaccttcaatacaccccaaatttcaccggctcagggttcggcggatacacgaccaccgagaacaatgcaattatgaccggcactttagatccaacaaaaacggggtctaacaacccattttcgctagaaaatattgccagagaacagcaacaacaaaatttccaaaactccccaaatccttttaccctccaacaagcacaaaccaccccgattcttgctcatagtcaaacaggtaatccatttcaggctcaaaacgtggtgacatcaccaatgggcacatacatgacgaatcccgtggccggtcaacttcagtatgcctctactggtgcgcagcagcaaccacaaatgatgcagggtcagcaaacagggtatgttatggttcccactgcgtttgtccccatcaatcaacaacagcaacaacagcagcatcagcaagaaaatcctaacttaatagatatatagtgagcgatagatactacagttttttgttctcaacaggccgtccttgcatattataaactctgatttttaggtaatcccttccacctttctatattttatgatactatccaaacatgtaaattttacgtaccatacatataacctcatct

SEQ ID NO: 1056 - DNA, 3393 bp, Saccharomyces cerevisiae
tattgctttctaccaataaaatctgttaattctatttggattgtcgtctactcaagtctcgcctagtaaataaacgataaacaaatttgaagtaagaataacaatatagggagagaaatttttctatttttaatttcgaaacaggtaccaaaaaatctaagttcactttagcactatttgggaaagcttttatataaaaaatctgaaacaaaatcatatcaaagatgcaatctcaagattcatgctacggtgttgcattcagatctatcatcacaaatgatgaagctttattcaagaagaccattcacttttatcacactctaggatttgcaactgtgaaagatttcaacaaattcaaacatggtgaaaatagcttactatcttcagggacttcccaagattccttgagagaagtttggttagaatctttcaagttgagtgaggttgatgcttctgggttccgtataccacaacaagaagctactaacaaggctcaaagtcaaggtgctctattaaagattcgtttagtgatgtctgctccaatcgatgaaactttcgacaccaacgaaaccgccacaatcacttatttctctactgatttgaacaagattgtcgagaaattcccaaaacaagccgaaaaattgtccgataccttagtgtttttgaaagatccaatgggcaacaacatcaccttctcaggcttagctaatgcaaccgattccgctccaacttccaaagatgctttcttagaagctacctccgaagacgaaatcatctctagagcttcttccgatgcttctgacttactaagacaaacattgggctcttctcaaaagaagaagaagattgctgtcatgacttctggtggtgattctccaggtatgaatgccgctgttcgtgccgttgttcgtacaggtatacatttcggctgtgatgtttttgctgtttacgaaggttacgaaggtttactaagaggcggtaaatatttaaagaaaatggcttgggaagatgtcagaggttggttaagtgaaggtggtactttgattggtactgctcgttctatggaattcagaaagcgtgagggtcgtagacaagctgcaggcaatttaatttcgcaaggtattgacgctttggttgtttgtggtggtgatggttctttaaccggtgctgatcttttcagacacgaatggccatctttggttgatgaattggttgcagaaggtagattcactaaagaagaagtcgccccatacaagaatttgtccattgttggtcttgtcggttccatcgataatgatatgtctggtactgactctaccattggtgcttattctgctttggaaagaatctgtgaaatggttgactacattgatgccaccgctaaatcccactcccgtgcctttgttgttgaagttatgggtagacattgtggttggttggccttgatggctggtattgctaccggtgccgattacatttttattccagaaagagctgttcctcacggaaaatggcaggacgaattgaaggaagtgtgccaaagacacagaagtaagggtagaagaaataacacaattattgtcgctgaaggtgctttagatgatcaattaaaccctgttactgccaatgacgtcaaagatgctttgattgaattgggtctagacaccaaggtaaccattctaggtcacgttcaaagaggtggtacagctgttgctcatgacagatggttagctactctacaaggtgtcgatgctgttaaggccgttctggaatttacccctgaaactccttctccattaattggtattttagaaaacaagataattagaatgccattggttgaatctgtgaagttgactaaatctgttgccactgccattgaaaacaaagatttcgataaggcaatttctttaagagacacagaatttattgaactttacgaaaacttcttatccactaccgttaaagatgatggttccgaattattgccagtatctgacagactaaacattggtattgtccatgttggtgccccatctgctgctttgaacgctgccacccgtgccgcaactctatactgtttgtctcacggccataaaccatacgctatcatgaatggtttcagtggattgattcaaaccggtgaagtgaaggaactatcatggattgatgtcgaaaactggcataacttgggtggttccgaaatcggtacgaacagatctgttgcttcagaagatttgggtaccattgcttactacttccaaaagaacaagctagacggtttgattattcttggtggttttgaaggtttcaggtccttgaagcaattgcgtgacggtagaacccaacacccaatctttaacattccaatgtgtttgattccagccactgtttctaacaacgttccaggtactgaatactcacttggtgttgatacctgtttgaacgcattagtcaattacactgatgacatcaaacagagtgcttctgcgacaagaagaagagtcttcgtctgtgaagtccaaggtggtcactctggttacatcgcttctttcactggtttaatcactggtgctgtttcagtgtacactccagaaaagaagatcgacttagcttctatcagagaagatataactctattaaaagagaactttcgtcacgacaaaggtgaaaacagaaacggtaagctattggttagaaacgaacaagcttctagcgtatatagcactcaattgttggctgacatcatctctgaagcaagcaagggtaagtttggtgttagaactgctatcccaggccatgttcaacaaggtggtgttccatcttctaaagaccgtgtcaccgcttccagatttgctgtcaaatgtatcaagtttatcgaacaatggaacaagaaaaatgaagcttctccaaacactgacgctaaggttttgagattcaagttcgatactcacggtgaaaaggtaccaactgttgagcacgaagatgactctgctgctgttatctgtgttaatggttctcacgtttccttcaagccaattgctaacctttgggaaaacgaaaccaacgttgaattaagaaagggttttgaagttcactgggctgaatacaacaagattggtgacatcctgtccggtagattaaagttgagagctgaggtagccgctttagccgctgaaaacaaatgaatgattgcaatgaaaagtttaagttaagcaaaaggaggtaaaaatggcatgcactttaatttttatacaatcgtttttttgtcataagacttatttatgtatctgttgtttttctttttctatcctctatttttgtctatttgtctttgttttactctttttcattattatttctttatataatttttgtacgatatgatacaca

SEQ ID NO: 1057 - DNA, 1092 bp, Saccharomyces cerevisiae
ggcattggcaatgttcaaacctctgatagaacggcagatatatatttaagagaatatagtcaaggttgacgccgcatactttggttttgtttcaaaaagaaacaggtgaaaaattataaagaccaaactagaataccatgcccagtgtctgccatacaagcccgatagaaaagattatccaacaagggcatcgcatacagaatgattccttaataccgtcaaaacgcaccaagctggcccatacggaattaacagcacactatgccactgaagactcgcatgtggaaaaacactttttgcataatggtagtaattttgacggcattgacaatgtaaggtatcaaaatcaaccctctccattaaccttcattactccaaacaacactgtagattccagtgattgggttccgcagttctcgtctatgaagattgacgattcactagagtttagctcagaatataaaaggttgtattccaattacgagtcacagcagcgcctgaattcaagcagacaacacttaccttttaagaattgtatgataaggaagacaagttgcacttacccacctcaaaagacgcttcgacagcaacgccaaggaaaccgggacaacccaacggatgcgtttcaattcgacgcggagttccaagttttggagagagaaattcaaaaagagcggtacgagcccataacacgtcgggacgagaaatggttcgaccaagatcagtcggaactgcaaaggattgccacagatatagtaaaatgctgtactccaccgccttcgtctgcatcctcctcttctactctttcctcctctgtcgaatcaaaactatctgagtcgaagtttattcagttaatgagaaacattagtagcggtgacgtgactttaaagaaaaatgcagatggaaattccgcaagcgagttattctcatccaacaacggggaactggtcggaaacaggcacattttcgtcaaggacgaaattcacaaagacatacttgattgatataggcagtttctacaattgtacctcttgtaactactacatacgttgatatatgtttacagatagctaagaatatcaaaatcatgaa

SEQ ID NO: 1058 - DNA, 838 bp, Saccharomyces cerevisiae
tcaaggatatacaaaaataactactgtatttgatatagcacggaaacaatgacaaaagatttttaccgtcagctagatcccgttgaggagaagattgttccaccagaaaacgctatagtaatttcttcggaggccaaagaggctactgttaatgagaaggaagccaagcaaggtgttctttcgcaaagggttatgaaatatattggagaaaatgagctggtagacggtatttcagtacgtgatcctgactacttgaagaggtttttcaacgaaagaagaaaacaattttccgctaaatgggacaaggtgacaaataaaatagatgatatcgcaggcagatattatgcccgtgaagagagctttacatcaacaattgctagtttacataccgatccaaacgagcgcctaataccggggttgttgtccattttggttgcttccatgacaggttccgttttggcaagaagaagaacatggcttcttcgtgcaaccatgcccattatactggggtcttgttgttttgcgtatgcaatgccaacaaccttcaggaacaccatgggtctcatccataatctagaaatgaacacctttccacactttaccgaaagacaagatcgtgtttggaaagaaacaaagagattaagtaccgcgtctgtgcaatactactatgatgccaaaaaatggttgaacaaagatgtagaaaaaacagggaatgcaatcaaaaattggactggcgttaacgtgaagtgaactctgtttagcacctggcgcttattcatcttataaatacatacacaatctttacttactatctaaatattccacataggatttcaca

SEQ ID NO: 1059 - DNA, 3671 bp, Saccharomyces cerevisiae
caaaaaatcttcataacattatttttcggttccacagtgattgagctttttgagagaataaccctttggaggcaacatagatagataaacgtgcaatgaaattcggcaagtatttggaagccaggcagttggaactggcggagtacaacagccattttattgattataaggctctaaagaaacttatcaaacaattggccattcccacgctaaaggctagttcagatttagatttgcatttaacattagatgacatcgacgaaaaaattatacatcagagactgcaagaaaataaagctgcctttttttttaaactagagagggagctggaaaaagtaaatggttattatttggcgagagagtccgatttaagaataaaattcaatatattacactcaaaatataaagattataagataaatggtaagctaaactcaaaccaagctacctcatttaaaaacttatatgcggctttcaaaaagtttcaaaaggatcttagaaatttggagcagtatgttgagttaaataaaacgggattttcaaaagctctgaagaaatgggacaagagatctcaatctcacgataaagatttttaccttgctactgttgtttccattcaaccaatttttaccagagatgggccactaaaattaaacgatgaaactttacatattctcttagagctgaatgatattgacaacaacaatagaagggcagacatacaatccagtacgtttactaatgacgatgatgacgacaataataccagcaacaataataaacacaataataataataacaataataataacaacaacaacaacaacaataataataacatattacacaataattatgaattaacaacatcaaagatttcggaaaaccaacttgaacatctttttcaagcatcttcctcctccttggacatggagatggaaatcgaaaactggtataaggaaattttgaatatagccacggtgaaagatgttcaaagaaagcatgcactactaagaaacttcagagaaaccaagatattcacatatctgctacaaaattcctcagaatcttttcataaaaatgtcttttctttgttgaaggagtgcttaacgacgctgtttttattactggtggctagtcctttggacgataactctctgcatattttctataaaagcaatcaggatcatattgatctgtcatattgtgacgaagatgatcaagtattttcacgaaaaaacgtatttcacgaggctgcaagttgtccagaaaaatcacgcttatttattctagatgaggctttaacaacatcaaagttatctaaagaaacagtacaaaaactactgaatgcccaagatatacattcgcgggtgccgctacattatgctgcagagctaggaaaactggaatttgttcactcgttgctaatcaccaatcttttagaggacgttgatcccattgatagtgattctaagacacccttggttttggctatcactaacaaccacatagatgttgttagggatctgctgactattggtggtgcgaacgcatcacccattgaaaagccaattctggattatagtaagaatgtaatcagctctactaaagtccagttcgatcctttaaatgttgcttgtaaatttaataatcatgacgccgccaagttacttttagaaattcggagtaagcaaaatgctgataatgccaagaacaaaagttcacaacacttgtgtcaaccgcttttcaaaaagaactcaacaggtttatgcactcttcatatagtggcaaaaattggcggcgatccacaattaattcaactattgatacgttatggggcggatcccaacgaaattgatgggtttaataaatggacgcccattttttacgctgttcgttcaggtcattctgaagttattactgaactattgaaacataatgcacgtctggatattgaagatgacaacggccattcgccacttttttacgccttatgggagagccacgttgatgttttgaatgcacttttacaaagaccattaaatttgccatctgcacccctgaatgaaataaattcgcagtctagtacgcaacgccttaatacaatagatttaaccccaaatgatgacaaatttgatttagacattcaagatagcattccggattttgctttaccaccgccaatcattccactaaggaaatatggtcataattttttggagaaaaaaattttcatcaaattaaagttgaggccaggtctcgagtctatcaagttgactcaggataacggcattattatgtcatcatcaccaggcagaattactttatcctcaaacttacctgaaataataccgcgaaatgttattttacctgttagatctggcgaaattaataacttttgtaaggatatcagtgaaacaaatgatgaagaagatgatgatgaaattagtgaagatcatgatgatggagagataattttccaagtagattcaatcgacgatttttcaatggatttcgagatatttccttcatttggcacaaggataattgccaaaacaacggcaatgccattccttttcaagaaggtggcaataaatagtattgcaaccatgaatttacccttattcgacacaagactaaataatattggatctctcactttggattaccaaattatttttccttatccgggaaatccactgaaaatcataaattatgagccgtattggaaatctacaggaagtgatttaatgacctctagtaaagacggtaattttgttacttcttcatcgttgaatggcagttttattagtgtattagtttgcgctctgaatgatgaaaccatagtggctgcgccaaaaccatacgttgaattcaaaggcacgaagattctgttaaatgatttaacgaaagaacaattggaaaaggtagtggattatgacttcggtaaaattgatggaagcttcgatgaagtaacattgaaacaatacttatcttcgagagtggtgcctctcagaagcctactagaagttattcccgggtcagcccagctggtaattcgtgtatattttcctacagataaggaaattgacacaattcccatcaaaatatcgccatttataaatatcaatcaattcattgataagcttttactaatcattttcgagcatgaacgttttttgcgtcacagcggaagtgggagtatgcgccaaatagttttcagttcatgcaattgggaagcttgctcgatccttaactggaaacaacccaattttccggttttgttgcaaatgaaaaatctactcagagattcaaccacaggcaaatttgtaggtgatactcctaattgtttaaaggaactggccgtaaatcctcaaaaaatgtcgtatttaaacacggaactaataaacatacatacaatggttcaatttgctatgaacaataatttgttaggtgtaacgcttccatatgaagtactgaagatatgcccgtcgttggctaggatcatcaaacaaaacggactactgttgattgcatcggtcggggaaaatgaccaaataccagctgatggaggttacagcgggatctactacgcttgtgagttgctttttgagaataatattgatatgtaaagttctgtaatatgtagttttgaaatcttatacattatt

SEQ ID NO: 1060 - DNA, 1156 bp, Saccharomyces cerevisiae
aaaagaatataatttagtgctgatgaatagatcacctggtgagttccaaaggtacgcaaaggcgttccaaaaacaattgtccaaggtacagcaaaccggaggcagaggtcaagtgccttcaccaaggggggcatttgcaggcttgggaggtttgcttttactcggaggtggtgcactgttcattaataatgcactgttcaatgtagatggtggtcatagagccattgtttattccagaatacatggtgtttcctctaggatatttaatgaaggtactcacttcattttcccttggcttgacacaccaattatttatgatgtgagagcaaaacctcgtaatgttgcttctttaacaggtaccaaagacttacaaatggtgaatatcacctgtagagtactttcaagaccggatgtggtgcaattgcccaccatatacagaaccttaggtcaggattacgatgaaagagtgttgccttccattgttaatgaagttttaaaggctgtagtggcccaatttaatgcgtcacaattaatcactcaaagagaaaaagtttccaggttgattcgcgagaatttggttcgtcgtgcaagcaaattcaatatcctactggatgatgtttctattacgtacatgactttttcgccagagtttacgaacgctgtagaagcaaagcaaattgcccaacaagatgctcaaagggctgcatttgtagttgataaagccagacaagaaaaacaaggtatggtagtgagggcacaaggtgaagccaaatccgccgaactgattggtgaagccatcaagaaatcaagagactacgtggaattgaaaagattagatacagccagggacattgcaaagatcttggctagctctccaaatagagtcatcttggataatgaagcattgttgctaaataccgtagtggatgcaagaatcgatggaaggggcaaataaatagcgaaggctagatattatctttaagaattgagtaacaatgttaagatgccatatacttgtgaatacaaaataaagggaaagaaagcgatgcgtaaaacataaatatttgtatgtcttctagaataagaataaggagtattaccccgtatcatcttgtattgttggagaacgtatatagtataatatgtaacacataca

SEQ ID NO: 1061 - DNA, 1947 bp, Saccharomyces cerevisiae
ttcaaacgcaagtccattcttagaaattttagcttctctcaatattgaaatatttgcaaatacgccattcaagaatcaagcctgttgaaaataaaggtacaaaattaaatccgctaattattttttttcgtgttcgactaaagttatcgaaaaattgaaaatatacaaggactagctatactatcaatacgcaaagaaaatacaaaataaacgcacattcgttctataggcgacaacttggcagaattttttagtataaaatggatctattcaaaagaaaagttaaagaatgggtatactccctcagcactgacgaccattatgcagagtataaccccgatgaaacgcctacttttaacatgggtaaacgtttaaacagcaacaatggtcaggtaaatccctctcaaatgcatttgaatagtgtagatgaggaaatgagcatgggatttcaaaatggcgtgccatctaatgaagacataaatattgatgaatttacgtccacggagtcaaacgatggtgtctctgaaaccctcttagcttggagacacatcgatttttggaccagtgaacataatccagatttaaatgcaactttgagtgatccttgcacccaaaacgatatcactcacgcagaggaagacttggaagttagctttcccaacccagtaaaagcgtctttcaaaattcatgatggccaagaagatttagaatcgatgaccggtacttctggcttgttttatggcttccaactaatgacactagatcaggttgtagctatgactcaggcctggagaaacgtcgcaaagaacctaaacaaaagatctcaacaaggtttatcccatgttacatctactggctcttcttcatctatggaaagactaaatggtaacaagttcaaactgccaaatatcccagatcaaaaatctattcctccaaatgcagtgcaaccggtatatgcacatcctgcttggattcctttaataacggacaatgccggtaaccatatcggtgttgacttggcgcctggtccaaatggtaaatatgctcaaattataacatttgggagggacttcgatacgaaatttgtcattgctgaaaattggggtgaatttctgttatcgtttgccaacgatttggaagctggtaattggtatttagtagatgacaatgacgactactttagcggtgatggtgaattggtcttcagggataagaaatctaatggtcctatacaagattatttcgaagttttaaaaagaagaacgtggatcaagtatcaagaaaacttgagatcacaacagcaaaaatctcaacctgacacatccttgcaggagcagaaatacgtgcctgcctcgcaaaagaaagtggcagctgaacagccttctaccctcaacgcagaatccataaagggcgaagatagtggtagtgcagatgtacaatctgttcaagatcacgaatctgtcaaaattgtgaaaacagaacctagcgaagcggagactacaactgtaaatacagaaagccttggacaagcagagcatgaaatcaaagctgataatgtagacattaaacaagaaagcgagaggaaagaagacgaaaagcaaccaaaggttgaagaaaaagaacacgttgaaaacgaacatgtcacagaatcagcaaaaaaagacgatgatgtaaataagcaaacagaagaaatgaacaaaaaggaagaaaatgaaataagaagtgatgatgctaaagtggaagaagcgagagaagaatttgaaaatatagctttatgaaatatcacaattaacattctacaaccaaaaagaaatttggacaatatttatttctattaaactgttctaggtaggtttcaaccttaagaaatttatacaatattatcatatatatatatatatatatatagcacaattcccttacgtttaccaaccatgaacgttcgtg

SEQ ID NO: 1062 - DNA, 922 bp, Saccharomyces cerevisiae
acgataaattgacaactgggacgagaaagggcaactctttgaaagcaagagagaacaaatatagccatgtcgaagttcctacagggatcaatatttagcatatcaaaacttcatgttagatattcttctactcggccttttctagtggctcctagtattgctaacagtataacaaccgaggctccagcgattaatcactcacctgaactggcaaatgcgagaaaatggctaccaaaaagatgcggtttaattactcgtaagaagggaatgatgccttattttgataaatctactggtgaaagaagcgccgctactatattagaagttaataatgttgaagtaataatgcatagaacttcggaggtcaatgggtacttcgcgtgtcaagtagggtacggatcaaggcatttgtctaaagttagcagacaaatgcttggtcatttcgcttctaaagttgttaacccaaaagagcatgtggccgaattccgagttaaagatgaaaagggattaataccacctggcacattattgaaaccctcttttttcaaagaaggccaatatgttgacgtcagatcagtcagcaaaggcaaaggttttactggtgtgatgaaaaggtatggattcaagggtttgagagcatctcatggtacatctattatgcatagacacggtggttcttatggtcaaaaccaagacccaggtagggtactgccaggaagaaagatgcctggtcatatgggaaacgagcatgttactatccaaaatgttaaagttttgaaagtcgacgatgaaaataatgttatttgggttaaaggctctgtggctgggcccaaaaacagtttcgttaaaattcaagatgcaatcaaaaaaacttgagcataaggcgtataagtattttactacaatcatgtacatacatcaa

SEQ ID NO: 1063 - DNA, 1945 bp, Saccharomyces cerevisiae
tacagttaaatgacatgccaaattacattttctggccatacgaatccttgttcgagaattccgcagctcaaggacctcaggtagctttggcaatttcatttgagaagacgcattttgttgtcttaggtgtttgcgaacctcagtatttagaagaagtaagcatacggcccccttattcagtggtagctactaagaacaatggagcggagggttggaactacaaagttgctgatccctgtaatgtccattttagaatacccaagctgaaatttatgcaattctattcttctgatcccatctcgctcatcataccagaaaaagaagttggtcttcatagtagtgtgggtgaaactctgaactattctaaattagagcaacatccaagatacaagagagataataagaaattgagtgaaactttgaacatcattaatctattccccgcatattgtaaagcattaaatgagctttacccgtttattcaaacatcacaggaaaatttgaggggtactatgcttaatagtgtcgcagcttggtgttcatctacttgtatttataaaatggtcgcaaaaattggtttttatttgacttttgtgatctgctctattgctagtctcgtatcctcgttattaaattattcgcactttcagttggtaaattactcggcatttgtccagcaaatcgatcttcgttgtcaacaaatttgctatttcccagtacagtatgagcgtattaataagaaggataacatacagaatgttggctctatggtggaaaaagataattctaatagtcaattctcacattcatatatgccttctaaattctatcccgattatattttattgtataatacaatttggcttattattaatgacatttcatttggtttaatattgggggccatacttattgagaatcgagatttcttggtgtcggcatcccatagagtattgaagttttttttatatgattcattaaaaacaataactgaaacgttagcaaataacccccttggcatcaaattaaatgcagaacttgcgaactttttgagcgaattatttctttgggtgatagaattttcttataccacattcataaaaagactcattgatccgaaaaccctatcatctttgctcacgttaacgatatatatgatgtttctcgttggcttttcttttgctgtttccctagcgattgatttttttgcaattttaagttttccaatatatgttttttatcgtatcagcagtaaactgtaccattgtcagttgaatattatggctagtctttttaacctgttctgcggtaaaaagaggaacgttttacgaaataggattgaccataactattttcaactagatcaattgctattgggaacattattatttattattctagtgttcttgactcccacagtgatggcattctatatgtcatacacagttttgagaatgctaacaataactatcgaaatattctcggaagctgtcattgcactcattaaccattttccattgttcgcattattacttaggttaaaagatcctaaacgtctacccggtggcatttcaattgagctcaaaaccacggtttctaacaagcatacaaccttagaacttcaaaacaatcctattaaattcaagagtatgttcagaccatacaatctattgttgtcgcaaatgaggacaaattatttctcgtttgctactgtacgaaagattgtccgaggggagtctataatggtcaatagaaataagctgtactatgttctttattcttcactgcctagtaagccattgagtgtaaaggatttatacaaaaggctgactattcaggcataacgttttcttttataagtaaagtagcgttttcttgcttcagctatttgttgttttatttttgattttgtatgtacatgaaatgagtttctacataatgaata

SEQ ID NO: 1064 - DNA, 1429 bp, Saccharomyces cerevisiae
tgagagttggttttattttcattttgcgttttcgttttccgtcttttagcttttgtccaactaacttgtagtataagctgtctgtaagaataaaacggaaatagagccagtatgcccagggatccattgattggtattgtgggtaagccatcttcagggaaatccaccacattaaattctttgacggacgcaggtgcggcggtaggagcatttccctttaccacgatcgagccaaatcaggcaaccggctacttgcaagttgagtgtgcttgctccagatttggcaaggaagatctttgtaaacctaactacgggtggtgtagcaagggtaagaggcatatccccatcaaactgttggatgtggcagggcttgtgcctggagcgcattccggcagagggcttggaaataaattcttggatgatttaagacacgcagatgctcttattcatgtggtggacgttagtggaaccacagatgcagaggggaagaacacaagaggatatgatccattgaacgatatagaatggctgcaagacgaaatcaggctttgggttgaggggaacctgaagaaaagatgggggtctattgtgcgtaaacatacagcaacgaaatctagcatagtggacacacttcaagcgcaattcggtgggtacggttcacatgcgcccatgatccaaaaagccctggacaggttgaagggactaccacctttggaaaaatgggatgacgaatggatcactcgagtggtcaagtcctttatgatggagaaatttccaactgtgttggcactcaacaagattgaccaccctgacgccgataaaaatgtttctaaaatcatgctaaagtatcctgacaccaaagctgtactgaccagtgcagtgacggaagtttttttgaggaaattgaaaaagcaaggttttatattatacgaggagggcacggaatttgttgacacatttgaggacgagccagacaaactaaagccactggacgacaagatccttaacagaattgaaaatatcagagatttggtcctgtatagattcggatctacgggtgttgttcaggttctgcaagcagcaacggacatccttggtctaataccggtgtacactgtgaagaacatccagacttttacgggtggcaacggaaccaacgtatttagagattgttttttggtcaagcgaggaacccctgttggcaaagttgccaggtatatcatgggtggcgaggtcaccattgcaagcattgaaaccgttggcggcgtgagagtcagtgaagaaagtcttgttgagcccggtaagaatgacatactcggcttcaagatcgctccaagatcagcataacttgagtgccagtgaatattaagtaatcatcaaagtatatgtgtaattgtttatactcttagtaaaggatgctccctacaag

SEQ ID NO: 1065 - DNA, 413 bp, Saccharomyces cerevisiae
acgagagtctacgatatctttaaataacacatcaataatggtcactcaattaaaatccgcttctgaatacgacagtgctttagcatctggcgacaagttagtcgttgttgacttttttgccacatggtgtgggccatgtaaaatgattgcaccaatgattgaaaagtttgcagaacaatattctgacgctgctttttacaagttggatgttgatgaagtctcagatgttgctcaaaaagctgaagtttcttccatgcctaccctaatcttctacaagggcggtaaggaggttaccagagtcgtcggtgccaacccagctgctatcaagcaagctattgcttccaacgtatagttgccggtatattaacgctacgtaaagtacatcatgtttaccagtttaaataaacaatttt

SEQ ID NO: 1066 - DNA, 897 bp, Saccharomyces cerevisiae
atcaagtatcagaaagagtaataaaaatgtctgcaaaacagcaactacgtatattagttccggtgaaaagggtagttgatttccagatcaagcctagagtaaataagaccttaactgggattgaaaccagtggaatcaaattcagtatcaaccctttcgatgatattgctgtcgaagaagccatcagaattaaagaaaagaacaagagtttagtagaatctacgcatgcagtttctattggctccgccaaagctcaggatattctaagaaattgccttgctaagggaatagacacctgtagtttaattgactctgtgggtaaagaaaacatagagcccttagcaattgctaaaatcttaaaagctgttgttgaaaagaagggttctaatctggttttgatgggaaagcaagccattgatgatgactgtaacaacaccggtcagatgttggcaggtttattaaattggccacaggcaacaaatgcggcaaaggtggaattccttgataatggtagagttcaggtaacaagagaaattgacgatggagaagaagtaattgaagcttccttaccaatggttattactacagatttgagattgaacactccgcgttacgtaggactgcccaaactaatgaaggcgaagaaaaagcctattgaaaaattggatatagcaaaagattttcctgaaattaatattgaacctcagttaaagatagtgtcgatggaagagccaaagactaagtcacctggtgtgaaattgaattctgtggatgaattgattgaaaagttaaaagaagttaaggccatttaaatgcaacaaaggtcaaatgacataaaatgaaaactgataatattactaaggtttataaaaaaaaattgctgtatatgtgtacata

SEQ ID NO: 1067 - DNA, 1518 bp, Saccharomyces cerevisiae
ttgtattttttatacccattcccctttcttgcatacgccagtcacttttctttattgtattgtttaactttcaaatttcactcttgctattctctcttggtagtacaaagcacagcagacacaaagaaaaatggcaaacccaacaacagggaagtcctcgattagggctaagctttctaactcatcgctatcaaacctatttaaaaaaaataaaaataaaagacagcgtgaggaaacggaagagcaggacaatgaggataaggatgagagtaagaaccaggatgaaaataaggacacacagctcactccccgcaagcgtcgccggttgacgaaggagtttgaagagaaggaggctcgttacaccaacgagttgcccaaggaactgcgcaagtatcgtcctaaaggtttcagattcaatttgcctccaacggatagacccatcaggatatatgcagatggtgtttttgatcttttccatcttggccacatgaagcaactggaacagtgtaagaaggctttccccaatgtaacactgatagttggtgtgcctagcgacaaaatcactcacaaactaaaaggtttgactgtgctgaccgataagcagcgttgtgaaactttaacgcactgcagatgggttgacgaagtcgtgcccaacgctccctggtgtgtcaccccagaatttctactagaacacaagattgactacgtggcacatgacgatattccttacgttagcgccgacagcgacgatatctacaagccaataaaggagatgggaaaattcttgactacccaaagaaccaatggtgtctctacaagtgatattatcacaaagatcatcagagattatgacaaatatttgatgagaaactttgcaaggggtgctaccagacaggagctgaacgtttcttggttgaagaaaaacgaactggagttcaaaaaacacatcaatgaattcaggtcatatttcaagaaaaaccagacaaatttgaataacgcctccagagacttgtacttcgaagtccgtgaaatcttgctaaagaaaacgttgggcaaaaaactctactccaagttaataggcaatgaattaaagaaacaaaatcaacgacaaagaaaacagaattttttggatgatccgtttactaggaagctaatcagggaggcctctccggctacagagtttgccaacgaatttacgggcgaaaactctaccgctaaatcaccggatgacaatggaaatcttttcagtcaggaagatgatgaagacacaaattctaacaacacgaatacaaattcagattcagattcaaacactaactcaacgcctcccagtgaagatgacgacgacaacgacaggttaactttggaaaacctaacacagaagaagaaacaatcagcgaactgagcccctcctccaatctctgtgcgtctctttctctctcccttcaaccaaccctttttgtcgcctccacgtataaacaagcgtatgtacatatttaaagatataataagataaaa

SEQ ID NO: 1068 - DNA, 792 bp, Saccharomyces cerevisiae
aaaagcctagatgtagcagtgcgaagcgaactcgatacttgctcatcattgatttcggcatctttgtgtagaaaactacaaatgtctgacggaacactgtttactgatttgaaggagagaaagttgattaggaccattgtgccaagaggtttagtgcgttccttgaagctggacgttaagcttgctgatccaagtgacgctcagcaactttacgaaagggagtttcccttgcgtaagtacccaacttttgttggaccgcatgacgagtggacgcttacagaggcaatggctattgactactacttgatccatctgtcgagcgacaaggaagctgtgcgccagttgttgggtcccgaaggtgacttcaaaactcgtgcagatattttaagatgggaatcgctttccaacagtgatttcttgaatgaggtttgtgaggtgtttttccctctaattggcgtaaagccatataatgccactgaattcaaagccgcaagagagaatgtcgacaccattgtttcgctttacgagaaaaggttaaagaaacagcaataccttgtctgtgatgaccacgaaactcttgctgatttaatctcagcggctgctttttcgctagggtttataagttttttcgatgaaacatggaggtctaagcatccagaggttacgcgctggtttaatcgagtaattaagtcccgcttttttgaaggtgaatttgagagtttcaaaatgtgtgagactgagatgcaacccattaaataagagtatagtgtataaagatcagtataatttata

SEQ ID NO: 1069 - DNA, 2473 bp, Saccharomyces cerevisiae
gtatatctatttgtatatcccagttcctgcaaaaactttatatagttaacgttccataatcatggtggaatgtatcactcccgaagccatttttataggtgctaacaagcaaactcaggttagcgatatacacaaagttaaaaaaatcgtcgcatttggcgcaggtaaaactattgcattatgggaccccattgaaccaaataataaaggtgtttatgcaactttgaaaggccacgaagctgaagtgacttgtgtcagatttgtcccagattcagattttatggtatctgcatctgaggatcatcatgttaagatctggaaatttactgattactcacatttacaatgtattcaaaccattcaacattactcgaagacgattgtggcattaagcgctttaccaagtcttatttcagtcggttgtgctgatggtactatcagcatatggagacaaaatattcaaaatgatgagtttggtcttgctcatgaattcaccataaaaaagggattcttctatccactgtgtttatcactgtcaaaagttgaagaaaaaaagtatttacttgccattgggggtactaatgtgaacgtttttatcgcatctttcattttaagtgattctggcattgagaagtgtcgagtggttgcagaattggaaggtcatgaagactgggtcaagtcattggctttccgtcaccaggaaactccgggtgattatttgttatgctctggctctcaggaccgttatattagattgtggagaattaggattaacgatttaatcgatgactctgaagaagattcaaagaaattaacattattgagcaataaacaatataaatttcaaattgatgatgaattgagagtaggcataaattttgaagccttaattatgggccatgatgattggatttcatcccttcagtggcacgaaagtcgcttacaactactagctgctactgctgatacttcattgatggtatgggaacctgatgagacttcaggcatttgggtgtgcagtctacggttaggagaaatgtcctcaaaaggtgcctcaactgcaacgggttcctctggaggtttttggtcctgtctatggtttactcatgagagaatggatttctttttgaccaatggtaagactgggtcctggaggatgtgggctacaaaggataatattatttgcgatcaaaggttgggcatatccggtgccacgaaggatgtgacggacattgcttggtctcctagcggcgagtacctattggctacttctctggatcagaccactagactctttgctccatggatttatgatgccagcgggagaaaaagggaaatagctacctggcatgaattttctaggccacaaatacatggttatgatatgatttgtgttgagacagtgacggataccagatttgtaagtggtggtgatgaaaaaatcttgagatcatttgacctacctaaaggggtggcaggaatgttacaaaagtttgttggtattcaatttgaggaaaaaagtgaaatgccagactctgctaccgttcctgtgttaggtttgtctaataaagctggtgaggatgacgcaaatgaagatgatgaagaggaggaaggtggtaataaagaaacaccagatatcactgatccattgtccttgctagaatgtccacctatggaagaccaattgcaaagacacttgttatggcctgaagtggaaaagctttacggacatggttttgaaataacgtgtcttgatatttctccggatcagaaattaattgcttctgcttgtagatcaaataatgttcagaatgcagttattagaatattcagcacagaaaattggttagaaataaagcctgcattaccgttccacagtctaacgataacaagattaaaattctctaaagatggaaaatttttattgagtgtttgtagagacagaaaatgggcgctttgggaaagaaatatggaagataatacttttgaattgagattcaaaaatgaaaaaccacacacaaggattatatgggatgcagactgggcaccattagagtttggtaatgtttttgtcaccgcgtccagggataaaactgtcaaagtatggaggcaccaaaaggagccagctgatgactacgttctggaagcatcaattaaacacactaaagctgtcactgctatttccatacatgacagcatgataagagagaaaattttgatatcggtgggtcttgaaaacggtgagatttatttatacagttatactttgggaaagtttgagttaataacgcagctaaacgaggatataacaccagcagacaaaattacaagattgaggtggtcacatttaaagagaaacggtaaattatttttaggtgtaggaagtagtgatttgtccacccgtatatactcattagcatatgaataggcaatatctatatcatttctcatgtgaaaagaagaggataataag

SEQ ID NO: 1070 - DNA, 1733 bp, Saccharomyces cerevisiae
ataagtgtaagtagccgtacagagaacaaatatgactaaatcggttggtgatgaagagtcacagtacattgaggaccctagttttgcagcagcagctgcatttactggcggcagggacggggtttcgtacagtaatcagcgatttgctgagggttccggccattcttctgacttagcaaagtcattagaagactatcggcctcctgatgaaaagccgtcctcattgtcatctgtgggggaaggtggcgctaatgaggaagagaagggcggtaacgacggcggtcccttggcaagaattcaaacagggcttttttctccaagactgcgaaatcataggaaaaagattctctcgaagtttgttttgaacaacttcttcattgcttgtgtgtgtgtatcgctcatatcgatttactggggtgcctgttacggaacagatcgttactttttcaaagtgaaaaatattgttgtattgcaggatgcgccatctaatacttcagttcaatctatttccgcgatcataccctcattgttagcgtctgtccccgggacatggcatatatacaacgcaacatcatttcataggaaatttggtacgacgaactccaccgaaattgacagaaagatagtcgatttaatttacgatgagagatactggctggcgttaaacgttaaacctaatgctacagacactttgtataattctttgattagccaagacgcaaactcggagttcaattcatcaattttttttgaatccgtgtttgaaagtggtcgtgacccatcgagtgttaaatcgaccattctaccactcatgcaacaattggaggtccgccttcagaaatattacgtcaaggaatatcttccctcattgatgagcaacatcacttctaatgacagagatcttaatataaacatggagaactgggcgattgcaggacagttgttgttcacctacaacgattatcgtccctttgctgatcgtattctaatggcccctctgcaggtcggtctgatttattgtattttgttaaccgttttacaactgtcattatatggtaagttgcacggagaaatggccagagttctgaagccaaagcatattttaatctacaggcttctaatttcctgggcaacttattttcttctttccattggattctgtaccgtatctgcaatttttaggatcgatttcacccccgcctttggcagaggaggattcgtagtatattggatgtctacgtggttggtaatgatggctgttggtggtgccaatgaaaacgttctcagcttagttatagcttactgccctccatacctgagtatttggttgatgacgtggatcatattaaatatttctgcttcattctacccaatggttttgaacaacgaattttacaggtacggctacataatgccaatccataatgccgtggatatctataaagtgatttttttgaatttaaccaaaagaaaaatgggaagaaattacggtattctcgtggcatgggttgccctcaatacatccttgatgccattttgtatgaagtttgcaggtaaaaaaatgcaaaaaaatgctatgcaagcagcagaagccgctgtcgcagcagctacccagcgtgctagccgcccggcagaggccaatactgataaaaataacaacccgcccggaaattaatgggtagggttaatagcttattcatatatacacttaatacgattaaaaattatttata

SEQ ID NO: 1071 - DNA, 1409 bp, Saccharomyces cerevisiae
agacaaatcaaattagcgctttccagtgagaatataagagagcattgaaagagctaggttattgttaaatcatctcgagggaaaaattcaaaaatgctaagtgcaatttccaaagtctccactttaaaatcatgtacaagatatttaaccaaatgcaactatcatgcatcagctaaattacttgctgtaaagacattttcaatgcctgcaatgtctcctactatggagaaaggggggattgtgtcttggaaatataaagttggcgaaccattcagcgcgggcgatgtgatattagaagtggaaacagataaatctcaaattgatgtggaagcactggacgatggtaaactagctaagatcctgaaagatgaaggctctaaagatgttgatgttggtgaacctattgcttatattgctgatgttgatgatgatttagctactataaagttaccccaagaggccaacaccgcaaatgcgaaatctattgaaattaagaagccatccgcagatagtactgaagcaacacaacaacatttaaaaaaagccacagttacaccaataaaaaccgttgacggcagccaagccaatcttgaacagacgctattaccatccgtgtcattactactggctgagaacaatatatccaaacaaaaggctttgaaggaaattgcgccatctggttccaacggtagactattaaagggtgatgtgctagcatacctagggaaaataccacaagattcggttaacaaggtaacagaatttatcaagaagaacgaacgtctcgatttatcgaacattaaacctatacagctcaaaccaaaaatagccgagcaagctcaaacaaaagctgccgacaagccaaagattactcctgtagaatttgaagagcaattagtgttccatgctcccgcctctattccgtttgacaaactgagtgaatcattgaactctttcatgaaagaagcttaccagttctcacacggaacaccactaatggacacaaattcgaaatactttgaccctattttcgaggaccttgtcaccttgagcccaagagagccaagatttaaattttcctatgacttgatgcaaattcccaaagctaataacatgcaagacacgtacggtcaagaagacatatttgacctcttaacaggttcagacgcgactgcctcatcagtaagacccgttgaaaagaacttacctgaaaaaaacgaatatatactagcgttgaatgttagcgtcaacaacaagaagtttaatgacgcggaggccaaggcaaaaagattccttgattacgtaagggagttagaatcattttgaataaaaaacacgctttttcagttcgagtttatcattatcaatactgccatttcaaagaatacgtaaataattaatagtagtga

SEQ ID NO: 1072 - DNA, 1653 bp, Saccharomyces cerevisiae
atttctactaaatagcaagagaaaggttaagataatataatattcataataattcaatacagcaaaaaaccatgaaagtgcttgacctactaacggtactcagtgcctcttcattattatctacattcgcggctgccgaaagtactgctactgcagacagtacaactgcagcttctagcactgcttcgtgtaacccgttaaaaactacaggttgtacgccggatacagctttggcaactagttttagcgaagatttctcatcttcatccaaatggtttaccgacttgaagcacgcaggtgaaatcaagtacggttcagacggtttgtcaatgacactggcgaaaagatacgataatccaagtttgaagtctaacttttatatcatgtatggtaaattggaagttatcttaaaagctgccaatggtaccggtattgtttcatcattctatttacaaagtgatgatttggatgaaattgatattgaatgggtgggtggtgacaacactcagttccaatctaacttcttttctaaaggtgataccacaacatacgacagaggcgaatttcacggtgtcgacactcctaccgacaaatttcataactacactttagattgggcgatggacaagacgacttggtacctcgatggagagtctgtcagagtattatcaaacacatcaagtgagggttacccacaatctcctatgtacctaatgatgggtatctgggccggtggtgacccagacaatgctgctggtaccattgaatgggctggtggtgaaaccaactacaatgacgctccattcactatgtacattgaaaaggtcattgtaactgattattctaccggtaaaaagtacacatatggtgaccaatctggttcttgggaatctattgaagctgacggtggttctatttacggcaggtatgaccaagcccaagaagatttcgcagttttagccaacggtggtagtatttccagcagctctacatcctcttctactgtatcttcctcggcgtcttccactgtatcttcctcggtttcttccactgtgtcctcctcggcttcttccactgtgtcttcctcggtttcttccactgtatcttcttcgtcttctgtatcttcctcttcatccacatctccatcttcttcgaccgctacttcatctaaaacacttgcttcctcatcagtcaccacatctagttccattagttcattcgaaaagcaatcctcctcttcatccaagaaaacagtggcttcctcttctacaagtgagtccattatttcctccactaagaccccagccactgtttcctctaccactaggtctacagttgccccaactactcaacaatcttccgtatcatcggacagtcctgtacaagataagggtggtgtcgcaacatcaagtaatgacgtgaccagttctactacccagatatcaagcaaatacacatctacaatccaaagttcttcctccgaagccagctcgacaaactctgttcaaatttctaacggtgctgatttagctcagagtttaccaagagagggaaaacttttttccgtactcgtagctttactagccttgctataagtggaaaatttcttttagaacaatattcgtagatcactaagtaacatttgagaccgaa

SEQ ID NO: 1073 - DNA, 1289 bp, Saccharomyces cerevisiae
catccataaccgcatactctaattgacgataacatgtcctctgctgccacggttgaccctaatgaggcgttcggtctcattaccaagaacttgcaagaagtcttgaacccacaaatcatcaaagatgttctcgaagtacaaaagagacatttgaaattatactggggtaccgcgcccactggaagacctcattgtggttattttgttcctatgaccaagcttgctgatttcttgaaagcaggttgtgaagtgactgttcttttagcagacttgcacgcctttttggacaacatgaaggcgccattggaagtggtgaactatagggccaaatactatgaattgaccatcaaagctatcttgagaagcatcaatgttccaattgaaaagctaaaatttgttgttggctcttcttaccagctaactccagactataccatggatatctttagattatccaacattgtttcacaaaacgatgctaaaagggcaggcgctgatgttgtcaagcaagtcgccaatccattattgagtgggcttatctatcctttaatgcaagcgttggacgaacaattcttagatgttgattgccaatttggtggtgtcgaccagagaaaaatttttgtcttagcggaagaaaatttaccaagtttgggctacaagaaaagagcacatttaatgaaccctatggttccaggtttggctcaaggtggtaaaatgtctgcctctgatccgaattcaaaaatcgaccttttggaagaaccaaagcaagttaagaaaaagatcaatagtgcattttgtagccccggtaacgtcgaagagaatggtttactgtcatttgtccaatatgtcattgcaccaatccaagaattgaagtttggtacaaatcacttcgaattcttcattgatagaccagaaaagttcggtggtccaattacctacaaatccttcgaagaaatgaaattggcttttaaagaagaaaaattgtccccacctgatctaaaaattggtgttgctgacgctatcaacgagctattggagccaatcagacaagaatttgccaacaacaaggaatttcaagaggcctccgaaaagggttatccagttgccacaccacaaaagtcgaaaaaggctaagaaaccaaagaataagggtactaagtacccaggcgctactaagaccaacgagattgccacgaaactagaggaaaccaaattgtaagcatagcttaatccgttttcacgattcataatataataaataagaaaagatatatcatataaacgttataa

SEQ ID NO: 1074 - DNA, 618 bp, Saccharomyces cerevisiae
cggatagtcaataatcgttgaaggttgattttcatatccttcgcaatttcgtaaagcaacaatagcaatacggactaaaatgtctttttcatcactatataaaacctttttcaaacgaaacgctgtttttgttggtactatctttgcaggtgcctttgttttccaaactgtatttgatactgctattacttcatggtacgagaatcacaacaaaggaaaattatggaaagatgtcaaggctcgaatagctgcaggcgatggagacgacgatgatgagtaaacgctgattatgtcacacatatacgtgcaaacgctctctctctctctcaagctatataagtggcactcgtcttatttattatttttttattttggctggttgttcatgttcaacccaacctcataaaggcactcaacttcatattttgacacaaatctatgtctcgccaaagcgcattcaaatttcagaatggaaatagacacgaacgagcctgtctgtcagatgttcacaaaatccttattataattttatattctactaaaggaaaaagagaattaggaaaaagaataactcattttatgtatatacatatattttgtacatatctataccaagca

SEQ ID NO: 1075 - DNA, 1314 bp, Saccharomyces cerevisiae
ggtttctgaccccacctctgtccccttacactatcaaatttcacttttttactttttttttttttgcaaaaggccttgtctcgaaacagaaagaaaaaaaattcatttaaaaagggaaataaaaaattgctaatacaaaaacagatctttttgagccacacaaccccgcgcaacgcacacaattagttattacaatggaagcacataaccaatttttgaagactttccaaaaagaacgtcatgatatgaaagaagctgaaaaggatgaaatccttttgatggaaaacagccgtagattcgtgatgttccctatcaaataccacgaaatctgggctgcttacaagaaggttgaagcctctttctggactgcggaagaaatcgaattggctaaggacactgaagatttccaaaaattgactgatgaccagaagacctacatcggtaacttgttagccttgtccatttcttctgacaaccttgtcaacaagtacttgatcgaaaacttttctgcccaattgcaaaaccctgaaggtaagagtttctacgggttccagattatgatggaaaacatctactctgaagtttactccatgatggttgatgccttcttcaaggaccctaagaacatccctctattcaaggaaattgccaatttgcctgaagtcaagcataaggctgctttcatcgagagatggatttccaacgatgacagcttgtatgctgaaagactagtagcatttgctgcaaaggaaggtattttccaagctggtaactatgcttctatgttctggttgactgacaaaaagattatgccaggtttagcaatggccaacagaaacatctgtagagacagaggtgcctacactgacttttcatgcttgctatttgcccatttgagaaccaagccaaaccccaagatcattgaaaaaatcattaccgaagccgtggaaattgaaaaggaatactactcaaactctttgccagtagaaaaatttggtatggatttgaagagcattcacacctacatagaatttgtcgctgacggtctattacaaggtttcggtaacgaaaaatactacaacgccgtcaacccattcgaattcatggaggatgtcgctaccgctggtaagaccaccttctttgaaaagaaggtttccgactaccaaaaggccagtgacatgtctaagtccgctaccccatccaaggaaattaactttgatgatgacttctaagtcaacgacggggtgcgttcttttattcttggccacttttatttatatatatttatatatacctaggtacagtataactaaa

SEQ ID NO: 1076 - DNA, 2485 bp, Saccharomyces cerevisiae
gcatctctcatcgcatagatctttaaggaagatataggtcattcactcgcgttttcttctatctttctttttgttctttccagaagacgtttcgattatttccgaattgatcttgaaggggaagcaataattaaatctttgaaaattgatttgatataaaaactgacatcctcagtcacggaagtaattaaaggagttcattacattgaaacaatatgaagggaaactttaggaaaagagatagctccaccaactcaagaaagggtggtaattctgacagcaattatacgaatggaggcgtccctaatcaaaacaacagttcaatgttctatgagaaccctgaaattacgagaaactttgatgaccgtcaagattatttgttagccaatagtataggctctgatgtaacagtaactgttacttcaggtgtgaaatataccggtttattagtatcttgtaatttggaatctactaatggtatcgatgttgtattaagatttcccagggttgctgattcaggagttagtgattctgtggatgacttggctaagactttgggagaaaccttgctgattcacggtgaagatgtcgctgagttggaactgaagaatattgatttgtctcttgatgagaaatgggaaaattccaaagcccaagaaacaacgcccgccagaacaaatattgaaaaggaaagggtaaatggagaatcgaatgaagttacgaaattcaggactgatgttgatatttctggttctggtagagaaattaaggagcgtaagttagaaaaatggacacccgaagaaggcgcggaacattttgatatcaacaagggtaaagctttggaagacgattctgccagttgggatcaatttgctgtgaacgagaaaaagtttggcgtaaagtcaacttttgatgaacatttgtatacaacaaagattaacaaggatgaccctaattacagtaagaggttgcaagaagccgaaagaatcgctaaggaaattgaatcgcaaggaacttccggtaatattcatattgcagaggacagaggtatcataattgatgattctggtctagatgaagaagacttatactctggtgttgatagaagaggagatgagttgttggccgctttaaaaagcaattctaagcctaattccaacaaggggaataggtatgtcccacctactttaagacagcaacctcatcatatggatccagcaattatctcttcgagtaattctaacaaaaatgaaaatgccgtttccacggatacctctactcccgcagcagcaggtgcgccagagggaaaacccccacaaaagacttctaagaataagaaaagtttgagtagcaaagaagcccagattgaagagttgaagaaattttccgagaaatttaaagttccatatgatattccaaaagacatgctagaagtcttaaaaaggtcaagctctacattaaaatctaattcttcgttgcctccaaaaccgatcagcaaaaccccttcggccaagactgtttctcctactacacagatttctgcagggaaatcagaatctagaagaagtggcagcaacatatctcaaggccaatcatctaccggccataccacgagatctagtacttcattgagaagacgtaatcatggttccttttttggtgccaagaaccctcatactaatgacgccaagagagtgttgttcggaaaaagttttaatatgttcatcaaatccaaggaggcccacgatgaaaagaagaaaggcgatgatgcctcggagaatatggaacccttctttattgaaaaaccttattttactgcgccaacctggttaaatacaattgaagaatcgtataagacatttttcccagatgaggatacggcgattcaagaagctcaaactaggttccaacaacgccaattgaactccatgggcaatgctgtgcctggtatgaatccagctatgggcatgaatatgggcgggatgatgggctttccgatgggaggtccatcggcatcaccaaatccgatgatgaatggctttgctgctgggtcaatgggtatgtacatgccatttcaacctcagccaatgttttatcacccatctatgcctcaaatgatgccagttatgggtagcaatggggctgaagaaggaggaggaaatatttcgccccatgtccctgcaggttttatggcagctggccctggcgctcctatgggtgccttcgggtatccaggagggatacccttccaaggaatgatgggatcaggtccatctggcatgccagcgaacgggtcggcaatgcacagtcatggccatagtagaaattaccatcaaactagccaccatggccaccataatagtagtaccagtggccataaatagtgaaggaagcacgtcagaaaaagcaatatatagtaataaattcatgcactttataaatatggtatataatcagtggtacttacttacccataaataatgga

SEQ ID NO: 1077 - DNA, 1608 bp, Saccharomyces cerevisiae
atggaagatatagaaggatacgaaccacatatcactcaagagttgatagaccgtggccatgcaagacgtatgggccacttggaaaactactttgctgttttgagtaggcagaaaatgtactcgaattttactgtttacgcggaattgaataaaggtgttaataagagacaactaatgcttgtcttgaaagtattacttcaaaaatactcaactcttgcgcatacaatcattcctaagcattatcctcatcatgaagcgtactactctagcgaagagtaccttagtaaaccttttccacagcatgatttcataaaggtgatttctcatcttgaattcgatgacttgattatgaataatcaaccagaatacagagaagtcatggagaaaatctcagaacagttcaaaaaggatgatttcaaagtcaccaataggttaatcgaattgattagccctgtaatcatacctctgggtaatccgaagaggcctaattggagattgatttgtttaccaggtaaggatactgatgggtttgaaacgtggaaaaacttcgtttatgtcactaaccactgcggctccgacggtgtcagtggatcgaattttttcaaagatttagctctactcttttgtaaaatcgaagaaaaagggtttgattatgatgaagagttcatcgaagatcaagtcatcattgactatgatcgagactacactgaaatttctaaattgccaaaaccgattacggatcgtattgactacaagccagcattgacttcattacccaaattctttttaacaaccttcatttatgaacattgtaattttaaaacctccagcgaatctacacttacagctagatatagcccctctagtaatgctaatgctagttacaattacttgttgcatttcagtactaagcaagtagaacaaatcagagctcagatcaagaaaaatgttcacgatgggtgcaccctaacacccttcattcaagcgtgctttcttgtagccctgtatagactggataagctgttcacaaaatctcttctcgagtatgggttcgatgtggctattccaagcaacgcaagaaggtttttaccaaacgatgaagagttaagagattcttataaatacggctccaacgttggaggttcgcattacgcctatctaatctcctcattcgacattcccgaaggtgacaatgacaagttttggagtcttgtcgaatactactatgaccgctttttagaatcgtacgacaacggtgaccacttgattggtctgggggtcctacaacttgattttatcgttgaaaacaagaatatagacagccttcttgccaactcttatttgcaccagcaaagaggcggtgcaatcatcagtaatacaggacttgtctcgcaagatacgaccaagccgtactacgttcgggatttaatcttctcgcagtctgcaggcgccttgagatttgcgttcggcctaaacgtttgctccacaaacgtgaatggtatgaacatggacatgagcgtggttcagggcactctacgggatcgtggcgaatgggaatcgttctgcaagctcttctaccaaaccatcggcgaatttgcgtcgctttaa

SEQ ID NO: 1078 - DNA, 1714 bp, Saccharomyces cerevisiae
aatacaggttatttcgaacaattgaaaaaaaaaaatcacagaaaaacatatcgagaaaagggtcatgtctgctgttaacgttgcacctgaattgattaatgccgacaacacaattacctacgatgcgattgtcatcggtgctggtgttatcggtccatgtgttgctactggtctagcaagaaagggtaagaaagttcttatcgtagaacgtgactgggctatgcctgatagaattgttggtgaattgatgcaaccaggtggtgttagagcattgagaagtctgggtatgattcaatctatcaacaacatcgaagcatatcctgttaccggttataccgtctttttcaacggcgaacaagttgatattccatacccttacaaggccgatatccctaaagttgaaaaattgaaggacttggtcaaagatggtaatgacaaggtcttggaagacagcactattcacatcaaggattacgaagatgatgaaagagaaaggggtgttgcttttgttcatggtagattcttgaacaacttgagaaacattactgctcaagagccaaatgttactagagtgcaaggtaactgtattgagatattgaaggatgaaaagaatgaggttgttggtgccaaggttgacattgatggccgtggcaaggtggaattcaaagcccacttgacatttatctgtgacggtatcttttcacgtttcagaaaggaattgcacccagaccatgttccaactgtcggttcttcgtttgtcggtatgtctttgttcaatgctaagaatcctgctcctatgcacggtcacgttattcttggtagtgatcatatgccaatcttggtttaccaaatcagtccagaagaaacaagaatcctttgtgcttacaactctccaaaggtcccagctgatatcaagagttggatgattaaggatgtccaacctttcattccaaagagtctacgtccttcatttgatgaagccgtcagccaaggtaaatttagagctatgccaaactcctacttgccagctagacaaaacgacgtcactggtatgtgtgttatcggtgacgctctaaatatgagacatccattgactggtggtggtatgactgtcggtttgcatgatgttgtcttgttgattaagaaaataggtgacctagacttcagcgaccgtgaaaaggttttggatgaattactagactaccatttcgaaagaaagagttacgattccgttattaacgttttgtcagtggctttgtattctttgttcgctgctgacagcgataacttgaaggcattacaaaaaggttgtttcaaatatttccaaagaggtggcgattgtgtcaacaaacccgttgaatttctgtctggtgtcttgccaaagcctttgcaattgaccagggttttcttcgctgtcgctttttacaccatttacttgaacatggaagaacgtggtttcttgggattaccaatggctttattggaaggtattatgattttgatcacagctattagagtattcaccccatttttgtttggtgagttgattggttaactacagcttataagggagagaggataggaaccgtcaaacattaagctgcaccttttttttttattacagaagtcggcttggaaggcttgtatagtacattacgataaacacatcttatttttatttattacttatttattttacatattttcaaaaaaa

SEQ ID NO: 1079 - DNA, 894 bp, Saccharomyces cerevisiae
gtactgcaagacaactattagtccctctcgagatgtctttctacaatactagtaacaatgctaataatggcggtggcttttatcagccttctgcacaatttgccgttccccaagggtcaatgagttttcaaaataccgtcggttcttctaatactggcaacgataacaatttgggtgttgcccccgaccctttgcctgtaggtattttacatgctctttcaactaagggatatccacatgaacctccattactggaggaaattggaataaatttcgatcatatcataacgaaaactaaaatggttcttataccaatacgttttggtagtggtgtgccacaagaaattctaaacgattcagatttggctgggcctttgatattctttttgttattcggactttttctattgatggctggaaaggttcattttggatatatctatggtgtcgctttgtttggtaccatttctttgcacaatctatcgaaattaatgagcaataacgatacttccactcaaacgaacctacaatttttcaatacagcgtccatcttaggatactgctttttgcctctgtgtttcctttctttactgggcattttccatggtttgaacaacactacaggttatgttgtatcagtactatttgtaatttggagtacttggacctcgtctggatttttaaattctttgctccaattgcaaaatgcaagattgctaattgcctacccactgttgattttctacagtgtttttgccctcatggtaatttttgtctgaagggaattggcttaggggcgatatttgtatatatgtttttctgaactatgtttgaataaagagtgtatacagcattacataatcacacttacttccttgtatagtgcaagcaata

SEQ ID NO: 1080 - DNA, 1363 bp, Saccharomyces cerevisiae
atggctaagactactaaagtaaaaggtaacaagaaggaagttaaggcttccaaacaagccaaagaagaaaaagctaaggccgtctcttcctcttcctccgaatcttcatcctcatcttcatcttcatctgaatctgaatctgagtctgagtctgaatctgaatcttcatcttcatcttcatcctctgattctgaatcctcttcttcatcgtcttctgacagcgaaagtgaagctgaaaccaagaaggaagaatccaaggattcctcttcctcttcctctgactcttcttccgacgaagaagaagaagaagaaaaagaagaaaccaagaaggaagaatcaaaagaatcttctagctctgattcatcctcatcttcatcttctgatagcgaaagcgaaaaggaagagtctaacgataagaaacgtaaatctgaggacgccgaagaagaagaagacgaagagtcttccaacaagaagcaaaaaaatgaagaaaccgaagaaccagctactattttcgttggtagactatcgtggtctattgatgacgaatggttgaagaaggaattcgaacacatcggtggtgtcattggtgccagagttatttatgaaagaggtaccgatagatctcgtggttatggttacgttgattttgaaaacaaatcttatgctgaaaaggccattcaagaaatgcaaggtaaggaaattgatggtagaccaatcaactgtgatatgtccacaagcaagccagctggtaacaacgatcgtgccaagaaattcggtgataccccatctgaaccatctgacactttgttcttgggtaacttatctttcaatgctgacagagacgctattttcgaattattcgctaaacacggtgaagttgtttccgtccgtatcccaacacatccagaaactgaacaaccaaaaggtttcggttatgttcaattctccaacatggaggacgccaagaaggctctagacgctttacaaggtgaatacattgacaacagaccagttagattagacttctcttctccaagaccaaacaacgatggtggtcgtggcggtagccgtggttttggtggtcgtggcggtggtcgtggcggtaaccgtggattcggtggtcgtggtggcgctcgcggtggccgtggcggtttcagaccatctggttctggtgctaatactgctccattgggcagatcaagaaataccgcttctttcgctggttcaaagaaaacatttgattaatgagaaaatgaaatgaatttcaatttcaattttttctctttttacgttaattactatattccatttttgaggaaaaatttggtctataatattttgtgtacattagtaagtaaatagg

SEQ ID NO: 1081 - DNA, 1009 bp, Saccharomyces cerevisiae
acatactccacttaaaagtaggaacatactcacattaaggtgttatcagaataaatgaatgttcaagacagaaggaggttattaggccctgctgctgccaagccaatggcgtttagcaacactactactcatgtgccagaaaagaaatcaacagatttgacacctaaaggcaatgaaagtgaacaggaactttctctacataccggtttcatcgaaaactgcaatggatctgcattagtagaagctagaagcttaggacaccaaacatcgctcattaccgctgtctatggaccacgctccattagaggatccttcacatctcaaggtactatatctattcagttaaagaacggtcttctggaaaaatataacacaaatgaactgaaggaagttagcagctttttaatgggcattttcaattcagtagtaaacctatctcgctaccccaagtccggcatcgatatcttcgtttatttaacgtatgataaggatcttacaaataatcctcaggacgacgattcgcaaagcaaaatgatgtcttctcaaatatcatctctcataccacattgtatcactagtataacgctagccttagctgatgccggcatcgaattagtggatatggcaggtgccggtgaggccaatggcactgtcgtatcattcatcaaaaatggagaggaaattgtaggtttttggaaggatgatggtgacgatgaagatcttttggaatgccttgatcgttgcaaggagcaatataaccgttatagagatttaatgataagctgtttaatgaaccaggaaacttagacacgagattatcctagtcggaaagaaaagtgaaagaggttaagaaaaaattcatggtaaaagaagcgcacaaaggcattgtacatcaacatcataatttataatgtcattctgcatatatggtagctccattatattacaacaacataactacttctattcaaaatgttaacttgaatcctagtactttttaaatatatat

SEQ ID NO: 1082 - DNA, 940 bp, Saccharomyces cerevisiae
tgaacaataatactattatttagtaacgatatagaacatttacatacaacgttctaatattttggcttctatcatcgcttagaaatatttggctaggaaacattaggactaatgagagactataaattagtagtattgggtgctggtggtgtcggtaaatcctgcttaaccgtgcagtttgtacagggagtttatttggatacgtatgatccaacgatcgaagattcttacaggaaaaccatcgagatcgataacaaggtattcgacctggaaattttagatacagcgggtatagcacaatttactgcaatgagagaattatacataaagtcaggaatggggttcctgttggtatattcagtaacagatcggcaatctttggaagaattaatggagctaagagaacaggtccttaggatcaaagattccgatcgcgttccaatggttctaataggtaacaaggctgatctaatcaatgaaagggtaataagtgtggaagaaggtatagaggtaagcagtaaatggggtagagttcccttttatgaaacaagcgctttgttgaggagcaatgtggatgaagtgttcgttgatttagttaggcaaatcattcggaatgaaatggaaagtgttgcagttaaagacgcaagaaatcaaagtcaacaatttagcaaaatcgagtctccatcaaccaggctccctagttctgcgaaacaggatacgaaacaatcaaacaataagcaatcatcaaaaggtttatataacaaatcttcacaaggacaagctaaagttaaacaatctactccggttaatgaaaagcacaaaccgtcacatgccgttccgaaatctggttctagcaacaggacaggaattagcgctacttcacaacaaaagaaaaagaagaaaaacgcttccacttgcactattctatagtcacttaatt

SEQ ID NO: 1083 - DNA, 1023 bp, Saccharomyces cerevisiae
agcaacaatttgaattgaaacgtatgtcgcgtgcccattaggaaatgagagaatattgaggacaacgaggagcttcgcagtgtaggaattgagaaagaagcgaccatttgaacaatgctgaggttaataagaggcccacgataaaggcgttatattaatcaacgttgaacatcttcccagaaaagtacatgcgaataaatcaggaccgtcgaaagacgtacggaacatcattggcaaatatacatcgggatctgttggatatgcttgtcgtgatgaaatactgttctcgttgtcggcttgataaattttctcccatttaaaactctttgaaccaaaattgtgtactaacatcaatttgtatataaaccatgagtgtatttcaccttgtggtttttcacagctttttaatttagaagaacaatgaaggttgaagttgattccttttccggcgctaagatctacccaggtagaggtactttatttgtccgtggtgactccaaaattttcagattccaaaactccaaatctgcttctttgttcaaacaaagaaagaacccaagaagaatcgcttggaccgtcttgttcagaaagcatcacaagaagggtatcaccgaagaagttgctaagaagagatctagaaagaccgttaaggcgcaaagaccaatcactggtgcttctttggacttgatcaaggaaagaagatctttgaagccagaagttagaaaagctaacagagaagaaaaattgaaagccaacaaggaaaagaagagagctgaaaaggctgctagaaaggctgaaaaggctaagtccgctggtgtccaaggttccaaggtttccaagcaacaagctaagggtgctttccaaaaggttgccgccacttcccgttaagataattaacttttgttagttttttattaataatatatcattacaagaaaaatgaaataaaaaaataaaaacgtgatccgtacttatttttgtgttaagtatcaaataatataatatataaaagaccgtgataca

SEQ ID NO: 1084 - DNA, 1021 bp, Saccharomyces cerevisiae
attagatcttccctttcttttttgaaattttcttttttggtctagagttggggtgatgatggtacccaggattagtgcttcaccagttttcaagaggatatttcttcgatggggatttgtaactttacccatacagaaaaccgtatcccatacactgcgcagggactttagtgccccttgtaggagtatggtaaaatgccttctcctacgacctgggataagtgtgcactcagcacaagacagaaaattttacagtacagaggaaaaaagtagtcagtttgatgaaaataaaagcaaaagtaacaatgggaagaaaaatgagccacacggtattaaaggattaatggctaagtatggttattctgcactgatcgtatatatcctcttaacttgtgttgatttgccattatgttttctgggagtccactcactaggtgaagagaagattaagatctatctgaacagaggtaagcaattgattgggatgggtgagcctgacgaaagcaaagtcattcaagatgttagaaggaaacaggctcatcgcgaagcagtgcaagcagagaatgctgacaaggtggaggacgcatcgaggaaaactttcaatgagagatggcaagagatgaaggacagcacgttgttggccgaattgctaattgcgtatggcatacacaagagtttgatcatcgttagagtacccctgacggcagtgctaacgccatccttcgtcaagcttctgcagaggtttggcatcgacttgatgaagaagcagaaaaaggtattccaaacgatggcctctggtgccaaaataagatacaaagggaacaaccctagcgatttcatcaagaatgagggcacagcgctcgacattacaaagcgcaaaccaagaaccaaaggccagaaatggtttgatggcctaatgtgaaagaatattagcgtaggcttagcatgtatatagagtttacatttcttttcttttttctacgtaaccacgttgtttacgtactagtaacagaacatttgg

SEQ ID NO: 1085 - DNA, 1201 bp, Saccharomyces cerevisiae
caacggtacgaaacttacattcaaaatcaataatttactttagaaaagaatgtctaattctgccaaacttatcgatgtcatcaccaaggtggcgttgcccattggtataattgctagcgggattcagtactccatgtatgatgtgaagggtggttctcgtggtgttattttcgacagaatcaatggtgtaaagcaacaggttgtgggtgaaggcactcatttcttggtgccttggctacagaaggcgatcatatacgatgtgaggacgaaaccaaagagcattgctaccaatactggtacgaaggatttgcaaatggtgtcattgaccttgagagtcttacatagaccagaggtcttacagctacccgcaatataccaaaatttgggtctcgattacgacgaaagagtgttaccatctatcggcaatgaggttttaaagtctatagtagctcaatttgatgctgctgagttaattactcagagagaaattatttctcaaaaaatcagaaaagagctttctacgagggccaacgaattcggtattaagttggaagatgtctctatcactcatatgacgtttggtcccgaattcacgaaagcagttgagcagaagcagattgcacagcaagatgccgaaagagccaaattccttgtcgaaaaggcagagcaagagagacaagcttctgttatcagagctgaaggtgaagcagaaagtgctgaattcatttcaaaagccttagctaaagttggtgatggtctgttattgattagaagattagaagcttctaaggacatcgctcaaacattagcaaactcatctaacgttgtctatttaccaagtcaacattctggtggtggtaacagcgagtcttcgggatcaccaaattccttgcttttgaacattggccgttaagtctggaaaagctatgaacacaataaactaggggagaaaatttttttttaatcatattagaaacctgtatatatgggggataacaacgccaataacatattccatctttccatttagttaccaacacgaatacgtatgctatcaatatcgtaacttagttttttatcatttatatatatacatggatgagcctacgaaaaaactaaagcacattcatgtatcaccataatattattttagaaagaactttttttgttaaatttatttaatgcaaaggttatataaaga

SEQ ID NO: 1086 - DNA, 2220 bp, Saccharomyces cerevisiae
ggatagtaaagattcaaaatgccatccctgtctcaaccatttagactagcaactctcccaaaaattgcttcattgagcaatttttctttacaagcagattacgttcaagtcgcagatggcacctttaatgaatctacaaataacataacgttaggtatttccgggtcatctatatctcaatatattattaatcctacaccaaagttaacattcgattacccaataccctctacaaatattatcacggcatgcaatgctgagaaaggtcaagcgaacattgacggaaatatagaagccagtaccgatgatgaagccaacaacgagaagactatcaacacccaaaaaaaaagaaatgttgaaatttgggcctttggtttaatggtaaataagggtaattatacgctaaatgttatcactaaggcactggaagataccactgatacctcaaatgaccatctgagtgagagtgatattgacaataaagcatacacgggttcagacgaatttttatctcagtataagatcaaggcgaaagccaaagtcatgagtattaaaattgacaccaagaacagcttagtaattgcaattttacagaacgggttgattgaaatttttgattttaagttaacacttttgcattcatttgatatatcttatgataacttaaaatatgctaaatggttcactgaaaatggaactgaatatgtttttgttctctgtccattacaggatgataaagtctgctataaattgctcgagctaacagattgtggcagtggagaaagttcgcccataaaagaattatcatctactatcatcgaaggattttcttttgaaaattcaaagctttgttatcaatttggaaaactttacaaattgaaccaggggaaaatatacatttactctttaccacattgccaattgcaacaagttattgaatttccgatggtggataaactcagtcctggagatgacttaatctctttccaacctgtttcagtaaacagagttctactgaccgtaaacaacgtcatttatctactagacttactgcattgttctactttaagccaaagagaattaactcacgtgaaaacattccaactattaaaatctgcagtgatcaattcagaaaagtcgcataattcaaaaacaatagcaattggtatttcaacgaaaaatggaccaaacccaacgtcttccttagaaataattaatattgatgttggaactaatacgttgaaggactcattaggcaagagttttcaagttggaaataatgatagctcagttattttaaagccgctatttgatgataaagacataaatgacaagagagtgaaatgtaacgacgtcagcggggattcaagcgttccagtcctccactgtaatgaagttattgaaaagctttcagcccttcaagataatgacattacatcatttgatgacatatttttcaaagaactaaaaatcaaagaagaacattatactgaaaaagatagatatatttctgatcctggctttttgaataaagttttagatctaattttcggaaagtttagcggaaatgattatccaaaaactttaacgtttttattgacacacccattgtttccattgagtcgtacacgcaacttgctatccttactaagagaccaacctagattatttaaacaagcaattgtaacatgcccaaacttgccattaaatgaactacttgaagaattgttttctatcagaaacagggaactattacttgatatctcatttaggattttgcaggatttcaccagagactctattaaacaagaaatgaagaaactaagtaaattagacgttcaaaatttcattgagttcataacaagcggtggtgaagacagctcaccagaatgcttcaaccctagccaaagcacgcagctatttcaactcttgtcccttgtgctagattctatcgggctattttcattagaaggtgctctattggagaacttaaccttatatattgacaaacaagttgagattgctgaaagaaataccgaattgtggaatttgattgatacgaaaggttttcagcatgggtttgctagctcaacctttgataacggaacttctcagaagcgagccttacccacttacaccatggaatacttggacatttgagtatgcaatgaatttgattgtattgtataatacctatatagaaaaggaactaatatatat

SEQ ID NO: 1087 - DNA, 1702 bp, Saccharomyces cerevisiae
acgcttgccttggtataatcaaatatctcgaatatgtcaacacccacagcagcagatcgcgcgaaggcacttgaaagaaagaacgaaggaaatgtttttgtgaaggaaaaacattttttaaaggccattgaaaaatatacagaggcgatcgatttagattctacacagtctatctatttttcgaacagagcatttgctcactttaaggtagataactttcaaagcgctttaaatgactgtgatgaagccattaaactggatcccaaaaatatcaaagcttatcatagacgtgcattatcctgcatggctctgctagaatttaaaaaggctaggaaagatttgaatgtgcttctaaaggcgaagcccaatgatccggctgctactaaggcgttacttacatgtgataggttcattagagaagaaagatttaggaaagctatcggaggcgcagaaaatgaagccaagatcagtttgtgtcagactttgaacttgagttcatttgatgctaatgcagatttagccaattatgaaggtccaaagttagaatttgaacagctgtatgacgataagaatgcctttaaaggtgcaaagatcaagaacatgtctcaagagtttatttccaaaatggttaacgatcttttcctaaagggaaaatatttaccaaaaaagtacgttgcagctattatctctcatgctgataccttatttcgtcaagagccatctatggtagaactagaaaataactctactcctgatgttaagatatcagtatgtggtgatacgcatggccaattttatgatgttttgaatttatttcgcaagtttggtaaagtaggtcctaagcacacttatctattcaatggtgattttgtcgaccgtggttcttggtcgtgtgaagttgcactattattctactgtttgaaaatattacatccaaataatttctttttgaacagaggtaatcatgagagtgataatatgaacaaaatctatgggtttgaagatgagtgtaaatacaaatattcacaaaggatatttaacatgtttgcacaaagttttgagagccttccattggctaccttaattaataatgattaccttgtaatgcatggtggtttaccaagtgatccttcagcaactttgtctgatttcaagaatattgatagatttgcccaaccacctagagatggcgcctttatggaacttctatgggcggacccacaagaagccaacgggatgggtccttctcagcgtggtttaggacatgcttttggacccgacattacagatagatttctaagaaacaacaaattgcgcaagatttttagatctcacgagttaagaatgggtggtgtgcaattcgagcagaagggtaaattaatgacagttttcagtgctccaaactattgtgatagccaaggtaatcttgggggtgttattcatgttgtaccaggccatggtattttacaggctggcaggaatgacgaccaaaatctaataattgagacattcgaagctgttgagcacccagatataaaaccaatggcctattctaatggtggttttggtttatagtcatgccttttctattttgctagattattatcaaaagcagaaagtctgggaataaaagaaactaatatgagctaacgaagtggaggaagtaactttttttttttttttataaatttatacatctttc

SEQ ID NO: 1088 - DNA, 1750 bp, Saccharomyces cerevisiae
tcccgttcaaactattccagaaacgctcgttagtaacaaaagacataccttgttgaccaattgatcacatgtttggtttcagcggtagtaataacgggttcggaaataaaccagctggttcgaccggtttttcatttggacaaaacaataacaatacaaatactcaaccttcggcttcaggatttggttttgggggcagccagccaaattctgggacggctactaccggagggtttggtgcaaatcaggccacaaatacttttggaagtaaccaacaaagtagtacaggtggaggccttttcggtaataagcctgctcttggcagcctaggaagttcaagcactaccgcttcaggaactacagctactggaacaggtttatttgggcaacaaacagcacaacctcaacaatccaccattggaggtgggttatttggaaacaagccaactaccacaacgggaggtcttttcggcaacagtgcacaaaacaatagtaccacaagtgggggtttatttggtaataaagtaggatccactggctcactgatgggcggcaatagcactcaaaacacatctaacatgaatgcaggcggactttttggtgcaaagcctcagaatactacagcgactacgggaggcctatttggcagtaagccacaaggatcaacaactaatggtggcctgtttggaagcggcacccagaataacaatacccttgggggaggtggcctttttggccaatcccagcagcctcaaacaaacactgcgcccggacttggaaacacggtatccacacaaccatcatttgcttggtctaagccttcaactggatctaatttacagcagcagcagcagcagcaaattcaagtaccgttgcaacaaacgcaagcaattgctcaacaacagcagctgtctaattatccgcagcaaattcaagaacaggtgttgaaatgtaaagaatcgtgggatccaaacacaacgaaaacaaaactcagggctttcgtgtacaataaagtgaacgaaacggaagccattttatatacaaaaccaggacatgtacttcaagaagagtgggatcaggcaatggaaaagaaaccttcccctcagacaattcccattcaaatatatggatttgagggtttgaatcaacgtaatcaagtacagactgaaaatgtagcccaagctagaataattttgaaccatattttagagaaatccacacaattgcaacaaaagcatgaattggacactgcgtccagaattttgaaggcacaatcaaggaatgttgaaattgaaaaaagaatcttaaaattgggcacacaattggcaaccctgaaaaatagaggactgccattgggtattgcagaagagaaaatgtggtcgcaattccaaactttactacagcggagcgaagatcctgcaggtttaggtaagactaacgaactttgggcacgtttggctatcttaaaagaacgtgctaaaaacatttctagtcaattagatagtaaattaatggttttcaacgacgatacaaaaaaccaagacagcatgtccaaaggcaccggtgaagaatctaatgatcgtattaataagatagtggaaattctgacgaatcaacaacgcggtataacatatttaaatgaggttttagagaaagatgctgcaattgtaaaaaaatataaaaataaaacgtaatcaggttacttaaatcaatgactgaattgtataaagatcgatctattacatatata

SEQ ID NO: 1089 - DNA, 1830 bp, Saccharomyces cerevisiae
aaaatgaagtttactttttatatttaaaaatagggtatgggtgtatatagggtatgggtgtacagttaatttcagaaggaaagaaaatgtataagaatggcaaaaaaaaaaaggacatgatttcaaacaggtaagtgacagtgagaagaaaagtctagtgcgaccgacatggctgacaattctacttccagattttatactaatctattgatagctaattatctcaaacataacggtctggaagatacattagctgcattcataagggagacagcgttacctctttctgccttagaaaagtccgatagttcaaatagtaatgtcggtgagataccgctagaagacttgcagagtgtcgttgaagataggatttactacaaaagacggtctttcaaagataggtttaaaactctttcaataaacgatgatttagccccaattgacaatgctaagtatggaattcaaccttggaaccatagtttgaaatttagtattgatgtaaaattgaacaaatccttacccaaagataccttgttcattagcgcaacttttacagaagatagcaaatatatattactttcgtcagctactggatacctagtaatctacgacattgagaaagcgacgtcgaagtcatttaaaattaatgaaaaagtcaagagcatcgtcaagctgtacggacccattggtagctccggttaccaatatgtatgtccaatgaacggaagtttttacttgctaaataacgattttgaactggtgaacaacgcagtatggaaaattcatgccagaatgattacgcatataaagatctgcaatgttacggaatcatcttggtttgttattactagtggaatggataacttcctgcgattgagtttgttggagataaaaaacgggaacactttcctcacaaaactctccgaaataaagttggcttccaattgtacgtcgttgaatgtaatcgccaacggtgacggcaatggtcagaatagtttctctgtgtttcttaccagagcagaatacactcatatagcatgttactcaattatagatgccaaaaatcttgtccattcatacaatattgccttaaacaatgcggaatttagcacgtacgctttcaacattcgagacgtaatggcagtagattatgttcattccaatactaaggatacgataggattatcacccagtaccatgctagttgtagccacgtcacataaaccatacatgagattgattttagtagaaatacctatgaatacaggccatccaaaggcaatgaaattggataaagttcagacttactacgataaaatcttacgaaattttgcgacagaaatatatcaagatgatttctcattaccaattctcggcaaattagaatcttctaatggtgtattggtaggaaatgatgaaggtatttacagtgttgatttgatgactggtgattcgagaattttaaatattcctggtgaggcaaactccttgcacgacaggataaagtgtatggatatcagtaaggaccaaatgagaatggtcgctggaacgtctactaagtcaatttacatcctaaatgtaatcagaaatgcacagtaaattatttatttcctgcaaatatttgaagaaccaaaatagtcgccactttgcaacgctttccttctcattagtgaaaaaaatttctaaaattttggttcccaagctatttctattaaatgttgtgttcgtgctatgttcgtcacggtacaaactttgcgaaactaaacatgcagcaaataattacgtaaaaaatacagttgaagcgttctagtttacataccttacctaaac

SEQ ID NO: 1090 - DNA, 929 bp, Saccharomyces cerevisiae
ctgctgtgactatatataataagaatcgaactgtaaagttaaagcaatggtgttcggtcagctgtatgcccttttcatcttcacgttatcatgttgtatttccaaaactgtgcaagcagattcatccaaggaaagctcttcctttatttcgttcgacaaagagagtaactgggataccatcagcactatatcttcaacggcagatgttatatcatccgttgacagtgctatcgctgtttttgaatttgacaatttctcattattggacaacttgatgattgacgaagaatacccattcttcaatagattctttgccaatgatgtcagtttaactgttcatgacgattcgcctttgaacatctctcaatcattatctcccattatggaacaatttactgtggatgaattacctgaaagtgcctctgacttactatatgaatactccttagatgataaaagcatcgttttgttcaagtttacctcggatgcctacgatttgaaaaaattagatgaatttattgattcttgcttatcgtttttggaagataaatctggcgacaatttgactgtggttattaactctcttggttgggcttttgaagatgaagatggtgacgatgaatatgcaacagaagagactttgagccatcatgataacaacaagggtaaagaaggcgacgatgatattttaagctccatctggactgaaggactactaatgtgtttaatagtttctgcgttgctattgttcattttgattgttgcactttcttggatatctaatttggatatcacatatggtgcgttggaaaaatcaacaaacccaataaaaaaaaacaattaatcgttatatatactcatatatttgaaagaaacatatgtaagattgggttatttgcatatatatcccaatcatccataacatttaa

SEQ ID NO: 1091 - DNA, 707 bp, Saccharomyces cerevisiae
acgatgtacaaaacatggcgtctatgcagaacacatacagtgggtgggttatgccatgatggaagtcatcggttcgtatctacgggaggggcaaagattggtaaaaaatttgaaaatatgaatcaaataagggattatttatcaagacctgtatggtccgtccacgaatatttaggcataaacactaaagaggaaaaactagagccaccgtctgctgaagctgtaaaaaaattgttgcggttatcaggtcttcccttggaaggagcagatattaaagaaattcaaatgcgacttgccaagcaattatcattcatcaacaaactccataacatacctgtcgaaggtgaaaagcacaccaaggaatatgatgctcggttggtgcaaagaaatacgaaacagctgaactacacaaagctacttgaaggcatcagccaccaaaagcaggatgctgagctaggagaagttagcggatcttggaaagcaactggacttgccgcggaatccaaaaatgcatattttgttgtcaaagagggactactcaaaaacaggaagtaagacttagaaaagtaacacatacgctctattctatatattcttttgcctatgaattttcttgtacatgtaccaccacgataaggctgaaatatttttcaaatgcataaataagattaagtacatagaagacatagcagtatttacaatatttc

SEQ ID NO: 1092 - DNA, 746 bp, Saccharomyces cerevisiae
accaagaatagattagattctgctgaaaaaaaaaaaaaaatgagcgtccaagcagaaatagggatattagatcatgtagatggttcatctgaattcgtatcacaagacaccaaggttatttgttctgtaacaggccctattgaaccaaaagcaagacaagaactgcctacacaattagcattagaaattattgtacgtcccgcgaaaggggtggccacaacaagagagaaggtactcgaagataaattacgggcagttctgaccccactcatcactcgtcattgttacccaagacagctctgccagataacttgtcaaattctggaatctggtgaagatgaagccgaattctccctgagagagctaagttgttgtataaatgcggcatttttggctttagttgatgcaggaattgccttaaatagtatgtgcgcaagcatccctattgcaataatcaaagacactagtgatatcattgtcgatcccactgccgagcaattgaagatttcgctctctgtccacactttagctctggagttcgtcaatggcggtaaagtcgtgaaaaacgttttattgttagacagcaatggtgattttaatgaagatcaattgttcagtttactggagctgggtgagcaaaagtgtcaagaacttgtcacaaatataagaagaataatacaggacaatatatcacctcgtctagttgtatagccattatagattataatataccacaacatgctatg

SEQ ID NO: 1093 - DNA, 1371 bp, Saccharomyces cerevisiae
caagaaagaaaatttgtctcacatctgcatctgcacatttatttacctatacttttccattgttagcagtattgcaaagtgaagaatatatcagcatcaagtatatagtatgcacagaacttactctttaagaaattccagggcacctaccgcctctcaattacagaacccaccgccaccaccatctacaaccaaaggtagattctttgggaagggtggtctagcttacagctttaggagaagtgctgctggagcttttggcccagaattatccagaaagttgtctcaattggttaagattgaaaagaatgttttgaggtccatggaattgacagccaacgaaagacgtgacgctgctaagcaattgtctatttgggggttggaaaacgatgacgatgtttccgacatcactgataaattaggtgtcttgatctatgaagttagtgaattagacgaccaatttatcgatcgttatgaccaatacagattgactctaaagtccatcagagatatcgaaggttctgttcaaccatctagagaccgtaaggacaagatcaccgacaaaatcgcctacttgaaatacaaagatcctcaatcacctaagattgaggtcttggaacaagaattggtgcgtgctgaggctgaatctttggtcgctgaagctcaattatctaatatcacaaggtcaaagttgagagctgctttcaactaccaatttgactccatcatcgaacattcagagaaaattgctttaatcgctggttacggtaaggctctcttggaactattggacgactctcctgtcactccaggtgaaaccaggcctgcttacgatgggtatgaagcctctaaacaaatcattattgatgctgaaagcgcactgaatgaatggacactagactctgcccaagtcaagcctactttaagtttcaagcaggattacgaagacttcgaacctgaagaaggcgaagaagaggaagaggaagacggtcaaggcaggtggtccgaagacgaacaagaagatggacaaattgaagaacctgaacaagaagaagaaggtgctgttgaagaacatgaacaagtcggacaccagcaaagtgagtctcttccccaacaaacaacagcttaatcaaaataaatcaacaatctattagaaacaaaaaaaaaaaaaccagcagaaaagaacaagttaccatactaattaatctcttttaattaatgcgtggacagataatcatttctgttccctcactctgaaaaaattgttttattttcctattttttttttcatctattattgtattttgccctctcctcactccttactttagtctattatcaatatctcttccccctcctaaatatgtactc

SEQ ID NO: 1094 - DNA, 618 bp, Saccharomyces cerevisiae
caacatatacaaaaatacgcgtccaagatgtctactaaagcccaaaaccctatgcgtgatttgaagatcgagaaattggtcttgaacatctccgttggtgaatctggtgacagattaaccagagcctccaaggttttagaacaattatctggtcaaactccagttcaatccaaggccagatacactgtcagaactttcggtatcagaagaaacgaaaaaattgctgttcacgttaccgtcagaggtccaaaggctgaagaaattttggaaagaggtttgaaggtcaaggaataccaattgagagacagaaacttctctgctaccggtaacttcggtttcggtattgacgaacacattgacttgggtatcaagtatgacccatccatcggtattttcggtatggatttctatgtcgtcatgaacagaccaggtgctagagtcactagaagaaagagatgtaagggtactgttggtaactcccacaagacaactaaggaagacaccgtctcttggttcaagcaaaagtacgacgctgatgtgctcgataaataatttggtctcggtatagtcagtgacaacatcaactacttaatatataagaacaaataaaatatccca

SEQ ID NO: 1095 - DNA, 1070 bp, Saccharomyces cerevisiae
atgggaaccataacagtggtgattaatgagggaccaatactgttgataagggcattgcaccgagcaacgaccaacaagaaaatgttcagaagtacagtttggagacgttttgcatctaccggcgaaattgcgaaagcaaagctggatgaattcttgatataccacaagacagatgcgaaactaaaaccattcatttaccgtcccaagaatgctcagatattgttaactaaagatattagggatccaaaaacaagggaaccattacaaccgagacctcccgtaaagccactgtcgaagcaaacgttaaatgattttatttattcggttgaacccaactcgacagaactactagattggttcaaagaatggacagggacctccataagaaagcgcgctatttggacgtacatctcaccaattcatgttcaaaagatgttgactgcgtcatttttcaaaatcggtaaatatgcgcacatggtaggactcttatatggtattgagcacaagtttctcaaagcgcaaaatccatccgtatttgatatcgagcatttttttaatactaatatcatgtgtgctttgcatcgaaataggttgaaagactataaagatgcagaaattgctcagaggaaactgcaggttgcttggaaaaaggtattaaatagaaaaaataatactggactagcaaatattcttgttgcaacattaggtagacagattggatttaccccagagctgacgggcttgcaacctgtagatattagtttaccagatatccccaattcatcaagtggcgcggaactaaaggacttgctaagcaaatacgaggggatataccttattgcaagaacattattggacatcgatcaacacaatgctcaatatctagaattgcaagaatttatacgccaatatcaaaatgcattaagtgaatccagcgatccatacgacacgcatttgaaagcgttgggactgttggaaacaccacctcctcaggaatccaccgaaaaagaggaaaaatagtaccaaaacaccccataggaaatatataaataaacatacctgtaaatact

SEQ ID NO: 1096 - DNA, 709 bp, Saccharomyces cerevisiae
aagcatagataagcgataatggttgctaagaagagaaacacgcttagaagcaaagtaagtgcaagaaatagtcaaaattttggaccagacgtagcgaacaatggcattctggacgagagttatgacatagaatctgatccaagggcctttctgcaccaacctaaagaaactaaaaaggaaaagctacttaacagacagaatactttcttatctaacttgaaggggaaatccacacttaacgatggcatagctgccaattttgatggtatttctaaatcttccattagacgtaggaaaagaaagctaagagaagaactaaaaccaagaatgcaagatctgctcacttctttggagcaagaaaaggatttacggggcattattgaaaatagtagcaaagacatgaataacgatgatgacatcgacatggattctaaaataaggtttgtggacacaaaggaaatgaacttgaaaaagatagaacctggttctgttaggataaaaaagaatcagccaaatatcaggaaccaaaagggtgcaaaggcattggctgctaacgaaactgcaagattcaatcaggtcctaaccaatcaagatttccaaaaaaatccatttggcgccttaagagaggttatcaagctgcaaaaacaatgaacattaaatagcatagcataacaatttttgccagtgtaatatatattccagcaaacct

SEQ ID NO: 1097 - DNA, 742 bp, Saccharomyces cerevisiae
gcacatatataacagatactacggttattatggacacactgttcaactccacggaaaagaatgccagaggcataccgcaggctccattcatcgaaaatgtcaacgaaataattaaggacccaagcgacttcgaattgtgcttcaataagttccaagaacggctttctaagtacaaatttatgcaggaatctaaattggctacgataaagcagctgaagactagaatcccggacttggaaaacacattaaaaatatgccaaagtctgcgcaatcacagcgacgagggcgatgagagcgatgaacctatcctgttgcactaccaattgaacgacacgctctacacaaaggctcaggttgatataccggaagatcgggcggatttgaaagttgggttgtggcttggcgcagacgtgatgctggaatatcccatcgacgaggccatagagttgttaaagaagaaactcgcggattccgaacagtctttaacggtgtccaccgaggacgtagagtttttgagggaaaatatcacgacaatggaggtcaattgcgcgcgattgtataactgggacgttcagagaaggcaagacttgaagcaggctcaagaagggactaaaaacctcaagatataatgtgtctgtaaatttaaatccaaagaaaaataaagggcactacatagaacaacacaatcaacctacatagctctctttttttttttttttttttttttcttttttgttttttc

SEQ ID NO: 1098 - DNA, 1808 bp, Saccharomyces cerevisiae
agagggcattaggacattatgtttgatcatgacgtcgaatatctgatcactgcactctcttccgaaacgaggatccagtatgatcaacgcctgctagacgaaatcgcggccaatgtggtatactacgtcccaagagtcaaatcccccgacactttgtatcgcttggtcggagcacttttccgatcgcagttcattgtccaattaccaccactacgccttttgcacatcgtcaaagatgttttcctttggaaactggaagtttctgagcccacgctcccaatttcgaagttttacttggtttggaatgctgttttcgaatctcaccgagccacgtggaacctttcacagttgatggttttggatggtgtactagtcacatacccgagcttcaaacaattgaacaacgcctattttattgatgaatccagcaacaaaactgcgctttattacagaaactggaaattacaactgttttcaccaatatgggcgcagctatggaatactgccattgtcagggctaatttatcgattcagcattgccttctgatagcattagctttactttttaatcagtcaaaccgaagcgcccttttgcatggagttgacgtatcatggaatttggtcacagagaaactattggaccttttggaagagtatgtacacggcattgtgcagccgatggaaattttttcgactgattcagtcttatcaaccaacttgaatcatttggccagttgcttgaccagttcaatcacgaggtcaaatgaggcaactttggtaaattcagtacgcaaactagaaaggatatgtcgatacttgtccgatactgtggcttcgttgaaagaacaacaactagatttcaagttccaaaatgtatttatcctgataatcctcgcgttaaaagaattatccgccatgaatatgacaatactgcctaaccataaagacactttttattctatgatctgtttaagccttttccacgtccacgtattgactcaaaaaatcgggacagtcggttttcccagttacgattatgtttacgataatttagtaacgtatttcattgtcatggatgacttgtctaaaatcactacagttttggaactaatgaaaagaaacaacaccaaacaagatccaaataaattagtgttttacatcaattttctaaacaaaattactaattactatgggtgtcgcattcgtttgccgtttattactgagtttatcgaacctttactgcatttcgatgtattttttagcgggaagacgggcaataccttggatattgaaatcaaagaatctatacacacattgacaatcactgtactgtctatagactcctcttattcctcacaggttgcacaatggcaagtatcccgcatactcgtctatttaaagatgtcgatggaccaatttattgcaggtaaattgtccgcaaatcaaattttacttatattcggccatctatccacacaacttccctcactacataattataacaagcatttgcttagggactctttgcacgagacgtatatcagaattgttaatgtaaaaaacccagaaaagaagaatgtattgattgaatgtctgattgtacaaatagcctttatcaacaatcctcatcatttgatcggctggttgaacatctgtctccagctaatcaatacacataacaaaaagctacttcaacaattgtgggaaatggtttcgagtctagaatcctccctagccatcgactggtggtacacaacggtcttatcaagtcaatcttctaaattatagtatcattaagtactttatag

SEQ ID NO: 1099 - DNA, 1992 bp, Saccharomyces cerevisiae
ttcccaaaaatctgcatgactcttacggctataacataactatatataaaggctctacacccacgagcaatcgccttttcatttgtttcaattttcaaaaaaggaccgacacaaatcaatagataatgacaatttcgaataaatcgtggaggagctacttcccacatttgagaaaactacccgaagatgatcagtacttatactcagacgatactaactccagtatcatagctgaagaggagctacatcatagcgtagataagtcctcgaagacagacgttacggcagaaactacagctgtagaacctcatcctcacaatttaaggcatgacttgccatatgaagtgagagatgaagctgggcgtaaatggtggaaatattttgatgaattcgagtatcgtgttaataaggaatacaagaaatcacgtaagtggtacgagtttttgtatcctaatcatactactcaaaccaaggctgaaagacggcttctttacaagctagacattattattgctttatacttttttatgttatgttggtccaagtcagtggatttgaataactacactaacgcatatgtttccaatatgaaggaagatttaaacatgaaaggtaatgattacgtttacacttctactattgctaatgttggtgccattgtcttccaattaccatttatgtatttgttaccaagatttccctctcatattattttgcctgtaatggacttgggctggacttggttcacatttgcatgttatagggcaaactcactagccgaactaagggcttacagatttattttaagtgcctttggcgctgcttactacccagtgtcccaatatatactaggttgttggtatgccccagatgaaattaattcaagagtctgtttattcttttgtgggcaacaattgggttccgtgacttcaggacttctgcaaagtcgcatattcaaaagtttgaacggcgtccatggtctagcaggctggagatggatgtttctgatcgatgccattgcaatttctcttcccacggctattattggtttttttgttattcccggtgtaccatctaagtgttactctttatttctgactgacgaagaaatacgaattgcaagggccagaaataagaggaaccaaatcaaagatggtgttgataaaagtaagctagccccattatggagcagaaaactttggaagaaagtattttgtactccagcattctgggtacttgttgtttttgatacatgttcgtggaataacatgactgcgtatagtggttcatatactttgtggttaaagtctaatacaaagtactccattgcccaagtgaacaacctgagtgttatacccgcatgtttaggatttgcgtatgtgattttttgtgcctttggtgccgatttatttagatgtaagtggatattcatggtttttgctgctataatgaataccgtttcttgtgccttacttatcaagtgggatattccttcgaaagctaaatggtacgctttcttcaccacgtatttcagtgtggccgcatcgccttgtctatggtcgtttattaatgacttcttaaggtttgatcctcaggtgaaggctattacatggatcgccatttattccttctctcaatccacttacgcctggattcctaccttggcgtggcctaccgtggagtcaccacgttttaagactggttacaccgtgagcttaatttttggtgctatttacggtttatggacgtttgttgtactttttttttacaagagaaacgaaaagaaacatgctctaggtaatggtatcatcttgtatgatagtaataagggtgaagagcttccagaatttgtaaagaaaaatatggaggaaagagatggttactactatttaaagcggtcctcgtagtccaatttacgtgaagtagataggtatattacgctttagacaccatacctcaaataaatatattcatgtatataatttaatcatc

SEQ ID NO: 1100 - DNA, 389 bp, Saccharomyces cerevisiae
atgtctagtgaaagagcctgtatgctgtgtggcatagtgcagaccacaaatgagtttaatagagatggttgtcccaactgtcagggtatttttgaagaggcaggtgtttctacaatggaatgtacgtcgccttctttcgagggcctcgtaggaatgtgtaagcctactaagtcgtgggtagcaaagtggctgagcgtagatcatagtatagctggtatgtacgccatcaaggtcgatggtagactaccagctgaggttgtggagctgttgcctcactacaaaccgagggatggcagtcaagttgagtaaaaccttccgttctgatatcacatgtataatagtaatgaattttttttacttttttttttttttagtaaatattctagcat

SEQ ID NO: 1101 - DNA, 994 bp, Saccharomyces cerevisiae
atgttaaagaggttagccaatcgtcaaaatggttttgcgtcattctcgtgcagctcagtcggtctgcgatatggtaggactaatccaagtacaaagagaagcttttcactttttcaaagtgtagcggacacgtttttaacagtgcatgaagcctcacatataccatggatagtgcttgttcctttgactactatgacccttagaaccctcgtgacgctgccattcagtatatggcagcggaggagaattttgaaacaacaagaactgaggaaattagtacagccaataacgcccattattaaacttcgactggcagccgttactaataaaaagtctagaaatgccgccagaattagctccaacggttctttcatgccgttacaactacagaatgctggcgttttgacaccagaacaaattacactattggcagtgaaagagacaagaaagaggcagaaaaaattattcaagaagtacaatgtacccctatggaaaaatgccttactgccaatggtgcaaattcctctttgggtcacagtctccatgggcatcaggaccctaacagagacacagcttatagaaagtttttatccttcctggttttccgcactgggtttcagttcctttgatctaagctcaccgctagtagcaatgcctctactagcgcccattttggtggggactctggcggtattaaacgtggaactcaatggccgactgatgtttagctcaagtttgtcatcgcaaggtataaagacaatttcaaggaattcgacaagagtccaagaggcaatgactagtatactgaacgtatcgagactcggttgtgtcgttatgctagcaatgtcctcacaggctccattccttctttcgctctattggatatcatcacagctattctccctggtgcaaaatatcatattaaattggatttatccttaccaacgatgagtgaagctgacgcatagataggatatgtaattctacatcagct

SEQ ID NO: 1102 - DNA, 4475 bp, Saccharomyces cerevisiae
ttgacatacgtatttaaataattggctgtccctgcctcgaagtatatttctcttctacttttatcttagcgatatccctaagagtttaatcctcccaggtccataacaaaagaagtcaagttcaatgactgattatattttgccgggtcccaaggccttatctcagttcagagtcgataatctaattaaagatataaactcctatacaaacagtacttctgtcatcaatgaattgcgttcgtgttacattcactatgtcaacggcatcgctcaaaatttgtctgaacaggacactaaattgctagaagttttgttgacttacgattctgctttagatattgctaacgatccattagcaagacaattaaacgatgctgtcgctaataatttacccagttcagctcttggcgaagacacatatttgattagagttgttcctagatcaggcactatctctccttggtcttccaaggctactaatattgctcatgtatgcgggctacaagacaaagttcaacgtattgaaagaggtttagccttactcataaagactgttccaggtttccctcttttggaaaatctaaatgatatttcattgaagtgtgtctacgataggatgacacaacaattatatctgaccgaaccaccaaatacgatgagtattttcacacatgaagagccaaagccattagttcacgttcctttaactcctaaggacactaaacagtctccaaaggatattttatccaaagctaatacggaattgggtttagctctagatagtggagaaatggaatatttgattcatgcattcgtcgaaactatgaaaagagatcctactgatgttgagttatttatgttcgctcaagttaattctgaacattgtcgtcacaagatcttcaatgctgattggaccattgatggaataaaacaacaattcaccttgtttcaaatgattagaaatacccataaattaaacccagaatatactattagcgcctattctgataatgcagccgttttggatagtgaaaatgatgcctttttctttgcaccaaattcaactacaaaggaatggacctctacaaaggaaagaattccattacttatcaaagtcgaaactcacaaccatccaacagccgtgtctcctttcccaggtgctgctacaggttctggtggtgaaatcagagacgagggtgctacaggcagaggttccaagactaagtgtggtttgagtggattctctgtcagcgaccttttgataccaggtaatgaacaaccttgggagttgaatattggtaagccttaccatattgcatctgcattagatattatgattgaggctcctttgggttcagctgcatttaacaatgagtttggtagaccttgtataaacggttacttcagaactttaactacaaaggttttgaatcaccaagggaaggaggaaatcagagggttccacaagccaattatgattgcgggtggtttcggtactgttagacctcaatttgctttgaagaacaccccaataactccaggctcttgtttaattgtacttggtggtcaatctatgctgattggtttaggtggtggtgctgcttcttctgtagcttccggtgaaggttccgccgatttggattttgcttctgtacaaagagggaaccccgaaatggaacgtcgttgccaacaagtgattgacgcttgtgttgccttaggtaacaataatcctatccaatctattcacgatgttggtgctggtgggttatccaacgctttgccagaattggttcatgacaatgacttgggtgctaaattcgatattagaaaggtcctctccttagaacctggtatgtcaccaatggaaatttggtgtaatgaatcacaagaacgttatgttcttggtgtttctcctcaagacttatccattttcgaggaaatctgtaagagagaaagagcaccatttgctgtcgtcggtcacgcaaccgctgaacaaaaattgattgtagaagatcctcttttgaaaacaactccaattgatttagaaatgccaattttatttggtaagcctccaaagatgtcaagagaaaccataactgaagcactaaatctaccagaggcaaatttgagcgaaattccttccctacaagatgctattcaaagagttctaaacttaccatctgttggctcaaagtcatttttgattactattggtgacagatccgtcacaggtctaattgatagggatcaatttgttggtccttggcaagtacctgttgcggatgtcggtgttaccggtacctctttgggtgagacaataatttccacaggtgaagccatggctatgggtgaaaaaccagttaacgccctaatctccgcatctgcttccgctaaattatctgtggcagaatctttattgaacatattcgctgctgatgtgaaatctttaaatcatatcaagctatctgctaactggatgtctccagcctctcatcaaggtgagggttctaagttatatgaagccgttcaagcattaggtctggatttatgtcctgcattaggtgttgctatccctgttggtaaggattccatgtccatgaagatgaaatgggatgataaggaagttactgcaccattgtcattgaatatcacagcatttgcaccagttttcaacactagtaaaacgtggactccattgctaaatagaaacacagatgattctgtccttgtcttggttgatctatcagctaaacaagagactaagtcactaggtgcctctgctttgttgcaagtttacaaccaagttggtaacaagtcgcctactgtgtatgataacgccattttgaagggtttcttggaaagtttaatccaattgcatcaacaaaaggaggatatagtgcttgcctaccatgataggtctgatggtggtctactaatcactttactggaaatggcatttgcttccagatgcggcttagaaatcaacattgacggtggagacctagaaagtcaattaacaaacctattcaatgaagaattaggtgcagtattccagatttctgctaagaacttgagcaagttcgaaaaaatcttgaacgagaacggagttgctaaagaatatatttctattgttggtaagccatccttccaaagccaggaaatcaagattattaactccacaacaaatgatgtaatttacgccaattcgagatctgaattggagcaaacttggagtaagacatcttacgaaatgcagaaattgagagacaatccaaaaacagccgaagaagagtttgccagtatcacggacgatagagatcccggtttgcagtatgccctaacatacaacccagccgatgatatgaagatcggattagaattatccagtcaaaggccaaaggttgctatcttaagagagcaaggtgtgaacggtcaaatggaaatggcatggtgcttccaacaagctggattcaactcagtggatgtcactatgacagatttgctagaaggtaggttccatttggatgacttcatcggtcttgccgcatgtggtggtttctcttatggtgatgtcttaggtgcaggtgcgggttgggctaaatccgtattgtatcacgaaggtgtgcgctcgcaattttctaagttcttcaatgaaagacaagatacatttgcttttggtgcttgtaatggttgtcaattcttgagtagattaaaagatatcatacccgggtgtgaaaactggccaagtttcgaaagaaatgttagtgaacaatatgaagcccgtgtatgtatggtgcaaatatctcaagaaaaggacaattctagcgaggaatctgttttcttgaatggcatggcaggatccaaattgccaattgctgtcgcacatggtgaaggtaaagcaacattttctaaaagcgctgaacaactggaaaagttcgaaaaggatggtttatgttgtataaggtatgtggacaactacggtaacgtcaccgaaaggttccccttcaaccccaatgggtcgaccaatggtattgccggtatcaagtcaccaaatggtagagtgcttgccatgatgccacatcctgaaagagtttgcagattggaggccaattcctggtatccagagggcaaatacgaagagtggggtggatacggtccatggattagattattcagatctgccagaagatgggtcggttgaaagatttttgtagtttttgtatatgtagtttttaagtttgaataataattagaaagaagctgtcttttatttatagcatttaataatgggtttgcttgttaaaaatttatcataaatagtatgtatatatatatatatatatatggatatgtatacgtggtaatgaacgtgtatacatatatttaaaagattgcaatatagtttttagaattaacctgaattaatttaaaaatcatatattaaaataaacaattgtgaaggtaaaaagaaagag

SEQ ID NO: 1103 - DNA, 1119 bp, Saccharomyces cerevisiae
atgtcaccgtgttatggacaaaacagtgccatcgccaaggggtcttggaacagagaggttttacaagaggtgcaaccgatttatcattggcacgatttcgggcaaaacatgaaagaatattcggcatcacccttagagggggattccagcctgccttccagcctgccttccagcactgaggactgtttactactatcattagaaaacacaatcacagttatagccggaaatcagagacaggcttatgactctacgtcgtctactgaggaaggtacagcacctcaattacggccggatgaaatagcggacagtacacactgtatcacgtcattagttgatccggagttcagagatcttattaattatggacgtcaaaaaggagcaaatcctgtatttattgagagcaatacaacagaacaatcccattcacagtgtattctaggctatccccaaaaatcgcacgtggcacagctatatcacgaccccaaagtactcagcacaatttccgaagggcaaacaaaaagaggaagttaccactgttctcattgttctgaaaagttcgcaacgttagttgagtttgccgcgcacttagacgaattcaaccttgaaagaccgtgtaagtgtcccatagagcaatgtccctggaaaatattgggtttccaacaagcaactggtctgagaagacattgtgcttcccaacatataggagagcttgatatagagatggagaaatcattaaatctaaaagtagaaaaatatccaggactgaattgcccatttcctatctgtcagaaaacgtttaggcgcaaagacgcctataagagacatgtggccatggtgcataacaacgctgattcaagatttaacaagcgtttgaagaaaattttgaacaataccaaatagttgaggcattaaaaatgtaccccatgaaactcttgttaaatttgtgcaggcatgaaagctactgtattttttcttaaagtaataaaaataaaacacaatgatattaaagaaaacgcatgcaactatggacacttgctatgtcgtgaatatggcaccacgttggttacttagctaaataaaaaatcgtaagtactcgcattttttcttctatattca

SEQ ID NO: 1104 - DNA, 460 bp, Saccharomyces cerevisiae
ctaaaactctaaaattagttaaactagtgttttcagcaaaatggtttcccaattattcgaagaaaaagctaaagccgtcaacgagctaccaacgaagccctccactgatgaattattagaattgtatgctctgtacaagcaagccactgtaggtgacaacgacaaggaaaagcctggtattttcaacatgaaggaccgctacaagtgggaagcctgggaaaacttaaaaggtaaatcccaggaagatgccgaaaaggaatacattgcccttgttgatcaactgattgccaagtactcctcttagaaaaggggtatactagctccatgtaaggagttttggcctagctttccttgttactattctattattatattttattggctgcaaaaacgtgacttatgtacatttataaatgcccatatcccttactactctccctggggacaaggcgtaataact

SEQ ID NO: 1105 - DNA, 720 bp, Saccharomyces cerevisiae
atgaatagtaccgccgctgcaataaatccaaatccaaatgttataccattcgatgacacatacattctctatgattcgcatgactttctatcattccttagtgcatatttctcgctgatgcccatcctagtgctagctttttatttgtcgtggtttatcatcacaagagagttagaagcctgcattgtagcctttggccaattgatgaacgaaatattcaataacgtgatcaagaatataataaaacagccacgccccgtatcgttcggtgcgtcgttccaaaatgacactataagatccggttacgggatgcccagtgcacactcccaattcatggggttttgttttacctataactctctgaagatatacacttcctggaagaatctaaacttcttagaaaaatgcattttttctggtgcattggctttattatcgttttgcgtttgcttttccagagtttacttgcactaccacaatttagatcaagtaatcgtgggattcagcgtgggggcactgactggatcactttatttttttatagttggcatcataagagagcttggtttaatcaattggtttttaaaactacgtattgtcagattattttacatgacagattcttacaatctggcgcctttgacattgaaagagaattacgaggcgtattggaaaagaataaatcagcgatctttcaatgataaatccaaaagggattag

SEQ ID NO: 1106 - DNA, 1052 bp, Saccharomyces cerevisiae
cagcaggttatagttctaaatttaattttagatatcaggttggtaaaatcattcgtatattattttcctgactccaagtttaaacaatgagctcaagtttgcctaggtctttactccgtttaggacatagaaagcctttgtttccacgatataatactttcgtgaactcatcggtaataactcatacgtcactgcttagaacaagattatatagtaatggcaccggcgcaacatcaggaaagaaggatgacaagactaggaataaacctaagccattatggcctcaagtaaaatccgcttctacgttcaccttttctggcatacttgtgataggagctgttggtatatctgctattgttatttacctaattctttcagaactattttcgccttcaggtgatacacagcttttcaacagagcagtttctatggtagagaaaaacaaagatataagaagtttgttacagtgcgacgatggcattacgggaaaagaaagattgaaagcgtacggtgagcttataacgaatgacaaatggacaagaaacaggcctatagtatctaccaaaaaattagataaagaaggtaggacacatcactatatgagattccacgttgaatccaaaaagaaaatagcgttggttcacttagaggctaaagaatccaaacagaattatcaacctgactttatcaacatgtacgttgatgttcccggagagaagcgttactatttgatcaagccaaaattgcatccggtttctaattcgaagggctttctgggaattagatggggccccagaaaagattaagatcaaatttgacggagttgctcaggttttaaatattcgtaaatgactgttatttccacgtgtctttctatgtgtatcacctgttatacgtgttggaccttacatctaaaaaagaaggagaacgcccacccacatccaaatatgttgcagatcctactatatagcgagaggaccgagcttctaagaaagttacaatgaaataaatataaactaggaagaatagaaagtaaaaatatacttatgtat

SEQ ID NO: 1107 - DNA, 738 bp, Saccharomyces cerevisiae
ctttgttatcgaaaaccgtcaagccctgttagttttagtgtatgtatctataaatttgaaaccaatattaggcggataagatgaaatagtgactggccaatccaggatttaatatgtcataaaagcctgttctaccttaatgggatgaatatccatgtctctgttatatgctccatagcacagatctagctacccatggtactttgagagaaggaaactacgtacttagtggtgatttacagttaaattcaatctacaattcaagtcattagcaaatagtctttatcccaaattctactagagttcggttttttactaacaagtatgtttttactttttactttatcatagaacatttaataaatcatgcctccaaagcaacaattatctaaagctgccaaagccgctgctgcccttgctggtggtaagaagtctaagaagaagtggtccaaaaagtccatgaaagacagagctcaacacgctgtcattttagaccaagagaagtacgacagaatcttgaaggaagttccaacttacagatacgtttctgtctctgttttggtcgacagattaaagattggtggttctttagctagaattgctttgagacacttggaaaaggaaggtatcatcaagccaatctccaagcactccaagcaagctatctacaccagagctactgcttctgaataaacagggaacgggttatataattttaaataatctgtattttcaata

SEQ ID NO: 1108 - DNA, 813 bp, Saccharomyces cerevisiae
gttcaaagattctacttcctaatgcgagcgggatggcaaactctaaatttggatacgtaaggcaatttgaaacacacgatgttattttgcctcagtgttatattgtggtaagaatagacggcaagaagtttcatgaattttccaagttctacgagtttgccaagccaaacgatgaaaatgctttgaagttaatgaatgcatgtgctaagaaccttgtcctcaagtacaaaaatgatattatattggcgttcggggagagtgacgaatactcatttattttgaagtcaagtacaactttatttaacagaaggaaagacaagcttgcgactttatttggttcttttttcacgtccaattacgtcgcattatgggccaagtttttcccagaaaagccgttgaatatcaagcatttgccatatttcgattcaaggtgtgtagcataccctaatttacaaacgataaaagattatttatcctggagatatgtcgatacacatataaacaatctttataatacgacgttttggcagttaataataaagtgtggcttaactccccaggaatccgagaagaaactatgtggaacatttagtaatgagaaacaggaaatactattttctgaatgtgggataaactacaataatgaacctgaaatgtttaaaaagggttcactagtaacaagaaaaggagaaatacttcatattaacgtcatcgcacagatagatgagttgttcgaaggctattaataacctttatatatatatatatatatatatatatatatgtatatcagatcatcgttgatttctaatg

SEQ ID NO: 1109 - DNA, 541 bp, Saccharomyces cerevisiae
gcactacatttctatattcatagctagtctcactgacgcatagtaactaaatcatggctgagaaacgtactcttatagctgtgatagctgacgaagatactacaactggtttattgttagccgggattggacaaatcactcctgaaacccaagaaaagaacttttttgtttaccaagaaggtaagactactaaggaggaaatcactgacaagtttaatcactttactgaagagagagacgatattgccatccttctaatcaaccaacatatcgcggaaaacataagagctagagtggactccttcaccaatgcgttccctgctattttagaaattccatctaaagatcatccctacgaccctgaaaaggactctgtattgaagagagtcagaaagttgttcggtgagtaagcgaacgatctttcccaaaacaaacacaattactggtagattactagtagcaggcggaggtggagggcgggagccactgttattgcgtttgtataatatatacactcataaatgatatatttaaggttcag

SEQ ID NO: 1110 - DNA, 464 bp, Saccharomyces cerevisiae
taaactcaattatacaaataaacgaacaatcaacagtaacaaaccgctcaagtgtacaaccaatcagaaaaaatgacgagaacaaacaagtggaccgaacgtgaaggaaaggctgatccaaagtacttttcgcacactggtaactacggtgaatctccaaatcacatcaagaagcaaggttccggcaagggtaattggggtaagccaggcgatgagattgatgacttaattgataatggtgaaatacccccagtgttcaagaaagatagaagaggctcaaatttgcaatcgcatgaacaaaagtttgaaaacgtccaaaaggaatgagggcgttttcaagataaaaaaaggttttttgatctctgaaggatagtggccttctccactgatttatatgcatctataggtatatacttgcatgcctacttcatgacttatgtaatacagttttcttacatccattt

SEQ ID NO: 1111 - DNA, 800 bp, Saccharomyces cerevisiae
actgataaaatgtccgactccgactccgactccgattatgaattgacactttctgctaatgccctcgctgcccttgaagaattcaaaagagaggaacaacaacatcaagaagcctttcaaaagctttacgacgaaacggatgaagacttccaaaagaaaaaaaaagaagaagggatgaagcttttcaaggaagattggcagctttcccagttttggtacagcgatgacacagccgcaattttagcagatgccatattggaaggtgcggacgaaaacactgtaattgcaatagttagtgcgccatccgtctatgctgccattcaaaagaaacctactaatgaaattccaaccgaacatatctacttgttcgaatttgataagagattcgagttgttagctggaagagatcatttctttttttatgattacaataaaccactggacttcagtgatgaaattaaaggaaaagttgatagattgttaattgacccaccttttttaaatgaagattgtcaaacaaagtcctctatcactgcaaagtgtttattagcgccaaatgacaactctaaaactaagaaaggagtttttaagcaccgcctcataagttgtactggtgaaagaatgtctgaagtcatatccaaagtttattctgacacaagaataacaacttttcttcctgaacattctaatggtttgagtaacgaatttaggtgctacgcaaattttgaatgtagttcatggaaatttgcttcttgagctttttaagagcttcgataaatttgaaaattaattgtactaca

SEQ ID NO: 1112 - DNA, 1853 bp, Saccharomyces cerevisiae
caaatctctcaattgagtaaaatattcgcatgagtgtttgcaaatccgcagtgacaggacaaaagtagccccaatagtatttatcgaatatgagaagaaaaaatcgactgtttatattagttgtactactgggaattgtgttagtagtatattactctcagttgaattcgttagatttggtagaaccagttcaaagtagcagcagtggcaatggtggctgctggagttactatgaaggtcttacgcctgggtggttgaatgacttctacgacgtaaatcaaataaccccgaatcctgcaaaagatgtgattgaactggttacgaggattaagattttttttaattgcttgcagcaggttgatgggcataatattcagcgtttgagggatattgaaaagaagctctttccgtatattaactttgaaaaattagaaactgatgaaagtgccttctggcacacaactacgagatggaatggcgaggtttaccatgcgtctatgttggaatttgaccccaaaaaccatcaattccttcgttctaagcccatcaatttcgatacagggctatctttttgggagaattggttgcacactgtgactcaaagtggttcgaaaggcatagttattagtgcttctgacgtgcagttgaatgaaaccatacgcttattgaaagtgttgaggttcatcaaaaatgattatcctatacagattgttcataatgcagatctgagtcaagattccatgaaatctattatcaaatatgcgagaagtctagacaccgctgaatatcctgctcaagaattatggtttttaaatgtacatagtctgctaaacccgaaatattcgaaaaaatttaccacctattccaacaagtggttagcattgaccttctcatcctttgaaattcctattctaatggactcagatacagtgccctttgtttcaatagaaaaattttatgaattagaggaatttcaaaagactggagttctattctttaaagatcgggtaatatcagatgatctatttgaatcctctgaattaaaaattctaagggaaattgtctatgggtgtattgggcttgatttagaggatgaatccaagatacatgagcaagtagaggatccagtggttgcacaggttctggaaaacatgtttataaagaaatataaacatcatttggaaagcggcctggtaatattgcataaaggaaagcatctcttcagtatgcttacttcaatagctttacaattttctccaattgcagaatattttcatggtgataaggactttttttggctgggcgaattactttcgaacaatcgctttacgttccatcctgtggatgcatcaaacattggtcagttgggcaatgtagtttcaaaagagagtaccggtgagttttaccagatttgttctgtgcaactatctcatacagacagggacgggtccttgctatggctaaacgggggccttaatatttgtaaaaaaacttcatgggaatacgattatgagcatagacagagactaaatgatatgttccaaaatgcagatgaattacgtgaatattatgcatcaccagtaaaacttgaagggattataataccagatactagtatatcaggatggattaactcaggagagtgttttttgttcaattattgcacattattcaaggaaggtgagtttggaaagttgatcaaatttaaagaagacgaaaagctccggctttcacaaatagtcgacatatggaataaagatatttgaccaagagttgttctagtcttataagcaataggtaaacctacacgcttttgttgtataatgtagtataatttttgatatctgaaaaat

SEQ ID NO: 1113 - DNA, 2008 bp, Saccharomyces cerevisiae
acgaaaagtgtaggcgtgccacaaatgtcaacacttagcgatagtgataccgagactgaggtcgtgtcgagaaacttgtgtggaatcgtcgacataggttctaatggtattcgttttagtatatcttccaaggctgcacatcatgcaagaattatgccttgtgtttttaaagatagggttggtctttctctatacgaagttcaatataatacacatacgaacgcaaaatgccctattcccagagatattataaaagaggtttgttctgccatgaagagattcaaattaatttgcgatgattttggtgtacctgaaactagtgtcagagtaattgcaacagaagccacgcgagatgctattaacgcggatgaatttgttaatgctgtttacggtagcactggctggaaagtagaaatattaggccaggaagatgaaactagggtcggcatatatggtgttgtttcctcatttaatacagtaagaggtctatatctagatgtggcaggtggtagtactcagttatcatgggtaataagctcgcacggagaagtcaagcaatccagcaaacctgtatctttgccatatggagctggaactcttttgagaagaatgagaacagatgataatagggcacttttttatgagattaaagaagcgtacaaagatgcgattgaaaaaattggtatacctcaagaaatgattgatgacgccaagaaagaaggtggatttgacctttggacccgtgggggtggtttaagaggtatgggacatctgcttctttaccagtcggaaggttatcccatccaaacaataattaacggatatgcttgcacttatgaagaattctcgtctatgtcagattatctattcctaaaacaaaaaataccaggttcttcaaaagagcataaaatatttaaggtttctgatagaagggctttacaacttcctgccgttggtttgttcatgagtgctgtttttgaagcgattccccagatcaaagctgtacattttagtgagggtggtgttcgagagggttcactttattctcttcttccaaaagaaattcgtgcacaagatccattgctaattgcgtcccgtccttatgctccattacttactgaaaaatatctatatctattgagaacatcaatcccacaagaagatataccagaaatagtaaacgaaaggattgctcctgctttatgtaacttagcatttgttcatgcctcttatccaaaggagttacaaccaacagctgcattacatgttgctacaagagggataatagccggctgtcatggattatctcacagagctagagcgctgataggaattgctctatgtagtagatggggcggcaacattccggaatctgaagaaaaatactcccaagaattagaacaagtagttctacgcgaaggtgataaagctgaagcattgagaattgtatggtggacgaagtatattggtacgattatgtatgtgatttgcggtgttcatccaggtggtaatatcagagataacgtatttgatttccatgtttctaagcgtagtgaggtggagaccagtttaaaagaattaatcattgatgatgcaaacactacaaaggtaaaagaagaatccacgcgtaaaaatcgcgggtatgaagtggttgtgagaattagtaaggacgatcttaaaacaagtgcttccgttcgttccagaattatcacgctacaaaagaaagtacgcaagctatctagaggaagtgtagagagggttaaaattggcgtgcaattttatgaagaataaagacatctagtctttaaatacttgaacaataaatacgaaatccttatataagcatcttttactaccaaaaaaatttaaaattaagcaagagaaaaaaacgagcaattgttaaaagaaactaaaatcatgtagatttcataaatcgtcatattctttgtctatataaatatttatcgtcacgaataaatcccgtgaatttctaacaaagtttatacaa

SEQ ID NO: 1114 - DNA, 1316 bp, Saccharomyces cerevisiae
acttctgtaatatggtgaaagaatagcgaaatattagaccaacatagtgtatcccaatgggtgttagtgcaaatttgttcgtaaagcaaagagggtcgacaacagctctgaagcagccaaaggaaataggattctattcaagaactaaggatgaagaatatttaattagcgatgatacgaatttgaattactactatcttccagacgctgaattggacaggaagttggatctttcatcaggatttcagaaatttaaggattattacaaagattttgaagacaggtgttccctgcgtgggctattagaaaccatagaaagctctgaaagacataaaggaaaaaaaattaatgctgatataattacttttagaggaatagcacggaaattaatttcatgtgcatttgactctccatcttttaatacagttgatcttcgtatcgtttcattcaacggccaactttttatcaaggaagtgcctgaagctgtcaatgcagctaaggcttcctctgcaactgaagcagggcgtaatataaatcaagatctgaatgtatttacagggtacaagtttgaaactttggctactctttccaatccgttgcagtatacaccccgtgaagtgatagaaaaaagaactaaaaggattgtatcgcatggagatgaatacattagtgttgtgagaactggtgtaggtaactgcaagttaattcttggtgctgaggtggattgtatatttgactttaaagaaaacggtagagacaatttaaaacattatgccgaattgaaatgtacgcagcaagttgcgaacatatcggatacgcataagtttgagcgtaaactgttccggacctggctgcaatgcttcttagttgggatcccaaggatcatatatggttttaaagacgaccattatgtattaaaaactgtggaagagttttcaacggaggaagtacctgttttattaaagaacaataatccacaagttggaagtgcatgtttagaagccattaaatggtatggtctccttactgagtggcttttgaaaatgataccaagagatgaggatcctcattctcaaataagagcatttaagttggttttcgaaaataatcacctaagattatccgaaattgaagaaagtgatgaggaatattcaggtttgattgatggagaacatatattatcgaacgggtttaaggagtggagaaaatctttgaaataacaatattcctttatgtctttcctgcgcatatcctcatcgacgtatggatctaaataatataaatgtgcagattagattaagttatatacactatgc

SEQ ID NO: 1115 - DNA, 689 bp, Saccharomyces cerevisiae
agtcgaagtttttcacaaaataaattagtttctttttttgatcatgaatactgaaggtgcttctttaagtgaacaattgctggatgcagctagaagaaacaatctggatcttttggagaccgtatttgatagcttagataatgatcctgagaagattgcaaagctaattaacgaatccaaagaaccactggggaatacagcgttacatttatgttgtaagtatggatcctgggaagttctcgacaagattctcgatcaagacggtgaaatcgaaatagacccacaaaacgacgttgatggcgacactccgttacatgttactgtcagatacagtcaagaggagcctgagcatggaacttttattgctagaaacttaattgaagtgggtgcggatcctagggtgagaaactataacaatcaaaagccagttgatttggttcatggtgatgaactggatgaattaattgaccttttgcagggtgccgagttagcgattgatagtaccaatggatcaggtgataacaatgaggatggggaaatgatagatgatggtccatctgacgatgacgaagaagatgataaaaaatgataaaatatgtgatgataataccacagagagggaaagatagatgaactctggatatatagatatttctactgtgtatatatttctttaaggtgcactaaca

SEQ ID NO: 1116 - DNA, 2066 bp, Saccharomyces cerevisiae
atgctgcgtgtaacaaccttggcgtcttcgtgtacttcatttcccttacaggtcctcaggaggcggttgaccatatcttctttgacaagcttccaacccacaaccaagacacaggtcgtggtcatcggtgctggacatgcaggctgcgaagctgcagctgcgtcatctaggactggtgcgcatactactctcattacaccatcgttaacagatattggtaagtgttcgtgcaacccctctattggtggagtgggtaagggcatccttgtaaaggaaatcgacgctctcgatgggctgatgggcaaagtaactgatctcgctggagtgcaattcaaaatgctgaacagaagcaagggtcctgctgtgtgggggcccagagcccagatagacagagagttatataagaaatacatgcaaagggaactttccgacaagaaagcacaccccaacttgtctctgctgcagaacaaagttgctgacttgatcttgtatgaccccggatgtggccacaaggtcatcaaaggtgtggttctggatgacggtacccaggttggggcagatcaggtcataatcactacaggtacgtttctcagtgcagaaattcacatcggcgacaagcgtattgcagcaggaagaattggcgagcagccaacatatgggatcagcaatactctacaaaatgaggtgggctttcagttagggcgtttgaaaacaggcactccggctaggctggccaaggaatccattgatttcagcgctctggaggtccagaagggagatgcgttgcctgtccctatgagttttctgaatgaaaccgtgtcagtcgaacccacgaagcaactggattgctttggcacacataccacacctcaaatgcacgactttttgcgcaataacttgcatcaatccattcatattcaggacacgaccatcaaaggcccccgctattgtccctccatcgaagctaagattctaaggtttcctgatagatcttcccataagatatggttggaaccagaaggtttcaactccgacgtcatttatccgaacgggatatccaattctatgcctgaggatgtccagttacaaatgatgaggctcatcccgggcatggcaaacgttgagatcttgcagccggcatacggcgtggaatacgactacgtagacccacggcaattaaagcctagcttggaaacaaaattggtggatggactattcttggccggacaaataaatggtactacaggctacgaggaagccgctgcacaggggatcattgcaggtatcaatgcaggattactatcgcgccaagaacgggagcaattggtcttgaaaaggtccgaagcgtacattggtgtgctcattgacgatctaatcaataatggcgtcatagaaccatatagaatgtttacttccagatcagaattcagaatcagcgtaagagccgataacgcagacttcagactgacgcccattggtgctcaactagggattatatctcctgtccgtttaagtcaatattcaagagacaagcacctatatgatgaaacaatacgggcgcttcaaaatttcaagctaagctctcaaaaatggtctagcttactacaggctaatatcgcgccacaggctgaaaacagatctgcttgggaaatattcagattcaaagatatggatctacataaactctacgagtgcattcccgatttacccattaatttgctggacatcccaatgcatgttgtcaccaaaattaacattcaaggtaaatacgaaccttacattgtcaaacagaaccagtttgtgaaggcatttcaggcagacgaaaatatgctgttgccgcaagattacgattaccgtcagttacccacgctttccactgaatgcaaactactcttgaaccgcgtacagccattgaccataggccaagcaagacggattcaaggtatcactgcggcagccctatttgaactctaccgtgtggcacggaagccaagccaaccagtcatgtaaatatcctttaatcgttagcttgtatatgtaaataattcattgtatgtaaccatcaa

SEQ ID NO: 1117 - DNA, 630 bp, Saccharomyces cerevisiae
acgatataagcaacagaaatgagtgaacaggagccttacgaatgggctaaacacctattggacaccaagtatatcgaaaaatacaacattcagaactcaaacacattaccttcaccaccaggatttgaaggtaattcctctaaaggaaatgttacaagaaaacaacaagatgctacatctcaaactacttctttggcacaaaaaaaccaaataacagtattacaagtacagaaggcatggcaaattgcgttacaaccagccaaatctattccgatgaatatttttatgtcgtatatgtccggtacatccttacaaatcattcctataatgactgccctcatgctactctctggacccattaaagcaatattttcaacaaggagtgcattcaaaccagtgttgggtaataaagcaacacaaagtcaagtgcaaactgctatgttcatgtatatcgtattccaaggcgtcttaatgtacattggatacaggaaactaaattcaatgggtctcattcctaacgctaagggtgattggctaccctgggaacgaattgctcattataataatggattacaatggttttccgattgagagcgtatatacttatataaaatatctattctgtttcat

SEQ ID NO: 1118 - DNA, 418 bp, Saccharomyces cerevisiae
acataagcagtgagagatatccctgcatattcaaggtttacaatgacttatgaacaattatacaaagagttccattcctcaaagagcttccagccatttatccacttagacactcaaccaaaatttgcaatttgtggtttaatcgttacattagctgtattatcatctgccctgttcgccgtcggttctaaatcttcatacattaagaaactcttcttctacacaattttaagtgtaattggcagcttgtttgctggcttgaccactgtttttgcttcgaattctttcggtgtctacgtctagtggctcttcgttggcctataaaggaattatcgatgaattatatactatacttaagaagtattttggatgagaatattaaaaagaaaggtgtcaagtaaatttcattatataaacg

SEQ ID NO: 1119 - DNA, 1058 bp, Saccharomyces cerevisiae
atatatatatatatacataatatatatatgtttatctgtgtgtatctatgtggacttcaataagtgatcgccttcttgatatcatattactcccccatttcacctgaattaatttcggaatacatgagtaagctcttggaccgaatcattactaggcttcatgactgttgaatatactgcatccgatttggcaacctatcagaatgaggtgaacgaacaaattgccaagaataaagcacatcttgaatcattgactcatccaggttcgaaagtgacatttccgatcgatcaagatatttctgctacacctcaaaacccgaacttaaaagttttcttttttgatatcgacaactgtctctataaatcatccacgagaattcacgatcttatgcaacaatctatactgaggttctttcaaacacacttgaaactatcacctgaagatgctcacgttttgaataactcttactacaaagagtatggacttgccataaggggacttgtaatgttccacaaagtgaacgcactggaatataaccggcttgtggatgattccttaccactacaagatatcttgaaacctgatataccattaaggaatatgctgttgagattgagacaatcgggaaagattgataaattgtggcttttcaccaacgcttataaaaaccacgcaatacgttgcctgagattgttgggtatagcggatttatttgatggattgacatattgtgactactctaggacagatacgctggtctgcaaaccacatgttaaagcatttgaaaaagccatgaaggaaagcgggttggcaagatacgagaatgcttattttatagatgacagtgggaaaaacatcgagacaggtatcaaattgggcatgaaaacatgtattcatttagttgagaatgaagtaaatgaaattttggggcaaacaccagaaggcgctattgtcattagtgatatattggagttaccacacgttgtgtccgacctgttctaaggtatatcaattttaagtataattgtatataaatctacttgcattagatgcctct

SEQ ID NO: 1120 - DNA, 1319 bp, Saccharomyces cerevisiae
aaaatggatgaagtcttaccattgtttcgcgattctcatattccacagattaaagattatcaattggagttacagaacgatttgactaaaaccaatgaggccttccaaaagaatttgctaaagaactataacaagatcttaagcttgaccgattctgttaatgacttgtcgctcaatttgaaaaatgttgatcaagattttaaatccctgtgtttcaatgatgaaaaatttcagttgaataagttaactccactaccataccaaaccactacccatatatcaccacctcgtgacgaagaaaaagtcagcataccatcgcaaaacattttagtaatttcaaattggaccatctccatcaacaacttctgtaatcgtatagttacttccactactccgtcgcggatattcgacgagctactgttgaatttccacgaattatctttgataccagttccttccaaatttgaagcgcttgtcaaggacaaatgttgtcgactacagaagttcttggtggactctatgaagacattaaacttaactttactacagtgggtaaaactatacaatttactaaacacggagttttcctcgaagtgggacgatgatttactttctatattcaatgaatccctattcgagacactatttaacgataacgttcaagcgttactgatatcaagtgccaacagcaaagatcatcaatatcactccaatcagcaatataaggacgcgattgttgtcgattttgtgaattcgtccacctttagagaccatctcattcggagaaccgtgaaagaaataaacacacatttggatacactctctactttgagagccaagcttaaggagcctgaaactcttcataaattagatatcttccatgataatgatacgaacctcaatgatggcactgtatctccacttgatgatgatgcattgaaacaatatattgatacagcggtattctattcaaaaggtttaaccaatgataccacgttgcaaatttatcaaacggtgcagcctacgattgaaatcctacaaaacttagaattgtataaatgccctcaagagacactgacagatttgagaaataaattgattactcaattgcaagagtttaagactcagatctcatcccgcttaccttcaccactggaaaactcaacgagtgttgtggatgattttataacttcgtacaacaatcacaatctcttgcaattagtcatcgatcaaattactcaattaaggcaacagtaatataatagcacgagggagggtacccgcctcgcaaacttattgataatgataatggtatgggc

SEQ ID NO: 1121 - DNA, 1287 bp, Saccharomyces cerevisiae
tcattagtttgcttttaccttgaaagaagtcgctgaccaccacaatatcaaacgactgaccacaaccgtacgaaagatccgtcacaatgatatggtaaacttgcggtatggctgattctatcctctcgcggagtccctgttcagtaacgggcatcttatagtgtcgttggcgctttgtttctctccactgagttgttaggaaatgtgattttgcaaattcgtcatttattttcaccttttcaattctttcacctgtcatatatatgtatatatataacaccgaaaaacttattccaatacacagtcggaaggaaacagaacaagagtccaccgaaacgcaatgagcagagctattactagagcacaattggacaaacttgtgcgtagcattaccaagttctaccctcaaaagtacgcagacaagagctgggacaatacgggtcttctcatcgattgttccactgcacaagtcaccactgccgatgcaaacgctaaaacaaaggtccttttgactgtagacctcacgaagtcagttgctcaagaagctgtggatgctaactgcaacgtaattgttgcttaccatccttttattttcccaagctggaacagattaagcccacatacaaacccacaacacgagacagctataaagctaatccagtacggaatatccgtatactgccctcacactgccgtagatgccgctcgtggcggtgtaaatgactggttggttaggggtttgaacaacggagagaacgtcgcaaagtcttatgccttggaaactgtaagtggcgaaactgacgacttgattggctacggtagattcgtagaattcaataaagacatctctttggagcaaattgtcaaaaatgtcaagcgtgttttacgggttccctatgtacaagtagcatctcttgctgctccatccgcatggaatcaactcaaaatcaaaaaagtcgctgtctgtgccgggagcggttctggcgtgtttaagcaactaaaagaggacgtagacctttactatacgggagaaatgtcacatcatgaagtactgaagtggaaagaaatgggcaagaccgttattgtttgcaaccactcaaatactgagcgtggattccttcaagacgttatgaagggcttgttgcaagatgagggccacgaagtagtcgtaagcaaaatggattgcgatcctttgactgttgcatagctgctagtaattatatggctatataggatatcacaaataccatacgtactacagttttatcatccggctgttcgtgtaaa

SEQ ID NO: 1122 - DNA, 1445 bp, Saccharomyces cerevisiae
atgtcatttagattcaacgaagctgtgtttggtgataactctttcaatgaacgaatacgggaaaagttatctacggctttgaactcaccgtctaaaaagaaattagatatcttgaaaagcggaattaaggtacagaaggtggattttcctacaataccacagctagaaattctggacctagacattatcacgcagcccaagtctctggccaaggggatttgcaagatttcatgtaaggatgctatgttgcggatacagacagtcatagagtcgaatcttttattgattaacgaacaggatacacccagctttaccatgccccagctcatcaataatggatcgttcacaattcctataactatgacgttcagttccatcgagctagaagccatcacgaatatttttgtaaagaaccctggaattgggatatcctttaatgacgttgatttggattttaagtttgattgttctgtaaaaattctccaaagcaccattgagagaaggctaaaagagtccatgcatgtagtgttcaaggatgttcttccttctttgatcttcaacacgtcacagaactggttcaccaatcgcggcgagagcaccagtaccatccctggtaaaagagagcatcatcatcaacaaactacaatgtctaggaatgtaatcttggacggatcagattttcaagagctttctccaataaacatgctacgtctttcaagcattgtgtcgtcgaggtcaacactgtcactacattccactgtgatgaattctctttccgctatacctggttgcttggaaagacaaaacttgtacagatttatatcaaggatgccctctttaaacaattactactcttcgcaatcatttccacaaccaaagtcatcaaccgtatcatcaaaacaattggtaaagccattctactgttcccacaatctattacctaaaacagtgttagattccagccagtacgatttggctacgataaccaagattcagtctcgacttttcgataggagtaacagcaacgacgacaatgccaaaccaaggagaagaaagatcaaatgcaaaaagacccgcacaccatcgaacctacaatcacaaggagaacaggctgttgatgatagtactgctattgaaacagttacgtccacaccggtccaaacaccgatacccgagcttgaagaacaatctcccccatatttgaaaacaacagtatcgataagggataaatacgttataccagaaaaaatatcgctaaatttggactccaagaaagatacatctaaaaagaaaccgttttacttcataggtttgaactcgcaagaaccttcaaataactggaaatggggcatggaggatagccccccaccatatcattaaattaagttacatatctaagtacataactacacaaatacatactctccgatgtaaataacgtaaga

SEQ ID NO: 1123 - DNA, 1447 bp, Saccharomyces cerevisiae
ggttaatcaagtattggaaaaatgtccaaagtgtttattgccacagcaaatgcaggtaaagctcatgacgctgatattttctcggtttctgcttgcaattcatttacggtaagttgttcaggtgacggttacttaaaggtgtgggataataagctgttagataatgaaaatccaaaagataagtcatattctcactttgtccataagtccggattgcaccatgtcgatgtcttgcaagctattgagagagatgcatttgaattatgccttgttgctaccacttcattttctggcgatttactcttctatcgtatcactagagaagatgagactaaaaaagttatattcgagaaattggatcttctagactcagacatgaaaaagcattccttttgggcattaaaatggggtgcctcaaatgacagactactttcccataggctggttgctacagacgtcaaagggaccacttacatttggaagtttcacccgtttgcagatgagtcaaattctttaacactaaattggagccccacgttagaattacaaggcactgtcgaatcgcctatgactccaagtcaatttgccacttctgtggatatctctgaacgaggactaattgccacaggttttaataatggaacagtacaaatttcagaactatctacattacgcccgttgtacaattttgaatctcagcattctatgattaataattcgaattccatcagatcggtgaaattttctcctcaaggatccttattagccattgctcacgattcaaattcatttggttgcatcactctatatgaaactgaatttggtgaaagaataggctccttatccgtaccaacccatagctcgcaggcaagtctgggtgaatttgcacattctagctgggtcatgagtctatcgtttaatgattctggtgaaacattatgcagtgccggatgggatggtaaattgagattttgggatgtaaaaacaaaggaaagaatcactacattgaatatgcattgtgatgatattgaaattgaagaggatatcttagctgttgatgaacatggagattctttagctgaacctggtgtctttgacgtgaagtttttgaaaaaaggttggagatctggtatgggagctgatttaaatgaaagtttatgctgtgtttgtttagatagaagcatcaggtggtttagagaagctggcggtaaataatctctagtaatatcttgatatattgcatgtaaccttacatcatccattattctttttggttcataaaatttcagtaatatttaatacctttaataagccaatgtatgaatttcacttcacaaaaataaatttgctagtaataaaaaaaaaaaattggtttttttatgtatttcttaaatattagaaagagatagactcaattcttacatatgtatatgtggagaacttgaaa

SEQ ID NO: 1124 - DNA, 5288 bp, Saccharomyces cerevisiae
gagagagaaagaagatattcaactataaaaataaattatcacgaaagttctaaccaatgagtgacctacccattgaatttaccgaattggtcgatctgatgtccttaggaatttcccctcaattccttgacttcagatcaactactttcgagagtgaccacttcgtcactgttagagaaacaaaggacggtacaaactctgttgcaatcgtggatttggccaaaggcaatgaagtgacaaggaagaatatgggcggtgattctgctatcatgcatccatctcagatggttatttccgttagagcaaatggtactatcgtgcagatatttaatttggaaactaagagcaagttaaagtcttttactttagatgaacctgttattttttggaggtggttgagtgaaaccactttgggttttgttaccgcaagatccatactgacctcgaacgtctttgatggtaacgtaaatgctaagcctcaattgcttaccttgagacacgctaacttgaacaatacccaaattatcaattttgtggctaacaaaaaccttgactggttcgcagttgttggtatcttacaagaaaatggccgtattgccggtagaattcaattattctcaaaacaacgtaacatctcccaagctatcgacggtcatgttgctatctttacgaatatattactagagggtaatggctcgaccccggtacaagttttcgttactggtaacagaaatgccaccaccggtgctggagaattaagaattatcgagattgatcacgatgcttcattgccttctcaatatcaaaaggaaactaccgatattttctttccaccagatgcaacgaatgatttcccaatcgctgttcaggtgtctgagaaatacggcataatttacctattaaccaagtatggcttcatccatttgtacgaattggaaaccggtaccaatttattcgttaatagaattacagcagaatctgtttttactgcagctccgtacaatcacgagaacggtattgcatgcatcaataaaaaaggtcaagttttagcagtagagatttctacttctcaaatcgttccatatatcttgaataaattatctaatgtggcactggccttaatcgttgctacaagaggtggcttaccaggtgcagatgatttatttcaaaaacagtttgaatctttattgttacaaaacgattatcaaaatgcagctaaagttgcagcctcttccacttctttaaggaaccaaaacaccatcaacaggttgaaaaacattcaagcaccaccaggcgccatttctcctatcctactttacttttcaacactattggataaagggaaattgaataaagaggaaacaattgaattggctagaccagttctacaacaagacagaaaacaattgttcgaaaaatggttaaaggaagataaactagaatgttcagaagaactaggtgacatcgttaagcctttcgatactactttagcgctagcttgctacttaagagcaggtgcccatgcaaaagttatatcttgtcttgccgaattacaacagtttgaaaaaattattccttactgccaaaaggttggatatcaacctaactttttagtgctgatttcttctttgattagatcatcaccagacagagcttctgaatttgccgtatctctattacaaaatccggaaactgcttctcagatcgacatagaaaaaatcgcagatctattcttttcccaaaaccatatccaacaaggaacctctctacttctagacgcgttaaaaggagataccccagaccaaggtcacttgcaaactcgtgttcttgaagtcaatctactacacgcaccacaagttgctgacgccatattgggaaacaacatcttttctcattatgacaaaccaactattgcttccttatccgaaaaggcgggactataccagagagctttagaaaattacacagacatcaaagatatcaagagatgcgttgtccacaccaatgcattacctatcgattggttagtcggatactttggtaagttgaacgttgaacaatctttggcgtgcttaaaagctttaatggataacaatattcaggctaacatccagaccgtagtacaggtggcaactaaattctctgatttgatcggtccatctactttgattaaattattcgaagattataatgctacggaaggtttatactattacttagcctctttagtcaacctaaccgaagataaagatgtggtttacaaatacattgaagctgctgctaaaatgaaacaatacagagaaattgaaagaattgtgaaggataacaatgtctatgatccagaaagagtcaagaatttcttgaaggatgccaatctagaagaccagttgcctctagtcatagtttgtgaccgtttcgactttgttcatgaaatgattttatatttgtacaaatcacagaacttaaaatttattgaaacttacgtgcagcaggttaacccttcaaagactgcccaagttgttggcgcattacttgatatggactgtgatgaggcatttattcaaagtctgctacaatcagtcttaggtcaagtccctattaatgaattaactactgaggttgaaaagagaaatagactaaaaatattgctacctttcctagaacaaagcttaagtcaaggtatccaggatcaagctgtttacaatgccttagcaaaaatttatattgattccaataattctcctgaaaagtttttgaaggaaaacgaccaatatgacaccttagacgttggtcattactgcgaaaaaagagatccctaccttgcatatattgcgtatgaaaaaggtcaaaatgatgatgacttgattagaatcactaatgaaaatagcatgtacaagtaccaggcaagatatttgttggaacgttctgatctcgatttatggaacaaagttttgaatcaagaaaatattcacagaagacaattaattgattcggtcatctccgttggtatccctgaattaactgatcctgaacctgtttccttaactgttcaagcattcatgaccaatggattaaaactggaactaattgagttgctagaaaaaatcatattggaaccttctcctttcaacgaaaatgtggctttacaagggttgctattattgtctgctattaagtatgaaccaactaaggtttcaagctatatcgaaaaattagataactacgacgccgatgaaattgctccattatgtattgaacatgatttgaaggaggaagcttttgaaatctatgacaaacatgaaatgtacggtaaagctttaaaggttttaatcgaagacatcatgtctttagatagagctgcttcttatgctgataaaatcaatactcccgaattgtggtctcaaattggtacggctcagttagatggattaagaatcccagatgctattgagtcttatattaaagcagaagacccatcaaattacgaaaatgtaattgatatagccgaacaagccggtaaatacgaagaattaattccatttttactaatggctagaaagactttgaaagaaccaaagatcgacggtgctttaatcttggcctatgctgaactaaacaagattcatgaaattgagaacttgttggcaggttccaatgttgcaaacttagatcatgttggtgataaattattcgagaataaagagtataaagcggccaggctatgttattctgctgtttctaattactccaagcttgcttctaccttggtttacctgggagattatcaggctgctgttgacactgctagaaaggcttcaaacattaaagtttggaaactggttaacgacgcttgtattgaaaagaaagaattcaagctggctcaaatttgtgggttgaacttgatcgttcacgctgaagaattagatgaactggtggaaaggtatgaatcaaacggctatttcgaagaactgatttcattgtttgaagctggtttgggacttgaaagagctcatatgggcatgttcactgaattggccattttgtattccaaatatgaaccagacaagaccttcgaacacttgaagctattctggtccagaataaatattccaaaggttattagagctgtcgaacaagctcacctctggtcggaattggtctttttatatgctcactatgatgaatgggataatgctgctttaacactaatcgaaaaatcaaccaaagacttggatcacgcctatttcaaagaagttgttgtcaaagtttctaacttagaaatctattacaaggccattaatttctacgtcaaatttcacccatcattactagttgatcttttgacctcattgacaccaagattagatattccaagaactgtcaaaattttctcgaaatccgacaacttgcctttaatcaagcctttcttgatcaatgtcttaccaaaaaataactcagttgtcaaccaagcctaccacgatctgatgattgaagaagaagattataaagctttgcaagacgctgttgattcttatgacaaatttgaccaattgggattggcatctcgtttggaatctcataagctaatttttttcaagaaaataggagccctgttataccgtagaaataagaagtgggcaaagagtctttcaatcttgaaggaagaaaagctatggaaggacgctattgagacggcagcaatctctcaggatccaaaggtagtggaggctctactcacatatttcgttgaaaccggtaacagagaaggctttgttgctttgctatatgctgcttacaacttagtgagaattgaatttgttttagaaatatcatggatgaattctttggaggactacattaagccatttgaaatctccataaaaaaagagcagaatgattccattaagaaaatcaccgaagaactcgctaaaaagtccggatctaatgaagagcacaaagatggccaacctttgatgctgatgaacagcgcgatgaacgttcaacccacaggattttaagacgtggataaaataattcgtttgctgtaccccatcgtgtattttttttttttttaccgttattattttgtttgttagcatctttgattatctgaggggatttcaaaatgccaataaaaaagaccttatgagttctgtatttttcttaatattttcgagagaatttcccaactataaaattgtagattacaggaataaataaattgcagaaactaaaatgattgaaactgccttttcaatttatatacttttatatcaaattatgttcaa

SEQ ID NO: 1125 - DNA, 744 bp, Saccharomyces cerevisiae
actgcaatcttaatagtatccctccgcacaaaaatacacacgcataaggatggcctcatttgctactaagtttgtcattgcttgcttcctgttcttctcggcgtccgcccataatgtccttcttccagcttatggccgtagatgcttcttcgaagacttgagtaagggtgacgagctctccatttcgttccagttcggtgatagaaaccctcaatccagtagccagctgactggtgactttatcatctacgggccggaaagacatgaagttttgaaaacggttagggacacgtcgcacggtgaaatcacattgtctgctccatacaagggacatttccaatactgtttcttgaacgagaacaccggtatcgagacaaaagacgtgactttcaacattcatggggtggtatatgtggatttggacgacccaaacaccaatacattggatagtgctgtcagaaagttgtccaaattaaccagggaagtcaaggacgaacaaagttatattgttattagagaaaggacgcatagaaatactgcagagtcgaccaacgatcgtgttaaatggtggtccatcttccaattgggcgtcgttattgcaaactctcttttccagatatactacttgagaagattctttgaggtcacatctctagtctaagtaaagcaggaaaatgtagttcatatctatttacttttgcctacatacgattacatacacgattggataacctgaagtcgcga

SEQ ID NO: 1126 - DNA, 447 bp, Saccharomyces cerevisiae
tacaacattagagcaagtcactcagttcatgtaatacatctggacaattatgtctaataaagagataacttgtatcaaaccgtttaaaattattgctctaattttattgatagttctaataataaacctctcttataagttatttctgagacgctatttaaagtcgacagttatttggtgtttaggaatcgccaatacagatcgtaacgatatgatgtggtggcaagtctcgccactattagagcgctgggtttggcagttagttgacaattatgaatccgggtacgaataattatcaagcccttattagctacaatgctgggagcaatagatatataaataacccttatgcacagcggaagacttcaaaatatctttgtcttttatatcattatgtggtatgtattatataacgagaataatatatcaaatacaaaaagtaacgag

SEQ ID NO: 1127 - DNA, 357 bp, Saccharomyces cerevisiae
atgaattcaagtctgaatgccaattcttatttttttcgaaaacccccaatgctaacttatatggtccgttttctttactgttatccatctccctttcctatagctccagcggttaccgatcttccagaatgccggggagatctttctctttctttgtttataacaagtttcacaagcacgaaagaaagaacaatactgtacgccaaaagccgcctaaagacgcatattcccgtcaatttatgtgaccggtaccactatatacctaaggcacctctataccaatgtagaatgccctgtttatactctatatagaggattctcgatgttctttggggcatcgttaaacgtgatattcct

SEQ ID NO: 1128 - DNA, 803 bp, Saccharomyces cerevisiae
agaaccatagtcttaagtagtatgttaacgacacaaaagtgtgaaagtagagaagggaagaacgatgagatctttgaattgggagaaagtaatagtgacaagatattattaaaacatggcaaatgtaacttgttttctgaaaggaaaccagttaatcactagaagtgtgccaatcatgagttcacactaactaaagaaaaagaaggaagtcgcccatcgtatgcaatgtacttattattgaagaatattgtaccgagaaaatttcaaatgttacgtaaatatctccttccctttttgccacgatcattttaaaaaaattgagaagttactaactaattattttaactctttgcaaacctgcaatactcgtgatgaatatttaattagatcattcaaaatgccaaagaagagagcttccaacggtagaaacaagaaaggtagaggtcacgtcaaaccagtcagatgtgtcaactgttccaagtctattccaaaggataaggctatcaagagaatggctatcagaaacattgttgaagccgctgccgtcagagatttgtccgaagcttctgtctaccctgaatacgctttgccaaagacttacaacaagttacactactgtgtttcttgtgctattcacgccagaattgtcagagtcagatccagagaagacagaaagaacagagctccacctcaaagaccaagattcaacagagaaaacaaggtttcccctgctgatgccgccaagaaggctttataacttgattaatataggtgaaacataagtaaatttttctactatttct

SEQ ID NO: 1129 - DNA, 1196 bp, Saccharomyces cerevisiae
ataaacacaggaaagaaagatatacgaagattagaatttttttcatactttttacaaaacatttttttgtacttaggcacgctaattgcgtaaaaattagcataaacaggaaataagattattttgaaatgtatgttataatcctcttattgaaaaatacatgagatgtaggagaagaactaccaggaaagaagatatttaacagatcgaacgaaacggaaaagaactaagagaaaacaaatctggatttgactttaagaaaaaatttatttgcaagtttaactcgttccctgcttttctatttggcttgagacgataattgcataattgtccaaattgtccatcatataatgaagaattcgatgcgaaatattccctgtcactttcctttagtcaacgtattcttctccctgaagaaacagtatactaacaatactcacccatttcgattttgatgttgccatacaaatagataacaagcacaatgctttcactacgtcaatctataagatttttcaagccagccacaagaactttgtgtagctctagatatctgcttcagcaaaaacccgtggtgaaaactgcccaaaacttagcagaagttaatggtccagaaactttgattggtcctggtgctaaagagggtaccgttccaacagacctagatcaagaaactggtttagctaggttagaattattgggtaaattagagggtatcgatgttttcgacaccaaaccattagattcgtccaggaagggtaccatgaaagatccgatcatcattgaatcttatgatgattatcgttatgtcggttgtacgggttctcccgctggttcacatactattatgtggttaaaaccaactgttaacgaagtcgccagatgctgggaatgtggttctgtttacaaactaaaccctgttggtgttccaaatgatgaccaccatcactaatcttatcattcaagttgcccttctgtttctcttttactttttaccttcttctttatttatatttttttttttggaaacctagcgaatattcttaccaggtctgagcttttacacacgtcatgttaacaaagttccacaagaaagttctttgcaggaaggttaaggcgaacgctttgctctatctataatgaagagccaaaaaatacataaccaaaaagatcgagaaaaggtcgagatatatttt

SEQ ID NO: 1130 - DNA, 1824 bp, Saccharomyces cerevisiae
tgaatattattagctttatagagtatttatcaaagaacaggacttgaaaaacttcgatcatagatgaatagggacaacatggacacaacaaagcgcaaagaagatcatacaaagcatactactgatgtaatagaattttacgaagaaggaaccgcagcttcttctttaaacatagccacagaaaaggccaactcaagtccgtccattttgagaagaattatcaacagggcggcatggctttctaagaaagtggacgcaatgggagtagagtctaccggtattcagaggatatctccctatgaacgaggaacatcaaagaaacaatttttgcatgtcgcggggctatggttgagtgccacaggtggtttgtcttccatgtcgtcgtttttattaggccctctgcttttcggtttaagctttagagaatccgtagcctccagtttaatatcggtaacaattggttgcttaattgctgcctattgctcgatcatgggaccgcagtccggttgcagacagatggtaacagctagatacctgttcggatggtggtttgttaaattagttgcattagcttccattatcggtgtcatgggttggtctgtggttaattccgtggttgggggtgaaatgttagctgctatttctaatgataaagtacccctatgggtagggattgtcatagtgaccgtatgctcctttttagttgccattttcggtatcaaacaagtcattaaagtggaaacttacttatccgtacccgtcctgacagcatttttactactgtacatttcatcaagtgataaatacagcttcgtcaatgcatacgtttcaaagggaaatttggactcttccacccgaaagggcaactggatgagttttttttcattatgctatagtattacggctacttgggggtctattacagcagactattatatattgttcccagaagatacaccatatattcaaattttttgcctaacgttttttggaacatttttgcctacctgtttcgtcggaatcttaggtctcttactagcttctgttgccatgtcgtataagccttggtcagtcgagtacgattcccatggaatgggtggtctactttgggcaggttttcagcgttggaacggcttcggaaagttctgcgtggtagtactggtattcagtttggtatccaacaacatcatcaatacgtattcggcagcattctccatccaactttctagtgtgttttgtgcaaaaatccctcgctggttctggtctattgtttgtactataatttgtttggtatgcgcattaataggtcgtaatcattttagtactattttgggaaatttcctaccaatgataggctactggattagcatgtactttatcttattattcgaagagaatttagtattcagaaggtttttcttacatttgtacaccaaagagtttcctacagttacaggagaaataaatggaccggaacttgttggatcttcaaaagaagtggagaaagatgcagttactaatatccatttgttaaaaagaaaacataaggtgactaaacatcgttacaattgggacaaatgggaagattatgaggttttaacgcacggttatgcagcaacatttgcgtttattgtaggagttgctggtgtggtagttggtatggcgcaagcctattggattggcccaattgctgccaaatttggtgaatatggtggtgatgtcgcaatgtggttaagtatggcgttctcaggtgttgtataccctccttgtagatacttagagctacgtaaatttggtcgttaattgaaatgacataagtatata

SEQ ID NO: 1131 - DNA, 5044 bp, Saccharomyces cerevisiae
caaactaagtacttacgacttccaattaccggttgtaaagtttatctacgcaaatataacagttgcagcttgctttttttttcagcagctcttccgttattataaaatctgtttggcgttcgcacaagcgaaccgattcttttattattttctctctgccttttatttccgttcctgttaatagtttattttctaaaggatactgtcttcttccgtacttataatcgggttcacaataagcaattgactaatcctaggacgattcgtgtactataaggagaaaaaaaatcaacacttgtaacaacagcagcaacaaatatatatcagtacggtatgggtattccaaaatttttcaggtacatctcagaaagatggcccatgattttacagcttattgagggaacacagattcctgagtttgataacttatacctggatatgaattcgattttacataattgtacgcatggtaacgacgatgatgtaaccaagcgattaactgaagaagaggtttttgcaaaaatctgtacgtatatcgatcacctttttcaaacaatcaagcccaagaagattttctacatggctattgatggtgtggcccctcgtgccaagatgaatcaacaaagagctcgtagattcagaaccgctatggatgcagaaaaagccttgaagaaggctattgagaatggtgacgagattcctaagggtgagccatttgattcgaattctattactccaggtacggagtttatggccaaattgaccaaaaacttacaatattttattcacgacaagatttctaacgattccaaatggagggaagtgcaaatcatattttctggccatgaagttccaggtgaaggtgaacacaagatcatgaactttataaggcatttaaaatcccaaaaggatttcaaccagaatacgagacattgtatttacggtcttgacgcagatttgattatgctgggtttgtctactcatgggccacattttgcgttattgagagaagaagtgacatttggtagaagaaatagtgaaaaaaaatcgcttgaacatcaaaatttctacttattacatctttctttattaagagaatacatggagttggaattcaaagaaattgccgatgaaatgcaatttgaatacaattttgaacgtattttggatgattttattcttgtcatgttcgtcattggtaatgatttcttgcccaatttgccagatttgcaccttaacaaaggagcatttcccgttttgttacaaacgttcaaagaagctcttttacatactgatggctacattaatgaacatggtaaaataaatttaaagagattaggtgtctggttaaattatctgtctcaatttgagttattaaatttcgaaaaggatgatatagacgttgagtggttcaacaagcaattagagaatatttctttggagggtgaaaggaaaagacagagggttggtaaaaaattactggtaaaacaacagaagaaattaattggaagtataaaaccatggttgatggagcaattacaggaaaaattatcgcctgatttaccagatgaagaaattccaactttagagttacctaaggacttagacatgaaagatcatttagaatttttaaaagaattcgcttttgatttgggtctttttataacgcattccaaatccaaaggtagttattcgctaaaaatggatcttgattctattaatcctgatgaaacagaagaagaatttcaaaatcgtgttaattctatcaggaaaacaataaaaaaatatcaaaatgctatcatcgtggaggacaaagaagaattggaaactgaaaaaacgatttataatgaaaggtttgaacgttggaagcatgagtattatcacgacaagttaaaatttacgacagacagtgaagaaaaagtgagagatcttgctaaagactacgttgaaggtttacaatgggttctatattattattatagaggatgtccatcttggtcgtggtactatccgcaccattatgcaccaagaatctccgacttagccaagggtttagatcaagacattgaatttgatttgagcaaaccatttactccattccagcaactaatggcagttttaccggaaaggtccaaaaatctgatacctcccgcctttaggccattaatgtacgatgaacagtcgccaatccacgatttctatcccgctgaggttcaacttgataaaaacggcaagacagctgattgggaagctgtggttttgatatcgtttgtagatgaaaaaaggttgattgaggctatgcaaccttatttgcgcaagttatcacctgaagaaaaaacgagaaatcaatttggcaaggacttgatatattcctttaatcctcaagttgataacctttataagagtccgttgggcggcattttttctgatattgaacacaatcattgtgtcgaaaaagagtacatcaccatcccattggacagctccgagattcggtatggtttattacctaatgctaaactcggtgccgaaatgctggcgggtttccccacgttattgtctttaccatttactagttcactggagtacaatgagacaatggttttccaacaaccttctaaacaacaatcaatggtcttacaaataactgacatatacaaaacgaataatgttactttggaggacttttccaagaggcatttaaacaaagtgatttatacaagatggccatatttaagagaatccaaattggtctctttaacggatggtaagactatctatgaatatcaggagtccaatgataagaaaaagttcggattcataacgaagcctgcggaaacccaggacaaaaaacttttcaatagtttgaagaattcaatgctaaggatgtatgctaaacagaaagctgttaaaataggacctatggaagccattgctaccgtctttccagtgactggtttggtgagagactctgatggtggttatattaagacctttagccctaccccagattactatccattgcaactggttgttgaatctgttgtcaacgaggatgaaagatataaagaaagaggacccattcctattgaagaggaatttccattgaattcaaaagttattttcttaggtgattatgcctatggtggtgaaactactattgacggttacagcagtgaccgcagactaaaaattactgtagaaaagaagtttttggatagtgagcccaccatcggcaaagaaaggttacaaatggatcatcaagccgttaaatattatccgtcttatattgtgtccaagaacatgcacttacaccccttgtttttgtctaagattacttccaagttcatgattactgacgctactgggaagcatatcaatgttggtatcccggttaagttcgaagctagacaccaaaaggttttaggttacgcgaggaggaaccctaggggctgggaatactcaaatttaactctaaatttactgaaagagtatagacaaactttcccagatttttttttcaggttgtccaaggtaggtaatgatatcccagttttggaagatcttttccccgatacttccactaaggatgccatgaatttattagatggtatcaaacaatggctaaagtatgtctcatcgaagtttatcgcggtatctttggagtctgactccttaactaagacatcgattgctgccgtggaagatcatatcatgaaatacgcagctaacatcgaaggtcatgaaagaaaacagttagccaaagttcctcgtgaggctgttttgaatccaagatcatcatttgcactcttacgtagtcaaaagttcgatttgggtgaccgtgttgtttatatccaagattctggtaaggtaccaattttctcaaagggtacagttgttggctatactactctcagttcatcattatcaattcaggtcttatttgatcatgaaatcgtggccggtaataattttggcggcaggttgcgcacgaatagaggcttagggcttgatgcctctttcttattgaatattactaacaggcagttcatttatcactccaaggcttccaaaaaggctttggaaaagaaaaagcaatctaacaataggaacaataataccaaaactgctcacaagactccttcaaagcaacaatctgaagaaaaactgagaaaagaaagggcacatgatttattgaattttatcaaaaaggataccaatgaaaagaattctgaaagtgtagacaacaagagcatgggatcgcaaaaagattccaaacccgcaaagaaagttttgttaaaaagaccagctcagaaaagcagtgaaaacgtgcaagttgatttggccaattttgaaaaagcaccgcttgataatccaactgttgctggatctattttcaatgccgttgcaaatcaatattctgatggtataggcagtaatttgaatatcccaactccacctcacccaatgaatgtggttgggggtcctattcctggagcgaatgatgttgcagatgttggtttgccgtacaatattcccccaggttttatgacgcatcctaatggtcttcacccattacaccctcaccagatgccttaccctaatatgaatggaatgtctattccgccaccagcaccacatgggtttggacaaccgatttccttcccacctccacctcctatgacaaatgtttcagatcaaggaagtcgtattgttgtcaatgaaaaggaaagccaagatttgaaaaaattcattaatggtaaacagcacagcaatggttcaactattgggggagaaacaaagaacagtaggaaaggcgagattaaaccttcttctggcacaaactctactgaatgtcaatcgccaaagtcacaaagcaatgctgctgaccgtgataataaaaaagacgaatctacttagaacatacgactaaaaacgaagtatattcgaggttactttaatagtatatctgagacctatataaagaggggtatttgtatttaatcgttgatcttgttaagaaaaagcttataacaaatgggga

SEQ ID NO: 1132 - DNA, 3111 bp, Saccharomyces cerevisiae
ccccgttctttccattcccatttataacaatactagtaactataataatatccttacgactgggcaagacaagacgaagcaaggccagcacagacgtaagcttaagtgtaagtaaaagataagataattatgagtgacaatccatttaatgcgagtcttcttgacgaggactcaaaccgtgagagagaaatactagatgccacagcagaggccctttcgaaaccaagcccttctttagagtattgtactttatccgtggacgaagctctagaaaaactggacactgacaaaaacggtggtttacgatcatctaacgaggccaacaataggagatcactttatggccccaatgaaataaccgtagaagatgatgaaagtcttttcaagaagttcttgtcaaatttcattgaggatcgaatgattctacttttaataggatccgcagtggtctctctttttatgggtaacattgatgatgctgttagtatcacactggccattttcatagttgtcactgtcggttttgtccaagaatataggtctgaaaaatctctagaagcgttgaataaattggttcctgctgaatgtcacttaatgagatgtggtcaagagagtcatgtactggcttccaccttggttcctggtgatttagtgcacttcagaataggtgacagaatccccgcagacattagaattattgaagcaatcgatttatccatcgatgaaagtaatttaactggtgaaaatgaaccggtacataaaacctcacaaacgatcgaaaaatcttcctttaacgatcagcctaattcaattgtaccgatttctgagagatcttgtatagcttatatgggtacattagtcaaggaaggtcatggtaagggtatcgtcgtaggaacaggtacaaacacatcctttggtgccgtttttgaaatgatgaataatattgaaaaaccgaagactccattgcagttaacaatggacaaattgggaaaggacttgtcactggttagcttcatagttattggtatgatttgtttagttggtatcatacaaggtagatcttggttagaaatgttccaaatatcggtatccttagcggttgctgctattccagaagggttaccaattattgtcactgttactttggcattgggtgttctgagaatggccaagcgtaaagccatcgtgagaaggttaccaagtgtcgaaactttaggctctgtcaacgttatctgctccgacaaaacaggtacactaacctcaaaccacatgaccgtatctaaactttggtgcttggacagtatgtccaataagctaaacgtcctctcattagacaaaaataagaagactaaaaattctaatggaaatttgaaaaactatttgactgaagacgttagggaaactctaactatcggtaatctctgtaataatgcatctttctctcaagaacatgccatatttctgggaaatcctactgatgtagctcttttagagcaattggcaaactttgaaatgcctgatatcagaaacaccgttcaaaaagttcaggaacttccatttaactcgaaaagaaaattaatggcaaccaagattctcaaccctgtcgacaataagtgtacagtttatgttaaaggtgcatttgaaagaattcttgagtactccacaagttatttgaaatcaaagggtaaaaaaactgaaaagttgactgaagcccaaaaagctacgataaatgagtgcgcaaattctatggcatctgaaggtttgcgtgtctttggatttgctaaactaactttgtctgattcatcaactcctctaaccgaagacctaatcaaagatttaacctttactggtttaatcggtatgaatgacccaccaagaccgaacgttaaatttgccatcgaacaattactacaaggtggtgtccatattattatgatcactggtgattctgagaataccgcagtaaacattgcaaaacaaattggtattccagttattgatccaaagctttccgttttatccggtgataaattagatgaaatgtcagatgatcaactggccaatgtcatcgaccacgttaatatttttgctcgtgctacgcctgagcataagttaaacattgttcgtgcattaagaaagaggggtgatgtggtagcaatgactggtgatggtgttaacgacgctcctgcgttgaaactttcagatattggtgtttctatgggtagaattggtacagatgtagccaaagaagcctcagatatggtcttaactgatgatgacttcagtactattttaactgccattgaagagggtaaaggtatctttaataatattcagaatttcctgacttttcaattgtctacttctgttgccgcactatcattagttgcactatctacagcgtttaaactacccaatccactgaacgcaatgcaaattctttggataaatattttaatggatgggccaccagctcaatccttaggtgtggaacctgttgatcatgaagttatgaaaaaacctccaagaaaacgtaccgataaaattttgacccatgatgtaatgaaacgtttactaaccaccgcggcctgtatcatcgttgggacagtttacatttttgttaaagagatggccgaagatggtaaagtaactgctagagatactactatgacatttacttgttttgttttttttgatatgtttaatgctttggcctgcagacataacacaaagtcaatcttcgaaatcggctttttcacgaacaaaatgttcaactacgccgttggactgtctctgttaggtcaaatgtgcgctatatatataccatttttccaaagtatctttaaaactgagaaacttggtatctctgatatactattgttattgctcatcagcagtagcgttttcatcgttgatgaattgagaaaattgtggacgaggaaaaagaatgaagaagactcaacgtatttctcaaatgtttgatatgtcacattttgtgcttttatcgtttttccttccttccctttatctttcatgaggacgcccaaccctattgaggtaaatgtactaattaatgggaacatatgtagatgtatatatgtacatatattt

SEQ ID NO: 1133 - DNA, 1160 bp, Saccharomyces cerevisiae
cattggatccaaacgcattggttctgtagttcttttttacgcttcatccacgattgtatactagcaaataggattgactcgacaaaagcagaaaaatgccgtccaataatagcagttttttagatattgacgatgatctcgagggtgtagatgattttggcaacgagcccaacccatttgatgatgccaccgtacctgatagcccaaacatgaataactcgactgctggaaagggtagcgaattttataacacaacgggcagtaaggcagaatccgcaccattacagggtcaaatggacccaccagcgtacgaccaagtgataggacagaatgacaacgacggtcttgggcgtaatggattgaggccaggattgataaactactattctaaatacttccagatcgatttgacgcagttcaaaaagagattgtccgcggtactgacgtttagaaacgatcataattccgaaagtaacgaagataacactgatttatacggtgctgtatggatcactgccacggtggtaatgatcaattttaccatgagtagggggttaaattttattatcagtgacgtaattgagggcgtcaagactggtgaggacatcgacagggccagtcagtttaagaagctactgcattctatttggctattttacgggtacacgttcggcgtaccatttattaccatgcaagtattgaatagagatgagcactcggagcgcaatagaagcttcaaaagtgttcctgaattgatttccgtttacgggtacgctaacttgatctggatacccgtttgtgttatattgaatatattggatatgtccaagcgcctgaggactgttcaagcaattcaatgggcaattgtggctcttgggtgggcacagtcgtcttatttcttgaattctcaaatatcgagtaataataatacggagacacaatcgaacgggaaattttcgctgtccatcatcgttgtcgttgcgctgcatactttattctgtctattgttcaggtttataatattttgaaaatatgcgcacgtctatacacacaatactttttatgactagtatcattgtatactcttattatgtagggttatacatgagtgtttatacgttttctgtgtgtacatatatatccatatatgttaatgctaa

SEQ ID NO: 1134 - DNA, 2008 bp, Saccharomyces cerevisiae
ttaagatagtgtaggattgtgtaatccaacataatatctaactttcaatggctcacgaggttcatagaataaaacctaaactaggacggacccaaatattttgggtttttctagcctttagagtactgaatgcagttctgacgagaaccttctttcaggctgatgagttttggcaagcattggagccggcacattggaaggctttcaagtatggtgaactgacttgggaatggaaattcggagttcgtagctatttatttccgatgatttttgagctgacttatagattggtttctctatcgtcaatccttcttcactatgcacttcttcttctctcaacgatagggtctgatttattaattttactactgccgaaatatgagttaagttggcaagtcgctgaagacttgaagaggcttccttttgatgtcacacggtcgttcgaatattatggtgtgatatatgcgccaaaaatagttatggcagtactagcttccataggggaatattatatcgtaagatttgttcaaaagctctatttacttacacttgataagagaaacgagaaggaggaagaggagagacgcagcggtttatccgagattacgaagtttgcactgcttttaagtttaactaatttttttaattgcttttttattacaagaacgttcatcaactcttttgaaatgattttaacttctattgccctctactactgggactggacaggcggacaaatgataaaagagtcatcttttactaagtcgcttatttttgcatttctggcatgtttgcaaagacccagcagtggacttatttgggtaattcccagcatttccctaatattaaacttggtaggcaaaaagcagtatcatttacttttcatcacattttccaaagttttacggtctttttttctggtatttactgcaaatgcaattatcgacatgtatttttatgaaaaagtaacgtttccctttttccgatttctaaaattcaatttcacaacaccattatcaaagttttatggggtagctccttggcattttcatttctttcaaagcttacctatcgtattaggtgcaagtattcccgcttttgcatttggattattttttccactaagcaaaaggagtttcccaaagaagtatttaaacccgtttttccaagtgaaactcactatcttgttgaatctgttggtgtactctacgttacctcataaggaatttaggttcatcttcccattacagccacttttcatattaatatcatcatttggccttttgagacttgatagagattattggaaaagactatctggcctaaaatctttactctggcttgttccattcgtgtcggtgttcatcgcattacttttggacacattccacgaatctggatctatcgaagttatgaaatttttacatgaagagccagaaatagatagtttgggattcataatgccctgtcattcgacacctggtcaaagctatttacaccgcagtgacattcaagatctgtggtcgattacttgtaaccctccattgcatttacttggagacccagaggcttactccaaactagagacctacatggatgaaagtgaccatttgtatgacgatatatcggcattcatttacaaaaatttcccaccgccttttcgtaaggatctaaggagtccaggtaaaacatacagccacgaatggccaacatatttggttgttttcgagcacatggaaaacgcatttctaaaggatttcctgaaagattcatcatacattgaatacaatagattcttcaactctcttgcgcactgggattcaagaagatcaggagacataataatttattataaattaccattcgattatagcgatattccagcggcagatatttaaatttgtgtattcttcacttatcagtttacttcatttcgcgaaaaagcctttaattattagtgatttatttactacatgatattaatatatgtgtataattatgcaataag

SEQ ID NO: 1135 - DNA, 3923 bp, Saccharomyces cerevisiae
atcttccttatcctttgcatcaattgcttgacttcattatttgtccatgtcgcttaaatcaaagttgactaagattcagaagttatggctgtattatttcccctgtgacagaatcctcgcgaagagaatatgtaaatcgactgttaatactacggtagctttcatattttgcttgatacctaagataactgcgcatttgggagcagctcctgcgatgctgccaatgatttctgttattgttcaccctggaagaagggtcgggggtactatccatggtgctatctattgcataactggattgatatttggcctagcttacgcaatcttcggccggttccttgcgcagcgatgtttagggagttcttggcatgagctaacagaggcacagcagcacgtattgcactataaaagatatgaagcgggattagcaattttggctgttttcgaagtaattatgcttttttttcatggttggatgagatctgtatcacactattactttggtattgttttcccactttttgtcgtggttcatttcgcatttatggatcctttgaatgaaacagcaggcactattgctaaagcttatagtacgcctttctacctgggtattgcaatgtcgattttctggaatcttgtgttgtttcctgagtggggtaccacatatttgggtaatacgactattgatgctatgaatgagctccataagtccattgactattcgataaatttcttcattgcagttgacccgcacaatagtagccagttgtacagtagagatcctgtttcgttaggcaagctattgaagatgaagtcactgatttcttctaaagttaacaactgtcgagtagtacttcacgagtgcatttatgagtttacttacgcttatgtttcgccaactaaactaaagccaatcatatctactttggaaaatttgacagtcttcattaatggattagttaatacatgccaattagaatttattttattggcaagacatgataacaagctcaggcctgatgatgtcgcagctttgacactgccaaagaacaaagaaatcagctttgcaaatgctgagaagttgttgaaagttattgacaagttgcatccagtgatttatagtctacaccggacaatgagtgaatgcatgtacatagcaaagttggtacttgctcatgcatttgatgtgaaagtttcaagggttcattcctgctcaatgttcaaagatggtaacttcccaacattcagtaataacgccaataatctgcccaatgatgttgacatccagaacaagatcaatgacctgaagcaggcgttagaagaatgtaaagcaaaattcaagtcagaaatgttaagttttgatattgatattatgagtcctagtgatgaaatgtttttgttgtctagctttctactaaattttaggcaaactgcagattcaactttggtaattatggagtccgtcaaggacattttagtcaaacgtcaaatacaagagaagaagggctggctgagaggcaaaagactttggtttttagtgttgaccaactacgagacattttctatctggttaaaaggcgataggaactcagtgactgaaaatgatacattaaagggtacgttcaatggtaatactaatggttttgctcatgacacagttattagaaggcctgattatgaagagaatgaacttttatctcaaaaagtttcatcgaataagaacattgtaaaagatgatgcatcgctagatctgccaatgacaagtgaacccaaaggaaattcatcttctacctctgacacttcttcgtcgccattaacgttaacgaaaacaactacgttcggaactaatagaacttccaggaggcaaggcagattttcttttatgtccatgcttatttcaattgataagttttgtgaagtgtcacatcctcactttagatttggatttcaggtagccattgcattaatgctggcttcatttccgatgtttattccaaagacaaggcagtggtacatagactatcgtggtacctggattggtttcgtgtgcatactttgtttggaaccttccgtaggaggtacgttctgggtcttctttttgcgtgctgtgggggttatttttggagcagcctggggttatctttcctatgttgctgctgtcaaccaaaccaatccatatttggagacagtcatcacagtttttggagccattcctgggttttactatttattaggcacaccctatgtgaaggctgcaattattgaaattattagtatttatattgttatgcttgcagcaatacttccctcccaagatgatatattgactagtttcgccaagagatgtttagctgtcggctatggtggaggggtagcattaatagttcaagtctttttctttccattgaaggcacgggaacaattaaatgaagagatttcttttgtctgtggctgtatatcggaaatggaacttctctacgccaccggactggaaggagagcaagtcgcaagtagtatgagtgaagagaaatacaaaaaaatcgaaaagatatcaaaaagtgctaaagaggcgttagcccgtgctacggcctataaaggactaaccagacaagagccgagattaaagggtgaatataccgagttggaaaatgttttcactcaagttatatttattcagaagcaaataatagagaggatagatacaatttccttgctgagaaagcaaaatggaagtgcggttattgaagaatttaacagtgttgtatatccatatcgacgccaaatggttggaagtatttcttgcctaatgagagcacttcaagaggcatttataaataagaccccgttaccgcaatttttgcccagcgcaagaattgcacatagaaggctgattaataaagtgcgccaaactctgcgaataagatatcctgggcagatttcaaatttaagtgataaagcaagaaagccaaatgaaggagattacgctgacggcaaggatgaagatgacgatgataacgaaggtttggtaatgaaaatgaatagaaggggacaggccaacacaacagctaatcctcatgaatatgttttaaaagaaaaatttttaagttggaacgcatctagtgctgcatcggaagaaataattgagtatattgaagagctgttgaatttaactaaaattctggtcggtgtaaatgagtttaaatacgggtttttatcgcgtccactttacgaggactgggctgcagaggcagtaacaggatttgataatttcattaacgggaaaagcaatcctatgaatacacggcgcaatcggaccccatttgatggtacttccatcatttccgaaggaaatgaaagtttacaaagtacaaattctaatgaatctcaaatttctcctgattccacaagaagttatgagccggaatgtccagtggcatacgaaaaaaatgataatccggcagcgttgaatttattacggattgcttctcataaagcaggccaaaacgcggatggcttaccaaagacatttagaaatagagcattttccattacttctacctccggccaactttcaagcttaagcagacacagcacccttggtaatgcggatcctaattatctgaacgatgatgatgaaagctctgatgatgatttgccattagctttgaaaatggtgctaagtcacatgaaagaaaagaaggactaagatattgaaaagtcctaatgtaagataattaccaatttcatattcattgtcgatttcacttcgcttaaagaatttttactgtttgttttttgtaaagcctttccaataaaaaatagaatgatagataaaggtcataactagaatggtggcgaacaaagcaaaacttaaattatctctgcatacaagcgtataatttccttatctatagtaatatata

SEQ ID NO: 1136 - DNA, 1564 bp, Saccharomyces cerevisiae
atgtacaagaatatatatatatgtatattgtatatatacatcaacttctatacttcgagggaaaacattaacaagagaacaagtacaagccacgtggttatacgtatcagaataatgctacgtatgtcaacttcaagattcattgggcaaaggctgttcactacggcacgatctctccaggctgctaaaccggcaccaaaaggtaaaactcaaggattttccaaaaaatcatcttcagtctcatcttactcatctgcaaagagagttactcctggttcattgtataaaaactggacaaacaccacgcacaccgctcaattacaacagaccgccgttcctttggcattacctatcttcaactttgatgatatttccaagactttgaataaagtagtatcatattccaacaaacagtacaaatcccttcaccatttgggttccttcaagaagtcgcagttcaatgaactttttcaaaaaccggtttgtctagttcgtgaagatgcaacgaatagctttttgaagaaactagtatctcatcctgttaaaaaatttataatcactggagagccaggggtcgggaaaactgtactactctctcaagcgcatgcatatgcagttgattccaagcaaatcattattaacatatcatatcctgaattattcctgaacggtaggaatgacttttcttatgatgatgatttaaagcttttcatccaaccgatgtatttgaaaaagcttataaggaaaatattgaaggcaaatgaccctgcattgttaaaatctattgagctatccaaagactacaagttctcgaatgcaaacccaaagaatgcctctgtaaaaccatttgtcacattaaacaaaacgaaaaatacagttttagatttgttatccgtaatgacccacccgcataatcgtggaaaactaatgaaagccattattgatgagttatctgtccaatccaaggtgccaatcatgtttacagtggataatttttcaaaagtgttaactactgcatattctgcgtacagaaatacagagaataaacaaatatattccctggatttacaaatgggtaaattgatgatggacattatttcaggagagacgaaatttgctaatggtgagagttctactatattagctatatccggcgttgacaggacaaacaaaactttacccgtggcattgggcaagatcccagtagacccctatgttactagatatcactatgaaccgaagttcgtagaattgctccaaaaaggtaatgtcaccgaattcgaggttcctaaactgaacaaacaggaagttaacgaactaatcgattactacaaacaatcaaatgttttattagacaaggatatcacaggaaaaaagtgggagaacttgattgacgaaaaatatttcctaagtggtaacggtaacccaagagaattattgaaaagtttagtcctttcccataggtgataagcatgcgcatatatatacatgtatatgcgtatataacactttcaccctcgcttctcaaaattctcccatttctcatgtacatataaatagataa

SEQ ID NO: 1137 - DNA, 492 bp, Saccharomyces cerevisiae
ccccaagctccacccaggatgtcaagcactaatggaaacgcaccagcgacaccttcctcggatcaaaatcctctccccacgaggttcgaagtggagctcgaatttatccagtcactggcaaacatccaatacgtaacgtacttactcactcaacagcagatctggaagtctcctaacttcaaaaactacttgaaatacctggagtactggtgcaaccccccttattcgcaatgcattgtgtatccaaactgtctcttcattttaaagctgttgaacgggttcatggagtcggcgatcgttaatgaagatggcctgctggaagggctagacgagctgcccaagatcattcaattacaaggcccgcaatggatgaatgaaatggtagaaagatgggccaactgaacacacctaattataactacattcgcacgcattcatatatctattttatacactcatgaatatatatacacacacacacatatatatatc

SEQ ID NO: 1138 - DNA, 1816 bp, Saccharomyces cerevisiae
ggaagtacatcagaaatgtctcaagaacagtacacagaaaacttgaaggttatcgttgccgaaaaactggctggtataccaaactttaacgaagatatcaagtatgttgcggagtatattgtcttattgatcgttaacggtggtactgttgaatctgtcgtagacgagctggctagtttgtttgatagtgtttcgagagatacgcttgcaaatgttgttcaaacagcctttttcgcattagaagctctgcaacagggagaaagtgctgaaaatattgtttccaaaattagaatgatgaatgcgcaaagcttgggacaatcggatatcgcacaacagcaacaacagcaacaacaacaacagcaaccagacatcgcgcaacagcaacctcaacagcaacctcaacagcaacctcaacagcaacctcaacagcaacctcaacagcaacctcaacagcaacctcaacagcaacctcaacagcaacctcaacttcaaccacttcagccacaactagggacccagaatgcaatgcagacagatgctcctgcaactccatcccccatatcagccttttccggcgttgttaacgctgcagctccccctcagtttgcgcctgtagataacagccaaaggttcactcaacgtggcggaggcgccgttggaaagaatcgtagaggtggtcgcggtgggaaccgtggaggacgcaacaataattccacacgttttaatccgttagcaaaagcacttggaatggcgggtgagagtaatatgaacttcactccaaccaagaaagaggggcgttgcagattgtttcctcactgtcctcttggtagatcatgcccacatgcacacccaactaaggtatgtaatgaatatccaaattgtccaaagcctcccggaacttgtgagtttttacatccaaatgaagatgaagagttgatgaaggaaatggaaagaactcgtgaagaatttcaaaaaagaaaagctgatttattggcggcaaaaaggaaaccggtacaaactggtatcgttctgtgtaaatttggggctctgtgttccaatccatcatgcccatttggtcatccaacaccagcaaatgaagatgcgaaagtcattgatctaatgtggtgtgacaagaatttgacatgtgataatcctgagtgtagaaaggcccactcttcattgtcgaagatcaaggaagtaaaaccaataagccagaagaaagcagctccacctccggttgaaaagtccttagaacaatgtaagttcggtacgcactgcaccaataaacgttgcaaatatagacatgctcgttctcatattatgtgccgtgaaggagcaaactgtactagaattgattgtttatttggccatccaattaatgaagattgtagatttggtgtcaattgtaagaatatttactgtctattcagacatcctccaggcagagtacttccggaaaagaaaggcgctgcacccaattcaaacgttcctaccaatgaaaggccatttgcattgccagaaaacgcaataattgaaaatgctcctccgcaaaccagttttacgcaccaagaacaagatacggaaatgaactgattactattaaaatcacggaacgaaattcatgttcctgtgacccttttgatggaagacacctattcaaagctttttgaacatgacacatcatatgttttcccgttattgtatttataattcaagcaacatatttagattttaaaaaaaaaaaaaaaaaaaaaaaaaagtttttaaacagttcctgatcataagggcactgtgatgtaaataaacatatcagcat

SEQ ID NO: 1139 - DNA, 2442 bp, Saccharomyces cerevisiae
cgatagtataaccttataaacgcgcatagaaagattaggactgcaagaataataatgggttccaaaagaagattctcgtccgaacacccggatccagttgagacctctattcctgagcaggccgccgagattgcggaagaattatccaaacagcatcctcttccatccgaagagccacttgtccatcatgatgctggtgaattcaagggcttgcaacgtcaccatacttcagcagaagaggcccaaaaacttgaagatggaaaaataaatccatttaccggtagggagtttacaccaaaatatgttgatatcctgaaaattagaagagaattgccagtacatgcccagagagatgagtttttaaaactttatcaaaataaccagattatggtttttgttggtgaaacaggttccggtaaaacgacacaaattcctcaattcgttttattcgatgagatgccacacttagagaacactcaagttgcatgtactcaacctcgtcgtgtcgcagcaatgtctgttgcacagagagttgctgaggaaatggatgtcaagttgggcgaagaagttggttattctatcagattcgaaaataaaacttctaataaaacgatattgaagtatatgactgatggtatgttgttgagagaggcaatggaagaccatgacttgtcgcgttattcatgtatcattctggatgaagcgcacgaacgtacactagctactgatattttgatgggtcttttgaagcaagtagtcaagaggagacctgatttgaagataattattatgtctgctactctggatgcagagaagttccaacgctacttcaacgatgctccattacttgccgttccgggcagaacatatccagttgagctatactatacaccggaatttcaaagggactatttagattctgccattcgtactgttttgcaaattcatgccactgaagaggctggcgatattttgttatttttaactggtgaagatgaaattgaagacgctgtcagaaagatttccttagaaggtgatcaattggttagagaagagggatgcggacctttatccgtatacccactgtatggttcattaccaccgcatcaacaacaaagaatattcgagcctgctccagagtcacataatggtagaccaggcaggaaagttgttatctccacgaacatcgctgaaacttctttaacaattgatggtattgtctacgtcgttgacccaggattttcaaagcaaaaagtttacaatccaagaattagagttgagtctttacttgtttcccctatctccaaggcttctgcccaacaaagagctggtcgtgctggtcgtacaaggcctggtaaatgtttcagattatacactgaagaggcattccaaaaggaactgatagagcaaagttacccagaaattttacgttccaatttatcctccaccgttctagaactaaaaaaattaggtattgatgacttggtccatttcgattttatggatccaccggctccggaaacaatgatgagagcccttgaagaactaaattatttggcatgtctggacgacgaaggtaacttaacacccctaggtagattggcatcccagtttcccttggatcctatgctagcggtgatgttaattgggtcctttgagttccaatgttctcaagaaatactaactatagtggccatgctatcggttccaaacgtgtttattcgcccaacaaaggacaagaagcgagcagatgatgccaagaatatctttgctcatccagacggtgatcatatcaccttactaaatgtatatcatgcgttcaaatcggatgaagcttatgaatatggtatccataagtggtgccgtgaccactatctaaattacaggtccctttccgctgctgataatatccgctcccaattagaaagattaatgaaccgttacaacctagaattaaacactacagactatgaaagccctaaatactttgacaacatcagaaaggctcttgcgtctgggtttttcatgcaagtagcaaaaaaaagatcgggagctaaaggatacatcacagttaaagataaccaagatgttctgatccatcctagtacggttcttggccacgacgcagaatgggtcatttacaatgaatttgtgctcacatcgaagaactacataagaactgtgacctcggtcaggcccgaatggctgattgaaatagcgcctgcatactacgacttaagcaatttccaaaaaggtgatgtcaaattatctttggaaaggatcaaggaaaaagttgatagattaaacgagttgaaacaaggtaaaaacaaaaagaagagtaagcactccaagaaatagacattttgtgtcgaaaaaaaaaaaaaaatagatttatataaatttataggactatttcatagagagaaaattcaactagaaata

SEQ ID NO: 1140 - DNA, 1695 bp, Saccharomyces cerevisiae
cctcagtgtagttgatagcctgttaaaatgtctacacagcagcaatcttacacaatttggtctccacaagatactgttaaagatgtcgctgagtcgcttgggttggaaaatatcaacgatgacgtgttgaaagcacttgctatggacgttgaataccgtattctagagattattgaacaggcagtcaagtttaaaagacactctaaaagagatgttttaactacagacgatgtatcgaaggccctgcgtgttctgaatgtggaacctttatatggatattatgatggctctgaagttaataaagctgtatcatttagtaaggttaacacaagtggaggacagtcggtttactacctggatgaggaagaagtagattttgatagattaataaatgagccattaccgcaagtgcctcgtctaccaacttttactacacattggctagcagttgaaggggttcaacctgccataatccaaaatccaaatttgaatgatataagggtatcccaaccaccatttattagaggtgctattgtcactgctttgaatgataacagcctccaaacacctgtaacgtcgacgacagcaagtgcttctgtgacggatacaggcgcctctcaacacctgtctaatgttaaaccaggacagaatactgaagtcaaacctttagtgaaacacgttttatccaaagaattacagatttatttcaataaggtcatttcaaccttgacagcgaagagtcaagctgatgaagctgcacagcatatgaaacaagcagctttgacttcactacgaactgatagtggcctgcaccaactggttccatattttattcaatttattgccgaacaaatcacacaaaatctttccgatttacaattgctaacaacaattttggaaatgatttactctttactaagcaatacttctattttcctggacccttatattcattcgttaatgccttccattttaaccttgctattagcaaaaaaacttggtggatcaccaaaagatgattcgccgcaagaaattcatgaatttttagaaagaacgaatgcactacgtgattttgccgcatctttgttggactatgtattgaaaaaatttcctcaagcatacaaatccctgaagccaagagtaactaggacactgctaaagacatttttggacataaaccgtgtttttgggacttactatgggtgcttaaagggtgtatcggtactagaaggtgaatccatcagattcttcttaggaaacctaaataattgggcgcgcttggtattcaatgaaagcggaataactctagacaatatagaggaacatttgaacgatgactccaatccaactaggaccaaatttactaaagaagaaactcaaatcttggttgatactgtaattagtgcattgttagttctaaaaaaggatttaccagatttgtacgagggtaaaggtgaaaaagttacggatgaggataaggaaaaattgctagagaggtgtggtgtcactattggatttcacattttgaaaagagacgacgcaaaagaattaattagtgcgatattttttggcgaatagtgagaatcggtttatactaatagtacaacggtaatgttatataacagtttttacatacgccattgtatgtatatatatatatatgcatgatgagttatttaattgtatactcaaagg

SEQ ID NO: 1141 - DNA, 1175 bp, Saccharomyces cerevisiae
gtgaagtctttctgtttttgagaacaacagtatacataagtgatatccaagaatgactgagatactaccacatgtaaacgacgaagtgctaccagcagagtatgaacttaatcagccggaaccagaacactgtcctggtccagaatcagacatggcaggtaagtccgatgcttgtggtggctgcgccaataaagaaatatgtgaaagtcttccgaaaggccctgatccagatattccattgatcacagataacttgtcaggaatagaacataaaatattggttttatcaggcaaaggtggcgtaggcaagtcgacatttgccgcaatgctaagttgggcactttcagctgacgaagatttacaagtaggtgccatggatttagatatatgtggaccttctttgccacatatgttaggctgcattaaagaaaccgtccatgaatcgaactccggttggacacctgtctatgtgactgataatttagccaccatgtctattcaatatatgcttccagaagacgattccgccattatatggaggggttcaaaaaagaatttattgataaaaaaatttttaaaggatgttgattgggataaactcgattacttggtaatcgacacaccgcccggaacatctgatgagcacatttcaataaacaagtatatgagagaatctggcatagatggtgcccttgtggtcaccacacctcaggaagtagctttattagatgtacggaaagagatagatttctgtaagaaggctggtatcaatattcttggactagtggaaaatatgagcggatttgtatgtccaaattgcaaaggagagtcccaaatattcaaggctaccacaggtggaggtgaagcactttgtaaggaattgggcatcaaatttttggggtctgttccgttagatccgaggattggcaagagttgtgacatgggtgaaagtttcctggataactatcctgacagcccagcttcgagtgctgtacttaacgttgtggaggctctgcgagatgctgtgggggatgtatagtatattttatcaaaaagaataaaaggaagtgcattagaggtcaaatcgttttataatataaatatcattacctttaaatcttagacctactgaagaacacttttaccatatataatgctactaattactccaaaag

SEQ ID NO: 1142 - DNA, 363 bp, Saccharomyces cerevisiae
atgaaattcatttctacctttctcacttttattttagcggccgtttctgtcactgctagttccgatgaagatatcgctcaggtgccagccgaggccattattggatacttggatttcggaggtgatcatgacatagcttttttaccattcagtaacgctaccgccagtgggctattgtttatcaacaccactattgctgaggcggctgaaaaagagcaaaacaccactttggcgaaaagagaggctgttgccgacgcttggcactggttaaatttgagaccaggccaaccaatgtacaagagagaggccaacgctgatgcttggcactggttgcaactcaagccaggccaaccaatgtactga

SEQ ID NO: 1143 - DNA, 545 bp, Saccharomyces cerevisiae
ttcttattctgtatatgcaacgtagaagaaagcagcgtttacacaaaaatgtcaaaagtaccaagaaattttaggttgttagaagaattagaaaagggtgaaaaagggtttggtccagaatcatgtagttatggtttagctgatagcgacgatattaccatgaccaaatggaacggcactattttagggccccctcatagtaatcatgaaaacagaatctattccctttctatagattgtggcccaaactatccagattctcccccaaaggtcactttcatttccaagataaatctaccatgcgtcaatccaactacgggggaggtccaaactgacttccacaccttacgtgactggaaaagagcctacaccatggaaactttattacttgatcttagaaaggaaatggcaaccccagcgaacaagaaattgcgtcaaccgaaggaaggagaaaccttttagttatctactttttcctaaacagtatttgcagcattccaagccactcatatatacaagcaataagacatagatatcctcttatt

SEQ ID NO: 1144 - DNA, 1832 bp, Saccharomyces cerevisiae
atgttaatcatacaaaggcaaaaacaaagcgtgaatcagcatttgttaacagacaattgcaagaaatgtcgctgatcagcatcctgtctcccctaattacttccgagggcttagattcaagaatcaaaccttcaccaaaaaaggatgcctctactaccactaagccatcactatggaaaactactgagttcaaattctactacattgcatttctggtcgtggttcccttgatgttctatgctgggttacaagctagttcgcccgaaaatccaaactatgcaagatacgaacgtctcctatctcaaggttggttatttggcagaaaagtagacaatagtgattctcaatataggtttttcagggacaattttgcgctattgtcagttttaatgctagtccacacttctataaaacgcattgtactttattcaacaaatatcactaaattgaggtttgatctgatatttggtttgatctttttagtggccgctcatggtgtcaattcgataagaattttagcccatatgctaattttatatgccatcgcccatgtactaaagaactttagaagaatagccaccatcagcatttggatttatggtatttctacgctttttattaacgacaacttcagagcatatccatttggtaatatttgctcttttttaagcccattggaccattggtatagaggtatcattccaagatgggatgtctttttcaattttactcttttgagagtcttaagttacaacttggacttcttagagaggtgggagaatttacaaaagaagaaaagtccatcctatgaatcaaaagaagctaaatcagccattttgctcaatgaacgtgctagattaactgctgcacaccccatacaggactacagcttaatgaattatattgcatatgttacttacacgccacttttcattgccggccccattataacattcaatgattatgtttaccaatcgaaacataccttgccatcaataaatttcaaattcattttttactatgcggtgagattcgttattgctctcttatctatggagttcattttacactttctccacgttgtggcaatctcaaaaaccaaagcgtgggaaaatgacacacctttccagatttccatgattggcttatttaatttgaatattatttggctaaaactactgattccgtggaggctgtttaggctgtgggctttgctagacggaatcgatacacctgaaaatatgatcaggtgtgttgataacaattacagttcactagcattctggagagcttggcatagaagctacaataagtgggttgtccgttacatatatattcctctaggtggttcaaaaaatagagttttgacatcactagcagtcttttccttcgtagctatatggcatgacatcgaactaaagttattattatggggttggctaatagttttgttcctcttaccagaaatttttgctacccaaattttctctcattataccgacgcagtctggtacagacacgtttgcgctgtcggtgctgttttcaacatatgggttatgatgatcgctaatctttttggattctgcttgggctctgacggtactaaaaaattactaagcgatatgttctgtaccgtatctggtttcaaatttgtaattttggcaagcgttagtttattcatcgcagtacaaataatgtttgaaatcagagaagaagaaaagaggcacggaatttacctaaaatgctgaatgccaaatttacgaatatcaattgtataacactgctatcatgtatgtatttttatctactagtacaaaaatgaaaccgaaaat

SEQ ID NO: 1145 - DNA, 1818 bp, Saccharomyces cerevisiae
gagatatagcttaacttcattttacagccttttaacgaaagcataagtattaacagtttgatatataggggattaaaatgacaaaggaagaaatcgcagacaagaagagaaaggttgtagatgaggaggtaattgaaaaaaagaagagtaagaaacacaaaaaggataagaaagacaagaaggaaaagaaggataaaaagcataaaaagcataagaaggagaagaagggtgagaaggaagtggaagtaccagagaaagaatctgaaaagaaacctgaacctacttctgcagtggctagtgagttttatgttcagagtgaagcactaaccagtcttccacaatctgatattgacgaatatttcaaggaaaatgaaattgctgttgaggattctctggatctagccctacgtccgctattatcatttgattatctttctttagactcttccattcaagcagaaatttccaaatttccaaaaccaacgcctattcaagccgtagcctggccatatttgttatctggtaaagatgttgttggtgttgctgagaccggttctggtaaaacatttgctttcggtgttccagctatcagccatttaatgaacgatcaaaagaaaaggggcatacaggttctagtcatttccccaactagagaacttgcttcccaaatttatgataatctgattgtattaactgacaaggttggtatgcagtgttgttgtgtttatggtggtgttccaaaggatgagcaaagaattcagttaaaaaagtcacaagtggtggttgctacacctggtagattattagacctattgcaggaaggatctgttgacttatctcaagttaattacttagtattagacgaggcagacagaatgttggaaaaaggttttgaagaagacatcaagaatattatcagagaaactgatgcgtccaaaagacaaactctaatgtttaccgctacctggccaaaggaagtccgtgaattagcttccacgttcatgaacaacccaatcaaagtatctattggtaacacggaccaactaactgctaacaaaagaattacacagattgttgaagtggtggacccacgtggaaaagaaagaaagttattggaactgttgaaaaagtaccactctggtccaaaaaagaatgaaaaggtcttgatttttgctctttataagaaggaagctgctcgtgttgaaaggaatttgaaatataacgggtataacgtcgcagctatccatggtgatttgtcccagcaacaaagaacgcaagcattgaatgagttcaaaagcgggaagtctaacttgttactggccaccgacgttgcagcaagaggtttagatataccaaatgttaagacagttattaatttaactttcccattgactgtggaggattatgtccatagaatcggtagaactggtagagctggtcaaacaggcacagcacacactctgttcactgaacaagaaaagcatttggctggtggactggttaacgttttgaatggtgccaatcaacctgttcctgaagatttgataaagttcggtactcacactaagaagaaggaacatagcgcttatggttcattctttaaggacgtcgatttgactaagaaaccaaaaaaaattactttcgattaggggttttttcgtttacttcaatcttggattttcttctctaataatagccaatcgagagtcggagatttattaacaaaacactgtatattactattataactgcccactttcatttatcattaatattatttaaattgactctcacatagtatacatattttctagaaaa

SEQ ID NO: 1146 - DNA, 1811 bp, Saccharomyces cerevisiae
tgttaactggctcatttactcagaaattagtattttgaagaacgatgagtattcggaatgataatgcttccggtggctatatgcagccggatcaatcttcgaacgcttctatgcacaaaagagacttaagagttgaggaggaaataaagccattggatgatatggatagcaagggtgctgtagcagcagatggtgaagttcatctaagaaagtcattttcgttgtggtcaattcttggtgttggattcggtttgactaattcctggttcggtatttctacatcgatggttgcaggtatatcttctggtggacccatgatgattgtttacggtataattattgttgccctgatttctatttgcattggtacctcgttgggtgaattatcttccgcatatccgcacgccggtggtcagttttggtggtctttgaagcttgcccctcctaagtacaaaagatttgcggcctacatgtgcggttcatttgcttacgcaggatccgtgttcacaagtgcttcaactacgttatccgttgctaccgaagtggttggtatgtacgctctgacgcaccctgaattcatcccaaagagatggcatatattcgtttgctttgaattgttgcatttgttcttgatgtttttcaactgttacggtaaatccttacctatcatttcatcttcctctctatacatttccctactatcctttttcacaattacaattactgtattggcatgttctcatggaaagttcaacgatgcaaagtttgtttttgccacatttaataatgaaacaggttggaagaacggcggtatcgcctttattgtcggtttgattaacccagcttggtcattttcgtgccttgactgtgcaacccatatggcgtttgaagttgaaaaaccagaaagagttattcccattgctatcatgggaacagtcgccattgggtttgtcacttccttttgttatgttatcgctatgttcttctctatacaagatctggacgctgtcttgtcttctacaacaggcgccccaatcttggacatttataatcaggcattgggtaataaatcaggtgcgattttcctgggttgcttgattctatttacctcttttggttgcgtcattgcttgtcacacttggcaggcaaggttatgttggtcatttgccagggacaatggtcttccattatcccgtttatggtcgcaagttaacccacacactggtgtacctttgaacgctcatttaatgtcatgcgcttggataaccctcattggcctactttatttggcttccagtacggcttttcagtccttaattacaggttgtattgcatttttattgttatcctacatcattccggttatatgtttacttgctaaaaagcgtaacatagctcatggtccattctggcttggaaaatttggatttttttcaaacattgttcttttgggttggactgtcttttctgtggtctttttttcctttccaccagttttacctgtgacaaaggataacatgaactatgtttgtgtagttattgttggttatactgcgtattcgattctttactggaaatacaagggtaagaaggaattccacgctttagaagaatctgagaacgaacaggctgaatatagtaataacttcgataccattgaagatagtcgagaattttccgttgcggcctctgacgttgaactcgaaaatgaacacgtaccgtggggaaagaagtgaatttatagtgttgatcagtcgaccgttatttattttaagtatattatttgcatagaagtaataaaagtgaatttt

SEQ ID NO: 1147 - DNA, 847 bp, Saccharomyces cerevisiae
ccaaccaagcaaattaagatcacaatggccgctgaaaaaatcttgaccccagaatctcagttgaagaagtctaaggctcaacaaaagactgctgaacaagtcgctgctgaaagagctgctcgtaaggctgctaacaaggaaaagagagccattattttggaaagaaacgccgcttaccaaaaggaatacgaaactgctgaaagaaacatcattcaagctaagcgtgatgccaaggctgctggttcctactacgtcgaagctcaacacaagttggtcttcgttgtcagaatcaagggtattaacaagatcccacctaagccaagaaaggttctacaattgctaagattgacaagaatcaactctggtacattcgtcaaagttaccaaggctactttggaactattgaagttgattgaaccatacgttgcttacggttacccatcgtactctactattagacaattggtctacaagagaggtttcggtaagatcaacaagcaaagagttccattgtccgacaatgctatcatcgaagccaacttgggtaagtatggtatcttgtccattgacgatttgattcacgaaatcatcactgttggtccacacttcaagcaagctaacaactttttgtggccattcaagttgtccaacccatctggtggttggggtgtcccaagaaagttcaagcactttatccaaggtggttctttcggtaaccgtgaagaattcatcaacaaattggttaagtccatgaactaaactggttgaagtcacattacatataactacttattttatctaagtcctatatagttctgttattcactagtttgtatattgtacctct

SEQ ID NO: 1148 - DNA, 698 bp, Saccharomyces cerevisiae
ttaaactccccttaaaactgctatgactacgtttagattttgtcgtgactgcaacaatatgttgtaccctcgtgaggataaagaaaataaccggttgttatttgaatgcagaacatgctcgtatgtagaagaagcgggcagtccattggtctacaggcatgaattgattaccaacattggtgaaactgcgggagtggtgcaagatattggttccgatcccactcttccgagatctgatagagaatgtcccaaatgtcactctcgggaaaatgtgttttttcaatcacaacaaagaagaaaggatacttcgatggttttattctttgtgtgcttatcttgctcacacatatttacttcagatcaaaaaaacaaaaggacgcagttttcatgagtgctcaacgaactttcaaaattaatgacagagggagagaaaatgggacttatcttcacgtatgtcttgtatgtatgagaaaagcactactatttacaccagcctaatctaccggcaaaaggatgatgtgaaataacagggggaaggaacatgaaaaaatcctgatcttagcaccgatatatgtaatataataagaacgattttttatctgtaacaaaagtagaaaaaagaatgtatactattgttttctttttcttctttaaaaagtcaaaattgtatagatgcgtatatgttcagtatataatta

SEQ ID NO: 1149 - DNA, 1512 bp, Saccharomyces cerevisiae
atgattgaaaaggataaaagaacgattgcttttattcatccagacctaggtattgggggcgctgaaaggttagtcgtcgatgcagcattaggtctacagcaacaaggacatagtgtaatcatctatactagtcactgtgataaatcacattgtttcgaagaagttaaaaacggccaattaaaagtcgaagtttatggtgattttttaccgacaaactttttgggtcgtttttttattgttttcgcaacaattagacagctttatttagttattcaattgatcctacagaaaaaagtgaatgcgtaccaattaattatcattgatcaactgtctacatgtattccgcttctgcatatctttagttctgccactttgatgttttattgtcatttccccgaccaattattggctcaaagagctgggctattgaagaaaatatacagactaccatttgacttaatagaacagttttccgtgagtgctgccgatactgttgtggtaaattcaaatttcactaagaatacgttccaccaaacgttcaagtatttatccaatgatccagacgtcatttatccatgcgtggatttatcaacaatcgaaattgaagatattgacaagaaatttttcaaaacagtgtttaacgaaggcgatagattttacctaagtataaatcgttttgagaaaaaaaaggatgttgcgctggctataaaggcttttgcgttatctgaagatcaaatcaatgacaacgttaagttagttatttgcggtggttatgacgagagggttgcagaaaatgtggagtacttgaaggaactacagtctctggccgatgaatacgaattatcccatacaaccatatactaccaagaaataaagcgcgtctccgatttagagtcattcaaaaccaataatagtaaaattatatttttaacttccatttcatcatctctgaaagaattactgctcgaaagaaccgaaatgttattgtatacaccagcatatgagcactttggtattgttcctttagaagccatgaaattaggtaagcctgtactagcagtaaacaatggaggtcctttggagactatcaaatcttacgttgctggtgaaaatgaaagttctgccactgggtggctaaaacctgccgtccctattcaatgggctactgcaattgatgaaagcagaaagatcttgcagaacggttctgtgaactttgagaggaatggcccgctaagagtcaagaaatacttttctagggaagcaatgactcagtcatttgaagaaaacgtcgagaaagtcatatggaaagaaaaaaagtattatccttgggaaatattcggtatttcattctctaattttattttgcatatggcatttataaaaattctacccaataatccatggcccttcctatttatggccacttttatggtattatattttaagaactacttatggggaatttactgggcatttgtattcgctctctcctacccttatgaagaaatataa

SEQ ID NO: 1150 - DNA, 1748 bp, Saccharomyces cerevisiae
gcgatacgaatacctcagaacatcatcttttcagcaagacccacccaatgcctcaaaatacaagacacacgtccatcgtagaaatgctttctaccccacctcaattaccgaattccacagatttaaatagtttgagcgaacagacagacaagaacactgaagcaaacaaaagcgacacagaatcactacataaatctatttcgaaatcgtcatcttcatcttctctctccacgctggataacacggaatactcaaacaataatggcaactccttgtccaccttgaattcacagaatctgttatctgttcataggcaggagtggcaacacactcctctgtcaaatttggtggaacagaacaaattgattttcatcagaggttctatttccgtagaggaagcattcaacacgctggtcaagcaccagctaacttctttgcctgtggagaattttccgggagacatgaattgtttaacattcgactataatgatctcaatgcgtaccttcttcttgtattaaacaggatcaaggtgagcaacgacaagataacctcagactgccagaatggtaagtccgtgcccgtggcggagatagtaaagttgacacctaagaatccattctacaaattgcccgaaacggaaaacttatcgacggtaataggcatactaggctcaggtgtgcatcgtgttgccatcacgaacgtggaaatgacacagattaaaggtatactttcccaacgtcgattgattaagtatctgtgggagaatgcgagatcatttcccaacttgaagcctctcttggactcttccctggaggagctgaatattggtgtactaaatgcagcccgtgataaacctacattcaagcagtcacgtgtcatatccatccaaggtgacgagcatctaattatggctctgcataaaatgtatgtcgaaagaatctcttccattgcggtagttgacccgcagggaaacttgattggtaatatttcagtaacagacgtcaaacacgtcaccagaacttcacaatatcctttattacacaatacatgtcgtcattttgtctcggttattttgaatttaaggggcctagagaccggtaaggactcatttcctattttccatgtgtatccaacaagttccctggcaagaacgtttgccaaattggtcgctaccaaatctcacagattatggatagtacaaccaaatgacaatcaaccaacagcatcttccgaaaaatcctcatctccatcaccaagtactccacccgtaacgacattgccatcgcttgcgtcgtcataccattcgaacacgcaatcttccaggatggccaactctcctgttctaaaatcttcagatacatcaaacaataaaataaatgtaaatataaatttgagtggtccctcaccttctcaaccacagtctccatcggccacaatgccaccacctcaaagtccaagtaattgtcccgcatctccaactccagcacatttcgaaaaggagtatagaacaggtaaattgataggtgttgtgtcattgactgacatattaagtgttttggcaagaaaacaaacgcatcataaggaaattgatccgcagatggcaagaaagcaaagagggcatataggctgaaacaaaccagacgaaaaaaactggcttcatttaactacatatacatatataagggtttttctgatttttattttatcccaataaagtttgatttttttttttttacttttattatgc

SEQ ID NO: 1151 - DNA, 502 bp, Saccharomyces cerevisiae
acttaacaaagacatttacctttgaactgcaattaaagtaaagtaaaaaaattaagaataaaaagaaaaatgggtgcttggttatttatccttgctgttgttgtcaactgtatcaatttgtttggccaagtgcatttcacaatactatacgctgatttagaagctgactatatcaatccaattgaattatgttctaaagttaacaagttaattacccctgaagccgccttgcatggtgctttgtcattactattcttactgaacggttactggtttgtatttttattgaacttaccagttctagcttacaatctaaacaagatctacaataaagttcaacttttggatgctaccgaaatattcagaactttaggcaaacataaaagggagagtttcctaaagttaggtttccacttattgatgttcttcttctacttgtacagaatgatcatggctttgattgctgaaagtggtgatgacttctaatccaacaagacattga

SEQ ID NO: 1152 - DNA, 1308 bp, Saccharomyces cerevisiae
agtgggatactatcacgacaatgacagctgctgtaacatcctccaatatagtattagaaacccacgaaagtggtatcaaaccatattttgaacagaagatccaagaaacagaattaaagatccgctccaaaacagaaaatgttcgcagactggaagctcaaaggaatgcattgaatgacaaagtacgttttatcaaggacgaactgcgtctattacaggaacctggatcttatgtgggtgaagttataaagatcgtgtctgacaaaaaagttctcgttaaagtgcaacctgagggaaaatacatcgtggatgttgcaaaagatataaacgtgaaggacttaaaggcatctcaaagagtttgtctaaggagtgactcttatatgttgcataaagttcttgagaataaggctgacccactagtttcgttgatgatggtggaaaaagttcctgattccacatacgatatggttggtggtttgacaaagcaaataaaggagattaaagaagttattgaattgcccgtaaaacatcctgaactttttgaaagtttgggtattgcgcaaccaaagggtgtcatcttatatggcccccctggtacagggaaaaccttattggcaagagctgtcgcacatcacactgattgtaaattcatcagggtcagtggtgcggaactggtacaaaagtatatcggcgaaggttcccgtatggtccgtgagctgtttgtgatggctagagaacatgctccctcaattatctttatggatgaaatcgattccattggctctactcgtgtagaaggttctggtggtggtgattcagaagttcaaagaacaatgttagaactactaaaccaattggacgggtttgaaacttctaaaaatatcaagatcataatggccacgaatagactagatattctagatccagcacttttgagacccggtagaatagataggaagattgaatttccacctccaagtgtcgcagctagagctgaaattttaagaatccattccagaaaaatgaatctaactcgtggtatcaacttgagaaaggttgctgaaaagatgaacggttgttctggtgccgatgtcaaaggtgtctgtacagaagctggtatgtatgctttaagagaaagaagaatacacgttactcaagaagacttcgaactcgctgtgggtaaggttatgaacaagaaccaagaaacggccatttctgtcgccaagctgttcaagtgatgtattcgtttcacttggctcattgtatatgttacttagtgtatgtgtataatatcatagtttagcatta

SEQ ID NO: 1153 - DNA, 1290 bp, Saccharomyces cerevisiae
ccaaataaaaaaaagttttactgcttactcatattattgcttactccagtaattcatacctagaaaattgacaaaaccatgcatacagctgaatttttggaaacagaaccaacagaaatctcatctgttctagcaggtggttataatcacccactgctgagacagtggcaaagtgagcgtcaactgactaagaacatgttgatttttccgctattcatctccgataatccagatgactttactgaaattgactctctacctaatatcaatagaatcggtgtaaataggctaaaagactacttaaagccattagtggccaagggtttgcgttctgtgatcttgtttggtgtgcctctcatccctggtaccaaggatccagtgggtacagcggctgacgatcctgcagggccagtcattcaaggtattaaattcattcgtgagtatttccctgaactgtatattatttgcgatgtctgtctctgtgaatacacttctcatggccattgcggggttctatacgatgatggtactattaatagagaacgtagtgtctctagattagcagctgtggcagttaactacgctaaagctggtgcgcactgtgtggctcccagtgatatgatcgatggtaggatcagagatattaaacgaggcttaataaatgcaaacttggctcacaagaccttcgtgttatcctatgcagctaagtttagcggtaatctatatgggccattccgtgatgctgcttgttcagctccttcgaatggtgataggaaatgttaccaattacctcctgccggtcgtggcctggcacgtagggcgttggaaagggatatgagtgaaggtgccgacggtattattgttaagccttccactttctacttagatataatgagggatgcaagtgaaatttgtaaagacttaccaatctgcgcatatcacgtgtcgggcgaatacgcaatgttacatgctgcagctgaaaaaggtgttgttgatttgaagacaattgcctttgaatctcatcaaggtttcttgagggcgggtgccagattaatcatcacttatttggctcctgagttcctagactggttagatgaagaaaactaaaaaaaaacgtgcttaccttgtgaatagtaaaaataatgatgtcaatatgacaaatgtaacagtgctggcagtatatccctatttggcaagctttataatatgcaaagatgcgacctagtatacgatacaatggaaattatgtaatcctcctaatgagtatttatgtagtagtacgtaatattt

SEQ ID NO: 1154 - DNA, 1661 bp, Saccharomyces cerevisiae
tgattccgttttcatttcaagagcaataatagcaatttggaaaaagaaagcaagtaaaagaaagaagagatcatgtctaggaagttgtcccacctgatcgctacaaggaaatcaaaaacaatagtcgtaaccgtacttcttatttattctttgttgacatttcacttgtcaaacaaaaggctgctttctcagttttaccctagcaaagatgatttcaagcaaactcttctccctacgacttctcattcacaagatataaatttgaagaaacaaattacagttaacaagaaaaaaaatcaattgcataatttacgtgatcaattatcgtttgcgtttccctacgactctcaggcccccatcccgcaaagggtgtggcagacctggaaagtcggcgcagatgataagaattttccctcttcgttcagaacctatcaaaaaacatggtctggttcgtattcaccggattaccaatattctctgatttcggatgattctattatcccttttttggagaatctttacgcacccgttccgatagtcatccaagcgtttaaattgatgcctggaaatatcctaaaggcagattttttaaggtacctattattatttgcaagaggtggtatttactcagatatggatactatgcttttgaagccaattgattcatggccttctcagaataagtcatggctaaacaacataatagatttgaataaacctattccttataagaactcaaagccctcacttctctcaagtgatgagatatcacaccagccaggtttggtcatcggcattgaggcagatccggacagagatgattggagtgaatggtatgctcgtaggatccagttttgtcaatggactatccaagccaaaccaggtcacccaattctaagagaattgatcttaaatattactgcaacgactttggcgagcgtacaaaacccaggagttcctgtcagtgaaatgattgatccaagatttgaagaagactacaacgtaaactataggcacaaaagacgtcatgatgagacctacaaacactccgaattgaaaaataacaaaaatgttgatggctcagatataatgaattggacgggtccaggtattttctccgacattattttcgaatacatgaacaatgtgctccgatacaatagcgatatcttgttaatcaacccaaacctaaacaagaacgacgaagaaggtagtgagagtgccaccacaccagcaaaagatgttgataacgatacgctgtccaaatcaacaagaaaattttataagaaaatatcagagtctttgcaatcgtcaaattcaatgccctgggaattcttctcttttttgaaagaaccagttatcgttgatgatgtgatggttctaccaataacaagtttttcaccagatgtggggcagatgggcgcccagtctagtgacgacaaaatggcttttgtaaagcacatgtttagcgggagctggaaagaagatgctgataaaaatgcaggtcataaataacgaggctctcctttcatcataccctctctaaataaaatttattcctagttattcctttcttcttcatatccttaatcatgcattcactgccatgtgcaaataaaggctcttgtggtagaaacttttagctcaaacgtggtaaaact

SEQ ID NO: 1155 - DNA, 822 bp, Saccharomyces cerevisiae
ctttcttttacgattatctatatctttgttagaaagaataaaatacagtacaaaaatgaagactttaattgttgttgatatgcaaaatgattttatttcacctttaggttccttgactgttccaaaaggtgaggaattaatcaatcctatctcggatttgatgcaagatgctgatagagactggcacaggattgtggtcaccagagattggcacccttccagacatatttcgttcgcaaagaaccataaagataaagaaccctattcaacatacacctaccactctccaaggccaggcgatgattccacgcaagagggtattttgtggcccgtacactgtgtgaaaaacacctggggtagtcaattggttgaccaaataatggaccaagtggtcactaagcatattaagattgtcgacaagggtttcttgactgaccgtgaatactactccgccttccacgacatctggaacttccataagaccgacatgaacaagtacttagaaaagcatcatacagacgaggtttacattgtcggtgtagctttggagtattgtgtcaaagccaccgccatttccgctgcagaactaggttataagaccactgtcctgctggattacacaagacccatcagcgatgatcccgaagtcatcaataaggttaaggaagagttgaaggcccacaacatcaatgtcgtggataaataagagctgaataatacttcttcaacctgatgaactagggtggcttgcaaatgcacaaatctatataacaatatctatatatatgtatgtacaccgaattccgacatatggagaaggaa

SEQ ID NO: 1156 - DNA, 1856 bp, Saccharomyces cerevisiae
caaaggagagtaagaaagcccggtaaagcatttcgaagataagagagccatttattctagctcgcttgtaactacacgagagttgagtatagtggagacgacatactaccatagccatgcaaagcccatatccaatgacacaagtgtctaacgttgatgatgggtcactattgaaggagagtaaaagcaagtccaaagtagctgcgaagtcagaggcgccaagaccacatgcttgtcctatctgtcatagagcttttcacagactggaacatcagacgagacacatgagaattcatacaggtgagaagcctcacgcgtgtgacttccccggatgtgtgaaaaggttcagtagaagcgatgaactgacgagacacagaagaattcatacaaactcccaccctcgaggtaaaagaggcagaaagaagaaggttgtgggctctccaataaatagtgctagttctagtgctaccagtataccagatttaaatacggcaaatttttcaccgccattaccacagcaacacctatcgcctttaattcctattgctattgctccgaaagaaaattcaagtcgatcttctacaagaaaaggtagaaaaaccaaattcgaaatcggcgaaagtggtgggaatgacccatatatggtttcttctcccaaaacgatggctaagattcccgtctcggtgaagcctccaccttctttagcactgaataatatgaactaccaaacttcatccgcttccactgctttgtcttcgttgagcaatagccatagtggcagtagactgaaactgaacgcgttatcgtccctacaaatgatgacgcccattgctagcagtgcgccaaggactgttttcatagacggtcctgaacagaaacaactacaacaacaacaaaattctctttcaccacgttattccaacactgttatattaccaaggccgcgatctttaacggattttcaaggattgaacaatgcaaatccaaacaacaatggaagtctcagagcacaaactcagagttccgtacagttgaagagaccaagttcagttttaagtttgaacgacttgttggttggccaaagaaataccaacgaatctgactctgattttactactggtggtgaggatgaagaagacggactaaaggacccgtctaactctagtatcgataaccttgagcaagactatttgcaagagcaatcaagaaagaaatctaagacttccacgcccacgacaatgctaagtagatccactagtggtacgaatttgcacactttggggtatgtaatgaaccaaaatcacttgcatttctcctcatcatctcctgatttccaaaaggagttgaacaacagattactgaacgttcaacaacagcagcaagagcaacataccctactgcaatcacaaaatacgtcaaaccaaagtcaaaatcaaaatcaaaatcaaatgatggcttccagtagttcgttaagtacaaccccgttattattgtcaccaagggtgaatatgattaatactgctatatccacccaacaaacccccatttctcagtcggattcacaagttcaagaactggaaacattaccacccataagaagtttaccgttgcccttcccacacatggactgatacgctgacaagtttttggcggtgcagataaatcaaaagacaatagacaagaattaataatattaacaattaataattaataaataataaataataataataataataataataataataataatagtaataataataataattaataacgataaaaatatttaattatgatagtaagaatacatattttgattgtcttagtcttccgcagagataattaattgt

SEQ ID NO: 1157 - DNA, 1064 bp, Saccharomyces cerevisiae
caagacaccaagacaataacttgagaggtatgtccctatatgatgatgattcataattaatggcgaccgagggcagcgttgtgctagaaagcaatgtattaatatatgagagagcttcagatagccaatacaccggaatttagactttgacaggattgtggcttgttccagtataacttataatatatgtcaacctttgagcaggaaacccaatgaaaatgcttcattacatatatacgatatggagaagcatgaaaaataacagcgtgagatgttatccatgttgcaagaacctagtaaaatgaattctgaatttgcaaaaagtccatatttccacgttctcctcttcctacaattttgcgaacgcctgaacaaccatgcggattaccattatttatattgacaagatggctacctatgaaaagcatagacttactaacattttttttttcaaatatgtttgaaaaacgtggattaatatagtgataaaatgaaggttgaaatcgattctttttcaggtgccaaaatctacccaggcagaggtaccttgtttgtccgtggtgactccaaaatcttcagattccaaaactccaaatctgcctctttgttcaagcaaagaaagaacccaagaagaatcgcttggactgtcttattcagaaagcatcacaagaagggtatcaccgaagaagttgctaagaagagatctagaaaaaccgttaaggcccaaagaccaattaccggtgcttctttggacttgatcaaggaaagaagatctttgaagccagaagttagaaaggctaacagagaagaaaaattgaaggccaacaaagaaaagaagaaggctgaaaaggctgctagaaaggctgaaaaggctaagtctgctggtactcaaagttctaagttctccaagcaacaagctaagggtgctttccaaaaggttgctgctacttctcgttaagatttatgctcgaacttattatgtacaatgaatatttttcttttaaatcatttttaaatatttcaatttagtattattttctgtataattcattcgcgaggtataa

SEQ ID NO: 1158 - DNA, 2063 bp, Saccharomyces cerevisiae
actataatcgtcagttacgcaacaaagacagtccactcttttagaagaataagcctttactgacatacctccactgtaataaatctattctattctctgtactgtttatcgacttattattacgctacactcattgatataatatctaatagaaaaccatcatgatttcacccataagctttctatcatcgctgctatgcttaacttatctaacctcagctttaccgattcttcctaagagagaagttgtaacgagagttcacacagcaagcacaactaatgttgtgactgatttttactccactactaccgaagttgttattgccccaactgtcgaattcctaataagcgatagtgttacctttacaacaaccttaattccacaaggtgtgaacccaacagctgaaccaactacgactatcactaaagttctcttaaaaaaggctgaaatgagtacatcttcgcagccaacctctactttgcagccaagcactattccacaatcaacctcctcttttcaagcagaatctactttgcaagccgtctctacgcaacaaactgctatgtctgtttctgcaggtactagtgaggatgtgcaacaattagctactacttctacctctatctcctcctctccttcccctaccactacgtctacttccacacaaaatatcgtgagtggtgtcggtgaagccaatgttgaaggcaacactcaaagtcagcatcattcttaccaagcagctgcgacttcaactttgaatcaacaaacgagtacctcaattgcttctcaggagtccaccgaatcaaccaatacacctacgtcgtcctctacgtcgtcctctacttcttcttctacttcttcttctacttcttcctctacttcttcttctacttcttcctctacttcgtcctctacttcgtcctctacttcatccacacaggaaacagccgctaccacctctgaaggttcctctagtagcagcgctgctataacttcttctccaaaggctattgcatattcaccatataatgatgatggctcttgtaagtctgcagacgctgtctcttctgacttaacgttgatcaaatctaaaggtatttccaaaatccgtgtttatggcaccgactgtaattcctttgaaaccgtccaaccagcagccgtaaaactaggtattaagattaaccaaggtttgtatatcaccagtagcggcgttgattccatagatgattctgttaccacattgattcaatatggtcaaactaacggttgggatgtctttgatttcattactgttggaaatgaagctatcaataatggttggtgttcagtttctgatttgattagtaaaatttcctctgtcaaatccaaattaagcgaagctggctattctggccaaattactaccagtgagccccctgtctcatttgaaaataaccctgatttgtgcaaaaaatctgatattgacttcgttggtatcaacccacatgcctactttgatactagcgccagtgctgaaactgccggtacatttgttaagggtcaagttgaattaattcaaggtgtttgtggtacttctaatgttttcgtcacggaaacaggttacccatcgtctggtattcaaaatggaggcaacattccatccactgctaaccaaattactgcagtccaaaacatcttgaatgaaatggacttggatgttacaatcttatcgacttacaatgattactggaaggctcccggtgattacggtatcgaacaatctttcggtgtgattgaatattttccataagttttctaaatcgaatagagaaacatgcatataaaagatcagaaaacagtaattagatcttttccattacgacattaacgatatagatgttttacaaatttgcggttctaatttctaactacaaatacaccagggtataggttaaagataaaataaagaagacaggaagcaagaatgtaagtttggcattgaaatgtgcacgagtacttcttactcttcttatatacgggattattcagttcatttacatatctacattatcatttcactttg

SEQ ID NO: 1159 - DNA, 2619 bp, Saccharomyces cerevisiae
aactgttaataaggaagtagtggataataacggttcaggttgcttcacaatgcttatttcaaaatctaagatgtttaaaacattttggatactaaccagcatagttctcctggcatctgccaccgttgatattagtaaactacaagaattcgaagaatatcaaaagttcacgaatgaatctttactgtgggcaccgtatagatccaattgttactttggtatgaggcccagatatgtccatgaaagtccactaattatgggtatcatgtggttcaacagtttgagtcaggatggcttacattcgttaagacattttgcaacgcctcaggataaattgcaaaagtatggttgggaagtgtatgatccaagaattggtggtaaagaagtttttattgatgaaaaaaataacttgaacttgactgtttattttgtaaagagcaagaacggggaaaattggtcagtgagagttcaaggtgagcctttggatcccaagagaccatctacagcatctgtcgtattgtactttagtcaaaatggtggcgagatagatggaaaatcttccttagcaatgataggtcatgacggccctaatgacatgaaattcttcggatattctaaagaattaggcgagtatcatcttacagtaaaggacaattttggtcactacttcaaaaatccggaatatgaaaccatggaagtagcaccaggaagtgactgctctaaaacaagtcatttatcacttcaaatcccggataaagaagtttggaaggctcgtgatgttttccaatctctagttagcgattcgatacgtgatatactggaaaaggaagagacaaagcagcgtcctgctgatttaataccaagtgttttaactattagaaatttgtacaattttaatcctggtaattttcattatatacaaaagacatttgatttgaccaaaaaagatgggttccaatttgatatcacttacaataaacttggcactactcaaagtatttccaccagggaacaagttacggagttgattacttggtcactaaatgagataaacgcgcgttttgataagcagtttagttttggagaaggtcccgactcaattgaaagcgtggaggtcaaaagaagatttgctttagagacgctatcaaacctattaggaggaatcggttatttctatgggaatcaactaattgatcgtgaaacagaatttgatgagagccagtttacagagatcaaactgctgaatgcaaaagaggaaggtccatttgaactgtttaccagcgttccgagccgtggctttttcccacgtggattctattgggatgaaggtttccatcttctacaaattatggagtatgattttgaccttgcctttgaaatcttagcgagctggtttgaaatgatcgaagatgatagtggttggattgctagagaaattatactgggtaatgaggcaaggagtaaagttccgcaggaatttcaggtgcaaaatcccaatattgctaatccgccaactttattgctagcatttagtgaaatgctttctagggccattgaaaacatcggcgatttcaacagtgacagctaccaccaagtcatgttcaatagtaggacagccaagtttatgacgaacaatctagaagccaatcctggcttgctaaccgaatatgccaagaaaatttatcctaagctattgaagcactataattggttcagaaaatctcaaacaggacttattgatgaatatgaggaaatattggaagatgaaggaatatgggataagattcataagaacgaagtttatagatgggttgggcgtaccttcactcattgtttgccaagcggtatggatgactatcctagagcacaaccaccagatgtagcagaattgaacgtagacgcattagcatgggtgggcgttatgacaagatccatgaagcaaattgctcacgtgttgaagttaacacaggacgagcaaagatatgcacaaattgagcaagaggtggtcgagaatctggatttgttacactggagtgaaaatgacaattgctactgtgatattagcatcgatccagaagacgatgagattagggagtttgtatgtcatgagggttacgtctccgtattgccctttgcattgaagctaatccccaaaaactcacccaagctagagaaagtagttgctttgatgagtgacccagaaaaaatcttttcagactacgggctgttatcactatcgagacaagacgactatttcggcaaggatgaaaactattggagaggcccaatttggatgaatattaattacttgtgtcttgacgcaatgagatactactacccagaggtgattctcgacgtggctggtgaggctagcaatgccaagaaactgtaccaaagtttaaagattaatctcagtaacaacatatacaaagtttgggaagaacaaggttattgttatgaaaattacagtccgatagatggtcatggtactggtgctgagcatttcacaggctggacagcacttgttgtcaacatccttggacgcttctgaatctatgtagatattttcagtcatataaacagatatgtaaccagatatgtaccagtatgcaggatgaa

SEQ ID NO: 1160 - DNA, 2213 bp, Saccharomyces cerevisiae
tccaaaaagggacatagcacaccgacagaccatgtcagaacaactcagacaaacatttgctaacgctaaaaaagaaaacaggaacgccttggtcacatttatgaccgcaggttacccaacagtcaaagacactgtccctattctcaagggtttccaggatggtggtgtagatatcatcgaattgggtatgcccttctctgatccaattgcagatggtcctacaattcaattatctaatactgtggctttgcaaaacggtgttaccttgcctcaaactctagaaatggtctcccaagctagaaatgaaggtgttaccgtacccataatcctaatgggttactataaccctattctaaactacggtgaagaaagatttattcaggacgctgccaaggctggtgctaatggttttatcatcgtcgatttgccaccagaggaggcgttgaaggtcagaaactacatcaatgataatggtttgagcctgatcccactagtggctccttctaccaccgacgaaagattggaattactatcgcatattgccgattcgtttgtctacgttgtgtctagaatgggtactactggtgttcaaagttctgtggccagtgatttggatgaactcatctctagagtcagaaagtacaccaaggatactcctttggccgttgggtttggtgtctctaccagagaacatttccaatcagttggtagtgttgctgacggtgtagtgattggttccaaaatcgtcacattatgtggagatgctccagagggcaaaaggtacgacgttgctaaggaatatgtacagggaattctaaatggtgctaagcataaggttctgtccaaggacgaattctttgcctttcaaaaagagtccttgaagtccgcaaacgttaagaaggaaatactggacgaatttgatgaaaatcacaagcacccaattagatttggggactttggtggtcagtatgtcccagaagctcttcatgcatgtctaagagagttggaaaagggttttgatgaagctgtcgccgatcccacattctgggaagacttcaaatccttgtattcttatattggccgtccttcttcactacacaaagctgagagattaactgagcattgtcaaggtgctcaaatctggttgaagagagaagatcttaaccacacgggatctcacaagatcaacaatgctttagcacaagttcttctagctaaaagattaggcaagaagaacgttattgctgaaaccggtgctggtcaacacggtgttgccactgccactgcatgtgctaaatttggcttaacctgtactgtgttcatgggtgcagaagatgttcgtcgccaagctttaaacgtcttcagaatgagaattctcggtgctaaagtaattgctgttactaatggtacaaagactctaagagacgctacttcagaggcattcagattttgggttactaacttgaaaactacttactacgtcgtcggttctgccattggtcctcacccatatccaactttggttagaactttccaaagtgtcattggtaaagaaaccaaggaacagtttgctgccatgaacaatggtaaattacctgacgcagttgttgcatgtgttgggggtggttccaactctacaggtatgttttcaccattcgagcatgatacttccgttaagttattgggtgtggaagccggtggtgatggtgtagatacaaagttccactctgctactctaactgccggtagacctggtgtcttccatggtgtcaagacttatgtcttgcaagatagtgatggtcaagtccatgatactcattctgtttctgctgggttagactacccaggtgtcggtccagaattggcatattggaaatctactggccgtgctcaattcattgcagctactgacgctcaggctctgcttggctttaaattattatctcaattagaaggtattattcccgctttggaatcttctcatgctgtttatggcgcttgcgaattggctaagacgatgaagcctgatcaacatttggttatcaatatttctggtagaggtgataaagatgtccaaagtgtcgctgaagtcttgccgaaattaggtccaaagataggttgggatttgagattcgaagaagacccatctgcctaatgagtaatatctgataaggaacgcttttatttagctttttaactacatagacgaatat

SEQ ID NO: 1161 - DNA, 1258 bp, Saccharomyces cerevisiae
atggactcgattataccggcaggcgtcaagctagatgatttacaagtgatattggctaagaacgagaatgaaaccagggacaaagtgtgtaagcagatcaacgaagcacgcgatgaaattctgccgttgcgattgcagttcaatgaattcatacagataatggcaaacatagaccaagaaggatccaagcaggctgaccgtatggccaaatacctacatatcagagacaagattttgcaactgaacgatagattccagactttgtcttcgcatttagaagcactgcaacctttattcagcactgtaccagaatacttgaagactgcagataacagggacagaagtttccagcttttggaaccgttgagtacttataacaaaaatggcaacgccgtttgctcgacagcaactgttgtaagcaccaaccactctgcggccgcttcgacacccaccacaactgccacccctcatgcaaatcccatcacacatgcgcactcgctttcgaatccaaatagcaccgctacaatgcaacataatcccctggccggcaagagaggtccaaaaagcggtagtactatgggaactccaaccgtacataatagcactgcagctgcaccgattgcggcacctaaaaagccaagaaaaccaagacaaaccaagaaggcaaaggctcaagctcaggctcaagcgcaggctcaagcgcaggtctacgcacagcagtcgactgtccagacgccaataacagcatcgatggcagccgcgctacccaacccaactcctagcatgattaacagcgtttcgcccacaaatgttatgggcacgccgctgaccaacatgatgtctcccatggggaacgcatactcaatgggagctcaaaaccaagggggacaagtatctatgtcacaattcaatggcagcggcaatggatccaatccaaatacaaatacaaactccaataacaccccgctacagtcacaattaaacctaaacaatctaacccctgctaatatcctaaatatgagcatgaataacgatttccagcagcagcagcaacagcaacagcagcagcagcagcctcaaccacagtacaatatgaatatgggcatgaataacatgaataacggggggaaagaactggattctctagacctgaacaatctggaattaggtggtctgaacatggatttcttgtgactggtgcatctatgtatccaagatagtaattatctgtataatcttctattctttataccttatt

SEQ ID NO: 1162 - DNA, 2045 bp, Saccharomyces cerevisiae
actgggcagcacagttgtagtggagaccagaatgactgcgttgcatagtgtgtccaaaacgcccgcgatcaaggaagaggaggaggacggtgatgagcgagacggcagaggagttcccctgggaccaaggaaccatgactaccgtggcaggaaaggtgatgaggaaagcggtgctgacaccgtgacatctcccatcacgtttgaaaagaagaagatagcgcccagggcgtcaacgcattccgaacagagtattttgagcagcatctcattgaaatcgatggtaaatcaacatcgtcagcagcagttgcagcaagagagctcaacaggggcaggcactgggtttgttgacagaaagcagcagatccaatctccggcgatggtgtccatattgaggaagaactctgctgaggagaatgttcgcagcagccacagtagcaagctcggtgaagggcagatagatggtaggaaggcttctgctagtaaggagatcggcaagacgttgccattcacggatgaccaaagatcgaaccctgaactagatcccaccaatagcgtggtggatgttagcaggggcaagaatacaaagagcaaaactgtgttcaatgagttagaagatgatgccgatgacgatgacgaggttcgacaaaagaatctaaccacgcaggcgttacgcaagttgtcgtcgttcaaaatgaatgctagttctaatttgaggttgagtaaagaaaacaaggcgaaagagtcttcatcttcgtccacgtcttcagtgtcgtcatcgtcgacgtcgaaggtggaaaatattgtcgacaagctgactacaacgaattctagctcgatgtcccaactgcggtttggcaacacgaacgtcattattgattcggtgaatcatgcggcgaaaccgccgcatcagcagatgctaaggaaaccctcgctggaatttttaccgcagcctgcttcgagcactaatctgaattttaattccaataaacataaatcaaatgtaagacagatcagtaaccctaaaaaaccgctatacatccccgccgtgctgaggaaagtttcagagacaaacataactaatgacgatctgttgaatgcaacattgtcgtcttactacaagaaggcatctaacctggaacatggctttaatccaagcaagtcgcaatccgctagcgttcagaatgcgaacaacctacggatcatatcttctcaatccagcgtacaatccaacacatcgtcaatcttggaaagctacaaaaacaaaatatcctcgtacttgttcccgaattctattccgaacagcgacagaatcaacttaataccaactatttcaaacagaaactctgccagagtaaacccgcccactaaggaccactggattccggacagtaagaggaattcttgtcgttactgccataagccttttaccctgtgggaaaggaaacatcattgcaggcattgcggggacatcttttgtcaagaccatttgcgccattggctgtacctggactcgcaggcaaattttataatgatcaacgaactaaacaacggtggcataaatggcggtggcactctctgtaaaatatgcgatgactgtctggtcgagtacgagaacctttcaaccacgaaccataacgcaaacacgaacgaggataacataaacgttgaggagggcgaagatgacgataatgacaataggaagaaattacgcaattactacaagaataggcagatgaacgctcttttcagaccaaagaagggcggttcgtcccaagagcatgccacggttgatcgagacacaacaacgcccatccaggtgaagtcgaacgacgaagaagcagataatgagaatacggggggagaacaagaagaaggtaatgatgttttgggcagtgttatcggctctgtgcctgcaaactggaattggagtagtttctgatgaacattttttgcgagacaagcgaagagaggatgtacactattgatgtatgaccattatgtatacaataaacttaatataatatgatataatataatataatata

SEQ ID NO: 1163 - DNA, 814 bp, Saccharomyces cerevisiae
gcaggacagtttgcaatccttgaactacgtctagttgattgaaataggagaaatgcattgggcagcagcggtagcgatattctttattgtggtcacaaagtttctacagtatacaaacaaataccacgagaaatggatctctaaatttgcaccaggaaatgaattatccaaaaaatacttagccaaggtcaaagaacgtcacgaattaaaagaattcaacaactctatctccgcgcaggataattatgccaaatggactaagaacaatagaaaattggactcgttagataaagaaataaataacttgaaggacgaaatacaatcagaaaataaagcctttcaggcccatcttcacaaactcaggttattggcattgacggtgccattttttgtgtttaagattatgtacggcaagacaccagtttacaagttgagttcctcgactagcaccttgttccctacgtttgtaagtggtgtttggtctcaaggctggttatatgttctcttgcatcctctaaggactatttctcagaaatggcatataatggagggcaaatttggtgcttccaagtttgatgatatggctttacagagtgtctctttgggaatctgggtttgggcattgatgaatgtcatcaacggcgtggaatttatcgttaagcaattgtttttgactcccaaaatggaagcacctgcatctgtggagactcaagaggagaaagccttggatgctgtcgacgatgccattattttagattagtgttattacattatgtacgtatatataatatgtttatgtattggagtatacaat

SEQ ID NO: 1164 - DNA, 879 bp, Saccharomyces cerevisiae
aaaaacatattacaatcatgtcgggtgctgctgctgcatctgctgctggttatgacaggcacatcactatcttttcccccgagggtcgtttatatcaagtagaatatgcctttaaagcgactaatcaaactaacataaactcactagcggtcagaggtaaagattgtacagtggtgataagtcagaaaaaggtccctgataaactgttggatccaactactgtttcgtatattttttgtatttcaagaacaattggtatggtagtgaacggaccaataccggatgcaagaaatgcggccctaagagccaaggctgaggctgcagaattccgttataaatatggttatgatatgccatgcgatgtattggctaagagaatggctaacctttcccaaatctatactcaaagagcatatatgagaccattaggtgttatactcacatttgtttcggtagatgaagaattgggtccctccatttacaaaactgaccctgcaggttattacgttggctacaaagctactgcgacaggaccaaaacaacaggagatcacaacaaacttagaaaaccatttcaaaaagagtaaaatcgaccatattaatgaagaatcatgggagaaggtggtagaatttgctattactcatatgattgacgcactgggtaccgaattttcaaagaatgacttggaagtcggtgtcgctacaaaggacaaattctttaccttgagtgctgagaacatcgaagaaaggctagtagcaattgctgaacaagattaacatacttcctgccacaacataatgtgaaatcacacgcgtcaacactcaatatatgtatggacacgtttcatttaggatttattttataggaaaaagtagatca

SEQ ID NO: 1165 - DNA, 2528 bp, Saccharomyces cerevisiae
caaatataaagaatattgaaattgacagtttttgtcgctatcgatttttattatttgctgttttaaatcatggtttacactccatccaagggtccaagaactctttacgataaggtttttgatgcacatgttgtccatcaagatgaaaatggttcctttttgttgtatatcgacagacacttggttcatgaagtcacctctccacaagctttcgaaggcctagaaaatgccggcagaaaggtcagaagagttgattgtactctagctactgtagatcataatattccaactgaatcaagaaagaatttcaaatcactagacacatttatcaagcaaactgattcgcgtttacaagtcaaaactttagagaataatgttaaacagttcggcgttccatatttcggtatgagtgatgccagacaaggtatcgtccacaccatcggtcccgaagaaggtttcactttaccaggtaccactgttgtttgtggtgactctcatacctctactcacggtgcctttggttcgctggcctttggtattggtacttctgaagttgaacacgtcttggccactcaaacaattatccaagctaaatcgaaaaacatgagaattactgttaatggtaagctatcacctggtatcacatctaaagatttgattttgtatattattggtctgataggtactgcaggtggtactggttgcgttattgaattcgcaggtgaagccattgaagctctttctatggaagcacgtatgtccatgtgtaacatggccatcgaagctggtgcaagagcaggtatgattaaaccagacgaaactactttccaatacaccaaaggcagacctttggctccaaaaggtgccgaatgggaaaaggctgttgcctactggaaaactttgaaaacagacgaaggtgccaaatttgaccacgaaatcaacattgaagctgtcgacgtgattccaactattacatggggtacttctcctcaagatgccttaccaattactggttccgtaccagatccaaaaaatgttacagacccaataaagaaatctggtatggaaagagccttagcctatatgggtttggaacctaacacaccgctaaagagcatcaaagtagataaagtctttattggatcttgtaccaatggccgtattgaagatttaagaagtgctgcagctgtagttaggggtcaaaaattggctagtaacatcaaattagctatggttgttccgggatctggtttggtcaaaaaacaagccgaagcagaaggtttggacaagattttccaagaagctggttttgaatggagagaagctggttgttcaatatgtttaggtatgaaccctgatattttggatgcctatgaacgttgtgcttctacttccaacagaaatttcgaaggtcgtcaaggtgccttgtctcgtacacatctaatgtccccagccatggcggctgctgcaggtatcgcaggtcacttcgtagatattagagaattcgaatataaggatcaagaccaaagtagtccaaaggttgaggtcacttccgaagatgaaaaagagcttgaaagtgctgcttacgatcacgctgaacctgtccaacccgaagacgctccccaagatattgccaatgatgaattaaaagatattccagtgaagtcagatgatacacctgctaaacctagctcttccggcatgaagccatttttgactttggaaggtattagcgcaccattagataaggccaatgttgatacagacgctattatcccaaagcaatttttaaagacaattaagagaacgggtttgaaaaaagggttgttttatgaatggcgtttccgtaaagacgatcaaggtaaggatcaagaaaccgattttgtattaaatgttgaaccttggagggaagctgaaatattggttgttactggtgacaatttcggatgtggttcttccagagaacacgcaccatgggctctaaaagactttggtataaaatccatcattgcaccttcttacggtgatattttctacaacaactctttcaagaacggcttattacctattagattggatcaacaaataatcattgacaaattgatccctattgctaataagggtggtaagctctgcgtcgatttaccaaatcaaaaaattttggattccgatggcaatgtgctcgttgatcattttgaaatagaacctttcagaaagcactgcctagttaacggtcttgatgatattggtattacattgcaaaaggaagaatacatttccagatacgaagctttgagaagagagaaatactcattcttggaaggtggatcaaaattattaaaatttgacaacgttccaaaaagaaaagctgttacaactactttcgataaagtccaccaggattggtagacagtgaaaaacaacgtccaaacctggcgtcaataacatgtgtctcagcgacaagcacaccatccttttctaaaaccaaactacttatttattattaatacgtaatctaacgtactcac

SEQ ID NO: 1166 - DNA, 3486 bp, Saccharomyces cerevisiae
caatagtgaaaatctttttttcttctatatctacaaaaactttttttttctatcaacctcgttgataaattttttctttaacaatcgttaataattaattaattggaaaataaccattttttctctcttttatacacacattcaaaagaaagaaaaaaaatataccccagctagttaaagaaaatcattgaaaagaataagaagataagaaagatttaattatcaaacaatatcaatatgactgatacatcatcctcttcatcatcctcttcagcatcttctgtttcagctcatcagccaactcaagaaaagcctgctaagacttacgatgacgctgcatctgaatcttctgacgatgacgatatcgatgctttaatcgaagaactacaatctaatcacggtgtcgacgacgaagacagtgataacgatggtccagttgccgccggtgaagctagaccagttccagaagaatatttacaaactgacccatcttacggtttaacttccgatgaagttttgaaaagaagaaagaagtacggtttgaatcaaatggctgacgaaaaagaatctttagtcgttaagttcgttatgtttttcgtcggtccaattcaattcgttatggaagccgctgctattttggctgccggtttgtccgattgggtcgatttcggtgttatctgtggtttgttaatgttaaacgctggtgttggtttcgttcaagaattccaagctggttctattgtcgatgaattgaaaaagactttggctaacactgctgttgttatcagagacggtcaattggttgaaattccagccaacgaagtcgtcccaggtgatattttgcaattggaagatggtactgttatcccaactgatggtcgtattgtcactgaagactgtttcttgcaaatcgatcaatctgctattactggtgaatctttggctgtcgacaaacattacggtgaccaaactttctcttcttccactgttaagagaggtgaaggtttcatggttgttaccgctaccggtgacaacactttcgttggtagagctgctgctttggttaacaaagccgctggtggtcaaggtcatttcactgaagttttgaacggtattggtattatcttattggttttggtcattgccactttgttgttggtctggactgcttgtttctacagaaccaacggtattgttagaatcttgagatacactctaggtattactattattggtgtcccagtcggtttgccagctgtcgttaccaccactatggccgtcggtgctgcttacttggctaagaaacaagccattgttcaaaagttgtctgctattgaatccttggctggtgtcgaaatcttgtgttccgacaaaaccggtactttgaccaagaacaagttgtccttgcacgaaccatacactgttgaaggtgtttctccagacgacttgatgttgactgcttgtttggctgcttccagaaagaagaagggtttggatgctattgataaggctttcttgaagtctttgaagcaatatccaaaggctaaggacgctttgaccaagtacaaggttttggaattccatccatttgaccctgtctccaagaaggttactgccgttgtcgaatctccagaaggtgaaagaattgtttgtgttaagggtgctccattattcgtcttgaagactgtcgaagaagatcacccaatcccagaagatgtccatgaaaactacgaaaacaaggttgctgaattggcttctagagggttccgtgctttaggtgttgctagaaagagaggtgaaggtcactgggaaatcttgggtgttatgccatgtatggatccaccaagagacgatactgctcaaactgttagcgaagctagacacttgggtctaagagttaagatgttaactggtgatgctgttggtattgctaaggaaacttgtagacaattgggtttgggtaccaacatttacaacgctgaaagattaggtctaggtggcggtggtgacatgccaggttctgaattagctgattttgttgaaaatgccgatggtttcgctgaagttttcccacaacataaatacagagttgttgaaatcttgcaaaacagaggttacttggttgctatgactggtgatggtgttaacgatgctccatctttgaagaaggctgatactggtattgctgtcgaaggtgctactgatgctgccagatctgctgctgatattgttttcttggctcctggtctatctgctattattgatgctttgaagacctccagacaaatttttcacagaatgtactcttacgttgtttaccgtattgctttgtctctacatttggaaatcttcttgggtctatggattgctattttggataactctttggacattgatttgattgttttcatcgctattttcgctgatgttgctactttggctattgcttacgataatgctccttactctccaaagcccgttaaatggaacctaccaagattatggggtatgtctattattttgggcatagttttagctataggttcttggattaccttgactactatgttcttaccaaagggtggtattatccaaaacttcggtgctatgaacggtattatgttcttgcaaatttccttgactgaaaactggttgattttcattaccagagctgctggtccattctggtcttctatcccatcctggcaattggctggtgccgtcttcgctgtcgacatcatcgctaccatgtttaccttattcggttggtggtctgaaaactggactgatattgttactgtcgtccgtgtctggatctggtctatcggtatcttctgtgttttgggtggtttctactacgaaatgtccacttctgaagcctttgacagattgatgaacggtaagccaatgaaggaaaagaagtctaccagaagtgtcgaagacttcatggctgctatgcaaagagtctctactcaacacgaaaaggaaacctaatcctgttgaagtagcatttaatcataatttttgtcacattttaatcaacttgatttttctggtttaatttttctaattttaattttaatttttttatcaatgggaactgatacactaaaaagaattaggagccaacaagaataagccgcttatttcctactagagtttgcttaaaatttcatctcgaattgtcattctaatattttatccacacacacaccttaaaatttttagattaaatggcatcaactcttagcttcacacacacacacacaccgaagctggttgttttatttgatttgatataattggtttctctggatggtactttttctttcttggttatttcctattttaaaatatgaaacgcacacaagtcataattattctaatagagcacaattcacaacacgcacatttcaactttaatatttttttagaaacactttatttagtctaattcttaatttttaatatatataatgcacacac

SEQ ID NO: 1167 - DNA, 2025 bp, Saccharomyces cerevisiae
acttggccatctcaaacttggttcatcctctaactccgatttttgtcacccttccttctagtcttcatcctaaatttagttgcatgtccacaaacctgaacccattcatgaataatacgccttcctcctccccactcaagggttctgaaagtaagagggtatcgaaaaggccaatatctagttcttcgtccgcctcactattatcatctccctccaggcgatcgaggccgtctacagtatatggtgataggtatattccttcccgaacagatatagatttcaattccatcgtttccatcagtagtatggcaagcgttccagcccttaatccatcgagtacggaagatcaagtagaataccaaaaggaaagacaggcacatgaaacttataatactttgctgaagaatgagctttttggcgagatgctaagcaaggatacggtaggctcagagagcagtatagatcgcattaagaatacgagaccatctactagaggcaatgtgcacgcagaaaatacaactagacatggttatgaactggaacgagtatcaactccacctcctgaagctgctggtttagaggaattttcgccacattccacgccagtcactcctcgacgtctttttacatcacagcaagatgaaatcacgagaccctcaagcaactcagttaggggcgccagcctgttgacttatcaacaacgtaaaggtagaagactatctgcggcctctttgttacaatctcaattttttgattccatgtcgccagttaggccggattccaaacagctcctattatcaccggggaagcaatttagacaaatagctaaagttccctatagagttttagatgccccatcattagcagacgatttttactacagcttgatagattggtcaagtactgatgttttggcagttgctcttggaaaatcgatttttttaaccgataataacactggcgacgttgttcacttatgcgacacggaaaacgaatacacaagcttaagctggattggagcaggctctcatctggcagtaggtcaagcaaatggacttgtagaaatttatgacgtaatgaaaagaaaatgtattaggacgttgtcgggacatattgacagagtagcgtgtttatcttggaataatcatgttttgacgtctgggagtagagatcatcgaatactgcatagggatgttaggatgccagatcccttttttgaaactatagaatcgcacactcaggaagtctgtggcctaaagtggaatgtagcggacaacaaacttgcctcaggtggtaacgataacgtcgtccatgtttacgaaggaacgtcgaaatctccaatcttgacgtttgacgaacataaggctgctgttaaggcaatggcctggtctcctcataaacgaggtgtgctagctaccggtggtggtacagcagatagaagactaaaaatctggaacgttaatacgtcaataaagatgagtgatatagatagcggctctcaaatatgtaatatggtatggtcaaagaatactaacgagcttgtgacatcacatggttactcaaaatataacttaaccttgtgggactgtaactctatggatccaattgcaattctgaaaggtcatagtttcagggttctgcatttaacgttatccaatgatggaaccacggtggtttctggggctggagatgaaacattgcgatattggaaactttttgataaaccaaaagcgaaggtacagccaaattcgttaatatttgacgcatttaatcaaatacgttagtaaagggttttcatagtagtaatatcatctcaaaaattctgtaaaaaaaagtgtactagtatatctgatggtgttgttgcgaatgcccagtagttcatatagttctacttacacctcactcatctaacaaggtcggttgattagttcaattgtttcagtgagaagattttaacgataacacttatgtactaaggtaacgtacctaccaagcatacaaaatacgtaacaatataaaaagaga

SEQ ID NO: 1168 - DNA, 1207 bp, Saccharomyces cerevisiae
gtcaattttgtccaattttatttgcaactctacctggaagggcaaacaaaaataaatatgtcaaagatagattcagttttaattatcggtggttctggttttcttggattgcacttaattcagcaattttttgatattaatcctaagccagacatccacatttttgatgttagagatctccctgaaaaactttcaaaacagtttacttttaatgtagacgacataaaatttcataagggtgatttaacatcacctgatgatatggaaaacgcaattaacgaaagtaaagcaaatgttgttgttcattgtgcttctccaatgcatggtcaaaatccagatatttatgacatagtgaatgttaagggaacccgtaacgtgatagatatgtgcaagaaatgtggcgttaatatacttgtatatacttcctctgctggtgttatttttaatgggcaagatgtgcacaatgcagacgaaacctggccaatcccagaagttcctatggatgcgtacaatgagactaaagctatcgccgaagatatggtcttgaaggcgaatgatccaagcagtgatttctatactgttgctcttcgtccagctggtatttttggcccaggtgataggcaattagtacctggtctaagacaggttgcgaaattggggcagtcgaagttccaaattggtgataataacaatctatttgattggacttatgctggaaatgttgctgacgcgcatgtgttagctgcacagaaacttctcgatccaaaaacaagaactgctgtctcgggtgaaacttttttcattaccaatgatacccccacctatttttgggccttggcccgtactgtgtggaaggcagatggtcatattgataaacatgttattgttttgaaaaggccagttgcaatttgtgcaggttatctttcagaatgggtatccaagatgctgggtaaagagccaggtttgactccattcagagtcaagattgtgtgtgcataccgttatcacaacattgctaaggccaaaaagttgctaggctacacaccaagagttggtattgaagaaggaattaacaaaacgttggcctggatggacgaaggtttgtaatggcaatcgttaggagctttttgatccgattatcgaaagatagtatgttgaaatagcatatctgatacgcaccgtatatatttattctgtctttatagat

SEQ ID NO: 1169 - DNA, 74 bp, Saccharomyces cerevisiae; identical to SEQ ID NO: 899

SEQ ID NO: 1170 - DNA, 74 bp, Saccharomyces cerevisiae; identical to SEQ ID NO: 899

SEQ ID NO: 1171 - DNA, 72 bp, Saccharomyces cerevisiae; identical to SEQ ID NO: 236

SEQ ID NO: 1172 - DNA, 73 bp, Saccharomyces cerevisiae; identical to SEQ ID NO: 397

SEQ ID NO: 1173 - DNA, 73 bp, Saccharomyces cerevisiae; identical to SEQ ID NO: 231

SEQ ID NO: 1174 - DNA, 72 bp, Saccharomyces cerevisiae; identical to SEQ ID NO: 230

SEQ ID NO: 1175 - DNA, 72 bp, Saccharomyces cerevisiae; identical to SEQ ID NO: 229

SEQ ID NO: 1176 - DNA, 96 bp, Saccharomyces cerevisiae
atttagtgatgatactgccgattctggcattccaaaaagtgactagcaaaattgcgatgttgtcaacttaaattacaccatctttcggggctgata

SEQ ID NO: 1177 - DNA, 89 bp, Saccharomyces cerevisiae
ttttatgatgaaaatccattgtatcccaatacatattcgactagtcattgacgatgctgtcgtaacttatcaccatctttcgactgatt

SEQ ID NO: 1178 - DNA, 245 bp, Saccharomyces cerevisiae
aacgcaaatttaacagccattcgtaacacgtacagtatctcgtcgaggttgaacccctccggggcgttcttgacccatgaagaatgtggattggtgttgcaatatatttattattggcttggactggagaacaaatttatcgatcttgggtgcaacagtctttctgtcgtctgttttttagcagatctaagggtttaccttcgtgtgcccggatgaggaccgttgcaaggattgataatacaact

SEQ ID NO: 1179 - DNA, 197 bp, Saccharomyces cerevisiae
atggcctcttcgaagatccgtagattttgcatttttgcggtggtttatggattcaaagcgaggcctaaattaacgatcatgtctttgctattatatcagagggcatatcattgaatttccgatttccaaagggaagaaaataaataaagttgtgctatttccatgcatccttttttctttcattcaatgacacatac

SEQ ID NO: 1180 - DNA, 113 bp, Saccharomyces cerevisiae
tcataatgatgatttcacttatacctatatgttttttctggcatctctaatgttaggatgtgaagtttaagtactctccattcaatgaatacaatttttgacaatatctgatt

SEQ ID NO: 1181 - DNA, 268 bp, Saccharomyces cerevisiae
atggctcttcaacacatttcaacatgttcaagtaatttgtgttagtggatgaccatttaggggctgctggcctggttaccgggagtttttcttggatccaagctagcttttccgtctgattatccttaagcttcacaaattacaatttttcccacgcattaagaaataagctcaagatgcctaaaataagttctatcccgccttttttcgctaacaatgactgagtattcccacagtctatagtttgatagtagatgggcggaaattt

SEQ ID NO: 1182 - DNA, 73 bp, Saccharomyces cerevisiae; identical to SEQ ID NO: 78

SEQ ID NO: 1183 - DNA, 72 bp, Saccharomyces cerevisiae; identical to SEQ ID NO: 229

SEQ ID NO: 1184 - DNA, 72 bp, Saccharomyces cerevisiae; identical to SEQ ID NO: 230

SEQ ID NO: 1185 - DNA, 72 bp, Saccharomyces cerevisiae; identical to SEQ ID NO: 230

SEQ ID NO: 1186 - DNA, 74 bp, Saccharomyces cerevisiae; identical to SEQ ID NO: 232

SEQ ID NO: 1187 - DNA, 73 bp, Saccharomyces cerevisiae; identical to SEQ ID NO: 397

SEQ ID NO: 1188 - DNA, 73 bp, Saccharomyces cerevisiae; identical to SEQ ID NO: 397

SEQ ID NO: 1189 - DNA, 74 bp, Saccharomyces cerevisiae; identical to SEQ ID NO: 401

SEQ ID NO: 1190 - DNA, 72 bp, Saccharomyces cerevisiae; identical to SEQ ID NO: 236

SEQ ID NO: 1191 - DNA, 72 bp, Saccharomyces cerevisiae; identical to SEQ ID NO: 236

SEQ ID NO: 1192 - DNA, 74 bp, Saccharomyces cerevisiae; identical to SEQ ID NO: 899

SEQ ID NO: 1193 - DNA, 926 bp, Saccharomyces cerevisiae
tatggggtgtatagttaaaatctctactgatagactttattggtgaggttgtgaacagattgttggcgctttcttccttatcgcctcaatctgaaaggatctagatttgccaatgttatcacactacatcttcctggcattcgttttattgccattcagagtttccgcgttttacttctatggttatggtggagacagaaaatgcttcctgaaggaactatccaaagacacccttttaaaaggttcttacaatttggaagtttacgatgataagttggcagattatgcgcttcccagttataatgactatggcattgtcatagatgtggaagaagtctttgataataatcatagggtagtccaccaacagggctctccttccggtgacttcagctttctagctttggaatctggagaatataagatctgtttacagtctagggtaaataactgggtagggaaaaccaaaacaaagttagaaatcgaatttgaagtcggttttgaagcaatgttggacatgcaaagaaaagaaaccttggaaagtttgcacggaaaagtcagtatattgaattctaagatcgtggatatcaggagagagcaacaactgatgagagaacgtgaagaatcctttagagacatatcagagtctgtgaattctcgcgcaatgtggtggacggtaactcaagttactcttctcattataatttgtgtatggcaaatgaaaagtttacgctcgttttttgttaagcagaaagtattatgaccgtacatatcaaaaaattgaatccttagcaggcatacatgagaatttcgttgtttcaatgatttatttctatttatttacatgcattaccccgacgcttcatagtgtagtcattaaatgagtgtatacatatatatactaacctagtcatcaagatgtttta

SEQ ID NO: 1194 - DNA, 3932 bp, Saccharomyces cerevisiae
tagtcaggttggcacgattcaattgagaaggcttaggttaagaataaacattttttcataaatttgaggaagaaggggcttttctggtaattttcattcaatagaaaggcttaagaaaacgtcaaaaaactcatgcgcctccagtaaaaactaagtgtattaagagaattgtatcacatatatacgacattgaattaaagaaataaaacttgaacaaataaagtttagaaaagtggttctaaaaaaaaaaaactgtgtgcgtaacaaaaaaaataatgtctagacaagacgaaaattctgctttactagcgaataatgaaaataacaaaccatcgtatacgggaaatgagaacggagtctacgataatttcaaattatcaaaaagtcaactttcggatcttcataaccctaaatcaataagatcatttgtcagattatttggatatgagtctaacagcctcttcaaatacttgaaaacagataaaaatgcaggcatttctcttccagaaatatcaaattatcgaaagacaaaccggtataaaaattatggcgataattcacttcctgaaagaataccaaagtcttttttacaattagtatgggctgcttttaatgacaaaacaatgcaattactgacagtcgccgctgttgtttcctttgttttaggtctatacgaactatggatgcaacctccacagtatgatcctgaaggaaataaaattaagcaagttgactggattgaaggggttgctatcatgattgcggtctttgtggtagttctagtgagtgccgctaacgattaccagaaggagttgcaatttgcaaagctaaataaaaagaaggaaaaccgtaaaattatagtcataagaaatgatcaggaaatattaatttccattcaccacgttttagtcggtgatgtcatttcattacaaaccggtgatgttgtccccgctgattgtgttatgatatcagggaagtgtgaggcagatgaatcatccatcactggtgaatctaacacaatacagaaatttccggtggataactcattaagagatttcaaaaaatttaattctatcgatagtcataaccatagcaaaccattagatataggtgacgttaacgaagacggtaacaagattgctgattgtatgttgatttcaggttccagaattctctctggcttgggcaggggtgtcatcacgtccgtgggtataaactcagtttacggtcaaaccatgacttcattaaatgccgaacctgaaagtactccattacagttacatttgagccaattggctgataatatatccgtttacggttgcgtgtctgctataattcttttcttggtccttttcactaggtacttattttacataatacctgaggatggcaggttccatgatctagatcccgctcaaaagggttctaaatttatgaacatttttatcacatctatcacggttattgtggtggctgttccggaaggtttaccattagctgtaactttggccttagcgtttgcaacaacaagaatgacaaaagacggtaatttagtacgggttttaagaagctgtgaaacgatgggatctgctactgcagtgtgctctgataagactggcactttgacagaaaatgtcatgactgtcgttcgtggcttcccgggcaattctaaatttgatgatagtaaatcgttgcccgttagcgaacaaaggaagctgaattctaagaaagtttttgaagaaaattgttcgtcatccttgagaaatgatttattagccaatattgtcctgaattctaccgccttcgaaaacagagattataagaaaaacgataaaaatacaaatggtagtaaaaatatgtcaaaaaatttgagttttttagataagtgtaaatctagattatcgttttttaaaaaaggcaacagggaagatgacgaggatcaattattcaaaaatgtcaacaagggtaggcaagaaccctttattggctctaaaacggaaacagccttactcagtttggcaagattatcattaggattacaaccgggagaattgcaatatttgagagatcaaccgatggaaaagtttaatatcgaaaaagttgttcaaacaattccgtttgaaagttctcgtaaatgggccggcttagtggtaaagtacaaagaaggcaaaaataaaaaaccattttacaggtttttcattaaaggtgcagcagaaattgtttccaagaattgttcgtacaagaggaattcagatgatactttggaagaaatcaatgaggacaataaaaaagaaactgatgatgaaatcaaaaatcttgcgtccgatgctctcagagccataagtgttgcccacaaagatttctgcgaatgtgatagctggccccctgaacagctgcgtgataaagactcaccaaatatagctgctcttgacttgctatttaacagtcaaaagggcttaattctagatggtttacttgggattcaagaccctttacgtgcaggcgttagggagtcagtacaacagtgccaacgtgctggtgtaactgtgcgtatggttactggtgacaatatattaacagcaaaagcaatcgcgaggaattgtgcgattctttctactgatattagttcagaggcttattctgcaatggaaggcactgaattcagaaagttaacgaaaaacgaacgtataagaatcctgccaaatttaagggtcttagcaaggtcttcgcctgaggataaaaggttattagtagaaacattgaaggggatgggagatgttgttgcggtcactggcgatggtacgaacgatgctccagctttaaagctagctgatgttggtttctcaatgggtatttccggtacggaggttgccagagaggcttctgacattattttgatgactgatgatttctcagctattgtcaacgctattaagtggggaagatgtgtttcagtctccataaaaaagttcatacagtttcaattaattgttaatatcaccgcagtgattttaacgttcgtttcatccgttgcatctagtgatgaaacatcagtactgacggcggtccaactgttatggatcaatctaatcatggatactctagcagctttagctttagccactgataaacccgatccaaatatcatggacagaaaacctaggggccgctcaacttctttgatttctgtgtcaacttggaaaatgattctatcacaagctacattgcagttgatagttactttcattttgcatttttacgggccagagttattcttcaagaaacatgaagatgaaataacaagtcaccaacagcagcaactgaatgccatgacattcaacacttttgtttggttgcaattttttaccatgttagtatcgagaaaattagatgaaggtgatggtatatcaaactggagaggcaggatttctgccgccaatttgaatttcttccaagacttgggtagaaactattattttctcacgatcatggcgatcattggcagctgtcaagttttaatcatgttttttggtggcgcaccattttctattgccagacaaaccaaatcaatgtggataaccgcggtactgtgtggtatgttgtctctaatcatgggggtgctagtgagaatctgccccgatgaagtagcagtgaaggtatttccggctgctttcgttcaaagattcaagtacgtatttggactcgagttcctcagaaaaaaccatactggaaaacacgacgatgaagaagcgctgttggaggaatctgatagtccagagtccaccgccttttattaatagacgcgctctatatgtttatacaaatgtaagtgaccaaatgaaaagatgtgtgtaatagttatattttcaaaattgtacactatattatataatcaataaaaagaaactatctgaaatagcatgtcctcctaa

SEQ ID NO: 1195 - DNA, 750 bp, Saccharomyces cerevisiae
atatacgaggttttgagaatatagtctcttcttctgttataaaagaataaatatgggcgaaggtttgctggatttaagatctcagcttggattttacaagttttaccaccacaatcctaagaacgttttgatccattccatatttgtccccacaatcctatttagtggtagctgtatgctccacagagtcaaaatatatcagagtatttcattgactgctgtgctaagcgttttattttccatattttattgtcttctgtatttacccacagggctattagcaggagttctcttgcttttgttaaatcttgcactcatcgatcacagggttgatttaacatttaagcaggaactgggtttgtttactattggttggattttccaatttgttggccatggtgtctttgagaaaaggaggccagcgttaattgacaatctagttcagagcttggtgctggcaccatattttataatgttcgagttccttttcaaattgggtttcatgcctagattaaaggcaactctcgaacatgatcttgaaattaagcaaagaaatttgcggatgcaaagacaataaagagggataatgttgcatttaaagtacatgttcctctgtagcattcacaaaacctgcatgcattaacaagggctagcattataaacttcatcaatgatgttatagtcaaataaataaataattagtgagtacgttagattacgtattaataataaataagtagtttggtttta

SEQ ID NO: 1196 - DNA, 1552 bp, Saccharomyces cerevisiae
cgtagtgtacatagattagcatcgctatggcaaaggataatagtgagaagctgcaggtgcagggagaggagaaaaagtccaagcaaccggttaatttcctgcctcagggtaaatggctgaagccaaatgaaatcgaatatgagtttggtgggactactggtgttattggtatgctgatcgggtttccactgctaatgtactatatgtggatttgtgcggaattttatcacggtaaggttgccctacccaaggctggtgaatcgtggatgcactttatcaagcacctataccagttagtcttggagaacggtatcccagaaaagtatgactggactattttcttaacattttgggtgtttcagatcattttctactatacgttgcccgggatttggacaaaaggtcaaccattgtctcatttgaagggaaaacaattgccttacttttgtaatgccatgtggaccttgtatgtaactaccactttggtcttggttttgcactttaccaatctttttagattgtatgtcattattgaccgttttgggaggatcatgacatgtgccattatttcagggtttgccttctccatcatattgtacttatggactttatttatctcacatgactatcatagaatgacaggaaaccatctatatgatttcttcatgggagctccactaaaccctaggtgggggattttggacttgaagatgtttttcgaggttagattaccttggttcaccctttactttatcactttgggtgcctgtttgaagcagtgggagacttacggctatgtgacaccacaattgggggttgtcatgttagctcattggttgtacgcgaacgcatgtgctaaaggtgaagaattgattgttccaacctgggacatggcttacgaaaagtttggatttatgctgatcttctggaatattgccggtgtcccatacacttactgtcattgtacgttgtatttgtactaccatgacccatctgaatatcactggtctacactgtacaatgtttcgctgtacgttgttctattatgcgcctactacttctttgacacggcaaatgctcagaaaaatgccttcagaaagcaaatgtctggtgacaagacaggtaggaagactttcccatttttgccataccaaattttgaagaatccaaagtatatggttacctccaatggatcgtacctattgattgatggttggtacactttggctagaaaaattcactacactgccgattggactcaatctctcgtttgggccttgtcttgcgggttcaactcggtgttcccatggtttttcccagtattcttccttgttgtcctgattcacagagccttcagagaccaagcaaaatgtaagagaaagtacggaaaagattgggatgagtattgtaaacattgcccttacgtctttattccttatgttttctagttattttctttttctatccacttcattaacttattttacagtttgtatataaaagtattgatgtatttacgcgacaaaagggcttgaaaagattcgattttcta

SEQ ID NO: 1197 - DNA, 3125 bp, Saccharomyces cerevisiae
ctctctccgaaggtgaacagcaaacagtacctcacgtcttttttttgaatagtttttttttttgttgaaacagaaaaaaaactttcttccgtatattacattgtacattatttttattgtattttagtttccaacgttaggatttgagccgtcattaatattattcgtttttgtacactattccagacgatttatttttagtacacttaaaattcctgttgatattgtccactagttctcttttcatattttattttcgcttattctttaggttcttttaagagtctctgttcattttccgttcttactgtttctttgtcctcgatatcttttaagaaagagagaactaagcgctgtaacatttttaagtggacctacgttatgtctacaaaaggtttgaaagaagaaatcgatgatgtaccatcagtagaccctgtcgtttcagaaacagtcaattctgctttagagcagttgcaactagatgatccagaggaaaacgccacctctaatgcatttgcgaataaagtttctcaagattctcaattcgctaatggccctccgtcgcaaatgtttccacatccacaaatgatgggtggaatgggcttcatgccctactctcaaatgatgcaggttcctcataatccttgtccattttttccgccccctgattttaatgatccaacagcaccattgagtagctcgcccttgaatgcaggcggtccaccaatgttattcaagaatgactcacttccatttcaaatgctgtcttcgggtgctgcggtagcaactcaaggtggacaaaatctaaacccattgataaatgacaattcaatgaaggtattgccaatcgcatcggctgatccgttatggactcattcaaacgtaccaggatcagcatctgtagccattgaagaaaccaccgctactctacaagaaagcctaccatctaagggcagggagtctaataataaggctagttcgttcagaagacaaacttttcatgctttatcaccaactgaccttatcaatgcggccaacaatgtaaccttgtcaaaggacttccaatctgacatgcagaatttttctaaggctaagaaaccgtctgtaggagctaacaatactgcaaaaaccagaactcaatccatatcttttgataatactccctcctcaacgtcatttatacccccaaccaatagtgtttctgagaaattatccgatttcaaaatagaaacctcgaaggaggatttgattaataaaactgcaccagctaaaaaagagagtcctacaacttatggtgcagcatatccatatgggggacctttacttcaaccaaatcctattatgccaggccacccacataatatatcctcccctatctatggtattagatcaccttttcctaattcttatgaaatgggcgcgcaatttcaacctttctctccgattttaaatcctacgagtcattcactaaatgcaaattctccaattcctctaacccaatcgccaattcatcttgcaccagttttaaaccctagttcaaattctgttgccttttcagatatgaagaatgatggtggtaagcccaccaccgataacgacaaggcgggtccaaatgttaggatggatttaataaatcctaatcttgggccatcaatgcaacctttccacatattacctccccagcaaaacaccccccctcctccctggctttatagcactccacctcccttcaacgcaatggttccgcctcatttgttggctcaaaatcatatgccgttaatgaatagcgccaataataaacatcatggtcgtaataacaatagcatgtcaagtcataatgacaatgacaacattggtaattctaattacaacaataaagacacaggtcgttctaacgttggtaaaatgaaaaatatgaaaaacagttatcatggctactataataacaataataataataataataataacaataataataataacagtaatgctaccaacagcaacagcgcggaaaaacaacgtaaaattgaggagtcgtcgagatttgcggacgcagttttagaccaatatatcggaagtattcactcattgtgtaaagaccaacatggttgtcgttttctgcaaaagcagttggatattctcggcagtaaggcggcggacgcaatttttgaagaaactaaggattatacggttgaattgatgactgattcattcggtaattatttgatccagaagctattggaagaggttaccacagaacaaagaatcgtactcacaaaaatatcttcccctcattttgtcgaaatttccttaaaccctcatggtactagggcattacaaaaactcattgaatgcatcaaaacagatgaagaagcacagattgttgttgattctttacgcccttatactgtccagttgagtaaggatttaaatggtaatcatgttattcaaaaatgtttgcaaaggttgaagcctgaaaacttccagtttatctttgacgcaatctctgatagctgtattgatattgctactcatagacacgggtgttgcgttttgcaacgttgtctagatcatgggactacagaacaatgtgacaatctgtgtgataagttgctagcccttgttgataaattaactttggatccatttggcaactatgtggtgcaatatataattaccaaagaggctgagaagaacaaatatgattatacgcataaaattgtccacctgttgaaaccaagagccatcgaactttctatccataaatttggatcaaatgtgattgaaaaaatcttgaagacagctattgtttcggagccaatgattctggaaattttaaataatggtggcgagacgggtattcaatcattgttgaatgatagctacggaaattacgttttacagacagcattagacatttctcataagcaaaatgactatctctataaaagactatcagagattgtggcgcctttactggtgggccccataagaaatacacctcatggtaaaagaatcatcggaatgttacatttagattcatagttgatacatatatcctcagtttagctttttttacgttagcctcatataatatcttttgtacaatactaaaatacatc

SEQ ID NO: 1198 - DNA, 3246 bp, Saccharomyces cerevisiae
atgagctccattcacgaggttgtggctcttattgaagagctgtactctcctcatccgaaacatgatgttaatcagattcaacagagtttacagtcaatccagaaatcagagcaaggcttccacctagctaatgagcttttatctgatgacaagtactctgcgaatgtcaagtactttggtgcactgactttaactgtgcaactaaatacgcggggtgaaaacgattatgaaaccctatggaatgttttcaggtcaaatttattgtacttgacgaaattcagtacattgtacgtttccaatcctaatatgtacgggcaatctctaatcataattaaaaagttaatgtcaaacttgtcattgatcttcactaaaatcaacgatccgcagcttaataacgctggaaatgaaaatatgattaagcaatggaacaatcccataaatacgtttattcaacttatgtcggttcaaaatcaaaacattaatgcagaccaactgttgcttgactcaatcaactgctccttaacatacgagcaactgtctcaatttgttagcctatctcagaaacataatgaactggcattgacgtttacagaagttattgtggaagatttgacgaagttccaaacaaagaggcattcaatgtctcaaatccacgaagtagtccatgagcatttatatatttcaactatggctttgatcaacttgaacttaactgcacaagctgtcttcaatcctaccgtatttgattgtattactgcttggattaattatatctcattaaccagaagcgtatcttcaagtggtagaatggatttgtcggaaatttttcaaaacctgattgacttgatgtatcagtctacagaaggatcggacggttatgagaatgcggaaaagatcctaacaatatttggtaatgtttttgctaatgatccattattaatgagttacgatttgagacaacaaatcgagtgtattttcttaggtgtagtaaggcctgattctggcataaccgacatatctaacaaaaattcttggatgctacaatatatgaattatttagttaccaatgattttttttccgaattgaaggaattggccatttgtattgtggatttcttgcaaattaacacgttaagtgtttgtaataaattatttactaacattcaagcagctgataatggtcaagttcaagatgaatatattcaggaatacatcaaagtccttttgcaaatgaccaatttccctttaactcctgtcttacaagagttcttttctgttagaatggttgatttttggttggatttatcggatgcttacactaatttggctagcgaaactttgaggccaaattctattgagctgtctacacaaatttttcagcagttgatcaatatttatttacccaaaatttctttgagtgtgaaacaaagaataattgaagaagagggtgagagcacttctgtgaacgaatttgaagattttagaaacgctgtcagtgaccttgctcaatctctctggtctattttgggaaacgataatttaacaaatgtgctaattgatggtatgggccaaatgcctgctgcgagtgatgagactctcatcatcaaggatactgatgttttgtttcgaattgaaacgatgtgttttgttttgaatactatattggttgatatgactctatcagaaagcccatggattaaaaatatcgttgatgccaacaaattcttcaaccaaaatgtcatatccgtcttccaaactggtttccaaactagtgccagtacaaaagtcagtcaaattttgaaacttgacttcgtaagaacaagtacaactttaatcggcactttggctggttattttaaacaggaaccttttcaattaaacccatacgtggaagctttatttcaaggtttgcacacttgcaccaattttactagtaaaaacgaacaagaaaaaatttcgaacgataaacttgaagttatggttatcaagactgtttcaacattatgtgagacatgccgtgaggagttgactccatatttgatgcattttataagctttttaaacacagtcattatgccagactccaatgtttcacatttcactagaactaaattggttagatctataggttatgtcgttcaatgtcaagtctccaacggtccagaggagcaagctaaatatattttacaattgacgaacctattgagcggctcaatagagcattgtttggcttcatcggtacagttacaagaacaacaagattatattaattgtctattatactgtatatctgagctagcaacaagtttgatccaacctactgaaatcatcgaaaatgatgcattactacaaaggttatctgagtttcaaagtttctggtccagcgatcccttacaaatccgatcgaaaattatgtgcaccattgataaggtcttggataattcaatatattgtaaaaactccgcctttgtggagatcggttgtttgattgttggtaaaggattaaatctgcccgacggggaaccgtacttcctcaagtacaatatgtctgaagttatgaattttgttttgcggcatgtccccaactgtgagcttgctacttgcttgccttattttgtttatttattagaaaagcttatttcagagttcaggaaggaactaacaccacaagaatttgatttcatgtttgaaaagatccttctagtctattatgatgcatatattatcaatgatccggaccttttacaaatgacaataggttttgttaataacgttttggacgtgaagccaggcttagctattggcagtaaacattggacatcatttattttacctcaatttttaaaattaataccttcaagagaaaagttcacaattgttgcggtggcaaaattttggactaagttgatcaataataagaaatacaaccaagaagaactcacaactgttaggcaacaagtttcctctataggaggagaccttgtgtaccaaattatgtatggcttattccacacacaaaggtccgatctgaatagttacacagatctgctaagagctttggtagccaagtttccaattgaagcaagagagtggctcgttgctgttttgccccaaatatgtaacaatcctgcaggtcatgaaaaatttattaataaattacttattacgagaggaagcagagcagctggaaatgttattttgcagtggtggttggattgtaccacacttccaaattaccaaggatga

SEQ ID NO: 1199 - DNA, 1612 bp, Saccharomyces cerevisiae
atagtctcaagatacaactgagaagaagcacaattatgtccgatagattcgttatttgggctccctcgatgcacaatgaacctgccgcaaagtgtgggtattgtcacggtaataaggggggcaacatggatcagttgttcgcattggattcgtgggctcatcgttatatgaacaaaatggacgttgtaaagattgaaaactgcacaattggctctttcgtggaacatatggatgtagccacgtatgatcgcatgtgtaatatgggatttagaaggtctggtaagtttctttataaagtggacccgttgaggaattgttgtaggttatacaccattcgaactgcccctcaagaattgaatatgacaaaggaattgaaaaaatgcatcagccgctttgctactagaataacaagtgaggactactgcccagccgctgttgcaagcagtgattttgtgggcaaaattgttaatgcagagatgaattctaaaacattctatacccgatttgagcctgcactttatagtgaagaaaagtatcacttatttgtcaaatatcaggaaaaagtgcatcaagactacaataattcgccgaagtcctttaagcgattcctatgtgatacgccctttggccctgaagcggtgttggggacacaagaatcatgggagcagttaaacaattggcagcgaatgaagccaggcgagaaactgaagcatatgggtcctgtgcacgaatgctactactatgagggtaaattaattgccatcactgtgtcagatatcttgcccagtggtatatcttcggtatattttatttgggatccagactacagtaaatggtccctagggaagctcagtgctttgcgcgatcttgccatcattcaaaggacaaatctgcaatactattacctggggtactatattgaggactgtccgaagatgaattataaagcaaactatggtgcggaagtactggatgtgtgtcacagtaaatatatcccattgaaacccattcaggatatgatttctaggggcaaactctttgtcataggtgaagaagagacgaaagttactaaggagctctacctcgttgactctgaaaccggaagaggggagggatttcccactgataatgttgtcaagtacaagaatattgctgaggaaatatacggtgtgggagggtgtgcgtttaaatctgcaaatgaatctgcattggaattgaaagaactttacggtataccgtacgaagaggaagatttagataccatctaccatttgaaagaacacaatggccatgctccaaatggtattcctaatgtggtgccgggattactcccgctatgggaattgctggacattatgcaatctggcaagatcactgacctggagggaagactatttctcttcgaaatcgaaacggaggggattcgaccattaattaacttttatagcgaacctccgaatgtcaagaaacgtatttgtgacgtgatacggttatttggcttcgaaacttgtatgaaagccgtcattttatatagtgagcaaatgtgagccttcaacacactattctaataacaatcctaatgtataacattttttagcattcaaacattctc

SEQ ID NO: 1200 - DNA, 1007 bp, Saccharomyces cerevisiae
cgttaatccgaatctgtaaattggtgaattggtatttagaagcgaccattagctaaaagagagagaaaactatgtcgcaagagtttgtggaagactattcacgtacagggtcctcagacgacgaggatagtggagcttatgacgagtggattccatcgttctgttccagatttggtcacgagtacttctgccaagtcccgacagagtttatcgaggatgatttcaatatgacctcgttatcccaagaggtaccccactaccggaaagctctggatttgatattggatttggaggctatgagtgatgaagaagaggacgaagacgacgtggtggaagaagacgaagtggatcaagagatgcagagtaatgacggtcatgatgaaggcaaaaggagaaacaagtcgccagtggtgaacaagagtattatcgagcacgcagcagaacagttatacggattgatacatgcaagatttattctgaccaagccaggcctgcaagcaatggctgaaaaattcgaccacaaggaatttggaacgtgcccccgttactattgtaatggcatgcagttgctgccttgtgggttgagcgatacagttgggaaacacaccgtaaggttgtactgtcccagttgtcaggacttgtatcttccccaatcatctagattcctgtgcttagaaggtgcattttgggggacaagcttccctggtgtgttcttgaaacatttcaaagaattggaagagtatgtggaaaggaaaagtaaagagtcctacgagttgaaagtttttgggttcaggataaatgatgaggcagtatctggtcctagaatgaagtggttgagacaatatccatccacggaggaggactgggaagaatttgccaaatgcgagttcgagacaccggcggtttaacccttgatttattttcctctttgccctaccatatacatatgtactttacctatttacattgtttcagtttttatatcaccactattattattattacta

SEQ ID NO: 1201 - DNA, 2387 bp, Saccharomyces cerevisiae
atgctacttcattttgacattgtaattcaattactatcaagtcatacccttaaatcgcaccaagtagagccccccatggattttgaaacgtcgttcgaagaatttgtcgaagataaacgattcattgctctagaggtatctgataatgatgacgattgtgacactgatttgactgctgacacagctgacgagctggaaagctctgctatcttaaagatgagggagtctgatgcatctttaaatgttaccaccggcaataatacatcaaggaaaacgacttccaattccaaaaaacgatggtctctattatccaatcattctgctgtttcatcatctaaatctaagaaaagatggtctgtactttcttcaagctttaccagtgaatctcataaggacagggaatcgaggaacgttttgcaacaaaaaagaaaatccttgcagagttattcaagcttagatacggtagcatctaatagctctatctctgcttcttcttctttgaaaagatcgtccactggtctttccctcagacaattgtttaccaagataggcataaacgatgatatatcacaacctgggatcgggattccgcaaggtaaggaaaatctgcctccaactatgggcaaaaaaaattcatcaattgcttccactagttcggaaaacagacttaggacaccattgaagccgcttgttaatcattctaaaaggcccacttcacaaccacaacagcaacaaccactatataatgcatcattgtcctcgagaagatcgtcgatttcttccactgtctcttcttccagctcgtctaaatggagattctggaagagaaataagaaccagacacctgcattgttgcaaccagaccaccattctttaaaaacctttcctgcagtaaaccgtcgtgattccatgacgcccgttgaaccaagaaatatggtaaaacataagacatccttttcagatttccataagactatcttcagttcaaatacgtattctgaaagcagcgatacaatatcttccatggaaattactttgaaaaacaaagcttcttcctcaagtctatctttgaacgtgttgaagaaaaggaattcgcaatcaagtttgaagcacaaaagttcacatgcatccttacaaaaattcaaaagaaacaaaggaaagtcctccatgatagcaccatcgacagcaactaatagcagcaatgatgactcttgtagctacagttccaaaaattctacgttgagtcaccgaatatcgttacctgtaccggaccaagtttcccgtgataaaattcagaacaaattaagatattcgacctcattactctcattaaattctaaatcatctttaccgatgaacaaaaatgatcatgatgagacacttctaagacagattttactaaattgtgatataaagagaattttaaaccccgcaaaaggagatgtattgcctttaatcaacgatgtaaaccatttgtcatcaatacaattaacatcaaatgtttggcaaattggtgaagtaatctgtaaaaaagtttctctcggtactattgatgacattacatgggatagaaagttcttatctttgcaggaactggaaaaactcaaaatcatgcaacaaaaatttgatggcataccgcaactattgaaaagttttgttgttaaagaggcaaatggggggttgtatttgtacttactattcaaagatcacggtaccccaatttcgttaatctcactgaaaaactggaagcagattctaaagattttttggtcttgtgctggtataattcatgggttggaaaaaaatttgaaatttgaacatcgtaatcttactttggataatattttgatagatggtaatgggaatataacaattattgattttaaatgcagtagattgcaaactcctcaagatgatgttttatatctacggctagatcatccactcttttttctaaatgggaaagacaagagtaaaataaacgaataccagtatcaatttgagtttgaaatctatcaaagtatgcggatcttgttgaacatggacgcgtcagcttttgagcccatgacaaatttgtattggttatattacctgtcacgcgttttactaaagtttggtgacaggaagcttggtaagaatgatgcaaacagggataaaatggcaagggtgataaaccatttggaaatgaacttggcagttcataaaagaggggggcagttattcaaaagattggagacggaggacattaagaatactggagatttactaaaactttataaataaaacaaataggaatgttgacatttatatttcattttctttctattgtatactccaatacataaacatattatatatacgtacataatgtaataacactaatctaa

SEQ ID NO: 1202 - DNA, 2296 bp, Saccharomyces cerevisiae
ccgcaatcgcattcacagccgtaaatcctaactaccattcgtcattatcacagctgccatgggatccgaccggtcgtgtgttttgtctgtgtttcagaccatcctcaagctcgtcatcttcgtggcgatttttggggctgccatatcatcacgtttgtttgcagtcatcaaatttgagtctattatccatgaattcgacccctggttcaattatagggctaccaaatatctcgtcaacaattcgttttacaagtttttgaactggtttgacgaccgtacctggtaccccctcggaagggttactggagggactttatatcctggtttgatgacgactagtgcgttcatctggcacgccctgcgcaactggttgggcttgcccattgacatcagaaacgtttgtgtgctatttgcgccactattttctggggtcaccgcctgggcgacttacgaatttacgaaagagattaaagatgccagcgctgggcttttggctgctggttttatagccattgtccccggttatatatctagatcagtggcggggtcctacgataatgaggccattgccattacactattaatggtcactttcatgttttggattaaggcccaaaagactggctctatcatgcacgcaacgtgtgcagctttattctacttctacatggtgtcggcttggggtggatacgtgttcatcaccaacttgatcccactccatgtctttttgctgattttgatgggcagatattcgtccaaactgtattctgcctacaccacttggtacgctattggaactgttgcatccatgcagatcccatttgtcggtttcctacctatcaggtctaacgaccacatggccgcattgggtgttttcggtttgattcagattgtcgccttcggtgacttcgtgaagggccaaatcagcacagctaagtttaaagtcatcatgatggtttctctgtttttgatcttggtccttggtgtggtcggactttctgccttgacctatatggggttgattgccccttggactggtagattttattcgttatgggataccaactacgcaaagatccacattcctatcattgcctccgtttccgaacatcaacccgtttcgtggcccgctttcttctttgatacccactttttgatctggctattccccgccggtgtattcctactattcctcgacttgaaagacgagcacgtttttgtcatcgcttactccgttctgtgttcgtactttgccggtgttatggttagattgatgttgactttgacaccagtcatctgtgtgtccgccgccgtcgcattgtccaagatatttgacatctacctggatttcaagacaagtgaccgcaaatacgccatcaaacctgcggcactactggccaaattgattgtttccggatcattcatcttttatttgtatcttttcgtcttccattctacttgggtaacaagaactgcatactcttctccttctgttgttttgccatcacaaaccccagatggtaaattggcgttgatcgacgacttcagggaagcgtactattggttaagaatgaactctgatgaggacagtaaggttgcagcgtggtgggattacggttaccaaattggtggcatggcagacagaaccactttagtcgataacaacacgtggaacaatactcacatcgccatcgttggtaaagccatggcttcccctgaagagaaatcttacgaaattctaaaagagcatgatgtcgattatgtcttggtcatctttggtggtctaattgggtttggtggtgatgacatcaacaaattcttgtggatgatcagaattagcgagggaatctggccagaagagataaaagagcgtgatttctataccgcagagggagaatacagagtagatgcaagggcttctgagaccatgaggaactcgctactttacaagatgtcctacaaagatttcccacaattattcaatggtggccaagccactgacagagtgcgtcaacaaatgatcacaccattagacgtcccaccattagactacttcgacgaagtttttacttccgaaaactggatggttagaatatatcaattgaagaaggatgatgcccaaggtagaactttgagggacgttggtgagttaaccaggtcttctacgaaaaccagaaggtccataaagagacctgaattaggcttgagagtctaaattggccacacattaaaggaaatgactaagataaaatatacatatataaaaagataaacaaataagtataagtttggtttc

SEQ ID NO: 1203 - DNA, 1255 bp, Saccharomyces cerevisiae
ttagtttctcttcactaattccggagaacaaaaacatatcatacgattgtgtgagattcaacaaaaatcgatcagaaattttttttgaacagaatagtcatgactactgaaaaaaccgttgtttttgtttctggtgctactggtttcattgctctacacgtagtggacgatttattaaaaactggttacaaggtcatcggttcgggtaggtcccaagaaaagaatgatggattgctgaaaaaatttaagagcaatcccaacctttcaatggagattgtcgaagacattgctgctccaaacgcttttgacaaagtttttcaaaagcacggcaaagagatcaaggttgtcttgcacatagcttctccggttcacttcaacaccactgatttcgaaaaggatctgctaattcctgctgtgaatggtaccaagtccattctagaagcaatcaaaaattatgccgcagacacagtcgaaaaagtcgttattacttcttctgttgctgcccttgcatctcccggagatatgaaggacactagtttcgttgtcaatgaggaaagttggaacaaagatacttgggaaagttgtcaagctaacgcggtttccgcatactgtggttccaagaaatttgctgaaaaaactgcttgggattttctcgaggaaaaccaatcaagcatcaaatttacgctatcaaccatcaacccaggatttgtttttggccctcagctatttgccgactctcttagaaatggaataaatagctcttcagccattattgccaatttggttagttataaattaggcgacaatttttataattacagtggtccttttattgacgttcgcgatgtttcaaaagctcatttacttgcatttgagaaacccgaatgcgctggccaaagactattcttatgtgaagatatgttttgctctcaagaagcgctggatatcttgaatgaggaatttccacagttaaaaggcaagatagcaactggcgaacctggtagcggctcaacctttttgacaaaaaactgctgcaagtgcgacaaccgcaaaaccaaaaatttattaggattccaatttaataagttcagagattgcattgtcgatactgcctcgcaattactagaagttcaaagtaaaagctaaaattaagctttcgagaaaaactttcttttaacccctctaatctaaatataaacatatagcttatagaaatgaatgaatattttaaatagttacggatacaaagagttca

SEQ ID NO: 1204 - DNA, 1184 bp, Saccharomyces cerevisiae
cagtccgcataagagcattcatcatggatagtaaggaagtactggtacatgttaagaatctagaaaagaacaaaagtaatgatgctgcagttctagaaatcttacatgtcttggataaagaattcgtccccactgaaaagttactgagagaaacaaaagttggtgtggaagtcaacaagtttaaaaaatccactaatgtagagatcagcaaactcgtgaagaaaatgattagctcttggaaagacgcaattaataaaaataagcgttccaggcaagcacagcagcatcatcaagatcatgcgccaggcaatgcagaggacaagacaactgtaggtgagtccgtgaatggtgttcaacagccggcctcctcccagtcagatgccatgaaacaagacaagtacgtcagcactaaaccaagaaatagtaagaacgatggtgtggatacagctatataccaccacaaattacgtgatcaggtactaaaagcactctacgacgttttggccaaggaaagtgagcatccacctcaatctattttgcatactgcaaaggccatagaaagtgaaatgaataaagttaacaactgtgacaccaacgaagccgcttacaaagccaggtatcgtataatttattcaaacgtcatatcaaagaataacccagatctcaaacataaaattgccaacggtgatataacacctgaattcttagctacatgcgatgccaaggatctggcaccagcgcccttaaagcaaaagatagaagaaattgccaagcaaaacttatacaacgcacagggtgccaccatagaaaggtcagtcaccgatagatttacatgtggtaaatgtaaagagaagaaggtatcttactatcaattgcaaacaagatctgcggatgaaccattgaccactttctgtacatgtgaagcatgtggtaacagatggaaattctcttagaatagaaaaagatgagagtagccacggacagagcaaaggaaacaataggaggaagggacagaaaagcctgttctgactctattcgtagtagtatttgacagccggaatccaggaaaagaaaaagccaaacatacaaccatatccaatttgttgaaatggcatattcatatacgatgtacatatatacatatactgctggtgttaattttttttgtcctgtctcacgtaaaa

SEQ ID NO: 1205 - DNA, 670 bp, Saccharomyces cerevisiae
gtcgcaaaaagaggttaaacaaacgagtcagaagccagctctttcaaacaatgggtattattgaagaaaaggctctttttgttacgtgtggggcaacggtgccatttccaaagctcgtctcatgtgtgctaagcgacgaattctgccaagaattgattcaatatggattcgtacgtctaatcattcagtttgggagaaactacagttctgaatttgagcatttagtgcaagaacgcgggggccaaagagaaagccaaaaaattccaattgaccagtttggctgtggcgacaccgcaagacagtatgtcctgatgaacgggaaattaaaggtgatcgggtttgacttttcgaccaagatgcaaagtattatacgtgattattcagatttggtcatatcacacgctggaacgggctctatactagattctctacggttgaataaaccgttgatagtttgcgtaaacgattctttgatggataaccaccagcagcagatagcagacaagtttgtagagttgggctacgtatggtcttgtgcacccactgaaacaggtttgatagctggtttacgtgcatctcaaacagagaaactcaaaccattcccagtttctcataacccgtcatttgagcgattgctagttgaaactatatacagctagttagtaagatt

SEQ ID NO: 1206 - DNA, 822 bp, Saccharomyces cerevisiae
atggctgcgcagaatgcctttgaacaaaaaaagagggcaattttgaatgagatagactcaacccaaccagatttgtcaccaaaaggcactatagatgaactatgccttccaataattgatcttatcaacgcaagcgctgatatggtgacaacttcatcgtgttccggtagagtcagtgtattcttggaaggtactaagtcatataacggggaggtcaagataggtggtaagggacaaggcggtaaatggctttacgtcactcatgatcgtgagaaagttattggctggttagatgagttgaaatcaaaaagtgagttttcttttgaactatctggcaaggagataccaacagagaaagtaacggggagtatcagatatatactttataagtatgagcctttcatattgcacgttaaatgcagagactttcaagcagcatccaagttatacaacacagccatgtcttgtggtttcagagaaagtgggattggttcgaacaatctggtcgcaatcagaataaatatcaagctggacgtaccgctcggttatttagatgagacttcaggcactttgaaattttttgtaactccagaatacgtaagcgttctggattctttatcgttaagcaaattcgatgagaataccaggaaaatgcaagcactatatgatagaattgaaaaagaactcataaattgtgcgccggatgtaaattctaaggtcaatataacgccaatcgaaacaaaggaagagaggagagaacgaaagaaaagagaaggtatggagagacaacgtcaacttaagagcccacaaaatgtgctataa

SEQ ID NO: 1207 - DNA, 1852 bp, Saccharomyces cerevisiae
ccgtttatattttgtattacgtagaatagaacatcatagtaatagatagttgtggtgatcatattataaacagcactaaaacattacaacaaagatgccaacttctggaactactattgaattgattgacgaccaatttccaaaggatgactctgccagcagtggcattgtcgacgaagtcgacttaacggaagctaatattttggctactggtttgaataagaaagcaccaagaattgtcaacggttttggttctttaatgggctccaaggaaatggtttccgtggaattcgacaagaagggaaacgaaaagaagtccaatttggatcgtctgctagaaaaggacaaccaagaaaaagaagaagctaaaactaaaattcacatctccgaacaaccatggactttgaataactggcaccaacatttgaactggttgaacatggttcttgtttgtggtatgccaatgattggttggtactttgctctctctggtaaagtgcctttgcatttaaacgttttccttttctccgttttctactacgctgtcggtggtgtttctattactgccggttaccatagattatggtctcacagatcttactccgctcactggccattgagattattctacgctatcttcggttgtgcttccgttgaagggtccgctaaatggtggggccactctcacagaattcaccatcgttacactgataccttgagagatccttatgacgctcgtagaggtctatggtactcccacatgggatggatgcttttgaagccaaatccaaaatacaaggctagagctgatattaccgatatgactgatgattggaccattagattccaacacagacactacatcttgttgatgttgttaaccgctttcgtcattccaactcttatctgtggttactttttcaacgactatatgggtggtttgatctatgccggttttattcgtgtctttgtcattcaacaagctaccttttgcattaactccttggctcattacatcggtacccaaccattcgatgacagaagaacccctcgtgacaactggattactgccattgttactttcggtgaaggttaccataacttccaccacgaattcccaactgattacagaaacgctattaagtggtaccaatacgacccaactaaggttatcatctatttgacttctttagttggtctagcatacgacttgaagaaattctctcaaaatgctattgaagaagccttgattcaacaagaacaaaagaagatcaataaaaagaaggctaagattaactggggtccagttttgactgatttgccaatgtgggacaaacaaaccttcttggctaagtctaaggaaaacaagggtttggttatcatttctggtattgttcacgacgtatctggttatatctctgaacatccaggtggtgaaactttaattaaaactgcattaggtaaggacgctaccaaggctttcagtggtggtgtctaccgtcactcaaatgccgctcaaaatgtcttggctgatatgagagtggctgttatcaaggaaagtaagaactctgctattagaatggctagtaagagaggtgaaatctacgaaactggtaagttcttttaagtatcacattacaataacaaaactgcaactaccataaaaaaaaattgaaaaatcataaattaaaaaaaaaaaaatcaattgaatttttttttttcatgattacgttttgacatttttcctttttttttctcttattacgatttaccttttttatttatttttttcattttagtattttattcttcgttatttatgtatagaaattttcattttcatttagattca

SEQ ID NO: 1208 - DNA, 800 bp, Saccharomyces cerevisiae
acgaagatcgaattccaaagattatttttaggcagacagagactaaaagataaagcgtcatgtccacaccagctagaagaaggttgatgagagattttaaacgtatgaaggaagatgccccaccgggtgtatctgcttcaccattacctgataacgtcatggtatggaacgccatgattatcgggccagccgatactccatatgaagacggaacttttaggttattgttggagtttgatgaagaatatcccaataagccaccgcatgtcaaatttttgagtgaaatgtttcatcccaatgtctatgcaaatggtgaaatttgtttggatattttgcagaacagatggactccaacatatgatgtcgcatccatattgacatccattcaaagtttattcaacgatccaaatccagcttcgccagcaaacgttgaagctgcaacattattcaaagatcataaatcacagtacgtcaaaagagttaaggagacggtagagaaatcttgggaggatgatatggacgatatggacgatgatgatgatgatgatgacgacgacgacgacgacgaagcagactgagaaaaatcaaaagaatcttaatgatgaatgccgagccgatattatgaattcgattacctttttgttcaatcaaatatagggcttcatcgtgagtttctttctctatcgatccgtttgctttctattcctccatcttctactttataccgtaaagaaaatttaataatgatagaaacattgcatataaataatatactaaaaagaaacactgctctaccataa

SEQ ID NO: 1209 - DNA, 4007 bp, Saccharomyces cerevisiae
ctagtgggctgtcgcatatggttggttttaggtggcgaaagtttcgccgcgatagcaatcatgtcctcgaccttaatctcaatggaatgggtcatgctcggtaagtgagtctcgctgtatataagtatatatgtaatcgcctagttcgatagatacaaggaggtcttgagtatgtagataaacgaaaagaagataacaaaaggaaaatctcagcctctccccttcctcttagacaatgtcgcaaagaaaattcgccggcttgagagataacttcaatctcttgggtgaaaagaacaaaatattggtggctaatagaggagaaattccaatcagaatttttcgtaccgctcatgaactgtctatgcagacggtagctatatattctcatgaagatcgtctttcaacgcacaaacaaaaggctgacgaagcatacgtcataggtgaagtaggccaatatacccccgtcggcgcttatttggccattgacgaaatcatttccattgcccaaaaacaccaggtagatttcatccatccaggttatgggttcttgtctgaaaattcggaatttgccgacaaagtagtgaaggccggtatcacttggattggccctccagctgaagttattgactccgtgggtgataaggtctcagctagaaacctggcagcaaaagctaatgtgcccaccgttcctggtacaccaggtcctatagaaactgtagaggaagcacttgacttcgtcaatgaatacggctacccggtgatcattaaggccgcctttggtggtggtggtagaggtatgagagtcgttagagaaggtgacgacgtggcagatgcctttcaacgtgctacctccgaagcccgtactgccttcggtaatggtacctgctttgtggaaagattcttggacaagccaaagcatattgaagttcaattgttggccgataaccacggaaacgtggttcatcttttcgaaagagactgttccgtgcagagaagacaccaaaaggttgtcgaagtggccccagcaaagactttaccccgtgaagtccgtgacgccattttgacagatgcagttaaattggccaaagagtgtggctacagaaatgcgggtactgctgaattcttggttgataaccaaaatagacactatttcattgaaattaatccaagaatccaagtggaacataccatcacagaagaaattaccggtatagatattgtggcggctcagatccaaattgcggcaggtgcctctctaccccagctgggcctattccaggacaaaattacgactcgtggctttgccattcagtgccgtattaccacggaagaccctgctaagaacttccaaccagataccggtagaatagaagtgtaccgttctgcaggtggtaatggtgttagactggatggtggtaacgcctatgcaggaacaataatctcacctcattacgactcaatgctggtcaaatgctcatgctccggttccacctacgaaatcgttcgtagaaaaatgattcgtgcattaatcgagttcagaattagaggtgtcaagaccaacattcccttcctattgactcttttgaccaatccagtatttattgagggtacatactggacgacttttattgacgacaccccacaactgttccaaatggtttcatcacaaaacagagcccaaaaacttttacattacctcgccgacgtggcagtcaatggttcatctatcaagggtcaaattggcttgccaaaattaaaatcaaatccaagtgtcccccatttgcacgatgctcagggcaatgtcatcaacgttacaaagtctgcaccaccatccggatggaggcaagtgctactagaaaaggggccagctgaatttgccagacaagttagacagttcaatggtactttattgatggacaccacctggagagacgctcatcaatctctacttgcaacaagagtcagaacccacgatttggctacaatcgctccaacaaccgcacatgcccttgcaggtcgtttcgccttagaatgttggggtggtgccacattcgatgttgcaatgagatttttgcatgaggatccatgggaacgtttgagaaaattaagatctctggtgcctaatattccattccaaatgttattgcgtggtgccaatggtgtggcttattcttcattgcctgacaatgctattgaccatttcgtcaagcaagccaaggataatggtgttgatatatttagagtctttgatgccttaaatgacttggaacaattgaaggtcggtgtagatgctgtgaagaaggcaggtggtgttgtagaagccactgtttgtttctctggggatatgcttcagccaggcaagaaatacaatttggattactacttggaaattgctgaaaaaattgtccaaatgggcactcatatcctgggtatcaaagatatggcaggtaccatgaagccagcagctgccaaactactgattggatctttgagggctaagtaccctgatctcccaatacatgttcacactcacgattctgcaggtactgctgttgcatcaatgactgcgtgtgctctggcgggcgccgatgtcgttgatgttgccatcaactcaatgtctggtttaacttcacaaccatcaatcaatgctctgttggcttcattagaaggtaatattgacactggtattaacgttgagcatgtccgtgaactagatgcatattgggcagagatgagattgttatactcttgtttcgaggctgacttgaagggcccagatccagaagtttatcaacatgaaatcccaggtggtcaattgacaaacttgttgtttcaagcccaacaattgggtcttggagaacaatgggccgaaacaaaaagagcttacagagaagccaattatttattgggtgatattgtcaaagttaccccaacttcgaaggtcgttggtgatctggcacaatttatggtctccaataaattaacttccgatgatgtgagacgcctggctaattctttggatttccctgactctgttatggatttcttcgaaggcttaatcggccaaccatatggtgggttcccagaaccatttagatcagacgttttaaggaacaagagaagaaagttgacttgtcgtccaggcctggaactagagccatttgatctcgaaaaaattagagaagacttgcagaatagatttggtgatgttgatgagtgcgacgttgcttcttataacatgtacccaagagtttatgaagacttccaaaagatgagagaaacgtatggtgatttatctgtattgccaacaagaagctttttgtctccactagagactgacgaagaaattgaagttgtaatcgaacaaggtaaaacgctaattatcaagctacaggctgtgggtgatttgaacaaaaagaccggtgaaagagaagtttactttgatttgaatggtgaaatgagaaaaattcgtgttgctgacagatcacaaaaagtggaaactgttactaaatccaaagcagacatgcatgatccattacacattggtgcaccaatggcaggtgtcattgttgaagttaaagttcataaaggatcactaataaagaagggccaacctgtagccgtattaagcgccatgaaaatggaaatgattatatcttctccatccgatggacaagttaaagaagtgtttgtctctgatggtgaaaatgtggactcttctgatttattagttctattagaagaccaagttcctgttgaaactaaggcatgaaccggttagttctcatttataatgtataatatacccgaatcttatttatttacctttcctattttttgacgaccagtaaatactaatacataattaggaacaaaagttaaataaaaaaaaaaataataatttaacgcatccaattaacgtgtccttttttcatcattaatttatctactatttcgatttaaattccatatacaataaatcctagatacattcccgaaagcatctt

SEQ ID NO: 1210 - DNA, 1113 bp, Saccharomyces cerevisiae
atgctcttaggttactgtggcagcggatactatggaatgcaatacaacccaccacacaagacgattgaaggtgagattctcaccaagctcttcgacgtaggagccatttccgaagaaaattcattggcaccgaagaaaaattcctttatggcagcggcaagaacagacaagggtgtacacgctatgttgaatctactgtcgctaaagatcacattgcgagaggacacagtagcgaagttaaacgccgcactaccgcccgaaatacgcgtgtggggtatccagcctgtcaataaaaagtttaatgctagatccgcgtgcgattctcgatggtaccaataccttatcccagaatttatactcattggtccaccccggagttctcttttgcatcgaaacgtggggggatcgtaccgcgaagacggctcgcaagaggtgtgggatacgttcctggaacagacgcgtgggagatttagcggggatgagctgtgccgtttgcaggacactgcacagaaactaagcgagagcgatcctttggtacaagactacgtggggctattgagcggtacccttagcggctactgcttgtcgccctcgaagctggacgcgtttgaggcagccatgcaggagtacgtgggaacgcataattttcacaactttaccacaggaaagctttggggggatcctagtgctcagcgccatatcaaaaaggttgtagtgtcgcaggcctcaccgggatggatatgtgtgcggatccacgggcagtcgtttatgttgcatcagattcgacgaatggtagcgcttgccgtacttgcagcccgttgccaattgccgcctaatattgtacgtaactattttaacgccgggcctaggaaatacattccgagggcgcccgcacaaggcctattattagagggacctgtgtttgacgggtataacactaagttgcgcaatttgctgtattgcgaaatccgcccggacgatatcactcttgagcgcatgtgccgtttccgagaacgccagatctgtactgcgatcgcacacgaggagacacagcgtcacgtgttttgccattttgtacgacaaatgaaccgcctggccacgcctctaatctag

SEQ ID NO: 1211 - DNA, 1298 bp, Saccharomyces cerevisiae
aaagcccaccaaccataagaataaagaacaagagcaggagcgaaacgaaagagaagataaagattgtacctttttgctcctgatttttttttgattacgctacggttagttgagagaatgtccactgctgtgactttttttggccagcatgtcttgaacagagtttcgttcttaagatgttcgaaagagttcatcaaaaaatcattgaaccatgactctaccgtttttatcccatttatcgaaggggaagccctcatttcgcccgaaaatggtgacctagttcagctttctaattctgtaaagtcttacaagaatattttgtcagcaatagttcctttatacactactttattgaacacaactcgctcaagaagcgatgaatcaggcatcaatgtaacatttttaggtctcctggaaggcacagattctgcatttaattttgaatggtctaatatttcttacaaaggaacaccatattttggattagatatccgtgttactgagagcacactcttcaagaaagtcgactttgagcctattttttcctatccgaaggtgaccagagatcacattttcaaacaaacaaatgaggatgcttcactttattcacaaggtaagatgtatctggattggctagcaaagtacaaattctgtcccggttgtgggtctccgttattcccagtagaggcaggaactaagcttcagtgttctaatgaaaatcggaatgtatactgtaatgtgagagatgcaagaattaataacgtttgcttcccaagaactgatccaacggtcattatagccttgaccaattcggattactctaagtgttgtctggcaagatcaaaaaaaaggtacggtgattttgtattgtattcaacaatagcaggttttatggagccatcagaaaccatagaggaggcttgtatcagagaaatatgggaggaaacaggcatttcatgcaaaaatattgatatagtccggtcacagccctggccttacccttgcagtttgatgattggctgtttaggcatagttcaattcaattccaaaaatgaggttatcaacctgaatcatgacgacgaattattggatgctcaatggtttgatacaactgaaatcattcaagctttggataagtacgccggcgggtatcgtgttccattcaaaaatgatatcaatttacctggaagtactaccattgccttccaattaatcaatcatgtttgcgagaactataaaaacttacgtaagacctcatcgagccatctatagtttttaatataataaacattgataaa

SEQ ID NO: 1212 - DNA, 743 bp, Saccharomyces cerevisiae
caagcagcccgtcagcagcaaacacagtcaattaaataagcgcccagtatgtccttacgtatactagcgaagagatcttcttctatctggatgaaaacgcgcgttacaccagcgctaatttctcctattactatcacaacccgtttcaattctacgactacaacagcaccatcacataaggatgatgtaaggccagttgatcctaaaatttctaaaattgtacaggacatttcacaattgactcttttggaaacttccagtttaatcaacgagctgaaaaccgtattgaacattccagaaatttccatgcctatgggcggattcatggcaggcgctgcaggcgcaggtgctggtaatgtacctagctccactggtgaagctggtagtggtgctgaagaagaagctaagcctgaggcaaagaccgtgtttacggtgaagttggactcgttcgacacgaagactaaggctaaagtcatcaaggaagtcaagggattattggggctttcattagttgaagctaagaaattcgttgaagctgcaccaaaggtcttgaaagaaaatgtcgccaaggatgatgctgaaaagattaagaaaaccttggaagacttaggagctaaggtcagtttagaatgattttaaaactgtagcaatctaccaatcgtgttaatcaaaatagtctgttttctcttcgagaaaataaggaatatatcatgtaaatatgtttaactctttattcttctttc

SEQ ID NO: 1213 - DNA, 851 bp, Saccharomyces cerevisiae
taaaataataagagaggcaaaataatggttaccaacacttagtgaagaacaatggtgaccggaatatcggaggaaaatgatgatgaagagactttttcggctgttcattcttcaacacccagtattaattctcaatcctacgcgattcctataacagaggaaatgtccagctctttccatgattcgatcagcaccactagcaactcaagtggtagcttcgatagtgatggaagtaacgtttcagatgttgtggagcaaaatgaaatggacaatgaatctaacgttgacgaagatttgttcctagataacgatatccctcagtcaagcaatttgctacccacggatgcccaggatcctggtccaatatttgacgtttctagatatatttttgattctctaaaacaatctattgattctgctgatttctcagaggcactttctctacagaccaaaacctccgctgttataaattcgaaaagcctagagcttaaacaatatattgatgaaatgaagagcaggctcactcaactgcaagagaagtttgaaaatggtgaggctacttcaaaaaaaataaaacgtgatttagaaacttcaagaaagaacatcgactatttaaacgctgctttgcgtgtcgatttccccatagagtttaatcaggcaagagaaaaaattcttgagcgcagattgaatgaagaccatgactgctgatatactgaatcgtattttttttctagaaaatatgtatactatgtgagagtcaatttaaataatattaatgataaatgaaagtgggcagttataatagtaatatacagtgttttgttaataaatctccgactctcgattggcta

SEQ ID NO: 1214 - DNA, 711 bp, Saccharomyces cerevisiae
cagcaaacgtcaatacatctacatatatacgtatagattttattgcactgtgatcaaaaagaatgtctcaaccggttcaacgcgctgcagcacgctcattccttcaaaaatacatcaataaagaaactttgaaatatattttcacaacacacttctggggtcccgtatcaaatttcggtatcccaattgctgctatatatgatctgaaaaaagaccctacactaatctctggcccaatgacttttgctttagttacctattcaggtgttttcatgaagtatgctctttcagtatcacccaaaaactacttactgtttggatgccaccttattaatgaaactgcgcaattagctcaaggctataggtttctcaaatacacgtatttcacaacagatgaggagaagaaagctctagataaggaatggaaagagaaagaaaaaactggtaaacagtaaaacgagcagtctaagaacctgaagtaggtgactagatggaaacataaaaaagaacaagcaaggattaagaggatggatatgttcatgcatattctctcatttttacctcttctccttttcatatatgcatgctatagaaccattatctctatgagtttcattttatttagtagttagtattgaaccaaactacataagatgacatattctaaataacctaaataattattatgtctttattcaaatatttctttta

SEQ ID NO: 1215 - DNA, 1381 bp, Saccharomyces cerevisiae
aaacaaaaccaaatttgctaaaatcaagactggggcaatttttcagtccgtatacaatcgttcacaggaattagccaatatggatgttacatttctaaccaaaaatgttcaaataaatggcactcagtttaaaatattacttcaaaatgggcaaggtgaatgcgcgctaattgcactagctaacgtattattgatatcacctgcccatgctcgctatgcccaagaaatttccagactagtgagaggcaaggaaactgttactttaaacgaacttgtgcaaactctagccgacatgggcgttcaaaatccgaatggtacagatgtggacaaacaacagctactccaaatcctaccacaattatatagcggattgaacatcaacccagaatttaacggatcttttgaggacggcgtagaaatgtcgattttcaggctctacaatgtcggcatcgttcatggatggataatagatggggacaatgatccgaactcttacgaacatgtgtccaaatattcttatatgggcgcgcaaaaagttttggtacagtcgtatgagatccaaaagaataatgcccaatttgaaaacagcgagcaaatccaatctgatgcaccttacttaaaatcgtttctggcaagatctgccacacaattgactgaatatggtctaactcatctcagagaaattttagtagaaagatcgtatgccgtgctttttagaaatgatcacttttgcacattatataaaaacaatggcgaattgtttactttggtcacggatcctacttacagaaatcgcaaggacataaactggcagtcgcttaaatccgtgaatggatcgcaggattcttactacacgggcaacttcattcccacaagtctggaaagaacagaaactactgctaccgggcaaaatgagtcctacatttctaacccattcagtgaccagaatacagggcatgtaactagcaaccaagttaatagtggagcaagcggtgttcaacaaatcgaagatgatgaggaactagctaggaggttacaggaacaagaagatatgcgtgcggcaaataacatgcaaaatggttatgctaataacggtagaaatcatcaaagggaaaggtttgaaagacctgaaaaaaattcaaagaaaaacaagttccttccctttaatgggagtaataaagaaaagaaaagagacaagttgaaaaaaaactgtgtaattatgtgaaaccatgatttctttttcgtcttttgtatctttcttatagaattattttttttgtgggtgtcaccacgctagcgcttatttttaactctaccactttttaattttgtaaatgtatattttactccttcatggcgttcaactggcctatttgtgata

SEQ ID NO: 1216 - DNA, 4051 bp, Saccharomyces cerevisiae
tgttgtttcctgttacctatcacaattattattgctttttagaaccacaagcaaaggagaagcagtagccaccttatgtttaataaaagtgtaaatagtggtttcacctttggaaaccaaaacacatccacaccgacatccactccggcacagccttccagttcccttcaattccctcaaaaatctactgggttatttgggaacgttaatgttaatgcgaatacttcaacacctagcccatctggtggattattcaatgccaattcaaacgctaattctataagtcaacaacccgccaataattcattatttggaaataaaccagcacaaccatcaggtggcttatttggcgctacaaacaatactacttctaaaagtgccggaagcttattcggaaataataatgccacagcaaattctacgggctctacaggtttattcagtggtagcaataatatagcctctagtacccaaaatggtggtttgtttggtaatagcaacaataacaatataacttctaccacgcaaaatggtggtctgttcggtaagcctactacaacccctgctggtgctggcggcctgtttggaaattcctcatcgacaaactcaacgacaggattatttggatcaaataatacacaaagttctacaggtatttttggtcaaaagccgggagcttcaacaactgggggattgtttggaaataatggtgcttcattcccaagatccggtgaaactactggaaccatgtcaaccaacccatatggaattaacataagtaatgttcctatggcagtggctgacatgccaagatctattacgtcttctctatcagatgtgaatggcaagtcagatgcggaacccaaaccaattgaaaatagaagaacatattcgttttcttcctcagtttcagggaacgctcctttaccactcgcctcacagtcaagtttagtgagtagactaagcacgagactgaaagccactcagaaaagcacgtcaccgaatgaaatattttcaccgtcttacagtaaaccgtggctgaatggagcaggttcagctcccttagtagatgactttttttcttcaaagatgacttctttggctccaaatgaaaacagcatctttcctcagaatggttttaatttcctatcctcccaaagggccgacttgacagagctgcgtaaattgaaaattgattccaacagaagtgctgcaaaaaaattaaaactcctctctggtactcccgccatcacaaaaaaacatatgcaagacgaacaagattcatcggaaaatgagccaattgcaaatgctgatagtgtcactaacattgacaggaaagaaaatagagataataatttggataacacttatttgaatggaaaggagcaatcgaataacttgaataaacaagacggcgaaaatactttacaacatgaaaagtcatcaagttttggttattggtgttctccttccccagaacagctggagcgtttgtcattgaagcaattagcggccgtttcaaattttgttatcgggagaagaggttatggttgtattacatttcaacatgatgtggatctcacagcttttaccaaaagctttagagaagaactattcggtaaaattgtaatatttcgttcctctaagacagtagaagtatatcctgacgaagccaccaaaccaatgattgggcatgggttaaacgttcccgctataatcactctagagaatgtttatcctgtagataaaaaaacaaaaaaaccgatgaaagatacgacgaagtttgctgaatttcaagtttttgacaggaaactaagaagcatgagggaaatgaactatatatcctataatccctttggcgggacttggactttcaaagtcaatcattttagcatttgggggttagtcaatgaagaagatgcggaaatagatgaagacgatttgagtaaacaagaagacggcggtgagcaaccattaagaaaggtgcgcacgttagcgcaatcaaaaccatcggataaagaggttatcctcaaaacagatggcacttttggaactctatcaggtaaagacgactctatcgttgaggaaaaggcatacgaacctgatttgtctgatgcggactttgagggaattgaagcttcccctaaacttgacgtttctaaggattgggtagaacaattaattttagctgggtcttcactacgttctgtgtttgccacttctaaagaatttgacgggccatgtcaaaatgaaatagatttactcttttccgaatgcaatgatgaaattgataacgcaaaactcatcatgaaggaaagaagatttacagcctcttatacgtttgcaaaattttcaacaggttcaatgctactgacaaaagatattgttggtaaatcgggcgtttcaattaagcgtttaccaactgagttgcaaagaaaatttttattcgatgacgtctatttagataaagaaattgaaaaggttactatcgaagcaaggaagtcaaacccatacccacaaattagtgaaagctctttactctttaaagatgctttagattatatggaaaaaacctctagtgattacaatctatggaaactttcatctattttattcgaccccgtttcctatccatacaagacggacaatgatcaagtaaaaatggcattattaaaaaaagaaaggcattgtcgattaacttcgtggattgttagccagataggtccggaaattgaagagaaaattaggaattcttctaacgaaatagaacaaatatttctatatttgctcttgaatgatgtcgtaagggcatccaagttagcaattgagtctaagaatggtcatttgagcgttttgatatcctatttgggttcaaacgacccaaggatacgtgatttagcggaattacaattgcaaaagtggtcaactggtggttgtagtatcgacaagaatatctcgaagatttacaaattactaagcggttcaccttttgaaggtttattttctcttaaggaacttgaaagtgaattcagttggttgtgccttttgaatttgacactgtgctacggccagatagatgagtattccttagaatctcttgtgcaatcgcatttagacaagttttctttaccctatgatgatcctattggagttattttccaactatatgctgctaatgaaaatacggagaagctctataaggaggttagacaaagaaccaacgctttagatgttcagttttgctggtacttgattcaaacattgagatttaatggaacacgcgttttttcgaaggaaactagcgatgaggctacattcgcatttgccgctcaacttgaatttgcacaattacatggccactctctttttgtttcttgctttttaaatgatgacaaggcagcagaagataccataaaaaggcttgttatgcgtgaaataacattgttaagagcctctaccaatgatcacattttaaatagattaaagatcccttcgcaattgatattcaatgctcaagctttgaaagatagatatgaaggcaattacctttctgaagtacaaaatctactcctgggttcgtcttatgatttggcagaaatggctattgttacgtcattaggaccaaggctgttgttatcaaacaatcctgtacagaataatgaactgaaaactttgagggaaattcttaacgaatttccagactctgagagggacaaatggagtgtaagtataaacgtatttgaagtatatctaaagcttgtgttggataatgttgaaacgcaggagactatcgattcattaattagtggtatgaagatattttatgatcagtataagcactgtcgtgaagtggccgcatgttgtaatgttatgtcccaagagattgtatcaaaaatattggagaaaaacaatccttcaataggcgattcgaaggccaaattgcttgagctccccctagggcagccagaaaaggcatacttgaggggtgagtttgcccaggatttaatgaagtgtacatataagatataagtttttttatttttatttctaa

SEQ ID NO: 1217 - DNA, 1589 bp, Saccharomyces cerevisiae
ctctttaagtcaaatcctggatccagaaacttaaaaagttgtcatataaaagtttaaaatggtcaaaagaacagtcgccaccaatggagacgcgtctggcgctcatagagcaaagaaaatgtctaaaactcatgcttctcatatcataaacgctcaagaagactacaagcatatgtacttaagtgtccaaccattggatatattttgctggggtactggttctatgtgtgagcttgggttgggtccactagccaaaaataaggaagttaaaagaccaaggttaaacccatttttacctcgcgatgaggccaagatcatttcttttgcagtcggtggtatgcacaccttagcccttgatgaagaaagcaatgtatggtcctggggttgcaatgacgtgggtgcgttgggcagagatacttccaacgccaaggaacaactcaaggacatggacgccgatgactcaagtgatgacgaagatggtgatttgaacgaattggaatctacgcccgctaaaatcccaagagagtcatttcctcccttagcggagggacacaaggtcgtgcaattggcagctacagacaatatgagttgcgccctgttcagcaatggcgaggtatacgcatggggtactttccgttgcaatgaaggtatcctagggttttaccaagataaaattaaaattcaaaaaactccatggaaagtgcctacattctctaagtacaatattgtccaattagctcccggtaaggatcacatacttttcttagatgaagagggtatggtgttcgcctggggtaacggtcagcaaaaccaattaggaagaaaagttatggaaaggttccgtttaaagactttggatcccagaccatttgggttaagacatgtaaaatacatcgcatctggcgaaaaccattgctttgctttaacaaaagacaacaagttagtaagctgggggttgaatcagtttggtcaatgtggtgtttcagaggatgtggaagacggtgcgcttgttacaaagccaaaaagactagcgctacctgataacgttgttatcagaagcattgctgctggtgaacatcactcattgatcctatcccaagatggcgatttgtattcgtgtggtagactagacatgtttgaagttggtatcccaaaagacaatttacccgaatatacttacaaagatgttcatggaaaagcacgtgccgtgccacttccaactaagttgaataatgttccgaagttcaaaagcgttgcggcggggtctcaccattcagtcgcggtagctcaaaatggcattgcctattcttggggttttggtgaaacctacgccgttggattaggcccttttgaggacgacactgaagttccaaccagaatcaagaatactgctacacaggatcataacatcattttagtcgggtgtggaggccaattttccgtgtctggtggtgttaagctgtctgatgaggacgcagaaaagagagcggatgaaatggatgattaaggtagtagtacaaagataaataaaagaaaatcgacataatgcacctcagtataaattgtaaaatataacataaatcaaagaa

SEQ ID NO: 1218 - DNA, 2006 bp, Saccharomyces cerevisiae
aacacaaaactaaatctgatattgaggacccccaccaactatgccaccaaaagaagctcccaagaaatggaaggcgccaaaagggccaaaacctacccaccgtaaaaataaaaataagcttgaattaggcagagctattaaatatgcacgtcaaaaagaaaatgccatcgagtatttacctgatggtgaaatgaggttcactaccgataagcatgaggccaactgggttaaattaagatctgtaactcaagaatcagctttagatgaattcttgagtacagctgcactggcagacaaagatttcacggccgatagacattcaaatgttaaaattattagaatggatagcggtaatgattctgcgacatctcaagggttttctatgactaatgagcagcgtggaaatcttaatgcgaagcaaagagcgcttgctaaggatttgattgttccaaggaggcctgaatggaacgagggcatgtccaagtttcagcttgataggcaagaaaaggaagcgtttttagaatggagaagaaaattggcacatttacaagaaagcaatgaagacttgttgttaacaccgtttgaaagaaatatcgaagtttggaaacagttatggagagttgttgaaagatcagatttagttgttcaaattgtagatgcgaggaatccgttgctgtttagatctgtcgatttagaaagatatgtaaaagagtcagatgacagaaaagcaaacttactgctagttaataaagcagatttattgaccaaaaagcaacgtatcgcttgggcaaagtactttatctccaagaatatttcgttcacgttttactctgcattgagagctaatcaattattggagaaacaaaaggaaatgggggaagattatagagaacaagatttcgaggaagctgataaagaagggttcgatgctgatgaaaaagttatggaaaaagttaaaattctgtccattgaccaactggaagaattgtttttatcaaaagctccaaacgagcctttattgccacctctgcccggtcaacctccactgattaatattggtttggttggttatccaaatgtaggtaaatcctccactattaattcgctcgtgggtgccaagaaagtttctgtttcatccacgcctggtaaaacaaaacacttccaaactattaagttatctgattctgtcatgctttgtgactgtcccggtcttgtcttcccaaactttgcatataacaagggtgagctcgtgtgtaatggtgttttacctattgatcaattacgtgattatattggtccagcaggtttagtagcagaaagaataccaaagtattacattgaagcgatttatggtatccatattcaaaccaaatcaagggatgaaggtgggaatggggatataccaactgctcaagaattgttagtcgcatacgccagagctcgtggttatatgactcaaggttacggttctgctgatgaaccaagagcaagtcgttatatattgaaagattacgtcaatgggaaattactgtatgtcaaccctccgccccatctagaggatgatacaccttacactagagaagagtgtgaagaatttaacaaagatttatatgtgttcgacagattaccggacaccagaaaggagcaagtgcaaaatgctgctaaggctaaaggcattgatatcgtggatttagctcgtgatttgaatcagctaacgttttcagctcacactggtggtgacacacaaaaagaagccaaatctgttacgcacggtggtaaacaagctgcattgtacaatgccgctgaggacttggatagagacttcttcaagatgaacaacgtcgaaggtagattaagtacaccattccacaaagttcaaaatagttcagctggtaagagacataacaaaaaaaacaaaagtaaaaatgcgaaaagcaaagtttttagcattgaaaataattagcggtaactaacatatatcttctcaaaaaaactgtgtactatta

SEQ ID NO: 1219 - DNA, 1162 bp, Saccharomyces cerevisiae
cgacccaataatatttctgaatatgcaaccatttgatagtgggcatgatgatttagttcatgatgtcgtttatgacttttacggaagacatgtggcaacatgctcttctgatcaacatattaaagtttttaaattagacaaggacacgagtaattgggaactcagtgactcatggagagctcacgacagtagtatcgtggccattgattgggccagtccagaatatgggcgcatcattgcttcagcctcttacgataagacggtaaaattatgggaagaagatcccgaccaagaagaatgctctggccgtcgttggaacaagctgtgtaccctgaatgattccaaaggatcactttatagtgtaaaatttgcgccagcgcatttgggcttaaaattagcttgtttgggtaacgatggaatcctcagactttatgatgccttagaaccttctgacctaaggtcatggacactgacttctgagatgaaagtgctatctataccaccagcaaatcatttacagtctgatttttgtctctcttggtgtccttcgagattttctcctgaaaagctcgcagtctctgcattggaacaagcgattatataccaaaggggtaaagacggtaaacttcacgttgcagcaaaacttcccggtcataaaagtttaataagaagtatcagctgggctccttccattggtagatggtatcaactcattgcaacaggttgcaaagatggtagaattagaattttcaaaatcacagaaaaactaagtcccctggcctcagaggagtctttaactaactcaaatatgtttgataatagtgctgatgttgacatggatgcacagggcagatcagactcaaataccgaagagaaagctgagctacaatcaaacttgcaagttgaacttctaagcgagcatgatgaccataatggcgaagtttggtccgtgtcttggaatttaacgggtacaatcttaagcagtgctggggatgatgggaaggtacgtttatggaaagccacttattcaaatgaatttaagtgtatgtcagtaattactgcccaacaataaataagaatatatgtatacataacattatatattggtactttatacgtgtgcattattctgtataatacgaggcaacagatgaatcaagaa

SEQ ID NO: 1220 - DNA, 1003 bp, Saccharomyces cerevisiae
tttttaaaagattttcaaaatccatatataaacatagggtccaaaaagaaaacaaataacaaaacaagaaaacctattcgaggtaaagaccaggaaaaacaaaatgactgcagttaacatctggaagccagaagataatatacctagggagattttggcaattctttcgaaacctcacccaaattatcagttagcgtttttgaatattatacaacttttgaaaacgcaaagaagaactggttgggttgaccatggtattgacccatgcgaaagtatatctgaccatatgtacagaatgggtttaactaccatgctgattacggacaagaatgttgatcgtaacaaatgtatcagaatcgcacttgttcacgattttgcggagtcattagttggtgatattacacctaatgacccaatgacaaaggaagagaaacatcgcagagaatttgaaactgtcaagtatctctgtgaaagcataataaggccctgcagtgaaagcgcatctagggaaattcttgatgactggttagcatacgaaaagcagacctgtttggaaggaagatatgtcaaagatattgataagtatgaaatgttggttcaatgttttgagtacgaacaaaagtataatggcaagaaggatttgaaacaatttttgggagccatcaatgatataaaaactgatgaagttaaaaaatggacacaatctttactggaagatcgacaagcctttttcgacagtttgaaggagtaataatgtggccttttgaaagaaaagttagtgcttttttttcttttctcaaaccttcacctggtggtgcgtatcatttataataacatcttgatgcttttcaacgagatagtgcccattttattttgcatgtattatacttccagcacccggtgtgcattatatgtaactttagaaataatcttttgtatattattcgcgattgaatgtgcgtgctgcattatcaaccaagttttaatatatctgtttctctta

SEQ ID NO: 1221 - DNA, 1276 bp, Saccharomyces cerevisiae
gcccaattgaataagaaagtataatatagagtttcaagagtcaatgtccgatctcgttaccaagttcgaatcgcttattatttcaaagtatccagtttctttcactaaagaacaatctgctcaagctgcccaatgggaatcggttctaaaatctggtcaaatccaaccacacttagatcaattgaatttggtgttaagagacaacaccttcattgtgtccactttgtacccaacatctaccgacgttcacgtcttcgaagtcgccttaccattgattaaggatttagtggcaagctccaaggatgtcaagtcaacttataccacatacagacatattttgagatggattgattacatgcaaaacttgttggaagtgtcgagcactgacaagttagaaataaatcacgatttggacttacctcatgaagttattgagaagaagaaaaaggcacctgcgggtggcgctgctgatgccgcagccaaggcagacgaagatgttagtaagaaggctaaaaagcaagatcatccaagaggtaagcctgatgaagaaacccttaagaaattgagagaggaggcaaaggccaagaaggcagctaagaaggccgccaacgccaaacaacaacaagagcaacaaaataaggccccagaaaagccaaagccatccgcaatagatttccgtgttggttttattcaaaaagccatcaagcacccagatgccgactccctatatgtctctacaattgatgtcggtgatgaagaaggcccaagaactgtttgttctggtttggtcaagcattttcctttggacgctatgcaagaacgttatgttgttgttgtatgcaacttgaaaccagttaacatgagaggtattaaatccactgctatggtattgtgtggttctaacgacgacaaagttgaatttgtcgagccaccaaaggactctaaggccggtgacaaggtgttctttgaaggtttcggtgacgaagctccaatgaagcaattgaatccaaaaaagaagatctgggaacacttacaacctcattttactacaaatgacgggttggaagttatcttcaaagacgaagaagaaaaggaccatcctgtaagaaagttgaccaacgctaagggcgaatcattcaaggttgctagtattgctaatgctcaagtccgttaaaaagatataatatcacgaatttgttactaatttaacatgcgtaaatacttatttcacatatataattcaaagatttataagtaaatgtctttgtgctaataa

SEQ ID NO: 1222 - DNA, 718 bp, Saccharomyces cerevisiae
gcacatacatagaataacaatgtcagccaccagagccaataaagatattttcacactattcgacaagaagggtcaaggcgccattgccaaggattccttgggagattacctgagggcaattggctacaaccccaccaaccagctcgtacaggacatcataaacgcggattcgagcttgagagacgcctctagcttgacgctggaccagattacaggcctaattgaagtcaacgaaaaggaattggatgcaactaccaaggcaaagacagaagacttcgtcaaggcattccaggtcttcgacaaggaaagtacaggcaaggtatccgttggtgacttaaggtacatgctaactggcttgggtgaaaagttaaccgacgctgaagtagacgagctgttgaagggtgttgaagtggacagcaacggagaaattgactacaagaagttcatcgaagatgttttgagacaatgagagtgcggaactgcaaatttagacatttattactatataacagagtcctatcgacataaaaacgaaaaaagcgccattatgcaatgaaaacttgccagcggtttttcatttttcatactggtaattcagagagccaagtctttctttataatgcatagcaataaatagtcatatatatatatatatatatatatatatgtacatatatatgaacatatatatgaacaaataaatgataatggtatgtga

SEQ ID NO: 1223 - DNA, 1563 bp, Saccharomyces cerevisiae
gcccagcttcgatcgtaaaatgaggttactagtcagctgtgtggatagtggatccataaaggaagttttgtgtaacatcgggactgacacttccgtacaatcagcactgcagccttttcatgtggcacctcatctagccgaaggattgaaagcttacgttgacaggatgtgggtgatatccgaagatgaagccatcttagcaaggaattcaggggtcgtcgaacttgtaaagatttcgaaacaccttaaagaaaatgaagctctccaggtcgatcccaaaggagaaagcaaaaatgaaaagagcctttccgatgatctacccaaatttgacatatccgagtttgagataaccagctcagtttcagacctttttgatgatgccaaattggaatcactttcaagtaaatctgttaaaagaaccaagttggtggatggttttgtcacattatgtcccataaaaaaggattcgtcgaataacacattcgtagctgctaccaaatcgggattattacatattataaaaaaaggagaagataaaaagttaataaaactagcatcccttggactgaaagcaccagtagaatttcttcagttatatgatctagaagataccgatactgataaatatatatttgcatacggaggggaggagaatttaataaaattagtggaaatagattcgagtttccaatctttaaagcaaatttgggaagccaagaatgttaaaaacgacaggttggatatgagagtcccagtatggcccatggccctaagatttttggagccctcccctggtaaaactgaaaagggtaagctgaactaccagtttgcagccataacccgttggtcccacctcaccaaatacagcacacaacatggcagaaaaccgttcgctcagatagatttattacctaaccgtgaaccattatctcagatggaagtttttgatgccaagggagaaaatgttgtctcttcgttggggaattttcaatctgaaacctttaatgaactgaatgtgattactactgactacaaaaagaatgtttttaaattcgatggtaatggaagaatgttgggcaaggtgggtagagatgatatcactggttcgtcaacctatattcatgtacatgacggcaaatatcttttacaaggtggtttagataggtatgttcggatcttcgatataaaaactaacaaaatgctggtgaaggtttatgttgggtcccgtataaattttattgttatgctggatgacgttgaaatcgagatgccactaagtccaagtgcgaaagctgccaaagggaagcaaaaaaggaaggttacagaacttgaagaagacgcagatgagctttggaataaattggagggaaaggtagctgcttctaaagccagtaagaaaagcaaaatttaatagtaaaggacgctaattgaaggcaaagttttactagtcggcgggaaaaattattaaaaaaagcacttcctgaacgcgacgctgaataacttataatacgttacataattgtataccgtctagtaaacttacatacgcttgtctatcttgta

SEQ ID NO: 1224 - DNA, 2298 bp, Saccharomyces cerevisiae
taggaagaaaaagagtcacagtatagaggactaaccgttaaagattctaaatcggtactgtaaatactttgaaatgcctcaatctactccaagtcaagaagtacagcgtgtaccatgggataataaacctgctttgaagcagataacactccgagcaaccatagcaggtatcgctatagggtctctggtgctaacatcaaattttcaatttggcctgcaaaccggttgggtttccatgatgtccctgccatcggcattgttagcttgtgctttctttaaaaatatctggccattaatatttccgaacgacaggcctttcagtgacgttgaaaatgtatacgtacaaagtatggcagtagctgtcggaacaggcccattagcctttgggtttgtcggcgtcatacctgccatcgagaagttccttactaacgacgaaagtggtggattaagggaacaaggacagtccttcacttttagagaattgttaatatggtccacagccctagcattcttcggtattttttttgcagttcctctaagaaagcaagtaattgttagagagaaacttcccttccccagtggtagcgccacggccactttaatttcagtgctaaatggaactgagattttacaagaggtttctaagtcagagttattggaaatgaggcagaggagattgaatgaatgccctgaagtgctacaacccaacagagatccagaggaggcggattatttaatgaactcttctcatagcgaacttggtgattatacggcaactagccaagatggaagttctatcctttctactggctctgagaactacagagcgaatattattattttattgaaaacttttgttgtttcttcgctttacaccatggtgtcatattttgtaccggtaatacggtctattccagtcttcggaaaatacctctcgaacaattatctctggaattttcagccgtcgcctgcgtatataggccaagggataataatgggtcttccaacagtatcgtatatgcttatcgggtgcttcttaggctggggtgtgttagcaccattggcgagatacaaaagatgggtaccaccagatgctgatgtccacgactgggaggagggagtgcaaggatggattctttggtcgtcgctttcaataatggttgctgacagtgtagtcgcttttattgttgtgacagtgaagtccattgtgaaatttattcttatagatgacaaagctgctttactgaacaacataatcgatgatacatttcaatctatgttactggaggaggaacgcgccattaatagcagcagaagaaatacatatgttgatggaaggcaggacaccgtaagattagtgagtagagataacgaaatagaagtagattcgaagcatttggttcgctataccaccgttatcagtggatgtctagtctcctcgataatatgcattgtttccataatatatttgtttgggatacaagtaattcccctatatgctattatcactgctttgatacttgcgttgtttctatctattctcggtattcgagcacttggagagaccgatctgaatcctgtgagcggcattggtaagatctctcaattgatttttgcctttatcataccaagggatagacctggatcagtgttaatgaacgtggtatcgggaggtattgcagaagcctctgcccaacaggcgggcgatttaatgcaggatttgaaaacggggcacctcctcggcgcctccccaagagctcagttctgtgcccaattgataggggcctgttggtcaattattttgtctagcttcatgtatttgtgctacaataaagtttattcaattccgagtgagcaattcaggataccgacagcagtagtgtggatagattgtgcaagactagtaactggtaaagggctccctgataaggccttggagtgctccatgattctcggagtcatatttgccgttttatcattaatcagaaacacttatagagattacggatacgggtggatattatatattccgtctggtgtagcagtcggtgttggtatatttaattctcccagttttacaattgcaagattcatcggcgggtgggcttcgcatttttggttgaagaatcataggggtgacttaaatgcgaaaacaaaaatgattgtattcagttcggggttggtcttaggtgaaggtatctttagcgtaataaacatgctcttcatctgcttaaatgtccctcactattaggtatataatattttactaataaagaatttacaaagtttacaaatttt

SEQ ID NO: 1225 - DNA, 1173 bp, Saccharomyces cerevisiae
cattgagaacttcttgggctagtggttttgctgcaaactggaaaattgtatcaatcttttaacgttagctaaacatcttctgctgtgttagcattaggaggaagcgaaaaggaaaatacataatgaaaccgacacaggattcacaagaaaaggtttctattgaacagcagttagctgtagaatcgataaggaagtttttgaactcgaaaacatcttatgacgtgttgcctgtttcttaccgtttaattgtcttggacacctcgttgttagtgaagaaatcactgaatgttcttttgcaaaatagcattgtctctgcgccattatgggactccaagacttccaggttcgctggacttctaactactacagattttattaatgtcatccagtattacttctccaatccagataagttcgaattagtagacaaattacagttagatggattaaaagatatagagcgtgctctcggtgttgatcaactagatacagcttcaattcatccttctagacccttatttgaggcgtgtcttaagatgttagaatcaagaagtggtagaataccactgatcgatcaagatgaagagacacatagagaaattgtcgttagtgttcttacgcaatatagaattctgaagttcgttgctttaaattgcagggaaacacattttctaaagattccaattggggacttgaacattattacgcaagataacatgaaaagctgtcaaatgaccactccggtcatagacgtcattcagatgcttacccaaggtcgggtttcttccgtccctattattgacgaaaacggctacttaatcaacgtatatgaagcatacgatgtcctaggcttgataaaaggaggcatctacaacgacctgtcattgagcgtcggagaagcccttatgaggagaagtgatgattttgagggtgtttatacatgcactaagaatgataaattatctactattatggataacatcagaaaagcaagggtgcatagattctttgtagttgatgacgtcggacggttggttggtgtcttgacgttaagcgatattctcaaatatatccttctaggtagcaactgaaacgagccgatgagatttttgtgtacatactataaataaatgcaactaataaagtcatgattaatcagtcatgcatacttca

SEQ ID NO: 1226 - DNA, 1435 bp, Saccharomyces cerevisiae
acgcctaaaactccactgaaaccagctataaagcacggcatattacaacaatgtctagcaaatggtttaatgctatacacctactggtgtgcccgttgacggtactggtaggatatctcatgaacgcgtatggctacggtgcggcgctgcaagcaaccctgaataaggatggtctggtaaatgctatgttggtaaagaaagggtggttttggacttccttggtcggatggtggtgtattatacgctaccgtgcggtgccgggggcaaccggcagagaccgaagacacattgtccagtcattcaaaaggtatgccatactgacagtgtggtggtacgtattcacgcaaggtatatggtttggcgtaggccccatcatggacttggtattcgtatatacgggtggccattgtcactatgacgtcttcgatgatgcaggtcacgtgaacgaagacttccagggttctgtcacccggactaatcgcgcgttggcgctcattcacaatgtcctcactttgcacggacaccaccaagaacaccgtcagcaacaactctgggaccgctccatagggtcgatccagggcgccctgcaggcgacgcaaccgaaaaccccaaaaaacgtaacggccagcgctgccgctgccatcaatacttttattcatgaccagatgcacaggtggcaaggtccgttaaccacctcggcacagtgcagacgttttggaggccattgggctggaggacacgatccatccgggcacgtgttcttggccaccttgatgtgcatgtttcttctaggtgagctacgtgtgtttgggcgtcgtgcactggctcacttgtacgcgcagaaatggcagcttgtacgattggtgacccgccttttcgacactggaccgctatggacgtggcggcggtgtggcggcggctcaatgacctgtggcgcccgtttgtggcgtgcgatagtcgagccgcctgtcacgtgcgcggccgccctgctccgtttgacgcgatgcatagcatgcgaccacccagtaatcatactgctgacgctattggtcacgtggttatggcagctgctgttgactgcggtggcgtcccgtttccacaccgtacgtgagcacatgtctggattgctagctgcgtacatagtgacaggccttgtctacgctcgcgacgcagccgcgctacgtccagtatgactcaggaaaagttggcgatagaccacgagcgactgaaaaaataacagcgacttttctcccggtagcgggccgtcgtttagtcattctatccctcggattatagactgtgaatattgcatatgcaactttgactcaaatttttccaaaatttgatatatatatatatatatatatgtttgtatgtatatatatatatacgtatatatatcatatatacgaaaagtagaaaaaaaaaggtgata

SEQ ID NO: 1227 - DNA, 813 bp, Saccharomyces cerevisiae
catagaactagtcgcaagcctcacggaccaccaaatactttggaagactaattacatatcataaaatgtctaagatcacctcttctcaagtcagagaacacgtcaaggaattgttgaagtattccaacgaaaccaagaagagaaacttcttggaaaccgtcgaactacaagtcggtttgaagaactatgaccctcaaagagacaagcgtttctctggttctttgaagttgccaaactgtccaagaccaaacatgtccatctgtatcttcggtgatgctttcgatgttgacagagctaagtcttgcggtgttgacgctatgtccgtcgatgacttgaagaagttgaacaagaacaagaagttaatcaagaagttgtctaagaagtacaacgctttcattgcttccgaagttttgatcaagcaagttccaagactattgggtcctcaattgtccaaggctggtaagttcccaaccccagtttctcacaacgatgacttgtacggtaaggtcactgatgtcagatctaccatcaagttccaattgaagaaggtcttgtgtttggctgttgccgttggtaacgttgaaatggaagaagacgttttggttaaccaaatcttgatgtctgttaacttctttgtttctttgttgaagaagaactggcaaaatgttggttccttggttgttaagtcctccatgggtccagctttcagattgtactaatcacttccgagcgattaatacatatctccatctttttaaataccttttttaatacgtatgactctaagtagtaaaagtattatgcatagtttta

SEQ ID NO: 1228 - DNA, 2880 bp, Saccharomyces cerevisiae
gaaacaattatacggacacgatgaagttggatataaagaaaacttttagtaatagatccgatcgagttaaaggtatcgatttccatcctactgagccatgggttttgactaccttgtactctggtcgtgttgagctttggaattacgaaacacaagttgaagttagatccatccaagttacggaaactcctgttagagcaggtaaattcattgcaagaaagaattggataattgttgggagtgatgatttcaggatcagagtcttcaactacaatacaggtgaaaaagttgttgatttcgaagctcatccagactatatccgttccattgctgtacatccaacaaagccttatgttttatccggcagtgatgatttgacagtcaaactatggaattgggaaaataactgggccttagaacaaacttttgaaggtcacgaacactttgtcatgtgcgtcgcattcaatccaaaggatcctagtacgtttgcatctgggtgtttggaccgaaccgttaaagtttggtcattgggacaatcgacaccaaatttcacgttaaccacaggacaagaaagaggtgtgaattatgttgattattacccgctacctgacaagccttatatgattactgcgtcggacgacttaaccatcaaaatttgggattaccaaacgaagtcatgtgtagccactctagaaggtcacatgtccaatgtttcttttgctgttttccatccaactttacccattataatttctggttccgaagatggcactttaaagatatggaattcttccacttacaaggtagaaaagactttaaacgttggtttagaaagaagttggtgtatcgctacccatccaacaggacgtaaaaactacattgcatccgggtttgataatgggtttaccgtactttccttgggaaatgatgaaccaactttatcacttgaccctgtcggtaagctagtatggtcaggtggcaaaaatgccgcagcttcagacattttcactgccgtcataagaggtaacgaagaagttgaacaagatgaaccattatctttacaaactaaggagctgggttccgttgatgttttccctcaatctttagcccattctccaaatggtaggtttgttacagttgttggggatggtgaatacgttatttatacggcgttggcttggagaaacaaagccttcggtaaatgtcaagactttgtttggggccccgactccaatagttatgctttaattgatgaaactgggcaaattaaatactacaaaaactttaaagaagtcacatcatggtctgtcccaatgcattctgctattgatagattattttcaggtgccttgttgggtgtgaagtctgatggcttcgtctatttcttcgattgggacaacggtacgctagttagaagaattgatgttaatgctaaggatgtcatttggtccgataacggtgagctggtgatgattgtcaacaccaatagtaatggtgatgaagcaagtggttacacattattattcaacaaggatgcttaccttgaagcagcaaataatggcaatatcgacgattcagaaggtgttgatgaggcttttgacgtattgtatgaactaagtgaatccattacatcaggcaaatgggttggtgatgtctttatctttaccacagcaactaacaggctgaactacttcgtaggtggaaagacttataatttagcccattacacaaaggaaatgtatctattgggctatctagcacgtgataataaagtatatttagctgacagagaggtccatgtttatggttacgaaatatctctagaggtgctggagttccaaacattgactttaagaggggaaattgaagaagccattgaaaatgtactcccaaatgttgagggtaaggactctttaacaaaaattgctagatttctggaaggtcaagagtattatgaagaagcactgaatatttcccctgatcaagatcaaaaatttgagctagccttaaaagtcggccaacttacgcttgctcgcgatttgttgacagatgaaagcgccgaaatgaaatggagagccttgggtgatgcttccttacaaaggttcaattttaaacttgctgttgaagctttcacaaatgcacatgatctagaatctttatttctattgcactcatcttttaataacaaggaggggttggtcactttagctaaagatgctgaaagggccggtaaattcaatttggcttttaatgcatattggatcgctggcgatatacaaggcgctaaagatcttttaatcaagtctcaaaggttttccgaagccgctttccttggatcaacatacggtttaggagatgatgcagtcaacgatattgttacaaaatggaaggaaaatttgatactcaacggtaagaatactgtatcagaaagagtttgtggggccgaaggtttaccaggctcttcgagttcaggagatgcccaaccactcattgacttagattccactccagccccagaacaagctgacgaaaacaaagaagctgaagttgaggacagcgagtttaaagaatccaactcagaggcagttgaagccgaaaaaaaagaagaggaagctccccagcaacaacaatcagaacaacagccggagcaaggagaggcagtgccggagcctgtggaagaagagagttaaccacctcatagaaagacaaataaagaactaatcaacgaatgagaaaacatctttaatggatggtaaacatatatatatacagatgtacactttttatttttattgcgataggtgtgaaaatgaacgtgacttgaaactttgcgcgcaaacaaatcatattatgaattactaaacacgtccagtttatcta

SEQ ID NO: 1229 - DNA, 2819 bp, Saccharomyces cerevisiae
taaaaaaatttcaacaacaacaacaacaacaacaacaacaacaacaacaaatagtggagactagaaaagtatacccctcacaggcatgagatttcttcaggtttataaatcatcggcattaattggactaataatattgttagccagtaaagtaaatcttgcagaggcaaaaaggaagctggtagccacatcattggtcacatgtatggaaaactcgcagctgtcagcaaatagttttgacgttgttttcaatccagacgacaggtcattacattatgatcttgatatgtcaactcaaattgattcatatatttttgctgatattgatgtctacgcatatggtttcaagatcattactaaaaatgtcgatctttgttcaatcaactggaaacagttttgcccggttcacccaggtaatattcagatcgactctattgaatacatctccagtgagtacgtaaatgaaattcctggtattgcataccaagtccccgatatcgacgcatatgccagggtcaagatcaccaacaatgtgagcgagtacctagcatgtatccaaatatacttctcaaacggtaaaacagtttctcagattggtgtaaaatgggcaactgcagtggtagcgggaattggtcttttactatctgccatcttatccacttttgggaactctaccgcagcctcacatatttctgccaacacaatgtcacttttcttatacttccaatctgttgtcgtggttgccatgcaacatgttcatcgagttccgcctattgcagccgcctgggcggaaaacttggtttggtcaatggggttaattagaatctcattcatgcaaaggattttccggtggtatgtgcaatccactggtggtacgcctagcttatatctgacttcaacatctatgtctgttttggctcaaagaagttggcaatatttgatggagctcccattaatcaaaagagctaccaatgttttgtatggtaatgcaaatacattaatttttagaggaatcaaaaggctaggctataaaatgggaatcgaaaatacgtccatcgtttgtaccggttttactttcttcgtcttatgtggatatgtgttggctggatttatcatagtattcaaatgctgtgtggagttagccacccggttaggatggatccaaaaggcaaggttttgggaattcaggaaacaatggagaatgatcttaaaaggtgctcttttaagatatatttacatcggtttcgttcagttaacaattctcagtttttgggaatttactgaaagagattcacctgctgttatcgtcatcgcatgcctttttattcttttgtcatgtgggttaatgctttgggctgcatggaggactgtttttttcgcaagaagatctgttgcattgtacaacaacccagcagccttattgtatggagatgaatatgtcttacacaaatacggatttttctatacaatgttcaatgccaatcattactggtggaacattgttcttttatcctacatttttgtaaaatcattattggttggatttgctcaggcttctggtcaaacacaagttcttttcatgttcatattggatttgttttacttcgttgctattatctactataagccctatctggaccgtccaacaaacataatgaatattttaattgctactgttactgtagttaattcctttctattcatgtttttttcggacttgtttaaccaaagctacaaagtggctgctattatgggatggatatttttcattatgaacgctgcattttcgttcattttactaatgatgatattggcattcgctggtatgatgcttttctcaaagaaccccgatctaagatttaaacctgctaaggacgatagaacttctttccaaaggaacactatgaaaccagaaggtactgttaatagatcagtagcgaacgagttgcttgcgttgggcaatgtggcaaaagaccatgacgacaattcagattacgaatcaaatgatactggtgtgaatgatgagctaaagcaagcacaggatgaaaccactcccacaaccgtaacatcaagtgatgataacaagcctacgttttcagagaaaatattaagtaaattctctaggcctaagaatgaaaacgcaagcacagatgctctgagagttgaagctccaaaacaacaaacgtttcctcacaacttaacgaatctttcacgagaaaacctatcaacattaggctctaaaccttatccaggacacacaagatcacagtctgatgcgcataatggactgatcaattcctttgaagaggaagatacaagttcaaataccgatccatttcacgactccactgaaggagaccttttagatacctcaagttcggacggaggatttaggtcgcaaaactatgttcgagatgacagcataaatagtttgggaaacaataaacaaccactgaggaaaccccctggattcttcgatgaaggatttatgtgagtctttacgatatacaaaagttctgctcctatcataaaaatttttaattttacaggtttttctcattctccttctaaccttctaaattctgtttttgtcagaagtttcccaagttttctttttcattaataacgttaaaacactttgtaccagtttgcttaatatgaatttttttaaaatagatagcttttgttatctttgtttctatgttgtaatatcccagtttgtcatatttttaatactcctcgtgtaacaacaaattaaaaaaaaataaatacttaaattaatcaagttaaataaactaatcgaatcaaacaaacaattt

SEQ ID NO: 1230 - DNA, 1265 bp, Saccharomyces cerevisiae
aaaagaaaatagtatcatagcacagaggcatgtcaacgtttgggaaactgttccgcgtcaccacatatggtgaatcgcattgtaagtctgtcggttgcattgtcgacggtgttcctccaggaatgtcattaaccgaagctgacattcagccacaattgaccagaagaagaccgggtcaatctaagctatcgacccctagagacgaaaaggatagagtggaaatccagtccggtaccgagttcggcaagactctaggtacacccatcgccatgatgatcaaaaacgaggaccaaagacctcacgactactccgacatggacaagttccctagaccttcccatgcggacttcacgtactcggaaaagtacggtatcaaggcctcctctggtggtggcagagcttctgctagagaaacgattggccgtgtcgcttcaggtgccattgctgagaagttcttagctcagaactctaatgtcgagatcgtagcctttgtgacacaaatcggggaaatcaagatgaacagagactctttcgatcctgaatttcagcatctgttgaacaccatcaccagggaaaaagtggactcaatgggtcctatcagatgtccagacgcctccgttgctggtttgatggtcaaggaaatcgaaaagtacagaggcaacaaggactctatcggtggtgtcgtcacttgtgtcgtgagaaacttgcctaccggtctcggtgagccatgctttgacaagttggaagccatgttggctcatgctatgttgtccattccagcatccaagggtttcgaaattggctcaggttttcagggtgtctctgttccagggtccaagcacaatgacccattttactttgaaaaagaaacaaacagattaagaacaaagaccaacaattcaggtggtgtacaaggtggtatctctaatggtgagaacatctatttctctgtcccattcaagtcagtggccactatctctcaagaacaaaaaaccgccacttacgatggtgaagaaggtatcttagccgctaagggtagacatgaccctgctgtcactccaagagctattcctattgtggaagccatgaccgctctggtgttggctgacgcgcttttgatccaaaaggcaagagatttctccagatccgtggttcattaaagatagaaacaaaacccctcaagagttatgtatatttatatacgcatgtatatgtattagtgcacgtaataaaacggcaacaaaaaacaaaaagttgacatatta

SEQ ID NO: 1231 - DNA, 1455 bp, Saccharomyces cerevisiae
tattacttggtcactaacccccaagtcatctctagcaatttaaatttcaattttaagaaaacctttatttatccaacgtgaacaagtactttcaagcacttctgcccaccgctatatcgtggaaaaatgtgtcaagctaccaatggcccgagtagagttgtgactaaaaagcataggaaatttttcgaaagacatctacagttgcttccctcttcacatcagggacatgacgtgaacagaatggcgataatattctactcaatctcaggactctctatatttgatgttaacgtttctgcgaagtacggcgatcatcttggctggatgcgcaaacattatatcaaaacagtgctggatgatacagaaaatactgtgatatctggatttgttggaagcttagtcatgaatatccctcacgcaacaacgattaatctaccaaatactctctttgcattgttgtccatgattatgctgagagattacgagtattttgagactatactagacaaaagaagcctggcgagatttgtttctaagtgccaacgacctgaccgtggctcgtttgtatcttgtttagactataagacaaattgtggatcttcggttgattcagacgatttaaggttttgctacatcgcagttgccattctgtacatatgcggatgccgatccaaagaagactttgatgaatacattgatactgagaagttgcttggctatataatgtcgcaacaatgctacaacggagctttcggtgcccacaatgaaccacactcagggtacacatcttgtgcgctgtctaccttagctttactctctagtttggaaaagctatcagacaagtttaaagaagacaccataacctggctattacataggcaagtatcaagccatggatgtatgaaatttgaaagcgaattgaatgccagctatgatcaatctgatgatggcggtttccagggaagggagaacaagttcgctgatacgtgttacgcattttggtgcttaaattcactacacttactaacaaaggattggaaaatgctatgccaaactgaactagtcacaaattatttgcttgatcgaacgcaaaaaacattaactggaggctttagtaaaaatgacgaagaagatgctgatttatatcacagctgtctagggagcgctgcgttagcattaattgaggggaaatttaatggagaattatgcatacctcaagaaatatttaatgattttagtaaaaggtgctgtttttgaagttcaaacagtaataagagtctatcgattacataaatgtgagcaagcgaaaaaaaaaaattggcattataaaccatcattttcgatgaaataatcaatcaacgtagataagctgatattatataattttggtctgttcgtgttgattttatcactgatggactttggcatacagatagtgacaatttcgttattgaa

SEQ ID NO: 1232 - DNA, 1172 bp, Saccharomyces cerevisiae
gcattgtacaactgtgctaaacagacttaaaaaagtaataattatgactactgataccactgttttcgtttctggcgcaaccggtttcattgctctacacattatgaacgatctgttgaaagctggctatacagtcatcggctcaggtagatctcaagaaaaaaatgatggcttgctcaaaaaatttaataacaatcccaaactatcgatggaaattgtggaagatattgctgctccaaacgcctttgatgaagttttcaaaaaacatggtaaggaaattaagattgtgctacacactgcctccccattccattttgaaactaccaattttgaaaaggatttactaacccctgcagtgaacggtacaaaatctatcttggaagcgattaaaaaatatgctgcagacactgttgaaaaagttattgttacttcgtctactgctgctctggtgacacctacagacatgaacaaaggagatttggtgatcacggaggagagttggaataaggatacatgggacagttgtcaagccaacgccgttgccgcatattgtggctcgaaaaagtttgctgaaaaaactgcttgggaatttcttaaagaaaacaagtctagtgtcaaattcacactatccactatcaatccgggattcgtttttggtcctcaaatgtttgcagattcgctaaaacatggcataaatacctcctcagggatcgtatctgagttaattcattccaaggtaggtggagaattttataattactgtggcccatttattgacgtgcgtgacgtttctaaagcccacctagttgcaattgaaaaaccagaatgtaccggccaaagattagtattgagtgaaggtttattctgctgtcaagaaatcgttgacatcttgaacgaggaattccctcaattaaagggcaagatagctacaggtgaacctgcgaccggtccaagctttttagaaaaaaactcttgcaagtttgacaattctaagacaaaaaaactactgggattccagttttacaatttaaaggattgcatagttgacaccgcggcgcaaatgttagaagttcaaaatgaagcctaagtatcacgctaattgaagttttttttgatcactccaataggcaaatctatagatatataaaaaatatagacaagactttttttta

SEQ ID NO: 1233 - DNA, 1936 bp, Saccharomyces cerevisiae
ttccttatattgtagacgtgttatttaaaaactacattttccatatctcgtcgccagaaacttctaatttggtaagccttccaataaatatgaaagaatcccctctcataacgttggttaaaagacattccgagacacattttgccaatatcaagtatgggtattatgtgttgataatatcattggtctatctcattggattggctcttttgagagctttcggaaggagaaccccatccagatcgtcgtcagctttcaaaaataagataatttatcggttgtatgatatagatcctgcaattcacttaggtatattgttttttgcagtcttgattccattttattaccattactctttgactacccaatctacggtctatctcaaaagattagggaggttgagttacgccttgatcccgctgaacctattcctcactttaaggcctaattggttccttaggaaaaattgcacctacactgattttataccgttccataaatggttttcacgtattatcaccgtgattggtttgcttcatgggattttcttcatcattaagtgggcgatagacgataatgtctctctaaagcaaaaattgattctgaaaactttcaattttgcgggattcataatatcaatattggtactttttttacttatttgctcgattgggccaatgagaagatacaactatcgtttgttttacatcgtacataacctggtgaacgtggccttcatcttactcaccccaatacactctaggccaggtgttaagttcccatttcttctactaaactgtaccctattattcattcatattatcaatagaatagtatttgcgaaatccttgatgattttgaataagaatgcgaattattcaaaaacaaatttagtccatgtaagattgcccagggctattcttccagattattttgaaccagggtcgcatattagaataagcccttacagaagaattaatcccctctattggttgctaccatcgcatccatacacaattgcgtctttggcagaagacaattcaattgatcttattataaaggaaacctctacagccgagccaggtagccagatagagtctcttcgtagtaatccaaaatcctttcatttagatcaagaaaaaacctatactttgattaatagttatcctccctctgtacccgaagaatgttattctcaaggcacgaatatagctattatatgtggtgggtctggtatatcttttgccctaccactatttaggcatttttttaacaaggagaatgtaaaatacttgaaaatgatctggctgataaaagattactctgaatatgaacttgttttggattatctcaagacaaatgggttgacttttgagaaaaaactctcgaataataagaggatttcagtatttattagtggagaatacacggcggaaacacggttagacgaaattacgaccaatatcgacgatgaaaactcagaatatgaaatgggatctttcaacaatgaagacgaagacctttcgatttctaatttcaattcagaaaatgcggacagcaatgacaatacgccagagacaagtcatagccccacaaaagagaatggaagcatgatcgaggtaaaatccaaacacagttttactctttccaacgaattgaagagcttcaacaatgaaagtgcacaagtgaaccaaaatgaaacatggttgttttcatgtggtcctccctcgttattacaattgtctaaaaaatattgtaacgatgaaaggatcaactttgtctgtgagacttacggattatgaggggaaaagaaaagaataataatgtcttacgcaatatgctcggaaatgatattccacgacattagatgctaatttatagtatatagaaaacaaaaaatacatatctgttttttaatgacctttagtttatatgc

SEQ ID NO: 1234 - DNA, 861 bp, Saccharomyces cerevisiae
tgataatcagtgtattcacagaatggtcgtaattaacggggtcaaatatgcctgtgaaacgtgtatcaggggtcacagggcggcgcagtgtactcacactgatggtccgctacagatgatcagacgcaagggaagaccatcgaccacatgtggccattgtaaagagctgagaagaaccaagaacttcaacccatccggtgggtgcatgtgtgcctctgcacgacggccagctgttggcagcaaggaagatgaaacacgatgtcgttgtgatgagggtgaaccttgtaaatgtcataccaagaggaaaagcagccggaaatcaaagggagggtcatgccacagaagggcaaatgatgaagcagcgcatgtcaatggtctcggtattgcagatctggacgttcttttgggcctaaatggtcgctcgtcggatgtagacatgacaaccacattgccgagtttgaagccacctctgcaaaacggagaaattaaggccgacagcattgacaatcttgatttggcttccctcgatccgcttgagcaaagccctagtatatctatggaacctgttagtatcaatgaaacaggaagcgcatatacaactacgaacacagcactaaacgatattgacattccattctccatcaatgagttgaacgagctatacaaacaagtatcttcgcataactcacattcacaataatgcatctggacatctatataaatatacatatacatatattggcggttgtttgttctcccggcaagctggcagtcgggccgagattcggataaatttttccattcgtatacatatacatagatatatacaattataaaatttgtccaaggctgcacaggata

SEQ ID NO: 1235 - DNA, 1577 bp, Saccharomyces cerevisiae
ttttttttttcttctgcgctgttaacttaccactaaacctgtttccatttttaatggtagtcctgtttattattccatttttagaattgtatgtaccttggacgacattttttggcaatgacatcgaaagcactgtttgataccaagatcttaaaagttaacccgctatcaatcattttctcccctgatgcgcatatagatggttccttaccaacgataacagatcctgaaacggaagcagcgctagttgaagcggcgaggataataagagatacagatgagactgtggcttttccaaccgaaactgtttatggtcttggaggttctgctttaaatgataattcagtgcttagtatatacagggccaaaaataggcctagtgacaatcctttgattacacatgtttcatccattgatcaacttaacagaaaggtctttaatcaaccgcatctatcaggtacatccttgtttgataacataccctcaatctatcgcccattaatttcaagcctttggcctggcccattaacaattcttttgccagttccatcttcagagcatagtgcattatcaaagttaacgaccgcagatcagcctacgtttgcggtacgcatacccgctaatccagtggctagagcactgattgccctgagcgatacaccaatagctgctccttcagcgaatgcgtctactaggccatctcctactttagcgtctcatgtttatcatgatctaaaggataaaattcccataattcttgatggcggagcgtgcaaggttggtgtagaaagtactgttgttgatgggttatgtaatcctcctacgctactgcgacctggcggttttacatatgaagaaattgttaaattgggtggtgaagcttggtctctttgtaaagttgagaataagaaaacagttgaaaagggcgaaaaggtaagaacgcctggtatgaagtatagacactattccccttcagctaaagttgttttactagttcctcattgcgaaggcgatggcattcttaagggcgttgataggatggaaagattaaagaggttaatcgaaacggaattaaaagccaacagtaatataaaaaaaattgcgattttaacttccctaaaattacgtgattccgacttacaatctaagatctttaatgaacccgatttttcttcgaaaactttcatcatcgaaagacttggccaatctggtgaagaaatacagactaacttgtttgcagctttaagaaaagtggatgaaaatgataaagtagacctaatatttgtcgaaggtataaatgaggaaggagaaggattagctgttatgaacagattgcgaaaggcggctgcaaataattgtatacagttttaaataaaactgtgattaacttttgaaaatcataaccactgattacggagattttatatctagtccggaaaaagaaggaaagaataaaattttatattgctttgtatatacgaaaagtcgcccatacatgtttatcttagtatccgttgtaaatatatgtacatatatacatctacatatgttcccattaattagtacatttacctcaa

SEQ ID NO: 1236 - DNA, 1538 bp, Saccharomyces cerevisiae
gggttttcacgggtagtgggcacaatgtttggattaaataaagcatcttcgacacctgcaggtgggctctttggtcaggccagcggagctagcactggaaacgcgaatactgggttttcgtttggtgggactcaaactggacaaaacaccggcccaagtacaggtggactatttggcgctaaaccagccggatctacaggaggattaggtgcatcatttggtcagcagcaacaacaatctcagacaaatgcatttggaggaagcgccaccaccggagggggccttttcggtaacaaacctaacaatacggcgaacactgggggcgggttatttggcgctaattcgaacagtaattctggcagtttgtttggttccaacaatgcacagacgagtcgtggtttgtttggtaataataacactaataatatcaataatagtagtagtggcatgaataatgcaagcgctggactatttggctctaaacctgcaggaggcacttctttgttcggtaatacaagcacctcttcggcccctgcgcagaaccagggcatgtttggtgcaaaaccagctggtacatctctattcggcaataatgcaggtaatacgaccactggtggagggttatttggctccaaaccgacaggagcaacgtctttgtttggttcatcaaataacaacaacaataacaataatagtaacaacatcatgagtgcgtcaggcgggctatttggtaatcagcagcagcaactgcagcaacaaccacaaatgcagtgcgcattgcaaaatctatctcagctccctattaccccaatgacacggatttccgaattaccacctcaaatacgtcaagaaattgaacaactagatcaatatattcaaaaacaagtgcagatctcgcaccatttgaaggccgatacaatcgatcatgatgaattgatagattccattcctcgtgatgttgcatacctactgaagtcagaatctgcaacaagtcaatatttaaagcaagatttgaagaaaatatcctcatttaaatcgctaatcgatgaggaccttctagacacgcaaactttttcggtgctcttacagcaactattaactccgggaagcaaaatttcttctaatgacttagacaaattctttcaaaagaaaattcatctctacgagaagaagttagaggattactgccgtattctctctgatatagaaactgcggtaaatggcattgatacagatttatttggcgccccaaataaccctaattctacagctatcacagcagatctaggttcatccgaagcagagaacctactgcagttgaagacaggcttagctgccatagtctctactgtcattgaggaattcacactgtttatggatatcgctgagagaatcgccgtgttacatcaaaaaacgaaaacactggcatcattgagcatatgagtaaatcgccctgaaagtttatatagtgcgtataacaagtacaaatgtcttgtacaaatgtaatttatactaaatgcaatagaatataacatcaa

SEQ ID NO: 1237 - DNA, 1357 bp, Saccharomyces cerevisiae
tggaggcagcgttctgtcaatcacagattatagtttatttatacttagtcaaaaatgaggtttaggagttcttcccatagcttaaaacatgttgacagagaattaaaggagttgattaattcgtccgagaatgccaataaatgcggtgaatgtggtaatttctacccaacttggtgctcagttaatttgggggttttcctttgtggtaggtgtgcctctgttcatagaaaagttttcggtagcagagacgacgatgccttttctaacgttaaatcactatcaatggatagatggacaagagaggatatcgatgaattagtgagtcttggaggcaataaggggaatgctcggttctggaatcctaaaaatgtcccttttccttttgatggagatgatgacaaagccatcgtggagcattacattagagacaagtatattttgggtaaattcaggtatgatgaaataaagcctgaagactttggatccagaatggatgattttgatggggaatcggacaggtttgatgaaagaaatagaagtaggagcaggagcagatctcattctttctataaagggggccataataggtctgactacggcggttccagggactcattccaaagcagtggaagcagatattctaggcaactggcagaactcaaggacatgggtttcggtgatacaaacaaaaatttagatgcattatcgtccgctcacggaaatatcaatagagcaatcgattatctagaaaaaagttcaagttcaagaaatagtgtatcggcagcagcgacaacatcaactccgcccctgcccaggagacgtgcgacaacaagtggcccacagccagctatttttgatggtacaaatgtaatcacgccagattttacttcaaattcagcatcttttgtacaagcaaagccagcagttttcgatggtacccttcaacagtattacgatcctgctaccggaatgatatatgtagatcagcagcaatacgccatggctatgcaacagcagcaacagcaacagcaacagcttgctgtcgcacaggctcaggctcaggcacaggcacaggcacaggctcaagttcaggctcaggctcaggctcaggcccaggctcaggctcaagcacagcagatccagatgcaacagcttcagatgcagcaacagcaacaggcgccattatcttttcagcaaatgtcgcaaggaggaaacctgccacaaggttatttctacacacaataaaaataagatacattgccgctgctccgcattacatatcatatagagtgacactaagtaattaaatgacactaagtaacgaaagatatctgtaaacaacgactatataccagaa

SEQ ID NO: 1238 - DNA, 698 bp, Saccharomyces cerevisiae
atctagatttaaaatcatattactacagttctacagttatacaaataacaaacaatagaaaaatgtttagacagtgtgctaagagatatgcatcttcattacccccaaatgctttgaaacctgcatttggcccaccagataaagtggcagctcaaaaatttaaagaatcattaatggccactgaaaagcatgcgaaggacacatctaatatgtgggttaaaatctcagtttgggtcgccctaccagcaattgctttaacagctgtgaacacatactttgttgaaaaggagcatgctgagcatcgtgaacatttgaaacatgtgccagactccgaatggccaagggattacgagtttatgaatatcaggtctaagccttttttctggggtgacggtgataagacattattctggaatcctgttgtcaacaggcacatcgagcacgacgattaattaattgattaagtgagaataaacttttcgaaaaatttttatttatgataattttactaattcttacttatttcttttatattcgataaaaaaaattcaaaataaaaaaagattaatcctttgataggaactaaaggtactaggtattttgggcggcgaagcatcattccgttcttaaacatctatatatatataattatattgcaaatgtataagcatttaaaaacataaacatgcacctatgaa

SEQ ID NO: 1239 - DNA, 8145 bp, Saccharomyces cerevisiae
ctctgactgacaccaataactcctacagtgatgacagctatcttaaactgggaagatatatcccctgttttagagaaaggcacccgcgaatcacacgtgtctaaaagagttccctttttgcaagatatatcacaattagttcgtcaagaaacattggaaaaacctcaattatctgaaattgctttcgttttattgaataccttcacgatttacgaagacaataggtctaaaagtttggtaacttcaatattgcttgacatcttaaatctagagccatgtctcctagaaaactttatccgattcatttccgacgtggtcatcagtaatccggctaccaaagcagtcgctgattaccttaatttgttagattggattaattctttcttgatttttgtgtcgcataattctaatttatttgaagagtacattccaaaattgttggtcgcccattcttatgcaacgttcggtgtggaaactattcttgacaatcaagaagaaggcaagaaatcccaagataagcagaaccagcatagaaagagaattcgttattgcattttccaaacaacggtcaaagcattccttaagtgcttgaaggataatgacgacagtatttccttcatgaagatttcaattaaaactgtactggagagctactctaagctgaagataaccagtgttggagtagttatgataatgggtgcactaactcaggctgcacttcagttattatcgaggcaaccagctctgcactccgttttaaaggaaaattctgcagagaaatattgcgaatatttgggcaaagaagtgtttttaggcaaaaacccaccatcttccttttgcttagagattggtttgaagccatttttaaaagaatttgtttcacaagagttattcattaagtttttcatccctaatattgaaaaagcagttttaagatctcctgaggttggtttttcgattttatctgagttatatgctggtgtttctcctgaaaaagtaaatctcttaaatgcctttgcttcctcgaaactgattaatcaatacttctcgtcatttaaaagctcaaaagaggtagttagatccgtctcgcttcagtctatgataatcttattgagaaaaatttccaatactgacactaccttggaagatttgaccaagcttattgacgaaatatttaagaacatcaaatcgaacttaaatgcagattacaaatcacttatttccaaaattctcatagaaatacccttaacgcactatgaggtttcagaaaaaatctgcaaagggctgtccccatatattggtaaagaaggtaatgaagcagccttgactctaatgcttaacgctttttttgttcattattttagtctgggcaaacctattgaagacttggataaaattatatcagctggttttgcagataaaaaacctgctttgaaaaaatgctggtttgccgcatttttgaacaattccaatgctgcctctgaagaggtgattttaaactttatagacggttgtttggaatttgtgaaagactccatcatacattatcagactcacgggcatgcatgtattctagcatcaattgaatttacaaacaaaattttggcattggacaatactgagctaaatgatcgtgttatgcagctcatagaaacccttcctgaaaattcttcgataggtgatgctatcttaactgctgcattatcaacagagctatccatcgaaaaccgtattcatgctgttaatttactacaagaattgttctacaagaaacccgaatttattgggtttagcgtgattgatgcaattgaaaggagaatgcgtgtccaagaattaatacctcaacaaaatacatcctttaaatatgtcacttctgtactactggccattacgtctgagttacctgacaaggaagcctcgataaaggtattaatcaatgctctggtcatagcgcaatggaatattttcaacattaagaatggctgggctggtttagttttacgtgcaaggcttgatccagctgaagttgtcaaagaacatgctagcgttatcatggagaagattcttgaaatcacaggtagttgtgaatggatagatacaatttatggtgcatgcggtttgcaagcagctgcctatgcagcatttattcagcctaatgagttcacaccgatcctttgtaagactatcgaagcagatttaaccgcggatgatttctcacgtttatctgaagaggacttcgaaatttttgcaggagaggaaggtgttctggtggttgacgtcctggaagaaagcatgaataagaaactttccaataaaaattctaaagagtacgaaactctaatgtgggaacaaaaaataaggaaggagcaagccaaaaagaatgtgaaaaaactttcaaaagaggaacaagagctcgttaatgaacagttagcgaaagaatctgcagttagatcacacgtttcggaaatttccactcgtttaaagcgtggtattagattggtatctgaactttccaaagctgcttgcttagtccaaaatggcatcgctacttggttccccttggcagtcacaaagcttttgtacctatgctcggaaccaaatatttcaaagctaacagaggatgtaaataatgtgttcttgcagctttctcaaaatgtctccgagagattaggtaatatcagacttttcttaggtttggcgactttgcgtgtgcacaatgctaatggcatctcgcaagattatttacaagaaccactggttgaattacttacaagagttctttttaggatcaagttcgtctccaaccaagcagcaatagattccatcagtttgacatatattttaccattgttgattaatgttttagaaaagggtaaggcgattgcattaaagaatgcggacaagcctgttgttaaggctgagtttgttgaagaagatgaagaagaagaacatctgttactggccatggaaattatttctgtacacgctgaagcttttgaggatccttccattccgagaatttccattgttgaagtgttactatctcttctatctttaccctcaaaagcgaagattgctaaagattgtttcaacgctctgtgccaaagcatatctgttgcaccaaatcaagaagaccttgatatgatactatcaaatttactatcaccaaatcaatttgtccgttcaacaatattagaaactcttgataacgaattcgaattagaaccttttatgaaatattcacctgaagttttcatttgcagatttgattcggatccttccaaccgcgagattgcagatttcatttgggagttcaacaaatttgtagtcaacgatgaattactaaaaagcttattcccactattcaatcaggatgatagtggcttgagattatttgcggcaaacgcgtacgcatttggtgcggtaagtctgtttacctctgaagagaactcctcgaaagattacttaaatgatttgctgaacttttataaagaaaaggcaaagccattggagccaattcttgatcaatttggcttggttcttgtttctgcgagtgaacaaaaagatccatggcaaggaagaagtaccgttgctattacattaaaaatcatggctaaggctttttctgcagaggatgatactgtcgttaacattataaaatttttggtcgatgatggaggtctagtagacagagagcctattgttcgtcaagaaatgaaagaagctggtgttgaattaattacgttacatggctcacaaaactcgaaggatttaattcctatatttgaagaagcattaagctccagtacggacagtgccttaaaagagaacgttattattttgtatggtacattagcaagacatttacagcaaagtgatgcaaggattcacacgatcattgaaagattgctttcaactttggatactccttctgcggatattcaacaggctgtgtcggcttgtatagcaccactagttttccagttcaaacaaaaagttggtgattacttgggtatcctaatggagaaactgctgaatccaactgttgcttcttctatgcggaaaggtgccgcttggggtatcgctggtttagtgaaaggttacggtatctcggctctctcggagtttgacattattcgcaacctcatcgaagctgcagaagataaaaaggagccaaaaagacgtgaatctgttggcttctgctttcaatatttgtctgaatctctaggaaagttttttgaaccatatgtgatagaaattcttccaaatattttaaagaatttaggggatgctgttcctgaagttagagatgcaaccgctcgtgccactaaggctataatggcgcatactacaggttacggtgttaaaaagttaattccagttgctgtttctaatttggatgaaattgcttggagaactaagaggggctctgttcaattgttgggtaatatggcttatttagatcctactcaattgtcagcttctttgtccaccattgtcccagaaattgttggtgtattgaacgactctcacaaagaggtgcgtaaggccgctgatgaatccttgaaaagattcggtgaagttatcagaaatccggaaattcagaaattggtgcccgtacttttgcaagctatcggtgatccaacaaaatacactgaagaggccttggattcgttaattcaaacacaatttgtccattatattgatggtccttcactagcactaattattcatattattcatcgtggtatgcatgatagatctgccaacattaagaggaaagcatgtaagatcgtgggcaatatggccattttggttgataccaaagatctcatcccatatttacaacagctgatagatgaagtggagattgctatggtggatccagttccaaatactagagccacagcagcacgtgctttgggtgctttggtagaaaggttaggtgaagagcaattcccagatttgattcctcgtctactagataccttaagtgacgaatcaaaatctggtgatcgtctcggttctgctcaagctctagctgaagttattagtggcttgggcttgaccaagttggatgagatgttaccaaccattttagctggtgtaaccaattttcgtgcttatatcagggaaggattcatgcctttgctgcttttccttcctgtttgttttggatcacaatttgctccatacattaatcagattattcagcctattctttccggattggccgataatgatgaaaatattcgcgatactgctttgaaggctggtaaattaattgtcaaaaactacgctacaaaggccgttgatttgttgttgcctgaattagaaaggggtatgttcgatgaaaatgacagaattcgcttatcttctgttcaattaaccggagaactattgttccaagttactggtatttcctccaggaacgaattttctgaggaagatggtgatcataatggtgaattctctggtaaattggtcgatgtacttggccaagaccgtcgtgatagaattttagccgcattatttgtatgcaggaacgacacttctggtatcgtacgtgctacgacggttgacatttggaaggcattggttccaaatactccaagagctgtgaaagagatccttccaacattgactggtatgatagtcactcacttggcttcatcatccaatgtattacgcaacattgctgctcagaccttaggtgatcttgtccgtcgtgtaggtggtaatgctttgtcccaactgttaccaagtttggaggaatctttgatagaaacatcaaactcagattcgagacaaggtgtttgtattgctctttatgagttaattgaatcggcttctacggaaacgatatcacagttccaatctaccatcgttaacattattcgtacggcattaattgatgagtcggctactgtcagagaagcggctgcattatcttttgatgtattccaagatgttgtaggaaaaactgctgttgatgaagttttaccatatttgttgcatatgcttgaatcttctgataattctgactttgctttgttaggtttacaagaaattatgtcgaagaagtccgacgtaatcttcccaattttaattccaaccctattagcccctccaatagacgccttcagggcttctgctttaggttctttggcggaagttgctggctcagccttatacaagcgtttatcaattataatcaacgcactagtggatgcaatcataggtacttctgaagatgaatcgaccaagggtgcattagaacttgcattagacagggtattcttatctgtgaatgatgacgaaggtcttcacccattacttcaacagattatgtcactactaaagagtgataatatagagaaacgcatagctgttttagaacgtttgccaaatttcttcgataagactgttcttgattttgatgtctatattccgaactttgtctctcacgcaattttatcattagatgatgaagatcaaagggttgttaatggtaacttcaatgctttgtctactttgttgaagaaggttgataagcccaccttagaaaaattagttaagcctgctaaacagtcattggcattaacaggcaggcaaggtcaagatgtcgctgcatttaagcttccaagaggccctaactgtgttttgcctattttcttgcatggtttgatgtatggttcgaatgatgaaagggaagaatctgcattagccattgctgacgttgtttcgaagacccctgccgctaacttgaagccatttgtgagcgtaattactggtccattaattcgtgtcgtgggtgaaagatttagtagtgatatcaaagcagcaattttatttgcacttaatgtgctattcattaagattccaatgttcttgaggccttttatccctcaattacaaagaacatttgttaaatccttgtctgacgctaccaatgaaacgttacgtctccgcgccgcaaaggctcttggtgccctgattgaacatcagcctcgtgttgaccctctagtcattgaactggtgacaggtgccaagcaagccacagatgaaggtgtcaagactgcgatgcttaaagctttactggaagttattatgaaggctggttccaaattaaacgaaaattctaagacaaacattgtcaatttagttgaggaagaaatgttgggtagcaatgacaaattggcagttgcttacgctaaattaatcggatcgttatcagagattttgtcgaacgacgaagcccacaagatattgcaagacaaggttttgaatgcagatctagatggagaaaccggtaagtttgctattctgactttgaattcctttttgaaagatgcaccaacacatatattcaatacgggcttgatagacgaatttgtaagttacattttgaatgcaatccgttcccctgatgtttacttcggagaaaatggtaccattgctgctggtaaattacttttattagaaggagaaaagaggtctccatttgttaaaaaggatgctgcagaaccattcaaaattggcgatgaaaacatcaatctgttaattaatgagttgagcaaagctgtcttacaaccagccagtaattctacggatgtaagaaggttggccttggtggttataagaacactagccagattcaaatttgacgagtgcattaagcaatacttcgatgtagtaggaccatctgtattttcttgcttgcgtgatcctgttatcccaattaagctcgcagcagaaaaagcatatttagctttgttcaaattggttgaagaagatgacatgcatactttcaacgagtggtttgctaaaatttcagatcgcggtaacagcatcgaaactgtcacaggtactacaattcaattacggtctgttggggactataccaagagggttggtaaaaggttagcaaatgtcgaaagagaaaggattgctgccggaggagacgcggaaacaatgtttagtgacagatttgaagatgaaagagaaatatgggctgtcggaggtgttgaattaaccactgatatttgaagaaaattcaatgtggtaacctcgttactttttgtatttgatatattattctcgttatataatacataccacataatgatataaaagacaaagata

SEQ ID NO: 1240 - DNA, 1465 bp, Saccharomyces cerevisiae
tgcacataaatacttcatttcttgataaggaagtataatattgctcctaagaagagtttgaaatgagcgatgttctatctcaatataaagggtgctcagtcagagatttacccacacccaatttcgttattaatgaagaaaaatttgataagaattgtacgacaatgttgaacaacgttgaaaagctcagccaggaatgtggcgtaccaatcaaatttcgtgcacacgtaaaaacgcataagacagcaaagggaactttgaaacaattgggccacggacttccattggctaaacgcactacaagagccatattagtatcaactttgaaagaagcagaagaacttcttaattatcaagatagacaatgttcggattatattgacgatataacatatagtttaccctgttgcgttccagagtttattcctcttttgagcaatttgtcaagaagggtgaataattttcaggtttttgttgataacattgaacacttggagaatttaaagaatttcggtaggcctgcttccggcaagaaatggtcggtttttatcaaggttgatatggggactaagagggcaggtcttgctttcgactctccagaatttttgagtcttttaaaaaaactgacttcctcagaaattaaagaagtaattgagccatatgggttttatgctcatgccggacacagctactcttcaacctcgatcaacgacactcagaatcttttgatggaagaagtgaaagcagtcaattctgccgctaaagttttgtgctctgtggatcctcagtttgatccttctaaattaacactttctgtgggcgctactccgacttccaattctttgaaactcgataataaaagtacccttgttaaattcattactactcaattagttagtacgcttgaaatccactgcggtaattactgcatgtatgacctgcaacaggtggcaacaggctgtgtccaagatcacgaattgtctggttttgtattaggaacagtactatcatcttacccttctagaggtgaattgttgagtaatacaggtgtaatgtgtctaacgcgagaagcatcctcaataaaagggtttggaatatgtgctgatttggaacatgtgttaaaatccgagagtttcagtagggaatggtatgtagcaagggtctctcaagaacacgggatactgaggccaataagaaactggaacgaaactactccattaaaattaggcagcaaaattgccgtccttcctcaacacgcttgtatcacaatgggacaatttccatattatttcgtggtaaacagcgaaggcattgtcaacgatgtttggttaccttttcagaaatggtaagctctcttttgtcgttggttatcactctcatcaaagcatctctgtgtctatgtaattgtgtatctatttataaatagtaactaagaggtaaggttgtacacaggttggtctaaaca

SEQ ID NO: 1241 - DNA, 758 bp, Saccharomyces cerevisiae
atgtcatacggaagagaagacactacgattgagcccgacttcatagaaccagatgcacctttggctgcttccgggggtgttgctgacaacataggcggaactatgcagaattcaggcagcagagggacgctcgacgagactgtgctgcaaacactaaagcgagatgtggtggagattaattccagactgaaacaagtggtatacccgcatttcccctcattctttagcccctctgatgacgggataggggcggctgataacgacatttcagccaattgcgacctgtgggcgccccttgcgtttatcatattgtattctctatttgtatcgcatgcgcggtcgctgttctcgagcctatttgtgtctagttggttcattttgctggtgatggcattgcatctgagactcaccaagccacaccagagggtgtcgctgatttcgtacatctccatttccgggtattgcttattcccacaagtgctgaatgccttagtctcgcagatactacttccattggcctaccatattggaaagcaaaatcgctggattgtgagggtcctgtcgctcgtgaaactggtggtcatggcgctgtgcctgatgtggtctgtggccgccgtttcgtgggttaccaagagcaagaccattatcgagatataccctctggcactctgtctttttggcatggcctggttgtcaactattttataacactagttacatatgtataaaacccaatatcatggacatagaattgccta

SEQ ID NO: 1242 - DNA, 1691 bp, Saccharomyces cerevisiae
tatatatttggtttggttatatctttaagaacttatttctttttcttatttttccattccactaagttaaaccctgcagttgatacagacattgaataggacaaccgatcgttactatcatgactttacctgaatcaaaagacttttcttacttgttttcggatgaaaccaatgctcgtaaaccatccccattgaaaacctgcatccatcttttccaagatcctaacattatctttttgggtggtggcctgccattaaaagattatttcccatgggataatctatctgtagattcacccaagcctccttttccccagggtattggagctccaattgacgagcagaattgcataaaatacaccgtcaacaaagattacgctgataaaagtgccaatccttccaacgatattcctttgtcaagagctttgcaatacgggttcagtgctggtcaacctgaactattaaacttcattagagatcataccaagattatccacgatttgaagtataaggactgggacgttttagccactgcaggtaacacaaatgcctgggaatctactttaagagtcttttgtaaccgaggtgatgtcatcttagttgaggcacattctttttcctcttcattggcttctgcagaggctcaaggtgtcattaccttccccgtgccaattgacgctgatggtatcattcctgaaaaattagctaaagtcatggaaaactggacacctggtgctcctaaaccaaagttgttatacactattccaacgggccaaaatccaactggtacttccattgcagaccatagaaaggaggcaatttacaagatcgctcaaaagtacgacttcctaattgtggaagatgaaccttattatttcttacaaatgaatccctacatcaaagacttgaaggaaagagagaaggcacaaagttctccaaagcaggaccatgacgaatttttgaagtccttggcaaacactttcctttccttggatacagaaggccgtgttattagaatggattccttttcaaaagttttggccccagggacaagattgggttggattactggttcatccaaaatcttgaagccttacttgagtttgcatgaaatgacgattcaagccccagcaggttttacacaagttttggtcaacgctacgctatccaggtggggtcaaaagggttacttggactggttgcttggcctgcgtcatgaatacactttgaaacgtgactgtgccatcgatgccctttacaagtatctaccacaatctgatgctttcgtgatcaatcctccaattgcaggtatgtttttcaccgtgaacattgacgcatctgtccaccctgagtttaaaacaaaatacaactcagacccttaccagctagaacagagtctttaccacaaagtggttgaacgtggtgttttagtggttcccggttcttggttcaagagtgagggtgagacggaacctcctcaacccgctgaatctaaagaagtcagtaatccaaacataattttcttcagaggtacctatgcagctgtctctcctgagaaactgactgaaggtctgaagagattaggtgatactttatacgaagaatttggtatttccaaatagagaggtaaatacgttggaagaatatatataaggtgaaaaaaggacgtacgtatttttgtattgcttaaa

SEQ ID NO: 1243 - DNA, 3328 bp, Saccharomyces cerevisiae
cacgggactaaaaggtaaaaagttcagctattccaactttactcctttctgatattgcacctttcgtgaactggcttcgtgtatttaagtgaatatggaagagctgaatattgattttgacgtatttaagaaaaggattgaattgttgtattccaagtacaatgagtttgaaggttctccaaattcgctgctgtttgttttaggttcgtccaacgctgaaaacccgtaccagaagacgaccatattgcataattggttgctaagttacgaatttcccgctactttgattgcattagttcccggaaaggttattataattactagttctgccaaggccaagcatttacaaaaggcaattgatctatttaaagaccctgaaagcaaaattacgctggaattgtggcaaagaaacaataaagaaccagaactcaataaaaagttatttgatgacgttattgccttaatcaatagcgctggtaaaacagtgggtatccctgaaaaggactcttaccaaggtaaatttatgactgagtggaacccagtatgggaagcggctgtgaaggagaacgaattcaatgtcattgatatttcgctgggtctttctaaagtttgggaagtgaaggatgttaacgaacaagccttcctgtccgtttcaagtaaggggtcggacaaatttatggaccttttatccaatgaaatggttcgggcagttgacgaggagttgaaaatcaccaatgccaagttatcagacaaaattgaaaataaaattgatgatgtgaaatttttgaagcaattgagtcccgatttaagcgcattatgcccaccaaactacaaattcaactttgatttattggattggacctattctccaatcattcagtccgggaaaaagtttgatcttagggtttctgcccgttctaccaatgatcagttgtacggcaacggttgtattttagcttcatgtggtattcgttacaataattattgttctaatattactaggacctttttgatcgatccatctgaagaaatggccaacaactacgattttctattaactttgcaaaaagaaattgtaactaacattctgaagcccggccgtacaccaaaagaagtttatgaatcagtaatagaatacatcgaaaaaaccaaacctgaactagtgcccaatttcaccaaaaacattggttcattgattggtctcgaatttagagattctaactttatattaaatgttaagaatgattaccgtaaaatccaacgcggtgactgctttaatatttcgtttggtttcaataatctgaaagattctcaaagtgctaacaactacgctttacaattagctgatacggttcaaattcctctcgatgaaacagagcctccacgcttcttaacaaattacaccaaagccaaatcccagatatcattttatttcaataatgaagaagaagacaataataaaaagaaatcttcacctgccaccaaagtccctagtaaaccagacagaaattccaaaattttaagaacaaagttacgtggcgaagcccgtggtggtgccgaagacgctcaaaaggagcaaattcgtaaagaaaaccaaaagaagctacacgaaaaattggaaaagaatggattactcagatttagtgctgctgatgccaatggcccagatagtgaacctcgtcaatacttcaaaaaatatgaatcttatgttcgggattcacaactaccaaccaatattcgtgatctaagaattcatgtcgactggaaaagccaaacaattattctacccatttacggtaggccagtcccatttcatataaattcatataagaatggttctaaaaacgaagaaggcgaatatacgtatttacgtttgaactttaattcaccgggatcttctggtggtatttctaaaaaagtggaggaattgccgtatgaggaatcagcagacaatcaatttgtacgttcgattacactaagatccaaagatggtgaccgcatgagtgaaacctttaaacaaattgcagatttgaaaaaagaagccacaaagagagagcaagaacgtaaggcgcttgctgatgttgttcaacaggacaaattgattgaaaataaaactggaagaacgaaaagactggatcaaatttttgtgaggccaaatccagatacaaaacgtgtacctagtactgtctttatccatgaaaatggtatcagatttcaatccccactaaggactgatagcagaatagacatattattctcaaacattaagaatctaatttttcaatcttgtaaaggtgaattaattgtcgtcattcatattcatttgaagaatccaattttaatgggtaaaaagaaaatacaagacgtccaattctatcgtgaagcttctgatatgtccgtcgatgaaactggaggtggaagacgaggtcaatccagattcagaagatatggtgatgaggatgagctggaacaagaacaagaagaaagaagaaaacgagctgcgcttgataaagaatttaagtattttgcagacgcaatcgcagaagcatcaaacggtttattgacggtggagaatacatttagagatttgggcttccaaggtgtcccaaatagatcggcagttttctgtatgccaactacagattgtttagttcaattgattgaaccaccatttttggtgattaacctagaggaagtcgaaatctgtattttagaaagagttcaatttggtttgaaaaacttcgacatggtttttgtttataaagatttcaataaacccgtcactcatatcaatacagttccgatcgaatctttagatttcttgaagcagtggttaacagatatggatattccttacactgtctcaacaatcaatttgaattgggcaactattatgaagtcattacaagatgatccatatcagtttttcttagatggtggttggaattttctggctactggttcagatgatgaagcatctgatgaaagtgaagaagaagttagtgaatatgaggcttcagaagacgacgtaagtgatgaaagcgcattttctgaagatgaagaaggatcagaggtggatgacgatattagtggtgatgaaagtgaggactatactggcgacgagagtgaggaaggtgaagactgggatgaattagagaaaaaggctgctagggctgataggggtgcaaactttagagattagactttataacacttactgggtttcaccagcaagaccttgatctgacagaaaattactcttatgtatctgaaaaataatgatggtatttaggcatagtatttatcaatgctaagaaatgtaaatgga

SEQ ID NO: 1244 - DNA, 801 bp, Saccharomyces cerevisiae
aaccaagcatattgttttccaagaatgagcaacgaagattacggatacgactacgattatttatttaagatagttcttatcggcgactccggtgtgggtaaatctaatctgttgtcgagatttacaaccgatgaattcaacattgaatccaaatccacgattggcgtggaattcgctacaagaaccattgaagttgaaaacaagaagataaaagcacagatttgggacacggcaggtcaagaacgttacagggccatcacgtctgcgtactaccgtggtgctgtaggtgcacttatagtgtatgatataagcaaatcaagttcatacgaaaattgcaaccactggcttaccgaactgagagagaacgcagatgacaacgtggctgttgggttgatagggaacaaatcagatctggctcatttaagagcagtaccaaccgatgaagcgaaaaatttcgcaatggaaaaccaaatgttatttactgagacaagtgctttaaatagtgataatgtagataaagcatttagagaactgatcgtagccatcttccaaatggtaagcaaacatcaagtagacttaagcgggtcgggtaccaacaacatgggctctaatggcgctccaaagggtcctaccatcagcttaacaccggcaccaaaggaagacaagaagaaaaaatccagcaactgttgttaaaaattttgtgccctactaaggtcgcatggtttcatgcatattctgtctacatataacccccgttaataatgcttttataaatataatcaattacatataccttcccaa

SEQ ID NO: 1245 - DNA, 1209 bp, Saccharomyces cerevisiae
agacgatatggtaagagtaaagcaaaggaaccgtcatgtcgtttactgctccttcagatcccgtcaataaaccgacaaaagtgaaggtatcacagttgtgtgaactatgtcattcaagaaaggctctcattagaagacccaaaaacctgtctaaactttgcaaacaatgcttctgcctcgtgttcgagacggagatccataacactattgtagcaaataacttgtttcagaggggagaaaaagtagccgtgggggcctctggtggtaaagactccacggtgttagcgcatatgctgaagcttctgaatgaccgttacgattacggcattgagattgtactgttgagtattgacgaaggaatcatcggatacagagatgattccttggccacggtgaaaaggaatcagcagcagtatggccttcctttggagattttttcctttaaggacctctatgattggacaatggatgagattgtatccgttgctggtataaggaacagttgcacgtattgtggtgtttttagaagacaatcattggaccgtggtgctgcaaagctgggcatatctcacgttgtcaccggccacaatgcagacgatatggcagagacagtactaatgaatatcctacgtggtgacgtagcaagattggaaaaatcgactgcgattatcacacaaagtagcggctctcccatcaagagatcaaaaccatttaaatattcttaccaaaaggaaattgtcctgtatgcgcactacatgaagctggattatttttccactgagtgtacctatgccccagaagcgtttaggggcactgcgagagaatacatgaagaatctggaagcagtgaggcccagttgcattatagacatcatccaaagtggcgaaaatttggcattaaaggctaaaaaatctaacgctggaaagagagtcgtcaaatttgttgacggcaatagatgcgctagatgtggatatctgtcgtcaaataacatttgcaaggcgtgcatgttgctggaaggactggagaaaagtagagcccaagtggcaatcgagaatgacacttctgccgatggtgcagccttgaagctgagagctcttgagaaactcagcttttgacatatatatagctcgcagtagaagaatgcagcgtaacataatataatataatatagtacggcgccgccctccattagaacgcgcaacacaataa

SEQ ID NO: 1246 - DNA, 2126 bp, Saccharomyces cerevisiae
caaatcattgatcttttaagaaaaacgcacaaggatcatatactagattctcgttctcgttttttcttccttttttttttctctaaagccttttactgggttaatttcctttattgacccaaattaaaagaaaacgtttctcaggagactcttttaagcaaaatttagcaaatttgtgtttgctgttgtttttacagagactgcattacttgaaggtttgcctttaagtcttcgagtcgtttttttttattaactttaatcctttttctgtgtgtttgtgtatattcagtggggttattttacagtattcgaagagacttcgtttcacacatttaaaccagctttattagcgtttagcttatacactacaaggaattttttttttctttaacattattaagacagttattgagttaattcgtcttcagcccccctccccccaacaaaccccccttcatatagaaatggctaatactttcaagtattatcctgaaacgatgggtaattctagtggttatccaattagtttgccttttccgaaaggttcggctacttctgctgttaatgttgctaggcaactgcctaaatatttaggtcatgttccctcgcaatcagttcatactcagttgccatccatggcttctttaggttacttcaatcagccaagttctacttactatgctcctcctgcaccacttcaacagcaccagcaaccacctatccttccccctccgggcctaatgtacactagtaacaataacagcaacgttattcctcctcctgttcaaatgattcgggatggacaacaacaaccacaacaatctaaccaagtaaatgggggcgtcagtgagaacttggactacgatatttctataatgtcaaaatttatcatggaaaatgcctttgttgccttcaacgcgaactatagtactgatgaccagaccactgatctttttttcaagggcatatcttctgtgttgaatgccacgagattgccttcagctactatttttttggctatagattatcttttcaagtatatcaataaattatctaatgggatacattcaattggtggcaattcgatcaatatcatttatcaaaatactatgattgcgttcatattagcaaacaagttcaacgatgacaaaactttcaccaataactcatggtcacaggcaacaggaatactgataaatgttatcaatgatttcgagagacaatggttgagaatatttaactgggaattgtatgatagtgcttttctttattttgagttcgtcaagaattttgagattttcaagcaaaatcaactcaaacctgctgtagcggttcctacgttattatctccaattgtcaacgttggtgatacgagaaacgtaaatttcaacttgaagcctacttccacaaacaacctattatctccagtttccaattatgaaacccccatgctgatgccgcataacatgttttcatcaccatcttatcagagtaactcaaggtctgaattttctagtatgaatggttattataactattacaactataatcagccaagattgaattactatcaacaattccccaatatatattcttcaccaatttcggaaactcagtttgattacgacttctacaatttcagtagtcaacaacaacagcaacaacaaaaacaacactcacttttacctgccgctccacaattacctccccctcacgtccataatcagtcttacggtcatcatcttggctggaagtcaatggatgacacaataaatcattcaagatttgagcgaaactactttccgtattcggcagtgtattagtgaaaacttttttttccttattttttctttgatcccatcgaattactttctcttttgcccaggatcatctttctaatctatcattttattattttctctcatgagaaaacagaatttcgaaacagatataataaaaaaattgaaaaatttgaaaaaaaaaaatctagaaacatattttcctaaaatgaaaatcggaagctaacaaaatttttgaaaaacgaaataaagaagaaagattattattattagttactttttttattgtactccagtatggacctcttaggtgagtgatcttattaa

SEQ ID NO: 1247 - DNA, 363 bp, Saccharomyces cerevisiae
atgacaggtgaaagaattgaaaaggtgaaaataaatgacgaatttgcaaaatcacatttcctaacaactcagtggagagaaacaaagcgccaacgacactataagatgcccgttactgaacagggactccgcgagaggatagaatcagccataccgcaagtttaccatatcattgtgacggatctttcgtacggttgtggtcagtcgtttgatattgtggtggtcagcgacttctttcaaggtaaaagcaaactaatgaggagtcgtgcagtgaacaaggctgtgaaagaagagctgcaggagattcatgcctttagctgcaagtgctacactgaggaggaatggtctaagattgtggtatga

SEQ ID NO: 1248 - DNA, 1169 bp, Saccharomyces cerevisiae
taagaaaacaaacacactaaccacacagtatctttcgcccgaatgtctgaattgaaaacaggtcatgcaggccataacccttgggcttcagttgccaattccggtccgatctctattttatcctactgtggttcctctattttaatgacggtgactaacaagttcgtcgtcaatttgaaggatttcaacatgaactttgtcatgcttttcgtgcaatctttggtttgtactataaccttgattatcctacgtatactgggctatgcgaagttccgttcattaaacaaaacagacgccaagaactggttccctatttcctttttactggtcttgatgatctacacctcttcgaaggctttacaatacttggctgttccaatttacaccattttcaagaatttgactattatcttgattgcttatggtgaggttctcttttttggtggctctgtcacctccatggaattgtcatcatttttgttgatggtcctttcttctgtcgttgcaacttggggtgaccagcaagctgtggctgccaaggctgcttcattggctgaaggagcagccggtgctgttgcctcctttaacccaggttatttctggatgttcaccaactgtatcacttctgcattattcgttcttataatgagaaagagaattaagttaactaacttcaaggatttcgacactatgttttacaacaatgttttggctctacctattctattgctgttttctttctgtgtggaagattggtcttcagttaatttgaccaataacttttctaacgattcgctaactgctatgatcatcagtggtgttgcatccgtcggtatttcttactgttccggttggtgtgttcgtgttacttcgtctactacatattcgatggtaggggctttgaacaagctgccaattgccttgtctggtttgattttctttgatgctccaagaaacttcttatctattctctccatttttattggtttcctatcaggtattatttatgctgttgccaaacaaaagaagcaacaagcccaacctttacgtaaatgagaacttacggggggtgcaatttattttttttttttggtttattttattttatagaggcatctaatgcaagtagatttatatacaattatacttaaaattgatataccttagaa

SEQ ID NO: 1249 - DNA, 1921 bp, Saccharomyces cerevisiae
acaaaagctgttacatctaaacaagaacgcagcgtaacgaaatgggaaagctgataaagttaatcacaactctgacggtgttggtatcgttgcttcagtactgttgcgaattcaatagtgggagcatatcgtgtgaacgcacgcaaacgctttgccattataccaatccaagagtctggaacacctacttttcaagaaattgtgaattatacaaaaataaagttagtcccggtttcgatatagtggcgcgtaaatatgacacggctgtcaaacctgtcatcgatgacgctacagtaaaagtgaacaaggtcgctatacagcctgcattcaaggtcatccattcacaatgtaagaaatggaactgtggaaagtattaccaattggtccgctccccaatggtcaagactagacgatttttcttcgcaaaatacaatgcttttgtgaaacctaacttagacaaattctttactgcggagtttcgctctcatttgaaggaaagaattttaaagtataaaaatataggccattattactttactatcacttcaagatgcatcaaatccaaatacgactttattgttggtaatacagaggaaaaattaatgggaaagttcaagaataaggacacgcatggcattcatggttctgtcacacgtgagccttcctcggaggacatggttttaaccgtaagtactatggagtctgacgaagaggagctaactacaacaagtactcaaacagtggttgaaacaattactttggaccaggaagaggctagcgctgttgctaatcatgcgcacgacgatgaggcttccacagacgttgaaggctccacagacgtcaatgtcaatgaacaggctctgttgcaagaggattttgacatgtggagtgagactatattgcagaaaacacaagacgtcatacagctatttgaaaaggatgtttccaaatacatcaatggtaaattggttgaggaggccaaccattttaaagccaagtttcaatctttagatgataaatctaagaagttcttctccaagatttcgctagccattaacgatattgaatgtgtggaaggcattgatagtgaaactggcaagaaaattttcttcgataaatctggaagtactgagatttctcagtacataacgagagagttagttcgtgagtacttcaacgagacgcgctcgacgttagacgaactgacaaatgctatggagaaagatttgagcgaaatcactgatgaaattgaaaaaaaagttaatgcaattagagaggaaaacgtcgaggtatttgaagaatggggtgatatcattgtaaatgaatggtccaaaagaatggcttatgtggatgttatcaacgctcacatgggtgcagatgatgacactacgcttgatgaagagaaagcaaagtcttctgttaactggaagaagtttttgaagggcaagaaacagatcatagaatctagagacaagctggctcaccattccgctgacttatcccgtgttaacgcgtttaggcaaaaagtgcaaaagaagatattatcgttcactcaagagagtggtgagtttttgtatattctaagatcgaaagccaacctgcaatttcaggaacgtgaaagaaaggaacgtgaaagaaaagagcgtgaaaaagctgcagcagaagagttccaaaggcagcaggagctattacgacaacaggaagaagaagacgaagaagacgtatcctacacctctacttcgaccatcaccacaaccattaccatgacattgtgatgaaattcatgcgcttgctatacacacacacacacacacacacacacacacacacaatatctatctatatatatatgtatgttctttattgtttgtctttacctttatatataaacatatatagccatataagaatataatattac

SEQ ID NO: 1250 - DNA, 2553 bp, Saccharomyces cerevisiae
atttcttattactttcttaatcatagcttaagagaaccattctccctcccctcacaatgctcaacattctcgttttaggaaacggtgcaagagaacacgttcttgtcaccaagctggctcagtcacccaccgtgggtaagatctatgtcgctccaggtaatggagggaccgcaaccatggatccttcgcgtgtgataaactgggatattacgccagatgtcgccaattttgctcgtttgcagtcgatggctgtggaacataagatcaacttggtcgttcctggtccagaattacctctagtcaacggcatcacctccgtgttccatagcgttggtattcccgtttttggaccttccgtcaaagccgctcagttggaagcttccaaggctttctccaagagatttatgtcaaaacacaatattccaaccgcgtcttatgatgtcttcactaatccagaagaagccatttcattcttgcaagctcatactgacaaagcttttgtcatcaaggccgacgggatcgctgctgggaaaggtgttattatcccatctagcatcgacgagtccgtccaagctatcaaggacataatggtcaccaagcaattcggtgaagaagcgggcaagcaggttgtgatagaacaattcttggaaggtgatgaaatctctctactcaccattgttgacgggtactctcacttcaatctccccgtcgcacaagatcacaagaggatctttgatggcgacaagggcttgaacaccggtgggatgggtgcctatgcccccgctcctgtggccacaccatctttgttgaagaccatagattcacagattgtgaagcctacgattgatgggatgagacgtgatggtatgccctttgttggtgtgctgttcaccgggatgattttggtgaaggattctaagacaaatcaacttgttcccgaagtgttagaatataatgtcagattcggtgacccagagacacaggctgttttgagtttacttgatgatcaaaccgatttggcgcaagtgtttttggctgctgctgaacatcgtttggattccgtaaacataggaatcgatgacacaagatctgccgttactgtcgtagtggctgcaggtggttatcctgaatcatacgccaaaggtgacaaaattaccttggataccgataaattacctccacatacacaaatcttccaagcaggtaccaaatacgattccgccaccgattctttattgaccaatggtggtagagttctttctgtgacctccactgctcaggacttgagaacagcagtagatacagtatatgaagccgtcaaatgcgtccatttccaaaattcttactacagaaaggacatcgcataccgtgcgttccaaaactcagaatcatcaaaagttgccatcacatacgcagactcaggtgtctctgttgataatggtaacaatctcgtacaaactatcaaagaaatggtcagatccacaagaaggccaggtgcagactctgatattggtggttttggtggtttattcgatttggctcaagcaggtttccgtcaaaacgaagataccttactagtaggtgctacagatggtgtcggtactaaattaatcattgcccaagagaccgggattcataatactgtcggtattgacctggtggccatgaatgttaacgatttggtggtacaaggtgctgagcctctattctttttggactactttgccactggtgctcttgacattcaagttgcctctgattttgtgtccggtgttgctaatggttgtattcaaagtggttgtgctcttgtgggtggtgaaacttcggaaatgcccggtatgtatccacccggccactacgatactaatggtaccgctgttggtgctgtattaagacaagatatcttgcccaagataaatgaaatggccgcaggagatgttcttctgggtctcgcctctagcggtgttcattctaatggtttctctttggttagaaaaattattcaacatgtagcattaccatgggacgctccatgtccatgggatgaatctaagacgttaggtgaaggtattcttgaaccaacaaaaatttacgtcaagcaattattgccatcaattagacaaagactactactaggtttagctcatataacaggtggtggtttagtagagaatatcccaagagctattccagaccacctacaggcccgcgttgatatgtcaacctgggaagtaccccgtgtcttcaaatggtttggtcaagcaggtaatgttccacacgatgacattttaagaaccttcaacatgggtgttggtatggttttgattgtcaagagagaaaacgtcaaggctgtttgtgattcattgactgaagaaggtgaaattatttgggagcttggttctttgcaagaaagaccaaaggatgctcccggttgtgtgattgaaaacggaactaagctttactaatcaacaatattaactttataatagattcatatatgcgcgtacatatattatatacaatttttctacacaagaatgcttaataaagata

SEQ ID NO: 1251 - DNA, 2983 bp, Saccharomyces cerevisiae
atgtccgatttggaaaccgtagctaaatttctggccgaatcagttattgcttctaccgctaaaacttcggaaagaaatttgaggcagttggagacgcaagatggattcggtttaactttattgcacgttattgcttccacaaacctgccgttatccaccagattagcaggtgctttgttcttcaaaaatttcatcaagcgcaagtgggtagatgaaaatggtaatcatttgctgccggctaacaacgtagaactgatcaaaaaggaaatcgttcctttaatgatcagtctaccaaataatttgcaggtccaaataggagaggcaatttccagtattgctgactctgattttcctgataggtggcctacacttttgagtgatttagcttccagattgagtaatgatgatatggtgacgaataaaggtgtccttacagtggcacattctatttttaaaagatggagacctttatttagatcagatgaactttttttggagattaaattggttcttgacgtgtttactgctccatttttgaacttattgaaaacggtcgatgaacagataacagcgaatgaaaataacaaggcatcgctaaatattttatttgatgtattgctagtattaattaaactatactacgattttaattgtcaagatataccagagttttttgaggataacattcaagtgggtatgggtatcttccataagtatttgtcatattctaatcctttattggaagaccctgacgaaactgaacatgcgtctgtcctaataaaagtaaagtcctctatccaggagctggttcaattgtacacaacaagatatgaagatgtctttggacctatgatcaatgaattcatacaaataacttggaatcttctgacctcaatttcaaaccaacctaaatacgacatcttagtatccaagtccttgtcatttttgactgcagtaacacgtattccaaaatactttgaaatattcaacaacgaatctgccatgaataatatcacagaacaaatcattctgccaaatgttacactacgtgaggaagatgttgaactttttgaagacgatccaattgaatatatccgtagagatctggaaggttcagataccgacactagaagaagggcatgtactgatttcttgaaggaattgaaggaaaaaaatgaagtgttagtcacaaatatttttttggcgcatatgaaagggttcgttgaccagtacatgagtgatccatccaaaaattggaaatttaaagatctttatatttatctattcactgcattggccattaatgggaatattaccaatgccggtgtttcatccacaaacaacttactaaatgttgtagattttttcaccaaggaaattgccccggaccttacttccaacaatattcctcatattattttgagagtggatgccataaaatatatctacactttcagaaatcagttgaccaaagctcagttgattgaactaatgcccattttggccaccttcttacaaacagatgaatatgttgtctacacgtatgctgccattactattgaaaaaattttgactattagagaatcaaatacgtctcctgcttttatttttcataaggaagatatttcgaatagtacagaaattcttttgaaaaatcttattgcattaatcttgaagcatggcagctcccctgaaaaactagctgaaaacgaatttttaatgagatcaatctttagagttttgcagacgtcagaagattccattcaacctttatttcctcagttgttggcacaatttattgaaattgtaacgataatggcaaagaacccatcaaatccaagatttactcattacacttttgaatctattggtgccatcttgaattacactcaaagacaaaacttaccactacttgtagattctatgatgccaacatttttaacggttttctccgaggatattcaagaattcattccatatgtgttccaaatcatcgcatttgttgttgagcagtctgcaacaattccagaaagtatcaagccgttggcacaacctttattagcaccaaatgtatgggaattgaaaggtaatattcctgccgtgacaaggctactaaagagttttataaagacagattcatcgatcttccccgatctagtccctgttttaggtatttttcaaagattgatcgcatcaaaggcttatgaagttcatgggtttgacttattagagcacatcatgcttctaatcgacatgaaccgcttgagaccatatattaaacaaatcgcagttttattattacaaagattacagaactctaaaacagaaaggtatgttaaaaaattaacggtattttttggtttgatatctaataaattaggctctgattttttgatccactttattgacgaagtgcaagatgggctttttcaacaaatatggggtaattttattattaccacattacctactattggtaacctgctagatcgtaaaattgcattaattggtgttttgaacatggttataaacggccaatttttccaaagcaaatatccaactttgatttcaagcacaatgaattccattatagagacagcatcatcacaaagtattgcaaacttgaaaaacgattatgttgatttagataacttggaggaaatctccacgtttggttctcatttcagtaagttggttagtattagcgaaaaaccattcgatcctttgcctgaaatcgatgtcaataatggtgtgagattatatgttgctgaagcactaaacaaatataatgctatctctgggaatacatttttaaataccattttgcctcaattgacccaagaaaatcaagtaaaattaaatcaattattagttggtaattaacatggtgtagagaattatatatagatgaaaatggagctcttttgaatagctgtttatatgtagatagagtaagcaaaaatgaaaaaagaaaagcacgtaa

SEQ ID NO: 1252 - DNA, 2208 bp, Saccharomyces cerevisiae
aagcatagaagggatcaagatgccatctaccttgactattaatggaaaagccccaattgtggcttatgctgaactaattgctgctcgtattgtgaatgcgttagctcctaactccatagctattaagttggtggacgataagaaagcacctgctgccaagctcgatgatgctactgaagatgtcttcaacaagataactagcaaattcgccgccatcttcgataatggtgataaagagcaagttgctaaatgggttaatctggcccaaaaggaattagttatcaagaactttgctaaattatcacaatcattggaaacactagattctcaattgaacctaagaacctttattcttggcggcttgaagtattctgccgctgatgtagcatgttggggtgctttaagatccaatggtatgtgcggttccatcatcaagaacaaggttgatgttaacgtttctcgttggtacactttgttagaaatggatcccatcttcggcgaagctcacgatttcttgagcaaatctttactagaattaaagaaaagtgctaatgtgggtaagaagaaggaaactcacaaggctaactttgaaattgatttgccagatgccaaaatgggtgaagtcgtcactcgtttcccacctgaaccttctggatacttacatattggacatgccaaagctgccttgttgaaccaatattttgctcaagcttacaagggtaagttgattattagattcgatgacaccaacccatcgaaggaaaaggaagaattccaagactctattttggaagatttggatttattaggaatcaagggtgatagaataacctactcatctgactacttccaagaaatgtacgactactgtgttcaaatgatcaaggatggtaaagcttactgtgacgacactccaactgaaaagatgagagaagaacgtatggatggtgttgcttctgccagaagagatcgttctgttgaagagaacttaagaatttttaccgaagaaatgaaaaacggtactgaagaaggtttgaagaactgtgttcgtgccaagatcgattacaaggctttgaacaagactctaagagatcctgtcatttacagatgtaatctaacccctcaccacagaaccggatcaacttggaagatctacccaacttatgatttctgtgtcccaattgttgatgctattgaaggtgttacccacgctttacgtaccattgaatatagagaccgtaacgctcaatatgattggatgttacaagctttgcgtttgagaaaagtccatatttgggatttcgctcgtatcaatttcgttagaaccttgttgtctaagagaaagttacaatggatggttgacaaggacttggtcggaaattgggacgatccaaggttcccaactgtcaggggtgtgagaagaagaggtatgactgtcgaaggtttgaggaacttcgtcttatcccaaggtccatccagaaatgtcattaacttggaatggaacttgatctgggctttcaacaagaaggtcattgatccaattgctccaagacacactgctatcgtcaacccagttaaaatccacttggaaggctccgaagctccacaagaaccaaagattgaaatgaaaccaaaacacaagaaaaacccagctgtgggcgaaaagaaagtcatttactacaaagacattgttgtcgacaaagatgatgctgacgtcatcaatgttgatgaagaagtcactttaatggactggggtaatgtcattattactaaaaagaatgacgatggttctatggttgccaaattgaatttggaaggtgatttcaaaaagaccaagcacaagttgacttggttagctgatactaaagatgtcgtccctgttgatttagttgacttcgaccatttgattaccaaggacagattggaagaagacgaaagtttcgaagatttcttgactcctcaaacagaattccacacggatgccattgctgacttgaatgttaaggatatgaagattggtgatatcatccaattcgaaagaaagggctactacagattggatgctttacccaaggatggtaagccatatgtcttttttaccatcccagatggtaaatctgtcaacaagtatggtgcaaagaaataagcatcacataagtaatgtatatacatatttatgttatttctcaaccagtaccttttgaacaa

SEQ ID NO: 1253 - DNA, 1212 bp, Saccharomyces cerevisiae
acgaggttcttcttcttcatccccttttttaccaatattcctttttatggttgtattcgaaataactatacttggggccaatggaggacccaccgaatacggaacacagtgttttatacttaagcctgctagaacagaggatccagaattaatagctgtagacggtggtgcaggaatgtaccagctacgggagatgttggtccaagggcgaaatgaaaatgaaggtgatgatgagcttgttccaagcttttatgaacatgatcgagagccaatagagttttttattgattccaaactgaacatacaaaagggattatccaagtccttgctacaatcattaaagaggcagggagagcattttgaaagcgccaatacaatgaagaaaacttacgaggttttccaaggaattaccgactactacattacccatccccatctggaccatattagtgggctggtagtaaactccccctcaatatatgagcaggaaaacagtaaaaagaaaactatttggggattaccgcatactattgacgttttgcaaaagcatgtctttaatgacttaatatggccagatttaacggcagaacgttcaagaaaattgaagctaaaatgcttgaatccgaaggaagttcaaaagtgcactatctttccttgggatgtaataccgttcaaagttcatcatgggataggcgtcaagactggcgcgccggtatacagcaccttctatatcttcagagacaggaaaagcaaagactgtataatagtttgcggagatgttgagcaggaccgcagagaatctgaagaatctctacttgaagaattttggtcttacgttgctgaaaatataccgcttgtgcatctcaagggtatattagtcgaatgttcatgcccattatcttccaagcccgagcaattgtatggtcatctatctccaatatatttaatcaacgaattatccaatttgaacactttatacaacagtagtaagggattaagcggtttgaatgttatcgttactcacgttaagtcaacacctgctaaaagagacccaagactaaccatactcgaagagttacgatttttagctgaggagaggaacttaggagacttgagaatatctattgcgctagaaggccacactttgtttctataatgtacacaacgtcaataacataatactacgtagatgaaaagcggaaaaattcatta

SEQ ID NO: 1254 - DNA, 1683 bp, Saccharomyces cerevisiae
tctccacacataataagtacgctaattaaataaaatggttcatttaggtccaaaaaaaccacaagccagaaagggttccatggccgatgtgccaaaggaattgatgcaacaaattgagaattttgaaaaaattttcactgttccaactgaaactttacaagccgttaccaagcacttcatttccgaattggaaaagggtttgtccaagaagggtggtaacattccaatgattccaggttgggttatggatttcccaactggtaaggaatccggtgatttcttggccattgatttgggtggtaccaacttgagagttgtcttagtcaagttgggcggtgaccgtacctttgacaccactcaatctaagtacagattaccagatgctatgagaactactcaaaatccagacgaattgtgggaatttattgccgactctttgaaagcttttattgatgagcaattcccacaaggtatctctgagccaattccattgggtttcaccttttctttcccagcttctcaaaacaaaatcaatgaaggtatcttgcaaagatggactaaaggttttgatattccaaacattgaaaaccacgatgttgttccaatgttgcaaaagcaaatcactaagaggaatatcccaattgaagttgttgctttgataaacgacactaccggtactttggttgcttcttactacactgacccagaaactaagatgggtgttatcttcggtactggtgtcaatggtgcttactacgatgtttgttccgatatcgaaaagctacaaggaaaactatctgatgacattccaccatctgctccaatggccatcaactgtgaatacggttccttcgataatgaacatgtcgttttgccaagaactaaatacgatatcaccattgatgaagaatctccaagaccaggccaacaaacctttgaaaaaatgtcttctggttactacttaggtgaaattttgcgtttggccttgatggacatgtacaaacaaggtttcatcttcaagaaccaagacttgtctaagttcgacaagcctttcgtcatggacacttcttacccagccagaatcgaggaagatccattcgagaacctagaagataccgatgacttgttccaaaatgagttcggtatcaacactactgttcaagaacgtaaattgatcagacgtttatctgaattgattggtgctagagctgctagattgtccgtttgtggtattgctgctatctgtcaaaagagaggttacaagaccggtcacatcgctgcagacggttccgtttacaacagatacccaggtttcaaagaaaaggctgccaatgctttgaaggacatttacggctggactcaaacctcactagacgactacccaatcaagattgttcctgctgaagatggttccggtgctggtgccgctgttattgctgctttggcccaaaaaagaattgctgaaggtaagtccgttggtatcatcggtgcttaaacttaatttgtaaattaagtttgaacaacaagaaggtgccctttttctacttatgtgaacatgttttctatgatctttttttttcttacttttacaactgtgatattgtataaactttgttagaaattcacgggatttattcgtgacgataaatatttatatagacaaagaatatgacgatttatgaa

SEQ ID NO: 1255 - DNA, 1344 bp, Saccharomyces cerevisiae
aagtggtaccagaatacgtggccaccaaaacaatgacggatatagggagaaccaagtctagaaattacaaatgttcttttgacggttgtgagaaagtctacaacagacctagtttgcttcagcaacaccaaaattcgcataccaatcaaaagccgtatcattgtgatgagccgggatgtggcaaaaaatttataagaccgtgccatctacgagttcacaaatggactcattcacaaatcaagcccaaagcgtgcacattatgtcaaaaaagatttgtcacaaatcagcaattaagaaggcatttaaatagtcatgaaagaaaaagcaagcttgcatcaagaattgaccgtaaacacgaaggagtgaatgcgaatgtgaaagcagaactcaatggcaaggagggaggttttgacccaaaattaccttccggctctccaatgtgtggtgaagaattctcgcaaggtcatttgcctggatatgatgacatgcaagtgctacaatgcccatacaaatcatgtcaaaaagttaccagcttcaatgacgatctaataaatcatatgttgcaacatcatatagcaagtaagcttgttgtaccatctggagatccatctctgaaggaatcgcttccaacctctgagaaatccagcagcaccgacactacatccattccacaactttcatttagcactactgggacaagcagtagtgaaagcgttgatagcactacggcacaaaccccaactgatccagagagttactggtcggataaccggtgcaaacatagtgattgtcaagagcttagtccattcgcatctgtatttgatctcattgaccactatgaccacacgcacgccttcattcctgagacgctggtaaagtacagctacattcatttatataagcctagcgtctgggatttattcgaatactgaacgccatagaagagcaatttccgtcctctactcatgtgattcgaactatgaaacaaagaaaaggcaagagtaaatagcgtgatacctattacgtattacgtatacatcctattattcttgaaaaaaagtgcggggctccagagctccacattggtgaccccagagtatactgctctttctaatgccttttccatcatgttactacgagttttctgaacctcctcgcacattggtacctagaaatggctatcatgccggacggcaccgggcaataaaccggacggcacaaaaaaatcgaagaaaagagatttctttttctcgcgggcagtttttccggtcgatcgacattcgtacggtactttctctgtttcagggacatcatgttgtaaaagaaaaagacagtttaggtaat

SEQ ID NO: 1256 - DNA, 1265 bp, Saccharomyces cerevisiae
gacaataaaacaacagcacaaatatcaaaaaaggaattatgagcaacgttactacgccgtggtggaaacaatgggacccttctgaagttacacttgccgataaaacccctgatgatgtgtggaagacctgtgttttgcaaggtgtttactttggtggaaacgagtacaatggtaacttaggtgccagaatatcttccgtctttgttattcttttcgtgagtacttttttcaccatgttcccattaatctcaacaaaagtgaaaagattgagaattcctctatatgtttaccttttcgcaaagtattttggttccggtgttattgttgcaaccgcatttatccacttaatggaccctgcttatggtgcgattggtggtaccacttgtgtaggacaaaccggtaactggggtctttattcatggtgtcctgccattatgctaacgagtttgaccttcactttccttactgatctattcagtagcgtctgggttgaaagaaagtatggtctttcccatgaccatacccacgatgaaattaaagacactgttgtgagaaacactgcagctgtttcaagtgagaatgacaatgagaatggtactgcaaatggatctcatgacaccaagaacggagtagagtattatgaagattcagacgctacatccatggatgttgttcaatcatttcaagcacaattttatgcctttttaattttagaattcggtgtgattttccactccgttatgatcggtctaaacctgggaagtgttggtgatgagttctcctccctataccctgtcttagtgttccatcaatcatttgaaggtttaggtattggtgcaagattgtcagccattgaattccctagatcaaagagatggtggccatgggccctatgtgttgcgtatgggttaaccacaccaatctgtgtggccatcggtttgggtgttcgtaccagatacgtcagcggttcttacactgcgcttgttatctctggtgttttggatgccatttctgctggtatcttattgtacactggtttggttgaactactagcaagagactttatattcaatcctcaaagaacaaaggatctaagagaattgtccttcaacgttatatgcactcttttcggtgctggtatcatggctttgatcggtaagtgggcttaaaccaaagcgaaattctgcatgttccatatagattctatttcatattttatagttatttattctttagtaatagcaaaaaaacagtaataatttttc

SEQ ID NO: 1257 - DNA, 1591 bp, Saccharomyces cerevisiae
acgtgtttaatatgtcagatgcttgggatcacgtatgccgttaactctacaaagcaattgatattttgctgcctcaaatatctcacactactaggatatattcttttatcaaacaggaaaaaagggcagcgtaccaacatgtataaaagggttattagcatttctggtttattaaagactggagtcaaacgtttttcttctgtctattgcaaaacaaccatcaacaacaagtttacatttgcaacaactaatagtcaaataagaaaaatgtcttccgttactgggttttacattccaccaatctctttctttggtgaaggtgctttagaagaaaccgctgattacatcaaaaacaaggattacaaaaaggctttgatcgttactgatcctggtattgcagctattggtctctccggtagagtccaaaagatgttggaagaacgtgacttaaacgttgctatctatgacaaaactcaaccaaacccaaatattgccaatgtcacagctggtttgaaggttttgaaggaacaaaactctgaaattgttgtttccattggtggtggttctgctcacgacaatgctaaggccattgctttattggctactaacggtggggaaatcggagactatgaaggtgtcaatcaatctaagaaggctgctttaccactatttgccatcaacactactgctggtactgcttccgaaatgaccagattcactattatctctaatgaagaaaagaaaatcaagatggctatcattgacaacaacgtcactccagctgttgctgtcaacgatccatctaccatgtttggtttgccacctgctttgactgctgctactggtctagatgctttgactcactgtatcgaagcttatgtttccaccgcctctaacccaatcaccgatgcctgtgctttgaagggtattgatttgatcaatgaaagcttagtcgctgcatacaaagacggtaaagacaagaaggccagaactgacatgtgttacgctgaatacttggcaggtatggctttcaacaatgcttctctaggttatgttcatgcccttgctcatcaacttggtggtttctaccacttgcctcatggtgtttgtaacgctgtcttgttgcctcatgttcaagaggccaacatgcaatgtccaaaggccaagaagagattaggtgaaattgctttgcatttcggtgcttctcaagaagatccagaagaaaccatcaaggctttgcacgttttaaacagaaccatgaacattccaagaaacttgaaagaattaggtgttaaaaccgaagattttgaaattttggctgaacacgccatgcatgatgcctgccatttgactaacccagttcaattcaccaaagaacaagtggttgccattatcaagaaagcctatgaatattaaaaaaatcgaacgaactcataaacgtcaattatgcgtgtgccttatttatttagttgtgcgtacagtataatgcacttatttatttaccaatcaaatgatttttttaacttttcacgatctatataattacgttaatttcgagtatataacaatgaaaatatatatctacgttgtt

SEQ ID NO: 1258 - DNA, 1474 bp, Saccharomyces cerevisiae
atttggtattcttccctggttgtcaagccttggtttccctttatttgatagtatgagcgaaataaataatgaaaatctagagccaacctcaagtacagtagctgagtctacagaaagcaagaataaacacattcgtagcgctttaagaaaacgaagaggtaaattaagcgcccaaacttatgaggaagatcaagaggctattttatcatctcctttattgacttcaacacctaaaacagtctccaggtcattagtgaggttatacccatatttaattgttgtggataactttctaagtatcatcacttggtccaatgacaatgtctctgcaaacttgcttggaatattcttatttacggtttgtgttctatattttggatttattacaaggtattttggacatttaatgatcgttggtataatatgggtatatcttttaattgacaagcacgttcaagaaacaatggcatcttgcccttcattggatgatataatacacgttatggatagggtttctatgaaatctagcgctgtgttatctcctattacgattttgagcgctcaggatgttagaagactgttatttaccattgccttcctatccccagtttatatttttctaacagtgtttgtgctatctccaaactatttaatgttaatagggggtctgtatgtgcttacgtaccattctaaactaatccgaagaatgagaagatacttgtggaaatttcgcgttgttagattacttgtatttttcataacaggattagaccttggtggaccagataataataggcgcttgtttgcttctgtcaataagaaaataaggtcctttgtttggaatgaggtagggaacacatctaacactaaaaagactgtacttttcaaggttgctctgtttgaaaaccagcgccgctggcttggcatcggatggacatcaactatgttgagttatgagcgcgcatcttggacagatgaattcctaaatacttctccaagcccagaagtgtttactttaccagaggagcagtcgggaatggcttgggaatggcacgataaagattggatgcttgacctaacaaatgatgggatcattcaacttcctgcttctgctgctaagacaaaagttaagccaggtgcagatgaaggtttcatatattatgataacacctggaataatccctctgcaacggacacatataaaaagtacacaagaagaaggaggtggatcaggactgcaacagtaacaacaacgtatgacgatgagcccactgtagaaaaagctacaccgaattctcatgctctgaagagtgaagaaaataatagagttagaaaaagaaaagtgtcatttagtacagcaaatgaagtgcatatcataccttcctcggacagtagcaaattaatacaaatatctgatgtttcaatgtctccttctctataatgagtgcatgccccatatggacaacaacgttca

SEQ ID NO: 1259 - DNA, 1153 bp, Saccharomyces cerevisiae
aaatgctttacaggatcgggacttgaaatatactgactggatgacggtaaacttagatccggataaagtttggatagacggctgctttgatttcacacatcatgggcatgcgggagccattttgcaggctcgtcgaacagtttcaaaagaaaatggtaaactattctgtggtgtgcataccgatgaagatattcagcataacaaaggaacaccagtaatgaactcttcagaaagatatgagcatactagatcaaataggtggtgttcggaagtggttgaagcggcgccatatgttacagatcccaattggatggataaatatcagtgccaatatgttgttcatggtgatgatatcaccatagatgctaatggagaagactgctataagttggtgaaagagatggggcgcttcaaggtagttaaaagaacatatggcgtaagtactaccgagattatacatagaatattgacgaaaaaatctttgccaccgactcatcctgattattatcccaccacccaggaattgagtttctattctgtcgcccaagatgccgtttcaaaacattgttatgtctttcagagggatttggacaatgtcttggtcaatggtggatacaaattcgatgcagaagattgtgtttatgttgacggggattttgacttattccatatgggggatattgatcagttaagaaagctgaaaatggatcttcaccccgataagaaattgattgttggtattaccacaagcgattactcgagtaccattatgacgatgaaggaacgcgtcttgagcgttttaagttgtaaatatgttgatgccgttattatcgatgctgacgccacctcaatgtctcagtataactgcgagaagtatcatattggcacggctgtcctcactgctgccggaaaattcagtgaatacttgactaaagagcttattgtgaagagggtggaatcgcaaagggaggtttacattgcgaggaaccaaaaaaagggaatgtccatataaacaaatgttgaaaacttcttcgaacgtaaattaaatggatgtaagaaaactgtattacataagtcatgaagtaggcatgcaagtatatacctatagatgcatataaatcagtggagaaggccactatccttcagagatcaa

SEQ ID NO: 1260 - DNA, 1188 bp, Saccharomyces cerevisiae
atggatcccaccaaagcacccgattttaaaccgccacagccaaatgaagaactacaaccaccgccagatccaacacatacgataccaaaatctggacccatagttccatatgttttagctgattataattcttcgatcgatgctcctttcaatctcgacatttacaaaaccctgtcgtcaaggaaaaaaaacgccaactcaagcaaccgaatggaccatattccattaaatactagtgacttccagccactatctcgggatgtatcatcggaggaggaaagtgaagggcaatcgaatggaattgacgctactctacaggatgttacgatgactgggaatttgggggtactgaagagccaaattgctgatttggaagaagttcctcacacaattgtaagacaagccagaactattgaagattacgaatttcctgtacacagattgacgaaaaagttacaagatcctgaaaaactgcctctgatcatcgttgcttgtggatcattttctcccataacatacctacatttgagaatgtttgaaatggctttagatgatatcaatgagcaaacgcgttttgaagtggttggtggttatttttctccagtaagtgataactatcaaaagcgagggttagccccagcttatcatcgtgtccgcatgtgcgaattagcatgcgagcggacatcatcttggttaatggttgatgcctgggaatctttacaatcaagttatacaaggacagcaaaagtcttggaccatttcaatcatgaaataaatatcaagagaggtggaatcatgactgtagatggtgaaaaaatgggcgtaaaaatcatgttattggcaggcggtgatcttatcgaatccatgggcgagcctcatgtgtgggctgattcagacctgcaccatattttgggtaattatggatgtttgatcgtggaaaggactggttctgatgttaggtccttcttgctttcccatgatatcatgtatgaacacagaagaaatatccttattatcaaacaacttatttacaatgatatttcctctacgaaagtgcggcttttcatcagacgtggaatgtcagttcaatatcttcttccaaactctgtcatccgttacatccaagagtataatctatacattaatcaaagtgaaccggtcaagcaggtcttggatagcaaagagtga

SEQ ID NO: 1261 - DNA, 1346 bp, Saccharomyces cerevisiae
ttactattaatgcgggtaatgatctatattgaattttgcacgtctatagtaacttaaaagtcttgtaatatttgaagtaacaatgccgtataatactgcataatagccctatcaatcggaatataccaaaacatcctttatgtcctgttctcaaaataagacttctgtcagtctggcctggcgtgaatgcatatccatcgcttccgtcctaattggcgcgtatgcatcatacaaatactataagctgttcaaaacacgcgatattccacgtccaaaagaaggcgttgaagaactcataggaaacactcctctggttaagatcagatctcttaccaaggctactggagttaacatttacgctaagttggagttatgcaacccagcaggaagtgctaaggatagagtggctttaaacatcataaagacggctgaggaattaggcgagctcgtcagaggtgaacctggctgggtatttgaaggaacaagtgggtcgactggtatctctatagcagtggtctgtaatgcgttgggttatagggcacacatttctttgcccgatgacacatcgctagaaaaattggcattactagaaagcctcggtgctactgttaataaggttaagcccgctagtattgtcgatccaaaccaatacgtaaatgccgccaaaaaggcatgtaatgaactaaagaagagtggtaatggaataagagcagtttttgccgatcagttcgaaaacgaagccaactggaaagtacattaccagaccacaggcccagaaattgcccatcaaactaagggaaatattgacgcattcattgctggctgcggtactggtggcaccataactggtgtggcaaaattcttaaaggaaagagcaaagataccttgccatgtcgttctagcggatccacaaggatctggcttttataatagagtcaactatggcgtgatgtatgactatgtagagaaggaaggtactagaagaaggcatcaagttgacactatcgtagaagggattgggttaaacagaatcactcataattttcatatgggcgaaaagtttattgatgaatcaatacgagtcaacgataatcaagccattagaatggcaaaatacctatcggtaaacgacgggctattcgtggggagtagtacagctattaatgcggtagccgctattcaggttgcaaaaacgcttcctcacggctcaaacattgtgattattgcatgcgacagcggttcaagacacctaagtaaattctggaaagaagctaaagaaatcgatcacgacgtgtcattagaagaagtaataaatatctaacatagatgtataaatcagtactgag

SEQ ID NO: 1262 - DNA, 4057 bp, Saccharomyces cerevisiae
acccatctatgcagtttccattcgcttgtctcctatcgacccttgtaattagtgggtcattggcccgggccagccccttcgactttatattcggcaatggaacgcaacaagctcagagccaaagcgagagtcaaggtcaagtttctttcaccaatgaagcttctcaggatagttccaccacctctttggtaacagcctattctcaaggtgttcattcgcaccagtctgcaacaatagtgagtgccacaatctcttccctcccatctacttggtatgatgcgagctccacttcccagacttctgtgtcatatgccagtcaagaatccgactatgccgttaatcaaaactcttggagcgcgtctactaatcaactgccatctaccagtacgacaagctactatgcgccaaccttcagtacatcggccgattttgctgcttctagtgtaaatgcagcttctgatgtctccactgccagtgttcccattgatacgagtgctaattctatccctttcacaactacaagtaacatagagactacaacgagtgcacctctcacttcggacactccacttatttccactagtacgatgtccgcagctgataacgtattttcgtcagcaaaccctatttctgcctccctaacaaccaccgatagttcagaaagttttgaccaaacttcgactgctggtgccattccggtgcaaagttcagcagattttagtagttctagtgaaattttagtacaaagttcggcggatttcagtagccctagttctccaactactaccgatatatcgctatcagctgccccactgcaaacaagtgaatcaagcagttttaccactgcatcagcagctctaccagtaagttcaacagacgttgatggctcaagcgcctcacctgtagtgagcatgagcgccgcaggacaaatagctagctcaagcagcacagataatccaactatgtcagaaaccttttcgttaacatctacagaagttgatggttccgatgtttcatcaacagtgagcgcattattatcggctccttttttacaaacaagtacttccaacagtttcagcattgttagcccatcggtatcttttgttccatcacagagttcctcagacgttgctagctccagtactgcaaatgtagttagttcatccttttctgatattccaccgcaaactagtacctcagggagcgtagtttcggtagcgcaatccgcatctgccctcgcatttcaaagttcaacagaggtatatggtgccagtgcctcgagcacaatgagttcattattatcaactacttcgctacagtctactactttggatagctcaagtttagctagctcctctgcgtcgagttcagaccttacagattatggcgtctccagtacagcaagcataccgctgttgtcagcctcagaacaagcaagtacttccagcagttttagcgttgttagcccttcggtatcttttgttccatcacaaagttcctcagatgttgctagcaccagtgctccaagtgtagttagttcatccttttcttatacttcactgcaagcaggtggctctagcatgaccaatccctcttcatcaactatagtatattcaagtagtactggcagttctgaggaatccgctgcatctacagcttctgcaacactgtcgggctcctcgtctacttatatggcaggaaatttgcaatcacagcctccatccacttcaagtttgctttcggagtctcaagctacaagcacttcagctgtgctagctagcagttctgtttctacaacttcaccctataccactgcaggtggtgcatctacagaggcctcatccctcatatcatctacatctgcggaaacttcccaggtaagttattcacaaagcacaactgcattgcaaacttcctcattcgcatcgtcttcaacaacagaaggaagtgaaacatctagtcaaggtttttctaccagctctgttttagttcaaatgccttcttcgatttccagcgaattctcaccctctcagacgacaactcaaatgaattctgcaagctcatcatctcagtacactatatcatccactggtatactttctcaggtttcagacacatcggtgtcttatacaacttcaagttcgtctgtttctcaagtttcagacacaccagtttcttatacaacttcaagttcgtctgtttctcaagtttcagacacaccggtttcttatacaacttcaagttcgtctgtttctcaagtttcagacacaccagtttcttatacaacttcaagttcatctgtttctcaagtttcagacacaccggtttcttatacaacttcaagttcgtccgtttctcaagtttcagacacgtcagtaccttctacaagttccagatcgtccgtttctcaagtctcagacactccggtgccttctacaagttcaaggtcgtccgtttctcaaacatctagctcactacagcccaccactacatcctcccaacgtttcaccatttccactcatggagcgctttctgaaagtagttctgttagccaacaagcttctgagattactagctcaatcaatgcaacagcttccgaataccatagcatccagacaaccgcggctactcaatccacaactctatcttttaccgacgcaaacagcagttctgcttccgctccattggaagtggcaacgtctacgccaaccccatcttcaaaggcatcctctctgttgcttacaccatcaacatcctctttaagtcaggttgctacaaatactaatgtacagacgagtttaacaacggaatcgacgaccgttttagaaccatcaacgactaacagttccagtacgtttagtctggtcacttcaagtgacaacaattggtggattccaactgagttaatcacgcaggcaccagaagctgcatccactgcatcttctaccgttggaggaacacaaactatgactttgccccatgcaattgcagccgcgacacaagttcccgagcctgagggctacaccctaatcacaatagggttcaaaaaagctttgaactacgaatttgttgtatcagaaccaaaatcatcggctcaaatcttcggatacttgcctgaagctctgaacacaccttttaagaacgtattcacaaacattacggtactacaaatagtgccattacaggatgactcactcaactacttagtaagtgttgctgaagtatactttccaactgcagaaatagaggagctgtcaaatctaattaccaactcttcaagcgctttttacacggatggaatgggtacagcaaaatctatggctgcaatggttgattcctcaataccgctaacgggcctcttacacgatagtaacagcaactctggcggatcttcggacggatcctcctccagtaattcgaactcaggatcttcaggttcaggatctaattcgaactccggtgtgtcttcatcttccggaaattcctatcaagatgccggtactttggaatattcatccaaatctaactccaacgtatccacttctagcaaatcaaagaaaaaaatcattggtttagttatcggcgttgttgttggtggatgcttatatattttattcatgatttttgctttcaagtatatcataagaaggcggattcaaagtcaagaaattatcaagaacccagaaatttccagtatcagttcaagtgaatttggtggagagaaaaattacaataatgaaaagagaatgagcgttcaagaatccataacacaatctatgcgaattcaaaattggatggatgatagttactatggtcacgggttgacaaataatgactcaactccaaccaggcacaatacatcgagttccataccaaaaatttcaagaccaattgctagccaaaactccctgggttggaacgaagtttgatagcaatgtctgcagagactttctccgcttgcataaccttataaacttataacgatacctacttatttcatatcttatgtatagttctccttcaaggagacgttgttttaatacttttatctattcca

SEQ ID NO: 1263 - DNA, 1157 bp, Saccharomyces cerevisiae
agtcgagcacggtgctgtatattttcatacattatacattcgaggacctttcaccaaacaagaggaacttagctgatactaaacgaagattagaaaaagagcaaaaaaaaacaaaaaaagaaccaccgaaacattaaaagtgggaataatgtcgcatcaaatggcgccatggatacccatgtttattcaatcgtgcaaaaataacactgaaccgtttgtatcatttcaatttgctactgttgacgaactaacgaacaaaccacgttgtagaacggtagtgttcagagattttttatttcatgacaaaagaactaatgtgttgacttttaacactgatatgaggagctcaaagataactgaatcatttataactccaaattcaaataactctagcgacagcaaaagatgtgagactccatttttcgaagcatgtttctatttcccggaaacttgggagcagtatcgcttcagtggccaatgctttacaatatctaaacaatttaagaaaataccggctgagattgtaaccaagtatgacatattttcaccgcggttttcagagacaaatgatgacagcactgacgaagaaatagatactccaattaacgacgacgacgacgacgataaaaataatgacgccgacaataatgacattaacgaagataacaaacttatagaatccatagagaacgatgaacaccatgaggatgaagacgactactaccctcaaccacaagaatgggaggctgaattactaagacaatggtcctctctatcaaggcataccaagtcattgtataggaagccagccccgggccagaaacttacctctgaaactagcaaacaactggacaaactccatagaggagttgacggtgctaaagaggacgctggactggaaaactttggtattgtctgtctttgtgttgattctgttgattttttgaacttgaaagagggaagaggtggtgaaagatggattttccagaaaaccgacggcaaagacgaagatctgtgggaggaacaagaagtgtgtccgtgagaaatgtcaatcattattgctaacgttcgcgatggttaatgctttgtattcgcgctatctcgatttctacctatatagttaatctctgtacaaaaacaatctttccaactatcca

SEQ ID NO: 1264 - DNA, 1551 bp, Saccharomyces cerevisiae
tataaggccatttgtaatttcaatagttttaggatttttccttctcccaaaatactcacttactgtgttacattacagaaagaacagacaagaaaccgtcaataagaaatataactaagaacaatgtctatttgtgaacaatactacccagaagagccaaccaaaccaactgttaagaccgagtccattcctggtcctgaatcccagaagcagttaaaggaactgggtgaagtttttgacacaagaccagcatattttttggctgattatgagaaatctttaggtaactatatcactgatgtggatgggaacacatatttggatttgtatgcccaaatctcttcaattgcacttggttataacaaccctgctttgatcaaggcagcacaatcaccagaaatgatccgtgctttggtcgaccgtcctgccttaggtaacttcccatctaaggatttagacaagatattgaagcaaatattgaaatctgcgccaaagggtcaagatcacgtctggtcagggctttccggtgcagatgccaatgaattagcgttcaaggctgcctttatttattaccgtgccaaacaaaggggctatgatgccgatttttctgaaaaggaaaacttgtctgtcatggacaatgacgcccctggcgcccctcatcttgccgtactatcgttcaagagagcgttccacggtagattgtttgcctccggttccacaacttgttctaaaccaattcacaagttggatttcccagccttccactggcctcatgctgagtatccatcttaccaatacccattagatgaaaattctgatgcaaaccgtaaagaggatgaccattgcttggccattgttgaagaattaatcaaaacctggtctattccagttgctgccttaatcatcgaaccaattcaatctgagggaggtgataaccacgcttctaagtatttcttacaaaagctaagagacattaccttgaagtataacgttgtctacatcatagatgaagtgcaaacaggtgtcggagccaccggtaagctatggtgtcatgagtacgccgatattcaaccacctgtggatttagtgaccttttccaagaaattccaaagtgcaggatatttcttccacgaccctaaattcattccaaacaaaccatacagacaattcaacacatggtgtggtgaacctgcaagaatgatcattgcaggtgccattggacaggaaatctccgacaagaagttgactgaacaatgttcaagagtaggtgattatttgttcaagaaattggagggtttgcagaagaaataccctgaaaactttcaaaacttgagaggtaaaggaagaggcacattcattgcctgggatttgcctactggtgagaagagagacttactattgaagaaattgaagttgaatggttgcaacgttggtggatgtgcagtccatgcagtgagattaagaccttcattaacattcgaggagaagcatgctgatatctttattgaagcattagccaaatcagttaatgaattatgattgtatattagc

SEQ ID NO: 1265 - DNA, 991 bp, Saccharomyces cerevisiae
atggcgaagactatcaaagttatcaggaagaaggaccccaaaaagaagaacctatccgatcctttagcaaaacaaaaactagtttggaaaatcggacacgttttaactttagtttttggtttattattttctatcacgtatttctaccatgtcctaatcttcttcaaatatcgttcctggaagtggttgttcttaagggtcaataaaaattactcgtttattcaaagtaagagatggtacatgaaacttttgagttggagcccacaggtaatgtaccgtttgtcattaattggcgtatttatgtctgagtccgtcacaatgcaacagaactgggttggacttaaccctacttggaatgaccttttgtcctctgagaactttcatacccttttgattgcctgtttatggttctttggtggtggtaagtctttttacaagattttgccttacatgattttaagttatctacacctaactaaaatgaactacgaattgaatgctaacaaagaagaaaagatccctttaacacccaaagacagaaaaatgctacacttacttgcgtactctgaattacttgttatcttagcgctaacactagacactatattgtttaagacgggtacatccggatttatgctcgtcatttatgttggtatttattggttgaggttgaacttctctccatacgcacaagtggctgttttggagttacttgtcaagtttgaaaaatacgtccccaaaaaatatagagacaaatggcaggttataaagaactttatttatatgaaaatgaaggagcacgaaaagagaacagaagaagttgccagatacgcgtaagaaattctctaacttaagatgaccagatgtcatgttcgtttacttattttcctctcctcttaccttttttggccactaacgctcgtacagaaatggacggcatacatacaatttaatcaattctcttaaataccgttttatacctcatttctga

SEQ ID NO: 1266 - DNA, 1234 bp, Saccharomyces cerevisiae
agaaaggaagcccaatgtctcgcaaatttgatttaaaaacgattactgatctttccgtcctagttgggactggcatatcattatactacctggtcagtcggctactcaacgatgttgaatcaggaccgttatcaggtaaatcaagggaatcaaaggccaaacagtccttgcaatgggaaaagctggtgaaaagatcaccggcattggcagaagtaacattagatgcatatgaaaggactatattatcttctatcgttacgccagatgaaataaatattacattccaggatattggtggcttagacccgcttatttcagatctacatgaaagtgtcatatatcccttgatgatgccagaagtatattctaatagccctttacttcaagcacctagcggtgtcttgctatatgggccaccaggatgtggtaaaaccatgttggcgaaggccctagccaaggaaagtggtgctaattttatctcaataagaatgtcatctataatggataaatggtatggtgaatctaacaaaatagtcgatgcaatgttttcattggcgaacaagttacaaccttgtataatattcattgacgaaattgattcattccttagagaacggtcttctacagatcatgaagttacggcaaccttaaaagctgaattcatgactttatgggatggcttattgaataatggaagggttatgattatcggtgctactaatcggataaatgacatagatgatgcgtttttgaggaggttaccaaaaaggtttcttgtttcattgcctggttctgatcaacgttacaaaatattaagtgttttattaaaagacactaaactagacgaagacgaattcgacttgcaactgattgcagacaataccaaaggattttctgggtcggacctgaaagagctttgcagagaagcggccttagatgcagcaaaggaatacataaaacagaagaggcagctcattgatagtggtacaatcgatgttaatgatacttcttccttgaagataagaccattaaagacaaaagattttacaaaaaaattaagaatggatgctacaagtacgttgtcatctcaacctcttgattaaggaaggaaaattagaaaaaaaagaagaaagctttttattcacgcatcatatcatatcagataagctagttttcacataatatgtgtatatgcagtatactcctgtacataacttcctttatttctgcttta

SEQ ID NO: 1267 - DNA, 666 bp, Saccharomyces cerevisiae
atgaaagcaatagataaaatgacggataatccaccacaagaaggcttaagtgggaggaaaataatatatgacgaagatggcaaaccttgccgatcatgtaacaccctacttgactttcagtacgtgaccgggaagatatctaatggcctgaagaacctctcatctaacggtaaactagcaggtacgggggctctcactggcgaagcttcagagttgatgcctggctcaagaacatacaggaaggttgaccctcctgacgtagagcaactaggtagatcttcatggacgctgttacactctgtagctgccagctatcctgctcaacctacagaccaacagaagggtgaaatgaaacagttcttgaatatcttctcacatatttatccttgcaactggtgtgctaaagactttgaaaaatatatcagagaaaatgcaccacaagttgagtcaagagaagaacttgggaggtggatgtgtgaagcccacaataaagtcaataagaaattgaggaagcccaaatttgactgtaatttctgggaaaaaagatggaaggacggctgggacgaataagtacaatctcagaattctgaaggaacacataaaagacaatttatacatatttacagattctcgtgtatataacactccaatcgtattgatcagtca

SEQ ID NO: 1268 - DNA, 1484 bp, Saccharomyces cerevisiae
ggggttggttatccagtacatgtgttgcttgaaactgccaacaaaaaagaaaagaaaataagaatatattagtacgccaatagtaaacgtcaccccgaggtttaaaaactaaccgtgatatacgaggagaattggtaacggtacaatgatgatactgggtaaagccgggatcctggcacagtatgggacaatatatgtgagacaaaataccattcggaataatttaagttcctgcatttttaagcagtcactatgtgcctttcattcattagcaaaggtgctgcaacaaaagcaagtcccactggacctttcatatgacataatcaagagagatgcagtaaaaactggggatgaagggaagccaagaccacctattatcatacttcacggcttattcggtaacaagctcaacaaccgaagcattggccgtaaccttaacaagaaattgggaagagacgtgtatctgctggacctaagaaatcatggatcctcaccacacagttcagtccataactacgaagtcatgtcggaagacgtgaaacactttatcacaaagcacgaattaaacaccaatggaggccctattataataggacactcaatgggtggtaaagttgccatgatgctggtcctgaaaaacccgcaactttgttcgatgttagtctgtatagagaacgctccggtgagtttgcgccctaacgctgagtttgtcgaatacatcaaagcgctgatggaaatcgtcaacgacaagggcaaaactatccgcacgctgaaacaggctgatgaacaccttgcagagaggatcggcggcaatgagctagtaaggcggtttctcctaacggcgctgaaaaaggtcaagatggacaattcatcgtctgtgtcgtcatatacattcgaagaacgaattcccctcgcaacactgaaagatgccattgtcaaaggtgaaattgccgcgtggcccctagatcctgctcgtgaacgatggacgcggcctgcgctattcatcagggctactcaatcgcattatgtggtagacgagtatcttccgatcatcggcgcgttctttccacgctttgaaacacgtgacatcgatgcgggtcactgggtaaatgcggagaagcctggggaatgtgccgaaagcatcgtcgattttgtggagcggcacgaggattaaaggcaagcgccccggagcaaggtgccagtagcaccagtcggtggctgtgcgcttgccgtagcacatgacatacggactattgtgtgagtggtgatggggtgtaggcagtgccacaccagtttaaaggcctagtaacggcaaatcgccaaaagagatgatgctgatgcatacgataagatcgtcagtttcacgttcgcggttcgaacatggaattgtggctaaagaaatttgggcggtatgatgcaaatgaggtgtacgtatgtatatatagcaaagagtagaataaaatgagataaagcctcgttcgttc

SEQ ID NO: 1269 - DNA, 544 bp, Saccharomyces cerevisiae
acaacggcaagaccaaagatatatcaaatatggctaagcaatctctagacgtttcctctgacagaagaaaggccagaaaggcttatttcactgctccatcctctgaacgtcgtgttttgttatctgctccattatccaaggaattgagagctcaatatggtatcaaggctttgccaatcagaagagacgatgaagtcttggttgttcgtggttccaagaagggtcaagaaggtaagatttcatctgtttacagattgaagtttgctgttcaagttgacaaggtcaccaaggaaaaggtcaacggtgcttccgttccaattaacttgcacccatccaagcttgttatcactaagttacacttggacaaggacagaaaggctttgatccaaagaaagggtggtaaattggaataaactagctcgactttaacatagatcatacaaaaaatacaataaataaatcctgtgtttcttttatgtatattttttatcaatttcaatttagtttagtttagtttctttaaaaataaaattgtaatttctca

SEQ ID NO: 1270 - DNA, 956 bp, Saccharomyces cerevisiae
cactgatcgataacatcttcctttgcttgatattccctttttgaatttccctaactaccttttgttgtttaccacatattctctaaaaagcagagttattcttattttgtatttcattgcatttttatccatttagttaatgaccgaattagattatcaaggaactgctgaggcggcttctacctcgtatagtcgaaatcaaacggaccttaagccgtttccttctgcaggcagtgcatcttcatcaattaaaacgacggaacctgtgaaagatcatagaagaaggcgttcttccagcataatttcacatgtggaaccggagacttttgaagatgaaaatgaccagcaacttctaccaaatatgaatgctacttgggtagaccaacgcggcgcttggattattcatgtggtcattatcatactgctgaaactattttataatttatttcctggtgttaccacagaatggtcgtggactctgactaatatgacatatgttattgggtcctatgtcatgttccatctgattaagggtacccctttcgatttcaatggtggtgcttatgacaacttgacgatgtgggaacaaattgacgacgagactttatatactccttcaagaaaatttttgattagtgtcccgatcgccctattcttagttagtactcattatgctcactatgatttgaaattgttttcatggaattgttttttgacaacctttggtgctgttgtcccaaagttacctgttactcatagattaaggatttctatcccaggtatcacaggtcgcgcccaaattagttgaacatagtttatttcaatcttgtatctagatgtttttgctatatttatattttctgggccaaatcactaacgctttgaaatttcaaaagccaacaacggatttcggacttcatttatgtaaatgaaaaagaatgtgaacaaaaattgaa

SEQ ID NO: 1271 - DNA, 1959 bp, Saccharomyces cerevisiae
ttcaacaaaaaagtatcttttcttcacttttctttcaacaattcaaagatggctagaaccataacttttgatatcccttcccaatataaactcgtagatttaataggtgagggagcgtacggaacagtatgttcagcaattcataagccttccggcataaaggtagctatcaagaaaatacaaccgtttagcaaaaaattgtttgttacaagaactatacgtgagatcaagcttttacggtatttccatgaacacgaaaacataataagtatattggataaagtaaggccagtatccatagacaaactaaacgctgtttatttagtcgaagagttgatggaaaccgatttacaaaaagtaattaataatcagaatagcgggttttccactttaagtgatgaccatgttcaatactttacataccaaatcctcagagccttaaagtctattcacagtgcacaagttatccatagagacataaagccatcaaacctgttactaaattccaattgtgatctcaaagtctgcgattttggactagcgaggtgtttagctagcagtagcgattcaagagaaacattggtaggattcatgacggagtacgtcgcaacgcgatggtacagggcacccgagataatgctaacttttcaagagtacacaactgcgatggatatatggtcatgcggatgcattttggctgaaatggtctccgggaagcctttgttcccaggcagagactatcatcatcaattatggctaattctagaagtcttgggaactccatctttcgaagactttaatcagatcaaatccaagagggctaaagagtatatagcaaacttacctatgaggccacccttgccatgggagaccgtctggtcaaagaccgatctgaatccagatatgatagatttactagacaaaatgcttcaattcaatcctgacaaaagaataagcgcagcagaagctttaagacacccttacctggcaatgtaccatgacccaagtgatgagccggaatatcctccacttaatttggatgatgaattttggaaactggataacaagataatgcgtccggaagaggaggaagaagtgcccatagaaatgctcaaagacatgctttacgatgaactaatgaagaccatggaatagtattcacaagaacatttctgccatacttctaaaatttccctatattcagcttagcagtgacacgttgtggtctgtaggtcaatatgtaagtaagaaacttcaactcacatatgcacgatgcatgccaatggaaaaatgcaaggaacgaaatggcgccacggcaacaagtttttttttttcgccagcagaagtacacgaaatgcggcttcatgagcctcttcactgctttgcctaaacgggaaatgcagagaaaaaccagccatcgcgtgtgcttggagagctgacgcgactgtaatcaaagaggcgatatcaacaccttttatccagcactattcaacagtgaatgggctcccaagtaagtcttggcattgtgctttctattcttaagtattaagtagaagttttgtttactgggtttgtttattcctggctagatgttcgcattcgttttctagttgaccatatttaccaaatattcacaactaatacccagccaaggtagtctaaaagctaatttctctaaaagggagaaagttggtgattttttatctcgcattattatatatgcaagaatagttaaggtatagttataaagttttatcttaattgccacatacgtacattgacacgtagaaggactccattatttttttcattctagcatactattattccttgtaacgtcccagagtattccatttaattgtcctccatttcttaacggtgacgaaggatcaccatacaacaactactaaagattatagtacactctcaccttgcaactatttatctgacatttgcctt

SEQ ID NO: 1272 - DNA, 1648 bp, Saccharomyces cerevisiae
aaagagtagatgtttcgacggactaaataatgtgaaaaaggttctaaaaccttcaaaacaattaaacttgagaaacgttgctataggattgagctaataatttgaattaataggagctgctttttactttgatatatcctgaagttatgttacgagtttctgaaaatggtctacggtttctgctgaaatgccattcaacgaacgtaagcatgtttaataggcttctgagtactcaaataaaggaggggagaagttccatagatgatgctggcattatccccgatggaactattaacgaaaggccgaatcactacatcgagggaattactaaaggcagtgatctggacctcttggaaaaaggtataagaaaaactgacgaaatgacttccaattttacaaattatatgtacaagtttcacagattgccccccaactatggaagtaaccagctcattactatcgataaggaacttcaaaaggaactggatggggtaatgtcatccttcaaagctccgtgccggtttgtatttggttacggctcaggagttttcgaacaagcgggatattccaaaagtcatagcaaacctcaaatcgatataatcttgggcgtcacatatccatcacattttcactctattaatatgaggcagaatccgcaacattattcaagtttgaaatacttcggttccgagttcgtgtctaaatttcaacagatcggcgcaggcgtatattttaatccatttgcaaatataaatggacacgacgtaaaatatggggtggtttctatggaaacacttttaaaggacatagctacttggaatacattctatttagcaggacgactacaaaagcctgtaaaaatattgaagaatgatttgagagtgcaatattggaaccaattaaacttaaaagctgcagctactttggccaaacattacaccttagagaaaaataacaataagtttgacgaattccaattttacaaggagatcactgccttaagttatgcaggtgatattagatacaaactgggtggagaaaatcccgacaaagttaacaacattgttaccaaaaactttgaaagatttcaagagtattacaagccgatttacaaagaagtggtcctaaatgattcattttatcttccaaaagggttcacattaaagaatactcagagacttttgctcagccgtattagtaaatcaagtgcattacaaactattaaaggtgttttcacagctggaatcacaaagtcaattaagtatgcttgggccaaaaaactaaaatcgatgaggagaagctagtgtatccaatgttatctacacattatcttttatcaaaaatgttttatcgtcctttcatctctttcgaagaatcgctctattcacattccaaatctctggcgtcggtcaatatttattcatctttatttttaccttcttctagataatatacattatcccatattggcattcaaactgacttacttgcattatggaagggggatcatacgttccagtatatgcaatggatgtcgtacttacgaacacattgtagcatttgaaggggtatttctatatatttctattattaagggttatattacaattatactttatagtttaaaatatttaaacaagttctcaaa

SEQ ID NO: 1273 - DNA, 1215 bp, Saccharomyces cerevisiae
catagcaagggaggaaaaaatatcaaagtgatactgtaaaatataataaaaatgttttctggctttagttcttttggcggcggaaatggttttgtaaatatgcctcaaacgtttgaggagttctttagatgctaccctatagctatgatgaatgatagaatacggaaggatgacgcaaacttcggcgggaaaatattcctgccaccaagtgctctaagcaaactatccatgttgaacataagataccccatgctttttaaactaactgccaatgaaactggacgtgtgacacatggaggtgttttagaatttattgctgaagagggcagagtttacttaccacaatggatgatggaaactttgggtatacagccaggatctctactgcaaatttcatctactgatgtacctctgggccagtttgtgaagttagaacctcagtctgtagatttcttggatatttccgaccccaaagcagttttggaaaacgtactgaggaatttctcgactttgaccgtggacgatgttattgagattagttacaatggtaaaactttcaaaattaagatcttagaagtcaaaccagaatcatcatcgaagagtatatgtgtcattgaaacagatttagtaacagattttgctccacctgtaggatatgtggaaccggattacaaagcgctgaaagctcagcaagataaagaaaaaaagaattcttttggtaagggccaagttttggatccctcggtgcttggccagggatcgatgtccacaagaatcgactatgcgggtatcgctaacagtagcagaaacaaactatctaaatttgtaggtcagggacaaaacatatctggtaaagctccgaaagcggagcccaagcaagatataaaagatatgaagataacgtttgatggcgagcccgccaagctagatctgcctgaaggccaattattctttggtttcccaatggtcctaccgaaagaagacgaagaaagtgccgctggtagcaaatccagtgaacaaaatttccaaggccaagggatctcactaaggaagagcaataagagaaaaacgaaaagtgaccatgattcgtccaagtccaaggctcccaaaagcccggaagtaatcgaaattgactaaaagatatatactagtatacaacaatatagtgtctttgacagatatatagagcattttcaagttaacagatcttagaat

SEQ ID NO: 1274 - DNA, 2152 bp, Saccharomyces cerevisiae
ctttacggtagaagcaacctatagattaccgaatcataactttctttagtgttgattgagacgtgttgtgtttaaactatccattgcatctcgataaaaaaacatagtactacaacaaacagtcaggttcaataacacctaaacattatgtcatctcagtttttcctgaaaacctctcaggatatagagctcttccaaagctacccaacttttgagcaatccaacacaaactccaaggatttccctgtcatttcctcggttttatcgccatgtggcagatttttggctttatctacgaaggagaacgtcaaagtttttacaggtccatgtttggataacgttctattaacaatgaagttgtccgacgtctatgacctacacttctctccagcaggtaactacttaagcacttgggagagagcgtctatacaagacccaaatcacaagaacgttaaagtttggtatttgaataaaccatttaagaaagattgcgtttcggaggatatagtccctgcttacgaatatcaagccaaatcccaaagcggttggtttttacaattctccaaattagacaattatgggctaagactttttaaacacgacttgaagattgttaaattaagctccgctaatgccgacaatttcgacttccaatctccgtttgctgtcttgtctgatgatgaaacgtcccaacatttcaccacctacctaatctctccagctgaacatccaacaatttgtactttcacaccagaaaagggtggtaaaccggctcaattaatcatatgggccctctctgaaggtaaaatcaccaagaaaattgcctccaaaactttctttaaagctgattcctgccaattgaaatggaatccattaggtaatgctattttatgtttagctattactgattttgattcctcaaacaaatcatattatggtgaaaacacactatacttactgtctttccaaggtgtcaacgggactttgggtggtaactctgtacgtgtttctttaaccactggacctgtccacgatttcacttggtcgccaacttcaaggcaattcggtgtcatcgctggttacatgccagcaaccatttccttttttgacttaagaggtaatgttgtccattcattacctcaacaagccaaaaataccatgcttttctctccctctggtcattacattcttatcgccgggtttggtaatttacagggctccgtggaaatcctagatcgtctcgacaaattcaagtgtgtgagtaaatttgacgctaccaacacttctgtctgcaaatggtcaccgggtggagaatttatcatgacagctaccacttcaccaagattgagagtggataacggcgttaaaatatggcatgtatcaggctctttagtatttgttaaagagttcaaggagcttttgaaggtagactggaggtcaccatgtaattacaaaactttggaaaacaaagacgaagcatttttcgagaaccatatcattaataactgggaaccgctacctgattcgaccacatcttcacttgatcctaaaatatccaataaatcagaattgcaaatacattctagcgttcaagagtacataagtcaacacccaagcagagaagcaagctccaatggaaacggatctaaggccaaagctggaggcgcttataaaccacctcacgcaagaagaacaggcggtggacgtattgtccccggagttcctcctggtgcagcaaagaagaccatcccagggctagttccgggcatgagtgccaacaaggacgccaacaccaagaacaggagaagaagagccaataaaaagtcaagtgaaacgtcacctgattctactccggccccatctgctcctgcctccacaaatgcccccacaaacaataaagaaacttctccagaggagaagaaaataagatctttactaaagaaattaagggctattgaaaccttgaaggaaagacaggccgtcggcgacaaactagaagatacgcaagttctaaaaattcaaactgaagaaaaagtgttgaaagatttggaaaagttgggttggaaggatgaataaactagaagaaactgatgtatccatacaactgtgtaaatattaacaacgtcaaataatactactttgaattgttttt

SEQ ID NO: 1275 - DNA, 1870 bp, Saccharomyces cerevisiae
taaagacaagagaagagaaaacaaaggcggagcaatgtcggaaggaagaacgtttctgtcacagttgaatgtcttcaacaaggagaactatcaattttcttcttctactacaaaaaaggaagtaagtaactcgacagtggatgctgacaacggtgcctccgattttgaggcaggccagcaatttgctacagaattggaccaaggtgaaaagcagttaggtattttgtcgtgtattgggcttatctgtaatagaatgcttggtaccggtgttttcgccgtttcctcgaccatttacacactatgtgggtctgtggggcttgcattaattatgtgggcagttggcgccattattgccatttctgggttatatgtatacatggaattcggtacggctataccgaaaaatggtggtgaaaaaaactacctggaggctattttcaggaaaccaaaattcttcattacctgtatgtatgctgcgtatattttcttcctaggttgggctgctggtaattccatcaatacagctattatgtttttaactgctgctgatactgaagtgaccaaatggaatcaaagaggtattggtgtggccgtcgttttttttgcattcctaattaattctctgaatgtcaagattggtctatatttgcaaaacattttaggtattttcaagattggtattgtcctcttcatttctattaccggttgggttgcccttggcggtggtctcaaagatggttatcaatctcacaactttcgtaatgcttttgaaggtactgaaaccgccactgcttatggtattgttaacgccttatatagtgttatttggtcgtttgtcggttactccaatgttaactatgcacttggtgaagttaagaaccctgtgagaactttgaagattgctggtcctacatcgatggtcttcttggctataatctacatttttgtgaacattgcttacttcgctgtggttccaaaagataagttaatttcttcaaaattgattttagctgctgacttcttcgatattgtgtttggcggccaagccaagagagcagcagccgcactggtcgggttgagtgccttaggaaatgttctttctgtcattttttctcagggtagaattattcaacaactaggacgtgaaggtgtgttgcccttttctaatttctttgcctcttctaagccattcaactccccaatggttggtttgtttcaacattttattgtttgtacagtaaccattttagccccacctccaggtgatgcatatttgctagtccaaaatttaatttcctacccaatgaatattattaattttgccattagcgcgggtttgctttggatatactggcaacgtagacaaggtaaaattgaatggaacccaccaattaaggccggtgtttttgttacgggatttttcacattatccaatttatacctgattattgctccttacgttccaccttcaaatggcgagtcggtgtattcaagcatgccatactggatccactgtgtaattgcttggggtattttcttctttggtggtgtttactacgttgtttgggcccaattattgccaagatggggccactacaaattggtttccaaggatgtgcttggtgaagatgggttctggagagtcaaaattgccaaagtttatgatgacactattggcgatgtcgatacacaagaagacggcgttattgaaacgaatataatcgaacattacaaaagtgaacaagaaaaatcgctgtaaccaaaaaggtacttaccatctcatctcgattcttataatcacgtatgaacattcttataattgcattttctttatacaaaatatataggtaccaaacctcattataatttc

SEQ ID NO: 1276 - DNA, 1051 bp, Saccharomyces cerevisiae
aactttttctctttagatagtagcatagaggactaaggaaaagtagtacagccataaaaaaaagaggaaaagatgtctgccgttttcaacaacgctaccctttcaggtctagtccaagcaagcacctactcacaaactttgcaaaatgtcgcccattaccaacctcaattgaatttcatggagaaatactgggccgcatggtacagttacatgaacaatgatgttttggccaccggtctaatgttctttttattgcatgaatttatgtatttctttagatgtttgccatggttcatcatcgaccaaattccatactttagaagatggaagttacaaccaactaagattccaagtgctaaggaacaactatactgtttgaaatccgttcttctatctcatttcttggtcgaggccatccctatctggaccttccacccaatgtgtgaaaaattaggtattactgtcgaagttccattcccatctttgaaaacaatggctctagaaattggtctattcttcgtcttggaagatacatggcattactgggctcaccgtctattccactacggtgtcttctacaagtacattcacaagcaacatcacagatacgctgctccattcggtctttctgctgaatatgctcatcctgctgaaactttgtctttgggttttggtaccgttggtatgccaattctttacgtcatgtacactggtaaattacacttgttcactctatgtgtatggatcaccctaagattattccaagctgttgactctcattctggttatgacttcccatggtctttgaacaagatcatgccattctgggctggcgctgaacaccacgatttgcatcatcactactttattggtaactacgcttcctctttcagatggtgggattactgtctagacactgaatctggtccagaagctaaggcctccagagaagaaagaatgaagaagagagctgaaaacaatgctcaaaagaagactaactaagagaagaaacatacttcaaaaaaaaaaaaaagaaaaacaacaaaaaaac

SEQ ID NO: 1277 - DNA, 736 bp, Saccharomyces cerevisiae
atgaagttggttaactttttaaaaaagctgcgcaatgagcaggttaccatagaactaaaaaacggtaccaccgtttggggtacactgcagtcggtatcaccacaaatgaatgctatcttaactgacgtgaagttgaccctaccacaaccccgactaaataaattgaacagtaatggtattgcgatggctagtctgtacttgactggaggacagcaacctactgcaagtgacaacatagcaagtttgcaatacataaacattagaggcaataccataagacagataatcttacctgattccttgaacctggattcacttttggttgaccaaaagcaacttaattccctaagaagatcgggtcaaattgcaaatgaccccagcaaaaagagaaggcgcgattttggtgcaccagcgaataaaaggccaagaagaggtctatgattcgctgctggtgtcgttgtcatcttcactgtcaccattactttcgctttcgctagaactactctcttcatcagagttgtatattttattccattgacatttccctaatggaataccccagatatggtcctgtgtggccaaccaatcgactaattcatcaatgtgtattatacaaagttcttcgttataggagtgagcaaagcagtctacttgtagtgggaaactttttagtttgaaataatgctgtgaatatttgtataattgtactttaaataactttatcaaatcattttca

SEQ ID NO: 1278 - DNA, 1205 bp, Saccharomyces cerevisiae
atgagcagtgccgcaaatgagggatgtgtttatttgttcattgtcgttttgcgattatcttcgttttcatgtgttaactcattcattcattcatttactcgttcacgcacacgcagcagttattccctcgacgagcgttcacttgtatcatatagcatagtttacgtagcaatgaataaaagcagcaaggcatttcaggtaccgaataaggtcatcaccaaggaggatattactcccttgtccagatcgcacacaaagaaagcggacactcgcgggacagcagatggtaaaaacaccacagccagtgcagtcgaggccaccccaatcatcatcaccactgctcgttcgatagatactgccggttcactatctgagaacgccaccgaggacgatggcacccaaaacggagatttacacgatgatgacgatgatgacgacctcgaaagtacgctcggctatagttctgagcctgatcctctcttctccccatgccaccagccttccttcaccaacagcacatttagttacagtgcggacaatgaactacccatggaggaaaatcacaacaagaataatttccacgatagcagcgagagcagtatctttctaccacagatacagcaatcattctttttcggcgacaatagcaagagtgacgcaaataatacggacttctggaaggaagtaaatggcactgcagaagaggccatttgcctgcaggagacaagacaaagaaaatgctccctcgtggctctgcatccaggcgacgccaccacgagttcgaacgacacattgggaatagaggacttcatcaaagatgatatcaacagtgctgaagccatggaaccctccccatcttcatcaccatcttcctcccttcttgataatttggactacaatatcaagttattgtgctacagagacaatgagggcaagttcaccttgaaaaaaaggaagtttttgaagaattccctgcgctcatcctctgcaatttctaaaaagtggaaacccttgtctaaaagagataagctgttgaagagggccataagaagaaagagtggtgtttgccagacgttatcagctggttttggtatcggtgaattcatgttgtaataacagtactattaacagtacaataaatagattctttttatacagtgttagggtaacttgtttttgtaggatttgaaaaatatgtcattata

SEQ ID NO: 1279 - DNA, 1077 bp, Saccharomyces cerevisiae
catcacatgtctactcaatccggtatagtcgcagaacaagccttgctgcattctctgaatgaaaatctttcagcagatggcatcgtcatcattatagccaaaatttcccctgattctacctcggtacatcaaacgcaagtcgcacgtagcttcgaggagctggtacagttggcatcacaagaaagagaaccgttgtacatcttctataagccggaagggcttgataagtacttctttgtgtcattcatccccgatggttctccggtaagatcaagaatgctttatgcctcgacgaagaacactctggcaagacaggtaggttcaaactctttatccaccgaacagccattgatcacagatgcacaggacttggtggatttgaaaaattttgatagtgcccgtcctgctggccagaataagcccttgacacatgatgaagaaatgcaaatcgaaatcaataagcaacaggcacttttaaggaaaaacacatccgtcaagttggtttctcaggacagtgcttcgcctttatcgttaactttcagggtcaattctgagaaacctatcaatgaaatactggatagcgagggtaaaaatttaatcatatttcaaatcgatccctcgaacgaaaccatccagatcgtgcaatctgatacatgtccctccgtagatgaactgtacattgacttgcccgggccaagttacacgattttcaggcagggtgattcaagtttctttatctactcttgtccctctggcagcaaagtcaaagatagaatgatatatgcttctaacaagaatggatttatcaactacttgaaaaatgatcaaaaaatcgcatttagtaaagtggtagaaattggcgattttgtggaactagacaagtccttacttatggcaacaaataaagaagatagcctcgatcatggatccaatccagatctcccaaacaaaagcaatttgaaattcaacaaaccaaagggcccattgaggaaaagaagaacatagagatagaaatggcatctatatatgtgtgaccaacaatacatacgtttttattcttctaaatatgaaactgaa

SEQ ID NO: 1280 - DNA, 749 bp, Saccharomyces cerevisiae
caagaaacattgcctcaagtgccaccttcataaagtttattttctattatgtcccagtcgaaccctatcttacgtggcctcgctattacaacagccatagcagctctatcagccaccggttatgctatctactttgactatcaaagaagaaatagcccgcaattcaggaaagtgttgagacaaagggccaaagagcaggccaagatggaagaacaagctaaaactcatgctaaggaagtgaagctgcaaaaggttaccgaattcttatccatggaattagccaaggaccccatccctagtgatccctccgaaagagaagctacatttaccaccaacgtagaaaatggtgaaagattatccatgcaacaaggtaaggaactggaagcagcctctaagttttataaagcattgactgtataccctcagccagccgatttattgggaatttaccaaagatccattcctgaagccatttacgaatatattatattaatgattgccatcttgcctcctgctaatgtggcttctttcgttaaaggagttgttggaagcaaggccgaatctgatgcggttgctgaagctaacgatatcgatgactgagagtaacattttgcttgctttttttctccgtttttgtttcttttactctgtatatagccctatataattacatcatttctctagcctaaatcttgttatatataccaagctttttggaaagctaaggataaaaacaattcttttcatta

SEQ ID NO: 1281 - DNA, 3946 bp, Saccharomyces cerevisiae
ggccagatatttgctttcactttaagaaccaactccaagaaatcttcaaagtttcctttgttagatttatcctctgattgaattattgaaaccacaggtataatcactttggggtagaacattatagttttcatagaaattttacaaaggatctccttcatataccatggctacaagtgttaaaagaaaagcatctgagacttctgaccagaatattgttaaagtgcaaaagaaacattccacacaggacagcacaactgacaacggatccaaagaaaatgatcacagtagtcaagccatcaacgagcgtaccgtgcccgagcaagaaaacgacgaaagcgatacttcacctgaaagtaacgaggtcgctactaacactgctgcgactcgccacaatggaaaggttactgcaacagagtcctatgatattcacatagctagagaaacggctgaattattcaagtctaatattttcaagttacaaattgacgaattactggagcaagtgaagttaaaacaaaaacatgttctgaaagtcgaaaaatttctacacaagttatatgatattctccaggaaattcctgattgggaggaaaagtcattagctgaagtggactccttcttcaaaaacaagattgtttctgttccatttgttgaccccaaacctattcctcaaaatactaattataaattcaattacaagaaaccagacatctccttaattggctcctttgctcttaaagctggaatttatcaacctaacggctcttccattgatactttactaacaatgccaaaggagttgttcgaaaaaaaagatttcttaaatttcaggtgcttacacaagaggagcgtttatttagcatacctaacccaccacctattgatattattgaaaaaagataaattagactcatttttgcaactcgagtattcttattttgataatgatccgcttttaccaattttaagaattagttgttccaaaccaacgggtgattctctttctgattataacttttacaagaccagattctctatcaacttgcttattggtttcccatacaaagtctttgaaccaaaaaaactgttacccaatagaaactgtattagaatagcacaagaaagcaaagagcaatctttaccagccactcctctttacaatttttcagtgttatcttcttcaacacatgaaaactacctgaagtatttatacaagacgaagaaacaaacagaatcttttgttgaagctactgttttaggtagattatggctgcagcaacgtgggttttcatccaatatgtcgcattctggttcattgggtggattcggtacttttgaatttactatcttgatggcagcgttattaaacggtggtggtataaatagtaacaagatattacttcacgggttttcatcataccaattgtttaaaggtgtaataaaatacttagccactatggatttgtgccacgacggccatttacaatttcattctaatccagagaattcctccagttcaccagcttctaaatatattgatgagggtttccaaactccaaccttatttgataagtcaaccaaggtcaatattcttacaaaaatgactgtttcttcttatcaaattttgaaagaatatgccggtgaaacattgagaatgctaaacaacgttgttcaagaccaattctcaaatatttttttgactaatattagccgttttgacaatttgaagtacgatctgtgttacgatgtacagttacctttgggtaagtacaataatttagaaacttctttagctgctacatttgggtcaatggaaagagtaaaatttattactctggagaatttcctcgcccacaagattacaaatgttgcaaggtatgcattgggcgatagaatcaaatatatccaaattgaaatggttggtcaaaagtccgattttccaatcaccaaaagaaaagtgtactctaacacaggaggtaaccatttcaactttgattttgtaagagtaaaattgattgttaacccctctgaatgtgacaaattagtcaccaagggccctgctcattctgaaactatgtctacagaagcagccgtttttaagaatttttggggaattaaatcttccttaagaagattcaaggatggctccatcacccattgttgtgtttggtctacatcctcatcagagcccatcatttcctcaattgttaactttgcattgcagaaacatgtttcaaaaaaggcacaaatatcaaatgagactatcaagaagtttcataatttcctaccgttgccaaacttaccctcaagtgctaaaacatcagttttgaacttgagcagctttttcaacttaaagaaatcctttgacgatttatacaaaataattttccaaatgaagttaccgctttctgtaaaatcaatcttaccggttggctctgcatttagatacacttccttatgccaaccagtaccattcgcatactctgatccagatttctttcaagacgtcattttggaatttgaaacctcacctaaatggccagatgaaattacttccttagaaaaggctaaaacagcttttcttctcaaaattcaagaagaattaagcgctaactcttcaacttataggtcgtttttcagcagagatgaatccatcccatacaatttagaaattgtaaccttgaacatcttgacacctgaaggttatggattcaaattcagagttctaactgaacgtgacgaaatcctttatttaagagctatagcgaatgctaggaatgagttgaaaccagaattggaggccacattcctaaaatttactgcaaaatatctggcttccgtaagacatactcgtactttggagaatatatctcattcgtatcaattctactcccctgtggtaagactattcaaaagatggttggacactcatttattactaggtcatataacggacgaattagcagagttgattgccattaaaccttttgttgatcctgcaccatatttcattccaggttctcttgaaaacggtttcctcaaagtgcttaagtttataagtcaatggaactggaaagatgatccattgattttagatctagtaaaaccagaagatgatataagagatacatttgaaacaagtattggagctggctcagagctagactccaaaacgatgaaaaagctttctgaaagattaaccctagcacaatataagggcattcaaatgaacttcacgaacttgaggaacagtgatcccaacggtacacatttgcaattttttgttgcctctaagaacgatccaagcggtattctttattcatcaggtatcccactacccattgctacaaggcttacagcattagctaaagtagccgtgaatcttttacagacacacggtttaaaccagcaaactatcaatcttttattcacgcctggattaaaagattacgattttgtcgttgatttgaggacaccaataggtttgaaatcatcctgtggtatactttcagccacagagttcaagaatataactaacgatcaagccccatcgaactttccagagaatttgaatgatttaagtgaaaaaatggatccaacataccagttagtgaagtatttgaacttgaagtacaagaatagtttgattttatcaagccgcaagtatataggtgtgaatggtggagagaaaggagataaaaatgtcatcacagggctaataaagccactcttcaagggagcccacaaatttagagtaaacttggattgcaacgttaaaccagtggatgatgagaatgtgattttaaataaagaagccatatttcatgagattgctgcattcgggaatgacatggttataaattttgagacagattagaataaacaacaaaatcataacttttagaagtatctgtataatattaaataattaaagcagccggca

SEQ ID NO: 1282 - DNA, 3479 bp, Saccharomyces cerevisiae
ctactggtgttctctgtgtgtgctaccactggctgtcatcgttgttgtatgtccttcagatttatggaattacttagatggtatgaataagtggttaaacacattatctaagacattcacttttcggcttttgaactgtcattataggcgatcattaccactttgtcaaaacttttctctgaagaagtcgttaactcataatcaagtcaggttctttaaaatgagcgatcttgataatttgcctccagttgacccaaagactggtgaggtcatcattaatccgttaaaggaagatggctctccaaagactcctaaggaaattgaaaaagagaagaaaaaggctgaaaaactgttaaagttcgctgccaaacaagctaaaaaaaatgctgctgccaccacaggtgcatctcaaaagaaacctaagaaaaagaaggaagttgagccaatccctgaatttattgacaaaactgttccaggtgagaaaaaaatcttagtatccttggatgatccggctttaaaagcttataaccctgctaacgttgaaagttcttggtatgactggtggatcaagactggtgtttttgaacctgagtttaccgctgatggtaaggttaaaccagaaggtgtattttgcattccagcacctccaccaaacgtcactggtgccttacatattggtcatgctttgactattgctatccaagattctttgatcagatataacagaatgaaaggtaaaactgtcttattcttgccaggtttcgaccatgctggtattgctactcagtccgttgtggagaagcaaatctgggctaaggacagaaagactagacatgactatggaagagaagcttttgttggtaaggtctgggaatggaaagaggaataccatagcagaattaagaaccaaattcaaaaattgggggcttcttatgattggagccgcgaagctttcactttgagtccagaattgaccaagtctgttgaagaagcttttgttagactacatgatgaaggtgttatttatcgtgcgtccagattagttaattggtctgttaaattgaataccgctatctctaatttggaagtcgaaaataaggacgttaaaagtagaacgcttttatcagtcccaggctatgatgaaaaggttgaatttggtgttttaacatcatttgcttatccagttatcggtagcgatgaaaaactgatcattgctacaactagacctgaaactatatttggtgatactgccgttgcagttcatcctgatgatgaccgttacaaacacttgcatggtaagttcatccaacatcctttcttaccaagaaaaattccaattatcaccgacaaggaagctgttgacatggaattcggtactggtgccgttaagatcactccagcccatgaccaaaacgattacaataccggtaagcgtcacaatttggaattcatcaatattttgactgacgatggtttattaaacgaggagtgtggtccagagtggcaaggcatgaagaggtttgatgccagaaagaaggtcattgagcagctgaaggaaaagaacctatacgttggccaagaagataatgaaatgaccattccaacttgttccagatctggtgacattattgaacctttattgaaacctcaatggtgggtttctcaaagtgaaatggccaaagatgctattaaggttgttagggatggtcaaattaccatcacccccaaatcttctgaggctgaatatttccattggttgggtaacatccaagattggtgtatttccagacaattatggtggggtcatcgttgtccagtttactttattaatatcgaaggcgaagaacacgatagaattgatggtgactattgggttgctggtaggagcatggaggaagctgaaaagaaggctgctgccaaataccctaattccaaatttactctggaacaagatgaagatgttttagacacctggttctcgtccggtttgtggcctttctccactttgggttggccagagaagactaaagacatggaaactttttaccccttttctatgttggaaactggttgggatattcttttcttctgggttactagaatgattctattgggcttaaaattgaccggttcagttccattcaaggaagttttctgccactctttagtccgtgacgctcaaggtcgtaagatgtctaaatctttaggtaatgttattgacccactagacgttattactggtattaagttggatgatttgcatgcaaaattattacaaggtaacttagatccaagagaagttgaaaaagctaagatcggtcaaaaggaatcctaccctaacggtattcctcaatgtggtaccgatgctatgaggtttgcattatgtgcttataccactggtggtcgtgatattaacttagatatcttacgtgtcgaaggttacagaaagttctgtaacaaaatctaccaagctaccaagtttgcattgatgagactcggtgacgattatcaaccacctgccactgaaggtctatcaggtaacgaatccttggttgaaaaatggatcttgcacaagctgactgaaacctcgaaaattgtcaatgaagctctagataaacgtgacttcttgacgtccactagcagtatttacgaattctggtatttgatttgtgatgtttacatcgagaactctaaatacttgattcaagaaggctctgctattgaaaagaagtccgcaaaggatacattgtatatcttgctggacaacgctttgaaattaatccatccattcatgccattcatttctgaagaaatgtggcaaagacttccaaagcgttccactgagaaggctgcctcaattgtaaaagcttcttatccagtttacgtatctgagtacgatgatgtcaaatcggccaatgcttacgacttggtcttgaacattaccaaagaagctcgttccttgttatctgagtacaatattttgaagaatggtaaggttttcgttgaatctaaccacgaggaatacttcaaaactgctgaagatcagaaagattctattgtctcgttgatcaaggccatcgacgaagtcactgttgttcgtgatgcttccgaaattccagaaggttgcgtattgcaatctgttaacccagaagtcaatgtacatcttctcgtcaagggacacgttgatattgatgctgaaattgcgaaagttcaaaagaaacttgaaaaggctaaaaaatccaagaacggtattgaacaaaccattaacagtaaggattacgaaacaaaggctaatacacaggccaaggaagccaataaaagcaagctggataacactgttgccgaaatcgaaggtttggaagctactattgaaaacttgaagcgtttgaaattgtagattgaaggtagataaaaattaatgtaatatatatatatatatatgctatgtatatgtaacaacgaaaatgttaagaatttta

SEQ ID NO: 1283 - DNA, 945 bp, Saccharomyces cerevisiae
atgttcaaagaggaggactcgttaagaaaagggcaaaatgtggccgcgtggaaaactttgttggctggcgccgtatccgggctgcttgcccgtagcataactgctcccatggataccattaagatcagattgcaattgacccctgcaaatgggctgaagcccttcggaagtcaggtcatggaggtggccagaagcatgataaagaacgaaggcatccggtccttttggaagggtaacatacccggttctttgctgtacgttacctatggctcagcgcagtttagttcatactccctttttaatagatatttaactccatttggactagaggcgcgcttacatagtcttgttgtcggagcctttgctggcataaccagttccatcgtttcctacccgttcgatgttttacggacccgactagttgccaacaaccagatgcactcaatgagcatcacgagagaagtgcgtgatatctggaaactagaaggtctccccggatttttcaagggctccatcgcgtcaatgacaaccataactctaaccgcatctataatgttcggaacatacgaaacaatcaggatatactgtgacgaaaacgaaaaaacgaccgccgcgcataaaaaatgggaactggctactttaaatcacagcgctggtaccattggcggcgtcattgctaagatcattactttccccctcgaaacgatccgtaggcgaatgcagttcatgaattcgaagcatctggaaaagttctcccgtcattcgtctgtatacggttcttataaagggtacggattcgcaagaatcggtttacagattttgaaacaagaaggtgtgagttcgctttacagaggtattctggtggccctttccaagacaatacccaccacttttgtgagtttctgggggtatgaaactgccatccattatttgcggatgtactaa

SEQ ID NO: 1284 - DNA, 2157 bp, Saccharomyces cerevisiae
cgtgaatcgagctactttatacgcatttaattcctcatgaaatggttttagaaacgctgaaacaagggcttgacagcagtcaaatacatgaagctttaatacaactagattcctatcctcgcgaaccggtggatctagatgcctcgatggttctcataaaattcgtaattccagtttatccatcactaccagaaagatcgaaggtgatattgagacggctagcttctaaatcgtttacatttttatgccaaattgtcaccttctcaaggacaataagtggccgcgatggactgcaagagatacgcatataccaagaaattttagaagacatcatcagttttgaaccgggatgtttgactttttatttaaaggcaagcactactagcaaagcagaccgtgatagcattaaggcccttttctttgggagcaagttatttaatgtgttggccaaccgaattgatatggcgaaatatttgggataccttcggcttcagtggaaatttctacttgagagtaatgaaacagatccacctgggtttttaggggaatggttagtttcatcatttttgcttaacccagtgctagcggcagatatgttattaggcgaattatttttattgaaagagtcgtatttcttttcttttcagaaaatcatatctgctagtagtctgatagatcaaaagaggctgattgctaagtttttattaccatatattcaagttatcgtgactttagaaaatttgaacgatgttaggaaaattctgcggcggtttgatctcgataaaatcataagtctgtccgtattatttgaaatacagtcgctgccattgaaggaagtgatagtacgtctgatgagcaaccactcttccacgaagtttgttagcgctttggtaagtaaatttgctgattttacagatgaggaagtagacacaaagacatgtgaattgcttgtactctttgcagtgcacaatctcaatcattcccagagagaggaaatagcacacgatgagcggtttttgaatggcgtgaccaaacatttaggtagcaatgaacgtgaggcaagggagcgtgcgatgtttattgccaagcttttatcaggcggtcatctgaagtacgaaagtgattttaaaatcaatataccgaatgtcaaattcgaaagcaatagcgatgataaaatcattgatttccaatctttaaaaaatccatccatatgcaatacccaaactgatgtgggtaaggataagattactgaggtctcgggtcatgttcaaagccttacattggactgcagtgatagcgatgatgaagatgagaacgatgagcgggagattgttaaacgaattgtatttttaaaagatttaatgaaagaatacgaaaaaactggggaatctcgaaaagctccattgataccacttctgaagcaaacagtgaaattgatacggcaaaaggcggattttcagttagaggttggctattatgcacaaggtattctgtcaagcattgtgtgcttgaataatgaatttgatgaaccgcttttcgagcagtggagaataaacgctctaacaagcatactggtcgtccttccagagaaggtgaatggcgctataaatattctattcaattcagaactgtcgttacagcaaaggatgtcactattgtcggctctgggtctttctgcaagagagttgagagggcttgatgatcctactattgtcaagcccaagtttgattttccaacaaatcgtttaccgtgggatgatcaaagccatcataatagtaggcttgttgaagttcaagagtcaacaagtatgataaagaagacgaaaacagtatggaaatctagaaaactaggcaaggatcgagaaaaaggaacgcaaaaccgctttagaaaatatgctggtctattcttctatccgctagcacacggttggcttaatggaattgacgtaggcacatacaatcagctttttaagtcgcattatttaacaacactgcgtatcatatactcttgcgctaacccggtccacgattttgaatccatgacggagttgatgaatcatataattagttcagccatagaggaaggaatttctctcaataaaggttagtagcatagttatttgtaccaatcttatgatacatatttgaataaattta

SEQ ID NO: 1285 - DNA, 1188 bp, Saccharomyces cerevisiae
agctttcgcaactgacatatacagacagtgaaaagtaataaattgcccaagtgtgaacatgtcaggtgtaagctctgttatgctcggtcttcgacctgctacaagaatttttttccgcagtaatatttcggtttcaccttcgaggacttttgtatcatatattggaagatcccagagcacgtcgatactcaaaaatgctcccaacttagaggacaatgtcacaaatcttcagaaaattataccgaaacggttcttttctcaaacatcaattttgaaatcaaggtggaagcctatattcaatgaagaaactactaatcgatacgtacgtttgaacaggtttcagcagtaccagcagcagagaagcggcggcaatcctctgggctctatgactattttggggctctctttaatggcaggaatatattttggctccccttatttgttcgagcacgttccaccctttacgtattttaagacgcatccaaagaatctggtatacgcgttattaggcatcaatgttgccgtatttggactatggcagctacccaaatgctggaggtttctacagaagtacatgttgctgcaaaaggattacgtaactagcaaaatttcgataatcggaagtgcgttttcacatcaagaattctggcacttaggtatgaacatgctagcgttgtggtcctttggtacttcactcgcaacaatgttgggagcatccaattttttctccttatatatgaatagtgccattgcaggttctttgttttcgttatggtatccaaaactggcacgcctagccattgtcggacctagcttgggtgccagtggagcgctatttggggttttaggatgtttttcatatctattcccacacgctaaaattttgctgtttgttttcccagtcccaggtggggcttgggtagcattcttggcttcagtggcatggaatgcagctggttgtgctttaagatgggggtcatttgattacgctgcgcatttaggtggctctatgatgggggtcttgtacggatggtatataagtaaagctgtagagaaacaaaggcagcgtcgccttcaggctgctggtaggtggttttaatcacttaaaaaaagacacattctcattcgaaatattgtaaatactgctatgtcttctatgtacttaatcttatttatgcatttgaaaaa

SEQ ID NO: 1286 - DNA, 2004 bp, Saccharomyces cerevisiae
gcggtatcctacttatacaatgagaatcaagaagaaaaacaccagaggtaacgcaagaaactttattaccagatctcaagctgtgagaaaattacaggtttctcttgctgatttcagaagattatgtatattcaaaggtatctatcctagagagccaagaaataaaaagaaggcaaacaagggctctactgcaccaactactttttactatgctaaggatattcaatatctaatgcatgagcccgttttggctaaatttagagaacacaagacttttgctaggaaactaacaagggctttgggtaggggagaagtctcttctgctaaaaggttagaggaaaacagagatagttatactttagaccatattatcaaggagcgttatccaagtttcccagatgctataagggatattgatgatgctttgaatatgttatttcttttctctaatttgccctctaccaaccaggtttcctcgaaaattatcaatgatgctcagaaaatctgtaatcaatggttagcctatgttgccaaggaacgcttggttcgtaaagtgtttgtatccattaaaggtgtttattatcaagccaatattaagggtgaagaagttagatggttagttccattcaagtttccagaaaacatccccagtgacgttgatttcagaattatgttgaccttcttagaattctactcgactctattgcatttcgtcctatataagttatacaccgatagtgggttgatttatccgccaaaattggatcttaaaaaggataaaatcataagtggtttgtcatcatatattctagaatccagacaagaagacagcctactaaaacttgacccaactgagattgaggaagacgtaaaagttgaaagtttggacgcatcgacattaaagtctgccttgaatgccgatgaggcaaatactgatgaaacagaaaaggaggaagaacaagaaaagaaacaagaaaaggaacaagaaaaggaacaaaatgaggaaacggaactagatactttcgaggataacaataagaacaagggtgacatcttaatacagccaagtaagtacgattctcctgttgcttctttgttttctgcatttgttttttacgttagcagagaagttccgatcgatattcttgagttcttgatcttatcttgtggtggtaatgtcatcagtgaagctgctatggaccaaattgaaaataagaaggatattgacatgtccaaggtcactcatcaaattgttgacaggccagttttgaaaaacaaggtagctggcagaacgtatattcagccacagtggatatttgattgtatcaataaaggcgaattggtacctgccaacaaatatcttccaggggaggctcttccacctcacttaagcccatggggtgatgctattggttacgatccaactgctcctgtcgaagaaggcgaagaagaagaaagtgaaagtgaaagtgaaagtgaagatcaagttgaggaggaagatcaagaagttgttgctggagaagaagatgatgacgatgacgaagagctacaagctcaaaaagagcttgaattggaagcacaaggtatcaaatattctgaaacttcagaagctgataaggatgtcaataagtcaaagaacaaaaagagaaaggtggatgaagaagaagaagaaaagaaattgaaaatgataatgatgagtaacaaacaaaagaaactttacaaaaaaatgaagtattctaatgctaaaaaggaggaacaagctgagaacttaaaaaagaaaaagaagcaaattgccaaacaaaaagctaaactgaataaactagattccaagaaatagttttctcttcttttccaatagcctctcaaaaattttgtcttttaatttaacatctttattactttataattcctcggtatagcaacattagatatataactacacatttttgtttgtagatatagaaatacctgtacattaaaagtggttactgttgttctgtataa

SEQ ID NO: 1287 - DNA, 454 bp, Saccharomyces cerevisiae
atgaacgcaatactggaaagcaatagtagaaactaaccaagacttcaaaagaatcaaataatggctgtagatgttcctcgtgcggtgattaataaacttatgctgtttactgcagcgatggtggtactgcccgtactcacttttttcattattcagcaatttacgccaaataccttaattagtggaggtttagctgctgcaatggccaatgttgttctaatcgtttacattgttgtagcgttccgcgaggatactgaagatcacaaagttgatggtaataaaaaggaagactgattgagtagtatatgttgctagaagagaatatacaagaaaaatagtagaggctaaataaaaaaaaagtagcattaaatgttatggatgattgggatatatatgcaaataacccaatcttacatatgtttctttcaaatatatgagtatatataacgattaa

SEQ ID NO: 1288 - DNA, 1683 bp, Saccharomyces cerevisiae
gtgcagctgtttagatcacaaaagcgtaattaagaataagatctaccaacaagaacagagccaaaatattttcgtccgttatatcaaccatcaaaggaagctttaatcttctcataatgtcacgatcccttttggtagagaatagtagaaccattaatagtaatgaagagaagggggtaaacgaaagtcaatatatcttacaaaagagaaacgtcccaaggaccattctcggtaatgtcacaaataatgcaaatatcctgcaagagatttctatgaacagaaaaattgggatgaagaacttctcaaaattgaacaacttctttcctttaaaggatgatgtttcgagagccgatgacttcacctcctcttttaatgacagtagacagggggtgaaacaagaagtactaaacaataaggaaaatattcctgaatatggatattccgagcaagaaaagcagcagtgctcaaatgatgactcttttcatacgaattcgactgccttgagctgtaatcggttgatatactctgagaacaagtctatttccactcaaatggaatggcagaaaaaaataatgagagaagattccaaaaaaaaaaggccaatatcaactcttgtagagcaggatgaccagaaaaagttcaaactccatgaattgactacagaagaagaggttctggaggagtacgaatgggatgacctagatgaagaagattgtgatgatcccttaatggtgagcgaagaggttaatgatatcttcgattatttgcatcacttggaaataatcacattgccaaataaggcgaatctctataagcataaaaatattaagcaaaacagagacattttggtgaactggataatcaagattcataataagtttggccttctgccggaaactctatatttggccataaacataatggatagatttctttgtgaagaggtggttcagttaaatagattgcaactggttggtacatcatgcctgttcatcgcatctaagtatgaggaaatatactcccctagcataaaacattttgcgtacgagacagacggtgcatgctctgtggaagatattaaagagggtgaaagatttatattggaaaaactcgattttcaaattagtttcgctaacccaatgaatttcttaaggagaatatcaaaagcggatgactatgatatccagtctaggacgttagcgaagttcctaatggaaatatctatagtggacttcaagttcatcgggatattaccgtcattatgtgcctcagcggcaatgttcctttcgagaaaaatgctgggcaagggcacctgggatggcaacttaatccattatagtggtggttacacaaaggcaaaactatatcccgtttgccaattactgatggattatcttgttggatctactattcacgacgagttcttgaaaaaatatcaatcgagaagatttttaaaggcttccataatttctatcgaatgggcattgaaggtaaggaaaaatggatatgatattatgacattgcatgagtgaaggtgctagcctacacagaaaaccaaaatctcacttccttactttatcatctattttatagaaaaatcaggcattcattattcatataacggttatctcatatatattatcacacggtatcagttttgtaggctgtaataattaattcatt

SEQ ID NO: 1289 - DNA, 1353 bp, Saccharomyces cerevisiae
tgttctgtacacatattcacttgtagaagttgattagaatgacagcctcatcaaatgacgatgacctaatattcgaatgttatagcgatcctgagttaaaaagatggacacaccttgctaatgcaaaagcttggaaaggtattctgaccgtgcagcagtacgctgatagggaacaattgctagggtcttcagagatttctcaaaagaataaatcaaatgaaatgatgacaaaatacccaaaaagttaccagtggcttgggcagaagtactttgttttaaaggatcgatctttgccagataatggaaaatttagtcaagttgtttccagttgcgaaactttaaacaggattggatattgtattcatccgggttctaatggaaaaatcgagccagctttgattgtatgcattgggggcgtctttacctttgaaaaccatcgcggcaagggctacgccaagaagatgattatcaaactgaatgaattttatgacaagattcgtgatgacgctaacaccgtactagaattgaaaaatttggtgattaacctttacagcgaagtcggagaatattattccgcattaggatacgagagtatgcatgttcccttgcaccgcatttctaaattagatgaacttactgagagatactgtggagaagatgatgaccatgatggtaagtacttgggatttgatgattacaggggtttagtaggactacatgagacacagttcaaagaaagcttattaagtttacacaaagaaaacccagagaagtttgtttttaccgttgcgccagactttgacattttcacatggtttcagtatcgtgatctttttatcatgaataaatcaggaagaaaagcccagcaaaatctgttttttggatacgcgttgagtgataacagccacatcatatggcatcacaattggaacggtgattctctgattattgtcaaaatccatatacctgaagaaacatttcaaaggaaagaattgaagctcaaaaaattactaaggaaggccatagaagagacaaagcttcatggattgcaagaattagaattttgggacgaagaaattcccatcaaaaagtacccacaattgtttcagttattaacagagcttgaaaatgaatctaaagttttctcagaaaacggttccatcagtgctgttcgtccccccaaaggatatacagccgagcaggtaatttgggataacaataccaaattctgttggttttaagtcaaatattgtgttgcttatacaggaaaagtcaaggtttcaaactacatatcattatttactgttaaaattcacatatactaatacatacggtaatagattgaacctcttc

SEQ ID NO: 1290 - DNA, 4513 bp, Saccharomyces cerevisiae
ccaagcgaacaggtcattaattgcctagaatctttacatagaatttgccttttatggaagagacgggagattcgaagctggtccctagggacgaggaagaaatagtaaatgacaacgatgaaactaaagcgcctagtgaggaagaagaaggagaagatgtctttgactcctctgaggaagacgaagatattgatgaagacgaagatgaggcaagaaaagtgcaagaaggcttcattgtcaacgatgatgatgaaaatgaagacccaggaacaagtatttccaaaaaaagaagaaaacataaaagaagagaaagagaagaagatgatcgactatccgaagatgatttggatttgttaatggagaatgctggtgttgaacgtaccaaagcgagctcctcttcaggaaaatttaaaagattaaagagagtaggagatgaaggaaacgctgcagaatcagaaagtgacaacgtcgctgcatcaaggcaagattctacgtctaaattggaagatttcttttctgaagatgaagaagaagaagaatctggtttacgcaacggtaggaacaatgaatatgggcgtgatgaagaagaccatgaaaataggaacagaacagctgacaaaggtggaatcttggacgaattggatgatttcattgaagatgatgaattttctgatgaggacgacgaaaccagacaaaggaggatccaagaaaagaagcttttaagagaacaatccatcaaacaacctacacagattactggtctatcgtcggataagattgacgagatgtatgacatttttggtgatggtcatgactacgattgggctttagaaattgaaaatgaagaactagaaaatggtaacgacaacaatgaagctgaagaagaagagatcgatgaagaaactggtgctataaaaagcaccaagaaaaagatatctctacaagacatttatgatttagaggatttgaaaaaaaacttgatgactgaaggagacatgaaaattagaaagacagatattccagaaagatatcaagaattaagagcaggtattactgactacggaaatatgtcatcggaggatcaagaattagaaagaaactggatagcagaaaaaatttctgtggataagaacttcgatgccaattatgatctcactgaatttaaagaagcaattgggaacgcaatcaaatttatcaccaaagaaaacttggaagtcccttttatatatgcttaccgtcgtaactatatttcctcaagagaaaaagatgggtttcttttgactgaagatgacctttgggatatagttagccttgacatcgaatttcacagtcttgtgaacaaaaaggattatgtccagagattttatgcagaattacatatcgatgatcctattgtcactgaatacttcaaaaatcagaatactgcatctattgcggaactgaattctctacaggatatttatgactacctagaattcaaatatgccaacgaaatcaatgaaatgtttataaaccacactggaaagactggtaagaaacatttgaaaaattccagttatgaaaaatttaaagctagtcctctttatcaagcggttagtgatattggtatatcagctgaggatgttggtgaaaatatcagttcccagcatcaaatccaccctcccgtagatcatccaagttccaaaccagtagaagtgatagaatctatattgaatgcaaacagcggtgatttgcaagtctttacgtccaatactaagctggcaattgatacggtccaaaaatactactctttggaattgtctaaaaatacaaaaataagggaaaaagttagatccgatttttccaaatattatctggctgacgttgtgttaactgctaaaggtaaaaaagaaattcaaaagggatctctgtatgaggacataaaatatgccatcaatagaactccaatgcacttccgtagggatccagacgtttttttgaaaatggtcgaggctgagtctttgaacctgctcagtgttaagttacacatgtcgtcacaagcccaatatatagagcatttattccaaattgcacttgaaactaccaatacctcggacatcgcaatagaatggaataacttccgtaaactggcattcaaccaagcgatggacaagattttccaggatatatctcaagaagtcaaagacaatttaacaaaaaattgtcaaaaattggtagccaagactgttcgccataagtttatgacaaaattagaccaggctccattcattcctaatgtcagggatccaaaaattccaaaaatcttatctttaacctgtggacagggtagattcggagccgacgctataattgctgtctacgtcaacagaaagggtgattttataagagattacaagattgtcgacaatccatttgataagacgaatcctgaaaaatttgaagacaccttggataatatcattcaaagctgtcaaccgaatgccatcggaatcaatggccctaacccaaagactcaaaaattttacaaaagattacaagaagttctacataagaagcaaatcgtcgacagtagaggacatactattccaatcatttacgttgaggacgaagtcgctatccgttatcagaattccgaaagagctgctcaagaattccctaataaacctcctctagttaaatactgtatcgccttggcgcgctatatgcattccccattgttggaatatgctaatttaacaagtgaagaagtgagatcattgtcaattcatccacaccaaaatctgttatcctcagaacaattgagttgggctcttgaaaccgctttcgttgatattgtcaacctggtaagtgttgaagttaacaaagccacagataataattactacgctagtgcgctgaaatacatctctggctttggaaaacgtaaagctattgatttcttacagtcccttcaaaggctaaatgaaccattactggctcgtcaacaattaattactcataacattcttcacaagactatttttatgaattccgcgggattcctctatatctcatggaatgaaaaaagacaaaaatacgaagatttggaacatgatcaactagatagcactagaattcatccagaagactaccatttggccaccaaggttgccgctgatgctttagaatacgatcctgatactattgccgaaaaagaagaacaggggactatgagtgaattcattgaactgttgagagaagatcctgaccgtagagctaaactagaatcactaaatctagaatcatacgcagaagaacttgagaagaataccggattaagaaaacttaataatctaaatacaattgtccttgaattgttggatggatttgaagaattgagaaatgactttcatcctttgcaaggtgatgaaattttccaaagtttgactggtgagtctgaaaagacgtttttcaagggtagtattattccagtcagagtagaaagattctggcacaacgatataatttgcactacaaactctgaagttgaatgtgtagtaaatgctcaacgtcacgcaggtgcacaattaagaagacctgcaaatgaaatatacgaaattggtaaaacatatccagcaaaggtgatatatattgactatgctaatattactgcagaagtttccttattagatcatgatgtcaaacagcaatatgttccaataagctacagtaaagatccttccatttgggacttgaaacaagaactggaagatgccgaagaggagaggaaattgatgatggcagaagcccgtgcaaagagaacacatcgtgttatcaatcatccttactatttccctttcaacggcagacaggctgaggattacttaaggagtaaagaacgtggtgaattcgtgatcagacagtctagccgaggtgatgaccacttggttatcacctggaaattggataaggatttgtttcaacatattgatatccaagaattagaaaaagaaaatcctttggctttaggtaaagtcttgattgtcgacaatcagaaatacaatgatttagaccagatcattgtagaatatcttcaaaacaaggtaaggctcttgaatgaaatgacatctagtgaaaaattcaaaagcggtactaagaaagatgtggtcaagtttattgaagactactctagagtgaatccaaataagtctgtgtactatttcagtttgaaccacgataaccctggttggttttacttgatgttcaagattaacgcaaatagcaaattatacacatggaatgtgaaattaacgaacactggttatttcctggtaaactacaattatccaagtgttatccagctttgtaatggttttaagacgcttctaaaatctaacagtagtaagaatagaatgaacaactaccgttagatgcgtatgtagtgtccattgttattattaattttattattactttgaccattgtttaggtaaggtatgtaaactagaacgcttcaactgtattttttacgtaa

SEQ ID NO: 1291 - DNA, 636 bp, Saccharomyces cerevisiae
taagacaacaggaaataaacaaagatgggtaaaggtaagccaagaggtttgaactctgctagaaagctacgtgtccacagaagaaacaaccgttgggccgaaaacaactacaagaagagattgttgggtactgccttcaagtcttctccattcggtggttcttctcatgccaagggtatcgtcttggaaaaattgggtatcgaatccaagcaacctaactctgctatcagaaagtgtgttagagttcaattaatcaagaacggtaagaaggtcactgctttcgttccaaacgatggttgtttgaactttgtcgacgaaaatgatgaagtcttgctagcaggtttcggtagaaagggtaaagctaagggtgatattccaggtgttagattcaaggtcgttaaggtctctggtgtctccttgttggctttgtggaaagaaaagaaggaaaagccaagatcataagcacgaaagttatcctctcgaggactacattgtttttgtaccttaatgtatctctttattcttccagaaagttccttctaatttcttattaggaatgggagagaatcacatcaatattttctctttaatagaatgtataattcaatagaaaaaaacaacataatttgcacttta

SEQ ID NO: 1292 - DNA, 1209 bp, Saccharomyces cerevisiae
atgcgtgagaatgcaatgtctacaaagaaacttccctataaattatctggcagcagcaaaataacaacttccatacctaatgatttaatcatactgcgaaataattgcataaattcactgaacagttcctcgtccaaagctgacagcattacatgtatagatacgtggctaaaatacacagagggtttgttaacccacaggtacgaagctaataatgacgccgctctcattgaagaggagatagcgattgcgttaatcaatgttgccgtattttatcaagacatcggtattgaaacattgtacagagcttatgaatcttcacaagcgtcaaataacttatggacaacaagcgggacctatctaaagagaggtctaggcttaatctgctttcttggaaagaattttcaaataaacacagctaatgattgccaaaagatgcaggttctcaacgtccttaatcagctatcattagagtttcaattgctgcaacaactagggattgtcgttttagcactgtctaaactaagatcaaaaatcagcaaggatgctgttgcggaccttgagcctcaagaattggaagagctaggcaagtccagtgtcttttacgctaagctttgtattggatcttatagcactgcttcgcaatgccaaggaggccgtatagtggacgcattatttatgaattatttacagagtttgacctatctcttcctatcaatcaaccaatacaacaatgatgagtgcggaattgccattgggatgctccaagaatcgatcaaaaaactgttaaatatagtacccaattcgcaactaaaagagttggacattttatcctcaaccgatattacaaagaagagggatcttataaagatgtcgtttaaaaggaaaatacatgggtctactttaaaaaaccaacggatatttgagaagaaggtgccattttcatccaaagcgtacatgatgccgttattgaaatcttcattagacgattttgttatcccactaacgatactgttaaggtacagataccagacaaccaatgagaattattccttcaaaacggttgaaaccgacgtttctaaattgaaggagcttttccccaggggaaaatcgtcagatattgaaggcactgtatggagtttccaagatggacatcttacatttgcagactcaaataatgcaacccacaattgcggtaattatttttga

SEQ ID NO: 1293 - DNA, 1849 bp, Saccharomyces cerevisiae
actcactacaatacaatatgtgtggtatctttgcagccttcaagcatgaagatattcacaacttcaaaccaaaagctctacaactatctaaaaaaatcagacaccgtggcccagattggtcaggaaatgccgttatgaattccaccattttcgttcacgagaggttggctattgttggtttagactccggtgcccagccaatcacttcagctgatggcgaatatatgcttggcgttaatggtgagatctacaaccacatccaactaagggagatgtgctctgattacaagtttcaaactttcagtgactgtgaacccatcataccgttatatttggaacatgatatcgatgctccaaaatatctggacggtatgttcgcattttgtctgtatgattccaagaaagaccgtattgtcgctgcaagagaccctatcggtgttgtcactttatacatggggcgttcttctcagtctccagagaccgtttattttgcctccgaattaaaatgtctaactgacgtttgtgacagtatcatttcgttccctcctggtcatgtctacgattctgaaacggacaagattactcgttactttaccccagactggttggatgaaaagcgtatcccatccaccccagttgactaccatgctatcagacacagtttagaaaaggccgttagaaagaggctaatggctgaagttccatacggtgttcttctatccggtgggctggactcttctttgattgctgcgattgctgctcgtgaaacggaaaaagctaatgctgatgctaacgaagacaacaatgttgacgagaagcaacttgcaggtatcgatgaccaaggccatctacacacatccggttggtctcgtttgcattcgtttgcgattggtctaccaaatgcacctgatttacaagcggctagaaaagtcgccaaattcattggttctatccaccatgaacacacttttacattacaagaaggtttggatgctttggacgacgtgatctaccatttggaaacttacgacgttaccactatcagagcttctacaccaatgttcttactatctagaaagattaaggcccaaggtgtcaaaatggttctttctggtgaaggctcggacgaaatattcggtggctatctatatttcgcacaagcaccttctgctgcagaatttcacaccgaatctgtgcaacgtgtcaagaacttgcatttggcagattgtttgagagctaataagtccacgatggcttggggtctagaagctcgtgttcccttcttagacaaagactttttgcagctatgtatgaacattgatccaaatgaaaagatgatcaagccaaaggaaggacgtatcgaaaaatacattttaagaaaggcattcgacactacagatgaaccagatgttaagccatacctacctgaagaaatcttatggagacaaaaggaacaattttccgatggtgttggctactcatggattgacggcctaagagacactgctgaaagggccatttctgacgccatgtttgccaatccaaaggctgattggggcgacgatattccaaccaccaaagaagcttactggtacaggctgaagtttgatgcttggtttcctcaaaagactgcggcagacactgtcatgagatggattccaaaggccgattggggttgtgccgaagatccttcaggtagatacgccaaaatacacgaaaagcacgtcagtgcttaatacgagcgcaatcgtattcttataattgacgagtgaaccaagaaatgcggtgatacaaacggatattaatctatatagatatatgtatataataaaagttttcaatctgctga

SEQ ID NO: 1294 - DNA, 3196 bp, Saccharomyces cerevisiae
gaaatatgggaaggactattaggagacgccggagtaattcgtcgctttcggaggccatatcagtttctttaggaataaatcaagactcatctgtgaacaagatgcatagagcgagtgttagcgcaatgtctcctccattatgccgttcatacatgagcggattttttactggtggaaactcacctatgatcaataatttgtcggattcaaaacttcccatctcgaacaaacaacatcctaaagtgatacatggatcagaaaatttgcataggcagacagctcaactatccaatgaattttgctcctcttctgtggaagaaaattctcccacaattaaggattacatggacattataggcaatggtgatagaaaagatgatcaatctatgcgtactatagaagagaatattgatgaagaatattcagatgagtactccagattgctacttagcccagcatcgtctaacgtggacgatgaccgaaatcgaggactacagaatagttcactaccggaattagaagatggttacgcgggcggatatcagtcacttcgtccctcccataatttaaggtttaggccaagaaacttgtggcatatgtgtacgtcatttccttccaaatttgcacattatctgcccgcagcagtgttaggtttgcttttgaacattttagatgccttatcttatggtatgatcatttttccaatcacagagccagttttttctcatttagggcccactggtatatccatgttttatatttccaccataatatcacaagccgtgtactccggaggctggtcgagttttccttccgggattgggagtgaaatgattgaaattactccgttttatcatacaatggcattagctataaaagaggcattagcaggtaatgatgacgaaatcataacgacaacgatattttgttatgtgataagttcgatgctcacaggtgtcgttttctatgcattgggtaaactacgactaggaaagatagtgggattttttccacgacacatattgattggctgtattggaggtgttggttatttcttgataattacaggaattgaagtcacaacgagggtggcgaaatttgaatattcatggccttttttttcagggctgtttacggattatgacacattagcgaaatggttattacctgtactattgactgtagttttaatcggcactcaacgctactttaagaactcactcgttttgccaagtttttacatcttgacgttagttttgtttcattttattgttgcgatcattccaacattatccttggatgctttgagacaagctggatggatttttcctattgccaactcagatagtaaatggtatgaccattatagattatttaatgtccataaagttcattggtcactagttttgcaacaaataccaacgatgatggcattgacattttttggtatcctacatgttcctataaatgttcctgcgttggctatgtcactacaaatggataagtatgatgttgacagagaattgattgcacatggttattccaacttttttagtggattattaggttctgtccaaaattacttggtatataccaacagtgttctgtttattagggcgggcgctgattcgccattcgctgggttccttttaatagctttgactatctgtattatgatcattggaccagtcataatatcattcattccaatctgtatagtgggctctctaattttcctactaggctacgagttattagtggaagcgttggtcgatacatggaataaattgaatagattcgaatatttgactgttgtcattattgttttcacgatgggtatctttgattttgtcctaggtatcatcgttggcattttaattgcatgtttttcgtttttggtggatagtacgaaattacaaaccattaacggtgaatataatgggaacgtcgcaagaagtacagtatatcgtgattacgttcaaacaaaatttttggatggaattggtgaacaaatatatgttttaaagctccaaaaccttctgtttttcggaacaatcatatctattgaagagaaaattgaaagattgctgcaaataagtaacaaagatgcaacaaaacgcagaataaagtatttaatattggactttaaaaatattaatgccgacaatattgactattctgcggcagaaggtttcaatagaattaaaagattcacggaaaccaaaagaatcaaactaatcatatcttcaatcaaagaaagggaccgtatttacaacgccttcaataatgtgggattactaaacgatgtggaattatttgctgatttaaacagtgcgttggaatggtgtgaaaacgaattcctttttcaatataaacaattaagaaaaaaggcgaaagaaagattggaagaaggaaagcaaaataatgtcgtatccgcagtaattgcagccactaaaaacaaaaaaattgatacaataggaaatggtttaaacaggggaagcaatggagacacagcgagaaacttaatgtcactaccaaccaatactcctcgtaattaccaaatactttctgtagcacagaatgtatttgtaaacgacgaacaagcagtgaagaatttcaaaaaggagtacaaagatgatgaacctgtcctgcctatattgttatttgcattaaagcagtaccgacccgatataatatctgaagttcaaaaagtaagagaaaaggaaatcaagttttgggcacaactctgcccctacttcaccaggcgcagattagcaagtcaatcacatttactacatgcagacaacatttttttccttgtggaaacaggtatgttgaaggcaacatatgaactaccacaaggaaccttgtacgagattttttcaaatggcacatgcttcggaaaaatcattgcgccagggaatgctatgcctagagaacaaaagctcaccatcgaaactgaaactgattccgtattatgggttatagactctagctcgttgaacaaattgaaagaagacaatctagcattgtacgtggaggttgcattaatggtcatgtgtatcaaggacaccagattcaaagaattactaggttacacacttgttagcgcatgagagcgtacacgtatatttatttaatttcttttattgccggcgtattgcaagtaatttacaccagtactaaataaaagcag

SEQ ID NO: 1295 - DNA, 804 bp, Saccharomyces cerevisiae
ttatgctgccacttactggagacaacataaaatatacataatcatcgcctttatacataatatgccaaacttctggattcttgagaatcgtaggagctatacgtctgatacatgtatgtcgaggatcgtgaaggagtacaaagtcatactgaaaacattggccagtgatgaccccatagcgaacccctaccgggggataatcgagtcacttaacccgattgacgaaaccgacttgagcaagtgggaagctataatttctgggccgtcagacacaccttatgaaaatcatcagtttcgaatactaatagaagtccctagttcctaccccatgaatccaccaaagataagttttatgcagaacaatattttgcactgcaatgttaaatcagccacaggagaaatatgtctgaacatccttaaaccagaggagtggactcctgtatgggatttgttacactgtgttcatgctgtttggagactcctaagggaacccgtttgtgattctccacttgacgtagacattggtaatatcatccgctgtggcgatatgagtgcctatcaggggattgtaaagtacttcctagcagaaagagagcggatcaacaaccattgataccacgtaggatggatgtgttcgaatggcaaacaatgggccctcacttttatctgatgcaatttctaccttacccgggcagcgccaatttatgaatacaaatactttaacaaattgcactattgatgtattgacacatttgtatatacatatacatatattaataaggagcacgaatttttgacaagtag

SEQ ID NO: 1296 - DNA, 919 bp, Saccharomyces cerevisiae
aagttttcgatcagtctctattttaataattgattattggatatagttagtagtgttaaacatgggttccagaagatacgattccaggacaacaattttctcccctgagggacgtctatatcaggttgaatacgcgctagaatccatttcacatgcaggtaccgcaattgggattatggcatctgatgggattgttcttgcagcagaacgcaaagtcacaagtactttactagaacaagacacctctaccgaaaaactttataagttaaacgataaaattgcggttgccgttgctggactgactgcagatgcagaaattctaataaatacggctagaattcacgctcaaaattaccttaaaacctataatgaagatataccagtagaaattttggtgagaaggctaagtgatataaaacaaggttacacgcaacatggtggtttaagaccatttggtgtgtcctttatctacgccggttatgacgatagatacggttaccaattgtatacatctaatccatcgggaaactatacagggtggaaggctattagtgttggcgctaacacatcagcagcacaaaccctacttcaaatggactacaaggatgatatgaaagtcgatgatgccattgaactggctttaaaaacgttatccaaaactaccgacagtagcgcgctgacttatgacaggttggaatttgctactatcagaaagggtgctaatgacggagaagtgtatcagaagattttcaagcctcaagagataaaggatatattggtaaagactggtattaccaagaaggatgaagacgaagaagctgatgaagatatgaaataaggttggaaagtattgtttgacttcatgcttatataaatatgtacgcatagaaacatatctctaaaattaaaagtgaaagaa

SEQ ID NO: 1297 - DNA, 726 bp, Saccharomyces cerevisiae
atgtctgcgtcactagtgaatcgatcattgaaaaatataaggaatgaattagaatttttgaaggaatcaaacgtcatatcaggcgacattttcgaattaatcaatagcaagttacctgagaaatgggatggaaaccaaagatcgccccaaaatgcagatacagaagagtacgttgaagctttatatgattttgaagctcaacaagatggagatttgtcattgaaaacaggtgataaaatacaagttttagagaagatttctccagattggtatagaggcaagtcaaataataagatcggaatattccctgcaaattatgtgaaacctgctttcacgagatcagcctcacctaaatctgcggaagctgcttcaagctcgactgtttctcgtcccagtgttccacctccatcatacgaaccagccgcatcacagtatccttcacagcaggtttcagcaccttatgcacctccagccggttatatgcaagctccgcctccacagcaacagcaggcgcctttaccatatcctccacctttcactaattactatcaacagcctcagcaacagtacgcaccaccttcacagcaagcaccggtggaagcacaaccgcaacagagcagtggggctagtagtgccttcaagagttttggtagcaaattgggaaatgctgctatatttggcgctggttctgctattggtagtgatattgtcaacagcattttttag

SEQ ID NO: 1298 - DNA, 1549 bp, Saccharomyces cerevisiae
aagaaggcttctttattaccgcaactaagaataaacttatagcttcatgcgaatctcaaaaaatagtcataagcggcaaagaacgaggctatatttcctcgttacatttattatttattcgataataccctgccgtgcggtactcgtgccttggctggatgatgacccatttgaagcaacgcttctagaaatgggggatgaaccatggagtaaggacatcctttcaagcacacctccgttacatccatctgaagttaccgaggataacaaaagcttaaaacaaaggggcaatgtaccgcaatatgtcatcgataatagccctctgctccatttatatagtgaagaaaagtactggccagctgatgttaaggattttgtaaaaagattccagttgagagaccacagtggggagaaaattatcaatgaacaccttcgtgacttaagtgacttacaagagtattattcggtagagttagagaacggaacgtggggccgagtatccagtgaaggtacatatatgacaagtttagatgattttgataagggccctgactggttgttgggtgaacaaccagaatatggtacaggtcacataaagaaagcaccagcagttctttttgtcgttgacaaaggaaatggttgggtagacgcgttctggttttatttctaccccttcaattggggtccttatattatgggctccggaccatggggaaatcatgtaggggactgggaacattctttagtacgattctataaaggagaaccacaatatctatggatgagtgcgcatgggggtggtagtgcctataagttcgaagccattgagaaaatcaaaagattgcgtcgtgttgacggtaaattgacaaacgaggttattaagaagcctttaatatttagtgcaagaggcacacatgcacattatgcatcagtcggtcaacatgcgcacgatgttccgtttttctttatgccattgagtgactttactgatagagggccattatgggatccttctttaaactattatgcctatacagtgactgtgggggaaaaaatgacaccatgcggcgctgaagaaactaaaatgggactagaatggctatcgttcaaaggcgcttggggcgataaacaattaagacctagggatcccagacaaaaatggtgcccatttcaatggaaatatattgacggaccaaaaggtccactattcaaaaatatggaaagggtttctttatgccaaagatttaaatggtggaatttttggaagggctgcccggcaagaagatatataaaaagaggggaaggtttggatgcagaaaagaatgatcttgtgggtgacaattgtggtatcttgctgtacaacataaggccaaagtggctgcgtagcatactccgttttttgacgtggaggggaagcgtatgtttcattatggactactttacagggtaatgaatatttgggcgtttttcgctattttagcatgctgtagtgtatgtactgtgcatcgtcatgtagcactatttcagccgtatttttctttttttcttt

SEQ ID NO: 1299 - DNA, 2870 bp, Saccharomyces cerevisiae
acttttacaggtttgataaaattattacaatcgttagcggttacgcaaggaataggaaataaagaaacggtaaataataagaaaaacacagcagatctaagcctattgcacacagtatattataaccattactagctagtgttacataaacaatagcagaatatgtctgtgcgaaacctcaccaataatcgtcattccaacagcgaaaatagtgtttccggaagcgaaaactccttttattcctcgaatgagcaatcaagacaaagctcatcattagaacctgcagatggtcagaacgttagggtgagcggtaatcctttccttggaagtgaagaatttgacgaagattataattcacccagtggagacgatgagcggcgtggggcaaatgaatattccagttcttcatccataaattataataacgatcctaacagcgatacttctcttctggctaatgaaaagaactcacccgagagaaatggtcaaagaatgtcagactataagggctattatgctaagactaacctaacttctgctaataacttaaacaatcataataacaataattataagaacattataagcagtagtaacgataatagttttgcatcacatttacagccgccggacagaaacttaccgtctcatccttcttcaaataatatgagtagcttttctaacaacagcttaattaagtctccaccaccttttgacagatatccgctagtaggaacgaggcatatttcagcggctcaatctcagtcgcagaaccttataaatgaaaagaaaagagcgaatatgactggctcatcttcttctgctcacgactcttcattatcatccaccaacttatacatgggcgaacaggatttttcgccctttggcggttatccagcttccttctttccgttaacgttggacgaaaaggaagacgatgactacattcataatccaaatgtcgaggaagaagcaaagttagatagaaggaggttcgttgacgacttcaaacacatggatagaagatctttcttggggcttctgggtattctatttttatttatggctggtatatttattttcattgtattacctgcaattacattttccggggtagtttatcatcatgaacatgttcatgcggcaaattcagcaggatcgtcgtcttctaatactacatccaagtcattgactgaatatcaatatcctcaacttgcggctataaggacaactttagttgatccagacacacctgacagtgcgaagacaagagtagcgaaagatggatctaaatggcagctggtgttttccgatgaatttaatgctgaaggtaggaccttttacgatggcgatgaccagttttggacagctcctgacatccactacgacgctacgaaagatcttgaatggtactcaccagatgccgttacaactacaaatggtaccttgacgttgagaatggatgcattcagaaaccatgacctttattacagatctggtatggtacagagctggaacaaactctgctttacagaaggtgcgttagaagtttccgcgaacctccctaattatggtcgagttacaggattatggcctggtatgtggaccatggggaacttgggcagaccaggttatttggcgagtactcaaggtgtttggccttattcatatgaagcatgtgacgctggtataacaccaaaccaaagttccccagatggtatttcttacttgccgggacaaaagttgagtgtttgtacttgtgataatgaggatcatccaaatcagggagttggaagaggcgcaccggaaatagatattttagaaggtgaagctgatacaattttgggtgttggtgttgcgtcacaatctctacaaattgctccatttgatatatggtacatgcccgattatgacttcatcgaagtttataatttcaccacaacaactatgaatacttacgctggtgggccttttcaacaagctgtctcagcaatatccactttaaatgtaacatggtatgaatttggggaggaagcaggttattttcaaaagtatgccattgaatatctcaatgatgacgacaacggatatattcgttggtttgtgggagagaaccctactttcacactatatgctacttctttacatcctagtggtaatattgactggaggagaataagtaaggagccaatgtcagcgattttaaacttaggtatttccaacaactgggcctatatcgactggcaatatatatttttcccggtgacaatgtcaatagattacgtccgattataccagccgaagggttctacgtccattacttgtgatcctgaggactacccgacatatgattatatccaaagccatctaaatgcatattataacgccaatttaactgattgggaacaggctggatatactttcccaaaaaatattctaacaggaggttgtagtagttcaaaattctcattatcctgaggttgatttttttttttcaactggttaaaacctactatctaagtgcgctttaattctaaggaggcaaaatagtctgcggtcacagtcgttgaaagttctagatttgggtacggaagcagccatgtaaatggtcttcctttgtaataatatcatcactggagtttttaaattagagtacggattcaagttagcgaaaaatttctgttggtatctgatagcaatttgtcgacaaggtggagagtttttgaagtttttttttgtaacagttatgttacactatttaccagagaaacaccaagacaggagccctcagaagctttcgtgttgtcagaacataaatatcttctatatgttttaatcttttatattaatcaatattttatgttaaatca

SEQ ID NO: 1300 - DNA, 1628 bp, Saccharomyces cerevisiae
gacatatcaacccctaaatgggtttagcggataacaaatatatatcaatagtaatataaggtatattcaatagagaagctttgacatcataaaagctcccatttaacaaaaaattatctccacattgtgataccatttagagtggcactcatcgctatctttatcgtaatgtacaagttggacaataacgacattgacgatgaaacgaataactctgtttcactgacgagccttttagaatttctcgacccgatcgcttcaaaagtagtttcaaaatactaccatggttctcatctttcgaaagcagaacagaaattgcgaaattttgagggttttagaagacgtaaaccccatcatgaacatgatagtcatcatccacatcacctgaatagaagtcgctctttcttgcaattagaggacttcaaagtaagagcgttacaaagaattaggaatctggataaacccttggattccatttttttcaaaaacagctcaaggttggagaaagcattttaccctttcacactgtttaatatatttttcatcggatttttgatgggcaggtttccagaatggtttcatgtttactataccatcctgttcttcgttctgatgcccatacgtttttacacatactataaaaccaaaaaccactactttctggctgatttttgttactttgtgaacatgctatgcctattgtttatttggattttcccatattcatacagccttttccagtcatgttttgcattcactttcggaacgttatgctttgccgttattacttggagaaattccttggtaatacattctatagataagactacttcatgcttcattcacataatacctccctgtgtcatgtacgtcatctatcatggattaccactcgaatacaaaatcgaaaggtttccgggagcaattattcaaagtgaattggacatcaaaaaaaatattctttggacatccctttattatttggtttggcaatcattataccattacttcatcacgttgaaaaagtctagcaagatcaagtcaggggaaagaatgacaagttttgaatatttaaccacacaccaatttaaaaacttttgggcagttaaattaaggtcaccttggccgatgataatttacacactttctcaatatttctatcaactattcactatgctattgtgtggcatatggattcgttacaaattagctgcggccctatttttaactatagtatttctatgggcgtctcataatggggctacctactatatcgaccactacgggaagaatttcgaaaaagaagttgatagattacgtcttgaagttgagaatttacaacaaaagttacagcctgattctgatgcagtcatatctgatgcctccgtgaatgataaggattacttgaatgtcaaccgtgacgaagattttgacgactcttcaagtgtatcctcaaagagtgattaagatagttcacttcatttatctgttaactttgagagcttttatttacaggcgctttactatatatatatatgtgcatgcatggacgcgtatatgtcgtttcttgatatataatcacttttagtctaatgactacatgttaagttcttgttcctcccacttca

SEQ ID NO: 1301 - DNA, 1681 bp, Saccharomyces cerevisiae
gataaatacgacgtaagaataaaaatgactaaatctgagcagcaagccgattcaagacataacgttatcgacttagttggtaacaccccattgatcgcactgaaaaaattgcctaaggctttgggtatcaaaccacaaatttatgctaagctggaactatacaatccaggtggttccatcaaagacagaattgccaagtctatggtggaagaagctgaagcttccggtagaattcatccttccagatctactctgatcgaacctacttctggtaacaccggtatcggtctagctttaatcggcgccatcaaaggttacagaactatcatcaccttgccggaaaaaatgtctaacgagaaagtttctgtcctaaaggctctgggtgctgaaatcatcagaactccaactgctgctgcctgggattctccagaatcacatattggtgttgctaagaagttggaaaaagagattcctggtgctgttatacttgaccaatataacaatatgatgaacccagaagctcattactttggtactggtcgcgaaatccaaagacagctagaagacttgaatttatttgataatctacgcgctgttgttgctggtgctggtactggtgggactattagcggtatttccaagtacttgaaagaacagaatgataagatccaaatcgttggtgctgacccattcggttcaattttagcccaacctgaaaacttgaataagactgatatcactgactacaaagttgagggtattggttatgattttgttcctcaggttttggacagaaaattaattgatgtttggtataagacagacgacaagccttctttcaaatacgccagacaattgatttctaacgaaggtgtcttggtgggtggttcttccggttctgccttcactgcggttgtgaaatactgtgaagaccaccctgaactgactgaagatgatgtcattgttgccatattcccagattccatcaggtcgtacctaaccaaattcgtcgatgacgaatggttgaaaaagaacaatttgtgggatgatgacgtgttggcccgttttgactcttcaaagctggaggcttcgacgacaaaatacgctgatgtgtttggtaacgctactgtaaaggatcttcacttgaaaccggttgtttccgttaaggaaaccgctaaggtcactgatgttatcaagatattaaaagacaatggctttgaccaattgcctgtgttgactgaagacggcaagttgtctggtttagttactctctctgagcttctaagaaaactatcaatcaataattcaaacaacgacaacactataaagggtaaatacttggacttcaagaaattaaacaatttcaatgatgtttcctcttacaacgaaaataaatccggtaagaagaagtttattaaattcgatgaaaactcaaagctatctgacttgaatcgtttctttgaaaaaaactcatctgccgttatcactgatggcttgaaaccaatccatatcgttactaagatggatttactgagctacttagcataaataagaacccacgcttcaaataaaagcaaacatagaagcaaaatccgtcattcctttcctattcaattgcaccgttctctttatataactacttaattaaatagcgcctatacgaagcagcattgttctatta

SEQ ID NO: 1302 - DNA, 2932 bp, Saccharomyces cerevisiae
tgattcaaaggacctttttttttgcctctttgattagtttatcttcttttcttcattttatcccctaattttatacgttagttcaacctaacaatccaggatttcattaacaagaaaggtaaaagtaacctatcaaggctattttgaaaaaaaaaattccgccctgaatatttcgagtgattttcttagtgacaaagctttttcttcatctgtagatgtccagttgtaaaaccactttgtctgaaatggttggttctgtgacaaaagataggggcactatcaacgtcgaagccagaacacgttcgagtaatgtaactttcaaaccacctgtaacccacgatatggtgcgttcgcttttcgatccaactttgaagaaatctctgctggaaaaatgcatcgcgctagctattatatcgaattttttcatttgttattgggtcttccaaaggtttggcttacagtttaccaaatacttttttctggtacagtatttattttggagaattgcttataatttaggtattggactggttctgcattaccagtcacattatgaaacactaacgaattgtgctaaaactcatgcgattttcagcaaaataccacagaataaagatgctaattcgaatttctcaacaaattccaattccttttcagaaaaattttggaattttattaggaagttctgtcaatatgagattaggtctaaaatgccaaaggagtatgatttatttgcctatccagaagagatcaacgtctggttgatatttcgccagtttgtcgatttaatcttgatgcaagattttgtgacttacattatttacgtttacctttctattccatatagctgggttcaaatcttcaactggagatctttgctaggtgttattttgattttatttaacatctgggtcaagttagatgcgcatcgcgtggttaaagattatgcttggtactggggtgatttcttctttttggaagaatctgaattgatttttgatggtgtcttcaacatctctccacatccaatgtattctattggttatttgggttattatggcctatcattgatttgtaatgactacaaggttcttctggtgtccgtatttggacattattctcaatttttgtttctgaaatacgtcgaaaatcctcatattgaaagaacgtatggtgatggcactgattccgattctcaaatgaatagcagaattgatgacttgatatcaaaagagaattacgattattcaagacctctaattaacatgggtctttcttttaacaacttcaataagctaagatttactgactatttcacaattggtaccgtagcggcacttatgttaggaacaatcatgaatgctaggtttatcaatttaaattacctctttattaccgtttttgtaacaaaactggtttcatggttatttatctcgacaatattgtacaagcaatctcagtctaaatggttcacgagattgtttttggagaatggttacacacaagtttattcctatgagcaatggcaatttatttacaattattatttggtattaacctacacacttatgataattcatacagggcttcaaatttggagtaatttttccaacataaacaacagtcaattaatttttggtttaattcttgtggctttacaaacatggtgtgataaggaaacgagactagcaatctctgattttggttggttttatggtgattttttcttgagcaactatatctcaactagaaagctgacttcccaaggtatctacagatatttgaatcacccagaagcggtattaggcgttgttggagtttggggtactgtattgatgacgaattttgccgttacaaatattatcttggctgttttatggacattgacaaattttattcttgtcaagtttattgaaacacctcatgttaataagatatatggtaaaactaaacgagttagtggtgttggaaaaactttactaggcttgaaacctctaagacaagtttcagatattgtcaatagaattgaaaatattataatcaaatcattagttgatgaaagcaagaactccaatggtggggcagaacttttgcccaaaaattatcaagataacaaagaatggaatattttaattcaggaagcaatggatagcgttgcaacaagattgagtccatactgtgaattgaaaattgaaaacgagcaggtagaaaccaattttgtcttgcctactccagtaactttgaattggaaaatgcccattgaactttataacggagatgattggattggtttgtataaagtcattgatacaagggcagatcgtgaaaaaacaagagttggatcaggtggtcattggagtgcgacttctaaagattcatatatgaaccatggattaagacataaagaatctgtaacagaaataaaggcgactgaaaagtacgttcaaggtaaagtgacattcgacacgtctttgctttattttgaaaatggtatctacgaatttaggtatcattctggtaactcccataaggtgttattgatttctacaccatttgaaatttcattgccggtactaaataccacgacacctgaactgtttgagaaggatttgactgagtttttgacgaaagtcaacgttttgaaggatggtaaatttcgtccattaggaaataagttcttcgggatggacagcttgaaacaattgattaagaactcaattggcgtcgaactttcgtctgagtatatgaggagagtcaatggtgacgctcacgttatttcgcatcgcgcttgggatataaaacaaacgcttgatagtcttgcttgagttttttttttttgagtatatatatttaaaaagtactaggattcaagttaacattttgaatagaagtagttatgttgttgtaatataatggagctaccatatatgca

SEQ ID NO: 1303 - DNA, 583 bp, Saccharomyces cerevisiae
atgtctggatacttcaaccatctttcttcgaatgcacatttcgcaaatattcaagccgatcagggcttcataggtgatgctactggcacaagcagcgatcatggcagtagtggcatggttgattttgccctacaactcggagaactgagcctagaagagaaaatacttaaagagttcaccttattccagagcaagaacatggacttattgcaagagacggcgacggcgtgtccgagtactaatccttccttgagacagagccgaattcaaggctggtgaacgcctgatgcgagctatacgttttgtgctcaccgtgcacatatggtggctacttttctactcaaacacgtttgaaaaacggcatacgattagcttacagattgaactcaaagaagtcgcaatgggaggtgcagaagatgacgtgttacttagtttataatacaatgtgttttatatatcgattcttcgtttatgcatttctggacgattgcttttcactgtaaatacgcactaatattcatgaatataaaaaaatgtaacatcatatctcaatgttcttctccgtcagtcagatagtggcaag

SEQ ID NO: 1304 - DNA, 3061 bp, Saccharomyces cerevisiae
gctcataaataagcaaggtaagaggacaactgtaattacctattacaataatgacagacgaaactgctcacccgacacaatctgcttcaaagcaggaatctgctgctctgaaacagacaggcgatgaccagcaggaatctcagcaacaacgtggctacaccaactacaacaatggtagcaactatacccaaaagaagccttacaacagcaacagacctcatcagcaaagaggtggtaaatttggaccaaacagatataacaaccgtggcaactataatggtggcggtagtttcagaggtggacacatgggagccaacagctcaaacgtgccatggactggttactataataactaccccgtttactaccagccccagcaaatggcggccgctggtagtgcccctgctaatccaattcctgtcgaagagaagtcacctgttccaactaagatagaaatcactaccaagtctggtgaacacttagatttgaaagaacagcataaagccaagctacagtctcaggaaagatctactgtgtctccgcaaccagagtcaaagttaaaagaaacttctgattctacttctacttctactccaactcctaccccttccactaatgactctaaggccagttctgaagaaaatatatctgaagctgaaaagacaagaagaaatttcatcgagcaagttaaacttcgtaaagctgctttagaaaagaagagaaaggagcaacttgaaggttctagtggcaacaataatattccaatgaagactaccccagaaaatgtggaagagaagggatcggacaaacctgaggtaaccgaaaaaaccaagcctgctgaagaaaaatctgctgagccagaagttaagcaagaaactccagctgaagaaggtgaacaaggagaaaagggccaaataaaggaagaatccactccaaaggtgttaacctttgctgaacgtttgaagttgaagaaacaacaaaaagaacgagaagaaaaaacggaggggaaggaaaacaaggaagtgccagtacaggaagagactaagagcgccatcgagtctgctcctgtgcctcccagtgaacaggttaaagaagaaactgaggtcgccgaaaccgaacagtcaaacattgatgaatctgcaacaactccggctatccctactaaatctgatgaagctgaagctgaagttgaggctgaagcaggtgatgctggaacaaagattggacttgaagctgaaatcgaaactacaactgatgaaactgatgatggtacaaacaccgtttctcacatattgaatgtattgaaagatgctacaccaattgaagatgtcttttcttttaactatccagaaggtattgaaggtcctgatatcaaatacaagaaagaacacgtcaaatatacatatggcccaactttcttgcttcaatttaaggacaaactaaacgtcaaagcggacgccgaatgggtccaaagcactgcttctaaaattgtcattccaccaggaatgggcagaggaaatagatctagagattctggcagattcggcaataattctagtcgtggccatgactttagaaatacctcagtgagaaatatggatgacagagctaattcaagaacttcatcaaagagaagatcaaagagaatgaatgacgacaggagatctaatagatcttatacatcaagaagagaccgcgagagaggctcctacagaaatgaagagaaaagagaggacgataaaccaaaggaagaagttgctccacttgttccaagtgctaataggtgggtgccaaaattcaagtctaaaaagactgaaaagaagctagcccctgacggaaagaccgaactattggacaaggatgaagttgaaagaaagatgaagtcactactgaataaacttactttggaaatgttcgatgctatttcatctgaaattttggctattgcaaacatatcagtatgggaaacaaatggtgaaacgttaaaggctgtgatagaacagattttcttaaaggcctgtgacgaaccccattggtcttctatgtacgcgcaattatgtggtaaagtagttaaagaattaaacccagatataacagatgaaactaatgaaggtaagacaggtccaaaattggttttgcattacttggttgctagatgtcatgccgaatttgacaagggttggaccgataaattacccacaaacgaagatggtactccattagaacctgagatgatgtcagaagagtactatgcagctgcttctgctaagagaagaggtttaggtttggttcgtttcatcggtttcctataccgtctgaatctgttgactggaaagatgatgttcgaatgtttccgtagactaatgaaggatttgacggattctccatctgaagaaactctagagtccgttgttgaattgttaaatactgttggtgaacaatttgagaccgatagtttcagaacgggtcaagcaacattggagggttcgcaattgctcgatagtttgttcggtattttagacaatattattcaaactgctaagatttctagtagaatcaagttcaagttgatcgacattaaagaattaaggcacgacaagaactggaacagtgataagaaggacaacggtcctaagaccattcaacagattcatgaggaagaggagagacaacgtcaattgaagaataattcaagatctaattcaagacgtacgaacaactccagtaatagacactctttcagaagggacgctcctcctgcatcaaaagatagctttatcacaaccagaacatattctcaaagaaatagccaaagggctcctcctccaaaggaagaaccagctgcaccaacttctaccgcaacaaatatgttcagtgcattaatgggagaaagtgatgacgaagagtaacatgaatagatcatgttaagtatcgaaaatgtcacttggatacaaggatgttggtagaaagtctaataaaataataaattaatagtacaacacaaatttaatcttacgtttaatcctgcgctattaattgaaaatatatgcatggagaagaa

SEQ ID NO: 1305 - DNA, 1214 bp, Saccharomyces cerevisiae
tgtaaagttacaaaaaagaggaaagccactccatacttttagtaatattcgattgtgatgagttacggcttaacaggtacctcttctaagctaagaggaactagttcaatattttcatggactcaggtgaggcacttttctcgtagaagaatagcctatccattttatccattcaagaaattgggaagacaacacccgaagaagcatgatacaaacttaaagactgctatgagacagtttttaggtccaaaaaattacaaaggagaatatgtcatgaacaagtattttacggttccgacgaatcatgtacctaactacattaagccagatttggaaaggggacaaagtttagaacacccggtaaccaagaagccattgcaactaaggtatgatgggacattaggtcctcctcctgtagaaaataaaaggttacaaaacattttcaaggatagattgttgcaacctttcccttcaaatccacattgtaagacgaattacgtattaagcccgcaattgaagcaaagcattttcgaagagattactgtggaaggactttctgcccaacaagtttctcaaaagtatggattaaaaattcctcgtgtagaggctattgttaaactggttagcgtggaaaacagctggaacagacggaatagagtatcttctgatttgaaaactatggacgagactttatatagaatgtttcccgtcttcgactcagatgcctcttttaaacgggagaatttaagcgaaattcctgttccgcaaaagactttggcgtcaagattcctcaccattgcagagtcagaaccttttgggcctgttgatgcagcccatgttttagaattagagcctgctgtagagaccttaaggaatttgtctactgtgggggaacattctagtggccatcaacaatccactaataagaatacgaaggttatatatggtgagcttgtcgaaggtgaaagatcacaatataaatttactaacgcaaaggttggaaaagtgggataccgttacggtagcggaaatagggataacaagaaagacagaagaattggctttaataaactgggccaaatggtatatatataaccactttttgtcttatgagtgctttcttgtatatgcgtatatgtcgtcatattttcagccattattacttgtacataaaatattctacataaatttatatatcccatgaaagagccatg

SEQ ID NO: 1306 - DNA, 891 bp, Saccharomyces cerevisiae
ccaaaagagcagttgaaggacgccgccgtttcactagatacatatatatataatgtcagagaaattccctcctttggaagatcaaaacattgatttcacacccaacgacaaaaaagatgacgacaccgattttttaaaaagagaagcagagatacttggagacgagttcaagactgaacaggatgacatattggaaacggaggcttcccccgccaaagatgatgacgaaattagggattttgaagagcaatttccagatatcaactccgcaaatggcgcagtctcgagcgatcaaaatggtagtgctactgtatctagtggtaatgacaatggcgaggcagatgatgatttttccacattcgaaggtgccaatcagagtacagaatccgttaaagaggatcgttctgaagttgtagaccaatggaaacaacgtcgtgctgtagagattcacgaaaaggatttaaaggacgaggagttaaaaaaggaattgcaggatgaagctatcaaacatattgacgatttttacgattcttacaataaaaagaaggaacaacaattggaagatgctgctaaggaagctgaggctttcttaaagaaaagagatgaattttttggtcaagacaatacgacctgggatcgtgcacttcaattaattaaccaagatgatgccgatatcattgggggtagagacaggtctaagcttaaagaaattcttttgagattgaaaggtaacgcgaaggctcccggtgcttaaatgatgatgaataataagaaccataatgaactaaggaagagaaggggcttattccctatcattcccgtcatacatgagtatcatacttgataggttcagtaaataactaattcatactgtaaattcatttatcaaga

SEQ ID NO: 1307 - DNA, 1366 bp, Saccharomyces cerevisiae
aacgagatacgcattatcaaaactaacgtaacaagcactacaaaatgggtattatcgacaaaatcaaagccatcgaagaagaaatggccagaacccaaaaaaataaggccacagaacatcatctgggtcttttgaaggggaaattggctagatacagacaacaactgctagctgatgaagctggtagtggtggtggaggagggtctggttttgaagtggcaaaatcaggtgacgctagagtagttttaataggttacccctccgtcggtaagtcctccttattgggtaaaattaccaccaccaagtctgagatcgctcattatgctttcacgacattgacatccgttcctggtgtattgaagtaccaaggtgcagaaatccaaattgtggatcttccaggtattatttatggtgcttcgcagggtaaaggtcgtggtaggcaagttgttgcaacagcaaggaccgcagatctagtattaatggttttagatgccacaaagagtgaacatcaaagagcatctttggagaaggagctggaaaatgtaggcatcaggcttaataaagagaaaccaaatatttactataagaaaaaagaaactggtggcgtgaaagttacgtttacctcccctccaaagaccaatttaaccgaacaggcaatcaaaatgatcttgagagattatcgtatccataatgcagaagttctggtaagagatgaccaatgtacgattgatgattttatcgatgttattaacgaacaacatagaaattatgtcaaatgtctttatgtgtataataagatagatgcagtatcattagaagaggtggataaacttgccagagagccaaacaccgttgttatgtcctgtgaaatggatttgggattacaagacgtcgttgaagaaatttggtaccagctgaacttgagtcgtgtgtatacaaagaagagaggtgttagaccagtatttgatgatcctctagtggtaagaaataattccactattggtgacttatgtcatggtatccacagggatttcaaagataagttcaaatacgcattggtttggggttcttctgccaaacattctcctcagaagtgcggcttaaaccacaggattgatgatgaagatgtagtttctttattcgcgaaatagtataaatgaatagattttaaagaaacatgaaaaaacaagatcagcatcgagaactgtagtacggagcagagattttgcatgactaaacggactcattttccttgtagtagaaataaatgctgaaaataggttttttagtgagaaccggaaggtgttactttcatggtatattcgtatatacttttataatgtaatttgaagagctccgttcataa

SEQ ID NO: 1308 - DNA, 550 bp, Saccharomyces cerevisiae
aaccaatcaatcttttctctccaacaacagtttgagcttatttaatcaagaaaatgggtctatcatctatctttggcggcggtgcaccatcacaacaaaaggaagcagccactactgcaaagacaaccccaaaccctatagccaaggagctgaaaaaccaaattgctcaagaactggctgtggctaatgcgactgaattagtgaacaaaatttctgagaactgctttgaaaaatgcttaacttcgccatacgctaccagaaacgatgcgtgcattgaccagtgtttggctaaatatatgagaagttggaatgtcatatcaaaggcttacatctccagaatccagaacgcctccgcttctggcgaaatctaaacacaccatcaggatcaatttactgcgcagtatgtactcgtacttgtatataagattcaaaggataccaagaaaatgctattacgtttaataacgtcgaagaacagtattgcactatacttgcttggtatagatatgtacaaaatatatgtatatacataaaatgagttattctttttc

SEQ ID NO: 1309 - DNA, 2183 bp, Saccharomyces cerevisiae
ttgggagaaaattcatcaaaacaacatatcatcagcgttattacaattcattgtccttcccaagtttttttgacgtataatattatcgctatctgactcattagtacacaaatacagatatacaacctcaaaatcaaaaatgcctagaaacccattgaaaaaggaatattgggcagatgtagttgacggattcaagccggctacttctccagccttcgagaatgaaaaagaatctactacatttgttaccgaactaacttccaaaaccgattctgcatttccattaagtagcaaggattcacctggcataaaccaaaccacaaacgatattacctcttcagatcgcttccgtcgtaatgaagacacagagcaggaagacatcaacaacaccaacctgagtaaagatctatccgtgagacatcttttaactctagctgtcgggggtgcaataggtactggtttatatgtgaatacgggtgctgctttatctacaggtggtccggccagtttagttattgattgggttattatcagtacatgtctttttactgtgattaactctcttggtgagctgtccgctgcttttcccgttgttggtgggttcaatgtttacagtatgcgttttattgagccttcatttgcattcgcagtgaacttaaactatttagcacaatggctagttcttctacccttggaattagtggccgcatctattactataaaatactggaatgataaaattaattccgacgcctgggttgctatcttttatgccaccattgcactggctaatatgttggatgttaagtcatttggtgagaccgaatttgtattgtccatgattaaaatcctctccatcattggctttactatcttaggtattgttttgtcctgtggtggtgggcctcacggcggttacattggtggtaaatactggcatgacccaggcgcttttgtagggcacagctcgggaactcagtttaaaggtttatgttcagtttttgttaccgctgccttttcttattccggtattgaaatgactgctgtctccgctgctgaaagtaaaaatccaagagaaaccattcccaaggcagcaaagagaactttttggctgattaccgcctcttatgtgactatattgactttgattggttgcttggttccatccaatgaccctaggttactaaacggttcaagttcagtggacgctgcctcatctcctctggttatcgcaattgaaaacgggggtattaaaggtctaccatcattaatgaacgccattattttgattgctgttgtttccgtggctaacagtgctgtttatgcatgttcaaggtgtatggtcgccatggctcatattggtaatttaccaaaatttttgaaccgtgttgacaaaaggggtagaccaatgaatgctatcttgttaactttgttttttggtttgctttcctttgtggcagcaagtgataagcaagctgaagtctttacatggttgagtgccttatctggtttatcgacaattttctgctggatggccattaatctttcccatattagatttcgccaagccatgaaagttcaagaaaggtctttagacgaattacccttcatttctcaaactggcgtcaagggatcctggtatggttttatcgttttatttctggttcttatagcatcgttttggacttctctgttcccattaggcggttcaggagccagcgcagaatcattctttgaaggatacttatcctttccaattttgattgtctgttacgttggacataaactgtatactagaaattggactttgatggtgaaactagaagatatggatcttgataccggcagaaaacaagtagatttgactcttcgtagggaagaaatgaggattgagcgagaaacattagcaaaaagatccttcgtaacaagatttttacatttctggtgttgaagggaaagatatgagctatacagcggaatttccatatcactcagattttgttatctaattttttccttcccacgtccgcgggaatctgtgtatattactgcatctagatatatgttatcttatcttggcgcgtacatttaattttcaacgtattctataagaaattgcgggagtttttttcatgtagatgatactgactgcacgcaaatataggcatgatttataggcatga

SEQ ID NO: 1310 - DNA, 923 bp, Saccharomyces cerevisiae
catttacacatattttctttccagggtcccactggtaaaatctattaacatataaaaagatttacaaaaaaactttagtgccataactacagcaggatcatcatatgtcaagactagaaatatactcgccagaagggctacgtctcgatggacgtcgatggaatgaactccgccgttttgaaagttccatcaacacacatccgcacgctgcagacggttcatcctacatggaacaaggtaacaacaaaattatcactcttgttaaaggtccaaaagagccaagattgaaatctcaaatggatacctcaaaggctttattgaacgtatcggtaaacattacaaaattctccaaattcgaaagaagtaaatcaagccacaagaatgaaaggcgtgttcttgagatacaaacctccctggtgaggatgtttgagaagaatgtcatgctgaatatctaccccagaacagttatcgatatcgagatccatgtccttgagcaagatggcggtattatgggatctttaatcaacggtattaccctcgctttaatagatgccggtatatcaatgttcgattacataagtggtatatccgtcgggctgtacgatactaccccattattagataccaattcattagaagaaaatgctatgagtacagtgacactaggtgtggtagggaagtcagaaaaactttctcttttattggtggaagacaaaattccgttagataggttagagaacgttcttgccatcggcatcgcaggtgctcatagggtaagagatttgatggatgaagaactgaggaaacatgctcagaaaagagtcagtaacgcctctgctaggtagaataaaaaacgccattaattgccactgtttatataaaagtacataaaaaacagtaaaattgaaaattgaacgcattta

SEQ ID NO: 1311 - DNA, 2280 bp, Saccharomyces cerevisiae
atgagtaaagccaagggaacgggattttcatcaattgatactgaagatgaaaacttacgcgaacgttatgttaatcaaccaaaagctaatgcctccgatattcaagatgaacaattagattgctttgagcaactagaagaaaaacataggacaaaaaaaaatgaagaatacactgcgttgaaaattttaagggatgtcataggtccccttttattaactataacttcgttttatctaagattccaacatatagatcagaacaattatgttgtctgggatgaggctcattttgggaaattcggatcatactacatcaaacatgagtactaccacgatgtccaccctccacttggtaaaatgcttattgcattgagcgaatggatggcaggatttgacggtcaatttgacttttcctctaataatgcatatccggaaaacgtaaactttaaactaatgagacaatttaatgccacatttggagctctatgtacaccagtagctttctttacagccaaatggatggggttcaattattttactgtttatttgattgctacgatggtaacgttggaacattcatatattgtcctctcaaaattcatattgctagattcaatgctgctttttttctcgatgacgacttttgcctgtatgataaagttgtatacgttgagaaagcaacaaatgacgaaaaaatggtcgttatggatgttattaactggtttatctattggttgcgtttgttctgtgaaatgggttggtctttttatcacagttgtagtcggcctctacacatgtatagaactatttttgctctattgtgataaagaattgcctagaataaaatattacaaacattggcttatcagaatcattaatctgatagtaattccttttcttatctatctctattgcttcaaaattcactttgtgttgttgtacaaatctggcacgggggattctactacaaatacgttatttcagataaacttggagggaactcagattgaggcgggtcctcgtgatgtagcatttgggtcagagttaaccataaggtcgcatggtttaagcccgaatctgctgcattcacatattcaagtatacccagaaggctctggacagcgccaaatcactggatatggattcgcagactctaataatgtttggaagtttgaattttctaggtcttctggattggaactagatcagaacgggactttgaatggcaaaataatcccaataacggatggtgtggaagttcgtctcagccataaaaatacaggatcgaatcttcactcgcatgatgtaccttctcacgtctctagaggaaattatgaggtttcaggctatgggtcacaaagtgttggcgatgaaaaggatgattggatagtggagattgtgaaacaaatggattcaccaaatcccgtctattctaatgagaattcaactattttacatccagtttctactttcttcaggttgagacacaaagttttaggttgttacttggcttctactggattgacgtatccagcttggggatttaaacaagctgaaatcgtctgcaaagactcctggagtcgtagggacaaatcgacctggtggaatgtagaagatcactggaaccacaatttagaaaccgcagaagattacgttccaccaaaatccaatttttggaccgattttattctaactaattttgccatggcctcctctaataacgcgttagtgcctgatgaggataaatatgatagtttatcgtctgatgcatgggaatggccaaccttgcataaagggctaagaatgtgttcatgggcgggatatatcactcgatattacttgatgggatctcccttcaatacatggatttctactgtctccttaatcatcttcccatttattattctttttatattatatcgttggaggagacaaacgctttatctctcagacgatcaaatctggcaaataacgatacagggtatttttcctttcatttcctggatgacacattatctgccttttgcaatgatggggagagtgacgtatgtacatcactacgttcccgctttatattttgcaatgcttgttttcggatttgtgcttgatttcactttgacaagagtccattggatggtcaaatatcccatctatttgtcattgtttggcggatgtatatacatttataatttatttgctccaatatgtcagggtatgcatggtgataaagcggaatacttacctttgcagtggttatctacttgggatatcgcaccttag

SEQ ID NO: 1312 - DNA, 962 bp, Saccharomyces cerevisiae
aaacaatggtaactgtactaaaaccaataccagatatatatttcatacttattaaaaagcgttaagaaacgaagcgtaaaaacgtaagaaaaagaatgactatataacggtaggtcttcgactcatttttttcttcctacatgcaaacgacaaatacgggtaatgcacatttcgcttattgggttcttccctttccttttttccatttttttctttctggctgtcgctagcctttctacttcctccgcacatacagttttcagcacagtatagatagctgtgcagccagatagaagcaaaagagaagtcaattgcaaaaaaaatatggactcgtactcaataacaaacgtaaaatacctggatccgactgaattgcatcgttggatgcaagaaggacacactactacgctgagggagcctttccaggtagtggatgtgcgaggctcagattatatggggggccatatcaaggacggatggcactacgcctattcgcgccttaagcaggatccggagtacttacgtgagctaaagcacagattgttggaaaagcaagcggacggccgcggagcgctgaacgtgattttccattgtatgttatcgcagcagcgcggaccgtctgcagcgatgctgctgcttcggtcgcttgacacggcggaactttctcgctgtcgtctatgggtgttgcgtggggggttctcgcgctggcaatccgtatacggtgacgacgagagcgttacggcgggttacctacccgatctgtggcgttgacaggtttacacaatcgcacgtgatcatatatttgccatgactcctcccagtgacaattttgttcttttttcctctttatcgctttcgtactatggtcagtcattcattcattatatacgcgctctccataacccgtaactttttattatatatagactcgtttacaatacaacgatagcgataccattcaa

SEQ ID NO: 1313 - DNA, 2962 bp, Saccharomyces cerevisiae
acgaacacaactttacaagtcaaataagaaatcatggctggtcaagtgttggacggcaaagcatgcgctcagcagtttagaagcaatattgctaatgaaatcaaaagcattcaaggtcacgtgcctgggtttgcacctaaccttgccatcattcaagtaggcaacagaccagactcagccacatatgtacgcatgaagcgtaaggcagctgaagaggccggcattgttgctaatttcattcatttagatgaatccgctactgaatttgaagttctgcgttacgtggaccagctgaatgaggacccacatacacacggtattatcgtgcaactaccattacccgctcatttggacgaggatagaatcacctcgagagtgttggcagaaaaggacgtggacgggttcgggcccaccaacattggcgaattgaataagaagaacggacacccattctttttgccctgcacgcccaaggggatcattgagctgcttcacaaggccaacgtcacgattgaaggttcccggtccgttgtgatcggaagatctgacattgttggctctcctgttgcagaattgttaaaatctctaaactccaccgtcaccatcactcattctaaaacccgtgatatcgcatcatacttacacgacgcggacatcgtagtcgttgccatcggccaaccagaatttgtgaagggtgaatggttcaaaccaagagacggcacttccagtgataagaaaaccgtggtaattgatgttggcaccaactacgttgctgatccttccaaaaagtccggtttcaaatgtgttggtgacgttgagttcaatgaagcaatcaaatacgtccatctaatcactccagtgcccggtggtgtgggccccatgacggtggctatgttaatgcaaaataccttgattgctgccaaacgccaaatggaagaatcctcgaagcctttgcagattcctcccttgccattgaagttgctaacacctgttccttccgatatagacatctccagagcacaacagccaaagcttatcaaccagcttgctcaagaattgggtatttactctcatgagttggagctgtacggacattacaaggccaaaatttctcctaaagtcatcgaaaggctgcagacgcgccaaaatggtaagtacatcttggtgtctggtatcacaccaacaccactgggagagggtaaatccactacaacaatgggtcttgtccaggcactaacggctcacttgggcaagccagccattgcgaacgtcagacaaccctccctaggacccactttaggtgtcaaaggtggtgctgcgggtggtggttattcccaagtcatcccaatggacgaattcaacttacatttgactggtgacattcacgccattggtgcggctaacaacctacttgctgccgctattgacactagaatgttccatgagaccactcaaaagaacgacgctaccttctacaacagactagtgcctagaaagaacggaaagagaaagtttactccctccatgcaaagaagattgaacagactgggtattcaaaagaccaaccccgatgatctaacacccgaagagatcaacaaattcgccagattgaacattgacccggacactattactatcaagagggtggtcgatatcaacgacagaatgttaagacaaatcaccattggtcaagcccctaccgagaagaaccacacaagagttactggattcgatatcaccgttgcttctgaattgatggctattcttgctctttcaaaggacttgagggacatgaaggaacgtattggaagagtcgttgttgctgctgacgtaaacaggtctccagtcactgttgaagatgtgggttgtaccggtgccttaaccgctttattaagagacgctatcaagcccaacttgatgcaaactttagaaggtactcctgtcttggtccatgccggcccatttgccaacatctctatcggtgcctcttctgttattgctgatcgcgtggctttgaaattggttggtaccgagccagaggcaaaaacagaagctggttatgtggttactgaagcagggttcgatttcactatgggtggtgaaagattcttcaacatcaagtgccgttcctctggattgacacctaatgctgtggtcttggttgctactgttagggcattgaagtcacacggtggtgctccagatgtcaaacctggccaacctttaccttccgcatacactgaagagaatatcgagtttgtcgaaaaaggtgccgctaacatgtgtaaacaaattgccaacattaagcaatttggcgtccccgtcgttgtcgcaattaacaagtttgaaactgacactgaaggtgaaatagccgccattagaaaagccgctttggaagctggtgcatttgaagccgtaacctctaaccattgggccgaaggtggtaaaggtgctatcgacttggccaaggccgtcatcgaagcttccaaccaaccagtggacttccatttcctatatgacgttaactcctccgttgaagacaaattaactactatcgttcaaaagatgtacggtggtgccgcaatcgatatcttgcctgaagcacaacgcaagattgacatgtacaaggaacaaggtttcggtaacttgccaatttgtatcgccaagacacaatactctttatcccacgatgcaactttgaaaggtgttccaaccgggttcactttccccatcagagacgtcagattgtctaatggtgctggatacttatacgctcttgccgccgaaatacaaaccattcctggtttggctacctatgctggttacatggccgtggaagtcgatgatgacggtgagatcgatggcctgttctaagacaacttaattatatagaatttaataaagacaaatgcaaaagtttttttaaagtatggatgtataataataataacgataatacgaa

SEQ ID NO: 1314 - DNA, 428 bp, Saccharomyces cerevisiae
ggaaaatagcaatgggagcttatcgcataaaaaaatgaacaataatgttgaagaactcctacggcgtattcccctctacaacaaatatggtaaggattttccacaagaaacagtgactaggtttcagatgcctgaatttaagttaccagcgctacaaccaacaagggacttattatgcccttggtacgaagaatgtgacaatatcaccaaagtctgtcagttacatgattcttctaataagaaattcgatcagtggtacaaggagcaatatctgagtaaaaaaccaccgggaattgttggaaacacactattatctccatcaagaaaggataattcctagttaaattgcatttcgatatctatgtacacatatacagcaatttttttttataaaccttagtaatattatcagttttcattttatgtca

SEQ ID NO: 1315 - DNA, 1022 bp, Saccharomyces cerevisiae
caagtccaatagcatagacattaagcacgacagctgtaaaaaatgtcaaagtttgttatcacctgcatagctcatggagaaaatctcccaaaagaaaccatcgaccagattgcgaaagaaattactgaaagctcggcgaaagatgtatcaatcaatggtaccaagaaactatcggccagagctaccgatatattcattgaagtcgcaggatcgattgttcaaaaagacctcaagaataagctgacgaacgtcattgacagtcataatgatgttgatgttattgtttctgtcgacaatgaatatcgtcaagccaaaaagctctttgtctttgacatggattcaacattaatctaccaagaggtcatcgaattgattgccgcttatgctggtgttgaagaacaagtgcacgagatcacagaaagagccatgaacaatgaacttgatttcaaagagtctttaagagaacgcgttaaattattgcaaggcctccaagtcgatacactatatgatgaaataaaacaaaagctagaggtcaccaagggtgtgccagaactatgcaagttccttcacaaaaaaaattgcaagctcgctgttttaagcggtggttttattcagtttgccggttttatcaaggatcagttaggtttagatttttgtaaggcaaacttgttggaagttgacactgatggaaaattaaccggtaaaacactgggtcctatcgtagacggacagtgcaagagtgaaacccttctgcaactatgtaatgactacaatgttccagttgaagcaagttgtatggtgggtgacggtggtaacgacctgccagccatggctaccgccgggtttgggatcgcatggaacgccaagccaaaggtgcagaaagctgcaccttgtaagttgaataccaagagcatgactgacattttatacattcttggttacaccgatgatgaaatatacaatagacaatgaagaaaataatgatagatagatgtaatagagtttctttttaaaattgttta

SEQ ID NO: 1316 - DNA, 1719 bp, Saccharomyces cerevisiae
catatatacacagagatacatattatacctataccgttaagaaataggatagaaaataatgagcgaacaaaaggaagatttgtttaaaccagtaggagaagctgctgcagaggtcgaagatgaaagcatagccgaacagaacaaagctaatgacggcgtcaagttaaccggcgcacaggacgccatgggccatccagtgcaagagatagagtctctttgtatgaattgtggaaagaacggtacaaccagacttcttctgacttccatcccttatttcagagaaataattattatgtcattcgactgtcctcactgtgggtttaagaactgtgagatccaacccgcttctcaaattcaagagaagggctctcgttacgttttgaaagtggagtgccgtgaagattttaacaggcaagttattaagtcagaaactgccacttgtaagtttgtcgagctagacattgagattcctgctaagagaggtcaattgacgacagttgaaggtttgttatccgagatgatcgacgatctgtcgcaagaccaggaaatgagaaaatctatagacgaagctctttacaagaagatcgatgacttcatacagaaagttaaatcctacatcaattgtgaacccaacactattccgattacatttattttggatgatcctgcgggaaattcctggatcgaatacaaacccggtgaacctcaacacaaatggtctcatacccagtacgtgagaaccgacgaacaaaacgttcaagttggcattattactagagaccagttggagcaacgtcgccaagaacaattaaaacaattggccaaccgtgaaagaaatccttctgaatctgtcaaagttggctcagcaaacccacagtttttgtcagacgccaccgacatcgaaaactttaacaacgaggtgcaaacattcagagcttcttgtccatcgtgtacccaagagtgtgaaactcatatgaagccagtaaatatcccacactttaaagaagtcattatcatgtcgacggtctgcgatcattgtggttataagtctaatgaggtgaagaccggtggtgccatccctgacaaaggaagaaggattactttatactgtgacgatgcagctgacttgtcccgtgatattttgaaatctgagacctgtagtatggtaattcctgaattacatcttgatattcaagaaggtacattgggtggtagattcaccactttggaaggtttactaagacaagtctacgaagaactagaatcccgtattttcactcaaacttcggattccatggacgaagcaacgaaagcccgctgggtagaattttttgccaagctaaaggaggccatcgctgggaaagtcaagttcacagtcattatggaagatccattggccgggtcgtacatacaaaatgtctacgccccagatccggatccaaacatgactatcgaagattatgaaagaactaaagagcaaaatgaagacctgggattgtccgatatcaaggttgagtaacgatcgttggcctcggtatcacctccccctttcctcttcctctttacatatatcctaaccacacaagcactcatttgatatgataatacttattcgtttttattcaaatagatagcgcagtcttgaagatttacctatatttttaaacttttgtataatagttgaaatagataatacagcattttttggctcctgcttca

SEQ ID NO: 1317 - DNA, 840 bp, Saccharomyces cerevisiae
gcaaactaaatagagagcgaaatgtccttaccagctacttttgacttgactccagaagatgcccaacttttgttggctgctaacactcacttaggtgctagaaacgttcaagttcaccaagaaccatatgttttcaacgcaagaccagatggtgtccacgttatcaacgttggtaagacctgggaaaaattggttttggctgccagaatcatcgctgccattccaaacccagaagacgttgttgccatctcttccagaactttcggtcaaagggctgttttgaagttcgctgcccacaccggtgctaccccaatcgccggtagattcactccaggttctttcaccaattatatcacccgttctttcaaggaaccaagattagttattgtcaccgacccaagatcagatgctcaagccatcaaggaagcttcttacgttaacatccctgtcattgctctaactgatcttgactctccatcagaattcgtcgatgtcgctatcccatgtaacaacagaggtaagcactccattggtttaatctggtacttattggctagagaagttttgagactaagaggtgctttagttgacagaactcaaccatggtccatcatgccagatttgtacttctacagagaccctgaagaagttgaacaacaagttgctgaagaagctaccaccgaagaagctggtgaagaagaagccaaggaagaggttaccgaagagcaagctgaagctactgaatgggctgaagaaaatgctgacaacgtcgagtggtaagtaaggtgatatttacaaatagtatattaataattatagtataatgttttattagaataa

SEQ ID NO: 1318 - DNA, 3743 bp, Saccharomyces cerevisiae
aaagattatcaactgcaggatattcggtcacaactttgacatagatcttgagaacctcaacactattcatttctctggcctgattattttaagtaaagtcaatcattgttaagttttcttttgttcttttctatcattctcgctctttcaattacttacacctacaataatagacgttgacctgtgaaaggcaagaaacttaactaatagtataattaagaagaagttaacattttactctacattattgaaaccgctcactgacttcaaaaataggataaaaacataatatggaaggaattttggatttttctaacgacttagatatcgctctattagatcaggtggtatctacattctatcaaggttcaggtgttcagcaaaagcaagcccaagagattttgactaaatttcaagataatccagacgcttggcaaaaagctgaccaaattcttcaattctcaactaaccctcaatcaaaatttattgccctttccatccttgataaattaattactagaaaatggaaattgttgccgaatgatcatagaattggaattaggaacttcgttgttggtatgattatctccatgtgccaagacgatgaagtatttaaaacacaaaagaacctgatcaataagtcggacttgactttggtccaaattttaaagcaggaatggcctcagaattggcctgaatttatcccagaactaatcggcagttcaagttcctctgttaatgtttgtgaaaataacatgatcgttttgaaactgctatccgaagaagtcttcgatttctctgcggaacaaatgacacaagctaaagctttacatttgaaaaattccatgtcaaaagaatttgaacagatttttaaattatgttttcaagttttggaacaaggttcttcaagctctctaatagtggcaaccttagaatctttactgagatatttacattggattccttatcgttatatttatgaaaccaatattttggaattattaagcaccaaattcatgacatcgcctgatacaagagccatcacattgaaatgtttgactgaggtttcaaatctaaaaattccacaagataatgatttgataaaaagacaaactgtactttttttccaaaatactctacaacaaattgccacaagtgtgatgcccgtgactgccgatctgaaagccacttatgcaaatgctaacggtaatgatcaatctttcttacaagatttagcaatgtttctaactacatatctcgctcgtaatagggcccttctagagagtgatgaatcgttaagagagttgttgttgaatgcgcaccaatacttaattcaattatccaaaatcgaagaaagagaactatttaagacgacattggattactggcataatttagtagcagatttgttttatgaggttcagcgtttgcctgctaccgaaatgagcccattgatacagttatcagtcggttcacaagctatctcaactggatctggcgccctaaatccggaatatatgaaaagatttccattaaaaaaacatatttacgaagaaatttgttcacagttgagattggtcattattgaaaatatggttagaccagaagaagtccttgtggttgaaaatgatgaaggagaaattgttagagagttcgttaaagaatcagacactatccaattatacaaatcagaaagagaggttcttgtatatttgacccatttgaatgttatcgatacagaagaaatcatgatcagtaaattggcaaggcaaatcgatggttccgaatggtcatggcataatatcaacactttatcttgggctattggttccatatctggtacaatgagcgaagatactgaaaaaaggtttgtagttactgttattaaagatttactagatttaacggtcaagaaaaggggtaaagataataaagctgttgttgcatcggatattatgtacgtcgtgggccaatatcctagatttttgaaggctcactggaattttctaagaacagttattttgaaactttttgaatttatgcatgaaactcatgagggtgttcaggatatggcatgtgacacattcattaagattgttcaaaaatgtaaatatcattttgttattcaacaaccccgtgagtctgagcctttcatccaaacaataattagggatattcaaaagacaactgctgacctacagccgcaacaggtccatacattttacaaggcttgtggtattattatttctgaagaaagaagcgtagcggagagaaatagattattaagtgatttgatgcaactgccaaatatggcttgggacactatagtggaacaatccactgctaacccaacattgttgttagattctgaaactgtcaaaattattgcgaatattataaaaaccaatgtagctgtctgcacctcaatgggagcagatttctatccacagttgggtcacatctattacaatatgcttcagctatacagagctgtttcttcgatgatttctgctcaagttgccgcagaaggtctaattgctacgaagacaccaaaggttcgtggtttgagaaccatcaaaaaagagattctgaagcttgttgagacctatatatccaaggcgagaaatttggatgatgtcgttaaagtgttagttgagccattattgaacgctgtacttgaagactatatgaacaacgttcctgatgcaagggacgccgaagtgctaaattgtatgacaacagtagtagaaaaggttggtcatatgatcccacaaggtgttattttaattttacagagtgtatttgaatgcactttggacatgattaacaaagacttcacagaatatccagagcatcgtgtagaattttacaagttattgaaggtcatcaatgagaaatcatttgctgcatttttggaactacctccggctgcctttaaattgtttgttgacgctatttgttgggcgttcaaacataacaatagagatgtcgaagttaatggtctacagattgcattagacctagtgaaaaacattgaaagaatgggaaatgtcccatttgcaaatgagttccacaagaattattttttcatttttgtcagtgaaacgttttttgttttaaccgattccgaccacaaatccggtttttctaagcaagctttgttactaatgaagttgatttctttggtttatgataacaagatttcggtaccattatatcaagaagctgaggtaccacaaggaacttcaaatcaagtctacttaagccaatatttggctaatatgttaagtaatgcattcccccatttaacatccgaacaaatcgcaagttttctctctgcattaactaaacaatacaaagacttagtggtcttcaaaggcactttgagggactttttggtgcaaatcaaagaagtcggaggtgatccaacagattatttgtttgctgaagataaagagaatgcattaatggaacagaatagactagagagggaaaaagctgccaagattggtgggttattaaaaccttccgaacttgatgattagaggcggtggcgtatcattctttaaatttccaatattttttcccttttattaactagtctctaatttataaccacggggttttcatttctttttcacttcatattgtatgtaaattggttcttcaaagttccaatactctaatatagtactaaatactatttagccaacttcatggaaaagtaaagaatattatttgaa

SEQ ID NO: 1319 - DNA, 1000 bp, Saccharomyces cerevisiae
ctttgtcatcgatgtaaagcagatatgaaggcttctagtaaagctattaaattagtactggaccatctgaagtccacgggaagagttcttggctccgtagagtcaggaaattcagcaacaataagtgagaaaacggcatctgttaataagcagcagcagttgcaggaaaagaaaccttctgtcctacaatatagaagctacaatccatatttagttaaggaggatttcctgtcaattctgccagaaaatttgtataaaaagaggggacaatttacaaatgagcttgactttcagttgatgaaagtcagggaccctaaatacttccagttcaaggatcagtattacttgttttttaatgattataactcgcttactgagtatatcaaattaacaaaacactcgcgaataaacaagatcagggtgaaaatgacgccattggcgcaacccttgccaaccctgttaacaaaattacaaagatattcaaaaaatctatataacgcattccgatcatctgagcaatattttgagggactaaacgaaaaagtcgatgttagtggagagttcactaccaatcagttacggagtatccttgattcggtggaagaaatagaaaataagtccgtattagtctggaatatacccactaaattacggtcgcacgatatattgaattatttttggttttacaacataaggtctagcttcaagatatactgggatgatgaaatgaaaagaaatctacgatttatatctttcgaaaactcgcatgacgcctaccgctttaaaagaaactatcatggattattggctaaagagctattgaccctgtcagaaaagggagatgcagctgactattcgctcgaaatggacgattccaaaatattaattgaacatcttagtgaatgaataacttgaatcttgtacgtaaatgcacactttctctatacatatatatatatttatattcatgttaaagctctctccatgattctctcaccaa

SEQ ID NO: 1320 - DNA, 1724 bp, Saccharomyces cerevisiae
aaaaaaatatagagacagagaaaaaccagaatacaaagagctgtttaagtggtcaatatcccaggtacaccgagcccagtcacatcgaacttataatggatgcaaagaaaaatactggtgaagccaataatgatgtattggaagaggaagcagcgattcagttgattgcaccaggtatagcgagaaacttaacacaagaagtcattaccggtatcttctgtaatgtagtaatatatcctcttcttctaatatattttgtcttaactttccgttacatgactacaaatattgtaccttatgaatttatagatgaaaagtttcacgttggccaaactttgacctatttaaaaggtaaatggactcaatgggaccctaaaataacaaccccccctggaatctatattttgggtttaattaattattattgtataaagcccatattcaagtcgtggagcacactaaccatactaagattagttaatttacttggagggattatcgttttccccattttagtactcaggccaatattcctttttaatgccttaggtttttggcccgtttcattaatgagcttcccattgatgacaacttattattacttattttacaccgatgtgtggtctacaattctgatattgcaatcactcagctgcgtgttaacattaccgtttggccccgtgaagagtatatggttgagtgctttttttgctggtgtaagctgtctcttcagacaaacgaatatcatttggacgggatttataatgattcttgctgttgaacgcccagccattttacaaaaacagttcaacacgcatacgttcaataactatttgaaattattcattcatgctattgacgatttctccaaccttgttctgccctatatgaaaaattttgttttgttcttcatttatctgatttggaacagatccataacactaggtgataagtccagccactcagcaggcctgcatatagtacaaatattctattgtttcacattcatcaccgttttcagtttacctatatggatatctcgtaattttatgaagttgtacaaattaagaataaaacggaagccagtacaaactttttttgaatttattggtattatgctaatcataagatactttacaaaagttcacccatttttgttagcagataatagacactacacgttctacctcttcagaagattgataggcaacaaaagtagactaatcaagtacttttttatgacaccaatctatcatttctccactttcgcataccttgaagtgatgagacccaaccagctcacctttcaccccatcactccactccccatcaaagaacctgtacatttacccatacaactgacacatgtatcgtggacggccttaataacgtgcaccatggtaactatcgttccatcacccttattcgaacctcgttactatatattgccctatttcttttggagaatatttattacctgcagctgcgaacctttgataaaggatttaaaacctgctaaagaaggcgaaaacccaattaccataagcagtacgaaaagactgttcatggaatttttatggttcatgctcttcaatgtcgttactttagttatcttttccaaggtctcatttccttggaccactgagccctatttgcaaagaataatatggtgaacagaattgattatagttgcaaaaagacgttctataaatgtttactagtag

SEQ ID NO: 1321 - DNA, 645 bp, Saccharomyces cerevisiae
ctgtgatttttttttaaaaaaagttaatcagaggctactacatcattgcgctaaaaaaaagtaacagatttgcgatgtcatacggcggatcggcatcccaagatatagtgacaaaattgattagaaaaatccaaaatacgtctgtgtcttgcaccaggagggatgaaaatctagattcttttaatcaacacttgaaaatgagtcttaaagttgcgcataacacgaagacatttgcaaagcattgccttcatcgacaagtattcaagaatacgtatcggaaaagaaaagcagtggaagatcaaaggaaaaacttgaacacgcaacttaggcaaaaatttgcgtcgccgtcagacaatttgctttcaccatgctctagaaaactgaatgatcacaagtcaaaacttttctcagccaaatcgcaacccaaaacactggagtttgtgcggggcaaacagaatataccacgcaagccgaatgtagacatttaatttaacggatgatgatcataaattggcctatttttttgctgtatgtgttacatattatactatatacgttctccaacaatacaagatgatacggggtaatactccttattcttattctagaagacatacaaatatttatgttttacgcatcgctttc

SEQ ID NO: 1322 - DNA, 768 bp, Saccharomyces cerevisiae
tgtataaccatgtctaattatcctttgcatcaagcctgcatggaaaatgagtttttcaaggtacaagagctgctacactccaaaccttccttgttgctacagaaggaccaggatggcagaatccctttacactggtcagtttctttccaagcacatgaaattaccagttttttgctttctaaaatggaaaatgttaacttagatgattatccagatgattctggatggacacctttccatattgcttgttcagtggggaatttggaggtggtaaagtctctttacgacagacctctaaagcctgatctaaataagataaccaatcaaggagttacatgcttgcacttggcagttggtaagaaatggtttgaagtatcccaatttttaattgaaaatggtgcgtccgtaagaattaaagataaatttaatcaaattccattgcatagagctgcgtcggtgggttctttgaaattaattgaactattatgcggtttgggcaaaagcgctgtaaattggcaggataagcagggttggaccccactatttcatgctttggctgaagggcacggtgacgcagctgtattgttggtggaaaagtatggtgcagaatatgatcttgtagataataaaggcgctaaggcagaagatgttgcccttaatgaacaggttaaaaagtttttcctaaataatgtataagatttcaaaactacatattacagaactttacatatcaatattattctcaaaaagcaactcacaagcgtagta

SEQ ID NO: 1323 - DNA, 1491 bp, Saccharomyces cerevisiae
cacacaaagactttattcattatgctagccgaaaaaacccgttccataatcaaagcaaccgttcctgttttggaacagcagggcactgtcatcacgcgtacattctacaaaaatatgcttactgaacacaccgaattacttaatatttttaacagaactaatcaaaaggttggcgcacaaccaaatgccttggccactactgttttggcagcggctaagaacattgacgatttgtctgtgcttatggaccatgtcaagcaaattggccacaagcatcgtgccttgcaaattaaacctgagcattatccaatcgttggtgagtacttgttaaaagcaatcaaggaagttttaggcgatgctgcgactccagagataattaatgcatggggcgaggcttaccaagcaattgctgacatcttcatcactgttgaaaaaaaaatgtacgaagaagctttatggccaggttggaaaccatttgacattactgccaaagagtacgttgcttcagatattgttgaatttactgttaagccaaagttcggttctggtattgaattggaaagcttgccaatcactccaggtcagtatattacggtaaacactcacccaattagacaggaaaaccaatacgacgctttaagacactactctctttgttctgcttcaactaaaaatggtttacgatttgcagtaaagatggaagctgccagagaaaattttcctgcaggattagtctctgaatatttacacaaggacgctaaagttggtgatgaaattaagcttagtgctccggctggtgatttcgcaataaataaagagttgatacaccaaaacgaagttccattggtgttactatcgtctggtgttggtgttacaccacttttagctatgttagaagaacaagtcaaatgcaacccaaataggccaatttactggattcaatcttcctatgatgaaaagactcaagcattcaaaaaacatgtagatgaactattagctgaatgtgcgaatgtcgacaaaataattgttcatactgatactgaaccactgattaatgctgcattcttgaaggaaaagtcacctgcgcatgccgatgtctacacttgcggctctttagcttttatgcaagctatgattggtcatctaaaagaactagagcatcgtgatgatatgattcactatgaaccatttggtccaaagatgtcaaccgtgcaagtttaggcgttaagcctcggaaacttcaattttattactgattcatttgataatttcacttgttcgatttcacagtttgagaagttatattacgaaataagaaaaatttttaaaacatgagaccattgctaatcttttgttgttatactgtgttagaaatcctcgtgaaatccttgtgaaatcctatgtggaatatttagatagtaagtaaagattgtgtatgtatttataagatgaataagcgccaggtgctaaacagagttcacttcacgttaa

SEQ ID NO: 1324 - DNA, 873 bp, Saccharomyces cerevisiae
attttattttaccatcaattgtaattattctagtttgggaattcgcgatacttcaatttgctaatatcagtaaccacagaaaaatggcaatagcattatggtattgtccaccacaaggatcagttgcttacgagacattacagatgcttatattttcgtttcaaacgttgttcccagattcaccagtttttgaacctcatgtgacggtaacgtcccatttggtgtgcaatagtaaagatgatgtcaacaaaatcttgacctcctgtgttgctgccatccaatcgataaggtcacaccaaacagcaaagaaaggacgtaagggacaggtatcccatgctgttgcagctcctttggtatctttcaatggatgcagtgtaggtaaacaatatttcaagaaaattgtgctcgagtgtaacaagaacaaaatactttatggggtcgcacaagtcatgagagagatgtacgtagagatcgatcctgagacgcgaagtagccgtgccgccacttgggtgcacgaggaattccatcctcacgtctcattgctttattcggatattcatccggtaagtcaggcgtcattgcgagtagttcaacaaagaattgaagatgctctagacgtgcaactagttccaagagagaaacgtaagggttccggaaacgctgatgggtccaatgaagtgcaaatgagatgggattttgacgtatcttcatcgctatcttggaatatcccaggaacgtttaaagtggtcaactgtgtggggcccgttcaagaatgggaggtattgggacgggtggacgtttaagcatacatttatgtgcactgtaagtaattatatagaattttttttttttttttttttttcatatctgtca

SEQ ID NO: 1325 - DNA, 1505 bp, Saccharomyces cerevisiae
ccaagcaactgcttatcaacacacaaacactaaatcaaaatggctgtctctaaagtttacgctagatccgtctacgactcccgtggtaacccaaccgtcgaagtcgaattaaccaccgaaaagggtgttttcagatccattgtcccatctggtgcttctaccggtgtccacgaagctttggaaatgagagatggtgacaaatccaagtggatgggtaagggtgttttgcacgctgttaagaacgtcaacgatgtcattgctccagctttcgttaaggctaacattgatgttaaggaccaaaaggccgtcgatgacttcttgatttctttggacggtactgccaacaaatccaagttgggtgctaacgctatcttgggtgtttctttggctgcttccagagctgccgctgctgaaaagaatgtcccattatacaagcacttggctgacttgtctaagtccaagacctctccatacgttttgccagttccattcttgaacgttttgaacggtggttcccacgctggtggtgctttggctttgcaagaatttatgattgctccaactggtgctaagaccttcgctgaagctttgagaattggttccgaagtttaccacaacttgaagtctttgaccaagaagagatacggtgcttctgccggtaacgtcggtgacgaaggtggtgttgctccaaacattcaaactgctgaagaagctttggacttgattgttgacgctatcaaggctgctggtcacgacggtaagatcaagatcggtttggactgtgcttcctctgaattcttcaaggacggtaagtacgacttggacttcaagaatccaaactctgacaaatccaagtggttgactggtcctcaattggctgacttgtaccactccttgatgaagagatacccaattgtctccatcgaagatccatttgctgaagatgactgggaagcttggtctcacttcttcaagaccgctggtattcaaattgttgctgatgacttgactgtcaccaacccaaagagaattgctaccgctatcgaaaagaaggctgccgacgctttgttgttgaaggtcaaccaaatcggtaccttgtctgaatccatcaaggctgctcaagactctttcgctgccggttggggtgttatggtttcccacagatctggtgaaactgaagacactttcattgctgacttggtcgtcggtttgagaactggtcaaatcaagactggtgctccagctagatccgaaagattggctaaattgaaccaattgttgagaatcgaagaagaattaggtgacaacgctgttttcgctggtgaaaacttccaccacggtgacaaattataaagcttttgattaagccttctagtccaaaaaacacgtttttttgtcatttatttcattttcttagaatagtttagtttattcattttatagtcacgaatgttttatgattctatatagggttgcaaacaagcatttttcattttatgttaaaa

SEQ ID NO: 1326 - DNA, 1718 bp, Saccharomyces cerevisiae
atgagcaacaaatttacaatggagtcacctaagcatttggtggatgatgtgcttttcatatcacccaccaatgatggatcagaagaaaagcctacggaagtcacgttccaggaagatgaaggccatgacgctagcttgcataatcgcagccatgacaagaagtcggaacttgccaccgaacgggaaattatggctactaccacggatgatgacggcatcccctccccttcccatccaatggaaaagcgtgtcttgcgcaaaatggatatatacttgattcctcttatggggatgctatatttcctttctaacctggataaatcgaatattggtaacgcagaagttgcaggtctatccaaggatatccaccttgtaggaacgcaatataacacatgtgtcacagtttttttcgcgacgtatgttcttttcgaccccataggtactaaccttctgaaaattatgggtccgccattaatgatgagtatctgtttgacctgtttcggtgctatttcgctcggaactgcttgggttaagaattatgctcaattgatcgttgtcagactactactgggtgcctttgaaggtatgatttatcccgctattaacatgtacctttcagtctgctatagaagagaacaatatgctctgaggttcgcttttgtcttcagtgcagcctgtttgtcttcatcttttggtgggctgattgcttatggttgttccaaaatcagcggttctctaaaggactggcaatacatttacattgtcgaaggttgtatctctttggggttcgtaccattctatgccttcgggttgagcaaaaatttggaggattcgtggtttttcaataaggaggaaaaagagtacatttccgaaagatacaagactatgaacacttttgacccggacgaaaaatttgaatggttccaagtgtggcaagcagttaaggatgtcaagacttgggctagtgctgtggcattattcggtatcgatttgactacttttggtctaacagtcttcttgccgatcatcattaccagtatggggttcactaatgtcagagctcaattaatgaccgtgcccatctatttccttacagcaattgtgttcttcatttgtgccgtttggtctgatcgtataaagttgagatctccattcatcctgggtgcttgtctgacgacttcgataggcatagctatcgtccttggttctcaagttcatggtgtgagatattttggcgtttacattctttgtatgggtatttacgttaatgctgcctgtaactgtttatggttaagtggtaacactggtaattacttcaagagagccaccgctttaggaattaatctatttttcgggtctggttcagggttggtctctggtcaaatttttgttgccaaagacaagccaagatatatcaaagggctgtcgattagtctggcctttcaagtcttctccatatttatgacggttgtgcaaattttcctatacaagagggaaaacgataaaaagaaagcaataatagatcgctgtaatgaattgggagagcctattccatacgacgaaaggttaagcgacaaaaaccctgagtttaagtacatgtattaggcttgactttcttcaccctccactttttttgcccctcgttatgagtgtgtttgcaatttgtaacttttcttttatatttgtatgtatttttgtactaagcaaattcacatgaa

SEQ ID NO: 1327 - DNA, 2403 bp, Saccharomyces cerevisiae
ctacagaaggtcaaaacagttgctaccgggttcaaagtactcaattgaaaataaacactgctacaaaaatgcatgctacaaactggttcgacgattggaacccagaagctctttatagagacgatgtcactggctgcgatgactgttccgaaacttcgccaattccaaagtctggtattatatgtggaccgatattaagactcatcaacatggattttaaggaaaaaacctacgaggggtctattatggtggtagttagaggcgaggaaaactttccgaaaattacctatcagctagggccctctttgccctctgaggatgaagacatcgaagttaacgaggcattcttcgaaggtaaactttttcataaggacattttaaaagatgataatatatggttttacaggtatgagattaagttgcccatgtccaactatgagcagatggtaaaatatgctgttgacggtactatggaaccacattataggttcttcgttccctctttcactcaaaattcgaacgttatctcctattcatgcaacggattttcactgagcgtagatacatcgaaattcaaaggttctctatggtatgatgtccttaaaaagcatcgatacgttcattatcatgccattctcggcggcggagatcaaatttactccgataatattaaactgcatgcgccaaatcttaaagcttggctggagacaaaggacccaattaagaagtataatactcagaccactgaagaaacaaaagagcagattaggcagttttatttagaacactatttaaactggtacggttacggtcactggtatggttctaccccaaaatccaagaccacccaaaaatgctttgtcaagtcactagcttgtattcctgccattaatgtctgggatgaccacgatattattgatggctatggatcgtacaacgattccttcatgaagactgaaaatttcctcacagtgggaagaatggcttaccgatactatatgcttttccagcagcatgtcagtgcttctaaacaagatggcgatgagtatgcttatctcaagagcaaacaatggattctaggtaatgaaaaagggagttcttatatcggtgaaaggtctcactcaatattctcttggttgggtccgaaaatggccatgttagggttggactgtagaactgagaggaaattacacgagattttctcagaaagaagttattccttaatttgggaacgtgtcgaaagggaaataaaaaatttaaaaggtggccacttattgctgatgctcggtatcccgattgcatatccaaggttagtatggttagaatggctttttacctcaaaactactggctccaattaaatatttatctaaaaaagggatatttgctagtggcttcgttaacgaatttaatggagatgtagaactgttggatgatttaaatgatcattggtgcgcgagacatcataaaaaagaaagaaactacttgataatgaaattgcaagacataggtgctaaatatggcgtcagaataaccatattatcaggcgatgtacatttggcatctgttgggagatttagggcaaaaattcatagacaccatctcatcatgtctgaggagaaggaaaaggaaaacaccagaattattgaagaaccaacgaaagacgtaaggctgatttttaatatcattgctagcgccatagtaaataccccaccgccagatgcaatggccacgctattgcaaaaaagatgtcgcttgcatcatttcgatttggaaacggatgaagatgccgtaccaatttttgccaaggaagtggatggagtacataaacgtaaagaatcatgtttcatgaacaagagaaactggtcagatattatacctatagaaaacctgttgaataatccccaattgagtaaagaattaggcgtaaaggttggtgatatagtcattcctggtatcatcacagaacagcaaaagctacagaaattggaaaacgatgaccaaattaactcttatccagtaacttctggtggcttgtttaccaccattcatgttgaaagagatgcaaatcaaacaaactcacaaactgtgagctactgtttacccattccagagttaacagttacctgcgaacggttgtctcacaagggtatcaaacatctgaatatcacatagtttagttttgtgataattacagatttttatttagcagttcaaacttttctattcattactaacggactgtcaagtgcgatgctgtaccggaagtaaatgtatatactgattgttgaaaaaaaaaaaagctcagtcgcgcgtggcctttctctatggagatttctcaaacgatattaatcctgtatatctctattaatttagttaatacatacacgatatatcgtcgctt

SEQ ID NO: 1328 - DNA, 4816 bp, Saccharomyces cerevisiae
ctagcgaaggtgtcactgaaatattttttgttccagttagtataaatacggaggtagaacagctctccgcgtgtatatctttttttgcgctatacaagaacaggaagaacgcatttccatacctttttctccttacaggtgccctctgagtagtgtcacgaacgaggaaaaagattaatattactgtttttatattcaaaaagagtaaagccgttgctatatacgaatatgacgattaccgtgggggatgcagtttcggagacggagctggaaaacaaaagtcaaaacgtggtactatctcccaaggcatctgcttcttcagacataagcacagatgttgataaggacacatcgtcttcttgggatgacaaatctttgctgcctacaggtgaatatattgtggacagaaataagccccaaacctacttgaatagcgatgatatcgaaaaagtgacagaatctgatattttccctcagaaacgtctgttttcattcttgcactctaagaaaattccagaagtaccacaaaccgatgacgagaggaagatatatcctctgttccatacaaatattatctctaacatgtttttttggtgggttctacccatcctgcgagttggttataagagaacgatacagccgaacgatctcttcaaaatggatccgaggatgtctatagagaccctttatgacgactttgaaaaaaacatgatttactattttgagaagacgaggaaaaaataccgtaaaagacatccagaagcgacagaagaagaggttatggaaaatgccaaactacctaaacatacagttctgagagctttattattcacttttaagaaacagtacttcatgtcgatagtgtttgcaattctcgctaattgtacatccggttttaaccccatgattaccaagaggctaattgagtttgtcgaagaaaaggctatttttcatagcatgcatgttaacaaaggtattggttacgctattggtgcatgtttgatgatgttcgttaacgggttgacgttcaaccatttctttcatacatcccaactgactggtgtgcaagctaagtctattcttactaaagctgccatgaagaaaatgtttaatgcatctaattatgcgagacattgttttcctaacggtaaagtgacttcttttgtaacaacagatctcgctagaattgaatttgccttatcttttcagccgtttttggctgggttccctgcaattttggctatttgcattgttttattgatcgttaaccttggacccattgccttagttgggattggtatttttttcggtgggtttttcatatccttatttgcatttaagttaattctgggctttagaattgctgcgaacatcttcactgatgctagagttaccatgatgagagaagtgctgaataatataaaaatgattaaatattatacgtgggaggatgcgtatgaaaaaaatattcaagatattaggaccaaagagatttctaaagttagaaaaatgcaactatcaagaaatttcttgattgctatggccatgtctttgcctagtattgcttcattggtcactttccttgcaatgtacaaagttaataaaggaggcaggcaacctggtaatatttttgcctctttatctttatttcaggtcttgagtttgcaaatgtttttcttacctattgctattggtactggaattgacatgatcattggattgggccgtttgcaaagcttattggaggctccagaagatgatccaaatcagatgattgaaatgaagccttctcctggctttgatccaaaattggctttaaaaatgacacattgctcatttgagtgggaagattatgaattaaacgacgctattgaagaagcaaaaggagaagctaaagatgaaggtaaaaagaacaaaaaaaagcgtaaggatacatggggtaagccatctgcaagtactaataaggcgaaaagattggacaatatgttgaaagacagagacggcccggaagatttagaaaaaacttcgtttaggggtttcaaggacttgaacttcgatattaaaaagggcgaatttattatgattacgggacctattggtactggtaaatcttcattattgaatgcgatggcaggatcaatgagaaaaactgatggtaaggttgaagtcaacggggacttattaatgtgtggttatccatggattcaaaatgcatctgtaagagataacatcatattcggttcaccattcaataaagaaaagtatgatgaagtagttcgtgtttgctctttgaaagctgatctggatattttaccggcaggcgatatgaccgaaattggggaacgtggtattactttatctggtggtcaaaaggcacgtatcaatttagccaggtctgtttataagaagaaggatatttatctattcgacgatgtcctaagtgctgtcgattctcgtgttggtaaacacatcatggatgaatgtctaaccggaatgcttgctaataaaaccagaattttagcaacgcatcaattgtcactgattgagagagcttctagagtcatcgttttaggtactgatggccaagtcgatattggtactgttgatgagctaaaagctcgtaatcaaactttgataaatcttttacaattctcttctcaaaattcggagaaagaggatgaagaacaggaagcggttgttgccggtgaattgggacaactaaaatatgaatcagaggtaaaggaattgactgaactgaagaaaaaggctacagaaatgtcacaaactgcaaatagtggtaaaattgtagcggatggtcatactagtagtaaagaagaaagagcagtcaatagtatcagtctgaaaatataccgtgaatacattaaagctgcagtaggtaagtggggttttatcgcactaccgttgtatgcaattttagtcgttggaaccacattctgctcacttttttcttccgtttggttatcttactggactgagaataaattcaaaaacagaccacccagtttttatatgggtctttactccttctttgtgtttgctgctttcatattcatgaatggccagttcaccatactttgcgcaatgggtattatggcatcgaaatggttaaatttgagggctgtgaaaagaattttacacactccaatgtcatacatagataccacacctttgggacgtattctgaacagattcacaaaagatacagatagcttagataatgagttaaccgaaagtttacggttgatgacatctcaatttgctaatattgtaggtgtttgcgtcatgtgtattgtttacttgccgtggtttgctatcgcaattccgtttcttttggtcatctttgttctgattgctgatcattatcagagttctggtagagaaattaaaagacttgaagctgtgcaacggtcttttgtttacaataatttaaatgaagttttgggtgggatggatacaatcaaagcataccgaagtcaggaacgatttttggcgaaatcagattttttgatcaacaagatgaatgaggcgggataccttgtagttgtcctgcaaagatgggtaggtattttccttgatatggttgctatcgcatttgcactaattattacgttattgtgtgttacgagagcctttcctatttccgcggcttcagttggtgttttgttgacttatgtattacaattgcctggtctattaaataccattttaagggcaatgactcaaacagagaatgacatgaatagtgccgaaagattggtaacatatgcaactgaactaccactagaggcatcctatagaaagcccgaaatgacacctccagagtcatggccctcaatgggcgaaataatttttgaaaatgttgattttgcctatagacctggtttacctatagttttaaaaaatcttaacttgaatatcaagagtggggaaaaaattggtatctgtggtcgtacaggtgctggtaagtccactattatgagtgccctttacaggttgaatgaattgaccgcaggtaaaattttaattgacaatgttgatataagtcagctgggacttttcgatttaagaagaaaattagccatcattccacaagatccagtattatttaggggtacgattcgcaagaacttagatccatttaatgagcgtacagatgacgaattatgggatgcattggtgagaggtggtgctatcgccaaggatgacttgccggaagtgaaattgcaaaaacctgatgaaaatggtactcatggtaaaatgcataagttccatttagatcaagcagtggaagaagagggctccaatttctccttaggtgagagacaactattagcattaacaagggcattggtccgccaatcaaaaatattgattttggatgaggctacatcctcagtggactacgaaacggatggcaaaatccaaacacgtattgttgaggaatttggagattgtacaattttgtgtattgctcacagactgaagaccattgtaaattatgatcgtattcttgttttagagaagggtgaagtcgcagaattcgatacaccatggacgttgtttagtcaagaagatagtattttcagaagcatgtgttctagatctggtattgtggaaaatgatttcgagaacagaagttaatttatattatttgttgcatgatttttctcttttatttatttatatgttgccgatggtacaaattagtactagaaaagaaaacccactactatgacttgcagaaaaagttatgtgtgccatagatagatataattgcatacccacattgtatact

SEQ ID NO: 1329 - DNA, 919 bp, Saccharomyces cerevisiae
caatagatacaccactattgaggaaagatggctagaggaccaaagaagcatctaaagagattagcagctccacaccattggttattggacaagttgtccggttgttacgccccaagaccatctgctggtccacacaaattgcgtgaatccttgccattgattgtctttctaagaaacagattaaagtatgctttgaacggccgtgaagtcaaggctatcttgatgcaacgtcacgtcaaagttgacggtaaggttagaactgacaccacctacccagctggtttcatggacgtcatcactctagatgccaccaatgaaaacttcagattggtctacgatgtcaagggtagattcgctgtccaccgtatcaccgatgaagaagcctcttacaaattgggtaaggtcaagaaggtccaattaggtaagaagggtgttccatacgttgttacccacgatggtagaactatcagatacccagacccaaacatcaaggtcaatgacactgttaagattgatttggcctctggtaagattactgatttcatcaagttcgatgccggtaagttggtttacgttactggtggtcgtaacttgggtcgtatcggtactatcgttcacaaggaaagacacgatggtggtttcgatttggttcacatcaaggactccttggacaacactttcgtcactagattgaacaatgtcttcgtcattggtgaacaaggtaagccttacatttctttgccaaagggtaagggtatcaagttgtctattgctgaagaacgtgacagaagaagagctcaacaaggtttgtaaacattttaaatattgttatctgccctctcttcgtcttttgtttaatataaataaattctaaatcaactatatatatgtatgtatacatatacatatacatatatca

SEQ ID NO: 1330 - DNA, 1342 bp, Saccharomyces cerevisiae
accgattgttaagaaagatgtcgcctttgagaaagacggttcctgaatttttggcacacttaaaatcactgccaatttcaaaaattgcaagcaacgatgtgttaacaatatgtgttggtaacgagtcagcagatatggactcaattgctagtgcaatcacttattcgtactgccaatacatatataatgaaggtacttactcggaggagaaaaagaaaggaagctttattgtcccaattatcgacattcctagagaagacctcagtttaagaagagacgtaatgtatgtcctagaaaaactgaaaattaaggaggaggaattattcttcattgaagatttaaagagcttgaagcaaaatgtctcccagggtactgaattaaactcttacttggtagataataacgatacaccaaagaatttgaaaaattatatagataacgtcgttggcattatagaccaccattttgacttgcaaaaacatttggatgctgaacctcggattgtaaaagtgtccggcagttgctcatcgctggtttttaactactggtatgaaaaattgcaaggtgaccgtgaagtggtgatgaacattgcaccacttttgatgggggccatcttaatagacacttcaaatatgaggcgcaaagtcgaggaaagtgataaattagctatcgagagatgccaagctgttcttagtggtgcggttaatgaagtgtctgcgcaaggtttagaggacagcagtgagttttataaagagataaaatcaagaaagaacgatattaaaggattttcggtaagcgatattctaaagaaggactacaaacaattcaatttccaaggaaagggacacaaagggttagagattggtctttcatcaatagtaaaaagaatgtcttggctattcaatgaacacggtggtgaagcagatttcgtcaaccaatgcagaagatttcaggcggagagggggctcgatgtattggttctgttgacttcatggaggaaagctggtgattcacacagagaattggtcatattgggagactctaacgtggtacgtgaactcattgaaagggttagcgacaagctccaacttcaattatttgggggcaatcttgatggaggtgtggcgatgtttaagcaactgaacgtcgaggccaccagaaagcaagtcgtcccctatttagaggaagcgtactcaaacctggaagagtgaagggagatgttatatatgctttatttggtttatatatgacccatatagatatttttgtacactactatttgtcttggtgttgttcaggctgttcagactgctcaggctgatcttgttgttgttgctgctgt

SEQ ID NO: 1331 - DNA, 222 bp, Saccharomyces cerevisiae
atgataccggctctcactcccgaagaacggcagaagttgcgcagcgcaatactacatcgaatgcagctggaactggaaacaacagaaaaactgatcgaaaatattaaagaggagacgttaaagaaactaaatctgctccagcagcctgatgcaacatcagcgcctcaatcaaaggaactaatcagagaggtgcttgaacaggaaggacgccgtatagaatga

SEQ ID NO: 1332 - DNA, 977 bp, Saccharomyces cerevisiae
atgcgtttaatcagtaaagttttggtgaaaacaaattgcctagaggtaggtatgaggagggccccacaatggtattctcactactctactacagcgggcaatgctcgtgtgaacaagaagggcagcaaagtagtgcctgtgttaacagggttagcactggcatccatattcgcgaagaaatggtatgacgattcccagatcaaaaaggcggatgccaccagcgttgcagtggacgcatccatctctgcgttccctaagaagatgggccccccacagtggcccttctccacgcaatatgagctgattggtaagggtgtacgttgtgtctcatcgatcactttcaaagcatatggtctgggcatatatgtggccgctgaagacaaacatctggtctctgaagtactggactcaaagttcctgtctcaggcgttcatcgacactgcggcacccccatcaccggaaaactcacatcaggataatttgcgtgcggctttgaacgatcctgctaaggcccctatcctgattaataacctcttagacagcggaatcagactaatgtccaagaatactccgataaaagcaggttccttcaagttattgatggacggcaccaaaaagagcgtcctaaagaacccagattctcagtctcaagacaaagaccggctggaagctggattccaagaattgcatgactgtttcaggagcgtaaaaggacttgtggctcgagatgatgattttttcattgagctgaataaggactgctctatgaatttgtcttactacgcaagaaagaaggatgaatttgtgatattgggcacagtgaaggaaccccttattggaaagctcttatttgcccactacctagctgctgtggatcctccttctccggaggctaggaaggaagtaatcgatgcactcgtctctctatcttaggacactttcgccgacttctacatacaattacataatacatacgc

SEQ ID NO: 1333 - DNA, 966 bp, Saccharomyces cerevisiae
atggacagaggaaggtgcgccaatatgctaaaatcactccagcgaacactagctaaatgtcagaaatctccatcaaccaaccattggcaatgtttcaaaagaaattttactagtatacgagccactaaataccctgggcgttctaattcgacgttccactattggccctggtttgcggcgtcaacattgctcgctacttcgttatactaccgtgatcgtccggtacaaaatgacgataaaactgatgcttttccttctcatactgaatcgatacaggtagactctagcgtatcagatttcccactaacgattactgctttaaatttccctgtctctacaacttttaaattactgggatatggtcaaaggcacgtcacgtttttgaggttcaaggtctatgccttgggtctttatctagctgaaaatgacgaaaaccttgtttcagacactctaaatgaaacttatttacataaatatttccttgatgtggatgattctaagactcctaaggagaatctagctagattattgaaacgtgatgactcaaaatccgttatgatgattgatgacttactggattctggaatgagaatgctagccaagataactcccgtaaggaatacagattttaagcatcttaaggagggcctggtcaaaactatttctaaacatcccgatgtggccaataataaagacacactggcgaagggcctaagtgagttaaatgatgccttttcacgtaagggatccgtcaggaaaaatgacgatttgatcatcgaattattagccaacggcgctttacaattttcatatcatgacagtaaaaacaacgaatttgaggtcatgggagtagttaataatcaactcgtcggaaaattcttatttagccaatatttatgtggcgaaaaatctccttctccacaagccaaaaaaacagctatcgacaaattgatcacactcctctaa

SEQ ID NO: 1334 - DNA, 587 bp, Saccharomyces cerevisiae
ccacatactcaattgataatgtctgctatcccagaaaacgccaacgttaccgtcttaaacaagaacgaaaagaaagccagagaattgattggcaaattgggtttgaagcaaatcccaggtatcatcagagtcactttcaggaagaaggacaaccaaatctatgctattgaaaagccagaagtcttcagatctgccggtggtaactacgttgtcttcggtgaagctaaggttgacaactttacccaaaagctagccgctgctcaacaacaagctcaagctagcggtattatgccatctaacgaagacgtcgctaccaagtccccagaagacatccaagctgacatgcaagccgccgcagaaggcagtgtcaacgccgcagcagaagaagatgacgaagaaggtgaagttgatgccggtgacttgaataaggatgatatcgagttagtcgttcaacaaactaacgtttccaaaaaccaagccatcaaagccctgaaagctcacaatggtgacttagtcaacgctatcatgtccttgtctaaataatgatataaaaatatattatataggggtacgtagttattctaacg

SEQ ID NO: 1335 - DNA, 624 bp, Saccharomyces cerevisiae
agaattatcactatcattcagcccaataaacagctgaaaagaatgcctagtgtagatatagatgctagtcaatggcagaagttgacacagtcaagagaaaagcagaccacggtgataacaccgcttgggatgatgatgctggagattcaaggtgaactagagttgcctaaggactttgcgtcgctggcgaggagagattctccaaatgagggaaggttcagtgaacaggacggcgaaactttaatacgatttgggtcgttacagattgacggagagagggccacattgtttgtcggcaagaaacagcgtttactggggaaggtgacaaagctagacgtaccgatgggtataatgcatttcaattcgaaagataataaggtcgaattagttgatgtaatgaaatataaggttatctttaaggataggcctctacctattatgtaagtacttagttattgttcggagttgtttgtttatgttatttggcgcagacttcacgctctgtgtaaagtgtatatataataaaacccaagaagaacggacaagatgatagataaaaccatattgaacttgtactcttcttcttgttgggttggaaccaattcatcatcgtatctggatctt

SEQ ID NO: 1336 - DNA, 1922 bp, Saccharomyces cerevisiae
aaacaagtgttcaaagcaaacaaagcataggcaagacgacgatgatcctcacactggcctatttcatgctgggcactctactactgggtgtgttcgcagaagacacggtgtcgcagattggtataaatgacagtttatggtatccgtacgacgaagcactggtgttgaagccgctgcccaacaatgatctgctactctcatttgcattccaactgcaatcggaaccgtttgacccggccgtatcatccatgtcatatgatgcgtatgagcactacacgactttcccacgggccatcccaccattgttggaatctactgccacgcgtcagtttcatttaagatttaccagaggattctgggatgccctgtcgtggggacagttgccacatgctggaaaagaggcaggtgcctcaggtgtggaattgtggtcgcaagtgcaggccatggatcaggaacaggcgttccataattggaaaaaactgtccaattcattgagcggattgttttgttcttctttaaattttatcgacgagtcaaggacgacctttccccggcggtcatatgcttctgatataggagctcctcttttcaatagcaccgagaaactgtacctgatgcgagcatcgttgcccaatgaacccatctgtaccgagaacttgacgccgttcataaaactattgcctactaggggcaaatccggtttgacatctctcttggatggtcataaattgttcgactctctatggaatagtatttccttggatattgccactatttgttctgaagatgaagatgctctttgtcactacgagatggacgcacgcatagaaatggtaacacacgttccctccgccttggcaagaggtgagagacctatccccaaacctttggatgggaacacattgcgttgtgacacggataaaccctttgattcttaccaatgcttccctctaccggaaccttcgcagactcacttcaagctgtctcagctgtttgccagaccaataaacaatggcaacctgtttgctaataggcccacaagaatttgtgcagaagttgaccgttctacctggactgcgtttttgtcagttgacgatactattttcagcacacatgataattgctttgacttatcaaacgatcaaaatgagggtggttcgggctacgactttattttagaatcgacggacactactaaagttactcccatagttcctgtcccaattcacgtaagcagatctctgactggtaatggacaagatcgtggtggaatgcgtattgttttccataacgacaatgatacccctgtgaagttgatttatttcgaatcattgccatggttcatgagagtttacctatcctctcttcaaattacttctactacctctccgcaattgcaagaaaacgatatcatcttagataaatactatttacaagcggccgatagaaaaagacctggccacttggagttcacgatgttaattccagctaatacggacattgtaatgacttatcaattcgataaagctcttctgcaatttgccgagtatccaccagatgcaaaccatggttttgaaatcgatgcagctgtaatcaccgtgctatctttggagtcctcatcgtctctttatgaaatgagaacctctaccctattgttatccctgtctacaccggattttagtatgccgtataacgtcatcattctaacatctacaatcatgggactcatattcggtatgctatacaatttgatggtgaagagaatggtcaccgtcgaagaggccgataagattacgttgcaatctggcttaaaatacaaattgctaaagctaaaggaaaagttcctagggaaaaaaaagactaaaacagactaacaatctagcatctagatatgtgtatgaagtatacgtagtttacataat

SEQ ID NO: 1337 - DNA, 2310 bp, Saccharomyces cerevisiae
gaagaatatgatgataactcttggaagcgagcggcgggttccatcactttttacggattggtaacacaggggcctcagttcgatacttggtattcaggcttccagcgttggtgagtttagttagcggtatggtatgcacatggtgttgatgcttggtggtaatcattcgttaggtgaattgagcagtagcgatattagatatatttagtattttatagcgtctttttggtgggggaggaaggacaaaacctgtctcgtaaatataaagggactgttcgatatcgcagatactagagtataaatttcgattgaggcgagatgacaacatatttcaagttggtaaaaggtgctaccaagatcaagtcagccccgcccaaacagaagtatctggatccgatactgttggggaccagcaatgaagaggatttctatgagatcgtgaagggtttggattcccgaattaatgacacggcgtggactattgtgtataaatcgctgttggtggttcatttgatgataagggagggttccaaagatgttgcattgcggtactactctaggaacctggagttttttgacattgaaaacatacgtggctccaatggcagtgcgtctggagacatgagggcacttgatagatacgataattatctgaaggtgagatgcagggagtttggtaaaatcaaaaaggactatgtgagagacggctatcgaacactgaagctgaacagtggcaattacggaagctccagaaacaagcaacactctatcaatatagcactagatcatgtggagtccctagaggtacaaatacaagccctgattaaaaacaagtatacacaatatgatttgagtaacgaattgatcatatttggtttcaagctgcttattcaagacctgctagcgctatataatgctctcaacgaaggtatcataactctgctggagtcttttttcgaactatctcatcataatgcagagagaactctagacctgtacaagacgtttgttgatttgaccgagcacgttgtcaggtacttgaagagcgggaagactgcgggcttgaaaatacccgtcatcaagcatatcactaccaaactggtcagatcgctagaagaacatctgatagaggatgataagacgcacaacacttttgtgcccgttgacagttctcaaggaagtgctggggccgtagtagccaaatctactgcacaggaaaggttggagcaaatccgggaacaaaaaaggatactagaggcacaattgaaaaacgaacaagtagcgatttcccctgctctaactactgtcacggcggctcaatcttacaacccgtttggaacagactcttctatgcatactaacattccaatggctgtggctaatcaaacgcaacagatcgcaaataacccatttgtatctcaaactcagccacaggtgatgaatacaccaaccgctcatacagagcccgcaaatttaaacgttcctgaatatgcagcggtccaacacacagtgaacttcaaccctgtacaagatgctggcgtaagtgcccaacaaacggggtactattcgattaacaaccatttaacacccacatttacaggtgcagggtttggaggatactccgtttcacaggatacaactgccgcttctaatcaacaagtctctcattcacaaactggttctaacaacccgttcgcattgcacaacgccgcgacgatcgcaacagggaatcctgcacacgaaaatgtcttaaataacccattttcacgaccaaactttgatgaacaaaataccaatatgccgctacaacaacagataataagtaacccttttcaaaaccaaacgtacaatcaacaacaatttcaacaacaaaaaatgcctttgagctcgatcaatagcgttatgacaacccctactagcatgcagggatcgatgaatattcctcagcgttttgataaaatggaatttcaggctcactacactcagaatcatctccaacaacagcaacaacagcaacagcaacaacagcaacagcaacaacagcaaccacaacagggttattatgtgcctgcaactgcaggagccaaccctgttacaaatataactgggacagttcaacctcaaaatttccctttctatccacaacagcaaccacaaccggaacagtctcaaacacagcaaccagttttaggaaaccaatatgctaacaacctcaatttaattgatatgtaatatctagtataatcaggtatgtaagggagtactcaagtgcatctttggatagctatatatagttgtaaggaagagcta

SEQ ID NO: 1338 - DNA, 1581 bp, Saccharomyces cerevisiae
atgtggatactcatatacctatttatcatatggtcctcactgcgaacgtgggttactgctgttgactctactacgacagttggcgatgatctgaatgagaccgtttcagcatctgtctggccgacgatgtcccctcaaatgacggtggcctttaggtcccaaagagatgtcatgggaaacttaactatagaccagctgccgtatgttggtttgaatctacgacgggttctgttgaacaatgagactagcatggtaaatgaaggtaataatacaagattactgactttgttcaaatctatgctatcctccgaagcaaatgcttttgtcctcgacttggaacaatataataatgatttgagagtggtagatacgacattgttatttagcgacgttctaactgctttacagtcattcatcttcagcacacaaaacaacctctatgcgaatatcattgtactgttgctgaatatatcagctcctgaactggattccacagaataccgccaccaaaaccaaactttgaacactacttatatactggacaaaaatttaggaaatagtttcatttacaagcctacggatttacaaagtgatagagcaaagaataatacctggaacatctacggaaaatcgtccattgacggttggcccactctgggctctgtgctatatgaacaaaagaagagactggttataggtgagctgaccgatttttttaatgaaactactgctccatatatttttcctcatgacgtctttcattatgagcaggggaactctacattagattgcccctctactgtagagggtctgactgatttatcatctatccattggagattcttagattcgctgttcaattccgtggacatcaaagagtatatttcgtgtggtttatcaccaataataagcaattcagcgtacgtcaataatgtgacgcagttagcagatataattcatgaaggcagcgtttggtcatgggatagtgaccaaccttcagttactcagtcaacttctaaatctggcagctcatccgggaccttagaggcttacaattgcgttctcttgtactactttgctaacaatgagacagtaacatggcgagtaggtaactgttacaattctaatattgggctctgtagatatgaaaatatggcattccgatggttggtgagatcaaataaggctacgtactttgattttgatagttaccagggatctaaatgtcccgatcagtattcatttaatattcctagaagcccattggagcagagatcgtttattgcatatatgaggaattcctccttctctgacacacaaatatggatagatttgaactctatatcagtaagcaattgttgggtaagtggtggtccttatgctagttgcccatatgaaaaagtcatttctaggagaaatttcgtaacaatgatggtccctgcgtcagtctgttcctttgccctactgtgtattgtcgtttacttgagtgtattgagggtccccatttatgataatagaaaaaattggagaagagttatcaataaaatctctaaatccgagctagaaggtgtcccttcttaa

SEQ ID NO: 1339 - DNA, 2375 bp, Saccharomyces cerevisiae
tttttcgttgaactcatatagcgtcacatagttctaacaaagatatagttcgcgatgtaccacacccatatgcatgaaagtttaatatctgtgacttcaacggtaagtgtttctgatgcgtcttatgcttatgcaaggctcactagaagagacgatagcgattcatcttcttcctcagcatccagcacgaaaaatagcaaatctgctgaatgtacaggctctaaacagcaatgtcaattacccacagattcgagtcacagcaccagtgtaactgttggtgtggctgttgcggtaccagtaggtgtcattatcattgttctggctgtgatactttgcattgtgtataggagaagcaaaaaggaagctgaggaagataatgatccagatttcgaaggagattctgaatttttaccgacaatgaaggattattcacctggaataaatcatttgtactctagcgactcgcagcaagacttcatggaaaagaccttgcaacagccgccttcagatccctttgttggtagcatgcatagtagtaaatataatgtgagaagcgctaccccacctgcaattggtcggtcatggtacgtagacccgtttcagcttccacaggaatcgaacgactctaacagtttgagagattttgccatgagagtacaagaagatggactaggtggctataaagttgcggccgagtctagaaatgccagtcaaacgtccttgcatcctgataacttttcgaattgtacaccaataagagcgtcttcaagatttcaagagagtgaaagctttcgatctcacggtagcccaatccataataaccagctttcccgtggttctgccacagaaggtgccaacaagcagtttacatttcctaatgaagacaatgattcgtcctcagttagtgaagaggctgaggttttgaatgagtcaaatgagtctgcaagcaatgacgcgttcgaattcgaacttgataatagttcagaaaagacacatgaaaggaatctgcgttttggtaaggatgatgataattatgaacttcaagatatcagagaagctgaacatatgaatgatcgtagtagcagtaaaagtcaagatgatgattactatgtatcactcttatcccctaatgaagaagaagatattaagagaatgaaaagtatttatcaagtttatttggatagagctaaaacaatgaaaaaggaagaggataaagcagataatgcaaatgatatatcgcaggaggagaatagagtggataatatagtccagaatccactgccttctatcaaaattaataataacgacaatatcgacaataatgaggtaccggaagcaaaacacctggtgaaagaagcacttcctctaaacaatactaacttggcagaatatggtccagaaatggcccaaagccagaaacaatatccagtgcaggatacactcaccgtgaacgatacggaagcagcgccttccaatagaattgcttcctcaatttattccgaagcaattcagccgttgaattatcaggatcaatatcaacaacaggaacaatcaccagtatataatggccacacacagtatcctggcaatggatatagcggaaatcctcagcaacaggggtatactgcgcaattcgtgcaaaatccacaatggtacggtgtaccaactcctcaacaacagcaacataatcatcctcagaccctggaaactattggagaattaccaactcccgcatatttagctcaatcagcttcctcgcattcattgacctcttttaaaagaccaaacaagcaacaacttcttcaattacagactgccagactaaacggaactgcgttaaatccggtcgatcatccggaaatgttttattcaccgacaaacgatgcctattatgctccacagcagcaaggccaatatatgaagtttaacgaaaatggggcggttccttcaccttatcaacttagacaaagtgtggtaatgaccaatccttcggatttgacggcaaaaccatcttataagccagcaggttctttcagaagtgtaagcgcaaccaattcaagaaataacagtctgaccacacaaaataatatctatctgcaacagcagcagcagcaactgtataattctcgtgttagtgggatattagaagagacagatgttgtacagccaccaagtgttggtggaattttgccacatagtggttcacaggacgatttaagaaaacaattaggctcttcacataattataccgtcaactgaagtgtagataatgaacggacaattatcggatatataaattgatgttttattggagaaattttacaaattgcgtatttatacaaattaatttatgttaaataggattttttcgaagt

SEQ ID NO: 1340 - DNA, 799 bp, Saccharomyces cerevisiae
tatcgcaaatcttactataggaattgaggccaacctatgtcatttattcagaggaggttattgtcgcaaacactttttctgcgctctcaagtggggtctttaccactttatatatctcctgaagttcaggtttccataaatgcattatccatgcccaggattatcagaaaaggtagaacttcaatgaatatatcacagaatatcacagtaaagggacccaagggtgaattgtccgtggaggtccctgattttttgcacttggacaaggatgaaaagcacggtaaaataaatgttacagttcagaattcagaagataaacatcaacgttcgatgtggggtacagtaagatcacttataaataatcacattataggtgttactgaggggcatcttgctgtccttagatttgtagggacaggttatagagctcaattagaaaatgatggtaaatttgtcaacgttaaggtgggtgcatctatcaaacaaggattggacgttcctgaaggtattgttgtcaaaacacctgctcccacgtctctgattattgaagggtgcaataagcagcaggtccttctttttgctgccaaattgagaaaattccatccaccagagccgtataaaggcaaaggaatatacgttaacgatgaaacaataaagctaaaggacaagaaaatcaaataacttcaggatttcagttattttcgtactcattttcgtaattttttttatgacatgtatcttttcttatactttatagggaataccttgtaaatatcctatgaaaataacttaaatgaaa

SEQ ID NO: 1341 - DNA, 1211 bp, Saccharomyces cerevisiae
ggtgtgaatgctacactaatcaatataacacgattatgttaattggtgtaagtggtacgaaattttgcggatgcgaagatgttattaacatgttggttgatcattttcattttgaattactcaatcacctagataatccagaggagatattagattatgctacgaaaaattacacaaaaaattcagttatattcctagaaaaattatcattactggagaaactggaaaagagaccattttttgttcatctttctatcgacgctcctgtcactacaagggtagcattatacaggaaaacgactcaagcagaaagcttatcattagaacaaataatacaagccattgatcaacatgactttcagcctgaaggcatcaaattaagggagaaatcccatttgagatttaaaatagttaatgaggaccgcagaggaaggagacagagcttgattaataacattaccacacaattaaagattctcgatgacaaagagaaacaaatggctccattaatgaggcctagttgggatagctattttatgaagttagccacactagcagcatctcgttccaattgcatgaaacgtagagttggttgcgtgattgtgagagaatgcagagtgattgctactggctataatgggactcctcgacatttaacaaattgtttcaatggcggttgcccacgttgcaatgacggtgattctagaaatctgcacacttgcttatgcttacatgcagaagagaatgcactactggaagctggcagggatcgtgtaggtcaaaatgcgaccttatactgtgatacttgcccttgcttaacatgttctgtaaagattgttcaaacaggcatcagtgaagtagtttatagccaaagttatagaatggacgaggaaagtttcaaggtcttgaagaatgcgggaataaccgtccggcaattcagctttacggaagaaccaagaattgtgatgatttaattcataagttccttttcagttcgaactaatgtaacatatatataaaatactacatttaaaaaaaatacagtacattgtacaaactaaaatcactataaatagcgaatacttttcttatatactattattattatacatttgtatacaccttttttcattaatataatctctaagtgatatacgttttcccttaaaaaaacataaagaatttgctggaagaaaagtgctgcataaact

SEQ ID NO: 1342 - DNA, 478 bp, Saccharomyces cerevisiae
cctcgttatattacaacatttaaatctattgtgtaacagactatagcatatatatgaaggccagttacttagttttgattttcattagcatattctccatggcacaggcatcttccttatcatcatacatcgtaactttccccaagacggataatatggctacggaccagaatagcattattgaagatgtcaaaaaatatgtggtggacatagggggtaaaataacacacgaatatagcttgataaagggctttacagtggacttacctgatagcgaccaaattttggacggtctgaaagaacgtttgagctatattgaaagcgagtacggtgctaaatgcaatttggaaaaggattcagaagttcatgctctaaaccgtgaccatttagttgcttagagtaatttaaaatatacgcgactataactttttcccaacttttatacaaaaaactacaatttatatatgatatgcaaata

SEQ ID NO: 1343 - DNA, 613 bp, Saccharomyces cerevisiae
tttcccacgtgctccgctctcttatctaccttggcggtacagccctgcgcggagtcactgcagccacgtgcctagatctattactatgacttcccatgggcacatatacgccattaatatacaatatatataacgttcatatatgggtatttacagagagccaggggcaaattggacagatgtctccacgcggcaaaatggaaacagcagtttcacaaggacaacacaaacaacttaaagatggtcaccagcataagggaagaaaactctccgaggagatcgcttctctattgaggctcaaagagtgcaggaggctcaatcctgctagttactatactccacgtagaacatcgcagtcacaatctctcagtggatcaacttttaaagagtataacgagtacattaatgagaaagattcaagtagagcgcagcgtcaaaacgctgccgccgttttaagcaagctcgcccatgacttttgggagaacgactgtgtcattgacgaagacatattcgaagattcgtctgacgaagaacaatcatgattgcatctcttaatcgttacacatacataccttctacctctgtactgttacatatgcattgactttacgat

SEQ ID NO: 1344 - DNA, 1810 bp, Saccharomyces cerevisiae
ccgttcattgagtgctctgtgactggttttcatgtggatgccatagtagagaaaagacacatacaaaaatttcgcgcattcgctggcccttttcctgctctcctcttccccatgtccatgcccatagcaagtaccactctagcagttaacaacctcaccaatataaacggaaacgcaaattttaacgtacaagcaaacaaacaactccaccaccaggctgtcgactcgcccgcaagatcttcgatgaccgccacgaccgccgccaactccaacagcaactcttccagagatgactctactattgtcggcctacattacaagatcggcaaaaaaataggggaaggttcctttggtgtgctatttgaaggtactaatatgatcaatggcgtacccgtcgcgatcaaattcgagcccagaaaaacggaggcccctcaattaagagatgaatataaaacatataaaattctgaatggcactcccaatatcccctacgcgtactacttcggccaagaaggtttgcacaatatcttggtcattgatcttttgggtccctctttggaagatttatttgattggtgtggaagaaaattttctgtcaaaacggttgtgcaagttgctgtccaaatgattactttgattgaagacttgcacgcacatgacttgatataccgtgatatcaaaccagacaatttcttgattggaaggcccggccaacctgacgcaaacaacatccatttgatcgacttcggtatggccaaacagtatcgtgatccgaaaactaaacagcacatcccatatagagagaaaaaatcactcagcggcactgccagatatatgtccattaatactcaccttggaagagagcagtccagaagagatgatatggaggccttgggtcacgttttcttttatttcttgagaggccacttaccctggcagggtttaaaagctccaaacaataagcaaaaatacgaaaagattggtgaaaagaaaagatctactaacgtttacgatctagctcaaggcttacctgtgcaatttggcaggtatctagaaatcgtcagaagtctttcctttgaagagtgtcccgattatgaaggctatagaaaactattactatctgtactggatgatttaggtgaaaccgcggacggccaatatgattggatgaaactgaacgatggccgtggttgggatcttaacataaacaagaagccaaatctccacggatacggccatccaaatccaccaaacgaaaaatcgagaaaacatagaaacaaacagctccaaatgcaacagctccaaatgcaacagctccaacaacagcaacagcaacagcaatatgctcaaaaaactgaggcagatatgcgcaattctcaatataaaccaaagttagaccctacttcttatgaagcttaccagcatcaaacccagcagaaatacctgcaagaacaacaaaagagacagcagcaacaaaaacttcaggagcaacaacttcaagagcaacaattgcaacagcagcaacagcaacagcaacagctacgtgcaacaggccaacctccatctcagcctcaagcgcaaactcaatctcagcagtttggcgctcgttatcaaccacaacaacaaccttctgctgctttaagaactcctgaacagcacccaaatgacgataattcaagtctagctgcttctcataagggctttttccaaaaattaggttgttgctaaatatagaaatgacattttttgcaagactaccgtctttcttacattttttgtaatgtgaatatatctgtatactttacaaccg

SEQ ID NO: 1345 - DNA, 1047 bp, Saccharomyces cerevisiae
tgagaaaaaaaaaatttaaacagaggaggttactaatgggcaagaagaagagtaagaaccaattaaacactggaggtgttcctaatggtgtccataataccaagaaagaggcagctttgccacctttgggaaataagctgggaagcgcaagttttacagctataaatacgctgactaagcccgctttgttttcattttatgatgacgatattaccaagaatgaaggtaatgtttatgacaaggctttattgtctaacgcctctcaattggaaatggttccgccatccgcgactgcgagacacgaaaggtcattgtatgcgaaaataatcaatactattgctgcattttttattctattcatagcaggaatactcttccccatgatatcagaatgtttgtttgataatgaccaattggcaaagggagatatcgtatcctttttaaagcatggtatagaaattaagaacaagatcgtcgcggaacctgacatggtgcctgattgggctgtatttggtactgaaggtgttatctttggttccatagtaccattcattgactctttcgttcgttatcaacaccagccaaaaaccaggtcatcagtttacaaaaacaccctaggatcatttataagatgtgccaatactcttttgggcttaatatttggtattaggaaacttgaatggtcctcctctttgcaggcagctggtgcatggagcttattaaacattgttctgtggttgttctttgatggcactttaaccgtttttttcccaggtctagtaattggtgcccttagtgcgttcacttgctcacaatgtttctcgcagttgtcactggcgttgtattttatagatttctatttttttgggtttttgatgttcagcaagttgggcagatatttattcaattaagtgttcccataggggcgttcaatgattagtatcgatgtgtaaatcttagctgatttttaggcctcaacaaccttcatttactaagcatgtgagtaaatcaaaaggatgacgtcaacaaaaaacacatcagtaacac

SEQ ID NO: 1346 - DNA, 1479 bp, Saccharomyces cerevisiae
caagttaacactatataaacaaaccagagtgttaagttatatcatgttgcacatgaattcgttgtggggttgttttcttttcgttttactagccgtgacaggtgctgtgcagggtctccaagaggattacagtgaatacgctgtttacaggtttacttcagacaactattctaccctggtaagagatgtgatcgcaccgctgacagatgattatgatgtatggacgagaagcaataatttcattgatattaagttgcctaaagaaataggtgagcagataaatgatgggcaggtgatcatagataacatgaatgaattgatacaaaatacattgcctacaagtcagatgatggcacgtgagcaggctgtttttgaaaatgattacgatttcttctttaacgaatacagggacctggatactatttatatgtggttggatcttctagaaagaagctttcccagtttggttgcagtggaacacttgggcaggacatttgaaggcagagagctaaaagctctgcatatatccggaaacaagccagaatcaaacccggaaaagaagactattgttatcacaggtggtatacatgccagagagtggatcagtgtcagtaccgtctgttgggcactttatcagttgttaaatcgatatggttcgtctaagaaggaaaccaaatacctggacgatttggactttttagtcatacctgtgttcaatccagacggatacgcatatacgtggtcgcatgacagactatggcgtaagaatcgtcaaaggactcatgttcctcaatgtcttggtatcgacattgatcattcctttggtttccagtgggaaaaggcacacacccacgcttgcagcgaagagtatagtggggaaacgcccttcgaagcttgggaagcatctgcttggtacaagtatattaatgaaaccaagggcgattacaaaatttatggctacattgacatgcattcgtattcacaggagattttatatccctacgcatactcgtgtgatgccttgcccagagacttagaaaatttgttggagttatcatatggcttatccaaggccatccgttcaaaatcaggtagaaactacgacgtaatctccgcatgtaaggaccgtggttccgacatattccccggcctcggtgcaggttctgcgttggacttcatgtaccaccacagagcacattgggcattccagttgaaattacgggatacagggaaccatggatttttattgcctccagaaaacatcaagccagttggaaaggaaacttatgctgctttaaagtacttttgtgacttcctactagacccagagatataatggataccacggtatacattatattacaagttagtaataccctatcctatataaaatctagaaaaagcaaaaccttatatattttcttctatattctccaaaaaattattttaacttggattatctgctcatacaccccctaa

SEQ ID NO: 1347 - DNA, 1503 bp, Saccharomyces cerevisiae
ttcgatattattcaaagaggaactcggtgtacggctcaactgtaaaccgtacttctcgttctttgttcactgccctgtttctgactcttgtgccgtgagcttttcttcttacagtgtcgatttcctgtgcacatacgttctgtatagtggttattcctggatgtctactaatactgttccctcatctcccccaaaccagacgccacctgctgcttctggcatcgctacctctcacgatcacaccaagttcaacaatcccatcagactaccgatatccatctctctcaccattaacgatacgcctaacaataacagcaataataatagcgttagcaatggtttaggtattttgccctcgcgtacggctacttctttagtcgttgcaaataacggtagcgcaaacggcaatgttggtgctactgctgctgctgctgccactgtggagacgaatacagcccccgcggtgaacactacaaagagtatccgccatttcatatatcctccaaaccaagtcaatcagacggagttttcacttgatatacatctcccaccaaatacctcgctaccggaacggatagaccaatctactttgaaacgcagaatggacaagcacgggcttttcagcattaggctaaccccgtttatagatacttcatccacgtctgtggctaaccagggtcttttctttgaccccattatcaggactgcgggcgcaggctcgcaaattatcatcggaagatacaccgaaagagtaagagaggcaatttccaaaattccagatcagtatcatcccgtagtgttcaaatcaaaagtgatatccaggacccatgggtgtttcaaagttgatgaccaaggaaactggtttttgaaagatgtcaagtcttccagtgggacctttttgaaccaccagcgtctatcttctgcgtctaccacttctaaggactaccttttacatgacggagatatcatacagctgggtatggactttcgcggcgggacggaagagatatatcgttgtgttaagatgaaaatagaattgaacaagtcttggaaattaaaggccaatgcatttaataaagaagccttgagccgaataaaaaatctacagaaactaactactggtttagaacaagaagactgttccatttgtctaaacaaaataaaaccttgccaagccatttttatatcaccatgtgcccatagttggcattttcattgtgtaagaagattggttattatgaattatcctcaattcatgtgtccgaactgtaggacaaactgtgatttggagactaccttggaatccgaatctgaatccgaattcgaaaacgaggacgaagatgagccagacattgaaatggatatagacatggaaataaataacaatttaggtgttcgcctagtagattgatcacatgaaattttgtgctatatatatatatatatatatatatatatataacatagagtcgtcatacctctcaaaaaagtggcggccaggga

SEQ ID NO: 1348 - DNA, 1378 bp, Saccharomyces cerevisiae
tccatctcttcaaatgttgtagtacatgctataaaggaaagattgcacgaaaagagtacgtaagatggtggacttgtcaacagctttgattcatggcgatgataaagataacagggttactgacgtggcgcccccaattaatgtctctacaaccttccgttacgacgatgacgacctaattccatggacagagcgtgaaaacttggactttatggagaagaagcccgtatattcacggctagcgcatccaaatagcaccagattagagagtatcttctcagagatcctcgatggttatgctgtcatttattcttcagggttagctgcgttctatgcggcaatggtacattacaaccctaagaagatctttatcggacagagctaccatggtgttcgagcaattgctaacatattgacccgtaattacggcattgagcaacaccccttggaagatattgaaaaatgtgcttctgaaggtgacattgtccatctggaatctcctgtaaacccatatggtacctcttctgatatcgagagtttggcccgcagagctcatgcaaaaggcgccctgcttatagtggattccacattcgcatctcctccattgcaatacgcatggaatttcggagccgatattgtcctatactctgctactaagtactttggtggtcattctgacttgttaagtggcgtccttgtagtcaaagaggaagcaacttcccgacaactaaaagacgacagaatctacttgggtacaaacgtggcaaatttggaaagtttcatgttgttgcgatccctgagaacctacgaaatgagaataaccaaacaatcagaaaatgctacgaaattagttagatttttgtcagatcaccaatctgaatttgacaaagtattgaagacgatttaccactcttctttacaaacagaagagttcgttaaaaagcaactggtaggaggatatggtcccgtttttgctatcactttgtacaccaaagagcagtgtaaacaattacccctcaagctgaaatatttccatcatgcgacctcactgggtggaattgaatcccttgtggaatggagagcaatgactgacccatatatcgaccaaactttaataagagtatctgtgggctgtgaatccgctaatgatttgattaaggatttggcttcggccttgaaagaattgcaggatgcagcctgaataaattgctcaagtgtgtcgaaaacattcctgttatagagcataagtgacagacaagaagaaataatgaaaggagggaaagggataaaaaaaaataaagttacatatacacgttatacatgtataggtcaactaatatttaggaatggtttgatcaatatcgtctatgtatttgaa

SEQ ID NO: 1349 - DNA, 1441 bp, Saccharomyces cerevisiae
tgacctgaagagtattgataacgaactacatcacatattgtatcaaataatgagtgctgccactgcgactgctgcccctgttcctcctcctgtagggatatccaatcttcccaaccagcgttataaaattgttaatgaagaaggtggtacattcaccgtgatgttatgtggtgagagcggattgggtaaaactacatttattaataccttatttcagactgtcttgaaaagggcagatggtcagcaacaccgccaagaacccatcagaaagactgtagaaatcgacatcacaagagctttgctggaagagaagcatttcgaattacgcgttaatgtcatcgacaccccaggttttggagataacgtgaataacaacaaagcctggcaaccattggtggattttattgatgatcaacacgattcttatatgcgtcaagagcagcaaccgtaccgtactaagaaatttgacttgagagttcatgccgttctgtacttcatcaggcccactggacatggtttaaagccaattgacattgagactatgaagagattgtcaaccagagccaatctgattccagttattgcgaaagctgatacattgactgcccaagaattacaacagttcaagtccagaatcaggcaagtaatagaagctcaagaaattcgtattttcacgcctccattagacgctgattctaaggaagatgccaaaagtggcagtaatccagattctgccgctgttgaacatgcaagacagttgatagaagcaatgccatttgccatagtagggtctgaaaaaaaatttgacaatgggcaaggcactcaggtagttgcaaggaagtatccttggggacttgtggaaatcgaaaacgattctcattgtgatttccgtaagctcagagccctgttactgaggacttatctattagatttgatttctaccacccaagaaatgcattacgaaacatacagaagattaagacttgagggtcacgagaacaccggggaggggaatgaagatttcactcttccagcaattgcaccagcaaggaaattgtcacacaatcctagatacaaagaagaagaaaatgcattgaagaagtatttcactgaccaagtcaaagctgaggagcaaagatttagacaatgggagcaaaacattgttaacgaaagaatcagactgaacggtgacttggaagaaattcaaggaaaggtaaaaaaactagaagagcaggtcaaaagcttgcaagtaaaaaaatcccatttaaaatgatgattaattaatgtcttcctctttgtctcgtcaatttcaacgcctatctctttgtctcttcttttgtcgcagcaatacgcacatatatatatgtatcttataaaaatatttcaaatatatctcaaaaaacatagaatacgtaacacaatcgaacagtaaaaacaaaaa

SEQ ID NO: 1350 - DNA, 2987 bp, Saccharomyces cerevisiae
ggagcttgcaactgaagaaattagtaattttgagggttactaaggaggccatttgcagaagaatattggaccatcatgtctcagcagaatattttggcagctagtgtttcagcgctctctcttgatgaatctactgtgcatacgggcggagcatcttccaaaaaaagtagaagacctcacagagcatatcataacttttcctcgggcactgttcctactttgggcaattcaccctacactacaccccaattgaatcagcaggatggttttcaacaacctcaagcctttacccctaagcaatttggtggcttcaacaacggttcgggttccgttatgtccacgcctgtaatggtgagtcaagagcgattcggtgcgagtgaggcctcctcgccatatggtcaatctatgcttgatatgacagcgcctcaacctacatctcacattgttccaactcaaagatttgaagatcaagctcaatatttacaacgatctttcgaaacttgtagagattctgttccgcccttgccgaccacccagttttattgtgttgaccaaggttcatgtgatccgcacttgatgagtttatccatgtacaacatccccgaaagtgaacacttgagagccgccacgaagctaccacttggattaaccatccaaccattttccactttgacaccgaatgatgcagaagttcccacaattccattaccaatggatggtacgcctttgcgttgtagacgttgtcgtgcgtatgctaatcctaaatttcagttcacttatgattcaagtgttatttgtaatatttgtagagttaagatgcaagttccaggtgagcattttgcgcccatgggtcccaatgggcaacgaagtgatttgaacgaaaaatcagagttattgcacggaacagtcgatttcttggtgccaagtatttacaatgctattcaggagaaggagcttttaccactacactacgtgtttttgattgatgtttcattgttagctaatgagaacggaagttctttagccatggtggaaggtgtcaggtcatgtattgagtatatttcagatttccagccaaattgtgaggttgctataatcgtttatgataataagttgcggttctttaatttgagaccagatttagataatgcacaagagtacattgtaagtgaattggacgatgttttcttaccattttataatggattatttgttaaacccggaaactcgatgaaaatcattaatgacacattgataaaaattagtggttacatctccaccgacaagtatagtcacgtaccccaagtctgttatggttctgctttacaagccgcaaaattagcgttagacacagtaactggcgggcaaggtggtaagattatttgttctttgaacagcttgccaacgatcggcaacgggaatttatcgctaaaaagggacaatgcacacattgctcatgttaaatgcgacaatgggttctataagaaattagcatcggattttttgaaatcctacatttctttagatttatatgtgaccaatgcgggattcattgatatggccactgtgggccatcctgtagagatgacttccggtattttgaaatattatccccactttcaacaagagacggatgccttcactttggttaacgacatggttacaaatgtctccaatattgttggttatcaagctttattgaaagttcgctgttctactgggctatctgtggaacagtactactgcgattcatctgataatacggatcatgatccaattattcctgtattgactagagataccaccttagatgtcttactaaaatatgacagtaaaataaaaacaggaaccgatgttcatttccaaactgcattgttatatactgatattgatggtgtcagaaaagttcgttctattaacacgtcaggtgcggtatctaataacattcgtgaaattttcaagtttataaatcaaaatcctgtcatgagaataatgatcaaagatgtcataaagacgctcggtgattgtgactttgtaaagatcagaagattaattgatgacaagatggtcgaaatcttgacccaatatagaggattggttagcagtaactcatcaacgcaattgatactgccggattctataaagacattgcctgcttacatgttagcatttgaaaaaagcgaattaatgaagccaaacgctcaaagtacccgtggtaatgaacgaatttatgatttattgaagtacgattcattgaactcagcacaactttgctacaaactttatccacaaattgtgccattccatgtattattagaggaaactgatctgaccttttacgatgctaatgataaattattacagatcaactccagctctattaataatctatctgtaagagcctcacactctaatttcattaacggcggttgctacttgattttccaaggtgatactatctatctatggtttaatgagaacaccaatagaatgctcttgcaagacctgctgtcagtggatgaatccttgcccgtcagccaaatttcgttatttagtggaacattgcctgagacgggcactagtattaatcaaaaggcttcaaacgtcattaaaaactggcaacaagtagtcaacaagtcatcattgccgttagtcttgttgaggcctaatgttgatcaatattacagtaatgtgatgagtcaattgctttgcgaggacaagaccgtcaacagaatcgaatcatatgacaattacttggtgataatgcataaaaaaattcaagaaaaacttcaaaaagacgatttcattaaagtctcgactgccgcaactcacgaaaatatccatcaaaaatttgtgcagttttgagcctcgctcaaaggagaccctgtgcttacacgcagaaaactggaaataacgacatattgttgtggctgtggccgatgcggttcgtatatccattactaaataattaaatacgtaaatgaatg

SEQ ID NO: 1351 - DNA, 1853 bp, Saccharomyces cerevisiae
ccttaaaatctataaagatatcataatcgtcaactagttgatatacgtaaaatcatgaattcaactcccgatctaatatctcctcagaaatccaattcatccaactcatatgaattggaatctggtcgttcaaaggccatgaatactccagaaggtaaaaatgaaagttttcacgacaacttaagtgaaagtcaagtgcaacccgccgttgcccctccaaacaccggaaaaggtgtctacgtaacggtttctatctgttgtgttatggttgctttcggtggtttcatatttggatgggatactggtaccatttctggttttgttgctcaaactgattttctaagaagatttggtatgaagcaccacgacggtagtcattacttgtccaaggtgagaactggtttaattgtctctatttttaacattggttgtgccattggtggtatcgtcttagccaagctaggtgatatgtatggtcgtagaatcggtttgattgtcgttgtagtaatctacactatcggtatcattattcaaatagcctcgatcaacaagtggtaccaatatttcattggtagaattatctctggtttaggtgtcggtggtatcacagttttatctcccatgctaatatctgaggtcgcccccagtgaaatgagaggcaccttggtttcatgttaccaagtcatgattactttaggtattttcttaggttactgtaccaattttggtaccaagaattactcaaactctgtccaatggagagttccattaggtttgtgtttcgcctgggccttatttatgattggtggtatgatgtttgttcctgaatctccacgttatttggttgaagctggcagaatcgacgaagccagggcttctttagctaaagttaacaaatgcccacctgaccatccatacattcaatatgagttggaaactatcgaagccagtgtcgaagaaatgagagccgctggtactgcatcttggggcgaattattcactggtaaaccagccatgtttcaacgtactatgatgggtatcatgattcaatctctacaacaattaactggtgataactatttcttctactacggtaccattgttttccaggctgtcggtttaagtgactcttttgaaacttctattgtctttggtgtcgtcaacttcttctccacttgttgttctctgtacaccgttgaccgttttggccgtcgtaactgtttgatgtggggtgctgtcggtatggtctgctgttatgttgtctatgcctctgttggtgttaccagattatggccaaacggtcaagatcaaccatcttcaaagggtgctggtaactgtatgattgttttcgcatgtttctacattttctgtttcgctactacctgggccccaattgcttacgttgttatttcagaatgtttcccattaagagtcaaatccaagtgtatgtctattgccagtgctgctaactggatctggggtttcttgattagtttcttcaccccatttattactggtgccatcaacttctactacggttacgttttcatgggctgtatggttttcgcttacttttacgtctttttcttcgttccagaaactaaaggtttatcattagaagaagttaatgatatgtacgccgaaggtgttctaccatggaaatcagcttcctgggttccagtatccaagagaggcgctgactacaacgctgatgacctaatgcatgatgaccaaccattttacaagagtttgtttagcaggaaataaactaaacaagctcaatatgcatattttaatgacttatacagtatttaatttctcagtaaattttataaaggtgatattatattggt

SEQ ID NO: 1352 - DNA, 1921 bp, Saccharomyces cerevisiae
ataaagaaaagatatattcaaagcctcttatcaaggtttggttttgaaacacttttacaataaaatctgccaaaaatgtctgaagaagctgcctatcaagaggatacagcagtccaaaatactccagctgatgctttgtcgccagttgaatccgattctaattccgctttgtctactccatccaacaaagctgaaagagatgacatgaaagatttcgacgagaatcacgaagaatctaataactacgttgaaattccaaagaagcccgcctccgcctacgttacagtttccatctgttgtttaatggttgctttcggtggttttgttttcggttgggatactggtaccatttctggttttgttgctcaaactgattttatcagaagatttggtatgaagcaccacgatggtacttattatttgtctaaggttagaactggtttaattgtctccattttcaacattggttgtgccattggtggtattattttagcaaaattaggtgatatgtatggtcgtaaaatgggtttgattgtcgttgttgtcatctacattatcggtatcattatccaaattgcctcaatcaacaagtggtaccaatatttcattggtagaattatctctggtttaggtgtcggtggtattgccgttttatctcctatgttgatttctgaagtctctccaaagcatattagaggtactttggtttcatgttaccaacttatgattactttgggtattttcttgggttactgtacaaactacggtaccaagacctacaccaattctgtccaatggagagttccattaggtctaggtttcgcttgggctttgtttatgattggtggtatgacattcgttccagaatctccacgttatttagttgaagtcggtaaaattgaagaagctaagcgttctattgctctttcaaataaggtcagcgcagacgatccagctgttatggctgaagtcgaagttgttcaagctacagttgaagctgaaaaattagctggtaatgcctcctggggtgaaatatttagcactaagactaaggttttccaacgtttgatcatgggtgctatgattcaatcattgcaacaattgacaggtgataactatttcttctattacggtactaccgttttcactgctgtcggtttggaagattcttttgaaacttctattgtcttgggtattgtcaactttgcttccacctttgttggtattttcttagtcgaaagatatggtcgtcgtagatgtttattatggggtgctgcttccatgacagcttgtatggttgttttcgcttctgttggtgttacaagattgtggccaaatggtaagaagaacgggtcttctaagggtgctggtaactgtatgattgtcttcacatgtttctacttattctgttttgccactacctgggctccaattccatttgttgttaactctgaaactttcccattgagagttaagtccaagtgtatggctattgctcaagcttgtaactggatctggggtttcttgattggtttctttactccatttatttcaggtgctattgatttctactacggttatgttttcatgggctgtttggtcttttcttacttctacgtcttcttcttcgttccagaaactaaaggtttgactttagaagaagttaacaccttatgggaagaaggtgttttgccatggaaatcaccttcttggttccaccaaacaagagaggtactgactacaacgctgatgatctaatgcatgatggatcaacccattttacaagaagatgttcggaaaaaagtaggtcagttaattaaataatatagacttccttcaaggaataaaaataatatttgatcttcaatttttaacgctttatgaaatatatatttatgatttaatagtttatagataatac

SEQ ID NO: 1353 - DNA, 841 bp, Saccharomyces cerevisiae
tgctctcttctaccaaaagatcacctgaggataatttttaaccaaaagaaaataatgagtttcagaggaggtaatagaggtggccgtggcggcttccgtggcggctttcgtggtggacgtacaggcagtgctagatcatttcaacaaggaccaccagacactgttctagaaatgggagcttttctacatccatgtgagggtgatattgtttgccgttctatcaacactaagattccatatttcaatgcgccaatatatttggaaaacaagactcaagtcggtaaagttgacgaaatattgggtccattaaacgaagtatttttcactatcaagtgtggtgacggtgtccaagcaaccagttttaaagaaggtgataaattctacattgccgctgacaaactattgcctattgaaagatttttacctaagcctaaggtggtaggcccaccaaaaccaaaaaacaagaagaagagaagtggtgccccaggtggccgtggtggtgcttcaatgggtcgcggtggtagcagaggaggtttcagaggaggccgtggtggtagttctttcagaggaggccgtggtggcagttctttcagaggtggatctcgtggcggatcatttagaggaggatctcgtggcggatctcgtggtggtttcagaggaggtagaagataatctagctagaaaaaaataaaaaaaaaaaccatcctttatctttcacaattcttcatttcttccaacttactatatctgccgaagcacgtctaacgtcgaaaaaaaaaaaaagaaattaccgtttgttctgtatactatatatatatatatttgtttgattgatttacct

SEQ ID NO: 1354 - DNA, 1203 bp, Saccharomyces cerevisiae
aacagatatgtccgaagttatcacaattaccaagcggaacggtgccttccaaaattcatctaacctgtcctataacaacacagggatatcagatgatgaaaatgatgaagaagatatctacatgcacgatgttaactcagcttctaaaagtgagtctgattctcaaattgtgacgccaggtgagctggtcactgatgaccctatctggatgagaggtcacggtacgtattttcttgataatatgacgtattcctctgttgctggtactgtatcccgtgtcaataggctgctatcggtaattccattgaaaggtcgttatgccccagaaactggtgatcacgtcgtagggagaattgctgaagtgggtaacaagagatggaaagtagacattggcggtaagcaacatgcagtacttatgttgggctctgtgaatttaccgggtggtattctaagaagaaaatctgaaagtgatgaactacaaatgagaagcttccttaaggaaggtgacctcctgaatgcagaagttcaatcattatttcaagatggtagtgcctctttacatacaaggtctctaaagtacgggaagttaagaaacgggatgttttgccaagtcccgagttcattaatagtgagagccaagaaccatactcataatttgcccggcaacataaccgtagttctcggagtcaatggttacatatggttaaggaaaacatctcagatggacttagcgagggatacgccgtctgcaaataacagttcctcaattaaatcaactggacccactggtgcggtatcattaaatccctccataacaagactggaagaagagtcttcatggcaaatatattcggatgaaaacgatccttccatatcgaacaacatacgacaagcaatttgccggtatgcgaacgtgatcaaagcgttagcgttctgtgaaataggcattactcaacaacgtatagtaagtgcttacgaagctagtatggtttattcaaacgtaggtgaactgattgagaaaaatgtaatggaatccataggcagtgacattcttaccgccgaaaaaatgagaggtaacggcaactaataggaatacaaaagccgctgtttacacatttataaactacacagcagactccaacgcaatttatgtgtataaacttacataatgtcatggctatgtacacacgattagtacgtata

SEQ ID NO: 1355 - DNA, 1622 bp, Saccharomyces cerevisiae
taagtacttcactgaatcagctataaaaatgtccaaaattgttaagagaaaggaaaagaaggctaacgatgaattaacttctttagcagaaaagattagagcaaaagctttggaaaatcaaaagaagcttatagaagcagaaaaggaaggtggttcagagtccgattctgaagaagatgctactgctgaaaagaaaaaggttttgaaatcaaaaagcaaatccacagtatcaacccaaaatgaaaatactaatgaagatgaatcttttgaatcctttagcgaactgaatctggtccccgaattaattcaagcttgtaagaacttaaattattccaaacccactcccattcaatctaaggcaattcctcccgcgttagaaggtcacgatataattggacttgcgcaaacaggttctggtaaaactgctgcatttgctattcccattttgaatcggttatggcatgatcaggaaccatactatgcgtgcattctagctccaacaagagaattagcacaacagatcaaagaaacatttgactcattaggatccttaatgggcgtgagatcgacatgtattgtgggtggtatgaatatgatggaccaggccagagacctgatgagaaagccacatattatcattgctacacctggtagattaatggaccatttagagaataccaaagggttttcactgaggaaactgaaattcttggttatggatgaagctgatagattattagacatggaatttggacctgttcttgatagaattttaaagatcatcccaacccaagaaagaaccacttatcttttttccgctactatgacttccaaaattgataaattacaaagagcaagtttgacaaatcctgtgaaatgtgccgtgtcaaacaaataccaaaccgtagatacattagtgcaaacactgatggtcgttccaggtggtcttaagaacacatacctaatttatttattaaatgaatttattggaaagacgatgatcatttttacaagaaccaaggccaacgcggaaaggttgtcaggattatgtaatttgctcgagtttagtgccactgcgctacatggtgatttgaatcaaaaccagagaatgggatctttggatcttttcaaggcaggtaagaggtctattctcgtggctacagatgtcgctgcgagagggttggatattccatcagtggacatagttgtaaactacgatattcctgtggattccaagtcctacattcatcgtgtgggaagaaccgcaagagctggtagatcaggaaaatctatctcactagtatcacaatacgatctggaattgatcttaagaattgaagaagttttaggtaaaaaactaccgaaggaaagtgtggacaagaacattatattgaccctaagagattccgtcgataaggctaatggggaagttgtaatggaaatgaacagaagaaacaaggagaagattgccagaggtaagggaagaagaggaagaatgatgacaagagagaatatggacatgggagaaaggtaggctttgtaagcatggtttaccttttaacgcccaaaagttcaatttaacttagaaatatttatctatatgttcatatatacatctatca

SEQ ID NO: 1356 - DNA, 1720 bp, Saccharomyces cerevisiae
taccacaatcacagttaaaattacaaataagatgtcctctccagtgattggtatcacctttggtaacacctcttcttctattgcctacatcaacccaaagaacgatgttgatgtcattgccaacccagatggtgagcgtgccattccatccgctttatcctatgtcggtgaagatgaataccacggtggtcaagctttgcaacaattaatcagaaatcctaagaatactatcattaacttccgtgacttcattggtttgccatttgacaagtgtgatgtcagcaagtgcgctaacggtgccccagctgtcgaagttgatggcaaagttggatttgttatttcaagaggcgaaggtaaggaagaaaaacttactgtagatgaagtggtctccagacatttaaacagattaaagttagccgcggaagattacatcggttctgccgtaaaggaagctgtattgacagttccaacaaacttcagtgaagaacaaaagactgcactaaaggcttctgccgccaaaattggtctgcaaattgttcaattcatcaatgaaccttctgctgctttattagcccacgctgaacaattcccatttgaaaaagatgttaacgttgttgttgctgacttcggtggtattagatctgacgctgctgtcattgccgttcgtaacggtattttcactattttggccactgctcatgacctcagcttaggtggtgacaatttggatactgaattagtcgaatattttgctagtgagttccaaaagaagtatcaagccaatccaagaaagaacgctagatccttggccaagttaaaggctaactcttcaattaccaagaagactttgtccaacgcaacttctgccactatttccatcgattccttagctgatggtttcgactatcacgcttctatcaacagaatgaggtacgaattggtagctaacaaggtcttcgcccaattttcctctttcgttgattctgtcattgccaaggctgaattagacccattggacatcgatgctgttcttttgactggtggtgtatcatttactccaaaattaaccactaacttggaatacactttaccagaatcagtcgaaattcttggtccacagaacaagaacgcttctaacaatccaaacgaattagctgcatccggtgccgcattacaagcaagattgattagcgattacgatgctgacgaattggctgaagctttacaaccagttatcgtcaatactccacatttaaagaagcctattggtttgattggtgctaagggcgaattccacccagtattgttggctgaaacttcgttccctgtacaaaagaaattgactttgaaacaagccaagggtgatttcttgattggtgtttacgaaggtgaccatcacatcgaggaaaagactttggagccaattccaaaagaagaaaatgctgaagaggacgatgaaagtgaatggtccgacgatgaacctgaagtcgtcagagaaaaactatacactttgggtaccaagttgatggaattgggaattaaaaacgctaacggtgttgaaattatctttaacattaacaaagacggtgctttaagagtcaccgctagagatttgaaaactggtaatgctgtaaagggtgaattatagagcgctctaagaaaaacggtatgtatacgtatatagaaaaatacatacatgatggaactatacagcccttga

SEQ ID NO: 1357 - DNA, 1214 bp, Saccharomyces cerevisiae
cgataaagtctgtacaatatgactgcaccacacagaagtactattcatattcttgggttgggtgccatgggtaccgttttggcagttgaccttttaagatttaccaatgccctagttgtgcccttatttagatcacaagaaagacttgcacaatttcagaagacaaatgggaacaacatttcgattcgcaaactttatttggaaggctcgccaatattttcttatccagtggagaaatgcgaatgccctgaaactttctctaaaaaacctattgacaacttagtcgtcactacaaagacttaccaaaccaaagaagcactagctccttatttgccttatattaataaaaatacaaacttaattttgattcagaatggactgggcgttttagaactattgagagaagaaatctttacagattcaaaaaacagaccacatttatttcagggtgtcatttctcatggcgtttatcaggataaagcaggagttttcaatcatgctgggtgggctggtatgaaaattgccaaattgccttggactgaggaagaaatgattcaaaaaaaatccgtagtcgaggacgatgcagccaataactcattagtaaaattattaacagaaccaaaatttgccaaggaatttggaatagaacattccacttatcaagaaatgctctttggtcaattatttaaatttttggttaatgcatgcatgaatccagttacggctattctagattgtgtcaatggtgagatgaaggccagttgcggtccagttttcacatctattattgacgagtgtttacaaatattgagagttgcttataggccattgtttcaataccacgaaaaatacagcggtaatgaagaatacccagaaatggatgtcaatgcagtactgacaaccgataacatggtctccgaagtcactagaattggctgtgacatcaattctaggaacagtagttcaatgagacaagacactttgttcttaagagacattgaaattgagtatatcaatggctatgtcgtcaaattggctgataacttaaatctagacccaaactgctgcaaggttaataaaactatcggagaattggccactatgagattagcattgaacaggtcgagaagtatcaatggtgactggagaaaggactgaaaatgcgcggatatcagccagaacatatacatttataaatactgatatatatacac

SEQ ID NO: 1358 - DNA, 993 bp, Saccharomyces cerevisiae
aaacagacacaaaaaacaaaagtgaaagcattatagaaccgagaatgctggtagatttgaatgtaccgtggccacagaacagctatgcagacaaagttacttctcaggcggtcaacaatttaataaaaacgttatccacattgcatatgttgggatatacacacatcgccataaattttacagtaaaccacagcgagaaattccccaacgatgttaagctgttaaatcctatcgatatcaagagaaggtttggagaattgatggatcgaacagggctaaaattatacagcaggatcacgctaattatcgacgatccatcgaagggacagtctctttccaagataagccaggcctttgatattgtagcagcattgccaatcagtgaaaagggccttactttatcaactaccaatctggatattgacttgttgacctttcagtacgggtcgcgcctgcctactttccttaagcataaaagcatatgcagctgtgtgaacagaggagtaaaacttgaaattgtttatggctatgctttgcgtgacgtacaagctcggaggcagttcgtatccaatgtaagaagcgtcatcaggagttcgaggtccagaggcattgttatcggcagtggtgccatgtcaccacttgagtgccgcaacatattaggagtaacaagtctaatcaagaatttaggtcttccgagcgataggtgttcgaaggccatgggagacctagcttcactcgtcctcctaaatggccgcttaaggaataagagccacaaacagaccattgttaccggtggtggtagcggaaacggcgatgacgtggtcaacgatgttcaaggcatcgacgacgtccagaccatcaaggtagtgaaaaggagtatggatgctgaacaattaggccatgcttccaaaagacacaagccttaaaacgatacgctaacctataacatataatgtataaatgataattaaatacgtacccgggtagtagaca

SEQ ID NO: 1359 - DNA, 1382 bp, Saccharomyces cerevisiae
ggggatccaaggcatattctgttacattgtacctgtaggatttactgagagctgaaaccattgaaaactattctgcaattaattatcttcgtacggactatcactacttttttttaagaaagacttatttctattgtttattgtttataattcactctgaatactcgcttattaattgtgtgataaattctaaaggatgactgaaggaaagaggctgcaacagatggagcttcctcaaatgaaatccatttggattgacgaggatcaggaaatggaaaaattgtatggattccaagtaaggcaacgattcatgaatggacctagtacggattccgatgaagacgccgacgaagatttaggaattgttctcgttgacagtaaaaagctggctttgccgaacaagaacaacatcaaattgccccctttgcccaattacatgacgatcaaccctaacataaattccaatcacaagtcattaactaataaaaagaagaatttcctgggcatgttcaaaaaaaaggacctgttgtcgaggagacatgggtctgccaaaaccgcaaaacagtcaagtatatctacaccatttgattttcaccatatttcgcatgctaatggtaaaagggaagacaaccctcttgagtcgcacgaagaaaaacatgatgtagaatcattagtcaaattcacgtctttggcaccgcaaccccgaccagattcaaacgtctcttctaaatattccaatgttgtgatgaacgattcgagcagaatagtgtcttcctccacaatagctacaacgatggattctcaccacgatggtaacgaaaccaacaataccccaaatggcaataagcaattagactcgcctacagatttggaaatgaccttggaagacttgagaaattatacatttccttctgttcttggagatagcgtcagcgaaaagaccaatccttcctctccctctgtttcatcattttctggcaaattcaagccaagagagttgagtgcgctacatacgcccgaattaggaaattgtttcaatgtagatcagtcgctaaattcccctggtaacagaatatctgtggatgacgtgctaaaattctactatcaatgtagtgaaactagtactcctcgaaatacctgaactagttttcttctttcctcctcttctttgaactgcttccaaattctgtctttaagtccatcacatggtgttttatgggattttgtattattacggtgttcggttttcttttgggtattgagcttttattttggtcttaatttttttttttctttttcaaaccatggactttattataattaatctacgacaacttttaatgattatttctttcttcaaatatacacgtatgtattatttc

SEQ ID NO: 1360 - DNA, 978 bp, Saccharomyces cerevisiae
agttgcaagtagtgaaacaaagcaggatttcgcaaaatgaacgtgacaccgttggatgaattgcaatggaaatctccagaatggattcaagtttttggtttgagaactgagaatgttcttgattactttgcagaatcaccatttttcgataagacgtcgaataatcaggtaattaaaatgcaaaggcagttttcccagttaaatgatcctaatgctgccgtgaatatgacacaaaacataatgaccttaccagatgggaagaatggaaacttggaagaggagtttgcctatgtggatccggcaagaagacaaatccttttcaagtatcctatgtatatgcaactggaggaggaattaatgaagttagatggtactgaatacgtattgagcagcgtaagagagcctgacttctgggttatcaggaagcaaagacgaacaaacaattctggtgtgggaagcgctaagggaccagagattattccattgcaagactactacataattggtgcaaacatttaccaatcgccaacaatttttaaaattgtgcaaagtaggctgatgtccacgagctaccatctaaatagcacattggagagcttgtatgacttgattgagtttcaaccttcccaaggagtacactataaagtacctacggacactagcacgactgcaacggctgccaccaacgggaacaacgctggagggggcagtaacaagagcagtgtacgacctaccggcggtgccaatatggcgactgttccctcaaccacaaatgtcaacatgacagtcaacactatgggtacaggaggacaaactatagacaacggtaccggtcgtactggcaacggtaacatgggtataactacagagatgttggacaaattaatggtcacaagcattcgatccaccccaaactacatatgagaactgccatggcaattgcatatatctttgtactatattataaaaccccgcgaa

SEQ ID NO: 1361 - DNA, 708 bp, Saccharomyces cerevisiae
cccaaaaggaaagaaatgagaggaaaaagacacgaagggaaaacaaaatgaaattcagtggcttgtggtgttggttgttattattccttagcgttaatgttattgcatctgatgtgggtgagttgattgatcaggacgacgaagtaattacacaaaaggtgtttttcgatattgaacatggtgaagagaaagttggcagaatcgttattgggttgtacggaaaggtatgtcctaagacggcgaagaacttctacaagttaagcaccaccactaattccaaaaaggggttcatcgggtccactttccatagggtgattcccaacttcatggtacagggaggggacttcacagacggcactggcgttggtggcaaatccatctatggagatactttccctgacgaaaactttactttgaagcatgatcgcaagggcagactatcgatggctaatcgtggtaaagataccaatggatctcagttcttcatcaccactacggaagaagcgtcgtggctcgatggaaagcatgtggtatttggacaggttgtggacggcatggatgtggtgaactacatacagcacgtgtccagagatgcgaatgacaaacctctcgaggcggtcaagatcgcaaaatgcggtgagtggacgcctgagctctcttcttgagtatatgcaatatttcatactatatacatagatatcaatttca

SEQ ID NO: 1362 - DNA, 367 bp, Saccharomyces cerevisiae
tagatattaagaaaaacaaactgtacaatcaatcaatcaatcatcacataaaatgttcagcgaattaattaacttccaaaatgaaggtcatgagtgccaatgccaatgtggtagctgcaaaaataatgaacaatgccaaaaatcatgtagctgcccaacggggtgtaacagcgacgacaaatgcccctgcggtaacaagtctgaagaaaccaagaagtcatgctgctctgggaaatgaaacgaatagtctttaatatattcatctaactatttgctgtttttaatttttaaaaggagaaggaagtttaatcgacgattctactcagtttgagtacacttatgtattttgtttagatactttgttaat

SEQ ID NO: 1363 - DNA, 2743 bp, Saccharomyces cerevisiae
ctttgagggttcctgttcaagcaagccaaattgccctctcagctaataccatgtcccgtgaagtactgccaaacaacgttaccccattgcattatgacattacactagaacctaatttccgtgcttttacgtttgaagggtcattaaaaattgacctgcagattaatgatcattcgataaactctgtgcaaataaattacttagaaatagatttccattctgcacgtattgagggtgtcaatgccattgaagttaacaaaaacgaaaaccaacaaaaagctactcttgtctttcctaatggaacttttgaaaacctaggaccttctgcgaagttagaaattatcttttccggtattctaaatgatcagatggcgggattttacagggctaagtatacggataaagtcacaggggagacgaagtacatggctactactcagatggaagccacagatgctagaagagcctttccttgttttgacgaaccaaatttgaaggcgacttttgcagtaactttggtctctgaatcgtttctgactcatttgtccaacatggatgtcaggaatgaaacaatcaaagagggtaagaaatatacaacttttaacacgactccaaagatgtctacgtacttagtagcatttattgtagctgacctgagatacgtggaaagcaataatttccgtattccagtaagagtttattctaccccaggggacgaaaaatttggtcagtttgcagccaatttagctgctaggaccttgagattctttgaggacaccttcaacatagaatatccattgccaaagatggatatggtggcagttcatgagttttctgctggtgctatggaaaactgggggctagtgacttatagagttattgatttgttattagacatagaaaattcgagtttagatcgcattcaaagagttgctgaggttattcagcatgaactagcccaccaatggttcggcaacttggtcaccatggattggtgggaaggcttatggttgaatgaaggttttgccacttggatgtcttggtactcttgcaacaagtttcaaccagaatggaaagtttgggagcaatatgttactgacaatttacaacgtgctctaaatttagattcattaagatcttcccatccaattgaagttcccgttaataatgcggacgaaatcaatcaaatttttgatgctatttcttattctaaaggatcttctttattgaggatgatttccaaatggttgggtgaagagacttttattaaaggtgtgtcccaatacctgaataaattcaaatacggtaatgcaaagaccggagatttgtgggacgccttagcagatgcctctggcaaggacgtttgttcggtgatgaacatctggacaaaacgtgttggttttccagtgttatctgtcaaggaacacaagaacaaaatcacattaactcaacaccgttatttaagtaccggtgatgttaaagaagaggaagatacaaccatataccccattttgttagctttgaaagacagtacaggtatcgataacacattggtattgaacgaaaaatctgctactttcgaattaaagaatgaagagttcttcaagattaatggtgaccaatctggtattttcattacctcttattctgacgaaagatgggctaagctatccaaacaggcaaatttattatccgtagaggatcgtgttggcttagtcgcagatgcaaaagccctttctgcatctggctatacctctactactaacttcttgaatttaatttctaattggaaaaacgaggattcatttgttgtttgggaacaaatcattaatagtttatccgctctgaaatctacttgggtcttcgaaccagaggatatattgaatgctctagataaatttactttggatctagtacttaacaaactttctgaattggggtggaatattggcgaagacgactcctttgctatccaacgtttaaaagtgacccttttcagtgccgcatgcacttctggcaatgaaaaaatgcaatcgattgcggtagaaatgtttgaggaatacgccaatgggaacaaacaggccatacctgcactgttcaaggcagttgttttcaacaccgttgccagacttggcggagaaaacaattacgaaaagattttcaacatctatcaaaaccctgtttcgtcagaagaaaagattatcgctttgagagctttgggcagatttgaagacaaagaacttttagaaaggacattgtcttatctgctagatggtacagttttgaatcaagatttttacatcccaatgcaaggcattagagttcataagaagggtattgaaaggttatgggcttggatgcaagaacactgggacgaaattgctaagagattacagccaggctcgcctgtgttgggtggcgtgttgacattgggtttaactaattttacctcttttgaagcccttgaaaaaattagtgcgttctatagtagaaaggtcactaaaggttttgatcaaaccctggctcaagccttagacactattagatccaaggcgcaatgggtgagcagagatcgtgaaatcgttgctacctacttgcgtgagcatgagtatgatcaatagcttttttttttcacgagcacctacaacacaaatatatacatatgccaatgagtcaaaaccacgtgtaattaataaagagattactacttgcttatgtagaaatatagtagctagcagaaaat

SEQ ID NO: 1364 - DNA, 1104 bp, Saccharomyces cerevisiae
aaataaccccagtgttttcttttttttggatgaataaggaaatcaacagctggtacacgcatatacacatataccatgaccattgatctagcttctatcgagaaattcctctgtgaactggctactgaaaaagtaggaccaatcatcaaatccaagtccggcactcaaaaggattatgacttgaagactggctccaggagcgttgatattgtaactgctatcgataaacaggtcgaaaagttaatttgggaatcggtaaaaacccaatatccaactttcaagtttattggagaggaaagttatgtgaaaggggagaccgtgattactgatgatcctacctttattattgatccaattgatgggactacaaactttgttcatgatttcccatttagctgtacctctcttgggctcacagtaaacaaagagcccgtagtaggcgttatatataatcctcacattaatcttctggtatccgcttctaaaggaaatgggatgagagttaacaacaaggactatgactataaatcaaaattggaatctatgggttctctaatactaaataaatccgtagtggcattacagccaggttccgctagagagggaaagaattttcagacaaaaatggccacatatgaaaaattactatcatgtgattacggttttgttcatggattcagaaatttaggatcatctgcaatgacaatggcatatattgctatggggtaccttgatagttattgggatggtggttgctattcgtgggacgtgtgtgctggatggtgtattttgaaagaagtgggcggtcgtgtagtaggtgccaatccaggtgaatggagtattgatgtcgacaataggacatatttggctgtgaggggaacaattaataacgaaagtgacgaacaaacaaaatatatcacagacttttggaactgtgttgatggccatttgaaatatgactgatcgtcagcacattaggcctaatataaaatgtacgattaaaatgacagttatttgaatcattttagctgatcacagggatatagaaggtattggtagtaataataataatgataataataataatgataataataaataata

SEQ ID NO: 1365 - DNA, 894 bp, Saccharomyces cerevisiae
agagtactttttgttattcactatagtattagccaacacgttatcgatacatttactgctatatacataaaaaatttacgtcaaaaaaataaaaaaaaaaaatgccacaattttcagtagatctttgtctttttgacctagatgggactattgtcagcacaacaactgcagcggaaagtgcctggaaaaaattatgccgtcagcatggggttgatcctgttgagttattcaagcattcccatggtgcaagatcacaagaaatgatgaagaaattttttccaaaattggacaataccgataataaaggtgttcttgcgttagaaaaggatatggcagataattatttggacacagtaagccttatccctggtgcagagaatttattgttatcgttagatgtagatactgagactcaaaaaaagttacctgaaaggaaatgggctatcgttacctctggttctccatatttggcattttcatggttcgagacaatattgaaaaatgttggaaagcccaaagttttcattactggatttgacgtgaagaacggtaagcctgatcccgagggttactcaagagctcgtgatttattgcgtcaagatttgcaattaactggtaaacaggatctgaagtatgttgtctttgaagatgcacccgtgggcataaaggccggcaaagcaatgggcgcaattactgtgggtataacatcctcgtatgataagagcgttttatttgacgcaggtgcagattatgtggtctgtgatttgacacaggtttccgtggttaagaacaatgagaacggtatcgttatccaggtaaacaaccctttgacgagagattaaataaataaggacatcgcagaagcacgaatatatagataaaattgtatgtaaa

SEQ ID NO: 1366 - DNA, 855 bp, Saccharomyces cerevisiae
tgtagatgtcgccgcgtgattttatcgttgtttctcttcttgtgttttcttatgcgttagtatgccagtttcgcggtgtgattcccaaagtgaaattttactggaagagcaaatcttgtaagtcggcgctcgaaagcacagtagcaatccatcatgggaaaatcagccgttatattcgtggaaagagccactcccgctacactaacggaactgaaggatgctctctcgaatagtatcctgtccgtgcgagacccttggtcgatagactttcggacgtaccggtgctctatcaagaacctacccgcggatgtctccaagctcatgtactcgataacgttccaccaccatggccggcagaccgtgctaatcaaggacaactcagcgatggtgacgactgccgcagcggcggatatccctccggcgctggtgttcaatggctcatctacgggcgttcctgagtccatagacactattttgtcgtccaagctgtccaacatctggatgcagaggcagctcatcaagggtgatgccggtgagacgttgatcttggacgggctcaccgtgcgactcgtcaacctcttctcctccactgggttcaagggtctcctgatagaactgcaggcggacgaagcgggcgagtttgagaccaagattgcaggcatcgaaggacacctagctgaaatccgggccaaggagtacaaaacctcatccgactcgttggggccggacaccagcaacgaaatatgtgatttggcgtaccagtatgttcgtgctctggagctgtgagttcttacgaatgctttttctttttttttttttctgtttgtatattgcggtgtatacgtatagatagat

SEQ ID NO: 1367 - DNA, 415 bp, Saccharomyces cerevisiae
aggtatacaaagcagaatgtcccaaaaaaacggaattgccaccctactacaagctgaaaaggaagcccacgaaatagtatcaaaggctagaaagtacagacaagataagttgaagcaagccaagactgatgcagccaaggaaatcgactcatacaaaattcaaaaagacaaggaattgaaggagtttgaacaaaagaatgccggtggtgttggtgaattggaaaagaaagcagaggctggtgtgcaaggtgaattagctgagattaagaaaattgcagagaagaaaaaggatgacgttgtcaaaattttgatcgagactgtcatcaagccttctgctgaagtccatatcaatgccttgtaatattgcattacattctagttttctaatcatatatctttttataatataatacca

SEQ ID NO: 1368 - DNA, 2097 bp, Saccharomyces cerevisiae
aattataatagtatttgcagaatagtagaattcttttcacagttcacgttcagtttctcctctgttttatcgaacgtttattcatcatgtccaaggtctatctgaattcagacatgattaaccatttgaactccacagttcaagcttactttaacttatggttggagaagcaaaacgcaataatgcgttctcaaccccaaattattcaagataaccaaaaactgataggcattacaacgctagttgcctcaattttcactctgtatgttttggtcaagataatctccaccccagcaaagtgttcctcgtcctataagccagtcaaattctcccttcctgcaccagaggccgctcaaaataattggaagggcaagaggtctgtttccactaacatatggaatcctgaagaaccaaactttattcaatgtcattgtcccgccacaggtcaatatctaggttcttttccatcgaaaacggaagctgacatagatgaaatggtttctaaggcaggcaaagctcaatctacttggggcaattctgatttctcaagaagattgagagttttggcttctttgcatgattatattctaaataatcaagatcttattgcgagagtagcgtgcagggattcaggaaagacaatgttagacgcatcgatgggtgaaatcttggttactttagaaaaaattcaatggactataaagcacggccaaagagcgttgcaaccttcgagacgtccgggccccactaattttttcatgaagtggtataaaggtgcagaaatccgttatgaaccactgggtgtgatcagttctatcgtttcctggaactatccattccataacttattgggtccaattattgcagcattgttcacagggaatgccattgtagtaaaatgttcagaacaagttgtctggtcttcggaatttttcgtcgagctgatccgcaaatgtttggaagcttgtgatgaagatccagatttggttcagttgtgctattgtttacctccaactgaaaatgatgattccgcaaattatttcacctctcatcctggtttcaaacatatcacttttattggcagtcagcccgtagcgcactatattctaaaatgcgctgccaaatcattgacacccgtagttgtggagcttggtggtaaggatgcgtttattgtcctagactcagctaagaatttagatgctttatcttctatcatcatgaggggtactttccaatcatccggtcaaaattgtattggtattgagagggttattgtcagtaaggaaaattatgatgatttagtcaagattttgaatgaccgtatgactgcaaatccactacgccaagggtctgatattgatcatttagaaaatgttgatatgggggcaatgatatctgacaacagattcgatgaactagaagctttggttaaagatgctgttgcaaagggagctcgtttacttcaaggtggttcccgcttcaaacatccaaagtatccacaaggtcattatttccaaccaactcttttggtggatgtcactccagaaatgaaaatagcacaaaacgaagtgtttggcccaattttagtcatgatgaaagctaagaatactgaccattgtgtacaactagccaactctgcgccatttggtctaggtggttctgtgtttggtgcggatatcaaggaatgcaattacgtcgcaaatagcctacaaactggtaatgtagccattaatgattttgctacattctatgtttgtcaattaccatttggtggtatcaatggttcaggttacggtaaatttggtggtgaagaaggtcttttgggtttgtgcaatgccaaaagtgtctgttttgatactttgccttttgtctccactcaaattccaaaaccattagactaccctattcgtaacaatgctaaggcttggaattttgtaaagagtttcatcgtaggagcttatacaaattccacatggcaaagaataaagtcactgttctctttagctaaagaagccagctagtttactttagaggaagcaacaaacttatcaataatttggtatttattattatataaaatgaactttttatgtacaa

SEQ ID NO: 1369 - DNA, 1181 bp, Saccharomyces cerevisiae
aacagaccttaaccgatggccgatttcttattgagaccaattaagcaacgtcatagaaacgaggacaagtacgtgtcggtggacgctgcagacggatcggtgtctaaaattgagcccatcgcagattttgtaattaagacaaaactattatccgctaatgggccggaaaaactgcaagatggcaggaaggtgttcatcaatgtttgtcactctccgttagtgcccaaacctgaggtcgattttaatgcaaggatagtgttcccgctcatcatccaaaacgaatgggagattcctattattacatcctgctaccgcatggaccatgacaagaaggggcaggagtgctatgtgtgggattgctgcataaatagcgattgctcgcgctggatatgcgatgatatccaactgcgagagatactggtcgaatggtgcttggagtcatgtgagatccgagattcggtggtattgtgcagagatcgcattgcattccccaagatgaagaagaagggcgctgagcttcctgcactagaggtattgaatgatgagttacatcaagattacaaggcaaaaatgcataaaatcatagaagaggaggccggagacccgatgagtatattgagaggaaggaatgacgatggcgatgataataatgatcccgacgatggaacactaccaccattgttccctatcgagaacaaaatctccggagccaagatagaggagattgataagaacgagattgctcacagaaacctgaaacaggcacctgcacctgcacctgcaccgcacgagcagcaggaggacgtgccggaatacgaggtaaagatgaagaggttcaaaggggccgcctacaagctgcgaattcttattgagaacaaagctccgaactcgaagccggaccggttctctccgagctacaacttcgcagagaatattttatacattaacggtaagctgagcatacctttgccgcgcgacatagtcgtgaatgcagcagatatcaagattttccatatccgcaaagaacgcacactatatatatatatataaactaacatttcgagtattcttttggtttttgttgtgactaatacgaacgaatatataaaagcgggaaaaaggagagagatatgatgtgcatctataacagaatttttttttttttttttaatccggtaaaa

SEQ ID NO: 1370 - DNA, 1661 bp, Saccharomyces cerevisiae
aaatctaggccacagattttcttattgaagctatcaaaatagtagaaataattgaagggcgtgtataacaattctgggagatggctgataagatagagaggcatactttcaaggtcttcaatcaagatttcagtgtagataagaggtttcaacttatcaaagaaatagggcatggagcatacggcatagtgtgttcagcgcggtttgcagaagctgccgaagataccacagttgccatcaagaaagtgacaaacgttttttcgaagaccttactatgtaaaagatccctacgtgagctaaagcttttgagacatttcagaggccacaaaaatattacatgtctttatgatatggatattgttttttatccagacgggtctatcaatggactatatctttatgaggaacttatggaatgtgatatgcaccaaatcatcaaatccggtcaacctttgacggatgctcactatcaaagtttcacataccaaatattatgtggtttaaagtatattcattctgcagatgtcttgcatcgtgatttgaagcccggcaatttgcttgtcaatgcagattgtcaattgaaaatctgtgattttgggttagctagaggttattcggagaatcctgtcgaaaacagtcaatttttgacggagtacgtggccactagatggtatagagctccggaaataatgttgagttaccaaggatataccaaggcgattgacgtatggtcagctggctgtattttagcggagtttcttggtggaaagccaatcttcaaaggaaaggattacgttaatcaattgaatcaaatattacaagttttagggacacccccagacgaaactttaagaaggattggttctaaaaatgttcaggactacatacatcaattaggtttcattccaaaagtaccttttgtcaatttatacccaaatgccaattcacaagcattagacttattggagcaaatgctcgcgtttgaccctcaaaagagaattaccgtggatgaggccctggagcatccttacttgtctatatggcatgatccagctgacgaacctgtgtgtagtgaaaaattcgaatttagttttgaatcggttaatgatatggaggacttaaaacaaatggttatacaagaagtgcaagatttcaggctgtttgtgagacaaccgctattagaagagcaaaggcaattacaattacagcagcagcaacagcagcagcaacagcaacagcaacagcaacagcagccttcagatgtggataatggcaacgccgcagcgagtgaagaaaattatccaaaacagatggccacgtctaattctgttgcgccacaacaagaatcatttggtattcactcccaaaatttgccaaggcatgatgcagatttcccacctcgacctcaagagagtatgatggagatgagacctgccactggaaataccgcagatattccgcctcagaatgataacggcacgcttctagaccttgaaaaagagctggagtttggattagatagaaaatatttttaggacaaaaaactataagtaaccggggaagtatagaatcaccatagatgtaagcttacagacaatgtgtatatatgatgtatatgaacgtatacaaatatatatatatatacgtgctcttgttgtagc

SEQ ID NO: 1371 - DNA, 885 bp, Saccharomyces cerevisiae
atgactttaatggtacctttcaaacaagttgatgtattcactgagaagccctttatgggaaatccagtagcagtaataaacttcttggaaattgatgaaaatgaagtcagtcaagaagaattgcaggcaattgccaactggacaaacttatcagaaacaacgtttttatttaaaccatctgataaaaagtatgattacaagttgaggatctttactccaagaagtgaattgccatttgctggtcacccaaccattggttcatgtaaggctttccttgagttcaccaaaaacaccactgcgacttctctcgtccaggaatgtaaaataggcgctgttccaataacaattaatgagggactaattagcttcaaagctccgatggctgattacgaaagtatatcgagtgagatgattgctgattatgaaaaagcgattggtttgaaattcataaagcctcctgctcttttacatactgggccagagtggatcgtggcgctagtagaagatgcagaaacttgcttcaatgcaaacccaaattttgctatgcttgcacaccagacaaaacagaatgaccatgtgggaattatcctagcgggccctaaaaaggaagccgccatcaaaaactcctacgaaatgagggcgtttgctccggtgataaacgtttatgaagatcctgtttgtggtagtggttctgtagcccttgcaagatatttgcaagaagtttataagtttgagaaaaccacggatattaccatttctgagggtggaaggttaaaaagaaatggcctaatgttagcttcaattaagaaagaagctgataatagcacttcctactatatagcaggtcatgccactaccgttattgatggtaagatcaaagtttag

SEQ ID NO: 1372 - DNA, 2547 bp, Saccharomyces cerevisiae
atggaaggtggcgaagaagaagttgagcgcattcctgatgaacttttcgatacaaaaaagaagcatttgttagataagctcataagggtcggaataatccttgtactcctgatatggggcactgttttgttgctaaaaagtatacctcaccattcaaacacaccagattatcaagaacccaactctaattacaccaatgatgggaaattaaaggtgtcgttttctgttgtaagaaacaatacatttcaacccaaatatcacgagctgcaatggattagtgacaataaaattgaaagcaacgatctaggtctttatgttacatttatgaacgatagttacgttgttaaatctgtctacgatgactcatataatagcgttttattagagggaaaaactttcattcataacggtcaaaacctcactgtggagtcaataactgcgtctcccgacctgaagcggttattaattagaacaaatagcgtacaaaattggagacactcaacgtttggttcttattttgtctacgataagagtagctcgtcctttgaggagattggaaacgaggtggctctagcaatatggtcccctaattctaatgatattgcatacgtccaagataacaatatatatatttattctgctatttccaaaaagaccatacgggctgtgaccaacgacggaagctcctttctttttaacggtaagccagattgggtttacgaggaagaagtttttgaagacgacaaggctgcgtggtggtcaccaactggtgattacctggcattcttgaaaattgatgaatcagaagttggtgagtttatcattccatattatgtccaagatgaaaaggatatataccccgaaatgcgcagtatcaagtatccaaaaagtggcacgccaaatcctcatgcagagctatgggtttacagtatgaaagatggaacatcgttccatccaagaataagtggaaataaaaaagatggaagtctgttaattactgaagttacatgggtaggaaatggaaacgttttagttaaaactaccgatcgatcctcggacatattgactgtgtttttgatagatacaattgcaaagacttcaaacgtggtaaggaacgaaagttctaacggaggatggtgggagattactcataatactctgtttattccggcaaatgaaacatttgataggcctcataatggttatgttgatattcttccgattggtggttacaatcatttggcttatttcgaaaatagtaatagttcacactataaaacattgacagaggggaaatgggaagtggtgaatggcccacttgcctttgattcaatggaaaatcgtctttacttcatttctacacgaaagagttcaaccgaacgccacgtttactacatagatttacggtcaccaaatgaaattattgaagttactgatacttctgaggatggtgtctatgatgtgtccttttcttctggtagaaggtttggtttactcacctataaaggaccaaaagttccatatcaaaaaattgtggacttccattctcgtaaagcagaaaaatgcgacaaaggtaatgttttaggcaaatcactataccatttggaaaagaacgaagtacttaccaaaattttagaagattatgcggtacccagaaaatcattcagggaattgaacctaggaaaggacgaatttggaaaggatatactagtgaactcgtatgaaatcctaccaaatgatttcgatgaaacgttaagtgaccactatcctgtatttttctttgcatatgggggaccgaattctcaacaagttgtcaaaacgttttccgtaggatttaatgaagtggtagcttcacaattaaacgcaattgtagttgttgttgacggtcgtggtactggcttcaaaggtcaagactttagatcccttgttcgcgataggctcggtgattacgaggcccgcgaccaaatatctgcggcttccttatatggttctttaacttttgttgatccgcaaaagatttccttatttggttggtcatacggggggtacctgacactaaaaactttggagaaagatggcggaagacatttcaaatacgggatgtcagttgcgccagtaaccgactggagattttacgattctgtttatactgagaggtacatgcatactcctcaagaaaactttgatggatacgtagaatcaagcgttcataatgtcactgctttggcacaagcaaatagatttttgttgatgcacggaacaggagatgataacgttcactttcaaaattccctaaagtttctggaccttttggatctaaatggtgtggaaaattatgacgtccacgtctttcctgactcagatcatagtataagataccataatgcgaatgtaatcgtttttgacaagctattggattgggcaaagcgtgctttcgatgggcaatttgtcaaatgagttgactatttacagctcatctcatagagacattcataaaacattttcatatttacatactatgtatatataaaattggtaatataacag

SEQ ID NO: 1373 - DNA, 3262 bp, Saccharomyces cerevisiae
tctacataaggtgcgattcgtataaatttggaagacaattgcaagaaaatggtagacgaaagtgataagaaacaacagactattgatgaacaatcgcagataagtcctgaaaagcagacaccaaataagaaggataaaaaaaaggaggaagaggagcagctatccgaagaagatgcaaagcttaaaacagatttagagctattggttgaaaggctgaaagaagacgattcatctttatatgaagcgtctttgaatgccttaaaggaatcgatcaaaaattctacgagttctatgaccgccgttcccaaacctttgaaattccttcgtccgacatatccagacctatgttctatctacgacaaatggacagatccaaacttgaaatcctctttagcggatgtcttgtccattttagccatgacatactctgaaaatggtaaacacgattcattgagatatagattactctccgacgtttctgattttgaagggtggggacatgagtacatccgtcatttagctttggagatcggtgaagtatataatgatcaagtggaaaaagatgctgaagatgaaacatcatctgatggatctaaaagcgatggatctgcggctacttccgggttcgaattttccaaggaagatactcttcgtctatgtttagacattgtcccatactttttgaaacacaacggtgaagaagacgcggtagatttgcttttggaaattgaatctattgacaagctacctcaatttgtcgatgagaataccttccaaagagtttgtcaatatatggttgcatgtgttccacttttgccacctcctgaagacgttgcctttttaaaaaccgcatattctatttatctatctcagaacgaacttacagatgcaattgctttggcagttagactaggggaagaggatatgatcagatccgttttcgatgctactagcgatccagtgatgcataaacaattagcatatattttagccgcacaaaagacatcgtttgagtatgaaggtgttcaggatataattggaaatggtaaattgtctgaacactttttatatcttgctaaagaattgaatctaactgggccaaaagtcccagaagacatttataagagccatttggataactctaaatctgtgttctcaagcgccggcctagattctgctcaacaaaatctagcttcgtcatttgtcaacgggttcttaaacttaggttattgtaacgataaattaattgtggataatgataattgggtatataaaaccaaaggtgacggtatgacttccgcggtagctagtattggatctatataccagtggaatctcgatggtttgcaacaactggataagtatctctacgttgatgagccagaagttaaagctggtgcattattaggtattggtatttccgcttccggtgtgcatgatggtgaagttgaaccagctttgttacttttgcaagattatgttactaacccagacactaaaattagttcagcagctattcttggcctgggtattgcatttgctggtagcaagaatgacgaagtgttgggtttgttattaccaattgccgcatccactgacttgcctattgaaactgcagctatggcttccttagctttggctcatgttttcgttggtacttgtaatggtgacattacaacttctatcatggacaactttttagagcgtacagccatcgagttgaagaccgactgggtaaggtttttggcacttgctttaggtattctatacatgggccaaggtgaacaggtggatgatgttttagaaactattagtgctattgaacatccaatgacatcagctattgaagtattagttggttcatgtgcttatactggtacgggtgatgttttgttaattcaagatttgttacatcgtttgacccctaaaaacgtaaaaggtgaagaagatgcagatgaagaagaaactgccgaaggacagactaatagcataagtgactttttgggtgagcaagtgaatgaacctaccaagaacgaggaagctgagatcgaagtggacgaaatggaggttgatgccgaaggagaggaagttgaagttaaagcagaaataacagagaagaagaatggtgagagtttagaaggtgaagagataaaatccgaagaaaagaagggaaaatcttccgataaggatgctactacggacgggaaaaatgatgatgaggaggaagaaaaagaagcaggcatagtcgatgaacttgcttatgcagttttgggtattgctttgattgcccttggtgaagatattggcaaggaaatgtctttacgtcattttggtcatttaatgcattatggtaatgaacacatccgtcgtatggttcctttagcgatgggtattgtttccgtttctgatccacaaatgaaggtgttcgataccttaactcgtttttcacatgacgccgatttagaagtttcaatgaattcaattttcgctatgggtctatgtggtgctggtactaacaatgcaaggttagctcaactattaagacagttggcaagttattattcacgtgaacaagacgctttgtttatcaccagattagcacaagggttattgcatcttggtaaaggtactatgacaatggatgtgttcaatgatgcacatgttttgaataaggtgacattagcatcaatattaactaccgcagttggtttagtatcgccaagtttcatgttgaagcatcatcaattgttctacatgttgaatgccggtataaggccaaagtttattctagcattaaacgatgagggagagccaataaaggttaatgtgcgcgttggtcaagcagtggaaactgtcggccaagcaggcagaccaaaaaagattactggctggattacgcaatccactcctgttttactaaatcatggcgaaagagcagaactagaaactgatgaatatattagttacacaagccatattgagggcgtagtaattttaaagaagaaccctgactatcgtgaagaggagtaaactgaatagcttttgggcaatatcaaccagaataggaaaaattcaaaaccattttaaataaatatatatttatatagttgtacatttttttctcttacttaatataatatgatttttagataataaaagaaaacgtgcatatatacatacacatgtatctcagatatctcattatatctattagtaaatatggatgcgcttatctagctcgtaaaaacggaaaagaaaagcc

SEQ ID NO: 1374 - DNA, 1713 bp, Saccharomyces cerevisiae
gattaataacaaaagatgctaaggaacggcgttcagaggttgtactctaacatcgctagaaccgataattttaagctttcgtcactagcgaatggactgaaagtggcgacatcaaatactcctggacactttagtgccttaggcctatacatcgacgcaggatcacggtttgaaggtaggaatttgaagggttgtacacatatcttggatagactagcattcaaatcaaccgaacacgtcgagggccgagcaatggcagagacgttggagttactgggtgggaattaccagtgtacctcgtctagagaaaatttgatgtatcaggcttctgtgttcaaccaggatgtgggtaaaatgcttcaattaatgtcagaaactgtgaggttccctaagattactgagcaagaactgcaagaacagaagctgtcggcagagtatgaaatcgatgaagtttggatgaagccagaattggtattacctgagctgttgcacacagcagcatactccggagaaactttggggtcccctttaatctgccctagagagctcattccttctatttctaaatactacttattggactacagaaataaattctacaccccagaaaatactgttgcggcatttgttggtgttcctcacgaaaaggcattagagcttacagaaaagtatctcggtgactggcaatctacacaccctccgatcaccaaaaaagttgcccaatatacgggcggggaaagttgtattccaccagcaccagtgtttgggaatttaccagaattattccacatccagatcggatttgaaggtctccctatagatcatccagacatttatgctttagcaacattacaaactttacttggaggtggtggttctttcagtgctggtgggccaggaaaggggatgtattctcgtttgtatacccacgttttgaaccagtattactttgttgaaaattgtgttgcgttcaaccattcttattcggattctggtattttcggtatttcattatcttgtataccgcaggcagctcctcaagcggttgaggtaattgcacagcaaatgtataatacatttgctaataaggatttgaggttaactgaagacgaagtctccagggccaagaatcagttgaagtcttcactactaatgaacctagagtctaaactggtagaattggaagatatgggcagacaagttctcatgcatggtcgcaaaatcccagtcaacgaaatgataagtaagatcgaagatttgaagccagatgatatctcacgtgttgccgaaatgatatttacgggaaatgtaaataatgctggcaatggtaagggtagagctactgttgtaatgcaaggagacagaggatcctttggagatgtggaaaatgtactgaaggcatatggattgggtaacagctcctcctccaaaaacgatagtcccaagaagaagggttggttttgaacaactttagcagtactttattacttttattttggagatttcaagataggaaaaagactttatttccgctgcttatctattgaatcggttattttctttattttatgtaccacctttaagactactatcgaaggatacggggtgaaagagttcatgccacttagtatataacgctcgtgtcgtctttttctgttaataatgcatattctcattctgtatatacaaaacatctcatcattatttttttaa

SEQ ID NO: 1375 - DNA, 1766 bp, Saccharomyces cerevisiae
cacgcaagtagcaaggtaatctatatcctcatttttttcaaacatgtcatctttgtacattaaggaggctaccggtgtagacgaattgaccacagccggttcacaagaccatccattcaaaaccccagcatatgctttgttcgcatctcaacagaagagcgatgccacggaacctaagcttttcgtgtttaagacagaagacaacgagtaccaggaaatcagtgcttctgctttgaagaaggctcgtaagggctgtgatggtttgaagaaaaaggcagtcaagcaaaaggaacaggagttgaagaaacaacaaaaagaggcagaaaatgctgccaagcaattgtctgctttgaatatcaccattaaggaggacgaatcgctaccagctgccattaagactagaatttatgactcttattccaaggtcggacaaagagttaaggtttccggttggatccatagattacgttctaacaagaaggttattttcgtcgtcctcagagacggatctggtttcattcaatgtgtcttgtccggtgatttggcattggctcaacaaactttggacctgactttggaatccaccgttactctgtacggtaccatagtcaaattgcctgagggtaaaaccgctccaggtggtgttgaattgaatgtcgactattacgaagttgtaggtttggcccccggtggtgaagactcctttacaaacaaaatcgcagagggctcagacccttctttactgttggaccaacgtcatttggccttgagaggagatgccttgtctgcagtcatgaaagtccgtgctgctctactgaaaagcgttagacgtgtttatgatgaagaacatttgacagaagttaccccaccatgtatggtgcaaactcaagtcgaaggtggttccactttgttcaagatgaactattacggcgaggaagcttacttgacccaaagttcccaattatatttagaaacctgtttggcctccctaggtgatgtttataccatccaagaatctttcagagctgaaaagtcccacacaagaagacatttgtccgaatatacccatatcgaagctgaattggccttcttgactttcgacgatctattacaacatattgaaactttgatcgtcaaatccgtgcaatacgttttggaagacccaattgctggcccactcgtaaaacaattgaatccaaactttaaggctccaaaggctccattcatgagattacagtacaaggatgccattacctggttgaacgaacacgacatcaagaacgaagagggcgaagactttaaatttggtgacgatattgcagaagctgctgaaagaaagatgaccgataccatcggcgtcccaatctttttgacgagattcccagtagaaatcaagtctttctacatgaagcgttgttctgacgacccccgcgtcactgaatccgtcgacgttttgatgccaaacgttggtgaaatcactggtggttctatgagaatcgacgacatggacgaactaatggcagggtttaagcgtgagggtattgataccgacgcctactactggttcattgaccaaagaaaatacggtacttgcccacatggtggttacggtatcggtaccgaacgtattttagcctggttgtgtgacagattcactgtcagagactgttccttgtatccacgtttcagcggtagatgtaagccatgatctttagttactgaagagtacgtgagcgctcacatatatacaaatatttataccgatt

SEQ ID NO: 1376 - DNA, 1582 bp, Saccharomyces cerevisiae
agctcaaaagcaggtaactatataacaagactaaggcaaacatgtcagacggcactcaaaaactatggggtgggagattcactggtgaaaccgatcctttgatgcacctttacaatgcgtctcttccgtatgattataagatgtataaggcagatttagaaggaactaaagtatacacagcgggcttgcagaagttgggtcttctaacggagacagaattggcaaagatccatgaaggtttggctgaaatcaaaaaagaatgggacgctgacaaatttgtccgtcatccaaacgacgaggatatccatactgcgaatgaaagacgtcttggtgaactaattggccgcgatattgctggtaaagtccacaccggtagatcccgtaatgatcaagttgttaccgatttgagaatatactgtcgtgacattgtcaatgacaccctctttccagctttaaagggcttggttgaagttctaattaagagggccgaaggtgagatagatgtcttaatgccaggctacacacatttacaaagggcacaacctattagatggtctcattggttgagctcttatgcaacatacttcaccgaagattacaagagactgggtcaaatactacacagattgaatcaatcaccactgggtgcaggcgctcttgctggtcatccttacggcattgatagagaatttttggctgaaggtttgggtttcaatagtgtaattggtaactccttggttgctgtttctgatagagatttcatcgtggagttgatgttttggggaactttgttcatgaaccatatttctcgttttgctgaagatttgattatatattgtacagcagaatttggtttcatacagttgagcgacgcctattcaacaggttcttctttaatgcctcagaagaagaatgcagactcgttagagttgttaagaggtaaatccggtagagtatttggtgatctgacaggattcttgatgagtttgaagggtatcccatctacttatgataaagacatgcaagaagacaaagagccactattcgattgcttaacaactgtagagcactccatgctgattgccacaggtgttatttctaccttaactgtaaataaggaaaagatggaagctgctctcacgatggatatgctagctaccgacttggcagattacttggtcagaaagggtgttccattcagagagactcatcacatatctggtgagtgtgtcgctactgctgaaagacttggtctaagcggtattgataaattaaccttggagcagtatcaaaagatcgattcgagattcggacaagatctttttgaaacttttaactttgaacaaagcgttgaaagacgagatgctactggtggaaccgctaaatctgctgtattgaagcaattggataatttgaaatcccaattaaattagcagatggcgacgttatgcgcaagaatttcatcaggtctggtacttctaggacttcatcaacccttctttaaatacttattttgttattagtattatattttcgagattgtgctatgtatatatatacgtagataagcaattgttatcta

SEQ ID NO: 1377 - DNA, 1563 bp, Saccharomyces cerevisiae
agtaaaattttcaagagtagtggtaatatcaaatccaaaatccaaaaatgggtatcaataatccaattcctcgaagcttgaaaagcgagaccaagaaggccgcgaaagttctaaggagttttgttaaaccaaatcaagtatttggagcagaccaagttattccaccatatgtgctaaaaagagctaaaggtctagcaattatcacggttttaaaggctggcttcttgttttcagggagagcaggttctggggtgattgtggccaggttaaaagacggtacatggtcggctccctctgctatcgctatggcaggtgctggtgcaggtggtatggtcggcgttgaattgacagattttgtttttattttaaattcggaagaggcagtgaggtccttttctgaatttggtacaattactttaggtggtaatgtgtcagtttccgcaggtcctcttggaagaagtgcagaagctgcagcttctgcatccacaggtggtgtctcggcagtttttgcctattccaaaagcaaaggtttatttgccggtgtgtctgtggaaggttcagccatcttggagagaagggaagctaatcgaaagttttacggcgataactgtacatcaaagatgattttgtcaggtagagtaaaagttccaccagcagcagaccccctactccgtatcttggaatcaagagcgttcaactttacacgccacgaccatgatgacaacgctagcggtgatgatttttatgatgacggtcaatacagcgacaacacaagccattattacgacgatattccagattcctttgattctactgatgaatcctcaacacgtccaaacacaagatcatcaagaagaagaggaatgtcgctggggtcacgcagtcgttatgatgatgattatgatgatgatggttacggacgtggtcgcgggtatggagattttgatagcgaagatgaagattatgattacggaagatctccaaatagaaacagcagccgcaatagaggcccacagatagataggggtactaagccgcgtgcgaatacccgatgggaagatgatttgtatgatagagatactgaatactcccgtcccaaccattccggtagggattatgataatacccgaggaaataggcgtggttatggtagagaaaggggttatagccttggtcatggcccaactcaccccagcaatatgagcaatgtcgatgatttatcacataaaatgtcgaagacagggttaggtaatgaatccactgctacaaattcggcgacaccaacggctgttgctctctacaattttgctggagaacaaccaggcgacttggctttcaaaaaaggtgatgttattactatcttaaaaaaatcagattctcaaaatgattggtggacaggcaggactaacggaaaagaaggaatattccctgcaaactacgttagagtttcttaaattatcgtcctccatatgtctcgttcctatatatagaatttttttttagagttatgaagttgaggatgggttccttattcagctatgtttacgaaatgtttgtagttat

SEQ ID NO: 1378 - DNA, 843 bp, Saccharomyces cerevisiae
cctaaatacatacgatcaagctccaaaataaacttcgtcaaccatgcctattaatattcgcagagcgacaatcaatgacattatatgtatgcaaaatgccaaccttcataacctacccgaaaattatatgatgaaatattatatgtatcatattctctcgtggccagaggcttcgtttgttgctactaccaccactttggactgtgaagatagtgatgaacaagatgagaacgacaaattggaattgaccttagatgggaccaatgacggcaggacaatcaagttggatccaacatacttggctccgggcgaaaaattagttggatacgttctcgtgaagatgaacgacgaccccgaccagcaaaacgagccaccaaatggtcatattacttccttaagtgtcatgagaacctatagaaggatggggattgccgaaaacttaatgagacaagctttatttgcgttgagagaagttcatcaagcggaatatgtttccttgcatgtgagacaatctaatagagcagctttacacttgtacagggacacattggcgtttgaggtgttgagtatcgagaaaagctactatcaggatggtgaagatgcatacgccatgaagaaggttttaaaattagaggagttgcagataagcaacttcacccatcgccgtttgaaagagaatgaggaaaaactagaagacgatctagaaagcgatctactagaggatatcattaagcaaggcgtaaatgatatcattgtataattaaatcaacctatataaacgtagtatattttcatccaggcttcttcacaagctctgttagctctttttgagcacggttctaa

SEQ ID NO: 1379 - DNA, 1782 bp, Saccharomyces cerevisiae
gattttcgtgctctccaatacaccatctaagtatcaatagcattttaaccaagcaacagaaggaatagtgtttataaatgggtgaagattttatgcacccaccgtttcaaacgtacccttcaaagaacagcgaagggaaaaaacatattgtcattgtaggtggcggtatcatcggttgctgtactgcttactacttgacccagcatccaagtttcagcccttcgacgcatcatattaccatcattgaatcgaggcgcattgctggaggggcttctggtaaagcaggtggcttgcttgcatcttgggctttccctcaccaaatcgtacctttaagtttccagctacatcaggagttgagtgatgaatatgatggagaaaacaactgggactacagaagattgacgactgtgtccttagaagcagatgttcgcgaagaagtcattgaaaactacgaaagactgagcaagaaggcatataatctgaatgtccctcctccaaagaagagaccgggctacatatccaacaagtttaacatcggggactctaattcatctttgagttcttcgggctcttctttgaaaaacgactccgctagtaacgaggaagaaggatcagacattcatgtttctagctcagtacccagtttacactctctaacaaatgagcgcatgagaagccacacaaatagcgcatctgatcttgactctgtaagtcccgtggagcaactgagagagactaatatccataatcctttgcctgctgatttagattggataagaagagaattggttaatgattggtcatcactaggtggtactgataccacagcgcagcttcatccctataaattcacccatttcatcttatcgaaggcaatggaaacaggtgctgtcgatcttctcctaggtaaggtagttgggctaaagtgtgacgagatggattgtgttcattctcttaagtaccttccatctgtcgtcaagaatcgcagaaatagcagagggcatgcagaaaatccagacattaagctgggtacaatcttcaacgatgagaacgcgaagcccattgaaatcaatgacatccagcagattgttttgagtatgggaccctggacttccaagattctaaaagattgtccaatttctggattgagagcccactctgtcaccattaagcctagtgaaaagacagtttcaccttacgctattcttgctgaactaaaagttaacgaccgtgaatttttctcccctgaaatgtatgctagaaaagatgaagtttatgtgtgcggcgaaggcgacactttagtcaatatacctgaaagttcggacgatgtggaggtagtttcggagaagtgtgatgaattgtaccattacgtatccaaattatcgccaactctatcaaagggccatctcttgcggaaacaagcctgttttttgccagttttaaacgttcctacaagttctggtcccttaattggtgagacaaatgtcaaggatctttatattgcaagtggacattcttgttggggtattaacaatgcgccagcaacaggtaaattaatggctgagattctccttgatggcgaagcaacctctgcggaaatctcaagtttggatccaaagttatatttcgacgccaccatcctttcttaatcaagccgaggagtaaaaaggtcaagaaaagtatatgcacaaatttgtacatataagagcttatttatttatatatttaaaatttctgaggccatttaatgtgtatatatttaacgaatacctaaatctatat

SEQ ID NO: 1380 - DNA, 895 bp, Saccharomyces cerevisiae
gctagctacagcgattgcttttcacttgctgctacaggaacgaaaccccaattgataactatacctcctaaaaacgtaccaggatgttcgcgaaaacagcagctgctaatttaaccaagaagggtggtttgtcattgctctccaccacagcaaggagaaccaaagtcaccttgccagacttgaagtgggacttcggtgcattggaaccttatatctccggtcaaatcaacgaattgcattacaccaagcaccatcaaacttatgtgaacggattcaacactgctgttgaccaattccaagaactctcagatcttctggccaaggagccctctcccgcaaacgcaagaaaaatgattgctatccaacaaaacatcaagttccatggcggtggtttcacaaaccactgtctattctgggaaaacctggctccagagtcgcagggcggtggtgaaccacccaccggcgctttggcaaaggcaatcgacgagcagtttggcagtctggacgagctgattaagttgaccaacacaaagctagcaggcgtgcagggctccggatgggccttcattgtgaaaaacctctctaatggaggcaagctggacgttgttcaaacctacaaccaggataccgtcacaggcccactagttcctctagttgccattgacgcctgggaacacgcctactacttgcagtaccaaaacaagaaagccgactacttcaaagccatttggaatgtggtcaactggaaagaagcatccagaagattcgatgctggcaagatctgaagaaagaaagaaagaaaatacctttttttttccactgtgtcgtttttattctaactactctactaaatcacacaaccacactcccctatttaataatatattttactatt

SEQ ID NO: 1381 - DNA, 1971 bp, Saccharomyces cerevisiae
tcagcgtgtgtattttcgataggaagtaataatttttcattatattaattaatagtttccagaaaaaattttttttccttcacaattgcagcaggcttgaatagaaacagaacaaacgagtaatacaaggatgtctgctaccaagtcaatcgttggagaggcattggaatacgtaaacattggtttaagtcatttcttggctttaccattggcccaaagaatctctttgatcataataattcctttcatttacaatattgtatggcaattactatattctttgagaaaggaccgtccacctctagtgttttactggattccatgggtcggtagtgctgttgtgtacggtatgaagccatacgagtttttcgaagaatgtcaaaagaaatacggtgatattttttcattcgttttgttaggaagagtcatgactgtgtatttaggaccaaagggtcacgaatttgtcttcaacgctaagttggcagatgtttcagcagaagctgcttacgctcatttgactactccagttttcggtaaaggtgttatttacgattgtccaaattctagattgatggagcaaaagaagtttgttaagggtgctctaaccaaagaagccttcaagagctacgttccattgattgctgaagaagtgtacaagtacttcagagactccaaaaacttccgtttgaatgaaagaactactggtactattgacgtgatggttactcaacctgaaatgactattttcaccgcttcaagatcattattgggtaaggaaatgagagcaaaattggataccgattttgcttacttgtacagtgatttggataagggtttcactccaatcaacttcgtcttccctaacttaccattggaacactatagaaagagagatcacgctcaaaaggctatctccggtacttacatgtctttgattaaggaaagaagaaagaacaacgacattcaagacagagatttgatcgattccttgatgaagaactctacctacaaggatggtgtgaagatgactgatcaagaaatcgctaacttgttaattggtgtcttaatgggtggtcaacatacttctgctgccacttctgcttggattttgttgcacttggctgaaagaccagatgtccaacaagaattgtacgaagaacaaatgcgtgttttggatggtggtaagaaggaattgacctacgatttattacaagaaatgccattgttgaaccaaactattaaggaaactctaagaatgcaccatccattgcactctttgttccgtaaggttatgaaagatatgcacgttccaaacacttcttatgtcatcccagcaggttatcacgttttggtttctccaggttacactcatttaagagacgaatacttccctaatgctcaccaattcaacattcaccgttggaacaaagattctgcctcctcttattccgtcggtgaagaagtcgattacggtttcggtgccatttctaagggtgtcagctctccatacttacctttcggtggtggtagacacagatgtatcggtgaacactttgcttactgtcagctaggtgttctaatgtccatttttatcagaacattaaaatggcattacccagagggtaagaccgttccacctcctgactttacatctatggttactcttccaaccggtccagccaagatcatctgggaaaagagaaatccagaacaaaagatctaaggtttgtaactgagaaaaaaaaaaaaaacagaaaaagagagaagttgtacattcacgtgggccttatcgccacactcatccatctccaatgatttattttatttgccagtacgtttgatatgacatcgagttatgttctttagttactttcaaacttggacaaccatcccgcattatttatgagtggtatggtttcacttctttatttataaatatttatactacgaaattatatatagattacattt

SEQ ID NO: 1382 - DNA, 438 bp, Saccharomyces cerevisiae
acaagcaaaagaaggaactatcatacttagaaaaacatgtctttcttaggtttcggtggtggtcagcctcaattatcatctcaacaaaagattcaagctgcggaagctgaactagatttggtcacagacatgttcaataaattggttaataactgttataaaaaatgtatcaatacttcttattccgagggtgagctgaataagaatgaatcttcgtgcctagacagatgtgtggccaaatattttgagaccaatgttcaagtcggtgaaaacatgcagaaaatgggccaatcatttaacgcagccggtaagttttagaaatgtgcattaaagcagtaatgataagacgaaaataagaaaagaaatccataagctgttttactcgactcaacgttataattagtattattgattcatatcctgtatatacaagtaaca

SEQ ID NO: 1383 - DNA, 1583 bp, Saccharomyces cerevisiae
aagctattcatactgtaaattggtattttagcatcacatcaataatccagaggtgtataaattgatatattaaggtaggaaataatggggtgtacagtgagtacgcaaacaataggagacgaaagtgatccttttctacagaacaaaagagccaatgatgtcatcgagcaatcgttgcagctggagaaacaacgtgacaagaatgaaataaaactgttactattaggtgccggtgagtcaggtaaatcaacggttttaaaacaattaaaattattacatcaaggcggtttctcccatcaagaaaggttacagtatgctcaagtgatatgggcagatgccatacaatcaatgaaaattttgattattcaggccagaaaactaggtattcaacttgactgtgatgatccgatcaacaataaagatttgtttgcatgcaagagaatactgctaaaggctaaagctttagattatatcaacgccagtgttgccggtggttctgattttctaaatgattatgtactgaagtactcagaaaggtatgaaactaggaggcgtgttcagagtaccggacgagcaaaagctgctttcgatgaagacggaaatatttctaatgtcaaaagtgacactgacagagatgctgaaacggtgacgcaaaatgaggatgctgatagaaacaacagtagtagaattaacctacaggatatttgcaaggacttgaaccaagaaggcgatgaccagatgtttgttagaaaaacatcaagggaaattcaaggacaaaatagacgaaatcttattcacgaagacattgctaaggcaataaagcaactttggaataacgacaaaggtataaagcagtgttttgcacgttctaatgagtttcaattggagggctcagctgcatactactttgataacattgagaaatttgctagtccgaattatgtctgtacggatgaagacattttgaagggccgtataaagactacaggcattacagaaaccgaatttaacatcggctcgtccaaattcaaggttctcgacgctggtgggcagcgttctgaacgtaagaagtggattcattgtttcgaaggaattacagcagttttatttgttttagcaatgagtgaatacgaccagatgttgtttgaggatgaaagagtgaacagaatgcatgaatcaataatgctatttgacacgttattgaactctaagtggttcaaagatacaccgtttattttgtttttaaataaaattgatttgttcgaggaaaaggtaaaaagcatgcccataagaaagtactttcctgattaccagggacgtgtcggcgatgcagaagcgggtctaaaatattttgagaagatatttttgagcttgaataagacaaacaaaccaatctacgtgaaacgaacctgcgctaccgatacccaaactatgaagttcgtattgagtgcagtcaccgatctaatcatccagcaaaaccttaaaaaaattggtattatatgaaggaactgtataattaaagtagtgtttagatacgtaaattctgtttccgaagatgcaagaaggagcagcagcaccagaaa

SEQ ID NO: 1384 - DNA, 1428 bp, Saccharomyces cerevisiae
aaaattttctagcgttagtaaagtattaatactgcaattagttaggatagcagaacgaacaaatggcaaataatacgtggaagttaattgctactacagctcttatatcggtgttttcaacccaacttgccaaaagtgtatggaaagaatacaaactttcatgtgcggctaataagaataaaaccgtatcgcgacctcgtcaatatgatgaccacttatttagggaacaattggctcgtaactatgcatttcttggcgaagaaggtatgaggaagatcaaagaacagtatatagttatagtcggagctggagaagtgggatcgtgggtatgcacaatgttaattcgttcaggctgtcagaaaattatgattatagatccagaaaacatatctatcgactctttgaatacccactgttgcgcagttttatcagatattggaaagcccaaagttcaatgcttgaaagaacacttgtctaaaattgctccttggtctgaaataaaagcaagggccaaggcctggactaaagaaaactcacacgatttaatttttgcagacggtgagtccccaacttttatcgtggattgtctagataatctagaatctaaggtagacctattagagtacgcccatcacaataaaatagatgttatttcttccatgggtgttgccacgaaatcagatcctacccgtgtgagtataaatgacatatccatgacagaatttgaccctatatctcgttgtgtaagaagaaaattgaggaagaggggtatcgccacggggatttccgttgtttttagtaatgaaatgctcgatccacgccgagacgacatactctctcctatagattgcgaacatcgtgcaatcaatgctgtcagagatgaggctctcagacatttaccggaattagggaccatgcctggtatttttggtttgagtattgcgacatggattttaaccaaagtgtcaggctatccaatgaaagaaaatgaggtcaaaaataggttaaagttttatgacagcatcctagagactttccaaaagcagatggcgcggttgaatgaaaataaggagcgatcgtcattgcttggattagaagaggtcggttatatagttgaagaaatgtttagaggcaagtctcctattagcggatactctacgaaactagctctaacaaaatgggaagctaacaaagaaatctccttaaccaatgttgttctgatgacgaaagaagagcaagaaattcacgaaaaaaggattttgctggatggtgagaaactgacagctgtatactctgaagaagttctcgattttattgagaggctttttaaagaggaggagtactattcttagcaatgggagatcaaaaatacaacatattgaatatagatttattaatactatttacatcatagtgtaatgcagtgta

SEQ ID NO: 1385 - DNA, 1998 bp, Saccharomyces cerevisiae
atgatcgaagtcccagaagacaatcgttctagccaaacaaagcgtaagaatactgaaaaaaattgtaatgaactgatggttgatgaaaagatggatgacgattcgtcgcccagagatgaaatgaaagataaattaaagggaacaaaatcattgattattcgtaagtctgagctaatggctaaaaagtatgatacttggcaattaaaagctatattcctgttttctgcattcatttgcactttcgcttatggattagatagcagcataaggggtacatatatgacctacgcaatgaactcgtactccgcacattctctcatttctacagtaagcgtcatagttctaatgatatctgctgtttcacaggtgatctttggagggttatcagatatctttggaaggctaacgttgtttcttgtatccattgtactttacattgtgggtacaataattcaatctcaagcatatgatgtccagaggtatgctgctggagctgtcttttattatgtgggacttgtcggtgttatgctacaggttgttttgatgttgtctgataattcttcattaaaatggaggctattttacacattgataccttcatggccctcgattatcactacgtgggtctcaggtagtgtagtggaggcagcaaacccgttagagaactggtcgtggaatattgctatgtgggcgttcattttccctctatgctgtatcccattgattttgtgtatgctccatatgagatggaaagtaagaaatgacgtggaatggaaagaattacaggatgaaaaatcgtactatcaaacgcacggattagtacaaatgctggtacagttgttctggaagctagatgttgtcggtgtgttgttgtttactgctggtgttggttgtattcttgtaccactcactcttgctggtggcgtctctacaaattggagaaattcaaagattatcgggccctttgtgcttggctttgtcctggttccaggcttcatatattgggaaagtcgacttgctttggttcctttcgctccattcaagctgctaaaagatcgtggcgtgtgggccccattgggaattatgttttttatctgctttgtatatcaaatggctgctgggtatctctacaccattctagtagttgcggtagatgagagcgcttcctcagctacaagaataataaacttatactcttttgtgactgctgttgttgctccatttctggggctcatcgttacgagatcatctagattgaagtcgtatattatttttggtggctcactttatttcattactatgggactattttaccgctacaggtcaggtcaagacgccgatggaggtataattgctggtatggttatttggggtctcagtagttgtttattcgattatcctacaattgtttctattcagtcggtaacatcccatgagaatatggctactgtcacagcattaaactatacagttttcagaataggtggagcagttgcagctgccatttccggtgccatatggacgcagtcattgtaccctaaattattgcactacatgggagacgctgacctggctacagcagcatatggctcaccactaacttttattctttccaatccctggggtactccagttaggtctgcgatggttgaagcttacagacacgttcaaaaatacgaagttattgttgcgcttgtattttcagcgcctatgttccttctaacattctgcgtaagagatcctcggttgactgaagattttgcccaaaagttacctgacagagaatatgtccaaaccaaggaagatgatcctatcaatgactggatcgcgaaacgttttgcaaaggccttaggaggtcataagaaagatttacaaaaccccaacaggatatgtgttcgaaaaaatgatctctgatatgcgcagtaatttttgtatggtacataagatgaagcaagataagtgatagtaatatttgttaccatgtatatgtttaatgtg

SEQ ID NO: 1386 - DNA, 1884 bp, Saccharomyces cerevisiae
atggagtctgttcactctcgcgatcctgttaaggaggaaaagaaacatgtcttcatgggaatggaacacgagttgaatcctgagactcataacgattccaactccgactcatatggtctccctcagttatctgaaaaatacaatgccttgagacagaacaggagcctaattatccagcagactgaaatcattggctctgcttacaataaatggtacttacaagcgattttacttttgagtgctttcatatgtggctacggttatggactggacggtaacatccgttatatttacactggttacgccacatcatcctatagtgagcattctctgctgtctacaatcaacgtcattaatgctgtggtcagtgccgcttcgcaaatcatatacgctaggttgtctgatgtgtttggtagactataccttttcattagtgctgtcatcctatatgttgtgggtacaattattcaatcacaagcttatgatgttcaaagatacgctgcaggtgccattttctacaatgctggctatgtgggtgtaatccttattcttttgattatcctatccgatttttcatctttaaagtggagactgctgtatcaatttgtcccgacttggccttttatcatcaacacatggattgctggtaatatcacttccagagccaatcctgttgtcaactggtcttgggatgtaggtatgtgggctttcatctttcccctatcatgtgttccaatcgttttgtgtatgttgcacatgcaatggagggccagaaagactcctgaatggcacgctttgaagggccagaagtcctattatcaagaacatggttttattaagatcttaaagcaattattttggatgttagatgtcgttggtgtccttttgatgggttgttccctaggttgtatcttggtcccactgaccttggctggtggggtcaaaactacctggaatgattcaagattgatcggcccctttgttcttggctttgttttgatccctatcttatggatttgggaatatcgattcgctagagatccaattcttccatataggctggtcaaagatagggctgtatggtcttctatgggtatttctttcctgattgattttatttactatatggccgctgattatttgtacacggttatgattgttgccgtcaatgaatccgttaaatctgcaaccagaattgccacattatcttcatttgtctctactgtggcctctccatttttcgctttacttgtaacaagatgtacgagattgaaaccattcataatgtttggatgcgcgctatggatggtggctatgggtttattgtaccactttagaggtggaagtcagtcccattcaggtattattggtgcattatgtgtctggggtgtgggcactactttgttcacttacccagttaccgtctctgtacaatctgccgtctctcatgaaaacatggcgacagttacagctttaaactataccctctatagaattggttctgctgtcggttccgcagtttccggtgccatttggactcagactttgtacaaacaaattttgaagagaatgggtgatgttgctctagccacaactgcctacgaatctccatatactttcattgaaacctatacttggggtaccccacaaaggaatgccttaatgaacgcttacaaatacgttcaaagattggaaactatcgtggctttagtattttgtgttccattaattgcattctccttatgtctaagggatcctaaattgactgatactgttgctgtggaatacatcgaggatggcgaatatgtcgacacgaaagacaatgatccaattttggattggtttgaaaaacttccatcaaaattcacttttaaacgggaataa

SEQ ID NO: 1387 - DNA, 1126 bp, Saccharomyces cerevisiae
tggactcaaaataatcattctgcaaatttaaaggaagttactgagttatcactacatcgagagaagaagtttcccccaaaagaaagaagaaaaccctcaaacgaagaaaaatatgtctgctgaaattgaagaagctactaatgccgtaaacaacttgagcatcaacgactccgaacagcaaccaagggctcctactcataagacagtaattgaccccgaggacacaatctttattggtaatgttgctcacgaatgtaccgaagacgacttgaagcaattgtttgtggaggaattcggggatgaagtcagcgtagagatcccaattaaggaacacaccgacggtcacattccagctagtaaacacgctctagtcaagttcccaaccaagattgattttgataatatcaaggagaattatgacacgaaagtcgttaaggacagagaaattcatattaagagagctagaactccaggccaaatgcaaagaggaggtttcagaggcagaggcggtttcagaggcagaggaggttttagaggaggtttcagaggcggctacagaggaggtttcagaggcagagggaacttcagaggtagaggcggcgccagaggtggtttcaatggacaaaaaagggaaaagattccattagaccaaatggaaagatcaaaggataccttatatattaataacgtcccattcaaagctaccaaagaggaggtcgctgaatttttcggtactgacgccgactccatctctttgccaatgagaaaaatgagagaccaacacactggtaggatcttcacatccgattctgctaatagaggtatggcatttgtcactttcagtggtgaaaacgttgatattgaagctaaagctgaagaatttaaaggcaaggttttcggtgacagggagttaactgtagatgttgctgttattagaccagaaaatgatgaagaagaaattgagcaagaaactggttctgaagaaaagcaagaataattacttcttacccacatccctatttctaacttgagtttttgctagagttttgtatttttgttcaccttccctgcaaaagaaatatgtgtatttatatatgcgtgtatacctatatatgatatgtaaaaa

SEQ ID NO: 1388 - DNA, 1248 bp, Saccharomyces cerevisiae
taattcgaaatggccccaggtaagaaagtcgctccagctccattcggtgctaagtcaactaagtctaacaagactagaaacccattgactcactctactccaaagaacttcggtattggtcaagctgtccaaccaaagagaaacttgtccagatacgtcaaatggccagaatacgtcagagtgcaaagacaaaagaagatcttgtccatcagattgaaggttcctccaaccattgctcaattccaatacactttggacagaaacaccgctgccgaaaccttcaagttgttcaacaagtacagaccagaaactgctgctgaaaagaaggaaagattgaccaaagaagctgccgctgttgctgaaggtaagtccaagcaagatgcttctccaaagccatacgctgtcaagtacggtttgaaccacgttgttgccttgatcgaaaacaagaaggctaagttggttttgattgctaacgatgtcgacccaattgaattggttgtctttttgccagctttgtgtaagaagatgggtgttccatacgccattgtcaagggtaaggctagattgggtaccttggttaaccaaaagacctctgccgttgccgctttgactgaagtcagagccgaagacgaagctgctttggctaagttggtttctaccattgacgctaacttcgctgacaaatacgatgaagtcaagaagcactggggtggtggtatccttggtaacaaggctcaagccaagatggacaagagagctaagaactccgactccgcttaaattgaaaatgagaaattttgcataaaaaatttattttttaataataatattaattttcaaacgttttaatataataatgaccttaaataaccttttaaggtgattgctttgttgaagctttgatacttggaccatgggaagtacctcattataggaaaatcatatcgacttattttgaatatcacaataattttgcatgccttagtagttttggattacctaagctatgttgatcgcatccaagattattaggtcagaaggtcattaacatccaaaagcgatatgattgtgccattgaagtgagtgaaagccgtggtttcgagacaaagttacagaagtagtcaccgttgtaaataagtattgccatatcggattgatgctgggaagaagttcaaattcatattctcacttgcgctacccgtgcagctggcaatcttgaagccagcgtccagttagtctgatatggcg

SEQ ID NO: 1389 - DNA, 2195 bp, Saccharomyces cerevisiae
ttatatgtttccctctctcttccgacttgtagtattctccaaacgttacatattccgatcaagccagcgcctttacactagtttaaaacaagaacagagccgtatgtccaaaataatggaagatttacgaagtgactacgtcccgcttatcgccagtattgatgtaggaacgacctcatccagatgcattctgttcaacagatggggccaggacgtttcaaaacaccaaattgaatattcaacttcagcatcgaagggcaagattggggtgtctggcctaaggagaccctctacagccccagctcgtgaaacaccaaacgccggtgacatcaaaaccagcggaaagcccatcttttctgcagaaggctatgccattcaagaaaccaaattcctaaaaatcgaggaattggacttggacttccataacgaacccacgttgaagttccccaaaccgggttgggttgagtgccatccgcagaaattactggtgaacgtcgtccaatgccttgcctcaagtttgctctctctgcagactatcaacagcgaacgtgtagcaaacggtctcccaccttacaaggtaatatgcatgggtatagcaaacatgagagaaaccacaattctgtggtcccgccgcacaggaaaaccaattgttaactacggtattgtttggaacgacaccagaacgatcaaaatcgttagagacaaatggcaaaacactagcgtcgataggcaactgcagcttagacagaagactggattgccattgctctccacgtatttctcctgttccaagctgcgctggttcctcgacaatgagcctctgtgtaccaaggcgtatgaggagaacgacctgatgttcggcactgtggacacatggctgatttaccaattaactaaacaaaaggcgttcgtttctgacgtaaccaacgcttccagaactggatttatgaacctctccactttaaagtacgacaacgagttgctggaattttggggtattgacaagaacctgattcacatgcccgaaattgtgtcctcatctcaatactacggtgactttggcattcctgattggataatggaaaagctacacgattcgccaaaaacagtactgcgagatctagtcaagagaaacctgcccatacagggctgtctgggcgaccaaagcgcatccatggtggggcaactcgcttacaaacccggtgctgcaaaatgtacttatggtaccggttgctttttactgtacaatacggggaccaaaaaattgatctcccaacatggcgcactgacgactctagcattttggttcccacatttgcaagagtacggtggccaaaaaccagaattgagcaagccacattttgcattagagggttccgtcgctgtggctggtgctgtggtccaatggctacgtgataatttacgattgatcgataaatcagaggatgtcggaccgattgcatctacggttcctgattctggtggcgtagttttcgtccccgcatttagtggcctattcgctccctattgggacccagatgccagagccaccataatggggatgtctcaattcactactgcctcccacatcgccagagctgccgtggaaggtgtttgctttcaagccagggctatcttgaaggcaatgagttctgacgcgtttggtgaaggttccaaagacagggactttttagaggaaatttccgacgtcacatatgaaaagtcgcccctgtcggttctggcagtggatggcgggatgtcgaggtctaatgaagtcatgcaaattcaagccgatatcttaggtccctgtgtcaaagtcagaaggtctccgacagcggaatgtaccgcattgggggcagccattgcagccaatatggctttcaaggatgtgaacgagcgcccattatggaaggacctacacgatgttaagaaatgggtcttttacaatggaatggagaaaaacgaacaaatatcaccagaggctcatccaaaccttaagatattcagaagtgaatccgacgatgctgaaaggagaaagcattggaagtattgggaagttgccgtggaaagatccaaaggttggctgaaggacatagaaggtgaacacgaacaggttctagaaaacttccaataacaacataaataatttctattaacaatgtaatttccataattttatattcctctccaccttc

SEQ ID NO: 1390 - DNA, 707 bp, Saccharomyces cerevisiae
atgagctcacaaccgtctttcgtcaccataaggggcaaggccatttctctagaaacacaaacggagtcacttctttccaagtactccacattcgcgcagacaactagttcagaacaaactggccaagaaaagaagatagacaagcagttggagggaatcttaggccagagacaggatgtaatcgattcattaacacaaatctgcgattctaacccggcaatctccgcctcaaagctttcccaactgcaccgccacaaggagatcttacaagaccactggaagagcttccgcaatatcaggtcctccatccagcaagagcgcaacagactaaacttgttattcagcgtgaagaacgatattgctaattccacaacggacgcgccagctcctataggggatgctgacgagtacattcagaacgaaacaaggcgaatcgatcagtccaacaacgtagtcgaccgtctcatctcccaagcctgggagactcggtcgcagttccactcgcagagcaacgtgctgaacacggcaaacaacaaggtgttgcaaactttacaaagaataccaggtgtcaatcagcttattatgaagattaacacgagaaggaagaaaaacgcgtttgtattggccacgataaccaccctttgtatactgtttttgtttttcacatggtaaataacgacttttattaaacaacgtatgtaaaaaca

SEQ ID NO: 1391 - DNA, 1497 bp, Saccharomyces cerevisiae
agaaaaaataattattagaaaccaattaccaacacaagatgctaagatcaaatttatgcagaggatctcgaatccttgcaagactgaccactacaccaaggacatacacatctgcggcgacagctgcggctgcgaatcggggacatatcatcaaaacatacttcaatagagattctacgacaattacgttctccatggaggagtccagcaagccggtttccgtttgctttaacaacgtttttcttagagatgcctcccatagtgccaagctggtgaccacgggagaactgtatcataacgagaaattgaccgctcctcaggacattcaaatttctgaggacggaaaatctctagtggtgaaatggaaagatggcggtcatcaccagttccctttacaattctttatcgactataaaggttccagttttgtttcgccagcaacaagaaaacaagaatccagatatagaccccagttatggaataagcgcatcctgaaagataacgtcaaggacttactttctgtgagctacaacgagtttattgatcctaaggatgactccaagcttttccaaacgctggtcaacctacaaaagtttggtatcgctttcatttccggtactccttcatcctcctctgaaggccttaccatacaaaagatctgtgaaaggatcggacccataagatcgactgtacatggtgaaggtacatttgacgtgaatgcatcccaagcgacaagtgttaatgcccattatgccaataaagacttgccgctacatacggatttaccatttttagaaaatgtgccaggtttccagattctacaatctctacctgctacagaaggggaagatcccaatactagacccatgaattacttcgtggacgcattttatgctacccgtaatgttagagaatcggattttgaggcttatgaggctttacaaattgttcctgtaaattatatatatgaaaacggcgataagaggtactaccaatccaaacctttaatcgaacatcacgacattaacgaggacaatactcttctgggtaattatgaggccttgattaaatgcattaactactctccaccataccaagcacctttcactttcggaatttatgataagccctcagatctaaataataatctggacttgaatttaattaccaccccagcaaaactaacagagagatttttgtttaagtctttcattagggggttgaacttgttcgagagtcatatcaatgacttcaacaatcaatttagattgcagttgcccgaaaactgttgtgttatctttaacaacaggagaattttgcatgctaactctttaacaagctcaaaccagcaatggttaaagggttgctatttcgattctgatactttcaagagtaaattaaagttcttggaagagaagtttcctcatgacaaataacttcattttttcagcatagttatgtgattctttatatttatttattttctctctgtgtagt

SEQ ID NO: 1392 - DNA, 1390 bp, Saccharomyces cerevisiae
cgtggcattttgtttacagtgctgattaaagcgtgtgtatcaggacagtgtttttaacgaagatactagtcattgatgtctgaaaatcaacgtttaggattatcagaggaagaggtagaagcggctgaagtacttggggtgttgaaacaatcatgcagacagaagtcgcagccttcagaggacgtctcacaagctgacaaaatgccggcaagtgagtcgtctacgacgccgctaaacattttggatcgcgtaagtaacaaaattatcagtaacgtagtgacattctacgatgaaataaacaccaacaagaggccactgaaatcaatagggaggctgctagacgatgacgatgacgagcatgatgattacgactacaacgacgatgagttcttcaccaacaagagacagaagctgtcgcgggcgattgccaaggggaaggacaacttgaaagagtacaagctgaacatgtccatcgagtctaagaagaggcttgtaacgtgcttgcatcttttaaagctggccaataagcagctttccgataaaatctcgtgtttacaggaccttgttgaaaaggagcaggtgcatcctttgcacaagcaagatggaaatgctaggacgaccactggagctggcgaggacgagacatcgtcagacgaagacgacgacgatgaggagttttttgatgcctcagagcaggtcaacgccagcgagcagtctattgtggtgaaaatggaggtggtcggcacagtcaagaaagtctactcgctgatatcgaagttcacagcaaattcgctgccggagcccgcaagatctcaggttcgggaaagtcttctaaacttacccacaaattggttcgacagcgtccacagtacatcactgccgcatcatgcttcgtttcattatgccaactgtgaagaacaaaaagtggagcaacagcaacagcaacagcaacagcagcagcagcagcaacttttgcagcagcaactcctgcaacagcaacagcaaaaaaggaacaaggatggcgacgactcagcctcgccgtcctcctccgtaactgcgaatgggaaagtactcattctcgccaaagaatccctggaaatggtgagaaatgtcatgggcgtagtcgactccacgttgggcaaggctgaagaatgggtgaagcagaaacaggaggtaaaagaaatgatcagggagcgtttcttgcaacagcagcaacagtacaggcagcaacagcagaaggatggcaattacgtaaagccctctcaggacaacgtggatagcaaggactaaccgagacagattgaggtctttcatgcattaccaccagtaataatattatacggaataatatagtttatataatatccataatcataatcataatcataat

SEQ ID NO: 1393 - DNA, 1178 bp, Saccharomyces cerevisiae
gattcatactcttttttctacgtactttgccagcgcaggataaacgaacctacccattcaaactgagcctcatatattcacttaggattacaaaatgccaacaaattccatcaaattattagcaccagatgtccaccgaggtttagctgaacttgttgccaaaaggctaggtctacagttaacaagcagcaaactaaagagagatccaaccggtgaggtttccttttctattggagaatctgttagggaccaagatatctttatcatcacgcaaattggctctggtgtcgtgaacgatcgtgttctagaactactgatcatgatcaatgcttcgaagactgcgtctgcaagaagaatcactgctattattccaaatttcccatatgcaagacaagatagaaaggataagtctcgtgctcctattaccgctaaattgatggccgatatgttaacaacagccgggtgtgatcatgttattactatggatttgcatgcttcccaaattcaagggttcttcgacgtcccagtagataatttatatgcagaaccaagcgtagttaggtatatcaaggaaaatgtcaactatatggattcaataataatttcgccagatgctggtggggcaaaacgtgctgccactttggctgatcgtttggatctaaattttgcattgatccataaggaaagagctcgtgccaatgaggtttctcgtatggttcttgttggggatgttactgataagatttgtatcattgttgatgatatggccgatacttgtggtactttagctaaggctgctgaaattcttttggagaatagagctaaatctgttattgctattgtcacgcacggtgttttatcaggcagagctattgaaaatattaacaattctaaactggatagagttgtttgcacaaatactgttccatttgaagaaaaaatcaagaagtgcccaaaactggcagtcattgacatcagtagtgtgctggctgaaagtattcgtcgtttgcataatggtgaaagtatttcttatttatttaagaattatcccttataagtgactgaagaataaatggggagaaaaaaaatactacaaaaatgatgagtgattttcagaatttgataaatacctacgtatctgatgtgtatacttctcttcccacaaattgcaatgtaat

SEQ ID NO: 1394 - DNA, 2939 bp, Saccharomyces cerevisiae
atgagcaatgatccatctgctgtatcggaactaccagacaaggacagtcttgataacggtatcagcaatgacaatgaaagggccatgggcggcaatggcgatggcggcgatggattacgattaccaaggaccactggaactttgaacgtcaatgccttacaaaaaggcactaatgctgcccatgaagctggtggatacaaatccatggatcctgcgaagaacgcggagacaaccaatgatgatgacaataatgtcgtttcactagatgatcctattcaatttacccgagtatcttcctcctctgtcatcagtggaatgtcttcatccatgagtcctcattctaacatcgatgaaaccaaatctctagaagcagtcactccaaacataaataccagcaatataaccccggatcattctgctgacaacacattttctaccataaatgcgtccgagtcagatcaccagtttaatgacactttactatcaaaactgtcgttaacagattctacagaaactatagaaaataacgcgacagtgaagcaccagcagccagttgcatcttccacagtaaactcgaataagagctccactgatatacgaagggctacaccagtgtccactcccgttatctctaaaccatcgatgacaaccacgccaagacagatcaattcagcttcccattcgctttcgaaccctaagcataagcaacataaaccaaaagttaaaccgtccaagcctgaagcaaaaagtaaaccggtttctgtgaaaaaaagctttccttcgaaaaatcctttaaaaaactcctctccacctaaaaagcaaacagaaaaatcgtattattcttcctcttcgaaaaaaaggaaaagcggttcaaatagtggtacactaagaatgaaagatgtctttacgtcctttgtacagaatataaagagaaattctcaggatgataaaagggcctcatcgtcgtccaataattcttcctcatcttctataaccaccgctttgaggatatctacgccatacaatgccaagcatatccaccatgtgggcgtggactccaagactggtgagtacacaggtttgccggaggaatgggaaaaattgttgacttctagtggtatttccaaaagagaacaacagcaaaacatgcaagcagtcatggatattgtcaaattctatcaggatgtcacggaaacaaacggtgaagataaaatgttcaagactttcaacacaaccacaggattgccgggaagtcctcaagtttcaacaccgcctgcaaactcattcaataaatttcctccgtcgacaagtgattcgcacaattacggttccagaacaggtacaccaatgtccaatcacgtcatgtctccaaccttaaatacagattctagttcagcaaacgggaaattcataccaagtagaccggctcctaagcccccatcttctgcgtccgcttcagctccaattataaaatcacccgtcatgaattctgccgccaatgtttcgcccttgaagcagactcatgcacctacaactccgaacaggaccagcccaaacaggtcctcaatatcaagaaatgccactttaaaaaaagaggagcagccactaccaccaatacctccaaccaaatccaaaacgtctccaatcatctccacagctcacacaccacagcaagttgctcaatcgccaaaagcgccggcgcaagagacggtaacgacacctacttcgaagccagctcaagcaagaagcttgtctaaagaattaaatgagaaaaagagagaggaaagggaaagacgtaaaaaacaactatatgccaaattgaacgaaatttgctcagacggtgacccaagtacaaaatatgccaatttagtaaaaattggtcaaggtgcatcaggtggtgtttatactgcttatgaaataggtacgaatgtctcagtggccattaagcaaatgaatctcgaaaagcaaccaaaaaaggagctaatcatcaatgagattctggtcatgaagggtagcaaacaccctaatatagttaatttcattgattcttacgttttaaaaggcgacctttgggtcattatggaatacatggaaggtggctccttaactgatgtggtcacccattgtattttgacagaaggtcaaattggtgccgtttgtagagaaactttgagtgggttggaatttttacattctaaaggtgttcttcacagagatatcaaatccgataacatcctattgtccatggaaggggatattaagttaacggatttcggtttttgcgctcaaatcaatgaattgaacttgaaaagaactactatggtgggaacgccttattggatggcgcctgaagtggtttctaggaaagaatatggcccaaaagtagatatctggtcgttgggtatcatgatcattgaaatgatcgagggggagcctccatatttaaatgaaaccccgctaagagcactgtatttaattgctacaaatggtacacccaagttaaaggaacccgagaatctatcgtcaagcttgaaaaaattccttgattggtgtttatgtgtggagcccgaagatagagcaagcgctacggaattgcttcatgatgaatatatcacggagatagctgaagccaattcctcattggccccgctagtcaagttagcaagattgaagaaagtagctgagaacatggatgctgatgaagataatgacgacgataacgacaacgagcatattaataagacaaacaattgtgacgacaataacgatagcaaagaaaccgtaaatttggacgtaactgaagatgataaacaaaagtaaacgtagcaagcagggtacaccttattatcgacaaagtatatacacagttgtgactggcataaaaattcttttcatatatcttatcgtgtatatttggacattttataacacatcccact

SEQ ID NO: 1395 - DNA, 1567 bp, Saccharomyces cerevisiae
caaacgatttcgtaaggttgtctcaattgatctgactgcttgtctatctaaagtggcaaggtatattagacagtgttgagagtgaactccaagatacagagaaactgaagaaataacgacaacatgacatcagctacggacaaatctatcgataggttagttgttaatgcaaaaacaagaagacgaaactcttccgtgggtaaaattgatttaggtgatacagttcctggctttgcagccatgcctgaaagtgctgcctctaaaaatgaggccaaaaaaaggatgaaagccttgactggtgactctaaaaaggatagtgacctactgtggaaggtttggttttcatatagagaaatgaattaccgtcatagttggttgacaccattcttcatacttgtatgcgtgtatagcgcgtactttttatctgggaatagaacagaatcaaacccgctgcacatgttcgtagccatatcatatcaagttgatggcacagactcatatgcaaaaggtatcaaagatttgagttttgtgtttttctacatgattttcttcacatttttacgtgagtttttgatggatgttgtaattcgaccattcacggtatacctaaatgttacttccgagcatcgtcaaaagcgtatgctagaacaaatgtatgccatattttattgcggagtttcagggccctttggtctttatattatgtaccatagtgatttgtggttgttcaagacaaaaccaatgtacagaacatatcctgttataaccaatccgttcttgtttaagatattttacttgggtcaagcggcattttgggcgcaacaggcttgtgttcttgttctacaattagaaaagccaagaaaggattacaaggaattggtttttcatcacattgtgacattattattaatttggtcatcatatgttttccattttaccaaaatgggattggctatctatattactatggatgtgtcagattttttcctttctttgtctaagacattaaactatctgaattctgtatttactccctttgtgttcggcttgttcgtgttcttttggatctatctgcgccatgtcgtgaatatcagaatattatggtcagtcttaacagaattccgtcatgaaggtaattatgtgttgaattttgccacacaacaatacaaatgttggatttcgttgccaattgtatttgtactaattgctgcgttacaattagttaacctgtattggctgtttttaattcttagaatcttgtacagattgatatggcaaggtatccaaaaggacgaaagaagtgacagtgattctgatgagagcgctgaaaatgaagaatctaaggaaaagtgtgaataaacgtatcttaaggagaatacgtatcatcatatgatttcccccctgtatgaaggccaagttaacatggtatagctcatagttgttgttataagaagcataaacccaagtacgaaagtaataattctgtaaaaaaaaaaaaaaatgcgtttatttagcgtcttcgggttggctatatatatatatttaaggatatatgggcatatgtaca

SEQ ID NO: 1396 - DNA, 74 bp, Saccharomyces cerevisiae; identical to SEQ ID NO: 899

SEQ ID NO: 1397 - DNA, 73 bp, Saccharomyces cerevisiae; identical to SEQ ID NO: 231

SEQ ID NO: 1398 - DNA, 73 bp, Saccharomyces cerevisiae; identical to SEQ ID NO: 231

SEQ ID NO: 1399 - DNA, 188 bp, Saccharomyces cerevisiae
aacatcataattatatcgcgaatgtactactagtatatgcagttttcttaaaattgcagggaatgactaaaagcccacgtttttcccacttttagtagtactgaagcgtagatagattgaacgttgctgggcgcctggtgttgatcatttctgaaatgagatattgggaatcagctgtatctacattt

SEQ ID NO: 1400 - DNA, 90 bp, Saccharomyces cerevisiae
gttatatgatgataaccttctcagctcactcagatcttttgatatgattgataaaaatttcctatccaacattcatcaatttatctgacc

SEQ ID NO: 1401 - DNA, 563 bp, Saccharomyces cerevisiae
gcgcaaataaaccaaaaatgtccactgattctattgttaaagcctccaactggagattagtcgaagtcggccgtgtcgttttgatcaaaaagggtcaatccgcaggtaaattggctgctatcgttgaaattatcgaccaaaagaaggttttgattgatggtccaaaagctggtgtcccacgtcaagccatcaacttgggtcaagttgtcttaactccattgacctttgctctaccaagaggtgctagaactgctaccgtttctaagaagtgggctgctgctggtgtttgcgaaaagtgggctgcttcatcttgggctaagaagattgctcaacgtgaaagacgtgctgctttgactgactttgaaagattccaagttatggttttaagaaagcaaaagagatacactgtcaagaaggctttggctaaggcttaaaaaaagaagaataattctaaaatccataggtaagtactgaaagcaattttgcgttccgtcaatgcatattatatatattaatcttaaccatttatgtaaacaacatatcatttcattttgttctggcca

SEQ ID NO: 1402 - DNA, 1415 bp, Saccharomyces cerevisiae
atgtcatcatctgcgattaaaataaggaatgcactgttgaaggcaacagatcccaagttgagaagtgataactggcaatacattttagatgtttgcgatttggtgaaggaagatcccgaagataatggacaagaggttatgtctcttatagagaagaggctagaacaacaggatgctaacgtgatcttaagaaccctctctttgacggtatctttggcagaaaattgtggttcccgcttaagacaggaaattagttcaaaaaattttacctctttgttatatgcgctcatcgagagccattctgtacacattactctaaaaaaagcggtgactgatgttgtcaagcaactgtctgattcattcaaggatgacccatcattacgcgccatgggagatctatatgacaaaattaaaagaaaggctccatatttggtacagcctaatgtaccagagaagcataacatgagtacccaggcagacaactcagatgatgaggaattacaaaaagcactaaaaatgtctttgtttgagtacgaaaagcaaaaaaagctacaagaacaggaaaaagaaagtgccgaagtccttccgcagcaacagcagcagcatcagcagcagaatcaagctcctgctcacaaaataccggcacaaaccgttgtgagaagagttcgggctctatatgacttaaccacaaacgaaccggatgaattgtcctttaggaagggcgatgttattacagtgctggaacaagtatatagagattggtggaagggagctcttcgaggaaatatgggtatatttccattaaattatgtaacaccgattgttgagccatcgaaagaagaaattgagaaggaaaaaaataaggaagccatagtattctctcaaaaaactaccatagatcaacttcataattcgcttaatgcagcttctaaaacgggaaattcaaatgaagttttgcaagatcctcatattggagatatgtacggatctgtaacgcctttgagacctcaagttacgagaatgttaggtaaatatgctaaagaaaaagaagacatgttatccctgcgtcaagtcttagcaaatgcagaacgctcatataatcaactaatggatcgtgcagctaacgcacatatctcaccaccagttccaggccctgcactctacgcaggaatgactcatgctaataatactccagtaatgccacctcagaggcagagttaccaaagcaatgagtactcaccttacccttctaatttgccaatccaacatcctacgaatagcgcaaataataccccacaatacggttatgatcttggatattcagttgttagccaaccaccacctggttatgaacaatagcccttcaacttatatagcacctttacatatctttaatttttacgaagagcatttta

SEQ ID NO: 1403 - DNA, 1368 bp, Saccharomyces cerevisiae
catacgctcgagagcctgattatcgcggggcacaaatacaggtgattcgagaaataaaaagtgagaaacgactcttttctcatgcagagacacgtttttgcgaggaatttcagacgtctttccttattgaggaacccttcccttaccaaaaggtttcagtcgtcagcatccggtgcggccaacacccctaacaataacgatgaggtgatgctgttgcaacagaaacttttgtatgatgaaattagatcagaattgaagtctctatctcaggtaccagaagatgaaatattacctgagttgaaaaagtcattagagcaagacaaactctctgacaaagaacagcagctggaggctgaattgagtgactttttcagaaattatgctctgttgaacaagttgtttgacagcaagacattagatggacaatcttctacaacgacagcagcagccacgccaaccaagccttaccctaaccttataccttcggccaatgacaaaccatattcctctcaagaacttttcttgcgtcaactaaaccattccatgcgtaccgctaaattgggtgccactatttcgaaggtttactatcctcataaggacattttctatccgcccctcccagaaaacattactgttgagagcttaatgtctgctggtgttcacttgggccagtctacctcactttggaggtcttccacacaatcctacatatacggtgaatataaaggtattcacataatagatctaaaccaaactttgtcctatttgaagagagccgccaaggtagtagagggcgtttcggaatccggtggcattatcctatttctgggtacaagacaaggccagaaaagagggctcgaggaagctgctaagaagacacatggttattatgtgtctaccagatggatcccgggtactttgacgaattctacagaaatttcaggtatctgggagaagcaggaaatcgactctaatgacaatcccaccgaaagagcgttatcaccgaatgaaacatcaaagcaggttaagcctgacttgctggtcgtattaaatcccacagaaaatagaaacgctttgttagaagcaattaaatcaagggtcccaactatcgcaatcatcgatactgactccgaaccttctttggtgacctaccctatcccaggtaacgatgattcattgagatctgtcaatttcttactaggagtcttggcgagagctggccaaagaggcttgcaaaatcgcttggccagaaataacgaaaaatgaacacttttattttcttttggcttgttaacctaaacttgtacatatgcccatatatccttaaatatatatatatagccaacccgaagacgctaaataaacgca

SEQ ID NO: 1404 - DNA, 1804 bp, Saccharomyces cerevisiae
aaggtattgaaatttcaactgtattgtgtaaatcatttttgggcaaactagacacaataactagcgaacagaaaaatggatagaacgtggctattactgacgtggctgttgctactctgtggggtagttcaagggaaccaagaaagcataaatcaaaaatatcacgatgtctgttcagggatgtattccaaggaggatttcaatggaaaagttgacccctatatatcgtttacgttggaggaattgtcacttgctgatgaagacgatgatggcgagggggttagtgttgctgtgtttgatttccaagattatgagcatattggtgtgcggttaccaaatggagaaattcagtatatttgcgatgactacgcattggatttgggcctctgtgaggattcgtcggaggggcaatttatcattcaagagacagccatcgatccgttcaccagtaaggaacataagctaacgagtcagattttgactttcactcaacaagaattgggcactaacgacaaggtatactcaattaacaaaactggttactattgtgtgaccacgtcatctttcatttcttccagttccaagtttaaggctacagtgaattttaggaacgcttacggtcaattggacgcttcagaggcgtacaagatgcctatttatgcctttttggccgtcgcttatgccgtctgtacattagtgtactcttggctatgctggaagcatagacatgagttactgcctttacaaaggtacattttggtattttgtattttcctaacagctgatactattttcgtctggatgtactatattattgagaaccagaagggaaactccagcgtcgctcttcatgtctatatggttttcatatcgatctttagcgccggtaagatgactttcacgcttctcctcgccttgctgatatctcttggatatggtatagtatatccaaaactggaccgtacattgctaagaagatgtcaaatatttgcgatatttacgtttgcagtgtgcgttgcattcctggtccaaaaatattcccagaattctgagtctttatccaatttgattttgattactgctatccccttagtattatgtctattcgctttctattatttgacactgtcttcaatgaacaaaacaatgacttatttgagggaacaaaaccaagtggtgaaattaaacatgtacagaaaactgatcatattgtgttatatttcgttgtttatactcttcttaggcttactagtctctacttttgcatacgtcggtatggacactgttgacatgatagaacaatattggaaaacagaattcctcatcacagatacttggcctagtttcgtttacttcttggtcttcgtcattttcgcattcttctggagacctacaagtacatcatatttactagcgtgctcgcatcaattaccaactgacatggaaaatgtatcagaattcgatttagatgacataaattccttgtctgatgaggcattgcctaatagagagccacgtaatgactaccaggaacacgatcacaatatggatattgatttagcatccgattttgaagaagtgccaagtgtaaatgcaaatacgaacgcaaataatgacgtattgttcgacgtagattacgacagagatgcaaaaaatgatagaagtactacataaacggaccaaataacataaatttagaaatttccttttttttttttttttccccttgactttcttttcttttatgtacctataatgaaagactattttataattagagctatttaaaaattattaatgaggt

SEQ ID NO: 1405 - DNA, 1133 bp, Saccharomyces cerevisiae
aaggcgaaagaaaagcgtttaagagaattttacaaacgtagtaaaataatgggtgtcatcaagaagaaaagatcgcaccatggaaaggcttcgcgccaacaatactactctggggtacaggttgggggagtaggcagcatgggcgccataaacaataacatcccgtcgttgacgagcttcgcggaggaaaacaactatcagtacggatacagcggctccagtgccggcatgaatggcagatcgcttacgtacgcgcagcaacagcttaataagcaaagacaggacttcgaacgtgtacgacttagaccagaacagctcagcaatatcatacatgacgagagcgacacgatatcgttccgatccaaccttttgaagaactttataagctcgaacgacgcatttaacatgctgagtttgaccacggtaccgtgcgacagaattgagaagtccagattgttcagtgaaaaaacaataagatatctcatgcaaaaacaacacgaaatgaaaacacaagcggcagagttgcaagaaaagcctctgacgccacttaaatacacaaaacttatagctgcggcagaggacggaagccgtagcacaaaggatatgatagatgctgtcttcgagcaagatagtcatttgaggtaccagccggacggcgtggtcgtacatcgtgacgatcctgcgctggtgggtaaactccgcggagatctccgcgaagcgccggcggactactggacgcatgcttatagggatgttttggcgcaataccacgaggccaaggagcgtatcaggcagaaggaagtaactgcaggtgaagcacaggacgaagccagcttgcagcagcaacagcagcaagatttgcagcaacagcaacaagtagtgactacagttgcctcgcaaagtcctcatgcaactgcaacggaaaaggagccagtacccgccgtggttgacgacccactggagaacatgttcggagattattccaatgagccgttcaacaccaatttcgacgatgaatttggagatcttgatgctgtatttttttaatagccatgggcggctacttcttggaaatatatactttccttttacatatttagtatagttatacatgtggatgtgtatggaggtaa

SEQ ID NO: 1406 - DNA, 2198 bp, Saccharomyces cerevisiae
cttttttttttttattggtctgttatcacttccactgagaaagtaatattgctattgcacaacactttttgaacaagtgcaaagataaaatactgaaaacggtaaagtaggtttgtttaaattgacttaagatggtgccattggaagatctgcttaataaagaaaatggcactgccgcacctcaacacagccgggagagtatagtagaaaatgggacagacgtttctaacgtcacaaagaaggacgggctgcccagtcctaacctatctaaaaggtcttctgattgttcgaagaggcctagaattaggtgtaccacggaagctattggcttgaacggtcaagaagatgaacggatgtcaccaggcagcacttcttcatcatgcttaccatatcatagtacttcacacttgaacactcctccatacgatctattgggcgcttcggcagtttcacccaccacatcatcttcctctgactcgtcctcctcctcgccattggcacaagcgcataacccggcaggtgatgacgacgatgcggataatgacggtgattctgaggatataacactatattgtaaatgggacaactgtggtatgattttcaaccaaccagagctgctatataatcatctgtgtcatgaccatgttggcaggaagtcacataagaacctacaattgaattgtcattggggagactgtaccacgaagacggagaaaagggaccatatcacctcgcatttgagagttcacgtaccattgaaaccgttcggttgctctacgtgctccaaaaagtttaaacgtccgcaagatttaaaaaagcatttgaaaattcatctggaaagtggcggtattttgaaaagaaagaggggacccaaatggggctcaaaaagaacttctaagaaaaacaaaagttgtgcaagcgacgcagtgtcgtcttgttctgcatctgtgccttccgctatagctggtagctttaagtcacattctacttctccacagatattacccccattgcccgtgggtatatctcaacatctgccttcacaacagcagcagcgggctatttccttaaaccaactatgctcagacgagctatctcagtataagccggtatattctccacaattgagtgccagattgcaaacgatcttgccgccattatactacaataacggcagcacggtaagccaaggtgccaacagtcggagcatgaatgtctacgaggacggttgttctaataagaccatagcaaacgccacccaattcttcaccaaactatcgagaaatatgacaaataactacattttgcaacaaagcggtggtagtactgagtcctcgtcatcatctgggcgcatccccgtagcacaaacaagctatgtgcagccacctaatgctccttcataccaatccgtacaaggtggtagctctatttcggccactgcaaatacagcaacttatgtgccagtacggttggccaagtatccaactggtccttcgcttactgaacatttgccacctttacattcgaacactgccggtggtgttttcaaccgccaatcacagtatgctatgccacactatccatctgttcgtgctgcgcctagctattcctccagtggctgttctatattaccgcctctacaatcaaagataccaatgttaccatcgcgccgtacaatggcaggtggaacttcattgaagcctaactgggaatttagcctgaaccaaaaaagctgtactaatgatattatcatgagtaagctggcgattgaagaagtagatgacgaaagcgagatagaggatgatttcgtagagatgttgggtatagtgaacattatcaaggactacttgttgtgctgtgtcatggaagatttagatgatgaagaaagtgaggacaaagatgaagaaaacgcattcttgcaagaatctttagaaaaattgagtttacaaaaccaaatgggaactaactcagttcgcatcttgaccaagtatcccaaaattttggtatgatatggattgtcggatattttattcttagttgtttctttgcggctgtatagtaaatgaataaatcacacatgccctagcgcggcgtcgcggattaaacaaggtaacaatggttaaaggaaaaattatttgttaaggtgggtatattatagattgctaattgtaaagtattaatagtttattaagtattaa

SEQ ID NO: 1407 - DNA, 1758 bp, Saccharomyces cerevisiae
atgatcacccaaactgagctagataactgcttacaatgggctcaaaataatggagccttcatcgatccgaaaatctcttttaggattacagaggatgctggtgttagtgcatttgtaaacgaaaaattctctcccaaacccgaccaagctttgattagggtacccgaaactctgctgatcacttcccagcaagctttatcagaattttcccaggctgctaatgaaaggagtcttttgaattccgtgacacagttgtacttgtcaaagttgaaatttggcaccgatgcagttcacctgaaatccttttacaaaccatatttagatgtgctacccttgcaccttccacaaccatatttttggtctactgatgaagtcatgaatttgcatggtacagacgtgtacttaactatgagagatacgctgaacaaactagtaaaggagtggaggatgctgttccaagctttatctattgaacactcttctcaagataagcagttcttgtctttattccaggagaataaagactctgccgtagtgccgttggaacagttctgcgcacacatcaatggatgtaaactagaagattcggaatggaactcgttcgtggcgtatctttggtcgtactgcatctttaattctagggcatttcctcgtgtcattttaggcagggccggtacagaccgcaccaatctgaacgaaggatttttgtatccaatagtagatttattaaaccataaaaacgatgtaccagtaagatgggagatgaatgaacaaaatgaactttgtttcatgtcgcagactaccacatttagtgcacaggatgaattgtttaataattatggtaatatttctaatgaaaaatgtttgttaaactacgggttttgggattcctcgaataagtttgacttctctaggttgactttaaagctaccatccaccttagttagcggtttgcccgtggattttaacaaatcaggtaattttgttactgacgatggagaaactaccattttacaatttagtttaaaaatttctgaaccattaccaccggttctactagcgttatttgcctacctaagtaaattaaagtctgaagaaactccaaccgtaaggagcgtattggaaggtattgatcaattaacatctgtagtatcccagagattgctgttttataagaattttaaaattaaaacttcttcgactcaaaaattacgccctcatgttattaaactaatcaaactatactatcaagataacaaaaaaattctgaacgccactactgagaaattgtccgttttacaaaaaaaaatatatagcaataataaggagttttctctgtcattcaagacaatttttaaaaacgacaaaatatttgccaattctctcttactggtatttggtgctataaattacgaagatttgatcacaaaagactgtcttaatgacgcattgttgctctggatagtcaaattaatcaacgataaaagtaataatcagggaggtttcattaaacaaaccttcaaagaagttagtgattcaattgtcattgaaaaagaagatgttatggagtttttgccgttctataaaaaatacttccctaatttatcggagagaattccagaaatttatagtgtcggtgattggggcataagacagttcattgtggcagatactgcgattgatagattggtttggatcaggaaatcaaataaagagcctatatttctaatgaagaaggcatacgacttacagatttag

SEQ ID NO: 1408 - DNA, 966 bp, Saccharomyces cerevisiae
atgagttcagaattattaatatctaattctaaaccaagaccagaaggattaagaaaattatgcgaaggtgagacagtgatccttccaagggacataacccccagcaaatgcgcttatttcttaaaacagaatatcgtattcatttcatatattttcatccatattattattaccataatcttaaaccgcctggcattatctgcacacggtaatactttgattattatcttagcggctttactaattacaatttcactattccttttactcctcttaccttacttaagctgctcaagatataagttaagatgtttagatgatgattgtaagttcaaactattagcggaagtcattacacataaacctaacatggacttgagcacatgggaccggattgcatatgacatgaaccaatttgtatatgaccgtcgtatatgtgcagatagatcttttttctacgatggcagttattgctatcaggtttttaaaaagttggtggctaccccgtaccttgtgaattccaatatgaatagtatatatgctgatctggagatgagaagtaatggagcaaccaacattaacgattctggtaatagttcattacacatcgaattgggcacttatatttttaaagcattggccgttttcaggaactctgttgacaagtactgggaggataagtatccagagatgggggtcacagtttgattggaaggtatttctaggttctactttagttttttataacgcatccagtacaaagaaatgatattggtatttggaaaagtcattgaatattcttgaatagattataagtgagcttcctttctgtatcaggatatgtggcttaactttaaactcgtataataaaagtactcgtatttttgtgggatgtttgcctccgtaaatttataaatggcaacaggaacactattataatgtaatgttacaatattacttttactg

SEQ ID NO: 1409 - DNA, 1241 bp, Saccharomyces cerevisiae
atgaaagagaatgaagtcaaagatgagaaaagcgtagatgtgttatccttcaaacagctcgaattccaaaagaccgttctacctcaagatgttttccgaaacgaattgacctggttttgttatgaaatttacaagtctttagcgtttcgcatctggatgctgttatggctaccacttagcgtctggtggaaactttccagcaattggattcacccacttatagtttcacttcttgtcctgttcctgggaccattttttgtccttgttatttgtggactttctcgtaagcgttccttatcgaaacaactcattcagttttgcaaagagattactgaagacacaccaagttcggatcctcatgattgggaagtcgttgcagcaaatctaaattcgtacttctatgaaaataagacttggaataccaagtacttttttttcaatgccatgagctgccaaaaagcgtttaaaacaacccttctcgaacccttctctttaaaaaaagacgaatctgcaaaggttaagtcatttaaggattccgttccttatatcgaagaggccttgcaagtgtatgctgcaggatttgacaaagagtggaagctgtttaatactgagaaggaagagagtcctttcgacctggaagacattcagctccccaaagaagcttaccgatttaagcttacctggattcttaaaaggattttcaacctgcggtgtttaccactcttcctttattattttttaattgtctacacgtctggaaatgctgaccttatatcacgtttcttgtttccggtagtaatgttttttatcatgacgagagatttccaaaatatgaggatgattgttttatccgtgaaaatggaacacaagatgcagttcttgtcaactattataaatgagcaagaaagtggtgcgaatggatgggacgaaattgcaaagaaaatgaataggtatttgtttgagaaaaaagtctggaataatgaagagtttttctacgatggacttgactgcgaatggttttttaggcgctttttctatcgtctcttatctttaaaaaaacctatgtggtttgcttcgttgaacgttgagctatggccatacattaaagaagcgcaatcggcccgcaatgagaagcccctaaagtaggaacaaatgttccttttccaaaatatactatgtgtagttgatcgaatatcagtaagtcaaaacgtattttacttgtttattattattaatactcc

SEQ ID NO: 1410 - DNA, 1704 bp, Saccharomyces cerevisiae
tgtggatgtgtaattgttggagttcttcttatctactttttaacttgtgtgtaattagagctgtacattcaaggtaaggaatgtaatgcaccaatgattacctaaatcaaattcgaaatatgtatcagtatattataggaatgttaattcgctcgtgcgtactaatttttccgaggtcactcgcaaatccagaattctaaaggatgaaagtatattttctgaaatcgtcaacaaagaagggatgtgatatattcaaaatggaaagattcctccttctttcatttagaaataggaaactaaccagtaaattagaaacaaagaatggctctcaataaactaaagaatataccttctttaacaaacagttctcatagctcaattaacggcattgcatccaatgctgcaaattccaaaccaagcggagcagacacggatgatatcgatgagaatgatgaatctgggcaaagtattctattaaatattatttcccagctgaagccaggttgtgatttatctagaatcacacttccgacatttattctggaaaaaaaatcgatgttggagagaatcactaatcaattacaattcccagatgttcttttagaagcacactccaataaagacgggctgcaaaggttcgttaaagtggtagcatggtacctagcaggttggcacattgggcccagggctgtgaagaagcccctaaatcccattcttggagaacactttacagcttattgggatttgcctaacaagcaacaagccttttacattgcagaacaaacgagtcaccatcctcctgaatctgcgtatttttacatgattccagaatcgaatattagagttgatggagttgttgtgccaaaatcgaaatttttaggaaactcaagtgctgcaatgatggaggggttaactgtattgcaattccttgatatcaaggatgcaaatggtaaaccagagaaatatactctatcgcaaccaaatgtttacgcaaggggaattctgtttggcaagatgaggattgaattgggagatcacatggtcattatgggtcctaagtatcaagtggatattgagttcaaaacaaagggctttatttctggtacctatgatgcaattgaaggtacaattaaggattacgatggtaaggaatactaccaaattagtggtaagtggaatgatattatgtatatcaaagatttgagggaaaaaagctctaaaaagactgttctcttcgatactcatcagcattttcctctagctcctaaagtccgcccattggaggaacagggagaatacgaatcgagaaggctttggaagaaggttacggatgcgctggctgtacgtgaccatgaagtagctacagaagaaaagtttcagatagaaaaccgccaaagagagctggccaaaaagagggccgaagacggcgttgaatttcattcaaaactatttagaagggcagagccaggtgaggatttagattattatatttacaagcacatccctgaagggaccgacaagcatgaagaacagatcaggagcattttggaaactgccccgattttaccaggacagacattcactgaaaaattttctattccggcttataaaaagcatggaatccaaaagaattaggcttctcattctattttaattatactagtacgatttctcactctgtaatttaatatcagtgtaatatgc

SEQ ID NO: 1411 - DNA, 509 bp, Saccharomyces cerevisiae
tcacagcaaaagcgcaagtcgaataatatatcgataaatacaatccataagacttaaaactaacctcaatggcgtacacttctcatctgtcttcaaaaactggtctacatttcggtagactttctttaagaagtttaacagcttatgctccgaatttaatgttatggggtggtgctagcatgcttgggctatttgtattcacagaaggatggcctaagtttcaagatacgctatacaaaaagattccgttgttaggacctacattggaagatcatactccaccagaagataaacctaattgaagccaaaacatccaaccggctgagtgattttatttatttgttttacgttcttttctatcattttggaagaggaattaatgcaaaacacatttgtatttttttttatttttgcatattctcgattatctatacatatttttaaactggatcataaaaggtataaaaagtaattgatccatacaacatttttaaatatttacccctcta

SEQ ID NO: 1412 - DNA, 558 bp, Saccharomyces cerevisiae
acaaaagcataaccaaagaaaaaaatggctaagttcttgaaagctggtaaagttgctgtcgttgtccgtggtcgttacgccggtaagaaggttgttatcgttaaaccacatgatgaaggttccaagtctcacccatttggtcacgctttggttgccggtattgaaagatacccattgaaggtcaccaagaagcacggtgccaagaaggttgctaagagaaccaagatcaagcctttcatcaaggtcgtcaactacaaccatttattgccaaccagatacactttagatgttgaagctttcaaatccgttgtttctactgaaactttcgaacaaccttcccaacgtgaagaagctaagaaagtcgtcaagaaggctttcgaagaaagacaccaagctggtaagaaccaatggttcttctctaagttgagattttaagagaattgcattatggtcaaccaaaaatcaaaaaattattagtaatatcaacatatgtatatttaatgtatgtaaacaatgattaaatattaataaaatatatctacatataagtatacgcaa

SEQ ID NO: 1413 - DNA, 1332 bp, Saccharomyces cerevisiae
ttaggtatattcctttagatttccgtaacacctttcagttttactattccgcgtggcgaggtaaagatcataaaaatacaagtttgttatagcatttcctgcaaataattgctgtaactagtggcgaaaaggtcatagaattattcgcctaaattatgttgttgttagcattaagtgatgcacatattcctgatagagcaactgatttacctgtaaaattcaaaaaattactaagcgttcctgataaaatatctcaggtcgctttattaggtaatagtacaaagtcttatgactttttgaaatttgtcaatcagatatctaacaatataacaatcgtaagaggagaatttgataatgggcacttaccaagcacgaagaaagataaagcatcagataactctagaccgatggaagaaattcctatgaatagtataataaggcaaggtgctttgaaaatcggctgttgtagcggttataccgttgtgccaaagaacgaccccttatctttgttagcattggcacgccagttggatgtagacattttattgtggggtggtactcataacgttgaagcttataccttagagggaaaatttttcgttaatccaggtagctgtacgggtgcttttaatacagattggccaattgtctttgatgttgaggatagcgatgaagctgtgacatcagaggtggacaagccgactaaggagaatcagtcggaggatgacgatgccaagggtggatcaacaggaaaggaacaacctgggtcttacacgcctaaagaaggcactgctggggaacgtgagaatgagaatgaaagcaacgttaagcctgaaaaccaatttaaggaagacgaggttgatatgtcagattcggatataaatgggtctaattcaccaagtttctgcctcttggatattcaaggcaatacctgcacgttatacatttatttatacgttaatggagaagtgaaggtcgataaagtggtttatgaaaaggaatagggtagccattttcatttttatgcatttctatgatgtctaaacattagatgcattcgtgaactttttcttgcagacgagatagatgtaattaagatatcctatctgccggatattacatatataaaaaaagaaagcttgcatgcacagtttccttactattcatgctcacacaattctaccgaattagcactgcagtgtttagaaccgtgctcaaaaagagctaacagagcttgtgaagaagcctggatgaaaatatactacgtttatataggttgatttaattatacaatgatatcatttacgccttgcttaatgatatcctctagta

SEQ ID NO: 1414 - DNA, 1261 bp, Saccharomyces cerevisiae
tatttgctctcaaaaaaacaaataaaaatggcttggtctggtggtaaggatatagtggatcagatatttgatgctgggtattggctcgtctcgaaaagcgctgtcttgagcgatgagatcaagaaccacgtcgaaaaatcaattgaatccatatctggaaagatatccaacaaggagactcctcgactacaggaaaacgacagtaacagatctaaagtatataaaactttgaggatcgggctccaggatcattggaagctaggcttgggaatttctgccacctccctgtgcttataccttgggtataggaccttttttaaactgccacctaatttacctgaagcagaatctcaagtggtattaatactgggcgatatgaatgatcctatcataaggaatcaagtgatggatttatatcgcagacggtttacagtatatatttgtactgaaaatgcagacgtctataagaagcacgaagaagatcaggatttcatatattacattgatcccacctgcgaaaaagacttcgagggtttttttgttgatgtaccaaggctagcatccatattgtttatgccaaggttatcatatcatccatccggagtaatttcatgtgactcattggaatctgaaattcattcaagtatatttgtgtattatcaagcattattaagcattataccccatttgaagagaaaaacccaactaattatgttcaatccatctttgactgcggacctgaacttagtccatcatagtacagaaattataacgtctggaataatcgactcactatttaaaattttcaaggaatatcaaaggttaaatgtttccacaatcaagcttggaatcctgcagattgggtcacaaccatcgaactataaatttttgagaatggccggttcagacattcacgaggccctacattatccagtttacaaaatgataatgagtgcgaatgggtataaactaagacaactgctaagttggttaacgactttgggaggttacaatagtgtgtattattgcggccgttttagttatttagtctcatggccatttgcttcacttatattcaaccatcacacacgtctttccctgaaacgcttgagaggaagattagccaaggtatatagcagcattatttcgtttttttgccggtcatcttctaaatcatccaaataatatccttgattagataacaattgcttatctacgtatatatatacatagcacaatctcgaaaatataatactaataa

SEQ ID NO: 1415 - DNA, 2261 bp, Saccharomyces cerevisiae
gaaaagctttcctataagagaatatagaggttggtgtacatccgtgcttcgacacattatataaaaaacataaccataaagtaagagagtagaagaacaaatcaaaatatgcctgtttcggaagcgtttgccaagttgtgtgtgaatgagaagcctcctgctgaatctgccgttgcggtgaagtctttggtcttcaaaccaaagactccaaagtccgccacccctgttcctatcgttgtggtggctttgcaatctactactactccttctgcgttgattgccaacgctacgtccagtaaggatccaagattggctcgcgatgatttggtcaagcaagcgttccaatctgaatccgctagagcttttatcttgggggatttggctaacgccacgtccaattttcacttgctaattgatcacgagttgggtactgttgacggtgacactatcttgcagttaaacgacagtacttatatgaagaaatctgacatgatgaaatttctaaacaattttgaggatagtcaaaaagtggttgatttctcccaagaggtgtctaaggaaaccgctacagaaggcaagaaacaacagaaaaagcagcaaccttctaaggcaggcactgcagcagcagcagcagcagcagctttggaagacgccaaacttattggtatcaccgtagacaaagcgttggatttcccaggctggtaccaacaaatcttgaccaagggtgaaatgttggactactacgatgtttctggctgttacatcttaagacctccttcttatgcgatctgggaaaacattcagaaatggttcgacgacaagatcaaggccattggtgtacaaaatgcctatttcccaatgtttgtttcctcacgtgtgttggaaaaggaaaaggaccatgttgaaggctttgctccagaagttgcctgggtcaccagagctggctcctctgaattggaagaaccaatcgccattagaccaacttctgaaactgtcatgtatccttactacgcaaaatgggtccagtcttacagagatttaccattgaaactaaaccaatggaattctgtggttagatgggaattcaagcatcctcagccctttttaagaaccagagaattcttgtggcaagaaggtcatactgctcacttgactgctaaggatgccgaagaggaggttttgcaaatcttagatttctacgctggggtttacgaagagttattagctgttccagtggttaagggtagaaagaccgaaaaggaaaaatttgctggtggtgacttcaccacaacttgtgaaggctatattccacaaaccggtcgtggtattcaaggtgccacctctcaccatttgggccaaaacttttctaagatgttcaatttgtctgtggagaacccactaggttctgatcatccaaagatctttgcgtaccaaaattcatggggtttatccactcgtgtcattggtgtcatggtcatgatccactctgacaacaagggtttggttatcccaccaagagtgtcccaattccaatccgttgtcattccagtgggcatcacaaagaagacctctgaggaacagcgtaaacacattcatgaaacagccagaagtgtggaatcccgtttgaaaaaggttggcattagagcctttggtgactataacgataattacacaccaggttggaaattttcccaatacgagctaaagggtattccaatccgtattgaattaggtcctaaggatattgaaaaaaaccaagtcgttgtcgttcgtagaaatgactccaagaaatacgtcgtttctttcgacgaattggaagcccgtatcccagaaatcttagaagaaatgcaaggagatttgttcaaaaaagccaaggagctattcgacacccacagagttatcgttaatgaatggagtggttttgttccagcattgaacaagaagaacgttatcttagcaccatggtgtggtgtgatggaatgtgaagaagatatcaaggaatcttctgcaaagaaagacgatggtgaagaattcgaggaagatgacaaggcaccaagtatgggtgccaaatctttatgtatcccattcgaccaacctgtattgaatgaaggtcaaaaatgtatcaagtgtgaacgtattgctgtcaattactgtatgttcggtcgttcttattagttgcatttcccacctataattttcatgtatagagtttttattttgtgctttttatctttctaaaaatcaaatatcatcattttcaa

SEQ ID NO: 1416 - DNA, 1182 bp, Saccharomyces cerevisiae
ataaagtagatatacggactacagaaaatggttcgtgccttcaaaattaaagttccagcttcttccgccaatatcggccctggttatgatgttcttggtgtcggtctttctctattcttggagttagatgtcaccatcgactccagccaagctcaggaaacaaacgacgatcccaacaactgcaagctgtcttacactaaagaaagtgaaggctattctacggtcccattgcgttctgatgctaacctgattaccaggactgcgttatatgtgttgcgttgcaacaatattagaaacttcccctccggaaccaaagttcacgtctccaacccaatcccacttggccgtggattgggttcctctggtgcagcagttgtggcaggtgttattttaggtaacgaagtggcccaattgggtttctctaagcaacgtatgttggactactgtttgatgattgaacgtcatccagacaacataaccgctgctatgatgggaggcttttgcggttcattcctaagggacttgaccccacaagaggtggaaagacgtgagattccattggctgaggtgcttccagaaccttctggtggtgaagataccggtctggttcccccattacctcccaccgatatcggtagacatgtcaaataccaatggaaccccgccattaaatgtattgcgatcatcccacagttcgagttgtccaccgccgactccagaggcgttcttccaaaagcctacccaacccaggacttggttttcaatctacaaagattggccgtcttgaccacagctttgaccatggacccacctaatgccgacttaatctaccctgctatgcaagatcgtgtccaccaaccttatagaaagacattgatcccaggtctcacggaaatcttatcatgtgtcaccccatccacataccctggcctattgggtatctgcttgtcaggtgcaggcccaactatcttggctttggccactgagaatttcgaagaaatctctcaagaaattatcaacaggttcgccaaaaacggcatcaagtgctcctggaaactactggagcctgcctacgatggtgctagcgtcgaacagcaatgaaatgtcctttacccctagtatactgtgttaaatactattgtagaccatatacatactgtaattgaccgttaacggttatta

SEQ ID NO: 1417 - DNA, 893 bp, Saccharomyces cerevisiae
actcatagccaaggccagttgattgatttagccacaagtatcattcaacgtaatatccacaggtgttttttttctcaccggaaggcgaataaaatacaggagctagagcgtgtaagataatgaacaaggaatctaaagatgatgatatgtccttggggaagttttccttctcccacttcctatattacttggtgctaatagtagtaatagtgtacggtttgtacaagcttttcactggacatggatccgacattaatttcgggaagttcttgttaaggacatccccttatatgtgggccaatcttggtattgccctttgtgtaggcttaagtgtcgtgggggcagcatggggtattttcattactggttcatccatgattggtgccggtgtgcgtgctccaaggattaccaccaagaatttaatttccattattttctgtgaagtggttgccatttacggtctgattattgccattgtcttttcttcgaaattgactgtggctactgctgagaacatgtactcgaaatcaaacctgtacactggttattctcttttctgggcaggtatcactgtcggtgcttccaatttgatttgtggtatcgctgtcggtatcaccggtgcgactgctgccatttccgatgctgctgattccgcattgtttgttaaaattttggtcattgaaattttcgggtccattttaggtttattaggtttgattgttggtttattgatggccggtaaagcttctgaatttcagtaagcgctcaaaccaggcttttcttttccgtttttacgagctagataagcgcatccatatttactaatagatataatgagatatctgagatacatgtgtatgtatatatgcacgttttcttttattatctaaaaa

SEQ ID NO: 1418 - DNA, 1746 bp, Saccharomyces cerevisiae
atgtctaaacaatttagtcataccaccaacgacagaagatcatcgattatctactccaccagtgtcgggaaggcagggcttttcacgcctgcagactacatcccacaggagtcagaagaaaacttaattgagggcgaagagcaagagggtagtgaagaagaaccttcctataccggcaatgacgatgagacggagagggaaggtgaataccattcgttgttagatgccaacaattcgcggacattgcaacaagaagcgtggcaacaaggttatgactctcacgaccgtaagcggttgcttgacgaagaacgggacctgctaatagacaacaaactgctctctcaacacggcaacggtgggggagatatagaaagtcacggacatggccaagcaattggaccggacgaggaagaaagaccagctgagattgcaaatacgtgggagagcgcgatcgagagtggtcagaaaatcagcacaacttttaagagagaaacgcaagtgatcacgatgaatgcgttgccgctaatcttcacctttatcttgcaaaattcgttgtcactagcatctattttctccgtctcacatttagggacgaaagagctaggtggtgttacactcggttctatgactgctaacatcacgggtcttgctgctattcaaggtctgtgtacatgtctggacacactgtgtgcgcaggcatacggtgccaaaaactaccacttggtgggtgtgctagtgcagagatgtgctgtgatcaccatcttggcgttcttgccaatgatgtatgtttggtttgtttggtcggaaaagatcctagcactaatgattccggagagagaactatgcgcgctagcggctaactatctacgtgtaaccgcattcggtgtgccaggattcatcctttttgaatgtggtaagaggttcctacaatgtcaaggtatattccatgcatccacaatcgtgctctttgtgtgcgcacccttgaacgcattgatgaactacttacttgtttggaatgacaagattgggattgggtaccttggtgcgccattatcggttgtgatcaactactggttgatgacgctcggattactaatatacgcaatgaccaccaagcacaaggagagaccactcaaatgctggaatggtatcatccctaaggaacaagcatttaagaactggcgtaagatgattaacctagctattcccggcgtggtgatggtggaggcagagttcctcggctttgaagtgttgacaattttcgcttcccatctgggcaccgatgccttgggcgctcagtcgattgtggctacgattgcgtctcttgcataccaagtgcctttctctatctccgtttctaccagtacacgtgtagccaattttatcggcgcgtcgctatacgacagctgcatgatcacgtgccgcgtgtccttattgttgtcctttgtgtgctcctcaatgaacatgttcgttatctgccgttataaggaacaaatcgcaagtctattttctactgagagcgctgtagtgaagatggtcgtggacacactacctcttcttgcgttcatgcaattattcgatgcctttaatgcgtccaccgccggatgcctacgtggtcaagggagacaaaaaaataggtgggtacatcaacctagtcgcattctactgcctaggtgtgcccatggcatatgtgttagcattcctgtatcatctgggtgtaggcggcttatggttgggtataactag

SEQ ID NO: 1419 - DNA, 1322 bp, Saccharomyces cerevisiae
atgacaaaagcttatactatcgttatcaagctgggcagttcgtcgctcgtcgacgagagcacaaaagagccaaagttgtccatcatgacgttaatcgtcgagaccgtgacgaatcttaagcgcatgggccacaaagtgatcatcgtatccagcggcggcattgccgttggtttggacgctctcaacattccgcacaagcctaagcagttgtctgaagtgcaagcgattgccgctgtcggacaaggccgtctcatcgcgcgctggaacatgctgttttcccagtatggcgagcaaacagcgcagatcctgctcacgcgtaacgatatactgcgttggaaccagtacaataacgcacgcaatacaatcaacgaactgctggccatgggtgtcatccctatagtcaacgaaaacgatacgctatccattagcgagatcgagttcggcgataacgacacgctttctgccattaccgctgctcttgtaggggcggatttcctgttcttgctcacagatgtggactgcctatatacagacaatccgcgcactaatccggatgctcgtcctattgttctcgtgccagagctatcagagggccttccgggcgtcaacacttccagtggttcaggctccgaggttggcacgggcggaatgcgcaccaaactcatagccgccgacctcgcctctaatgccggtatcgagactattgtgatgaagagcgaccgtccagagtacgtcccgaagatcgttgactacattcagcatcacttccgccctccgcgccatatcggaaacggcacacagcagcagtttctcgatcttcaggatacggagctcgaacagttgcgtcgctacgatgttcccatgcacaccaagttcttagctaatgacaacaaacacaagcttaagaacagggaattttggattctgcacgggctcattaccaagggcgccattatcatcgacgagaacagctatgataaacttttgtcaaaggatatggctagtctgactccaaacgccgtgatcgaagtccgagacaacttccacgaacttgaatgcgttgatctcaaaataggccagcggttacccaatggcgaattggatatctcgaagccgattcagtctgttggatgcgtccgctccaattatacgagtctggagcttgcgaagatcaagggcttacccagtgagaagattcacgatgttttgggctacagtgtgagtgaatacgtagcacatagagaaaacatcgctttccctccgcaattttgagaatattcccttttttttaccggattaaaaaaaaaaaaaaaaattctgtt

SEQ ID NO: 1420 - DNA, 1884 bp, Saccharomyces cerevisiae
atgctatcagcaaggtgcctcaaatctatatacttcaagagatctttctcacaactgggacacatcaagccccccaagcacataagaaatgaacctgttaagccatttagaaacatagacttaaaagactgggacttactgagggcttccttgatgaaattcaaaagttcttctttagaagtgccactggtcatcaatggggaaaggatatatgacaataatgaaagagcgcttttcccgcagactaaccctgcgaaccatcaacaagtactggcaaacgtcacacaagccacggaaaaagatgtcatgaatgctgtaaaagccgccaaggatgccaaaaaggattggtacaatctaccgttttatgacagatctgcaatttttttgaaagccgctgacttaatttccaccaagtatcgttatgacatgttagctgctacaatgctgggccagggaaaaaatgtgtatcaggcagaaatcgactgtatcacggaattatctgacttttttagatactatgtcaagtatgcatcagacttgtatgctcaacaacccgtagagtcagcggatggtacttggaataaagctgaatacagacctttagagggatttgtgtatgctgtttcaccattcaactttactgctattgctgcaaacttgattggggctccagctttgatgggtaatacagttgtctggaaaccttcacaaaccgctgccctttcaaattacttattgatgactgttttggaagaagcgggattgccaaagggtgtcataaatttcattccaggtgatccagttcaagttactgaccaggtattagctgataaagattttggtgccttgcattttaccggttctacaaatgtctttaagagtttgtatggcaaaatacaaagtggcgttgttgaagggaagtacagagattacccccgtattattggtgagacaggtggtaaaaatttccatctagttcacccaagtgcaaatatatcacatgcagtactctctactattagaggcactttcgagttccaaggccaaaagtgctctgccgcttccaggttatatcttccagagtcaaaaagtgaagaattcttatccgatatgtttggcatattgcagtcacagaatgttgtcccaatgaacacatccgcaagtccaatttctggtgggaatttgcggggatttatgggtcctgtcatccatgaacaaagtttcgacaaattagttaaagtaattgaagatgcaaagaaagaccccgagttggaaattctttacggtggacaatacgataaaagccaaggttggtttgtcggacccacagtcataaaagccaagagaccagatcatccatatatgtcaacagaattttttggccctatattaactgtttacgagtatccagatactgaatttaatgaaatctgtgatattatcgataatacgagtcaatacgccttaactggtgctatttttgccaaagatcgtaaagcaattgaatacgcagatgagaagttgaagtttagcgcaggaaatttctacataaatgataagtgtactggtgccgttgtttctcagcaatggtttggtggcgcaagaatgagtggtaccgacgataaggctggtggtccaaacattttaagcagatttgtcagtattagaaacacaaaggagaacttctacgagttgactgatttcaaatatccatcgaattatgaataaaaaaatttttgtggaatagaaccgcgaatgcagtcacttcatccatcaactcatgtaaatgttagattatcgaaaaaagggttttgattacttcattaggtttttttagttttacaattttaatttatctaggtaaatagtttaaaaatattcatt

SEQ ID NO: 1421 - DNA, 2234 bp, Saccharomyces cerevisiae
cggttttcaagtgatctactgtcgcacatatcatgccgtttggaatagacaacaccgacttcactgtcctggcggggctagtgcttgccgtgctactgtacgtaaagagaaactccatcaaggaactgctgatgtccgatgacggagatatcacagctgtcagctcgggcaacagagacattgctcaggtggtgaccgaaaacaacaagaactacttggtgttgtatgcgtcgcagactgggactgccgaggattacgccaaaaagttttccaaggagctggtggccaagttcaacctaaacgtgatgtgcgcagatgttgagaactacgactttgagtcgctaaacgatgtgcccgtcatagtctcgatttttatctctacatatggtgaaggagacttccccgacggggcggtcaactttgaagactttatttgtaatgcggaagcgggtgcactatcgaacctgaggtataatatgtttggtctgggaaattctacttatgaattctttaatggtgccgccaagaaggccgagaagcatctctccgccgcgggcgctatcagactaggcaagctcggtgaagctgatgatggtgcaggaactacagacgaagattacatggcctggaaggactccatcctggaggttttgaaagacgaactgcatttggacgaacaggaagccaagttcacctctcaattccagtacactgtgttgaacgaaatcactgactccatgtcgcttggtgaaccctctgctcactatttgccctcgcatcagttgaaccgcaacgcagacggcatccaattgggtcccttcgatttgtctcaaccgtatattgcacccatcgtgaaatctcgcgaactgttctcttccaatgaccgtaattgcatccactctgaatttgacttgtccggctctaacatcaagtactccactggtgaccatcttgctgtttggccttccaacccattggaaaaggtcgaacagttcttatccatattcaacctggaccctgaaaccatttttgacttgaagcccctggatcccaccgtcaaagtgcccttcccaacgccaactactattggcgctgctattaaacactatttggaaattacaggacctgtctccagacaattgttttcatctttgattcagttcgcccccaacgctgacgtcaaggaaaaattgactctgctttcgaaagacaaggaccaattcgccgtcgagataacctccaaatatttcaacatcgcagatgctctgaaatatttgtctgatggcgccaaatgggacaccgtacccatgcaattcttggtcgaatcagttccccaaatgactcctcgttactactctatctcttcctcttctctgtctgaaaagcaaaccgtccatgtcacctccattgtggaaaactttcctaacccagaattgcctgatgctcctccagttgttggtgttacgactaacttgttaagaaacattcaattggctcaaaacaatgttaacattgccgaaactaacctacctgttcactacgatttaaatggcccacgtaaacttttcgccaattacaaattgcccgtccacgttcgtcgttctaacttcagattgccttccaacccttccaccccagttatcatgatcggtccaggtaccggtgttgccccattccgtgggtttatcagagagcgtgtcgcgttcctcgaatcacaaaagaagggcggtaacaacgtttcgctaggtaagcatatactgttttatggatcccgtaacactgatgatttcttgtaccaggacgaatggccagaatacgccaaaaaattggatggttcgttcgaaatggtcgtggcccattccaggttgccaaacaccaaaaaagtttatgttcaagataaattaaaggattacgaagaccaagtatttgaaatgattaacaacggtgcatttatctacgtctgtggtgatgcaaagggtatggccaagggtgtgtcaaccgcattggttggcatcttatcccgtggtaaatccattaccactgatgaagcaacagagctaatcaagatgctcaagacttcaggtagataccaagaagatgtctggtaatcagcccactgatcaagccttcggcgcggttgttcaaccacacgatctgtatcaaagaaaaataagttagataaccaaaaaaaaaaaaaatttcatactcactataagaaatcatacgcagttcaa

SEQ ID NO: 1422 - DNA, 1846 bp, Saccharomyces cerevisiae
tgaatggaaatcattctgcaacacctttatagcttcaacataggttaagttttaagcatttcaagtgcttttcaattaagctatagaaagttctttcgttagaaagaaagacagttaaacaagcggcaaaagttgatgagcaatgaattggtcttttctactacagctggtaataacaatattgttaattgtgctgggcgccaactggttgctaagctcttttctacttgattttaagagagatttaacaggggtggctttgtcacagcaatctagcatatccagtgttcgtaaagaaaatgaaacagcatattatcgaagcattttagtgcccacaggattcccattgacgacaggattagggctatctttaaaatacaaaataagaaatggcaatttcggtgatgtttggaatgccataatggaagtttccaagggaaaaaacataattaaatttacaggaagagaaaaaagttattcgttgagtgaacttaatggtatggccaagcgcatatttccgaaactttccaataagaatttcaaaaatatcggtatagctaattctattgctaccgtagagggttttactctctccttggcttccatgatgacctctataagaacaggttcaatacctcatttcttgccagctgttcctagacaacgactagaagatgttgatgtcctgatcatcgactcatggaagtcttttaagatgctaaacggcagcgaggattggtacaagcttattgttgtttgcgatgatcctatcgaatcactacaatttgatgcgaactgtgatgttatcacttggaaagaacttatcgacggttttaccaaggatacagagtaccaatacaccccgccagatgacaactctgatgataagaaactttttgcatacgtaacttcaccatggaatggaactaatagttttaatcaaatctgtctggtgagtaatatagcggaattcatcaaagggttccccttgggaaatgaattgaatagtaatgaatacctaaccatttcgacaaaattggcaaattctagtgcaagcctacaaatttggggaaagctttttgcagttttgctgcatggtgggtctgcatctttcatcaatcctacaacgatagattgcgagtcgttgcaagaaactacgttactgtttaccgaaacaaaggatgttgtcaaattaattgattctaattctagaagtgggctgctgaataaaatctacttatcctgggccacgaacttactgagcgagggtatttttacgaaaattgccagaatcgagccacattctcttgaaaaattaagatgtgtttatttggcagataatgtgaaagatgctgaggttatttcgacatttcctgaaaaaattcctcagctaaaaaagactaaccgaagaatcaccccaagcactgaacaattgaataaaataagagctcaattaggatcccgtgtagtcctcgagttatattgtccctacgctatcatgggacctgtggcacataccaatttttatgactatagggtttttggaaaatctgtggacgataacgttgtatgttatggaacactaagtacaacattagaaggaaaaatggtagaaacggaaacaaaccctcatttgaacatagagaagaagcagggtatgttatgtattcgtggttttagcataggtaaaccagtagagtccgatcgtttagagaaagctttgcatttagctgaaaggtttggaggaggtgaaggatggatgcctctagttggcgtttttggactatttggccaagacggttgcttatacatctataatcaatgagcattatctatcgctttatta

SEQ ID NO: 1423 - DNA, 892 bp, Saccharomyces cerevisiae
gaaactctctagcttgtaataaacgaaggatgactgtacaaattccaaaattattatttttacacggcttcttgcaaaacggtaaagttttctccgaaaaatcatctggtattagaaaattattgaagaaggctaatgtccaatgtgactatattgatgcaccagtccttttagaaaagaaggacttgccatttgaaatggatgatgaaaaatggcaagccaccctagatgcggatgttaacagagcctggttctatcacagcgaaatctctcacgaattggatatctcagaaggtttgaagtctgttgttgatcacatcaaggccaatggcccatacgacggcattgtcggtttctctcaaggtgccgcattgtcctctatcatcaccaacaagatctcagagttagttccagaccatccacaattcaaggtaagtgtagtcatttccggctattccttcaccgagccagacccagaacatcctggagaattgagaataaccgaaaaattcagagactcatttgcggtaaaaccagacatgaagaccaagatgatcttcatctatggtgcttctgaccaagccgtcccatccgtcagatccaagtacctgtacgatatttatttgaaggcgcaaaatggtaataaggaaaaggtgttggcttacgaacaccctggtggacatatggttccaaacaagaaggacattatcagaccaattgttgaacaaataacctcttccttacaagaagcttctgaataaatcgtaggttgttgcttacctgctttctagctttttactatcacacgcagggtgtgtggagtgaaatgctgatcgagtatgtatatatacatataagtactttgtatagaatgaaccacaagtttgtagca

SEQ ID NO: 1424 - DNA, 1696 bp, Saccharomyces cerevisiae
atgacgtcccaagaatatgaacctattcaatggagcgatgaatcccaaacaaataatgatagtgtcaacgatgcgtatgccgacgtgaataccactcatgagtcgcgtcgaagaacaactttgcagccaaactcaacatcccagagcatgatcggaacattgagaaaatatgctaggttcatcggtcctggtttgatggtatctgtatcgtacatggatcctggtaactatagtacagctgtagcagcgggttctgctcatcggtacaagcttttattttctgtcttagtttctaatttcatggctgctttttggcagtacctctgcgccagattgggtgctgtcactggcctagatctggcacaaaattgtaagaaacatttgccctttggacttaacattactctttatattctggcggagatggcaattattgccacagatctggcagaagtggtaggaaccgctatttctttgaatatccttttccatatacctctcgccctaggtgtgatacttactgtggtagacgttttaattgttctgctagcttacaaacctaacggttccatgaagggtatcagaatatttgaagcttttgtttctttattggtggttcttaccgtagtttgctttactgttgaactgttttatgccaaactgggacctgccaaagaaatattttctgggttcttacccagtaaagccgtttttgaaggtgatgggttatacttaagtctggcaattctgggcgccacggtaatgcctcattcattatatttggggtcaggtgtggttcaaccaagattaagagagtatgatatcaaaaacggacattacttgccagacgcgaatgatatggataacaatcacgataattacaggccatcctatgaggccatcagtgaaactctgcactttactataacggaattactgatctcgctgttcacggtggcattatttgtcaattgtgccattcttatcgtgtctggcgctacactatacgggtccactcaaaatgctgaggaagctgacttattttctatttacaacttactctgtagtactctttccaagggagcgggaacggtattcgtgctggcattgttgttttcaggacagagtgccggtatcgtgtgtacgttgagtggacaaatggttagtgaagggttcttaaattggactgtttctccggcattgagaagatccgccacaagagcggtagccatcacgccttgtttgattttagtgcttgtagctggacgtagcggcctctctggtgcactaaatgcttcccaagtggtactttctctcttgctgccttttgtttctgcacctttactttacttcacttcaagcaagaagattatgcgtgtacagcttaaccgtaccaaagaactttcaagaactacagacaaaaaacccgtggccgaccgaaccgaagatgatgagaccattgagctcgaagaaatgggcataggcagcagctcacaggagcgcagcttagtttctcctgctccagaatacaaagacatgagcaatggaatgatcgtcaccgtgctcgcaatcatagtatggttgattatctccggactgaacttttatatgttactgggctttactacgggcaaagaagtacacctctaatataacaattctttagactagtataagtatacattttatccaagaa

SEQ ID NO: 1425 - DNA, 951 bp, Saccharomyces cerevisiae
ataaacagccgaacaattgtatttgacacataaactaataaatatacaacaatgttatcaagggccatattcagaaatccagttataaatagaactttattgagagccagacctggtgcttatcatgcaactagattgactaaaaatacgtttattcaaagtaggaagtattctgacgcacatgatgaagaaacctttgaggaattcaccgcaagatacgaaaaggagtttgatgaagcctatgatttgtttgaagtgcaaagagtgctcaacaactgtttttcctatgatttagttcctgctcctgctgttattgaaaaagctttgagggctgccagaagagtcaatgacttacctaccgcaattagagtatttgaggctttgaaatacaaggtggagaatgaagaccaatacaaggcctacttggatgaattgaaggatgtcagacaagaattgggcgttcccttaaaggaagagctatttccaagctcttcttaataataaggaaaaagctaccacacaacgtctgtaatttgttgtcctttttttatttgtggaaaattcctcaatttgaaataagattcgtatttattttgtaaaacgattttagtttttattttttttttttcttcccttttaccttattatttgttttaccctttatggatattcatccactcagaaactaatatatcaaaatcaacgataagatcacaagaggtgaaataagaaaagtaaaagaaaaatatttaaatttaaccattatgatttccactttgttttctctactctattacttgaacaaactttatttttggtaatgagggctggtcacagattacctttaatatcctttgttagtagcttttttgtgttctatttcaggaaagaagaatgggaaaaataataaaacaataaataactatataaaaaacaaaaacctagaatata

SEQ ID NO: 1426 - DNA, 1291 bp, Saccharomyces cerevisiae
cctacgttccagactataaagtataaaatggctaaaaagagtaactcaaagaaatctacgcctgtaagtacaccaagcaaagaaaagaagaaggttattgaaaagaaatcttccacagccattcctagggaaagagttattaaagctgtcaacgagcttataaaattcacttccaagccacaagatgaaaataatgaagaaggaaataacggtaagaaaaacctattggaagatgatgaagaagaattgaagaaagatctgcaattaatcgtagtaaataataaatcattcaccggtacttccaaatcattcaaattgaaattactaaatgtcaaacattcgttttacaagccttggaaagaagccagtgcaacagcggttaaggatttcaaagttttattaattttgaaggattctgatattaagaaagtttcagaagatgatttatttgatcaattagattcagaaggaatcaaggttgatgaaatcatttgcgggaaagacttaaagaccgtttacaaggcatatgaggctagaaacgcttttatatctcagttttctttgattttggctgacgacagtatagttacatctttgccaaaacttatgggaggcaaagcctacaacaaagtagaaactactcctatatcaattagaacacatgcaaataaggaattttccttgaccactttgacgaacaatatcaaaaaggtttacatgaatcagttgcccgttaaacttccaagaggtaccacgttgaatgtccatttgggtaatttagaatggttaaggccagaagagtttgtagataacgttgaattaatttctgaacagttaatcaaagcataccaaatcagatccatttttatcaagaccaataggtcgcccgtattgccattatactataaccaggacgttcttgatgaacttgaagctaaaaaggacaaaatcgaagaaacccacgaagatgacatggtcaccattgatggtgtacaagttcatttgtctaccttcaacaagggtttgatggaaatcgccaatccttccgaattgggttcaattttctctaaacaaattaacaatgcaaaaaagagatcttctagcgagcttgaaaaagaatctagcgagtcagaagctgtcaagaaggctaaaagttaatttgtttcctccttatctatcttttctctcatttttttcttgtgaagaaaaaaatttgaatttcatagagtgcggtgcatatgtatatatctatatatgtttgaagtgtatattaaaaataaagtcattattt

SEQ ID NO: 1427 - DNA, 1510 bp, Saccharomyces cerevisiae
taatccagatatagcagacaataaaatttcaagatggccaagagaagacaaaagaaaagaacacatgcacagcttacacctgagcaggaacaaggtatacctaagtcaatggtaatcagagtgggtcaaacttctttggccaaccattctctgaaccaattagtaaaggacttccgccaaatcatgcaaccacatacggctataaaattgaaagagcgcaagtccaataaactgaaggatttcgttgttatgtgtggcccattaggtgttacgcatctttttatgttcactcaatctgaaaaaacaggaaatgtctccctaaagatagctagaactccgcaaggtcctactgttacttttcaagtattggactattctctgggtagagatatcaaaaaatttttgaagagacctaaatcgttgaataatgatgatgtattaaatcctccattgctagtgctaaacgggttttccacatccaaaagatctggtgaagacgaccaggatgtaaacgtggagaaggtcattgtttctatgtttcagaatattttcccacctctgaatcctgcgagaacttctttgaattctatcaaacgtgtatttatgatcaataaagacagggaaacaggggaaatttctatgcgccactattttattgacattcgagaagtagagatctctagaaacctaaaaaggctttataaagccaaaaataatctaagtaaaacagtgccgaatttgcatcgaaaagaagatatttcttctttgatattagatcacgacttaggcgcctatacatcagaatctgaaattgaagatgacgctatcgtgagagtagttgataatcaggacgtgaaggcaaagcattctcaaagtttgaagtcccaaagaacaccggtcgaaaagaaggataataaagagcgtgaaaaagaaacagaagaagaagatgtggaaatggaggaacctaagccttcagaaaacttgcaaccaaccccacgtaagaaagctatcaaactaactgaattaggaccaagattaactttaaaactggtcaagatagaagaaggtatttgttcaggtaaagtgttacatcatgaatttgttcaaaaatcaagcgaagaaatcaaagctttagaaaagagacacgctgcaaaaatgaggctgaaggaacaaagaaagaaggaacaagaagaaaacattgctaaaaagaaggctgttaaagacgctaaaaagcaacgtaaattggaaagaagaaaagctagagcagcagaaggaggtgaaggtcaaggaaaagatgatgcgatgagcgatgatgagtcttcatcaagtgacagcgaacattatggtagcgtaccagaggatctagatagtgacttatttagtgaggtcgaataaattgttctccggtaccaagaaaattttagttaagcctggctatccaccaacgcacgtatacttcttcactttagataaattgcatacttgatacatataaactctttgtctttta

SEQ ID NO: 1428 - DNA, 1199 bp, Saccharomyces cerevisiae
tatctaaagacagcttatcagcatgaaatccaaaacgtggattttcagggatgtcttatctagtcaccgaaccaaagcgtttgatagtttactttgtaggagactccctgtatcaaaggcaacgaagcatcttcaactgggagaacatttcctgttcttcccaccatcattcgaaaaattggatagagatggttattttaactatcaaaatcctgcaagtttgctaggaaaccctgatttacgctaccgtagaaggatttggggacaaggagagcttgttcagtatttaccagtcaccttagaccaggagtatacatgccacgaatcaatcaaatacgtaaaaaaaatacgagatgaacatgttgtctgtattgaaagaacccttttacaagaaaggcccgaaaatgtgtcgagtccaatggacatttgcttattcgagagaagggtattaatgtacaccaattcacccgcaaacaagactgcagtcaagatgcccgtaggagaggagaactataagatcttaaaaaattttactgttactgatatggatattgtagcttatggtcagatgtctttgaatccgcaccgaattcattgggacaaagagtacagtcgctatgttgaaggctacgacgatattatcatgcaaggacccttctcggtccaattactacagaaatgcatccaaccttttctcgaacaaccaatcagacagttgcgataccgcaatttgaattatatatatccaaacactactttgagcatatgtcagtctttaagctcttcgagcggaatgtacacatttcaaattagggacctccagaaagccaacttagtctacatgaaagctgatgttttctgttgactaccagtaattgtctctctgcagataatcactacctgtgtgtttcttgtctcttgaaataatactagtagctgctgaacagtggaaggtcacgaacgagattaccataatatctcgccatcaccaggttgacggtaaacgcattacgggaagaactgaaaaaaaggtgggaaaaaaaaataaaaagtaaagtgaaaaattaaatgtaatgtatatttccattttgacgcaaagtacttccctctatcagttttgtatctaactgcagagtaaagtcgtgttttgcttagttaacttatatacaagtcaaagcaaaaaagatgtccgatatcaa

SEQ ID NO: 1429 - DNA, 1378 bp, Saccharomyces cerevisiae
tcagttttgtatctaactgcagagtaaagtcgtgttttgcttagttaacttatatacaagtcaaagcaaaaaagatgtccgatatcaacgaaaaactcccagagttactacaagacgctgtcttgaaagcatctgttcctattccagatgacttcgttaaggttcaaggtattgattactcaaagcctgaagccactaatatgagagcaactgatttaattgaagctatgaagaccatgggtttccaagctagttctgttggtactgcctgtgagattattgatagtatgagatcatggagaggtaagcatattgacgaattggatgaccatgaaaagaaaggttgcttcgatgaggaagggtaccaaaagactactatcttcatgggttatacttctaacttgatcagttccggtgtacgtgaaactttacgttatttggtgcaacacaaaatggttgatgctgtcgttacttctgctggtggtgtggaagaagatttgatcaaatgtcttgctccaacttacttgggtgaatttgctttgaaaggtaaatctttgcgtgaccaaggtatgaatcgtattggtaacttgcttgttccaaatgataactactgtaagtttgaagaatggattgtcccaattttggataagatgttggaagaacaagatgaatacgtaaagaaacatggcgctgactgtttagaggctaaccaagacgtggattcaccaatctggaccccatctaagatgatagatcgttttggtaaggaaatcaacgacgaatcctccgtattgtactgggcccacaagaataaaattccaatcttttgtccatctttgactgatggttcaatcggtgacatgttgtttttccatacttttaaagcatctccaaaacaactaagagttgacattgtaggagatatccgcaaaatcaattcaatgtccatggccgcttacagagccggtatgatcatcttgggtggtggtttgatcaagcaccacattgccaatgcttgtttgatgagaaatggtgctgattatgccgtttacattaacactggtcaagaatacgatggttctgatgcaggtgcaagacctgacgaagctgtgtcttggggtaagatcaaggctgaagccaaatccgtcaaactttttgctgatgtcaccactgttcttccattgattgttgctgctacctttgccagtggtaaaccaatcaaaaaagttaagaattgatgagagaattttgagatgaaaaaaaaaaaaatgaatctgtactatttctttttttagtgcaaaagttttgttttaatatagagataaataaaaaaatgaacatattactataatatcaacaaaatatgatgtaatgtctg

SEQ ID NO: 1430 - DNA, 2079 bp, Saccharomyces cerevisiae
atgaaaatcgcactgccagtattccaaaaatttaatagattgatcagttcgtgcaagatgtcaggagtgttcccatacaacccacccgtgaatcgccaaatgcgagaattggataggtcatttttcatcaccaagataccaatgtgtgcagtcaagttccccgaacccaaaaatatcagtgtgttttctaaaaacttcaaaaattgcatcttgagggtgccccgtatcccgcacgttgttaagttaaactcatccaagccaaaggacgaactgacaagtgtacagaacaagaaactaaagactgcagatggcaataataccccagtcacgaaaggtgtgctgctacacgaatccatccacagcgtggaggatgcgtatggaaaattgcctgaggacgccttggcgtttcttaaggaaaacagtgcggaaattgtaccacacgaatacgtgctcgattatgatttctggaaagctgaggagattcttcgagccgtgctgcccgagcaattcctggaagaggttccaacgggttttacaatcacaggccacattgcccacttgaacttgcgcaccgagttcaaaccattcgactcgctcatcggacaagtcatccttgacaagaacaacaaaatcgaatgtgtcgtggacaaagtcagctccattgccacacagttcaggacttttcctatgaaagtcattgctgggaaaagcgatagtctagtggtagagcagaaggaatccaactgcactttcaaattcgactttagcaaggtgtactggaactcccgattgcacacagagcatgaaagactcgtcaaacagtacttccagcctggccaagtagtctgtgatgttttcgccggcgtggggccctttgctgtacctgcgggcaagaaggatgtcatcgttttggctaacgacttgaatcctgagagttacaaatacttgaaggagaacatcgcattgaacaaagtggccaagaccgtcaaatccttcaacatggatggcgctgacttcatccgccagtcgccacagttattacaacagtggattcaagatgaagagggcggcaagatcacgatccctctgcctttgaagaaacgacacagatcccagcaacacaatgaccaacaaccgccacaaccacgcaccaaagagctgatcattccgtcacatattagccactatgtcatgaatctaccagacagcgccatttctttcttaggaaacttccgtggcatctttgcagcacacactaaaggcgccactgataccatccaaatgccatgggtgcacgtgcactgttttgagaagtacccgcctggcgaccaagtcactgaggacgagttgcatgcacgcgttcatgcccgtattattgccgcgctcaaggtcactgcagacgatcttccgttgaatgccgtttcgttgcatttggtgcgcaaagttgcacccaccaaaccgatgtattgcgcgagtttccaacttccagctaacgtatgaagcgatctgctcttgcagtttgccgtgggaggaaaaaggcaaaaaggcgaccattagaaaaagaaacgagatgactaacacctttatcttcgagaaggcgcggggctgacagggcactgcgcgatgcgtcatactacttgaatacaacacaacccgtcttctgttatataaagaagaagaataaattaggaagtagggggaaaaggcttatagtgtaaaagtattttagtttgttgttgtaatttcgtcttttctctcactaccgtaacaacgtggtagttggcagaatatatatattcttggcaacctagttgttactcaaatagaagaaaaagcaagtttctccctatttatttggttctccctattcactcgcatttagcattggcatacttttttatatttttttcgttttgtttttggttttcctaggttcgatatagttataacaatgcactcttccgtcttctaagttttccttttattaaggatgcgcgcaatagaagacacaggcaataatagaatttattagggtattattgtaaggataggcattacaaagataaaataagtttttaa

SEQ ID NO: 1431 - DNA, 808 bp, Saccharomyces cerevisiae
taaaataagtttttaaaaaaaaaaaaaaaaaaaaaaaaaaaaagaaaaataaaaataaatatggatggaaatcataggtttactccagattccaaagaatttaatactgttgtaaaaagtaaagagtcttccactggcagaaatccgtatcagactccgcccttagagcacaacggtactcatcatcagacaaattacagcagaaagaaaacaaatctagcaattatcatatcgaatttcttgtccgagatcagtcggcctctttcaaatggcaaaatcaataattctacccacaacattttaaaatttctaaatgaagtgcttaagagatcgaagtgcagtaaagaaaacgctgtgttagccactttctactttcaaaagattcaccaatccagaggtgtccgggatgagtcctcattgcctgaattctcgcactgttcccgcagaatttttctctgctgtcttattctatcgcacaaatttttgaacgacaacacttactcgatgaaaaattggcaaattataagtgggctccatgcaaaggatctatctctaatggaaagatggtgtctgggtaagctgaattatgagctggccattccatatgacgagtttttgctatgggaaacgaacactttaatgaaagcgaaattgcgcgtcggaactcccgccaacgctccggtgaagagacccagagaatcagacaatgattatgatgcaaattcttggaaacagattaaatcttgttaatttcgaaaatgttatatatctttcattcatcaataaattaactttttttttttttttt

SEQ ID NO: 1432 - DNA, 2373 bp, Saccharomyces cerevisiae
tgagcacaagcctctccagtaatgtactgctgtgcccaataaccttaccaataatcgtcgcccacaaagaaagtacaaaacagatgacagaattttattctgacacaatcggtctaccaaagacagatccacgtctttggagactgagaactgatgagctaggccgagaaagctgggaatatttaacccctcagcaagccgcaaacgacccaccatccactttcacgcagtggcttcttcaagatcccaaatttcctcaacctcatccagaaagaaataagcattcaccagatttttcagccttcgatgcgtgtcataatggtgcatcttttttcaaactgcttcaagagcctgactcaggtatttttccgtgtcaatataaaggacccatgttcatgacaatcggttacgtagccgtaaactatatcgccggtattgaaattcctgagcatgagagaatagaattaattagatacatcgtcaatacagcacatccggttgatggtggctggggtctacattctgttgacaaatccaccgtgtttggtacagtattgaactatgtaatcttacgtttattgggtctacccaaggaccacccggtttgcgccaaggcaagaagcacattgttaaggttaggcggtgctattggatcccctcactggggaaaaatttggctaagtgcactaaacttgtataaatgggaaggtgtgaaccctgcccctcctgaaacttggttacttccatattcactgcccatgcatccggggagatggtgggttcatactagaggtgtttacattccggtcagttacctgtcattggtcaaattttcttgcccaatgactcctcttcttgaagaactgaggaatgaaatttacactaaaccgtttgacaagattaacttctccaagaacaggaataccgtatgtggagtagacctatattacccccattctactactttgaatattgcgaacagccttgtagtattttacgaaaaatacctaagaaaccggttcatttactctctatccaagaagaaggtttatgatctaatcaaaacggagttacagaatactgattccttgtgtatagcacctgttaaccaggcgttttgcgcacttgtcactcttattgaagaaggggtagactcggaagcgttccagcgtctccaatataggttcaaggatgcattgttccatggtccacagggtatgaccattatgggaacaaatggtgtgcaaacctgggattgtgcgtttgccattcaatactttttcgtcgcaggcctcgcagaaagacctgaattctataacacaattgtctctgcctataaattcttgtgtcatgctcaatttgacaccgagtgcgttccaggtagttatagggataagagaaagggggcttggggcttctcaacaaaaacacagggctatacagtggcagattgcactgcagaagcaattaaagccatcatcatggtgaaaaactctcccgtctttagtgaagtacaccatatgattagcagtgaacgtttatttgaaggcattgatgtgttattgaacctacaaaacatcggatcttttgaatatggttcctttgcaacctatgaaaaaatcaaggccccactagcaatggaaaccttgaatcctgctgaagtttttggtgacataatggtagaatacccatacgtggaatgtactgattcatccgttctggggttgacatattttcacaagtacttcgactataggaaagaggaaatacgtacacgcatcagaatcgccatcgaattcataaaaaaatctcaattaccagatggaagttggtatggaagctggggtatttgttttacatatgccggtatgtttgcattggaggcattacacaccgtgggggagacctatgagaattcctcaacggtaagaaaaggttgcgacttcttggtcagtaaacagatgaaggatggcggttggggggaatcaatgaagtccagtgaattacatagttatgtggatagtgaaaaatcgctagtcgttcaaaccgcatgggcgctaattgcacttcttttcgctgaatatcctaataaagaagtcatcgaccgcggtattgaccttttaaaaaatagacaagaagaatccggggaatggaaatttgaaagtgtagaaggtgttttcaaccactcttgtgcaattgaatacccaagttatcgattcttattccctattaaggcattaggtatgtacagcagggcatatgaaacacatacgctttaagttttatttataagtgttgttagaggctgcaacaattagaaactagtgcaaaactagtatatttatttgtatatgtagtagtaaaataataggt

SEQ ID NO: 1433 - DNA, 396 bp, Saccharomyces cerevisiae
ttgacggaaaagagaaatactttcaatagaccaatacataacaaatccttttgaacaagatgcatttgatgtacactttgggcccagacggcaagagaatctatacattgaaaaaggtcaccgaaagtggtgaaatcacgaagtctgctcacccagctagattttctccagacgacaaatattcaagacaaagagtaactttgaagaagagatttggtttggtaccaggccaatagatttgggtagtttaagggaatattgtatagtacgtgattctggctagtatgaaaatgcagtgaattttcttgtttcattttcaattttctagacctacataaatttgataagtttttaggtgataaatactaattataattgatcgattatatgttttaa

SEQ ID NO: 1434 - DNA, 3217 bp, Saccharomyces cerevisiae
gtataactcgtgaaagtttcgacgtcctatttgctggagagtagtaaaacgagcttgaatagcagcctgcgaatcgaattatggaaacaattgatatacaaaatcgatcatttgttgttcgttgggtaaaatgtggccgtggcgatgtaatcaattatcagatcaagccattgaagaaatctattgaagtcggcatatacaaaaagttgaaatccagtgtagatgaccatgcttccgcagttcacattgcacctgacactaaaacattgctagactatactacgaaatctctattacataagggaagttcgagtaatattgaggagcatcacaggcgttcctcacagcactctcatagttcgagcaatggatcggataataagaggaaagagagatcatattcttcactgtccattagcggcatacagcagcaatcccaggaaatacccctacgtgaaaaactctctgcgtcaggattcactttggtcaagagggtcggcaacgtttccggtaacactatggtccaaggtgatcttgaagtgaaagatacagactactattatgcatttatactggacaactcgtcttccaagaatgcaaaaaagaaaattctttttaacgcaagtgtgataaacggcgataatcaatcgatgataagcacaagatccacccctcccgcaaggcctacagctttaagcagaacatctactcaacaggatatgttatttagagtaggacaaggtcgttacttgcaaggctacctgctgaaaaaaaggagaaagagactacaaggttttaagaaaaggtttttcaccttggactttcgatatggaaccctatcgtactatttaaacgaccataatcaaacttgtaggggtgaaattgtcataagcttgtcatctgttagtgccaataagaaggacaaaataatcataattgattctggtatggaagtttgggtcttgaaggctacaactaaggaaaattggcagtcgtgggtcgatgcgttacaaacttgttttgacgatcagttcgaagataaggacacgtccactttggaagaaaatcccgacattcttgacgatgacaaggaagtaattaataaaagctcacctcaagaccacgaccacctcacgcccacggctacgaccaaaagtgcactatcacatagacagcatactcagaaagacatggatgacatatatgtcccattgcccagcgaatcttacgctactttctccatgaatctacgtttgattcaacaacgactggagcagtgtaaaaaagactcgttatcttataaaccaactactttacatcaaagatcggaggggctaaatggaacacattcgtcatcttccgtctttaccaataatagagtgtcttcattcaatcattcttcttctggtatgacgtcatctgattctttagcctctgaagaggttccttccaacaaaacatatattgagcatgctttatataaccaattggcagatcttgaagtatttgttagccggttcgttacacagggagaggttttattcaaggaccaccagatcctgtgcaagaaagcaaaagacacgagagtttctttaacttcatatcttagcgagaatgatgaattttttgatgcagaagaggaaatcagtcggggagtcattatattacctgacacagaagatgatattaataatatagtcgaggaaactccccttcttggtaaaagtgaccaaaatgagttcacaaaagaggtccaattgtcgggatccgaacagatagcttcatcaagtgtggagagctatacaactaacgatgaaaatcatagccgtaaacacctcaaaaatcgtcacaaaaatcgtcgccgtggccaccctcatcatcaaaaaaccaaaagcgcccaatcctcaacagaaacatttacaagtaaggatttgtttgctctttcctatccaaagagtgttacacgccgtaatgacatacctgaagctgcagcttctccgccaagcctattatcttttttgagaaagaatgtaggcaaagatctgagctctattgccatgccagtaacctcaaatgagcctatttctattttgcagttgatatcagaaacatttgagtatgctccacttttaacgaaggctacccaacgtcctgatcctataacctttgtttctgcatttgctatttcctttctttccatatatagggataaaacaagaacgctaagaaagccttttaatcctttactggctgaaacatttgaacttatacgagaagatatggggtttaggcttatatcggaaaaggtctcacatcgtcctccagtatttgccttctttgcagagcatctcgactgggagtgtagttacactgtaacgccatcgcaaaagttttggggtaagtctattgaattgaataacgaaggtatactgagattgaagtttaagacaactggagaactatttgaatggacgcaaccaacaactattttaaaaaatttgatagcgggtgagagatatatggagcctgtcaacgaattcgaagtacattcttcgaagggagacaaatcacacatcctgttcgataaggcaggtatgtttagtggaagatctgaaggatttaaggtttcgataatcccaccaccttcgagcaatcgcaagaaggaaactctagctggtaaatggacacagagtttagctaatgaaactacacatgaaactatatgggaagtaggtgatttagttagcaatccgaagaagaaatatggctttactaaattcaccgcaaatttgaatgagataactgaaattgaaaagggcaatttaccacctacggactcaagattaagaccagatattagagcttacgaggagggaaatgttgataaggcggaagagtggaagctgaaattggaacaacttcaacgtgaaagacgtaataaagggcaagatgtggagcctaaatatttcgaaaaagtatctaagaatgaatggaaatacataactggaccgaagagttattgggaaagaagaaagaagcatgattggtctgatatttctcaactctggtgaatgccttgatgacatcaagtgaacttttttcccccctttgtactctatttattttccatctttaatgatcatccacacaaattacttgtatatgcgttcatgtatagtatactatatacaacatgaaggactttataaattcttga

SEQ ID NO: 1435 - DNA, 2282 bp, Saccharomyces cerevisiae
tctttttttgactccctgccagtaatgtcacatcttatcactttagctacatgcaacttgaatcaatgggccctagattttgaaggtaatagagaccgtatcctacagtccattaagattgccaaagagaggggtgccaggttacgtgtcggcccagaactggaaataactggctacggatgtttagatcattttttagaaaatgacgtttgccttcattcatgggaaatgtatgctcaaatcattaagaataaagaaacccatggattaatacttgacattggtatgcccgttctacacaagaatgttcgttataattgtcgtttgttatccttggatggtgagatattgttcataagacctaagatttggttagctaatgatggtaactatagggaaatgagatttttcacaccttggatgaaacctggcgtggtggaggactttatccttccacctgagattcagaaagttaccggccagagacttgtgccatttggggacgctgtgataaattcattggatacatgcattggtacagaaacttgtgaagaattgtttacacctcaatccccccacatcgccatgtctttagatggtgtggaaatcatgacaaactcatctggttctcatcatgaactgcgtaagttaaataaaaggttagacctaattttaaatgccactaaacgttgtggtggtgtttacttgtatgcaaatcaaagaggttgtgatggtgacagattatattatgatggctgtgcactaattgccatcaatggtacaattgtagcccaaggttcacaattttcgctagatgatgtggaagtagttactgctactgtggacctagaagaggtgaggagttatcgtgcagctgtcatgtctcgtggcctacaagcctccttggcagaaataaagttcaagcgtattgatattcctgtagaattggctttaatgacctccagatttgatcctacagtgtgtccaacaaaagtccgcgagcctttctatcactctcctgaggaagaaattgcactgggacctgcttgctggatgtgggattatttaagacgttgtaacggaacagggtttttccttcccttatctgggggcattgactcttgtgcaactgcaatgattgtccactctatgtgccgtttagtgaccgacgctgctcaaaatggaaatgagcaagttatcaaagacgttcgtaagataacacgtagcggcgatgattggattccagacagtccacaggatctagcctcaaaaatatttcactcctgtttcatgggtacggaaaattcatccaaggagacaagaaacagagcaaaggacctttccaatgcaattggatcttaccacgtggatttaaagatggactcattggtatccagtgtggtgtccttattcgaagtagccactggcaaaaaaccaatatacaaaatatttgggggatctcaaatcgagaacttggctttacaaaacatccaggcgcgtctaagaatggttctttcttatctttttgcgcaactgttgccgtgggttcgtggtatcccaaactcgggtggattgttagtacttggtagcgcaaatgttgatgagtgcttacgtgggtatctaacaaaatatgactgctcctccgcagatatcaaccctattgggggtatttcaaaaactgacttgaaaagattcattgcctacgcatcaaaacaatataacatgccaatcttgaatgactttttaaacgctacaccaactgcagaattagaacctatgactaaagattacgttcaatcggatgagatagatatggggatgacgtatgaagaattgggcgtgtttggttacctaagaaaggttgaaaaatgtggtccttattctatgttcttaaaacttcttcatcaatggtccccaaagttaacacctcgtcaaatatctgaaaaggtgaaaagatttttcttcttctatgccatcaacagacacaagcaaactgttttaactcctagttatcatgctgaacagtattcaccagaagacaacagatttgacttacgtcctttcttaatcaacccaagatttccatgggcttcaagaaaaattgatgaagttgtcgagcagtgtgaagcacataaaggctcaacgcttgacattatgtctattgattagcacagaagaagtgctcacagcaaaataagacttttccacgagttcatatattctgttatttattctatcataaataaagatataaaagtgatatttaacccttatgtattttg

SEQ ID NO: 1436 - DNA, 1176 bp, Saccharomyces cerevisiae
agaaaacaaacgacaaagccaccaaaaatgtttgcaaacgttggatttagaactttgagggtctcgagaggtcccctttatggatcctgcagtcaaatcatcagcttttccaagaggactttttactcaagtgccaagagtgggtatcaatcgaacaacagtcatggtgatgcgtatagttcaggtagccaatcaggcccgttcacctataaaaccgcggtagctttccaaccaaaagacagagacgatctgatataccaaaaactaaaggattctattagatcacctacaggagaagacaactattttgttacatcaaacaacgttcacgatatttttgccggtgtcgcagacggtgttggaggatgggctgagcatgggtatgactccagcgccatctcaagagaattgtgtaaaaaaatggacgaaataagcactgctttagcagaaaattcatccaaagaaacgcttttaacgccaaagaaaattattggtgctgcatacgcaaaaattagggatgagaaagtagtgaaggttggtgggacaacagccattgtggctcacttcccatctaatggaaaattggaagttgccaacttgggtgattcttggtgtggagtcttcagagattctaaacttgtattccagacaaagtttcaaactgttggatttaatgctccttaccaattgtcaatcattccagaagaaatgttgaaagaggccgaaagaaggggtagcaagtatattttaaacacccccagagacgctgatgaatatagcttccaattgaaaaaaaaggatattattatattggctaccgatggtgtaaccgataatattgccacagatgatattgagctttttctgaaggataacgctgcgagaacaaacgatgagttacagctattatcccagaagtttgtggacaatgttgtcagtttaagcaaggaccccaattaccccagtgtttttgcgcaagagatttctaagctaactggcaaaaactacagcggtggtaaagaagacgatataactgttgttgtcgtgagagttgactaacactccgctctttaatctcctggaaagcagtgtaaataaaaatacagcgtcataaacggtactatataaacacgtagccatttaatagagccaaacataagtgggcatatatagtaa

SEQ ID NO: 1437 - DNA, 1857 bp, Saccharomyces cerevisiae
tagaaaggactattgagtgtagactaagtggtggacgggatggaggcacttatcgtatttatagtgctttccgtatccggagcatttgcttacaaatgctcctatgaaaggctctggtttaaagtagggtctttgtttgacattatatcaacttcctcgaagaaaaatgtcattccgttggcaagcaaaatggaagttggctcgaatgaggatgtgtctagtatgggtaatttcataaataaattctacacagagtattctttaccctcacataaggtactgcaatcactgcgagtccttttttcattagcaatgatgacgtatacagtaaccatagagattattctatggcagattaaggttgctggaatggacaaggaagttactttcataacgacttgggtgtggcctctgactgcaatcatgctatccttcatactaattttatttcagccctttttcattataatatcgttactgaataaattctacaatgacaagttcgatatcgataggttgataatagtgacatgcataatcttgtccacacttattgcgctgttaagttacataaatattggaccgttccagtacacaaaaaatattctaactagattgtccatcggaggcgtcacagtcatggcttccctatctgggttagccactgtttctagtttatactacaactttttagtcatctggcacaagtttcgtaatacaccaatgtcagaccccagttttagaaacatcaacaacagcaacaataacagtaaatctctcttatggacaacagacgcctatatagaggaaaaaatccaagattatgaacacaacattgaacaaaatgtacaaatattaagaagtttagaagaagaggtcggagaaaactcaacttttaaagcagagttgatggaaaaaatcgcctggtatcaactggagcttgggaaattggaagcattattacaacagtcccctcaggtacgcacttttaagaaagcttttgaagtcgggtttatcatatactgtcttcataaactaataataactttcctgaaaagaatcccctatatcatataccactcgctcaaatatccagatgactacgattatgaaaattttagtgaaaatgcagcatccgatcctttagccattacgatagcaaatattttggatttttcgtttttcaggttcaattaccagcacgatctcgattcgttaacaaaacagatatcgttatttttgtcaatttctctctttctttgctgtctttctgctgtcaataccaccatctcctacgttgtgacccttttgcccataaagttccagattcttgcacttttcgccatgcagaatgatgacactgctaatgtacttccagagtacaccaataactcttcctataagggaaaaaagagaaactattctcaggaacaaaaaggaatatctttgataaaaaatctggtggtgtcagagttgactggcgtctacgttttggctacaacgctaatggttaggtcccatctcccttttgaagtatcacaaagattaaaggagctattgggtggaaagtttaccgtcccaaacattgtcatagattcttggtttgatgaagtctacgcttttgcatgtgtgtttacctttatttgcataagaattgcagaacgaaagctttccaccaaaaaagtcagtgttgaataactggagtagtatgtcgatgttcgatgtttatgagatatgtatttataaaattaaatgtctgtcgggtagtttatgtagggatgagaaaagtagtataggttcatgaagaagtacaactttttttcatttatgcaagggcgtaaaaattatggatggtta

SEQ ID NO: 1438 - DNA, 1086 bp, Saccharomyces cerevisiae
tcgtgcacaatggtaagttcattcagtgttcccatgccagtaaaacggatatttgacacatttccgttacaaacatatgctgcgcagactgacaaggacgaggccgttgcattagaaatacagcggaggtcctacacattcacagaacgcggtggtggaagctctgagttgactgtggaggggacgtacaagctaggtgtttacaacgtttttttggaggcaaatacaggggcggcattggccacagatccatggtgtctgtttgttcagcttgcgctgtgtcaaaagaatggtctagtcttacccacgcactcgcaggaacaaaccccatcgcatacctgtaaccatgaaatgctcgttctgtcccgtctttctaaccccgatgaggccctacctattctagttgagggttacaagaagagaattataagatccaccgtggcaatcagcgaaattatgaggtctcggatacttgatgatgctgagcagttgatgtactatacgttgctggataccgtgctgtacgattgttggatcacgcaaataattttctgtgcctcagatgcgcaattcatggaattgtactcttgccagaagttaagtggttcgatagtcactccattggacgtagaaaactctttattacagaagttgtccgcaaagagtttgaagatatccctaacaaagcggaacaagttccagttccgccatcgagaaatcgtcaagagtatgcaaggagtttatcacaaccatcacaactccgttaatcaagagcaggtcttgaacgttttgttcgagaatagcaagcaagttcttttaggtttaaaagatatgttgaaaagcgacgggcaacccacttacttacatctgaaaattgcaagttacattctttgtataacgaacgttaaggaacccataaagctaaagacatttgttgaaaacgaatgtaaagaattggtccagtttgcacaagacaccctgaagaacttcgttcagtaatcactttcaagctgtagtatgtaaacgatatagatgaagttttcgtgtgtataaatatatgaactctagagtgttgcataatttgaa

SEQ ID NO: 1439 - DNA, 2108 bp, Saccharomyces cerevisiae
gttggtggtgaaattgtgtgtgcgtacatccttatatcagagctttcctttagtgacaacatttaaatcgacgtgaccttattcgggtagtcaaacaccgaaccatattctttgcccttaggttactttcccttcattttatcagcttagtcgattaagttcgtgtctatatcccgtcaaaagttcctaatacattgcgggtacaaatgtcctataaacaaacaacatattatcctagcaggggtaatctggtaagaaacgactcatctccgtacactaatactatttcctcagaaaccaacaatagcagtacaagcgtattgagtcttcaaggcgcatctaacgtgagtttagggaccactggtaaccaattgtacatgggcgacttggatcctacatgggataagaataccgttaggcaaatttgggcatctctgggagaagcgaatattaatgtccggatgatgtggaataatacgcttaataatgggtcgagatcatcaatgggtccaaagaataatcaaggatattgctttgttgattttccctcatctactcatgcagcaaatgcacttttaaagaatggtatgcttatacccaattttccaaataaaaaattgaaattaaactgggctacatcctcatattcaaacagcaacaattctcttaacaacgtgaagagtggtaacaactgttctatatttgttggagacttagcaccaaatgttacagagtctcaattatttgaacttttcattaacagatatgcttctacttctcatgccaaaattgtgcacgaccaggttaccgggatgtctaagggctacggttttgtaaagtttaccaattctgatgaacaacagttagctctgtcagaaatgcaaggcgtatttttaaatggtagagccataaaagtaggacccacatctggtcagcagcagcatgtcagcggtaacaacgattacaaccgtagttcttcgtcactaaacaacgaaaatgtagactcgagatttctttccaagggtcaatcatttttaagcaatggaaataataacatgggctttaagagaaaccatatgtctcaattcatttatccagtccaacagcagccgtctttaaaccacttcactgatccgaataacaccactgtgtttatcggaggattgtcatcactggtgactgaagacgaattacgtgcttatttccaaccttttggcacgatagtctatgtcaaaattccggtaggcaaatgttgcgggtttgtccagtatgttgatcggctatcggctgaggctgccattgctgggatgcaagggttccccattgcaaattcaagagttagactgtcttggggcaggtctgctaagcaaacagcgttgcttcagcaagccatgttaagtaactctttacaggttcaacaacagcaaccaggtttacagcaacctaactacggatacattccatccagtacgtgtgaagcacctgttctgccagataataatgtttcatccacgatgcttcctggatgtcaaattctgaattattctaatccatacgctaatgcgaatggattaggctcgaacaatttcagtttctacagtaataataatgctacaaatacgcaagctactagtttactggctgacactagctctatggacctctcaggcacgggtggccaacaagttatcatgcaaggaagcgaagcggttgttaacagcactaatgcaatgttaaaccgtttggaacaaggcagtaatggttttatgtttgcttgagccacacgtgtatataaaaatgtttgttttccttttggccctttttctttcttggtattttctttacttcagtgttaaattgtatttggtcttaggctgacggtgatataacagcgctttattttctttttttcattgctttttatcgttttcaagattccatgtccttttattaagtcttttttgtatcgttatagttgcgtttttccttttgattttcatttctttcaaggttattgttattcttaattcaattcaagattgtacgcttttaagcatgtttatgattttcctttattacttccatttaccttctttccatcactactc

SEQ ID NO: 1440 - DNA, 589 bp, Saccharomyces cerevisiae
aacaaattcatactttgaacaagctgataaaaataagaaaaccatcgcatacacaaaataaaatcaacatgtctactgtaaccaaatacttttacaagggtgaaaatacagatttgattgtcttcgctgcatccgaagagcttgtagacgaatatttgaaaaatccatcaattggtaagctatctgaagttgtcgaactcttcgaagttttcactcctcaggacggtaggggtgccgagggtgagttgggcgctgcctccaaggcccaagtggaaaatgagttcggtaagggcaagaagatcgaagaagttatcgatttgatattgagaaatggtaagccaaactctaccacctctagtctcaaaaccaaagggggtaacgccggaaccaaagcctacaattgagtagcttttccttctgtctggacagcctgcattgaaatatgcaataagttaaattggcgtgctgccctgtcataacgcatgcattcttcttttacagtagtagaaagaacaaaaaggtgtatatttcaatatacatatttacgatctatataacgttgtatacatttaattcagtgcatttttca

SEQ ID NO: 1441 - DNA, 1013 bp, Saccharomyces cerevisiae
agcaggcttaatatattgaaatactaaaaaatggctctcggtaatgagataaacatcacaaacaagctaaagaggcaagaaatttttgctgatataaaacatgaaaaaaataaagagcgccataccatgagaagaaagagagctaaggaagagagagagaatccggagctgcgggagcagagattaaaagagaacgtaacacagacgatagagaacactagagtgtacgatgagaccattaacaaggaagtggagggagatgaagacgatttgatgagatacttcaacagcaattctaatgagccaccaaagatctttctgaccacaaatgtaaacgctaagaagagcgcttatgaatttgctaacattttaatcgaaattttaccaaacgtcacatttgtgaaaagaaaatttggctacaaattgaaggaaatatctgatatttgtataaaaaggaatttcactgacatcgtgataatcaacgaggacaagaaaaaggttactggcctaacattcatacatctgccagagggcccaactttttattttaaattatcatcatttgttgaagtgaagaaaattgtcggtcatggtagaccaactagccatattccagaattgattctaaataatttccagaccagattgggtcaaacagtaggtaggttgtttcagtccattttacctcagaatcctgatattgaaggtcgacaagttatcaccctacataatcaaagagattacattttcttcagaaggcatcggtatgtcttcaaagataatgaaagggttggtttgcaagaactgggtccacaatttaccctcaagttgaaaagattgcaaaggggtattaaggaagaaactgaatgggagcataaacctgagatggacaaagaaaagaaaaagttttatttatagtgttccattcgtaaactttgtatggatataatattaagacaaccgtaagaaccgtggtcgtttgtttaactacggcggcttctggtattactgaa

SEQ ID NO: 1442 - DNA, 2677 bp, Saccharomyces cerevisiae
gtgatcgtgtttatactttttcgactcaaatttgtccttatctttagttaatacggtctaacttgccacgctactcaagaaatgacctcgattcaggagcgaggcacaagcgctcatctgcattcgcttaaagaaggtgaggctagtgatcgttccagcgagatgcttcctaaacaaagaagtatcataggatcccacgtgcaacgtccaccgtctcaaacaactttaggaaggtcaagggctggaagcaatacaatgaataaagtttcaggcttagatattgctcgaagaccaagtgagaatttattatcaaacatgaactgtagcgacaacggcaatgggggaaatatgctaaattcattcgttaactcggctttaccaccgccaaaagtcaaccctgctcaaacaagacgtgaacgtcccgcttcaaatagctcaataggtaccaagactaccgaggtattttcatccacttctgcatcttcctccttgggagataccagcgatgagggagaaggcagtgatgccgacaaatctaaaataaatacttttcccagcatattgatggaaaaggctactcaaggtagaggcgctgatggaaatggaatgagaagcgcaagcaataataccattgtggaagcaactacggacggttccaaaatggcactgcaaaaaagcatgtcgtttgatgatacagccgcagagaaaactatgaataaatctagacattcttaccaagaacagttctcctcgaagaaaagccagtcatctttactgaacagcaagcaaagatcacgtgctaaatcgcaaacatgctcgtctacgggttataacaacagcagcattctgaaaacgtttggcataagctccaaaatttctaattcaagtgatcggatagaggcttcgtcattagaatttaacgttccatctcagaaacctttgaattgcaagccattaactccgtctcagaaatacagacttcgtaaagagcaatcggagatgaatttaagaaatacaatcaaaagaaaagagaaattttatgatagtcaagaacaaattcttgagttacaagagggagacgttgatgattcgttgatttggaacgttcctatggcatcattatctactaattcatttctagcgtctgctaagcccgatgatatgaataacttggctggcaagaatgacttatcagaatataccggaggtttggtaaatgataactctgaaatttcttatacaaaacaaaatcataggtactcgaacatctcttttgcgagtacaacatcaaacgcctcattattggactttaatgagatgcctacgtctccgattccaggtttgaacaaagtaactgattttcagttcattcaagacacaaccaagagtctagcctctgtttatttgcattcttccaataggctttcaagatctaagctgtccgaaagaacaaagtcttccgatttcttgccaattgaactaaaagaagctcaaaatcaaggcatggaagatttgatacttgtctcggagaacaaactagatgtggtcagccattcaagaccgagttggttaccacccaaggatcgccaggaaaaaaagcttcatgaaaggcaaattaacaaaagcatgagtgttgcttcccttgaccaactaggaaaaaataaagacagagaagaaaagttgattagagatgaaacaaataggcaaaaatatgtgttattattggacagagatataactagaaactcctccttacaaagcctaagtaaaatggtttgggacactccatttagtgacgaaactaggtcaacaatttacagcgaaattttacagagcaagactaggtttattaccaaaaactatattcaaccatttcatgagctacaggagcttttaacaaaaatgggagactttcctaaaaacaaggaaattgaaatatcgcagctaatcgaaacaagtttgaggcgaaaagtgagcggtttacatgatatatgtcctgatttgatgcttttattgaagataaaatctatctcatcacagggtatagtcaccggtgatgaactccttttccatcatttcttggtgagtgaatcatttcagaacctggggctaaacgagatttggaatattgttaatttagtacaaatgacgtgttttaatgatctttgtaaagaaaagttcgatgcaaaggttttagaacgtaagggtgtcgtagccggttatttatcgcaaaacgaggagttcaaggatgaatttaatacggagtgtataaactctaccacctggtggaacatcctagaacgtattgatcataagctttttatgtggatcatggatattatagtagtcaacaattcccagagctacaaaaatagcccaatcaacgaagatgagtttgttaacaaggattgggaatattaccgctcgaagaaagtggtaataaactacaagatcttgatttcatttgcattaaatgtattgttaaattaccactttggattcactgatttaagaagtctttgtaacgtgaatgaccagagattttgcattccagtattcatcaatgatgaattcgtagacgcagatactgtaaatgccgtgttcatcaagaaatgggcgcattactacaagaagttttgatattttttgtaactgtaatttcactcatgcacaagaa

SEQ ID NO: 1443 - DNA, 1212 bp, Saccharomyces cerevisiae
gaagcaaatagttgtcagtgcaatccttcaagacgattgggaaaatactgtaatataaatcgtaaaggaaaattggaaattttttaaagatgtcttcactggttactcttaataacggtctgaaaatgcccctagtcggcttagggtgctggaaaattgacaaaaaagtctgtgcgaatcaaatttatgaagctatcaaattaggctaccgtttattcgatggtgcttgcgactacggcaacgaaaaggaagttggtgaaggtatcaggaaagccatctccgaaggtcttgtttctagaaaggatatatttgttgtttcaaagttatggaacaattttcaccatcctgatcatgtaaaattagctttaaagaagaccttaagcgatatgggacttgattatttagacctgtattatattcacttcccaatcgccttcaaatatgttccatttgaagagaaataccctccaggattctatacgggcgcagatgacgagaagaaaggtcacatcaccgaagcacatgtaccaatcatagatacgtaccgggctctggaagaatgtgttgatgaaggcttgattaagtctattggtgtttccaactttcagggaagcttgattcaagatttattacgtggttgtagaatcaagcccgtggctttgcaaattgaacaccatccttatttgactcaagaacacctagttgagttttgtaaattacacgatatccaagtagttgcttactcctccttcggtcctcaatcattcattgagatggacttacagttggcaaaaaccacgccaactctgttcgagaatgatgtaatcaagaaggtctcacaaaaccatccaggcagtaccacttcccaagtattgcttagatgggcaactcagagaggcattgccgtcattccaaaatcttccaagaaggaaaggttacttggcaacctagaaatcgaaaaaaagttcactttaacggagcaagaattgaaggatatttctgcactaaatgccaacatcagatttaatgatccatggacctggttggatggtaaattccccacttttgcctgatccagccagtaaaatccatactcaacgacgatatgaacaaatttccctcattccgatgctgtatatgtgtataaatttttacatgctcttctgtttagacacagaacagctttaaataaaatgttggatatactttttc

SEQ ID NO: 1444 - DNA, 1332 bp, Saccharomyces cerevisiae
actatcccatttaactcgggcgcgttgttaattaatcactcgatggggaatgccttgagctgaccgcaatgaaaacttttaggggatcgtccaacattaaaggaagaacgaaacggactccacagtttctaatataaataaacaatgataaaacatatagtttcgccattcaggacgaattttgttggcatcagcaagtccgtgctgtcaaggatgattcatcacaaggttacaatcataggttctggccccgctgcccacaccgctgctatatacttggcaagagcagagatgaagcccacattatatgagggaatgatggccaacggaattgctgctggtggccaattgacaacaaccaccgatatcgaaaatttcccagggtttcctgaatcgttgagtggcagtgaactgatggagaggatgaggaaacaatctgccaagtttggcactaacataattaccgagactgtctctaaagtcgatttatcttcaaaaccattcagattatggaccgaatttaatgaggatgcagagcctgtgaccactgatgctataatcttggccacgggtgcttccgctaagagaatgcatttaccaggggaggaaacctactggcagcagggaatatctgcctgtgctgtatgtgatggtgcagtccctatctttagaaacaagccattggccgttattggtggtggtgactctgcgtgtgaggaagcggaatttcttacgaagtatgcgtcgaaagtatatatattagtaagaaaggatcattttcgtgcatctgtaataatgcagagacgaattgagaaaaatccaaacatcattgttttgttcaacacagttgcattagaagctaagggtgatggtaagttattgaatatgttgagaattaagaatactaaaagtaatgtggagaacgatttagaagtaaatggactattttacgcaataggtcacagccctgccacagatatagttaaaggacaagtagatgaagaagagacggggtatataaaaactgtgcctggatcgtctctgacttctgtgccaggtttttttgctgcaggtgacgttcaggactctaggtatagacaagcagttacttctgctggttccggatgcattgctgctttggatgcagaacggtacctaagtgcccaagagtaacgtgaaaaaaccggtttatttttgtttttactgttcgattgtgttacgtattctatgttttttgagatatatttgaaatatttttataagatacatatatatatgtgcgtattgctgcgacaaaagaagagacaaagagataggcgttgaaattgacga

SEQ ID NO: 1445 - DNA, 1958 bp, Saccharomyces cerevisiae
taaacaaaacaaagagcaacataactcatagctgaattgctaatcgtgatactgcatcatgtcccatccgcactcacatagcatatatttgtctgagttgcccgtcaggaaacctcaagccttgggcaatcctcttttgaggaagattcaaagagcttgcagaatgtcacttgctgaaccagacttggcgttgaatcttgacattgctgactacattaatgaaaaacagggcgctgcccctagggatgctgccattgcacttgctaaactgatcaacaatagagaatcgcacgtggcaatattcgcgttatctctattagacgtgcttgtcaagaattgtggatacccattccacttgcaaatttctagaaaggaatttttgaatgaactggtcaagagatttccaggtcacccaccattacgttattctaagattcagagattgattttaactgctattgaagaatggtatcaaacaatttgtaaacactcaagctacaagaatgatatgggttatattagagacatgcaccgtttgttgaaatataagggttatgcattccccaaaatcagtgaatccgacctagcagttttgaagcctagtaatcaattgaagaccgctagtgaaattcaaaaggagcaggaaattgctcaagctgcaaaactcgaagaattgatcaggcgtggtaaacctgaagatttgagggaagctaacaaattaatgaaaatcatggcagggttcaaagaagacaatgccgttcaagctaaacaggctatttccagtgaattgaacaaattgaagcgtaaagccgatttgctgaatgaaatgctggaatcacctgactcacaaaactgggataacgaaactacacaagaacttcacagtgcattaaaggtagctcaaccaaaatttcaaaagatcattgaggaagaacaggaagacgatgcgttagtgcaggatctattgaagtttaatgatacagttaatcaactattggaaaaattcaacttattgaaaaacggtgactccaacgctgcttcgcagatacatccaagtcatgtttctgctccgttacaacaatcttctggtgctttaacgaatgaaatcaacttaatcgatttcaatgatttggacgaagcgccctctcaaggcaacaacaataccaacggcacgggtacaccagcagcagcggaaacatctgtcaatgacttattgggcgatttgaccgatttatctatttcgaacccttcaaccgctaaccaagcatcctttggtctgggaggcgatatcgtgttggggtcctctcaacccgcaccaccagttactactactaacaactcgaacaacactttagatcttttgggactttcaactcctcaatcgccaactaattcccaagcagtaaacagtagtgggttcgatcttttgatgggatttaatccaacaacaggtactactactgcgcccgcaagaaccctagtcaatcagtctcctaacttgaagattgagttcgaaatatctagggagtcaaactcagttataaggataaaatcgttctttacaaacttaagttcgtcaccgatctccaacttagtgttcttattagcagtccctaagtcaatgtctttgaaattgcaaccccaatcgagtaactttatgattggcaacgctaaagatggtatctctcaagaaggtacaattgaaaatgcgccagctaacccttcaaaggctttgaaagtcaagtggaaggtcaactattctgtcaactccacccaagctgaagaaactgctgtttttacgttacctaatgtataatcctctggcgtttcttatcaatcctttctcttctctatgtatatttttagaaggataatacctctatgtagacaatcttataaagatcttcgcaacaatacatatttcacttactaatatatgttgcgttttcatgcatcaa

SEQ ID NO: 1446 - DNA, 763 bp, Saccharomyces cerevisiae
tctcacaggctactatgaaatataatatagtgcatggaatttgcctattatttgctattacccaagctgtaggggctgtccatttttatgcgaagtccggggaaaccaaatgcttctatgaacacttatcccggggaaacctactgattggggatttagacctatatgtagaaaaggatggtctgtttgaagaggaccctgaatccagtctgacaataactgtcgatgaaacattcgataacgaccatcgtgtcctaaatcaaaaaaactcacacacaggtgatgttacttttacagctttagacacaggtgaacatagattttgcttcactccattctacagcaagaaatcagccacactaagagtattcatcgaactagaaattggcaatgttgaagcgcttgacagcaagaaaaaagaagatatgaattcacttaaggggagggtaggccagttgactcaaaggctatcttctattcgtaaggagcaagacgctatcagagaaaaagaggcagaattcagaaatcaaagtgaatcagctaacagcaagataatgacgtggtctgtgttccaacttctcatattgctgggcacctgtgccttccagctacgctatctcaagaatttctttgtcaaacagaaggtagtataatataccatgtttgttatatagagtttatatatcgctcattacgaatcggtgcaatgagctcttcgatatgaaatattccttagcttagtaataagagtgacttaagctga

SEQ ID NO: 1447 - DNA, 1323 bp, Saccharomyces cerevisiae
atgaatgactaccatctcgaggataccacgtctgaacttgaagcattaagattggagaatgcacaattaagagagcagcttgccaagagagaagacagcagccgcgactacccattatctttggaagaataccaacgttacggaagacaaatgattgttgaagaaacaggtggtgtagcaggtcaagtcaagttgaaaaatacaaaagttttggtagttggtgctggaggtttgggatgtcccgccttgccctacttagcgggcgctggcgtgggccaaataggcatagtagataacgatgtggtggagacttccaatttgcataggcaggttcttcatgattctagcagagttggaatgttgaaatgtgagtcggccaggcaatatatcacgaaactgaacccacacattaacgtcgttacctatcccgttagattgaactccagtaatgcttttgacattttcaaaggttacaattatatattagactgcacagattctccattaacgagatacctggtgtctgatgttgcagttaatctgggaataacagtagtgtctgcatccggtttgggaacagagggccagctaactatattgaattttaacaatatagggccatgctacagatgcttttatccaacacctccgccaccaaatgccgtgacctcttgccaagaaggcggtgtgataggaccttgcattggactagttggaacaatgatggctgtagaaactttgaagcttatcctaggaatctacaccaatgaaaattttagtccctttttgatgttatattcaggtttcccacagcagagcctgcgcactttcaaaatgagaggcagacaagaaaagtgtctatgctgtggtaagaatcgaacgataacaaaagaagccatcgaaaaaggtgagatcaattacgaactgttttgtggcgcacgaaactataatgtatgcgagcctgatgagagaatcagtgtggacgcatttcagcgtatctacaaggatgatgaatttctagcaaaacatatatttcttgatgttaggccatcccatcattacgagatatctcatttccctgaagcagttaatattccaatcaaaaatctaagagatatgaacggtgatcttaagaaactgcaagaaaaacttcccagtgtagaaaaagacagtaatatagtgattctttgccgctacggtaacgactctcagctagctacaagattattgaaggataaatttgggttttctaatgtacgagacgtgagaggaggatacttcaaatacatagacgatattgatcaaaccattcctaaatattag

SEQ ID NO: 1448 - DNA, 1586 bp, Saccharomyces cerevisiae
aaggttcagcttttctatgttcaggatacaactgagaactatgtccagcaaaacatgcaagagtgattacccaaaggagtttgtcagtttcttaaatagctcacactctccttaccatacagttcataacatcaaaaagcatctggtgtcaaatggcttcaaagagttgagcgaacgtgactcgtgggctggccacgtcgcacaaaaaggaaagtactttgtgacaagaaatggctcttccattattgcgtttgctgttggtggaaagtgggagcctggtaatccaattgccattacgggtgctcacaccgactcccccgcattaaggattaagcctatttctaaaagagtcagtgagaagtatttacaagtgggcgtggaaacttatggtggcgctatttggcattcatggtttgataaggatttgggcgttgccggaagagttttcgtaaaggatgcgaaaactggcaaatccattgctagattggtggatttgaatagacctctgttaaagattcctactttggctattcatctggacagagacgtaaatcaaaaattcgagtttaatagagaaactcaactgttgccgattggtggtctgcaagaagacaaaactgaagcgaaaactgaaaaggaaattaataacggtgagtttacctccataaaaacgatagtacagaggcatcacgcagaacttttggggctaatagccaaagaactcgccattgatacaattgaagacattgaagacttcgaattgatcctttatgatcataatgcatccactctaggtgggttcaacgatgagtttgtcttctctggtcgattggataatttgacatcttgtttcacatcaatgcacggtttaacgttggcggctgacacagaaattgaccgagaatcaggcattagattgatggcatgctttgatcatgaggagattggctcatcctccgcccaaggggcagattctaacttcttgcctaatatattggaaaggttgtccatcctgaagggggacggttctgatcaaactaaacctttgtttcactcggcaatattggaaacttccgctaagtcgtttttcctttcatctgatgttgctcatgcagttcatccaaactatgcaaacaaatacgaaagccaacacaaacccttattgggtggtggtcccgtaatcaagattaacgcgaatcaacgttacatgaccaattcaccagggttggtcttggtgaaaagactagcagaggctgctaaagtccctttgcaattgtttgtcgtagctaacgactcaccatgcggttctaccatcggccccattttggcctcaaagacaggtattagaactctagacttgggtaatcctgtgttgagtatgcattcgattagagagaccggtggctctgcagacctggagttccaaatcaagttatttaaggaattttttgaacgctacacttccatagaatctgaaattgttgtctaaactgcaattgttagatgattcataatccggtatatttattgccctcttttgtattttacaaatagtaaatatatataatatcttgtgatctacataa

SEQ ID NO: 1449 - DNA, 722 bp, Saccharomyces cerevisiae
cttaaagagaatggagaagcccagccccaccaggcggcaaactagtagtctctccactatctccaacggtatgaccatgaccaacgataatagggataccacaaataccaacagtggctctacaagcagcaacaattcacaaccatcttcgtcttccacgccaccagcggccagtggacccgtaacggacagaaccaaagtcaactatgtaccaaagagcgacgatccgtcgtcatttcaatactacccagacgacccggagaacccggtcaataagtataaattcgcgttaaaggctgacagtcagtactatgatccttgtgaggagtcctccaagctcagttttcagtgcctcgagcgcaacgattacgaccgatccaagtgccaagaatattttgacgcataccgcgaatgcaagaaacaatggctgacagccaggaggaaaaacagacagcagtgggaatgaggcagccttttcttcttgtttgttcagctgtgatctgttttctatatagatcgccactacgcgacgtagtgttccgacaggcagccacagcacactctagtgcaatgtgaaaaactaattcgcaatggtatgtaaataagcaagctaaattggattttcaaagtgcgaataaagaattttttgtatatatctctacatacttgtatataccgaacataagaagctcttatggccgaaaactccctcctgaggttta

SEQ ID NO: 1450 - DNA, 1920 bp, Saccharomyces cerevisiae
atggccgaaaactccctcctgaggtttatcaccaagaacaaagtggccatcctagcaacggtctctgcggggactgctgctgtgggtgcttatgtttactaccagcaaattaagcagcagcaacagcagcaattgaagggtacaaaagacaaccgacgtcaaagtgaggcctttgctggtcaaaatgaagacgaggcggacttaaaggacgacggcagcgtcgtaagtggaagtaataagaggaagaagaagaagaataaacgcaagaggaacaataaggcaaaatcgggagaagggtttgactatccctccttgcccaatggcgagcctgatattgcccaattgaaaggcctatcaccctcccagagacaagcgtatgccgtgcaactgaagaacagaggtaaccacttcttcactgctaagaattttaatgaggccatcaaatactaccagtatgccattgagctggacccgaatgaaccagtgttctattccaacatatctgcttgttacatttctacgggcgacttagagaaggttatagagttcactacaaaggcacttgagataaaacctgaccattctaaagccttgctgagacgtgcatctgccaacgagtcactgggcaacttcactgatgctatgtttgatctatctgttttgtcattgaatggtgactttgatggagcctccattgaacctatgctggaaagaaatttaaataagcaagcaatgaaagtactaaatgaaaacctatcgaaggatgaaggcagaggctcgcaggttttgccgtctaacacatctctggcgtcattttttgggatttttgactctcacttagaagtttctagtgtgaacaccagttcaaactacgatactgcatacgctctattgtcagatgctttgcaaagactatattctgcaacagatgaaggttacttagtagcaaacgatcttttaacaaagtccactgacatgtaccactctctactttctgcaaatacagtggacgatcctttaagagagaatgctgccttggcattgtgctacacgggtattttccatttcttaaaaaataacctgttagatgcccaagttcttttacaagaatctataaacctgcatccaacaccaaattcgtacatatttttggcattgaccttggccgataaagaaaactctcaagaatttttcaaatttttccaaaaagctgttgatctaaaccctgagtatccgccaacctattaccaccgtgggcagatgtattttattctacaagattataaaaatgccaaggaagatttccaaaaggcccaaagcttgaaccctgaaaatgtttatccctacattcaattagcctgtttgttgtacaagcaaggtaaatttaccgaatctgaagcttttttcaatgaaacaaagttgaagtttcctaccttacctgaggtgcccacctttttcgctgaaatcttgacagataggggcgattttgatactgcaattaaacaatatgatattgctaaaaggttggaagaagtgcaagaaaaaatacatgtgggtataggacccttgattgggaaagcaactatattagctagacaatcctctcaagatccaacccagttggatgaagagaaattcaacgcagccattaagctgctgacaaaagcctgtgaattagatccacgatctgaacaagcgaagatcgggttagcacaactaaaattacaaatggaaaaaattgacgaggccatagaattgtttgaagattctgcaattttagcaagaactatggatgaaaaacttcaagctactaccttcgcggaagctgcaaagatacaaaagcgtttgagggctgatccaatcataagtgcaaagatggagctaacattagctcgttatagggctaaaggcatgctttag

SEQ ID NO: 1451 - DNA, 731 bp, Saccharomyces cerevisiae
tgagccaggcttgtaaatagcggttatctaagcttgtaactaaagaaatcaatttgcatctttcgtccatgagtgtcagccttgagcaaacgctcggattcagaataaaagttacgaacgtgttggatgtagttactgaaggaagattgtattcgttcaattcatccaacaacactcttactatccaaacaacaaagaagaatcaatctccacaaaacttcaaggtgataaaatgtacattcatcaagcatttggaagtcattggtgataagccctcgtttaactcattcaaaaagcaacaaatcaaaccctcatatgtcaacgtggaaagagttgagaagcttttgaaagaaagtgtaatagcatctaaaaagaaagaactcttaaggggcaagggtgtgagtgcagagggtcagttcattttcgatcaaatcttcaagaccataggagatactaagtgggtggctaaagacatcattattcttgatgacgttaaggtgcaacctccatacaaggtcgaagatatcaaagtgctacatgagggaagtaaccaatccattacattaattcaaagaatagtggaaagaagctgggagcagctagaacaagacgatggtaggaaaggtggatagattaattaatgacggaaacgataatatacgttatatattttatccgtacttctataatgtcaactattgtttataaagagatccatttgagtctacaga

SEQ ID NO: 1452 - DNA, 897 bp, Saccharomyces cerevisiae
taaaatcttgctactgcattattctacgatttcctgttatcacttatagtacacatgtctgagtttttgaatgaaaatcccgacattttagaggagaaccaacttcccactagaaaagaagatagtaccaaggaccttttgttaggcgggttcagcaacgaagctacgctggaaaggagaagccttttgctgaaaatagaccattctttaaagtctcaggtattgcaagatatagaggtcttagacaagcttctttccattcgaattccaccagaactgacttccgatgaggatagtttgccagcagaaagcgaggatgaatccgtagcgggtggaggaaaggaggaggaagagcctgatctcattgatgctcaagaaatatatgatttgatagctcatatttccgaccctgagcacccgttaagtctgggacaactctctgttgtaaatttggaagatattgatgttcatgattcaggaaaccagaacgaaatggctgaagtcgtgatcaaaataacaccaacaattacccattgttctctggcaacgttgattggtctggggatacgggtcaggttagaaaggtctcttcccccaagatttagaattactattttgttgaagaaaggtactcatgatagtgagaaccaggtaaataaacaactaaatgataaggaacgtgtagcagctgcatgtgagaatgaacaactgttgggtgtagtctctaagatgttagtgacttgtaagtaaacggggattcttctttttgcttcccttactcacgaagctatcaaaaaacatgtaaatttaacaatgtgctctcactgtataacacagctatagctacattttattatatagtattttctccaatcgattaaataacggtttttacaa

SEQ ID NO: 1453 - DNA, 1337 bp, Saccharomyces cerevisiae
gaagtgtagaataagaaaaacaagctaaggtataaaatgggatattttgttccggattcacatatcgaaaatctaaagtcatataaatatcaaagtgaagaccgctcgctggtatcgaagtatttcttaaagccattttggcaaagattttgtcacatatttcccacgtggatggcgcccaacatcatcacattatcaggatttgcttttatagttatcaacgtgttgactgtattctattacgatccaaaccttaacacagatacgcctcgctggacatatttttcttacgctttaggtgtattcctatatcaaacgttcgatggatgtgatggtgtacacgctcgccgtatcaatcaatcaggacccttaggagaactattcgatcatagtattgatgccattaattctactctgtctattttcatcttcgcatccgaaactggaatgggattttcgtataacttaatgttatcccaatttgcgatgctgacgaatttttacttaagtacttgggaagagtaccatacacacacattatacttaagtgagttttctggacccgtggaaggcatcctgattgtttgcgtttcattgatactgacaggtatatacggaaaacaggtaatctggcatacctacttatttacaattacagttggtgataaggtaattgatgtagacactctagatattgttttttccctagctgttttcggtttggttatgaacgcattgtctgcgaaaagaaacgtggataagtattatagaaacagcacttcttcggccaacaatatcacgcaaattgagcaagatagtgctataaaaggtcttttgcccttttttgcctattatgcaagcattgctttactagtgtggatgcaaccaagctttattacactctctttcatcctttccgttggtttcacgggagcatttaccgtcggaagaataatcgtttgccatttaactaagcagagctttcccatgttcaatgcacccatgttaattcctttgtgccagatagtattgtacaaaatatgtctatccctttggggaattgagtctaataaaatcgtctttgccctatcttggcttgggttcggtctctcactaggtgttcacattatgtttatgaatgacattatccatgaatttactgagtacctggacgtttatgctttatccatcaagcgctccaagctgacataaatcgcactttgtatctacttttttttattcgaaaacaaggcacaacaatgaatctatcgccctgtgagattttcaatctcaagtttgtgtaatagatagcgttatattatagaactataaaggtc

SEQ ID NO: 1454 - DNA, 930 bp, Saccharomyces cerevisiae
aggcagaaatatctatcagagcacaaaatggctagaaatagaacaacctccaagaaaaatgttcaaagtaaacgcttaatagacagagtggttcccatggacaagattaaaaaagttggcgtagcgaaaaaaaaaaccgtagaacacactaaagaaggatttagcgttgtcaacggtaagctagtaagcagcaatgacgtcggtgtactgttaagagaagcacagggtgctatcgataaaagaactaatgtttcccaaagaaataggaaaaagggaataaagaataataggccccacaaagacataaacagcagtcctgactggggcaatgcccacagaggaaccgattggcagagcgaaaaagcaaacggcatgaacagggccaagaactctcggaattttaccactaatattaaattgcagcgacaacattttggcgaagaaatacaaggtggcagccagcttgtgatatctacaaattcagatgcttcagataaattgttaatgctattcaacctaactttgggagtaaaccaagaaaacttgaaaaatgttctggaaaacatttctcaggtgcagatagctcaaattagggttagagacctgccttcaggatctgccaccgctaaggtccgtctggcatatcctacaacacagtctttggagaaggtaagaaaactgttccatggcgctctagttgatggaaggcgcatccaagtggtgattgcatctgatgaatcgtcccacttgtcgtattagagtttgtcaacgacactcacaaggtatttaatcagcaaaatccccgccacaaactatttttttgaagacatgctttctcatgactgcctaataacaatacctcattctactagtaatcgacctatgtaattatttcataaactataaagcaggtcattgcaataacagaaa

SEQ ID NO: 1455 - DNA, 932 bp, Saccharomyces cerevisiae
tatcttatatattatccaaacaaagggtctttcgttagcaaacctagaaatctgcaaaaaatgtcttcggaaccatttaagaacgtctacttgctacctcaaacaaaccaattgctgggtttgtacaccatcatcagaaataagaatacaactagacctgatttcattttctactccgatagaatcatcagattgttggttgaagaaggtttgaaccatctacctgtgcaaaagcaaattgtggaaactgacaccaacgaaaacttcgaaggtgtctcattcatgggtaaaatctgtggtgtttccattgtcagagctggtgaatcgatggagcaaggattaagagactgttgtaggtctgtgcgtatcggtaaaattttaattcaaagggacgaggagactgctttaccaaagttattctacgaaaaattaccagaggatatatctgaaaggtatgtcttcctattagacccaatgctggccaccggtggtagtgctatcatggctacagaagtcttgattaagagaggtgttaagccagagagaatttacttcttaaacctaatctgtagtaaggaagggattgaaaaataccatgccgccttcccagaggtcagaattgttactggtgccctcgacagaggtctagatgaaaacaagtatctagttccagggttgggtgactttggtgacagatactactgtgtttaaataaatcacacccgaacaccatcttgaaggttcagaacggctgaagccgcatatcaacttttggtttctactgttttaaatttcctttctcgttttaaacctttgttgccgtctcttctactatcaattttgttgttcatgcatgtttaattacctttttttgtaaaaataatataaacgtatcaatggctatttataacaaatatgcttgaaaaatctaa

SEQ ID NO: 1456 - DNA, 745 bp, Saccharomyces cerevisiae
gtaccaaagaagtgttataaaagtgatataactatgtcagaggatctttcacctacaagcagcagggtggatttgagcaatcctcatgggtttaccaaagagggagtggatttatcgaagctgtcaccacaagaactaaaattgtataaaatgtatgggaagcttccatccaaaaaagatctgttaagacataagatgcaggatcgtcaatattttgacagcggagattatgcattgaaaaaggccggagtcattaagtcggatgacgttatcgtgaataattctagtaataatctaccagtgaccaatcctagcggtttaagagagtctattattagaagacgtatgagtagtagtagtggtggcgattctatctcgagacaaggaagtatctcaagtggacctccaccaagatctccaaataaatgactaatgaaggaatgatattatgtggtattactttttttttatcatcactagcttcggctaagcccttgcattttcaatattcaattaccaaataatatatatatatatatatatatatgtatgtatggtataccttgtgttactgatgtgttttttgttgacgtcatccttttgatttactcacatgcttagtaaatgaaggttgttgaggcctaaaaatcagctaagatttacacatcgatactaatcattgaacgcccctatgggaacacttaattgaataaatatctgcccaacttgctgaacatcaaaaacc

SEQ ID NO: 1457 - DNA, 1869 bp, Saccharomyces cerevisiae
gccgacggccgtagataataacaaaggaataaaaaaaaaaaagcggtaactcgcggaagcattgccgatgcttaccgagatttgccgcggataaccgaaccatcattggggtaggaaacattataaatatttgatatatataaaggaaaaagcttgatttggtcttgtaatatcccagtgtaaacataaaaatacacacataccacaattacactctctcatcgactcaatgactgctggttctgccccccctgttgattacacttccttaaagaagaacttccaaccgtttctctccagaagagtagaaaatagatctctgaaaagcttttgggatgcttctgatatctcagatgacgtcattgagctagctggtggaatgccaaacgagagattttttcctatcgaatctatggatttgaaaatatcaaaagttccttttaatgataacccaaaatggcataattcgtttaccacggcgcatttggacttgggatcccccagtgagctacccattgcacgttctttccaatatgcagaaaccaagggtttaccccctctcttacattttgttaaagattttgtgtccagaattaatcgcccagccttttccgatgagacggagtctaactgggatgtcatcctttctggcgggtccaacgattcaatgtttaaggtttttgaaacaatttgcgacgaatcgaccactgtgatgattgaagagtttactttcaccccggctatgtccaatgtggaggctacaggagcaaaagtcatccccatcaagatgaacctgaccttcgacagagagtcccagggtattgatgtcgaatatctaacgcagttgctcgataattggtcaactggaccatacaaagacttaaacaagccaagggtcctatataccattgcaacgggccaaaatcctaccgggatgtctgtcccccagtggaaaagagagaaaatttaccagttggcccaaagacacgatttcctcattgttgaagatgatccctacggttatctgtactttccttcctataatccgcaagagccattagaaaacccttaccattctagcgacctgactactgaacggtatttgaatgattttttaatgaaatcattcttgactttggatacagatgcccgtgtcatccgtttggagactttttctaaaatttttgctcctggattaaggttatccttcatcgttgctaataaattccttttgcaaaaaatcttggatttggccgacattactacaagggcccccagtggtacctcacaagctattgtttattctacaataaaggcaatggctgagtccaacttatcgtcctctctttctatgaaagaagcaatgtttgagggttggataagatggataatgcagattgcttctaaatacaatcataggaaaaatcttactttgaaagccttatacgaaacagaatcttaccaagctggtcagtttaccgttatggaaccctccgcgggtatgttcatcattattaaaatcaattgggggaatttcgatagacctgacgatttgccgcaacagatggatattttagataagttcttgctgaagaatggtgttaaagtagtgcttggttataaaatggctgtttgcccaaattattcaaagcagaattcagattttctaagactcaccatcgcctatgcaagggatgatgatcagttgattgaagcttccaaaagaatcggtagtggcataaaagaattttttgacaactataaaagttgaacagtgaagattaaacctatgtgttatttgcatatcatatataaattgtagttttttgtataaaagttgggaaaaagttatagtcgcgtatattttaa

SEQ ID NO: 1458 - DNA, 1214 bp, Saccharomyces cerevisiae
gatccattttggtataaaaatagcatattgcataacttaactaaaaagattaaaaaaagtcaaagctacactggcatactttgaactgttttttcaaagctgtctccacgtggaaagtttatttcatcaaaactattatcaaaaattgtggttttgttaatacaaaagctgatatatatataatatggcatttagtgattttgctgccatatgctcaaagaccccgttgccattatgttcggtaataaagtctaaaacccatctaatactttcgaactcaacaattatacatgattttgatcctttaaatttgaatgtcggtgtactgccacgctgttatgctcggtcgattgatcttgccaatacagtcatctttgatgtcgggaacgcattcataaatattggtgctctaggtgtcattttaatcatactttataacataagacagaagtatactgctattggcaggtctgaatatctctactttttccaactaacattgctattgataatatttaccttggtggtagactgtggtgtatctccccccggctctgggtcatatccatacttcgtggctatacaaataggactggcgggtgcatgttgctgggccttattgataatcgggtttttaggtttcaatttatgggaagatgggactacaaagtccatgctgttggtccgtggaacgtccatgctaggattcatagccaattttttagcctctattttaaccttcaaagcatggatcaccgaccataaagtagcaacaatgaacgcttcagggatgattgtcgtcgtttacataataaacgccattttcttattcgttttcgttatttgtcaattactggtatccctattggtagttcgaaacttatgggtcacaggagctatctttttggggctatttttctttgtagcaggccaggtattggtttatgccttctctacacaaatttgtgaagggttcaagcactacttagatggcctcttttttggaagcatctgtaatgtgttcacattaatgatggtttacaagacttgggatatgactaccgacgacgacttggaatttggtgtaagtgttagcaaggacggtgacgtggtgtatgataatggatttatgtgaaatgcttcttttttctattaccatatatagaaaataggtgtatactattagtttaatgtaataagcaggactatgacaa

SEQ ID NO: 1459 - DNA, 1488 bp, Saccharomyces cerevisiae
caagtaaaccagcaatatcgacttccattaagtagacagcgagcctgaaacaaagaatatactgtttcaattccaactaaagccactccctcaagcgttattattttttgaattatattttcgggttttaagctaactctagtcattccttactacattttattgtaactcttcagtagagctaaccacagtcattccttaatattttttaacacagatctctttcacagagtagaaataaagccactcctttaacaaattacaaagaaatgaaatttaatttttctacaattttcaatatcttattctttttattcaccttaattgaagccaacagcaatggggaaacagtcaaacttattacttctgatggtattgtttacagttatgctgtctacacaaagactcttgcgccggcaagggttgtggttaaaacgatttcatatactactacaagggtatatccgattactttagctaattccgtcgtttcttccactactgaaaagataacagaggtttcaacggtgtcagcttcagaacaagttagtgctactcaaacaaactcattggtttctacttctactgtttccactatcagtccaacgatttcatctggttcttcaacatcctctagctctacatacgatatcgaatcatctcaaagtatcgaatcgtcaggtacatcttccgctacagccgaaccatctgcgtcttcaggttttcgtttgacttctagttctgcttttgtttcatctactgcacctttctcttcccaactttcttcatcttcatcttctgaaacatcatcctcatcattttcaacatcatcatcatctgcccctctttccttaacttcttcttcttcttcttcttcttctttcgccactattattaccttggcaccatcgagctcaaaaagcggaaactctcaactaactttggcgtcatcgtcttccacttccgcagttgagtcatcccaaacagggtccactatagcaagaactacctctacactggtaccctcttctagcgtagatacaacgtctagagcaacgacatccatgccattagaatcgtcttctacgcaatcgatatccgtctccagctcggatggcacttgttacgttttttatgatgatgatgactactatagtactgtctacttaactaacccgtctcaatccgttgatgccgccaccactataactagtacaaacacaatttatgctacggttaccatttagcgcttaggcataatggtggtgcattcttttctatttgttttctcaggcgtattttttccattattttttgttaaaaatagtaaaaagacagtattatttattcatttttcctcgtgttgttataacgactaagtttcctaatttctttattttgtttttttctcatgatcttttcattttgtagtttcaactattatatacaatgtgtatactataacttaattttattagttacctctta

SEQ ID NO: 1460 - DNA, 520 bp, Saccharomyces cerevisiae
taagaacgtacccaagaataaaagtccacaagtataacaatgtctcgcgaagggttccagattccaacaaatttagacgccgcagctgcaggtacttctcaagctagaacggcaactttgaagtatatttgtgctgaatgttctagtaaattatctttatccagaactgatgcagtccgttgtaaggactgtggtcatagaatcctgttgaaggctaggactaagagattggttcaatttgaagctagatgaatggagagactgaaaaccataatgggttaccggggcagaataatacgaaataaagaacctaggttttccaaggtttttgcaatatataaacttgtgcttgatttaagtttatgcagcacttttcttccagcaaattctttatgtttttttaagggaaaacgtatatcacttagagattatattaatgaaaaaaggtgtatacaaatgtataataataatagtatataagaaaagtattcgctatttatagtgattttagtttgtacaa

SEQ ID NO: 1461 - DNA, 1472 bp, Saccharomyces cerevisiae
ctaagaaaactaatctatcaataaaaatgagtagtgaactcatgttcaactatacttttagctggcctgctggtccaaaagatgttattttaacaggaacgtttgatgactggaggggcactttacccctcgtgaagaccgccaagggaaatttcgaaattactatgcccgtgaagctagccaacaaggatgatacgtttcagtttaagtttattgtggatggcgtttggtgcgttagtgattcgtataaaaaggagcatgttagtgaaggaatcgaaaacaatttcttacaaattaccgatttagttgaaacgcaggaagttgccggtgccagtagaatcccggaggcaggtggcctattatgtggtaaaccgcctcgttcagcaggtcctccttctacaagtaatagaaagaaaaacaagcgtaacaataagaaaagaagatctaaattgaagaaaaagagtactaagaacaacaagaagtcaaatgaaagtttagacgataatgaagaagaagacggggtgactggaactactactgaagatgttactggaacctctagggaagaaactccattggcggagcctactaatgtttccaaagaagctccgggcaatttccatattctgccaatcgatcaaagtgcagacacaactcaatcaaatggtataattggtggaccaggtcctgttcttgtcccaaaccctggtgaaatcaaggaatttaccgaaattagagacgttgatgctagggaattgaatgaaagacttaacaaaaaagaagaggttccagaacccgttgctggccctattgttgaatcatcagttacggaaaagagtcctgctcttccacaagctgacgacccgattgttgagaccaaggaagtggctcataatgtgcaggaacttactcctcaagtggaagcggttactccgttaataaatgagcccgaaccattaccaactccggaagcacaaatatctatacctgagtcatcgaaagttgaaccagtggaggggtctcttcaatctaagttggtggagaaacgtgagtccactgaaggtgtattagacggttccaaaaaagtagaaaataaggcaaaaaaagatgaagaggtctttacattagaccccatcgttaacaaagctcccaagctacccttgactgacgagcaaacagctgaaggtagaaaatcaccagcagtgtcagaagaaaaagaaaagaaaaagaagcaagaaaaaggctctaaagaggtcaagaggtcagaaaccagtaaagaaaaaaagccttctgccaaagaggttaagaaacaaactgtaaaagccccaaagaaacagacagcttctcctttgtcttcttcgacagaagagcccaagaagaagaaaactggtttcttcggcaaattgaagaagctatttaagtgaattatctaaggattggtctcatgttgccgaatcatagaaatataagaa

SEQ ID NO: 1462 - DNA, 879 bp, Saccharomyces cerevisiae
aatcacaaccaataatggttagaaaactaaagcatcatgagcaaaagttattgaaaaaagtagacttccttgaatggaagcaggaccaaggccaccgggacactcaggtcatgagaacatatcatattcagaatcgtgaagattatcataaatacaataggatatgcggtgatattcgtcgtcttgccaataaattatcattattacctcccactgatccatttcgtcgcaaacatgagcaattattactggacaagctatacgctatgggtgtcctgacaactaaatcaaagatttctgatctggaaaataaagttactgttagtgccatctgtaggaggcgattacctgtaataatgcatagattaaaaatggcggaaactatacaagatgcagtcaagttcattgaacaagggcatgttcgcgtgggtccaaatttgatcaacgatccagcctacctcgtaacgagaaatatggaggactacgttacttgggtggacaactctaagatcaagaaaaccttgttgagatacagaaaccaaatcgacgattttgatttttcataaattgactacaaacttacgttttctgtatcaatactcgatttatcatcttcctacattgtgaaattattacgaataggcaacgaggcagcaaatacaaatgatgtgaggcgcctgagctttcttaaaagctggaagcatgaaaaattgttatatacacaaaggaacttcttcgtcgtatgcaaaaataagaaaaaccgcaaaacaatttctcatcggcgtcatttgttaaatatgccttaaaacttaaaaatacacttcgaaaaaatcctatttaacataaattaatttgtataaatacgcaatttgtaaaatt

SEQ ID NO: 1463 - DNA, 674 bp, Saccharomyces cerevisiae
atacgcacatcgttgacatcgctgactgcaataggaaactgaaatagacggcaaaccattagttcattcgaaagaacgtattgtcgagaattatcactcactatatcagaaaattgacacacgaattatataaacgaagttatacagaaaaagattaaagaaaagaaaaatgtctacatcatccgtacgttttgcatttaggcggttctggcaaagtgagacaggccccaagacggtgcatttctgggctcctactttgaaatggggtctggttttcgctggattcagcgatatgaagagaccggtggaaaaaatttctggtgctcaaaatttgtcgctgctatctactgcgctgatttggactcgttggtcctttgtcatcaagccaagaaacatcttgttggcttctgtcaactcgtttctttgtctgaccgctggctatcaattgggtagaattgccaactacaggatacggaatggcgactctatatcgcaattgtgtagctatattctcagcggcgccgacgaaagcaaaaaggaaattactacgggcagataaacgccgaatttacaactcgaaactttgctttgtcaaagatatgtacgtaagcatatatatccggattgtataatattcataaaatagtaaagtatattttctttgcgcggtgtta

SEQ ID NO: 1464 - DNA, 935 bp, Saccharomyces cerevisiae
agaaggcaatgcaccatcaattgctttacccctggtccgcgacaaatggtgacagtcggtgtgttttctgagagggctagtttgacccatcaattgggggaattcatcgtcaagaaacaagatgaggcgctgcaaaagaagtcagactttaaagtttccgttagcggtggctctttgatcgatgctctgtatgaaagtttagtagcggacgaatcactatcttctcgagtgcaatggtctaaatggcaaatctacttctctgatgaaagaattgtgccactgacggacgctgacagcaattatggtgccttcaagagagctgttctagataaattaccctcgactagtcagccaaacgtttatcccatggacgagtccttgattggcagcgatgctgaatctaacaacaaaattgctgcagagtacgagcgtatcgtacctcaagtgcttgatttggtactgttgggctgtggtcctgatggacacacttgttccttattccctggagaaacacataggtacttgctgaacgaaacaaccaaaagagttgcttggtgccacgattctcccaagcctccaagtgacagaatcaccttcactctgcctgtgttgaaagacgccaaagccctgtgttttgtggctgagggcagttccaaacaaaatataatgcatgagatctttgacttgaaaaacgatcaattgccaaccgcattggttaacaaattatttggtgaaaaaacatcctggttcgttaatgaggaagcttttggaaaagttcaaacgaaaactttttagaaaagacacacatgcgagctttcgaacctcagatgctaatattacgtgttatatataccaaactttataaaatgacatagatattttatgctgtgatagctttcctgttatggagaagctcttcttattccccctgtcaa

SEQ ID NO: 1465 - DNA, 900 bp, Saccharomyces cerevisiae
ctagtttatcaggtttacactgctcaagttatcaagttcatagcatgacaaaggaagaaggtcgtacgtattttgaatctctctgcgaggaggaacaaagtttgcaggaaagccaaacccacttattaaatattttagatatattatcagtattggcagaccctagatcatctgatgatctgcttactgaatccctcaagaagttgcctgatttacacagggagctgataaatagttccatccgcctgcgatacgataaatatcaaacaagagaagcacagcttttggaggatacaaaaactggaagggacgttgcagcgggagtacagaatcctaagagtattagcgagtactattctactttcgaacatttgaatagggatactttaaggtacataaatttactgaagcgactttctgttgatttagcaaagcaggtggaagtgtctgatccatcagtgacagtgtatgaaatggataaatgggttccatctgagaaacttcagggtattctcgagcagtactgtgcgcctgatactgatatacgtggtgtagacgctcaaatcaagaactatctagatcagatcaaaatggcacgtgccaaatttggtttagagaataagtattccttaaaggaaagactctctactttgacaaaggaactaaaccattggcgaaaagaatgggacgatatagaaatgcttatgttcggtgatgatgcacattctatgaaaaaaatgatccagaagatagattcattaaagtctgaaataaatgctccatcggaaagctatcctgtagataaagaaggtgacatagttttagaataagcacattttatttaaccagcctgcacaagttagatagagttatacatacttgttgagtgggagggaagaa

SEQ ID NO: 1466 - DNA, 1517 bp, Saccharomyces cerevisiae
cggattgtaaatagtaaatataaactggcaatttacttagtttttgaataaataattgtataggaatattatcagtcgtataatacagacgctttagatctccgtagcatcatatcagaaacttttcaagatggcagactttaaatctttaggtctttcaaaatggcttacggaatccttaagagctatgaaaattactcagccaaccgctatccaaaaggcttgtattcccaaaatcttagaaggaagagattgtattggtggtgccaagactggttctggtaaaactattgcatttgcagggcctatgctgactaaatggtccgaagatccgtcagggatgtttggagtggtcttgaccccaaccagagagttagccatgcaaattgccgaacaatttactgcacttggtagcagtatgaacattcgcgtgtcagttatagttggtggtgaaagcatcgttcagcaggcattggatttacaaaggaagccgcactttattattgccacgcctggacgtctggcacatcatatcatgagcagcggagatgataccgttggagggctaatgagagctaaatatttagttctagatgaagccgatattttgctaactagcacgtttgccgatcatttagcaacatgtataagtgctctacctcccaaggataagagacaaacacttctattcactgcaactataacggaccaagtaaagtcgttacaaaatgcaccagtgcagaaagggaaacccccattgttcgcttaccaagtagaaagtgtagataatgtggctattccatcgacgttgaaaatagagtatatcttggttccagaacacgtcaaagaagcatatttgtaccaattattaacatgcgaggaatatgagaataaaaccgctataatatttgtaaatagaacaatgaccgcggagatccttagaagaaccctgaagcagttggaagtgagggtagcgtcgttgcactctcaaatgccccaacaggaaagaacaaattccttacatagatttcgagctaacgctgcaagaatcctcatcgctacagatgtagcatccagaggtttggatatcccaactgttgagcttgtagtgaattacgatataccttcagacccagatgtattcatccatagatctggtcgtacggcccgtgctggcagaattggtgacgccatatcattcgttacccagcgagatgtttctaggatacaggccattgaggaccgtatcaacaagaagatgacagagacaaacaaggtacacgataccgctgtaataagaaaagccttgaccaaggtaaccaaggcgaagagggaatcgctgatggcaatgcaaaaggaaaacttcggtgagagaaaaagacagcaaaagaagaagcaaaatgacgggaaaagtttgcgctcttgaaaaattctaaataagatttaaagacgtacatatcgtacaatctggatactgttttccaggacaactgatagatacaattttggcacatatg

SEQ ID NO: 1467 - DNA, 1710 bp, Saccharomyces cerevisiae
acataacactacattttattgtctaataaacgttgaggaatttgacaaaaggatggaattcacacctatagatccgcaccagcaccaaaatgctgctactcttctatgttgtaactgtggtaccccaatcgatgggtccactgggctggttatgtgttatgactgtatcaaactgactgtggacattactcaaggtattccaagagaagcgaacatttcattttgcagaaactgtgaaagatttttgcaaccacctggacaatggatcagagcagaattagaatctagagaattactggccatttgtttgcgtcgtttgaagggcctaacaaaagtcagattagtggatgcttcattcatttggacagaaccccattctagacgtattagaattaaacttaccgtgcagggagaagccatgacaaatactattattcagcaaactttcgaagtagaatacattgttattgcgatgcaatgtccagactgtgccagatcctacactacaaatacttggagggctactgtccaaattagacaaaaagtgcctcacaagagaacatttttgtttttggaacaactgattttgaaacataatgctcatgtggataccatttccattagtgaagctaaggacgggttggatttcttctatgcgcaaaaaaaccacgcagttaagatgattgattttttgaacgctgttgttccgattaaacataaaaagtctgaagaacttatttctcaagatacacatactggtgcatctacttataaattttcatattctgtcgagattgttcctatctgtaaagatgacttggtcgttttaccaaaaaaactggctaaatctatgggtaacatttctcaatttgttctatgttctaagatttctaacactgtccagtttatggatccgactactttgcaaaccgcggatctgtcaccatctgtgtactggagggctccattcaacgccctggctgatgtgacccagttggtggagttcattgttctggacgtggattctacaggtataagcaggggaaatcgtgtcttagctgacattactgttgctagaacgtctgacttgggtgttaatgaccaagtctactacgtcaggtctcatctcggtggtatttgccatgcaggtgatagtgttatgggttatttcattgcaaactcgaattacaactcagatctttttgatgggttaaatatcgattatgtgcctgatgtagttcttgtgaagaaattgtatcaaagaaagagcaaaaagagcagacactggaagttaaagagaatggctaaggaacacaaagatatcgatgcatccttagattacaattcaagagctcaaaagcaagaaatggaacgtgcagaaaaggactacgaattattcttacaagaattagaagaggatgctgaattaagacaaagtgttaacctatacaaaaaccgcgaagcaaatgtacctcctgaagagcatgaaatggatgaagacgaggatgaagacgctccacaaatcaacattgatgaattattggacgagttagatgaaatgacattagaagatggagtcgagaacacacccgttgaatctcagcagtaaaaaaacaccaaagaatggagagtagtatatactcttaacaaacactagcatttcagtttatctatatacatatatatggatgtaaaatgtactttatggaa

SEQ ID NO: 1468 - DNA, 774 bp, Saccharomyces cerevisiae
atggatgataagaaaacatggagtacagtcactttgagaaccttcaatcagctggtaacgtcttcgttaattggatactcaaaaaagatggatagcatgaatcacaagatggaaggaaatgcgggccacgaccacagtgatatgcatatgggagatggagatgatacctgttcgatgaatatgctattttcgtggtcatacaagaatacgtgtgtcgtctttgaatggtggcatatcaagaccctgcctggactgattttaagttgtttagcaatttttggtctagcctacctctatgagtacttaaagtactgtgtccataagagacaattatcccagagagtattgttaccaaatagatctctgaccaagatcaaccaagccgacaaagtgtccaatagtattctatatggtttgcaagtgggattctcattcatgctcatgcttgtattcatgacttataatggttggttaatgttagctgtcgtgtgtggggcaatatggggtaattacagctggtgtacttcgtatagtcctgagatagatgacagctccctcgcctgccattaagatggtgacaaatattacaaatttgatactatttgtatctattttgtttttatccgggatttttcgtatttcttcctcattcatacccttccctttatttgttcccactgagtataatgataaactacgttaacattacatgtataatatttagcactcgtacgttactagtctttgacacaagtttatatatcccccccttta

SEQ ID NO: 1469 - DNA, 1355 bp, Saccharomyces cerevisiae
taaatcatcatattaagctaaatatagacgataatatagtatcgataatgccatttgttaaggactttaagccacaagctttgggtgacaccaacttattcaaaccaatcaaaattggtaacaatgaacttctacaccgtgctgtcattcctccattgactagaatgagagcccaacatccaggtaatattccaaacagagactgggccgttgaatactacgctcaacgtgctcaaagaccaggaaccttgattatcactgaaggtacctttccctctccacaatctgggggttacgacaatgctccaggtatctggtccgaagaacaaattaaagaatggaccaagattttcaaggctattcatgagaataaatcgttcgcatgggtccaattatgggttctaggttgggctgctttcccagacacccttgctagggatggtttgcgttacgactccgcttctgacaacgtgtatatgaatgcagaacaagaagaaaaggctaagaaggctaacaacccacaacacagtataacaaaggatgaaattaagcaatacgtcaaagaatacgtccaagctgccaaaaactccattgctgctggtgccgatggtgttgaaatccacagcgctaacggttacttgttgaaccagttcttggacccacactccaataacagaaccgatgagtatggtggatccatcgaaaacagagcccgtttcaccttggaagtggttgatgcagttgtcgatgctattggccctgaaaaagtcggtttgagattgtctccatatggtgtcttcaacagtatgtctggtggtgctgaaaccggtattgttgctcaatatgcttatgtcttaggtgaactagaaagaagagctaaagctggcaagcgtttggctttcgtccatctagttgaacctcgtgtcaccaacccatttttaactgaaggtgaaggtgaatacaatggaggtagcaacaaatttgcttattctatctggaagggcccaattattagagctggtaactttgctctgcacccagaagttgtcagagaagaggtgaaggatcctagaacattgatcggttacggtagattttttatctctaatccagatttggttgatcgtttggaaaaagggttaccattaaacaaatatgacagagacactttctacaaaatgtcagctgagggatacattgactaccctacgtacgaagaagctctaaaactcggttgggacaaaaattaatagtgttaaccgtactttgtagcaccatttctttttcttctaatttatataattaatgaatatatatatttgggataaatagcctttaatgaaatattaacagaa

SEQ ID NO: 1470 - DNA, 835 bp, Saccharomyces cerevisiae
tatagttgacaagtgagaaaaagagcaaaagggagaaaagaaattgttagaataaaaccatgctgttagaattgatttcttatgcaggaaccgtttcagggtttctttttttaacactttcaattgcatcgggtttatactacattagtgaacttgttgaagaacacacagaacccacaagacggtttctcacaagggctatttatggtataatattaatattaattctgctactgttactagacggtttcccgttcaaacttacacttttttccattgcatgttacatagtatattaccaaaacttaaaaagtttcccatttatttcgttaaccagcccaactttcctattaagctgcgtatgtgtggtcttgaatcactacttctggttcaaatattttaatgatacggaagttcccccacagttcaaatttgatccaaattatataccacgcagacgtgctagtttcgctgaagtagcctcattttttggtatatgcgtttggttcataccatttgccttatttgtttctctgtcagctggtgattatgtgctaccaacgactagtgagcaacatatggctaagaaaaatgatgacatcacaacgaacaaccagccaaaatttcgtaaaagggctgttgggttagctcgtgtagtcatcaactcggtaaggaagtacatctactctctagcccgtgtattcggttatgagatagaacctgactttgatagattggctgtttaggattgcctttttttttaacatgtagttagtttttctttatttgaatattctaaataagaaatatgtgtaatgctctgccaactattttg

SEQ ID NO: 1471 - DNA, 1669 bp, Saccharomyces cerevisiae
taaatagcctgatacatataaacctgtattgttgccattacagaaaaaagccactttctatacaaaaactacaataaaatgtctgctgatttcggtttgattggtttggccgtcatgggtcaaaatttgatcttgaacgctgctgaccacggtttcactgtttgtgcttacaacagaactcaatccaaggtcgaccatttcttggccaatgaagctaagggcaaatctatcatcggtgctacttccattgaagatttcatctccaaattgaagagacctagaaaggtcatgcttttggttaaagctggtgctccagttgacgctttgatcaaccaaatcgtcccacttttggaaaagggtgatattatcatcgatggtggtaactctcacttcccagattctaatagacgttacgaagaattgaagaagaagggtattcttttcgttggttctggtgtctccggtggtgaggaaggtgcccgttacggtccatctttgatgccaggtggttctgaagaagcttggccacatattaagaacatcttccaatccatctctgctaaatccgacggtgaaccatgttgcgaatgggttggcccagccggtgctggtcactacgtcaagatggttcacaacggtattgaatacggtgatatgcaattgatttgtgaagcttatgacatcatgaagagattgggtgggtttaccgataaggaaatcagtgacgtttttgccaaatggaacaatggtgtcttggattccttcttggtcgaaattaccagagatattttgaaattcgacgacgtcgacggtaagccattagttgaaaaaatcatggatactgctggtcaaaagggtactggtaagtggactgccatcaacgccttggatttgggtatgccagttactttgattggtgaagctgtctttgcccgttgtctatctgctttgaagaacgagagaattagagcctccaaggtcttaccaggcccagaagttccaaaagacgccgtcaaggacagagaacaatttgtcgatgatttggaacaagctttgtatgcttccaagattatttcttacgctcaaggtttcatgttgatccgtgaagctgctgctacttatggctggaaactaaacaaccctgccatcgctttgatgtggagaggtggttgtatcattagatctgttttcttgggtcaaatcacaaaggcctacagagaagaaccagatttggaaaacttgttgttcaacaagttcttcgctgatgccgtcaccaaggctcaatctggttggagaaagtcaattgcgttggctaccacctacggtatcccaacaccagccttttccaccgctttgtctttctacgatgggtacagatctgaaagattgccagccaacttactacaagctcaacgtgactactttggtgctcacactttcagagtgttgccagaatgtgcttctgacaacttgccagtagacaaggatatccatatcaactggactggccacggtggtaatgtttcttcctctacataccaagcttaaaggaaatctccaacctggacataaaccaaaaaaatttaatgaaatagattagttatagtaaaagtaatcataataataaatagataaataaatccaaatgcaattataaatagtatatgaa

SEQ ID NO: 1472 - DNA, 1076 bp, Saccharomyces cerevisiae
caacccaagctattgctacaggtagaacaagatataatggccagttcgtcacataaccctgtcattcttttgaaaagaatcttatcgctcacagaaagctcccctttcattttgtgcttagattctattgcccagacctcatacaagctcatccaagaattcgtccaccagagcaagagtaaaggaaatgagtatccaattgtgtacatttcgttcgaaacagtgaataaaccatcgtactgtactcaatttattgacgctacgcagatggattttgtacatttagtgaaacaaattatatcatatctaccggctgctactgccacacaggcaaaaaagcacatggtcattatcgattcattgaactatatttctacagaatacataacaaggtttttgtctgagatcgcctctcctcactgcacgatggttgcgacttatcataaagacatcaaagatgagaaccgtacggtaatacctgattggaataacaattatcctgataagttgactttactgcagtttatggccactacaatagtagatattgatgtggtattaacaggcactctcgatactgaggaggtgagtgaattgttaaacgaatttagaattcctcgcgggttaaataacgatatatttcaattacgacttgttaataaaagaaagtccggcaggtcattggaatacgacttcatagtaaattcaaacacccacgaatatgaattattatcaaccactaagcaagaagaggagagcagtagtaacggactggagacacccgaaatgttgcaaggattaacaacattcaacctaggaacatccaacaaacagaagctggccaaagatcaagtcgcattgccttttctggaggcacaaagctttggacaagggggtgctattgtttatgagtacgaaaaggatgacgattatgatgaagaggatccatatgaggatcccttttaaaaagtagaaactgatggtaaatagtgagtgcttccagattatgtaaactacgtatacttcatacacatatctagatgctagattgttagtctgttttagtcttttttttc

SEQ ID NO: 1473 - DNA, 573 bp, Saccharomyces cerevisiae
atgtccggtaaatggagactagtgctgaccgggataggcaatccagagcctcagtacgctggtacccgtcacaatgtagggctatatatgctggagctgctacgaaagcggcttggtctgcaggggagaacttattcccctgtgcctaatacgggcggcaaagtgcattatatagaagacgaacattgtacgatactaagatcggatggccagtacatgaatctaagtggagaacaggtgtgcaaggtctgggcccggtacgccaagtaccaagcccgacacgtagttattcatgacgagttaagtgtggcgtgtggaaaagtgcagctcagagcccccagcaccagtattagaggtcataatgggctgcgaagcctgctaaaatgcagtggaggccgtgtaccctttgccaaattggctattggaatcggcagagaacctgggtcccgttctagagaccctgcgagcgtgtcccggtgggttctgggagctctaactccgcaggaactacaaaccttgcttacacagagtgaacctgctgcctggcgtgctctgactcagtacatttcatag

SEQ ID NO: 1474 - DNA, 1485 bp, Saccharomyces cerevisiae
cgaagagcagaagcggaaaacgtatacacgtcacatatcacacacacacaatgggaaagctattacaattggcattgcatccggtcgagatgaaggcagctttgaagctgaagttttgcagaacaccgctattctccatctatgatcagtccacgtctccatatctcttgcactgtttcgaactgttgaacttgacctccagatcgtttgctgctgtgatcagagagctgcatccagaattgagaaactgtgttactctcttttatttgattttaagggctttggataccatcgaagacgatatgtccatcgaacacgatttgaaaattgacttgttgcgtcacttccacgagaaattgttgttaactaaatggagtttcgacggaaatgcccccgatgtgaaggacagagccgttttgacagatttcgaatcgattcttattgaattccacaaattgaaaccagaatatcaagaagtcatcaaggagatcaccgagaaaatgggtaatggtatggccgactacatcttagatgaaaattacaacttgaatgggttgcaaaccgtccacgactacgacgtgtactgtcactacgtagctggtttggtcggtgatggtttgacccgtttgattgtcattgccaagtttgccaacgaatctttgtattctaatgagcaattgtatgaaagcatgggtcttttcctacaaaaaaccaacatcatcagagattacaatgaagatttggtcgatggtagatccttctggcccaaggaaatctggtcacaatacgctcctcagttgaaggacttcatgaaacctgaaaacgaacaactggggttggactgtataaaccacctcgtcttaaacgcattgagtcatgttatcgatgtgttgacttatttggccggtatccacgagcaatccactttccaattttgtgccattccccaagttatggccattgcaaccttggctttggtattcaacaaccgtgaagtgctacatggcaatgtaaagattcgtaagggtactacctgctatttaattttgaaatcaaggactttgcgtggctgtgtcgagatttttgactattacttacgtgatatcaaatctaaattggctgtgcaagatccaaatttcttaaaattgaacattcaaatctccaagatcgaacagtttatggaagaaatgtaccaggataaattacctcctaacgtgaagccaaatgaaactccaattttcttgaaagttaaagaaagatccagatacgatgatgaattggttccaacccaacaagaagaagagtacaagttcaatatggttttatctatcatcttgtccgttcttcttgggttttattatatatacactttacacagagcgtgaagtctgcgccaaataacataaacaaacaactccgaacaataactaagtacttacataataggtagaggcctatccttaaagataaccttatatttcatta

SEQ ID NO: 1475 - DNA, 941 bp, Saccharomyces cerevisiae
atcggatataaaagaataacataaatatgtttagtgcattaggtaaatgggtccgaggctctcgcaatgataaggactttgtgacgaagtataccgcagatttatcacaaataacttcacagatccatcaattagatgtcgcgttaaagaaaagccaatccatcttgagtcaatggcaatcaaatctgaccttttatggtattgcgttaacggtattggccctgagctacacatattgggagtaccatggttatcgaccataccttgtggtgactgcgctactatgcataggctcgctaatcttgttcaaatgggcattaaccaaactctatgcattttataacaacaataggttacgcaagttggcaaaactccgtgcaattcatcaaaagaaactggaaaagttaaaggaagagacccactataatgctacaagctcaatcatccaacggttttcttccggtgaagatcaaaacgacgatgccatggtacttctagatgatgaattaaatgctaaataccaagaattaaacaatctaaagacagagctagaaaaatttaagaaggaaagccatgtaaagggcctaaagaaggaagacagcgatgcatggttcgacaaaatcatcagcgtactggcaggcggtaatgaattggactcaacaagttcgctctctcccttcaaaaaaatcatatgtccacagtgtcattggaaatccaattgctacagattggccagtaagccaatcatctttatctgtcctcactgtaaccacaaaatagacgaagtaaaggaaagagaagacgccattgaagcaaaacaaccggcacagccttcgcagtcggagaaggaaaaaacaaaatgattttgcgttagaataactacgtacccctatataatatatttttatatcattatttagacaaggacatgatagcgttga

SEQ ID NO: 1476 - DNA, 1827 bp, Saccharomyces cerevisiae
atgtccctttttaccaggccttttctaaggagcccccggcagttttctgtagcaaggtatgtgtattgggctagaagccctgcccttcgaagtaacttgagaataccgtcaatagcagcggcatcgctaagagcatattctaatgagtctaaaactggaagggatgctcctcccgacaaaaaatcaaaaaagctatcaaacctgaaatacattactgaaagggattccctgctggtgcagaccaacaatatttttactaagctcaaaataaacatacgatggttcttgaaaaagtccacccggccgttcaattcagacgatataagtgcgttcatctcatggatcctcgtgagcaacattttcatattcatcttctggacaaccacctttgtatctttgatcctttacttaatcaataccgtgtttgcacaagaatacctcgcaagcaagattggtaaatttattactaagaatgagtcgttgtcaatcgttttcgagagtgccattgtaccagactggtcgtctgggaaaatcagctttcaaaaagtcttcgtctccaggagaccaaaggtctcgcgcggctttaccaagggttcacagcaggatgccctgcaaagggcgaagttggcccttagtgagagaatattggttaaccaacaggactttgataatggcaattatacacagtttgatctgaccattgaccaagtcgacatatcgttgaatttcagaaagtggataaatgggaagggtatcctagacgaagtgaccataaatgggcttagaggagtcatagacagaacacacgtggtgtggaaaaaggacgacgatcctaagaactatctgaacgtctaccagccgggcgactttgaaatatcaaaattcaccatgaacgatgtcctttgtacactgtaccagccaaatgggttcaggccattccaggtgagtatatttaattgcgatctaccgcaattgagaaaacattggttgttctacgatatcttgaatgcgaacaatatcaatgggacctacgacaattcaatgttcactatccacaagaagttcagaaccgatgatcagcatcaggaccccacgctgctatggaagcaaatgacaaggtttagggtagacaatctcgacatcgatcacctgaacgccggtatcgaaggaccctttggatggatcaacgaaggtcgcgtgaacatgattggcgacgttcttttaccagatgacgatgccgcgtctgactcgctgcaactgacagaaatcctcacagagatcggtgaccgcttaatcaaaaaagcgaaaaggtacacttcatcccttcctctggttgggccaggattctccccggccgttgatgaaattgacccgaacgactactttattatggacttttctttaagactatacaatgtcaaagccgaagtccctctgttcacttctggcttaacgtatatcaatagtgcattgataaggcctattgtcgggtacatcaattctcacaggacatacatcccaatcaaatgccgcattgtaaagaaaaagtctgattttgagggctcctggaccatatatgattcataccttatgcgggatctaagtgcggaagcgtacgatgccttcgccgactacgtcgctgacgatgaaaagaggacattacgcttgagaagggtgggcttttggtcactgcaacttatactccaggtgattttgatgagtctcggtgctatcgcgtgaggaatacctactcctgtcactttctgtacatatgcatttacatagcatcgttctttctatcagtttatctaatttgtgacgcatctt

SEQ ID NO: 1477 - DNA, 1831 bp, Saccharomyces cerevisiae
ccgttgcaatatataacgccgggcattctccacgtatatacataccgtagtgcacaatgggctcctctttggatttggtggcgagcttctcgcatgattccactcgttttgcattccaagcaagcgtcgcacaaaagaacaatgtggatatttatccattaaatgaaactaaggattatgtggtcaatagttcattagtgagtcatattgactatgagacaaacgatatgaaggtttcagatgtaatcttctttgggtggtgtagtgatttgatagatacgcagtcatccaatatcaaaagaaaattagatgaagatgaaggaactggtgaatcaagtgagcaaagatgtgaaaactttttcgttaacggatttcctgacggaagaattgttgtttactcttctaatggtaaggatatagttaatatcatcaagaataaaaaagagattttgggagcagacacagacgagtctgatatatggattttggatagtgataaagtcgttaagaaattacagtataacaattcgaaacctctaaagacttttacgctagttgatggtaaagatgacgaaatagttcatttccaaattttgcaccaaaatggcactttattggtatgcattattactaaacagatggtttatattgttgatccatcaaagagaagaccctctactaagtatagttttgaaatatcagacgctgtagcatgtgaattttcttcagacggtaagtatctgttaattgccaacaacgaagaattaatagcttacgacttgaaggaagattcaaagctgatccaatcatggcctgtccaagtgaagacattgaaaactttagatgatttgataatggctttgactactgatggtaaaattaataattataagattggcgaagccgacaaagtttgttctatagttgtaaatgaagatttggaaattatagatttcacgccaataaacagcaagcaacaggttctaatttcatggctaaatgtcaatgaacccaactttgaatctatttctttaaaagaaattgaaactcaggggtatattacaataaacaaaaatgaaaaaaataatgctgatgaagcggaccaaaagaaattagaagagaaagaagaagaagctcagcctgaagttcaacatgagaagaaggagactgaaactaagataaacaagaaagttagtaaatcagatcaagttgaaattgctaatattctctcatcgcatttagaagctaattcaacagaaatattggatgatctgatgtctggaagttggacagaaccagagattaaaaaattcatcttaaccaagatcaatacagtagatcatctaagtaagatatttttgactatatcaaagtcaataacacaaaatccatggaatgaagaaaatttacttccgttgtggcttaagtggttgctgactttgaaaagtggggagttaaattctataaaggataaacatacaaagaaaaattgcaagcatttaaaatctgcattaagatcttcagaggagatcttgcctgttctactcggtatacaaggtagattagaaatgttgaggaggcaagcaaaattgagagaggatcttgcacaactatctatgcaagagggtgaagatgatgaaatagaagttatagagcattcaaatgtaattagtaatcctttgcaggatcaagcatcgcctgttgaaaagcttgaaccagattcaattgtttatgcaaatggagaaagtgacgaatttgtcgacgcatcggaatacaaagattgatcaagcattttaaatatatttaagtatatacaaagaaaagtttcaca

SEQ ID NO: 1478 - DNA, 2405 bp, Saccharomyces cerevisiae
ttgagcatgtcagaggaatttatcgcagtttctactttggctagaaacctggaaattgccaagggtaatgagtttcataccattttggcgactttaagatcaccagtttatatcaatgaacagctgctaaaatccgaattgagcttccttgttacaaaaatcctaaaacttatcagatcaggcaatgactttgatctttggaaaggatgtcacacctctgttgtgacttgcgcctataatccactggtcttatcgactcatggaggtcaattgcttgctgccatttattccagattggaacagaagacgggtttctattcttcggttatttcttcatcacatggaaagcagctattcaatacccttatttcttctgtagcgattatcattgatttaatgaagaataaacctacgttatcgagagaagcactggttcccaaattaaaggctatcattccaacgttaattacattgtctcaatacgagcccgaacttgttctaccagtactacagaggatattgaagagaaacactacaacatttaagccatttaccaacaaattccgcactgtgttaatcaatttaatcatatcagactatgcttctttaggcactaagacgcagaggcttgtttgcgaaaactttgcttatttgcatttgctgaaaattcaggttagtgatactagcgatgacgaaactcaagcacatcacaaaatatatgctgattctaattggagaacaggattaatgtccatcttatcacaattcaagcccataattcaattatgtggagaaatcttggattttgaacaagataatgagctgtataaactaattaaaagtttaccggttatcgatgaatccaataacaaagaagaatttttaccctcattgaaattagacttcaacgcacctttaactttatgggaaattccacaacgtttgtccttattggctgacatgcttgttgctttcatctctttaccaactccctttcccattcgagttccgctgggtggtattaattccctttgtgaagttttgttgggagttagtaacaaatatttaccgttaaaaaaagaattgcgtcatgataatgaactaaatggggtcatcaataccatcttacctcaaatacaatttcaaggcattaggttatgggaaattatggtttcaaaatatggcaaatgcggtttatcatttttcgaaggaatcctttcttccattgaacttttcattccattaaaaaagaaaagtaacaatgaaattgattttaatgttgttgggtctttaaaatttgagtttgctactgttttcagattggtaaatatgattttgtctcatttaggccaccaactgaacataatcagcgtcatatcccaattaatcgaagtggcgttgttcttatctcatgataaaacattgattgattctttattcaaaaatcgtaaaagcatcatgaaacaacagactaaaacaaaacaatcaaagaggagtaaaagtgccgaaggtgcattttctgatatttatacgcacccagagctatttgtgtgtaaaaattccatgaattggttcaatgaaatcaatgatttttttattactgcactaaataattggattttgccttcaactccacatattcaaattttgaaatatagtatcacgcaatctttaagattaaaggaaagatttggttatattccagaaagctttgttaatctcctgcgttgcgaggttcttcacccaggtagtgaacgtgtttcaattttaccgattgcaatatcactattaaagaatatcaatgatgatatgtttgaattactgtgtcatccaaaagtgccagtcggtatggtgtaccagttgcacaaacctttggacttaggcgaagacggggaagtaagggatgatatcaacaagaaggaggttgaaacgaacgaatcatcctcaaacgccaatactggcctggagactttaaaagcgttagaaaatttggaaaatgttacaatccctgaacccaaacacgaagtcccaaaggtcgtcgatgatactgccatattcaagaaaaggtcagtagaagaagtcattgaaagagagtctacatcttcacataagaaagtgaaattcgttgaagaaacaaccgtggataatggcgaagaattgattgtaaaaaaagctgtaagccaaactaaggaagaagagaagccaatggaggacagtgaagatgaagaacaggaggagtttgaaattcccgctatcgaattaagtgatgacgaagaggaggaggaagaaggagaataataatatcaaccagattttgtttggttatatttcgactagaatatatgtatgcatatgctaaaattgtacataggcatttacgaatgaaaatagtgtagaggtatgaa

SEQ ID NO: 1479 - DNA, 906 bp, Saccharomyces cerevisiae
aagtcaataaataactcagcagtaaccgcacaatggtattggaagctacagtgttagtgattgataattcagagtactctcgcaatggcgactttcctaggacaaggtttgaagcccagatcgactcggtagagttcatatttcaagccaagagaaacagcaatcctgagaatacagtgggtcttatctctggtgctggcgccaaccccagggtgttatctacgtttaccgccgagtttgggaagattcttgctggactacacgacacgcagatcgagggtaagctgcatatggccactgcgttgcagatcgctcagctgactttgaagcatcgccagaataaggtccaacatcaaaggattgtggcatttgtgtgtagcccaataagtgattctcgagacgaattgatcagattggcaaaaacactgaaaaagaataatgttgccgtggacatcatcaattttggagagattgaacagaacacggagcttttggatgagttcatagctgcagtgaacaaccctcaagaagaaactagtcatttgcttactgtgacgcctggccccagactgctgtacgagaacatcgcatcttcacccataattctcgaagaaggatcctccggtatgggcgcctttggtgggtctggcggtgattccgatgccaatggcacatttatggacttcggggtagacccatcaatggacccagaactggcaatggccttgcgtctgtctatggaagaagagcagcaaagacaggaaaggttaagacagcagcaacaacaacaagatcagcctgagcagtctgaacagcctgaacaacaccaagacaaatagtagtgtacaaaaatatctatatgggtcatatataaaccaaataaagcatatataacatctcccttca

SEQ ID NO: 1480 - DNA, 2720 bp, Saccharomyces cerevisiae
catggttacactattagtacatttggtatagactgataggtttccgttgtgctttaacgacgggtaacgatttatttctggcgtgtttcagcgactattaataataagcaataaagaaggacgcgtttttgaatatgtattaatgggtcaagagtaaccatgataatttcatatttccatggattggttacattcagggaaatagaatggtttgctgcttatgggtgcttctagcattgttgcttcatctcgatcatgtagcatgcgaagacgatgcgtactcattcacttctaaagaacttaaggcttacaagcaggaagtgaaggagctgttttatttcggcttcgacaattatttagagcatgggtatccatatgatgaggtaaaacccatttcatgcgttcctaagaagagaaactttgaagatcctactgatcaaggcaccaacgatatattgggcaattttacaatcactttaatagattctttaaccactattgctatactggaagaccggccgcagtttttgaaagctgttcgacttgttgaaaggacatttcctgatggcaatttcgatattgattccacaatacaagtttttgaaattactatacgtgttatcggatcactactatcatcacatctttatgctacggatcccacaaaggcagtgtatttaggggacgattatgatggctcactgttacgtctcgcccagaatatggcagataggctcttacctgcatatttaacgtctaccggattacctatgccacggagaaacatcaaacgaaaatgggatgtctctgaatttccagaatttttggagacagagaataatgtggccgctatggcgtctcccatgttcgaattcactattttatcttacttgacaggcgatcccaagtatgagaaagttaccagatacgcatttgataaaacatggtctcttagaactggtttggatttgctacccatgtcctttcaccccgaaaaactaacaccatatacgcccatgactggaatcggcgcctccatcgactcccttttcgaatacgctttgaaaggtgctattttatttgatgattcagaattaatggaagtttggaacgtagcatacgaggcattaaagactaactgtaaaaacgattggttttttgctaatgtaatggctgacacagggcatttgtttgttccctggattgattctttgagtgcttttttctccggtttacaggtgcttgctggtgatttggatgatgccatagcgaaccatttaatgtttttaaaaatgtggaacacctttggcggtattcctgaaaggtggaactttagtcctccggagtttcccccactatctccattagagcgatcgggagctgttgctttggataatatcctccccttagaatggtacccattaagaccggaattttttgagtcaacctatttcttatatagagctacaaaagacccgttttacttaaatattggggtacatctgctaaaagacctcaagcaacgatttaagtctaactgcggatttgcaggtttccaaaatgtaatcacgggcgaactgcaagatagaatggaaacatttgtgttgagtgaaactttgaaatacctgtatttattatttgatgaagagaacgaattacataacagcgctagtgacgtaattttcagtacagaagcccatccaatgtggttgccccaagaagtgaggtccaactataaacgtaacgctaaatttaacaactctgtctactcgtcgcacttggaaatttgccagaaaaaggacagggaacaagctggagagaacacattgagccaaagaattgtggggttcgccaaatcgatctttcataaaggtccaccagacgaagaggctactgatccaattatagactataccattgatactgaacttcccggtacatgctctataaagcctcatcatgtaattggtgacgaattttggtattctccaatgttgagcaattttgacagattattcgagattgactcccggttcgctgccacgctaattaaaccttcacacatgcataactataatgcaattgaactagaacctggattttataacaggtggtccaatccgcaatttagcacgtgcctgatcccacccaccaccgaaattttcgaactactattcgaccttcctggatatcatcagttgaatccattaatgttagaaaacaaaactattacatttgaaacctttggaggtaggtcaaggttgaagatcgaaaaattgcaaatctaccaaattgattactatggagacttaatcactgcatcgacattccaagacgtctcccgcaaggatattttctcgaatgcatgcgatgcagtggcaagcttgtattctcccacttatctttacagagtagtagccatcaacggacgcatattgcctcgccatggaagtgtacaaatcaagaaacatagtcctgtgctcacttccaatggcacaagagaggaagacgaattcaaaatggatggcatcgggattaatgaccattcccaactcatgttagaatgcacgcccatcatcaacttatttattgtatgaaatcactcttttagatagacctctacagcttttacataatggcaccagtaataaatgatgaacgatttcgttaccctcggtaaaaccggccaaaaaaaaaaaaaaaaaaaaaaaaaaatgttc

SEQ ID NO: 1481 - DNA, 2655 bp, Saccharomyces cerevisiae
atgatgaatttttttacatcaaaatcgtcgaatcaggatactggatttagctctcaacaccaacatccaaatggacagaacaatggaaacaataatagcagcaccgctggcaacgacaacggatacccatgtaaactggtgtccagtgggccctgcgcttcatcaaataatggtgccctttttacgaattttactttacaaactgcaacgccgaccaccgctattagtcaggacttatatgcaatgggcacaacaggaataacatcagaaaatgccctttttcaaatgaagtcaatgaataatggaatatcatcagttaataataacaacagcaacacccctacgattattaccacgtcacaggaagaaactaatgctggaaatgtacatggcgataccggtggcaattctttgcaaaattctgaagatgacaacttttcttccagttctaccaccaaatgcttactctcttccacttcttcgctatcaataaatcaacgagaagcagcagcagctgcttatggtccagataccgatattcctaggggtaaactagaagttacaataatagaagcacgtgacctagtcactagatcaaaggattcacagccttatgttgtttgtacttttgagagttcagagttcatttctaatggtcctgagtcactaggcgccattaataataacaacaataacaacaacaataatcagcataatcaaaaccagcatattaacaacaacaacgaaaataccaaccctgacgctgctagccagcatcataataataacagtggttggaacggttctcagttaccatcgataaaagagcacttgaagaaaaaacccctttatacacacagatcatcttcccaattagatcagctaaactcttgctcttcagtaaccgatccgagcaaacgttcttctaattcttcgtcgggttcttcaaatggtccaaagaatgatagttcacatccaatatggcatcacaagacaacgtttgatgttttgggatctcactcggaattagatatttctgtttatgatgctgcccacgaccatatgttcttaggccaagttagactgtatccaatgattcataatttagcacatgcttcccaacaccaatggcacagtttgaaacctcgcgttattgatgaagttgtgtccggtgatattttaatcaaatggacttacaaacagacaaagaaaagacattatggcccacaagattttgaagttcttcgattattgggtaagggtacttttggccaagtctaccaagttaagaagaaagacactcaaagaatttatgcaatgaaagttctctccaagaaagttattgtcaagaaaaatgagatcgcccacacaattggcgaaagaaatatcctagtcacgacagcgtccaaatcgtccccattcattgtcggattgaagttttcctttcaaacaccaacagatctgtatttggtcactgattatatgagtggtggagaattattctggcatttacaaaaggagggccgtttttcggaagacagagcgaaattctatatcgctgagttagtcctagcgttagaacatttacacgataacgatatcgtttacagggacctaaagcctgaaaacattctactcgatgccaacggtaacatcgctctttgcgattttggtctttctaaagctgacttgaaggatagaacaaacacattttgcggcaccacggaatacctggcaccagaattgttactggacgaaaccggctacaccaaaatggtcgatttctggtctctaggtgttttgatatttgaaatgtgttgtggttggtcccctttctttgcggaaaataatcaaaaaatgtaccaaaaaattgcctttggtaaagtcaaattccccagagacgtactgtcacaagaggggaggtcttttgtaaagggtttactaaacagaaaccccaaacatagactcggtgccattgatgatggaagagaactacgagctcatccatttttcgcagatatcgactgggaggccttgaagcagaaaaaaattccaccacctttcaaacctcacctagtctcggagacggatacctcgaattttgacccagagttcacaacagcttcaacttcatacatgaacaagcaccagccgatgatgactgctaccccgctatctccagccatgcaagcaaagtttgctggtttcacctttgttgatgagtccgccatcgatgaacacgttaataacaacagaaaattcctacaaaactcgtactttatggaacctggttcctttatcccgggaaatccaaacttacctccagacgaagatgtcatcgatgatgacggggacgaggacatcaatgatggattcaaccaagagaaaaatatgaacaacagccattcgcagatggacttcgacggcgaccaacacatggatgacgaatttgtcagtggaagattcgaaatatgatttctcaatcgctcctcttgcccttcctcttcttttccttttctttttatttttttctaatttttctatcttttatttctacttctattattaatttgtatcttctaatcgtttttcccactttatcgaaacatttcttctatttatatatgtaaagtatgtatgtattttcgttttatt

SEQ ID NO: 1482 - DNA, 2467 bp, Saccharomyces cerevisiae
gaatgtgacaagattgaaagtgcttccaggatctgaaacatttgtcaaagttttactaacattacacagatatccctggtcaccttactatcttccaacatcttacctaggcttgctgcttttgtttgggtcatatatttaactcgctcattagaggacattctgttttttccaagaccaacaaaaaagcaacgaaattgctgtattattaaaggactgttatagaagtttttttatcctctctttgtttccattattcttattcctattttttcgttgcttacttttgatatccactatgagcttttccaccataaatagcaacgtcaataaaaccaccggcgatagcaataataacaccaccgagaacagttcgactgcagaccttttaggaatggacttgttgcagagcgggcctcgactgatgaacacgatgcagccaaacaactcttctgacatgctgcacattaacaacaagactaataacgttcaacaaccagctggaaacacaaatatcagcagtgctaatgcgggagcaaaggctccagcaaatgagttcgtaagaaaactgttcaggatactggaaaacaatgaatatcctgacattgtaacttggactgagaacggcaaaagtttcgtcgttttggacacaggaaagttcactacgcatatattgcctaatcacttcaaacattcaaattttgcatcttttgtaaggcaactaaacaagtatgactttcacaaggttaagagaagtcccgaggaaagacagagatgtaaatatggcgaacaaagttgggagtttcagcatccagaatttagagtccattacggaaaaggtctcgataacatcaaaaggaaaattccggcgcaaaggaaagtgcttttggatgaatctcaaaaggctcttttgcatttcaatagtgaaggcactaaccccaacaatccttctgggtctcttttgaatgaatccaccacagagctgttgttaagcaataccgtaagtaaagatgcatttggaaatctaagaaggcgagtagacaaactacaaaaggagttggatatgtccaaaatggagagttatgctactaaagtagaactacaaaagttgaactcgaaatacaatacggttatcgaaagtttgataacattcaagaccataaatgaaaatttactcaacaacttcaacactctgtgttccactttggcaaataatggtattgaagtgccaatatttggcgacaatggaaaccgtaacccaactggtaataccaacccagcaacaacaacagctatccaaagcaacaacaacaccaacaatgcttctccggcaacatctacagtttccttacaactacctaatttacccgatcagaatagcctaacaccaaatgctcaaaataacacagtcacgctacgaaaaggtttccatgtactgttggtggaagatgacgcagtgtctatacagttgtgttcaaaatttttacggaaatatggctgtactgtccaagttgtcagcgacggtctttcagctatctcaacactagagaagtataggtatgatttggttttaatggacattgttatgccaaacctagatggtgccacagcgacatccattgtcagaagttttgataatgagactcccatcattgccatgacaggtaacattatgaatcaagacttgatcacatacttacaacatggaatgaatgatatcttggccaaaccattcacgagggatgatttacactcaattttaatacgttatctaaaggaccgtattcctttatgcgaacagcaattaccacctcgcaactcttcgccacaaactcattccaacaccaatactgctaattcgaatcctaatacgattaatgaacagtcgttagccatgttaccacaagataatccgtcaactactacccctgttaccccaggtgcctctatatcttctgcacagcatgttcaacaaggtcaacaagaacagcagcatcaaattttccatgctcagcagcagcagcagcatcacaacgccattgctaatgctaggtcagacgtagccataccgaatttggaacatgaaatcaacactgtaccacattcctcaatgggttccactccgcaattaccacaatctacacttcaagaaaaccagctatcataaaattttacaaatagccttgcgtctaagttagcagaggacattctgtattcctgaggagtttctttatatttattatgtgatcttggaggattatcattttcttttcgttcaatattttatccccttcagttatttccagttatctacatcaaaatgtttgaattttatttctttctgccgctctcaaattcactctcatttcttttttctttgtttttcttatatttactatatatatatatatatatatatatatatagccaaaaacaataacagacacagtaatttagtatgcgttta

SEQ ID NO: 1483 - DNA, 1361 bp, Saccharomyces cerevisiae
ctagaaccttagcatactaaaacatgttgcagagacattccttgaagttggggaaattctccatcagaacactcgctactggtgccccattagatgcatccaaactaaaaattactagaaacccaaatccatccaagccaagaccaaatgaagaattagtgttcggccagacattcaccgatcatatgttgaccattccttggtcagccaaagaagggtggggcactccacacatcaagccttacggtaatctttctcttgacccatctgcttgtgtattccattatgcatttgaattatttgaaggtttgaaagcctacagaactcctcaaaatactatcaccatgttccgtccggataagaacatggcccgtatgaacaagtctgccgctagaatttgtttgccaactttcgaatctgaagaattgatcaaacttaccgggaaattgatcgaacaagataaacacttggttcctcaaggtaatggttactcattatacatcagaccaacaatgattggtacatccaagggtttaggtgttggcactccctccgaggctcttctttatgttattacttctccagtcggtccttattataagactggtttcaaagccgtacgtcttgaagcaacagactatgctacaagagcttggccaggtggtgttggcgacaaaaaattgggtgctaactatgccccatgcatcttacctcaactacaagctgccaaaagagggtaccaacaaaatctatggttgttcggcccagaaaagaacatcactgaggttggtactatgaacgtgttcttcgttttcctcaacaaagtcactggcaagaaggaattggttaccgctccattagatggtaccattttagaaggtgttaccagagactctgttttaacattggctcgtgacaaactagatcctcaagaatgggacatcaacgagcgttattacactattactgaagtcgccactagagcaaaacaaggtgaactattagaagccttcggttctggtactgctgctgtcgtttcacctatcaaggaaattggctggaacaacgaagatattcatgttccactattgcctggtgaacaatgtggtgcattgaccaagcaagttgctcaatggattgctgatatccaatacggtagagtcaattatggtaactggtcaaaaactgttgccgacttgaactaatgataatgaaggtaaacatcccctccccccccaaaaaaaaaaaacgagaattcctctcagaggatctgtttttctctcactttattcacatagatacatacttttttacaattcctgttgagtttatttattataagaaatattggattactatta

SEQ ID NO: 1484 - DNA, 1516 bp, Saccharomyces cerevisiae
ggaacaacaacagcaaagagagcaagaacatcatcagaaataccaatgttgaagtcagccgtttattcaattttagccgcttctttggttaatgcaggtaccatacccctcggaaagttatctgacattgacaaaatcggaactcaaacggaaattttcccatttttgggtggttctgggccatactactctttccctggtgattatggtatttctcgtgatttgccggaaagttgtgaaatgaagcaagtgcaaatggttggtagacacggtgaaagataccccactgtcagcaaagccaaaagtatcatgacaacgtggtacaaattgagtaactataccggtcaattcagcggagcattgtctttcttgaacgatgactacgaatttttcattcgtgacaccaaaaacctagaaatggaaaccacacttgccaattcggtcaatgttttgaacccatataccggtgagatgaatgctaagagacacgctcgtgatttcttggcgcaatatggctacatggtcgaaaaccaaaccagttttgccgtttttacgtctaactcgaacagatgtcatgatactgcccagtatttcattgacggtttgggtgataaattcaacatatccttgcaaaccatcagtgaagccgagtctgctggtgccaatactctgagtgcccaccattcgtgtcctgcttgggacgatgatgtcaacgatgacattttgaaaaaatatgataccaaatatttgagtggtattgccaagagattaaacaaggaaaacaagggtttgaatctgacttcaagtgatgcaaacactttttttgcatggtgtgcatatgaaataaacgctagaggttacagtgacatctgtaacatcttcaccaaagatgaattggtccgtttctcctacggccaagacttggaaacttattatcaaacgggaccaggctatgacgtcgtcagatccgtcggtgccaacttgttcaacgcttcagtgaaactactaaaggaaagtgaggtccaggaccaaaaggtttggttgagtttcacccacgataccgatattctgaactatttgaccactatcggcataatcgatgaccaaaataacttgaccgccgaacatgttccattcatggaaaacactttccacagatcctggtacgttccacaaggtgctcgtgtttacactgaaaagttccagtgttccaatgacacctatgttagatacgtcatcaacgatgctgtcgttccaattgaaacctgttctactggtccagggttctcttgtgaaataaatgacttctacggctatgctgaaaagagagtagccggtactgacttcctaaaggtctgtaacgtcagcagcgtcagtaactctactgaattgacctttttctgggactggaataccaagcactacaacgacactttattaaaacagtaaatagacctaatatgatttatgtaattttagaaactaaatatgaatgctaatttttttcttattttga

SEQ ID NO: 1485 - DNA, 1948 bp, Saccharomyces cerevisiae
ttatacattttacctagtatgctgggaacctttttttccgtattctattctattccttgccttacttttcttattattttctatataaccaatttcaataatactttttaactgtcataaacgcattttgtttattacaaattaaaagaattaaatataatcagtgcaattaataactccacaagtagcaaaagcaatggccgccattagagactacaagaccgcactagactttaccaagagcctaccaagaccggatggtttgtcagtgcaggaattgatggactccaagatcagaggtgggttgacttataacgattttttaatcttaccaggtttagtcgattttgcgtcctctgaagttagcctacagaccaagctaaccaggaatattactttaaatattccattagtttcctctccaatggacacggtgacagagtcagaaatggccacttttatggctctgttgggtggtatcggtttcattcaccataactgtaccccagaggaccaagctgacatggtcagaagagtcaagaactatgaaaatgggtttattaacaaccctatagtgatttctccaactacgaccgttggtgaagctaagagcatgaaggaaaagtatggatttgcaggcttccctgtcacgacagatggaaagagaaatgcaaagttggtgggtgtcatcacctctcgtgatatacaattcgttgaggacaactctttactcgttcaggatgtcatgaccaaaaaccctgttaccggcgcacaaggtatcacattatcagaaggtaacgaaattctaaagaaaatcaaaaagggtaggctattggttgttgatgaaaagggtaacttagtttctatgctttcccgaactgatttaatgaaaaatcagaactacccattagcgtccaaatctgccaacaccaagcaactgttatgtggtgcttctattgggactatggacgctgataaagaaagactaagattattggtaaaagctgggttggatgtcgtcatattggattcatcccaaggaaactctatcttcgaattgaacatgctcaagtgggtcaaagagagtttcccaggtctggaagtcatcgctggtaacgttgtcaccagggaacaagctgccaatttgattgctgccggtgcggacggtttgagaattggtatgggaactggctctatttgtattacccaagaagttatggcttgtggtaggccacaaggtacagccgtctacaatgtgtgtgaatttgctaaccaattcggtgttccatgtatggctgatggtggtgttcaaaacattggtcatattaccaaagctttggctcttggttcttctactgttatgatgggtggtatgttggccggtactaccgaatcaccaggtgaatatttctatcaagatggtaaaagattgaaggcgtatcgtggtatgggctccattgacgccatgcaaaagactggtaccaaaggtaatgcatctacctcccgttacttttccgaatcagacagtgttttggtcgcacaaggtgtctccggtgctgtcgttgacaaaggatccattaagaaatttattccatatttgtacaatggtttacaacattcctgtcaagacatcggctgtaggtcgctaactttattaaagaataatgttcaaaggggtaaagttagatttgaattcagaaccgcttctgctcaactagaaggtggcgttcataatttacattcttacgaaaagcgtttacataactgaatgttaaaatggcatcatcaatacagtattactgatgttatgttatttagtgctgtccgtatgtcctcctgttcttttttgggctacaatttaattgatggggtgttatgtttacgatatttcaattatgttaatatttagtatgtttatatcttctcattaatgaatagttaattttta

SEQ ID NO: 1486 - DNA, 828 bp, Saccharomyces cerevisiae
gggaaaaggtaaatcaaggaagcattatgtcgttgccaattatcaaagtccattggttggaccattccagagcgttcagacttttgtggttattagaccatttgaaccttgaatatgaaattgtcccttataaaagagatgctaacttccgtgctccaccagaattaaagaaaattcacccattaggaagatctccattgttagaagttcaagacagagaaactggtaagaagaagatacttgccgagtccggtttcatcttccaatatgtcttgcagcattttgatcattcacacgttttaatgagcgaagatgctgatattgcagaccagattaactattatctgttttatgtagaaggttccttgcaaccacctttaatgattgagttcattctttcaaaggtgaaggattctggtatgcccttccctatttcgtacttggcaagaaaagtggcagacaagatcagtcaggcatactctagtggtgaagttaagaaccagttcgactttgtggagggtgaaatttccaaaaataacggctacctggttgatgggaagttgagcggtgccgatatcttgatgtctttccctttgcagatggcgtttgaaagaaagtttgccgcaccagaggattatcctgccatttccaaatggttaaagaccataacctcagaggagtcgtatgctgcttctaaggaaaaggcgcgtgctttaggtagcaatttctaaaccgttttgttgcgttcgtacggcactagcagccgcgtaattcgttcacacacttcaatacatatgtatgtatacgtatatagtctgttgcgacaca

SEQ ID NO: 1487 - DNA, 837 bp, Saccharomyces cerevisiae
atgggcaaggttattttgattacaggtgcctcccgtgggattggcctgcaattggtgaaaactgttatcgaagaggacgatgaatgcatcgtctacggcgtagcaagaacggaagctggtctgcagtctttgcaaagagaatacggtgcagacaaatttgtctatcgtgtcctcgacatcacggacaggtctcgaatggaagcgttggtggaggaaatccggcaaaagcatggaaaactggacggtattgtcgcaaatgcggggatgctagaaccggtgaagtccatctcccagtccaactccgaacacgacatcaagcagtgggaacggctgttcgatgtgaactttttcagcattgtctctttggtggcactgtgtttacccctcttgaagagctcgccatttgtaggcaacattgtcttcgtcagctctggagccagtgtgaaaccatataacggatggtcggcgtacggctgctcgaaagccgcattaaaccactttgccatggacattgccagtgaagagcccagtgataaagtgcgtgccgtgtgtattgcaccgggcgtcgttgacacgcagatgcagaaagatattagggaaacattgggtcctcagggcatgacacccaaggctctcgagaggtttactcaattgtacaagacttcgtcactgctggacccaaaggtgcctgcggcggtactagcgcaactcgtcctgaaaggtattcccgactctttgaacggtcaatatctccgctacaacgatgagcgactggggccggtgcagggctagtactaaactatattatgtaaaagggtatagttatagtttttagct

SEQ ID NO: 1488 - DNA, 847 bp, Saccharomyces cerevisiae
aaaaaagggtctaactacagcgtgtaacaggttaaaaaaacatgggtaaagttattttagttacaggtgtttccagaggtatcggtaagtccatcgtggatgttcttttcagtttggacaaggacacggttgtttacggtgtagccaggtctgaggcacccttgaagaagttgaaagagaagtatggcgacaggtttttttacgttgtcggtgatattaccgaggattccgtgttgaagcagttggttaacgctgctgttaagggccacggcaagatcgactccttggttgccaacgctggtgtcctagagcccgtgcaaaatgtcaacgagattgatgtcaacgcttggaagaagctgtatgacatcaacttcttcagcattgtttccttggttggcattgcgttacctgaattgaagaagaccaacggtaacgtggtattcgtcagttcggacgcctgtaacatgtacttcagcagttggggagcttacggttcttcaaaagccgctctgaaccacttcgccatgactctggccaacgaggaaaggcaagtgaaagccattgccgtcgccccaggtattgtggacacagatatgcaagttaacattagggagaacgtggggccttcctccatgagtgcagagcaattgaagatgtttagaggtttaaaggagaataaccagttgctggatagctctgtgccagctacagtttatgccaaattggcccttcatggtattcctgacggtgttaatggacagtacttgagctataatgaccctgccttggcggactttatgccttgaggatagcaggtacatataaattgttacatactaagtcgatg

SEQ ID NO: 1489 - DNA, 1185 bp, Saccharomyces cerevisiae
caacgaaaacgctttatttttcacacaaccgcaaaaatggctgccgtcacattacatctaagagctgaaactaaacccctagaggcacgtgctgccttaacacctaccacggttaaaaaactgatagctaagggcttcaaaatatatgtagaggacagtccacaatctactttcaatattaacgaatatcgtcaagcaggtgccattatagtgcctgcaggttcatggaaaaccgctccacgcgacagaatcattataggtttgaaggaaatgcctgaaaccgatactttccctctagtccacgaacacatccagtttgctcactgctacaaagaccaagctgggtggcaaaatgtccttatgagatttattaagggacacggtactctatatgatttggaatttttggaaaatgaccaaggtagaagagttgctgcctttggattttacgctgggttcgcaggtgcagcccttggtgtaagagactgggcattcaagcaaacgcattctgacgatgaagacttgcctgcagtgtcgccttaccccaatgaaaaggcattggttaaagatgttaccaaagattataaagaagccttagccaccggagccagaaagccaaccgtgttaatcattggtgcgctaggaagatgtggttccggtgccatcgatctgttgcacaaagttggtattccagatgctaacatattaaaatgggatatcaaagaaacttcccgtggtggtccctttgacgaaattccacaagctgatatttttatcaattgtatatatctatcgaagccaattgctcctttcactaacatggagaaactgaataatcctaacagaagactaaggaccgtggtggacgtatcagcagacactaccaaccctcacaaccccatcccaatatacactgtggctactgtgtttaacaaacctaccgttctggtacctaccactgccgggcctaaattatctgtcatctctattgatcacttgccttctttgctgccaagagaagcttcagaatttttctctcatgatctcttaccatctttagagctcctacctcaaagaaaaactgctcctgtctgggttagagccaagaaattgttcgatagacattgcgctcgtgttaaaagatcttcaagattgtagtttacatttaaagtatatacattatcg

SEQ ID NO: 1490 - DNA, 1193 bp, Saccharomyces cerevisiae
gtaaaagcagcaagaaattacagggaagatggctggaaatgcaaactcagtagacgaggaagttaccaggatattaggaggcatatatcttggcggaatccgtccaattattgaccacagaccattgggtgcagaatttaacattactcatattctttctgttatcaaattccaggtcattccagagtatctaataaggaaaggttacacgctaaaaaacatacccatcgatgatgatgatgtgactgatgtgctgcaatacttcgatgaaacgaaccgattcattgatcaatgcttgttccccaatgaagttgagtattcgcccagattagtagatttcaagaagaaaccacaacgtggtgctgtttttgctcattgtcaagcaggactctcgagatctgtaaccttcatagtagcctacctaatgtatcgttatggattgtcactatcaatggctatgcacgctgtcaagaggaagaaaccgagtgttgagccaaacgagaatttcatggaacaattacatctctttgagaaaatgggtggagattttgtcgatttcgacaacccagcctataagcagtggaagctgaagcaatctatcaagttagatccatcgggcagcgaattggtctccaattctggaatgtttaaagattcggagtcgtcgcaagacttggataaattaactgaagctgagaagagcaaggtcaccgcagtgagatgtaagaagtgcagaaccaaattggcgttatctacatctttcatcgcgcatgacccaccaagtaaggaatcatcagagggacacttcatcaagagggccgccaactcccatcgtattattgatattcaagagtcacaagcaaattgctctcattttttcatcgaacctttaaaatggatgcaacctgaactacaaggcaagcaagagttagaagggaagttttcatgtccaggctgttcaagtaaagttggcggttacaactggaaaggatctaggtgcagttgtggtaagtgggtcatccccgctatccacctgcaaactagtaaagtggatcaatttcccttacaatccactgctttgcccaacatggttaattttgaatccgagaaagtaaatagataacttagatataatcagcaaatataactaccactaagcacttttggtgcacttgtgtatgtatacatcttaa

SEQ ID NO: 1491 - DNA, 1063 bp, Saccharomyces cerevisiae
tatagcattatgatggggtttgaatggggttttaaacccagcagtaaaataacacagagtacagtcagttcacaaggcacaggcaatgtaatgattccaactgctggagtgaaacaaaaaaggcggtatgccaacgaggagcaagaagaggaagaactacctcgtaacaagaatgtgatgaaatatgggggcgtctccaagaggaggcctcagccaggatcgctcatcagagggcagcctctgcccttgcaacgaggcatggaactaatgaacaagaaccaattacagcagttgttggtggatttgatgacaaaacatccagaaatacaacaaagcgtacatacgagagtcatcggattagacttcagtatacaaaagtgtctggacatgttgaaacaaaaatcagaagccgtttaccagagcataccttacaataggtcttatgagagtaataaattagatgactatgctttcgtgagaatgaaacctcaaattctggagttcttaaactgtttggtggatttcatactggataacattccaccacgtttggaaaatttgcacgcatcattaaaattcttagacatttgcacggaattagttatcaaattgcccagatttgaattagctagtaataattactactacgataaatgcattgaacaattgtctcacgtatggtgtacgcttattgaacatgttgcccgtgacaggataattttattagcagataatagctccgtctggaaaagtcatatgacaagattacaggtatacaatgaacattcaaatgggttattggaacgcccactccagctgttcaaatctttagatatgggtagcccttcagcagcatcgtcatcaacattatcacttcaagaaagtattatttaccaccacgataccatgacagcaaacgaaaacaataacaatagtggtagcgctgctactgattcgccctttaactaaggatagaatggttcttttgctttttcaaatacattaatatgtatatatatgtatatataaatgtatgactgtgtaatgttacatatgcagaagt

SEQ ID NO: 1492 - DNA, 1286 bp, Saccharomyces cerevisiae
gttttataaacatcatgaccaattcagtaaagactaatgggccaagctcctcagacatggagtactactataagtcgctctatccattcaaacacattttcaactggctgaatcattcgcccaaaccttctagggatatgattaacagagaattcgctatggcgttcaggtcaggtgcttacaaaaggtataattcttttaactctgtgcaagatttcaaagcacaaatagaaaaagccaacccagacagatttgaaatcggtgccatatataacaaaccgccaagagaacgtgatactctattaaaaagcgaattgaaagctttagagaaggagttggtgtttgatattgatatggatgattacgatgccttcagaacgtgttgctccggagcccaagtttgctctaagtgctggaaatttatatctttggcaatgaaaattacgaacacggccctaagagaggattttggttataaggacttcatctgggtattttcaggtagacgtggtgctcattgttgggtaagcgacaaacgggcacgggctttgacggatgtacaacgaagaaacgttttagattatgtcaacgtgattagagacagaaatactgacaagcgattggctttgaagaggccttatcaccctcatcttgctcgttctttggagcaattgaaacctttctttgtcagcattatgctcgaagagcaaaatccttgggaagatgaccaacatgctatccaaactttattgcctgcattatatgataaacaattgattgattcattaaagaagtattggctggacaatccaaggaggtcaagcaaagagaagtggaatgatatagatcagatagctacatcgctcttcaaaggccccaagcaagactctcacataattaagttacgtgaatgtaaggaagatctcgtattgatgactctttatccgaagctggatgtggaagttacaaagcaaacaattcatttgttaaaggcccctttttgtattcatcctgctacggggaatgtctgtgtgcctattgatgaatcctttgcacctgaaaaagcacctaagctaattgatcttcaaacagaaatggagaaaaataatgatgtttcattaacagctttacaaccttttatcaatcagttccaagcatatgtgagttctcttttgaaaaatgaactgggttcagtgaaaagagaacgtgaagatgatgatgaaccggcttctttagatttctgatggtgaaatctttttgtaacaataaaaagggtgtatatatat

SEQ ID NO: 1493 - DNA, 4593 bp, Saccharomyces cerevisiae
aggaagaatctatcagcgacgcgaaattgctaatctgtacaactgaatatgtataacccgtaccagcaacagggcatgggttaccagcagcaacagcagcaacagcagcaacaaccaaatggattctacccgcagcagcagcaaggtcagtcttcaaaccagccccaaggccagcctcaaccacaacagcaaatggcgtttaaccagcctcaggctaccggaattggtgggatgcctcaaagttttggtaattctttctcaagtatgccacagcagccccaaacgggttacaataataatggaaataatggtagtgtatatggtaatggtaattttggccaacaaccccagcagcaacaacagcaggcgaaaccgcagcatacgggatacgtaccaaattccagtatgcctatgatgaatactactggcaccatgcctccacctaatccggctcaacagcctcagctacaatccatacaaccccaaggaacaggctattaccaagctgctaatactgcaaatgtacactcagtacaacctttgcaatctcaagggacaggatattatgtgtctacacccaatttgatctcttctaatcaaacccagcagccccttcaggcccagggcactggttattatcaatctcaacctcaacaggtgccacctcctcagcaagcacagtccttgcaacctttgaagccgcagcaaacaggattttaccttcaaccgcaaaaccaagctcccttagaaccattaaagcccaccgcaactggctttgtcaactcatttgccaacaacggtctaaacaatgatatcaaaatccctgccattagattgtcgtttattactgcccaagatcaggcaaaatttgagactctattcagatcaattgttaccaatggttcgaatactgtttccggtgctaattgtaggaaaattttgatgagatccggtttgccaccttctcaactcgcaagaatttggacgctttgtgatacatcaaaagcaggtgagttactgtttcctgaatttgcattagcaatgcatttgatcaatgatgtcttacaaggtgacactatcccttacgaattggattctaagacaaaaaacgaagtttcaagttttattgacgccattaatttaagcattgcaaaccaggattcttccgcaaacgatgccccaaaaactccctttgatgaattcattacagcgggcgtacaaaatttgcaacctcaaccaacaggatatatgcctcaaactagttttggtatcccattacagtctcaaattactggaggcggtgttgcctcggcgttgaatcctcaatccacaggatttatggcaccaaccactttcaacatgtcaatgaataccggaactcccggattgaacccccaaattactggaggagcacctgcctctatgcaacccaacattactggcaatgctttgcaacctcagacaactggtatgatgccacagacaactggtatgatgccacagacaactggtatgatgccacagacttcatttggcgttaatttaggacctcagttgaccggcggtgctttgcaatctcagtataccggaggatatggttccgttatgccccagcaaagcggtcctgcaagtatgcccaatttgtcctttaatcaacaaggattacaatctcagttaaccgggttgcaaccccaaccaacgggttttctaccaccatctaactttagtgctaccatgccgttgactgcccaaaagacaggatttggtaataacgaaatttataccaaatccaactttaataataacttaattgataactcaagtcaagacaaaatttccacggaggaaaaatctttgttttataaaatttttgaaacttttgatactcaaaacaaaggtttgttagattcccccactgctgtggagatttttagaaaatctggcttaaatcgtgcagatttggagcaaatttggaacctttgtgatataaacaacaccggccaattgaataaacaagaatttgcactaggtatgcacttggtttacggtaaattaaacgggaagccaatccccaatgtcctaccttcaagtttaattccctccagcacaaaacttttagacaacttaaagaaccaattaaagacagagccaacgaccacaaaagaaaaaccttcgtttggtaaaatcgatgccttgagctacaaaaataatgatgatgatgttttgccgaactatagaaatcgtaggaaggtttactctgcgaaaaatgaagagcaatcttctttttcttcaccatctgctaaatctgttaatcattctagcagcacccttcaaaccgatgacatttcggtagataagactgttgaaaagaagacagcgaaaccaaaatatgctgggttttcaagagaaataaatctgaaaaatattgcttcactggaaaatgagatcaaaaatatcagcaatcctgaaaactgttatgacagttctattccatcagatttgacaagccgctttgatgccatcatcgccaaacttccaaacctattcaatgaaatttctacaattgataatgagattaccaatgcaaaaattcagttgtatagaaaaaaaaatccttcttcgataattggatctggtccaaatggtgaaataactgaaaatgataggaagaaagctaagagtagggctttgttgagagcaaggatgtctgctctaacaggaaaatcaacggaatcggaggattcactttccatggaagatgaacagcaaagtgctgaaatcaagagaatccagcaggaaaatggtaagaaccaagaaatcattaaagacataaggtcatctatatcagatatttctgcatccttgaagtctactatgacaggatcgaatatgatatccaatcaagaatttgaaagatgggaatttggcatagggttagaagatggtgttcgtgaatttttggatgatctgaagtcaaattcaaataaatcagtgactgagtcatctccctttgtgccttcctcaacaccaacccctgtagatgaccgttcctcgtcgccttcttattctcagttcaaaactgctgaagaaagagcagcttatctgaaagaacaggcaaaaaagagaatgaaggaaaaattagctaaatttgataagaataggcgaaatgttactcaaagttccagatcgattagcagtgaaaactctcgagaacagccacaacagattgctggttcttccaatttagttgaacctagagcaactccattccaagaagaaaaatatgtggaagtcgctcaaccaactcaacctgttcaatcaacacaacctgttcaaccaactcaacctgttcagccaactcaacctgttcagccaactcaacctgttcagccaactcaacctgttcaaccaactcaacctgttcagaatgtatataatgcaaagcaagaatccgatgatgaagatgaagatgatgaagaaaagcgtttacaagaggagctaaaacgattgaaacttaaaaaaaaggctgataaagaaaaaagacttgcagctttacgtaagcaaattgaggatgctcaaaatgaaagtgacgaagaggagacaaacggaaaagacaactttggcggccatgtgaacgttcctcaggccgctccagtggcaccatctgcagctttttcgcaaaattctactaatgctcctcgctcggtacacgctgctgttacccctgccgcaggtaagaacagtactggtctgccttccacgacaatgggccataatccatacttcaaggatgcatcagctagctctacatctactttcgatgctcgcgctgcagaaatgcaaagaagaatccaaagaggattggatgaggacgaggatgatggatggtctgatgaagacgagagtaataaccgcgtagctgtagataataaggttgaagaagcaaagattggtcatcctgatcatgcacgtgctccacctgttactgctgctcccttgccgtctgttacccctgttccacctgctgtccctgtccctcaggcgaatacctctaatgaaaagagtagtcctattccaatagctccgataccaccttctgttactcaggagccacccgtcccgttggctccccctttgcctgctgttgatggctttcaagaacctccaattccctcagcacctgcaatagctactgccgtgcaaaaatcgggttcttccaccccagctttagctggaggcgttttgcctccacccccacctttaccaactcaacaagcttccacttcagaacctattatcgctcacgttgataactacaatggtgctgaaaaaggcacgggcgcatatggatccgattctgatgatgacgttttatcgattcctgaatcagttggtacagatgaagaggaagaaggggcacaaccagtttctactgcaggtatcccatcaattccacctgcaggtattcctccacccccaccccttccatgaagatttaatttgctttctatagatacgtatgtatactaatttctgaaaggatgtagaattacaaatatgatattgattatttttttctaggctatatgaata

SEQ ID NO: 1494 - DNA, 600 bp, Saccharomyces cerevisiae
atggcgaaacacattgttgctgcccttcaaatcggctcttgtccgggctctactaaggataccttgaaaaaaattttgtcatatgagaaggagatcaaggaatctggtgccaagttggtcgttatcccagaagccactcttggtggttatccaaagggatcgaactttggggtttatctaggctaccgtcttcaagaaggaagggaggagtatgctaagtatcttgccgaagcaattgagatcggaaacggagagaaatatccagaaattagtcagttgtgcgcactatcgaaggccaccgacgcatccttatgtgtggggtgtatagagcgcgatgggacgacattatattgtaccatggtttatatagatcctaaagatggctacgttgggaagcatcgaaaactgatgccgacagctggcgaaagactgatatggggtcaaggcgatggttcgactctgcctgtcgtggataccgctgctgggaagattggcggtgctatctgctgggagaacatgatgcctctactgagatacgccatgtataaaaaaggggttgagatctggtgtgccccaacggtggatgctaggcctatttag

SEQ ID NO: 1495 - DNA, 832 bp, Saccharomyces cerevisiae
agttcgatctttctctccgtaccagtccacgacataaaagtaaaagataaaacagactatacatgatgttaagactagtaactaaagggttgccgaaagtgacaccttctgcagctaaggctgtgctagtgcgtggttccttgctgcactcattctctaccagcgctagattcaataatagtgtcgctgaagatgaggccaagatcgttttgaaagacaagaacaggccattgagaattgacagagaattgcctgacccaaccacggagaggagaaagcgaatagctggatttttgttgttttctgtggccattgggtccgcactatctttgatcttcaactatgaaaagacggagtcccccattatctccaacacgctgtattatataagacggtctccagcaactaaaaacatactgggtgagagcatagaatttgatggtatcatcccttgggtctacggtgaactgaactctgtgaagggtaggattaacattacgttttatatcaagggggacaaaaacgttactggaaccgttagactggttgccgataggaacactcacgacgaagagtttttgattcatgaatggagcgtcactgccgctggccaaaagatcgatttgctagctgaaaataccaagacaccaatttaatagcaagtatggtgctatttgtctgtaaatatcctttattattattttatttttatcgttattacaagtggtctgggtatctatacaaatgcaaaactatgtaggtacgtttatatatctatatgcatatatattagtgtggccgtaagctgtcaataaattctctcttgttgaca

SEQ ID NO: 1496 - DNA, 1112 bp, Saccharomyces cerevisiae
agaaacaaccaagtacgcaatgcagaagagcatattgctgactaaacctgacggaacacaatcgaatctacacagcatcaaaacggaaacgcccaccacggtggagttcgactcggagcagatggaaaggggccacagggaaagaggtcgtagcaagaagaaaagaggcgaacgagactcaaacgtgagcagtctgtcgcggtcgagaagcagggccagtagccgcagcagagtaagggaggaagagttcctcaagtggaccgtgttgaggcaggacccctcgatgcggttgagggtcgtggatgtggattctgaagaggaaggtgagggcaacgacgaagatgacgacgacggcgacggcgacgatatggacgaggaagagtccgatgaagagcaagtgagcgatatagagaacgatttagagattgacgaggagttccactacgatctgggcatgaaagtgttacccaacttttgtaccagcataaacgaagtgctagactccagcaagccctggatagccaagtacgagatcagcatccgtggccacgaaaacgaagacgtgtctctggagcaactcgacggaggctacgtcagagccatgcaactactcaccaagggtgccggcgcagaggccgggaaccaaaggtccttcatcctctacacggacctgagcagcgagtccacctacgccctgacctatctcatgggcgcagctgtcaaccagggagacaccgtctacattgtccactgggagccctcgaagcccacggacgactcccagatgttcgccaacgttgccagaatcagaaagcacgtcatgcacctgtttgactgcgtcgcgggcgtgctcgacgacctcgacgtcgtcgtcctctccttgacccatccgtacccaaaacacctcctcaacgagatgatccacggcctcaagccagtcgccctgtgctgctccctctcggtcatcctgtccactctgcagaacttcgtctgctctgtgcccatcctcgcggttagaaagaagctgaaacgtgccaagcgcaagggcatcagcgagtgaccaataatcactgcactaattcctttttagcaacacatacttatatacagca

SEQ ID NO: 1497 - DNA, 1305 bp, Saccharomyces cerevisiae
actgttttatacaagtttttatactgcatatccatatagaattgatgaaaatcttccatactgtcgaagaagttgttcaatggagaacacaggagctgagggaaactagatttagagaaactattgggttcgttcccacaatgggttgcctgcattcgggtcacgctagtttgatctcgcagtctgtgaaggaaaacacctatactgtggtcagtatatttgtaaatccctcccagtttgcgccaacggaagatctagataactatcctcgaactttgccagacgacatcaaattgcttgagtcgttgaaggtggatgttctatttgctcctaatgcacacgtgatgtatccacagggaattccgctcgacatagaagagcagaaaggcccttttgttagtgttcttggattgagtgaaaaattagaggggaagacgagacctaacttctttaggggcgtggcaactgtcgtgactaaactattcaatatcgttatggcggatgtggcttattttgggcagaaggacattcaacagttcattgttttacagtgtatggtggacgaactgtttgttaatacaaggctacaaatgatgcctattgtaagaaacaataatggactggctctgagtagtagaaacaaatatctttgtccagagtctttaaagatctctgaaaacctttaccgcgggctgaaagctgcggaaaatgctattaggagactagcaccagggggacgtctctccagatcagaaatcatcgatactgtgactcaaatatgggcaccctacgttgattcccacgatttcaaaatcgactatgtttccttagcagattttaagactcttgatgaactctccgatgttgaaaacaccagcgaacagcagccaatagtcattagttgtgctgtatacgtgactgaccgcgaaaaacccgatacggtcgtcagactaatagataacatcgttatttaaactaggtgattgggccttcccgtgtctgtgttgcagtatataccactcttatacagtatgcacgatattcttttaaaccaacaacgggatgatagatttcacgcttgatgactttttttttagacggctgaagggacgacatccccatcgctcaaaacacaaatatggaaaggacaaatcgtctttcacagtttgcatagtaaaagcaaagtttatactacttcagcaaagttgaagttgtttggcacttgtttcgtgctttctcaaatatcttagatcaccgtctgtctagagcatatatctattgtttgacgcaccccttttacaaaaa

SEQ ID NO: 1498 - DNA, 2704 bp, Saccharomyces cerevisiae
tctactgacgttggaatcagtggaagataaatcatgacggacgttgaaggctaccaacctaagagcaaggggaaaatctttccagatatgggtgagtcctttttctcatcagatgaggattcaccagctactgatgcagagatcgatgagaactatgatgataacagggaaacgtcagaaggacgtggagaaagggataccggcgccatggtaacagggttgaagaagcctcggaaaaagaccaagagtagcaggcatacagcggcggattcctctatgaatcaaatggacgctaaggataaagcgcttttgcaggacactaatagcgatataccagcagatttcgttccagattccgtctctggaatgttcagaagccatgactttagttatttgcggttaagaccagaccatgcttccaggcccctttggatctcgccaagtgacggtaggatcattctggagagtttctctccattagcagaacaggctcaggactttctggtcaccattgcagagcctataagtagaccctcccatattcatgaatacaagatcacagcatactctttgtatgcagctgtttctgtagggttggagacggatgatatcatttcagttctggatagattatccaaagtacccgttgctgaatcgataatcaacttcattaaaggggctaccatttcatacggtaaagtgaaactagttattaagcataatagatatttcgtggagactacacaagcagatattctgcaaatgttgctgaatgattccgtcatcgggcccctaagaatagatagcgatcatcaagtacagccaccagaggatgtactacagcaacaacttcagcaaaccgctggaaaacccgctactaatgttaatccgaacgatgtggaagccgtgtttagtgcagttataggtggtgataatgagcgggaagaagaagatgatgatattgatgccgttcactcctttgaaattgccaatgagtctgttgaagtcgtaaagaaaagatgtcaagaaatcgattatcccgtgttggaagaatacgactttagaaacgaccatagaaacccggatttagatattgatttgaaaccttccactcaaatcagaccctatcaagaaaaatcgctgagtaaaatgtttggtaatgggcgtgctcgttcagggattattgttttgccatgtggcgcaggtaaaactttggtcggtattaccgcagcatgtactataaaaaaatccgtaattgttttatgtacttcatcagtctccgtcatgcaatggaggcagcaatttttacaatggtgtaccttacaacctgaaaattgtgctgttttcacctctgataataaggaaatgttccagacagaatccggtttggttgtttccacttattcaatggtggcaaacacaagaaacaggtctcatgattcacaaaaagttatggatttcttgaccggtagggaatgggggttcattattcttgacgaagttcatgtggtgcccgccgcaatgttccgtagggtggtctccaccatcgcagcacacgccaaattgggactgaccgcaacgctggttagagaagatgataaaattggtgatctgaattttttaattggtccaaaactttatgaagcaaattggatggaattatcccaaaaaggacatattgcaaatgtccaatgtgcagaggtttggtgtcccatgacagcagaattttaccaagagtatttaagagaaactgcaaggaaaagaatgctactgtatatcatgaatccaacaaagtttcaggcatgccaattcttaattcaatatcacgaaaggaggggtgataagatcatcgttttttcagataatgtttacgccttacaagaatatgctttgaaaatgggaaaaccatttatttatggttccacaccacaacaagagcgtatgaacattctgcaaaatttccagtacaatgaccaaatcaataccatatttctatcaaaagttggtgatacttccatcgatttaccagaagctacctgtttaattcaaatatcttcgcactatgggtctcgtcgtcaagaagcccaaagattaggaagaattttaagagctaaaagacgtaatgacgaaggtttcaatgcgttcttttattctctggtttctaaggatacgcaagaaatgtactactcaacaaagagacaagcgtttttggtagatcaaggttacgcattcaaagtcattacacatttacacggaatggagaacattccaaatttggcatatgcttcacccagagaacgtagagagctattgcaagaagtattattgaagaacgaagaagctgctggtatcgaggtcggtgatgacgctgacaattctgttgggagaggttcaaatggccacaaaagatttaaatcaaaggccgttagaggtgaaggttcattgtctggtcttgctggcggtgaagatatggcatatatggaatacagtaccaataaaaacaaagaactgaaggaacatcatccattaatcagaaagatgtattataagaatttgaagaagtgaataggcttggtttcattgtcaccttcctattttgaatctattcagtcataatacctttttgttcccaccgtcttcttattctttcgtcgctgttctttcttttattgattcgtcacgtccattttcttccataatataa

SEQ ID NO: 1499 - DNA, 829 bp, Saccharomyces cerevisiae
tctaaaatagcaattagcaaaatggagaagatcaaagagaaattgaatagcttaaaattagaatctgagtcatggcaagaaaaatatgaggagctgagagaacagctcaaagaattagagcaatctaacactgaaaaagaaaacgagattaaatctttgtccgctaaaaacgagcaactcgacagtgaagtggagaagttagagagtcaattgtctgatacaaagcaattggctgaagactccaataacttgagatctaataatgagaactacaccaagaaaaaccaggatctagaacaacagctagaagacagtgaagccaaactgaaggaagcaatggataaactgaaagaggccgatttgaactctgagcaaatgggtagaaggatcgttgctttggaagaagaaagagatgaatgggaaaagaagtgcgaagaattccaaagcaaatatgaagaagctcaaaaagaattggacgaaattgctaattcattggaaaatttatgattcccattgataagactaaaattacggaagatacaaacgacaaacgcgctaaaggcaacggaggtgatgattttattattgctcacacaactgatgttgctgacagatggcaaatccttttcattttagttattatcattgggtgctttttggaaaaaagatgaactaagcctctctttatttcgtccattttattctagcttttacattatgctttcacctttaccaaaaaatagtatgtatttcttttccccttgctataaatcaaaagtacgtagaaacataaacaggcgagaaatacatatgcatatacgtctacact

SEQ ID NO: 1500 - DNA, 2937 bp, Saccharomyces cerevisiae
cgaagacgtgtaaaggatatataacgccaggttgatcatcactaaccatcatgtctgataatttgttatctttagagaatccggtggtgcctagtcactatgagttgcgtctagaaattgaccctaagcagtcgtcgcccaatttcaaaggatccgccataatccatttgaaattcaatccgaactccaccaccttagcttctatcgaagacagttttacccagttcaagttacattccaaggatttgattgtgttgtctgcacatgccaccatagggtctactaagtttgatctaaaaatttctcaggacactggaaagcatttgtcgattttcaactctgaatctcctattcaattgtccaacgattgccctctgattttgtccgtgcaatacgtgggtaaaattcgtgacataaaaacacatcatgataagacttttggtattttcaaaaccaattttatggatcgtaaaaccggtactgccaataatcacgtcgttgctactcactgccaaccgttttccgctagcaatattttcccatgtattgacgagccttcaaacaagtccacttttcaattgaacattgcaacggatgcacaatataaagccgtttccaatactcctgtagagatggtcgaagctttggatagttctcaaaaacatttggtgaaatttgccaagacacctttgatgactacttccgtatttggtttttctattggtgatttagaatttttgaaaacggaaatcaagttggaaggtgataggactattcccgtttcaatttatgcaccttgggatattgctaatgcagctttcactttagatacagtccagaaatatctacctttgttggaatcctattttaaatgtccataccctctgccaaagttagatttcgtcctactaccatatttaagtgacatggcaatggagaactttggtatgatcaccatccaactaaaccacctgctcataccaccaaatgccttggccaatgaaaccgtcagagagcaagcacagcaactcattgtccacgaactcgttcatcaatggatgggcaactacatatcttttgactcgtgggaatctctttggtttaatgagtctttcgctacttggttagcttgccacatactagaacagaatggtgacctatcccattattggacctcggaaccttatttactacagcaagtggagccgaccatgtgcagagatgcagctgacgttaatggaagaagcatatttcagattgcgcaacggaacactggcatagattctcaaacctccgatatttttgatcctgaggcatacacaaagggtattatcatgctgaggtccctgcaattggctacaggcgaatctcatctacaaaagggcctggaaagtgtatttgaagatactaaaacatttcatgcgagaagcgtcaaaccaatggatatatggaatcatatcggaaaatttttgaagtctcaaaatattacaaactttgtttcatcttggacaagaacgccaggcttacctgtcgttaaggtcgaagtagaagagaaagacgggaaaacgcaaacaaaattgactcaacacagatttatcaatcaattatctactgaagaaaaggatcagttagaagatgtcccatatcaggtacccttattcggggttctgccagatggtaaaatggatactaaaaatgtactattgacggataggaccttaaagttcgattatcctatcttagtaattaaccatttagcccaaggttattaccgcgtttcatatgagtccgaagagtgctatgcattgattaatgataaaataactgaggagacgttatccgagattgaccttcggaagattttcttagacttgtcgcagtttattggagatgagggtttccagaattctattcatttgcacggtctctttaagatactaaaccatatcgcttctccttccacaaagattgcatcaaaatattgggatcctctttccaaggggttggaagttctgcaaacgatcgatcgtgccagtttaacgagctctaaattacaatctttcttaaagaaaaaaattgtcattccccttttcaataagattgattggccccacggtgaatttgataaaagcacaaaccctcacgagttgaaagtcatgtctcaagtcttgtttttaaataaaaactccgcaaaatgtgctgaattgtgtcaaatttattttaaacatctattacagggcccacgttcgagcgtaccgttagaattagtgaactcaatccttgtcgtcgtatcgcaacattgtgcaaacatcaagcagtggaagaaaatattcgatttggtgaaacgcagttcctgtactggtatcacaaaccatgtcattaatatgtatgaccaaaacagtagcgaaaccgccatgttgattcaaaacggtgcaatagaatctcttggattctgtttagattctgatatcgtgaaaaaaactttgaattttatcacttccaatattgagtcagaggggatggaactggcattattcggatttaattacaactttaagaagaggctgaacaaaaacgagaaacctcaagaccaagtcgttcgtgaaacgatctgggagtggtatatgggcaattttgaccaatgggcacggaaggctacaaggaaaggtaccaccacgggggatcatctacacaaggcgttaaggagtatttccctgataatctttcaaatgtttgtagcagacgagccacagaagatagaaaagtttattaatttggagaaagagaagttgggtcaaagcttgttatctttggacgacatctgggcctctgtccagcaagatgaagagtccagaaagactataagaagagacttggcctccttggtctgattttttacaagtatttcaacacactatcgtacgtagatttagtagt

SEQ ID NO: 1501 - DNA, 1517 bp, Saccharomyces cerevisiae
gatatgcaatttcttgaggcgcaaaaggttgatcctgaaagcttttgtgatagactaccttcaagcaaagcgaacgtaaacggcaaagatggataccagcaaccacaaccaagaccacgactcccacgtggcggcacagagggagaacgacaataattatatgccaccttccccctccatgagcgagagttctatgatttttgaaagaaatgtagaggacccatcatacctttataaaacggtgtcaaacaacgctgcaaactctctctctaggcagagcagcaggaccagtttgttcaatcataataattctagtaataggaacttccataacttaagccagagatcgtctgctgtgaatctacatttgcaaccttctaggactaatgagtcaatagcatcgtaccagacatacaatccggattttgttgtgcagactccactggatcaccgtcgtaccttagagaatttcgtccctcctgcattagacgctggctgttctattgtaactgacgacacgactggccttgatgacgttgatatggtttattcgagaaggccatctaccatcggcctggatagagccctaggtaggacaagaagtctttcgtcacaatcttttgataacgaaacgtcgcctgcgcatccaagatctcccaacgaccatggttcaagactactaaggttttattcctacgctgacatgttgtccgatgacaacaataacaacgttagtaatgcgacatcaacatcatcaactgcgaaccccttgagaagacccccaatgcaaggtcactactcgttctcgtcgtcccttttgaattctccttctcatttgccttcccccccatcagcttcggcatcaccacctcagcatatgaacttcaccaaccctttcatcatatctagacgttactctaacacaacgatcaacaatgccaatgggggaaccagcgctggaagcactacgggggccgcactatcaagatcgccatcgaaccaacagtacttacttaaacaacaaaggtcaccttcagggagcgcccgttcaagaagaaacagcaataggcccggcagtgctgccaacattatgatcgggaaacctaaatccaaattccatatggaatccagtggcagtgaagggttttcttccgaagaggaggacaacactatgattgaaagagataaactcaatctaaagcaaaaattgcagtcacaactggcacaaccaccatcaattgccaacatggttaacgataatcacaataatactaataaacacaagaatactattaataataacatcaaaaatagccctgcgttcacaaactcgaatccaagttcaaaatcaaattcaaactctacaataacctctatgaatccagacacaaccaaataaagaaaactgaagggccgcgattgttcatttcttcaaccttcttctcctactctaaaaattcatttaagtctcttttttccatatatatagatatataacggtattttatgtatgcacg

SEQ ID NO: 1502 - DNA, 717 bp, Saccharomyces cerevisiae
tctctttgaaaacggaaggtgaagaacaaatcgagaaaatgtctgttgaaccagttgttgtcattgatggtaagggtcatttagtaggtcgtttagcttccgttgttgctaagcaattattaaacggtcaaaaaatcgttgttgttagagctgaagaattaaacatttctggtgaatttttcagaaacaaattaaagtaccatgatttcttgagaaaggctaccgctttcaataagacccgtggtccattccatttcagagccccatctagaatcttctacaaagctcttcgtggtatggtttctcacaagactgctcgtggtaaggccgctttggaacgtttaaaggtctttgaaggtatcccacctccatacgataagaagaagagagttgttgtcccacaagcattgagagttttgagattgaagccaggtagaaagtacaccaccttgggtaagttgtctacttccgttggttggaaatacgaagatgttgttgccaaattggaagcaaagagaaaggtttcatccgctgaatactatgccaagaagagagctttcaccaagaaagttgcctctgctaatgctactgctgctgaatctgatgttgctaaacaattagccgctttgggttactaagaaattaaaaatagtttttctttaatactttacattttgtaatataatcacaaatattttttagaaataataaaaacca

SEQ ID NO: 1503 - DNA, 1660 bp, Saccharomyces cerevisiae
aaggtttaaataatagtgtgtaaattgtgcgttcaattagcaaagaaaggcttggagagacacagtaataataaatgtctgttaccagtagggaacaaaaatttagtggtaagtatagttcgtatacagcccaggatcgccaagggcttgttaatgcggtgacatgtgttcttagctcgtcaagcgatcctgtggctgtgtcaagtgactattccaatagcttgagtattgccagagaggtcaacgcttatgctaaaattgccggatgtgattggacgtattatgtacaaaaattagaagttaccattggtaggaacacagacagcttgaacttgaatgctgtgcccggtacagtcgtgaagaagaatatagacattgatcttggtcctgccaaaattgtgtctaggaagcatgctgcaatcagattcaacctggagagcggatcatgggaattacagatattcggtagaaatggtgctaaggtcaattttagaaggattcccacaggtccagactctcctcctacggtgctacagtctggttgtatcatagacataggtggtgtgcaaatgatctttatattgccggaacaagaaactattatatcggattattgcctgaatcacctcatgcccaaattactatctacttatggtacgaatggtaacaacaacccgttgctacgtaacattatcgaaggttctacctatttaagagagcaaaggttacaggaagaggctcgattacaacagctggaccacctacacaccccattatcgtcatcatcagatgttaacccaataggggatccacatggagacacgattatgatggaagaagatgaagaagatgaaaattacaccagaggaggaattagaccgaatacatacacgtccagtagcaacaatgctgtcactaacggtaatgtaccccatatagaaaatccatcagacttgtcgctggatgaaaacagatatatcaaaccaccacagtcgtatgcatcgatgatcacccaagccattctttcaacacccgaaggtagtatttcattagcggatatttacaaatttatctctgacaactacgcattttacaggttttctcaaatggcgtggcagaactccgtgaggcataatctgtccctaaataaagccttcgagaaggtgcccaaaagagctggtcaacaaggtaaagggatgaattggaaaattagcgatgaagtcaggcgtgattttttgaacaagtggaatgctggtaaattgagtaagattagacgaggcgcctctgtgacaagacagctgcaattgcacatgtccaaatttggagaaatacctgctcctgaatcttcatcaattgacccgagggggataaaagcacagaaggtgaaaaagtctttacaagctacgagctcgattttaggtgaaagcgccccgcaattacaaagaactcaactcactggccaaatttctactacgacatccatggacgtaacaacaaacgcaaacgtgaacaattcctctctgagttgaaattcagcgtcgtcgaacccatatgtattattaaacaataaagaacaaagacccgttaagaaatatcttacaccttttagattaacgattaaataaacaagaattctcgatttatatctttttattgaatg

SEQ ID NO: 1504 - DNA, 1136 bp, Saccharomyces cerevisiae
agaaacagttatagcattagagttaagtcaagagcactcattattactttaaaaggtcgttgaaaatagaataaattgacactcaaaacgcaagaatgacagtaatcaccattgccaagagaggccttccaaaattaaccacttccacttcttcgacaacaactgccagttcaagtagtacgataacatctgttgcttcttcttcatcttctttaccacttttgtccaactctacatcctcttctattataccaagtattactcctccctctagaaatggtaatccttatattttggattccggggatatgcctaatggaacagttttcattgtagtggggggaatcgcgggagtgatttttttggcaatattgctatggtgggtaataacaacttattcttcgcataggttgaccagaagtgttcaggactacgaatcaaagatgttttccacacaacatacccagttttacggcgattccccatatatggattatcccgccaaagaaaatttccaagatcaggtccatatcagcgagtccgatattagtcccggaaataaggatgaatcggtgaaagatgcacttgtatctcatactaataatgaaaaaccattcttaagtaatttcgaaaggccgctattctctcttgcatccgaatccaacagaaattcacttttcatttcaccaacaggtgatatcttatacaaaacaaggctatctaaactttaccaagaaagccctagattattacagaaacctgtgattatgacaagtgataatgtatctacaaattctctggtgtctacaatctcttcatcatccgcatcgtcgctcgataacggtaatgaaaaggaggtgggtgaagacataaggaaacccgcaaaaattgcatcttcaccaagtcgaaagctgcttaattcaccagaaagtgatggtagcgtaaatcgtaaccatagtaagggtaatttgttggtcgtacagtccaaaagaaaacctacaccttcgacttatctcgagcacatgctggaggggaaagaacaggatgagtaaaaacttttatgatattttgcaatattttttttaagcagtggtagtaattacataaaaaatataaaatagtaggagtattattaa

SEQ ID NO: 1505 - DNA, 4577 bp, Saccharomyces cerevisiae
tgtcacacatacgctgcttcacaccaattcatatttctcaggttaatttgtctcctctccaacttcaataacgattttgcgtgaaggtttaatttcattattgcaattttagcagagaaacgcacataaatatatatatattgattacagaaccattataacatgtcttctttgaaggatgaagtacccactgagacttccgaagacttcggttttaagtttttaggtcaaaaacaaattctaccttccttcaatgaaaaactgccatttgcatctctacaaaatctcgatatttcaaacagtaagtctttattcgttgctgcctctggtagtaaggcggtggtcggcgaattacaattactgagagatcatatcacctccgactctactccgttaacgttcaagtgggagaaagaaatcccagatgtaatatttgtgtgctttcatggtgatcaggttttggtttcaaccagaaatgcattatattcgttagacttggaggaattgagtgaatttcgaacggtcacttcttttgagaagccagttttccaattgaagaacgttaataacactttagtaattttaaattcagtcaatgatttatcagcactggatttaagaacaaaatcgactaagcaactggcacaaaacgttacctcttttgatgtcacaaattcgcagttagcagttctactaaaagatagaagttttcaaagttttgcatggcgaaatggcgaaatggaaaaacaatttgagttctctctaccgtcagaattagaagagcttccagtagaagaatattcccctttgagtgttaccattctctctccacaggattttttggcggttttcggtaatgttatatcagagaccgatgacgaagtttcatacgatcaaaaaatgtacattataaagcacatagacggcagcgcctcatttcaagaaacttttgatattacacctccattcgggcaaatagtaaggttcccatatatgtacaaagttaccttgtctggtttaattgaacctgatgcaaacgtaaatgtgctagcatcatcatgttcaagtgaagtaagtatatgggactcgaaacaagttattgaaccttcccaggattctgaacgagcagtattgcccatcagtgaggaaacagataaggacacaaatccaataggtgtggcagttgacgtcgttacttcaggcactattctagaaccttgttccggtgttgatacgatagagcgattgccgctcgtttacatattgaataacgaaggtagcttacagatagtcgggttgtttcatgtggcagcaatcaaaagcggccattatagcataaatctggaatctttagaacatgagaaatctctctctcctacatcagaaaaaattcctattgctggacaggagcaggaagaaaaaaagaaaaataatgaatcaagtaaggctttatcagagaatcctttcacatcagcaaatacatcaggcttcacttttcttaaaacacaaccagccgctgccaatagcctgcagtctcaaagttcttcaacctttggtgctccctcatttggatcatccgcatttaaaattgacttgccatcagtctcatctaccagtactggtgtagcgtccagtgaacaagacgcaacagatcctgcttctgctaagccagtattcggcaaacccgcgttcggagctattgccaaagaaccgtcaacatcagaatatgcctttggcaagccatcttttggtgctccctcctttggctctggaaagtcatctgttgaatcgcctgcctccggatctgcctttggtaagccctcttttggtactccttcctttggctctggaaattcatctgttgagccgcctgcctccggatctgcatttggtaagccctcttttggtactccttcctttggctctggaaattcatctgctgagccgcctgcttccggatctgcctttggtaagccctcttttggtacatctgcattcggaactgcatcaagtaacgaaactaactctggatccatatttggaaaggctgcatttggttcatcatcttttgcacccgccaacaatgaacttttcggatcaaactttactatttcaaaacctacagttgacagcccaaaggaggtagattcaacgtcacctttcccatcttctggcgatcaaagtgaagatgagtctaagagtgatgtagactcttcttcgacaccttttggtacgaaacctaacacctctacgaaaccaaagaccaatgcctttgattttgggagttcttcctttggatctggattttcaaaggctctggaatctgttggttccgatacaacttttaaattcggtactcaggcttcacctttctcttcacagttaggaaacaaatcaccattcagttccttcacaaaagatgatactgaaaatggatctttaagtaagggctctaccagtgaaatcaatgacgataatgaagaacacgaaagcaatggtcccaacgtaagcggtaatgatttgacagattctacggttgagcaaacatcttctactagattaccggaaactccctcggatgaagatggtgaagttgtcgaggaggaagcgcaaaaatcccccataggcaagctaactgaaactataaaaaaaagtgccaatattgacatggctggtttaaaaaatcctgtatttggaaatcatgtcaaagcaaaatccgaatcgccgttttcagcatttgcaacaaatattaccaaaccaagctctacaacacctgctttttcgtttggtaactccacaatgaataaaagtaatacatctacggtttcaccaatggaagaagctgatactaaagaaactagtgaaaagggccccataaccttgaagagtgtggagaatccgtttctaccagcgaaagaagaaagaactggagaaagttctaaaaaggatcataacgatgacccaaaagatggttatgtatcaggaagtgaaatatctgtaaggacttctgaaagtgcttttgataccacagcaaacgaagaaattccaaagtcacaggacgtgaacaatcatgaaaaaagcgaaacagacccaaaatatagtcaacatgctgtggttgatcacgataacaagtctaaagaaatgaatgaaacttcgaagaataatgaaaggagcggtcaaccaaatcatggtgtccaaggagatggaatagcattgaaaaaagacaatgaaaaagagaattttgattcaaatatggcaataaagcaattcgaagaccaccaatcttcagaagaggacgcgagcgaaaaagacagtagacaaagcagtgaagttaaagaatcagatgataacatgtcactcaacagtgaccgggatgaaagtatatctgagtcctacgataaactggaagatattaatactgatgagctacctcatggtggagaagcttttaaagcacgtgaagtgagcgcttccgctgattttgatgtacaaacttcattagaagacaattatgctgaatctggcatacagacagacctttcagaaagttccaaggaaaatgaagttcaaacggatgccatacccgtgaaacacaacagtacacaaactgttaagaaggaagcagtcgacaatggtctgcaaactgagcctgttgaaacatgtaatttttctgttcaaacatttgaaggtgacgaaaattatttagcagagcaatgcaaaccaaagcaattgaaagaatattacacaagtgcaaaagtatcaaatattcctttcgtttcacaaaattctacgttaaggttgattgagagtacatttcagacggtcgaagctgagtttactgttctgatggaaaacatccggaatatggatactttttttactgatcaatcgagcatccctttggtgaagcgtacagtgcggtctatcaataatctgtatacttggagaataccagaggctgaaattctattaaatattcagaataatatcaagtgtgaacaaatgcaaataacaaatgctaacattcaagacctgaaggaaaaagttacagattatgtcaggaaagatattgcacaaataactgaagatgtagccaatgcaaaagaggagtatctgtttttaatgcattttgatgatgcttcgagtggatacgttaaagatctcagcacgcatcaatttagaatgcaaaagacattacgtcaaaagctattcgatgtgtccgccaaaattaatcatactgaagagttgctgaacattttaaaattgttcactgtaaagaataagagattggacgataatccattagtggcaaaactagctaaagaatctcttgcacgtgacggtttactaaaagaaatcaaattattgcgtgagcaagtgagtaggttacaattggaggagaaaggtaaaaaggcttcgtcgttcgatgcatcctcttcaataacaaaggacatgaaaggatttaaagtagtagaagttgggttggccatgaatacgaaaaagcaaattggtgatttcttcaaaaatttgaacatggcaaaatagtgatatttagctatatgtacgttgttagtgcc

SEQ ID NO: 1506 - DNA, 931 bp, Saccharomyces cerevisiae
gttagaaattacctacgatggcactacgatttttcaacgatatatctagagatgtcaatggcctattcaatagggacttttttcacaccaaccccctctctttgaatatttcaacaaccacggaaaatggtgtgaattttactctgaaggcgaagcagggcgtgacagaaggccccatccaaactagcgtagaaggacggttttatgacaggaaggagggagtgtcgctatctcagagttggtcgaaccagaacaggttaaatacaagaatcgaattttccaagatagcacctggttggaaaggtgatgtcaacgcatttttgactccccaatccatcaagaacgccaaatttaatttgagctacgcccaaaaatcgtttgcagcaagaacttctatagacatcttgcaacctaaggactttgtcggaagtgttactttgggccaccgcgggtttgttggcggcactgacatcgcatatgacacagctgcgggtttatgtgcacgctatgctatgtcaatcgggtatcttgccagagaatattcgtttattttgtctactaacaacaggcaatgcgcaactgcttcattttttcaaaacgttaaccgctatttgcaagtgggaactaaagccactttacaatcgaagacaagttctaatatgaacattgaatttgttaccagatacgtaccagattctatttcgcaagttaaggcaaaaattgcagattcaggcctgactacattgtcgtacaagcgaaatttgaataaagatatttctttgggtgtgggtatgtctttcaatgcgctacaactgactgaaccagtccacaaatttggctggtctctatcgttctcgccctgagagattttattttcttataaattttactaaataaggatttgtacttttgatagagttttttttttttc

SEQ ID NO: 1507 - DNA, 2966 bp, Saccharomyces cerevisiae
gcactacaaaaaggttttatctggcactcaggtccatttttgccgcattgaaacagacataaatatataagtctgagaccatctgcaaaatgtctcatcacaagaaacgtgtttacccacaagctcagctccagtatggacaaaatgccacccctctacaacagccagcacaattcatgcctccgcaggatcctgctgcagctggaatgagctatggtcagatgggaatgccgccacagggtgcagtcccttccatggggcagcaacaattcctaacccctgctcaagaacagttacaccagcaaattgatcaggccaccacttccatgaacgatatgcatctgcacaacgtaccgctagtcgatcctaacgcttatatgcagccacaggttcccgtgcaaatgggcacacctttgcagcaacagcaacaaccaatggcagcgcctgcgtatggccaacctagcgccgcaatgggccaaaacatgaggcccatgaaccagttgtatccaatcgatctgttgacggaattgcctcctccaattaccgatctgaccttgcctcccccaccgttggttattcctccagaaaggatgttagttccttctgaattgtccaatgcgtctccagattatatcaggtcgaccttgaacgccgttcctaagaacagctccctgctgaagaagtctaaacttccatttgggcttgttatcagaccataccaacacttgtacgacgatatcgacccgcctccattgaatgaagatggacttattgtccgttgtcgtcgttgtcgttcttacatgaacccttttgtcacttttatcgagcaaggcagaagatggagatgtaacttttgtcgtctggccaatgacgttcctatgcaaatggaccagagcgatccaaacgacccaaagagtagatacgacagaaatgaaatcaaatgtgctgtgatggaatatatggccccaaaggaatatactctaagacaaccacctccagccacttactgtttcctgatcgatgtctcccagtcctctatcaagagtgggttactggccactaccatcaacacccttttgcaaaatcttgattccattccaaaccatgatgaaagaaccagaatttccatcttatgtgtagacaacgccattcactactttaaaatcccattggattctgaaaacaatgaagagtccgccgatcaaatcaacatgatggatattgccgacctggaagagcctttcttgcccagaccaaactctatggttgtgtccttaaaggcctgcagacaaaacattgaaactttattgaccaagattcctcaaatcttccaatctaatttaatcacaaatttcgcactgggccccgctttgaaatccgcttatcatttaattggtggcgttggtggtaaaataattgttgtgtcaggtactttgcccaacttaggcataggaaaattacaaaggagaaatgaaagtggtgttgttaatacatccaaggaaactgcacaactactttcctgtcaagactcattttataagaatttcaccatcgattgttctaaagtacagattactgtcgatttatttttggcttctgaagattatatggacgttgcatcactatcgaatttgagtcgtttcactgctggtcaaacgcatttctatcctggtttttcaggcaagaacccaaatgatattgtcaaattttccactgagtttgccaagcacatttccatggatttctgtatggaaaccgtaatgagagcccgtggttccacaggtttgagaatgagtagattctatggtcacttcttcaatagatcatctgatttatgtgcattttccaccatgccaagagatcaatcatacttattcgaagttaacgttgatgaatccattatggctgactattgttatgttcaagtagcggtacttttatctctgaataatagtcaacgtagaataagaattataacattggctatgccaaccacggaatcgttggcagaagtctacgcatctgctgaccaattagctatagcgtcgttttacaactcgaaggcggtggagaaagcattgaattccagtttggacgatgcaagagtattgatcaacaaatccgtgcaagatatcttagccacgtacaagaaggaaatagtggtgtccaacactgcagggggggccccattgaggttatgtgccaatttgagaatgttcccattgttaatgcattctttaactaagcatatggcatttagatctggtattgtcccaagtgaccatcgcgcctcggccttgaacaacttagaatcattacctttgaaatatctaatcaaaaacatctaccctgatgtttattcgctgcatgatatggctgatgaggctgggttaccagtgcaaactgaagatggtgaagctactggcacaattgttttgcctcaaccaatcaatgctacctcttcgttgtttgaaagatacggtctatacttgatagataatggtaacgaattgtttttgtggatgggtggtgacgctgtaccagcgctagtattcgatgtgtttggaacacaggatatctttgacattccaattggcaaacaggaaatacctgttgttgaaaattctgaattcaatcaaagagtaagaaacattatcaaccaattgagaaaccatgatgatgtcatcacttaccaatcattgtatattgttaggggtgcctctttgagcgagcccgttaaccatgcatctgctagggaagttgcaacgctaagactatgggcttctagcaccttagtggaggataagattttgaataacgaaagttacagagaattcttacaaatcatgaaagccagaattagcaaataaggctaaaagggaatcaatgataaaaagaaactgtatatttttgttggttgcatttttgctttccaattatattatgtatattgaacagttacttta

SEQ ID NO: 1508 - DNA, 1207 bp, Saccharomyces cerevisiae
tctatgcgattattatattagtgcgacatatttatataactaagatagtaacgcactcaaaaagatgtttagatctgttgctactagattatctgcctgccgtgggttagcatctaacgctgctcgcaaatcactcactattggtcttatccccggtgacggtatcggtaaggaagtcattcctgctggtaagcaagttttggaaaaccttaactccaagcacggcctaagcttcaactttattgatctctacgccggtttccaaacattccaagaaacaggaaaggcgttgcctgatgagactgttaaagtgttgaaggaacaatgtcaaggtgctcttttcggtgcagttcagtctccaactactaaggtggaaggttactcctcaccaattgttgctctaaggagggaaatgggccttttcgctaatgttcgtcctgttaagtctgtagagggagaaaagggtaaaccaattgacatggttatcgtcagagaaaatactgaggacctgtacattaaaattgaaaaaacatacattgacaaggccacaggtacaagagttgctgatgccacaaagagaatatccgaaattgcaacaagaagaattgcaaccattgcattagatattgccttgaaaagattacaaacaagaggccaagccactttgacagtgactcataaatcaaatgttctatctcaaagtgatggtctattcagagaaatctgtaaggaagtctacgaatctaacaaggacaagtacggtcaaatcaaatataacgaacaaattgtggattccatggtttataggctgttcagagaaccacaatgttttgatgtgatagtggcaccaaacctatacggggatatattatctgacggtgctgctgctttagtcggttcattaggtgttgttccaagcgccaacgtaggtccagaaattgtcattggtgaaccatgccatggttctgcaccagatattgctggtaaaggtattgctaacccaatcgccactataagatctactgctttgatgttggaattcttgggccacaacgaagctgcccaagatatctacaaggctgttgatgctaacttaagagagggttctatcaagacaccagatttaggtggtaaggcttctactcaacaagtcgttgacgacgttttgtcgagattatagagcatataataggaaaatagaaacgaa

SEQ ID NO: 1509 - DNA, 1040 bp, Saccharomyces cerevisiae
ttagaagcttggaaaaggaagaaggacattgcgcaccattcaagaagaagatcttagaattctgagaaatgaagatacaaacaaatgctgtaaacgtccttcaacggacgtccgcttacttgaaatcaggattgttgaaagaaacacctgcgtggtacaacgttgtagcgtctatcccaccatcaaccaagtttacacgtgaacctcgttttaagaatccttccaatggacacatcataggaaaacttgttgacgtaacagaacaaccgcatgccaacaataagggactttacaagacaagacccaactcgagcgacaaaagggtgggcgtgaaaaggctgtacaggccacctaaactaacatacgttgaggataggctcagatcgctcttttacaaacaacatccatgggagttgtcgagacctaagattttagtggaaaacgaaattggtgatgaaaactacgattggagccatatgcttcagataggaagaccactcgatggtgaaagtgttatccagcgaactatgtacttaatcaaaacgaagcagtatggggacatggtcgaagcatatgaccatgccagatatgaattctatgcgttgagaatgcaagaagaaacagagcagcaagtggctttggaagaagcggagatgttcggatccctctttggagtttctgccattgaacatggtatacaaaaggaacaagaggtcctagacgtctgggaaaagaaggtagttgaagaaactgaactaatggcagcaaggacaagtaaccctgcagggtcgtggaaggacgacactacattgaatacggcgcaagaagaagaatccaccacttccgagaacctccacttctaggtgggctgcctcttttctccaacgtcacctaaccaacctgtatataattaaaaacaaacgagaacaacacatgtagtgctaagtaattgtcgttctcaaattccacctcgattttttcaactgcactgaaaattcccactcttttttttttttttttttttttttttcacttttttc

SEQ ID NO: 1510 - DNA, 1591 bp, Saccharomyces cerevisiae
cgaattctacaatcaggacatagcatcaaagagaaaaggaattctaaggtatggaggctacatcaagtgctctttcgtctacggcgaatctcgttaagacaatagttggcgctggtacacttgccattccgtacagttttaaaagcgatggtgttctggtaggggttattcttacattattggcggcggtaacatccggtctgggtctctttgtgctatcgaaatgttccaagaccttaattaatccaagaaactcttctttcttcacattatgcatgctcacctatcccactttggccccaatttttgatttggcaatgatagttcaatgctttggtgtgggcttaagttacttagttcttattggtgatctctttccaggactgtttggtggtgaaagaaattattggataattgcatcagctgtaatcatcattcccctatgtttagtgaagaaactagatcaattgaagtattctagtattctaggtcttttcgcgctagcatacatatcaattctggtgttcagtcattttgtgtttgagctgggaaagggtgaattaacaaatatattaagaaatgacatatgctggtggaaaattcacgactttaaaggattattatcaacttttagcattataatttttgcttttacgggatcaatgaacctattccccatgataaatgaattaaaagacaacagcatggaaaatatcactttcgttatcaataattcgatatccttatcaacagcactatttttgatcgttggtttatcaggatatttaaccttcggtaatgaaaccttgggtaatttaatgttgaactacgatcctaactcaatttggatagtaattggcaaattctgtcttggctcaatgttaattctttccttcccgcttctctttcatccgctgcgcatagcagttaacaatgtcatcatctggattgagatcacttatggtggggcaaatcccgaagaggacccacaagtttcggaatacactcgtgcttccaacctaagaccaattagcatgactgtggaagatccagcccagcccagtgatgcactagacgcaacttcttataacgagcaagaatgtttactacctaacgggaactttgataatggttcaattgaaagtcaagagaacaataatgatgaaagagggactatggcggtcgccggggataacgagcatcatgcgccatttgttaagtctagattttactggattactgcattattactaataagcatgtataccttggcgttgtctgtccagtcatttgcactggttctttcatttgtaggggctacaggttcaacgtctatttcattcactttacctggattattaggttacaaattaataggcttggattctttggctattgggaagatgattccaccaaaagatagattttacaaaaggtgcagcttattgctagtcttctacggactatctgtgatgtttttgtcattgtatgtaactgtattcaaccgttcagatgaagcctaaatggaccaatagtcatgcaagagaagtataaaacagtatatagtaaatagtaaatagaatcagagaca

SEQ ID NO: 1511 - DNA, 520 bp, Saccharomyces cerevisiae
atgtctgctaaacccgctactgacgatgccaaagatgaacttctatcaccatttcgccggctatatgcattgacaaggacaccttatcctgcgctcgcaaacgcagcactattagcatccactccggtgctatccccaagctttaaagtgcctccaacgcaatctcctgccctctcgataccaatgtctagggtattctctaaatcttctactgccagaatcggtataactactaaaaccgcccttttcttttctacaatgcaagctataggtgcatacatgatctatgacaacgacttggaaaatggggctggcttcattgctacatggtccgccttatatttgattgtagggggcaagaagtcctttagtgcgttaagatatggaagaacttggccgttggtgctatcctcggtttcattggccaacgcagtcctttatggccaacggttccttgctaccggattccagtgatgcttacatctattaatgtcttaatatttaattttgtatcctctgt

SEQ ID NO: 1512 - DNA, 1668 bp, Saccharomyces cerevisiae
aatctgtgattataggcacagttgtaccaaagaagggctagaatatacatcataattagatgcaattagcatggctataagattgaatccaaaagtcagaaggttcttgctggataagtgtcgacaaaaacgatatggtttcctctttttaggatgtatcttcgccatactttactgtatggggacctggccatttttcgcaaaagatattgtacatgatccaaataatttgccttattccttacaggattattcgactgacaaagacgagccatttttccggggctgcactgatacaaagctgtacttgcaaaatcctgcttactccaaaatgaacgcatctttcgttatgctaacgagaaacgaagaaatagaagacgtactgaaaactatgagaagtatagagggccatttcaataagtggttcaaatatccgtacgttttcttgaatgatgacccctttacagatcattttaaggaccaaattcaagctgcaactaatgccactgtagagtttggcactgttgatgaaattatgtgggagtttcctgctaaggttcgtaattcattgcagtttaaggcttcattagaagaccaaaacgatcgcggtataatgtatggtaatatggaatcatatcacaagatgtgtcgattttactccgggatcttttataaacatccattagtttccaagtatgaatggtattggagaatagaacctgatgtggactttttttgtgacatctcgtatgatccctttttcgagatggccaaacataacaagaaatatgggtttaccgtacttataactgaactgtactggactgtccccaacttgttcagaacaaccaaaagctttataaaaaaaacggcaggtttaaaggaaaatctcggcacgttgtggaaattatttacatttaattataatattctagatacagatgatgaagaaatttctaggtgggtcaattttccctgggatgcaaagccaaagttgacagaaaagttgatggtagactttttgctagagaatcatggtcaagtcaataatgaggaagatttggaaggtatacaatatctcgttgaaagggcccgctctaaggtgccaatgctagaggattcccttgaaggggaagattacaatttgtgtcatttttggagtaactttgaaattgcccgcgttgatttattcgacaatgagatctataacgcctattttaaatttttggaagagtctggaggtttctggactgaaaggtggggtgacgcgccaattcattcaattgggttgggaatgaccttggatctagaagacgttcattatttcagagacattggttatagacactcatcgctgcagcattgtccgaagaatgccttacaaagccaagaaaatctcaacactttcgatgaaggttataacttcggatgtggatgtcgatgcgtgtgccccaagaaaggtgaagacatcgaagaccactccaccccttgcatggatattttttttgaattgcttcacggcagggaatatgagaaggaattccctggttgttacaagccctccataaaggacaaagacgtgattgaagagatcagaagagaaaattttagagtaattgaatagatacagtgttttctatacatttatacgtatgaacaaaattataa

SEQ ID NO: 1513 - DNA, 1284 bp, Saccharomyces cerevisiae
taagacaattacgcacacaacgcttttattagttgtcataaactgtgtagattagcagcagacactcctttttttcttcatactatagcaatgccacctctacccgtgctcaacagacctcaaattcatacgtctgttactgaaataagtcatgcaattgatcgtacaatcaaggaagagctctttcccgttgcctacactactgaagaagagcaatatttcaaaactaaccctaaacctgcctatatcgatgaattgattaaggacgctaaagagtttattgatttgcagtattccctgaaaaggaacaaaatagttcttatcacctctggtggtactactgttccattggaaaacaatacagtacgttttatcgataatttttctgcaggtactcgtggtgcatcgagtgctgaacagttcttagcgaacggatatagtgttattttcttacatagggaattctcattaactccgtataataggtccttctcccatagcattaatactttattcttggactacattgattctgaaggtaaaatcaaacctgaatttgctgagaatgttttgaagaacaaaaagctttatgacaagtatatggagaaagaggagaaactacttttactaccattcaccacggtcaaccaatacttatggtcactgaaaagtatagccaagctattgaataatagtggttgcttgttttatttagctgctgctgtcagtgatttttttgttccatattcaagactacctcagcacaagattcaatcaggagacaacggtaagatgggagcaaataatgacactgaaggtacaactaggactacgcctgatggtaaactgattgtgaatcttgaccctgtccctaagtttttgagaagattagtggaatcatgggccactcaagcgatgatcgtttcgttcaaattagaaactgatgaatccatgctgctttacaaatgtacacaagccctggatagatacaaccatcaactggttatcggaaaccttttacagacaagaaacaaacaggtcattttcgtatcccctgaaaacagaaagggagattgggtacgtttggatgaaaaacaccatatcattgaagagatgataatcccagaagtcatcgcacgccatgacaaatgggtggcgcattcgaaaactaagctagctacgaaataaaacatagctcttgtctgtaatcaaaaaaatttgcgtcaaaaaaaaaaattagatgtatgtaaacctttttattgaactgaaaatttatcttttatc

SEQ ID NO: 1514 - DNA, 2966 bp, Saccharomyces cerevisiae
tatccagtaaaagaccacccagaatagattgagttcaaatataaccggaaaagatgtctttgacgactgctgctcctcttttagcattgttgagagagaatcaagattctgttaaaacatatgccctagaatctataaataatgttgtggaccaattatggtctgagatctcgaatgaactgccggatattgaggcattgtatgatgacgataccttttcagaccgtgaaatggctgctttgattgcatccaaagtttattacaatcttggtgaatacgaatcggctgtgaagtatgcacttgccgcaaaggatcgttttgatatagacgaaaagtcacaatttgttgaaactatagtctcaaagagtattgagatgtacgtccaagaggcttccaagcaatacactaaggacgaacaattttacaccaaggatattattgacccaaaattaacctctatttttgagcgaatgatagaaaaatgtttgaaagcttcagaattaaaattagctttaggaattgccttagaaggttacagattggatatcattgaaagtgctttaaagagcaaattggatcaggattccacttctgaaaacgttaaaattattaactacttattgaccttagctataactactgtgacaaattccaagttcagatcctcgatattgagaaaatcatttgatttcctaatgaatatgcctaactgcgattacttaacgctcaataaagtagttgtaaatttgaatgacgccggattggcacttcagctatttaaaaaattaaaggaagagaacgatgaaggattatctgctcaaattgcatttgatttggtttcgtctgcgtctcagcagttgcttgagattttagtaaccgaactaactgcccagggttacgatcctgccttattgaatattctatctgggctaccgacttgtgattattacaataccttccttttgaataataaaaacattgacatcggtcttttaaacaagtctaaatcatctttggatgggaaattttctttgttccacaccgcagtcagcgttgccaacggttttatgcacgctggtactaccgacaattcatttatcaaggcgaacttgccatggttaggtaaggctcaaaattgggctaaatttacagctacagcctctttaggtgtaattcataaaggcaatttattggagggtaaaaaagtcatggccccttacttgccaggcagtcgagcttcttctaggtttatcaaaggtggttcattgtatggtttgggtttaatttatgctggctttggtcgtgatacaactgactatctgaaaaacataatagttgagaatagcggaacttcaggcgatgaagacgtagatgtattgttacatggtgcttcactgggtatcggtcttgctgctatgggttctgctaatattgaagtttatgaagccttaaaggaagttctgtacaacgattctgccacatctggagaagcagctgcattaggtatgggtctctgtatgctcggaacaggtaagcctgaagcgattcacgatatgtttacatattcccaagaaacgcagcatggcaatattactcgtggtctagccgttggtttagcactgataaattacggccgtcaagagttagctgatgatttaattactaagatgttagcaagtgatgagtccttgttacgctatggaggtgcattcacaatcgcgttagcgtatgcgggtacgggaaataattcagctgtcaagagattactgcatgtggcagtctcggattctaacgatgatgtcagaagggcagcagtcatcgcattagggtttgttctcttgcgtgattataccactgtaccaaggattgtccaacttctatctaaatcgcataacgctcatgtcagatgtggtaccgcatttgctcttgggattgcttgtgccggcaagggtttacaatcagctattgacgttttagatccgctaacaaaggacccagtagattttgttcgtcaggctgccatgatagctttatccatgattttgattcaacaaacagaaaaactaaaccctcaagttgctgatattaacaaaaattttttgagcgtgattacaaacaaacaccaagaaggtttagccaaattcggtgcatgtgtggcccaaggtataatgaatgccggtgggcgtaatgttacaattcagctggaaaatgcggatacaggcacattggataccaagtccgtagttggtttggtcatgttctcacaattctggtactggttcccactggctcactttttatccctttcttttacaccaacaactgtcattggtattcgtggtagcgatcaagctatacccaaatttcaaatgaattgttacgctaaagaagatgcattcagttatccgaggatgtatgaggaagcaagtggtaaggaggtagagaaggtagcaacagctgttctttccacgacagcaagagcaaaagcaagggcaaagaagacaaagaaggaaaagggtccaaatgaggaagaaaagaaaaaagagcatgaggaaaaagaaaaggaaagagagacgaataaaaaaggcataaaagaaacaaaagaaaacgacgaagaattttacaaaaataagtactcttctaaaccttataaagtcgacaatatgacccgtatactaccacaacaatcgagatatatttcctttattaaggacgacagatttgttcctgtacgtaaattcaaaggaaataacggtgtggtggttttaagagatagggaacccaaggaacctgtagcactaattgaaactgttaggcaaatgaaagatgttaacgctccacttccaaccccatttaaggtcgatgataatgtcgacttccctagtgcttagatcaagggtgcatggtcgtacagaaaatgaagaattagttcaaaatgccagaaaataaataatagtgtacatact

SEQ ID NO: 1515 - DNA, 1551 bp, Saccharomyces cerevisiae
atacataagaaggttacgagctactacattaaaaaatactttgtctgttttagctgtagattattgtaacattaaaaagtaacaaacactgatttcgggtatttcctccctaacatgtcttattcagctgccgataatttacaagattcattccaacgtgccatgaacttttctggctctcctggtgcagtctcaacctcaccaactcagtcatttatgaacacactacctcgtcgtgtaagcattacaaagcaaccaaaggctttaaaacctttttctactggtgacatgaatattctactgttggaaaatgtcaatgcaactgcaatcaaaatcttcaaggatcagggttaccaagtagagttccacaagtcttctctacctgaggatgaattgattgaaaaaatcaaagacgtacacgctatcggtataagatccaaaactagattgactgaaaaaatactacagcatgccaggaatctagtttgtattggttgtttttgcataggtaccaatcaagtagacctaaaatatgccgctagtaaaggtattgctgttttcaattcgccattctccaattcaagatccgtagcagaattggtaattggtgagatcattagtttagcaagacaattaggtgatagatccattgaactgcatacaggtacatggaataaagtcgctgctaggtgttgggaagtaagaggaaaaactctcggtattattgggtatggtcacattggttcgcaattatcagttcttgcagaagctatgggcctgcatgtgctatactatgatatcgtgacaattatggccttaggtactgccagacaagtttctacattagatgaattgttgaataaatctgattttgtaacactacatgtaccagctactccagaaactgaaaaaatgttatctgctccacaattcgctgctatgaaggacggggcttatgttattaatgcctcaagaggtactgtcgtggacattccatctctgatccaagccgtcaaggccaacaaaattgcaggtgctgctttagatgtttatccacatgaaccagctaagaacggtgaaggttcatttaacgatgaacttaacagctggacttctgagttggtttcattaccaaatataatcctgacaccacatattggtggctctacagaagaagctcaaagttcaatcggtattgaggtggctactgcattgtccaaatacatcaatgaaggtaactctgtcggttctgtgaacttcccagaagtcagtttgaagtctttggactacgatcaagagaacacagtacgtgtcttgtatattcatcgtaacgttcctggtgttttgaagaccgttaatgatatcttatccgatcataatatcgagaaacagttttctgattctcacggcgagatcgcttatctaatggcagacatctcttctgttaatcaaagtgaaatcaaggatatatatgaaaagttgaaccaaacttctgccaaagtttccatcaggttattatactaattactcagataaataaaaatatatgta

SEQ ID NO: 1516 - DNA, 937 bp, Saccharomyces cerevisiae
taaactatcacatatactaacaaataacaaataatgttcttaagaagcgttaaccgtgccgtcactagaagcattttgactacgcccaagccagccgtagtaaaatcatcgtggagagtttttactgttgctaactctaagagatgtttcacacccgctgcaatcatgaggaaccaagagacccaaagagtaggtgatattttgcaatctgaattgaaaattgagaaggaaacgttaccagagtcaacgtcgttagactcatttaatgactttttgaacaaatataagttctcattagtagagacacccggtaagaatgaagctgaaatagttagaagaaccgaatcaggcgaaacagttcatgttttttttgacgtagctcagattgctaatctgccttacaacaacgcaatggatgaaaataccgagcaaaatgaagacggcattaatgaggatgattttgatgctttatcagacaactttgccaacgttaatgttgttatttctaaagaaagcgcaagcgaacctgcagtctcatttgaattactaatgaatttacaggaaggttcattttatgttgatagtgctactccatacccctcagttgatgctgctttgaatcagtctgctgaggccgaaataacaagagaattggtataccatggcccacctttttcaaacttggacgaagaactacaagaatctctggaagcttatttggaaagtagaggtgtcaatgaagagctagcctctttcattagtgcatattccgagttcaaagagaataacgagtatatttcttggttggaaaagatgaagaagtttttccactaagaaacaagatacctttgctttatttcgcgactcggggttacttagtttgtagtcaaatttaactgtaaataatttatatatataatacacatgttaatacatt

SEQ ID NO: 1517 - DNA, 637 bp, Saccharomyces cerevisiae
agccatcttattcgaagctcactgcaaacgctaaggtacctacagaagatcaataaaaatgtctgacgctgtcactattcgtaccagaaaggttatctccaacccattgttggccagaaagcaattcgttgttgacgtcttgcacccaaacagagctaatgtctccaaggatgaattacgtgaaaaattagctgaagtctacaaggctgaaaaggacgctgtctccgttttcggtttcagaacccaatttggtggtggtaaatctgttggtttcggtttggtctacaactctgttgccgaagctaagaagttcgaaccaacttacagattagtcagatacggtttggctgaaaaggttgaaaaggcttccagacaacaaagaaagcaaaagaagaacagagacaagaagatctttggtactggtaaaagattggccaaaaaggttgctcgtcgtaacgctgattaagaagttctcaagtatacacatatttgtatcggttatgtccccgactatttttttttgacgttcatcttgtcctttttatttcctcatcatcgaacccttcataatataattcatatttctatgtaggttgtacagctacgtaaacaattttttttgcataattataaagca

SEQ ID NO: 1518 - DNA, 2074 bp, Saccharomyces cerevisiae
atgggtgtgcattttgatgataatgctaacacaacgtgggaagccacagaccctggcgtttcaagtgattgcgatggacagcaccgtgtgactgagtctatacaactgcagaacttttccaatacagacatggaaagtatgcttgatgaagaagggagagaaaacagtaagtcaaaatggttactattaaaaaggaaacatcctatacaaaagtttattgaaagagtttggaatggccctgttgagccaagtgacgaaccgcctagctttcctaaacgttggggatggctgaagaagatagatgattttccgcagactacattcaaaactaaaataccaagtaagttgatacgactgttgctactgattgtgtactgctgcttttggatgcgcattttttattctctcatatacccctatcttatcaagccgccatacttccatccaaatgatggctcagaaaagattcctatattgtctttaagttgcaattcctacttgaactgggagggtaccaataacgaatgtggtttaaatgctaaaaactgcggtccacttgataataaagaatacatgatcagatgtccagcactgtgtgatagaggtggatggacatactccgccattgccgtagggaataggagagtcaaatatacagggtatgaaattggcggaggtgccctgtttagcgaagaagacccgatggtcgtgtcctacccttatagaagtgactcgtttccatgcgcctctgcagtacatgcaggtgttatctcaccattttacggtggctgtaccaaagtttctatgcaaggggcccaaaattcttttccatcaaaaaaaggaatgtataacactgggttttcagtagcattcaattcattttttcccggttcatattcattcagagatatacaaggcggtatcctgtcgggctgttatgatcctcgagcagctgtggtcgcattgaatatgctttttggactgccaatattttatttgtatgacagtatttacgggtactggataaacacgatagtgggctattggactcttgtattatctctagaccctccattactaacggatgcacatgacccagctagcgtgtatgagcttttcagtgtgggatttcaaagacttttacctttatgctttgttttatacgtcgtttggaagagtgcggtgaaaagaacactagaaaatggatcgcccatagcaaaagtaatactttggtaccccacattttggttgggaatctcaaataatgtcacatttgaccgattacctgttgatagacttacgacgacggatttgaaagagcaggctggagcactgactgctgtgggatctattgcagccactattcttacatgcgcagttatacaggcttattcactctggaaatcaggaagattcaaaaagtattttaaaatatacatttgtttcattggcggattaatagctttgggatctttgccgggactgaacttgaggatacatcactacatcttaggttctatactggttccaggctgtgccacgagaggatcatctgcatatctgttccaaggaattttagtcgggttaattctgtctggtgtagcaagatgggattttgcaagcatagttgagacagatacggccttgttaagaggagaagcaggtgcttctttgaagccacctatactggattttaacgacgatcaaaaccattctctgtcgtggcatctaaatgcaactgatccagtaattgatcaaataggaaacatcgacggtttttcattacttttgaacgatgtggaagtgtacgtaggcaagaatgagactgtgagtatcgatgttcttcggatggagaatccagcacttgctcaaatgatggacgatgctcttgatgcctctaacgggacaatagacttgtatttaagagtggctcgtgcctctgtacggtctccaacgaatagaggtgactatacgaatgcaggagttttacagtggccgaacggaatgtggcaaaagcctgaaccaggcgtatcataatctaaatacatatttacatactatacatagaatgggc

SEQ ID NO: 1519 - DNA, 572 bp, Saccharomyces cerevisiae
taaaaacggcacatagaagcacagatcagagcacagccatacaacataagtatgaccaaagtagatttttggccaactcttaaggacgcatacgaaccactctatccgcagcagctggagattctgcgccagcaagtcgtctccgagggggggcccaccgctaccatacagtcaaggtttaactacgcatgggggctgatcaaatccactgacgtgaatgacgaaaggcttggtgtgaaaatcctcacagacatttacaaagaggccgagtcccgtagacgagaatgcctatattatctgaccataggttgctacaaactcggtgaatactctatggcgaagagatatgtagacactttatttgagcatgagcgtaataacaagcaggtgggcgctttgaagagtatggtagaggataagatccagaaggaaacactcaagggtgttgtcgtcgctggaggcgtactagccggcgctgtggccgtggctagtttcttcttaagaaacaagagaaggtaacaagcacataaaaaatcagcacatacgtacatacataagaatgaatcgcacgc

SEQ ID NO: 1520 - DNA, 1030 bp, Saccharomyces cerevisiae
acaaaacaagtacgcataaactttgagagcatgagtgagaccaatggtggcaatgcagccagggaaaattctgaggtgaaacaaactgcagttgaaaatcctatcgataaactagatggaactcctaagagaccgagggaaaaagatcaggatgaacaagcggaagaaacgagtgacaaatcagaagcacccaataaaaatgatgaggagaaaaaggaggaaggtaaaaaagaccaagaaccatcgcataagaagatcaaggttgacgacggaaagaccgtagaatctggtattgtggaagatgacaaaaaggaggataaattcgtgtttggtgccgcatctaaatttggaactgggtttggtgttgccaaaaaggacacgaaagatggagatgcaactaccagtactgaaagtttaccagcctctgacagcaaaacaaagaagccatttgcatttggttcaggtttatcatttggcagcggcttcaacatactgaaaaacaaaacagaaaataactctgaaagtgaaaagaaagctactgatgttgacaaagataaagtccatagtggatctgaacaactagcgaatgcctcagaagatacaaaagacaaaccaaaacccctcaaattgcagaaacaggaagtcaagtctggtgaagagtctgaggagtgcatatatcaagtcaatgcgaagctgtaccaactttccaacataaaagaaggctggaaggaaagaggtgttggtatcatcaaaatcaataaaagtaaggacgacgtcgagaagacgcgtattgttatgaggtctcgtggtatcttaaaagtcattttaaacatccaactggtcaaggggttcactgtgcaaaaaggatttacaggttctttgcaaagcgaaaaattcataagattactagcagtagatgataacggtgatcctgcacagtacgccataaagactggtaagaaggaaaccacggatgaattgtataacattatagttaaatccgttcctaaataagtaaagagaaataacg

SEQ ID NO: 1521 - DNA, 550 bp, Saccharomyces cerevisiae
tcaacacaacacacgcgaacgatcaagcaatggaagccgattggaggagaattgacatcgatgcatttgatccagagagtggcagactaaccgctgccgatctggtaccaccatacgaaactactgtcacattacaagaattacaacctcgaatgaatcaattgcgctcgcttgccacaagtggtgactctttgggagccgttcaattactcacaaccgatcctccatacagtgcagatgctccaacaaaggagcaatattttaagagcgtccttgaagcattgacacaagtcaggcaagccgatattggtaatgtaatcaaaaatttgagtgattctcagagggacgtgctggtaaagtatctctacaaaggaatgtccgtacctcagggccagaaacaagggggtgtcttgcttgcgtggctggaaagaattactcaagtcagtggtgtcacacctatcgttcattatatatcggatagaagaactgtatgatactctgcccagtaaaacttagtataaagaaatatacatatatatacgtaatttta

SEQ ID NO: 1522 - DNA, 426 bp, Saccharomyces cerevisiae
gagaatagattagcaacgaacaaccctaaaaatggctcaacgtgttactttcagaagaagaaatccatacaacacccgttctaacaaaatcaaggttgttaagaccccaggtggtatcttgcgtgcccaacacgttaagaagttggctactagaccaaagtgtggtgactgtggtagtgctctacaaggtatttccactttgagaccaagacaatacgctactgtctccaagacccacaagactgtttccagagcttacggtggttccagatgtgccaactgtgtcaaggaaagaatcgtcagagctttcttgattgaagaacaaaagattgttaagaaggtcgttaaggaacaaactgaggctgctaagaagtctgaaaagaagtctaagaaataaatttaaataagcattccttttataattac

SEQ ID NO: 1523 - DNA, 565 bp, Saccharomyces cerevisiae
aggacaacacatacacacaaatatattaccaataatgtttttaagaaattccgttttgagaacagctccagtcttgaggaggggtataacaacattgaccccggtcagcaccaagttggccccacccgctgccgcctcttactcccaagctatgaaggccaacaattttgtgtacgtgtctggtcaaatcccttatactccagataacaagcctgttcaaggttctatctctgagaaggccgaacaagtttttcaaaacgttaagaatatcttagcagaaagtaattcttctttagacaatatagtcaaagtcaacgtattcttggctgacatgaaaaactttgccgaattcaactctgtatacgccaaacacttccacacccataagcctgcaagatcctgtgttggtgttgcttccttacctttgaatgttgatttagaaatggaagttatcgctgttgaaaagaattgaaggattgaaacttctttactgccttttttccacttgcgataccgaggagtgtacatttataaacattttagtagcattctttagcgtatataa

SEQ ID NO: 1524 - DNA, 2709 bp, Saccharomyces cerevisiae
atgaagtttgctgaccatctaaccgagtctgccatcccggaatggagggacaaatatattgattataaggtcggcaagaagaagcttcgccgctacaaggagaagctggatgccgaagaagagcaatccagctcctaccggagctggatgccctctgtgtcggtataccagactgcatttcagcagagagagcccggcaaaagtcgcagcgacggagactatcgctccggacctgcgttcaagaaggactattctgctttgcagagggagttcgttgctgacttcattgaagactggttgatctcgttccagttgagtaagtgtaacgagttttacctttggttgctaaaggagtgcgacaagaagtttgaggttttacagtcgcaactgcactattactcgctgcagaagaattatgagcgcgacaacttgaaccggtctagttcgaatgttgacatgtccacgagtctatatgcggcagggcttgctggtcgttctgactccagggtcaatagcatcgacagcgatagccggtctgttatgtatgggtcaatgccctgcaccaaagaggccaagaagccgcgtttgtcgctgctagcgtactgtcagaaagttcttaaggacaataggctgctgccatcgtggcccaaacgtggattttctctgctacaggacttgagacaggatgcgtcctcaagaggccgcgagacgtttgcttttggcgcttcttttctggagactatgacgacaacccaggctagaaacttgttaagcaacgctataatcgagtactatctgtacttgcaattggtcaaatcgttccgggatatcaacgtcaccgggttccgtaaaatggtcaagaaattcgacaaaacgtgtcacacaagagagctgaccacgttcatgtcgtacgccaggacccactacacccttttcaagcacgcggatgccaacgtgcagttggtggcacagaagatgcaacaaataaccagttcgcaaccaacacccacttcggagctctcttccgcccaaagagacaaagagcccatcacttggttggaaacgcagatcaccgagtggttcaccactgcgttgaccaattcgcctaaggacaggaagcacaatacccataagttgaagaaattgaccattcagtactctatctccgaacaaatggttcatagaaacaacagatcgattgtgcagatgctggttgtcgggctgggcataggtgtgtcaatgactttgatcacttacactttgtatttgggcattagctctgaagaaacgtcatttacgcacaagattctgttcccactgtggggtggttggtacatggttttgttgatcgcgtttctctttcttgttaattgttttatctggcatagaaccgggattaattatagatttattatgctgggtgagattcaatccaagaatggtacgcaatttttcaacaatgattttgccacgagtaaaattccgctcaagttgtatttcttgacattcttcatagtaccttgtgcggtctgttccatgttaagtttcgctttggagaagctcacacccttaggctttttatatattggtattgtgtctttcttatttttatgtccctctggtctaattccatattgggacaaagttgtacacactagaaaatggctggtggttactcttattagactgatgatgtctggttttttccctgttgagtttggtgatttctttttgggagatattatttgttcgttgacgtattctattgccgatattgccatgttcttctgtgtttactctcatacgcccaacaatctatgtggctcttcacattccagagcaatgggtgttttatcatgtttaccaagttattggagattcatgcaatgtttacgaagatttgctgattccggtgattggttccctcatcttttgaacgcggcgaaatacactttgggtatagcgtataatgccacactttgtgcttacagattgtcagaccgttctgaacaaaggagaaccccttttatcgtgtgcgctacgttgaattcgatccttacttccgcctgggatttagttatggattggtcctttgctcacaatactacttcttacaattggttgctaagagacgacttgtatttagctggtaaaaaaaattgggaaaacggcagttattcattcagtaggaagttagtttattactttgctatgatttgggatatcctcattagatttgagtggattgtatacgcaattgctcctcaaacaattcagcagagtgctgtgacgtcgtttatattggcccttttggaggttttaagaagattcgtttggatcatcttcagagtcgaaaatgaacatgttgccaatgttcacctattcagggttaccggtgacgctcctctgccttatccaattgcgcaggtcggtgatgattctatggatagtagtgatttgggttcaaaagccttttcatcacttaacgacatacctatcacgccttcacatgacaataatcctcacagttttgccgaacctatgcccgcttaccgtgggactttcagaagaaggtcctccgtgtttgagaacatttcgagatccattccttgggcacatgcaactgatttccaaagaccaactgtcaataccgtggatgataggtctcccgaaacagatagtgaaagtgaagtggaaagtattatgtga

SEQ ID NO: 1525 - DNA, 1031 bp, Saccharomyces cerevisiae
cttcaactgtacaaaggagcatagaacgtggggcaatttacaagcgatgtcgacgtcagtcccagtcaagaaggcattaagtgctcttttacgcgatccaggaaacagtcattgtgccgactgtaaggcgcaactacatccacgctgggcttcctggtcacttggtgttttcatttgcattaaatgtgctggtatacatagatcattgggaacgcacatttcgaaagtgaaatctgttgatctggatacatggaaggaagaacatttggtgaaactgatacagttcaaaaacaatttaagagctaactcatactacgaagctactttggctgatgaattgaaacagaggaaaatcactgatacgagcagtttacaaaatttcatcaagaataaatatgaatataagaagtggattggtgacctctccagtattgaagggttaaatgattctactgaaccagttctgcataagccgtctgcgaatcattcgttgcctgcttcgaatgcaagattggaccagagctcaaattcattacaaaagacgcaaacacaaccaccttcccacttattaagcacctcaaggagtaatacgagcttattaaacctacaggtttcatcgctttctaagactacatctaatacaagtgtaactagttctgcaacaagcataggtgctgctaataccaagactggcaacagagtcggtgaatttgggcaaaggaacgatttgaaaaaatccattttatctttatactcaaaaccttctgcccagactcaaagccagaactcatttttcacttccacgacacctcagccttgtaatactccgtcaccattcgtgaacactggaattaccgctacaaataataatagtatgaattcaaattccagttctaacatttcattggatgataacgagttatttaagaacgtctggagttgaataaaaagtaaaaaaagaaagcaaatatagaaagcaacaaaaagaacatcattccagtatattattttatataaagaaaatgaccttc

SEQ ID NO: 1526 - DNA, 951 bp, Saccharomyces cerevisiae
aagcaatcgaagatggctattgatgctcaaaagcttgtggtggtcatcgtgatcgtggtcgtgcctttgctcttcaagttcattatcggaccgaagaccaagcctgtgctggatcccaaaaggaatgacttccaatcatttccgctggttgaaaaaaccatcttaacgcataatacttcgatgtacaagttcgggctacctcatgctgacgacgtactcggtttaccaattggtcagcatatcgtaattaaggccaatatcaatggtaaggatattaccagatcgtatacgcccacatcgttggatggagatacaaagggaaactttgaattactagtgaagtcttaccccacaggtaacgtttctaagatgattggagagttgaagataggtgactcgatccagatcaagggccctcgtgggaactatcattatgagagaaactgccgttcccatctagggatgattgctggtggtactggtattgcgcccatgtatcagatcatgaaagctattgccatggaccctcacgacactaccaaggtctctctagtctttgggaacgtccatgaggaggatattctgttgaagaaggaactggaagcgttggtggccatgaagccttcccaatttaagatagtttactacttagactctcctgaccgtgaagactggactggtggtgtaggatacattaccaaggatgtcatcaaggaacacttgcccgctgctacaatggacaacgttcaaattttgatctgtggtcctccagccatggttgcctcagttagaagaagtaccgtggacttggggttcagacgttccaaaccgctttccaagatggaagaccaggtgtttgtgttttaagataaggaactgtaacagagtgccatatatatatatatagattggaacatatataatatatacgctatttagtttagtcaccta

SEQ ID NO: 1527 - DNA, 2867 bp, Saccharomyces cerevisiae
aaggcgcttgtaaagttattaataactttgcttctacattttttaaagcattttgttgatatttcgaactttcttttgttcatctccttttggtttgactttaacgagaagtctcattgtgtcaagacaaaaaatcaaaagctattatctacagcacatttatttattcattttcaaatttagatttttgaagattcattgtatgtttagtcgatcgacatggctcatagaaaattacagcaggaggtcgatagggtctttaaaaaaattaacgaaggtttagaaatcttcaatagctattacgaaagacatgaatcatgcacaaacaatccttcccaaaaggacaagctagagtcggatttaaaaagagaagtcaaaaagctgcaaaggctaagggaacagataaaatcatggcaaagctcacccgatattaaagataaagattctcttctagattacagaaggtctgtagaaatagcgatggaaaagtataaggctgtagagaaggcgtccaaagaaaaagcatactctaatattagcctgaaaaaatcagagactttagacccgcaagaaagggaaaggagagatatatctgagtacctttcccaaatgatcgatgagctggaaaggcaatacgattccctacaagtggaaattgacaagcttttacttcttaataaaaagaagaaaacgtcatctacgacaaatgatgaaaaaaaggaacaatataagcgttttcaagcgaggtataggtggcatcaacagcagatggagttagccttgagattgttagccaatgaggaattggacccccaagatgttaaaaacgtgcaggacgatataaattacttcgtggagtcaaatcaggatccagatttcgtagaggatgaaactatttatgacggtttgaatttacagagtaacgaagccattgctcatgaggtggcccagtattttgcttcacaaaatgctgaagataacaatacatcggatgctaatgaatctctgcaggacatatcaaaactttctaaaaaggagcaaagaaaattggaaagagaagccaaaaaggctgctaaacttgcggcaaaaaatgcaacaggtgcagctatacccgttgctggtccctcttctacgccgtcacctgtcattcccgttgctgatgcttcaaaagaaacggaaagaagtccttcatcttcccctatccataatgcaacaaagcctgaagaggctgttaaaacttctataaagagtcccaggagcagtgctgataatttgcttccgtcattgcaaaaatcaccaagttcagctacaccagaaactccaacaaatgtacatacacatattcatcaaactccaaacggtattactggtgccactacattgaaacctgctactcttccagcaaaacctgctggtgaattaaaatgggccgttgctgcatcacaagcggtagaaaaggatagaaaagtcacttctgcatcgtccaccatatccaatacctcaacaaagactccaacaactgctgctgctactacaacatcatccaacgctaacagcaggattggtagtgcgttgaatacacctaagttatctacttcatctttgtctttacaacctgacaataccggcgcatcatcttcagcagcaacggccgctgctgttttggctgctggggcggctgctgtgcatcaaaacaatcaggccttctatagaaatatgagctcctcacatcatcctttagtttccttggcgacaaatccaaagtctgaacatgaagttgcaactacggtaaaccaaaatgggcctgagaacacaactaagaaggttatggagcagaaggaggaagagtcaccagaagaaagaaataaattgcaagtgccaacttttggagtattcgatgacgattttgaatcggatagggattcagagacggagccagaggaagaagaacaaccaagcacaccgaaatatttaagcttggaacaaagagaagctaagacaaatgaaatcaaaaaagaatttgtaagtgattttgaaactttacttctaccaagtggtgtgcaagaattcataatgagttctgaactctataatagtcaaattgaatcgaaaataacgtacaaaaggtctcgtgatatgtgtgaaatttccaggctggtcgaagtaccgcaaggagttaatccaccatctcccttggatgcattcagatctactcaacagtgggacgttatgcgttgttcgttgcgtgatattattataggctccgaaaggctgaaagaagattcatcgtcaatttatgccaaaattctagaaaatttcagaactttagaaatgttttcgttattttataactattattttgctattactcctttagaaagggagattgcatacaagattctaaatgagagggattggaaagtttcaaaggatggtacaatgtggtttttaagacaaggtgaggtcaagttttttaatgaaatttgcgaagttggtgattacaaaatttttaaactggacgattggacagtaattgataaaattaacttcagactggattattcatttttgcagccaccggtagatacagcgtctgaggtccgtgatgtgagtgttgacaataacaatgttaatgatcagagtaatgtaactttagaacaacaaaaacaagaaatttctcacggcaagcagctcttgaaacaattgaaacagggaaaaattagtgtatgataataacataaaaaaaaaaaatgtgcatccctttaaaacaaaaacaacaaaaatcagtgctaatggcagtataatttgatttttaatttgatttttaattttatttatagttattttaaagtagtaagtaaacattt

SEQ ID NO: 1528 - DNA, 1319 bp, Saccharomyces cerevisiae
ttgatactcggtgtattgcaattacctactaggagttttctgaatagggacttaagaagtcaaatatacagacaaaaatagggggttgtagaaggaatatttgattcgaactatgaaatgcagggtatggtcagaggctcgtgtttatacgaatatcaataaacaaagaaccgaggaatattgggattatgaaaatactgtaattgattggtccacaaatacaaaggactatgaaattgaaaataaagttgggcgaggaaaatactccgaggttttccaaggtgtcaaattagactctaaagttaaaattgttattaagatgttgaaaccagttaaaaagaagaagatcaagagagaaatcaaaatcttaacggatttgtctaacgaaaaagtgcctccaacgactttgccatttcaaaaagatcaatattacacaaatcaaaaggaggacgttttaaaattcatcaggccctatatctttgatcagccacacaatggtcatgcaaacataattcatctatttgatataataaaggatcccatctcaaaaactccggctttggtcttcgaatacgtagataatgtggacttccgtattctttaccctaaattaaccgatctcgaaattaggttttatatgtttgagttattaaaggccttagactattgtcattcaatgggaataatgcatagagatgttaaacctcataacgtaatgattgatcataagaataaaaaattgcgattgatagattgggggcttgctgaattttatcatgttaatatggaatacaatgttcgtgttgcgtcgaggttttttaagggtcctgaactactagttgactacagaatgtatgattattctttagacttgtggtcgtttgggacaatgttggcttctatgatctttaaaagagagccatttttccatggaacgagtaacacagaccagcttgtcaagatcgtcaaagtacttggtacaagcgattttgagaaatacctgttgaagtatgaaattaccttaccgagagaattttacgatatggaccaatacatcagaaagccttggcatagattcatcaatgatggtaataaacatttaagcggcaacgatgaaattattgaccttattgacaatcttttgagatatgatcatcaagaaagattaactgctaaggaagcgatgggacacccgtggtttgccccaataagggaacaaattgaaaaataagaaataaataatgaatgaaataaaaaaaaaaaaatcactgacaaacgatataacgattacttttttttaccatctgtacaattgtact

SEQ ID NO: 1529 - DNA, 931 bp, Saccharomyces cerevisiae
acaatcaccaccgtaatgtctgatgctcaattcgatgctgctttagatcttcttaggaggctaaatcctaccacgttacaggagaatctaaacaacttgatcgaattacaaccaaatttggcacaagatttactatcttcagtagacgttcccctatccacacagaaagattccgccgattcaaaccgggagtacttatgctgcgactataatcgtgatattgattcgttcagatcgccttggtcgaacacttattacccagaactatccccaaaggatctacaagacagcccctttccctcagcccctttaagaaaattggagatcttagccaatgactctttcgacgtttacagagatctctattatgaaggcggtatctccagcgtgtacctctgggacctcaatgaagaagatttcaatgggcacgattttgcaggggtagtgcttttcaaaaaaaaccaatcagatcacagtaattgggacagtatccatgtttttgaagttacaacatctccttcttctcccgacagtttcaactatagagtcaccactacaatcattctgcacttggacaaaacaaaaactgaccagaattctcatatgatgttatccgggaacctgacaagacagaccgaaaaggacatcgctattgatatgtcccgtccattagatgttattttcacatcacatgtcgctaatttgggttccttaattgaggacattgagtctcagatgagaaatctattggaaactgtttatttcgaaaagacaagagatatcttccaccaaacaaagaacgcagccattgcttcctctgctgaggaagcgaataaagacgcacaggcagaggtaatcagaggtttacagtctttatagaaatatttacatgtatcgctggtatatcatataaatacatacagcagcacta

SEQ ID NO: 1530 - DNA, 1454 bp, Saccharomyces cerevisiae
catcacatccattacacgcatttcacgcatacataaataggaagatcatttacaacaagcagattattttcaaaagacaacagtaagaataaacgatggtatcttctttgcccaaggaatcgcaagccgaattgcaactgttccagaacgaaatcaacgccgctaatccgtccgactttcttcagttctccgccaactatttcaataaaaggctggaacaacagagagcgttcctcaaggccagggagcctgaatttaaggcaaagaacattgttctatttccggaaccagaggagtcattttccagacctcaatcagctcaatctcaatcaagatccagatcgagtgttatgttcaaatccccctttgtgaacgaggacccacactccaacgtgtttaaaagtgggtttaatttagacccgcacgaacaggacactcaccagcaagcacaggaagaacaacagcatactagagaaaagacatcaactcctccactcccaatgcacttcaacgcccaaaggcgtacttctgttagtggtgagaccttacaaccaaacaattttgacgattggactccagatcactataaggaaaagtccgagcagcaattgcaaagactggaaaaatcgatccgtaataactttctgttcaacaagctggattccgactcaaaaaggctggtcataaattgtctggaggagaagtccgtccccaaaggtgctacgataatcaagcaaggtgaccaaggggactacttctatgtcgtcgaaaagggtactgttgacttctacgtcaacgacaacaaggtcaactcttccgggccaggctccagtttcggggaacttgctcttatgtacaacagccctcgtgctgccaccgttgtagcaacctccgactgtttgttgtgggctctagacaggctcaccttcagaaaaatacttttgggcagctctttcaagaagagactcatgtatgacgatcttttgaagagcatgccagttttgaagagtttgactacgtacgaccgtgccaaacttgccgatgcactggataccaagatctaccagccgggtgaaacaatcattcgcgagggtgatcaaggggagaacttttatttaattgagtacggagctgtggacgtctctaagaagggccaaggtgtcataaataaactgaaagaccatgattatttcggtgaagtggccttgctaaacgatttgcccagacaggccactgtgactgctacaaagagaaccaaagttgccacattggggaaaagtggttttcaacgtttactgggtcctgcagtagacgtattaaagctcaatgatcctacaagacattaagtaaaaaggggaagcgatcttaaatccacatgaatttcctttctctttttcttcttcttctgttccctttttctttcttcttccttcaacgtctacgtaaatataatg

SEQ ID NO: 1531 - DNA, 4038 bp, Saccharomyces cerevisiae
atggatgttgattctgacgttaatgtctccaggttaagagatgaactgcataaggtggcaaacgaggaaacagataccgccactttcaatgatgatgcgccatccggcgccacctgccgtatttgtcgtggagaagctactgaggacaatcctcttttccatccttgtaaatgcaggggctcaattaaatacatgcatgaatcctgtctgttggaatgggtagcttcaaaaaatatagacatttcaaaaccaggcgcggatgttaaatgtgacatctgtcactatcccattcaattcaaaacgatatatgcggaaaacatgcccgaaaagatacctttttctttactactatccaagagcatcttgacatttttcgaaaaagctcgtttggctttaacgattggtttggccgctgtactatatattatcggtgttcctttggtatggaacatgtttggaaaattatacaccatgatgctagatggatcatccccttatcctggtgatttcctaaagagtttgatttatggttatgatcagtcagcaactccagaattaaccacgagagcaattttttaccaacttttacaaaaccattcgtttacgtctttacaatttattatgatagtgatactacatatagcattgtactttcaatacgatatgatagtaagagaggatgttttcagtaaaatggttttccacaagataggtccaagattatctcccaaggacttgaaatcacgtttgaaggaaagattccccatgatggatgatagaatggttgaatatttagcgagggaaatgagagctcatgacgaaaatcgtcaagagcaaggtcatgatagactgaacatgccagccgcagcagcagataataataataatgttattaatcccagaaacgataacgttccacctcaggatcctaatgaccatcggaattttgaaaaccttcgccacgtagacgaattagatcatgatgaggctacggaagagcacgagaacaacgactctgacaatagtttaccatcaggtgatgattcgtcacgaattttaccggggtcttcaagtgacaacgaagaagatgaagaagcagaggggcaacagcaacagcagcaaccagaagaagaggcagattaccgtgatcatatagagcccaatccgattgacatgtgggcaaatcgtcgtgcgcaaaatgaatttgatgacctaatcgctgctcaacagaacgcaataaacaggcccaacgctccggttttcatcccaccacctgcccaaaacagagctggaaatgtcgatcaagacgaacaagactttggcgcagctgttggtgtgccaccagcacaggctaacccagacgatcaaggacaaggccctctagtgataaatctcaaattgaaattgttgaatgtcattgcttatttcataattgccgtagttttcaccgcaatatacctggcaatttcctatttgtttccaacttttattgggttcggtttgttgaaaatttattttggtatatttaaggttattttgcgtgggttgtgccatctttactacttgtctggcgctcatatagcttacaatgggctgacgaaactggtccctaaagtagatgtcgcgatgagttggatttcagaccacttaattcatgacatcatttatctttacaacggctacactgaaaacaccatgaagcactcaattttcatcagagctttacctgctttaacgacgtatctaacctcagtcagtatcgtttgtgcttcatccaatcttgtctcgaggggttatggccgtgagaacggaatgagcaaccctactagaaggctgattttccagattttatttgcactcaaatgcactttcaaggtgttcactttatttttcatcgaattggctggattccccattctagctggtgtaatgctagatttctcattattttgcccaatcctggcatccaatagtcggatgctttgggttccttcaatatgcgcaatatggcctccattttcccttttcgtatactggacgattggtactctctacatgtattggtttgccaaatatatcggaatgattaggaaaaatatcattagaccaggtgttctattctttatcagatctccagaagatcctaatattaagatcttgcatgatagtttaattcatccgatgagtattcaattatcaaggctttgcttatccatgtttatttatgcgatttttattgtcttaggttttggcttccatactagaatttttttcccattcatgctcaaatcgaacttattatccgttcctgaagcttataaaccaacatcaattatttcatggaagttcaatacaattttgctaactttatattttacgaagaggatcctggagtctagctcttacgttaaacccttattggaaaggtattggaaaacaatttttaagttatgttcaagaaaattacgtttatcatcctttatcttaggtaaagataccccaacagagagaggccatattgtttaccgcaatttgttttacaagtacattgctgccaagaatgcagaatggtcaaaccaagaacttttcactaaaccaaagactctagaacaagcagaagaattgtttgggcaagttcgtgacgttcatgcttattttgtccccgatggcgttttaatgcgtgttccttcttctgatatagtatccagaaattatgtacaaacaatgtttgtccccgttacaaaggatgataagctgttgaaaccattagatttggaaagaattaaagagagaaacaaacgtgctgctggtgaatttggttatttagacgaacaaaacacggaatatgatcaatattatatcgtttacgtccctccagatttccgtttacgctatatgacattgcttggcctggtttggttatttgcttccattttaatgcttggtgttacatttattagtcaagctttaataaactttgtttgtagtttcggctttcttccagtcgtaaagctattgttaggtgaaagaaataaggtctatgttgcatggaaggaactctctgacattagctactcctatttgaacatttattatgtctgtgtcggatctgtttgtttatccaagattgctaaggatattcttcattttacagaaggccaaaacactctcgatgaacatgccgttgacgaaaacgaagtagaggaagtggaacacgatataccagagagagatatcaacaatgcccctgttaataatatcaataatgtggaagagggtcaaggaattttcatggccatctttaacagtatatttgatagtatgttggtgaagtataacctgatggtgtttatagctatcatgattgcggttattagaactatggtttcgtgggtcgtcttaaccgatggtatactagcctgttacaattatctcaccatcagagtgtttggcaattcttcatacactattggtaattccaaatggtttaaatatgacgagagtttgttattcgtcgtttggatcatttcgtcaatggtcaatttcggaaccggatataagtcattgaaactatttttcagaaacagaaatactagtaaattgaacttcttgaaaacaatggctttggaactgtttaaacaaggtttcctgcacatggtaatttacgtcttgccgattattattttatccttagtatttttacgtgatgtttctacaaagcagattatcgatattagccatggatccaggagtttcactttatcgcttaacgaatcattcccaacatggacaaggatgcaagatatttatttcggactactgatagcattagagtcatttacgttctttttccaagcaactgtgctgttcattcaatggttcaaaagtactgtacagaatgtaaaagacgaggtttacactaagggtagagctttagaaaatttaccagatgaaagttaaaggcgttttcttccttacatttaaaatgaatgctagcatatttacatatatatatctacattaagttatatgtttttc

SEQ ID NO: 1532 - DNA, 889 bp, Saccharomyces cerevisiae
caacaacgcagttatgcaaaccatcaaagagggcaaatgaactattcccgctcttcgtaaggatgctgtattaccgccgttagccatcagaattactataaaaacaatgcggttaattttcattgcgaaaatgcttcaatattcatttctaccattttccccgttcaatcttttgaattttgataatagtataagcgtaagctggtttataacatactcagtgatcgtttccatttgggggtttgctgtgtggattgaaggagcatataggaataagattaatctacagcttccaagatgtacgaagataaaatgctcccgctacaatacgagaataaaatcccccaagtggttcaactgtaaaaattggatgcattttttcctattatacctttttctaaccgcttctaacttaattgttcaattggcctatttttcaaaagaaatgtgtagtcagggtataaacgttcctggaacgaagaaaccaggtaatagagtttatttatcggttatcatactaatggggaacgggtgatagaacttttaccaatgaaaagaaatcagcaggccataatttggctttattaaaattaataacattatggtgctgttgcgtttattaaaacagactaaagctgttggaatgaaattctaatgttatctatttagtagtaatagcatcacatgcggtgtaagaggatggcgtaaattatgagaagctgtcatcgaggttagaggaagctgaaatacaaaaattgataatgtaataggagaatgaaacatataaaacggaatgaggaataatcgtaatattagtatatagaaatatagattccattatgaggattcctagatcctcgaggagaacttctagtatattccgtataca

SEQ ID NO: 1533 - DNA, 549 bp, Saccharomyces cerevisiae
catctaaaaagcgatcgtaattaagccctaccgagatacaaaaaagcaattatcaagagatgtcgtttgtttccaagcttctctatacagtctctgcattggtgttatttcattctggtttctcaagctatgagtttcatcacttattaaaacttaactcgcttaataatgcacaaggtgcaatcagcaagttacctaaagatatcatgtatgaaacgtatgcaggattgatactctttgttcttgcagtgttcacttcgttcgagaaattacaatatttaccaattgagagtaacgatgggaagataatatcccaaggaaactatctaaaagaaatcgcattaaataaagccaccaacgtggataacttgataggaagtaaccctaatggtgagatcatatttactccaagctttgttgacgttcatatgaagagaaaaatttgcagggaatgggcctctaacactgtaaaaaaagaaaaataaataagatactgaaaactagagctagaacttataatttcatacatatatacatatcaagatctaa

SEQ ID NO: 1534 - DNA, 1353 bp, Saccharomyces cerevisiae
ttctaatacacaatttatacgtaatttagtagaatttctgcggagaaccaaactgtgccagttcttccaatatatagttttccggattattattcattccctttccatagaacagtaaactgaaaaaaaaaaacgtcttaggaaaaaggtggaaaaggaaagaagaaaataagaatgaaatagaaggagaacagaagcagaaaaagcatgaaggcgtcgcacatttgctcttatttgctaagcattgcacccctagtggtgtcccatggagtacatcataatcgagatcatggccacgaggcaaaccatgagtccaagcaaagtttcttgattttgaagcaagaatccattttttactctctagtttgctttctgcagaaccacctctttgtcctgggaccccgttacaatgcgattgtggctatcctaatcatacaacttatgccgtgtcttttcgtactgtttgttcctggactgcgcaagaacgatcgtgccagcttgacactgtccttactagtttccttttctctaggaacactcctgggtgatattttattacacgtgatacctgaaagtctcagcggcgtaactgatgtcacaatggttggaggagccatatttctggggtttataagcttcttgactctggataaaacgatgcgtattctgtcagggacgtccaacgatgacggcagcatacattctcattctcatagtcatactccacaacaaactgcagagaagaaagcgggctttaacatgtctgcgtatctgaatgtcatatccggcattgctcatcacatcacggatggcatagcgctggctacgtcattctatagttccacacaagttggcataatgaccagcatagctgtcactttccatgagatccctcatgagctaggtgacttcgccattctgctttccagtgggtttacgttcccacaagcgataagagcccaagcggtgacagctttcggcgccgtcgttggaacgtccattggctgctggatgaacgaaatcgggaacaacagccataaagcaacgtcttcatccgcgaacgcatctgaacttatgctgccgttcacggcgggcggcctcatatacatagccactactagcgttgtaccgcagatcttacatagctccgcacccgatagcaagcttcgagagtttaagaagtgggccttgcagctagtcttcatttttgtaggatttgccgttatggcgctcatggatgagcattgattcagctttgtattacttggcgtgcaatatacgtacctttatagtaaatatccttgttgccttatatggtaccgacgcttccccggatttcaattaaggcaaaaa

SEQ ID NO: 1535 - DNA, 938 bp, Saccharomyces cerevisiae
acaatatcttcgaaactgcgcataagaaggctgggggtatatactagaaaaaaatgacgaagtttattggttgtatagacctgcataatggagaggttaaacagattgtaggtggaacgttaacgagcaaaaaggaggacgttccaaaaactaactttgtatcacaacatccttcttcatattacgctaaactttacaaagacagagatgtccaaggatgtcatgttattaagttgggacctaacaatgacgacgctgcacgcgaggcactccaggagtcaccacaatttctacaagtgggcggaggaattaatgatacgaactgtttggaatggttaaaatgggccagtaaagtaattgttacgagttggctatttacaaaagagggtcattttcaattaaaaaggttagaaagactgacagaactatgtgggaaagaccgcattgttgtagacttaagctgtagaaaaacccaggacggtcgttggattgtggccatgaacaaatggcaaactctaactgatcttgagcttaatgctgacactttcagagaattgaggaaatatacaaatgagtttctaattcacgctgcagacgttgaaggtttgtgtggtggtatcgatgaattattggtttctaagcttttcgaatggaccaaagattacgatgatttgaaaatcgtttatgctggtggggccaaaagtgttgatgatttgaaattagtagacgaactaagtcacggaaaagtagatttgacattcggtagttccttagatatatttggtggtaacctagttaagtttgaagactgctgtagatggaatgaaaagcaaggttagcccttcctttcattttttcattttcttttttcttttttgtttgcttcgtactttagattataatacttataatactaatcataatgatacatacatgca

SEQ ID NO: 1536 - DNA, 704 bp, Saccharomyces cerevisiae
gtaaatcctgggtacaaatcgggataacaagtaaacaatgccgaaagtaattctggagtctcattcaaagccaacagactcagtttttctacaaccatggataaaggcattaattgaagacaactcggagcatgatcaatatcatccctctggccatgtaattcctagcttgaccaagcaggacttagcgctaccgcatatgagcccgacaattttaaccaatccgtgccatttcgccaaaattacaaaattttataacgtttgcgactacaaggtatacgcatcgataagagattcctcacaccaaatacttgttgagttttcccaagagtgtgtatctaattttgaaaggactcataattgcaggatcacatctgagacgaccaattgcttaatgatcattggcgatgctgacttagtctacgtaacaaattctcgagcaatgtctcacttcaaaatttgcctaagcaacatttcgtccaaagaaatagtgcccgttctcaatgtaaaccaggccacgatatttgatattgatcaagtcggatcgttaagtactttcccatttgtatataaatatttatgaccttctgcaggctcgatattttataagtgtgagagagttagaatatcttcgtttatctacatatataaagggaagggtttggaatattttaccgataagtactcctctagagaaacaaaaa

SEQ ID NO: 1537 - DNA, 589 bp, Saccharomyces cerevisiae
caacactaggctacacagatgagttcaagatttgcagggggaaacgcttatcaacgtgatactggtagaacacagttattcggaccggctgatggatcaaatagtctcgatgacaatgtatcatcagcgctagggagcacagataaattagactactcccaaagtactttggcatctcttgaatctcaaagtgaggaacagatgggagctatgggtcagagaataaaagcactcaagtcattatcgttgaagatgggtgatgagattagaggcagcaatcaaactattgaccagcttggtgatactttccataacacttctgtaaaactcaaaaggacttttggaaacatgatggagatggccagaagatctgggatcagtataaaaacatggttaataatattttttatggtaggcgtgctatttttttgggtatggattacataaatatttgcatattgtacattaaacctaagtgacaaaataagagcgacgtttgttagatgattgtagatattgatacgtgaaataaaggatagttatgatagcatcataagatatcagcattcttttatttttataactactt

SEQ ID NO: 1538 - DNA, 74 bp, Saccharomyces cerevisiae; identical to SEQ ID NO: 232

SEQ ID NO: 1539 - DNA, 72 bp, Saccharomyces cerevisiae; identical to SEQ ID NO: 229

SEQ ID NO: 1540 - DNA, 72 bp, Saccharomyces cerevisiae; identical to SEQ ID NO: 229

SEQ ID NO: 1541 - DNA, 136 bp, Saccharomyces cerevisiae
tatcatgatgagcatttattttactgcgttatcgtattgacgggggctgtttaagtacagtctgttttataatctatattcatttatattttatatttcttaccgaggaaattgactcttaacagatttgctgaaa

SEQ ID NO: 1542 - DNA, 72 bp, Saccharomyces cerevisiae; identical to SEQ ID NO: 619

SEQ ID NO: 1543 - DNA, 72 bp, Saccharomyces cerevisiae; identical to SEQ ID NO: 230

SEQ ID NO: 1544 - DNA, 74 bp, Saccharomyces cerevisiae; identical to SEQ ID NO: 232

SEQ ID NO: 1545 - DNA, 82 bp, Saccharomyces cerevisiae; identical to SEQ ID NO: 883

SEQ ID NO: 1546 - DNA, 295 bp, Saccharomyces cerevisiae
cgtcgtcaataatatgactcgtgatacacccgaagatgtcagtactgcaggcgcaaaggatattttagatgttttgaacctactaaaaggaggagaagagaaaatctcggaagtcgaacttaagttggatgaaatggaaaagaaaatggactctctgttagttcagttagaagatctacacagggacaacaatgatttggcaaaaagttccagccaaaaatagagagtacgctcacagccgcatagggaaggaacgctaaataaatatatttatatataatcttttcactaatga

SEQ ID NO: 1547 - DNA, 1003 bp, Saccharomyces cerevisiae
cccaaaactaatacgactattacaattaagcatggaggaacaggagataggcgttcctgcggcctctttggcaggaataaaacatatcatattgatcctttccggaaaaggtggtgtcggtaaaagttcggtaacgacacagactgcgctgactctttgcagtatgggcttcaaagttggagttttagatattgatttaacagggccatccttaccgaggatgtttggcctagagaacgaatctatatatcaaggtcctgaaggttggcaacctgtgaaagtggagacaaactctactggctctcttagtgtaatatcattggggtttctactaggtgatagagggaacagcgtgatatggaggggtcctaagaagacttctatgataaaacaattcatctctgacgtcgcctggggtgaactggattacttactgatcgatacccctccgggaacgtcggatgaacatatatcgattgcagaggagctgagatattccaaaccagatggtggtattgtagtaactaccccacagagtgttgcaacagctgatgtcaaaaaagaaatcaatttctgcaagaaggtcgatttaaagatcctcggtataattgaaaacatgtcagggtttgtatgcccgcattgtgctgagtgtacaaatatcttttccagtgggggtggtaaaagattatcggagcaattttctgtcccataccttggtaacgttcctatagatccaaaatttgtagaaatgattgagaatcaagtttcaagtaaaaaaacgcttgtagaaatgtacagagaatcatctctttgtcccatttttgaagaaataatgaagaaactgaggaaacaagacactacaacccctgttgtggataaacacgagcaaccccagatagaatctccaaaataagatcctctcctatgcatgtacgtatatatatatatatgtgtgtgtgtgtgtttatatacacttatattttgatccttgggcctagaaata

SEQ ID NO: 1548 - DNA, 480 bp, Saccharomyces cerevisiae
aaaacaatactgatttctgatactaaaacgagataggttaatagcaaaatcgggatggtaaacgtgaaagtggagtttctaggtggacttgatgctatttttggaaaacaaagagtacataaaattaagatggacaaagaagatcctgtcacagtgggcgatttgattgaccacattgtatctactatgatcaataaccctaatgacgttagtatcttcatcgaagatgattctataagacccggtatcatcacattaatcaacgacaccgattgggagctcgaaggcgaaaaagactacatattggaagacggtgacatcatctcttttacttcaacattacatggtggttaaaaatagcagcaaataatttttaagaagcagctacatatatatatataaagtgctgtacagcttgaatgaatcacaagttagataacgtaggtaatatgcagatagtataaaaagtaatagtaataa

SEQ ID NO: 1549 - DNA, 2292 bp, Saccharomyces cerevisiae
atgtccgaacaacactctgtcgcagtcggtaaagctgctaatgagcacgagactgcccctaggagaaatgttagagtcaagaagcggcccttaattagaccattgaactcgtcagcatctacgctgtatgaatttgccctagagtgtttcaacaagggtggaaaacgagatggtatggcttggagagatgtcatcgagattcatgagacaaagaaaaccattgtgagaaaggtagacggcaaggataaatctatagaaaagacatggctgtattatgaaatgtcaccatataaaatgatgacctaccaggaactgatctgggtgatgcacgatatgggccgtgggctggcaaaaataggcatcaagcccaatggagaacacaaattccacatcttcgcatctacttcccataaatggatgaagattttccttggttgcatatcccagggtatccccgtagtaaccgcgtatgatactttgggtgagagcggtttgattcactccatggttgaaaccgagtctgctgctattttcactgataatcaattattggctaaaatgatagtgcctttgcaatctgctaaagatatcaaatttcttatccataacgaacctatcgaccccaatgacagaagacaaaacggcaaactttacaaggctgctaaggatgccattaataagatcagagaagttaggccagacataaaaatttatagttttgaagaagttgtcaagataggtaaaaaaagtaaagatgaggtcaaacttcatccacctgagccaaaagatttggcttgtatcatgtacacctcgggctcgatcagtgcaccaaaaggtgtagtattgactcattataatattgtttcgggtatcgctggtgtaggtcacaacgtctttggatggatcggctctacagaccgtgttttgtcgttcttgccattggctcatatttttgaactggtctttgaattcgaagccttttactggaacggtattcttgggtacggtagtgttaagactttgactaatacttcgactcgtaattgtaagggtgacctggttgagtttaagcctactattatgatcggtgtggctgccgtttgggaaactgtgagaaaagctattttggaaaagatcagcgatttaactcccgtactccaaaagattttttggtctgcctatagtatgaaagaaaagagtgtaccatgcaccgggtttttaagtcgtatggtcttcaagaaagtcagacaagccaccggtggtcatcttaagtatattatgaacggtgggtctgcgatcagtattgatgctcagaaattcttttctatcgtcctgtgtcctatgattatcggttacggccttactgaaacagttgcgaatgcttgtgttttggagcctgatcatttcgaatatggtatagttggtgatcttgttggatcggtcactgccaaattggtggatgttaaggacctaggttattatgcaaaaaacaatcaaggtgaattgcttctaaagggtgcgccggtctgttctgaatattataagaatccaatagaaacggcggtctctttcacttacgatggatggtttcgtactggtgatattgttgaatggactcccaagggacaacttaaaattattgatagaagaaagaatttggttaaaaccctaaatggtgaatatattgcattagaaaagttagaatctgtttacaggtcaaactcctatgtgaaaaatatctgtgtttatgccgatgaaagtagggttaaaccggtgggtattgtggtacccaacccaggacccctatctaaatttgctgtcaaattgcgtattatgaaaaagggtgaagacatcgaaaactatatccatgacaaagcattacgaaatgctgttttcaaagagatgatcgcaacagccaaatctcaaggtttggttggtattgaactattatgtggtattgttttctttgatgaagaatggacacctgaaaatggctttgtcacatctgctcaaaaattaaagagaagagaaatcttagccgctgttaaatcagaagtcgaaagggtttacaaagaaaattcttagagagaagcttattaccttccccttccatctatgcacggtgtctcgtacttccatagagcaccgattagtgaatactaaaactatgtgcgtgataaatggttctcttttacagatgcggtaaatcaattattgatatactacataacatacaaacatgtttcatttccgtaatacaaattacaattgtataattaaaaaatataaaaa

SEQ ID NO: 1550 - DNA, 856 bp, Saccharomyces cerevisiae
acaggtaatattaaagttccttaatagaatgggtgaagcactacgtagatcaaccaggattgcaatatccaaaagaatgttggaagaggaagagtccaaactggcccctatttcgacaccggaagtgcctaagaagaaaatcaagacgggtcctaaacataacgctaatcaagcagtagttcaagaggcaaataggtcatctgatgttaacgaattagagataggcgatcctattcctgatttgagtcttttaaatgaagataatgactctatctccttgaagaaaatcaccgaaaataacagagttgtggtgttttttgtgtatcccagggcaagcacgcctggttgtactagacaggcctgtggatttcgtgacaattaccaggaactcaagaaatatgctgctgtctttggactgagtgcagattctgtgacatcccagaaaaagtttcagagtaaacaaaatttgccatatcatttactaagcgatccaaagagagagtttattgggttgctaggagccaaaaaaacgccactttctggttctattagatcgcatttcatttttgttgatgggaagttaaaattcaaaagagttaagatatcaccagaagttagtgtaaatgacgccaaaaaggaggttttagaagtcgctgaaaagtttaaagaagaatgaagtttaataaccccctttttgtttctctagaggagtacttatcggtaaaatattccaaacccttccctttatatatgtagataaacgaagatattctaactctctcacacttataaaatatcgagcctgcagaaggtcataaatatttatatacaaatgggaaagtacttaacgatccga

SEQ ID NO: 1551 - DNA, 955 bp, Saccharomyces cerevisiae
cagatccaattgttcaaccgcccacacacaacaatgtctttcactaaaatcgctgccttattagctgttgccgctgcctccactcaattggtttctgctgaagttggacaatatgaaatcgtcgaatttgacgctattttggctgatgtcaaggccaatttggaacaatatatgtccttggcaatgaataatccagactttaccctaccatctggtgttttggatgtttaccaacatatgaccactgctactgatgattcctacaccagttatttcaccgaaatggactttgctcaaatcaccactgccatggttcaagtgccttggtactcttctagactggaacctgaaatcatcgctgctttacaaagcgcgggtatcagtattacctccttaggtcaaaccgtttccgaatctggttccgaatctgccactgcttcctcagacgcttcttctgcttctgaatcctcttcagctgcttcttcttctgcttctgaatcctcttcagctgcctcctcttctgcttctgaatcctcttcagctgcttcttcctctgcttcagaatcttcttctgctgcctcctcttctgcttctgaagctgctaagtcttctagctctgccaagtcttctggctcttctgctgcttcatctgctgcttcatctgcttcttccaaggcctcttctgcagcttcctcttctgcaaaggcctcctcttctgcagaaaaatctactaatagctcctcctctgctacctccaagaacgctggtgcagctatggacatgggcttcttctccgctggtgttggtgccgctattgccggtgccgctgctatgctcttatgattgtcacttattaatgataaattataaaatgttatatgtaaaaaaacaaatatacactttttgaatattagtatcctattttaatatactgtctcctagataatacaaactt

SEQ ID NO: 1552 - DNA, 2046 bp, Saccharomyces cerevisiae
gcaataatctactctttaatttggtatcattgtttgtcttagtacttaaattgtgcctctggaactgatcaaattcctttctccatcacatgagtacgaggaggggtgttaaggaattaaagacagtctactaaaactatttccctaagcatgcttaaatcattaaaatccagaagactaatcttaaaacgattagtaacactgctgctctctttattcttttcttatctcattttctctgccagtcggaatgttacatcatccaataaattaaacaaccatgcaagcgagaggacagctgttgaatcatctgcattcaattggattgaaaaacgacaacaccaagtgagatccgaaaacttaatgaacagattatctgcctactttttgccctttttgagtagaagttctcacaaagaacgtgtattgttgaggcaattaggaaataatgaaatagcgaagagtgacaagtgccgttacatttttgaagtactatacaagattgatcccgactgggacaatgcgcaaactgcaaaattttataatgttgatggtgtagataacacgttggcctcattgttaggggaaagattaagatcttatgattattgctttttatctggtcaattagatcctactgcaatatttgcaaattcaaccgtaaatcctcatgatttgcaaaacagaatgtttccatttctgaagaaaattaacgaggaatccaaaactgtaatgtggcctattatcacagacatgacaactggagaggcagttccggcacccgaggttgatatggaatcatcaaactttaatggtaacttttggtccaactggaataggttgagcaaaggaagaggttttgttttaactattgctgaaaaggatgttcctttatttttgaaacagttgaaagtgatggaattttcaaaaaacgaattaccattccaaatagtatccacgggaaatgaactatcagcagagtctattgctaaaatttctgagaccgctaaagaaacggaacaaagggtctacttagtagactgctcgacagtgcttgacactaattttgctaatacatacatttctttttttcagaataaatgggtcgccactttgttcaacacatttgaagaatacattttgttggatgcagacgtagtaccgtttgtagggtctgattactttttcgactctccttcttacagggagagcgggatacttttgttcaaggatagggttatggaaaacgagcaaactttccaatactgcatcgaaatgttaaatgaagtggaaccctctgcacaagaacgcagatttattggaagtaggttagtttttgattcgtcattaccgttttcttccgaaacctcagaagaagcatctgtgtattacaattttttcaaaaaattacgactccatcatgttgatagtggtttggttgtagtcaataaacttgagaaattaaatggattgttgatgtcttttatgttaaatttggatggaaaattgcagaggtgtgtgtatggtgacaaggaaatattctggttggggcaattatatgctggccaggattattctatcaatcccgttgatggcagtattattggacctgttaatgaagagcctgaaaatgatgacggacataaaagcgggatgtactacatttgttctacgcagattgcacacagtgactccaaaaatcgattactatgggtaaacggtggactgaagacttgtaaaatttcgaacagtgctgaagatgactttggaagagagccagagtattttaagagtagatatggggacatttcaaaattaaaaaggatatatgatgcttcgttgaacgtagagggactaatcgttcctgacgtttctgttcatccatggatgcaaatcaaggaatgttctaattatatgtattgtgcatatgctacgggtgacggacacacaaactctgaacttgacgaaggtcgtctaatcacgtttactgaaaaggaattacgatatatcaatgatatttctcgaacctggaatgctaattgagaa

SEQ ID NO: 1553 - DNA, 524 bp, Saccharomyces cerevisiae
caattgtacgtttccgtaatgtcgcacaacgcaatggaacattggaagagcaagctgagcaaaacaagtacctcgacgtacgtcctcttggccgtgattgctgttgtatttttggttacaatcagaagacccaatggcagcaagggaaaaagcagtaaaaagagggcttctaaaaagaacaagaaaggtaagaatcagtttgaaaaagcgccggttcctctgactctagaagaacaaattgacaatgtgtcgttgagatacggcaacgagttggaaggtcgtagcaaggatctaataaacagatttgatgtggaagatgaaaaggacatctacgagcgtaactattgcaacgaaatgcttttgaagttgctgattgagttagacagtatcgatttgattaacgtggatgagtccttaagaaggccgttgaaggaaaaaaggaaaggcgtcataaaggaaattcaggctatgttaaaaagtttggactctcttaaataagtttgtatttttagtttatagataac

SEQ ID NO: 1554 - DNA, 880 bp, Saccharomyces cerevisiae
ccaagaaaccacaaagttattgaacaatgggtagagttattcgtaaccaaagaaagggtgctggttctatcttcacctctcacaccagattaagacaaggtgctgccaagttgagaactttggactatgctgaacgtcatggttacatccgtggtatcgttaagcaaattgtccacgactccggtagaggtgctccattggccaaggttgttttccgtgacccatacaagtacagattacgtgaagaaatcttcattgctaacgaaggtgttcacactggtcaattcatttacgctggtaaaaaggcttctttgaacgtcggtaacgtcttgccattgggttctgtcccagaaggtaccattgtctccaacgttgaagaaaagccaggtgacagaggtgccctagccagagcttctggtaactacgttatcatcattggtcacaacccagatgaaaacaaaaccagagtcagattaccatccggtgccaagaaggttatctcttctgacgccagaggtgtcatcggtgtcattgccggtggtggtagagttgacaaaccattgttgaaggctggtcgtgctttccacaagtacagattgaagagaaactcttggccaaagacccgtggtgttgccatgaatccagttgatcaccctcacggtggtggtaaccatcaacatattggtaaggcttctactatctctagaggtgccgtttctggtcaaaaggctggtttgattgctgccagaagaaccggtttactacgtggttctcaaaagacccaagattaatctttttaattttggtttcttccttctgtcatattattttatcaattttcttaaatattatataatttaatccgaaacgttccttataa

SEQ ID NO: 1555 - DNA, 1154 bp, Saccharomyces cerevisiae
acactttttatatcaggtgcaaaggcttcgtaccagcgttgaaaaactaaaacaatattgaaaaatgagtgaagaaggtcctcaagttaaaataagagaagctagtaaagataacgtcgactttatactatccaatgtggatttggctatggccaattctctccgtagagtcatgatagcagagattcccactttagccattgattcagtcgaagtcgaaacaaatactacggttttggccgatgaatttattgcacacagattaggtttaatacctctacaaagtatggatatcgaacaactagaatacagtcgtgattgtttttgtgaggaccactgtgataagtgttcagtggtgttaacattgcaagcgttcggcgaaagcgaaagtactacaaacgtctacagcaaggacttggtaattgtgtctaatctcatgggccgtaatattgggcatcctattatacaagataaagaaggtaacggtgttcttatttgtaaattgagaaaaggtcaagaattgaaactgacatgcgttgcgaaaaagggtatagccaaagagcacgccaagtggggtccagcagcagccatagagttcgagtatgatccttggaataagctcaaacataccgattactggtatgaacaggattctgccaaagaatggcctcagtctaaaaattgtgaatacgaagatcctccaaacgaaggtgaccccttcgattataaggctcaggcagatacattttatatgaatgtagaatctgtggggtctattcccgttgatcaagttgtcgtcagaggtatcgatacattacagaaaaaggttgcctcaatattgttagctctgacacagatggatcaagacaaagttaattttgcatcgggtgataacaacaccgcttcaaatatgctgggaagtaacgaagacgtaatgatgacgggcgctgagcaagatccttactccaatgcatctcaaatgggtaatactggatcaggagggtatgataatgcttggtagttctcaagtgggcgtaatagaggaaaaaaaacaagtgaacgaaccgaaaataataagagaaaaaaagctttatatgcatgtatgtatcattatgattagtattataagtattataatctaaagtacgaagcaa

SEQ ID NO: 1556 - DNA, 1632 bp, Saccharomyces cerevisiae
ataagcccgcaagtaagcaaaagttgggataagagggcaggaccgagcttatagtgtttcgtttttttattcctgaatttttcactaccgcagcaattgctatttcagttcatgcacagatccacttttatcaggacgtccggcacgagctctaggacactaaccgcaaggtacagatcgcagtacacaggattactcgttgcccgagtattattctccacctctacgacccgtgcgcaaggtggaaaccctcgatcaccactccagattttccgcgatacattcaagaaggaatgggagaagtctcaggaactgcaggagaacataaagacgctgcaagatgcttcgggaaagttaggcgagtctgaggcctacaaaaaggctagggaagcatatttgaaagctcagagaggctccacaattgtgggtaaaactctgaaaaagaccggtgagaccatggaacatatagccactaaggcctgggagtccgaactcggtaagaacacaagaaaggcggctgccgccacggcgaagaagctggatgagagttttgagccagtgagacagacgaagatttacaaggaagtctcagaagtcattgacgatggggagagttcccgatacggtgggtttatcacgaaagagcaaaggagacttaaacgtgagagagacctggcctctgggaaaagacacagggcagtaaagagcaatgaagatgcaggaacagcagtggttgcgacaaatatcgagtctaaagaatcgtttggtaagaaagtggaggatttcaaggagaaaaccgtggttggccgttctatacaatctttaaagaacaaattgtgggatgaaagtgaaaaccccttaattgttgtcatgaggaaaataaccaacaaagtgggcggtttctttgcagaaacagaatcctcccgtgtttacagtcaatttaagctaatggacccaaccttttcgaacgaaagcttcaccagacacttaagagaatacattgttcccgagattctcgaagcgtatgtgaaaggcgatgtcaaagttctcaaaaaatggttcagcgaggcgccattcaatgtttacgccgcccaacagaaaatcttcaaagaacaggatgtttacgccgatggccgtatcctagatatcaggggcgttgaaatagtgagtgcaaagttattggctccccaagacatcccagtcttggtggtcgggtgtagagcacaagaaatcaacctttacaggaaaaagaaaactggcgagattgcggctggtgacgaagctaatatcttgatgagctcttatgccatggttttcaccagagacccagagcaaatcgacgatgacgaaacagaagggtggaagatcttggagtttgtgcgcgggggttctagacaattcacctgattggtttcgatgtactcttttgttttcttttccttttccttcctattccgcttgtaaataactccgttatgtctcaccttcgatccccactttttcttttggaatactgcatcaaataggaagagagaaaaaaggaaatcatatcccaatatatttgaacatacgacacgatataccttatatagtatcatctgtactaatagtactataactaatacttcttga

SEQ ID NO: 1557 - DNA, 1926 bp, Saccharomyces cerevisiae
taaaaagatctaaagtagtaaagaaaaaagtataagcccacacctttttggtaggataatgtttactggtcaggagtatcattccgtagactctaattccaacaagcaaaaagacaacaataaacgtggtattgatgacacatcaaagatcttgaataataagataccgcactctgttagtgatacttctgccgccgccaccaccacttctactatgaacaattctgctttaagtagatccttagatcctactgacataaactatagcacaaatatggctggtgtggttgaccaaatacatgattatactacttccaatagaaattctttaaccccacaatattctattgcagctggaaacgtcaattcgcatgatcgggttgttaaacccagcgccaattcaaactatcagcaggctgcataccttcgacaacagcaacagcaggatcagcgacaacagtcaccctctatgaaaactgaagaggaatcccaactctacggtgatattctgatgaattctggtgtcgtacaggatatgcatcagaatctggccactcatacaaatctgagccaactgtcgtctacccgtaagtccgctccgaatgattctactacagccccgactaatgcgtccaacatcgccaatacggcttctgtgaacaagcagatgtatttcatgaacatgaatatgaataacaacccacatgccttgaacgatccatccatcctggaaacattgtcgccattttttcaaccttttggtgttgatgtagcacatttacctatgacgaatccaccaattttccaaagttctttgcctggatgcgatgagccaattagaagaagaagaatatcaatctctaacggtcaaataagccagctaggcgaagatattgaaactttggaaaacctgcacaacacacagccgcccccgatgcccaattttcacaattataatggtctgagccaaactaggaatgtatcaaacaagccggtcttcaaccaagcagtgccggttagtagtattccacaatacaatgcaaaaaaagttattaatcccacgaaggactccgcattgggtgatcagagcgttatttactcgaaaagtcagcagcgaaattttgtaaacgcgccatcaaagaatactccagcggagagtataagtgatttggaaggcatgacgacgtttgcgccaactactggaggtgaaaataggggcaaatctgcacttagggaatctcactctaatcctagcttcactccaaaatctcaaggatctcatttaaatttagcggcgaacacacagggaaatccaatccctggtactacggcatggaagagagcaagattgttagaaagaaatcgaattgcagcttcgaaatgtagacaaaggaaaaaggttgcgcagctgcagctccaaaaggaatttaacgaaattaaagacgagaatagaattttactgaaaaagttaaattactatgaaaaactaatctctaaattcaagaaattctccaaaattcatttacgtgaacatgaaaaactaaataaagactcagataataatgttaatggcactaatagtagcaacaaaaatgaaagcatgactgtggattcattaaagatcattgaagaacttttaatgatcgattcagacgttacagaagtggataaagatactggtaagatcatagccatcaagcacgagccatactctcaacgtttcggaagcgatactgacgatgacgatatagatctcaagcccgtagaaggtggtaaggatccagacaaccaatcattacccaattctgaaaagataaaataacaaagttttggtgagcacaacggtgtttcattcaagaatgataaggacaactatatatgtaatatacgtgtataaatactcgagctgcatcctttcttttctgc

SEQ ID NO: 1558 - DNA, 1563 bp, Saccharomyces cerevisiae
aactgaaaacaacagcagcagcattgtaccaagaatcccaagatgctcaggtgtgcggtcaagaagtttgcatattttgccaccttcctcactatcgtcgctaatatttacatctatacttatccatctttccatccagaacagtgttcatggaactgctctaacaagaacgcaccactacagaaagatttgacttttgtggacaaagtgaagaattacttcagtgatgttcgagagcaatggcatggtagccatgcctctgcaggtaacgatgaggatattcatattttggccttcggtgatcctcagattaaaggcatctggccaaagacgccatatgtgtcccgattagatacatacggtaatgactactatcttggtcacatctatgatatgatgcagcagagactgaagcctcaggtggtgactgttatgggtgatcttttctccagtcaatggatcggtgattccgaattccataatagaacgaaaaggtatattagcagaattttcaaaagagacccaacttctattgaaaatatcaaacaacagaacctcgatgagaaaggtcaatataaggcgaattggcctgaatggggagaccgttttaatgagattttagacaatgtcaaggaaaacgaggctgataatcaagaactttcttttgggtttggttatgaaaatatccactcatggaatccagacttggaagactttttaatcatcaacatcacaggtaatcatgatgtaggttactcaggcgacgcgacttatcaacatatgacaaggttccacgaccttttcggtaaggacaactattggattgaatacgaaaccaacactacccatccttggagaattgtagtgttgaatgatcttttactagaaggtcccgctttacaaccagaatttgttgaagctacttggatctttttaaaccaactaaatgaacgtaaattcaatggtagtactgttttgttgacgcatgttccattttacaagcgtgaagggttatgcgttgatggcccagacactaggtattatccagatgcccatgccccagaatcatataaatctgggcttttgagatcccaaaatcatttgagtgaatccgtttcaaatcaagttttgaatatgatatttgaaaatgggaagccaggtatcatattaactggtcatgaccatgagggctgtgaaacagtttataataaaaaatctacatctacttgggaagcgactaaaaatatcgaaagtgacgttttcgttaaagaaatcacagttaagtctatgatgggtgaatttaatgggaatactggtttggttacaggacacttcaacacagattcaatgacttgggagtggactttcagtttatgcccattcgctattcaacatgtttggtggttcgctaaagtgtccctgctcgtcaccatattcacttggtcctcgctactatttgtctaaacaaaaaagagtaaagaagataaaactcctgtatagagatttatattaaatgtatgtatatatatgcatatactgctcttcaaattgcttatgttttat

SEQ ID NO: 1559 - DNA, 501 bp, Saccharomyces cerevisiae
aacccaaaaatggacgctactcaaccgcaatacgaactatccgtagtaacacaatgcctaaagtctgccattgacgtcatccaatggttgattcctactattactaagttcagccaatcacacccgttagttttccaactattgtttattttcttcacattttatgtcttttacaagttgttgatgaacttcattactctggtcaaaagattcctgtatttgacgttggtagtaacatgtatcggtatttatatgcgtggttcgcagcagtttttgactgtggacctgttgaatttctacaatttcgtcatgtcaaatagatactacgcatttaaaatttatactctgtttattaatgccctggaaagagaaatcaacactgtttatcatttggcgcagatgaaaatggaacagttgcttaaatagagcgaaacgcctctgcttactcggaacatcttaaagtaattacatatcttaatttctaaatattcatatagataa

SEQ ID NO: 1560 - DNA, 1091 bp, Saccharomyces cerevisiae
taagcaacaaatcatagtcatcaatgtcgtttaatgccttcgccagctctttgagcaagaaattacaggaaatatccacaagtgtttccgaaaaaacccaggaattgcccagtttggcgcaatccacccaaagaatggtccaggaacgtttgggccaggtgacggacatctcccaattgccaagagagtacacagagctggaagataaggttgacaccatcaaactgatttacaaccacttcttgggtgtaactgctatctacgaaaacggatcgtacgattaccctaaatacatcaacgaatccgtcaacgagttttcaagaagcgtggcttccaagttgacagagttgactcatgctacatctgcgtctgaggcacaaaacatcttagttgctccaggccccatcaaagaacccaagacgttgaactacgccctcagtaaagtggctttgaactccagtgaatgtttgaacaagatgttccccaccgaggaacaacccttggcttcggcactcttgcaattcagtgatgtgcaggctaagattgctcaagctagaattcaacaagataccttgattcaaaccaaattcaataaaaatttgagggaaaggctctcttttgagatcggtaaggccgataagtgccgcaaggatgtccattccatgagattaagatatgacgtggcaagaactaacttggcaaacaacaagaagccagaaaaggaagcttccttgagagtccaaatggagactttggaagaccagtttgctcaagtcactgaagacgctactgtgtgcttgcaggaggttatttctcacgctaacttcagtgaagatttgaaggaattggccaaggctcaagctgagtattttgaaacctcggctggcctaatgaaagagttcctatccaactcatttgcggaagagccggaagcaaagcctgaggttgcagaagaagaaaagccacagacagctatctctatgaatgacgaagacgacgcttaatagccgccctgttcttgtctttctctctccttctctatatatatatatttacttaatacaatatcatattctctagtgtcgtacgaa

SEQ ID NO: 1561 - DNA, 2116 bp, Saccharomyces cerevisiae
atcgtaagagaagactgcagttaaagaagtttagagaagaggcttgagtatcggtaaaggggtgtgtgtttggtgatttataaaggagaagggcatgaggagagagaggcaaaggatgatgagtttcgaggacaaggacaaggacgaccttgacaatagtaatagtaataacagcagtgaaatgacagatacggcgatgatgccaccattaaagagattgcttattacgggcagtagcgatgatttggcacaaggatcatcgggtaagaagaagatgacgatggcgacgaggtcgccatcgtcatcacccgatttggcgacaaacgacagcggcactagggtacagccattgccagaatataacttcaccaagttctgctatcggcataacccggacattcagttctcaccaactcatacagcgtgctacaagcaggatttgaaacgaacgcaagagattaatgctaatatcgcgaagctacccctgcaggagcaatccgacatccaccacattatctcgaagtacagcaattccaatgacaagatacggaagctgattctggatgggatcctatcgacgagttgcttcccacagctttcctacatttcgtcactcgttacacacatgatcaagatcgacttcatcagcattctgccgcaggagctgtcgctgaagatcttgagttatctggattgccaatctctttgcaacgccacgagagtgtgccgcaagtggcagaagctcgcggatgacgacagggtatggtaccacatgtgcgagcagcacatagacaggaaatgtcccaactgtggctgggggctgcctcttttgcacatgaaacgtgcgcggatacaacagaatagtacaggatctagcagcaacgcagatatccagacgcaaactacgcgaccttggaaagtcatctacagagaacggttcaaagtggagtcaaactggagaaagggccactgcaggattcaggaattcaagggccacatggatggtgtgttaacgctccagtttaactacaggcttttgttcacaggctcgtacgactccaccataggtatatgggacttattcacggggaagctaatacgaaggctcagcggccattcggacggcgtcaagacattatattttgacgatagaaagctgattacgggctcgctcgacaagacgatccgtgtttggaactacataaccggtgaatgcatttccacgtatcgaggccactcggatagcgttctgagcgtagattcataccagaaggttatcgtttccggcagtgctgacaagacggtcaaggtatggcacgtggagtccaggacatgctacaccttgagaggccacacggaatgggttaattgcgtcaaattgcatccgaaaagcttttcatgttttagttgcagtgacgataccacaatccgaatgtgggatatcaggaccaattcatgcctaaaagtgttcaggggtcatgtagggcaggtgcaaaagatcataccgcttaccattaaggatgtagagaatctagccaccgacaacacttctgatggcagctctccgcaggatgacccaacaatgactgatggtgcagacgaatcagacacaccgtcgaacgagcaagaaactgtcttagatgaaaacataccttatccaacacatctactatcttgcggactggataacacaatcaaactatgggacgtcaaaaccggtaaatgcataagaacacagtttgggcacgtggaaggtgtttgggacatcgccgctgacaacttcagaattataagtggttctcacgacggaagcattaaggtctgggacttgcaaagcgggaagtgtatgcacacgttcaacggtcgaagactacaaagagaaactcagcacacacaaacacaatccttgggtgataaagtcgcccctatcgcttgtgtttgtattggagattcagaatgctttagtggtgatgaatttgggtgcgtaaaaatgtacaaattcgatctcaatgattaggacctgtgtgtggtcttttcttggtcaaaaacatccgtagtacctcgaatatatatgcttacatatataatgaaaaatacataatagcattttacattt

SEQ ID NO: 1562 - DNA, 3912 bp, Saccharomyces cerevisiae
acctatcactgccaaacaaaaggttagacatcttgggaatttcggacacattcgttacttaaaacgaggaccaaaattactcaatacctattttttatttaatattttaggcattgtttcacctgaatttgctgctattagaagcctgatctacgcaataaaagatttcatctggatttttgaagcttatacagtactcaacaatcagcttattaacagcaatataccgttaagcaattgagaaaaagtaacaatcagagcacttgtgtggcataacgttaatctgaaaaagaaaggggtatcagtgtgcacggaaaacttcagagacaaatgcctaaccctccttcatttaagtcacataagcagaatttattcaactccaacaataatcaacacgcaaacagtgtagattcttttgacttacatctcgacgattcatttgacgctgctttagacagtttacaaattaataataacccagaaccacttagtaagcataacactgttggagatagggaaagttttgaaatgagaacagtagatgatttagacaatttttctaaccattcttcggattcgcatcgtaagtcttcaaacacagatacccatcctttgatgtatgataatcgcctctcgcaggatgataatttcaaatttactaatattgcttcgtcaccaccgtcgtcttcaaacaatattttttcaaaagccctctcatatttaaaagtatctaacacaaaaaactggtccaagtttggttcacccatagaactcagtgatcaacacatcgaaagagaaatacatccagacacgactcctgtgtacgataggaatagatacgtttcgaatgaactatctaatgccaaatataatgccgttacttttgtgccaaccctattatatgaacagttcaaattcttttacaatttatactttttagtagttgcattatcgcaggccgttcctgcactaagaatagggtatttatcatcgtatattgtacctttagcatttgtgctgacagtaaccatggcaaaggaagctatagatgatattcagagaaggagacgtgatagagagtcaaacaatgaactgtatcatgtaataacgagaaatcgttccataccaagcaaagacttaaaagttggagatctcataaaagtccataaaggtgatcgtattcccgctgatttggttcttttacaatcaagtgaaccatcaggcgagtcatttatcaaaactgaccaactagatggggagactgactggaaactacgtgttgcctgtcccttgacccaaaatctatctgaaaatgacttaattaacagaattagtataacagcctctgctcctgagaaatctattcataaatttttaggtaaagttacctataaggattccacttcaaaccctttgtctgtagataatactctatgggcgaatactgttctagcttccagtggattttgtattgcttgtgtcgtctacactggcagagatactaggcaagctatgaatacaactacagctaaggttaaaactggcttattagagctagaaattaacagtatttccaagattctttgtgcatgtgtttttgccctgtcaattcttttagttgcatttgccggtttccacaatgacgactggtacattgacattttgaggtatctgatattgttttctaccatcatccctgtctctttaagagttaatttagatttagccaaaagtgtttatgcacatcagatcgaacacgataaaaccattcctgaaacaattgttagaacgagtacaattccagaggatttaggccgtattgaataccttctaagcgacaaaacagggacgcttactcagaatgatatgcaattgaagaaaatacacttgggtactgtatcatacacgtcggaaacattagacattgtatccgactatgtacaatctctggtgagctctaaaaatgactctttgaacaattctaaagttgccttatcaacaacaagaaaggatatgtcttttcgtgtacgtgatatgattttaactctagcaatttgccataacgttactcccacttttgaggatgacgaacttacatatcaagcggcatcacctgatgaaattgctattgttaaatttaccgagtcggttggcttatctcttttcaaaagagatcgccattcaatttctttattacacgaacattctggtaagactttaaattacgaaattttacaagtattcccatttaattctgattctaagcgtatgggtatcattgttcgtgatgagcaattggatgaatattggtttatgcaaaaaggggccgatactgtcatgtcaaaaattgtggaaagcaatgattggctagaggaagaaacaggtaatatggctcgtgaaggtctacgtactttggttatcggtcgtaaaaaattaaacaagaaaatttacgagcaatttcaaaaagaatacaacgatgcctctttgtcaatgctaaatcgtgatcaacagatgagtcaagttatcaccaagtatttagagcatgatcttgaattattgggtctaactggtgtagaagataagttacagaaggatgtgaagtcctctatcgagttattaagaaacgcaggtatcaagatttggatgctgacaggtgataaagttgaaactgctcgttgtgtttccataagtgcaaaattaatatctcgtggccaatatgttcatacgataacaaaagtcacaagaccggaaggtgcattcaatcagctggagtatctaaaaatcaatagaaatgcttgtcttttaatagatggtgaatccctgggaatgtttttgaaacattacgaacaggaattttttgatgtcgtggttcatttacccactgttattgcttgccgttgtacacctcaacagaaggcagacgttgctttggtaattcgtaaaatgacgggcaaaagggtatgctgtattggtgatggaggtaacgatgttagtatgattcaatgtgcagatgttggcgtagggattgtgggtaaagaaggtaaacaagcttctttagctgctgatttttctataacgcaattttgtcacctcaccgaattactattatggcatggtaggaactcttacaaaagatctgctaaattggctcaatttgtcatgcatagaggtttaatcattgcaatttgccaagcggtatattccatctgttcgttgttcgaacctattgctctttatcaaggttggttaatggtcggttatgctacctgctatacaatggctccagtcttttcattaactcttgatcacgatatcgaagagtcattgactaaaatatacccagaattgtacaaagaattgactgaaggtaagagcttatcatataagacgttctttgtttgggttctattatcgctattccaaggttctgtaattcaattattttctcaggcctttacgagtttattagatactgatttcacaaggatggttgctatcagcttcactgctttggttgtaaatgaattaataatggttgccttagaaatctacacatggaataaaacaatgctcgtcactgaaattgctactttactattttacattgtatcggttccatttcttggcgattattttgatttaggttatatgactaccgtaaattactatgctggacttttagttatattactcatctcgatctttcctgtctggacggcaaaggcaatttatagaaggctacatcctccaagttatgcaaaagtgcaagagtttgccactccataattcaattggtttggatttttcttgttgcttcaacggattatcttaaaaaaatctatcatatttcaaaatataaattcttatttttacaaagaagatatagattatgcataatattattttgttaca

SEQ ID NO: 1563 - DNA, 838 bp, Saccharomyces cerevisiae
gtccaatgtactttgatgaagaacaattgctaaaatatactatatatgcctatagattatccttttttgtaggcatttgctcacttttcatagcaaaaagttgtctaccagaatttcttcaatatggtaaaacctaccggcccaaagagaattcaaagtactcaagcattttagaacgaatcaagaagttcacagttccaaaggcgtatttttcccatttttactatttggctacctttctatccttagtcaccttatatttctatcctaaattccccatcgtttggatcatatttggacactcattgcgccgactttatgaaacgctttatgtactacattatacaagcaattctaggatgaattggtcccattatctagtcggtatatggttctattccgtactcttgttaattcttaatatatcactgtacaagaactccattccaaatacgttaaacatgaatgctttcatcatattctgcatagcatcttgggatcagtacaaaaatcatgttattctggccaatctggttaaatattcgctgccaacaggaaggcttttcaggttggtatgctgtcctcattatctcgatgaaataatcatttattctactctgttgccctatgaacaagaattttacctaacactagtttgggtaatcacaagtttgactatatccgcattggaaacaaaaaattattacaggcacaaatttaaagacaatcacgtagccccctacgccataataccttttataatctagtaatgtgcacactagggcattcatatacatatatatatagacgcggtaaagaaccactttactttcactat

SEQ ID NO: 1564 - DNA, 931 bp, Saccharomyces cerevisiae
aatatacaaaccatcgcaatgcctttgaccacaaaacctttatctttgaaaatcaacgccgctctattcgatgttgacggtaccatcatcatctctcaaccagccattgctgctttctggagagatttcggtaaagacaagccttacttcgatgccgaacacgttattcacatctctcacggttggagaacttacgatgccattgccaagttcgctccagactttgctgatgaagaatacgttaacaagctagaaggtgaaatcccagaaaagtacggtgaacactccatcgaagttccaggtgctgtcaagttgtgtaatgctttgaacgccttgccaaaggaaaaatgggctgtcgccacctctggtacccgtgacatggccaagaaatggttcgacattttgaagatcaagagaccagaatacttcatcaccgccaatgatgtcaagcaaggtaagcctcacccagaaccatacttaaagggtagaaacggtttgggtttcccaattaatgaacaagacccatccaaatctaaggttgttgtctttgaagacgcaccagctggtattgctgctggtaaggctgctggctgtaaaatcgttggtattgctaccactttcgatttggacttcttgaaggaaaagggttgtgacatcattgtcaagaaccacgaatctatcagagtcggtgaatacaacgctgaaaccgatgaagtcgaattgatctttgatgactacttatacgctaaggatgacttgttgaaatggtaattttcttttatttttttgataaaactactacgctaaaaataaaataaaaatgtatgatttccctccatttccgaccaattgtataattttatatctgcatgacttaataatataatataatacttataaaatacgaatagaaaaatttaaaccgatgtaa

SEQ ID NO: 1565 - DNA, 855 bp, Saccharomyces cerevisiae
catgaaaagaagtgaaaaaaaatcgatgagctcagctcttaagaacggtattatggaacgaactcaacccgaaaaggtagtacagatgcagggcacggcagatttgagcacttcgaaacttggtacgaaaaaatactgggatgaactgtatgccctggagctggagaatttcaggcggaatccgcaggataccggggactgttggtttagcgatagcgatgctgaacaaaagatgattgattttctggtagataacattggtgcgtacagaatttctgagaatgcttctgttgtagacctcggtacaggtaatggacacatgttatttgaactgcatcaaacggaattccaagggaaactggtcgggatagactattctgaggaaagcgtcaaactcgctagtaatatagccgaggccaccggtgttgacaatttcatcagtttccagcaagcagacatctttagtggtgactggaagccgggaaagtatgacattgtgttggataaagggaccctagatgccatttcattgagtggcatgaagatcaacggtaaacttgatgtagtcgatgtatacgccggagtagtggaaaggattttgaaaaaagacggtattttcttgatcacttcttgtaatttcacacaagatgaactagtaaagatcatagagactgataatttgaaaatgtggaaaacaataaaataccctgttttccaatttggcggggtccagggtgcgaccatatgtagtgtagcatttgttaaacaaaactgatttgtttttatctttgatttatttttaacgttatttctctttacttatttaggaacggatttaactataatgttatacaa

SEQ ID NO: 1566 - DNA, 1067 bp, Saccharomyces cerevisiae
gacaaaaaatcatggattactttaatatcaagcagaattactacacggggaacttcgtgcaatgtttgcaggaaatagagaagtttagcaaggtcacagataacaccttattattctacaaggcgaaaacccttttagctctaggccaatatcaatcacaagatcctacctctaagcttggcaaggtactagacttgtacgtccagttcttagatacaaaaaacattgaagaattagaaaatttgttaaaggataaacagaattcaccatatgaattatatctgttagccacggctcaagctatcttgggtgacttagataaaagtttggagacatgtgtagaagggattgacaatgacgaagcagaagggactacagaattattgctgcttgccatcgaagtcgctttgttaaacaacaacgtttcgaccgcgtccaccatctttgataactacactaatgctattgaggatactgtttccggtgacaacgaaatgattttaaacctggctgaatcgtacattaaatttgccacaaacaaagaaacggcaacatccaacttttactactatgaagagctatctcaaacctttcctacttggaaaactcaattgggattgctcaatttgcatttacagcaaagaaacatagctgaagctcagggtattgtcgagctattactatctgactactatagcgtcgaacaaaaagaaaacgccgtattgtacaaacctactttcttagcaaaccaaattacgcttgctcttatgcaaggtcttgatactgaagatttaacaaatcaattggttaaattggatcacgaacatgcattcatcaagcatcaccaagaaattgacgcaaaattcgatgaattagtgaggaaatatgatacgtccaactgatttacgtaatatctcacattaaacatgtaggttttttagaaaaagaaaaaaatatttcatgtatatgcctatatactattttgataaagccgaataagatggtaccataaatgaggttgacatggcttgaacaaaatcatataaagtataattaacaaagcggaa

SEQ ID NO: 1567 - DNA, 2318 bp, Saccharomyces cerevisiae
aaaattaacagctaacagagcaagaaaataaaacggagatgagtgctagtgaagcaggtgtcactgagcaagtcaaaaagctgtctgtcaaggatagtagtaatgatgccgtaaaaccaaataagaaagaaaacaaaaaatccaagcaacagtccttgtacttggatcctgaaccaactttcatcgaggaaagaattgaaatgtttgacagattacaaaaggaatacaatgataaagttgcttctatgccacgtgttccattgaagattgtcttgaaggatggagccgttaaggaagccacttcttgggaaaccactccgatggatattgccaaaggaatttctaaatctttagcagacaggttatgtatttctaaggttaatggtcaattatgggacttagatagaccatttgaaggcgaagccaacgaagaaatcaaattagaactgctagatttcgaatctgacgaaggtaagaaggtcttttggcattcgtctgcccacgtcttgggtgaatcttgtgagtgccacctaggtgcccatatttgtttaggtcctccaactgatgatgggttcttttatgaaatggctgttagagatagtatgaaagatatatctgaatctccagaaagaaccgtctcccaagctgatttcccaggattggaaggcgttgccaagaatgttatcaagcaaaagcaaaaatttgaaagattggtcatgtccaaagaagatcttttgaaaatgtttcattattcgaagtataagacttacttggtacagacaaaggttccagatggaggtgctactaccgtctaccgttgcggtaaattgattgatctatgtgtcggccctcatatcccacatactgggcgtatcaaagctttcaaactattaaagaactcttcttgttatttcttaggtgatgcgacaaacgactctttacaaagagtttacggtatctcttttccagacaaaaaattaatggatgctcatttgaagttcttggcggaagcctctatgagagatcacagaaagattggtaaagaacaagaattattcttattcaatgaaatgtccccaggttcttgcttttggttacctcatggtactagaatttacaacactttggttgacttgttgagaaccgaataccgtaagagaggttacgaagaagtcatcactccaaacatgtacaactccaaattgtgggaaacctcaggtcactgggccaattacaaggaaaacatgtttactttcgaagtagagaaggaaactttcggtctaaaaccaatgaactgtccaggtcattgtttgatgttcaagtctagagaacgttcttatagagaattgccatggagagttgcagacttcggtgttatccacagaaatgaattttctggtgccttgtctggtttgactcgtgtcagaagattccaacaagatgatgctcatatcttctgtacccatgaccaaattgagtctgaaattgaaaatattttcaactttttgcaatacatttacggcgtttttggatttgaatttaagatggaattgtccactagaccagaaaagtacgttggaaagatcgaaacctgggatgccgctgaatcaaaattagaatctgccttaaagaaatggggtggtaactgggagatcaatgctggtgatggtgctttctacggtccaaagattgacattatgatttctgacgctttaagaagatggcatcaatgtgccaccatccaattagatttccaattgccaaacaggttcgaattggaatttaaatctaaagatcaagatagcgagagttacgaaagaccggtcatgatccatcgtgccattttagggtctgttgaaagaatgactgccattttgaccgagcattttgctggtaaatggccattttggttatcaccacgtcaagttttggttgtgccagttggtgtcaagtaccaagggtatgctgaagacgtccgtaacaaattgcacgatgctggcttctatgccgatgtcgatttgaccggtaacactctgcaaaagaaggtcagaaacgggcaaatgctaaaatataacttcatttttattgttggtgaacaagaaatgaatgaaaaatctgttaacattagaaacagagacgttatggaacaacagggtaaaaatgctactgtttctgttgaagaagttttgaaacagttgcgtaacttgaaagatgaaaagagaggtgacaacgtcttagcttaatgagattttatgtagttaaattttgacttatttaatttatgttttgtaaagaataaaatgagtatgatgaaggaa

SEQ ID NO: 1568 - DNA, 1916 bp, Saccharomyces cerevisiae
gtggatcttatagtattcgtgaagcttctttttccgttttgctcccctcagcccatcgcgtaattgcttagatctattagagaggtgctgtttgtggccgatcacgctaaagattaggcaacgatgaccagtttgtccaaaagcttcatgcagagtggacgaatctgcgcagcatgtttctatctgttattcacactactttcaattccaatctcgtttaaagttggtggtttggaatgcgggctttccttcacggtgacactgttcactttatatttcataactacgactcttaacgtgttggcaagacgacatggaggaagactatacattttttttaccaactgtctgtattactcacaacattttatcattgcatctttgctatacctgtttttgtctggattttctaatgatgagttgggaaacgttctgaaaaataaatataatgagtcggagtcgttcctggaagctttgaaaaatagcttgaattccaatcaaattaactacgtcttatattattactactatcgatttgttgtacaaccgtggcaattcgtgcttaccaagtccacacctttttttactctatcggaaggttttttcactattttagccattcaggccgtcggggaaactaatagatggttatcaaatgacttgaattcaaacacgtggattatttcctcattgttaacctccggaggtgtgattaccgcatcgctgtactatttgtatcggatttatgtcacccccatatggccgttatccatccaaacggcgtccttattaggacttgttttgtctatggtatgtggactggggttgtatggtattgtgagtcaaaaaggatccgtcatagagagctctttattttttgcgtatattgttcgttgtatttatgaaatttcccccaaattagctactaccgcgactgatgaaattttaaatttgttcaaagacgtctggcagaaacatcaaagaaatctgcccacagctgacaatcttttgtgctactttcataatgtcatattgaaaaatgcagaggtgttatgggggtcctttattcctagaggaagaaagaaaaccggtgattttcatgataaactcattagcattctatcattcgaaaaagtatccttgatatctaaaccattttggaaatttttcaagaatttcacctttagtgttccgctatccattaatgaattttgtcaagttacaattaagatggcaagcgaatcagtttccccagctatagtaatcaatttatgctttagagttctgatgttttactcggcaacgaggattattccagcattacaaagaaaaaatgacaaacagttgcgcaagagtcgcaggatcatgaagggattgtattggtacagtccttgcatattaattgctatgtatactcacctgattttacaatattcaggtgagctaaagaaagacctgtgcatatggggttgcagtgaaaagtggtttggcgtagatcaaccagaaattatagtagattcatggggattttggaactggtgcaacattttctgtactattttggtatacgctacagaattaataggttctggtagttgaagctgatgcattgtcaaaagagccgcattaccagctttgccaaatacgcgaagacaaaaaggaaggtgaaataccaactgacttataactaagtgatagatgatatctgttttaagtgccattcctgaaccatttttacatttggttagtttctttttttgttattatttgcattagtcccttgcacgttcatagtgaaaatcccttacgctcaccactattttctaataaatacaatgaacattttaactcatactctaatatgtagacacataaatatataaatatataacatttccctgaaatactacttttat

SEQ ID NO: 1569 - DNA, 1379 bp, Saccharomyces cerevisiae
gatagcttgaagcatttctttttcgtaatgagtggctctacagaatctaaaaaacaaccaagaagaagatttattgggagaaaatctggcaacagtaataatgacaaattaactacagtggctgaaaatggcaacgaaataatccacaagcaaaagagtagaatcgccctaggtaggagtgttaatcatgtgccagaagatatattgaatgacaaagagttgaatgaagccatcaaattattgccctctaactacaactttgaaatccacaaaactgtgtggaatatcaggaaatataatgctaaaagaatagccctacagatgcctgaaggtttgctgatttactcattgattataagtgacattttggaacagttctgtggtgttgaaactctagtaatgggggatgtgtcttatggtgcatgctgtattgatgattttactgctagggcattggattgcgattttattgtgcattacgctcattcgtgtttagttcctattgacgttacaaagattaaagtactatatgtctttgttactataaatattcaagaagatcatattatcaaaacgctgcagaagaattttcctaagggatctagaatcgctacatttggtaccattcagtttaatcctgcggtacacagcgtcagagataaactgcttaacgatgaagaacacatgctgtatattattccaccacaaatcaagcctctatcgaggggtgaagtattggggtgtacttctgaaagattagataaagaacaatacgatgccatggtattcatcggtgatggtagatttcatttggagtctgcaatgatacataatccggaaattcctgcattcaagtatgacccatacaacagaaagttcactagagaaggatacgatcaaaagcaactcgtggaagttagagcagaggccattgaagtcgctcggaagggtaaagtttttggtctgatcttaggtgcattaggtagacaaggtaatttaaacactgtaaaaaacttggaaaaaaacctgatcgcagcaggtaaaaccgtggtgaaaattattctaagtgaagtttttccccaaaagctcgcaatgttcgatcaaattgatgtttttgttcaggtcgcatgtcctagactgtccatcgattggggttatgccttcaataaaccactattaacaccatatgaggctagtgtcttactaaagaaagatgtcatgttcagcgaaaaatattatccaatggattattacgaagctaaaggatacgggcgtggggaaactccgaaacatgcgattgaatagtttaaatagtttttgttgtcacttgtcttcctgttacatatgtataaatagttagtatcatattcttcggagca

SEQ ID NO: 1570 - DNA, 1131 bp, Saccharomyces cerevisiae
tttgagctgtatagatatttttttagtttattcgagagaaaaccggtttttttgttagtatcttcaacaaaattttcctaattcaataaggacttcaatttccatgtcttttctacaaaattttcatataagtcccggccaaacaataagatctactagaggtttcaagtggaatactgccaatgcagctaataatgcaggctctgtatcgcctactaaggcaactccccataacaatactattaacggcaataataataatgccaatactattaacaatagagcagattttacaaacaatccagtaaacggatataatgaaagcgaccatggaaggatgtctcccgtcctcactacgccaaagaggcacgcccctccgcctgaacaattacaaaatgtaacggactttaactatacaccatcgcatcagaagccgtttctacaaccgcaagcaggtacgacagttacaacacatcaagacatcaagcaaattgtggagatgacactggggtctgagggagtccttaaccaagctgtgaagttaccgcgtggtgaggatgagaatgaatggctagcggttcattgcgtggatttttacaatcagattaatatgttatacgggtccatcacagaattttgctccccacaaacatgcccgaggatgatagcgacgaacgaatatgaatatctttgggcatttcaaaagggtcagccccccgtttcggtaagtgcccctaagtatgtggaatgtttgatgaggtggtgtcaagaccaatttgatgacgaatctctttttccttccaaagtcaccggtaccttcccggagggattcatccaacgagtaattcaaccaattctaaggcgattattcagagtttatgcgcatatttactgtcatcattttaatgaaattcttgaactaaatttacaaaccgtactaaacacaagttttagacatttttgtctttttgcacaagagttcgaactactaagaccggctgattttggtccgctgttagaattagtgatggagttgagggataggtagtattgtatatttatataagtctgcttgtaggttgtattcttccatgcatgggacacaaaaacaaaaatacggaaacatattaa

SEQ ID NO: 1571 - DNA, 2313 bp, Saccharomyces cerevisiae
ggaaatttaaaaggagttcttctttcttcttattattagatcgtatacagtaaaaaaaaaaaaaggaagtagtagttcgaagagaaagaaataaatggtaggctcgaaggatattgatctattcaacctgagagagaacgagcaaatcgtttctccttgtcttatcgtgcacggaaaatgcaataagcaaaatggtgcgaagaccgttcaagtgcagcatccacaattgcctccaattacttaccccatacataatcagttcttcaaggccactgtgatattgactcctggtgagaacaagttgacctttgttacagacactaacaccgctaggacaatcgtatgttactacacaccactgacgcagaaccctcccgtacacctgtgtctgatcttggccaaggattcgcctttacagtttgactctcctcgagaacagaaggacagagagggcgggaatggcctcgaattggcaatcaagaagctaagacttggggccagactcatgcaagcgtacacgaacgagcaaatgctgagaaacagtatgggaaataggacgtttccctttgttgaagaatttacctgggacacgctgttcgaacggcctgctatgagaaacaccatcaaaatacatgtagttcgttcggaaaagacggtgaaggaaatccaggaccctgacatagctcaacagaattccaaagggaaaaacaccggcgccctttttgggatagccatggacgcccttaaaagttacggcggacccttcaccaataacgaaaagcctgttcaggcagcttgtatgtttctagacacccactgggatggtaagttgattagaggccacgccgcattgggtgggggtgacgacagcattaagctcgccatttttgggtcgcacgggctttactcatggcctacttgtctcgagcaattggtgccttattttactgatgagacaagatcctccaccagtgaagtcgccaacgactgtaatgagtgtggtacttactgggaatgtttgactatcacgttgggagcatttatgcatgagattggtcacttactgggttgtcctcatcaggaaagcggtgttatgctaagaggctataccactttgaataggtctttcttgactaaagaggcttattctgtaagaactaattcaactggtgctagtcctcccatcttccccaaggaagaatgtacctggaaccgtctcgatacggtaagatttttgtaccacccctctttcactttaccacaggattattacgatccatcgttcatgagacctacaaaattgggcggataccccaatataaaacactctgtatatcctttgggtaacggcagttgccgcatattatcgcccacaggaatctatttgattgaaattatatgtgatgatttggccaggggccatattgaatacttgccggtttccctaggtggacaggggcctcaacgggaagttatagtaacattagatgatttacgtgccaggttgcccaagaatgaactcgccaagtttggcaataccttcaaattgaaaattctttctgttaatgcaccggaaaccgagttcgacaagttcccatctttgttagatgttcagccattagacatgtcgaaatatgggttttctaaaaatgttcaaggtatcaaatcaccactttatggtcgcagcgacggtggtaatgctgtcggcgtcgtcgcttttgatgttagattagtcactgctgtgagaatataccatggctatgcattagatggtgtgaggttttattacaaggaaaaaccaactggaacaaaggatgctcccgcatccaagccctctgtaccaccaagaaattatttctcaaaaattacacatagtatcaaaaatcatgcttcaataaacgaagaaaatctaaaaagtgtactctttggacatgaaacacaaaattttacggatgctacactagaaccgggtgaaataatcattgggtttaatctgaggtgcggagcttgggttgatgctatccaaattataacgagtcatgggagaatgaccgacatgtttggtaacaaagacggaggtgggttcgctgaattgcagccacctaatggccaatatatcctaggtgtgactggcagagtcggtcaatgggtcgacgccttcggaattatttacggagctttatagtaattagtcaaggttttttttttcttatttttttctatttcataacttagtcatatcaaaatatatctattaaattattttccatatatacgtagatattcttcatttgcataattctttgggaaaaa

SEQ ID NO: 1572 - DNA, 1739 bp, Saccharomyces cerevisiae
aaaaggacaatcagaaccgaagtgttgtgtagctaaaatatgtcattttccttcggctttacttccaatgactttgatgatgatgagcttgttgctcaacctgaaacattcgttgaaagcagcaaagaaaacgaaaataccactgcttacatcaatccattagattcggatttcttgtcgcaagctggagttgtgcagccaaatgtggaagacctaggaacaatattggaaagtcttaaggatgttagattgacatttgaagagttccaatctccgatatatagaaaaccattgatcaagagggaactattcgatgtcaaacatcagctaatgttagagacagatgcccaatccaacaacaactccacggaactggacattttactaggtgatacttctgaagatttgagaaagaacatctatgaaggtgggttgaaatcatgggagtgctcttatgatttagttgatttgttgtcagagaacgttgatagaataagcaacgatatcgacgcggttgtcgaaataggctgtggtacggcactaccctcagagtttcttttcagatctgctcttctacggaatgatagaagtaaaggtttaaagtttgttttgactgactataatgccagtgtattaagattagttaccataccgaatttggttataacatgggctaaaacggttttgacaaaggaacaatggtacgccttacagaaagacgaatgtgaagatattccaataaataatgaggaactgcttcttacctcaaagctgttagctgccttttacgacgatgtacaaagcaggaatatcagcgtcactcttatatcaggatcgtggggacgtaaatttagtaatttgatccatgaagtactctcaggtagccaaaaagtcctttcattatcctcagaaacaatttatcaacctgacaatttgcccgttatagcggaaacaatacttgacatacacaatttaccacaaaccgatgtcaaaacttacgtagccgcaaaggatatttattttggagtcggtggtagcatcactgaatttgaagcttatttggacgacaaaataaactccgaacatctaccaattcattctgaaaggtttaaagttaactctggcttaaaaaggtcgattatatgcattgaaacaaataaagctatccgatagttagtataatttgtttcaacttcatttccttaagttaatccataagtcttttactgtatcttttatttataacatggatgaaaatagaaaagaaatatagaagtaaaaattaaagtaactgttcaatatacataatataattggaaagcaaaaatgcaaccaacaaaaatatacagtttctttttatcattgattcccttttagccttatttgctaattctggctttcatgatttgtaagaattctctgtaactttcgttattcaaaatcttatcctccactaaggtgctagaagcccatagtcttagcgttgcaacttccctagcagatgcatggttaacgggctcgctcaaagaggcacccctaacaatatacaatgattggtaagtgatgacatcatcatggtttctcaattggttgataatgtttcttactctttgattgaattcagaattttcaacaacaggtatttcctgtttgccaattggaatgtcaaagatatcctgtgttccaaacacatcgaatactagcgctggtacagcgtcaccacccatccacaaaaacaa

SEQ ID NO: 1573 - DNA, 512 bp, Saccharomyces cerevisiae
acgccacatattcattgtaaagatgttgcgtacttctcttactaaaggggcacggctaactgggacaagatttgttcaaacaaaggccctttcgaaggcaacattgacagatctgcccgaaagatgggaaaatatgccaaacttagaacagaaagagattgcagataatttgacagaacgtcaaaagcttccatggaaaactctcaataacgaggaaatcaaagcagcttggtacatatcctacggcgagtggggacctagaagacctgtacacggaaaaggcgatgttgcatttataactaaaggagtatttttagggttaggaatctcatttgggctctttggtttagtgagactattagccaatcctgaaactccaaagactatgaacagggaatggcagttgaaatcagacgagtatctgaagtcaaaaaatgccaatccttggggaggttattctcaagttcaatctaaataagtagacgaggaaaataaaattgtttcgtatattc

SEQ ID NO: 1574 - DNA, 1274 bp, Saccharomyces cerevisiae
cgtatatattaaaattacactatggtttttgatttgaaaagaattgttagaccaaaaatttataacttggaaccttatcgctgtgcaagagatgatttcaccgagggtatattgctagacgccaatgaaaatgcccatggacctactccagttgaattgagcaagaccaatttacatcgttacccggatcctcaccaattggaattcaagaccgcaatgacgaaatacaggaacaaaacaagcagttatgccaatgacccagaggtaaaacctttaactgctgacaatctgtgcctaggtgtgggatctgatgagagtattgatgctattattagagcatgctgtgttcccgggaaagaaaagattctggttcttccaccaacatattctatgtactctgtttgtgcaaacattaatgatatagaagtcgtccaatgtcctttaactgtttccgacggttcttttcaaatggataccgaagctgtattaaccattttgaaaaacgactcgctaattaagttgatgttcgttacttcaccaggtaatccaaccggagccaaaattaagaccagtttaatcgaaaaggtcttacagaattgggacaatgggttagtcgttgttgatgaagcttacgtagatttttgtggtggctctacagctccactagtcaccaagtatcctaacttggttactttgcaaactctatccaagtcattcggtttagccgggattaggttgggtatgacatatgcaacagcagagttggccagaattttaaatgcaatgaaggcgccttataatatttcctccctagcctctgaatatgcactaaaagctgttcaagacagtaatctaaagaagatggaagccacttcgaaaataatcaatgaagagaaaatgcgcctcttaaaggaattaactgctttggattacgttgatgaccaatatgttggtggattagatgctaattttcttttaatacggatcaacgggggtgacaatgtcttggcaaagaagttatattaccaattggctactcaatctggggttgtcgtcagatttagaggtaacgaattaggctgttccggatgtttgagaattaccgttggaacccatgaggagaacacacatttgataaagtacttcaaggagacgttatataagctggccaatgaataaatagattaatttaaacagtatatgtacagttttatatatatatatatatatatatacatatataaagaaacctgtgcgttttttgtattttcaaa

SEQ ID NO: 1575 - DNA, 958 bp, Saccharomyces cerevisiae
cgtttttttatcgttctcatctctagctctggtcagcattttttactttataacaacaagtttttcattaaaatccatagtagcacaaggtaaagggaaacaaacatgtcatttctatgtgggtcagcttcaacgtcaaataaaccgatcgaaagaaagatcgttattttgggcgacggtgcctgtggtaaaacttcgttgctgaatgttttcaccagaggttattttcccgaagtttatgagcctactgtttttgaaaactatatccatgatattttcgttgacagtaaacatatcacgctatcgttgtgggatactgcgggccaagaggaatttgacaggttacgatccttgtcttattcagatacgcaatgtataatgttatgtttcagtattgattcacgcgattctttagaaaatgtccaaaataaatgggtgggtgaaatcactgatcattgtgaaggcgtcaagttagtcttagttgcactaaagtgtgacttaagaaacaatgaaaatgaatctaacgcaatcacaccgaacaatatccaacaggataacagcgtttctaacgacaacggaaataacataaatagcacctcaaacggcaaaaacctgataagttatgaagaaggtctagctatggctaaaaagatcggtgcgctacgttatttggaatgtagcgctaagctgaataaaggtgtcaacgaagctttcacagaagccgcaagagttgctttaaccgcgggcccagtagcaaccgaagtgaaaagtgacagtggatccagctgtaccattatgtaatataataagacacggacgcacacacaaaagaatagaacccaaaaagagagactaaacaaataatataataagttatagaagttaataatactcctactattttatattttttatgtaattactaccactgcttaaaaaaaatattgcaaaatatcat

SEQ ID NO: 1576 - DNA, 1833 bp, Saccharomyces cerevisiae
ggtcattttagtagaaactctgctctcaaacttgagtactgcaacgatggcaggagcaacatcaagtataattcgggaaaatgattttgaggacgagcttgcggagagtatgcagtcatataatagagaaactgcagacaaattggctttgactaggaccgagagtgtaaagccagaaccggagataaccgctccgcctcactcacgcttttcccgttctttcaagacagttttaatagctcagtgcgctttcactgggtttttctccacaatagcaggtgccatctactatccagttctgagcgttatagaaagaaaattcgatattgacgaggaattggtgaatgtcactgttgtagtatattttgtatttcagggtcttgcccccacattcatgggcgggtttgccgattcactgggcaggagaccggtggtgcttgtcgcaatcgtcatttattttggtgcctgcatcggtcttgcttgtgctcaaacgtatgctcagatcattgtgctaagatgtctacaagccgccggtatttcacccgtgattgcgattaacagcggaataatgggagatgttactactagagccgagcgcggcgggtacgttggatatgttgctggatttcaagttctaggttctgcgttcggagcccttatcggtgccggattatcatctagatggggatggagagccatcttttggttcttagcaattggatctggcatttgcttcctagcctcgtttttaattttgccagaaacaaagaggaacatatccgggaatggttctgtcaccccaaaatcatacttaaatagagctcccattcttgttttgccaacagtaagaaaatcattgcatttggataatccagattacgaaacattggaactgcccacgcaactaaatctactggcgcccttcaagattttgaaagcttatgaaatttgtatacttatgctagtcgctggattacaatttgccatgtatactacgcaccttacggcgttatccacagctttgagtaaacaatatcacttgactgttgcaaaggtaggattatgctaccttccctccggtatctgcacattatgtagtattgtcattgctggaagatatttgaattggaattacaggcgcagattaaaatattaccaaaattggttgggcaagaagagatcaaagcttttagaagaacacgacaacgaccttaatttggtgcaacgtatcatagaaaatgatcccaaatacacctttaatatcttcaaggcgaggttgcaacccgcatttgttaccttgcttttaagcagtagcggattttgtgcgtacggatggtgcattactgtcaaagcccctttagcggccgttctttgcatgagtggatttgcgtcgctgttttccaattgcattttgactttttcaacaactctaatagttgatctttttcccacgaagacatctacggctacgggatgtttaaaccttttcagatgcattctatctgctgtgtttatagctgcattgagtaaaatggtagaaaaaatgaaattcggaggtgtttttacatttttgggggctttaacctcctcgtcatcgatcctcttatttattctcttgagaaaaggtaaagaattagcctttaagaggaaaaagcaagaactgggagtaaattaagaagtaaagcttcttgaatcaaaggaaaatgttccttttgatcgctccactaccgagaaagaggaattggtgtgataagtcttctcaaatagaaagtaatagtaagtatttttttttttttaatctgaactctgtaataactaaaattagagttagca

SEQ ID NO: 1577 - DNA, 2250 bp, Saccharomyces cerevisiae
agtaagttatttaccacaatttttctcatacacctttacaatccgtattgccatgaataccaaggcttgctcagcttctgcagcagttcaaccctttccaataccgccaatgcgtcctcaaaacgttagtttagtcgtgctcaaccgctatttttggttttatcttcgtttctttctcctgaacgacattcgtcacgaaaattgcggcggaaaatttcctgatgcggacactttttcccgatccggacatgcctttttttggcgtttcgcgtcagtcaatagaagtttcagatctacattaggaagaaccagaaaatagccattaatgctttcagcatagcacagcatagcagctgtgtatatcttaaataagatgtagactggtttgcatttggaaaggttttgtgtaagaaaagcaatacttgaggtaaaacaagagaaaaaaaaacactttactaactaatatccaatcctttatttttttgcagaaatgaaattctcaactgccgttactacgttgattagttctggtgccatcgtgtctgctttaccacacgtggatgttcaccaagaagatgcccaccaacataagagggccgttgcgtacaaatacgtttacgaaactgttgttgtcgattctgatggccacactgtaactcctgctgcttcagaagtcgctactgctgctacctctgctatcattacaacatctgtgttggctccaacctcctccgcagccgctgggatagccgcttccattgctgtttcatctgctgccttagccaagaatgagaaaatctctgatgccgctgcatctgccactgcctcaacatctcaaggggcatcctcctcctcctcctcctcctcggcaacttctaccctagaaagcagctctgtttcttcatctagtgaagaagctgctccaacatctactgtcgtgtcaacttcttccgcaacccaatctagtgcttcttctgccactaaatctagtacttcttccacttcaccatctacttctacttctacttccacttcttctacttcctcttcctcttcctcctcctcctcctcttcttcttcttcttctggcagtggtagtatctacggtgatttggccgacttttcaggcccaagtgagaaattccaagacggcactattccatgtgacaaattcccatctggtcaaggtgtcatttctattgactggattggcgagggtggatggtccggtgtggaaaacaccgacacttccactggcggttcatgcaaggaggggtcctactgttcctactcctgccaaccaggtatgtctaagacccaatggccatccgatcaaccatctgacggtagatctgtcgggggtttgttgtgtaaaaatggttatttgtaccgttctaacactgacgcggattacttatgtgaatggggtgtcgaggctgcctatgttgtttctaaactaagcaagggtgtcgccatttgcagaaccgactacccgggcactgaaaacatggttatcccaacctatgttgaagggggtagctctttgccattgaccgttgttgaccaagatacttactttacttgggaaggcaaaaagacatctgctcaatactacgttaataacgccggcgtctcagttgaagatgggtgtatctggggtacttctggatctggtattggtaactgggcaccattaaactttggtgctggctccactggtggagtgacatacttatcattgattcctaacccaaacaacagcgacgcattgaactacaacgtcaagatagttgctgctgatgattcatccaatgtcatcggtgaatgtgtttacgaaaatggtgagttctctggcggtgctgacgggtgtaccgtctctgttacttccggtaaagctcatttcgtcttatacaattaagctacgtgactactacttttccttttttttttcttttttcgaacacatctcaccccctatacctcacacaatcactatggtccccttttctttttaccgatatttatactgtccacctttttcttttcgttaatggcctcaatgtttctgtaccattatccaagtgaacttgttagacgaccaaatatagccaagattcattacgattatctttaactagcaagtagtattcttggatagagagattttcaaagacggaacaattttaaatagatttacataagaaaacacatactgtccgatacccataagaaatttaagaactcttttca

SEQ ID NO: 1578 - DNA, 1044 bp, Saccharomyces cerevisiae
tctattaatatatactcaattcaaatattgatcaggatttcaaagagtatgtcggagttacagtcacaacctaaaaagattgccgttgttacaggcgcctcaggtggtattggatatgaggtaacgaaggaattagccagaaatggctatttggtttatgcatgtgcaagaagactagaaccaatggcacaattggccatccaatttggtaacgatagtatcaaaccatataagttggatatttccaagccagaagaaattgtaacattttctggttttttgcgagctaatttacctgatggtaaattagatttattgtacaacaatgccggtcagagttgtacattccctgcattggatgcaacagatgctgcagtagaacaatgctttaaggtcaatgtgtttggtcatatcaacatgtgccgtgaattgtcggagttccttattaaagcgaaaggaaccattgtcttcactggttccttggcaggagttgtgtcattcccctttggtagcatttattccgcttctaaagctgctatccaccaatatgctcgtgggttacatctagagatgaagcccttcaacgtgagagtgattaacgctattactggcggtgtggctactgatatcgctgataaaaggcccttgcctgaaacctcaatatacaacttccctgaaggtagggaagcttttaattcaagaaaaaccatggctaaggacaataagcccatgccagctgatgcgtacgcaaagcaactggttaaagatatcttgagcactagtgaccctgtagatgtttatagaggaacgttcgccaacatcatgcgttttgtcatgatatttgttccttactggctattggaaaaaggactttccaaaaaatttaaattggacaaagttaataatgctttgaagtcgaaacagaagaataaggacgattagtgtttcaccatcgtcaatagctacctatatttatatacaagattccgtatagtttgtacaccacgtcaggacatcaatagctaataatcgttctaatgctaa

SEQ ID NO: 1579 - DNA, 3258 bp, Saccharomyces cerevisiae
tgaaagaaacaacaaaagagaaagaaagcagtttttagaaaatactaaattttaccgttatgctaaggttcgtgtcttcgcaaacctgccggtatagttcaagaggactattaaaaacatctttacttaaaaatgcatctactgtcaaaattgtcggaagagggttagccaccactggtacagataattttctatcgacatcaaatgccacctatatcgatgaaatgtaccaagcttggcaaaaagacccatcttcagtccatgtttcatgggacgcatatttcaagaatatgtctaacccaaagattccagctacaaaggcttttcaggctcctcccagtatcagtaactttccccagggtaccgaagcagctcccttagggaccgcaatgactggttcagtagatgagaacgtctccattcatctaaaagtgcaattgctatgtagagcttaccaagttagaggtcatttaaaagcccatatagatcctttagggatctcatttggtagtaataaaaataaccctgttcctccggaattgactctagactactacggctttagcaaacacgatcttgataaagaaatcaacctaggacctggtatcctgccaaggtttgcaagggacgggaaatctaaaatgtctctgaaagagattgtggatcatctagaaaagttatattgttcctcttatggggtacaatacacacatattccatctaagcaaaagtgtgattggttaagagagagaattgagattcctgaaccttaccaatatacagtggaccaaaagagacaaatcttagatagattaacatgggccacttcttttgagtcattcttatctacaaaatttccaaatgataagaggttcggtttagaaggtttggaaagtgttgttccaggtattaaaactttggttgatcgttctgttgaattgggtgtagaagatattgttttgggtatggctcaccgtggtagattgaacgttttatccaatgtggtccgtaaaccaaatgaatctattttttctgaatttaagggttcgagcgctcgcgatgatattgaaggatcgggtgatgtcaagtaccatttgggtatgaactaccaaagaccaactacgtctggtaagtacgtcaatttatcgctggtggcaaatccttctcatttagaatcccaagatccagttgttcttggtagaactagagctttattgcatgccaagaacgatttgaaggaaaaaacaaaggccttaggtgtgttattacatggtgatgctgcttttgctgggcagggtgttgtttatgaaaccatgggtttcttgaccctaccagaatactctactggtggtactattcatgttattacaaacaaccagatcggattcactacggatccaagatttgcaaggtccacaccatatccttccgatttggctaaggccattgatgccccaattttccatgttaacgctaatgacgtggaagctgtgacctttattttcaatttagccgcagaatggagacataagttccacacagatgccataattgatgtcgttggttggagaaaacatggacataatgaaaccgatcagccatcgtttactcaaccattaatgtacaaaaaaattgcaaaacaaaaatctgtcattgacgtctatacggaaaaattgataagtgaaggcacattttctaaaaaagatattgatgagcacaagaaatgggtatggaacttatttgaagatgctttcgaaaaggcaaaggattacgtcccatctcaaagagaatggttaactgctgcctgggaaggattcaaatccccaaaggaattggccactgagatattaccacatgaaccaactaatgttccagagagtactttgaaagaactaggtaaggtactctcttcgtggccagaaggttttgaagtgcacaaaaatctaaagagaattttgaaaaatagaggaaaatctattgagacaggtgaaggcatcgattgggccaccggtgaagcattagcgttcggtacattggttttggatggtcagaacgttagggtttccggtgaagatgtagaaagaggtacattttctcaacgtcatgcagtcttgcatgaccaacaatctgaagccatttacacaccgctaagcactctgaataatgaaaaggcagacttcaccattgcaaattcctcgttatctgagtacggtgtaatgggtttcgaatatggttattcgctaacctccccagattatctagtcatgtgggaggctcaattcggtgactttgcaaatacagcacaggttattattgaccaatttattgccggtggtgaacaaaaatggaagcaacgctctggtttagttttgtctttaccccatggttatgatggccaggggccagaacattcgtctggtagattggaaagattcttgcaactagccaatgaagacccaagatatttcccatctgaagaaaagctacagagacaacatcaggattgtaatttccaggttgtttatccaactacgcctgctaatttattccacattctaaggagacagcaacatcgtcaattccgtaaaccattggcgttattcttttctaaacagctgctgcgtcacccattggccagatcatctctttccgaattcactgaaggcggattccaatggattatcgaagatattgaacatggaaaaagtattggtacgaaagaggaaaccaagagattagttttgctgagtggccaagtgtacactgccctacataaaagacgtgaaagtttgggtgataagaccactgctttcttaaagattgaacagctgcacccattcccatttgctcagctacgtgattcattaaattcttatccaaacttggaagaaattgtttggtgccaggaagagccattgaacatgggttcgtgggcatacacagaaccacgcttacacacaacattaaaagaaacggataaatataaggatttcaaggtcagatactgtggtagaaacccaagtggtgctgttgctgccggtagcaaatcactacatttggccgaagaagatgcctttttgaaagatgttttccaacaatcctaaagatgaattcaaatatgaaaaacatgaaaatacagccatataaacacgtaatatttttaccttaatgtttatggacagcctttttacttgaagaatgatctaacaaatattttttttgatacattcacattttttttttgttcatgatgttagc

SEQ ID NO: 1580 - DNA, 1152 bp, Saccharomyces cerevisiae
ttgcaaaaccagcacgcagcaggaagctcttgataatatggtcgatcaccagtggacgccactgcagaaggaggttatctcaggtctgtccgcgggatccgtcaccacattggtagtgcatccattagatttactgaaggttcgtttgcaattatccgctacaagcgcacaaaaggcccattacggcccatttatggtaatcaaagagattatacgttcgtcggcgaatagtggacgtagtgttacgaacgaactgtatcgcggattaagcataaatttgtttggaaatgccattgcatggggagtttatttcggtttatatggtgtcacgaaagaattgatatacaagtcagtggcaaagccaggggaaacacagcttaaaggtgttgggaacgaccacaaaatgaattcgcttatttatttgtctgccggtgcttccagtgggttgatgacagctatcctaacaaaccctatctgggttataaagaccaggataatgtctacaagtaaaggcgcccaaggagcgtacacttctatgtacaacggtgtccaacaactgttacgaactgatggcttccagggcctatggaagggccttgtacccgcactgtttggtgtttcgcaaggtgccttatattttgcagtttacgataccttaaagcaaagaaaattgcgacggaagagggaaaatgggcttgacatccatttaacaaatcttgaaaccattgaaatcacatcgttgggaaaaatggtctccgtcactttggtttacccttttcaattattgaaatcaaacttacaaagtttcagggccaatgagcaaaaatttaggctctttcctttgataaaattaatcattgctaatgatggttttgttggactttataagggcctatctgcaaacttagtacgggccattccatccacttgcattaccttttgtgtatacgagaaccttaagcataggctttagtaaataaaggctatatgatagatttaatttcttgtaaatatcaaacgataaaaatataaaaagtacgaaagaaaaaggggaggtaatctaaactgtaacggggaggaatggtttctttggtttttattatttctaaaaaatatttgtgattatattacaaaatgtaaagtattaaagaa

SEQ ID NO: 1581 - DNA, 2472 bp, Saccharomyces cerevisiae
atgacacagcttcagatttcattattgctgacagctactatatcactactccatctagtagtggccacgccctatgaggcatatcctatcggaaaacaataccccccagtggcaagagtcaatgaatcgtttacatttcaaatttccaatgatacctataaatcgtctgtagacaagacagctcaaataacatacaattgcttcgacttaccgagctggctttcgtttgactctagttctagaacgttctcaggtgaaccttcttctgacttactatctgatgcgaacaccacgttgtatttcaatgtaatactcgagggtacggactctgccgacagcacgtctttgaacaatacataccaatttgttgttacaaaccgtccatccatctcgctatcgtcagatttcaatctattggcgttgttaaaaaactatggttatactaacggcaaaaacgctctgaaactagatcctaatgaagtcttcaacgtgacttttgaccgttcaatgttcactaacgaagaatccattgtgtcgtattacggacgttctcagttgtataatgcgccgttacccaattggctgttcttcgattctggcgagttgaagtttactgggacggcaccggtgataaactcggcgattgctccagaaacaagctacagttttgtcatcatcgctacagacattgaaggattttctgccgttgaggtagaattcgaattagtcatcggggctcaccagttaactacctctattcaaaatagtttgataatcaacgttactgacacaggtaacgtttcatatgacttacctctaaactatgtttatctcgatgacgatcctatttcttctgataaattgggttctataaacttattggatgctccagactgggtggcattagataatgctaccatttccgggtctgtcccagatgaattactcggtaagaactccaatcctgccaatttttctgtgtccatttatgatacttatggtgatgtgatttatttcaacttcgaagttgtctccacaacggatttgtttgccattagttctcttcccaatattaacgctacaaggggtgaatggttctcctactattttttgccttctcagtttacagactacgtgaatacaaacgtttcattagagtttactaattcaagccaagaccatgactgggtgaaattccaatcatctaatttaacattagctggagaagtgcccaagaatttcgacaagctttcattaggtttgaaagcgaaccaaggttcacaatctcaagagctatattttaacatcattggcatggattcaaagataactcactcaaaccacagtgcgaatgcaacgtccacaagaagttctcaccactccacctcaacaagttcttacacatcttctacttacactgcaaaaatttcttctacctccgctgctgctacttcttctgctccagcagcgctgccagcagccaataaaacttcatctcacaataaaaaagcagtagcaattgcgtgcggtgttgctatcccattaggcgttatcctagtagctctcatttgcttcctaatattctggagacgcagaagggaaaatccagacgatgaaaacttaccgcatgctattagtggacctgatttgaataatcctgcaaataaaccaaatcaagaaaacgctacacctttgaacaacccctttgatgatgatgcttcctcgtacgatgatacttcaatagcaagaagattggctgctttgaacactttgaaattggataaccactctgccactgaatctgatatttccagcgtggatgaaaagagagattctctatcaggtatgaatacatacaatgatcagttccaatcccaaagtaaagaagaattattagcaaaacccccagtacagcctccagagagcccgttctttgacccacagaataggtcttcttctgtgtatatggatagtgaaccagcagtaaataaatcctggcgatatactggcaacctgtcaccagtctctgatattgtcagagacagttacggatcacaaaaaactgttgatacagaaaaacttttcgatttagaagcaccagagaaggaaaaacgtacgtcaagggatgtcactatgtcttcactggacccttggaacagcaatattagcccttctcccgtaagaaaatcagtaacaccatcaccatataacgtaacgaagcatcgtaaccgccacttacaaaatattcaagactctcaaagcggtaaaaacggaatcactcccacaacaatgtcaacttcatcttctgacgattttgttccggttaaagatggtgaaaatttttgctgggtccatagcatggaaccagacagaagaccaagtaagaaaaggttagtagatttttcaaataagagtaatgtcaatgttggtcaagttaaggacattcacggacgcatcccagaaatgctgtga

SEQ ID NO: 1582 - DNA, 1638 bp, Saccharomyces cerevisiae
atgagtgtacagatatttggagaccaggttacagaagaaagagcggaaaacgcccgtttgtcggcgtttgtcggtgccattgccgtgggtgatttggtgaaaagcacattaggcccaaaagggatggataaattattgcaaagtgcgtccagtaacacttgcatggtaacaaacgatggtgctacgattctgaagtcaattccgctggataatcccgcagccaaagtgttggtgaacatcagtaaggtgcaggatgacgaagttggagatggtaccactagtgttactgttttgagcgcagagttgcttagagaagcagagaagttgattgatcaatccaaaatccaccctcaaactattattgaaggttaccgactagcttcagcagccgcattggatgcgttaacgaaagcggctgttgacaactctcatgataagaccatgttccgtgaagatctgatccatattgccaagactactttatcttccaaaattttgtctcaggataaggatcacttcgcagaattagcaactaatgctattttgagattgaagggctccactaacttagaacatattcagatcattaagattcttggtggaaagctatcagattcgttccttgacgaaggtttcattcttgccaaaaaatttggtaacaaccaacccaagagaattgaaaatgctaagattctaatcgccaatacaactttggatacagacaaggtcaaaatattcggcaccaaattcaaagtcgattctactgctaaattggcacaactagaaaaggcagaacgtgaaaagatgaagaataaaattgccaagatttccaagtttggtatcaacactttcatcaatagacaactaatttatgactatccagagcaattatttacagatttgggcataaactcaattgagcatgctgattttgaaggtgtagaaaggctcgccctggttacaggcggtgaggtggtgtctacatttgacgagccaagtaaatgcaaactgggagaatgtgacgtgatcgaggaaattatgcttggtgaacagccattcttgaagtttagtggttgcaaagctggtgaagcttgtaccatcgtcctaagaggtgctaccgaccaaacgcttgatgaagctgagagatccctgcatgacgcattgtccgtgttgtcacagaccacaaaggaaacaagaactgttcttggcggcggttgcgccgagatggtcatgtcaaaagctgtggacaccgaagctcaaaacatcgacggaaagaagtcccttgccgtggaggcttttgcccgtgctctgagacaactgccaaccattttggcagataatgctggttttgacagcagcgaacttgtgtccaaactaagatcctccatatacaacggtatctccacctcaggtttagatctcaacaacggaaccattgccgacatgagacagttaggtatcgtcgagagttacaagctaaaacgagcagtagtcagctctgcatctgaagccgctgaagttctactaagggtggataacatcatccgtgcaagaccaagaaccgccaatagacaacatatgtaacatatttaggatatacctcgaaaataataaaccgccacactgtcattattataa

SEQ ID NO: 1583 - DNA, 467 bp, Saccharomyces cerevisiae
accaagattcaaacatgcaaatttttgtcaagactttgactggtaagaccatcactttggaagttgaatcttctgacactattgacaatgtcaagtcaaagattcaagacaaggaaggtatcccacctgaccaacaaagattgatctttgctggtaagcaattggaagacggtagaaccttgtctgactacaacattcaaaaagaatccactttgcacttagtcttgagattgagaggtggtatcattgaaccatctttgaaagctttggcttccaagtacaactgtgacaaatctgtttgccgtaagtgttatgctagattgccaccaagagctaccaactgtagaaagagaaagtgtggtcacaccaaccaattgcgtccaaagaagaagttaaaatgatctgtttcgcccaatcaatctatacatttatttactgtatactttaatgtacatcttcttttatca

SEQ ID NO: 1584 - DNA, 708 bp, Saccharomyces cerevisiae
atgagtcacaagagaaggggcctggtaatatatcaggatcagaagcagcaacaacaacaccccccggggcagtccctaagctctatatcctggtctccaaccaggcgacctcatcaccctttaaaacaacaaagcaccaacagtttctcagaaatactatcgaaatcaagtgtgcaaccgaacgtgcaacatgacggtaatcatatgcccatttcattgctagttctgaaacaagaacatcataagcagcagcagcagcagcagcagcgccagaatatccgatcacaaaactctacgcctcccctgcgacagttggttcaggagtcgcagtggacgagctccgcaagtaatagttctctaaagaaacaggaaaagcagccgcaaacattctacaacactgactctaaacttgtttctcaactgcatagctccgtgaaggacctggatgccataatccagacgcataaaccaaagtttgacacaattattcgcgatttctctcaagcaaccatactgtcctcaaacgagttactcatcaaacttccgaaggaccaaacaataatattgcatagcagagcgccaaaaattaacgcagaatggctacagaacaaggttaatgaccctagtgcctcgttagtgatcgattcaagatcttttctaaccttgtgtaacaatataaaatggtacctgcattggaaatttatatga

SEQ ID NO: 1585 - DNA, 1242 bp, Saccharomyces cerevisiae
acaagcattaaacgagcaaagaaatgtctctggatcgtgtagattggccgcacgccaccttctctacgccggtgaagcgtatcttcgatacgcagacaacgctggacttccaatcgtcactagccattcacagaatcaagtatcatcttcacaagtacactacgttgatatcgcactgttctgaccccgacccgcacgctactgcgtcgtcgatcgccatggttaacgggctgatgggagtgttggacaagctggcacacctgatcgacgagacaccgcctcttccaggtcctagaaggtatggtaacctagcatgccgcgagtggcatcacaagctggatgaacgtttgcctcagtggctgcaggaaatgcttccctcggaataccatgaggtggtgcctgaattgcagtattacctgggcaacagctttggttcgtcgacaagattggactacggcacgggccacgaactttcgttcatggccacggtcgcagcactggacatgctggggatgtttccgcacatgaggggggcagacgtttttctgctgttcaacaagtactacacgatcatgaggaggctgatcctgacgtatacgctggagcccgctgggtcacatggcgtgtgggggcttgatgaccatttccacttggtgtacatcttgggctcgtctcaatggcagctgcttgatgcgcaagcacccttgcaaccaagagaaatactggataagtctctggtgcgcgagtataaggacaccaacttctactgccaaggcataaactttattaatgaggtgaaaatggggccctttgaagagcattcccccatcctatacgatattgccgtcaccgttccacgctggtccaaagtgtgtaaggggcttctaaaaatgtattctgtagaggttctgaagaagttccccgtggtgcaacatttctggttcggcacaggcttctttccctgggtcaacattcaaaacggcactgatcttccagtctttgaagaaaaggaggaagagagtatagaacaggctaacgcaggatcgcccggtcgagaacagacttcaacacgattcccaacgtccacgtcaatgcctcccccaggcgttccgccgtcaggtaacaatatcaactatttactaagccatcaaaaccagtcgcaccggaaccagacttctttttcaagagatagactacgtagataatattaattaaacatataaatgtgtatgacaagcatta

SEQ ID NO: 1586 - DNA, 314 bp, Saccharomyces cerevisiae
atgacattagtagggaaactagtacacatatccatagatttggtcttggtatcaacgtgcctcgcggggattaaacgcaatacaggtttgacgcctaaactggagactctggacaatcagactatgagaaactacatgaagcggtacttgaacttgggagagtctgtatacgactattctgttgccacttgtggctcctcgacgtatttcgctaggaaataggtacgtttatattctatatatgttgataatattttgtataacggcacccagccgggggccaaaattaataaccgcaacttaaagagctatcg

SEQ ID NO: 1587 - DNA, 744 bp, Saccharomyces cerevisiae
ttcaatcatcaaaacagactattgaataaagatgggcaatgtgtctgtggcagtgggaacggcagttgggattccaattgctgtgggcgtaataatagccctgatattttggtgtaaattacaacgacgttacaaaaaagaagagattagagatgctgatttggagaagatggtaatggaagaagtggcagtgtcggtatatgatggttttaaagccgaaattaacagctcaagtgaagcttccacgataaacgaaaaggaagcaaaccaggatcttaaaccctgccaagaaaaaaccgccaaggcagggtacacaccagcatacagaaggcaattgaacgctagtatggggactttgcgtccaaaaaagcagagcactgcatataccaatgtccccgtcattttcagcggcgaaaaggtgaattatgggatggtcagagatccttcctatagttttatgtatccactgacgctatcgcgcaaagaaacgagtagtttgagatcagcttctacgtcaaacttgtcatcgagcacagaaaatactgcgttacacgaagaaataaaactggatgacccatatgaaaacgattttacgaattatactgtcaacaagagagaatttattgacagcttacggccacactaatatatatgcatatagatatataaacgtacctacatagttttgcatttgtatagatacccagaccacttgtaataacgataaaaataaaataataataa

SEQ ID NO: 1588 - DNA, 1834 bp, Saccharomyces cerevisiae
ctatagtaaaccatttggaagaaagatttgacgactttttttttttggatttcgatcctataatccttcctcctgaaaagaaacatataaatagatatgtattattcttcaaaacattctcttgttcttgtgctttttttttaccatatatcttacttttttttttctctcagagaaacaagcaaaacaaaaagcttttcttttcactaacgtatatgatgcttttgcaagctttccttttccttttggctggttttgcagccaaaatatctgcatcaatgacaaacgaaactagcgatagacctttggtccacttcacacccaacaagggctggatgaatgacccaaatgggttgtggtacgatgaaaaagatgccaaatggcatctgtactttcaatacaacccaaatgacaccgtatggggtacgccattgttttggggccatgctacttccgatgatttgactaattgggaagatcaacccattgctatcgctcccaagcgtaacgattcaggtgctttctctggctccatggtggttgattacaacaacacgagtgggtttttcaatgatactattgatccaagacaaagatgcgttgcgatttggacttataacactcctgaaagtgaagagcaatacattagctattctcttgatggtggttacacttttactgaataccaaaagaaccctgttttagctgccaactccactcaattcagagatccaaaggtgttctggtatgaaccttctcaaaaatggattatgacggctgccaaatcacaagactacaaaattgaaatttactcctctgatgacttgaagtcctggaagctagaatctgcatttgccaatgaaggtttcttaggctaccaatacgaatgtccaggtttgattgaagtcccaactgagcaagatccttccaaatcttattgggtcatgtttatttctatcaacccaggtgcacctgctggcggttccttcaaccaatattttgttggatccttcaatggtactcattttgaagcgtttgacaatcaatctagagtggtagattttggtaaggactactatgccttgcaaactttcttcaacactgacccaacctacggttcagcattaggtattgcctgggcttcaaactgggagtacagtgcctttgtcccaactaacccatggagatcatccatgtctttggtccgcaagttttctttgaacactgaatatcaagctaatccagagactgaattgatcaatttgaaagccgaaccaatattgaacattagtaatgctggtccctggtctcgttttgctactaacacaactctaactaaggccaattcttacaatgtcgatttgagcaactcgactggtaccctagagtttgagttggtttacgctgttaacaccacacaaaccatatccaaatccgtctttgccgacttatcactttggttcaagggtttagaagatcctgaagaatatttgagaatgggttttgaagtcagtgcttcttccttctttttggaccgtggtaactctaaggtcaagtttgtcaaggagaacccatatttcacaaacagaatgtctgtcaacaaccaaccattcaagtctgagaacgacctaagttactataaagtgtacggcctactggatcaaaacatcttggaattgtacttcaacgatggagatgtggtttctacaaatacctacttcatgaccaccggtaacgctctaggatctgtgaacatgaccactggtgtcgataatttgttctacattgacaagttccaagtaagggaagtaaaatagaggttataaaacttatt

SEQ ID NO: 1589 - DNA, 563 bp, Saccharomyces cerevisiae
ccgagcaactgtttcgaaactcacgcatcattcacacgtaggatatagtaatggttgaaccagcaaggaaaaagcagaggattgatcgcgatactcatcacactgtggctgaaccagtaacggaagctaaaaatacgctgtacgtgagccagcttaatgaaaaaattaatatgcaacgactgcgagtaaacctttttttgctctttgctacgtttggagaggtactgaaggttagcatgaatttcaagaaacagcggggccaagcctttatcaccatgagaaccatcgaccaggccagtctggcccagatttcattaaacggcgagcgattctttggtaagcctttgaaagttgagttcagcaagagtgaaactaaaacactatgactggcttaacgctctattcatagcagcacgtatataccgagaagagctgccataggggcacatcaaagtcaagagcgcagaaccaaaccaaaatgtttatatccaaacaacccggcgttatagatggtcgtcaacggacaaataatatcaaggcatgtatcaatatggagtagatat

SEQ ID NO: 1590 - DNA, 2480 bp, Saccharomyces cerevisiae
cattaagcgtaatggaacctcaagaagagtttataactaccgaagaagttgagcaggagattgtgcccactgtggaggtcgaacaagacgttcccgttgatattgaaggagagaatgacgacgatgatgaaatgatgaatgatgatgaggaagctttggaggtcgacatgtccaacaactcgcttacctatttcgataagcacacagactccgtgtttgccattggccatcatcctaacctgccgctagtatgtaccggtgggggtgataacttggcacatctttggacatcacattcacagccacccaagtttgctggcactctaaccggttatggcgaatctgtgatttcatgttctttcacttctgaagggggcttcttggtcactgccgatatgtcggggaaggttcttgtacacatgggtcaaaaaggtggcgctcagtggaagttggcatcgcaaatgcaagaagtcgaagagattgtttggctgaaaactcatcccactatagcaaggacgtttgcgtttggtgcaactgatggatctgtttggtgctaccagattaatgagcaggatggttctttggaacagttaatgtctggttttgtacaccagcaagattgctctatgggtgaattcattaacaccgacaagggtgaaaatacgctggaattagtcacttgttctttggatagcactattgtggcatggaattgcttcactggccaacaattatttaagatcacacaggcagaaatcaagggattagaagctccatggatttccctatcattagctccggaaactttgaccaagggtaactcgggtgtcgtggcatgtgggtccaacaatggtcttctggcagtaattaattgtaacaatggcggtgcgattttacatttatctacagtgattgaactaaagccagaacaagacgaattagatgcctccattgaatccatttcttggtcatccaaattctcccttatggccattggccttgtctgcggtgaaatactcttatatgatacaagtgcatggagagtaagacacaagtttgttctcgaagattctgttacaaaacttatgtttgataatgatgacttattcgcatcgtgtatcaatggtaaggtttaccagtttaatgcaagaactggccaagagaagtttgtttgtgtgggccataatatgggggttcttgattttatattactgcatcctgtggcaaataccggcaccgagcagaagagaaaagtaataactgcaggtgatgaaggtgtatctctggtgttcgaggtaccaaactgatagatagtcgcgtatacataaataacaaaaaaacaaattcaataacataaaataaaaatacttttacatacagaagaagaaactttatatattcgacaaaggaaaatgtaaaaaaaaaaaacacattattttaaaagaactgcgctcattatcgtcgttaacgattttattattacatgttgaacgttacattgtctttttgtcccgataggttgaaagctgaaaaagtataatgggtcagaatctgacagttccggtaagttctttggggatccttctcttagtcccggtacctttaatttgctccatgtatcttttagcagctgctctaccgaagcgcagaatcaattttctaaaaaacaacccacaagcattacacaggcaagcagcaccgttagggccctccctccattgtaatgaagtcttaatctctccacattgcccacatgtcctagtaatgcccgttcttggtcgagcaggctgagagtcagcgttcctagggaggccatgttgtgcctctgatccgctattcaacagcaattgaacggggacttttttgaaggctgttccgtttgaaatcacaataggcaacttagtggacatagcgaccctgtaatgttatgtttctagctaggaacagaaagtgccagctttttgagcagttaaagagtaaaatgtttatgtggtttcacggacttacatgtgaaagactagcctggcgctatctaaattcatgatgaaactcgatggccctttccatggcacaaaaatcttgacacatggatgtgcgcggcggcggtaaccgcaccaaggaaaaaagggtccaatgccaagaaataataaaacggacccttttttctttttttttgaaataaaattgaaagagaaatgcaaacacttttcaggtttgaaaagaaaagaaaacgtcaagaatcttacgccaaaagtgcctaagattcaagtatctctgaaaggcgtaccattttcaacaaggggcataggtggccgcaaactaggataattgacaacttagtttcatattgacaatgtcatcgcaattgaggagatagccataattcgggagggtacaaaacctgacctgctagtgttcaactaatgcatcatgggtactatagagagcattctagtggtagaaaaaaaaaaaaaaacaaa

SEQ ID NO: 1591 - DNA, 435 bp, Saccharomyces cerevisiae
atgggcaagaaagcacacggaggaaagatgaaacctgagatcgacgaaaatggtactctgctagtaccgccaccaaggacgattgcgaaccaggaccatttccatagattaaactacctctaccaaatatccgcttaccaaacaagagcaagacagaaagcaagaacagacgcacatacgcctttggcacgcaattatatcaaatcaatggacctaattagtaagaaaaccaagacatcactgcttcctacgataaagagaacaatttgtaaaaaatgccatcggttgttatggaccccaaaaaaactggaaatcacatccgacggagcgctttcggtaatgtgtgggtgcggtaccgttaaacgttttaatattggcgccgatcctaattacaggacctactcggagcgggagggtaatctactaaattcttag

SEQ ID NO: 1592 - DNA, 925 bp, Saccharomyces cerevisiae
tcttgccagcatagcggataaacaccgcaaggaggtgttgtggtcggtaatgagtggcacgaggtgtttgctaggcgtcggactaccagttgatgtgactgctacggaaactttgactcatgatgaacaaggaccaggtgtagagccaggaccgtgttcgcgaggaagttctatagatggtctgctgccctcgttgctcggtccacatgatgatgtggatgacgattcggcggcttttcacaagtacatgacactatcgcgagatggcgcaggcgccatccatgctccgtcattagtcgaagacgcctcaaggaacgacgacgacgacgatgatgaagacgacgacgacagttccatgtcgcgagacctatccaaggctctagatatgtcatcgtcatcatcgtccagcccgcgcgttcaaagtcggcggcaccgtagttctgtgagcgcaatatctgcaatcttacaccaaggaaaatctggccgcgaagacataactggaagccttagcgttccggcagaacaagaaaaactcagttttcttgccaaagcctcgagtattttctttcgaaggaacagtatgcccagagacaaacatacgcattcagtatgtcccgctagccgcccagattccgagagatttatcgtcacatctgcagccgcgcagtctttacgccgccaacaacaactggaagacgctcagtacgctcgagttattacaaactttcgtactataggatggtgctctcccagcgagatagagtctgtggaatataaacggtccttgatcaatgcggagtgggacgaaaagatctcgcttttgtctcacgcgcaatgctataaataataaatatacatatatatatatttatatgtagatagatgtgtgtatatatatgctaggtaaagaaacggaaaaatcgaa

SEQ ID NO: 1593 - DNA, 904 bp, Saccharomyces cerevisiae
taactagcatattatcacagtcatggctctacctctgataaaacctaaggagtctgaggaaagccacctcgctcttttgtccaagatccacgtgtccaaaaattggaaactgcctccaaggttgccccatagagcagctcagcggaggaaaagagttcatcgacttcacgaagattacgaaactgaagaaaatgatgaggagctacagaagaaaaaacggcagaatagagacgcccaaagggcctacagagaacgcaaaaacaacaagttgcaagtgctggaggaaaccatagagtcactgagtaaggtcgttaaaaactacgaaacgaaactaaaccgcctccaaaatgaacttcaagcgaaagaatcggaaaatcatgcccttaaacagaaattggagacccttactctgaaacaagcctctgtgcctgctcaggaccctatcctgcagaatttgatcgagaatttcaaaccaatgaaggcgatacctattaagtacaataccgctatcaagcgccaccagcactcgacagaactgcctagctctgtcaaatgcggcttttgtaacgacaacactacttgcgtttgtaaagaactggaaacagatcaccgtaaaagtgacgacggtgtggccacagaacagaaggatatgtcgatgccacatgcagagtgcaataataaagataaccccaatgggctctgtagtaattgtactaatatcgacaaatcatgtatcgacatccggtccatcatccactgaagagagagaacttcttaatacttataaatacgtcattgaacagctcaacttttgtaacgtcaaaagaacgcacatgaaaggagtgacattgcttttttctttgcaagtttattactgtggttatgtgtaaagaattagttcatg

SEQ ID NO: 1594 - DNA, 1136 bp, Saccharomyces cerevisiae
atgtctccgaagaatataacaaggtcggtgatcccggctatagatttgtattgccgcaaagcaaattttaaaactctaaaatcattgtcgatgatcctaggtagtaaaaaagaatggtatgacactaaaaaggcgccattgagaacctttttggtctctcgatgtggcattttcgagcagttgaggggtcgtctcgttgaagatggcaaagtcaacttgtttagtgttttcctgacaaacgactcattttctttttgcaagatgaccgttgatgataagttcaacactagcttggtcgattggcaaaaaataccctttgacagtacatttgcaactgacagaagacagaatatcagtttactacctgttgatacactgtttgcaactgaaaagatcatatcgattcttggtgtatctcctaatatgacgaatcttgtttctatagaaagagagcgatcagacctggtggattttaattgtaaactgcaatcaaacatcctagaacacctactatacgcgaaatgccaaggagtgtacgtaacttctaccaatgaaaaagctcgtttgcttgcagctgtctgcaatcctgaattcattgacaccttctggtgcgaattgactcccataagagtctcattaaaggaaaacccttccatttctgtacctcgagaatatcagatgtacgatccggtggtacgtgccactataaaggaggttgtcaccaagcgattactgcgatccgccttcgataatgacatcgacccgctaatgtgtcttcatttggataaaggctggaaacttaaattccccatactatcctcgacaacgggcctaaacttctccctgaaggattgtctttccctggacacaggaaaagatgcatctgatatgacagaggtgtttctcgctactatggagtcgagtaaagttcttcgtacgtatagcaacctcgttgacattgtgatgaaggacaatggtaggttggactcaggcgtcctaaagcaattcaacgactacgttaagcaagaaaagctcaatctacaacattttcaggccggttcctcaaagtttctcaaaggcgcaaagatataatcctcttatatagcatgtaaatagaaagtacgtaaaaaaaagct

SEQ ID NO: 1595 - DNA, 606 bp, Saccharomyces cerevisiae
atgaatctaagatttgaattgcagaaactattgaacgtttgctttttgtttgcatctgcttacatgttctggcaaggcttagccattgctactaatagcgcttctccgatcgtggtggtgctttcaggctccatggaaccagctttccaaaggggtgatatccttttcctatggaatagaaatactttcaaccaagtaggtgatgtcgtggtgtatgaggtcgaagggaaacaaatccccattgtgcatagagttttgaggcaacataacaatcacgcggacaagcaattcctcctgaccaaaggtgacaataacgccggcaatgatatctcactatatgctaataagaaaatttacttgaacaagtcaaaggagattgtagggaccgtcaagggctactttccacaactagggtacattacgatttggattagcgagaacaaatatgccaagtttgcattgttaggtatgttggggttgagtgctctgctggggggcgagtagttcgccaagtttttttggaacgatgtttacgtactttgtatttgtgcttatggtctttaacttgtttaattatataaccataaccattcggtccacgctgaa

SEQ ID NO: 1596 - DNA, 630 bp, Saccharomyces cerevisiae
gtctctctcttccaagctgtcatctcgtaaagtattcaagtttatcatgtcagaattctataagctagcacctgttgacaagaaaggccaaccattccccttcgaccaattaaagggaaaagtggtgcttatcgttaatgttgcctccaaatgtggattcactcctcaatacaaagaactagaggccttgtacaaacgttataaggacgaaggatttaccatcatcgggttcccatgcaaccagtttggccaccaagaacctggctctgatgaagaaattgcccagttctgccaactgaactatggcgtgactttccccattatgaaaaaaattgacgttaatggtggcaatgaggaccctgtttacaagtttttgaagagccaaaaatccggtatgttgggcttgagaggtatcaaatggaattttgaaaaattcttagtcgataaaaagggtaaagtgtacgaaagatactcttcactaaccaaaccttcttcgttgtccgaaaccatcgaagaacttttgaaagaggtggaataggcaggtcttcttcttttgaagttaggtaaagcttagttttcttttatatttcctgataatacatactcgctagtcaaacctgtcaattatta

SEQ ID NO: 1597 - DNA, 876 bp, Saccharomyces cerevisiae
ccaaagaatcaatacgcaaagatggctagaggaccaaagaagcatctaaaaagattagcagctccacaccactggttattggacaagttgtccggttgttacgccccaagaccatctgctggtccacacaaattgcgtgaatccttgccattgattgtctttctaagaaacagattaaagtatgctttgaacggccgtgaagtcaaggctatcttgatgcaacgtcacgttaaagtggacggtaaggttagaaccgacactacctacccagctggtttcatggatgtcatcactctagatgccaccaatgaaaacttcagattggtctacgatgtcaagggtagattcgctgtccaccgtatcaccgatgaagaagcttcttacaagttgggtaaggtcaagaaggttcaattaggtaagaagggtgttccatacgttgttacccacgatggtagaactatcagatacccagacccaaacatcaaggtcaatgacactgttaagatcgacttggcctctggtaagattactgatttcatcaagttcgatgccggtaagttggtttacgttactggtggtcgtaacttgggtcgtatcggtactatcgttcacaaggaaagacacgatggtggtttcgatttagttcacatcaaggactccttggacaacactttcgtcactagattgaacaatgtcttcgtcatcggtgaacaaggtaagccttacatttctttgccaaagggtaagggtatcaagttgtctattgctgaagaacgtgacagaagaagagctcaacaaggtttataaatttcataacaacttaattattttcttcttttgtatatctccattaatgtttattagaaattgaatttt

SEQ ID NO: 1598 - DNA, 2463 bp, Saccharomyces cerevisiae
actgtactaagaagtttgtcgatacatattttaccaagatattttctgacagtccacagaagtacagatgtctgtgcccaaaaaacgtaaccatgggaagttaccaccttccactaaggacgtagacgatccttcgttgaagtacacgaaggccgcgcctaaatgtgaacaagttgctgaacattggctcttgcagccactaccggaaccggaatcacgttatagcttttgggtaacaattgttaccttattagcgtttgctgctagattttataagatctggtatccaaaagaagttgtttttgatgaggtacatttcgggaaatttgcatcgtattacttagaaaggtcttatttctttgacgttcatcccccttttgctaagatgatgattgccttcattggttggttatgtggctatgatggttcctttaagtttgatgagattgggtattcttatgaaactcatccagctccatatatcgcgtaccgttctttcaacgcgatattgggcacattgactgtaccaattatgttcaacactttgaaggaactgaatttcagggctattacatgtgcgtttgcatctctcttggttgcaatcgatactgcgcatgttacagaaactaggctgattttactggatgccatcttgattatttctattgctgctactatgtattgttacgttcgtttctacaagtgccaattgcgtcaaccttttacatggagttggtatatttggttacacgctactggtttgtctttatccttcgtgatttccacaaaatatgttggtgttatgacatattccgctattggttttgctgctgtggtcaacttatggcaattactggacatcaaggcgggtttgtccttgaggcagttcatgagacattttagtaaaaggctgaatggtttagttttgattccatttgtgatttacttgttttggttctgggttcatttcaccgttttgaatacttcaggtcctggcgacgcatttatgtctgctgaatttcaagaaacacttaaggactctcccttaagtgttgactctaaaaccgtcaattattttgatattatcactatcaaacatcaagatactgacgcattcttacattctcacttggcacgttacccacaacggtatgaagatggtcgtatctcatccgctggtcaacaagttactggttacacgcatcctgacttcaacaatcaatgggaagtgttaccaccccatggcagtgatgtcggtaaaggacaagctgttctattgaaccagcatataagattgagacatgtagccaccgatacctacttgttagcccatgatgtcgcctccccattttaccctaccaatgaagaaatcactacagtaactttagaagaaggtgatggggaattatatcctgaaacactttttgcattccaaccactgaaaaaatcagatgaaggtcacgttttaaagagtaaaacggtttctttccgtcttttccacgttgatacctccgtagctttgtggactcacaacgacgagttgttaccggattgggggttccaacaacaagaaattaatggtaacaaaaaagttattgatccttcaaataactgggttgttgatgaaattgttaacctggacgaggttcggaaggtatatattccgaaggttgttaagccattaccattcttgaagaaatggattgaaactcaaaaatctatgttcgaacataacaataaactatcatcagagcatccatttgcctctgaaccttacagttggcccggtagtttaagtggtgtttcgttctggaccaacggtgacgaaaagaagcaaatatatttcattggtaacatcattgggtggtggttccaagtcatatcattggctgtttttgttggcattatcgtggccgatttaattactagacatcgtggctattatgccctaaacaagatgaccagagaaaagctgtatggcccattgatgtttttcttcgtctcctggtgctgtcattattttccattctttttaatggcgcgtcaaaagtttttgcatcattacttaccagctcatttaatcgcgtgcttattctcaggagcactatgggaagtaattttcagtgattgcaaatcattggatttggagaaagacgaggatatttcaggtgcatcatatgaacggaaccctaaggtctacgttaaaccctataccgtcttcttggtgtgtgtctcctgtgctgttgcgtggttttttgtatacttttcaccactagtgtatggagatgtcagcttgtcaccatcggaagttgtttctagagagtggtttgacatagaattaaatttctccaagtaactttttctgttcactaaccacaaacgaactgaacgccttcctccgtttagtgacaaaatagagtacttttgatcttagatagtatgtacctagatgtgtatatatga

SEQ ID NO: 1599 - DNA, 1208 bp, Saccharomyces cerevisiae
aatttgttgaagctaaatcttctgtgtgtgtactcaggactgttttaagaacgtagatagtatcatcaatcgaataataaaaaaaaaatgagcactaaagttgttaatgttgccgttatcggtgccggtgttgttggttcagctttcttggatcaattgttagccatgaagtctaccattacttacaatctagttcttttggctgaagctgagcgttctttaatctccaaggacttttctccattaaatgttggttctgattggaaggctgctttagcagcctccactactaaaacgttgcctttggatgatttaattgctcatttgaagacttcacctaagccagtcattttggttgataacacttccagcgcttacattgctggtttttacactaagtttgtcgaaaatggtatttccattgctactccaaacaagaaggccttttcctctgatttggctacctggaaggctcttttctcaaataagccaactaacggttttgtctatcatgaagctaccgtcggtgctggtttgcctatcatcagtttcttaagagaaattattcaaaccggtgacgaagttgaaaaaattgaaggtatcttctctggtactctatcttatattttcaacgagttctccactagtcaagctaacgacgtcaaattctctgatgttgtcaaagttgctaaaaaattgggttatactgaaccagatccaagagatgatttgaatgggttggatgttgctagaaaggttaccattgttggtaggatatctggtgtggaagttgaatctccaacttccttccctgtccagtctttgattccaaaaccattggaatctgtcaagtctgctgatgaattcttggaaaaattatctgattacgataaagatttgactcaattgaagaaggaagctgccactgaaaataaggtattgagattcattggtaaagtcgatgttgccaccaaatctgtgtctgtaggaattgaaaagtacgattactcacacccattcgcatcattgaagggatcagataacgttatttccatcaagactaagcgttacaccaatcctgttgtcattcaaggtgccggtgccggtgctgccgttactgccgctggtgttttgggtgatgttatcaagattgctcaaagactttagatcagtaaacagacatataaaaacataggtatatttatata

SEQ ID NO: 1600 - DNA, 4436 bp, Saccharomyces cerevisiae
cttgatatttattcagatcccttatatactaataaagtaacagtagggaacgggaaccagagaaaaacaaaagattggcgaatgactgcttctgacctcttgacgctcccacaattgttggcgcaatattcctctagtgctccccaaaataaagtgttctacactactagcacaaaaaatagtcattcatccttcaaagggctagaatctgttgccacagatgctactcatctattgaacaatcaagatccattgaataccatcaaagatcaactctctaaggacattttaactaccgtttttacagatgaaactactttggtcaaatccatccaccatctatattctcttcctaataaacttccattggtgattacagtggatttgaatttgcaagattattccgcaattcctgcgttaaaggatctttctttccccatcttaatatcttctgatttgcaaactgcaatttcaaacgcggactcttcttataagattgctacaagttctctgaccccagttttccattttcttaacttggagaaaattggcacgagtacagctattgaacaagacatcgactttcctaccttggagattgctaacgaagagactaaagtagcattatcagaagctactgattcattgacaaattttgaactggttaaaggtaaagagtcaattaccactgtcattgttaacctgtcaccatatgacgcggaattcagtagcgtattgccttcaaacgtaggattgatcaagattagagtatacagaccatggaatttttccaagttcttggaaatactgccatcttctgttaccaaaatcgccgttttacagggtgtctctaagaaatcgcaatcaaacgaatttcaaccatttcttttggacttctttggcaattttaatgaattagtttctaggaacatcgagcaggtagtgttgactaatattggtaatgtgaatgattatggcaacgttatcaacaccgtcatatcgaatattaacaagaaggaaccagataataacttatttttaggtgaatccaatgaaaaggctgaggaacaagctgaagttactcaacttatttcttctgtcaaaaaagttgtgaacttagaagacgcctatatcaaagtgctaaaacagttattttcatcaaatctacaaattttgaatcaattttccagtgagacaattgaaccaagtaatccagaatttggttttggacgctttttaaaacaagaagcccagcgtgaagaattgatcagcttagcaaaaacctctcttgatccaagtctttacttgtccgaggatgcaaataaaattgttcaactattatctaaatggttgtcattcaatggacgcgatcttgacgaagctcaattacaagaggccaatgcgacaggtttggaaatatttcagttattacaatctaatcaagattcctctactgtcttaaaattcttaaagatagctccaacaagcgattcttttattttcaaatcaagctggctaattggctccgatgcctggtcttatgatttgggtcactcaggtattcaacaggttttatcctcccgtaaaaacattaatgttttattgattgattcagagccatatgaccatagaaagcaaaaccaggatagaaagaaagatgttggtttgtacgccatgaattattacagtgcctatgttgcctctgtagcagtatatgcttcttacacccaactattgactgcaataatagaggcatctaaatacaatggtccttctattgtcttggcttatttgccgtataattccgaaaatgatactccattagaagtcttaaaggaaaccaaaaacgccgttgaatctggttactggccattgtataggtttaatcctgtttatgacgatccatcaacagataaggaggcatttagcttggattcttcggttatcagaaaacaattacaggacttcttagaccgtgagaataagcttaccctattaaccagaaaagatccatctttgtcaagaaatctaaagcaatctgctggtgatgcgttgacaaggaaacaagaaaaaagaagcaaggctgccttcgatcagttattggagggtttgtccggcccaccgctacacgtctattatgcttctgacggtggtaatgctgcaaacttggcaaagagactagcagcaagggcatctgcaagaggtttaaaggctactgttctgtccatggatgacattattttggaagaattacctggtgaagagaatgtagttttcattacttccacggctgggcaaggtgaattcccccaagacggtaagtctttctgggaagctctgaaaaatgacaccgacttggatttagctagtttgaatgttgctgtttttggtctcggtgattctgagtattggccacgtaaagaagataaacattattttaacaagccttcacaggatttatttaagcgcttggaattattgagtgccaaagccctaattcccttgggactgggtgatgatcaagatgctgatggtttccaaactgcttattctgagtgggaacctaaattatgggaagctcttggtgtttccggcgctgctgttgatgatgagccaaaacctgttacaaacgaggatattaagagagaatctaatttcttgagaggtactatcagtgagaacttaaaggatacttcttcaggtggtgttactcacgctaatgaacaattaatgaaatttcacggtatttacacccaagacgatcgtgacattagagaaatacgtaagtcacaaggcttagagccatactatatgtttatggcaagagctcgtttaccaggtggtaagaccactccacaacaatggcttgctctggatcacttatctgatacttcaggcaatggtaccctgaaattaacaacaagggcaaccttccagattcatggtgtgctaaagaagaacttgaaacacacattgagaggaatgaatgcagttcttatggatacattagctgctgcaggtgacgtgaacagaaatgtcatggtttctgctctaccaaccaatgccaaggttcaccaacaaatcgctgatatgggaaaattgatttctgatcatttcttaccaaagactacggcctaccacgaagtttggctggagggcccagaagaacaggacgatgatccatcctggccatctatttttgaaaacagaaaagatggtccaagaaaaaagaagactctagttagcggtaacgctttggtcgatattgaaccaatttacggtccaacttatctgccaagaaagtttaaattcaacatcgccgttcctccatataacgatgtggatgtattatctatcgatgtcggtttagttgctatagttaacccagaaactcaaatcgtggagggttataatgtttttgttggtggtggtatgggtaccactcataacaacaagaaaacttacccaagattagggtcatgcttaggttttgttaaaactgaagacattattccaccacttgaaggtatcgttattgtccaaagagatcacggtgaccgtaaagaccgtaagcatgctcgtttaaagtatactgtagatgatatgggtgtcgaaggcttcaagcaaaaagtggaggaatactggggtaagaaattcgagcctgagagaccatttgagtttaaatctaatattgattactttggatggattaaagatgaaactgggttaaaccactttaccgcatttattgaaaatggtagggttgaagatacaccagatttgcctcaaaagacaggtattagaaaggttgctgaatacatgcttaagactaattctggtcatttcagattgactggtaatcaacatttggttatctctaatattacagatgaacatgttgctggaataaaatctattttaaagacctataaattggataacaccgatttcagcggtttgagattatcttcatcttcctgtgttggtttgccaacatgtggtttagcgtttgccgaatctgaacgtttcctacctgacattattactcagttggaagattgtttagaagagtatggtttacgccatgattccattattatgagaatgactggttgccctaacggttgttctcgtccatggctaggtgaattagctcttgttggtaaagctccacatacttataacttgatgcttggtggtggttacctcggccaaaggctaaacaaattgtataaggccaatgtgaaggatgaggaaattgtcgactacatcaaaccattgtttaaaaggtatgctttagaaagagaagaaggggaacactttggtgatttctgtataagagtaggtatcattaaaccaaccaccgagggtaaatacttccatgaagatgtgtctgaagatgcctattaatgatagcatatgacatagtaggacat

SEQ ID NO: 1601 - DNA, 2436 bp, Saccharomyces cerevisiae
atgagaatgatacagagagagagaaagagagagaaagaggaaggtcaattaaaggagagaactgttgttaatatggcagaccctgatgacaatgaggccgaagccactggattacaacaatatagtggcgagaccactcgcgatgacaatgaagaaagcatgaatgattctttcactttaacatccaggaatagaggcagaagtaatacaatatctagtattgttagtggttatgaaataatgaaagaacatatggacaaggaaaagtttatgtacttgattctagcgagtctccttttgtacatgggatttgttgccgcatttgctcccaggacgtctttatcaagagactttcggcggtttcactcttccagattgacgaatgcagaggtttataggatatacttgaactccttgcaacaggaaaatagagcgaaagaacatgtatacaagtatgctgggtacatgagcaacggagcaagtgattcgtcaacgtttaaatataccttggacgagtttctagatatggggtacaaacccaaagttgaaaaatattacccatggataggtgaaccagtagacactaacgtagctcctttagaaaatggtaaagtggtctacgaagcaagcatgatcgaggatagagttaaaggtgatcctgcttctcacgctaggaaaaggcaaaagggtttccatcaatattcaaaaaatggaagtgtaactgctcgatacgtgttttgcaattatggtagcatcagtgattacaagctacttttgaagaaaaacattgatattgaagataaaatccacatcgtacgatcgggtaaaatattacctggattaaaggtaaagaatgcagaactttatggcgcttccagtgtcattatatatacagacccatttgacgatggtaaagttactgaggaaaatgggtttttacactatccttatggaccagcaagaaacccaagttatattaggagagattctgtaaactatttcagtgacactccaggagatccgacaactccagggtatccctccaaggattccgacactgaacatatgtcaccggtagggagagtgccgaggataccatcggtgccgatgagtgctagagatgtccaaccaattttagaaagattgaatggcaggggttttcaaattgggcccggtagtaatataaaagattttggatcattcactggaccttcaagctctatcgataaagtccatttgcataatgagctaacttacaacatcaaggaaatgagtagtgtagaggttagtatccctggtatattcactgagggggagattattatcggagctcatagggattcgctcgcctcgagtagcgccggtgatgcaaatagtggcagcgctattcttttagaaattgcacgaggaatgagtaaattacttaagcatggttggaagccactgcgtcctatcaaactaataagttgggatggtgaacgatccggccttctgggatctacagattatgcagaagctcatgctgcgattctcaggagaagggccttggtatacctaaatctagataatgcaatctctgggacaaattttcactgtaaagccaacccacttttacaagacgtgatatacgaagctgctaagctcacggaatttaatgggcacgaagactggtcattgttcgaccattggaaatacacttctaatgccactatttctctacttgatgggttgtctagttacacttcatttcagtaccatcttggagtgcccgctgcacattttcagtttaatgccaatgatacttcaggcgcagtctatcatagtaactccgtattcgatagcccaacttggttggaaaaatttaccaattctgactacaagttacacaacaccatggccatgtttgtaggtttgacaacgctgatgctgagtgaaaacgaactggcaagattcaatacacatgtttacctgaagaaaatatataactggtatatcgcatggcactctaatctatcttcagcatttccccaggacgatgaagtgaacagcttagcaaaaagggttctggacttattaaaagttgccacacaggaagatagcatccaatttgaccaacaaaatggtattctctataaagagtgtagggaagctttacctgtttgggctttttacaaaaaaatcaagagctatattaaactgcaacgatccaatagcaaatcaaagcaaattgatcaattatttattacacacagaggactgaaagacagggaatggatgaagtactctcttttagcacctagtaagtttgagggatctgtcggggaagttttgcccggccttcacgaaggattggctgatattgatagaaacgaggtcattcagtggttaaccattttgctaagccaattcagcaacgttcgctatttacttcaataa

SEQ ID NO: 1602 - DNA, 1352 bp, Saccharomyces cerevisiae
caattcaggaaggtgtagggacgtcgataggagatcacatcgttaattagtgttaggaagaatgagtttagaggatacattagccaacatgtcattatatgacgccaagaaatattttcgtaaagctcaaaatgttgttttcaattatactgagatggaggggaaagttcgtgaagcgacaaacaacgagccttggggtgcctcatccactttaatggaccagatttctcaaggaacttacaatttcagggaaagagaagaaattttgtccatgatattcagaaggttcactgaaaaggcaggtagtgagtggaggcaaatttataaagccttgcaattgctcgattaccttatcaaacacggttctgaaaggtttatcgatgatacaaggaatagcattaacttaattaggattttagaaacttttcactatattgattcccagggaagagatcaaggaattaatgtcagaactagggtcaaagctttgattgaattattgagcgacgataataagatacgcgcagaaagaaaaaaggcaagagaaacggcaaagaagtacaagggcgttgctggaggatctgcctctgctgatggcagtttgaattcgaaggcaggtttcacgtcaacgaaagtgcacggcattagcgtgagtgctgatttcgatagtgacaatgaagataacgaagatggttcttttagtcaaaatggatataacgataatgcctcgagagccacatctactcctgggcaaggaaaacaagaaccagaggactttgttgactttttttctagtgagtcttcaaaaccatctaaagaactcatacaagaagatgaaaagaaggcggacgaagaagaggacgatgatgacgagttttcagaatttcaaagcgccgtccctgttaccaaccctgctaattcgtttaacttgctaaacacgagcccaattgagggtatgcccgccaccacgagttcaatgcctttttataacagctccactaccgaccaaggcaagattaccccagctattgcggaacctaaaaaagtagatccttttagctctctcttttcaactgcaaaggcatctgcagaagcacctagtgctcctaaagcatcccaagcgaaagccgctgcctctaatcctgtatctaatagcacaactgcactaagtacagatcaagatgatgatgacgaatttggtgaaatgcatggtggagctgttcaacaagaacagaataccaataataaccatacatcatccaaagaaatcgatttactttccttttgagtgatattattggtttacacaatatgtaaatgttttataacaatagaaagtactttgtaacagg

SEQ ID NO: 1603 - DNA, 1628 bp, Saccharomyces cerevisiae
cattgcagaaggatttaccaatatttctaaagttaacgtaaccatggcaccggaaatttttgttaaattcaagtgtgcaagtagagacataaagctactatgggcgtccgtctttcttagacttctatcatatggtttaacaaatcaagttttgacgctttttttaaatgccatcaatatgacagaggataaaattgggctgtttatgtcattaacactggcaggggatgtaatttgctcttacattcttacttggtatgcggattcctggggccgaagaagagtcctagtttatggttgtgcaatgatgttgttaagtgggttggttttcagttttagcgaaaatttcaccctcttgctagtatttgctatcttcggtgttatatcgccttcaagtgatgaagtcgggcctttcaaatctatagaagaggccatgattgcacatctgagtcctcataatgcaagaccagagatttatgctattcacgccttggttggaacaattggaagcgctctaggtgcaataatttgtggtatatttgtagatcttttgaaaagaactggtttagctgctactgatttgcaatgttataaattagttttcttactgtatgccttcttcgccttttgcaaaatggtcatcatgctcttattatcagatgctacagaattggacgggcattatgaacatacagattgcaatgaagaaacagctgaaccattggacgttaacgatgaaactgcaccattaatgagacaagcaactcacccagaagaaagatccaacaaactatctaaggagaccgtttcggttttgatgaaattgttagtaatcttcatggtcgactctctcgggtccgggtttatgacaagtggctggatggtttactactatagtaagcaatttttgatgggatctctggcgttgggtactttatttttcatcacgcaactggttatggcatcttccaccatcccatcatcaataattgccagatgttttggcccagtaagagccacactattggtccaaattccatcagggatattttctattctcatccctatggccaagaattacttgcccttatctattttgtttttgaatctgcattttgcaacaactgccatggacgttacaccaaggcaaattctattaacaaatatcatcaaaccaagagatttaaccaaagttatgggggtggtcaacattggaaagacatttgctcggtgtgttggtccaatattcacgggtatacttgctaacaataattatttatggctatgttacatcattagtgggtccttggtgataacggcggatctaatactggcatgcatgtttttaggagtggacgctaaaattaaaaagcaaatgaaccgccattaatgcagcagcaaatgtagagtgacttagaaacatgtgtagatcatttcaaggaaacgttacgtttagagacaatgtaaatagtacccagttaaagtatctgacacacgaggaagtacaaccaatagcatttatatttacttgatagatttgcgtaagatatattatttaaaaattgatagtcctatttttttttacatcaaaagataagattgtattatgttataaatttaaacaatag

SEQ ID NO: 1604 - DNA, 760 bp, Saccharomyces cerevisiae
gtaacaatttacaacataatagagtatcgcattcagcaaaagtaaagaataaattctaagaaaatggctcaagccttgaactccaccaatattgcttttttcagagtagcatttttattcacgatcgccttcttttgtttaaagaacgttaattctattttgcaaaatacatatttcatagtcttaacgcaagcgatgaatttaccgcagttaacactgtcacgttatagtggtcaattgggtcttttcgctcttctgtttactcttaacggtgttcatgatctaattcccctgttagaaaacaatgttaaatacttccaatctgttgtgccagttagattactaattttttttattttgacaagtatctcgtacctttgggagtcaaacttttacgttcacaataactctgtttttatttactgttttgcagaagtttggataaattttcttttgtataatgccattagggaggagaaaaatgaagagttcaaaagattgaaccaattcatggttaatgatgaggatattgaagaaccccaaccatttaccgtgaagactgaaaccacagaaatcattgaaataatcaatgatgaagaaaatgacgatgaagatgggaaagataatgatgataacaatgagaaaggtaatgatgatagcgatgcaaaaaaataaaatgtttaatcgtttattttttctttcctttattcttatagtagatacctgtgtatgtatgtagatatagacataacgaagctga

SEQ ID NO: 1605 - DNA, 858 bp, Saccharomyces cerevisiae
atgctgcattgtgcgaggaggtatatgttagtcaggccacgtctcctgtggcaaagtgggacatgtgttgctcgtttccagtcgtcagtacgaacaccagctagcgaaccatcggcagagaaaggggtcgacgagtggcttgaagcgatcaacgagctaagggaagagttctctgcaaaagaatacctgccagagacctcgctggctccaccgggccagtccaaagtagacctcttacagggttcacaggcgggctccaagataaagccaactgcagagcagttggcacaatgggaggcactgaagtccgtgcccattcctccacgcaagaacgcaacgctggatcacatcacaaacatgatcatgcgccacggtaagaaggaaaaggcacaaaccattctgtccagggccttatatctggtgtactgccagacccggcaggaccccatccaggctttggaaaagtcactcgacgaactagctccgctgatgatgaccaagacattcaacacaggcgtggccaaggcttctgtcattcctgtgcctctgaacaagaggcaaagaaataggatcgcgtggaactggatcgtacaaagcgcaaaccaaagagtgtcgagcgacttcgccgtgcgtttgggagaagaactcactgccattgccaaaggcacttcgtctgcctttgaaaagagggaccagattcacaagacagccattgctcacagagcatatattcaattaaagtaatctagtctacgtaaacttgcctgtacataaacacatttatatgattttccgtataatctctttttatcggtcctggtagaaggcaatgcccacaccaagcagactgccccagaa

SEQ ID NO: 1606 - DNA, 3526 bp, Saccharomyces cerevisiae
ttaagtttaagcatcgaaaaactaacatctatagttaaaattagttctataaaggaagagcaatacagtacatagacaggaagaaaagaatgacatcgatttatacatcaacagagcctacgaattctgcttttactaccgaggactacaaacctcaattagttgaaggagtaaattctgtacttgtcattggatcaggagggctctctattggtcaagctggtgaattcgattacagtggttctcaagctatcaaagctctgaaggaagataacaagtttactatattggttaacccaaatatcgctactaaccagacttctcattccctggcggacaagatttattacttgcccgttacaccagaatacatcacatatatcattgaacttgaaaggccggatgctatacttttaaccttcggtggtcaaacaggtctaaattgtggggtggctctggatgaatctggtgttttggctaaatacaacgtcaaagttttaggtactcctatcaaaactttgatcacttctgaagatagggatcttttcgcatctgcgttaaaggatatcaacattcccatcgcagaatcatttgcttgtgaaaccgtggatgaagctttggaggctgctgaaagggtcaaatacccagttattgtcagatctgcatacgctttgggtgggttaggctcaggtttcgctaacaatgcaagtgaaatgaaggaacttgccgcacagtccttgtcgttggccccacaaattcttgttgaaaaatctttgaaaggttggaaagaagttgaatatgaagtggtcagagatagggttggtaactgtattacagtatgtaatatggaaaatttcgacccacttggtgttcatactggtgattctatggtttttgctccttcgcagaccctatcagatgaagagtttcatatgttaagatccgccgcaattaaaatcattagacaccttggtgttattggtgaatgtaatgtccaatacgctttgcaacctgatgggctagactatagagttattgaagtgaacgcacgtttatctcgttcctctgcattggcgtctaaggccactggttatcccttagcatacactgccgccaaaattgggctaggctatactttgccagaattgccaaacccaatcacaaaaactacagtggctaactttgagccatctttggattatattgtggcaaaaatacctaagtgggatctttctaagttccaatacgtggacagatccattggttcctctatgaaatcagttggagaagttatggctattggtagaaactatgaagaagcctttcaaaaagcattaagacaggtggatccatcattattgggattccaaggttctactgaattcggcgatcaacttgatgaagccttgagaactccaactgatagaagagtccttgccattggtcaggccttaatccatgaaaactatactgttgagagagttaatgaattgagtaaaattgataaatggtttctttacaagtgcatgaacattgttaatatctataaagagcttgaatcagttaaatctttaagtgacttgagtaaagatctcttgcagagagccaagaaattagggttttcagataagcagattgcggttactataaataaacacgcctccacaaacattaacgaactggaaatcagaagtttaagaaaaacgttaggtataatcccttttgtcaagagaatcgatactttggccgcagaatttccagcacaaaccaattatttgtataccacttacaatgctacaaagaacgatgtggagttcaacgaaaatggtatgctggttttaggctctggtgtctatcgtattggttcatctgtagaatttgattggtgtgccgtgaacaccgcgaagacattaagagatcaaggcaagaaaactatcatgataaattataacccagaaacagtttccacagatttcgatgaagttgatagattatactttgaagaattatcgtatgaaagagtgatggacatttatgagttggagcaatctgagggttgcattatttctgtcggtggtcaattacctcaaaacattgccttgaaactttacgataacggctgtaatataatgggtaccaatccaaacgatattgatagagctgagaacagacacaaattctcatctattttggattctattgatgttgaccaacctgaatggagtgaattaacatcagtagaagaagcaaaattatttgcttctaaagttaactaccctgtgttgattcgtccctcatatgttctttccggtgcggcaatgagtgttgttaataatgaggaggaactgaaggctaaattaactttggcatctgacgtttctccagaccacccagtcgtcatgtctaaatttattgaaggtgctcaagaaattgatgtggacgccgttgcttataatggtaatgtcttggtacatgccatttccgagcatgttgaaaatgcgggtgtgcactccggtgatgcttctttagtcttaccgccacaacatctttctgacgatgtgaagattgccctaaaagacattgctgataaggtcgcaaaagcttggaagatcactggccccttcaatatgcaaatcatcaaggatggggagcatacattgaaagtgattgaatgtaacattagagcttctagatcatttccattcgtttcaaaagttttaggcgttaattttattgaaattgctgtcaaggcatttttgggcggtgacattgtaccaaaacctgttgatttgatgctcaacaaaaagtacgactatgttgctactaaagttcctcaattttcctttacaaggttggctggtgcagatcctttcttaggggttgaaatggcatcaactggtgaagttgcttcatttggtagagatttaattgaaagctattggactgctattcaaagtaccatgaacttccatgtaccactacctccaagtggtatattatttggaggtgatacatctcgagaatacttgggccaagtggcttccatagtggccactattggttacagaatatacacaactaatgagaccactaaaacgtatctacaggaacacatcaaagaaaagaacgcaaaggtttctttgattaaatttccaaagaatgataagagaaaattgcgtgaactatttcaagaatatgacataaaagctgttttcaatttagcctccaagagagctgagagcactgacgatgttgactatattatgagaaggaatgctattgattttgctatcccattgttcaatgaacctcaaacggctttgttatttgcaaagtgtttgaaggcaaaaattgcagaaaagatcaaaattttggaatctcatgacgttatagttccaccagaagtccgttcctgggatgaatttattggtttcaaagcatattgattgtgcaaaagaaaaacctgcctctaattgtattactgtatattatataatggatttttttagagatatttttaatttca

SEQ ID NO: 1607 - DNA, 542 bp, Saccharomyces cerevisiae
gcaaacaaataaaacataattaatttataatggttcaagcagtcgcagtgttaaagggtgatgccggtgtctctggtgttgtcaagttcgaacaggcttccgaatccgagccaaccactgtctcttacgagatcgctggtaacagtcctaacgcagaacgtgggttccacattcatgagtttggagatgccaccaatggttgtgtctctgctggtcctcacttcaatcctttcaagaagacacatggtgctccaactgacgaagtcagacatgtcggtgacatgggtaacgtaaagacggacgaaaatggtgtggccaagggctccttcaaggactctttgatcaagcttatcggtcctacctccgttgtaggcagaagcgtcgttatccacgccggccaagatgacttaggtaagggtgacactgaagaatctttgaagactggtaatgccggtccaagaccagcctgtggtgtcattggtctaaccaactaatgttaatgataatatacttgaataaaaaccgtatgtaagtaagtagta

SEQ ID NO: 1608 - DNA, 1093 bp, Saccharomyces cerevisiae
acgaaatgaaaaaagacaaaacaaaagaagattaaaggtcaaacataaaggataacaccgacatgcatagaacggcaatatttctaacttaccgatcatgtatgagaaatttcagtacactgagtaaaacattaacggtttcttctggtaaagtaatcagaaacggtccatttaggagagtaattcgtgaaaagaaccaaataacgaaggcgccatcagtaaaagcatttaaagaaaatagcaatagcgggataataaaagtacatgatcctatagctactacgatacttaatgaaccgacagttattatcgaaaggcaaatagaatttatgaacgtttttctaggtttcgagcaggctaataggtatgccataatggatgtgaacggaaacaaaatagcatcaatgatggaaagagatttttctataacaaaggccataatgcggcagttttatcgtctacatcgtccttttttggtagatgtctttgataattggggaaatgtaataatgacgattaaaaggcccttttcgttcatcaattctcatataaagactatcatacctccttccgcgtatgttgataatggcagtgactccactcactatcacgacggtaaagaaggaacgacagtaggagagaccattcagaactggcatctctggaggcgtcgttacgaattattccagaaagatggagtagaaggatccacttttgaccaatttggtaagatagatgcacctttcttatcatttgattttcctgtaacagatgctgatggtaagataatggcgagtgtagacagaaattgggttggtttaggaagagaaatgtttaccgatactggtgtttatgttgttagatttgattcgcagagatgctttgataatatttatcctactgagatgctaagttctcaagtactaactttggatcaaagggccgtgttattagcaaacgctgtgtccatcgatttcgattatttttcgagacattccagacaaactggaggtttcctttcttttggcggtggctatgatgagtaggtgaattatatatttaaaagaattctgtaaatacatatttgactacg

SEQ ID NO: 1609 - DNA, 3457 bp, Saccharomyces cerevisiae
tttattccttcttaagatggataaaagtaagcagatgaacatcaacaacttgtccaacatccccgaggtgattgaccctggcatcactatcccaatatacgaggaagaatacgagaacaatggagagagtaatagccaactgcagcaacaaccccaaaagcttggatcatataggtcgcgagcaggaaaattttctaatacattgagtaaccttttgccctccatcagtgccaagttacaccattcgaagaaaaatagtcacggaaagaacggtgctgagttttcctctagcaacaacagttcccaatctacggtggcgtccaagacaccaagggccagcccttccaggagtaagatgatggaaagttctatagacggtgtaactatggatagacctggcagtttaacccctcctcaagacatggaaaaattggtgcattttcctgactcgagtaataacttcttaattcctgccccccgaggatctagcgactcgtttaacttgccacatcagatctcgaggacgagaaacaacacaatgtcttctcagataacttccatttcatcaatcgcccccaagcctcgtacttcgagcggaatatggtcttcaaatgctagtgcgaacgatcccatgcaacagcaccttttgcaacaattgcaacctacgacaagcaataatacaactaattcaaacacgctcaacgattattcgacaaaaactgcatattttgacaacatggtatctactagtggaagccaaatggcagataataagatgaatacgaataacttggctatcccaaactctgtttggtcaaataccagacagagatctcaatccaacgcgtctagcatatataccgacgctccactgtacgaacagcccgctcgtgccagtatttcatcgcactatactattccaacacaggaatctccattgattgctgatgaaatagatccgcaatccatcaattgggtaacaatggaccccactgtaccatcaataaaccaaatatcgaaccttttacccacaaataccatttctatttccaacgtttttcccctacagcaccagcagccacaattaaataacgcgataaacttaacaagtacttccttggcaaccctatgctccaaatatggtgaagtcatatctgctaggactttaaggaatttaaacatggctttagttgaattttcttccgtggaaagtgccgtaaaagccttagatagtttacagggcaaggaggtatctatgattggagcaccaagtaaaatttcatttgccaaaatcttacctatgcatcaacaacccccacaatttcttctcaattctcaaggcttgccattgggtttagaaaacaacaatttgcaaccacagcctttattacaggagcagttattcaatggagctgtgactttccaacaacaaggaaatgtttctatacctgtatttaaccagcaatcacaacaatcgcagcaccaaaaccatagttcgggttctgctggttttagcaatgttctccatggttataataataacaatagtatgcacggaaacaacaataactcagcaaatgaaaaagaacaatgtcctttccctctaccaccacctaacgttaacgaaaaggaagatttgttaagagagatcatcgaactttttgaagcaaattccgatgaataccaaatcaattcgttgataaaaaaatcgctgaatcacaaaggcacttccgatacgcaaaactttggacctttaccagaaccattgtctggcagggagttcgatccaccaaaattacgcgaattgcgaaaatcaatcgattcaaacgcattttccgacttagagatcgaacagttggctattgcaatgcttgacgaattgcccgaattgagttcagattacttgggtaacactatcgttcaaaaattatttgaacattcatctgatattattaaagacatcatgctgaggaaaacaagcaaatacctaacctctatgggtgttcacaaaaacggaacatgggcttgtcagaagatgatcactatggcgcatactccgagacaaatcatgcaagtgacgcaaggggtcaaggactactgtactccattaatcaatgaccaattcggaaattatgtcatacagtgcgttttgaaatttggattcccctggaaccagtttatttttgaaagtataatagctaatttttgggttattgttcagaatagatatggtgcaagggcagtcagagcttgtttagaggcacatgacattgtaactcctgaacaatcaatagttttgagtgcaatgatcgttacatatgctgaatatctaagcactaatagcaatggtgcgttgttagtaacgtggtttttagatactagtgttttacccaacagacattctatcttggcaccaagattgacgaaaagaattgtagagttatgtggccacagattggcttctttgactattttgaaggtcttgaattacagaggggatgataacgctagaaaaatcatcctagattccctatttggaaacgtgaacgcacacgattcttcgccaccaaaggaattaacaaagcttttatgtgaaacaaattatggcccaacctttgtccataaagttttagcaatgccattattagaagatgacttaagagcccacatcattaaacaagtcagaaaagtattgacggattctactcaaatccaaccaagccgccgtttattggaagaagtcgggttggcatcaccctctagtactcataacaagacaaaacaacaacagcagcagcatcataacagcagcatttcgcacatgttcgccactcctgatacttctggacaacacatgagaggtctttctgtttctagcgttaaaagtggtggatctaaacataccacaatgaacaccacgactacaaatggttcttctgcctctacattatccccgggccaaccattgaatgccaattctaattcttcaatgggctattttagttatcctggcgtcttccctgtcagcggcttttcaggcaacgccagtaatggatatgctatgaacaacgatgacttaagttcccagtttgatatgctaaactttaataacggaacccgtttatcgttgccacaactgagcctaactaaccataacaacactactatggaattagtaaacaatgttggctcctcacaacctcatacgaacaacaacaacaataataacaacacgaactataacgacgataacaccgtttttgaaactctgactttacactctgcaaactgacgtccccatgttttcttttatttccgtcatcattgggagaccacgccgttttcttctcatacctgcatccattcaaaactatctcatttacccccaacggttttatggttcaaatcctaatagaatatgagcgagctaatgaagaatttgggcattttcattact

SEQ ID NO: 1610 - DNA, 1015 bp, Saccharomyces cerevisiae
agaaaattatagaaagcagtagataaaacaatgttgaaggatttggttagagaaaagcttttgacaattatgaataccaaagcgtatactcaatttaatccagaacaattactgcaactagaaaatgaaatgaaaatttacatgaaaagcggagactctgcactaacagaaggaaactatttcttcttgatggaaatgcttttctatgttttggtgtaccgaaaccaagacgttgatgcgcaagttgtttataatacattaagagatcgtcttggtgaaaattcgtataaaatggtaatcatgaaagccactttattgcagataaacggaaatgataaaggcgctattgaatatctggaaaatttgttgaatgatgatctggagtatgaaacggacttcgttacttatgtctctattgcaaagaaattgatagctatcaagacaacttccaagaacttgagccaagaaagtgttcttaaagaagtggtagctcttacagataaattcccgcttgatgcagaattgtggtggtatgccagcgagatttatttcgaaatgggccaatttgaaaaagcctgttattgtttggaacaggtcctatgtattacaccattcaattacgcttgttttggtaggctaagtgagactctgtattatgaggctctacgtagcaagaaacaaaccaagaccgagctcttggaaaaggcattaaagaatgctttgaggagcgttgaacttagcgaactatacctaaaagggtgggcattggttaacatcatttctcgcgaactgggacgtaataaacaaaatgacttgatcaaactatctgcatcgaagctaaaggaaatttctgcgaagtctaacaataaagataagattaccgctgaattaattttgaataagatatgaacggagccaaaattagaagaaaaaaaaagatagggtgagagaggatatgaaaaagcatgtatattttttttttttttggattctattactatcattacataagcgt

SEQ ID NO: 1611 - DNA, 386 bp, Saccharomyces cerevisiae
gagaaaggaacatcagatcacactatggaacatccagcatatacattgagtcttttgactacagccggtggccttatgggatactaccgtaagggctccattccatctctagtatctggcttagtattcggtagtgtatatgggattgccggttacttgctacatatgaatagagatggtgggctcgaaatggcattgggtgcatcgaccttactacttggtgctggtgtcataagaggcatgccttccaggttcactaaacctgtccctgtcgttttgacagctttgggtgggctcggcagttactactattataacaaatacaaggaattttacccttagagaaggaagaagacgcacgatatatatacgaccctatatatata

SEQ ID NO: 1612 - DNA, 1328 bp, Saccharomyces cerevisiae
acaaaacagaagcacagaaaaggatatccacccatcatgataagcccaagggtgaatactcgagtttggcagagatcaatttctcttttgagcccacaagcggccaagacggagagtaatgtcgtaactaaagaaaggacatatatcgagaacttaagcaaggatattgcgacttcccgtttcaggctagtagacgaaaatggtaaaattgcatctatcactgttcaaccagatattccaatttgtatcaaaaaggattgcctagtttccattcacaatttgaaccatttatccctttcctataaatggctgaatttttggtcaaacctgattaaatttcgttcattcaaatcttcattgtttcatagaattattggatcctccgttttagaaattctggctgccccaaactttcaaacatcgagaagacctttcgattcttcaagaagcttgtccgtactgaatttgaccgggacaaaggattggaatgtatttggcaaggattcaattatcgcatttgaacagaactccagtctggaaatcaaatcgcctatctttccctctgcaaggtctttagtctcgaactcatcaaaatcacaactaccacggaaatttcaaattctgaatgggagaggaaatgtgttagtatgtggaggtgggttggtatattcaattgagttaattgatgaaagcgacaaaattctggttaattccagaaacattttggccatcaacggccaaagtcaattggatattgcaaattcagtggagagacaagagttacacgtggaaggcgcgtacgtcggagattcaagtaatgatacggtggcacctaaattcattaagaaccaaacgctaaaatctgcttacggacatactgttcaatttttcaaaagaatgcgcagttggatccgtaaccagtacgaaaaaagatacatttatggtgtcgactcgtactttatgaagattaaaggtccaagaacaatattgattcaaacgcatgaaatgacaacatccaaagataatattctaactaaactaacgtccaagggccacgttaagaagagcaacgtgaatgataacggtgtcaatttagagaaacaagtggctaacgatgtaaattcaaagatcattgagcttgccaacagaccctcactgtttattgcgaccgtctcgcaagatgggagggttgattttcaaagtacttcgaagttcacataaaaaacattgtttataatatctttctggcctccttgtctatacataaaaattgaagaaaggcagcatgtagtacacagcacatgcatatatgtatgtatatatgtata

SEQ ID NO: 1613 - DNA, 1211 bp, Saccharomyces cerevisiae
tgatctgcaagaagaagaactacaaagatcaaaaagtctcatctcaccatgtctgtgtctgctgctcctgctattccacagtactctgtctctgactacatgaaattcgccctagccggcgccatagggtgcgggtcgactcactccagtatggtcccgatcgatgtcgttaagacgagaatccaactggaacctaccgtgtacaacaagggtatggtcggctctttcaagcaaatcatcgccggagaaggtgctggtgcgttgttgaccgggtttggtcctactttgttgggttactctatccaaggtgccttcaagttcggtggttacgaagtgttcaagaagttcttcattgacaacttgggttacgataccgcctctcgctacaagaactctgtttacatgggttctgctgccatggccgaattcttggcagacattgccttgtgtcccctagaagccactagaatcagattggtctcccaaccacagttcgctaatggactcgtcggagggttttccagaattttgaaagaagaaggtatcggctctttctacagtgggttcactccaattttgttcaagcaaattccttacaacattgctaaattcttggtctttgaacgtgcctccgagttctactacgggttcgccggtccaaaagaaaaattgtcctctacttccactactttgttgaatttgctttccggtttgactgctggtttggccgctgccattgtttcccagccagcagacactctgttgtccaaggtcaacaagactaagaaggctcctggccaatccacagtcggtttgttggctcagttggccaaacagttaggatttttcggttcctttgctgggttgcctactcgtttggtcatggttggtaccttgacctccttgcaatttggtatttatggttctttaaagagcactttgggttgcccaccaaccattgaaattggtggtggtggtcattagaaatggtcttgattgatacatgcatatatattctctcctcatcaccaccggagccccttttttttttcatattctaagaaagagtcaacaaaggaaagaaataaataaatctgtttaaatgtactctattcaatcactagtattcttattccatgtatttactgactttgcaaaagtccaaatatctgtaaattaacatgctattataaatatatatatatatatat

SEQ ID NO: 1614 - DNA, 1410 bp, Saccharomyces cerevisiae
cgtttagaaagtcaatcatcacaaggcctaaagttgctaaccaccagccatgtccggaataattgacgcatcttctgcattaagaaaaagaaagcatttgaaaagaggtataaccttcactgtgatgatcgtgggccagtccggatctggtagatcgacttttataaatactttgtgcggtcagcaagttgtagacacttcgacgacaatcttgttacccacagatacgtccacagaaatagacttacaattgagagaggagacggtcgaattagaagatgatgaaggtgtcaagattcaacttaatatcatcgatactccgggattcggtgattctctcgacaattctccatctttcgaaatcatttccgactacattcgccaccaatatgatgaaatcttattggaagaaagtcgtgtgagaagaaacccaagatttaaggacggcagagttcattgttgtctttacttaatcaacccaactggccacggtttaaaagagattgatgtggaattcatcagacagttgggatccttagttaacatcatccctgtgatcagcaaatcagattccttgacaagagatgaactgaaactgaataaaaaattgatcatggaggatatcgacagatggaacttgccaatttataatttccctttcgatgaagatgaaatatcagacgaagattacgaaaccaatatgtacctacgtacacttctaccttttgctattattggatccaatgaagtttacgaaatgggcggcgatgttgggacaattcgtggcagaaagtatccatggggcatactggacgtggaagattcatcgatctctgattttgttatcttaaggaatgcgttattgatctctcatttacatgacttgaaaaactacacacatgagatattatatgaaagatatagaaccgaggcattatcaggtgaatctgtcgcggcagaatccatacgtccaaatctgacaaaattgaatggttcgtcgtcatcgtccaccacaacaaggagaaacacaaatcccttcaagcaaagtaataatattaataacgatgttctcaacccagcatccgatatgcacgggcaaagcactggcgaaaataacgaaacctacatgacacgtgaggagcaaatacggttagaagaagagcgactaaaggcatttgaggagagagttcagcaagaactgctgttgaaaagacaagaactgttgcaaagagaaaaggaattaagagaaattgaagccaggttggaaaaagaggcgaaaatcaaacaggaagaatgagtccgcttttggcttcctcacttatttcttctttctctatatatataaagagtgagtgttgtatataagtaaatacatctggtatattattttttttttttcttcattcttaa

SEQ ID NO: 1615 - DNA, 711 bp, Saccharomyces cerevisiae
tgaagacaacaagaatagcgcaagtcaagcgatgaaggagtcagtccaagagatcatccagcaactcatccacagtgtcgatttacagtcttccaagttccagctggccattgtgtgcacgatgttcaatcctatcttttggaacatcgttgcaagaatggaataccacaagcattctctcaccaagatgtgtggtggggccagaaagggctgttacatgttggcggcgaccatattttcgctaggtatcgtcagagacatggtgtacgagtctgcattgcgtgaacagcctacgtgttctctgatcacgggcgagaactggaccaagctgggtgtggctctctttggtttggggcaagtgcttgttttgagttccatgtacaagctgggtatcacagggacgtacttgggtgactatttcggcatcctgatggatgagagagtcaccggcttccccttcaacgtttccaacaaccccatgtaccagggttccactttgtccttcttgggcatagccctttacaaaggaaagcctgcggggctggttgtttctgccgtagtttacttcatgtacaagatcgctcttcgttgggaagaaccttttactgccatgatctacgctaaccgtgataaggccaaaaagaatatgtaagtgctctatttctatatattctataatgttagaagcctatgctattaccgtttctatat

SEQ ID NO: 1616 - DNA, 1221 bp, Saccharomyces cerevisiae
aacaactacaaaacgcaataacgacacagcaagaatgagtctcagcacaatcatatgtattggtatggccggatccggtaaaacaactttcatgcaaaggttaaactcccacttgcgggcagagaaaacgccaccatacgtaatcaatcttgatcctgcagtattgagagtcccctatggtgcaaacatcgatatcagagactcaatcaaatacaagaaagtgatggagaattaccagctaggtccgaacggtgccattgtcaccagtttgaatttgttcagcaccaagattgatcaagttattaggttggtggaacagaagaaggacaagttccaaaactgcatcatcgacactccaggccaaatcgaatgttttgtgtggagtgcgtcgggtgccattatcacggaatcttttgcctccagctttcccacagtgattgcatatatcgtggatacgcctagaaactcatccccaactacattcatgagtaacatgctgtacgcctgctccattctgtataagaccaaacttcccatgattgtcgttttcaacaagaccgacgtgtgcaaggcagattttgctaaggaatggatgacggattttgagagtttccaagcagcaatcaaggaagatcaagacttgaatggtgacaatgggctgggctccgggtacatgagctcattggtcaattctatgtcactgatgcttgaagaattctattcccagctagacgtcgtgggcgtttccagttttaccggagacggattcgacgaatttatgcaatgcgtagacaagaaagttgatgaatacgaccaatactataagcaagaacgtgaaaaagcattgaacctaaaaaagaaaaaggaagagatgagaaagcaaaaatcattgaatggcctgatgaaggatctagggttaaacgagaagagcagcgctgcagccagcgacaacgacagcatagatgccattagcgacctcgaagaggatgccaatgatggtcttgtggatagggatgaggacgaaggcgttgagagagaatacacgttcccaggcgaagaaagaacaaaaggtgaggtcaacgagaactctgctccagacctacaaaggagatatcaggaagctatgcaacaagtagggaaaacggccagtagcgagactgcagaaaatatcgcgaagtatattagaaactaaataactacgtatagtcctttggttcggcg

SEQ ID NO: 1617 - DNA, 1086 bp, Saccharomyces cerevisiae
atgtctactaactttgaaaaacatttccaagaaaacgtcgatgaatgcactctagagcaactaagggacatcttagtcaacaagtccggcaaaacagttttggccaacagatttagagctctgttcaacttaaagactgttgctgaagaatttgccactaagccagaggaagccaaaaaggccatcgaatacattgccgaatccttcgtcaatgacaagtctgagttgttgaagcacgaagtggcctacgtgttgggtcaaaccaagaacttggacgctgctccaactttaagacacgttatgttagatcaaaatcaagaaccaatggtgagacacgaagccgctgaggctttgggtgccctaggtgacaaggattcgttggatgacctaaataaggctgctaaggaggatccacacgttgctgtgagagaaacctgtgaactggccattaacagaatcaactggacccatggaggtgccaaggataaggaaaacttgcaacaatccctatactcgagtattgacccagccccacctctaccattagaaaaggatgctaccatcccagaactacaggccttattgaatgatcctaagcaacctttgttccaaagatacagagccatgttcagactgagagatatcggtactgatgaagcaatcctggccttggccactggtttcagtgcagaatcctcccttttcaagcatgaaatcgcctacgtcttcggtcaaataggtagtccggctgctgtcccaagtttgattgaagttttgggcagaaaggaagaagctccaatggttaggcatgaagctgctgaagccttgggtgccattgcttctccagaagttgtcgacgtcttgaaatcttacctcaacgatgaagtcgatgtcgtcagagaatcttgtatcgttgcgctagatatgtatgattacgaaaacagcaacgaactagaatatgctccaactgctaattagaagaatcagcatcatcaataatgatagtaacaataatcattgtataatcttgtattttatacttttcaaaacccgccatttccgttatatatacaaatgtatcaaata

SEQ ID NO: 1618 - DNA, 755 bp, Saccharomyces cerevisiae
actcacatagagatatctaaaaacgaacgatagcagaatgagcaacaacgaaattgtatttgtcactggcaatgccaacaagttaaaggaagtgcagtcgattttgactcaagaggtcgacaacaacaacaaaaccatccacttaatcaatgaggccttagacctggaagaattgcaggacacggatctgaatgccattgcgttagctaagggaaagcaagctgttgcggccttgggtaagggtaagccagtgtttgtggaagacactgcgttgagatttgacgaatttaacggtctaccaggtgcttatataaaatggtttttaaagagcatgggattggaaaaaattgtgaaaatgttggaaccctttgaaaataaaaacgctgaagcagttaccaccatttgttttgctgattctcggggtgaatatcacttctttcaaggtattacaagaggcaagatcgttccaagccggggacccactacattcggctgggattcaatttttgaaccttttgatagtcatggactgacttacgcagagatgagcaaagacgcaaagaatgctatttctcatcgtggtaaagccttcgctcagtttaaagagtacttgtatcaaaatgacttttaggtgatgtgctgagaagataagaggaattatggatagatttttttttttttattcttactttatgtcgcctctatattcaattatataaagatgcctgtatattagagttgggatattttaacca

SEQ ID NO: 1619 - DNA, 525 bp, Saccharomyces cerevisiae
gatgtcgaatacttgggacgatgtatgggcatcagacagtgatgtcgaaactgaacgatctccagatttagtgaagttaagagagaatcatagcaagagggggtacttggacggaatagtgagttctaaagaagaaaagctgcaagagggtttcaatgatggtttcccaacgggcgctaaattagggaaacaagttggcataattatggggattttacttggcctacgaacacgttttggtgatgaagatgaggacctcagtaaggcatatattgatgctcaaaaagaattacgcattaacaaagtacttagtaagtccatatttgatccaaactttgacttgcaagaaaaacatccgctcataacaaaatggactgatattgccaatacctattgtgaaaagtaccatgtgccatctatccaataaagttgttttaaatggagttgatttcacaatttatgtaccttatatcatccttcatttcacataatgacgagatattacaaaaataatgataataataa

SEQ ID NO: 1620 - DNA, 1490 bp, Saccharomyces cerevisiae
aagaaattaggattcaatgtcatacttaaacaatcccgctgttgtcatggacaatggtaccgggctgaccaagctcggtttcgccggtaatgattctccctcctgggtcttccctactgcaatagccacagctgcaccttcaaatacaaagaagtcctcgggcgttggtgcgccctcagcagttagtaatgaagcatcatactttggaaattccacctctgcaaccaatttcaatggtgcaacaggtggtttgctgtctaataatttatccggtaaaagaggtacagaagatttggatttctatattggaaatgaggctttagtagcatcccaaggaccctcttactctttgagctatccaatcagacacggtcaagtggaaaattgggatcacatggaaagattctgggaaaattccatcttcaagtatttaagaacagagcctgaagatcattttttcctattgaccgaaccaccactgaatcctccagaaaacagagagcaagtggcggagattttttttgaatcatttaattgtgctggtctatatattgctgtgcaagcagttttggctctggctgcgtcatggacctcttcaaaagtcacggatagatcattaactggtactgttatagattctggtgatggtgtcacccacgtcatcccagtggcggaaggttacgtcattggctcagcaattaaaaacattccaatagccggtagagacatcacattgttcatccaatccttgctaagagaacgtggtgaagcagacacttccttgagaactgccgaaaagattaagcaagaatactgttacgtctgtccagatattgtaaaggagtttaacaaattcgataaagatccttctaaatttgcccaatttgtggtggaaaaccaagaaaagacaaggagaaaagtcgtagatattggttacgaaagattcttagcacctgaaatcttcttcaatccagaaattgcatcctcagacttcttgactcctttacccacggtagtggatcaaactatccaggcttgccctattgacgtccgtaaaggtttatacaacaatattgtactatcaggtgggtctaccatgttcaaagattttggacgtcgtttacaaagagatctaaagtctatcgtaaataacagaatcgcacaaagtgagctgttaagtggaactaaatcgactggtgtagatgtttccgtgatttctcatcggaagcagagaaacgctgtctggtttggtggctcgctgctggcacaaacagccgaattcaaaggctactgtcacactaagaaagattatgaggaatatggtccggaaattgttagaaatttcagccttttcaacatggtttgattattgagtcatgactcatcttataaggaaaaaggtacaaaaacaaatgcaaataactgaaacgcccctcacttcatttaaatatacgtatacaactgattatatacacgtatatgtacaatca

SEQ ID NO: 1621 - DNA, 1450 bp, Saccharomyces cerevisiae
agtgaatgctaatagacgcaattcatggtgctaagatgagcacaaaacttttagtatcactaaaggtactagtaattcaactcaatccgcaaattgggcaagtagatcaaacaattaagagaacatggtcaatattggataaagttacgaaaagtgccacctatgtgaaaccagacataatactattccccgaatttgcattgacaggttacagttttcatgccagaaaagatattttaccttatgttactaagaaagatgaagggccctcttttgaactggctaaatcaatatccgagaaatttcaatgctacactataataggatatcctgaagatgatgatgaacagaagctatacaattctgccctggtagtaaatccgcagggggagcagatctttaattacagaaagacttttctctatgatacagaaatgaattgggattgcgaggagaatccagagggatttcagacgtttcccatggatttttcaaagtgtgctaagctttctaatgaggactcttacaacagagatgtgactttgaaagcatcaataggtatttgtatggacttaagtccctacaaattcatggccccctttaatcactttgaattctcttctttttgcgttgacaataatgttgaattgattctatgtccaatggcgtggttaaactctacttctatcacagacaaacagacgttacataacaattcattattagaagccgctaagaacaaaatagctttcgctttaaaggagcaagggttgcctttggcaggatctcaaggaatttaccagcttaaaattggtgattcgcaacgtacgcccagagtgccttctgacgacagtacaagtgaatataaggatatggatgaaccagatatgtcaaacgtaaactactggattctacgattttttccttttttgtactttaaatccagaattaattggtttaaaaattcatctcttatcgaaagcattttgggcaaaactagaatgcccctagatcatgaatattataaagatggaaagcacaaggaggacacaatagacttattggattctgaggaagtgataaaggatacagtactggaaaagacatttttgggaacctcccttggacagccttggaagttccaaggaaagaatgcgattttggtgctagctaacagatgtggtactgaagatggtaccacgatttttgcaggaagttctggcatttataaatttaacggtaaaaaacctaaaggttcacaggatgatgatgagagttcgcttgattctctcaatgaaagcgtagagttgctgggtaatttgggcaagggtctagaaggcgctatattgcgtgaggtccaatttgaagtgtttaggtgaaggaatattataataaattagacattataaattaataaggttacacgcatatttatgttattgaaatgtcg

SEQ ID NO: 1622 - DNA, 537 bp, Saccharomyces cerevisiae
tgccttgagatagcgtttggtgctgttattttgtgaagaacggagacttgtttgctgtaagggataaaaaaaatggcagtacagtttatactgtgctttaataagcagggtgtggtgcggttggtgagatggttcgatgtacacagttcggatcctcagcgtagccaggatgccattgcgcagatttatagactcatatcttccagagatcataagcatcagagtaacttcgtagagttttccgattcgacgaaactcatatacaggaggtatgcgggtctgtattttgtcatgggtgtggacttacttgacgatgaacccatatatttgtgccacatccatctgtttgtggaggtgctagatgcatttttcggcaatgtctgtgaactggatatcgtattcaacttttacaaagtctatatgataatggacgagatgtttattggaggggaaatacaagaaatttcaaaggatatgctgttagaaagactaagtattttagatagactagactaggatatatgtacagatcctcct

SEQ ID NO: 1623 - DNA, 1774 bp, Saccharomyces cerevisiae
ccctaaataagtagagtaaaagctcttgagatgaaggagaatgacatgaataatggcgtagataaatgggtaaatgaggaagatggtcgaaatgatcatcataacaacaataataacttgatgaagaaggccatgatgaacaatgagcaaattgatagaactcaggatatcgacaacgccaaagaaatgttgaggaaaatatcaagtgaaagcagctcgcgcagaagctccctgttgaataaagattcatctctcgtgaacggcaatgcaaacagtggcggtggtacgagcattaacggaacaagaggaagttctaagagtagtaatacacactttcagtatgcctccacggcgtatggtgtaagaatgttgagtaaagatatatctaataccaaagtggaactggatgtggaaaatttgatgattgttacgaaactcaacgatgtctcactgtatttcttaacaagagagttggtagaatgggttttggtacattttccacgtgtgactgtttatgtggattccgaattgaaaaacagcaaaaaatttgccgctggcgagttatgtgaagatagtaaatgtagagaatcaaggatcaagtattggacaaaggatttcatcagggaacatgatgttttcttcgatttggtagtgactttgggtggcgacggtactgttctttttgtaagttccatttttcagagacatgtaccacccgttatgtcgttttcattagggtctctaggatttttaacaaattttaagtttgaacatttcagggaggatttacctcggattatgaatcataaaatcaagacaaatttacggttgaggttggagtgcacaatttatcgtagacaccgccctgaagtagacccaaacacggggaagaaaatatgtgtggtggaaaaactaagcacacaccacattttgaacgaagtgaccatcgatcgtggtccaagtccttttctatccatgttagaattgtatggtgacggctcattaatgaccgttgcgcaggcggacggactgattgctgctactccgactgggtccacggcctattctttgagtgcaggtgggtcattggtatgcccaaccgtcaatgcaatcgctttaacacccatttgtccacatgcattgagtttcagacccatcatcttaccagaaagtataaatttaaaagtgaaagtctcgatgaagtcaagggctccagcatgggcggcttttgatgggaaagatagaattgaattgcaaaaaggtgattttataaccatatgcgccagcccatatgcttttccaaccgtggaagcctcgcccgatgagtttattaacagtatcagtcgacaactaaactggaatgtgagggaacaacaaaagtcctttacgcatattttgtcccaaaagaaccaagaaaaatatgcacatgaggcgaacaaagtcagaaatcaagcagaacctttagaggtaataagagataaatactctctggaagcagacgctactaaggaaaacaacaacggaagcgatgatgagagcgacgatgagagtgtaaactgcgaagcttgcaaattaaagccttcgagcgtcccaaaaccttctcaagcaaggttttcagtataatgttacatgcgtacacgcgtttgtacagaaaaaaaagaaaaatttgaaatataaataacgttcttaatactaacataactattaaaaaaaataaatagggacctagacttcaggttgtctaactccttccttttcggttagagcggatgtg

SEQ ID NO: 1624 - DNA, 604 bp, Saccharomyces cerevisiae
catacacctatttcattcacacactaaaacatgtctgacgaagaacacacctttgaaaatgctgacgctggtgcctccgccacctacccaatgcaatgttctgccttgagaaagaatggtttcgttgtcatcaaaggtagaccatgtaagattgtcgacatgtccacttccaagaccggtaagcacggtcacgccaaggtccatttggttacccttgatatcttcactggtaagaagttggaagatttgtctccatccactcacaacttggaagttccatttgtcaagagaagcgaataccaattgttggatattgatgatggctacttgtccttgatgaccatggacggtgaaaccaaagacgatgtcaaggcaccagaaggtgaattgggtgacagcatgcaagctgctttcgatgaaggtaaggatttgatggtcactatcatttctgccatgggtgaagaagctgccatctccttcaaggaagctccaagatctgattagatattttagatttctatagcttacaaaatacgcgatgtttttttgatctagaaatcttatttatacattttatataatattataataatcataatcataa

SEQ ID NO: 1625 - DNA, 2302 bp, Saccharomyces cerevisiae
catacgttgctgtcctcctctgcctgctgtacatatcgacgccccgctgctcaccaacctttgccagagtgacaacttttgtatttacgacccatttaatataattaagactacacaaatctcatattatacgcaccaagatgcttgctgctaaaaacatactaaacaggtcaagcttgtctagctctttccgtattgccacacgtttgcagtcaaccaaggttcaaggttccgtcatcggtatcgatttgggtaccaccaactctgcggttgccattatggaaggtaaagttccaaaaattattgaaaacgccgaaggttccagaactactccttctgtagtagctttcactaaagagggagaacgtttggttggtattccagccaagcgtcaagccgtagtgaacccagaaaacaccctatttgctaccaagcgtttgattggtcgtcgtttcgaagacgctgaagtgcaaagagatatcaagcaagttccatacaagatcgtcaagcactccaacggggatgcttgggttgaggccagaggtcaaacttactcaccagcccaaatcggtgggttcgtcttgaacaagatgaaggaaacagctgaggcctacttgggtaagccagttaagaatgctgttgtcactgtcccagcttatttcaacgactctcaaagacaagctactaaagacgcaggccaaattgttggtttgaacgttttacgtgtcgtcaatgaaccaaccgccgctgccttagcttacggtttggaaaaatccgactctaaagttgttgccgttttcgatttgggtggtggtactttcgatatctccatcttagatattgacaacggtgtttttgaagttaagtccactaacggtgacactcatttgggtggtgaagatttcgacatctatttgttgagagagattgtttctcgtttcaagaccgaaactggtattgatttggaaaatgaccgtatggctatccaaagaattagagaagctgctgaaaaggctaagattgagctatcttctaccgtttccactgaaatcaacctgccatttatcactgctgatgcctcaggtccaaagcatatcaacatgaagttctccagggctcaattcgagactttgacagccccactagttaagagaactgtcgacccagtcaagaaggctttgaaagacgccggtttgtctacttcagacatatctgaagtcttattggtcggtggtatgtccagaatgcctaaggttgtcgaaaccgttaaatctttgtttggtaaggacccatctaaggccgtcaacccagatgaagctgttgccattggtgctgctgtgcaaggtgctgtcttgtccggtgaggttactgacgtcttattattagatgttaccccattgtctctaggtatcgaaactttaggtggtgttttcacaagattgattccaagaaacactactattccaacaaagaaatctcaaatcttctccactgccgctgctggtcaaacttctgttgaaatcagagttttccaaggtgaaagagaattggttagagacaacaaattgattggtaacttcactttagccggtatcccacctgctccaaagggtgtcccacaaatcgaagtcacttttgacatcgatgccgatggtattattaacgtttctgctagagacaaagctacaaacaaagattcttctattactgttgccggttcttctggtttgtccgaaaacgaaattgaacaaatggttaacgacgctgaaaaattcaagtctcaagatgaagctagaaaacaagccatcgaaactgccaacaaggctgaccaattggccaacgatactgaaaactccttgaaagaatttgaaggtaaggttgacaaggctgaagcccaaaaggttagggatcaaatcacttccttgaaggagttggttgctagagtacaaggtggcgaagaggttaacgctgaggagttaaagaccaagaccgaagaattgcaaacttcctcgatgaaattgtttgaacaattatacaagaacgactctaacaacaacaacaacaacaacggcaacaatgccgaatctggtgaaactaagcagtaaaaagcaaattcctgttaataaattactaccacaatgttaaactagaaagaatgacaaaaaacataataataactaaccagtatttttgtttctttattttttaagaacatttatatacataatatacacgccccaaacatatatcgtttatataagtactgtttcctcgcattaagcgggaaagccatgtatctctt

SEQ ID NO: 1626 - DNA, 644 bp, Saccharomyces cerevisiae
tatcggcgcatatttatcaaatctaaaaggcaaagaatcttaatacataaaatcccagacggttatgatggaattcaaagtgtcaccattgacaaagattatttctctgtcaggattcctcgcattgggattccttttggtcatactaagctgcgcattattccataattactacccactattcgatattttgatctttttgcttgccccaataccaaacacaattttcaatgcaggaaataaatatcacacatctgacttcatgtccgattcatcaaacactggccaagatctggctcacttccttacaggaatgctggtgacaagcggtatagcactccctgttgttttctatcattgccaattgattggccatttgagttgtatcatgtgcatgatcggtggtcttatcatatattctagtattgttatttttaaatggtttttcaaaaaagatttcaacgaagatgattccctttttggttaatatataacaattactcatcccctcaacagactaagccaactgggtgcgtgaaccgtacattgatattatatagtatgatactctactcaaggtgggaaatctggcgtcgatttctccttttttttagaactacttaaatataatagattacataaaa

SEQ ID NO: 1627 - DNA, 3786 bp, Saccharomyces cerevisiae
ctgtctaagatttagcttgccatcaattatctttggaaaaacagagagtatactgcactttttgataatatgggtgatcttacagaagaactatctatcccagacaatgcccaagatttgtcgaaattactacgttcgacgagcacaaaaccccatcaaattgccgagatagtttcaaaatttgataaattagaaacctactttccaaaaaaagaaattttcgtcttagatttactcattgataggctcaacaatggaaatttggatgattttaagaccagtgaacatacttggataattttcacgagattattagatgctattaatgatccaatttcgataaaaaaactactcaaaaaattgaagactgtgcctgtaatgataagaacatttttcctttggcctaaagacaaattacttacacgtagcgtttcgtttataaaagcattttttgcgattaatgactacttgattgtcaatttttctgttgaagagtcttttcaacttttagaacatgccataaatggattaagttcgtgcccgacgactgactttgcgctttcatacttgcaagatgcctgcaatctaactcatgttgacaatattactacaacggataacaaaattgctacttgttactgcaagcatatgctactaccaagtttaagatatttcgcacagaccaaaaattctgcatcttcaaaccaatccttcattcgtctatctcattttatgggaaagttccttttacaaccacgcatagattacatgaaattaaataaaaagtttgtccaagagaatgcgtccgaaattaccgacgatatggcttattattattttgccactttcgtcactttcttatcaaaagacaattttgctcaactagaagtcatctttacaattttaggtgccaagaaacctagtttagaatgcagatttctgaatcttttatcggaatcgaagaaaaccgtatctcaagagttccttgaagcattattgcttgaaatgttagcgtcgactgatgaatctggagtgttatcattaataccaattatccttaaattggatatcgaggttgctattaaacatatttttcggttacttgaattgattcagctcgaaaatttgaacgatcctctcttttcctctcatatttgggatttaataatccaatcacacgctaacgcaagggaattatcagatttttttgccaaaataaatgagtactgttccagaaaaggacccgattcctattttttgataaatcatcctgcatatgtcaagtctataacgaagcaattgttcactttatcttctttacaatggaaaaatctattgcaagctttacttgaccaagtcaatcacgattccaccaacagggttcctttatatttaatacgcatatgcttggagggactatcagagggcgcatcgcgcgcaactctcgatgaggtaaagcctattttatctcaagtatttactttggaatcatttaataacagtcttcaatgggacctaaagtatcatataatggaagtctacgatgatattgtccctgcagaggaactagaaaaaatcgattacgtgttatcttctaatatttttgatactacatcggctgatgttgaagaactgttcttttattgcttcaaattgagagaatatatttcgttcgatctttctgatgcaaaaaaaaaattcatgaggcactttgaaatccttgacgaagaaagaaagtcaaacttatcatactctgttgtgtccaaatttgcaacattagtaaacaacaactttacaagagaacaaatttcttctttaattgattcattactattgaactcgacaaatttatcttcgttattaaaaaatgatgacatttttgaggagacaaatatcacgtacgctttaataaacaagcttgcttcatcataccatcaaaccttcgctctagaagctttgattcaaattcctatccaatgcatcaacaaaaacgttagagtggctctcattaacaatctaacatgcgaatcattttgccttgattccgctactagagaatgcctccttcatttattgtcaagcccgaccttcaagagcaacattgaaacaaatttctacgaattatgtgagaaaacaataatgagccccgaaatggccatttcagagacaggtgatgaaaaaaaggaaatagaagacaaaatatctattttcgaaaaagtttggactaatcatctgtcacaggcaaaggagcctgtgagtgagaagttcttagaatctggttacgatatcgttaaacagtcaatgtcattgtccaatggtgatagcaaactaattatcgccgggtttactatcgcaaaatttttgaaaccagataacaagcatagagatatacaaggtatggcaattagctatgctgttaaaattttggaaaactactctgaaaattttgaatctgaaacaattccccttttcagaatatcaatgtctacattgtacaagattataacgaccggacaaggcgatatttctaagcataaatcgagaattctggatatattttccaaaattatgcttcgatatcattctaaaaaagtgtaccatgcgccagaagaacaggaaatgtttttggttcattcactccttacagaaaacaagttggagtatatttttgcagagtacttaaatattgagcatacagataagtgcgattctgccttggggttctgcttggaagaaagtcttaaacaaggtcctgatgcgtttaaccgcctgctctggaacagtgctaaatcgttttccaccattagccaaccttgtgctgaaaaatttgtgagagtttttatcataatgtcaaaaaggattgcaagagacaataaccttggtcatcacctatttgtgatagctttacttgaagcctacacctattgtgatatagaaaaatttggctacaagtcatacttgctactgttcaatgctatcaaggagttcttagtatcgaaaccatggctattcagccaatactgtattgaaatgctgcttcctttctgtttaaaaactctcgcttttatagtaaaccatgagtcaacggatgaaatcaatgaaggctttattaacatcatcgaagtgatagatcatatgctattagttcacaggtttaaattttccaatcgtcaccatttgtttaactccgttctttgccagatactagaaataatagcaattcatgatggtacattgtgtgcaaattcagcagacgccgtagccagactaataacgaactactgcgagccttataatgtatcaaacgctcaaaatgggcagaaaaataacttaagctcaaagataagtttgataaagcagtccatcagaaaaaatgtacttgtggttctaacgaaatatatacagttgtctattacgacgcagttcagtttaaacataaaaaagagtctgcagcccggtattcatgcgatttttgatatattatctcagaacgagttgaatcaattgaacgctttccttgacacacctgggaaacaatatttcaaagcactttacctccaatacaaaaaggttggtaaatggcgcgaagattaacttatgtgttttagtgtgttttcaaaaggcatttctctgctcacgtttaataacagggtgacggagcttaaacaagtaaaaattgataaaagtctgtatcatataattttgaataatctatactagcgccttaaaaattacataaatgtctaatcatataacgttaccatttcgattagtggtaaacctttt

SEQ ID NO: 1628 - DNA, 729 bp, Saccharomyces cerevisiae
tttattcttttcacgacagtctacaagtaactgaaatagcatacatttaccaaaaaaatcgaaaaaaatgtttaatactacaccaattaatatcgacaaatggttgaaggagaacgaaggccttttgaaaccaccggtgaataattattgcttacataaagggggattcactgtgatgattgtcggtgggcctaatgaaagaaccggttatcacatcaatccaactcccgaatggttctatcaaaaaaaaggatctatgcttttaaaggttgtggatgagacagacgctgaaccaaagttcattgatatcatcatcaatgaaggcgattcatatttattgccaggaaatgttcctcacagtcctgttcggtttgctgatactgtgggtattgttgtggaacaagataggcctgggggagaaaacgataagataaggtggtactgttctcattgtcgccaagtggtccacgagagtgaactgcaaatgttagacttaggtacccaagtgaaagaagccattttagattttgaaaatgatgtcgaaaagaggacatgtttccattgcaagacgttaaactacgcacgccctcaatctaattaagtattagaagagttgttagttgtacttttatagctctcttgttacgtaagattgcggcactaagatgcggtgccaattttttttttttttctcttgatcaaagcagctagctgttcatcaagatatgt

SEQ ID NO: 1629 - DNA, 849 bp, Saccharomyces cerevisiae
atgtcttcacaagatgttctgatacattcagatgatccgtgccatccagcaaatctcatttgcacgctatgcaagcagttttttcataataattggtgcaccggaactggaggtgggatttcaataaaagatcctaacacgaattattattatctcgccccatctggggtgcagaaggagaagatgatacctgaggatttgtttgtcatggacgctcagacattagagtatttgcgctctcccaagctttacaagccaagcgcatgtactccattgttcttagcgtgctaccaaaagaaaaatgcaggtgctataatacatacacactcccaaaatgctgtgatatgctccttgctatttggcgatgagttcaggattgctaacatcgaacaaatcaaagcaattccaagcggaaaggtggaccctgtgaccaagaaacccatggcgctatcgttttttgatacgctgaagattcccatcattgaaaacatggcgcatgaggacgagttgatcgatgacttgcacaagacttttaaagattatccagacacatgcgccgtaattgtgaggagacatggcatttttgtttggggtccgacaatcgataaggccaaaattttcaacgaagccatcgattatttgatggagctggccataaagatgtaccaaatggggattcctcccgactgtggcattggcgaagagaagaagcatctgaagatggccagtccgtgacgggttaatgcttaaatttattgtatgatttatatacttctatacatggtattattattattattattattattattattattattattattattattactattattgcaacta

SEQ ID NO: 1630 - DNA, 1148 bp, Saccharomyces cerevisiae
gtttttttttttccctttacgccatgatagtattttcaggacttaaagggaaaatcaacaagaacagaaagaaggaaaacaagcaaaacaaggatactgcagacgtgtagaaacatttagtaaaatggtcgctagaggtagaacagacgagatatctacagatgtttcagaggctaattctgaacactcgttgatgattacagaaacatcatcaccgttcagatctatattctcccacagtgggaaagtagcgaatgcaggcgctttagaggaatcggacaagcagatactggaatgggcaggtaaactggaattggagagtatggagctgagggaaaactctgacaagctaattaaagttttaaatgaaaattctaagacattatgtaaatcgctaaacaagtttaaccagctactggaacaagatgctgctacgaacggaaacgtgaaaaccttaataaaggatttggcttcccagattgaaaaccaactggacaaagtgtcaacagcaatgttatcgaaaggcgacgagaagaagacaaagtcggattccagctacaggcaggtattagtcgaagaaataagcaggtataattccaagataacgcgacacgtaactaacaagcagcatgagacggaaaagtcgatgaggtgcacccaggagatgctcttcaacgtcggcagccaactggaggacgtgcataaagtgctcctgtctctatccaaagacatgcacagtctacaaacccgccagactgctctagagatggcgtttcgagaaaaggcagatcacgcctacgatcgcccggatgtgtctctgaatggcaccacactcctgcacgatatggacgaagcccacgataagcagcgtaagaagtccgtgccgccaccaagaatgatggtcacaaggtccatgaaacgcagaagatccagctccccaaccctatccaccagccaaaaccacaatagcgaagacaatgatgacgctagccatcggctgaagcgtgcggccaggaccattattccctgggaggaactaagacccgacactctggaatctgagctgtgaaacgggcgtcctgctttttcattctacacaggcatatgtaacagcagtgtataggctatgtaaatcggcccaatcaaca

SEQ ID NO: 1631 - DNA, 1121 bp, Saccharomyces cerevisiae
atgagtgcttccaaaatggccatgtccaacctagagaaaatattggaactggttcctctttcgcctaccagttttgtcacaaagtatctgcctgccgcgcccgtagggtctaagggcacttttggtggaacgctggtatcacaatcgctgctggcgtcattgcatactgtgccattgaacttcttccccacatcgctacattcgtatttcatcaagggtggtgatccgcggaccaagatcacgtaccatgtgcagaatctgagaaacggtagaaatttcatccataagcaggttagtgcttatcagcacgacaagttgatatttacgtcgatgatcttatttgccgtgcaacggtccaaggagcacgactccttgcagcactgggagacgattccaggcctgcaaggtaagcagccagaccctcatcgttatgaagaggccacttcgcttttccagaaagaagttctggacccacagaaattgagcaggtatgcctcattgtccgacaggttccaagacgcaacctcgatgagcaagtatgtggatgcgtttcaatacggagtcatggagtaccaattccccaaggacatgttctactcggcaagacacaccgacgagctggattatttcgtcaaagtgagacctcccatcactaccgtggagcacgcgggcgacgagtcttctttacacaagcatcatccgtacaggatcccgaagagcattactcctgagaacgacgctcgctacaactacgtggcctttgcgtatctgtccgattcctacctcctactcacgatcccgtacttccacaacctgcctttgtactgccacagtttcagtgtctcgctcgaccacacgatttactttcaccagttgcctcatgtgaacaattggatctatcttaagatttcgaatcccaggtcccactgggacaagcacctcgtacagggcaagtatttcgacacacagtcgggacgcatcatggcaagcgtctctcaggagggctacgttgtctacgggtcagaacgagacattcgagccaagttctgaggacaattccctcccacgtataaacacatacatatatattcttatattatataataatatcctatttatta

SEQ ID NO: 1632 - DNA, 754 bp, Saccharomyces cerevisiae
tacggcaccacaacgacgcaccaatgccatctgacgtagcatcgaggaccgggctgccaaccccgtggaccgtcaggtatagtaagtccaagaaaagagagtattttttcaatccagagacgaagcactcgcaatgggaggagcctgagggcaccaacaaggaccagctacacaagcacttaagagaccatccagtgcgtgtaagatgcctgcacattctcatcaagcacaaggattcaagaagacccgcatcgcatagatccgagaacattacgatatccaagcaagacgctacggacgaactgaaaaccttaatcacgaggttggatgacgactctaagacgaactccttcgaggccctggctaaagagagatcagattgctcttcatacaagcgaggcggcgacctcggctggttcgggagaggcgagatgcagcctagctttgaagacgctgccttccagctcaaggtcggcgaggtaagcgatatcgttgaatcaggaagcggtgttcatgtgatcaagcgggtaggttaggttggcatttgcttctccacctcacctttttatgttcttattccctcttgtatccattccgtcctcgctgaacccatgaaaagaaaaaaaattaactagtcacatagttaaatggcgctgttcttcgctgcgagcggaaccgggcctgaaaaaaaattttctcttttcctctccagatgactcagtaatatagtagtatattatataatgtaacaaaa

SEQ ID NO: 1633 - DNA, 1910 bp, Saccharomyces cerevisiae
ccaagaaaaaagtagagatgggcttgttaacgaaagttgctacatctagacaattctctacaacgagatgcgttgcaaagaagctcaacaagtactcgtatatcatcactgaacctaagggccaaggtgcgtcccaggccatgctttatgccaccggtttcaagaaggaagatttcaagaagcctcaagtcggggttggttcctgttggtggtccggtaacccatgtaacatgcatctattggacttgaataacagatgttctcaatccattgaaaaagcgggtttgaaagctatgcagttcaacaccatcggtgtttcagacggtatctctatgggtactaaaggtatgagatactcgttacaaagtagagaaatcattgcagactcctttgaaaccatcatgatggcacaacactacgatgctaacatcgccatcccatcatgtgacaaaaacatgcccggtgtcatgatggccatgggtagacataacagaccttccatcatggtatatggtggtactatcttgcccggtcatccaacatgtggttcttcgaagatctctaaaaacatcgatatcgtctctgcgttccaatcctacggtgaatatatttccaagcaattcactgaagaagaaagagaagatgttgtggaacatgcatgcccaggtcctggttcttgtggtggtatgtatactgccaacacaatggcttctgccgctgaagtgctaggtttgaccattccaaactcctcttccttcccagccgtttccaaggagaagttagctgagtgtgacaacattggtgaatacatcaagaagacaatggaattgggtattttacctcgtgatatcctcacaaaagaggcttttgaaaacgccattacttatgtcgttgcaaccggtgggtccactaatgctgttttgcatttggtggctgttgctcactctgcgggtgtcaagttgtcaccagatgatttccaaagaatcagtgatactacaccattgatcggtgacttcaaaccttctggtaaatacgtcatggccgatttgattaacgttggtggtacccaatctgtgattaagtatctatatgaaaacaacatgttgcacggtaacacaatgactgttaccggtgacactttggcagaacgtgcaaagaaagcaccaagcctacctgaaggacaagagattattaagccactctcccacccaatcaaggccaacggtcacttgcaaattctgtacggttcattggcaccaggtggagctgtgggtaaaattaccggtaaggaaggtacttacttcaagggtagagcacgtgtgttcgaagaggaaggtgcctttattgaagccttggaaagaggtgaaatcaagaagggtgaaaaaaccgttgttgttatcagatatgaaggtccaagaggtgcaccaggtatgcctgaaatgctaaagccttcctctgctctgatgggttacggtttgggtaaagatgttgcattgttgactgatggtagattctctggtggttctcacgggttcttaatcggccacattgttcccgaagccgctgaaggtggtcctatcgggttggtcagagacggcgatgagattatcattgatgctgataataacaagattgacctattagtctctgataaggaaatggctcaacgtaaacaaagttgggttgcacctccacctcgttacacaagaggtactctatccaagtatgctaagttggtttccaacgcttccaacggttgtgttttagatgcttgatgcattataggccccaatcgatgaatatatatatagagattctccttttccatcatcttttttgttcgcaatcttttcatatatatatatatataaatatttattatagtccattgaatggataaacatttattt

SEQ ID NO: 1634 - DNA, 498 bp, Saccharomyces cerevisiae
atgtctgagatattacaagatgtacaaaggaaactggtttttccaatagattttcccagccaacggaaaacagaaaaatttcaacagctatcgctcatgatcggagctttggtagcgtgtatattgggatttgcacaacagtccctgaaagttttactgactgcgtatggcattagttgtgtgattactttaatatgtgttttgccagcttacccatggtataataaacaaaaattgaggtgggcacagccaaaaattgaaattaatgtcgaccagtatgactagtcgctattgcctccgtctccaaaaattaaccttttttagtatcttcgagaagtaccaataataagctttctcgacagtataaggagttttttattgaatatgcaccatcgctatctctaggttttgtaattgatgactgaataagagtgcaatttttttttttttttttttttgatttttttcttttgatatattatatatattaataaatgt

SEQ ID NO: 1635 - DNA, 1129 bp, Saccharomyces cerevisiae
aattaaattcatcacacaaacaaacaaaacaaaatggttagagttgctattaacggtttcggtagaatcggtagattggttatgagaattgctttgcaaagaaagaacgtcgaagttgttgctttgaacgatcctttcatctctaacgactactccgcttacatgttcaagtacgactctactcacggtagatacgctggtgaagtttcccacgatgacaagcacatcatcgttgatggtcacaagatcgccactttccaagaaagagacccagctaacttgccatgggcttctctaaacattgacatcgccattgactccactggtgttttcaaggaattggacactgctcaaaagcacattgacgctggtgccaagaaggttgtcatcactgctccatcttccaccgccccaatgttcgtcatgggtgttaacgaagaaaaatacacttctgacttgaagattgtttccaacgcttcttgtaccaccaactgtttggctccattggccaaggttatcaacgatgctttcggtattgaagaaggtttgatgaccactgttcactccatgaccgccacccaaaagactgttgacggtccatcccacaaggactggagaggtggtagaaccgcttccggtaacatcatcccatcctctaccggtgctgctaaggctgtcggtaaggtcttgccagaattgcaaggtaagttgaccggtatggctttcagagtcccaaccgtcgatgtttccgttgttgacttgactgtcaagttgaacaaggaaaccacctacgatgaaatcaagaaggttgtcaaggctgccgctgaaggtaagttgaagggtgtcttgggttacactgaagacgctgttgtctcctctgacttcttgggtgactctaactcttccatcttcgatgctgccgctggtatccaattgtctccaaagttcgtcaagttggtttcctggtacgacaacgaatacggttactctaccagagttgtcgacttggttgaacacgttgccaaggcttaaatttaactccttaagttactttaatgatttagtttttattattaataattcatgctcatgacatctcatatacacgtttataaaacttaaatagatt

SEQ ID NO: 1636 - DNA, 2091 bp, Saccharomyces cerevisiae
atgttcacttttctcaaaattattctgtggcttttttccttggcattggcctctgctataaatatcaacgatatcacattttccaatttagaaattactccactgactgcaaataaacaacctgatcaaggttggactgccacttttgattttagtattgcagatgcgtcttccattagggagggcgatgaattcacattatcaatgccacatgtttataggattaagctattaaactcatcgcaaacagctactatttccttagcggatggtactgaggctttcaaatgctatgtttcgcaacaggctgcatacttgtatgaaaatactactttcacatgtactgctcaaaatgacctgtcctcctataatacgattgatggatccataacattttcgctaaattttagtgatggtggttccagctatgaatatgagttagaaaacgctaagtttttcaaatctgggccaatgcttgttaaacttggtaatcaaatgtcagatgtggtgaatttcgatcctgctgcttttacagagaatgtttttcactctgggcgttcaactggttacggttcttttgaaagttatcatttgggtatgtattgtccaaacggatatttcctgggtggtactgagaagattgattacgacagttccaataacaatgtcgatttggattgttcttcagttcaggtttattcatccaatgattttaatgattggtggttcccgcaaagttacaatgataccaatgctgacgtcacttgttttggtagtaatctgtggattacacttgacgaaaaactatatgatggggaaatgttatgggttaatgcattacaatctctacccgctaatgtaaacacaatagatcatgcgttagaatttcaatacacatgccttgataccatagcaaatactacgtacgctacgcaattctcgactactagggaatttattgtttatcagggtcggaacctcggtacagctagcgccaaaagctcttttatctcaaccactactactgatttaacaagtataaacactagtgcgtattccactggatccatttccacagtagaaacaggcaatcgaactacatcagaagtgatcagccatgtggtgactaccagcacaaaactgtctccaactgctactaccagcctgacaattgcacaaaccagtatctattctactgactcaaatatcacagtaggaacagatattcacaccacatcagaagtgattagtgatgtggaaaccattagcagagaaacagcttcgaccgttgtagccgctccaacctcaacaactggatggacaggcgctatgaatacttacatctcgcaatttacatcctcttctttcgcaacaatcaacagcacaccaataatctcttcatcagcagtatttgaaacctcagatgcttcaattgtcaatgtgcacactgaaaatatcacgaatactgctgctgttccatctgaagagcccacttttgtaaatgccacgagaaactccttaaattccttctgcagcagcaaacagccatccagtccctcatcttatacgtcttccccactcgtatcgtccctctccgtaagcaaaacattactaagcaccagttttacgccttctgtgccaacatctaatacatatatcaaaacgaaaaatacgggttactttgagcacacggctttgacaacatcttcagttggccttaattcttttagtgaaacagcagtctcatctcagggaacgaaaattgacacctttttagtgtcatccttgatcgcatatccttcttctgcatcaggaagccaattgtccggtatccaacagaatttcacatcaacttctctcatgatttcaacctatgaaggtaaagcgtctatatttttctcagctgagctcggttcgatcatttttctgcttttgtcgtacctgctattctaaaacgggtactgtacagttagtacattgagtcgaaatatacgaaattattgttcataattttcatcctggctctttttttcttcaaccatagttaaatggacagttcatatcttaactctaataatacttttctagttc

SEQ ID NO: 1637 - DNA, 2532 bp, Saccharomyces cerevisiae
aaccgcaacaattatataacgtcacagaacacatgagtaccatttatagggagagcgactcgttggagtcggagccctcgccaacgccaacaaccattcctatccagatcaatatggaagaggaaaagaaagatgctttcgttaagaatattgacgaggacgtcaataatctcactgcgactactgatgaggaggaccgcgatccggaaagccaaaaattcgacaggcattccatacaggaggaaggtctcgtttggaagggcgaccctacatacttgcccaattctccatatcctgaagtgagatcggcggtgtccatcgaggatgaccccaccatccgcctcaaccactggagaacgtggttcttgaccacggtgtttgtggtagttttcgccggtgttaatcaatttttttccctgagatatccatcgctagagatcaacttccttgttgcacaagttgtttgctacccaattggtaggatactggctctcttgcccgactggaagtgttctaaagtgccatttttcgatttaaacccgggcccatttaccaaaaaggaacacgccgtggtcacaattgccgtggcgcttacttcctctactgcatacgctatgtacattttgaacgcccagggaagcttttacaacatgaaacttaatgtcggatatcagttcttgttggtttggacatctcaaatgattggttatggtgctgcaggtcttaccagaagatgggtcgtcaaccctgcaagctctatctggcctcagactttaatttcagtgtccttgtttgattcgttgcactcgagaaaagttgaaaagacagtcgcaaatggttggacgatgccccgttacaggttcttcttaatcgtccttatcggatcgttcatctggtattgggtacctggattcctctttaccggtctgtcctatttcaacgttatcctatgggggtcgaagacaagacacaatttcatcgctaacacaatctttggtactcaaagtggtctcggtgcgttgccaattacatttgactacacccaggtttcccaagccatgtccggctctgttttcgccacaccattctacgtctccgccaacacctatgcatcagtgttgatattcttcgtcatagtgctgccatgtctttattttacgaatacctggtatgccaaatacatgcccgtcatttcaggttctacttatgacaacactcaaaacaaatacaacgtaacaaagattcttaacgaggattattccattaatcttgagaaatataaggaatactcaccggtattcgttccattttcctatcttttgtcgtatgctttaaattttgccgctgttatcgccgtttttgtccactgcatcttataccacggtaaagatattgtcgccaagtttaaagaccgtaaaaatggtggcactgacattcacatgagaatctactccaagaactataaggattgtcccgattggtggtatttacttttgcagattgtcatgatcggtttaggatttgtagcagtgtgctgtttcgatactaagttcccagcttgggcatttgttattgcaatattaatttcccttgtaaatttcatcccgcaaggtatcttggaagcaatgactaaccaacacgtaggtttgaatattatcacagaattgatctgcggttatatgctgcctttaagaccaatggcaaacttattattcaagctatacggatttattgtcatgagacaaggcttgaatttgagtagagatttgaaattagccatgtacatgaaggtttcccctcgtttgatctttgccgttcaaatctatgccactatcatatcaggcatggttaacgttggtgtccaggaatggatgatgcataatatcgatggcttatgtaccaccgatcaaccaaatggcttcacttgtgctaatggtcgcacggttttcaatgcttccattatctggtctttgccaaagtatcttttctcatcagggcgcatttataatccgctgatgtggttcttcttgattggtttgctattcccactagccgtttatgctgttcaatggaaattccctaaatttaaatttgctaagcacattcatactcctgtatttttcacaggcccaggtaatattccaccaagcacaccttataactactcattattttttgcaatgtcattctgcctaaacttgataagaaaaagatggagagcttggttcaataagtacaatttcgtcatgggggccggtgttgaagcaggtgtggcaatctccgtcgtcatcatcttcttgtgtgtacagtacccaggtggtaagctcagctggtggggaaacaacgtttggaaaagaacgtatgataatgattataaaaaattttataccttaaagaaaggtgagacatttggttatgataaatggtggtaatcatgaaaacataataataaacctgcagaggttcatatcaagttttaattcaaaatttggcacacgtaatagcaaactttagttcatattctgtaatatt

SEQ ID NO: 1638 - DNA, 309 bp, Saccharomyces cerevisiae
acaaatgttcactccatttataagaggattccacacaagatcatcgataacatggttcagtacgctccctttctattaggaaaattttctgatccgttattggcaattatggtaggctgtctcagctactatgtgtacgaaaggaaaatggggcgtccacaaggtcatcatttacacgagctcataaagaagcgatgggacgatcgcaaataataatccggcgtgaggggagtatatataagtttctggcgatatgtaaataccataataattaatcctaggatctacctttatacgcatttatcctat

SEQ ID NO: 1639 - DNA, 2542 bp, Saccharomyces cerevisiae
ctttaaacataaaactctaagagcaataagcaagagattcgatgctatcttcagctaataggttttatataaagaggcatttggcaacacatgccaatatgttcccctctgtatctaaaaattttcaaacaaaagtgccaccttatgcaaaacttttgaccaacctagacaagattaaacaaataacaaacaatgctccattgacactagcagaaaaaattttatactcgcatctttgcgatcctgaagaatcgattacttcttctgatctgtccaccatccgtggtaataaatacttgaagctaaacccagaccgtgtagctatgcaggacgcttctgcccaaatggcgcttctacaattcatgaccaccggtctaaatcaaacatctgtcccagcatccatacattgtgatcatttaattgtaggtaaggacggtgaaactaaagatttaccctcttccatagctaccaaccaagaagttttcgatttcttggagagttgcgcaaagagatatggaattcaattctggggcccaggttctggtatcattcaccagattgttttggaaaatttctcagctccaggtctaatgatgctaggtactgattcccatacaccaaatgcaggcggtctgggagctattgccatcggggttggtggtgcggatgcagttgatgccctcacaggcactccatgggaattaaaagcaccaaaaattttaggtgttaaattgaccggaaagttaaacggatggtccactcctaaagatgtaatcacaaagctcgctggtttactaactgtcagaggtggtactggttatatcgtcgagtacttcggcgaaggtgtatccactctatcttgcacaggtatggcaaccatctgtaatatgggagctgaaatcggtgctacaacgtcaactttcccttaccaagaagctcacaagcgttatttgcaagcaactaatagagcagaggtcgctgaagcagctgatgttgctttaaacaagtttaacttcttaagagccgacaaagatgctcaatacgataaagttattgaaattgacttatccgcaattgaacctcacgttaatggtccatttacaccagacctttcaaccccaatatctcaatatgccgaaaaaagtttgaaggaaaactggccccaaaaagttagcgctggtttgattggatcatgtaccaattcatcttatcaagacatgagtcgtgttgtcgacttggtcaagcaagcttccaaagccggcttgaaaccacgtatccccttctttgtcacccctggttcagaacaaattagagctaccttggaaagagatggaatcatcgatattttccaagaaaatggtgccaaagttttagcaaatgcatgcggcccttgtatcggacaatggaatagggaagatgtctcgaaaacatcaaaagaaacgaacactatttttacatcattcaatagaaatttcagagctagaaacgatggtaataggaatacaatgaatttcttaacatccccagaaatagtaacagcgatgagttattctggagatgctcagttcaatccgctaactgactcaattaaattgccaaatgggaaggatttcaaattccaaccaccaaagggtgatgagttaccaaaaagaggatttgaacacggtagagacaaattttatcctgaaatggatccaaagccagatagcaatgtagagattaaggtagaccctaattctgatcgtttgcaattattagagccattcaaaccttggaacgggaaggaattgaagacaaacgtgcttttgaaagttgaaggtaaatgtacaacagatcatatttccgctgcgggcgtctggttgaaatataaaggccatctagaaaacatttcttacaatacattgattggtgcacaaaacaaagaaaccggtgaagtcaacaaggcttatgaccttgacggaactgaatatgatattcctggtttgatgatgaaatggaaatcagacggtagaccatggaccgtgatagcggaacataactatggtgaaggttccgcaagagagcatgctgctttgtcaccaagatttttaggcggagagattcttttagttaagtcttttgcaagaattcatgagacaaacttgaagaaacaaggtgtgttgccattgacttttgccaacgaatctgactatgataaaatatcaagcggagatgttttagaaacgttgaacctagttgacatgattgctaaggatggtaataacggtggtgaaattgatgttaaaattactaaaccaaacggtgaatcgttcaccatcaaggcaaaacatactatgtctaaagatcaaatcgattttttcaaagctggttcagcaatcaattatattggtaatatacgaagaaacgaataaattctgaagagatattagctaaaaattaagagtccgatttaatagtcataagctagtttacacaattctatagactctgcatatagacggtgcaaataacctacctatttatttatttatttactataaaa

SEQ ID NO: 1640 - DNA, 1088 bp, Saccharomyces cerevisiae
ccttatcaattttaaggaacttgagagctaaatttgcaagcaagtatggtaagtgattggaaaaatttttgcctcgagaaagcctctaggtttcgcccaacaatagataggcctttttttaatatttatttgtgggactatttcaatcgtgcggttgggtgggccactgcaggtcgcttccagccaaaggattttgagtttaccgttgggaagcagcctttgagtgaacctcgtccggtactgctttttattgccatgtattatgtggttatatttggcgggaggtccctggtaaagtcatgtaaacctctcaagttgagatttatttctcaagtccataacttgatgttgacttctgtttcctttttatggttgattttgatggtggaacagatgctacccatagtgtatcgccatgggctgtattttgctgtttgtaatgttgaatcgtggacgcaaccgatggagacattatattatctcaactatatgacaaagtttgtggagttcgcagacactgtcttgatggtgttgaaacatagaaagttgactttcctacatacataccatcatggtgctacagctttactgtgctataatcaattggttggttacacagcagttacatgggttcctgtcaccttaaacttagctgttcacgttcttatgtattggtattatttcctttctgctagcggaattcgtgtttggtggaaagcctgggttacaagactacaaattgtgcagttcatgcttgatctcattgtcgtttattacgtgctttatcagaagattgttgctgcatatttcaaaaatgcttgtactccacagtgtgaggattgcttaggttcaatgacggctattgctgctggtgcagccattcttacatcctacttgtttttgttcatctctttctatattgaggtttacaaacgtggaagtgctagtggtaagaagaagatcaacaaaaacaattaaccagtccttctgttttgtttttttctgtttttcttcctatcttgtatttgacttatatatagactgttttattcgaaataatcattttgcttcgtttatgtaatttttgt

SEQ ID NO: 1641 - DNA, 800 bp, Saccharomyces cerevisiae
tcaacaagtgaaagagcagtgtgacgatgttttcacagattgttcttttactcagtgcatttatttatgtcgccagtgctacggccaggagagggaccattaagggtcgcttagacttagcagcaagtaacatcaccggctttgtttcaactagaacaagtttcaaactttatcagatcggcaatttttcgacagaatatccttacacatctacgaccatgtttcaagatgacgaaggcaactttgaattcgctaatctccctttaaacgacggtgttaatgaaacgacatactatgtgatgtacccagcatctatggacttcaatctgaagccaaacagaattcttattgaattcaagaatttagagaatggcaccttacaattgaacgcgttcaagaacttttttggaagagaatatttcccatccaaagatataacgtacccagaaaaattacaatctatgaaggtgcacccttatattacagtggagcttttacataaggccccgattagatcttatttacaggctagaaacgtcagtatcttttctacaggtattgtgggtaatattttgaactcacgttggaaactggcgggcgttattaccttaattgcccttgtcgttttcccaatcatagtagaaaagttggaccccgaaacagctcgagccatcagagaggaggcaaaaagaaaacaaagagaaaagtatgctgccgttgcctcaaagtagagtgactattatgtgttgataaagattctattattatatgtaaattttatgtatggtacagataagtaa

SEQ ID NO: 1642 - DNA, 937 bp, Saccharomyces cerevisiae
taaaggtaaggaaagctttcacgatggtatcgaagacttggatatgtggcttcatcagtataattacagtggtacaggccttgtcctgcgagaagcatgatgtattgaaaaagtatcaggtgggaaaatttagctcactaacttctacggaaagggatactccgccaagcacaactattgaaaagtggtggataaacgtttgcgaagagcataacgtagaacctcctgaagaatgtaaaaaaaatgacatgctatgtggtttaacagatgtcatcttgcccggtaaggatgctatcaccactcaaattatagattttgacaaaaacattggcttcaatgtcgaggaaactgagagtgcgcttacattgacactaaaaggcgctacgtggggcgccaattcttttgacgcaaaactagaatttcagtgtaatgacaatatgaaacaagacgagctgactagtcacacatgggccgataaaagtatccaattgaccctaaaagggccatctggctgtttgaagagcaaagatgatgacaaaaaaaatggcgacggcgataatggtaaggatggtgacagcgaggggaaaaagccagctaagaaggcaggcgggacttcgtggttcacttggttattcctatacgctctactgtttacattgatatacctgatggttgtatcattcttgaataccagaggaggctcttttcaagatttccgtgctgagttcattcaacgttctactcaatttctcacttccttacctgaattctgcaaggaagtggtttcgagaatcttaggcagaagtaccgcccaaagaggcggttatagcgccgtttaaataagtttactggcttacaattcgatatttttgcaacagcagtgctaaccttttattatatttatataaactctaagcttttatatctacattatact

SEQ ID NO: 1643 - DNA, 428 bp, Saccharomyces cerevisiae
atggccagcgaaacaccaagagttgaccccacagaaatctccaacgtcaatgctcctgtgtttaggataatagcgcaaatcaaatcacaacccactgaatctcagttgattttacaatcgccaaccatatcatcgaaaaacggcagcgaggttgaaatgattacgttgaacaatattcgtgtatctatgaataaaacatttgagatcgactcgtggtatgagtttgtttgcaggaacaatgatgacggcgagctaggatttttgattctagacgctgtactatgcaaattcaaggagaacgaagatttaagcttaaacggtgtggttgctttacagagactatgtaagaaatacccagaaatatactagctaaaatcgcttttattcttacctttatgtactgttgcctctatatgtcttcccttcat

SEQ ID NO: 1644 - DNA, 1408 bp, Saccharomyces cerevisiae
catactcaagtgcaaacattacaagcttaaataagacaaatgttacagagtatagtcctttccgtgtgcatgtttatgttgcacacagtcgctgccagtggacctcagtcgtaccaaaagttggatttcactaatgttggttttacaggctcctacgtagatgtgaataagtttaaagatatcaccaacaatgaatcgtgtacttgcgaagtgggtgacagagtatggtttagtggtaagaacgctccactagcagactatttatccgttcatttccgtggaccattgaagttgaaacaatttgctttttacacatcccctggatttaccgtcaacaacagcagaagttcttctgattggaaccgtcttgcctactatgagtccagttccaaaaccgctgataacgttacctttctaaatcatggaggtgaagcttccccttgtttaggaaatgctttgtcctacgctagttctaacggtactggcagcgccagtgaagctaccgttttggcagatggcactttgatttcttcagatcaagaatacataatctattcgaatgtctcatgtccaaaatcaggttatgataagggttgtggggtttaccgtagtggcattccagcttactatgggtacggaggtacaacaaagatgtttttgtttgaattcgaaatgcctactgaaactgagaaaaatagcagctctattgggtactatgacttgcctgctatttggttgctaaacgatcacattgcaaggacttctcaatatccaaccaatgccaactgttcatgttgggctagtggatgtggggaatacgatatttttgaagctatgaatggtacggagaaaaaccatctctattctactttccacactttccaaggtatcgaggatttgggtactggtatccaatcttacggatacataacaagaaatactactggaacgatgaaaggtggtgttgttttcgattctagtggaaatgtcgtttctttcatatctgatgccactccattcaatggaactgtttctgctgatactgttaacgatttattggctgcaattccagaaaacgaaacctattcttctcaattgatgagcatttctgctactgcgccttcgaccacctcgttgtcgaatggtgttcgtttaacgaacatgcaaaacggtgtatggtattatattttggccatattcactgcctttacgcaagtggttttgatttgatttaagtcattgtatggtcatattatcatcatcatttaaattttgatttgacactttgatttgaacacttctttttttttttatttatgttttgtttaactgacggtgtttttttttttacgttatatactgatacatatatagacgtgatttatttaaataaaagtctatgaaaaaa

SEQ ID NO: 1645 - DNA, 876 bp, Saccharomyces cerevisiae
atttcactcgctaaacttacatctaaaatgcaattcaaaaacgtcgccctagctgcctccgttgctgctctatccgccactgcttctgctgaaggttacactccaggtgaaccatggtccaccttaaccccaaccggctccatctcttgtggtgctgccgaatacactaccacctttggtattgctgttcaagctattacctcttcaaaagctaagagagacgttatctctcaaattggtgacggtcaagtccaagccacttctgctgctactgctcaagccaccgatagtcaagcccaagctactactaccgctaccccaaccagctccgaaaagatctcttcctctgcatctaaaacatctactaatgccacatcatcttcttgtgccactccatctttgaaagatagctcatgtaagaattctggtaccttagaattgaccttgaaggacggtgttttgactgatgccaagggtagaattggttctattgttgctaacagacaattccaatttgacggtccaccaccacaagccggcgccatctacgctgccggttggtccattactgaagatggttacttggctttgggtgacagtgacgttttctaccaatgtctatccggcaatttctacaacttgtatgatcaaaacgtcgccgaacaatgtagtgccattcatttggaagctgtttctttggtcgactgttaaatagctacatcaaagtactaatgttctaccttttataagggaaaagaaatagaaaaagattatgatttgtaaaaagattttggtatgaatgatttgtatattacatttttaaggttctctaaaagaaggtttcttttatttagataaatattttttttttaatag

SEQ ID NO: 1646 - DNA, 2628 bp, Saccharomyces cerevisiae
atgaagacaccaacaagagtttcgtttgaaaaaaaaatacacactccaccaagtggagatcgtgacgctgaaagatcaccaccgaagaaatttctaagaggtttatcgggtaaagtttttagaaagacaccagaatttaagaagcaacagatgcccacatttgggtatattgaagagagtcaatttactccaaatcttggcctaatgatgtccaaaagaggcaatattcctaaaccactgaatctttccaagcctatatctcccccaccaagtttgaagaaaacagcgggatcagtagcatctggtttttcgaaaacaggacaacttagcgctttacaatcgccagtaaatatcacaagtagcaacaaatacaacatcaaagctacaaatttaactactagtttactccgagagtcgatttctgattctacaactatgtgtgatactttgtcagacatcaatttaacggttatggatgaagattatcgcattgacggcgattcatattacgaagaagattcaccaactttcatgatcagcctggaaagaaacataaaaaaatgcaattcacaattcagtccaaaaaggtacataggtgagaaatgtttaatctgtgaggaaagtattagttccacatttaccggtgaaaaggttgtggagtctacgtgttcacacactagccactataactgttatttgatgctatttgaaactctttatttccaaggcaagtttcctgagtgtaagatatgtggcgaagtgagcaagccaaaggataaagacattgttcctgaaatggtatccaaacttctaacgggcgcaggcgctcatgatgatggtccgtcatccaatatgcaacagcaatggattgatttgaaaacggcgagaagcttcacaggtgaatttcctcagtttacaccacaggagcagctcattcgtactgctgatatttcatgtgatgggttcaggacaccacgcttatcgaatagcaatcaatttgaggccgttagctatcttgatagcccatttttaaattcaccattcgttaataaaatggcaactacagacccttttgatttaagtgatgatgaaaaactggactgtgatgatgaaatagacgaaagtgctgctgaagtgtggtttagtaaaacgggtggtgaacatgttatggtcagtgtgaagtttcaagaaatgcggaccagtgatgatttaggggtcttgcaagatgtgaatcatgtggaccacgaagaactagaggaaagggaaaaggaatggaaaaagaaaattgatcaatatatcgaaacaaatgtggataaggatagcgaatttggcagtttgatcttgtttgacaaactaatgtattctgatgatggcgaacaatgggtagacaataaccttgtaatattattctccaaatttctagttttgtttgattttgaagaaatgaagatcctgggtaagattcctagagaccagttttaccaggtaatcaagttcaatgaggacgtactactttgtagtttgaagagcactaatatacctgaaatatacttgaggttcaacgaaaactgcgaaaagtggttgcttcccaaatggaagtattgtctagaaaattcttcactggagacactaccattaagtgagattgtttctacagtgaaggaactctctcatgtgaatataataggcgctttaggagcgccgcctgatgttatatcagcacaatcccatgattctcgtctaccgtggaaaagattgcacagtgatacgccgctaaaacttattgtatgtttgaatttgtcgcatgctgatggggaactgtatcgcaagagagttctaaagagtgttcatcaaatattggatggattaaacacagacgatttactgggaatagttgttgttggaagagatggatccggtgtagtaggcccatttggcaccttcatcggaatgataaataaaaattgggacggatggacaactttcttggataatttagaagtggttaatccaaacgtcttccgcgatgaaaagcaacagtataaggtaacattacaaacttgtgaaagattagcgtcaacaagtgcatacgtggatacagatgaccatattgcaactggatacgccaagcaaatcttggtcctcaacgggagtgacgttgttgacattgagcatgatcagaaattaaaaaaggcctttgaccagttatcttaccattggagatacgaaatttcgcaacgccgcatgactccattgaacgctagcattaagcagtttttagaggagctgcacactaagcgttatctagatgtaactcttcgtctaccacaagctacattcgagcaagtatatttgggggatatggctgcgggtgaacaaaaaacgcgtctaattatggatgaacacccgcattctagtttgatagaaatagaatattttgacctggtaaagcagcaaagaattcatcagaccctggaagttcccaacctctagtagttcgggaatcgaggcccgtatttcgaggcttttgcttttccttttttttttttcgtttctccacgtctatactacgcaatgactgaatatatataatgcgtcgtaaatagcagttaatgtataaatagaaat

SEQ ID NO: 1647 - DNA, 2918 bp, Saccharomyces cerevisiae
gttaatatataacgataaaaggaggaggacgagaaagaagaagctgaaaaacacaatggcgtatgcggactcaccagaaaatgcgatcgctgttatcaagcagcgaaccgcactaatgaaccggtgtctatctcaacacaaactaatggaatcattacagcatacttccataatgttgaccgaattgagaaatccaaacttatcgccgaagaaatactacgaactttatgtcattattttcgactcattgactaatctatctacgtacctcatagaaaaccatcctcaaaatcaccacttagctgatctttatgagttggttcaatataccggtaacgtggtacccaggctttacttgatgatcacagttgggaccagctatctcactttcaatgaagcgcccaagaaggaaatcttaaaggatatgattgagatgtgtcgtggtgtgcaaaacccaataagaggtttgtttttacgctattatttatcccagagaaccaaagaattacttccggaggacgatccgtcgtttaactctcaatttattatgaataatttcatcgagatgaacaagttgtgggtgagattacaacaccaggggccacttcgtgagagggaaaccagaacacgtgaaagaaaagagctgcaaattttagtggggtctcaactagtacgtctttcgcagattattgatgataatttccaaatgtataagcaagatattcttcccaccattttggaacaagtcatacaatgtagagatttagtatcccaagaatatcttttggacgtcatctgccaagtgttcgcagacgagttccatttgaaaaccttggatactttactgcaaactactttgcatttgaaccctgatgtttcgataaacaagattgttctcactttggtcgatcgattaaacgattatgttacaagacagttggaggacgatccaaacgccacctccacgaatgcttatttagatatggacgtgtttggtacgttctgggactatttgaccgtattgaatcatgaaagaccagatctatcattacaacagtttattcctctagttgagagtgtgattgttttaagtttgaaatggtatcctaataattttgataatttgaacaaactctttgaattagtcttacaaaaaactaaggattatggtcagaaaaatatttctttagagtccgagcatttatttttggttctgttatctttccagaatagtaaacttcagctaacctcatcgaccactgcgccaccaaactcaccagttacttcgaaaaagcattttatctttcaattaatctcccagtgccaggcttacaaaaacatcctggctttgcagagcattagtctacaaaaaaaagttgtcaatgaaattattgacatcttaatggatagagaagtggaagaaatggccgataatgattcagaatcgaaactgcatcctccagggcattccgcttatttagttattgaggacaaactccaagttcagcgcctgctttcaatctgtgagcccttaataatatcaagaagcggaccgcccgcaaatgttgcatcctcggatacaaatgtagacgaagtgttttttaatcgacatgatgaagaagaatcctggatactggacccaatacaggaaaagttggcacatttgattcattggataatgaacactacttctcggaaacaaacaatgaaaaacaaaattcaatttagcttagaagcccaattggaaatattacttcttattaaatcttcgttcattaaaggtggcatcaatgttaaatacacttttccagcaataatcacaaatttttggaaactgatgaggaaatgccgtatgatacaagagtaccttttgaaaaaaagacccgataacaagacgttactttcccattattccaatcttttaaagcaaatgtttaaatttgtttctcgttgtatcaatgatatctttaattcttgcaacaactcatgcacagatctgattctgaaactgaatttacaatgtgccattctagctgatcaattgcaattaaacgaaatttcatatgattttttctcacaggccttcacaatatttgaagagtctctaagtgattcaaagactcagttacaggctttaatatatattgctcagtctttacaaaagacaagatcactctacaaagaagcttattatgattctttgattgtcagatgcacactccatggatccaaattattaaagaaacaagaccaatgtcgtgctgtttatttatgctcccacctctggtgggcaacggaaatttcaaatattggtgaggaagaaggtatcacagacaacttctacagagatggtaaacgggtgttagaatgtctacaaaggtctctccgtgtggcggattctataatggataacgaacagagttgtgagctaatggtcgaaatattaaatagatgcctctactattttattcacggggatgagtccgaaactcatatatcgataaaatacatcaatggtctgatcgaactaatcaaaacaaacttaaaatcgctaaaactagaagataacagtgcctctatgattaccaactcaatcagtgatttgcacatcaccggagaaaataatgtgaaggcaagcagtaatgctgacgatggctctgtaatcacagataaggaatcaaatgttgccataggatcggatggtacgtatattcaattaaatactctgaacggatcttccacgctaatacgcggagtcgtagcaactgcttcaggtagtaaattactgcaccaactgaagtatatcccaatccaccattttcgacgcacttgtgagtacattgaaagtcaaagagaagttgacgatcgtttcaaagtcatatatgtatagttaaataacgtacttgctcttcgtacat

SEQ ID NO: 1648 - DNA, 471 bp, Saccharomyces cerevisiae
caaacaaccaaatataatttagaaatggacagagaccatattaatgaccatgaccatcgaatgagctattccatcaacaaggacgacttgttgttaatggttttggcggttttcattcccccagtggccgtctggaagcgtaagggtatgttcaacagggatacactattgaacttacttctcttcctactgttattcttcccagcaatcattcacgcttgctacgttgtatatgaaacgagtagtgaacgttcgtacgatctttcacgcagacatgcgactgcgcccgccgtagaccgtgacctggaagctcaccctgcagaggaatctcaagcacagcctccagcatatgatgaagacgatgaggccggtgccgatgtgcccttgatggacaacaaacaacagctctcttccggccgtacttagtgatcggaacgagctctttatcaccgtagttctaaataacacata

SEQ ID NO: 1649 - DNA, 1442 bp, Saccharomyces cerevisiae
cagatcccaatacacatagtaggaaaaaaaaaggttcgctaaacaaaggactggtgtgtacaagaaactaataaatagtaattgcaatatgtctgaaggtattactgatattgaagaatcccaaattcaaaccaactatgacaaggtcgtctacaagttcgatgatatggaattggacgaaaacttgttaagaggtgttttcggttacggtttcgaagaaccatctgccattcaacaacgtgccatcatgcctattattgaaggtcacgatgtcttggctcaagctcaatctggtactggtaagaccggtactttctccattgctgctttgcaaagaattgacacctctgtcaaggctcctcaagctttgatgttggctccaactagagaattggctttgcaaatccaaaaggttgtcatggctttggctttccacatggacatcaaggtccacgcttgtatcggtggtacttcctttgttgaagacgctgaaggtttgagagatgctcaaatcgtcgttggtactccaggtcgtgtttttgacaacatccaaagacgtagattcagaactgacaagatcaagatgttcatcttagatgaagctgatgaaatgttgtcttctggtttcaaggaacaaatctaccaaattttcaccttacttccaccaaccactcaagttgttctattgtccgccaccatgccaaatgacgtcttggaagttaccaccaaatttatgagaaacccagttagaattttggttaagaaggatgaattgactttggaaggtatcaaacaattctacgttaatgttgaagaagaagaatacaaatacgagtgtttgaccgatttatacgactctatctccgttactcaagctgtcatcttctgtaacaccagaagaaaggtcgaagaattgaccactaagttaagaaacgacaaatttaccgtttctgccatctattctgatttaccacaacaagaaagagacaccatcatgaaggaattcagaagtggttcttccagaattttgatctccactgatttgttggctagaggtatcgatgtccaacaagtttctttggttattaactacgacttaccagctaacaaagaaaactatattcacagaatcggtagaggtggtcgtttcggtagaaagggtgttgccatcaactttgttactaacgaagacgttggcgctatgagagaactagaaaagttctactccactcaaattgaagaattgccatccgacattgctaccttgttgaactaatctctaaggagaagaaatccataactatattacctttatcttatcttgaccccctatatgatattattttgcccatatttgtttttattattgattatccttttattgtctttttgttagggatatttcataataaatatttgaatatataatatgtacaataatt

SEQ ID NO: 1650 - DNA, 1294 bp, Saccharomyces cerevisiae
tatacatcgtgtcatttttttgaatatctatcagaagtaaggtttgttacggagctatggccaagaaagttgccatctgtacattgctgtattcacgggactatttacctggcgcattgactttagcgtaccaattacaaaaactcttgaaacacgctgtagtggaagatgagataaccttatgcctgctaattgaaaaaaaattgtttggagatgagtttaaacctcaggaaatagctttaattagaagtctttttaaagagattatcattattgaaccgctaaaggatcaagagaagagcatagagaagaataaggcaaatcttgaactgttgaaaaggcctgagctatctcatactttactcaaggctagactgtgggaactggtgcagttcgatcaggttttatttttagatgctgatactttaccattaaataaagaattttttgaaatcctacgattataccctgaacaaacaagattccagattgctgcggttccagacatcggatggcctgacatgttcaacaccggtgtactactactaattcctgatttagatatggcaacaagtttacaagattttttgattaaaactgtatcgattgatggtgctgatcaaggaatcttcaatcaattttttaatcctatttgcaactacagcaaagaggttttgcataaggtgtctccactcatggaatggatacgcctccccttcacctacaacgtaaccatgcccaactacggataccagtcttcaccagccatgaattttttccaacaacacatcagacttattcacttcattggaacgtttaagccatggtcccgtaatacaactgactatgacgaccactattaccagctgtggagaagtacacagcgtgaactttatagtgaatgccacttaagtaactacttcacacacttgcaattgggcaatattgaaacagagacaaatttttaccacgaacctccttgtcttcaagacctgttgaatcatggtaaaagagaaaatcaaaagcacgttgacctggatataacctcagtagatcgaaatgcttcgcagaagagtactgcagagaaacatgatattgagaaaccgacatctaagccgcaatctgcttttaaatttgattgggagtctacggattatttagaccgcgtccaaagagcattcccaaagcctgatacctgatgccatccctctacctcttagctatcaatcattcaactaaactactacatagtatacattagctgtacagtcgtcacatcagacgaatacaaaag

SEQ ID NO: 1651 - DNA, 405 bp, Saccharomyces cerevisiae
aaagaatatcaataagccaaaatggaaaacgataagggtcaattagttgaattatatgttccaagaaagtgttctgctaccaacagaatcatcaaagccgatgaccacgcttctgttcaaatcaacgttgccaaggttgatgaagaaggccgcgccattccaggtgaatacatcacttacgctttgtccggttacgttagatccagaggtgaatccgatgactctttgaaccgtttggctcaaaacgatggtttgttgaagaacgtttggtcttactcccgttaaaaagataaatattgaataaaaagaagaggggaagtcgtttattcaacgtttccctatcatttattttctattatattatcaatatttaatctatatataacttacgtacatgcaacaact

SEQ ID NO: 1652 - DNA, 427 bp, Saccharomyces cerevisiae
taatgattacgcacaagtttaaatattacattcataagacagtaaataaacgtattaaatgatcgcccaaagtaccagattagccgccgccgtctcttcttcagccgcctccgcgggtgtctcaaggatagccgctagcgccatggccagcactattttcaagagatctccgggcaactcgttcaactcttttaaggaatatagagaaaatgccaagacatatggtcccttgagtgcctcactagctaccagaagacacttggctcacgcgccaaagttgtaggcgtatcttaattatgctcttttctttcctggtttattaatgatgatgactttaacctattcttcttttggggtcctggtacggtgcctcaaatttttatacaacatgactttttcagttacatatttttttataagtacttaa

SEQ ID NO: 1653 - DNA, 7346 bp, Saccharomyces cerevisiae
cttgtatttttatcttattcttgattgtagaaaataaaaaacctgtcgacaacaaccacaaacaaaaggtttcctgaacattttctctacggaagcacttgagaaagaattgaggaataccgctatatctagccaaaaaaacttataaatacttctactcttttgttaaagactcaccacgttcaactttgaattgaaagaaaaaggaaacattataatccgttagcattcaaatttgagtatgttttttatgattacttttgagaagccttaatgttgccatctattcagaccatgcgatgccagtcgcaatatcagtgggcgcgtattttagtatctgggcgtggaaaatagaagccgtttgactctgcgatgatgtcgtttttcattacctggaataggaaagaaaaaaaagaaagaaaaaaaaaagaaaagaatcgcaattgatagagatcttcatggcacgaaagcaaatcaatctcttcaattagttctgattttatatcggcatctggcttgaacgatcaacaattactaacattaatattaacgacgatagaaatccataactaattgcagcatacaacacataaaccttacctaatagaatataacaatcataatatggccactattgctcccactgctccaatcacccctccaatggaatctacgggtgaccgtctggttacgttggaacttaaggacggcacggtcttacaaggttattcatttggtgctgagaaatccgtcgctggtgaattagttttccaaactggtatggttggttatcctgaatctgtgaccgatccatcttatgaaggccagatcttagtcatcacttacccattggtaggcaattatggtgtcccagatatgcacttgagagatgaattggtcgaagaattgccaagatattttgaaagtaatagaatccatattgccggtttagttatttctcactataccgacgagtactctcattatcttcgtaaatcttccttaggtaaatggttacaaaatgaagggatcccagctgtttatggtgttgatacaagatcattgaccaagcatttgagagatgcaggttcaatgttgggtaggttgtctttggaaaaaagcggctctgacagaaccatctccagatcttcctcttggagaagtgcgtttgatgttcctgaatgggtggatccaaatgttcaaaacctagtttctaaggtctccatcaatgaacctaaattgtacgttcctccagcagacaataagcacatcgaattgcaaaccggacccgatggtaaagttttaaggattctagccattgacgtgggtatgaaatacaatcaaattcgttgttttatcaaaaggggtgtagaattgaaagttgttccatggaactacgatttcactaaagaagattatgatggtctgtttatttcaaatggtccaggtgatccatctgttctagatgatctatctcaaagattgtcaaatgtcctggaggctaaaaagacgccagtattcggtatttgtctcggtcatcaattgatagcaagagctgccggtgcatccaccctaaaactaaaatttggtaaccgtggtcataacataccttgtacatcaactataagtggtcgttgttacataacatctcaaaaccatgggttcgctgtggatgttgacactctaacttccggatggaagccattgtttgttaacgcgaatgatgactctaacgaaggtatctatcattctgaattaccttatttttccgtccaattccatccagaatccacacctggcccaagagatacagaattcttgtttgacgtttttatccaagcagttaaagaattcaagtatacacaagtgttgaaaccaatcgctttcccaggtggcctattagaggataacgttaaggcacaccctagaatcgaagcgaagaaggttctagttctcggttctggtggtttgtccatcggtcaagctggtgaatttgactactctggttctcaagccatcaaagctttgaaagaagaaggtatctatacaattttaattaatccaaacattgctaccatccaaacttcgaaagggttggctgataaggtttattttgttcctgttactgcagagttcgtgagaaaagttattttacatgaaaggccggacgccatttatgtgacatttggtggacaaactgctttatctgttggtatagccatgaaagatgaatttgaggcgttaggagttaaagtattgggtactccaatcgatactattattaccacggaagaccgtgaactcttcagtaatgccattgacgaaattaatgaaaaatgtgcgaaatctcaagctgctaattcagtggacgaggcattggccgctgtcaaggagatcggtttcccagttattgtacgtgctgcatatgcattgggaggtttaggttccggtttcgctaataatgaaaaagaattggttgatctatgtaatgttgcattttcatcctcacctcaagttttagtcgagaaatctatgaaaggttggaaagaagtcgaatatgaagttgttcgtgatgcttttgacaactgtattactgtttgtaatatggaaaattttgatccactaggtattcacaccggtgattccatcgttgtagccccatctcaaactttatctgatgaagattacaatatgttaagaactactgctgttaatgttattagacacttaggtgttgttggtgaatgtaatatccaatatgctttaaatcccgtttctaaggattattgcatcattgaagttaatgcgcgtttgtcacgttcctctgctttagcttctaaggctactggttacccattggcctacactgcggctaagttaggtttgaatatcccattaaatgaagttaagaattccgtcacaaaatccacatgtgcttgttttgaaccttctctagactactgtgttgtcaaaatgccaagatgggatttgaagaagttcaccagagtttctaccgaattatcttcatcaatgaaatctgttggtgaagttatgagcatcggtagaaccttcgaagaagctattcaaaaagctatcagatccacagaatatgctaacctcggattcaatgagacagatctagatatcgacattgattacgagttgaacaaccctacggatatgcgtgtcttcgccattgcaaatgcttttgctaagaagggatattctgttgataaagtctgggaaatgactagaattgataagtggtttttaaacaaactgcacgatttggtccaatttgctgagaaaattagttcatttggtactaaagaggaattaccttccttagttttaagacaggctaagcagttaggttttgatgacagacagattgcaagatttttggattccaacgaagttgccatccgtagattaagaaaagaatatggaattacaccatttgtcaaacaaattgatacagttgccgctgaattccccgcttacacgaactatttatacatgacatacaatgctgactcacacgatttatcctttgatgaccacggtgttatggtcttgggttctggtgtttaccgtatcggttcttctgtcgaatttgattggtgtgctgttactgcagttagaacattacgtgccaacaatatcaaaactatcatggtcaactataatccagaaactgtttccacagattatgatgaggctgatagactatactttgaaaccatcaaccttgaaagagttttggatatttacgagattgaaaactcaagcggtgttgtcgtatcaatgggtggtcaaacttccaacaacatcgccatgactttacatcgtgaaaatgtaaagattcttggtacatcccctgacatgattgattctgctgaaaaccgttacaagttctctcgtatgttggatcaaattggtgttgaccaaccagcttggaaagaattgacatccatggacgaagctgaatcttttgccgaaaaggtgggttatccagttttggtacgtccatcttatgtgttatccggtgccgccatgaatactgtttattctaaaaacgatttggaatcctacttaaaccaagccgtcgaagtttcacgtgattatcctgttgttatcactaaatatattgaaaacgcaaaggagattgaaatggatgcagttgcaagaaatggtgaattggttatgcatgttgtctctgagcatgttgaaaatgcaggtgtccactcgggtgatgcaacattaatcgttccacctcaagatttggctcctgaaactgtggatagaattgttgtcgccactgctaaaattggtaaggctttgaaaattacaggtccatacaacatccaattcattgcaaaggacaatgaaatcaaggtcatagaatgtaatgttcgtgcttcgagatctttcccattcatttcaaaggttgttggcgtcaatctgattgaattggcaacaaaggccataatgggtttgcctttgacgccttatcctgttgaaaaattaccagatgattatgtcgccgttaaagtaccacaattctctttcccacgtttagcaggagctgatccagtcttaggtgttgaaatggcctctactggtgaagtcgctacttttggccactcgaagtatgaagcatacttaaagtctttgttggcaaccggcttcaaacttccaaagaagaatattttattgtctattggttcttacaaggaaaaacaagaattgctttcttccgtacaaaaactatacaacatgggatataaattatttgcaacatcaggtactgctgactttttatctgaacatggtattgccgtccaatatctggaggttttaaacaaggatgatgatgatcaaaaatcagaatactcacttactcaacatttggctaataatgaaattgacctttacatcaacttgccttctgccaacaggttccgtcgtcctgcatcctatgtttcaaaggggtataaaacacgtcgtttggctgtcgattattcggttccgttggttactaacgttaaatgtgcaaaattgttgattgaagccatttcaagaaatatcactttagatgtttctgaacgtgatgcacaaacttcccacagaactattaccttacctggtttaatcaatatcgcaacttatgttccgaatgcatcccatgttatcaaaggcccagctgaactgaaggagaccacacgtctatttttggaatccggttttacatactgtcaattgatgcccagatccatcagcggacctgttattactgacgttgcatccttgaaggccgcaaactctgtttcccaagattcatcttacactgacttttctttcactattgctggtacagcacacaatgctcatagtgttacgcaatctgctagcaaagtgacagcattgtttttgcccctacgtgaattaaagaacaagatcacagcagtagctgaacttctgaatcagtggccaactgaaaagcaagtgattgcagaagctaaaactgcagatttggcatcggttttattgttaacctcccttcaaaacagatctattcacattactggtgtttcgaataaggaagatttagctttgatcatgacggtcaaggcaaaagaccctagagtgacttgtgatgtcaatatttattctttgtttattgcccaagatgactatccggaggcagttttcttgcctactaaggaagatcaagagtttttctggaacaaccttgatagtatcgatgctttctctgtcggtgctcttcctgtcgccttggcaaatgtcacaggtaacaaggttgatgttggtatgggtatcaaagattcattaccactattgttggctgctgttgaagaaggtaaattaaccattgatgatatcgtccttcgtctgcatgacaatcccgctaaaattttcaacatccctactcaggactcagttgtcgaaattgatttggattattctttcagacgtaataagagatggtcaccattcaacaaagatatgaacggtggtattgagcgtgttgtctataatggcgaaacattagttttgagcggtgaattagtttcaccaggcgccaaaggaaaatgcattgttaatccaagtccagcttccataactgcttccgcagagctccaatctactagtgctaaaagaaggttctcgatcacggaagaagcaatcgctgataatttagatgccgcggaggatgcaattccagaacagcctttggaacaaaaattgatgtcttcaaggccaccaagagaacttgttgctccaggcgccatccagaatttgatccgtagtaacaatccattccgcggaagacatatattgtctatcaaacaattcaaacgttctgatttccatgtgttgtttgctgttgcacaagaactaagggcagctgtcgcaagagaaggtgtcttagatttaatgaaaggccacgttattactacaattttctttgaaccatctactcgtacttgttcttcattcattgctgctatggaacgtttgggtggtagaattgtaaatgttaatccattggtgtcttctgtcaagaaaggtgaaacccttcaagatactatcagaactttggcttgttacagtgatgccattgtcatgcgtcattcagaagaaatgtctgttcatatcgccgctaaatattctcctgttccaattattaatggtggtaatggttctcgcgagcatcctacgcaggccttcttggatttgtttacgattcgtgaagaaatcggtactgttaatggtattactgttactttcatgggtgatctcaaacatggtagaaccgtacattcattgtgtcgtttgttaatgcactatcaagtcagaattaatcttgtttctcctccggaattgaggttaccagaaggattaagagaagagctaagaaaagctggcttacttggtgttgagagcattgaattaacccctcatatcatctcaaagaccgatgttctgtattgtacaagggtccaagaagaaagattcaatagccctgaagaatatgcacgtctgaaggatacttatatcgtggacaacaagatcttggcacacgccaaagaaaatatggctatcatgcatccattgcctcgtgtaaatgaaatcaaagaggaagtggactacgatcatcgtgctgcttacttcagacaaatgaagtatggtttgttcgtcagaatggctttgttggccatggtcatgggtgttgatatgtgaatgataagagacctatccgtattttaaatttataatctattattaaacttttttaaccaatatttttatttgtatat

SEQ ID NO: 1654 - DNA, 3915 bp, Saccharomyces cerevisiae
gcccattgtttttaccttaccattagcatcactgattccacacttgtattgccttaaaaagaaggagggtattctattggctctcaaggaagtcattcctatccattttacttaaagttattacctttttttgataactaacaatgcattttagaagaacgatgagtagagtgcccacattggcatctcttgaaatacgatataaaaaatctttcggccataaatttcgtgattttattgctctatgtggtcactattttgctccagttaaaaaatatatcttccccagttttatcgcggttcactacttctacacgatatccctgacattaataacttcaatcctgctatatcccattaagaataccagatacattgatacattgtttttagcagcgggcgcagttacacaaggtggcttaaatactgtggatatcaacaatctaagcttataccaacaaattgttctgtatatcgtatgctgcatatcaacaccaattgcagttcatagttgcttggcatttgtacggctttactggtttgagcgctacttcgatggtattagagactcttctagacgaaattttaagatgagaagaacgaaaacaatcttagaaagggaactaacagcaagaaccatgaccaagaatagaacaggtacccaaagaacgtcttatcctaggaaacaagctaaaacagatgatttccaagaaaaattgttcagcggagaaatggttaatagagatgagcaggactcagttcacagcgaccagaattctcatgacattagtagggacagcagcaataataatacgaatcacaatggtagcagtggcagtttagatgatttcgttaaggaagacgaaacggatgacaatggagaatatcaggagaacaactcctactcgacggtaggtagttcgtctaacacagttgcagacgaaagtttaaatcagaagcccaagccaagcagtcttcggtttgatgagccacacagcaaacaaagacccgcaagagttccctcagagaaatttgcaaaaagaaggggttcaagagatattagcccagccgatatgtatcgatccattatgatgctacaaggtaagcatgaagcaactgctgaagatgaaggtccccctttagtcatcgggtcccctgcggatggcacaagatataaaagtaatgtcaataagctaaagaaggccaccggcataaatggtaacaaaatcaagattcgagataagggaaatgaaagtaacactgatcaaaattccgtgtcaagtgaagcaaacagtacggcgagcgtttcggacgaaagctcgttacacacaaattttggtaacaaagtaccttcattaagaacaaatactcatagatcaaattcgggcccgatagccattactgataacgcagaaacagacaaaaagcatgggccatcaattcaattcgatataactaaacctcctagaaaaatttcaaaaagagtttcaaccttcgatgatttgaacccaaaatcttccgttctttatcgaaaaaaagcatcgaagaagtacctcatgaaacattttcctaaagcgcggcgaatacggcaacaaattaagagaaggctttctactggttcaattgagaaaaacagcagtaacaatgtttcagatagaaaacctattactgatatggatgatgatgatgatgacgatgacaacgacggcgataacaacgaagaatactttgctgacaacgaaagcggcgatgaagatgaacgagtacagcagtctgaaccacattctgattcagaactcaaatcgcaccaacaacagcaagaaaaacaccaactgcagcagaacctgcaccgcatgtataaaaccaaatcatttgatgataatcgttcaagagcagttcctatggaacgttccaggaccatcgatatggcagaggctaaggatctaaatgagctcgcaaggacgcctgattttcaaaaaatggtctatcaaaattggaaagcccatcatagaaaaaaaccgaactttaggaagaggggatggaataacaagatatttgaacatggtccctatgcatctgacagcgatcgcaattatcctgataatagtaatactggaaacagtattcttcattacgcagagtctattttacatcatgatggctctcataaaaatggaagcgaagaagcctcttccgactctaatgagaatatctattccacgaatggaggaagcgaccacaatggtcttaacaactatcctacttacaacgacgatgaagaaggctattatggtttacatttcgataccgattatgacctagatcctcgtcatgatttatctaaaggcagtggtaaaacgtatctatcatggcaaccaactattggacgtaactcaaacttccttggattaacaagagcccagaaagatgaattaggtggtgtcgagtacagagcaatcaaacttttatgcaccatattggttgtctactacgttggatggcatattgttgcttttgttatgttagtaccttggattattttgaaaaagcattatagtgaagttgttagagatgatggtgtttcacctacatggtggggattttggacagcaatgagtgcatttaatgatttaggtttgacattaactccaaattcaatgatgtcgtttaacaaagctgtatacccattgatcgttatgatttggtttatcattatcggaaatacagggtttcccatccttcttagatgcatcatttggataatgtttaaaatttctcctgatttatcacagatgagagaaagtttaggttttctcttagaccatccacgtcgttgtttcaccttgctatttcctaaggcagctacatggtggctacttttaacgcttgcaggattgaatataactgattggattttatttattattctagattttggctcaacagttgtgaaatcattatcgaaaggctatagagtccttgtcggcctgtttcaatctgttagcacaagaactgctggattcagcgttgtcgatttaagtcaactgcatccttctatccaagtctcctatatgctaatgatgtatgtctccgtattaccattggccatctctattcgacggacaaatgtttacgaggagcaatctttaggactatatggagatatggggggagaaccagaagatacggatactgaagacgatggtaacgatgaagatgacgacgaggaaaacgagagtcacgaaggtcaaagtagtcaaagaagtagttcgaacaacaacaacaataacaacaggaaaaagaaaaagaaaaagaaaactgaaaatccaaatgaaatatctacaaaatcctttatcggtgcccatttaaggaaacagctttcatttgacttgtggtttctatttttagggttatttatcatttgcatttgtgaaggggacaagataaaggacgtacaagaaccaaactttaatatatttgcaattctttttgaaattgttagcgcttacggtacagttgggctatcgctaggttatccggacaccaaccaatcgttttcaagacagtttactacattatctaagttggtgatcatagctatgctgatcagaggcaagaatagaggtctaccatactcactggatcgtgcaattatcttgcctagtgatagacttgaacatattgaccaccttgagggcatgaaattgaagagacaggctagaaccaatacagaagacccaatgacggaacatttcaagagaagtttcactgatgtgaaacatcgttggggagctcttaagcgtaagaccacacattcccgaaatcctaaaaggagcagcacaacgctctaacatatatactcattctttagaaataggttttcgtactcaatatttaagaaggtaattaagcatt

SEQ ID NO: 1655 - DNA, 2222 bp, Saccharomyces cerevisiae
gaagaaaagaattactaaaaaagaagacaagggtagctgctattgtgggtacacgtttcacagaactactttttccttgtccttctccagacatcaacgtcatacaactaaaactgataaagtacccgtttttccgtacatttctatagatacattattatattaagcagatcgagacgttaatttctcaaagatggaagacaagtttgctaacctcagtctccatgagaaaactggtaagtcatctatccaattaaacgagcaaacaggctcagataatggctctgctgtcaagagaacatcttcgacgtcctcgcactacaataacatcaacgctgaccttcatgctcgtgtaaaagcttttcaagaacaacgtgcattgaaaaggtctgccagcgtgggcagtaatcaaagcgagcaagacaaaggcagttcacaatcacctaaacatattcagcagattgttaataagccattgccgcctcttcccgtagcaggaagttctaaggtttcacaaagaatgagtagccaagtcgtgcaagcgtcctccaagagcactcttaagaacgttctggacaatcaagaaacacaaaacattaccgacgtaaatattaacatcgatacaaccaaaattaccgccacaacaattggtgtaaatactggcctacctgctactgacattacgccgtcagtttctaatactgcatcagcaacacataaggcgcaattgctgaatcctaacagaagggcaccaagaaggccgctttctacccagcaccctacaagaccaaatgttgccccgcataaggcccctgctataatcaacacaccaaaacaaagtttaagtgcccgtcgagcggtcaaattaccaccaggaggaatgtcattaaaaatgcccactaaaacagctcaacagccgcagcagtttgccccaagcccttcaaacaaaaaacatatagaaaccttatcaaacagcaaagttgttgaagggaaaagatcgaatccgggttctttgataaatggtgtgcaaagcacatccacctcatcaagtaccgaaggcccacatgacactgtaggcactacacccagaactggaaacagcaacaactcttcaaattctggtagtagtggtggtggtggtcttttcgcaaatttctcgaaatacgtggatatcaaatccggctctttgaattttgcaggcaaactatcgctatcctctaaaggaatagatttcagcaatggttctagttcgagaattacattggacgaactagaatttttggatgaactgggtcatggtaactatggtaacgtctcaaaggtactgcataagcccacaaatgttattatggcgacgaaggaagtccgtttggagctagatgaggctaaatttagacaaattttaatggaactagaagttttgcataaatgcaattctccctatattgtggatttttatggtgcattctttattgagggcgccgtctacatgtgtatggaatacatggatggtggttccttggataaaatatacgacgaatcatctgaaatcggcggcattgatgaacctcagctagcgtttattgccaatgctgtcattcatggactaaaagaactcaaagagcagcataatatcatacacagagatgtcaaaccaacaaatattttatgttcagccaaccaaggcaccgtaaagctgtgcgatttcggtgtttctggtaatttggtggcatctttagcgaagactaatattggttgtcagtcatacatggcacctgaacgaatcaaatcgttgaatccagatagagccacctataccgtacagtcagacatctggtctttaggtttaagcattctggaaatggcactaggtagatatccgtatccaccagaaacatacgacaacattttctctcaattgagcgctattgttgatgggccgccaccgagattaccttcagataaattcagttctgacgcacaagattttgtttctttatgtctacaaaagattccggaaagaagacctacatacgcagctttaacagagcatccttggttagtaaaatacagaaaccaggatgtccacatgagtgagtatatcactgaacgattagaaaggcgcaacaaaatcttacgggaacgtggtgagaatggtttatctaaaaatgtaccggcattacatatgggtggtttatagcgttaatatccaaataaaagca

SEQ ID NO: 1656 - DNA, 560 bp, Saccharomyces cerevisiae
gagttaaatgtacagcagcaaaatcagtcactcacggagaaaagctacggtagcgtaacgaagagcacattgctactagcagccagctagataattgcagcagtgtacagtttacgcgacaataaagaaagcatgattttctttttcaaccagatccgttcaatatttacagctttgcatacgccaactcaacagatccaattatcaagaagggcctttttccaattcttaggctatttgggtagttgtgttgtgatttcattagcagctcaatcgaaatacgtgcagtaagaaatgaaataatgacctgcaacagtccttcttgagatggaatgaagtaattgctctttgaacgagagcacaaaagcaagcagaagtcgcgtatgtcaagcccatgatatagctgcttagatatataggtagatataaataagcacaatggctacagtaattgtgcggtgcagggaggcaatgtttagtgcatctcctctacatcatttctatttttaatctcgtccacgagaacgatttaaggaaatggggcttcaaaaataaaaaaa

SEQ ID NO: 1657 - DNA, 881 bp, Saccharomyces cerevisiae
attaaatattagtgaagatacaagtaacacagtttagttatattttcttttccttttcaacaggattgccaacgctgcagtagagttataccaacatttgctccgctttcaaaacctataaaagaaagcagccctcgaatcgaattaattcaccaaaaatgtctgcaaatagcaaggacagaaatcagtccaatcaggatgcgaagcgacaacagcagaatttcccaaagaagatttcagaaggtgaggccgatttatatctcgaccagtataacttcactaccaccgctgctattgtaagctcagtagaccgtaaaatcttcgttcttttgcgtgatggaagaatgctattcggtgtactaagaacctttgaccaatatgcaaatttgatacttcaagattgcgtggagagaatatattttagcgaagaaaacaaatacgctgaagaagaccgcggcatattcatgattcgtggtgaaaatgttgtcatgttaggcgaagtagacatcgataaagaagatcaaccccttgaggccatggaacgcataccatttaaggaggcttggctgaccaagcaaaaaaatgatgagaaaaggtttaaagaggaaacccacaaaggtaaaaaaatggcccgccatggtatcgtttacgatttccataaatctgacatgtactaagaaagaaaaacacaatactaccaacatatatcctggagtaaactctcaaaaatttccacattcagttttacctatccgtacacttaatcaactgccttttggagatggaacaataaaaaaaatgcaagagaggaggccgtatttgtatataaattaatatatttaaatgtaaaatatatacagtacttgagtttttttatgaag

SEQ ID NO: 1658 - DNA, 882 bp, Saccharomyces cerevisiae
agaatccgcccgtaaaaagaaaaataaagcaaactcgatacaatttcatgcaagaaggccatttgctaattccaagagcgaggtaaacacacaagaaaaaatggtcaaaccaattatagctcccagtatccttgcttctgacttcgccaacttgggttgcgaatgtcataaggtcatcaacgccggcgcagattggttacatatcgatgtcatggacggccattttgttccaaacattactctgggccaaccaattgttacctccctacgtcgttctgtgccacgccctggcgatgctagcaacacagaaaagaagcccactgcgttcttcgattgtcacatgatggttgaaaatcctgaaaaatgggtcgacgattttgctaaatgtggtgctgaccaatttacgttccactacgaggccacacaagaccctttgcatttagttaagttgattaagtctaagggcatcaaagctgcatgcgccatcaaacctggtacttctgttgacgttttatttgaactagctcctcatttggatatggctcttgttatgactgtggaacctgggtttggaggccaaaaattcatggaagacatgatgccaaaagtggaaactttgagagccaagttcccccatttgaatatccaagtcgatggtggtttgggcaaggagaccatcccgaaagccgccaaagccggtgccaacgttattgtcgctggtaccagtgttttcactgcagctgacccgcacgatgttatctccttcatgaaagaagaagtctcgaaggaattgcgttctagagatttgctagattagttgtacatatgcggcatttcttatatttatactctctatactatacgatatggtatttttttctc

SEQ ID NO: 1659 - DNA, 5398 bp, Saccharomyces cerevisiae
ttatctaactggccaccaaagtacgaataactttgaaaatgtcttcgttgagtgaccaattagctcaagttgcttccaacaatgctactgttgcgttggatagaaagagaagacaaaaacttcattctgcttctttgatttataactcaaagacggctgcaacacaagattacgatttcatttttgaaaacgctagtaaggctcttgaagaattgagccaaattgagccaaaatttgccattttctcaagaacactcttttcagagtcttccatttctcttgatagaaatgtccaaacaaaagaagaaattaaagatttggataatgctatcaatgcttacttgctattggcttcttctaaatggtatttagcacctacactacatgcaacagaatggttggttcgtcgttttcaaatacatgttaaaaacacagagatgctgcttttgtccactctcaactactaccaaacacctgtctttaagagaattctcagcattattaagttgccccctttgtttaattgtttgtcgaattttgttagaagtgaaaagcccccaacggcgctaaccatgataaagctctttaatgacatggattttctgaaactttataccagttatttggatcaatgtattaagcataatgcaacgtatactaaccagcttttatttacaacatgctgctttattaacgttgttgctttcaattcaaacaacgatgaaaaactgaatcagcttgttccaatcttacttgaaatatctgctaaacttttagcctctaaatcaaaggattgtcaaatagctgcacataccatattagttgtatttgctacagctttgcctttaaagaaaacaattatcttagctgccatggaaaccattctttcaaacttagatgctaaagaggcaaaacattcagcactcctcacgatttgtaagctgttccaaacattaaaaggacaaggtaacgtagatcagctaccttccaaaattttcaagttatttgatagcaagttcgacactgtgtctatactaaccttcttagataaggaagacaaaccagtttgtgataaattcattacttcctatacaagatccatagcaaggtatgatcggtccaaattgaacattattcttagcctactaaaaaaaataagactagaaagatacgaagttaggttgataatcactgatttgatttacctttccgaaattttagaggacaagtcacaattagtagaactattcgaatattttatctccataaatgaagatttggtgttaaaatgtttgaaatcattgggactgacaggcgaactcttcgaaatcaggcttactacatctttgttcactaatgccgatgttaacaccgacattgtaaagcagttaagcgaccccgtggaaactactaaaaaggataccgcttcatttcaaacattcttggataagcattcagaattgataaacacaacgaatgtgtccatgctaacagaaactggagaaagatacaaaaaggttttatctttattcactgaagctattggtaaaggctataaagcaagttccttcttgacttcatttttcactactttagaatcaagaataacgtttttgttaagagtaactatatctccagccgctccaaccgcgctaaagctaatatctttaaacaatattgcaaaatatattaatagtattgaaaaggaagttaatatttttactttagttccatgcttgatttgcgctttgcgagatgcttctataaaagttaggactggcgtgaagaagattctttccttgattgctaaaagaccatccactaagcactactttttgtctgataaactttacggagagaacgttaccattcctatgttaaatcccaaagatagtgaggcatggttatcaggatttttgaatgagtacgttactgagaattatgacatatccagaattttaacgccaaagagaaatgaaaaagtctttttgatgttttgggctaatcaagccctactaataccttctccgtatgccaagacagtgttgttggataacctgaacaagagtccgacttatgcatcttcttattcctccctatttgaggaatttatttcccactacttagaaaacagatctagttgggaaaagagttgtattgctaataaaacaaactttgagcattttgagcgctctttagttaatttggtatcaccaaaagaaaagcagtcattcatgatcgattttgttctcagtgctcttaactcagattatgagcagttagctaacatagctgccgagaggcttatcagcatattcgcttcattaaataatgctcaaaaactaaaaatcgtccaaaatatcgtggattcttcgagtaacgtagaatcatcgtacgatacagtcggtgtactacaatcattgccgttagattccgatatttttgtatccatactaaatcaaaacagtatcagtaacgaaatggatcagacagacttttctaaaagaagaagaagacgttcatcaacaagtaaaaacgcatttttgaaagaggaggtttcgcaactggcggaattgcacctgagaaagttgacgattattttggaagcacttgataaagtcagaaatgttggatccgaaaagcttttgttcactttactttccttattatcagatctggaaactttggatcaagacggtggattaccggttttatatgcgcaagaaactttgatttcttgtacgctgaacactatcacatacttgaaggaacatggctgtacagaactaaccaacgtaagggcagatatattggtatccgctattagaaattctgcatctccgcaagtccaaaacaaactattacttgtaattggatctcttgctactttaagttcggaagttattttgcattctgtaatgcctatctttacttttatgggagcccatagtattcgtcaagatgatgaattcacaactaaagttgttgagcgtacgatactaactgttgtccctgccttgatcaagaatagcaaaggaaatgaaaaagaggaaatggagttccttttgttgagcttcacaaccgctttgcaacatgttccaagacataggagggttaaattattttctacgttaatcaaaacacttgatccagtaaaggcactgggctcgttccttttcttgattgcacaacagtattcttcagctttagtcaactttaaaattggcgaggcaagaatattaattgagtttattaaggccctactcgttgatctacatgtcaatgaggaattatcaggtttgaatgacttactcgatatcatcaaattgttgacatcatcaaagagctcctcggaaaagaagaaatcactagaatcccgtgtcttgttttcaaatggtgtcttgaatttttcggaaagtgaatttttgacatttatgaacaatacctttgagtttatcaataaaataaccgaggaaacagatcaagattattacgatgtgaggagaaatttaagactaaaggtatattctgttttgttagatgaaacaagcgataaaaagttaattagaaacatcagggaagaatttggaacccttttagaaggtgttctttttttcattaattctgtagaattaaccttttcatgtataacttcccaagaaaatgaggaagcttccgactctgaaacatcattatcagatcacacgactgaaataaaggagattctattcaaggtgcttggcaatgtgttacaaattctaccagttgacgagtttgttaatgcggtattacccttactcagtacatccactaatgaagatattagataccacctaacgttggtaatagggtccaaattcgagttagaaggctctgaagctattcctatagttaacaatgtgatgaaggttttgctcgacagaatgcctttggaatctaaatctgttgttatttctcaagtaatattgaacacgatgacggctttagtgagcaaatatggtaagaagcttgaggggtccatattaactcaagccctcacccttgctactgaaaaagttagttctgatatgacagaggtcaagatatcttcgttggcattgataactaactgtgttcaagttttaggagtcaagtcaattgcgttctatccaaaaatagtcccaccttctattaaattatttgatgcttcattggcagatagtagtaacccattaaaagagcagttgcaagttgctatactgttgctgttcgccggtctaatcaaaaggataccaagtttcttgatgtcaaatattttggatgttttgcatgttatttatttttcccgtgaagttgacagcagcattaggctgtcagtaatttcattgataattgagaatatagatttgaaggaagttttgaaagttttattcagaatttggtccactgaaatagcaacgtccaatgatacagttgctgttagtctatttttgagtacattagaatccactgttgaaaatattgataaaaaatccgcaacctcacaatcgccaatattttttaagttactattatctttattcgaatttagatccatttccagtttcgataataatacaattagtaggatagaggcatccgttcacgaaatttccaactcttacgtcctgaagatgaatgacaaagtatttagaccgctatttgttatattagtaagatgggcgtttgacggtgaaggcgttacaaatgcaggtatcactgaaacagaaagactgttggcatttttcaaatttttcaacaagcttcaagaaaatttgagaggtataattacttcctatttcacgtatttgttagaacctgttgatatgttgttaaaaagattcattagcaaggacatggaaaacgttaatttaagacgtttggtaatcaactctctaacctcttcgctaaagtttgatagagacgaatactggaaatcaacttccagattcgagttaatttctgtatccttggtcaatcaactatctaatatagaaaactctattgggaagtacctggtcaaggcaattggcgctctggcttctaacaatagtggcgttgatgagcataaccaaattttgaataaactaatcgttgaacacatgaaagcttcctgttcctccaatgaaaaattatgggctattagagccatgaagttgatatactcaaagataggtgaaagttggttagttctattgccacagctcgttcccgtcatcgctgagttattggaagatgatgatgaagagatcgaacgtgaagtcaggaccggtttggtcaaggttgttgaaaacgttttaggggaaccttttgataggtatttagattagaaaaaaaaggtgaagtattatgtaaatttttgtaaagtaaaacactatgc

SEQ ID NO: 1660 - DNA, 2397 bp, Saccharomyces cerevisiae
gcaatcgattatattgaatcgttgtgctggagtagttggatctttccacgtggtctcgagtcacttgtagaagctgaaaattgagcagatttagtatagggctacattgtagggtggtttagagtatcgaaaatatacatatagaagaataaaatgggactcttagctttgggcacgcctttgcagtggtttgagtctaggacgtacaatgaacacataagggatgaaggtatcgagcagttgttgtatattttccaagctgctggtaaaagagacaatgaccctcttttttggggagacgagcttgagtacatggttgtagattttgatgataaggagagaaattctatgctcgacgtttgccatgacaagatactcactgagcttaatatggaggattcgtccctttgtgaggctaacgatgtgagttttcaccctgagtatggccggtatatgttagaggcaacaccagcttctccatatttgaattacgtgggtagttacgttgaggttaacatgcaaaaaagacgtgccattgcagaatataagctatctgaatatgcgagacaagatagtaaaaataacttgcatgtgggctccaggtctgtccctttgacgctgactgtcttcccgaggatgggatgccccgactttattaacattaaggatccgtggaatcataaaaatgccgcttccaggtctctgtttttacccgatgaagtcattaacagacatgtcaggtttcctaacttgacagcatccatcaggaccaggcgtggtgaaaaagtttgcatgaatgttcccatgtataaagatatagctactccagaaacggatgactccatctacgatcgagattggtttttaccagaagacaaagaggcgaaactggcttccaaaccgggtttcatttatatggattccatgggttttggcatgggctgttcgtgcttacaagtgacctttcaggcacccaatatcaacaaggcacgttacctgtacgatgcattagtgaattttgcacctataatgctagccttctctgccgctgcgcctgcttttaaaggttggctagccgaccaagatgttcgttggaatgtgatatctggtgcggtggacgaccgtactccgaaggaaagaggtgttgcgccattactacccaaatacaacaagaacggatttggaggcattgccaaagacgtacaagataaagtccttgaaataccaaagtcaagatatagttcggttgatcttttcttgggtgggtcgaaatttttcaataggacttataacgacacaaatgtacctattaatgaaaaagtattaggacgactactagagaatgataaggcgccactggactatgatcttgctaaacattttgcgcatctctacataagagatccagtatctacattcgaagaactgttgaatcaggacaacaaaacgtcttcaaatcactttgaaaacatccaaagtacaaattggcagacattacgttttaaaccccccacacaacaagcaaccccggacaaaaaggattctcctggttggagagtggaattcagaccatttgaagtgcaactattagattttgagaacgctgcgtattccgtgctcatatacttgattgtcgatagcattttgaccttttccgataatattaacgcatatattcatatgtccaaagtatgggaaaatatgaagatagcccatcacagagatgctatcctatttgaaaaatttcattggaaaaaatcatttcgcaacgacaccgatgtggaaactgaagattattctataagcgagattttccataatccagagaatggtatatttcctcaatttgttacgccaatcctatgccaaaaagggtttgtaaccaaagattggaaagaattaaagcattcttccaaacacgagagactatactattatttaaagctaatttctgatagagcaagcggtgaattgccaacaacagcaaaattctttagaaattttgtactacaacatccagattacaaacatgattcaaaaatttcaaagtcgatcaattatgatttgctttctacgtgtgatagacttacccatttagacgattcaaaaggtgaattgacatcctttttaggagctgaaattgcagaatatgtaaaaaaaaataagccttcaatagaaagcaaatgttaaactccttttacttcggttgtgaaagaaagttgacattatcgatttgggtgacacggtgattgaaaaagcaacgaccagtattatacctcttttttttattattcagtttatatttttgcaagtgatcttaagcatttctacacaaacttatgccaacgtgaccatttattattttatatagcaaaaaaaaatgaggggccttgcaga

SEQ ID NO: 1661 - DNA, 2803 bp, Saccharomyces cerevisiae
gcacacatcaaatgataccaacgattattattattacgaagttgtattatttatattctatcaaatggcaaacactgtaggaggaattctgtcgggtgtaaatccgttccactacaactccagttcgccgcttacattatttctctttcaagcatgtctcatactactggtatgcaatttaattcacattcccttttcaatgatgaggcagcctaaagtcatttcagaagttatatctggtgttattttggggcctactatatttggtcaaattccaaactatacaaacacaattttccctacatcatcgatcccggggctaaatttagtggcgaatttgggaataatactgtttatgttttttttaggtttagaagtggatattgctttcatcaagaaacacctaaagaaagcactcgtgataggtatagtcactttagcagtgccattcggttttggttgtctgctggcgattcctttatttcacacttatgcaaacaaaacagaaggcgaaaggcatattaaattctctgtcttcatggtatttatagctgtttccatctccgttacggcttttccagttttatgtcgtattttaaatgaattgcgcttgatcaaggatagagcaggtatcgttgtccttgcggcgggtatcattaacgatataatgggatggattttgttagcattaagtattattctttctagtgcagaagggagccctgtcaataccgtttatattctgcttatcacgtttgcatggtttttgatttatttctttcccttaaaatacctattaagatgggtgctcataaggacccatgaattggacagaagcaagccttcaccgttggcaacgatgtgcattctattcatcatgttcatttctgcttattttacggatattattggagttcatcctatttttggcgccttcattgctggcttagtagttcctagagatgatcactacgttgttaaattaacagaaaggatggaagatattcctaacattgttttcattccaatctactttgctgttgcaggattaaatgtcgatttgactctattaaatgagggaagagattggggctatgttttcgccacaatcggcatcgccattttcaccaaaattatttcaggtactcttacagctaaacttactggcttattttggagagaagccactgcagccggtgttttgatgtcatgcaaaggtatcgttgaaatcgttgtcttaactgttggtttgaatgcgggcattatcagtagaaaaatatttggtatgtttgtgttgatggcattagtttctacttttgtcactactcctctgactcagcttgtttacccagattcataccgggatggtgttcgcaaatccttatctacacctgcagaagatgatggtgcagcagatggtctcgattctgagggtgtggacaagactgaaattaacactcaacttaattcattggcagatgttagcaaatatagaattggtgaactgaccacggtgataaacactacagaagcgatctctccatctctaaagctgctaaattacctgtctttaggggtatctcccaagcctaagaataataaacataagaacgaaacctccttgagcagaatgacaacagctactgattccacattgaaatctaacacattcaaaataaaaaagatggttcatatctggtctaaaagcgttgacgatgtggataccaatttaagtgttatagatgaaaaattgaccccgtttgagggagtcggtgcattgagggccattcatttacgattgctcactgaacggacaactgatctgctgcaatcatcttctctatataatgatgatccccactttaccgcaaatacagattcactattacaaatttttgatatattttcaaacctgagcaaaataccattttcaagtgaagtcatattttctacaatgcgtgaaaaggcagctaatatagcgacgatgaaaatggattccacagatctgatcttattgccattaaaaggggcctcgtatgagtatagagggagcccagtcttcattgatgaaaaatacgcaaactttgatcacatttattctcatctcctaggtctgaatgaactatcatctactttcttcaagtctattttccagtcactcaaggcaaattttgccgttcaaatttcaaatacctatggcagattaaatgctgatcgctttaagaggaaacggttcaatttattacttccaaaaccatacctgacacaatccgattatcttggactatatcttctcttattgatatgctatagagatggctataataatgataatgcatcctgtagtatatttattaacagcaagaatattgatttcgcaaaagatttgtcaactgcatttgctgagcatgactggctaaacgaatctaccattaaaattgtggatatcccctttgaaacgaaagttccagaagaagcaattgaaaagccgtcctttatagagactgtgcttgatgttggtttatcagatactgctttagctgatatagaggagactacctttattattggagaggaccttcctgatgaaagtgagcccttcagcgaagaggtgaggactgtaatatttgaagggtcgaatcgtcgttttgacacccttattgtgcaccatttttcgtctgaataagtatcagcagaaattttttaattttctttgttcttaattttcagtcattccgtcattccgtcatctatgtttattgttctatattattacgtatgcataaatatcttaagtatagat

SEQ ID NO: 1662 - DNA, 2076 bp, Saccharomyces cerevisiae
atgacaaggttcatgaacagctttgccaaacaaacgctgggatatggcaatatggcgacagtggagcaagagagctcagctcaggctgttgattctcattcaaacaacacaccgaagcaagctaagggtgttcttgcagaggaactaaaggatgcattgcggttccgggacgaaagagttagtattattaatgcagagccttcttcaacactgttcgtcttttggtttgtggtttcatgctatttccctgtgattactgcctgcttgggtcccgtagctaacactatctcgatagcctgtgtagttgaaaaatggagatccttaaagaacaactccgtggtgacaaatccacgaagcaatgacaccgatgttttgatgaatcaagtaaagacagtttttgatcctcctggtatttttgccgttaatatcatctctttggtactgggttttacgtcaaatattatactaatgctacatttcagtaagaagttgacgtatcttaaatctcagttaataaatataacaggatggacaatagctggagggatgcttttggtggacgtgattgtatgctccttgaatgacatgcccagcatctacagtaagactatcggattttggtttgcctgtatcagttctggtctatatttggtatgcaccattattttaacaatacattttattggatataaattaggaaaatatcctccaacgttcaaccttttgcccaatgaaagaagtatcatggcatacactgtactattgtctttatggttgatttggggtgcgggtatgtttagcggtttattgcacatcacttacggaaatgcattatatttctgcacggtatcattattaaccgtgggactaggtgacatcctgcccaagtcggttggcgccaaaatcatggttttaatcttttcgctatctggtgttgtcttgatgggtttaatagtgtttatgacaagatccatcattcaaaagtcctctggcccaattttctttttccacagagttgaaaaaggcaggtccaaatcgtggaaacattatatggatagtagtaaaaatttatctgaaagggaagcgttcgacttaatgaagtgtatccgacaaacggcctcaaggaagcagcattggttttctttgtcggtgactattgcaattttcatggctttttggttattgggagctcttgtattcaaattcgcagaaaattggtcgtacttcaattgtatttacttttgtttcttgtgcttattaaccattggatacggagactatgctccaaggactggtgcaggccgtgctttttttgtgatttgggcgttgggagccgtgccattaatgggggctatcctatctacagtcggtgatctgttgtttgacatttccacttctctggatattaagatcggtgaatcattcaataataaagtcaagtccatcgtttttaatgggcgtcaaagagcactttcctttatggtgaacactggagaaattttcgaagaatctgacacagctgatggtgatctggaagaaaatacaacgagctcacaatccagtcaaatttctgaattcaacgataataattcagaagagaatgattctggagtgacatcccctcctgcaagcctgcaagaatcattttcttcattatcaaaagcatctagcccagagggaatacttcctctagaatatgtttcttctgctgaatatgcactacaggactcggggacctgtaatttaaggaacttgcaagagctacttaaagccgtcaaaaaactacatcggatatgtctggcggataaagattacacacttagtttttccgactggtcgtacattcataaactacatttgaggaacattacagatattgaggagtacacacgcggacccgaattttggatatcacctgatacgcccctcaagttcccgttaaatgaacctcattttgcttttatgatgcttttcaagaacatagaagaattagttggtaatctagtagaagacgaagagctttataaagttataagcaaaagaaaatttttgggtgagcatagaaagacactttga

SEQ ID NO: 1663 - DNA, 1623 bp, Saccharomyces cerevisiae
agaagaatatgtcgactttaaaacagagaaaagaggactttgtgacagggctcaatggcggttctataacagaaattaacgcagtgacatcaattgctttggtaacttacatatcatggaacttattgaaaaattccaaccttatgcctcctggcatttccagcgtgcaatacataattgattttgcattgaactgggttgctttgcttctatctattactatttatgctagtgaaccataccttctaaacacgctaatactgttaccttgtttgctcgcattcatatatggaaaatttactagctcgagtaaaccttctaatccaatatacaataaaaaaaaaatgattacacagcggttccaactagaaaaaaagccgtatattactgcgtatcgtggtgggatgcttattctgactgctattgccatcttggctgtagattttccaattttcccaaggaggtttgccaaggtggaaacttgggggacatccctgatggatcttggtgtaggatcattcgttttcagtaacggtattgtttcttctagggcactgttgaaaaacctaagcttgaagagtaaacccagcttcttaaaaaatgcatttaatgccttaaaatcaggaggaactctattgttcctaggattgctgaggttgttttttgtaaaaaatttggaatatcaagaacatgtcacagaatatggggttcattggaatttttttatcaccctatcattgttgccacttgtattgacctttattgatcccgtcacaagaatggttccacgctgctcaattgcaatattcatttcatgcatttatgaatggctacttttaaaggacgatcgcactttaaactttttaattttggctgatagaaattgtttcttcagtgctaatagagaaggcatcttctcatttctaggttattgctcgatttttctttggggccaaaacacgggattttacttgttgggaaataaaccaactttaaacaatctttataagccttctacgcaagacgtagttgcagcatcaaagaagtcttcgacttgggactattggacttcagtaaccccattaagtggcctctgtatatggagtacaatttttcttgttatcagccagttggtttttcaataccatccttatagtgtttcaagaaggtttgctaacttaccatatactttgtgggtcattacttataatttactatttttgactgggtactgcttgactgacaaaattttcggtaattcttcggaatattataaagttgccgaatgcttggaatcaatcaactccaatgggttgtttttatttttgttggcaaatgtctctactggtttagtcaatatgtctatggtcacgatagattcttcacccttaaaatcattcctggttttgttggcatactgctcattcatagctgtcatatcggttttcttgtatagaaaaagaatattcattaagctataataacacaccatccacatttccatgtagttcgtatacaaaccctaccagtaaaataaaattaactcctatgtgctttaaataaaaattataaaccgcctccaatagttgacgtagtcaggcatgaaagtgctactaatcgatg

SEQ ID NO: 1664 - DNA, 1623 bp, Saccharomyces cerevisiae
cttcgttataaggcggtgaaaagcataactatgtccaatgctgctttgcaagtttatggcggcgacgaagtttccgcagtagtcattgatcctggctcatacacaacaaatattggctattcgggttctgacttccctcaatcaattctgccctctgtttacggtaaatacactgcagatgaaggcaataagaaaatattttctgaacaatcaattggaattccaagaaaagattatgaactgaaacctattatcgagaacggtctagtcatagactgggataccgcacaagaacagtggcaatgggcattgcagaacgaactctatttgaattccaactccggaataccagctctgttaactgagcccgtttggaatagcacagaaaacaggaaaaaatctttagaagtgctcttagaaggcatgcaatttgaagcctgttacttagcacccacatcgacatgcgtttcttttgcagcaggtagacccaattgtttggttgttgatattggacatgatacttgcagcgtcagtccaatagtggatggtatgacattatcaaagagtacaagaagaaattttattgctgggaaatttatcaatcacttgattaaaaaggcattggaacccaaagaaatcataccacttttcgcaatcaagcaaagaaaaccagagtttataaaaaaaacattcgactatgaggttgataaatcgctgtatgattacgccaataaccgagggttctttcaagagtgcaaagaaacactttgtcatatatgcccaacaaaaactttggaagaaacgaaaacagaattaagttctacggctaaaagatctattgaaagtccttggaatgaggagattgtttttgacaacgaaactcgttacggctttgctgaagagcttttccttccaaaagaagatgacatcccagcaaattggcctcgctcgaactctggagttgtgaaaacttggcggaatgattacgtgccgctaaaaagaaccaagccaagcggagtgaacaaatcagacaagaaagttacaccaactgaagaaaaggaacaggaagctgtaagcaaatctacttctccggctgcaaatagtgcagacactccaaatgaaaccggtaagagaccgttagaagaagaaaagcctcctaaagaaaataatgaattgattggtctagcggatcttgtttattcgtctataatgagcagtgatgtggatctaagagcgacactagctcataatgttgtccttacaggcggtacatcctctattcctggattaagtgataggttaatgacagaactaaacaaaatactaccatcccttaaatttagaatattaacaacagggcacactatcgaaaggcaataccagtcatggcttggcggtagtatacttacaagtctgggaacatttcaccaactgtgggttgggaaaaaggaatacgaagaggtgggcgtcgaaagattgcttaacgataggtttagataggaatagaaaacgttgttgaatgacaagtcgcctttcagtttagcagtttgagcgaccattcatctactcgatcaatatctcagtgataaataaattgtcttgattctactataacccttttgt

SEQ ID NO: 1665 - DNA, 3934 bp, Saccharomyces cerevisiae
cgtctttgaaaaagaacgtctaagtacacaacagcactttctattttcctttgaaattgctgtcttttatctagcataatttttaaggtgaatcattctgatttcctaactttccgtctattgtcttttggttaccacgcttaaaatatacttcccacaccccctccttccattataactgcaatgtctgaagaacaaaccgctattgactctcccccttccactgtcgaaggatctgttgaaaccgtaactaccattgattcgccaagtactactgcctccactattgctgctaccgctgaagaacatcctcagttggagaaaaagccaactccattgccatctttgaaggatcttccttctttgggttcaaatgctgccttcgcgaacgttaaggttagctggggcccaaacatgaaacctgctgtctctaactcgccatcaccttccccttctgctccttcattgactactggccttggggccaagaggatgcgttcaaagaacatccaagaggctttcactttggacctgcaatctcagttgtcaatcaccaaacctgaattatctcgtattgtccaatctgttaagaaaaatcatgatgtttctgttgaatcaactctttctaagaatgctcgtacctttttggtttctggtgtagctgctaacgttcatgaagcaaagagagagttagtgaagaaattaacaaaaccaatcaatgctgtcatcgaggtcccatccaaatgtaaagccagtattatcggttcaggtggtagaactattcgtgaaattagtgatgcctacgaagttaaaatcaatgtctcaaaggaagtcaatgaaaactcatatgatgaagacatggatgatactacaagtaacgtttctttatttggtgattttgaatcggtcaacttggctaaggctaaaatcttggccattgttaaggaagaaaccaagaatgccacaatcaaattagtcgttgaagatgaaaaatacctaccatacattgatgtttccgagtttgcctccgatgagggtgatgaagaggtcaaagtccaattctataaaaaatcgggtgatattgtcatattgggtcctcgtgaaaaagcaaaagccacgaagacatctattcaagattatttgaaaaaattagcttctaatttggacgaagaaaaggtcaagattccatccaagttccagtttttgattgatgcagaagaactaaaagaaaaatacaatgtcattgtcactttcccatcaactcctgatgatgagcttgtgtcatttgtcggtttgcgcgataaggttggtgaagctatcacctatgccagatcgtcttcaaagagctatgtggttgaatctttagatatttccaaggctcatagtaagaatctgacccatgccaaaaatctaatcatgtatttcaccaagtactccgttttaaagggtcttgaagaatctcatcctaatgttaaaatatctttaccatccatacagtcattgccaacagctgaaactgttaccatccacatcagcgcaaaatctgatgaggcaaacgatatcaaggccgttcgtaaagaattgatttcttttgtgaacaatattccaccttccgaaaccctggttatcacagatttggattacgagttgttcggcgggtctattaaacattgtttattagcttccgaaagcagcgttgcctttgttcaattcggtgattattatccaaatgataacagtattttacttgttgctttaactgaagatgaagatttcaagccatctattgaagagattcaagcatctttgaacaaggccaatgagtcattaaactctctacgtactaaacaaaacaacatggagactaaaacttacgaattttccgaggaggttcaagactcattgtttaaaccatcttccgctacatggaaattgattatggaggacatttctgaacaagaaggccaccttcaaattaaactacatacccctgaagaaaatcagttaactgttagaggtgatgaaaaagctgccaaagctgctaacaaaatttttgaatctattttgaattctccatcgagcaaaagcaaaatgactgttaatattccagccaactcagttgccagattaattggtaacaagggctccaacctacaacaaattcgtgagaagtttgcctgccaaattgatattccaaacgaagagaacaataatgcttcgaaagataagactgtcgaagttactttgactggtttagaatacaacttgactcatgccaagaaatatttggctgccgaagccaaaaaatgggctgatatcatcacaaaggaactaattgttccagttaagtttcatggtagtctgattggtccacacggtacttatcgtaaccgtttgcaggaaaaatacaatgtcttcattaacttcccaagagacaatgaaattgtcaccattagaggcccttctcgtggtgtcaataaagctcatgaagaattgaaagctctgttagattttgaaatggagaacggacataagatggttattaatgttccagctgagcacgtcccaagaattatcggtaagaatggtgacaatatcaacgacatcagagctgaatacggtgttgagatggatttcttacaaaagagcaccgatccaaaggctcaggaaactggtgaggttgaactggagatcactggttctagacaaaacataaaagatgccgccaaacgtgtggaatccattgttgccgaagcctccgattttgtcactgaagtcttgaaaattgatcacaaataccataagtcaattgttggtagcggtggtcatattttaagagaaattatctccaaggctggtggtgaagaaattagaaataagtctgttgatattcctaacgcagactccgaaaataaagacattaccgtacaaggtcctcaaaagtttgtcaaaaaggttgtcgaggaaattaacaagattgtcaaggatgctgaaaatagtgttactaagaccattgatattccagcagaaagaaagggtgctttgattggccctggtgggattgttcgtcgtcaactagaatccgaatttaacattaacttattcgttcctaataaggatgaccctagcggcaaaataactattaccggtgcaccagaaaatgtcgagaaagctgagaagaaaatcttgaatgaaataatcagggaaaattttgaccgagaagtcgatgttcctgcctccatttatgaatatgtttcagaacgtggtgctttcatacaaaagttgagaatggatttatccgtcaatgtaagatttggtaacacctcaaagaaggctaacaaattagctcgtgctccaatcgaaattcctctagagaaagtctgtggatctaccgaaggcgaaaatgcagaaaagactaaatttaccatcgaagaagtcggtgcaccaacttcttccgaggaaggtgatattaccatgaggttgacatatgaaccaattgatttgagtagcattctctctgacggtgaagaaaaggaagtcacaaaggacacttcaaacgattccgctaagaaggaagaagctctcgatactgctgttaagttgattaaagaaagaattgccaaggcaccatctgctacatatgccggttacgtctggggtgctgataccagaagattcaatatgattgttggcccaggtggttctaacatcaaaaagattagagaagcggccgacgttatcatcaacgtcccaaggaagtctgacaaagtcaatgatgttgtgtacattagaggtaccaaagctggtgtcgaaaaggccggtgaaatggttttgaaatccttaagaagatagacaagctctttgaaaccaatttttttcaatatagattttggcttttacttacttatataatccattaatatctacgatgtgt

SEQ ID NO: 1666 - DNA, 1249 bp, Saccharomyces cerevisiae
tttctattctgaaaacaagcaaggaatcttcaatcgcgctctcttttcaatcctagttgctaccgttaggtctatcgctacgtcgtaagctatttcaattcattctttttttataggccgccacactcttccgctctttgatattactttttcttcgtttttaatatcccgtaattgataaatcatgaaactttctaaattatcgatcttaacctccgccttagccacgtctgcattggccgctcctgccgttgttactgtcactgaacacgcccatgaggctgcagtcgttactgtgcaaggcgtagtttatgtcgaaaacggccaaacacgtacaacttacgaaacactagctcctgcttccactgccactccaacttctacagctacagctttggttgctccccctgtcgctccttcctctgcttccagcaattccgatgtggtcttgtctgctttgaagaacttagcctctgtttggggtaaaactaccgattcaacgaccacgttgacatcttctgaatctacatcgcaatcgttggctcaagctactacgacttctacacccgctgctgcttccaccacttccacacccgctgctaccaccaccacttctcaagccgctgctactagctcagcatcgtcttcggatagtgacctgtcagattttgcctcttctgtgttggctgaacacaacaagaagagagctttgcacaaggacacaccagctttgtcctggtccgatactttggcctcctacgctcaagactatgctgacaactatgattgctccggcactttgacccattctggcggtccatacggtgaaaacttggctttgggttatgacggcccagctgccgtcgacgcttggtacaatgaaatttccaactacgacttctcgaatccaggcttttcaagtaacactggccactttactcaagtcgtttggaagtccaccacccaagttggttgtggcatcaaaacctgtggcggtgcatggggtgactatgtcatctgtagttacgaccccgcaggaaactacgaaggcgaatacgccgataatgtcgagcccctagcttaactttcaagaaaagttttcattgatccttctttctcattccttcatttaatgttcgttttatcttcattgttttacgaggatttttctgcttcagcagttccttgttcactaagtatacccatatatacccgcctatataccccaatttttttatacagtaacgaa

SEQ ID NO: 1667 - DNA, 2894 bp, Saccharomyces cerevisiae
aaaattataattgctgcacccctgcaactccaaacaacttaaaacaacttaaaacgaaaacgcttatgctggagtttccaatatcagttctgctaggatgcctagtagccgtcaaggcacaaaccacgtttccaaacttcgagagcgatgtgctgaacgagcataacaagttcagagcgctacatgttgacacagcgccgctcacctggtccgacactctggccacctatgcgcagaactacgccgaccaatatgattgttcgggtgtcttaacgcattccgatggcccatatggtgagaaccttgcccttggttacacagacacgggagcggtggacgcctggtacggggagataagcaagtataattattcaaatcccggattttctgaatccacgggtcacttcacacaggtggtttggaagtcaaccgccgagattggatgtggttataaatattgtggtacgacatggaacaattatattgtgtgctcctacaaccctcctggaaactacctgggtgagtttgcagaggaagtggaaccacttataagcactgtttcctcgtcctcatcctcgtcctcttctacctcaactacatcagacacagtctccaccatctcatccagtattatgcccgctgtagcgcaagggtatacaacaacggtatcgtctgcggctagcagcagttctttaaaatcgacgaccataaaccctgccaagaccgctaccctcactgcgtcctcttctaccgtaattactagtagcacagaatcagttggatcctccactgtctcatcagcctcaagctcttctgtcactacttcctatgctacctcctcgagtaccgtcgtctctagtgatgctacttcatccactaccaccacctcatcggttgctacatcgtccagtaccacttcttccgaccctacctcgagcactgctgctgcttcttcttctgatcctgcctcaagttccgctgccgcttcctccagcgcgagtaccgagaacgccgcttcttctagcagcgccatctcgagctcttcatcaatggtttctgctcctttgagtagtactcttactacttccaccgcaagctccagaagtgtaacttccaattcagttaattctgttaagtttgcaaacacaactgtgttttctgctcaaacaacctcttctgtaagcgcctcattatcatcatctgtagctgctgacgatattcagggtagcacttccaaggaggccacaagctcagtttccgaacatactagtatagtaactagtgcaactaatgctgcccaatatgcaacgagacttgggtcatcttccagaagttcttccggggccgtctcttcctcagctgtgtcgcaatctgttctgaattccgttatagccgtcaacaccgacgtatctgtaacctcagttagtagcacagcccataccacaaaggacaccgccaccacttcagtaaccgcctcagaaagtatcacttcggaaactgctcaggcttcaagttcaacagagaagaatattagtaacagtgccgccacatcgagtagcatttactccaacagtgcttctgtgtcaggacacggtgtaacatacgctgccgaatacgccattacatccgagcaatcctctgcgcttgccacatctgtgcctgctacaaattgctctagtatcgtgaagaccacaactttagaaaattcgagtaccacaaccatcacagccattactaagagtactacaaccttggccactactgctaacaactccacaagggcagctaccgcagtaaccatagatcccacattggaccctaccgacaactcagctagtccaaccgacaatgctaaacacacctctacatatggatcttcttccacaggcgcatctttagatagcttacgcacaaccaccagtattagtgtctcaagcaacaccacacagttagtctctacctgcacttccgagagcgattattccgatagtcctagcttcgccatctccactgccaccaccactgaaagcaatctgatcacaaacaccatcacagcttcttgtagtacggatagtaatttccctacctccgctgcttcttctacagatgagacggccttcactagaacaatctcgacatcttgtagcactttgaacggcgcctcaacccaaaccagtgagctaaccacatcgcctatgaaaaccaacacggtggttccagcttcttctttcccttcaactacaaccacttgtctagaaaatgatgacactgccttttctagtatctacactgaagtcaacgccgcaactatcattaaccccggagaaacatcttctctcgctagcgatttcgccacatctgaaaagccaaacgagcccacttctgtcaaatccacctcaaacgaaggcacctcttccacaacaacaacctaccaacagactgttgctacactgtatgccaagccctccagcacaagcctaggtgcaagaacaactactggtagcaacggtcgttcaactaccagccaacaagacgggtctgccatgcatcagccaacttcctcgatctacactcaactaaaagaaggcacatcaaccaccgcaaaactttctgcatacgaaggtgctgcaacacctctttccattttccagtgcaatagtctagctggaacgattgccgcttttgtcgtagctgttctgttcgccttctagactcctcgaacaacacccaactatgcattttttttcctaaacgagcgacacctccacacccgtgcgccaatcacagtaattattattcctaaagaggtaatatgtacgcacagagtcatttcccgatgtggataaaaattgcctgtctgctcgaaggggagggatcgcatacccattacctgt

SEQ ID NO: 1668 - DNA, 642 bp, Saccharomyces cerevisiae
atgtcactaccggcacatttgcagcagactttctcaccagaagaaatacagttcattgtggaaaacgagccaataaagatttttcccagaataacaacacgccaaaaaattcgtggcgatgatagaggaactggaaaccacacccgctggcaacttattactacagatgacaaagctttaaataatatggtagccatgcgttctacagaagtggttctttggatcgctctattactgaagcaacaatccaagtgcagtattgtagcaccacagtggttaacgacgaaagagcttgatagaaaaatacaatatgagaaaactcatccggataggtttagtgagttgccgtggaactggcttgtcttggcacgtatacttttcaataaagctaaggatgattttcatgaccccattcacgaattacgtggtaaaatacaagacttaagggaaataaggcagatcaaagtgttaaaaggccttaagtatttgaatgaatctcatttacaattggataatttaagtctattagaaatcaatgagttgaggccgttcattactgaaatcatggataaactgcgagaaattcacacagcatctcttaccgctggtactgaaaatgatgaagaagaattcaatatttaa

SEQ ID NO: 1669 - DNA, 1875 bp, Saccharomyces cerevisiae
tatcagcctacattagtgcgacaatgacaatggcaacaaccgcaatgaatgttagcgtacctccaccagatgaagaagaacagttactagccaaatttgtattcggtgatacaacagatttacaagaaaatctcgctaaatttaatgccgatttcattttcaatgaacaagaaatggatgttgaagaccaggaggatgagggatctgaatcagataacagtgaagaagatgaagcgcagaacggtgaattagaccatgttaacaacgatcagttattttttgtggacgatggtggtaacgaagatagtcaagataagaatgaagataccatggacgtggatgacgaagatgactcttcaagcgatgattattctgaggactctgaagaagctgcttggatagattcggatgatgaaaaaattaaagtgcctattcttgttaccaataagacaaagaaattaagaacctcctataacgagtccaaaatcaacggtgttcattacatcaacagattgagatctcagtttgaaaagatatatccaaggcccaaatgggtggacgatgaatctgattctgaattagatgacgaagaagacgatgaagaagaaggctctaataatgttattaatggagatattaatgctctaacgaagatcctgtctactacttacaattataaagacactttatcgaattccaaactattaccccctaagaaacttgacattgtgcgtcttaaagatgcaaatgcatcacacccgtctcattccgccatacaatctctttcattccatccttctaagcctctactgttaacgggtgggtatgataagaccttaagaatatatcatattgacgggaaaacgaaccatctagtgacaagtttgcacctggttgggtctccaatacaaacatgtactttctatacttctctatcaaaccaaaatcaacaaaatatattcaccgccggtagaagaagatatatgcattcctgggacttatccttagaaaatttaactcattcacagactgccaaaatcgaaaaattttccagattgtatggacatgagtccactcaaagatcatttgagaatttcaaagttgcacatttgcagaattcacaaacaaattctgtccatggaattgtccttttacagggtaataatggttggattaacattttacattccacttccggactatggttaatgggctgcaagatagaaggtgtgataacggatttctgtatcgattatcaacctatttcacgtggtaagtttaggaccattttaattgctgtaaacgcgtatggtgaagtgtgggaatttgacttgaataagaatggccatgttataagaagatggaaagaccaaggtggcgtgggtataacaaaaatccaagttggtggtgggacaacaactacttgtccggctcttcaaataagtaagataaagcaaaataggtggcttgcggtaggtagtgagagtggatttgttaatctttacgatagaaataatgctatgacctcgtcgacccctacacctgtcgccgccttggaccagctaacaactaccatttctaatctacaattttcccctgatggtcaaatactgtgcatggcatcccgtgcagtcaaggatgctttgagactagttcatctgccttcttgtagcgtgttcagcaactggcctaccagcgggacgcctttgggtaaagttaccagtgtcgcattttcgccatctggtgggctactggccgtgggtaacgaacaaggtaaagtgaggctctggaaattaaaccactactaaatttccatttatagacaaacttagatattaaaagcaatgtacaaatacatacacaaaatatcactgt

SEQ ID NO: 1670 - DNA, 986 bp, Saccharomyces cerevisiae
atgaaggttgttaaggaatttagtgtctgtggtggcagattgatcaagttgtcacataactcgaactctaccaagaccagcatgaacgtcaatatctatttgcctaagcactattacgcccaagattttccaagaaataagcgtatcccaactgtgttttacctttctggcttgacgtgcacgccagacaacgcctctgagaaggctttttggcagtttcaagctgacaagtacggatttgcaatagtctttccggatacgtccccacgtggtgacgaagtagccaatgatcctgagggctcctgggattttggacagggcgccggattctatctaaatgccacccaagaaccatacgcccaacattaccagatgtacgactacattcacaaagaactcccacaaacattagattctcattttaacaagaacggtgacgtaaagctggacttcttggacaatgttgccatcacaggccattcgatggggggatatggtgcaatttgtgggtatttgaagggctattccggaaagagatacaaatcttgttctgccttcgcccctatcgtgaacccttccaacgttccctggggtcaaaaagcgtttaaaggttatctgggcgaagaaaaagcccagtgggaagcgtacgacccatgtttattaatcaagaatattagacatgtgggcgacgacagaattttgatccatgtaggagactccgatccctttttggaagaacacttgaaaccggaattactacttgaggcggtgaaagccacttcatggcaggactacgtggaaataaaaaaagttcacggctttgatcactcctattactttgtcagcactttcgttccagaacatgctgaatttcatgcgcgaaacttgggtttgatttgagaggcatcgcatttcattatggtaatttttatgacttttctatgtacatatttagtgaaatatacgtccgtagaaaaaaatggcca

SEQ ID NO: 1671 - DNA, 948 bp, Saccharomyces cerevisiae
atgggcttttatgaaggcgatgacaatgatgccaacaccaaggcatttaatgacaaatatatcaaagatcaaaagttcgcaacggcacccttctggaacctctttccaaagttaagggatattgatgaatacgataatccactcctaccactgcccttcaatttcaacttcagagatcttggagatagtgcacttgccatggcgtccggaatccctacggtgaagcagtttgacaagtgcgaagaacttaagggccagtctgcatggaccacccaagggatttggaaatgtcttgtcccaagtaaggctatcccccctctaccacaattggacttcctcttacctctggaggagatcaaatctgacaagtcgcactctcatgggttgttcttcaatgatttcaacctctttttgaagtggaggtcgcacatgaatagactacaaaaacaaagaatcaagactaggagcactgccgtagagcctctggctagaactccagaagacctcatgttgaattgggacgacttgcatctgggcaacgatgctgaatatgcttctgcagatggatccaagaaaattgttggaagggcacagtccattagtaccacgaaggattccaatgatgcaaaacccagcaccgtcaaaactgaaaaaatctactttgacgatggcacggtagacattactaccaccactacctccaagggttccagtccccaggtgaagcataaagtggtgagtgttgacgaagacaattaggacatattttcgtttcctttttttactcatatcttacacaatatgccttgtatatatcgcacgattatgaccttgcgcgtgtggaaaacatgcgactgctaaggggagatccacacacacacacacaaaagatcaatacacatttttgacaatatatagcatcaataaaatacatataagcgattcaca

SEQ ID NO: 1672 - DNA, 602 bp, Saccharomyces cerevisiae
atgaacaacgagactagtggtaaagaaacggcgtctgcacctctgtgttcgcccaagttacctgtagaaaaagtgcagagaatagccaagaatgatccagaatatatggacacttcggatgacgcattcgtagccacagcgtttgctacagaattcttcgtccaggtgctgacacatgagtccctacataggcaacagcagcagcaacaacaacaggtaccgccgctcccagatgaactcacgctgtcgtacgatgacatctctgccgcaattgtgcactcttctgacggccatctgcagtttttgaatgatgtgataccaacaacaaagaatttgaggcttctagtggaagaaaaccgagttagatatactacaagtgtcatgccccctaatgaagtttactccgcctatgtggtgaacgatacggctccgaagcccaacattgtcgagattgatcttgataatgacgaagacgacgacgaagacgttactgatcaagaataactacacaagcacattgcatagaaggatttttcttctctctctcacgatctgtagaacaacatagtttctttatacgttaattaagtaaaggggaaaaa

SEQ ID NO: 1673 - DNA, 806 bp, Saccharomyces cerevisiae
aaacggtgagaagcacagtcgagcgcaacaatgacagtgggtattgctaggaaactctctagggacaaggcgcatagggatgcgctgctaaaaaaccttgcgtgccagttgtttcagcatgaatctatagtgtcaacgcatgccaaatgtaaagaggcttccagggtcgcagagcggatcattacctggacaaagagggcaataacgacaagtaatagtgttgcacaggcggaattaaagtcccaaattcagagccaattgtttttagcaggagacaacagaaagttgatgaagcggttgttcagcgagatcgcaccgcggtacttggaaaggcccggtgggtacacgcgtgtgctgcggttagagcctagggctaacgactcagcgccgcaatccgtcttggaactagtcgactctcccgtgatgtccgaatcgcatacggtgaacaggggcaatttaaagatgtggctgttagtcaagtcagtcatcaacgatgacgccaaccagctacctcataacccactcacattgcagaatcttcacaaagtggccaagtttaaagcagaagcgcagctacatggtgaaattatgctcatcaagcaggtcttactcaaggaaatgtcccttccctatgatgaggcactcgaaaacgaaaggacgcaggcacttttgaaggaggtctactcttcgtcattgccaaagaagacgaagaaaccctcctcctatgtcatggttcccagaccttaaaaaaaccaggattttgtgtattcccttgtaaatatatagatgacaattgaaagaacagc

SEQ ID NO: 1674 - DNA, 1491 bp, Saccharomyces cerevisiae
agagggttagctgtcgtgcgtttgtattttttcgcttatgcaaccatgaaggatgtcttacaatgggcgattgaccactacgagacaagagaccaactggtgcagaagggaatttggaaaggtgaactctaccatgactctatctttaaagaaaatagtagaggctggctctggaaagctttgcttctgtgtgatgaaaacaacaactgcttgttaactgataactttaaaggtttggaccttaaccagttcggcttggtgccagtgcctatgctggcagatggcgacaactatgacgaaaatcataatgcaaatgtacctaaaagggtcttgcactcgaacgtttcctcctcagtgggaatcaggaggctgactcccgtcgaggctgttgaaaaacatcccttgtctgatgacaatgacaaaactaaaggttctttgtccaagggaagtgatgaaaagccgttgacactgagggaaactctggaaattatagatttggacctctcaaggataatgcttgacgatatatttcaggaacccaaggttcatgctcaaatgagacaacttttgtacaattacctgcttatacatcaaagcgaacacctacagtataaacaagggttccacgaaatattaagcgtcatttatctgcaattatatcacggtacagatctcgataataccgatttgcaaaacgttctgattatctttaacaagctaatgaaccaaatcgaaccgattttttataacgaagaaaatttgattaactgggataagagagtattcacgaaaatctttaggatttgtttgccagacttgttttcaaaggttttttaccaaccaccaaaaacgggcagcgggaagaaaaaaaacgtagaccatctgattcactccaacctaatctggctcatccgatggacaaggttgttatttttaagagaattacccttaaaatatgtgctaatcgtttgggaccacgtcctgacgttcaattatcccttggatattttcattgcatgcactatcatcacccttttgttatccatttacgatgagcttcacgaactagtgagccaaggtgactatgaacatacgaataataacgatgaatttgttgaattgattttgcatttcaagaaaatttttgaaaaggaagatgccagtaaagatgatgaaaagtttttagacctgtgtaaggtcactggaaatttatgtgaattgtggtatggaaaaaattacgacgatatgagattgatttgcgacacttttataaatgcgaagttcggcataaagactagtgatgttttaagtatggaaacagcaaagttgactattgatcctaatagacaatcactcgaaaacaaactgagggagagggtaaggcaaacaattttgaagaacaaaaagaaaataagccaataagtttttcttgtcaattactcgttgttatttgtttgaaatcccagcctgcacacccgcacgacaaaatca

SEQ ID NO: 1675 - DNA, 5248 bp, Saccharomyces cerevisiae
tccgcagataagaaaaaatgaaatggtctgcaattcctttccaaacattgtatcgctctattgagagtggtgagttcgattttgatctgttcaaagaggtacttcctgacttacaaaatttgaacttaaacacagacaaactaaaaaacaatgctagccgatcacaattagaaaaaggtgaaattgaactatccgatggctctacttttaaggtcaatcaggagtttattttcgaagctatttctttgtccgatgaattaaacttggatgaaattgttgcatgtgaacttatactttctggtgataccaccgctaataatggcaaagtacaatactttttgagaaggcaatatatcctgcaaattgtttcttttatagtcaactgtttccacgaagatactgagttataccaagagcttataaagaatggagctttagtttctaatatcctctcagcctttaagttcattcatactcaattatctgagattaaacaacaaatcaataaggctcagatactagaaaactataatgctttattccaacaaaatatcaagtttaggagagacttcttactgagagaatatgatattctgagtcaaattttatatggtttagtggataaaggagccatcatgaaaaataaggattttatactgtccttacttcatcatgtgtcagaattggattccaatgatttttttataatatattatactcctgcatttttccaccttttcgcatctttaagagttttgcccgatgcagatgtcaaattattacattctcagtttatgaaagacttaaaggacgactccatatataccaaaccggtcaaagtagctcttattttcattttttttgcttacttcattgggtggtgtaaagaagaccctaaaagaagggctgacacgatggatttcaaaactgatgttgatgagccaatgacttctgccgtcgaactaggcgctattgaacaaattttaatatttgccgcagatacatctatcgtggaacaagacaagagtatggaacttttctacgatataaggtccctgttagaaaggcatattccaaggctaattcctaaacagttacttgatgatgaaaaaattttcagtcaaacgacgaattctacctacaacccagcatccgcaactgataatatgagcggacgcggcttatggaatccgtcttatcctgggatgatgtcaaccacgggtaccgctcgactaaatagtatgcccaataacgtcaacgaatattcttacactactatagttttatccgatcagacccaagaatttttcctctcatcctttgatgatgtgcttcaaactattattacagattgtgcctttttgcttacaaagattaaggatgctgaggaagactctttgttgtccggtgaagacttaactttggatgacatctcactaaaggctgacttagaaagattttttctgtcaatatattttttctatgcatcaaggcccgaatattcatgtactttctggtctgataaggaatcaaacgcttatggttttattgagtggtgttcgagatgcaacgacaacttgatgaggtcttgtttctatttgatggtttctagcttgtcctttggtcctgaaaatgccctgaatgtctatcactattttggcgaaaacagctcgatttcatggaaaaacattgcacagtgtctcagtgactacactaagaaaataagcaattttaactcgagcctccataagaggcagcagtttagtgagtcaactcataacgatatcgattcgactgcggtagccttagaagaaggcttaaatgaagaagctgtaatatttctgtcttctttattaactttagttggatcagttacataccaggttgacgaggatgtaaaaagctcgctatcgaaagttttctcagatgtcctattcgaattcaccaagataaatacacctctcgtaggcgctgctttcaaggttataagtaacttggttccaaaacttgaatcttctagaacaaaattttggtcttttctagactctctaattttcaaggattcatcgctgaattattcatccgaatcttatagaaatgcttttacaaacgtgttaacaaaatactctgacgttttggggtttttacaactcttccataatctgatttctattcattctcgtgaaaataatagtgaatacatggtttttggcaaattggcatttccaacaagattaggtcagggatataggaaggtaggtatatggccatattttgactacattttcaacgacattttagcgcacgtggatcaaattgttgatatcagaaataaaagagccgtccagcttcctattttgaaaattatctatacgggcttatgctcttttgattacagtgtaattttaaattctattcctgcagctgcgaatttggatgctttggtggattgcgaaaatttcttcaattacgttcaagaatgcccagctatccccatattcaactatattttcacggaaaagatttacaaaagtatatttaatgtagttgatgttggtgttgatcaattgtccatagagttagaaggtggcaaaaatcaggctgaattgttgcagttagctgtgaaaattatcaataaagtattggattatcaggagacatacgtggaagaattatttccaattgttaagaagcatggcaagacggattatttcttgccaaagaattattctcttcacggattacgttcattttacgatgcaatttttttcaatattccacttgttgcacacttgggtttatacgtcggggtcgatgatcaaattttagccacaaattcactgcgtattttggcgaaactttcagaacgctctaatggctccgttgcgtctttgtctaagagaaataagttgttaacaatattcgattccgtagatgaatcagccagaataaaggatgcatttattacacaattggaaagctcaataaccgacgctggtgtccttgctttgaagttagaactattagatttcttaacatcaaatctttctaattatagtcgaacgatgactatttctcatctgttattaggtttccaggtctcaaacgttatatccctgggacctaacctagcaacatttatatcttccggaacctcattacttgattccctcataagcgtgttggaagcttcattgaacagcattactaaggacaatatcgattatgcacctatgagattggctacagcagcactggaaattattctcaaactatgtcgtaatccgttaacatctggtctactatattcatacctaatcaaagaaaacttttttgagagaataatgatcctcgatccacaagtgacaaggttcacgacatggaacggctctccttttgacaattctacagaggaaaaatgtaagaacttcatcgagagcgaatccgttggtgcatttctgtcattcttagcctacaggaattattggacacaatatttgggtctgttcattcataaaatttcattttcgggcacgaaatcagaggttttaacatatgtgaattacttgatatcaaatacaatgtattcggtaaggttgttttctttcttggatccattaaactatggcaatatctgcgaaccaaaagagacgttatcaattttcaccaatgttcctttaaatttggaacaagtcactcttaacaagtattgctccggcaatatctatgactttcacaaaatggaaaaccttatgcgcctgattaaaagagtccgtgctgaaagcttacattctaattccttcagtctcactgtgtcaaaagaacaatttttgaaggatgcagatgtcgagtgtataaaagcaaaaagccatttcacgaatattatatcaagaaacaaagcattggagttgaacctatctgtgctgcactcttgggtacagttggtgcaaatcattgttactgatggaaaattggaaccatcaacaagatcaaactttattctggaggtttttggtacaattattccgaagattagtgattatattgagtttaatataactttttcagaagaattggtttctctcgccgttttcctatttgatatatataaccgcgatcgtaagttgattaccgacaaaggcacggtagacggcaggctatatcagttgttcaagacatgtattcagggtataaactccccactctcctctgtggcattaaggtccgatttctatatattagcaaaccattatttgagtagagttctaagcgaccaagtagggtccgaaaaggttctgcaggatttgagactaggaagtaaaaaattggtagagatcatatggaacgatgttgtttatggcgagggaactagtagggttacaggtatattactattggattcacttattcaactggctaatagaagtaaagagaattttatattggattcactgatgaaaactacaagactgctcttaataatacgttcgctgaaaaatacagatgctttgttaaattctactacagagcacataaacattgatgatttgttatatgaattgacagcttttaaagccactgtattctttttaatacgtgttgccgaaactagaggtggagctagcgctttaattgaaaataatctattccgaataatcgcggaattgtcatttttaaaagttgatcctgatttgggtctagaccttatgtttgacgaagtctacgttcagaattccaaattcttaaaggttaacgtcaccttggataatccgctactagttgacaaagatgctaatggtgtttccttgtttgagttaatcgttcctatattccaattgatatcagctgttttagtgagcatggggagctcaaacaaagctgttgttcaaacggtaaagggtttactgaatacgtataagaggctagtgatcggaatattcaaaagagatcttttgagggaaaaagaagataagaaaaattcgtcggatcctaataaccaaagtttaaacgaaatggtgaagctaattgtgatgttatgcacattaacaggatatcaaaataacgattaagtcattcattatcacttttaagaattacttttaggaatcgatttcattttgcaaaatatttggttgtgtactaagtactaagaagaaactatcacaaaaagtggcttttagtttcatacactacagaagcctttctttggttctgatttggtgcgtatttactgtctaatgaaataaaa

SEQ ID NO: 1676 - DNA, 753 bp, Saccharomyces cerevisiae
atgcagcatattaaacatatgaggacagctgtccgtttggctagatacgctcttgaccacgatgagacaccggtagcttgcatctttgtacatacgccaactggccaggtgatggcttatggcatgaacgatacgaacaagtcattaactggagtagcacatgctgagttcatggggatcgatcagatcaaggcgatgttgggctcccgaggagttgttgacgtgttcaaagacattactctatatgttactgtagaaccgtgtataatgtgtgcatctgctctcaagcaattagacattggaaaggtggtgttcggttgtggcaacgagagatttggaggcaacggtactgtcttgtcagtaaatcatgatacgtgtacattagtgcccaagaacaatagtgcggcagggtacgagagtataccggggatcttgaggaaagaagcaataatgctgctgagatacttttatgtaagacaaaatgaaagggcgccaaagccacggtccaagagtgacagagtgttggataaaaacacgtttccgcctatggaatggtcaaagtatcttaatgaagaagcattcattgagacttttggtgatgattacaggacttgttttgcgaataaagttgacttgtccagtaatagcgtcgattgggatttgattgactcccaccaagataatataatccaagaactggaagaacaatgcaaaatgtttaagtttaatgtacataagaaatctaaggtttga

SEQ ID NO: 1677 - DNA, 823 bp, Saccharomyces cerevisiae
acacatataacgttacacaatgattcatgcagttctaatattcaataagaaatgccaaccaagattagtgaaattctacacgccggtcgaccttccaaagcaaaaactgctattagagcaagtatatgaattgatttctcaaaggaatagcgattttcaaagttcttttttagtcacgccaccatcgcttctgttaagcaatgaaaataataatgatgaggtaaacaatgaagatattcaaatcatctataaaaactacgctacactatatttcactttcatcgtggatgatcaagaatcagaactggccatattagatctgatccaaacttttgtggaatcattggaccgttgttttactgaagtcaatgaacttgatttgatttttaactggcaaactttggaaagtgtattagaagaaatcgtgcaggggggcatggtcattgaaacaaatgtgaacagaatagttgcttctgttgacgaactcaacaaagctgccgagtccacagatagtaaaattggaagactaacgtccactggatttggaagcgcactacaagcgtttgctcaaggcggatttgcacaatgggcaacggggcaataaacaaacaaattaatcggatgatggttattttcgttcgtcaagatctgcacgtaaaaccggcttgaagaaaattagctgagccgggcatttcccagcttttttaatatataatacaaaattaggcaccctccctttaaaattctgtttaaaactagatctggtcataaaacatagataatattgtacgtacaatatggtcacaccgttaggaaaagtaag

SEQ ID NO: 1678 - DNA, 3670 bp, Saccharomyces cerevisiae
gtcggtagtaaacatcaatcgcgtcccaactgcaagagctactagaagtaaacacagtcttacccaaactaaggatgagtgaacccgaagtgcccttcaaggtggtggctcagttcccatacaagtccgattacgaggacgatttaaattttgaaaaagatcaagagattattgttacgtctgttgaagacgccgaatggtactttggtgaataccaggattcaaatggcgacgttattgagggtatcttcccgaaaagttttgttgctgttcagggatctgaagttggaaaggaagccgaatcatctccgaataccggttccactgagcaacgtacaatccagccggaagtagaacaaaaggacctaccagagcccatttcccctgaaacgaagaaagaaactctgtccgggccagtgccagttccagccgctacagtgccagttccagccgctacagtgccagttccagccgctacagcagtatcagcacaggtccagcatgatagtagtagtggtaatggcgaaagaaaagttcccatggattctccaaaattgaaggctcgcttatctatgtttaatcaagatataacggagcaagttcctttaccaaaatcaactcacttggatttagaaaacatacctgtgaaaaaaacaattgtggcagatgctcctaaatactatgtcccccctggaattccaacaaatgatacgtccaatcttgaaaggaaaaagtccctaaaggaaaacgaaaaaaagattgttcccgaaccaattaatcgtgcacaggtggaaagtggaagaatagaaactgagaatgaccaattaaagaaggatttgccccagatgagccttaaagaaagaattgctcttttacaggagcaacaaagattacaggctgcaagagaagaagaactcttgagaaaaaaggctaagctcgaacaagaacatgaacgtagtgcggttaacaagaatgagccctatacggaaactgaagaagcagaagaaaatgaaaaaactgaaccgaaacctgaatttacgcctgaaactgagcacaacgaggaaccgcaaatggaattattggcacataaagagattactaaaacctcacgcgaagcagatgaaggcacgaatgacatagagaaagaacaatttttagatgagtacacaaaggaaaatcagaaagttgaggagtcacaagcagacgaggcaagaggagaaaatgttgctgaggaaagcgaaataggttacggccatgaagacagagagggagataatgatgaggaaaaagaagaggaagatagtgaagagaatcgtagggccgcattgagagaaagaatggctaaactatctggcgctagtagattcggtgctcctgttggttttaaccccttcggtatggcttctggagttggaaataaaccatcagaagagccgaaaaagaaacagcataaggagaaggaggaggaggaacctgaacagctccaagaactacctcgtgccatacctgttatgccatttgttgacccaagttctaacccattttttaggaaatcaaatctaagtgagaagaatcaacccactgaaacaaagacgctagatcctcatgcaaccacagagcatgaacagaagcaagaacatggtacacacgcctatcacaatttagctgctgttgataatgcacatcccgaatactctgaccatgattctgatgaagatactgacgaccacgagtttgaggatgcaaacgatgggttgagaaagcattcgatggtggagcaagcttttcagataggtaataatgagtcagagaatgttaattccggagaaaaaatttaccctcaagaaccaccaatctcccaccgtactgcagaagtatcacatgatattgaaaattcatcacaaaacacaactggaaatgttttgcctgtctcttccccacaaacaagagttgctcgcaacgggtcgataaattctttgactaaatccatttcaggggaaaatcggcggaaatccataaacgagtatcatgatacagtttccactaattcatctgcattaacagaaaccgctcaagatatttcgatggcagctccagcagctccagttctaagtaaggtgtcacatcctgaggacaaggtgccacctcacccagtgccttctgcaccctctgcacctccagtaccctctgcaccttcagtaccctctgcacctccagtacctccagcacctccagcactctctgcaccttcagtacccccagtacccccagtacctccagtatcttcagcacctccagcactctcagcaccttcaatacctccagtacctccaacacctccagcacctccagcacctccagcgcctcttgcgctgcctaaacacaatgaagtagaagaacatgtcaagtcatctgctccccttccacctgtatccgaggaatatcatcctatgccaaatactgctccgccacttccacgtgcaccaccagtaccaccggctacttttgaatttgactctgaaccaacagccactcattcacatacagctccttctcctccaccacatcaaaatgtcacggcctctacaccttcaatgatgagtacgcaacaacgtgtgccaacctcagtactatctggggcagaaaaagaatcacgaaccctaccgccccatgtgccttcattgacgaatcgtcctgtggattcattccatgagtcagatactacaccgaaggtggcctctataagaaggtcaacgacgcatgatgtaggcgagatttccaacaacgtcaagatagagtttaatgcacaagaaagatggtggattaataaaagcgcacctcctgctataagcaatctgaagttgaactttttgatggagatcgatgatcatttcatttccaaaagattacatcaaaaatgggtggtaagggatttttacttcttgtttgaaaactattcgcaactaagattctccttgacctttaatagtacaagcccagagaaaacggtaacgactcttcaagaacgctttccatcgccagtcgaaacacaatcagcacgtattcttgatgaatacgctcaaaggtttaatgcgaaagttgtagagaaatctcattcattgataaattcacatattggggctaagaatttcgtgtcacaaattgtatccgaattcaaagacgaagttatacaacccataggagcaagaacgtttggcgcaactatattgagttataaacctgaagaaggaatcgaacagttgatgaagagcttacagaagattaaaccaggtgacattcttgtaattagaaaggccaaatttgaagctcataaaaagatcggaaaaaacgaaattatcaacgttggaatggactccgccgctccgtattcgagtgttgttactgattatgattttacaaagaataagtttagagttatcgaaaatcacgagggaaagattattcaaaacagctacaagctaagccatatgaaaagtgggaagttaaaggttttcagaattgttgcgagaggatacgtaggttggtaatttacccaatgcttccaaggggaaattgtgaatgctttcgatttcatcattttcctttcgcattttcttatcgttatagtttaagtgtatattttcataactcttctacagaagaaactata

SEQ ID NO: 1679 - DNA, 2246 bp, Saccharomyces cerevisiae
caataaaagagcataacaaggcaggaacagctatgaagtttggtgagcacttgagcaagtctcttattagacagtacagctactattatattagttatgatgatctgaagactgagctagaagataacttatctaagaataacggtcagtggacgcaagaattggaaacagattttttagaatctttggagatcgagttagacaaggtttacacattttgcaaagttaagcatagtgaagtttttagacgtgtaaaagaggttcaagaacaagtgcaacatactgttcgtttgttagactccaataatcctcctactcagctagattttgagattctagaagaagaactaagtgatatcattgccgatgttcatgatctagcaaagttttcgagactaaactacactggtttccaaaagattatcaagaaacacgataagaagacaggttttatcttgaaaccagttttccaagttagattagactctaaaccatttttcaaggaaaactatgacgaactagtcgttaaaatttcccaactatatgatattgccagaacttcaggtcgcccaatcaagggagactcatctgctggtgggaagcaacaaaatttcgttagacagacaacaaagtattgggttcaccctgataacattacagaattgaagctgatcatcttgaagcatttaccagtgttagtcttcaacactaataaggaattcgaaagagaagattccgctattacttcgatctattttgataatgaaaatctagacctttattatggcagattaagaaaagatgaaggtgcagaagcccacagattgagatggtatgggggtatgtctacagacacgatctttgtagaaagaaagacccatagagaggattggactggtgagaaatctgtcaaggcaagatttgcgctaaaggaacgtcatgttaatgacttcttaaagggtaaatatactgttgatcaagtatttgccaagatgcgtaaagaaggcaagaagccaatgaacgaaattgaaaacttggaggcgttagcatccgaaattcaatacgtcatgttaaagaaaaagttgagacctgtagtgagatcattctacaatagaactgcttttcaattacctggtgatgcaagagttcgtatctcccttgatacagagttaactatggtgagagaagacaactttgatggtgtggatagaactcataagaattggaggagaactgatattggtgtcgattggccattcaagcagctagatgacaaggatatttgccgtttcccatatgcagtcctggaagttaaattgcaaactcaactaggtcaagaacctccagagtgggtacgtgaattagtcgggtctcacttagttgagccagtcccaaaattctccaagtttattcatggtgtggctaccttactaaatgataaagtggattcaatcccattttggttacctcaaatggatgttgatatcaggaaacctccactaccaacaaatattgaaataacaagacccggtagatccgataacgaagataacgacttcgatgaggatgatgaggatgacgctgctttggttgctgccatgacaaacgcacccggtaattctcttgatatagaagaatctgttggttacggggctacttcggcccccacctccaacactaatcatgttgttgagagtgctaatgctgcttattatcaaagaaagatcaggaatgccgaaaatcctatctccaagaaatactatgaaatcgtggcattttttgaccactattttaacggtgatcaaatatctaaaatcccaaaaggtactacttttgatactcaaattcgtgccccaccgggaaagacgatatgtgtgccagttcgtgtggaaccaaaagtttactttgccactgaaagaacctacctgtcttggttgtccatctcgatattgttgggcggtgtctccactactttattaacatatggttcaccaacagccatgattggctccattgggttctttattacttccttggctgtgttgatacgtactgttatggtttatgccaagagagtggtaaacattagactaaagagagcagtagattatgaggataagatcgggcccggcatggtttctgtgtttctaattctctctattttattttcctttttctgcaacctagttgctaaatgaatacacagcgtgttttttttactgtataattaagtaataatcatatta

SEQ ID NO: 1680 - DNA, 657 bp, Saccharomyces cerevisiae
ccaccactgaaaaaatcgacacttaaacaaaaaactttaaacgttatgaaagttcttgaggaaaggaatgcatttttaagtgactatgaagtcttgaagttcctaacagatctagaaaaaaaacatctttgggaccaaaaaagtttggctgcgctgaagaaaagtcgctcgaaaggtaagcagaataggccctacaatcatcctgaattgcaaggtattactcgcaatgtggttaactatctcagtataaacaaaaactttatcaaccaggaagatgaaggcgaggaacgagaaagcagtggtgcaaaagatgctgaaaaatcgggtataagcaaaatgagcgatgaaagctttgctgagttgatgactaaactgaattcttttaaattattcaaggctgaaaaactgcagattgtcaatcaacttcctgccaatatggtccacctttactccatagtggaggagtgtgatgcaagatttgacgaaaaaacaattgaggaaatgctagagatcatctctgcgtacgcatgagtgtacagtgctttgaattgatttggactggcacttccgaaaaacagaaattactttgttgtgtaacaatataacatgttcaatgagtatgcatgtattattgaacttaagcatatagaaatattt

SEQ ID NO: 1681 - DNA, 1861 bp, Saccharomyces cerevisiae
aagggcaataaaatcatcaattaaccatgtcacttagattgccacaaaatcccaacgcgggattgtttaaacaaggctacaatagttactctaacgccgatggccaaattattaaatcaattgcggccattcgcgaattacatcaaatgtgtttgacttctatgggaccctgcggtagaaacaagatcattgttaaccatctcggtaaaatcattattaccaacgacgcggccaccatgctaagagaactagatattgtccatcctgcagtgaaagtcctcgtaatggcgactgaacaacagaagatcgacatgggagacggtacaaatttagtcatgattttggctggcgaactattaaatgtgtccgaaaaactgatttcaatgggcttgtctgccgttgagattattcaaggttataatatggcaaggaagtttactttgaaagaactagacgaaatggttgttggtgaaattactgacaagaatgataaaaacgaacttttgaaaatgattaaaccagtcatctcctccaaaaagtacggatctgaagacatattgagtgaacttgtttctgaagctgtatctcacgttttaccagttgctcagcaagctggagaaattccttattttaatgttgattctatcagagtagtaaagattatgggtggatcgctttccaattctaccgtcatcaaaggtatggttttcaatcgtgagcctgaaggccatgtaaaatcattatccgaagataaaaagcataaagttgcagttttcacttgtccgcttgacatagccaatactgaaacgaaaggcactgttttattacataatgcacaagaaatgctcgatttttctaagggcgaggaaaagcaaatagatgccatgatgaaagagattgccgacatgggcgtagaatgcattgttgcaggtgctggtgttggtgaattggcgttacattatttgaatagatacggtatactagtcttgaaggtaccaagcaaattcgaattaagaagattatgtcgcgtttgtggggccactccattgcctagattaggtgcgccaactccagaagaattaggtttagtggaaactgttaagacaatggagataggtggtgatagagtaactgtgttcaaacaagagcaaggtgaaatttcaagaacatctactatcattttaagaggtgccacacagaataatttggatgatattgaaagagccattgatgatggtgttgcagccgtcaagggactaatgaagccatcaggcggtaagttgttgcctggtgctggtgctaccgaaattgaattgatttctaggataactaagtatggtgaacgaacacctggattgctacagttagctataaaacagtttgccgtggcttttgaagtggttcctcgtaccctagcggagaccgctggtcttgatgttaatgaggtactaccaaacttatacgctgcacataacgtaactgaacctggtgcagttaagacagatcatttatataaaggtgtggatattgatggcgaatctgatgaaggtgtaaaggacatcagagaggaaaatatttatgacatgcttgcaacgaaaaagtttgctattaacgtcgctacagaagctgcaactactgtgctttccattgaccaaattatcatggcaaagaaggcgggtggtccaagagcacctcaaggcccaaggccaggtaactgggaccaagaagactgatttgtttgcatctttatacttacaaagtagatatacctgcaaacagcagaatataatgtcataaattgcaatcaagttttcaaacttgctaggctgtatcatgtgtacctgtatagtagtaaagatat

SEQ ID NO: 1682 - DNA, 885 bp, Saccharomyces cerevisiae
actgtaacatggtttcgataagaaggtatttgcgagtgccgaatgagttgaaaccttcccagatcttcaaacaagattctctctctccaagtaagattggacttcaaattgttcttttacagattttttattacaccacagcgatcgttcttttttattgttgggcgaagctagcgggatatgatctcaatatcaaggaatggctgttttcttgggagaatatcgactttacgaacgcatacggtttatcaatctcactgttatggcttctggattcattaatatgtgtttttttcttaactgttatcgttggacggagtaaactcgcatgggattttgctatcactatacatgccatcaattttattgtggtgttcctctatactcggaaatttccttctttttcttggttttttcttcaaattttatcatctttaatactaatatttttggggacatggacaacaagatggagagagcttagagacaccttttttgagggcttggttgatcctaatgaaggagaagttggattggttacgcctagtcagcagcatagtaatcattcagaattggagcaatcaccaatacaactaaaagacttagaaagccaaatatgagaggagatgaaacaacatattcgaggcaattttggcaatattatagtcattcaagagaaaacagtaaatgtatgaaaaatggcaagaaccttatctctataggcttaataaatctgcctttttggccaatttttcaaaacagatcctatttcttatttatacacaatctatatttaacataattaagtacgtgatgacattgaagataataataagtaaagagtttacgtacttaaattttatatagttttagtatacttgcaat

SEQ ID NO: 1683 - DNA, 1552 bp, Saccharomyces cerevisiae
tcggaacaagacgcaaactacaaaatattggtgctgaaaaaatgaggcaggtttggttctcttggattgtgggattgttcctatgttttttcaacgtgtcttctgctgcccaatacgagccacctgcgacttgggagaatgttgattataagaggacaatagacgtgtcaaacgcttatatttcagaaacaatcgaaataactatcaaaaacatagcaagcgaacctgcgactgaatacttcacagcctttgagagtggcatcttcagtaaagtttcctttttttcagcctattttaccaacgaggcaacttttttaaatagccaattacttgccaattcgactacagcacctggtgacgatggtgaaagtgaaattagatacgggatcattcaatttccaaatgcaatttcccctcaggaagaagtttctttagtgattaagagcttctataataccgtaggtattccttatcctgagcacgttggaatgtcagaagaacaacacctattgtgggaaacgaacagattgccgctttctgcttacgataccaagaaggcctcttttacgctgattggtagctcatcatttgaggagtaccaccccccaaatgacgagagtttactgggaaaagctaatggaaactcttttgagtttgggccttgggaagatattccgagattttcttcaaacgaaaccttagcaattgtttattcccacaatgccccattgaatcaggtagtgaatttgagaagagatatttggctttctcattgggcttccacaatacaatttgaggaatattatgaattaacaaacaaagccgcaaaactgtctaaaggattttcaagattagaattaatgaaacagattcaaactcagaatatgagacaaactcactttgttactgtcttagacatgctcctgcctgagggagctactgatcattatttcactgatttggttggccttgtttccacgtcgcatgcagaacgtgaccatttctttataagaccaagattcccaatctttggaggttggaactacaattttactgtcggttggactaataaattgtccgatttcttgcatgtatcctctggctcagacgagaaattcgttgcttctatcccaattctaaacggcccaccggacactgtatatgataatgttgaattatcggtatttcttccggaaggggccgaaatattcgatattgattctccagtcccttttacaaatgtttctatagaaacccagaaatcatactttgacctaaataaaggtcacgttaaattaactttcagttacagaaatttgattagtcaagttgccaatggccaagtcttgataaagtacgactacccgaaaagctcttttttcaagaagcctctgtctattgcttgctatattttcaccgcactaatgggagtttttgtcttaaaaactttgaacatgaacgtaactaactgagttcacgtttgaatgatatataccttatgatgcagagcaataaattcagtatttaattttttataagttttatagataag

SEQ ID NO: 1684 - DNA, 72 bp, Saccharomyces cerevisiae; identical to SEQ ID NO: 236

SEQ ID NO: 1685 - DNA, 84 bp, Saccharomyces cerevisiae; identical to SEQ ID NO: 234

SEQ ID NO: 1686 - DNA, 72 bp, Saccharomyces cerevisiae; identical to SEQ ID NO: 230

SEQ ID NO: 1687 - DNA, 72 bp, Saccharomyces cerevisiae; identical to SEQ ID NO: 229

SEQ ID NO: 1688 - DNA, 104 bp, Saccharomyces cerevisiae
tgttaatgatgataaccaaagatgcatagttcaactgattgaacatactatcgaaatgaagataaaaatttccatcgaaattagtctttcgctcctatctgaac

SEQ ID NO: 1689 - DNA, 386 bp, Saccharomyces cerevisiae
aacatcagtagtggttaatactatctttagataatattaatttcattataccatagaaacctaaagattaggttattttcgttcttcatgttatggagtgtgagtgatgaggagcttgctcttttaagctcatattacgtaataagttaatactggagcgagaataatttaaatcatttcatcataacccatagctgaatgaactttgactactcctaaacaaagtagtaacaattttcatttcgtttccggtttcttagatcgaatattattctgaggaaattccctgattacatatcagggaaaggttcgcgtttttagagaattgcgtaatgcgatttgaaagtttaaattcctaagcgactcttcttcatgataagacagtt

SEQ ID NO: 1690 - DNA, 190 bp, Saccharomyces cerevisiae
ggccctgatgataatggtgtctcttctttcctcgtccgattcgaccatgacgacaagggattttatctcgttctcttaatgcgaatgattttgaaaagatgttgcttctgtgacatttttttttaatcatttgtgtttgcaaacgggaacttttcttgccagtgttatacaacacatgcagatctgagcc

SEQ ID NO: 1691 - DNA, 126 bp, Saccharomyces cerevisiae
tcacggtgatgaaagactggttccttaacattcgcagtttccacggtaggagtacgcttacgaacccatcgttagtactctcggtgaccgctcttctttagagaccttcctaggatgtctgagtga

SEQ ID NO: 1692 - DNA, 72 bp, Saccharomyces cerevisiae; identical to SEQ ID NO: 229

SEQ ID NO: 1693 - DNA, 72 bp, Saccharomyces cerevisiae; identical to SEQ ID NO: 229

SEQ ID NO: 1694 - DNA, 72 bp, Saccharomyces cerevisiae; identical to SEQ ID NO: 229

SEQ ID NO: 1695 - DNA, 73 bp, Saccharomyces cerevisiae; identical to SEQ ID NO: 397

SEQ ID NO: 1696 - DNA, 72 bp, Saccharomyces cerevisiae; identical to SEQ ID NO: 236

SEQ ID NO: 1697 - DNA, 74 bp, Saccharomyces cerevisiae; identical to SEQ ID NO: 899

SEQ ID NO: 1698 - DNA, 803 bp, Saccharomyces cerevisiae
cgataagaattgctacttcaaagtacacacagaaagttaacatgaatggaattcaagtggacatcaatcgtttgaaaaagggcgaagtcagtttaggtacctcaattatggccgtgacatttaaggatggtgtgatactaggtgctgattcacgtaccaccactggtgcgtacatagctaaccgtgtgacagataaattaacgagagtacatgacaaaatttggtgttgtaggtccggttctgcagcagacacgcaggcgattgccgacattgttcagtaccatttggaattatatacttctcaatatggtaccccctccacagagactgctgcctcggtgttcaaagaattatgttacgaaaataaagataaccttactgctggtataattgtggctggttatgatgacaaaaacaaaggggaagtatatactattccattgggtggctccgtccataagctgccttatgcgatagcaggatctggctctactttcatatatgggtattgtgataaaaactttagagaaaatatgtcaaaggaagaaaccgtagatttcataaagcattcgctatcgcaagccattaaatgggacggatcttccggtggtgttataagaatggttgttttgacagctgctggtgtggaacgtttgatattctaccctgatgaatatgaacaactataatagaccccaaaagaacaaattctgagtgattacttctctttatatttgttaacaaatgcctctggatctacactgatataacatataatagtctataacctctttctctttttc

SEQ ID NO: 1699 - DNA, 6450 bp, Saccharomyces cerevisiae
ttcagtaaagacagctgggaagtatagtaacagaggagagaaagcataaggagacctcttgctgcagttcacaaccaaaaatagcatatctttactattgtcgctaaccattgcgaaacgagctaaagcaacagcaaacgaaatccctaggtcgaaatgtcatcaaaacctgatactggttcggaaatttctggccctcagcgacaggaagaacaagaacaacagatagagcagagctcacctacggaagcaaacgatagaagcattcatgatgaggtaccaaaagtcaagaagcgtcacgaacaaaatagtggtcacaaatcaagaaggaatagcgcatatagttattacagcccacggtcgctttctatgaccaaaagcagggagagtatcactccaaatggtatggatgatgtaagtatttcgaacgtggaacatccaaggccgacagaaccgaaaatcaaaaggggtccatatttactgaagaaaacattgagcagtctttcaatgacgagcgcgaatagtactcatgatgataataaagaccacggttacgctttgaattcatccaagacgcacaactacacatctactcataaccatcatgacggtcatcatgatcatcatcatgttcagttttttcccaataggaagccatcattagcggaaaccctattcaaaaggttttcagggtcaaacagtcacgatggcaataagtcaggaaaggaaagtaaagttgctaacctttccctttcaacggtaaatcctgcacctgctaataggaaaccttctaaagactccactttatctaatcacttggctgataacgtgccaagcactttacgaaggaaagtgtcctcattggtacgtggttcttccgtccatgatataaataatggtattgcagataaacagattagaccaaaggctgttgcgcaatcagaaaatacattacattcatccgatgttcccaatagcaaacgctcgcacagaaaaagctttctgctaggctccacatcttcttcaagcagtagaagaggttcaaatgtcagttcaatgactaacagtgacagtgcaagtatggcgacgtcgggtagtcatgttctccaacataacgtatctaatgtttctccaactactaaaagtaaggacagcgttaacagcgaatccgccgatcacactaataataaatccgagaaagtgactccagaatataatgagaacattccggaaaattctaactctgacaacaaacgcgaagccacaacgcctactatagaaacacccatttcatgtaaaccatcccttttcaggctagatacaaaccttgaggatgttactgatattacaaagacggtgccacccaccgctgtcaattctacactaaattctacacacgggactgagactgcctcacccaaaacggtgatcatgcctgaaggtcctaggaagtcggtgtcaatggctgatctctccgtcgctgccgcagcacctaatggtgaattcacatcaacttccaatgatagatcacaatgggtagcacctcaaagctgggatgtggaaaccaaaaggaaaaaaacaaaacctaaagggagatcgaaatcaagaaggtcaagtatagatgctgatgaacttgatcccatgtcaccggggccaccttcaaaaaaagactctcgtcatcatcacgatcgaaaggataacgaatcaatggtcactgcgggtgacagtaactcaagttttgttgatatatgtaaagaaaacgttccgaatgatagcaagaccgcactcgatactaaatctgtgaaccgcttaaaaagtaatttggctatgagtcccccaagtatacgatatgctccatcaaatttagatggggactacgacacgtcttccacttcctcatctttaccgtcctcatctattagttcagaagatacatcttcctgcagcgattcctcttcgtacactaacgcgtatatggaggccaaccgagagcaggataataaaacaccgatcctgaataaaacgaaatcgtataccaagaaatttacatcctcttcggtaaatatgaattcaccagatggtgcccagagttctggattattactacaagatgagaaggacgatgaggtcgagtgccaactggaacattactataaagatttcagtgatttagatccaaagaggcactatgctattcgtatattcaatactgatgacacttttacgactctctcatgtactccagcgactaccgtcgaagagataatacctgcacttaaaagaaaatttaacattacagcgcaagggaattttcaaatttccctgaaggtgggaaagttgtcaaaaattttgagaccaacttcgaaacctattttaattgaaagaaaacttttacttttgaatggttatcgaaagtcagacccacttcatattatgggtatagaggatttaagttttgtttttaagtttcttttccatcctgtcacaccttctcactttactcctgaacaagaacaaagaataatgagaagcgaatttgttcacgtagatttaaggaatatggatctgactacacctcccatcattttttaccagcatacgtcagaaatagaaagtttagacgtttctaataacgcaaatatattcctacctctggagttcattgaaagctcgattaaattattaagtttgagaatggttaatattagagcatctaaatttccttccaatatcactaaggcgtataaactagtatctttggaattacagagaaacttcataagaaaagtaccgaactcaatcatgaaactgagtaatttaacgatattaaaccttcaatgtaatgagcttgaaagcctaccggctggatttgttgaactgaaaaatctgcaattgctagacttgtcttcaaacaagttcatgcactacccagaagttattaactactgcaccaatcttttacaaatagacctatcatataataaaatccaaagcttaccacagtccactaagtacctagtaaagcttgcgaagatgaacctttctcataacaaactaaattttataggcgacttatcggaaatgacagatttgaggacgctgaacctaagatataacagaatatcatcaattaagacaaatgcgtctaacttgcagaacctttttttaacagataatagaatttcgaactttgaagacactttgccgaaactaagagcccttgaaattcaagagaatccaatcacttctatatccttcaaagatttttatccaaaaaacatgacaagtttgacgttgaacaaggcacagttatcgagtattcctggagaattactcaccaaactatctttcctcgagaaacttgaacttaatcagaataatttgactagactgccacaggagatatccaagttgactaaattagttttcctttcagtggcgagaaacaaactagagtatattccacccgagctatctcaactgaaaagtttgaggacattagatctacattctaacaacataagggactttgttgacggtatggaaaaccttgaactaacatcgctaaatatttcatcgaatgcattcggtaactctagcttagaaaattctttttaccataacatgtcatatgggtcaaagttatctaaaagcctgatgttttttattgctgcagacaatcaatttgatgatgctatgtggcctcttttcaattgctttgtcaatctgaaagtgctaaatctttcttacaacaatttttcagatgtatcgcacatgaaacttgagagcattaccgaattgtacctctccggtaataagctcacgacattgtcgggtgatacagttttgaaatggagctctttaaagactttaatgttgaatagtaaccaaatgttatctctgcctgcagaattatcaaatctctcacagctaagtgtatttgatgttggagcaaatcaattaaagtataatatatcaaactatcattacgattggaactggaggaataataaagaactaaaatatttgaatttttcaggaaatcgaaggtttgaaataaagtcatttataagtcacgatattgatgctgatttgtcagatctgacagtattacctcagttaaaggtactaggtttaatggacgtaactttaaatactaccaaagtaccggatgaaaatgtcaatttccgtttaaggacaactgcatcaataataaatgggatgcgctacggtgttgctgatacattaggtcaaagagactatgtgtcatctcgtgatgttacctttgaaagattccgcggaaatgacgacgaatgcttactatgtcttcatgatagtaaaaaccaaaatgcagattatggccacaatatatcaagaattgttagagatatttacgataaaatactgatcagacaactggaaaggtatggagacgaaacagatgataatataaaaactgcacttcgtttcagttttttgcaactgaataaggagattaacggaatgctaaattctgttgataatggtgccgatgttgccaatctttcatatgcagacttgctaagtggcgcttgctctactgtgatatatatcagagggaagaaactcttcgctgcaaatttaggtgactgtatggctattttatccaaaaacaatggtgactaccaaacgctaaccaaacaacatctcccaacaaagcgggaagaatacgagaggatcagaatatctggcgggtatgtcaacaatggaaaattagatggtgttgtagatgtgtctagagcagtgggtttttttgatttgcttccccacattcatgcttctcccgacatatctgtcgtgacattaacaaaagcagacgagatgcttattgtagcaacgcataagttatgggaatacatggacgtggatacagtttgtgatatcgcgcgtgagaatagtactgatccactccgtgccgcagctgagttgaaggatcatgccatggcttacggctgtacagagaatattacaattttgtgccttgctctttacgagaacattcagcaacaaaatcggttcactttaaataaaaactctttaatgactagaagaagtactttcgaggatactacattaagaagacttcaacctgagatttctccgccaacaggtaacctagcaatggtcttcactgatatcaaaagctcaaccttcttatgggagctattccctaacgcaatgaggaccgcaataaaaactcacaatgacattatgcgtcgtcaactacgaatttacggtggttacgaagtaaagacagaaggagacgcctttatggtggcatttcctacgccaactagtggtctgacatggtgcttaagtgttcaattaaaactcttggatgcacaatggccggaggaaattacctcagttcaagacggctgccaagttacggatagaaatggtaacattatctatcaaggcctatcagttagaatgggtattcattggggctgcccagttccagagcttgatttagtgactcaaagaatggactatttggggccgatggtcaataaggcagcaagggtccagggcgtcgctgacggtggtcagattgcaatgagtagtgatttttactctgaattcaacaagataatgaagtatcatgagcgagtagtgaagggcaaggaatctctcaaggaagtttatggtgaagaaattatcggagaggttcttgaaagagaaattgccatgctggaaagtattggttgggcattttttgactttggcgagcataagctaaagggactcgaaaccaaagaactcgttactattgcgtatcctaagattcttgcttccagacacgaatttgcatctgaagatgagcagtcaaaattaatcaatgaaacgatgttgtttcgtttaagagtcatttcaaacagactggaatctataatgtcagctttaagcggcggatttattgaactagactctcggacggagggaagttatattaaatttaaccctaaagttgaaaatggtattatgcaatcgatttctgagaaggatgcgttgttattttttgatcatgtaattactagaatcgaatccagtgtggcattattacatttacgacaacagaggtgttcaggactggaaatttgcagaaacgataaaacatctgctcgaagcaatattttcaatgttgttgacgaacttttacaaatggttaagaacgcaaaggatttatcaacttgagttctgttcgtaaattatgtaccaccctgttactcgtttcatattcacgctagagaagtacctcagcttactagatccattcacacattgcaagtatactaaaactatataaaatttaagtacgtaaactctttacttattattatcttcaatgtcatcacgtacttaattatgttaaatatagattgtgtataaataagaaataggatctgt

SEQ ID NO: 1700 - DNA, 1759 bp, Saccharomyces cerevisiae
aatcatcaagtacaatagtgatataagccacaatgcaagctccagtggtatttatgaatgcttctcaagagagaactaccggtcgtcaggcccaaatctccaatatcactgctgcaaaggcagttgccgatgtcattcgaacttgcttaggtccaaaagctatgttaaagatgttattggatcctatgggcggtcttgtgttgactaacgatggccacgctattttaagggaaattgatgttgcacatccagcagctaaatcaatgttggagttatcccgtactcaagacgaagaggttggtgacgggactacaacagttattattctagctggtgagattttagctcagtgtgcaccttatttgattgaaaaaaatattcaccctgttattattatccaagccttgaagaaagcactgactgatgcactagaagttatcaaacaagtaagtaaacctgtcgatgtggaaaatgatgccgctatgaaaaaattgattcaagcctctatcggtactaaatatgtcatacattggtcagagaaaatgtgtgaattagctctagacgctgttaagactgtccgtaaagacctgggacaaactgtggaaggtgaacctaattttgaaatcgatatcaaaagatatgtccgtgtggagaagattcctgggggggatgttctagattctcgcgtcttaaagggtgtcttattgaacaaggatgttgttcatccaaagatgtcccgtcacatagagaatccacgtgttgttcttttggattgtccactagaatataagaagggtgaatctcaaaccaacatagaaattgaaaaggaggaagattggaataggattttacaaatcgaggaagaacaagttcagctaatgtgtgaacaaattttagccgttaggccaacactagtcatcactgaaaaaggtgtttcagatctagcacagcattatttactaaagggtggatgtagtgttttaagaagagtgaagaaatcagacaataatagaattgctcgtgtaactggtgcaaccattgtcaatcgtgtagaggacttgaaggaaagtgatgtcggtacaaactgtggattattcaaagtagaaatgattggggacgaatatttctcatttttggataactgcaaggaaccaaaagcttgtaccataatgttacgtggtggttccaaagatatattaaacgaaatagatcgtaacctacaagatgctatggctgttgctcgtaatgtgatgttgagtccttccttgtccccaggtggtggtgccaccgagatggcagtttctgtcaaattagcagaaaaggcaaagcaattagaagggatccagcaatggccataccaagctgtagctgatgctatggagtgtattccacgtactttgatacaaaatgcaggtggtgatcctattagactcctatcccaactaagagccaaacacgcacagggaaattttacaacaggtattgatggtgacaaggggaaaattgtagatatggttagttacggtatttgggaacctgaagtcatcaagcagcaaagtgtcaaaaccgctattgaaagtgcatgtttactattaagggttgatgatattgttagtggtgtaagaaaacaagaataatagcctcgaggttaaacttcattactgccgtttaatatttggtgtttcttcacatttttttgtttttttatactattgtaatgtatttatatagaattaaagtcctcactataattttgtca

SEQ ID NO: 1701 - DNA, 2184 bp, Saccharomyces cerevisiae
ggaatatcttttttcgtgcagttttgcgggaaattttccctacttaaaaagctgaatgaaaatcagaaatatctgcaaaaaaaaaaggtaaaaaagggaaattttaagacatagcataaaggacttggttttgtttcaatactcagcccttttcattcatttctatcacaagtttttttttgctctcgtttccattttcttcgtttacttattattgacgtacatcttttttagtttcaaataacatagcaagaaggcttaactaagttcctatattcttggcatatttatcatcatcaggtcttttaaaagtatctcagaacgtaacttcaacgcctttagatttttttcacaacacgactctattgcaagagacaaaaaaaattaaaatgggcattttggactcgctgaaaaaacctgttaatatcaagagttcgctccccaaattctcccgcagtgctaccagcatcaatttaagtagccacccagtaagttcacggtccttcctcgaattaccaccagagcttttcagcatcactaaacctatatttaagcttctgcaagcacacgcaaataagatttacttccaatcttccgacgctgaggctgtatggaatgttaaggattcttctggacatgtttttgaagcagagtcaatttctttgctcggctctcatataattatcacaaattcctctgtacaagtcgcagacgtggccatcatagattccccttccaacataaaccaatgtgaaatttcaagcgttggagagttcctgcaattcaataatggccaactatctatcacatgtaacgattttggtttactggagaagttcaaaaggttgtgtatgatttctatttttgagttcatttctatatataaggccttgacaggcacagtgatttcctcttatgggctgagaatgtctgatatgcatatcattttgaactcgccgttcaattttaaggattggtgtgaagtttatcttgatggtcaaggttgggtgaaagtgtggtgtcatattgataaagtgtctaaaaccaataattctaaaagtagtagtgacaatgatgctaaaggaaagtatcaaatacggttttatagagatgacaaatccacatctagcaagaactgcgttttttttattcctgacaatgagtacgttcaagatattttcttttataacatcaatgcggcagaaccttctaaaaatatgaacgacttttttcaagggttgcaaatgataaagctcgttggtaatgtacgcttttgcagtgatacggactttaatgatgtggtggatagtggatccatctatagtagtgcaaacaacggcagtggtgacagcagctcgacagcattgaataatgaaagtcctaacactacaccaaaaagtagaactttcttttcacctaaagggcacagaagaaatagctcccatgtaagttcgttaacttctagatcaacaaaaaagcctataactaacttcactacacgtacaaatgggcttttgattaggccattgccccatcatggcgtacatcacctggaagcaatgatcaggttcattattcctttgatggattgtgcaagactttatgggcgtccagttcaattcaagacagaaagaaccgatataaattcgttaatgtttggattacctaaattgccctcagtggattattttgctgaagaggagattgcccatttgatgacccaggaatttaatcctttgaaagaaaaagatactgacgatactatggctttaactatgtcaagattttctagctacctgcaagaaagaatgacaaaagtctccaagagaaacacagaactcaacttcaggacctttagtgatgtaatgggcatgtataatactacgagggatcactctaaacttaattgcatgagtgacaaggataattctgtgaaggaattttcattgagtgataaaagcaatgttagttctgaaacgactaatatgatgaatcaattgcaagtaaacgcccatgaatacaaaagttctatgtgcgaacgtcctatcgtcgcaagtacttcgcccattgcatagttcttcgcatatatagccacatctcaaaaacttacatacagtgtatatatttgtggtacagtttctgtatagccaaatataccctgatataatcttatgtgatattata

SEQ ID NO: 1702 - DNA, 1379 bp, Saccharomyces cerevisiae
aagaatccaaacttaatacacgtatttatttgtccaattaccatgcctaaagagaccccttccaaagctgctgccgatgcattgtccgacttggaaatcaaagattccaagtccaaccttaacaaggaattggagacattgagagaggaaaacagagtaaagtcagacatgcttaaggagaaattgagcaaggacgctgaaaatcacaaggcttacttgaaatctcatcaagttcaccgtcacaaacttaaggaaatggaaaaggaggaacctttgttgaatgaagacaaggagagaactgttcttttccctatcaagtaccatgaaatctggcaagcctacaagcgtgccgaagcttctttctggaccgctgaagaaattgatttgtctaaggatatccatgactggaacaacagaatgaacgaaaacgagagatttttcatttccagagttcttgcctttttcgccgcttctgacggtattgttaatgaaaacttggttgaaaacttctccaccgaagtccaaattccagaggcaaagagtttctacggtttccaaatcatgattgaaaatattcactctgaaacttactccttgttgatcgatacttacatcaaggaccctaaagaaagtgaattcttgttcaatgccattcacaccatcccagaaatcggtgagaaggccgaatgggctttaagatggattcaagacgctgacgccttgtttggtgaaagactagttgcctttgcctccattgaaggtgtctttttctccggttcctttgcctccattttctggttgaaaaagagaggtatgatgcccggtttaaccttttccaacgaattgatctgtagagacgaaggtttgcacaccgactttgcatgcttgttgttcgcccatttgaagaacaaaccagacccagccattgttgaaaaaattgtcaccgaggctgtggaaattgaacaaagatacttcttggacgccttaccagttgctttgctaggtatgaacgctgacttaatgaaccaatacgttgagttcgtcgccgacagactgttggttgctttcggtaacaagaaatactacaaggtcgaaaaccccttcgatttcatggaaaacatctccttggccggtaagaccaacttcttcgaaaagagagtttctgactaccaaaaggctggtgttatgtccaagtcgactaagcaagaagccggtgctttcaccttcaacgaagacttttaagagtatctctctatatatttctttttacgcagtctcttcaatctctttatgtgggctttcgcacctcttatttatatatatatatatacactgaatcatataaacttttttttatattgaatctaatatattatcaa

SEQ ID NO: 1703 - DNA, 2286 bp, Saccharomyces cerevisiae
caagagtagtctcaagggaaaaagcgtatcaaacataccatgtttttcaacagactaagcgctggcaagctgctggtaccactctccgtggtcctgtacgcccttttcgtggtaatattacctttacagaattctttccactcctccaatgttttagttagaggtgccgatgatgtagaaaactacggaactgttatcggtattgacttaggtactacttattcctgtgttgctgtgatgaaaaatggtaagactgaaattcttgctaatgagcaaggtaacagaatcaccccatcttacgtggcattcaccgatgatgaaagattgattggtgatgctgcaaagaaccaagttgctgccaatcctcaaaacaccatcttcgacattaagagattgatcggtttgaaatataacgacagatctgttcagaaggatatcaagcacttgccatttaatgtggttaataaagatgggaagcccgctgtagaagtaagtgtcaaaggagaaaagaaggtttttactccagaagaaatttctggtatgatcttgggtaagatgaaacaaattgccgaagattatttaggcactaaggttacccatgctgtcgttactgttcctgcttatttcaatgacgcgcaaagacaagccaccaaggatgctggtaccatcgctggtttgaacgttttgagaattgttaatgaaccaaccgcagccgccattgcctacggtttggataaatctgataaggaacatcaaattattgtttatgatttgggtggtggtactttcgatgtctctctattgtctattgaaaacggtgttttcgaagtccaagccacttctggtgatactcatttaggtggtgaagattttgactataagatcgttcgtcaattgataaaagctttcaagaagaagcatggtattgatgtgtctgacaacaacaaggccctagctaaattgaagagagaagctgaaaaggctaaacgtgccttgtccagccaaatgtccacccgtattgaaattgactccttcgttgatggtatcgacttaagtgaaaccttgaccagagctaagtttgaggaattaaacctagatctattcaagaagaccttgaagcctgtcgagaaggttttgcaagattctggtttggaaaagaaggatgttgatgatatcgttttggttggtggttctactagaattccaaaggtccaacaattgttagaatcatactttgatggtaagaaggcctccaagggtattaacccagatgaagctgttgcatacggtgcagccgttcaagctggtgtcttatccggtgaagaaggtgtcgaagatattgttttattggatgtcaacgctttgactcttggtattgaaaccactggtggtgtcatgactccattaattaagagaaatactgctattcctacaaagaaatcccaaattttctctactgccgttgacaaccaaccaaccgttatgatcaaggtatacgagggtgaaagagccatgtctaaggacaacaatctattaggtaagtttgaattaaccggcattccaccagcaccaagaggtgtacctcaaattgaagtcacatttgcacttgacgctaatggtattctgaaggtgtctgccacagataagggaactggtaaatccgaatctatcaccatcactaacgataaaggtagattaacccaagaagagattgatagaatggttgaagaggctgaaaaattcgcttctgaagacgcttctatcaaggccaaggttgaatctagaaacaaattagaaaactacgctcactctttgaaaaaccaagttaatggtgacctaggtgaaaaattggaagaagaagacaaggaaaccttattagatgctgctaacgatgttttagaatggttagatgataactttgaaaccgccattgctgaagactttgatgaaaagttcgaatctttgtccaaggtcgcttatccaattacttctaagttgtacggaggtgctgatggttctggtgccgctgattatgacgacgaagatgaagatgacgatggtgattatttcgaacacgacgaattgtagataaaatagttaaaaatttttgctgctggaagcttcaaggttgttaatttattgacttgcatagaatatctacatttcttctaaaaatacatgcatagctaattcaaacttcgagcttcatacaattttcgaggagattatactgagtatatacgtaaatatatgcattatatgttataaaattagaaagatatagaa

SEQ ID NO: 1704 - DNA, 2660 bp, Saccharomyces cerevisiae
attggagagccattgcaacgcacagtccaacagtaataagctctgatcgttttgaaaaatgaacttcaatacacctcaacaaaacaaaacgcccttttcgttcgggactgccaacaataactctaacaccaccaatcagaattcctctactggtgcgggcgccttcggaacaggtcaatcaacatttggtttcaacaattctgcgccaaataacacgaacaatgcaaactcttcaatcacacctgcatttggtagcaataacactggtaatactgcattcggtaacagtaaccccacaagtaacgtttttggcagcaacaattctacgactaatacatttggtagtaatagtgcagggacatccctttttggatcttccagtgctcaacaaacgaagagcaatggaactgctggaggaaatacatttggttcttcatccttattcaataacagtactaatagcaatacgacaaaacctgcgttcggcggtttgaattttggcggcggcaataacacaactcctagctcgaccggtaatgctaacacaagtaataacttatttggcgctaccgcaaatgcgaataagccagccttttcctttggtgcaaccactaacgacgataaaaaaacagaaccagacaagcctgctttctcctttaattcaagtgtcggtaataagacagacgctcaagctcccactacaggattttcctttggttcacaactaggtggaaacaaaacggttaacgaggctgcaaagccttccctttcatttggttcaggatcagctggtgctaacccagctggagcttcgcaacccgaacctacaactaatgaaccagcaaaaccagccctctcttttggtactgcaacatccgacaataagacaactaacacaaccccaagtttttcgtttggtgctaaatcggatgaaaataaagctggtgctacttctaagcctgccttctcattcggtgctaagccagaagaaaagaaggatgataattcctcaaaaccagctttctcatttggtgccaaatcaaatgaagacaagcaagatggaacggctaagccagcattttcctttggtgccaagcccgcggagaagaataacaatgaaacctccaagccggcattctcttttggagcaaagtctgatgagaaaaaggatggtgatgcctctaaacctgccttctcttttggcgctaaaccggatgaaaataaagctagtgctacttctaagcctgccttctcattcggcgctaagccagaagaaaagaaggatgataattcctcaaaaccagctttctcatttggtgccaaatcaaatgaagacaagcaagatggaacggctaagccagcattttcctttggtgccaagcccgcggaaaagaataacaatgaaacttccaagccggcattctcttttggagcaaagtccgatgagaaaaaggatggcgatgcctctaaacctgccttctcatttggtgctaaatcggatgaaaaaaaggacagtgattcttcgaagcctgccttctcatttggtactaaatcgaatgaaaaaaaggacagtggttcttcgaagcctgccttctcattcggtgctaaacccgatgaaaagaagaatgatgaagtctccaagcctgccttctcattcggagcaaaggctaacgaaaagaaagaaagtgatgaatcaaaatcagccttttcatttggttctaagcctacaggaaaggaggaaggcgatggggcgaaggctgccatttcctttggtgctaaacccgaagaacagaaatccagtgatacgagcaagccagcgtttacttttggtgctcaaaaagataatgagaagaaaacagaggaatcttctacggggaagtcaaccgcagatgtcaaatcaagtgatagcttgaaattaaattctaaaccagtagaattgaagccagtttctctcgacaataaaacactggacgatttagtaacgaaatggactaaccaactaacagaatcggcctctcattttgaacagtataccaaaaaaattaatagttgggatcaggtactagtgaaaggaggtgaacaaattagtcagttatactcagatgctgtgatggcggaacatagtcaaaacaaaatagatcaatctctacaatatatcgagaggcaacaggatgaattagaaaacttcttagacaattttgaaaccaagacagaggcacttctgtccgatgttgtgtctacaagttcaggtgctgcggccaacaataatgaccaaaaaagacaacaggcctataagacagcccagactttggacgaaaatttaaactcgttgtcatccaatctttcttctctaatagtagaaatcaacaatgttagtaatacattcaacaaaaccactaacatcgatataaacaatgaagacgaaaatattcaactaatcaaaatcttgaattcacatttcgacgctttaaggtcactagacgataactccacctctctggaaaaacaaatcaactcgataaagaaatgatctaaaagaaaaaattccctctattctacacttatttgacataggatgtgctatattaaataattatatataggtatcaaaatgtacgcgatggttcagaacctgcaattaatttaacacctcaatcata

SEQ ID NO: 1705 - DNA, 4398 bp, Saccharomyces cerevisiae
atacatatacaccactcaggcactcgcataatcgcacttaaatacgcaaaatatacaagatagccctacaactgctccatggactccaaggacacgcaaaagttgcttaaggagcaccgaatcccctgcatcgacgttggatggttggtcaggcccagtgcctccaccagcaagagctccagaccagggaaatccgagtccaaggccaacagtgtggctcctgacatccagatggacactgctcgcccgcccgttttcgaaacgtctgtagactcttccagcagcattctttcttcaaacgataagggacgccgtcactccgtagctgcgagcttgctaatggataatcagcgtgctaacgctgggtctacatccgttcccacaaacattcctccccctaggggtaggtcgaagtcagtggtggagactaacctgtctaacgttgaggctgactccggacatcatcaccaccaccgccaccaccatcacacggaagatgctcctgcacctaagaaggtcggattctttaagagtctgtttggccataggaagaaggatcaggaacaacaggagaaggaacgagaaaggaaagagcgctcaccctctccgactcacgtggaccgtggcgcggccataagaagagaaagaacggctaccatatctgcggaatcaccaccgcctttgcagtacaatgctccaccctcttataacgatactgtggtaccgttaacaagatccaagacggaatcagaagtgtattacgaaaatcatccgcaaagctactaccatggccgtatgcgcacataccactcaccagaagagggtaaagtcgacggaacttcccccgcagacgatcataactatggcggctctcgacctgatcctagattaatggatttcttgcgctactacaaatctaaggattacaaattagccgccttcaaagaagggaactttattaagtcatctgcgtctcccacaaccaagaaaaatagacgcgcttcgttctcattacataacgacaaaccacaacctgccaaatcacttgctcaccagaaatttgacgctaagggaagacccattccgccgcatcccgacgcacccaaattgccttccgccttcaggaagaagcatccaagcaacgcatcgatagtagacacagtggattccaattcggacgtttcctcgtcagcgcagaataataatcagacaccttcttctcataaattcggcgcctttttaaggaaagttacctcttatgggaacaacaacaacaacagcaccaatgcctcctccctttctgcaaacgtcaataatccagacacctcatcgacgtccctatggtcttctagttcaatggagttcgacccttcaaagataaccaccgtccccggcctcgagaatatacggcccttgaaacacgtctcctttgctacgaacacctatttcaacgatcctccacaacaaatatgcagtaaaaaccctcgtaaaggtgaagtggaagtgaagcctaatggatctgttgtcattcataggttgactccgcaagaacgcaaaaaaatcatggaatcgactagtttgggtgttgtcgttggggggaccgggcaattaaaactattaaatcccgaggaagacgacgcaaatgccaagagtaaagaggagatggcccctcaaaagcagaacgaagtggaggcacacgacgaggaggataacaattctcaaaggagaaacatcgttatggccgctgcagaagctgctgcagaggccagagccaaagaggcacctaacgaattgaaacgtatcgtgaccaacaatgaagaagaagtcactgtcagtaagaccgccagccatttgaccatcgataagccaatgatttcaagaaggggtgcttccacatcctctttggcctccatggtgtccagtgataccaacggtacgaacgcagatgatgaaggagaaattcttcccccaccttctttgaagatacctcacgacattgtgtatacccgttgttgtcacttgcgagaaattctgcccataccagccacattgaagcaattgaaaaagggctcgacggaccctatccccatcttacagttacgtaacccaagaccttctatggtggaaatttggtcgttcagcgatttcttgagcattgctcccgttttatgtctttcgttggacggtgtacaattaaccgtgcaaatgcttagaataattttgagttcgctggtttacaaacagcatttccaaaaactttctctaagaaacacccccttggatgaagaaggatggaaagttctgtgttattttgtctccaaggccaagtctctgcactctattgatttgacaatggtcccttccatcaagacaaatgtacaaaagccttctaaatcttctttgaagtcaaaaattctgagaatgcaatgcaacttggaaaatagatccgacatgaactgggaccttttgacagcttctattgccctcatgggcggtttggaggaaattgtcatttccggggccaagatgaattctgcacaattcaaaaacttcatcctcgttgcttgtatagcaaccgagagattgggcctcgcgtataatggattatctaagagccaatgtgatgatttggccaagtggatggttcaatcaaaagtgacaggtctagacgttggttttaacgatttgaatggcaaactttcctctttcaccgatgctgttttaggcaaaatacaaaaagctaacgagaaaaacgtcttcaaatttttatctctaaatgggacaaatttgagagtgaacgaacacgacacttttgagaataacgaggtcttaaaactgataagcgttttatgttatttggaaaatttaaaattcttggatatatcgaacaatcctgccatcttcccccactgtgttccgacgctgattgattttttacctgtttttgttaatcttgtccgtctgcatatcgactacaataatttaagttccacgagtgtagtgatgctggccgaaatattacccatgtgttcaagattgaattatttttccatgttaggaacggaattggatttggcatcgtctaaagctctagcagaggcggtgaggaaaagttcatctttgatgactttggacgtggactatgtgtatatgccagagaacattaaggaaaaaatttcattatatgctttaagaaatattcaaggggagttgaaaagggttaatagtgacgataaagatatcaaagatagccaattttcaagcctacaggaccaactatcacttttattaactgaaaaagcggataattccgaacattacaacaaaatggttgagaatttcatggccaaaatcgcgttggcacgtatcaagattagtaaagtggttcatgatctttttgatttaaaactgaatggacaattaaatttggaaggtaaggaagctttgattagattatgcttcatagaggcaagtttggaaagaggctgtgacctgctgaaacaaagacataacaacactttgaaatcaccagaggccgtctcaaaaagtcggaaagggggaaatcaagcacaacccaattccgaaagctgtcaaagaatgttactaagctcatctatattacaaaattcagatcatattgcgcttatgccattcggtagtgcaatagtcgaaaagtcaagcccagatgcagaagatgccgtcgaattcagagaaggtgacgactccaacgtaaatcacgaagacgtaccagcaaatgatcaacaatttcgagatgaagttgatatcaaaaacaaatactctatcattaaaagagaactagaacacgaaaagcttgtcggtggtggcgatttgccagtggacaaagaaatcttaaatcgtgccgcacaatccttagatagtgaccagataaaggaatttctgttgaagaatgacgtctctactatccttggcgtcattgatgaactgcatagccaagggtaccacttgcatcatattttcaaaaaacagggaaaccaagaagagaccgcgttcagaacaaaggatgaacaacagtcctcccaatccaatgattcaagtgctaatgcgtcccctaccactgatccgatatccacaggctccaatacttctagaacgaacgataatgctcatattcctccgaccgatgcgcctggatttgataaatttatgaacaatgcagaggaaaatgccattgacgctgcttatgatgatgtgctagacaaaatccaggatgcgcggaacagtagtactaaataataagggatttctcttaattttttaatctcttttttgtattgggtttcgaaaatataataaggagccctcagacatttacgtatcctttcatgtatgattattttaagtattttgtatttttta

SEQ ID NO: 1706 - DNA, 3454 bp, Saccharomyces cerevisiae
tttcattaaatttttttttttttttttttttttcactttcttgcgatgagatgcacatagtaaaagaaaagtataccagtgtagtgcgtaaattaatacctatataataattcattttcggtgactcaacattccctgcctatattttaagcacctgcaagaaatatagattatatacgaaggatggattctactgatctgttcgatgttttcgaggaaacacctgttgagcttcctacagatagtaatggagaaaaaaatgctgatacaaacgtaggagatactccagatcatacccaggataagaagcatggccttgaagaagaaaaagaagagcatgaggaaaacaacagtgaaaataaaaaaatcaaatccaataagagcaaaacggaagataaaaacaaaaaagttgtagtaccagtgttggcagattcgttcgaacaagaagcctctagagaagtggatgcatcgaaaggactgacaaattcagaaaccttacaagttgagcaagacggtaaagtcagattatcgcatcaggtccgccaccaggttgcactaccaccgaactatgattatacgcctatcgctgagcataagagggtaaatgaggctcgtacatatccattcacattagaccctttccaggacactgcaatctcatgtatagatagaggcgaatctgtgttggtttctgcgcacacatcggctggtaaaacagttgtggctgaatatgccatcgcacaatctttaaaaaataagcaaagagtcatttatacctctccaattaaggctctatcaaaccaaaaatacagagaacttttagcagaatttggagatgtcggtttgatgactggtgatatcacgatcaatccggatgcaggctgtttggtcatgaccactgagattttgagaagtatgttatatagaggcagtgaagttatgagagaagttgcctgggtcatctttgatgaagtgcattacatgagggataaagaaagaggtgttgtgtgggaagaaacgattattttactgccagataaggtccgttacgtgtttttatcggccaccattccaaatgcaatggagtttgctgaatggatatgcaaaattcattctcagccatgtcatattgtctacacaaatttccgtccaactcctttacaacattacctgtttccagcccatggagatggtatttatctggtggttgacgaaaaaagtaccttcagagaggaaaatttccaaaaagcaatggcgtccataagtaaccagataggtgatgatccaaattccactgattcaagaggtaaaaagggtcaaacctataaaggtggctccgctaagggtgacgcaaaaggtgacatttataagatagtgaaaatgatttggaagaaaaagtacaatccagtgattgtattttcgttcagtaaacgtgattgtgaagaattagcattgaagatgtctaaattagattttaattctgatgatgaaaaggaggctttgacgaagatttttaacaatgccattgcactattaccagagacagacagagagctaccccaaattaaacacattttaccattattaagaagaggtatcggtattcatcattccggtttactgcccattttgaaggaagtcattgaaattctgtttcaagagggatttttgaaggtgttgtttgcaacagaaacattttcgattggattaaacatgcctgctaaaactgttgtctttacatcggtcagaaagtgggatggtcaacaattccgctgggtttcaggtggagaatatatacaaatgtctggtcgtgcaggtcgtcgtggtttagatgatcgtggtattgttattatgatgattgatgaaaaaatggaacctcaagttgctaaaggaatggttaagggccaagcagataggctagactcggcttttcacttaggatataatatgattttgaacttaatgagagttgaaggtatctctccggagtttatgttggagcattctttcttccaatttcaaaacgttatttcagtaccagttatggaaaagaaacttgctgaactgaaaaaagactttgatggcatcgaagtcgaagatgaagaaaatgttaaagaataccatgagattgagcaggctatcaaaggttaccgtgaagatgttcgtcaagttgtcacccatccggcaaacgccttaagtttcctacaaccaggcagattagttgaaatctctgtcaatggtaaggataactatggctggggtgctgttgtcgattttgctaaaagaattaacaaacgcaacccaagtgctgtctatacagaccatgaatcctatattgtcaatgtggtcgtcaataccatgtatatagactctccagtcaacttgttgaaacctttcaaccctaccttaccagaagggattcgcccagcggaagaaggtgaaaaaagcatatgtgctgttattcccataactttggattcaatcaagtcgattggtaatttgagactatatatgcccaaagatattagagccagcggtcaaaaagaaactgttgggaagtctttaagggaggttaatcggaggttcccggatggtattcccgtgctggatcctgttaaaaacatgaagatcgaagatgaggactttttaaagctaatgaagaagattgacgttttaaacacaaagttatcctccaatcccttaaccaattccatgagactagaagaactatatggtaaatatagtagaaaacacgatttacatgaagatatgaaacaattgaaacgcaaaatttcagaatcacaagccgtaatccaactggacgatcttcgtcgccgtaaaagagttttgcgccgtttaggattttgtactcctaatgacattattgaactgaaaggtagagttgcatgtgaaatatctagtggtgatgaactgttactaacagaattgatcttcaatggtaatttcaatgagttgaaaccggaacaagcagcagcattattatcatgctttgcattccaagaacgctgtaaagaagcgcctagattgaaaccagagcttgccgaacctttgaaggctatgagagaaattgcagcaaagatcgctaagataatgaaggattctaaaattgaagttgtagaaaaggactacgttgaaagcttcagacatgaactaatggaagttgtttacgaatggtgtagaggagctacttttacgcaaatctgtaaaatgaccgacgtttacgaaggttcgttgatcagaatgttcaagagattagaggaattggtgaaggagctggtagacgtcgccaataccattggtaactcttcacttaaggagaagatggaagctgtcttgaaattaattcatagagatatcgtatctgctggttctttgtatttatagttaatcacacacaattatgtatttttattggtatatataataaacaaat

SEQ ID NO: 1707 - DNA, 1205 bp, Saccharomyces cerevisiae
catcaagaacttggtttgatatttcaccaacacacacaaaaaacagtacttcactaaatttacacacaaaacaaaatgatcagaattgctattaacggtttcggtagaatcggtagattggtcttgagattggctttgcaaagaaaagacattgaggttgttgctgtcaacgatccatttatctctaacgattatgctgcttacatggtcaagtacgattctactcatggtagatacaagggtactgtttcccatgacgacaagcacatcatcattgatggtgtcaagatcgctacctaccaagaaagagacccagctaacttgccatggggttctctaaagatcgatgtcgctgttgactccactggtgttttcaaggaattggacaccgctcaaaagcacattgacgctggtgccaagaaggttgtcatcactgctccatcttcttctgctccaatgtttgttgttggtgttaaccacactaaatacactccagacaagaagattgtctccaacgcttcttgtaccaccaactgtttggctccattggccaaggttatcaacgatgctttcggtattgaagaaggtttgatgaccactgttcactccatgaccgccactcaaaagactgttgatggtccatcccacaaggactggagaggtggtagaaccgcttccggtaacattatcccatcctctaccggtgctgctaaggctgtcggtaaggtcttgccagaattgcaaggtaagttgaccggtatggctttcagagtcccaaccgtcgatgtttccgttgttgacttgactgtcaagttggaaaaggaagctacttacgaccaaatcaagaaggctgttaaggctgccgctgaaggtccaatgaagggtgttttgggttacaccgaagatgccgttgtctcctctgatttcttgggtgacactcacgcttccatcttcgatgcctccgctggtatccaattgtctccaaagttcgtcaagttgatttcctggtacgataacgaatacggttactccgccagagttgttgacttgatcgaatatgttgccaaggcttaaataaagcaatcttgatgaggataatgatttttttttgaatatacataaatactaccgtttttctgctagattttgtgaagacgtaaataagtacatattactttttaagccaagacaagattaagcattaa

SEQ ID NO: 1708 - DNA, 1275 bp, Saccharomyces cerevisiae
atgagtatttttttcaagccgccgattgatattgagatccttttcgataatgaggaatctcgcaaacacgtagacattgcaacaagatcaagtaattccagttacaaatcaatgaaggaaagcttgcccgtctatgaagatggcgaatcccttggtggaattgttactttgagagttcgggatagtaaaaaggtagaccacttgggcataaaagtgtccgttattggatccattgatatgttaaaatctcatgggagcggtaattcatcttctaaaaaagttacctctagcacatcatcttcctcttctaatggttcagtagatgtgcggaagaattcagttgatcaatttttatgccaaagctatgacctctgtcctgctggtgaattacaacattctcaaagtttcccattcctattcagagatttgagtaaaagatacgaatcttataaaggcaaaaatgtggatgtagcttactatgttaaggtaacagttatgaggaagtccacagacatctcgaaaataaaaagattttgggtctatctttataatagtgtaactactgcgccaaataccctttccgcaaatgagacaaaggcaaccactaatgacatcgctggtggtaactatgctgcagataatgcgagtgacaacacgcaaacaaagagcacccagggtgaggcggcagacgttaatcaagttttgccgatatcacattcaaataatgagcccaagcctgttagattggatataggtatagaaaattgccttcacattgagtttgaatatgccaaatcccagtacagcttaaaagaagtcattgtggggcgtatatatttccttttaacgagactaaggataaaacatatggaattaagcttgatcacaagagaatcttccggcctacaaacttctaatgtaatgacagattccactgctatccgatacgaaataatggatgggtcttcagtgaaaggtgaaaccatacccataagattattcttgagcggctatgacctgacgcccaatatgagctgcaactactttaacgtcaagaattatttgagcttggttattatcgatgaagatggcagaagatattttaaacaatcagaaataacattgtacaggacccggtagaaaagctcgaccttaaataaggtgaagatgtggttctctgttctttcaacatctcgatatttaacttttcgtttggcattatagtgttatacataacaatatctagatttcagtagaagacttttgcgtaagtta

SEQ ID NO: 1709 - DNA, 1648 bp, Saccharomyces cerevisiae
caaaagaagctcaatagaccatgtcttctgaatcaggaaagcctattgctaagcctattaggaagcctggctataccaatccggctttaaaagcccttggtatacccgccttgaggctgccttctcgaaactggatgatcttttggtctgtgttaacagtatccatcggtggcatagcctatgacaaatacaagcaacgtcagattctgagccatgcaacagacttggtgaagcctttggcagaggagtccatggaggtagacaaagtgccacgaaagatcactgtttttattgcacctcctccaaatgattatctggagagttcgttgaaagtttggagacgatatgttaagcctgtactgtattatgcagggttggactatgaattagttcaagaggataggcaagggattattagaactaatgtagccaacagaatcagagaattgagaaaggaaatattggcatcgacggatgggcagccagttaaagagcctaaccaaacggtagcaaaaccaagtggttcttcaaccagtaaaatttcatcactactaccgttcaataaaatcattcaagatcctgctgaagaagatgactcgtttgatccagaaatcggtaaaaagttcaaggagaacttcgactggagaaacgttataggtatcttctatacaatgccaaaaccgaagcatataataagtgaagacgccctgacaaaggaccctatattatctggtggtgttatttgtttaggtagaggcgcctataaggagtacattgccggtattcacgaaggcttgcttggacccatcgagaagaccgaaaaaacaggatccactgagcctaagatgactggggttgtagaagcaaatcaaatagaatcaaaggtaagtgaatccggtgctacggaactggtggatgccgagaaagagactgctttggaagaggccaaagtacaagatgatctaaaggttgatgaagaaaacagctcagaggattcgcaaaaatttttgaagccatttatttcttcagaccaataccctgacctgcaaatcgcttcggaattacaaactccaaatggcgaattcataagaaaccccaatacaaatatcccgcttctgattaatcagccgttattggtcattccaatacctaacttgataggttttactaccattccaaggagaatacatcgtttttaccagaagcgtttctacgtagaggacgtgtgttcaagtgtagttaactgtgttcgacaaacccgtataagaccgtttgatattgcaaaggatattgatttggcgaaggacgaagaaaaagattggccacagaactgggtcaaacagggtaaagaaaagaacagcgaatggacccaagaattagtatgtgatcctagaatcacgaagcatatgtttgtttacgaaaaaccacccaaggaagagccagaatcagatatttaattggatatatattatgttttatcatcatgcacgatcgacgttatgtctgacatataccaaacccttttcgaagatttccctttactcatgttgaaatagtttttatatatgcacacatatacatatatataaaatctgtaaatataataaaatgtgtacattgtaaaagaatccaagcacaactattatta

SEQ ID NO: 1710 - DNA, 822 bp, Saccharomyces cerevisiae
atccagtactaagaaacggcgatgacaatggaaaaaaatggaggtaatagcagccgtggtggccaagtaggcggcaagtctgtgtgtgtttactgcgggtcttcatttggcgctaaggcgctatactcagaaagtgcagaagaattaggagcccttttccataagctgggatggaaattggtatacggtggaggcactactggtttgatgggcaagatagcaaggtctacgatgggacctgatttaagcggacaggttcacggtatcattccaaatgcacttgtgtctaaggaaaggacagacgaggataaagaagatgttaataaagcattgttggagtctgtagaaaatcataagggcgccactcctatttctgaagagtatggggaaacaacgattgtaccagatatgcatacgagaaaaagaatgatggcaaatttgagtgacgcgtttgttgctatgcctggtggatacgggacttttgaagaaatcatggaatgtatcacgtggtcgcaactggggattcataataaaccaattatcttgttcaatatcgatgggttctatgacaaattattggagttcctcaaacactctattcaagaacggttcatcagtgtgaagaatggtgaaatcattcaagttgcctccactccgcaggaagttgttgataaaatagagaagtacgtcgttccagagggccgtttcaatttgaattggagcgacgaaggtcacgctcacgaggattgtgctaaataatagaaacgtaagtcatgtatctagtttaaacgatctgtatagataatgtggtgaaaaatccaa

SEQ ID NO: 1711 - DNA, 1418 bp, Saccharomyces cerevisiae
ttaatgaaaaatagacaatatgaacatttagtaatgttttgaacagtgtatttatagagtacttaaacacatatgaagatatagcgcaagtaaatataaatgagtgacaaatctcatcagatatattgctacttttggctctttggtttgatcaataatgtactttatgtggtaatactttcagcagctgttgatatcgtgggtcctaccttgcctaaatctctagtattgctagcagatatattcccatcactcgccattaaattgtgttccccattctttattgatagaatcaagtacagctatagaatatggtctttgatcacgatgagttgcttaggaatgttcttagtttcttttaaaaacttgtttgtttgtcttttaggaatatctttcgcatctatatcttccggatttggagaagtgacattcctacagctaacacactattacaaacaaatttctttgaatggatggtcgtcaggtactggtggtgcaggaatcattggcggagcatcttatatgttcttaacttcaatctttaaagttccagtgaagctaactttactagtatttagtctccttccatttgcatttttgttttattttaaattagaatccaatgataccaacctgacttaccaaagtcttcaacaaattgacgaagcagaggatgaccagttggtgccctttcctgtcgcctttacacataccaacgcttcgcaatccctgtattctacaagacagcacattttgcaaacggtcaagagacttcgaagattggtttttccatacatggttccattgaccaccgtctacttattcgaatatttaataaaccaagcggtagctccgaccctattatttccgattaatggtgatgaaagaagtaaatcgatgccatttttcttccataaatacagagatatatacgtaacctatggaacgctctaccaattaggtgtctttatatcaagatcctttggacatcttatgagaatgaggagtttatacatcttagcgtttttacaaggtgtgaatttgtgcataacggtactgcaatcatggttttatgtcacacattcgccctgggcggtgatgatattaatattctatgagggttttcttggtggtgcgtcatatgttaacacattcttaaatattctcgaacaagaggatcctgatgaaacagagttcgccatgggtgctgtgtccatcgctgattcctttggcgtttttttggctgcgttacttggtttggggctagaacccaaactttgtaggcatcaaattgccgatgacagaccttggtgtaggatggaataaagttttgttgtgatattaaataggagattgaaataaagtgttagatgctttctatatactcattctaatgcctgctaataactcttcgataa

SEQ ID NO: 1712 - DNA, 1486 bp, Saccharomyces cerevisiae
atatatataaagtgttcaatttactataattgcgtatagaatccattgttacttgctctcaatgaaacaacgattcattcgtcaatttacgaacctaatgtctacttcgagaccgaaagttgttgccaacaaatatttcacttctaacactgccaaagatgtttggtcgctaaccaatgaagccgctgcaaaagctgccaataactccaaaaaccaaggccgtgaacttattaatttaggccaaggctttttttcatattcccctcctcaattcgccattaaggaggctcagaaagccctagacattccaatggtcaatcaatattctccaactagaggtcgaccttcattaattaattccttgattaagttgtattctcctatttataacacagaattgaaagcggaaaatgttaccgtaacaacaggtgccaatgaaggtatactttcttgcttgatggggcttttgaacgctggcgacgaggttattgtttttgaacctttctttgaccaatatattccaaatatcgaactttgcggtggtaaagttgtttacgtccccataaatcctccaaaggaattggatcaaaggaatactagaggtgaagaatggaccattgactttgagcagttcgaaaaagcgattacatccaagacaaaagctgtcattatcaatacccctcacaacccaattggtaaagttttcacgcgcgaggaattaaccactttaggtaacatttgcgtcaagcacaacgttgtgattatatctgatgaagtctatgaacacctttacttcactgattctttcactagaattgccacactctctccagaaattgggcaactaaccttaacggtcggttctgccggtaaatcgtttgctgctactggttggagaattggttgggtcttatccttgaacgcagagttgttaagttatgcagctaaggcacatacaagaatttgttttgcatctccatcccctctacaggaagcttgtgcaaactctattaacgacgctttaaaaattgggtattttgaaaaaatgagacaggaatatatcaacaaattcaaaattttcacatcgatctttgatgaattgggactaccatatacagctccagagggtacatattttgtcctcgttgatttctctaaagtgaaaattcccgaggactatccctacccagaggagatcctgaataagggaaaagattttcgcatttctcactggttgatcaatgaattaggtgtggttgccattccaccaactgaattctatatcaaagagcacgaaaaggctgctgagaatttgttaaggtttgcagtttgtaaagatgatgcttatctagaaaatgccgtagagagattaaaactactcaaggactacttataagataaatttttttttatactcctttttctcaatatatagattttataaagcatgtatatttttatgcagaagtggtaaatataaacatca

SEQ ID NO: 1713 - DNA, 2324 bp, Saccharomyces cerevisiae
ttaatatttaagcaacaaaaggacagcgataattgagtggtggcttaattctatactccaaagtatgtcccaatctagtaggttaagtgcacttcctattttccaagcatcgctttcggcaagccaatctccacgttacatttttagttctcagaatggcacaaggattgttttcattcaagataacataataaggtggtacaatgtactcactgattcactttaccacagtttgaactttagtcgtcatctcgtcttggatgataccttccatgtaatatctagtacgtctggtgacctactctgtcttttcaatgacaacgagatttttgtaatggaagttccttggggctattccaacgttgaagacgtttccattcaagatgcattccaaattttccactattcaattgatgaagaagaagttggtccgaaatcgtccattaagaaagttttgtttcatccaaagagttatcgtgattcttgtatagtggttttgaaagaggatgacactatcacgatgtttgacatccttaattcgcaagaaaagcctatcgttttgaacaaaccgaacaactcctttggtttagatgcacgtgttaacgacatcacagatttagaattcagtaaggacggattgacgttatattgtctaaacaccacagaaggcggtgatatctttgcattttatccatttttaccgtcagtattactgttaaatgagaaagatctcaacttgatcctaaacaaatctttagtaatgtacgagtccctggattctacaacagatgttatagttaaaaggaatgttattaagcagttacagtttgtgtcaaaactgcatgaaaattggaattcaagatttggcaaagtcgacatacaaaaggaatatcgtttagccaaggttcaaggaccattcacgataaacccctttcccggcgagctgtatgactatactgctacaaatattgcaaccatactaattgataatgggcaaaatgaaattgtttgtgtcagttttgatgatgggtctttaatcttactcttcaaagatttggaaatgtcaatgtcgtgggatgttgacaattacgtgtataataattctttggttctaattgaacgagtcaaactacaaagagaaattaagtctctaataacgttacctgaacagttgggaaaactttatgtcatttccgataatattatacaacaagtaaattttatgagctgggcttctacattgagtaaatgtatcaacgaatcggatttgaatccacttgcaggattgaaatttgaaagtaaacttgaggatattgccaccatagaaagaattccaaacctagcgtatatcaactggaatgaccaatctaatttagccttgatgtcgaataaaacattgacttttcaaaatatttcaagcgatatgaaaccgcaaagcaccgcagctgaaacaagtatcagtacagaaaaaagtgacacggtaggagatggttttaaaatgagtttcacacagcccataaatgagattcttattttgaacgataattttcaaaaagcctgtattagtccatgtgaacgaattatcccatcagcagaccgccagatacctttaaaaaacgaagctagtgaaaatcagttggaaattttcacggatatttccaaagaatttttgcaaagaattgttaaagctcaaactttgggtgtttctatccacaatagaattcatgagcaacagttcgaattgacgcgccaactacaatcgacatgcaaaataatttcaaaggatgatgatttaaggagaaaattcgaagcacaaaataagaaatgggatgcacaactaagcagacagtcagaattaatggagagatttagtaaattgagcaagaagctatctcaaatcgccgaatccaataaatttaaagaaaagaaaataagccatggtgagatgaaatggttcaaagagatacgaaaccaaatattgcaattcaacagctttgttcactctcaaaaatcccttcaacaagatttatcgtacttgaagagtgaactaactcgtatcgaggcagaaactatcaaagtcgataaaaagagccaaaacgaatgggatgagctacgcaaaatgcttgaaatagattcaaagataattaaagaatgcaatgaagaattgttacaagtttctcaggaatttactactaaaactcaatgagtaagcgacttgcatagtctgctatcatatatgtacgctaagaaacaactgggcaatggtataatatcatgtagcaagaggacattatatatgaattggtcaatatataaagccttct

SEQ ID NO: 1714 - DNA, 2610 bp, Saccharomyces cerevisiae
catctaccacgcacacttcaccaagttagcaagatgaacttgaagcagttcacgtgcctatcatgcgctcaattactcgctattctgctctttatctttgcttttttccctagaaaaatcgtgctgacaggtatatcaaagcaagatccggatcaagaccgtgatctccagcgcgataggcccttccagaaattggtgtttgtgatcattgatgctctcagatcagactttctttttgattcgcagatttcccacttcaacaacgtgcaccaatggctcaatacgggcgaagcatggggttacacgtcatttgctaatccgcctaccgtgacgctgcctagactcaaaagtattactacgggatctacacctagcttcattgacttgctgctgaatgtagcccaggacatagattccaacgatctttcggagcacgattcctggctgcagcagttcatccaacataataacacgattcgtttcatgggcgatgacacctggctgaaactgttcccacagcaatggtttgacttcgctgacccgacacactcgttctttgtcagtgatttcactcaagtcgataataatgtgacgaggaacttgcccgggaaattatttcaggaatgggcccagtgggacgtggctatcctgcattacttgggtcttgaccatatcgggcataaagatggcccgcattcaaagtttatggctgctaaacatcaagaaatggacagcattctgaagtcaatatatgatgaagtgttggaacatgaagatgacgatgatacactgatttgtgttcttggcgaccatggaatgaacgaactgggcaaccatggtggctcttcagccggcgaaacatcagcaggattgttgtttttgtcacctaagctggcgcaatttgctaggccagaatcgcaagtaaactacacattgcccatcaacgctagtccggactggaatttccagtatttagagactgttcaacaaattgatatcgtccccaccatagcagcactgtttggtatgccaatccccatgaacagtgttgggataataatacctgactttttacaactgttgcccaataagttggcaagtatgaaagaaaattttatgcatttgtggaaattatcagaccatcacggcgaggttgctcttgacgatttcactgccgaagatatttatacaaagatgtacactattcaagaaacgttaaccaagtctgcaacaaattataattatcctcttttgacactggcttttgttggtttcctcataataacaatcatcgccatttatgtattattacgttattctgggcctgatttttggcagttgcgcgtttcttccctgtctgttctgttagtttccattatactaggcgtttccacatttgcaagtagtttcattgaagaggagcaccaactgtggtggtggatagtaactgcattctcggcggtccctctgttcgtataccgattgaatgtgctcataatcgtgcgctggtttataatgatggcatgcgtacgctcaatcaagttttggaataacagtggccagaaattcatttattctaacgttatgtccaatctacttaatcagaatccttcctggaagtggtgcttaaatatgttgacatttctagtgctgataatggcatctgctggttttcaagtactacattttattgtcactactattttggtggggttgtgtttcacgtacaaaatctcgtgggaaatcgtcaatggtaaccaggcagaaataccgctctttatgcatgatttactggctaagatagactttgcaccaactgaaagtaacttgattgtacttgcgcgcgttttcttccaagcttgggctattgttgtcatttcaaggttggtcctgacgaaattgaaagtacttaacaagaactacctcattaaagatatgaaagtttatataacaattcttttgatgttccaaacttcttctcagaacataggtcaatttctcgttttccaaatattagagtcccaaattttttactttttccaaaatattccaaccgcctcattaacatcaacaagtaagatttatttttcgaatttggtgtccttaattttacaaaattttacatttttccaattcggtggcacaaattccatttctactatagaccttggaaacgcataccatggtgtttcctcagactacaacatctacgtagtggggatattaatgtccgttgccaatttcgcgccggcaatatactggtccatgctaccgtggtcaataaactacgcctctattccagcacaagttaagttgcaaacgttcatcagaagtaagttacctgccttcacctatcattgtatatttggaacttgtttgatgacggcatgcgtcgttttgagatttcatctctttatttggtccgttttcagtccaaaattatgttattttcttgggtggaattttgtgatgggattgctgaatggctggttacctgaattggccctcctttgcgctcttgattaacatagaattgttcacgtggtctaaatatgtatacatatatgatagtttatagattcatactgagacaagtgaaaaaaaaaaaat

SEQ ID NO: 1715 - DNA, 473 bp, Saccharomyces cerevisiae
tagacgacaaagtagtatggttttgaatccgtccaagtaccaagacacccgcacgtggaagatgacgcctgccatgatcagggcccgtaaaccctttttcaaaggcaatatgctcggtctcacgctgctgctgggtgtcacgggctctgtttactactacacatatcattttctgcacaaggacaacgactttgcagacgtgcccattccacccatcgatccgcaggagctcgaggctctcaaaaaggagtacgaagccaagaagaaggcatgaaaagaccgttaatgtggaggtacgctgtggtcttccatcaataggctttgcgctgttcttctctcctcttttgtaaatagtttacctacttgcgtatatgtatatatatatatatatagatatgcttatacggatatatacatacattctgtttgtttatactctttgtcctactctaacagccagctctttagtttaa

SEQ ID NO: 1716 - DNA, 3659 bp, Saccharomyces cerevisiae
cctgaaacagagagaagtcgattactgtacaccgtgcctccttctatgtacaagctacaagtggtcttggtgcctccgagtcttcaggcgacgatgccaatacagtttggctacggaccaaccatcgccgaatcttctcaattgttgccaaacagaactaatatggcgcaaagcgccggagatgcctctttgcagtatgctaatctgagatctgccaatgtgagtttcacgccaagctatttcaaccagtctaggtttaggaagtttcttttgtttaccaagccgacaaacacgctgttgaacttgagtgatgaaatcatcgataagtgtgaaaaaatgtacccgagtttgcaagaagacattgaaattttgagtttgcaagataacagcggttgtgaccttgatccggattttttggtaaaggacgttttcaatgtaaataatatcgtaagagttatattgaagaatgagatagatctggacgattccgcaccagtgtcactttataagtcggtaaaacgatccaagttgaacaacgggtcgccccagtcggtgcagccgcaacaacaaatcccgtcctcttcaggtgttcttcggattgccaagaagaggccacctacaggaaccacgacaacaacaaccattcgtagtgccactaatggatccatgagggtttctaccccattggctaggcaaatttatcctccaccttcttcgaagatcgtctccaacaactcagatgacgaagacgaagacattggtgaaagatcctttttgccgcctccaacgcagcctcagtcacctcccataagaattagttcgggcattgacgcaggtaaaaaaataaaatcaagcatcgtcgaggaagatatcgtgtccagatcagcaaccgtggatccagataaaacaaagcagcaacgtctattgtccggaactcctataatgtccaccatgactccaaacagagttactcttaccggtcagagagtggtttctgaacacgcacataaaaacgaattggttttctctgcttcagcttcttcctcttcatttgctaatggtggcacagctgctgtcactgctcaggacattaataggaaaccacccgtaaccactccaagaataacatcaggaatgttgaaaatccccgagccaagaatctcagagattgaaaaagagttaaaagagggaccttccagtccggcctccattttacccgctaaagctgcaaagattccaatgaaaaaaccttacttggaaaatggcgagaactacgaatccgacgatagctcaagtagcgaaaaccaagaaactcctgaaacagaaccacattcaaaggcttccttgcaacgtagtcaaagctccatcgcagataataatggctctccggtgaaaaatagtcctctcggtgatgccatgccacacaatgtgcatttagcagaacttcccaaggcaagcaatacctcgatcaccaaatcttcaaatggcgaatcctggggaaagcaacaagaacatcaaccaccaagaaagagttcactggaaactatagtggaaaagaaatctcaggcggaaccttccggtattgtggaaccgaaaagaatgactaatttcctagatgataatcaggtaagagaaaaagaagatacgaatgataaacttttagaaaaggaaattttgccgacaattccacataatgatcagccaatacttgcatcatctgataagtctaatgggacgttgaaatcactagctgggaaagttagttcaaacaacaacgcttcaaaggaagatggcactatcattaacggcaccattgaggacgatggcaatgataatgatgaagttgatactacggttcgtattgttcctcaagattcagattcctctagtttcccaaagtcagatcttttcaaaatgatcgaaggtgatgatacagatctaccgcaatggtttaagggcaaaaattcgagaacttccggtaattccaaaaattcaaagccttacacaacggttttgaataaagacatagacaattctaagccagatccaagaaatattttgccccagcgaaccccaagaagtgcggctaagagggctgcccaattattggcaggtgccaagaaaaacgaagtcccacagaaaagtactgaagattctagttcggcagcgtccacagacgatgagtcagagagtgggattgaaacagatttctcatcagacgatgattttaaaaggaaaaatatgtcggtgcctaataatgggcccaaagacatttctttacattctttgaaaggcagtgttgttccagtgaaagactcaaagataatcaataaagaagttgatgaagaaagaaacgacaaaagagatagtcaaaaaaagtcagccgtgagtgaatcttcagtaacaaatagcaaaataagtgaacaaatggcgaaaagcttttatccgaattcaaacaagaagcaaaatgaagctacaaaggtggaaactaagccagcaacacaagcatcgtcttttcctgttgttggtgggtctccttctgttgctactaaaggaactacctctttcaatgaagaaggaaatcgtaaaaatgttaaaacgaaggccaagaatgagtctgcgcagattgataggcagcagaaggaaacaacttctagggttgcagatttgaaaagcgcaaacataggaggtgaagacttgaacaagaaagcagaggggtccaaggaaccagaaaaagcatctgccaatatacaggatgctaacgataaaaataactcgaaggaaaaagaagactccaaaagcaaacaggtatctcagaaaaagttaaaaatgacagatcacttaaaagaaggcaatgttcagcttcctaagcccagtgcaaatgataaattgaaggatttgaaggctaaatttactaatagtaaaacactcgtgccacctggaataatttctaatgaaaaaaataattctagtgcaaacgatgatgattctagctcctcaggttcttccacagaagacgagtctagttcatcttcctcgtcttctgatgaggaaacttcaacatccaggaaggctagaagagttgttgtaaatacaccaagagaaccagttagatcttcatctaagattgaagccccctctccatctgttaacaaaaaaatcaatgccacccctgataaaattccagttacacagctaatggacatgtcgtctcctccgtcagttaaatccaagaccacctcaaatccgtctagtatacttcatgaccttccaagaaaagttcgtccttctttgagttcattatctgatcttgtttcaagaggcatcccagatgtaaaggaaaaaacttctaaatcgaatgagaagtcacaaacaaaagccccttcaagtagtgatgatgaatctagctctgattctgactctaactccagttcggactccgtatcggattccagttcagattctaaatctgagtcagattctgatgactcaggggattcatctgatgatggaaaaagttttattagtgcgaaatccgctagtgctgctttaggtaagaagaagaagccaagtggtggatttgcatcattaataaaagatttcaagaaaaaatgataccagaaagtctcagtagaatacacgtcacagaaagctagtaa

SEQ ID NO: 1717 - DNA, 584 bp, Saccharomyces cerevisiae
agacaatcttaagtgtgttgctctaattttcatgctacaactgaaattcatatggccagtggccagaatcacacctatttataggccatttaccagtcatccattcagaaatttagctacttcctcaagcatcagtagtacaaaagctaagactactaagacagatacaactccactaaaattatcaaatgaactatatgcaatattcaagattcataatcgtccatatttggtgaccgagggcgacagagttattcttccattcaaattgaagcaagcggaggtgggtgacattttaaacatgaccgatgtaacaactttaggatctagaaactacaagctagttggtcatccaatcaatacttctctgtatactttaaaagcaaccgttgttgggaaaactaaaagggctttccaaactagggaggtaacgaagagaagaaatagacgggtccgtcatgcaaagagtaaaggtgatttgacaatcttaagaatatcagaactgagtatgaactgaattttagggatatgtacatatacgcatacgtataaaatcatgtaaataacaataaaatttgacacac

SEQ ID NO: 1718 - DNA, 754 bp, Saccharomyces cerevisiae
atcatcacacaagaagaagcacaactccaagcaatttctacaatatgtcaaaaaaacttgcgtcaccattgtccttcttacccctttataatttgctttctgctgttggttggtcttatttgctttacttggtcatctccttgtacccaaaagttggacagccagcattcttctaccaaactaaaaatgtcgctacccttgttcaatgtggtgctataatcgagatcataaactcatttttaggagttgtacgttccccattgctgaccactgttgcacaagtgtcttcaagactactagttgtcctcggcatcttccaattgttgccaaacacaagtggtgttcaatcagttgtttacatatcattattactggcatggtctataactgagatcgtcagatacttgtattattttttcatgttggtattcaagaatggcgcaccaaagatcttaattctattaagatataatttgttctggattttgtaccccactggtgttgccagcgaactacgcattatttactgtgctttaaatgcagctgaatctcagtattctttactttacaaaagaattttaatagcggccatgctcgcttatatcccaggcttcccaatgctcttcctacacatggtagcacagagaaagaaagtcatgaaaagtttaagatcctctttcgggaagaaactaatttgaattctttagataaattcttctgtattttttataagaatattagccttcacattgaa

SEQ ID NO: 1719 - DNA, 649 bp, Saccharomyces cerevisiae
agaaaaacatagacttgttggatataaaatatggctcacagggctttcatacaggttataatcacaggaactcaagtttttggaaaagcattcgccgaggcgtatagacaagcggcttcacaatcagtgaaacaaggtgctacaaatgcatctagaaggggaacaggaaaaggcgaatatggtggtattacgttggatgagagttgtaaaattttaaatattgaagaatccaagggcgatttaaacatggacaagattaataacaggtttaactatctatttgaggttaacgataaagaaaaaggtggaagcttctacttacagagcaaagtttatcgagcagcagaaaggttaaaatgggaactggctcagagagaaaaaaatgcgaaggcgaaagcaggggacgcttcaacagcgaaacctcctccgaattcaacaaattcatctggtgcagataatagtgcaagcagcaatcagtagtcaaggaagcctccatcattacgtcacaagtgttatcgaaagcatgcagcagtgcatatattttcctagttggttgcttcctgtacgttaggaatcttcaaccaccatccttgtatttagttaatattagtatatgtaccaaagtaaatatactcagatgccatctcga

SEQ ID NO: 1720 - DNA, 1949 bp, Saccharomyces cerevisiae
taatatttaagtggcgactttttcatccttgctattgaaaaaaaaaaaaatgaataattgttattaagcgttagcagatgccaaattgtcgaaatgatttcaaatacagagaattagccgcaaatattaagtagtacctgaatcacgagacatacaactcggaaaaatgaactttggaagccaaacacctacaattgtggttctaaaagagggaacagacgcatctcaaggtaaaggtcaaatcatctctaatatcaatgcctgtgttgcagtccaagaggcattgaaaccaactttaggtcccttaggttctgatattttaattgtgacatcgaatcaaaagactactatttctaacgatggtgccacgatcctaaaattattagatgtagtacatcctgctgccaaaactttagtggatatttctagagctcaggatgccgaggtgggtgatggtacaactagtgtaaccattttagctggtgagttaatgaaagaagccaagccctttttggaagaaggcatttcatctcatttgattatgaagggctacagaaaggccgtttctttagctgtggagaagattaacgaattagctgtggatattacttcagagaaaagcagtggcagagaattacttgaacgctgtgctagaactgcaatgtcgtcgaaattgattcataataatgcagatttttttgttaaaatgtgtgttgacgccgtgctatcccttgatagaaacgatttggatgacaaattaataggtattaaaaaaattccaggtggtgctatggaagaatctcttttcatcaacggtgtcgcctttaagaagacattttcgtatgctggatttgaacagcaacccaaaaagttcaacaatcctaaaattttaagtttgaatgtagaactggagttgaaagcagagaaagacaatgctgaagtacgtgtagaacatgttgaagattaccaagctattgtagatgcggagtggcaattaatctttgaaaagctaagacaagtggaagaaacaggtgccaatattgtactatcaaagttacctatcggcgatttggctactcaattttttgctgatagaaatattttctgcgctggtagagtgagcgcagatgatatgaatcgtgtcatccaagctgttggaggctctatacaatctactacttcagatataaaaccagagcatttgggtacttgtgctttgtttgaggaaatgcaaatcgggtcagaacgctacaatttattccaaggttgcccacaagctaaaacatgtacattattattaagaggaggtgctgagcaagttattgccgaggttgagagatcattgcacgatgcaatcatgatagttaagagagcgttacaaaataaactgatcgttgctggtggtggtgctacagaaatggaagtatcaaaatgcttgagagattattcaaaaaccatagctggtaagcaacaaatgataatcaatgccttcgctaaggctttagaagttattccaaggcaactctgtgaaaatgctgggtttgatgctatagaaatattaaacaaactaagattggctcacagcaaaggtgagaaatggtatggtgttgtctttgaaacagaaaatattggcgataattttgccaaattcgtatgggaacctgctttagtaaaaatcaatgctttgaacagtgccacagaggctactaacttgattttatctgttgacgagacgatcactaataaaggtagtgaaagtgccaatgctggcatgatgcctccccaaggggctggaagagggagaggtatgccaatgtaattaacactctaaaaaacatgtgctgcatacattttattattactctttttgcagtagttatttgcatcaaaggtaatttctttcaatcataaataagttaatactgtattgataaaaccttattcttttc

SEQ ID NO: 1721 - DNA, 1094 bp, Saccharomyces cerevisiae
tttctctctcacacaaataaagcttttcatgtttatagatatatagcacatacttttactaagttttctagattgattacgactcttccagttgcacattttttcatagcgaaagtacaagagtaggaagagtggcacaatggcggttcaacaaagaaagaagaaagagggtagaaagtccgataaaaatgccccatcggtcccacaagtagatgcatcattagacaaaccacttgatattgatgctcctcctactatttacagtgttaatttgaaaccagaatatggtacagctgcattgaatttgtccgcggatttcatcagacaagaacaggcattggctaataagtatttgttcttccatcccgtcatccttgttgttctaaccattgggctgcttatttacttgacgccaagaattgtctttccgataaggaatacaggatccgttgctggatggttctaccagctggctcgtattaataagaaggtcgtcctcagcggtttagtgttcaccgcaattggtgcatctttcttgttcaccctcctctcacgtgtatctgactcgtatttcaagtcgaagatcaaccaacttgttggttctaaaggtgagaaagttttcggcatcaatttgaatgatttggtggcaagacatgaaacaaaggatccagtggtgaacaatacgcatatcatcgtttatagagaaacgcccattgcattgatttcgttagcccctaacatgacattaagtactgatgaaaatttagtcatgagtgttactactgtgggttgtcgtcgtgtatatgtaaaaagtggcattatcgaagatttgattgattgggctatgctacactccaaaaatattagaagcagcggcaaatacggggagaccatgaaactcttgattgatgtctactcattcgatagcacgcttaaggaaattttgaagaaaaaagggttcacttatattcaaagcattagagtctctgaaaatcgactactaggcggtttgttcggtgtgaagaaggaattatggggtttgcaattccattttaaagccgaacacaaggactaggatactgttatttttatag

SEQ ID NO: 1722 - DNA, 829 bp, Saccharomyces cerevisiae
atggcttcatgcttttcagtttcattattggcacgagtagcagtcgttgagcccatcagagtgcaactttggttaaatgtcgtaaattgtatgattgaatcatccatgcaccaatgtcctccacgggatcgccactttttttcttcatcacgccccattttgttgatccgacgttctgtatcaactgtatacagattcgttgcttctcgcaccacacaggttttacgtgcggccaagaccgttgtcaagtggttcattattgtcgacccactgataaattctattctaatcaattatctcattgataggctctgcactcttgggcatgctgtattgcgagtgaaaaagcgcaagaccgaggagagacaaccctgttctcccattatacaacacacacacgttaagagacgcaaacggcctcgtctgaggatcgtagccatcaagaggaagcggaggcgtcgaagaccacatcgcatcgagcgtccactctcaaatatgtacccaataatggaaatccagatggtggctgttccacttgctcttcccagtccaactgcactggtgcattatcagcagcagcaacagcagctcccgcaacatcatccctggtacgacctctcgctttctgaagaagccctctcgacctgctgttgtagttgacctataactgaaaattcacacccgcattacccagcgcgcccgcacgtgctctttatggaaactataatgaataacgaccaaagaacatctttttttctctctcacacaaataaagcttttcatgtttatagatatatagcacatacttttactaagttttctagattga

SEQ ID NO: 1723 - DNA, 714 bp, Saccharomyces cerevisiae
gccgaagagactagcacagccaacccataatgccttctaaaaactccatcaacagacctaagctgacttcaaatttgcaccacaaggtgcactctttaaataagaaaagagctcaaagagaaagagctggtctcttgaagccagctagatccagcgtaaattcgaaatctggggaaataaaatcagtagcgttggacctatacttccaaaacaagaagaacgaaagtcagaattccactgctgtgacattacaaaatgcttcatcttctccggcctccatcaccacgaggacactttccaaaaagagagctaagaaaatcgagagaaacttaaaatatgctacacagagaaaattattggttgacgcaagcgctaagctagaagacgaaatggatattgatctagatggcggtaagaaagtgaaagagaatgaaaagaagagttctttgactttggttaaggaagccttatggagtgtcattgacgatactgcatcccagggattgatcatcgaaaacggacaaggcaccaccctgggcggcccatttttcccatgagttaggcacttacgtatcttgtatagtaggaatggctcggtttatgtatattaggagatcaaaacgagaaaaaaataccatatcgtatagtatagagagtataaatataagaaatgccgcatatgtacaactaatctagcaaatctctagaacgcaa

SEQ ID NO: 1724 - DNA, 924 bp, Saccharomyces cerevisiae
atgactagtaaattaaaacgggttgctgtcgcacaattatgttcatccgctgacctgaccaaaaacttaaaagtggtaaaagaattgatatctgaagccattcaaaaaaaggcggatgtcgtttttctccctgaggcaagtgactatctttctcaaaaccctcttcattccaggtatttggcacagaaaagccccaaatttattcggcaattacagtcaagcattaccgaccttgtcagagataattcacggaatatagatgtttccattggggtacacttgccgccctcagaacaagatttacttgaaggcaatgatcgagtcagaaacgttctattatatatcgatcatgaagggaaaatattgcaagaataccaaaaactgcatttgtttgacgtagacgtgccaaatggaccgatattgaaagaatcaaaatctgtccagcctggcaaagccattcctgacattatagagtctccattgggaaaattgggcagtgccatttgttatgatattcgctttcccgaattttctttgaaattacgatcaatgggggctgaaatcttatgttttcccagtgcgttcactattaaaacaggggaagcacattgggagttactaggcagagcaagagcggttgacactcaatgctatgtgctcatgccagggcaggttggaatgcacgatctcagtgatccagagtgggagaaacaatcacatatgagcgctctcgaaaaaagctccaggagagaatcttggggacactcaatggtcattgatccttggggtaaaataatagcgcatgccgatccctctactgttggaccacaactaattctcgctgatttggatcgtgagcttttgcaagaaataaggaacaaaatgcccttatggaaccagagaagagacgatttatttcattga

SEQ ID NO: 1725 - DNA, 1248 bp, Saccharomyces cerevisiae
tgacaaaagtaattttgtcgttcatttcttcatcgattctttcctctttcaacaacttccttattttatcttgggatcgtaacttcacttaattaatcacgattcccatattcgttaacacctcttaaggtttgctgtaaatatatttatgttataaaaaaagaagatattatggtagaaaactcgtcgagtaataattcaacaaggccaattccagcaatacctatggatctacccgattatgaggcgctccccacccacgcgccattgtaccatcaacttatagcgggtgcatttgctggtataatggaacattcagtgatgttcccgatagatgcccttaagacgcgaatacaatcagccaacgcgaaatcgctgtctgccaagaatatgctttcgcaaatatctcacatctctacttccgaaggaactctagccctatggaagggtgttcagtctgtcatactaggtgcgggacctgcgcatgcagtgtattttggtacgtatgagttctgcaaaaaaaatcttatcgattcgagtgatacgcaaacgcaccatccttttaagacagctatcagtggtgcctgtgccaccacggcatctgacgcattaatgaacccattcgacacaataaaacagagaatccaactcaatacctcggcatcagtatggcaaaccacaaagcagatttaccaatctgaaggtttggcagcattttattattcttacccaaccaccctagtaatgaacatcccatttgcagcatttaatttcgtcatatatgaatcatccacaaaatttttaaacccatcaaatgagtacaaccccctcatacattgtctgtgtggcagtatcagcggatcgacatgtgcggcgatcacaacacctttagactgcataaagacagtactgcagataaggggcagtcaaacagtttcgttggaaattatgagaaaggcggatacttttagtaaagcagccagtgccatatatcaagtttatggctggaaagggttttggagaggttggaaaccaaggatagtggcaaacatgccggctactgctatatcatggacagcttatgaatgtgcaaaacatttcctaatgacgtattagttggttcttacatgtcatattattttccattcattttgcatctcagaagattatgtgtatattatcattttcctgttgtgactttatgtacatttatatatacaaatttaatttgataatcccaaagcttga

SEQ ID NO: 1726 - DNA, 1305 bp, Saccharomyces cerevisiae
atggtagatggactgaatacctcgaacattaggaaaagagccaggactctctctaaccccaatgactttcaagagcctaattacttgctggatcccggtaatcatccctcagatcattttcgaactcgaatgtccaaatttcggtttaatattagagagaagctgttagtgtttaccaacaatcaatcattcacattaagccgctggcaaaagaagtaccgttctgcgtttaatgatctctactttacttatacttccttaatgggatcgcataccttctatgttctgtgtttacctatgcccgtgtggtttggatattttgaaacaacaaaagatatggtttatatcttgggatattctatctacttgagtggtttttttaaagattactggtgcttgcccaggcctagagcacctccattacatcgaattacgttaagtgaatatacaacgaaggaatatggtgctccaagctcccatacagcaaatgcaacaggagtgagtctcttgtttctctacaacatctggaggatgcaagaatcttctgtcatggtccaactattgttgtcatgtgtggttttattttattatatgactttggttttcggtagaatatactgtgggatgcatggcatattagatttagtaagcggtgggctcattggaatagtgtgtttcattgttaggatgtatttcaagtacaggtttccgggtttacgcattgaggagcattggtggtttcctttgtttagtgtgggatggggtcttcttcttttgtttaaacatgttaagcccgtagacgaatgtccttgcttccaagatagtgttgcgttcatgggcgttgtgtcaggtattgaatgctgtgattggttgggcaaagtgtttggagtcaccctggtgtacaatttggaacctaactgtggctggcggttaaccttagccaggctgctggtgggcctaccgtgcgttgttatctggaagtacgtgatcagcaaaccgatgatctacacgttattgatcaaagttttccatctgaaggatgacagaaacgttgcggcaagaaaaagactggaggccacgcacaaagaaggtgcaagcaagtacgaatgtccattatatattggagagcccaagattgacattctaggtagatttattatctatgctggcgttccattcaccgttgtaatgtgcagccccgtcctattttccctcttaaatatagcataaaacaaaaggaacaaaaaaaaaaaaatagacaaaatgtagtgtaaatgtatccgtttctaaattaagtacttataa

SEQ ID NO: 1727 - DNA, 802 bp, Saccharomyces cerevisiae
ctgcatcttaataagttgagtttgagggcgaaagtacacaaatattcatccgtattgaaaatatatatataagaatatagaaaaatgaatgtttctacatcaacctttcaaacaagacggagaagattgaagaaagtggaggaagaagaaaatgcagctactctacaactgggccaggaattccagctgaaacagataaatcatcagggtgaagaggaggaattgattgccttgaacctaagtgaagccaggttagtaatcaaagaagctcttgtagaacgtaggagagcatttaaaagatcgcaaaaaaaacacaagaagaagcatttgaagcacgaaaacgccaatgatgaaactacggcagtagaggatgaagatgatgatctggatgaagatgacgtcaacgctgatgatgatgattttatgcattctgaaactagggagaaggagttggagtctatcgacgttctgttagaacagacaacgggaggaaataataaagatttgaaaaataccatgcagtatttaacaaatttctcccgatttagagaccaagaaaccgtcggggcagttatacagcttctgaaaagcactgggttacatccttttgaagtggcgcaactaggttctttggcctgtgacacagctgatgaagcaaagactttaattccaagcttaaacaataaaatatcagacgatgagttggaaaggatactaaaggaattgtcaaacctagaaacactctattaataactgtatgtatacgtgtgtgtaactagtaatgaattttcaccctgtggaa

SEQ ID NO: 1728 - DNA, 834 bp, Saccharomyces cerevisiae
ttcagaagaaagcgttaagaaaaatagagtacacgggagcgttatgtcagccgatcattcgagagatccatgtcctatagtcatactaaatgatttcggtggtgcttttgccatgggtgccattggtggtgttgtttggcatgggattaaaggttttagaaattcgccattaggtgagcgtggttcaggagctatgagcgccattaaagcgcgtgctcccgtactgggtggtaattttggtgtgtggggtggtttattttcgacttttgattgcgctgtgaaggccgttagaaagagagaggacccatggaatgctatcattgcagggtttttcactggtggcgctttagctgtaagaggtggttggaggcatacaaggaacagttcgatcacgtgtgcttgtttgttgggtgtgattgaaggtgtgggactaatgtttcaaagatatgctgcttggcaagccaaacctatggctcctcctttgcccgaagcaccttcctctcaacctctgcaagcttaggcatgtagacattatatgagccattttttcatcgttgttggaagtacccttattcggcatgttttttgttacataaatgacgtatcgcactagcctcctttacgtttttactttatttcagccttttatttcaagattaccaaccatttctctcaaccatgtacatattatatattgaaaaagtaccatacttcatctctgaagagaaaatatcaacaagccaaaagctagtgcagaaactttataatgttactttattaattgtaatgactatacgtataaggaaaattaagaaaaggcaaaattcatattta

SEQ ID NO: 1729 - DNA, 991 bp, Saccharomyces cerevisiae
atcccaatcgtaattaattcactaaattaacatccttaaaatgaaattcgacaatgacagtgagaagcaggttttcgataagcttaaaaaagcgattcctggtattatcaaggaaaaatgtgcaggatacgatgaattgtatggttacaagttgaatcctgaaggtcttacacaagaggaggttgataaatactatgacgaaaaaatcgccgatcgtctaacctacaaactttgcaaagcctatcaatttgaatatagcaccattgtacagaacctgatcgatattttgaattggaggagggaattcaacccattgagttgtgcctacaaggaagtccataatacagaattgcaaaacgttggtattttgacattcgatgcaaacggcgacgcaaataaaaaggctgtcacttggaacttatacggccaactggtcaaaaaaaaagaattgtttcaaaatgtggataagtttgtacgctacagaatcgggctcatggaaaagggtttgagcttattagatttcaccagctccgacaacaactatatgacccaagtccacgattataaaggcgtctccgtgtggcgaatggattctgacattaaaaactgtagcaagacggtcattggaatctttcaaaaatactatccagaactgttatatgcaaagtattttgttaatgtccccaccgttttcggctgggtttacgatttaatcaaaaagttcgttgacgaaaccaccagaaagaagttcgtggtattaaccgacggcagcaagttgggtcaatacttgaaggattgcccatatgaagggtatggcgggaaagataagaagaacaatctgaccaagcaaaatgtcacaaatgtccatccaacagaatacggcctttacattttacaaaaacaaatcatcgaggacgttgagtgatttgttggcatgatctaataatagtctcttatataaaccctataataatttcttatttttgcctta

SEQ ID NO: 1730 - DNA, 807 bp, Saccharomyces cerevisiae
tgagcagctaggattcaataaacgggattaacaaaaaattgatatgtccaagctttcgaaagattacgtatcagattcagactctgatgatgaagtgatatcaaacgagttcagcataccagatggtttcaagaaatgtaaacatttaaagaatttccctctcaacggtgataacaaaaaaaaagcgaaacagcaacaggtttggctgatcaaattcccatcaaatgtggacatctccaagttaaaatctctgcctgtagattttgaatcctctacaaccatgacaattgataaacacgattataaaatcatggacgatacagatattgagtcctcgttaacacaggataacctcagtaatatgactttattggttccttcggaaagtaaggaaagtcttaaaattgctagcactgccaaggataatgcaccattacagtttgacaaggtattttctgtcagcgaaaccgctaaaatcccagctattgattacagtaaggtaagagttccacgtaaagatgttccaaaagtagaaggcttgaagttggagcattttgctactggttatgatgccgaagatttccatgtggctgaggaagttaaagaaaataagaaagaaccaaagaagcgttcacatcacgacgatgaagaggagtctagtgaaaagaagaaaaagaagaaggagaagagggagaagagggagaagaaggataaaaaggataagaaaaagaaacatagagattgaatgcgtatgtgcgtataactgtgtgtaacataagataaaaatgtgcatttgtgtgtgtgtca

SEQ ID NO: 1731 - DNA, 1601 bp, Saccharomyces cerevisiae
tatcaataagaaactcatattccttttctaaccctagtacaataataataatataatgcaatacaaaaagactttggttgcctctgctttggccgctactacattggccgcctatgctccatctgagccttggtccactttgactccaacagccacttacagcggtggtgttaccgactacgcttccaccttcggtattgccgttcaaccaatctccactacatccagcgcatcatctgcagccaccacagcctcatctaaggccaagagagctgcttcccaaattggtgatggtcaagtccaagctgctaccactactgcttctgtctctaccaagagtaccgctgccgccgtttctcagatcggtgatggtcaaatccaagctactactaagactaccgctgctgctgtctctcaaattggtgatggtcaaattcaagctaccaccaagactacctctgctaagactaccgccgctgccgtttctcaaatcagtgatggtcaaatccaagctaccaccactactttagccccaaagagcaccgctgctgccgtttctcaaatcggtgatggtcaagttcaagctaccaccactactttagccccaaagagcaccgctgctgccgtttctcaaatcggtgatggtcaagttcaagctactactaagactaccgctgctgctgtctctcaaattggtgatggtcaagttcaagctaccaccaagactactgctgccgccgtttctcaaatcggtgatggtcaagttcaagctactaccaagactaccgctgctgctgtctctcaaatcggtgatggtcaagttcaagcaactaccaaaaccactgccgcagctgtttcccaaattactgacggtcaagttcaagccactacaaaaaccactcaagcagccagccaagtaagcgatggccaagtccaagctactactgctacttccgcttctgcagccgctacctccactgacccagtcgatgctgtctcctgtaagacttctggtaccttagaaatgaacttaaagggcggtatcttaactgacggtaagggtagaattggttctattgttgctaacagacaattccaatttgacggtccaccaccacaagctggtgccatctacgctgctggttggtctataactccagacggtaacttggctattggtgacaatgatgtcttctaccaatgtttgtccggtactttctacaacttgtacgacgaacacattggtagtcaatgtactccagtccacttggaagctatcgatttgatagactgttaagcagaaaactattagttcttttatcctgatgactttttctcatttgcattgattagaaaggaaaaaaagaagtgtccttttctactactactctagtcgcatccattcctttgcatttatcttttctgcggttggccaatccattcttccgagaatttggctagccatacttgatgttttcccattattggttcgtttggcaatgctaattttcttaattgccccttatatactcttccataaaatgttttttttataactaattttctgtatatcattatctaataatcttataaaatgttaa

SEQ ID NO: 1732 - DNA, 550 bp, Saccharomyces cerevisiae
gaacattgtttacttgagcaagtccgattaagagtaagttgtcgtacgttaaatacaaataatcaacaaaacactacacaaaaacttctacgataatgggtcctccaagcggtaaaacttacatgggatggtggggtcacatgggtggtccaaagcaaaaaggtataacctcatatgctgtgtctccatatgctcaaaagccattacaaggtattttccataacgctgtattcaatagttttagaagatttaagtctcaatttctatatgtattaatacctgcgggaatttattggtactggtggaagaacggtaacgagtataatgaatttctgtacagcaaagctggtagagaagagctggaaagagttaatgtttaatattgtttccatgcctctacattacatcgatcttttgatcttctaaaaacttacatatatattctgtttataaaacaagagcaaataacccccatatatttattcagtcagtctatttatttacttacagtatcagtaataataaatacttaagcattttttgttttgta

SEQ ID NO: 1733 - DNA, 1211 bp, Saccharomyces cerevisiae
caaccaacaggtattggactgacataggcacaataaactcaaaaatattacgtagaaatggcttcagaaaaagaaattaggagagagagattcttgaacgttttccctaaattagtagaggaattgaacgcatcgcttttggcttacggtatgcctaaggaagcatgtgactggtatgcccactcattgaactacaacactccaggcggtaagctaaatagaggtttgtccgttgtggacacgtatgctattctctccaacaagaccgttgaacaattggggcaagaagaatacgaaaaggttgccattctaggttggtgcattgagttgttgcaggcttacttcttggtcgccgatgatatgatggacaagtccattaccagaagaggccaaccatgttggtacaaggttcctgaagttggggaaattgccatcaatgacgcattcatgttagaggctgctatctacaagcttttgaaatctcacttcagaaacgaaaaatactacatagatatcaccgaattgttccatgaggtcaccttccaaaccgaattgggccaattgatggacttaatcactgcacctgaagacaaagtcgacttgagtaagttctccctaaagaagcactccttcatagttactttcaagactgcttactattctttctacttgcctgtcgcattggccatgtacgttgccggtatcacggatgaaaaggatttgaaacaagccagagatgtcttgattccattgggtgaatacttccaaattcaagatgactacttagactgcttcggtaccccagaacagatcggtaagatcggtacagatatccaagataacaaatgttcttgggtaatcaacaaggcattggaacttgcttccgcagaacaaagaaagactttagacgaaaattacggtaagaaggactcagtcgcagaagccaaatgcaaaaagattttcaatgacttgaaaattgaacagctataccacgaatatgaagagtctattgccaaggatttgaaggccaaaatttctcaggtcgatgagtctcgtggcttcaaagctgatgtcttaactgcgttcttgaacaaagtttacaagagaagcaaatagaactaacgctaatcgataaaacattagatttcaaactagataaggaccatgtataagaactatatacttccaatataatatagtataagctttaa

SEQ ID NO: 1734 - DNA, 1898 bp, Saccharomyces cerevisiae
ggaatcattcatctaacaattacattatgatcgccttaccagtagagaaggcccctagaaagtccctatggcaaaggcacagagcctttattagtggaatagttgcccttattatcatcggcaccttcttcctcacttcgggtctccacccagcaccacctcatgaggcaaagcgtccacaccatggaaaaggtcccatgcactcacccaaatgtgagaagattgaaccattaagtccatcattcaaacattccgtcgacacaattcttcatgaccctgcctttagaaacagctccattgagaaactgtccaatgctgttagaatccccactgtagtccaagacaaaaaccccaaccccgcagatgatccggatttctataagcatttttatgaactacacgactattttgagaagactttccctaatattcacaagcatttgaaattggagaaagtcaatgagctgggtcttctatacacatgggaaggttctgatcctgatctaaaaccattattgttaatggcccatcaagatgttgtacctgtaaacaacgaaactttatcatcctggaagttccctccattttctggtcactatgatccagaaacagattttgtttgggggcgtggttctaacgattgtaagaacttgttaattgccgagtttgaagctatcgaacaactgttgatagatggattcaagcccaacagaactattgttatgtcgcttggttttgatgaagaagcaagcggcaccctcggtgctgccagcttagcctcatttcttcacgaaagatatggtgatgatggtatttacagtatcattgacgagggtgaaggtatcatggaagtcgacaaggatgtctttgttgccactccaatcaacgctgaaaaaggctatgtcgacttcgaagtcagtattctaggccatggtggtcattcctctgtcccacctgatcataccacaatcggtatcgcttcagaactgattactgaatttgaagccaacccatttgactacgaatttgagtttgacaatccaatctatggattgttgacatgtgctgctgaacattctaaatctttaagtaaggatgtgaagaagacaattttgggcgcaccattctgtcctagaaggaaggacaagcttgttgagtacatttccaaccaatcacatttgcgcagcttaataagaacaacacaagctgttgatatcatcaatggtggtgttaaagctaatgctctgcccgaaactaccagattcttgatcaatcacagaattaatttacattcttctgtggctgaagtctttgaaagaaacatagaatatgcgaaaaagattgctgagaagtatggctatggtttatctaagaacggtgacgattacattatccctgaaaccgagttaggtcacattgacattactctcttgagagaattggaaccagcaccactttcgccaagttcaggccctgtttgggacattttggcaggtactattcaagatgtttttgaaaacggtgttctacaaaacaacgaagagttctatgtgactactggtttattctctggtaacaccgatactaaatactactggaatttgtccaagaacatttataggtttgttggctctatcattgatattgatttactgaagacattgcattcggttaatgaacacgtggatgtcccaggtcatttatctgccattgcctttgtttacgagtatatcgttaatgttaacgaatacgcttaagcgcaatcattgaatagtcaaagattttttttttttaattttttttttttaattttttttttttcatagacttttatttaaataaatcacgtctatatatgtatcagtatataacgtaaaaaaaaaaacaccgtcagttaa

SEQ ID NO: 1735 - DNA, 1118 bp, Saccharomyces cerevisiae
tagttccaagaagcgctaaaagtggcagttcacactttgttttgattactaggaatctactctttcgctttttacttccttctcagagaatcagcaactgtgacatattatagataatgcgtttacaaagaaattccatcatatgtgctttggtgtttttagtctcatttgtgctgggagatgtgaatattgtttcccccagctccaaggcaacattcagtccaagtggtggtactgtctctgttcccgttgaatggatggataatggggcatatccctcgttaagcaagatttcaactttcacgttcagtctttgtactggtcctaataacaacattgactgtgtggccgtacttgccagtaaaattactccaagtgagctaacacaagatgataaagtttactcttacacagctgagtttgcttcgaccttaactgggaacggtcaatattacattcaagtttttgcccaggtggacggtcaaggttacactatccattatacaccaagattccagttgacttccatgggcggtgttacggcttatacatatagtgccacaactgaacctactccccagacttctattcaaacaaccactacaaacaacgcccaagccactactattgacagtcgttcatttactgttccgtacaccaagcagactggtacgtcgcgtttcgctccaatgcaaatgcagccaaatactaaagtgaccgctaccacatggacaaggaaatttgccactagtgctgtgacatattactctacctttgggtcattgccagagcaagcaactacgataactcctggctggtcttatacgatatcatcgggagtaaactacgctactcctgcatctatgccttcagataatggtggttggtacaaaccatccaagagattgtctttgtctgcaaggaaaatcaacatgagaaaagtatgaaaaatagacggcttctactatcatcattacagtaagggttgaagtcaggaaaggttaaaaataaaataaatatcaaaaagtttttagcggaaggcgttaaggcagcaagtacacattcatttatctatctatacatgtataaacacaactacaatttttttagaaatggaa

SEQ ID NO: 1736 - DNA, 690 bp, Saccharomyces cerevisiae
ttggtgaatcaaaaaattaacgaaacgaacaaatttaaaatggcaagatacggtgctacttcaaccaacccagctaaatctgcgtcagctcgtggttcttatttgcgtgtttctttcaagaacaccagggaaactgctcaagccattaatggttgggaattgactaaggctcaaaaatacttggaccaagttttggaccaccaaagagccatcccattcagaagatttaactcctctattggtagaactgcccaaggtaaggaatttggtgtcaccaaggctagatggccagctaaatctgttaagttcgttcaaggtttgttgcaaaacgccgctgccaatgctgaagctaagggtctagatgctaccaagttgtacgtttctcacatccaagttaaccaagcaccaaagcaaagaagaagaacttacagagcccacggtagaatcaacaagtacgaatcttctccatctcacattgaattggttgttaccgaaaaggaagaagctgtcgccaaggctgctgaaaagaaggttgtcagattgacttctagacaaagaggtagaattgctgcccaaaaacgtatctctgcttaaatgcttttttaattttaaaatcttttaaagtgaatatttgatttatatactactatatactaatttgtttaggccaatacacagaatcaaaatcaa

SEQ ID NO: 1737 - DNA, 508 bp, Saccharomyces cerevisiae
agagctctttactaaattgaatcaataatacatacttacaaacatgtcacagatagcacaagaaatgacagtgagcttaagaaacgccaggacacaattggatatggtcaatcagcagctagcatatttggacagacaagaaaagcttgctgaattgacaaagaaagaactagagtcttatccaacggacaaagtatggagatcttgcggtaaatcgtttatcttacaggataaatccaaatacgttaatgatttatcacatgccgaaactgttcttctggatcaaagaaaaacattaaagataaagaagaactatttagaaactactgttgaaaaaacaatagacaatctaaaggcattgatgaagaattaaaagaaagcggcaatagcctttcctttcttagccggaaaacttactacgggaacaagttttttttattagtataatgtagatataaaagcttagagtttatataaatataataaaaggttagcactgctgttgcaa

SEQ ID NO: 1738 - DNA, 1410 bp, Saccharomyces cerevisiae
cgaagaaagccaattttcaacttggaatcatcctgccggtttgttgttggtgttagctgtgttaggactcgttaaaatggcaatcaaaccaagaacgaagggcaaaacgtactcctcaagatcggtgggttcgcagtggttcaacaggcttggtttcaagcagaacaagtacggaacttgtaaatttttgtcgataataacggcctttgtttttatcctctatttcttctccaatcgcttctatccaatttctcgttccgccggtgcatcatattctccatcccatgggctgtatattaacgaaattcctgcctccagccggttgatttatccacatgtagaacatgtgcctgtgttaaaacaaatgaccgttaggggcctgtatattacgaggctagaagtggatggcagtaaaagattaattttgaaaccagaagagaatgctttgacagatgaagaaaaaaagaagactactgatcaaattctattagtgaagcactcgttcttagaccatggtaaattagtgtatcggaagagcaatgatgcacctgaagtggtcgtagtaaccctgatagattttgaaaactacgaattagaaacaattattcaaattgttcaaaatagggttgattacgctcaaaagcaccaatatggtgtatacattcgttggatacaggagtttttgcctgttcttgaaaatcagaatttggctgaaagctacgaattcattaagccattggtgataagagccgccatgcatgctttcccaactgccaagtatattcattttgttgatcaagatgctttattgatgaatctcgatctttctttacaaaaatacctgttagatccaaagattatggatttggctctattaaagaacgtccctgttgtggcgaattcaaacatcaagacatacaatcattttgaatatagttcggcaaagattatcattccacatgatgcgggtggtaatattgatgcgtcctcatttgttattgccaatgacttttatggtaaagctctgatagactacttgaatgatccgttactgagaaatttcccatgggataataccggtgataagttgagtgctgctatcggtcatattttacagtggcatcctacattactgggtaagacggcaatcgtcataccaaaagttttggcaagtcagtacgatgcatccttggatcaagaaggtgagtctggaaacggtgcttctaatggcgatgtttaccattataatgaaggggacttggctgcctccttcaagggatgtagatcaagaggtacgtgtgctagtgaaataggtcacatgtaccagaaaatcaagaaatcttagatgtgtgtaatcttgcaatttagtttcaaacaagatccttgtatttatataaacaaagatataat

SEQ ID NO: 1739 - DNA, 476 bp, Saccharomyces cerevisiae
gtgcactggaaccttatcctaatatctcaatgaaactaccggtagcacagtacagtgcaccagatggtgtggaaaaaagttttgcaccaatacgcgatgaccctcgatacatgaccacagagggaaggacaactgggcccagtgaccatgtgctaaacgctggccaaatcgatagagacaaaccttcagaaccggaacgcacgaaagatggctcacaactgacatacttaggccagctgcgcacgcagctgacggggctacaggacgatattaacgagtttttgacaggaagaatggaattggcaaaaaataagaagaaagccggcgcagacgagaagcggatccaggaagagattaaccagctattagatggtggtgacggtgacgaagatgctgtttaggcaacgatatgtagcgctagagagtgtatatacaaacagaaaagagtctaatgataaatgacaaatatttcgtta

SEQ ID NO: 1740 - DNA, 1875 bp, Saccharomyces cerevisiae
actaatagttcaggttacaatgctgattaggttaaagaagagaaaaatcctgcaggtcatcgtgagcgcagtagtgctaattttatttttttgttctgtgcataatgatgtgtcttctagttggttatacggtaaaaagcttagattgccggttctaacaaggtcgaaccttaaaaacaatttttacacaacactggtacaagccatcgtggaaaacaagccggcagattcgtctccggacttgagtaagttgcatggggcggaagggtgtagctttgcaaataacgttgctgcacacgactctggacacgatagtgacttaagttacgagagcttgagtaaatgctataatttgaataaaacagtacaagaaagcctacgagaagtgcacagtaagtttacagacaccttatcagggaaactgaatttttccatcccacaaagagaggcacttttctcaggttctgagggcattgtcaccattggaggtggaaagtattctgtgctcgcgtatacgatgatcaaaaagttgagggacacgggtactacattgcctattgaagtcatcattccgcctcaggacgaaggcgaggatgatttttgtaagaactggttgccgaaattcaatggtaagtgcatttatttctcagatatcgttccttcaaagccattaagcgatttaaaactcacgcacttccagttgaaagtctttgggttgataatttccagtttcaagcgtattatcttcttggacgcagataactatgcggtgaaaaaccttgaccttgcttttaacactacatccttcaacgatactggcctgatattgtggcccgatttttggagacgtgtcacccctcccgccttttacaacattataggatctagcattaacatcggcaaaagagtccgttttgttagtgacgatatttcccccgtgtcacgttatgatccatttgttagtaactcaaacgattacactccaaaggagagacaggagcatttcctgaaacatgttcccttacatgatctggacggcacgatgccagacttgagctctgaatcaggccagatggtgattgataagattcgccatttcaacactctattactggcgctatactataatgtttatgggcctacctggtattataagatgatttctcaaggcactgccggtgaaggtgacaaagacactttcttcgctgctgcccatgccttgaatatgccatactatcaagtgaggactaactttgaatttgatggtttcttctatcaaaaagatgattacaagggtctcgccttgctccagcatgattttgaacaagattacaagcaataccaaaaggcgcagcagaaagttaaagccaacattgaggaattttccaaactggatccagattatactttggacaatggtttcttgaaaactttgatggttaatgatgacggttctgatttggatatcatgttcattcatgccagtttctacaaggcagatccatggactctttatcatgaaaacagatttatcggtccaaatggcgaacaagtacggggcttcaggaagccgcatcgctatggaatggattttgaattgtttttattcaatgatatgagggggtccttctgtaccactccgaaaagccaagttattaaattcaagtattttaccgataaagttaataccccagaatgggatgcaatgtgtgagtatttgaccaatcatgttaattatctggagagcacacacaaagaagctatgggggagaaaaactaatgaagtgattaacaataataatttaataataactcgccatccgaccttgtataatataatgtagcatatatgtgcacggatatatatacatctta

SEQ ID NO: 1741 - DNA, 540 bp, Saccharomyces cerevisiae
cccaataacaattaagaatggctaacgaccttgttcaagctcgcgataactctcaagtctttggtgttgccagaatctacgcctcctttaacgatacctttgtacatgttaccgatttatctggtaaggaaactatcgccagagttactggtggtatgaaagtcaaggccgacagagacgaatcatctccatacgctgctatgttggctgcccaagatgttgccgctaagtgtaaggaagtcggtatcactgccgttcacgttaagatcagagctactggtggtaccagaaccaagaccccaggaccaggtggtcaagccgctttgagagctttggccagatctggtttgaggattggccgtatcgaagacgttactccagtcccatcagactccaccagaaagaagggtggtagaagaggtagaagattatgatttcttttttttttactctattaacgcatggaaatacggctttaccttctcacataaatatagtttgtttaattaataaagccaatataaacatttgcatattcga

SEQ ID NO: 1742 - DNA, 1440 bp, Saccharomyces cerevisiae
tgtcggaaaggtgaaaaaaaaaaaatgcaaacaaataaattggcacggtgtgacatatgccttctataataatgaaggaactcgaagaaaaaggggaaaacgatgtttcaacagctgtcggcatccattaggcacaatgcacacataatttttttatgcataagttggtattttatttcatcgttggcatctcaggtaacgaagcaggtactaacggtttgcccattaccactttttttgggtgagtttcagttcatttatactgctgtgctagcatggtttacgtgttatattgcatatagtttcccaggattctatcgcatatttcctaatggtacttttccggaatattatatcgacgacagagaaactagccgtgcagctaggaaagaatcaaaactatcctccctcattataccgccctctaaaccaatcctgcaaacagttctacctttaggtcttttccaatttgtagggaaatattttgggcatacagctacctctttggtgcctgtttccacggttgcaagtataaaaacgctatcccccatgtttatccttttgctccaaaagattttgaaaatatccactttgaaaattactttaactcttatctttagtttatgcactttagttcttggagtttggattatagttcaagaagataatcgttcaccggcctcttccaatgagctgagagaattctctaaatacggcgtaatatgcgctatgatatcaatgttcatttttgtcttgcaaaatatatatggcaagaccgtgttcacgtacagatctcaaacagatgaatctcaaagtaattctggattctcacggcaagaatcacctttacccttatatgaaaagttggatgagaaacttgttgcgaaaaagaaacctaaatcatatgacaaattgactttaatgatttatatttcccttgttggattttgtttatcgtttggctggtttatcactctagaatttcctgtactatttaggtatttttttcaaattaacagctcttctacagtaataaaagcttttccagtctctttatttttactgaacgggacattccacttcattcaggcaatgattacatttcatttactgggtgaggtctcaactttaacatattcaatagcgaatctgatgaagcgctttgccattattgcggttagttgggtctttattggaagaagaattacttggctgcaagtgttcggtttggttctgaacacattagggttattcctttatgaaagatgcacatcacaatcgaaaataaaagcgaaaatacgtcctgagtagtttaacatgatagaatataaatgcaaataatatttattccctttaggaaatacgggtgttttgaatttacttatctgtaccatacataaaatttacatataataatagaatctttatcaacacataata

SEQ ID NO: 1743 - DNA, 2889 bp, Saccharomyces cerevisiae
cgttttttttttttttgtttttttttgcgctgcttctcgaagaatgaatggctcactgaaaaattttgattcatcgatataaagaacactgttcacttcgatgtcatccggccaataaagttgtttttaggataaacgagtaagtggtagctggtacaggatcatgagattttcacacttcttgaagtacaatgctgtcccagaatggcaaaaccattatatggactacagcgagctgaaaaatcttatttacacgctacaaacagatgaacttcaggttggtgataacgaagaaggatttggcgcaggaaagagctctaacattacagataggttcaaaaacaagttttcttttaaaaatgcgaaggaagatacgtcttccggtatgaacaaagatgcaggcatcgttgaggaaaccatcgagttgcgagagttgcctactgctcagacggtcgctgccaaaccttctcctttcagaagaatgaaggaaaagatattttacaaaagaaggtcgtcttccgcatcgtccgtctcctccacggccaacgaaaatctgcaattagacacttatgatacgtttgttggtgatttaacagctgaaaaacagaaagtagatgatttttataagaggacagaagcgaagttctacgacaaatttgacgcgctggtgaaggacctgaagaaaatcggagttatagaatacgatatcgacgatgatactctgtttaacgaaccgattgccagcacaaatgacgaagttcccccactagacttggatgatgacgaagacgacgacgaattttacgatgatcaatctaatattgaagataatactgctttgctgcatcattcgcagtataacattaagtctcagaaaaaatcgctgttgaagaagtcgatcgtaaacctatatatcgatctttgccagttgaagtcgttcatcgaattgaaccgcattgggtttgcaaaaattacaaagaaatcagacaaagttcttcacttgaatacaagaaccgaactgatcgaatcggagcagtttttcaaagacacatatgcattccaggcagaaacgatcgaattgctaaattccaaaatttcccagctagtcacattttatgcgcgcatcactgaccggcctcataatatctcgcatagcaagcaagagttgaaatcctacctgcatgaccacattgtttgggaaagaagtaacacttggaaagacatgttgggactgctatcgcaagctgacgagttgacaccaaaggaaacagaatataatgcaaataagctggtaggcaagttagatttggaatactacagatggccactacccagaccgataaacttaaaattcactagtataaacaacgttgcactaccgaaattatttttcaccaagaaagcatacaagatttactttattattctagtcactggactcttgttaggaataaagaccttcaacgacgctgctcagcaccgctgcatggcccttgtcgagtgtgtcgcctttttgtgggctagtgaggccatcccattacacattacagcattccttgtaccactacttgtagtccttttcaaagtcctaaaaacctccgacggggctataatgagtgctgcaagcgcttcatcagaaattttggccgccatgtggtcttctacaattatgattctgctggcaggttttactttgggtgaagtacttgcacaatataacatcgccaaagttcttgcctcgtggttgttggccttcgctggttgtaaacccagaaacgttcttttaatggcaatgtgtgtcgtgttcttcctatcaatgtggatttccaatgtcgcagcacctgttctaacatattcgttgttatctcccctattggatgccatggatgcagatagcccatttgcgcaagcattggtgttaggtgtagcgttggctgcaaatatcggtggtatgtcttcaccaatctcttcacctcaaaacatcatttccatgtcgtacttgaaaccctatggtattggctggggccaattctttgctgttgcattgccatctggtatcctggccatgcttttggtttggattttattgttcactactttcaagatgaataagaccaaattggaaaaatttaagcctattaagacgaaattcacagttaagcagtattatatcattactgtcactgtggccactattttgttgtggtgtgtggaaagccagattgaaggtgcttttgggtcatcaggtcaaattgcaatcattcccatcgttttgttttttggtaccggattactatcaacacaagatttaaatgcctttccgtggtcaatcgttattttggcaatgggaggtattgctttggggaaggccgtctcatcctcgggtttgctatcaaccattgcaaaagcattacaaaagaaaattgagaatgatggtgtttttgccattctatgtattttcggtatcctgatgttggttgtgggtactttcgtctcgcatacagtatccgctattatcatcattcccttggtgcaagaagttggtgacaagcttggcaaccccaaagctgctcctatccttgttttcggttgtgcattattgtcatcctgtggtatgggactagcttcttcggggttccccaatgtcactgccatctctaaagtagatagaaagggcgatcgctatttaagtgtcatgactttcttaacgagaggtgttccagcttctattttggctttcctatgtgtcattactctaggttatggtatcatggcatctgttgtcaagggtaacgcaacctctgcgtaagagatacgtctacgatagcatgtaacagcgtatatataatctatatgtattcgattaatccaacacttctgttgtgtagt

SEQ ID NO: 1744 - DNA, 881 bp, Saccharomyces cerevisiae
atgtctcgagttgcacagctcgactcgatagcgcttgataaagaattgtatggacagttttggtccgagttcaatgcagcattcaatacgagtgaacacaaagaggaatgggagttggcactgaacacagttgtgtttatgtgcgcgacgaggttcctgccacactatggctctagctgtacgtatggatccgcactcagtggcgtggtttttcagtgcaggaaacgcaccttgtatgtcgtcactgtcttggcagggtacgtgtggaagaagatcacacatattatttttaatgggccgcactgtgggaaccagatgatgtggctgaagctgtacaaatgggttaatttattgtatcacggctgtgatgtaaccaacttcctgaggtttctagcagcggaagggcccaatgcgagggcgtttttgtcgccgttataccgggcttttaatgtccattccacaaggttgattcgggatggttctgcaattgcctctgaattttattcgaactctgtattcgctgggttagaataccagaatagacaattgctatggaatgcactattagaactcttttccaatacactacttacgaaaagaggactcttgacctttgttaaaaaaccaccaaggtctcgttctacgactacttataagacagtttgcccccgttgcggcggttttccaaccaacccataccagatcgcttgttgtcgtgcgaactactgttacgtgtgcgttgtaaaggcgttggagtggtctatgtgcgatgcctgtggatcctctgggagactgaccgcctcaccagtgtactaaagggccccgttccctcgcttgtatctctatatatgtgtatactatattcatattcatgttgtcaa

SEQ ID NO: 1745 - DNA, 792 bp, Saccharomyces cerevisiae
ctaggtatttaacctgacctaatattaacaaaagtccaagtgacggcttctccatcaaacaagataaattaccaaacacaatggtcgaatctaagaatactgaattatcgcaaggaacatggctcaataagccaaaatctgtttttcaagaggcaggaaaagtcactctggaaacagatgaaaaaactgacttttggcgtgaaacattttacggatttacccgtgatagcggtcattttttgggagtagagacaggtagtgcttttactgcacaagtccgtgttcagggaagctacgagagtctttatgatcaggctggtatcatggttcgtatagatgatggacattggctcaaagctggcatagaaatttctgatggccacgcaatgctaagcagtgttttgacaaatggaaaatcagattggtcaactgctgtttatggcggaaatgctcgcgatttctggcttcgtgttactgttgaaaagggcgttttgaggattcaggtgtcctctgataaaaaaacatggccgttagtacgtttggctccatttccaacttctgaccattaccttgttggaccaatggcttgcacacctgagcgtggcggattgaaagttactttctcggaatggagtctcacagctcctttaggaaaagctttacatgatttgagttagttcacctatatatcaatatataaagaggggtttgcttttgttaagaacaaggcctgcacctcactaagatctgttgatttggcactatgctttttaaaattttgtttatactcaa

SEQ ID NO: 1746 - DNA, 1951 bp, Saccharomyces cerevisiae
caccggggagtcattacgtagacttacgtattctgtataactgattccgagacgcaaatgcctgagcaagaaccattgagtcccaatggccgtaagcgctctgaggttcactatatctcaatcccattgaacagaggttccgcattctcaccagatgattctgtatcacagtttcagtctgacgggttcatgacacgtaggcaatccatattggaccatcctgtgggctcatttaagggagttaattctttaagtcgatttgcgacttcgttgaggagagccaattcgtttcgtaatatcgagctaaatgcggataatgaaagatcctttttcaaagagagtaacgatgaaacctacgatccggatactttagcaccagctttggacggtagaagattatcagtaactttaaataatgctggtcgcccgcgcattactaatttggctaacaacgatagagttagtacagccagcatggctattcacgatgatgattatgggtccatccaaaattcaacaattggggattctgggtcaatattacgccctactgcctccttaacagaaatgatgagtggtggagcggggagaaggtttacaaataatgacatggattcaattgtagtgaagagagtggagggtgtagatggtaaggtagtaactcttcttgctggtcagtcgaccgctccacagaccatattcaactcaatcaatgtactgattggtattgggctcctggcgttacctcttggtttgaaatacgccggctgggttataggacttactatgcttgcaatcttcgccttagcgacattttgtactgctgaacttttgtctaggtgcctagatacagatccaactttgatatcttacgcggacttgggatatgcagcatttggtacaaaagggcgcgcactaatttctgctcttttcacacttgacctactgggtagtggggtgtccttggtgattctcttcggagattctttaaatgctctatttcctcaatactccaccacttttttcaaaatagtttcattttttatcgttacacccccggtttttataccattgagtgttctatctaatatctcgcttctgggaatcctttcaacaaccggaactgtgctagtcatttgctgctgcggactatacaagtcgtcttctccaggttcattagttaatccgatggaaacgagcatgtggccgatagatctaaagcatctctgtttatctataggtttattgagtgcctgctggggaggacatgcggtttttcccaacttaaagacagatatgaggcatccagataaatttaaagactgtttgaaaactacctataagataacatcggttacggacataggtactgcagttattggctttttgatgtttggaaatcttgttaaagatgaaattactaagaacgttttgctgacggagggatatccaaaattcgtttatggtctgatttcagcgcttatgactatcattcctatcgcaaagaccccattgaacgcaagacctatcgtttctgtattggacgttctgatgaatgtgcaacacatagatgaagcggccagcgccataaaaagaagagctgcgaaaggccttcaagtattcaataggatctttattaatgttgtcttcgttttgatagctattaatttccctgaatttgataagattatcgcatttctgggggccggtttgtgttttacaatttgcctaattttgccgtgttggttctatttaagattgtgcaagacaacaatcaaaccatgggagagagtggcttgtcacgtaaccatatgtattagtgtcgtgttgtccacattaggtgttggtgctgcaattatttcataatcgacgaggggcatacttactctacttaaattcatttacattagctctgtacttctgataatgaaaaaccattgcgtaatataca

SEQ ID NO: 1747 - DNA, 2160 bp, Saccharomyces cerevisiae
ccaaggaaagtcgtataatgtcagaactctttggagtattgaaatctaatgctggcagaattattttgaaggacccctccgccacttctaaagatgttaaagcatatatagattcagttatcaatacctgtaagaatgggagtattacaaagaaagcagaactggacgaaatcactgttgatggtttagacgccaatcaagtttggtggcaggtcaaactagttcttgatagtattgatggtgatctaattcaaggaattcaagaactcaaagatgttgtcacgccttctcacaatctctctgatggtagcaccctgaactcatcatccggggaagaaagtgaactagaggaggcagaaagtgtttttaaagaaaagcagatgctctctgctgatgtttctgagattgaggagcagagtaatgatagtctttccgagaacgatgaagaacctagtatggatgacgaaaaaaccagtgcagaggcagctagagaagaatttgcggaggaaaaaagaatttcttctgggcaagatgaaaggcattcttcacccgatccttatggtatcaatgataagtttttcgatctcgaaaagttcaatagggatactttagctgcagaagattctaacgaagcttctgaggggagtgaggatgaagatatagattattttcaagatatgccttcagatgacgaggaggaggaggctatttattatgaagacttttttgacaaacccacaaaagaacctgtgaagaagcactctgacgtaaaagatccaaaagaagatgaagaattggatgaagaagagcatgattctgccatggataaagtgaaattagacttatttgcggatgaggaagatgaaccgaatgctgagggagtgggagaagccagtgacaagaacttatctagtttcgaaaagcaacaaatagagattagaaaacagatagaacaattggaaaacgaagcggttgccgagaagaaatggtctttgaagggtgaagtaaaggcaaaggatcgtcccgaagatgcattgctcactgaggaacttgaattcgacagaactgcaaagcctgttcctgttataacaagtgaggtcacagaatcattagaagatatgattagacgaaggatacaggacagtaactttgacgaccttcaaagaagaaccctgttagacatcacacgtaagtctcaacggcctcaatttgaattgagtgatgttaaatcctcgaagtcgttagcagaaatatatgaggatgactacacacgcgctgaagatgaatctgcattaagtgaagagcttcaaaaggcacattccgaaatatcagaactttatgctaacttggtatataaattggatgtgctttcatcagtgcacttcgttcctaagccagcaagtacttctttggaaattagagttgaaacacccactatatcgatggaggatgctcaacctctctatatgtcgaatgcctcttctttggctcctcaagagatatacaatgtcggtaaagcagaaaaggacggagaaattcgcttgaagaatggtgttgcaatgtctaaggaagaattaaccagagaagataaaaacagattgcgcagggctttgaaaagaaaaagatcgaaagctaatttgccaaatgtaaacaaaagatctaaaaggaatgatgttgttgacactttgtcaaaagccaagaatattactgttatcaatcaaaagggtgaaaagaaagatgtttccggtaaaacgaagaagagcagatcagggccagatagcacaaatataaaactttgaacacgccgaagaagacttagtttgtatttaggtaaaaaattatttcttcataactctgttcacccagcattttttatggaatatcgaccttgtaatgtcattaaccccttaaaggaccacttaaagaaaatgaagtgcatcatgaaatattcatgacgagatgcggaacatatacactcataaataccagaagaatgtgctgaataattttttgttggtaattggctgtcatttaaagtatcgttgaaacaagaggtattggaagatagctaattttagtattatttatgacgttctttcctggataaatgtagatgtatatacgtaataaaatgttaattagtaagttatatgctttcca

SEQ ID NO: 1748 - DNA, 2441 bp, Saccharomyces cerevisiae
ggaatacagcaagaacattcacttcattaataggacgtatttcgcttatgtccgatcaaaaagtttttgccagatataaagcaaatgaaatcgtcacagatctgcaacattttggagtaaaaaagtttaaatcgaatataacaagaaggaaaaatgctctgagaaaaattatcgccaatttggttctaggaaactatggcgaaatgtccgttctgttttctgagctcttgaaattttggcaaattgaagatgatctagaagtgaaaagaatttgccatgagtatattagggtgatcggcgcattaaaacctcagcaggccagagaggctttgccatttataatggacgatttcaaaagcagagatgaaaagttacaaataatggcactaagaactctggtattagtcccggtgaaagagctatctgatcaggccttcgactgtatcatttcattggtaaatcacaagtctccacctgaacaagtgacgaggacagcaatttacgcactgttggatttagatgaaattgatcatgaaagggtattggggttatcaagcattctacatgacattgtaaaagcacagtcgagctctccagaagtcattgtagctgcattacatactttatattccattcacgaaaaaaacgctaacatggaacccttcaggattcccttggaactcgcttttgacatgctagagcttttacccgaattaaatgagtggaataaggctactgttttggaagttttgacgacttcggttgtgccgcagcattatttggatacccatgaaatgatcgaactagctttaccgtacctgcaacaagtaaacacatacgtagtgttgaactctttaaaattcatcatgtacttgttgaattatgttgacgtcatcaaagaaactctagccgaaaagctatctaactctgtaatagctttgttagataagccgcctgaattacaatttttagtattaagaaacgttattcttcttttattgagtagggagtcatctctactcaggctagacatttcgtattttttcatcgagtacaatgaccccatatacatcaaagacacgaaattagagtgtttatatcttttagctaacaaggaaacattaccaagaattctagaagagttggaacaatatgctacagatattgatattcaaatgtcaaggaaatcagtcagagccattggtaatctggctgttaagctagatgaagactctgtacacgattgtgtcgctgttctactagatttgttagaattcggtgttgattatgtcgtccaggagattatttcggttttcagaaatattttgaggaaatatcccaataattttaaagcaaacgtaacagaactagtcaaacacactgaagttgtacaggaacctgaatcaaaaaacgctatgatctggataataacgcaatattcggatgtaattccaaactacctggagttatttagagttttttcctcaaacatgtttagtgagacgctagaagtgcaattttccattctgaactcagcaataaaattcttcatcagaagtcctacaaaggaaactgaagaactttgtatggatttattaaaaggatgcatcgatcacgaaaataatcctgacttaagagataaaacactgatgtattggagattgctgtcattaacgaaaacgtctcgtatatcaaacgcgataacttttgaatctttaaaatcagtactggacggagagttgccactaatagaaatgaacacgaaattagatcccaccgttttggaggaattggagctaaacattggtacaatagtatcgatttacttaaaacctgtttctcatatctttagattgaataaaaccaaactgctaccacaaagtcctattttgaatccaaacaaagacctcttgccagttgtaggtaactcatttcctccaactggagctaatagggaccgtcaaaattcagaaagccagtcctcgacgaagtccagaaagactgctatgatggatgattatgataagcccgctgaaaaaattaatcagttgaaaggtaagcgtaaatctagttcaaacaacccctcaaaactatcacggaaaccctcaactttattaagaaaactctctatgaaacggcccttttcgtgactgcaaatgatactaattcctgtatttaaatatactcatatttaacgaacaattatgatgaatgaaaaaacctgatataatagacttaactaagcgatcataaaaaaattcaaaaagttattttataaaacaattcagatgttaaactaaagagttaatgtaatatatatacaatgaactgcgtcataaattcccatagttcagctcatgggacattatctacttataaagacgtggcttggcagcatttcatatataaggctactgaatgtaaatttttcttccattgtc

SEQ ID NO: 1749 - DNA, 1527 bp, Saccharomyces cerevisiae
gggcaatggacgcattgttaacaaagttcaacgaggatagaagtctccaagatgaaaacttgtcccaaccacgaacgagagtaagaattgttgacgacaatctttacaacaaatcgaatccattccaactatgctataaaaaacgtgactacggttctcagtactaccacatttatcaataccgtctaaagactttcagagaacgcgtcttaaaagaatgtgacaagagatgggatgcgggctttaccttgaatggccaattagttctaaaaaaggacaaagtgttagatattcagggaaaccaaccatgttggtgcgtaggatccatatattgcgagatgaaatataaaccaaacgtactggacgaagtgatcaatgatacatatggtgcaccagatttaactaaaagttatactgataaagagggtggttctgatgaaattatgctcgaagatgaaagtgggagagtgcttctagtgggagattttattcggtctacacccttcatcacgggtgttgttgtaggtatactgggtatggaagctgaagccgggacatttcaagttttagacatatgctaccccactcctttaccacaaaatcctttccctgcaccaattgctacctgccccaccaggggaaaaattgctcttgtttctgggttaaacctcaataatacatcacctgataggctattgagattggagattttgagagaatttttgatggggagaatcaataacaaaattgacgacatttctctaattggtagattactgatatgcggcaactctgttgacttcgacattaaaagcgtgaacaaagacgaattgatgatttctctaactgagttcagtaaatttctacacaacattttgccatctatatctgttgatattatgcccggaaccaatgatccaagtgacaaatctctaccgcaacagcctttccacaaatcattgtttgataagtccctagaatcatacttcaacggttctaacaaagaaattttgaatttagtgaccaacccatatgagtttagctataatggcgtagacgttctagccgtttcaggcaaaaatatcaatgatatttgtaaatacgtaataccatcaaatgataacggagaaagtgaaaacaaggtcgaggagggcgagagtaatgatttcaaagacgatatagagcatcgcctggaccttatggaatgtacaatgaaatggcaaaacatcgcgcccaccgcacctgataccttatggtgttatccgtacactgataaggatccatttgtattggataagtggccccacgtttacattgtggcaaaccagccatattttggaacaagagtagtggaaataggtggtaagaacataaagataatatctgtccctgaattcagttctactgggatgataatattactggatttggaaacgttagaagcagagacggtcaagattgacatttaaataaaacaaggaataatttccacatagatatgcaattaagttttatatgtaaaagtga

SEQ ID NO: 1750 - DNA, 1170 bp, Saccharomyces cerevisiae
gtgcaatctgtttactaatcagtttttgtcttcatatttttgtgtcttttctgctgcctcacgcaccttctataatacaccaaataatgtccacttctcattgcagattttatgaaaacaaatacccagaaattgacgatatcgtcatggttaacgtccagcagattgctgaaatgggtgcttatgttaaattgttagaatatgacaacattgaaggtatgattctactaagtgaattgtcccgtagacgtattaggtcaatccaaaaattaattcgtgttggtaaaaatgatgtcgccgttgttcttcgtgtcgacaaagaaaaaggttatattgatttgtccaaacgtcgtgtttcttctgaagatatcattaaatgtgaagaaaaataccaaaaatctaagactgttcattccattttaagatactgtgccgaaaaattccaaatccctttggaagaactatataagaccattgcttggccattaagtcgaaaatttggtcacgcttacgaagctttcaaactatccatcattgacgaaactgtttgggaaggtattgaaccgccatcaaaagatgttttagatgaattaaagaactatatctccaagagattaacaccacaagctgtaaagattagagccgatgttgaagtgtcttgttttagttacgaaggtatcgatgccattaaagacgcattaaaatcagctgaagacatgtccacagaacaaatgcaagttaaagttaaattagtcgccgccccattatatgttttgaccacccaagccttggataagcaaaaaggtattgaacaactggaaagcgctattgaaaaaattacagaggttattacaaaatacggcggtgtttgcaacattaccatgccaccaaaggctgtcactgctactgaagacgctgagttacaagctctattagaaagcaaagaattagataatagatctgactctgaagacgatgaggatgagtcagacgacgagtaatcattgccgcgcctaatttttctaggtgttttcaagtgtcatactgttttagaaaattttgtatagaacaaatacgtatatcctgccatatcatattctttgcaatatacaccttgtacatttggctattataaatattacaatccatttaatcataatcaaaatttaa

SEQ ID NO: 1751 - DNA, 1777 bp, Saccharomyces cerevisiae
ctctctgtcgtaacagttgtgatatcgtttcttaacaattgaaaaggaactaagaaagtataataataacaagaataaagtataattaacatgcctgctcctcacggtggtattctacaagacttgattgctagagatgcgttaaagaagaatgaattgttatctgaagcgcaatcttcggacattttagtatggaacttgactcctagacaactatgtgatattgaattgattctaaatggtgggttttctcctctgactgggtttttgaacgaaaacgattactcctctgttgttacagattcgagattagcagacggcacattgtggaccatccctattacattagatgttgatgaagcatttgctaaccaaattaaaccagacacaagaattgcccttttccaagatgatgaaattcctattgctatacttactgtccaggatgtttacaagccaaacaaaactatcgaagccgaaaaagtcttcagaggtgacccagaacatccagccattagctatttatttaacgttgccggtgattattacgtcggcggttctttagaagcgattcaattacctcaacattatgactatccaggtttgcgtaagacacctgcccaactaagacttgaattccaatcaagacaatgggaccgtgtcgtagctttccaaactcgtaatccaatgcatagagcccacagggagttgactgtgagagccgccagagaagctaatgctaaggtgctgatccatccagttgttggactaaccaaaccaggtgatatagaccatcacactcgtgttcgtgtctaccaggaaattattaagcgttatcctaatggtattgctttcttatccctgttgccattagcaatgagaatgagtggtgatagagaagccgtatggcatgctattattagaaagaattatggtgcctcccacttcattgttggtagagaccatgcgggcccaggtaagaactccaagggtgttgatttctacggtccatacgatgctcaagaattggtcgaatcctacaagcatgaactggacattgaagttgttccattcagaatggtcacttatttgccagacgaagaccgttatgctccaattgatcaaattgacaccacaaagacgagaaccttgaacatttcaggtacagagttgagacgccgtttaagagttggtggtgagattcctgaatggttctcatatcctgaagtggttaaaatcctaagagaatccaacccaccaagaccaaaacaaggtttttcaattgttttaggtaattcattaaccgtttctcgtgagcaattatccattgctttgttgtcaacattcttgcaattcggtggtggcaggtattacaagatctttgaacacaataataagacagagttactatctttgattcaagatttcattggttctggtagtggactaattattccaaatcaatgggaagatgacaaggactctgttgttggcaagcaaaacgtttacttattagatacctcaagctcagccgatattcagctagagtcagcggatgaacctatttcacatattgtacaaaaagttgtcctattcttggaagacaatggcttttttgtattttaatcgtcataaaatgctcccatctcaaaagtagggcaaaattcatgatcgaccgcgcaaaataaatagatttgcaaataagttttgtatgtacatttattaatatatataatatatcaaaagaaaaaaatcaaaaaaaaaaaaaaaaaaaaat

SEQ ID NO: 1752 - DNA, 1301 bp, Saccharomyces cerevisiae
atgactggcgaagaatggggcttgactgtactgtcattcttggtaagagtcggattttttctttttggcatttaccaggacgctaatttcaaagtgaggtacactgatatcgactattttgtgtttcatgatgctgctaaatatgtatacgaaggcaaatcaccttatgcaagggatacatatcgttacacaccgctactaagttggctgctagtgcctaatcattattttggatggtttcatttggggaaggtcatatttgttattttcgatttggttactgggctcattataatgaagcttttgaaccaggccatctccagaaaaagagctttaatattggaaagcatttggctattgaatccgatggttatcaccatcagtacaaggggaaacgctgaaagcgtgctttgctgtttgatcatgttcacgcttttttttctacaaaagagtagatacaccctagctggaatcttatatggtctttctatccatttcaaaatatatccaatcatatattgtatcccaatagcaatttttatatactacaataaaagaaaccagggtccacgaacacaacttacatcgctactcaatatcggtttgagtactctaacaactttgcttggatgtggttgggcaatgtacaagatatacggatacgagtttctggatcaggcatacttgtaccacttatacagaacggatcacagacacaatttttcagtgtggaacatgctattgtatttagattctgcaaataaggaaaatggtgagtccaatctctcaaggtacgcatttgtgcctcaattgctgcttgttttagtaactggatgtcttgaatggtggaatcccacattcgataacctattgagggttttatttgtgcagacgttcgcatttgtgacatataataaagtgtgcacatcgcaatattttgtttggtacctgatctttctaccattttacctctcaagaacgcacattggttggaagaaggggcttttaatggccacgctttgggtaggaacgcagggaatttggttaagccaaggttactatttggaattcgaaggcaagaatgtattctatcctggactatttattgcaagcgtgttatttttcgtcaccaatgtgtggctactgggtcaatttattactgatattaagataccgacgcaacccacagtttccaacaaaaagaacaactgactgacgtgaacttgcaccatgtacatcaattctataaatctactcatataatgaatgtgtaaatatgaaaaaaaaaatgcaaaagcgca

SEQ ID NO: 1753 - DNA, 736 bp, Saccharomyces cerevisiae
gttcaagagctaaactaaagaaaagcatattgcataaaatgttaagagaagtcatctattgtggaatttgctcctacccaccagagtactgcgagttttcaggaaaattaaagcgttgtaaagtttggttatctgaaaaccacgcagacctttatgcaaagctatacggtactgacgataatacgcaagaggtggaagccgtgaccaacaaactggctgaatccagtattggcgaagctagagaggaaaagttggaaaaggacttgctgaaaattcaaaaaaaacaggaaaacagggaacaaagagaattagctaagaagctgtcatcgaaagtgatcattaaaagagaagctaggaccaagagaaagtttatcgtcgctatctctgggctggaagttttcgacatcgacatgaaaaagctagccaagacatttgcgtctaggttcgccacagggtgctcagtctcgaaaaatgcagagaaaaaagaagaagttgtcattcaaggtgacgtgatggatgaagtggaaacttacatacattccttgctggaagaaaaaggcctaaaggacgtcaaagtggaaaccatcgatgctaagaagaagaaaaagcctgctgcagaaggagctgccaagtaagcaatccataaatatgtaatagcaccgttctgggagaaaaggactttttacttggtaaccaggcgtgtaggttagatagtcaaaccctatatcgttcttga

SEQ ID NO: 1754 - DNA, 1666 bp, Saccharomyces cerevisiae
atgacttcatctctagatgatatagaaccaacagcatataataatatggaagcggacgaggaatattgcagacgcaacgatatacatgacctttccagcgtggtcggtgatgctgtctcacaaggtgtgccagacatggatggtcaaacaacggattcttcgaaggaccctgagccaaattccgaggataagaaagcgtttcctccttcgagtggctcatttttttctcctaatctacagggtcaaaggaagaaagttcttttaaagtttgttttcacaaattgcttactggccataatttgctttacaatgtttgtgttgttctggggggctctttacgacaccagcaagtatctacacaaagttaagcttctggttgttatccaggaaccccctgtggtaattttggataataacagttccatggtagtgccctccatatcgtatgctttgcctacttttatcaataaaataccatgtgattgggatatttataacagtcctaccttccaggccaagttcgacgtaaatacgccacagcaagtcaatgacaaggttgtcgatttggtttacgacgaaaaatactggtttgccattaatatcaagccaaacgccacggagactctatttgaatcactaatcaacgataccgcaccactattcaattctacgctgtttaatcaggtggtatatgaaactggtagagacccgacaaacctaaaatcaacgattttaccggttgctcagaccattgaagagtactaccatacattctacacactaaattatctgccgccgttattgacaaacataacccaggtatatcgttatgcactaactaacaatgcaaggtatatcgctgcagcaggtaaatataactacgaatactatgaccacagaccattcacagaccgtattctactggcacccacacaaatcggtgttgtttactgtttactgctaacttttttccaatttctattgtacggcccattacacgtagaaatggcaaaagtgctaagaccagccaacggtttaatttaccgtatcgctatgtcatggttcacctttttctttgcgtctttgttcttctgcacaacaaccgccatctttcaagtcgattttaccaagtcctttggtagaggtggcttcgtcgtatattggatgtctacgtggctcttcatgcttgctgcgggaggagctaacgaaaatgcggttatgcttgttattacgttaggaccccagtatctcgggttctggatcctatcatttgtcattctcaatattgcaccttctttcttcccattagcgctaaacaataatgtttatagatatgggtacatgatgcccgttcacaacgtcatcgatatctacagggttattttttttgacgtgacaagacgcaagatgggtcggaattatggtattttagtcgcactcattgccttgaatacggcactgttaccatttgttggcaagtatgctagtagaaaactaaaacagaaggctttagtggcagcaaagcagagttaatttcgtagattataattaaggcgacttttcaaataaaaaaatactgatcgttgtttttttttaaataaatgtttatccattcaatggactataataaatatttatatatatatatatatgaaaagattgcgaa

SEQ ID NO: 1755 - DNA, 2443 bp, Saccharomyces cerevisiae
cggtgaatgttgatcttgcatactataaaattatttgacactaatgccaacaacttatgtgccaataaatcaaccaattggggatggtgaagatgtcattgacaccaatcgattcaccaatattccagaaacgcaaaattttgaccaatttgttacaattgataagattgctgaggaaaatagaccactgtctgtagactcggacagggagttccttaattcaaaatatcgacattaccgagaggttatatgggaccgtgcaaaaacatttatcacattaagctctacggccatagttattggatgtattgctggtttcctacaagtcttcacggaaactctggttaactggaaaacaggtcattgtcagaggaactggctacttaataaatccttctgttgtaacggcgtggttaatgaggttacctctacaagcaatttactactgaaaagacaagagtttgaatgcgaggcacaagggctttggattgcctggaagggacatgtgtccccttttataattttcatgcttttgtcagtcttatttgctctaattagtacactgttagtcaaatatgttgctcctatggctactggttcaggaatctcagagattaaggtatgggtatcaggttttgaatacaataaggaatttttgggtttcttaacattagtcattaaaagtgttgcccttcctttggctatttcttcgggattaagcgtaggtaaagaagggccctcagttcattatgcaacctgttgtgggtacttactcacaaaatggctactaagagatactttgacgtattcatcgcaatatgagtatatcacagcagctagtggagcaggtgttgcggttgcttttggtgctcctattggtggtgtcctttttggtttggaagagattgcttctgcgaataggtttaactcctctaccttatggaaatcctattatgtcgccctagtcgcaataactactttgaagtacattgatccatttaggaatggcagagttattttattcaatgtaacatatgatagagactggaaggtacaagagattccgatctttatagccttaggaatctttggtggtttatatggaaaatatattagtaagtggaacatcaactttattcactttcgcaaaatgtacctgtcctcatggccagttcaagaagtgctttttttggcgacgcttactgctttgatttcttacttcaatgagttcttgaaattagacatgacagaaagtatgggtatattgtttcatgaatgtgtcaagaacgataacacctcaacttttagtcataggttatgtcagttggatgaaaatacgcacgcttttgagttcttaaaaatttttacttccctatgctttgccactgttatcagggccttgttggtggtggtatcatatggcgccagagttcctgccggaatctttgttccttcaatggcggttggggccacatttggacgggcagtaagtctactggtagagagatttataagtggcccttctgttattactcctggtgcctacgccttcctgggagcagccgctaccttgagcgggataactaacttgactttaactgtggtggtaataatgttcgagctaacaggcgccttcatgtatatcataccccttatgattgtagtggcaataacaaggataattttaagcacgtctggtatttctggcggtattgctgatcaaatgatcatggttaatggattcccatatttggaagacgagcaagacgaggaagaggaggaaaccttagaaaaatacactgcagagcagctcatgtcctccaaattaattactattaatgaaaccatttacctttccgagcttgaatctttgttgtacgactcagcgtctgaatattctgtgcatggttttccaataactaaggatgaggataagtttgagaaggaaaaaagatgtattggctatgttttaaaaaggcacttagccagtaaaatcatgatgcaaagcgtaaatagcaccaaagctcaaacgacactggtatacttcaataagtctaacgaagagttgggacatcgtgaaaactgcatcggatttaaggatattatgaatgaatctccaatctcggtgaagaaggcggtgccagtaacattgttattccgtatgtttaaagagctaggttgtaagactatcatcgtagaggaaagtggaattttaaaggggttggtcactgctaaagatattttgaggttcaaaagaattaagtatcgagaagttcacggtgcgaaatttacatataatgaagcacttgatagaagatgttggtcagttatccatttcataatcaaaaggtttaccactaatcgaaatggtaacgttatatgattagacatttatgtaatttttaaggcgctagtatagattattcaaaattatatgatacag

SEQ ID NO: 1756 - DNA, 2391 bp, Saccharomyces cerevisiae
agttgtatagaaaacattgaacttacggtcttgagttgagtcaataagcgtgagccagaacgcaattatcagatatgacaatcgatgattcaaatcgattacttatggacgtcgatcaatttgattttttggacgacggaacggcgcaacttagtaataacaagaccgatgaagaagaacaactatataaaagggacccagtcagcggggctatcctggtccctatgactgtaaatgatcaaccgattgaaaaaaatggcgacaagatgcctttaaagttcaagctggggccactttcttaccaaaatatggcattcataactgcaaaagataaatataagctttatcctgttagaattcctagattagataccagcaaagagttttctgcatacgtatcaggtttatttgaaatttaccgtgatttaggtgatgacagagtgtttaatgtaccaacgattggagttgttaattctaatttcgcgaaggagcataatgcaacagtaaatctggccatggaggcgattctgaatgaattggaagtgtttattggtagagtcaaggatcaggatggaagagtgaaccgattttatgagttggaagaatctttaaccgttttaaactgtctgaggacaatgtacttcatattagatggtcaggatgtagaggagaacagatcagagtttattgagtcattgctaaactggattaatagatcagacggtgaaccagatgaagaatatattgaacaagtgttttcagtgaaggattctacagcaggtaaaaaagtgttcgaaacacaatatttctggaagcttttgaatcagcttgttttaagaggcctgctctcccaagctataggttgcattgaaagatcagatcttttaccatatttgagtgatacatgtgccgtttcatttgatgcagtaagtgactccatcgaactcctgaaacaatatccaaaagattcgtccagtacatttagagaatggaaaaatttggtgctaaaattaagtcaagcctttggtagttctgctactgatatttccggtgaattacgggattacattgaagatttcttgttagtaattggtggaaatcaacgaaaaattctgcagtattcaaggacgtggtatgagtccttttgtgggtttttattatactatatcccctcattagaactatcagcagaatatttacaaatgtcactggaagctaacgtcgtagacataacaaatgattgggaacaaccatgcgtcgacatcattagtggtaagatacactcaattttaccggtaatggaatctttagatagttgcacagcagcatttaccgctatgatttgtgaagcaaaaggtttgatagagaatatttttgagggtgaaaaaaatagcgatgattatagtaatgaagacaacgaaatgcttgaagatctattctcttataggaatggtatggcatcttatatgctaaatagcttcgcttttgagttgtgttcactgggtgataaggaactatggcccgttgccattggattgatagccttatctgcaacagggacgagaagtgcaaagaaaatggtgattgcagaattacttccacactacccatttgttacgaatgatgacattgaatggatgctaagtatatgtgtagaatggagactaccagaaatagcgaaggaaatatacaccacgttgggtaatcaaatgttatcggcacacaacataattgaaagtatcgcaaattttagtagggcgggcaaatatgaactggtaaagtcatattcgtggctattatttgaagcttcgtgcatggagggccagaagttggacgaccctgtgttgaatgccattgtgagcaaaaactctcctgcagaggatgacgttataataccacaagacattttagattgtgtagtgacgaattctatgcgtcaaactttagcgccatatgctgttctgtcacaattctatgagctgagggacagagaagattggggccaagcgctgcgcctattgcttttgctgattgaattcccttatttaccaaaacattacttggttttgcttgtggcgaaattcctgtacccaattttccttttagatgataagaagctaatggatgaagattcagtggcgacagtcattgaagttatagaaactaaatgggatgacgctgatgaaaaaagttcaaacttatatgaaaccattattgaagcagataaaagcttacctagtagcatggcaacacttttgaaaaatttaagaaagaaactaaatttcaaattatgtcaagcgttcatgtaaatcagtatagtaatgtccttcggatggtatattaggatatatgacgaaaataagtaaatttaaacaacaatatatatttata

SEQ ID NO: 1757 - DNA, 1894 bp, Saccharomyces cerevisiae
acgtagcgtcgtgatttatgagtggcacagctaatagtaggaggaaggaggttttgcgcgtgcctgtgatagatttgaatagagtttcagatgaagagcagctgttgccggtggtgagggcaattttgctacagcatgacacctttctgttaaaaaattatgctaacaaggctgttctagatgcactactagcggggctcacgacaaaggacctgcctgacacgagtcaaggttttgatgcgaactttacgggtacattaccgctagaagatgatgtttggctggagcagtacatatttgacactgatcctcaattacgcttcgatcggaagtgcaggaatgagtcactgtgctccatatatagtaggctgttcaaactgggtctgtttttcgcccaactgtgtgtgaaaagtgtggtttctagcgcagaattgcaagactgtatcagcacctctcattatgcgactaagctgacccgttatttcaatgataatggtagtacacacgatggtgcagatgcaggtgctaccgtgctgcccactggcgacgatttccagtacctgtttgaaagggactatgttacttttcttccgacgggcgtgttgaccatcttcccctgtgccaaggctataaggtacaagccatcgactatggcgacgacggacaattcttgggtgagtattgatgaacccgattgtcttctgttccacacggggaccctccttgcgcgctggtctcaaggtatgcacactacctcaccactccagatagatcctcgtgcgaacattgtttcgttgaccatctggcctccacttactacgccaatctcgagtaaaggagagggtacgattgccaatcatttgttggagcaacaaattaaggctttcccaaaagtcgctcagcaatactacccacgggagcttagtattctaagactccaagacgcaatgaagtttgttaaggagttgtttactgtttgcgagactgtattgtctttaaacgctctttccagatccacgggcgtcccaccagagctgcacgttttgttaccccagatatccagcatgatgaaaaggaaaatagtgcaggatgatattttgaagttattgaccatttggtctgatgcatacgtagtggaactgaactctagaggggagctgaccatgaatctacccaaaagagacaatctaacaacgttgaccaataagtctaggactttggcattcgtggaaagggcagagtcgtggtaccaacaagtgatagcttccaaggatgagattatgactgatgtacccgctttcaaaataaataaaagaaggtccagctctaattctaaaacagtcttgagcagtaaagtgcaaacgaagagctctaatgctaatgccttgaataactcaagatatttggcgaatagtaaggaaaatttcatgtacaaagagaagatgcctgattcgcaagcaaaccttatggacagactgcgtgaaagagagagacgttcggccgcattgctttctcaaaggcaaaaacgttaccagcagtttctagcgatgaaaatgactcaggtatttgatattcttttttcgctgaccaggggccagccttatacagagacatatctaagctcgctaatcgtagatagtttacaagatagtaataatcctatcggtacaaaagaagcaagtgaaattttagctgggctacaaggtatcctaccaatggacatatctgttcatcaagtggatggtgggttaaaagtttatagatggaacagtttggataaaaacagattttctaagctgttgcaaatccacaaatcaaaacaacaagattgaagaatatttttagatataaggtagaatacgtacatttacggtaaaaaaaaaaaaaaaagaaa

SEQ ID NO: 1758 - DNA, 1272 bp, Saccharomyces cerevisiae
tactatacttctatagacacacaaacacaaatacacacactaaattaataatgactgaattcaaggccggttctgctaagaaaggtgctacacttttcaagactagatgtctacaatgccacaccgtggaaaagggtggcccacataaggttggtccaaacttgcatggtatctttggcagacactctggtcaagctgaagggtattcgtacacagatgccaatatcaagaaaaacgtgttgtgggacgaaaataacatgtcagagtacttgactaacccaaagaaatatattcctggtaccaagatggcctttggtgggttgaagaaggaaaaagacagaaacgacttaattacctacttgaaaaaagcctgtgagtaaacaggccccttttcctttgtcgatatcatgtaattagttatgtcacgcttacattcacgccctcctcccacatccgctctaaccgaaaaggaaggagttagacaacctgaagtctaggtccctatttattttttttaatagttatgttagtattaagaacgttatttatatttcaaatttttcttttttttctgtacaaacgcgtgtacgcatgtaacattatactgaaaaccttgcttgagaaggttttgggacgctcgaaggctttaatttgcaagcttcgcagtttacactctcatcgtcgctctcatcatcgcttccgttgttgttttccttagtagcgtctgcttccagagagtatttatctcttattacctctaaaggttctgcttgatttctgactttgttcgcctcatgtgcatatttttcttggttcttttgggacaaaatatgcgtaaaggacttttgttgttccctcacattccagtttagttgtcgactgatactgttaataaactcatcgggcgaggcttccacggttggaaaagcatatgggctggcgcatatggttataaaatcacctttttgcaattcaattctatctttcccatcaaaagccgcccatgctggagcccttgacttcatcgagactttcacttttaaatttatactttctggtaagatgatgggtctgaaactcaatgcatgtggacaaatgggtgttaaagcgattgcattgacggttgggcataccaatgacccacctgcactcaaagaataggccgtggacccagtcggagtagcagcaatcagtccgtccgcctgcgcaacggtcattaatgagccgtcaccatacaattctaacatggatagaaaaggacttggaccacga

SEQ ID NO: 1759 - DNA, 1578 bp, Saccharomyces cerevisiae
atgattagatctgtgagaagggttttcatttacgtctcaatattcgtattgataatagttttgaaaagaacattaagtggcacagatcaaacgtcaatgaaacaaccagtggtggtcattggctctggtttggcaggcttaaccacaagtaatcgtctcattagtaaatacagaattcctgttgtgcttttggataaggcggcttctattggtgggaattctataaaggcttctagtggtattaatggtgctcacacagacactcaacaaaatttaaaggtaatggacactcccgaattgtttttgaaagatactttgcattcggctaaaggcagaggggttccatcactgatggataagttgactaaggaatccaagagtgctatcaggtggttgcaaacagaattcgatttgaaattagacctccttgcgcaattgggcggtcactctgttccaaggacccatagatcttctggcaaattaccaccaggttttgaaatcgtgcaagcgttatcaaaaaaactaaaggatatctcttccaaagattccaatctcgtgcagattatgctaaacagtgaagtagtggatatcgagcttgataatcaaggtcatgttactggtgtagtatatatggacgagaacggaaaccgtaaaatcatgaagtcacaccatgtcgtgttttgctcaggtggatttggttactctaaggaaatgttgaaagagtactcaccaaatttgattcacttgccaactactaatggcaaacagactacaggtgatggtcaaaaaatcctttcaaagttgggtgccgaattgattgatatggatcaagtgcaggtacaccctaccggcttcattgatccaaatgaccgtgaaaataactggaagtttttggctgcagaggcattgaggggtttaggcggcatcttattgcatcccaccactggaagaaggtttacaaatgaattgagcaccagagatacagtaaccatggaaatacagtctaaatgtccgaaaaatgataatagagcacttttggtaatgagcgacaaagtctacgagaactatacgaataacataaacttttatatgtccaaaaacttaatcaaaaaagtgtcaatcaacgatctgatccgacaatatgacctacaaactacagcttctgaactggtaactgaactgaagagctattccgatgttaatactaaggatacgtttgataggccattgattatcaatgcctttgataaagatatttcgactgaatcaactgtttatgttggggaagttacaccagttgttcatttcacaatgggtggtgtgaaaattaatgagaaatctcaggtaattaagaaaaattcggaaagcgttctatctaatgggatatttgctgctggtgaagtttcgggtggtgttcatggagccaacagattgggtggatctagtttgttagagtgtgttgtctttggaaagacagctgcggataacatagcaaaattgtactgagaatttatagggaaataaaagatatttttgcaacgtactttacatttcaataattaatgcgacatgatagga

SEQ ID NO: 1760 - DNA, 741 bp, Saccharomyces cerevisiae
agaaagatcaccattttgaatgatgggtcgtggcaaattaatactgatagaaggattggataggactggtaaaaccacgcaatgtaatattctttacaaaaaattgcaaccaaactgtaaactattgaagttccccgaaaggtctacccgaatcggaggactcataaacgaatatttgacggatgatagtttccaattatcagatcaggcaattcacctcttgttttcggcaaatagatgggaaatagttgacaagataaagaaagatttactagaaggcaagaacattgtcatggacagatatgtttattctggagtggcatattctgccgctaaggggacaaatggaatggatttggattggtgcttgcaacccgatgtagggttgctgaaaccggatttgacattatttttaagcactcaagatgtcgacaataacgccgaaaaatctggatttggtgacgaaagatacgaaactgttaagtttcaagaaaaagtgaagcaaacttttatgaagctattggataaagagataaggaaaggcgatgagtcaatcacgattgtagacgttactaataagggcattcaggaagttgaagcgcttatttggcaaatcgttgagcctgttttgagtacgcatattgatcatgataaattttcgttcttctaggaggatctgtacatatatcctagtctagtctatctaaaatacttagtctttctaacagcatatcctttgaa

SEQ ID NO: 1761 - DNA, 2643 bp, Saccharomyces cerevisiae
ggaaagtaaagttgtgtaagccgtagcagttttttacaggttaaccgattgaataagataatggcgggaaacggtaaggacaaagaggtagataaaagtccctctgttagtactttgaaactattgggaaaacgcctgtttaattccagcagtcacacggataactcttcgttactgcttagtgccgaacaattgggcaatgggagaagtttaagaaaaaggccaacgtctccgtccattagtggcagtggtagcggtggtaattcaccttcgtcttctgctggggcacggcagagatctgcttctttacatagaagaaaaaacaatgcttctgtaggattttcaaatgggtctgtgtcgtcacacaagtcctctgtcgcattgcaggacttaattaaacataataataacccttacttgaactctccctctgatattctgggcacaggtactggcattgcctcgacaagagatagggatagagcagttttggatagagaaaaggaaaaagaaagggcgagaaacaaagaaagaaatactcatcacgcgggcttaccgcaaaggtctaatagcatggctagtcaccattttcccaacgagaatatagtttataatccatacggcataagcccaaaccatgctaggccagatactgcatttgcagacactctgaatacgaataaggagaacgatttgagtttttacatgcatgatggtaacagcaagatacggatgttgccccttccaattgctaatccgaacgattttttgcccgaagatatgaaacaatatagtgtccatttaacggataatttcgtatttgatacggacaataaacctattggttcgggtgggtctagtgaagttagaaaggttaaatcaagttacaggcaaaaggatgtttacgctctaaaaaaactgaatatgatataccacgagtcacccgagaagttttacaagagatgctccaaagaattcatcatagctaagcatttaagtcataacgttcacatcacgaatactttttatcttctaaaagttcccacgaccacatatacaactcgtggttgggggtttattatggaactaggtgttaaggacctcttccaactgatggaaagaacaggctggaagaacgttcccttcaatgaaaaatattgtcttttcaaacaagtggcccaaggtattaagttttgtcatgacaatggtattgctcaccgtgatttgaagcccgaaaatgttttaatttctaaagaaggtatatgcaaattgacggatttcggtatttctgattggtaccatgtgatacctcatgactacactagtccagtgaaaacatgccaaggtatgattggctctccaccatacactccgccagaggtaatgtacttcgatgccaagaagcactaccccgaaaagttccaaaaaccctataatccgttggccatggattcctatgccctcggaatcatgctgattaccatgattaacaatatcatccccttcatcgattcttgtaacactgatgcgagattcagggaatttgaagtgtcatatgacaacttcatcaatcatcaaaacccacatttcagggacaagggctgccacaagccgggtcctggttccgaatactctttagcaagaaatttcaagaatactgatgccacgcgtatcgcatggagattggctgacccgaaccctgcaactagatatacaatggatgatttatttaatgatccgtttttccaacaaattgaaacatgtgtcgagccaaatgatgatgacttagtaagggttcctgaattaaggaaaagtacttctaccaatgattttagtgaaaattcattagatgcaccccatgatcaagaggtcattcacacgtctaatccattcctaaaaaaggaaacgctcacttctaaaccaagatcgatgttggaaattgcagaatctccttccttgaaacaaaaatccaaggtaaaagatagcgcaaagaccaaaacacacgatgttggggatgaaggggggaatgaaagcaccaaacctaagcagcaagataaaaaggaaaatttgaagaaagatgaggtcaagaacggcgacaaggacaaagtcattgaagaggctaccacgactaatgtggacagcatattggaaaaaccaacaccaacctccacaaaagtagaggacaacttaagcgaagatgattccacaatgaaggaattaaagtcgatgctaaactccacccctactacaccaacacataatggccccactccgctccctgcaaaggctggcactcaattagataagcgtatgagcgacctatcactcaaatcggaaacaccggcttctacaaagaactttagcgcaccgaatgtttcgtcatcaagcaattcactgagaagcctcggaagtccaagcgtgtcatcctcgaaaaagaagaaggtaattcaccaccacttggacattaccaacagcgttacaaacatgtcatccgtgagcgcctttatctcaagatagacgttaggacttctttaattccctcttttatgctttagtatcgtcatattctttcatacccttccttataagctttttatataaaatatcccaccgggaaaagataaagaacggaagataaatcaa

SEQ ID NO: 1762 - DNA, 1769 bp, Saccharomyces cerevisiae
tataccttaaagataaacactttgttaattaatcattttagttggcggtcattttcatttctgctacaagtaccaacatcaagtgcttaaaatataatacggttttctacacttttattaacgatgaactctctggcaaataataataagctttctactgaggatgaggaaatccattcggcaagaaaaagaggctataacgaggagcagaactacagcgaggccaggaaaaagcaaagagatcaaggcttgttgtcacaagagagcaatgacggaaatattgactctgctctgttgagcgaaggggctacgctaaaagggactcaaagtcagtatgaaagcggactgacgtctaacaaagatgagaaaggaagtgatgacgaagatgcgtcagtggctgaggctgctgttgccgctaccgtcaattatacagacttaatccagggccaggaagatagttctgatgcccacacatctaatcaaacgaacgcgaatggtgagcacaaggattcccttaatggggaaagagccataaccccatcaaatgaaggagtcaagccaaacacctccctggagggaatgacgtcttcaccaatggaatctacacagcaatctaaaaacgacatgctcataccattggcagaacacgatcgtgggccagaacaccaacaggatgatgaagacaatgatgacgctgacattgatctcaaaaaggatataagcatgcagccgggtcgtcgtggaagaaaacctactactttggccacaacagacgagtggaaaaagcaaagaaaagactcccataaagaagtcgaaaggcgtcgccgcgaaaacatcaacactgcaatcaacgttttaagcgacctcctgcccgtgagagaatcaagtaaggcagcaatattggcgtgtgccgctgaatacattcaaaaattgaaagaaaccgatgaagcaaacatcgaaaagtggacgttacaaaaattgcttagcgagcaaaacgcatcgcaattagccagtgcaaatgagaaactgcaggaagaactgggaaatgcttacaaagaaatcgagtacatgaaacgcgttttaaggaaggagggaatagaatacgaggatatgcacactcacaagaaacaagagaacgaaagaaaaagcactaggagcgataatccacatgaggcttgagagttaaaaatagatagctaaatgtatttcgagtctccctatgtatctgcgtctctgccccatagcacctctgttaagtttttatcaatattccatcggcatatttgaaaccgcccggatggtattagagaatcactcagcctcaaactcagcaagtaaaagaggacgggacggactttcaaatatgtctttgtacgttattgtttttcatccctaaatggcttagtaaaaaagttttgccaagaattttttgacgttcaatggaaaaatcgccaagagaaatacgcacaacctccgttttcccgccttttatcaaaaaatcttagttttcccttcctttttttttttttgggtcgcagaaaagaaaaaagatagtagtggagaggattacctgaaaaaaacaggcaaaaacgtcacatccttgaaggtccgcgacaatcacgggcctatttctactttggggctttgcttgattatttaagaagaaacattggacgaagatcaagtaagagtgcacttgtctttagtctggcattccgctatttgtatcttatatagttaacaacaactgttatttactttctggaaaa

SEQ ID NO: 1763 - DNA, 551 bp, Saccharomyces cerevisiae
aaaggcttaaagcaatccaggttagtacttataagaatgtctgttgtaggatcgttaattttttgcttggactgtggtgatctcctggaaaatcctaatgccgtattaggctctaacgttgaatgcagccaatgtaaagccatatatcccaagtcacaattctccaatttaaaagtcgtcaccacgacggcagacgatgcgtttccatcttctcttagagccaagaaatccgtggttaaaacttctttgaagaagaacgaactgaaagacggcgctactatcaaggaaaagtgtcctcagtgtggaaatgaagagatgaactatcatactttacagttaagatctgcagatgaaggtgctactgtcttctatacatgcacttcctgtggttacaagttccgtaccaacaattgattgggttgtgttcgcacatattacaatttgtacattaatatcatccccgctttcatcatgtgaacatctatagaacatcatttataaaaacaaaaaatctatgtactgacgatataatagcgtacattatcatatta

SEQ ID NO: 1764 - DNA, 1782 bp, Saccharomyces cerevisiae
actcaaagtaataacagctatcatccatttttatagcaatatttgaaaatggctgctcgtccacaacaacctcctatggaaatgccggatctgtcgaacgccattgtggcacaagacgagatgggtagaccctttattatcgtgaaggatcaaggtaacaagaagagacagcacggattagaggccaagaaatcacatatattggctgctagatcagtagcttctattatcaaaacttcgttgggtccccgtgggttagataagatcttgatttcacctgacggtgaaatcaccatcactaacgatggtgctacaattttgtcccaaatggagctagataatgagattgcaaagttgttagtacaactttccaaatctcaagatgatgaaattggtgatggtactactggtgttgttgttctggcaagtgcgctacttgaccaagcattggagttaattcaaaagggtatacatccaatcaaaatcgctaatggatttgatgaagccgccaaattagccatttccaagttagaagaaacatgtgacgacatttctgcgtcaaacgatgaattgttcagggactttttattgagggccgccaaaacttctttgggctccaaaattgtttccaaggatcatgatagatttgctgaaatggctgtggaagccgtcataaatgtcatggacaaagatcgtaaagacgtggatttcgatttaatcaaaatgcaaggacgggttggcggatctataagcgattcaaaattgattaatggtgtcattttggataaagatttttctcatccacaaatgcctaaatgtgttttaccaaaagagggctctgatggtgttaagttagctatattaacgtgtccatttgaacctcctaaaccaaagaccaagcataaattagacatttcttcagtagaagaataccaaaaattacagacttatgaacaagataagttcaaagaaatgatagacgatgtgaagaaagcgggcgcagatgttgttatatgccaatgggggtttgacgatgaggccaatcatctacttctacagaatgatttacctgccgtaagatgggtaggtggccaagaactagaacacattgccatttccacaaacggtcgcattgttccaagatttcaagacttgtctaaggataaattaggtacatgttccagaatttacgagcaggagtttggtactactaaggatcgtatgctgattatcgagcaaagtaaagaaacaaaaactgtaacatgttttgttcgcggttccaataaaatgatcgtggatgaagctgaacgtgcattgcatgactcactatgtgtggtacgtaacttggttaaagactcacgtgtagtttacggtgggggagcagccgaagtgactatgtccctggctgtctctgaggaagctgataagcaacgtggtattgatcagtatgcattccgtggattcgcccaagcgttagacaccattccaatgactttggctgaaaattctggtcttgatccaatcggaactttgtctacattgaaaagtaaacaactgaaagaaaagatttccaacattggtgtcgattgcttaggttacgggtctaatgacatgaaggaactatttgtcgttgatccatttattggcaaaaagcagcaaattcttttagctactcaattatgtagaatgattttaaagattgataacgtcatcattagtggtaaagatgagtattgattttgtataaataaataataaaagataagttttaatcacatatcc

SEQ ID NO: 1765 - DNA, 1326 bp, Saccharomyces cerevisiae
actgggggaaagtattggcaatcacttgagatgtttgaagggtttggtccaaataaaaagcgtaagatatcaaagttagccgcagagcaatcattggcacaacaaccctgggttgagaaatacaggcccaaaaacctagatgaagtgacagctcaagatcatgccgttactgttttgaagaaaaccttaaagtcagctaatctaccacatatgttgttttatggtcccccaggaactggtaaaacgtctaccattttagcgctaacaaaagaattatatggacccgacttgatgaaatcaagaatattggagttgaacgcttctgacgaacgtggtatctctattgtaagagaaaaggtaaaaaattttgcaagattgactgtatccaagcctagcaaacatgacttggagaactatccgtgcccaccgtataagatcattattctcgatgaggccgattcaatgactgccgatgcacagagtgcattacgtagaacaatggaaacctattcaggagtaacaagattctgtttgatttgtaattatgtgacaagaattattgacccgctagcgtcccgttgttccaaatttagattcaaagccctagacgcaagtaatgccattgaccgtttgaggtttatcagcgaacaagaaaatgttaaatgtgatgatggagttttggaaaggatcttggacatttcggcaggtgacttgagaagaggcattacattattacaatccgcttccaagggggcgcaatacttgggtgatggtaaaaacataacttctacccaagtggaagaattagctggtgtggtacctcatgacattctaatagaaattgttgaaaaagtcaaaagtggtgattttgatgagattaagaaatacgtcaatacgtttatgaaaagcggttggtctgctgcgtcagtagttaaccaactacatgaatattacatcaccaacgataactttgatacgaacttcaaaaatcaaatatcttggttgctgtttactacggattccagattaaacaacggaacgaacgagcacatccaattattaaacttattggttaaaatatcccaactctaatatacaggcatctttatataattgaatatagaggcgacataaagtaagaataaaaaaaaaaaaatctatccataattcctcttatcttctcagcacatcacctaaaagtcattttgatacaagtactctttaaactgagcgaaggctttaccacgatgagaaatagcattctttgcgtctttgctcatctctgcgtaagtcagtccatgactatcaaaaggttcaaaaattgaa

SEQ ID NO: 1766 - DNA, 762 bp, Saccharomyces cerevisiae
gggtttgcatatgaagattgaaaaggcttctcatatttcacaaccggtgcaactttccacatgcactctcattgacacctaccctggtcatcaaggaagcatgaacaacaaggaagtcgaattatacggcggcgccatcactactgtcgtcccacctgggtttatagacgcttctactctaagagaagtccccgatacacaggaggtgtacgtcaattcccgtcgcgatgaagaagaattcgaagatggactagccaccaatgaaagcattatcgtggatctcttggagacggtcgacaagagcgatctgaaggaggcttggcagttccacgtggaagacctgacggagttgaacgggaccaccaaatgggaagctttacaagaagacactgttcagcaaggaaccaagttcaccggactcgttatggaagtagcaaataagtggggaaaaccagatctggcacagaccgttgtcatcggcgtagcgttgatcagattaacccagtttgacacggatgtggtcatctccattaatgtacctttgacaaaggaggaggcgtcgcaagcaagcaacaaagagttgcctgcaagatgtcatgctgtttaccaattgttgcaagaaatggtacggaagtttcacgttgtggacacgtcgctgtttgcttaatctttcaaattttaaccttatgtttatattacctttttatttctactatatagcgtattacatgttttttccgataagtataacgaaatttccca

SEQ ID NO: 1767 - DNA, 1438 bp, Saccharomyces cerevisiae
ctctactcggaagacagcagatagatatatagactgtagcggttaacgatggccaaaacaacaaaaagagcctccagtttcaggaggttgatgatattcgccataatagccctcatctcattagcatttggagttagatacctatttcacaattctaatgctactgatttacaaaaaattctgcagaacttgcccaaagagatttcccaaagcattaatagtgccaacaatattcagagttcggattctgatctagttcaacattttgagagtttggctcaggagatcagacaccaacaggaagttcaagcaaagcaatttgataaacaacgtaagatcctggaaaaaaaaatccaagacttgaaacaaacacctccggaggccaccctaagagaacgcatagctatgactttcccctacgattcccatgtcaagttcccagcatttatttggcaaacttggtccaatgatgaaggtcccgagcgtgttcaagatataaagggcatgtgggaaagcaagaatccgggctttgcgcacgaagtgttgaaccatgacgtgataaacgcactagtacaccactacttctactccataccggaaatcctagagacttacgaagctctgccctccatcatcctaaagatagattttttcaaatacttaatactgttagttcatggaggtgtttatgctgacatcgacacgttccctgttcagccaattccaaactggattcctgaagagttgtcgccatccgacattgggttgatagttggagttgaggaagacgctcaaagagctgactggagaaccaagtatatcagaagacttcagtttggtacttggattatacaagcaaaacctggtcaccctgttttgagggaaatcatttctcgaattattgagaccactttacagagaaagagggacgaccaactaaacgtcaatctaaggaatgatctgaatattatgagttggacgggttctgggttgtggactgacactattttcacgtatttcaatgactttatgagaagtggtgtcagggagaaggttacatggaaattattccataacctaaatcaaccaaaattgctaagtgatgttctggtctttccaaaattctcctttaactgtccaaaccaaatcgataatgacgatccacacaagaaattctatttcattactcatttggcatcacaattttggaaaaatactccaaaggtggagcagaaataagtacttctacgcagatataataaggaacttttttgttaatttttttttgctgatcgatattaatactttttaagaatgaagaaaaaaaaaaaataatataccagatgtatttacttatatacaacactcactctttatatatatagagaaagaagaaataagtgaggaagccaaaagcggactcattcttcctgtttga

SEQ ID NO: 1768 - DNA, 401 bp, Saccharomyces cerevisiae
aaacgttctcaataattctaagaatgacatcagttcaaaactctccacgcttacaacaacctcaggaacagcaacagcaacagcaacagctttccttaaagataaaacaattgaagttaaaaagaatcaacgaacttaacaataaactgaggaaagaactcagccgtgaaagaattactgcttcaaatgcatgtcttacaataataaactatacctcgaatacaaaagattatacattaccagaactatggggctaccccgtagcaggatcaaatcattttatagagggtttgaaaaatgctcaaaaaaatagccaaatgtcaaactcaaatagtgtttgttgtacgcttatgtaatgatagtaatagaatccaaaaaaaaaaaaaatatacatgcttttt

SEQ ID NO: 1769 - DNA, 450 bp, Saccharomyces cerevisiae
atacgatattataaacagcatagataatcaaacaaaaaaatggctaagagaacaaagaaggtcggtatcacaggtaaatacggtgtccgttatggttcatcattgagaagacaagttaagaagcttgaaattcaacaacatgccagatatgactgttccttctgtggtaagaagactgttaagagaggtgcagctggtatttggacttgttcctgttgtaagaagaccgttgccggtggtgcttatactgtttctactgcagctgccgctactgttagatctaccatcagaagattaagagaaatggttgaagcttaaacttctttcattcattttctcttggctttcactaggtatatctattccataacgactatgttttgtatttgttaatttacataaaaccatatcagtacatcaacgaactgtaaaaaagaaactttagcataa

SEQ ID NO: 1770 - DNA, 1052 bp, Saccharomyces cerevisiae
gtctctttctttcatcccttgtcgcaacctccaatatataagagcataagcaactgatcttactttagtaattaacttagcatacctagcccgaaggaagaaaaaaaattcacctcaacaacatggttcctaagttttacaaactttcaaacggcttcaaaatcccaagcattgctttgggaacctacgatattccaagatcgcaaacagccgaaattgtgtatgaaggtgtcaagtgcggctaccgtcatttcgatactgctgttctttatggtaatgagaaggaagttggcgatggtatcattaaatggttgaacgaagatccagggaaccataaacgtgaggaaatcttctacactactaaattatggaattcgcaaaacggatataaaagagctaaagctgccattcggcaatgtttgaatgaagtctcgggcttgcaatacatcgatcttcttttgattcattcgccactggaaggttctaaattaaggttggaaacttggcgcgccatgcaagaagcggttgatgaaggattggttaagtctataggggtttccaactatgggaaaaagcacattgatgaacttttgaactggccagaactgaagcacaagccagtggtcaaccaaatcgagatatcaccttggattatgagacaagaattagcagattactgtaaatctaaaggtctcgtcgtcgaagcctttgccccattgtgtcacggctacaaaatgactaatccagatttattaaaagtttgcaaagaggtggaccgtaatccaggtcaagttttgattcgttggtctttacaacacggttatttaccactaccgaagactaaaactgtgaagaggttagaaggtaaccttgcagcctacaactttgaactgtcagacgaacagatgaaatttcttgatcatcctgatgcttatgagcctaccgattgggaatgcacagacgcgccataaaaagaaaatgcgaaccgtagaataacgtatatagaacatataattagtttacgtttcacaaagtattaatattacatgtag

SEQ ID NO: 1771 - DNA, 1027 bp, Saccharomyces cerevisiae
tcacaataagaggatattttgcaggcaaatttctgaagaccacataatatcgtcttcttggcgcaactaagacgcagagaaatgcttgttttcaaaaggggtattcacgtagtacctaaactaccaaattctaaggccctactgcaaaatggagtgcctaatatactcagttcttcgggattcaagacggtgtggttcgactaccagcgatatctatgtgataagctaacgctggcgacagcgggacagtctttggaatcatattatccatttcacatattgctgaaaactgcaggaaatccattacagtcaaacatcttcaatttggcgtcctctatccataataaccatttattcgtggagaacattctaccttctgctgttgaacatggcactaactcgaacgccgttgtgaagacagagccttctaggctttttttatccaaaatcaaagattcattcaacggcagcgattgggaagtagtgaaggaggaaatgatttaccgtgctgagaatgaagtcttgggacaaggctggttatttctagttgaaaacaatgagaaaaaactcttcatattaacgagcaataataatggtacgccgtattattttcccaggaaccagtcatttgatttaaacagtgcgatatccatcgatgaatttgctaccttgaaacaaatgaaagaactgataggaaagtctactaagttgaatggtaaggttcaagactggaccatgcctataatctgtgtcaatctgtgggatcatgcttatttacatgattatggcgttggtaaccggtccaaatacgtgaagaatgttctagataacttgaattggtcagtggtaaataataggatattctctggtatatcgaagtaatgaaaagaaaggaagcgatagcctcttaccctcatatgtaattataaaggtatcgggtagaaggggatctaccaaaatcttatatactgtaaatagttttattttatcctctcgctcgtgttttaaacaaccttaatggcaatta

SEQ ID NO: 1772 - DNA, 1896 bp, Saccharomyces cerevisiae
acattttttttgtttttgagtatttatcttgtatctaactgtctatctgactaggaatcaatttgtaaagttctaaaaaaaaatttaaaggcggctattgaaaatgaaatacgttgttgtttctggtggtgttatctcaggtattggtaagggtgttttagcgtcctctacagggatgctactgaaaaccctcggcctaaaggttacttccatcaagattgacccatatatgaatattgacgccgggacgatgtctcccttggaacatggtgagtgttttgtacttgatgatggtggggaaacggacttggatctcggtaattacgagcggtacctcggtattaccttaagcagggaccacaacatcaccaccggtaagatatactcccacgtaatttccagagaaaggagaggtgattatttaggtaagacagttcaaattgttcctcatttgactaacgcaattcaggattggattcaacgtgtttcaaaaattccagtggatgacacaggattagaaccagacgtctgtatcatcgagttaggtggtacggtcggtgacattgagagtgcgcccttcgtggaagcattacgacaatttcagttcgaagttggaagagagaatttcgccctgatccatgtttcacttgtgcccgtcattcatggtgaacagaagacgaaacccacccaagcagcaatcaaagatttaaggtcattagggcttattcccgatatgattgcctgcagatgcagcgaagaacttaacaggagcactattgacaagattgccatgttttgccatgtggggccggagcaagtggtcaacgttcatgatgttaactccacgtaccacgttcccttattgctgctaaagcaacatatgatcgactacctccattcaaggttgaaattaggtgaagtgcctctaaccttggaagacaaggaaagagggtctcaattattgactaactgggaaaacatgaccaaaaacctagatgattctgatgatgttgtcaagattgctcttgtgggaaaatacactaatttgaaggattcctacctatctgtgaccaaatccttagaacacgcaagcatgaagtgccgtcgtcagctagaaatcctctgggtagaggcaagtaacctagagcccgaaactcaagaggtggacaagaacaagttccacgattcatggaataagctcagttccgccgacggaattttggttcctggtggatttggcacgagaggtattgaaggtatgattcttgctgccaaatgggcccgtgaatccggtgttccctttcttggtgtctgtcttggattacaagttgccgctatcgagttcgcccgcaatgtgataggccgcccaaacagcagttctacagaatttttggacgagacactactagctcctgaagaccaagtagtcatatacatgcccgagatcgacaaggaacacatgggtggcacgatgagattgggtttgaggcctaccattttccaaccgaactcagaatggagcaacataaggaagctttatggtgaagttaatgaggtgcatgagagacatcgtcatcgctatgagataaacccgaaaatagtgaatgatatggagtctcgtggctttatttttgttggtaaggacgagacgggccagcgttgcgaaatattcgaattgaaaggccatccatactacgtgggcactcaataccatccagagtatacatcgaaggtgctggaaccatcaagaccgttttgggggcttgtggccgcagctccggcacacttggtgaagtgatcaaggacataaatctaagcgagggaaatgaaaatgaatgaattgatgcgcttactacttacttacatacggtttttattcaagtatattatcattaa

SEQ ID NO: 1773 - DNA, 1103 bp, Saccharomyces cerevisiae
accaaagataacagcaaaagaaagagcaagcaattatgaccgcaccattggtagtattgggtaacccacttttagatttccaagccgacgtcacggctgaatacctggccaagtattctctaaaggaaaacgacgcaattttggtcgatgccaaatcaggcgatgctaagatggctatttttgacgagctcttacagatgccagaaacaaagcttgttgcaggtggtgctgctcaaaacactgctagaggggcagcatacgttttgggcgccggccaggtggtgtacttcggttccgtcggtaaggacaagttcagcgagagattgcttaacgaaaacgaaaaagctggtgtcaagtctatgtaccaagttcaaaatgatattggtaccggtaagtgtgccgcattaatcactggccataaccggtccttggtcactgacttgggtgctgccaatttctttactccagaccacttggacaagcattgggacttggtcgaagcagctaagctcttctacatcggtggtttccacttgaccgtgtctccagacgctatcgttaagttgggccaacatgctaaagagaacagcaaacctttcgtgttgaactttagtgctcctttcattcctcatgtcttcaaagacgcattggccagagttttgccttatgctaccgtcatcatcgctaacgaatcggaggccgaagccttttgcgacgccttccaattagactgtgccaacactgatttggaagctattgctcaaagaattgtcaaggactctccagttgaaaagactgtcatcttcacccacggtgtcgaaccaacagtggtcgtgtcctccaagggtaccagcacatatccagtcaaacctttggactcttctaagatcgtcgacaccaacggtgctggtgacgccttcgctggtggctttatggctgggttgactaaaggtgaagatttggaaacctctattgacatgggtcaatggctagctgctttgtctattcaagaagttggtccctcttacccttccgaaaaaatatcttactctaaatagattcttcttacaatataatagaaataaaatatactctacgtgttc

SEQ ID NO: 1774 - DNA, 462 bp, Saccharomyces cerevisiae
ccaaagaccacaagagcaaacaatggtacagctgagaagaaccatcactaccaacaaagtgtttcaagcgatcacgtcgactaacgacaaagttgctcactttgtcgtgttcatgtgggagtcgtggctgtttgtaaagatgtttgctgaggacatcgtgactttccgcaagctacaggccaacaagtacgtgttaggggtgctgatctgttcattatgcgcaagtgtaacgagtgaattcgcccaaagcgtggtttcgcggggacaaagggtgttcgatgtgaaggatattatttgtaatttctggggcagtctgcttggtgtgggcattgccttctaccaggaccgataaaaagagattatacggaaaatcatataaatgtgtttatgtacaggcaagtttacgtagactagattactttaattgaatatatgctctgtgagcaatggctgtcttgtgaa

SEQ ID NO: 1775 - DNA, 1189 bp, Saccharomyces cerevisiae
gccaggaacaatagacttttatcgcatattatttctatacgtgcacttatatatgcacacatatgtttatatacatatacatacatacgtgtttcttttcagcctgtgtttttgtcgggtccaaaaacatacaaggcaacataatattttgacataactcaacgcaacataacagtataaaacatagtttaataaaagagaaaaaaaaaacaatatttttaagctatcgctcttgccgcaatgaacgccaactctaccacgacagcaatcggcctcaccagccccttcgaaaagctgtccttcttccctcattcgtctaatttaatactggctcatttgcatgagatcatcttcagcttcgtcttctaccagctcgcattctccgttgtcgcaccgttcttgaataaagtggtctttcgcaagcactacaccacgatccgtgacccactgctgaaaattgatttcaatgtccacaccgtctcgatgatccaggctgtcgtctcgaacaccgtcctgttgcccaccctcacgacgccaatgcattataatgttgtcacctacacagattcgtacagttcaatggtatcttccctcagcgcagggtactttatctgggacttgactatgtgcgtgcgttacttcaagctttatggtctcgagttcacgggccacgccattggctccgtatatgtgatgctgttgtccttaagaccgttctgccaaccctggatcggcaggttccttatctacgaggcctccactccctttgtgaacatcaattggttcatcatgcaatgtaacgccaagagcaagaactctatccctctgtggtttaatgtcgtcaatggccttttgctcatgactgtgtttttcgtcgtcaggatttgctggggctccatcgcatccgctctcttattcaggcagatgtggaaggtaagagacgagttacccaagttttctgctgtcacgatgatgtcgctgaacattttcatgaaccttttgaacgtgctttggttcaagaagatgattagaatcgccaagaaacttgcaaaaccagccccaacgtcgaagctagactaaacctacctttttttctatcttcaacaacgaaacgccttacacacacacacacatacatctacatacatacatacaaatatacatatatgtaaacttgtatattcattcc

SEQ ID NO: 1776 - DNA, 1494 bp, Saccharomyces cerevisiae
ggaggaaatagaaaactgcaggcctttattcatgtttgatcttaagacgattctcgaccatcctaatatcccgtggaaattaatcatttctgggttctcgattgcccaattttctttcgaatcttacttgacgtacagacagtaccagaagctatctgaaacaaagttgccacctgtgctggaagacgaaattgatgatgaaacttttcataaatcaaggaactactcccgggccaaggccaagttctccattttcggtgacgtctataacctagcccaaaagctagttttcatcaaatacgacctcttccctaaaatctggcacatggccgtttctttattgaatgcagtcctgccagtcagatttcatatggtctccactgtcgcacagagtttatgcttcttgggtctcttatccagtttgtctaccttggttgatttgccactctcttactatagccattttgtcctggaagaaaaatttggtttcaataaattgaccgtccaactatggatcaccgatatgatcaagagtctgactttggcgtatgctattggtggcccaatcctttacctgttccttaagatctttgataaattccctactgatttcctttggtacattatggtcttcttgttcgttgtccaaatcttagccatgacaatcattccagtcttcatcatgcccatgtttaataagttcactccattggaggacggtgaactgaaaaaatctattgaaagtttggccgatagagttgggttccctctagataagatttttgtcattgacggctcaaaaagatcttctcattcaaacgcatatttcacaggtttgccattcacctccaagagaattgttttgttcgacactttagtgaacagtaattctactgatgaaattacggctgttttggcccatgaaatcggtcactggcaaaaaaaccacatcgttaatatggtcatctttagtcaattgcacaccttcctcattttctcccttttcaccagcatctacagaaatacatcattttacaacaccttcggctttttcttagagaagtccactggcagttttgttgatcccgttatcactaaggaattccccattatcattggatttatgttatttaacgacttattaactccactcgaatgtgccatgcaattcgtgatgagtttaatttccagaactcatgaatatcaagctgatgcttatgctaaaaaattgggctacaagcaaaatctatgtagggctctaattgatctacaaatcaaaaacctttccaccatgaatgtagatcctctgtattctagctatcattattcccatccaactctagctgaaagattgaccgctctagactatgttagtgaaaagaagaaaaactaatctatagagtacacatattagcatgtaccgttaaattcagcttcgttatgtctatatctacatacatacacaggtatctactataagaataaaggaaagaa

SEQ ID NO: 1777 - DNA, 351 bp, Saccharomyces cerevisiae
atgcgctgggatgttatcatcttatacgcaattagccgcccatatgccacccggcgcaccgggtcgcacacacacccccgtgattcgcgatatatagcggccaatcaacggcgacctccaagcgcgtgccgggtgggcccctcgccggccaagcagcgcaaggatattcccatcttcgagctcttagatacaacgcttataaagaacgcactttttgcattaacctcttttttgtattacagaacaaacattttaacttgcccttttttaaactttctttatctctccaggacaggccaattggataaattttgcaaagatcaaacagtaacacaaattttagcaacctaa

SEQ ID NO: 1778 - DNA, 1607 bp, Saccharomyces cerevisiae
atggttttgccaagactatatactgctacatcccgtgctgcttttaaagcagccaaacaatccgctccgcttctatccacttcgtggaaaagatgtatggcctcagctgctcaatctactccaatcaccggtaaagttaccgctgtcattggtgccattgttgacgttcattttgaacaatcagagttgcccgctattttgaacgctttagaaattaaaacacctcaaggtaagttggttttggaagttgctcaacatttgggtgaaaacactgtcagaaccattgctatggatggtaccgaaggtttggtccgtggtgaaaaggttcttgacactggtggccctatctccgtcccagttgggagagaaactttagggagaatcatcaacgttatcggtgaacctattgatgaaagaggtccaattaagtccaaactaagaaagccaattcacgcagaccctcctagttttgcagaacaatctacttcggctgaaattttggaaacaggtatcaaagtcgtcgatctattagctccttatgccagaggtggtaagattggtcttttcggtggtgcaggtgtcggtaagactgtgttcattcaagaattgattaacaatatcgccaaggcccatggtggtttttccgttttcaccggtgttggtgaaagaacaagagaaggtaatgacttgtaccgtgaaatgaaggaaactggtgtcattaacttggaaggtgaatccaaggtcgccttagtgttcggtcaaatgaacgaacctccaggagccagagccagagtcgctttaactggtttgacgatcgctgaatatttcagagatgaagaaggtcaagatgtcttgttgtttatcgacaatatctttagatttactcaagctggttcagaagtctctgcccttttgggtcgtattccatctgccgtcggttatcaaccaactttggccactgatatgggtctcttacaagaaagaattaccaccacaaagaagggttctgtcacttctgtgcaagccgtttatgttccagccgatgatttaacagatcctgctcctgccactacttttgcccatttggacgctactaccgtcttgtcaagaggtatttcagaattaggtatttaccctgcagtggatccattggattctaaatcaaggttattggatgccgccgttgtcggtcaagaacattatgacgtcgcctccaaggttcaagaaactttacagacctataaatctttacaagatatcattgctattttgggtatggatgaattgtccgaacaagataaactaactgtcgaaagggcaagaaagattcaaagattcttatctcaaccatttgctgtcgccgaagtctttactggtatcccaggtaaattagtgagattaaaggacaccgttgcctcgttcaaagccgttttggaaggtaaatacgataatataccagaacatgctttctatatggttggtggtattgaagatgttgttgctaaagctgaaaagttagccgctgaagccaactagaagaaataaagcttaaaccaagggaagcaaaatttgaaataccgaaggtagaacaataaggatgatgggaa

SEQ ID NO: 1779 - DNA, 1706 bp, Saccharomyces cerevisiae
atgaagaactctgtcggtatttcaattgcaaccattgttgctatcatagcagctatatactatgtgccatggtacgaacactttgagagaaagtcaccgggggccggagaaatgagagatcggattgaaagcatgttcttggaatcgtggagagactattccaagcatggctggggatacgatgtgtatggacctattgagcacacttcccataatatgcctcgtggcaaccagccgttaggctggattatcgtagattcagtggataccttgatgttaatgtataactcctccacactatacaaaagtgagttcgaggcagaaattcagagatcggagcattggataaacgatgttttggattttgatattgatgccgaagtgaatgtttttgaaactactattagaatgctaggtggtttattatccgcatatcatctatctgatgttttagaagtaggtaataagactgtctacttgaacaaagcaatagatttgggggataggcttgctttggcgttcttatccactcagaccggaattccatactcaagtataaaccttcatagtggccaagcggttaagaaccatgcagatgggggggcatcttctaccgcagaattcactacgctacaaatggaattcaaatatctggcgtatttgacaggaaatcgtacttattgggagctggtggagcgtgtttacgagccattatacaaaaataacgatcttctaaatacctacgatggattggttccaatttatacatttccagatactgggaagtttggtgcttcgactatccggttcggatcaagaggtgattctttttatgagtatttactaaaacaatatttattgacgcacgaaacactttattatgatctgtacagaaaatccatggaaggtatgaaaaagcatttattagcacaatccaaaccctcttctctgtggtacattggggaaagagaacaaggtctacatggacaactttctcctaagatggaccacctcgtgtgctttatggggggattgttagcatcaggctctactgagggcctttctattcatgaagcccgaagacgtccgtttttctctctttcccttgaaagaaaaagtgactgggatttggctaaagggataactgacacatgttatcaaatgtacaagcagtcttcctcggggcttgcgcctgaaatcgttgtcttcaatgatggaaacataaaacaggatggttggtggcggtcgtctgtgggtgatttttttgttaaaccactcgataggcacaacctacaaagaccagaaacggtggaatcgattatgttcatgtatcatttatctcatgatcacaaatatcgtgaatggggggcggaaatcgcaactagcttctttgaaaatacctgtgttgattgtaatgacccaaaattaaggcggttcaccagtttaagtgattgtatcacgttacctacaaagaaatctaacaatatggaaagtttctggttggcagagactttaaagtatttatatatattgtttttagacgagtttgatttgaccaaagttgttttcaacacagaagctcatccttttccagtattagacgaagaaatattaaaatcgcagtctctgaccacaggttggtcgttgtaggttagtgtgctatatagtggccagattcgccttttaaaattcactatgcggtgtga

SEQ ID NO: 1780 - DNA, 3388 bp, Saccharomyces cerevisiae
aatcaatattcatttatatatttcagcataatcaatcatttttcgtctggatatttgacacaattttgattttgacgaagacattttattctcgatggatattacagaattgttacagtgctttgcctgtactttggaccataacgctgccgtaagaactaatgcagaaacacatcttaaaaatgcaagtaaagtaccgggattcttaggcgcatgcctggatatcattgctgctgatgaagtaccagaaaacatcaaattatcagcttccttatatttcaagaataagattacatacggatggtctgctggtgcaagacagggttcaaatgaattattagattcacatgttgatccggatgaaaaaccagtagtaaaagatatgttaattaaaacaatggtcagtgtgtccaagacctccccgcgttgtatcagagtgctaaaatctgcccttactgtaattatttcagaagattaccctagcaaaaaatggggcaatttgttaccaaattccttagaattactcgcaaatgaagacatcacagtaacatatgtcggacttctgtgtcttgctgagatttttaggacctataggtggaagaataatgatgaaagacaggacttagaagagttgattttaaattatttccctgctttattaaactatggcgcaaatgtccttttccaagatggtaaatatatgaataacgagcaaattggcgaattggtaaaattaatcattaaaatttataagttcgtttcataccatgacctaccatttacattacaacgctcagaatcgtttaccccatgggcatgtttttttgtcagcatcattcagcagccattgcctcaggaagttttgtctatatcagatattgaggtcagaagtaaaaatccatgggtcaaatgtaagaaatgggctcttgcaaacctttatagacttttccagagatacgcatcaacgtcattaacaaggaagtttcagtacgatgagtttaaacagatgtactgtgaagagtttttgactcagtttttgcaagtcgtcttcgatcaaatcgagaaatggggaactggacagttgtggttaagtgacgaatgcttatactacatattgaactttgttgagcagtgtgttgtgcagaaaacaacttggaaacttgttgggccccactacaatgtaatacttcaacatgtcattttcccactactaaagcccactgcagagactttggaggcctttgacaatgaccctcaagaatatatcaaccggaatatggacttttgggatgtcggctattccccagatcttgccgcactggctttgctaacgacatgcgtgacgaaacgcggtaaaacgaccttacaaccgaccttagaatttatggtctcaaccttacaaagtgccgttggtgattacaacaatattatgttggataatgccttgcaaattgagtcctgtttgagaatattctccagcattattgaccgtttgataactaaagattctccatttgccagtgagatggaaaagtttatattgacatacgttttacctttttttaagtctcagtatgggtttctgcaaagtcgtgtttgcgatatttgttcgaagttgggttctatggatttcaaagacccggtaataacctctactatctacgaaggtgttatgaattgtctgaataactcttctaattctttacctgtagaattgacagctgcattggcattgcaaacttttatcagtgatgaccagtttaatatgaagttatccgaacacgttgttcctactatgcagaaattactaagtttgtctaatgattttgaatctgatgtcatttcaggcgttatgcaagattttgtggagcagtttgctgagcaattacaaccttttggtgttgaattaatgaacactttggtccaacagtttttgaaattagctattgatctgcatgaaacatccaatttggatccagattccttcacgaacgttgatagcatacccgatgaatctgacaagcaaatggcggcgctaggtattttgtcgactacgatatctattctgttgtcttttgagaattcacctgaaattttaaaaaacttggaacagtcattttatccagctgcagagtttattttgaaaaacgacatcgaagatttctatcgcgaatgttgcgaatttgtagagaactctacattcctactaagagatatcacacccatcagctggaaaattttggagctgattggagaatgtaatagaaaaccagatagtatggtatcttattatttaagtgatttcatgctagccttaaataatatcctcatttatggaaggaacgaattaaagaagaacgagttttacacaaaaatcatattcgaaatatatcaaaaggctgttactgcagaagataattcgttagacgatcttagagtggtttttgatttatcccaagagttggttcttgcattagatgacagtttacctcaacaatacagagagcgcctactggcggatgttgtcggctctattctaacgcaaaagaatgaattgaaaactaatgttgtatttagtgtgactgcttttaatgtcgtaatctcaaatatgataacagagcctttgatcacgcttcagtacctgaaacagcaaggttgtcttgaaatcttctttcaaacgtggattacagactatattccgaattataaaaggtgctatgatatcaaattatcagttcttgcgttattaaaaattatactgaagttagaaagcaacgattattcagtgttgaacttagaaaatttggttccgcaattagggagtattgttacgcagttagcttcgaggctaccaacggcgttaaggcaattagctaaccaacgcaaggaattctcatcatccggttttgaagaggatactaagtgggatgaaaattttcttgacgttggagacgatgatgaaaatgatgacgagggagaccttactgagaaatatctggaactgataaaaaatagagccgattccttggacttcgtagatggttatgacgcaaaggaaactttcgatgacctagaagaggacccattaacggggtcgatcctggacacagttgacgtatacaaggttttcaaggagtccattgcgaacttacaacatgttgacagcaatagatatcagggaatcttgagacatctgaccccggctgatcaagaactattcatgggaattatgaatgcctaattgaattaaatggcgattgtatattgaaacaaacactggattacataatttagatagaagagagaggatattatgctcaaagtttgttgcctttgcctcggccagttgactttgatttgatatcaagatcttttttttttatctgga

SEQ ID NO: 1781 - DNA, 827 bp, Saccharomyces cerevisiae
atctgagttttgtcagtctttcttttgcatagcccatccttgtactagatttcataaacattgatcacttcaaaatatacttgtaccaagatggccgaaaatgagagaatgtacatctcctataataatattcacaagctttgtcagggagtggctaaacatatcttagctagaaacgaaagacctgatattattatcgccatcactggtggtggtatgatccccgcaagaattattaggtcctttttgaaaactaaaggacaaaagaatattccgattcaggccatcggcctatctttgtatgaagatttagggttggataatagcgtcgaaactatcggcaaagaggtcatcagaacacaatggctggacttcggtgctttgaaccaacatttcgattccttaattggtaaaaaggtcctaattgtggatgaagttgacgatactagaactaccctccactatgctgtttctgagctggaaaaagagattgctgaacaacaaaaggttttgaatagaatgagtgaggaaaccgttatttctatctttgttctacataataaggacaaaccaaagagagctggactacctgactccatgatgaattctggacgttacattgctgcgcaaactgtccctgataagtggttgtgctatccatgggacgctgaagatatcgaagaacataccatgctcgctaaggctcaaggtcatgactgatgacaaacagtatgttgcgatggggttgcatgtatatagatacatatagttatcattggtaattatttcatatttaacctaaatctaaagataagagtgtatttcta

SEQ ID NO: 1782 - DNA, 386 bp, Saccharomyces cerevisiae
acaaatttacaaacaacaaagaatgtcttctctatcaacgtctgatttggcctcccttgatgacacttccaaaaaggaaattgctactttcttggagggagagaactccaaacaaaaagtccagatgtcaatccatcaattcactaatatatgcttcaaaaaatgtgttgagtctgtcaatgattctaatttaagttcgcaagaagagcaatgtttgtctaactgtgtgaatcggtttttggatactaatatcaggattgtgaacgggttgcaaaacacccgttaatatgaaaccgatttatctctccgagtcattattctctttaccttaatatatctgtaaataagcaaatgaatattttaatatatgtccaaggtttctttaa

SEQ ID NO: 1783 - DNA, 1189 bp, Saccharomyces cerevisiae
caagaaaacaaagagagaaacaaatgcaagggtgatggttcaatatgtggtagaatggttaccaaggatacagagcatttcagtggtagtagaaggttggaagcaggtggagataaagaacttgaaggacacactcatgagcatatctggtgatgaagaacaagttgaagatattttacttccagtagaagttgaagaaaaagtagacgcttcttacaagttcaaaaacagaggtaaagacttagaatggatgacgaagttaagaagcaaatcctctaagatatatgacagttctatcatgtcgcttccagatggaagatggactaaagaagagcttcgctcagattctgatttctcgatagaatgtcttaactgtaagcaaaaaattataagcaaagataactgtcaagttttgaatgatatgccttcagagttttggttcgagttaatggattattggcattgccacaaacccgatgttaaggaagacaagtcttcctacacaagatttgaaacgctaaaaccatctaaaaacgaaattttaattggaagctcttattttcaaggcactcctgcgacttttgaaaatgtagcgactacaaaggaaaatgataatgttttatgcataaagtgctcagcagtgttaggccaagtaactgctggttcgctttataaactacacaaatggaaactgcagttaatacgcagtggaaacacatacaaatttcctccagaatgtgacattacaatttctttaataaacgtagttaaggcaaactcttgtcgttacgtactagtaaaatgtaaaacggaatcattgctagtttggatattttccgttgacattggagtcacattgacgggaaacaaaagcttcaagagagcgatgaagttgctttacacaaacagcgttaccacaataaatcgatgtctcaatcgacaagtcgtcgaggaattagatttccaagaaacatcgtttaatgctttttacagcgcccttcaacatactaatgcacttttaccctcaagcatgaaaaaaattggtgaatggaccattagctatacatcactaatctaattttaagaaccattctctttcaaatttgtacaaatattgtcatcaagtaataaatagcttctttttttttttaacatacagttgtagaattaacttcgttggccgaagaat

SEQ ID NO: 1784 - DNA, 1143 bp, Saccharomyces cerevisiae
tacaatgaaggtcgagaaatcatctaaaggcttggaagttttagtgaggacacaggaggatgatctagaggggttctctttcctggagattatggaccgcgtagaccctttaccattagacttcgagaattacaaaaatttcaaagagggcatttactatatgtgtacacacgatggcacaaagatcggtttcgtgttgaaatttgcgataaatgaaatggagactgtttgctcggaaatcttcgaagaaaccttccaattagatgaatctagacatgagttaaggtttaaaagtgaagattttgatcatagaaacaatctaattgaccaattggctcgtaaaatgtatttagaatcatccttgagtggtgtgaagggctggagaaacgagaaatatgccgtttgggttaataaaaaaccctatgtactggttgagcgtgcagtagcaggtgttcttggtataattacctacgggattcatattaatggttatgtgctagatccaaagtcaaaaaaagttcagttttgggttccaagaagatctaaaacgaaacaaacatggccgctaatgcttgacaacattatcgccgggggattaggttatccttatggtatctatgaaacagttttgaaagaaagcatggaggaagccaatctagaaaagagtgttattgaggataacattaaagcaactggttcagtttcctacctttactttacgggtgatatttctgtaacgaagttcaataaggaatcagattttatcgtaggggaagtacaatatgtatacgatctaaaactcagcgaagacatcattccaaaaccaaacgatggtgaagtcgagagtttcaatttattcagcctgcaagagacgattaatgctttaagaaaaaaagagttcaaaccaaattgtgcattggtaatggtagatttcttgattagacatggctacatcactccagaaaatgagcccaattatcttgaactagtaactagaatgcacagaaggttaccattccccaccttgaattaacattcaagaggttaccggttgatatctaaacaaatataaagaatttttttcatatatacacatctaggtacatactatctaagatcaaaagtactctattttgtcactaa

SEQ ID NO: 1785 - DNA, 901 bp, Saccharomyces cerevisiae
caagtaggaagatcagcgtacgatgaaaagcattttcaaggttagaggatgtgtatcgcatgctgctcaattttgccaaaaaagaaccgtggtgagtaccggcactagtaacaccgcaacagccggtgcagtgaggaaaagtttcaacagtaccgaaaccaagcctgtatttgcaacaaaatcggaagctggcaatggaagccacatgaaggaatattcaagcggcattaactctaaactcggcgggacccctttggaaacccgcagcaccgccgatgattctttgaacaatagttataagcaagtcaagggagacattgactggtatacttcatggtatggcctaggtatgaagccctttgaagcaaaagtgcaaaaggatctaatcgagcctctggaccctaaggatatagaaatcaagccagatggtttgatatacttgcctgaaattaaataccgtagaatactgaacaaagcttttggcgcaggcggttgggggctagtgccaagatcacaaacaatagtgacatccaagctggtcactagggagtacggtcttatttgccatggtcaattgatcagtgtggcaagaggcgaacaagactatttcaacgaagccggcataccaactgctacagaaggttgcaaaagtaatgcattaatgaggtgttgcaaagatctcggcgtcggttctgaattatgggaccctgttttcataaagaaattcaaagtggatcattgtactgagaagtttgtggaacatgttaccaccaagagaaagaagaaaatttggttaagaaaggacagacaagttgaatatccttataaatagtcaatatgcgaaccatataagctaattttagtaagtatatatattccaatacaatcacacacacacaca

SEQ ID NO: 1786 - DNA, 1425 bp, Saccharomyces cerevisiae
atggatgcaacatcgaggatggagcagcctgatgtctttgtaagcaaactctaccacctgctgcaggggaacgcttactcgaacataatacaatggtcgactgatggcagcaagctcgtcatttggaatccggaccagttcaccaaagtcatcctagagcgattttttggtattcacacctttgcagcattcgttaagcaattgagcaaatataacttccagaaggcgggccgcccggactgcgtggagttttccaacattcattttcaaaaagataacattaatagcctctcactggttaaagctcatcagtctgccgccactcccaatgtcgccgccgtcaataatatgaataagcagtgtacttttcactgggaccctttcaaagtgaactccattctaagcaaggccatcggcaagccttccttcgagaaattagtgaaaaatgttgacaggcttcagggcaatcttgatgagcttaagtcgacaaacgcagatagtctgcgtattataagggaaattaacgccagcttacagacaatctcctaccaccagtttcacgcctaccaaaccgctaacttccttcaagaaaattttgaagccatcaaaaaggttgtatgcccggactcttgtctacaacaccagcaacgccaaccaaagcgccccaaacgctactcgttgctgttactaataccaaacgcatccgaattgtcagaaacacctttgatgcgcttcgccggcgtgttcgaatttatgaactgctctttggatacggccactcagtggcacccgcagttgcatcccgaggcatacgaccttcttttcgtcaccgtgtcgcccaacatgcaacaagaacatctcatctacttcaagagactgagaaacctactcccaagctttcctgtaatagccattattaacagacccgtctcccctcaagataccagcattgctccctccaactactctcgctattatttccaccattttttgcagttggggttcagtgacatcctagttagccccttcaccccaacacaacttataacgctcctttccaaacatcttcgaacgtgaaaacctgcctctgagggtcattcacgacctagcataccactatatacgtgtacgattttttttttctgtgaccgcactacaccaaagtttaatgttccattggccccggaaccattcttgcaaacggcgttctttttccgctttcgggtgacacttaatttagcttcttttccctctctgacacctcttgttatctaatctgtagatccgactctttttctttttggtgtcgttcttctatgtccgtttttctgtcaacaaaaacggaaataataggtagaaattaagagccgtacgtgagtgagaggagatccgaaatgagctgacagtataactaatataagctta

SEQ ID NO: 1787 - DNA, 1240 bp, Saccharomyces cerevisiae
taactactaaaattttagaaatttaagggaaagcatctccacgagttttaagaacgatatgaccttggcacccctagacgcctccaaagttaagataactaccacacaacatgcatctaagccaaaaccgaacagtgagttagtgtttggcaagagcttcacggaccacatgttaactgcggaatggacagctgaaaaagggtggggtaccccagagattaaaccttatcaaaatctgtctttagacccttccgcggtggttttccattatgcttttgagctattcgaagggatgaaggcttacagaacggtggacaacaaaattacaatgtttcgtccagatatgaatatgaagcgcatgaataagtctgctcagagaatctgtttgccaacgttcgacccagaagagttgattaccctaattgggaaactgatccagcaagataagtgcttagttcctgaaggaaaaggttactctttatatatcaggcctacattaatcggcactacggccggtttaggggtttccacgcctgatagagccttgctatatgtcatttgctgccctgtgggtccttattacaaaactggatttaaggcggtcagactggaagccactgattatgccacaagagcttggccaggaggctgtggtgacaagaaactaggtgcaaactacgccccctgcgtcctgccacaattgcaagctgcttcaaggggttaccaacaaaatttatggctatttggtccaaataacaacattactgaagtcggcaccatgaatgcttttttcgtgtttaaagatagtaaaacgggcaagaaggaactagttactgctccactagacggtaccattttggaaggtgttactagggattccattttaaatcttgctaaagaaagactcgaaccaagtgaatggaccattagtgaacgctacttcactataggcgaagttactgagagatccaagaacggtgaactacttgaagcctttggttctggtactgctgcgattgtttctcccattaaggaaatcggctggaaaggcgaacaaattaatattccgttgttgcccggcgaacaaaccggtccattggccaaagaagttgcacaatggattaatggaatccaatatggcgagactgagcatggcaattggtcaagggttgttactgatttgaactgaagtatcgctattgctacgtaaagtaattaaaagttaaaaagaataaaacta

SEQ ID NO: 1788 - DNA, 1359 bp, Saccharomyces cerevisiae
gactcgctcgctatttgttctttttcaacagaaagcatagacttattattgtgactaaggatcagttatcgtttgcctgctcgggacaattaaaacgaatatctctaagttggatattttatactgtgaggcagtttttgtactgagttattgagtattagacaaaatttcgagtccttattttactcttcacctaggtccggcttcttagttttgtgttatttatcagggatatattttttttttgggagctcatcgtagtaagaagtaaaagagatgactgccagcacatcagttgcggtgggttgtgcggtgggtatacccgtcggtgtaggtattataatagcagtatgtttctggtttaacctacaaaaaagatacaagagggaggaacaagacgatagagaattggaaagggctatttatgatgaaagtggtttcgtgtcctttgacaattttggacccttaagagacagtaaagatgaagcagcactagccagctccgagctaaaaaatcctgatcacacttctggttcatcggaaggatctgctcatccagaagaaaaagatggaaaatcgcgagatcaagagaaaccgttagggaaaaagaatagtaaatactatgtgccagcataccgtaggaaaataaatttacttcaagtacgaaataataactacggcaataatgccaggcagaagtccgttgtggatttaccaagtataaataacagctccaatgtttccttatcatcttcccaacggcatataacaaagagacagatcagcgtttatgatcagatggtccctgttatttctgatgaaggaccaaactttttcgcagatccttccagtgatactaatactagcaatgaccaaaacaaagcttcgatgatagaacttaaacataatactcgccaatctagtaatgaaaatctgataagaaatttgcagaatcaggactttggttcgtattacccaaggagagcttcatcctcgtttttaaatggtaacatttcaaacgcgtccttccatacaaggaattcctctataacatcggtaaataagcgcgatgccctagaggatgtgtttgcaacacccaaaagtgcggctcaatcacagttaccaaacacttttgataaagataacgaaggaatggatgctgaccactcggtaaaggatagcaggtctgcaataacagataaagataaggatttatacaaattacagaataactatgatgtgggcaatatcggggaaattgctgaggaagatcaatacgaaaacgaatttaccaactactcacagagtaagagagagttcatagaaagtctaaggcctaaatagtactgttgatatact

SEQ ID NO: 1789 - DNA, 557 bp, Saccharomyces cerevisiae
agccaccaaaggttcaaaatgcaaatcttcgttaagactttgactggtaagaccatcactttggaagttgaatcttctgacaccattgacaatgtcaagtccaagatccaagacaaggaaggtatcccacctgaccaacaaagattgatctttgctggtaagcaattggaagacggtagaactctatctgactacaacatccaaaaggaatccactttacatttggtcttgagattaagaggtggtatcattgaaccatctttgaaagccttggcttccaaatacaactgtgacaaatctgtttgtcgtaaatgttacgccagattaccaccaagagctaccaactgtagaaagagaaagtgtggtcacaccaaccaattgcgtccaaagaagaagttgaaataatcgatttattacgatctccacaaatccaaagtttgtatacatcacgatttttttactacatatatatttccttttctattctatttgtaaatgggaggaaatcttaatatggacctctcttcacaaattgttctataatacaatatatatca

SEQ ID NO: 1790 - DNA, 1369 bp, Saccharomyces cerevisiae
caagtcgcagtacactaagaatacatagcaatggcttccaagaaaattaaagttgacgaagtgccaaaattaagtgttaaggagaaggagattgaagagaaatcttcttcttcttcttcctcctcctcctcctcctcctcctcctcttcttcttcatcttcctcgtccagttctagcggcgaatcttcaagcagcagcagcagcagcagcagcagcagcagcagtgacagcagtgacagcagtgactctgaatctagctcatcatcatcttcttcttctagctcaagctcaagttccagtgactctgaatcttctagtgaatccgactctagctccagtggatcttcttcttcctctagctctagttctgacgaatcttcttcggaatccgaatcagaagatgaaaccaagaaaagagcaagagaatcagacaacgaagatgctaaggagactaaaaaggctaaaactgaaccagaaagctcttcctcatcggagtcaagctctagcgggtcatcgtcatcttcagaatcagaatcaggttcggaatctgattctgactcaagttctagctcaagtagttcttctgattccgaatcagattctgaatcagattctcaatcaagttctagctccagctctagcgactcttcgtctgactccgactccagctccagcgactcttcatctgactccgactctagctccagctctagcagctcttcctcggattcagattcggattccgactcaagctcggactcagactcttcaggctcgtccgattcttcaagctcgtctgattcaagttccgacgaatctacatcttctgattcctccgattcggattccgactcagactctggttctagctctgaattggaaacaaaagaagcaactgcagacgaatccaaggccgaagaaacgcctgcctcatctaacgaatcaactccatctgcttccagttcatcaagcgccaataaattgaacattcctgctggaaccgacgagatcaaagagggccaaagaaagcatttttccagagtagatagatcgaagattaatttcgaagcttgggagttgacagacaacacctacaaaggcgcggctggaacatggggtgaaaaggcaaatgaaaaattaggtagagtaagaggtaaagatttcacgaagaacaaaaataaaatgaagagaggttcttacagaggtggatccattacattagaaagtggttcatacaaattccaagattaaaagaataggaaacataaaacaaaactcgttgtctggagtaatctccttttaagttgtagagtaaacaaattgtaattatagcaacgatagaaaaataatagtaataaagacaataata

SEQ ID NO: 1791 - DNA, 2851 bp, Saccharomyces cerevisiae
aaaaaaattagcgctgtaataattattgaagggagtacaggtatatgtaataaaagtctgaatgagcagcaaaatatcagatcttacatctacacaaaataagcccctccttgttacgcaacaactaatcgaaaaatattacgaacagatcctgggcacttcccagaacataattcctattttaaatccgaagaacaagtttattaggcccagtaaggataattcagatgttgaaagggtggaggaggatgctggtaaaagactgcaaactggcaagaacaaaactacgaacaaagtaaatttcaacctggatactggaaacgaggataaacttgacgatgaccaagagacagtaacagaaaatgaaaataatgatatcgagatggttgagacagacgaaggcgaagatgaaaggcaagggtcatctttagccagtaaatgcaaatcatttctttacaacgtttttgtgggaaactatgaaagagacattcttattgacaaagtctgttcacaaaagcaacatgcgatgtcatttgaagaatggtgttctgcgggcgccagattggatgacctcactgggaaaacagaatggaagcagaaattggaaagtcccttgtatgattacaagctaataaaagatttaacatctagaatgcgtgaggagcgcttgaataggaattacgctcaattgttgtacatcattaggacgaattgggtacgaaacctgggaaatatggggaatgtaaacctatataggcactcccatgtaggcaccaaatatttaattgacgagtatatgatggagtctaggttagcgctagaatctttaatggagtctgatcttgatgatagttaccttttgggtatactgcaacaaacgagaagaaatattggtcgtaccgctttagttctcagtgggggtggaacttttggtcttttccacatcggtgtccttggtactctatttgaattggatttattacccagagtgattagtggtagcagtgctggtgcaattgtagcaagcatattatctgtccatcacaaagaagaaattccggttttactaaatcatattttggataaagaattcaacattttcaaagacgataaacagaaaagtgaaagcgagaatttgttaataaaaatatctaggttcttcaaaaacggtacgtggtttgataacaagcatctggtaaatacaatgatagaatttttgggagatttgacatttagggaagcttacaatagaacgggtaaaattttgaatataaccgtttcgccggcatctttatttgaacaaccgcgcttgctgaataatttgactgcaccaaacgtcctgatttggtccgccgtatgtgcatcatgttcactaccgggaattttcccctcgagcccactttacgaaaaagatccaaaaacgggagaaaggaaaccatggactggtagtagttcggtcaaatttgtcgatggttctgtggacaatgacttgcccatttctcgtctttctgaaatgtttaatgtagaccatattatcgcatgccaggtgaatattcacgtatttccctttttgaaactatcactatcctgtgttggcggggaaattgaggacgaatttagtgcaagattaaagcaaaacttatcaagtatatacaattttatggccaatgaagctattcatattctagaaattggaagtgagatgggaattgccaaaaacgcgcttacaaaactgagatcggtattatctcaacaatattctggtgacatcactattttgcccgacatgtgtatgctttttagaataaaggagctgttgtcaaacccaacaaaagaatttttattaagggaaatcaccaatggtgcaaaagctacgtggcccaaggtttccattattcaaaatcactgtggccaggaatttgctctggataaggcgatttcttatatcaaaggtaggatgattgtcacctcctctttaaaaacccccttccaatttgctgattcagtcattggattaattaaagctccagagcaaacgtcagatgagtccaaaaacccagaaaattcaacattgctaactaggactccaaccaagggtgacaatcatatttccaatgttttagatgacaacttattagaatcagaatcgacaaactctttgctattgttacgtgagaatgcaagcacatatgggcggtcaccttccgggtttagaccgcggtattccattacgtccgcttctctcaatccgcgtcaccaaagaaggaaatcagatactatttcaacttcaaggcgaccagccaaatccttttcattttcagttgcttctcccacatcaaggatgttgaggcaatccagcaaaatcaatggacacccaccgccaattctgcagaaaaaaacaagtatgggccggctaatgtttcctatggatgccaagacctatgacccggaaagccatgaacttatcccacattctgccagcattgaaacacctgccatggtagacaagaaattgcattttggccgaaagagtagatacttgaggcatatgaacaaaaaatgggtcagcagtagcaacatattatacacagattcggataaagaagaccatcctacattgagactgataagtaacttcgattcagacgcaatgattcatagtgatttagcgggcaatttcaggcgtcatagcattgatggaagacccccttctcaagctacaaagagctcaccgtttcgatcgaggccttcttcttcaacgcagcacaaaagcaccaccagttttactcaataagaaaacacgggcttgcttatatatcctctagatattctttttcatctatgtatttat

SEQ ID NO: 1792 - DNA, 1078 bp, Saccharomyces cerevisiae
aaagatattggttacacaaatgagtcagtcttacgaagcaggaaatgccaatatgggccaaggggaggatgatgaatttgatggctatttcgaagactttgacaacgatatcatgccaaatagtaataatggacaaagggttggtactaatgctggattgtcattcaatgacgaagtaaatgttaatgatgatgattttttagacatttataatatgtcccctagagagagattgatgcataatatcaggaagaatgttcaaaaattacagttttatttttattcactacgcttatggcaacagattatcattgtcctcctcggcataatgctaatgataatgggtatattgttgctcgtcttccataatgcgattttacataaagttgttgttacttcgaacgatttgagagaaaagatgtcaacacattttatattaatggttctgatattctttgtcgcatttcctcctatgattggctactccttattatccaccactactgggttgatctatggtgtcagttttgagggatgggttacgctagctttgggatctgtaacaggttccattgcctctttcgttgtgttcaagacgatcttgcattcaagagcagaaaagcttgtgcatttgaatagaagatttgaagcattggcttcaattttacaagaaaacaatagctattggattctagctctactgagattatgtcccttcccatattctttgactaatggtgccatagctggtgtttacggtatctcggtacgcaacttttccattgccaacataataaccacaccaaagctgttcatctatctatttataggttctcgtgtaaagagtctcgcagaatctgaatctacaggatctagggtatttgacttggtaagcattattatcacattattaatcctaagtcttacagcatggctcttatacttcaagactaagaagagatatttagaactacaaaaccgcgaccgtcaagtgtccactgatcaactacctgaattgtcttttgaggtctaatcctccgtatacgtttatatatgtttagataagttggttttatat

SEQ ID NO: 1793 - DNA, 1156 bp, Saccharomyces cerevisiae
tatggaaagataaaatacaagaaatgttacgcaacatcatcaggttcaaaggatttggaaaagggaccagtggaggatttttaaaacctgtatcatttcgtgttcagttaacgcgatgttaccgctatgacaatggtccttcatatcgtcgatttaataatggagagtattcccaaaaatcatcgtttaaaagcattcttctcgataagtcatcaagaaaatacttagctttattatttggtggatgctctctcttttattatacacatttggataaagcaccggtaagcgataggtccaggttcatctgggtatcgcgtccattagagttaactatcggaaattacacatacaaatcaatttggagacaaacgcagcaggaaatattacctccacagcatccgctgtccatcaaaattgagaatattttcatgaaaattgtcgaagctgcttataaggaccctagtgtagacaactcactactggacggaatcaagtgggaaattcatgtggtcaatgatccaactgcttcaccaaatgcattcgttttaccagggggtaaggtctttatattcagctctattttacctatttgtgctaatgatgatgggattgccactgttttagcacacgaatttgctcatcagctagcaagacacacagccgaaaatttgtcgaaggctcctatatattctcttttgggtttggtgttatatactgttactggagctcatgctatcaacaatatactattggatgggtttttgcgaatgccagcatcaagacagatggaaaccgaagctgattacattggcctgatgataatgtcaagggcatgttttcaaccacaggagtcaataaaagtgtgggaaagaatggcaaattttgaaaagcaaatgaatagagggggtgttgtgaatatggagtttctaagtacacatccagcaagcactcgtagaatagagaatatgtcgaaatggttgccaaaagctaatgaaatttatgaacaatctgattgtagcagtatgggtaactattataaaagttttttctcaatgtaagcactccacgagttatgctcttttcttttgtacccaataaataaccctttgttttatgcatgcatataactatataataacatatatgaatattt

SEQ ID NO: 1794 - DNA, 631 bp, Saccharomyces cerevisiae
gcacaagaatgattggcagaggtgtgtgctgcagatcgttccacactgctggatctgcctggaagcaatttggatttcccaaaacacaagtgacaacgatttacaacaagactaagagcgcatctaactataaagggtatttaaagcacagagatgctccaggaatgtactatcaaccatcagaatccatcgcaaccggatctgttaacagtgagaccattccacgtagctttatggcagccagtgaccctcgtagagggcttgacatgcctgttcaaagcactaaagcgaagcagtgtccaaatgttctcgtaggtaagagcacagtgaacggcaaaacctatcatctgggacctcaagaaattgatgagatccggaagttacgtcttgacaatcctcaaaagtatacacgcaaatttttggctgcaaaatatggcatttcgccattatttgtatccatggtctcgaaacctagtgaacaacatgtacaaattatggaaagtagattgcaagaaatccaatcacgctggaaggagaagaggcgtatagccagagaggaccgtaagcgtagaaaactcctgtggtaccaggcgtgaatgctatataaatataataacaatcgtgtaaatac

SEQ ID NO: 1795 - DNA, 1959 bp, Saccharomyces cerevisiae
cttcgacaactattgactatcgagatggcttacagtgactacagcgatggagcagacgacatgccggactttcacgacgaaggtgaatttgatgattatttgaatgacgatgaatatgatctaatgaacgaggtatttcctactctaaaggcgcagttacaggattaccaaggctgggataatctttcacttaagctagctttgtttgacaacaatttcgatttggaaagcacgctggcggaattgaagaaaactttgaagaagaagaagacaccaaagaagccaattgctgctgctaatgggagtgcgaatgttactcaaaaactggcaaacatctcaatttcgcaacaaaggccaaatgatcggcttccagactggcttgacgaggaagaaagtgagggtgaacgcaatggtgaggaagccaatgatgaaaagacagttcaaagatactataagactacggtgccaacgaaaccaaagaaacctcatgatatttctgcatttgttaaatctgccttacctcacttaagttttgttgttcttggtcatgttgatgcgggaaaatcaactctaatgggcagactactttatgatctgaacattgtcaaccaatcccaactgagaaagctacaaagagagagtgaaactatgggtaagtcatccttcaaatttgcatggattatggatcagacaaatgaagagcgcgaacgtggtgtaacagtgtcaatttgtacatcgcatttctctacccatagggcaaattttactattgtggatgcgccaggccatagagattttgttccaaacgctataatggggatatcacaagcagatatggctatactttgtgtagactgtagcaccaatgctttcgaatcaggatttgacttggatgggcaaacaaaggagcatatgctactggcatctagtcttggaattcacaatctgattattgctatgaataagatggataatgttgactggtcccaacaaaggtttgaagagattaaatcgaaattgttgccatatctggttgatattgggttttttgaggataatattaattgggtacctatcagtggcttttccggagaaggtgtttataaaattgaatatacagatgaagtgagacaatggtacaatggtcctaacttaatgtctactttggaaaatgcggcgttcaagatttcaaaggagaatgaaggaattaacaaagatgatccgtttttgttttctgtgttggagatcatcccatcgaaaaaaacaagtaacgatttagcactagtttcaggaaaattggaatcaggttctattcaacctggtgaatctttgacaatatatccgtcggaacagagttgtattgtggataaaattcaggttggttctcaacagggccaatcaacgaatcacgaagagacagatgttgccattaagggtgattttgtcactttgaaattgcgcaaagcctatccagaagatattcaaaatggtgatttggcagcatcagttgattattcgtccattcattcagcacagtgttttgttctggaattgaccacctttgacatgaaccgacctttgctgccaggaacaccgtttattcttttcatcggagtcaaggagcaacctgctcgaatcaaaagattgatttcatttatagacaagggcaatactgcaagcaagaaaaagattagacatctaggctctaaacaacgagcatttgtagaaatagaactaattgaagtaaagaggtggattcctttattaactgcccatgaaaatgaccgtttgggaagagttgttcttagaaaggacggtagaaccattgcggcaggtaaaatatccgaaataactcagtagaagggtgaaaatagatgataagaattttatacgcttctgtatgtaattttttcaatttctacacattaatagcgatccttttttaatatttgaatttag

SEQ ID NO: 1796 - DNA, 1139 bp, Saccharomyces cerevisiae
gttatcatatccaaaagcgcaggagaacactggcagaaaaaatgattagaaccgtaaaacccaagaatgcaagagccaagagagctttggtaaagagggaagctaagttggtagagaatgtcaagcaagcgctattcattccagggcaaagctgtaacaagaatctgcacgatattatggtagatttgagtgccttgaagaagccagatatgaagaggttcaatcgtaagaatgatattcatcctttcgaagacatgtcgccactagagttctttagtgaaaagaatgactgttcattgatggtgctgatgacaagttccaaaaagcgtaaaaacaacatgacctttatacgtacatttggctacaaaatatatgatatgattgaactaatggttgcagataatttcaagttgttatctgattttaagaaattaacatttactgtagggttgaagcctatgtttacattccaaggtgctgcatttgatacacatcccgtatacaagcaaattaaatctttgtttttagatttctttagaggcgaatctactgatttacaggatgttgcgggattacaacatgtcatttccatgaccattcaaggtgacttccaagatggtgagccattgccgaacgttctattccgtgtttacaaattaaaaagttataaaagcgaccaaggtggtaagagattaccacgtattgaattggtggagattgggccacgtctagatttcaaaatcggcagaattcatactccaagtccagatatggtcactgaagctcacaagaagccaaaacaattagaaatgaagacaaagaagaatgtagaattagatatcatgggtgataaattgggtagaatccatatgggcaaacaagatttgggtaaactacaaacaagaaagatgaagggtttgaaatccaaattcgaccaaggaactgaagaaggtgatggagaggtagatgaagactacgaagatgaagcgtcgtattcggatgatggacaagaatacgaagaagagttcgtcagtgccactgatattgagccctctgctaaaagacagaagaaataagacccataaactttgtatattatatgataatctaagagaggagaattctatatgtatgtagta

SEQ ID NO: 1797 - DNA, 2658 bp, Saccharomyces cerevisiae
ctggaaggttttcaacgatgttcacatttatacccatcacccatcctacatcggatacaaagcacccattgctgctagtccagtctgcacatggggaaaagtatttcttcggtaaaattggtgaaggatcccaaaggagtctgactgaaaataagatcaggatatccaaattgaaggatattttccttactggtgaattaaactggtcagatataggtggattacctggaatgattttgactattgctgatcaagggaaaagtaatcttgttttgcattacggcaatgacattttgaattacatagtttccacttggagatacttcgtctttagattcggaatagacttgaacgatcacattatgaaagacaaggaagtatataaagataagataatagctgttaaatcctttaatgttctgaaaaatgggggggaagacaggttaggcgtcttcgatagttttcaaaaaggtgtattacgttccatagtagcaaaaatgttccccaaacatgcacccaccgataggtacgatccttctagtgatccgcacttgaatgtagagttgcctgacttagacgccaaagtggaagtttctacgaattacgagatttcattcagtccagtgaggggtaaatttaaagtggaggaagctattaaactaggtgttccgaagggtcccttatttgcaaagttaaccaagggccaaacaattactttggataacggtattgttgtaactccggaacaggtattggagaatgaacgtcattttgccaaagtattgatcctggatatcccagatgacctatatttgaacgctttcgtagaaaaattcaaggattatgattgtgctgagcttggcatggtgtattattttcttggtgatgaggttaccattaatgataatctattcgcgttcattgacatatttgagaaaaacaattatggtaaagtaaatcatatgatatcccacaataaaatttctccaaacacgatatcatttttcggttctgcattgaccacattgaaattaaaggcactacaagtaaataattacaatttaccaaaaacagatcgtgtgttttccaaggacttctacgacagattcgatacaccactcagcagaggtacatctatgtgtaaatcccaggaagagcctttgaatacaataatagagaaggataacattcatattttttcacaaaacaagacagtaactttcgaaccatttcggatgaacgaagaaccgatgaaatgcaacatcaacggtgaagtggcggatttctcgtggcaagaaattttcgaagaacatgtaaaaccattagaatttcccttagctgatgtcgatacagttatcaataatcaactacacgtggataactttaacaattcagcagaaaagaagaaacacgttgaaattatcaccttaggaaccggtagtgcattgccttctaaatatagaaacgttgtctccacacttgttaaagttccttttactgacgccgatggaaataccataaatagaaacattatgctagatgctggtgaaaatactttaggtaccatacacaggatgttttctcagctagcagtcaagtcaatatttcaggatttgaaaatgatatatctgagtcacttgcatgcagaccaccatttgggaataatcagcgtgctaaatgaatggtacaaatataacaaggatgatgaaacgagttatatatatgtggttactccatggcaatatcacaaatttgttaatgaatggttagttctagaaaataaagagattttaaagagaatcaaatacataagttgtgagcatttcatcaatgattcgtttgtaagaatgcagacacaatctgttcctttggcagagttcaatgaaatattgaaagaaaatagcaatcaagaatcaaacagaaaactggaactggatagagattcttcatatagggatgttgacttgatcagacaaatgtatgaggatttatcgatagaatattttcaaacttgcagagctatacattgtgactgggcatattcgaactcaattaccttccgaatggacgaaaacaatgagcataatacattcaaggtttcatattcaggcgatacaagacctaacatcgagaaattttccctcgaaataggctataattcagatctattaattcacgaagctacactagaaaatcagctactggaggatgccgtgaagaaaaaacactgcactattaatgaagcaatcggtgtttcgaacaaaatgaatgctaggaagttgatcttaacacacttttcccagagatatcccaaattgccccaattagacaataatattgatgtgatggcgagagaattttgttttgctttcgacagtatgatcgttgattatgagaaaattggtgaacagcagcgtatttttccactgctgaataaggcatttgttgaagaaaaggaagaagaagaagatgttgatgacgttgaaagcgtacaagatttggaagtcaaacttaagaaacacaagaaaaattagtataattcatcttaacttcttatattgttgctttttcagtagtaaattatcttctttaattacgttattatgtacatattcattggcttatgtgctcatctggtacaaagtcttgccataattg

SEQ ID NO: 1798 - DNA, 1341 bp, Saccharomyces cerevisiae
ctttcatcacatttgatctaagcatatacactgtaagtgaaggtatcgatgtcacaatacaaaactggtttacttttaatacatccggcggtgactacaacgccagagctagtagagaacactaaggctcaagctgcatcaaagaaagtcaagttcgtggaccagtttttaatcaataaactaaatgatgggtccataactttggaaaacgcaaaatatgaaacagtacactatttgacgccagaagcccagactgatattaagtttccgaaaaagttaatttctgtcttagctgactcattgaaaccaaacggctcactaattggtttaagtgatatttataaagtagatgcattaatcaatgggtttgaaataattaacgaaccagattattgctggattaaaatggattcctctaaactaaaccaaactgtttctataccactgaaaaaaaagaaaacgaacaatactaagctacagagtggtagtaagctaccaacttttaaaaaagctagttcttcaacctctaatttaccctcattcaaaaaagcagatcacagtaggcaacctatagttaaggaaacagacagcttcaaaccacctagtttcaaaatgaccactgaaccaaaagtctaccgagtcgtagacgacctgattgaggatagcgatgatgatgatttctctagtgactcttccaaagcccaatattttgatcaagtggataccagcgatgattccattgaagaagaagaattaatcgacgaggatggttctggtaagtcaatgattactatgattacatgcggtaaatccaaaactaagaagaagaaggcttgtaaagattgcacctgtggtatgaaagaacaggaagaaaatgaaataaacgatataagatctcaacaagataaagttgtcaaatttacagaagacgagttgaccgagattgatttcactatcgatgggaagaaagttggcggctgtggttcttgttctctaggggatgcctttagatgtagtggttgtccctacttgggtcttcctgctttcaagcctggtcaacctatcaatttggacagcatttcagatgacttgtaaaccctgcacattcgtttcagtaaatgacgtcaattggtctactttggtgaaggtgaatttttttagatgcattgatcgattgactttggtaggttactaattttaccaaaaagagttggtagtttttatttttttaaatagaagaaaacaggtactcattataccgtgattaccaatttcccaacccattatttaacccgttatgtatattgcatatattttgtaaaagcgtttaagctattaata

SEQ ID NO: 1799 - DNA, 769 bp, Saccharomyces cerevisiae
taaagcttcaagtgttcattgataaccaaaactgggtcaaaaatggtttctaccacgcaatcgaggtctttgaaggccatgggagaagagatctggaaaaataaaacagaaaaaattaatacagaattatttacgctaacatatgggtccatagtggcacaattgtgccaagattatgaacgggactttaacaaagtgaatgatcatttgtatagcatgggatataatattgggtgtagacttattgaggatttcttggctagaacggcattgccacgctgtgagaatttagtgaagacaagcgaagtactaagtaagtgtgcattcaaaatatttttaaacatcacacccaacataacgaactggtcgcataacaaggatactttttcattgattttggatgaaaacccattggctgactttgtggagttacccatggacgctatgaaatcgctctggtattccaatatattgtgtggtgttttgaaagggtcacttgaaatggtgcagctggattgtgatgtctggtttgtgtcggatatcttgagaggagactctcagacggagatcaaggttaagttaaatagaattttaaaagacgaaataccgatcggcgaagattagtggacatgtaagcttttttttttcgtgatttttgttattattggtgtcgttatttaggtatacattattttcctacgtagaaatgttatccttaatgtttttgttcagtagttactttcatattatattatttacaaacattgtc

SEQ ID NO: 1800 - DNA, 1210 bp, Saccharomyces cerevisiae
acacacgtatatctacaattatgactactgctgttaggcttttaccttcactgggcagaaccgcccataagaggtctctctacctgttctccgctgctgctgctgctgctgctgctgcaacttttgcttactcgcaatcccaaaagagatcatcgtcttctcccgggggtggtagtaaccacggatggaacaactgggggaaggcagctgctttggcttccactacaccgctcgttcatgtcgcctctgtcgaaaaagggaggtcatacgaggacttccaaaaggtgtacaatgcgattgcactcaagctgagggaagatgacgaatatgacaactatataggctatgggcccgtattagtccgtcttgcttggcacacttcagggacctgggacaagcacgacaatacaggcgggtcatacggtggtacatacagattcaaaaaggagtttaacgatccatccaatgcgggcttgcagaatggcttcaagttcctggagcccattcacaaagagtttccctggatctcctcgggtgatctgttcagtctagggggtgtcactgccgtgcaggaaatgcagggtcccaagattccatggagatgtggtagagtcgacacgccagaggatactacccctgacaacgggagactgcctgacgctgataaagacgctgactatgtcagaacattttttcaaagacttaatatgaatgacagagaagtagttgctcttatgggggctcacgctctgggcaagacccacttgaagaactctggatacgaagggccatggggagccgctaacaacgtctttaccaatgagttttacttgaacttgctgaatgaagactggaaattggaaaagaacgacgcgaacaacgaacagtgggactctaagagcggctacatgatgctgcccactgattattctttgattcaggatcccaagtacttaagcattgtgaaagaatacgctaatgaccaggacaagttcttcaaggatttttccaaagcttttgaaaaactgttggagaacggtatcactttccctaaagacgcgcccagtccatttattttcaagactttagaggaacaaggtttataggtcactgaggaaagatattatttattggttatatttcgtattatttatctatttattatatttattattatttaggcttatgcttttttctgaatatcatctaa

SEQ ID NO: 1801 - DNA, 702 bp, Saccharomyces cerevisiae
ccgcctcttcaaaatgtttaccagtgccattagattgtcatcgcaaagactgttcgctagtcaaccttctgtcaccgctgcggcattgcgctcgactgctacaaccttacccttaagatcatattctcagcccgcatcccttcaagactccagtatcttgacatggtctgattttttcaaattgaggaaacagcagcgtagaatcaatgttggttcttcgctgtttactgctcttttgggctgtaacgtttcatgggcttacctttccacaatggaaatagacccgactcaaatgctattcggattcgacccattaactgtaatttcagctgggataatagcctctggtgcactaggctacttgttgggtccgatagttggttcgcaagttttcaaactttcccataaccaacaattggcacagttcaacaacaaaaataaagagtttctaaaacatatcatcaataacagggtcgatgcctcttctcaaagtttcagtaatcctgttccagattattacggtgaaaagataggttccttaaaggaatataagcaatggttaagagattgtcacgcttacgcaaagaaagccaaagaatttttgtgattgaacgtgtgatcttttccttcttctcagactctgtatatatacatatatgaataaagtagtgcgatatataacgctactaaataattcgaatg

SEQ ID NO: 1802 - DNA, 1313 bp, Saccharomyces cerevisiae
tattgacgaagactttcgtgagaagtacaaagtgaagaagtaaaaaactcaaccgaaatatcagttaatattatgaatacttcagaactgtcaatagctgaggaaatcgactacgaagctcttccatcacatgctccgctacattcccagttactggcaggagcatttgcaggtataatggagcattctttgatgtttccaatagatgctctgaaaacccgagtgcaggctgcaggattgaataaagctgcctctacagggatgatatctcagatatccaaaatatctacaatggaaggttcgatggctttatggaagggtgttcaatcggtaatactgggggcagggcctgcgcatgcagtatattttggtacatacgagttttgcaaagctcgcctgataagccctgaagatatgcaaactcatcaaccaatgaagaccgcactgagtggtaccattgctaccattgctgcggatgcattgatgaacccctttgacaccgttaaacaaagactacaattggatactaatctaagagtttggaatgttactaagcaaatatatcaaaatgaaggctttgcagcattttactactcctatcccacaacattggccatgaatatcccatttgcagcgttcaatttcatgatatatgaatctgccagcaaattcttcaacccacaaaattcctacaatccattgattcattgtctttgcggtgggataagtggtgcaacatgtgctgcgttaactacaccgttggattgcataaagactgtattacaggttagaggcagcgaaactgtctccatcgaaataatgaaggatgcgaacacttttggtagagcctcaagagccatactggaggttcatggttggaaggggttttggcgaggtttgaaaccaaggatagtggctaatataccagccactgccatttcttggactgcatatgaatgtgctaagcattttttaatgaaaaattgatgttttttccccttttcgaggtcaactttttttgacaacttataaaaggcaaggccaaaatgcattggtggtggtgctgttgctgctgctgccacttttgttgctgcaaaagacaagtccaatggtaataatagaaaaataataataatggtgatatcgtccaactcccactctgcatatatagccaatcctccggcaaaaaattacagtagcatttatttcattttattagaataagcatccaagttacaataattgaaaaaaaagcattgcttgtagatgttgttttattttgtatataaccgaaagcgcagtaactatgtata

SEQ ID NO: 1803 - DNA, 452 bp, Saccharomyces cerevisiae
acgcaataaatgtcgttttggaaaacattgcagagacagccacgtaccatctcgttgtttaccaatgacatcgcgtccaatatcaagtcgcagaaatgcctgcagttgctgaagggagacgtctctcatcgattcgacgtggaaatcgccaaccgctttcccacgtgggaccagctgcaatacatgagaacttcgtgcccgcaaggcccagtttcgttgcaaaggcagattccaaagctggattcagtgctcaaatacaagcacacagacccgacgttcgggatggacctgcagaagtgtgtccagaggggactttggaatccaaaggaggcgctttgggtcgactgggaaaacaagttggtgggaaatgagcccgcagacattgacaagtacatcattcagcgcaaataacacctatataccactatattgaacacatacatatttttata

SEQ ID NO: 1804 - DNA, 1377 bp, Saccharomyces cerevisiae
caaagcgcaagatcatgtcagaccctatcagaacgaaacccaagtcgtcgatgcaaatcgacaacgcccctacgcctcacaataccccagcatcggttctgaatccgagctatttgaaaaacggcaacccagttagggcccaggcacaggagcaggatgacaagatcggcaccatcaacgaggaggacatcttggctaaccaacccctgttgttacagtccatccaggacagacttggctcgctggtgggccaggacagcgggtatgtggggggtcttcccaagaacgttaaggaaaagctgctgagcttgaagactttacaaagcgagctattcgaagttgaaaaggaatttcaggtggagatgtttgagctagagaacaagtttctgcagaagtacaagcccatttgggagcagcggtccaggatcatttcaggacaagagcaacccaagccggaacagatcgcaaagggccaagagattgtggagtcactcaatgagacggagttgttggtggacgaagaagagaaggcccaaaatgattccgaggaggaacaggtgaagggaattccctcattctggctaaccgcattagagaacttgcccatcgtttgcgacacgatcactgaccgcgatgcggaagttctggagtacctgcaagatattggtctggaatacttgacggatggtagacccggtttcaagctgttgttcagatttgattcttccgccaacccattcttcaccaacgacattctgtgcaagacctacttctaccagaaggagctcggttactccggggactttatctacgaccacgcagaaggctgcgagatcagttggaaggacaacgcccacaacgtcactgtggacctagaaatgcgcaagcagagaaacaagaccaccaagcaggtgaggaccatcgagaagatcactcccatagaatcctttttcaacttcttcgaccctcccaagatccaaaacgaagaccaagacgaggagttggaggaagacctcgaggaacgtctagctttagactactccatcggggaacaacttaaggacaagctaattcctagagccgtggactggtttaccggcgcagccttggaattcgagttcgaggaggacgaagaagaagcggacgaggacgaagacgaagaagaagatgatgatcacggcttggaggatgacgacggggaatctgccgaagagcaagacgattttgctggcaggccggaacaggctcctgaatgcaagcagtcataatcccaacgcacttcgcaagagtggtcataaccgtattcatatatttatatacatatgtatacatacatatatagatatatatatgtatatacatgtaagtgtgtaagct

SEQ ID NO: 1805 - DNA, 1040 bp, Saccharomyces cerevisiae
atgtctgaatcatctatttcttcttctaaaccatctgtggaattgccacaagcaacctggtcgcatctgcaaagatacccagctttatccaagtttattaaatatgcggaatctctgccacctgtggagagattgatttccttcaacctcgttgttttgggatctgtgaaccagtgggtttccgaatcgtccagctctcctcgtctggtgaagcaagttgttgctgctgggaaggaaggggccttcaagttggacgagttagttaacctcttggtgttcaaggagggtgtcgacggcttgctgtacaattggaaatcacattccaacacgccagggatctggctggtgtggttcttcgtcgactacgtcgccaacatttctaatactctgttgagggagttcctgatcaagccattgcacttgcaaggttctaccgcatcgaaggagatcggctcttccggtgaggagaacaaggtcactgatgcttcttctttgccccacgtggcagagttgtcttcaacgaccagaggtatgtcgcaggagatccagtccaaggtcaagtcgaactatatcgacccaaccaaggacctggctaaagaaaagtacgacgccatagtgaagcccacaactgacaagttgcagtctgtgtacatcgacccaacaaagactaagcttaacgaaacctaccaacgcttcaccactgtctatgaaaacaatctaagtaaatctgaaagcgtccctaaagccattgtatccaccgggttggacttgggcaatgccaccattgagaagctaaaggcctcaagagaagaccaaaccaattctaagcccgcggctgtgtcgaccaattagtaatttggttttgcgctaatcgtgcgcctgattttttttcctgccactcttatatagttatttgttattattctattatttcatctattgtttgctagctattatgtacgttgctgtttgagcactatatacaattgaataccaaagaaaaaattataaaaacgaaaaaaaaaaaaaaaaaaaaaaat

SEQ ID NO: 1806 - DNA, 621 bp, Saccharomyces cerevisiae
agcatgtcaaacagtcatcatacatcccagggaagaagaaacaaactttcagtgtgggttaaaaaaataataaacaccactaccacaactaacgcatcggtctcgagcagtaaaccaagacgcggcactagggctggccccacaagagttaagcgtgctgagttggatccggatggaacaaccatcagttcgtcgttgcgaccattggttgatcgaaattcgttgcattcgagcgaatccgatgacgaaggagaccgtcgagtggcatgggatgaaccaccaacaggcaaagtaagacagcagcagcagcaacagcagcaacaacaaaacgacaacgcaagtgttattccgctagtatcgttttgttcctcgtcagtgaagtcgtctactttctcggacattcattcaatacagtctacgaggcccacaatattctctaacaggacgtttgagacgaattctagcgttctggccatcccaccacagagtatattggatcgatcaagaaccctcccgccgtcgaacgcaagtaacactaccacaagaagaccgtgaattggctacctaagatgaacgtcctatattgtattatttgtgtatgtatgtatgtgcgtgcctatg

SEQ ID NO: 1807 - DNA, 980 bp, Saccharomyces cerevisiae
gaaacacctacacttaattgcaagcaacaatgccttcgctaacccccagatgtatcattgtcagacacggtcaaactgaatggtccaagtcaggccagtatactggtttgacagatctaccgttaacgccctacggtgagggccaaatgttgaggaccggtgagagtgttttccgcaataatcagtttttgaatccagacaacatcacttatatcttcacctctccacgtttgcgtgccaggcaaactgtggatttggttttgaaaccattaagcgacgagcaaagagctaagatccgtgtggtggtagacgacgacttgcgagagtgggagtacggtgactacgagggaatgctgactcgagaaatcattgaattgagaaagtcacgcggtttggacaaggagaggccatggaatatctggagagatgggtgtgagaacggtgagactactcagcaaattgggttgagactttcccgcgctattgccagaatccagaacttgcaccgcaagcaccagagtgagggcagagcatcagacatcatggtctttgcgcacggacatgcattgcgttattttgctgctatttggtttggactgggtgtgcaaaagaagtgtgagacgattgaagaaattcaaaatgtcaaatcttatgatgacgacacagttccatatgtgaaattggaatcttacagacatttggtagacaatccatgtttcttactggacgccggtgggattggtgttttgtcatacgctcaccacaacattgacgaacctgcattggaattagcaggtccatttgtctcaccaccagaggaggaatcccagcatggcgatgtgtaagcaatcattcgaaatgcaaaaaaagatatgcagttatagaaagtgataaaaacattttttttcttgactttttatgttatataatatgctatatatgataatatctagtggtatcttaaaaaagaaaaaataatg

SEQ ID NO: 1808 - DNA, 1574 bp, Saccharomyces cerevisiae
gtaccaattcgacgaaatataaatatttaaaactaagagaaaaaatccaacaaataacgttccgtgatagtttaatggtcagaatgggcgcttgtcgcgtgccagatcggggttcaattccccgtcgcggagattttttattttgctttttattcctcctgtaatatcgctttatacggaaaaactgaattctttcattatgatgagttcgagagtaaccatttttacttcgtgcaacgatgcatatatttatcttttacgtgaagggaattcccaagcgttccctaatgcagtcgggagcaaaatggtcaacttgaacactatcccacccaaaaatggcagggactactacattgcgcttggacttgaaggttctgcaaataaactgggcgttggtatagttaagcatccgcttctgcctaaacatgccaacagcgatctatcttatgattgcgaagctgagatgctttctaatattagagacacatatgtcacacctcctggggagggatttttgcctcgagacacggcaaggcatcacagaaattggtgcataagactcataaaacaagcactggccgaagctgacatcaaaagcccgacactagacattgatgtaatttgctttaccaaaggtcccggcatgggggcccctctgcattcagttgtcatcgccgccagaacgtgctccttactgtgggacgtgccactggtgggagtaaaccactgcattggtcacatcgaaatggggagagaaatcactaaagctcaaaatcctgtggtactgtatgtaagtggtggaaatacacaagttattgcatactcggaaaaaaggtaccgtatctttggtgaaacgcttgatattgctatcggtaattgtcttgatagatttgcaagaactctgaagatacctaatgagccctcgcctggctacaacatcgagcagttagctaaaaaagcccctcacaaagaaaacttggtagaacttccctatacagtaaaggggatggatctttcgatgagtggtatattggcttccatcgatttacttgccaaggatctatttaagggcaataagaaaaataagatcctattcgacaagacaacgggcgagcaaaaagtcactgtagaggatctttgctactctctgcaagagaacctattcgccatgctagttgaaataacagaaagagctatggctcacgttaactccaatcaagttttgatcgtaggcggtgttggttgtaacgtgcgattacaagaaatgatggcgcaaatgtgtaaagacagggccaatgggcaagtacatgctacagataataggttttgtatcgataacggagttatgattgcccaagcaggactactagagtatagaatgggtgggatcgtgaaggacttttctgaaactgttgttacgcagaaattcagaaccgatgaagtatacgcagcctggcgtgattaacgatttttgttacagttagcctaatgttcacactacgaatatatatatatatttatatatgccatacaccttacatttacagctcagtgtataaccttgtggaagcgcg

SEQ ID NO: 1809 - DNA, 1012 bp, Saccharomyces cerevisiae
atgggggaaagcttggatagatgtatagatgatattaatagggcggtggactctatgtccacactctatttcaagccaccaggaatttttcataatgccatcctacagggagcaagcaacaaggcaagcattagaaaagacattactagactaataaaggactgtaaccacgacgaggcgtatcttctgttcaaagtcaaccctgagaaacaatccgtttcacgtagagacggcaaggagggagtattcgactatgttattaaacgagatacggacatgaaaagaaatagaaggctgggcagaccaggggaaaaaccgatcatccatgtgcccaaggaagtatatttgaacaaagatcgtcttgatttgaacaataaaaggagaagaaccgccactacaagtggcggtggcttgaacggttttatttttgataccgatcttataggatcctctgtcatttcaaattcaagttcaggtacattcaaagcattatcagccgtgttcaaggatgatccgcaaattcaaaggctcctatatgccttggaaaatggaagcgtgctcatggaagaagaatccaataaccaaagaagaaaaaccatctttgtcgaggatttccctactgatttaattcttaaagttatggccgaagtaacagatttatggccactaacagagttcaagcaggattacgaccaattgtaccataattatgaacaactttcttccaaattgcgcttcatcaagaaagaagttttgcttcaagatgatcgcttaaagactatgtcacagtaccatccttcttcttctcacgacgttgctaagattattcgaaaagaaaaagatgaaattaggcggctagaaatggagatagccaacttgcaagagtaggggagcacttctcctcaagaatagatatttcctttgtcctaattgcatacataggccactgcaaatcatataattatgtattaccttacatctaaatgtataaaaccaactgagcggatccacc

SEQ ID NO: 1810 - DNA, 1147 bp, Saccharomyces cerevisiae
aagccatcattaatcatagatttcttcatagtaattgatagaaagaattttaaaagtcctacgtataccagaaatcgagaggaaggatgtcggagtttaatattacagaaacttatctaaggtttttagaagaagatactgagatgacaatgccgattgctgccattgaagcattggtcacgctattaagaataaaaacaccagaaacagcggcagaaatgattaatacaataaaaagctccacggaagaacttattaaatccattccgaactcagtttccctgagagccggttgtgatattttcatgagatttgtcttaagaaatcttcatttatacggtgattgggaaaactgtaaacaacatttgattgaaaatggccagctttttgtatcgagagccaaaaaatcgcgtaacaagattgcagaaataggggtggatttcatagctgatgatgatatcatcttggtacatggttattcgagagcagtattttctttattaaatcatgcagcaaataagtttattaggttcagatgtgtggtgacagaatcaagacctagcaaacaagggaaccagctatatactttacttgaacaaaagggcatacccgtgactcttattgtcgatagcgcggttggagcggtaatcgataaggttgacaaagtgttcgttggtgctgagggtgttgctgaatcaggtggtattataaatctcgtgggtacctattcagtgggtgttttagcacataatgcaagaaaaccattctatgtggtcactgaaagtcacaaatttgttcgtatgtttccattgtcttcagatgatctacctatggccggccctcctttggatttcacacgtcgtacggacgatctagaagatgcattgcgtgggcccacgatcgactataccgcccaagaatacattactgcattgattacagatttaggggtcctcactccaagtgccgtttcagaagagttaatcaagatgtggtatgattaaaaaaaatcacataatatatgcacgcaatgacttaatagaaaaggagaaaaagcgcaagagcatcctttatgtgaaactgatgtctgatgctgttctttcttcatgatgcattatgtacttcaaactagattatctatatagtc

SEQ ID NO: 1811 - DNA, 2357 bp, Saccharomyces cerevisiae
actgagacgatccacaggctaattgtgactagtggatcacagaacaaccaaaatgtttaaagtgtttggttttggtgcgaaggaagagattcctgagctttcacaggaagaaaaaactaaagccattctaaaacaagctcatgatttcgaacaggcactgcgtgcgatggactatgtcttagatgataatgctgacgagggtttggctttgctggatgagagtgatgctaaagaagcttccgaccaaactataaatgcgttagctcgtggtgtcattgaatttttggaggccactttaggttttgaagctgaagagatgaaaaaagcttctgcgactttggccaaggcagaagctttatctttgaaaagtagagagagggctcaaaaaattggattgaagagcagttctttatatcctccaggaacagtttatgccgtgacttatacagaatcatgccttctacatgccctattgatgattttcagtgaaagtatgatggaggcggccaaggccattttaaagctcagaaagtcgtactatatgttacaagaaatcttggaaactattaaagctgctaacaaagccaagaaattgaaaattacgtcaggcagtgaagataaggagtccaccccagcgactttcataactggtggcgatgcgttcaattccgttgatataccttatgaactgactcctgaagaacaaaaggataaggatcttttacaatttgctgaacaaattcatagcatgaggactgaaagattatctggcgcccacattggcaactctcctgcaattaacaggttgagaggtgagctaggactacaagcaatggaagacttgccagaagaggaaataacagatcataaagttctttcggatgatatagatttaagtcaagcaacaattgatgagtttgtccattctggtgtcaatttatgctttggtattttacaggttgtgatatcactattaccacccgctattggcgcggtcctatctgtggttggattcaggggttccagagaagaaggtttgagacttgtttggaaagccacaaagcaaagaaacgtgcatggttgtattggtttgttagccctgatgttttactatgatggacctttccaattcactgacgatgattttgatattcctgcagcagttaaggattccagtaacagtgaagattctgaagatgaagagatggatggccctacgttgttgcatcctgggaaaatactggaagatgcgttgctgcaatcaagagcgctatttcccaatagtgcgctatggttattgaatgaggcaaggatgctatctggtaaagggcgtttagaggaagcagtcgcattgatggattcgattgatgttagcaagatacggatgagacaggtcaaatccttgatgatttttgaccgtgctataacattgatccatttgcatcaatacgatagagctgcagaagatattttatcgctattagacatcagtgattggtcacacgctttttacacatattttgctggctgctgttatttagaaaattggagaatgtgcgaaatgggattaatgaagtcagacaaaaaggatgaataccaaaagaaggccgaagaacttatcttcacctctgtgaatttgctaggtaagaaaaccttcaaatcgaagaacctgccattagataggtttattctgagaaaagttgagcaatttaaagcgaaaaaggaggaacttggggtggaaaatcctctggatggtatcgctacttcaccagtacacgaaattgcgtacttctacaatggttataatagaatgtctgaagagcatttggagctaacaaagaaaatgctaactgagtatagaaatcccgccattgaagctttagactcagatcaggagttaatcaaagatctcttggtctctttgacattaagaagattaggtcatatccaagaaggttgtgatatattggatgaaaaggttctacctaagtttttctccattcaaaatggcaaggtcaaatatataaagaaaactgaagatccatgggcctatccgactgcactttatgaacgtgctctatttacatggaagttggagggcatggatggccttccagagagtaaagaatggttactgagggctcagggctacgcagatgattatgaattgagtacgagagtaggtatgaaaattaaggctgccattgaccgcgttgaccattcattgtaatcaagttttgatcagccctcatgcccttttttttaagaaatattttcccctattagttttcctaatgtcccacctaattttaaagcgctaagctatacttattgaccgtacataccttgcgtagttt

SEQ ID NO: 1812 - DNA, 933 bp, Saccharomyces cerevisiae
ccaactgtcagtattaattatttgttaagtcgcttcgatatcgagctctggacatatctaaatttttttttatagtgcgagggtaggaagaaggtttaacttatttggagtaaacgtatatattattaacagatgttgcaatttaaactagttttattgggtgactcatccgtgggtaaatcttccattgttcatcgttttgttaaggatacattcgatgaactacgtgaaagtacgattggtgctgcttttttatctcaatcaatcactattcacccaaacgatggtaatgaaacaaaggatgtcgttataaaatttgaaatctgggatactgctggtcaagaaagatacaagtcattggcaccaatgtattatagaaacgctaatgcagcattagttgtttatgacattacgcaggaagattcactacaaaaggcaaggaactgggttgatgagctgaaaaataaggtaggcgacgacgacttggttatttatttactgggaaacaaagtggatttatgtcaagaaacgcctagcactgagacaagcccagattcaaacgaaggtggagatgaagaacaaaaagtaagagcaattagcactgaagaagcgaaacagtacgcacaagaacaagggttgctgttccgagaagttagtgctaagacaggtgaaggggttaaggaaatttttcaagatattggtgaaaaattatacgatttaaagaaagacgaaattctctctaagcaaaatagacaaatcggtggaggcaataacggacaagtagacattaatttgcaaaggccatccacaaatgatccaacatcttgttgcagttgatatcctatgatttgtgttttagaggaaaaacaacagaagttgctttaattaaactgctactttccgataataaagcagtatatacgtaataatgta

SEQ ID NO: 1813 - DNA, 864 bp, Saccharomyces cerevisiae
atgtcgtcactgcttaaattacattgtattagaccattgccgcaaaggtcggtctggctctctggctacaagcagaaagccagatgtattcacagttccgctgcaaacggggactttatgtcatggttcaagaggaagaagcaagaagagcaccaagagcctgtcaaggacaccaaacagttgataaaggatattgaagaaggcactaacgaggcttcctctcaatcctcttccaataacaaaaacagattggagctaataccagaaaattttattggcgaagggtctagacggtgtaagagacagaaggagttgaagcttgcggtctcctctgcgccattcaatcagtggttatccagggataagattacgtctgataatcagttagatgatatgatattgcaggcaacggaaaaaacattgggcaaagtagaccaggacgtccaattctctgatttggtagctaaatttcagttcaccaaatttttgcaatctaaatctggctatctaattcctgattatgaactgaccactttaagcacacccttgcagtttaaaaggtatattaaggaaaaaattttgccatctgccaacgatcctaaactcgcttataaagaagctgagccaaatgctatccacccattttctgataattacgcgtcaccaaacatatatgttgttaacgatgttacttctaaagagcaaaaaagtaaatatgatactattatgaaagaaattcaaaagttagaggatgatgcaacaagaaaagctttggaaacagcaagatccgcttagcttatgttaatactattattactactatcattacattttaatatcctgtacatatatatactctttgaa

SEQ ID NO: 1814 - DNA, 2269 bp, Saccharomyces cerevisiae
tagcaccaaaataaggaccgtacgaaaactgcacattttatattatcagatatcatggatgagcatttaatttctactattaacaagcttcaggacgctttggcgcccttaggaggaggatctcaatctcctattgatttaccacagatcactgttgtcggttcccagtcgtcaggaaagtcgtccgttttggagaacattgttggtagggatttcttgccaagaggtactggtattgtcaccaggagacctttagtgttacaattgattaataggagaccaaaaaagtcagaacatgctaaagtaaaccaaactgctaatgaattgattgacttgaacatcaacgatgatgacaagaaaaaggatgaatcaggaaagcaccagaacgagggacaatctgaagacaataaagaggaatggggtgaatttttgcatttacctggtaagaagttttataattttgacgaaattagaaaggaaatcgtcaaagaaactgacaaagtgacaggtgccaattcaggtatttcttctgtgcccattaacttgagaatttattctccgcatgttcttactttgacgttagtggatttgcctgggttgacgaaggttcccgtaggtgaccaacctcctgatattgaaagacaaattaaggacatgttgttaaagtatatttcgaaaccaaacgctatcatattatctgttaatgccgctaacaccgatttagccaacagcgatggtttgaagctggctagagaggtcgatccagaaggaacgagaactattggtgtcttgacaaaagtcgatttgatggatcaaggtacagatgtcatagatattttggctggaagagtcattcctttgagatatggttatatcccagttatcaatagaggtcaaaaggatattgaacacaaaaaaacaatcagagaagcccttgaaaacgaaagaaaattttttgagaaccatccctcttacagttctaaagctcattactgtggtacaccatatttggctaaaaagttaaactcaatcttattacaccacattaggcaaactctgccagaaatcaaagcgaaaatcgaagccacattgaaaaaatatcaaaacgaacttataaacttgggcccagaaactatggattcagctagttcggttgttttgagcatgattactgatttttccaatgaatatgccggtatcttggacggtgaggcgaaggagctttccagtcaggaactttctggtggtgctagaatttcttacgtattccatgaaactttcaaaaatggtgtagactctttggatccattcgaccagatcaaagattctgatatcagaaccattatgtacaatagttcaggttctgccccatctttgtttgtcggtaccgaagcttttgaagttttagttaaacagcaaattagaagatttgaagaaccatctctacgtttagttactctggtgtttgatgaacttgttcgtatgctaaaacagattatttcacaaccaaagtactcaaggtatcctgctctaagagaagcgatttctaatcagttcattcagttcttaaaggatgctactattcctacgaatgagtttgttgtcgatatcatcaaagctgaacaaacttacatcaatacagcccatcccgaccttttgaagggttctcaagcaatggttatggtggaagaaaaattacatcctcgccaagtcgctgttgacccaaagacgggtaaaccattaccaacccaaccatcgtctagtaaggcgccagttatggaagagaaatcaggattttttggtgggttcttctccactaaaaacaagaagaaattggcagctttggaatccccacctcctgttttaaaagctactggccaaatgacagagagggaaacaatggaaacagaagtaatcaagttgttgattagtagttatttctctattgtcaaaagaaccattgccgatattataccaaaggctttgatgcttaaattgattgtgaaaagtaaaactgatattcagaaagttttactcgaaaaactttacggaaagcaagatattgaagaattaacgaaagaaaacgacataaccattcaaagaagaaaagaatgtaagaagatggtcgagatattgagaaacgctagtcaaatcgtctcctctgtttaggttttcctcatctataccggtcgactcaagcttggttttgagtatttctccctaatatttactgcaaatcttatatattgttcttgtatacgtggaagct

SEQ ID NO: 1815 - DNA, 708 bp, Saccharomyces cerevisiae
gaaacgataagcgtctagtaccttttccattagacgattcaatactgcattttgcaatggacaaagcatttgacgaaattattggaaatagtcacacagacagctcatctaatcataaggtaacgagataccgcagaagggatttaagaaatgaattaggacctagactgggatttgcgccttcggatgctgcatcaaggtcgaaagatcgcctttatagagagagggaagagcctcctttgcctaagagaattagaatatccaaaatcccactagacgtttctgactacaccctcgatgatatgattaaagagtttggctcgccaatattttcgaaaatttttgacaataaagaggatcgtacatgtatttacgaatttgaagacccagaagttttggaaaagattgtcgagcgttataatggacatgagttacataatgcaaaaattgaagtggagatttaccaaccacagagaaagcattctagaatgaatgcccacaaccgtcgcaaacagacggctcaagaacacggaagaggcaggccagggagccattatcgccaaaagcctaacagagtctccaaaaagaacaagggccgtgagaagaataacactcctacttctgtcgaagctcttgacgctgaattagatgcttacatgaaaggttaagcaattgtgtatctacttataatttctttatagtcttttc

SEQ ID NO: 1816 - DNA, 2237 bp, Saccharomyces cerevisiae
tgtgatagtaaggtgtagagcagcagatttggagtatgggatatcaattgagtgcaacacttaaagggcacgatcaggacgtcagggatgtggtagctgtggatgattcaaaggttgctagtgtttcgagggatggaacagttcgcttgtggtctaaagatgaccaatggctcggtacggtagtttatacaggacaaggatttttaaatagtgtgtgttatgattccgagaaggagttgttgctttttggaggtaaggatactatgatcaacggtgtgcccttgtttgccacctcaggagaggatcccttgtataccttgattggccaccaagggaacgtttgtagtttatccttccaagatggtgttgtgataagcggtagttgggacaaaaccgcaaaggtttggaaagaaggatcgttggtttacaatttgcaagcacacaatgcctctgtatgggatgccaaagtcgtatccttctcagaaaataaattcttgacagcttccgccgataagacgattaaactgtggcaaaacgataaagtgatcaaaactttcagtgggattcacaatgatgtagtaagacatttagctgtggtggatgatggccattttatcagttgttcaaacgatggcctcatcaagttggttgatatgcatacaggtgacgtactaagaacatatgaaggccatgaaagctttgtttattgcattaaactgctgcccaatggagatattgtaagctgcggcgaagaccgaacagtccgtatatggtcaaaggaaaatggttcgttaaagcaggtaattacacttcctgccatctctatttggtccgttgattgtatgtctaatggtgatattattgtgggaagtagtgataatcttgtgagaatattttcgcaagagaagtcaagatgggcttccgaggatgaaataaatgaactatctacgcaagtggaaaaatccactataagttccaagacaatagaatttgatgagtctaaactatcaccttatgaaattttacaatcgccggggcgcaaagagggtcaaattgtggtagtcaaatcacctcaaggtactatagaagctcatcaattttcaaattcttcatggaaaaaggttggtgatgttgtcggtgcaggtgctactggaaacgacaaaaaaatagaattcgagggtaaaacgtatgactacgtatttgatgtggatattgaagatggaaaacctcccttgaaattgccgattaatgtcagcgacaacccatatacagcagccgacaattttttggctcgttatgaactgccaatgagttatagggatcaagtagtacagttcatactgaagaacactaatggcatatcgctagaccagcccaacgataatgcatcatcttctgcagtatcaccttcaaaaacgagcgtaatgaaggttcttcctgtcaagcagtatcttatcatggaaaattataacccagatactattttcaatggaatagtaaaaataaattcaaatgagaagacctttgatgatgaaattctggcgcaaattggtggcgcactacatgacatagatgaaagctgggagttgctactttcatttgctaacactataagatctaactgggaaattaagactcctgcatacgacatagtacgattgattgtaaaaaaattaccttattcttcagatataaaagattacatcgaagaaggcttgggcaataagaatatcactctaaccatgttaactgtgcgtattttggtaaattgcttcaataatgaaaactggggtgtgaaattactggaatcaaatcaagtttataaatcaatttttgagactatagatactgaattttctcaggcatctgctaaacagtcacagaatttggctattgcagtttccacactaattttcaactattcagctctcgtcacgaaagggaactctgatttagaacttttgcctatcgtagctgacgccatcaacaccaagtatgggccattggaagagtatcaagaatgcgaagaagccgcatataggctaaccgtagcttacggaaatttggctactgttgaacctacattaagacaatttgccaactccgtaacttggcttgcaaacatcaaaaggagctatgggaacgtgccaaggtttaaggatattttcgacgatctctcctaatacttttacagcaatcatataaaacacataatgtctagatagcaaataatcttt

SEQ ID NO: 1817 - DNA, 1635 bp, Saccharomyces cerevisiae
ggagctggtcagtattaacacattaccaaatctgtttggttctacatagaacgccataaaagtaagaaaaaaatgtctgtgcacgctgcaacaaacccaatcaataagcatgtggttctaattgacaactacgattcctttacctggaacgtttacgagtacttgtgccaggagggcgccaaagtgagcgtctaccgtaacgatgcaattacagttccagaaattgccgccttgaatcccgacacattgcttatctcgcctggaccaggccacccaaagacagattctggcatttcaagagactgtatccggtactttactgggaaaattcctgtatttggaatctgtatgggccagcaatgcatgtttgacgtatttggtggtgaagttgcctacgctggtgagattgtccacggtaaaacgtccccaatctctcacgacaactgtggaattttcaagaacgtgccgcaaggtattgctgtgacaagataccattcattggccgggacagaatcgtccctaccatcctgcttgaaggttactgcgagtaccgaaaatggaattatcatgggtgtaagacacaagaagtacactgtagaaggtgtgcaatttcatccggaatccatcttgaccgaggaaggtcatctgatgatcaggaacattttaaacgtcagtggaggcacttgggaggaaaacaaatcatctccttcaaattctattttggaccgtatctatgctcggcgtaaaatagacgtcaatgagcagtctaaaatcccaggtttcacctttcaagacttacaatctaactatgatttaggtcttgccccaccgttacaggatttctacacggtgttgtcatcatcccataaaagagccgttgttcttgctgaagtcaagcgtgcctctccatcgaagggacccatttgtttaaaagctgttgctgctgaacaggctctcaaatacgcagaggctggtgcatccgcaatttccgtattgaccgaacctcattggtttcacggttcgttacaggatttagtaaatgtgaggaaaatcctagatttgaaatttcctcccaaggagaggccttgtgttttgagaaaagaatttattttcagcaagtatcaaatactagaagcaagattagctggagctgacactgtccttcttatagtcaagatgctatctcaacccttattgaaggaactgtacagctacagtaaagatttgaacatggaacctctcgttgaggtgaactccaaagaggaattacaaagggctctagaaattggtgctaaagttgtaggtgtcaataatagggacctgcattcattcaacgtagacctaaataccaccagtaacttggtagaatctattccaaaggatgttcttctaattgctctatcgggaattaccaccagggacgatgctgaaaaatacaaaaaagaaggtgtccatggatttttagtgggtgaagccctaatgaaatcaaccgatgtgaagaagttcattcatgaattatgcgaataattgaaacttacacggtacaatagggaaaaaaacttaacgttgtaagggcgaacgccttcatgtatagtagcctatagaagatatatatatatatatatatatatatat

SEQ ID NO: 1818 - DNA, 887 bp, Saccharomyces cerevisiae
tcaggaaagaatagcacaaaacccaaaggaacatacgatgagctgcctggtgttgccattagtaagcgtagggaatataccacaattgagtattgactggctgctgaattcacaagcaaatgaatgggaatatttggaggcgttagattcgaaatacctagtggaatttgtgggaccattagacagaccagaggatggtagcgactcgctatataaagacgctgatatgaagtatagcagcgctttggaagttttctacaataagaagcgaggactttttgccatacagcaacgaacaccactcgtgtccgttaactatctgaataatttcatcgtagagatcatcttgccgttcttgagcaagtataatatatcggaaatatgcatttgggactctctatatgcaatggaggatgaaaatggtgtgattgtacgtccacaggaggtatattcgctcggagagttttatttcgacgatgaagctgagcttttatcgaacctccatctaaacgatcaagagtcgatggtcaataactggttacattttactcctaccagtttccaagacaagatatccgttgatcagccgatcttcaaaatacttttccaaatactgaatgcgtcgcagaggcctaaagccctccgcagcattaagtactgtagttgtttggccaatgagggggacaactcattagattctcaacagttcttacaatggataatctctcaaaaagttatcaaaaacgcgccaccaattgtaaagtttgtcaggcctatatcatggcaaggtgcatacggaatggcggatgcaagagataaatttgtagatttatacaattgaaaccgagaagtatatctgttttctatacaagtgcatatatagccac

SEQ ID NO: 1819 - DNA, 777 bp, Saccharomyces cerevisiae
caggctagggcatttctgaagctttacgtatcactagagaagttattttggcaatgagaatctactacatcggtgtatttcgctctggaggagaaaaggctctagagttgagtgaagttaaagacttgtcacaatttggtttctttgaaaggtctagtgttggccagtttatgactttttttgctgaaacggtcgcttctagaactggtgcaggacaaagacaaagtatagaagaaggcaactatattggccacgtttatgccaggagtgagggcatatgtggtgttttgatcaccgacaaagaatatcctgtcagaccagcatacacactattaaacaaaatattggatgaatatttagtcgcacatcctaaggaagagtgggcagatgtgactgagaccaatgatgcattgaaaatgaagcaactggacacttacattagcaaatatcaagatccttcacaggctgacgctatcatgaaagttcaacaagaactggatgagacgaaaatcgttttgcacaaaacgattgagaatgttttacaaagaggtgaaaagttggataatttggtggacaaatcggagtcattaacggcaagttccaaaatgttttataagcaagctaaaaaatccaattcgtgttgcatcatcatgtagatgcatccacacactattttcagcatagtgtggcttttcatctgctttatgtaatttagaaagccaatgacagcagcaagggaaacaaaaatcttttaaatcaaattaattgtttaaataa

SEQ ID NO: 1820 - DNA, 1796 bp, Saccharomyces cerevisiae
gtccttctgtctcgcaatatgaaaatacaacttgtaagatggcattgttctcgcaatgctctttggaatcgtgctttctactctacgagaaaggccactaagaacgcttcgtcggcgactccagctactatgacatccatggtatctcagaggcaagatcttttcatgacagatccactatctcctggatccatgttctttcttccaaatggtgctaagattttcaacaaattgatagagtttatgaagttacaacaaaagttcaaatttggttttaatgaagttgtgacgcctttgatttacaaaaagactctttgggaaaagtctggtcactgggaaaattatgctgatgacatgtttaaggtggaaactacggatgaagaaaaggaggaatacggtttaaaaccgatgaattgcccaggccattgtctgatcttcggtaaaaaggatagatcgtataacgaacttcccctacgcttctctgatttttcaccactacatagaaatgaagcttctggtgcactgtcgggattgactagactaaggaagttccatcaagacgatggtcatatcttttgcactccttcccaagtgaaatcagaaattttcaactctttaaaattaatcgacatagtttacaacaaaattttcccctttgttaaaggaggttctggagcagagagcaattattttataaacttttctacaagaccggatcacttcattggagacctcaaagtttggaatcatgctgagcaagtactcaaggaaatcttggaagaatcaggcaaaccgtggaaactgaaccctggtgatggtgcgttctatggtccaaagttggatataatggttacggaccatttacgcaaaactcatcaagtcgctactattcagttggactttcagctacctgagaggttcgatttgaaattcaaggatcaagacaactcgtacaagaggccaattatgattcatagagctacttttggttctatcgaaagatttatggctttactgatagattctaatgagggccgttggccgttttggttgaatccttaccaagctgtaattattcccgtcaatacgaaaaatgtgcaacagctagacatgtgcactgccttgcagaaaaaactacgtaatgaactggaagccgacgacatggaaccagttcctttaaatgattggcatttcaatgttgatctcgacataagaaacgaacccgtagggtataggatcaagtcggccattttgaaaaactattcctatttaattatcgtgggtgatgaggaagtacagttacagaaatacaacattcgagaacgtgataatagaaagagtttcgagaaacttacaatgtctcaaatttgggaaaaatttattgagctggaaaaaaactacaagtaacttaaaatatatgacaaacttgccctgtaaataaaaggatacgatttgatgtatagctggattcatacagagactagactcatccgccccacagatgcattaattcatgtatatttcacatattataccatatgtagtcattaaactaagataatattactgtatttacatgtatcatcctttatacttttatactttttacgttcgggagattttcaggagattttaaggtttggattcctcattcaatggttcttttttcacatctgattgctctgcttttttcgcagcattttcctttgcgcttgaaacatttggcgctgattctattgtgttgacctttactttgtcttgaggttcctcatcatcagatgtttcctttagttgtt

SEQ ID NO: 1821 - DNA, 522 bp, Saccharomyces cerevisiae
actaactcaatacagcaccttccttgccatgtttagatccgtttgccgcatttcttcccgcgtggcaccttctgcgtaccgcactataatgggccgttccgttatgtccaacaccatactcgcacaaagattttattctgcaaacttgagcaaagatcaggtttctcaaagggtcattgatgttatcaaggcgtttgataagaactctcccaacattgccaacaagcaaatctccagcgatacccaatttcacaaggatttggggttggactccttggacactgtcgagctgctcgtagctattgaagaagaatttgatattgaaatccctgacaaagtggctgatgagttgagaagtgttggtgaaacggtcgattatatcgcttccaatcccgacgcaaactaagtgtccgtccccgctctattatattgtatcgtgtcacccccatgtcatattatattcgtatgtatataaatagatcgattgacccgtatatatatatatctatataaccagccctg

SEQ ID NO: 1822 - DNA, 999 bp, Saccharomyces cerevisiae
atctctaatgacatccaaactacaaaaccgagattggacatatagcacactctgcatttctactttcctttctccctacagtttgctcgatctgaaccgatgcttctttgattggacaagatgatagaccatgactccctgtatgtattgcagagattgccactactaaccaagaaaagttgaacgtgtcgtacgtataaaacgatttatgcttaggctttactgaaaaaaaaaaagtaaaaagaggatgcgcaaacgcatagagcaagtaactaacctgtttttatagtatatacttggccccaccaggctgatcgtcaggcaaaacgccaaactaataacagtaataacagaaatatgaacaccaatagtaatactatggtaatgaatgacgcaaatcaagcacaaataacggccacatttacgaagaagatattagcgcatttggatgatccggactccaacaaattggcccaattcgtacagctttttaatccaaacaactgcagaataatatttaatgctacccccttcgcgcaagcaacagtttttctgcaaatgtggcaaaaccaggtcgtacaaacacaacatgccctaacaggagtagactatcacgctattccgggatccggcacgttgatatgcaacgtcaattgcaaagtcagattcgacgaaagcggcagagacaagatggggcaagacgcgactgttcccattcaaccaaataacactgggaacagaaatcgacccaacgatatgaacaagccaagacctctatggggtccatattttggcatttccctgcagctgatcatcgacgaccgcatatttagaaatgattttaatggtgtaatatcggggtttaactataacatggtttacaaacccgaggattctctgctaaaaatttagtgggaagattccgctctaccagggaaaaacaaaattatatagaaaagaaggtaagtaataagtaatacgaaaaaacccaaaaaaaaa

SEQ ID NO: 1823 - DNA, 1413 bp, Saccharomyces cerevisiae
atgtcatacaagtcagcaataatagggctttgtttgctagctgtgatactattagctccccctttagcatggcattcacataccaagaatattccagcaatcattttgataacatggcttcttacaatgaatttaacgtgtattgtagatgcggcaatatggagtgacgacgatttcctcacgagatgggatggtaaaggttggtgtgatattgtcatcaagttgcaggttggtgcgaatattggcatatcatgtgccgttaccaacatcatttacaacttgcatacaattttgaaggcagatagtgttttaccggatctttcatcatggacgaaaatcgtcaaggaccttgtgattagcttgttcacacctgtcatggtcatgggattttcatatctgttacaagtatttagatatggtatcgctcgttacaacggttgccaaaacttattgtctccgacatggattaccactgttttgtataccatgtggatgcttatatggtcatttgtgggcgctgtttatgccaccttagtactgttcgtgttttataaaaaacgcaaggacgttagggatattttacactgtaccaattcaggtttaaacctgacaaggttcgcaaggctgttgatattctgtttcattattattttagtcatgttccctttttctgtttacacctttgttcaagatttacagcaggtagaaggacactatacttttaaaaatacccattccagcaccatctggaataccattattaaatttgaccctggcagaccaatttataatatatggctttatgttttgatgtcttacctagtatttctaatctttggcttaggttctgatgctttgcatatgtactctaaattcctgcgttccatcaaactaggatttgtacttgacatgtggaaaagattcattgataagaataaggaaaaacgagtaggcatattgctaaacaagctgtcctcacgcaaagagagccgtaacccattttctacagactctgagaactatatctccacgtgtacagaaaactattctccctgtgtaggtacaccaatatcacaagcgcatttctatgtcgactataggattccagatgatcctagaaaatctcaaaataaaagcaaaaaatatttgtttgctgataaagaaacagatgatattcttgatgaaatagacctaaaagaaagtaggcacatcccttacgtcacgcaaggacagagctttgacgacgaaatatcacttggaggattctcaaaagttactctcgattattcagaaaagcttcataattctgcaagctccaattttgaaggggaaagtctttgctactctccagcttcaaaagaagagaattcaagctcaaacgaacatagttcagaaaatactgcaggcccttaa

SEQ ID NO: 1824 - DNA, 2870 bp, Saccharomyces cerevisiae
caagtgagttgtatctaggattttttattacgtgagtgttgttttactttagtcggtaggaatcattgttatttttgtctgtttgtttgtctctatttttgggtacacgtgcgtgtttcttctagtggatggtttgaacgaagcaggttctcaggattgattgattgatctgctttagtgtgtaacgttctgcgactagctttcgttgctaccgatatataaagaaaaaaaggagagcgtgtgtttggagcgtcttaaaccccattggtgagagcctccagtaccatttgcctgttaaaactgtcttgtgtgtggccttgtagagaaggtgaagagggagagtttatatgttgggtaatttactgagaaataagacgagttcgtctggttttgagaagagctcagagcattccgatttttcctccgtagttcccaatgtccctgtatactgcaaagcggcaagcacaggaactactaagaccgctgctggagctcttttagatactgcagtcaatgtggaaaagccttcggaaatgctatcaacgacttctccgcccattttagatcatatatcggatgacttaaaactgaagcttttcggctcgagggatattccttatagtcgtcctatcgatacgttacaaaacaacggaggtcttggtactgataaaatcacgtctattaacgaaaaaacgtatgcattcaggattttgatcattgaggaagcgggtcaaatggcgtgtaggaacaactaccgtgatatcttcgattacactacgtcaaagatttcaaattcgatggagcagatacggccgagtgaattgaaggaatatatatttggttctcccgtaagatcttccgatttgacgcagtgcgacaagataaggacgattcctaactcggatttggtactcataactagaattttctattacacacaccaatacaaccgcatcgcaattagcttatgcataccgaggatattgttgcccgtagttgcagagtcgtggtcttccatttcatcatggttgacccagactcaaaaaatgctcattggtttcttgactaaaaaccgtattatgcaagaaaatactggcaattacagcaataattcagtcataaaattgtcaaatattgacatcaggacgcattatcccaaggaaattgaaataatggtgcaaactttacaaaaaagagtcataccaggtttacgttctatgtctgagattcctaggcttttcctttaccctgagacatttaaagaattcgttcacgtttggttcaaaagtatatttaattggattgaaatcaaagatggaccgaaactaggcttccttcctctcctaatggcaatgattatatctgattacaggcacactataagagaactaaagacatccaagatcgtaatcctgtcaggaaacatggtggttgctaacaagttactgttcatcttatcggctttattggagccaaagtacaagggacaaataacgatacggcgggaaaacataagatcggattcgtccgctgtatcaagaaataagtctaacaataattttgtcgataagcctgagacggaattgagcacactgacttcaacagacaaccttttgagtcgcacagaaaataatagcaatcataattacaacaacagtaatgtgagctctaacagcattggatcacccaatttccattctttgaggaaaggatggcaaatacccaatcggaggaactcgaacacttcagtatctgtgtcttctagtgagtctttagcggaagttattcagccatcttccttcaaaagtgggagtagttcattgcattatctatcgtcttctatctcaagccaacctggttcgtacggttcttggttcaacaaaaggccaacaatttctcagttctttcaaccaagcccttctttaaaacacaacgagtcgtgggagaggctgcaaacaactgctggaaatatgcaaaggacttcaagttcgtcttctttgcagcaagcaacctccaggttatcactaaccactccgcaacaatcaccgtctatcagcgaatatgatgagtatccttggatgggcacacctggctctcctaatgttggagatgtgtctcacgcacccccattggttaagaatatatcatataaatttccactaaagaacgttgagttgaaaagagattgccaaaggatctctcaggatgatcttttggatgaggcttttgaaagaatatgtcagccctctttggctgaccttaattccacttacgaaatttttccaggtaactcttcttatgcggatattttgactactgattctgatattgatgatggcttgatgaataaacctctggaactattgccgaaatatacaatgtatttaacccattttaacaattttttccagttgcaagcatgtcctgctggtcaagaatcagagagcagaataacaaattctatgaagattgacctgttaaaggcggattacacaagaagtctattagtatcgttacgttcaagggacattagggatgtcgcattgaaaagagagtttactggcaataacaacaataacagcaaccagaatatctatgatgagaattttgtcggaaaaaggaagtacgtgttgaaacagaagaccagaaaaatcttttcctgtggcaagattggcaagctaagtactagtttggaaaactgcgttaattttgttgaaaatagtataaagagtgcaatgatgttatatgatgataatggaatagatagtgagcttcgcgattcagaagctttacggattttttcatctcttgttcattattgtaatgcaggttaatgttttctccttctttacatgtttaatatattccaa

SEQ ID NO: 1825 - DNA, 1982 bp, Saccharomyces cerevisiae
gtgtatttgtttgccattgtacaataaaataaataaaaataagtcaaataaatgaaaaatgccagagtatacgctactggctgataatataagggagaatatcgttcatttcgatccgaatggtttgtttgataacttgcacaccattgttcatgaagatgacagtcaagagaacgaggaggccgagcatttcaattatgatcaggtgttggataaatcgttattgtcaagaggttctattgtcggtctcggtttaggactaatgagtcccgttttaggaatgtgcactagtatggccattgggctaattaatggtggtccgttaactataatgctaggttttttaatcagtggagtgtgtatatggttttcgtcgctttctcttggtgagattgtttcaaaatttccgatggaactgcatgttgggagtgccatgttggccccggagaaattgaaattagtatgttcgtggtacactggctggttaatgctcatagggaattggactatgagtaccagtattacttttgcaggcgctcaacttaccatttctttgattctgatgacgaactccaacctaatatccgaggcacacttgattttttacacagtcattgtattttacttagttgtgactgttgtaggcctcgtgaatttgaaatttgcaagatttattgaaacaataaacaaagtctgtgtttattggatcatatatgccattatatttattgatattcttctactagtattccacaaaggtaaatttcgatctttgaagtacgcgctatttcactttgataataatctatcagggtataaaagcgcatttctttccttcatcattggattccaacagtctaatttcacgttacaaggtttcagtatgttacctgctttagctgacgaagtcaaagttcctgagaaggatattccacgtggtatgtcgaatgcggtattgttatccgcgttctctggagtcatttttcttataccaataatgttaatcctgccagataatgatttgctttttaccaatcataaggttctaccaatagtgaacatttttacaaaatcgactgattcggtggtcttgtctttttttttagtgctcctaattttaggaaacttactgttttccggaattggctcgattactacatcttctcgtgcggtatatagttttagtcgtgaccaggctataccatactacgataaatggacctacgtcgaaccggattctcagtcaaaagtccccaagaattctgttgtattgagtatgataatatcatactttttaggtctgctagctttgatttcaacggccgcatttaatgcttttataggcgctgcagtgctctgtctttgttctgcgactttcattccgttagtcttggtgctgtttacgagaagaagagctatccgaagcgcgccagtaaaaatcaggtataagtttggttggttcatcaacattgtttctattgtgtggctcttgttatctatggtttctgtttgcctaccaacgcaagtgcctgtaactttcaaaacaatgaattatgctttaatggtgtacgtattctgcattttagttatcactggtctttatttcaaatgggggaagtataattttagattacccttggcagatgacatcaaggctccaattcccagtgatgcggaagaaactgtttttgaactagaggatagcaatgttgaacatactctaaactcgggaaccacagtgaaagagtctgtagaaaataattctgaagaaggtttcatcaaggtgcatcctaaaagtagtacagaaaatccctttgaggaaaatgaggaaaacgtgataaccgattatggtgatgagcaccatacagcagaacaagaatttgatcttgccgatgatcgtagatatgatatatgatatatgatcgtgattatacaccgttatttaatgggaaaagacttatatagaaagaatatacgtagtt

SEQ ID NO: 1826 - DNA, 553 bp, Saccharomyces cerevisiae
ctgctacaataagaagatgtctaaggttgcacaacagttaaaatttttgaataaaattagcgccactaccagactaccgcagattctagtcgatcctaaaaaatactcaggtcttagattgacttttcaaacgaaaaaccacaatggacatatgggtgccagagttttttggcataactacctacccactttgcagttctataatccaagaatgaagtttgacgtgataaggataaagaacgaagacaagcaaaaaagcgttccatgcaaactggagattttatctcatgaaggctccgttgtagagactattgatatgcgtaataaaatgcatgaagatataatgaaagacttacttgacaaaatagagcacgttcctcttcctgaaaatgagatcataagagttggaccgcaagaaagtattatataagctttctctcgataagtttgttcatgtatatatcaaaaaacattgcccttcatggaaatatgtaaattcaaaactcacttatggggcatataagtatataatttagagtacaataagtaggat

SEQ ID NO: 1827 - DNA, 1386 bp, Saccharomyces cerevisiae
atgtatgttgatccgatgaacaacaatgaaatcaggaaattaagcattactgccaagacagaaacaactccagataacgttggacaagacattcctgtaaacgcacattcggtgcatgaggaatgttcttccaacacacccgtggagataaatggaagaaacagcggaaagttgaaagaagaagcgtctgcaggtatttgtttggttaaaaaaccaatgctacaatatagagatacctcaggaaagtattccctaagtgactttcagattttaagaactttgggaactggctcatttgggagagttcacctaattcgttccaatcacaatgggaggttttacgctttgaagacattgaaaaagcacactatagtgaagctgaagcaggttgaacacaccaatgacgaacgccgaatgctttcaattgtttcacatccattcatcattcgaatgtggggaacgttccaagattctcagcaagttttcatggtaatggactacattgaaggtggtgaattattttctttactacgtaaatctcaaagatttcccaacccagtagccaaattttatgccgcagaggtatgcttagcgttggaatatttgcacagtaaggatataatatatagagacttgaaaccagaaaatatccttctagataaaaacggccatatcaagataaccgactttggcttcgcaaaatacgttcccgatgtcacatacacattatgtggcacaccagattacatagcgccggaagtggtcagtacaaaaccgtataataaatcagtggattggtggagttttggtgtgctaatctatgaaatgcttgccggatacactccattttacaattcgaacaccatgaaaacttacgaaaatatactgaacgccgaattgaagttcccaccatttttccatccagacgcgcaggacttattgaagaagctaattaccagagacttaagtgaaaggttgggtaacttacaaaatggaagtgaagatgtcaagaaccatccgtggtttaacgaagtgatatgggagaaattgttagcaagatacatagaaacgccgtacgaaccaccaatccaacagggccaaggtgacacttctcaatttgacagataccctgaagaggaattcaactatggaattcaaggggaggatccatatatggatttaatgaaagaattttaaggaggttcagtgggataattgtaattgaaaaaaaaaaaaaatcaataaaagtaaaaacaagaacaagaaaaagcacaaacaaacctggttatagattcttggtgagtctaacagggccatgataaaaaagtgacacatgcatatatgtacatgtatatatctacgtacgtctattcaatagaggtgtat

SEQ ID NO: 1828 - DNA, 2858 bp, Saccharomyces cerevisiae
attgaagagccttaggactcatacaactgaaatctgtaaaaaatgtggaacaaaaccagaacgacgcttctggctgttggtgtcttatttcatttattttacctatggtctatttttgatatctatttcatttcaccgctcgttcatggtatgagcccatatcaaagtactccaacccctcctgcaaagagattgtttttgattgtcggtgatggtttacgtgcagataccacttttgataaagtcactcatccagtatccggaaaaacagaatttctggcaccttttattagatctttggtaatgaataatgccacctacggtatatcacataccagaatgccaactgaatcccgtcctggtcatgttgctatgattgctgggttttacgaagatgttagtgccgtcacaaaaggttggaagtcaaaccctgtcaatttcgatagttttttcaaccaatctactcatacttattcattcggttcacctgacattttacctatgttcaaagatggcgcttctgacccaaataaagttgacacttggatgtatgatcatactttcgaggattttacgcaatcttccatcgagctggatgcttttgtctttagacacttggatcaattattccacaattccacactgaactcaacattggattatgaaattaggcaagacggtaatgtattctttctacatctactaggttgcgatactgccggacattcttatagaccatattctgccgagtattatgacaatgtcaaatatattgatgatcaaatccctatccttatagacaaagtcaacaagttttttgcggacgacaaaaccgcatttatttttacagcagatcatggtatgagtgcatttggatcacatggtgacggtcatcctaacaacacaaggacccctcttgttgcttggggtgcgggtttgaataaaccagtacataatccttttccggtatccgacaactatactgaaaattgggagctttcgagcattaaaagaaatgatgtcaagcaagcagatattgcttctttaatgtcatacttgattggtgtgaactatcctaaaaattcagttggtgagttaccaatagcatatatcgatggaaaagaaagtgacaagcttgccgcattgtacaacaacgcaagaagcattttagagcagtacttagtcaagcaagatgaggtaatagactctcaatttttttataaggaatacttcaagtttgttgaaaagtctcattcacattacttagaagagatagaaaccttaattcagcgtatatctgaaggagaaaactatttggaacaagaagcaatcacccttacagaggaattaatgcagataacattggaaggtttacattatttgacaacctataattggagattcattagaactattgttacatttgggtttgttgggtggatctttttttcttttataatatttttgaaatcattcatattagagaatgtaattgatgaccaaaaagcgtcaccattaagccatgcagtatttggttccataggaattttactaaattggattttgttctaccaacattctccgttcaatttttacatgtaccttcttttcccattatacttttggagctatatttttacaaatagatccgtactacgttcaggtatcaaggaattcttcaaaggtacctctccttggaaaagagttttaataacaatctctattatatcagtttatgagggaattgtatatggatttttccatagatggacgtttacgctaattacaaatatattggcgttttacccgtttatttgtggggtgagagagctatccgtgaatatattgtggatcataactagtgttcttttatctacatttaccttatttgacgctgttaaaattgaggacttgaaccagatacatctagcagggttattaatcattctcagtgccttttatgctctttacaaaatacattccaggataaattcctacacgcgtgctatatttgccattcaaatttccttggtggctgccatgttggcggttactcatcgttcagttatctctttacagctaagacaagggttaccaagagagtcacaggtcgctggatggataattttttttgtatctctttttgtaatgccaattttacattataggaagcccaacaatgattacaaagtgagattattgatcatttatttaaccttcgcaccatcctttatcattttgactatatcattcgaatcccttttctacttcttgttcactagttacatggtacaatggattgaaattgagaacaaaatcaaagaaatgaagacccaaaaagatgaaaattggttacaagtgctaagagtttcagtaatcgggttctttttacttcaagtcgcattctttggaactggtaacgtcgcttcaatctcttcattttcattggagtctgtttgtagattgttgccaatttttgatcctttcctgatgggcgcattattgatgttgaaattgataattccctacgggctattgtccacatgcctaggtatactgaatttaaaacttaacttcaaggactacacaatctcatcattaattatttccatgagtgatattctgtcgttgaattttttctaccttttaagaacggaggggtcgtggttggatattggcataaccatttccaactattgtttggcgatcctatcatctttgttcatgcttattttggaagtactcggtcatgtgttgctaaaaaatgtcatcatacaggataaaaccaaaaaaacacaatagattcacatacccaccgctatgtatatattttcctatatgtatattaagaaagacag

SEQ ID NO: 1829 - DNA, 1336 bp, Saccharomyces cerevisiae
tcaagaaaacaaaagttaatacactggtattaaaaaaaaacaaactacaaaactcccctaatagtatattctagaaaatgcaatacaaaaaatcattagttgcctccgccttagttgctacatctttagctgcctatgctccaaaggacccgtggtccactttaactccatcagctacttacaagggtggtataactgattactcttctactttcggtattgctgttgaaccaattgccactactgcttcctccaaggctaagagagccgctgctatctctcaaattggtgacggtcaaatccaagccactaccaaaaccactgctgctgctgtttctcaaattggtgacggtcaaatccaagccactactaaaaccaaagctgctgctgtctctcaaattggtgacggccaaatccaagccaccaccaagactacctcagctaagactaccgctgcagccgtctcccaaattggtgacggtcaaattcaagccactactaaaaccaaagctgctgctgtctctcaaattggtgacggtcaaatccaagccactaccaaaacaactgctgcagctgtctctcaaattggtgacggtcaaatccaagccactactaaaaccactgctgctgctgtttctcaaattggtgacggtcaaatccaagccaccaccaatactactgttgctccagtctcccaaatcactgatggccaaatccaagccacaactttaacttctgcaaccattataccatctccagctccagctccaattactaatggcactgacccagtaactgctgaaacatgtaaaagcagtggcactttagaaatgaacttaaagggtggtatcctgactgacggtaaaggtagaattggttctatcgttgccaacagacaattccaattcgatggtcctccaccacaagctggtgctatctatgctgctggttggtccatcaccccagaaggtaacttggccatcggtgaccaggatactttttaccaatgtttgtcaggaaacttctacaacttatacgatgagcacattggaactcaatgtaatgcagtccacctacaagctatcgatttgctcaactgttaatcataagtttacctctcatagtcgcatgaaaacataaagtcatcgtagcatattctgtacattagtcatttctgtctccaaagggcataatttgggtcggttcatttttttcttcttaattcgtctcttcatttcataaagctttcttttgaaacctatgaaatgagctttacagttcttcactcttttttttaaagtttgtttatttttttatactatatacattattattt

SEQ ID NO: 1830 - DNA, 1353 bp, Saccharomyces cerevisiae
tgttaccagcttgcatactagaaatggactcttatgatcgtcaaaaggagcacacacccacacacgactcctttgcgctgtaaagggcagaatagggagtgatgtgatgtgatgcgatgtgatgggtcttgcaacgtgatctagtagatatatatgtaaaggtgtaaataggtatataggcgtcggtgaaattttattagcaacaccagttcaatacgatcactaccgtatcactggaaatgttagcagaattgtctcatagagaattgataaagttggcgcagaaaagatgtataccacctttattgccaaagtttcataagggacagtctggtgggagagtttgcattattggaggatgcgaagattatacaggggcaccgtatttcagcgccaatgctacagccttgatgggctgtgatttgacacatgtcatctgcgaatacaacgctggtacggtcattaaatcgtacaccccaaacctaatggttcatccataccttcgtatgagtaacaccaaattagacgttgatatggacgaacaaaggaagaaaatcaattccttattggatagaatccacgttgtggtaattggacccggcttgggtagggaccccctaatgttaaaatccattaaggatatcataagatatatacttgaaaaacatgagggcaagatcccgttagtaattgatgctgatggactgttcttagtaactcaagatagcgaagtcaaagaaatgctgaaaagctaccccaaaggtagagtgatcttgacgcccaatgtggtagaattcaaaagactatgtgatgccataggcaagaagggagactctcactccgagatgggcagcttgatcgcccaggaattgaattgtattgtggtggagaaaggtcagtcagataagatattctcacccgatagtgaaaaagacatgttgacgaacagcgaagagggcagcaacaagagggtaggaggccaaggtgatactttgacaggagctatatcatgcatgcttgcatttagtcgtgcaatgtatgactttaagatttgtgagcaggaagaaaagggagaatcttctaacgataaacccttgaaaaactgggtagactacgctatgttgagttgctacgcaggctgcacaattacacgagaatgctcccgcctaggatttaaggctaagggacgtgcaatgcagacgacagatctaaatgaccgtgtcggtgaagtgttcgccaaacttttcggttaacacatgcagtgatgcacgcgcgatggtgctaagttacatatatatatatatatatatatatatatatatatagccatagtgatgtctaagtaacctttat

SEQ ID NO: 1831 - DNA, 2281 bp, Saccharomyces cerevisiae
cttaaatagcactaataaactagtagacacattataactaaccagtagtatactttgcactttcgatattcttttcactaatctcctccccaaccccttattgaagataaaaagaaagaaagaaagaaagaaaaaaatccaatttcatagtacgaagaagaacgagaataaagatgctatcgctaaaaaaatcagcgctctccaagttgactttgctcagaaacacaagaacatttacatcgtcagctttggtgcgccaaacgcagggctctgtaaacggttccgcgtccagatctgcagacgggaagtaccacataatagatcacgagtatgactgtgtggtaatcggtgccggtggtgccggccttagagcggcctttggtcttgccgaggcgggctacaagactgcttgtatatccaagcttttccccaccagatcccacactgttgctgctcagggtggtatcaatgccgctctgggaaatatgcacaaggataactggaaatggcatatgtacgatactgtgaaaggatctgattggctaggtgaccaggactccatccattacatgaccagggaagcgcccaaatcgatcattgaactggaacactatggtgttcctttttcaagaactgaaaacggtaagatctaccaaagagcctttggtggtcagaccaaggagtacggtaagggtgctcaggcctatagaacatgcgctgtcgcagacaggacaggacatgctcttttacacacgctttatggccaagctttaagacatgacacacatttctttattgagtactttgccctcgatctgttgacccataatggcgaggtcgttggtgtcatcgcttataatcaggaagacggtaccatccacagattcagagcacacaagaccattattgccactggtggctatggtagagcatacttctcttgtacctctgctcacacatgtacgggtgacggtaatgccatggtttcgcgtgctggtttccccttgcaagatttagagtttgttcaattccatccttcaggtatatatgggtctggttgcttaatcactgaaggtgctcgtggtgaaggtggttttttggttaattctgaaggtgaaagattcatggaacgttacgctcctacggccaaggatctagcttgtagagatgtcgtttccagagcaatcaccatggagatcagagaaggcagaggtgttggtaagaaaaaggaccacatgtacttacaattgagccatctacctccggaagttctaaaggaaagattgccaggtatctctgaaacagcagccatttttgctggtgtagacgtcaccaaggaacctattcccattattcctaccgtccactataacatgggtggtattcccacgaagtggaatggtgaggcattaaccattgatgaagaaactggcgaagacaaggttattcccggtttaatggcttgtggtgaagccgcttgtgtttctgtccatggtgccaatagattaggtgccaattccttgttggatcttgttgtctttggtcgtgctgttgcccatacggttgctgacactttacagcctgggttgccacacaaaccactaccttctgatttgggtaaagaatccatcgcaaacttggataaactaagaaatgctaatggttcaagatctacggcagaaattagaatgaatatgaaacaaactatgcaaaaggatgtttccgtctttagaacacaatcatctttagatgaaggtgttcggaacattactgcagtagagaagacctttgatgatgtgaagacgaccgatagatcaatgatctggaattctgacttggttgaaactctggagctacagaacttattaacctgtgcctcccaaacagctgtttccgctgctaatagaaaggaatcccgtggtgctcatgcaagagaggattatccaaatagagatgacgaacattggatgaagcatacattatcctggcaaaaggacgtcgctgccccagtgactttgaaatacagaagggttatcgatcacactttggacgaaaaggaatgtccttccgtacctccaactgtaagagcctactaatttgaacctcattgtattttacggaaaagaatatcatactcttctttaattgcactttttttgtgcgtttgcacttttttaccactgactcactaatttgtatatatacctattaatatacatttacataaagtttcttcttatacatactctatttatttagttatttattaacttactattta

SEQ ID NO: 1832 - DNA, 1366 bp, Saccharomyces cerevisiae
cgggtagtataaagacattctgtagtactatttaaattagaaaattcattgaacaaggtaatatgtttatcctttcaaaaatcgctgacttggtacgaatcccgcccgatcaattccatcgcgatacaatatcggcaatcacacatcagttaaataataagttcgccaacaagattattcccaatgtcggtctatgtattacgatttacgacttattaaccgtcgaggaaggccaattgaagccaggcgatggatcatcctatattaacgttacatttcgagccgttgttttcaaaccgtttctaggtgagatagtaactggatggatttctaaatgtacagcagaaggcataaaagtttcactgttaggtatatttgatgacatttttatcccacaaaatatgttattcgaagggtgctattatacccctgaagaaagtgcatggatttggcccatggatgaagagacgaaactatatttcgatgtaaatgaaaaaattagattcagaatcgaaagagaagtttttgttgatgtgaagccaaaatcacccaaagaacgagaattggaggaaagagctcaattagagaatgagattgagggtaagaatgaagaaactcctcaaaacgaaaaacctccagcatatgccctattaggtagttgtcaaactgatggcatgggactcgttagttggtgggaatgatagataaggacgccactgacttcaataaaacatttaataataatagtaacagtaataatgaggataataatatataataaacgtgaattttctttagcattatatacgctaattctttctctatttgaggggatactctcgtatcctttttatctcgatagttgtagttgtacttgttgtttttattaacccttctcataatatataataaaaaagtacattgacgtcaattatattgcatataacgcgatgtggaactaaacttcttgtatccgctaataactttatcaacagccttcaggaaatccttttcagtagccacctttcttcttgctctaatggcaaacataccggcttctgtgcaaacagatcttaattctgcaccggtagagtttggacacagtctggagataagttcccatctgatgccacgttccacactcattgatttagagtgaatacggaagatatttgcacgaccttccaagtcaggtaatgaaaactctaccttacgatcaattctaccgggtctcaataaagctggatctaaagtgttgggcctattggtggcaaacatcactttaatgttaccacgagggtcaaacccgtctaactgtgtaatcagttctaacatagttctttgaacttcattatcaccaccagca

SEQ ID NO: 1833 - DNA, 291 bp, Saccharomyces cerevisiae
caaagaatttcaggcaagagaatgaacgctaacaaacaaaggcagtataatcagcttgcacacgaacttagagagcttcaaacgaatttacaggaaacgacaaaacaactagatatcatgtcgaaacaatgtaacgaaaacttggtaggccaattgggtaaggtacatggaagttggttgataggtagttacatttattatatggagcagatgcttggaaaaacgcaataaggcataagaggtaagacagttagtggccaggctaatttataagatgtgaaatgagatggt

SEQ ID NO: 1834 - DNA, 546 bp, Saccharomyces cerevisiae
ataacaaaaggacaaagggaagccaaagagggaaaaaagatatccgtactttgtaggaaggagacgtatttaaaaggctacccaagttataagactccaatgtttggcccattcaaattaacaagccccgtcgctggtggcctactatggaaaattccatggagaatgtccacacatcaaaaaacccgtcaaagggaaagattaagaaacgttgatcaagtcataaagcaattaactttaggtctccacgtccaaagatgtcaggataaaggtcttacttatcaagaagccatggagagcaaaaagaaatacaagccaagaagtaaatcgttaaggttgttaaacaaaccatcagtctttccaaaggagaatcaaatgtcttctaaagataaatattggacttttgataaaaaagctgttggttataggaagggtattcataaggtgcccaagtggacgaagatttccattagaaaggccccaaaattcttttgaatgatacgtaaaagatcgttttattgatataaaaatttcatctgtatatag

SEQ ID NO: 1835 - DNA, 2334 bp, Saccharomyces cerevisiae
ttattgtcataatacaccaattatctgggtacgaactcacttcctgcagcttagtttttttttttgctcagcttcccactgcacttaaaaaacagtttcaactatgccaccattggataaaagaatcaagaagtttctaaaagactccattagaattgcgccaaaaatatccggtaagggtgaactaagtgaattaagaactggattagtatctcaatacccacagactcggaaagatgcaataaagaaaacgatccagcaaatgacgttgggaaaagatgtctcttcgctgttcccagacgtcttgaaaaacattgccacaattgacgttgaacaaaaaaaactggtttatctttatgtgatgaattatgctgagacgcatcccgaattatgtattcttgccgttaacacattcattactgatgcacaagatccaaatcccttaattcgctgcatggcaatcagaacgatgtcaatgataagagttgacaaaatcctggaatacattgaaacaccactccgccgtaccttgcatgatgataatgcatatgttagaaaaaccgcagtgatatgtgtcgcaaaacttttccaattaaacaaggatttatgcgttgagttgggtgtcgtcgaagatttggtcaatgccctagatgactcaaatcctttagtcattgcaaacgcaacagcagcattaattgaaattcacaatatggatatggatgccgttgatctttcaagtttgatccagtcccacgtttcacaattcttattagctttgaacgaatgtacggaatgggctagaattatcatactaggaactctttcggaatattcggcaaaagattctttagaggcacaagatatcattgatcgagtaactgcgcatttacaacacgttaatccagccgttgttttagctacaataaaggtaatcgtaaggaacttgcctcaaattgaatattcctcgaacagtctgataatgaaaagattatcatctgcttttgtatcactgatgtctacgccgcctgaaatgcaatatgttgctttgaaaaatattaggatcatattggagaaatatccagagctgttaaccaaagaattgagaatattttatgtcaagttcaacgatcctctttacgtcaagttagagaagatcgatatccttgtaagactagtcgatccttccaacttgaaacaatgtactttgttgttgacagaattaaaggaatacgcaatggaatatgaacctgagtttgtttcaagagctattcaagctttgtcccagttgggtattaaatatgcacaagaatcattcgtcagtaaagtcttggatattctcctagaattgttagaaagacaagacacaataaaagacgactgctgtatatcattatgtgatttattaagacattgccccggaaacgataagatggccaaacaagtttgtgcagtatttaatacttggtcaaatccagaggtgttattacaatcagatattgcgaagtgcaactatgtctggttgctaggacagcatcccaacaatttctcagatttggagtcaaaaatcaatatttttatagagaactttgttcaagaggaagctttaacacagatgtctttactaatgacaatagtcagactacatgctactttaacgggtagtatgctacaaagcgtcctagaattggccacacaacagacacatgaattagatgtgcgagatatggctatgatgtattggagatgcctttcgatgccaaataatgaaagtttggttaatgatctatgtcaaaataaacttccaatgatctccaatacactggagaagttttcaccagaagtgctagagaaactattaatggaattgggtactataagttccatttatttcaagcccgactcaaataggagaaaaggcaaaaagtatgttcaaaatatagttaaaggaaaacatatagaggaattagaaagcatggcaaaaaatgaaatttctagcaaggctaacgatgatgtgctattggattttgatgaaagagatgatgtaacaaatacaaatgcaggaatgctgaatactttaacaactttaggcgatttggatgatttatttgatttcggaccatctgaggatgccacacaaataaatacaaatgataccaaggctgtacaagggttgaaggagctgaaactaggtggcgactcaaacggtatatcttctggtggtaaaaacaatcccgatgtttcgggcggcaatatagtgtcacaggatctcctcgatttattctgactataaacgtccgttgtagtgaacttaagtattataccatacatatatac

SEQ ID NO: 1836 - DNA, 903 bp, Saccharomyces cerevisiae
cacagtaaaccctccttaattttccttttgcataataccagacacttaaaaatgagcaaagacaaagatatcaaagtcactcctggaacttgtgaattagttgaacaaatactcgccttactctcccggtatctctcatcttatattcacgtgctgaacaagttcatcagtcatttgcgaagggtagctacgctacgattcgagagaactactttgattaaatttgttaagaaattgagattttacaacgattgtgtgttaagctataatgcatcagagtttatcaatgaaggtaaaaacgaattagacccagaggcggattcgtttgacaaggtaattttaccaatagcttcaatgtttgttaaatgtgttgaaacgtttgacttactgaactattatctaacgcagtcattacaaaaggaaattttatctaaaactttgaacgaggacctaacgctaacagcagagtccatattagccattgacgatacctacaatcatttcgtgaaattttctcaatggatgattgagtctttgcgtataggcagcaacctgctagatttagaagttgttcaatttgccattaaatgcgcagatgaggacggaacgaatatcggagaaactgataatatcttcttgcaggagattcttcctgtcaactccgaagaagaatttcagaccttgtcagctgcgtggcactccattttagatggtaagctgagcgccttggacgaagaatttgatgttgtcgctactaaatggcatgacaaatttggtaaattgaaaaactgaggccttcagtttttagctcaaaaagagcaaataagtaccactagttaatagaacatatatatatacatgaatagcctcatcacatagcacagaaagtaagctttcaaaaca

SEQ ID NO: 1837 - DNA, 1043 bp, Saccharomyces cerevisiae
accaacagttattcaacaatgtcactcagagcagtcccaggatattttgctgcatatccaagtgagggttttcaaggattagactccacgaaatatgatcacttagaattgattaaccataagaattggaaggaactgtatcatgctatccctagaaataccaaaaatcgccactataagctgttgattttagctaggcatggtcaaggttaccacaatgctgccatactgaggtacggtatggagaaatgggacgcctattggtcgttgctttcgggcgatgaacatggagagtggcttgactctaaactgacacctctgggtaaagatcaagttagaagaacaggatcgaatgtcttgctaccaatggcaaagcaattaggtatgctacctcatgtgtttttcagttctccaatgagaagatgtctcgaaacattcattgagtcgtggacaccagtgttagcggagacgcaagaattaccggccggaactaaaatttctacacgcattatagaaggtctaagggagacgttgggctctcacacttgtgacaaaagagtggctcactcaatggcagttgacgaataccaggatttcagcacggaatcgggccacactgtacattggcaatatgtaccagattacccagaagatgatgaattgtggcttcctgatcatagagaaacgtgtgctgaaatggacaaacgtacactgaatggattatttgaactatttaatcaattgtcaagcgaagaaaaattcatctcgcttacttgtcactcaggtgtcattcaaagtgtcttgagaaacttacagcatcctccaatttataacctggacacaggtaaagtcgtcgctgtcgtcgtggaagtaccagtcaacacggccgatcgcggcaggctctgaattttcccacagcgcccattcgggactttcaaatatgtgggtaatttaaataattttttatagatataatagagtggatggaataaaaccctttcttttcaaataatgtgttaagcactttgagaaatggttgaacc

SEQ ID NO: 1838 - DNA, 593 bp, Saccharomyces cerevisiae
caaattaacagacctaattgaactggaaaacatgtctgtgaaacccattgacaactacatcacgaacagtgttcgcctttttgaggtgaatccatctcaaacgctcttctccatatcgtataaaccaccaacacagaagacagacaccaaagtgtcctttagaactcataactcgcatttatccttgaactataaatttactactaataagagtaaagatgtttcaagattacttagtgcattaggcccacgaggcgtatctataactccaggtaaaattgaaaaaatagcacagtcgaagaagaaaaataacaaaataaaagaatcgagtaaaaaaataaaaggtaagagcatccaagacattgttggtttagccaccttaattgtcaacacagatgtcgaaaagagcgatcctgcggctaagaaaactgctacagaaccgaagcaaaaagctaatgctgtgcaaaataacaatggtaactctgcagcttcaaaaaagaaaaaaaataaaaacaagggcaaaaaaaagcgttaaatatttcatgtatactaggagattgaatatgaaataaaatactatatatatatattta

SEQ ID NO: 1839 - DNA, 753 bp, Saccharomyces cerevisiae
atgttcgaaattaaactgaatgatagaataactgaatttctgcgaaagttcaagaatagcgcgaaatcaaacgaaggaattgatgaggacattgatttgttcctgaagcgacacgcaatacctatgcagtcacttcttttttatgtgaaagagtatagaaaagacagtgatctccaatgctctatcaaagaacttttgaaacctttggagttcgaattcaagcccaaggccgtcagaggtttacactattcagaggatttcaagaaaaaattagagtttttgaaatatcaggaacaagaacttgaatatcaaagtatggtcaagagaagcaagtctgtcttttcacttcaagaagacgatgaactcacgccttcacaaattaataaacagattaaggaacaagttaccactgttttcaacgttcttgtaagtgtcatatcggttgttgtggccatttggtactggaccggatcttcaacaaactttccggtccatgttcgtcttttgttgtgcttgttctttggaatattggtcttagtagcagatgtggttgtgtataacagctatctgaaaaaactcgaagaagcaaaagtaaaagaaaaaacaaaggttgagaaaaagaaagttctaagcaagattacactgtaactgatcattttataaataagaactccgagatccgagagcatataattcttggaactggacaattgtgaataatgttctgtatgtttataattacgtttataaaac

SEQ ID NO: 1840 - DNA, 1983 bp, Saccharomyces cerevisiae
gtgtgttctttatcttttttttcttttttacacaattagacaagtatattttgagatagtaatcacatctacgcttcgaattcatccatacccacagcagctgttaggttataccgacaatggatgaatatagtagtatatattcacaaccaaagactcctcggttgaaacaagaaggatttcccgactccattggcgatcaacacgaaaaggcattgattgatgaaaatggtgaggaagataaaaaaatggcatccactgaagggaccactggtgattctcgcagtacacctttgactgtatctattccgacgtttgaaaatgtccaagcattacctacaccgatgacctacactccgttatccccaggcaatctgtcaatgtcacctatagatcaatcctcgttgaatatacccaaaagacgaagtcatgcacgattactggatgatatgctttctgttacacaaccaaaccaaagagttgtttctgaacttattgcaccagctaatttatccccccaaagggttgtttccttaccaacagtgactgaagaggctttagtaaatgattctgttgatagtgataactacacgaaagaaccttattttcccgaaagtagtagttctaccgaaaagtgtgacgatgatatatttcagggatttcttttagatcactgggatcgcccgttattatggaaaaaggtcaggcccattggttcaggaaattttagtaccgtacttttatatgaactcatggaccaaagcaatcctaaactgaaacaagtggccgttaaacgactcaaatatcccgaggaattatcaaatgttgaacaaatcaatacatcgttacgatataaggaaactttatcccgtttggaaaattctctgactagggaattgcaggtgctaaaatcactaaatcacccatgtatagttaaactacttgggataaacaatccaatttttgttactagcaaaaaacctttatgcgatttgattataaaaactccaagagctctgccgccttgtgatatgattatgtcttattgtcctgcaggagacttattagctgccgtcatggcccgtaacggaagactagaagcgtggctgattcaaaggatttttacggaagtagtactggcagtaaaatatttgcacgaaaacagtattattcatcgggacctaaaattagagaatatactactgaaatatagttttgatgatatcaacagttttagggactcacccatttactgcaagcaaaatttcattgagctagcagattttggtctctgcaaaaaaattgagaacaatgagatgtgtacagcaagatgtggatcagaggattatgtctcaccagaaatcctgatgggagttccctacgatggccatttaagcgacacgtgggccttaggtgtcatactatacagcttgtttgaggacagattaccatttgaccctcctccaaacgcttcagcaagacagcgtagcagagctacgtcacatcgtattgccaggtttgattggagatggtaccggttaagcgattataaaactaatgtgggaaaacagattgtggaaaatacgctaacgaggaagaaccaacgttggtcgattaatgaaatttacgaatcccccttcgttaaaacgatcgctgatactctaagtttttcttgaaatttcccacggatgggagttactttcgttttctttcttattgcttacacctgataatcatccagcatatagaaattgttctttaaatatcacatacagttccattacttgacatttgcaacataatatttctgcttttttctctattttgcatccaatatagcttctatctgcttactactgtctttttgacaatgtacaatatatatctaagatagttacgaataaaaatatttttattaattccataatatttaattacatagaggcagccaataacaaacaggtaaagagttgtgtaaagtgc

SEQ ID NO: 1841 - DNA, 1403 bp, Saccharomyces cerevisiae
gtattttttataggaaacgcgacgcgtaacatcgcgcaaatgaaggttttgatgtattataatgaggtattcttccttatatacatcgatgaaaagcgttgacagcatacattggaaagaaataggaaacggacaccggaagaaaaaatatgggtattaaaggtttgaatgcaattatatcggaacatgttccctctgctatcaggaaaagcgatatcaagagcttttttggcagaaaggttgccatcgatgcctctatgtctctatatcagtttttaattgctgtaagacagcaagacggtgggcagttgaccaatgaagccggtgaaacaacgtcacacttgatgggtatgttttataggacactgagaatgattgataacggtatcaagccttgttatgtcttcgacggcaaacctccagatttgaaatctcatgagttgacaaagcggtcttcaagaagggtggaaacagaaaaaaaactggcagaggcaacaacagaattggaaaagatgaagcaagaaagaagattggtgaaggtctcaaaagagcataatgaagaagcccaaaaattactaggactaatgggaatcccatatataatagcgccaacggaagctgaggctcaatgtgctgagttggcaaagaagggaaaggtgtatgccgcagcaagtgaagatatggacacactctgttatagaacacccttcttgttgagacatttgactttttcagaggccaagaaggaaccgattcacgaaatagatactgaattagttttgagaggactcgacttgacaatagagcagtttgttgatctttgcataatgcttggttgtgactactgtgaaagcatcagaggtgttggtccagtgacagccttaaaattgataaaaacgcatggatccatcgaaaaaatcgtggagtttattgaatctggggagtcaaacaacactaaatggaaaatcccagaagactggccttacaaacaagcaagaatgctgtttcttgaccctgaagttatagatggtaacgaaataaacttgaaatggtcgccaccaaaggagaaggaacttatcgagtatttatgtgatgataagaaattcagtgaagaaagagttaaatctggtatatcaagattgaaaaaaggcttgaaatctggcattcagggtaggttagatgggttcttccaagtggtgcctaagacaaaggaacagctggctgctgcggcgaaaagagcacaagaaaataaaaaattgaacaaaaataagaataaagtcacaaagggaagaagatgagggggttctttttccactttcttcttttggtccttcaccttggcatatatgtaacatagatatttgtatacacgaacttttttcatctaatacttctcttttttt

SEQ ID NO: 1842 - DNA, 1237 bp, Saccharomyces cerevisiae
aatctttttttttctttttctttgactttttgccgttttgtcatcgtcatcgcgatggaaaaagaaatgaagaatacttgatgaacaggtgaaacttgaacaataacgtatcagaatgagggtaaagggaccttgtaaaacttttgaaaaaactaaacaggcaatttagtaagaagatgccactggtgctttttacgggatacccatgtagtggtaagacaacgcttgctaaacatttggtacaactactacagtccaagatcgatgcaaccccatcattaagtaaatattccataacctatcattcagatgaatctttaggcataaaacattcagattatataacttcccaagatgaaagaaaattgaggtcggagatcatctccgcagtgaaaagagatctatctaaaaacaagatagtcattgtagactcgttgaattatatcaagggtttccggtatcaacttcactgcgaggtgaaaaatttgtccaccacattttgtgtaattcaaacactgtgtccaccagagactatattcgagtggaataagacttcaaacccgaacccttgggaacccgagttattgaatcaattgattcaacgatacgaagagcctaactcaagcaaccgatgggactctccactctttgctattcttactcctcaggacaacataactgactacatcgacgatatttgtaaagtagtctttcaaacttccaaatcggctaaaaacagtggacacaatgatccgttgagtaagggcttacaaaaaccgaactcagccacggtactaaagcctgcgtctcagtccaatttcatccaggttctcgacatcgaaactagtaagataataaaaaccataatgaaccacatcaaaagcctgacttctattggcggggtaagtaacggaacaagagtcattgtttccgaagggattaccgatatcaatgatgatggttgcttcttcgtagacttgcccattggtaacgtcgttacgttggcgcaattgcagagattgaaaaggcaattcattaacttcaacaaactaagagatatagatcaagataggatcggtccgcttttcgctgattatcttaacaaaaacttgaattgagatatacatgtgattaatatcagaaggtaaatggcaagacgaaatttgcttgtttataatacaaaaaaacatacataagatataatatatatttcaatagaaaagaaaaagtatagaaa

SEQ ID NO: 1843 - DNA, 2549 bp, Saccharomyces cerevisiae
cacacttattttcactgcaaagttacagaaccggtgtcctttccaacatcatagttatatagttgagaaaaagtggacaaaaagccagcataaacaaggaataactgtatttcttttcttatatagttatcagggccaaataagcaataagttctcgagcaaatcaacagcaacttttataaaaaaatgtgtggtatctttggttactgcaattatctagtggaaagatccagaggagaaattatcgacaccttagtggatggtttacaaagattagaatatagaggctatgattccaccggtattgctatcgatggtgacgaagctgattctactttcatctataagcaaatcggtaaagtgagtgctttgaaagaggagattactaagcaaaatccgaacagagacgttacttttgtctctcattgtggtattgcgcatactagatgggctactcacggtcgaccagaacaagttaactgtcaccctcaaagatctgacccagaagaccaatttgtggtcgttcataatggtatcatcacaaattttagagaactgaagactcttttaattaacaaaggttataaattcgaaagtgataccgataccgagtgtattgctaaactatatttgcatttatacaatacaaatttacaaaatgggcatgacttagatttccacgaattaaccaagctagttcttttagaactagaaggttcatacgggttattatgtaaatcttgtcactatcctaatgaggttatcgccactagaaaagggtcccctttactgattggtgtcaaatctgaaaaaaaactaaaagtcgacttcgtggatgtggaatttcccgaagaaaacgctggtcaaccggaaattccattgaaatctaacaacaaatcatttggcttgggcccaaagaaagctcgtgaatttgaagctggttcccaaaatgccaatttactaccaattgccgccaatgaatttaacttgagacattctcaatccagggctttcctatcagaagatggatctccaacaccggtggaattttttgtttcttcggatgcggcatctgttgttaaacataccaagaaggtgctatttttagaagatgacgatttggctcatatttacgatggtgagttacatattcatagatctagaagagaagtaggcgcatcaatgacaaggtccattcaaactttagagatggagttagctcagatcatgaagggcccttacgaccattttatgcaaaaggaaatctatgagcaaccagaatctactttcaatactatgagaggtagaatcgactatgaaaataataaagtgatattgggtggtttaaaggcatggttaccagttgtcagaagagcacggagactgatcatgatcgcatgcggtacttcttatcattcatgtttggctactcgtgctatcttcgaagaattatcagatatcccagttagtgtggaattagcgtctgactttctggacagaaaatgccctgtcttcagagacgatgtatgcgtgtttgtttcacaaagtggtgaaactgcggataccatgctggctctaaattattgtttagaaagaggagccttaactgtcggaattgttaacagtgttggttcttctatctctcgtgtcacccactgtggtgttcatattaacgctggtcctgaaattggtgttgcctctacaaaagcttatacttcccagtatattgccttagtgatgtttgctctatcgctgtcagatgaccgtgtatcgaaaatagacagaagaattgaaatcattcaaggcttgaagttaatcccgggccaaattaagcaggtattaaagctggaaccaagaataaaaaagctctgtgcgactgaattaaaggatcaaaaatctctattgttattgggtagaggttaccaatttgctgctgctctggaaggtgctttgaagatcaaagaaatttcttatatgcattctgaaggtgttttggcaggtgagttgaagcacggtgtcttggccttggtggacgaaaacttgccaatcattgcttttggtaccagagactctctattccctaaagtagtttcctctattgagcaagttactgcaagaaagggccatccaattattatttgtaacgaaaatgatgaagtgtgggcgcaaaaatctaaatcaatcgacctgcaaaccttagaagttccacaaactgttgattgtttacaaggtctaattaatattattccattacaactaatgtcatattggttggctgttaataaagggattgatgttgattttccaagaaacttggctaaatctgttaccgtcgaataaattaacccttttactttctcttcgtcccccagcctcccatccgtctttctacaatcacttctccttcgcttttaatttttgaacttccattattctgcaatgcgcactacaagctggcgttaaagatgattccacttgtattctctatataaataaaaaattatattttatatgaataaccaaaaagatagttgcagccctaaattaga

SEQ ID NO: 1844 - DNA, 1763 bp, Saccharomyces cerevisiae
cctgatcagtaatcttagtgcaattgtagaaacctgcacaaccaacaaaattaagaaaaaaagaatggaggaacaacgtgaaatactggaacaattgaagaaaactctgcagatgctaactgtagagccatctaaaaataaccaaatcgccaacgaagaaaaggaaaagaaagaaaatgaaaattcgtggtgcatcctcgagcacaattatgaggatattgcacaggaattcattgatttcatttacaagaaccctaccacttaccatgtagtatcatttttcgcggagctgttagataagcataacttcaaatacttgagcgagaaatccaattggcaggactccattggcgaagatggtgggaaattctacactataagaaatggaactaacctatctgcctttatcctgggcaaaaactggagagccgaaaagggtgtcggtgtcattggatctcatgtggacgctttgacggtcaaattgaagcccgtctcctttaaagacacagcggaaggttacggaagaattgctgttgctccctatggaggtacactgaatgaattgtggctagacagagacctaggtattggtggtcgccttctttacaagaagaagggcactaacgaaattaaaagcgccttggttgattctacacccctacctgtttgtcgaattccttccttggctccccatttcggtaaacctgctgaaggcccatttgataaagaggaccaaactatcccggtcatcggcttccccactccggatgaggaaggtaatgaacctcccacggatgatgaaaagaaatcgcccttatttggcaaacactgcatccacctgttaaggtacgttgccaaattagccggtgtggaagtgtccgaattgattcaaatggatttagacttattcgatgtgcaaaagggtaccattggaggtattggtaaacacttcctttttgcaccacgtctagatgacaggttgtgtagtttcgcagcaatgattgctttgatttgctacgctaaggatgttaataccgaggaatcagatttattctctactgtcactttgtatgataatgaagaaatcggatcgttgacaagacaaggcgcaaaaggtggcttgttggagtcagtggtggaacgcagttcttctgcattcactaagaaaccggtcgatttgcatacggtttgggctaattccatcatcttgtccgcagacgtcaaccacctctacaacccaaactttcctgaagtctatttgaagaatcattttccagtgcctaatgtcggaatcactttatcactggatcctaacggtcatatggccacagatgtcgtaggaactgccctagtagaagaattagcacgccgcaatggagacaaagtgcaatatttccaaatcaaaaacaactcaagatcaggtggtactatcggcccatcattggcttctcaaacaggtgctcgtaccatagacctgggaattgcacagttgtccatgcacagcatcagagctgctacagggtccaaggatgtcggattaggtgttaagttcttcaacggatttttcaagcactggagatcagtctacgatgaattcggcgagttgtgattttgccacactctttttatttcttttgatttctgtttctttatcctttttctaaaaatacttttatttcgaatcaggaagaaaagaaaaatgtataaaaaaaaaaaaataaaacaccacaatcgtcaagatataaatatctatttataaataa

SEQ ID NO: 1845 - DNA, 1875 bp, Saccharomyces cerevisiae
ataatggggaacaaactcatacacgatggacaagtatttgaattcatttgttgaccacctttcagagtggtcatctcgtgcctttaggaacaattcatcaagcgctaaccaaagtgcgtcgaacaaggaattagaacaagtttttgaacagatcaatgctatagttgaaaaccacaataacaaattaaccactgcctttgataagatatcatatcgcgttgctcacaagattacacacttggtggaaagccattctttagtattcaactacgccactttagttctcatcgcaagtgctttggtcgttattggctcatttacgtctatttcttctattccatttacagctctacctcctacgagagaacactcattgtttgatcctacagattttgatgtggaccacgactgtcatgttatctaccgcgagaatgacgaagataaaaagaaaaagaagaaaagcaagaggtttttcgatatgatggatgaaaaacatgcgattatactgcccttaactagtggctgtactttactcgctctctattttgtgatcaagaaactacacctaaactggctaaaatatgtggtgaaaattttgaattttaatataacactgctaaatatcccagctggcacatttgtctactcctactttctcaactcacttttcagaaacctatcacatttagcttcttggaatcccctggttgttttaccaaggtatcgtgtaacaatagctgatgataacgaagacctgaacaagataggcgggtttgttaccaatttgaattacaaagatggattgaccaactcagttgttcacaagaaaacattggatgagattgaaaaagatcattggatgaagcatttttacagaagagaattagttgaaccgaaggatattaaatcgaagaggcagatcagcaacatgtatttgaatagcgcattaattgtttcgttcgttctgtccatcgtttctaccgtatatttctatttatcacccaatgattggttaatatccaatgctgtcagtatgaatatggctatttggtccattgctcaattaaaattgaagaatttaaaatcaggggccctaatcctaattgctctatttttttacgacatttgctttgtctttggtaccgatgtaatggttacagtagctactaaccttgatattcccgtaaaactaagcttaccagtcaagtttaatacagctcaaaacaacttcaatttttcaatacttggtctgggtgatattgccttgcctggtatgtttattgcgatgtgctacaaatatgacatctggaagtggcaccttgatcatgatgacactgaattccactttttgaactggtcatacgttggaaaatattttattactgctatggttagttacgttgcttctttggtatctgccatggtctccttgtccattttcaatactgctcaaccggctttattatacattgttccttccttgttgattagtactattttggtagcttgctggaacaaggattttaagcagttttggaattttcagtatgatacgattgaagtggataaaagtttaaaaaaagcgatagaaaaaaaggagaactctataacttattcgaccttcatcctatcagaatactataatgatgccgacaagtatgccttgcttggtgatgatgtaaacgaaaattttgacgatgatgaagaattcgtgcaagaggaagatctcagtgacagctctgaggaagagctttctgaagaagatctcttggatgacgaatcttcttgagctccaaaagaaacgacagctctttttacccctccagggttgtatttatcttctaatctaggacaatgtttgtaaaaccctctttc

SEQ ID NO: 1846 - DNA, 906 bp, Saccharomyces cerevisiae
tatcatcgaataatactagtggggttttctagttcgttacagccaacaacagacaaaagatatggctaaacttgtacatgatgttcagaaaaagcagcatagagaacgttctcagctaactagccgttccagatatgggtttttagaaaagcataaagactatgtgaaacgtgctcaagacttccacaggaagcagtccactttgaaagtcctcagagaaaaagcaaaagagagaaatccagatgaatactaccatgctatgcattcaaggaagacagatgcaaaaggactgctgatcagctcacgtcacggtgacgaagaagacgaatcgctttccatggatcaagttaaattactcaaaacgcaagatagtaattatgtgaggacgctgaggcaaatagagctgaaaaagctggagaaaggagcgaaacagttgatgttcaaaagcagtgggaatcatacaatattcgtcgattcccgagagaagatgaacgaattcaccccagagaagtttttcaataccacctccgagatggtgaatagatctgaaaatagattaactaaggaccaattagcccaagatatttcaaacaataggaacgcttcatcaataatgccaaaggaatcattagacaaaaagaaattgaaaaagttcaagcaagtcaagcagcacttacagagggaaactcaattgaaacaggtccaacaaagaatggatgctcaaagagaattgttgaagaagggttccaagaaaaaaatcgtagactcttcaggaaaaatttcatttaaatggaagaaacaacggaaacgttagatttttaccatctatatagtatatataagtgaatcaggcagacgttccgtaatccttcttttcatgttttataggattacgtttataaaaag

SEQ ID NO: 1847 - DNA, 949 bp, Saccharomyces cerevisiae
cagaggccaaaggcttaagcatcacatttcggtagtagtaaatagtttgttagttcacgtgcttttcattcgtctctattttacatattatgatgtcttcagaccaacaggggaaatgccccgtagatgaggaaaccaaaaagttatggctacgagaacatggcaacgaagcgcatcctggtgctactgccccaggcaatcaactagagtgctctgcaaacccacaagataacgataaaacgcctgaatatcacaccacggtggatctctctcagtccagagaggtttccaccataccaaggacgaattctgacagaaactggatatacccgtcggagaaacaattttacgaggcaatgatgaaaaaaaattgggatccgaactcagatgacatgaaggtggttgtgcctttacataactccatcaatgagcgggtttggaactacattaaaagctgggaagacaagcagggtggtgaagcgtgtggcggtatcaaattaacaaattttaaaggtgattccaaaaaactgacaccaagggcctggttcaggtcccgtatcttgcacctggccaaaccttttgatagacatgattggcagatagatagatgcggtaaaaccgtcgactacgtaatcgatttctattccaccgatctgaacgatgcaaactcgcagcaacaaccacttatttatctcgatgttagaccaaaattaaacagttttgagggctttagattacggttctggaaatctttaggcttttgaattactacaactattcctgtaaataaaaacataccctccctagtttccacatacatatttatttaatcttatttaggcactcaatttagaaactagggaatgaaaaagcagtaatcttcttttaaggaataaacaaaaaaaaaaaaaataaaacataaaacataacacaaaatactcttttctaa

SEQ ID NO: 1848 - DNA, 681 bp, Saccharomyces cerevisiae
ctgaaaaccgagaagaataaataatattgcgatgagtttatactttacgacattatttttattgctcactgttgaggtggtaatgctcttcatcttcgttttgcctttgccattccggatccgtaggggtatttttagcacctataaccaattgacagcgaagcagcaaataaaaactataatctttataacgggttgtcttgttggcctgttgtttattgattcatggaaaaggtctcaaattcgtgtttcattataccacaacgacaacagtggctcaatcgggtcatctgctgtaactccaatacaggcactagcatcaagagcgtacaatcaaagaaatatgtatatttccgggttcatattgtacttttctatctgtatcccaactgtcatgtctattgtcaagagactggtgaaataccaaggcttaatcaacgaacaagaaaagcaaaaattgaacaaaccttcctcaaacagcaagaaagactcaaatgaagctgattccaccaaacttcaagaggaactaaggaaaaagcaaatttctctggagggcctacaaaagcaagtcaaaaacctggagaaatattttgatgagaagaatcaacctggaaatgtagcagctgctgaagcttccaagaaaggaaactaaatagatatatttatgtataaatgtatata

SEQ ID NO: 1849 - DNA, 814 bp, Saccharomyces cerevisiae
agtgatttcgtcattaacattaagagttagcactttaccagagtgctattgccttccaacatacgttcctcccctccaaagtagtagtactatatagataaagctagggtattctgagcaaatataaatcaaactaaagtgattcataattatagaaaatatgcagggcgatatcagaaggaaaaaagatcttttacctcgttataaaacaggaagcaaatataattccagaagaaggggcggttatctgactacccctatgaaaaagattatagtatacattatactgttatgtggcgtttatttcgttataaaagttgcctattctgatctgaataaagaaactgagatcaagctagaaagccattcttctgatgtttctgcaagtgcaagcgatcataccaatattgcagccggcggtgcagctgatgcgactaacaataagcaaccacaacaagctaaagtacctaaagaaaagttcaataatgaagtcgcaaagcaacaagaagtaaagaatttggagaacgatttgaaaccacaaattgattcagaaaagcaaaaacaaataaacaaggacaaaaaagaacaaaaacagcaactccagaaagagaaacaagatctcgccaaggaaaatttggctaacaatgaaatccttgataattaaccaattcaaaacttccaacagtttggtgatgaaaataataaatgttttacgttaaccttattgattaacctcacctcccttattctttgtatagtataagtgcatactaacatactgtgtacgtacataaagatatgcagaacgttcaca

SEQ ID NO: 1850 - DNA, 3186 bp, Saccharomyces cerevisiae
ggtcgcaatttcactcgtacacaactgacctattatggcatgcctctcaagaattgatgcaaatttgctccaatattatgaaaaacctgaacccaataatacggttgatttatacgtcagtaataacagtaataataacgggctgaaagaaggagataagtccatctctacaccagttcctcagccttacggaagtgaatattccaattgtttgttattgagtaactctgagtatatctgttaccatttttcctcaagatcaacattgttgacattttatcctttgagtgacgcataccatgggaagacaattaatatacacttaccaaatgcttctatgaatcagagatacactttaacgatacaagaagtggaacagcaattactggttaatgttatcttaaaagatggttcgtttttaacgttacaactacccctaagtttcctattttcatcggccaacactctcaatggagagtggtttcatctccaaaatccctacgactttacagttagagttcctcatttccttttctatgtatcaccccagttctcagttgtttttttggaagatggcggtttgttgggtttaaaaaaagttgacggcgtacattacgagcctttactattcaatgataattcatacttgaaaagcctaacgcgatttttttctaggagttctaaatcggattacgatagtgtgattagttgtaaattattccatgaaagatacttaattgtgttgactcagaattgccacttgaaaatttgggatttaacttcatttactttaatacaagattatgatatggtttcacagtcagattcagacccaagccattttagaaaagtggaagctgtaggggaatacctttccttgtataacaatactctagttacattgttgcctttggaaaatgggctttttcaaatgggcaccttgttggttgattcaagcggtattttgacttatacttttcaaaataacatccccactaatctttcagcttctgctatttggtcaattgtagatttagttctaacgagaccattggagttgaatgtcgaggctagttatttaaatttgatcgttttatggaaaagtggcactgctagcaagttacagatactaaacgtaaatgatgaaagtttcaaaaactatgaatggatagaatcagttaacaaatccttagtagatttgcaatccgaacatgatttggatatcgttacaaagactggagatgttgagaggggtttctgtaatttgaaatcaagatatggtacccaaatttttgaacgtgcacagcaaatattgagtgaaaataagattattatggctcataacgaagatgaagaatatttggctaatttagaaacaatattgagagacgtaaaaaccgcattcaacgaggcttcttctataacactttatggcgatgaaattattctcgtcaattgtttccaaccgtataatcattccctttacaagctgaatactactgtggagaattggttttataatatgcactctgaaactgatggttctgaattgttcaagtatttaaggacattgaatggttttgcttctactttgtcaaatgatgttcttagatccatttctaagaagtttcttgatataataacaggagagctgcctgattctatgactaccgtagaaaaatttacggacattttcaaaaattgcctagaaaatcaatttgaaatcacaaatctaaagattcttttcgacgaattaaactcttttgatatacccgttgttttaaatgatttaatcaataaccaaatgaagcctggtatattttggaaaaaggatttcatctctgcaatcaaattcgatggtttcacaagtataatttccctagaatctcttcaccagttactttccatacattatcgtattactttacaagtattgttaacattcgttctgttcgatcttgataccgaaattttcggacagcatatatctacattattggatttgcattataagcaatttttattgttaaacctttatagacaagataagtgtctgttggcggaagttcttctcaaggattcttctgaattctctttcggtgtcaaattttttaactacggccaactcattgcctatatcgattccttaaactctaatgtttacaatgcttccatcactgaaaattctttctttatgacgtttttccgctcatatatcattgaaaacacatctcataagaatataaggttctttctcgagaacgttgaatgccccttctacttacgccacaacgaggtgcaagaatttatgtttgccatgacgttatttagttgtggtaatttcgatcaatcctatgaaatttttcaactacacgattatccggaggctatcaatgataaattgccgacattcttagaagaccttaagagtgaaaactatcacggtgatagtatatggaaagatcttttgtgcacctttacagttccatataggcattctgcattctattatcaattatctctcttatttgatagaaataacagccaagaatttgctttgaaatgtatatctaagtcagcagaatattcattaaaagaaattcagattgaagaactgcaagacttcaaagaaaaacagcatattcattatttaaatcttttaatccacttcagaatgtttgaagaagtcttggatgttttgagattgggtcacgagtgtctttccgacacagtaagaacaaattttctccaattattattacaggaagacatatattcacgagattttttcagcacacttctgcgcttgtgtaacgcacattcagacaatggcgagctatatcttcgtacagtagatattaaaatagtggatagtattctgtcacaaaatctacggagtggtgattgggagtgttttaagaaactttattgttttagaatgttgaacaaaagcgagagggctgctgcagaagtactgtaccagtacatattaatgcaagctgatcttgatgttattcgaaagagaaaatgttacctaatggtcatcaacgttttatctagctttgatagtgcatacgatcaatggattctaaacggaagtaaagtggttactttaactgatttaagagatgagttacgaggtctatagtgaatatataaactgtaaattaatacttcatttaaaaa

SEQ ID NO: 1851 - DNA, 765 bp, Saccharomyces cerevisiae
aatgttttcattcaatggtttactactttcattttagctttttaacaattttctttctggggtctcagttgcggttagcagattaacacagaacatactatagacaaatatgattatttacaaggatatcttctctaacgacgaattgttgtctgatgcttacgacgctaagttagttgatgacgttatctacgaagccgactgtgctatggtcaatgtcggaggtgacaacatcgatatcggtgctaacccatctgctgaaggtggtgacgatgatgttgaagaaggtgctgaaatggtcaacaacgttgtccactctttccgtctacaacaaaccgcttttgacaagaagtccttcttgacctacattaagggttacatgaaggctgttaaagctaagttgcaagaaactaacccagaagaagttcctaaattcgaaaagggtgctcaaacttacgtcaagaaggttattggttctttcaaggactgggagttcttcactggtgaatccatggacccagatgccatggttgtcatgttgaactaccgtgaagatggtaccactccatttgttgccatctggaagcacggtattgtggaagaaaagatctaagtctagcgaaattagaaaaattttcgtattttgtatttgaatttgagagtaggactcccctttctcatttttaatgtatatgtaacctctctctcttttttctctgcatcaactttttagcttctattctttgattctataggtatctaaac

SEQ ID NO: 1852 - DNA, 2490 bp, Saccharomyces cerevisiae
aaaaaaatcaccatcataaagtacttacatatttatttttgtttggtcgttttctcaatataatctacatcatcatatatatataatgtctacacaatttaggaagtctaatcataatagtcatagtagtaaaaaactaaatcctgcgctaaagtccaaaatagatacgcttacagaattgttccctgactggacgagtgatgatttaattgatatagttcaagaatatgatgatttggaaactataattgataaaattacttccggcgcagtgacaagatgggatgaagtaaagaaacctgctaagaaggaaaaatatgaaaaaaaggagcaacaacactcatatgtccctcaacaacatttgccaaatccagaagatgatattacatataagagttctaataatagcaattcttttacttctacaaagcataacagtagtaacaattatactcaagccagaaataagaagaaggtacaaacaccacgagctcatacaaccgggaaacatgttaatctcgacaaggggaagcacgtaccatccaagcctgtttcaaacactacatcgtgggcagcagctgtttctgtagatactaaacatgacgttcctcaagattcaaatgataacaataatgaagaattagaagcacaagggcaacaagcgcaggagaaaaatcaagaaaaagagcaagaagagcaacaacagcaggaagggcataataacaaagaagaacacaaacaaatagagcaaccttctttatcttcaaagaaaacaacttctaggacatctgcttcacaaccaaagaaaatgtcgtgggctgcaattgctacaccaaagccaaaggctgttaaaaagaccgagtctcctcttgaaaacgttgctgaattgaagaaagaaataagcgatattaagaaggatgaccaaaagtctgaagctagtgaagaaaaagttaatgaacaagaaacatctgcacaagaacaagaggaggagactgctgaaccttctgaagaaaatgaagacagagtccctgaagtggacggagaagaagtccaagaagaagctgaaaaaaaggaacaagtaaaagaagaggaacagacagcggaagagctggaacaagaacaagataatgttgctgctccagaagaagaagttacagttgttgaagaaaaggttgaaattagtgctgttatttcagagcctccagaagatcaagctaatactgtacctcaaccacaacaacaatcccaacaaccacagcaaccacagcaaccacagcaaccacagcaaccacagcaaccacagcaacaacaacaaccacagcaaccacaacaaccacaacaacaactacaacagcaacagcaacagcaacaacaaccagtacaagctcaagctcaagcccaagaagaacaattatctcaaaactactatactcaacaacagcagcaacaatacgctcaacaacagcatcagttacagcaacagtatttgtcccaacaacaacaatatgctcagcaacagcaacagcatccacaacctcaatcacaacaacctcaatcacagcaaagtccacaaagtcaaaaacaagggaacaacgtggctgcccaacagtactacatgtatcaaaaccaatttcctggatattcttatccaggtatgtttgattcacaaggatacgcttacggtcaacaatatcagcaacttgctcaaaacaacgctcaaactagtggtaatgctaaccaatataatttccaacaaggttatggtcaagcaggcgcgaacactgctgctgctaatttgactagtgctgccgctgctgctgccgcttctccagctacagctcacgcccaacctcaacaacaacagccatacggtggctcattcatgccatactacgcccacttttaccaacagtcattcccatatggtcaacctcaatacggtgtagctggtcaatatccataccagttaccaaagaacaattacaactattaccaaactcaaaacggtcaggaacagcaaagtccaaatcaaggtgttgcccagcattctgaagactctcaacagaagcaatcacaacagcaacagcaacagcaacctcaaggtcaaccccaacctgaagttcaaatgcaaaatggccaacctgttaacccacaacaacaaatgcagttccaacaatactatcaattccaacaacaacagcaacaagctgctgccgctgccgctgctgctgcccaacaaggtgtaccatatggctacaacggttatgattacaattctaaaaattcaagaggtttctactaataagggagaagtagaacctcccacataaaaaacgaaatggggaataaaatacaatgaatttaaatacacattttattaccactattatgttttactttcttcaatgtttgggcaaggattccatatccttttgatgatgtcatatatcatttaaattttgcatatatatatatacgtacgtaaataat

SEQ ID NO: 1853 - DNA, 424 bp, Saccharomyces cerevisiae
tgccgggagaggtcattagaaaacatctgtttgtgttttaacttgaattacaataacaataataccagttttatatggggaatataatgtcagctagttttgcgcctgaatgcactgacctgaagacgaaatacgatagttgttttaatgaatggtatagcgaaaaattcctgaagggaaaatccgttgagaacgagtgctcaaaacaatggtacgcttatactacatgtgtcaacgcagctctcgtcaaacaaggtattaagcctgctctagacgaagctagggaggaggcgccgtttgaaaatggcggcaaactaaaagaagttgacaaatgaagtatatattttagcacagaatgtgcattattcaacatgtaaatactaatactgcaatatcgacttataataatgtatagtgatccgta

SEQ ID NO: 1854 - DNA, 929 bp, Saccharomyces cerevisiae
aaagagcaacataagggattgttgacacaaaaaatggattctgcaagcaaagaggaaacattggaaaaacttgatcaagaaattacagtgaacctgcagaagatagactctaacttgagtttctgctttcataagatcacccaggacatcatcccacacgtggctacatattcagaaatatgtgagcggatcatggatagcaccgaatggctggggactatgtttcaagagactgggctggtgaatttgcaggcaaatgcagctgcaccagtgggaaacgctccagtcaaaagccttgtgagcaataatgttggtatatttcctacatccgctgaagaggcgagtaggcagtcccagacagacaatgggcctaacgaggcagattcagctgtacatgtcaaccgggatgtccattctatgtttaataacgacagtatagatgatttccacacagcgaatataacatccacgggacagatattgaaacttccggactctagcgacgaagatactggttcagaggcggtgccttcaagggagcaaacagaccttacaggcgagggtcatggtggagctgatgatgagcaagatgaaagtacaatacagagacaaagccgcaaaagaaagatttcgctacttttgcagcagcagtacgggtctagttccagcatggtaccgtctccgattgtgcccaataaaatgcggaagcaactggctcatgaagaacatattaataacgacggcgataacgacgatgagaacagcaataatatagagagctcgcctctgaagcaggggcaccaccacccgaagggacaagcggatgataacaacgaagggcccgatgaagaagagagtacgaaagaagtaccaaagcctgggaccatcattcatttttctacgaatagatagaataaataagtacatac

SEQ ID NO: 1855 - DNA, 1609 bp, Saccharomyces cerevisiae
tcatctattatatattcactgttactgtgttgatactcatattttataagcagcttaataggtgtgcgaacgggaggatttttggtaaaaagaggcttaaattacaagatacgaaagggtcaaaacgctagggaaacctttccaggacatataatagtggatacaacaaaatacacaccactttttttctgagctttctttcttttcagtctgttttaaaaacgaacacataaaaatgctagtaaataaagtgatagggttactgggtgtactcttcgcaacaagatttacaaatgccgtcgaattggatctagacaactacgaatctttgcaaaatgctacttcactaattgcctacggtttaatggattattacactggtaatcagtatggtaagacggtcggtatgttttcagatccgtactattggtgggaagccggtggtgcctggggctgtatgctagattactggtttttcatggataacgacacctataatgatgaaattatagcagcaatgatacatcaagctggtgatgataatgactatattccgctaaatcaatctaccactgaaggtaatgatgaccaagccttttggggtattgctgctatgactgccgcggagagaaactttactaatcctcccgagaatgagcctcaatggctatatttagcacaggctgttttcaataccatggctttgcgttgggatgccgattcctgtggtggtggtttgaggtggcaaattttcgtttggaactctggttacgattacaagaacaccgtttctaacggtgccttgtttcacatagctgcaagattagcaagatatacaggtaatcaaacatatgttgactgggccgaaaaagtttacgagtggatggtcggtgtgaacttaatttctaatggtacctataagtatgtttacgatggtgtcagcattgatgataattgcaccaaagtgacctcatatcaatggacatataatcaaggtttgctgttggctggctctgcctacctttacaactttacgggatcagacctctggcacacaagaaccaaagagtttttgaacgcttcccaagtgtttttccatgatggtattgtgtatgaagctgcttgtcaaggtccaaattcttgtaatacagatcaacgttccttcaaagcctattttgcccgtttcttaggtgtcactgcacaactagtgccagaaactaggaaccaaattatgtcttggttgaatacatctgccattgcggccgcgaaatcatgttctggaggtactgatggtcatacctgtggattgaattggttcaatgggacttgggatggtatgtatggtctaggtgaacaaatgtccgccttagaagtaatggtcaacacgagggccttagataaacccgcaccatacacggcagagaatggtggttcatctgttggtgatggggcagcaggtactcaagcgcaacccacaaatttggcaccattaaatatcactaagggttcaaaggcaggtgcaggtattattaccgctgtcattggtatttcaattgtcgcatgtgctctgtggttagtcttttgatgcagaacttatgaaagcttaaca

SEQ ID NO: 1856 - DNA, 1428 bp, Saccharomyces cerevisiae
aattcccaaattatgttcaacattacggatattacaatgttcaatgcgcataatacaccatagaagaaaattggcactacgtatatactgtccattgttcttttaaacacaaaattgaaacgtctgcggtctcttgaggataaaacaatgtacattgagtatagtaacatgctaagcgttagcttgtatcatcaagaccgtcaaagcaggcatttcatcaaatctataggaccacttagcggagtcctggtgattgtagaaatagccttctaacgtatcaagtgataaataatttaagttttccgaatttcagtgatctacttacaatattgcttattaatcattataaaaagaagcgtatttagcggactaattagaatacataaggcattctcagcgtaatctaagcaaaaaagcaagaaattgactaacaatgttcaaatcagtggctaaattggggaagtctccgattttttacttaaattctcagagattaattcatattaagactttaacaactccaaatgaaaatgctttaaaatttctctccacagatggcgagatgctacagacgcgtggctccaagagtatagttattaagaacactgatgaaaacctcatcaaccattccaagttagcacagcaaatttttttgcagtgtccaggagtggagtctttaatgataggtgatgattttctcactattaataaagacagaatggtccattggaatagtatcaagcctgaaattatagatttgttaaccaagcaacttgcttacggtgaagatgttatatccaaagaattccatgctgtccaagaagaagaaggagaaggtggctacaaaataaatatgcccaaatttgaacttaccgaagaagatgaagaggtcagcgaattgattgaagagctgatagatacaagaataagaccagccatcttggaggacggcggtgatatcgattaccgtgggtgggatccaaagactggaaccgtttatttaagattacaaggtgcatgtacctcatgctcttctagtgaagtgactttgaagtacggtattgagtccatgttgaagcactatgtggatgaagtgaaagaagtgattcagatcatggatcctgagcaagaaatagcattaaaggaatttgataagcttgaaaaaaagttggaatcgagtaaaaatacaagccatgaaaagtaaatattccgtccttcaaatgaaaatacaagatgagacgaaaataaaaggaagtgtgtatatactgtctttaccctcactattacttgatagtccgtacatgtttcaacggtcatcatggaaaaagggtaaagcactcaactttttccatacactaaaaacgggtgccctttttactgtgttattcgtaccattatttattcacttatttatttattttctttgta

SEQ ID NO: 1857 - DNA, 2111 bp, Saccharomyces cerevisiae
tgcctaacagctactgctaccgagactgtgacgctgaagtttattcgctctgatatcccacaaagaactctattacacacagacaaggcaaggcaacgcaagtcaaggcaagaccacaactatatccccttcttctatccattctgtgatatacgtacgacgctaacagtacccacaactgcaatgaacaccggtatctcgcccaaacaggacgacgcctctaactccaacttactcaacataggccaagaccattcgctgcagtatcagggtctcgaacacaacgactcccagtacagagatgcttctcaccagacacctcaccaatacttgaaccagtttcaagcccagcctcaacaacaacaacagcagcagcagcagcaacaacagcaacaacaacaagcgccttatcaaggtcacttccagcagtcgcctcaacaacaacagcaaaatgtttattatccactacctccacaatctttgacgcaacctacttcgcagtcgcaacaacaacaacagcaacaacaacaacaacagtatgctaattcgaactcaaattcaaacaacaatgttaatgttaacgcgctacctcaggatttcggttacatgcaacaaaccggatcgggccaaaactatccgacgatcaatcaacaacaattttccgagttttacaactcctttttaagtcatttaactcaaaaacagacaaacccttctgtcacgggtacaggcgcgtctagtaacaacaacagtaacaacaacaatgttagtagcggcaataacagcactagcagtaatcctgcccagctggcagcctcccaattaaaccctgccacggctgctgcggccgccgcaaacaatgctgctggcccggcttcgtacttgtctcagctcccacaggtgcagagatactacccgaacaacatgaacgctctgtctagtcttttggacccttcctctgcaggaaatgctgcaggaaatgccaacaccgctactcatcctggtttgttaccacccaatctgcaacctcaattgactcaccaccagcagcagatgcagcaacagctgcaattacaacaacaacagcagttgcagcaacagcagcagctacaacagcaacaccagttgcaacaacaacaacaacttcaacaacaacatcatcatctacaacagcaacagcagcaacaacagcatccagtggtgaagaaattatcttccactcaaagcagaattgagagaagaaaacaactgaaaaagcaaggcccaaagagaccttcttccgcttatttcctgttttctatgtccataagaaatgagttgcttcaacaattccctgaagcaaaggtccccgaattgtctaaattggcttctgcaaggtggaaagagttaacggatgatcaaaaaaaaccattctacgaagaattcagaaccaactgggagaagtacagagttgtgagagatgcttacgaaaagactttgcccccaaagagaccctctggtccctttattcagttcacccaggagattagacctaccgtcgtcaaggaaaatcctgataaaggtttaatcgaaattaccaagataatcggtgaaagatggcgcgagttagaccctgccaaaaaggcggaatacactgaaacttacaagaaaagattaaaggaatgggaaagttgttatcccgacgaaaatgatccaaacggtaacccaaccggtcactcacataaggccatgaacatgaatttgaatatggacactaaaatcatggagaaccaagacagtatcgagcacataaccgcaaatgccatcgactcagttaccggaagcaacagtaacagtaccaacccaaatacgcccgtttctcctccgatttcattacagcagcagccgctccaacaacaacaacaacagcagcaacaacaacaacacatgttattggctgaccccactacaaatggttcgatcataaaaaatgaataacaaataaacaactttagttttccactgtaacattatcccacgcaaacaacgagaataaggaattcctttttcaacatttgttttatattgtactactctatttcctattactacaaattttactttatttaata

SEQ ID NO: 1858 - DNA, 2055 bp, Saccharomyces cerevisiae
cacataaataccaagacaaaaggtagaaatacggttatgcttagaaccagactatccgtttccgttgctgctagatcgcaactaaccagatccttgacagcatcaaggacagcaccattaagaagatggcctattcagcaatcgcgtttatattcttctaacactagatcgcataaagctaccacaacaagagaaaatactttccaaaagccatacagcgacgaggaggtcactaaaacacccgtcggttctcgcgccagaaagatcttcgaagctcctcacccacatgccactcgtttgactgtagaaggtgccatagaatgtcccttggagagctttcaacttttaaactctcctttatttaacaagggttctgcatttacacaagaagaaagggaagcgtttaatttagaagcattgctaccaccacaagtgaacactttggacgaacaactggaaagaagctacaagcagttatgctatttgaagacgcccttggccaaaaacgacttcatgacgtctttgagagtacagaacaaagtcctatattttgcattaataaggagacatatcaaggaattagttcctatcatttacaccccaaccgaaggtgatgctattgctgcctattcccacaggttcagaaagccagaaggtgtgtttttagacattaccgaacctgattccatcgaatgtagattggctacatacggtggagacaaagatgtagactacatcgttgtgtcggattcggaaggtattctgggaattggtgaccaaggtatcggtggtgtacgtattgctatctccaaattggcattgatgacgctgtgcggtggtattcatcccggccgtgtgctacctgtgtgtttggacgtcggtactaacaacaagaaactagcccgtgacgaattgtacatgggtaacaagttctccagaatcaggggtaagcaatatgacgacttcttggaaaaattcatcaaggccgttaagaaagtgtatccaagcgccgttctgcatttcgaagatttcggtgttaagaacgctagaagattactagaaaagtacaggtacgaattgccatcattcaacgatgacattcagggcaccggtgccgtcgtgatggcctcgttgattgctgctttgaaacataccaacagagacttgaaagacaccagagtgcttatttacggtgccgggtctgcgggcctcggtatcgcagatcaaattgtgaatcatatggtcacgcacggcgttgacaaggaagaagcgcgcaagaaaatcttcttgatggacagacgtgggttaattctacaatcttacgaggctaactccactcccgcccaacacgtatacgctaagagtgatgcggaatgggctggtatcaacacccgctctttacatgatgtggtggagaacgtcaaaccaacgtgtttggttggctgctccacacaagcaggcgcattcactcaagatgtcgtagaagaaatgcacaagcacaatcctagaccgatcattttcccattatccaaccctactagactacacgaagccgttcctgccgatttaatgaagtggaccaacaacaacgctcttgtagctaccggatctcctttcccacctgttgatggttaccgtatctcggagaacaacaattgttactctttcccaggtatcggtttaggtgccgtactatcgcgtgccaccaccatcacagacaagatgatctccgctgcagtggaccaactagccgaattgtcgccactaagagagggcgactcgagacctgggttgctacccggcctggacaccatcaccaacacttctgcgcgtctagctaccgctgtgatcttgcaagcactcgaggagggaaccgcccgtatcgagcaagaacaagtaccgggaggagctcccggcgaaactgtcaaggttcctcgtgactttgacgaatgtttacagtgggtcaaagcccaaatgtgggagcctgtgtacagacctatgatcaaggtccaacatgacccatcggtgcacaccaaccaattgtagacgaagcat

SEQ ID NO: 1859 - DNA, 2082 bp, Saccharomyces cerevisiae
tcttacgccatggacaaaatcaatcctgattgggcgaaggatattccgtgcagaaatatcactatttatggctactgcaaaaaggagaaagaaggttgccctttcaaacacagcgataacactaccgctactaccataaatgacgttcctcctccaatagatgtgggtgaggctacaactccgaccatgacatcagttcctaagttcaatgctaaagtatccgcaagtttcactccgatgacagtcggtagtgactccttaaccactgtgacgaataccacctccgctgctacaaatgctactggcaatatcgccatggcagctacctctgctactgcttctacagttaatccgatgattaatccgatagttaatagctcgttagtgaataacaataacaataatagtaatataagcatatcaataccaactaccgcttcgagttccaattacgaccccttcaatgcccccattttcactccgtcttcaacctcctcaattcacactaatgcaaatgcacattcttttccatttccctccattgcaaattctggtggcataaatataaacgccactgatgataatagtaacaatatgagtatggctaataatgtgccacctcctatgcaaccgccacccatagagagtagtaatcttaagtacccacgtatttatccgcctcctcacagtcttctacagtatcacctatatgcacctgaacagccatcatcattgaaatcattattaaagcctaatgaaaggtctgcagatcagcttttcattccaaacaatattagagaagatttaaccaagaaaaacttatcgattttgcaggttttcccctcttcaggtaaagttataccaagtattgtacaagattattttaatttggttccattgaacttcaataataacgattttttaaataaaactacgctcttcaaagttttttccaattatgacggtaaagcctacgttttgaagaggcttcctaacatcgataagtcaatgaatccaaacaaaatatccaaaatatatcagatatggtcaaaaattaattgtacaaatttgataaagtttagggacatttttcaaactactaaatttggtgatctgtctatttgtttggtctttgactactacccaaactcgctatctttgtatgattaccactttgttaatttccctaagtttccaataacgaataattatttatggatatatttagttcaactcaccaatgtaataaactctatccattcacaaaacttgagtattggcaatacattaaactggagaaaagttttgattactggggacccagggagaatcaagttatcacactgcaattttatggaccttttgttcaatgatgatactgataccgtagtatcttccggcggaagtaccatagagggacaacaacagctagactacaaatatttaggagagctattatttaacctatccattaatattgaaaactctaataacaacactgcccctaaagaatatcgattggaggaaataacccctcaatcaattgatgacatgagacagatcgatgataagttcaaggatgtactcaagtatctgatatcagacaacggcgattccaaaaagagcattcatgatcttactagtcacttttatgataagatgttcatggtcctggaatcgtcacaaacctatacagaatacatggagtctgtcttatcaagagaactagaaaatggcagattatttaggctggtcaacaagctaaattgcatttttggtagaatcgaatcaagaatagacataaattggtccgaatctgggactaaattccccattatactattttatgactacgtattccatcaagtggattcgaatgggaaaccaataatggatttaactcatgtcctaagatgtttgaacaaattagacgctggtattcaagaaaagttaatgttggtaacgcccgatgagttaaactgtattattatatcctataaggagttgaaggacttgatagaatccacctttcgatccatcacccaataaaacaacaccaaataatgtagatacacacatata

SEQ ID NO: 1860 - DNA, 923 bp, Saccharomyces cerevisiae
cacgctacaggtttatactgagattttattcttcgaaaaaaccaactttccacaatacagcaccttcgaagaccaacgtaaacgtaccacgcgctaacaaaagtcaaagcaagggtaaacacaaaggcaaattgttggtactcgtaggaactttagcactcgtgacatcagttatttcggtaaactatcaaaagaacgaaccagttgaatttcttgaataagacaaatgacagctgccactacatcacagccagctttctcgcctgaccaagtttccgtgatcttcgttctaggaggacccggtgcaggcaagggtactcagtgtgaaaaactagttaaggactattcatttgtccatttgtcagccggagaccttctacgtgctgagcagggcagagcaggttcccaatatggggaattgatcaagaactgcatcaaagagggccagattgtccctcaagagattactttggcgcttttacgcaacgctatttccgataacgtcaaggcgaacaagcataagttcttaattgacggatttcctaggaagatggatcaagccatttcctttgaaagagacatcgttgaaagcaaattcatcctgttctttgactgccctgaagatatcatgttagagagactattggagcgtggcaagaccagtggtagaagcgatgacaacattgagtccattaagaagagatttaacactttcaaggagactagtatgcccgtcatcgagtactttgaaaccaaatcgaaagtcgtccgtgttcgttgcgacagatccgtcgaagatgtgtacaaagacgtccaagacgctatccgtgatagcttatagactaagacgtattttatatagtttacgctataagttacggcgatattatatatatatgtaagaatatatacatatatattaa

SEQ ID NO: 1861 - DNA, 1473 bp, Saccharomyces cerevisiae
atgttactgaatactacttatactgtcttcattttttttttgcttagaattataaagttcaagatcaaggccgaaaattttttagaacatgaaaaattgaaaactcatggtacctcatctcgaaaagatcctaagggccaagtcaagaattcgtgtagaaaaatgagtgctataggcgacaagaaccaatttcgtatcattgtgggctcatacgagcacaacattttgtgtttatccttagatatcccaaatcaaaaggaaaatgatgcagcaaagacaccacattttatgccaatatttcattttcaagcccattcgttgagtattaaatgtttggctgtttcaagaagatacctagtttctggatccaatgacgagcacatcagaatttatgatttgcaaaagaggaaggaactgggtactttgttaagtcatcagggctctattactgctctacaattctcacatccagcttcttccagtgaggatgctgctgtttcaaaggggagcaagaatagcaaatggttattatcagcatcagaagaccacaaaattatggtttggagagtaaaggactgggaaacagtggggactttaaagggacacacggcaagggttaatgatgtggatattcaccccaccaatagaattgccatcagtgttagtgatgaccattctatacgtctttggaatttgatgactctaagaaatgctgctgtactaaaactaagaaaatataatacaaacgggacttgtgttagatggttaggcgccaaaggtgattattttgccgtgggtttaagggatagggtgcttatttatgaaactggatcggctaaagtttttaaagaaatagtctttcaaaggaaaactcttatgcatattgaaacacatattttaccattcgataataaggaatacctttctgttggtatcagcgatggtaatgttcatttctatccttgtgaggagttattcgaaaaagttgaagaaaatgaaaagcaggaagatgatgacgacaaggaggatatcagccccgctttttctttattgggtcacacaaaccgtattaaagatttcaagttttatacgaatgaatttggtacctacctagtcaccattggttctgatggtaaaattgtcgtatgggatatgtctacaaaagaacaagtagcagtctacgactgtggcgaaaggctaaattgcttaacgctatgcgatgaaagcattgagaaatacaacacaatgaagaagagggatgctgaaacagctgatataggtgaccaaagtgaggtggaaagtgataccgaagaattaaagaagataatgtttggtgagaagaagaaactcaataaaaagaagcggaagcaattgaagaagagtaaagtatcagtagaacttgaataaacgccttatacatgcgtgcagctcagaattgttgcgtactaaagttagtttatatgtataatataa

SEQ ID NO: 1862 - DNA, 663 bp, Saccharomyces cerevisiae
ttaggatttaaaagaaatttttcgtgcacttaattgcagaatcacctaattatatttttgttcgactatgtctttggccaaatccgctgctaacaaacttgactgggcaaaagtcatctcttctctacgtataacagggtcgactgccactcaattatcgagttttaaaaagagaaacgatgaggcacgtagacaattactagagctgcaaagtcaacccaccgaagtagatttcagtcattatagatctgtgttgaaaaacacttcagtcattgacaagatagaatcatacgttaagcaatataagccggtcaaaatcgatgcctccaaacaattacaagtgattgagtcttttgaaaagcacgcaatgaccaacgccaaggagacagaatccttagtttccaaggagttaaaggatttgcaaagcaccttagataatattcaatctgcaagacctttcgatgaattaactgttgacgacctgacaaagatcaaacctgaaattgatgctaaggtagaagagatggtcaagaagggtaaatgggacgtacctggttacaaggacagattcggcaatttgaatgtgatgtagtaccctttacctctatatattacgcaccatattctattatttttttcacaggtttatataactggcaaata

SEQ ID NO: 1863 - DNA, 697 bp, Saccharomyces cerevisiae
aaagataaaagaggaagcaactgatagtaggaaatgtcacaatcattacgtccgtatctaacggctgttcgttattccctggaagctgcgttgactttgagcaatttctcttcgcaggaagtggagaggcacaacagaccggaagttgaagtccctaacactagcgccgaattgttgctccaaccgatgcatatatctcgtaatgaaaatgaacaagtattgattgagcccagtgtaaactcggtgcgtatgagtttaatggtgaaacaggcagatgaaattgagcagattttagttcacaagtttactagatttttggaacagcgtgctgaagcattctacattctgagacgtgtaccaatacctggctacagtatttcttttctaataactaataagcatactgaatcaatgaaaactgggaaattggttgattttattattgaattcatggaggacgtggataaggaaatcagtgaaattaaactgtttttgaatgccagagcaagatttgttgcggaagcatatcttgatgaatttgtctattagattcctaatataggaaagggaatctttctccgtcagggccctattgacggaaaactttacgatctgtactgactgtgttagtttgcgtactcaattgaactatttcgagactatttagttagatacaataacatgtgtatgtgaatta

SEQ ID NO: 1864 - DNA, 1464 bp, Saccharomyces cerevisiae
gatcgctattgtttttattattcatacctccggtaaacatttagatagacacagtatcaataaacaagagctatgtcgacaataaagccaagcccttcaaacaacaatttgaaagtgaggtcaagaccaagacgcaagtcttccataggtaagatcgacctcggggacactgtacctagtttaggtactatgttcgagacaaaagaatctaaaacggctgctaaaaggcgtatgcagagattatctgaagccaccaaaaatgatagcgacctggtcaagaaaatctggttttcattccgagagataagttaccgtcatgcctggatagctcccttgatgattttaatcgcggtatatagtgcctatttcacttctggtaacactacaaagacaaatgtgttacatagatttgtcgctgtgtcataccaaataggtgataccaacgcatatggtaaaggtattaacgatttgtgctttgtattttactatatgatttttttcacattcttacgtgaattcctaatggatgttgtcattagaccgttcgctattaggttacacgtcacttctaagcacagaataaaaagaatcatggaacaaatgtacgctattttctacaccggtgtttccggtcctttcgggatatattgtatgtaccattcggatttatggtttttcaacacaaaggcaatgtacagaacatatccagatttcactaatcccttcttattcaaggtattctatttgggtcaagctgcattttgggctcaacaagcctgcattcttgtattgcaactagaaaagccaagaaaagatcataacgagttgactttccatcatattgttactttactattgatttggtcttcctacgtatttcatttcactaaaatgggactgccaatctatatcacaatggatgtttctgattttcttttgtcattctccaaaactctaaattatttggactctggattggcttttttttcttttgctatctttgttgttgcgtggatttatttgcgtcattacataaatttaaagatcctatggtccgttttaacgcaatttcgcacggaaggtaactatgtcttgaattttgccactcagcaatataaatgttggatttccttaccaattgtctttgtattgataggcgctttgcaattagtgaatctttattggctgttccttatttttagagttctttacaggattctatggagaggtattctcaaggatgacagaagtgatagtgaatcagacgaagaaagtgatgaaagttccactactccaactgacagtactccaacgaaaaaggatatttgaaggaaaacggtgtttttaagtagtataaccattacacattaattctttacacattaattcttttacggtcctgctctcacgttcttccttattggtttatgtaaacaggtatttttatagtattcttttccagac

SEQ ID NO: 1865 - DNA, 366 bp, Saccharomyces cerevisiae
ggtagaaaggtaatatataatcatcatagcgatgtcaaattctaggtattctcagaccgaatcaaacaatgataggaaactagaggggttagccaataaattagctacattcagaaacataaaccaagagattggagaccgagcggtctctgacagttctgtcataaaccaaatgacagattcattgggatcgatgtttaccgatatcaaaaattcgtcctcaaggttaacccgatcattaaaggctggtaatagcatatggagaatggtgggtttggcgttattaatattcttcattctatataccctgtttaagttattttagtgagccaatcaagccaaaaataaataatgtacatagatgta

SEQ ID NO: 1866 - DNA, 485 bp, Saccharomyces cerevisiae
acccttttcactaagatgctttatgagctgatcggacttgttcgcataaccaactccaatgcgccaaagttggaagcaaaagaattgtcttccacaatcgggaaactgattattcaaaacagaggtgtggtgagggacattgtacccatgggcataaggtatcttcctaaaataatgaagaaagaccaggaaaaacattttcgagcatatcactttttaatgctgtttgattcatcagctgcggtacagtctgaaattctaagaactttaaagaaagatccccgtgtcataagatcatccatcgttaaagttgatttagataagcagctggatagagcctcatcgttacaccgttctttggggaagaagtctattttagaattagtgaatgaagattatcaatccatttaggtatagcgcacaggttttgactggggacgctacaaacacatgtaaatacatacatatctttcatacacatataa

SEQ ID NO: 1867 - DNA, 690 bp, Saccharomyces cerevisiae
gaattatttctccaagcacactgtacaccaatggctactaatattacttggcatccaaatcttacttacgacgaacgcaaggcattgagaaaacaggacggttgtactatttggttaacaggtctaagtgcgtcaggtaaaagtacaatcgcctgtgcgctagaacagttactgctccaaaaaaacttgtctgcatatagattggatggtgacaacattcgttttggattgaacaaggatttgggtttctcagaaaaggacagaaatgaaaacattcgtagaattagcgaagtttctaagctatttgctgattcatgtgctatttcaatcacctcatttatctctccatacagagttgacagagatagagctcgtgaactacataaggaggctggtttgaagttcattgaaatatttgttgatgttccattagaagtcgctgagcaaagggaccctaagggtttatacaagaaagctagggagggtgtaatcaaggagtttacaggtatttctgccccatatgaagcgccaaaagctccagagctacatttgagaaccgaccagaagacggttgaagaatgtgctaccattatttatgagtacttaatcagtgaaaaaatcatccgtaagcatttgtaatttgaccgattactgtacatttaatgatatataaaagatgtatatatataa

SEQ ID NO: 1868 - DNA, 74 bp, Saccharomyces cerevisiae; identical to SEQ ID NO: 899

SEQ ID NO: 1869 - DNA, 72 bp, Saccharomyces cerevisiae; identical to SEQ ID NO: 236

SEQ ID NO: 1870 - DNA, 72 bp, Saccharomyces cerevisiae; identical to SEQ ID NO: 230

SEQ ID NO: 1871 - DNA, 72 bp, Saccharomyces cerevisiae; identical to SEQ ID NO: 229

SEQ ID NO: 1872 - DNA, 95 bp, Saccharomyces cerevisiae
cataatgatgaaaaaaaattttatcaaacagttatccctgtctgaatgggtaataataggtaacctctcatatgttgatatttgtatttctgata

SEQ ID NO: 1873 - DNA, 101 bp, Saccharomyces cerevisiae
ttgtatgatgaggaaccagatagggacaacagattctcaagtgacgaggaacatcttttaaagcccagtttttagtagagcttagggcgcctttactgact

SEQ ID NO: 1874 - DNA, 101 bp, Saccharomyces cerevisiae
gtttatgatgagaccacgtccttagtgacaatgctataaacccagctcttcgattcgtttttaatgaaagggagaagatttttttgtcaaacgctctgagt

SEQ ID NO: 1875 - DNA, 73 bp, Saccharomyces cerevisiae; identical to SEQ ID NO: 397

SEQ ID NO: 1876 - DNA, 84 bp, Saccharomyces cerevisiae; identical to SEQ ID NO: 234

SEQ ID NO: 1877 - DNA, 74 bp, Saccharomyces cerevisiae; identical to SEQ ID NO: 401

SEQ ID NO: 1878 - DNA, 74 bp, Saccharomyces cerevisiae; identical to SEQ ID NO: 899

SEQ ID NO: 1879 - DNA, 855 bp, Saccharomyces cerevisiae
cgtattcagttgaagcgtatttgtgaccagtgtacttcaaggctgattgtttcacccttggacacagaacgttaaacaatgagtttgtttgagtgggtatttggaaagaatgtcactccgcaagagaggttaaaaaaaaatcaaagggctttagaaaggactcagagggagcttgaaagagaaaagagaaaattggaactacaagataaaaaacttgtatcagaaattaaaaaatcggcaaagaatgggcaagttgcagctgcgaaagttcaagcaaaagatttagtaagaacccggaattacatccaaaaatttgacaacatgaaagctcaacttcaggcgatatcattgagaatacaggccgttcgaagtagtgaccaaatgacacgttctatgagcgaggccactggtcttttggctggaatgaacagaacaatgaatctacctcagttgcaaaggatatcgatggagtttgaaaagcagagtgatttgatgggtcaacgacaggaattcatggacgaagctattgataacgtcatgggtgatgaggtggatgaagacgaagaagctgacgaaattgtaaataaagttcttgatgagattggagtggatttgaattcacagttgcaaagcacgcctcaaaatctggtttctaatgcgccgatcgcagaaacagcgatggggattcctgaacctattggcgccggatcagaatttcacggtaatcctgacgatgacttgcaagctcggttgaacactttgaagaagcagacttgagcgctctgagtatatttaatgaataataggtctatactataatacatcaactactgatatcaaagtaggcacttagaa

SEQ ID NO: 1880 - DNA, 1698 bp, Saccharomyces cerevisiae
gtgcccatcagtgttcatatttgttacaaagtggttttctgatttggtactactgcagaggcgtattttttgcttcagttaccatagcgtaagaacactagcgacttttgttcgtgaaccaacagagtaggatttctactgctacatctcttaggtagttggttagtccgatcgctcacttttggttgttgttaagtacttcataagtttatccttttcctttttcacactgagctactttgggtatagcttttggcccaaggatctttgaattttctccaaaagtactttattttatatcctacaggttgcggttttcatattttaaaaagcttttaatcattcctttgcgtatggcaaaccctttttcgagatggtttctatcagagagacctccaaactgccatgtagccgatttagaaacaagtttagatccccatcaaacgttgttgaaggtgcaaaaatacaaacccgctttaagcgactgggtgcattacatcttcttgggatccatcatgctgtttgtgttcattactaatcccgcaccttggatcttcaagatccttttttattgtttcttgggcactttattcatcattccagctacgtcacagtttttcttcaatgccttgcccatcctaacatgggtggcgctgtatttcacttcatcgtactttccagatgaccgcaggcctcctattactgtcaaagtgttaccagcggtggaaacaattttatacggcgacaatttaagtgatattcttgcaacatcgacgaattcctttttggacattttagcatggttaccgtacggactatttcattttggggccccatttgtcgttgctgccatcttattcgtatttggtccaccaactgttttgcaaggttatgcttttgcatttggttatatgaacctgtttggtgttatcatgcaaaatgtctttccagccgctcccccatggtataaaattctctatggattgcaatcagccaactatgatatgcatggctcgcctggtggattagctagaattgataagctactcggtattaatatgtatactacagctttttcaaattcctccgtcattttcggtgcttttccttcactgcattccgggtgtgctactatggaagccctgtttttctgttattgttttccaaaattgaagcccttgtttattgcttatgtttgctggttatggtggtcaactatgtatctgacacaccattattttgtagaccttatggcaggttctgtgctgtcatacgttattttccagtacacaaagtacacacatttaccaattgtagatacatctcttttttgcagatggtcatacacttcaattgagaaatacgatatatcaaagagtgatccattggctgcagattcaaacgatatcgaaagtgtccctttgtccaacttggaacttgactttgatcttaatatgactgatgaacccagtgtaagcccttcgttatttgatggatctacttctgtttctcgttcgtccgccacgtctataacgtcactaggtgtaaagagggcttaatgagtattttatctgcaattacggatacggttggtcttatgtagatacatataaatatatatctttttctttctttttcttagtcaggattgtcgtttagcataatatacatgtagtttatttaatcacataccactga

SEQ ID NO: 1881 - DNA, 556 bp, Saccharomyces cerevisiae
aagagagtcgtgaaaaataaaataaacaatgtccaccgattctattgtcaaggcttctaactggagattagtcgaagttggccgtgtggttttgatcaagaagggtcaatccgcaggtaaattggccgctatcgtcgaaattattgaccaaaagaaggttttgattgacggtccaaaagctggtgttccacgtcaagccatcaacttgggtcaagttgtcttaactccattgacctttgctctaccaagaggtgctagaactgctaccgtttctaagaagtgggctgctgctgctgtctgcgaaaagtgggctgcttcatcttgggctaagaagattgctcaacgtgaaagacgtgctgctttgactgactttgaaagattccaagttatggttttaagaaagcaaaagagatacactgtcaagaaggctttggctaaggcttaaaatatgtacatgatctttaattctgatatatttcgtatgtaattttatctttaactggtgattcttttaataaataaactacaatattataactattgaaagcctctgtta

SEQ ID NO: 1882 - DNA, 967 bp, Saccharomyces cerevisiae
gatcataagagcgacagaaaatgtctagtagtaaattcgaagaggtcatcaacaagatcatcaatgacagccctccaggagaattaagggaagtatacgacgatctaatcaagatcacaagtgaaaactccaaaaatactattttggatgctattgagaattacaacgtgcagaattgcatccctatagaagtcaacgggaactctgtaattatttccaaatacaacaaggaaggagcaaagttttttgatcccgtaaattccgtaatattttcagttaaccatttagagcgcaagggccttgacattgaaccatatgagttcacgcatgcaaagatagagaaagggcaattgaaagaactgcacgataaattgcacgaatatcttcttcagagctttccaggtgatgtcagttttgctgtttacccagtccctgaggaaataagtaaaatttctattattattgttagcaccaaatataatccaaacaatttctggaacggccattggagatcaagctacatctacgatttggagaccagggagttatccggtcaaatctctacgcaagtccactattacgaagacggtaacgttagtttccaatctgggaaggatatcaatcaatctaacgttgatgacgttgtttgcacaataagggatattgagacgaatttcgaaaatgatctagatctttcatttttcgacttgaacgaaaaacagtttaaggccttaagaagaagattaccagtcacgagatccaaaattaactggggtagtgcgattggcagttatagattgggtaagaatgcggcagaaggcaaatgaaatttcatgcctgccttattccattctcttcctatttcttaaattgaatacatctatgtacattatttatttttggcttgattggctcactaaaataacttaaacagggtatatagaatgaagaatattaataacgccaa

SEQ ID NO: 1883 - DNA, 847 bp, Saccharomyces cerevisiae
tcactgtctatcgtccataaaagatttattatagttgaatcatgccaagatcaaaacgttccaagctagtcactttagcacaaaccgataaaaagggcagagaaaataaagaaagaattttcgatgaagtgagggaagccttagatacttatagatacgtctgggtcctacatcttgacgacgtaagaactccagttttacaagaaatcagaacatcttgggcaggctctaagttaattatgggtaagaggaaagttttacaaaaagcattgggagaaaagagggaagaagaatacaaagaaaatctgtatcaattgagtaagctttgtagcggtgtcactggtttattgttcactgatgaggatgtcaacactgtcaaggaatactttaagtcatacgttcgttcagactattcaagaccgaacacgaaagcaccactaacatttacaattcctgagggcattgtctactcacgtggtggtcaaattccagctgaggaagatgttccaatgattcattctttagagccaactatgagaaacaaatttgaaattccaactaaaatcaaagctggtaagatcaccattgacagtccatatttagtttgcactgaaggagaaaaattagatgttcgtcaagctttaatactgaaacaattcggtatcgctgcttctgaattcaaagtcaaggtgtcggcctactatgacaacgatagctccactgttgaaagcactaacatcaacatggaataagctgaactattatttggaagccttttttaatagaccattgtataaaaatttcttttttttgtatagatatactaaagcaacgctcataaatgtaa

SEQ ID NO: 1884 - DNA, 1162 bp, Saccharomyces cerevisiae
gagcaaagcacaagcaaatacaccgtttgtccttttagcatagccaacaatgaccaccgtgtccatcaataagcccaacctgctgaaattcaagcatgttaaaagctttcaacctcaagaaaaagactgcggacccgtaacctcattgaatttcgacgataatggccagtttctactgacctcttcttccaacgatacaatgcaattgtacagtgccacgaactgcaaattcttggacactatagcctctaagaaatatggctgtcactccgctatctttacgcacgcacaaaacgaatgtatctattcctctacaatgaaaaattttgacattaaataccttaatctggaaacaaaccaatatctaagatatttttccggtcatggcgccctagtgaatgatttgaagatgaaccccgtgaacgatacgtttctatcgtcgtcatacgatgaatccgttaggctttgggatttgaagatctctaaaccgcaagttattataccaagtctcgtaccaaattgtatcgcatatgatccaagtggccttgtattcgcattggggaacccagagaatttcgaaatagggctatataatctgaaaaaaattcaggagggtcctttcttgataattaaaattaatgatgcgactttcagtcaatggaataaattagaattttctaacaatggaaagtatttattagttggctcctcgataggaaagcatttaatttttgacgcattcacaggtcaacaattattcgaactaataggaacaagggccttcccgatgagagaatttctagattctggatctgcttgtttcacaccagatggtgaattcgtccttggaaccgattatgacggtaggattgccatttggaatcattctgattcaataagtaacaaagtattaaggccgcaagggttcattccctgtgtttctcatgagacctgccccaggtcaattgcattcaaccctaaatattcgatgtttgttaccgcagacgaaacagtagatttttacgtgtacgatgaatgactgctgctactgcattgatatactagaggatataatatataacgaacattttttacctactgtataacgacgtatactctatacatcttgtgtattctttacaaataatcgtcaatgttgggg

SEQ ID NO: 1885 - DNA, 1103 bp, Saccharomyces cerevisiae
gacctactgcaagactgttaattatggtatattatatatcaagtgctgatacaacgtacaccatcgaaaatggaggagtacgattattcagacgttaaacctttgcccattgagacagacttgcaggatgaactgtgcaggattatgtataccgaggattataagcggttgatgggactcgcaagggctctgatcagccttaacgaactgtcacccagggcactacagctaacagccgaaattatcgacgtggcgccagccttctacaccatatggaactaccgattcaatatcgtcaggcacatgatgagtgaatccgaagacactgtcttgtacctgaacaaggaattagactggctagatgaagttacgctgaataatccaaagaactatcagatctggtcctatagacagtctcttttgaagctacatccgtctccttccttcaaaagagagctgcctatcttaaaactgatgattgatgatgattccaagaattatcacgtttggtcgtacagaaagtggtgctgtttgttcttcagtgactttcaacatgagctcgcctacgccagcgacctcatcgagacagacatttataacaacagcgcatggactcataggatgttttactgggtgaacgctaaagatgtcatttcaaaagtggaattggccgacgagctccagttcattatggacaagattcaattggttccgcagaacatcagtccgtggacctacctccgtggtttccaagagctattccatgataggctacagtgggatagcaaagtagtcgacttcgccacaaccttcatcggtgacgtattgtcacttccaattggctcaccagaggatttgcccgagatcgagtcctcatatgccctggaattcctggcatatcactggggggcagacccttgtacccgagacaacgctgttaaggcctatagcttgctagcaatcaaatacgatcctattagaaaaaacttgtggcaccacaaaataaataatctgaactgaatatatgtaagcactctatttgtacgaatatatttacgtgtgtacgtgcatgcacgcaagtttaatctagttctacaaaccta

SEQ ID NO: 1886 - DNA, 1453 bp, Saccharomyces cerevisiae
atggtagagaaggatacatggaaactgataactgccactgcactattcactgtggcagtgacgacgattacagattatgcttggaccagttggcaagcacaaaagcaagtaattgcgcaacaaaaaaataagaataaaggtgggcaaacaaaatctgacacggataaatatcatcaatatgatgaacagtttattcgccaatctttgaaaaacaatgttgaatttcttggtgaggacacaattgaaaaactatccaatcaatatgttgttgtcgtgggagcaggtggagttggatcttgggtggttaactctttggtgcggtccggatgccgaaagatcagggtcgttgattttgaccaggtctcactaagttcactaaatagacacagctgtgccatactaaatgatgttggcacgccaaaagtggaatgtctacgaaggcatatgcgggaaattgcaccatggtgtgagattgatccgattaatgaattatggacgttacaaaatggcgaaagactgacccttggtaatggaactcctgactttatcgtggactgcattgataatattgatacaaaggtcgacttacttgagtttgcctataatcatggtatcaaagtgatctcttccatgggtgcttccgcgaaaagtgatcctacaaaacttaatgtgggggacttggctaccacggaggaggatcctcttgcaagggtagtgagaaggaaattaaagaaaagaggtatcttatccggaattcctgtagtatttagtgccgaaaaaccagatccgaagaaggctaaattattacccttaccagatgaggaatatgaaagaggaaaggtcgacgagctgagcgccctgaaggacttccgtgtaagaatcctacccgttttaggtactatgccaagtttgtttggattgaccatcactacgtggattttatctaatatatccgataaacctctagaacctgttgagggtaagaatagaattaaggtatacgatggtatatatcaatcgttggcaggtcaaatgagcagagtcggtataccgagccaaagaatcccattggctttgaaggatgttagttaccttgtcgaagaggtgtttaagggtaaatctccaattagcggcatttccactagactaactttaaccaaatgggatccctctaaacctatctctttgcaaaatgtggtagtactaactaaaaacgaacagaaagtgcacgaagaccgtgtcttgaagggtaaggaaagcttacaagatgtttatgatgccaaagttctaaaactggtttcacaaagattcagagaagaagcttattactctcaattcagatgatcttgttcctttccaacatataaagcattttcttccatagagttacgtactattccaggaggcttttcggactcataccatatagaaaactatttttatgcttcttcat

SEQ ID NO: 1887 - DNA, 1789 bp, Saccharomyces cerevisiae
aactactggaagcagctgctgcagtgagtagagtatggatagacctatagatgatattgtgaaaaatcttttaaagttcgtcgttagggggttttatggtggctcctttgtactggtactcgatgctatactatttcactcggtcctagctgaagatgacttgaaacaattgttgagcataaataagacggaactggggccgctaattgctagactaagatcagacaggttaatatccatacacaaacaaagagaataccctccaaactcaaaaagtgtggaaagagtttactactatgtaaaatatcctcatgctattgacgcaatcaaatggaaggtccatcaagtcgtacaaagattgaaggatgacttggacaaaaattcagaacctaatggttacatgtgtccgatttgtttgaccaagtacacacaattggaagctgtacaattattgaattttgataggacagaatttttatgttccctatgtgatgaaccgttggtggaagatgattctggtaaaaaaaacaaagagaagcaagataaattaaataggttaatggaccaaattcagccaatcattgattctttgaaaaagattgatgattcaagaattgaggagaatactttcgaaattgcattggctcgcttgataccacctcaaaatcaatcacatgcagcatacacgtacaatccaaagaaaggcagcaccatgttcagaccgggagattctgctccattgccaaatcttatgggtactgctcttggtaacgacagtagtagacgtgccggtgctaactctcaagccacattacacatcaacattaccacggcaagtgatgaagtggctcaaagggaattgcaagagagacaggctgaagagaaaagaaaacaaaacgctgtccctgaatggcataaacagagtaccatcggtaaaactgctcttggtagactggataatgaagaggagttcgatcctgtagttactgcatctgccatggattctataaatcctgataatgaacctgcacaggaaacatcctatcaaaataacagaactctgaccgagcaagaaatggaagaaagagagaatgaaaagacgttgaatgattactacgctgctttggctaaaaagcaagcaaagctcaataaagaagaagaggaggaggaagaagaagaagaggatgaggaagaagaagaggaagaagagatggaagatgttatggatgataacgatgaaactgctagagaaaatgcattggaagatgaatttgaagacgtaacggatacagctggcaccgcaaagacagaatcaaacacctccaacgacgtaaaacaagaatcgattaatgataagactgaagacgctgtaaatgctactgccactgcttcaggtccgagtgcaaacgctaaaccaaatgatggtgatgatgatgatgatgatgatgatgatgagatggacattgagtttgaggacgtttgatatggtccgttttttttaaatcttaccaactagctcttacaatgtagaaccaacttttcctttcttcattttcttctctattgtatcaagcttctcttaaaatctaaaaaaaatgagagaaaaaaaaaagaatacgtctggaaaaaatcacatgaaaaaatttcagaaaaagaaagcggagctactagacatatggcatctttatagtaataataaaaacattactagtgagaatattgaggtgtaaaaaatattttttcgagcatatttagtttatatatatttaataaagaacctcaacttata

SEQ ID NO: 1888 - DNA, 870 bp, Saccharomyces cerevisiae
cttaagaccgtcactgccttccaattacactgcttttgtttctttgacaataagaacgcaaaagtaaatttcttttttttaacaaattatgacacatcctgtagcagtgaaggcatgtctatttgacatggatggtcttctcatcaacacagaggatatttatactgaaactttaaatgaaactctcgcagaatttggtaagggacctttaacttgggatgtgaagattaaattgcaagggcttccgggaccggaagcaggaaaaagggtgatcgaacactacaaattaccaataactttagatgagtacgacgaaagaaatgttgcattgcaatctcttaaatggggtacttgcgaatttcttcccggtgcattgaatttgttgaaatacttaaagttaaagaacattcctattgcattatgtacgtcttcgaacaagactaaatttcgcggcaaaacaagtcatttagaggaaggttttgatcttttcgataccattgtcactggtgatgatccaagaattgcaaaaggtaggggtaagcctttcccggacatttggcagttgggtttaaaggaattgaatgagaagtttcataccgatattaagcccgatgagtgtatagtgttcgaagatggtattccaggcgtaaaatcagccaaggcatttggtgcacacgttatttgggtcccccatccagaagcacatgctgttttgggggacacagaagctttgttagccggtaaaggtgaactattgtcttctttggaaaaactggaaatgtccaaatatggactgtgaatttccagtatttacgtaaacaatatatttgtatattgcactaagtataaaaagggatgatttgtatttga

SEQ ID NO: 1889 - DNA, 2394 bp, Saccharomyces cerevisiae
agtatggaaatcgatggcaacactctggtgttcataatagtgatccttttcctatttttctcctcaccgggtggtgatggtgtgtcttctcaatatgagttcaatcaactccagagactcaagcagcagttccgaacagagcacaatacgttcgtcaatatgacatatacagatagttttcgaaatattaccgggcttaaactcagctaccaagacatgctgaataatcctctccaaaatgccacttacccactaccaggaaaagattatgatcgatggtttcccaatcaaaactacatggttttgcccaacgatgtcatagaggccataaatactgaagtctggaatacttcgaatgatgacgcttccaaccttttccctcccaatattacaagcaccctgttaggtaaaatcgaccttgtatcaaataacaagtacgaaaagataaggatgcctgtacccagattctatgagccggcaactgatttttcagaggatattcctcctgaaggtgagacgtactggtctgagtggccttcgtatggcgaacttcataatgtgagttttcagcatggcgaaatagctattcaaatttctcatatgagcaatcttcaggacaataataattacttaaggagaaatttcataaataagaaaaatgaccgttggaagttgttaaatcttcagattgatttctcagataaggctgaaaaggaaaagcattccatatactcgaaggctgtatatgacattcaacgtggtagaattctttctatttctcagagttctaaatttcattcattgttcgcccttcctcattacatgtccttccagaatgattataatgagaaaatatttaatgatgtcaaggaactcgttgatgaattttggaatttcacggattacacagatgtcatgaccatgaaagacgtacaggatgcttataataatgccaactttaaatgtgagtatttgatttttcttcagttggaaccatggaatcagtacacaagagatcagatcaagttaatagatgatgaattgaattggcccctggggcgtccggcaaatctgtctagtttaccgcccataaatgttgtctctggattactgtattctccagactgtggcgtacgattagggcttcataacgtaaagggtacacggtacgaattaaaaataatgtcgatcagaaaacatctattgttcggtattgcattatttgcagcccagatatacttattgcttactcagatgcatcatacaaataccccctccatggtcaacaaaatctcattctattgtttctcaatgataaacttagtcgatggttccttggccactttgtactttgtcgcagctagtgtcgttcccgaattgtacttacccctagttataagtgctttttcgtgctttatcttggcatctatttttgaaatacgctacttaatttcaatttacgcttcacaggttaacgaacagaatgttgggattatcaacctcctgcgtggtaacactggcacatatgatgagaataggccaagacccgcattcattcccgatgaagggtctatcggtggctcgttatatggtaggtttttctttatgctaatcattttcacgtttttaatattgagttcaacttcatggccccgtcagctaaggatggtatttgagtatatcctaatcttcatattaaactcatattggatccctcaaattttccgtaacgccgttaaaggtattccttcaagaagagaaagagcaagatctagcattggaggaaatagaagtcaaaacaaaatgccattattgtggagttttgtaattggtacaacaataattagaagcttgcccgttgtgtatgttttcacttactcctctaatgtgttcaggcaccataaagatgttcatttcgtcgtatttttatcattgtggctactgtttcaaattagtatactgtattctcaagatgtattgggatcgcgctggttcttgcctaagcacacaatacctgatggatattcgtatttcaagcccctttcaaacgagtatatatcggagcatggtggtggaactgctgaacataccgttgattgcgcgatatgtatgtctgatgttccaatttacatagaggaaattccagaaactcataaggtggatcagcactcttacatggtaacgccttgtaatcacgtatttcatacttcgtgtctagaaaactggatgaattataagttacaatgtcctgtgtgtaggtcaccattacctccgttgtagatagcatctcttgatcctaagaactatatactgtatttgtattcaagatccaagataccgtgacatttcctatttgtcaaccattgcaataagaaattttacatgaatagtgca

SEQ ID NO: 1890 - DNA, 1742 bp, Saccharomyces cerevisiae
caacgttaaaaggcctagtcctcttccgattatataatataacttccacagcaagtgtaccataacataataatgtccactaagaagcacaccaaaacacattccacttatgcattcgagagcaacacaaacagcgttgctgcctcacaaatgagaaacgccttaaacaagttggcggactctagtaaacttgacgatgctgctcgcgctaagtttgagaacgaactggattcgtttttcacgcttttcaggagatatttggtagagaagtcttctagaaccaccttggaatgggacaagatcaagtctcccaacccggatgaagtggttaagtatgaaattatttctcagcagcccgagaatgtctcaaacctttccaaattggctgttttgaagttgaacggtgggctgggtacctccatgggctgcgttggccctaaatctgttattgaagtgagagagggaaacacctttttggatttgtctgttcgtcaaattgaatacttgaacagacagtacgatagcgacgtgccattgttattgatgaattctttcaacactgacaaggatacggaacacttgattaagaagtattccgctaacagaatcagaatcagatctttcaatcaatccaggttcccaagagtctacaaggattctttattgcctgtccccaccgaatacgattctccactggatgcttggtatccaccaggtcacggtgatttgtttgaatctttacacgtatctggtgaactggatgccttaattgcccaaggaagagaaatattatttgtttctaacggtgacaacttgggtgctaccgtcgacttaaaaattttaaaccacatgatcgagactggtgccgaatatataatggaattgactgataagaccagagccgatgttaaaggtggtactttgatttcttacgatggtcaagtccgtttattggaagtcgcccaagttccaaaagaacacattgacgaattcaaaaatatcagaaagtttaccaacttcaacacgaataacttatggatcaatctgaaagcagtaaagaggttgatcgaatcgagcaatttggagatggaaatcattccaaaccaaaaaactataacaagagacggtcatgaaattaatgtcttacaattagaaaccgcttgtggtgctgctatcaggcattttgatggtgctcacggtgttgtcgttccaagatcaagattcttgcctgtcaagacctgttccgatttgttgctggttaaatcagatctattccgtctggaacacggttctttgaagttagacccatcccgttttggtccaaacccattaatcaagttgggctcgcatttcaaaaaggtttctggttttaacgcaagaatccctcacatcccaaaaatcgtcgagctagatcatttgaccatcactggtaacgtctttttaggtaaagatgtcactttgaggggtactgtcatcatcgtttgctccgacggtcataaaatcgatattccaaacggctccatattggaaaatgttgtcgttactggtaatttgcaaatcttggaacattgaaggtgcggcttgcaatcccttttttactttcaattctccgttaggttatttattctactacacgcagtttttttttttcaatgggttatatatctctaatatatacacatttatatgtttagacttatacagaagcaaaaaaaaatgcaaaagaagcttagtgttcataa

SEQ ID NO: 1891 - DNA, 1966 bp, Saccharomyces cerevisiae
caaactaatagtcaagaggatcaactattctgttcaggttttgcaggttaaaaattgaaatagaatattttctcggtaatttcaagaaacagctggtaaaaaggcagtaaatttacagaaactaagagtgtaagggcacaatgagagtatatcagttttgccgacctttccaattattcacctgcttcttatgctaccttctagtgttcgtaaaagctaacaaggaaaagataagtcaaaagaattatcaagtatgcgcaggtatgtattccaaagaagattggaagggcaaaatagacccgtttatatcattcaatcttaaaaaaataagtggattgagtgatgagtctgatccaggcttagtcgttgcaatctatgatttccaagactttgagcacttaggtgtgcaattgccggatgaagaaatgtattatatttgtgatgattatgcaattgatatcgggatttgtgaagaggagaatcgtgatgagtttattgttcaagatgttgtatatgatccatatacttccacaaatagatctttggccaatccaatcatgacgttttctcaaaatgaggtcggccttcatgatactagatacccaataaaagaaaccggattttattgtgttactgcgttcagatcatcgacgtctaccaagttcaacgctgtggtgaatttcaggaatgcttatggtcagcttgcgggcaccgagatcaacaaattgccactatatggtcttttggcggtcgcatacgttgtggcgatggcgttatattccttcgccttctggaagcacaagcatgaattgttaccattacaaaagtatttgctggccttttttgtatttttaaccgcagaaaccatatttgtatgggcttactatgatttgaaaaatgaaaaaggtgatactgcgggaataaaagtttatatggtgttcttgtcgatattgacggctggtaaagttacattttcatttttcctattattgattatcgctttgggctacggtatcgtgtaccctaagttgaataaaacgttgatgaggcgttgccaaatgtatggtgcgttaacttatgcaatttgcattggatttttgatccaaagttatttgaccgacatggaggcaccatctccactaatcttgatcaccttgattcctatggcgcttgcattaatcatattttactacatgattattagatccatgacaaaaacagttatctatttgaaagagcaaaggcagatcgtaaaattgaacatgtacaagaagctactatacatcatttatgcgtcctttttgagtgtactagctggtagtatagtttcgtcatttatttacgttggcatgaacactattgatatgattgagaagaactggaggtcaaggttcttcgttactgatttctggcctacgttagtgtatttcattgttttcgttaccatcgcgttcttatggagaccaacagatacttcatacatgctagccgcatcccaacaactacccacagacccagaaaatgtcgcggactttgacttgggcgatttgcaatcgtttgacgatcaagatgacgcaagtatcatcactggtgagcgtggcatagacgaggatgacctcaatttgaattttactgatgatgaagaaggacacgataatgtaaataaccatagccaaggccacgggccagtgtctccctctccaacaaaataacgctacctccagcagatttgattaggtgatgagacaaatagtttcttcgagggcagtcacgaaatgtttacaagcgaaaagaaagaaattatgaaccatatgcacttctgttcaatgcgatgtgaatatgaatatgaatataaatatgaatataaataaataaataaataaatgcgttgcacgtttcttttcatttatttgtgcgtgcttttacctgtttataactgtagtcaccaaagctatgctatactcta

SEQ ID NO: 1892 - DNA, 1259 bp, Saccharomyces cerevisiae
atgtaccatgttcctgaaatgaggctacattaccccctggtgaacactcaatctaacgccgcaataacacccaccagaagttacgacaatacccttccttcgtttaacgagctatcacaccagagtacaatcaatcttccattcgtccaacgcgaaactccaaacgcatatgctaatgttgcccaattagctacgtcgccaactcaggctaaatcagggtattattgtcgctattatgctgtgccttttcccacatatccacaacaaccacaatctccatatcaacaagctgtacttccttatgccaccattcccaacagcaatttccaaccatcttctttccctgtgatggcagtgatgcctccagaggttcaatttgatggatcattcttgaacaccttacatcctcacacagagttgcctccaatcattcaaaacactaatgatactagcgtcgcacgtccaaataaccttaaatcaatagcagcagcgtcaccaacagtgacagcaacaacaagaacacctggcgtcagttcaacgtcagttctcaaaccacgcgttataactacgatgtgggaagatgagaatactatctgctaccaagtagaggcgaacggtatatcagtcgtgcgtagggctgacaacaacatgattaacggcaccaagttgttgaatgtcacgaagatgacaagggggagaagggatggaatattaagatccgagaaggttagggaagtcgtgaagattggctccatgcacctcaagggtgtttggattcctttcgaaagggcttatatcctggctcaacgtgaacagattctagatcatctgtacccgctcttcgtcaaagatatagaatccattgttgatgccagaaagcccagcaacaaggcatctttgacccccaaatctagccctgcccccatcaagcaagaaccatctgataataaacacgaaattgctactgaaattaagccgaagagtattgatgctttatcgaatggagcatctactcagggtgctggcgaactgccccacttaaaaatcaaccatatcgatactgaggcccaaacaagtagagcaaaaaatgaattatcataagcacataacataatccgttaactctttgctctatgaacaagaaccgaagttctagaaaggctgataggattcgtacaatcatttttacggtcgaacttctgtagttactcgatatataaatataaataacggacataaaaaaaaaaattgtaacatta

SEQ ID NO: 1893 - DNA, 1783 bp, Saccharomyces cerevisiae
actgataactacccaggtggagcaaccagtgacagcaggtaaagcacaataaggagaagaaatgttcaggcagtcaaaaagaagaattgcctcaaggaagaattttagttcatacgatgatattgtcaaaagcgaattggacgtaggcaacacaaatgcagctaaccagatcatcttaagttcaagttcatctgaagaagagaaaaaactttacgctaggctgtatgagtctaaattatcattttacgatttaccaccacagggagaaataacgttggaacaatttgagatctgggcaatcgatcgtctcaaaattctgttagagatcgaatcttgcctttcaagaaacaaatcgatcaaagaaattgaaaccattatcaagccgcagttccaaaaactactgcctttcaacacagagagtttagaagacagaaaaaaggattactactctcatttcattttaagattgtgcttttgtcgttcaaaagaactgcgggaaaaattcgtcagggctgaaacgtttttgttcaaaattagatttaacatgctaacctccaccgatcaaacaaaatttgttcaatcattggacttacccttactacagtttatctcaaatgaagaaaaggccgaattatctcatcagttgtatcaaacagtttctgcgtctctacagttccaattgaatttaaacgaggaacatcaaagaaaacagtatttccaacaggaaaaattcataaaattacctttcgaaaatgtgatagaactggtaggaaaccgtttagtgtttttgaaggacgggtacgcatatttaccacaattccagcaattgaatttactttctaatgagtttgctagcaaattgaaccaggagttaataaaaacgtaccagtacttaccaagactgaatgaggatgaccggttgttaccaattctaaatcatctttcgtcggggtacactatcgcggatttcaaccagcaaaaggcaaaccaattcagtgagaacgtagatgatgagattaatgcgcaaagtgtctggtctgaagagattagctcaaactatccgctatgtatcaaaaacctgatggagggtcttaaaaagaaccatcatttgaggtattatgggagacaacaactgagtctgtttttgaaaggtatcggcctgagcgctgatgaagcgttaaaattttggtctgaggcatttacaagaaatgggaacatgacaatggagaagttcaataaagaataccgttacagcttcaggcataattacggtcttgaaggtaacagaatcaactacaaaccatgggactgtcacactatcctttccaagcccagacctgggcgcggagattatcatggatgccctttccgtgattggagtcacgagagactatctgcagaattgcgctctatgaagttgacccaagcgcagatcatcagtgttctggattcctgccagaaaggtgaatacacaattgcttgcactaaagtgtttgaaatgacacacaactctgcatcagcggatttggaaattggcgagcaaacgcatatcgcgcatcctaacctatacttcgaaagatcaaggcaactgcaaaagaaacagcagaagctggaaaaggaaaaactattcaataatggtaatcattagtgcagaaagggaaaaggaaaaaagcgaagagataactaaaaaggattaatagtatacgtaatttagtctactgtaagtatggtcaaaaattttctttagtgagaaaaaaaaaaaaaaagagaaacgataaacgct

SEQ ID NO: 1894 - DNA, 1748 bp, Saccharomyces cerevisiae
tttcgaacaacttaatagctacttcaagaaggatcaagtaagttcctcgaagcactatgaattccggaggtgaagaaccaactataaagccaaatgtatttaatattactcaacttttaaactcaaatggtgaaaaaccgggaattgcttgcatcttcttaagtaaatttgacatgaaaaagggaaatatcataatatggtctaaaagtattaatggtgcggcaattgacttaagcaatattgaatttaaatcgttaccagccggtattcacgaacaaactgacgatgttgtcaattttgtagttcctaaagaattagatgtctgtcaaactgccaagacgacaacttatgattacggcatcgcctatttcaaacaaaattcgttcgatattattgagaatgacaatcgtattgataggagtaaagttcaaatgttttctcttggtgtaattatcgatgtccaaaatgcctcatcagatagtaaaaagcacttttataaggaaatataccatgcgtatgctgccaacagatactcaagctatctagaaagtttactcggtcaatggataaggcagcgtgatcttgataagtttgatatttttgaaaagttttttgacgagaataaccaagggcacatggctgaaaattcagtagaagtctttgaacattcacccaaagaaagacggcatttggttgaatatttgccatactggacaaggaagttagggcctctcatatttccactttggaaagcaagtctccttcagtcaaggatattgatactagttcctcaaggagaatcgttcgaattgtgcaattctttggcctattgtgtcttcttaatatcaatgcttccaaaaaacttgataggaaaccatgtaagcgatgaatatattaagcctattttcacggtatcaacatcagatattccttttctagagtcgttcaaaaaggggaacggttatgtggctacgaccagcgaggaaattttgttgtataagcctgaaatttacgacatagtagtcaaacttacttcgagctcaactatagaagaatcaccagaaaaagaagtggaaattcttaccgcatctggtgaacaaaacaaagcaactcctcttgacttagaggtgtatgaaaaacttatactgggggagttacaagaggatgcctctacaaatgcgacatgtcgacatcatgaggtgacagaacccatatcatggctacagtttttaattgatgggttttttcttttaactactgcaggctatctggtagcgccatatcaccttgcaaataatttcaagattccgaggcacgtttctggcccagaacccaacaattcagaaatacagatcgctgaaaatttagttcgctattttcaccgcagaacatcaaatctgtacaacgatctgaaggatgtcatacaaaaaagtgaaaatattgattcagaacaaccgattactatcgcagcttcatttttaaccaagttaaatttggattgctttagcaaacaagatcatcaattcgtcaaggatatcgcccttaaatggttccaaagaagcattgatattagcaacctaccagaatgtttgggaaatctctgttaaccactagaaacgagctagatcatgtgagagagatagtatatgtctttgtaactgtattttatatttatatgtatatggtgaattttacttaaattccttggtagattacatacacgactctgttgcttgttcattccctaa

SEQ ID NO: 1895 - DNA, 1616 bp, Saccharomyces cerevisiae
tcagtttataaatatagttattccctgaagttgagatttactgatttaacatctggacaactaaaaacctaaataataagacacaattttttgcgggattttttttcctttagatacttttaacattcatagtaaaaagttctgctacatagtaaaaacacatagaaggtacaagcaatagcatgattcaatttaaaagtccaggtaactggctgttcatagtaccctggattgccttcattccatggtatggtatgctgatagccatgcttatttgctgggccagtcaaggccatcccatatattggttcatgcactcggagcaattccctgtgtacatttcagatataggtgccactaatttaaggccactgtttatatcgtgcgccggctggcagggtctaggctatgtaatcactgttgcccttgagttttttcaaagatccggctatctgcctttccaactgaaaaaaaaagacccttctatctctgattccacatcttatgctgagaaattgcacagcggtaaatacttaatgcctccatattacacaaaggatgaacggaacctgattttcgcagcttttgttctcggcagcattggtgaactagcccttttattcagttccatcttctcaaccgccctgtaccatcgcgttcacattgctatggtctctgttttcgtcgtcttcatgttcctatccacttgctgcttgattgcagagtatttcctcatgggaaggcactatgcctcagtccaccccctagccagccctcatttcaatcctcaatcatctgaaaaaagctttaaccaagattataacactgtggatgagctgccttggtataaatggaaaggccatgtatggaataaatttaccatcagtgcaactctaaaagttatatggttaactctcgcagttgtatgggccatttgttttggtgctatcaatgatagatctaagagtgcttgtttcgaatggttgctagcattttggtttggtatcatatttatgattctttccgccgacttttatttaggtggaagatacagacaatcccgctatttcaaccacgtggaatcattttcgggttattacaagtatgacaaggcgctaggcctctaccacagtgaagacgttttgccttcggacgataacgccggcgtgattgccacagaaacagcatcttcaaatatttacaataattcctcttccaacgaatctattcaagtagtcgtatgacctcatatatgctagacttgactaggaaataccctctaacctgcaagatatattcatctttttctttccaaagcacaatttaataaaacttgcaagaacatcgtcatcatttcccccttttatttttgttatccccgttactgatgtaactaatacctaattctatgcttctcaatctgtatagtagttttccttttgccgaagaatttcttctggctgcttttttttttgacatatttcgcattgtccacaatggtcattgcgttaaaagctagaaattaaaaagagaatattgttcagcatatgtagtttaagttggcaaatttgttctgctcttgatgtacctagaataaataaatattaatcagaaaa

SEQ ID NO: 1896 - DNA, 747 bp, Saccharomyces cerevisiae
cgaagataacagtaaggataaatggcagtacccgggtattacgaattatatcgtagaagtactatagggaatagtttggtggatgctcttgatactttaattagtgatgggagaatagaagcgtcgttagctatgcgtgttttagagacatttgacaaagtggtggctgagactttaaaagacaatacccaatctaaattgactgtgaaaggaaacctggacacatatggattttgcgatgatgtttggacttttatcgtaaaaaattgtcaggttactgttgaggacagccaccgcgacgcctcccagaacgggtctggagatagccaaagtgtaatttcggtggataagttgaggattgtggcatgtaactcaaaaaagagcgagtaatatctatgctatatgcccggatgctttgttgaccaatagttacattgaaatttctctattatctcctctcttctaccgcttttaatacaagctctaggaacagtgtcatgaaataatgttttgtattcttttatattagggaacttgtgattcttctgtttttgttttttatttttcctgtctgtacattcatgtaataataatttagatttaaagttcaatctttttacttaaaaaacaaacgaagatcatggtgctaatattcggatttgagttgatcaattttttaaatgaagtattaatttacagtttatatattcactatagacctcgtaactcatctcttaaatcagttaa

SEQ ID NO: 1897 - DNA, 714 bp, Saccharomyces cerevisiae
tttatcaagttatcaggttctttccggaaaaacatctcataaatcatccctggaaaaatgtctagtcaaacagaaagaacttttattgcggtaaaaccagatggtgtccagaggggcttagtatctcaaattctatctcgttttgaaaaaaaaggttacaaactagttgctattaaattagttaaagcggatgataaattactagagcaacattacgcagagcatgttggtaaaccatttttcccaaagatggtatcctttatgaagtctggtcccattttggccacggtctgggagggaaaagatgtggttagacaaggaagaactattcttggtgctactaatcctttgggcagtgcaccaggtaccattagaggtgatttcggtattgacctaggcagaaacgtctgtcacggcagtgattctgttgatagcgctgaacgtgaaatcaatttgtggtttaagaaggaagagttagttgattgggaatctaatcaagctaagtggatttatgaatgaataacttatggcatgggagggtacatatgagcgccttttttttctcgctttgggcagctcatatcatgttccctcactagctaataatataatgaattttttagaaggagcacgattatataaaaaaaataccacttatgttgctacccttatatacgaatttataatacttaatgacgcttcaatgacgcctga

SEQ ID NO: 1898 - DNA, 3117 bp, Saccharomyces cerevisiae
caccgcttttggacctgaagaggagaagaaaataacatatcgtagaacagtctttgttaaccaaaatattttagctttgattccggactattagtacattgaattttttcaggtactaacaatgtttggcaacaatagaccaatgtttggagggagcaacctttcctttggatcaaatacgtcatccttcggtgggcaacaatcgcaacaaccaaactctctttttggaaatagcaataacaacaacaattccaccagtaacaatgcccaatcaggatttggtggattcacttctgccgctggcagtaatagtaacagtttatttggaaataacaatactcaaaataatggggcatttggccagtcaatgggtgccacccaaaactcaccatttgggtcgttaaactcctcaaatgccagtaatgggaacacttttggaggatccagttcaatgggttcttttggtggtaataccaataatgcatttaataataacagtaacagtaccaattccccgtttggtttcaataaaccgaatacaggagggaccttgtttggttcgcagaataataatagtgcaggtacttctagtttatttggcggccaaagtacaagtaccactggcacattcggaaacaccggaagtagtttcggaacaggcttaaatggcaacggctctaacatatttggggcagggaacaactcacaaagcaatactaccggcagcttgtttggcaaccaacaatcttcagcgtttgggacaaataatcaacaaggaagtctatttggacagcaatctcaaaacaccaataatgcgtttggtaatcaaaatcagctggggggcagttccttcggatcaaaaccagttggttcagggtcgctgtttggccagagcaacaacactttaggtaatacaaccaataatagaaatggattgtttggtcaaatgaattccagtaaccaaggcagttctaacagtggattgtttggacaaaactcgatgaacagcagcactcaaggggtatttggacaaaacaataatcaaatgcaaattaatggcaataacaacaacagtttatttggaaaggcaaacaccttttcaaattccgcatcaggaggtttatttggccaaaataatcaacagcaagggtccgggctgtttggtcaaaattctcagacaagcggtagtagtggactttttgggcagaataatcagaaacagcccaatacttttacccaatctaatacaggaataggtctctttggacagaacaacaaccagcaacaacaatctacaggtttgtttggagccaaaccagcaggtaccacaggatctcttttcggtggtaattcatcaacccagcctaactctcttttcggtactaccaatgtacctacctctaatacacagtcacaacaaggaaatagtctttttggtgccacgaagctgaccaacatgccctttggaggaaatcccactgcaaaccagtcagggagtggaaacagtctattcggaactaaacctgcctccactaccggctcattatttggaaacaacacagcttctacgacagtaccttccacgaatggattgtttggtaacaacgctaacaattcaactagcactacgaatacgggacttttcggtgcaaagcctgattctcagtccaaacctgcattagggggagggttattcggcaattcaaactcgaattcttccacaatcggccaaaacaaaccagtttttggaggcacaacccaaaatacaggactctttggcgccaccggcacgaactcttcagcagttggttcaactggtaaactttttggccagaataataatacgcttaatgttggtacacaaaatgtaccacctgtgaacaataccacccaaaacgcccttttgggtacaacggcagttccttccctacaacaagccccagtaactaatgaacagcttttttccaaaatatcaatccctaactctattacaaatccagttaaagcaacaacttcaaaagtgaacgcagatatgaaaagaaatagtagcctcacgtctgcctatagacttgccccaaagccgttatttgctccctcttcgaatggcgatgctaaatttcaaaagtggggcaagacactggaaagaagtgatagaggaagcagtaccagcaattctattacggacccagaatcaagctatctaaattcaaacgacttgttgtttgatccagatagaagatatttgaaacatctggtgattaaaaataataagaacttaaatgtcattaaccataatgatgatgaagcaagcaaagttaaattagtgacgtttacaacagaatcagcttcaaaagatgaccaagcctcatcaagcattgctgcttcaaaattaactgaaaaagcacattctcctcagactgacctaaaagatgatcatgatgaaagcactcctgatcctcaatcgaaatctccaaatggttccacctctataccaatgattgagaatgaaaagattagcagcaaagttcccggcctattgagcaacgacgttacctttttcaagaataactactacatttcaccttccatagaaacgcttggcaataagtcattaattgaacttcgtaaaataaacaacctagtcattggtcacagaaattatggtaaagtcgagtttctggagcccgttgatttgttgaatactcctttggatactttatgcggggatcttgtcacctttggaccaaaatcatgttcaatatatgaaaactgttccataaagccagaaaagggcgaaggcattaatgtacgttgtagagtgactttatattcctgttttcctattgacaaagaaacaaggaaacctataaagaatataacacatcctctactgaaaagaagtatagccaaactaaaagaaaacccagtgtacaagtttgaaagctatgaccccgtaacaggcacctatagttacaccatagatcacccagttttaacttaaaccggaataatttttgtagagaatccttgtatcgtctaagtagtctagatgttcagctgatagattttcgttgtattgtatatataataattgtcggaaaacaaaaatacttaatt

SEQ ID NO: 1899 - DNA, 615 bp, Saccharomyces cerevisiae
ctagtaactcataaatcaacgacattatatatcatcaactacaatgcaggcaaaccattccgtcagttacctttacgaatcaagtacttcaaagaggtcaaatgggctcttttctcaaacacaaaagcaaggaagttttcaaaaagctttaagtcaaactcaggaagaaatagaagatgaagacctgatggtagacctcaacacaggatctttaactcccgttaagttaaaatattggactcaaatgagtgctatgacggaaaaatttggtaaactgtgagaccaattttggcggtaatttcgtttagctgttttattttcacatttttaattgtcaatgctggaggttgttaaagtttggctagctgttctgaacaatccttgtataccggtgagactttttgttatagatattggcgatattcattttttaggaaggtgtttttatagatttttcaattttttttgtgtagatgcatgttttgattacttatgcatagtacgaatttttagtttattaagctatagaggtttttttttttttcacctctttaccacaaatttaatagctattgtgtagaataacttttaatggaaaacatttgcagtatttta

SEQ ID NO: 1900 - DNA, 608 bp, Saccharomyces cerevisiae
agaaaaaaaaacaaaaaaaaacaaacagatatgggctcatcaaccgggtttcatcatgccgatcatgttaactattcttcaaatctgaataaggaagaaattctagaacagcttctgctttcatacgaggggctatcagatggacaagtcaattgggtttgtaatttgtcaaacgcttcgtcattgatctggcatgcgtacaagtcattagctgttgatatcaattgggctggattttacgttactcaagctagcgaagaaaacacactgatattgggcccatttcaaggaaaggtcgcttgccaaatgattcaattcggtaaaggtgtttgcggaactgcagcctctacaaaggaaacgcagattgttccagatgtcaacaagtatcccggtcatattgcgtgcgacggtgaaaccaagagcgaaattgttgttccaatcatatccaatgatggtaagacattgggcgtcatagacatagattgtttggattacgaaggattcgaccacgtagacaaagaattcctagaaaaacttgctaaattaattaataaatcatgtgtctttaaataagagttttgagaacgaacaagtatttacgcacataa

SEQ ID NO: 1901 - DNA, 2833 bp, Saccharomyces cerevisiae
ttataaaagtgatccattctacagcgtaatattaacagtatcgctcctgcagtattctggcattattagtgcaaataagtacgcatattaccatgcgaaacgttttaaggcttttatttttaacagcttttgttgctatagggtctttagcagccgttttaggtgttgattacggtcagcaaaatatcaaggccattgtggtttctccgcaagccccattagaacttgtgctcacaccagaggcaaaacggaaggagatatctggtctttcgataaaaagattaccaggttatggaaaggatgatccgaatgggattgaaagaatctacggttccgctgttggcagtttagcaacaaggtttccccaaaacacattgttgcatttgaaaccgctacttgggaaatcactagaagatgaaaccactgtaactttgtattcaaaacaacaccccggtttagaaatggtatcaacaaatagaagtaccatagcctttttagttgataatgtggaatatccattggaagagttagtggcaatgaatgtccaagagattgccaatagagccaattcactgttgaaggatagagatgcaagaactgaggactttgtaaacaagatgagttttacaattcctgacttttttgaccaacatcaaaggaaagcacttttagatgccagttcaataaccacaggaatcgaagagacatatctggttagtgaagggatgtctgttgcagttaactttgtattaaagcagcgccaatttccaccaggtgaacagcagcattatatcgtatatgacatggggagcggttctattaaggcctcaatgttctctatattgcagccggaggacactactcagcccgttacaatagaatttgaaggatatgggtataatccacatctaggtggtgcaaagtttacaatggatattggcagtttgatagagaataagtttttggaaacacacccagccataagaactgatgaattgcacgctaatcccaaggccttagcaaaaatcaaccaagcagcagagaaggcaaagttaattttaagcgccaattctgaggcaagtattaacatagaatcactgatcaacgatattgatttccgtacttctataactagacaggaattcgaagaatttattgcagactcgttattggacattgtcaaacccataaatgacgctgttacaaaacaattcggtggctatggaacaaatttacctgagataaatggggtcattttggcgggaggctcttcccgaattcccattgtgcaggatcaattaatcaaactcgtatccgaagaaaaagtgttgagaaatgtcaatgctgatgaatcagctgtgaatggtgttgttatgagagggatcaagttatctaattcgtttaagaccaagccgttaaatgttgttgaccgttctgtaaatacttattcattcaaattatcaaacgaatctgaactgtatgatgtgttcacgcgcggaagtgcttatccaaacaaaacatctattttgacaaacacgactgattcgattcctaataattttaccattgacttatttgagaatggtaaattgttcgaaactatcacagttaattcaggagctataaagaattcatattcctctgataagtgctcgtcaggagttgcgtataacattactttcgacttgtccagtgatagattattctctattcaagaggttaactgcatttgtcagagcgaaaatgacataggtaactccaagcaaattaagaacaaaggcagccgtttggcttttacttctgaggatgttgagatcaaaaggctttctccttcagaacgttcgcgtttgcatgagcatatcaagttgctcgataaacaggataaggaaagatttcaattccaagaaaatttaaacgttcttgaaagtaacttgtatgatgctagaaacctgctaatggatgatgaagttatgcaaaatggaccaaaatcccaagtagaagagttatcggagatggttaaagtatatttggattggctcgaagatgcatcctttgatactgaccctgaggatatagttagcagaattagagaaattggaatattaaaaaagaaaatagaactttacatggattctgcaaaggaacctttgaactctcaacaatttaaaggaatgcttgaagaaggccataagttacttcaggctatagaaacccataagaataccgttgaagaatttttgagtcaatttgaaaccgagtttgcggataccatagataatgttagagaagaatttaaaaagattaagcaaccagcgtatgtgtcgaaggcgttatctacatgggaggaaaccttaacctcttttaaaaattccattagcgaaatagagaagttcctggcaaaaaacctatttggcgaagaccttcgtgaacatttatttgaaatcaaattacaatttgatatgtatcgtacgaaactagaggaaaaactgcgtttaataaaaagcggtgatgaaagtcgcttaaatgaaataaagaagttacatttaagaaacttccgcctacaaaagagaaaggaggaaaagttgaaaagaaagcttgaacaggaaaaaagcagaaacaacaatgaaacagaatcgacagtaatcaactcggctgacgataaaactactattgtcaatgacaagaccaccgagtcgaatccaagttctgaggaagacattttgcatgatgaattatagaagaatctttataatatatagcactagatttattttccgatatcaaattcagttacttatataaagttaaccacttgttacttcttttttcgcag

SEQ ID NO: 1902 - DNA, 1490 bp, Saccharomyces cerevisiae
taagacaatatagtcggaagcagttctgcgggatctgaaggaattgcggaataatgagatttcacgatagtatacttatcttcttttctttggcatcgctttatcaacatgttcatggtgcaagacaagtcgttcgtccaaaggagaaaatgactacttcagaagaagttaaaccttggttacgtacggtttatggaagtcaaaaagaattagtcactcctacggtcattgccggtgtcactttttctgaaaaaccagaagaaacaccaaatccattgaaaccttgggtatctttagagcatgatggtaggccaaaaaccattaaaccagaaatcaacaaaggtcgaaccaagaagggaagacctgattactcaacttacttcaaaacggtaagttcccacacatattcttatgaagaattgaaggctcacaatatgggccctaatgaagtttttgtagaagaagagtatattgatgaagatgacacctacgtctccctgaatcctattgtcagatgtactcctaatctttacttcaataaaggtctagcaaaggatatccgcagtgagccattttgtaccccttatgagaattctagatggaaggttgacaagacttacttcgttacttggtatacaagattttttacagatgagaattccggtaaagttgctgataaggttcgtgttcatttgtcctatgttaaagaaaaccccgtagagaagggcaattataaaagagatatccctgcaacttttttctcttccgaatggattgataatgacaacggtctaatgccggttgaggtcagagatgaatggctgcaggaccaatttgatcgtaggatcgttgtatcagttcagccaatatacatatcagatgaagatttcgatccactacaatacggtattttattatacatcactaagggttcaaaagtgtttaagcctactaaggagcaactggctttagacgatgcaggtataacaaatgatcagtggtattatgttgcattatctatccctactgtcgtggtggtatttttcgtcttcatgtactttttcttatatgtcaacgggaaaaacagagatttcacagatgttactagaaaagctttaaacaagaaacgccgtgttttgggtaagttctcggagatgaagaaattcaaaaacatgaaaaatcacaagtacaccgaattgccatcttataagaaaaccagtaaacaaaattagattcccttcgaagtatgcattcacccttcctcgagagggctgtttttatcttccgtcacactaatagaaaaccactctatccagttttttttgttacttaacttatcttaactcgatattgtataaatactgaagtccatatacttctttttttctcctttggatagtaaatacggtaaattaaaattagtgtaaactgaacaatattaacatatataaatcatctgtacgacaatttgataccaaataaatagagaa

SEQ ID NO: 1903 - DNA, 1301 bp, Saccharomyces cerevisiae
aacacaaacaaaggaggtatatagaagttgcagttgctagagtttgttttcttacctaattctagatcaattcttttttctgaaaaaaaaaaatggctactgcgttatatactgcaaacgatttcatattaatctcgttgcctcaaaatgctcaacctgttaccgcccctggctccaaaactgattcatggttcaatgagaccttaatcgggggtagggcatttgtttctgatttcaaaattcccgaattcaaaattggctctttagacacattgatagttgaatcggaagaactgtctaaagtagataaccaaattggggcttctattggcaaaatcattgaaattcttcaaggcctcaacgagaccagcaccaatgcttacaggactttacctatcaataatatgccagttcctgaatacttggaaaattttcaatggcaaaccagaaagttcaagttagataagtctatcaaagatttgataacattgatttctaatgaatcttctcaattagacgccgacgtcagagctacttatgcaaattacaacagcgctaaaactaacttggctgctgctgagagaaagaagacgggtgacctttctgtcagatccttgcatgatattgtcaagcccgaagacttcgttcttaattctgaacatttaactactgttctagtagcagttcccaaaagtttaaaatccgatttcgaaaaatcgtacgaaactttatccaagaacgttgtaccagcatctgccagcgtgattgcagaggatgctgagtatgttttgttcaatgttcatttgttcaagaaaaacgttcaagaattcacaacagctgctagagagaagaaattcattcctcgtgaatttaactactcggaggaattaattgaccagttgaaaaaagagcatgactctgctgccagtttagaacaatctttgcgcgtccagttggtaagattggccaagacagcttatgtcgatgtttttataaattggttccacatcaaggccttgagagtttacgtggaatctgttttgcgttacgggttgccacctcactttaacatcaagattatagctgtcccaccaaagaatctctctaaatgcaagtctgaattaattgatgcttttggatttcttggtggcaatgccttcatgaaggataaaaaagggaaaattaacaagcaagatacttctcttcaccaatatgcttctcttgtcgacacagagtatgaaccatttgtgatgtatataatcaatttataatcgatttataatactaacttagattaatat

SEQ ID NO: 1904 - DNA, 1474 bp, Saccharomyces cerevisiae
tttgattttggccctcgatagattcaagatgtcccaaggtactttatacattaatagatctccaagaaactacgcttctgaagctttgatttcttactttaaactagatgtcaagatcgttgatctagaacaatctagcgagtttgcttctttgttcccattgaagcaagcccctgcatttttgggtccaaagggcttaaagctaactgaagctttggctatccaattttatttggctaatcaagttgccgatgaaaaagaaagagctcgcttattaggttccgacgttatcgaaaagtctcaaatccttagatgggcatctctagctaattccgatgtcatgagcaacattgctcgtccattcctttctttcaaaggtttgattccatacaacaagaaagacgttgatgcttgttttgttaaaatcgacaacctagctgctgtcttcgatgctagattgagagactacacctttgttgctaccgaaaacatttctctaggtgaccttcatgccgctggttcttgggcttttggtttggccactattttgggccctgaatggagagctaagcatcctcatttgatgagatggttcaacactgttgctgcttctccaatcgtgaagactccatttgctgaagtcaaattggctgaaaaggctctaacctacactccaccaaagaagcaaaaggctgaaaagccaaaggccgaaaagtcaaaggctgaaaagaagaaggacgaagctaagccagcagatgatgctgctccagctaaaaagccaaagcacccattggaagctttaggaaagtccacatttgtcttggatgactggaagagaaagtactccaacgacgacaccagaccagttgctttgccatggttctgggaacactacaaccctgaagaatactccatctggaaggttggttacaaatacaacgacgaacttaccttgactttcatgtccaacaacttggtcggtggttttttcaacagattgtccgcttctactaagtacatgttcggttgtttagttgtctatggtgaaaacaacaataatggtattgttggtgccgttatggtcagaggccaagatttcgctccagcctttgatgtcgctccagactgggaatcttacgaatacaccaagttggacccaaccaaggaagaagacaaagaatttgtcaacaacatgtgggcttgggataagcctgttgttgtcaatggcgaagataaggaaattgttgacggtaaggttttgaaataatctcaataactcttcttccatattttcttcccaatatacataagagtcaaacaaaacgaattttcaaaagaaaaaagaaaaaaaccctgaagtctacttcatgattaccccatacttacgcgtggtttaattctatgtaacgattaacgtccatgtaatcattatatatatatatattgtaataatctctctaattgagtatcacaa

SEQ ID NO: 1905 - DNA, 516 bp, Saccharomyces cerevisiae
atgatcgaaactgccatttatggtaagacagtggatgaccaatctcgatgtgtccactggcatcttccaaaggatgtaattgccatcaggtttaaatgttgtgataagtactatgcgtgctttgaatgccaccaagagttaagttctcacccgctagaaaaatatgatctccttgacgatgcaaataaacacttgattatttgcggagtttgccgtcatgaaatgacgtttgcagagtattacgactacaattcaaaccttatttgtcccaattgcagatccccctttaatccaggctgtaaattgcactaccatttgtatttccagaaccctccccccgctatgtgttgagtgttgttctataaatgcatgccatcttaagctctgctgtgctcttctcgttaaggaaaaaatgcgatggtatatatatagatatatatatatatatatgtatctgtatatatatgttcatacatatatatatatctattattgttgttattattatcgtgatta

SEQ ID NO: 1906 - DNA, 1511 bp, Saccharomyces cerevisiae
actgtattcctccacttaagataacgaatacacatatagatatacaatatattatacgtggacatctacggaaaggaagaaaaaaaacaaaaggaaaaggaaggataccatatacaatgttgtcaagagtagctaaacgtgcgttttcctctacagttgccaacccttataaagtgactgttttgggtgcaggcggtggtattggacaaccattgtctttgcttctaaagcttaaccataaagtcacggacttaagactgtacgacctaaagggcgcaaaaggtgttgccaccgatttgtctcatattccaacaaactccgtggtcaaggggtttactccagaagagccagacggattgaacaacgctttaaaggacacagacatggttttaattcctgctggtgtgcccagaaagcctggtatgacacgtgatgacttgttcgccatcaacgcaagcatcgttcgcgatttggcagcagcaaccgccgaatccgctcccaatgctgccattctggtcatttccaacccagtcaattctaccgttccaattgtcgcccaagtcttgaaaaacaagggtgtttacaacccaaagaaattgttcggtgtgactaccttggactctattagagccgccagattcatctcagaagtcgagaacaccgatccaactcaggaaagggttaacgtcatcggtggacattctggtattaccatcatcccattgatttcgcaaacaaaccataagttgatgtctgatgacaagagacacgaattgattcacagaatacagtttggtggtgacgaagtcgtcaaagcaaagaatggtgctggctctgctacgttgtcaatggcccatgctggtgctaaattcgctaacgctgttttgtccggtttcaaaggcgaaagagacgtcatcgagccttccttcgtggactctcccttgttcaaatccgaaggcatcgaattctttgcatctccggtcactttgggcccagatggtattgaaaagatccatccaataggtgagttatcttcagaagaagaagaaatgctacaaaaatgtaaagaaaccttgaagaagaatatcgaaaagggtgtcaactttgttgctagtaaatagattgttcaagatcagaaatagagtgaaaaatagggaaaaaaaaaaaaaaattctactaataagaacggaagactactcgccatcatgagattacgacatcttttttatttaattctttgttatatttagccaattgaaaggaaggaaactgccaaaaatcaactagagaaaaattcatgctattcgttgctcctacacctttttttcttccgtagacgaggaaaaacaaaaatgattaaataggcgcgcgcggtgtgatggtgatgataatgatgatgatgatgataatgatgaataaacgtttcggtttacgagtttctttaaatatacatatatgatataaaaaaaaaaatacgtaccacttacaatttgcaaatatagatgatcgaa

SEQ ID NO: 1907 - DNA, 1057 bp, Saccharomyces cerevisiae
caaaccgaggacaaatagaaaagcatggctccgtatccatacaaagtgcagacgacagtacctgaacttcaatacgaaaactttgatggtgctaagttcgggtacatgttctggcctgttcaaaatggcaccaatgaggtcagaggtagagttttactgattcatgggtttggcgagtacacaaagattcaattccggcttatggaccacttatcactcaatggttacgagtcatttacgtttgatcaaaggggtgctggtgttacatcgccgggcagatcgaaaggtgtaactgatgagtaccatgtgtttaacgatcttgagcattttgtggagaagaacttgagtgaatgtaaggccaaaggcatacccttgttcatgtgggggcattcaatgggcggtggtatctgcctaaactatgcctgccaaggtaagcacaaaaacgaaataagcggatatatcgggtcaggcccattaataattttacatccgcatacaatgtataacaagccgacccaaattattgctccattattggcgaaatttttaccaagggtaaggatcgacactggtttagatcttaaaggaatcacatctgataaagcctatcgtgctttcctcggaagcgatcctatgtctgttccactatatgggtcgtttaggcaaatacacgactttatgcaacgtggtgccaagctctacaagaatgaaaacaattatattcagaagaacttcgctaaagacaaacccgttattattatgcatggacaagacgacacaatcaacgatcctaagggctctgaaaagttcattcaggactgtccttctgctgacaaagaattaaagctgtatccgggcgcaagacattcgattttctcactagagacagataaagtcttcaacacggtgttcaatgatatgaagcaatggttggacaaacacaccacgaccgaagctaaaccataacctatacaggacttaatcacttagacagtatacaaatacacatatacatttatatttcatcgagaatgccatcagtaaatattatttgcaa

SEQ ID NO: 1908 - DNA, 866 bp, Saccharomyces cerevisiae
tatcccgtaacaaactaataaatactacgaaagtctcaaaaaacaataatgaaattctccactgctttgtctgtcgctttattcgccttggctaagatggtcattgccgattccgaagaattcggcctggtgagtatccgttccggctcggatttacaatacttgagtgtttacagtgataacggcactttgaaacttggcagcggtagtggctcatttgaggcaactattaccgatgacggtaaactgaaatttgacgacgataagtatgctgttgtcaatgaggatggctcattcaaagaaggttctgagagcgatgctgccactggtttttctattaaagatggccatctaaactacaagagctcttctggtttctacgctatcaaggacgggtcgtcttacattttctcttctaagcaatccgacgacgctaccggtgttgcgattagaccaactagtaagagcggatctgttgcagcagatttttctccaagcgactctagttcctcttcatctgcttctgcttcgtctgcttccgcatcatcttctacaaagcatagttcgagtatagaatctgtcgagacctctactactgtggaaacttcctctgctagctccccaactgcttcagttatctctcaaattactgatggacaaatccaagctccaaacacagtttacgaacaaacagaaaatgcaggtgccaaggctgccgtcggcatgggtgctggtgctctagcggtcgcagctgcttacttgttgtaagtacgagaacaaaacctgcatgttttatttccttcaatatagctttctacataatgatcacttacatatagcgtaatgtaatatgaaatggcccataa

SEQ ID NO: 1909 - DNA, 500 bp, Saccharomyces cerevisiae
caagaataaataacttcatcacattcgctacacactaacaagaaaaaaaatgcaattctctactgtcgcttccgttgctttcgtcgctttggctaactttgttgccgctgaatccgctgccgccatttctcaaatcactgacggtcaaatccaagctactaccactgctaccaccgaagctaccaccactgctgccccatcttccaccgttgaaactgtttctccatccagcaccgaaactatctctcaacaaactgaaaatggtgctgctaaggccgctgtcggtatgggtgccggtgctctagctgctgctgctatgttgttataagaaatctctgattttttataatatctatatggcttttttcaaaattttcggttttactaggtaagtgtttgattcttttcttttcgttaatatatttttacacataattttaaataatttttgttattttgaataggtagataccataaaaataaaacactttttactttaa

SEQ ID NO: 1910 - DNA, 1195 bp, Saccharomyces cerevisiae
tgcaaaattattgattggatgtggcaaaaataggaatgggcgatcataatctgccggattttcagacatgtttgaagttttctgttacagctaaaaagagctttctatgtatgtatagagacagcgtctcaaaggaaaaattagcctcttcgatgccaagtacttgtgatatacaactgaagagggcaatcaatgacgcttatccgggcggaggaataaaggtcacggttctgaactcaacaactgcaagcttggactcgttagcaactacacatgttaaggaatttgagattgttatcattccagacataaattctcttttacagccagaccaagcgaaattagtaaaaattatgagagattgcacagtggcgattgagaaggcacagtcaacacgtatatttataggagtggttcattggaataatcccgtgcagccttcaggcgccgctaaggatggggatgaagcaggtaaaccagctcccaaaactcgcatcttcctgcccacgtctttccgtatgggcgcttggctcaaacacaaattctggtttgcatgtgcacccccatatttggattttgaaagttcaactgagtctagcattaatacaagagccaataatagcattggtatggctgaggaagagaagcaggagccagagagcaagaggtcgatcatattaaatgaagaggcaaatctgaacgatgtatttgtggggtccactgtaagacggtatattctcgatatcatggtccatttgcgaacgcatagattgacgtataacgccaaagccggcggggtatatacaaattcattggacgacgtggtgttattgtctagattaattggtctacatagcggcaagatgtttgtgtcaccttcacatgtcaaagaggcgtccaggtggtacttccccatgcacttggaattggttcagcgttcctccatggatagttccttattgtacggtagcgaccccaacttggtggacgaaatgctagagaaacttgcgaagattaagtgtgaggaggttaatgagtttgagaatccccttttcctggaatctctcgtagtgaaaaacgtactaagtaaagtcgtgccgcccgtgtaagtttattatgtatttcgagcatgcatctggaacctatgtttacatacgtacaaacggtatttaaaagtttctattcttagcgtcaa

SEQ ID NO: 1911 - DNA, 1604 bp, Saccharomyces cerevisiae
caattgaaaagaaaaaaaaaatacagaatagacgatagcggattgaacgatagcatactattgagtgcgttttcccttctcatttgaaaattactatccgtttttcactgccgaaagacttgatgttgaggacgaggcttactaattgcagtctatggaggccctactacacgtcatcgcttagtagagtaccaagagcacctccagataaagtcttggggttatctgaacacttcaaaaaggtaaaaaatgttaacaaaattgacctgaccgtaggaatatataaagatggttggggcaaagtgacgacgtttccctccgttgcaaaagctcaaaaattgattgaatctcatttagagttgaataagaatctttcatatttaccaataacaggttccaaagaatttcaggaaaacgttatgaaatttttgttcaaggaatcatgtccgcagtttgggccattttatttagcccatgatagaatcagctttgttcagactttgagtggtacaggcgccctagctgtagcagctaaattcttggcattatttatttcaagagatatttggatacctgacccatcatgggcaaatcataagaacatttttcagaacaatggttttgaaaatatttaccggtattcctattataaggacggtcagatagacatcgacggatggattgagcaattgaaaacctttgcatataacaaccagcaagaaaacaataagaacccaccttgcataatcttgcatgcgtgttgtcacaaccctacaggtctcgacccaactaaagagcaatgggaaaagattatagatactatatatgagctaaaaatggtacccattgttgatatggcttatcagggtttagagtctggtaacttactaaaggacgcatatttattgaggctatgtctcaatgtaaataaatatccaaattggagtaacggtatctttctttgtcaatcttttgccaagaacatgggcctttatggtgaacgagttggttccttaagcgttatcacgccggcaactgcgaacaatggaaagttcaaccctctacaacagaaaaactcattgcagcaaaatattgactcccaattaaaaaagattgtcagaggtatgtattcttctccaccaggatacggttctcgtgtggtaaatgtagtattatcagatttcaaattgaaacagcaatggttcaaggatgttgatttcatggttcagagattgcatcacgtcagacaggagatgtttgaccgtctagggtggccggatcttgtaaatttcgcacaacagcacggtatgttttactatacaaggtttagtccaaagcaagtcgaaatattgagaaacaattacttcgtctatttaacaggtgatggtagattgtcgcttagcggagtcaatgattcgaacgttgattacttatgtgaatctcttgaagcagtctcgaaaatggacaaactcgcataattttttcaccttacagttcacctttgtctttatttttttattacttttcccttctcattttgccacacaataatttatagaatataataattttttgtaataattaataaaccttttttttatcta

SEQ ID NO: 1912 - DNA, 3571 bp, Saccharomyces cerevisiae
caactagagaggattatcaactgctaagccctttacacgttatctgtgatcctgctgcactaggaaacgtttcaaatcaccatatttgcaatttcacaaggatggacaaattagtcgtgaattattatgaatacaagcaccctataattaataaagacctggccattggagcccatggaggcaaaaaatttcccaccttgggtgcttggtatgatgtaattaatgagtacgaatttcagacgcgttgccctattattttaaagaattcgcataggaacaaacattttacatttgcctgtcatttgaaaaactgtccatttaaagtcttgctaagctatgctggcaatgctgcatcctcagaaacctcatctccttctgcaaataataataccaaccctccgggtactcctgatcatattcatcatcatagcaacaacatgaacaacgaggacaatgataataacaatggcagtaataataaggttagcaatgacagtaaacttgacttcgttactgatgatcttgaataccatctggcgaacactcatccggacgacaccaatgacaaagtggagtcgagaagcaatgaggtgaatgggaacaatgacgatgatgctgatgccaacaacatttttaaacagcaaggtgttactatcaagaacgacactgaagatgattcgataaataaggcctctattgaccggggattggacgacgagagcggtcctactcatggtaatgacagcggtaaccaccgtcacaacgaggaggatgacgtccatacccaaatgacgaaaaactattctgacgtagtgaacgatgaagacatcaacgttgccattgccaatgccgtcgcaaatgtagattctcaatcaaacaataagcacgatggaaaagacgatgatgccactaacaacaatgatggccaagataataatactaataacgatcacaacaataacagcaatatcaataacaacaatgtcggtagccacggcatttcctcccactcaccatcctccatacgagacacgtctatgaatttagacgtcttcaattctgctaccgatgatataccgggcccatttgtcgttaccaaaattgagccctatcatagtcacccactagaagataacttgtcactgggtaaatttatcctaactaagattccaaagattttacaaaacgatttaaagtttgatcaaatactagaaagctcttacaataattctaaccatacagtgagtaaatttaaagtttctcattacgtggaggagtccggtcttttagacattttaatgcaaagatatggattaaccgccgaagatttcgaaaaaaggttactttcccaaatagccagacgtataacgacgtataaagcaagatttgttttgaaaaagaaaaaaatgggcgagtataatgatttacaaccttcttcatcttccaataacaacaataacaacgatggtgagctttctggcacgaacttgagaagtaactctatcgactacgccaaacatcaggaaatatcaagtgcgggtacctcatcgaacacaaccaaaaatgtgaataataacaagaatgacagtaatgacgataataacggcaacaataataatgacgcctcaaatttaatggaaagtgtgctagataaaacctctagtcaccggtatcaacccaagaagatgccaagcgtcaataaatggagcaagccagatcaaataactcattcagacgtgtccatggttggcctagatgaatcaaacgatggcggtaatgaaaatgtccacccaaccttggctgaagtagacgctcaagaagctcgtgaaactgctcagttagccatagacaagatcaattcttataagaggtccattgatgacaagaatggtgatggccataacaattcgtcgagaaacgtggtagatgaaaacttgatcaacgatatggattcagaagatgctcacaagtccaaaagacagcatttgtcagatatcacactggaagagagaaatgaagacgacaaactaccacatgaagtggcggaacagttaaggttactgtcatcgcatttgaaagaggtagagaatctacaccagaataatgatgatgacgtagacgatgtaatggtggacgtggatgtagaatcgcagtataataagaacacaactcatcataataaccatcatagccaacctcatcacgatgaagaagatgttgctggactaatagggaaagccgatgatgaagaagacctttctgatgaaaacattcaaccagaattaagaggtcaatagatacccagttgagaagacgagctatttttctcatgtttcttttgtttattcacttttctatactttttcttttctattgaaatatatattatatcttatgtatgtttttttgtattataaacaagcaaatttcgtcttgccatttaccttctgatattaatcacatgtatatctcaattcaagtttttgttaagataatcagcgaaaagcggaccgatcctatcttgatctatatctcttagtttgttgaagttaatgaattgccttttcaatctctgcaattgcgccaacgtaacgacgttaccaatgggcaagtctacgaagaagcaaccatcatcattgatatcggtaatcccttcggaaacaatgactcttgttccgttacttaccccgccaatagaagtcaggcttttgatgtggttcattatggtttttattatcttactagtttcgatgtcgagaacctggatgaaattggactgagacgcaggctttagtaccgtggctgagttcggtttttgtaagcccttactcaacggatcattgtgtccactgtttttagccgatttggaagtttgaaagactactttacaaatatcgtcgatgtagtcagttatgttgtcctgaggagtaagaatagcaaagagtggagagtcccatcggttgcttgagttaggctcttcgtatcgttgaatcaattgattcaataactcgggttcccaagggttcgggtttgaagtcttattccactcgaatatagtctctggtggacacagtgtttgaattacacaaaatgtggtggacaaatttttcacctcgcagtgaagttgataccggaaacccttgatataattcaacgagtctacaatgactatcttgtttttagatagatctcttttcactgcggagatgatctccgacctcaattttctttcatcttgggaagttatataatctgaatgttttatgcctaaagattcatctgaatgataggttatggaatatttacttaatgatggggttgcatcgatcttggactgtagtagttgtaccaaatgtttagcaagcgttgtcttaccactacatgggtatcccgtaaaaagcaccagtggcatcttcttactaaattgcctgtttagttttttcaaaagttttacaaggtccctttaccctcattctgatacgttattgttcaagtttcacctgttcatcaagtattcttcatttctttttccatcgcgatgacgatgacaaaacggcaaaaagtcaaagaa

SEQ ID NO: 1913 - DNA, 827 bp, Saccharomyces cerevisiae
ccaagatcatcgattcataatagtcatgtccgataaagttattaaccctcaagttgcatgggctcaaaggtctagtactactgatccagaaagaaattatgtcttaataactgtgtcaattgcagactgtgatgcccctgagttaaccattaagccatcatacatcgaattaaaggctcaatcaaagcctcatgttggcgatgaaaatgtccatcattatcaattacacattgatctatacaaggaaattatacctgaaaaaacaatgcataaggttgctaatggccagcactactttttgaaattgtataaaaaggatttagaatctgaatactggccacgtttgacaaaggaaaaggtgaagtacccttacatcaaaactgatttcgataaatgggttgatgaagatgaacaagacgaagttgaagctgaaggtaatgatgccgctcaaggaatggatttcagccaaatgatgggaggtgctggaggtgctggaggtgctggaggcatggacttcagccaaatgatgggaggtgctggtggcgctggttctccagatatggctcaattgcagcaattattggctcaaagcggtggtaatttggacatgggagatttcaaagaaaacgatgaagaagatgaagaagaggaaatagagccggaagtgaaagcttaaaaggaggagcaaatcaacctggagtgctagaatgagtaacttagaataaaagacgaatatatgcactttacacaactctttacctgtttgttattggctgcctctatgtaattaaatattatggaattaataaaaatatttttattcgtaa

SEQ ID NO: 1914 - DNA, 1249 bp, Saccharomyces cerevisiae
catccgaaatagttttccttagattgctatagcaagtcagacacaagcacatctcatcgaattatatcgtaagcaaatatgtcatctgacaactctaaacaagataaacaaattgaaaaaacagccgcccagaagatatcgaagtttggttcgtttgtggctggtgggctagcagcatgtatagctgttacagttactaatccgatcgaattgattaaaatcagaatgcagcttcaaggtgaaatgtcagcatcagctgcaaaagtttataaaaatccaatccaaggtatggcggtaattttcaaaaacgaaggtataaaaggtctgcaaaaagggttaaatgctgcttatatctatcaaattgggctaaatggttccagattagggttttatgagccaatcagatcatcattaaatcagcttttcttcccagatcaagagccacataaggtacagagcgtcggagttaacgtcttttctggtgccgcatctggtataattggtgcagtcattggctctccattattcttggtgaaaacaagacttcaatcatattccgagtttataaaaattggtgaacaaacgcactacaccggtgtttggaacgggttagtaaccatttttaaaaccgaaggtgttaagggtctattcagaggtattgatgcggcaattttaaggacaggtgctggttcctctgttcaactacctatctacaacacagcaaagaacattttggtcaaaaatgatctgatgaaagatggcccagcattacatttaactgctagtactatctctgggttaggtgttgccgtcgttatgaacccatgggatgtcattttgacaagaatctataatcaaaaaggtgacttgtacaagggacctatagattgtttggtcaaaactgttagaatcgaaggtgtaaccgctttgtataagggttttgcagctcaagtgttcagaatcgcacctcatacaatcatgtgtttgaccttcatggaacagacaatgaaactagtttattcgatagagtcgagagttttaggccataattaattcccataacaaactccgaggtttgaagtttcattcattggccaggacagttctactttactaatggtttcattacaacctttttcttcatattatgtagcattaaggataatagagcattttttatttcacattcatacacgatagttttataaacgtaattataaacatacagaacattattcacaattgtcca

SEQ ID NO: 1915 - DNA, 2293 bp, Saccharomyces cerevisiae
cgtcataccaacaacagttgagttatttttcgctcccatactttttagaattggtttgtttgtgtttggttaaatttcaaagcctttatattctttgatatagattactctacaatttctttgtatacagcgggaaattgacacttcaaagttcctctcatatcaacaaacattaatacagttcctgaaaatgtattcttggaagtcaaagtttaagtttggaaaatctaaagaagaaaaagaagccaaacatagtgggttttttcactcctctaaaaaggaagaacagcagaataatcaagcaactgcgggggaacatgatgcttcaattactcgttcatctttagacaggaagggcacgataaatccatcaaattcatcagtggtcccggttcgtgtttcatacgatgcatcctcatcgacctctactgtacgagattcaaatggtggtaattcagaaaacacgaactcatctcaaaatttagatgaaacagcaaatattggttctacagggacacccaatgatgccacctcaagttcaggaatgatgactatcaaagtatataatggtgatgactttattttaccttttccgattacctcaagcgagcaaatattgaataaactattggcctcgggtgttccaccgccacataaggagattagtaaagaagtagatgctttaattgcacaactgtcccgtgttcaaataaagaaccaaggtccagctgatgaagatttgatctctagcgagtcagcagcaaagttcatcccatctactatcatgttaccagggtcttcgaccttaaatcccttactatatttcaccattgaatttgataatacagttgcaactattgaagcagagtatggtacgatcgctaaacctggtttcaataagatatctacctttgatgtgacaaggaaattaccttatttaaagattgatgtatttgcaagaattccgtccattcttttgccctcgaagacatggcaacaggagatgggtttgcaagacgagaagctacagaccatttttgataaaataaattccaatcaagatatacatttagattctttccatttgcccatcaacttaagttttgactctgcagctagtattagactatataatcaccactggatcacattggataatggcttgggtaagatcaatattagtattgattataaaccttccagaaataaacctttgtccatcgatgatttcgatcttttgaaagttatcggtaagggttcgtttggtaaagtgatgcaagtcagaaagaaagatacacaaaaagtatacgctttgaaggcaatcagaaaatcatacattgtctctaaatccgaagtcacgcatactttggcagaaagaaccgttctagcacgtgttgattgtccatttattgtacctttgaagttttctttccaatcaccggaaaaattatactttgttttagcgtttatcaatggtggtgagttgttttatcatctacaaaaggaaggaaggtttgatttatcacgtgccagattttataccgcagaattgttatgtgcgctagacaacttgcataaactagatgttgtctatcgtgatttgaaaccagagaatattttattggattatcaaggccacattgccctttgtgatttcgggctatgcaaattgaatatgaaggatgatgataagacagatactttttgtgggaccccagaatacttggcaccagaactattgctaggtttaggctatacaaaggcagtagattggtggacattgggagtcttgttatacgagatgctcacaggtcttcctccttattatgatgaagatgttccaaaaatgtataagaagattctacaggagccactagttttcccagatggatttgatagagatgcaaaggatctattgattggattattgagccgtgatccgacaagaagattgggctacaatggtgccgacgaaattcggaaccatccttttttcagccaattatcatggaagcgcctgttgatgaagggttatattccaccatataaaccagctgttagtaattccatggatactagtaatttcgatgaggaattcactagggagaagccaattgatagtgtggtagatgaatacttgagtgaaagtgttcaaaagcaatttggtggctggacatacgttggaaatgaacagctaggtagctcaatggtgcaaggtagaagcattagatagacttagtgaatacattatcaactagtttactcatgacatactttatataaaaagaaaggt

SEQ ID NO: 1916 - DNA, 1877 bp, Saccharomyces cerevisiae
acaactcaattgaatagtaaatgtcacttctaatagattctgtaccaacagttgcttataaggaccaaaaaccgggtacttcaggtttacgtaagaagaccaaggttttcatggatgagcctcattatactgagaacttcattcaagcaacaatgcaatctatccctaatggctcagagggaaccactttagttgttggaggagatggtcgtttctacaacgatgttatcatgaacaagattgccgcagtaggtgctgcaaacggtgtcagaaagttagtcattggtcaaggcggtttactttcaacaccagctgcttctcatataattagaacatacgaggaaaagtgtaccggtggtggtatcatattaactgcctcacacaacccaggcggtccagagaatgatttaggtatcaagtataatttacctaatggtgggccagctccagagagtgtcactaacgctatctgggaagcgtctaaaaaattaactcactataaaattataaagaacttccccaagttgaatttgaacaagcttggtaaaaaccaaaaatatggcccattgttagtggacataattgatcctgccaaagcatacgttcaatttctgaaggaaatttttgattttgacttaattaaaagcttcttagcgaaacagcgcaaagacaaagggtggaagttgttgtttgactccttaaatggtattacaggaccatatggtaaggctatatttgttgatgaatttggtttaccggcagaggaagttcttcaaaattggcaccctttacctgatttcggcggtttacatcccgatccgaatctaacctatgcacgaactcttgttgacagggttgaccgcgaaaaaattgcctttggagcagcctccgatggtgatggtgataggaatatgatttacggttatggccctgctttcgtttcgccaggtgattctgttgccattattgccgaatatgcacccgaaattccatacttcgccaaacaaggtatttatggcttggcacgttcatttcctacatcctcagccattgatcgtgttgcagcaaaaaagggattaagatgttacgaagttccaaccggctggaaattcttctgtgccttatttgatgctaaaaagctatcaatctgtggtgaagaatccttcggtacaggttccaatcatatcagagaaaaggacggtctatgggccattattgcttggttaaatatcttggctatctaccataggcgtaaccctgaaaaggaagcttcgatcaaaactattcaggacgaattttggaacgagtatggccgtactttcttcacaagatacgattacgaacatatcgaatgcgagcaggccgaaaaagttgtagctcttttgagtgaatttgtatcaaggccaaacgtttgtggctcccacttcccagctgatgagtctttaaccgttatcgattgtggtgatttttcgtatagagatctagatggctccatctctgaaaatcaaggccttttcgtaaagttttcgaatgggactaaatttgttttgaggttatccggcacaggcagttctggtgcaacaataagattatacgtagaaaagtatactgataaaaaggagaactatggccaaacagctgacgtcttcttgaaacccgtcatcaactccattgtaaaattcttaagatttaaagaaattttaggaacagacgaaccaacagtccgcacatagaattattggtcttgaacaagcactaattttccaaagatgttttaactgatcttaatttatatgtagaggatatatgtagtatatctattttttgctgattgacttatcaattagcttcataatacaacattgtttttgtttttc

SEQ ID NO: 1917 - DNA, 540 bp, Saccharomyces cerevisiae
caaaagtcgaatatcttcaagttatctggaacaactttcatatatttgataagatggagcaaaacaaagatccgcagatgatctcgaaacatagttctaggctacctatatgggtgctaagtcctcgcgaagaacaacaggctcgcaagaacttgaagacggaaacatacaaaaaatgtgcaaattttgttcaagcaatggcagattgtgctaaggcaaatggaatgaaagtttttcccacttgtgataagcaacgagatgaaatgaaatcgtgcctcctgttttatcaaacagatgagaaatatttagatggtgaaagggataaaattgttttagaaaaaatcaacaagcttgaaaagttatgtcaaaaacaaagctctacaaaataagctgtgttgattgatgtttttgatttacatcttttaaggattttttgatatatccattcttgtacataaattatatacacacagcccaacaataaaaaggaaaaattaatacgaagggtatatatgtatggtataatacttaagttcacta

SEQ ID NO: 1918 - DNA, 1972 bp, Saccharomyces cerevisiae
attttttacagatatcaagataatttctttccggatacttattgaagctattatttgttactggcaagaaaaagcaaacataggcggtcatttttcttttgtataaagtaaatacaagaagaattattttcgaggaataactaggtgtgcagagatattaaggaacaaggaaagaagaaagaaaacaattcgaacaaaactttattattctagcactattttaaaaaactgtcttttggcaaaatgtacttcccctttttaggcagattatcgataacagattacattatagtcgtcttggtatacatagaaagcattatttcatcagtccttaaacttataccacaaccaatgattaaccttttcgaatggctaataaatttctcaacgtcctccgatgacaataccatcgaagaaaagttaaggtcagctccaactatccatgaaatgtgtgcaatttttgatatatctgtcgaggatcatttggtaagaactgaagacaattatatcttgacactgcatagaatcccaccgatttctaaaaacagatttaacaataaagtggtatacttacatcacggtcttttgatgtgttctgatgtttggtgttgcaatattgaaagacataaaaacttaccgtttgtattgcatgatttaggttacgacgtctggatgggaaataatagaggtaataaatattcaactgcccacttgaacaaaccaccaaaatcgaacaagttttgggatttttctatcgacgaatttgcgttctttgacattccaaactcaattgaattcatcttagatataacaaaagtggacaaggtcatctgcatcggattctctcaaggctctgctcaaatgtttgctgcattttcgttgagtgaaaaattgaatcgaaaagtctcccattttatagccatagcacccgctatgactccaaaggggttgcacaacagaattgtcgataccttggccaaatcatcgcccggctttatgtatcttttctttggtaggaaaattgtgttaccttcagctgtcatttggcaaagaactttacatccaacacttttcaatttgtgtatcgatatcgcaaacaagatactgttcaattggaagtcgtttaacattctaccgagacaaaagattgcttcttacgcaaaactttattcaacgaccagtgtaaaatccattgttcactggttccaaatattaagatctcagaaatttcaaatgtttgaagagtctgataacatgctaaattccttaactaggccttaccaaattgctaattttcctactagaacaaatatcaagattcccattcttttaatttatggtggcatagattctttagttgatattgatgtgatgaaaaaaaatctacccttcaactccgtctttgatgttaaagttgacaattatgaacacctggatttgatttggggcaaagatgccgataccttggtcattgctaaagtcttgaggtttattgaattttttaaccctggtaatgtttcagtgaagactaaccagttactaccatcagcaagtctggttgaggaattaccaagcacgacatggaagacaactcatccaacgcatggtctcagttatagaactcactcggcagaccgttctccgttgtctgtacaagctgatgaagcggatgaggtccacaatgctgacaattcaaggttcttaagacgagtgttttctactagtgccatagacgaggacaacgaaaatgagcaccaggatgatacagaagatcaaatccataaggagcagcaaagacggttaagtgcctatctggaatcatccaaagatttacgacaactagatgccaactcttcgacaactgcgctggatgctctaaataaagaatgaaaagaatgcgagagaaaccctattaaactattttttgtctaggataataatattagcgctaatctaaaaatcgatgaactaa

SEQ ID NO: 1919 - DNA, 719 bp, Saccharomyces cerevisiae
acaagctctaagaataataaacgatgtctgcaatgatggtcaagttaggactgaataagtcggctctattactgaaaccctccgccttttcaagagcagctgccttgagctcctcgaggaggctgctttttaatacagctagaacaaacttcctttctacctcaccattgaagaatgtggccagtgaaatgaacaccaaagcggcaattgctgaagaacaaatattaaacaagcaaagagcaaagagacctatttctccacatctgaccatttaccagccacaattaacttggtacctgtcttctcttcaccgtatttcgttggtgcttatgggactaggtttctacttgtttactatactcttcggagtctctggtttattaggtcttggattgactaccgaaaaggtttctaattggtaccatcagaagttttccaagattaccgaatggtccatcaagggttcctttgcttacttatttgcaattcactatggtggcgccattagacacttgatctgggataccgctaaggaattgacattgaaaggcgtttacagaactggttacgctctcattggtttcaccgccgttctcggtacttatttattaactttatgattctttaaggcgacgcacctgtttctacacacaaatatatatatagccaattttatatatacgttcctatatatgacccaataccgcacttatttattc

SEQ ID NO: 1920 - DNA, 849 bp, Saccharomyces cerevisiae
gtacattttaagaaaggaagtaaatacacataaataaatagcaggaagaaaatgtctaacgaaattgaattactgcagaagcaagtctctgaattacaagacttagtgaagaagcaaagtctgattatctctaagacaggagagcgtgtgctggaattgcagttagataaacaaaagcacgacgtaactgattttgattcgaaattctctaaatctatctcgaagaaatcaggatccgctactcaattcgatgccactgattttgccacaaatgaagatctagtggaattagtcaaagaactacagggtgagctaaatttcatcgaggaaaggtctatcagaagacttgttaactctttgaaaaaagatgatgatgacgttatagcgccactgcctaatgcagatggtgatattcctgctatttcagacggagtgttccctaagtcgttgaaagaatttaaagacatcccagacttaaaactggtaagacttgctaaattctacgaaagattgccaccaactctaaaggaacaagaagattttgaaaacttcctggaaggtaaggtggaagcctttcacattaatgagaccactgatgaagagatttctaaggagttggaaaagttctccaaagatgagctagatgatgcatttaatgatgttgcccgctatctaggtctctcccttagaagaggaaccgaaatatggtaaacagaaaatgaaaaaaaatgaaaaatcaatgaataagagggcttgagttccaggttctagaaatttccctcacttatatatatatatatatctatatacatatagttttgagtatatcataacaggattctctttcaa

SEQ ID NO: 1921 - DNA, 1618 bp, Saccharomyces cerevisiae
attcaattgagatatttttttgaaccatcgtaataaatcaaggaagttaggaactatacggaatgccaccaaaagaagactgggaaaaatacaaggcacctttggaagacgatgataaaaaacctgatgatgacaagatcgtacccttaacagaaggtgacattcaagtcttaaaatcatacggtgcagctccatacgcagccaaattaaagcaaactgagaatgacttaaaagacattgaagcgagaatcaaagaaaaggccggtgtgaaagaaagcgatacagggttagcaccctcccatctatgggatattatgggtgataggcagagactgggcgaagaacatcccttacaagtcgctcgttgcacgaagatcattaaggggaatggtgaaagtgacgaaactacgacagataataataacagcggcaatagcaatagtaatagcaatcaacagtctactgatgcagacgaagacgatgaagatgccaagtacgtgataaatcttaagcaaattgccaaatttgtcgtcggattaggtgaacgtgtttctccaacagatatagaagaaggtatgcgtgtaggtgtcgataggtcgaaatataatattgaacttccattgcctccaaggattgacccatcagttactatgatgaccgttgaagaaaagcctgacgttacttatagcgatgtcggtggctgtaaagaccaaattgaaaagctgagagaagttgtcgagctgcccttattatctccagaaagatttgctactcttggtattgatccaccaaagggtatcttattatatgggccacctggtactggtaagacattatgtgctcgtgctgttgctaatagaactgatgcaacttttattagggtcattgggtctgagctagtgcaaaaatatgtcggtgaaggtgctcgtatggttagagaattatttgaaatggctcgtaccaaaaaggcttgcattatattcttcgatgaaatcgacgctgttggtggtgctcgttttgatgatggtgctggtggtgataatgaagttcaaagaactatgttagaactgattacacagttagacgggtttgaccctcgtggtaacattaaagtgatgtttgccaccaataggcccaacactttagatccagctttattgagacccggtagaattgatcgtaaggtagagttttcattacctgacttggaaggtcgtgcaaatatcttccgtattcactctaaatcaatgagtgtggaacgtggcatcagatgggaacttatctccagactgtgtccaaactctaccggtgcagaattaagatctgtttgcacagaagccggtatgtttgccattagagcaagaagaaaggtggctactgaaaaggatttcctgaaggctgttgataaagttattagcggatacaagaagtttagttccacatcgcgttatatgcaatataattgacgtcaatgtacttttttattatatattatgagaagggttaataaaaacaacaagtacaactacaactatcgagataaaaaggatacgagagtatcccctcaaatagagaaagaattagcgtatataatgctaaagaaaattcacgtttatta

SEQ ID NO: 1922 - DNA, 2183 bp, Saccharomyces cerevisiae
ataagggattgcatcgcggatatgaatggaaaagaggtttcaagtggctctggaagaacgcagagcaacaacaacaaaaaaaataacaacggaggcagtacaggaatctcgcatgcgtctggctcacctttaacggacggcaacggtggcaatagcaacggtaatagtagaagtagaagcagaagtagaaaatctagtggaactacaggtggtttgctaaaaaagccgccgctgcttgtgaacaatgaagcggtgcatgctagcgtacccgacgcgtcgcacacttcctgtaacaatggcacgcttgaagtgagcataaataaccctgagccacatgtggtagatgccgtggcacgccacttgataagaaacccgagtaacagcctacaattgcaaggcggagacattacaagagatctgtataagtggacaaacgaccatccttcatcaccatcgcagtatcagtacccaagtcaacctgcactttccacctcaataccttcacaagcgccctcattctcgaatcgtaaaaggtctatgagcttttctgccgcttctatagcatcttcctctcaccttaacaacaactcggaggcgaatgggaatcctctagcggcaataggcctggcgcccgcaccgatgacgcacgaagaaatcagggctcctggtggattcagaagatcttttataatacagaagcgcaggaaacataacgttgatgcgcccataccgaattttttcaccaggaactttattgaatttttgaccttgtatggccacttcgctggtgaagatttatcggaagaagaggaggaggaggaagaaactgaagaggagccagaggaggaagctttggaaacggaaagcacccagctagtttctcgtgaacacgggcgccatcctcacaaatcatctacggtaaaggcggtgctgctcttgttaaagtcatttgttgggacaggtgtgcttttcctaccaaaggctttccataacggtggttggggatttagcgccctttgtctactctcgtgtgccctcatttcttatggatgtttcgtatcattgattaccaccaaggacaaagtaggcgtagatgggtacggtgacatgggtcgtatactatatgggcccaaaatgaaatttgccattctttcgtctatcgccttgtcacaaatcgggttttctgctgcatacactgttttcactgcaactaatttgcaggtcttttctgaaaatttcttccatttgaaaccgggcagcatcagtctagccacctatatctttgcacaagtactcatctttgtcccactatctttgacaagaaacatagccaagttaagtgggaccgcgttaatagcagatctatttattctactgggattggtttatgtttacgtttactccatttattatattgctgttaatggtgtcgcatccgatacaatgcttatgttcaataaagcggactggtcgttgttcatcggtaccgccatattcacctttgaaggtataggcctacttatccccattcaggagtcaatgaaacacccgaagcatttccggccatcgttgtccgcggtgatgtgtatcgtggcagtgattttcatatcatgtggtctcttatgctatgccgcttttggatctgacgtgaaaactgttgttttattgaattttccgcaggacacttcctatactctcactgttcaattactgtatgcattagccattttgttatccacgccgttgcagctatttcccgcgatacgtattttggaaaactggacttttccctcaaatgcatctggtaaatacaacccgaaagtcaaatggttgaaaaactatttccgttgcgctattgtcgtcctgacatctatcctcgcttgggtaggcgccaacgatttggacaaatttgtatcactggtaggctccttcgcgtgtatcccattgatctacatatacccgccattgttgcactataaggcgtccatcttatctggaacctcgagagccaggcttcttttagatttaatcgtcatagtatttggagttgctgtcatggcctacacgtcatggcagacgattaaaatgtggagccagtaatccgccatttttgaccgagtacatcatgtacagacacatatatatatatttatatatgactcgttatctatatgcatctggaa

SEQ ID NO: 1923 - DNA, 1163 bp, Saccharomyces cerevisiae
ggtacgtatataagaatgcagtttgctcgcaatgcccgcttgtgttaagtactcttaccttttccctcaatactaacgttttgaagcagccaaactaacaatagtataacgtatataggttaaaataatattccaagtcaaaaacatgttttccagattatccagatctcactcaaaagcattaccgattgctctaggtacagttgctatagcagctgctaccgcattctattttgcaaaccgtaaccaacattcctttgtcttcaatgaatctaataaagtgttcaaaggtgatgacaaatggatcgacttgccaatatctaaaatagaggaggaatcccacgacaccagaaggtttacttttaagctgcctaccgaagactcagaaatggggttggtcctagcatctgctctgtttgctaaatttgtcacaccaaagggatccaatgtggtgagaccatacactcctgtgagtgatctttcccagaagggtcacttccagctggtcgtcaagcattatgaaggtggtaaaatgacctcacatttatttggtcttaaaccaaatgacaccgtttctttcaagggtcctattatgaaatggaagtggcaacctaatcagttcaagtcaatcaccttgttaggtgccggtaccggtatcaaccctctgtaccaattagctcatcatatagttgaaaacccaaacgacaagaccaaagttaacttgctatatgggaacaagactcctcaggacattttactaaggaaggaactggatgcgttgaaggaaaagtatcctgacaagttcaatgttacttactttgttgacgacaagcaagatgaccaagactttgatggtgaaattagtttcatctccaaagattttattcaggagcatgttccaggtccaaaggaaagcacacatttgtttgtctgcggtcccccaccatttatgaacgcttactcaggtgagaagaagtcacctaaggaccaaggtgaattgatcggtatcttgaacaatttgggctactccaaggaccaagttttcaaattttaagcatggaggaaagtaattgatattttttttaatttcggatcgttcaaattagtaaatatataaaaaatatatatatattcatgtgtatgactaaaaattctctcaagaa

SEQ ID NO: 1924 - DNA, 866 bp, Saccharomyces cerevisiae
tttaagtgtctgtattgatcaattaattattactttaccactgctgtttattagcataatagcacacgggatcagaatgcttagtaatacacttattattgcctgtttattggtgatagggacaaccatagcgctaatagcagtgcaaaaggcatcctccaagacagggatcaagcaaaaaagttatcaaccatctattatcattgcaggtcctcaaaattctggaaaaacgagcttgcttacgctgctaaccacagattcagtaagaccaactgttgtttctcaagaaccgttatcagcagcggattacgatggttccggcgtcacgttagtggacttcccaggccatgtcaagttgcgttataaactctcagattatttgaaaacaagagccaaatttgttaaagggttgatatttatggtagactcaacagttgatcctaagaaattaacaacaacagctgagttcttggtagacatattatcaattactgaatctagttgcgaaaatggtattgatatcttaattgcatgcaataaaagcgaattgttcactgcaagaccaccatcaaagatcaaggatgctttagaaagcgaaattcaaaaggttattgaaagaaggaaaaaatcgttgaacgaggttgaaagaaaaattaacgaagaagattatgcagagaatacactagacgttttacagtctaccgacgggttcaaatttgcaaatttggaagcatctgtagttgcttttgagggcagtattaataaaagaaaaatttcccaatggcgcgaatggatagatgaaaaactgtaatataattataatttataactagatgaacgatagatagtttaaaaacaagcattta

SEQ ID NO: 1925 - DNA, 468 bp, Saccharomyces cerevisiae
atatcccaaaatggttttagttcaagatttattgcacccaactgcagcttctgaagcaagaaagcacaaattaaagacattagtccaaggtccaagatcgtacttcctagacgttaagtgcccaggttgtttgaacatcactacagttttctcacacgcccaaactgcagttacctgcgaatcctgctcaacaattttgtgcaccccaactggtggtaaggcaaagctttctgagggtacatctttcagaagaaagtaatttcattactagacagatgaaacgaaatttacttcaaaagaagagcattaataaagtgattcaattatggaaccagcagggtaggttttatcatatataatatacactcagttgtcatctttattggctttttagaaacgctgcaacaaactgtactatatatatatcatattcacgtatgtagaatattaaagtattgaatatattaa

SEQ ID NO: 1926 - DNA, 3034 bp, Saccharomyces cerevisiae
aggtacttaaaaacacaggttgcataatatgccaattgttcggtggctattattgaaaagcgcagttagaggttcttctctaataggcaaagctcacccttgtttaaggtctattgctgcacaccctaggtatttatctaatgtgtactcaccaccagcaggcgtcagtagatcactgcgcatcaatgtaatgtggaagcagagtaaattaactcccccaagatttgtgaagatcatgaatagacgccctctgttcacagaaactagtcacgcctgtgcgaagtgccaaaaaacgtcacaattactaaataaaaccccaaatcgtgaaattcttcctgataatgtcgttcctttacactacgatttaaccgtggaacctgatttcaaaacattcaaatttgaaggctcagtcaaaattgagctaaaaattaataatcctgcaattgatacggtaacattgaacaccgtcgataccgacatccattctgcaaaaatcggtgatgtcacatcttccgagattatctctgaagaggagcaacaagtcaccacatttgcgtttcctaaagggaccatgtcttctttcaagggtaatgcatttttggatataaaatttactggtattttaaatgataatatggctggcttttacagagccaaatatgaggacaagttaacaggtgagacaaaatacatggctactactcagatggaacctactgatgctagaagggccttcccatgttttgatgagcctaacttgaaagcctcttttgctattactttagtttcagacccatctttgacacacctatccaatatggacgtcaagaacgaatacgtaaaggatggaaaaaaggtcactttgttcaatacgacccctaaaatgtcaacttaccttgttgcttttattgttgctgaattgaagtacgttgaatccaagaactttcgtattcctgtcagagtttacgccaccccaggtaacgaaaaacatggtcagtttgccgcggatttgactgccaagactttggcattttttgaaaaaacttttggcatccaatatcctctacctaaaatggacaatgttgctgttcacgaattttctgcaggagctatggaaaattgggggttagtcacttatagagtggttgatctactactagacaaagataactctacattagatcgtattcaaagagtggctgaggtagttcaacatgaattagctcaccaatggtttggtaacttagttactatggactggtgggaaggcttatggctaaatgaaggttttgctacttggatgtcatggtattcatgtaatgagtttcaaccagaatggaaagtttgggaacagtatgttactgataccttacaacatgcattaagccttgactctttaaggtcctctcatccgatcgaagtacctgtaaaaaaagctgacgaaattaaccaaatctttgatgccatctcttactcaaagggtgcttctttattaaggatgatttcgaaatggttaggtgaagaaacttttattaaaggtgtatcccaatacctgaataaatttaaatacggtaatgcgaagactgaagacctatgggatgctttagcggacgcctccggtaaagacgttcgttctgtgatgaacatctggactaaaaaagttggtttcccagtcatttcagttagcgaagatggtaacggtaaaataacatttcgccaaaaccgttacttaagcacagctgatgtcaagcccgacgaggacaaaaccatctatcctgtatttttggctttgaagactaaaaatggagttgacagttccgttgtattgagtgaaagaagcaaaactattgaattagaagatcctacctttttcaaagttaacagcgaacaatccggaatttatataacatcctacaccgatgaaagatgggcaaaactgggtcaacaagctgacttattgtctgttgaggaccgtgtcggtctggttgctgatgtcaagacactatctgcttctggctacacttcaactactaattttttgaacttagtctccaaatggaataatgaaaagtcatttgtcgtctgggaccaaataatcaacagcatatcttcaatgaaatctacttggttattcgaaccaaaggaaacccaggatgcgcttgataacttcacgaagcaactaataagcggtatgacacaccacttgggttgggaattcaaatcttctgattcgttctccactcaacgtttgaaagtgaccatgtttggtgctgcttgtgccgcaagggacgcagacgttgaaaaagctgctctaaaaatgtttactgattattgcagcggtaataaggaagccatcccagcattgattaaaccaattgtatttaacactgtggcaagagttggtggtgcagaaaactatgaaaaagtttacaaaatctacttagatccaatctctaacgatgaaaaattagccgcattaagatctttaggcagatttaaagaacctaaattattagaaagaaccttaggatatttgtttgatggcactgtcttaaaccaagacatttatattccaatgcaaggaatgagagctcatcaagaaggtgtagaggctttgtggaattgggttaaaaagaactgggacgaactcgtaaagagactacctcctggtctttcaatgctaggctccgtcgtcacattaggtacctctggctttacatcaatgcaaaaaatagatgagattaagaaattctttgccactaaatccacgaaaggtttcgatcaaagtttggctcaatcactggacactattacttcgaaagcgcagtggggttaacagagaccgtgatgtcgtcaacaagtatttgaaggaaaatggttactattaagaaaaaatctcttttctagccattttgcctttttatatagtcaagtatctatatgtgacaaatacttcttctaagcttggccttctgataggcttagcttgcagtggttgcaaacatacataaatcaacaaaaaagtacggcttaa

SEQ ID NO: 1927 - DNA, 527 bp, Saccharomyces cerevisiae
tgaaaacaattaacgagccatgggtaaaagaaagaagtcaacaagaaagcctaccaagagactggtccaaaaattagatacgaaattcaattgtttattttgtaatcatgaaaaatcagtttcatgcactctggacaaaaaaaatagtataggaactttatcgtgcaagatttgtgggcagtcgttccaaacgcgcataaattcattatcacagcctgttgatgtatatagtgattggtttgacgccgtcgaagaagtcaattctggccgtggaagtgacacagatgatggtgacgaaggttctgatagtgattacgaaagtgattcagagcaagatgctaaaacgcaaaatgatggcgaaatagattctgatgaagaggaggtagactcggacgaggagaggataggccaagttaaaagaggcagaggcgccttggtagatagtgacgatgaataatccggtcctgagaaaaaaccatatttacttaggtcatatatattttatattttaaagcaaccacccgtaa

SEQ ID NO: 1928 - DNA, 1600 bp, Saccharomyces cerevisiae
ctaaatttggcatatttcgccgtcgactgaaatagaagggataaatcatgcatctccaggattatccctactccattcattacaacatgcgccaaatcaagcctatataagattctcgtcatttagcatgctctattgatttgtgtcttgttttgtctaacactgaaactgtaacctaagatttctttagataattattacatttacatcaataagaaatctcataaaacaagtactgtttataagtaaaaatgcaatataaaaagccattagtcgtctccgctttagctgctacatctttagctgcctatgctccaaaggacccgtggtccactttaactccatcagctacttacaagggtggtataacagattactcttcgagtttcggtattgctattgaagccgtggctaccagtgcttcctccgtcgcctcatctaaagcaaagagagccgcctctcagataggtgatggtcaagtacaggctgccactactactgctgctgtttctaagaaatccaccgctgctgctgtttctcaaataactgacggtcaagttcaagctgctaagtctactgccgctgctgtttcccaaataactgacggtcaagttcaagctgctaagtctactgccgctgccgtttctcaaataactgacggtcaagttcaagctgctaagtctactgccgctgccgtttctcaaataactgatggtcaagttcaagctgccaagtctactgctgccgctgcctctcagatttctgacggccaagttcaggccactacctctactaaggctgctgcatcccaaattacagatgggcagatacaagcatctaaaactaccagtggcgctagtcaagtaagtgatggccaagtccaggctactgctgaagtgaaagacgctaacgatccagtcgatgttgtttcctgtaataacaatagtaccttgtcaatgagtttaagcaagggtatcttaaccgataggaagggtagaattggctctatcgttgccaacagacagttccaattcgatggtcctccaccacaagctggtgctatctatgctgctggttggtccatcaccccagaaggtaacttagctcttggtgaccaggatactttttaccaatgtttgtctggtgacttctataacttgtatgataagcacattggttctcagtgccatgaagtttatttgcaagctatagatttaattgactgttgaacgatgcatcgatcaatcggagtcgtcctcctttaacttcacgaattagttgccactctcattccccacacataaacttgttttatggcatccttttcatttagcatgtctttatttccaaacctttcctcgttctttgcattcatttagcgtttgctcgagaaagcatcacgttttcacacattatcgttcgtcgctataataaaaatagttatagaatttactcagatttacatgtcgtacctttttaattgtaaaaaaaaaaattttatgatacataattacctaaatataattcagaatcaaacatacttatagctatttgtatgctattaggtggtcctgctataaaaatatcgtttataatactt

SEQ ID NO: 1929 - DNA, 630 bp, Saccharomyces cerevisiae
gcatagcggatttgtagaacggtgtgtcgtcaaccctttgagatctggataagccatattttctaacatcacaacatgatatttctaaaatctgtcatcaaggtaatcgacaattcaggtgcacaattagcagaatgtattaaagtaataaggaaagggtcccccaagagtcctgcaatggttggagacagaatagtctgtgttatacagaaagcaaagcccttgactcaaaacattacggggacagccaacaccaaccgtgtcaaaaaaggtgatatttgtcacgcaattgtcgtaaggtctaaacagcgtaacatgtgcagaaaggatggctccaccgttgcattcggagatactgcttgcgttttgattaataaaaataccggtgaacctctggggacaagaattatggctaatgatggttgtgtagatagaacactgaaagacaagggatacaataagatatgctctttggcaagtagggtcatataagaataaaagtacccccattttccattcattaacgttataatcaagggactgtaaaccagcaaaagagctttgtcgtcattatttaattaaccacctgtatatattgcttaaattttaatgtatgactttaactttgaa

SEQ ID NO: 1930 - DNA, 1400 bp, Saccharomyces cerevisiae
aacggtatatagagaatggctaaaggtttcaagttgaaggagttgctttcgcatcaaaaggaaattgaaaaagctgaaaagcttgaaaatgacctaaagaaaaagaaatcccaagaattgaagaaagaagaaccaactatcgttacagcttctaatttgaaaaagcttgagaagaaagaaaagaaggccgatgttaagaaggaagttgctgcagatactgaagaatatcaaagccaagccctttctaaaaaagagaaaagaaagttgaaaaaagaattgaaaaaaatgcaagaacaggacgctaccgaagctcaaaagcatatgtctggcgatgaagatgaatctggcgacgatagagaggaagaagaagaagaagaagaagaagaagaaggaagactggatcttgagaaattggccaaaagtgactctgagtctgaagatgattctgagtctgaaaatgattctgaagaggatgaggatgtcgttgctaaagaagaaagcgaggaaaaggaagagcaagaagaagaacaagacgttccattgtcagacgtggaatttgattctgatgcagatgtcgttccacatcataaactaaccgtcaacaacacaaaagcgatgaaacatgccttagaaagggtacaattgccatggaaaaaacattcattccaagagcaccaaagcgttacatcagaaactaatacggatgaacatattaaggacatatacgatgatactgaaagggaattagcattttacaagcaatcactggacgctgttttagtagcacgtgacgaattgaaacgactaaaagtacccttcaaaagaccattggattattttgctgaaatggtgaaaagtgatgaacatatggacaagattaagggtaagttgattgaagaagccagtgacaagaaggcacgtgaagaagctagaagacaaaggcaattgaagaaatttggtaagcaagtccaaaacgctaccttacagaaacgtcaattggagaaaagagaaacactggaaaagatcaaatctttgaagaacaaaagaaagcacaacgagatcgatcactccgagttcaacgtcggtgtagaggaagaagttgaaggaaaaaggttcgatagaggcaggcctaacggaaagagagccgcaaaaaacgctaagtatggccaaggaggcatgaagagattcaagaggaagaatgatgctacctcttctgctgatgtcagcggcttttcttccagaaaaatgaaggggaagaccaatagaccaggaaagagtagacgtgccagaagattctaagccgttatgtcggcaagaacactgtatatatccagaacgtaaagtatatacaactatctatcatctctttgtacactagtataaaatagaattaaatccaa

SEQ ID NO: 1931 - DNA, 1633 bp, Saccharomyces cerevisiae
tcctaatattctcacaagcatcacagtgaagaaacgcaagaaaatggaaaaaattcccaggtggttgttgttttctcttatatcgtcggtgctgtgcatacttggggccctgtgtgtgccgttgttatcggttgccttcgatagcaagcgcaatagccaatctaagttggtcaactatggtctttctctaagtgccggatctatgatcactacttcactatacatgctattgcctcggatcgaaaaatcaaaccggttcaaggtttttcctggattgcttttgggtatttgcctcagttttttcttaaactacctagtccacgctttcgccagcgaatcgttggtacactgtgctgatagcggtgaccatgctacaggttcacatatacactccaaatcacattcgcattcgcactcacactcacatgcggattcgcattcgaattttagcaacgatcatgatttagaaaatgctccctctgagcatggttatgcaacatcttcttccagtgtttctgaaaatgacccgttgattacaaaggatagcgatagaccccaaatgaaaaagaaaatgtccctaattgacttattaaccagaaggaaatcagaaggcgagtgttgtgacctaaacaagtgcactccgctcttgcaatcagagcagccagaatatattgcatgtgtcccaccagtgataaagtcttctcaaagtgaaagaaacgtgccacatggatgcgagggatcagaagataatggacaatccgatgacaaggatcatcgtggccttgtatgcgtggaaaataatatcggttacgatcttgaaaacctatcgttgtaccgtaagaattttctttcgagccgccatcatcattcctctgaatcgcccgaaaattatggttccaaccagttgtcgcactctttttcgtcacctttgggaaatgatgtaactgagaatccggccgcattggcagacacacaataccatcccgaaaatggttcattatacccccaccatcatcacttagagacccctttttccaaattactgtctattggtatgcaaacttgtctagtccttgcattacacaaatttcccgaagggtttattattttttacactaacaggtcagattcgtcaaagtccttgggattttccatttttttaagtttgacgatccataattttgtcgaaggatttgcaatgacgttaccattctacactgttttcgaatctaaatgggttgccattttgattactgccgttctcggtggtggatctcaaccattaggtgcattgataggttatttcatctttaaaggtagtactccaagggatcacgaacccaacatggattttttactgagcgttactgcagggttcctattagtaattggtttacaaatgttccaaactggtatcggatttagcgatggacatcatcatcatcaaggagaaggtgatgaagaaatgaaacagtcccatagctcaggcacaacttgcttgaaatggtgctgcactggcgttttgctaattctagcgagtgcccttttcacttgataaattaaaactacgtatattctttctatataagtcttttcccattaaataacggtgtataatcacgatcatatatca

SEQ ID NO: 1932 - DNA, 691 bp, Saccharomyces cerevisiae
cctcaagaactactaatagattaaaatggctagatacggtgctacttccactaaccctgctaaatccgcttctgctcgtggttcctacttgcgtgtttctttcaagaacaccagagaaactgctcaagctattaacggttgggaattgaccaaggctcaaaaatacttggaacaagttttggaccaccaaagagctattcctttcagaagatttaactcttccatcggtagaactgctcaaggtaaggaatttggtgtcaccaaggctagatggccagctaagtctgttaagttcgttcaaggtttgttgcaaaacgccgctgccaacgctgaagctaaaggtttggatgctactaaattgtacgtttctcatatccaagttaaccaagctccaaagcaaagaagaagaacttacagagctcacggtagaatcaacaagtacgaatcttctccatcccacattgaattagttgtcactgaaaaggaagaagctgtcgccaaggctgctgaaaagaaggtcgttagattgacttctagacaaagaggtagaatcgccgcccaaaagcgtattgctgcttaaatagaagatgaaaaataatgataatataattctctgttaattttaatcttttatctatgtaattttatctccccgtcatatcacataactctaaaataagttttttattaa

SEQ ID NO: 1933 - DNA, 1553 bp, Saccharomyces cerevisiae
taaactgctacttcaactctttactcgaaaagttgaaacaagtgtctattccgcacatctctgcaataaccgaaccttcacgatttagctacaatcccacatctgcagattctaccgtttaatagtcttaatttgaagagaaataaaaatgcgtaagtgtaaaatttttgttggtaactctcacccagagttgggtaatatggtttgccaaagattaggtatcgaaccagctccatgtacattaaaaaaatttgcaaatggtgaaacgtcagttcaaatcggtgtatctgttcgtgacgaagatgtgtatgtcattcaatctggttctccatccataaatgatgacattatggaactgttgattttagtttctgcctgtaggggcggatctgctaggaaaattacagcagtcattcctcaatttccttactctaaacaatgtaaaatgaagagacacagaggcgctattactgcaaggatgttggccaatctgttggtcatggctggcgctgatcatgttgtgtctatggaccttcatgcttctcaaatgcaggggtttttcaccaaaccagtcgataacctatacgggggccctagtttagcgaaatggattagagaaaatgttgaagactatgaagatgcagtagttgtctctaagaatccaggtggtactaaaagagttacagccctggcggattctttgaagatcaactttgctatgatccatactgatcgtcgtcgttctaaggatctgtattctcaaaacaaggatttgcaacaactaaagttgagaaagcaatcaatgttgaggaaaaatagaccgatcatcagacaaggtgaccatccaaatgaggaggaaaacattattttaagtaacggtattcaaactgctaggatccgtaacggccacgttatcggtgacgatgaggcagacgatgatgaagacgctatcttagaatctgacagcgaattgcattctattgatggcttagactcgcatggcttgggcggtacatatgatgctgtcgactccgaagacgaagaggaaatcccagttctctatagggaacaactgattacattggtcggaaacgtccgtggtcgctctgccatcattctagatgatatgattgatagacctgggtcatttattagcgctgctgaacatttggtgcaaaattgtggtgccaaaaaggtttatgttgttgctactcacggtatattcactggagactgtttggaagaacttgaaaagtccgatgccattgacacaattgtggtcacaaatacatatccgatttctggcgaacgcatagctgggtccaagaaattggttactatcgatgtttctccaattttcgcagaatgtatccgtcgtgatcattatggtgagagtatttccgttttatttgactctttggcagctctgtaaacagaagagagtgtgcgcaatattttagttcttaaatatgacatagattatcaaaaaactttgtatgtttgccagatttcagtgaatctgcaagagtataaattataggaatttgggtgaa

SEQ ID NO: 1934 - DNA, 6564 bp, Saccharomyces cerevisiae
gattgataaggaaaaagaaccaagggaaaaatataaaaaagtacattgggccttttcatacttgttatcacttacattacaaagaagaacaaacaacttttttaaacgaattttctttcttcctttttcaatttattaattctttttttccatacaattcaaggtcaaatatattcttatatgctctttgaatatttctgaaaaatatataaagaaaagaaactacaagaacatcatccggaaaatcagattatagactaggattccgctctttttagtatatttattcgccacacctaactgctctattattcgctcattatggacgcttactccacaagaccattaaccctatctcacggttctttagagcacgtgcttctggtaccaaccgcttcatttttcattgcttcgcaattacaagaacaatttaataaaattttgcccgaacccactgaagggtttgctgcagatgacgagcctaccacacctgctgaactagtggggaaattccttggctacgtatcttctctagtcgaaccttccaaggtcggtcaattcgatcaggtcttgaacctttgcttaacagaatttgaaaactgttatttagaaggcaatgacattcacgccttggctgctaaactattacaggaaaacgacacaactttagtgaagactaaagaactaattaaaaattatattaccgccagaataatggctaagagaccatttgacaaaaaatccaactctgctctttttagggccgtcggcgagggtaacgcacaattggtagccattttcggtggtcaaggtaacaccgacgactactttgaagaattgcgtgatctatatcaaacttatcatgtcttagtgggagatttaatcaagttctccgctgaaactttaagtgaactgattagaactactttagatgctgaaaaagtctttactcaaggtttaaacatattggaatggttggagaacccttcaaataccccagacaaggactatttactttccattccaatttcatgccccttaattggtgtcattcaattggctcactacgtagttactgccaagcttttgggtttcactccaggtgagttaagatcttacttaaaaggtgctacaggtcactctcaaggtttggttactgctgtcgccatagctgagacggattcctgggaatccttcttcgtctccgtaagaaaagcaattactgtattattcttcatcggtgttcgttgttacgaagcatacccaaacacttccctaccaccatccatcttggaagattccttggaaaacaatgaaggtgttccatctccaatgttgtccatttccaatctaactcaagaacaagttcaagactatgtaaataagactaactctcatttgccagctggtaaacaagttgaaatttctctagtcaatggtgcgaagaatctagtcgtatcgggcccaccacaatcattatatggtttaaacttgactttaagaaaggccaaggccccatctggactggatcaatcaagaatcccattcagcgaaagaaaattgaagttctccaataggttcttacctgttgcatcaccattccattcccatctattggttccagcttcagatttgattaacaaagacttagtcaaaaacaatgtcagctttaacgctaaagatattcaaatccccgtttacgacacttttgatggttcagatctaagagtcctttcaggttccatttccgagagaatcgtcgactgcatcattagattacctgtcaaatgggaaactactacacaattcaaagccacccacatattagactttggtccaggtggagcttccggtttaggtgttttaacccatcgtaataaagatggtactggtgttcgtgttatcgttgccggtactctcgacattaacccagatgatgattacggattcaagcaagaaatctttgatgttactagtaatggtttgaagaaaaatccaaactggttggaagaataccatccaaaattaattaagaacaaatcaggcaaaatttttgtcgaaacaaaattttctaaattaatcggtagaccacctttattggttcctggtatgacaccatgtactgtttctccagatttcgtagctgctaccacaaatgctggttataccattgagttggccggtggtggttacttttccgcagcaggtatgaccgccgctattgattctgtggtttctcagatagaaaagggtagtaccttcggtatcaacttgatctacgtcaatccatttatgttacaatggggtattccattaatcaaggaactaagaagcaaaggttatccaattcaattcttgaccattggtgctggtgtcccatcattggaagttgctagtgaatacatagagacattaggtttgaagtacttgggtttgaaaccaggttccattgatgctatttcgcaagttataaacattgctaaagcacatccaaacttcccaatagctttacaatggaccggtggtagaggtggtggtcatcattctttcgaagatgcccacactccaatgttacaaatgtactccaagattagaagacatccaaacattatgttgatattcggttctggtttcggttctgctgatgacacttacccatacttaaccggtgaatggtccacaaaattcgattatccaccaatgccattcgatggtttcctatttggttcgagggtcatgattgctaaggaagttaaaacttctcctgatgctaagaagtgtattgctgcttgtactggtgttcctgatgataaatgggaacaaacctacaagaagccaactggtggtattgtcactgttcgctctgaaatgggtgaaccaattcacaaaattgccactcgtggtgttatgctatggaaggaattcgacgaaaccatcttcaacttaccaaagaataagttggtaccaactttggaagcaaagagagattacattatctcaagattgaacgccgatttccaaaaaccatggtttgctaccgtcaacggtcaagcccgtgacctagccacaatgacatacgaagaagttgcaaagagattggtggaattaatgttcatcagatctaccaactcttggtttgatgtcacatggagaacctttactggtgatttcctacgtcgtgtcgaagaacgtttcactaaaagtaagacattgtctttaatccaatcctattctctactagacaagcctgatgaagctattgaaaaagtatttaatgcttatcctgccgctagggaacagttcttgaatgcgcaagatattgatcactttttgagcatgtgtcaaaatccaatgcaaaaaccagtgccttttgttccagttttggatcgtagattcgagatttttttcaaaaaagattcgttatggcaatctgagcacttggaagccgtcgtcgaccaagacgttcaaagaacatgtatcctacatggacctgttgcagcacaattcactaaagtcatcgatgaaccaattaagagcattatggatggtattcacgatggtcacatcaaaaagttactacatcaatattacggtgacgatgagtcaaagattccagcagttgagtactttggtggtgaaagccctgtagacgtacaaagtcaagttgattcttcctctgtatctgaagactcagctgtttttaaggcaacatcctctactgatgaagaaagctggtttaaggctttggcgggatccgaaattaactggagacatgcaagtttcttatgttcctttatcactcaagataaaatgtttgtttctaacccaattagaaaagttttcaagccaagccaaggaatggttgttgagatttccaacggcaatacttcttcaaagactgttgtcactctttcagaacctgttcaaggtgaattgaaaccaactgttattttgaagttgttgaaggagaacataatccaaatggaaatgattgagaacagaactatggatggtaagcccgtcagcttgccattgttgtacaacttcaacccagataatggttttgctccaatctctgaagttatggaggacagaaaccaaagaattaaggaaatgtactggaaattatggattgatgagcctttcaatttggactttgacccaagagatgtcattaagggcaaagatttcgagatcaccgctaaagaagtttatgactttacacacgctgttggaaacaattgtgaagacttcgtttctagacctgatagaacgatgttggccccaatggactttgctattgttgtcggatggagagccatcatcaaggccattttccctaatacggtcgatggtgacttattgaagttggttcatttgtctaacggctacaagatgattcctggcgctaagccactgcaagttggtgatgttgtttcaactactgctgttattgaatctgtcgtcaaccaacctacaggaaagattgtcgatgtggtaggtacattatcgagaaatggcaagcctgtcatggaagtcacctcctcattcttctacagaggcaactatactgactttgaaaacactttccaaaagactgttgaacctgtttatcaaatgcacatcaaaacttctaaagatatagctgtcttgcgctctaaggagtggttccaattggacgatgaagacttcgatctgttaaacaaaactttgactttcgaaactgaaactgaagttactttcaagaatgctaacatcttctcttcagtgaaatgttttggcccaattaaagttgaattgccaaccaaagaaaccgtggagatcggtattgtcgattacgaagccggtgcctctcacggtaaccctgttgttgatttcttgaagagaaacggttccacattggaacaaaaggtcaatctagaaaatcctattccaattgcagtacttgattcgtacactccaagtaccaacgaaccatacgctagagtttctggtgatttgaatccaattcacgtttcacgtcattttgcctcttacgcaaacttgccaggtactatcacgcacggtatgttttcttctgcttccgtccgtgctttgattgaaaactgggctgctgacagtgtttcatccagggtacgtggctacacttgtcaatttgttgacatggttttgcctaacactgctttgaaaacatcgattcaacatgttggtatgatcaatggtagaaaattgataaagtttgaaactagaaatgaagatgacgttgtagttttgactggtgaagccgaaattgaacaacctgttactaccttcgttttcactggtcaaggttcacaagaacaaggtatgggtatggacttatacaaaacttctaaagctgctcaagatgtttggaatagagctgacaaccatttcaaggacacttatggtttctctatcttagacattgtcattaacaacccagttaacttaacaattcacttcggtggtgaaaagggtaagaggatcagagaaaactattctgctatgatctttgagactatcgtggatggaaaattgaagactgaaaaaattttcaaggaaattaatgagcacagtacttcttacacatttagatctgaaaaaggtttattgtctgctactcaatttacacaaccagctttaactttgatggaaaaagctgctttcgaagacttgaaatctaaaggtttgatcccagccgatgctacttttgctggtcactctttaggtgagtatgctgctttggcctctttggctgatgttatgtctatcgaatctttagttgaagttgtgttctacagaggtatgactatgcaagttgctgttccaagagatgagttgggcagatccaactatggtatgattgccattaacccaggtagagtcgctgcatcattctctcaagaagctttgcaatatgttgttgagagagttggtaagagaaccggctggttggttgaaatcgtcaactacaacgttgaaaaccaacaatatgttgcagctggtgatctaagagctttagacaccgttaccaatgttctaaacttcatcaaattacaaaaaattgatattattgaactacaaaagtccttatctttggaagaagttgaaggtcatttgtttgagatcattgacgaagcttccaagaaatctgctgtcaagcctcgcccacttaaattggagagaggttttgcttgtatcccattagttggtatttctgttcctttccattccacctacttgatgaatggtgttaaaccattcaagagtttcttgaagaagaatatcataaaagaaaatgtgaaggttgctagattggccggaaagtacattccaaacttgactgcaaaaccattccaggttactaaggaatatttccaggacgtttatgatttgactggctccgaacctatcaaggaaatcatcgacaactgggaaaagtatgaacaatcctaatttcttaagtgattatataaccgtaagaaatatttaactttgaaactcctgtatactaatgtttaatatagctggcttatgatttta

SEQ ID NO: 1935 - DNA, 1031 bp, Saccharomyces cerevisiae
atgatgaaaaaaaaaccaaagtgccaaattgcaaggaccaaaccatcggtcgaaaacgtcataccatataaccaattcaagaagacgcagccgcgattcaacggcaacttttctgcactgaataatgaagaatacataatactctttggcggaggtcgggacctgatactaggctccctgacaccttgttcgagctctcatttgtccaatcaagccaacccacaagacaccagtgagtatggcacagacctgtttatactcaacagctgcattatcatttggttcaatggcttgggatatgggctggaaattccctacagcagcgttttgtaccatgcatcaagacggctaccagatggtagggaagggcttcaattagaaattttgctgactttggaaagagacgaagtgttggacatgctctaccaaagcctcgcgccacaggcctgcgaattcgacggcgaagaagcacatgccttcaccgtgcgcagcgtggaattgactatcaggcccaaatattcaatatacgatcgccattataacaacgaaatcgaaacccttttcaccttcgaaaacttcggcgtgaacaggggcgatgacctggtaaacaattgtaacgaagcactagccgtatgcatggacctgcacggtgaggacgtacaagatcaagaccaggaacaataccaagatccaagcatggcgtttgagggtgcgcaagatctcaacgccacgtattctgggcttggagacacccttcacgggccgcccgtgtatcagaacgacgggctggcagacgatctggatggcgacctcgttatggacaacgtggtctctaggggtggtccagaagcaagtatgtctatggagttctacgcaaatcaaaatcttgctggcagaaagaactccagagacaatgaatgaacaacatctattatgggaacatcccgctgtactatgcggtctcgtcctctacgaatatggctatttgccttcgtatatacctttctataccaagtaatgaatgtcttgag

SEQ ID NO: 1936 - DNA, 1625 bp, Saccharomyces cerevisiae
ttattgcactgaaatagcggaacctgcttctaataagcttaaaattcaatcataatagtgtagttaatagaaaggacagaagaacttttcgttccttggtttatcatccaggtttcagcacggcttttgtttcaagtttaagtaggtaagattttttgattgttctacaactttttcatagtaatcaaaacctttgaatttcaaacttactatgtctagtactcaagtaggaaatgctctatctagttccactactactttagtggacttgtctaattctacggttacccaaaagaagcaatattataaagatggcgagacgctgcacaatcttttgcttgaactaaagaataaccaagatttggaacttttaccgcatgaacaagcgcatcctaaaatatttcaagcgctcaaggctcgtattggtagaattaataatgaaacgtgcgaccccggtgaggagaactcgtttttcatatgcgatttgggagaagtcaagagattattcaacaactgggtgaaggagcttcctagaattaagccattttatgccgtcaaatgtaatcctgataccaaggttttgtcattattagcagagttgggcgttaatttcgattgcgcttccaaagtggaaattgacagagtattatcgatgaacatctcgccggatagaattgtttacgctaatccttgtaaagtagcatctttcattagatatgcagcttcaaaaaatgtaatgaagtctacttttgacaatgtagaagaattgcataaaatcaaaaagtttcatcctgagtctcagttgttattaagaatcgctaccgatgactctaccgctcaatgtcgactttccaccaaatatggctgtgaaatggaaaacgtagacgttttattaaaggctataaaggaactaggtttaaacctggctggtgtttctttccacgtcggttcaggcgcttctgattttacaagcttatacaaagccgttagagatgcaagaacggtatttgacaaagctgctaacgaatacgggttgccccctttgaagattttggatgtaggtggtggatttcaatttgaatccttcaaagaatcaactgctgttttgcgtctagcgctagaggaatttttccctgtaggttgtggtgttgatataattgcagagcctggcagatactttgtagctacagcgttcactttggcatctcatgtgattgcgaagagaaaactgtctgagaatgaagcaatgatttacactaacgatggtgtatacgggaacatgaattgtattttattcgatcatcaagagccccatccaagaaccctttatcataatttggaatttcattacgacgattttgaatccactactgcggtcctcgactctatcaacaaaacaagatctgagtatccatataaagtttccatctggggacccacatgtgatggtttggattgtattgccaaagagtattacatgaagcatgatgttatagtcggtgattggttttattttcctgccctgggtgcctacacatcatcggcggctactcaattcaacggctttgagcagactgcggatatagtatacatagactctgaactcgattgaaggatatatttaa

SEQ ID NO: 1937 - DNA, 731 bp, Saccharomyces cerevisiae
tcagaatccatagaagcatttttatttcttaaaatgggtgctgctccttccaaaattgtggatggtcttttagaagatacaaattttgatagagatgaaattgaaaggttaaggaagagattcatgaaattagatagagatagctcagggtctattgataaaaatgaatttatgagcattcctggcgtttcgtcaaaccctcttgctggacgtataatggaggttttcgatgctgataatagtggggacgtggattttcaagagttcatcacaggattatccattttcagtgggcgtgggtccaaggacgaaaagttaagattcgccttcaaaatctacgacattgacaaggacggtttcatatccaatggtgagttgttcatcgtgttgaagattatggtaggttctaatctggacgatgaacagctgcaacagatagtagataggacgatagtggaaaacgatagcgacggcgacggacgtttaagtttcgaggagtttaagaatgctatcgaaaccacagaagtggccaagagtctgacattgcaatacgatgtgtaagactaggggacacttcattcatttatggtatgccaatatttttaagaaaagaagaataatacgcgatattgttttttaaggaaggaacgcacactcgcccagttagagtgctgatgatatatacatatatatatgtatatgtaacaaacaataagaaagcaatgatacaa

SEQ ID NO: 1938 - DNA, 1708 bp, Saccharomyces cerevisiae
gatcgtgcaaaggttgaaaaatggaagttgcaccggccttatcgactactcagtcggacgtggcgtttcagaaggtggagacacatgaaattgacaggtcttcatacttggggccatgttataatagcgatgagcttatgcaacttatctcggcttattacaatgtcgagcctctcgtgggttatctggaacagcacccggagtaccaaaacgtgaccttgcagtttcctgacgatttaatcaaggactcctcgttgatagtaaggctgctgcaatcgaaatttccccatgggaagataaagttttgggttttagctgacacagcgtacagtgcatgctgtgtagacgaggtcgctgctgaacacgtacatgcagaagtcgtggtacattttggtgacgcatgtttgaacgccatccaaaacttgcccgtggtttactcattcggaactccatttttggatttggcactggtggtggagaactttcagagggcattcccagacttatcctccaaaatttgtttgatggcaaacgcacccttctctaagcatttgtcacagctgtacaatattttgaagggcgacctgcactacacaaatatcatatattcccaagtgaacacctctgcggtagaagaaaaattcgtaaccatacttgacacctttcacgttcccgaagacgtagaccaggtgggtgtgttcgaaaaaaatagcgtgctgtttggtcagcacgacaaagcagacaacatctcgcccgaggactatcatcttttccatttgaccaccccacaggatccgagattactgtatttgtctactgtgtttcaatctgttcatattttcgatccggctttacctggcatggtaacggggccatttccctctctaatgaggcgttacaagtacatgcatgtggcaagaacagcgggatgtataggtattctggtcaacacgctgtcgctacgtaatacaagagaaactatcaacgagctggtcaagcttatcaaaactcgtgagaaaaaacactatttatttgttgtcggaaagccaaatgtggccaagctagcaaactttgaagatattgatatttggtgcattctcggttgtagccaaagcggtatcatcgttgatcaattcaacgagttttacaagcccattattacaccttatgaattaaacttggccttgagcgaagaggtcacatggaccgggaaatgggttgtggacttcagagacgccattgatgaaatcgagcagaatttgggcggacaagataccatctctgccagcacaacttccgatgaaccggagtttgatgtagttaggggaagatatactagcacatcaagaccactgcgagcgctaacgcacctggagttagaggcggccgacgacgacgattccaaacaactgactacaagacataccgcctcaggtgccgtcattaaaggtactgtatccacttcagcatcagcactgcagaatcgttcgtggaaaggtctaggaagcgatttcgactctactgaggttgataatactggagcggatatcgaagaaggtatttccggtgtcgcacgtggttatggatttgatcgcgaagacgctatgaaaaaggaaaacaaatgactcttataatttgtttccctcgacttctctatttaaatccaagattttaactaataaactatttaataataaaacaattaact

SEQ ID NO: 1939 - DNA, 1364 bp, Saccharomyces cerevisiae
aagagtgtatattatcagtaaaatgcttcgcaacttagtcgtcaggaatgcgtgcagaaacaggccgtcaattcaagtggcaagggggttatgccgacaccaaacaagacgtctcatggcgtcctcccctcagttcggtaggaactccaatcaggaaaaaacagcgggctttataatggggattctttctatggctggtgctttatattttattgctcctaataggaagcctcttttcgcctcaaggaaggtagaatccgataaaaccgcagaggaagagctttccagtggtggtgagcaatcaccagaaaatgaagatgacaacaacagcaaaagcgatgaaaatggagatgacaacgacagcaaaaacgatgaaactgaagctggccctcaattagggggtgataaaattggtgcttcaaaagtagctgaagatggtgaattggttgttctagcagaagaagacaacaagtcttccgaagataaagatactgatgaatcaaaggtatcaaccaaagatgatgagcaatccaatgaagacaatgccaccgctaacaatcaaaaggatgaaaacataagttctgagaactcggaagaaaatactagtgacaaaacactagacaacaatgctggatcttctgaaaaaaaagatccagaacattcagatgatgaaaaatcgcaacagggacaatctgatgacaagacaactactgaagataataatggagaagaagaatcctcaaaaaaaactgtaagtgactcggaaaattcagctaagcaatctgaatctagcgatgaagagaaagaagaactaagaaaacaagaggaaaagcaaatgggtcctactgaagaagaggttcaacacgaaggtgcttataacccagacactggtgagataaattgggactgtccttgcttgggaggtatggcccatggaccctgtggtgaagagttcaaatctgcattttcttgcttcgtctattctgaagctgaaccaaaaggtatcgactgtgttgaaaagtttcaacatatgcaagactgtttcagaaaataccccgagcattatgcagaacaactaaaggaaacatctgatgatgaggaacctcaagacaaagtaaaggtcaacacaatagaatcagcgccaaatgtttcaagcgcaaaggaaaatgctgcgaaaaaagcagagcaatcagatgtgaaaaaagaaccattgaatgaggaatccaaaccttaaaatctcctgaaaatctcccgaacgtaaaaagtataaaagtataaaggatgatacatgtaaatacagtaatattatcttagtttaatgactacatatggtataatatgtgaaatatacatgaattaatgca

SEQ ID NO: 1940 - DNA, 3536 bp, Saccharomyces cerevisiae
gaacaagtgtttccagtcaaatcgaggaatgctagaacggattcagcagctggtaaatgcagtgaacgatccacgctcagatgtggccactaagagacaagccatcgagctgctaaatgggattaaatcatcagagaatgcattggaaatctttatatcattggtcatcaacgagaattcaaatgatttgttgaagttttacggactgtccacattgatagaattgatgacggagggcgtgaacgctaatccaaatggtttgaatctggtaaagtttgaaataaccaaatggctcaaatttcaagttttgggcaataagcaaactaagctgcctgactttttaatgaataagatttctgaagtgctgactactttgtttatgttaatgtacagtgattgtaatggaaaccagtggaacagtttttttgacgatctgatgagtctattccaagtggattcggctatttccaatacgagcccgtctaccgatggtaacattcttctaggtcttgaattttttaacaagctctgtttgatgattaattcggagattgctgaccaaagctttattaggtctaaggaatctcagttaaaaaataacaatataaaagattggatgcgtgataacgatatcatgaaattgagtaatgtgtggtttcagtgtttaaaactggacgaacaaattgtgtcacaatgtcccggattgatcaattctaccttggattgtattgggagttttatctcatggatcgatattaatttaattattgatgcaaataattattatctgcaattaatctataaatttttaaatcttaaagaaaccaaaatttcatgttataattgcatactggccatcatctctaaaaaaatgaaaccaatggacaaactggcttttctgaatatgatcaatttgaccaacgaattgacttactatcatcaagccatatcaatgaatccccaaattattacatttgataatttagaagtctgggaaagtttgaccaagttgattacttcctttggcatagaatttactatcattattgaacaagtcaacgatgatcaaaaattggatacattatacaaacaatcggtcatttcaaatgttgattccatattattggagaaaataataccaatacttttggaatttatgaataatgagtttgattcaataacagcaaaaaccttcccattctggtcaaattatctggctttcttgaaaaaatataaagcatcttcaccaaattttgtaccattgcataaggattttctagataatttccaacaaatttgctttaaaagaatgaagttttcagacgacgaggtcacacaggatgattttgaggaattcaacgaaaccgtaagatttaaattaaaaaatttccaggagatcatcgtggtaattgacccaagtctgtttttaaataacatttctcaagaaatttcagcaaacctaatgaattgtaaaaacgaaagctggcaaattttcgagctaactatttatcaaatcttcaatttaagtgaatgtaccaagaacaactatttcggtttgaacaagaatgaaattatgacctcacaaccttcgctaactttagtacgatttttaaatgaattgttaatgatgaaggatttcttattagccattgataacgaacaaatccaaatactattcatggaattaattgtgaaaaactacaatttcatattttcaactagtgctaacacagcaaatgctactgatgatgatgaaaagtatctattaatattgaatattttcatgagctcatttgctatgttcaataaaagagaaaacgtcagactaaggtcatggtatttatttacaagattcttgaagttgacaagaatcaatttgaaaaaaatcctctttgccaacaaaaatttggttaatgaaataactaataagataagtcctctacttcacataaaagtaacatctatcaacgcccaagggacggatgacaatgatacaatttttgataatcagttgtacatatttgagggtattgggtttataatcacattgaataatagcagtcaggagctcactgctgccactgccaacacccccatcgattacgatatattggaccagatattaactccgctatttacacaattagagggttgtattacccaaggagcttcgccagttgtgattctggaatgtcatcacattcttatggctattggtactttagcgagaggtttgcacattggtctcgtccctgagaatcaggtcaacaatatggttgtcaacaaaaaattaatcaatgactctttaatccataaattctctaatatagctgaggttatattagtaacattctcttttttcaataagttcgaaaatatccgcgatgcatctaggtttacctttgccaggttaattccaattttaagtaataaaattttaccatttatcaataaattgattgaattgatcttatcgtccacagatttaaaatcatgggagatgattgattttcttgggttcttatctcaactgattcatatgtttcacacggacacagactgttatcagctgtttaaccagttacttactccgcttatcaacaaagtccattctattatcgaagagattgatgaacaacacgaccaacaatcaagcagtaacaaacctatagacactgcagtcacagccacctccgtaaataagaatatcgtggtcaccgattcgtatagagataaaatactattgaaaaaggcttactgcacatttttacagtcatttactaataattccgtcacttcgatactattgtcagatataaacagagcaatcctgccggtcatattaaacgatttggtcacctatacgccgcaagagatccaggaaacatcaatgatgaaagtgtcactcaatgtattgtgcaattttatcaaatgttttgggaatgggacctgcttggataatgacgacatcaataaagatcccaaccttaaaatagatggtctcaacgaatacttcatcatgaaatgtgtcccaataatctttgaaattccgttcaatccaatatacaagttcaatatcaaagaagggaatttcaaaacaatggcatatgatttggcaagattactgagggagctatttatcgtcagcagcaaccccaccacaaatgagaatgaatgtgtaaaatatttaactcagatctaccttccacaaatccaattaccacaggaattgacgattcagttggttaatatgttaaccacaatgggtcaaaagcaattcgaaaaatggtttgtagataatttcatttctgttttaaagcaaggtcaatagctttcaggcgcagaaaacctgaaaataaaaaaaaaatgcaaaacgagagtaaaagttgtaattatatttatactaatatttaaattggtaatatgtaattagacttatcattcactttggtttagcagctagtcatgtaatggcactaaaagtgcttctttatctattatttatacgtgacataccattacttctatgtattacg

SEQ ID NO: 1941 - DNA, 837 bp, Saccharomyces cerevisiae
caacaagctagggcgccgcagatgttattagatgaccagctgaagtattgggtcctgttacctatttcgattgtcatggttttgacgggtgtactcaaacagtacatcatgacacttataacgggaagcagtgcaaatgaagcacaaccaagggtaaagttaactgaatggcaatatctacaatgggcacaattattgattggaaacggtgggaacctgtcttccgatgcatttgctgcgaagaaggaatttctagttaaggatctcactgaggaaaggcacctagccaaggccaagcagcaggatggttcgcaagctggagaggttcctaatcccttcaacgatccaagtatgtctaatgctatgatgaacatggctaagggtaatatggccagtttcatccctcaaactattattatgtggtgggtgaaccatttttttgctggatttattcttatgcaactacctttccctttgactgccaaattcaaagagatgttacagaccggtattatctgtcaggacctggatgtgagatgggttagctccatttcatggtattttatttctgtgctcgggctaaatccagtctacaacctgattgggttaaacgatcaggacatgggtattcaggccgggataggtggccctcagggcccccaaggccctccacaatcacaggttgacaaagcaatgcatgcgatggctaacgatttgactatcattcagcatgagacttgtcttgataacgttgagcaaagggttttgaaacagtatatgtaagttcgtggctatatatgcacttgtatagaaaacagatatacttctcggtttcaa

SEQ ID NO: 1942 - DNA, 3212 bp, Saccharomyces cerevisiae
gtaagattagtagcaaagcaaagaacatataactatagctatgagcagcaataatagtggtctctctgccgccggagaaatcgatgaaagtctttattctcgtcaactttatgtgttgggtaaggaagcaatgttgaaaatgcaaacctccaacgtattaattctcggcttgaaggggctaggtgttgagatagcgaagaacgttgtgttggcaggtgtcaaatctatgaccgtttttgaccctgagccggttcaattggcagacttatcaacccaattctttttgaccgaaaaggatattggtcaaaagagaggagatgtgaccagagccaaattggcagagttgaacgcatatgtcccggttaatgtgctggattccttagacgatgttacccaattgagtcaattccaggtcgttgtcgctacggacactgtttctttggaagataaggtgaaaatcaacgaattttgccattcctccggtattagattcatttcctcggagacaagagggctgtttggtaacaccttcgtagacctaggtgacgagttcacagtgttggacccaacgggtgaagaacctcgcactggtatggtttcagacatcgagcccgatggaacagtgaccatgctagatgataacagacacgggttggaagacggaaattttgtcaggttctccgaagtagaaggtcttgataagttgaatgatgggaccctttttaaagttgaggttttggggccctttgcattcagaattggttcagtcaaagaatatggcgagtataagaagggcggtatcttcaccgaagtcaaagtaccccgtaaaatctcattcaagtctttgaaacaacaactgtccaatcctgagtttgttttttcggattttgctaaatttgacagagctgctcaattgcatttgggatttcaggctttacatcagtttgccgttagacataatggtgaactgccaagaacaatgaatgacgaagacgccaatgaattaatcaagttggtcaccgatttgtccgttcagcaaccggaggttctgggtgaaggtgtagatgttaatgaagatttaatcaaagagctttcctatcaggcaagaggtgacataccgggtgtcgtagcatttttcggtggccttgtggcacaagaagtgttaaaagcatgttctggtaaatttactccgctaaagcaatttatgtactttgattccttggaatcattgccagatcctaaaaacttcccaagaaatgagaagactactcagccagtaaactctcgttacgataatcaaatcgcggttttcggtttggattttcagaaaaagattgccaattcaaaggtctttcttgtcggatctggtgccattggttgtgagatgttgaaaaattgggcacttttggggcttggttctggctccgacggttacatcgttgttacggataacgattcgatcgaaaagtccaacttaaaccgtcagttcttgtttagaccaaaggatgtcggaaagaacaaatctgaagtagcggcagaggccgtttgtgctatgaaccccgatttgaagggcaagataaatgctaaaattgataaagtggggccagaaactgaggaaatatttaatgactccttttgggaaagcctggattttgtcaccaacgctctagacaatgtcgacgcaagaacatacgtagatcgccgttgtgtgttttatagaaaaccactgttagaatctggtaccctaggtactaaaggtaatactcaagtcatcattccaagattgactgaatcatactcttcttctagagacccaccagaaaagtctatcccattgtgtaccctacgttctttcccaaacaagattgatcacaccattgcctgggccaaatctcttttccaaggttacttcactgattccgccgaaaacgttaatatgtacttgacacaaccgaatttcgttgagcaaacactaaagcaaagcggggatgtcaagggagttctagaatccatctcagattctctatctagtaaaccacacaattttgaagattgtatcaaatgggcaaggttagaatttgaaaaaaaattcaaccatgatatcaagcagttactgttcaacttccccaaggatgccaagacttccaacggtgaaccattttggtccggtgctaagcgtgctccaacaccattagagtttgatatttacaataacgatcacttccattttgtcgtagcaggtgctagtttacgcgcttataattatggtattaaaagtgatgactctaattctaaacccaacgtggacgagtataagtccgtcatcgatcatatgataattccagaatttactccaaatgccaatttgaaaattcaagttaatgacgatgatccggatccaaatgccaacgcggctaatggctcagatgaaattgatcagctggtatcatccctaccagatccttctactttggctggctttaaactggagcctgtagatttcgagaaagacgatgacactaatcatcatattgaatttataacggcttgttctaactgtagagctcaaaactacttcatcgaaactgctgatcgccaaaagaccaaattcatagctggccgtattattcctgccatcgcaacaaccacttctttggttactggtttggtcaatttggaattatataaactgattgacaacaagacagatattgagcaatataagaatggctttgttaatttagctttgccatttttcggtttttcggaaccaattgcttcaccaaagggagaatataacaacaagaaatatgataaaatttgggatagatttgatatcaagggagatattaaattaagtgatttaattgaacattttgaaaaagatgaagggttagaaataacaatgctttcttatggcgtttctcttctttatgcctcatttttccctccaaagaaattgaaagaaagactaaatctaccaataactcaattggttaaattagtgactaagaaagatattccggcacatgtatctacaatgattctcgaaatttgcgcagatgacaaggaaggagaggatgttgaagttcctttcattaccattcatctatgagtaactaattaaccaaaataaaaaaataaattaaatatatacattaaatatgtatatatatatgtatgacttttgacaactttttctttggtaaaaa

SEQ ID NO: 1943 - DNA, 2304 bp, Saccharomyces cerevisiae
ctgcttacccacactacaaatttaattccagcttattgaagttgaaaaggcaagggaaaaataccacaggtttagataaggaaataggagaaaggattagaaaccatatccctataacagtaacgataatatttatatacacgtatattttctcgtctagatatgacaggtccaatagtgtacgttcaaaatgcggacggtatcttcttcaagcttgctgagggcaaaggaactaacgatgctgttattcacttggccaatcaagatcaaggtgttcgggtccttggagcagaggaatttcctgtgcaaggtgaagtagtaaagattgcgtccttgatggggttcattaagctaaagttgaacaggtatgccattatcgcaaatactgtggaagagaccggtagattcaatggccacgttttctatagagtgttgcaacattctatcgtatctaccaagtttaactcgagaatcgattctgaagaagccgaatatatcaagctactggagttgcatttgaaaaattccaccttttatttttcatacacatatgatttaacaaattccttacaaagaaatgaaaaggttggtcctgcagcctcctggaaaaccgctgatgaacgattcttttggaaccattacttaactgaagatttgagaaactttgctcatcaagatcctagaattgactcctttatacaacctgttatctatgggtatgccaagacagtggacgccgttttgaatgccacccctatcgttcttggtttgattaccagacgtagtatatttagggcgggcacaagatacttccgtcgtggtgttgacaaagacggtaacgttggcaatttcaatgaaactgagcaaattttactcgctgagaatccagagagtgaaaaaatacacgttttctccttcttacagacaagaggatctgtgccaatatactgggctgaaatcaacaacttgaagtacaagccaaatcttgttcttggagaaaactcattagatgcgacaaaaaagcattttgaccagcaaaaggagttatatggcgacaactacttggttaacctagtcaaccaaaagggccacgaactacccgtgaaagagggctatgaatcagtcgtgcacgcgctaaacgatccgaagattcactacgtgtattttgacttccaccatgaatgtcgtaagatgcaatggcatagagtgaaattgttaattgatcacctggagaaattaggtttatctaacgaagatttcttccacaaggtcatagactctaatggtaacaccgttgaaattgttaatgagcaacattccgttgtaagaacaaactgtatggattgtttggacagaacaaatgtcgttcaatctgttttagcccagtgggttttgcaaaaggagtttgaaagtgccgatgtcgttgctactggaagcacttgggaagacaacgctccattgttaacttcttaccaaaacttatgggctgataatgcagatgcagttagtgtggcatattcgggcactggagctttgaagaccgatttcacaagaaccggtaagcgtacacgtctaggtgcattcaacgattttttgaattcagcatcacgttattaccagaacaattggactgatggtccaagacaggattcatacgatttattccttggtggatttagaccacataccgcttctatcaagtcgccattccccgacagaagaccagtgtatattcagctgatcccaatgatcatttgcgcagccttgaccgttttaggtgctacgatattttttcctaaagatagatttaccagcagtaagaatttgctgtattttgcaggtgcgtcgattgtcttggcgctttcaaccaaattcatgtttaagaacggtattcagtttgtcaactggcctaagttagtagacgttgggttcttggtcgttcatcaaacgcatgataaagaacaacaattcaaaggtttgaaatatgcacagagtcctaaattttccaagccggatcctttaaaaagagattaatgagttctatatgtgataaaatgatgattattgtaaatccaaaacgtaaaaccgaaaatatgataaaaacgagaaaaaaagtaagttaaaaaataaaaaaataaaaaaatgaacgccggccccagagggaagaacaagctatttattttcttttttactttatctttcatggtcatatatatatatatatatatatatatatatcttctataggctactatacatgaaggcgttcgcccttacaacgttaagtttttttccctattgtac

SEQ ID NO: 1944 - DNA, 1216 bp, Saccharomyces cerevisiae
tcaaaaaaaaattgaacttccgtaccaaacatgacagccagtttaactaccaagttcttgaacaatacctatgaaaacccatttatgaatgcatccggtgttcattgcatgactacacaagaattagatgaattagcaaactctaaagctggcgcattcattacaaagagtgctacaaccttagaaagagaaggtaaccctgaaccacgttacatttctgtccctctaggcagtatcaactccatgggtttaccaaacgaaggtatcgactactatttgtcctatgtattaaaccgtcaaaagaattatcctgatgcacctgctattttcttctcagttgctggtatgagcattgatgaaaatttaaatttgttgaggaaaatccaagatagcgaattcaacggtattaccgagttaaacttgtcttgtcctaatgtgcctgggaaaccacaagttgcttatgactttgacttgacaaaggaaaccttggaaaaggtttttgcctttttcaaaaaacctcttggtgtcaagttgcctccttattttgattttgcccattttgatatcatggcaaaaatattgaacgagttcccattagcttatgtcaactctatcaatagtataggaaatggtcttttcattgatgtggagaaggagagtgtagtagtgaagccaaagaatggtttcgggggtattggaggtgaatatgttaagccaaccgcgctcgccaatgttcgtgcattttacactcgtttgagacctgaaatcaaagttatcggtacaggtggaattaagtccggtaaggatgcatttgaacatcttctatgtggtgcctctatgctacagattggtacagaattacaaaaagagggcgtcaagatttttgaacgtatcgaaaaagaattaaaagacataatggaagctaagggttatacatccatagatcagttccgtgggaagttgaacagcatttaattatcggaatttgaagaactatgatgggacaagttatggaagagtgttaagattcgtatgaatattttattattttgaaattgcataaatcaaggatagttggtaaatgctaattccttaatttttcggtgagtgcattcgcaattggcatcatacattagggttcaatgtgctttaatagatgatgatactaaatacttatactttgaaataacttaatcaatgtaaattattgtcttga

SEQ ID NO: 1945 - DNA, 1224 bp, Saccharomyces cerevisiae
atgcaaatagtcagaagttgtaactccaataacaaacccctcataccgtcctcaaattggcatatcgctatcagaatgagaggcgatggggttaaagataggagtatagatgtgttatccctcaaacatttcgaatcccagaaagttgttctgcctcaagaccttttcatggataacttcacctggatgttttatgagttcttcaagtgcttcacgtttcgtacctggttgctattattactgctaatgtggttgccaggttttctttcgcagataaagtccatcaatcggatttttccgtttaaactttgtattttagtctcatgcctagtggggatatttttacccaatatttattcattctctcataaaagtgtgttaacgaatcaacttactcagttctccaaagaaattgttgaacatgcaccaggtactgatactcatgattgggaaacagttgcggcaaatctaaattcttacttctatgaaaataaagcttggaatactgagtacttctttttcaatgctgcagagtgtcaaaaagcattcagaaaagttcttctcgaaccattctctgtgaagaaagatgaatcttcgaaaataaaatcatttggggattctgtcccctacatcgaagaggccttgcaagtctattccacagaatttgacaaaaagtggaagttgttcaatactgagaaagtgtggagccctgataacttggaacatgttcagctccccaagaaaacttatcgttataagtttacctgggttctcaagaggattttcaatctctggctttttccagcatttattctgtttctggcttgtatctatgtgtcatgggataagggccatctatttcgtatcttgtgttgtgggggaggttttctccttatggtaagagtttttcaaaatatgaggcccttttccatgcacatggaagacaaaatgcagttcttgtcaacgattataaatgagcaagaaagtggtgcgaatggatgggacgaaattgcaaagaaaatgaacaggtacttgtttgagaaaaaagtctggactagtgaagagtttttctttgatgggattgactgtgaatggttttttaaccacttcttttaccgccttctatctacaaagaaacctatgtttgatagacctctaaacgtggaactatggccatacattaaagaagcgcaattgacccgcaaacaggcgcctcccgtgtag

SEQ ID NO: 1946 - DNA, 1475 bp, Saccharomyces cerevisiae
ctcgagaattacgtctgacagttacatgaagtgtgagttcatgcaatctgtacctttattgacacagatatactaaaagaagttacaatgggctccaaaaaactgaccgtaggatctgattcgcaccggttgagcaaatccagtttttcaagtaataagtcgtcacattcagcaacaaaagatcagccaattgataccgacgatattgatgaagacgatgaatctggtcataatattatcttgaacatcatctcacaattgagaccaggctgcgatttgaccaggatcaccttgcctacttttattttagaaaaaaaatcgatgcttgaacgtgtcacaaatcagttacaattccctgagtttttgttacaggcgcattcagaaaaggaccccttgaaaagatttttgtacgtaatgaaatggtatttggcaggctggcatattgctccaaaggctgtaaaaaaaccattgaacccagtccttggtgaatattttacagcttattgggatctaccaaacaagcagcaggcatattatatatctgaacagacaagtcaccatcctccagaatgtgcatatttttacatgattcctgaatcttcgattagagtggatggggtcgttattcctaaatctagatttttaggtaattcaagtgcggccatgatggatggatcaacagtcttgcaatttctggacataaaggatggaaacggaaagcccgaaaagtatgttcttacacaaccaaatgtatatgtaagaggaattctttttggaaaaatgagaatcgaacttggagatcatatgataattaaatctcctaacttccaagctgatatagagttcaagacaaagggatatgtttttggaacttacgatgcaatcgaagggactgtaaaggattatgatggcaatgcgtattacgaaatatctggtaaatggaatgacgttatgtatttaaaggacttaaagcaacctcgttcttcaccaaaagttttccttgatactcataaagagtcaccattgagaccaaaagttcggccattgagcgagcaaggtgaatatgaatccagaaaactgtggaaaaaggttacagatgcgttggccgttcgcaatcatcctgttgcgacagaagaaaaatttcagattgaagatcaccaaagacagttagccaaaaaacgcattgaagatggcgtagaatttcatccaaagttgtttagaagatcaaagcctggcgaagatcttgactattgtatttataaaaatatccctgtcgacgaggaccctgagaagcaaatacgaagcatattgcaaatagcacctattttacctggtcaacaatttaccgacaaatttttcatccccgcatttgagaaaataaaatcacaaaagaagatgattgaaaacgaaaagcagaacccagcaaaacaatagtgtatatgttggatatgatatttgttgtaaattatagatta

SEQ ID NO: 1947 - DNA, 646 bp, Saccharomyces cerevisiae
gtcgtaaaaatgggagccgtactcagctgttgtagaaaccattccggcgaagagaatgaagctttgctgagggaacagcaggcaggctatggaagtcaaggaaacgcaaatgacgaatacgatgccgaacaaatgcggttgaaggaacacgaacacgaacagaaactgctggccagggaacaagagttaagagacattgttgcaaacaccaacgataaactaatagacatatcgatgataaacaatagtggcattgtaattcaagggacagacctgcaagaagctcttgataaaagacaacaggaagaaggtggagattcccgggaagacgaaaggagtgcaggtgatgacaacctcagtgggcactcagtgccttcaagcggatccgcacaggcaactactcaccaaactgcaccaaggactaatacgtttactctgcttacatcaccggattcagcgaaaatatcaaaggaacagttaaagaagttgcactctaatatactaaatgaaattttcagccagtcccaggtaaacaaaccaggccccttgacggttcccttttaatgaactttttgtataacatcattggtatacaagctttataaataaatgttaaatagttaatgaaataaaaaatcacatttga

SEQ ID NO: 1948 - DNA, 1229 bp, Saccharomyces cerevisiae
cgaaacagcccatcataaaacaataccattcctttaataaaacttacaaagatgaaattttctaaagtctcactactggccgcatctgcatctgtcgctttatctgccccagttgctgtgactgtcacgcaacatgtccaccaagctgccactgtagtggtacaaggtatagttcgtgtagaaaatggccagactctaacgacgttcattaccaagggcactcaaacggcttctgctagtcccgttgccacaacatcagctcctattgtggttgctaatgctcaagtggacagcatagctacttccgttatccaagaaagcgctgtcgtggctgaatctgcaacatttgaagaatcctctacagaaacatctgaagcattttctacagcaactgcaaccatacaagcggtgcaaacctccgcaagtgccacacaggatgatgtaaccacaactttaacatcttcaacacaacctaccagcacaactactccaacaaccactaccactagcccaaccactaccactagcccaactactaccgctagtccaactactactgctagcccaaccaccgctaccaccactcaatctaccgcctcaagcactcaatcctcaagctccgatttctcaacgtcaatggttaacgaacacaacactaaaagggcgttgcacaaggataccggttctttgacatggtctgacacactagcaacatatgcacaaaactacgctgactcctacgattgttcaggcaacctagtccactccggcggtccatacggtgaaaacttggcacttggttacggtacgaccggctctgttgatgcctggtataacgaaattaccagctacgactattccaaccctggttttagtgaaagcgcaggtcacttcacccaagtcgtatggaagggaacttctgaagttggttgcggtttgaaatcttgcggtggcgaatggggcgattacatcatttgttcctacaaagccgctggtaatgtcattggtgagtttgctgacaacgttatgccattagcttaatcactgaatttagcgaatacatgggtatggacatgaacagcaatgggcactgttccttctcttacatttctcttttatagtttcaatttttattatacactaaggattcttcttttctagggtacgcaaattaaatgcaagcaagatcatataacattgtcatagtctcatgcatggtaaatagggtg

SEQ ID NO: 1949 - DNA, 989 bp, Saccharomyces cerevisiae
caaggtgaaagtggaataggctagtgttatagatgagtattgacaacaagttgtttgttactgaagaggatgaggaagacaggacgcaggaccgtgctgatgttgaggatgaatctaacgacattgatatgatagcggatgagaacggaacaaacagcgctatagctaatgagcaagaggaaaaatccgaagaagtaaaagctgaagatgatactggtgaagaagaagaggatgacccagtgatcgaagagtttccattgaagatctccggagaagaggagtcactgcacgtgtttcagtatgctaatagaccaaggctagtaggacgcaaacctgctgagcatccgtttatctctgcagcaagatataaacccaagtcgcacctatgggaaatagatattcctttggatgagcaggccttctataacaaggataaggctgagagcgaatggaatggggttaatgtccaaacattaaaaggcgtgggtgtggaaaacaatggccaatatgcagcatttgtcaaagatatgcaggtttatttggtacctattgagagggtagcacaattgaagccatttttcaaatatatcgacgacgcaaatgtaacaagaaagcaagaggacgccagaaggaaccctaatccttcatcacaacgcgctcaagtggttaccatgtctgtaaagagcgtcaacgacccttcgcaaaacagactcactggctccctgctggcacataaagtcgccgatgaagaggctaatattgaattgacctgggcagaaggcacgtttgaacagttcaaagatactatcgtgaaagaagctgaagataaaactttagtagccttagagaaacaagaagactatatagataatctagtttgaagtacataatgcatcatgaagaaagaacagcatcagacatcagtttcacataaaggatgctcttgcgctttttctccttttctattaagtcattgcgtgcatatatta

SEQ ID NO: 1950 - DNA, 3428 bp, Saccharomyces cerevisiae
tctttatcatcttttgttttgtttgttcatttactttagcgtttagttgataagtcctgttatcctcttcttttatttcatttcttcatttacttaactgcgagaagattataatagcatgtcaggttctttctggaagtttggtcaggattactcgatagagtcaccggtttctaagattctaaatagtgcctttattaaaatcaataaggaccaagatgacgacgtacctaccggcacatgtgaagaaaatattgctgatgacgaagataactcttcacatgactacgctgcttctgaagataatgtagttaacgagaacgaagagaaggaagaagaaaatactctgcccactacagaatcggaatatgaaaattatagacctaatttggacgtcttagacgatttgctggatgatgacgaactgtatacggaattaatgtgttcaaatttcaagctactaatattcttgaagtatcctgatgttttatcaaaattgatagaatatgttaccaacgagaagattctcgacgaagaaacagatagcgctaaaaagccagagattattgaaggtgtaaacgatcatcctattttgatagaaagagacagaaaggataaaaaggaggacgctgaagaaggaggcgactcagaagaaactacaaatgatagcgatcatgactctggggacgaaagaagtgttgattctgaagagacaagcattactttgccaccggaatctgaggaacaagtggagactagaagggcaaggatagctgctgaaattttatcggctgatgtatggcctatatccgcagcaataatgcaaaataaggatcttcttggtagattgtggtcgatactagatcacccagctcccttaccgataccagcttccacctacttcatgaaaataaatgaaagacttctcgatatggatataacggggatgttagagtttatattaagccgagacagcttggttgcaaggttcttgacacatgttgacaatccgtctttgatggacttccttttgaaagttatctcgacggataaacctgactctcccacgggtgtcataaagatactaaaatcacaggaattaatacctaaacttttagatcatcttaatccagaatacggtatttccactcagtctgcggcaggcgattttattaaggcattcgtcacgttaagcactaactcaagcaatgaacttgcttcgggaataggtcctaatgaattgacaaggcaattagtatcagaagaaatgatagaaaagttgattaagataatgctaaagggcggtacatccttaagtaatggtgttggaattatcatagagttgatcaggaagaataactcagattatgatttcatccaactagtctacactaccctagaaagtcaccctcccactgatcgagatccaattcacttgatacatttagtcaaactttttgctaagcatatgcctgattttgctgatatgctggataaaaccaagttgccactaatggaaatgccattcggtaatattgaacctctgggatttgagaggtttaaaatctgtgaacttattgcagaactattgcactgttctaatatgacgctgctaaatgagcccaatggtgagatgattgcccaagaacgtgatatagaaagggccaaagaattagaaacttcaaccgaaaaggaaaatataacagctattgtggacaataaatcatcatattatgataaggattgcgtagagaaggatatcacagaaaatttaggcgctcttcaaataaataatcaaggaagtgaagaagatgaattaaatgatactggggtatcaagtgtaaaactagatgtgaaatcagacgcaaaggtagttgaggggctagaaaatgatgcttctggagtagagttgtatgatgaaaccttgtctgacacagaatccgtgagagaatgcctaagggaaaaaccgctagttggagacaggctgaagattgctctagaagacactaagatactgattagtatccttgatatgttcactgagttcccttggaataattttttgcataatgtaatttttgatattgcccagcaaatattcaatggtcccctcaaaactggttataataggttcctcttgaaagattatttggttgatgcatacctaactaaaaagatagtagatgcggataaggcatgtcaagactatgaaaaaaagaccggtttacgttatggttatatgggtcatttgacattagttgccgaagaaatatcgaagttcaaagagtatattgatgaaatgaagctaactttttgcaataccgctgtttcagatcgacttgaggaaccattttggaaagaatatagtgaaacgatcttggctgatacaagagagaagtataacaccgttttgggagattttggcaatgaccaagaaagcgatgacgatgttattaggaattctgattctgaggatataattggtgatacagagggcaacgaaaactacggaaatggagaaaacgatgaacttcttagtaacgggcatgattctgggaacatggatttatattataacttcaataataacgagaatgaagaaaatgaagaagattacgcagagtatagtgatgtggataataaaaattactataataacgtcgagactaacgacgatgattatgatagtgatgatggtaaatccaaaagtgccgaatcagagtttaccgataaaatatctgaacatagggatggcaatagtctctataatgaggacaatgatgaaaacgggagtgacaaatggacatcgggtacttcattgttccctccagaccattttcctagtaggtcacaaccttcagatcctaaactgcaagaccagaatatttttcaccatcagtttgactttgaaggtgttggcgatgacgatgactatatggatcctaatgatgatggccagtcatatgccagacctggtaatccattgtatactaccccgaaaacaccaccaagaccgaagactattcttttcaattctttatccgcattggataataatggcgaagacgaagaagtggcactaggcaccagtgttgatgatcgaatggataacgagatatcaagcgatgaagaagactccgaaatgaagatgaagagaatgatatgggcaatgaggagggctactcattatataggtcaagaagtaaagaagctttctgaactaaaacattcacattgtcacattttcaccctttattcatcaattttttattgctccacttttttcgcatataggtcatttataattcatcaaatatatacttttttaattgaggcttgtaatttaatattaaccgaatataatcttataaagaataatgaatattcacttttgaatatacttaagtttatataggtgtaagaaggaa

SEQ ID NO: 1951 - DNA, 962 bp, Saccharomyces cerevisiae
gccactacttagtcaacggatttatcaatgtcatatttgccgacttattccaacgacttgccagcaggcccgcaaggccagaggaggcgtaataatggtaatgaaaacgatgcaagacaaggctacggtcagcaatctgtgccgatggtaatcaggaggcttttcaaaacgccaaagaatttagatctcgagacagccagctgggaaatgttccatttgattttccatccaagaaaagcttatagatcaatatattatcagcgacagacgaaaaatcagtgggcgagagatgatccttcctttttcatcttccaaatagccttaatttcactcagttctattatttggtcgatttataattcaggtttcaacaacgacagtgatatgggggccttgagcattataggtcattttttcaaaagtttggtaatgatggtgattttagattttttcatatttggatttattatggcaactattttttaccttttgttgaataggtcacattttaaattcaaatcgagccaaaatagtgtggtagagtgggcttattgtttcgacgttcattgtaattcatttttaatcatcctactgtgcctatacttcattcagtttttactactgcccataattaatttacaaaactggatttccttactcattggtaattcgttatattgttttgctattggccattactttattttaaccttttatggatacaaccagttgccattcttgaaaaatttgaactttatacttttaccaacattaggattatcgataatctatttaatcagtttatttggcatcgacttatccaagaaattaagcttttacaattattaagcaattgaacacggaaatagaaaaaatttggttctttaagataaagcacataaattacataatgatattattattatatatatttgaagtataaaaatgcaatgagtaataag

SEQ ID NO: 1952 - DNA, 756 bp, Saccharomyces cerevisiae
cagacatcgcactgagaaatgtcacgtaattctgcagcaggtttggaaaacactcttttccaactaaagtttacatcaaaacaattacaaaagcaagccaataaagcctcaaaggaagaaaaacaggaaactaataagctcaaacgtgctcttaatgaaaatgaagatatatctcgtatatatgcatccaatgctataagaaagaaaaatgaaagattacaactgttgaagttggcatcacgggtggattcggtcgcatcaagggtacaaaccgccgtcacgatgaggcaggtgtcagcatcaatggggcaagtttgcaaaggcatggataaggcgttacagaatatgaacctccaacagataaccatgataatggacaagttcgaacagcaattcgaagatttggacaccagtgttaacgtatatgaagatatgggtgtgaattcggatgccatgctggtggacaacgataaggtggatgaactaatgagcaaagttgctgacgaaaatggcatggaattgaagcaaagtgcaaaactggacaatgttccggagataaaggcgaaagaggttaatgttgacgacgaaaaggaagacaaacttgcacaaagactaagagcattgaggggctgaaaaaacatgctaacaggtcatgcatttttagttcatcattacgtttccagctatgttatgtatgtatgaccacatatgctgtacataaattgtatactaaaatcaataaaaaaagtataactc

SEQ ID NO: 1953 - DNA, 1528 bp, Saccharomyces cerevisiae
accgcaatttacgctcctttcatcggtaactaagaagaaaaaaaaaaaagtacgaccacacaatttccagtgtattcattccttaaacttcgtttattttttattcattcattcatttttatttgaatataaccaactactagtccttcctttaaacaaaaatttaccctcccttaatttttcaagaaattccagtatgaaattatccgctctattagctttatcagcctccaccgccgtcttggccgctccagctgtccaccatagtgacaaccaccaccacaacgacaagcgtgccgttgtcaccgttactcagtacgtcaacgcagacggcgctgttgttattccagctgccaccaccgctacctcggcggctgctgatggaaaggtcgagtctgttgctgctgccaccactactttgtcctcgactgccgccgccgctactacctctgccgccgcctcttcttcctcctcttcctcttcctcctcttcctcttcttcctctgttggttctggagattttgaagatggtaccatttcctgttctgatttcccatccggacaaggtgctgtctccttggactggttaggtctaggcggctgggcttccatcatggacatgaacggtaacaccgccacctcttgtcaagacggatactactgttcttacgcttgttctccaggttacgctaagacccaatggccttctgaacaaccttccgatggtagatccgttggtggtttatactgtaagaacggtaaattataccgttccaacaccgacactaacagtttgtgtgtagaaggtcaaggctctgctcaagctgttaacaaggtctccggctccattgctatctgtggtaccgattatccaggttctgaaaacatggtcgttcctaccgtagttggcgctggttcctcccaaccaatcaacgtcatcaaggaggactcctactatcaatggcaaggtaagaagacctctgcccaatactacgttaacaacgctggtgtctctgtggaagatggttgtatctggggtactgagggttccggtgtcggtaactgggccccagttgtcttgggtgctggttacactgatggtatcacttacttgtccatcattccaaacccaaacaacaaagaagcaccaaactttaacatcaagatcgttgccaccgatggctctaccgtcaatggtgcttgctcttacgaaaatggtgtctactctggctctggctctgacggttgtactgtttcagttacttctggttctgctaactttgtcttctactaggccttttttccttgaatattgcaaataagcttttgctagtactttttttactccgttcattttatggtttatttttcaattagttcgtttttccacaatacaaaaaaacacagtcctttgtactatcccttttatttcattattttttcttttttaagataccactagatattatcatatatagcatattatataacataaaaagtcaagaaaaaaaatgtttttatcactttc

SEQ ID NO: 1954 - DNA, 1459 bp, Saccharomyces cerevisiae
cttaacattggatagcaatttggcggtgggtagtttataacgtgtgtgctctctctttaagtaacgatgtcaagagatgtaagggcagagaaactagccatatcactattgattttatcattgtttctaatattccaattagtggctgagatttatctcaataatggtgatcagtaccatacagagactagcccctttacaagaggaagatcacatgtaacgcgtgtgcccaaccatgatgctagtttatctataccgtttttggacaagatcaaccagttttggcatgtaggcggtgccacgcaaattaggaatattcagtcgatcaaattgactcaggaccgtgatcaagataaacatggattagtattgtccaatggaattggcgacaacaccatcaatgactttgagattgttttcactttcagaatttctcacgaccccactacacaactcactggtgatggaatgtgttttgccattacgcccgaaaatgggtttctcacacagaatttacagtcgtcgtatgcgaaaaagcaatacatgatgaattctcagggcgtcatagccgataatacagatctgatgggcttcccgaaaaatctgcctggcctatttattgtcttggatacgtatcgcaaccaaggccacgaccataaggaggtaccctttatggatgtgtttataaatgtggccccagaaagcgattggtacgatataaatagtgatggtgaactcagtacatcgctgcggcttaattcaagaggccacataaaactcaagaaaaatgccctgtggaatcgagtcacgaaactaagaataatatatttggaaagtataagcttcctgaagatcgacgtgcagtacgcaaaagagggaaactactggattgagttatttcaaacaaccgaaaatctgtacttgccgaaaaacatgcacacggggcaaagatacattggctgtagcgcattaaatggccaattaacggagacagtggagctgctggacgtatccactagcgaattccattggaacgacatggatgcgtccattgaggacacctatgattacgcaaaggaagctgagctattcctggagcaggaatttggcgaggtccttgacagggaacccgatgagttcaccaaatggaaaatgatcaaagctcaaccaaacatcaagactgggtcacagtcagctgaacagaaaacttcaaacaatcctcactctcggttgttcaaggtcgtgctgaccatatggcattatagcgagattttgctattgatcatgggcatttatcttttttctgcttgcataagagttttccaaagaaggttcaaaaaaattagatccagaagaaaaagggcaggctcgcattctgtggggctattgcccatgtagcattgcataggcacgcacatacatacatacacaaataatacaatataggacgttcatctta

SEQ ID NO: 1955 - DNA, 1706 bp, Saccharomyces cerevisiae
aaccaaagccatcaacaggtccactagaagcatctgccaagttacgacctaagcaaaggtttgagtgaaaagtgaattgcgacagtacaatcacaaaagtatagaaacataattgttatggaaaacaaactactttgttggtggttgtactggccatgcgtgtattcatctattatagctaccataatatctttttacaccataactagacacttattaaattaccgtaaaccatatgaacaaagactatccatacggatactattgctcgtgcccatttttagtgtgtcatgcgcaagtggcataattaagcctgaagcagctcaattttatgtcgatcctatcagagaattttatgaagcattcgttatttacacttttttcacatttttaacactactactaggaggcgagaggaacatcattactgttttaagcttaaatcacgcccccacaagacatccgataccgctaataggtaaaatttgcaaaccgatagacttatctgatccttttgattttctttttgtcaaaaaaggcatattacagtatgtttggttcaaaccattttattgttttggtacattgatatgcagtgcatggaagctacccaaattcgaaatatttttgaacgttttttataatatttcagtgacttggtcactgtatagtttagcactattttggaagtgtctctatccggaattaactccttataaaccatggttgaaatttttatgtgtcaaattgattatttttgcctcttattggcagagcatcataatccagggtctagtggttactggaaagttgggtacgggaaaccaagatcgaacctctggatatgtgtacaagaatgggctcctgtgtatagagatggtgcctttcgccatcttgcatgcagtagctttcccttggaacaaatacacagcatttagcataccttatggggccaggatgaaattcatttacgctttgaaagattttcttggttgcggtgatctaatatgggattttaaacagactttgtttgctggtcccttgtactataattataggaacttcgatcctgaagccatggatctattaagcactagacaacaatccggtgcgactatggaaagactaaagcatgggctaagatttactgataatggaagaaatagttattgggtggcatatgggagtatagataacaaccttgttccggaatcaatagaggaatcatgggaagatgatattgctggtcagagaacttttcctgaggatccaaattatccggttgttcacgactacacgatgggccatcgatatagtagatcaatgaatgatttaagaagagatgttcaaagtaggtcatcaatggcttgttaaatgagtcgttaaatgtacgtatatacatagttactgcgctttcggttatatacaaaataaaacaacatctacaagcaatgcttttttttcaattattgtaacttggatgcttattctaataaaatgaaataaatgctactgtaattttttgccggaggattggctatatatgcagagtgggagttggacgatatcaccattattattatttttctattattaccattggacttgtcttttgcagcaacaaaagtggcagcagcagcaacagcaccaccaccaatgcattttggccttgccttttataagttgtcaaaaaaagttgacctcga

SEQ ID NO: 1956 - DNA, 2228 bp, Saccharomyces cerevisiae
gacgaaacaattagaacctgatttaatttaacttccatttttctgaatctggtgtgatataccgctccaatatattcgaatttatcccaattttatcataataattcattttaattcgatgtcataaagtactaattcgatattaatctagcctaattacattaaatacttaataaaagcttctgtgacataaaagtacaaatctgtcattttattttagaggaatagtttaggacaaagtcattatgtacgaacagtttgaattttctttttttttcttcgaaaattcagacaataaggttaaatataaagctcatctcatctcatcgataaaacgctggagtattatcacatgcatgcgttgcttttggaccgtacagaagtctatatttaaagctaggtttttcgcttgcagaaactttgtcaagaagcataattataaactaatcagcaccatgactggaagtactgaaatggtaccaccaacaatgaaacataccgttgacaacaaaaggctttcgtctcctttgacagattctggtaaccgccggactaagaagccaaagttgagaaagtacaaggccaaaaaggttgaaacaacttctccgatgggtgtcctagaatttgaagtgaacgatttgttaaaatctcaaaatttgtccagggagcaggttctgaacgatgttacttcaattctaaatgataagtcctcaacagatggacctatcgtcttacaatatcaccgagaggtaaaaaatgtcaaggtcttagaaattacttccaatggcaacgggttggctttgatcgataatcctgttgaaacagaaaagaagcaagttgttatcataccgtttggcctgcccggtgatgtagttaatatcaaagtctttaagacccacccttactatgtcgagagtgatttattagacgtagtggaaaaatctccaatgagaagagatgatttaattagggataaatatttcgggaaatcttcaggaagtcaattagagttcttaacttacgatgaccaactagaattgaaaagaaaaacaattatgaatgcctacaagttcttcgcaccaaggttagttgctgaaaaacttttacccccatttgacaccaccgtagcttcccctttacaatttggctacaggaccaaaattacgcctcatttcgatatgccaaaaagaaaacaaaaggaactatcagtaaggcctcctttaggatttggtcaaaagggtagacctcaatggagaaaagatactttggatatcggcggacatggttcgatattagatatcgatgaatgtgtgcttgcaactgaagttctcaacaaaggattgactaatgaaagaagaaagtttgagcaagagtttaaaaactacaaaaaaggcgcgactattttactgagagagaataccactattttagacccttccaaaccaactttagaacagttaaccgaagaagcctctagggatgaaaatggtgatataagttatgtcgaagtcgaagacaaaaagaacaatgtcaggctggctaaaacttgcgttaccaatcctagacaaattgtcactgaatatgttgatggatatacttttaattttagtgcgggtgagttttttcaaaataataactctatcctgccaatagtgaccaagtatgtccgtgataacttgcaagctcccgctaaaggtgatgataataaaacaaagtttctagtagatgcttattgtggatcaggtcttttcagtatatgcagctccaagggcgtagataaagtgattggtgtagaaatttccgctgacagtgtctcttttgcagaaaaaaatgcaaaggcaaatggtgttgaaaactgtagattcatcgttggaaaggctgagaaactctttgagtctattgatactccaagtgaaaacacttccgttatcttggatccaccacgcaagggctgtgacgaattattcctaaagcaattagccgcatataatccagccaagattatttacatatcgtgtaatgtccattcccaggcacgtgatgtcgagtacttcctcaaagaaacagaaaacggttccgcccaccagattgaaagcataagaggatttgatttctttccacaaacgcaccacgttgagagtgtgtgtataatgaagagaatctaattgcacatataaaatatctatcactatgtatatctttctagagtaaatgtcttcctgtacttt

SEQ ID NO: 1957 - DNA, 1319 bp, Saccharomyces cerevisiae
ccttctaattatatacaagatgtctgaaggtattactgatattgaagaatcccaaattcaaaccaactatgacaaggttgtctacaagttcgatgatatggaattggacgaaaacttgttaagaggtgttttcggttacggtttcgaagaaccatctgccattcaacaacgtgccatcatgcctattattgaaggtcacgatgtcttggctcaagctcaatctggtactggtaagaccggtaccttttccattgctgctttgcaaagaattgacacctctgtcaaggctcctcaagctttgatgttggctccaactagagaattggctttgcaaatccaaaaggttgtcatggctttggctttccacatggacatcaaggtccacgcttgtatcggtggtacttcctttgttgaagacgctgaaggtttgagagatgctcaaatcgtcgttggtactccaggtcgtgtttttgacaacatccaaagacgtagattcagaactgacaagatcaagatgttcatcttagatgaagctgatgaaatgttgtcttctggtttcaaggaacaaatctaccaaattttcaccttacttccaccaaccactcaagttgttctattgtccgccaccatgccaaatgacgtcttggaagttaccaccaaatttatgagaaacccagttagaattttggttaagaaggatgaattgactttggaaggtatcaaacaattctacgttaatgttgaagaagaagaatacaaatacgagtgtttgaccgatttatacgactctatctccgttactcaagctgtcatcttctgtaacaccagaagaaaggtcgaagaattgaccactaagttaagaaacgacaaatttaccgtttctgccatctactctgatttaccacaacaagaaagagacaccatcatgaaggaattcagaagtggttcttccagaattttgatctccactgatttgttggctagaggtatcgatgtccaacaagtttctttggttattaactacgacttaccagctaacaaagaaaactatattcacagaatcggtagaggtggtcgtttcggtagaaagggtgttgccatcaactttgttactaacgaagacgttggcgctatgagagaactagaaaagttctactccactcaaattgaagaattgccatccgacatcgctactttgttgaactaagggagacaaaaacttcttaaaaaagtatcttgtgaggctatcttgataacgtaacatatatttctaaaaagttatatatgctttttgtatttaatttgtttttctttttaca

SEQ ID NO: 1958 - DNA, 1166 bp, Saccharomyces cerevisiae
actgttttataccaagtagttcgttcgatttggaaaagagagtagtcttttgcgatgagtaaaaacagggaccctctactggctaatttgaacgctttcaaaagcaaagtgaagtctgccccggtgatcgcacccgctaaagttggacagaagaagaccaatgacacagtgattactatagatggaaacactaggaagaggacggcctccgaacgtgcgcaagaaaacactttgaactctgcgaaaaatcctgtgttagtggatatcaagaaagaagctgggagcaatagctctaatgctatttcattagatgacgacgatgacgacgaagattttggtagctctccttcaaaaaaagtaaggcctggctctattgctgcagccgctttacaagcaaatcaaacagatatttccaagagtcacgattcttcaaagttgctttgggcgactgaatacattcaaaagaaaggtaagcccgttttggtgaatgagttattggactacttgtcaatgaaaaaagatgacaaggttattgagcttttaaaaaaattagatagaatagagtttgaccccaagaaggggactttcaaatacctttccacctacgatgtccattccccttcggaactgctgaagttgttacgttcacaagtaacattcaaaggtatttcctgcaaagacttgaaagacggttggccacaatgcgatgaaacgattaaccaactggaggaagacagcaaaattttggtgttaagaactaaaaaggataaaactccaagatacgtttggtataacagcggtggtaacttgaaatgtattgacgaggagtttgttaaaatgtgggaaaatgtgcaattaccgcaatttgcagaattgccaagaaagctgcaagatttaggtctaaagcctgctagtgtcgatcctgctactatcaaaagacaaacaaagagagttgaagttaaaaagaagagacaaagaaagggtaagattactaacactcatatgaccggtatcttgaaagattattcccatagagtatgaggttgttttgattaaatcattttcgtttgcatattaggttaaagagactgtgattatatatacatgcacgttagggtgcagcatacaactcagctttatagtctacaacgtatttataacgagca

SEQ ID NO: 1959 - DNA, 1250 bp, Saccharomyces cerevisiae
ggcccgaaaaggtccttcaaccaagtcgtcaaaatattggcaagccaaaagagcagcgagaatgattggcaaacggtttttccaaacaacaagtaaaaagattgcttttgcattcgatattgatggtgtgttgttcaggggcaaaaagccaattgctggtgccagcgacgcattgaagctgttgaaccgaaataaaattccatatattttactcactaatggtggagggttctctgaaagggcacggacagagtttatctcgagtaaattggacgttgatgtatcacccttgcaaattattcaaagtcatactccttacaagtcccttgttaacaaatattcaaggatcttggccgttggtacaccttccgtgagaggcgttgcagaaggctacggatttcaagatgttgttcaccaaacggatattgtaagatacaatagggacattgcaccatttagtgggctatctgatgaacaagtgatggagtactcaagggatattccagatttaaccactaagaaattcgatgccgtcttggtatttaacgatcctcatgattgggctgccgatatacaaatcatctcagatgcaatcaacagcgaaaatgggatgttaaataccttgagaaacgaaaagagtggcaaaccttccatccccatttacttttcgaaccaggatttactgtgggccaatccttataaattgaatagatttggacaaggtgccttccgcttactagttagaaggctttatctcgagttaaatggtgaacccttgcaagattatactttgggtaagcctacaaagttgacttatgatttcgctcatcatgttctcattgattgggaaaaaagactaagcgggaaaataggccaatctgtgaagcaaaaactgccactcttaggcacgaaaccttcaacttctccattccatgcggtttttatggtaggtgataatcctgcaagtgacatcattggagctcaaaattacggttggaacagttgtttggtgaagacaggtgtgtataacgaaggtgatgacttaaaggaatgtaagcctaccttgatcgtgaatgatgtatttgatgcggttactaaaacgttagaaaagtacgcatgaaagactactatggaatatcttttcctgcctttgagctgtactgttatgatagatttattaatagcttaaacgcttttacaaaatatatgcaatatacataacgggttaaataatgggttgggaaattggt

SEQ ID NO: 1960 - DNA, 625 bp, Saccharomyces cerevisiae
caaattttttcttgtttggttgcattatttcatgaattcaactaaaaggctgaaaatgtcaacaacctttcatgattatgacttggaagagccattaacctcaaatgccagaccactaaagaactccgttattacaatccgagtaataaaatctttcccatatagaaacgtcaagaacatagtgctgcacgattacgatcttgctgataaaactgcaaaggacctgttcaatgacgttttgaacaaaattcaaaatgaaggttcattcagaccattccgtaatgttaagtttgatactttaaagatatacacgcacgcacatggttccaagacggttaatctcgtgatcaattttgaccacgatgacgactggactttagacatagagaatgacaaaaaaaagctgttcgagtatggcattgagaatgaaaccgaaatttcgcttttcaacaaagaggattacctaaggtttaaagaaaaccctgaagaaaaatggtgagatgttgtttggcttatggccttcattaataagtaagtgctatgaatatattacatatatatatatatatatgttgtgtacgagagtatactcgtatgtaaattaacatcaaatgtgtatgtggaa

SEQ ID NO: 1961 - DNA, 1265 bp, Saccharomyces cerevisiae
agcaactacgcaaagtatttaagtgccttgcaaccagcttcttcttgggctgagatacaatacctccttgtctattcaagtgtacagtatcgcaaagcacagtaaaattaattcctatcaacacaacccatcaatataaatctatagagaaatgtcgaagcctggtcgtactattttagcaagcaaggtcgccgaaactttcaataccgaaataattaacaacgtagaggaatacaagaagacacataatggtcaaggtccccttcttgtgggattcctagctaataatgatcctgctgcaaagatgtatgctacatggactcaaaagactagcgagtcaatggggttccgctatgacttaagggtcattgaagataaggattttttggaagaagcgataatacaagctaacggcgatgactctgtgaacggtatcatggtatactttcctgttttcggtaatgctcaagatcagtatttgcaacaggttgtgtgcaaggaaaaagatgtagaagggttaaatcatgtttactaccaaaacctgtaccataatgtcagatacctggacaaagaaaaccgtttgaaatccattctaccttgcacaccactagctatcgttaagatattggaattcttgaaaatttacaacaatttgttaccagaaggaaacagactgtatgggaagaaatgcatagtaattaacaggtcagaaatcgtcggtagaccactggcggcgctattagccaatgacggtgccacagtatactctgtggacgttaacaacattcaaaaattcacccgtggtgaaagtttgaaattaaacaagcatcatgtggaagaccttggggagtactctgaagatctgttgaaaaagtgttctcttgattcagatgtggtcatcactggtgtccctagtgaaaattacaaattccccaccgaatacatcaaagaaggtgccgtctgcatcaattttgcatgcaccaaaaattttagcgatgatgtcaaggaaaaagcttctctttacgttccaatgactggtaaagttaccattgcaatgttgttgagaaacatgttacgtttagtaaggaacgtagaactgtctaaagaaaaatagaacatttgtggctgttcaaataagcataggtaaaacagaatacataaaaataagggaaaaaaagaaagatcatttgtaatgtacttactacatacatatagaattctcctctcttagattatcatataatatacaaagtttatgggtctta

SEQ ID NO: 1962 - DNA, 3576 bp, Saccharomyces cerevisiae
cgagcatactgttacatccaattcaagtgaagtacattaggatagccatatgagtgaaaaaaaagtacatcttcgtttgcggaaggaacttagcgtacccattgcggtggttgaaaacgaatccctggcgcagttgtcttatgaagaggaaagccaggcctctctaatggacatttccatggagcagcaacagttaaggttacattcgcactttgataattccaaggttttcacagaaaataacagatacatagtaaaaacccttcaaacagactacagtagcggattcagtaacgatgacgaattgaatggatatatcgatatgcaaattggatatggactagtcaatgaccacaagaaggtttacatctggaatattcactccactcaaaaggatacgccctatataactgtaccatttcgttctgatgataatgatgaaatagcagtcgcgcccaggtgcatactaactttccctgctacaatggatgagtctccattagcactgaatcctaatgatcaggacgaaaccggagggcttatcattatcaaaggtagcaaagcgatatattatgaggatatcaactccataaataatttgaactttaagttatctgaaaaattctctcacgagttagaattacccatcaactcttcgggcggagagaagtgtgacctaatgttaaactgcgaacctgctggtatagtgctttctacaaatatgggcagaatattttttataaccattagaaattccatgggtaaacctcaactgaagttaggcaaactattaaataaacctttcaaattgggtatctggtccaaaattttcaatacaaacagttcagttgtctcattacgaaatggacctatcctcggtaaggggacaaggttagtatatattactactaacaaaggaatttttcaaacatggcagttgtctgccacgaattcccatccaacaaaattgattgatgtaaacatttacgaagccattttagagtcgctccaggatttgtatccatttgctcatggtacgttgaagatttgggactctcatccattacaagatgaaagttcacaacttttcctgtcatctatttacgacagttcatgcaatgaaacatattatattctttccacgattatcttcgattcttcttctaatagttttactattttttccacttatagattgaacacttttatggagtcaataaccgacacaaagtttaagcctaagatatttatacctcagatggagaatgctaacgataccaatgaggtaacttccattttggtaatgttccccaatgctgttgtcattactcaggtgaactcaaaattggactctagctattcaatgagaagaaagtgggaagatattgttagccttagaaatgacattgatataattggttctggttacgactcaaaatctttgtatgttttaacgaaacaaatgggggtgctacagttttttgtgaaagagaatgaggaaacaaattctaaaccggaagttgggtttgtcaaatctcatgttgatcaagctgtttatttctccaaaataaatgcaaatcccatagatttcaatttacctccagaaatttcactagatcaagaatctatagagcatgatttaaaattaaccagcgaggagatttttcattccaacggcaagtacataccccctatgctaaatacgttggggcaacatctctctgtccgtaaagaattttttcaaaatttcctgacatttgttgctaagaacttcaactataaaatatcacccgaactgaaattggatctgatcgaaaaatttgagatcttgaattgctgtattaagttcaatagtatcatcagacaatctgatgtattgaacgatatatgggagaagactttatcaaactataatctgacacaaaatgaacacttaactactaaaacagttgtaatcaacagtcccgacgtatttccagtaatctttaaacaatttttaaaccatgttgtgtttgttttgttcccatcacaaaatcaaaatttcaaactaaatgttaccaatttaatcaacttatgcttttatgatggaattcttgaagaaggtgaaaaaactataaggtatgaacttttggagttagacccgatggaggttgatacatccaagctaccatggttcataaactttgattacttaaactgtatcaatcaatgtttttttgattttacatttgcgtgtgaggaggaaggaagtctggattcttataaagagggcttgttaaagattgtgaaaattttatattatcagttcaaccaatttaaaatatggatcaacacgcaacccgttaaatctgtgaacgccaatgataattttataaatatcaacaatctttatgatgataaccacctggattggaaccacgtcctttgtaaggtaaatctaaaagaacagtgtattcaaatagcagaattttacaaagatttatctggattggtgcaaacattacaaactttagatcaaaatgactcaacaaccgtatcgctatacgaaacattcttcaacgaattccctaaagagtttagctttacattatttgaatatttaatcaagcataaaaaattgaacgacctcatcttcaggttcccacaacaacacgatgttttaatacagtttttccaagagtccgctccaaagtacggtcatgtagcatggatccaacagattctggatgggtcgtacgcagatgccatgaatactttaaaaaacattactgttgatgattcaaagaagggcgaaagcttgagcgaatgtgaattgcacttgaatgttgcaaaattaagctcgttgctagttgaaaaggataatttggacattaatactttgagaaagatccaatataatttagatacaattgatgctgagaaaaatatttcaaacaaattgaaaaagggcgaagttcagatatgtaaacgcttcaagaatggctctatcagggaagttttcaacatattagtggaagagcttaaatcaacaacagtagtcaatctatcggatctcgttgagttgtattctatgctcgacgatgaagagagcttattcataccgctaaggcttctttctgttgatggaaacttactgaattttgaagttaaaaagttcttgaatgctttggtatggagaagaatcgttctactaaatgctagtaatgaaggagataaactgcttcagcatatagtcaaacgtgtttttgatgaagaactacccaaaaataatgatttccccttgcccagtgtggatcttttatgtgacaaatcgttactgacgccagaatacataagcgaaacatatggcaggtttcctattgatcagaatgccatacgtgaagagatatatgaagaaatatctcaagtggaaacgttgaactcagacaactcactcgagataaagttgcactcgactattggttctgtagcgaaagaaaaaaactataccatcaactatgaaaccaacactgtagaatactaatatctataatacaattttacatatatataataaactttactggggaatgataa

SEQ ID NO: 1963 - DNA, 2082 bp, Saccharomyces cerevisiae
tgcaaacaatataaaatattatcaattatttttttttttcttcttttgaattagatcactaataaactcttataatgctcaaccatcccagccaaggctcagatgatgctcaggacgaaaagcaaggcgacttcccggtcatcgaagaggagaagacccaggctgtaacgctgaaggattcgtatgttagcgacgacgtcgccaactccacggaacgctacaacttgtccccttctccggaggacgaagacttcgaaggccccactgaagaagaaatgcagactttaaggcacgttggtggtaaaattcctatgaggtgttggttaattgctattgtagagctttccgagagattctcctactacgggctttccgcaccattccaaaactacatggaatatggacctaatgactccccaaagggtgttctgagcttgaacagtcagggtgccactgggttgtcgtattttttccagttttggtgttacgttacaccagttttcggtggttacgttgcggacaccttctggggtaaatataatacaatttgttgcggtaccgctatttacattgccggtattttcattctatttatcacttcgattccctccgttggtaacagagacagtgctattggtgggttcattgctgccattattctgatcggtattgccactggtatgattaaagctaacctttccgtgttgattgccgaccagcttcctaagcggaaaccctccatcaaagttttaaaatcgggcgaaagagtcattgtcgattcaaatattactttacaaaacgtttttatgttcttctatttcatgatcaatgtcggttctctatcattaatggccactactgaattggaatatcataaggggttctgggcggcctatctattgcccttctgcttcttttggatcgctgttgtcactttgatttttggtaaaaagcaatacattcaaagaccaatcggagataaagtcatcgctaaaagttttaaagtttgttggattttaactaagaataagttcgacttcaacgctgctaaaccttctgttcatccagaaaagaactatccatggaatgacaaatttgttgatgaaattaagagagctttggcggcttgtaaagtctttatattctacccaatttattggacccaatacggtaccatgatttccagtttcatcactcaggccagtatgatggaattacatggaattcccaacgatttcttacaagcattcgattccattgcgttgatcattttcatcccaatttttgaaaaattcgtatatcctttcattagaagatacactccactaaaaccaattacaaaaattttcttcggtttcatgtttggatcttttgccatgacatgggctgctgttctacaaagtttcgtttacaaggctggtccatggtataatgaacctctgggtcacaacaccccaaatcatgtccacgtttgctggcaaatacccgcatatgtcttgatttctttttcagagatctttgcctctatcactgggttggaatacgcttattccaaagccccagcttccatgaaatcgtttattatgtccattttcttattgactaacgcctttggttctgcaatcggttgtgcattgtccccagtgaccgttgatcctaaatttacatggttattcactggtttggctgttgcctgctttatttctggttgtttgttctggttgtgcttcaggaagtataatgatacagaggaagaaatgaacgctatggactacgaagaagaagacgaatttgatctcaatccaatttccgcacctaaagctaacgatattgaaatattagaaccaatggaaagtctaagatccaccaccaaatattagtgcgtttaattaacttactgtcttttttttttttttttttttaaccatattacgttgacgggagttttctgtgctgctgttatttgtttcacagaactctctcctcttccattgctatcgaacagataaaatggaatttctttatgtataattactattgtataatattcagtaaatctaaattttaagctcatatatctaa

SEQ ID NO: 1964 - DNA, 428 bp, Saccharomyces cerevisiae
tgaaacaagtctgccaacatagacagctaagaaaattgatgacaagcaaacgggaaaagtcactggatcacacattagaactaaagataccgtttgaaacggagcgacaagcgaccatagcaaccaaagtcctatctccggacccgattttgaagccacaagattttcaagtagactacagttccgagaaaaatgtcatgctagtccagttcagaagcattgatgatagggtgcttcgagtgggagttagcagtatcatagacagtatcaaaaccattgtggaagccatggacgttctatcataaataattagaacaccgtattagtgtacatatagtataagtatctagacggcattcatgcacatcataacttaaatatttaaaatagcattaagataaaaaaataaagagaggtatagttgctaa

SEQ ID NO: 1965 - DNA, 2357 bp, Saccharomyces cerevisiae
acgttccttctaggttttgcacgcactatctgaggcgttataggttcaatttggtaattaaagatagagttgtaagatggtggataaaaataggacgttgcatgaattatcttccaaaaatttcagcagaacgccgaatggactgatctttaccaatgatttaaagacagtatattccatttttctaatttgtttggatttgaaagagaaaaaacatagtagtgacactaagtctttcttattaactgcattcactaaacatttccacttcacttttacatatcaggaagctattaaagcaatgggacaattggaactaaaagtggatatgaacacaacttgtattaacgtttcatataatattaaacctagtttggcgcgccaccttcttacattatttatgtcttctaagctactacatacaccgcaggacagaactcgtggcgagccaaaagagaaagttcttttccaaccaacacctaagggagttgctgttttacaaaagtatgttagagatattgggttgaaaacaatgcctgatattcttttgtcatcgtttaactccatgaaacttttcacttttgagagaagctctgtcacggattcaatcatccatagtgattatttgatccatattcttttcattaaaatgatgggcgctaagccaaatgtttggtctccaacaaacgcagatgacccattaccttgcctatcttcgttgttggaatacactaataatgatgatacatttacttttgagaaatctaagccagaacaaggatggcaagctcagattggaaacatcgatataaatgacttagaaagggtatcgccattagctcatcgattctttacaaatccagattctgagtcgcacacgcaatactacgtttcgaatgcaggtattaggttgtttgaaaataagacgtttggcacttccaaaaaaatcgtgattaagtacacctttacaacaaaggctatatggcagtggataatggactgtactgatattatgcatgttaaagaagcggtctcgttggcagcgttatttttaaaaacggggttgattgtaccagttcttttacaaccatcacgcactgacaagaaaaagtttcaaattagcaggtcctctttttttaccttgtccaagcgtggttgggatttggtttcttggacaggttgtaagagcaataatattagagcaccaaatggtagcaccatagacctagatttcacattaaggggtcatatgactgttcgtgatgaaaaaaagacattggatgatagtgaaggtttttctcaagacatgcttatctcttcgagtaatttaaataaactggactatgtgctaactgatccaggtatgagatatttattcaggcgccatttagaaaaggaactttgtgtagaaaatttggatgtcttcattgagattaagaggtttttgaagaaaatgacaattctgaaaaaattgatagattctaagcattgtgataaaaaatctaataccagtacttcaaaaaacaatatcgtaaaaacgattgattcagctttaatgaaacaggccaatgagtgccttgaaatggcatatcacatttattcgtcctatatcatgataggatcaccatatcaattaaatatccatcataacttgcgtcagaatatttctgacatcatgttgcaccctcattctccattatcggaacactttcctactaatctatacgatccatcacctgcatccgcggaatcagcagcttcatcaattagctcaacggaggctgacacgttaggtgaaccacctgaagtgagtctaaaaccttcaaaaaatctttcaaatgaaaactgttcatttaagaagcaaggattcaaacatcagttaaaggaatataaacctgccccgttaactctggcagaaacgcattcgcctaatgcatcagtagaaaattcacatacaattgttcgttatggcatggacaacacccaaaatgataccaaatcggttgaatcatttccagcaactttgaaggtcctcaggaaattatatcccctcttcgagatcgttagcaatgaaatgtatagactgatgaataacgattcctttcaaaaatttacccagtcagacgtatacaaagatgctagcgctttaatagaaatccaagaaaagtgctaatttcattgagagtcttactcatcttcaggtacaattgcacaaacagtccttttttttttctttagttctcctaacctaatatgtcttgatacccataaggactgtaaatactattacgtataaattaagcggaggtgtgatttgttatatcaactataatatgattaaataaagccatttatta

SEQ ID NO: 1966 - DNA, 1216 bp, Saccharomyces cerevisiae
aaagagtataccattcggatcgtgttgctaaagtcttgcgaagatggaaggcgtgtatttcaatattgacaatgggtttattgaaggtgtagtgagaggctacagaaatgggttgttatctaataaccaatacatcaacttaacacaatgtgacacgttggaagatctaaaattacaattatcatcaactgattatggtaattttctttcctctgtttcctcagagtctttgaccacgtcattgattcaagaatatgcttctagcaagttgtaccacgaattcaactacataagagaccaatccagtggatccacgagaaagttcatggactatatcacttatggttacatgatcgacaatgtagcattgatgattacaggtactattcatgatcgtgataagggtgaaattttacaacgttgtcatccgctaggttggtttgatactttgcctacgttgagtgttgctactgatcttgaatccctatacgaaaccgtattggtggataccccactggcaccttacttcaaaaactgttttgacacggcagaggagctagacgatatgaacattgaaattattagaaataagctgtacaaggcttatttagaagacttttacaattttgtcactgaagaaattccggaacctgctaaagaatgtatgcaaacattactagggtttgaagctgacagaagaagtatcaatattgcactcaactctttgcaaagttcagatattgacccagatttgaaaagtgacttgttacctaacataggtaagttgtaccctcttgcaacgtttcacttggcgcaagcccaagatttcgaaggagttagagctgctttagctaacgtctatgagtataggggatttttggagactggtaacttagaagatcacttttaccaattggaaatggaactatgtagagatgctttcacgcaacaatttgccatcagcactgtttgggcctggatgaaatccaaggaacaagaagttaggaatattacctggattgcagaatgtatcgcacaaaaccaaagagaaagaatcaacaattatatttccgtttattgaaaaagttatcgttccttcttcttttatgtcactaagagaaattgttacctatatggtttgttttgtctttttttcatttttttttaagaatcagatccatatatgattatataaaattataattaagtagaagca

SEQ ID NO: 1967 - DNA, 974 bp, Saccharomyces cerevisiae
cgaataaccaatcgtttaatcatggctgtcggaaagaataagagactatccaagggtaagaaaggtcaaaagaagagagtcgttgacccatttaccagaaaggaatggttcgacattaaagctccatccacttttgaaaacagaaatgttggtaagactttagttaacaagtccactggtttgaagagtgcttcagatgctttgaaaggtagagttgtcgaagtttgcttggctgacttacagggttctgaagaccactctttcagaaaaatcaaattaagagttgacgaagtccaaggtaagaatttattgaccaacttccacggtatggacttcactactgataaattgagatccatggttagaaagtggcaaactttgatcgaagctaacgttactgttaagacttctgatgattacgttttgagaatctttgctatcgccttcaccagaaagcaagctaaccaagttaagagacactcttacgctcaatcttcccatatcagagctatcagaaaggttatttccgaaatcttgactaaggaagttcaaggatctaccttggcccaattgacctccaagttgattccagaagttatcaacaaggaaattgaaaacgccaccaaggacattttcccactacaaaacatccatgttagaaaggttaagttgttgaaacaaccaaagttcgatgtcggtgctttgatggctttgcacggtgaaggttctggtgaagaaaagggtaagaaggttaccggtttcaaggacgaagtcttggaaactgtgtaaaggaaccaataataaaatagaaaggaaaggaacaggaaaaaggagtgatgcatatcttattttttaaatctttctttttcgattttaatttttttagtctctttaataactctctattctatgatgtcattaacctcgtcaaaaagataattctataactatactactgtatacaatatttgtat

SEQ ID NO: 1968 - DNA, 410 bp, Saccharomyces cerevisiae
acacgcagataaatacacacacacacacaacatcacgcacactcaagaaaatggagacacctttggatttattgaaactcaatctcgatgagagggtgtacatcaagctgcgcggggccaggacgctggtgggcacactgcaagcgttcgactcacactgcaacatcgtgctgagtgatgcagtagagaccatataccaattaaacaacgaggagttgagtgagtccgaaagacgatgtgaaatggtgttcatcagaggagacacagtgactctaatcagcacgccctctgaagatgacgatggcgcagtggagatataagcaaagaggaggagaaaacaaagggaaacagtacgtatttttttattttacttttagtatattaaaaatgtgtaagatataaaacaaaaa

SEQ ID NO: 1969 - DNA, 498 bp, Saccharomyces cerevisiae
gagaagaaaacaaagaaaaagaaacagcaagagaacccagatcaagaaacgcacgctttacatcacacactaatacaggaacaaacaagacttaatggacgcacaactggaatgggcaagcagcctcgtcccaaagagacagcttcaacaacaacaacaacaacaggagcagcagcagcagcagcaacaggatttccacaaggaccagttgatgactgtgggtatgcgaatcagacagcgggtcgaccagggttatgcatcgaggacgccgagcacctcggacgcttcactacagccgggtgtcattagagattactcgagcgttattgttccgcaatttacaaggtcgcccttgcccactgctaactcgctaccacctatgctgataaaccagagaacaatgtcgaccgaggcgtcctcgctcgagaaatgggacgtcgcggaacctgccgcggagcacgaaacaatggttaatggatccaagagaagactttaaca

SEQ ID NO: 1970 - DNA, 713 bp, Saccharomyces cerevisiae
ggttgacttataaattttaaaagagtgttgatgagtatgagttcaactgtaattaaattcagggctggtgtttgtgaatacaacgaagattcacgtctatgtacgccaattccagttcagggtgaaatcgagatcaaaccaaatgaagaggaagaattgggattttgggatttcgagtggcgtccaacggaaaagccggtcgggagggaacttgatcctatttctttgattttaattcctggagagaccatgtgggttccaataaaatccagtaaaagtggcagaatatttgctttagttttttcatccaacgaaaggtacttcttttggctgcaagagaagaactcaggtaatttgcccttaaatgaattgagtgcgaaagataaagaaatttacaataagatgattggagtgctgaataatagtagtgaaagtgatgaggaagaaagcaatgacgaaaagcaaaaagctcaagatgtggatgttagtatgcaagattaaatcaaggttgtggcattttttgataaaaaactgaagagaaaaaatataccatatcaacgcatttggctgtgaacttctgtaaagagatacggaccataacaataggcatgatgatggcatctataacttctattggaaggtaagtttatttttcccataaatatgtatatatggtctatactctcaaatgagcctacatattgttgcatatt

SEQ ID NO: 1971 - DNA, 1532 bp, Saccharomyces cerevisiae
gttaaaagaataataatttgagcaagaaactggtgaaaaaattatggcgaactcattagacagactgagagaacacttaaagaacggcgataaactggttctaaaaaataatgagggacagtctactgatgatattacgaaagcaaccatggtagaaactctatccagtgatggtagtacccaagatagttttccattgaatgaagaaacggaaattgagattgatggttcattggtacagttacgaataattgttcattgttggatgaataaggactcaagtgccgcagactatctagcagactgtcagaataaacaattgactaatgtttcatttttacaaagaactgatttaataaattggttgtctggcaatacggaatcatcccaatatctgaaagcacccggtcagaaaggcgagacatccgataaagtagatatagaaaataaaactttggctggtgaattgtcgactgtaaaatcaaccacttcagcatctcttgaaaatgatagtgaagtttccgatccagttgtggtggaaacaatgaaacatgaacgtatattggtggaccacaactctgcattgcgtggtgctaagccgatcaactttggttatctaataaaagatgcagaactaaaattagtacagtcgatcaaaggatctttacgaggatctaaattgcctcccggtcataagggcgcgcacggtcgtatttccaaaacaaatggttcatcaggtggccctcgcaaagatccaattattttgattccttcggctgcgtcatcaattttaactgttgcaaatataaaacagttcctgctggagtcaaaatacgtgaatcctcgtaacttaccgtcagtgccaaacggattagttaacatagagaaaaacttcgaacgtatatcaagaccaattagatttattatagtcgataacactaggatgtttactaagccagaatattgggacagagttgtcgctatcttcactactggtcatacgtggcagtttaataactatcagtggaattcgccacaggaattatttcaacgctgcaaaggctactatttccactttgccggtgattctgtaccacaacacgtgcagcaatggaatgtagaaaaggtcgaacttgacaaaaataaaagatttaaggatgtggaagtcgtgcgttatttctggcatagtttagaaaaggaacttatttcaagaggataccgttgaatacgataaacggaagaatggtatttcggccattgaaagtgtttcttcagtcggcgtttctattccgattttgtactctatgttatgtgttattattggcatttcaagtaacgaagtgaagtttagccgcgcgtttatatgtaaactatttatttgggagaatgtagtattacgagcaggtaatcaaaccatgcatttattacttatatatgcgagggccaataagagtttttatagtagtaaatcccactcagttgcttgtctatcagtaaatcgccttcatcgacacaattttgtaatacctcca

SEQ ID NO: 1972 - DNA, 997 bp, Saccharomyces cerevisiae
tagatcaagatcatacaacgctgcgcagtagtgaaacttgattaaagcaatagagaactattaagaaaaaaacaaacacatcatcgaaggacgctataagcatgaggaattttttcacgttattttttgcagctatattttcgctaggagcacttatattagccattgttgcatgcgcaggatcaacgaaaaattacagtcccataaataaaatttactgtgcagaattggatctgtcgcagatgaaggtatcgacggtgctcccttctttgagttctgctacgctatcttcgttgggcctgccctcatatataaatatagggctttggtcgtactgtacagtggactcctcgcataacatccaatcatgttcttcgcctcacggtatccagaattttaacctatcgtcattagtgtatgacaatatcaacaacaatgaggctctggagcttatggattccgtggccagtgttgttttgcccgaaaaactaaaaagtaaaatgacatactacaacaatttggtcaagtgtatgttcattaccattcttattggtattgtcttgacctttgtgaatctagtgttcaacgtattgcgctggatcatccacataaggccgctaacgtggtttggtgcctttttttcatttttcgcctttgccgccctattagtcagtataggttcgtgtttgggcacttactcatacatcaaatacatcctaaagcataactatagtgattacggtatttcaatgagcattggtaggaactaccagggtttgatgtggggggctgtcgttggagcattactgaatttcattctatggtgtagcgtgagatcgaggcccaccgtcatctatgcgaacgctccaattgaggaaaaaccattgatttgaatttgaaaaaggcaaggttattaattaatttttgtgttccgtttcatattaaatatgattaaaatatattgtctatatacaattcagaaaattataatgaagaa

SEQ ID NO: 1973 - DNA, 2878 bp, Saccharomyces cerevisiae
ggctatagcgagttaggaatagtacattatgtctatcgacttgaaaaaaagaaaagtcgaagaagacgtaagaagtagagggaaaaattctaagatattttcccctttccggattattggtaatgttagcaatggtgttccttttgctactggtacattgggatctaccttttacattgtaacgtgtgttggtaaaacatttcagatatatgatgcgaataccttacatttactttttgtttccgagaaagaaacaccatcctcaattgtagcattatcagcacactttcactacgtctacgcagcatatgaaaacaaggttggtatttacaagaggggtattgaggaacatttgcttgagctagaaactgatgcaaatgtcgaacatttgtgcatattcggagattatctttgcgcttccaccgacgacaattccatctttatatacaagaagtccgatccgcaagataaatatccatcagaattctacactaaacttaccgttactgaaattcaaggtggcgaaattgtgtctttacaacatttggcaacttatttgaataaattaactgtcgttaccaaatctaacgttttactttttaacgtcagaaccgggaagcttgtattcacatcaaacgaatttccagaccaaatcacaactgctgaacccgctccagtcctggatattattgctctaggtaccgtgaccggtgaggttattatgtttaatatgagaaaaggtaaaaggatccgcacaattaagattccgcaatcaagaatctcctcattgagtttcagaaccgacggttcttctcatttgagtgtgggaacgagcagtggtgatctaatattttatgatttagatcgccgttcaagaatacacgttttgaagaacattcatagagaatcgtacggtggtgtcactcaggctacttttttaaatggtcaacccattattgttacatcaggtggtgacaattccctgaaggagtacgttttcgatccgtcattatctcaaggaagcggtgatgtagttgttcaaccgccaagatatctacgttccagagggggtcattctcaaccaccttcatacattgcgtttgctgattcgcaatcacacttcatgctatcagcatccaaagatagatcattatggagcttttctctgcgtaaagatgcacagtcgcaagaaatgtcacaaaggttacacaagaaacaagatggcggcagggtaggtggtagtacaattaagtctaaatttcctgaaatagtggctcttgcaattgaaaatgccagaataggtgaatgggaaaacattatcactgcacataaagatgaaaagtttgcaagaacctgggatatgcgaaataaaagagttggcaggtggacttttgatactactgatgatggatttgttaaatctgtggccatgtcgcaatgtggtaattttggattcatcggttcttctaacggctctatcaccatctataatatgcaaagtggtatactccgtaaaaaatacaaattgcacaaaagagcagtcaccggtatatccttagatggtatgaatcgtaaaatggtttcttgtggactagacggtattgttggtttttatgactttaacaagtcaaccttgttgggaaaattgaaattggatgcacctattaccgcaatggtttatcatcgttcttccgatctatttgcattggctttagacgacttatcaattgttgttattgacgcagttactcaaagagttgttcgtcaattatggggtcatagtaatagaataactgcatttgatttctcacctgagggccgttggattgtttccgcttctctagattccaccattagaacgtgggatcttccaaccggaggatgtatcgatggtatcatagtagataatgtcgctacgaatgtaaagttttctccgaatggtgacttgcttgccactacccatgttactggtaatggtatatgcatctggacgaacagagcacaatttaagacagtatcgacaagaaccatcgatgagtctgaatttgcaagaatggcgttacctagcacatctgttcgagggaacgactcgatgttatcaggggctttagaaagcaatggaggagaagacctaaatgatattgatttcaacacttatacatcattggaacagattgataaggagctgttgactttatcaataggacctagaagtaaaatgaacacattgcttcatttagatgttatcagaaaacgttctaagccaaaggaagctccaaagaaatcagaaaagcttccatttttcttgcaactatctggggaaaaggttggggatgaagcctctgtcagagaaggcatagcacatgaaacaccagaagaaatccatcgcagagatcaagaagcacaaaagaagttagatgcagaagagcaaatgaataaattcaaagttacaggaagattagggtttgaatcacatttcacaaagcaattacgagagggctcacaatccaaggactattcatcattgctggccactctaataaatttctcacctgctgcagtggatttggagataagatcattgaattcctttgagccatttgatgaaattgtgtggtttatcgacgcgttaacacaggggttgaagagcaataaaaatttcgaactttatgaaacgtttatgagcttactgtttaaggcacacggtgatgttattcatgctaacaacaagaatcaagatattgcctctgctcttcaaaattgggaggatgtacataagaaggaagacagattagatgatcttgtgaagttttgcatgggagtggcagcttttgtgaccaccgcgtgagcattatatagaacaagtatattagtaaca

SEQ ID NO: 1974 - DNA, 534 bp, Saccharomyces cerevisiae
cgagcagataatccaaagtacttgaaaatggccggtttaaaagacgttgtcactcgtgaatacaccatcaacttgcacaaaagactacatggtgtcagtttcaaaaagagagctccaagagctgtgaaggaaatcaagaaattcgccaaattacacatgggtactgaagatgtccgtctagccccagaattgaaccaagctatctggaaaagaggtgttaagggtgttgaatacagattgagattgagaatctccagaaagagaaacgaagaagaagatgccaagaacccattgttttcctacgtcgaaccagttttggttgcctctgctaagggtctacaaaccgttgtcgttgaagaagatgcttaaattgtaaaaaaaaaaaaataatgtccatcttataagcattttatttcttttaggttatattattacacaaacagagctgctttcggggtacgagtatacgctcttgaatgataggaaaatatatacaatttcagtaccacagtttattagatttttgtaattcaa

SEQ ID NO: 1975 - DNA, 2073 bp, Saccharomyces cerevisiae
atgaactcagaataggaaaaaaaggcaacttctaaacattattgatggagcaaaacgctgaaaaacgctctattgttggcgacgacaactcaaccgtgaagagacaagacacttccccgtccaaaggtattgcacatatcaaaccagaatatattgtaccattgaagcagaatgaaaaccagaaggtcgccatctatgatgaagagatgtcttccgacagaatgacaaacgagtttgcaggtgggactaataagaaaaataagaacggaagaggtaagaagcgtgggcaaaacaagaatagagataacaggcaggtcaaggaacagaatgtcttgtgcccacgcttgatccatggcgatatatctaaatgctcctttggtgataactgtaggtttgttcacgatatcaatctgtacctttcaacaaaaaagcctgaagttgaaagtaatatatttccttcctgtccggtcttcaactcgttgggattttgccccatgggattcaaatgcagatttttatcgtctcatctgaataaagaagataatatcctaatatcgaagaaggagattgatccagatgcgcaaacaatatggtccgttaaaggtgaggtaaaccatatctcaccggaaagaaaactcgatcttataaaaagaagatttcctttcacaaaaagtaatgaaatattggaaatcatcgactctttccaacaagaatgtagagattccatgaagccagaagaagaagttgagtcaacgccacagctgaagaaacaagacccagatgtggaacaaccagttgccccccaagtcgaacagaggaacaaagaattgtcagaacatagaatgaaacagcgtgaagtatacttgaagtacaaggacactcgttattttgctcaagaaaaaaagccactggatttgtaccacaaaaaaatcgtgtcgccattgacaaccgtaggcaatttaccataccgtcgtctaatgagaaagttaggtgcagatgtgacatattcggaaatggccttggcagttcccttaattcaaggaactaattctgagtgggcgttacctaaagctcacacatcagagttccccgggttcggggttcaagtggcctgttctaaagcctggcaggcggcaaaggctgcagaagcactcgcaaactccgtcagtgaaataagtgaaatcaacttaaactctggctgccccatcgatttgctatacagacaaggttctggtagcgccctgctggataaccctgcaagaatgattcgttgtttaaacgcgatgaactacgtatcgaaagatattcctatcacggtgaagatcagaacaggtacaaaggaaggtcatcctatcgcggaagggttagtcaaaagactggttaacgaaactgatgtggctgcgattaccttacacggtaggtctaggcaacaaaggtacactaagtctgcggattgggactacgtgagtcaagtggctgacaccttgagatccgccgaagcggatttcatcgaaaccgaacaaggcaaagaaggcagggattccaagaacagaattcaatttgtcggaaatggtgatgtcaacaattttgaagactggtaccgctatttgaacggaaatgaaaatattgatagtgttatggttgctcgaggggccctgatcaaaccatggatttttgaagaggttgagtcgcagcagtatctagacaagacaagtacggaaagattagacattttaagggattatgcgcagttctctatggaacactggggcaccgacgaatacggcatttctcaatgtcgtagattcttctgcgagttcatgtccttttttcataggtatgtccccatgggtatttgtgaaagataccctgtgaagttgaatgagagaccgccaaactggtgtggaagagacgaacttgaaactctaatgggtagtacggatgttaatgattggatcaagctaagtgatctatttttcggtaaaaccgacgagaactttgtatttgtccccaaacataagagcagctcttatgcaaacagagattcctaaatagaaaatcaagtgtacatgt

SEQ ID NO: 1976 - DNA, 2271 bp, Saccharomyces cerevisiae
cgaatctcaacggctctgataaacgtacgtaatgaccgatatcacacccgtacagaacgatgtggatgtcaatggtaataatgtcaatgacgacgtttccagtaatctaaagaggcctatagatcaaggggatccttcgaatggactcgcagaagaagaaaaccccgccaataaccagttgcatctcaaaaaggctagactggatggagatgctctaacatcatcgcctgctggacttgcagagaacggtattgaaggcgccaccctggcggctaacggggaaaatgggtataacgccaccggaagtggcgcagaagacgaacagcaggggttgaagaaggaagaaggaggacaaggtaccaaacaagaggatttagatgaaaactcaaaacaagaacttccgatggaggttccaaaggaacctgcccctgctcctcctccagagcccgatatgaataatctccctcagaatccaataccaaagcaccagcagaaacatgcattgcttgcgattaaagctgtcaaacgcttgaaggatgcgagaccctttctacaacctgttgacccagtgaaattggatattcccttttactttaactacataaagaggccaatggacttgtctactatagagaggaagttgaacgtaggcgcttatgaagttccggagcaaatcacggaggatttcaatctcatggttaacaacagtattaaattcaacggtccaaatgcgggcatatcacaaatggcaagaaacatacaagcttctttcgagaaacatatgctaaatatgcctgctaaggatgctccacctgtaatagccaagggacggcggtctagtgcccaagaggatgccccaattgtaattagacgagcccaaactcataatgggaggccgaaaaggactatacatccgccgaaatcaaaggatatttatccttatgaatcgaagaaaccgaaatccaaaagactacaacaagcaatgaaattttgtcagagtgtgctaaaggaattgatggccaagaagcacgcctcttataactacccatttttggaaccagtagacccagtttctatgaatttgccgacttatttcgattatgttaaagagccaatggatttaggcacaatcgccaagaaattaaatgactggcagtatcaaacaatggaggattttgagagagacgtgaggttggtctttaaaaactgctacacgttcaatccggatggcacgatcgttaatatgatgggtcatcgtctagaggaagttttcaattccaaatgggcggataggcctaatttggatgactacgattccgatgaagattcgaggacccaaggcgactacgacgattatgaatctgagtattcagagtctgacatcgatgaaactataattacaaatccagccatccagtatttggaagaacaacttgctcggatgaaagtggagttgcaacaattaaaaaagcaagaactggaaaaaataagaaaagagaggcgcttagcacgtggatcaaagaaacgcggcaaaagatcgaagggaaggagtgggtctaagaacgcttcttcgaaaggaaggcgagataaaaagaataaattgaaaacagtagtgacatatgatatgaaacgtatcattacagagaggatcaatgatttaccaacttccaaattagaaagagcaatcgacataataaaaaaatccatgcccaatatttctgaagacgatgaagtagaacttgacctcgacactttagataatcacaccatcttaacattgtacaacactttctttagacaatatgaaagctcatccggtgcttctaacggtttggacggtacttcaggtgttacgcgagatgcttcgtccttgtcgcctacaagtgcgggaagcagaaagagaagatctaaggcattaagccaagaggagcagagtaggcagatagaaaagataaaaaataaactagctatcttagacagtgcttcacctctgagccaaaacggctccccaggccaaattcaaagcgctgcacacaacgggttttcctcatcttcagatgacgatgttagcagcgaaagtgaagaagagtgactgaattttgaatttgattatcttcaacgactgagaagaatgagcaccattttgatattttgattaattaagtggtaatcttaagctcatatacaaaaagggaaggaaaaaaaataaagatagaaaagatcttaggaacggatagaggtttgaaaaaggaataacaggtaatttttcat

SEQ ID NO: 1977 - DNA, 2343 bp, Saccharomyces cerevisiae
atggctcctaaatctagttcttccggttccaaaaagaaatcatcggcaagttctaatagtgctgatgcaaaagcatccaaatttaaattgcctgctgaatttattaccagaccacatccttctaaagatcatggcaaggaaacatgcacagcatatattcatcctaacgtattatcctcgcttgagataaatccgggatcattttgtactgtcggtaagataggcgaaaatggtattttagtaatagctagagcgggtgatgaagaagtacatcctgttaatgttatcaccctttccacaactatacgatctgttgggaaccttatccttggtgatcgtctagaattaaagaaagcccaggtgcaaccaccttatgccactaaggttaccgtggggtccttacaaggatataatattttggaatgtatggaggaaaaagtaattcaaaagctactggatgatagtggcgttataatgcctggaatgatttttcaaaacttaaaaacaaaagcaggtgatgaaagcattgatgtcgtaattacagatgcgagcgatgattcgcttcccgacgtcagccaactagatcttaacatggacgatatgtacggtggattagataacctgttttatctatctccaccttttatattcagaaaaggctccacacatataactttttcgaaagaaacccaggcaaatcgtaaatacaatcttccggagcccttatcctatgcagcagtgggcggcttagacaaggagattgaatcactgaaaagtgctattgaaatacctcttcatcaaccgacgctatttagtagctttggtgtttctccccctcgaggtatacttcttcacggacccccaggtactggtaaaactatgcttttgagagttgtagcaaatacgtccaacgcacacgtcctaaccattaatggcccctcaatcgtctccaaatatcttggtgaaacggaagcggcattaagagatatttttaatgaagcaaggaagtaccagccttccattattttcattgacgaaattgattcaatagcaccaaatagagcaaacgatgactccggtgaagttgagagcagagtcgtggctacattgcttaccctaatggatggcatgggcgctgcaggtaaagtggtggtaattgctgctacaaacaggcctaattctgtcgaccctgctctcaggagacctggcaggtttgaccaagaagtagaaattggtataccagacgttgatgccagatttgacattttaactaagcaattctcaagaatgtcctcggatcgtcacgtattagattctgaagcgatcaagtacattgcttctaaaacgcatggctatgttggtgctgatttaactgctctctgcagagaatcagttatgaagacgatacaacgaggactaggaacagacgccaatattgacaagttttccctaaaagttacattgaaagatgtggagagcgccatggttgatatcagacccagcgcaatgagagaaatcttcttagaaatgccaaaagtttattggtctgacattggcggccaagaagagcttaaaacaaagatgaaagaaatgatacagttgcctttggaggcttcggagacttttgccaggctgggaatttctgcaccaaaaggtgtattactttacgggccgccaggttgctccaagacattaaccgcaaaagctctcgctacagaatcgggtatcaacttcttagctgtgaaagggcctgaaatttttaacaagtatgtaggggaatccgaaagagctataagagaaattttccgcaaagcacgctctgcagctccaagtattatcttctttgatgaaatcgatgcattatctcctgatagagacgggagttccacctctgcagctaatcacgtgctcacatctttactcaatgagattgatggtgttgaagagttaaagggtgtagttattgtagcggcgacgaatagacctgatgaaatagatgctgctcttctaaggcctggtaggttagatagacacatttacgttggccctccagacgtaaacgcccgcttggaaatcttaaagaagtgcacaaagaaatttaatacagaagagtctggagtcgatcttcatgaattggcagaccgtacagaaggttattccggagctgaagttgtgctgctttgtcaagaagcgggcttggctgccataatggaagatttagatgtcgcaaaagtggaattacgtcattttgagaaagcttttaaaggaattgctaggggcattactccagaaatgctctcttattatgaagagtttgctctaagaagcggttcatcttcgtaa

SEQ ID NO: 1978 - DNA, 563 bp, Saccharomyces cerevisiae
agatagagccacagagcaaactaaacagaaaagttatccatttccattacgcaatgttgtgccaacagatgattagaacgacagctaagagaagtagcaatatcatgaccagacctattatcatgaagaggtcagtacacttcaaagacggtgtgtatgaaaatatcccattcaaagtcaaaggaagaaagacaccttacgccttatctcatttcgggttcttcgctattggatttgctgttccatttgttgcctgctatgttcaattgaaaaagtcaggtgctttttaaaacacccccataagtttgaaggatagatgtgtgtacatagcgtgcttggttgagacgttttagagtgtgttctttgctattcctaggtgcgcatatcatcgttttatttatttgtacaattttcttttcatatattcataatcctctccttgtgccttcgtattgagacggcgggaaagaaggatctaagaagaacataattcgacaaatttcttctaaaataataccatatatagtaacacataagaaaatagaataacttttataatacag

SEQ ID NO: 1979 - DNA, 3274 bp, Saccharomyces cerevisiae
tcctgaatgaatcagagaaagtgaaatcaaatagtaagtcagaaccaaccattcggaagacctcattcttgctcattttgatattgctctgtatgggcgtatctcttttagcttcttcttctgcatttgtaactaaaccactcctcactcaattggttcacctctcacctatcagtctcaatttcaccgtaagacgcttcaagccattcacgtgcttatcacgctattacacaacaaatccttataatatgacatccaattttaagacattcaatctggactttttaaagccggatttagacgaaagatcgtatcggtttattgagctacctaataagctgaaggctctgttgatccaggacccaaaagcagataaagcagcagcgtcgctagacgtcaatattggcgcctttgaagatccaaagaacctacctggattggcgcatttctgcgagcatcttttattcatgggctctgagaaatttccagacgaaaacgaatactcgagctatttaagcaagcacggtggttcatccaatgcctacacagcatcgcaaaacacaaattatttttttgaggttaatcaccaacatttatttggtgcgctagacaggttttcagggtttttctcttgtcctcttttcaacaaggactctactgataaagagatcaacgccgttaacagcgaaaacaaaaagaacttacagaatgatatttggagaatttaccaattagacaagtctttgaccaatacaaaacatccatatcacaaattttctacaggaaacatcgaaactttgggcacattgccaaaggaaaatggactaaatgttagagatgaactgttaaaattccataagaatttttactccgctaacctaatgaagctatgtattcttggtagagaagaccttgatactctctctgattggacttatgatctcttcaaggatgtagccaataacggtcgtgaagtacccctttatgcggaacctattatgcagcctgagcatttgcaaaaaataattcaagtccgtcctgtgaaagatttgaaaaaactagaaatctctttcactgtccctgatatggaggaacattgggagtccaagccaccgaggatattaagtcatttaatcggccatgaagggtccggttcattactagcacatttgaaaaaattgggctgggccaatgagctatctgctggtgggcatactgtgtccaaaggaaatgctttttttgctgtcgatatagatttaacagacaacgggttgacacactatcgcgatgttattgtcttgatcttccagtatattgaaatgttgaaaaactcactacctcaaaaatggatattcaatgaactgcaagatatctctaatgctaccttcaagtttaagcaagctggtagcccatcttccacagtttcatcattggcaaaatgcttggaaaaggattacattcctgttagcagaattttagccatgggtttgttaacgaaatatgaacctgatttgcttacccaatatacggacgctctggtcccggaaaattctcgtgttactctgatctcaaggagtttagaaacagattctgctgaaaaatggtatggtactgcgtataaagtggtagattatccggcagatttaataaaaaacatgaaatcgccaggtttgaaccctgctctgactttgccacgtccaaatgaattcgtttcaacaaatttcaaggttgataaaattgacggtataaaaccattagatgaacctgttttgttattatccgatgacgtcagcaaattatggtacaagaaggacgaccgattctggcaaccacgaggctacatttacttgtcttttaaacttccacatacgcatgcaagcatcattaatagtatgctttctacgctatacactcagctggccaacgatgccttgaaagatgtacaatatgatgctgcttgtgccgatcttcgtatatcattcaataaaactaatcaaggcctcgccattaccgcgtctgggttcaacgaaaaattgatcattctattaacaaggtttttacaaggcgttaattcattcgaacctaagaaggatcgttttgagattttgaaagataagaccatacgtcacttgaaaaaccttttatatgaagttccttattcacaaatgtcgaattactacaatgctataataaatgaacgttcttggtcaactgcagaaaaattacaagtctttgaaaaattgacctttgaacaattgatcaacttcatacccaccatttacgaaggcgtttattttgaaactttaatccacggaaacataaaacatgaagaagcattggaggtggattctctgatcaagtctttgattccaaacaacattcataatctgcaggtttctaacaaccggttgagatcctacttacttcctaaaggcaaaactttcagatatgaaactgctttgaaagactcccagaatgttaactcatgtattcaacatgtcacccagctagatgtctattcagaagacctatctgccctcagcggattatttgcgcaattgattcacgagccatgttttgataccttaagaacaaaagagcaattgggctacgttgtttttagttcgagtttgaacaatcacggtacagcgaacattaggatcttgattcagtcagaacataccacgccatatctagaatggagaataaacaatttttatgaaacttttggccaggttttgagggatatgccagaagaggactttgaaaaacacaaagaggcgttatgcaacagtctattgcaaaaattcaagaatatggccgaggaaagcgccagatacacagcagcaatttacttaggtgattacaatttcacacatcgtcaaaaaaaggctaagctcgttgctaacattacaaagcagcaaatgatagatttttatgagaattatataatgagcgagaacgcatcgaagttgattctacatttgaaatctcaagtggaaaacaaagagctcaatgaaaatgaattggacaccgctaagtatccaactggccagttgatcgaagatgtcggggcattcaagtcgacgctgtttgtagctcccgttcgtcaaccaatgaaagacttcgagatttccgcgcctcctaagctgaataatagttctgaatcagagtgaaatagaaagtgaaggggttgtgttgcacgacaacgtacgtacatgtattttcatagctgatttttttaccatcctctaatcttagcatacatacctcg

(The sequence listing continues in the following parts.)
